United States Patent Application Publication US 2020/0040061 A1 - sequence listing, part 4

SEQ ID NO: 41783 - DNA, 20 bp, Artificial Sequence
  Description of Artificial Sequence: Synthetic oligonucleotide
  Target: SCNA; (-) strand; PAM type: YTN; PAM sequence: TTC
taaaaattttgtttcctgct

SEQ ID NO: 41784 - DNA, 20 bp, Artificial Sequence
  Description of Artificial Sequence: Synthetic oligonucleotide
  Target: SCNA; (-) strand; PAM type: YTN; PAM sequence: TTA
acaattctaaaaattttgtt

SEQ ID NO: 41785 - DNA, 20 bp, Artificial Sequence
  Description of Artificial Sequence: Synthetic oligonucleotide
  Target: SCNA; (-) strand; PAM type: YTN; PAM sequence: TTA
gttaacaattctaaaaattt

SEQ ID NO: 41786 - DNA, 20 bp, Artificial Sequence
  Description of Artificial Sequence: Synthetic oligonucleotide
  Target: SCNA; (-) strand; PAM type: YTN; PAM sequence: TTT
agttaacaattctaaaaatt

SEQ ID NO: 41787 - DNA, 20 bp, Artificial Sequence
  Description of Artificial Sequence: Synthetic oligonucleotide
  Target: SCNA; (-) strand; PAM type: YTN; PAM sequence: TTG
aacatttagttaacaattct

SEQ ID NO: 41788 - DNA, 20 bp, Artificial Sequence
  Description of Artificial Sequence: Synthetic oligonucleotide
  Target: SCNA; (-) strand; PAM type: YTN; PAM sequence: TTC
attgaacatttagttaacaa

SEQ ID NO: 41789 - DNA, 20 bp, Artificial Sequence
  Description of Artificial Sequence: Synthetic oligonucleotide
  Target: SCNA; (-) strand; PAM type: YTN; PAM sequence: TTA
ttcattgaacatttagttaa

SEQ ID NO: 41790 - DNA, 20 bp, Artificial Sequence
  Description of Artificial Sequence: Synthetic oligonucleotide
  Target: SCNA; (-) strand; PAM type: YTN; PAM sequence: TTC
attattcattgaacatttag

SEQ ID NO: 41791 - DNA, 20 bp, Artificial Sequence
  Description of Artificial Sequence: Synthetic oligonucleotide
  Target: SCNA; (-) strand; PAM type: YTN; PAM sequence: CTT
cattattcattgaacattta

SEQ ID NO: 41792 - DNA, 20 bp, Artificial Sequence
  Description of Artificial Sequence: Synthetic oligonucleotide
  Target: SCNA; (-) strand; PAM type: YTN; PAM sequence: CTC
ttcattattcattgaacatt

SEQ ID NO: 41793 - DNA, 20 bp, Artificial Sequence
  Description of Artificial Sequence: Synthetic oligonucleotide
  Target: SCNA; (-) strand; PAM type: YTN; PAM sequence: TTA
actcttcattattcattgaa

SEQ ID NO: 41794 - DNA, 20 bp, Artificial Sequence
  Description of Artificial Sequence: Synthetic oligonucleotide
  Target: SCNA; (-) strand; PAM type: YTN; PAM sequence: TTT
aactcttcattattcattga

SEQ ID NO: 41795 - DNA, 20 bp, Artificial Sequence
  Description of Artificial Sequence: Synthetic oligonucleotide
  Target: SCNA; (-) strand; PAM type: YTN; PAM sequence: TTT
taactcttcattattcattg

SEQ ID NO: 41796 - DNA, 20 bp, Artificial Sequence
  Description of Artificial Sequence: Synthetic oligonucleotide
  Target: SCNA; (-) strand; PAM type: YTN; PAM sequence: TTT
ttaactcttcattattcatt

SEQ ID NO: 41797 - DNA, 20 bp, Artificial Sequence
  Description of Artificial Sequence: Synthetic oligonucleotide
  Target: SCNA; (-) strand; PAM type: YTN; PAM sequence: TTT
tttaactcttcattattcat

SEQ ID NO: 41798 - DNA, 20 bp, Artificial Sequence
  Description of Artificial Sequence: Synthetic oligonucleotide
  Target: SCNA; (-) strand; PAM type: YTN; PAM sequence: CTG
cacccagcaataatttttta

SEQ ID NO: 41799 - DNA, 20 bp, Artificial Sequence
  Description of Artificial Sequence: Synthetic oligonucleotide
  Target: SCNA; (-) strand; PAM type: YTN; PAM sequence: CTG
aaatcacaggagtgaaccac

SEQ ID NO: 41800 - DNA, 20 bp, Artificial Sequence
  Description of Artificial Sequence: Synthetic oligonucleotide
  Target: SCNA; (-) strand; PAM type: YTN; PAM sequence: CTC
ccaaagtgctgaaatcacag

SEQ ID NO: 41801 - DNA, 20 bp, Artificial Sequence
  Description of Artificial Sequence: Synthetic oligonucleotide
  Target: SCNA; (-) strand; PAM type: YTN; PAM sequence: CTC
agcctcccaaagtgctgaaa

SEQ ID NO: 41802 - DNA, 20 bp, Artificial Sequence
  Description of Artificial Sequence: Synthetic oligonucleotide
  Target: SCNA; (-) strand; PAM type: YTN; PAM sequence: CTG
cctcagcctcccaaagtgct

SEQ ID NO: 41803 - DNA, 20 bp, Artificial Sequence
  Description of Artificial Sequence: Synthetic oligonucleotide
  Target: SCNA; (-) strand; PAM type: YTN; PAM sequence: CTC
aaatgatccacctgcctcag

SEQ ID NO: 41804 - DNA, 20 bp, Artificial Sequence
  Description of Artificial Sequence: Synthetic oligonucleotide
  Target: SCNA; (-) strand; PAM type: YTN; PAM sequence: CTG
gactcaaatgatccacctgc

SEQ ID NO: 41805 - DNA, 20 bp, Artificial Sequence
  Description of Artificial Sequence: Synthetic oligonucleotide
  Target: SCNA; (-) strand; PAM type: YTN; PAM sequence: CTC
ctggactcaaatgatccacc

SEQ ID NO: 41806 - DNA, 20 bp, Artificial Sequence
  Description of Artificial Sequence: Synthetic oligonucleotide
  Target: SCNA; (-) strand; PAM type: YTN; PAM sequence: TTG
aactcctggactcaaatgat

SEQ ID NO: 41807 - DNA, 20 bp, Artificial Sequence
  Description of Artificial Sequence: Synthetic oligonucleotide
  Target: SCNA; (-) strand; PAM type: YTN; PAM sequence: CTT
gaactcctggactcaaatga

SEQ ID NO: 41808 - DNA, 20 bp, Artificial Sequence
  Description of Artificial Sequence: Synthetic oligonucleotide
  Target: SCNA; (-) strand; PAM type: YTN; PAM sequence: CTG
gtcttgaactcctggactca

SEQ ID NO: 41809 - DNA, 20 bp, Artificial Sequence
  Description of Artificial Sequence: Synthetic oligonucleotide
  Target: SCNA; (-) strand; PAM type: YTN; PAM sequence: TTG
taacagcccaggctggtctt

SEQ ID NO: 41810 - DNA, 20 bp, Artificial Sequence
  Description of Artificial Sequence: Synthetic oligonucleotide
  Target: SCNA; (-) strand; PAM type: YTN; PAM sequence: TTC
attgtaacagcccaggctgg

SEQ ID NO: 41811 - DNA, 20 bp, Artificial Sequence
  Description of Artificial Sequence: Synthetic oligonucleotide
  Target: SCNA; (-) strand; PAM type: YTN; PAM sequence: TTT
cattgtaacagcccaggctg

SEQ ID NO: 41812 - DNA, 20 bp, Artificial Sequence
  Description of Artificial Sequence: Synthetic oligonucleotide
  Target: SCNA; (-) strand; PAM type: YTN; PAM sequence: TTA
gtagagatggggtttcattg

SEQ ID NO: 41813 - DNA, 20 bp, Artificial Sequence
  Description of Artificial Sequence: Synthetic oligonucleotide
  Target: SCNA; (-) strand; PAM type: YTN; PAM sequence: TTT
agtagagatggggtttcatt

SEQ ID NO: 41814 - DNA, 20 bp, Artificial Sequence
  Description of Artificial Sequence: Synthetic oligonucleotide
  Target: SCNA; (-) strand; PAM type: YTN; PAM sequence: TTT
tagtagagatggggtttcat

SEQ ID NO: 41815 - DNA, 20 bp, Artificial Sequence
  Description of Artificial Sequence: Synthetic oligonucleotide
  Target: SCNA; (-) strand; PAM type: YTN; PAM sequence: TTT
ttagtagagatggggtttca

SEQ ID NO: 41816 - DNA, 20 bp, Artificial Sequence
  Description of Artificial Sequence: Synthetic oligonucleotide
  Target: SCNA; (-) strand; PAM type: YTN; PAM sequence: TTG
tatttttagtagagatgggg

SEQ ID NO: 41817 - DNA, 20 bp, Artificial Sequence
  Description of Artificial Sequence: Synthetic oligonucleotide
  Target: SCNA; (-) strand; PAM type: YTN; PAM sequence: TTT
gtatttttagtagagatggg

SEQ ID NO: 41818 - DNA, 20 bp, Artificial Sequence
  Description of Artificial Sequence: Synthetic oligonucleotide
  Target: SCNA; (-) strand; PAM type: YTN; PAM sequence: TTA
tttgtatttttagtagagat

SEQ ID NO: 41819 - DNA, 20 bp, Artificial Sequence
  Description of Artificial Sequence: Synthetic oligonucleotide
  Target: SCNA; (-) strand; PAM type: YTN; PAM sequence: TTT
atttgtatttttagtagaga

SEQ ID NO: 41820 - DNA, 20 bp, Artificial Sequence
  Description of Artificial Sequence: Synthetic oligonucleotide
  Target: SCNA; (-) strand; PAM type: YTN; PAM sequence: CTA
tttatttgtatttttagtag

SEQ ID NO: 41821 - DNA, 20 bp, Artificial Sequence
  Description of Artificial Sequence: Synthetic oligonucleotide
  Target: SCNA; (-) strand; PAM type: YTN; PAM sequence: CTG
taggcatgtgccaccatgcc

SEQ ID NO: 41822 - DNA, 20 bp, Artificial Sequence
  Description of Artificial Sequence: Synthetic oligonucleotide
  Target: SCNA; (-) strand; PAM type: YTN; PAM sequence: CTG
ggactgtaggcatgtgccac

SEQ ID NO: 41823 - DNA, 20 bp, Artificial Sequence
  Description of Artificial Sequence: Synthetic oligonucleotide
  Target: SCNA; (-) strand; PAM type: YTN; PAM sequence: CTC
ccaagtggctgggactgtag

SEQ ID NO: 41824 - DNA, 20 bp, Artificial Sequence
  Description of Artificial Sequence: Synthetic oligonucleotide
  Target: SCNA; (-) strand; PAM type: YTN; PAM sequence: CTC
agcctcccaagtggctggga

SEQ ID NO: 41825 - DNA, 20 bp, Artificial Sequence
  Description of Artificial Sequence: Synthetic oligonucleotide
  Target: SCNA; (-) strand; PAM type: YTN; PAM sequence: CTG
cctcagcctcccaagtggct

SEQ ID NO: 41826 - DNA, 20 bp, Artificial Sequence
  Description of Artificial Sequence: Synthetic oligonucleotide
  Target: SCNA; (-) strand; PAM type: YTN; PAM sequence: CTC
ctgcctcagcctcccaagtg

SEQ ID NO: 41827 - DNA, 20 bp, Artificial Sequence
  Description of Artificial Sequence: Synthetic oligonucleotide
  Target: SCNA; (-) strand; PAM type: YTN; PAM sequence: CTC
aagtgatcctcctgcctcag

SEQ ID NO: 41828 - DNA, 20 bp, Artificial Sequence
  Description of Artificial Sequence: Synthetic oligonucleotide
  Target: SCNA; (-) strand; PAM type: YTN; PAM sequence: CTC
ccaggctcaagtgatcctcc

SEQ ID NO: 41829 - DNA, 20 bp, Artificial Sequence
  Description of Artificial Sequence: Synthetic oligonucleotide
  Target: SCNA; (-) strand; PAM type: YTN; PAM sequence: CTA
cctcccaggctcaagtgatc

SEQ ID NO: 41830 - DNA, 20 bp, Artificial Sequence
  Description of Artificial Sequence: Synthetic oligonucleotide
  Target: SCNA; (-) strand; PAM type: YTN; PAM sequence: CTC
tacctcccaggctcaagtga

SEQ ID NO: 41831 - DNA, 20 bp, Artificial Sequence
  Description of Artificial Sequence: Synthetic oligonucleotide
  Target: SCNA; (-) strand; PAM type: YTN; PAM sequence: CTG
tagcctctacctcccaggct

SEQ ID NO: 41832 - DNA, 20 bp, Artificial Sequence
  Description of Artificial Sequence: Synthetic oligonucleotide
  Target: SCNA; (-) strand; PAM type: YTN; PAM sequence: CTC
actgtagcctctacctccca

SEQ ID NO: 41833 - DNA, 20 bp, Artificial Sequence
  Description of Artificial Sequence: Synthetic oligonucleotide
  Target: SCNA; (-) strand; PAM type: YTN; PAM sequence: CTA
gaatgcagtggcatgcacat

SEQ ID NO: 41834 - DNA, 20 bp, Artificial Sequence
  Description of Artificial Sequence: Synthetic oligonucleotide
  Target: SCNA; (-) strand; PAM type: YTN; PAM sequence: CTG
tcacccaggctagaatgcag

SEQ ID NO: 41835 - DNA, 20 bp, Artificial Sequence
  Description of Artificial Sequence: Synthetic oligonucleotide
  Target: SCNA; (-) strand; PAM type: YTN; PAM sequence: CTC
tgtcacccaggctagaatgc

SEQ ID NO: 41836 - DNA, 20 bp, Artificial Sequence
  Description of Artificial Sequence: Synthetic oligonucleotide
  Target: SCNA; (-) strand; PAM type: YTN; PAM sequence: CTC
cctctgtcacccaggctaga

SEQ ID NO: 41837 - DNA, 20 bp, Artificial Sequence
  Description of Artificial Sequence: Synthetic oligonucleotide
  Target: SCNA; (-) strand; PAM type: YTN; PAM sequence: TTA
agacaaggtctccctctgtc

SEQ ID NO: 41838 - DNA, 20 bp, Artificial Sequence
  Description of Artificial Sequence: Synthetic oligonucleotide
  Target: SCNA; (-) strand; PAM type: YTN; PAM sequence: TTT
aagacaaggtctccctctgt

SEQ ID NO: 41839 - DNA, 20 bp, Artificial Sequence
  Description of Artificial Sequence: Synthetic oligonucleotide
  Target: SCNA; (-) strand; PAM type: YTN; PAM sequence: TTT
taagacaaggtctccctctg

SEQ ID NO: 41840 - DNA, 20 bp, Artificial Sequence
  Description of Artificial Sequence: Synthetic oligonucleotide
  Target: SCNA; (-) strand; PAM type: YTN; PAM sequence: TTT
ttaagacaaggtctccctct

SEQ ID NO: 41841 - DNA, 20 bp, Artificial Sequence
  Description of Artificial Sequence: Synthetic oligonucleotide
  Target: SCNA; (-) strand; PAM type: YTN; PAM sequence: TTT
tttaagacaaggtctccctc

SEQ ID NO: 41842 - DNA, 20 bp, Artificial Sequence
  Description of Artificial Sequence: Synthetic oligonucleotide
  Target: SCNA; (-) strand; PAM type: YTN; PAM sequence: TTT
ttttaagacaaggtctccct

SEQ ID NO: 41843 - DNA, 20 bp, Artificial Sequence
  Description of Artificial Sequence: Synthetic oligonucleotide
  Target: SCNA; (-) strand; PAM type: YTN; PAM sequence: TTT
tttttaagacaaggtctccc

SEQ ID NO: 41844 - DNA, 20 bp, Artificial Sequence
  Description of Artificial Sequence: Synthetic oligonucleotide
  Target: SCNA; (-) strand; PAM type: YTN; PAM sequence: TTG
aatgataattttttttaaga

SEQ ID NO: 41845 - DNA, 20 bp, Artificial Sequence
  Description of Artificial Sequence: Synthetic oligonucleotide
  Target: SCNA; (-) strand; PAM type: YTN; PAM sequence: CTG
agtagttgaatgataatttt

SEQ ID NO: 41846 - DNA, 20 bp, Artificial Sequence
  Description of Artificial Sequence: Synthetic oligonucleotide
  Target: SCNA; (-) strand; PAM type: YTN; PAM sequence: CTA
ctgagtagttgaatgataat

SEQ ID NO: 41847 - DNA, 20 bp, Artificial Sequence
  Description of Artificial Sequence: Synthetic oligonucleotide
  Target: SCNA; (-) strand; PAM type: YTN; PAM sequence: TTA
tcataatctactgagtagtt

SEQ ID NO: 41848 - DNA, 20 bp, Artificial Sequence
  Description of Artificial Sequence: Synthetic oligonucleotide
  Target: SCNA; (-) strand; PAM type: YTN; PAM sequence: TTT
atcataatctactgagtagt

SEQ ID NO: 41849 - DNA, 20 bp, Artificial Sequence
  Description of Artificial Sequence: Synthetic oligonucleotide
  Target: SCNA; (-) strand; PAM type: YTN; PAM sequence: CTT
tatcataatctactgagtag

SEQ ID NO: 41850 - DNA, 20 bp, Artificial Sequence
  Description of Artificial Sequence: Synthetic oligonucleotide
  Target: SCNA; (-) strand; PAM type: YTN; PAM sequence: CTC
aggtaatagtaatacaggtc

SEQ ID NO: 41851 - DNA, 20 bp, Artificial Sequence
  Description of Artificial Sequence: Synthetic oligonucleotide
  Target: SCNA; (-) strand; PAM type: YTN; PAM sequence: TTC
tcaggtaatagtaatacagg

SEQ ID NO: 41852 - DNA, 20 bp, Artificial Sequence
  Description of Artificial Sequence: Synthetic oligonucleotide
  Target: SCNA; (-) strand; PAM type: YTN; PAM sequence: TTA
cataattctcaggtaatagt

SEQ ID NO: 41853 - DNA, 20 bp, Artificial Sequence
  Description of Artificial Sequence: Synthetic oligonucleotide
  Target: SCNA; (-) strand; PAM type: YTN; PAM sequence: TTG
ttacataattctcaggtaat

SEQ ID NO: 41854 - DNA, 20 bp, Artificial Sequence
  Description of Artificial Sequence: Synthetic oligonucleotide
  Target: SCNA; (-) strand; PAM type: YTN; PAM sequence: TTA
taccataaataggtagttgt

SEQ ID NO: 41855 - DNA, 20 bp, Artificial Sequence
  Description of Artificial Sequence: Synthetic oligonucleotide
  Target: SCNA; (-) strand; PAM type: YTN; PAM sequence: CTA
aatattataccataaatagg

SEQ ID NO: 41856 - DNA, 20 bp, Artificial Sequence
  Description of Artificial Sequence: Synthetic oligonucleotide
  Target: SCNA; (-) strand; PAM type: YTN; PAM sequence: CTG
ctaaatattataccataaat

SEQ ID NO: 41857 - DNA, 20 bp, Artificial Sequence
  Description of Artificial Sequence: Synthetic oligonucleotide
  Target: SCNA; (-) strand; PAM type: YTN; PAM sequence: TTA
tagcctgctaaatattatac

SEQ ID NO: 41858 - DNA, 20 bp, Artificial Sequence
  Description of Artificial Sequence: Synthetic oligonucleotide
  Target: SCNA; (-) strand; PAM type: YTN; PAM sequence: TTT
atagcctgctaaatattata

SEQ ID NO: 41859 - DNA, 20 bp, Artificial Sequence
  Description of Artificial Sequence: Synthetic oligonucleotide
  Target: SCNA; (-) strand; PAM type: YTN; PAM sequence: CTT
tatagcctgctaaatattat

SEQ ID NO: 41860 - DNA, 20 bp, Artificial Sequence
  Description of Artificial Sequence: Synthetic oligonucleotide
  Target: SCNA; (-) strand; PAM type: YTN; PAM sequence: CTA
taatatagacaacactttat

SEQ ID NO: 41861 - DNA, 20 bp, Artificial Sequence
  Description of Artificial Sequence: Synthetic oligonucleotide
  Target: SCNA; (-) strand; PAM type: YTN; PAM sequence: TTG
tatctataatatagacaaca

SEQ ID NO: 41862 - DNA, 20 bp, Artificial Sequence
  Description of Artificial Sequence: Synthetic oligonucleotide
  Target: SCNA; (-) strand; PAM type: YTN; PAM sequence: CTG
tgtaggttgtatctataata

SEQ ID NO: 41863 - DNA, 20 bp, Artificial Sequence
  Description of Artificial Sequence: Synthetic oligonucleotide
  Target: SCNA; (-) strand; PAM type: YTN; PAM sequence: TTC
tgtgtaggttgtatctataa

SEQ ID NO: 41864 - DNA, 20 bp, Artificial Sequence
  Description of Artificial Sequence: Synthetic oligonucleotide
  Target: SCNA; (-) strand; PAM type: YTN; PAM sequence: CTG
aattctgtgtaggttgtatc

SEQ ID NO: 41865 - DNA, 20 bp, Artificial Sequence
  Description of Artificial Sequence: Synthetic oligonucleotide
  Target: SCNA; (-) strand; PAM type: YTN; PAM sequence: TTG
cgtctgaattctgtgtaggt

SEQ ID NO: 41866 - DNA, 20 bp, Artificial Sequence
  Description of Artificial Sequence: Synthetic oligonucleotide
  Target: SCNA; (-) strand; PAM type: YTN; PAM sequence: TTT
gcgtctgaattctgtgtagg

SEQ ID NO: 41867 - DNA, 20 bp, Artificial Sequence
  Description of Artificial Sequence: Synthetic oligonucleotide
  Target: SCNA; (-) strand; PAM type: YTN; PAM sequence: CTT
tgcgtctgaattctgtgtag

SEQ ID NO: 41868 - DNA, 20 bp, Artificial Sequence
  Description of Artificial Sequence: Synthetic oligonucleotide
  Target: SCNA; (-) strand; PAM type: YTN; PAM sequence: TTA
cctttgcgtctgaattctgt

SEQ ID NO: 41869 - DNA, 20 bp, Artificial Sequence
  Description of Artificial Sequence: Synthetic oligonucleotide
  Target: SCNA; (-) strand; PAM type: YTN; PAM sequence: TTT
acctttgcgtctgaattctg

SEQ ID NO: 41870 - DNA, 20 bp, Artificial Sequence
  Description of Artificial Sequence: Synthetic oligonucleotide
  Target: SCNA; (-) strand; PAM type: YTN; PAM sequence: TTT
tacctttgcgtctgaattct

SEQ ID NO: 41871 - DNA, 20 bp, Artificial Sequence
  Description of Artificial Sequence: Synthetic oligonucleotide
  Target: SCNA; (-) strand; PAM type: YTN; PAM sequence: TTT
ttacctttgcgtctgaattc

SEQ ID NO: 41872 - DNA, 20 bp, Artificial Sequence
  Description of Artificial Sequence: Synthetic oligonucleotide
  Target: SCNA; (-) strand; PAM type: YTN; PAM sequence: CTT
tttacctttgcgtctgaatt

SEQ ID NO: 41873 - DNA, 20 bp, Artificial Sequence
  Description of Artificial Sequence: Synthetic oligonucleotide
  Target: SCNA; (-) strand; PAM type: YTN; PAM sequence: TTC
caaactttttacctttgcgt

SEQ ID NO: 41874 - DNA, 20 bp, Artificial Sequence
  Description of Artificial Sequence: Synthetic oligonucleotide
  Target: SCNA; (-) strand; PAM type: YTN; PAM sequence: CTT
ccaaactttttacctttgcg

SEQ ID NO: 41875 - DNA, 20 bp, Artificial Sequence
  Description of Artificial Sequence: Synthetic oligonucleotide
  Target: SCNA; (-) strand; PAM type: YTN; PAM sequence: TTC
ttccaaactttttacctttg

SEQ ID NO: 41876 - DNA, 20 bp, Artificial Sequence
  Description of Artificial Sequence: Synthetic oligonucleotide
  Target: SCNA; (-) strand; PAM type: YTN; PAM sequence: TTT
cttccaaactttttaccttt

SEQ ID NO: 41877 - DNA, 20 bp, Artificial Sequence
  Description of Artificial Sequence: Synthetic oligonucleotide
  Target: SCNA; (-) strand; PAM type: YTN; PAM sequence: TTT
tcttccaaactttttacctt

SEQ ID NO: 41878 - DNA, 20 bp, Artificial Sequence
  Description of Artificial Sequence: Synthetic oligonucleotide
  Target: SCNA; (-) strand; PAM type: YTN; PAM sequence: TTG
tgttttcttccaaacttttt

SEQ ID NO: 41879 - DNA, 20 bp, Artificial Sequence
  Description of Artificial Sequence: Synthetic oligonucleotide
  Target: SCNA; (-) strand; PAM type: YTN; PAM sequence: TTA
ttgtgttttcttccaaactt

SEQ ID NO: 41880 - DNA, 20 bp, Artificial Sequence
  Description of Artificial Sequence: Synthetic oligonucleotide
  Target: SCNA; (-) strand; PAM type: YTN; PAM sequence: TTT
attgtgttttcttccaaact

SEQ ID NO: 41881 - DNA, 20 bp, Artificial Sequence
  Description of Artificial Sequence: Synthetic oligonucleotide
  Target: SCNA; (-) strand; PAM type: YTN; PAM sequence: TTT
tattgtgttttcttccaaac

SEQ ID NO: 41882 - DNA, 20 bp, Artificial Sequence
  Description of Artificial Sequence: Synthetic oligonucleotide
  Target: SCNA; (-) strand; PAM type: YTN; PAM sequence: TTC
atattttattgtgttttctt

SEQ ID NO: 41883 - DNA, 20 bp, Artificial Sequence
  Description of Artificial Sequence: Synthetic oligonucleotide
  Target: SCNA; (-) strand; PAM type: YTN; PAM sequence: TTT
catattttattgtgttttct

SEQ ID NO: 41884 - DNA, 20 bp, Artificial Sequence
  Description of Artificial Sequence: Synthetic oligonucleotide
  Target: SCNA; (-) strand; PAM type: YTN; PAM sequence: CTT
tcatattttattgtgttttc

SEQ ID NO: 41885 - DNA, 20 bp, Artificial Sequence
  Description of Artificial Sequence: Synthetic oligonucleotide
  Target: SCNA; (-) strand; PAM type: YTN; PAM sequence: CTA
tccaacaaaataactttcat

SEQ ID NO: 41886 - DNA, 20 bp, Artificial Sequence
  Description of Artificial Sequence: Synthetic oligonucleotide
  Target: SCNA; (-) strand; PAM type: YTN; PAM sequence: TTA
gaaaaaaagtcaaaataaca

SEQ ID NO: 41887 - DNA, 20 bp, Artificial Sequence
  Description of Artificial Sequence: Synthetic oligonucleotide
  Target: SCNA; (-) strand; PAM type: YTN; PAM sequence: CTT
agaaaaaaagtcaaaataac

SEQ ID NO: 41888 - DNA, 20 bp, Artificial Sequence
  Description of Artificial Sequence: Synthetic oligonucleotide
  Target: SCNA; (-) strand; PAM type: YTN; PAM sequence: TTA
aacacttagaaaaaaagtca

SEQ ID NO: 41889 - DNA, 20 bp, Artificial Sequence
  Description of Artificial Sequence: Synthetic oligonucleotide
  Target: SCNA; (-) strand; PAM type: YTN; PAM sequence: TTA
taaaagttaaacacttagaa

SEQ ID NO: 41890 - DNA, 20 bp, Artificial Sequence
  Description of Artificial Sequence: Synthetic oligonucleotide
  Target: SCNA; (-) strand; PAM type: YTN; PAM sequence: TTA
taagtggttataaaagttaa

SEQ ID NO: 41891 - DNA, 20 bp, Artificial Sequence
  Description of Artificial Sequence: Synthetic oligonucleotide
  Target: SCNA; (-) strand; PAM type: YTN; PAM sequence: TTA
cattataagtggttataaaa

SEQ ID NO: 41892 - DNA, 20 bp, Artificial Sequence
  Description of Artificial Sequence: Synthetic oligonucleotide
  Target: SCNA; (-) strand; PAM type: YTN; PAM sequence: TTT
acattataagtggttataaa

SEQ ID NO: 41893 - DNA, 20 bp, Artificial Sequence
  Description of Artificial Sequence: Synthetic oligonucleotide
  Target: SCNA; (-) strand; PAM type: YTN; PAM sequence: TTT
tacattataagtggttataa

SEQ ID NO: 41894 - DNA, 20 bp, Artificial Sequence
  Description of Artificial Sequence: Synthetic oligonucleotide
  Target: SCNA; (-) strand; PAM type: YTN; PAM sequence: CTT
ttacattataagtggttata

SEQ ID NO: 41895 - DNA, 20 bp, Artificial Sequence
  Description of Artificial Sequence: Synthetic oligonucleotide
  Target: SCNA; (-) strand; PAM type: YTN; PAM sequence: TTA
aatatgtatgcttttacatt

SEQ ID NO: 41896 - DNA, 20 bp, Artificial Sequence
  Description of Artificial Sequence: Synthetic oligonucleotide
  Target: SCNA; (-) strand; PAM type: YTN; PAM sequence: TTA
atgtgttaaatatgtatgct

SEQ ID NO: 41897 - DNA, 20 bp, Artificial Sequence
  Description of Artificial Sequence: Synthetic oligonucleotide
  Target: SCNA; (-) strand; PAM type: YTN; PAM sequence: TTA
aaattaatgtgttaaatatg

SEQ ID NO: 41898 - DNA, 20 bp, Artificial Sequence
  Description of Artificial Sequence: Synthetic oligonucleotide
  Target: SCNA; (-) strand; PAM type: YTN; PAM sequence: TTT
aaaattaatgtgttaaatat

SEQ ID NO: 41899 - DNA, 20 bp, Artificial Sequence
  Description of Artificial Sequence: Synthetic oligonucleotide
  Target: SCNA; (-) strand; PAM type: YTN; PAM sequence: TTG
tcatttaaaattaatgtgtt

SEQ ID NO: 41900 - DNA, 20 bp, Artificial Sequence
  Description of Artificial Sequence: Synthetic oligonucleotide
  Target: SCNA; (-) strand; PAM type: YTN; PAM sequence: TTC
attgtcatttaaaattaatg

SEQ ID NO: 41901 - DNA, 20 bp, Artificial Sequence
  Description of Artificial Sequence: Synthetic oligonucleotide
  Target: SCNA; (-) strand; PAM type: YTN; PAM sequence: CTT
cattgtcatttaaaattaat

SEQ ID NO: 41902 - DNA, 20 bp, Artificial Sequence
  Description of Artificial Sequence: Synthetic oligonucleotide
  Target: SCNA; (-) strand; PAM type: YTN; PAM sequence: TTC
ttcattgtcatttaaaatta

SEQ ID NO: 41903 - DNA, 20 bp, Artificial Sequence
  Description of Artificial Sequence: Synthetic oligonucleotide
  Target: SCNA; (-) strand; PAM type: YTN; PAM sequence: TTT
cttcattgtcatttaaaatt

SEQ ID NO: 41904 - DNA, 20 bp, Artificial Sequence
  Description of Artificial Sequence: Synthetic oligonucleotide
  Target: SCNA; (-) strand; PAM type: YTN; PAM sequence: TTG
tttcttcattgtcatttaaa

SEQ ID NO: 41905 - DNA, 20 bp, Artificial Sequence
  Description of Artificial Sequence: Synthetic oligonucleotide
  Target: SCNA; (-) strand; PAM type: YTN; PAM sequence: TTT
gtttcttcattgtcatttaa

SEQ ID NO: 41906 - DNA, 20 bp, Artificial Sequence
  Description of Artificial Sequence: Synthetic oligonucleotide
  Target: SCNA; (-) strand; PAM type: YTN; PAM sequence: TTC
agaaaagaatttgtttcttc

SEQ ID NO: 41907 - DNA, 20 bp, Artificial Sequence
  Description of Artificial Sequence: Synthetic oligonucleotide
  Target: SCNA; (-) strand; PAM type: YTN; PAM sequence: TTT
cagaaaagaatttgtttctt

SEQ ID NO: 41908 - DNA, 20 bp, Artificial Sequence
  Description of Artificial Sequence: Synthetic oligonucleotide
  Target: SCNA; (-) strand; PAM type: YTN; PAM sequence: TTC
aaatttcagaaaagaatttg

SEQ ID NO: 41909 - DNA, 20 bp, Artificial Sequence
  Description of Artificial Sequence: Synthetic oligonucleotide
  Target: SCNA; (-) strand; PAM type: YTN; PAM sequence: CTT
caaatttcagaaaagaattt

SEQ ID NO: 41910 - DNA, 20 bp, Artificial Sequence
  Description of Artificial Sequence: Synthetic oligonucleotide
  Target: SCNA; (-) strand; PAM type: YTN; PAM sequence: CTC
agtcttcaaatttcagaaaa

SEQ ID NO: 41911 - DNA, 20 bp, Artificial Sequence
  Description of Artificial Sequence: Synthetic oligonucleotide
  Target: SCNA; (-) strand; PAM type: YTN; PAM sequence: TTC
aatatgtatagtctcagtct

SEQ ID NO: 41912 - DNA, 20 bp, Artificial Sequence
  Description of Artificial Sequence: Synthetic oligonucleotide
  Target: SCNA; (-) strand; PAM type: YTN; PAM sequence: CTT
caatatgtatagtctcagtc

SEQ ID NO: 41913 - DNA, 20 bp, Artificial Sequence
  Description of Artificial Sequence: Synthetic oligonucleotide
  Target: SCNA; (-) strand; PAM type: YTN; PAM sequence: TTC
cttcaatatgtatagtctca

SEQ ID NO: 41914 - DNA, 20 bp, Artificial Sequence
  Description of Artificial Sequence: Synthetic oligonucleotide
  Target: SCNA; (-) strand; PAM type: YTN; PAM sequence: TTT
ccttcaatatgtatagtctc

SEQ ID NO: 41915 - DNA, 20 bp, Artificial Sequence
  Description of Artificial Sequence: Synthetic oligonucleotide
  Target: SCNA; (-) strand; PAM type: YTN; PAM sequence: TTT
tccttcaatatgtatagtct

SEQ ID NO: 41916 - DNA, 20 bp, Artificial Sequence
  Description of Artificial Sequence: Synthetic oligonucleotide
  Target: SCNA; (-) strand; PAM type: YTN; PAM sequence: TTA
ttttccttcaatatgtatag

SEQ ID NO: 41917 - DNA, 20 bp, Artificial Sequence
  Description of Artificial Sequence: Synthetic oligonucleotide
  Target: SCNA; (-) strand; PAM type: YTN; PAM sequence: TTG
attattttccttcaatatgt

SEQ ID NO: 41918 - DNA, 20 bp, Artificial Sequence
  Description of Artificial Sequence: Synthetic oligonucleotide
  Target: SCNA; (-) strand; PAM type: YTN; PAM sequence: TTT
gattattttccttcaatatg

SEQ ID NO: 41919 - DNA, 20 bp, Artificial Sequence
  Description of Artificial Sequence: Synthetic oligonucleotide
  Target: SCNA; (-) strand; PAM type: YTN; PAM sequence: CTG
accatgtatttgattatttt

SEQ ID NO: 41920 - DNA, 20 bp, Artificial Sequence
  Description of Artificial Sequence: Synthetic oligonucleotide
  Target: SCNA; (-) strand; PAM type: YTN; PAM sequence: TTC
tgaccatgtatttgattatt

SEQ ID NO: 41921 - DNA, 20 bp, Artificial Sequence
  Description of Artificial Sequence: Synthetic oligonucleotide
  Target: SCNA; (-) strand; PAM type: YTN; PAM sequence: TTT
ctgaccatgtatttgattat

SEQ ID NO: 41922 - DNA, 20 bp, Artificial Sequence
  Description of Artificial Sequence: Synthetic oligonucleotide
  Target: SCNA; (-) strand; PAM type: YTN; PAM sequence: TTT
tctgaccatgtatttgatta

SEQ ID NO: 41923 - DNA, 20 bp, Artificial Sequence
  Description of Artificial Sequence: Synthetic oligonucleotide
  Target: SCNA; (-) strand; PAM type: YTN; PAM sequence: CTA
gaaaaattttctgaccatgt

SEQ ID NO: 41924 - DNA, 20 bp, Artificial Sequence
  Description of Artificial Sequence: Synthetic oligonucleotide
  Target: SCNA; (-) strand; PAM type: YTN; PAM sequence: CTA
ggaagagatacctagaaaaa

SEQ ID NO: 41925 - DNA, 20 bp, Artificial Sequence
  Description of Artificial Sequence: Synthetic oligonucleotide
  Target: SCNA; (-) strand; PAM type: YTN; PAM sequence: TTG
tctaggaagagatacctaga

SEQ ID NO: 41926 - DNA, 20 bp, Artificial Sequence
  Description of Artificial Sequence: Synthetic oligonucleotide
  Target: SCNA; (-) strand; PAM type: YTN; PAM sequence: TTT
gtctaggaagagatacctag

SEQ ID NO: 41927 - DNA, 20 bp, Artificial Sequence
  Description of Artificial Sequence: Synthetic oligonucleotide
  Target: SCNA; (-) strand; PAM type: YTN; PAM sequence: CTT
tgtctaggaagagataccta

SEQ ID NO: 41928 - DNA, 20 bp, Artificial Sequence
  Description of Artificial Sequence: Synthetic oligonucleotide
  Target: SCNA; (-) strand; PAM type: YTN; PAM sequence: TTC
tttgtctaggaagagatacc

SEQ ID NO: 41929 - DNA, 20 bp, Artificial Sequence
  Description of Artificial Sequence: Synthetic oligonucleotide
  Target: SCNA; (-) strand; PAM type: YTN; PAM sequence: TTG
tagtattctttgtctaggaa

SEQ ID NO: 41930 - DNA, 20 bp, Artificial Sequence
  Description of Artificial Sequence: Synthetic oligonucleotide
  Target: SCNA; (-) strand; PAM type: YTN; PAM sequence: TTT
gtagtattctttgtctagga

SEQ ID NO: 41931 - DNA, 20 bp, Artificial Sequence
  Description of Artificial Sequence: Synthetic oligonucleotide
  Target: SCNA; (-) strand; PAM type: YTN; PAM sequence: TTT
tgtagtattctttgtctagg

SEQ ID NO: 41932 - DNA, 20 bp, Artificial Sequence
  Description of Artificial Sequence: Synthetic oligonucleotide
  Target: SCNA; (-) strand; PAM type: YTN; PAM sequence: CTG
agttttgtagtattctttgt

SEQ ID NO: 41933 - DNA, 20 bp, Artificial Sequence
  Description of Artificial Sequence: Synthetic oligonucleotide
  Target: SCNA; (-) strand; PAM type: YTN; PAM sequence: TTC
aggctgagttttgtagtatt

SEQ ID NO: 41934 - DNA, 20 bp, Artificial Sequence
  Description of Artificial Sequence: Synthetic oligonucleotide
  Target: SCNA; (-) strand; PAM type: YTN; PAM sequence: TTT
caggctgagttttgtagtat

SEQ ID NO: 41935 - DNA, 20 bp, Artificial Sequence
  Description of Artificial Sequence: Synthetic oligonucleotide
  Target: SCNA; (-) strand; PAM type: YTN; PAM sequence: TTA
gtgaagaataccaacaaagc

SEQ ID NO: 41936 - DNA, 20 bp, Artificial Sequence
  Description of Artificial Sequence: Synthetic oligonucleotide
  Target: SCNA; (-) strand; PAM type: YTN; PAM sequence: TTT
agtgaagaataccaacaaag

SEQ ID NO: 41937 - DNA, 20 bp, Artificial Sequence
  Description of Artificial Sequence: Synthetic oligonucleotide
  Target: SCNA; (-) strand; PAM type: YTN; PAM sequence: CTG
aaataaatgcaaagcaacaa

SEQ ID NO: 41938 - DNA, 20 bp, Artificial Sequence
  Description of Artificial Sequence: Synthetic oligonucleotide
  Target: SCNA; (-) strand; PAM type: YTN; PAM sequence: TTG
ctgaaataaatgcaaagcaa

SEQ ID NO: 41939 - DNA, 20 bp, Artificial Sequence
  Description of Artificial Sequence: Synthetic oligonucleotide
  Target: SCNA; (-) strand; PAM type: YTN; PAM sequence: TTT
gctgaaataaatgcaaagca

SEQ ID NO: 41940 - DNA, 20 bp, Artificial Sequence
  Description of Artificial Sequence: Synthetic oligonucleotide
  Target: SCNA; (-) strand; PAM type: YTN; PAM sequence: CTT
tgctgaaataaatgcaaagc

SEQ ID NO: 41941 - DNA, 20 bp, Artificial Sequence
  Description of Artificial Sequence: Synthetic oligonucleotide
  Target: SCNA; (-) strand; PAM type: YTN; PAM sequence: TTA
ctttgctgaaataaatgcaa

SEQ ID NO: 41942 - DNA, 20 bp, Artificial Sequence
  Description of Artificial Sequence: Synthetic oligonucleotide
  Target: SCNA; (-) strand; PAM type: YTN; PAM sequence: TTA
taattactttgctgaaataa

SEQ ID NO: 41943 - DNA, 20 bp, Artificial Sequence
  Description of Artificial Sequence: Synthetic oligonucleotide
  Target: SCNA; (-) strand; PAM type: YTN; PAM sequence: CTT
ataattactttgctgaaata

SEQ ID NO: 41944 - DNA, 20 bp, Artificial Sequence
  Description of Artificial Sequence: Synthetic oligonucleotide
  Target: SCNA; (-) strand; PAM type: YTN; PAM sequence: TTC
ttataattactttgctgaaa

SEQ ID NO: 41945 - DNA, 20 bp, Artificial Sequence
  Description of Artificial Sequence: Synthetic oligonucleotide
  Target: SCNA; (-) strand; PAM type: YTN; PAM sequence: CTT
cttataattactttgctgaa

SEQ ID NO: 41946 - DNA, 20 bp, Artificial Sequence
  Description of Artificial Sequence: Synthetic oligonucleotide
  Target: SCNA; (-) strand; PAM type: YTN; PAM sequence: TTA
tcttcttataattactttgc

SEQ ID NO: 41947 - DNA, 20 bp, Artificial Sequence
  Description of Artificial Sequence: Synthetic oligonucleotide
  Target: SCNA; (-) strand; PAM type: YTN; PAM sequence: TTT
atcttcttataattactttg

SEQ ID NO: 41948 - DNA, 20 bp, Artificial Sequence
  Description of Artificial Sequence: Synthetic oligonucleotide
  Target: SCNA; (-) strand; PAM type: YTN; PAM sequence: CTT
tatcttcttataattacttt

SEQ ID NO: 41949 - DNA, 20 bp, Artificial Sequence
  Description of Artificial Sequence: Synthetic oligonucleotide
  Target: SCNA; (-) strand; PAM type: YTN; PAM sequence: TTA
cctttatcttcttataatta

SEQ ID NO: 41950 - DNA, 20 bp, Artificial Sequence
  Description of Artificial Sequence: Synthetic oligonucleotide
  Target: SCNA; (-) strand; PAM type: YTN; PAM sequence: CTT
acctttatcttcttataatt

SEQ ID NO: 41951 - DNA, 20 bp, Artificial Sequence
  Description of Artificial Sequence: Synthetic oligonucleotide
  Target: SCNA; (-) strand; PAM type: YTN; PAM sequence: TTC
acttacctttatcttcttat

SEQ ID NO: 41952 - DNA, 20 bp, Artificial Sequence
  Description of Artificial Sequence: Synthetic oligonucleotide
  Target: SCNA; (-) strand; PAM type: YTN; PAM sequence: TTT
cacttacctttatcttctta

SEQ ID NO: 41953 - DNA, 20 bp, Artificial Sequence
  Description of Artificial Sequence: Synthetic oligonucleotide
  Target: SCNA; (-) strand; PAM type: YTN; PAM sequence: TTT
tcacttacctttatcttctt

SEQ ID NO: 41954 - DNA, 20 bp, Artificial Sequence
  Description of Artificial Sequence: Synthetic oligonucleotide
  Target: SCNA; (-) strand; PAM type: YTN; PAM sequence: TTG
aattttcacttacctttatc

SEQ ID NO: 41955 - DNA, 20 bp, Artificial Sequence
  Description of Artificial Sequence: Synthetic oligonucleotide
  Target: SCNA; (-) strand; PAM type: YTN; PAM sequence: TTT
gaattttcacttacctttat

SEQ ID NO: 41956 - DNA, 20 bp, Artificial Sequence
  Description of Artificial Sequence: Synthetic oligonucleotide
  Target: SCNA; (-) strand; PAM type: YTN; PAM sequence: CTT
tgaattttcacttaccttta

SEQ ID NO: 41957 - DNA, 20 bp, Artificial Sequence
  Description of Artificial Sequence: Synthetic oligonucleotide
  Target: SCNA; (-) strand; PAM type: YTN; PAM sequence: TTC
tttgaattttcacttacctt

SEQ ID NO: 41958 - DNA, 20 bp, Artificial Sequence
  Description of Artificial Sequence: Synthetic oligonucleotide
  Target: SCNA; (-) strand; PAM type: YTN; PAM sequence: CTG
ttctttgaattttcacttac

SEQ ID NO: 41959 - DNA, 20 bp, Artificial Sequence
  Description of Artificial Sequence: Synthetic oligonucleotide
  Target: SCNA; (-) strand; PAM type: YTN; PAM sequence: CTC
tgttctttgaattttcactt

SEQ ID NO: 41960 - DNA, 20 bp, Artificial Sequence
  Description of Artificial Sequence: Synthetic oligonucleotide
  Target: SCNA; (-) strand; PAM type: YTN; PAM sequence: CTC
tctgttctttgaattttcac

SEQ ID NO: 41961 - DNA, 20 bp, Artificial Sequence
  Description of Artificial Sequence: Synthetic oligonucleotide
  Target: SCNA; (-) strand; PAM type: YTN; PAM sequence: TTG
cctctctgttctttgaattt

SEQ ID NO: 41962 - DNA, 20 bp, Artificial Sequence
  Description of Artificial Sequence: Synthetic oligonucleotide
  Target: SCNA; (-) strand; PAM type: YTN; PAM sequence: CTC
acattgcctctctgttcttt

SEQ ID NO: 41963 - DNA, 20 bp, Artificial Sequence
  Description of Artificial Sequence: Synthetic oligonucleotide
  Target: SCNA; (-) strand; PAM type: YTN; PAM sequence: TTA
ggctcacattgcctctctgt

SEQ ID NO: 41964 - DNA, 20 bp, Artificial Sequence
  Description of Artificial Sequence: Synthetic oligonucleotide
  Target: SCNA; (-) strand; PAM type: YTN; PAM sequence: TTT
aggctcacattgcctctctg

SEQ ID NO: 41965 - DNA, 20 bp, Artificial Sequence
  Description of Artificial Sequence: Synthetic oligonucleotide
  Target: SCNA; (-) strand; PAM type: YTN; PAM sequence: CTT
taggctcacattgcctctct

SEQ ID NO: 41966 - DNA, 20 bp, Artificial Sequence
  Description of Artificial Sequence: Synthetic oligonucleotide
  Target: SCNA; (-) strand; PAM type: YTN; PAM sequence: CTC
caagtccctttaggctcaca

SEQ ID NO: 41967 - DNA, 20 bp, Artificial Sequence
  Description of Artificial Sequence: Synthetic oligonucleotide
  Target: SCNA; (-) strand; PAM type: YTN; PAM sequence: TTC
tccaagtccctttaggctca

SEQ ID NO: 41968 - DNA, 20 bp, Artificial Sequence
  Description of Artificial Sequence: Synthetic oligonucleotide
  Target: SCNA; (-) strand; PAM type: YTN; PAM sequence: TTT
ctccaagtccctttaggctc

SEQ ID NO: 41969 - DNA, 20 bp, Artificial Sequence
  Description of Artificial Sequence: Synthetic oligonucleotide
  Target: SCNA; (-) strand; PAM type: YTN; PAM sequence: CTT
tctccaagtccctttaggct

SEQ ID NO: 41970 - DNA, 20 bp, Artificial Sequence
  Description of Artificial Sequence: Synthetic oligonucleotide
  Target: SCNA; (-) strand; PAM type: YTN; PAM sequence: CTC
tttctccaagtccctttagg

SEQ ID NO: 41971 - DNA, 20 bp, Artificial Sequence
  Description of Artificial Sequence: Synthetic oligonucleotide
  Target: SCNA; (-) strand; PAM type: YTN; PAM sequence: TTG
atctctttctccaagtccct

SEQ ID NO: 41972 - DNA, 20 bp, Artificial Sequence
  Description of Artificial Sequence: Synthetic oligonucleotide
  Target: SCNA; (-) strand; PAM type: YTN; PAM sequence: TTT
gatctctttctccaagtccc

SEQ ID NO: 41973 - DNA, 20 bp, Artificial Sequence
  Description of Artificial Sequence: Synthetic oligonucleotide
  Target: SCNA; (-) strand; PAM type: YTN; PAM sequence: TTA
tttgatctctttctccaagt

SEQ ID NO: 41974 - DNA, 20 bp, Artificial Sequence
  Description of Artificial Sequence: Synthetic oligonucleotide
  Target: SCNA; (-) strand; PAM type: YTN; PAM sequence: CTG
agggattatttgatctcttt

SEQ ID NO: 41975 - DNA, 20 bp, Artificial Sequence
  Description of Artificial Sequence: Synthetic oligonucleotide
  Target: SCNA; (-) strand; PAM type: YTN; PAM sequence: TTG
gctgagggattatttgatct

SEQ ID NO: 41976 - DNA, 20 bp, Artificial Sequence
  Description of Artificial Sequence: Synthetic oligonucleotide
  Target: SCNA; (-) strand; PAM type: YTN; PAM sequence: TTG
aaaatcagccgcgttggctg

SEQ ID NO: 41977 - DNA, 20 bp, Artificial Sequence
  Description of Artificial Sequence: Synthetic oligonucleotide
  Target: SCNA; (-) strand; PAM type: YTN; PAM sequence: TTG
ttgaaaatcagccgcgttgg

SEQ ID NO: 41978 - DNA, 20 bp, Artificial Sequence
  Description of Artificial Sequence: Synthetic oligonucleotide
  Target: SCNA; (-) strand; PAM type: YTN; PAM sequence: TTA
catcagacatgttgttgaaa

SEQ ID NO: 41979 - DNA, 20 bp, Artificial Sequence
  Description of Artificial Sequence: Synthetic oligonucleotide
  Target: SCNA; (-) strand; PAM type: YTN; PAM sequence: TTT
acatcagacatgttgttgaa

SEQ ID NO: 41980 - DNA, 20 bp, Artificial Sequence
  Description of Artificial Sequence: Synthetic oligonucleotide
  Target: SCNA; (-) strand; PAM type: YTN; PAM sequence: TTT
tacatcagacatgttgttga

SEQ ID NO: 41981 - DNA, 20 bp, Artificial Sequence
  Description of Artificial Sequence: Synthetic oligonucleotide
  Target: SCNA; (-) strand; PAM type: YTN; PAM sequence: TTT
ttacatcagacatgttgttg

SEQ ID NO: 41982 - DNA, 20 bp, Artificial Sequence
  Description of Artificial Sequence: Synthetic oligonucleotide
  Target: SCNA; (-) strand; PAM type: YTN; PAM sequence: TTT
tttacatcagacatgttgtt

SEQ ID NO: 41983 - DNA, 20 bp, Artificial Sequence
  Description of Artificial Sequence: Synthetic oligonucleotide
  Target: SCNA; (-) strand; PAM type: YTN; PAM sequence: CTT
ttttacatcagacatgttgt

SEQ ID NO: 41984 - DNA, 20 bp, Artificial Sequence
  Description of Artificial Sequence: Synthetic oligonucleotide
  Target: SCNA; (-) strand; PAM type: YTN; PAM sequence: TTC
catgtgaagacatggggaag

SEQ ID NO: 41985 - DNA, 20 bp, Artificial Sequence
  Description of Artificial Sequence: Synthetic oligonucleotide
  Target: SCNA; (-) strand; PAM type: YTN; PAM sequence: CTT
ccatgtgaagacatggggaa

SEQ ID NO: 41986 - DNA, 20 bp, Artificial Sequence
  Description of Artificial Sequence: Synthetic oligonucleotide
  Target: SCNA; (-) strand; PAM type: YTN; PAM sequence: CTG
tcagtcacttccatgtgaag

SEQ ID NO: 41987 - DNA, 20 bp, Artificial Sequence
  Description of Artificial Sequence: Synthetic oligonucleotide
  Target: SCNA; (-) strand; PAM type: YTN; PAM sequence: CTG
cgtccctgtcagtcacttcc

SEQ ID NO: 41988 - DNA, 20 bp, Artificial Sequence
  Description of Artificial Sequence: Synthetic oligonucleotide
  Target: SCNA; (-) strand; PAM type: YTN; PAM sequence: TTC
tgcgtccctgtcagtcactt

SEQ ID NO: 41989 - DNA, 20 bp, Artificial Sequence
  Description of Artificial Sequence: Synthetic oligonucleotide
  Target: SCNA; (-) strand; PAM type: YTN; PAM sequence: CTT
ctgcgtccctgtcagtcact

SEQ ID NO: 41990 - DNA, 20 bp, Artificial Sequence
  Description of Artificial Sequence: Synthetic oligonucleotide
  Target: SCNA; (-) strand; PAM type: YTN; PAM sequence: TTA
tacttctgcgtccctgtcag

SEQ ID NO: 41991 - DNA, 20 bp, Artificial Sequence
  Description of Artificial Sequence: Synthetic oligonucleotide
  Target: SCNA; (-) strand; PAM type: YTN; PAM sequence: CTT
atacttctgcgtccctgtca

SEQ ID NO: 41992 - DNA, 20 bp, Artificial Sequence
  Description of Artificial Sequence: Synthetic oligonucleotide
  Target: SCNA; (-) strand; PAM type: YTN; PAM sequence: TTC
ttatacttctgcgtccctgt

SEQ ID NO: 41993 - DNA, 20 bp, Artificial Sequence
  Description of Artificial Sequence: Synthetic oligonucleotide
  Target: SCNA; (-) strand; PAM type: YTN; PAM sequence: TTT
cttatacttctgcgtccctg

SEQ ID NO: 41994 - DNA, 20 bp, Artificial Sequence
  Description of Artificial Sequence: Synthetic oligonucleotide
  Target: SCNA; (-) strand; PAM type: YTN; PAM sequence: TTT
tcttatacttctgcgtccct

SEQ ID NO: 41995 - DNA, 20 bp, Artificial Sequence
  Description of Artificial Sequence: Synthetic oligonucleotide
  Target: SCNA; (-) strand; PAM type: YTN; PAM sequence: TTA
gccattttcttatacttctg

SEQ ID NO: 41996 - DNA, 20 bp, Artificial Sequence
  Description of Artificial Sequence: Synthetic oligonucleotide
  Target: SCNA; (-) strand; PAM type: YTN; PAM sequence: CTG
ttagccattttcttatactt

SEQ ID NO: 41997 - DNA, 20 bp, Artificial Sequence
  Description of Artificial Sequence: Synthetic oligonucleotide
  Target: SCNA; (-) strand; PAM type: YTN; PAM sequence: TTA
ctgttagccattttcttata

SEQ ID NO: 41998 - DNA, 20 bp, Artificial Sequence
  Description of Artificial Sequence: Synthetic oligonucleotide
  Target: SCNA; (-) strand; PAM type: YTN; PAM sequence: CTT
actgttagccattttcttat

SEQ ID NO: 41999 - DNA, 20 bp, Artificial Sequence
  Description of Artificial Sequence: Synthetic oligonucleotide
  Target: SCNA; (-) strand; PAM type: YTN; PAM sequence: TTC
ttactgttagccattttctt

SEQ ID NO: 42000 - DNA, 20 bp, Artificial Sequence
  Description of Artificial Sequence: Synthetic oligonucleotide
  Target: SCNA; (-) strand; PAM type: YTN; PAM sequence: TTT
cttactgttagccattttct

SEQ ID NO: 42001 - DNA, 20 bp, Artificial Sequence
  Description of Artificial Sequence: Synthetic oligonucleotide
  Target: SCNA; (-) strand; PAM type: YTN; PAM sequence: TTT
tcttactgttagccattttc

SEQ ID NO: 42002 - DNA, 20 bp, Artificial Sequence
  Description of Artificial Sequence: Synthetic oligonucleotide
  Target: SCNA; (-) strand; PAM type: YTN; PAM sequence: CTT
ttcttactgttagccatttt

SEQ ID NO: 42003 - DNA, 20 bp, Artificial Sequence
  Description of Artificial Sequence: Synthetic oligonucleotide
  Target: SCNA; (-) strand; PAM type: YTN; PAM sequence: TTA
gtgtgaccttttcttactgt

SEQ ID NO: 42004 - DNA, 20 bp, Artificial Sequence
  Description of Artificial Sequence: Synthetic oligonucleotide
  Target: SCNA; (-) strand; PAM type: YTN; PAM sequence: TTT
agtgtgaccttttcttactg

SEQ ID NO: 42005 - DNA, 20 bp, Artificial Sequence
  Description of Artificial Sequence: Synthetic oligonucleotide
  Target: SCNA; (-) strand; PAM type: YTN; PAM sequence: CTT
tagtgtgaccttttcttact

SEQ ID NO: 42006 - DNA, 20 bp, Artificial Sequence
  Description of Artificial Sequence: Synthetic oligonucleotide
  Target: SCNA; (-) strand; PAM type: YTN; PAM sequence: CTA
ccataagcatgatctttagt

SEQ ID NO: 42007 - DNA, 20 bp, Artificial Sequence
  Description of Artificial Sequence: Synthetic oligonucleotide
  Target: SCNA; (-) strand; PAM type: YTN; PAM sequence: CTG
cccacctaccataagcatga

SEQ ID NO: 42008 - DNA, 20 bp, Artificial Sequence
  Description of Artificial Sequence: Synthetic oligonucleotide
  Target: SCNA; (-) strand; PAM type: YTN; PAM sequence: CTC
tgcccacctaccataagcat

SEQ ID NO: 42009 - DNA, 20 bp, Artificial Sequence
  Description of Artificial Sequence: Synthetic oligonucleotide
  Target: SCNA; (-) strand; PAM type: YTN; PAM sequence: TTC
tctgcccacctaccataagc

SEQ ID NO: 42010 - DNA, 20 bp, Artificial Sequence
  Description of Artificial Sequence: Synthetic oligonucleotide
  Target: SCNA; (-) strand; PAM type: YTN; PAM sequence: CTT
ctctgcccacctaccataag

SEQ ID NO: 42011 - DNA, 20 bp, Artificial Sequence
  Description of Artificial Sequence: Synthetic oligonucleotide
  Target: SCNA; (-) strand; PAM type: YTN; PAM sequence: CTG
taagcttctctgcccaccta

SEQ ID NO: 42012 - DNA, 20 bp, Artificial Sequence
  Description of Artificial Sequence: Synthetic oligonucleotide
  Target: SCNA; (-) strand; PAM type: YTN; PAM sequence: TTG
gcaagggcagaatgatctgt

SEQ ID NO: 42013 - DNA, 20 bp, Artificial Sequence
  Description of Artificial Sequence: Synthetic oligonucleotide
  Target: SCNA; (-) strand; PAM type: YTN; PAM sequence: TTA
taaaaagggcattggcaagg

SEQ ID NO: 42014 - DNA, 20 bp, Artificial Sequence
  Description of Artificial Sequence: Synthetic oligonucleotide
  Target: SCNA; (-) strand; PAM type: YTN; PAM sequence: TTT
ataaaaagggcattggcaag

SEQ ID NO: 42015 - DNA, 20 bp, Artificial Sequence
  Description of Artificial Sequence: Synthetic oligonucleotide
  Target: SCNA; (-) strand; PAM type: YTN; PAM sequence: TTA
gtttataaaaagggcattgg

SEQ ID NO: 42016 - DNA, 20 bp, Artificial Sequence
  Description of Artificial Sequence: Synthetic oligonucleotide
  Target: SCNA; (-) strand; PAM type: YTN; PAM sequence: TTT
agtttataaaaagggcattg

SEQ ID NO: 42017 - DNA, 20 bp, Artificial Sequence
  Description of Artificial Sequence: Synthetic oligonucleotide
  Target: SCNA; (-) strand; PAM type: YTN; PAM sequence: TTT
tagtttataaaaagggcatt

SEQ ID NO: 42018 - DNA, 20 bp, Artificial Sequence
  Description of Artificial Sequence: Synthetic oligonucleotide
  Target: SCNA; (-) strand; PAM type: YTN; PAM sequence: TTT
ttagtttataaaaagggcat

SEQ ID NO: 42019 - DNA, 20 bp, Artificial Sequence
  Description of Artificial Sequence: Synthetic oligonucleotide
  Target: SCNA; (-) strand; PAM type: YTN; PAM sequence: TTT
tttagtttataaaaagggca

SEQ ID NO: 42020 - DNA, 20 bp, Artificial Sequence
  Description of Artificial Sequence: Synthetic oligonucleotide
  Target: SCNA; (-) strand; PAM type: YTN; PAM sequence: TTT
ttttagtttataaaaagggc

SEQ ID NO: 42021 - DNA, 20 bp, Artificial Sequence
  Description of Artificial Sequence: Synthetic oligonucleotide
  Target: SCNA; (-) strand; PAM type: YTN; PAM sequence: TTT
tttttagtttataaaaaggg

SEQ ID NO: 42022 - DNA, 20 bp, Artificial Sequence
  Description of Artificial Sequence: Synthetic oligonucleotide
  Target: SCNA; (-) strand; PAM type: YTN; PAM sequence: TTG
gattttttttagtttataaa

SEQ ID NO: 42023 - DNA, 20 bp, Artificial Sequence
  Description of Artificial Sequence: Synthetic oligonucleotide
  Target: SCNA; (-) strand; PAM type: YTN; PAM sequence: TTT
ggattttttttagtttataa

SEQ ID NO: 42024 - DNA, 20 bp, Artificial Sequence
  Description of Artificial Sequence: Synthetic oligonucleotide
  Target: SCNA; (-) strand; PAM type: YTN; PAM sequence: TTA
tttggattttttttagttta

SEQ ID NO: 42025 - DNA, 20 bp, Artificial Sequence
  Description of Artificial Sequence: Synthetic oligonucleotide
  Target: SCNA; (-) strand; PAM type: YTN; PAM sequence: TTA
tatattatttggattttttt

SEQ ID NO: 42026 - DNA, 20 bp, Artificial Sequence
  Description of Artificial Sequence: Synthetic oligonucleotide
  Target: SCNA; (-) strand; PAM type: YTN; PAM sequence: TTT
atatattatttggatttttt

SEQ ID NO: 42027 - DNA, 20 bp, Artificial Sequence
  Description of Artificial Sequence: Synthetic oligonucleotide
  Target: SCNA; (-) strand; PAM type: YTN; PAM sequence: TTA
atttatatattatttggatt

SEQ ID NO: 42028 - DNA, 20 bp, Artificial Sequence
  Description of Artificial Sequence: Synthetic oligonucleotide
  Target: SCNA; (-) strand; PAM type: YTN; PAM sequence: TTT
aatttatatattatttggat

SEQ ID NO: 42029 - DNA, 20 bp, Artificial Sequence
  Description of Artificial Sequence: Synthetic oligonucleotide
  Target: SCNA; (-) strand; PAM type: YTN; PAM sequence: TTA
tttaatttatatattatttg

SEQ ID NO: 42030 - DNA, 20 bp, Artificial Sequence
  Description of Artificial Sequence: Synthetic oligonucleotide
  Target: SCNA; (-) strand; PAM type: YTN; PAM sequence: TTT
atttaatttatatattattt

SEQ ID NO: 42031 - DNA, 20 bp, Artificial Sequence
  Description of Artificial Sequence: Synthetic oligonucleotide
  Target: SCNA; (-) strand; PAM type: YTN; PAM sequence: TTT
tatttaatttatatattatt

SEQ ID NO: 42032 - DNA, 20 bp, Artificial Sequence
  Description of Artificial Sequence: Synthetic oligonucleotide
  Target: SCNA; (-) strand; PAM type: YTN; PAM sequence: TTC
atattttatttaatttatat

SEQ ID NO: 42033 - DNA, 20 bp, Artificial Sequence
  Description of Artificial Sequence: Synthetic oligonucleotide
  Target: SCNA; (-) strand; PAM type: YTN; PAM sequence: TTG
gggtggttcatattttattt

SEQ ID NO: 42034 - DNA, 20 bp, Artificial Sequence
  Description of Artificial Sequence: Synthetic oligonucleotide
  Target: SCNA; (-) strand; PAM type: YTN; PAM sequence: TTT
ggggtggttcatattttatt

SEQ ID NO: 42035 - DNA, 20 bp, Artificial Sequence
  Description of Artificial Sequence: Synthetic oligonucleotide
  Target: SCNA; (-) strand; PAM type: YTN; PAM sequence: TTA
aagtgaggtagtttggggtg

SEQ ID NO: 42036 - DNA, 20 bp, Artificial Sequence
  Description of Artificial Sequence: Synthetic oligonucleotide
  Target: SCNA; (-) strand; PAM type: YTN; PAM sequence: TTT
aaagtgaggtagtttggggt

SEQ ID NO: 42037 - DNA, 20 bp, Artificial Sequence
  Description of Artificial Sequence: Synthetic oligonucleotide
  Target: SCNA; (-) strand; PAM type: YTN; PAM sequence: TTT
taaagtgaggtagtttgggg

SEQ ID NO: 42038 - DNA, 20 bp, Artificial Sequence
  Description of Artificial Sequence: Synthetic oligonucleotide
  Target: SCNA; (-) strand; PAM type: YTN; PAM sequence: CTC
cacattttaaagtgaggtag

SEQ ID NO: 42039 - DNA, 20 bp, Artificial Sequence
  Description of Artificial Sequence: Synthetic oligonucleotide
  Target: SCNA; (-) strand; PAM type: YTN; PAM sequence: TTA
ctccacattttaaagtgagg

SEQ ID NO: 42040 - DNA, 20 bp, Artificial Sequence
  Description of Artificial Sequence: Synthetic oligonucleotide
  Target: SCNA; (-) strand; PAM type: YTN; PAM sequence: TTT
actccacattttaaagtgag

SEQ ID NO: 42041 - DNA, 20 bp, Artificial Sequence
  Description of Artificial Sequence: Synthetic oligonucleotide
  Target: SCNA; (-) strand; PAM type: YTN; PAM sequence: CTA
cgaaaacagtatgtttactc

SEQ ID NO: 42042 - DNA, 20 bp, Artificial Sequence
  Description of Artificial Sequence: Synthetic oligonucleotide
  Target: SCNA; (-) strand; PAM type: YTN; PAM sequence: CTA
ccaagaagtgaaacactacg

SEQ ID NO: 42043 - DNA, 20 bp, Artificial Sequence
  Description of Artificial Sequence: Synthetic oligonucleotide
  Target: SCNA; (-) strand; PAM type: YTN; PAM sequence: CTG
cagcagaggcgtatctacca

SEQ ID NO: 42044 - DNA, 20 bp, Artificial Sequence
  Description of Artificial Sequence: Synthetic oligonucleotide
  Target: SCNA; (-) strand; PAM type: YTN; PAM sequence: CTA
gccatcctgcagcagaggcg

SEQ ID NO: 42045 - DNA, 20 bp, Artificial Sequence
  Description of Artificial Sequence: Synthetic oligonucleotide
  Target: SCNA; (-) strand; PAM type: YTN; PAM sequence: TTG
tgcctagccatcctgcagca

SEQ ID NO: 42046 - DNA, 20 bp, Artificial Sequence
  Description of Artificial Sequence: Synthetic oligonucleotide
  Target: SCNA; (-) strand; PAM type: YTN; PAM sequence: CTT
gtgcctagccatcctgcagc

SEQ ID NO: 42047 - DNA, 20 bp, Artificial Sequence
  Description of Artificial Sequence: Synthetic oligonucleotide
  Target: SCNA; (-) strand; PAM type: YTN; PAM sequence: CTG
tgacatggaaggccttgtgc

SEQ ID NO: 42048 - DNA, 20 bp, Artificial Sequence
  Description of Artificial Sequence: Synthetic oligonucleotide
  Target: SCNA; (-) strand; PAM type: YTN; PAM sequence: CTC
aagtcctgtgacatggaagg

SEQ ID NO: 42049 - DNA, 20 bp, Artificial Sequence
  Description of Artificial Sequence: Synthetic oligonucleotide
  Target: SCNA; (-) strand; PAM type: YTN; PAM sequence: TTG
agctcaagtcctgtgacatg

SEQ ID NO: 42050 - DNA, 20 bp, Artificial Sequence
  Description of Artificial Sequence: Synthetic oligonucleotide
  Target: SCNA; (-) strand; PAM type: YTN; PAM sequence: CTT
gagctcaagtcctgtgacat

SEQ ID NO: 42051 - DNA, 20 bp, Artificial Sequence
  Description of Artificial Sequence: Synthetic oligonucleotide
  Target: SCNA; (-) strand; PAM type: YTN; PAM sequence: CTA
ggacttgagctcaagtcctg

SEQ ID NO: 42052 - DNA, 20 bp, Artificial Sequence
  Description of Artificial Sequence: Synthetic oligonucleotide
  Target: SCNA; (-) strand; PAM type: YTN; PAM sequence: CTA
gagaagctaggacttgagct

SEQ ID NO: 42053 - DNA, 20 bp, Artificial Sequence
  Description of Artificial Sequence: Synthetic oligonucleotide
  Target: SCNA; (-) strand; PAM type: YTN; PAM sequence: CTG
tcatctagagaagctaggac

SEQ ID NO: 42054 - DNA, 20 bp, Artificial Sequence
  Description of Artificial Sequence: Synthetic oligonucleotide
  Target: SCNA; (-) strand; PAM type: YTN; PAM sequence: CTC
tgtcatctagagaagctagg

SEQ ID NO: 42055 - DNA, 20 bp, Artificial Sequence
  Description of Artificial Sequence: Synthetic oligonucleotide
  Target: SCNA; (-) strand; PAM type: YTN; PAM sequence: CTC
agcatcacaaaagctctgtc

SEQ ID NO: 42056 - DNA, 20 bp, Artificial Sequence
  Description of Artificial Sequence: Synthetic oligonucleotide
  Target: SCNA; (-) strand; PAM type: YTN; PAM sequence: TTC
tcagcatcacaaaagctctg

SEQ ID NO: 42057 - DNA, 20 bp, Artificial Sequence
  Description of Artificial Sequence: Synthetic oligonucleotide
  Target: SCNA; (-) strand; PAM type: YTN; PAM sequence: CTT
ctcagcatcacaaaagctct

SEQ ID NO: 42058 - DNA, 20 bp, Artificial Sequence
  Description of Artificial Sequence: Synthetic oligonucleotide
  Target: SCNA; (-) strand; PAM type: YTN; PAM sequence: CTC
agaaaaagcataggaaactt

SEQ ID NO: 42059 - DNA, 20 bp, Artificial Sequence
  Description of Artificial Sequence: Synthetic oligonucleotide
  Target: SCNA; (-) strand; PAM type: YTN; PAM sequence: TTG
acactcagaaaaagcatagg

SEQ ID NO: 42060 - DNA, 20 bp, Artificial Sequence
  Description of Artificial Sequence: Synthetic oligonucleotide
  Target: SCNA; (-) strand; PAM type: YTN; PAM sequence: CTA
attgacactcagaaaaagca

SEQ ID NO: 42061 - DNA, 20 bp, Artificial Sequence
  Description of Artificial Sequence: Synthetic oligonucleotide
  Target: SCNA; (-) strand; PAM type: YTN; PAM sequence: CTA
agactaattgacactcagaa

SEQ ID NO: 42062 - DNA, 20 bp, Artificial Sequence
  Description of Artificial Sequence: Synthetic oligonucleotide
  Target: SCNA; (-) strand; PAM type: YTN; PAM sequence: TTG
atcactaagactaattgaca

SEQ ID NO: 42063 - DNA, 20 bp, Artificial Sequence
  Description of Artificial Sequence: Synthetic oligonucleotide
  Target: SCNA; (-) strand; PAM type: YTN; PAM sequence: TTT
gatcactaagactaattgac

SEQ ID NO: 42064 - DNA, 20 bp, Artificial Sequence
  Description of Artificial Sequence: Synthetic oligonucleotide
  Target: SCNA; (-) strand; PAM type: YTN; PAM sequence: CTG
tcccgtttgatcactaagac

SEQ ID NO: 42065 - DNA, 20 bp, Artificial Sequence
  Description of Artificial Sequence: Synthetic oligonucleotide
  Target: SCNA; (-) strand; PAM type: YTN; PAM sequence: TTG
ctgtcccgtttgatcactaa

SEQ ID NO: 42066 - DNA, 20 bp, Artificial Sequence
  Description of Artificial Sequence: Synthetic oligonucleotide
  Target: SCNA; (-) strand; PAM type: YTN; PAM sequence: TTT
gctgtcccgtttgatcacta

SEQ ID NO: 42067 - DNA, 20 bp, Artificial Sequence
  Description of Artificial Sequence: Synthetic oligonucleotide
  Target: SCNA; (-) strand; PAM type: YTN; PAM sequence: TTT
tgctgtcccgtttgatcact

SEQ ID NO: 42068 - DNA, 20 bp, Artificial Sequence
  Description of Artificial Sequence: Synthetic oligonucleotide
  Target: SCNA; (-) strand; PAM type: YTN; PAM sequence: TTG
taaagaaggttttgctgtcc

SEQ ID NO: 42069 - DNA, 20 bp, Artificial Sequence
  Description of Artificial Sequence: Synthetic oligonucleotide
  Target: SCNA; (-) strand; PAM type: YTN; PAM sequence: CTG
ttgtaaagaaggttttgctg

SEQ ID NO: 42070 - DNA, 20 bp, Artificial Sequence
  Description of Artificial Sequence: Synthetic oligonucleotide
  Target: SCNA; (-) strand; PAM type: YTN; PAM sequence: CTC
cctgttgtaaagaaggtttt

SEQ ID NO: 42071 - DNA, 20 bp, Artificial Sequence
  Description of Artificial Sequence: Synthetic oligonucleotide
  Target: SCNA; (-) strand; PAM type: YTN; PAM sequence: TTC
tccctgttgtaaagaaggtt

SEQ ID NO: 42072 - DNA, 20 bp, Artificial Sequence
  Description of Artificial Sequence: Synthetic oligonucleotide
  Target: SCNA; (-) strand; PAM type: YTN; PAM sequence: CTT
ctccctgttgtaaagaaggt

SEQ ID NO: 42073 - DNA, 20 bp, Artificial Sequence
  Description of Artificial Sequence: Synthetic oligonucleotide
  Target: SCNA; (-) strand; PAM type: YTN; PAM sequence: TTC
cttctccctgttgtaaagaa

SEQ ID NO: 42074 - DNA, 20 bp, Artificial Sequence
  Description of Artificial Sequence: Synthetic oligonucleotide
  Target: SCNA; (-) strand; PAM type: YTN; PAM sequence: TTT
ccttctccctgttgtaaaga

SEQ ID NO: 42075 - DNA, 20 bp, Artificial Sequence
  Description of Artificial Sequence: Synthetic oligonucleotide
  Target: SCNA; (-) strand; PAM type: YTN; PAM sequence: TTA
atgatgtcgtttccttctcc

SEQ ID NO: 42076 - DNA, 20 bp, Artificial Sequence
  Description of Artificial Sequence: Synthetic oligonucleotide
  Target: SCNA; (-) strand; PAM type: YTN; PAM sequence: TTA
atgagaaagttaatgatgtc

SEQ ID NO: 42077 - DNA, 20 bp, Artificial Sequence
  Description of Artificial Sequence: Synthetic oligonucleotide
  Target: SCNA; (-) strand; PAM type: YTN; PAM sequence: CTA
aatattaatgagaaagttaa

SEQ ID NO: 42078 - DNA, 20 bp, Artificial Sequence
  Description of Artificial Sequence: Synthetic oligonucleotide
  Target: SCNA; (-) strand; PAM type: YTN; PAM sequence: CTA
acagtaatctaaatattaat

SEQ ID NO: 42079 - DNA, 20 bp, Artificial Sequence
  Description of Artificial Sequence: Synthetic oligonucleotide
  Target: SCNA; (-) strand; PAM type: YTN; PAM sequence: TTG
gatatcctaacagtaatcta

SEQ ID NO: 42080 - DNA, 20 bp, Artificial Sequence
  Description of Artificial Sequence: Synthetic oligonucleotide
  Target: SCNA; (-) strand; PAM type: YTN; PAM sequence: CTT
ggatatcctaacagtaatct

SEQ ID NO: 42081 - DNA, 20 bp, Artificial Sequence
  Description of Artificial Sequence: Synthetic oligonucleotide
  Target: SCNA; (-) strand; PAM type: YTN; PAM sequence: TTA
tacttggatatcctaacagt

SEQ ID NO: 42082 - DNA, 20 bp, Artificial Sequence
  Description of Artificial Sequence: Synthetic oligonucleotide
  Target: SCNA; (-) strand; PAM type: YTN; PAM sequence: CTT
atacttggatatcctaacag

SEQ ID NO: 42083 - DNA, 20 bp, Artificial Sequence
  Description of Artificial Sequence: Synthetic oligonucleotide
  Target: SCNA; (-) strand; PAM type: YTN; PAM sequence: TTC
ccttatacttggatatccta

SEQ ID NO: 42084 - DNA, 20 bp, Artificial Sequence
  Description of Artificial Sequence: Synthetic oligonucleotide
  Target: SCNA; (-) strand; PAM type: YTN; PAM sequence: TTT
cccttatacttggatatcct

SEQ ID NO: 42085 - DNA, 20 bp, Artificial Sequence
  Description of Artificial Sequence: Synthetic oligonucleotide
  Target: SCNA; (-) strand; PAM type: YTN; PAM sequence: TTA
tttcccttatacttggatat

SEQ ID NO: 42086 - DNA, 20 bp, Artificial Sequence
  Description of Artificial Sequence: Synthetic oligonucleotide
  Target: SCNA; (-) strand; PAM type: YTN; PAM sequence: CTT
atttcccttatacttggata

SEQ ID NO: 42087 - DNA, 20 bp, Artificial Sequence
  Description of Artificial Sequence: Synthetic oligonucleotide
  Target: SCNA; (-) strand; PAM type: YTN; PAM sequence: TTG
ccttatttcccttatacttg

SEQ ID NO: 42088 - DNA, 20 bp, Artificial Sequence
  Description of Artificial Sequence: Synthetic oligonucleotide
  Target: SCNA; (-) strand; PAM type: YTN; PAM sequence: TTT
gccttatttcccttatactt

SEQ ID NO: 42089 - DNA, 20 bp, Artificial Sequence
  Description of Artificial Sequence: Synthetic oligonucleotide
  Target: SCNA; (-) strand; PAM type: YTN; PAM sequence: TTC
aaaatcatggaaaaaaattt

SEQ ID NO: 42090 - DNA, 20 bp, Artificial Sequence
  Description of Artificial Sequence: Synthetic oligonucleotide
  Target: SCNA; (-) strand; PAM type: YTN; PAM sequence: TTT
caaaatcatggaaaaaaatt

SEQ ID NO: 42091 - DNA, 20 bp, Artificial Sequence
  Description of Artificial Sequence: Synthetic oligonucleotide
  Target: SCNA; (-) strand; PAM type: YTN; PAM sequence: CTG
tcagtttcaaaatcatggaa

SEQ ID NO: 42092 - DNA, 20 bp, Artificial Sequence
  Description of Artificial Sequence: Synthetic oligonucleotide
  Target: SCNA; (-) strand; PAM type: YTN; PAM sequence: CTC
tgtcagtttcaaaatcatgg

SEQ ID NO: 42093 - DNA, 20 bp, Artificial Sequence
  Description of Artificial Sequence: Synthetic oligonucleotide
  Target: SCNA; (-) strand; PAM type: YTN; PAM sequence: TTA
gaaaatcaaatctctgtcag

SEQ ID NO: 42094 - DNA, 20 bp, Artificial Sequence
  Description of Artificial Sequence: Synthetic oligonucleotide
  Target: SCNA; (-) strand; PAM type: YTN; PAM sequence: TTA
tattagaaaatcaaatctct

SEQ ID NO: 42095 - DNA, 20 bp, Artificial Sequence
  Description of Artificial Sequence: Synthetic oligonucleotide
  Target: SCNA; (-) strand; PAM type: YTN; PAM sequence: CTA
acaaattatattagaaaatc

SEQ ID NO: 42096 - DNA, 20 bp, Artificial Sequence
  Description of Artificial Sequence: Synthetic oligonucleotide
  Target: SCNA; (-) strand; PAM type: YTN; PAM sequence: TTC
taacaaattatattagaaaa

SEQ ID NO: 42097 - DNA, 20 bp, Artificial Sequence
  Description of Artificial Sequence: Synthetic oligonucleotide
  Target: SCNA; (-) strand; PAM type: YTN; PAM sequence: TTT
ctaacaaattatattagaaa

SEQ ID NO: 42098 - DNA, 20 bp, Artificial Sequence
  Description of Artificial Sequence: Synthetic oligonucleotide
  Target: SCNA; (-) strand; PAM type: YTN; PAM sequence: TTT
tctaacaaattatattagaa

SEQ ID NO: 42099 - DNA, 20 bp, Artificial Sequence
  Description of Artificial Sequence: Synthetic oligonucleotide
  Target: SCNA; (-) strand; PAM type: YTN; PAM sequence: CTG
gtccatatcaaaattttcta

SEQ ID NO: 42100 - DNA, 20 bp, Artificial Sequence
  Description of Artificial Sequence: Synthetic oligonucleotide
  Target: SCNA; (-) strand; PAM type: YTN; PAM sequence: TTG
tctggtccatatcaaaattt

SEQ ID NO: 42101 - DNA, 20 bp, Artificial Sequence
  Description of Artificial Sequence: Synthetic oligonucleotide
  Target: SCNA; (-) strand; PAM type: YTN; PAM sequence: CTT
gtctggtccatatcaaaatt

SEQ ID NO: 42102 - DNA, 20 bp, Artificial Sequence
  Description of Artificial Sequence: Synthetic oligonucleotide
  Target: SCNA; (-) strand; PAM type: YTN; PAM sequence: TTA
cttgtctggtccatatcaaa

SEQ ID NO: 42103 - DNA, 20 bp, Artificial Sequence
  Description of Artificial Sequence: Synthetic oligonucleotide
  Target: SCNA; (-) strand; PAM type: YTN; PAM sequence: TTT
acttgtctggtccatatcaa

SEQ ID NO: 42104 - DNA, 20 bp, Artificial Sequence
  Description of Artificial Sequence: Synthetic oligonucleotide
  Target: SCNA; (-) strand; PAM type: YTN; PAM sequence: CTG
ccatatttacttgtctggtc

SEQ ID NO: 42105 - DNA, 20 bp, Artificial Sequence
  Description of Artificial Sequence: Synthetic oligonucleotide
  Target: SCNA; (-) strand; PAM type: YTN; PAM sequence: TTG
atcatcaaacaacaaacagg

SEQ ID NO: 42106 - DNA, 20 bp, Artificial Sequence
  Description of Artificial Sequence: Synthetic oligonucleotide
  Target: SCNA; (-) strand; PAM type: YTN; PAM sequence: TTT
gatcatcaaacaacaaacag

SEQ ID NO: 42107 - DNA, 20 bp, Artificial Sequence
  Description of Artificial Sequence: Synthetic oligonucleotide
  Target: SCNA; (-) strand; PAM type: YTN; PAM sequence: TTT
tgatcatcaaacaacaaaca

SEQ ID NO: 42108 - DNA, 20 bp, Artificial Sequence
  Description of Artificial Sequence: Synthetic oligonucleotide
  Target: SCNA; (-) strand; PAM type: YTN; PAM sequence: TTT
ttgatcatcaaacaacaaac

SEQ ID NO: 42109 - DNA, 20 bp, Artificial Sequence
  Description of Artificial Sequence: Synthetic oligonucleotide
  Target: SCNA; (-) strand; PAM type: YTN; PAM sequence: CTT
tttgatcatcaaacaacaaa

SEQ ID NO: 42110 - DNA, 20 bp, Artificial Sequence
  Description of Artificial Sequence: Synthetic oligonucleotide
  Target: SCNA; (-) strand; PAM type: YTN; PAM sequence: CTC
ctttttgatcatcaaacaac

SEQ ID NO: 42111 - DNA, 20 bp, Artificial Sequence
  Description of Artificial Sequence: Synthetic oligonucleotide
  Target: SCNA; (-) strand; PAM type: YTN; PAM sequence: TTC
cgtcataacaactccttttt

SEQ ID NO: 42112 - DNA, 20 bp, Artificial Sequence
  Description of Artificial Sequence: Synthetic oligonucleotide
  Target: SCNA; (-) strand; PAM type: YTN; PAM sequence: TTA
gttccgtcataacaactcct

SEQ ID NO: 42113 - DNA, 20 bp, Artificial Sequence
  Description of Artificial Sequence: Synthetic oligonucleotide
  Target: SCNA; (-) strand; PAM type: YTN; PAM sequence: CTT
agttccgtcataacaactcc

SEQ ID NO: 42114 - DNA, 20 bp, Artificial Sequence
  Description of Artificial Sequence: Synthetic oligonucleotide
  Target: SCNA; (-) strand; PAM type: YTN; PAM sequence: TTC
agccaaataacatataaaca

SEQ ID NO: 42115 - DNA, 20 bp, Artificial Sequence
  Description of Artificial Sequence: Synthetic oligonucleotide
  Target: SCNA; (-) strand; PAM type: YTN; PAM sequence: TTC
aaagttcagccaaataacat

SEQ ID NO: 42116 - DNA, 20 bp, Artificial Sequence
  Description of Artificial Sequence: Synthetic oligonucleotide
  Target: SCNA; (-) strand; PAM type: YTN; PAM sequence: CTT
caaagttcagccaaataaca

SEQ ID NO: 42117 - DNA, 20 bp, Artificial Sequence
  Description of Artificial Sequence: Synthetic oligonucleotide
  Target: SCNA; (-) strand; PAM type: YTN; PAM sequence: CTG
tgtacatccttcaaagttca

SEQ ID NO: 42118 - DNA, 20 bp, Artificial Sequence
  Description of Artificial Sequence: Synthetic oligonucleotide
  Target: SCNA; (-) strand; PAM type: YTN; PAM sequence: CTA
cacatctgtgtacatccttc

SEQ ID NO: 42119 - DNA, 20 bp, Artificial Sequence
  Description of Artificial Sequence: Synthetic oligonucleotide
  Target: SCNA; (-) strand; PAM type: YTN; PAM sequence: CTA
acctacacatctgtgtacat

SEQ ID NO: 42120 - DNA, 20 bp, Artificial Sequence
  Description of Artificial Sequence: Synthetic oligonucleotide
  Target: SCNA; (-) strand; PAM type: YTN; PAM sequence: CTC
acctaacctacacatctgtg

SEQ ID NO: 42121 - DNA, 20 bp, Artificial Sequence
  Description of Artificial Sequence: Synthetic oligonucleotide
  Target: SCNA; (-) strand; PAM type: YTN; PAM sequence: CTG
gaaccatgcagacacacaca

SEQ ID NO: 42122 - DNA, 20 bp, Artificial Sequence
  Description of Artificial Sequence: Synthetic oligonucleotide
  Target: SCNA; (-) strand; PAM type: YTN; PAM sequence: CTC
acccaggctggaaccatgca

SEQ ID NO: 42123 - DNA, 20 bp, Artificial Sequence
  Description of Artificial Sequence: Synthetic oligonucleotide
  Target: SCNA; (-) strand; PAM type: YTN; PAM sequence: TTG
tacacacccactcacccagg

SEQ ID NO: 42124 - DNA, 20 bp, Artificial Sequence
  Description of Artificial Sequence: Synthetic oligonucleotide
  Target: SCNA; (-) strand; PAM type: YTN; PAM sequence: CTT
gtacacacccactcacccag

SEQ ID NO: 42125 - DNA, 20 bp, Artificial Sequence
  Description of Artificial Sequence: Synthetic oligonucleotide
  Target: SCNA; (-) strand; PAM type: YTN; PAM sequence: CTC
ttgtacacacccactcaccc

SEQ ID NO: 42126 - DNA, 20 bp, Artificial Sequence
  Description of Artificial Sequence: Synthetic oligonucleotide
  Target: SCNA; (-) strand; PAM type: YTN; PAM sequence: CTG
cagggtgctcttgtacacac

SEQ ID NO: 42127 - DNA, 20 bp, Artificial Sequence
  Description of Artificial Sequence: Synthetic oligonucleotide
  Target: SCNA; (-) strand; PAM type: YTN; PAM sequence: TTA
ctgcagggtgctcttgtaca

SEQ ID NO: 42128 - DNA, 20 bp, Artificial Sequence
  Description of Artificial Sequence: Synthetic oligonucleotide
  Target: SCNA; (-) strand; PAM type: YTN; PAM sequence: TTC
cattactgcagggtgctctt

SEQ ID NO: 42129 - DNA, 20 bp, Artificial Sequence
  Description of Artificial Sequence: Synthetic oligonucleotide
  Target: SCNA; (-) strand; PAM type: YTN; PAM sequence: CTG
ttccattactgcagggtgct

SEQ ID NO: 42130 - DNA, 20 bp, Artificial Sequence
  Description of Artificial Sequence: Synthetic oligonucleotide
  Target: SCNA; (-) strand; PAM type: YTN; PAM sequence: CTC
agggagcaatatgggaaccc

SEQ ID NO: 42131 - DNA, 20 bp, Artificial Sequence
  Description of Artificial Sequence: Synthetic oligonucleotide
  Target: SCNA; (-) strand; PAM type: YTN; PAM sequence: CTG
gcagctcagggagcaatatg

SEQ ID NO: 42132 - DNA, 20 bp, Artificial Sequence
  Description of Artificial Sequence: Synthetic oligonucleotide
  Target: SCNA; (-) strand; PAM type: YTN; PAM sequence: CTA
tcctggcagctcagggagca

SEQ ID NO: 42133 - DNA, 20 bp, Artificial Sequence
  Description of Artificial Sequence: Synthetic oligonucleotide
  Target: SCNA; (-) strand; PAM type: YTN; PAM sequence: TTG
gagcctatcctggcagctca

SEQ ID NO: 42134 - DNA, 20 bp, Artificial Sequence
  Description of Artificial Sequence: Synthetic oligonucleotide
  Target: SCNA; (-) strand; PAM type: YTN; PAM sequence: TTC
ggtggaggccgcaggtggtt

SEQ ID NO: 42135 - DNA, 20 bp, Artificial Sequence
  Description of Artificial Sequence: Synthetic oligonucleotide
  Target: SCNA; (-) strand; PAM type: YTN; PAM sequence: TTT
cggtggaggccgcaggtggt

SEQ ID NO: 42136 - DNA, 20 bp, Artificial Sequence
  Description of Artificial Sequence: Synthetic oligonucleotide
  Target: SCNA; (-) strand; PAM type: YTN; PAM sequence: TTA
tttcggtggaggccgcaggt

SEQ ID NO: 42137 - DNA, 20 bp, Artificial Sequence
  Description of Artificial Sequence: Synthetic oligonucleotide
  Target: SCNA; (-) strand; PAM type: YTN; PAM sequence: CTA
attatttcggtggaggccgc

SEQ ID NO: 42138 - DNA, 20 bp, Artificial Sequence
  Description of Artificial Sequence: Synthetic oligonucleotide
  Target: SCNA; (-) strand; PAM type: YTN; PAM sequence: TTA
cctaattatttcggtggagg

SEQ ID NO: 42139 - DNA, 20 bp, Artificial Sequence
  Description of Artificial Sequence: Synthetic oligonucleotide
  Target: SCNA; (-) strand; PAM type: YTN; PAM sequence: CTT
acctaattatttcggtggag

SEQ ID NO: 42140 - DNA, 20 bp, Artificial Sequence
  Description of Artificial Sequence: Synthetic oligonucleotide
  Target: SCNA; (-) strand; PAM type: YTN; PAM sequence: TTA
atacaaacaagtcaaataac

SEQ ID NO: 42141 - DNA, 20 bp, Artificial Sequence
  Description of Artificial Sequence: Synthetic oligonucleotide
  Target: SCNA; (-) strand; PAM type: YTN; PAM sequence: TTA
agaaagattaatacaaacaa

SEQ ID NO: 42142 - DNA, 20 bp, Artificial Sequence
  Description of Artificial Sequence: Synthetic oligonucleotide
  Target: SCNA; (-) strand; PAM type: YTN; PAM sequence: TTT
aagaaagattaatacaaaca

SEQ ID NO: 42143 - DNA, 20 bp, Artificial Sequence
  Description of Artificial Sequence: Synthetic oligonucleotide
  Target: SCNA; (-) strand; PAM type: YTN; PAM sequence: CTA
tatatacgtttaagaaagat

SEQ ID NO: 42144 - DNA, 20 bp, Artificial Sequence
  Description of Artificial Sequence: Synthetic oligonucleotide
  Target: SCNA; (-) strand; PAM type: YTN; PAM sequence: TTA
atgtgagctatatatacgtt

SEQ ID NO: 42145 - DNA, 20 bp, Artificial Sequence
  Description of Artificial Sequence: Synthetic oligonucleotide
  Target: SCNA; (-) strand; PAM type: YTN; PAM sequence: TTG
aaattaatgtgagctatata

SEQ ID NO: 42146 - DNA, 20 bp, Artificial Sequence
  Description of Artificial Sequence: Synthetic oligonucleotide
  Target: SCNA; (-) strand; PAM type: YTN; PAM sequence: TTA
aacattgaaattaatgtgag

SEQ ID NO: 42147 - DNA, 20 bp, Artificial Sequence
  Description of Artificial Sequence: Synthetic oligonucleotide
  Target: SCNA; (-) strand; PAM type: YTN; PAM sequence: CTG
acattaaacattgaaattaa

SEQ ID NO: 42148 - DNA, 20 bp, Artificial Sequence
  Description of Artificial Sequence: Synthetic oligonucleotide
  Target: SCNA; (-) strand; PAM type: YTN; PAM sequence: TTC
tgacattaaacattgaaatt

SEQ ID NO: 42149 - DNA, 20 bp, Artificial Sequence
  Description of Artificial Sequence: Synthetic oligonucleotide
  Target: SCNA; (-) strand; PAM type: YTN; PAM sequence: CTT
ctgacattaaacattgaaat

SEQ ID NO: 42150 - DNA, 20 bp, Artificial Sequence
  Description of Artificial Sequence: Synthetic oligonucleotide
  Target: SCNA; (-) strand; PAM type: YTN; PAM sequence: CTA
aataaagataaatcacttct

SEQ ID NO: 42151 - DNA, 20 bp, Artificial Sequence
  Description of Artificial Sequence: Synthetic oligonucleotide
  Target: SCNA; (-) strand; PAM type: YTN; PAM sequence: CTC
ctaaataaagataaatcact

SEQ ID NO: 42152 - DNA, 20 bp, Artificial Sequence
  Description of Artificial Sequence: Synthetic oligonucleotide
  Target: SCNA; (-) strand; PAM type: YTN; PAM sequence: CTG
gacacaaaaacaccatcaaa

SEQ ID NO: 42153 - DNA, 20 bp, Artificial Sequence
  Description of Artificial Sequence: Synthetic oligonucleotide
  Target: SCNA; (-) strand; PAM type: YTN; PAM sequence: TTC
tggacacaaaaacaccatca

SEQ ID NO: 42154 - DNA, 20 bp, Artificial Sequence
  Description of Artificial Sequence: Synthetic oligonucleotide
  Target: SCNA; (-) strand; PAM type: YTN; PAM sequence: TTT
ctggacacaaaaacaccatc

SEQ ID NO: 42155 - DNA, 20 bp, Artificial Sequence
  Description of Artificial Sequence: Synthetic oligonucleotide
  Target: SCNA; (-) strand; PAM type: YTN; PAM sequence: CTA
tggcaaatttctggacacaa

SEQ ID NO: 42156 - DNA, 20 bp, Artificial Sequence
  Description of Artificial Sequence: Synthetic oligonucleotide
  Target: SCNA; (-) strand; PAM type: YTN; PAM sequence: TTA
agtcctatggcaaatttctg

SEQ ID NO: 42157 - DNA, 20 bp, Artificial Sequence
  Description of Artificial Sequence: Synthetic oligonucleotide
  Target: SCNA; (-) strand; PAM type: YTN; PAM sequence: TTG
atataagcaagaattaagtc

SEQ ID NO: 42158 - DNA, 20 bp, Artificial Sequence
  Description of Artificial Sequence: Synthetic oligonucleotide
  Target: SCNA; (-) strand; PAM type: YTN; PAM sequence: CTA
attgatataagcaagaatta

SEQ ID NO: 42159 - DNA, 20 bp, Artificial Sequence
  Description of Artificial Sequence: Synthetic oligonucleotide
  Target: SCNA; (-) strand; PAM type: YTN; PAM sequence: TTG
gctaattgatataagcaaga

SEQ ID NO: 42160 - DNA, 20 bp, Artificial Sequence
  Description of Artificial Sequence: Synthetic oligonucleotide
  Target: SCNA; (-) strand; PAM type: YTN; PAM sequence: TTA
ccattggctaattgatataa

SEQ ID NO: 42161 - DNA, 20 bp, Artificial Sequence
  Description of Artificial Sequence: Synthetic oligonucleotide
  Target: SCNA; (-) strand; PAM type: YTN; PAM sequence: TTT
accattggctaattgatata

SEQ ID NO: 42162 - DNA, 20 bp, Artificial Sequence
  Description of Artificial Sequence: Synthetic oligonucleotide
  Target: SCNA; (-) strand; PAM type: YTN; PAM sequence: TTT
taccattggctaattgatat

SEQ ID NO: 42163 - DNA, 20 bp, Artificial Sequence
  Description of Artificial Sequence: Synthetic oligonucleotide
  Target: SCNA; (-) strand; PAM type: YTN; PAM sequence: TTG
aagcaaaacaacatataaca

SEQ ID NO: 42164 - DNA, 20 bp, Artificial Sequence
  Description of Artificial Sequence: Synthetic oligonucleotide
  Target: SCNA; (-) strand; PAM type: YTN; PAM sequence: CTT
gaagcaaaacaacatataac

SEQ ID NO: 42165 - DNA, 20 bp, Artificial Sequence
  Description of Artificial Sequence: Synthetic oligonucleotide
  Target: SCNA; (-) strand; PAM type: YTN; PAM sequence: CTG
tgacttgaagcaaaacaaca

SEQ ID NO: 42166 - DNA, 20 bp, Artificial Sequence
  Description of Artificial Sequence: Synthetic oligonucleotide
  Target: SCNA; (-) strand; PAM type: YTN; PAM sequence: CTG
gaaactgtgacttgaagcaa

SEQ ID NO: 42167 - DNA, 20 bp, Artificial Sequence
  Description of Artificial Sequence: Synthetic oligonucleotide
  Target: SCNA; (-) strand; PAM type: YTN; PAM sequence: TTC
tggaaactgtgacttgaagc

SEQ ID NO: 42168 - DNA, 20 bp, Artificial Sequence
  Description of Artificial Sequence: Synthetic oligonucleotide
  Target: SCNA; (-) strand; PAM type: YTN; PAM sequence: TTT
ctggaaactgtgacttgaag

SEQ ID NO: 42169 - DNA, 20 bp, Artificial Sequence
  Description of Artificial Sequence: Synthetic oligonucleotide
  Target: SCNA; (-) strand; PAM type: YTN; PAM sequence: TTC
atcaatagtttctggaaact

SEQ ID NO: 42170 - DNA, 20 bp, Artificial Sequence
  Description of Artificial Sequence: Synthetic oligonucleotide
  Target: SCNA; (-) strand; PAM type: YTN; PAM sequence: CTT
catcaatagtttctggaaac

SEQ ID NO: 42171 - DNA, 20 bp, Artificial Sequence
  Description of Artificial Sequence: Synthetic oligonucleotide
  Target: SCNA; (-) strand; PAM type: YTN; PAM sequence: TTA
acttcatcaatagtttctgg

SEQ ID NO: 42172 - DNA, 20 bp, Artificial Sequence
  Description of Artificial Sequence: Synthetic oligonucleotide
  Target: SCNA; (-) strand; PAM type: YTN; PAM sequence: CTT
aacttcatcaatagtttctg

SEQ ID NO: 42173 - DNA, 20 bp, Artificial Sequence
  Description of Artificial Sequence: Synthetic oligonucleotide
  Target: SCNA; (-) strand; PAM type: YTN; PAM sequence: CTC
acttaacttcatcaatagtt

SEQ ID NO: 42174 - DNA, 20 bp, Artificial Sequence
  Description of Artificial Sequence: Synthetic oligonucleotide
  Target: SCNA; (-) strand; PAM type: YTN; PAM sequence: TTC
catcagagggcacataatac

SEQ ID NO: 42175 - DNA, 20 bp, Artificial Sequence
  Description of Artificial Sequence: Synthetic oligonucleotide
  Target: SCNA; (-) strand; PAM type: YTN; PAM sequence: CTT
ccatcagagggcacataata

SEQ ID NO: 42176 - DNA, 20 bp, Artificial Sequence
  Description of Artificial Sequence: Synthetic oligonucleotide
  Target: SCNA; (-) strand; PAM type: YTN; PAM sequence: TTA
agatggtgatgtgtatgtac

SEQ ID NO: 42177 - DNA, 20 bp, Artificial Sequence
  Description of Artificial Sequence: Synthetic oligonucleotide
  Target: SCNA; (-) strand; PAM type: YTN; PAM sequence: TTT
aagatggtgatgtgtatgta

SEQ ID NO: 42178 - DNA, 20 bp, Artificial Sequence
  Description of Artificial Sequence: Synthetic oligonucleotide
  Target: SCNA; (-) strand; PAM type: YTN; PAM sequence: TTA
gtttaagatggtgatgtgta

SEQ ID NO: 42179 - DNA, 20 bp, Artificial Sequence
  Description of Artificial Sequence: Synthetic oligonucleotide
  Target: SCNA; (-) strand; PAM type: YTN; PAM sequence: CTT
agtttaagatggtgatgtgt

SEQ ID NO: 42180 - DNA, 20 bp, Artificial Sequence
  Description of Artificial Sequence: Synthetic oligonucleotide
  Target: SCNA; (-) strand; PAM type: YTN; PAM sequence: CTA
gtacagtcttagtttaagat

SEQ ID NO: 42181 - DNA, 20 bp, Artificial Sequence
  Description of Artificial Sequence: Synthetic oligonucleotide
  Target: SCNA; (-) strand; PAM type: YTN; PAM sequence: TTA
aactagtacagtcttagttt

SEQ ID NO: 42182 - DNA, 20 bp, Artificial Sequence
  Description of Artificial Sequence: Synthetic oligonucleotide
  Target: SCNA; (-) strand; PAM type: YTN; PAM sequence: CTT
aaactagtacagtcttagtt

SEQ ID NO: 42183 - DNA, 20 bp, Artificial Sequence
  Description of Artificial Sequence: Synthetic oligonucleotide
  Target: SCNA; (-) strand; PAM type: YTN; PAM sequence: TTG
gatcagtgaacaatagccca

SEQ ID NO: 42184 - DNA, 20 bp, Artificial Sequence
  Description of Artificial Sequence: Synthetic oligonucleotide
  Target: SCNA; (-) strand; PAM type: YTN; PAM sequence: TTA
ttggatcagtgaacaatagc

SEQ ID NO: 42185 - DNA, 20 bp, Artificial Sequence
  Description of Artificial Sequence: Synthetic oligonucleotide
  Target: SCNA; (-) strand; PAM type: YTN; PAM sequence: TTG
atgaagttattggatcagtg

SEQ ID NO: 42186 - DNA, 20 bp, Artificial Sequence
  Description of Artificial Sequence: Synthetic oligonucleotide
  Target: SCNA; (-) strand; PAM type: YTN; PAM sequence: CTT
gatgaagttattggatcagt

SEQ ID NO: 42187 - DNA, 20 bp, Artificial Sequence
  Description of Artificial Sequence: Synthetic oligonucleotide
  Target: SCNA; (-) strand; PAM type: YTN; PAM sequence: TTC
ccacttgatgaagttattgg

SEQ ID NO: 42188 - DNA, 20 bp, Artificial Sequence
  Description of Artificial Sequence: Synthetic oligonucleotide
  Target: SCNA; (-) strand; PAM type: YTN; PAM sequence: TTG
ttcccacttgatgaagttat

SEQ ID NO: 42189 - DNA, 20 bp, Artificial Sequence
  Description of Artificial Sequence: Synthetic oligonucleotide
  Target: SCNA; (-) strand; PAM type: YTN; PAM sequence: CTT
gttcccacttgatgaagtta

SEQ ID NO: 42190 - DNA, 20 bp, Artificial Sequence
  Description of Artificial Sequence: Synthetic oligonucleotide
  Target: SCNA; (-) strand; PAM type: YTN; PAM sequence: CTA
gtgtagcttgttcccacttg

SEQ ID NO: 42191 - DNA, 20 bp, Artificial Sequence
  Description of Artificial Sequence: Synthetic oligonucleotide
  Target: SCNA; (-) strand; PAM type: YTN; PAM sequence: CTG
tcatccctagtgtagcttgt

SEQ ID NO: 42192 - DNA, 20 bp, Artificial Sequence
  Description of Artificial Sequence: Synthetic oligonucleotide
  Target: SCNA; (-) strand; PAM type: YTN; PAM sequence: TTG
tgctgtcatccctagtgtag

SEQ ID NO: 42193 - DNA, 20 bp, Artificial Sequence
  Description of Artificial Sequence: Synthetic oligonucleotide
  Target: SCNA; (-) strand; PAM type: YTN; PAM sequence: CTA
gaataggattgtgctgtcat

SEQ ID NO: 42194 - DNA, 20 bp, Artificial Sequence
  Description of Artificial Sequence: Synthetic oligonucleotide
  Target: SCNA; (-) strand; PAM type: YTN; PAM sequence: CTC
tagaataggattgtgctgtc

SEQ ID NO: 42195 - DNA, 20 bp, Artificial Sequence
  Description of Artificial Sequence: Synthetic oligonucleotide
  Target: SCNA; (-) strand; PAM type: YTN; PAM sequence: TTG
gactctagaataggattgtg

SEQ ID NO: 42196 - DNA, 20 bp, Artificial Sequence
  Description of Artificial Sequence: Synthetic oligonucleotide
  Target: SCNA; (-) strand; PAM type: YTN; PAM sequence: TTT
ggactctagaataggattgt

SEQ ID NO: 42197 - DNA, 20 bp, Artificial Sequence
  Description of Artificial Sequence: Synthetic oligonucleotide
  Target: SCNA; (-) strand; PAM type: YTN; PAM sequence: TTG
tcgatttggactctagaata

SEQ ID NO: 42198 - DNA, 20 bp, Artificial Sequence
  Description of Artificial Sequence: Synthetic oligonucleotide
  Target: SCNA; (-) strand; PAM type: YTN; PAM sequence: CTA
ttgtcgatttggactctaga

SEQ ID NO: 42199 - DNA, 20 bp, Artificial Sequence
  Description of Artificial Sequence: Synthetic oligonucleotide
  Target: SCNA; (-) strand; PAM type: YTN; PAM sequence: CTG
atccaacatcgaggtcgtaa

SEQ ID NO: 42200 - DNA, 20 bp, Artificial Sequence
  Description of Artificial Sequence: Synthetic oligonucleotide
  Target: SCNA; (-) strand; PAM type: YTN; PAM sequence: TTA
ggatgacctgatccaacatc

SEQ ID NO: 42201 - DNA, 20 bp, Artificial Sequence
  Description of Artificial Sequence: Synthetic oligonucleotide
  Target: SCNA; (-) strand; PAM type: YTN; PAM sequence: TTA
caccattaggatgacctgat

SEQ ID NO: 42202 - DNA, 20 bp, Artificial Sequence
  Description of Artificial Sequence: Synthetic oligonucleotide
  Target: SCNA; (-) strand; PAM type: YTN; PAM sequence: TTA
atagcagttacaccattagg

SEQ ID NO: 42203 - DNA, 20 bp, Artificial Sequence
  Description of Artificial Sequence: Synthetic oligonucleotide
  Target: SCNA; (-) strand; PAM type: YTN; PAM sequence: TTT
aatagcagttacaccattag

SEQ ID NO: 42204 - DNA, 20 bp, Artificial Sequence
  Description of Artificial Sequence: Synthetic oligonucleotide
  Target: SCNA; (-) strand; PAM type: YTN; PAM sequence: CTT
taatagcagttacaccatta

SEQ ID NO: 42205 - DNA, 20 bp, Artificial Sequence
  Description of Artificial Sequence: Synthetic oligonucleotide
  Target: SCNA; (-) strand; PAM type: YTN; PAM sequence: TTG
tcgaacaaacgaacctttaa

SEQ ID NO: 42206 - DNA, 20 bp, Artificial Sequence
  Description of Artificial Sequence: Synthetic oligonucleotide
  Target: SCNA; (-) strand; PAM type: YTN; PAM sequence: TTC
aattgtcgaacaaacgaacc

SEQ ID NO: 42207 - DNA, 20 bp, Artificial Sequence
  Description of Artificial Sequence: Synthetic oligonucleotide
  Target: SCNA; (-) strand; PAM type: YTN; PAM sequence: CTT
caattgtcgaacaaacgaac

SEQ ID NO: 42208 - DNA, 20 bp, Artificial Sequence
  Description of Artificial Sequence: Synthetic oligonucleotide
  Target: SCNA; (-) strand; PAM type: YTN; PAM sequence: CTC
accgatcatgtaggacttca

SEQ ID NO: 42209 - DNA, 20 bp, Artificial Sequence
  Description of Artificial Sequence: Synthetic oligonucleotide
  Target: SCNA; (-) strand; PAM type: YTN; PAM sequence: CTG
acctcaccgatcatgtagga

SEQ ID NO: 42210 - DNA, 20 bp, Artificial Sequence
  Description of Artificial Sequence: Synthetic oligonucleotide
  Target: SCNA; (-) strand; PAM type: YTN; PAM sequence: CTC
ctgacctcaccgatcatgta

SEQ ID NO: 42211 - DNA, 20 bp, Artificial Sequence
  Description of Artificial Sequence: Synthetic oligonucleotide
  Target: SCNA; (-) strand; PAM type: YTN; PAM sequence: CTA
tagatctcctgacctcaccg

SEQ ID NO: 42212 - DNA, 20 bp, Artificial Sequence
  Description of Artificial Sequence: Synthetic oligonucleotide
  Target: SCNA; (-) strand; PAM type: YTN; PAM sequence: TTG
gccaggatgctatagatctc

SEQ ID NO: 42213 - DNA, 20 bp, Artificial Sequence
  Description of Artificial Sequence: Synthetic oligonucleotide
  Target: SCNA; (-) strand; PAM type: YTN; PAM sequence: TTC
accatgttggccaggatgct

SEQ ID NO: 42214 - DNA, 20 bp, Artificial Sequence
  Description of Artificial Sequence: Synthetic oligonucleotide
  Target: SCNA; (-) strand; PAM type: YTN; PAM sequence: TTT
caccatgttggccaggatgc

SEQ ID NO: 42215 - DNA, 20 bp, Artificial Sequence
  Description of Artificial Sequence: Synthetic oligonucleotide
  Target: SCNA; (-) strand; PAM type: YTN; PAM sequence: TTA
gtagagatggggtttcacca

SEQ ID NO: 42216 - DNA, 20 bp, Artificial Sequence
  Description of Artificial Sequence: Synthetic oligonucleotide
  Target: SCNA; (-) strand; PAM type: YTN; PAM sequence: TTT
agtagagatggggtttcacc

SEQ ID NO: 42217 - DNA, 20 bp, Artificial Sequence
  Description of Artificial Sequence: Synthetic oligonucleotide
  Target: SCNA; (-) strand; PAM type: YTN; PAM sequence: TTT
tagtagagatggggtttcac

SEQ ID NO: 42218 - DNA, 20 bp, Artificial Sequence
  Description of Artificial Sequence: Synthetic oligonucleotide
  Target: SCNA; (-) strand; PAM type: YTN; PAM sequence: TTG
tattttagtagagatggggt

SEQ ID NO: 42219 - DNA, 20 bp, Artificial Sequence
  Description of Artificial Sequence: Synthetic oligonucleotide
  Target: SCNA; (-) strand; PAM type: YTN; PAM sequence: TTT
gtattttagtagagatgggg

SEQ ID NO: 42220 - DNA, 20 bp, Artificial Sequence
  Description of Artificial Sequence: Synthetic oligonucleotide
  Target: SCNA; (-) strand; PAM type: YTN; PAM sequence: TTT
tgtattttagtagagatggg

SEQ ID NO: 42221 - DNA, 20 bp, Artificial Sequence
  Description of Artificial Sequence: Synthetic oligonucleotide
  Target: SCNA; (-) strand; PAM type: YTN; PAM sequence: TTT
ttgtattttagtagagatgg

SEQ ID NO: 42222 - DNA, 20 bp, Artificial Sequence
  Description of Artificial Sequence: Synthetic oligonucleotide
  Target: SCNA; (-) strand; PAM type: YTN; PAM sequence: CTT
tttgtattttagtagagatg

SEQ ID NO: 42223 - DNA, 20 bp, Artificial Sequence
  Description of Artificial Sequence: Synthetic oligonucleotide
  Target: SCNA; (-) strand; PAM type: YTN; PAM sequence: CTA
actttttgtattttagtaga

SEQ ID NO: 42224 - DNA, 20 bp, Artificial Sequence
  Description of Artificial Sequence: Synthetic oligonucleotide
  Target: SCNA; (-) strand; PAM type: YTN; PAM sequence: CTA
taggagaaccaccacgcccg

SEQ ID NO: 42225 - DNA, 20 bp, Artificial Sequence
  Description of Artificial Sequence: Synthetic oligonucleotide
  Target: SCNA; (-) strand; PAM type: YTN; PAM sequence: CTG
ggactataggagaaccacca

SEQ ID NO: 42226 - DNA, 20 bp, Artificial Sequence
  Description of Artificial Sequence: Synthetic oligonucleotide
  Target: SCNA; (-) strand; PAM type: YTN; PAM sequence: CTC
ccgagtagctgggactatag

SEQ ID NO: 42227 - DNA, 20 bp, Artificial Sequence
  Description of Artificial Sequence: Synthetic oligonucleotide
  Target: SCNA; (-) strand; PAM type: YTN; PAM sequence: CTC
agtctcccgagtagctggga

SEQ ID NO: 42228 - DNA, 20 bp, Artificial Sequence
  Description of Artificial Sequence: Synthetic oligonucleotide
  Target: SCNA; (-) strand; PAM type: YTN; PAM sequence: CTG
gctcagtctcccgagtagct

SEQ ID NO: 42229 - DNA, 20 bp, Artificial Sequence
  Description of Artificial Sequence: Synthetic oligonucleotide
  Target: SCNA; (-) strand; PAM type: YTN; PAM sequence: TTC
ccctggctcagtctcccgag

SEQ ID NO: 42230 - DNA, 20 bp, Artificial Sequence
  Description of Artificial Sequence: Synthetic oligonucleotide
  Target: SCNA; (-) strand; PAM type: YTN; PAM sequence: TTC
aagtgattcccctggctcag

SEQ ID NO: 42231 - DNA, 20 bp, Artificial Sequence
  Description of Artificial Sequence: Synthetic oligonucleotide
  Target: SCNA; (-) strand; PAM type: YTN; PAM sequence: CTC
ccgggttcaagtgattcccc

SEQ ID NO: 42232 - DNA, 20 bp, Artificial Sequence
  Description of Artificial Sequence: Synthetic oligonucleotide
  Target: SCNA; (-) strand; PAM type: YTN; PAM sequence: CTC
cacctcccgggttcaagtga

SEQ ID NO: 42233 - DNA, 20 bp, Artificial Sequence
  Description of Artificial Sequence: Synthetic oligonucleotide
  Target: SCNA; (-) strand; PAM type: YTN; PAM sequence: CTG
caatctccacctcccgggtt

SEQ ID NO: 42234 - DNA, 20 bp, Artificial Sequence
  Description of Artificial Sequence: Synthetic oligonucleotide
  Target: SCNA; (-) strand; PAM type: YTN; PAM sequence: CTC
actgcaatctccacctcccg

SEQ ID NO: 42235 - DNA, 20 bp, Artificial Sequence
  Description of Artificial Sequence: Synthetic oligonucleotide
  Target: SCNA; (-) strand; PAM type: YTN; PAM sequence: CTG
ggctcactgcaatctccacc

SEQ ID NO: 42236 - DNA, 20 bp, Artificial Sequence
  Description of Artificial Sequence: Synthetic oligonucleotide
  Target: SCNA; (-) strand; PAM type: YTN; PAM sequence: CTG
gagtgcaatggtgtgatctg

SEQ ID NO: 42237 - DNA, 20 bp, Artificial Sequence
  Description of Artificial Sequence: Synthetic oligonucleotide
  Target: SCNA; (-) strand; PAM type: YTN; PAM sequence: CTC
cgtcaccaggctggagtgca

SEQ ID NO: 42238 - DNA, 20 bp, Artificial Sequence
  Description of Artificial Sequence: Synthetic oligonucleotide
  Target: SCNA; (-) strand; PAM type: YTN; PAM sequence: CTC
actccgtcaccaggctggag

SEQ ID NO: 42239 - DNA, 20 bp, Artificial Sequence
  Description of Artificial Sequence: Synthetic oligonucleotide
  Target: SCNA; (-) strand; PAM type: YTN; PAM sequence: TTG
agacggagtctcactccgtc

SEQ ID NO: 42240 - DNA, 20 bp, Artificial Sequence
  Description of Artificial Sequence: Synthetic oligonucleotide
  Target: SCNA; (-) strand; PAM type: YTN; PAM sequence: TTT
gagacggagtctcactccgt

SEQ ID NO: 42241 - DNA, 20 bp, Artificial Sequence
  Description of Artificial Sequence: Synthetic oligonucleotide
  Target: SCNA; (-) strand; PAM type: YTN; PAM sequence: TTT
tgagacggagtctcactccg

SEQ ID NO: 42242 - DNA, 20 bp, Artificial Sequence
  Description of Artificial Sequence: Synthetic oligonucleotide
  Target: SCNA; (-) strand; PAM type: YTN; PAM sequence: TTA
ttttgagacggagtctcact

SEQ ID NO: 42243 - DNA, 20 bp, Artificial Sequence
  Description of Artificial Sequence: Synthetic oligonucleotide
  Target: SCNA; (-) strand; PAM type: YTN; PAM sequence: TTT
attttgagacggagtctcac

SEQ ID NO: 42244 - DNA, 20 bp, Artificial Sequence
  Description of Artificial Sequence: Synthetic oligonucleotide
  Target: SCNA; (-) strand; PAM type: YTN; PAM sequence: TTA
tttattttgagacggagtct

SEQ ID NO: 42245 - DNA, 20 bp, Artificial Sequence
  Description of Artificial Sequence: Synthetic oligonucleotide
  Target: SCNA; (-) strand; PAM type: YTN; PAM sequence: TTT
atttattttgagacggagtc

SEQ ID NO: 42246 - DNA, 20 bp, Artificial Sequence
  Description of Artificial Sequence: Synthetic oligonucleotide
  Target: SCNA; (-) strand; PAM type: YTN; PAM sequence: TTA
tttatttattttgagacgga

SEQ ID NO: 42247 - DNA, 20 bp, Artificial Sequence
  Description of Artificial Sequence: Synthetic oligonucleotide
  Target: SCNA; (-) strand; PAM type: YTN; PAM sequence: TTT
atttatttattttgagacgg

SEQ ID NO: 42248 - DNA, 20 bp, Artificial Sequence
  Description of Artificial Sequence: Synthetic oligonucleotide
  Target: SCNA; (-) strand; PAM type: YTN; PAM sequence: TTA
tatatttatttatttatttt

SEQ ID NO: 42249 - DNA, 20 bp, Artificial Sequence
  Description of Artificial Sequence: Synthetic oligonucleotide
  Target: SCNA; (-) strand; PAM type: YTN; PAM sequence: TTT
atatatttatttatttattt

SEQ ID NO: 42250 - DNA, 20 bp, Artificial Sequence
  Description of Artificial Sequence: Synthetic oligonucleotide
  Target: SCNA; (-) strand; PAM type: YTN; PAM sequence: CTA
tttatatatttatttattta

SEQ ID NO: 42251 - DNA, 20 bp, Artificial Sequence
  Description of Artificial Sequence: Synthetic oligonucleotide
  Target: SCNA; (-) strand; PAM type: YTN; PAM sequence: TTC
tatttatatatttatttatt

SEQ ID NO: 42252 - DNA, 20 bp, Artificial Sequence
  Description of Artificial Sequence: Synthetic oligonucleotide
  Target: SCNA; (-) strand; PAM type: YTN; PAM sequence: TTT
ctatttatatatttatttat

SEQ ID NO: 42253 - DNA, 20 bp, Artificial Sequence
  Description of Artificial Sequence: Synthetic oligonucleotide
  Target: SCNA; (-) strand; PAM type: YTN; PAM sequence: TTT
tctatttatatatttattta

SEQ ID NO: 42254 - DNA, 20 bp, Artificial Sequence
  Description of Artificial Sequence: Synthetic oligonucleotide
  Target: SCNA; (-) strand; PAM type: YTN; PAM sequence: TTT
ttctatttatatatttattt

SEQ ID NO: 42255 - DNA, 20 bp, Artificial Sequence
  Description of Artificial Sequence: Synthetic oligonucleotide
  Target: SCNA; (-) strand; PAM type: YTN; PAM sequence: CTT
tttctatttatatatttatt

SEQ ID NO: 42256 - DNA, 20 bp, Artificial Sequence
  Description of Artificial Sequence: Synthetic oligonucleotide
  Target: SCNA; (-) strand; PAM type: YTN; PAM sequence: TTC
tttttctatttatatattta

SEQ ID NO: 42257 - DNA, 20 bp, Artificial Sequence
  Description of Artificial Sequence: Synthetic oligonucleotide
  Target: SCNA; (-) strand; PAM type: YTN; PAM sequence: TTT
ctttttctatttatatattt

SEQ ID NO: 42258 - DNA, 20 bp, Artificial Sequence
  Description of Artificial Sequence: Synthetic oligonucleotide
  Target: SCNA; (-) strand; PAM type: YTN; PAM sequence: TTT
tctttttctatttatatatt

SEQ ID NO: 42259 - DNA, 20 bp, Artificial Sequence
  Description of Artificial Sequence: Synthetic oligonucleotide
  Target: SCNA; (-) strand; PAM type: YTN; PAM sequence: TTG
ttttctttttctatttatat

SEQ ID NO: 42260 - DNA, 20 bp, Artificial Sequence
  Description of Artificial Sequence: Synthetic oligonucleotide
  Target: SCNA; (-) strand; PAM type: YTN; PAM sequence: TTT
gttttctttttctatttata

SEQ ID NO: 42261 - DNA, 20 bp, Artificial Sequence
  Description of Artificial Sequence: Synthetic oligonucleotide
  Target: SCNA; (-) strand; PAM type: YTN; PAM sequence: TTT
tgttttctttttctatttat

SEQ ID NO: 42262 - DNA, 20 bp, Artificial Sequence
  Description of Artificial Sequence: Synthetic oligonucleotide
  Target: SCNA; (-) strand; PAM type: YTN; PAM sequence: TTT
ttgttttctttttctattta

SEQ ID NO: 42263 - DNA, 20 bp, Artificial Sequence
  Description of Artificial Sequence: Synthetic oligonucleotide
  Target: SCNA; (-) strand; PAM type: YTN; PAM sequence: TTT
tttgttttctttttctattt

SEQ ID NO: 42264 - DNA, 20 bp, Artificial Sequence
  Description of Artificial Sequence: Synthetic oligonucleotide
  Target: SCNA; (-) strand; PAM type: YTN; PAM sequence: TTT
ttttgttttctttttctatt

SEQ ID NO: 42265 - DNA, 20 bp, Artificial Sequence
  Description of Artificial Sequence: Synthetic oligonucleotide
  Target: SCNA; (-) strand; PAM type: YTN; PAM sequence: CTT
tttttgttttctttttctat

SEQ ID NO: 42266 - DNA, 20 bp, Artificial Sequence
  Description of Artificial Sequence: Synthetic oligonucleotide
  Target: SCNA; (-) strand; PAM type: YTN; PAM sequence: TTC
tttttttgttttctttttct

SEQ ID NO: 42267 - DNA, 20 bp, Artificial Sequence
  Description of Artificial Sequence: Synthetic oligonucleotide
  Target: SCNA; (-) strand; PAM type: YTN; PAM sequence: TTT
ctttttttgttttctttttc

SEQ ID NO: 42268 - DNA, 20 bp, Artificial Sequence
  Description of Artificial Sequence: Synthetic oligonucleotide
  Target: SCNA; (-) strand; PAM type: YTN; PAM sequence: TTT
tctttttttgttttcttttt

SEQ ID NO: 42269 - DNA, 20 bp, Artificial Sequence
  Description of Artificial Sequence: Synthetic oligonucleotide
  Target: SCNA; (-) strand; PAM type: YTN; PAM sequence: CTT
ttctttttttgttttctttt

SEQ ID NO: 42270 - DNA, 20 bp, Artificial Sequence
  Description of Artificial Sequence: Synthetic oligonucleotide
  Target: SCNA; (-) strand; PAM type: YTN; PAM sequence: TTC
ggatcacgtagggcttttct

SEQ ID NO: 42271 - DNA, 20 bp, Artificial Sequence
  Description of Artificial Sequence: Synthetic oligonucleotide
  Target: SCNA; (-) strand; PAM type: YTN; PAM sequence: TTC
aaattcggatcacgtagggc

SEQ ID NO: 42272 - DNA, 20 bp, Artificial Sequence
  Description of Artificial Sequence: Synthetic oligonucleotide
  Target: SCNA; (-) strand; PAM type: YTN; PAM sequence: TTA
atcaaattcaaattcggatc

SEQ ID NO: 42273 - DNA, 20 bp, Artificial Sequence
  Description of Artificial Sequence: Synthetic oligonucleotide
  Target: SCNA; (-) strand; PAM type: YTN; PAM sequence: TTA
aatgttaatcaaattcaaat

SEQ ID NO: 42274 - DNA, 20 bp, Artificial Sequence
  Description of Artificial Sequence: Synthetic oligonucleotide
  Target: SCNA; (-) strand; PAM type: YTN; PAM sequence: TTG
tcagtgatagttaaatgtta

SEQ ID NO: 42275 - DNA, 20 bp, Artificial Sequence
  Description of Artificial Sequence: Synthetic oligonucleotide
  Target: SCNA; (-) strand; PAM type: YTN; PAM sequence: CTG
taagttgtcagtgatagtta

SEQ ID NO: 42276 - DNA, 20 bp, Artificial Sequence
  Description of Artificial Sequence: Synthetic oligonucleotide
  Target: SCNA; (-) strand; PAM type: YTN; PAM sequence: TTG
ctgtaagttgtcagtgatag

SEQ ID NO: 42277 - DNA, 20 bp, Artificial Sequence
  Description of Artificial Sequence: Synthetic oligonucleotide
  Target: SCNA; (-) strand; PAM type: YTN; PAM sequence: TTT
gctgtaagttgtcagtgata

SEQ ID NO: 42278 - DNA, 20 bp, Artificial Sequence
  Description of Artificial Sequence: Synthetic oligonucleotide
  Target: SCNA; (-) strand; PAM type: YTN; PAM sequence: TTA
tatttgctgtaagttgtcag

SEQ ID NO: 42279 - DNA, 20 bp, Artificial Sequence
  Description of Artificial Sequence: Synthetic oligonucleotide
  Target: SCNA; (-) strand; PAM type: YTN; PAM sequence: CTT
atatttgctgtaagttgtca

SEQ ID NO: 42280 - DNA, 20 bp, Artificial Sequence
  Description of Artificial Sequence: Synthetic oligonucleotide
  Target: SCNA; (-) strand; PAM type: YTN; PAM sequence: TTC
accaccttatatttgctgta

SEQ ID NO: 42281 - DNA, 20 bp, Artificial Sequence
  Description of Artificial Sequence: Synthetic oligonucleotide
  Target: SCNA; (-) strand; PAM type: YTN; PAM sequence: TTT
caccaccttatatttgctgt

SEQ ID NO: 42282 - DNA, 20 bp, Artificial Sequence
  Description of Artificial Sequence: Synthetic oligonucleotide
  Target: SCNA; (-) strand; PAM type: YTN; PAM sequence: TTT
tcaccaccttatatttgctg

SEQ ID NO: 42283 - DNA, 20 bp, Artificial Sequence
  Description of Artificial Sequence: Synthetic oligonucleotide
  Target: SCNA; (-) strand; PAM type: YTN; PAM sequence: TTT
ttcaccaccttatatttgct

SEQ ID NO: 42284 - DNA, 20 bp, Artificial Sequence
  Description of Artificial Sequence: Synthetic oligonucleotide
  Target: SCNA; (-) strand; PAM type: YTN; PAM sequence: TTG
taagcaatgaacatgttttt

SEQ ID NO: 42285 - DNA, 20 bp, Artificial Sequence
  Description of Artificial Sequence: Synthetic oligonucleotide
  Target: SCNA; (-) strand; PAM type: YTN; PAM sequence: CTG
ttgtaagcaatgaacatgtt

SEQ ID NO: 42286 - DNA, 20 bp, Artificial Sequence
  Description of Artificial Sequence: Synthetic oligonucleotide
  Target: SCNA; (-) strand; PAM type: YTN; PAM sequence: TTG
tagccactgttgtaagcaat

SEQ ID NO: 42287 - DNA, 20 bp, Artificial Sequence
  Description of Artificial Sequence: Synthetic oligonucleotide
  Target: SCNA; (-) strand; PAM type: YTN; PAM sequence: CTG
attgtagccactgttgtaag

SEQ ID NO: 42288 - DNA, 20 bp, Artificial Sequence
  Description of Artificial Sequence: Synthetic oligonucleotide
  Target: SCNA; (-) strand; PAM type: YTN; PAM sequence: TTG
ctgattgtagccactgttgt

SEQ ID NO: 42289 - DNA, 20 bp, Artificial Sequence
  Description of Artificial Sequence: Synthetic oligonucleotide
  Target: SCNA; (-) strand; PAM type: YTN; PAM sequence: TTT
gctgattgtagccactgttg

SEQ ID NO: 42290 - DNA, 20 bp, Artificial Sequence
  Description of Artificial Sequence: Synthetic oligonucleotide
  Target: SCNA; (-) strand; PAM type: YTN; PAM sequence: CTC
acagtgcaaaatttgctgat

SEQ ID NO: 42291 - DNA, 20 bp, Artificial Sequence
  Description of Artificial Sequence: Synthetic oligonucleotide
  Target: SCNA; (-) strand; PAM type: YTN; PAM sequence: TTC
tcacagtgcaaaatttgctg

SEQ ID NO: 42292 - DNA, 20 bp, Artificial Sequence
  Description of Artificial Sequence: Synthetic oligonucleotide
  Target: SCNA; (-) strand; PAM type: YTN; PAM sequence: TTT
ctcacagtgcaaaatttgct

SEQ ID NO: 42293 - DNA, 20 bp, Artificial Sequence
  Description of Artificial Sequence: Synthetic oligonucleotide
  Target: SCNA; (-) strand; PAM type: YTN; PAM sequence: TTG
tgtagtttctcacagtgcaa

SEQ ID NO: 42294 - DNA, 20 bp, Artificial Sequence
  Description of Artificial Sequence: Synthetic oligonucleotide
  Target: SCNA; (-) strand; PAM type: YTN; PAM sequence: CTT
gtgtagtttctcacagtgca

SEQ ID NO: 42295 - DNA, 20 bp, Artificial Sequence
  Description of Artificial Sequence: Synthetic oligonucleotide
  Target: SCNA; (-) strand; PAM type: YTN; PAM sequence: TTG
tcttgtgtagtttctcacag

SEQ ID NO: 42296 - DNA, 20 bp, Artificial Sequence
  Description of Artificial Sequence: Synthetic oligonucleotide
  Target: SCNA; (-) strand; PAM type: YTN; PAM sequence: TTT
gtcttgtgtagtttctcaca

SEQ ID NO: 42297 - DNA, 20 bp, Artificial Sequence
  Description of Artificial Sequence: Synthetic oligonucleotide
  Target: SCNA; (-) strand; PAM type: YTN; PAM sequence: CTT
tgtcttgtgtagtttctcac

SEQ ID NO: 42298 - DNA, 20 bp, Artificial Sequence
  Description of Artificial Sequence: Synthetic oligonucleotide
  Target: SCNA; (-) strand; PAM type: YTN; PAM sequence: TTC
tttgtcttgtgtagtttctc

SEQ ID NO: 42299 - DNA, 20 bp, Artificial Sequence
  Description of Artificial Sequence: Synthetic oligonucleotide
  Target: SCNA; (-) strand; PAM type: YTN; PAM sequence: TTA
gacgtattctttgtcttgtg

SEQ ID NO: 42300 - DNA, 20 bp, Artificial Sequence
  Description of Artificial Sequence: Synthetic oligonucleotide
  Target: SCNA; (-) strand; PAM type: YTN; PAM sequence: TTG
aaattagacgtattctttgt

SEQ ID NO: 42301 - DNA, 20 bp, Artificial Sequence
  Description of Artificial Sequence: Synthetic oligonucleotide
  Target: SCNA; (-) strand; PAM type: YTN; PAM sequence: TTA
ttgaaattagacgtattctt

SEQ ID NO: 42302 - DNA, 20 bp, Artificial Sequence
  Description of Artificial Sequence: Synthetic oligonucleotide
  Target: SCNA; (-) strand; PAM type: YTN; PAM sequence: CTT
attgaaattagacgtattct

SEQ ID NO: 42303 - DNA, 20 bp, Artificial Sequence
  Description of Artificial Sequence: Synthetic oligonucleotide
  Target: SCNA; (-) strand; PAM type: YTN; PAM sequence: TTA
cttattgaaattagacgtat

SEQ ID NO: 42304 - DNA, 20 bp, Artificial Sequence
  Description of Artificial Sequence: Synthetic oligonucleotide
  Target: SCNA; (-) strand; PAM type: YTN; PAM sequence: TTT
acttattgaaattagacgta

SEQ ID NO: 42305 - DNA, 20 bp, Artificial Sequence
  Description of Artificial Sequence: Synthetic oligonucleotide
  Target: SCNA; (-) strand; PAM type: YTN; PAM sequence: TTG
caatttacttattgaaatta

SEQ ID NO: 42306 - DNA, 20 bp, Artificial Sequence
  Description of Artificial Sequence: Synthetic oligonucleotide
  Target: SCNA; (-) strand; PAM type: YTN; PAM sequence: TTA
gttgcaatttacttattgaa

SEQ ID NO: 42307 - DNA, 20 bp, Artificial Sequence
  Description of Artificial Sequence: Synthetic oligonucleotide
  Target: SCNA; (-) strand; PAM type: YTN; PAM sequence: TTT
agttgcaatttacttattga

SEQ ID NO: 42308 - DNA, 20 bp, Artificial Sequence
  Description of Artificial Sequence: Synthetic oligonucleotide
  Target: SCNA; (-) strand; PAM type: YTN; PAM sequence: TTT
tagttgcaatttacttattg

SEQ ID NO: 42309 - DNA, 20 bp, Artificial Sequence
  Description of Artificial Sequence: Synthetic oligonucleotide
  Target: SCNA; (-) strand; PAM type: YTN; PAM sequence: TTT
ttagttgcaatttacttatt

SEQ ID NO: 42310 - DNA, 20 bp, Artificial Sequence
  Description of Artificial Sequence: Synthetic oligonucleotide
  Target: SCNA; (-) strand; PAM type: YTN; PAM sequence: CTT
tttagttgcaatttacttat

SEQ ID NO: 42311 - DNA, 20 bp, Artificial Sequence
  Description of Artificial Sequence: Synthetic oligonucleotide
  Target: SCNA; (-) strand; PAM type: YTN; PAM sequence: TTC
tttttagttgcaatttactt

SEQ ID NO: 42312 - DNA, 20 bp, Artificial Sequence
  Description of Artificial Sequence: Synthetic oligonucleotide
  Target: SCNA; (-) strand; PAM type: YTN; PAM sequence: CTT
ctttttagttgcaatttact

SEQ ID NO: 42313 - DNA, 20 bp, Artificial Sequence
  Description of Artificial Sequence: Synthetic oligonucleotide
  Target: SCNA; (-) strand; PAM type: YTN; PAM sequence: CTA
acttctttttagttgcaatt

SEQ ID NO: 42314 - DNA, 20 bp, Artificial Sequence
  Description of Artificial Sequence: Synthetic oligonucleotide
  Target: SCNA; (-) strand; PAM type: YTN; PAM sequence: TTC
ccactaacttctttttagtt

SEQ ID NO: 42315 - DNA, 20 bp, Artificial Sequence
  Description of Artificial Sequence: Synthetic oligonucleotide
  Target: SCNA; (-) strand; PAM type: YTN; PAM sequence: TTA
agcggcaggttcccactaac

SEQ ID NO: 42316 - DNA, 20 bp, Artificial Sequence
  Description of Artificial Sequence: Synthetic oligonucleotide
  Target: SCNA; (-) strand; PAM type: YTN; PAM sequence: TTT
aagcggcaggttcccactaa

SEQ ID NO: 42317 - DNA, 20 bp, Artificial Sequence
  Description of Artificial Sequence: Synthetic oligonucleotide
  Target: SCNA; (-) strand; PAM type: YTN; PAM sequence: CTT
taagcggcaggttcccacta

SEQ ID NO: 42318 - DNA, 20 bp, Artificial Sequence
  Description of Artificial Sequence: Synthetic oligonucleotide
  Target: SCNA; (-) strand; PAM type: YTN; PAM sequence: CTA
ctttaagcggcaggttccca

SEQ ID NO: 42319 - DNA, 20 bp, Artificial Sequence
  Description of Artificial Sequence: Synthetic oligonucleotide
  Target: SCNA; (-) strand; PAM type: YTN; PAM sequence: TTC
tactttaagcggcaggttcc

SEQ ID NO: 42320 - DNA, 20 bp, Artificial Sequence
  Description of Artificial Sequence: Synthetic oligonucleotide
  Target: SCNA; (-) strand; PAM type: YTN; PAM sequence: CTT
ctactttaagcggcaggttc

SEQ ID NO: 42321 - DNA, 20 bp, Artificial Sequence
  Description of Artificial Sequence: Synthetic oligonucleotide
  Target: SCNA; (-) strand; PAM type: YTN; PAM sequence: CTC
acttctactttaagcggcag

SEQ ID NO: 42322 - DNA, 20 bp, Artificial Sequence
  Description of Artificial Sequence: Synthetic oligonucleotide
  Target: SCNA; (-) strand; PAM type: YTN; PAM sequence: CTC
tcacttctactttaagcggc

SEQ ID NO: 42323 - DNA, 20 bp, Artificial Sequence
  Description of Artificial Sequence: Synthetic oligonucleotide
  Target: SCNA; (-) strand; PAM type: YTN; PAM sequence: CTC
tctcacttctactttaagcg

SEQ ID NO: 42324 - DNA, 20 bp, Artificial Sequence
  Description of Artificial Sequence: Synthetic oligonucleotide
  Target: SCNA; (-) strand; PAM type: YTN; PAM sequence: CTA
atgctctctcacttctactt

SEQ ID NO: 42325 - DNA, 20 bp, Artificial Sequence
  Description of Artificial Sequence: Synthetic oligonucleotide
  Target: SCNA; (-) strand; PAM type: YTN; PAM sequence: TTG
gctaatgctctctcacttct

SEQ ID NO: 42326 - DNA, 20 bp, Artificial Sequence
  Description of Artificial Sequence: Synthetic oligonucleotide
  Target: SCNA; (-) strand; PAM type: YTN; PAM sequence: TTG
caattggctaatgctctctc

SEQ ID NO: 42327 - DNA, 20 bp, Artificial Sequence
  Description of Artificial Sequence: Synthetic oligonucleotide
  Target: SCNA; (-) strand; PAM type: YTN; PAM sequence: TTA
ggttgcaattggctaatgct

SEQ ID NO: 42328 - DNA, 20 bp, Artificial Sequence
  Description of Artificial Sequence: Synthetic oligonucleotide
  Target: SCNA; (-) strand; PAM type: YTN; PAM sequence: CTT
aggttgcaattggctaatgc

SEQ ID NO: 42329 - DNA, 20 bp, Artificial Sequence
  Description of Artificial Sequence: Synthetic oligonucleotide
  Target: SCNA; (-) strand; PAM type: YTN; PAM sequence: TTC
ttaggttgcaattggctaat

SEQ ID NO: 42330 - DNA, 20 bp, Artificial Sequence
  Description of Artificial Sequence: Synthetic oligonucleotide
  Target: SCNA; (-) strand; PAM type: YTN; PAM sequence: TTC
ccaatgagaatgaaataaag

SEQ ID NO: 42331 - DNA, 20 bp, Artificial Sequence
  Description of Artificial Sequence: Synthetic oligonucleotide
  Target: SCNA; (-) strand; PAM type: YTN; PAM sequence: TTA
tgtagggttcccaatgagaa

SEQ ID NO: 42332 - DNA, 20 bp, Artificial Sequence
  Description of Artificial Sequence: Synthetic oligonucleotide
  Target: SCNA; (-) strand; PAM type: YTN; PAM sequence: CTT
atgtagggttcccaatgaga

SEQ ID NO: 42333 - DNA, 20 bp, Artificial Sequence
  Description of Artificial Sequence: Synthetic oligonucleotide
  Target: SCNA; (-) strand; PAM type: YTN; PAM sequence: TTG
cttatgtagggttcccaatg

SEQ ID NO: 42334 - DNA, 20 bp, Artificial Sequence
  Description of Artificial Sequence: Synthetic oligonucleotide
  Target: SCNA; (-) strand; PAM type: YTN; PAM sequence: TTT
gcttatgtagggttcccaat

SEQ ID NO: 42335 - DNA, 20 bp, Artificial Sequence
  Description of Artificial Sequence: Synthetic oligonucleotide
  Target: SCNA; (-) strand; PAM type: YTN; PAM sequence: TTC
catttgcttatgtagggttc

SEQ ID NO: 42336 - DNA, 20 bp, Artificial Sequence
  Description of Artificial Sequence: Synthetic oligonucleotide
  Target: SCNA; (-) strand; PAM type: YTN; PAM sequence: TTT
ccatttgcttatgtagggtt

SEQ ID NO: 42337 - DNA, 20 bp, Artificial Sequence
  Description of Artificial Sequence: Synthetic oligonucleotide
  Target: SCNA; (-) strand; PAM type: YTN; PAM sequence: TTT
tccatttgcttatgtagggt

SEQ ID NO: 42338 - DNA, 20 bp, Artificial Sequence
  Description of Artificial Sequence: Synthetic oligonucleotide
  Target: SCNA; (-) strand; PAM type: YTN; PAM sequence: CTC
atatgtgttttccatttgct

SEQ ID NO: 42339 - DNA, 20 bp, Artificial Sequence
  Description of Artificial Sequence: Synthetic oligonucleotide
  Target: SCNA; (-) strand; PAM type: YTN; PAM sequence: CTA
cctcatatgtgttttccatt

SEQ ID NO: 42340 - DNA, 20 bp, Artificial Sequence
  Description of Artificial Sequence: Synthetic oligonucleotide
  Target: SCNA; (-) strand; PAM type: YTN; PAM sequence: TTC
cccaactacctcatatgtgt

SEQ ID NO: 42341 - DNA, 20 bp, Artificial Sequence
  Description of Artificial Sequence: Synthetic oligonucleotide
  Target: SCNA; (-) strand; PAM type: YTN; PAM sequence: TTT
ccccaactacctcatatgtg

SEQ ID NO: 42342 - DNA, 20 bp, Artificial Sequence
  Description of Artificial Sequence: Synthetic oligonucleotide
  Target: SCNA; (-) strand; PAM type: YTN; PAM sequence: TTC
aaatttccccaactacctca

SEQ ID NO: 42343 - DNA, 20 bp, Artificial Sequence
  Description of Artificial Sequence: Synthetic oligonucleotide
  Target: SCNA; (-) strand; PAM type: YTN; PAM sequence: TTA
aatatcaagtcagtgttcaa

SEQ ID NO: 42344 - DNA, 20 bp, Artificial Sequence
  Description of Artificial Sequence: Synthetic oligonucleotide
  Target: SCNA; (-) strand; PAM type: YTN; PAM sequence: CTT
aaatatcaagtcagtgttca

SEQ ID NO: 42345 - DNA, 20 bp, Artificial Sequence
  Description of Artificial Sequence: Synthetic oligonucleotide
  Target: SCNA; (-) strand; PAM type: YTN; PAM sequence: TTC
ttaaatatcaagtcagtgtt

SEQ ID NO: 42346 - DNA, 20 bp, Artificial Sequence
  Description of Artificial Sequence: Synthetic oligonucleotide
  Target: SCNA; (-) strand; PAM type: YTN; PAM sequence: CTA
aagaaataaacaataattct

SEQ ID NO: 42347 - DNA, 20 bp, Artificial Sequence
  Description of Artificial Sequence: Synthetic oligonucleotide
  Target: SCNA; (-) strand; PAM type: YTN; PAM sequence: CTG
caatatatcatcacacctaa

SEQ ID NO: 42348 - DNA, 20 bp, Artificial Sequence
  Description of Artificial Sequence: Synthetic oligonucleotide
  Target: SCNA; (-) strand; PAM type: YTN; PAM sequence: TTG
aagtaaaactgcaatatatc

SEQ ID NO: 42349 - DNA, 20 bp, Artificial Sequence
  Description of Artificial Sequence: Synthetic oligonucleotide
  Target: SCNA; (-) strand; PAM type: YTN; PAM sequence: TTT
gaagtaaaactgcaatatat

SEQ ID NO: 42350 - DNA, 20 bp, Artificial Sequence
  Description of Artificial Sequence: Synthetic oligonucleotide
  Target: SCNA; (-) strand; PAM type: YTN; PAM sequence: TTT
tgaagtaaaactgcaatata

SEQ ID NO: 42351 - DNA, 20 bp, Artificial Sequence
  Description of Artificial Sequence: Synthetic oligonucleotide
  Target: SCNA; (-) strand; PAM type: YTN; PAM sequence: TTT
ttgaagtaaaactgcaatat

SEQ ID NO: 42352 - DNA, 20 bp, Artificial Sequence
  Description of Artificial Sequence: Synthetic oligonucleotide
  Target: SCNA; (-) strand; PAM type: YTN; PAM sequence: CTT
tttgaagtaaaactgcaata

SEQ ID NO: 42353 - DNA, 20 bp, Artificial Sequence
  Description of Artificial Sequence: Synthetic oligonucleotide
  Target: SCNA; (-) strand; PAM type: YTN; PAM sequence: TTA
agaactttttgaagtaaaac

SEQ ID NO: 42354 - DNA, 20 bp, Artificial Sequence
  Description of Artificial Sequence: Synthetic oligonucleotide
  Target: SCNA; (-) strand; PAM type: YTN; PAM sequence: TTG
taaaagttaagaactttttg

SEQ ID NO: 42355 - DNA, 20 bp, Artificial Sequence
  Description of Artificial Sequence: Synthetic oligonucleotide
  Target: SCNA; (-) strand; PAM type: YTN; PAM sequence: TTT
gtaaaagttaagaacttttt

SEQ ID NO: 42356 - DNA, 20 bp, Artificial Sequence
  Description of Artificial Sequence: Synthetic oligonucleotide
  Target: SCNA; (-) strand; PAM type: YTN; PAM sequence: TTA
atttgtaaaagttaagaact

SEQ ID NO: 42357 - DNA, 20 bp, Artificial Sequence
  Description of Artificial Sequence: Synthetic oligonucleotide
  Target: SCNA; (-) strand; PAM type: YTN; PAM sequence: TTA
attaatttgtaaaagttaag

SEQ ID NO: 42358 - DNA, 20 bp, Artificial Sequence
  Description of Artificial Sequence: Synthetic oligonucleotide
  Target: SCNA; (-) strand; PAM type: YTN; PAM sequence: TTT
aattaatttgtaaaagttaa

SEQ ID NO: 42359 - DNA, 20 bp, Artificial Sequence
  Description of Artificial Sequence: Synthetic oligonucleotide
  Target: SCNA; (-) strand; PAM type: YTN; PAM sequence: CTG
taaacatttaattaatttgt

SEQ ID NO: 42360 - DNA, 20 bp, Artificial Sequence
  Description of Artificial Sequence: Synthetic oligonucleotide
  Target: SCNA; (-) strand; PAM type: YTN; PAM sequence: TTG
atctgtaaacatttaattaa

SEQ ID NO: 42361 - DNA, 20 bp, Artificial Sequence
  Description of Artificial Sequence: Synthetic oligonucleotide
  Target: SCNA; (-) strand; PAM type: YTN; PAM sequence: TTT
gatctgtaaacatttaatta

SEQ ID NO: 42362 - DNA, 20 bp, Artificial Sequence
  Description of Artificial Sequence: Synthetic oligonucleotide
  Target: SCNA; (-) strand; PAM type: YTN; PAM sequence: TTA
tttgatctgtaaacatttaa

SEQ ID NO: 42363 - DNA, 20 bp, Artificial Sequence
  Description of Artificial Sequence: Synthetic oligonucleotide
  Target: SCNA; (-) strand; PAM type: YTN; PAM sequence: CTT
atttgatctgtaaacattta

SEQ ID NO: 42364 - DNA, 20 bp, Artificial Sequence
  Description of Artificial Sequence: Synthetic oligonucleotide
  Target: SCNA; (-) strand; PAM type: YTN; PAM sequence: CTA
gatagatatcttatttgatc

SEQ ID NO: 42365 - DNA, 20 bp, Artificial Sequence
  Description of Artificial Sequence: Synthetic oligonucleotide
  Target: SCNA; (-) strand; PAM type: YTN; PAM sequence: TTC
ccccacccaaacctagatag

SEQ ID NO: 42366 - DNA, 20 bp, Artificial Sequence
  Description of Artificial Sequence: Synthetic oligonucleotide
  Target: SCNA; (-) strand; PAM type: YTN; PAM sequence: TTT
cccccacccaaacctagata

SEQ ID NO: 42367 - DNA, 20 bp, Artificial Sequence
  Description of Artificial Sequence: Synthetic oligonucleotide
  Target: SCNA; (-) strand; PAM type: YTN; PAM sequence: CTA
tatcccacccatttccccca

SEQ ID NO: 42368 - DNA, 20 bp, Artificial Sequence
  Description of Artificial Sequence: Synthetic oligonucleotide
  Target: SCNA; (-) strand; PAM type: YTN; PAM sequence: TTC
tatatcccacccatttcccc

SEQ ID NO: 42369 - DNA, 20 bp, Artificial Sequence
  Description of Artificial Sequence: Synthetic oligonucleotide
  Target: SCNA; (-) strand; PAM type: YTN; PAM sequence: CTT
ctatatcccacccatttccc

SEQ ID NO: 42370 - DNA, 20 bp, Artificial Sequence
  Description of Artificial Sequence: Synthetic oligonucleotide
  Target: SCNA; (-) strand; PAM type: YTN; PAM sequence: TTC
ttctatatcccacccatttc

SEQ ID NO: 42371 - DNA, 20 bp, Artificial Sequence
  Description of Artificial Sequence: Synthetic oligonucleotide
  Target: SCNA; (-) strand; PAM type: YTN; PAM sequence: TTT
cttctatatcccacccattt

SEQ ID NO: 42372 - DNA, 20 bp, Artificial Sequence
  Description of Artificial Sequence: Synthetic oligonucleotide
  Target: SCNA; (-) strand; PAM type: YTN; PAM sequence: CTC
atgtttcttctatatcccac

SEQ ID NO: 42373 - DNA, 20 bp, Artificial Sequence
  Description of Artificial Sequence: Synthetic oligonucleotide
  Target: SCNA; (-) strand; PAM type: YTN; PAM sequence: TTA
aactcatgtttcttctatat

SEQ ID NO: 42374 - DNA, 20 bp, Artificial Sequence
  Description of Artificial Sequence: Synthetic oligonucleotide
  Target: SCNA; (-) strand; PAM type: YTN; PAM sequence: CTG
atgaaatattaaactcatgt

SEQ ID NO: 42375 - DNA, 20 bp, Artificial Sequence
  Description of Artificial Sequence: Synthetic oligonucleotide
  Target: SCNA; (-) strand; PAM type: YTN; PAM sequence: TTA
aaactgatgaaatattaaac

SEQ ID NO: 42376 - DNA, 20 bp, Artificial Sequence
  Description of Artificial Sequence: Synthetic oligonucleotide
  Target: SCNA; (-) strand; PAM type: YTN; PAM sequence: TTT
aaaactgatgaaatattaaa

SEQ ID NO: 42377 - DNA, 20 bp, Artificial Sequence
  Description of Artificial Sequence: Synthetic oligonucleotide
  Target: SCNA; (-) strand; PAM type: YTN; PAM sequence: TTT
taaaactgatgaaatattaa

SEQ ID NO: 42378 - DNA, 20 bp, Artificial Sequence
  Description of Artificial Sequence: Synthetic oligonucleotide
  Target: SCNA; (-) strand; PAM type: YTN; PAM sequence: TTT
ttaaaactgatgaaatatta

SEQ ID NO: 42379 - DNA, 20 bp, Artificial Sequence
  Description of Artificial Sequence: Synthetic oligonucleotide
  Target: SCNA; (-) strand; PAM type: YTN; PAM sequence: CTT
tttaaaactgatgaaatatt

SEQ ID NO: 42380 - DNA, 20 bp, Artificial Sequence
  Description of Artificial Sequence: Synthetic oligonucleotide
  Target: SCNA; (-) strand; PAM type: YTN; PAM sequence: CTG
tatatactttttaaaactga

SEQ ID NO: 42381 - DNA, 20 bp, Artificial Sequence
  Description of Artificial Sequence: Synthetic oligonucleotide
  Target: SCNA; (-) strand; PAM type: YTN; PAM sequence: CTA
ctgtatatactttttaaaac

SEQ ID NO: 42382 - DNA, 20 bp, Artificial Sequence
  Description of Artificial Sequence: Synthetic oligonucleotide
  Target: SCNA; (-) strand; PAM type: YTN; PAM sequence: CTG
aaaccatggaaaacaaaacc

SEQ ID NO: 42383 - DNA, 20 bp, Artificial Sequence
  Description of Artificial Sequence: Synthetic oligonucleotide
  Target: SCNA; (-) strand; PAM type: YTN; PAM sequence: TTG
gtggtgggcaactgaaacca

SEQ ID NO: 42384 - DNA, 20 bp, Artificial Sequence
  Description of Artificial Sequence: Synthetic oligonucleotide
  Target: SCNA; (-) strand; PAM type: YTN; PAM sequence: TTG
caattggtggtgggcaactg

SEQ ID NO: 42385 - DNA, 20 bp, Artificial Sequence
  Description of Artificial Sequence: Synthetic oligonucleotide
  Target: SCNA; (-) strand; PAM type: YTN; PAM sequence: TTG
gggttgcaattggtggtggg

SEQ ID NO: 42386 - DNA, 20 bp, Artificial Sequence
  Description of Artificial Sequence: Synthetic oligonucleotide
  Target: SCNA; (-) strand; PAM type: YTN; PAM sequence: TTT
ggggttgcaattggtggtgg

SEQ ID NO: 42387 - DNA, 20 bp, Artificial Sequence
  Description of Artificial Sequence: Synthetic oligonucleotide
  Target: SCNA; (-) strand; PAM type: YTN; PAM sequence: TTT
tggggttgcaattggtggtg

SEQ ID NO: 42388 - DNA, 20 bp, Artificial Sequence
  Description of Artificial Sequence: Synthetic oligonucleotide
  Target: SCNA; (-) strand; PAM type: YTN; PAM sequence: TTA
gtattttggggttgcaattg

SEQ ID NO: 42389 - DNA, 20 bp, Artificial Sequence
  Description of Artificial Sequence: Synthetic oligonucleotide
  Target: SCNA; (-) strand; PAM type: YTN; PAM sequence: CTT
agtattttggggttgcaatt

SEQ ID NO: 42390 - DNA, 20 bp, Artificial Sequence
  Description of Artificial Sequence: Synthetic oligonucleotide
  Target: SCNA; (-) strand; PAM type: YTN; PAM sequence: CTA
aatatcttagtattttgggg

SEQ ID NO: 42391 - DNA, 20 bp, Artificial Sequence
  Description of Artificial Sequence: Synthetic oligonucleotide
  Target: SCNA; (-) strand; PAM type: YTN; PAM sequence: CTC
taaatatcttagtattttgg

SEQ ID NO: 42392 - DNA, 20 bp, Artificial Sequence
  Description of Artificial Sequence: Synthetic oligonucleotide
  Target: SCNA; (-) strand; PAM type: YTN; PAM sequence: CTG
tctctaaatatcttagtatt

SEQ ID NO: 42393 - DNA, 20 bp, Artificial Sequence
  Description of Artificial Sequence: Synthetic oligonucleotide
  Target: SCNA; (-) strand; PAM type: YTN; PAM sequence: CTC
tgtctctaaatatcttagta

SEQ ID NO: 42394 - DNA, 20 bp, Artificial Sequence
  Description of Artificial Sequence: Synthetic oligonucleotide
  Target: SCNA; (-) strand; PAM type: YTN; PAM sequence: CTC
tctgtctctaaatatcttag

SEQ ID NO: 42395 - DNA, 20 bp, Artificial Sequence
  Description of Artificial Sequence: Synthetic oligonucleotide
  Target: SCNA; (-) strand; PAM type: YTN; PAM sequence: CTC
tctctgtctctaaatatctt

SEQ ID NO: 42396 - DNA, 20 bp, Artificial Sequence
  Description of Artificial Sequence: Synthetic oligonucleotide
  Target: SCNA; (-) strand; PAM type: YTN; PAM sequence: CTC
tctctctgtctctaaatatc

SEQ ID NO: 42397 - DNA, 20 bp, Artificial Sequence
  Description of Artificial Sequence: Synthetic oligonucleotide
  Target: SCNA; (-) strand; PAM type: YTN; PAM sequence: TTC
cctctctctctgtctctaaa

SEQ ID NO: 42398 - DNA, 20 bp, Artificial Sequence
  Description of Artificial Sequence: Synthetic oligonucleotide
  Target: SCNA; (-) strand; PAM type: YTN; PAM sequence: TTT
ccctctctctctgtctctaa

SEQ ID NO: 42399 - DNA, 20 bp, Artificial Sequence
  Description of Artificial Sequence: Synthetic oligonucleotide
  Target: SCNA; (-) strand; PAM type: YTN; PAM sequence: CTT
tccctctctctctgtctcta

SEQ ID NO: 42400 - DNA, 20 bp, Artificial Sequence
  Description of Artificial Sequence: Synthetic oligonucleotide
  Target: SCNA; (-) strand; PAM type: YTN; PAM sequence: CTC
tttccctctctctctgtctc

SEQ ID NO: 42401 - DNA, 20 bp, Artificial Sequence
  Description of Artificial Sequence: Synthetic oligonucleotide
  Target: SCNA; (-) strand; PAM type: YTN; PAM sequence: TTC
tctttccctctctctctgtc

SEQ ID NO: 42402 - DNA, 20 bp, Artificial Sequence
  Description of Artificial Sequence: Synthetic oligonucleotide
  Target: SCNA; (-) strand; PAM type: YTN; PAM sequence: TTT
ctctttccctctctctctgt

SEQ ID NO: 42403 - DNA, 20 bp, Artificial Sequence
  Description of Artificial Sequence: Synthetic oligonucleotide
  Target: SCNA; (-) strand; PAM type: YTN; PAM sequence: CTT
tctctttccctctctctctg

SEQ ID NO: 42404 - DNA, 20 bp, Artificial Sequence
  Description of Artificial Sequence: Synthetic oligonucleotide
  Target: SCNA; (-) strand; PAM type: YTN; PAM sequence: CTC
gctttctctttccctctctc

SEQ ID NO: 42405 - DNA, 20 bp, Artificial Sequence
  Description of Artificial Sequence: Synthetic oligonucleotide
  Target: SCNA; (-) strand; PAM type: YTN; PAM sequence: TTA
tgtgggtatggtctcgcttt

SEQ ID NO: 42406 - DNA, 20 bp, Artificial Sequence
  Description of Artificial Sequence: Synthetic oligonucleotide
  Target: SCNA; (-) strand; PAM type: YTN; PAM sequence: CTG
taataaaagttatgtgggta

SEQ ID NO: 42407 - DNA, 20 bp, Artificial Sequence
  Description of Artificial Sequence: Synthetic oligonucleotide
  Target: SCNA; (-) strand; PAM type: YTN; PAM sequence: TTA
taataatatactgtaataaa

SEQ ID NO: 42408 - DNA, 20 bp, Artificial Sequence
  Description of Artificial Sequence: Synthetic oligonucleotide
  Target: SCNA; (-) strand; PAM type: YTN; PAM sequence: CTA
ataacaaaagagaacaatta

SEQ ID NO: 42409 - DNA, 20 bp, Artificial Sequence
  Description of Artificial Sequence: Synthetic oligonucleotide
  Target: SCNA; (-) strand; PAM type: YTN; PAM sequence: TTA
acaacaataactaataacaa

SEQ ID NO: 42410 - DNA, 20 bp, Artificial Sequence
  Description of Artificial Sequence: Synthetic oligonucleotide
  Target: SCNA; (-) strand; PAM type: YTN; PAM sequence: CTA
ggcacagtaagagattaaca

SEQ ID NO: 42411 - DNA, 20 bp, Artificial Sequence
  Description of Artificial Sequence: Synthetic oligonucleotide
  Target: SCNA; (-) strand; PAM type: YTN; PAM sequence: TTA
taaactaggcacagtaagag

SEQ ID NO: 42412 - DNA, 20 bp, Artificial Sequence
  Description of Artificial Sequence: Synthetic oligonucleotide
  Target: SCNA; (-) strand; PAM type: YTN; PAM sequence: TTT
ataaactaggcacagtaaga

SEQ ID NO: 42413 - DNA, 20 bp, Artificial Sequence
  Description of Artificial Sequence: Synthetic oligonucleotide
  Target: SCNA; (-) strand; PAM type: YTN; PAM sequence: TTA
atttataaactaggcacagt

SEQ ID NO: 42414 - DNA, 20 bp, Artificial Sequence
  Description of Artificial Sequence: Synthetic oligonucleotide
  Target: SCNA; (-) strand; PAM type: YTN; PAM sequence: TTT
aatttataaactaggcacag

SEQ ID NO: 42415 - DNA, 20 bp, Artificial Sequence
  Description of Artificial Sequence: Synthetic oligonucleotide
  Target: SCNA; (-) strand; PAM type: YTN; PAM sequence: CTA
tgaaaaagtttaatttataa

SEQ ID NO: 42416 - DNA, 20 bp, Artificial Sequence
  Description of Artificial Sequence: Synthetic oligonucleotide
  Target: SCNA; (-) strand; PAM type: YTN; PAM sequence: TTA
tgtacctatgaaaaagttta

SEQ ID NO: 42417 - DNA, 20 bp, Artificial Sequence
  Description of Artificial Sequence: Synthetic oligonucleotide
  Target: SCNA; (-) strand; PAM type: YTN; PAM sequence: CTT
atgtacctatgaaaaagttt

SEQ ID NO: 42418 - DNA, 20 bp, Artificial Sequence
  Description of Artificial Sequence: Synthetic oligonucleotide
  Target: SCNA; (-) strand; PAM type: YTN; PAM sequence: TTC
caatgcttatgtacctatga

SEQ ID NO: 42419 - DNA, 20 bp, Artificial Sequence
  Description of Artificial Sequence: Synthetic oligonucleotide
  Target: SCNA; (-) strand; PAM type: YTN; PAM sequence: TTT
ccaatgcttatgtacctatg

SEQ ID NO: 42420 - DNA, 20 bp, Artificial Sequence
  Description of Artificial Sequence: Synthetic oligonucleotide
  Target: SCNA; (-) strand; PAM type: YTN; PAM sequence: TTT
tccaatgcttatgtacctat

SEQ ID NO: 42421 - DNA, 20 bp, Artificial Sequence
  Description of Artificial Sequence: Synthetic oligonucleotide
  Target: SCNA; (-) strand; PAM type: YTN; PAM sequence: TTT
ttccaatgcttatgtaccta

SEQ ID NO: 42422 - DNA, 20 bp, Artificial Sequence
  Description of Artificial Sequence: Synthetic oligonucleotide
  Target: SCNA; (-) strand; PAM type: YTN; PAM sequence: TTT
tttccaatgcttatgtacct

SEQ ID NO: 42423 - DNA, 20 bp, Artificial Sequence
  Description of Artificial Sequence: Synthetic oligonucleotide
  Target: SCNA; (-) strand; PAM type: YTN; PAM sequence: CTG
ttttttccaatgcttatgta

SEQ ID NO: 42424 - DNA, 20 bp, Artificial Sequence
  Description of Artificial Sequence: Synthetic oligonucleotide
  Target: SCNA; (-) strand; PAM type: YTN; PAM sequence: CTA
catatactgttttttccaat

SEQ ID NO: 42425 - DNA, 20 bp, Artificial Sequence
  Description of Artificial Sequence: Synthetic oligonucleotide
  Target: SCNA; (-) strand; PAM type: YTN; PAM sequence: TTG
cggatagtagcaaaccctac

SEQ ID NO: 42426 - DNA, 20 bp, Artificial Sequence
  Description of Artificial Sequence: Synthetic oligonucleotide
  Target: SCNA; (-) strand; PAM type: YTN; PAM sequence: CTG
aaattgcggatagtagcaaa

SEQ ID NO: 42427 - DNA, 20 bp, Artificial Sequence
  Description of Artificial Sequence: Synthetic oligonucleotide
  Target: SCNA; (-) strand; PAM type: YTN; PAM sequence: CTA
ggacacctgaaattgcggat

SEQ ID NO: 42428 - DNA, 20 bp, Artificial Sequence
  Description of Artificial Sequence: Synthetic oligonucleotide
  Target: SCNA; (-) strand; PAM type: YTN; PAM sequence: CTG
aaacccccactaggacacct

SEQ ID NO: 42429 - DNA, 20 bp, Artificial Sequence
  Description of Artificial Sequence: Synthetic oligonucleotide
  Target: SCNA; (-) strand; PAM type: YTN; PAM sequence: TTC
tgaaacccccactaggacac

SEQ ID NO: 42430 - DNA, 20 bp, Artificial Sequence
  Description of Artificial Sequence: Synthetic oligonucleotide
  Target: SCNA; (-) strand; PAM type: YTN; PAM sequence: CTA
cagggatacattctgaaacc

SEQ ID NO: 42431 - DNA, 20 bp, Artificial Sequence
  Description of Artificial Sequence: Synthetic oligonucleotide
  Target: SCNA; (-) strand; PAM type: YTN; PAM sequence: TTA
tctacagggatacattctga

SEQ ID NO: 42432 - DNA, 20 bp, Artificial Sequence
  Description of Artificial Sequence: Synthetic oligonucleotide
  Target: SCNA; (-) strand; PAM type: YTN; PAM sequence: TTT
atctacagggatacattctg

SEQ ID NO: 42433 - DNA, 20 bp, Artificial Sequence
  Description of Artificial Sequence: Synthetic oligonucleotide
  Target: SCNA; (-) strand; PAM type: YTN; PAM sequence: CTT
tatctacagggatacattct

SEQ ID NO: 42434 - DNA, 20 bp, Artificial Sequence
  Description of Artificial Sequence: Synthetic oligonucleotide
  Target: SCNA; (-) strand; PAM type: YTN; PAM sequence: TTC
ctttatctacagggatacat

SEQ ID NO: 42435 - DNA, 20 bp, Artificial Sequence
  Description of Artificial Sequence: Synthetic oligonucleotide
  Target: SCNA; (-) strand; PAM type: YTN; PAM sequence: CTT
cctttatctacagggataca

SEQ ID NO: 42436 - DNA, 20 bp, Artificial Sequence
  Description of Artificial Sequence: Synthetic oligonucleotide
  Target: SCNA; (-) strand; PAM type: YTN; PAM sequence: TTG
aaatgagcatacagcagtct

SEQ ID NO: 42437 - DNA, 20 bp, Artificial Sequence
  Description of Artificial Sequence: Synthetic oligonucleotide
  Target: SCNA; (-) strand; PAM type: YTN; PAM sequence: CTA
ttgaaatgagcatacagcag

SEQ ID NO: 42438 - DNA, 20 bp, Artificial Sequence
  Description of Artificial Sequence: Synthetic oligonucleotide
  Target: SCNA; (-) strand; PAM type: YTN; PAM sequence: CTA
actattgaaatgagcataca

SEQ ID NO: 42439 - DNA, 20 bp, Artificial Sequence
  Description of Artificial Sequence: Synthetic oligonucleotide
  Target: SCNA; (-) strand; PAM type: YTN; PAM sequence: TTA
gagaactaactattgaaatg

SEQ ID NO: 42440 - DNA, 20 bp, Artificial Sequence
  Description of Artificial Sequence: Synthetic oligonucleotide
  Target: SCNA; (-) strand; PAM type: YTN; PAM sequence: TTC
agaaaaacatagttagagaa

SEQ ID NO: 42441 - DNA, 20 bp, Artificial Sequence
  Description of Artificial Sequence: Synthetic oligonucleotide
  Target: SCNA; (-) strand; PAM type: YTN; PAM sequence: TTA
gatcacatattcagaaaaac

SEQ ID NO: 42442 - DNA, 20 bp, Artificial Sequence
  Description of Artificial Sequence: Synthetic oligonucleotide
  Target: SCNA; (-) strand; PAM type: YTN; PAM sequence: TTT
agatcacatattcagaaaaa

SEQ ID NO: 42443 - DNA, 20 bp, Artificial Sequence
  Description of Artificial Sequence: Synthetic oligonucleotide
  Target: SCNA; (-) strand; PAM type: YTN; PAM sequence: CTA
cgaatgtgatagagtcaaca

SEQ ID NO: 42444 - DNA, 20 bp, Artificial Sequence
  Description of Artificial Sequence: Synthetic oligonucleotide
  Target: SCNA; (-) strand; PAM type: YTN; PAM sequence: TTA
aaatctacgaatgtgataga

SEQ ID NO: 42445 - DNA, 20 bp, Artificial Sequence
  Description of Artificial Sequence: Synthetic oligonucleotide
  Target: SCNA; (-) strand; PAM type: YTN; PAM sequence: CTT
aaaatctacgaatgtgatag

SEQ ID NO: 42446 - DNA, 20 bp, Artificial Sequence
  Description of Artificial Sequence: Synthetic oligonucleotide
  Target: SCNA; (-) strand; PAM type: YTN; PAM sequence: TTA
gtatgcttaaaatctacgaa

SEQ ID NO: 42447 - DNA, 20 bp, Artificial Sequence
  Description of Artificial Sequence: Synthetic oligonucleotide
  Target: SCNA; (-) strand; PAM type: YTN; PAM sequence: TTT
agtatgcttaaaatctacga

SEQ ID NO: 42448 - DNA, 20 bp, Artificial Sequence
  Description of Artificial Sequence: Synthetic oligonucleotide
  Target: SCNA; (-) strand; PAM type: YTN; PAM sequence: TTT
tagtatgcttaaaatctacg

SEQ ID NO: 42449 - DNA, 20 bp, Artificial Sequence
  Description of Artificial Sequence: Synthetic oligonucleotide
  Target: SCNA; (-) strand; PAM type: YTN; PAM sequence: CTG
ccaaatattttagtatgctt

SEQ ID NO: 42450 - DNA, 20 bp, Artificial Sequence
  Description of Artificial Sequence: Synthetic oligonucleotide
  Target: SCNA; (-) strand; PAM type: YTN; PAM sequence: TTG
gaatagctgccaaatatttt

SEQ ID NO: 42451 - DNA, 20 bp, Artificial Sequence
  Description of Artificial Sequence: Synthetic oligonucleotide
  Target: SCNA; (-) strand; PAM type: YTN; PAM sequence: CTT
ggaatagctgccaaatattt

SEQ ID NO: 42452 - DNA, 20 bp, Artificial Sequence
  Description of Artificial Sequence: Synthetic oligonucleotide
  Target: SCNA; (-) strand; PAM type: YTN; PAM sequence: CTC
cttggaatagctgccaaata

SEQ ID NO: 42453 - DNA, 20 bp, Artificial Sequence
  Description of Artificial Sequence: Synthetic oligonucleotide
  Target: SCNA; (-) strand; PAM type: YTN; PAM sequence: TTC
tccttggaatagctgccaaa

SEQ ID NO: 42454 - DNA, 20 bp, Artificial Sequence
  Description of Artificial Sequence: Synthetic oligonucleotide
  Target: SCNA; (-) strand; PAM type: YTN; PAM sequence: TTA
tattctccttggaatagctg

SEQ ID NO: 42455 - DNA, 20 bp, Artificial Sequence
  Description of Artificial Sequence: Synthetic oligonucleotide
  Target: SCNA; (-) strand; PAM type: YTN; PAM sequence: TTG
ttatattctccttggaatag

SEQ ID NO: 42456 - DNA, 20 bp, Artificial Sequence
  Description of Artificial Sequence: Synthetic oligonucleotide
  Target: SCNA; (-) strand; PAM type: YTN; PAM sequence: TTG
ttgttatattctccttggaa

SEQ ID NO: 42457 - DNA, 20 bp, Artificial Sequence
  Description of Artificial Sequence: Synthetic oligonucleotide
  Target: SCNA; (-) strand; PAM type: YTN; PAM sequence: TTT
gttgttatattctccttgga

SEQ ID NO: 42458 - DNA, 20 bp, Artificial Sequence
  Description of Artificial Sequence: Synthetic oligonucleotide
  Target: SCNA; (-) strand; PAM type: YTN; PAM sequence: CTG
atggtcatatgaagtgtttg

SEQ ID NO: 42459 - DNA, 20 bp, Artificial Sequence
  Description of Artificial Sequence: Synthetic oligonucleotide
  Target: SCNA; (-) strand; PAM type: YTN; PAM sequence: TTG
tgtctgatggtcatatgaag

SEQ ID NO: 42460 - DNA, 20 bp, Artificial Sequence
  Description of Artificial Sequence: Synthetic oligonucleotide
  Target: SCNA; (-) strand; PAM type: YTN; PAM sequence: TTA
tgaaacagtaaatatacagg

SEQ ID NO: 42461 - DNA, 20 bp, Artificial Sequence
  Description of Artificial Sequence: Synthetic oligonucleotide
  Target: SCNA; (-) strand; PAM type: YTN; PAM sequence: TTT
atgaaacagtaaatatacag

SEQ ID NO: 42462 - DNA, 20 bp, Artificial Sequence
  Description of Artificial Sequence: Synthetic oligonucleotide
  Target: SCNA; (-) strand; PAM type: YTN; PAM sequence: TTA
gaaataggtttatgaaacag

SEQ ID NO: 42463 - DNA, 20 bp, Artificial Sequence
  Description of Artificial Sequence: Synthetic oligonucleotide
  Target: SCNA; (-) strand; PAM type: YTN; PAM sequence: TTT
agaaataggtttatgaaaca

SEQ ID NO: 42464 - DNA, 20 bp, Artificial Sequence
  Description of Artificial Sequence: Synthetic oligonucleotide
  Target: SCNA; (-) strand; PAM type: YTN; PAM sequence: TTT
tagaaataggtttatgaaac

SEQ ID NO: 42465 - DNA, 20 bp, Artificial Sequence
  Description of Artificial Sequence: Synthetic oligonucleotide
  Target: SCNA; (-) strand; PAM type: YTN; PAM sequence: TTT
ttagaaataggtttatgaaa

SEQ ID NO: 42466 - DNA, 20 bp, Artificial Sequence
  Description of Artificial Sequence: Synthetic oligonucleotide
  Target: SCNA; (-) strand; PAM type: YTN; PAM sequence: TTA
tagataacaatgtttttaga

SEQ ID NO: 42467 - DNA, 20 bp, Artificial Sequence
  Description of Artificial Sequence: Synthetic oligonucleotide
  Target: SCNA; (-) strand; PAM type: YTN; PAM sequence: TTT
atagataacaatgtttttag

SEQ ID NO: 42468 - DNA, 20 bp, Artificial Sequence
  Description of Artificial Sequence: Synthetic oligonucleotide
  Target: SCNA; (-) strand; PAM type: YTN; PAM sequence: CTT
tatagataacaatgttttta

SEQ ID NO: 42469 - DNA, 20 bp, Artificial Sequence
  Description of Artificial Sequence: Synthetic oligonucleotide
  Target: SCNA; (-) strand; PAM type: YTN; PAM sequence: TTC
tttatagataacaatgtttt

SEQ ID NO: 42470 - DNA, 20 bp, Artificial Sequence
  Description of Artificial Sequence: Synthetic oligonucleotide
  Target: SCNA; (-) strand; PAM type: YTN; PAM sequence: TTT
ctttatagataacaatgttt

SEQ ID NO: 42471 - DNA, 20 bp, Artificial Sequence
  Description of Artificial Sequence: Synthetic oligonucleotide
  Target: SCNA; (-) strand; PAM type: YTN; PAM sequence: TTA
atatttctttatagataaca

SEQ ID NO: 42472 - DNA, 20 bp, Artificial Sequence
  Description of Artificial Sequence: Synthetic oligonucleotide
  Target: SCNA; (-) strand; PAM type: YTN; PAM sequence: TTT
aatatttctttatagataac

SEQ ID NO: 42473 - DNA, 20 bp, Artificial Sequence
  Description of Artificial Sequence: Synthetic oligonucleotide
  Target: SCNA; (-) strand; PAM type: YTN; PAM sequence: TTG
aaatttaatatttctttata

SEQ ID NO: 42474 - DNA, 20 bp, Artificial Sequence
  Description of Artificial Sequence: Synthetic oligonucleotide
  Target: SCNA; (-) strand; PAM type: YTN; PAM sequence: TTG
gagttgaaatttaatatttc

SEQ ID NO: 42475 - DNA, 20 bp, Artificial Sequence
  Description of Artificial Sequence: Synthetic oligonucleotide
  Target: SCNA; (-) strand; PAM type: YTN; PAM sequence: TTG
taaattggagttgaaattta

SEQ ID NO: 42476 - DNA, 20 bp, Artificial Sequence
  Description of Artificial Sequence: Synthetic oligonucleotide
  Target: SCNA; (-) strand; PAM type: YTN; PAM sequence: TTA
ggcacagttgtaaattggag

SEQ ID NO: 42477 - DNA, 20 bp, Artificial Sequence
  Description of Artificial Sequence: Synthetic oligonucleotide
  Target: SCNA; (-) strand; PAM type: YTN; PAM sequence: CTA
tattaggcacagttgtaaat

SEQ ID NO: 42478 - DNA, 20 bp, Artificial Sequence
  Description of Artificial Sequence: Synthetic oligonucleotide
  Target: SCNA; (-) strand; PAM type: YTN; PAM sequence: TTA
cagccaaactatattaggca

SEQ ID NO: 42479 - DNA, 20 bp, Artificial Sequence
  Description of Artificial Sequence: Synthetic oligonucleotide
  Target: SCNA; (-) strand; PAM type: YTN; PAM sequence: TTG
ttacagccaaactatattag

SEQ ID NO: 42480 - DNA, 20 bp, Artificial Sequence
  Description of Artificial Sequence: Synthetic oligonucleotide
  Target: SCNA; (-) strand; PAM type: YTN; PAM sequence: TTT
gttacagccaaactatatta

SEQ ID NO: 42481 - DNA, 20 bp, Artificial Sequence
  Description of Artificial Sequence: Synthetic oligonucleotide
  Target: SCNA; (-) strand; PAM type: YTN; PAM sequence: TTT
tgttacagccaaactatatt

SEQ ID NO: 42482 - DNA, 20 bp, Artificial Sequence
  Description of Artificial Sequence: Synthetic oligonucleotide
  Target: SCNA; (-) strand; PAM type: YTN; PAM sequence: TTT
ttgttacagccaaactatat

SEQ ID NO: 42483 - DNA, 20 bp, Artificial Sequence
  Description of Artificial Sequence: Synthetic oligonucleotide
  Target: SCNA; (-) strand; PAM type: YTN; PAM sequence: TTT
tttgttacagccaaactata

SEQ ID NO: 42484 - DNA, 20 bp, Artificial Sequence
  Description of Artificial Sequence: Synthetic oligonucleotide
  Target: SCNA; (-) strand; PAM type: YTN; PAM sequence: TTT
ttttgttacagccaaactat

SEQ ID NO: 42485 - DNA, 20 bp, Artificial Sequence
  Description of Artificial Sequence: Synthetic oligonucleotide
  Target: SCNA; (-) strand; PAM type: YTN; PAM sequence: CTT
tttttgttacagccaaacta

SEQ ID NO: 42486 - DNA, 20 bp, Artificial Sequence
  Description of Artificial Sequence: Synthetic oligonucleotide
  Target: SCNA; (-) strand; PAM type: YTN; PAM sequence: TTC
tttttttgttacagccaaac

SEQ ID NO: 42487 - DNA, 20 bp, Artificial Sequence
  Description of Artificial Sequence: Synthetic oligonucleotide
  Target: SCNA; (-) strand; PAM type: YTN; PAM sequence: TTA
atgttctttttttgttacag

SEQ ID NO: 42488 - DNA, 20 bp, Artificial Sequence
  Description of Artificial Sequence: Synthetic oligonucleotide
  Target: SCNA; (-) strand; PAM type: YTN; PAM sequence: TTT
aatgttctttttttgttaca

SEQ ID NO: 42489 - DNA, 20 bp, Artificial Sequence
  Description of Artificial Sequence: Synthetic oligonucleotide
  Target: SCNA; (-) strand; PAM type: YTN; PAM sequence: TTT
taatgttctttttttgttac

SEQ ID NO: 42490 - DNA, 20 bp, Artificial Sequence
  Description of Artificial Sequence: Synthetic oligonucleotide
  Target: SCNA; (-) strand; PAM type: YTN; PAM sequence: CTC
ataaaatgcaaattttaatg

SEQ ID NO: 42491 - DNA, 20 bp, Artificial Sequence
  Description of Artificial Sequence: Synthetic oligonucleotide
  Target: SCNA; (-) strand; PAM type: YTN; PAM sequence: TTG
aaaacaagtcatgaatactc

SEQ ID NO: 42492 - DNA, 20 bp, Artificial Sequence
  Description of Artificial Sequence: Synthetic oligonucleotide
  Target: SCNA; (-) strand; PAM type: YTN; PAM sequence: TTT
gaaaacaagtcatgaatact

SEQ ID NO: 42493 - DNA, 20 bp, Artificial Sequence
  Description of Artificial Sequence: Synthetic oligonucleotide
  Target: SCNA; (-) strand; PAM type: YTN; PAM sequence: TTT
tgaaaacaagtcatgaatac

SEQ ID NO: 42494 - DNA, 20 bp, Artificial Sequence
  Description of Artificial Sequence: Synthetic oligonucleotide
  Target: SCNA; (-) strand; PAM type: YTN; PAM sequence: TTA
tattttgaaaacaagtcatg

SEQ ID NO: 42495 - DNA, 20 bp, Artificial Sequence
  Description of Artificial Sequence: Synthetic oligonucleotide
  Target: SCNA; (-) strand; PAM type: YTN; PAM sequence: TTC
aagtatgattatattttgaa

SEQ ID NO: 42496 - DNA, 20 bp, Artificial Sequence
  Description of Artificial Sequence: Synthetic oligonucleotide
  Target: SCNA; (-) strand; PAM type: YTN; PAM sequence: CTT
caagtatgattatattttga

SEQ ID NO: 42497 - DNA, 20 bp, Artificial Sequence
  Description of Artificial Sequence: Synthetic oligonucleotide
  Target: SCNA; (-) strand; PAM type: YTN; PAM sequence: TTC
acaccttcaagtatgattat

SEQ ID NO: 42498 - DNA, 20 bp, Artificial Sequence
  Description of Artificial Sequence: Synthetic oligonucleotide
  Target: SCNA; (-) strand; PAM type: YTN; PAM sequence: CTT
cacaccttcaagtatgatta

SEQ ID NO: 42499 - DNA, 20 bp, Artificial Sequence
  Description of Artificial Sequence: Synthetic oligonucleotide
  Target: SCNA; (-) strand; PAM type: YTN; PAM sequence: TTG
tggtaaaaataaatagaagg

SEQ ID NO: 42500 - DNA, 20 bp, Artificial Sequence
  Description of Artificial Sequence: Synthetic oligonucleotide
  Target: SCNA; (-) strand; PAM type: YTN; PAM sequence: TTT
gtggtaaaaataaatagaag

SEQ ID NO: 42501 - DNA, 20 bp, Artificial Sequence
  Description of Artificial Sequence: Synthetic oligonucleotide
  Target: SCNA; (-) strand; PAM type: YTN; PAM sequence: TTG
tttgtggtaaaaataaatag

SEQ ID NO: 42502 - DNA, 20 bp, Artificial Sequence
  Description of Artificial Sequence: Synthetic oligonucleotide
  Target: SCNA; (-) strand; PAM type: YTN; PAM sequence: CTT
gtttgtggtaaaaataaata

SEQ ID NO: 42503 - DNA, 20 bp, Artificial Sequence
  Description of Artificial Sequence: Synthetic oligonucleotide
  Target: SCNA; (-) strand; PAM type: YTN; PAM sequence: TTC
ttgtttgtggtaaaaataaa

SEQ ID NO: 42504 - DNA, 20 bp, Artificial Sequence
  Description of Artificial Sequence: Synthetic oligonucleotide
  Target: SCNA; (-) strand; PAM type: YTN; PAM sequence: TTT
cttgtttgtggtaaaaataa

SEQ ID NO: 42505 - DNA, 20 bp, Artificial Sequence
  Description of Artificial Sequence: Synthetic oligonucleotide
  Target: SCNA; (-) strand; PAM type: YTN; PAM sequence: TTT
tcttgtttgtggtaaaaata

SEQ ID NO: 42506 - DNA, 20 bp, Artificial Sequence
  Description of Artificial Sequence: Synthetic oligonucleotide
  Target: SCNA; (-) strand; PAM type: YTN; PAM sequence: TTT
ttcttgtttgtggtaaaaat

SEQ ID NO: 42507 - DNA, 20 bp, Artificial Sequence
  Description of Artificial Sequence: Synthetic oligonucleotide
  Target: SCNA; (-) strand; PAM type: YTN; PAM sequence: TTT
tttcttgtttgtggtaaaaa

SEQ ID NO: 42508 - DNA, 20 bp, Artificial Sequence
  Description of Artificial Sequence: Synthetic oligonucleotide
  Target: SCNA; (-) strand; PAM type: YTN; PAM sequence: TTT
ttttcttgtttgtggtaaaa

SEQ ID NO: 42509 - DNA, 20 bp, Artificial Sequence
  Description of Artificial Sequence: Synthetic oligonucleotide
  Target: SCNA; (-) strand; PAM type: YTN; PAM sequence: TTT
tttttcttgtttgtggtaaa

SEQ ID NO: 42510 - DNA, 20 bp, Artificial Sequence
  Description of Artificial Sequence: Synthetic oligonucleotide
  Target: SCNA; (-) strand; PAM type: YTN; PAM sequence: TTG
gtagttttttttcttgtttg

SEQ ID NO: 42511 - DNA, 20 bp, Artificial Sequence
  Description of Artificial Sequence: Synthetic oligonucleotide
  Target: SCNA; (-) strand; PAM type: YTN; PAM sequence: TTA
tattggtagttttttttctt

SEQ ID NO: 42512 - DNA, 20 bp, Artificial Sequence
  Description of Artificial Sequence: Synthetic oligonucleotide
  Target: SCNA; (-) strand; PAM type: YTN; PAM sequence: TTG
ttatattggtagtttttttt

SEQ ID NO: 42513 - DNA, 20 bp, Artificial Sequence
  Description of Artificial Sequence: Synthetic oligonucleotide
  Target: SCNA; (-) strand; PAM type: YTN; PAM sequence: TTT
gttatattggtagttttttt

SEQ ID NO: 42514 - DNA, 20 bp, Artificial Sequence
  Description of Artificial Sequence: Synthetic oligonucleotide
  Target: SCNA; (-) strand; PAM type: YTN; PAM sequence: TTA
acatttgttatattggtagt

SEQ ID NO: 42515 - DNA, 20 bp, Artificial Sequence
  Description of Artificial Sequence: Synthetic oligonucleotide
  Target: SCNA; (-) strand; PAM type: YTN; PAM sequence: TTT
aacatttgttatattggtag

SEQ ID NO: 42516 - DNA, 20 bp, Artificial Sequence
  Description of Artificial Sequence: Synthetic oligonucleotide
  Target: SCNA; (-) strand; PAM type: YTN; PAM sequence: TTC
aaaagtgtttaacatttgtt

SEQ ID NO: 42517 - DNA, 20 bp, Artificial Sequence
  Description of Artificial Sequence: Synthetic oligonucleotide
  Target: SCNA; (-) strand; PAM type: YTN; PAM sequence: TTT
caaaagtgtttaacatttgt

SEQ ID NO: 42518 - DNA, 20 bp, Artificial Sequence
  Description of Artificial Sequence: Synthetic oligonucleotide
  Target: SCNA; (-) strand; PAM type: YTN; PAM sequence: TTT
tcaaaagtgtttaacatttg

SEQ ID NO: 42519 - DNA, 20 bp, Artificial Sequence
  Description of Artificial Sequence: Synthetic oligonucleotide
  Target: SCNA; (-) strand; PAM type: YTN; PAM sequence: TTT
ttcaaaagtgtttaacattt

SEQ ID NO: 42520 - DNA, 20 bp, Artificial Sequence
  Description of Artificial Sequence: Synthetic oligonucleotide
  Target: SCNA; (-) strand; PAM type: YTN; PAM sequence: TTT
tttcaaaagtgtttaacatt

SEQ ID NO: 42521 - DNA, 20 bp, Artificial Sequence
  Description of Artificial Sequence: Synthetic oligonucleotide
  Target: SCNA; (-) strand; PAM type: YTN; PAM sequence: TTG
attttttcaaaagtgtttaa

SEQ ID NO: 42522 - DNA, 20 bp, Artificial Sequence
  Description of Artificial Sequence: Synthetic oligonucleotide
  Target: SCNA; (-) strand; PAM type: YTN; PAM sequence: TTG
agaaaaaattgattttttca

SEQ ID NO: 42523 - DNA, 20 bp, Artificial Sequence
  Description of Artificial Sequence: Synthetic oligonucleotide
  Target: SCNA; (-) strand; PAM type: YTN; PAM sequence: TTT
gagaaaaaattgattttttc

SEQ ID NO: 42524 - DNA, 20 bp, Artificial Sequence
  Description of Artificial Sequence: Synthetic oligonucleotide
  Target: SCNA; (-) strand; PAM type: YTN; PAM sequence: TTA
atataatatcataatgaaaa

SEQ ID NO: 42525 - DNA, 20 bp, Artificial Sequence
  Description of Artificial Sequence: Synthetic oligonucleotide
  Target: SCNA; (-) strand; PAM type: YTN; PAM sequence: CTG
ggttaatataatatcataat

SEQ ID NO: 42526 - DNA, 20 bp, Artificial Sequence
  Description of Artificial Sequence: Synthetic oligonucleotide
  Target: SCNA; (-) strand; PAM type: YTN; PAM sequence: TTC
tgggttaatataatatcata

SEQ ID NO: 42527 - DNA, 20 bp, Artificial Sequence
  Description of Artificial Sequence: Synthetic oligonucleotide
  Target: SCNA; (-) strand; PAM type: YTN; PAM sequence: CTA
acatattctgggttaatata

SEQ ID NO: 42528 - DNA, 20 bp, Artificial Sequence
  Description of Artificial Sequence: Synthetic oligonucleotide
  Target: SCNA; (-) strand; PAM type: YTN; PAM sequence: TTG
ccctaacatattctgggtta

SEQ ID NO: 42529 - DNA, 20 bp, Artificial Sequence
  Description of Artificial Sequence: Synthetic oligonucleotide
  Target: SCNA; (-) strand; PAM type: YTN; PAM sequence: TTA
ttgccctaacatattctggg

SEQ ID NO: 42530 - DNA, 20 bp, Artificial Sequence
  Description of Artificial Sequence: Synthetic oligonucleotide
  Target: SCNA; (-) strand; PAM type: YTN; PAM sequence: TTT
attgccctaacatattctgg

SEQ ID NO: 42531 - DNA, 20 bp, Artificial Sequence
  Description of Artificial Sequence: Synthetic oligonucleotide
  Target: SCNA; (-) strand; PAM type: YTN; PAM sequence: TTT
tattgccctaacatattctg

SEQ ID NO: 42532 - DNA, 20 bp, Artificial Sequence
  Description of Artificial Sequence: Synthetic oligonucleotide
  Target: SCNA; (-) strand; PAM type: YTN; PAM sequence: TTA
ttttattgccctaacatatt

SEQ ID NO: 42533 - DNA, 20 bp, Artificial Sequence
  Description of Artificial Sequence: Synthetic oligonucleotide
  Target: SCNA; (-) strand; PAM type: YTN; PAM sequence: TTT
attttattgccctaacatat

SEQ ID NO: 42534 - DNA, 20 bp, Artificial Sequence
  Description of Artificial Sequence: Synthetic oligonucleotide
  Target: SCNA; (-) strand; PAM type: YTN; PAM sequence: CTC
atttattttattgccctaac

SEQ ID NO: 42535 - DNA, 20 bp, Artificial Sequence
  Description of Artificial Sequence: Synthetic oligonucleotide
  Target: SCNA; (-) strand; PAM type: YTN; PAM sequence: TTC
tcatttattttattgcccta

SEQ ID NO: 42536 - DNA, 20 bp, Artificial Sequence
  Description of Artificial Sequence: Synthetic oligonucleotide
  Target: SCNA; (-) strand; PAM type: YTN; PAM sequence: TTT
ctcatttattttattgccct

SEQ ID NO: 42537 - DNA, 20 bp, Artificial Sequence
  Description of Artificial Sequence: Synthetic oligonucleotide
  Target: SCNA; (-) strand; PAM type: YTN; PAM sequence: TTT
tctcatttattttattgccc

SEQ ID NO: 42538 - DNA, 20 bp, Artificial Sequence
  Description of Artificial Sequence: Synthetic oligonucleotide
  Target: SCNA; (-) strand; PAM type: YTN; PAM sequence: TTT
ttctcatttattttattgcc

SEQ ID NO: 42539 - DNA, 20 bp, Artificial Sequence
  Description of Artificial Sequence: Synthetic oligonucleotide
  Target: SCNA; (-) strand; PAM type: YTN; PAM sequence: TTA
agcatacaggcatataccaa

SEQ ID NO: 42540 - DNA, 20 bp, Artificial Sequence
  Description of Artificial Sequence: Synthetic oligonucleotide
  Target: SCNA; (-) strand; PAM type: YTN; PAM sequence: TTA
ttaagcatacaggcatatac

SEQ ID NO: 42541 - DNA, 20 bp, Artificial Sequence
  Description of Artificial Sequence: Synthetic oligonucleotide
  Target: SCNA; (-) strand; PAM type: YTN; PAM sequence: CTT
attaagcatacaggcatata

SEQ ID NO: 42542 - DNA, 20 bp, Artificial Sequence
  Description of Artificial Sequence: Synthetic oligonucleotide
  Target: SCNA; (-) strand; PAM type: YTN; PAM sequence: CTC
ttattaagcatacaggcata

SEQ ID NO: 42543 - DNA, 20 bp, Artificial Sequence
  Description of Artificial Sequence: Synthetic oligonucleotide
  Target: SCNA; (-) strand; PAM type: YTN; PAM sequence: TTC
tcttattaagcatacaggca

SEQ ID NO: 42544 - DNA, 20 bp, Artificial Sequence
  Description of Artificial Sequence: Synthetic oligonucleotide
  Target: SCNA; (-) strand; PAM type: YTN; PAM sequence: CTG
taggttctcttattaagcat

SEQ ID NO: 42545 - DNA, 20 bp, Artificial Sequence
  Description of Artificial Sequence: Synthetic oligonucleotide
  Target: SCNA; (-) strand; PAM type: YTN; PAM sequence: CTA
ccctgtaggttctcttatta

SEQ ID NO: 42546 - DNA, 20 bp, Artificial Sequence
  Description of Artificial Sequence: Synthetic oligonucleotide
  Target: SCNA; (-) strand; PAM type: YTN; PAM sequence: CTA
tatcctaccctgtaggttct

SEQ ID NO: 42547 - DNA, 20 bp, Artificial Sequence
  Description of Artificial Sequence: Synthetic oligonucleotide
  Target: SCNA; (-) strand; PAM type: YTN; PAM sequence: CTC
tatatcctaccctgtaggtt

SEQ ID NO: 42548 - DNA, 20 bp, Artificial Sequence
  Description of Artificial Sequence: Synthetic oligonucleotide
  Target: SCNA; (-) strand; PAM type: YTN; PAM sequence: CTA
tgtctctatatcctaccctg

SEQ ID NO: 42549 - DNA, 20 bp, Artificial Sequence
  Description of Artificial Sequence: Synthetic oligonucleotide
  Target: SCNA; (-) strand; PAM type: YTN; PAM sequence: TTA
ctatgtctctatatcctacc

SEQ ID NO: 42550 - DNA, 20 bp, Artificial Sequence
  Description of Artificial Sequence: Synthetic oligonucleotide
  Target: SCNA; (-) strand; PAM type: YTN; PAM sequence: CTT
actatgtctctatatcctac

SEQ ID NO: 42551 - DNA, 20 bp, Artificial Sequence
  Description of Artificial Sequence: Synthetic oligonucleotide
  Target: SCNA; (-) strand; PAM type: YTN; PAM sequence: TTC
ttactatgtctctatatcct

SEQ ID NO: 42552 - DNA, 20 bp, Artificial Sequence
  Description of Artificial Sequence: Synthetic oligonucleotide
  Target: SCNA; (-) strand; PAM type: YTN; PAM sequence: TTT
cttactatgtctctatatcc

SEQ ID NO: 42553 - DNA, 20 bp, Artificial Sequence
  Description of Artificial Sequence: Synthetic oligonucleotide
  Target: SCNA; (-) strand; PAM type: YTN; PAM sequence: TTT
tcttactatgtctctatatc

SEQ ID NO: 42554 - DNA, 20 bp, Artificial Sequence
  Description of Artificial Sequence: Synthetic oligonucleotide
  Target: SCNA; (-) strand; PAM type: YTN; PAM sequence: CTA
gtagagagagaataaaaggt

SEQ ID NO: 42555 - DNA, 20 bp, Artificial Sequence
  Description of Artificial Sequence: Synthetic oligonucleotide
  Target: SCNA; (-) strand; PAM type: YTN; PAM sequence: TTC
cagggatagggcctagtaga

SEQ ID NO: 42556 - DNA, 20 bp, Artificial Sequence
  Description of Artificial Sequence: Synthetic oligonucleotide
  Target: SCNA; (-) strand; PAM type: YTN; PAM sequence: CTA
ttccagggatagggcctagt

SEQ ID NO: 42557 - DNA, 20 bp, Artificial Sequence
  Description of Artificial Sequence: Synthetic oligonucleotide
  Target: SCNA; (-) strand; PAM type: YTN; PAM sequence: CTA
cagctattccagggataggg

SEQ ID NO: 42558 - DNA, 20 bp, Artificial Sequence
  Description of Artificial Sequence: Synthetic oligonucleotide
  Target: SCNA; (-) strand; PAM type: YTN; PAM sequence: TTG
aaaaaaaaaagtctacagct

SEQ ID NO: 42559 - DNA, 20 bp, Artificial Sequence
  Description of Artificial Sequence: Synthetic oligonucleotide
  Target: SCNA; (-) strand; PAM type: YTN; PAM sequence: TTT
gaaaaaaaaaagtctacagc

SEQ ID NO: 42560 - DNA, 20 bp, Artificial Sequence
  Description of Artificial Sequence: Synthetic oligonucleotide
  Target: SCNA; (-) strand; PAM type: YTN; PAM sequence: TTC
gtaaaacaatcccatttgaa

SEQ ID NO: 42561 - DNA, 20 bp, Artificial Sequence
  Description of Artificial Sequence: Synthetic oligonucleotide
  Target: SCNA; (-) strand; PAM type: YTN; PAM sequence: CTG
ttcgtaaaacaatcccattt

SEQ ID NO: 42562 - DNA, 20 bp, Artificial Sequence
  Description of Artificial Sequence: Synthetic oligonucleotide
  Target: SCNA; (-) strand; PAM type: YTN; PAM sequence: TTC
actgttcgtaaaacaatccc

SEQ ID NO: 42563 - DNA, 20 bp, Artificial Sequence
  Description of Artificial Sequence: Synthetic oligonucleotide
  Target: SCNA; (-) strand; PAM type: YTN; PAM sequence: TTT
cactgttcgtaaaacaatcc

SEQ ID NO: 42564 - DNA, 20 bp, Artificial Sequence
  Description of Artificial Sequence: Synthetic oligonucleotide
  Target: SCNA; (-) strand; PAM type: YTN; PAM sequence: CTA
tttcactgttcgtaaaacaa

SEQ ID NO: 42565 - DNA, 20 bp, Artificial Sequence
  Description of Artificial Sequence: Synthetic oligonucleotide
  Target: SCNA; (-) strand; PAM type: YTN; PAM sequence: CTG
agtctatttcactgttcgta

SEQ ID NO: 42566 - DNA, 20 bp, Artificial Sequence
  Description of Artificial Sequence: Synthetic oligonucleotide
  Target: SCNA; (-) strand; PAM type: YTN; PAM sequence: CTG
aactgagtctatttcactgt

SEQ ID NO: 42567 - DNA, 20 bp, Artificial Sequence
  Description of Artificial Sequence: Synthetic oligonucleotide
  Target: SCNA; (-) strand; PAM type: YTN; PAM sequence: CTG
tgtgtcaaatgcagatataa

SEQ ID NO: 42568 - DNA, 20 bp, Artificial Sequence
  Description of Artificial Sequence: Synthetic oligonucleotide
  Target: SCNA; (-) strand; PAM type: YTN; PAM sequence: TTC
tgtgtgtcaaatgcagatat

SEQ ID NO: 42569 - DNA, 20 bp, Artificial Sequence
  Description of Artificial Sequence: Synthetic oligonucleotide
  Target: SCNA; (-) strand; PAM type: YTN; PAM sequence: TTT
ctgtgtgtcaaatgcagata

SEQ ID NO: 42570 - DNA, 20 bp, Artificial Sequence
  Description of Artificial Sequence: Synthetic oligonucleotide
  Target: SCNA; (-) strand; PAM type: YTN; PAM sequence: CTT
tctgtgtgtcaaatgcagat

SEQ ID NO: 42571 - DNA, 20 bp, Artificial Sequence
  Description of Artificial Sequence: Synthetic oligonucleotide
  Target: SCNA; (-) strand; PAM type: YTN; PAM sequence: TTC
tttctgtgtgtcaaatgcag

SEQ ID NO: 42572 - DNA, 20 bp, Artificial Sequence
  Description of Artificial Sequence: Synthetic oligonucleotide
  Target: SCNA; (-) strand; PAM type: YTN; PAM sequence: TTT
ctttctgtgtgtcaaatgca

SEQ ID NO: 42573 - DNA, 20 bp, Artificial Sequence
  Description of Artificial Sequence: Synthetic oligonucleotide
  Target: SCNA; (-) strand; PAM type: YTN; PAM sequence: TTT
tctttctgtgtgtcaaatgc

SEQ ID NO: 42574 - DNA, 20 bp, Artificial Sequence
  Description of Artificial Sequence: Synthetic oligonucleotide
  Target: SCNA; (-) strand; PAM type: YTN; PAM sequence: TTT
ttctttctgtgtgtcaaatg

SEQ ID NO: 42575 - DNA, 20 bp, Artificial Sequence
  Description of Artificial Sequence: Synthetic oligonucleotide
  Target: SCNA; (-) strand; PAM type: YTN; PAM sequence: TTG
ataaccatttttctttctgt

SEQ ID NO: 42576 - DNA, 20 bp, Artificial Sequence
  Description of Artificial Sequence: Synthetic oligonucleotide
  Target: SCNA; (-) strand; PAM type: YTN; PAM sequence: TTT
gataaccatttttctttctg

SEQ ID NO: 42577 - DNA, 20 bp, Artificial Sequence
  Description of Artificial Sequence: Synthetic oligonucleotide
  Target: SCNA; (-) strand; PAM type: YTN; PAM sequence: TTT
tgataaccatttttctttct

SEQ ID NO: 42578 - DNA, 20 bp, Artificial Sequence
  Description of Artificial Sequence: Synthetic oligonucleotide
  Target: SCNA; (-) strand; PAM type: YTN; PAM sequence: TTT
ttgataaccatttttctttc

SEQ ID NO: 42579 - DNA, 20 bp, Artificial Sequence
  Description of Artificial Sequence: Synthetic oligonucleotide
  Target: SCNA; (-) strand; PAM type: YTN; PAM sequence: TTT
tttgataaccatttttcttt

SEQ ID NO: 42580 - DNA, 20 bp, Artificial Sequence
  Description of Artificial Sequence: Synthetic oligonucleotide
  Target: SCNA; (-) strand; PAM type: YTN; PAM sequence: TTG
taattttttgataaccattt

SEQ ID NO: 42581 - DNA, 20 bp, Artificial Sequence
  Description of Artificial Sequence: Synthetic oligonucleotide
  Target: SCNA; (-) strand; PAM type: YTN; PAM sequence: TTC
cattgtaattttttgataac

SEQ ID NO: 42582 - DNA, 20 bp, Artificial Sequence
  Description of Artificial Sequence: Synthetic oligonucleotide
  Target: SCNA; (-) strand; PAM type: YTN; PAM sequence: TTA
gcaatgagggtcattccatt

SEQ ID NO: 42583 - DNA, 20 bp, Artificial Sequence
  Description of Artificial Sequence: Synthetic oligonucleotide
  Target: SCNA; (-) strand; PAM type: YTN; PAM sequence: TTA
ttagcaatgagggtcattcc

SEQ ID NO: 42584 - DNA, 20 bp, Artificial Sequence
  Description of Artificial Sequence: Synthetic oligonucleotide
  Target: SCNA; (-) strand; PAM type: YTN; PAM sequence: CTT
attagcaatgagggtcattc

SEQ ID NO: 42585 - DNA, 20 bp, Artificial Sequence
  Description of Artificial Sequence: Synthetic oligonucleotide
  Target: SCNA; (-) strand; PAM type: YTN; PAM sequence: TTC
cttattagcaatgagggtca

SEQ ID NO: 42586 - DNA, 20 bp, Artificial Sequence
  Description of Artificial Sequence: Synthetic oligonucleotide
  Target: SCNA; (-) strand; PAM type: YTN; PAM sequence: TTT
ccttattagcaatgagggtc

SEQ ID NO: 42587 - DNA, 20 bp, Artificial Sequence
  Description of Artificial Sequence: Synthetic oligonucleotide
  Target: SCNA; (-) strand; PAM type: YTN; PAM sequence: CTT
tccttattagcaatgagggt

SEQ ID NO: 42588 - DNA, 20 bp, Artificial Sequence
  Description of Artificial Sequence: Synthetic oligonucleotide
  Target: SCNA; (-) strand; PAM type: YTN; PAM sequence: TTA
agtctttccttattagcaat

SEQ ID NO: 42589 - DNA, 20 bp, Artificial Sequence
  Description of Artificial Sequence: Synthetic oligonucleotide
  Target: SCNA; (-) strand; PAM type: YTN; PAM sequence: TTT
aagtctttccttattagcaa

SEQ ID NO: 42590 - DNA, 20 bp, Artificial Sequence
  Description of Artificial Sequence: Synthetic oligonucleotide
  Target: SCNA; (-) strand; PAM type: YTN; PAM sequence: TTT
taagtctttccttattagca

SEQ ID NO: 42591 - DNA, 20 bp, Artificial Sequence
  Description of Artificial Sequence: Synthetic oligonucleotide
  Target: SCNA; (-) strand; PAM type: YTN; PAM sequence: CTT
ttaagtctttccttattagc

SEQ ID NO: 42592 - DNA, 20 bp, Artificial Sequence
  Description of Artificial Sequence: Synthetic oligonucleotide
  Target: SCNA; (-) strand; PAM type: YTN; PAM sequence: CTA
atatagcttttaagtctttc

SEQ ID NO: 42593 - DNA, 20 bp, Artificial Sequence
  Description of Artificial Sequence: Synthetic oligonucleotide
  Target: SCNA; (-) strand; PAM type: YTN; PAM sequence: TTC
ctaatatagcttttaagtct

SEQ ID NO: 42594 - DNA, 20 bp, Artificial Sequence
  Description of Artificial Sequence: Synthetic oligonucleotide
  Target: SCNA; (-) strand; PAM type: YTN; PAM sequence: TTT
cctaatatagcttttaagtc

SEQ ID NO: 42595 - DNA, 20 bp, Artificial Sequence
  Description of Artificial Sequence: Synthetic oligonucleotide
  Target: SCNA; (-) strand; PAM type: YTN; PAM sequence: CTG
tttcctaatatagcttttaa

SEQ ID NO: 42596 - DNA, 20 bp, Artificial Sequence
  Description of Artificial Sequence: Synthetic oligonucleotide
  Target: SCNA; (-) strand; PAM type: YTN; PAM sequence: TTC
tgtttcctaatatagctttt

SEQ ID NO: 42597 - DNA, 20 bp, Artificial Sequence
  Description of Artificial Sequence: Synthetic oligonucleotide
  Target: SCNA; (-) strand; PAM type: YTN; PAM sequence: TTT
ctgtttcctaatatagcttt

SEQ ID NO: 42598 - DNA, 20 bp, Artificial Sequence
  Description of Artificial Sequence: Synthetic oligonucleotide
  Target: SCNA; (-) strand; PAM type: YTN; PAM sequence: CTC
agccatttctgtttcctaat

SEQ ID NO: 42599 - DNA, 20 bp, Artificial Sequence
  Description of Artificial Sequence: Synthetic oligonucleotide
  Target: SCNA; (-) strand; PAM type: YTN; PAM sequence: TTA
gggagaaagaggtcagtctc

SEQ ID NO: 42600 - DNA, 20 bp, Artificial Sequence
  Description of Artificial Sequence: Synthetic oligonucleotide
  Target: SCNA; (-) strand; PAM type: YTN; PAM sequence: TTT
agggagaaagaggtcagtct

SEQ ID NO: 42601 - DNA, 20 bp, Artificial Sequence
  Description of Artificial Sequence: Synthetic oligonucleotide
  Target: SCNA; (-) strand; PAM type: YTN; PAM sequence: TTT
tagggagaaagaggtcagtc

SEQ ID NO: 42602 - DNA, 20 bp, Artificial Sequence
  Description of Artificial Sequence: Synthetic oligonucleotide
  Target: SCNA; (-) strand; PAM type: YTN; PAM sequence: TTT
ttagggagaaagaggtcagt

SEQ ID NO: 42603 - DNA, 20 bp, Artificial Sequence
  Description of Artificial Sequence: Synthetic oligonucleotide
  Target: SCNA; (-) strand; PAM type: YTN; PAM sequence: CTT
tttagggagaaagaggtcag

SEQ ID NO: 42604 - DNA, 20 bp, Artificial Sequence
  Description of Artificial Sequence: Synthetic oligonucleotide
  Target: SCNA; (-) strand; PAM type: YTN; PAM sequence: TTG
aataagctttttagggagaa

SEQ ID NO: 42605 - DNA, 20 bp, Artificial Sequence
  Description of Artificial Sequence: Synthetic oligonucleotide
  Target: SCNA; (-) strand; PAM type: YTN; PAM sequence: CTT
gaataagctttttagggaga

SEQ ID NO: 42606 - DNA, 20 bp, Artificial Sequence
  Description of Artificial Sequence: Synthetic oligonucleotide
  Target: SCNA; (-) strand; PAM type: YTN; PAM sequence: TTA
aaaagaacttgaataagctt

SEQ ID NO: 42607 - DNA, 20 bp, Artificial Sequence
  Description of Artificial Sequence: Synthetic oligonucleotide
  Target: SCNA; (-) strand; PAM type: YTN; PAM sequence: TTT
aaaaagaacttgaataagct

SEQ ID NO: 42608 - DNA, 20 bp, Artificial Sequence
  Description of Artificial Sequence: Synthetic oligonucleotide
  Target: SCNA; (-) strand; PAM type: YTN; PAM sequence: TTA
tttaaaaagaacttgaataa

SEQ ID NO: 42609 - DNA, 20 bp, Artificial Sequence
  Description of Artificial Sequence: Synthetic oligonucleotide
  Target: SCNA; (-) strand; PAM type: YTN; PAM sequence: TTT
atttaaaaagaacttgaata

SEQ ID NO: 42610 - DNA, 20 bp, Artificial Sequence
  Description of Artificial Sequence: Synthetic oligonucleotide
  Target: SCNA; (-) strand; PAM type: YTN; PAM sequence: CTA
caggtttatttaaaaagaac

SEQ ID NO: 42611 - DNA, 20 bp, Artificial Sequence
  Description of Artificial Sequence: Synthetic oligonucleotide
  Target: SCNA; (-) strand; PAM type: YTN; PAM sequence: TTC
aaccctacaggtttatttaa

SEQ ID NO: 42612 - DNA, 20 bp, Artificial Sequence
  Description of Artificial Sequence: Synthetic oligonucleotide
  Target: SCNA; (-) strand; PAM type: YTN; PAM sequence: CTA
ttcaaccctacaggtttatt

SEQ ID NO: 42613 - DNA, 20 bp, Artificial Sequence
  Description of Artificial Sequence: Synthetic oligonucleotide
  Target: SCNA; (-) strand; PAM type: YTN; PAM sequence: TTA
tatcagctattcaaccctac

SEQ ID NO: 42614 - DNA, 20 bp, Artificial Sequence
  Description of Artificial Sequence: Synthetic oligonucleotide
  Target: SCNA; (-) strand; PAM type: YTN; PAM sequence: CTG
ggacgagtacgaaatgataa

SEQ ID NO: 42615 - DNA, 20 bp, Artificial Sequence
  Description of Artificial Sequence: Synthetic oligonucleotide
  Target: SCNA; (-) strand; PAM type: YTN; PAM sequence: TTC
agctgggacgagtacgaaat

SEQ ID NO: 42616 - DNA, 20 bp, Artificial Sequence
  Description of Artificial Sequence: Synthetic oligonucleotide
  Target: SCNA; (-) strand; PAM type: YTN; PAM sequence: CTT
cagctgggacgagtacgaaa

SEQ ID NO: 42617 - DNA, 20 bp, Artificial Sequence
  Description of Artificial Sequence: Synthetic oligonucleotide
  Target: SCNA; (-) strand; PAM type: YTN; PAM sequence: TTA
tagagcacttcagctgggac

SEQ ID NO: 42618 - DNA, 20 bp, Artificial Sequence
  Description of Artificial Sequence: Synthetic oligonucleotide
  Target: SCNA; (-) strand; PAM type: YTN; PAM sequence: TTT
atagagcacttcagctggga

SEQ ID NO: 42619 - DNA, 20 bp, Artificial Sequence
  Description of Artificial Sequence: Synthetic oligonucleotide
  Target: SCNA; (-) strand; PAM type: YTN; PAM sequence: TTT
tatagagcacttcagctggg

SEQ ID NO: 42620 - DNA, 20 bp, Artificial Sequence
  Description of Artificial Sequence: Synthetic oligonucleotide
  Target: SCNA; (-) strand; PAM type: YTN; PAM sequence: CTG
ttttatagagcacttcagct

SEQ ID NO: 42621 - DNA, 20 bp, Artificial Sequence
  Description of Artificial Sequence: Synthetic oligonucleotide
  Target: SCNA; (-) strand; PAM type: YTN; PAM sequence: CTC
atgatctgttttatagagca

SEQ ID NO: 42622 - DNA, 20 bp, Artificial Sequence
  Description of Artificial Sequence: Synthetic oligonucleotide
  Target: SCNA; (-) strand; PAM type: YTN; PAM sequence: TTC
gtctcatgatctgttttata

SEQ ID NO: 42623 - DNA, 20 bp, Artificial Sequence
  Description of Artificial Sequence: Synthetic oligonucleotide
  Target: SCNA; (-) strand; PAM type: YTN; PAM sequence: CTT
cgtctcatgatctgttttat

SEQ ID NO: 42624 - DNA, 20 bp, Artificial Sequence
  Description of Artificial Sequence: Synthetic oligonucleotide
  Target: SCNA; (-) strand; PAM type: YTN; PAM sequence: TTA
gcagtgaaggaagcttcgtc

SEQ ID NO: 42625 - DNA, 20 bp, Artificial Sequence
  Description of Artificial Sequence: Synthetic oligonucleotide
  Target: SCNA; (-) strand; PAM type: YTN; PAM sequence: CTA
ttagcagtgaaggaagcttc

SEQ ID NO: 42626 - DNA, 20 bp, Artificial Sequence
  Description of Artificial Sequence: Synthetic oligonucleotide
  Target: SCNA; (-) strand; PAM type: YTN; PAM sequence: TTC
ccaataagctattagcagtg

SEQ ID NO: 42627 - DNA, 20 bp, Artificial Sequence
  Description of Artificial Sequence: Synthetic oligonucleotide
  Target: SCNA; (-) strand; PAM type: YTN; PAM sequence: CTT
cccaataagctattagcagt

SEQ ID NO: 42628 - DNA, 20 bp, Artificial Sequence
  Description of Artificial Sequence: Synthetic oligonucleotide
  Target: SCNA; (-) strand; PAM type: YTN; PAM sequence: TTG
tacttcccaataagctatta

SEQ ID NO: 42629 - DNA, 20 bp, Artificial Sequence
  Description of Artificial Sequence: Synthetic oligonucleotide
  Target: SCNA; (-) strand; PAM type: YTN; PAM sequence: CTG
gaattgtacttcccaataag

SEQ ID NO: 42630 - DNA, 20 bp, Artificial Sequence
  Description of Artificial Sequence: Synthetic oligonucleotide
  Target: SCNA; (-) strand; PAM type: YTN; PAM sequence: TTC
cctggaattgtacttcccaa

SEQ ID NO: 42631 - DNA, 20 bp, Artificial Sequence
  Description of Artificial Sequence: Synthetic oligonucleotide
  Target: SCNA; (-) strand; PAM type: YTN; PAM sequence: CTT
ccctggaattgtacttccca

SEQ ID NO: 42632 - DNA, 20 bp, Artificial Sequence
  Description of Artificial Sequence: Synthetic oligonucleotide
  Target: SCNA; (-) strand; PAM type: YTN; PAM sequence: TTC
acttccctggaattgtactt

SEQ ID NO: 42633 - DNA, 20 bp, Artificial Sequence
  Description of Artificial Sequence: Synthetic oligonucleotide
  Target: SCNA; (-) strand; PAM type: YTN; PAM sequence: TTT
cacttccctggaattgtact

SEQ ID NO: 42634 - DNA, 20 bp, Artificial Sequence
  Description of Artificial Sequence: Synthetic oligonucleotide
  Target: SCNA; (-) strand; PAM type: YTN; PAM sequence: CTT
tcacttccctggaattgtac

SEQ ID NO: 42635 - DNA, 20 bp, Artificial Sequence
  Description of Artificial Sequence: Synthetic oligonucleotide
  Target: SCNA; (-) strand; PAM type: YTN; PAM sequence: TTC
actttcacttccctggaatt

SEQ ID NO: 42636 - DNA, 20 bp, Artificial Sequence
  Description of Artificial Sequence: Synthetic oligonucleotide
  Target: SCNA; (-) strand; PAM type: YTN; PAM sequence: CTT
cactttcacttccctggaat

SEQ ID NO: 42637 - DNA, 20 bp, Artificial Sequence
  Description of Artificial Sequence: Synthetic oligonucleotide
  Target: SCNA; (-) strand; PAM type: YTN; PAM sequence: TTC
cttcactttcacttccctgg

SEQ ID NO: 42638 - DNA, 20 bp, Artificial Sequence
  Description of Artificial Sequence: Synthetic oligonucleotide
  Target: SCNA; (-) strand; PAM type: YTN; PAM sequence: TTT
ccttcactttcacttccctg

SEQ ID NO: 42639 - DNA, 20 bp, Artificial Sequence
  Description of Artificial Sequence: Synthetic oligonucleotide
  Target: SCNA; (-) strand; PAM type: YTN; PAM sequence: TTT
tccttcactttcacttccct

SEQ ID NO: 42640 - DNA, 20 bp, Artificial Sequence
  Description of Artificial Sequence: Synthetic oligonucleotide
  Target: SCNA; (-) strand; PAM type: YTN; PAM sequence: CTT
ttccttcactttcacttccc

SEQ ID NO: 42641 - DNA, 20 bp, Artificial Sequence
  Description of Artificial Sequence: Synthetic oligonucleotide
  Target: SCNA; (-) strand; PAM type: YTN; PAM sequence: TTC
ccttttccttcactttcact

SEQ ID NO: 42642 - DNA, 20 bp, Artificial Sequence
  Description of Artificial Sequence: Synthetic oligonucleotide
  Target: SCNA; (-) strand; PAM type: YTN; PAM sequence: CTT
cccttttccttcactttcac

SEQ ID NO: 42643 - DNA, 20 bp, Artificial Sequence
  Description of Artificial Sequence: Synthetic oligonucleotide
  Target: SCNA; (-) strand; PAM type: YTN; PAM sequence: TTG
tatcacttcccttttccttc

SEQ ID NO: 42644 - DNA, 20 bp, Artificial Sequence
  Description of Artificial Sequence: Synthetic oligonucleotide
  Target: SCNA; (-) strand; PAM type: YTN; PAM sequence: CTT
gtatcacttcccttttcctt

SEQ ID NO: 42645 - DNA, 20 bp, Artificial Sequence
  Description of Artificial Sequence: Synthetic oligonucleotide
  Target: SCNA; (-) strand; PAM type: YTN; PAM sequence: CTC
cttgtatcacttcccttttc

SEQ ID NO: 42646 - DNA, 20 bp, Artificial Sequence
  Description of Artificial Sequence: Synthetic oligonucleotide
  Target: SCNA; (-) strand; PAM type: YTN; PAM sequence: TTC
tccttgtatcacttcccttt

SEQ ID NO: 42647 - DNA, 20 bp, Artificial Sequence
  Description of Artificial Sequence: Synthetic oligonucleotide
  Target: SCNA; (-) strand; PAM type: YTN; PAM sequence: CTT
ctccttgtatcacttccctt

SEQ ID NO: 42648 - DNA, 20 bp, Artificial Sequence
  Description of Artificial Sequence: Synthetic oligonucleotide
  Target: SCNA; (-) strand; PAM type: YTN; PAM sequence: CTA
cttctccttgtatcacttcc

SEQ ID NO: 42649 - DNA, 20 bp, Artificial Sequence
  Description of Artificial Sequence: Synthetic oligonucleotide
  Target: SCNA; (-) strand; PAM type: YTN; PAM sequence: TTC
ctacttctccttgtatcact

SEQ ID NO: 42650 - DNA, 20 bp, Artificial Sequence
  Description of Artificial Sequence: Synthetic oligonucleotide
  Target: SCNA; (-) strand; PAM type: YTN; PAM sequence: TTT
cctacttctccttgtatcac

SEQ ID NO: 42651 - DNA, 20 bp, Artificial Sequence
  Description of Artificial Sequence: Synthetic oligonucleotide
  Target: SCNA; (-) strand; PAM type: YTN; PAM sequence: TTT
tcctacttctccttgtatca

SEQ ID NO: 42652 - DNA, 20 bp, Artificial Sequence
  Description of Artificial Sequence: Synthetic oligonucleotide
  Target: SCNA; (-) strand; PAM type: YTN; PAM sequence: TTT
ttcctacttctccttgtatc

SEQ ID NO: 42653 - DNA, 20 bp, Artificial Sequence
  Description of Artificial Sequence: Synthetic oligonucleotide
  Target: SCNA; (-) strand; PAM type: YTN; PAM sequence: TTT
tttcctacttctccttgtat

SEQ ID NO: 42654 - DNA, 20 bp, Artificial Sequence
  Description of Artificial Sequence: Synthetic oligonucleotide
  Target: SCNA; (-) strand; PAM type: YTN; PAM sequence: CTG
aaattttttcctacttctcc

SEQ ID NO: 42655 - DNA, 20 bp, Artificial Sequence
  Description of Artificial Sequence: Synthetic oligonucleotide
  Target: SCNA; (-) strand; PAM type: YTN; PAM sequence: CTA
aagacagtagctgaaatttt

SEQ ID NO: 42656 - DNA, 20 bp, Artificial Sequence
  Description of Artificial Sequence: Synthetic oligonucleotide
  Target: SCNA; (-) strand; PAM type: YTN; PAM sequence: TTC
ctaaagacagtagctgaaat

SEQ ID NO: 42657 - DNA, 20 bp, Artificial Sequence
  Description of Artificial Sequence: Synthetic oligonucleotide
  Target: SCNA; (-) strand; PAM type: YTN; PAM sequence: TTG
tattcctaaagacagtagct

SEQ ID NO: 42658 - DNA, 20 bp, Artificial Sequence
  Description of Artificial Sequence: Synthetic oligonucleotide
  Target: SCNA; (-) strand; PAM type: YTN; PAM sequence: CTG
tagttgtattcctaaagaca

SEQ ID NO: 42659 - DNA, 20 bp, Artificial Sequence
  Description of Artificial Sequence: Synthetic oligonucleotide
  Target: SCNA; (-) strand; PAM type: YTN; PAM sequence: TTC
tgtagttgtattcctaaaga

SEQ ID NO: 42660 - DNA, 20 bp, Artificial Sequence
  Description of Artificial Sequence: Synthetic oligonucleotide
  Target: SCNA; (-) strand; PAM type: YTN; PAM sequence: TTA
tgtaaattctgtagttgtat

SEQ ID NO: 42661 - DNA, 20 bp, Artificial Sequence
  Description of Artificial Sequence: Synthetic oligonucleotide
  Target: SCNA; (-) strand; PAM type: YTN; PAM sequence: TTA
aaaagattatgtaaattctg

SEQ ID NO: 42662 - DNA, 20 bp, Artificial Sequence
  Description of Artificial Sequence: Synthetic oligonucleotide
  Target: SCNA; (-) strand; PAM type: YTN; PAM sequence: TTT
aaaaagattatgtaaattct

SEQ ID NO: 42663 - DNA, 20 bp, Artificial Sequence
  Description of Artificial Sequence: Synthetic oligonucleotide
  Target: SCNA; (-) strand; PAM type: YTN; PAM sequence: TTC
aaaacaggaaatttaaaaag

SEQ ID NO: 42664 - DNA, 20 bp, Artificial Sequence
  Description of Artificial Sequence: Synthetic oligonucleotide
  Target: SCNA; (-) strand; PAM type: YTN; PAM sequence: CTA
aatacaatatggttcaaaac

SEQ ID NO: 42665 - DNA, 20 bp, Artificial Sequence
  Description of Artificial Sequence: Synthetic oligonucleotide
  Target: SCNA; (-) strand; PAM type: YTN; PAM sequence: CTA
ggtatctaaatacaatatgg

SEQ ID NO: 42666 - DNA, 20 bp, Artificial Sequence
  Description of Artificial Sequence: Synthetic oligonucleotide
  Target: SCNA; (-) strand; PAM type: YTN; PAM sequence: TTA
ctaggtatctaaatacaata

SEQ ID NO: 42667 - DNA, 20 bp, Artificial Sequence
  Description of Artificial Sequence: Synthetic oligonucleotide
  Target: SCNA; (-) strand; PAM type: YTN; PAM sequence: TTA
cagaaagtattactaggtat

SEQ ID NO: 42668 - DNA, 20 bp, Artificial Sequence
  Description of Artificial Sequence: Synthetic oligonucleotide
  Target: SCNA; (-) strand; PAM type: YTN; PAM sequence: CTT
acagaaagtattactaggta

SEQ ID NO: 42669 - DNA, 20 bp, Artificial Sequence
  Description of Artificial Sequence: Synthetic oligonucleotide
  Target: SCNA; (-) strand; PAM type: YTN; PAM sequence: TTC
cttacagaaagtattactag

SEQ ID NO: 42670 - DNA, 20 bp, Artificial Sequence
  Description of Artificial Sequence: Synthetic oligonucleotide
  Target: SCNA; (-) strand; PAM type: YTN; PAM sequence: TTT
ccttacagaaagtattacta

SEQ ID NO: 42671 - DNA, 20 bp, Artificial Sequence
  Description of Artificial Sequence: Synthetic oligonucleotide
  Target: SCNA; (-) strand; PAM type: YTN; PAM sequence: TTG
aataaagataatttccttac

SEQ ID NO: 42672 - DNA, 20 bp, Artificial Sequence
  Description of Artificial Sequence: Synthetic oligonucleotide
  Target: SCNA; (-) strand; PAM type: YTN; PAM sequence: TTA
taagtcatagaattgaataa

SEQ ID NO: 42673 - DNA, 20 bp, Artificial Sequence
  Description of Artificial Sequence: Synthetic oligonucleotide
  Target: SCNA; (-) strand; PAM type: YTN; PAM sequence: TTA
aagttataagtcatagaatt

SEQ ID NO: 42674 - DNA, 20 bp, Artificial Sequence
  Description of Artificial Sequence: Synthetic oligonucleotide
  Target: SCNA; (-) strand; PAM type: YTN; PAM sequence: TTA
aaattaaagttataagtcat

SEQ ID NO: 42675 - DNA, 20 bp, Artificial Sequence
  Description of Artificial Sequence: Synthetic oligonucleotide
  Target: SCNA; (-) strand; PAM type: YTN; PAM sequence: TTT
aaaattaaagttataagtca

SEQ ID NO: 42676 - DNA, 20 bp, Artificial Sequence
  Description of Artificial Sequence: Synthetic oligonucleotide
  Target: SCNA; (-) strand; PAM type: YTN; PAM sequence: TTA
aatatatttaaaattaaagt

SEQ ID NO: 42677 - DNA, 20 bp, Artificial Sequence
  Description of Artificial Sequence: Synthetic oligonucleotide
  Target: SCNA; (-) strand; PAM type: YTN; PAM sequence: TTT
aaatatatttaaaattaaag

SEQ ID NO: 42678 - DNA, 20 bp, Artificial Sequence
  Description of Artificial Sequence: Synthetic oligonucleotide
  Target: SCNA; (-) strand; PAM type: YTN; PAM sequence: TTT
taaatatatttaaaattaaa

SEQ ID NO: 42679 - DNA, 20 bp, Artificial Sequence
  Description of Artificial Sequence: Synthetic oligonucleotide
  Target: SCNA; (-) strand; PAM type: YTN; PAM sequence: TTA
tgtgtcattttaaatatatt

SEQ ID NO: 42680 - DNA, 20 bp, Artificial Sequence
  Description of Artificial Sequence: Synthetic oligonucleotide
  Target: SCNA; (-) strand; PAM type: YTN; PAM sequence: TTA
ttatgtgtcattttaaatat

SEQ ID NO: 42681 - DNA, 20 bp, Artificial Sequence
  Description of Artificial Sequence: Synthetic oligonucleotide
  Target: SCNA; (-) strand; PAM type: YTN; PAM sequence: TTT
attatgtgtcattttaaata

SEQ ID NO: 42682 - DNA, 20 bp, Artificial Sequence
  Description of Artificial Sequence: Synthetic oligonucleotide
  Target: SCNA; (-) strand; PAM type: YTN; PAM sequence: CTT
tattatgtgtcattttaaat

SEQ ID NO: 42683 - DNA, 20 bp, Artificial Sequence
  Description of Artificial Sequence: Synthetic oligonucleotide
  Target: SCNA; (-) strand; PAM type: YTN; PAM sequence: TTG
cctttattatgtgtcatttt

SEQ ID NO: 42684 - DNA, 20 bp, Artificial Sequence
  Description of Artificial Sequence: Synthetic oligonucleotide
  Target: SCNA; (-) strand; PAM type: YTN; PAM sequence: TTT
gcctttattatgtgtcattt

SEQ ID NO: 42685 - DNA, 20 bp, Artificial Sequence
  Description of Artificial Sequence: Synthetic oligonucleotide
  Target: SCNA; (-) strand; PAM type: YTN; PAM sequence: TTT
tgcctttattatgtgtcatt

SEQ ID NO: 42686 - DNA, 20 bp, Artificial Sequence
  Description of Artificial Sequence: Synthetic oligonucleotide
  Target: SCNA; (-) strand; PAM type: YTN; PAM sequence: TTT
ttgcctttattatgtgtcat

SEQ ID NO: 42687 - DNA, 20 bp, Artificial Sequence
  Description of Artificial Sequence: Synthetic oligonucleotide
  Target: SCNA; (-) strand; PAM type: YTN; PAM sequence: TTG
gaaagcaatttttgccttta

SEQ ID NO: 42688 - DNA, 20 bp, Artificial Sequence
  Description of Artificial Sequence: Synthetic oligonucleotide
  Target: SCNA; (-) strand; PAM type: YTN; PAM sequence: TTT
ggaaagcaatttttgccttt

SEQ ID NO: 42689 - DNA, 20 bp, Artificial Sequence
  Description of Artificial Sequence: Synthetic oligonucleotide
  Target: SCNA; (-) strand; PAM type: YTN; PAM sequence: CTA
gaagagtgtggtttggaaag

SEQ ID NO: 42690 - DNA, 20 bp, Artificial Sequence
  Description of Artificial Sequence: Synthetic oligonucleotide
  Target: SCNA; (-) strand; PAM type: YTN; PAM sequence: TTC
tagaagagtgtggtttggaa

SEQ ID NO: 42691 - DNA, 20 bp, Artificial Sequence
  Description of Artificial Sequence: Synthetic oligonucleotide
  Target: SCNA; (-) strand; PAM type: YTN; PAM sequence: CTA
gatgattctagaagagtgtg

SEQ ID NO: 42692 - DNA, 20 bp, Artificial Sequence
  Description of Artificial Sequence: Synthetic oligonucleotide
  Target: SCNA; (-) strand; PAM type: YTN; PAM sequence: TTA
acaagggccctagatgattc

SEQ ID NO: 42693 - DNA, 20 bp, Artificial Sequence
  Description of Artificial Sequence: Synthetic oligonucleotide
  Target: SCNA; (-) strand; PAM type: YTN; PAM sequence: TTT
aacaagggccctagatgatt

SEQ ID NO: 42694 - DNA, 20 bp, Artificial Sequence
  Description of Artificial Sequence: Synthetic oligonucleotide
  Target: SCNA; (-) strand; PAM type: YTN; PAM sequence: TTT
taacaagggccctagatgat

SEQ ID NO: 42695 - DNA, 20 bp, Artificial Sequence
  Description of Artificial Sequence: Synthetic oligonucleotide
  Target: SCNA; (-) strand; PAM type: YTN; PAM sequence: TTT
ttaacaagggccctagatga

SEQ ID NO: 42696 - DNA, 20 bp, Artificial Sequence
  Description of Artificial Sequence: Synthetic oligonucleotide
  Target: SCNA; (-) strand; PAM type: YTN; PAM sequence: CTG
catttttaacaagggcccta

SEQ ID NO: 42697 - DNA, 20 bp, Artificial Sequence
  Description of Artificial Sequence: Synthetic oligonucleotide
  Target: SCNA; (-) strand; PAM type: YTN; PAM sequence: CTA
caaacctgcatttttaacaa

SEQ ID NO: 42698 - DNA, 20 bp, Artificial Sequence
  Description of Artificial Sequence: Synthetic oligonucleotide
  Target: SCNA; (-) strand; PAM type: YTN; PAM sequence: CTC
acaaggccctacaaacctgc

SEQ ID NO: 42699 - DNA, 20 bp, Artificial Sequence
  Description of Artificial Sequence: Synthetic oligonucleotide
  Target: SCNA; (-) strand; PAM type: YTN; PAM sequence: TTA
acaagacactcacaaggccc

SEQ ID NO: 42700 - DNA, 20 bp, Artificial Sequence
  Description of Artificial Sequence: Synthetic oligonucleotide
  Target: SCNA; (-) strand; PAM type: YTN; PAM sequence: CTT
aacaagacactcacaaggcc

SEQ ID NO: 42701 - DNA, 20 bp, Artificial Sequence
  Description of Artificial Sequence: Synthetic oligonucleotide
  Target: SCNA; (-) strand; PAM type: YTN; PAM sequence: TTC
caaggaacatacttaacaag

SEQ ID NO: 42702 - DNA, 20 bp, Artificial Sequence
  Description of Artificial Sequence: Synthetic oligonucleotide
  Target: SCNA; (-) strand; PAM type: YTN; PAM sequence: TTT
ccaaggaacatacttaacaa

SEQ ID NO: 42703 - DNA, 20 bp, Artificial Sequence
  Description of Artificial Sequence: Synthetic oligonucleotide
  Target: SCNA; (-) strand; PAM type: YTN; PAM sequence: TTG
gtgatgtcgggcagtggttt

SEQ ID NO: 42704 - DNA, 20 bp, Artificial Sequence
  Description of Artificial Sequence: Synthetic oligonucleotide
  Target: SCNA; (-) strand; PAM type: YTN; PAM sequence: TTA
caaacaattggtgatgtcgg

SEQ ID NO: 42705 - DNA, 20 bp, Artificial Sequence
  Description of Artificial Sequence: Synthetic oligonucleotide
  Target: SCNA; (-) strand; PAM type: YTN; PAM sequence: TTT
acaaacaattggtgatgtcg

SEQ ID NO: 42706 - DNA, 20 bp, Artificial Sequence
  Description of Artificial Sequence: Synthetic oligonucleotide
  Target: SCNA; (-) strand; PAM type: YTN; PAM sequence: TTA
taccacagggtttacaaaca

SEQ ID NO: 42707 - DNA, 20 bp, Artificial Sequence
  Description of Artificial Sequence: Synthetic oligonucleotide
  Target: SCNA; (-) strand; PAM type: YTN; PAM sequence: TTA
aattataccacagggtttac

SEQ ID NO: 42708 - DNA, 20 bp, Artificial Sequence
  Description of Artificial Sequence: Synthetic oligonucleotide
  Target: SCNA; (-) strand; PAM type: YTN; PAM sequence: CTA
tattaaattataccacaggg

SEQ ID NO: 42709 - DNA, 20 bp, Artificial Sequence
  Description of Artificial Sequence: Synthetic oligonucleotide
  Target: SCNA; (-) strand; PAM type: YTN; PAM sequence: CTC
tatattaaattataccacag

SEQ ID NO: 42710 - DNA, 20 bp, Artificial Sequence
  Description of Artificial Sequence: Synthetic oligonucleotide
  Target: SCNA; (-) strand; PAM type: YTN; PAM sequence: TTG
gtatactctatattaaatta

SEQ ID NO: 42711 - DNA, 20 bp, Artificial Sequence
  Description of Artificial Sequence: Synthetic oligonucleotide
  Target: SCNA; (-) strand; PAM type: YTN; PAM sequence: CTG
acagcaagtacattggtata

SEQ ID NO: 42712 - DNA, 20 bp, Artificial Sequence
  Description of Artificial Sequence: Synthetic oligonucleotide
  Target: SCNA; (-) strand; PAM type: YTN; PAM sequence: TTC
acactgacagcaagtacatt

SEQ ID NO: 42713 - DNA, 20 bp, Artificial Sequence
  Description of Artificial Sequence: Synthetic oligonucleotide
  Target: SCNA; (-) strand; PAM type: YTN; PAM sequence: TTA
ttcacactgacagcaagtac

SEQ ID NO: 42714 - DNA, 20 bp, Artificial Sequence
  Description of Artificial Sequence: Synthetic oligonucleotide
  Target: SCNA; (-) strand; PAM type: YTN; PAM sequence: TTA
aaaaaaattattcacactga

SEQ ID NO: 42715 - DNA, 20 bp, Artificial Sequence
  Description of Artificial Sequence: Synthetic oligonucleotide
  Target: SCNA; (-) strand; PAM type: YTN; PAM sequence: TTT
aaaaaaaattattcacactg

SEQ ID NO: 42716 - DNA, 20 bp, Artificial Sequence
  Description of Artificial Sequence: Synthetic oligonucleotide
  Target: SCNA; (-) strand; PAM type: YTN; PAM sequence: TTT
taaaaaaaattattcacact

SEQ ID NO: 42717 - DNA, 20 bp, Artificial Sequence
  Description of Artificial Sequence: Synthetic oligonucleotide
  Target: SCNA; (-) strand; PAM type: YTN; PAM sequence: TTT
ttaaaaaaaattattcacac

SEQ ID NO: 42718 - DNA, 20 bp, Artificial Sequence
  Description of Artificial Sequence: Synthetic oligonucleotide
  Target: SCNA; (-) strand; PAM type: YTN; PAM sequence: TTT
tttaaaaaaaattattcaca

SEQ ID NO: 42719 - DNA, 20 bp, Artificial Sequence
  Description of Artificial Sequence: Synthetic oligonucleotide
  Target: SCNA; (-) strand; PAM type: YTN; PAM sequence: CTT
ttttaaaaaaaattattcac

SEQ ID NO: 42720 - DNA, 20 bp, Artificial Sequence
  Description of Artificial Sequence: Synthetic oligonucleotide
  Target: SCNA; (-) strand; PAM type: YTN; PAM sequence: TTC
aaaatgagcatatctttttt

SEQ ID NO: 42721 - DNA, 20 bp, Artificial Sequence
  Description of Artificial Sequence: Synthetic oligonucleotide
  Target: SCNA; (-) strand; PAM type: YTN; PAM sequence: CTT
caaaatgagcatatcttttt

SEQ ID NO: 42722 - DNA, 20 bp, Artificial Sequence
  Description of Artificial Sequence: Synthetic oligonucleotide
  Target: SCNA; (-) strand; PAM type: YTN; PAM sequence: TTG
atggacttcaaaatgagcat

SEQ ID NO: 42723 - DNA, 20 bp, Artificial Sequence
  Description of Artificial Sequence: Synthetic oligonucleotide
  Target: SCNA; (-) strand; PAM type: YTN; PAM sequence: TTT
gatggacttcaaaatgagca

SEQ ID NO: 42724 - DNA, 20 bp, Artificial Sequence
  Description of Artificial Sequence: Synthetic oligonucleotide
  Target: SCNA; (-) strand; PAM type: YTN; PAM sequence: TTG
ccaacatttgatggacttca

SEQ ID NO: 42725 - DNA, 20 bp, Artificial Sequence
  Description of Artificial Sequence: Synthetic oligonucleotide
  Target: SCNA; (-) strand; PAM type: YTN; PAM sequence: TTT
gccaacatttgatggacttc

SEQ ID NO: 42726 - DNA, 20 bp, Artificial Sequence
  Description of Artificial Sequence: Synthetic oligonucleotide
  Target: SCNA; (-) strand; PAM type: YTN; PAM sequence: CTC
aacatttgccaacatttgat

SEQ ID NO: 42727 - DNA, 20 bp, Artificial Sequence
  Description of Artificial Sequence: Synthetic oligonucleotide
  Target: SCNA; (-) strand; PAM type: YTN; PAM sequence: TTC
agataaccctcaacatttgc

SEQ ID NO: 42728 - DNA, 20 bp, Artificial Sequence
  Description of Artificial Sequence: Synthetic oligonucleotide
  Target: SCNA; (-) strand; PAM type: YTN; PAM sequence: CTT
cagataaccctcaacatttg

SEQ ID NO: 42729 - DNA, 20 bp, Artificial Sequence
  Description of Artificial Sequence: Synthetic oligonucleotide
  Target: SCNA; (-) strand; PAM type: YTN; PAM sequence: TTC
ccagtgtcttcagataaccc

SEQ ID NO: 42730 - DNA, 20 bp, Artificial Sequence
  Description of Artificial Sequence: Synthetic oligonucleotide
  Target: SCNA; (-) strand; PAM type: YTN; PAM sequence: CTT
cccagtgtcttcagataacc

SEQ ID NO: 42731 - DNA, 20 bp, Artificial Sequence
  Description of Artificial Sequence: Synthetic oligonucleotide
  Target: SCNA; (-) strand; PAM type: YTN; PAM sequence: TTA
cttcccagtgtcttcagata

SEQ ID NO: 42732 - DNA, 20 bp, Artificial Sequence
  Description of Artificial Sequence: Synthetic oligonucleotide
  Target: SCNA; (-) strand; PAM type: YTN; PAM sequence: TTA
acgatcaccatggattactt

SEQ ID NO: 42733 - DNA, 20 bp, Artificial Sequence
  Description of Artificial Sequence: Synthetic oligonucleotide
  Target: SCNA; (-) strand; PAM type: YTN; PAM sequence: TTT
aacgatcaccatggattact

SEQ ID NO: 42734 - DNA, 20 bp, Artificial Sequence
  Description of Artificial Sequence: Synthetic oligonucleotide
  Target: SCNA; (-) strand; PAM type: YTN; PAM sequence: TTT
taacgatcaccatggattac

SEQ ID NO: 42735 - DNA, 20 bp, Artificial Sequence
  Description of Artificial Sequence: Synthetic oligonucleotide
  Target: SCNA; (-) strand; PAM type: YTN; PAM sequence: CTA
ttttaacgatcaccatggat

SEQ ID NO: 42736 - DNA, 20 bp, Artificial Sequence
  Description of Artificial Sequence: Synthetic oligonucleotide
  Target: SCNA; (-) strand; PAM type: YTN; PAM sequence: TTG
ctattttaacgatcaccatg

SEQ ID NO: 42737 - DNA, 20 bp, Artificial Sequence
  Description of Artificial Sequence: Synthetic oligonucleotide
  Target: SCNA; (-) strand; PAM type: YTN; PAM sequence: CTT
gctattttaacgatcaccat

SEQ ID NO: 42738 - DNA, 20 bp, Artificial Sequence
  Description of Artificial Sequence: Synthetic oligonucleotide
  Target: SCNA; (-) strand; PAM type: YTN; PAM sequence: TTG
atgaaaccttgctattttaa

SEQ ID NO: 42739 - DNA, 20 bp, Artificial Sequence
  Description of Artificial Sequence: Synthetic oligonucleotide
  Target: SCNA; (-) strand; PAM type: YTN; PAM sequence: TTG
acaaagcatagataccagat

SEQ ID NO: 42740 - DNA, 20 bp, Artificial Sequence
  Description of Artificial Sequence: Synthetic oligonucleotide
  Target: SCNA; (-) strand; PAM type: YTN; PAM sequence: TTT
gacaaagcatagataccaga

SEQ ID NO: 42741 - DNA, 20 bp, Artificial Sequence
  Description of Artificial Sequence: Synthetic oligonucleotide
  Target: SCNA; (-) strand; PAM type: YTN; PAM sequence: CTT
tgacaaagcatagataccag

SEQ ID NO: 42742 - DNA, 20 bp, Artificial Sequence
  Description of Artificial Sequence: Synthetic oligonucleotide
  Target: SCNA; (-) strand; PAM type: YTN; PAM sequence: CTA
actttgacaaagcatagata

SEQ ID NO: 42743 - DNA, 20 bp, Artificial Sequence
  Description of Artificial Sequence: Synthetic oligonucleotide
  Target: SCNA; (-) strand; PAM type: YTN; PAM sequence: TTC
taactttgacaaagcataga

SEQ ID NO: 42744 - DNA, 20 bp, Artificial Sequence
  Description of Artificial Sequence: Synthetic oligonucleotide
  Target: SCNA; (-) strand; PAM type: YTN; PAM sequence: TTT
ctaactttgacaaagcatag

SEQ ID NO: 42745 - DNA, 20 bp, Artificial Sequence
  Description of Artificial Sequence: Synthetic oligonucleotide
  Target: SCNA; (-) strand; PAM type: YTN; PAM sequence: CTA
catttctaactttgacaaag

SEQ ID NO: 42746 - DNA, 20 bp, Artificial Sequence
  Description of Artificial Sequence: Synthetic oligonucleotide
  Target: SCNA; (-) strand; PAM type: YTN; PAM sequence: CTC
tacatttctaactttgacaa

SEQ ID NO: 42747 - DNA, 20 bp, Artificial Sequence
  Description of Artificial Sequence: Synthetic oligonucleotide
  Target: SCNA; (-) strand; PAM type: YTN; PAM sequence: TTA
gaaatgtatctctacatttc

SEQ ID NO: 42748 - DNA, 20 bp, Artificial Sequence
  Description of Artificial Sequence: Synthetic oligonucleotide
  Target: SCNA; (-) strand; PAM type: YTN; PAM sequence: TTT
agaaatgtatctctacattt

SEQ ID NO: 42749 - DNA, 20 bp, Artificial Sequence
  Description of Artificial Sequence: Synthetic oligonucleotide
  Target: SCNA; (-) strand; PAM type: YTN; PAM sequence: TTA
atttagaaatgtatctctac

SEQ ID NO: 42750 - DNA, 20 bp, Artificial Sequence
  Description of Artificial Sequence: Synthetic oligonucleotide
  Target: SCNA; (-) strand; PAM type: YTN; PAM sequence: TTT
aatttagaaatgtatctcta

SEQ ID NO: 42751 - DNA, 20 bp, Artificial Sequence
  Description of Artificial Sequence: Synthetic oligonucleotide
  Target: SCNA; (-) strand; PAM type: YTN; PAM sequence: TTT
taatttagaaatgtatctct

SEQ ID NO: 42752 - DNA, 20 bp, Artificial Sequence
  Description of Artificial Sequence: Synthetic oligonucleotide
  Target: SCNA; (-) strand; PAM type: YTN; PAM sequence: TTC
ccacataaaagttttaattt

SEQ ID NO: 42753 - DNA, 20 bp, Artificial Sequence
  Description of Artificial Sequence: Synthetic oligonucleotide
  Target: SCNA; (-) strand; PAM type: YTN; PAM sequence: CTT
cccacataaaagttttaatt

SEQ ID NO: 42754 - DNA, 20 bp, Artificial Sequence
  Description of Artificial Sequence: Synthetic oligonucleotide
  Target: SCNA; (-) strand; PAM type: YTN; PAM sequence: TTC
ttcccacataaaagttttaa

SEQ ID NO: 42755 - DNA, 20 bp, Artificial Sequence
  Description of Artificial Sequence: Synthetic oligonucleotide
  Target: SCNA; (-) strand; PAM type: YTN; PAM sequence: TTT
cttcccacataaaagtttta

SEQ ID NO: 42756 - DNA, 20 bp, Artificial Sequence
  Description of Artificial Sequence: Synthetic oligonucleotide
  Target: SCNA; (-) strand; PAM type: YTN; PAM sequence: TTT
tcttcccacataaaagtttt

SEQ ID NO: 42757 - DNA, 20 bp, Artificial Sequence
  Description of Artificial Sequence: Synthetic oligonucleotide
  Target: SCNA; (-) strand; PAM type: YTN; PAM sequence: TTT
ttcttcccacataaaagttt

SEQ ID NO: 42758 - DNA, 20 bp, Artificial Sequence
  Description of Artificial Sequence: Synthetic oligonucleotide
  Target: SCNA; (-) strand; PAM type: YTN; PAM sequence: TTC
aatttttcttcccacataaa

SEQ ID NO: 42759 - DNA, 20 bp, Artificial Sequence
  Description of Artificial Sequence: Synthetic oligonucleotide
  Target: SCNA; (-) strand; PAM type: YTN; PAM sequence: TTT
caatttttcttcccacataa

SEQ ID NO: 42760 - DNA, 20 bp, Artificial Sequence
  Description of Artificial Sequence: Synthetic oligonucleotide
  Target: SCNA; (-) strand; PAM type: YTN; PAM sequence: TTG
aatttcaatttttcttccca

SEQ ID NO: 42761 - DNA, 20 bp, Artificial Sequence
  Description of Artificial Sequence: Synthetic oligonucleotide
  Target: SCNA; (-) strand; PAM type: YTN; PAM sequence: CTT
gaatttcaatttttcttccc

SEQ ID NO: 42762 - DNA, 20 bp, Artificial Sequence
  Description of Artificial Sequence: Synthetic oligonucleotide
  Target: SCNA; (-) strand; PAM type: YTN; PAM sequence: TTG
ggtataccaaagaccaacca

SEQ ID NO: 42763 - DNA, 20 bp, Artificial Sequence
  Description of Artificial Sequence: Synthetic oligonucleotide
  Target: SCNA; (-) strand; PAM type: YTN; PAM sequence: TTT
gggtataccaaagaccaacc

SEQ ID NO: 42764 - DNA, 20 bp, Artificial Sequence
  Description of Artificial Sequence: Synthetic oligonucleotide
  Target: SCNA; (-) strand; PAM type: YTN; PAM sequence: CTT
tgggtataccaaagaccaac

SEQ ID NO: 42765 - DNA, 20 bp, Artificial Sequence
  Description of Artificial Sequence: Synthetic oligonucleotide
  Target: SCNA; (-) strand; PAM type: YTN; PAM sequence: TTC
tttgggtataccaaagacca

SEQ ID NO: 42766 - DNA, 20 bp, Artificial Sequence
  Description of Artificial Sequence: Synthetic oligonucleotide
  Target: SCNA; (-) strand; PAM type: YTN; PAM sequence: TTG
ttctttgggtataccaaaga

SEQ ID NO: 42767 - DNA, 20 bp, Artificial Sequence
  Description of Artificial Sequence: Synthetic oligonucleotide
  Target: SCNA; (-) strand; PAM type: YTN; PAM sequence: TTT
gttctttgggtataccaaag

SEQ ID NO: 42768 - DNA, 20 bp, Artificial Sequence
  Description of Artificial Sequence: Synthetic oligonucleotide
  Target: SCNA; (-) strand; PAM type: YTN; PAM sequence: CTT
tgttctttgggtataccaaa

SEQ ID NO: 42769 - DNA, 20 bp, Artificial Sequence
  Description of Artificial Sequence: Synthetic oligonucleotide
  Target: SCNA; (-) strand; PAM type: YTN; PAM sequence: CTC
tttgttctttgggtatacca

SEQ ID NO: 42770 - DNA, 20 bp, Artificial Sequence
  Description of Artificial Sequence: Synthetic oligonucleotide
  Target: SCNA; (-) strand; PAM type: YTN; PAM sequence: CTC
ctctttgttctttgggtata

SEQ ID NO: 42771 - DNA, 20 bp, Artificial Sequence
  Description of Artificial Sequence: Synthetic oligonucleotide
  Target: SCNA; (-) strand; PAM type: YTN; PAM sequence: CTC
caacctcctctttgttcttt

SEQ ID NO: 42772 - DNA, 20 bp, Artificial Sequence
  Description of Artificial Sequence: Synthetic oligonucleotide
  Target: SCNA; (-) strand; PAM type: YTN; PAM sequence: TTC
agaacacctccaacctcctc

SEQ ID NO: 42773 - DNA, 20 bp, Artificial Sequence
  Description of Artificial Sequence: Synthetic oligonucleotide
  Target: SCNA; (-) strand; PAM type: YTN; PAM sequence: TTT
cagaacacctccaacctcct

SEQ ID NO: 42774 - DNA, 20 bp, Artificial Sequence
  Description of Artificial Sequence: Synthetic oligonucleotide
  Target: SCNA; (-) strand; PAM type: YTN; PAM sequence: TTT
tcagaacacctccaacctcc

SEQ ID NO: 42775 - DNA, 20 bp, Artificial Sequence
  Description of Artificial Sequence: Synthetic oligonucleotide
  Target: SCNA; (-) strand; PAM type: YTN; PAM sequence: TTT
ttcagaacacctccaacctc

SEQ ID NO: 42776 - DNA, 20 bp, Artificial Sequence
  Description of Artificial Sequence: Synthetic oligonucleotide
  Target: SCNA; (-) strand; PAM type: YTN; PAM sequence: CTT
tttcagaacacctccaacct

SEQ ID NO: 42777 - DNA, 20 bp, Artificial Sequence
  Description of Artificial Sequence: Synthetic oligonucleotide
  Target: SCNA; (-) strand; PAM type: YTN; PAM sequence: CTC
tttttcagaacacctccaac

SEQ ID NO: 42778 - DNA, 20 bp, Artificial Sequence
  Description of Artificial Sequence: Synthetic oligonucleotide
  Target: SCNA; (-) strand; PAM type: YTN; PAM sequence: TTC
tctttttcagaacacctcca

SEQ ID NO: 42779 - DNA, 20 bp, Artificial Sequence
  Description of Artificial Sequence: Synthetic oligonucleotide
  Target: SCNA; (-) strand; PAM type: YTN; PAM sequence: TTT
ctctttttcagaacacctcc

SEQ ID NO: 42780 - DNA, 20 bp, Artificial Sequence
  Description of Artificial Sequence: Synthetic oligonucleotide
  Target: SCNA; (-) strand; PAM type: YTN; PAM sequence: CTC
aaagagcagcgtgtatcatt

SEQ ID NO: 42781 - DNA, 20 bp, Artificial Sequence
  Description of Artificial Sequence: Synthetic oligonucleotide
  Target: SCNA; (-) strand; PAM type: YTN; PAM sequence: TTC
tcaaagagcagcgtgtatca

SEQ ID NO: 42782 - DNA, 20 bp, Artificial Sequence
  Description of Artificial Sequence: Synthetic oligonucleotide
  Target: SCNA; (-) strand; PAM type: YTN; PAM sequence: TTT
ctcaaagagcagcgtgtatc

SEQ ID NO: 42783 - DNA, 20 bp, Artificial Sequence
  Description of Artificial Sequence: Synthetic oligonucleotide
  Target: SCNA; (-) strand; PAM type: YTN; PAM sequence: CTT
tctcaaagagcagcgtgtat

SEQ ID NO: 42784 - DNA, 20 bp, Artificial Sequence
  Description of Artificial Sequence: Synthetic oligonucleotide
  Target: SCNA; (-) strand; PAM type: YTN; PAM sequence: CTA
gtgccaatgaactttctcaa

SEQ ID NO: 42785 - DNA, 20 bp, Artificial Sequence
  Description of Artificial Sequence: Synthetic oligonucleotide
  Target: SCNA; (-) strand; PAM type: YTN; PAM sequence: TTC
tagtgccaatgaactttctc

SEQ ID NO: 42786 - DNA, 20 bp, Artificial Sequence
  Description of Artificial Sequence: Synthetic oligonucleotide
  Target: SCNA; (-) strand; PAM type: YTN; PAM sequence: TTT
ctagtgccaatgaactttct

SEQ ID NO: 42787 - DNA, 20 bp, Artificial Sequence
  Description of Artificial Sequence: Synthetic oligonucleotide
  Target: SCNA; (-) strand; PAM type: YTN; PAM sequence: CTT
tctagtgccaatgaactttc

SEQ ID NO: 42788 - DNA, 20 bp, Artificial Sequence
  Description of Artificial Sequence: Synthetic oligonucleotide
  Target: SCNA; (-) strand; PAM type: YTN; PAM sequence: CTC
cccagaacctttctagtgcc

SEQ ID NO: 42789 - DNA, 20 bp, Artificial Sequence
  Description of Artificial Sequence: Synthetic oligonucleotide
  Target: SCNA; (-) strand; PAM type: YTN; PAM sequence: CTA
gctccccagaacctttctag

SEQ ID NO: 42790 - DNA, 20 bp, Artificial Sequence
  Description of Artificial Sequence: Synthetic oligonucleotide
  Target: SCNA; (-) strand; PAM type: YTN; PAM sequence: TTA
ctagctccccagaacctttc

SEQ ID NO: 42791 - DNA, 20 bp, Artificial Sequence
  Description of Artificial Sequence: Synthetic oligonucleotide
  Target: SCNA; (-) strand; PAM type: YTN; PAM sequence: CTT
actagctccccagaaccttt

SEQ ID NO: 42792 - DNA, 20 bp, Artificial Sequence
  Description of Artificial Sequence: Synthetic oligonucleotide
  Target: SCNA; (-) strand; PAM type: YTN; PAM sequence: TTG
aagcttactagctccccaga

SEQ ID NO: 42793 - DNA, 20 bp, Artificial Sequence
  Description of Artificial Sequence: Synthetic oligonucleotide
  Target: SCNA; (-) strand; PAM type: YTN; PAM sequence: CTC
accaattgaagcttactagc

SEQ ID NO: 42794 - DNA, 20 bp, Artificial Sequence
  Description of Artificial Sequence: Synthetic oligonucleotide
  Target: SCNA; (-) strand; PAM type: YTN; PAM sequence: CTG
tcactcaccaattgaagctt

SEQ ID NO: 42795 - DNA, 20 bp, Artificial Sequence
  Description of Artificial Sequence: Synthetic oligonucleotide
  Target: SCNA; (-) strand; PAM type: YTN; PAM sequence: TTG
cccaccactgtcactcacca

SEQ ID NO: 42796 - DNA, 20 bp, Artificial Sequence
  Description of Artificial Sequence: Synthetic oligonucleotide
  Target: SCNA; (-) strand; PAM type: YTN; PAM sequence: TTT
gcccaccactgtcactcacc

SEQ ID NO: 42797 - DNA, 20 bp, Artificial Sequence
  Description of Artificial Sequence: Synthetic oligonucleotide
  Target: SCNA; (-) strand; PAM type: YTN; PAM sequence: TTT
tgcccaccactgtcactcac

SEQ ID NO: 42798 - DNA, 20 bp, Artificial Sequence
  Description of Artificial Sequence: Synthetic oligonucleotide
  Target: SCNA; (-) strand; PAM type: YTN; PAM sequence: CTA
attttgcccaccactgtcac

SEQ ID NO: 42799 - DNA, 20 bp, Artificial Sequence
  Description of Artificial Sequence: Synthetic oligonucleotide
  Target: SCNA; (-) strand; PAM type: YTN; PAM sequence: CTA
ggactaattttgcccaccac

SEQ ID NO: 42800 - DNA, 20 bp, Artificial Sequence
  Description of Artificial Sequence: Synthetic oligonucleotide
  Target: SCNA; (-) strand; PAM type: YTN; PAM sequence: CTC
taggactaattttgcccacc

SEQ ID NO: 42801 - DNA, 20 bp, Artificial Sequence
  Description of Artificial Sequence: Synthetic oligonucleotide
  Target: SCNA; (-) strand; PAM type: YTN; PAM sequence: CTG
cagctctaggactaattttg

SEQ ID NO: 42802 - DNA, 20 bp, Artificial Sequence
  Description of Artificial Sequence: Synthetic oligonucleotide
  Target: SCNA; (-) strand; PAM type: YTN; PAM sequence: TTG
ctgcagctctaggactaatt

SEQ ID NO: 42803 - DNA, 20 bp, Artificial Sequence
  Description of Artificial Sequence: Synthetic oligonucleotide
  Target: SCNA; (-) strand; PAM type: YTN; PAM sequence: CTT
gctgcagctctaggactaat

SEQ ID NO: 42804 - DNA, 20 bp, Artificial Sequence
  Description of Artificial Sequence: Synthetic oligonucleotide
  Target: SCNA; (-) strand; PAM type: YTN; PAM sequence: CTG
aaaaaacttgctgcagctct

SEQ ID NO: 42805 - DNA, 20 bp, Artificial Sequence
  Description of Artificial Sequence: Synthetic oligonucleotide
  Target: SCNA; (-) strand; PAM type: YTN; PAM sequence: CTG
ctgaaaaaacttgctgcagc

SEQ ID NO: 42806 - DNA, 20 bp, Artificial Sequence
  Description of Artificial Sequence: Synthetic oligonucleotide
  Target: SCNA; (-) strand; PAM type: YTN; PAM sequence: CTG
taactgctgaaaaaacttgc

SEQ ID NO: 42807 - DNA, 20 bp, Artificial Sequence
  Description of Artificial Sequence: Synthetic oligonucleotide
  Target: SCNA; (-) strand; PAM type: YTN; PAM sequence: TTC
tgtaactgctgaaaaaactt

SEQ ID NO: 42808 - DNA, 20 bp, Artificial Sequence
  Description of Artificial Sequence: Synthetic oligonucleotide
  Target: SCNA; (-) strand; PAM type: YTN; PAM sequence: TTT
ctgtaactgctgaaaaaact

SEQ ID NO: 42809 - DNA, 20 bp, Artificial Sequence
  Description of Artificial Sequence: Synthetic oligonucleotide
  Target: SCNA; (-) strand; PAM type: YTN; PAM sequence: TTT
tctgtaactgctgaaaaaac

SEQ ID NO: 42810 - DNA, 20 bp, Artificial Sequence
  Description of Artificial Sequence: Synthetic oligonucleotide
  Target: SCNA; (-) strand; PAM type: YTN; PAM sequence: TTT
ttctgtaactgctgaaaaaa

SEQ ID NO: 42811 - DNA, 20 bp, Artificial Sequence
  Description of Artificial Sequence: Synthetic oligonucleotide
  Target: SCNA; (-) strand; PAM type: YTN; PAM sequence: TTT
tttctgtaactgctgaaaaa

SEQ ID NO: 42812 - DNA, 20 bp, Artificial Sequence
  Description of Artificial Sequence: Synthetic oligonucleotide
  Target: SCNA; (-) strand; PAM type: YTN; PAM sequence: CTG
ggaccaattttttctgtaac

SEQ ID NO: 42813 - DNA, 20 bp, Artificial Sequence
  Description of Artificial Sequence: Synthetic oligonucleotide
  Target: SCNA; (-) strand; PAM type: YTN; PAM sequence: TTG
taacctgggaccaatttttt

SEQ ID NO: 42814 - DNA, 20 bp, Artificial Sequence
  Description of Artificial Sequence: Synthetic oligonucleotide
  Target: SCNA; (-) strand; PAM type: YTN; PAM sequence: CTG
ttgtaacctgggaccaattt

SEQ ID NO: 42815 - DNA, 20 bp, Artificial Sequence
  Description of Artificial Sequence: Synthetic oligonucleotide
  Target: SCNA; (-) strand; PAM type: YTN; PAM sequence: CTG
cctgttgtaacctgggacca

SEQ ID NO: 42816 - DNA, 20 bp, Artificial Sequence
  Description of Artificial Sequence: Synthetic oligonucleotide
  Target: SCNA; (-) strand; PAM type: YTN; PAM sequence: CTG
aggctgcctgttgtaacctg

SEQ ID NO: 42817 - DNA, 20 bp, Artificial Sequence
  Description of Artificial Sequence: Synthetic oligonucleotide
  Target: SCNA; (-) strand; PAM type: YTN; PAM sequence: CTA
caagtccgcatgctgaggct

SEQ ID NO: 42818 - DNA, 20 bp, Artificial Sequence
  Description of Artificial Sequence: Synthetic oligonucleotide
  Target: SCNA; (-) strand; PAM type: YTN; PAM sequence: TTC
tacaagtccgcatgctgagg

SEQ ID NO: 42819 - DNA, 20 bp, Artificial Sequence
  Description of Artificial Sequence: Synthetic oligonucleotide
  Target: SCNA; (-) strand; PAM type: YTN; PAM sequence: TTT
ctacaagtccgcatgctgag

SEQ ID NO: 42820 - DNA, 20 bp, Artificial Sequence
  Description of Artificial Sequence: Synthetic oligonucleotide
  Target: SCNA; (-) strand; PAM type: YTN; PAM sequence: TTT
tctacaagtccgcatgctga

SEQ ID NO: 42821 - DNA, 20 bp, Artificial Sequence
  Description of Artificial Sequence: Synthetic oligonucleotide
  Target: SCNA; (-) strand; PAM type: YTN; PAM sequence: CTC
caaaagtgtaattttctaca

SEQ ID NO: 42822 - DNA, 20 bp, Artificial Sequence
  Description of Artificial Sequence: Synthetic oligonucleotide
  Target: SCNA; (-) strand; PAM type: YTN; PAM sequence: TTG
ctccaaaagtgtaattttct

SEQ ID NO: 42823 - DNA, 20 bp, Artificial Sequence
  Description of Artificial Sequence: Synthetic oligonucleotide
  Target: SCNA; (-) strand; PAM type: YTN; PAM sequence: TTC
aagaaacatcacattgctcc

SEQ ID NO: 42824 - DNA, 20 bp, Artificial Sequence
  Description of Artificial Sequence: Synthetic oligonucleotide
  Target: SCNA; (-) strand; PAM type: YTN; PAM sequence: CTG
ggaggaaaagcattcaagaa

SEQ ID NO: 42825 - DNA, 20 bp, Artificial Sequence
  Description of Artificial Sequence: Synthetic oligonucleotide
  Target: SCNA; (-) strand; PAM type: YTN; PAM sequence: CTA
aaacaatcaagaagcctggg

SEQ ID NO: 42826 - DNA, 20 bp, Artificial Sequence
  Description of Artificial Sequence: Synthetic oligonucleotide
  Target: SCNA; (-) strand; PAM type: YTN; PAM sequence: TTA
tacccaactaaaacaatcaa

SEQ ID NO: 42827 - DNA, 20 bp, Artificial Sequence
  Description of Artificial Sequence: Synthetic oligonucleotide
  Target: SCNA; (-) strand; PAM type: YTN; PAM sequence: TTG
ttatacccaactaaaacaat

SEQ ID NO: 42828 - DNA, 20 bp, Artificial Sequence
  Description of Artificial Sequence: Synthetic oligonucleotide
  Target: SCNA; (-) strand; PAM type: YTN; PAM sequence: CTT
gttatacccaactaaaacaa

SEQ ID NO: 42829 - DNA, 20 bp, Artificial Sequence
  Description of Artificial Sequence: Synthetic oligonucleotide
  Target: SCNA; (-) strand; PAM type: YTN; PAM sequence: TTC
ttgttatacccaactaaaac

SEQ ID NO: 42830 - DNA, 20 bp, Artificial Sequence
  Description of Artificial Sequence: Synthetic oligonucleotide
  Target: SCNA; (-) strand; PAM type: YTN; PAM sequence: TTG
ggtcattcttgttataccca

SEQ ID NO: 42831 - DNA, 20 bp, Artificial Sequence
  Description of Artificial Sequence: Synthetic oligonucleotide
  Target: SCNA; (-) strand; PAM type: YTN; PAM sequence: TTG
atcacacaaattgggtcatt

SEQ ID NO: 42832 - DNA, 20 bp, Artificial Sequence
  Description of Artificial Sequence: Synthetic oligonucleotide
  Target: SCNA; (-) strand; PAM type: YTN; PAM sequence: CTG
tgaaagttgatcacacaaat

SEQ ID NO: 42833 - DNA, 20 bp, Artificial Sequence
  Description of Artificial Sequence: Synthetic oligonucleotide
  Target: SCNA; (-) strand; PAM type: YTN; PAM sequence: TTA
aggctgtgaaagttgatcac

SEQ ID NO: 42834 - DNA, 20 bp, Artificial Sequence
  Description of Artificial Sequence: Synthetic oligonucleotide
  Target: SCNA; (-) strand; PAM type: YTN; PAM sequence: TTT
aaggctgtgaaagttgatca

SEQ ID NO: 42835 - DNA, 20 bp, Artificial Sequence
  Description of Artificial Sequence: Synthetic oligonucleotide
  Target: SCNA; (-) strand; PAM type: YTN; PAM sequence: TTG
aatgtttaaggctgtgaaag

SEQ ID NO: 42836 - DNA, 20 bp, Artificial Sequence
  Description of Artificial Sequence: Synthetic oligonucleotide
  Target: SCNA; (-) strand; PAM type: YTN; PAM sequence: TTT
gaatgtttaaggctgtgaaa

SEQ ID NO: 42837 - DNA, 20 bp, Artificial Sequence
  Description of Artificial Sequence: Synthetic oligonucleotide
  Target: SCNA; (-) strand; PAM type: YTN; PAM sequence: CTT
tgaatgtttaaggctgtgaa

SEQ ID NO: 42838 - DNA, 20 bp, Artificial Sequence
  Description of Artificial Sequence: Synthetic oligonucleotide
  Target: SCNA; (-) strand; PAM type: YTN; PAM sequence: CTG
ctttgaatgtttaaggctgt

SEQ ID NO: 42839 - DNA, 20 bp, Artificial Sequence
  Description of Artificial Sequence: Synthetic oligonucleotide
  Target: SCNA; (-) strand; PAM type: YTN; PAM sequence: CTG
ctgctttgaatgtttaaggc

SEQ ID NO: 42840 - DNA, 20 bp, Artificial Sequence
  Description of Artificial Sequence: Synthetic oligonucleotide
  Target: SCNA; (-) strand; PAM type: YTN; PAM sequence: TTC
tgctgctttgaatgtttaag

SEQ ID NO: 42841 - DNA, 20 bp, Artificial Sequence
  Description of Artificial Sequence: Synthetic oligonucleotide
  Target: SCNA; (-) strand; PAM type: YTN; PAM sequence: CTT
ctgctgctttgaatgtttaa

SEQ ID NO: 42842 - DNA, 20 bp, Artificial Sequence
  Description of Artificial Sequence: Synthetic oligonucleotide
  Target: SCNA; (-) strand; PAM type: YTN; PAM sequence: TTC
aagtgtaaaagcagtgggca

SEQ ID NO: 42843 - DNA, 20 bp, Artificial Sequence
  Description of Artificial Sequence: Synthetic oligonucleotide
  Target: SCNA; (-) strand; PAM type: YTN; PAM sequence: CTT
caagtgtaaaagcagtgggc

SEQ ID NO: 42844 - DNA, 20 bp, Artificial Sequence
  Description of Artificial Sequence: Synthetic oligonucleotide
  Target: SCNA; (-) strand; PAM type: YTN; PAM sequence: CTA
cccaaaatatcttcaagtgt

SEQ ID NO: 42845 - DNA, 20 bp, Artificial Sequence
  Description of Artificial Sequence: Synthetic oligonucleotide
  Target: SCNA; (-) strand; PAM type: YTN; PAM sequence: TTC
tacccaaaatatcttcaagt

SEQ ID NO: 42846 - DNA, 20 bp, Artificial Sequence
  Description of Artificial Sequence: Synthetic oligonucleotide
  Target: SCNA; (-) strand; PAM type: YTN; PAM sequence: TTC
aataatgcagcaaaacaatg

SEQ ID NO: 42847 - DNA, 20 bp, Artificial Sequence
  Description of Artificial Sequence: Synthetic oligonucleotide
  Target: SCNA; (-) strand; PAM type: YTN; PAM sequence: TTG
ttcaataatgcagcaaaaca

SEQ ID NO: 42848 - DNA, 20 bp, Artificial Sequence
  Description of Artificial Sequence: Synthetic oligonucleotide
  Target: SCNA; (-) strand; PAM type: YTN; PAM sequence: CTA
agtgacattgttcaataatg

SEQ ID NO: 42849 - DNA, 20 bp, Artificial Sequence
  Description of Artificial Sequence: Synthetic oligonucleotide
  Target: SCNA; (-) strand; PAM type: YTN; PAM sequence: TTG
aggctaagtgacattgttca

SEQ ID NO: 42850 - DNA, 20 bp, Artificial Sequence
  Description of Artificial Sequence: Synthetic oligonucleotide
  Target: SCNA; (-) strand; PAM type: YTN; PAM sequence: TTT
gaggctaagtgacattgttc

SEQ ID NO: 42851 - DNA, 20 bp, Artificial Sequence
  Description of Artificial Sequence: Synthetic oligonucleotide
  Target: SCNA; (-) strand; PAM type: YTN; PAM sequence: TTA
tttgaggctaagtgacattg

SEQ ID NO: 42852 - DNA, 20 bp, Artificial Sequence
  Description of Artificial Sequence: Synthetic oligonucleotide
  Target: SCNA; (-) strand; PAM type: YTN; PAM sequence: TTC
cattatttgaggctaagtga

SEQ ID NO: 42853 - DNA, 20 bp, Artificial Sequence
  Description of Artificial Sequence: Synthetic oligonucleotide
  Target: SCNA; (-) strand; PAM type: YTN; PAM sequence: TTA
attccattatttgaggctaa

SEQ ID NO: 42854 - DNA, 20 bp, Artificial Sequence
  Description of Artificial Sequence: Synthetic oligonucleotide
  Target: SCNA; (-) strand; PAM type: YTN; PAM sequence: TTG
agtgaaggtattaattccat

SEQ ID NO: 42855 - DNA, 20 bp, Artificial Sequence
  Description of Artificial Sequence: Synthetic oligonucleotide
  Target: SCNA; (-) strand; PAM type: YTN; PAM sequence: TTG
ttgagtgaaggtattaattc

SEQ ID NO: 42856 - DNA, 20 bp, Artificial Sequence
  Description of Artificial Sequence: Synthetic oligonucleotide
  Target: SCNA; (-) strand; PAM type: YTN; PAM sequence: CTG
gtgtgagttgttgagtgaag

SEQ ID NO: 42857 - DNA, 20 bp, Artificial Sequence
  Description of Artificial Sequence: Synthetic oligonucleotide
  Target: SCNA; (-) strand; PAM type: YTN; PAM sequence: CTC
ctggtgtgagttgttgagtg

SEQ ID NO: 42858 - DNA, 20 bp, Artificial Sequence
  Description of Artificial Sequence: Synthetic oligonucleotide
  Target: SCNA; (-) strand; PAM type: YTN; PAM sequence: TTC
atcctcctggtgtgagttgt

SEQ ID NO: 42859 - DNA, 20 bp, Artificial Sequence
  Description of Artificial Sequence: Synthetic oligonucleotide
  Target: SCNA; (-) strand; PAM type: YTN; PAM sequence: CTT
catcctcctggtgtgagttg

SEQ ID NO: 42860 - DNA, 20 bp, Artificial Sequence
  Description of Artificial Sequence: Synthetic oligonucleotide
  Target: SCNA; (-) strand; PAM type: YTN; PAM sequence: CTC
cttcatcctcctggtgtgag

SEQ ID NO: 42861 - DNA, 20 bp, Artificial Sequence
  Description of Artificial Sequence: Synthetic oligonucleotide
  Target: SCNA; (-) strand; PAM type: YTN; PAM sequence: CTC
tccttcatcctcctggtgtg

SEQ ID NO: 42862 - DNA, 20 bp, Artificial Sequence
  Description of Artificial Sequence: Synthetic oligonucleotide
  Target: SCNA; (-) strand; PAM type: YTN; PAM sequence: CTC
tctccttcatcctcctggtg

SEQ ID NO: 42863 - DNA, 20 bp, Artificial Sequence
  Description of Artificial Sequence: Synthetic oligonucleotide
  Target: SCNA; (-) strand; PAM type: YTN; PAM sequence: CTA
tctctctccttcatcctcct

SEQ ID NO: 42864 - DNA, 20 bp, Artificial Sequence
  Description of Artificial Sequence: Synthetic oligonucleotide
  Target: SCNA; (-) strand; PAM type: YTN; PAM sequence: CTA
ctatctctctccttcatcct

SEQ ID NO: 42865 - DNA, 20 bp, Artificial Sequence
  Description of Artificial Sequence: Synthetic oligonucleotide
  Target: SCNA; (-) strand; PAM type: YTN; PAM sequence: TTG
gctactatctctctccttca

SEQ ID NO: 42866 - DNA, 20 bp, Artificial Sequence
  Description of Artificial Sequence: Synthetic oligonucleotide
  Target: SCNA; (-) strand; PAM type: YTN; PAM sequence: TTT
ggctactatctctctccttc

SEQ ID NO: 42867 - DNA, 20 bp, Artificial Sequence
  Description of Artificial Sequence: Synthetic oligonucleotide
  Target: SCNA; (-) strand; PAM type: YTN; PAM sequence: TTT
tggctactatctctctcctt

SEQ ID NO: 42868 - DNA, 20 bp, Artificial Sequence
  Description of Artificial Sequence: Synthetic oligonucleotide
  Target: SCNA; (-) strand; PAM type: YTN; PAM sequence: TTT
ttggctactatctctctcct

SEQ ID NO: 42869 - DNA, 20 bp, Artificial Sequence
  Description of Artificial Sequence: Synthetic oligonucleotide
  Target: SCNA; (-) strand; PAM type: YTN; PAM sequence: CTT
tttggctactatctctctcc

SEQ ID NO: 42870 - DNA, 20 bp, Artificial Sequence
  Description of Artificial Sequence: Synthetic oligonucleotide
  Target: SCNA; (-) strand; PAM type: YTN; PAM sequence: TTA
tctttttggctactatctct

SEQ ID NO: 42871 - DNA, 20 bp, Artificial Sequence
  Description of Artificial Sequence: Synthetic oligonucleotide
  Target: SCNA; (-) strand; PAM type: YTN; PAM sequence: TTT
atctttttggctactatctc

SEQ ID NO: 42872 - DNA, 20 bp, Artificial Sequence
  Description of Artificial Sequence: Synthetic oligonucleotide
  Target: SCNA; (-) strand; PAM type: YTN; PAM sequence: TTT
tatctttttggctactatct

SEQ ID NO: 42873 - DNA, 20 bp, Artificial Sequence
  Description of Artificial Sequence: Synthetic oligonucleotide
  Target: SCNA; (-) strand; PAM type: YTN; PAM sequence: CTT
ttatctttttggctactatc

SEQ ID NO: 42874 - DNA, 20 bp, Artificial Sequence
  Description of Artificial Sequence: Synthetic oligonucleotide
  Target: SCNA; (-) strand; PAM type: YTN; PAM sequence: TTC
ttttatctttttggctacta

SEQ ID NO: 42875 - DNA, 20 bp, Artificial Sequence
  Description of Artificial Sequence: Synthetic oligonucleotide
  Target: SCNA; (-) strand; PAM type: YTN; PAM sequence: CTT
cttttatctttttggctact

SEQ ID NO: 42876 - DNA, 20 bp, Artificial Sequence
  Description of Artificial Sequence: Synthetic oligonucleotide
  Target: SCNA; (-) strand; PAM type: YTN; PAM sequence: TTC
ttcttttatctttttggcta

SEQ ID NO: 42877 - DNA, 20 bp, Artificial Sequence
  Description of Artificial Sequence: Synthetic oligonucleotide
  Target: SCNA; (-) strand; PAM type: YTN; PAM sequence: TTT
cttcttttatctttttggct

SEQ ID NO: 42878 - DNA, 20 bp, Artificial Sequence
  Description of Artificial Sequence: Synthetic oligonucleotide
  Target: SCNA; (-) strand; PAM type: YTN; PAM sequence: TTA
gtttcttcttttatcttttt

SEQ ID NO: 42879 - DNA, 20 bp, Artificial Sequence
  Description of Artificial Sequence: Synthetic oligonucleotide
  Target: SCNA; (-) strand; PAM type: YTN; PAM sequence: TTT
agtttcttcttttatctttt

SEQ ID NO: 42880 - DNA, 20 bp, Artificial Sequence
  Description of Artificial Sequence: Synthetic oligonucleotide
  Target: SCNA; (-) strand; PAM type: YTN; PAM sequence: TTT
tagtttcttcttttatcttt

SEQ ID NO: 42881 - DNA, 20 bp, Artificial Sequence
  Description of Artificial Sequence: Synthetic oligonucleotide
  Target: SCNA; (-) strand; PAM type: YTN; PAM sequence: TTT
ttagtttcttcttttatctt

SEQ ID NO: 42882 - DNA, 20 bp, Artificial Sequence
  Description of Artificial Sequence: Synthetic oligonucleotide
  Target: SCNA; (-) strand; PAM type: YTN; PAM sequence: TTT
tttagtttcttcttttatct

SEQ ID NO: 42883 - DNA, 20 bp, Artificial Sequence
  Description of Artificial Sequence: Synthetic oligonucleotide
  Target: SCNA; (-) strand; PAM type: YTN; PAM sequence: CTT
ttttagtttcttcttttatc

SEQ ID NO: 42884 - DNA, 20 bp, Artificial Sequence
  Description of Artificial Sequence: Synthetic oligonucleotide
  Target: SCNA; (-) strand; PAM type: YTN; PAM sequence: TTC
ttttttagtttcttctttta

SEQ ID NO: 42885 - DNA, 20 bp, Artificial Sequence
  Description of Artificial Sequence: Synthetic oligonucleotide
  Target: SCNA; (-) strand; PAM type: YTN; PAM sequence: TTA
agtcaaagttcttttttagt

SEQ ID NO: 42886 - DNA, 20 bp, Artificial Sequence
  Description of Artificial Sequence: Synthetic oligonucleotide
  Target: SCNA; (-) strand; PAM type: YTN; PAM sequence: CTT
aagtcaaagttcttttttag

SEQ ID NO: 42887 - DNA, 20 bp, Artificial Sequence
  Description of Artificial Sequence: Synthetic oligonucleotide
  Target: SCNA; (-) strand; PAM type: YTN; PAM sequence: CTC
ttaagtcaaagttctttttt

SEQ ID NO: 42888 - DNA, 20 bp, Artificial Sequence
  Description of Artificial Sequence: Synthetic oligonucleotide
  Target: SCNA; (-) strand; PAM type: YTN; PAM sequence: TTC
ctcttaagtcaaagttcttt

SEQ ID NO: 42889 - DNA, 20 bp, Artificial Sequence
  Description of Artificial Sequence: Synthetic oligonucleotide
  Target: SCNA; (-) strand; PAM type: YTN; PAM sequence: TTT
cctcttaagtcaaagttctt

SEQ ID NO: 42890 - DNA, 20 bp, Artificial Sequence
  Description of Artificial Sequence: Synthetic oligonucleotide
  Target: SCNA; (-) strand; PAM type: YTN; PAM sequence: TTT
tcctcttaagtcaaagttct

SEQ ID NO: 42891 - DNA, 20 bp, Artificial Sequence
  Description of Artificial Sequence: Synthetic oligonucleotide
  Target: SCNA; (-) strand; PAM type: YTN; PAM sequence: TTT
ttcctcttaagtcaaagttc

SEQ ID NO: 42892 - DNA, 20 bp, Artificial Sequence
  Description of Artificial Sequence: Synthetic oligonucleotide
  Target: SCNA; (-) strand; PAM type: YTN; PAM sequence: TTT
tttcctcttaagtcaaagtt

SEQ ID NO: 42893 - DNA, 20 bp, Artificial Sequence
  Description of Artificial Sequence: Synthetic oligonucleotide
  Target: SCNA; (-) strand; PAM type: YTN; PAM sequence: TTT
ttttcctcttaagtcaaagt

SEQ ID NO: 42894 - DNA, 20 bp, Artificial Sequence
  Description of Artificial Sequence: Synthetic oligonucleotide
  Target: SCNA; (-) strand; PAM type: YTN; PAM sequence: CTT
tttttcctcttaagtcaaag

SEQ ID NO: 42895 - DNA, 20 bp, Artificial Sequence
  Description of Artificial Sequence: Synthetic oligonucleotide
  Target: SCNA; (-) strand; PAM type: YTN; PAM sequence: TTG
aacctttttttcctcttaag

SEQ ID NO: 42896 - DNA, 20 bp, Artificial Sequence
  Description of Artificial Sequence: Synthetic oligonucleotide
  Target: SCNA; (-) strand; PAM type: YTN; PAM sequence: TTA
agttgaacctttttttcctc

SEQ ID NO: 42897 - DNA, 20 bp, Artificial Sequence
  Description of Artificial Sequence: Synthetic oligonucleotide
  Target: SCNA; (-) strand; PAM type: YTN; PAM sequence: CTT
aagttgaacctttttttcct

SEQ ID NO: 42898 - DNA, 20 bp, Artificial Sequence
  Description of Artificial Sequence: Synthetic oligonucleotide
  Target: SCNA; (-) strand; PAM type: YTN; PAM sequence: TTG
gaacacgggtgtgtgcttaa

SEQ ID NO: 42899 - DNA, 20 bp, Artificial Sequence
  Description of Artificial Sequence: Synthetic oligonucleotide
  Target: SCNA; (-) strand; PAM type: YTN; PAM sequence: TTT
ggaacacgggtgtgtgctta

SEQ ID NO: 42900 - DNA, 20 bp, Artificial Sequence
  Description of Artificial Sequence: Synthetic oligonucleotide
  Target: SCNA; (-) strand; PAM type: YTN; PAM sequence: TTT
tggaacacgggtgtgtgctt

SEQ ID NO: 42901 - DNA, 20 bp, Artificial Sequence
  Description of Artificial Sequence: Synthetic oligonucleotide
  Target: SCNA; (-) strand; PAM type: YTN; PAM sequence: TTC
attttggaacacgggtgtgt

SEQ ID NO: 42902 - DNA, 20 bp, Artificial Sequence
  Description of Artificial Sequence: Synthetic oligonucleotide
  Target: SCNA; (-) strand; PAM type: YTN; PAM sequence: TTT
cattttggaacacgggtgtg

SEQ ID NO: 42903 - DNA, 20 bp, Artificial Sequence
  Description of Artificial Sequence: Synthetic oligonucleotide
  Target: SCNA; (-) strand; PAM type: YTN; PAM sequence: TTG
atttcattttggaacacggg

SEQ ID NO: 42904 - DNA, 20 bp, Artificial Sequence
  Description of Artificial Sequence: Synthetic oligonucleotide
  Target: SCNA; (-) strand; PAM type: YTN; PAM sequence: CTT
gatttcattttggaacacgg

SEQ ID NO: 42905 - DNA, 20 bp, Artificial Sequence
  Description of Artificial Sequence: Synthetic oligonucleotide
  Target: SCNA; (-) strand; PAM type: YTN; PAM sequence: CTG
ggcttgatttcattttggaa

SEQ ID NO: 42906 - DNA, 20 bp, Artificial Sequence
  Description of Artificial Sequence: Synthetic oligonucleotide
  Target: SCNA; (-) strand; PAM type: YTN; PAM sequence: TTC
tgggcttgatttcattttgg

SEQ ID NO: 42907 - DNA, 20 bp, Artificial Sequence
  Description of Artificial Sequence: Synthetic oligonucleotide
  Target: SCNA; (-) strand; PAM type: YTN; PAM sequence: TTA
aatacgagttctgggcttga

SEQ ID NO: 42908 - DNA, 20 bp, Artificial Sequence
  Description of Artificial Sequence: Synthetic oligonucleotide
  Target: SCNA; (-) strand; PAM type: YTN; PAM sequence: TTT
aaatacgagttctgggcttg

SEQ ID NO: 42909 - DNA, 20 bp, Artificial Sequence
  Description of Artificial Sequence: Synthetic oligonucleotide
  Target: SCNA; (-) strand; PAM type: YTN; PAM sequence: TTA
tttaaatacgagttctgggc

SEQ ID NO: 42910 - DNA, 20 bp, Artificial Sequence
  Description of Artificial Sequence: Synthetic oligonucleotide
  Target: SCNA; (-) strand; PAM type: YTN; PAM sequence: TTT
atttaaatacgagttctggg

SEQ ID NO: 42911 - DNA, 20 bp, Artificial Sequence
  Description of Artificial Sequence: Synthetic oligonucleotide
  Target: SCNA; (-) strand; PAM type: YTN; PAM sequence: TTT
tatttaaatacgagttctgg

SEQ ID NO: 42912 - DNA, 20 bp, Artificial Sequence
  Description of Artificial Sequence: Synthetic oligonucleotide
  Target: SCNA; (-) strand; PAM type: YTN; PAM sequence: TTT
ttatttaaatacgagttctg

SEQ ID NO: 42913 - DNA, 20 bp, Artificial Sequence
  Description of Artificial Sequence: Synthetic oligonucleotide
  Target: SCNA; (-) strand; PAM type: YTN; PAM sequence: CTA
tttttatttaaatacgagtt

SEQ ID NO: 42914 - DNA, 20 bp, Artificial Sequence
  Description of Artificial Sequence: Synthetic oligonucleotide
  Target: SCNA; (-) strand; PAM type: YTN; PAM sequence: CTA
tgctatttttatttaaatac

SEQ ID NO: 42915 - DNA, 20 bp, Artificial Sequence
  Description of Artificial Sequence: Synthetic oligonucleotide
  Target: SCNA; (-) strand; PAM type: YTN; PAM sequence: TTG
aaacgtctatgctattttta

SEQ ID NO: 42916 - DNA, 20 bp, Artificial Sequence
  Description of Artificial Sequence: Synthetic oligonucleotide
  Target: SCNA; (-) strand; PAM type: YTN; PAM sequence: TTT
gaaacgtctatgctattttt

SEQ ID NO: 42917 - DNA, 20 bp, Artificial Sequence
  Description of Artificial Sequence: Synthetic oligonucleotide
  Target: SCNA; (-) strand; PAM type: YTN; PAM sequence: TTT
tgaaacgtctatgctatttt

SEQ ID NO: 42918 - DNA, 20 bp, Artificial Sequence
  Description of Artificial Sequence: Synthetic oligonucleotide
  Target: SCNA; (-) strand; PAM type: YTN; PAM sequence: TTT
ttgaaacgtctatgctattt

SEQ ID NO: 42919 - DNA, 20 bp, Artificial Sequence
  Description of Artificial Sequence: Synthetic oligonucleotide
  Target: SCNA; (-) strand; PAM type: YTN; PAM sequence: TTC
acatttttgaaacgtctatg

SEQ ID NO: 42920 - DNA, 20 bp, Artificial Sequence
  Description of Artificial Sequence: Synthetic oligonucleotide
  Target: SCNA; (-) strand; PAM type: YTN; PAM sequence: CTG
aggtagagaagtagagaata

SEQ ID NO: 42921 - DNA, 20 bp, Artificial Sequence
  Description of Artificial Sequence: Synthetic oligonucleotide
  Target: SCNA; (-) strand; PAM type: YTN; PAM sequence: CTG
tctgaggtagagaagtagag

SEQ ID NO: 42922 - DNA, 20 bp, Artificial Sequence
  Description of Artificial Sequence: Synthetic oligonucleotide
  Target: SCNA; (-) strand; PAM type: YTN; PAM sequence: CTC
ccctgtctgaggtagagaag

SEQ ID NO: 42923 - DNA, 20 bp, Artificial Sequence
  Description of Artificial Sequence: Synthetic oligonucleotide
  Target: SCNA; (-) strand; PAM type: YTN; PAM sequence: CTA
tgtacacactcccctgtctg

SEQ ID NO: 42924 - DNA, 20 bp, Artificial Sequence
  Description of Artificial Sequence: Synthetic oligonucleotide
  Target: SCNA; (-) strand; PAM type: YTN; PAM sequence: CTA
cactatgtacacactcccct

SEQ ID NO: 42925 - DNA, 20 bp, Artificial Sequence
  Description of Artificial Sequence: Synthetic oligonucleotide
  Target: SCNA; (-) strand; PAM type: YTN; PAM sequence: CTA
tctacactatgtacacactc

SEQ ID NO: 42926 - DNA, 20 bp, Artificial Sequence
  Description of Artificial Sequence: Synthetic oligonucleotide
  Target: SCNA; (-) strand; PAM type: YTN; PAM sequence: TTA
gtgaaatatactatctacac

SEQ ID NO: 42927 - DNA, 20 bp, Artificial Sequence
  Description of Artificial Sequence: Synthetic oligonucleotide
  Target: SCNA; (-) strand; PAM type: YTN; PAM sequence: CTT
agtgaaatatactatctaca

SEQ ID NO: 42928 - DNA, 20 bp, Artificial Sequence
  Description of Artificial Sequence: Synthetic oligonucleotide
  Target: SCNA; (-) strand; PAM type: YTN; PAM sequence: CTC
ttagtgaaatatactatcta

SEQ ID NO: 42929 - DNA, 20 bp, Artificial Sequence
  Description of Artificial Sequence: Synthetic oligonucleotide
  Target: SCNA; (-) strand; PAM type: YTN; PAM sequence: TTC
tcttagtgaaatatactatc

SEQ ID NO: 42930 - DNA, 20 bp, Artificial Sequence
  Description of Artificial Sequence: Synthetic oligonucleotide
  Target: SCNA; (-) strand; PAM type: YTN; PAM sequence: TTA
agtgcatcaataaaatacat

SEQ ID NO: 42931 - DNA, 20 bp, Artificial Sequence
  Description of Artificial Sequence: Synthetic oligonucleotide
  Target: SCNA; (-) strand; PAM type: YTN; PAM sequence: TTT
aagtgcatcaataaaataca

SEQ ID NO: 42932 - DNA, 20 bp, Artificial Sequence
  Description of Artificial Sequence: Synthetic oligonucleotide
  Target: SCNA; (-) strand; PAM type: YTN; PAM sequence: TTT
taagtgcatcaataaaatac

SEQ ID NO: 42933 - DNA, 20 bp, Artificial Sequence
  Description of Artificial Sequence: Synthetic oligonucleotide
  Target: SCNA; (-) strand; PAM type: YTN; PAM sequence: TTT
ttaagtgcatcaataaaata

SEQ ID NO: 42934 - DNA, 20 bp, Artificial Sequence
  Description of Artificial Sequence: Synthetic oligonucleotide
  Target: SCNA; (-) strand; PAM type: YTN; PAM sequence: TTC
atttttaagtgcatcaataa

SEQ ID NO: 42935 - DNA, 20 bp, Artificial Sequence
  Description of Artificial Sequence: Synthetic oligonucleotide
  Target: SCNA; (-) strand; PAM type: YTN; PAM sequence: CTT
catttttaagtgcatcaata

SEQ ID NO: 42936 - DNA, 20 bp, Artificial Sequence
  Description of Artificial Sequence: Synthetic oligonucleotide
  Target: SCNA; (-) strand; PAM type: YTN; PAM sequence: CTA
tcgccttcatttttaagtgc

SEQ ID NO: 42937 - DNA, 20 bp, Artificial Sequence
  Description of Artificial Sequence: Synthetic oligonucleotide
  Target: SCNA; (-) strand; PAM type: YTN; PAM sequence: TTC
atgtctatcgccttcatttt

SEQ ID NO: 42938 - DNA, 20 bp, Artificial Sequence
  Description of Artificial Sequence: Synthetic oligonucleotide
  Target: SCNA; (-) strand; PAM type: YTN; PAM sequence: TTA
acaaggtattcatgtctatc

SEQ ID NO: 42939 - DNA, 20 bp, Artificial Sequence
  Description of Artificial Sequence: Synthetic oligonucleotide
  Target: SCNA; (-) strand; PAM type: YTN; PAM sequence: TTT
aacaaggtattcatgtctat

SEQ ID NO: 42940 - DNA, 20 bp, Artificial Sequence
  Description of Artificial Sequence: Synthetic oligonucleotide
  Target: SCNA; (-) strand; PAM type: YTN; PAM sequence: TTT
taacaaggtattcatgtcta

SEQ ID NO: 42941 - DNA, 20 bp, Artificial Sequence
  Description of Artificial Sequence: Synthetic oligonucleotide
  Target: SCNA; (-) strand; PAM type: YTN; PAM sequence: TTT
ttaacaaggtattcatgtct

SEQ ID NO: 42942 - DNA, 20 bp, Artificial Sequence
  Description of Artificial Sequence: Synthetic oligonucleotide
  Target: SCNA; (-) strand; PAM type: YTN; PAM sequence: CTT
tttaacaaggtattcatgtc

SEQ ID NO: 42943 - DNA, 20 bp, Artificial Sequence
  Description of Artificial Sequence: Synthetic oligonucleotide
  Target: SCNA; (-) strand; PAM type: YTN; PAM sequence: TTG
ctttttaacaaggtattcat

SEQ ID NO: 42944 - DNA, 20 bp, Artificial Sequence
  Description of Artificial Sequence: Synthetic oligonucleotide
  Target: SCNA; (-) strand; PAM type: YTN; PAM sequence: CTT
gctttttaacaaggtattca

SEQ ID NO: 42945 - DNA, 20 bp, Artificial Sequence
  Description of Artificial Sequence: Synthetic oligonucleotide
  Target: SCNA; (-) strand; PAM type: YTN; PAM sequence: TTA
ccttgctttttaacaaggta

SEQ ID NO: 42946 - DNA, 20 bp, Artificial Sequence
  Description of Artificial Sequence: Synthetic oligonucleotide
  Target: SCNA; (-) strand; PAM type: YTN; PAM sequence: TTT
accttgctttttaacaaggt

SEQ ID NO: 42947 - DNA, 20 bp, Artificial Sequence
  Description of Artificial Sequence: Synthetic oligonucleotide
  Target: SCNA; (-) strand; PAM type: YTN; PAM sequence: CTT
taccttgctttttaacaagg

SEQ ID NO: 42948 - DNA, 20 bp, Artificial Sequence
  Description of Artificial Sequence: Synthetic oligonucleotide
  Target: SCNA; (-) strand; PAM type: YTN; PAM sequence: TTG
aacatatgaaatatatcttt

SEQ ID NO: 42949 - DNA, 20 bp, Artificial Sequence
  Description of Artificial Sequence: Synthetic oligonucleotide
  Target: SCNA; (-) strand; PAM type: YTN; PAM sequence: TTG
ataatagaaaattgaacata

SEQ ID NO: 42950 - DNA, 20 bp, Artificial Sequence
  Description of Artificial Sequence: Synthetic oligonucleotide
  Target: SCNA; (-) strand; PAM type: YTN; PAM sequence: CTA
ggaattgataatagaaaatt

SEQ ID NO: 42951 - DNA, 20 bp, Artificial Sequence
  Description of Artificial Sequence: Synthetic oligonucleotide
  Target: SCNA; (-) strand; PAM type: YTN; PAM sequence: TTA
tgagcagactaggaattgat

SEQ ID NO: 42952 - DNA, 20 bp, Artificial Sequence
  Description of Artificial Sequence: Synthetic oligonucleotide
  Target: SCNA; (-) strand; PAM type: YTN; PAM sequence: CTC
cccaccccaaaatggcatta

SEQ ID NO: 42953 - DNA, 20 bp, Artificial Sequence
  Description of Artificial Sequence: Synthetic oligonucleotide
  Target: SCNA; (-) strand; PAM type: YTN; PAM sequence: TTG
ctccccaccccaaaatggca

SEQ ID NO: 42954 - DNA, 20 bp, Artificial Sequence
  Description of Artificial Sequence: Synthetic oligonucleotide
  Target: SCNA; (-) strand; PAM type: YTN; PAM sequence: TTT
gctccccaccccaaaatggc

SEQ ID NO: 42955 - DNA, 20 bp, Artificial Sequence
  Description of Artificial Sequence: Synthetic oligonucleotide
  Target: SCNA; (-) strand; PAM type: YTN; PAM sequence: CTT
tgctccccaccccaaaatgg

SEQ ID NO: 42956 - DNA, 20 bp, Artificial Sequence
  Description of Artificial Sequence: Synthetic oligonucleotide
  Target: SCNA; (-) strand; PAM type: YTN; PAM sequence: TTG
aatcagatgccctttgctcc

SEQ ID NO: 42957 - DNA, 20 bp, Artificial Sequence
  Description of Artificial Sequence: Synthetic oligonucleotide
  Target: SCNA; (-) strand; PAM type: YTN; PAM sequence: TTT
gaatcagatgccctttgctc

SEQ ID NO: 42958 - DNA, 20 bp, Artificial Sequence
  Description of Artificial Sequence: Synthetic oligonucleotide
  Target: SCNA; (-) strand; PAM type: YTN; PAM sequence: TTT
tgaatcagatgccctttgct

SEQ ID NO: 42959 - DNA, 20 bp, Artificial Sequence
  Description of Artificial Sequence: Synthetic oligonucleotide
  Target: SCNA; (-) strand; PAM type: YTN; PAM sequence: TTG
attttgaatcagatgccctt

SEQ ID NO: 42960 - DNA, 20 bp, Artificial Sequence
  Description of Artificial Sequence: Synthetic oligonucleotide
  Target: SCNA; (-) strand; PAM type: YTN; PAM sequence: TTT
gattttgaatcagatgccct

SEQ ID NO: 42961 - DNA, 20 bp, Artificial Sequence
  Description of Artificial Sequence: Synthetic oligonucleotide
  Target: SCNA; (-) strand; PAM type: YTN; PAM sequence: TTA
gtttgattttgaatcagatg

SEQ ID NO: 42962 - DNA, 20 bp, Artificial Sequence
  Description of Artificial Sequence: Synthetic oligonucleotide
  Target: SCNA; (-) strand; PAM type: YTN; PAM sequence: TTG
agattagtttgattttgaat

SEQ ID NO: 42963 - DNA, 20 bp, Artificial Sequence
  Description of Artificial Sequence: Synthetic oligonucleotide
  Target: SCNA; (-) strand; PAM type: YTN; PAM sequence: TTA
tcaaaaattgagattagttt

SEQ ID NO: 42964 - DNA, 20 bp, Artificial Sequence
  Description of Artificial Sequence: Synthetic oligonucleotide
  Target: SCNA; (-) strand; PAM type: YTN; PAM sequence: TTT
atcaaaaattgagattagtt

SEQ ID NO: 42965 - DNA, 20 bp, Artificial Sequence
  Description of Artificial Sequence: Synthetic oligonucleotide
  Target: SCNA; (-) strand; PAM type: YTN; PAM sequence: TTT
tatcaaaaattgagattagt

SEQ ID NO: 42966 - DNA, 20 bp, Artificial Sequence
  Description of Artificial Sequence: Synthetic oligonucleotide
  Target: SCNA; (-) strand; PAM type: YTN; PAM sequence: TTA
gattttatcaaaaattgaga

SEQ ID NO: 42967 - DNA, 20 bp, Artificial Sequence
  Description of Artificial Sequence: Synthetic oligonucleotide
  Target: SCNA; (-) strand; PAM type: YTN; PAM sequence: CTT
agattttatcaaaaattgag

SEQ ID NO: 42968 - DNA, 20 bp, Artificial Sequence
  Description of Artificial Sequence: Synthetic oligonucleotide
  Target: SCNA; (-) strand; PAM type: YTN; PAM sequence: TTC
cttagattttatcaaaaatt

SEQ ID NO: 42969 - DNA, 20 bp, Artificial Sequence
  Description of Artificial Sequence: Synthetic oligonucleotide
  Target: SCNA; (-) strand; PAM type: YTN; PAM sequence: TTA
aaaataaaattccttagatt

SEQ ID NO: 42970 - DNA, 20 bp, Artificial Sequence
  Description of Artificial Sequence: Synthetic oligonucleotide
  Target: SCNA; (-) strand; PAM type: YTN; PAM sequence: TTT
aaaaataaaattccttagat

SEQ ID NO: 42971 - DNA, 20 bp, Artificial Sequence
  Description of Artificial Sequence: Synthetic oligonucleotide
  Target: SCNA; (-) strand; PAM type: YTN; PAM sequence: TTT
taaaaataaaattccttaga

SEQ ID NO: 42972 - DNA, 20 bp, Artificial Sequence
  Description of Artificial Sequence: Synthetic oligonucleotide
  Target: SCNA; (-) strand; PAM type: YTN; PAM sequence: TTC
aatgttttaaaaataaaatt

SEQ ID NO: 42973 - DNA, 20 bp, Artificial Sequence
  Description of Artificial Sequence: Synthetic oligonucleotide
  Target: SCNA; (-) strand; PAM type: YTN; PAM sequence: TTA
attcaatgttttaaaaataa

SEQ ID NO: 42974 - DNA, 20 bp, Artificial Sequence
  Description of Artificial Sequence: Synthetic oligonucleotide
  Target: SCNA; (-) strand; PAM type: YTN; PAM sequence: TTT
aattcaatgttttaaaaata

SEQ ID NO: 42975 - DNA, 20 bp, Artificial Sequence
  Description of Artificial Sequence: Synthetic oligonucleotide
  Target: SCNA; (-) strand; PAM type: YTN; PAM sequence: CTT
taattcaatgttttaaaaat

SEQ ID NO: 42976 - DNA, 20 bp, Artificial Sequence
  Description of Artificial Sequence: Synthetic oligonucleotide
  Target: SCNA; (-) strand; PAM type: YTN; PAM sequence: TTG
ctttaattcaatgttttaaa

SEQ ID NO: 42977 - DNA, 20 bp, Artificial Sequence
  Description of Artificial Sequence: Synthetic oligonucleotide
  Target: SCNA; (-) strand; PAM type: YTN; PAM sequence: TTT
gctttaattcaatgttttaa

SEQ ID NO: 42978 - DNA, 20 bp, Artificial Sequence
  Description of Artificial Sequence: Synthetic oligonucleotide
  Target: SCNA; (-) strand; PAM type: YTN; PAM sequence: CTC
aagagaaatcagagtatcca

SEQ ID NO: 42979 - DNA, 20 bp, Artificial Sequence
  Description of Artificial Sequence: Synthetic oligonucleotide
  Target: SCNA; (-) strand; PAM type: YTN; PAM sequence: TTA
tgacctcaagagaaatcaga

SEQ ID NO: 42980 - DNA, 20 bp, Artificial Sequence
  Description of Artificial Sequence: Synthetic oligonucleotide
  Target: SCNA; (-) strand; PAM type: YTN; PAM sequence: TTT
atgacctcaagagaaatcag

SEQ ID NO: 42981 - DNA, 20 bp, Artificial Sequence
  Description of Artificial Sequence: Synthetic oligonucleotide
  Target: SCNA; (-) strand; PAM type: YTN; PAM sequence: TTA
aaaaggcagaggatttatga

SEQ ID NO: 42982 - DNA, 20 bp, Artificial Sequence
  Description of Artificial Sequence: Synthetic oligonucleotide
  Target: SCNA; (-) strand; PAM type: YTN; PAM sequence: CTT
aaaaaggcagaggatttatg

SEQ ID NO: 42983 - DNA, 20 bp, Artificial Sequence
  Description of Artificial Sequence: Synthetic oligonucleotide
  Target: SCNA; (-) strand; PAM type: YTN; PAM sequence: CTC
ttaaaaaggcagaggattta

SEQ ID NO: 42984 - DNA, 20 bp, Artificial Sequence
  Description of Artificial Sequence: Synthetic oligonucleotide
  Target: SCNA; (-) strand; PAM type: YTN; PAM sequence: CTC
cacatagatctcttaaaaag

SEQ ID NO: 42985 - DNA, 20 bp, Artificial Sequence
  Description of Artificial Sequence: Synthetic oligonucleotide
  Target: SCNA; (-) strand; PAM type: YTN; PAM sequence: CTC
tccacatagatctcttaaaa

SEQ ID NO: 42986 - DNA, 20 bp, Artificial Sequence
  Description of Artificial Sequence: Synthetic oligonucleotide
  Target: SCNA; (-) strand; PAM type: YTN; PAM sequence: TTC
ctctccacatagatctctta

SEQ ID NO: 42987 - DNA, 20 bp, Artificial Sequence
  Description of Artificial Sequence: Synthetic oligonucleotide
  Target: SCNA; (-) strand; PAM type: YTN; PAM sequence: TTG
ttcctctccacatagatctc

SEQ ID NO: 42988 - DNA, 20 bp, Artificial Sequence
  Description of Artificial Sequence: Synthetic oligonucleotide
  Target: SCNA; (-) strand; PAM type: YTN; PAM sequence: TTA
agacccagagttgttcctct

SEQ ID NO: 42989 - DNA, 20 bp, Artificial Sequence
  Description of Artificial Sequence: Synthetic oligonucleotide
  Target: SCNA; (-) strand; PAM type: YTN; PAM sequence: TTT
aagacccagagttgttcctc

SEQ ID NO: 42990 - DNA, 20 bp, Artificial Sequence
  Description of Artificial Sequence: Synthetic oligonucleotide
  Target: SCNA; (-) strand; PAM type: YTN; PAM sequence: TTC
gtttaagacccagagttgtt

SEQ ID NO: 42991 - DNA, 20 bp, Artificial Sequence
  Description of Artificial Sequence: Synthetic oligonucleotide
  Target: SCNA; (-) strand; PAM type: YTN; PAM sequence: CTC
aataattcgtttaagaccca

SEQ ID NO: 42992 - DNA, 20 bp, Artificial Sequence
  Description of Artificial Sequence: Synthetic oligonucleotide
  Target: SCNA; (-) strand; PAM type: YTN; PAM sequence: TTC
caaaacaagacctcaataat

SEQ ID NO: 42993 - DNA, 20 bp, Artificial Sequence
  Description of Artificial Sequence: Synthetic oligonucleotide
  Target: SCNA; (-) strand; PAM type: YTN; PAM sequence: TTT
ccaaaacaagacctcaataa

SEQ ID NO: 42994 - DNA, 20 bp, Artificial Sequence
  Description of Artificial Sequence: Synthetic oligonucleotide
  Target: SCNA; (-) strand; PAM type: YTN; PAM sequence: CTT
tccaaaacaagacctcaata

SEQ ID NO: 42995 - DNA, 20 bp, Artificial Sequence
  Description of Artificial Sequence: Synthetic oligonucleotide
  Target: SCNA; (-) strand; PAM type: YTN; PAM sequence: CTA
gcctttccaaaacaagacct

SEQ ID NO: 42996 - DNA, 20 bp, Artificial Sequence
  Description of Artificial Sequence: Synthetic oligonucleotide
  Target: SCNA; (-) strand; PAM type: YTN; PAM sequence: TTA
acaaaatatctagcctttcc

SEQ ID NO: 42997 - DNA, 20 bp, Artificial Sequence
  Description of Artificial Sequence: Synthetic oligonucleotide
  Target: SCNA; (-) strand; PAM type: YTN; PAM sequence: TTT
aacaaaatatctagcctttc

SEQ ID NO: 42998 - DNA, 20 bp, Artificial Sequence
  Description of Artificial Sequence: Synthetic oligonucleotide
  Target: SCNA; (-) strand; PAM type: YTN; PAM sequence: TTT
taacaaaatatctagccttt

SEQ ID NO: 42999 - DNA, 20 bp, Artificial Sequence
  Description of Artificial Sequence: Synthetic oligonucleotide
  Target: SCNA; (-) strand; PAM type: YTN; PAM sequence: TTT
ttaacaaaatatctagcctt

SEQ ID NO: 43000 - DNA, 20 bp, Artificial Sequence
  Description of Artificial Sequence: Synthetic oligonucleotide
  Target: SCNA; (-) strand; PAM type: YTN; PAM sequence: TTT
tttaacaaaatatctagcct

SEQ ID NO: 43001 - DNA, 20 bp, Artificial Sequence
  Description of Artificial Sequence: Synthetic oligonucleotide
  Target: SCNA; (-) strand; PAM type: YTN; PAM sequence: TTA
tattttttaacaaaatatct

SEQ ID NO: 43002 - DNA, 20 bp, Artificial Sequence
  Description of Artificial Sequence: Synthetic oligonucleotide
  Target: SCNA; (-) strand; PAM type: YTN; PAM sequence: CTT
atattttttaacaaaatatc

SEQ ID NO: 43003 - DNA, 20 bp, Artificial Sequence
  Description of Artificial Sequence: Synthetic oligonucleotide
  Target: SCNA; (-) strand; PAM type: YTN; PAM sequence: TTG
aaatcttatattttttaaca

SEQ ID NO: 43004 - DNA, 20 bp, Artificial Sequence
  Description of Artificial Sequence: Synthetic oligonucleotide
  Target: SCNA; (-) strand; PAM type: YTN; PAM sequence: TTT
gaaatcttatattttttaac

SEQ ID NO: 43005 - DNA, 20 bp, Artificial Sequence
  Description of Artificial Sequence: Synthetic oligonucleotide
  Target: SCNA; (-) strand; PAM type: YTN; PAM sequence: TTT
tgaaatcttatattttttaa

SEQ ID NO: 43006 - DNA, 20 bp, Artificial Sequence
  Description of Artificial Sequence: Synthetic oligonucleotide
  Target: SCNA; (-) strand; PAM type: YTN; PAM sequence: TTT
ttgaaatcttatatttttta

SEQ ID NO: 43007 - DNA, 20 bp, Artificial Sequence
  Description of Artificial Sequence: Synthetic oligonucleotide
  Target: SCNA; (-) strand; PAM type: YTN; PAM sequence: TTT
tttgaaatcttatatttttt

SEQ ID NO: 43008 - DNA, 20 bp, Artificial Sequence
  Description of Artificial Sequence: Synthetic oligonucleotide
  Target: SCNA; (-) strand; PAM type: YTN; PAM sequence: TTA
ggttttttgaaatcttatat

SEQ ID NO: 43009 - DNA, 20 bp, Artificial Sequence
  Description of Artificial Sequence: Synthetic oligonucleotide
  Target: SCNA; (-) strand; PAM type: YTN; PAM sequence: TTT
aggttttttgaaatcttata

SEQ ID NO: 43010 - DNA, 20 bp, Artificial Sequence
  Description of Artificial Sequence: Synthetic oligonucleotide
  Target: SCNA; (-) strand; PAM type: YTN; PAM sequence: TTT
taggttttttgaaatcttat

SEQ ID NO: 43011 - DNA, 20 bp, Artificial Sequence
  Description of Artificial Sequence: Synthetic oligonucleotide
  Target: SCNA; (-) strand; PAM type: YTN; PAM sequence: TTG
tccaaagttttaggtttttt

SEQ ID NO: 43012 - DNA, 20 bp, Artificial Sequence
  Description of Artificial Sequence: Synthetic oligonucleotide
  Target: SCNA; (-) strand; PAM type: YTN; PAM sequence: TTA
aataacattgtccaaagttt

SEQ ID NO: 43013 - DNA, 20 bp, Artificial Sequence
  Description of Artificial Sequence: Synthetic oligonucleotide
  Target: SCNA; (-) strand; PAM type: YTN; PAM sequence: TTG
atgattaaataacattgtcc

SEQ ID NO: 43014 - DNA, 20 bp, Artificial Sequence
  Description of Artificial Sequence: Synthetic oligonucleotide
  Target: SCNA; (-) strand; PAM type: YTN; PAM sequence: TTT
gatgattaaataacattgtc

SEQ ID NO: 43015 - DNA, 20 bp, Artificial Sequence
  Description of Artificial Sequence: Synthetic oligonucleotide
  Target: SCNA; (-) strand; PAM type: YTN; PAM sequence: TTT
tgatgattaaataacattgt

SEQ ID NO: 43016 - DNA, 20 bp, Artificial Sequence
  Description of Artificial Sequence: Synthetic oligonucleotide
  Target: SCNA; (-) strand; PAM type: YTN; PAM sequence: CTT
ttgatgattaaataacattg

SEQ ID NO: 43017 - DNA, 20 bp, Artificial Sequence
  Description of Artificial Sequence: Synthetic oligonucleotide
  Target: SCNA; (-) strand; PAM type: YTN; PAM sequence: TTG
cttttgatgattaaataaca

SEQ ID NO: 43018 - DNA, 20 bp, Artificial Sequence
  Description of Artificial Sequence: Synthetic oligonucleotide
  Target: SCNA; (-) strand; PAM type: YTN; PAM sequence: TTT
gcttttgatgattaaataac

SEQ ID NO: 43019 - DNA, 20 bp, Artificial Sequence
  Description of Artificial Sequence: Synthetic oligonucleotide
  Target: SCNA; (-) strand; PAM type: YTN; PAM sequence: TTT
tgcttttgatgattaaataa

SEQ ID NO: 43020 - DNA, 20 bp, Artificial Sequence
  Description of Artificial Sequence: Synthetic oligonucleotide
  Target: SCNA; (-) strand; PAM type: YTN; PAM sequence: TTG
ttttgcttttgatgattaaa

SEQ ID NO: 43021 - DNA, 20 bp, Artificial Sequence
  Description of Artificial Sequence: Synthetic oligonucleotide
  Target: SCNA; (-) strand; PAM type: YTN; PAM sequence: CTG
aaatatgcatattgttttgc

SEQ ID NO: 43022 - DNA, 20 bp, Artificial Sequence
  Description of Artificial Sequence: Synthetic oligonucleotide
  Target: SCNA; (-) strand; PAM type: YTN; PAM sequence: TTC
tgaaatatgcatattgtttt

SEQ ID NO: 43023 - DNA, 20 bp, Artificial Sequence
  Description of Artificial Sequence: Synthetic oligonucleotide
  Target: SCNA; (-) strand; PAM type: YTN; PAM sequence: TTT
ctgaaatatgcatattgttt

SEQ ID NO: 43024 - DNA, 20 bp, Artificial Sequence
  Description of Artificial Sequence: Synthetic oligonucleotide
  Target: SCNA; (-) strand; PAM type: YTN; PAM sequence: TTA
tttctgaaatatgcatattg

SEQ ID NO: 43025 - DNA, 20 bp, Artificial Sequence
  Description of Artificial Sequence: Synthetic oligonucleotide
  Target: SCNA; (-) strand; PAM type: YTN; PAM sequence: CTG
aaaatatagtgttatttctg

SEQ ID NO: 43026 - DNA, 20 bp, Artificial Sequence
  Description of Artificial Sequence: Synthetic oligonucleotide
  Target: SCNA; (-) strand; PAM type: YTN; PAM sequence: TTA
tgcataatagtaagactgaa

SEQ ID NO: 43027 - DNA, 20 bp, Artificial Sequence
  Description of Artificial Sequence: Synthetic oligonucleotide
  Target: SCNA; (-) strand; PAM type: YTN; PAM sequence: CTT
atgcataatagtaagactga

SEQ ID NO: 43028 - DNA, 20 bp, Artificial Sequence
  Description of Artificial Sequence: Synthetic oligonucleotide
  Target: SCNA; (-) strand; PAM type: YTN; PAM sequence: TTC
ttatgcataatagtaagact

SEQ ID NO: 43029 - DNA, 20 bp, Artificial Sequence
  Description of Artificial Sequence: Synthetic oligonucleotide
  Target: SCNA; (-) strand; PAM type: YTN; PAM sequence: TTT
cttatgcataatagtaagac

SEQ ID NO: 43030 - DNA, 20 bp, Artificial Sequence
  Description of Artificial Sequence: Synthetic oligonucleotide
  Target: SCNA; (-) strand; PAM type: YTN; PAM sequence: CTT
tcttatgcataatagtaaga

SEQ ID NO: 43031 - DNA, 20 bp, Artificial Sequence
  Description of Artificial Sequence: Synthetic oligonucleotide
  Target: SCNA; (-) strand; PAM type: YTN; PAM sequence: TTC
tttcttatgcataatagtaa

SEQ ID NO: 43032 - DNA, 20 bp, Artificial Sequence
  Description of Artificial Sequence: Synthetic oligonucleotide
  Target: SCNA; (-) strand; PAM type: YTN; PAM sequence: TTG
ttctttcttatgcataatag

SEQ ID NO: 43033 - DNA, 20 bp, Artificial Sequence
  Description of Artificial Sequence: Synthetic oligonucleotide
  Target: SCNA; (-) strand; PAM type: YTN; PAM sequence: TTA
tattgttctttcttatgcat

SEQ ID NO: 43034 - DNA, 20 bp, Artificial Sequence
  Description of Artificial Sequence: Synthetic oligonucleotide
  Target: SCNA; (-) strand; PAM type: YTN; PAM sequence: TTT
atattgttctttcttatgca

SEQ ID NO: 43035 - DNA, 20 bp, Artificial Sequence
  Description of Artificial Sequence: Synthetic oligonucleotide
  Target: SCNA; (-) strand; PAM type: YTN; PAM sequence: TTT
tatattgttctttcttatgc

SEQ ID NO: 43036 - DNA, 20 bp, Artificial Sequence
  Description of Artificial Sequence: Synthetic oligonucleotide
  Target: SCNA; (-) strand; PAM type: YTN; PAM sequence: TTT
ttatattgttctttcttatg

SEQ ID NO: 43037 - DNA, 20 bp, Artificial Sequence
  Description of Artificial Sequence: Synthetic oligonucleotide
  Target: SCNA; (-) strand; PAM type: YTN; PAM sequence: TTA
tttttatattgttctttctt

SEQ ID NO: 43038 - DNA, 20 bp, Artificial Sequence
  Description of Artificial Sequence: Synthetic oligonucleotide
  Target: SCNA; (-) strand; PAM type: YTN; PAM sequence: TTA
cattatttttatattgttct

SEQ ID NO: 43039 - DNA, 20 bp, Artificial Sequence
  Description of Artificial Sequence: Synthetic oligonucleotide
  Target: SCNA; (-) strand; PAM type: YTN; PAM sequence: CTC
agagtatgtaaacaataaat

SEQ ID NO: 43040 - DNA, 20 bp, Artificial Sequence
  Description of Artificial Sequence: Synthetic oligonucleotide
  Target: SCNA; (-) strand; PAM type: YTN; PAM sequence: CTC
ctcagagtatgtaaacaata

SEQ ID NO: 43041 - DNA, 20 bp, Artificial Sequence
  Description of Artificial Sequence: Synthetic oligonucleotide
  Target: SCNA; (-) strand; PAM type: YTN; PAM sequence: TTA
aatactcctcagagtatgta

SEQ ID NO: 43042 - DNA, 20 bp, Artificial Sequence
  Description of Artificial Sequence: Synthetic oligonucleotide
  Target: SCNA; (-) strand; PAM type: YTN; PAM sequence: CTA
ggatgcaattaaatactcct

SEQ ID NO: 43043 - DNA, 20 bp, Artificial Sequence
  Description of Artificial Sequence: Synthetic oligonucleotide
  Target: SCNA; (-) strand; PAM type: YTN; PAM sequence: TTA
ctaggatgcaattaaatact

SEQ ID NO: 43044 - DNA, 20 bp, Artificial Sequence
  Description of Artificial Sequence: Synthetic oligonucleotide
  Target: SCNA; (-) strand; PAM type: YTN; PAM sequence: CTT
actaggatgcaattaaatac

SEQ ID NO: 43045 - DNA, 20 bp, Artificial Sequence
  Description of Artificial Sequence: Synthetic oligonucleotide
  Target: SCNA; (-) strand; PAM type: YTN; PAM sequence: CTC
atgtgacagaatatacttac

SEQ ID NO: 43046 - DNA, 20 bp, Artificial Sequence
  Description of Artificial Sequence: Synthetic oligonucleotide
  Target: SCNA; (-) strand; PAM type: YTN; PAM sequence: TTC
tcatgtgacagaatatactt

SEQ ID NO: 43047 - DNA, 20 bp, Artificial Sequence
  Description of Artificial Sequence: Synthetic oligonucleotide
  Target: SCNA; (-) strand; PAM type: YTN; PAM sequence: CTT
ctcatgtgacagaatatact

SEQ ID NO: 43048 - DNA, 20 bp, Artificial Sequence
  Description of Artificial Sequence: Synthetic oligonucleotide
  Target: SCNA; (-) strand; PAM type: YTN; PAM sequence: CTA
tggcttctcatgtgacagaa

SEQ ID NO: 43049 - DNA, 20 bp, Artificial Sequence
  Description of Artificial Sequence: Synthetic oligonucleotide
  Target: SCNA; (-) strand; PAM type: YTN; PAM sequence: TTC
tatggcttctcatgtgacag

SEQ ID NO: 43050 - DNA, 20 bp, Artificial Sequence
  Description of Artificial Sequence: Synthetic oligonucleotide
  Target: SCNA; (-) strand; PAM type: YTN; PAM sequence: TTT
ctatggcttctcatgtgaca

SEQ ID NO: 43051 - DNA, 20 bp, Artificial Sequence
  Description of Artificial Sequence: Synthetic oligonucleotide
  Target: SCNA; (-) strand; PAM type: YTN; PAM sequence: TTG
gatacagcagaacatgccaa

SEQ ID NO: 43052 - DNA, 20 bp, Artificial Sequence
  Description of Artificial Sequence: Synthetic oligonucleotide
  Target: SCNA; (-) strand; PAM type: YTN; PAM sequence: TTG
ggcattggatacagcagaac

SEQ ID NO: 43053 - DNA, 20 bp, Artificial Sequence
  Description of Artificial Sequence: Synthetic oligonucleotide
  Target: SCNA; (-) strand; PAM type: YTN; PAM sequence: TTT
gggcattggatacagcagaa

SEQ ID NO: 43054 - DNA, 20 bp, Artificial Sequence
  Description of Artificial Sequence: Synthetic oligonucleotide
  Target: SCNA; (-) strand; PAM type: YTN; PAM sequence: CTT
tgggcattggatacagcaga

SEQ ID NO: 43055 - DNA, 20 bp, Artificial Sequence
  Description of Artificial Sequence: Synthetic oligonucleotide
  Target: SCNA; (-) strand; PAM type: YTN; PAM sequence: TTA
tcctttgggcattggataca

SEQ ID NO: 43056 - DNA, 20 bp, Artificial Sequence
  Description of Artificial Sequence: Synthetic oligonucleotide
  Target: SCNA; (-) strand; PAM type: YTN; PAM sequence: TTA
ttatcctttgggcattggat

SEQ ID NO: 43057 - DNA, 20 bp, Artificial Sequence
  Description of Artificial Sequence: Synthetic oligonucleotide
  Target: SCNA; (-) strand; PAM type: YTN; PAM sequence: TTT
attatcctttgggcattgga

SEQ ID NO: 43058 - DNA, 20 bp, Artificial Sequence
  Description of Artificial Sequence: Synthetic oligonucleotide
  Target: SCNA; (-) strand; PAM type: YTN; PAM sequence: CTT
tattatcctttgggcattgg

SEQ ID NO: 43059 - DNA, 20 bp, Artificial Sequence
  Description of Artificial Sequence: Synthetic oligonucleotide
  Target: SCNA; (-) strand; PAM type: YTN; PAM sequence: TTA
tcatgctttattatcctttg

SEQ ID NO: 43060 - DNA, 20 bp, Artificial Sequence
  Description of Artificial Sequence: Synthetic oligonucleotide
  Target: SCNA; (-) strand; PAM type: YTN; PAM sequence: TTT
atcatgctttattatccttt

SEQ ID NO: 43061 - DNA, 20 bp, Artificial Sequence
  Description of Artificial Sequence: Synthetic oligonucleotide
  Target: SCNA; (-) strand; PAM type: YTN; PAM sequence: TTT
tatcatgctttattatcctt

SEQ ID NO: 43062 - DNA, 20 bp, Artificial Sequence
  Description of Artificial Sequence: Synthetic oligonucleotide
  Target: SCNA; (-) strand; PAM type: YTN; PAM sequence: TTA
agtgtaattttatcatgctt

SEQ ID NO: 43063 - DNA, 20 bp, Artificial Sequence
  Description of Artificial Sequence: Synthetic oligonucleotide
  Target: SCNA; (-) strand; PAM type: YTN; PAM sequence: TTC
gttaagtgtaattttatcat

SEQ ID NO: 43064 - DNA, 20 bp, Artificial Sequence
  Description of Artificial Sequence: Synthetic oligonucleotide
  Target: SCNA; (-) strand; PAM type: YTN; PAM sequence: TTG
ggttcgttaagtgtaatttt

SEQ ID NO: 43065 - DNA, 20 bp, Artificial Sequence
  Description of Artificial Sequence: Synthetic oligonucleotide
  Target: SCNA; (-) strand; PAM type: YTN; PAM sequence: TTG
gaaaaggaggttgggttcgt

SEQ ID NO: 43066 - DNA, 20 bp, Artificial Sequence
  Description of Artificial Sequence: Synthetic oligonucleotide
  Target: SCNA; (-) strand; PAM type: YTN; PAM sequence: TTA
accatatataattggaaaag

SEQ ID NO: 43067 - DNA, 20 bp, Artificial Sequence
  Description of Artificial Sequence: Synthetic oligonucleotide
  Target: SCNA; (-) strand; PAM type: YTN; PAM sequence: CTT
aaccatatataattggaaaa

SEQ ID NO: 43068 - DNA, 20 bp, Artificial Sequence
  Description of Artificial Sequence: Synthetic oligonucleotide
  Target: SCNA; (-) strand; PAM type: YTN; PAM sequence: TTA
acttaaccatatataattgg

SEQ ID NO: 43069 - DNA, 20 bp, Artificial Sequence
  Description of Artificial Sequence: Synthetic oligonucleotide
  Target: SCNA; (-) strand; PAM type: YTN; PAM sequence: TTT
aacttaaccatatataattg

SEQ ID NO: 43070 - DNA, 20 bp, Artificial Sequence
  Description of Artificial Sequence: Synthetic oligonucleotide
  Target: SCNA; (-) strand; PAM type: YTN; PAM sequence: TTT
taacttaaccatatataatt

SEQ ID NO: 43071 - DNA, 20 bp, Artificial Sequence
  Description of Artificial Sequence: Synthetic oligonucleotide
  Target: SCNA; (-) strand; PAM type: YTN; PAM sequence: TTG
aattttaacttaaccatata

SEQ ID NO: 43072 - DNA, 20 bp, Artificial Sequence
  Description of Artificial Sequence: Synthetic oligonucleotide
  Target: SCNA; (-) strand; PAM type: YTN; PAM sequence: TTT
gaattttaacttaaccatat

SEQ ID NO: 43073 - DNA, 20 bp, Artificial Sequence
  Description of Artificial Sequence: Synthetic oligonucleotide
  Target: SCNA; (-) strand; PAM type: YTN; PAM sequence: TTA
aagtttgaattttaacttaa

SEQ ID NO: 43074 - DNA, 20 bp, Artificial Sequence
  Description of Artificial Sequence: Synthetic oligonucleotide
  Target: SCNA; (-) strand; PAM type: YTN; PAM sequence: TTC
ccaaaaattaaagtttgaat

SEQ ID NO: 43075 - DNA, 20 bp, Artificial Sequence
  Description of Artificial Sequence: Synthetic oligonucleotide
  Target: SCNA; (-) strand; PAM type: YTN; PAM sequence: TTT
cccaaaaattaaagtttgaa

SEQ ID NO: 43076 - DNA, 20 bp, Artificial Sequence
  Description of Artificial Sequence: Synthetic oligonucleotide
  Target: SCNA; (-) strand; PAM type: YTN; PAM sequence: CTT
tcccaaaaattaaagtttga

SEQ ID NO: 43077 - DNA, 20 bp, Artificial Sequence
  Description of Artificial Sequence: Synthetic oligonucleotide
  Target: SCNA; (-) strand; PAM type: YTN; PAM sequence: CTA
tactttcccaaaaattaaag

SEQ ID NO: 43078 - DNA, 20 bp, Artificial Sequence
  Description of Artificial Sequence: Synthetic oligonucleotide
  Target: SCNA; (-) strand; PAM type: YTN; PAM sequence: CTA
agccataactatactttccc

SEQ ID NO: 43079 - DNA, 20 bp, Artificial Sequence
  Description of Artificial Sequence: Synthetic oligonucleotide
  Target: SCNA; (-) strand; PAM type: YTN; PAM sequence: TTA
gatctaagccataactatac

SEQ ID NO: 43080 - DNA, 20 bp, Artificial Sequence
  Description of Artificial Sequence: Synthetic oligonucleotide
  Target: SCNA; (-) strand; PAM type: YTN; PAM sequence: CTT
agatctaagccataactata

SEQ ID NO: 43081 - DNA, 20 bp, Artificial Sequence
  Description of Artificial Sequence: Synthetic oligonucleotide
  Target: SCNA; (-) strand; PAM type: YTN; PAM sequence: CTA
ccttagatctaagccataac

SEQ ID NO: 43082 - DNA, 20 bp, Artificial Sequence
  Description of Artificial Sequence: Synthetic oligonucleotide
  Target: SCNA; (-) strand; PAM type: YTN; PAM sequence: TTC
taccttagatctaagccata

SEQ ID NO: 43083 - DNA, 20 bp, Artificial Sequence
  Description of Artificial Sequence: Synthetic oligonucleotide
  Target: SCNA; (-) strand; PAM type: YTN; PAM sequence: TTT
ctaccttagatctaagccat

SEQ ID NO: 43084 - DNA, 20 bp, Artificial Sequence
  Description of Artificial Sequence: Synthetic oligonucleotide
  Target: SCNA; (-) strand; PAM type: YTN; PAM sequence: TTA
tttctaccttagatctaagc

SEQ ID NO: 43085 - DNA, 20 bp, Artificial Sequence
  Description of Artificial Sequence: Synthetic oligonucleotide
  Target: SCNA; (-) strand; PAM type: YTN; PAM sequence: TTT
atttctaccttagatctaag

SEQ ID NO: 43086 - DNA, 20 bp, Artificial Sequence
  Description of Artificial Sequence: Synthetic oligonucleotide
  Target: SCNA; (-) strand; PAM type: YTN; PAM sequence: TTT
tatttctaccttagatctaa

SEQ ID NO: 43087 - DNA, 20 bp, Artificial Sequence
  Description of Artificial Sequence: Synthetic oligonucleotide
  Target: SCNA; (-) strand; PAM type: YTN; PAM sequence: TTG
gtcattttatttctacctta

SEQ ID NO: 43088 - DNA, 20 bp, Artificial Sequence
  Description of Artificial Sequence: Synthetic oligonucleotide
  Target: SCNA; (-) strand; PAM type: YTN; PAM sequence: TTT
ggtcattttatttctacctt

SEQ ID NO: 43089 - DNA, 20 bp, Artificial Sequence
  Description of Artificial Sequence: Synthetic oligonucleotide
  Target: SCNA; (-) strand; PAM type: YTN; PAM sequence: CTT
tggtcattttatttctacct

SEQ ID NO: 43090 - DNA, 20 bp, Artificial Sequence
  Description of Artificial Sequence: Synthetic oligonucleotide
  Target: SCNA; (-) strand; PAM type: YTN; PAM sequence: TTA
aatgcaccaagtcctttggt

SEQ ID NO: 43091 - DNA, 20 bp, Artificial Sequence
  Description of Artificial Sequence: Synthetic oligonucleotide
  Target: SCNA; (-) strand; PAM type: YTN; PAM sequence: TTA
tagaatgttaaatgcaccaa

SEQ ID NO: 43092 - DNA, 20 bp, Artificial Sequence
  Description of Artificial Sequence: Synthetic oligonucleotide
  Target: SCNA; (-) strand; PAM type: YTN; PAM sequence: CTA
aagttatagaatgttaaatg

SEQ ID NO: 43093 - DNA, 20 bp, Artificial Sequence
  Description of Artificial Sequence: Synthetic oligonucleotide
  Target: SCNA; (-) strand; PAM type: YTN; PAM sequence: TTC
taaagttatagaatgttaaa

SEQ ID NO: 43094 - DNA, 20 bp, Artificial Sequence
  Description of Artificial Sequence: Synthetic oligonucleotide
  Target: SCNA; (-) strand; PAM type: YTN; PAM sequence: TTT
ctaaagttatagaatgttaa

SEQ ID NO: 43095 - DNA, 20 bp, Artificial Sequence
  Description of Artificial Sequence: Synthetic oligonucleotide
  Target: SCNA; (-) strand; PAM type: YTN; PAM sequence: TTG
atgcatttctaaagttatag

SEQ ID NO: 43096 - DNA, 20 bp, Artificial Sequence
  Description of Artificial Sequence: Synthetic oligonucleotide
  Target: SCNA; (-) strand; PAM type: YTN; PAM sequence: TTT
gatgcatttctaaagttata

SEQ ID NO: 43097 - DNA, 20 bp, Artificial Sequence
  Description of Artificial Sequence: Synthetic oligonucleotide
  Target: SCNA; (-) strand; PAM type: YTN; PAM sequence: CTT
tgatgcatttctaaagttat

SEQ ID NO: 43098 - DNA, 20 bp, Artificial Sequence
  Description of Artificial Sequence: Synthetic oligonucleotide
  Target: SCNA; (-) strand; PAM type: YTN; PAM sequence: TTG
ccactttgatgcatttctaa

SEQ ID NO: 43099 - DNA, 20 bp, Artificial Sequence
  Description of Artificial Sequence: Synthetic oligonucleotide
  Target: SCNA; (-) strand; PAM type: YTN; PAM sequence: CTT
gccactttgatgcatttcta

SEQ ID NO: 43100 - DNA, 20 bp, Artificial Sequence
  Description of Artificial Sequence: Synthetic oligonucleotide
  Target: SCNA; (-) strand; PAM type: YTN; PAM sequence: CTG
ggcttgccactttgatgcat

SEQ ID NO: 43101 - DNA, 20 bp, Artificial Sequence
  Description of Artificial Sequence: Synthetic oligonucleotide
  Target: SCNA; (-) strand; PAM type: YTN; PAM sequence: TTA
atgctgggcttgccactttg

SEQ ID NO: 43102 - DNA, 20 bp, Artificial Sequence
  Description of Artificial Sequence: Synthetic oligonucleotide
  Target: SCNA; (-) strand; PAM type: YTN; PAM sequence: CTT
aatgctgggcttgccacttt

SEQ ID NO: 43103 - DNA, 20 bp, Artificial Sequence
  Description of Artificial Sequence: Synthetic oligonucleotide
  Target: SCNA; (-) strand; PAM type: YTN; PAM sequence: CTC
ttaatgctgggcttgccact

SEQ ID NO: 43104 - DNA, 20 bp, Artificial Sequence
  Description of Artificial Sequence: Synthetic oligonucleotide
  Target: SCNA; (-) strand; PAM type: YTN; PAM sequence: TTA
gtgacaaatagctcttaatg

SEQ ID NO: 43105 - DNA, 20 bp, Artificial Sequence
  Description of Artificial Sequence: Synthetic oligonucleotide
  Target: SCNA; (-) strand; PAM type: YTN; PAM sequence: CTT
agtgacaaatagctcttaat

SEQ ID NO: 43106 - DNA, 20 bp, Artificial Sequence
  Description of Artificial Sequence: Synthetic oligonucleotide
  Target: SCNA; (-) strand; PAM type: YTN; PAM sequence: TTC
aaccacaggcccttagtgac

SEQ ID NO: 43107 - DNA, 20 bp, Artificial Sequence
  Description of Artificial Sequence: Synthetic oligonucleotide
  Target: SCNA; (-) strand; PAM type: YTN; PAM sequence: CTT
caaccacaggcccttagtga

SEQ ID NO: 43108 - DNA, 20 bp, Artificial Sequence
  Description of Artificial Sequence: Synthetic oligonucleotide
  Target: SCNA; (-) strand; PAM type: YTN; PAM sequence: CTC
agaaagaacagatggatcca

SEQ ID NO: 43109 - DNA, 20 bp, Artificial Sequence
  Description of Artificial Sequence: Synthetic oligonucleotide
  Target: SCNA; (-) strand; PAM type: YTN; PAM sequence: TTG
cctcagaaagaacagatgga

SEQ ID NO: 43110 - DNA, 20 bp, Artificial Sequence
  Description of Artificial Sequence: Synthetic oligonucleotide
  Target: SCNA; (-) strand; PAM type: YTN; PAM sequence: CTG
catattgcctcagaaagaac

SEQ ID NO: 43111 - DNA, 20 bp, Artificial Sequence
  Description of Artificial Sequence: Synthetic oligonucleotide
  Target: SCNA; (-) strand; PAM type: YTN; PAM sequence: TTC
gtctgcatattgcctcagaa

SEQ ID NO: 43112 - DNA, 20 bp, Artificial Sequence
  Description of Artificial Sequence: Synthetic oligonucleotide
  Target: SCNA; (-) strand; PAM type: YTN; PAM sequence: TTT
cgtctgcatattgcctcaga

SEQ ID NO: 43113 - DNA, 20 bp, Artificial Sequence
  Description of Artificial Sequence: Synthetic oligonucleotide
  Target: SCNA; (-) strand; PAM type: YTN; PAM sequence: CTT
tcgtctgcatattgcctcag

SEQ ID NO: 43114 - DNA, 20 bp, Artificial Sequence
  Description of Artificial Sequence: Synthetic oligonucleotide
  Target: SCNA; (-) strand; PAM type: YTN; PAM sequence: TTA
cctttcgtctgcatattgcc

SEQ ID NO: 43115 - DNA, 20 bp, Artificial Sequence
  Description of Artificial Sequence: Synthetic oligonucleotide
  Target: SCNA; (-) strand; PAM type: YTN; PAM sequence: CTT
acctttcgtctgcatattgc

SEQ ID NO: 43116 - DNA, 20 bp, Artificial Sequence
  Description of Artificial Sequence: Synthetic oligonucleotide
  Target: SCNA; (-) strand; PAM type: YTN; PAM sequence: CTC
cccttacctttcgtctgcat

SEQ ID NO: 43117 - DNA, 20 bp, Artificial Sequence
  Description of Artificial Sequence: Synthetic oligonucleotide
  Target: SCNA; (-) strand; PAM type: YTN; PAM sequence: TTG
caactccccttacctttcgt

SEQ ID NO: 43118 - DNA, 20 bp, Artificial Sequence
  Description of Artificial Sequence: Synthetic oligonucleotide
  Target: SCNA; (-) strand; PAM type: YTN; PAM sequence: TTA
tgttgcaactccccttacct

SEQ ID NO: 43119 - DNA, 20 bp, Artificial Sequence
  Description of Artificial Sequence: Synthetic oligonucleotide
  Target: SCNA; (-) strand; PAM type: YTN; PAM sequence: TTA
caaattatgttgcaactccc

SEQ ID NO: 43120 - DNA, 20 bp, Artificial Sequence
  Description of Artificial Sequence: Synthetic oligonucleotide
  Target: SCNA; (-) strand; PAM type: YTN; PAM sequence: TTA
taatgtatcaaatattacaa

SEQ ID NO: 43121 - DNA, 20 bp, Artificial Sequence
  Description of Artificial Sequence: Synthetic oligonucleotide
  Target: SCNA; (-) strand; PAM type: YTN; PAM sequence: TTA
tcatgtattataatgtatca

SEQ ID NO: 43122 - DNA, 20 bp, Artificial Sequence
  Description of Artificial Sequence: Synthetic oligonucleotide
  Target: SCNA; (-) strand; PAM type: YTN; PAM sequence: TTT
atcatgtattataatgtatc

SEQ ID NO: 43123 - DNA, 20 bp, Artificial Sequence
  Description of Artificial Sequence: Synthetic oligonucleotide
  Target: SCNA; (-) strand; PAM type: YTN; PAM sequence: TTA
taatttatcatgtattataa

SEQ ID NO: 43124 - DNA, 20 bp, Artificial Sequence
  Description of Artificial Sequence: Synthetic oligonucleotide
  Target: SCNA; (-) strand; PAM type: YTN; PAM sequence: CTA
atatattataatttatcatg

SEQ ID NO: 43125 - DNA, 20 bp, Artificial Sequence
  Description of Artificial Sequence: Synthetic oligonucleotide
  Target: SCNA; (-) strand; PAM type: YTN; PAM sequence: TTC
taatatattataatttatca

SEQ ID NO: 43126 - DNA, 20 bp, Artificial Sequence
  Description of Artificial Sequence: Synthetic oligonucleotide
  Target: SCNA; (-) strand; PAM type: YTN; PAM sequence: TTT
ctaatatattataatttatc

SEQ ID NO: 43127 - DNA, 20 bp, Artificial Sequence
  Description of Artificial Sequence: Synthetic oligonucleotide
  Target: SCNA; (-) strand; PAM type: YTN; PAM sequence: TTA
tatttctaatatattataat

SEQ ID NO: 43128 - DNA, 20 bp, Artificial Sequence
  Description of Artificial Sequence: Synthetic oligonucleotide
  Target: SCNA; (-) strand; PAM type: YTN; PAM sequence: CTA
taaattatatttctaatata

SEQ ID NO: 43129 - DNA, 20 bp, Artificial Sequence
  Description of Artificial Sequence: Synthetic oligonucleotide
  Target: SCNA; (-) strand; PAM type: YTN; PAM sequence: CTA
gatgtaatgctataaattat

SEQ ID NO: 43130 - DNA, 20 bp, Artificial Sequence
  Description of Artificial Sequence: Synthetic oligonucleotide
  Target: SCNA; (-) strand; PAM type: YTN; PAM sequence: TTA
ctagatgtaatgctataaat

SEQ ID NO: 43131 - DNA, 20 bp, Artificial Sequence
  Description of Artificial Sequence: Synthetic oligonucleotide
  Target: SCNA; (-) strand; PAM type: YTN; PAM sequence: CTT
actagatgtaatgctataaa

SEQ ID NO: 43132 - DNA, 20 bp, Artificial Sequence
  Description of Artificial Sequence: Synthetic oligonucleotide
  Target: SCNA; (-) strand; PAM type: YTN; PAM sequence: CTA
tcttactagatgtaatgcta

SEQ ID NO: 43133 - DNA, 20 bp, Artificial Sequence
  Description of Artificial Sequence: Synthetic oligonucleotide
  Target: SCNA; (-) strand; PAM type: YTN; PAM sequence: TTA
catctatcttactagatgta

SEQ ID NO: 43134 - DNA, 20 bp, Artificial Sequence
  Description of Artificial Sequence: Synthetic oligonucleotide
  Target: SCNA; (-) strand; PAM type: YTN; PAM sequence: TTT
acatctatcttactagatgt

SEQ ID NO: 43135 - DNA, 20 bp, Artificial Sequence
  Description of Artificial Sequence: Synthetic oligonucleotide
  Target: SCNA; (-) strand; PAM type: YTN; PAM sequence: TTT
tacatctatcttactagatg

SEQ ID NO: 43136 - DNA, 20 bp, Artificial Sequence
  Description of Artificial Sequence: Synthetic oligonucleotide
  Target: SCNA; (-) strand; PAM type: YTN; PAM sequence: CTT
ttacatctatcttactagat

SEQ ID NO: 43137 - DNA, 20 bp, Artificial Sequence
  Description of Artificial Sequence: Synthetic oligonucleotide
  Target: SCNA; (-) strand; PAM type: YTN; PAM sequence: TTC
ccttttacatctatcttact

SEQ ID NO: 43138 - DNA, 20 bp, Artificial Sequence
  Description of Artificial Sequence: Synthetic oligonucleotide
  Target: SCNA; (-) strand; PAM type: YTN; PAM sequence: CTG
ttcccttttacatctatctt

SEQ ID NO: 43139 - DNA, 20 bp, Artificial Sequence
  Description of Artificial Sequence: Synthetic oligonucleotide
  Target: SCNA; (-) strand; PAM type: YTN; PAM sequence: TTA
cctgttcccttttacatcta

SEQ ID NO: 43140 - DNA, 20 bp, Artificial Sequence
  Description of Artificial Sequence: Synthetic oligonucleotide
  Target: SCNA; (-) strand; PAM type: YTN; PAM sequence: CTT
acctgttcccttttacatct

SEQ ID NO: 43141 - DNA, 20 bp, Artificial Sequence
  Description of Artificial Sequence: Synthetic oligonucleotide
  Target: SCNA; (-) strand; PAM type: YTN; PAM sequence: TTC
acttacctgttcccttttac

SEQ ID NO: 43142 - DNA, 20 bp, Artificial Sequence
  Description of Artificial Sequence: Synthetic oligonucleotide
  Target: SCNA; (-) strand; PAM type: YTN; PAM sequence: TTT
cacttacctgttccctttta

SEQ ID NO: 43143 - DNA, 20 bp, Artificial Sequence
  Description of Artificial Sequence: Synthetic oligonucleotide
  Target: SCNA; (-) strand; PAM type: YTN; PAM sequence: CTT
tcacttacctgttccctttt

SEQ ID NO: 43144 - DNA, 20 bp, Artificial Sequence
  Description of Artificial Sequence: Synthetic oligonucleotide
  Target: SCNA; (-) strand; PAM type: YTN; PAM sequence: TTG
ccctttcacttacctgttcc

SEQ ID NO: 43145 - DNA, 20 bp, Artificial Sequence
  Description of Artificial Sequence: Synthetic oligonucleotide
  Target: SCNA; (-) strand; PAM type: YTN; PAM sequence: CTT
gccctttcacttacctgttc

SEQ ID NO: 43146 - DNA, 20 bp, Artificial Sequence
  Description of Artificial Sequence: Synthetic oligonucleotide
  Target: SCNA; (-) strand; PAM type: YTN; PAM sequence: TTA
tgccttgccctttcacttac

SEQ ID NO: 43147 - DNA, 20 bp, Artificial Sequence
  Description of Artificial Sequence: Synthetic oligonucleotide
  Target: SCNA; (-) strand; PAM type: YTN; PAM sequence: CTT
atgccttgccctttcactta

SEQ ID NO: 43148 - DNA, 20 bp, Artificial Sequence
  Description of Artificial Sequence: Synthetic oligonucleotide
  Target: SCNA; (-) strand; PAM type: YTN; PAM sequence: CTA
tacaagacttatgccttgcc

SEQ ID NO: 43149 - DNA, 20 bp, Artificial Sequence
  Description of Artificial Sequence: Synthetic oligonucleotide
  Target: SCNA; (-) strand; PAM type: YTN; PAM sequence: CTC
tatacaagacttatgccttg

SEQ ID NO: 43150 - DNA, 20 bp, Artificial Sequence
  Description of Artificial Sequence: Synthetic oligonucleotide
  Target: SCNA; (-) strand; PAM type: YTN; PAM sequence: CTG
tcactctatacaagacttat

SEQ ID NO: 43151 - DNA, 20 bp, Artificial Sequence
  Description of Artificial Sequence: Synthetic oligonucleotide
  Target: SCNA; (-) strand; PAM type: YTN; PAM sequence: CTG
taccagacctgtcactctat

SEQ ID NO: 43152 - DNA, 20 bp, Artificial Sequence
  Description of Artificial Sequence: Synthetic oligonucleotide
  Target: SCNA; (-) strand; PAM type: YTN; PAM sequence: TTG
gtagtaggactgtaccagac

SEQ ID NO: 43153 - DNA, 20 bp, Artificial Sequence
  Description of Artificial Sequence: Synthetic oligonucleotide
  Target: SCNA; (-) strand; PAM type: YTN; PAM sequence: TTT
ggtagtaggactgtaccaga

SEQ ID NO: 43154 - DNA, 20 bp, Artificial Sequence
  Description of Artificial Sequence: Synthetic oligonucleotide
  Target: SCNA; (-) strand; PAM type: YTN; PAM sequence: TTA
tagatttggtagtaggactg

SEQ ID NO: 43155 - DNA, 20 bp, Artificial Sequence
  Description of Artificial Sequence: Synthetic oligonucleotide
  Target: SCNA; (-) strand; PAM type: YTN; PAM sequence: CTA
tagttatagatttggtagta

SEQ ID NO: 43156 - DNA, 20 bp, Artificial Sequence
  Description of Artificial Sequence: Synthetic oligonucleotide
  Target: SCNA; (-) strand; PAM type: YTN; PAM sequence: TTC
aaaatactatagttatagat

SEQ ID NO: 43157 - DNA, 20 bp, Artificial Sequence
  Description of Artificial Sequence: Synthetic oligonucleotide
  Target: SCNA; (-) strand; PAM type: YTN; PAM sequence: TTG
aaatagtgcaaaatattcaa

SEQ ID NO: 43158 - DNA, 20 bp, Artificial Sequence
  Description of Artificial Sequence: Synthetic oligonucleotide
  Target: SCNA; (-) strand; PAM type: YTN; PAM sequence: CTA
cattgaaatagtgcaaaata

SEQ ID NO: 43159 - DNA, 20 bp, Artificial Sequence
  Description of Artificial Sequence: Synthetic oligonucleotide
  Target: SCNA; (-) strand; PAM type: YTN; PAM sequence: CTG
ctacattgaaatagtgcaaa

SEQ ID NO: 43160 - DNA, 20 bp, Artificial Sequence
  Description of Artificial Sequence: Synthetic oligonucleotide
  Target: SCNA; (-) strand; PAM type: YTN; PAM sequence: CTA
aaatactgctacattgaaat

SEQ ID NO: 43161 - DNA, 20 bp, Artificial Sequence
  Description of Artificial Sequence: Synthetic oligonucleotide
  Target: SCNA; (-) strand; PAM type: YTN; PAM sequence: TTG
taaagtcaggccaaccaaac

SEQ ID NO: 43162 - DNA, 20 bp, Artificial Sequence
  Description of Artificial Sequence: Synthetic oligonucleotide
  Target: SCNA; (-) strand; PAM type: YTN; PAM sequence: TTG
ttgtaaagtcaggccaacca

SEQ ID NO: 43163 - DNA, 20 bp, Artificial Sequence
  Description of Artificial Sequence: Synthetic oligonucleotide
  Target: SCNA; (-) strand; PAM type: YTN; PAM sequence: CTT
gttgtaaagtcaggccaacc

SEQ ID NO: 43164 - DNA, 20 bp, Artificial Sequence
  Description of Artificial Sequence: Synthetic oligonucleotide
  Target: SCNA; (-) strand; PAM type: YTN; PAM sequence: TTA
tcttgttgtaaagtcaggcc

SEQ ID NO: 43165 - DNA, 20 bp, Artificial Sequence
  Description of Artificial Sequence: Synthetic oligonucleotide
  Target: SCNA; (-) strand; PAM type: YTN; PAM sequence: TTT
atcttgttgtaaagtcaggc

SEQ ID NO: 43166 - DNA, 20 bp, Artificial Sequence
  Description of Artificial Sequence: Synthetic oligonucleotide
  Target: SCNA; (-) strand; PAM type: YTN; PAM sequence: TTT
tatcttgttgtaaagtcagg

SEQ ID NO: 43167 - DNA, 20 bp, Artificial Sequence
  Description of Artificial Sequence: Synthetic oligonucleotide
  Target: SCNA; (-) strand; PAM type: YTN; PAM sequence: TTT
ttatcttgttgtaaagtcag

SEQ ID NO: 43168 - DNA, 20 bp, Artificial Sequence
  Description of Artificial Sequence: Synthetic oligonucleotide
  Target: SCNA; (-) strand; PAM type: YTN; PAM sequence: TTT
tttatcttgttgtaaagtca

SEQ ID NO: 43169 - DNA, 20 bp, Artificial Sequence
  Description of Artificial Sequence: Synthetic oligonucleotide
  Target: SCNA; (-) strand; PAM type: YTN; PAM sequence: TTG
gaattttttatcttgttgta

SEQ ID NO: 43170 - DNA, 20 bp, Artificial Sequence
  Description of Artificial Sequence: Synthetic oligonucleotide
  Target: SCNA; (-) strand; PAM type: YTN; PAM sequence: CTT
ggaattttttatcttgttgt

SEQ ID NO: 43171 - DNA, 20 bp, Artificial Sequence
  Description of Artificial Sequence: Synthetic oligonucleotide
  Target: SCNA; (-) strand; PAM type: YTN; PAM sequence: TTA
aaacttggaattttttatct

SEQ ID NO: 43172 - DNA, 20 bp, Artificial Sequence
  Description of Artificial Sequence: Synthetic oligonucleotide
  Target: SCNA; (-) strand; PAM type: YTN; PAM sequence: TTG
ttaaaacttggaatttttta

SEQ ID NO: 43173 - DNA, 20 bp, Artificial Sequence
  Description of Artificial Sequence: Synthetic oligonucleotide
  Target: SCNA; (-) strand; PAM type: YTN; PAM sequence: CTA
cattgttaaaacttggaatt

SEQ ID NO: 43174 - DNA, 20 bp, Artificial Sequence
  Description of Artificial Sequence: Synthetic oligonucleotide
  Target: SCNA; (-) strand; PAM type: YTN; PAM sequence: CTA
aaacacagtaggtcactaca

SEQ ID NO: 43175 - DNA, 20 bp, Artificial Sequence
  Description of Artificial Sequence: Synthetic oligonucleotide
  Target: SCNA; (-) strand; PAM type: YTN; PAM sequence: TTC
aacatctaaaacacagtagg

SEQ ID NO: 43176 - DNA, 20 bp, Artificial Sequence
  Description of Artificial Sequence: Synthetic oligonucleotide
  Target: SCNA; (-) strand; PAM type: YTN; PAM sequence: TTT
caacatctaaaacacagtag

SEQ ID NO: 43177 - DNA, 20 bp, Artificial Sequence
  Description of Artificial Sequence: Synthetic oligonucleotide
  Target: SCNA; (-) strand; PAM type: YTN; PAM sequence: TTA
tagatttcaacatctaaaac

SEQ ID NO: 43178 - DNA, 20 bp, Artificial Sequence
  Description of Artificial Sequence: Synthetic oligonucleotide
  Target: SCNA; (-) strand; PAM type: YTN; PAM sequence: TTG
atagaaaattatagatttca

SEQ ID NO: 43179 - DNA, 20 bp, Artificial Sequence
  Description of Artificial Sequence: Synthetic oligonucleotide
  Target: SCNA; (-) strand; PAM type: YTN; PAM sequence: TTA
gtagaaaatgttgatagaaa

SEQ ID NO: 43180 - DNA, 20 bp, Artificial Sequence
  Description of Artificial Sequence: Synthetic oligonucleotide
  Target: SCNA; (-) strand; PAM type: YTN; PAM sequence: TTA
caggttagtagaaaatgttg

SEQ ID NO: 43181 - DNA, 20 bp, Artificial Sequence
  Description of Artificial Sequence: Synthetic oligonucleotide
  Target: SCNA; (-) strand; PAM type: YTN; PAM sequence: TTT
acaggttagtagaaaatgtt

SEQ ID NO: 43182 - DNA, 20 bp, Artificial Sequence
  Description of Artificial Sequence: Synthetic oligonucleotide
  Target: SCNA; (-) strand; PAM type: YTN; PAM sequence: TTT
tacaggttagtagaaaatgt

SEQ ID NO: 43183 - DNA, 20 bp, Artificial Sequence
  Description of Artificial Sequence: Synthetic oligonucleotide
  Target: SCNA; (-) strand; PAM type: YTN; PAM sequence: CTT
ttacaggttagtagaaaatg

SEQ ID NO: 43184 - DNA, 20 bp, Artificial Sequence
  Description of Artificial Sequence: Synthetic oligonucleotide
  Target: SCNA; (-) strand; PAM type: YTN; PAM sequence: CTA
aggcatgtcttttacaggtt

SEQ ID NO: 43185 - DNA, 20 bp, Artificial Sequence
  Description of Artificial Sequence: Synthetic oligonucleotide
  Target: SCNA; (-) strand; PAM type: YTN; PAM sequence: TTC
taaggcatgtcttttacagg

SEQ ID NO: 43186 - DNA, 20 bp, Artificial Sequence
  Description of Artificial Sequence: Synthetic oligonucleotide
  Target: SCNA; (-) strand; PAM type: YTN; PAM sequence: TTC
ccacattctaaggcatgtct

SEQ ID NO: 43187 - DNA, 20 bp, Artificial Sequence
  Description of Artificial Sequence: Synthetic oligonucleotide
  Target: SCNA; (-) strand; PAM type: YTN; PAM sequence: TTG
tgtgtgttcccacattctaa

SEQ ID NO: 43188 - DNA, 20 bp, Artificial Sequence
  Description of Artificial Sequence: Synthetic oligonucleotide
  Target: SCNA; (-) strand; PAM type: YTN; PAM sequence: TTT
gtgtgtgttcccacattcta

SEQ ID NO: 43189 - DNA, 20 bp, Artificial Sequence
  Description of Artificial Sequence: Synthetic oligonucleotide
  Target: SCNA; (-) strand; PAM type: YTN; PAM sequence: CTG
tgagtatgtatgtgtttgtg

SEQ ID NO: 43190 - DNA, 20 bp, Artificial Sequence
  Description of Artificial Sequence: Synthetic oligonucleotide
  Target: SCNA; (-) strand; PAM type: YTN; PAM sequence: TTC
gtgtgtatgtgtctgtgagt

SEQ ID NO: 43191 - DNA, 20 bp, Artificial Sequence
  Description of Artificial Sequence: Synthetic oligonucleotide
  Target: SCNA; (-) strand; PAM type: YTN; PAM sequence: CTT
cgtgtgtatgtgtctgtgag

SEQ ID NO: 43192 - DNA, 20 bp, Artificial Sequence
  Description of Artificial Sequence: Synthetic oligonucleotide
  Target: SCNA; (-) strand; PAM type: YTN; PAM sequence: CTG
tacttcgtgtgtatgtgtct

SEQ ID NO: 43193 - DNA, 20 bp, Artificial Sequence
  Description of Artificial Sequence: Synthetic oligonucleotide
  Target: SCNA; (-) strand; PAM type: YTN; PAM sequence: CTA
ctgtacttcgtgtgtatgtg

SEQ ID NO: 43194 - DNA, 20 bp, Artificial Sequence
  Description of Artificial Sequence: Synthetic oligonucleotide
  Target: SCNA; (-) strand; PAM type: YTN; PAM sequence: CTC
aggaagtggcaccagagatc

SEQ ID NO: 43195 - DNA, 20 bp, Artificial Sequence
  Description of Artificial Sequence: Synthetic oligonucleotide
  Target: SCNA; (-) strand; PAM type: YTN; PAM sequence: TTC
aaaatgatctcaggaagtgg

SEQ ID NO: 43196 - DNA, 20 bp, Artificial Sequence
  Description of Artificial Sequence: Synthetic oligonucleotide
  Target: SCNA; (-) strand; PAM type: YTN; PAM sequence: TTA
gaacattcaaaatgatctca

SEQ ID NO: 43197 - DNA, 20 bp, Artificial Sequence
  Description of Artificial Sequence: Synthetic oligonucleotide
  Target: SCNA; (-) strand; PAM type: YTN; PAM sequence: TTA
attagaacattcaaaatgat

SEQ ID NO: 43198 - DNA, 20 bp, Artificial Sequence
  Description of Artificial Sequence: Synthetic oligonucleotide
  Target: SCNA; (-) strand; PAM type: YTN; PAM sequence: TTT
aattagaacattcaaaatga

SEQ ID NO: 43199 - DNA, 20 bp, Artificial Sequence
  Description of Artificial Sequence: Synthetic oligonucleotide
  Target: SCNA; (-) strand; PAM type: YTN; PAM sequence: TTT
taattagaacattcaaaatg

SEQ ID NO: 43200 - DNA, 20 bp, Artificial Sequence
  Description of Artificial Sequence: Synthetic oligonucleotide
  Target: SCNA; (-) strand; PAM type: YTN; PAM sequence: TTT
ttaattagaacattcaaaat

SEQ ID NO: 43201 - DNA, 20 bp, Artificial Sequence
  Description of Artificial Sequence: Synthetic oligonucleotide
  Target: SCNA; (-) strand; PAM type: YTN; PAM sequence: CTT
tttaattagaacattcaaaa

SEQ ID NO: 43202 - DNA, 20 bp, Artificial Sequence
  Description of Artificial Sequence: Synthetic oligonucleotide
  Target: SCNA; (-) strand; PAM type: YTN; PAM sequence: TTG
cactttttaattagaacatt

SEQ ID NO: 43203 - DNA, 20 bp, Artificial Sequence
  Description of Artificial Sequence: Synthetic oligonucleotide
  Target: SCNA; (-) strand; PAM type: YTN; PAM sequence: TTT
gcactttttaattagaacat

SEQ ID NO: 43204 - DNA, 20 bp, Artificial Sequence
  Description of Artificial Sequence: Synthetic oligonucleotide
  Target: SCNA; (-) strand; PAM type: YTN; PAM sequence: CTT
tgcactttttaattagaaca

SEQ ID NO: 43205 - DNA, 20 bp, Artificial Sequence
  Description of Artificial Sequence: Synthetic oligonucleotide
  Target: SCNA; (-) strand; PAM type: YTN; PAM sequence: TTA
tactttgcactttttaatta

SEQ ID NO: 43206 - DNA, 20 bp, Artificial Sequence
  Description of Artificial Sequence: Synthetic oligonucleotide
  Target: SCNA; (-) strand; PAM type: YTN; PAM sequence: TTA
tgacaaaaaattatactttg

SEQ ID NO: 43207 - DNA, 20 bp, Artificial Sequence
  Description of Artificial Sequence: Synthetic oligonucleotide
  Target: SCNA; (-) strand; PAM type: YTN; PAM sequence: TTT
atgacaaaaaattatacttt

SEQ ID NO: 43208 - DNA, 20 bp, Artificial Sequence
  Description of Artificial Sequence: Synthetic oligonucleotide
  Target: SCNA; (-) strand; PAM type: YTN; PAM sequence: TTA
gcatatataatagcatagca

SEQ ID NO: 43209 - DNA, 20 bp, Artificial Sequence
  Description of Artificial Sequence: Synthetic oligonucleotide
  Target: SCNA; (-) strand; PAM type: YTN; PAM sequence: CTT
agcatatataatagcatagc

SEQ ID NO: 43210 - DNA, 20 bp, Artificial Sequence
  Description of Artificial Sequence: Synthetic oligonucleotide
  Target: SCNA; (-) strand; PAM type: YTN; PAM sequence: TTG
gcttagcatatataatagca

SEQ ID NO: 43211 - DNA, 20 bp, Artificial Sequence
  Description of Artificial Sequence: Synthetic oligonucleotide
  Target: SCNA; (-) strand; PAM type: YTN; PAM sequence: TTT
ggcttagcatatataatagc

SEQ ID NO: 43212 - DNA, 20 bp, Artificial Sequence
  Description of Artificial Sequence: Synthetic oligonucleotide
  Target: SCNA; (-) strand; PAM type: YTN; PAM sequence: CTA
ggtttggcttagcatatata

SEQ ID NO: 43213 - DNA, 20 bp, Artificial Sequence
  Description of Artificial Sequence: Synthetic oligonucleotide
  Target: SCNA; (-) strand; PAM type: YTN; PAM sequence: TTG
ctaggtttggcttagcatat

SEQ ID NO: 43214 - DNA, 20 bp, Artificial Sequence
  Description of Artificial Sequence: Synthetic oligonucleotide
  Target: SCNA; (-) strand; PAM type: YTN; PAM sequence: TTG
ttgctaggtttggcttagca

SEQ ID NO: 43215 - DNA, 20 bp, Artificial Sequence
  Description of Artificial Sequence: Synthetic oligonucleotide
  Target: SCNA; (-) strand; PAM type: YTN; PAM sequence: CTT
gttgctaggtttggcttagc

SEQ ID NO: 43216 - DNA, 20 bp, Artificial Sequence
  Description of Artificial Sequence: Synthetic oligonucleotide
  Target: SCNA; (-) strand; PAM type: YTN; PAM sequence: CTC
agccttgttgctaggtttgg

SEQ ID NO: 43217 - DNA, 20 bp, Artificial Sequence
  Description of Artificial Sequence: Synthetic oligonucleotide
  Target: SCNA; (-) strand; PAM type: YTN; PAM sequence: TTC
actcagccttgttgctaggt

SEQ ID NO: 43218 - DNA, 20 bp, Artificial Sequence
  Description of Artificial Sequence: Synthetic oligonucleotide
  Target: SCNA; (-) strand; PAM type: YTN; PAM sequence: CTT
cactcagccttgttgctagg

SEQ ID NO: 43219 - DNA, 20 bp, Artificial Sequence
  Description of Artificial Sequence: Synthetic oligonucleotide
  Target: SCNA; (-) strand; PAM type: YTN; PAM sequence: CTA
gcatatgacccaggagccac

SEQ ID NO: 43220 - DNA, 20 bp, Artificial Sequence
  Description of Artificial Sequence: Synthetic oligonucleotide
  Target: SCNA; (-) strand; PAM type: YTN; PAM sequence: TTG
ccgaaagaaagcctagcata

SEQ ID NO: 43221 - DNA, 20 bp, Artificial Sequence
  Description of Artificial Sequence: Synthetic oligonucleotide
  Target: SCNA; (-) strand; PAM type: YTN; PAM sequence: TTT
gccgaaagaaagcctagcat

SEQ ID NO: 43222 - DNA, 20 bp, Artificial Sequence
  Description of Artificial Sequence: Synthetic oligonucleotide
  Target: SCNA; (-) strand; PAM type: YTN; PAM sequence: CTG
agggagagcaagtccatttg

SEQ ID NO: 43223 - DNA, 20 bp, Artificial Sequence
  Description of Artificial Sequence: Synthetic oligonucleotide
  Target: SCNA; (-) strand; PAM type: YTN; PAM sequence: CTG
agtaggtatgtaacataact

SEQ ID NO: 43224 - DNA, 20 bp, Artificial Sequence
  Description of Artificial Sequence: Synthetic oligonucleotide
  Target: SCNA; (-) strand; PAM type: YTN; PAM sequence: CTG
atctgagtaggtatgtaaca

SEQ ID NO: 43225 - DNA, 20 bp, Artificial Sequence
  Description of Artificial Sequence: Synthetic oligonucleotide
  Target: SCNA; (-) strand; PAM type: YTN; PAM sequence: CTG
agacctgatctgagtaggta

SEQ ID NO: 43226 - DNA, 20 bp, Artificial Sequence
  Description of Artificial Sequence: Synthetic oligonucleotide
  Target: SCNA; (-) strand; PAM type: YTN; PAM sequence: TTG
ctgagacctgatctgagtag

SEQ ID NO: 43227 - DNA, 20 bp, Artificial Sequence
  Description of Artificial Sequence: Synthetic oligonucleotide
  Target: SCNA; (-) strand; PAM type: YTN; PAM sequence: TTT
gctgagacctgatctgagta

SEQ ID NO: 43228 - DNA, 20 bp, Artificial Sequence
  Description of Artificial Sequence: Synthetic oligonucleotide
  Target: SCNA; (-) strand; PAM type: YTN; PAM sequence: TTG
tacatttgctgagacctgat

SEQ ID NO: 43229 - DNA, 20 bp, Artificial Sequence
  Description of Artificial Sequence: Synthetic oligonucleotide
  Target: SCNA; (-) strand; PAM type: YTN; PAM sequence: TTT
gtacatttgctgagacctga

SEQ ID NO: 43230 - DNA, 20 bp, Artificial Sequence
  Description of Artificial Sequence: Synthetic oligonucleotide
  Target: SCNA; (-) strand; PAM type: YTN; PAM sequence: CTG
atgacatagtaatttgtaca

SEQ ID NO: 43231 - DNA, 20 bp, Artificial Sequence
  Description of Artificial Sequence: Synthetic oligonucleotide
  Target: SCNA; (-) strand; PAM type: YTN; PAM sequence: TTC
ccaagtgatccagatggctg

SEQ ID NO: 43232 - DNA, 20 bp, Artificial Sequence
  Description of Artificial Sequence: Synthetic oligonucleotide
  Target: SCNA; (-) strand; PAM type: YTN; PAM sequence: CTA
ttcccaagtgatccagatgg

SEQ ID NO: 43233 - DNA, 20 bp, Artificial Sequence
  Description of Artificial Sequence: Synthetic oligonucleotide
  Target: SCNA; (-) strand; PAM type: YTN; PAM sequence: TTC
accaatgtgactattcccaa

SEQ ID NO: 43234 - DNA, 20 bp, Artificial Sequence
  Description of Artificial Sequence: Synthetic oligonucleotide
  Target: SCNA; (-) strand; PAM type: YTN; PAM sequence: TTA
cagcgttcaccaatgtgact

SEQ ID NO: 43235 - DNA, 20 bp, Artificial Sequence
  Description of Artificial Sequence: Synthetic oligonucleotide
  Target: SCNA; (-) strand; PAM type: YTN; PAM sequence: CTT
acagcgttcaccaatgtgac

SEQ ID NO: 43236 - DNA, 20 bp, Artificial Sequence
  Description of Artificial Sequence: Synthetic oligonucleotide
  Target: SCNA; (-) strand; PAM type: YTN; PAM sequence: TTA
agatatgacttacagcgttc

SEQ ID NO: 43237 - DNA, 20 bp, Artificial Sequence
  Description of Artificial Sequence: Synthetic oligonucleotide
  Target: SCNA; (-) strand; PAM type: YTN; PAM sequence: TTT
aagatatgacttacagcgtt

SEQ ID NO: 43238 - DNA, 20 bp, Artificial Sequence
  Description of Artificial Sequence: Synthetic oligonucleotide
  Target: SCNA; (-) strand; PAM type: YTN; PAM sequence: TTA
tgtataatgtatttaagata

SEQ ID NO: 43239 - DNA, 20 bp, Artificial Sequence
  Description of Artificial Sequence: Synthetic oligonucleotide
  Target: SCNA; (-) strand; PAM type: YTN; PAM sequence: CTG
taggtatggattatgtataa

SEQ ID NO: 43240 - DNA, 20 bp, Artificial Sequence
  Description of Artificial Sequence: Synthetic oligonucleotide
  Target: SCNA; (-) strand; PAM type: YTN; PAM sequence: CTC
aatctgtaggtatggattat

SEQ ID NO: 43241 - DNA, 20 bp, Artificial Sequence
  Description of Artificial Sequence: Synthetic oligonucleotide
  Target: SCNA; (-) strand; PAM type: YTN; PAM sequence: TTC
tcaatctgtaggtatggatt

SEQ ID NO: 43242 - DNA, 20 bp, Artificial Sequence
  Description of Artificial Sequence: Synthetic oligonucleotide
  Target: SCNA; (-) strand; PAM type: YTN; PAM sequence: TTG
cattctcaatctgtaggtat

SEQ ID NO: 43243 - DNA, 20 bp, Artificial Sequence
  Description of Artificial Sequence: Synthetic oligonucleotide
  Target: SCNA; (-) strand; PAM type: YTN; PAM sequence: TTT
gcattctcaatctgtaggta

SEQ ID NO: 43244 - DNA, 20 bp, Artificial Sequence
  Description of Artificial Sequence: Synthetic oligonucleotide
  Target: SCNA; (-) strand; PAM type: YTN; PAM sequence: TTA
aaatagatttgcattctcaa

SEQ ID NO: 43245 - DNA, 20 bp, Artificial Sequence
  Description of Artificial Sequence: Synthetic oligonucleotide
  Target: SCNA; (-) strand; PAM type: YTN; PAM sequence: TTA
attaaaatagatttgcattc

SEQ ID NO: 43246 - DNA, 20 bp, Artificial Sequence
  Description of Artificial Sequence: Synthetic oligonucleotide
  Target: SCNA; (-) strand; PAM type: YTN; PAM sequence: TTT
aattaaaatagatttgcatt

SEQ ID NO: 43247 - DNA, 20 bp, Artificial Sequence
  Description of Artificial Sequence: Synthetic oligonucleotide
  Target: SCNA; (-) strand; PAM type: YTN; PAM sequence: CTA
aaggtatcatttaattaaaa

SEQ ID NO: 43248 - DNA, 20 bp, Artificial Sequence
  Description of Artificial Sequence: Synthetic oligonucleotide
  Target: SCNA; (-) strand; PAM type: YTN; PAM sequence: CTC
taaaggtatcatttaattaa

SEQ ID NO: 43249 - DNA, 20 bp, Artificial Sequence
  Description of Artificial Sequence: Synthetic oligonucleotide
  Target: SCNA; (-) strand; PAM type: YTN; PAM sequence: TTC
tctaaaggtatcatttaatt

SEQ ID NO: 43250 - DNA, 20 bp, Artificial Sequence
  Description of Artificial Sequence: Synthetic oligonucleotide
  Target: SCNA; (-) strand; PAM type: YTN; PAM sequence: CTG
ggttctctaaaggtatcatt

SEQ ID NO: 43251 - DNA, 20 bp, Artificial Sequence
  Description of Artificial Sequence: Synthetic oligonucleotide
  Target: SCNA; (-) strand; PAM type: YTN; PAM sequence: TTA
tgtgtaagactgggttctct

SEQ ID NO: 43252 - DNA, 20 bp, Artificial Sequence
  Description of Artificial Sequence: Synthetic oligonucleotide
  Target: SCNA; (-) strand; PAM type: YTN; PAM sequence: TTT
atgtgtaagactgggttctc

SEQ ID NO: 43253 - DNA, 20 bp, Artificial Sequence
  Description of Artificial Sequence: Synthetic oligonucleotide
  Target: SCNA; (-) strand; PAM type: YTN; PAM sequence: TTA
tttatgtgtaagactgggtt

SEQ ID NO: 43254 - DNA, 20 bp, Artificial Sequence
  Description of Artificial Sequence: Synthetic oligonucleotide
  Target: SCNA; (-) strand; PAM type: YTN; PAM sequence: CTA
aatatatgttatttatgtgt

SEQ ID NO: 43255 - DNA, 20 bp, Artificial Sequence
  Description of Artificial Sequence: Synthetic oligonucleotide
  Target: SCNA; (-) strand; PAM type: YTN; PAM sequence: TTC
taaatatatgttatttatgt

SEQ ID NO: 43256 - DNA, 20 bp, Artificial Sequence
  Description of Artificial Sequence: Synthetic oligonucleotide
  Target: SCNA; (-) strand; PAM type: YTN; PAM sequence: CTT
ctaaatatatgttatttatg

SEQ ID NO: 43257 - DNA, 20 bp, Artificial Sequence
  Description of Artificial Sequence: Synthetic oligonucleotide
  Target: SCNA; (-) strand; PAM type: YTN; PAM sequence: CTA
aacaaaagataaacaaagta

SEQ ID NO: 43258 - DNA, 20 bp, Artificial Sequence
  Description of Artificial Sequence: Synthetic oligonucleotide
  Target: SCNA; (-) strand; PAM type: YTN; PAM sequence: CTC
taaacaaaagataaacaaag

SEQ ID NO: 43259 - DNA, 20 bp, Artificial Sequence
  Description of Artificial Sequence: Synthetic oligonucleotide
  Target: SCNA; (-) strand; PAM type: YTN; PAM sequence: CTG
cctctaaacaaaagataaac

SEQ ID NO: 43260 - DNA, 20 bp, Artificial Sequence
  Description of Artificial Sequence: Synthetic oligonucleotide
  Target: SCNA; (-) strand; PAM type: YTN; PAM sequence: CTG
ggcaatagggcaagaccctg

SEQ ID NO: 43261 - DNA, 20 bp, Artificial Sequence
  Description of Artificial Sequence: Synthetic oligonucleotide
  Target: SCNA; (-) strand; PAM type: YTN; PAM sequence: TTA
cagcctgggcaatagggcaa

SEQ ID NO: 43262 - DNA, 20 bp, Artificial Sequence
  Description of Artificial Sequence: Synthetic oligonucleotide
  Target: SCNA; (-) strand; PAM type: YTN; PAM sequence: CTG
cattacagcctgggcaatag

SEQ ID NO: 43263 - DNA, 20 bp, Artificial Sequence
  Description of Artificial Sequence: Synthetic oligonucleotide
  Target: SCNA; (-) strand; PAM type: YTN; PAM sequence: TTG
tatcactgcattacagcctg

SEQ ID NO: 43264 - DNA, 20 bp, Artificial Sequence
  Description of Artificial Sequence: Synthetic oligonucleotide
  Target: SCNA; (-) strand; PAM type: YTN; PAM sequence: CTA
tgattgtatcactgcattac

SEQ ID NO: 43265 - DNA, 20 bp, Artificial Sequence
  Description of Artificial Sequence: Synthetic oligonucleotide
  Target: SCNA; (-) strand; PAM type: YTN; PAM sequence: CTA
cagtgagctatgattgtatc

SEQ ID NO: 43266 - DNA, 20 bp, Artificial Sequence
  Description of Artificial Sequence: Synthetic oligonucleotide
  Target: SCNA; (-) strand; PAM type: YTN; PAM sequence: TTG
gagactacagtgagctatga

SEQ ID NO: 43267 - DNA, 20 bp, Artificial Sequence
  Description of Artificial Sequence: Synthetic oligonucleotide
  Target: SCNA; (-) strand; PAM type: YTN; PAM sequence: TTG
ggcccaggagttggagacta

SEQ ID NO: 43268 - DNA, 20 bp, Artificial Sequence
  Description of Artificial Sequence: Synthetic oligonucleotide
  Target: SCNA; (-) strand; PAM type: YTN; PAM sequence: CTT
gggcccaggagttggagact

SEQ ID NO: 43269 - DNA, 20 bp, Artificial Sequence
  Description of Artificial Sequence: Synthetic oligonucleotide
  Target: SCNA; (-) strand; PAM type: YTN; PAM sequence: CTG
gaggatcacttgggcccagg

SEQ ID NO: 43270 - DNA, 20 bp, Artificial Sequence
  Description of Artificial Sequence: Synthetic oligonucleotide
  Target: SCNA; (-) strand; PAM type: YTN; PAM sequence: CTG
aggctggaggatcacttggg

SEQ ID NO: 43271 - DNA, 20 bp, Artificial Sequence
  Description of Artificial Sequence: Synthetic oligonucleotide
  Target: SCNA; (-) strand; PAM type: YTN; PAM sequence: TTG
ggaggctgaggctggaggat

SEQ ID NO: 43272 - DNA, 20 bp, Artificial Sequence
  Description of Artificial Sequence: Synthetic oligonucleotide
  Target: SCNA; (-) strand; PAM type: YTN; PAM sequence: TTT
gggaggctgaggctggagga

SEQ ID NO: 43273 - DNA, 20 bp, Artificial Sequence
  Description of Artificial Sequence: Synthetic oligonucleotide
  Target: SCNA; (-) strand; PAM type: YTN; PAM sequence: CTA
tttgggaggctgaggctgga

SEQ ID NO: 43274 - DNA, 20 bp, Artificial Sequence
  Description of Artificial Sequence: Synthetic oligonucleotide
  Target: SCNA; (-) strand; PAM type: YTN; PAM sequence: CTA
tagtcccagctatttgggag

SEQ ID NO: 43275 - DNA, 20 bp, Artificial Sequence
  Description of Artificial Sequence: Synthetic oligonucleotide
  Target: SCNA; (-) strand; PAM type: YTN; PAM sequence: TTA
aatagccgagcatggtggtg

SEQ ID NO: 43276 - DNA, 20 bp, Artificial Sequence
  Description of Artificial Sequence: Synthetic oligonucleotide
  Target: SCNA; (-) strand; PAM type: YTN; PAM sequence: TTT
aaatagccgagcatggtggt

SEQ ID NO: 43277 - DNA, 20 bp, Artificial Sequence
  Description of Artificial Sequence: Synthetic oligonucleotide
  Target: SCNA; (-) strand; PAM type: YTN; PAM sequence: CTA
taaaaaaaaaaaatttaaat

SEQ ID NO: 43278 - DNA, 20 bp, Artificial Sequence
  Description of Artificial Sequence: Synthetic oligonucleotide
  Target: SCNA; (-) strand; PAM type: YTN; PAM sequence: CTC
tataaaaaaaaaaaatttaa

SEQ ID NO: 43279 - DNA, 20 bp, Artificial Sequence
  Description of Artificial Sequence: Synthetic oligonucleotide
  Target: SCNA; (-) strand; PAM type: YTN; PAM sequence: TTC
atctctataaaaaaaaaaaa

SEQ ID NO: 43280 - DNA, 20 bp, Artificial Sequence
  Description of Artificial Sequence: Synthetic oligonucleotide
  Target: SCNA; (-) strand; PAM type: YTN; PAM sequence: CTT
catctctataaaaaaaaaaa

SEQ ID NO: 43281 - DNA, 20 bp, Artificial Sequence
  Description of Artificial Sequence: Synthetic oligonucleotide
  Target: SCNA; (-) strand; PAM type: YTN; PAM sequence: CTG
ggcaacataatgaaacttca

SEQ ID NO: 43282 - DNA, 20 bp, Artificial Sequence
  Description of Artificial Sequence: Synthetic oligonucleotide
  Target: SCNA; (-) strand; PAM type: YTN; PAM sequence: TTG
agaccagcctgggcaacata

SEQ ID NO: 43283 - DNA, 20 bp, Artificial Sequence
  Description of Artificial Sequence: Synthetic oligonucleotide
  Target: SCNA; (-) strand; PAM type: YTN; PAM sequence: TTT
gagaccagcctgggcaacat

SEQ ID NO: 43284 - DNA, 20 bp, Artificial Sequence
  Description of Artificial Sequence: Synthetic oligonucleotide
  Target: SCNA; (-) strand; PAM type: YTN; PAM sequence: TTG
agtccaggagtttgagacca

SEQ ID NO: 43285 - DNA, 20 bp, Artificial Sequence
  Description of Artificial Sequence: Synthetic oligonucleotide
  Target: SCNA; (-) strand; PAM type: YTN; PAM sequence: CTT
gagtccaggagtttgagacc

SEQ ID NO: 43286 - DNA, 20 bp, Artificial Sequence
  Description of Artificial Sequence: Synthetic oligonucleotide
  Target: SCNA; (-) strand; PAM type: YTN; PAM sequence: CTG
acgcaggaggatcacttgag

SEQ ID NO: 43287 - DNA, 20 bp, Artificial Sequence
  Description of Artificial Sequence: Synthetic oligonucleotide
  Target: SCNA; (-) strand; PAM type: YTN; PAM sequence: TTC
ggaggctgacgcaggaggat

SEQ ID NO: 43288 - DNA, 20 bp, Artificial Sequence
  Description of Artificial Sequence: Synthetic oligonucleotide
  Target: SCNA; (-) strand; PAM type: YTN; PAM sequence: TTT
cggaggctgacgcaggagga

SEQ ID NO: 43289 - DNA, 20 bp, Artificial Sequence
  Description of Artificial Sequence: Synthetic oligonucleotide
  Target: SCNA; (-) strand; PAM type: YTN; PAM sequence: CTT
tcggaggctgacgcaggagg

SEQ ID NO: 43290 - DNA, 20 bp, Artificial Sequence
  Description of Artificial Sequence: Synthetic oligonucleotide
  Target: SCNA; (-) strand; PAM type: YTN; PAM sequence: CTG
taatcccagcactttcggag

SEQ ID NO: 43291 - DNA, 20 bp, Artificial Sequence
  Description of Artificial Sequence: Synthetic oligonucleotide
  Target: SCNA; (-) strand; PAM type: YTN; PAM sequence: CTC
atgcctgtaatcccagcact

SEQ ID NO: 43292 - DNA, 20 bp, Artificial Sequence
  Description of Artificial Sequence: Synthetic oligonucleotide
  Target: SCNA; (-) strand; PAM type: YTN; PAM sequence: CTC
aggtgcagtggctcatgcct

SEQ ID NO: 43293 - DNA, 20 bp, Artificial Sequence
  Description of Artificial Sequence: Synthetic oligonucleotide
  Target: SCNA; (-) strand; PAM type: YTN; PAM sequence: TTA
tccaaagtagagcacggctc

SEQ ID NO: 43294 - DNA, 20 bp, Artificial Sequence
  Description of Artificial Sequence: Synthetic oligonucleotide
  Target: SCNA; (-) strand; PAM type: YTN; PAM sequence: CTA
gaagggcaaaagacaagaaa

SEQ ID NO: 43295 - DNA, 20 bp, Artificial Sequence
  Description of Artificial Sequence: Synthetic oligonucleotide
  Target: SCNA; (-) strand; PAM type: YTN; PAM sequence: CTA
aagaaacagctagaagggca

SEQ ID NO: 43296 - DNA, 20 bp, Artificial Sequence
  Description of Artificial Sequence: Synthetic oligonucleotide
  Target: SCNA; (-) strand; PAM type: YTN; PAM sequence: TTG
ccaagactaaagaaacagct

SEQ ID NO: 43297 - DNA, 20 bp, Artificial Sequence
  Description of Artificial Sequence: Synthetic oligonucleotide
  Target: SCNA; (-) strand; PAM type: YTN; PAM sequence: CTA
aggtgattgccaagactaaa

SEQ ID NO: 43298 - DNA, 20 bp, Artificial Sequence
  Description of Artificial Sequence: Synthetic oligonucleotide
  Target: SCNA; (-) strand; PAM type: YTN; PAM sequence: CTC
taaggtgattgccaagacta

SEQ ID NO: 43299 - DNA, 20 bp, Artificial Sequence
  Description of Artificial Sequence: Synthetic oligonucleotide
  Target: SCNA; (-) strand; PAM type: YTN; PAM sequence: CTC
tctaaggtgattgccaagac

SEQ ID NO: 43300 - DNA, 20 bp, Artificial Sequence
  Description of Artificial Sequence: Synthetic oligonucleotide
  Target: SCNA; (-) strand; PAM type: YTN; PAM sequence: CTC
tctctaaggtgattgccaag

SEQ ID NO: 43301 - DNA, 20 bp, Artificial Sequence
  Description of Artificial Sequence: Synthetic oligonucleotide
  Target: SCNA; (-) strand; PAM type: YTN; PAM sequence: CTC
tctctctaaggtgattgcca

SEQ ID NO: 43302 - DNA, 20 bp, Artificial Sequence
  Description of Artificial Sequence: Synthetic oligonucleotide
  Target: SCNA; (-) strand; PAM type: YTN; PAM sequence: TTC
tctctctctaaggtgattgc

SEQ ID NO: 43303 - DNA, 20 bp, Artificial Sequence
  Description of Artificial Sequence: Synthetic oligonucleotide
  Target: SCNA; (-) strand; PAM type: YTN; PAM sequence: TTT
ctctctctctaaggtgattg

SEQ ID NO: 43304 - DNA, 20 bp, Artificial Sequence
  Description of Artificial Sequence: Synthetic oligonucleotide
  Target: SCNA; (-) strand; PAM type: YTN; PAM sequence: TTT
tctctctctctaaggtgatt

SEQ ID NO: 43305 - DNA, 20 bp, Artificial Sequence
  Description of Artificial Sequence: Synthetic oligonucleotide
  Target: SCNA; (-) strand; PAM type: YTN; PAM sequence: TTT
ttctctctctctaaggtgat

SEQ ID NO: 43306 - DNA, 20 bp, Artificial Sequence
  Description of Artificial Sequence: Synthetic oligonucleotide
  Target: SCNA; (-) strand; PAM type: YTN; PAM sequence: CTT
tttctctctctctaaggtga

SEQ ID NO: 43307 - DNA, 20 bp, Artificial Sequence
  Description of Artificial Sequence: Synthetic oligonucleotide
  Target: SCNA; (-) strand; PAM type: YTN; PAM sequence: CTC
tttttctctctctctaaggt

SEQ ID NO: 43308 - DNA, 20 bp, Artificial Sequence
  Description of Artificial Sequence: Synthetic oligonucleotide
  Target: SCNA; (-) strand; PAM type: YTN; PAM sequence: TTC
tctttttctctctctctaag

SEQ ID NO: 43309 - DNA, 20 bp, Artificial Sequence
  Description of Artificial Sequence: Synthetic oligonucleotide
  Target: SCNA; (-) strand; PAM type: YTN; PAM sequence: TTT
ctctttttctctctctctaa

SEQ ID NO: 43310 - DNA, 20 bp, Artificial Sequence
  Description of Artificial Sequence: Synthetic oligonucleotide
  Target: SCNA; (-) strand; PAM type: YTN; PAM sequence: TTT
tctctttttctctctctcta

SEQ ID NO: 43311 - DNA, 20 bp, Artificial Sequence
  Description of Artificial Sequence: Synthetic oligonucleotide
  Target: SCNA; (-) strand; PAM type: YTN; PAM sequence: CTT
ttctctttttctctctctct

SEQ ID NO: 43312 - DNA, 20 bp, Artificial Sequence
  Description of Artificial Sequence: Synthetic oligonucleotide
  Target: SCNA; (-) strand; PAM type: YTN; PAM sequence: TTC
atcttttctctttttctctc

SEQ ID NO: 43313 - DNA, 20 bp, Artificial Sequence
  Description of Artificial Sequence: Synthetic oligonucleotide
  Target: SCNA; (-) strand; PAM type: YTN; PAM sequence: TTT
catcttttctctttttctct

SEQ ID NO: 43314 - DNA, 20 bp, Artificial Sequence
  Description of Artificial Sequence: Synthetic oligonucleotide
  Target: SCNA; (-) strand; PAM type: YTN; PAM sequence: TTA
tttcatcttttctctttttc

SEQ ID NO: 43315 - DNA, 20 bp, Artificial Sequence
  Description of Artificial Sequence: Synthetic oligonucleotide
  Target: SCNA; (-) strand; PAM type: YTN; PAM sequence: TTT
atttcatcttttctcttttt

SEQ ID NO: 43316 - DNA, 20 bp, Artificial Sequence
  Description of Artificial Sequence: Synthetic oligonucleotide
  Target: SCNA; (-) strand; PAM type: YTN; PAM sequence: TTT
tatttcatcttttctctttt

SEQ ID NO: 43317 - DNA, 20 bp, Artificial Sequence
  Description of Artificial Sequence: Synthetic oligonucleotide
  Target: SCNA; (-) strand; PAM type: YTN; PAM sequence: TTT
ttatttcatcttttctcttt

SEQ ID NO: 43318 - DNA, 20 bp, Artificial Sequence
  Description of Artificial Sequence: Synthetic oligonucleotide
  Target: SCNA; (-) strand; PAM type: YTN; PAM sequence: TTG
tttttatttcatcttttctc

SEQ ID NO: 43319 - DNA, 20 bp, Artificial Sequence
  Description of Artificial Sequence: Synthetic oligonucleotide
  Target: SCNA; (-) strand; PAM type: YTN; PAM sequence: CTG
aaataaattgtttttatttc

SEQ ID NO: 43320 - DNA, 20 bp, Artificial Sequence
  Description of Artificial Sequence: Synthetic oligonucleotide
  Target: SCNA; (-) strand; PAM type: YTN; PAM sequence: TTA
aaaactgaaataaattgttt

SEQ ID NO: 43321 - DNA, 20 bp, Artificial Sequence
  Description of Artificial Sequence: Synthetic oligonucleotide
  Target: SCNA; (-) strand; PAM type: YTN; PAM sequence: TTT
aaaaactgaaataaattgtt

SEQ ID NO: 43322 - DNA, 20 bp, Artificial Sequence
  Description of Artificial Sequence: Synthetic oligonucleotide
  Target: SCNA; (-) strand; PAM type: YTN; PAM sequence: CTT
taaaaactgaaataaattgt

SEQ ID NO: 43323 - DNA, 20 bp, Artificial Sequence
  Description of Artificial Sequence: Synthetic oligonucleotide
  Target: SCNA; (-) strand; PAM type: YTN; PAM sequence: CTG
ccaaacctttaaaaactgaa

SEQ ID NO: 43324 - DNA, 20 bp, Artificial Sequence
  Description of Artificial Sequence: Synthetic oligonucleotide
  Target: SCNA; (-) strand; PAM type: YTN; PAM sequence: CTC
cactgccaaacctttaaaaa

SEQ ID NO: 43325 - DNA, 20 bp, Artificial Sequence
  Description of Artificial Sequence: Synthetic oligonucleotide
  Target: SCNA; (-) strand; PAM type: YTN; PAM sequence: CTC
ctccactgccaaacctttaa

SEQ ID NO: 43326 - DNA, 20 bp, Artificial Sequence
  Description of Artificial Sequence: Synthetic oligonucleotide
  Target: SCNA; (-) strand; PAM type: YTN; PAM sequence: CTC
tcctccactgccaaaccttt

SEQ ID NO: 43327 - DNA, 20 bp, Artificial Sequence
  Description of Artificial Sequence: Synthetic oligonucleotide
  Target: SCNA; (-) strand; PAM type: YTN; PAM sequence: CTC
tctcctccactgccaaacct

SEQ ID NO: 43328 - DNA, 20 bp, Artificial Sequence
  Description of Artificial Sequence: Synthetic oligonucleotide
  Target: SCNA; (-) strand; PAM type: YTN; PAM sequence: TTA
ctctctcctccactgccaaa

SEQ ID NO: 43329 - DNA, 20 bp, Artificial Sequence
  Description of Artificial Sequence: Synthetic oligonucleotide
  Target: SCNA; (-) strand; PAM type: YTN; PAM sequence: TTT
actctctcctccactgccaa

SEQ ID NO: 43330 - DNA, 20 bp, Artificial Sequence
  Description of Artificial Sequence: Synthetic oligonucleotide
  Target: SCNA; (-) strand; PAM type: YTN; PAM sequence: CTT
tactctctcctccactgcca

SEQ ID NO: 43331 - DNA, 20 bp, Artificial Sequence
  Description of Artificial Sequence: Synthetic oligonucleotide
  Target: SCNA; (-) strand; PAM type: YTN; PAM sequence: TTA
gctttactctctcctccact

SEQ ID NO: 43332 - DNA, 20 bp, Artificial Sequence
  Description of Artificial Sequence: Synthetic oligonucleotide
  Target: SCNA; (-) strand; PAM type: YTN; PAM sequence: TTA
atatattagctttactctct

SEQ ID NO: 43333 - DNA, 20 bp, Artificial Sequence
  Description of Artificial Sequence: Synthetic oligonucleotide
  Target: SCNA; (-) strand; PAM type: YTN; PAM sequence: TTT
aatatattagctttactctc

SEQ ID NO: 43334 - DNA, 20 bp, Artificial Sequence
  Description of Artificial Sequence: Synthetic oligonucleotide
  Target: SCNA; (-) strand; PAM type: YTN; PAM sequence: CTC
cccaaaataaccccaaatat

SEQ ID NO: 43335 - DNA, 20 bp, Artificial Sequence
  Description of Artificial Sequence: Synthetic oligonucleotide
  Target: SCNA; (-) strand; PAM type: YTN; PAM sequence: CTA
gtaaatagctccccaaaata

SEQ ID NO: 43336 - DNA, 20 bp, Artificial Sequence
  Description of Artificial Sequence: Synthetic oligonucleotide
  Target: SCNA; (-) strand; PAM type: YTN; PAM sequence: TTC
agagataaaactagtaaata

SEQ ID NO: 43337 - DNA, 20 bp, Artificial Sequence
  Description of Artificial Sequence: Synthetic oligonucleotide
  Target: SCNA; (-) strand; PAM type: YTN; PAM sequence: CTG
aattcagagataaaactagt

SEQ ID NO: 43338 - DNA, 20 bp, Artificial Sequence
  Description of Artificial Sequence: Synthetic oligonucleotide
  Target: SCNA; (-) strand; PAM type: YTN; PAM sequence: TTA
aacctgaattcagagataaa

SEQ ID NO: 43339 - DNA, 20 bp, Artificial Sequence
  Description of Artificial Sequence: Synthetic oligonucleotide
  Target: SCNA; (-) strand; PAM type: YTN; PAM sequence: TTT
aaacctgaattcagagataa

SEQ ID NO: 43340 - DNA, 20 bp, Artificial Sequence
  Description of Artificial Sequence: Synthetic oligonucleotide
  Target: SCNA; (-) strand; PAM type: YTN; PAM sequence: TTG
aatgtatttaaacctgaatt

SEQ ID NO: 43341 - DNA, 20 bp, Artificial Sequence
  Description of Artificial Sequence: Synthetic oligonucleotide
  Target: SCNA; (-) strand; PAM type: YTN; PAM sequence: TTA
tggttgaatgtatttaaacc

SEQ ID NO: 43342 - DNA, 20 bp, Artificial Sequence
  Description of Artificial Sequence: Synthetic oligonucleotide
  Target: SCNA; (-) strand; PAM type: YTN; PAM sequence: TTT
atggttgaatgtatttaaac

SEQ ID NO: 43343 - DNA, 20 bp, Artificial Sequence
  Description of Artificial Sequence: Synthetic oligonucleotide
  Target: SCNA; (-) strand; PAM type: YTN; PAM sequence: TTA
atttatggttgaatgtattt

SEQ ID NO: 43344 - DNA, 20 bp, Artificial Sequence
  Description of Artificial Sequence: Synthetic oligonucleotide
  Target: SCNA; (-) strand; PAM type: YTN; PAM sequence: TTT
aatttatggttgaatgtatt

SEQ ID NO: 43345 - DNA, 20 bp, Artificial Sequence
  Description of Artificial Sequence: Synthetic oligonucleotide
  Target: SCNA; (-) strand; PAM type: YTN; PAM sequence: TTT
taatttatggttgaatgtat

SEQ ID NO: 43346 - DNA, 20 bp, Artificial Sequence
  Description of Artificial Sequence: Synthetic oligonucleotide
  Target: SCNA; (-) strand; PAM type: YTN; PAM sequence: TTT
ttaatttatggttgaatgta

SEQ ID NO: 43347 - DNA, 20 bp, Artificial Sequence
  Description of Artificial Sequence: Synthetic oligonucleotide
  Target: SCNA; (-) strand; PAM type: YTN; PAM sequence: TTT
tttaatttatggttgaatgt

SEQ ID NO: 43348 - DNA, 20 bp, Artificial Sequence
  Description of Artificial Sequence: Synthetic oligonucleotide
  Target: SCNA; (-) strand; PAM type: YTN; PAM sequence: TTA
ttttttaatttatggttgaa

SEQ ID NO: 43349 - DNA, 20 bp, Artificial Sequence
  Description of Artificial Sequence: Synthetic oligonucleotide
  Target: SCNA; (-) strand; PAM type: YTN; PAM sequence: TTA
tccaccaattattttttaat

SEQ ID NO: 43350 - DNA, 20 bp, Artificial Sequence
  Description of Artificial Sequence: Synthetic oligonucleotide
  Target: SCNA; (-) strand; PAM type: YTN; PAM sequence: TTT
atccaccaattattttttaa

SEQ ID NO: 43351 - DNA, 20 bp, Artificial Sequence
  Description of Artificial Sequence: Synthetic oligonucleotide
  Target: SCNA; (-) strand; PAM type: YTN; PAM sequence: CTG
atttatccaccaattatttt

SEQ ID NO: 43352 - DNA, 20 bp, Artificial Sequence
  Description of Artificial Sequence: Synthetic oligonucleotide
  Target: SCNA; (-) strand; PAM type: YTN; PAM sequence: TTC
ctgatttatccaccaattat

SEQ ID NO: 43353 - DNA, 20 bp, Artificial Sequence
  Description of Artificial Sequence: Synthetic oligonucleotide
  Target: SCNA; (-) strand; PAM type: YTN; PAM sequence: TTG
caccaattcctgatttatcc

SEQ ID NO: 43354 - DNA, 20 bp, Artificial Sequence
  Description of Artificial Sequence: Synthetic oligonucleotide
  Target: SCNA; (-) strand; PAM type: YTN; PAM sequence: TTT
gcaccaattcctgatttatc

SEQ ID NO: 43355 - DNA, 20 bp, Artificial Sequence
  Description of Artificial Sequence: Synthetic oligonucleotide
  Target: SCNA; (-) strand; PAM type: YTN; PAM sequence: TTT
tgcaccaattcctgatttat

SEQ ID NO: 43356 - DNA, 20 bp, Artificial Sequence
  Description of Artificial Sequence: Synthetic oligonucleotide
  Target: SCNA; (-) strand; PAM type: YTN; PAM sequence: TTA
aaaatgattttgcaccaatt

SEQ ID NO: 43357 - DNA, 20 bp, Artificial Sequence
  Description of Artificial Sequence: Synthetic oligonucleotide
  Target: SCNA; (-) strand; PAM type: YTN; PAM sequence: CTT
aaaaatgattttgcaccaat

SEQ ID NO: 43358 - DNA, 20 bp, Artificial Sequence
  Description of Artificial Sequence: Synthetic oligonucleotide
  Target: SCNA; (-) strand; PAM type: YTN; PAM sequence: TTC
ttaaaaatgattttgcacca

SEQ ID NO: 43359 - DNA, 20 bp, Artificial Sequence
  Description of Artificial Sequence: Synthetic oligonucleotide
  Target: SCNA; (-) strand; PAM type: YTN; PAM sequence: CTT
cttaaaaatgattttgcacc

SEQ ID NO: 43360 - DNA, 20 bp, Artificial Sequence
  Description of Artificial Sequence: Synthetic oligonucleotide
  Target: SCNA; (-) strand; PAM type: YTN; PAM sequence: TTC
ttcttaaaaatgattttgca

SEQ ID NO: 43361 - DNA, 20 bp, Artificial Sequence
  Description of Artificial Sequence: Synthetic oligonucleotide
  Target: SCNA; (-) strand; PAM type: YTN; PAM sequence: TTT
cttcttaaaaatgattttgc

SEQ ID NO: 43362 - DNA, 20 bp, Artificial Sequence
  Description of Artificial Sequence: Synthetic oligonucleotide
  Target: SCNA; (-) strand; PAM type: YTN; PAM sequence: TTT
tcttcttaaaaatgattttg

SEQ ID NO: 43363 - DNA, 20 bp, Artificial Sequence
  Description of Artificial Sequence: Synthetic oligonucleotide
  Target: SCNA; (-) strand; PAM type: YTN; PAM sequence: CTA
tataatgacattttcttctt

SEQ ID NO: 43364 - DNA, 20 bp, Artificial Sequence
  Description of Artificial Sequence: Synthetic oligonucleotide
  Target: SCNA; (-) strand; PAM type: YTN; PAM sequence: TTG
ctatataatgacattttctt

SEQ ID NO: 43365 - DNA, 20 bp, Artificial Sequence
  Description of Artificial Sequence: Synthetic oligonucleotide
  Target: SCNA; (-) strand; PAM type: YTN; PAM sequence: TTT
gctatataatgacattttct

SEQ ID NO: 43366 - DNA, 20 bp, Artificial Sequence
  Description of Artificial Sequence: Synthetic oligonucleotide
  Target: SCNA; (-) strand; PAM type: YTN; PAM sequence: CTT
tgctatataatgacattttc

SEQ ID NO: 43367 - DNA, 20 bp, Artificial Sequence
  Description of Artificial Sequence: Synthetic oligonucleotide
  Target: SCNA; (-) strand; PAM type: YTN; PAM sequence: CTC
tttgctatataatgacattt

SEQ ID NO: 43368 - DNA, 20 bp, Artificial Sequence
  Description of Artificial Sequence: Synthetic oligonucleotide
  Target: SCNA; (-) strand; PAM type: YTN; PAM sequence: CTA
cctctttgctatataatgac

SEQ ID NO: 43369 - DNA, 20 bp, Artificial Sequence
  Description of Artificial Sequence: Synthetic oligonucleotide
  Target: SCNA; (-) strand; PAM type: YTN; PAM sequence: TTA
aagcagcatactacctcttt

SEQ ID NO: 43370 - DNA, 20 bp, Artificial Sequence
  Description of Artificial Sequence: Synthetic oligonucleotide
  Target: SCNA; (-) strand; PAM type: YTN; PAM sequence: TTT
aaagcagcatactacctctt

SEQ ID NO: 43371 - DNA, 20 bp, Artificial Sequence
  Description of Artificial Sequence: Synthetic oligonucleotide
  Target: SCNA; (-) strand; PAM type: YTN; PAM sequence: TTG
ccaaggaaaataaggattta

SEQ ID NO: 43372 - DNA, 20 bp, Artificial Sequence
  Description of Artificial Sequence: Synthetic oligonucleotide
  Target: SCNA; (-) strand; PAM type: YTN; PAM sequence: CTT
gccaaggaaaataaggattt

SEQ ID NO: 43373 - DNA, 20 bp, Artificial Sequence
  Description of Artificial Sequence: Synthetic oligonucleotide
  Target: SCNA; (-) strand; PAM type: YTN; PAM sequence: TTA
ggcttgccaaggaaaataag

SEQ ID NO: 43374 - DNA, 20 bp, Artificial Sequence
  Description of Artificial Sequence: Synthetic oligonucleotide
  Target: SCNA; (-) strand; PAM type: YTN; PAM sequence: TTG
ttaggcttgccaaggaaaat

SEQ ID NO: 43375 - DNA, 20 bp, Artificial Sequence
  Description of Artificial Sequence: Synthetic oligonucleotide
  Target: SCNA; (-) strand; PAM type: YTN; PAM sequence: CTT
gttaggcttgccaaggaaaa

SEQ ID NO: 43376 - DNA, 20 bp, Artificial Sequence
  Description of Artificial Sequence: Synthetic oligonucleotide
  Target: SCNA; (-) strand; PAM type: YTN; PAM sequence: CTG
cttgttaggcttgccaagga

SEQ ID NO: 43377 - DNA, 20 bp, Artificial Sequence
  Description of Artificial Sequence: Synthetic oligonucleotide
  Target: SCNA; (-) strand; PAM type: YTN; PAM sequence: CTG
ccctgcttgttaggcttgcc

SEQ ID NO: 43378 - DNA, 20 bp, Artificial Sequence
  Description of Artificial Sequence: Synthetic oligonucleotide
  Target: SCNA; (-) strand; PAM type: YTN; PAM sequence: CTA
ccataaatacagcaggcact

SEQ ID NO: 43379 - DNA, 20 bp, Artificial Sequence
  Description of Artificial Sequence: Synthetic oligonucleotide
  Target: SCNA; (-) strand; PAM type: YTN; PAM sequence: TTA
tatggcactaccataaatac

SEQ ID NO: 43380 - DNA, 20 bp, Artificial Sequence
  Description of Artificial Sequence: Synthetic oligonucleotide
  Target: SCNA; (-) strand; PAM type: YTN; PAM sequence: CTA
attatatggcactaccataa

SEQ ID NO: 43381 - DNA, 20 bp, Artificial Sequence
  Description of Artificial Sequence: Synthetic oligonucleotide
  Target: SCNA; (-) strand; PAM type: YTN; PAM sequence: TTA
ggtgagtcagctaattatat

SEQ ID NO: 43382 - DNA, 20 bp, Artificial Sequence
  Description of Artificial Sequence: Synthetic oligonucleotide
  Target: SCNA; (-) strand; PAM type: YTN; PAM sequence: TTA
ttaggtgagtcagctaatta

SEQ ID NO: 43383 - DNA, 20 bp, Artificial Sequence
  Description of Artificial Sequence: Synthetic oligonucleotide
  Target: SCNA; (-) strand; PAM type: YTN; PAM sequence: CTT
attaggtgagtcagctaatt

SEQ ID NO: 43384 - DNA, 20 bp, Artificial Sequence
  Description of Artificial Sequence: Synthetic oligonucleotide
  Target: SCNA; (-) strand; PAM type: YTN; PAM sequence: CTG
tgaagtcttattaggtgagt

SEQ ID NO: 43385 - DNA, 20 bp, Artificial Sequence
  Description of Artificial Sequence: Synthetic oligonucleotide
  Target: SCNA; (-) strand; PAM type: YTN; PAM sequence: CTG
cgctgtgaagtcttattagg

SEQ ID NO: 43386 - DNA, 20 bp, Artificial Sequence
  Description of Artificial Sequence: Synthetic oligonucleotide
  Target: SCNA; (-) strand; PAM type: YTN; PAM sequence: TTG
ctgcgctgtgaagtcttatt

SEQ ID NO: 43387 - DNA, 20 bp, Artificial Sequence
  Description of Artificial Sequence: Synthetic oligonucleotide
  Target: SCNA; (-) strand; PAM type: YTN; PAM sequence: TTG
ttgctgcgctgtgaagtctt

SEQ ID NO: 43388 - DNA, 20 bp, Artificial Sequence
  Description of Artificial Sequence: Synthetic oligonucleotide
  Target: SCNA; (-) strand; PAM type: YTN; PAM sequence: CTG
gcagttgttgctgcgctgtg

SEQ ID NO: 43389 - DNA, 20 bp, Artificial Sequence
  Description of Artificial Sequence: Synthetic oligonucleotide
  Target: SCNA; (-) strand; PAM type: YTN; PAM sequence: CTA
tccaagtaacaggacaaaaa

SEQ ID NO: 43390 - DNA, 20 bp, Artificial Sequence
  Description of Artificial Sequence: Synthetic oligonucleotide
  Target: SCNA; (-) strand; PAM type: YTN; PAM sequence: TTC
aaccgagtctatccaagtaa

SEQ ID NO: 43391 - DNA, 20 bp, Artificial Sequence
  Description of Artificial Sequence: Synthetic oligonucleotide
  Target: SCNA; (-) strand; PAM type: YTN; PAM sequence: TTA
gtatattcaaccgagtctat

SEQ ID NO: 43392 - DNA, 20 bp, Artificial Sequence
  Description of Artificial Sequence: Synthetic oligonucleotide
  Target: SCNA; (-) strand; PAM type: YTN; PAM sequence: TTG
tgcattagtatattcaaccg

SEQ ID NO: 43393 - DNA, 20 bp, Artificial Sequence
  Description of Artificial Sequence: Synthetic oligonucleotide
  Target: SCNA; (-) strand; PAM type: YTN; PAM sequence: TTT
gtgcattagtatattcaacc

SEQ ID NO: 43394 - DNA, 20 bp, Artificial Sequence
  Description of Artificial Sequence: Synthetic oligonucleotide
  Target: SCNA; (-) strand; PAM type: YTN; PAM sequence: CTT
tgtgcattagtatattcaac

SEQ ID NO: 43395 - DNA, 20 bp, Artificial Sequence
  Description of Artificial Sequence: Synthetic oligonucleotide
  Target: SCNA; (-) strand; PAM type: YTN; PAM sequence: TTC
cctttgtgcattagtatatt

SEQ ID NO: 43396 - DNA, 20 bp, Artificial Sequence
  Description of Artificial Sequence: Synthetic oligonucleotide
  Target: SCNA; (-) strand; PAM type: YTN; PAM sequence: TTT
ccctttgtgcattagtatat

SEQ ID NO: 43397 - DNA, 20 bp, Artificial Sequence
  Description of Artificial Sequence: Synthetic oligonucleotide
  Target: SCNA; (-) strand; PAM type: YTN; PAM sequence: TTC
ccagatttccctttgtgcat

SEQ ID NO: 43398 - DNA, 20 bp, Artificial Sequence
  Description of Artificial Sequence: Synthetic oligonucleotide
  Target: SCNA; (-) strand; PAM type: YTN; PAM sequence: TTA
ttcccagatttccctttgtg

SEQ ID NO: 43399 - DNA, 20 bp, Artificial Sequence
  Description of Artificial Sequence: Synthetic oligonucleotide
  Target: SCNA; (-) strand; PAM type: YTN; PAM sequence: TTT
attcccagatttccctttgt

SEQ ID NO: 43400 - DNA, 20 bp, Artificial Sequence
  Description of Artificial Sequence: Synthetic oligonucleotide
  Target: SCNA; (-) strand; PAM type: YTN; PAM sequence: TTA
gacatgaaaagtaaaaatag

SEQ ID NO: 43401 - DNA, 20 bp, Artificial Sequence
  Description of Artificial Sequence: Synthetic oligonucleotide
  Target: SCNA; (-) strand; PAM type: YTN; PAM sequence: CTT
agacatgaaaagtaaaaata

SEQ ID NO: 43402 - DNA, 20 bp, Artificial Sequence
  Description of Artificial Sequence: Synthetic oligonucleotide
  Target: SCNA; (-) strand; PAM type: YTN; PAM sequence: CTA
gaagaggaggatcagccctt

SEQ ID NO: 43403 - DNA, 20 bp, Artificial Sequence
  Description of Artificial Sequence: Synthetic oligonucleotide
  Target: SCNA; (-) strand; PAM type: YTN; PAM sequence: TTC
tagaagaggaggatcagccc

SEQ ID NO: 43404 - DNA, 20 bp, Artificial Sequence
  Description of Artificial Sequence: Synthetic oligonucleotide
  Target: SCNA; (-) strand; PAM type: YTN; PAM sequence: TTT
ctagaagaggaggatcagcc

SEQ ID NO: 43405 - DNA, 20 bp, Artificial Sequence
  Description of Artificial Sequence: Synthetic oligonucleotide
  Target: SCNA; (-) strand; PAM type: YTN; PAM sequence: TTA
tttctagaagaggaggatca

SEQ ID NO: 43406 - DNA, 20 bp, Artificial Sequence
  Description of Artificial Sequence: Synthetic oligonucleotide
  Target: SCNA; (-) strand; PAM type: YTN; PAM sequence: TTT
atttctagaagaggaggatc

SEQ ID NO: 43407 - DNA, 20 bp, Artificial Sequence
  Description of Artificial Sequence: Synthetic oligonucleotide
  Target: SCNA; (-) strand; PAM type: YTN; PAM sequence: TTT
tatttctagaagaggaggat

SEQ ID NO: 43408 - DNA, 20 bp, Artificial Sequence
  Description of Artificial Sequence: Synthetic oligonucleotide
  Target: SCNA; (-) strand; PAM type: YTN; PAM sequence: TTA
acatacataataaattttat

SEQ ID NO: 43409 - DNA, 20 bp, Artificial Sequence
  Description of Artificial Sequence: Synthetic oligonucleotide
  Target: SCNA; (-) strand; PAM type: YTN; PAM sequence: TTT
aacatacataataaatttta

SEQ ID NO: 43410 - DNA, 20 bp, Artificial Sequence
  Description of Artificial Sequence: Synthetic oligonucleotide
  Target: SCNA; (-) strand; PAM type: YTN; PAM sequence: TTG
aatatagtttaacatacata

SEQ ID NO: 43411 - DNA, 20 bp, Artificial Sequence
  Description of Artificial Sequence: Synthetic oligonucleotide
  Target: SCNA; (-) strand; PAM type: YTN; PAM sequence: TTT
gaatatagtttaacatacat

SEQ ID NO: 43412 - DNA, 20 bp, Artificial Sequence
  Description of Artificial Sequence: Synthetic oligonucleotide
  Target: SCNA; (-) strand; PAM type: YTN; PAM sequence: TTA
aaatagtaaacaaatttgaa

SEQ ID NO: 43413 - DNA, 20 bp, Artificial Sequence
  Description of Artificial Sequence: Synthetic oligonucleotide
  Target: SCNA; (-) strand; PAM type: YTN; PAM sequence: CTT
aaaatagtaaacaaatttga

SEQ ID NO: 43414 - DNA, 20 bp, Artificial Sequence
  Description of Artificial Sequence: Synthetic oligonucleotide
  Target: SCNA; (-) strand; PAM type: YTN; PAM sequence: CTA
atccatgaaagcttaaaata

SEQ ID NO: 43415 - DNA, 20 bp, Artificial Sequence
  Description of Artificial Sequence: Synthetic oligonucleotide
  Target: SCNA; (-) strand; PAM type: YTN; PAM sequence: TTC
taatccatgaaagcttaaaa

SEQ ID NO: 43416 - DNA, 20 bp, Artificial Sequence
  Description of Artificial Sequence: Synthetic oligonucleotide
  Target: SCNA; (-) strand; PAM type: YTN; PAM sequence: TTC
aagattctaatccatgaaag

SEQ ID NO: 43417 - DNA, 20 bp, Artificial Sequence
  Description of Artificial Sequence: Synthetic oligonucleotide
  Target: SCNA; (-) strand; PAM type: YTN; PAM sequence: CTT
caagattctaatccatgaaa

SEQ ID NO: 43418 - DNA, 20 bp, Artificial Sequence
  Description of Artificial Sequence: Synthetic oligonucleotide
  Target: SCNA; (-) strand; PAM type: YTN; PAM sequence: CTG
accttcaagattctaatcca

SEQ ID NO: 43419 - DNA, 20 bp, Artificial Sequence
  Description of Artificial Sequence: Synthetic oligonucleotide
  Target: SCNA; (-) strand; PAM type: YTN; PAM sequence: CTA
cccaaggggctgaccttcaa

SEQ ID NO: 43420 - DNA, 20 bp, Artificial Sequence
  Description of Artificial Sequence: Synthetic oligonucleotide
  Target: SCNA; (-) strand; PAM type: YTN; PAM sequence: TTC
agtcactacccaaggggctg

SEQ ID NO: 43421 - DNA, 20 bp, Artificial Sequence
  Description of Artificial Sequence: Synthetic oligonucleotide
  Target: SCNA; (-) strand; PAM type: YTN; PAM sequence: TTA
ttcagtcactacccaagggg

SEQ ID NO: 43422 - DNA, 20 bp, Artificial Sequence
  Description of Artificial Sequence: Synthetic oligonucleotide
  Target: SCNA; (-) strand; PAM type: YTN; PAM sequence: CTT
attcagtcactacccaaggg

SEQ ID NO: 43423 - DNA, 20 bp, Artificial Sequence
  Description of Artificial Sequence: Synthetic oligonucleotide
  Target: SCNA; (-) strand; PAM type: YTN; PAM sequence: TTA
atgtcttattcagtcactac

SEQ ID NO: 43424 - DNA, 20 bp, Artificial Sequence
  Description of Artificial Sequence: Synthetic oligonucleotide
  Target: SCNA; (-) strand; PAM type: YTN; PAM sequence: TTC
acatcgttaatgtcttattc

SEQ ID NO: 43425 - DNA, 20 bp, Artificial Sequence
  Description of Artificial Sequence: Synthetic oligonucleotide
  Target: SCNA; (-) strand; PAM type: YTN; PAM sequence: CTT
cacatcgttaatgtcttatt

SEQ ID NO: 43426 - DNA, 20 bp, Artificial Sequence
  Description of Artificial Sequence: Synthetic oligonucleotide
  Target: SCNA; (-) strand; PAM type: YTN; PAM sequence: TTG
acccatcttcacatcgttaa

SEQ ID NO: 43427 - DNA, 20 bp, Artificial Sequence
  Description of Artificial Sequence: Synthetic oligonucleotide
  Target: SCNA; (-) strand; PAM type: YTN; PAM sequence: CTT
gacccatcttcacatcgtta

SEQ ID NO: 43428 - DNA, 20 bp, Artificial Sequence
  Description of Artificial Sequence: Synthetic oligonucleotide
  Target: SCNA; (-) strand; PAM type: YTN; PAM sequence: CTC
agcttgacccatcttcacat

SEQ ID NO: 43429 - DNA, 20 bp, Artificial Sequence
  Description of Artificial Sequence: Synthetic oligonucleotide
  Target: SCNA; (-) strand; PAM type: YTN; PAM sequence: TTC
tcagcttgacccatcttcac

SEQ ID NO: 43430 - DNA, 20 bp, Artificial Sequence
  Description of Artificial Sequence: Synthetic oligonucleotide
  Target: SCNA; (-) strand; PAM type: YTN; PAM sequence: TTT
ctcagcttgacccatcttca

SEQ ID NO: 43431 - DNA, 20 bp, Artificial Sequence
  Description of Artificial Sequence: Synthetic oligonucleotide
  Target: SCNA; (-) strand; PAM type: YTN; PAM sequence: CTT
tctcagcttgacccatcttc

SEQ ID NO: 43432 - DNA, 20 bp, Artificial Sequence
  Description of Artificial Sequence: Synthetic oligonucleotide
  Target: SCNA; (-) strand; PAM type: YTN; PAM sequence: CTC
agcacaagagcaaacctttc

SEQ ID NO: 43433 - DNA, 20 bp, Artificial Sequence
  Description of Artificial Sequence: Synthetic oligonucleotide
  Target: SCNA; (-) strand; PAM type: YTN; PAM sequence: CTG
agctcagcacaagagcaaac

SEQ ID NO: 43434 - DNA, 20 bp, Artificial Sequence
  Description of Artificial Sequence: Synthetic oligonucleotide
  Target: SCNA; (-) strand; PAM type: YTN; PAM sequence: TTC
tgagctcagcacaagagcaa

SEQ ID NO: 43435 - DNA, 20 bp, Artificial Sequence
  Description of Artificial Sequence: Synthetic oligonucleotide
  Target: SCNA; (-) strand; PAM type: YTN; PAM sequence: TTG
attctgagctcagcacaaga

SEQ ID NO: 43436 - DNA, 20 bp, Artificial Sequence
  Description of Artificial Sequence: Synthetic oligonucleotide
  Target: SCNA; (-) strand; PAM type: YTN; PAM sequence: TTA
ttgattctgagctcagcaca

SEQ ID NO: 43437 - DNA, 20 bp, Artificial Sequence
  Description of Artificial Sequence: Synthetic oligonucleotide
  Target: SCNA; (-) strand; PAM type: YTN; PAM sequence: CTT
attgattctgagctcagcac

SEQ ID NO: 43438 - DNA, 20 bp, Artificial Sequence
  Description of Artificial Sequence: Synthetic oligonucleotide
  Target: SCNA; (-) strand; PAM type: YTN; PAM sequence: TTG
caaacatgaaatgacttatt

SEQ ID NO: 43439 - DNA, 20 bp, Artificial Sequence
  Description of Artificial Sequence: Synthetic oligonucleotide
  Target: SCNA; (-) strand; PAM type: YTN; PAM sequence: TTT
gcaaacatgaaatgacttat

SEQ ID NO: 43440 - DNA, 20 bp, Artificial Sequence
  Description of Artificial Sequence: Synthetic oligonucleotide
  Target: SCNA; (-) strand; PAM type: YTN; PAM sequence: TTG
tatttgcaaacatgaaatga

SEQ ID NO: 43441 - DNA, 20 bp, Artificial Sequence
  Description of Artificial Sequence: Synthetic oligonucleotide
  Target: SCNA; (-) strand; PAM type: YTN; PAM sequence: CTC
caaatatcattgtatttgca

SEQ ID NO: 43442 - DNA, 20 bp, Artificial Sequence
  Description of Artificial Sequence: Synthetic oligonucleotide
  Target: SCNA; (-) strand; PAM type: YTN; PAM sequence: CTG
cctccaaatatcattgtatt

SEQ ID NO: 43443 - DNA, 20 bp, Artificial Sequence
  Description of Artificial Sequence: Synthetic oligonucleotide
  Target: SCNA; (-) strand; PAM type: YTN; PAM sequence: CTC
aaaaaaaaaaaaaaaaaaaa

SEQ ID NO: 43444 - DNA, 20 bp, Artificial Sequence
  Description of Artificial Sequence: Synthetic oligonucleotide
  Target: SCNA; (-) strand; PAM type: YTN; PAM sequence: CTG
tctcaaaaaaaaaaaaaaaa

SEQ ID NO: 43445 - DNA, 20 bp, Artificial Sequence
  Description of Artificial Sequence: Synthetic oligonucleotide
  Target: SCNA; (-) strand; PAM type: YTN; PAM sequence: CTC
tgtctcaaaaaaaaaaaaaa

SEQ ID NO: 43446 - DNA, 20 bp, Artificial Sequence
  Description of Artificial Sequence: Synthetic oligonucleotide
  Target: SCNA; (-) strand; PAM type: YTN; PAM sequence: CTG
ggcgacagagcgagactctg

SEQ ID NO: 43447 - DNA, 20 bp, Artificial Sequence
  Description of Artificial Sequence: Synthetic oligonucleotide
  Target: SCNA; (-) strand; PAM type: YTN; PAM sequence: CTC
cagcctgggcgacagagcga

SEQ ID NO: 43448 - DNA, 20 bp, Artificial Sequence
  Description of Artificial Sequence: Synthetic oligonucleotide
  Target: SCNA; (-) strand; PAM type: YTN; PAM sequence: CTG
cactccagcctgggcgacag

SEQ ID NO: 43449 - DNA, 20 bp, Artificial Sequence
  Description of Artificial Sequence: Synthetic oligonucleotide
  Target: SCNA; (-) strand; PAM type: YTN; PAM sequence: CTG
agatcgcgccactgcactcc

SEQ ID NO: 43450 - DNA, 20 bp, Artificial Sequence
  Description of Artificial Sequence: Synthetic oligonucleotide
  Target: SCNA; (-) strand; PAM type: YTN; PAM sequence: TTG
cagtgagctgagatcgcgcc

SEQ ID NO: 43451 - DNA, 20 bp, Artificial Sequence
  Description of Artificial Sequence: Synthetic oligonucleotide
  Target: SCNA; (-) strand; PAM type: YTN; PAM sequence: CTT
gcagtgagctgagatcgcgc

SEQ ID NO: 43452 - DNA, 20 bp, Artificial Sequence
  Description of Artificial Sequence: Synthetic oligonucleotide
  Target: SCNA; (-) strand; PAM type: YTN; PAM sequence: CTG
aagcaggagaatggcgtgat

SEQ ID NO: 43453 - DNA, 20 bp, Artificial Sequence
  Description of Artificial Sequence: Synthetic oligonucleotide
  Target: SCNA; (-) strand; PAM type: YTN; PAM sequence: CTC
gggaggctgaagcaggagaa

SEQ ID NO: 43454 - DNA, 20 bp, Artificial Sequence
  Description of Artificial Sequence: Synthetic oligonucleotide
  Target: SCNA; (-) strand; PAM type: YTN; PAM sequence: CTA
ctcgggaggctgaagcagga

SEQ ID NO: 43455 - DNA, 20 bp, Artificial Sequence
  Description of Artificial Sequence: Synthetic oligonucleotide
  Target: SCNA; (-) strand; PAM type: YTN; PAM sequence: CTG
tagtcccagctactcgggag

SEQ ID NO: 43456 - DNA, 20 bp, Artificial Sequence
  Description of Artificial Sequence: Synthetic oligonucleotide
  Target: SCNA; (-) strand; PAM type: YTN; PAM sequence: TTA
gccaggcgtggtggtgagcg

SEQ ID NO: 43457 - DNA, 20 bp, Artificial Sequence
  Description of Artificial Sequence: Synthetic oligonucleotide
  Target: SCNA; (-) strand; PAM type: YTN; PAM sequence: TTA
caaaaaaattagccaggcgt

SEQ ID NO: 43458 - DNA, 20 bp, Artificial Sequence
  Description of Artificial Sequence: Synthetic oligonucleotide
  Target: SCNA; (-) strand; PAM type: YTN; PAM sequence: CTA
aaattacaaaaaaattagcc

SEQ ID NO: 43459 - DNA, 20 bp, Artificial Sequence
  Description of Artificial Sequence: Synthetic oligonucleotide
  Target: SCNA; (-) strand; PAM type: YTN; PAM sequence: CTA
ctaaaattacaaaaaaatta

SEQ ID NO: 43460 - DNA, 20 bp, Artificial Sequence
  Description of Artificial Sequence: Synthetic oligonucleotide
  Target: SCNA; (-) strand; PAM type: YTN; PAM sequence: CTC
tactaaaattacaaaaaaat

SEQ ID NO: 43461 - DNA, 20 bp, Artificial Sequence
  Description of Artificial Sequence: Synthetic oligonucleotide
  Target: SCNA; (-) strand; PAM type: YTN; PAM sequence: CTG
tctctactaaaattacaaaa

SEQ ID NO: 43462 - DNA, 20 bp, Artificial Sequence
  Description of Artificial Sequence: Synthetic oligonucleotide
  Target: SCNA; (-) strand; PAM type: YTN; PAM sequence: CTA
acacagtgaaaccctgtctc

SEQ ID NO: 43463 - DNA, 20 bp, Artificial Sequence
  Description of Artificial Sequence: Synthetic oligonucleotide
  Target: SCNA; (-) strand; PAM type: YTN; PAM sequence: CTG
gctaacacagtgaaaccctg

SEQ ID NO: 43464 - DNA, 20 bp, Artificial Sequence
  Description of Artificial Sequence: Synthetic oligonucleotide
  Target: SCNA; (-) strand; PAM type: YTN; PAM sequence: TTG
ggaggccaaggtaggtggat

SEQ ID NO: 43465 - DNA, 20 bp, Artificial Sequence
  Description of Artificial Sequence: Synthetic oligonucleotide
  Target: SCNA; (-) strand; PAM type: YTN; PAM sequence: TTT
gggaggccaaggtaggtgga

SEQ ID NO: 43466 - DNA, 20 bp, Artificial Sequence
  Description of Artificial Sequence: Synthetic oligonucleotide
  Target: SCNA; (-) strand; PAM type: YTN; PAM sequence: CTT
tgggaggccaaggtaggtgg

SEQ ID NO: 43467 - DNA, 20 bp, Artificial Sequence
  Description of Artificial Sequence: Synthetic oligonucleotide
  Target: SCNA; (-) strand; PAM type: YTN; PAM sequence: CTG
taatcccagcactttgggag

SEQ ID NO: 43468 - DNA, 20 bp, Artificial Sequence
  Description of Artificial Sequence: Synthetic oligonucleotide
  Target: SCNA; (-) strand; PAM type: YTN; PAM sequence: CTC
acgcctgtaatcccagcact

SEQ ID NO: 43469 - DNA, 20 bp, Artificial Sequence
  Description of Artificial Sequence: Synthetic oligonucleotide
  Target: SCNA; (-) strand; PAM type: YTN; PAM sequence: CTG
gccgggcgcagtggctcacg

SEQ ID NO: 43470 - DNA, 20 bp, Artificial Sequence
  Description of Artificial Sequence: Synthetic oligonucleotide
  Target: SCNA; (-) strand; PAM type: YTN; PAM sequence: CTC
tggccgggcgcagtggctca

SEQ ID NO: 43471 - DNA, 20 bp, Artificial Sequence
  Description of Artificial Sequence: Synthetic oligonucleotide
  Target: SCNA; (-) strand; PAM type: YTN; PAM sequence: CTG
cctctggccgggcgcagtgg

SEQ ID NO: 43472 - DNA, 20 bp, Artificial Sequence
  Description of Artificial Sequence: Synthetic oligonucleotide
  Target: SCNA; (-) strand; PAM type: YTN; PAM sequence: TTA
agacctgcctctggccgggc

SEQ ID NO: 43473 - DNA, 20 bp, Artificial Sequence
  Description of Artificial Sequence: Synthetic oligonucleotide
  Target: SCNA; (-) strand; PAM type: YTN; PAM sequence: TTT
aagacctgcctctggccggg

SEQ ID NO: 43474 - DNA, 20 bp, Artificial Sequence
  Description of Artificial Sequence: Synthetic oligonucleotide
  Target: SCNA; (-) strand; PAM type: YTN; PAM sequence: TTT
taagacctgcctctggccgg

SEQ ID NO: 43475 - DNA, 20 bp, Artificial Sequence
  Description of Artificial Sequence: Synthetic oligonucleotide
  Target: SCNA; (-) strand; PAM type: YTN; PAM sequence: CTA
gttttaagacctgcctctgg

SEQ ID NO: 43476 - DNA, 20 bp, Artificial Sequence
  Description of Artificial Sequence: Synthetic oligonucleotide
  Target: SCNA; (-) strand; PAM type: YTN; PAM sequence: TTG
ctagttttaagacctgcctc

SEQ ID NO: 43477 - DNA, 20 bp, Artificial Sequence
  Description of Artificial Sequence: Synthetic oligonucleotide
  Target: SCNA; (-) strand; PAM type: YTN; PAM sequence: CTC
acccagttgctagttttaag

SEQ ID NO: 43478 - DNA, 20 bp, Artificial Sequence
  Description of Artificial Sequence: Synthetic oligonucleotide
  Target: SCNA; (-) strand; PAM type: YTN; PAM sequence: TTC
tcacccagttgctagtttta

SEQ ID NO: 43479 - DNA, 20 bp, Artificial Sequence
  Description of Artificial Sequence: Synthetic oligonucleotide
  Target: SCNA; (-) strand; PAM type: YTN; PAM sequence: TTT
ctcacccagttgctagtttt

SEQ ID NO: 43480 - DNA, 20 bp, Artificial Sequence
  Description of Artificial Sequence: Synthetic oligonucleotide
  Target: SCNA; (-) strand; PAM type: YTN; PAM sequence: CTG
atttctcacccagttgctag

SEQ ID NO: 43481 - DNA, 20 bp, Artificial Sequence
  Description of Artificial Sequence: Synthetic oligonucleotide
  Target: SCNA; (-) strand; PAM type: YTN; PAM sequence: CTC
cccactgatttctcacccag

SEQ ID NO: 43482 - DNA, 20 bp, Artificial Sequence
  Description of Artificial Sequence: Synthetic oligonucleotide
  Target: SCNA; (-) strand; PAM type: YTN; PAM sequence: CTA
ccctccccactgatttctca

SEQ ID NO: 43483 - DNA, 20 bp, Artificial Sequence
  Description of Artificial Sequence: Synthetic oligonucleotide
  Target: SCNA; (-) strand; PAM type: YTN; PAM sequence: TTG
tcaaagcctaccctccccac

SEQ ID NO: 43484 - DNA, 20 bp, Artificial Sequence
  Description of Artificial Sequence: Synthetic oligonucleotide
  Target: SCNA; (-) strand; PAM type: YTN; PAM sequence: TTT
gtcaaagcctaccctcccca

SEQ ID NO: 43485 - DNA, 20 bp, Artificial Sequence
  Description of Artificial Sequence: Synthetic oligonucleotide
  Target: SCNA; (-) strand; PAM type: YTN; PAM sequence: CTT
tgtcaaagcctaccctcccc

SEQ ID NO: 43486 - DNA, 20 bp, Artificial Sequence
  Description of Artificial Sequence: Synthetic oligonucleotide
  Target: SCNA; (-) strand; PAM type: YTN; PAM sequence: TTA
ctttgtcaaagcctaccctc

SEQ ID NO: 43487 - DNA, 20 bp, Artificial Sequence
  Description of Artificial Sequence: Synthetic oligonucleotide
  Target: SCNA; (-) strand; PAM type: YTN; PAM sequence: CTT
actttgtcaaagcctaccct

SEQ ID NO: 43488 - DNA, 20 bp, Artificial Sequence
  Description of Artificial Sequence: Synthetic oligonucleotide
  Target: SCNA; (-) strand; PAM type: YTN; PAM sequence: CTC
ttactttgtcaaagcctacc

SEQ ID NO: 43489 - DNA, 20 bp, Artificial Sequence
  Description of Artificial Sequence: Synthetic oligonucleotide
  Target: SCNA; (-) strand; PAM type: YTN; PAM sequence: TTA
tctcttactttgtcaaagcc

SEQ ID NO: 43490 - DNA, 20 bp, Artificial Sequence
  Description of Artificial Sequence: Synthetic oligonucleotide
  Target: SCNA; (-) strand; PAM type: YTN; PAM sequence: TTT
atctcttactttgtcaaagc

SEQ ID NO: 43491 - DNA, 20 bp, Artificial Sequence
  Description of Artificial Sequence: Synthetic oligonucleotide
  Target: SCNA; (-) strand; PAM type: YTN; PAM sequence: CTT
tatctcttactttgtcaaag

SEQ ID NO: 43492 - DNA, 20 bp, Artificial Sequence
  Description of Artificial Sequence: Synthetic oligonucleotide
  Target: SCNA; (-) strand; PAM type: YTN; PAM sequence: CTC
tttatctcttactttgtcaa

SEQ ID NO: 43493 - DNA, 20 bp, Artificial Sequence
  Description of Artificial Sequence: Synthetic oligonucleotide
  Target: SCNA; (-) strand; PAM type: YTN; PAM sequence: CTA
aaatatgaaagcagactctt

SEQ ID NO: 43494 - DNA, 20 bp, Artificial Sequence
  Description of Artificial Sequence: Synthetic oligonucleotide
  Target: SCNA; (-) strand; PAM type: YTN; PAM sequence: TTC
taaaatatgaaagcagactc

SEQ ID NO: 43495 - DNA, 20 bp, Artificial Sequence
  Description of Artificial Sequence: Synthetic oligonucleotide
  Target: SCNA; (-) strand; PAM type: YTN; PAM sequence: TTT
ctaaaatatgaaagcagact

SEQ ID NO: 43496 - DNA, 20 bp, Artificial Sequence
  Description of Artificial Sequence: Synthetic oligonucleotide
  Target: SCNA; (-) strand; PAM type: YTN; PAM sequence: TTT
tctaaaatatgaaagcagac

SEQ ID NO: 43497 - DNA, 20 bp, Artificial Sequence
  Description of Artificial Sequence: Synthetic oligonucleotide
  Target: SCNA; (-) strand; PAM type: YTN; PAM sequence: TTT
ttctaaaatatgaaagcaga

SEQ ID NO: 43498 - DNA, 20 bp, Artificial Sequence
  Description of Artificial Sequence: Synthetic oligonucleotide
  Target: SCNA; (-) strand; PAM type: YTN; PAM sequence: CTG
ggtttttctaaaatatgaaa

SEQ ID NO: 43499 - DNA, 20 bp, Artificial Sequence
  Description of Artificial Sequence: Synthetic oligonucleotide
  Target: SCNA; (-) strand; PAM type: YTN; PAM sequence: TTC
cctgggtttttctaaaatat

SEQ ID NO: 43500 - DNA, 20 bp, Artificial Sequence
  Description of Artificial Sequence: Synthetic oligonucleotide
  Target: SCNA; (-) strand; PAM type: YTN; PAM sequence: TTC
agcattccctgggtttttct

SEQ ID NO: 43501 - DNA, 20 bp, Artificial Sequence
  Description of Artificial Sequence: Synthetic oligonucleotide
  Target: SCNA; (-) strand; PAM type: YTN; PAM sequence: TTT
cagcattccctgggtttttc

SEQ ID NO: 43502 - DNA, 20 bp, Artificial Sequence
  Description of Artificial Sequence: Synthetic oligonucleotide
  Target: SCNA; (-) strand; PAM type: YTN; PAM sequence: TTT
tcagcattccctgggttttt

SEQ ID NO: 43503 - DNA, 20 bp, Artificial Sequence
  Description of Artificial Sequence: Synthetic oligonucleotide
  Target: SCNA; (-) strand; PAM type: YTN; PAM sequence: CTT
ttcagcattccctgggtttt

SEQ ID NO: 43504 - DNA, 20 bp, Artificial Sequence
  Description of Artificial Sequence: Synthetic oligonucleotide
  Target: SCNA; (-) strand; PAM type: YTN; PAM sequence: CTA
tgggcttttcagcattccct

SEQ ID NO: 43505 - DNA, 20 bp, Artificial Sequence
  Description of Artificial Sequence: Synthetic oligonucleotide
  Target: SCNA; (-) strand; PAM type: YTN; PAM sequence: TTC
ctatgggcttttcagcattc

SEQ ID NO: 43506 - DNA, 20 bp, Artificial Sequence
  Description of Artificial Sequence: Synthetic oligonucleotide
  Target: SCNA; (-) strand; PAM type: YTN; PAM sequence: TTT
cctatgggcttttcagcatt

SEQ ID NO: 43507 - DNA, 20 bp, Artificial Sequence
  Description of Artificial Sequence: Synthetic oligonucleotide
  Target: SCNA; (-) strand; PAM type: YTN; PAM sequence: CTT
tcctatgggcttttcagcat

SEQ ID NO: 43508 - DNA, 20 bp, Artificial Sequence
  Description of Artificial Sequence: Synthetic oligonucleotide
  Target: SCNA; (-) strand; PAM type: YTN; PAM sequence: TTC
tttcctatgggcttttcagc

SEQ ID NO: 43509 - DNA, 20 bp, Artificial Sequence
  Description of Artificial Sequence: Synthetic oligonucleotide
  Target: SCNA; (-) strand; PAM type: YTN; PAM sequence: CTT
ctttcctatgggcttttcag

SEQ ID NO: 43510 - DNA, 20 bp, Artificial Sequence
  Description of Artificial Sequence: Synthetic oligonucleotide
  Target: SCNA; (-) strand; PAM type: YTN; PAM sequence: TTC
ttctttcctatgggcttttc

SEQ ID NO: 43511 - DNA, 20 bp, Artificial Sequence
  Description of Artificial Sequence: Synthetic oligonucleotide
  Target: SCNA; (-) strand; PAM type: YTN; PAM sequence: TTT
cttctttcctatgggctttt

SEQ ID NO: 43512 - DNA, 20 bp, Artificial Sequence
  Description of Artificial Sequence: Synthetic oligonucleotide
  Target: SCNA; (-) strand; PAM type: YTN; PAM sequence: TTG
acagcatatttcttctttcc

SEQ ID NO: 43513 - DNA, 20 bp, Artificial Sequence
  Description of Artificial Sequence: Synthetic oligonucleotide
  Target: SCNA; (-) strand; PAM type: YTN; PAM sequence: CTT
gacagcatatttcttctttc

SEQ ID NO: 43514 - DNA, 20 bp, Artificial Sequence
  Description of Artificial Sequence: Synthetic oligonucleotide
  Target: SCNA; (-) strand; PAM type: YTN; PAM sequence: CTA
acatcttgacagcatatttc

SEQ ID NO: 43515 - DNA, 20 bp, Artificial Sequence
  Description of Artificial Sequence: Synthetic oligonucleotide
  Target: SCNA; (-) strand; PAM type: YTN; PAM sequence: CTC
actaacatcttgacagcata

SEQ ID NO: 43516 - DNA, 20 bp, Artificial Sequence
  Description of Artificial Sequence: Synthetic oligonucleotide
  Target: SCNA; (-) strand; PAM type: YTN; PAM sequence: TTG
gctcactaacatcttgacag

SEQ ID NO: 43517 - DNA, 20 bp, Artificial Sequence
  Description of Artificial Sequence: Synthetic oligonucleotide
  Target: SCNA; (-) strand; PAM type: YTN; PAM sequence: CTT
ggctcactaacatcttgaca

SEQ ID NO: 43518 - DNA, 20 bp, Artificial Sequence
  Description of Artificial Sequence: Synthetic oligonucleotide
  Target: SCNA; (-) strand; PAM type: YTN; PAM sequence: CTG
ggccttggctcactaacatc

SEQ ID NO: 43519 - DNA, 20 bp, Artificial Sequence
  Description of Artificial Sequence: Synthetic oligonucleotide
  Target: SCNA; (-) strand; PAM type: YTN; PAM sequence: CTC
ctgggccttggctcactaac

SEQ ID NO: 43520 - DNA, 20 bp, Artificial Sequence
  Description of Artificial Sequence: Synthetic oligonucleotide
  Target: SCNA; (-) strand; PAM type: YTN; PAM sequence: TTG
agagcaaactcctgggcctt

SEQ ID NO: 43521 - DNA, 20 bp, Artificial Sequence
  Description of Artificial Sequence: Synthetic oligonucleotide
  Target: SCNA; (-) strand; PAM type: YTN; PAM sequence: TTT
gagagcaaactcctgggcct

SEQ ID NO: 43522 - DNA, 20 bp, Artificial Sequence
  Description of Artificial Sequence: Synthetic oligonucleotide
  Target: SCNA; (-) strand; PAM type: YTN; PAM sequence: TTT
tgagagcaaactcctgggcc

SEQ ID NO: 43523 - DNA, 20 bp, Artificial Sequence
  Description of Artificial Sequence: Synthetic oligonucleotide
  Target: SCNA; (-) strand; PAM type: YTN; PAM sequence: TTT
ttgagagcaaactcctgggc

SEQ ID NO: 43524 - DNA, 20 bp, Artificial Sequence
  Description of Artificial Sequence: Synthetic oligonucleotide
  Target: SCNA; (-) strand; PAM type: YTN; PAM sequence: CTG
tttttgagagcaaactcctg

SEQ ID NO: 43525 - DNA, 20 bp, Artificial Sequence
  Description of Artificial Sequence: Synthetic oligonucleotide
  Target: SCNA; (-) strand; PAM type: YTN; PAM sequence: CTC
atctgtttttgagagcaaac

SEQ ID NO: 43526 - DNA, 20 bp, Artificial Sequence
  Description of Artificial Sequence: Synthetic oligonucleotide
  Target: SCNA; (-) strand; PAM type: YTN; PAM sequence: TTC
tcatctgtttttgagagcaa

SEQ ID NO: 43527 - DNA, 20 bp, Artificial Sequence
  Description of Artificial Sequence: Synthetic oligonucleotide
  Target: SCNA; (-) strand; PAM type: YTN; PAM sequence: TTT
ctcatctgtttttgagagca

SEQ ID NO: 43528 - DNA, 20 bp, Artificial Sequence
  Description of Artificial Sequence: Synthetic oligonucleotide
  Target: SCNA; (-) strand; PAM type: YTN; PAM sequence: TTA
agtccagtttctcatctgtt

SEQ ID NO: 43529 - DNA, 20 bp, Artificial Sequence
  Description of Artificial Sequence: Synthetic oligonucleotide
  Target: SCNA; (-) strand; PAM type: YTN; PAM sequence: TTT
aagtccagtttctcatctgt

SEQ ID NO: 43530 - DNA, 20 bp, Artificial Sequence
  Description of Artificial Sequence: Synthetic oligonucleotide
  Target: SCNA; (-) strand; PAM type: YTN; PAM sequence: TTT
taagtccagtttctcatctg

SEQ ID NO: 43531 - DNA, 20 bp, Artificial Sequence
  Description of Artificial Sequence: Synthetic oligonucleotide
  Target: SCNA; (-) strand; PAM type: YTN; PAM sequence: CTC
ccagtcagattttaagtcca

SEQ ID NO: 43532 - DNA, 20 bp, Artificial Sequence
  Description of Artificial Sequence: Synthetic oligonucleotide
  Target: SCNA; (-) strand; PAM type: YTN; PAM sequence: TTC
tcccagtcagattttaagtc

SEQ ID NO: 43533 - DNA, 20 bp, Artificial Sequence
  Description of Artificial Sequence: Synthetic oligonucleotide
  Target: SCNA; (-) strand; PAM type: YTN; PAM sequence: TTT
ctcccagtcagattttaagt

SEQ ID NO: 43534 - DNA, 20 bp, Artificial Sequence
  Description of Artificial Sequence: Synthetic oligonucleotide
  Target: SCNA; (-) strand; PAM type: YTN; PAM sequence: CTT
tctcccagtcagattttaag

SEQ ID NO: 43535 - DNA, 20 bp, Artificial Sequence
  Description of Artificial Sequence: Synthetic oligonucleotide
  Target: SCNA; (-) strand; PAM type: YTN; PAM sequence: CTA
aagtactttctcccagtcag

SEQ ID NO: 43536 - DNA, 20 bp, Artificial Sequence
  Description of Artificial Sequence: Synthetic oligonucleotide
  Target: SCNA; (-) strand; PAM type: YTN; PAM sequence: TTG
cctaaagtactttctcccag

SEQ ID NO: 43537 - DNA, 20 bp, Artificial Sequence
  Description of Artificial Sequence: Synthetic oligonucleotide
  Target: SCNA; (-) strand; PAM type: YTN; PAM sequence: TTT
gcctaaagtactttctccca

SEQ ID NO: 43538 - DNA, 20 bp, Artificial Sequence
  Description of Artificial Sequence: Synthetic oligonucleotide
  Target: SCNA; (-) strand; PAM type: YTN; PAM sequence: TTT
tgcctaaagtactttctccc

SEQ ID NO: 43539 - DNA, 20 bp, Artificial Sequence
  Description of Artificial Sequence: Synthetic oligonucleotide
  Target: SCNA; (-) strand; PAM type: YTN; PAM sequence: TTG
ttttgcctaaagtactttct

SEQ ID NO: 43540 - DNA, 20 bp, Artificial Sequence
  Description of Artificial Sequence: Synthetic oligonucleotide
  Target: SCNA; (-) strand; PAM type: YTN; PAM sequence: TTT
gttttgcctaaagtactttc

SEQ ID NO: 43541 - DNA, 20 bp, Artificial Sequence
  Description of Artificial Sequence: Synthetic oligonucleotide
  Target: SCNA; (-) strand; PAM type: YTN; PAM sequence: TTG
tatatgagtagtttgttttg

SEQ ID NO: 43542 - DNA, 20 bp, Artificial Sequence
  Description of Artificial Sequence: Synthetic oligonucleotide
  Target: SCNA; (-) strand; PAM type: YTN; PAM sequence: TTT
gtatatgagtagtttgtttt

SEQ ID NO: 43543 - DNA, 20 bp, Artificial Sequence
  Description of Artificial Sequence: Synthetic oligonucleotide
  Target: SCNA; (-) strand; PAM type: YTN; PAM sequence: TTT
tgtatatgagtagtttgttt

SEQ ID NO: 43544 - DNA, 20 bp, Artificial Sequence
  Description of Artificial Sequence: Synthetic oligonucleotide
  Target: SCNA; (-) strand; PAM type: YTN; PAM sequence: CTT
ttgtatatgagtagtttgtt

SEQ ID NO: 43545 - DNA, 20 bp, Artificial Sequence
  Description of Artificial Sequence: Synthetic oligonucleotide
  Target: SCNA; (-) strand; PAM type: YTN; PAM sequence: TTC
agagcccatccttttgtata

SEQ ID NO: 43546 - DNA, 20 bp, Artificial Sequence
  Description of Artificial Sequence: Synthetic oligonucleotide
  Target: SCNA; (-) strand; PAM type: YTN; PAM sequence: CTT
cagagcccatccttttgtat

SEQ ID NO: 43547 - DNA, 20 bp, Artificial Sequence
  Description of Artificial Sequence: Synthetic oligonucleotide
  Target: SCNA; (-) strand; PAM type: YTN; PAM sequence: CTG
cttcagagcccatccttttg

SEQ ID NO: 43548 - DNA, 20 bp, Artificial Sequence
  Description of Artificial Sequence: Synthetic oligonucleotide
  Target: SCNA; (-) strand; PAM type: YTN; PAM sequence: CTC
tgcttcagagcccatccttt

SEQ ID NO: 43549 - DNA, 20 bp, Artificial Sequence
  Description of Artificial Sequence: Synthetic oligonucleotide
  Target: SCNA; (-) strand; PAM type: YTN; PAM sequence: CTC
tctgcttcagagcccatcct

SEQ ID NO: 43550 - DNA, 20 bp, Artificial Sequence
  Description of Artificial Sequence: Synthetic oligonucleotide
  Target: SCNA; (-) strand; PAM type: YTN; PAM sequence: TTC
actctctgcttcagagccca

SEQ ID NO: 43551 - DNA, 20 bp, Artificial Sequence
  Description of Artificial Sequence: Synthetic oligonucleotide
  Target: SCNA; (-) strand; PAM type: YTN; PAM sequence: CTT
cactctctgcttcagagccc

SEQ ID NO: 43552 - DNA, 20 bp, Artificial Sequence
  Description of Artificial Sequence: Synthetic oligonucleotide
  Target: SCNA; (-) strand; PAM type: YTN; PAM sequence: TTG
ccttcactctctgcttcaga

SEQ ID NO: 43553 - DNA, 20 bp, Artificial Sequence
  Description of Artificial Sequence: Synthetic oligonucleotide
  Target: SCNA; (-) strand; PAM type: YTN; PAM sequence: CTA
ttgccttcactctctgcttc

SEQ ID NO: 43554 - DNA, 20 bp, Artificial Sequence
  Description of Artificial Sequence: Synthetic oligonucleotide
  Target: SCNA; (-) strand; PAM type: YTN; PAM sequence: TTG
aagctattgccttcactctc

SEQ ID NO: 43555 - DNA, 20 bp, Artificial Sequence
  Description of Artificial Sequence: Synthetic oligonucleotide
  Target: SCNA; (-) strand; PAM type: YTN; PAM sequence: CTT
gaagctattgccttcactct

SEQ ID NO: 43556 - DNA, 20 bp, Artificial Sequence
  Description of Artificial Sequence: Synthetic oligonucleotide
  Target: SCNA; (-) strand; PAM type: YTN; PAM sequence: TTA
aatccaccgatcttgaagct

SEQ ID NO: 43557 - DNA, 20 bp, Artificial Sequence
  Description of Artificial Sequence: Synthetic oligonucleotide
  Target: SCNA; (-) strand; PAM type: YTN; PAM sequence: TTT
aaatccaccgatcttgaagc

SEQ ID NO: 43558 - DNA, 20 bp, Artificial Sequence
  Description of Artificial Sequence: Synthetic oligonucleotide
  Target: SCNA; (-) strand; PAM type: YTN; PAM sequence: TTT
taaatccaccgatcttgaag

SEQ ID NO: 43559 - DNA, 20 bp, Artificial Sequence
  Description of Artificial Sequence: Synthetic oligonucleotide
  Target: SCNA; (-) strand; PAM type: YTN; PAM sequence: CTA
ggttttaaatccaccgatct

SEQ ID NO: 43560 - DNA, 20 bp, Artificial Sequence
  Description of Artificial Sequence: Synthetic oligonucleotide
  Target: SCNA; (-) strand; PAM type: YTN; PAM sequence: TTC
taggttttaaatccaccgat

SEQ ID NO: 43561 - DNA, 20 bp, Artificial Sequence
  Description of Artificial Sequence: Synthetic oligonucleotide
  Target: SCNA; (-) strand; PAM type: YTN; PAM sequence: CTT
ctaggttttaaatccaccga

SEQ ID NO: 43562 - DNA, 20 bp, Artificial Sequence
  Description of Artificial Sequence: Synthetic oligonucleotide
  Target: SCNA; (-) strand; PAM type: YTN; PAM sequence: TTA
gagaagatacttctaggttt

SEQ ID NO: 43563 - DNA, 20 bp, Artificial Sequence
  Description of Artificial Sequence: Synthetic oligonucleotide
  Target: SCNA; (-) strand; PAM type: YTN; PAM sequence: TTT
agagaagatacttctaggtt

SEQ ID NO: 43564 - DNA, 20 bp, Artificial Sequence
  Description of Artificial Sequence: Synthetic oligonucleotide
  Target: SCNA; (-) strand; PAM type: YTN; PAM sequence: TTT
tagagaagatacttctaggt

SEQ ID NO: 43565 - DNA, 20 bp, Artificial Sequence
  Description of Artificial Sequence: Synthetic oligonucleotide
  Target: SCNA; (-) strand; PAM type: YTN; PAM sequence: CTT
ttagagaagatacttctagg

SEQ ID NO: 43566 - DNA, 20 bp, Artificial Sequence
  Description of Artificial Sequence: Synthetic oligonucleotide
  Target: SCNA; (-) strand; PAM type: YTN; PAM sequence: TTA
tcttttagagaagatacttc

SEQ ID NO: 43567 - DNA, 20 bp, Artificial Sequence
  Description of Artificial Sequence: Synthetic oligonucleotide
  Target: SCNA; (-) strand; PAM type: YTN; PAM sequence: TTT
atcttttagagaagatactt

SEQ ID NO: 43568 - DNA, 20 bp, Artificial Sequence
  Description of Artificial Sequence: Synthetic oligonucleotide
  Target: SCNA; (-) strand; PAM type: YTN; PAM sequence: TTT
tatcttttagagaagatact

SEQ ID NO: 43569 - DNA, 20 bp, Artificial Sequence
  Description of Artificial Sequence: Synthetic oligonucleotide
  Target: SCNA; (-) strand; PAM type: YTN; PAM sequence: CTT
ttatcttttagagaagatac

SEQ ID NO: 43570 - DNA, 20 bp, Artificial Sequence
  Description of Artificial Sequence: Synthetic oligonucleotide
  Target: SCNA; (-) strand; PAM type: YTN; PAM sequence: TTA
atcttttatcttttagagaa

SEQ ID NO: 43571 - DNA, 20 bp, Artificial Sequence
  Description of Artificial Sequence: Synthetic oligonucleotide
  Target: SCNA; (-) strand; PAM type: YTN; PAM sequence: CTT
aatcttttatcttttagaga

SEQ ID NO: 43572 - DNA, 20 bp, Artificial Sequence
  Description of Artificial Sequence: Synthetic oligonucleotide
  Target: SCNA; (-) strand; PAM type: YTN; PAM sequence: TTC
ttaatcttttatcttttaga

SEQ ID NO: 43573 - DNA, 20 bp, Artificial Sequence
  Description of Artificial Sequence: Synthetic oligonucleotide
  Target: SCNA; (-) strand; PAM type: YTN; PAM sequence: TTT
cttaatcttttatcttttag

SEQ ID NO: 43574 - DNA, 20 bp, Artificial Sequence
  Description of Artificial Sequence: Synthetic oligonucleotide
  Target: SCNA; (-) strand; PAM type: YTN; PAM sequence: CTT
tcttaatcttttatctttta

SEQ ID NO: 43575 - DNA, 20 bp, Artificial Sequence
  Description of Artificial Sequence: Synthetic oligonucleotide
  Target: SCNA; (-) strand; PAM type: YTN; PAM sequence: TTA
aagcctttcttaatctttta

SEQ ID NO: 43576 - DNA, 20 bp, Artificial Sequence
  Description of Artificial Sequence: Synthetic oligonucleotide
  Target: SCNA; (-) strand; PAM type: YTN; PAM sequence: CTT
aaagcctttcttaatctttt

SEQ ID NO: 43577 - DNA, 20 bp, Artificial Sequence
  Description of Artificial Sequence: Synthetic oligonucleotide
  Target: SCNA; (-) strand; PAM type: YTN; PAM sequence: CTA
tcttaaagcctttcttaatc

SEQ ID NO: 43578 - DNA, 20 bp, Artificial Sequence
  Description of Artificial Sequence: Synthetic oligonucleotide
  Target: SCNA; (-) strand; PAM type: YTN; PAM sequence: CTA
gctatcttaaagcctttctt

SEQ ID NO: 43579 - DNA, 20 bp, Artificial Sequence
  Description of Artificial Sequence: Synthetic oligonucleotide
  Target: SCNA; (-) strand; PAM type: YTN; PAM sequence: CTC
tagctatcttaaagcctttc

SEQ ID NO: 43580 - DNA, 20 bp, Artificial Sequence
  Description of Artificial Sequence: Synthetic oligonucleotide
  Target: SCNA; (-) strand; PAM type: YTN; PAM sequence: CTG
ctctagctatcttaaagcct

SEQ ID NO: 43581 - DNA, 20 bp, Artificial Sequence
  Description of Artificial Sequence: Synthetic oligonucleotide
  Target: SCNA; (-) strand; PAM type: YTN; PAM sequence: TTC
ctgctctagctatcttaaag

SEQ ID NO: 43582 - DNA, 20 bp, Artificial Sequence
  Description of Artificial Sequence: Synthetic oligonucleotide
  Target: SCNA; (-) strand; PAM type: YTN; PAM sequence: TTA
ttcctgctctagctatctta

SEQ ID NO: 43583 - DNA, 20 bp, Artificial Sequence
  Description of Artificial Sequence: Synthetic oligonucleotide
  Target: SCNA; (-) strand; PAM type: YTN; PAM sequence: TTT
attcctgctctagctatctt

SEQ ID NO: 43584 - DNA, 20 bp, Artificial Sequence
  Description of Artificial Sequence: Synthetic oligonucleotide
  Target: SCNA; (-) strand; PAM type: YTN; PAM sequence: CTT
tattcctgctctagctatct

SEQ ID NO: 43585 - DNA, 20 bp, Artificial Sequence
  Description of Artificial Sequence: Synthetic oligonucleotide
  Target: SCNA; (-) strand; PAM type: YTN; PAM sequence: CTA
ctttattcctgctctagcta

SEQ ID NO: 43586 - DNA, 20 bp, Artificial Sequence
  Description of Artificial Sequence: Synthetic oligonucleotide
  Target: SCNA; (-) strand; PAM type: YTN; PAM sequence: TTG
actactttattcctgctcta

SEQ ID NO: 43587 - DNA, 20 bp, Artificial Sequence
  Description of Artificial Sequence: Synthetic oligonucleotide
  Target: SCNA; (-) strand; PAM type: YTN; PAM sequence: CTT
gactactttattcctgctct

SEQ ID NO: 43588 - DNA, 20 bp, Artificial Sequence
  Description of Artificial Sequence: Synthetic oligonucleotide
  Target: SCNA; (-) strand; PAM type: YTN; PAM sequence: TTC
acttgactactttattcctg

SEQ ID NO: 43589 - DNA, 20 bp, Artificial Sequence
  Description of Artificial Sequence: Synthetic oligonucleotide
  Target: SCNA; (-) strand; PAM type: YTN; PAM sequence: TTG
tggtatcacattcacttgac

SEQ ID NO: 43590 - DNA, 20 bp, Artificial Sequence
  Description of Artificial Sequence: Synthetic oligonucleotide
  Target: SCNA; (-) strand; PAM type: YTN; PAM sequence: CTT
gtggtatcacattcacttga

SEQ ID NO: 43591 - DNA, 20 bp, Artificial Sequence
  Description of Artificial Sequence: Synthetic oligonucleotide
  Target: SCNA; (-) strand; PAM type: YTN; PAM sequence: CTG
gaaccttgtggtatcacatt

SEQ ID NO: 43592 - DNA, 20 bp, Artificial Sequence
  Description of Artificial Sequence: Synthetic oligonucleotide
  Target: SCNA; (-) strand; PAM type: YTN; PAM sequence: TTC
tggaaccttgtggtatcaca

SEQ ID NO: 43593 - DNA, 20 bp, Artificial Sequence
  Description of Artificial Sequence: Synthetic oligonucleotide
  Target: SCNA; (-) strand; PAM type: YTN; PAM sequence: CTT
ctggaaccttgtggtatcac

SEQ ID NO: 43594 - DNA, 20 bp, Artificial Sequence
  Description of Artificial Sequence: Synthetic oligonucleotide
  Target: SCNA; (-) strand; PAM type: YTN; PAM sequence: TTA
gtatggaaacttctggaacc

SEQ ID NO: 43595 - DNA, 20 bp, Artificial Sequence
  Description of Artificial Sequence: Synthetic oligonucleotide
  Target: SCNA; (-) strand; PAM type: YTN; PAM sequence: CTA
ttagtatggaaacttctgga

SEQ ID NO: 43596 - DNA, 20 bp, Artificial Sequence
  Description of Artificial Sequence: Synthetic oligonucleotide
  Target: SCNA; (-) strand; PAM type: YTN; PAM sequence: TTC
tattagtatggaaacttctg

SEQ ID NO: 43597 - DNA, 20 bp, Artificial Sequence
  Description of Artificial Sequence: Synthetic oligonucleotide
  Target: SCNA; (-) strand; PAM type: YTN; PAM sequence: TTT
ctattagtatggaaacttct

SEQ ID NO: 43598 - DNA, 20 bp, Artificial Sequence
  Description of Artificial Sequence: Synthetic oligonucleotide
  Target: SCNA; (-) strand; PAM type: YTN; PAM sequence: CTG
tttctattagtatggaaact

SEQ ID NO: 43599 - DNA, 20 bp, Artificial Sequence
  Description of Artificial Sequence: Synthetic oligonucleotide
  Target: SCNA; (-) strand; PAM type: YTN; PAM sequence: TTA
gtatctgtttctattagtat

SEQ ID NO: 43600 - DNA, 20 bp, Artificial Sequence
  Description of Artificial Sequence: Synthetic oligonucleotide
  Target: SCNA; (-) strand; PAM type: YTN; PAM sequence: CTT
agtatctgtttctattagta

SEQ ID NO: 43601 - DNA, 20 bp, Artificial Sequence
  Description of Artificial Sequence: Synthetic oligonucleotide
  Target: SCNA; (-) strand; PAM type: YTN; PAM sequence: TTC
acttagtatctgtttctatt

SEQ ID NO: 43602 - DNA, 20 bp, Artificial Sequence
  Description of Artificial Sequence: Synthetic oligonucleotide
  Target: SCNA; (-) strand; PAM type: YTN; PAM sequence: CTT
cacttagtatctgtttctat

SEQ ID NO: 43603 - DNA, 20 bp, Artificial Sequence
  Description of Artificial Sequence: Synthetic oligonucleotide
  Target: SCNA; (-) strand; PAM type: YTN; PAM sequence: CTC
aaacttcacttagtatctgt

SEQ ID NO: 43604 - DNA, 20 bp, Artificial Sequence
  Description of Artificial Sequence: Synthetic oligonucleotide
  Target: SCNA; (-) strand; PAM type: YTN; PAM sequence: TTG
tgagggcccctcaaacttca

SEQ ID NO: 43605 - DNA, 20 bp, Artificial Sequence
  Description of Artificial Sequence: Synthetic oligonucleotide
  Target: SCNA; (-) strand; PAM type: YTN; PAM sequence: CTA
tccagattgtgagggcccct

SEQ ID NO: 43606 - DNA, 20 bp, Artificial Sequence
  Description of Artificial Sequence: Synthetic oligonucleotide
  Target: SCNA; (-) strand; PAM type: YTN; PAM sequence: TTC
tatccagattgtgagggccc

SEQ ID NO: 43607 - DNA, 20 bp, Artificial Sequence
  Description of Artificial Sequence: Synthetic oligonucleotide
  Target: SCNA; (-) strand; PAM type: YTN; PAM sequence: TTT
ctatccagattgtgagggcc

SEQ ID NO: 43608 - DNA, 20 bp, Artificial Sequence
  Description of Artificial Sequence: Synthetic oligonucleotide
  Target: SCNA; (-) strand; PAM type: YTN; PAM sequence: TTT
tctatccagattgtgagggc

SEQ ID NO: 43609 - DNA, 20 bp, Artificial Sequence
  Description of Artificial Sequence: Synthetic oligonucleotide
  Target: SCNA; (-) strand; PAM type: YTN; PAM sequence: TTG
aagagttttctatccagatt

SEQ ID NO: 43610 - DNA, 20 bp, Artificial Sequence
  Description of Artificial Sequence: Synthetic oligonucleotide
  Target: SCNA; (-) strand; PAM type: YTN; PAM sequence: CTT
gaagagttttctatccagat

SEQ ID NO: 43611 - DNA, 20 bp, Artificial Sequence
  Description of Artificial Sequence: Synthetic oligonucleotide
  Target: SCNA; (-) strand; PAM type: YTN; PAM sequence: CTA
cttgaagagttttctatcca

SEQ ID NO: 43612 - DNA, 20 bp, Artificial Sequence
  Description of Artificial Sequence: Synthetic oligonucleotide
  Target: SCNA; (-) strand; PAM type: YTN; PAM sequence: TTG
agatctacttgaagagtttt

SEQ ID NO: 43613 - DNA, 20 bp, Artificial Sequence
  Description of Artificial Sequence: Synthetic oligonucleotide
  Target: SCNA; (-) strand; PAM type: YTN; PAM sequence: CTG
aaggttgagatctacttgaa

SEQ ID NO: 43614 - DNA, 20 bp, Artificial Sequence
  Description of Artificial Sequence: Synthetic oligonucleotide
  Target: SCNA; (-) strand; PAM type: YTN; PAM sequence: TTC
cagcctgaaggttgagatct

SEQ ID NO: 43615 - DNA, 20 bp, Artificial Sequence
  Description of Artificial Sequence: Synthetic oligonucleotide
  Target: SCNA; (-) strand; PAM type: YTN; PAM sequence: CTA
agcaaagatattccagcctg

SEQ ID NO: 43616 - DNA, 20 bp, Artificial Sequence
  Description of Artificial Sequence: Synthetic oligonucleotide
  Target: SCNA; (-) strand; PAM type: YTN; PAM sequence: CTG
ggatagctaagcaaagatat

SEQ ID NO: 43617 - DNA, 20 bp, Artificial Sequence
  Description of Artificial Sequence: Synthetic oligonucleotide
  Target: SCNA; (-) strand; PAM type: YTN; PAM sequence: CTG
gctgggatagctaagcaaag

SEQ ID NO: 43618 - DNA, 20 bp, Artificial Sequence
  Description of Artificial Sequence: Synthetic oligonucleotide
  Target: SCNA; (-) strand; PAM type: YTN; PAM sequence: CTC
tggctgggatagctaagcaa

SEQ ID NO: 43619 - DNA, 20 bp, Artificial Sequence
  Description of Artificial Sequence: Synthetic oligonucleotide
  Target: SCNA; (-) strand; PAM type: YTN; PAM sequence: CTA
tggtcctctggctgggatag

SEQ ID NO: 43620 - DNA, 20 bp, Artificial Sequence
  Description of Artificial Sequence: Synthetic oligonucleotide
  Target: SCNA; (-) strand; PAM type: YTN; PAM sequence: TTG
aaatcaaccactatggtcct

SEQ ID NO: 43621 - DNA, 20 bp, Artificial Sequence
  Description of Artificial Sequence: Synthetic oligonucleotide
  Target: SCNA; (-) strand; PAM type: YTN; PAM sequence: TTT
gaaatcaaccactatggtcc

SEQ ID NO: 43622 - DNA, 20 bp, Artificial Sequence
  Description of Artificial Sequence: Synthetic oligonucleotide
  Target: SCNA; (-) strand; PAM type: YTN; PAM sequence: TTT
tgaaatcaaccactatggtc

SEQ ID NO: 43623 - DNA, 20 bp, Artificial Sequence
  Description of Artificial Sequence: Synthetic oligonucleotide
  Target: SCNA; (-) strand; PAM type: YTN; PAM sequence: CTT
ttgaaatcaaccactatggt

SEQ ID NO: 43624 - DNA, 20 bp, Artificial Sequence
  Description of Artificial Sequence: Synthetic oligonucleotide
  Target: SCNA; (-) strand; PAM type: YTN; PAM sequence: CTC
cttttgaaatcaaccactat

SEQ ID NO: 43625 - DNA, 20 bp, Artificial Sequence
  Description of Artificial Sequence: Synthetic oligonucleotide
  Target: SCNA; (-) strand; PAM type: YTN; PAM sequence: TTG
caactccttttgaaatcaac

SEQ ID NO: 43626 - DNA, 20 bp, Artificial Sequence
  Description of Artificial Sequence: Synthetic oligonucleotide
  Target: SCNA; (-) strand; PAM type: YTN; PAM sequence: TTA
caagatagaataattgcaac

SEQ ID NO: 43627 - DNA, 20 bp, Artificial Sequence
  Description of Artificial Sequence: Synthetic oligonucleotide
  Target: SCNA; (-) strand; PAM type: YTN; PAM sequence: TTT
acaagatagaataattgcaa

SEQ ID NO: 43628 - DNA, 20 bp, Artificial Sequence
  Description of Artificial Sequence: Synthetic oligonucleotide
  Target: SCNA; (-) strand; PAM type: YTN; PAM sequence: TTA
acaatgagagaatttacaag

SEQ ID NO: 43629 - DNA, 20 bp, Artificial Sequence
  Description of Artificial Sequence: Synthetic oligonucleotide
  Target: SCNA; (-) strand; PAM type: YTN; PAM sequence: CTT
aacaatgagagaatttacaa

SEQ ID NO: 43630 - DNA, 20 bp, Artificial Sequence
  Description of Artificial Sequence: Synthetic oligonucleotide
  Target: SCNA; (-) strand; PAM type: YTN; PAM sequence: CTG
tgacaaaacttaacaatgag

SEQ ID NO: 43631 - DNA, 20 bp, Artificial Sequence
  Description of Artificial Sequence: Synthetic oligonucleotide
  Target: SCNA; (-) strand; PAM type: YTN; PAM sequence: CTG
aaagaaagtagcaacaacaa

SEQ ID NO: 43632 - DNA, 20 bp, Artificial Sequence
  Description of Artificial Sequence: Synthetic oligonucleotide
  Target: SCNA; (-) strand; PAM type: YTN; PAM sequence: CTA
ggtaactgaaagaaagtagc

SEQ ID NO: 43633 - DNA, 20 bp, Artificial Sequence
  Description of Artificial Sequence: Synthetic oligonucleotide
  Target: SCNA; (-) strand; PAM type: YTN; PAM sequence: TTC
taggtaactgaaagaaagta

SEQ ID NO: 43634 - DNA, 20 bp, Artificial Sequence
  Description of Artificial Sequence: Synthetic oligonucleotide
  Target: SCNA; (-) strand; PAM type: YTN; PAM sequence: TTT
ctaggtaactgaaagaaagt

SEQ ID NO: 43635 - DNA, 20 bp, Artificial Sequence
  Description of Artificial Sequence: Synthetic oligonucleotide
  Target: SCNA; (-) strand; PAM type: YTN; PAM sequence: TTT
tctaggtaactgaaagaaag

SEQ ID NO: 43636 - DNA, 20 bp, Artificial Sequence
  Description of Artificial Sequence: Synthetic oligonucleotide
  Target: SCNA; (-) strand; PAM type: YTN; PAM sequence: TTC
agagaaaacattttctaggt

SEQ ID NO: 43637 - DNA, 20 bp, Artificial Sequence
  Description of Artificial Sequence: Synthetic oligonucleotide
  Target: SCNA; (-) strand; PAM type: YTN; PAM sequence: TTT
cagagaaaacattttctagg

SEQ ID NO: 43638 - DNA, 20 bp, Artificial Sequence
  Description of Artificial Sequence: Synthetic oligonucleotide
  Target: SCNA; (-) strand; PAM type: YTN; PAM sequence: TTT
tcagagaaaacattttctag

SEQ ID NO: 43639 - DNA, 20 bp, Artificial Sequence
  Description of Artificial Sequence: Synthetic oligonucleotide
  Target: SCNA; (-) strand; PAM type: YTN; PAM sequence: TTG
aggcatggatagaggttttc

SEQ ID NO: 43640 - DNA, 20 bp, Artificial Sequence
  Description of Artificial Sequence: Synthetic oligonucleotide
  Target: SCNA; (-) strand; PAM type: YTN; PAM sequence: CTG
ttgaggcatggatagaggtt

SEQ ID NO: 43641 - DNA, 20 bp, Artificial Sequence
  Description of Artificial Sequence: Synthetic oligonucleotide
  Target: SCNA; (-) strand; PAM type: YTN; PAM sequence: CTC
cgatctgttgaggcatggat

SEQ ID NO: 43642 - DNA, 20 bp, Artificial Sequence
  Description of Artificial Sequence: Synthetic oligonucleotide
  Target: SCNA; (-) strand; PAM type: YTN; PAM sequence: TTA
tctccgatctgttgaggcat

SEQ ID NO: 43643 - DNA, 20 bp, Artificial Sequence
  Description of Artificial Sequence: Synthetic oligonucleotide
  Target: SCNA; (-) strand; PAM type: YTN; PAM sequence: TTT
atctccgatctgttgaggca

SEQ ID NO: 43644 - DNA, 20 bp, Artificial Sequence
  Description of Artificial Sequence: Synthetic oligonucleotide
  Target: SCNA; (-) strand; PAM type: YTN; PAM sequence: TTT
tatctccgatctgttgaggc

SEQ ID NO: 43645 - DNA, 20 bp, Artificial Sequence
  Description of Artificial Sequence: Synthetic oligonucleotide
  Target: SCNA; (-) strand; PAM type: YTN; PAM sequence: TTT
ttatctccgatctgttgagg

SEQ ID NO: 43646 - DNA, 20 bp, Artificial Sequence
  Description of Artificial Sequence: Synthetic oligonucleotide
  Target: SCNA; (-) strand; PAM type: YTN; PAM sequence: TTT
tttatctccgatctgttgag

SEQ ID NO: 43647 - DNA, 20 bp, Artificial Sequence
  Description of Artificial Sequence: Synthetic oligonucleotide
  Target: SCNA; (-) strand; PAM type: YTN; PAM sequence: CTT
ttttatctccgatctgttga

SEQ ID NO: 43648 - DNA, 20 bp, Artificial Sequence
  Description of Artificial Sequence: Synthetic oligonucleotide
  Target: SCNA; (-) strand; PAM type: YTN; PAM sequence: TTC
cttttttatctccgatctgt

SEQ ID NO: 43649 - DNA, 20 bp, Artificial Sequence
  Description of Artificial Sequence: Synthetic oligonucleotide
  Target: SCNA; (-) strand; PAM type: YTN; PAM sequence: TTG
taagatgattccttttttat

SEQ ID NO: 43650 - DNA, 20 bp, Artificial Sequence
  Description of Artificial Sequence: Synthetic oligonucleotide
  Target: SCNA; (-) strand; PAM type: YTN; PAM sequence: CTT
gtaagatgattcctttttta

SEQ ID NO: 43651 - DNA, 20 bp, Artificial Sequence
  Description of Artificial Sequence: Synthetic oligonucleotide
  Target: SCNA; (-) strand; PAM type: YTN; PAM sequence: TTG
ataatcttgtaagatgattc

SEQ ID NO: 43652 - DNA, 20 bp, Artificial Sequence
  Description of Artificial Sequence: Synthetic oligonucleotide
  Target: SCNA; (-) strand; PAM type: YTN; PAM sequence: CTT
gataatcttgtaagatgatt

SEQ ID NO: 43653 - DNA, 20 bp, Artificial Sequence
  Description of Artificial Sequence: Synthetic oligonucleotide
  Target: SCNA; (-) strand; PAM type: YTN; PAM sequence: TTC
ttgataatcttgtaagatga

SEQ ID NO: 43654 - DNA, 20 bp, Artificial Sequence
  Description of Artificial Sequence: Synthetic oligonucleotide
  Target: SCNA; (-) strand; PAM type: YTN; PAM sequence: TTT
cttgataatcttgtaagatg

SEQ ID NO: 43655 - DNA, 20 bp, Artificial Sequence
  Description of Artificial Sequence: Synthetic oligonucleotide
  Target: SCNA; (-) strand; PAM type: YTN; PAM sequence: CTT
tcttgataatcttgtaagat

SEQ ID NO: 43656 - DNA, 20 bp, Artificial Sequence
  Description of Artificial Sequence: Synthetic oligonucleotide
  Target: SCNA; (-) strand; PAM type: YTN; PAM sequence: TTA
tctttcttgataatcttgta

SEQ ID NO: 43657 - DNA, 20 bp, Artificial Sequence
  Description of Artificial Sequence: Synthetic oligonucleotide
  Target: SCNA; (-) strand; PAM type: YTN; PAM sequence: CTA
gcccattatctttcttgata

SEQ ID NO: 43658 - DNA, 20 bp, Artificial Sequence
  Description of Artificial Sequence: Synthetic oligonucleotide
  Target: SCNA; (-) strand; PAM type: YTN; PAM sequence: TTA
aggatacacctagcccatta

SEQ ID NO: 43659 - DNA, 20 bp, Artificial Sequence
  Description of Artificial Sequence: Synthetic oligonucleotide
  Target: SCNA; (-) strand; PAM type: YTN; PAM sequence: TTT
aaggatacacctagcccatt

SEQ ID NO: 43660 - DNA, 20 bp, Artificial Sequence
  Description of Artificial Sequence: Synthetic oligonucleotide
  Target: SCNA; (-) strand; PAM type: YTN; PAM sequence: TTT
taaggatacacctagcccat

SEQ ID NO: 43661 - DNA, 20 bp, Artificial Sequence
  Description of Artificial Sequence: Synthetic oligonucleotide
  Target: SCNA; (-) strand; PAM type: YTN; PAM sequence: CTT
ttaaggatacacctagccca

SEQ ID NO: 43662 - DNA, 20 bp, Artificial Sequence
  Description of Artificial Sequence: Synthetic oligonucleotide
  Target: SCNA; (-) strand; PAM type: YTN; PAM sequence: TTG
aatgaccttttaaggataca

SEQ ID NO: 43663 - DNA, 20 bp, Artificial Sequence
  Description of Artificial Sequence: Synthetic oligonucleotide
  Target: SCNA; (-) strand; PAM type: YTN; PAM sequence: TTT
gaatgaccttttaaggatac

SEQ ID NO: 43664 - DNA, 20 bp, Artificial Sequence
  Description of Artificial Sequence: Synthetic oligonucleotide
  Target: SCNA; (-) strand; PAM type: YTN; PAM sequence: TTC
atttgaatgaccttttaagg

SEQ ID NO: 43665 - DNA, 20 bp, Artificial Sequence
  Description of Artificial Sequence: Synthetic oligonucleotide
  Target: SCNA; (-) strand; PAM type: YTN; PAM sequence: TTT
catttgaatgaccttttaag

SEQ ID NO: 43666 - DNA, 20 bp, Artificial Sequence
  Description of Artificial Sequence: Synthetic oligonucleotide
  Target: SCNA; (-) strand; PAM type: YTN; PAM sequence: TTA
atatttcatttgaatgacct

SEQ ID NO: 43667 - DNA, 20 bp, Artificial Sequence
  Description of Artificial Sequence: Synthetic oligonucleotide
  Target: SCNA; (-) strand; PAM type: YTN; PAM sequence: TTT
aatatttcatttgaatgacc

SEQ ID NO: 43668 - DNA, 20 bp, Artificial Sequence
  Description of Artificial Sequence: Synthetic oligonucleotide
  Target: SCNA; (-) strand; PAM type: YTN; PAM sequence: TTT
taatatttcatttgaatgac

SEQ ID NO: 43669 - DNA, 20 bp, Artificial Sequence
  Description of Artificial Sequence: Synthetic oligonucleotide
  Target: SCNA; (-) strand; PAM type: YTN; PAM sequence: TTC
catgtccgaataacacagaa

SEQ ID NO: 43670 - DNA, 20 bp, Artificial Sequence
  Description of Artificial Sequence: Synthetic oligonucleotide
  Target: SCNA; (-) strand; PAM type: YTN; PAM sequence: TTA
ttccatgtccgaataacaca

SEQ ID NO: 43671 - DNA, 20 bp, Artificial Sequence
  Description of Artificial Sequence: Synthetic oligonucleotide
  Target: SCNA; (-) strand; PAM type: YTN; PAM sequence: TTG
ttattccatgtccgaataac

SEQ ID NO: 43672 - DNA, 20 bp, Artificial Sequence
  Description of Artificial Sequence: Synthetic oligonucleotide
  Target: SCNA; (-) strand; PAM type: YTN; PAM sequence: TTA
ttgttattccatgtccgaat

SEQ ID NO: 43673 - DNA, 20 bp, Artificial Sequence
  Description of Artificial Sequence: Synthetic oligonucleotide
  Target: SCNA; (-) strand; PAM type: YTN; PAM sequence: CTG
ttattgttattccatgtccg

SEQ ID NO: 43674 - DNA, 20 bp, Artificial Sequence
  Description of Artificial Sequence: Synthetic oligonucleotide
  Target: SCNA; (-) strand; PAM type: YTN; PAM sequence: TTA
actgttattgttattccatg

SEQ ID NO: 43675 - DNA, 20 bp, Artificial Sequence
  Description of Artificial Sequence: Synthetic oligonucleotide
  Target: SCNA; (-) strand; PAM type: YTN; PAM sequence: TTG
aaatggtaccaaatacagag

SEQ ID NO: 43676 - DNA, 20 bp, Artificial Sequence
  Description of Artificial Sequence: Synthetic oligonucleotide
  Target: SCNA; (-) strand; PAM type: YTN; PAM sequence: CTT
gaaatggtaccaaatacaga

SEQ ID NO: 43677 - DNA, 20 bp, Artificial Sequence
  Description of Artificial Sequence: Synthetic oligonucleotide
  Target: SCNA; (-) strand; PAM type: YTN; PAM sequence: CTC
ttgaaatggtaccaaataca

SEQ ID NO: 43678 - DNA, 20 bp, Artificial Sequence
  Description of Artificial Sequence: Synthetic oligonucleotide
  Target: SCNA; (-) strand; PAM type: YTN; PAM sequence: TTA
agatcaaataatgcatataa

SEQ ID NO: 43679 - DNA, 20 bp, Artificial Sequence
  Description of Artificial Sequence: Synthetic oligonucleotide
  Target: SCNA; (-) strand; PAM type: YTN; PAM sequence: TTT
aagatcaaataatgcatata

SEQ ID NO: 43680 - DNA, 20 bp, Artificial Sequence
  Description of Artificial Sequence: Synthetic oligonucleotide
  Target: SCNA; (-) strand; PAM type: YTN; PAM sequence: TTT
taagatcaaataatgcatat

SEQ ID NO: 43681 - DNA, 20 bp, Artificial Sequence
  Description of Artificial Sequence: Synthetic oligonucleotide
  Target: SCNA; (-) strand; PAM type: YTN; PAM sequence: TTT
ttaagatcaaataatgcata

SEQ ID NO: 43682 - DNA, 20 bp, Artificial Sequence
  Description of Artificial Sequence: Synthetic oligonucleotide
  Target: SCNA; (-) strand; PAM type: YTN; PAM sequence: TTT
tttaagatcaaataatgcat

SEQ ID NO: 43683 - DNA, 20 bp, Artificial Sequence
  Description of Artificial Sequence: Synthetic oligonucleotide
  Target: SCNA; (-) strand; PAM type: YTN; PAM sequence: TTG
ttttttaagatcaaataatg

SEQ ID NO: 43684 - DNA, 20 bp, Artificial Sequence
  Description of Artificial Sequence: Synthetic oligonucleotide
  Target: SCNA; (-) strand; PAM type: YTN; PAM sequence: CTC
aaagagttgttttttaagat

SEQ ID NO: 43685 - DNA, 20 bp, Artificial Sequence
  Description of Artificial Sequence: Synthetic oligonucleotide
  Target: SCNA; (-) strand; PAM type: YTN; PAM sequence: TTC
ctcaaagagttgttttttaa

SEQ ID NO: 43686 - DNA, 20 bp, Artificial Sequence
  Description of Artificial Sequence: Synthetic oligonucleotide
  Target: SCNA; (-) strand; PAM type: YTN; PAM sequence: CTT
cctcaaagagttgtttttta

SEQ ID NO: 43687 - DNA, 20 bp, Artificial Sequence
  Description of Artificial Sequence: Synthetic oligonucleotide
  Target: SCNA; (-) strand; PAM type: YTN; PAM sequence: CTG
ataaaatggagacagtagta

SEQ ID NO: 43688 - DNA, 20 bp, Artificial Sequence
  Description of Artificial Sequence: Synthetic oligonucleotide
  Target: SCNA; (-) strand; PAM type: YTN; PAM sequence: TTC
actgataaaatggagacagt

SEQ ID NO: 43689 - DNA, 20 bp, Artificial Sequence
  Description of Artificial Sequence: Synthetic oligonucleotide
  Target: SCNA; (-) strand; PAM type: YTN; PAM sequence: TTC
attcactgataaaatggaga

SEQ ID NO: 43690 - DNA, 20 bp, Artificial Sequence
  Description of Artificial Sequence: Synthetic oligonucleotide
  Target: SCNA; (-) strand; PAM type: YTN; PAM sequence: CTG
ttcattcactgataaaatgg

SEQ ID NO: 43691 - DNA, 20 bp, Artificial Sequence
  Description of Artificial Sequence: Synthetic oligonucleotide
  Target: SCNA; (-) strand; PAM type: YTN; PAM sequence: CTC
tgttcattcactgataaaat

SEQ ID NO: 43692 - DNA, 20 bp, Artificial Sequence
  Description of Artificial Sequence: Synthetic oligonucleotide
  Target: SCNA; (-) strand; PAM type: YTN; PAM sequence: CTA
tctctgttcattcactgata

SEQ ID NO: 43693 - DNA, 20 bp, Artificial Sequence
  Description of Artificial Sequence: Synthetic oligonucleotide
  Target: SCNA; (-) strand; PAM type: YTN; PAM sequence: TTC
ctatctctgttcattcactg

SEQ ID NO: 43694 - DNA, 20 bp, Artificial Sequence
  Description of Artificial Sequence: Synthetic oligonucleotide
  Target: SCNA; (-) strand; PAM type: YTN; PAM sequence: CTT
cctatctctgttcattcact

SEQ ID NO: 43695 - DNA, 20 bp, Artificial Sequence
  Description of Artificial Sequence: Synthetic oligonucleotide
  Target: SCNA; (-) strand; PAM type: YTN; PAM sequence: TTG
gagccagacttcctatctct

SEQ ID NO: 43696 - DNA, 20 bp, Artificial Sequence
  Description of Artificial Sequence: Synthetic oligonucleotide
  Target: SCNA; (-) strand; PAM type: YTN; PAM sequence: TTT
ggagccagacttcctatctc

SEQ ID NO: 43697 - DNA, 20 bp, Artificial Sequence
  Description of Artificial Sequence: Synthetic oligonucleotide
  Target: SCNA; (-) strand; PAM type: YTN; PAM sequence: CTT
tggagccagacttcctatct

SEQ ID NO: 43698 - DNA, 20 bp, Artificial Sequence
  Description of Artificial Sequence: Synthetic oligonucleotide
  Target: SCNA; (-) strand; PAM type: YTN; PAM sequence: TTA
agagtgtgggctttggagcc

SEQ ID NO: 43699 - DNA, 20 bp, Artificial Sequence
  Description of Artificial Sequence: Synthetic oligonucleotide
  Target: SCNA; (-) strand; PAM type: YTN; PAM sequence: TTG
cataatagttaagagtgtgg

SEQ ID NO: 43700 - DNA, 20 bp, Artificial Sequence
  Description of Artificial Sequence: Synthetic oligonucleotide
  Target: SCNA; (-) strand; PAM type: YTN; PAM sequence: CTA
atattgcataatagttaaga

SEQ ID NO: 43701 - DNA, 20 bp, Artificial Sequence
  Description of Artificial Sequence: Synthetic oligonucleotide
  Target: SCNA; (-) strand; PAM type: YTN; PAM sequence: TTG
acaactaatattgcataata

SEQ ID NO: 43702 - DNA, 20 bp, Artificial Sequence
  Description of Artificial Sequence: Synthetic oligonucleotide
  Target: SCNA; (-) strand; PAM type: YTN; PAM sequence: TTT
gacaactaatattgcataat

SEQ ID NO: 43703 - DNA, 20 bp, Artificial Sequence
  Description of Artificial Sequence: Synthetic oligonucleotide
  Target: SCNA; (-) strand; PAM type: YTN; PAM sequence: TTC
aagacatttgacaactaata

SEQ ID NO: 43704 - DNA, 20 bp, Artificial Sequence
  Description of Artificial Sequence: Synthetic oligonucleotide
  Target: SCNA; (-) strand; PAM type: YTN; PAM sequence: TTT
caagacatttgacaactaat

SEQ ID NO: 43705 - DNA, 20 bp, Artificial Sequence
  Description of Artificial Sequence: Synthetic oligonucleotide
  Target: SCNA; (-) strand; PAM type: YTN; PAM sequence: TTT
tcaagacatttgacaactaa

SEQ ID NO: 43706 - DNA, 20 bp, Artificial Sequence
  Description of Artificial Sequence: Synthetic oligonucleotide
  Target: SCNA; (-) strand; PAM type: YTN; PAM sequence: TTT
ttcaagacatttgacaacta

SEQ ID NO: 43707 - DNA, 20 bp, Artificial Sequence
  Description of Artificial Sequence: Synthetic oligonucleotide
  Target: SCNA; (-) strand; PAM type: YTN; PAM sequence: TTT
tttcaagacatttgacaact

SEQ ID NO: 43708 - DNA, 20 bp, Artificial Sequence
  Description of Artificial Sequence: Synthetic oligonucleotide
  Target: SCNA; (-) strand; PAM type: YTN; PAM sequence: TTT
ttttcaagacatttgacaac

SEQ ID NO: 43709 - DNA, 20 bp, Artificial Sequence
  Description of Artificial Sequence: Synthetic oligonucleotide
  Target: SCNA; (-) strand; PAM type: YTN; PAM sequence: TTT
tttttcaagacatttgacaa

SEQ ID NO: 43710 - DNA, 20 bp, Artificial Sequence
  Description of Artificial Sequence: Synthetic oligonucleotide
  Target: SCNA; (-) strand; PAM type: YTN; PAM sequence: TTT
ttttttcaagacatttgaca

SEQ ID NO: 43711 - DNA, 20 bp, Artificial Sequence
  Description of Artificial Sequence: Synthetic oligonucleotide
  Target: SCNA; (-) strand; PAM type: YTN; PAM sequence: TTA
cacagatttttttttcaaga

SEQ ID NO: 43712 - DNA, 20 bp, Artificial Sequence
  Description of Artificial Sequence: Synthetic oligonucleotide
  Target: SCNA; (-) strand; PAM type: YTN; PAM sequence: TTA
gtaattacacagattttttt

SEQ ID NO: 43713 - DNA, 20 bp, Artificial Sequence
  Description of Artificial Sequence: Synthetic oligonucleotide
  Target: SCNA; (-) strand; PAM type: YTN; PAM sequence: TTT
agtaattacacagatttttt

SEQ ID NO: 43714 - DNA, 20 bp, Artificial Sequence
  Description of Artificial Sequence: Synthetic oligonucleotide
  Target: SCNA; (-) strand; PAM type: YTN; PAM sequence: TTT
tagtaattacacagattttt

SEQ ID NO: 43715 - DNA, 20 bp, Artificial Sequence
  Description of Artificial Sequence: Synthetic oligonucleotide
  Target: SCNA; (-) strand; PAM type: YTN; PAM sequence: TTA
ataagtagcccagcgtaata

SEQ ID NO: 43716 - DNA, 20 bp, Artificial Sequence
  Description of Artificial Sequence: Synthetic oligonucleotide
  Target: SCNA; (-) strand; PAM type: YTN; PAM sequence: CTT
aataagtagcccagcgtaat

SEQ ID NO: 43717 - DNA, 20 bp, Artificial Sequence
  Description of Artificial Sequence: Synthetic oligonucleotide
  Target: SCNA; (-) strand; PAM type: YTN; PAM sequence: TTA
ccttaataagtagcccagcg

SEQ ID NO: 43718 - DNA, 20 bp, Artificial Sequence
  Description of Artificial Sequence: Synthetic oligonucleotide
  Target: SCNA; (-) strand; PAM type: YTN; PAM sequence: TTT
accttaataagtagcccagc

SEQ ID NO: 43719 - DNA, 20 bp, Artificial Sequence
  Description of Artificial Sequence: Synthetic oligonucleotide
  Target: SCNA; (-) strand; PAM type: YTN; PAM sequence: TTT
taccttaataagtagcccag

SEQ ID NO: 43720 - DNA, 20 bp, Artificial Sequence
  Description of Artificial Sequence: Synthetic oligonucleotide
  Target: SCNA; (-) strand; PAM type: YTN; PAM sequence: TTG
aaacgtaattttaccttaat

SEQ ID NO: 43721 - DNA, 20 bp, Artificial Sequence
  Description of Artificial Sequence: Synthetic oligonucleotide
  Target: SCNA; (-) strand; PAM type: YTN; PAM sequence: TTT
gaaacgtaattttaccttaa

SEQ ID NO: 43722 - DNA, 20 bp, Artificial Sequence
  Description of Artificial Sequence: Synthetic oligonucleotide
  Target: SCNA; (-) strand; PAM type: YTN; PAM sequence: TTT
tgaaacgtaattttacctta

SEQ ID NO: 43723 - DNA, 20 bp, Artificial Sequence
  Description of Artificial Sequence: Synthetic oligonucleotide
  Target: SCNA; (-) strand; PAM type: YTN; PAM sequence: TTT
ttgaaacgtaattttacctt

SEQ ID NO: 43724 - DNA, 20 bp, Artificial Sequence
  Description of Artificial Sequence: Synthetic oligonucleotide
  Target: SCNA; (-) strand; PAM type: YTN; PAM sequence: TTT
tttgaaacgtaattttacct

SEQ ID NO: 43725 - DNA, 20 bp, Artificial Sequence
  Description of Artificial Sequence: Synthetic oligonucleotide
  Target: SCNA; (-) strand; PAM type: YTN; PAM sequence: TTT
ttttgaaacgtaattttacc

SEQ ID NO: 43726 - DNA, 20 bp, Artificial Sequence
  Description of Artificial Sequence: Synthetic oligonucleotide
  Target: SCNA; (-) strand; PAM type: YTN; PAM sequence: TTA
atttttttgaaacgtaattt

SEQ ID NO: 43727 - DNA, 20 bp, Artificial Sequence
  Description of Artificial Sequence: Synthetic oligonucleotide
  Target: SCNA; (-) strand; PAM type: YTN; PAM sequence: TTG
gaaaggattaatttttttga

SEQ ID NO: 43728 - DNA, 20 bp, Artificial Sequence
  Description of Artificial Sequence: Synthetic oligonucleotide
  Target: SCNA; (-) strand; PAM type: YTN; PAM sequence: TTT
ggaaaggattaatttttttg

SEQ ID NO: 43729 - DNA, 20 bp, Artificial Sequence
  Description of Artificial Sequence: Synthetic oligonucleotide
  Target: SCNA; (-) strand; PAM type: YTN; PAM sequence: TTG
catttggaaaggattaattt

SEQ ID NO: 43730 - DNA, 20 bp, Artificial Sequence
  Description of Artificial Sequence: Synthetic oligonucleotide
  Target: SCNA; (-) strand; PAM type: YTN; PAM sequence: TTA
acattgcatttggaaaggat

SEQ ID NO: 43731 - DNA, 20 bp, Artificial Sequence
  Description of Artificial Sequence: Synthetic oligonucleotide
  Target: SCNA; (-) strand; PAM type: YTN; PAM sequence: TTC
atcatgaatagttaacattg

SEQ ID NO: 43732 - DNA, 20 bp, Artificial Sequence
  Description of Artificial Sequence: Synthetic oligonucleotide
  Target: SCNA; (-) strand; PAM type: YTN; PAM sequence: TTT
catcatgaatagttaacatt

SEQ ID NO: 43733 - DNA, 20 bp, Artificial Sequence
  Description of Artificial Sequence: Synthetic oligonucleotide
  Target: SCNA; (-) strand; PAM type: YTN; PAM sequence: CTG
atatttcatcatgaatagtt

SEQ ID NO: 43734 - DNA, 20 bp, Artificial Sequence
  Description of Artificial Sequence: Synthetic oligonucleotide
  Target: SCNA; (-) strand; PAM type: YTN; PAM sequence: TTC
tgatatttcatcatgaatag

SEQ ID NO: 43735 - DNA, 20 bp, Artificial Sequence
  Description of Artificial Sequence: Synthetic oligonucleotide
  Target: SCNA; (-) strand; PAM type: YTN; PAM sequence: TTA
gagatagttctgatatttca

SEQ ID NO: 43736 - DNA, 20 bp, Artificial Sequence
  Description of Artificial Sequence: Synthetic oligonucleotide
  Target: SCNA; (-) strand; PAM type: YTN; PAM sequence: TTG
gtattagagatagttctgat

SEQ ID NO: 43737 - DNA, 20 bp, Artificial Sequence
  Description of Artificial Sequence: Synthetic oligonucleotide
  Target: SCNA; (-) strand; PAM type: YTN; PAM sequence: TTC
caataaaaatattggtatta

SEQ ID NO: 43738 - DNA, 20 bp, Artificial Sequence
  Description of Artificial Sequence: Synthetic oligonucleotide
  Target: SCNA; (-) strand; PAM type: YTN; PAM sequence: TTA
ttccaataaaaatattggta

SEQ ID NO: 43739 - DNA, 20 bp, Artificial Sequence
  Description of Artificial Sequence: Synthetic oligonucleotide
  Target: SCNA; (-) strand; PAM type: YTN; PAM sequence: TTT
attccaataaaaatattggt

SEQ ID NO: 43740 - DNA, 20 bp, Artificial Sequence
  Description of Artificial Sequence: Synthetic oligonucleotide
  Target: SCNA; (-) strand; PAM type: YTN; PAM sequence: TTT
tattccaataaaaatattgg

SEQ ID NO: 43741 - DNA, 20 bp, Artificial Sequence
  Description of Artificial Sequence: Synthetic oligonucleotide
  Target: SCNA; (-) strand; PAM type: YTN; PAM sequence: CTA
ttttattccaataaaaatat

SEQ ID NO: 43742 - DNA, 20 bp, Artificial Sequence
  Description of Artificial Sequence: Synthetic oligonucleotide
  Target: SCNA; (-) strand; PAM type: YTN; PAM sequence: CTC
ctattttattccaataaaaa

SEQ ID NO: 43743 - DNA, 20 bp, Artificial Sequence
  Description of Artificial Sequence: Synthetic oligonucleotide
  Target: SCNA; (-) strand; PAM type: YTN; PAM sequence: TTA
acctcctattttattccaat

SEQ ID NO: 43744 - DNA, 20 bp, Artificial Sequence
  Description of Artificial Sequence: Synthetic oligonucleotide
  Target: SCNA; (-) strand; PAM type: YTN; PAM sequence: TTT
aacctcctattttattccaa

SEQ ID NO: 43745 - DNA, 20 bp, Artificial Sequence
  Description of Artificial Sequence: Synthetic oligonucleotide
  Target: SCNA; (-) strand; PAM type: YTN; PAM sequence: CTT
taacctcctattttattcca

SEQ ID NO: 43746 - DNA, 20 bp, Artificial Sequence
  Description of Artificial Sequence: Synthetic oligonucleotide
  Target: SCNA; (-) strand; PAM type: YTN; PAM sequence: TTC
ctttaacctcctattttatt

SEQ ID NO: 43747 - DNA, 20 bp, Artificial Sequence
  Description of Artificial Sequence: Synthetic oligonucleotide
  Target: SCNA; (-) strand; PAM type: YTN; PAM sequence: TTT
cctttaacctcctattttat

SEQ ID NO: 43748 - DNA, 20 bp, Artificial Sequence
  Description of Artificial Sequence: Synthetic oligonucleotide
  Target: SCNA; (-) strand; PAM type: YTN; PAM sequence: TTA
tatatataaacatttccttt

SEQ ID NO: 43749 - DNA, 20 bp, Artificial Sequence
  Description of Artificial Sequence: Synthetic oligonucleotide
  Target: SCNA; (-) strand; PAM type: YTN; PAM sequence: TTT
atatatataaacatttcctt

SEQ ID NO: 43750 - DNA, 20 bp, Artificial Sequence
  Description of Artificial Sequence: Synthetic oligonucleotide
  Target: SCNA; (-) strand; PAM type: YTN; PAM sequence: TTG
caaaaaatcatatatataca

SEQ ID NO: 43751 - DNA, 20 bp, Artificial Sequence
  Description of Artificial Sequence: Synthetic oligonucleotide
  Target: SCNA; (-) strand; PAM type: YTN; PAM sequence: CTT
gcaaaaaatcatatatatac

SEQ ID NO: 43752 - DNA, 20 bp, Artificial Sequence
  Description of Artificial Sequence: Synthetic oligonucleotide
  Target: SCNA; (-) strand; PAM type: YTN; PAM sequence: TTG
cccttgcaaaaaatcatata

SEQ ID NO: 43753 - DNA, 20 bp, Artificial Sequence
  Description of Artificial Sequence: Synthetic oligonucleotide
  Target: SCNA; (-) strand; PAM type: YTN; PAM sequence: TTT
gcccttgcaaaaaatcatat

SEQ ID NO: 43754 - DNA, 20 bp, Artificial Sequence
  Description of Artificial Sequence: Synthetic oligonucleotide
  Target: SCNA; (-) strand; PAM type: YTN; PAM sequence: TTT
tgcccttgcaaaaaatcata

SEQ ID NO: 43755 - DNA, 20 bp, Artificial Sequence
  Description of Artificial Sequence: Synthetic oligonucleotide
  Target: SCNA; (-) strand; PAM type: YTN; PAM sequence: TTT
ttgcccttgcaaaaaatcat

SEQ ID NO: 43756 - DNA, 20 bp, Artificial Sequence
  Description of Artificial Sequence: Synthetic oligonucleotide
  Target: SCNA; (-) strand; PAM type: YTN; PAM sequence: CTG
gtttttgcccttgcaaaaaa

SEQ ID NO: 43757 - DNA, 20 bp, Artificial Sequence
  Description of Artificial Sequence: Synthetic oligonucleotide
  Target: SCNA; (-) strand; PAM type: YTN; PAM sequence: TTA
aaaaaaatctggtttttgcc

SEQ ID NO: 43758 - DNA, 20 bp, Artificial Sequence
  Description of Artificial Sequence: Synthetic oligonucleotide
  Target: SCNA; (-) strand; PAM type: YTN; PAM sequence: TTT
aaaaaaaatctggtttttgc

SEQ ID NO: 43759 - DNA, 20 bp, Artificial Sequence
  Description of Artificial Sequence: Synthetic oligonucleotide
  Target: SCNA; (-) strand; PAM type: YTN; PAM sequence: TTA
tgtgtttaaaaaaaatctgg

SEQ ID NO: 43760 - DNA, 20 bp, Artificial Sequence
  Description of Artificial Sequence: Synthetic oligonucleotide
  Target: SCNA; (-) strand; PAM type: YTN; PAM sequence: TTA
atgattatgtgtttaaaaaa

SEQ ID NO: 43761 - DNA, 20 bp, Artificial Sequence
  Description of Artificial Sequence: Synthetic oligonucleotide
  Target: SCNA; (-) strand; PAM type: YTN; PAM sequence: TTT
aatgattatgtgtttaaaaa

SEQ ID NO: 43762 - DNA, 20 bp, Artificial Sequence
  Description of Artificial Sequence: Synthetic oligonucleotide
  Target: SCNA; (-) strand; PAM type: YTN; PAM sequence: TTG
cagatttaatgattatgtgt

SEQ ID NO: 43763 - DNA, 20 bp, Artificial Sequence
  Description of Artificial Sequence: Synthetic oligonucleotide
  Target: SCNA; (-) strand; PAM type: YTN; PAM sequence: TTT
gcagatttaatgattatgtg

SEQ ID NO: 43764 - DNA, 20 bp, Artificial Sequence
  Description of Artificial Sequence: Synthetic oligonucleotide
  Target: SCNA; (-) strand; PAM type: YTN; PAM sequence: TTG
atatttgcagatttaatgat

SEQ ID NO: 43765 - DNA, 20 bp, Artificial Sequence
  Description of Artificial Sequence: Synthetic oligonucleotide
  Target: SCNA; (-) strand; PAM type: YTN; PAM sequence: CTT
gatatttgcagatttaatga

SEQ ID NO: 43766 - DNA, 20 bp, Artificial Sequence
  Description of Artificial Sequence: Synthetic oligonucleotide
  Target: SCNA; (-) strand; PAM type: YTN; PAM sequence: TTG
ataaacttgatatttgcaga

SEQ ID NO: 43767 - DNA, 20 bp, Artificial Sequence
  Description of Artificial Sequence: Synthetic oligonucleotide
  Target: SCNA; (-) strand; PAM type: YTN; PAM sequence: CTG
taacaaaaaattgataaact

SEQ ID NO: 43768 - DNA, 20 bp, Artificial Sequence
  Description of Artificial Sequence: Synthetic oligonucleotide
  Target: SCNA; (-) strand; PAM type: YTN; PAM sequence: TTC
ctgtaacaaaaaattgataa

SEQ ID NO: 43769 - DNA, 20 bp, Artificial Sequence
  Description of Artificial Sequence: Synthetic oligonucleotide
  Target: SCNA; (-) strand; PAM type: YTN; PAM sequence: TTT
cctgtaacaaaaaattgata

SEQ ID NO: 43770 - DNA, 20 bp, Artificial Sequence
  Description of Artificial Sequence: Synthetic oligonucleotide
  Target: SCNA; (-) strand; PAM type: YTN; PAM sequence: TTT
tcctgtaacaaaaaattgat

SEQ ID NO: 43771 - DNA, 20 bp, Artificial Sequence
  Description of Artificial Sequence: Synthetic oligonucleotide
  Target: SCNA; (-) strand; PAM type: YTN; PAM sequence: TTT
ttcctgtaacaaaaaattga

SEQ ID NO: 43772 - DNA, 20 bp, Artificial Sequence
  Description of Artificial Sequence: Synthetic oligonucleotide
  Target: SCNA; (-) strand; PAM type: YTN; PAM sequence: TTT
tttcctgtaacaaaaaattg

SEQ ID NO: 43773 - DNA, 20 bp, Artificial Sequence
  Description of Artificial Sequence: Synthetic oligonucleotide
  Target: SCNA; (-) strand; PAM type: YTN; PAM sequence: CTA
ttttttcctgtaacaaaaaa

SEQ ID NO: 43774 - DNA, 20 bp, Artificial Sequence
  Description of Artificial Sequence: Synthetic oligonucleotide
  Target: SCNA; (-) strand; PAM type: YTN; PAM sequence: TTA
taataaactattttttcctg

SEQ ID NO: 43775 - DNA, 20 bp, Artificial Sequence
  Description of Artificial Sequence: Synthetic oligonucleotide
  Target: SCNA; (-) strand; PAM type: YTN; PAM sequence: TTT
ataataaactattttttcct

SEQ ID NO: 43776 - DNA, 20 bp, Artificial Sequence
  Description of Artificial Sequence: Synthetic oligonucleotide
  Target: SCNA; (-) strand; PAM type: YTN; PAM sequence: TTG
aatttataataaactatttt

SEQ ID NO: 43777 - DNA, 20 bp, Artificial Sequence
  Description of Artificial Sequence: Synthetic oligonucleotide
  Target: SCNA; (-) strand; PAM type: YTN; PAM sequence: CTA
tgcattgaatttataataaa

SEQ ID NO: 43778 - DNA, 20 bp, Artificial Sequence
  Description of Artificial Sequence: Synthetic oligonucleotide
  Target: SCNA; (-) strand; PAM type: YTN; PAM sequence: CTA
aaccagaaaatgctatgcat

SEQ ID NO: 43779 - DNA, 20 bp, Artificial Sequence
  Description of Artificial Sequence: Synthetic oligonucleotide
  Target: SCNA; (-) strand; PAM type: YTN; PAM sequence: CTG
tcagaacaataatggaaagg

SEQ ID NO: 43780 - DNA, 20 bp, Artificial Sequence
  Description of Artificial Sequence: Synthetic oligonucleotide
  Target: SCNA; (-) strand; PAM type: YTN; PAM sequence: TTC
tgtcagaacaataatggaaa

SEQ ID NO: 43781 - DNA, 20 bp, Artificial Sequence
  Description of Artificial Sequence: Synthetic oligonucleotide
  Target: SCNA; (-) strand; PAM type: YTN; PAM sequence: TTG
ttctgtcagaacaataatgg

SEQ ID NO: 43782 - DNA, 20 bp, Artificial Sequence
  Description of Artificial Sequence: Synthetic oligonucleotide
  Target: SCNA; (-) strand; PAM type: YTN; PAM sequence: TTT
gttctgtcagaacaataatg

SEQ ID NO: 43783 - DNA, 20 bp, Artificial Sequence
  Description of Artificial Sequence: Synthetic oligonucleotide
  Target: SCNA; (-) strand; PAM type: YTN; PAM sequence: CTT
tgttctgtcagaacaataat

SEQ ID NO: 43784 - DNA, 20 bp, Artificial Sequence
  Description of Artificial Sequence: Synthetic oligonucleotide
  Target: SCNA; (-) strand; PAM type: YTN; PAM sequence: CTC
atagtctttgttctgtcaga

SEQ ID NO: 43785 - DNA, 20 bp, Artificial Sequence
  Description of Artificial Sequence: Synthetic oligonucleotide
  Target: SCNA; (-) strand; PAM type: YTN; PAM sequence: CTG
acaacctcatagtctttgtt

SEQ ID NO: 43786 - DNA, 20 bp, Artificial Sequence
  Description of Artificial Sequence: Synthetic oligonucleotide
  Target: SCNA; (-) strand; PAM type: YTN; PAM sequence: TTC
tgacaacctcatagtctttg

SEQ ID NO: 43787 - DNA, 20 bp, Artificial Sequence
  Description of Artificial Sequence: Synthetic oligonucleotide
  Target: SCNA; (-) strand; PAM type: YTN; PAM sequence: TTT
ctgacaacctcatagtcttt

SEQ ID NO: 43788 - DNA, 20 bp, Artificial Sequence
  Description of Artificial Sequence: Synthetic oligonucleotide
  Target: SCNA; (-) strand; PAM type: YTN; PAM sequence: TTA
tttctgacaacctcatagtc

SEQ ID NO: 43789 - DNA, 20 bp, Artificial Sequence
  Description of Artificial Sequence: Synthetic oligonucleotide
  Target: SCNA; (-) strand; PAM type: YTN; PAM sequence: TTT
atttctgacaacctcatagt

SEQ ID NO: 43790 - DNA, 20 bp, Artificial Sequence
  Description of Artificial Sequence: Synthetic oligonucleotide
  Target: SCNA; (-) strand; PAM type: YTN; PAM sequence: TTA
ggaaacaaaatgaacaattt

SEQ ID NO: 43791 - DNA, 20 bp, Artificial Sequence
  Description of Artificial Sequence: Synthetic oligonucleotide
  Target: SCNA; (-) strand; PAM type: YTN; PAM sequence: TTT
aggaaacaaaatgaacaatt

SEQ ID NO: 43792 - DNA, 20 bp, Artificial Sequence
  Description of Artificial Sequence: Synthetic oligonucleotide
  Target: SCNA; (-) strand; PAM type: YTN; PAM sequence: TTG
ccacatatttaggaaacaaa

SEQ ID NO: 43793 - DNA, 20 bp, Artificial Sequence
  Description of Artificial Sequence: Synthetic oligonucleotide
  Target: SCNA; (-) strand; PAM type: YTN; PAM sequence: TTT
gccacatatttaggaaacaa

SEQ ID NO: 43794 - DNA, 20 bp, Artificial Sequence
  Description of Artificial Sequence: Synthetic oligonucleotide
  Target: SCNA; (-) strand; PAM type: YTN; PAM sequence: CTT
tgccacatatttaggaaaca

SEQ ID NO: 43795 - DNA, 20 bp, Artificial Sequence
  Description of Artificial Sequence: Synthetic oligonucleotide
  Target: SCNA; (-) strand; PAM type: YTN; PAM sequence: CTA
aaacaaacaaacaagcaaac

SEQ ID NO: 43796 - DNA, 20 bp, Artificial Sequence
  Description of Artificial Sequence: Synthetic oligonucleotide
  Target: SCNA; (-) strand; PAM type: YTN; PAM sequence: TTC
taaaacaaacaaacaagcaa

SEQ ID NO: 43797 - DNA, 20 bp, Artificial Sequence
  Description of Artificial Sequence: Synthetic oligonucleotide
  Target: SCNA; (-) strand; PAM type: YTN; PAM sequence: CTA
ttctaaaacaaacaaacaag

SEQ ID NO: 43798 - DNA, 20 bp, Artificial Sequence
  Description of Artificial Sequence: Synthetic oligonucleotide
  Target: SCNA; (-) strand; PAM type: YTN; PAM sequence: TTC
aaactattctaaaacaaaca

SEQ ID NO: 43799 - DNA, 20 bp, Artificial Sequence
  Description of Artificial Sequence: Synthetic oligonucleotide
  Target: SCNA; (-) strand; PAM type: YTN; PAM sequence: TTT
caaactattctaaaacaaac

SEQ ID NO: 43800 - DNA, 20 bp, Artificial Sequence
  Description of Artificial Sequence: Synthetic oligonucleotide
  Target: SCNA; (-) strand; PAM type: YTN; PAM sequence: TTG
aagacatttcaaactattct

SEQ ID NO: 43801 - DNA, 20 bp, Artificial Sequence
  Description of Artificial Sequence: Synthetic oligonucleotide
  Target: SCNA; (-) strand; PAM type: YTN; PAM sequence: TTT
gaagacatttcaaactattc

SEQ ID NO: 43802 - DNA, 20 bp, Artificial Sequence
  Description of Artificial Sequence: Synthetic oligonucleotide
  Target: SCNA; (-) strand; PAM type: YTN; PAM sequence: TTG
gtcaaaaggtttgaagacat

SEQ ID NO: 43803 - DNA, 20 bp, Artificial Sequence
  Description of Artificial Sequence: Synthetic oligonucleotide
  Target: SCNA; (-) strand; PAM type: YTN; PAM sequence: TTG
gttggtcaaaaggtttgaag

SEQ ID NO: 43804 - DNA, 20 bp, Artificial Sequence
  Description of Artificial Sequence: Synthetic oligonucleotide
  Target: SCNA; (-) strand; PAM type: YTN; PAM sequence: CTT
ggttggtcaaaaggtttgaa

SEQ ID NO: 43805 - DNA, 20 bp, Artificial Sequence
  Description of Artificial Sequence: Synthetic oligonucleotide
  Target: SCNA; (-) strand; PAM type: YTN; PAM sequence: TTC
ttggttggtcaaaaggtttg

SEQ ID NO: 43806 - DNA, 20 bp, Artificial Sequence
  Description of Artificial Sequence: Synthetic oligonucleotide
  Target: SCNA; (-) strand; PAM type: YTN; PAM sequence: TTT
cttggttggtcaaaaggttt

SEQ ID NO: 43807 - DNA, 20 bp, Artificial Sequence
  Description of Artificial Sequence: Synthetic oligonucleotide
  Target: SCNA; (-) strand; PAM type: YTN; PAM sequence: CTT
tcttggttggtcaaaaggtt

SEQ ID NO: 43808 - DNA, 20 bp, Artificial Sequence
  Description of Artificial Sequence: Synthetic oligonucleotide
  Target: SCNA; (-) strand; PAM type: YTN; PAM sequence: CTG
tgcccaggcaaaagctttct

SEQ ID NO: 43809 - DNA, 20 bp, Artificial Sequence
  Description of Artificial Sequence: Synthetic oligonucleotide
  Target: SCNA; (-) strand; PAM type: YTN; PAM sequence: CTA
agaaagataaagcctgtgcc

SEQ ID NO: 43810 - DNA, 20 bp, Artificial Sequence
  Description of Artificial Sequence: Synthetic oligonucleotide
  Target: SCNA; (-) strand; PAM type: YTN; PAM sequence: CTA
gtgtaatgctaagaaagata

SEQ ID NO: 43811 - DNA, 20 bp, Artificial Sequence
  Description of Artificial Sequence: Synthetic oligonucleotide
  Target: SCNA; (-) strand; PAM type: YTN; PAM sequence: CTC
tagtgtaatgctaagaaaga

SEQ ID NO: 43812 - DNA, 20 bp, Artificial Sequence
  Description of Artificial Sequence: Synthetic oligonucleotide
  Target: SCNA; (-) strand; PAM type: YTN; PAM sequence: TTA
gtatctctagtgtaatgcta

SEQ ID NO: 43813 - DNA, 20 bp, Artificial Sequence
  Description of Artificial Sequence: Synthetic oligonucleotide
  Target: SCNA; (-) strand; PAM type: YTN; PAM sequence: TTG
ggagggattagtatctctag

SEQ ID NO: 43814 - DNA, 20 bp, Artificial Sequence
  Description of Artificial Sequence: Synthetic oligonucleotide
  Target: SCNA; (-) strand; PAM type: YTN; PAM sequence: TTG
ttgggagggattagtatctc

SEQ ID NO: 43815 - DNA, 20 bp, Artificial Sequence
  Description of Artificial Sequence: Synthetic oligonucleotide
  Target: SCNA; (-) strand; PAM type: YTN; PAM sequence: TTG
cgataatcataatgaaattg

SEQ ID NO: 43816 - DNA, 20 bp, Artificial Sequence
  Description of Artificial Sequence: Synthetic oligonucleotide
  Target: SCNA; (-) strand; PAM type: YTN; PAM sequence: TTA
ttgcgataatcataatgaaa

SEQ ID NO: 43817 - DNA, 20 bp, Artificial Sequence
  Description of Artificial Sequence: Synthetic oligonucleotide
  Target: SCNA; (-) strand; PAM type: YTN; PAM sequence: TTT
attgcgataatcataatgaa

SEQ ID NO: 43818 - DNA, 20 bp, Artificial Sequence
  Description of Artificial Sequence: Synthetic oligonucleotide
  Target: SCNA; (-) strand; PAM type: YTN; PAM sequence: TTT
tattgcgataatcataatga

SEQ ID NO: 43819 - DNA, 20 bp, Artificial Sequence
  Description of Artificial Sequence: Synthetic oligonucleotide
  Target: SCNA; (-) strand; PAM type: YTN; PAM sequence: TTA
tattttattgcgataatcat

SEQ ID NO: 43820 - DNA, 20 bp, Artificial Sequence
  Description of Artificial Sequence: Synthetic oligonucleotide
  Target: SCNA; (-) strand; PAM type: YTN; PAM sequence: TTA
atggatcgttatattttatt

SEQ ID NO: 43821 - DNA, 20 bp, Artificial Sequence
  Description of Artificial Sequence: Synthetic oligonucleotide
  Target: SCNA; (-) strand; PAM type: YTN; PAM sequence: CTT
aatggatcgttatattttat

SEQ ID NO: 43822 - DNA, 20 bp, Artificial Sequence
  Description of Artificial Sequence: Synthetic oligonucleotide
  Target: SCNA; (-) strand; PAM type: YTN; PAM sequence: CTG
ccccatggacttaatggatc

SEQ ID NO: 43823 - DNA, 20 bp, Artificial Sequence
  Description of Artificial Sequence: Synthetic oligonucleotide
  Target: SCNA; (-) strand; PAM type: YTN; PAM sequence: TTA
taaataaataaacatctgcc

SEQ ID NO: 43824 - DNA, 20 bp, Artificial Sequence
  Description of Artificial Sequence: Synthetic oligonucleotide
  Target: SCNA; (-) strand; PAM type: YTN; PAM sequence: CTG
tggaataaggcatggttata

SEQ ID NO: 43825 - DNA, 20 bp, Artificial Sequence
  Description of Artificial Sequence: Synthetic oligonucleotide
  Target: SCNA; (-) strand; PAM type: YTN; PAM sequence: CTC
tgtggaataaggcatggtta

SEQ ID NO: 43826 - DNA, 20 bp, Artificial Sequence
  Description of Artificial Sequence: Synthetic oligonucleotide
  Target: SCNA; (-) strand; PAM type: YTN; PAM sequence: TTC
tctgtggaataaggcatggt

SEQ ID NO: 43827 - DNA, 20 bp, Artificial Sequence
  Description of Artificial Sequence: Synthetic oligonucleotide
  Target: SCNA; (-) strand; PAM type: YTN; PAM sequence: TTA
aattctctgtggaataaggc

SEQ ID NO: 43828 - DNA, 20 bp, Artificial Sequence
  Description of Artificial Sequence: Synthetic oligonucleotide
  Target: SCNA; (-) strand; PAM type: YTN; PAM sequence: TTT
aaattctctgtggaataagg

SEQ ID NO: 43829 - DNA, 20 bp, Artificial Sequence
  Description of Artificial Sequence: Synthetic oligonucleotide
  Target: SCNA; (-) strand; PAM type: YTN; PAM sequence: CTT
taaattctctgtggaataag

SEQ ID NO: 43830 - DNA, 20 bp, Artificial Sequence
  Description of Artificial Sequence: Synthetic oligonucleotide
  Target: SCNA; (-) strand; PAM type: YTN; PAM sequence: CTC
tttaaattctctgtggaata

SEQ ID NO: 43831 - DNA, 20 bp, Artificial Sequence
  Description of Artificial Sequence: Synthetic oligonucleotide
  Target: SCNA; (-) strand; PAM type: YTN; PAM sequence: TTC
ctctttaaattctctgtgga

SEQ ID NO: 43832 - DNA, 20 bp, Artificial Sequence
  Description of Artificial Sequence: Synthetic oligonucleotide
  Target: SCNA; (-) strand; PAM type: YTN; PAM sequence: TTA
ttcctctttaaattctctgt

SEQ ID NO: 43833 - DNA, 20 bp, Artificial Sequence
  Description of Artificial Sequence: Synthetic oligonucleotide
  Target: SCNA; (-) strand; PAM type: YTN; PAM sequence: TTT
attcctctttaaattctctg

SEQ ID NO: 43834 - DNA, 20 bp, Artificial Sequence
  Description of Artificial Sequence: Synthetic oligonucleotide
  Target: SCNA; (-) strand; PAM type: YTN; PAM sequence: TTT
tattcctctttaaattctct

SEQ ID NO: 43835 - DNA, 20 bp, Artificial Sequence
  Description of Artificial Sequence: Synthetic oligonucleotide
  Target: SCNA; (-) strand; PAM type: YTN; PAM sequence: CTT
ttattcctctttaaattctc

SEQ ID NO: 43836 - DNA, 20 bp, Artificial Sequence
  Description of Artificial Sequence: Synthetic oligonucleotide
  Target: SCNA; (-) strand; PAM type: YTN; PAM sequence: TTG
atgcaatgaggaaataatct

SEQ ID NO: 43837 - DNA, 20 bp, Artificial Sequence
  Description of Artificial Sequence: Synthetic oligonucleotide
  Target: SCNA; (-) strand; PAM type: YTN; PAM sequence: TTT
gatgcaatgaggaaataatc

SEQ ID NO: 43838 - DNA, 20 bp, Artificial Sequence
  Description of Artificial Sequence: Synthetic oligonucleotide
  Target: SCNA; (-) strand; PAM type: YTN; PAM sequence: TTC
atttgatgcaatgaggaaat

SEQ ID NO: 43839 - DNA, 20 bp, Artificial Sequence
  Description of Artificial Sequence: Synthetic oligonucleotide
  Target: SCNA; (-) strand; PAM type: YTN; PAM sequence: TTA
gacaaaataaaagatattca

SEQ ID NO: 43840 - DNA, 20 bp, Artificial Sequence
  Description of Artificial Sequence: Synthetic oligonucleotide
  Target: SCNA; (-) strand; PAM type: YTN; PAM sequence: TTA
aagaaaaagaaatacaacat

SEQ ID NO: 43841 - DNA, 20 bp, Artificial Sequence
  Description of Artificial Sequence: Synthetic oligonucleotide
  Target: SCNA; (-) strand; PAM type: YTN; PAM sequence: TTA
gtgccaattaaagaaaaaga

SEQ ID NO: 43842 - DNA, 20 bp, Artificial Sequence
  Description of Artificial Sequence: Synthetic oligonucleotide
  Target: SCNA; (-) strand; PAM type: YTN; PAM sequence: TTT
agtgccaattaaagaaaaag

SEQ ID NO: 43843 - DNA, 20 bp, Artificial Sequence
  Description of Artificial Sequence: Synthetic oligonucleotide
  Target: SCNA; (-) strand; PAM type: YTN; PAM sequence: TTA
aaagaatgcaaataaacatt

SEQ ID NO: 43844 - DNA, 20 bp, Artificial Sequence
  Description of Artificial Sequence: Synthetic oligonucleotide
  Target: SCNA; (-) strand; PAM type: YTN; PAM sequence: TTA
aaagtaattaaaagaatgca

SEQ ID NO: 43845 - DNA, 20 bp, Artificial Sequence
  Description of Artificial Sequence: Synthetic oligonucleotide
  Target: SCNA; (-) strand; PAM type: YTN; PAM sequence: CTT
aaaagtaattaaaagaatgc

SEQ ID NO: 43846 - DNA, 20 bp, Artificial Sequence
  Description of Artificial Sequence: Synthetic oligonucleotide
  Target: SCNA; (-) strand; PAM type: YTN; PAM sequence: TTC
agtaatgtaatccagaaata

SEQ ID NO: 43847 - DNA, 20 bp, Artificial Sequence
  Description of Artificial Sequence: Synthetic oligonucleotide
  Target: SCNA; (-) strand; PAM type: YTN; PAM sequence: TTG
agagttcagtaatgtaatcc

SEQ ID NO: 43848 - DNA, 20 bp, Artificial Sequence
  Description of Artificial Sequence: Synthetic oligonucleotide
  Target: SCNA; (-) strand; PAM type: YTN; PAM sequence: TTA
ttgagagttcagtaatgtaa

SEQ ID NO: 43849 - DNA, 20 bp, Artificial Sequence
  Description of Artificial Sequence: Synthetic oligonucleotide
  Target: SCNA; (-) strand; PAM type: YTN; PAM sequence: TTT
attgagagttcagtaatgta

SEQ ID NO: 43850 - DNA, 20 bp, Artificial Sequence
  Description of Artificial Sequence: Synthetic oligonucleotide
  Target: SCNA; (-) strand; PAM type: YTN; PAM sequence: TTG
atttattgagagttcagtaa

SEQ ID NO: 43851 - DNA, 20 bp, Artificial Sequence
  Description of Artificial Sequence: Synthetic oligonucleotide
  Target: SCNA; (-) strand; PAM type: YTN; PAM sequence: CTA
tgtattgatttattgagagt

SEQ ID NO: 43852 - DNA, 20 bp, Artificial Sequence
  Description of Artificial Sequence: Synthetic oligonucleotide
  Target: SCNA; (-) strand; PAM type: YTN; PAM sequence: TTA
tatacagaactatgtattga

SEQ ID NO: 43853 - DNA, 20 bp, Artificial Sequence
  Description of Artificial Sequence: Synthetic oligonucleotide
  Target: SCNA; (-) strand; PAM type: YTN; PAM sequence: TTG
aaaaaattatatacagaact

SEQ ID NO: 43854 - DNA, 20 bp, Artificial Sequence
  Description of Artificial Sequence: Synthetic oligonucleotide
  Target: SCNA; (-) strand; PAM type: YTN; PAM sequence: TTA
aagaaggaaaaaatgttgaa

SEQ ID NO: 43855 - DNA, 20 bp, Artificial Sequence
  Description of Artificial Sequence: Synthetic oligonucleotide
  Target: SCNA; (-) strand; PAM type: YTN; PAM sequence: CTC
aataaacagcaaagggagat

SEQ ID NO: 43856 - DNA, 20 bp, Artificial Sequence
  Description of Artificial Sequence: Synthetic oligonucleotide
  Target: SCNA; (-) strand; PAM type: YTN; PAM sequence: CTA
ctcaataaacagcaaaggga

SEQ ID NO: 43857 - DNA, 20 bp, Artificial Sequence
  Description of Artificial Sequence: Synthetic oligonucleotide
  Target: SCNA; (-) strand; PAM type: YTN; PAM sequence: TTC
tactcaataaacagcaaagg

SEQ ID NO: 43858 - DNA, 20 bp, Artificial Sequence
  Description of Artificial Sequence: Synthetic oligonucleotide
  Target: SCNA; (-) strand; PAM type: YTN; PAM sequence: TTT
ctactcaataaacagcaaag

SEQ ID NO: 43859 - DNA, 20 bp, Artificial Sequence
  Description of Artificial Sequence: Synthetic oligonucleotide
  Target: SCNA; (-) strand; PAM type: YTN; PAM sequence: CTA
caaaaatcagaatttctact

SEQ ID NO: 43860 - DNA, 20 bp, Artificial Sequence
  Description of Artificial Sequence: Synthetic oligonucleotide
  Target: SCNA; (-) strand; PAM type: YTN; PAM sequence: TTG
ctacaaaaatcagaatttct

SEQ ID NO: 43861 - DNA, 20 bp, Artificial Sequence
  Description of Artificial Sequence: Synthetic oligonucleotide
  Target: SCNA; (-) strand; PAM type: YTN; PAM sequence: TTT
gctacaaaaatcagaatttc

SEQ ID NO: 43862 - DNA, 20 bp, Artificial Sequence
  Description of Artificial Sequence: Synthetic oligonucleotide
  Target: SCNA; (-) strand; PAM type: YTN; PAM sequence: CTT
tgctacaaaaatcagaattt

SEQ ID NO: 43863 - DNA, 20 bp, Artificial Sequence
  Description of Artificial Sequence: Synthetic oligonucleotide
  Target: SCNA; (-) strand; PAM type: YTN; PAM sequence: CTC
cctttgctacaaaaatcaga

SEQ ID NO: 43864 - DNA, 20 bp, Artificial Sequence
  Description of Artificial Sequence: Synthetic oligonucleotide
  Target: SCNA; (-) strand; PAM type: YTN; PAM sequence: TTC
tccctttgctacaaaaatca

SEQ ID NO: 43865 - DNA, 20 bp, Artificial Sequence
  Description of Artificial Sequence: Synthetic oligonucleotide
  Target: SCNA; (-) strand; PAM type: YTN; PAM sequence: TTG
ttctccctttgctacaaaaa

SEQ ID NO: 43866 - DNA, 20 bp, Artificial Sequence
  Description of Artificial Sequence: Synthetic oligonucleotide
  Target: SCNA; (-) strand; PAM type: YTN; PAM sequence: TTT
gttctccctttgctacaaaa

SEQ ID NO: 43867 - DNA, 20 bp, Artificial Sequence
  Description of Artificial Sequence: Synthetic oligonucleotide
  Target: SCNA; (-) strand; PAM type: YTN; PAM sequence: TTG
tttgttctccctttgctaca

SEQ ID NO: 43868 - DNA, 20 bp, Artificial Sequence
  Description of Artificial Sequence: Synthetic oligonucleotide
  Target: SCNA; (-) strand; PAM type: YTN; PAM sequence: TTT
gtttgttctccctttgctac

SEQ ID NO: 43869 - DNA, 20 bp, Artificial Sequence
  Description of Artificial Sequence: Synthetic oligonucleotide
  Target: SCNA; (-) strand; PAM type: YTN; PAM sequence: TTG
tttgtttgttctccctttgc

SEQ ID NO: 43870 - DNA, 20 bp, Artificial Sequence
  Description of Artificial Sequence: Synthetic oligonucleotide
  Target: SCNA; (-) strand; PAM type: YTN; PAM sequence: CTG
tgtgttgtttgtttgttctc

SEQ ID NO: 43871 - DNA, 20 bp, Artificial Sequence
  Description of Artificial Sequence: Synthetic oligonucleotide
  Target: SCNA; (-) strand; PAM type: YTN; PAM sequence: TTC
tgtgtgttgtttgtttgttc

SEQ ID NO: 43872 - DNA, 20 bp, Artificial Sequence
  Description of Artificial Sequence: Synthetic oligonucleotide
  Target: SCNA; (-) strand; PAM type: YTN; PAM sequence: TTA
aatacagaatattctgtgtg

SEQ ID NO: 43873 - DNA, 20 bp, Artificial Sequence
  Description of Artificial Sequence: Synthetic oligonucleotide
  Target: SCNA; (-) strand; PAM type: YTN; PAM sequence: TTG
cagcattaaatacagaatat

SEQ ID NO: 43874 - DNA, 20 bp, Artificial Sequence
  Description of Artificial Sequence: Synthetic oligonucleotide
  Target: SCNA; (-) strand; PAM type: YTN; PAM sequence: TTG
caaccatagagacaattgca

SEQ ID NO: 43875 - DNA, 20 bp, Artificial Sequence
  Description of Artificial Sequence: Synthetic oligonucleotide
  Target: SCNA; (-) strand; PAM type: YTN; PAM sequence: CTA
cacattgcaaccatagagac

SEQ ID NO: 43876 - DNA, 20 bp, Artificial Sequence
  Description of Artificial Sequence: Synthetic oligonucleotide
  Target: SCNA; (-) strand; PAM type: YTN; PAM sequence: TTG
aatgcaccccacctacacat

SEQ ID NO: 43877 - DNA, 20 bp, Artificial Sequence
  Description of Artificial Sequence: Synthetic oligonucleotide
  Target: SCNA; (-) strand; PAM type: YTN; PAM sequence: CTT
gaatgcaccccacctacaca

SEQ ID NO: 43878 - DNA, 20 bp, Artificial Sequence
  Description of Artificial Sequence: Synthetic oligonucleotide
  Target: SCNA; (-) strand; PAM type: YTN; PAM sequence: TTC
caacacacacacacacatac

SEQ ID NO: 43879 - DNA, 20 bp, Artificial Sequence
  Description of Artificial Sequence: Synthetic oligonucleotide
  Target: SCNA; (-) strand; PAM type: YTN; PAM sequence: CTT
ccaacacacacacacacata

SEQ ID NO: 43880 - DNA, 20 bp, Artificial Sequence
  Description of Artificial Sequence: Synthetic oligonucleotide
  Target: SCNA; (-) strand; PAM type: YTN; PAM sequence: TTC
ttccaacacacacacacaca

SEQ ID NO: 43881 - DNA, 20 bp, Artificial Sequence
  Description of Artificial Sequence: Synthetic oligonucleotide
  Target: SCNA; (-) strand; PAM type: YTN; PAM sequence: CTC
aatatatattcttccaacac

SEQ ID NO: 43882 - DNA, 20 bp, Artificial Sequence
  Description of Artificial Sequence: Synthetic oligonucleotide
  Target: SCNA; (-) strand; PAM type: YTN; PAM sequence: TTA
ggaatcatcctcaatatata

SEQ ID NO: 43883 - DNA, 20 bp, Artificial Sequence
  Description of Artificial Sequence: Synthetic oligonucleotide
  Target: SCNA; (-) strand; PAM type: YTN; PAM sequence: CTC
aacaaagtgataaaattagg

SEQ ID NO: 43884 - DNA, 20 bp, Artificial Sequence
  Description of Artificial Sequence: Synthetic oligonucleotide
  Target: SCNA; (-) strand; PAM type: YTN; PAM sequence: TTC
ctcaacaaagtgataaaatt

SEQ ID NO: 43885 - DNA, 20 bp, Artificial Sequence
  Description of Artificial Sequence: Synthetic oligonucleotide
  Target: SCNA; (-) strand; PAM type: YTN; PAM sequence: TTC
agttcctcaacaaagtgata

SEQ ID NO: 43886 - DNA, 20 bp, Artificial Sequence
  Description of Artificial Sequence: Synthetic oligonucleotide
  Target: SCNA; (-) strand; PAM type: YTN; PAM sequence: TTT
cagttcctcaacaaagtgat

SEQ ID NO: 43887 - DNA, 20 bp, Artificial Sequence
  Description of Artificial Sequence: Synthetic oligonucleotide
  Target: SCNA; (-) strand; PAM type: YTN; PAM sequence: TTA
gagtgaatgtgtagccacaa

SEQ ID NO: 43888 - DNA, 20 bp, Artificial Sequence
  Description of Artificial Sequence: Synthetic oligonucleotide
  Target: SCNA; (-) strand; PAM type: YTN; PAM sequence: TTT
agagtgaatgtgtagccaca

SEQ ID NO: 43889 - DNA, 20 bp, Artificial Sequence
  Description of Artificial Sequence: Synthetic oligonucleotide
  Target: SCNA; (-) strand; PAM type: YTN; PAM sequence: CTG
tgagacaaaatatttagagt

SEQ ID NO: 43890 - DNA, 20 bp, Artificial Sequence
  Description of Artificial Sequence: Synthetic oligonucleotide
  Target: SCNA; (-) strand; PAM type: YTN; PAM sequence: TTG
aagggaggggactgtgagac

SEQ ID NO: 43891 - DNA, 20 bp, Artificial Sequence
  Description of Artificial Sequence: Synthetic oligonucleotide
  Target: SCNA; (-) strand; PAM type: YTN; PAM sequence: TTG
ttgaagggaggggactgtga

SEQ ID NO: 43892 - DNA, 20 bp, Artificial Sequence
  Description of Artificial Sequence: Synthetic oligonucleotide
  Target: SCNA; (-) strand; PAM type: YTN; PAM sequence: CTG
tatataattgttgaagggag

SEQ ID NO: 43893 - DNA, 20 bp, Artificial Sequence
  Description of Artificial Sequence: Synthetic oligonucleotide
  Target: SCNA; (-) strand; PAM type: YTN; PAM sequence: TTC
caacaaatagtgtactgtat

SEQ ID NO: 43894 - DNA, 20 bp, Artificial Sequence
  Description of Artificial Sequence: Synthetic oligonucleotide
  Target: SCNA; (-) strand; PAM type: YTN; PAM sequence: CTT
ccaacaaatagtgtactgta

SEQ ID NO: 43895 - DNA, 20 bp, Artificial Sequence
  Description of Artificial Sequence: Synthetic oligonucleotide
  Target: SCNA; (-) strand; PAM type: YTN; PAM sequence: CTG
agcttccaacaaatagtgta

SEQ ID NO: 43896 - DNA, 20 bp, Artificial Sequence
  Description of Artificial Sequence: Synthetic oligonucleotide
  Target: SCNA; (-) strand; PAM type: YTN; PAM sequence: CTC
ctgagcttccaacaaatagt

SEQ ID NO: 43897 - DNA, 20 bp, Artificial Sequence
  Description of Artificial Sequence: Synthetic oligonucleotide
  Target: SCNA; (-) strand; PAM type: YTN; PAM sequence: TTC
tcctgagcttccaacaaata

SEQ ID NO: 43898 - DNA, 20 bp, Artificial Sequence
  Description of Artificial Sequence: Synthetic oligonucleotide
  Target: SCNA; (-) strand; PAM type: YTN; PAM sequence: TTT
ctcctgagcttccaacaaat

SEQ ID NO: 43899 - DNA, 20 bp, Artificial Sequence
  Description of Artificial Sequence: Synthetic oligonucleotide
  Target: SCNA; (-) strand; PAM type: YTN; PAM sequence: TTT
tctcctgagcttccaacaaa

SEQ ID NO: 43900 - DNA, 20 bp, Artificial Sequence
  Description of Artificial Sequence: Synthetic oligonucleotide
  Target: SCNA; (-) strand; PAM type: YTN; PAM sequence: TTT
ttctcctgagcttccaacaa

SEQ ID NO: 43901 - DNA, 20 bp, Artificial Sequence
  Description of Artificial Sequence: Synthetic oligonucleotide
  Target: SCNA; (-) strand; PAM type: YTN; PAM sequence: CTT
tttctcctgagcttccaaca

SEQ ID NO: 43902 - DNA, 20 bp, Artificial Sequence
  Description of Artificial Sequence: Synthetic oligonucleotide
  Target: SCNA; (-) strand; PAM type: YTN; PAM sequence: TTA
aatgccctttttctcctgag

SEQ ID NO: 43903 - DNA, 20 bp, Artificial Sequence
  Description of Artificial Sequence: Synthetic oligonucleotide
  Target: SCNA; (-) strand; PAM type: YTN; PAM sequence: CTT
aaatgccctttttctcctga

SEQ ID NO: 43904 - DNA, 20 bp, Artificial Sequence
  Description of Artificial Sequence: Synthetic oligonucleotide
  Target: SCNA; (-) strand; PAM type: YTN; PAM sequence: CTC
ttaaatgccctttttctcct

SEQ ID NO: 43905 - DNA, 20 bp, Artificial Sequence
  Description of Artificial Sequence: Synthetic oligonucleotide
  Target: SCNA; (-) strand; PAM type: YTN; PAM sequence: CTC
atgctcttaaatgccctttt

SEQ ID NO: 43906 - DNA, 20 bp, Artificial Sequence
  Description of Artificial Sequence: Synthetic oligonucleotide
  Target: SCNA; (-) strand; PAM type: YTN; PAM sequence: CTG
ccaccaaatctcatgctctt

SEQ ID NO: 43907 - DNA, 20 bp, Artificial Sequence
  Description of Artificial Sequence: Synthetic oligonucleotide
  Target: SCNA; (-) strand; PAM type: YTN; PAM sequence: TTA
ggtcagtctgccaccaaatc

SEQ ID NO: 43908 - DNA, 20 bp, Artificial Sequence
  Description of Artificial Sequence: Synthetic oligonucleotide
  Target: SCNA; (-) strand; PAM type: YTN; PAM sequence: CTA
ttaggtcagtctgccaccaa

SEQ ID NO: 43909 - DNA, 20 bp, Artificial Sequence
  Description of Artificial Sequence: Synthetic oligonucleotide
  Target: SCNA; (-) strand; PAM type: YTN; PAM sequence: CTA
ctattaggtcagtctgccac

SEQ ID NO: 43910 - DNA, 20 bp, Artificial Sequence
  Description of Artificial Sequence: Synthetic oligonucleotide
  Target: SCNA; (-) strand; PAM type: YTN; PAM sequence: CTG
gtaccatctactattaggtc

SEQ ID NO: 43911 - DNA, 20 bp, Artificial Sequence
  Description of Artificial Sequence: Synthetic oligonucleotide
  Target: SCNA; (-) strand; PAM type: YTN; PAM sequence: CTC
actggtaccatctactatta

SEQ ID NO: 43912 - DNA, 20 bp, Artificial Sequence
  Description of Artificial Sequence: Synthetic oligonucleotide
  Target: SCNA; (-) strand; PAM type: YTN; PAM sequence: CTC
aagatctcactggtaccatc

SEQ ID NO: 43913 - DNA, 20 bp, Artificial Sequence
  Description of Artificial Sequence: Synthetic oligonucleotide
  Target: SCNA; (-) strand; PAM type: YTN; PAM sequence: TTG
ctcaagatctcactggtacc

SEQ ID NO: 43914 - DNA, 20 bp, Artificial Sequence
  Description of Artificial Sequence: Synthetic oligonucleotide
  Target: SCNA; (-) strand; PAM type: YTN; PAM sequence: TTA
cgttgctcaagatctcactg

SEQ ID NO: 43915 - DNA, 20 bp, Artificial Sequence
  Description of Artificial Sequence: Synthetic oligonucleotide
  Target: SCNA; (-) strand; PAM type: YTN; PAM sequence: TTT
acgttgctcaagatctcact

SEQ ID NO: 43916 - DNA, 20 bp, Artificial Sequence
  Description of Artificial Sequence: Synthetic oligonucleotide
  Target: SCNA; (-) strand; PAM type: YTN; PAM sequence: TTG
aaacatttacgttgctcaag

SEQ ID NO: 43917 - DNA, 20 bp, Artificial Sequence
  Description of Artificial Sequence: Synthetic oligonucleotide
  Target: SCNA; (-) strand; PAM type: YTN; PAM sequence: TTC
agttgaaacatttacgttgc

SEQ ID NO: 43918 - DNA, 20 bp, Artificial Sequence
  Description of Artificial Sequence: Synthetic oligonucleotide
  Target: SCNA; (-) strand; PAM type: YTN; PAM sequence: TTT
cagttgaaacatttacgttg

SEQ ID NO: 43919 - DNA, 20 bp, Artificial Sequence
  Description of Artificial Sequence: Synthetic oligonucleotide
  Target: SCNA; (-) strand; PAM type: YTN; PAM sequence: TTT
tcagttgaaacatttacgtt

SEQ ID NO: 43920 - DNA, 20 bp, Artificial Sequence
  Description of Artificial Sequence: Synthetic oligonucleotide
  Target: SCNA; (-) strand; PAM type: YTN; PAM sequence: TTT
ttcagttgaaacatttacgt

SEQ ID NO: 43921 - DNA, 20 bp, Artificial Sequence
  Description of Artificial Sequence: Synthetic oligonucleotide
  Target: SCNA; (-) strand; PAM type: YTN; PAM sequence: TTA
ccgtttttcagttgaaacat

SEQ ID NO: 43922 - DNA, 20 bp, Artificial Sequence
  Description of Artificial Sequence: Synthetic oligonucleotide
  Target: SCNA; (-) strand; PAM type: YTN; PAM sequence: TTG
ttaccgtttttcagttgaaa

SEQ ID NO: 43923 - DNA, 20 bp, Artificial Sequence
  Description of Artificial Sequence: Synthetic oligonucleotide
  Target: SCNA; (-) strand; PAM type: YTN; PAM sequence: TTA
ttgttaccgtttttcagttg

SEQ ID NO: 43924 - DNA, 20 bp, Artificial Sequence
  Description of Artificial Sequence: Synthetic oligonucleotide
  Target: SCNA; (-) strand; PAM type: YTN; PAM sequence: TTT
attgttaccgtttttcagtt

SEQ ID NO: 43925 - DNA, 20 bp, Artificial Sequence
  Description of Artificial Sequence: Synthetic oligonucleotide
  Target: SCNA; (-) strand; PAM type: YTN; PAM sequence: TTT
tattgttaccgtttttcagt

SEQ ID NO: 43926 - DNA, 20 bp, Artificial Sequence
  Description of Artificial Sequence: Synthetic oligonucleotide
  Target: SCNA; (-) strand; PAM type: YTN; PAM sequence: CTG
aaaaatgttttattgttacc

SEQ ID NO: 43927 - DNA, 20 bp, Artificial Sequence
  Description of Artificial Sequence: Synthetic oligonucleotide
  Target: SCNA; (-) strand; PAM type: YTN; PAM sequence: CTC
tgaaaaatgttttattgtta

SEQ ID NO: 43928 - DNA, 20 bp, Artificial Sequence
  Description of Artificial Sequence: Synthetic oligonucleotide
  Target: SCNA; (-) strand; PAM type: YTN; PAM sequence: TTA
gtacaacatcactctgaaaa

SEQ ID NO: 43929 - DNA, 20 bp, Artificial Sequence
  Description of Artificial Sequence: Synthetic oligonucleotide
  Target: SCNA; (-) strand; PAM type: YTN; PAM sequence: TTT
agtacaacatcactctgaaa

SEQ ID NO: 43930 - DNA, 20 bp, Artificial Sequence
  Description of Artificial Sequence: Synthetic oligonucleotide
  Target: SCNA; (-) strand; PAM type: YTN; PAM sequence: TTC
atttagtacaacatcactct

SEQ ID NO: 43931 - DNA, 20 bp, Artificial Sequence
  Description of Artificial Sequence: Synthetic oligonucleotide
  Target: SCNA; (-) strand; PAM type: YTN; PAM sequence: TTT
catttagtacaacatcactc

SEQ ID NO: 43932 - DNA, 20 bp, Artificial Sequence
  Description of Artificial Sequence: Synthetic oligonucleotide
  Target: SCNA; (-) strand; PAM type: YTN; PAM sequence: TTA
tgtatatcatttcatttagt

SEQ ID NO: 43933 - DNA, 20 bp, Artificial Sequence
  Description of Artificial Sequence: Synthetic oligonucleotide
  Target: SCNA; (-) strand; PAM type: YTN; PAM sequence: TTT
atgtatatcatttcatttag

SEQ ID NO: 43934 - DNA, 20 bp, Artificial Sequence
  Description of Artificial Sequence: Synthetic oligonucleotide
  Target: SCNA; (-) strand; PAM type: YTN; PAM sequence: CTT
tatgtatatcatttcattta

SEQ ID NO: 43935 - DNA, 20 bp, Artificial Sequence
  Description of Artificial Sequence: Synthetic oligonucleotide
  Target: SCNA; (-) strand; PAM type: YTN; PAM sequence: CTA
ctttatgtatatcatttcat

SEQ ID NO: 43936 - DNA, 20 bp, Artificial Sequence
  Description of Artificial Sequence: Synthetic oligonucleotide
  Target: SCNA; (-) strand; PAM type: YTN; PAM sequence: TTA
taggctactttatgtatatc

SEQ ID NO: 43937 - DNA, 20 bp, Artificial Sequence
  Description of Artificial Sequence: Synthetic oligonucleotide
  Target: SCNA; (-) strand; PAM type: YTN; PAM sequence: CTG
tgcatgggtcattataggct

SEQ ID NO: 43938 - DNA, 20 bp, Artificial Sequence
  Description of Artificial Sequence: Synthetic oligonucleotide
  Target: SCNA; (-) strand; PAM type: YTN; PAM sequence: TTA
tgactgtgcatgggtcatta

SEQ ID NO: 43939 - DNA, 20 bp, Artificial Sequence
  Description of Artificial Sequence: Synthetic oligonucleotide
  Target: SCNA; (-) strand; PAM type: YTN; PAM sequence: TTG
atattatgactgtgcatggg

SEQ ID NO: 43940 - DNA, 20 bp, Artificial Sequence
  Description of Artificial Sequence: Synthetic oligonucleotide
  Target: SCNA; (-) strand; PAM type: YTN; PAM sequence: TTT
gatattatgactgtgcatgg

SEQ ID NO: 43941 - DNA, 20 bp, Artificial Sequence
  Description of Artificial Sequence: Synthetic oligonucleotide
  Target: SCNA; (-) strand; PAM type: YTN; PAM sequence: CTC
agtaaatatttgatattatg

SEQ ID NO: 43942 - DNA, 20 bp, Artificial Sequence
  Description of Artificial Sequence: Synthetic oligonucleotide
  Target: SCNA; (-) strand; PAM type: YTN; PAM sequence: CTA
gcacatagtagatgctcagt

SEQ ID NO: 43943 - DNA, 20 bp, Artificial Sequence
  Description of Artificial Sequence: Synthetic oligonucleotide
  Target: SCNA; (-) strand; PAM type: YTN; PAM sequence: TTA
aaataatctagcacatagta

SEQ ID NO: 43944 - DNA, 20 bp, Artificial Sequence
  Description of Artificial Sequence: Synthetic oligonucleotide
  Target: SCNA; (-) strand; PAM type: YTN; PAM sequence: CTT
aaaataatctagcacatagt

SEQ ID NO: 43945 - DNA, 20 bp, Artificial Sequence
  Description of Artificial Sequence: Synthetic oligonucleotide
  Target: SCNA; (-) strand; PAM type: YTN; PAM sequence: TTC
aaaagtgcttaaaataatct

SEQ ID NO: 43946 - DNA, 20 bp, Artificial Sequence
  Description of Artificial Sequence: Synthetic oligonucleotide
  Target: SCNA; (-) strand; PAM type: YTN; PAM sequence: TTT
caaaagtgcttaaaataatc

SEQ ID NO: 43947 - DNA, 20 bp, Artificial Sequence
  Description of Artificial Sequence: Synthetic oligonucleotide
  Target: SCNA; (-) strand; PAM type: YTN; PAM sequence: TTT
tcaaaagtgcttaaaataat

SEQ ID NO: 43948 - DNA, 20 bp, Artificial Sequence
  Description of Artificial Sequence: Synthetic oligonucleotide
  Target: SCNA; (-) strand; PAM type: YTN; PAM sequence: TTA
tattttcaaaagtgcttaaa

SEQ ID NO: 43949 - DNA, 20 bp, Artificial Sequence
  Description of Artificial Sequence: Synthetic oligonucleotide
  Target: SCNA; (-) strand; PAM type: YTN; PAM sequence: CTT
atattttcaaaagtgcttaa

SEQ ID NO: 43950 - DNA, 20 bp, Artificial Sequence
  Description of Artificial Sequence: Synthetic oligonucleotide
  Target: SCNA; (-) strand; PAM type: YTN; PAM sequence: TTA
tcaaaatacttatattttca

SEQ ID NO: 43951 - DNA, 20 bp, Artificial Sequence
  Description of Artificial Sequence: Synthetic oligonucleotide
  Target: SCNA; (-) strand; PAM type: YTN; PAM sequence: TTT
atcaaaatacttatattttc

SEQ ID NO: 43952 - DNA, 20 bp, Artificial Sequence
  Description of Artificial Sequence: Synthetic oligonucleotide
  Target: SCNA; (-) strand; PAM type: YTN; PAM sequence: TTA
agacaatatatgatatacat

SEQ ID NO: 43953 - DNA, 20 bp, Artificial Sequence
  Description of Artificial Sequence: Synthetic oligonucleotide
  Target: SCNA; (-) strand; PAM type: YTN; PAM sequence: TTA
ttaagacaatatatgatata

SEQ ID NO: 43954 - DNA, 20 bp, Artificial Sequence
  Description of Artificial Sequence: Synthetic oligonucleotide
  Target: SCNA; (-) strand; PAM type: YTN; PAM sequence: CTT
attaagacaatatatgatat

SEQ ID NO: 43955 - DNA, 20 bp, Artificial Sequence
  Description of Artificial Sequence: Synthetic oligonucleotide
  Target: SCNA; (-) strand; PAM type: YTN; PAM sequence: TTA
gcaataagatgaaatataac

SEQ ID NO: 43956 - DNA, 20 bp, Artificial Sequence
  Description of Artificial Sequence: Synthetic oligonucleotide
  Target: SCNA; (-) strand; PAM type: YTN; PAM sequence: TTA
aaaaaataaaattagcaata

SEQ ID NO: 43957 - DNA, 20 bp, Artificial Sequence
  Description of Artificial Sequence: Synthetic oligonucleotide
  Target: SCNA; (-) strand; PAM type: YTN; PAM sequence: CTT
aaaaaaataaaattagcaat

SEQ ID NO: 43958 - DNA, 20 bp, Artificial Sequence
  Description of Artificial Sequence: Synthetic oligonucleotide
  Target: SCNA; (-) strand; PAM type: YTN; PAM sequence: TTC
ttaaaaaaataaaattagca

SEQ ID NO: 43959 - DNA, 20 bp, Artificial Sequence
  Description of Artificial Sequence: Synthetic oligonucleotide
  Target: SCNA; (-) strand; PAM type: YTN; PAM sequence: TTT
cttaaaaaaataaaattagc

SEQ ID NO: 43960 - DNA, 20 bp, Artificial Sequence
  Description of Artificial Sequence: Synthetic oligonucleotide
  Target: SCNA; (-) strand; PAM type: YTN; PAM sequence: TTT
tcttaaaaaaataaaattag

SEQ ID NO: 43961 - DNA, 20 bp, Artificial Sequence
  Description of Artificial Sequence: Synthetic oligonucleotide
  Target: SCNA; (-) strand; PAM type: YTN; PAM sequence: TTC
caaaaaaaggttttcttaaa

SEQ ID NO: 43962 - DNA, 20 bp, Artificial Sequence
  Description of Artificial Sequence: Synthetic oligonucleotide
  Target: SCNA; (-) strand; PAM type: YTN; PAM sequence: TTT
ccaaaaaaaggttttcttaa

SEQ ID NO: 43963 - DNA, 20 bp, Artificial Sequence
  Description of Artificial Sequence: Synthetic oligonucleotide
  Target: SCNA; (-) strand; PAM type: YTN; PAM sequence: CTT
tccaaaaaaaggttttctta

SEQ ID NO: 43964 - DNA, 20 bp, Artificial Sequence
  Description of Artificial Sequence: Synthetic oligonucleotide
  Target: SCNA; (-) strand; PAM type: YTN; PAM sequence: TTC
tttccaaaaaaaggttttct

SEQ ID NO: 43965 - DNA, 20 bp, Artificial Sequence
  Description of Artificial Sequence: Synthetic oligonucleotide
  Target: SCNA; (-) strand; PAM type: YTN; PAM sequence: TTC
gattctttccaaaaaaaggt

SEQ ID NO: 43966 - DNA, 20 bp, Artificial Sequence
  Description of Artificial Sequence: Synthetic oligonucleotide
  Target: SCNA; (-) strand; PAM type: YTN; PAM sequence: TTT
cgattctttccaaaaaaagg

SEQ ID NO: 43967 - DNA, 20 bp, Artificial Sequence
  Description of Artificial Sequence: Synthetic oligonucleotide
  Target: SCNA; (-) strand; PAM type: YTN; PAM sequence: TTA
gtttcgattctttccaaaaa

SEQ ID NO: 43968 - DNA, 20 bp, Artificial Sequence
  Description of Artificial Sequence: Synthetic oligonucleotide
  Target: SCNA; (-) strand; PAM type: YTN; PAM sequence: TTT
agtttcgattctttccaaaa

SEQ ID NO: 43969 - DNA, 20 bp, Artificial Sequence
  Description of Artificial Sequence: Synthetic oligonucleotide
  Target: SCNA; (-) strand; PAM type: YTN; PAM sequence: TTT
tagtttcgattctttccaaa

SEQ ID NO: 43970 - DNA, 20 bp, Artificial Sequence
  Description of Artificial Sequence: Synthetic oligonucleotide
  Target: SCNA; (-) strand; PAM type: YTN; PAM sequence: TTT
ttagtttcgattctttccaa

SEQ ID NO: 43971 - DNA, 20 bp, Artificial Sequence
  Description of Artificial Sequence: Synthetic oligonucleotide
  Target: SCNA; (-) strand; PAM type: YTN; PAM sequence: TTG
ggtttttagtttcgattctt

SEQ ID NO: 43972 - DNA, 20 bp, Artificial Sequence
  Description of Artificial Sequence: Synthetic oligonucleotide
  Target: SCNA; (-) strand; PAM type: YTN; PAM sequence: TTA
aatagttgggtttttagttt

SEQ ID NO: 43973 - DNA, 20 bp, Artificial Sequence
  Description of Artificial Sequence: Synthetic oligonucleotide
  Target: SCNA; (-) strand; PAM type: YTN; PAM sequence: TTT
aaatagttgggtttttagtt

SEQ ID NO: 43974 - DNA, 20 bp, Artificial Sequence
  Description of Artificial Sequence: Synthetic oligonucleotide
  Target: SCNA; (-) strand; PAM type: YTN; PAM sequence: TTT
taaatagttgggtttttagt

SEQ ID NO: 43975 - DNA, 20 bp, Artificial Sequence
  Description of Artificial Sequence: Synthetic oligonucleotide
  Target: SCNA; (-) strand; PAM type: YTN; PAM sequence: TTT
ttaaatagttgggtttttag

SEQ ID NO: 43976 - DNA, 20 bp, Artificial Sequence
  Description of Artificial Sequence: Synthetic oligonucleotide
  Target: SCNA; (-) strand; PAM type: YTN; PAM sequence: TTT
tttaaatagttgggttttta

SEQ ID NO: 43977 - DNA, 20 bp, Artificial Sequence
  Description of Artificial Sequence: Synthetic oligonucleotide
  Target: SCNA; (-) strand; PAM type: YTN; PAM sequence: TTC
cattttttaaatagttgggt

SEQ ID NO: 43978 - DNA, 20 bp, Artificial Sequence
  Description of Artificial Sequence: Synthetic oligonucleotide
  Target: SCNA; (-) strand; PAM type: YTN; PAM sequence: TTT
ccattttttaaatagttggg

SEQ ID NO: 43979 - DNA, 20 bp, Artificial Sequence
  Description of Artificial Sequence: Synthetic oligonucleotide
  Target: SCNA; (-) strand; PAM type: YTN; PAM sequence: TTC
ccggccaaaagtttccattt

SEQ ID NO: 43980 - DNA, 20 bp, Artificial Sequence
  Description of Artificial Sequence: Synthetic oligonucleotide
  Target: SCNA; (-) strand; PAM type: YTN; PAM sequence: CTC
cgttcccggccaaaagtttc

SEQ ID NO: 43981 - DNA, 20 bp, Artificial Sequence
  Description of Artificial Sequence: Synthetic oligonucleotide
  Target: SCNA; (-) strand; PAM type: YTN; PAM sequence: TTA
taggtgtgagcctccgttcc

SEQ ID NO: 43982 - DNA, 20 bp, Artificial Sequence
  Description of Artificial Sequence: Synthetic oligonucleotide
  Target: SCNA; (-) strand; PAM type: YTN; PAM sequence: CTG
agattataggtgtgagcctc

SEQ ID NO: 43983 - DNA, 20 bp, Artificial Sequence
  Description of Artificial Sequence: Synthetic oligonucleotide
  Target: SCNA; (-) strand; PAM type: YTN; PAM sequence: CTC
ccaaagtgctgagattatag

SEQ ID NO: 43984 - DNA, 20 bp, Artificial Sequence
  Description of Artificial Sequence: Synthetic oligonucleotide
  Target: SCNA; (-) strand; PAM type: YTN; PAM sequence: TTC
ggcctcccaaagtgctgaga

SEQ ID NO: 43985 - DNA, 20 bp, Artificial Sequence
  Description of Artificial Sequence: Synthetic oligonucleotide
  Target: SCNA; (-) strand; PAM type: YTN; PAM sequence: TTG
tgatccgcccattcggcctc

SEQ ID NO: 43986 - DNA, 20 bp, Artificial Sequence
  Description of Artificial Sequence: Synthetic oligonucleotide
  Target: SCNA; (-) strand; PAM type: YTN; PAM sequence: CTT
gtgatccgcccattcggcct

SEQ ID NO: 43987 - DNA, 20 bp, Artificial Sequence
  Description of Artificial Sequence: Synthetic oligonucleotide
  Target: SCNA; (-) strand; PAM type: YTN; PAM sequence: TTG
accttgtgatccgcccattc

SEQ ID NO: 43988 - DNA, 20 bp, Artificial Sequence
  Description of Artificial Sequence: Synthetic oligonucleotide
  Target: SCNA; (-) strand; PAM type: YTN; PAM sequence: CTT
gaccttgtgatccgcccatt

SEQ ID NO: 43989 - DNA, 20 bp, Artificial Sequence
  Description of Artificial Sequence: Synthetic oligonucleotide
  Target: SCNA; (-) strand; PAM type: YTN; PAM sequence: CTC
ttgaccttgtgatccgccca

SEQ ID NO: 43990 - DNA, 20 bp, Artificial Sequence
  Description of Artificial Sequence: Synthetic oligonucleotide
  Target: SCNA; (-) strand; PAM type: YTN; PAM sequence: CTC
aatctcttgaccttgtgatc

SEQ ID NO: 43991 - DNA, 20 bp, Artificial Sequence
  Description of Artificial Sequence: Synthetic oligonucleotide
  Target: SCNA; (-) strand; PAM type: YTN; PAM sequence: TTG
gccaggatggtctcaatctc

SEQ ID NO: 43992 - DNA, 20 bp, Artificial Sequence
  Description of Artificial Sequence: Synthetic oligonucleotide
  Target: SCNA; (-) strand; PAM type: YTN; PAM sequence: TTC
accacgttggccaggatggt

SEQ ID NO: 43993 - DNA, 20 bp, Artificial Sequence
  Description of Artificial Sequence: Synthetic oligonucleotide
  Target: SCNA; (-) strand; PAM type: YTN; PAM sequence: TTT
caccacgttggccaggatgg

SEQ ID NO: 43994 - DNA, 20 bp, Artificial Sequence
  Description of Artificial Sequence: Synthetic oligonucleotide
  Target: SCNA; (-) strand; PAM type: YTN; PAM sequence: TTA
gtagagacggagtttcacca

SEQ ID NO: 43995 - DNA, 20 bp, Artificial Sequence
  Description of Artificial Sequence: Synthetic oligonucleotide
  Target: SCNA; (-) strand; PAM type: YTN; PAM sequence: TTT
agtagagacggagtttcacc

SEQ ID NO: 43996 - DNA, 20 bp, Artificial Sequence
  Description of Artificial Sequence: Synthetic oligonucleotide
  Target: SCNA; (-) strand; PAM type: YTN; PAM sequence: TTT
tagtagagacggagtttcac

SEQ ID NO: 43997 - DNA, 20 bp, Artificial Sequence
  Description of Artificial Sequence: Synthetic oligonucleotide
  Target: SCNA; (-) strand; PAM type: YTN; PAM sequence: TTT
ttagtagagacggagtttca

SEQ ID NO: 43998 - DNA, 20 bp, Artificial Sequence
  Description of Artificial Sequence: Synthetic oligonucleotide
  Target: SCNA; (-) strand; PAM type: YTN; PAM sequence: TTG
tatttttagtagagacggag

SEQ ID NO: 43999 - DNA, 20 bp, Artificial Sequence
  Description of Artificial Sequence: Synthetic oligonucleotide
  Target: SCNA; (-) strand; PAM type: YTN; PAM sequence: TTT
gtatttttagtagagacgga

SEQ ID NO: 44000 - DNA, 20 bp, Artificial Sequence
  Description of Artificial Sequence: Synthetic oligonucleotide
  Target: SCNA; (-) strand; PAM type: YTN; PAM sequence: TTT
tgtatttttagtagagacgg

SEQ ID NO: 44001 - DNA, 20 bp, Artificial Sequence
  Description of Artificial Sequence: Synthetic oligonucleotide
  Target: SCNA; (-) strand; PAM type: YTN; PAM sequence: CTT
ttgtatttttagtagagacg

SEQ ID NO: 44002 - DNA, 20 bp, Artificial Sequence
  Description of Artificial Sequence: Synthetic oligonucleotide
  Target: SCNA; (-) strand; PAM type: YTN; PAM sequence: CTA
acttttgtatttttagtaga

SEQ ID NO: 44003 - DNA, 20 bp, Artificial Sequence
  Description of Artificial Sequence: Synthetic oligonucleotide
  Target: SCNA; (-) strand; PAM type: YTN; PAM sequence: CTA
caggcatgtgccaccatgcc

SEQ ID NO: 44004 - DNA, 20 bp, Artificial Sequence
  Description of Artificial Sequence: Synthetic oligonucleotide
  Target: SCNA; (-) strand; PAM type: YTN; PAM sequence: CTG
ggactacaggcatgtgccac

SEQ ID NO: 44005 - DNA, 20 bp, Artificial Sequence
  Description of Artificial Sequence: Synthetic oligonucleotide
  Target: SCNA; (-) strand; PAM type: YTN; PAM sequence: CTC
ccgagtagctgggactacag

SEQ ID NO: 44006 - DNA, 20 bp, Artificial Sequence
  Description of Artificial Sequence: Synthetic oligonucleotide
  Target: SCNA; (-) strand; PAM type: YTN; PAM sequence: CTC
agcctcccgagtagctggga

SEQ ID NO: 44007 - DNA, 20 bp, Artificial Sequence
  Description of Artificial Sequence: Synthetic oligonucleotide
  Target: SCNA; (-) strand; PAM type: YTN; PAM sequence: CTG
cctcagcctcccgagtagct

SEQ ID NO: 44008 - DNA, 20 bp, Artificial Sequence
  Description of Artificial Sequence: Synthetic oligonucleotide
  Target: SCNA; (-) strand; PAM type: YTN; PAM sequence: TTC
tgcctcagcctcccgagtag

SEQ ID NO: 44009 - DNA, 20 bp, Artificial Sequence
  Description of Artificial Sequence: Synthetic oligonucleotide
  Target: SCNA; (-) strand; PAM type: YTN; PAM sequence: CTT
ctgcctcagcctcccgagta

SEQ ID NO: 44010 - DNA, 20 bp, Artificial Sequence
  Description of Artificial Sequence: Synthetic oligonucleotide
  Target: SCNA; (-) strand; PAM type: YTN; PAM sequence: TTC
ttctgcctcagcctcccgag

SEQ ID NO: 44011 - DNA, 20 bp, Artificial Sequence
  Description of Artificial Sequence: Synthetic oligonucleotide
  Target: SCNA; (-) strand; PAM type: YTN; PAM sequence: TTC
cagcgattcttctgcctcag

SEQ ID NO: 44012 - DNA, 20 bp, Artificial Sequence
  Description of Artificial Sequence: Synthetic oligonucleotide
  Target: SCNA; (-) strand; PAM type: YTN; PAM sequence: CTG
ggttccagcgattcttctgc

SEQ ID NO: 44013 - DNA, 20 bp, Artificial Sequence
  Description of Artificial Sequence: Synthetic oligonucleotide
  Target: SCNA; (-) strand; PAM type: YTN; PAM sequence: CTC
ctgggttccagcgattcttc

SEQ ID NO: 44014 - DNA, 20 bp, Artificial Sequence
  Description of Artificial Sequence: Synthetic oligonucleotide
  Target: SCNA; (-) strand; PAM type: YTN; PAM sequence: CTC
cgcctcctgggttccagcga

SEQ ID NO: 44015 - DNA, 20 bp, Artificial Sequence
  Description of Artificial Sequence: Synthetic oligonucleotide
  Target: SCNA; (-) strand; PAM type: YTN; PAM sequence: CTG
caacctccgcctcctgggtt

SEQ ID NO: 44016 - DNA, 20 bp, Artificial Sequence
  Description of Artificial Sequence: Synthetic oligonucleotide
  Target: SCNA; (-) strand; PAM type: YTN; PAM sequence: CTC
actgcaacctccgcctcctg

SEQ ID NO: 44017 - DNA, 20 bp, Artificial Sequence
  Description of Artificial Sequence: Synthetic oligonucleotide
  Target: SCNA; (-) strand; PAM type: YTN; PAM sequence: CTC
ggctcactgcaacctccgcc

SEQ ID NO: 44018 - DNA, 20 bp, Artificial Sequence
  Description of Artificial Sequence: Synthetic oligonucleotide
  Target: SCNA; (-) strand; PAM type: YTN; PAM sequence: CTG
tctcggctcactgcaacctc

SEQ ID NO: 44019 - DNA, 20 bp, Artificial Sequence
  Description of Artificial Sequence: Synthetic oligonucleotide
  Target: SCNA; (-) strand; PAM type: YTN; PAM sequence: CTG
gagtgcagtggtgctgtctc

SEQ ID NO: 44020 - DNA, 20 bp, Artificial Sequence
  Description of Artificial Sequence: Synthetic oligonucleotide
  Target: SCNA; (-) strand; PAM type: YTN; PAM sequence: CTG
tcgccagtctggagtgcagt

SEQ ID NO: 44021 - DNA, 20 bp, Artificial Sequence
  Description of Artificial Sequence: Synthetic oligonucleotide
  Target: SCNA; (-) strand; PAM type: YTN; PAM sequence: CTC
tgtcgccagtctggagtgca

SEQ ID NO: 44022 - DNA, 20 bp, Artificial Sequence
  Description of Artificial Sequence: Synthetic oligonucleotide
  Target: SCNA; (-) strand; PAM type: YTN; PAM sequence: CTC
actctgtcgccagtctggag

SEQ ID NO: 44023 - DNA, 20 bp, Artificial Sequence
  Description of Artificial Sequence: Synthetic oligonucleotide
  Target: SCNA; (-) strand; PAM type: YTN; PAM sequence: TTA
gatggagtctcactctgtcg

SEQ ID NO: 44024 - DNA, 20 bp, Artificial Sequence
  Description of Artificial Sequence: Synthetic oligonucleotide
  Target: SCNA; (-) strand; PAM type: YTN; PAM sequence: TTT
agatggagtctcactctgtc

SEQ ID NO: 44025 - DNA, 20 bp, Artificial Sequence
  Description of Artificial Sequence: Synthetic oligonucleotide
  Target: SCNA; (-) strand; PAM type: YTN; PAM sequence: TTT
tagatggagtctcactctgt

SEQ ID NO: 44026 - DNA, 20 bp, Artificial Sequence
  Description of Artificial Sequence: Synthetic oligonucleotide
  Target: SCNA; (-) strand; PAM type: YTN; PAM sequence: TTT
ttagatggagtctcactctg

SEQ ID NO: 44027 - DNA, 20 bp, Artificial Sequence
  Description of Artificial Sequence: Synthetic oligonucleotide
  Target: SCNA; (-) strand; PAM type: YTN; PAM sequence: TTT
tttagatggagtctcactct

SEQ ID NO: 44028 - DNA, 20 bp, Artificial Sequence
  Description of Artificial Sequence: Synthetic oligonucleotide
  Target: SCNA; (-) strand; PAM type: YTN; PAM sequence: TTT
ttttagatggagtctcactc

SEQ ID NO: 44029 - DNA, 20 bp, Artificial Sequence
  Description of Artificial Sequence: Synthetic oligonucleotide
  Target: SCNA; (-) strand; PAM type: YTN; PAM sequence: TTT
tttttagatggagtctcact

SEQ ID NO: 44030 - DNA, 20 bp, Artificial Sequence
  Description of Artificial Sequence: Synthetic oligonucleotide
  Target: SCNA; (-) strand; PAM type: YTN; PAM sequence: TTT
ttttttagatggagtctcac

SEQ ID NO: 44031 - DNA, 20 bp, Artificial Sequence
  Description of Artificial Sequence: Synthetic oligonucleotide
  Target: SCNA; (-) strand; PAM type: YTN; PAM sequence: TTT
tttttttagatggagtctca

SEQ ID NO: 44032 - DNA, 20 bp, Artificial Sequence
  Description of Artificial Sequence: Synthetic oligonucleotide
  Target: SCNA; (-) strand; PAM type: YTN; PAM sequence: TTT
ttttttttagatggagtctc

SEQ ID NO: 44033 - DNA, 20 bp, Artificial Sequence
  Description of Artificial Sequence: Synthetic oligonucleotide
  Target: SCNA; (-) strand; PAM type: YTN; PAM sequence: TTT
tttttttttagatggagtct

SEQ ID NO: 44034 - DNA, 20 bp, Artificial Sequence
  Description of Artificial Sequence: Synthetic oligonucleotide
  Target: SCNA; (-) strand; PAM type: YTN; PAM sequence: TTT
ttttttttttagatggagtc

SEQ ID NO: 44035 - DNA, 20 bp, Artificial Sequence
  Description of Artificial Sequence: Synthetic oligonucleotide
  Target: SCNA; (-) strand; PAM type: YTN; PAM sequence: TTT
tttttttttttagatggagt

SEQ ID NO: 44036 - DNA, 20 bp, Artificial Sequence
  Description of Artificial Sequence: Synthetic oligonucleotide
  Target: SCNA; (-) strand; PAM type: YTN; PAM sequence: CTT
ttttttttttttagatggag

SEQ ID NO: 44037 - DNA, 20 bp, Artificial Sequence
  Description of Artificial Sequence: Synthetic oligonucleotide
  Target: SCNA; (-) strand; PAM type: YTN; PAM sequence: TTC
cttttttttttttttagatg

SEQ ID NO: 44038 - DNA, 20 bp, Artificial Sequence
  Description of Artificial Sequence: Synthetic oligonucleotide
  Target: SCNA; (-) strand; PAM type: YTN; PAM sequence: CTA
gcaaacgaagtaaggcaaaa

SEQ ID NO: 44039 - DNA, 20 bp, Artificial Sequence
  Description of Artificial Sequence: Synthetic oligonucleotide
  Target: SCNA; (-) strand; PAM type: YTN; PAM sequence: TTG
aatgtagctagcaaacgaag

SEQ ID NO: 44040 - DNA, 20 bp, Artificial Sequence
  Description of Artificial Sequence: Synthetic oligonucleotide
  Target: SCNA; (-) strand; PAM type: YTN; PAM sequence: CTT
gaatgtagctagcaaacgaa

SEQ ID NO: 44041 - DNA, 20 bp, Artificial Sequence
  Description of Artificial Sequence: Synthetic oligonucleotide
  Target: SCNA; (-) strand; PAM type: YTN; PAM sequence: TTG
cagacttgaatgtagctagc

SEQ ID NO: 44042 - DNA, 20 bp, Artificial Sequence
  Description of Artificial Sequence: Synthetic oligonucleotide
  Target: SCNA; (-) strand; PAM type: YTN; PAM sequence: TTA
attgcagacttgaatgtagc

SEQ ID NO: 44043 - DNA, 20 bp, Artificial Sequence
  Description of Artificial Sequence: Synthetic oligonucleotide
  Target: SCNA; (-) strand; PAM type: YTN; PAM sequence: CTT
aattgcagacttgaatgtag

SEQ ID NO: 44044 - DNA, 20 bp, Artificial Sequence
  Description of Artificial Sequence: Synthetic oligonucleotide
  Target: SCNA; (-) strand; PAM type: YTN; PAM sequence: TTG
agaaaggcaaaacaccgagc

SEQ ID NO: 44045 - DNA, 20 bp, Artificial Sequence
  Description of Artificial Sequence: Synthetic oligonucleotide
  Target: SCNA; (-) strand; PAM type: YTN; PAM sequence: TTT
gagaaaggcaaaacaccgag

SEQ ID NO: 44046 - DNA, 20 bp, Artificial Sequence
  Description of Artificial Sequence: Synthetic oligonucleotide
  Target: SCNA; (-) strand; PAM type: YTN; PAM sequence: CTG
tgcacagtttgagaaaggca

SEQ ID NO: 44047 - DNA, 20 bp, Artificial Sequence
  Description of Artificial Sequence: Synthetic oligonucleotide
  Target: SCNA; (-) strand; PAM type: YTN; PAM sequence: CTA
ggcaacagagagaaggggaa

SEQ ID NO: 44048 - DNA, 20 bp, Artificial Sequence
  Description of Artificial Sequence: Synthetic oligonucleotide
  Target: SCNA; (-) strand; PAM type: YTN; PAM sequence: TTC
ctaggcaacagagagaaggg

SEQ ID NO: 44049 - DNA, 20 bp, Artificial Sequence
  Description of Artificial Sequence: Synthetic oligonucleotide
  Target: SCNA; (-) strand; PAM type: YTN; PAM sequence: CTG
tattcctaggcaacagagag

SEQ ID NO: 44050 - DNA, 20 bp, Artificial Sequence
  Description of Artificial Sequence: Synthetic oligonucleotide
  Target: SCNA; (-) strand; PAM type: YTN; PAM sequence: TTG
gctgtattcctaggcaacag

SEQ ID NO: 44051 - DNA, 20 bp, Artificial Sequence
  Description of Artificial Sequence: Synthetic oligonucleotide
  Target: SCNA; (-) strand; PAM type: YTN; PAM sequence: TTT
ggctgtattcctaggcaaca

SEQ ID NO: 44052 - DNA, 20 bp, Artificial Sequence
  Description of Artificial Sequence: Synthetic oligonucleotide
  Target: SCNA; (-) strand; PAM type: YTN; PAM sequence: TTT
tggctgtattcctaggcaac

SEQ ID NO: 44053 - DNA, 20 bp, Artificial Sequence
  Description of Artificial Sequence: Synthetic oligonucleotide
  Target: SCNA; (-) strand; PAM type: YTN; PAM sequence: TTT
ttggctgtattcctaggcaa

SEQ ID NO: 44054 - DNA, 20 bp, Artificial Sequence
  Description of Artificial Sequence: Synthetic oligonucleotide
  Target: SCNA; (-) strand; PAM type: YTN; PAM sequence: CTC
aagtttttggctgtattcct

SEQ ID NO: 44055 - DNA, 20 bp, Artificial Sequence
  Description of Artificial Sequence: Synthetic oligonucleotide
  Target: SCNA; (-) strand; PAM type: YTN; PAM sequence: TTA
ctcaagtttttggctgtatt

SEQ ID NO: 44056 - DNA, 20 bp, Artificial Sequence
  Description of Artificial Sequence: Synthetic oligonucleotide
  Target: SCNA; (-) strand; PAM type: YTN; PAM sequence: CTA
ttactcaagtttttggctgt

SEQ ID NO: 44057 - DNA, 20 bp, Artificial Sequence
  Description of Artificial Sequence: Synthetic oligonucleotide
  Target: SCNA; (-) strand; PAM type: YTN; PAM sequence: CTA
tcatctattactcaagtttt

SEQ ID NO: 44058 - DNA, 20 bp, Artificial Sequence
  Description of Artificial Sequence: Synthetic oligonucleotide
  Target: SCNA; (-) strand; PAM type: YTN; PAM sequence: TTA
gtgacagacccatctatcat

SEQ ID NO: 44059 - DNA, 20 bp, Artificial Sequence
  Description of Artificial Sequence: Synthetic oligonucleotide
  Target: SCNA; (-) strand; PAM type: YTN; PAM sequence: CTT
agtgacagacccatctatca

SEQ ID NO: 44060 - DNA, 20 bp, Artificial Sequence
  Description of Artificial Sequence: Synthetic oligonucleotide
  Target: SCNA; (-) strand; PAM type: YTN; PAM sequence: CTA
ggatgtgcttagtgacagac

SEQ ID NO: 44061 - DNA, 20 bp, Artificial Sequence
  Description of Artificial Sequence: Synthetic oligonucleotide
  Target: SCNA; (-) strand; PAM type: YTN; PAM sequence: CTA
tgtcactaggatgtgcttag

SEQ ID NO: 44062 - DNA, 20 bp, Artificial Sequence
  Description of Artificial Sequence: Synthetic oligonucleotide
  Target: SCNA; (-) strand; PAM type: YTN; PAM sequence: TTA
tctatgtcactaggatgtgc

SEQ ID NO: 44063 - DNA, 20 bp, Artificial Sequence
  Description of Artificial Sequence: Synthetic oligonucleotide
  Target: SCNA; (-) strand; PAM type: YTN; PAM sequence: CTT
atctatgtcactaggatgtg

SEQ ID NO: 44064 - DNA, 20 bp, Artificial Sequence
  Description of Artificial Sequence: Synthetic oligonucleotide
  Target: SCNA; (-) strand; PAM type: YTN; PAM sequence: TTC
ttatctatgtcactaggatg

SEQ ID NO: 44065 - DNA, 20 bp, Artificial Sequence
  Description of Artificial Sequence: Synthetic oligonucleotide
  Target: SCNA; (-) strand; PAM type: YTN; PAM sequence: CTT
cttatctatgtcactaggat

SEQ ID NO: 44066 - DNA, 20 bp, Artificial Sequence
  Description of Artificial Sequence: Synthetic oligonucleotide
  Target: SCNA; (-) strand; PAM type: YTN; PAM sequence: TTG
cttcttatctatgtcactag

SEQ ID NO: 44067 - DNA, 20 bp, Artificial Sequence
  Description of Artificial Sequence: Synthetic oligonucleotide
  Target: SCNA; (-) strand; PAM type: YTN; PAM sequence: TTT
gcttcttatctatgtcacta

SEQ ID NO: 44068 - DNA, 20 bp, Artificial Sequence
  Description of Artificial Sequence: Synthetic oligonucleotide
  Target: SCNA; (-) strand; PAM type: YTN; PAM sequence: TTG
tagcatttgcttcttatcta

SEQ ID NO: 44069 - DNA, 20 bp, Artificial Sequence
  Description of Artificial Sequence: Synthetic oligonucleotide
  Target: SCNA; (-) strand; PAM type: YTN; PAM sequence: TTT
gtagcatttgcttcttatct

SEQ ID NO: 44070 - DNA, 20 bp, Artificial Sequence
  Description of Artificial Sequence: Synthetic oligonucleotide
  Target: SCNA; (-) strand; PAM type: YTN; PAM sequence: TTT
tgtagcatttgcttcttatc

SEQ ID NO: 44071 - DNA, 20 bp, Artificial Sequence
  Description of Artificial Sequence: Synthetic oligonucleotide
  Target: SCNA; (-) strand; PAM type: YTN; PAM sequence: CTA
taattttgtagcatttgctt

SEQ ID NO: 44072 - DNA, 20 bp, Artificial Sequence
  Description of Artificial Sequence: Synthetic oligonucleotide
  Target: SCNA; (-) strand; PAM type: YTN; PAM sequence: TTG
cacctataattttgtagcat

SEQ ID NO: 44073 - DNA, 20 bp, Artificial Sequence
  Description of Artificial Sequence: Synthetic oligonucleotide
  Target: SCNA; (-) strand; PAM type: YTN; PAM sequence: TTT
gcacctataattttgtagca

SEQ ID NO: 44074 - DNA, 20 bp, Artificial Sequence
  Description of Artificial Sequence: Synthetic oligonucleotide
  Target: SCNA; (-) strand; PAM type: YTN; PAM sequence: TTG
tagtttgcacctataatttt

SEQ ID NO: 44075 - DNA, 20 bp, Artificial Sequence
  Description of Artificial Sequence: Synthetic oligonucleotide
  Target: SCNA; (-) strand; PAM type: YTN; PAM sequence: CTT
gtagtttgcacctataattt

SEQ ID NO: 44076 - DNA, 20 bp, Artificial Sequence
  Description of Artificial Sequence: Synthetic oligonucleotide
  Target: SCNA; (-) strand; PAM type: YTN; PAM sequence: TTA
aaacacaacttgtagtttgc

SEQ ID NO: 44077 - DNA, 20 bp, Artificial Sequence
  Description of Artificial Sequence: Synthetic oligonucleotide
  Target: SCNA; (-) strand; PAM type: YTN; PAM sequence: TTA
aaaccaattaaaacacaact

SEQ ID NO: 44078 - DNA, 20 bp, Artificial Sequence
  Description of Artificial Sequence: Synthetic oligonucleotide
  Target: SCNA; (-) strand; PAM type: YTN; PAM sequence: TTG
ttaaaaccaattaaaacaca

SEQ ID NO: 44079 - DNA, 20 bp, Artificial Sequence
  Description of Artificial Sequence: Synthetic oligonucleotide
  Target: SCNA; (-) strand; PAM type: YTN; PAM sequence: CTT
gttaaaaccaattaaaacac

SEQ ID NO: 44080 - DNA, 20 bp, Artificial Sequence
  Description of Artificial Sequence: Synthetic oligonucleotide
  Target: SCNA; (-) strand; PAM type: YTN; PAM sequence: TTA
taagtacttgttaaaaccaa

SEQ ID NO: 44081 - DNA, 20 bp, Artificial Sequence
  Description of Artificial Sequence: Synthetic oligonucleotide
  Target: SCNA; (-) strand; PAM type: YTN; PAM sequence: CTT
ataagtacttgttaaaacca

SEQ ID NO: 44082 - DNA, 20 bp, Artificial Sequence
  Description of Artificial Sequence: Synthetic oligonucleotide
  Target: SCNA; (-) strand; PAM type: YTN; PAM sequence: CTG
cttataagtacttgttaaaa

SEQ ID NO: 44083 - DNA, 20 bp, Artificial Sequence
  Description of Artificial Sequence: Synthetic oligonucleotide
  Target: SCNA; (-) strand; PAM type: YTN; PAM sequence: TTC
tgcttataagtacttgttaa

SEQ ID NO: 44084 - DNA, 20 bp, Artificial Sequence
  Description of Artificial Sequence: Synthetic oligonucleotide
  Target: SCNA; (-) strand; PAM type: YTN; PAM sequence: CTT
ctgcttataagtacttgtta

SEQ ID NO: 44085 - DNA, 20 bp, Artificial Sequence
  Description of Artificial Sequence: Synthetic oligonucleotide
  Target: SCNA; (-) strand; PAM type: YTN; PAM sequence: TTC
ttctgcttataagtacttgt

SEQ ID NO: 44086 - DNA, 20 bp, Artificial Sequence
  Description of Artificial Sequence: Synthetic oligonucleotide
  Target: SCNA; (-) strand; PAM type: YTN; PAM sequence: TTC
acagttcttctgcttataag

SEQ ID NO: 44087 - DNA, 20 bp, Artificial Sequence
  Description of Artificial Sequence: Synthetic oligonucleotide
  Target: SCNA; (-) strand; PAM type: YTN; PAM sequence: TTT
cacagttcttctgcttataa

SEQ ID NO: 44088 - DNA, 20 bp, Artificial Sequence
  Description of Artificial Sequence: Synthetic oligonucleotide
  Target: SCNA; (-) strand; PAM type: YTN; PAM sequence: TTT
tcacagttcttctgcttata

SEQ ID NO: 44089 - DNA, 20 bp, Artificial Sequence
  Description of Artificial Sequence: Synthetic oligonucleotide
  Target: SCNA; (-) strand; PAM type: YTN; PAM sequence: TTT
ttcacagttcttctgcttat

SEQ ID NO: 44090 - DNA, 20 bp, Artificial Sequence
  Description of Artificial Sequence: Synthetic oligonucleotide
  Target: SCNA; (-) strand; PAM type: YTN; PAM sequence: TTA
gatttttcacagttcttctg

SEQ ID NO: 44091 - DNA, 20 bp, Artificial Sequence
  Description of Artificial Sequence: Synthetic oligonucleotide
  Target: SCNA; (-) strand; PAM type: YTN; PAM sequence: TTG
caagtaggacaaaatgttag

SEQ ID NO: 44092 - DNA, 20 bp, Artificial Sequence
  Description of Artificial Sequence: Synthetic oligonucleotide
  Target: SCNA; (-) strand; PAM type: YTN; PAM sequence: CTT
gcaagtaggacaaaatgtta

SEQ ID NO: 44093 - DNA, 20 bp, Artificial Sequence
  Description of Artificial Sequence: Synthetic oligonucleotide
  Target: SCNA; (-) strand; PAM type: YTN; PAM sequence: CTG
gcaggcttgcaagtaggaca

SEQ ID NO: 44094 - DNA, 20 bp, Artificial Sequence
  Description of Artificial Sequence: Synthetic oligonucleotide
  Target: SCNA; (-) strand; PAM type: YTN; PAM sequence: CTC
aaaagactggcaggcttgca

SEQ ID NO: 44095 - DNA, 20 bp, Artificial Sequence
  Description of Artificial Sequence: Synthetic oligonucleotide
  Target: SCNA; (-) strand; PAM type: YTN; PAM sequence: TTG
cccagcactcaaaagactgg

SEQ ID NO: 44096 - DNA, 20 bp, Artificial Sequence
  Description of Artificial Sequence: Synthetic oligonucleotide
  Target: SCNA; (-) strand; PAM type: YTN; PAM sequence: TTT
gcccagcactcaaaagactg

SEQ ID NO: 44097 - DNA, 20 bp, Artificial Sequence
  Description of Artificial Sequence: Synthetic oligonucleotide
  Target: SCNA; (-) strand; PAM type: YTN; PAM sequence: CTT
tgcccagcactcaaaagact

SEQ ID NO: 44098 - DNA, 20 bp, Artificial Sequence
  Description of Artificial Sequence: Synthetic oligonucleotide
  Target: SCNA; (-) strand; PAM type: YTN; PAM sequence: TTG
tgtctttgcccagcactcaa

SEQ ID NO: 44099 - DNA, 20 bp, Artificial Sequence
  Description of Artificial Sequence: Synthetic oligonucleotide
  Target: SCNA; (-) strand; PAM type: YTN; PAM sequence: CTA
ttgtgtctttgcccagcact

SEQ ID NO: 44100 - DNA, 20 bp, Artificial Sequence
  Description of Artificial Sequence: Synthetic oligonucleotide
  Target: SCNA; (-) strand; PAM type: YTN; PAM sequence: CTG
acccagcactattgtgtctt

SEQ ID NO: 44101 - DNA, 20 bp, Artificial Sequence
  Description of Artificial Sequence: Synthetic oligonucleotide
  Target: SCNA; (-) strand; PAM type: YTN; PAM sequence: CTC
tgacccagcactattgtgtc

SEQ ID NO: 44102 - DNA, 20 bp, Artificial Sequence
  Description of Artificial Sequence: Synthetic oligonucleotide
  Target: SCNA; (-) strand; PAM type: YTN; PAM sequence: TTG
tctctgacccagcactattg

SEQ ID NO: 44103 - DNA, 20 bp, Artificial Sequence
  Description of Artificial Sequence: Synthetic oligonucleotide
  Target: SCNA; (-) strand; PAM type: YTN; PAM sequence: TTA
attgtctctgacccagcact

SEQ ID NO: 44104 - DNA, 20 bp, Artificial Sequence
  Description of Artificial Sequence: Synthetic oligonucleotide
  Target: SCNA; (-) strand; PAM type: YTN; PAM sequence: TTA
atgtgagtagtaaagttaat

SEQ ID NO: 44105 - DNA, 20 bp, Artificial Sequence
  Description of Artificial Sequence: Synthetic oligonucleotide
  Target: SCNA; (-) strand; PAM type: YTN; PAM sequence: CTA
ttaatgtgagtagtaaagtt

SEQ ID NO: 44106 - DNA, 20 bp, Artificial Sequence
  Description of Artificial Sequence: Synthetic oligonucleotide
  Target: SCNA; (-) strand; PAM type: YTN; PAM sequence: CTA
atgctattaatgtgagtagt

SEQ ID NO: 44107 - DNA, 20 bp, Artificial Sequence
  Description of Artificial Sequence: Synthetic oligonucleotide
  Target: SCNA; (-) strand; PAM type: YTN; PAM sequence: TTG
ctaatgctattaatgtgagt

SEQ ID NO: 44108 - DNA, 20 bp, Artificial Sequence
  Description of Artificial Sequence: Synthetic oligonucleotide
  Target: SCNA; (-) strand; PAM type: YTN; PAM sequence: CTT
gctaatgctattaatgtgag

SEQ ID NO: 44109 - DNA, 20 bp, Artificial Sequence
  Description of Artificial Sequence: Synthetic oligonucleotide
  Target: SCNA; (-) strand; PAM type: YTN; PAM sequence: CTC
ttgctaatgctattaatgtg

SEQ ID NO: 44110 - DNA, 20 bp, Artificial Sequence
  Description of Artificial Sequence: Synthetic oligonucleotide
  Target: SCNA; (-) strand; PAM type: YTN; PAM sequence: TTG
aggaatcagtgcaagaaaat

SEQ ID NO: 44111 - DNA, 20 bp, Artificial Sequence
  Description of Artificial Sequence: Synthetic oligonucleotide
  Target: SCNA; (-) strand; PAM type: YTN; PAM sequence: CTT
gaggaatcagtgcaagaaaa

SEQ ID NO: 44112 - DNA, 20 bp, Artificial Sequence
  Description of Artificial Sequence: Synthetic oligonucleotide
  Target: SCNA; (-) strand; PAM type: YTN; PAM sequence: TTG
cggcttgaggaatcagtgca

SEQ ID NO: 44113 - DNA, 20 bp, Artificial Sequence
  Description of Artificial Sequence: Synthetic oligonucleotide
  Target: SCNA; (-) strand; PAM type: YTN; PAM sequence: CTG
tgggaattgcggcttgagga

SEQ ID NO: 44114 - DNA, 20 bp, Artificial Sequence
  Description of Artificial Sequence: Synthetic oligonucleotide
  Target: SCNA; (-) strand; PAM type: YTN; PAM sequence: TTC
tgtgggaattgcggcttgag

SEQ ID NO: 44115 - DNA, 20 bp, Artificial Sequence
  Description of Artificial Sequence: Synthetic oligonucleotide
  Target: SCNA; (-) strand; PAM type: YTN; PAM sequence: TTT
ctgtgggaattgcggcttga

SEQ ID NO: 44116 - DNA, 20 bp, Artificial Sequence
  Description of Artificial Sequence: Synthetic oligonucleotide
  Target: SCNA; (-) strand; PAM type: YTN; PAM sequence: TTT
tctgtgggaattgcggcttg

SEQ ID NO: 44117 - DNA, 20 bp, Artificial Sequence
  Description of Artificial Sequence: Synthetic oligonucleotide
  Target: SCNA; (-) strand; PAM type: YTN; PAM sequence: CTT
ttctgtgggaattgcggctt

SEQ ID NO: 44118 - DNA, 20 bp, Artificial Sequence
  Description of Artificial Sequence: Synthetic oligonucleotide
  Target: SCNA; (-) strand; PAM type: YTN; PAM sequence: CTG
agcttttctgtgggaattgc

SEQ ID NO: 44119 - DNA, 20 bp, Artificial Sequence
  Description of Artificial Sequence: Synthetic oligonucleotide
  Target: SCNA; (-) strand; PAM type: YTN; PAM sequence: CTG
agcatgtaggtgtcacctga

SEQ ID NO: 44120 - DNA, 20 bp, Artificial Sequence
  Description of Artificial Sequence: Synthetic oligonucleotide
  Target: SCNA; (-) strand; PAM type: YTN; PAM sequence: CTA
atgcaacccactgagcatgt

SEQ ID NO: 44121 - DNA, 20 bp, Artificial Sequence
  Description of Artificial Sequence: Synthetic oligonucleotide
  Target: SCNA; (-) strand; PAM type: YTN; PAM sequence: TTC
taatgcaacccactgagcat

SEQ ID NO: 44122 - DNA, 20 bp, Artificial Sequence
  Description of Artificial Sequence: Synthetic oligonucleotide
  Target: SCNA; (-) strand; PAM type: YTN; PAM sequence: TTT
ctaatgcaacccactgagca

SEQ ID NO: 44123 - DNA, 20 bp, Artificial Sequence
  Description of Artificial Sequence: Synthetic oligonucleotide
  Target: SCNA; (-) strand; PAM type: YTN; PAM sequence: TTT
tctaatgcaacccactgagc

SEQ ID NO: 44124 - DNA, 20 bp, Artificial Sequence
  Description of Artificial Sequence: Synthetic oligonucleotide
  Target: SCNA; (-) strand; PAM type: YTN; PAM sequence: CTT
ttctaatgcaacccactgag

SEQ ID NO: 44125 - DNA, 20 bp, Artificial Sequence
  Description of Artificial Sequence: Synthetic oligonucleotide
  Target: SCNA; (-) strand; PAM type: YTN; PAM sequence: CTC
ttttctaatgcaacccactg

SEQ ID NO: 44126 - DNA, 20 bp, Artificial Sequence
  Description of Artificial Sequence: Synthetic oligonucleotide
  Target: SCNA; (-) strand; PAM type: YTN; PAM sequence: TTC
ctcttttctaatgcaaccca

SEQ ID NO: 44127 - DNA, 20 bp, Artificial Sequence
  Description of Artificial Sequence: Synthetic oligonucleotide
  Target: SCNA; (-) strand; PAM type: YTN; PAM sequence: CTG
cgttcctcttttctaatgca

SEQ ID NO: 44128 - DNA, 20 bp, Artificial Sequence
  Description of Artificial Sequence: Synthetic oligonucleotide
  Target: SCNA; (-) strand; PAM type: YTN; PAM sequence: CTC
tgcgttcctcttttctaatg

SEQ ID NO: 44129 - DNA, 20 bp, Artificial Sequence
  Description of Artificial Sequence: Synthetic oligonucleotide
  Target: SCNA; (-) strand; PAM type: YTN; PAM sequence: CTG
agctctgcgttcctcttttc

SEQ ID NO: 44130 - DNA, 20 bp, Artificial Sequence
  Description of Artificial Sequence: Synthetic oligonucleotide
  Target: SCNA; (-) strand; PAM type: YTN; PAM sequence: TTC
ctgagctctgcgttcctctt

SEQ ID NO: 44131 - DNA, 20 bp, Artificial Sequence
  Description of Artificial Sequence: Synthetic oligonucleotide
  Target: SCNA; (-) strand; PAM type: YTN; PAM sequence: TTT
cctgagctctgcgttcctct

SEQ ID NO: 44132 - DNA, 20 bp, Artificial Sequence
  Description of Artificial Sequence: Synthetic oligonucleotide
  Target: SCNA; (-) strand; PAM type: YTN; PAM sequence: TTA
taaaatatccatgtttcctg

SEQ ID NO: 44133 - DNA, 20 bp, Artificial Sequence
  Description of Artificial Sequence: Synthetic oligonucleotide
  Target: SCNA; (-) strand; PAM type: YTN; PAM sequence: CTG
gccattataaaatatccatg

SEQ ID NO: 44134 - DNA, 20 bp, Artificial Sequence
  Description of Artificial Sequence: Synthetic oligonucleotide
  Target: SCNA; (-) strand; PAM type: YTN; PAM sequence: TTA
ctggccattataaaatatcc

SEQ ID NO: 44135 - DNA, 20 bp, Artificial Sequence
  Description of Artificial Sequence: Synthetic oligonucleotide
  Target: SCNA; (-) strand; PAM type: YTN; PAM sequence: TTT
actggccattataaaatatc

SEQ ID NO: 44136 - DNA, 20 bp, Artificial Sequence
  Description of Artificial Sequence: Synthetic oligonucleotide
  Target: SCNA; (-) strand; PAM type: YTN; PAM sequence: CTT
tactggccattataaaatat

SEQ ID NO: 44137 - DNA, 20 bp, Artificial Sequence
  Description of Artificial Sequence: Synthetic oligonucleotide
  Target: SCNA; (-) strand; PAM type: YTN; PAM sequence: CTA
aagcaaagggacatctttac

SEQ ID NO: 44138 - DNA, 20 bp, Artificial Sequence
  Description of Artificial Sequence: Synthetic oligonucleotide
  Target: SCNA; (-) strand; PAM type: YTN; PAM sequence: TTC
taaagcaaagggacatcttt

SEQ ID NO: 44139 - DNA, 20 bp, Artificial Sequence
  Description of Artificial Sequence: Synthetic oligonucleotide
  Target: SCNA; (-) strand; PAM type: YTN; PAM sequence: TTT
ctaaagcaaagggacatctt

SEQ ID NO: 44140 - DNA, 20 bp, Artificial Sequence
  Description of Artificial Sequence: Synthetic oligonucleotide
  Target: SCNA; (-) strand; PAM type: YTN; PAM sequence: CTT
tctaaagcaaagggacatct

SEQ ID NO: 44141 - DNA, 20 bp, Artificial Sequence
  Description of Artificial Sequence: Synthetic oligonucleotide
  Target: SCNA; (-) strand; PAM type: YTN; PAM sequence: CTC
tttctaaagcaaagggacat

SEQ ID NO: 44142 - DNA, 20 bp, Artificial Sequence
  Description of Artificial Sequence: Synthetic oligonucleotide
  Target: SCNA; (-) strand; PAM type: YTN; PAM sequence: TTG
gatagaggtagtgcctcttt

SEQ ID NO: 44143 - DNA, 20 bp, Artificial Sequence
  Description of Artificial Sequence: Synthetic oligonucleotide
  Target: SCNA; (-) strand; PAM type: YTN; PAM sequence: CTT
ggatagaggtagtgcctctt

SEQ ID NO: 44144 - DNA, 20 bp, Artificial Sequence
  Description of Artificial Sequence: Synthetic oligonucleotide
  Target: SCNA; (-) strand; PAM type: YTN; PAM sequence: TTG
cagccttggatagaggtagt

SEQ ID NO: 44145 - DNA, 20 bp, Artificial Sequence
  Description of Artificial Sequence: Synthetic oligonucleotide
  Target: SCNA; (-) strand; PAM type: YTN; PAM sequence: CTT
gcagccttggatagaggtag

SEQ ID NO: 44146 - DNA, 20 bp, Artificial Sequence
  Description of Artificial Sequence: Synthetic oligonucleotide
  Target: SCNA; (-) strand; PAM type: YTN; PAM sequence: CTA
aaacaaaaggcaggtgtgct

SEQ ID NO: 44147 - DNA, 20 bp, Artificial Sequence
  Description of Artificial Sequence: Synthetic oligonucleotide
  Target: SCNA; (-) strand; PAM type: YTN; PAM sequence: TTC
taaaacaaaaggcaggtgtg

SEQ ID NO: 44148 - DNA, 20 bp, Artificial Sequence
  Description of Artificial Sequence: Synthetic oligonucleotide
  Target: SCNA; (-) strand; PAM type: YTN; PAM sequence: CTT
ctaaaacaaaaggcaggtgt

SEQ ID NO: 44149 - DNA, 20 bp, Artificial Sequence
  Description of Artificial Sequence: Synthetic oligonucleotide
  Target: SCNA; (-) strand; PAM type: YTN; PAM sequence: CTC
cttctaaaacaaaaggcagg

SEQ ID NO: 44150 - DNA, 20 bp, Artificial Sequence
  Description of Artificial Sequence: Synthetic oligonucleotide
  Target: SCNA; (-) strand; PAM type: YTN; PAM sequence: TTC
tccttctaaaacaaaaggca

SEQ ID NO: 44151 - DNA, 20 bp, Artificial Sequence
  Description of Artificial Sequence: Synthetic oligonucleotide
  Target: SCNA; (-) strand; PAM type: YTN; PAM sequence: TTT
ctccttctaaaacaaaaggc

SEQ ID NO: 44152 - DNA, 20 bp, Artificial Sequence
  Description of Artificial Sequence: Synthetic oligonucleotide
  Target: SCNA; (-) strand; PAM type: YTN; PAM sequence: TTG
gaagatagaaatcatttctc

SEQ ID NO: 44153 - DNA, 20 bp, Artificial Sequence
  Description of Artificial Sequence: Synthetic oligonucleotide
  Target: SCNA; (-) strand; PAM type: YTN; PAM sequence: CTT
ggaagatagaaatcatttct

SEQ ID NO: 44154 - DNA, 20 bp, Artificial Sequence
  Description of Artificial Sequence: Synthetic oligonucleotide
  Target: SCNA; (-) strand; PAM type: YTN; PAM sequence: TTC
atatagtgaacagccttgga

SEQ ID NO: 44155 - DNA, 20 bp, Artificial Sequence
  Description of Artificial Sequence: Synthetic oligonucleotide
  Target: SCNA; (-) strand; PAM type: YTN; PAM sequence: TTT
catatagtgaacagccttgg

SEQ ID NO: 44156 - DNA, 20 bp, Artificial Sequence
  Description of Artificial Sequence: Synthetic oligonucleotide
  Target: SCNA; (-) strand; PAM type: YTN; PAM sequence: TTT
tcatatagtgaacagccttg

SEQ ID NO: 44157 - DNA, 20 bp, Artificial Sequence
  Description of Artificial Sequence: Synthetic oligonucleotide
  Target: SCNA; (-) strand; PAM type: YTN; PAM sequence: CTT
ttcatatagtgaacagcctt

SEQ ID NO: 44158 - DNA, 20 bp, Artificial Sequence
  Description of Artificial Sequence: Synthetic oligonucleotide
  Target: SCNA; (-) strand; PAM type: YTN; PAM sequence: CTG
tcttttcatatagtgaacag

SEQ ID NO: 44159 - DNA, 20 bp, Artificial Sequence
  Description of Artificial Sequence: Synthetic oligonucleotide
  Target: SCNA; (-) strand; PAM type: YTN; PAM sequence: TTG
ggactgtcttttcatatagt

SEQ ID NO: 44160 - DNA, 20 bp, Artificial Sequence
  Description of Artificial Sequence: Synthetic oligonucleotide
  Target: SCNA; (-) strand; PAM type: YTN; PAM sequence: TTT
gggactgtcttttcatatag

SEQ ID NO: 44161 - DNA, 20 bp, Artificial Sequence
  Description of Artificial Sequence: Synthetic oligonucleotide
  Target: SCNA; (-) strand; PAM type: YTN; PAM sequence: TTG
tttgggactgtcttttcata

SEQ ID NO: 44162 - DNA, 20 bp, Artificial Sequence
  Description of Artificial Sequence: Synthetic oligonucleotide
  Target: SCNA; (-) strand; PAM type: YTN; PAM sequence: TTT
gtttgggactgtcttttcat

SEQ ID NO: 44163 - DNA, 20 bp, Artificial Sequence
  Description of Artificial Sequence: Synthetic oligonucleotide
  Target: SCNA; (-) strand; PAM type: YTN; PAM sequence: TTT
tgtttgggactgtcttttca

SEQ ID NO: 44164 - DNA, 20 bp, Artificial Sequence
  Description of Artificial Sequence: Synthetic oligonucleotide
  Target: SCNA; (-) strand; PAM type: YTN; PAM sequence: CTT
ttgtttgggactgtcttttc

SEQ ID NO: 44165 - DNA, 20 bp, Artificial Sequence
  Description of Artificial Sequence: Synthetic oligonucleotide
  Target: SCNA; (-) strand; PAM type: YTN; PAM sequence: CTG
ccttttgtttgggactgtct

SEQ ID NO: 44166 - DNA, 20 bp, Artificial Sequence
  Description of Artificial Sequence: Synthetic oligonucleotide
  Target: SCNA; (-) strand; PAM type: YTN; PAM sequence: TTC
aagcaagtcagtaactgcct

SEQ ID NO: 44167 - DNA, 20 bp, Artificial Sequence
  Description of Artificial Sequence: Synthetic oligonucleotide
  Target: SCNA; (-) strand; PAM type: YTN; PAM sequence: TTT
caagcaagtcagtaactgcc

SEQ ID NO: 44168 - DNA, 20 bp, Artificial Sequence
  Description of Artificial Sequence: Synthetic oligonucleotide
  Target: SCNA; (-) strand; PAM type: YTN; PAM sequence: TTT
tcaagcaagtcagtaactgc

SEQ ID NO: 44169 - DNA, 20 bp, Artificial Sequence
  Description of Artificial Sequence: Synthetic oligonucleotide
  Target: SCNA; (-) strand; PAM type: YTN; PAM sequence: TTT
ttcaagcaagtcagtaactg

SEQ ID NO: 44170 - DNA, 20 bp, Artificial Sequence
  Description of Artificial Sequence: Synthetic oligonucleotide
  Target: SCNA; (-) strand; PAM type: YTN; PAM sequence: CTG
cacatttttcaagcaagtca

SEQ ID NO: 44171 - DNA, 20 bp, Artificial Sequence
  Description of Artificial Sequence: Synthetic oligonucleotide
  Target: SCNA; (-) strand; PAM type: YTN; PAM sequence: TTC
tgcacatttttcaagcaagt

SEQ ID NO: 44172 - DNA, 20 bp, Artificial Sequence
  Description of Artificial Sequence: Synthetic oligonucleotide
  Target: SCNA; (-) strand; PAM type: YTN; PAM sequence: TTT
ctgcacatttttcaagcaag

SEQ ID NO: 44173 - DNA, 20 bp, Artificial Sequence
  Description of Artificial Sequence: Synthetic oligonucleotide
  Target: SCNA; (-) strand; PAM type: YTN; PAM sequence: TTC
aagcagcgtatcatttctgc

SEQ ID NO: 44174 - DNA, 20 bp, Artificial Sequence
  Description of Artificial Sequence: Synthetic oligonucleotide
  Target: SCNA; (-) strand; PAM type: YTN; PAM sequence: CTG
tccacattcaagcagcgtat

SEQ ID NO: 44175 - DNA, 20 bp, Artificial Sequence
  Description of Artificial Sequence: Synthetic oligonucleotide
  Target: SCNA; (-) strand; PAM type: YTN; PAM sequence: CTG
tgtcagctgtccacattcaa

SEQ ID NO: 44176 - DNA, 20 bp, Artificial Sequence
  Description of Artificial Sequence: Synthetic oligonucleotide
  Target: SCNA; (-) strand; PAM type: YTN; PAM sequence: TTG
tccctgtgtcagctgtccac

SEQ ID NO: 44177 - DNA, 20 bp, Artificial Sequence
  Description of Artificial Sequence: Synthetic oligonucleotide
  Target: SCNA; (-) strand; PAM type: YTN; PAM sequence: CTT
gtccctgtgtcagctgtcca

SEQ ID NO: 44178 - DNA, 20 bp, Artificial Sequence
  Description of Artificial Sequence: Synthetic oligonucleotide
  Target: SCNA; (-) strand; PAM type: YTN; PAM sequence: CTC
cttgtccctgtgtcagctgt

SEQ ID NO: 44179 - DNA, 20 bp, Artificial Sequence
  Description of Artificial Sequence: Synthetic oligonucleotide
  Target: SCNA; (-) strand; PAM type: YTN; PAM sequence: TTA
ctccttgtccctgtgtcagc

SEQ ID NO: 44180 - DNA, 20 bp, Artificial Sequence
  Description of Artificial Sequence: Synthetic oligonucleotide
  Target: SCNA; (-) strand; PAM type: YTN; PAM sequence: TTT
actccttgtccctgtgtcag

SEQ ID NO: 44181 - DNA, 20 bp, Artificial Sequence
  Description of Artificial Sequence: Synthetic oligonucleotide
  Target: SCNA; (-) strand; PAM type: YTN; PAM sequence: TTT
tactccttgtccctgtgtca

SEQ ID NO: 44182 - DNA, 20 bp, Artificial Sequence
  Description of Artificial Sequence: Synthetic oligonucleotide
  Target: SCNA; (-) strand; PAM type: YTN; PAM sequence: TTT
ttactccttgtccctgtgtc

SEQ ID NO: 44183 - DNA, 20 bp, Artificial Sequence
  Description of Artificial Sequence: Synthetic oligonucleotide
  Target: SCNA; (-) strand; PAM type: YTN; PAM sequence: CTA
atcatttttactccttgtcc

SEQ ID NO: 44184 - DNA, 20 bp, Artificial Sequence
  Description of Artificial Sequence: Synthetic oligonucleotide
  Target: SCNA; (-) strand; PAM type: YTN; PAM sequence: CTC
aaaacctaatcatttttact

SEQ ID NO: 44185 - DNA, 20 bp, Artificial Sequence
  Description of Artificial Sequence: Synthetic oligonucleotide
  Target: SCNA; (-) strand; PAM type: YTN; PAM sequence: TTG
gtcaagctcaaaacctaatc

SEQ ID NO: 44186 - DNA, 20 bp, Artificial Sequence
  Description of Artificial Sequence: Synthetic oligonucleotide
  Target: SCNA; (-) strand; PAM type: YTN; PAM sequence: CTA
gttggtcaagctcaaaacct

SEQ ID NO: 44187 - DNA, 20 bp, Artificial Sequence
  Description of Artificial Sequence: Synthetic oligonucleotide
  Target: SCNA; (-) strand; PAM type: YTN; PAM sequence: TTC
ctagttggtcaagctcaaaa

SEQ ID NO: 44188 - DNA, 20 bp, Artificial Sequence
  Description of Artificial Sequence: Synthetic oligonucleotide
  Target: SCNA; (-) strand; PAM type: YTN; PAM sequence: CTT
cctagttggtcaagctcaaa

SEQ ID NO: 44189 - DNA, 20 bp, Artificial Sequence
  Description of Artificial Sequence: Synthetic oligonucleotide
  Target: SCNA; (-) strand; PAM type: YTN; PAM sequence: TTA
tcttcctagttggtcaagct

SEQ ID NO: 44190 - DNA, 20 bp, Artificial Sequence
  Description of Artificial Sequence: Synthetic oligonucleotide
  Target: SCNA; (-) strand; PAM type: YTN; PAM sequence: CTA
ataattatcttcctagttgg

SEQ ID NO: 44191 - DNA, 20 bp, Artificial Sequence
  Description of Artificial Sequence: Synthetic oligonucleotide
  Target: SCNA; (-) strand; PAM type: YTN; PAM sequence: CTG
ctaataattatcttcctagt

SEQ ID NO: 44192 - DNA, 20 bp, Artificial Sequence
  Description of Artificial Sequence: Synthetic oligonucleotide
  Target: SCNA; (-) strand; PAM type: YTN; PAM sequence: CTA
ctgctaataattatcttcct

SEQ ID NO: 44193 - DNA, 20 bp, Artificial Sequence
  Description of Artificial Sequence: Synthetic oligonucleotide
  Target: SCNA; (-) strand; PAM type: YTN; PAM sequence: CTC
tactgctaataattatcttc

SEQ ID NO: 44194 - DNA, 20 bp, Artificial Sequence
  Description of Artificial Sequence: Synthetic oligonucleotide
  Target: SCNA; (-) strand; PAM type: YTN; PAM sequence: TTC
tctactgctaataattatct

SEQ ID NO: 44195 - DNA, 20 bp, Artificial Sequence
  Description of Artificial Sequence: Synthetic oligonucleotide
  Target: SCNA; (-) strand; PAM type: YTN; PAM sequence: TTT
ctctactgctaataattatc

SEQ ID NO: 44196 - DNA, 20 bp, Artificial Sequence
  Description of Artificial Sequence: Synthetic oligonucleotide
  Target: SCNA; (-) strand; PAM type: YTN; PAM sequence: TTT
tctctactgctaataattat

SEQ ID NO: 44197 - DNA, 20 bp, Artificial Sequence
  Description of Artificial Sequence: Synthetic oligonucleotide
  Target: SCNA; (-) strand; PAM type: YTN; PAM sequence: TTT
ttctctactgctaataatta

SEQ ID NO: 44198 - DNA, 20 bp, Artificial Sequence
  Description of Artificial Sequence: Synthetic oligonucleotide
  Target: SCNA; (-) strand; PAM type: YTN; PAM sequence: TTT
tttctctactgctaataatt

SEQ ID NO: 44199 - DNA, 20 bp, Artificial Sequence
  Description of Artificial Sequence: Synthetic oligonucleotide
  Target: SCNA; (-) strand; PAM type: YTN; PAM sequence: TTT
ttttctctactgctaataat

SEQ ID NO: 44200 - DNA, 20 bp, Artificial Sequence
  Description of Artificial Sequence: Synthetic oligonucleotide
  Target: SCNA; (-) strand; PAM type: YTN; PAM sequence: CTT
tttttctctactgctaataa

SEQ ID NO: 44201 - DNA, 20 bp, Artificial Sequence
  Description of Artificial Sequence: Synthetic oligonucleotide
  Target: SCNA; (-) strand; PAM type: YTN; PAM sequence: TTC
tttttttctctactgctaat

SEQ ID NO: 44202 - DNA, 20 bp, Artificial Sequence
  Description of Artificial Sequence: Synthetic oligonucleotide
  Target: SCNA; (-) strand; PAM type: YTN; PAM sequence: TTG
ttctttttttctctactgct

SEQ ID NO: 44203 - DNA, 20 bp, Artificial Sequence
  Description of Artificial Sequence: Synthetic oligonucleotide
  Target: SCNA; (-) strand; PAM type: YTN; PAM sequence: TTT
gttctttttttctctactgc

SEQ ID NO: 44204 - DNA, 20 bp, Artificial Sequence
  Description of Artificial Sequence: Synthetic oligonucleotide
  Target: SCNA; (-) strand; PAM type: YTN; PAM sequence: CTT
tgttctttttttctctactg

SEQ ID NO: 44205 - DNA, 20 bp, Artificial Sequence
  Description of Artificial Sequence: Synthetic oligonucleotide
  Target: SCNA; (-) strand; PAM type: YTN; PAM sequence: CTA
ctttgttctttttttctcta

SEQ ID NO: 44206 - DNA, 20 bp, Artificial Sequence
  Description of Artificial Sequence: Synthetic oligonucleotide
  Target: SCNA; (-) strand; PAM type: YTN; PAM sequence: CTA
aaatctactttgttcttttt

SEQ ID NO: 44207 - DNA, 20 bp, Artificial Sequence
  Description of Artificial Sequence: Synthetic oligonucleotide
  Target: SCNA; (-) strand; PAM type: YTN; PAM sequence: CTG
ccctaaaatctactttgttc

SEQ ID NO: 44208 - DNA, 20 bp, Artificial Sequence
  Description of Artificial Sequence: Synthetic oligonucleotide
  Target: SCNA; (-) strand; PAM type: YTN; PAM sequence: TTA
tctgccctaaaatctacttt

SEQ ID NO: 44209 - DNA, 20 bp, Artificial Sequence
  Description of Artificial Sequence: Synthetic oligonucleotide
  Target: SCNA; (-) strand; PAM type: YTN; PAM sequence: CTT
atctgccctaaaatctactt

SEQ ID NO: 44210 - DNA, 20 bp, Artificial Sequence
  Description of Artificial Sequence: Synthetic oligonucleotide
  Target: SCNA; (-) strand; PAM type: YTN; PAM sequence: CTA
aaaaatggcttatctgccct

SEQ ID NO: 44211 - DNA, 20 bp, Artificial Sequence
  Description of Artificial Sequence: Synthetic oligonucleotide
  Target: SCNA; (-) strand; PAM type: YTN; PAM sequence: CTA
cctaaaaaatggcttatctg

SEQ ID NO: 44212 - DNA, 20 bp, Artificial Sequence
  Description of Artificial Sequence: Synthetic oligonucleotide
  Target: SCNA; (-) strand; PAM type: YTN; PAM sequence: CTC
aacctacctaaaaaatggct

SEQ ID NO: 44213 - DNA, 20 bp, Artificial Sequence
  Description of Artificial Sequence: Synthetic oligonucleotide
  Target: SCNA; (-) strand; PAM type: YTN; PAM sequence: CTC
agactcaacctacctaaaaa

SEQ ID NO: 44214 - DNA, 20 bp, Artificial Sequence
  Description of Artificial Sequence: Synthetic oligonucleotide
  Target: SCNA; (-) strand; PAM type: YTN; PAM sequence: TTA
tggaggcatctcagactcaa

SEQ ID NO: 44215 - DNA, 20 bp, Artificial Sequence
  Description of Artificial Sequence: Synthetic oligonucleotide
  Target: SCNA; (-) strand; PAM type: YTN; PAM sequence: TTT
atggaggcatctcagactca

SEQ ID NO: 44216 - DNA, 20 bp, Artificial Sequence
  Description of Artificial Sequence: Synthetic oligonucleotide
  Target: SCNA; (-) strand; PAM type: YTN; PAM sequence: TTA
tatttatggaggcatctcag

SEQ ID NO: 44217 - DNA, 20 bp, Artificial Sequence
  Description of Artificial Sequence: Synthetic oligonucleotide
  Target: SCNA; (-) strand; PAM type: YTN; PAM sequence: CTT
atatttatggaggcatctca

SEQ ID NO: 44218 - DNA, 20 bp, Artificial Sequence
  Description of Artificial Sequence: Synthetic oligonucleotide
  Target: SCNA; (-) strand; PAM type: YTN; PAM sequence: TTC
aacttatatttatggaggca

SEQ ID NO: 44219 - DNA, 20 bp, Artificial Sequence
  Description of Artificial Sequence: Synthetic oligonucleotide
  Target: SCNA; (-) strand; PAM type: YTN; PAM sequence: TTT
caacttatatttatggaggc

SEQ ID NO: 44220 - DNA, 20 bp, Artificial Sequence
  Description of Artificial Sequence: Synthetic oligonucleotide
  Target: SCNA; (-) strand; PAM type: YTN; PAM sequence: TTT
tcaacttatatttatggagg

SEQ ID NO: 44221 - DNA, 20 bp, Artificial Sequence
  Description of Artificial Sequence: Synthetic oligonucleotide
  Target: SCNA; (-) strand; PAM type: YTN; PAM sequence: CTC
atattttcaacttatattta

SEQ ID NO: 44222 - DNA, 20 bp, Artificial Sequence
  Description of Artificial Sequence: Synthetic oligonucleotide
  Target: SCNA; (-) strand; PAM type: YTN; PAM sequence: CTC
caatctcatattttcaactt

SEQ ID NO: 44223 - DNA, 20 bp, Artificial Sequence
  Description of Artificial Sequence: Synthetic oligonucleotide
  Target: SCNA; (-) strand; PAM type: YTN; PAM sequence: CTC
aactccaatctcatattttc

SEQ ID NO: 44224 - DNA, 20 bp, Artificial Sequence
  Description of Artificial Sequence: Synthetic oligonucleotide
  Target: SCNA; (-) strand; PAM type: YTN; PAM sequence: CTG
aagtctcaactccaatctca

SEQ ID NO: 44225 - DNA, 20 bp, Artificial Sequence
  Description of Artificial Sequence: Synthetic oligonucleotide
  Target: SCNA; (-) strand; PAM type: YTN; PAM sequence: TTC
tgaagtctcaactccaatct

SEQ ID NO: 44226 - DNA, 20 bp, Artificial Sequence
  Description of Artificial Sequence: Synthetic oligonucleotide
  Target: SCNA; (-) strand; PAM type: YTN; PAM sequence: TTT
ctgaagtctcaactccaatc

SEQ ID NO: 44227 - DNA, 20 bp, Artificial Sequence
  Description of Artificial Sequence: Synthetic oligonucleotide
  Target: SCNA; (-) strand; PAM type: YTN; PAM sequence: CTC
aaaatatgtatttctgaagt

SEQ ID NO: 44228 - DNA, 20 bp, Artificial Sequence
  Description of Artificial Sequence: Synthetic oligonucleotide
  Target: SCNA; (-) strand; PAM type: YTN; PAM sequence: CTA
ctcaaaatatgtatttctga

SEQ ID NO: 44229 - DNA, 20 bp, Artificial Sequence
  Description of Artificial Sequence: Synthetic oligonucleotide
  Target: SCNA; (-) strand; PAM type: YTN; PAM sequence: CTG
tagtgtaactactcaaaata

SEQ ID NO: 44230 - DNA, 20 bp, Artificial Sequence
  Description of Artificial Sequence: Synthetic oligonucleotide
  Target: SCNA; (-) strand; PAM type: YTN; PAM sequence: CTC
tgtagtgtaactactcaaaa

SEQ ID NO: 44231 - DNA, 20 bp, Artificial Sequence
  Description of Artificial Sequence: Synthetic oligonucleotide
  Target: SCNA; (-) strand; PAM type: YTN; PAM sequence: TTA
cctctgtagtgtaactactc

SEQ ID NO: 44232 - DNA, 20 bp, Artificial Sequence
  Description of Artificial Sequence: Synthetic oligonucleotide
  Target: SCNA; (-) strand; PAM type: YTN; PAM sequence: CTT
acctctgtagtgtaactact

SEQ ID NO: 44233 - DNA, 20 bp, Artificial Sequence
  Description of Artificial Sequence: Synthetic oligonucleotide
  Target: SCNA; (-) strand; PAM type: YTN; PAM sequence: CTG
atgacttacctctgtagtgt

SEQ ID NO: 44234 - DNA, 20 bp, Artificial Sequence
  Description of Artificial Sequence: Synthetic oligonucleotide
  Target: SCNA; (-) strand; PAM type: YTN; PAM sequence: CTC
tgatgacttacctctgtagt

SEQ ID NO: 44235 - DNA, 20 bp, Artificial Sequence
  Description of Artificial Sequence: Synthetic oligonucleotide
  Target: SCNA; (-) strand; PAM type: YTN; PAM sequence: TTA
tgaactctgatgacttacct

SEQ ID NO: 44236 - DNA, 20 bp, Artificial Sequence
  Description of Artificial Sequence: Synthetic oligonucleotide
  Target: SCNA; (-) strand; PAM type: YTN; PAM sequence: TTT
atgaactctgatgacttacc

SEQ ID NO: 44237 - DNA, 20 bp, Artificial Sequence
  Description of Artificial Sequence: Synthetic oligonucleotide
  Target: SCNA; (-) strand; PAM type: YTN; PAM sequence: TTT
tatgaactctgatgacttac

SEQ ID NO: 44238 - DNA, 20 bp, Artificial Sequence
  Description of Artificial Sequence: Synthetic oligonucleotide
  Target: SCNA; (-) strand; PAM type: YTN; PAM sequence: TTA
attttatgaactctgatgac

SEQ ID NO: 44239 - DNA, 20 bp, Artificial Sequence
  Description of Artificial Sequence: Synthetic oligonucleotide
  Target: SCNA; (-) strand; PAM type: YTN; PAM sequence: TTT
aattttatgaactctgatga

SEQ ID NO: 44240 - DNA, 20 bp, Artificial Sequence
  Description of Artificial Sequence: Synthetic oligonucleotide
  Target: SCNA; (-) strand; PAM type: YTN; PAM sequence: CTT
taattttatgaactctgatg

SEQ ID NO: 44241 - DNA, 20 bp, Artificial Sequence
  Description of Artificial Sequence: Synthetic oligonucleotide
  Target: SCNA; (-) strand; PAM type: YTN; PAM sequence: CTC
actttaattttatgaactct

SEQ ID NO: 44242 - DNA, 20 bp, Artificial Sequence
  Description of Artificial Sequence: Synthetic oligonucleotide
  Target: SCNA; (-) strand; PAM type: YTN; PAM sequence: TTC
tcactttaattttatgaact

SEQ ID NO: 44243 - DNA, 20 bp, Artificial Sequence
  Description of Artificial Sequence: Synthetic oligonucleotide
  Target: SCNA; (-) strand; PAM type: YTN; PAM sequence: TTT
ctcactttaattttatgaac

SEQ ID NO: 44244 - DNA, 20 bp, Artificial Sequence
  Description of Artificial Sequence: Synthetic oligonucleotide
  Target: SCNA; (-) strand; PAM type: YTN; PAM sequence: TTT
tctcactttaattttatgaa

SEQ ID NO: 44245 - DNA, 20 bp, Artificial Sequence
  Description of Artificial Sequence: Synthetic oligonucleotide
  Target: SCNA; (-) strand; PAM type: YTN; PAM sequence: TTT
ttctcactttaattttatga

SEQ ID NO: 44246 - DNA, 20 bp, Artificial Sequence
  Description of Artificial Sequence: Synthetic oligonucleotide
  Target: SCNA; (-) strand; PAM type: YTN; PAM sequence: CTT
tttctcactttaattttatg

SEQ ID NO: 44247 - DNA, 20 bp, Artificial Sequence
  Description of Artificial Sequence: Synthetic oligonucleotide
  Target: SCNA; (-) strand; PAM type: YTN; PAM sequence: CTC
tttttctcactttaatttta

SEQ ID NO: 44248 - DNA, 20 bp, Artificial Sequence
  Description of Artificial Sequence: Synthetic oligonucleotide
  Target: SCNA; (-) strand; PAM type: YTN; PAM sequence: TTG
cctctttttctcactttaat

SEQ ID NO: 44249 - DNA, 20 bp, Artificial Sequence
  Description of Artificial Sequence: Synthetic oligonucleotide
  Target: SCNA; (-) strand; PAM type: YTN; PAM sequence: CTT
gcctctttttctcactttaa

SEQ ID NO: 44250 - DNA, 20 bp, Artificial Sequence
  Description of Artificial Sequence: Synthetic oligonucleotide
  Target: SCNA; (-) strand; PAM type: YTN; PAM sequence: TTC
acttgcctctttttctcact

SEQ ID NO: 44251 - DNA, 20 bp, Artificial Sequence
  Description of Artificial Sequence: Synthetic oligonucleotide
  Target: SCNA; (-) strand; PAM type: YTN; PAM sequence: CTT
cacttgcctctttttctcac

SEQ ID NO: 44252 - DNA, 20 bp, Artificial Sequence
  Description of Artificial Sequence: Synthetic oligonucleotide
  Target: SCNA; (-) strand; PAM type: YTN; PAM sequence: TTC
ttcacttgcctctttttctc

SEQ ID NO: 44253 - DNA, 20 bp, Artificial Sequence
  Description of Artificial Sequence: Synthetic oligonucleotide
  Target: SCNA; (-) strand; PAM type: YTN; PAM sequence: TTT
cttcacttgcctctttttct

SEQ ID NO: 44254 - DNA, 20 bp, Artificial Sequence
  Description of Artificial Sequence: Synthetic oligonucleotide
  Target: SCNA; (-) strand; PAM type: YTN; PAM sequence: TTT
tcttcacttgcctctttttc

SEQ ID NO: 44255 - DNA, 20 bp, Artificial Sequence
  Description of Artificial Sequence: Synthetic oligonucleotide
  Target: SCNA; (-) strand; PAM type: YTN; PAM sequence: TTT
ttcttcacttgcctcttttt

SEQ ID NO: 44256 - DNA, 20 bp, Artificial Sequence
  Description of Artificial Sequence: Synthetic oligonucleotide
  Target: SCNA; (-) strand; PAM type: YTN; PAM sequence: TTG
tttttcttcacttgcctctt

SEQ ID NO: 44257 - DNA, 20 bp, Artificial Sequence
  Description of Artificial Sequence: Synthetic oligonucleotide
  Target: SCNA; (-) strand; PAM type: YTN; PAM sequence: CTT
gtttttcttcacttgcctct

SEQ ID NO: 44258 - DNA, 20 bp, Artificial Sequence
  Description of Artificial Sequence: Synthetic oligonucleotide
  Target: SCNA; (-) strand; PAM type: YTN; PAM sequence: TTC
atgcaatgccatcttgtttt

SEQ ID NO: 44259 - DNA, 20 bp, Artificial Sequence
  Description of Artificial Sequence: Synthetic oligonucleotide
  Target: SCNA; (-) strand; PAM type: YTN; PAM sequence: CTT
catgcaatgccatcttgttt

SEQ ID NO: 44260 - DNA, 20 bp, Artificial Sequence
  Description of Artificial Sequence: Synthetic oligonucleotide
  Target: SCNA; (-) strand; PAM type: YTN; PAM sequence: TTC
ttcatgcaatgccatcttgt

SEQ ID NO: 44261 - DNA, 20 bp, Artificial Sequence
  Description of Artificial Sequence: Synthetic oligonucleotide
  Target: SCNA; (-) strand; PAM type: YTN; PAM sequence: CTA
agaaagttcttcatgcaatg

SEQ ID NO: 44262 - DNA, 20 bp, Artificial Sequence
  Description of Artificial Sequence: Synthetic oligonucleotide
  Target: SCNA; (-) strand; PAM type: YTN; PAM sequence: TTC
ctaagaaagttcttcatgca

SEQ ID NO: 44263 - DNA, 20 bp, Artificial Sequence
  Description of Artificial Sequence: Synthetic oligonucleotide
  Target: SCNA; (-) strand; PAM type: YTN; PAM sequence: CTT
cctaagaaagttcttcatgc

SEQ ID NO: 44264 - DNA, 20 bp, Artificial Sequence
  Description of Artificial Sequence: Synthetic oligonucleotide
  Target: SCNA; (-) strand; PAM type: YTN; PAM sequence: TTC
cttcctaagaaagttcttca

SEQ ID NO: 44265 - DNA, 20 bp, Artificial Sequence
  Description of Artificial Sequence: Synthetic oligonucleotide
  Target: SCNA; (-) strand; PAM type: YTN; PAM sequence: CTT
ccttcctaagaaagttcttc

SEQ ID NO: 44266 - DNA, 20 bp, Artificial Sequence
  Description of Artificial Sequence: Synthetic oligonucleotide
  Target: SCNA; (-) strand; PAM type: YTN; PAM sequence: CTG
ccttccttcctaagaaagtt

SEQ ID NO: 44267 - DNA, 20 bp, Artificial Sequence
  Description of Artificial Sequence: Synthetic oligonucleotide
  Target: SCNA; (-) strand; PAM type: YTN; PAM sequence: TTG
ctgccttccttcctaagaaa

SEQ ID NO: 44268 - DNA, 20 bp, Artificial Sequence
  Description of Artificial Sequence: Synthetic oligonucleotide
  Target: SCNA; (-) strand; PAM type: YTN; PAM sequence: TTT
gctgccttccttcctaagaa

SEQ ID NO: 44269 - DNA, 20 bp, Artificial Sequence
  Description of Artificial Sequence: Synthetic oligonucleotide
  Target: SCNA; (-) strand; PAM type: YTN; PAM sequence: CTT
tgctgccttccttcctaaga

SEQ ID NO: 44270 - DNA, 20 bp, Artificial Sequence
  Description of Artificial Sequence: Synthetic oligonucleotide
  Target: SCNA; (-) strand; PAM type: YTN; PAM sequence: CTC
tttgctgccttccttcctaa

SEQ ID NO: 44271 - DNA, 20 bp, Artificial Sequence
  Description of Artificial Sequence: Synthetic oligonucleotide
  Target: SCNA; (-) strand; PAM type: YTN; PAM sequence: TTA
cctctttgctgccttccttc

SEQ ID NO: 44272 - DNA, 20 bp, Artificial Sequence
  Description of Artificial Sequence: Synthetic oligonucleotide
  Target: SCNA; (-) strand; PAM type: YTN; PAM sequence: TTT
acctctttgctgccttcctt

SEQ ID NO: 44273 - DNA, 20 bp, Artificial Sequence
  Description of Artificial Sequence: Synthetic oligonucleotide
  Target: SCNA; (-) strand; PAM type: YTN; PAM sequence: TTT
tacctctttgctgccttcct

SEQ ID NO: 44274 - DNA, 20 bp, Artificial Sequence
  Description of Artificial Sequence: Synthetic oligonucleotide
  Target: SCNA; (-) strand; PAM type: YTN; PAM sequence: CTC
caattttacctctttgctgc

SEQ ID NO: 44275 - DNA, 20 bp, Artificial Sequence
  Description of Artificial Sequence: Synthetic oligonucleotide
  Target: SCNA; (-) strand; PAM type: YTN; PAM sequence: CTA
cacctccaattttacctctt

SEQ ID NO: 44276 - DNA, 20 bp, Artificial Sequence
  Description of Artificial Sequence: Synthetic oligonucleotide
  Target: SCNA; (-) strand; PAM type: YTN; PAM sequence: CTG
actacacctccaattttacc

SEQ ID NO: 44277 - DNA, 20 bp, Artificial Sequence
  Description of Artificial Sequence: Synthetic oligonucleotide
  Target: SCNA; (-) strand; PAM type: YTN; PAM sequence: CTC
tgactacacctccaatttta

SEQ ID NO: 44278 - DNA, 20 bp, Artificial Sequence
  Description of Artificial Sequence: Synthetic oligonucleotide
  Target: SCNA; (-) strand; PAM type: YTN; PAM sequence: TTC
catctctgactacacctcca

SEQ ID NO: 44279 - DNA, 20 bp, Artificial Sequence
  Description of Artificial Sequence: Synthetic oligonucleotide
  Target: SCNA; (-) strand; PAM type: YTN; PAM sequence: CTT
ccatctctgactacacctcc

SEQ ID NO: 44280 - DNA, 20 bp, Artificial Sequence
  Description of Artificial Sequence: Synthetic oligonucleotide
  Target: SCNA; (-) strand; PAM type: YTN; PAM sequence: TTC
atcttccatctctgactaca

SEQ ID NO: 44281 - DNA, 20 bp, Artificial Sequence
  Description of Artificial Sequence: Synthetic oligonucleotide
  Target: SCNA; (-) strand; PAM type: YTN; PAM sequence: TTT
catcttccatctctgactac

SEQ ID NO: 44282 - DNA, 20 bp, Artificial Sequence
  Description of Artificial Sequence: Synthetic oligonucleotide
  Target: SCNA; (-) strand; PAM type: YTN; PAM sequence: TTT
tcatcttccatctctgacta

SEQ ID NO: 44283 - DNA, 20 bp, Artificial Sequence
  Description of Artificial Sequence: Synthetic oligonucleotide
  Target: SCNA; (-) strand; PAM type: YTN; PAM sequence: TTT
ttcatcttccatctctgact

SEQ ID NO: 44284 - DNA, 20 bp, Artificial Sequence
  Description of Artificial Sequence: Synthetic oligonucleotide
  Target: SCNA; (-) strand; PAM type: YTN; PAM sequence: CTT
tttcatcttccatctctgac

SEQ ID NO: 44285 - DNA, 20 bp, Artificial Sequence
  Description of Artificial Sequence: Synthetic oligonucleotide
  Target: SCNA; (-) strand; PAM type: YTN; PAM sequence: TTC
ctttttcatcttccatctct

SEQ ID NO: 44286 - DNA, 20 bp, Artificial Sequence
  Description of Artificial Sequence: Synthetic oligonucleotide
  Target: SCNA; (-) strand; PAM type: YTN; PAM sequence: TTT
cctttttcatcttccatctc

SEQ ID NO: 44287 - DNA, 20 bp, Artificial Sequence
  Description of Artificial Sequence: Synthetic oligonucleotide
  Target: SCNA; (-) strand; PAM type: YTN; PAM sequence: TTT
tcctttttcatcttccatct

SEQ ID NO: 44288 - DNA, 20 bp, Artificial Sequence
  Description of Artificial Sequence: Synthetic oligonucleotide
  Target: SCNA; (-) strand; PAM type: YTN; PAM sequence: TTA
ttttcctttttcatcttcca

SEQ ID NO: 44289 - DNA, 20 bp, Artificial Sequence
  Description of Artificial Sequence: Synthetic oligonucleotide
  Target: SCNA; (-) strand; PAM type: YTN; PAM sequence: TTG
ttattttcctttttcatctt

SEQ ID NO: 44290 - DNA, 20 bp, Artificial Sequence
  Description of Artificial Sequence: Synthetic oligonucleotide
  Target: SCNA; (-) strand; PAM type: YTN; PAM sequence: CTG
aaatattgttattttccttt

SEQ ID NO: 44291 - DNA, 20 bp, Artificial Sequence
  Description of Artificial Sequence: Synthetic oligonucleotide
  Target: SCNA; (-) strand; PAM type: YTN; PAM sequence: TTC
tgaaatattgttattttcct

SEQ ID NO: 44292 - DNA, 20 bp, Artificial Sequence
  Description of Artificial Sequence: Synthetic oligonucleotide
  Target: SCNA; (-) strand; PAM type: YTN; PAM sequence: TTT
ctgaaatattgttattttcc

SEQ ID NO: 44293 - DNA, 20 bp, Artificial Sequence
  Description of Artificial Sequence: Synthetic oligonucleotide
  Target: SCNA; (-) strand; PAM type: YTN; PAM sequence: TTC
atttctgaaatattgttatt

SEQ ID NO: 44294 - DNA, 20 bp, Artificial Sequence
  Description of Artificial Sequence: Synthetic oligonucleotide
  Target: SCNA; (-) strand; PAM type: YTN; PAM sequence: TTT
catttctgaaatattgttat

SEQ ID NO: 44295 - DNA, 20 bp, Artificial Sequence
  Description of Artificial Sequence: Synthetic oligonucleotide
  Target: SCNA; (-) strand; PAM type: YTN; PAM sequence: TTC
atttcatttctgaaatattg

SEQ ID NO: 44296 - DNA, 20 bp, Artificial Sequence
  Description of Artificial Sequence: Synthetic oligonucleotide
  Target: SCNA; (-) strand; PAM type: YTN; PAM sequence: TTT
catttcatttctgaaatatt

SEQ ID NO: 44297 - DNA, 20 bp, Artificial Sequence
  Description of Artificial Sequence: Synthetic oligonucleotide
  Target: SCNA; (-) strand; PAM type: YTN; PAM sequence: TTT
tcatttcatttctgaaatat

SEQ ID NO: 44298 - DNA, 20 bp, Artificial Sequence
  Description of Artificial Sequence: Synthetic oligonucleotide
  Target: SCNA; (-) strand; PAM type: YTN; PAM sequence: TTT
ttcatttcatttctgaaata

SEQ ID NO: 44299 - DNA, 20 bp, Artificial Sequence
  Description of Artificial Sequence: Synthetic oligonucleotide
  Target: SCNA; (-) strand; PAM type: YTN; PAM sequence: CTT
tttcatttcatttctgaaat

SEQ ID NO: 44300 - DNA, 20 bp, Artificial Sequence
  Description of Artificial Sequence: Synthetic oligonucleotide
  Target: SCNA; (-) strand; PAM type: YTN; PAM sequence: TTA
gtaaaagacctttttcattt

SEQ ID NO: 44301 - DNA, 20 bp, Artificial Sequence
  Description of Artificial Sequence: Synthetic oligonucleotide
  Target: SCNA; (-) strand; PAM type: YTN; PAM sequence: CTT
agtaaaagacctttttcatt

SEQ ID NO: 44302 - DNA, 20 bp, Artificial Sequence
  Description of Artificial Sequence: Synthetic oligonucleotide
  Target: SCNA; (-) strand; PAM type: YTN; PAM sequence: TTA
cttagtaaaagacctttttc

SEQ ID NO: 44303 - DNA, 20 bp, Artificial Sequence
  Description of Artificial Sequence: Synthetic oligonucleotide
  Target: SCNA; (-) strand; PAM type: YTN; PAM sequence: CTG
acaagtagtagtaccaatta

SEQ ID NO: 44304 - DNA, 20 bp, Artificial Sequence
  Description of Artificial Sequence: Synthetic oligonucleotide
  Target: SCNA; (-) strand; PAM type: YTN; PAM sequence: TTG
aaactgacaagtagtagtac

SEQ ID NO: 44305 - DNA, 20 bp, Artificial Sequence
  Description of Artificial Sequence: Synthetic oligonucleotide
  Target: SCNA; (-) strand; PAM type: YTN; PAM sequence: CTT
gaaactgacaagtagtagta

SEQ ID NO: 44306 - DNA, 20 bp, Artificial Sequence
  Description of Artificial Sequence: Synthetic oligonucleotide
  Target: SCNA; (-) strand; PAM type: YTN; PAM sequence: TTA
cagcacttgaaactgacaag

SEQ ID NO: 44307 - DNA, 20 bp, Artificial Sequence
  Description of Artificial Sequence: Synthetic oligonucleotide
  Target: SCNA; (-) strand; PAM type: YTN; PAM sequence: TTT
acagcacttgaaactgacaa

SEQ ID NO: 44308 - DNA, 20 bp, Artificial Sequence
  Description of Artificial Sequence: Synthetic oligonucleotide
  Target: SCNA; (-) strand; PAM type: YTN; PAM sequence: TTT
tacagcacttgaaactgaca

SEQ ID NO: 44309 - DNA, 20 bp, Artificial Sequence
  Description of Artificial Sequence: Synthetic oligonucleotide
  Target: SCNA; (-) strand; PAM type: YTN; PAM sequence: TTT
ttacagcacttgaaactgac

SEQ ID NO: 44310 - DNA, 20 bp, Artificial Sequence
  Description of Artificial Sequence: Synthetic oligonucleotide
  Target: SCNA; (-) strand; PAM type: YTN; PAM sequence: TTT
tttacagcacttgaaactga

SEQ ID NO: 44311 - DNA, 20 bp, Artificial Sequence
  Description of Artificial Sequence: Synthetic oligonucleotide
  Target: SCNA; (-) strand; PAM type: YTN; PAM sequence: TTT
ttttacagcacttgaaactg

SEQ ID NO: 44312 - DNA, 20 bp, Artificial Sequence
  Description of Artificial Sequence: Synthetic oligonucleotide
  Target: SCNA; (-) strand; PAM type: YTN; PAM sequence: TTT
tttttacagcacttgaaact

SEQ ID NO: 44313 - DNA, 20 bp, Artificial Sequence
  Description of Artificial Sequence: Synthetic oligonucleotide
  Target: SCNA; (-) strand; PAM type: YTN; PAM sequence: TTC
ccattttttttacagcactt

SEQ ID NO: 44314 - DNA, 20 bp, Artificial Sequence
  Description of Artificial Sequence: Synthetic oligonucleotide
  Target: SCNA; (-) strand; PAM type: YTN; PAM sequence: CTT
cccattttttttacagcact

SEQ ID NO: 44315 - DNA, 20 bp, Artificial Sequence
  Description of Artificial Sequence: Synthetic oligonucleotide
  Target: SCNA; (-) strand; PAM type: YTN; PAM sequence: TTC
ttcccattttttttacagca

SEQ ID NO: 44316 - DNA, 20 bp, Artificial Sequence
  Description of Artificial Sequence: Synthetic oligonucleotide
  Target: SCNA; (-) strand; PAM type: YTN; PAM sequence: CTG
aaagtgcacatgtgtggttc

SEQ ID NO: 44317 - DNA, 20 bp, Artificial Sequence
  Description of Artificial Sequence: Synthetic oligonucleotide
  Target: SCNA; (-) strand; PAM type: YTN; PAM sequence: CTG
aagcataaaatacatagtac

SEQ ID NO: 44318 - DNA, 20 bp, Artificial Sequence
  Description of Artificial Sequence: Synthetic oligonucleotide
  Target: SCNA; (-) strand; PAM type: YTN; PAM sequence: TTA
aacaggtatgcatccctgaa

SEQ ID NO: 44319 - DNA, 20 bp, Artificial Sequence
  Description of Artificial Sequence: Synthetic oligonucleotide
  Target: SCNA; (-) strand; PAM type: YTN; PAM sequence: TTG
ttaaacaggtatgcatccct

SEQ ID NO: 44320 - DNA, 20 bp, Artificial Sequence
  Description of Artificial Sequence: Synthetic oligonucleotide
  Target: SCNA; (-) strand; PAM type: YTN; PAM sequence: TTT
gttaaacaggtatgcatccc

SEQ ID NO: 44321 - DNA, 20 bp, Artificial Sequence
  Description of Artificial Sequence: Synthetic oligonucleotide
  Target: SCNA; (-) strand; PAM type: YTN; PAM sequence: TTT
tgttaaacaggtatgcatcc

SEQ ID NO: 44322 - DNA, 20 bp, Artificial Sequence
  Description of Artificial Sequence: Synthetic oligonucleotide
  Target: SCNA; (-) strand; PAM type: YTN; PAM sequence: CTT
ttgttaaacaggtatgcatc

SEQ ID NO: 44323 - DNA, 20 bp, Artificial Sequence
  Description of Artificial Sequence: Synthetic oligonucleotide
  Target: SCNA; (-) strand; PAM type: YTN; PAM sequence: TTG
agaaaaaacatacttttgtt

SEQ ID NO: 44324 - DNA, 20 bp, Artificial Sequence
  Description of Artificial Sequence: Synthetic oligonucleotide
  Target: SCNA; (-) strand; PAM type: YTN; PAM sequence: TTT
gagaaaaaacatacttttgt

SEQ ID NO: 44325 - DNA, 20 bp, Artificial Sequence
  Description of Artificial Sequence: Synthetic oligonucleotide
  Target: SCNA; (-) strand; PAM type: YTN; PAM sequence: CTT
tgagaaaaaacatacttttg

SEQ ID NO: 44326 - DNA, 20 bp, Artificial Sequence
  Description of Artificial Sequence: Synthetic oligonucleotide
  Target: SCNA; (-) strand; PAM type: YTN; PAM sequence: TTC
aacacactttgagaaaaaac

SEQ ID NO: 44327 - DNA, 20 bp, Artificial Sequence
  Description of Artificial Sequence: Synthetic oligonucleotide
  Target: SCNA; (-) strand; PAM type: YTN; PAM sequence: CTA
ttcaacacactttgagaaaa

SEQ ID NO: 44328 - DNA, 20 bp, Artificial Sequence
  Description of Artificial Sequence: Synthetic oligonucleotide
  Target: SCNA; (-) strand; PAM type: YTN; PAM sequence: CTG
gactattcaacacactttga

SEQ ID NO: 44329 - DNA, 20 bp, Artificial Sequence
  Description of Artificial Sequence: Synthetic oligonucleotide
  Target: SCNA; (-) strand; PAM type: YTN; PAM sequence: TTC
tggactattcaacacacttt

SEQ ID NO: 44330 - DNA, 20 bp, Artificial Sequence
  Description of Artificial Sequence: Synthetic oligonucleotide
  Target: SCNA; (-) strand; PAM type: YTN; PAM sequence: TTT
ctggactattcaacacactt

SEQ ID NO: 44331 - DNA, 20 bp, Artificial Sequence
  Description of Artificial Sequence: Synthetic oligonucleotide
  Target: SCNA; (-) strand; PAM type: YTN; PAM sequence: TTT
tctggactattcaacacact

SEQ ID NO: 44332 - DNA, 20 bp, Artificial Sequence
  Description of Artificial Sequence: Synthetic oligonucleotide
  Target: SCNA; (-) strand; PAM type: YTN; PAM sequence: TTT
ttctggactattcaacacac

SEQ ID NO: 44333 - DNA, 20 bp, Artificial Sequence
  Description of Artificial Sequence: Synthetic oligonucleotide
  Target: SCNA; (-) strand; PAM type: YTN; PAM sequence: CTT
tttctggactattcaacaca

SEQ ID NO: 44334 - DNA, 20 bp, Artificial Sequence
  Description of Artificial Sequence: Synthetic oligonucleotide
  Target: SCNA; (-) strand; PAM type: YTN; PAM sequence: CTC
catctttttctggactattc

SEQ ID NO: 44335 - DNA, 20 bp, Artificial Sequence
  Description of Artificial Sequence: Synthetic oligonucleotide
  Target: SCNA; (-) strand; PAM type: YTN; PAM sequence: CTA
cctccatctttttctggact

SEQ ID NO: 44336 - DNA, 20 bp, Artificial Sequence
  Description of Artificial Sequence: Synthetic oligonucleotide
  Target: SCNA; (-) strand; PAM type: YTN; PAM sequence: TTC
tacctccatctttttctgga

SEQ ID NO: 44337 - DNA, 20 bp, Artificial Sequence
  Description of Artificial Sequence: Synthetic oligonucleotide
  Target: SCNA; (-) strand; PAM type: YTN; PAM sequence: CTT
ctacctccatctttttctgg

SEQ ID NO: 44338 - DNA, 20 bp, Artificial Sequence
  Description of Artificial Sequence: Synthetic oligonucleotide
  Target: SCNA; (-) strand; PAM type: YTN; PAM sequence: CTG
acttctacctccatcttttt

SEQ ID NO: 44339 - DNA, 20 bp, Artificial Sequence
  Description of Artificial Sequence: Synthetic oligonucleotide
  Target: SCNA; (-) strand; PAM type: YTN; PAM sequence: CTG
aagtctgacttctacctcca

SEQ ID NO: 44340 - DNA, 20 bp, Artificial Sequence
  Description of Artificial Sequence: Synthetic oligonucleotide
  Target: SCNA; (-) strand; PAM type: YTN; PAM sequence: CTC
ctgaagtctgacttctacct

SEQ ID NO: 44341 - DNA, 20 bp, Artificial Sequence
  Description of Artificial Sequence: Synthetic oligonucleotide
  Target: SCNA; (-) strand; PAM type: YTN; PAM sequence: TTA
tctcctgaagtctgacttct

SEQ ID NO: 44342 - DNA, 20 bp, Artificial Sequence
  Description of Artificial Sequence: Synthetic oligonucleotide
  Target: SCNA; (-) strand; PAM type: YTN; PAM sequence: TTT
atctcctgaagtctgacttc

SEQ ID NO: 44343 - DNA, 20 bp, Artificial Sequence
  Description of Artificial Sequence: Synthetic oligonucleotide
  Target: SCNA; (-) strand; PAM type: YTN; PAM sequence: CTT
tatctcctgaagtctgactt

SEQ ID NO: 44344 - DNA, 20 bp, Artificial Sequence
  Description of Artificial Sequence: Synthetic oligonucleotide
  Target: SCNA; (-) strand; PAM type: YTN; PAM sequence: TTC
ctttatctcctgaagtctga

SEQ ID NO: 44345 - DNA, 20 bp, Artificial Sequence
  Description of Artificial Sequence: Synthetic oligonucleotide
  Target: SCNA; (-) strand; PAM type: YTN; PAM sequence: CTG
gttcctttatctcctgaagt

SEQ ID NO: 44346 - DNA, 20 bp, Artificial Sequence
  Description of Artificial Sequence: Synthetic oligonucleotide
  Target: SCNA; (-) strand; PAM type: YTN; PAM sequence: TTC
tggttcctttatctcctgaa

SEQ ID NO: 44347 - DNA, 20 bp, Artificial Sequence
  Description of Artificial Sequence: Synthetic oligonucleotide
  Target: SCNA; (-) strand; PAM type: YTN; PAM sequence: TTT
ctggttcctttatctcctga

SEQ ID NO: 44348 - DNA, 20 bp, Artificial Sequence
  Description of Artificial Sequence: Synthetic oligonucleotide
  Target: SCNA; (-) strand; PAM type: YTN; PAM sequence: CTT
tctggttcctttatctcctg

SEQ ID NO: 44349 - DNA, 20 bp, Artificial Sequence
  Description of Artificial Sequence: Synthetic oligonucleotide
  Target: SCNA; (-) strand; PAM type: YTN; PAM sequence: TTC
aatgatctttctggttcctt

SEQ ID NO: 44350 - DNA, 20 bp, Artificial Sequence
  Description of Artificial Sequence: Synthetic oligonucleotide
  Target: SCNA; (-) strand; PAM type: YTN; PAM sequence: CTT
caatgatctttctggttcct

SEQ ID NO: 44351 - DNA, 20 bp, Artificial Sequence
  Description of Artificial Sequence: Synthetic oligonucleotide
  Target: SCNA; (-) strand; PAM type: YTN; PAM sequence: CTA
ccatcacagccttcaatgat

SEQ ID NO: 44352 - DNA, 20 bp, Artificial Sequence
  Description of Artificial Sequence: Synthetic oligonucleotide
  Target: SCNA; (-) strand; PAM type: YTN; PAM sequence: TTC
taccatcacagccttcaatg

SEQ ID NO: 44353 - DNA, 20 bp, Artificial Sequence
  Description of Artificial Sequence: Synthetic oligonucleotide
  Target: SCNA; (-) strand; PAM type: YTN; PAM sequence: TTT
ctaccatcacagccttcaat

SEQ ID NO: 44354 - DNA, 20 bp, Artificial Sequence
  Description of Artificial Sequence: Synthetic oligonucleotide
  Target: SCNA; (-) strand; PAM type: YTN; PAM sequence: TTT
tctaccatcacagccttcaa

SEQ ID NO: 44355 - DNA, 20 bp, Artificial Sequence
  Description of Artificial Sequence: Synthetic oligonucleotide
  Target: SCNA; (-) strand; PAM type: YTN; PAM sequence: TTG
tcaaaatgttttctaccatc

SEQ ID NO: 44356 - DNA, 20 bp, Artificial Sequence
  Description of Artificial Sequence: Synthetic oligonucleotide
  Target: SCNA; (-) strand; PAM type: YTN; PAM sequence: TTT
gtcaaaatgttttctaccat

SEQ ID NO: 44357 - DNA, 20 bp, Artificial Sequence
  Description of Artificial Sequence: Synthetic oligonucleotide
  Target: SCNA; (-) strand; PAM type: YTN; PAM sequence: CTT
tgtcaaaatgttttctacca

SEQ ID NO: 44358 - DNA, 20 bp, Artificial Sequence
  Description of Artificial Sequence: Synthetic oligonucleotide
  Target: SCNA; (-) strand; PAM type: YTN; PAM sequence: CTC
tttgtcaaaatgttttctac

SEQ ID NO: 44359 - DNA, 20 bp, Artificial Sequence
  Description of Artificial Sequence: Synthetic oligonucleotide
  Target: SCNA; (-) strand; PAM type: YTN; PAM sequence: TTG
cacaactctttgtcaaaatg

SEQ ID NO: 44360 - DNA, 20 bp, Artificial Sequence
  Description of Artificial Sequence: Synthetic oligonucleotide
  Target: SCNA; (-) strand; PAM type: YTN; PAM sequence: CTC
attgcacaactctttgtcaa

SEQ ID NO: 44361 - DNA, 20 bp, Artificial Sequence
  Description of Artificial Sequence: Synthetic oligonucleotide
  Target: SCNA; (-) strand; PAM type: YTN; PAM sequence: TTC
tcattgcacaactctttgtc

SEQ ID NO: 44362 - DNA, 20 bp, Artificial Sequence
  Description of Artificial Sequence: Synthetic oligonucleotide
  Target: SCNA; (-) strand; PAM type: YTN; PAM sequence: TTT
ctcattgcacaactctttgt

SEQ ID NO: 44363 - DNA, 20 bp, Artificial Sequence
  Description of Artificial Sequence: Synthetic oligonucleotide
  Target: SCNA; (-) strand; PAM type: YTN; PAM sequence: CTT
tctcattgcacaactctttg

SEQ ID NO: 44364 - DNA, 20 bp, Artificial Sequence
  Description of Artificial Sequence: Synthetic oligonucleotide
  Target: SCNA; (-) strand; PAM type: YTN; PAM sequence: CTA
gctttctcattgcacaactc

SEQ ID NO: 44365 - DNA, 20 bp, Artificial Sequence
  Description of Artificial Sequence: Synthetic oligonucleotide
  Target: SCNA; (-) strand; PAM type: YTN; PAM sequence: TTG
tcccacccctagctttctca

SEQ ID NO: 44366 - DNA, 20 bp, Artificial Sequence
  Description of Artificial Sequence: Synthetic oligonucleotide
  Target: SCNA; (-) strand; PAM type: YTN; PAM sequence: TTA
attgtcccacccctagcttt

SEQ ID NO: 44367 - DNA, 20 bp, Artificial Sequence
  Description of Artificial Sequence: Synthetic oligonucleotide
  Target: SCNA; (-) strand; PAM type: YTN; PAM sequence: CTC
aaaattaattgtcccacccc

SEQ ID NO: 44368 - DNA, 20 bp, Artificial Sequence
  Description of Artificial Sequence: Synthetic oligonucleotide
  Target: SCNA; (-) strand; PAM type: YTN; PAM sequence: TTA
ccctcaaaattaattgtccc

SEQ ID NO: 44369 - DNA, 20 bp, Artificial Sequence
  Description of Artificial Sequence: Synthetic oligonucleotide
  Target: SCNA; (-) strand; PAM type: YTN; PAM sequence: TTG
ttaccctcaaaattaattgt

SEQ ID NO: 44370 - DNA, 20 bp, Artificial Sequence
  Description of Artificial Sequence: Synthetic oligonucleotide
  Target: SCNA; (-) strand; PAM type: YTN; PAM sequence: CTC
aaatccccaattgttaccct

SEQ ID NO: 44371 - DNA, 20 bp, Artificial Sequence
  Description of Artificial Sequence: Synthetic oligonucleotide
  Target: SCNA; (-) strand; PAM type: YTN; PAM sequence: CTA
ctcaaatccccaattgttac

SEQ ID NO: 44372 - DNA, 20 bp, Artificial Sequence
  Description of Artificial Sequence: Synthetic oligonucleotide
  Target: SCNA; (-) strand; PAM type: YTN; PAM sequence: TTA
aagaacagaagcaaaaaatc

SEQ ID NO: 44373 - DNA, 20 bp, Artificial Sequence
  Description of Artificial Sequence: Synthetic oligonucleotide
  Target: SCNA; (-) strand; PAM type: YTN; PAM sequence: TTA
aaaagaagacaaaacaatta

SEQ ID NO: 44374 - DNA, 20 bp, Artificial Sequence
  Description of Artificial Sequence: Synthetic oligonucleotide
  Target: SCNA; (-) strand; PAM type: YTN; PAM sequence: TTT
aaaaagaagacaaaacaatt

SEQ ID NO: 44375 - DNA, 20 bp, Artificial Sequence
  Description of Artificial Sequence: Synthetic oligonucleotide
  Target: SCNA; (-) strand; PAM type: YTN; PAM sequence: CTT
taaaaagaagacaaaacaat

SEQ ID NO: 44376 - DNA, 20 bp, Artificial Sequence
  Description of Artificial Sequence: Synthetic oligonucleotide
  Target: SCNA; (-) strand; PAM type: YTN; PAM sequence: TTC
tttaaaaagaagacaaaaca

SEQ ID NO: 44377 - DNA, 20 bp, Artificial Sequence
  Description of Artificial Sequence: Synthetic oligonucleotide
  Target: SCNA; (-) strand; PAM type: YTN; PAM sequence: TTT
ctttaaaaagaagacaaaac

SEQ ID NO: 44378 - DNA, 20 bp, Artificial Sequence
  Description of Artificial Sequence: Synthetic oligonucleotide
  Target: SCNA; (-) strand; PAM type: YTN; PAM sequence: TTG
gtttctttaaaaagaagaca

SEQ ID NO: 44379 - DNA, 20 bp, Artificial Sequence
  Description of Artificial Sequence: Synthetic oligonucleotide
  Target: SCNA; (-) strand; PAM type: YTN; PAM sequence: CTT
ggtttctttaaaaagaagac

SEQ ID NO: 44380 - DNA, 20 bp, Artificial Sequence
  Description of Artificial Sequence: Synthetic oligonucleotide
  Target: SCNA; (-) strand; PAM type: YTN; PAM sequence: CTC
ttggtttctttaaaaagaag

SEQ ID NO: 44381 - DNA, 20 bp, Artificial Sequence
  Description of Artificial Sequence: Synthetic oligonucleotide
  Target: SCNA; (-) strand; PAM type: YTN; PAM sequence: TTA
acagtctcttggtttcttta

SEQ ID NO: 44382 - DNA, 20 bp, Artificial Sequence
  Description of Artificial Sequence: Synthetic oligonucleotide
  Target: SCNA; (-) strand; PAM type: YTN; PAM sequence: CTA
cattaacagtctcttggttt

SEQ ID NO: 44383 - DNA, 20 bp, Artificial Sequence
  Description of Artificial Sequence: Synthetic oligonucleotide
  Target: SCNA; (-) strand; PAM type: YTN; PAM sequence: CTA
ctacattaacagtctcttgg

SEQ ID NO: 44384 - DNA, 20 bp, Artificial Sequence
  Description of Artificial Sequence: Synthetic oligonucleotide
  Target: SCNA; (-) strand; PAM type: YTN; PAM sequence: CTC
ctactacattaacagtctct

SEQ ID NO: 44385 - DNA, 20 bp, Artificial Sequence
  Description of Artificial Sequence: Synthetic oligonucleotide
  Target: SCNA; (-) strand; PAM type: YTN; PAM sequence: CTG
ctcctactacattaacagtc

SEQ ID NO: 44386 - DNA, 20 bp, Artificial Sequence
  Description of Artificial Sequence: Synthetic oligonucleotide
  Target: SCNA; (-) strand; PAM type: YTN; PAM sequence: CTC
tgctcctactacattaacag

SEQ ID NO: 44387 - DNA, 20 bp, Artificial Sequence
  Description of Artificial Sequence: Synthetic oligonucleotide
  Target: SCNA; (-) strand; PAM type: YTN; PAM sequence: TTG
tgaaactctgctcctactac

SEQ ID NO: 44388 - DNA, 20 bp, Artificial Sequence
  Description of Artificial Sequence: Synthetic oligonucleotide
  Target: SCNA; (-) strand; PAM type: YTN; PAM sequence: CTG
tattgtgaaactctgctcct

SEQ ID NO: 44389 - DNA, 20 bp, Artificial Sequence
  Description of Artificial Sequence: Synthetic oligonucleotide
  Target: SCNA; (-) strand; PAM type: YTN; PAM sequence: CTC
tgtattgtgaaactctgctc

SEQ ID NO: 44390 - DNA, 20 bp, Artificial Sequence
  Description of Artificial Sequence: Synthetic oligonucleotide
  Target: SCNA; (-) strand; PAM type: YTN; PAM sequence: CTG
ctctgtattgtgaaactctg

SEQ ID NO: 44391 - DNA, 20 bp, Artificial Sequence
  Description of Artificial Sequence: Synthetic oligonucleotide
  Target: SCNA; (-) strand; PAM type: YTN; PAM sequence: CTC
tgctctgtattgtgaaactc

SEQ ID NO: 44392 - DNA, 20 bp, Artificial Sequence
  Description of Artificial Sequence: Synthetic oligonucleotide
  Target: SCNA; (-) strand; PAM type: YTN; PAM sequence: CTC
tctgctctgtattgtgaaac

SEQ ID NO: 44393 - DNA, 20 bp, Artificial Sequence
  Description of Artificial Sequence: Synthetic oligonucleotide
  Target: SCNA; (-) strand; PAM type: YTN; PAM sequence: TTA
tcaaccaacaccctctctgc

SEQ ID NO: 44394 - DNA, 20 bp, Artificial Sequence
  Description of Artificial Sequence: Synthetic oligonucleotide
  Target: SCNA; (-) strand; PAM type: YTN; PAM sequence: TTT
atcaaccaacaccctctctg

SEQ ID NO: 44395 - DNA, 20 bp, Artificial Sequence
  Description of Artificial Sequence: Synthetic oligonucleotide
  Target: SCNA; (-) strand; PAM type: YTN; PAM sequence: CTT
tatcaaccaacaccctctct

SEQ ID NO: 44396 - DNA, 20 bp, Artificial Sequence
  Description of Artificial Sequence: Synthetic oligonucleotide
  Target: SCNA; (-) strand; PAM type: YTN; PAM sequence: TTC
tttatcaaccaacaccctct

SEQ ID NO: 44397 - DNA, 20 bp, Artificial Sequence
  Description of Artificial Sequence: Synthetic oligonucleotide
  Target: SCNA; (-) strand; PAM type: YTN; PAM sequence: TTG
agacaattctttatcaacca

SEQ ID NO: 44398 - DNA, 20 bp, Artificial Sequence
  Description of Artificial Sequence: Synthetic oligonucleotide
  Target: SCNA; (-) strand; PAM type: YTN; PAM sequence: TTT
gagacaattctttatcaacc

SEQ ID NO: 44399 - DNA, 20 bp, Artificial Sequence
  Description of Artificial Sequence: Synthetic oligonucleotide
  Target: SCNA; (-) strand; PAM type: YTN; PAM sequence: CTC
atttgagacaattctttatc

SEQ ID NO: 44400 - DNA, 20 bp, Artificial Sequence
  Description of Artificial Sequence: Synthetic oligonucleotide
  Target: SCNA; (-) strand; PAM type: YTN; PAM sequence: CTC
tcatttgagacaattcttta

SEQ ID NO: 44401 - DNA, 20 bp, Artificial Sequence
  Description of Artificial Sequence: Synthetic oligonucleotide
  Target: SCNA; (-) strand; PAM type: YTN; PAM sequence: TTC
ctctcatttgagacaattct

SEQ ID NO: 44402 - DNA, 20 bp, Artificial Sequence
  Description of Artificial Sequence: Synthetic oligonucleotide
  Target: SCNA; (-) strand; PAM type: YTN; PAM sequence: TTT
cctctcatttgagacaattc

SEQ ID NO: 44403 - DNA, 20 bp, Artificial Sequence
  Description of Artificial Sequence: Synthetic oligonucleotide
  Target: SCNA; (-) strand; PAM type: YTN; PAM sequence: TTT
tcctctcatttgagacaatt

SEQ ID NO: 44404 - DNA, 20 bp, Artificial Sequence
  Description of Artificial Sequence: Synthetic oligonucleotide
  Target: SCNA; (-) strand; PAM type: YTN; PAM sequence: CTT
ttcctctcatttgagacaat

SEQ ID NO: 44405 - DNA, 20 bp, Artificial Sequence
  Description of Artificial Sequence: Synthetic oligonucleotide
  Target: SCNA; (-) strand; PAM type: YTN; PAM sequence: TTC
ttttcctctcatttgagaca

SEQ ID NO: 44406 - DNA, 20 bp, Artificial Sequence
  Description of Artificial Sequence: Synthetic oligonucleotide
  Target: SCNA; (-) strand; PAM type: YTN; PAM sequence: CTC
cattcttttcctctcatttg

SEQ ID NO: 44407 - DNA, 20 bp, Artificial Sequence
  Description of Artificial Sequence: Synthetic oligonucleotide
  Target: SCNA; (-) strand; PAM type: YTN; PAM sequence: TTG
gctccattcttttcctctca

SEQ ID NO: 44408 - DNA, 20 bp, Artificial Sequence
  Description of Artificial Sequence: Synthetic oligonucleotide
  Target: SCNA; (-) strand; PAM type: YTN; PAM sequence: TTA
ttggctccattcttttcctc

SEQ ID NO: 44409 - DNA, 20 bp, Artificial Sequence
  Description of Artificial Sequence: Synthetic oligonucleotide
  Target: SCNA; (-) strand; PAM type: YTN; PAM sequence: CTG
ttattggctccattcttttc

SEQ ID NO: 44410 - DNA, 20 bp, Artificial Sequence
  Description of Artificial Sequence: Synthetic oligonucleotide
  Target: SCNA; (-) strand; PAM type: YTN; PAM sequence: CTC
tgttattggctccattcttt

SEQ ID NO: 44411 - DNA, 20 bp, Artificial Sequence
  Description of Artificial Sequence: Synthetic oligonucleotide
  Target: SCNA; (-) strand; PAM type: YTN; PAM sequence: TTA
aacatcatctctgttattgg

SEQ ID NO: 44412 - DNA, 20 bp, Artificial Sequence
  Description of Artificial Sequence: Synthetic oligonucleotide
  Target: SCNA; (-) strand; PAM type: YTN; PAM sequence: TTC
ccaaattaaacatcatctct

SEQ ID NO: 44413 - DNA, 20 bp, Artificial Sequence
  Description of Artificial Sequence: Synthetic oligonucleotide
  Target: SCNA; (-) strand; PAM type: YTN; PAM sequence: TTT
cccaaattaaacatcatctc

SEQ ID NO: 44414 - DNA, 20 bp, Artificial Sequence
  Description of Artificial Sequence: Synthetic oligonucleotide
  Target: SCNA; (-) strand; PAM type: YTN; PAM sequence: CTT
tcccaaattaaacatcatct

SEQ ID NO: 44415 - DNA, 20 bp, Artificial Sequence
  Description of Artificial Sequence: Synthetic oligonucleotide
  Target: SCNA; (-) strand; PAM type: YTN; PAM sequence: TTA
acatgtcccacctttcccaa

SEQ ID NO: 44416 - DNA, 20 bp, Artificial Sequence
  Description of Artificial Sequence: Synthetic oligonucleotide
  Target: SCNA; (-) strand; PAM type: YTN; PAM sequence: CTC
atgttaacatgtcccacctt

SEQ ID NO: 44417 - DNA, 20 bp, Artificial Sequence
  Description of Artificial Sequence: Synthetic oligonucleotide
  Target: SCNA; (-) strand; PAM type: YTN; PAM sequence: CTG
gactcatgttaacatgtccc

SEQ ID NO: 44418 - DNA, 20 bp, Artificial Sequence
  Description of Artificial Sequence: Synthetic oligonucleotide
  Target: SCNA; (-) strand; PAM type: YTN; PAM sequence: CTC
tggactcatgttaacatgtc

SEQ ID NO: 44419 - DNA, 20 bp, Artificial Sequence
  Description of Artificial Sequence: Synthetic oligonucleotide
  Target: SCNA; (-) strand; PAM type: YTN; PAM sequence: TTC
tctggactcatgttaacatg

SEQ ID NO: 44420 - DNA, 20 bp, Artificial Sequence
  Description of Artificial Sequence: Synthetic oligonucleotide
  Target: SCNA; (-) strand; PAM type: YTN; PAM sequence: TTA
gttctctggactcatgttaa

SEQ ID NO: 44421 - DNA, 20 bp, Artificial Sequence
  Description of Artificial Sequence: Synthetic oligonucleotide
  Target: SCNA; (-) strand; PAM type: YTN; PAM sequence: TTT
agttctctggactcatgtta

SEQ ID NO: 44422 - DNA, 20 bp, Artificial Sequence
  Description of Artificial Sequence: Synthetic oligonucleotide
  Target: SCNA; (-) strand; PAM type: YTN; PAM sequence: TTT
tagttctctggactcatgtt

SEQ ID NO: 44423 - DNA, 20 bp, Artificial Sequence
  Description of Artificial Sequence: Synthetic oligonucleotide
  Target: SCNA; (-) strand; PAM type: YTN; PAM sequence: CTC
attttagttctctggactca

SEQ ID NO: 44424 - DNA, 20 bp, Artificial Sequence
  Description of Artificial Sequence: Synthetic oligonucleotide
  Target: SCNA; (-) strand; PAM type: YTN; PAM sequence: CTG
catgccataagctcatttta

SEQ ID NO: 44425 - DNA, 20 bp, Artificial Sequence
  Description of Artificial Sequence: Synthetic oligonucleotide
  Target: SCNA; (-) strand; PAM type: YTN; PAM sequence: TTC
agcatctgcatgccataagc

SEQ ID NO: 44426 - DNA, 20 bp, Artificial Sequence
  Description of Artificial Sequence: Synthetic oligonucleotide
  Target: SCNA; (-) strand; PAM type: YTN; PAM sequence: CTT
cagcatctgcatgccataag

SEQ ID NO: 44427 - DNA, 20 bp, Artificial Sequence
  Description of Artificial Sequence: Synthetic oligonucleotide
  Target: SCNA; (-) strand; PAM type: YTN; PAM sequence: TTC
atcttcagcatctgcatgcc

SEQ ID NO: 44428 - DNA, 20 bp, Artificial Sequence
  Description of Artificial Sequence: Synthetic oligonucleotide
  Target: SCNA; (-) strand; PAM type: YTN; PAM sequence: CTT
catcttcagcatctgcatgc

SEQ ID NO: 44429 - DNA, 20 bp, Artificial Sequence
  Description of Artificial Sequence: Synthetic oligonucleotide
  Target: SCNA; (-) strand; PAM type: YTN; PAM sequence: TTC
ttcatcttcagcatctgcat

SEQ ID NO: 44430 - DNA, 20 bp, Artificial Sequence
  Description of Artificial Sequence: Synthetic oligonucleotide
  Target: SCNA; (-) strand; PAM type: YTN; PAM sequence: TTT
cttcatcttcagcatctgca

SEQ ID NO: 44431 - DNA, 20 bp, Artificial Sequence
  Description of Artificial Sequence: Synthetic oligonucleotide
  Target: SCNA; (-) strand; PAM type: YTN; PAM sequence: CTT
tcttcatcttcagcatctgc

SEQ ID NO: 44432 - DNA, 20 bp, Artificial Sequence
  Description of Artificial Sequence: Synthetic oligonucleotide
  Target: SCNA; (-) strand; PAM type: YTN; PAM sequence: TTC
ctttcttcatcttcagcatc

SEQ ID NO: 44433 - DNA, 20 bp, Artificial Sequence
  Description of Artificial Sequence: Synthetic oligonucleotide
  Target: SCNA; (-) strand; PAM type: YTN; PAM sequence: TTT
cctttcttcatcttcagcat

SEQ ID NO: 44434 - DNA, 20 bp, Artificial Sequence
  Description of Artificial Sequence: Synthetic oligonucleotide
  Target: SCNA; (-) strand; PAM type: YTN; PAM sequence: CTT
tcctttcttcatcttcagca

SEQ ID NO: 44435 - DNA, 20 bp, Artificial Sequence
  Description of Artificial Sequence: Synthetic oligonucleotide
  Target: SCNA; (-) strand; PAM type: YTN; PAM sequence: TTC
ctttcctttcttcatcttca

SEQ ID NO: 44436 - DNA, 20 bp, Artificial Sequence
  Description of Artificial Sequence: Synthetic oligonucleotide
  Target: SCNA; (-) strand; PAM type: YTN; PAM sequence: CTT
cctttcctttcttcatcttc

SEQ ID NO: 44437 - DNA, 20 bp, Artificial Sequence
  Description of Artificial Sequence: Synthetic oligonucleotide
  Target: SCNA; (-) strand; PAM type: YTN; PAM sequence: TTC
cttcctttcctttcttcatc

SEQ ID NO: 44438 - DNA, 20 bp, Artificial Sequence
  Description of Artificial Sequence: Synthetic oligonucleotide
  Target: SCNA; (-) strand; PAM type: YTN; PAM sequence: TTT
ccttcctttcctttcttcat

SEQ ID NO: 44439 - DNA, 20 bp, Artificial Sequence
  Description of Artificial Sequence: Synthetic oligonucleotide
  Target: SCNA; (-) strand; PAM type: YTN; PAM sequence: TTT
tccttcctttcctttcttca

SEQ ID NO: 44440 - DNA, 20 bp, Artificial Sequence
  Description of Artificial Sequence: Synthetic oligonucleotide
  Target: SCNA; (-) strand; PAM type: YTN; PAM sequence: CTT
ttccttcctttcctttcttc

SEQ ID NO: 44441 - DNA, 20 bp, Artificial Sequence
  Description of Artificial Sequence: Synthetic oligonucleotide
  Target: SCNA; (-) strand; PAM type: YTN; PAM sequence: CTC
cttttccttcctttcctttc

SEQ ID NO: 44442 - DNA, 20 bp, Artificial Sequence
  Description of Artificial Sequence: Synthetic oligonucleotide
  Target: SCNA; (-) strand; PAM type: YTN; PAM sequence: TTC
ctccttttccttcctttcct

SEQ ID NO: 44443 - DNA, 20 bp, Artificial Sequence
  Description of Artificial Sequence: Synthetic oligonucleotide
  Target: SCNA; (-) strand; PAM type: YTN; PAM sequence: TTC
aataaataaatataaattcc

SEQ ID NO: 44444 - DNA, 20 bp, Artificial Sequence
  Description of Artificial Sequence: Synthetic oligonucleotide
  Target: SCNA; (-) strand; PAM type: YTN; PAM sequence: TTA
ttcaataaataaatataaat

SEQ ID NO: 44445 - DNA, 20 bp, Artificial Sequence
  Description of Artificial Sequence: Synthetic oligonucleotide
  Target: SCNA; (-) strand; PAM type: YTN; PAM sequence: TTA
caagattattcaataaataa

SEQ ID NO: 44446 - DNA, 20 bp, Artificial Sequence
  Description of Artificial Sequence: Synthetic oligonucleotide
  Target: SCNA; (-) strand; PAM type: YTN; PAM sequence: TTT
acaagattattcaataaata

SEQ ID NO: 44447 - DNA, 20 bp, Artificial Sequence
  Description of Artificial Sequence: Synthetic oligonucleotide
  Target: SCNA; (-) strand; PAM type: YTN; PAM sequence: TTT
tacaagattattcaataaat

SEQ ID NO: 44448 - DNA, 20 bp, Artificial Sequence
  Description of Artificial Sequence: Synthetic oligonucleotide
  Target: SCNA; (-) strand; PAM type: YTN; PAM sequence: TTA
acagttttacaagattattc

SEQ ID NO: 44449 - DNA, 20 bp, Artificial Sequence
  Description of Artificial Sequence: Synthetic oligonucleotide
  Target: SCNA; (-) strand; PAM type: YTN; PAM sequence: TTA
tcgtcagtaaaaaggggtga

SEQ ID NO: 44450 - DNA, 20 bp, Artificial Sequence
  Description of Artificial Sequence: Synthetic oligonucleotide
  Target: SCNA; (-) strand; PAM type: YTN; PAM sequence: CTT
atcgtcagtaaaaaggggtg

SEQ ID NO: 44451 - DNA, 20 bp, Artificial Sequence
  Description of Artificial Sequence: Synthetic oligonucleotide
  Target: SCNA; (-) strand; PAM type: YTN; PAM sequence: TTA
tgtcttatcgtcagtaaaaa

SEQ ID NO: 44452 - DNA, 20 bp, Artificial Sequence
  Description of Artificial Sequence: Synthetic oligonucleotide
  Target: SCNA; (-) strand; PAM type: YTN; PAM sequence: TTT
atgtcttatcgtcagtaaaa

SEQ ID NO: 44453 - DNA, 20 bp, Artificial Sequence
  Description of Artificial Sequence: Synthetic oligonucleotide
  Target: SCNA; (-) strand; PAM type: YTN; PAM sequence: CTG
acatttatgtcttatcgtca

SEQ ID NO: 44454 - DNA, 20 bp, Artificial Sequence
  Description of Artificial Sequence: Synthetic oligonucleotide
  Target: SCNA; (-) strand; PAM type: YTN; PAM sequence: CTC
tgacatttatgtcttatcgt

SEQ ID NO: 44455 - DNA, 20 bp, Artificial Sequence
  Description of Artificial Sequence: Synthetic oligonucleotide
  Target: SCNA; (-) strand; PAM type: YTN; PAM sequence: TTA
ggcaaaacacctctgacatt

SEQ ID NO: 44456 - DNA, 20 bp, Artificial Sequence
  Description of Artificial Sequence: Synthetic oligonucleotide
  Target: SCNA; (-) strand; PAM type: YTN; PAM sequence: TTT
aggcaaaacacctctgacat

SEQ ID NO: 44457 - DNA, 20 bp, Artificial Sequence
  Description of Artificial Sequence: Synthetic oligonucleotide
  Target: SCNA; (-) strand; PAM type: YTN; PAM sequence: CTT
taggcaaaacacctctgaca

SEQ ID NO: 44458 - DNA, 20 bp, Artificial Sequence
  Description of Artificial Sequence: Synthetic oligonucleotide
  Target: SCNA; (-) strand; PAM type: YTN; PAM sequence: TTA
ctttaggcaaaacacctctg

SEQ ID NO: 44459 - DNA, 20 bp, Artificial Sequence
  Description of Artificial Sequence: Synthetic oligonucleotide
  Target: SCNA; (-) strand; PAM type: YTN; PAM sequence: TTT
actttaggcaaaacacctct

SEQ ID NO: 44460 - DNA, 20 bp, Artificial Sequence
  Description of Artificial Sequence: Synthetic oligonucleotide
  Target: SCNA; (-) strand; PAM type: YTN; PAM sequence: TTT
tactttaggcaaaacacctc

SEQ ID NO: 44461 - DNA, 20 bp, Artificial Sequence
  Description of Artificial Sequence: Synthetic oligonucleotide
  Target: SCNA; (-) strand; PAM type: YTN; PAM sequence: TTT
ttactttaggcaaaacacct

SEQ ID NO: 44462 - DNA, 20 bp, Artificial Sequence
  Description of Artificial Sequence: Synthetic oligonucleotide
  Target: SCNA; (-) strand; PAM type: YTN; PAM sequence: TTT
tttactttaggcaaaacacc

SEQ ID NO: 44463 - DNA, 20 bp, Artificial Sequence
  Description of Artificial Sequence: Synthetic oligonucleotide
  Target: SCNA; (-) strand; PAM type: YTN; PAM sequence: CTA
tcgaattttttactttaggc

SEQ ID NO: 44464 - DNA, 20 bp, Artificial Sequence
  Description of Artificial Sequence: Synthetic oligonucleotide
  Target: SCNA; (-) strand; PAM type: YTN; PAM sequence: TTG
actatcgaattttttacttt

SEQ ID NO: 44465 - DNA, 20 bp, Artificial Sequence
  Description of Artificial Sequence: Synthetic oligonucleotide
  Target: SCNA; (-) strand; PAM type: YTN; PAM sequence: CTT
gactatcgaattttttactt

SEQ ID NO: 44466 - DNA, 20 bp, Artificial Sequence
  Description of Artificial Sequence: Synthetic oligonucleotide
  Target: SCNA; (-) strand; PAM type: YTN; PAM sequence: TTA
aacccagcttgactatcgaa

SEQ ID NO: 44467 - DNA, 20 bp, Artificial Sequence
  Description of Artificial Sequence: Synthetic oligonucleotide
  Target: SCNA; (-) strand; PAM type: YTN; PAM sequence: TTT
aaacccagcttgactatcga

SEQ ID NO: 44468 - DNA, 20 bp, Artificial Sequence
  Description of Artificial Sequence: Synthetic oligonucleotide
  Target: SCNA; (-) strand; PAM type: YTN; PAM sequence: TTT
taaacccagcttgactatcg

SEQ ID NO: 44469 - DNA, 20 bp, Artificial Sequence
  Description of Artificial Sequence: Synthetic oligonucleotide
  Target: SCNA; (-) strand; PAM type: YTN; PAM sequence: CTG
atatggttttaaacccagct

SEQ ID NO: 44470 - DNA, 20 bp, Artificial Sequence
  Description of Artificial Sequence: Synthetic oligonucleotide
  Target: SCNA; (-) strand; PAM type: YTN; PAM sequence: TTG
acgtaagactgatatggttt

SEQ ID NO: 44471 - DNA, 20 bp, Artificial Sequence
  Description of Artificial Sequence: Synthetic oligonucleotide
  Target: SCNA; (-) strand; PAM type: YTN; PAM sequence: TTT
gacgtaagactgatatggtt

SEQ ID NO: 44472 - DNA, 20 bp, Artificial Sequence
  Description of Artificial Sequence: Synthetic oligonucleotide
  Target: SCNA; (-) strand; PAM type: YTN; PAM sequence: CTT
tgacgtaagactgatatggt

SEQ ID NO: 44473 - DNA, 20 bp, Artificial Sequence
  Description of Artificial Sequence: Synthetic oligonucleotide
  Target: SCNA; (-) strand; PAM type: YTN; PAM sequence: TTA
aaacatgctttgacgtaaga

SEQ ID NO: 44474 - DNA, 20 bp, Artificial Sequence
  Description of Artificial Sequence: Synthetic oligonucleotide
  Target: SCNA; (-) strand; PAM type: YTN; PAM sequence: TTA
aaatcacaaccacacaacag

SEQ ID NO: 44475 - DNA, 20 bp, Artificial Sequence
  Description of Artificial Sequence: Synthetic oligonucleotide
  Target: SCNA; (-) strand; PAM type: YTN; PAM sequence: CTT
aaaatcacaaccacacaaca

SEQ ID NO: 44476 - DNA, 20 bp, Artificial Sequence
  Description of Artificial Sequence: Synthetic oligonucleotide
  Target: SCNA; (-) strand; PAM type: YTN; PAM sequence: TTC
ccttaaaatcacaaccacac

SEQ ID NO: 44477 - DNA, 20 bp, Artificial Sequence
  Description of Artificial Sequence: Synthetic oligonucleotide
  Target: SCNA; (-) strand; PAM type: YTN; PAM sequence: CTT
cccttaaaatcacaaccaca

SEQ ID NO: 44478 - DNA, 20 bp, Artificial Sequence
  Description of Artificial Sequence: Synthetic oligonucleotide
  Target: SCNA; (-) strand; PAM type: YTN; PAM sequence: TTC
ttcccttaaaatcacaacca

SEQ ID NO: 44479 - DNA, 20 bp, Artificial Sequence
  Description of Artificial Sequence: Synthetic oligonucleotide
  Target: SCNA; (-) strand; PAM type: YTN; PAM sequence: CTT
cttcccttaaaatcacaacc

SEQ ID NO: 44480 - DNA, 20 bp, Artificial Sequence
  Description of Artificial Sequence: Synthetic oligonucleotide
  Target: SCNA; (-) strand; PAM type: YTN; PAM sequence: TTC
ttcttcccttaaaatcacaa

SEQ ID NO: 44481 - DNA, 20 bp, Artificial Sequence
  Description of Artificial Sequence: Synthetic oligonucleotide
  Target: SCNA; (-) strand; PAM type: YTN; PAM sequence: CTT
cttcttcccttaaaatcaca

SEQ ID NO: 44482 - DNA, 20 bp, Artificial Sequence
  Description of Artificial Sequence: Synthetic oligonucleotide
  Target: SCNA; (-) strand; PAM type: YTN; PAM sequence: CTC
ttcttcttcccttaaaatca

SEQ ID NO: 44483 - DNA, 20 bp, Artificial Sequence
  Description of Artificial Sequence: Synthetic oligonucleotide
  Target: SCNA; (-) strand; PAM type: YTN; PAM sequence: TTA
taaaactcttcttcttccct

SEQ ID NO: 44484 - DNA, 20 bp, Artificial Sequence
  Description of Artificial Sequence: Synthetic oligonucleotide
  Target: SCNA; (-) strand; PAM type: YTN; PAM sequence: TTC
agagaacccattataaaact

SEQ ID NO: 44485 - DNA, 20 bp, Artificial Sequence
  Description of Artificial Sequence: Synthetic oligonucleotide
  Target: SCNA; (-) strand; PAM type: YTN; PAM sequence: TTT
cagagaacccattataaaac

SEQ ID NO: 44486 - DNA, 20 bp, Artificial Sequence
  Description of Artificial Sequence: Synthetic oligonucleotide
  Target: SCNA; (-) strand; PAM type: YTN; PAM sequence: TTT
tcagagaacccattataaaa

SEQ ID NO: 44487 - DNA, 20 bp, Artificial Sequence
  Description of Artificial Sequence: Synthetic oligonucleotide
  Target: SCNA; (-) strand; PAM type: YTN; PAM sequence: TTT
ttcagagaacccattataaa

SEQ ID NO: 44488 - DNA, 20 bp, Artificial Sequence
  Description of Artificial Sequence: Synthetic oligonucleotide
  Target: SCNA; (-) strand; PAM type: YTN; PAM sequence: TTA
tttttcagagaacccattat

SEQ ID NO: 44489 - DNA, 20 bp, Artificial Sequence
  Description of Artificial Sequence: Synthetic oligonucleotide
  Target: SCNA; (-) strand; PAM type: YTN; PAM sequence: TTT
atttttcagagaacccatta

SEQ ID NO: 44490 - DNA, 20 bp, Artificial Sequence
  Description of Artificial Sequence: Synthetic oligonucleotide
  Target: SCNA; (-) strand; PAM type: YTN; PAM sequence: TTT
tatttttcagagaacccatt

SEQ ID NO: 44491 - DNA, 20 bp, Artificial Sequence
  Description of Artificial Sequence: Synthetic oligonucleotide
  Target: SCNA; (-) strand; PAM type: YTN; PAM sequence: TTG
atattttatttttcagagaa

SEQ ID NO: 44492 - DNA, 20 bp, Artificial Sequence
  Description of Artificial Sequence: Synthetic oligonucleotide
  Target: SCNA; (-) strand; PAM type: YTN; PAM sequence: CTA
attgatattttatttttcag

SEQ ID NO: 44493 - DNA, 20 bp, Artificial Sequence
  Description of Artificial Sequence: Synthetic oligonucleotide
  Target: SCNA; (-) strand; PAM type: YTN; PAM sequence: TTC
taattgatattttatttttc

SEQ ID NO: 44494 - DNA, 20 bp, Artificial Sequence
  Description of Artificial Sequence: Synthetic oligonucleotide
  Target: SCNA; (-) strand; PAM type: YTN; PAM sequence: TTT
ctaattgatattttattttt

SEQ ID NO: 44495 - DNA, 20 bp, Artificial Sequence
  Description of Artificial Sequence: Synthetic oligonucleotide
  Target: SCNA; (-) strand; PAM type: YTN; PAM sequence: CTT
tctaattgatattttatttt

SEQ ID NO: 44496 - DNA, 20 bp, Artificial Sequence
  Description of Artificial Sequence: Synthetic oligonucleotide
  Target: SCNA; (-) strand; PAM type: YTN; PAM sequence: TTC
tttctaattgatattttatt

SEQ ID NO: 44497 - DNA, 20 bp, Artificial Sequence
  Description of Artificial Sequence: Synthetic oligonucleotide
  Target: SCNA; (-) strand; PAM type: YTN; PAM sequence: TTT
ctttctaattgatattttat

SEQ ID NO: 44498 - DNA, 20 bp, Artificial Sequence
  Description of Artificial Sequence: Synthetic oligonucleotide
  Target: SCNA; (-) strand; PAM type: YTN; PAM sequence: TTG
tttctttctaattgatattt

SEQ ID NO: 44499 - DNA, 20 bp, Artificial Sequence
  Description of Artificial Sequence: Synthetic oligonucleotide
  Target: SCNA; (-) strand; PAM type: YTN; PAM sequence: TTT
gtttctttctaattgatatt

SEQ ID NO: 44500 - DNA, 20 bp, Artificial Sequence
  Description of Artificial Sequence: Synthetic oligonucleotide
  Target: SCNA; (-) strand; PAM type: YTN; PAM sequence: TTT
tgtttctttctaattgatat

SEQ ID NO: 44501 - DNA, 20 bp, Artificial Sequence
  Description of Artificial Sequence: Synthetic oligonucleotide
  Target: SCNA; (-) strand; PAM type: YTN; PAM sequence: TTG
ttttgtttctttctaattga

SEQ ID NO: 44502 - DNA, 20 bp, Artificial Sequence
  Description of Artificial Sequence: Synthetic oligonucleotide
  Target: SCNA; (-) strand; PAM type: YTN; PAM sequence: CTC
agcagttgttttgtttcttt

SEQ ID NO: 44503 - DNA, 20 bp, Artificial Sequence
  Description of Artificial Sequence: Synthetic oligonucleotide
  Target: SCNA; (-) strand; PAM type: YTN; PAM sequence: TTC
tcagcagttgttttgtttct

SEQ ID NO: 44504 - DNA, 20 bp, Artificial Sequence
  Description of Artificial Sequence: Synthetic oligonucleotide
  Target: SCNA; (-) strand; PAM type: YTN; PAM sequence: CTT
ctcagcagttgttttgtttc

SEQ ID NO: 44505 - DNA, 20 bp, Artificial Sequence
  Description of Artificial Sequence: Synthetic oligonucleotide
  Target: SCNA; (-) strand; PAM type: YTN; PAM sequence: CTG
cttctcagcagttgttttgt

SEQ ID NO: 44506 - DNA, 20 bp, Artificial Sequence
  Description of Artificial Sequence: Synthetic oligonucleotide
  Target: SCNA; (-) strand; PAM type: YTN; PAM sequence: TTC
actgcttctcagcagttgtt

SEQ ID NO: 44507 - DNA, 20 bp, Artificial Sequence
  Description of Artificial Sequence: Synthetic oligonucleotide
  Target: SCNA; (-) strand; PAM type: YTN; PAM sequence: TTG
gattcactgcttctcagcag

SEQ ID NO: 44508 - DNA, 20 bp, Artificial Sequence
  Description of Artificial Sequence: Synthetic oligonucleotide
  Target: SCNA; (-) strand; PAM type: YTN; PAM sequence: CTT
ggattcactgcttctcagca

SEQ ID NO: 44509 - DNA, 20 bp, Artificial Sequence
  Description of Artificial Sequence: Synthetic oligonucleotide
  Target: SCNA; (-) strand; PAM type: YTN; PAM sequence: CTG
cttggattcactgcttctca

SEQ ID NO: 44510 - DNA, 20 bp, Artificial Sequence
  Description of Artificial Sequence: Synthetic oligonucleotide
  Target: SCNA; (-) strand; PAM type: YTN; PAM sequence: TTC
tgcttggattcactgcttct

SEQ ID NO: 44511 - DNA, 20 bp, Artificial Sequence
  Description of Artificial Sequence: Synthetic oligonucleotide
  Target: SCNA; (-) strand; PAM type: YTN; PAM sequence: CTC
agattctgcttggattcact

SEQ ID NO: 44512 - DNA, 20 bp, Artificial Sequence
  Description of Artificial Sequence: Synthetic oligonucleotide
  Target: SCNA; (-) strand; PAM type: YTN; PAM sequence: CTA
aaaagtgatgatactcagat

SEQ ID NO: 44513 - DNA, 20 bp, Artificial Sequence
  Description of Artificial Sequence: Synthetic oligonucleotide
  Target: SCNA; (-) strand; PAM type: YTN; PAM sequence: TTA
actaaaaagtgatgatactc

SEQ ID NO: 44514 - DNA, 20 bp, Artificial Sequence
  Description of Artificial Sequence: Synthetic oligonucleotide
  Target: SCNA; (-) strand; PAM type: YTN; PAM sequence: TTT
aactaaaaagtgatgatact

SEQ ID NO: 44515 - DNA, 20 bp, Artificial Sequence
  Description of Artificial Sequence: Synthetic oligonucleotide
  Target: SCNA; (-) strand; PAM type: YTN; PAM sequence: TTA
gtttaactaaaaagtgatga

SEQ ID NO: 44516 - DNA, 20 bp, Artificial Sequence
  Description of Artificial Sequence: Synthetic oligonucleotide
  Target: SCNA; (-) strand; PAM type: YTN; PAM sequence: CTG
gttagtttaactaaaaagtg

SEQ ID NO: 44517 - DNA, 20 bp, Artificial Sequence
  Description of Artificial Sequence: Synthetic oligonucleotide
  Target: SCNA; (-) strand; PAM type: YTN; PAM sequence: TTG
gactggttagtttaactaaa

SEQ ID NO: 44518 - DNA, 20 bp, Artificial Sequence
  Description of Artificial Sequence: Synthetic oligonucleotide
  Target: SCNA; (-) strand; PAM type: YTN; PAM sequence: TTA
aagaaaaatcaggatattgg

SEQ ID NO: 44519 - DNA, 20 bp, Artificial Sequence
  Description of Artificial Sequence: Synthetic oligonucleotide
  Target: SCNA; (-) strand; PAM type: YTN; PAM sequence: CTG
ttaaagaaaaatcaggatat

SEQ ID NO: 44520 - DNA, 20 bp, Artificial Sequence
  Description of Artificial Sequence: Synthetic oligonucleotide
  Target: SCNA; (-) strand; PAM type: YTN; PAM sequence: TTG
cctgttaaagaaaaatcagg

SEQ ID NO: 44521 - DNA, 20 bp, Artificial Sequence
  Description of Artificial Sequence: Synthetic oligonucleotide
  Target: SCNA; (-) strand; PAM type: YTN; PAM sequence: TTT
gcctgttaaagaaaaatcag

SEQ ID NO: 44522 - DNA, 20 bp, Artificial Sequence
  Description of Artificial Sequence: Synthetic oligonucleotide
  Target: SCNA; (-) strand; PAM type: YTN; PAM sequence: CTT
tgcctgttaaagaaaaatca

SEQ ID NO: 44523 - DNA, 20 bp, Artificial Sequence
  Description of Artificial Sequence: Synthetic oligonucleotide
  Target: SCNA; (-) strand; PAM type: YTN; PAM sequence: TTC
tttgcctgttaaagaaaaat

SEQ ID NO: 44524 - DNA, 20 bp, Artificial Sequence
  Description of Artificial Sequence: Synthetic oligonucleotide
  Target: SCNA; (-) strand; PAM type: YTN; PAM sequence: CTC
aaaaattctttgcctgttaa

SEQ ID NO: 44525 - DNA, 20 bp, Artificial Sequence
  Description of Artificial Sequence: Synthetic oligonucleotide
  Target: SCNA; (-) strand; PAM type: YTN; PAM sequence: CTA
tgggaaagactcaaaaattc

SEQ ID NO: 44526 - DNA, 20 bp, Artificial Sequence
  Description of Artificial Sequence: Synthetic oligonucleotide
  Target: SCNA; (-) strand; PAM type: YTN; PAM sequence: CTC
agtctatgggaaagactcaa

SEQ ID NO: 44527 - DNA, 20 bp, Artificial Sequence
  Description of Artificial Sequence: Synthetic oligonucleotide
  Target: SCNA; (-) strand; PAM type: YTN; PAM sequence: TTC
acaagaactcagtctatggg

SEQ ID NO: 44528 - DNA, 20 bp, Artificial Sequence
  Description of Artificial Sequence: Synthetic oligonucleotide
  Target: SCNA; (-) strand; PAM type: YTN; PAM sequence: CTG
taaaatagttcacaagaact

SEQ ID NO: 44529 - DNA, 20 bp, Artificial Sequence
  Description of Artificial Sequence: Synthetic oligonucleotide
  Target: SCNA; (-) strand; PAM type: YTN; PAM sequence: TTG
ctgtaaaatagttcacaaga

SEQ ID NO: 44530 - DNA, 20 bp, Artificial Sequence
  Description of Artificial Sequence: Synthetic oligonucleotide
  Target: SCNA; (-) strand; PAM type: YTN; PAM sequence: TTA
ttgctgtaaaatagttcaca

SEQ ID NO: 44531 - DNA, 20 bp, Artificial Sequence
  Description of Artificial Sequence: Synthetic oligonucleotide
  Target: SCNA; (-) strand; PAM type: YTN; PAM sequence: TTG
gatgccattattgctgtaaa

SEQ ID NO: 44532 - DNA, 20 bp, Artificial Sequence
  Description of Artificial Sequence: Synthetic oligonucleotide
  Target: SCNA; (-) strand; PAM type: YTN; PAM sequence: CTA
taggattggatgccattatt

SEQ ID NO: 44533 - DNA, 20 bp, Artificial Sequence
  Description of Artificial Sequence: Synthetic oligonucleotide
  Target: SCNA; (-) strand; PAM type: YTN; PAM sequence: TTA
tctataggattggatgccat

SEQ ID NO: 44534 - DNA, 20 bp, Artificial Sequence
  Description of Artificial Sequence: Synthetic oligonucleotide
  Target: SCNA; (-) strand; PAM type: YTN; PAM sequence: TTG
ttatctataggattggatgc

SEQ ID NO: 44535 - DNA, 20 bp, Artificial Sequence
  Description of Artificial Sequence: Synthetic oligonucleotide
  Target: SCNA; (-) strand; PAM type: YTN; PAM sequence: TTA
ttgttatctataggattgga

SEQ ID NO: 44536 - DNA, 20 bp, Artificial Sequence
  Description of Artificial Sequence: Synthetic oligonucleotide
  Target: SCNA; (-) strand; PAM type: YTN; PAM sequence: TTG
ttattgttatctataggatt

SEQ ID NO: 44537 - DNA, 20 bp, Artificial Sequence
  Description of Artificial Sequence: Synthetic oligonucleotide
  Target: SCNA; (-) strand; PAM type: YTN; PAM sequence: TTT
gttattgttatctataggat

SEQ ID NO: 44538 - DNA, 20 bp, Artificial Sequence
  Description of Artificial Sequence: Synthetic oligonucleotide
  Target: SCNA; (-) strand; PAM type: YTN; PAM sequence: CTT
tgttattgttatctatagga

SEQ ID NO: 44539 - DNA, 20 bp, Artificial Sequence
  Description of Artificial Sequence: Synthetic oligonucleotide
  Target: SCNA; (-) strand; PAM type: YTN; PAM sequence: CTG
cagctttgttattgttatct

SEQ ID NO: 44540 - DNA, 20 bp, Artificial Sequence
  Description of Artificial Sequence: Synthetic oligonucleotide
  Target: SCNA; (-) strand; PAM type: YTN; PAM sequence: CTG
gcaacaaaatggtctgcagc

SEQ ID NO: 44541 - DNA, 20 bp, Artificial Sequence
  Description of Artificial Sequence: Synthetic oligonucleotide
  Target: SCNA; (-) strand; PAM type: YTN; PAM sequence: CTG
gaggagaaacctggcaacaa

SEQ ID NO: 44542 - DNA, 20 bp, Artificial Sequence
  Description of Artificial Sequence: Synthetic oligonucleotide
  Target: SCNA; (-) strand; PAM type: YTN; PAM sequence: CTG
gaaagccaccctggaggaga

SEQ ID NO: 44543 - DNA, 20 bp, Artificial Sequence
  Description of Artificial Sequence: Synthetic oligonucleotide
  Target: SCNA; (-) strand; PAM type: YTN; PAM sequence: CTA
gctggaaagccaccctggag

SEQ ID NO: 44544 - DNA, 20 bp, Artificial Sequence
  Description of Artificial Sequence: Synthetic oligonucleotide
  Target: SCNA; (-) strand; PAM type: YTN; PAM sequence: TTA
caaactagctggaaagccac

SEQ ID NO: 44545 - DNA, 20 bp, Artificial Sequence
  Description of Artificial Sequence: Synthetic oligonucleotide
  Target: SCNA; (-) strand; PAM type: YTN; PAM sequence: TTT
acaaactagctggaaagcca

SEQ ID NO: 44546 - DNA, 20 bp, Artificial Sequence
  Description of Artificial Sequence: Synthetic oligonucleotide
  Target: SCNA; (-) strand; PAM type: YTN; PAM sequence: TTG
tttacaaactagctggaaag

SEQ ID NO: 44547 - DNA, 20 bp, Artificial Sequence
  Description of Artificial Sequence: Synthetic oligonucleotide
  Target: SCNA; (-) strand; PAM type: YTN; PAM sequence: TTT
gtttacaaactagctggaaa

SEQ ID NO: 44548 - DNA, 20 bp, Artificial Sequence
  Description of Artificial Sequence: Synthetic oligonucleotide
  Target: SCNA; (-) strand; PAM type: YTN; PAM sequence: TTA
tttgtttacaaactagctgg

SEQ ID NO: 44549 - DNA, 20 bp, Artificial Sequence
  Description of Artificial Sequence: Synthetic oligonucleotide
  Target: SCNA; (-) strand; PAM type: YTN; PAM sequence: CTG
agttatttgtttacaaacta

SEQ ID NO: 44550 - DNA, 20 bp, Artificial Sequence
  Description of Artificial Sequence: Synthetic oligonucleotide
  Target: SCNA; (-) strand; PAM type: YTN; PAM sequence: TTA
atgtaacatgacagggccac

SEQ ID NO: 44551 - DNA, 20 bp, Artificial Sequence
  Description of Artificial Sequence: Synthetic oligonucleotide
  Target: SCNA; (-) strand; PAM type: YTN; PAM sequence: TTA
gttaatgtaacatgacaggg

SEQ ID NO: 44552 - DNA, 20 bp, Artificial Sequence
  Description of Artificial Sequence: Synthetic oligonucleotide
  Target: SCNA; (-) strand; PAM type: YTN; PAM sequence: TTT
agttaatgtaacatgacagg

SEQ ID NO: 44553 - DNA, 20 bp, Artificial Sequence
  Description of Artificial Sequence: Synthetic oligonucleotide
  Target: SCNA; (-) strand; PAM type: YTN; PAM sequence: TTT
tagttaatgtaacatgacag

SEQ ID NO: 44554 - DNA, 20 bp, Artificial Sequence
  Description of Artificial Sequence: Synthetic oligonucleotide
  Target: SCNA; (-) strand; PAM type: YTN; PAM sequence: TTT
ttagttaatgtaacatgaca

SEQ ID NO: 44555 - DNA, 20 bp, Artificial Sequence
  Description of Artificial Sequence: Synthetic oligonucleotide
  Target: SCNA; (-) strand; PAM type: YTN; PAM sequence: TTG
gtttttagttaatgtaacat

SEQ ID NO: 44556 - DNA, 20 bp, Artificial Sequence
  Description of Artificial Sequence: Synthetic oligonucleotide
  Target: SCNA; (-) strand; PAM type: YTN; PAM sequence: CTT
ggtttttagttaatgtaaca

SEQ ID NO: 44557 - DNA, 20 bp, Artificial Sequence
  Description of Artificial Sequence: Synthetic oligonucleotide
  Target: SCNA; (-) strand; PAM type: YTN; PAM sequence: TTA
gacttggtttttagttaatg

SEQ ID NO: 44558 - DNA, 20 bp, Artificial Sequence
  Description of Artificial Sequence: Synthetic oligonucleotide
  Target: SCNA; (-) strand; PAM type: YTN; PAM sequence: TTT
agacttggtttttagttaat

SEQ ID NO: 44559 - DNA, 20 bp, Artificial Sequence
  Description of Artificial Sequence: Synthetic oligonucleotide
  Target: SCNA; (-) strand; PAM type: YTN; PAM sequence: CTT
tagacttggtttttagttaa

SEQ ID NO: 44560 - DNA, 20 bp, Artificial Sequence
  Description of Artificial Sequence: Synthetic oligonucleotide
  Target: SCNA; (-) strand; PAM type: YTN; PAM sequence: TTA
tatgtgtgctttagacttgg

SEQ ID NO: 44561 - DNA, 20 bp, Artificial Sequence
  Description of Artificial Sequence: Synthetic oligonucleotide
  Target: SCNA; (-) strand; PAM type: YTN; PAM sequence: TTA
ttatatgtgtgctttagact

SEQ ID NO: 44562 - DNA, 20 bp, Artificial Sequence
  Description of Artificial Sequence: Synthetic oligonucleotide
  Target: SCNA; (-) strand; PAM type: YTN; PAM sequence: TTG
cacacacatatgttattata

SEQ ID NO: 44563 - DNA, 20 bp, Artificial Sequence
  Description of Artificial Sequence: Synthetic oligonucleotide
  Target: SCNA; (-) strand; PAM type: YTN; PAM sequence: TTT
gcacacacatatgttattat

SEQ ID NO: 44564 - DNA, 20 bp, Artificial Sequence
  Description of Artificial Sequence: Synthetic oligonucleotide
  Target: SCNA; (-) strand; PAM type: YTN; PAM sequence: TTG
aaagcaagccagtttgcaca

SEQ ID NO: 44565 - DNA, 20 bp, Artificial Sequence
  Description of Artificial Sequence: Synthetic oligonucleotide
  Target: SCNA; (-) strand; PAM type: YTN; PAM sequence: TTT
gaaagcaagccagtttgcac

SEQ ID NO: 44566 - DNA, 20 bp, Artificial Sequence
  Description of Artificial Sequence: Synthetic oligonucleotide
  Target: SCNA; (-) strand; PAM type: YTN; PAM sequence: TTA
ggaatttgaaagcaagccag

SEQ ID NO: 44567 - DNA, 20 bp, Artificial Sequence
  Description of Artificial Sequence: Synthetic oligonucleotide
  Target: SCNA; (-) strand; PAM type: YTN; PAM sequence: TTT
aggaatttgaaagcaagcca

SEQ ID NO: 44568 - DNA, 20 bp, Artificial Sequence
  Description of Artificial Sequence: Synthetic oligonucleotide
  Target: SCNA; (-) strand; PAM type: YTN; PAM sequence: TTG
tatgatttaggaatttgaaa

SEQ ID NO: 44569 - DNA, 20 bp, Artificial Sequence
  Description of Artificial Sequence: Synthetic oligonucleotide
  Target: SCNA; (-) strand; PAM type: YTN; PAM sequence: TTA
attgtatgatttaggaattt

SEQ ID NO: 44570 - DNA, 20 bp, Artificial Sequence
  Description of Artificial Sequence: Synthetic oligonucleotide
  Target: SCNA; (-) strand; PAM type: YTN; PAM sequence: TTT
aattgtatgatttaggaatt

SEQ ID NO: 44571 - DNA, 20 bp, Artificial Sequence
  Description of Artificial Sequence: Synthetic oligonucleotide
  Target: SCNA; (-) strand; PAM type: YTN; PAM sequence: TTA
aaatttaattgtatgattta

SEQ ID NO: 44572 - DNA, 20 bp, Artificial Sequence
  Description of Artificial Sequence: Synthetic oligonucleotide
  Target: SCNA; (-) strand; PAM type: YTN; PAM sequence: TTT
aaaatttaattgtatgattt

SEQ ID NO: 44573 - DNA, 20 bp, Artificial Sequence
  Description of Artificial Sequence: Synthetic oligonucleotide
  Target: SCNA; (-) strand; PAM type: YTN; PAM sequence: TTT
taaaatttaattgtatgatt

SEQ ID NO: 44574 - DNA, 20 bp, Artificial Sequence
  Description of Artificial Sequence: Synthetic oligonucleotide
  Target: SCNA; (-) strand; PAM type: YTN; PAM sequence: TTT
ttaaaatttaattgtatgat

SEQ ID NO: 44575 - DNA, 20 bp, Artificial Sequence
  Description of Artificial Sequence: Synthetic oligonucleotide
  Target: SCNA; (-) strand; PAM type: YTN; PAM sequence: TTA
tttttaaaatttaattgtat

SEQ ID NO: 44576 - DNA, 20 bp, Artificial Sequence
  Description of Artificial Sequence: Synthetic oligonucleotide
  Target: SCNA; (-) strand; PAM type: YTN; PAM sequence: TTC
caaatacagttatttttaaa

SEQ ID NO: 44577 - DNA, 20 bp, Artificial Sequence
  Description of Artificial Sequence: Synthetic oligonucleotide
  Target: SCNA; (-) strand; PAM type: YTN; PAM sequence: TTT
ccaaatacagttatttttaa

SEQ ID NO: 44578 - DNA, 20 bp, Artificial Sequence
  Description of Artificial Sequence: Synthetic oligonucleotide
  Target: SCNA; (-) strand; PAM type: YTN; PAM sequence: TTG
tttccaaatacagttatttt

SEQ ID NO: 44579 - DNA, 20 bp, Artificial Sequence
  Description of Artificial Sequence: Synthetic oligonucleotide
  Target: SCNA; (-) strand; PAM type: YTN; PAM sequence: CTT
gtttccaaatacagttattt

SEQ ID NO: 44580 - DNA, 20 bp, Artificial Sequence
  Description of Artificial Sequence: Synthetic oligonucleotide
  Target: SCNA; (-) strand; PAM type: YTN; PAM sequence: TTC
ttgtttccaaatacagttat

SEQ ID NO: 44581 - DNA, 20 bp, Artificial Sequence
  Description of Artificial Sequence: Synthetic oligonucleotide
  Target: SCNA; (-) strand; PAM type: YTN; PAM sequence: TTT
cttgtttccaaatacagtta

SEQ ID NO: 44582 - DNA, 20 bp, Artificial Sequence
  Description of Artificial Sequence: Synthetic oligonucleotide
  Target: SCNA; (-) strand; PAM type: YTN; PAM sequence: TTT
tcttgtttccaaatacagtt

SEQ ID NO: 44583 - DNA, 20 bp, Artificial Sequence
  Description of Artificial Sequence: Synthetic oligonucleotide
  Target: SCNA; (-) strand; PAM type: YTN; PAM sequence: TTT
ttcttgtttccaaatacagt

SEQ ID NO: 44584 - DNA, 20 bp, Artificial Sequence
  Description of Artificial Sequence: Synthetic oligonucleotide
  Target: SCNA; (-) strand; PAM type: YTN; PAM sequence: TTT
tttcttgtttccaaatacag

SEQ ID NO: 44585 - DNA, 20 bp, Artificial Sequence
  Description of Artificial Sequence: Synthetic oligonucleotide
  Target: SCNA; (-) strand; PAM type: YTN; PAM sequence: CTT
ttttcttgtttccaaataca

SEQ ID NO: 44586 - DNA, 20 bp, Artificial Sequence
  Description of Artificial Sequence: Synthetic oligonucleotide
  Target: SCNA; (-) strand; PAM type: YTN; PAM sequence: TTG
ggtgtcaaagtgactttttt

SEQ ID NO: 44587 - DNA, 20 bp, Artificial Sequence
  Description of Artificial Sequence: Synthetic oligonucleotide
  Target: SCNA; (-) strand; PAM type: YTN; PAM sequence: TTA
tatacatcagttgggtgtca

SEQ ID NO: 44588 - DNA, 20 bp, Artificial Sequence
  Description of Artificial Sequence: Synthetic oligonucleotide
  Target: SCNA; (-) strand; PAM type: YTN; PAM sequence: TTT
atatacatcagttgggtgtc

SEQ ID NO: 44589 - DNA, 20 bp, Artificial Sequence
  Description of Artificial Sequence: Synthetic oligonucleotide
  Target: SCNA; (-) strand; PAM type: YTN; PAM sequence: CTT
tatatacatcagttgggtgt

SEQ ID NO: 44590 - DNA, 20 bp, Artificial Sequence
  Description of Artificial Sequence: Synthetic oligonucleotide
  Target: SCNA; (-) strand; PAM type: YTN; PAM sequence: CTC
ctttatatacatcagttggg

SEQ ID NO: 44591 - DNA, 20 bp, Artificial Sequence
  Description of Artificial Sequence: Synthetic oligonucleotide
  Target: SCNA; (-) strand; PAM type: YTN; PAM sequence: TTA
aaacccatatgcacagtctc

SEQ ID NO: 44592 - DNA, 20 bp, Artificial Sequence
  Description of Artificial Sequence: Synthetic oligonucleotide
  Target: SCNA; (-) strand; PAM type: YTN; PAM sequence: TTT
aaaacccatatgcacagtct

SEQ ID NO: 44593 - DNA, 20 bp, Artificial Sequence
  Description of Artificial Sequence: Synthetic oligonucleotide
  Target: SCNA; (-) strand; PAM type: YTN; PAM sequence: TTT
taaaacccatatgcacagtc

SEQ ID NO: 44594 - DNA, 20 bp, Artificial Sequence
  Description of Artificial Sequence: Synthetic oligonucleotide
  Target: SCNA; (-) strand; PAM type: YTN; PAM sequence: CTC
attttaaaacccatatgcac

SEQ ID NO: 44595 - DNA, 20 bp, Artificial Sequence
  Description of Artificial Sequence: Synthetic oligonucleotide
  Target: SCNA; (-) strand; PAM type: YTN; PAM sequence: TTC
atctcattttaaaacccata

SEQ ID NO: 44596 - DNA, 20 bp, Artificial Sequence
  Description of Artificial Sequence: Synthetic oligonucleotide
  Target: SCNA; (-) strand; PAM type: YTN; PAM sequence: TTT
catctcattttaaaacccat

SEQ ID NO: 44597 - DNA, 20 bp, Artificial Sequence
  Description of Artificial Sequence: Synthetic oligonucleotide
  Target: SCNA; (-) strand; PAM type: YTN; PAM sequence: TTT
tcatctcattttaaaaccca

SEQ ID NO: 44598 - DNA, 20 bp, Artificial Sequence
  Description of Artificial Sequence: Synthetic oligonucleotide
  Target: SCNA; (-) strand; PAM type: YTN; PAM sequence: TTC
aattttcatctcattttaaa

SEQ ID NO: 44599 - DNA, 20 bp, Artificial Sequence
  Description of Artificial Sequence: Synthetic oligonucleotide
  Target: SCNA; (-) strand; PAM type: YTN; PAM sequence: TTT
caattttcatctcattttaa

SEQ ID NO: 44600 - DNA, 20 bp, Artificial Sequence
  Description of Artificial Sequence: Synthetic oligonucleotide
  Target: SCNA; (-) strand; PAM type: YTN; PAM sequence: CTC
aaagatcaaatttcaatttt

SEQ ID NO: 44601 - DNA, 20 bp, Artificial Sequence
  Description of Artificial Sequence: Synthetic oligonucleotide
  Target: SCNA; (-) strand; PAM type: YTN; PAM sequence: TTA
atctcaaagatcaaatttca

SEQ ID NO: 44602 - DNA, 20 bp, Artificial Sequence
  Description of Artificial Sequence: Synthetic oligonucleotide
  Target: SCNA; (-) strand; PAM type: YTN; PAM sequence: TTT
aatctcaaagatcaaatttc

SEQ ID NO: 44603 - DNA, 20 bp, Artificial Sequence
  Description of Artificial Sequence: Synthetic oligonucleotide
  Target: SCNA; (-) strand; PAM type: YTN; PAM sequence: TTT
taatctcaaagatcaaattt

SEQ ID NO: 44604 - DNA, 20 bp, Artificial Sequence
  Description of Artificial Sequence: Synthetic oligonucleotide
  Target: SCNA; (-) strand; PAM type: YTN; PAM sequence: TTT
ttaatctcaaagatcaaatt

SEQ ID NO: 44605 - DNA, 20 bp, Artificial Sequence
  Description of Artificial Sequence: Synthetic oligonucleotide
  Target: SCNA; (-) strand; PAM type: YTN; PAM sequence: TTG
tttttaatctcaaagatcaa

SEQ ID NO: 44606 - DNA, 20 bp, Artificial Sequence
  Description of Artificial Sequence: Synthetic oligonucleotide
  Target: SCNA; (-) strand; PAM type: YTN; PAM sequence: TTA
cataacattgtttttaatct

SEQ ID NO: 44607 - DNA, 20 bp, Artificial Sequence
  Description of Artificial Sequence: Synthetic oligonucleotide
  Target: SCNA; (-) strand; PAM type: YTN; PAM sequence: TTT
acataacattgtttttaatc

SEQ ID NO: 44608 - DNA, 20 bp, Artificial Sequence
  Description of Artificial Sequence: Synthetic oligonucleotide
  Target: SCNA; (-) strand; PAM type: YTN; PAM sequence: TTA
aataaaaatagatttacata

SEQ ID NO: 44609 - DNA, 20 bp, Artificial Sequence
  Description of Artificial Sequence: Synthetic oligonucleotide
  Target: SCNA; (-) strand; PAM type: YTN; PAM sequence: TTC
agaaaaattaaataaaaata

SEQ ID NO: 44610 - DNA, 20 bp, Artificial Sequence
  Description of Artificial Sequence: Synthetic oligonucleotide
  Target: SCNA; (-) strand; PAM type: YTN; PAM sequence: TTT
cagaaaaattaaataaaaat

SEQ ID NO: 44611 - DNA, 20 bp, Artificial Sequence
  Description of Artificial Sequence: Synthetic oligonucleotide
  Target: SCNA; (-) strand; PAM type: YTN; PAM sequence: TTT
tcagaaaaattaaataaaaa

SEQ ID NO: 44612 - DNA, 20 bp, Artificial Sequence
  Description of Artificial Sequence: Synthetic oligonucleotide
  Target: SCNA; (-) strand; PAM type: YTN; PAM sequence: TTT
ttcagaaaaattaaataaaa

SEQ ID NO: 44613 - DNA, 20 bp, Artificial Sequence
  Description of Artificial Sequence: Synthetic oligonucleotide
  Target: SCNA; (-) strand; PAM type: YTN; PAM sequence: TTG
tatagcaagagggtataaag

SEQ ID NO: 44614 - DNA, 20 bp, Artificial Sequence
  Description of Artificial Sequence: Synthetic oligonucleotide
  Target: SCNA; (-) strand; PAM type: YTN; PAM sequence: TTT
gtatagcaagagggtataaa

SEQ ID NO: 44615 - DNA, 20 bp, Artificial Sequence
  Description of Artificial Sequence: Synthetic oligonucleotide
  Target: SCNA; (-) strand; PAM type: YTN; PAM sequence: TTA
agaaaaagtaggaggaataa

SEQ ID NO: 44616 - DNA, 20 bp, Artificial Sequence
  Description of Artificial Sequence: Synthetic oligonucleotide
  Target: SCNA; (-) strand; PAM type: YTN; PAM sequence: TTC
agagatatcaaaattaagaa

SEQ ID NO: 44617 - DNA, 20 bp, Artificial Sequence
  Description of Artificial Sequence: Synthetic oligonucleotide
  Target: SCNA; (-) strand; PAM type: YTN; PAM sequence: TTA
aattcagagatatcaaaatt

SEQ ID NO: 44618 - DNA, 20 bp, Artificial Sequence
  Description of Artificial Sequence: Synthetic oligonucleotide
  Target: SCNA; (-) strand; PAM type: YTN; PAM sequence: TTT
aaattcagagatatcaaaat

SEQ ID NO: 44619 - DNA, 20 bp, Artificial Sequence
  Description of Artificial Sequence: Synthetic oligonucleotide
  Target: SCNA; (-) strand; PAM type: YTN; PAM sequence: CTT
taaattcagagatatcaaaa

SEQ ID NO: 44620 - DNA, 20 bp, Artificial Sequence
  Description of Artificial Sequence: Synthetic oligonucleotide
  Target: SCNA; (-) strand; PAM type: YTN; PAM sequence: CTA
gactttaaattcagagatat

SEQ ID NO: 44621 - DNA, 20 bp, Artificial Sequence
  Description of Artificial Sequence: Synthetic oligonucleotide
  Target: SCNA; (-) strand; PAM type: YTN; PAM sequence: CTC
tagactttaaattcagagat

SEQ ID NO: 44622 - DNA, 20 bp, Artificial Sequence
  Description of Artificial Sequence: Synthetic oligonucleotide
  Target: SCNA; (-) strand; PAM type: YTN; PAM sequence: TTC
tctagactttaaattcagag

SEQ ID NO: 44623 - DNA, 20 bp, Artificial Sequence
  Description of Artificial Sequence: Synthetic oligonucleotide
  Target: SCNA; (-) strand; PAM type: YTN; PAM sequence: CTA
gtgaagatgaatcattctct

SEQ ID NO: 44624 - DNA, 20 bp, Artificial Sequence
  Description of Artificial Sequence: Synthetic oligonucleotide
  Target: SCNA; (-) strand; PAM type: YTN; PAM sequence: CTG
gaaaagatagaactagtgaa

SEQ ID NO: 44625 - DNA, 20 bp, Artificial Sequence
  Description of Artificial Sequence: Synthetic oligonucleotide
  Target: SCNA; (-) strand; PAM type: YTN; PAM sequence: CTA
gcactggaaaagatagaact

SEQ ID NO: 44626 - DNA, 20 bp, Artificial Sequence
  Description of Artificial Sequence: Synthetic oligonucleotide
  Target: SCNA; (-) strand; PAM type: YTN; PAM sequence: CTC
aaaaacaaaaatactagcac

SEQ ID NO: 44627 - DNA, 20 bp, Artificial Sequence
  Description of Artificial Sequence: Synthetic oligonucleotide
  Target: SCNA; (-) strand; PAM type: YTN; PAM sequence: CTC
aaaaatgggatagggaaacc

SEQ ID NO: 44628 - DNA, 20 bp, Artificial Sequence
  Description of Artificial Sequence: Synthetic oligonucleotide
  Target: SCNA; (-) strand; PAM type: YTN; PAM sequence: TTG
agatctcaaaaatgggatag

SEQ ID NO: 44629 - DNA, 20 bp, Artificial Sequence
  Description of Artificial Sequence: Synthetic oligonucleotide
  Target: SCNA; (-) strand; PAM type: YTN; PAM sequence: TTT
gagatctcaaaaatgggata

SEQ ID NO: 44630 - DNA, 20 bp, Artificial Sequence
  Description of Artificial Sequence: Synthetic oligonucleotide
  Target: SCNA; (-) strand; PAM type: YTN; PAM sequence: TTA
tagtttgagatctcaaaaat

SEQ ID NO: 44631 - DNA, 20 bp, Artificial Sequence
  Description of Artificial Sequence: Synthetic oligonucleotide
  Target: SCNA; (-) strand; PAM type: YTN; PAM sequence: CTC
gacaccaaattatagtttga

SEQ ID NO: 44632 - DNA, 20 bp, Artificial Sequence
  Description of Artificial Sequence: Synthetic oligonucleotide
  Target: SCNA; (-) strand; PAM type: YTN; PAM sequence: CTG
ggtactcgacaccaaattat

SEQ ID NO: 44633 - DNA, 20 bp, Artificial Sequence
  Description of Artificial Sequence: Synthetic oligonucleotide
  Target: SCNA; (-) strand; PAM type: YTN; PAM sequence: TTA
aagataagatacctgggtac

SEQ ID NO: 44634 - DNA, 20 bp, Artificial Sequence
  Description of Artificial Sequence: Synthetic oligonucleotide
  Target: SCNA; (-) strand; PAM type: YTN; PAM sequence: TTT
aaagataagatacctgggta

SEQ ID NO: 44635 - DNA, 20 bp, Artificial Sequence
  Description of Artificial Sequence: Synthetic oligonucleotide
  Target: SCNA; (-) strand; PAM type: YTN; PAM sequence: CTT
taaagataagatacctgggt

SEQ ID NO: 44636 - DNA, 20 bp, Artificial Sequence
  Description of Artificial Sequence: Synthetic oligonucleotide
  Target: SCNA; (-) strand; PAM type: YTN; PAM sequence: TTC
actttaaagataagatacct

SEQ ID NO: 44637 - DNA, 20 bp, Artificial Sequence
  Description of Artificial Sequence: Synthetic oligonucleotide
  Target: SCNA; (-) strand; PAM type: YTN; PAM sequence: CTT
cactttaaagataagatacc

SEQ ID NO: 44638 - DNA, 20 bp, Artificial Sequence
  Description of Artificial Sequence: Synthetic oligonucleotide
  Target: SCNA; (-) strand; PAM type: YTN; PAM sequence: CTA
cgtcttcactttaaagataa

SEQ ID NO: 44639 - DNA, 20 bp, Artificial Sequence
  Description of Artificial Sequence: Synthetic oligonucleotide
  Target: SCNA; (-) strand; PAM type: YTN; PAM sequence: CTG
cctacgtcttcactttaaag

SEQ ID NO: 44640 - DNA, 20 bp, Artificial Sequence
  Description of Artificial Sequence: Synthetic oligonucleotide
  Target: SCNA; (-) strand; PAM type: YTN; PAM sequence: TTG
tgctgcctacgtcttcactt

SEQ ID NO: 44641 - DNA, 20 bp, Artificial Sequence
  Description of Artificial Sequence: Synthetic oligonucleotide
  Target: SCNA; (-) strand; PAM type: YTN; PAM sequence: TTT
gtgctgcctacgtcttcact

SEQ ID NO: 44642 - DNA, 20 bp, Artificial Sequence
  Description of Artificial Sequence: Synthetic oligonucleotide
  Target: SCNA; (-) strand; PAM type: YTN; PAM sequence: CTT
tgtgctgcctacgtcttcac

SEQ ID NO: 44643 - DNA, 20 bp, Artificial Sequence
  Description of Artificial Sequence: Synthetic oligonucleotide
  Target: SCNA; (-) strand; PAM type: YTN; PAM sequence: CTA
ataaaagcacctttgtgctg

SEQ ID NO: 44644 - DNA, 20 bp, Artificial Sequence
  Description of Artificial Sequence: Synthetic oligonucleotide
  Target: SCNA; (-) strand; PAM type: YTN; PAM sequence: TTC
taataaaagcacctttgtgc

SEQ ID NO: 44645 - DNA, 20 bp, Artificial Sequence
  Description of Artificial Sequence: Synthetic oligonucleotide
  Target: SCNA; (-) strand; PAM type: YTN; PAM sequence: CTA
gtggacgttctaataaaagc

SEQ ID NO: 44646 - DNA, 20 bp, Artificial Sequence
  Description of Artificial Sequence: Synthetic oligonucleotide
  Target: SCNA; (-) strand; PAM type: YTN; PAM sequence: CTG
atctagtggacgttctaata

SEQ ID NO: 44647 - DNA, 20 bp, Artificial Sequence
  Description of Artificial Sequence: Synthetic oligonucleotide
  Target: SCNA; (-) strand; PAM type: YTN; PAM sequence: TTC
tgatctagtggacgttctaa

SEQ ID NO: 44648 - DNA, 20 bp, Artificial Sequence
  Description of Artificial Sequence: Synthetic oligonucleotide
  Target: SCNA; (-) strand; PAM type: YTN; PAM sequence: CTG
gtcattctgatctagtggac

SEQ ID NO: 44649 - DNA, 20 bp, Artificial Sequence
  Description of Artificial Sequence: Synthetic oligonucleotide
  Target: SCNA; (-) strand; PAM type: YTN; PAM sequence: TTG
tgcactggtcattctgatct

SEQ ID NO: 44650 - DNA, 20 bp, Artificial Sequence
  Description of Artificial Sequence: Synthetic oligonucleotide
  Target: SCNA; (-) strand; PAM type: YTN; PAM sequence: TTT
gtgcactggtcattctgatc

SEQ ID NO: 44651 - DNA, 20 bp, Artificial Sequence
  Description of Artificial Sequence: Synthetic oligonucleotide
  Target: SCNA; (-) strand; PAM type: YTN; PAM sequence: TTT
tgtgcactggtcattctgat

SEQ ID NO: 44652 - DNA, 20 bp, Artificial Sequence
  Description of Artificial Sequence: Synthetic oligonucleotide
  Target: SCNA; (-) strand; PAM type: YTN; PAM sequence: CTA
ggaaaataaattttgtgcac

SEQ ID NO: 44653 - DNA, 20 bp, Artificial Sequence
  Description of Artificial Sequence: Synthetic oligonucleotide
  Target: SCNA; (-) strand; PAM type: YTN; PAM sequence: CTG
ctaggaaaataaattttgtg

SEQ ID NO: 44654 - DNA, 20 bp, Artificial Sequence
  Description of Artificial Sequence: Synthetic oligonucleotide
  Target: SCNA; (-) strand; PAM type: YTN; PAM sequence: TTG
gtgagtctgctaggaaaata

SEQ ID NO: 44655 - DNA, 20 bp, Artificial Sequence
  Description of Artificial Sequence: Synthetic oligonucleotide
  Target: SCNA; (-) strand; PAM type: YTN; PAM sequence: TTT
ggtgagtctgctaggaaaat

SEQ ID NO: 44656 - DNA, 20 bp, Artificial Sequence
  Description of Artificial Sequence: Synthetic oligonucleotide
  Target: SCNA; (-) strand; PAM type: YTN; PAM sequence: TTA
aatttggtgagtctgctagg

SEQ ID NO: 44657 - DNA, 20 bp, Artificial Sequence
  Description of Artificial Sequence: Synthetic oligonucleotide
  Target: SCNA; (-) strand; PAM type: YTN; PAM sequence: TTC
caggttaaatttggtgagtc

SEQ ID NO: 44658 - DNA, 20 bp, Artificial Sequence
  Description of Artificial Sequence: Synthetic oligonucleotide
  Target: SCNA; (-) strand; PAM type: YTN; PAM sequence: CTT
ccaggttaaatttggtgagt

SEQ ID NO: 44659 - DNA, 20 bp, Artificial Sequence
  Description of Artificial Sequence: Synthetic oligonucleotide
  Target: SCNA; (-) strand; PAM type: YTN; PAM sequence: CTC
ttccaggttaaatttggtga

SEQ ID NO: 44660 - DNA, 20 bp, Artificial Sequence
  Description of Artificial Sequence: Synthetic oligonucleotide
  Target: SCNA; (-) strand; PAM type: YTN; PAM sequence: TTC
tcttccaggttaaatttggt

SEQ ID NO: 44661 - DNA, 20 bp, Artificial Sequence
  Description of Artificial Sequence: Synthetic oligonucleotide
  Target: SCNA; (-) strand; PAM type: YTN; PAM sequence: TTC
aacagagtcagacattctct

SEQ ID NO: 44662 - DNA, 20 bp, Artificial Sequence
  Description of Artificial Sequence: Synthetic oligonucleotide
  Target: SCNA; (-) strand; PAM type: YTN; PAM sequence: CTA
agaaaattcaacagagtcag

SEQ ID NO: 44663 - DNA, 20 bp, Artificial Sequence
  Description of Artificial Sequence: Synthetic oligonucleotide
  Target: SCNA; (-) strand; PAM type: YTN; PAM sequence: TTG
cctaagaaaattcaacagag

SEQ ID NO: 44664 - DNA, 20 bp, Artificial Sequence
  Description of Artificial Sequence: Synthetic oligonucleotide
  Target: SCNA; (-) strand; PAM type: YTN; PAM sequence: TTT
gcctaagaaaattcaacaga

SEQ ID NO: 44665 - DNA, 20 bp, Artificial Sequence
  Description of Artificial Sequence: Synthetic oligonucleotide
  Target: SCNA; (-) strand; PAM type: YTN; PAM sequence: TTG
tatttgcctaagaaaattca

SEQ ID NO: 44666 - DNA, 20 bp, Artificial Sequence
  Description of Artificial Sequence: Synthetic oligonucleotide
  Target: SCNA; (-) strand; PAM type: YTN; PAM sequence: TTC
aaatattgtatttgcctaag

SEQ ID NO: 44667 - DNA, 20 bp, Artificial Sequence
  Description of Artificial Sequence: Synthetic oligonucleotide
  Target: SCNA; (-) strand; PAM type: YTN; PAM sequence: TTT
caaatattgtatttgcctaa

SEQ ID NO: 44668 - DNA, 20 bp, Artificial Sequence
  Description of Artificial Sequence: Synthetic oligonucleotide
  Target: SCNA; (-) strand; PAM type: YTN; PAM sequence: CTT
tcaaatattgtatttgccta

SEQ ID NO: 44669 - DNA, 20 bp, Artificial Sequence
  Description of Artificial Sequence: Synthetic oligonucleotide
  Target: SCNA; (-) strand; PAM type: YTN; PAM sequence: TTC
agtgactttcaaatattgta

SEQ ID NO: 44670 - DNA, 20 bp, Artificial Sequence
  Description of Artificial Sequence: Synthetic oligonucleotide
  Target: SCNA; (-) strand; PAM type: YTN; PAM sequence: TTG
aaacattcagtgactttcaa

SEQ ID NO: 44671 - DNA, 20 bp, Artificial Sequence
  Description of Artificial Sequence: Synthetic oligonucleotide
  Target: SCNA; (-) strand; PAM type: YTN; PAM sequence: TTT
gaaacattcagtgactttca

SEQ ID NO: 44672 - DNA, 20 bp, Artificial Sequence
  Description of Artificial Sequence: Synthetic oligonucleotide
  Target: SCNA; (-) strand; PAM type: YTN; PAM sequence: TTG
tttgaaacattcagtgactt

SEQ ID NO: 44673 - DNA, 20 bp, Artificial Sequence
  Description of Artificial Sequence: Synthetic oligonucleotide
  Target: SCNA; (-) strand; PAM type: YTN; PAM sequence: TTT
gtttgaaacattcagtgact

SEQ ID NO: 44674 - DNA, 20 bp, Artificial Sequence
  Description of Artificial Sequence: Synthetic oligonucleotide
  Target: SCNA; (-) strand; PAM type: YTN; PAM sequence: TTT
tgtttgaaacattcagtgac

SEQ ID NO: 44675 - DNA, 20 bp, Artificial Sequence
  Description of Artificial Sequence: Synthetic oligonucleotide
  Target: SCNA; (-) strand; PAM type: YTN; PAM sequence: TTA
tattttgtttgaaacattca

SEQ ID NO: 44676 - DNA, 20 bp, Artificial Sequence
  Description of Artificial Sequence: Synthetic oligonucleotide
  Target: SCNA; (-) strand; PAM type: YTN; PAM sequence: TTG
ttatattttgtttgaaacat

SEQ ID NO: 44677 - DNA, 20 bp, Artificial Sequence
  Description of Artificial Sequence: Synthetic oligonucleotide
  Target: SCNA; (-) strand; PAM type: YTN; PAM sequence: CTG
aatgttgttatattttgttt

SEQ ID NO: 44678 - DNA, 20 bp, Artificial Sequence
  Description of Artificial Sequence: Synthetic oligonucleotide
  Target: SCNA; (-) strand; PAM type: YTN; PAM sequence: TTA
tctgaatgttgttatatttt

SEQ ID NO: 44679 - DNA, 20 bp, Artificial Sequence
  Description of Artificial Sequence: Synthetic oligonucleotide
  Target: SCNA; (-) strand; PAM type: YTN; PAM sequence: CTG
ttatctgaatgttgttatat

SEQ ID NO: 44680 - DNA, 20 bp, Artificial Sequence
  Description of Artificial Sequence: Synthetic oligonucleotide
  Target: SCNA; (-) strand; PAM type: YTN; PAM sequence: TTC
tgttatctgaatgttgttat

SEQ ID NO: 44681 - DNA, 20 bp, Artificial Sequence
  Description of Artificial Sequence: Synthetic oligonucleotide
  Target: SCNA; (-) strand; PAM type: YTN; PAM sequence: CTG
ggcataaacacatgagaaca

SEQ ID NO: 44682 - DNA, 20 bp, Artificial Sequence
  Description of Artificial Sequence: Synthetic oligonucleotide
  Target: SCNA; (-) strand; PAM type: YTN; PAM sequence: TTC
tgggcataaacacatgagaa

SEQ ID NO: 44683 - DNA, 20 bp, Artificial Sequence
  Description of Artificial Sequence: Synthetic oligonucleotide
  Target: SCNA; (-) strand; PAM type: YTN; PAM sequence: TTT
ctgggcataaacacatgaga

SEQ ID NO: 44684 - DNA, 20 bp, Artificial Sequence
  Description of Artificial Sequence: Synthetic oligonucleotide
  Target: SCNA; (-) strand; PAM type: YTN; PAM sequence: TTT
tctgggcataaacacatgag

SEQ ID NO: 44685 - DNA, 20 bp, Artificial Sequence
  Description of Artificial Sequence: Synthetic oligonucleotide
  Target: SCNA; (-) strand; PAM type: YTN; PAM sequence: TTA
ttttctgggcataaacacat

SEQ ID NO: 44686 - DNA, 20 bp, Artificial Sequence
  Description of Artificial Sequence: Synthetic oligonucleotide
  Target: SCNA; (-) strand; PAM type: YTN; PAM sequence: CTT
attttctgggcataaacaca

SEQ ID NO: 44687 - DNA, 20 bp, Artificial Sequence
  Description of Artificial Sequence: Synthetic oligonucleotide
  Target: SCNA; (-) strand; PAM type: YTN; PAM sequence: CTG
cttattttctgggcataaac

SEQ ID NO: 44688 - DNA, 20 bp, Artificial Sequence
  Description of Artificial Sequence: Synthetic oligonucleotide
  Target: SCNA; (-) strand; PAM type: YTN; PAM sequence: CTC
cagtctgcttattttctggg

SEQ ID NO: 44689 - DNA, 20 bp, Artificial Sequence
  Description of Artificial Sequence: Synthetic oligonucleotide
  Target: SCNA; (-) strand; PAM type: YTN; PAM sequence: TTA
gagaagctccagtctgctta

SEQ ID NO: 44690 - DNA, 20 bp, Artificial Sequence
  Description of Artificial Sequence: Synthetic oligonucleotide
  Target: SCNA; (-) strand; PAM type: YTN; PAM sequence: CTT
agagaagctccagtctgctt

SEQ ID NO: 44691 - DNA, 20 bp, Artificial Sequence
  Description of Artificial Sequence: Synthetic oligonucleotide
  Target: SCNA; (-) strand; PAM type: YTN; PAM sequence: TTA
atcttagagaagctccagtc

SEQ ID NO: 44692 - DNA, 20 bp, Artificial Sequence
  Description of Artificial Sequence: Synthetic oligonucleotide
  Target: SCNA; (-) strand; PAM type: YTN; PAM sequence: TTT
aatcttagagaagctccagt

SEQ ID NO: 44693 - DNA, 20 bp, Artificial Sequence
  Description of Artificial Sequence: Synthetic oligonucleotide
  Target: SCNA; (-) strand; PAM type: YTN; PAM sequence: TTT
taatcttagagaagctccag

SEQ ID NO: 44694 - DNA, 20 bp, Artificial Sequence
  Description of Artificial Sequence: Synthetic oligonucleotide
  Target: SCNA; (-) strand; PAM type: YTN; PAM sequence: CTT
ttaatcttagagaagctcca

SEQ ID NO: 44695 - DNA, 20 bp, Artificial Sequence
  Description of Artificial Sequence: Synthetic oligonucleotide
  Target: SCNA; (-) strand; PAM type: YTN; PAM sequence: TTG
acttttaatcttagagaagc

SEQ ID NO: 44696 - DNA, 20 bp, Artificial Sequence
  Description of Artificial Sequence: Synthetic oligonucleotide
  Target: SCNA; (-) strand; PAM type: YTN; PAM sequence: TTT
gacttttaatcttagagaag

SEQ ID NO: 44697 - DNA, 20 bp, Artificial Sequence
  Description of Artificial Sequence: Synthetic oligonucleotide
  Target: SCNA; (-) strand; PAM type: YTN; PAM sequence: TTT
tgacttttaatcttagagaa

SEQ ID NO: 44698 - DNA, 20 bp, Artificial Sequence
  Description of Artificial Sequence: Synthetic oligonucleotide
  Target: SCNA; (-) strand; PAM type: YTN; PAM sequence: CTG
ttttgacttttaatcttaga

SEQ ID NO: 44699 - DNA, 20 bp, Artificial Sequence
  Description of Artificial Sequence: Synthetic oligonucleotide
  Target: SCNA; (-) strand; PAM type: YTN; PAM sequence: TTG
taatactgttttgactttta

SEQ ID NO: 44700 - DNA, 20 bp, Artificial Sequence
  Description of Artificial Sequence: Synthetic oligonucleotide
  Target: SCNA; (-) strand; PAM type: YTN; PAM sequence: CTG
gaattgtaatactgttttga

SEQ ID NO: 44701 - DNA, 20 bp, Artificial Sequence
  Description of Artificial Sequence: Synthetic oligonucleotide
  Target: SCNA; (-) strand; PAM type: YTN; PAM sequence: CTG
ggctggaattgtaatactgt

SEQ ID NO: 44702 - DNA, 20 bp, Artificial Sequence
  Description of Artificial Sequence: Synthetic oligonucleotide
  Target: SCNA; (-) strand; PAM type: YTN; PAM sequence: TTA
gatagtcaaatctgggctgg

SEQ ID NO: 44703 - DNA, 20 bp, Artificial Sequence
  Description of Artificial Sequence: Synthetic oligonucleotide
  Target: SCNA; (-) strand; PAM type: YTN; PAM sequence: TTA
aatgattagatagtcaaatc

SEQ ID NO: 44704 - DNA, 20 bp, Artificial Sequence
  Description of Artificial Sequence: Synthetic oligonucleotide
  Target: SCNA; (-) strand; PAM type: YTN; PAM sequence: TTT
aaatgattagatagtcaaat

SEQ ID NO: 44705 - DNA, 20 bp, Artificial Sequence
  Description of Artificial Sequence: Synthetic oligonucleotide
  Target: SCNA; (-) strand; PAM type: YTN; PAM sequence: CTA
aggtttaaatgattagatag

SEQ ID NO: 44706 - DNA, 20 bp, Artificial Sequence
  Description of Artificial Sequence: Synthetic oligonucleotide
  Target: SCNA; (-) strand; PAM type: YTN; PAM sequence: TTA
atgagtatgcagtgacggtg

SEQ ID NO: 44707 - DNA, 20 bp, Artificial Sequence
  Description of Artificial Sequence: Synthetic oligonucleotide
  Target: SCNA; (-) strand; PAM type: YTN; PAM sequence: CTT
aatgagtatgcagtgacggt

SEQ ID NO: 44708 - DNA, 20 bp, Artificial Sequence
  Description of Artificial Sequence: Synthetic oligonucleotide
  Target: SCNA; (-) strand; PAM type: YTN; PAM sequence: TTA
acttaatgagtatgcagtga

SEQ ID NO: 44709 - DNA, 20 bp, Artificial Sequence
  Description of Artificial Sequence: Synthetic oligonucleotide
  Target: SCNA; (-) strand; PAM type: YTN; PAM sequence: TTT
aacttaatgagtatgcagtg

SEQ ID NO: 44710 - DNA, 20 bp, Artificial Sequence
  Description of Artificial Sequence: Synthetic oligonucleotide
  Target: SCNA; (-) strand; PAM type: YTN; PAM sequence: TTT
taacttaatgagtatgcagt

SEQ ID NO: 44711 - DNA, 20 bp, Artificial Sequence
  Description of Artificial Sequence: Synthetic oligonucleotide
  Target: SCNA; (-) strand; PAM type: YTN; PAM sequence: TTT
ttaacttaatgagtatgcag

SEQ ID NO: 44712 - DNA, 20 bp, Artificial Sequence
  Description of Artificial Sequence: Synthetic oligonucleotide
  Target: SCNA; (-) strand; PAM type: YTN; PAM sequence: TTT
tttaacttaatgagtatgca

SEQ ID NO: 44713 - DNA, 20 bp, Artificial Sequence
  Description of Artificial Sequence: Synthetic oligonucleotide
  Target: SCNA; (-) strand; PAM type: YTN; PAM sequence: TTT
ttttaacttaatgagtatgc

SEQ ID NO: 44714 - DNA, 20 bp, Artificial Sequence
  Description of Artificial Sequence: Synthetic oligonucleotide
  Target: SCNA; (-) strand; PAM type: YTN; PAM sequence: TTT
tttttaacttaatgagtatg

SEQ ID NO: 44715 - DNA, 20 bp, Artificial Sequence
  Description of Artificial Sequence: Synthetic oligonucleotide
  Target: SCNA; (-) strand; PAM type: YTN; PAM sequence: TTA
aaggaattttttttaactta

SEQ ID NO: 44716 - DNA, 20 bp, Artificial Sequence
  Description of Artificial Sequence: Synthetic oligonucleotide
  Target: SCNA; (-) strand; PAM type: YTN; PAM sequence: TTT
aaaggaattttttttaactt

SEQ ID NO: 44717 - DNA, 20 bp, Artificial Sequence
  Description of Artificial Sequence: Synthetic oligonucleotide
  Target: SCNA; (-) strand; PAM type: YTN; PAM sequence: TTT
taaaggaattttttttaact

SEQ ID NO: 44718 - DNA, 20 bp, Artificial Sequence
  Description of Artificial Sequence: Synthetic oligonucleotide
  Target: SCNA; (-) strand; PAM type: YTN; PAM sequence: TTA
ttttaaaggaatttttttta

SEQ ID NO: 44719 - DNA, 20 bp, Artificial Sequence
  Description of Artificial Sequence: Synthetic oligonucleotide
  Target: SCNA; (-) strand; PAM type: YTN; PAM sequence: TTT
attttaaaggaatttttttt

SEQ ID NO: 44720 - DNA, 20 bp, Artificial Sequence
  Description of Artificial Sequence: Synthetic oligonucleotide
  Target: SCNA; (-) strand; PAM type: YTN; PAM sequence: TTC
catttattttaaaggaattt

SEQ ID NO: 44721 - DNA, 20 bp, Artificial Sequence
  Description of Artificial Sequence: Synthetic oligonucleotide
  Target: SCNA; (-) strand; PAM type: YTN; PAM sequence: TTT
ccatttattttaaaggaatt

SEQ ID NO: 44722 - DNA, 20 bp, Artificial Sequence
  Description of Artificial Sequence: Synthetic oligonucleotide
  Target: SCNA; (-) strand; PAM type: YTN; PAM sequence: TTT
tccatttattttaaaggaat

SEQ ID NO: 44723 - DNA, 20 bp, Artificial Sequence
  Description of Artificial Sequence: Synthetic oligonucleotide
  Target: SCNA; (-) strand; PAM type: YTN; PAM sequence: CTT
ttccatttattttaaaggaa

SEQ ID NO: 44724 - DNA, 20 bp, Artificial Sequence
  Description of Artificial Sequence: Synthetic oligonucleotide
  Target: SCNA; (-) strand; PAM type: YTN; PAM sequence: TTC
ttttccatttattttaaagg

SEQ ID NO: 44725 - DNA, 20 bp, Artificial Sequence
  Description of Artificial Sequence: Synthetic oligonucleotide
  Target: SCNA; (-) strand; PAM type: YTN; PAM sequence: TTT
cttttccatttattttaaag

SEQ ID NO: 44726 - DNA, 20 bp, Artificial Sequence
  Description of Artificial Sequence: Synthetic oligonucleotide
  Target: SCNA; (-) strand; PAM type: YTN; PAM sequence: TTT
tcttttccatttattttaaa

SEQ ID NO: 44727 - DNA, 20 bp, Artificial Sequence
  Description of Artificial Sequence: Synthetic oligonucleotide
  Target: SCNA; (-) strand; PAM type: YTN; PAM sequence: TTA
cacagatattttcttttcca

SEQ ID NO: 44728 - DNA, 20 bp, Artificial Sequence
  Description of Artificial Sequence: Synthetic oligonucleotide
  Target: SCNA; (-) strand; PAM type: YTN; PAM sequence: TTT
acacagatattttcttttcc

SEQ ID NO: 44729 - DNA, 20 bp, Artificial Sequence
  Description of Artificial Sequence: Synthetic oligonucleotide
  Target: SCNA; (-) strand; PAM type: YTN; PAM sequence: CTA
tttacacagatattttcttt

SEQ ID NO: 44730 - DNA, 20 bp, Artificial Sequence
  Description of Artificial Sequence: Synthetic oligonucleotide
  Target: SCNA; (-) strand; PAM type: YTN; PAM sequence: TTA
atctatttacacagatattt

SEQ ID NO: 44731 - DNA, 20 bp, Artificial Sequence
  Description of Artificial Sequence: Synthetic oligonucleotide
  Target: SCNA; (-) strand; PAM type: YTN; PAM sequence: TTT
aatctatttacacagatatt

SEQ ID NO: 44732 - DNA, 20 bp, Artificial Sequence
  Description of Artificial Sequence: Synthetic oligonucleotide
  Target: SCNA; (-) strand; PAM type: YTN; PAM sequence: CTT
taatctatttacacagatat

SEQ ID NO: 44733 - DNA, 20 bp, Artificial Sequence
  Description of Artificial Sequence: Synthetic oligonucleotide
  Target: SCNA; (-) strand; PAM type: YTN; PAM sequence: CTG
ccccagggagaaagggagtg

SEQ ID NO: 44734 - DNA, 20 bp, Artificial Sequence
  Description of Artificial Sequence: Synthetic oligonucleotide
  Target: SCNA; (-) strand; PAM type: YTN; PAM sequence: CTC
ctgccccagggagaaaggga

SEQ ID NO: 44735 - DNA, 20 bp, Artificial Sequence
  Description of Artificial Sequence: Synthetic oligonucleotide
  Target: SCNA; (-) strand; PAM type: YTN; PAM sequence: CTC
aagtctcctgccccagggag

SEQ ID NO: 44736 - DNA, 20 bp, Artificial Sequence
  Description of Artificial Sequence: Synthetic oligonucleotide
  Target: SCNA; (-) strand; PAM type: YTN; PAM sequence: TTG
atgtgctcaagtctcctgcc

SEQ ID NO: 44737 - DNA, 20 bp, Artificial Sequence
  Description of Artificial Sequence: Synthetic oligonucleotide
  Target: SCNA; (-) strand; PAM type: YTN; PAM sequence: TTT
gatgtgctcaagtctcctgc

SEQ ID NO: 44738 - DNA, 20 bp, Artificial Sequence
  Description of Artificial Sequence: Synthetic oligonucleotide
  Target: SCNA; (-) strand; PAM type: YTN; PAM sequence: CTT
tgatgtgctcaagtctcctg

SEQ ID NO: 44739 - DNA, 20 bp, Artificial Sequence
  Description of Artificial Sequence: Synthetic oligonucleotide
  Target: SCNA; (-) strand; PAM type: YTN; PAM sequence: TTC
ctttgatgtgctcaagtctc

SEQ ID NO: 44740 - DNA, 20 bp, Artificial Sequence
  Description of Artificial Sequence: Synthetic oligonucleotide
  Target: SCNA; (-) strand; PAM type: YTN; PAM sequence: CTA
tgagttcctttgatgtgctc

SEQ ID NO: 44741 - DNA, 20 bp, Artificial Sequence
  Description of Artificial Sequence: Synthetic oligonucleotide
  Target: SCNA; (-) strand; PAM type: YTN; PAM sequence: CTC
caagaacgctatgagttcct

SEQ ID NO: 44742 - DNA, 20 bp, Artificial Sequence
  Description of Artificial Sequence: Synthetic oligonucleotide
  Target: SCNA; (-) strand; PAM type: YTN; PAM sequence: TTA
ctccaagaacgctatgagtt

SEQ ID NO: 44743 - DNA, 20 bp, Artificial Sequence
  Description of Artificial Sequence: Synthetic oligonucleotide
  Target: SCNA; (-) strand; PAM type: YTN; PAM sequence: CTT
actccaagaacgctatgagt

SEQ ID NO: 44744 - DNA, 20 bp, Artificial Sequence
  Description of Artificial Sequence: Synthetic oligonucleotide
  Target: SCNA; (-) strand; PAM type: YTN; PAM sequence: TTC
acacttactccaagaacgct

SEQ ID NO: 44745 - DNA, 20 bp, Artificial Sequence
  Description of Artificial Sequence: Synthetic oligonucleotide
  Target: SCNA; (-) strand; PAM type: YTN; PAM sequence: TTT
cacacttactccaagaacgc

SEQ ID NO: 44746 - DNA, 20 bp, Artificial Sequence
  Description of Artificial Sequence: Synthetic oligonucleotide
  Target: SCNA; (-) strand; PAM type: YTN; PAM sequence: CTT
tcacacttactccaagaacg

SEQ ID NO: 44747 - DNA, 20 bp, Artificial Sequence
  Description of Artificial Sequence: Synthetic oligonucleotide
  Target: SCNA; (-) strand; PAM type: YTN; PAM sequence: TTC
atcacggtggctttcacact

SEQ ID NO: 44748 - DNA, 20 bp, Artificial Sequence
  Description of Artificial Sequence: Synthetic oligonucleotide
  Target: SCNA; (-) strand; PAM type: YTN; PAM sequence: TTA
gttcatcacggtggctttca

SEQ ID NO: 44749 - DNA, 20 bp, Artificial Sequence
  Description of Artificial Sequence: Synthetic oligonucleotide
  Target: SCNA; (-) strand; PAM type: YTN; PAM sequence: TTT
agttcatcacggtggctttc

SEQ ID NO: 44750 - DNA, 20 bp, Artificial Sequence
  Description of Artificial Sequence: Synthetic oligonucleotide
  Target: SCNA; (-) strand; PAM type: YTN; PAM sequence: TTC
atttagttcatcacggtggc

SEQ ID NO: 44751 - DNA, 20 bp, Artificial Sequence
  Description of Artificial Sequence: Synthetic oligonucleotide
  Target: SCNA; (-) strand; PAM type: YTN; PAM sequence: TTA
gatgtaagcattcatttagt

SEQ ID NO: 44752 - DNA, 20 bp, Artificial Sequence
  Description of Artificial Sequence: Synthetic oligonucleotide
  Target: SCNA; (-) strand; PAM type: YTN; PAM sequence: TTT
agatgtaagcattcatttag

SEQ ID NO: 44753 - DNA, 20 bp, Artificial Sequence
  Description of Artificial Sequence: Synthetic oligonucleotide
  Target: SCNA; (-) strand; PAM type: YTN; PAM sequence: CTT
tagatgtaagcattcattta

SEQ ID NO: 44754 - DNA, 20 bp, Artificial Sequence
  Description of Artificial Sequence: Synthetic oligonucleotide
  Target: SCNA; (-) strand; PAM type: YTN; PAM sequence: TTC
tttagatgtaagcattcatt

SEQ ID NO: 44755 - DNA, 20 bp, Artificial Sequence
  Description of Artificial Sequence: Synthetic oligonucleotide
  Target: SCNA; (-) strand; PAM type: YTN; PAM sequence: TTT
ctttagatgtaagcattcat

SEQ ID NO: 44756 - DNA, 20 bp, Artificial Sequence
  Description of Artificial Sequence: Synthetic oligonucleotide
  Target: SCNA; (-) strand; PAM type: YTN; PAM sequence: CTT
tctttagatgtaagcattca

SEQ ID NO: 44757 - DNA, 20 bp, Artificial Sequence
  Description of Artificial Sequence: Synthetic oligonucleotide
  Target: SCNA; (-) strand; PAM type: YTN; PAM sequence: TTA
catctttctttagatgtaag

SEQ ID NO: 44758 - DNA, 20 bp, Artificial Sequence
  Description of Artificial Sequence: Synthetic oligonucleotide
  Target: SCNA; (-) strand; PAM type: YTN; PAM sequence: TTT
acatctttctttagatgtaa

SEQ ID NO: 44759 - DNA, 20 bp, Artificial Sequence
  Description of Artificial Sequence: Synthetic oligonucleotide
  Target: SCNA; (-) strand; PAM type: YTN; PAM sequence: TTA
atgtaatatgtttacatctt

SEQ ID NO: 44760 - DNA, 20 bp, Artificial Sequence
  Description of Artificial Sequence: Synthetic oligonucleotide
  Target: SCNA; (-) strand; PAM type: YTN; PAM sequence: TTT
aatgtaatatgtttacatct

SEQ ID NO: 44761 - DNA, 20 bp, Artificial Sequence
  Description of Artificial Sequence: Synthetic oligonucleotide
  Target: SCNA; (-) strand; PAM type: YTN; PAM sequence: TTT
taatgtaatatgtttacatc

SEQ ID NO: 44762 - DNA, 20 bp, Artificial Sequence
  Description of Artificial Sequence: Synthetic oligonucleotide
  Target: SCNA; (-) strand; PAM type: YTN; PAM sequence: CTT
ttaatgtaatatgtttacat

SEQ ID NO: 44763 - DNA, 20 bp, Artificial Sequence
  Description of Artificial Sequence: Synthetic oligonucleotide
  Target: SCNA; (-) strand; PAM type: YTN; PAM sequence: TTA
tgtcatgccaccttttaatg

SEQ ID NO: 44764 - DNA, 20 bp, Artificial Sequence
  Description of Artificial Sequence: Synthetic oligonucleotide
  Target: SCNA; (-) strand; PAM type: YTN; PAM sequence: TTA
atcagtgatataccattatg

SEQ ID NO: 44765 - DNA, 20 bp, Artificial Sequence
  Description of Artificial Sequence: Synthetic oligonucleotide
  Target: SCNA; (-) strand; PAM type: YTN; PAM sequence: CTT
aatcagtgatataccattat

SEQ ID NO: 44766 - DNA, 20 bp, Artificial Sequence
  Description of Artificial Sequence: Synthetic oligonucleotide
  Target: SCNA; (-) strand; PAM type: YTN; PAM sequence: TTC
ttaatcagtgatataccatt

SEQ ID NO: 44767 - DNA, 20 bp, Artificial Sequence
  Description of Artificial Sequence: Synthetic oligonucleotide
  Target: SCNA; (-) strand; PAM type: YTN; PAM sequence: TTT
cttaatcagtgatataccat

SEQ ID NO: 44768 - DNA, 20 bp, Artificial Sequence
  Description of Artificial Sequence: Synthetic oligonucleotide
  Target: SCNA; (-) strand; PAM type: YTN; PAM sequence: CTC
acatttcttaatcagtgata

SEQ ID NO: 44769 - DNA, 20 bp, Artificial Sequence
  Description of Artificial Sequence: Synthetic oligonucleotide
  Target: SCNA; (-) strand; PAM type: YTN; PAM sequence: TTA
tcagtggcacatgaaagtcg

SEQ ID NO: 44770 - DNA, 20 bp, Artificial Sequence
  Description of Artificial Sequence: Synthetic oligonucleotide
  Target: SCNA; (-) strand; PAM type: YTN; PAM sequence: TTT
atcagtggcacatgaaagtc

SEQ ID NO: 44771 - DNA, 20 bp, Artificial Sequence
  Description of Artificial Sequence: Synthetic oligonucleotide
  Target: SCNA; (-) strand; PAM type: YTN; PAM sequence: TTA
taatgatttatcagtggcac

SEQ ID NO: 44772 - DNA, 20 bp, Artificial Sequence
  Description of Artificial Sequence: Synthetic oligonucleotide
  Target: SCNA; (-) strand; PAM type: YTN; PAM sequence: CTA
tgtcaaattataatgattta

SEQ ID NO: 44773 - DNA, 20 bp, Artificial Sequence
  Description of Artificial Sequence: Synthetic oligonucleotide
  Target: SCNA; (-) strand; PAM type: YTN; PAM sequence: CTA
ctatgtcaaattataatgat

SEQ ID NO: 44774 - DNA, 20 bp, Artificial Sequence
  Description of Artificial Sequence: Synthetic oligonucleotide
  Target: SCNA; (-) strand; PAM type: YTN; PAM sequence: TTA
tctactatgtcaaattataa

SEQ ID NO: 44775 - DNA, 20 bp, Artificial Sequence
  Description of Artificial Sequence: Synthetic oligonucleotide
  Target: SCNA; (-) strand; PAM type: YTN; PAM sequence: TTC
caggtatgcagatgaaatat

SEQ ID NO: 44776 - DNA, 20 bp, Artificial Sequence
  Description of Artificial Sequence: Synthetic oligonucleotide
  Target: SCNA; (-) strand; PAM type: YTN; PAM sequence: TTT
ccaggtatgcagatgaaata

SEQ ID NO: 44777 - DNA, 20 bp, Artificial Sequence
  Description of Artificial Sequence: Synthetic oligonucleotide
  Target: SCNA; (-) strand; PAM type: YTN; PAM sequence: TTT
tccaggtatgcagatgaaat

SEQ ID NO: 44778 - DNA, 20 bp, Artificial Sequence
  Description of Artificial Sequence: Synthetic oligonucleotide
  Target: SCNA; (-) strand; PAM type: YTN; PAM sequence: CTC
attttccaggtatgcagatg

SEQ ID NO: 44779 - DNA, 20 bp, Artificial Sequence
  Description of Artificial Sequence: Synthetic oligonucleotide
  Target: SCNA; (-) strand; PAM type: YTN; PAM sequence: TTG
aaagtcctcattttccaggt

SEQ ID NO: 44780 - DNA, 20 bp, Artificial Sequence
  Description of Artificial Sequence: Synthetic oligonucleotide
  Target: SCNA; (-) strand; PAM type: YTN; PAM sequence: TTT
gaaagtcctcattttccagg

SEQ ID NO: 44781 - DNA, 20 bp, Artificial Sequence
  Description of Artificial Sequence: Synthetic oligonucleotide
  Target: SCNA; (-) strand; PAM type: YTN; PAM sequence: TTT
tgaaagtcctcattttccag

SEQ ID NO: 44782 - DNA, 20 bp, Artificial Sequence
  Description of Artificial Sequence: Synthetic oligonucleotide
  Target: SCNA; (-) strand; PAM type: YTN; PAM sequence: CTG
gcaggaatatgttttgaaag

SEQ ID NO: 44783 - DNA, 20 bp, Artificial Sequence
  Description of Artificial Sequence: Synthetic oligonucleotide
  Target: SCNA; (-) strand; PAM type: YTN; PAM sequence: CTG
taactggcaggaatatgttt

SEQ ID NO: 44784 - DNA, 20 bp, Artificial Sequence
  Description of Artificial Sequence: Synthetic oligonucleotide
  Target: SCNA; (-) strand; PAM type: YTN; PAM sequence: CTG
actgtaactggcaggaatat

SEQ ID NO: 44785 - DNA, 20 bp, Artificial Sequence
  Description of Artificial Sequence: Synthetic oligonucleotide
  Target: SCNA; (-) strand; PAM type: YTN; PAM sequence: TTG
caatacctgactgtaactgg

SEQ ID NO: 44786 - DNA, 20 bp, Artificial Sequence
  Description of Artificial Sequence: Synthetic oligonucleotide
  Target: SCNA; (-) strand; PAM type: YTN; PAM sequence: TTT
gcaatacctgactgtaactg

SEQ ID NO: 44787 - DNA, 20 bp, Artificial Sequence
  Description of Artificial Sequence: Synthetic oligonucleotide
  Target: SCNA; (-) strand; PAM type: YTN; PAM sequence: TTT
tgcaatacctgactgtaact

SEQ ID NO: 44788 - DNA, 20 bp, Artificial Sequence
  Description of Artificial Sequence: Synthetic oligonucleotide
  Target: SCNA; (-) strand; PAM type: YTN; PAM sequence: TTG
ttttgcaatacctgactgta

SEQ ID NO: 44789 - DNA, 20 bp, Artificial Sequence
  Description of Artificial Sequence: Synthetic oligonucleotide
  Target: SCNA; (-) strand; PAM type: YTN; PAM sequence: CTT
gttttgcaatacctgactgt

SEQ ID NO: 44790 - DNA, 20 bp, Artificial Sequence
  Description of Artificial Sequence: Synthetic oligonucleotide
  Target: SCNA; (-) strand; PAM type: YTN; PAM sequence: CTA
aatgcttgttttgcaatacc

SEQ ID NO: 44791 - DNA, 20 bp, Artificial Sequence
  Description of Artificial Sequence: Synthetic oligonucleotide
  Target: SCNA; (-) strand; PAM type: YTN; PAM sequence: CTC
actaaatgcttgttttgcaa

SEQ ID NO: 44792 - DNA, 20 bp, Artificial Sequence
  Description of Artificial Sequence: Synthetic oligonucleotide
  Target: SCNA; (-) strand; PAM type: YTN; PAM sequence: TTA
gatgctcactaaatgcttgt

SEQ ID NO: 44793 - DNA, 20 bp, Artificial Sequence
  Description of Artificial Sequence: Synthetic oligonucleotide
  Target: SCNA; (-) strand; PAM type: YTN; PAM sequence: TTT
agatgctcactaaatgcttg

SEQ ID NO: 44794 - DNA, 20 bp, Artificial Sequence
  Description of Artificial Sequence: Synthetic oligonucleotide
  Target: SCNA; (-) strand; PAM type: YTN; PAM sequence: TTC
agtttagatgctcactaaat

SEQ ID NO: 44795 - DNA, 20 bp, Artificial Sequence
  Description of Artificial Sequence: Synthetic oligonucleotide
  Target: SCNA; (-) strand; PAM type: YTN; PAM sequence: CTT
cagtttagatgctcactaaa

SEQ ID NO: 44796 - DNA, 20 bp, Artificial Sequence
  Description of Artificial Sequence: Synthetic oligonucleotide
  Target: SCNA; (-) strand; PAM type: YTN; PAM sequence: CTA
agcttcagtttagatgctca

SEQ ID NO: 44797 - DNA, 20 bp, Artificial Sequence
  Description of Artificial Sequence: Synthetic oligonucleotide
  Target: SCNA; (-) strand; PAM type: YTN; PAM sequence: TTC
taagcttcagtttagatgct

SEQ ID NO: 44798 - DNA, 20 bp, Artificial Sequence
  Description of Artificial Sequence: Synthetic oligonucleotide
  Target: SCNA; (-) strand; PAM type: YTN; PAM sequence: CTG
aagttctaagcttcagttta

SEQ ID NO: 44799 - DNA, 20 bp, Artificial Sequence
  Description of Artificial Sequence: Synthetic oligonucleotide
  Target: SCNA; (-) strand; PAM type: YTN; PAM sequence: TTA
caggcgtgagccaccgcgcc

SEQ ID NO: 44800 - DNA, 20 bp, Artificial Sequence
  Description of Artificial Sequence: Synthetic oligonucleotide
  Target: SCNA; (-) strand; PAM type: YTN; PAM sequence: CTG
ggattacaggcgtgagccac

SEQ ID NO: 44801 - DNA, 20 bp, Artificial Sequence
  Description of Artificial Sequence: Synthetic oligonucleotide
  Target: SCNA; (-) strand; PAM type: YTN; PAM sequence: CTC
ccaaggtgctgggattacag

SEQ ID NO: 44802 - DNA, 20 bp, Artificial Sequence
  Description of Artificial Sequence: Synthetic oligonucleotide
  Target: SCNA; (-) strand; PAM type: YTN; PAM sequence: TTG
gcctcccaaggtgctgggat

SEQ ID NO: 44803 - DNA, 20 bp, Artificial Sequence
  Description of Artificial Sequence: Synthetic oligonucleotide
  Target: SCNA; (-) strand; PAM type: YTN; PAM sequence: CTT
ggcctcccaaggtgctggga

SEQ ID NO: 44804 - DNA, 20 bp, Artificial Sequence
  Description of Artificial Sequence: Synthetic oligonucleotide
  Target: SCNA; (-) strand; PAM type: YTN; PAM sequence: CTG
tcttggcctcccaaggtgct

SEQ ID NO: 44805 - DNA, 20 bp, Artificial Sequence
  Description of Artificial Sequence: Synthetic oligonucleotide
  Target: SCNA; (-) strand; PAM type: YTN; PAM sequence: CTC
aagtgatccgcctgtcttgg

SEQ ID NO: 44806 - DNA, 20 bp, Artificial Sequence
  Description of Artificial Sequence: Synthetic oligonucleotide
  Target: SCNA; (-) strand; PAM type: YTN; PAM sequence: CTG
acctcaagtgatccgcctgt

SEQ ID NO: 44807 - DNA, 20 bp, Artificial Sequence
  Description of Artificial Sequence: Synthetic oligonucleotide
  Target: SCNA; (-) strand; PAM type: YTN; PAM sequence: CTC
ctgacctcaagtgatccgcc

SEQ ID NO: 44808 - DNA, 20 bp, Artificial Sequence
  Description of Artificial Sequence: Synthetic oligonucleotide
  Target: SCNA; (-) strand; PAM type: YTN; PAM sequence: CTG
gtcccaaactcctgacctca

SEQ ID NO: 44809 - DNA, 20 bp, Artificial Sequence
  Description of Artificial Sequence: Synthetic oligonucleotide
  Target: SCNA; (-) strand; PAM type: YTN; PAM sequence: TTC
accatgtgggccaggctggt

SEQ ID NO: 44810 - DNA, 20 bp, Artificial Sequence
  Description of Artificial Sequence: Synthetic oligonucleotide
  Target: SCNA; (-) strand; PAM type: YTN; PAM sequence: TTT
caccatgtgggccaggctgg

SEQ ID NO: 44811 - DNA, 20 bp, Artificial Sequence
  Description of Artificial Sequence: Synthetic oligonucleotide
  Target: SCNA; (-) strand; PAM type: YTN; PAM sequence: TTA
gtagagatggggtttcacca

SEQ ID NO: 44812 - DNA, 20 bp, Artificial Sequence
  Description of Artificial Sequence: Synthetic oligonucleotide
  Target: SCNA; (-) strand; PAM type: YTN; PAM sequence: TTT
agtagagatggggtttcacc

SEQ ID NO: 44813 - DNA, 20 bp, Artificial Sequence
  Description of Artificial Sequence: Synthetic oligonucleotide
  Target: SCNA; (-) strand; PAM type: YTN; PAM sequence: TTT
tagtagagatggggtttcac

SEQ ID NO: 44814 - DNA, 20 bp, Artificial Sequence
  Description of Artificial Sequence: Synthetic oligonucleotide
  Target: SCNA; (-) strand; PAM type: YTN; PAM sequence: TTT
ttagtagagatggggtttca

SEQ ID NO: 44815 - DNA, 20 bp, Artificial Sequence
  Description of Artificial Sequence: Synthetic oligonucleotide
  Target: SCNA; (-) strand; PAM type: YTN; PAM sequence: TTG
tatttttagtagagatgggg

SEQ ID NO: 44816 - DNA, 20 bp, Artificial Sequence
  Description of Artificial Sequence: Synthetic oligonucleotide
  Target: SCNA; (-) strand; PAM type: YTN; PAM sequence: TTT
gtatttttagtagagatggg

SEQ ID NO: 44817 - DNA, 20 bp, Artificial Sequence
  Description of Artificial Sequence: Synthetic oligonucleotide
  Target: SCNA; (-) strand; PAM type: YTN; PAM sequence: TTT
tgtatttttagtagagatgg

SEQ ID NO: 44818 - DNA, 20 bp, Artificial Sequence
  Description of Artificial Sequence: Synthetic oligonucleotide
  Target: SCNA; (-) strand; PAM type: YTN; PAM sequence: TTT
ttgtatttttagtagagatg

SEQ ID NO: 44819 - DNA, 20 bp, Artificial Sequence
  Description of Artificial Sequence: Synthetic oligonucleotide
  Target: SCNA; (-) strand; PAM type: YTN; PAM sequence: CTA
atttttgtatttttagtaga

SEQ ID NO: 44820 - DNA, 20 bp, Artificial Sequence
  Description of Artificial Sequence: Synthetic oligonucleotide
  Target: SCNA; (-) strand; PAM type: YTN; PAM sequence: CTG
gctaatttttgtatttttag

SEQ ID NO: 44821 - DNA, 20 bp, Artificial Sequence
  Description of Artificial Sequence: Synthetic oligonucleotide
  Target: SCNA; (-) strand; PAM type: YTN; PAM sequence: CTA
caggtgcgtgcaaccatgcc

SEQ ID NO: 44822 - DNA, 20 bp, Artificial Sequence
  Description of Artificial Sequence: Synthetic oligonucleotide
  Target: SCNA; (-) strand; PAM type: YTN; PAM sequence: CTG
ggactacaggtgcgtgcaac

SEQ ID NO: 44823 - DNA, 20 bp, Artificial Sequence
  Description of Artificial Sequence: Synthetic oligonucleotide
  Target: SCNA; (-) strand; PAM type: YTN; PAM sequence: CTG
agtaactgggactacaggtg

SEQ ID NO: 44824 - DNA, 20 bp, Artificial Sequence
  Description of Artificial Sequence: Synthetic oligonucleotide
  Target: SCNA; (-) strand; PAM type: YTN; PAM sequence: CTC
agccacctgagtaactggga

SEQ ID NO: 44825 - DNA, 20 bp, Artificial Sequence
  Description of Artificial Sequence: Synthetic oligonucleotide
  Target: SCNA; (-) strand; PAM type: YTN; PAM sequence: CTG
cctcagccacctgagtaact

SEQ ID NO: 44826 - DNA, 20 bp, Artificial Sequence
  Description of Artificial Sequence: Synthetic oligonucleotide
  Target: SCNA; (-) strand; PAM type: YTN; PAM sequence: TTC
tgcctcagccacctgagtaa

SEQ ID NO: 44827 - DNA, 20 bp, Artificial Sequence
  Description of Artificial Sequence: Synthetic oligonucleotide
  Target: SCNA; (-) strand; PAM type: YTN; PAM sequence: CTT
ctgcctcagccacctgagta

SEQ ID NO: 44828 - DNA, 20 bp, Artificial Sequence
  Description of Artificial Sequence: Synthetic oligonucleotide
  Target: SCNA; (-) strand; PAM type: YTN; PAM sequence: TTC
ttctgcctcagccacctgag

SEQ ID NO: 44829 - DNA, 20 bp, Artificial Sequence
  Description of Artificial Sequence: Synthetic oligonucleotide
  Target: SCNA; (-) strand; PAM type: YTN; PAM sequence: TTC
aagcgattcttctgcctcag

SEQ ID NO: 44830 - DNA, 20 bp, Artificial Sequence
  Description of Artificial Sequence: Synthetic oligonucleotide
  Target: SCNA; (-) strand; PAM type: YTN; PAM sequence: CTC
caccacccaggttcaagcga

SEQ ID NO: 44831 - DNA, 20 bp, Artificial Sequence
  Description of Artificial Sequence: Synthetic oligonucleotide
  Target: SCNA; (-) strand; PAM type: YTN; PAM sequence: CTG
caatctccaccacccaggtt

SEQ ID NO: 44832 - DNA, 20 bp, Artificial Sequence
  Description of Artificial Sequence: Synthetic oligonucleotide
  Target: SCNA; (-) strand; PAM type: YTN; PAM sequence: CTC
actgcaatctccaccaccca

SEQ ID NO: 44833 - DNA, 20 bp, Artificial Sequence
  Description of Artificial Sequence: Synthetic oligonucleotide
  Target: SCNA; (-) strand; PAM type: YTN; PAM sequence: CTC
agctcactgcaatctccacc

SEQ ID NO: 44834 - DNA, 20 bp, Artificial Sequence
  Description of Artificial Sequence: Synthetic oligonucleotide
  Target: SCNA; (-) strand; PAM type: YTN; PAM sequence: CTG
gagtgcagtggcaggatctc

SEQ ID NO: 44835 - DNA, 20 bp, Artificial Sequence
  Description of Artificial Sequence: Synthetic oligonucleotide
  Target: SCNA; (-) strand; PAM type: YTN; PAM sequence: TTG
cccaggctggagtgcagtgg

SEQ ID NO: 44836 - DNA, 20 bp, Artificial Sequence
  Description of Artificial Sequence: Synthetic oligonucleotide
  Target: SCNA; (-) strand; PAM type: YTN; PAM sequence: CTT
gcccaggctggagtgcagtg

SEQ ID NO: 44837 - DNA, 20 bp, Artificial Sequence
  Description of Artificial Sequence: Synthetic oligonucleotide
  Target: SCNA; (-) strand; PAM type: YTN; PAM sequence: CTC
ttgcccaggctggagtgcag

SEQ ID NO: 44838 - DNA, 20 bp, Artificial Sequence
  Description of Artificial Sequence: Synthetic oligonucleotide
  Target: SCNA; (-) strand; PAM type: YTN; PAM sequence: CTC
tcttgcccaggctggagtgc

SEQ ID NO: 44839 - DNA, 20 bp, Artificial Sequence
  Description of Artificial Sequence: Synthetic oligonucleotide
  Target: SCNA; (-) strand; PAM type: YTN; PAM sequence: CTC
actctcttgcccaggctgga

SEQ ID NO: 44840 - DNA, 20 bp, Artificial Sequence
  Description of Artificial Sequence: Synthetic oligonucleotide
  Target: SCNA; (-) strand; PAM type: YTN; PAM sequence: TTG
agatggagtctcactctctt

SEQ ID NO: 44841 - DNA, 20 bp, Artificial Sequence
  Description of Artificial Sequence: Synthetic oligonucleotide
  Target: SCNA; (-) strand; PAM type: YTN; PAM sequence: TTT
gagatggagtctcactctct

SEQ ID NO: 44842 - DNA, 20 bp, Artificial Sequence
  Description of Artificial Sequence: Synthetic oligonucleotide
  Target: SCNA; (-) strand; PAM type: YTN; PAM sequence: TTT
tgagatggagtctcactctc

SEQ ID NO: 44843 - DNA, 20 bp, Artificial Sequence
  Description of Artificial Sequence: Synthetic oligonucleotide
  Target: SCNA; (-) strand; PAM type: YTN; PAM sequence: TTT
ttgagatggagtctcactct

SEQ ID NO: 44844 - DNA, 20 bp, Artificial Sequence
  Description of Artificial Sequence: Synthetic oligonucleotide
  Target: SCNA; (-) strand; PAM type: YTN; PAM sequence: TTT
tttgagatggagtctcactc

SEQ ID NO: 44845 - DNA, 20 bp, Artificial Sequence
  Description of Artificial Sequence: Synthetic oligonucleotide
  Target: SCNA; (-) strand; PAM type: YTN; PAM sequence: TTT
ttttgagatggagtctcact

SEQ ID NO: 44846 - DNA, 20 bp, Artificial Sequence
  Description of Artificial Sequence: Synthetic oligonucleotide
  Target: SCNA; (-) strand; PAM type: YTN; PAM sequence: TTA
tttttttgagatggagtctc

SEQ ID NO: 44847 - DNA, 20 bp, Artificial Sequence
  Description of Artificial Sequence: Synthetic oligonucleotide
  Target: SCNA; (-) strand; PAM type: YTN; PAM sequence: TTT
atttttttgagatggagtct

SEQ ID NO: 44848 - DNA, 20 bp, Artificial Sequence
  Description of Artificial Sequence: Synthetic oligonucleotide
  Target: SCNA; (-) strand; PAM type: YTN; PAM sequence: CTT
tatttttttgagatggagtc

SEQ ID NO: 44849 - DNA, 20 bp, Artificial Sequence
  Description of Artificial Sequence: Synthetic oligonucleotide
  Target: SCNA; (-) strand; PAM type: YTN; PAM sequence: TTC
tttatttttttgagatggag

SEQ ID NO: 44850 - DNA, 20 bp, Artificial Sequence
  Description of Artificial Sequence: Synthetic oligonucleotide
  Target: SCNA; (-) strand; PAM type: YTN; PAM sequence: TTG
gagttctttatttttttgag

SEQ ID NO: 44851 - DNA, 20 bp, Artificial Sequence
  Description of Artificial Sequence: Synthetic oligonucleotide
  Target: SCNA; (-) strand; PAM type: YTN; PAM sequence: CTA
tgccatgaagaaaataaaat

SEQ ID NO: 44852 - DNA, 20 bp, Artificial Sequence
  Description of Artificial Sequence: Synthetic oligonucleotide
  Target: SCNA; (-) strand; PAM type: YTN; PAM sequence: TTA
tgctatgccatgaagaaaat

SEQ ID NO: 44853 - DNA, 20 bp, Artificial Sequence
  Description of Artificial Sequence: Synthetic oligonucleotide
  Target: SCNA; (-) strand; PAM type: YTN; PAM sequence: CTA
ttatgctatgccatgaagaa

SEQ ID NO: 44854 - DNA, 20 bp, Artificial Sequence
  Description of Artificial Sequence: Synthetic oligonucleotide
  Target: SCNA; (-) strand; PAM type: YTN; PAM sequence: CTC
atctattatgctatgccatg

SEQ ID NO: 44855 - DNA, 20 bp, Artificial Sequence
  Description of Artificial Sequence: Synthetic oligonucleotide
  Target: SCNA; (-) strand; PAM type: YTN; PAM sequence: TTA
actcatctattatgctatgc

SEQ ID NO: 44856 - DNA, 20 bp, Artificial Sequence
  Description of Artificial Sequence: Synthetic oligonucleotide
  Target: SCNA; (-) strand; PAM type: YTN; PAM sequence: TTG
ttaactcatctattatgcta

SEQ ID NO: 44857 - DNA, 20 bp, Artificial Sequence
  Description of Artificial Sequence: Synthetic oligonucleotide
  Target: SCNA; (-) strand; PAM type: YTN; PAM sequence: TTT
gttaactcatctattatgct

SEQ ID NO: 44858 - DNA, 20 bp, Artificial Sequence
  Description of Artificial Sequence: Synthetic oligonucleotide
  Target: SCNA; (-) strand; PAM type: YTN; PAM sequence: TTA
atttgttaactcatctatta

SEQ ID NO: 44859 - DNA, 20 bp, Artificial Sequence
  Description of Artificial Sequence: Synthetic oligonucleotide
  Target: SCNA; (-) strand; PAM type: YTN; PAM sequence: TTC
attaatttgttaactcatct

SEQ ID NO: 44860 - DNA, 20 bp, Artificial Sequence
  Description of Artificial Sequence: Synthetic oligonucleotide
  Target: SCNA; (-) strand; PAM type: YTN; PAM sequence: TTT
cattaatttgttaactcatc

SEQ ID NO: 44861 - DNA, 20 bp, Artificial Sequence
  Description of Artificial Sequence: Synthetic oligonucleotide
  Target: SCNA; (-) strand; PAM type: YTN; PAM sequence: CTG
tttcattaatttgttaactc

SEQ ID NO: 44862 - DNA, 20 bp, Artificial Sequence
  Description of Artificial Sequence: Synthetic oligonucleotide
  Target: SCNA; (-) strand; PAM type: YTN; PAM sequence: TTA
acacatgtcaatctgtttca

SEQ ID NO: 44863 - DNA, 20 bp, Artificial Sequence
  Description of Artificial Sequence: Synthetic oligonucleotide
  Target: SCNA; (-) strand; PAM type: YTN; PAM sequence: TTG
caattaacacatgtcaatct

SEQ ID NO: 44864 - DNA, 20 bp, Artificial Sequence
  Description of Artificial Sequence: Synthetic oligonucleotide
  Target: SCNA; (-) strand; PAM type: YTN; PAM sequence: CTG
tatatgattgcaattaacac

SEQ ID NO: 44865 - DNA, 20 bp, Artificial Sequence
  Description of Artificial Sequence: Synthetic oligonucleotide
  Target: SCNA; (-) strand; PAM type: YTN; PAM sequence: TTC
tgtatatgattgcaattaac

SEQ ID NO: 44866 - DNA, 20 bp, Artificial Sequence
  Description of Artificial Sequence: Synthetic oligonucleotide
  Target: SCNA; (-) strand; PAM type: YTN; PAM sequence: CTG
ttctgtatatgattgcaatt

SEQ ID NO: 44867 - DNA, 20 bp, Artificial Sequence
  Description of Artificial Sequence: Synthetic oligonucleotide
  Target: SCNA; (-) strand; PAM type: YTN; PAM sequence: TTC
tgttctgtatatgattgcaa

SEQ ID NO: 44868 - DNA, 20 bp, Artificial Sequence
  Description of Artificial Sequence: Synthetic oligonucleotide
  Target: SCNA; (-) strand; PAM type: YTN; PAM sequence: TTT
ctgttctgtatatgattgca

SEQ ID NO: 44869 - DNA, 20 bp, Artificial Sequence
  Description of Artificial Sequence: Synthetic oligonucleotide
  Target: SCNA; (-) strand; PAM type: YTN; PAM sequence: TTA
tggaaatgatttctgttctg

SEQ ID NO: 44870 - DNA, 20 bp, Artificial Sequence
  Description of Artificial Sequence: Synthetic oligonucleotide
  Target: SCNA; (-) strand; PAM type: YTN; PAM sequence: TTT
atggaaatgatttctgttct

SEQ ID NO: 44871 - DNA, 20 bp, Artificial Sequence
  Description of Artificial Sequence: Synthetic oligonucleotide
  Target: SCNA; (-) strand; PAM type: YTN; PAM sequence: TTT
tatggaaatgatttctgttc

SEQ ID NO: 44872 - DNA, 20 bp, Artificial Sequence
  Description of Artificial Sequence: Synthetic oligonucleotide
  Target: SCNA; (-) strand; PAM type: YTN; PAM sequence: TTA
aatattttatggaaatgatt

SEQ ID NO: 44873 - DNA, 20 bp, Artificial Sequence
  Description of Artificial Sequence: Synthetic oligonucleotide
  Target: SCNA; (-) strand; PAM type: YTN; PAM sequence: TTA
ggggaagtaacaggcaggtt

SEQ ID NO: 44874 - DNA, 20 bp, Artificial Sequence
  Description of Artificial Sequence: Synthetic oligonucleotide
  Target: SCNA; (-) strand; PAM type: YTN; PAM sequence: TTT
aggggaagtaacaggcaggt

SEQ ID NO: 44875 - DNA, 20 bp, Artificial Sequence
  Description of Artificial Sequence: Synthetic oligonucleotide
  Target: SCNA; (-) strand; PAM type: YTN; PAM sequence: CTA
cagagagatttaggggaagt

SEQ ID NO: 44876 - DNA, 20 bp, Artificial Sequence
  Description of Artificial Sequence: Synthetic oligonucleotide
  Target: SCNA; (-) strand; PAM type: YTN; PAM sequence: TTG
gggcatcagctacagagaga

SEQ ID NO: 44877 - DNA, 20 bp, Artificial Sequence
  Description of Artificial Sequence: Synthetic oligonucleotide
  Target: SCNA; (-) strand; PAM type: YTN; PAM sequence: CTA
atagtgaaattggggcatca

SEQ ID NO: 44878 - DNA, 20 bp, Artificial Sequence
  Description of Artificial Sequence: Synthetic oligonucleotide
  Target: SCNA; (-) strand; PAM type: YTN; PAM sequence: CTG
aagagctaatagtgaaattg

SEQ ID NO: 44879 - DNA, 20 bp, Artificial Sequence
  Description of Artificial Sequence: Synthetic oligonucleotide
  Target: SCNA; (-) strand; PAM type: YTN; PAM sequence: TTA
acatccaagtctgaagagct

SEQ ID NO: 44880 - DNA, 20 bp, Artificial Sequence
  Description of Artificial Sequence: Synthetic oligonucleotide
  Target: SCNA; (-) strand; PAM type: YTN; PAM sequence: CTT
aacatccaagtctgaagagc

SEQ ID NO: 44881 - DNA, 20 bp, Artificial Sequence
  Description of Artificial Sequence: Synthetic oligonucleotide
  Target: SCNA; (-) strand; PAM type: YTN; PAM sequence: TTA
aagagaggtccaggggaagg

SEQ ID NO: 44882 - DNA, 20 bp, Artificial Sequence
  Description of Artificial Sequence: Synthetic oligonucleotide
  Target: SCNA; (-) strand; PAM type: YTN; PAM sequence: TTT
aaagagaggtccaggggaag

SEQ ID NO: 44883 - DNA, 20 bp, Artificial Sequence
  Description of Artificial Sequence: Synthetic oligonucleotide
  Target: SCNA; (-) strand; PAM type: YTN; PAM sequence: CTG
tgacatttaaagagaggtcc

SEQ ID NO: 44884 - DNA, 20 bp, Artificial Sequence
  Description of Artificial Sequence: Synthetic oligonucleotide
  Target: SCNA; (-) strand; PAM type: YTN; PAM sequence: CTG
ccagaaatagctgtgacatt

SEQ ID NO: 44885 - DNA, 20 bp, Artificial Sequence
  Description of Artificial Sequence: Synthetic oligonucleotide
  Target: SCNA; (-) strand; PAM type: YTN; PAM sequence: TTA
cctgccagaaatagctgtga

SEQ ID NO: 44886 - DNA, 20 bp, Artificial Sequence
  Description of Artificial Sequence: Synthetic oligonucleotide
  Target: SCNA; (-) strand; PAM type: YTN; PAM sequence: CTT
acctgccagaaatagctgtg

SEQ ID NO: 44887 - DNA, 20 bp, Artificial Sequence
  Description of Artificial Sequence: Synthetic oligonucleotide
  Target: SCNA; (-) strand; PAM type: YTN; PAM sequence: CTA
accaaagcaatagtcttacc

SEQ ID NO: 44888 - DNA, 20 bp, Artificial Sequence
  Description of Artificial Sequence: Synthetic oligonucleotide
  Target: SCNA; (-) strand; PAM type: YTN; PAM sequence: TTC
acactaaccaaagcaatagt

SEQ ID NO: 44889 - DNA, 20 bp, Artificial Sequence
  Description of Artificial Sequence: Synthetic oligonucleotide
  Target: SCNA; (-) strand; PAM type: YTN; PAM sequence: TTG
tgatccacagtggtgtgtgt

SEQ ID NO: 44890 - DNA, 20 bp, Artificial Sequence
  Description of Artificial Sequence: Synthetic oligonucleotide
  Target: SCNA; (-) strand; PAM type: YTN; PAM sequence: CTT
gtgatccacagtggtgtgtg

SEQ ID NO: 44891 - DNA, 20 bp, Artificial Sequence
  Description of Artificial Sequence: Synthetic oligonucleotide
  Target: SCNA; (-) strand; PAM type: YTN; PAM sequence: CTC
aggtgccttgtgatccacag

SEQ ID NO: 44892 - DNA, 20 bp, Artificial Sequence
  Description of Artificial Sequence: Synthetic oligonucleotide
  Target: SCNA; (-) strand; PAM type: YTN; PAM sequence: CTC
tcaggtgccttgtgatccac

SEQ ID NO: 44893 - DNA, 20 bp, Artificial Sequence
  Description of Artificial Sequence: Synthetic oligonucleotide
  Target: SCNA; (-) strand; PAM type: YTN; PAM sequence: TTC
tctcaggtgccttgtgatcc

SEQ ID NO: 44894 - DNA, 20 bp, Artificial Sequence
  Description of Artificial Sequence: Synthetic oligonucleotide
  Target: SCNA; (-) strand; PAM type: YTN; PAM sequence: TTT
ctctcaggtgccttgtgatc

SEQ ID NO: 44895 - DNA, 20 bp, Artificial Sequence
  Description of Artificial Sequence: Synthetic oligonucleotide
  Target: SCNA; (-) strand; PAM type: YTN; PAM sequence: TTT
tctctcaggtgccttgtgat

SEQ ID NO: 44896 - DNA, 20 bp, Artificial Sequence
  Description of Artificial Sequence: Synthetic oligonucleotide
  Target: SCNA; (-) strand; PAM type: YTN; PAM sequence: CTT
ttctctcaggtgccttgtga

SEQ ID NO: 44897 - DNA, 20 bp, Artificial Sequence
  Description of Artificial Sequence: Synthetic oligonucleotide
  Target: SCNA; (-) strand; PAM type: YTN; PAM sequence: TTC
ggcagccttttctctcaggt

SEQ ID NO: 44898 - DNA, 20 bp, Artificial Sequence
  Description of Artificial Sequence: Synthetic oligonucleotide
  Target: SCNA; (-) strand; PAM type: YTN; PAM sequence: TTT
cggcagccttttctctcagg

SEQ ID NO: 44899 - DNA, 20 bp, Artificial Sequence
  Description of Artificial Sequence: Synthetic oligonucleotide
  Target: SCNA; (-) strand; PAM type: YTN; PAM sequence: CTT
tcggcagccttttctctcag

SEQ ID NO: 44900 - DNA, 20 bp, Artificial Sequence
  Description of Artificial Sequence: Synthetic oligonucleotide
  Target: SCNA; (-) strand; PAM type: YTN; PAM sequence: CTG
ctttcggcagccttttctct

SEQ ID NO: 44901 - DNA, 20 bp, Artificial Sequence
  Description of Artificial Sequence: Synthetic oligonucleotide
  Target: SCNA; (-) strand; PAM type: YTN; PAM sequence: TTC
ctgctttcggcagccttttc

SEQ ID NO: 44902 - DNA, 20 bp, Artificial Sequence
  Description of Artificial Sequence: Synthetic oligonucleotide
  Target: SCNA; (-) strand; PAM type: YTN; PAM sequence: TTT
cctgctttcggcagcctttt

SEQ ID NO: 44903 - DNA, 20 bp, Artificial Sequence
  Description of Artificial Sequence: Synthetic oligonucleotide
  Target: SCNA; (-) strand; PAM type: YTN; PAM sequence: TTT
tcctgctttcggcagccttt

SEQ ID NO: 44904 - DNA, 20 bp, Artificial Sequence
  Description of Artificial Sequence: Synthetic oligonucleotide
  Target: SCNA; (-) strand; PAM type: YTN; PAM sequence: TTA
ttttcctgctttcggcagcc

SEQ ID NO: 44905 - DNA, 20 bp, Artificial Sequence
  Description of Artificial Sequence: Synthetic oligonucleotide
  Target: SCNA; (-) strand; PAM type: YTN; PAM sequence: CTG
agttattttcctgctttcgg

SEQ ID NO: 44906 - DNA, 20 bp, Artificial Sequence
  Description of Artificial Sequence: Synthetic oligonucleotide
  Target: SCNA; (-) strand; PAM type: YTN; PAM sequence: TTC
tgagttattttcctgctttc

SEQ ID NO: 44907 - DNA, 20 bp, Artificial Sequence
  Description of Artificial Sequence: Synthetic oligonucleotide
  Target: SCNA; (-) strand; PAM type: YTN; PAM sequence: TTT
ctgagttattttcctgcttt

SEQ ID NO: 44908 - DNA, 20 bp, Artificial Sequence
  Description of Artificial Sequence: Synthetic oligonucleotide
  Target: SCNA; (-) strand; PAM type: YTN; PAM sequence: TTT
tctgagttattttcctgctt

SEQ ID NO: 44909 - DNA, 20 bp, Artificial Sequence
  Description of Artificial Sequence: Synthetic oligonucleotide
  Target: SCNA; (-) strand; PAM type: YTN; PAM sequence: TTT
ttctgagttattttcctgct

SEQ ID NO: 44910 - DNA, 20 bp, Artificial Sequence
  Description of Artificial Sequence: Synthetic oligonucleotide
  Target: SCNA; (-) strand; PAM type: YTN; PAM sequence: TTT
tttctgagttattttcctgc

SEQ ID NO: 44911 - DNA, 20 bp, Artificial Sequence
  Description of Artificial Sequence: Synthetic oligonucleotide
  Target: SCNA; (-) strand; PAM type: YTN; PAM sequence: CTT
ttttctgagttattttcctg

SEQ ID NO: 44912 - DNA, 20 bp, Artificial Sequence
  Description of Artificial Sequence: Synthetic oligonucleotide
  Target: SCNA; (-) strand; PAM type: YTN; PAM sequence: TTC
ttttttctgagttattttcc

SEQ ID NO: 44913 - DNA, 20 bp, Artificial Sequence
  Description of Artificial Sequence: Synthetic oligonucleotide
  Target: SCNA; (-) strand; PAM type: YTN; PAM sequence: TTT
cttttttctgagttattttc

SEQ ID NO: 44914 - DNA, 20 bp, Artificial Sequence
  Description of Artificial Sequence: Synthetic oligonucleotide
  Target: SCNA; (-) strand; PAM type: YTN; PAM sequence: TTT
tcttttttctgagttatttt

SEQ ID NO: 44915 - DNA, 20 bp, Artificial Sequence
  Description of Artificial Sequence: Synthetic oligonucleotide
  Target: SCNA; (-) strand; PAM type: YTN; PAM sequence: TTT
ttcttttttctgagttattt

SEQ ID NO: 44916 - DNA, 20 bp, Artificial Sequence
  Description of Artificial Sequence: Synthetic oligonucleotide
  Target: SCNA; (-) strand; PAM type: YTN; PAM sequence: TTT
tttcttttttctgagttatt

SEQ ID NO: 44917 - DNA, 20 bp, Artificial Sequence
  Description of Artificial Sequence: Synthetic oligonucleotide
  Target: SCNA; (-) strand; PAM type: YTN; PAM sequence: TTT
ttttcttttttctgagttat

SEQ ID NO: 44918 - DNA, 20 bp, Artificial Sequence
  Description of Artificial Sequence: Synthetic oligonucleotide
  Target: SCNA; (-) strand; PAM type: YTN; PAM sequence: TTT
tttttcttttttctgagtta

SEQ ID NO: 44919 - DNA, 20 bp, Artificial Sequence
  Description of Artificial Sequence: Synthetic oligonucleotide
  Target: SCNA; (-) strand; PAM type: YTN; PAM sequence: TTT
ttttttcttttttctgagtt

SEQ ID NO: 44920 - DNA, 20 bp, Artificial Sequence
  Description of Artificial Sequence: Synthetic oligonucleotide
  Target: SCNA; (-) strand; PAM type: YTN; PAM sequence: TTC
agcaccatgtgttttttttt

SEQ ID NO: 44921 - DNA, 20 bp, Artificial Sequence
  Description of Artificial Sequence: Synthetic oligonucleotide
  Target: SCNA; (-) strand; PAM type: YTN; PAM sequence: TTT
cagcaccatgtgtttttttt

SEQ ID NO: 44922 - DNA, 20 bp, Artificial Sequence
  Description of Artificial Sequence: Synthetic oligonucleotide
  Target: SCNA; (-) strand; PAM type: YTN; PAM sequence: TTT
tcagcaccatgtgttttttt

SEQ ID NO: 44923 - DNA, 20 bp, Artificial Sequence
  Description of Artificial Sequence: Synthetic oligonucleotide
  Target: SCNA; (-) strand; PAM type: YTN; PAM sequence: TTT
ttcagcaccatgtgtttttt

SEQ ID NO: 44924 - DNA, 20 bp, Artificial Sequence
  Description of Artificial Sequence: Synthetic oligonucleotide
  Target: SCNA; (-) strand; PAM type: YTN; PAM sequence: TTG
tatttttcagcaccatgtgt

SEQ ID NO: 44925 - DNA, 20 bp, Artificial Sequence
  Description of Artificial Sequence: Synthetic oligonucleotide
  Target: SCNA; (-) strand; PAM type: YTN; PAM sequence: CTG
ttgtatttttcagcaccatg

SEQ ID NO: 44926 - DNA, 20 bp, Artificial Sequence
  Description of Artificial Sequence: Synthetic oligonucleotide
  Target: SCNA; (-) strand; PAM type: YTN; PAM sequence: TTA
gatcataagtatacaaatgc

SEQ ID NO: 44927 - DNA, 20 bp, Artificial Sequence
  Description of Artificial Sequence: Synthetic oligonucleotide
  Target: SCNA; (-) strand; PAM type: YTN; PAM sequence: CTG
acataaattagatcataagt

SEQ ID NO: 44928 - DNA, 20 bp, Artificial Sequence
  Description of Artificial Sequence: Synthetic oligonucleotide
  Target: SCNA; (-) strand; PAM type: YTN; PAM sequence: TTA
atgactgacataaattagat

SEQ ID NO: 44929 - DNA, 20 bp, Artificial Sequence
  Description of Artificial Sequence: Synthetic oligonucleotide
  Target: SCNA; (-) strand; PAM type: YTN; PAM sequence: TTT
aatgactgacataaattaga

SEQ ID NO: 44930 - DNA, 20 bp, Artificial Sequence
  Description of Artificial Sequence: Synthetic oligonucleotide
  Target: SCNA; (-) strand; PAM type: YTN; PAM sequence: TTT
taatgactgacataaattag

SEQ ID NO: 44931 - DNA, 20 bp, Artificial Sequence
  Description of Artificial Sequence: Synthetic oligonucleotide
  Target: SCNA; (-) strand; PAM type: YTN; PAM sequence: CTT
ttaatgactgacataaatta

SEQ ID NO: 44932 - DNA, 20 bp, Artificial Sequence
  Description of Artificial Sequence: Synthetic oligonucleotide
  Target: SCNA; (-) strand; PAM type: YTN; PAM sequence: TTC
ttttaatgactgacataaat

SEQ ID NO: 44933 - DNA, 20 bp, Artificial Sequence
  Description of Artificial Sequence: Synthetic oligonucleotide
  Target: SCNA; (-) strand; PAM type: YTN; PAM sequence: TTT
cttttaatgactgacataaa

SEQ ID NO: 44934 - DNA, 20 bp, Artificial Sequence
  Description of Artificial Sequence: Synthetic oligonucleotide
  Target: SCNA; (-) strand; PAM type: YTN; PAM sequence: TTT
tcttttaatgactgacataa

SEQ ID NO: 44935 - DNA, 20 bp, Artificial Sequence
  Description of Artificial Sequence: Synthetic oligonucleotide
  Target: SCNA; (-) strand; PAM type: YTN; PAM sequence: TTA
ttttcttttaatgactgaca

SEQ ID NO: 44936 - DNA, 20 bp, Artificial Sequence
  Description of Artificial Sequence: Synthetic oligonucleotide
  Target: SCNA; (-) strand; PAM type: YTN; PAM sequence: CTT
attttcttttaatgactgac

SEQ ID NO: 44937 - DNA, 20 bp, Artificial Sequence
  Description of Artificial Sequence: Synthetic oligonucleotide
  Target: SCNA; (-) strand; PAM type: YTN; PAM sequence: CTA
aacaccttattttcttttaa

SEQ ID NO: 44938 - DNA, 20 bp, Artificial Sequence
  Description of Artificial Sequence: Synthetic oligonucleotide
  Target: SCNA; (-) strand; PAM type: YTN; PAM sequence: TTC
taaacaccttattttctttt

SEQ ID NO: 44939 - DNA, 20 bp, Artificial Sequence
  Description of Artificial Sequence: Synthetic oligonucleotide
  Target: SCNA; (-) strand; PAM type: YTN; PAM sequence: TTT
ctaaacaccttattttcttt

SEQ ID NO: 44940 - DNA, 20 bp, Artificial Sequence
  Description of Artificial Sequence: Synthetic oligonucleotide
  Target: SCNA; (-) strand; PAM type: YTN; PAM sequence: TTT
tctaaacaccttattttctt

SEQ ID NO: 44941 - DNA, 20 bp, Artificial Sequence
  Description of Artificial Sequence: Synthetic oligonucleotide
  Target: SCNA; (-) strand; PAM type: YTN; PAM sequence: CTG
tattttctaaacaccttatt

SEQ ID NO: 44942 - DNA, 20 bp, Artificial Sequence
  Description of Artificial Sequence: Synthetic oligonucleotide
  Target: SCNA; (-) strand; PAM type: YTN; PAM sequence: TTA
aatataaccatagacagcac

SEQ ID NO: 44943 - DNA, 20 bp, Artificial Sequence
  Description of Artificial Sequence: Synthetic oligonucleotide
  Target: SCNA; (-) strand; PAM type: YTN; PAM sequence: TTA
agtggtcacaatattaaata

SEQ ID NO: 44944 - DNA, 20 bp, Artificial Sequence
  Description of Artificial Sequence: Synthetic oligonucleotide
  Target: SCNA; (-) strand; PAM type: YTN; PAM sequence: TTG
tattaagtggtcacaatatt

SEQ ID NO: 44945 - DNA, 20 bp, Artificial Sequence
  Description of Artificial Sequence: Synthetic oligonucleotide
  Target: SCNA; (-) strand; PAM type: YTN; PAM sequence: TTT
gtattaagtggtcacaatat

SEQ ID NO: 44946 - DNA, 20 bp, Artificial Sequence
  Description of Artificial Sequence: Synthetic oligonucleotide
  Target: SCNA; (-) strand; PAM type: YTN; PAM sequence: CTT
tgtattaagtggtcacaata

SEQ ID NO: 44947 - DNA, 20 bp, Artificial Sequence
  Description of Artificial Sequence: Synthetic oligonucleotide
  Target: SCNA; (-) strand; PAM type: YTN; PAM sequence: TTG
ctttgtattaagtggtcaca

SEQ ID NO: 44948 - DNA, 20 bp, Artificial Sequence
  Description of Artificial Sequence: Synthetic oligonucleotide
  Target: SCNA; (-) strand; PAM type: YTN; PAM sequence: TTT
gctttgtattaagtggtcac

SEQ ID NO: 44949 - DNA, 20 bp, Artificial Sequence
  Description of Artificial Sequence: Synthetic oligonucleotide
  Target: SCNA; (-) strand; PAM type: YTN; PAM sequence: CTT
tgctttgtattaagtggtca

SEQ ID NO: 44950 - DNA, 20 bp, Artificial Sequence
  Description of Artificial Sequence: Synthetic oligonucleotide
  Target: SCNA; (-) strand; PAM type: YTN; PAM sequence: CTC
catgagagcaagcaagaatg

SEQ ID NO: 44951 - DNA, 20 bp, Artificial Sequence
  Description of Artificial Sequence: Synthetic oligonucleotide
  Target: SCNA; (-) strand; PAM type: YTN; PAM sequence: CTC
tccatgagagcaagcaagaa

SEQ ID NO: 44952 - DNA, 20 bp, Artificial Sequence
  Description of Artificial Sequence: Synthetic oligonucleotide
  Target: SCNA; (-) strand; PAM type: YTN; PAM sequence: TTG
cactctccatgagagcaagc

SEQ ID NO: 44953 - DNA, 20 bp, Artificial Sequence
  Description of Artificial Sequence: Synthetic oligonucleotide
  Target: SCNA; (-) strand; PAM type: YTN; PAM sequence: CTA
aattgcactctccatgagag

SEQ ID NO: 44954 - DNA, 20 bp, Artificial Sequence
  Description of Artificial Sequence: Synthetic oligonucleotide
  Target: SCNA; (-) strand; PAM type: YTN; PAM sequence: TTC
taaattgcactctccatgag

SEQ ID NO: 44955 - DNA, 20 bp, Artificial Sequence
  Description of Artificial Sequence: Synthetic oligonucleotide
  Target: SCNA; (-) strand; PAM type: YTN; PAM sequence: CTC
aattctaaattgcactctcc

SEQ ID NO: 44956 - DNA, 20 bp, Artificial Sequence
  Description of Artificial Sequence: Synthetic oligonucleotide
  Target: SCNA; (-) strand; PAM type: YTN; PAM sequence: CTC
tcaattctaaattgcactct

SEQ ID NO: 44957 - DNA, 20 bp, Artificial Sequence
  Description of Artificial Sequence: Synthetic oligonucleotide
  Target: SCNA; (-) strand; PAM type: YTN; PAM sequence: TTG
agctctcaattctaaattgc

SEQ ID NO: 44958 - DNA, 20 bp, Artificial Sequence
  Description of Artificial Sequence: Synthetic oligonucleotide
  Target: SCNA; (-) strand; PAM type: YTN; PAM sequence: TTA
gaaattgagctctcaattct

SEQ ID NO: 44959 - DNA, 20 bp, Artificial Sequence
  Description of Artificial Sequence: Synthetic oligonucleotide
  Target: SCNA; (-) strand; PAM type: YTN; PAM sequence: CTT
agaaattgagctctcaattc

SEQ ID NO: 44960 - DNA, 20 bp, Artificial Sequence
  Description of Artificial Sequence: Synthetic oligonucleotide
  Target: SCNA; (-) strand; PAM type: YTN; PAM sequence: CTC
cttagaaattgagctctcaa

SEQ ID NO: 44961 - DNA, 20 bp, Artificial Sequence
  Description of Artificial Sequence: Synthetic oligonucleotide
  Target: SCNA; (-) strand; PAM type: YTN; PAM sequence: CTC
aagatagagtacataaaccc

SEQ ID NO: 44962 - DNA, 20 bp, Artificial Sequence
  Description of Artificial Sequence: Synthetic oligonucleotide
  Target: SCNA; (-) strand; PAM type: YTN; PAM sequence: TTG
gtgtgcctcaagatagagta

SEQ ID NO: 44963 - DNA, 20 bp, Artificial Sequence
  Description of Artificial Sequence: Synthetic oligonucleotide
  Target: SCNA; (-) strand; PAM type: YTN; PAM sequence: CTT
ggtgtgcctcaagatagagt

SEQ ID NO: 44964 - DNA, 20 bp, Artificial Sequence
  Description of Artificial Sequence: Synthetic oligonucleotide
  Target: SCNA; (-) strand; PAM type: YTN; PAM sequence: CTC
cttggtgtgcctcaagatag

SEQ ID NO: 44965 - DNA, 20 bp, Artificial Sequence
  Description of Artificial Sequence: Synthetic oligonucleotide
  Target: SCNA; (-) strand; PAM type: YTN; PAM sequence: CTC
aatctccttggtgtgcctca

SEQ ID NO: 44966 - DNA, 20 bp, Artificial Sequence
  Description of Artificial Sequence: Synthetic oligonucleotide
  Target: SCNA; (-) strand; PAM type: YTN; PAM sequence: CTG
gtaaactcaatctccttggt

SEQ ID NO: 44967 - DNA, 20 bp, Artificial Sequence
  Description of Artificial Sequence: Synthetic oligonucleotide
  Target: SCNA; (-) strand; PAM type: YTN; PAM sequence: CTA
aactggtaaactcaatctcc

SEQ ID NO: 44968 - DNA, 20 bp, Artificial Sequence
  Description of Artificial Sequence: Synthetic oligonucleotide
  Target: SCNA; (-) strand; PAM type: YTN; PAM sequence: TTC
taaactggtaaactcaatct

SEQ ID NO: 44969 - DNA, 20 bp, Artificial Sequence
  Description of Artificial Sequence: Synthetic oligonucleotide
  Target: SCNA; (-) strand; PAM type: YTN; PAM sequence: TTT
ctaaactggtaaactcaatc

SEQ ID NO: 44970 - DNA, 20 bp, Artificial Sequence
  Description of Artificial Sequence: Synthetic oligonucleotide
  Target: SCNA; (-) strand; PAM type: YTN; PAM sequence: CTT
tctaaactggtaaactcaat

SEQ ID NO: 44971 - DNA, 20 bp, Artificial Sequence
  Description of Artificial Sequence: Synthetic oligonucleotide
  Target: SCNA; (-) strand; PAM type: YTN; PAM sequence: TTA
tggcagtgctttctaaactg

SEQ ID NO: 44972 - DNA, 20 bp, Artificial Sequence
  Description of Artificial Sequence: Synthetic oligonucleotide
  Target: SCNA; (-) strand; PAM type: YTN; PAM sequence: TTG
aattatggcagtgctttcta

SEQ ID NO: 44973 - DNA, 20 bp, Artificial Sequence
  Description of Artificial Sequence: Synthetic oligonucleotide
  Target: SCNA; (-) strand; PAM type: YTN; PAM sequence: CTT
gaattatggcagtgctttct

SEQ ID NO: 44974 - DNA, 20 bp, Artificial Sequence
  Description of Artificial Sequence: Synthetic oligonucleotide
  Target: SCNA; (-) strand; PAM type: YTN; PAM sequence: CTG
acttgaattatggcagtgct

SEQ ID NO: 44975 - DNA, 20 bp, Artificial Sequence
  Description of Artificial Sequence: Synthetic oligonucleotide
  Target: SCNA; (-) strand; PAM type: YTN; PAM sequence: CTC
cctgacttgaattatggcag

SEQ ID NO: 44976 - DNA, 20 bp, Artificial Sequence
  Description of Artificial Sequence: Synthetic oligonucleotide
  Target: SCNA; (-) strand; PAM type: YTN; PAM sequence: CTC
tccctgacttgaattatggc

SEQ ID NO: 44977 - DNA, 20 bp, Artificial Sequence
  Description of Artificial Sequence: Synthetic oligonucleotide
  Target: SCNA; (-) strand; PAM type: YTN; PAM sequence: TTC
catcagccctctccctgact

SEQ ID NO: 44978 - DNA, 20 bp, Artificial Sequence
  Description of Artificial Sequence: Synthetic oligonucleotide
  Target: SCNA; (-) strand; PAM type: YTN; PAM sequence: CTT
ccatcagccctctccctgac

SEQ ID NO: 44979 - DNA, 20 bp, Artificial Sequence
  Description of Artificial Sequence: Synthetic oligonucleotide
  Target: SCNA; (-) strand; PAM type: YTN; PAM sequence: TTA
aaaatcttccatcagccctc

SEQ ID NO: 44980 - DNA, 20 bp, Artificial Sequence
  Description of Artificial Sequence: Synthetic oligonucleotide
  Target: SCNA; (-) strand; PAM type: YTN; PAM sequence: TTT
aaaaatcttccatcagccct

SEQ ID NO: 44981 - DNA, 20 bp, Artificial Sequence
  Description of Artificial Sequence: Synthetic oligonucleotide
  Target: SCNA; (-) strand; PAM type: YTN; PAM sequence: TTT
taaaaatcttccatcagccc

SEQ ID NO: 44982 - DNA, 20 bp, Artificial Sequence
  Description of Artificial Sequence: Synthetic oligonucleotide
  Target: SCNA; (-) strand; PAM type: YTN; PAM sequence: CTT
ttaaaaatcttccatcagcc

SEQ ID NO: 44983 - DNA, 20 bp, Artificial Sequence
  Description of Artificial Sequence: Synthetic oligonucleotide
  Target: SCNA; (-) strand; PAM type: YTN; PAM sequence: TTA
aaatcttttaaaaatcttcc

SEQ ID NO: 44984 - DNA, 20 bp, Artificial Sequence
  Description of Artificial Sequence: Synthetic oligonucleotide
  Target: SCNA; (-) strand; PAM type: YTN; PAM sequence: TTT
aaaatcttttaaaaatcttc

SEQ ID NO: 44985 - DNA, 20 bp, Artificial Sequence
  Description of Artificial Sequence: Synthetic oligonucleotide
  Target: SCNA; (-) strand; PAM type: YTN; PAM sequence: TTT
taaaatcttttaaaaatctt

SEQ ID NO: 44986 - DNA, 20 bp, Artificial Sequence
  Description of Artificial Sequence: Synthetic oligonucleotide
  Target: SCNA; (-) strand; PAM type: YTN; PAM sequence: CTT
ttaaaatcttttaaaaatct

SEQ ID NO: 44987 - DNA, 20 bp, Artificial Sequence
  Description of Artificial Sequence: Synthetic oligonucleotide
  Target: SCNA; (-) strand; PAM type: YTN; PAM sequence: CTC
atgatcttttaaaatctttt

SEQ ID NO: 44988 - DNA, 20 bp, Artificial Sequence
  Description of Artificial Sequence: Synthetic oligonucleotide
  Target: SCNA; (-) strand; PAM type: YTN; PAM sequence: TTG
ccctcatgatcttttaaaat

SEQ ID NO: 44989 - DNA, 20 bp, Artificial Sequence
  Description of Artificial Sequence: Synthetic oligonucleotide
  Target: SCNA; (-) strand; PAM type: YTN; PAM sequence: CTT
gccctcatgatcttttaaaa

SEQ ID NO: 44990 - DNA, 20 bp, Artificial Sequence
  Description of Artificial Sequence: Synthetic oligonucleotide
  Target: SCNA; (-) strand; PAM type: YTN; PAM sequence: TTA
aaagccagcttgccctcatg

SEQ ID NO: 44991 - DNA, 20 bp, Artificial Sequence
  Description of Artificial Sequence: Synthetic oligonucleotide
  Target: SCNA; (-) strand; PAM type: YTN; PAM sequence: TTG
ttaaaagccagcttgccctc

SEQ ID NO: 44992 - DNA, 20 bp, Artificial Sequence
  Description of Artificial Sequence: Synthetic oligonucleotide
  Target: SCNA; (-) strand; PAM type: YTN; PAM sequence: TTT
gttaaaagccagcttgccct

SEQ ID NO: 44993 - DNA, 20 bp, Artificial Sequence
  Description of Artificial Sequence: Synthetic oligonucleotide
  Target: SCNA; (-) strand; PAM type: YTN; PAM sequence: TTT
tgttaaaagccagcttgccc

SEQ ID NO: 44994 - DNA, 20 bp, Artificial Sequence
  Description of Artificial Sequence: Synthetic oligonucleotide
  Target: SCNA; (-) strand; PAM type: YTN; PAM sequence: TTG
ttttgttaaaagccagcttg

SEQ ID NO: 44995 - DNA, 20 bp, Artificial Sequence
  Description of Artificial Sequence: Synthetic oligonucleotide
  Target: SCNA; (-) strand; PAM type: YTN; PAM sequence: TTT
gttttgttaaaagccagctt

SEQ ID NO: 44996 - DNA, 20 bp, Artificial Sequence
  Description of Artificial Sequence: Synthetic oligonucleotide
  Target: SCNA; (-) strand; PAM type: YTN; PAM sequence: TTT
tgttttgttaaaagccagct

SEQ ID NO: 44997 - DNA, 20 bp, Artificial Sequence
  Description of Artificial Sequence: Synthetic oligonucleotide
  Target: SCNA; (-) strand; PAM type: YTN; PAM sequence: TTC
agtcagccagaagccacatg

SEQ ID NO: 44998 - DNA, 20 bp, Artificial Sequence
  Description of Artificial Sequence: Synthetic oligonucleotide
  Target: SCNA; (-) strand; PAM type: YTN; PAM sequence: TTA
attcagtcagccagaagcca

SEQ ID NO: 44999 - DNA, 20 bp, Artificial Sequence
  Description of Artificial Sequence: Synthetic oligonucleotide
  Target: SCNA; (-) strand; PAM type: YTN; PAM sequence: TTA
ttaattcagtcagccagaag

SEQ ID NO: 45000 - DNA, 20 bp, Artificial Sequence
  Description of Artificial Sequence: Synthetic oligonucleotide
  Target: SCNA; (-) strand; PAM type: YTN; PAM sequence: CTT
attaattcagtcagccagaa

SEQ ID NO: 45001 - DNA, 20 bp, Artificial Sequence
  Description of Artificial Sequence: Synthetic oligonucleotide
  Target: SCNA; (-) strand; PAM type: YTN; PAM sequence: CTG
ggccttattaattcagtcag

SEQ ID NO: 45002 - DNA, 20 bp, Artificial Sequence
  Description of Artificial Sequence: Synthetic oligonucleotide
  Target: SCNA; (-) strand; PAM type: YTN; PAM sequence: CTC
tgggccttattaattcagtc

SEQ ID NO: 45003 - DNA, 20 bp, Artificial Sequence
  Description of Artificial Sequence: Synthetic oligonucleotide
  Target: SCNA; (-) strand; PAM type: YTN; PAM sequence: TTC
agatcagtctctgggcctta

SEQ ID NO: 45004 - DNA, 20 bp, Artificial Sequence
  Description of Artificial Sequence: Synthetic oligonucleotide
  Target: SCNA; (-) strand; PAM type: YTN; PAM sequence: CTT
cagatcagtctctgggcctt

SEQ ID NO: 45005 - DNA, 20 bp, Artificial Sequence
  Description of Artificial Sequence: Synthetic oligonucleotide
  Target: SCNA; (-) strand; PAM type: YTN; PAM sequence: TTG
ccttcagatcagtctctggg

SEQ ID NO: 45006 - DNA, 20 bp, Artificial Sequence
  Description of Artificial Sequence: Synthetic oligonucleotide
  Target: SCNA; (-) strand; PAM type: YTN; PAM sequence: TTT
gccttcagatcagtctctgg

SEQ ID NO: 45007 - DNA, 20 bp, Artificial Sequence
  Description of Artificial Sequence: Synthetic oligonucleotide
  Target: SCNA; (-) strand; PAM type: YTN; PAM sequence: TTT
tgccttcagatcagtctctg

SEQ ID NO: 45008 - DNA, 20 bp, Artificial Sequence
  Description of Artificial Sequence: Synthetic oligonucleotide
  Target: SCNA; (-) strand; PAM type: YTN; PAM sequence: CTT
ttgccttcagatcagtctct

SEQ ID NO: 45009 - DNA, 20 bp, Artificial Sequence
  Description of Artificial Sequence: Synthetic oligonucleotide
  Target: SCNA; (-) strand; PAM type: YTN; PAM sequence: TTG
caataaaaaataaaggcttt

SEQ ID NO: 45010 - DNA, 20 bp, Artificial Sequence
  Description of Artificial Sequence: Synthetic oligonucleotide
  Target: SCNA; (-) strand; PAM type: YTN; PAM sequence: CTC
cattgcaataaaaaataaag

SEQ ID NO: 45011 - DNA, 20 bp, Artificial Sequence
  Description of Artificial Sequence: Synthetic oligonucleotide
  Target: SCNA; (-) strand; PAM type: YTN; PAM sequence: TTC
tccattgcaataaaaaataa

SEQ ID NO: 45012 - DNA, 20 bp, Artificial Sequence
  Description of Artificial Sequence: Synthetic oligonucleotide
  Target: SCNA; (-) strand; PAM type: YTN; PAM sequence: TTT
ctccattgcaataaaaaata

SEQ ID NO: 45013 - DNA, 20 bp, Artificial Sequence
  Description of Artificial Sequence: Synthetic oligonucleotide
  Target: SCNA; (-) strand; PAM type: YTN; PAM sequence: TTT
tctccattgcaataaaaaat

SEQ ID NO: 45014 - DNA, 20 bp, Artificial Sequence
  Description of Artificial Sequence: Synthetic oligonucleotide
  Target: SCNA; (-) strand; PAM type: YTN; PAM sequence: TTT
ttctccattgcaataaaaaa

SEQ ID NO: 45015 - DNA, 20 bp, Artificial Sequence
  Description of Artificial Sequence: Synthetic oligonucleotide
  Target: SCNA; (-) strand; PAM type: YTN; PAM sequence: TTC
agtttttctccattgcaata

SEQ ID NO: 45016 - DNA, 20 bp, Artificial Sequence
  Description of Artificial Sequence: Synthetic oligonucleotide
  Target: SCNA; (-) strand; PAM type: YTN; PAM sequence: CTG
atagtcaaataatgttcagt

SEQ ID NO: 45017 - DNA, 20 bp, Artificial Sequence
  Description of Artificial Sequence: Synthetic oligonucleotide
  Target: SCNA; (-) strand; PAM type: YTN; PAM sequence: TTC
acaactgatagtcaaataat

SEQ ID NO: 45018 - DNA, 20 bp, Artificial Sequence
  Description of Artificial Sequence: Synthetic oligonucleotide
  Target: SCNA; (-) strand; PAM type: YTN; PAM sequence: CTT
cacaactgatagtcaaataa

SEQ ID NO: 45019 - DNA, 20 bp, Artificial Sequence
  Description of Artificial Sequence: Synthetic oligonucleotide
  Target: SCNA; (-) strand; PAM type: YTN; PAM sequence: CTA
aacttcacaactgatagtca

SEQ ID NO: 45020 - DNA, 20 bp, Artificial Sequence
  Description of Artificial Sequence: Synthetic oligonucleotide
  Target: SCNA; (-) strand; PAM type: YTN; PAM sequence: TTA
ctaaacttcacaactgatag

SEQ ID NO: 45021 - DNA, 20 bp, Artificial Sequence
  Description of Artificial Sequence: Synthetic oligonucleotide
  Target: SCNA; (-) strand; PAM type: YTN; PAM sequence: TTT
actaaacttcacaactgata

SEQ ID NO: 45022 - DNA, 20 bp, Artificial Sequence
  Description of Artificial Sequence: Synthetic oligonucleotide
  Target: SCNA; (-) strand; PAM type: YTN; PAM sequence: TTT
tactaaacttcacaactgat

SEQ ID NO: 45023 - DNA, 20 bp, Artificial Sequence
  Description of Artificial Sequence: Synthetic oligonucleotide
  Target: SCNA; (-) strand; PAM type: YTN; PAM sequence: TTT
ttactaaacttcacaactga

SEQ ID NO: 45024 - DNA, 20 bp, Artificial Sequence
  Description of Artificial Sequence: Synthetic oligonucleotide
  Target: SCNA; (-) strand; PAM type: YTN; PAM sequence: CTT
tttactaaacttcacaactg

SEQ ID NO: 45025 - DNA, 20 bp, Artificial Sequence
  Description of Artificial Sequence: Synthetic oligonucleotide
  Target: SCNA; (-) strand; PAM type: YTN; PAM sequence: TTA
gtgaaaatctttttactaaa

SEQ ID NO: 45026 - DNA, 20 bp, Artificial Sequence
  Description of Artificial Sequence: Synthetic oligonucleotide
  Target: SCNA; (-) strand; PAM type: YTN; PAM sequence: TTA
aaaccacccattagtgaaaa

SEQ ID NO: 45027 - DNA, 20 bp, Artificial Sequence
  Description of Artificial Sequence: Synthetic oligonucleotide
  Target: SCNA; (-) strand; PAM type: YTN; PAM sequence: TTC
ataaatattaaaaccaccca

SEQ ID NO: 45028 - DNA, 20 bp, Artificial Sequence
  Description of Artificial Sequence: Synthetic oligonucleotide
  Target: SCNA; (-) strand; PAM type: YTN; PAM sequence: CTG
aaccatcacattcataaata

SEQ ID NO: 45029 - DNA, 20 bp, Artificial Sequence
  Description of Artificial Sequence: Synthetic oligonucleotide
  Target: SCNA; (-) strand; PAM type: YTN; PAM sequence: TTG
ctgaaccatcacattcataa

SEQ ID NO: 45030 - DNA, 20 bp, Artificial Sequence
  Description of Artificial Sequence: Synthetic oligonucleotide
  Target: SCNA; (-) strand; PAM type: YTN; PAM sequence: TTT
gctgaaccatcacattcata

SEQ ID NO: 45031 - DNA, 20 bp, Artificial Sequence
  Description of Artificial Sequence: Synthetic oligonucleotide
  Target: SCNA; (-) strand; PAM type: YTN; PAM sequence: TTG
gagaaaatttgctgaaccat

SEQ ID NO: 45032 - DNA, 20 bp, Artificial Sequence
  Description of Artificial Sequence: Synthetic oligonucleotide
  Target: SCNA; (-) strand; PAM type: YTN; PAM sequence: TTG
caaaacattggagaaaattt

SEQ ID NO: 45033 - DNA, 20 bp, Artificial Sequence
  Description of Artificial Sequence: Synthetic oligonucleotide
  Target: SCNA; (-) strand; PAM type: YTN; PAM sequence: CTT
gcaaaacattggagaaaatt

SEQ ID NO: 45034 - DNA, 20 bp, Artificial Sequence
  Description of Artificial Sequence: Synthetic oligonucleotide
  Target: SCNA; (-) strand; PAM type: YTN; PAM sequence: TTA
gtggtcttgcaaaacattgg

SEQ ID NO: 45035 - DNA, 20 bp, Artificial Sequence
  Description of Artificial Sequence: Synthetic oligonucleotide
  Target: SCNA; (-) strand; PAM type: YTN; PAM sequence: TTA
attagtggtcttgcaaaaca

SEQ ID NO: 45036 - DNA, 20 bp, Artificial Sequence
  Description of Artificial Sequence: Synthetic oligonucleotide
  Target: SCNA; (-) strand; PAM type: YTN; PAM sequence: TTA
ttaattagtggtcttgcaaa

SEQ ID NO: 45037 - DNA, 20 bp, Artificial Sequence
  Description of Artificial Sequence: Synthetic oligonucleotide
  Target: SCNA; (-) strand; PAM type: YTN; PAM sequence: TTG
taaagatgattattaattag

SEQ ID NO: 45038 - DNA, 20 bp, Artificial Sequence
  Description of Artificial Sequence: Synthetic oligonucleotide
  Target: SCNA; (-) strand; PAM type: YTN; PAM sequence: TTT
gtaaagatgattattaatta

SEQ ID NO: 45039 - DNA, 20 bp, Artificial Sequence
  Description of Artificial Sequence: Synthetic oligonucleotide
  Target: SCNA; (-) strand; PAM type: YTN; PAM sequence: TTC
catttgtaaagatgattatt

SEQ ID NO: 45040 - DNA, 20 bp, Artificial Sequence
  Description of Artificial Sequence: Synthetic oligonucleotide
  Target: SCNA; (-) strand; PAM type: YTN; PAM sequence: TTA
catgttccatttgtaaagat

SEQ ID NO: 45041 - DNA, 20 bp, Artificial Sequence
  Description of Artificial Sequence: Synthetic oligonucleotide
  Target: SCNA; (-) strand; PAM type: YTN; PAM sequence: TTG
gcaaagaaaaaatagtagca

SEQ ID NO: 45042 - DNA, 20 bp, Artificial Sequence
  Description of Artificial Sequence: Synthetic oligonucleotide
  Target: SCNA; (-) strand; PAM type: YTN; PAM sequence: TTA
agcattggcaaagaaaaaat

SEQ ID NO: 45043 - DNA, 20 bp, Artificial Sequence
  Description of Artificial Sequence: Synthetic oligonucleotide
  Target: SCNA; (-) strand; PAM type: YTN; PAM sequence: TTC
aaaataagtattaagcattg

SEQ ID NO: 45044 - DNA, 20 bp, Artificial Sequence
  Description of Artificial Sequence: Synthetic oligonucleotide
  Target: SCNA; (-) strand; PAM type: YTN; PAM sequence: TTA
gaaaaaaaataaaacgtatt

SEQ ID NO: 45045 - DNA, 20 bp, Artificial Sequence
  Description of Artificial Sequence: Synthetic oligonucleotide
  Target: SCNA; (-) strand; PAM type: YTN; PAM sequence: TTT
agaaaaaaaataaaacgtat

SEQ ID NO: 45046 - DNA, 20 bp, Artificial Sequence
  Description of Artificial Sequence: Synthetic oligonucleotide
  Target: SCNA; (-) strand; PAM type: YTN; PAM sequence: CTC
aggtagaaataaatagagaa

SEQ ID NO: 45047 - DNA, 20 bp, Artificial Sequence
  Description of Artificial Sequence: Synthetic oligonucleotide
  Target: SCNA; (-) strand; PAM type: YTN; PAM sequence: TTA
agaaatgctcaggtagaaat

SEQ ID NO: 45048 - DNA, 20 bp, Artificial Sequence
  Description of Artificial Sequence: Synthetic oligonucleotide
  Target: SCNA; (-) strand; PAM type: YTN; PAM sequence: CTG
aataaaaaaattaagaaatg

SEQ ID NO: 45049 - DNA, 20 bp, Artificial Sequence
  Description of Artificial Sequence: Synthetic oligonucleotide
  Target: SCNA; (-) strand; PAM type: YTN; PAM sequence: CTA
cagtgagaataacaggactg

SEQ ID NO: 45050 - DNA, 20 bp, Artificial Sequence
  Description of Artificial Sequence: Synthetic oligonucleotide
  Target: SCNA; (-) strand; PAM type: YTN; PAM sequence: TTA
aaaatcctacagtgagaata

SEQ ID NO: 45051 - DNA, 20 bp, Artificial Sequence
  Description of Artificial Sequence: Synthetic oligonucleotide
  Target: SCNA; (-) strand; PAM type: YTN; PAM sequence: TTT
aaaaatcctacagtgagaat

SEQ ID NO: 45052 - DNA, 20 bp, Artificial Sequence
  Description of Artificial Sequence: Synthetic oligonucleotide
  Target: SCNA; (-) strand; PAM type: YTN; PAM sequence: TTT
taaaaatcctacagtgagaa

SEQ ID NO: 45053 - DNA, 20 bp, Artificial Sequence
  Description of Artificial Sequence: Synthetic oligonucleotide
  Target: SCNA; (-) strand; PAM type: YTN; PAM sequence: CTT
ttaaaaatcctacagtgaga

SEQ ID NO: 45054 - DNA, 20 bp, Artificial Sequence
  Description of Artificial Sequence: Synthetic oligonucleotide
  Target: SCNA; (-) strand; PAM type: YTN; PAM sequence: TTA
atataatataccagctttta

SEQ ID NO: 45055 - DNA, 20 bp, Artificial Sequence
  Description of Artificial Sequence: Synthetic oligonucleotide
  Target: SCNA; (-) strand; PAM type: YTN; PAM sequence: TTT
aatataatataccagctttt

SEQ ID NO: 45056 - DNA, 20 bp, Artificial Sequence
  Description of Artificial Sequence: Synthetic oligonucleotide
  Target: SCNA; (-) strand; PAM type: YTN; PAM sequence: TTT
taatataatataccagcttt

SEQ ID NO: 45057 - DNA, 20 bp, Artificial Sequence
  Description of Artificial Sequence: Synthetic oligonucleotide
  Target: SCNA; (-) strand; PAM type: YTN; PAM sequence: TTG
aaggattttaatataatata

SEQ ID NO: 45058 - DNA, 20 bp, Artificial Sequence
  Description of Artificial Sequence: Synthetic oligonucleotide
  Target: SCNA; (-) strand; PAM type: YTN; PAM sequence: TTC
acagttgaaggattttaata

SEQ ID NO: 45059 - DNA, 20 bp, Artificial Sequence
  Description of Artificial Sequence: Synthetic oligonucleotide
  Target: SCNA; (-) strand; PAM type: YTN; PAM sequence: CTG
aattcacagttgaaggattt

SEQ ID NO: 45060 - DNA, 20 bp, Artificial Sequence
  Description of Artificial Sequence: Synthetic oligonucleotide
  Target: SCNA; (-) strand; PAM type: YTN; PAM sequence: TTG
ctgaattcacagttgaagga

SEQ ID NO: 45061 - DNA, 20 bp, Artificial Sequence
  Description of Artificial Sequence: Synthetic oligonucleotide
  Target: SCNA; (-) strand; PAM type: YTN; PAM sequence: CTC
aaaacattgctgaattcaca

SEQ ID NO: 45062 - DNA, 20 bp, Artificial Sequence
  Description of Artificial Sequence: Synthetic oligonucleotide
  Target: SCNA; (-) strand; PAM type: YTN; PAM sequence: CTG
gaactcaaaacattgctgaa

SEQ ID NO: 45063 - DNA, 20 bp, Artificial Sequence
  Description of Artificial Sequence: Synthetic oligonucleotide
  Target: SCNA; (-) strand; PAM type: YTN; PAM sequence: CTA
atgccagatgaatccctgga

SEQ ID NO: 45064 - DNA, 20 bp, Artificial Sequence
  Description of Artificial Sequence: Synthetic oligonucleotide
  Target: SCNA; (-) strand; PAM type: YTN; PAM sequence: TTG
acaaggtcagcctaatgcca

SEQ ID NO: 45065 - DNA, 20 bp, Artificial Sequence
  Description of Artificial Sequence: Synthetic oligonucleotide
  Target: SCNA; (-) strand; PAM type: YTN; PAM sequence: CTT
gacaaggtcagcctaatgcc

SEQ ID NO: 45066 - DNA, 20 bp, Artificial Sequence
  Description of Artificial Sequence: Synthetic oligonucleotide
  Target: SCNA; (-) strand; PAM type: YTN; PAM sequence: TTA
tgcttgacaaggtcagccta

SEQ ID NO: 45067 - DNA, 20 bp, Artificial Sequence
  Description of Artificial Sequence: Synthetic oligonucleotide
  Target: SCNA; (-) strand; PAM type: YTN; PAM sequence: TTT
atgcttgacaaggtcagcct

SEQ ID NO: 45068 - DNA, 20 bp, Artificial Sequence
  Description of Artificial Sequence: Synthetic oligonucleotide
  Target: SCNA; (-) strand; PAM type: YTN; PAM sequence: TTG
atgtttatgcttgacaaggt

SEQ ID NO: 45069 - DNA, 20 bp, Artificial Sequence
  Description of Artificial Sequence: Synthetic oligonucleotide
  Target: SCNA; (-) strand; PAM type: YTN; PAM sequence: TTA
atgttgatgtttatgcttga

SEQ ID NO: 45070 - DNA, 20 bp, Artificial Sequence
  Description of Artificial Sequence: Synthetic oligonucleotide
  Target: SCNA; (-) strand; PAM type: YTN; PAM sequence: TTT
aatgttgatgtttatgcttg

SEQ ID NO: 45071 - DNA, 20 bp, Artificial Sequence
  Description of Artificial Sequence: Synthetic oligonucleotide
  Target: SCNA; (-) strand; PAM type: YTN; PAM sequence: CTT
taatgttgatgtttatgctt

SEQ ID NO: 45072 - DNA, 20 bp, Artificial Sequence
  Description of Artificial Sequence: Synthetic oligonucleotide
  Target: SCNA; (-) strand; PAM type: YTN; PAM sequence: TTC
tttaatgttgatgtttatgc

SEQ ID NO: 45073 - DNA, 20 bp, Artificial Sequence
  Description of Artificial Sequence: Synthetic oligonucleotide
  Target: SCNA; (-) strand; PAM type: YTN; PAM sequence: TTT
ctttaatgttgatgtttatg

SEQ ID NO: 45074 - DNA, 20 bp, Artificial Sequence
  Description of Artificial Sequence: Synthetic oligonucleotide
  Target: SCNA; (-) strand; PAM type: YTN; PAM sequence: TTT
tctttaatgttgatgtttat

SEQ ID NO: 45075 - DNA, 20 bp, Artificial Sequence
  Description of Artificial Sequence: Synthetic oligonucleotide
  Target: SCNA; (-) strand; PAM type: YTN; PAM sequence: TTA
aatattttctttaatgttga

SEQ ID NO: 45076 - DNA, 20 bp, Artificial Sequence
  Description of Artificial Sequence: Synthetic oligonucleotide
  Target: SCNA; (-) strand; PAM type: YTN; PAM sequence: CTT
aaatattttctttaatgttg

SEQ ID NO: 45077 - DNA, 20 bp, Artificial Sequence
  Description of Artificial Sequence: Synthetic oligonucleotide
  Target: SCNA; (-) strand; PAM type: YTN; PAM sequence: TTC
ttaaatattttctttaatgt

SEQ ID NO: 45078 - DNA, 20 bp, Artificial Sequence
  Description of Artificial Sequence: Synthetic oligonucleotide
  Target: SCNA; (-) strand; PAM type: YTN; PAM sequence: TTT
cttaaatattttctttaatg

SEQ ID NO: 45079 - DNA, 20 bp, Artificial Sequence
  Description of Artificial Sequence: Synthetic oligonucleotide
  Target: SCNA; (-) strand; PAM type: YTN; PAM sequence: TTC
atttcttaaatattttcttt

SEQ ID NO: 45080 - DNA, 20 bp, Artificial Sequence
  Description of Artificial Sequence: Synthetic oligonucleotide
  Target: SCNA; (-) strand; PAM type: YTN; PAM sequence: TTT
catttcttaaatattttctt

SEQ ID NO: 45081 - DNA, 20 bp, Artificial Sequence
  Description of Artificial Sequence: Synthetic oligonucleotide
  Target: SCNA; (-) strand; PAM type: YTN; PAM sequence: CTT
tcatttcttaaatattttct

SEQ ID NO: 45082 - DNA, 20 bp, Artificial Sequence
  Description of Artificial Sequence: Synthetic oligonucleotide
  Target: SCNA; (-) strand; PAM type: YTN; PAM sequence: TTC
aggcctttcatttcttaaat

SEQ ID NO: 45083 - DNA, 20 bp, Artificial Sequence
  Description of Artificial Sequence: Synthetic oligonucleotide
  Target: SCNA; (-) strand; PAM type: YTN; PAM sequence: TTG
attcaggcctttcatttctt

SEQ ID NO: 45084 - DNA, 20 bp, Artificial Sequence
  Description of Artificial Sequence: Synthetic oligonucleotide
  Target: SCNA; (-) strand; PAM type: YTN; PAM sequence: TTT
gattcaggcctttcatttct

SEQ ID NO: 45085 - DNA, 20 bp, Artificial Sequence
  Description of Artificial Sequence: Synthetic oligonucleotide
  Target: SCNA; (-) strand; PAM type: YTN; PAM sequence: TTT
tgattcaggcctttcatttc

SEQ ID NO: 45086 - DNA, 20 bp, Artificial Sequence
  Description of Artificial Sequence: Synthetic oligonucleotide
  Target: SCNA; (-) strand; PAM type: YTN; PAM sequence: TTA
ttttgattcaggcctttcat

SEQ ID NO: 45087 - DNA, 20 bp, Artificial Sequence
  Description of Artificial Sequence: Synthetic oligonucleotide
  Target: SCNA; (-) strand; PAM type: YTN; PAM sequence: CTT
attttgattcaggcctttca

SEQ ID NO: 45088 - DNA, 20 bp, Artificial Sequence
  Description of Artificial Sequence: Synthetic oligonucleotide
  Target: SCNA; (-) strand; PAM type: YTN; PAM sequence: CTC
ttattttgattcaggccttt

SEQ ID NO: 45089 - DNA, 20 bp, Artificial Sequence
  Description of Artificial Sequence: Synthetic oligonucleotide
  Target: SCNA; (-) strand; PAM type: YTN; PAM sequence: TTG
acctcttattttgattcagg

SEQ ID NO: 45090 - DNA, 20 bp, Artificial Sequence
  Description of Artificial Sequence: Synthetic oligonucleotide
  Target: SCNA; (-) strand; PAM type: YTN; PAM sequence: TTT
gacctcttattttgattcag

SEQ ID NO: 45091 - DNA, 20 bp, Artificial Sequence
  Description of Artificial Sequence: Synthetic oligonucleotide
  Target: SCNA; (-) strand; PAM type: YTN; PAM sequence: CTG
gaaaatttgacctcttattt

SEQ ID NO: 45092 - DNA, 20 bp, Artificial Sequence
  Description of Artificial Sequence: Synthetic oligonucleotide
  Target: SCNA; (-) strand; PAM type: YTN; PAM sequence: TTC
aagacacaaaacaccctgga

SEQ ID NO: 45093 - DNA, 20 bp, Artificial Sequence
  Description of Artificial Sequence: Synthetic oligonucleotide
  Target: SCNA; (-) strand; PAM type: YTN; PAM sequence: TTT
caagacacaaaacaccctgg

SEQ ID NO: 45094 - DNA, 20 bp, Artificial Sequence
  Description of Artificial Sequence: Synthetic oligonucleotide
  Target: SCNA; (-) strand; PAM type: YTN; PAM sequence: TTT
tcaagacacaaaacaccctg

SEQ ID NO: 45095 - DNA, 20 bp, Artificial Sequence
  Description of Artificial Sequence: Synthetic oligonucleotide
  Target: SCNA; (-) strand; PAM type: YTN; PAM sequence: TTA
cagcagaaagattttcaaga

SEQ ID NO: 45096 - DNA, 20 bp, Artificial Sequence
  Description of Artificial Sequence: Synthetic oligonucleotide
  Target: SCNA; (-) strand; PAM type: YTN; PAM sequence: TTA
ggtaattacagcagaaagat

SEQ ID NO: 45097 - DNA, 20 bp, Artificial Sequence
  Description of Artificial Sequence: Synthetic oligonucleotide
  Target: SCNA; (-) strand; PAM type: YTN; PAM sequence: TTT
aggtaattacagcagaaaga

SEQ ID NO: 45098 - DNA, 20 bp, Artificial Sequence
  Description of Artificial Sequence: Synthetic oligonucleotide
  Target: SCNA; (-) strand; PAM type: YTN; PAM sequence: CTT
taggtaattacagcagaaag

SEQ ID NO: 45099 - DNA, 20 bp, Artificial Sequence
  Description of Artificial Sequence: Synthetic oligonucleotide
  Target: SCNA; (-) strand; PAM type: YTN; PAM sequence: CTA
accacagtctttaggtaatt

SEQ ID NO: 45100 - DNA, 20 bp, Artificial Sequence
  Description of Artificial Sequence: Synthetic oligonucleotide
  Target: SCNA; (-) strand; PAM type: YTN; PAM sequence: TTA
tctaaccacagtctttaggt

SEQ ID NO: 45101 - DNA, 20 bp, Artificial Sequence
  Description of Artificial Sequence: Synthetic oligonucleotide
  Target: SCNA; (-) strand; PAM type: YTN; PAM sequence: CTC
aataattatctaaccacagt

SEQ ID NO: 45102 - DNA, 20 bp, Artificial Sequence
  Description of Artificial Sequence: Synthetic oligonucleotide
  Target: SCNA; (-) strand; PAM type: YTN; PAM sequence: TTG
caaaagtccctcaataatta

SEQ ID NO: 45103 - DNA, 20 bp, Artificial Sequence
  Description of Artificial Sequence: Synthetic oligonucleotide
  Target: SCNA; (-) strand; PAM type: YTN; PAM sequence: CTA
tatagagaaaagggacaatt

SEQ ID NO: 45104 - DNA, 20 bp, Artificial Sequence
  Description of Artificial Sequence: Synthetic oligonucleotide
  Target: SCNA; (-) strand; PAM type: YTN; PAM sequence: TTA
atgtggtgatctatatagag

SEQ ID NO: 45105 - DNA, 20 bp, Artificial Sequence
  Description of Artificial Sequence: Synthetic oligonucleotide
  Target: SCNA; (-) strand; PAM type: YTN; PAM sequence: TTA
attaatgtggtgatctatat

SEQ ID NO: 45106 - DNA, 20 bp, Artificial Sequence
  Description of Artificial Sequence: Synthetic oligonucleotide
  Target: SCNA; (-) strand; PAM type: YTN; PAM sequence: TTT
aattaatgtggtgatctata

SEQ ID NO: 45107 - DNA, 20 bp, Artificial Sequence
  Description of Artificial Sequence: Synthetic oligonucleotide
  Target: SCNA; (-) strand; PAM type: YTN; PAM sequence: CTC
gtttaattaatgtggtgatc

SEQ ID NO: 45108 - DNA, 20 bp, Artificial Sequence
  Description of Artificial Sequence: Synthetic oligonucleotide
  Target: SCNA; (-) strand; PAM type: YTN; PAM sequence: CTC
tcgtttaattaatgtggtga

SEQ ID NO: 45109 - DNA, 20 bp, Artificial Sequence
  Description of Artificial Sequence: Synthetic oligonucleotide
  Target: SCNA; (-) strand; PAM type: YTN; PAM sequence: TTC
ccagtgagactctcgtttaa

SEQ ID NO: 45110 - DNA, 20 bp, Artificial Sequence
  Description of Artificial Sequence: Synthetic oligonucleotide
  Target: SCNA; (-) strand; PAM type: YTN; PAM sequence: CTG
ttcccagtgagactctcgtt

SEQ ID NO: 45111 - DNA, 20 bp, Artificial Sequence
  Description of Artificial Sequence: Synthetic oligonucleotide
  Target: SCNA; (-) strand; PAM type: YTN; PAM sequence: TTA
aagatgcagaacagcaacct

SEQ ID NO: 45112 - DNA, 20 bp, Artificial Sequence
  Description of Artificial Sequence: Synthetic oligonucleotide
  Target: SCNA; (-) strand; PAM type: YTN; PAM sequence: CTT
aaagatgcagaacagcaacc

SEQ ID NO: 45113 - DNA, 20 bp, Artificial Sequence
  Description of Artificial Sequence: Synthetic oligonucleotide
  Target: SCNA; (-) strand; PAM type: YTN; PAM sequence: CTA
aaaatacttaaagatgcaga

SEQ ID NO: 45114 - DNA, 20 bp, Artificial Sequence
  Description of Artificial Sequence: Synthetic oligonucleotide
  Target: SCNA; (-) strand; PAM type: YTN; PAM sequence: TTG
aaaataaagtactaaaaata

SEQ ID NO: 45115 - DNA, 20 bp, Artificial Sequence
  Description of Artificial Sequence: Synthetic oligonucleotide
  Target: SCNA; (-) strand; PAM type: YTN; PAM sequence: TTT
gaaaataaagtactaaaaat

SEQ ID NO: 45116 - DNA, 20 bp, Artificial Sequence
  Description of Artificial Sequence: Synthetic oligonucleotide
  Target: SCNA; (-) strand; PAM type: YTN; PAM sequence: TTT
tgaaaataaagtactaaaaa

SEQ ID NO: 45117 - DNA, 20 bp, Artificial Sequence
  Description of Artificial Sequence: Synthetic oligonucleotide
  Target: SCNA; (-) strand; PAM type: YTN; PAM sequence: CTT
ttgaaaataaagtactaaaa

SEQ ID NO: 45118 - DNA, 20 bp, Artificial Sequence
  Description of Artificial Sequence: Synthetic oligonucleotide
  Target: SCNA; (-) strand; PAM type: YTN; PAM sequence: CTC
ttttgaaaataaagtactaa

SEQ ID NO: 45119 - DNA, 20 bp, Artificial Sequence
  Description of Artificial Sequence: Synthetic oligonucleotide
  Target: SCNA; (-) strand; PAM type: YTN; PAM sequence: TTC
tcttttgaaaataaagtact

SEQ ID NO: 45120 - DNA, 20 bp, Artificial Sequence
  Description of Artificial Sequence: Synthetic oligonucleotide
  Target: SCNA; (-) strand; PAM type: YTN; PAM sequence: TTT
ctcttttgaaaataaagtac

SEQ ID NO: 45121 - DNA, 20 bp, Artificial Sequence
  Description of Artificial Sequence: Synthetic oligonucleotide
  Target: SCNA; (-) strand; PAM type: YTN; PAM sequence: TTT
tctcttttgaaaataaagta

SEQ ID NO: 45122 - DNA, 20 bp, Artificial Sequence
  Description of Artificial Sequence: Synthetic oligonucleotide
  Target: SCNA; (-) strand; PAM type: YTN; PAM sequence: TTT
ttctcttttgaaaataaagt

SEQ ID NO: 45123 - DNA, 20 bp, Artificial Sequence
  Description of Artificial Sequence: Synthetic oligonucleotide
  Target: SCNA; (-) strand; PAM type: YTN; PAM sequence: CTT
tttctcttttgaaaataaag

SEQ ID NO: 45124 - DNA, 20 bp, Artificial Sequence
  Description of Artificial Sequence: Synthetic oligonucleotide
  Target: SCNA; (-) strand; PAM type: YTN; PAM sequence: TTC
tttttctcttttgaaaataa

SEQ ID NO: 45125 - DNA, 20 bp, Artificial Sequence
  Description of Artificial Sequence: Synthetic oligonucleotide
  Target: SCNA; (-) strand; PAM type: YTN; PAM sequence: TTA
gtggttctttttctcttttg

SEQ ID NO: 45126 - DNA, 20 bp, Artificial Sequence
  Description of Artificial Sequence: Synthetic oligonucleotide
  Target: SCNA; (-) strand; PAM type: YTN; PAM sequence: CTT
agtggttctttttctctttt

SEQ ID NO: 45127 - DNA, 20 bp, Artificial Sequence
  Description of Artificial Sequence: Synthetic oligonucleotide
  Target: SCNA; (-) strand; PAM type: YTN; PAM sequence: TTC
ttagtggttctttttctctt

SEQ ID NO: 45128 - DNA, 20 bp, Artificial Sequence
  Description of Artificial Sequence: Synthetic oligonucleotide
  Target: SCNA; (-) strand; PAM type: YTN; PAM sequence: CTT
cttagtggttctttttctct

SEQ ID NO: 45129 - DNA, 20 bp, Artificial Sequence
  Description of Artificial Sequence: Synthetic oligonucleotide
  Target: SCNA; (-) strand; PAM type: YTN; PAM sequence: TTC
ttcttagtggttctttttct

SEQ ID NO: 45130 - DNA, 20 bp, Artificial Sequence
  Description of Artificial Sequence: Synthetic oligonucleotide
  Target: SCNA; (-) strand; PAM type: YTN; PAM sequence: CTT
cttcttagtggttctttttc

SEQ ID NO: 45131 - DNA, 20 bp, Artificial Sequence
  Description of Artificial Sequence: Synthetic oligonucleotide
  Target: SCNA; (-) strand; PAM type: YTN; PAM sequence: CTG
agaagcaatcttcttcttag

SEQ ID NO: 45132 - DNA, 20 bp, Artificial Sequence
  Description of Artificial Sequence: Synthetic oligonucleotide
  Target: SCNA; (-) strand; PAM type: YTN; PAM sequence: TTG
gctgagaagcaatcttcttc

SEQ ID NO: 45133 - DNA, 20 bp, Artificial Sequence
  Description of Artificial Sequence: Synthetic oligonucleotide
  Target: SCNA; (-) strand; PAM type: YTN; PAM sequence: TTT
ggctgagaagcaatcttctt

SEQ ID NO: 45134 - DNA, 20 bp, Artificial Sequence
  Description of Artificial Sequence: Synthetic oligonucleotide
  Target: SCNA; (-) strand; PAM type: YTN; PAM sequence: CTG
tatatcagaaaatttggctg

SEQ ID NO: 45135 - DNA, 20 bp, Artificial Sequence
  Description of Artificial Sequence: Synthetic oligonucleotide
  Target: SCNA; (-) strand; PAM type: YTN; PAM sequence: TTG
agaatatctgtatatcagaa

SEQ ID NO: 45136 - DNA, 20 bp, Artificial Sequence
  Description of Artificial Sequence: Synthetic oligonucleotide
  Target: SCNA; (-) strand; PAM type: YTN; PAM sequence: TTT
gagaatatctgtatatcaga

SEQ ID NO: 45137 - DNA, 20 bp, Artificial Sequence
  Description of Artificial Sequence: Synthetic oligonucleotide
  Target: SCNA; (-) strand; PAM type: YTN; PAM sequence: TTT
tgagaatatctgtatatcag

SEQ ID NO: 45138 - DNA, 20 bp, Artificial Sequence
  Description of Artificial Sequence: Synthetic oligonucleotide
  Target: SCNA; (-) strand; PAM type: YTN; PAM sequence: CTT
ttgagaatatctgtatatca

SEQ ID NO: 45139 - DNA, 20 bp, Artificial Sequence
  Description of Artificial Sequence: Synthetic oligonucleotide
  Target: SCNA; (-) strand; PAM type: YTN; PAM sequence: TTG
tcttttgagaatatctgtat

SEQ ID NO: 45140 - DNA, 20 bp, Artificial Sequence
  Description of Artificial Sequence: Synthetic oligonucleotide
  Target: SCNA; (-) strand; PAM type: YTN; PAM sequence: CTT
gtcttttgagaatatctgta

SEQ ID NO: 45141 - DNA, 20 bp, Artificial Sequence
  Description of Artificial Sequence: Synthetic oligonucleotide
  Target: SCNA; (-) strand; PAM type: YTN; PAM sequence: TTG
gggggtgtgtgtgtgtgtgt

SEQ ID NO: 45142 - DNA, 20 bp, Artificial Sequence
  Description of Artificial Sequence: Synthetic oligonucleotide
  Target: SCNA; (-) strand; PAM type: YTN; PAM sequence: CTT
ggggggtgtgtgtgtgtgtg

SEQ ID NO: 45143 - DNA, 20 bp, Artificial Sequence
  Description of Artificial Sequence: Synthetic oligonucleotide
  Target: SCNA; (-) strand; PAM type: YTN; PAM sequence: TTC
cagagccttggggggtgtgt

SEQ ID NO: 45144 - DNA, 20 bp, Artificial Sequence
  Description of Artificial Sequence: Synthetic oligonucleotide
  Target: SCNA; (-) strand; PAM type: YTN; PAM sequence: TTA
aggcacattccagagccttg

SEQ ID NO: 45145 - DNA, 20 bp, Artificial Sequence
  Description of Artificial Sequence: Synthetic oligonucleotide
  Target: SCNA; (-) strand; PAM type: YTN; PAM sequence: TTG
ttaaggcacattccagagcc

SEQ ID NO: 45146 - DNA, 20 bp, Artificial Sequence
  Description of Artificial Sequence: Synthetic oligonucleotide
  Target: SCNA; (-) strand; PAM type: YTN; PAM sequence: TTA
aaatgtgcaaaaataagatt

SEQ ID NO: 45147 - DNA, 20 bp, Artificial Sequence
  Description of Artificial Sequence: Synthetic oligonucleotide
  Target: SCNA; (-) strand; PAM type: YTN; PAM sequence: TTT
aaaatgtgcaaaaataagat

SEQ ID NO: 45148 - DNA, 20 bp, Artificial Sequence
  Description of Artificial Sequence: Synthetic oligonucleotide
  Target: SCNA; (-) strand; PAM type: YTN; PAM sequence: TTT
taaaatgtgcaaaaataaga

SEQ ID NO: 45149 - DNA, 20 bp, Artificial Sequence
  Description of Artificial Sequence: Synthetic oligonucleotide
  Target: SCNA; (-) strand; PAM type: YTN; PAM sequence: CTT
ttaaaatgtgcaaaaataag

SEQ ID NO: 45150 - DNA, 20 bp, Artificial Sequence
  Description of Artificial Sequence: Synthetic oligonucleotide
  Target: SCNA; (-) strand; PAM type: YTN; PAM sequence: CTC
cttttaaaatgtgcaaaaat

SEQ ID NO: 45151 - DNA, 20 bp, Artificial Sequence
  Description of Artificial Sequence: Synthetic oligonucleotide
  Target: SCNA; (-) strand; PAM type: YTN; PAM sequence: TTC
ataatgacctccttttaaaa

SEQ ID NO: 45152 - DNA, 20 bp, Artificial Sequence
  Description of Artificial Sequence: Synthetic oligonucleotide
  Target: SCNA; (-) strand; PAM type: YTN; PAM sequence: TTT
cataatgacctccttttaaa

SEQ ID NO: 45153 - DNA, 20 bp, Artificial Sequence
  Description of Artificial Sequence: Synthetic oligonucleotide
  Target: SCNA; (-) strand; PAM type: YTN; PAM sequence: TTA
caggtcataaaatatgtgca

SEQ ID NO: 45154 - DNA, 20 bp, Artificial Sequence
  Description of Artificial Sequence: Synthetic oligonucleotide
  Target: SCNA; (-) strand; PAM type: YTN; PAM sequence: CTC
aagtgaaatcagatcagaga

SEQ ID NO: 45155 - DNA, 20 bp, Artificial Sequence
  Description of Artificial Sequence: Synthetic oligonucleotide
  Target: SCNA; (-) strand; PAM type: YTN; PAM sequence: TTA
gctcaagtgaaatcagatca

SEQ ID NO: 45156 - DNA, 20 bp, Artificial Sequence
  Description of Artificial Sequence: Synthetic oligonucleotide
  Target: SCNA; (-) strand; PAM type: YTN; PAM sequence: TTA
ttagctcaagtgaaatcaga

SEQ ID NO: 45157 - DNA, 20 bp, Artificial Sequence
  Description of Artificial Sequence: Synthetic oligonucleotide
  Target: SCNA; (-) strand; PAM type: YTN; PAM sequence: TTT
attagctcaagtgaaatcag

SEQ ID NO: 45158 - DNA, 20 bp, Artificial Sequence
  Description of Artificial Sequence: Synthetic oligonucleotide
  Target: SCNA; (-) strand; PAM type: YTN; PAM sequence: TTT
tattagctcaagtgaaatca

SEQ ID NO: 45159 - DNA, 20 bp, Artificial Sequence
  Description of Artificial Sequence: Synthetic oligonucleotide
  Target: SCNA; (-) strand; PAM type: YTN; PAM sequence: TTT
ttattagctcaagtgaaatc

SEQ ID NO: 45160 - DNA, 20 bp, Artificial Sequence
  Description of Artificial Sequence: Synthetic oligonucleotide
  Target: SCNA; (-) strand; PAM type: YTN; PAM sequence: TTT
tttattagctcaagtgaaat

SEQ ID NO: 45161 - DNA, 20 bp, Artificial Sequence
  Description of Artificial Sequence: Synthetic oligonucleotide
  Target: SCNA; (-) strand; PAM type: YTN; PAM sequence: TTT
ttttattagctcaagtgaaa

SEQ ID NO: 45162 - DNA, 20 bp, Artificial Sequence
  Description of Artificial Sequence: Synthetic oligonucleotide
  Target: SCNA; (-) strand; PAM type: YTN; PAM sequence: TTG
tatttttttattagctcaag

SEQ ID NO: 45163 - DNA, 20 bp, Artificial Sequence
  Description of Artificial Sequence: Synthetic oligonucleotide
  Target: SCNA; (-) strand; PAM type: YTN; PAM sequence: TTT
gtatttttttattagctcaa

SEQ ID NO: 45164 - DNA, 20 bp, Artificial Sequence
  Description of Artificial Sequence: Synthetic oligonucleotide
  Target: SCNA; (-) strand; PAM type: YTN; PAM sequence: CTG
atttgtatttttttattagc

SEQ ID NO: 45165 - DNA, 20 bp, Artificial Sequence
  Description of Artificial Sequence: Synthetic oligonucleotide
  Target: SCNA; (-) strand; PAM type: YTN; PAM sequence: TTG
atcacagcaagcacctgatt

SEQ ID NO: 45166 - DNA, 20 bp, Artificial Sequence
  Description of Artificial Sequence: Synthetic oligonucleotide
  Target: SCNA; (-) strand; PAM type: YTN; PAM sequence: CTT
gatcacagcaagcacctgat

SEQ ID NO: 45167 - DNA, 20 bp, Artificial Sequence
  Description of Artificial Sequence: Synthetic oligonucleotide
  Target: SCNA; (-) strand; PAM type: YTN; PAM sequence: TTA
gcatcttgatcacagcaagc

SEQ ID NO: 45168 - DNA, 20 bp, Artificial Sequence
  Description of Artificial Sequence: Synthetic oligonucleotide
  Target: SCNA; (-) strand; PAM type: YTN; PAM sequence: TTT
agcatcttgatcacagcaag

SEQ ID NO: 45169 - DNA, 20 bp, Artificial Sequence
  Description of Artificial Sequence: Synthetic oligonucleotide
  Target: SCNA; (-) strand; PAM type: YTN; PAM sequence: CTT
tagcatcttgatcacagcaa

SEQ ID NO: 45170 - DNA, 20 bp, Artificial Sequence
  Description of Artificial Sequence: Synthetic oligonucleotide
  Target: SCNA; (-) strand; PAM type: YTN; PAM sequence: TTA
tgaagcagtgtaaatataac

SEQ ID NO: 45171 - DNA, 20 bp, Artificial Sequence
  Description of Artificial Sequence: Synthetic oligonucleotide
  Target: SCNA; (-) strand; PAM type: YTN; PAM sequence: TTT
atgaagcagtgtaaatataa

SEQ ID NO: 45172 - DNA, 20 bp, Artificial Sequence
  Description of Artificial Sequence: Synthetic oligonucleotide
  Target: SCNA; (-) strand; PAM type: YTN; PAM sequence: TTA
catttatgaagcagtgtaaa

SEQ ID NO: 45173 - DNA, 20 bp, Artificial Sequence
  Description of Artificial Sequence: Synthetic oligonucleotide
  Target: SCNA; (-) strand; PAM type: YTN; PAM sequence: CTT
acatttatgaagcagtgtaa

SEQ ID NO: 45174 - DNA, 20 bp, Artificial Sequence
  Description of Artificial Sequence: Synthetic oligonucleotide
  Target: SCNA; (-) strand; PAM type: YTN; PAM sequence: TTA
acaccttacatttatgaagc

SEQ ID NO: 45175 - DNA, 20 bp, Artificial Sequence
  Description of Artificial Sequence: Synthetic oligonucleotide
  Target: SCNA; (-) strand; PAM type: YTN; PAM sequence: TTT
aacaccttacatttatgaag

SEQ ID NO: 45176 - DNA, 20 bp, Artificial Sequence
  Description of Artificial Sequence: Synthetic oligonucleotide
  Target: SCNA; (-) strand; PAM type: YTN; PAM sequence: CTT
taacaccttacatttatgaa

SEQ ID NO: 45177 - DNA, 20 bp, Artificial Sequence
  Description of Artificial Sequence: Synthetic oligonucleotide
  Target: SCNA; (-) strand; PAM type: YTN; PAM sequence: CTA
agctttaacaccttacattt

SEQ ID NO: 45178 - DNA, 20 bp, Artificial Sequence
  Description of Artificial Sequence: Synthetic oligonucleotide
  Target: SCNA; (-) strand; PAM type: YTN; PAM sequence: CTC
actaagctttaacaccttac

SEQ ID NO: 45179 - DNA, 20 bp, Artificial Sequence
  Description of Artificial Sequence: Synthetic oligonucleotide
  Target: SCNA; (-) strand; PAM type: YTN; PAM sequence: TTG
tctcactaagctttaacacc

SEQ ID NO: 45180 - DNA, 20 bp, Artificial Sequence
  Description of Artificial Sequence: Synthetic oligonucleotide
  Target: SCNA; (-) strand; PAM type: YTN; PAM sequence: CTT
gtctcactaagctttaacac

SEQ ID NO: 45181 - DNA, 20 bp, Artificial Sequence
  Description of Artificial Sequence: Synthetic oligonucleotide
  Target: SCNA; (-) strand; PAM type: YTN; PAM sequence: TTC
ttgtctcactaagctttaac

SEQ ID NO: 45182 - DNA, 20 bp, Artificial Sequence
  Description of Artificial Sequence: Synthetic oligonucleotide
  Target: SCNA; (-) strand; PAM type: YTN; PAM sequence: CTT
cttgtctcactaagctttaa

SEQ ID NO: 45183 - DNA, 20 bp, Artificial Sequence
  Description of Artificial Sequence: Synthetic oligonucleotide
  Target: SCNA; (-) strand; PAM type: YTN; PAM sequence: TTA
cttcttgtctcactaagctt

SEQ ID NO: 45184 - DNA, 20 bp, Artificial Sequence
  Description of Artificial Sequence: Synthetic oligonucleotide
  Target: SCNA; (-) strand; PAM type: YTN; PAM sequence: TTT
acttcttgtctcactaagct

SEQ ID NO: 45185 - DNA, 20 bp, Artificial Sequence
  Description of Artificial Sequence: Synthetic oligonucleotide
  Target: SCNA; (-) strand; PAM type: YTN; PAM sequence: TTA
tcagtttacttcttgtctca

SEQ ID NO: 45186 - DNA, 20 bp, Artificial Sequence
  Description of Artificial Sequence: Synthetic oligonucleotide
  Target: SCNA; (-) strand; PAM type: YTN; PAM sequence: TTA
atcaattatcagtttacttc

SEQ ID NO: 45187 - DNA, 20 bp, Artificial Sequence
  Description of Artificial Sequence: Synthetic oligonucleotide
  Target: SCNA; (-) strand; PAM type: YTN; PAM sequence: CTG
gttaatcaattatcagttta

SEQ ID NO: 45188 - DNA, 20 bp, Artificial Sequence
  Description of Artificial Sequence: Synthetic oligonucleotide
  Target: SCNA; (-) strand; PAM type: YTN; PAM sequence: TTG
tatagcaccctggttaatca

SEQ ID NO: 45189 - DNA, 20 bp, Artificial Sequence
  Description of Artificial Sequence: Synthetic oligonucleotide
  Target: SCNA; (-) strand; PAM type: YTN; PAM sequence: TTT
gtatagcaccctggttaatc

SEQ ID NO: 45190 - DNA, 20 bp, Artificial Sequence
  Description of Artificial Sequence: Synthetic oligonucleotide
  Target: SCNA; (-) strand; PAM type: YTN; PAM sequence: CTA
ggtagatttgtatagcaccc

SEQ ID NO: 45191 - DNA, 20 bp, Artificial Sequence
  Description of Artificial Sequence: Synthetic oligonucleotide
  Target: SCNA; (-) strand; PAM type: YTN; PAM sequence: CTC
taggtagatttgtatagcac

SEQ ID NO: 45192 - DNA, 20 bp, Artificial Sequence
  Description of Artificial Sequence: Synthetic oligonucleotide
  Target: SCNA; (-) strand; PAM type: YTN; PAM sequence: CTG
ggaaggcaccctctaggtag

SEQ ID NO: 45193 - DNA, 20 bp, Artificial Sequence
  Description of Artificial Sequence: Synthetic oligonucleotide
  Target: SCNA; (-) strand; PAM type: YTN; PAM sequence: TTA
acctgggaaggcaccctcta

SEQ ID NO: 45194 - DNA, 20 bp, Artificial Sequence
  Description of Artificial Sequence: Synthetic oligonucleotide
  Target: SCNA; (-) strand; PAM type: YTN; PAM sequence: TTG
cattaacctgggaaggcacc

SEQ ID NO: 45195 - DNA, 20 bp, Artificial Sequence
  Description of Artificial Sequence: Synthetic oligonucleotide
  Target: SCNA; (-) strand; PAM type: YTN; PAM sequence: CTC
ccataattgcattaacctgg

SEQ ID NO: 45196 - DNA, 20 bp, Artificial Sequence
  Description of Artificial Sequence: Synthetic oligonucleotide
  Target: SCNA; (-) strand; PAM type: YTN; PAM sequence: TTC
tcccataattgcattaacct

SEQ ID NO: 45197 - DNA, 20 bp, Artificial Sequence
  Description of Artificial Sequence: Synthetic oligonucleotide
  Target: SCNA; (-) strand; PAM type: YTN; PAM sequence: TTT
ctcccataattgcattaacc

SEQ ID NO: 45198 - DNA, 20 bp, Artificial Sequence
  Description of Artificial Sequence: Synthetic oligonucleotide
  Target: SCNA; (-) strand; PAM type: YTN; PAM sequence: CTT
tctcccataattgcattaac

SEQ ID NO: 45199 - DNA, 20 bp, Artificial Sequence
  Description of Artificial Sequence: Synthetic oligonucleotide
  Target: SCNA; (-) strand; PAM type: YTN; PAM sequence: CTG
tagccaggagccaggatctt

SEQ ID NO: 45200 - DNA, 20 bp, Artificial Sequence
  Description of Artificial Sequence: Synthetic oligonucleotide
  Target: SCNA; (-) strand; PAM type: YTN; PAM sequence: TTC
tgtagccaggagccaggatc

SEQ ID NO: 45201 - DNA, 20 bp, Artificial Sequence
  Description of Artificial Sequence: Synthetic oligonucleotide
  Target: SCNA; (-) strand; PAM type: YTN; PAM sequence: TTT
ctgtagccaggagccaggat

SEQ ID NO: 45202 - DNA, 20 bp, Artificial Sequence
  Description of Artificial Sequence: Synthetic oligonucleotide
  Target: SCNA; (-) strand; PAM type: YTN; PAM sequence: TTG
gcatttctgtagccaggagc

SEQ ID NO: 45203 - DNA, 20 bp, Artificial Sequence
  Description of Artificial Sequence: Synthetic oligonucleotide
  Target: SCNA; (-) strand; PAM type: YTN; PAM sequence: TTA
gttggcatttctgtagccag

SEQ ID NO: 45204 - DNA, 20 bp, Artificial Sequence
  Description of Artificial Sequence: Synthetic oligonucleotide
  Target: SCNA; (-) strand; PAM type: YTN; PAM sequence: TTT
agttggcatttctgtagcca

SEQ ID NO: 45205 - DNA, 20 bp, Artificial Sequence
  Description of Artificial Sequence: Synthetic oligonucleotide
  Target: SCNA; (-) strand; PAM type: YTN; PAM sequence: CTT
tagttggcatttctgtagcc

SEQ ID NO: 45206 - DNA, 20 bp, Artificial Sequence
  Description of Artificial Sequence: Synthetic oligonucleotide
  Target: SCNA; (-) strand; PAM type: YTN; PAM sequence: CTC
caaagtgaaggatggggtgg

SEQ ID NO: 45207 - DNA, 20 bp, Artificial Sequence
  Description of Artificial Sequence: Synthetic oligonucleotide
  Target: SCNA; (-) strand; PAM type: YTN; PAM sequence: TTA
acgcatcctccaaagtgaag

SEQ ID NO: 45208 - DNA, 20 bp, Artificial Sequence
  Description of Artificial Sequence: Synthetic oligonucleotide
  Target: SCNA; (-) strand; PAM type: YTN; PAM sequence: CTT
aacgcatcctccaaagtgaa

SEQ ID NO: 45209 - DNA, 20 bp, Artificial Sequence
  Description of Artificial Sequence: Synthetic oligonucleotide
  Target: SCNA; (-) strand; PAM type: YTN; PAM sequence: TTG
acacagcacagtgtcatctt

SEQ ID NO: 45210 - DNA, 20 bp, Artificial Sequence
  Description of Artificial Sequence: Synthetic oligonucleotide
  Target: SCNA; (-) strand; PAM type: YTN; PAM sequence: TTT
gacacagcacagtgtcatct

SEQ ID NO: 45211 - DNA, 20 bp, Artificial Sequence
  Description of Artificial Sequence: Synthetic oligonucleotide
  Target: SCNA; (-) strand; PAM type: YTN; PAM sequence: TTT
tgacacagcacagtgtcatc

SEQ ID NO: 45212 - DNA, 20 bp, Artificial Sequence
  Description of Artificial Sequence: Synthetic oligonucleotide
  Target: SCNA; (-) strand; PAM type: YTN; PAM sequence: TTC
attttgacacagcacagtgt

SEQ ID NO: 45213 - DNA, 20 bp, Artificial Sequence
  Description of Artificial Sequence: Synthetic oligonucleotide
  Target: SCNA; (-) strand; PAM type: YTN; PAM sequence: TTT
cattttgacacagcacagtg

SEQ ID NO: 45214 - DNA, 20 bp, Artificial Sequence
  Description of Artificial Sequence: Synthetic oligonucleotide
  Target: SCNA; (-) strand; PAM type: YTN; PAM sequence: TTT
tcattttgacacagcacagt

SEQ ID NO: 45215 - DNA, 20 bp, Artificial Sequence
  Description of Artificial Sequence: Synthetic oligonucleotide
  Target: SCNA; (-) strand; PAM type: YTN; PAM sequence: TTG
tattttcattttgacacagc

SEQ ID NO: 45216 - DNA, 20 bp, Artificial Sequence
  Description of Artificial Sequence: Synthetic oligonucleotide
  Target: SCNA; (-) strand; PAM type: YTN; PAM sequence: TTT
gtattttcattttgacacag

SEQ ID NO: 45217 - DNA, 20 bp, Artificial Sequence
  Description of Artificial Sequence: Synthetic oligonucleotide
  Target: SCNA; (-) strand; PAM type: YTN; PAM sequence: TTG
tttgtattttcattttgaca

SEQ ID NO: 45218 - DNA, 20 bp, Artificial Sequence
  Description of Artificial Sequence: Synthetic oligonucleotide
  Target: SCNA; (-) strand; PAM type: YTN; PAM sequence: TTT
gtttgtattttcattttgac

SEQ ID NO: 45219 - DNA, 20 bp, Artificial Sequence
  Description of Artificial Sequence: Synthetic oligonucleotide
  Target: SCNA; (-) strand; PAM type: YTN; PAM sequence: TTT
tgtttgtattttcattttga

SEQ ID NO: 45220 - DNA, 20 bp, Artificial Sequence
  Description of Artificial Sequence: Synthetic oligonucleotide
  Target: SCNA; (-) strand; PAM type: YTN; PAM sequence: CTT
ttgtttgtattttcattttg

SEQ ID NO: 45221 - DNA, 20 bp, Artificial Sequence
  Description of Artificial Sequence: Synthetic oligonucleotide
  Target: SCNA; (-) strand; PAM type: YTN; PAM sequence: TTG
cttttgtttgtattttcatt

SEQ ID NO: 45222 - DNA, 20 bp, Artificial Sequence
  Description of Artificial Sequence: Synthetic oligonucleotide
  Target: SCNA; (-) strand; PAM type: YTN; PAM sequence: TTT
gcttttgtttgtattttcat

SEQ ID NO: 45223 - DNA, 20 bp, Artificial Sequence
  Description of Artificial Sequence: Synthetic oligonucleotide
  Target: SCNA; (-) strand; PAM type: YTN; PAM sequence: TTA
tttgcttttgtttgtatttt

SEQ ID NO: 45224 - DNA, 20 bp, Artificial Sequence
  Description of Artificial Sequence: Synthetic oligonucleotide
  Target: SCNA; (-) strand; PAM type: YTN; PAM sequence: TTT
atttgcttttgtttgtattt

SEQ ID NO: 45225 - DNA, 20 bp, Artificial Sequence
  Description of Artificial Sequence: Synthetic oligonucleotide
  Target: SCNA; (-) strand; PAM type: YTN; PAM sequence: CTC
ggtttatttgcttttgtttg

SEQ ID NO: 45226 - DNA, 20 bp, Artificial Sequence
  Description of Artificial Sequence: Synthetic oligonucleotide
  Target: SCNA; (-) strand; PAM type: YTN; PAM sequence: TTA
tcactcggtttatttgcttt

SEQ ID NO: 45227 - DNA, 20 bp, Artificial Sequence
  Description of Artificial Sequence: Synthetic oligonucleotide
  Target: SCNA; (-) strand; PAM type: YTN; PAM sequence: TTA
ttatcactcggtttatttgc

SEQ ID NO: 45228 - DNA, 20 bp, Artificial Sequence
  Description of Artificial Sequence: Synthetic oligonucleotide
  Target: SCNA; (-) strand; PAM type: YTN; PAM sequence: TTT
attatcactcggtttatttg

SEQ ID NO: 45229 - DNA, 20 bp, Artificial Sequence
  Description of Artificial Sequence: Synthetic oligonucleotide
  Target: SCNA; (-) strand; PAM type: YTN; PAM sequence: TTA
tttattatcactcggtttat

SEQ ID NO: 45230 - DNA, 20 bp, Artificial Sequence
  Description of Artificial Sequence: Synthetic oligonucleotide
  Target: SCNA; (-) strand; PAM type: YTN; PAM sequence: TTT
atttattatcactcggttta

SEQ ID NO: 45231 - DNA, 20 bp, Artificial Sequence
  Description of Artificial Sequence: Synthetic oligonucleotide
  Target: SCNA; (-) strand; PAM type: YTN; PAM sequence: CTC
ggtttatttattatcactcg

SEQ ID NO: 45232 - DNA, 20 bp, Artificial Sequence
  Description of Artificial Sequence: Synthetic oligonucleotide
  Target: SCNA; (-) strand; PAM type: YTN; PAM sequence: CTG
agtcactcggtttatttatt

SEQ ID NO: 45233 - DNA, 20 bp, Artificial Sequence
  Description of Artificial Sequence: Synthetic oligonucleotide
  Target: SCNA; (-) strand; PAM type: YTN; PAM sequence: CTG
gaaaatggataaggaaactg

SEQ ID NO: 45234 - DNA, 20 bp, Artificial Sequence
  Description of Artificial Sequence: Synthetic oligonucleotide
  Target: SCNA; (-) strand; PAM type: YTN; PAM sequence: CTA
aaaaaaaaaaggtaactgga

SEQ ID NO: 45235 - DNA, 20 bp, Artificial Sequence
  Description of Artificial Sequence: Synthetic oligonucleotide
  Target: SCNA; (-) strand; PAM type: YTN; PAM sequence: CTG
gcctaaaaaaaaaaaggtaa

SEQ ID NO: 45236 - DNA, 20 bp, Artificial Sequence
  Description of Artificial Sequence: Synthetic oligonucleotide
  Target: SCNA; (-) strand; PAM type: YTN; PAM sequence: CTA
gtggacatgcagactggcct

SEQ ID NO: 45237 - DNA, 20 bp, Artificial Sequence
  Description of Artificial Sequence: Synthetic oligonucleotide
  Target: SCNA; (-) strand; PAM type: YTN; PAM sequence: TTC
tagtggacatgcagactggc

SEQ ID NO: 45238 - DNA, 20 bp, Artificial Sequence
  Description of Artificial Sequence: Synthetic oligonucleotide
  Target: SCNA; (-) strand; PAM type: YTN; PAM sequence: CTT
ctagtggacatgcagactgg

SEQ ID NO: 45239 - DNA, 20 bp, Artificial Sequence
  Description of Artificial Sequence: Synthetic oligonucleotide
  Target: SCNA; (-) strand; PAM type: YTN; PAM sequence: TTC
ttctagtggacatgcagact

SEQ ID NO: 45240 - DNA, 20 bp, Artificial Sequence
  Description of Artificial Sequence: Synthetic oligonucleotide
  Target: SCNA; (-) strand; PAM type: YTN; PAM sequence: TTT
cttctagtggacatgcagac

SEQ ID NO: 45241 - DNA, 20 bp, Artificial Sequence
  Description of Artificial Sequence: Synthetic oligonucleotide
  Target: SCNA; (-) strand; PAM type: YTN; PAM sequence: TTT
tcttctagtggacatgcaga

SEQ ID NO: 45242 - DNA, 20 bp, Artificial Sequence
  Description of Artificial Sequence: Synthetic oligonucleotide
  Target: SCNA; (-) strand; PAM type: YTN; PAM sequence: CTT
ttcttctagtggacatgcag

SEQ ID NO: 45243 - DNA, 20 bp, Artificial Sequence
  Description of Artificial Sequence: Synthetic oligonucleotide
  Target: SCNA; (-) strand; PAM type: YTN; PAM sequence: CTG
atgaagaacccaggtccctt

SEQ ID NO: 45244 - DNA, 20 bp, Artificial Sequence
  Description of Artificial Sequence: Synthetic oligonucleotide
  Target: SCNA; (-) strand; PAM type: YTN; PAM sequence: CTA
aggatgggctgatgaagaac

SEQ ID NO: 45245 - DNA, 20 bp, Artificial Sequence
  Description of Artificial Sequence: Synthetic oligonucleotide
  Target: SCNA; (-) strand; PAM type: YTN; PAM sequence: CTA
agatctaaggatgggctgat

SEQ ID NO: 45246 - DNA, 20 bp, Artificial Sequence
  Description of Artificial Sequence: Synthetic oligonucleotide
  Target: SCNA; (-) strand; PAM type: YTN; PAM sequence: CTA
ggtgcatatgtgcactaaga

SEQ ID NO: 45247 - DNA, 20 bp, Artificial Sequence
  Description of Artificial Sequence: Synthetic oligonucleotide
  Target: SCNA; (-) strand; PAM type: YTN; PAM sequence: TTA
ctaggtgcatatgtgcacta

SEQ ID NO: 45248 - DNA, 20 bp, Artificial Sequence
  Description of Artificial Sequence: Synthetic oligonucleotide
  Target: SCNA; (-) strand; PAM type: YTN; PAM sequence: CTT
actaggtgcatatgtgcact

SEQ ID NO: 45249 - DNA, 20 bp, Artificial Sequence
  Description of Artificial Sequence: Synthetic oligonucleotide
  Target: SCNA; (-) strand; PAM type: YTN; PAM sequence: CTC
ggcacttactaggtgcatat

SEQ ID NO: 45250 - DNA, 20 bp, Artificial Sequence
  Description of Artificial Sequence: Synthetic oligonucleotide
  Target: SCNA; (-) strand; PAM type: YTN; PAM sequence: TTG
ctcggcacttactaggtgca

SEQ ID NO: 45251 - DNA, 20 bp, Artificial Sequence
  Description of Artificial Sequence: Synthetic oligonucleotide
  Target: SCNA; (-) strand; PAM type: YTN; PAM sequence: TTT
gctcggcacttactaggtgc

SEQ ID NO: 45252 - DNA, 20 bp, Artificial Sequence
  Description of Artificial Sequence: Synthetic oligonucleotide
  Target: SCNA; (-) strand; PAM type: YTN; PAM sequence: TTG
aatatttgctcggcacttac

SEQ ID NO: 45253 - DNA, 20 bp, Artificial Sequence
  Description of Artificial Sequence: Synthetic oligonucleotide
  Target: SCNA; (-) strand; PAM type: YTN; PAM sequence: TTC
attgaatatttgctcggcac

SEQ ID NO: 45254 - DNA, 20 bp, Artificial Sequence
  Description of Artificial Sequence: Synthetic oligonucleotide
  Target: SCNA; (-) strand; PAM type: YTN; PAM sequence: TTA
ggaaaggtacagtcattcat

SEQ ID NO: 45255 - DNA, 20 bp, Artificial Sequence
  Description of Artificial Sequence: Synthetic oligonucleotide
  Target: SCNA; (-) strand; PAM type: YTN; PAM sequence: CTT
aggaaaggtacagtcattca

SEQ ID NO: 45256 - DNA, 20 bp, Artificial Sequence
  Description of Artificial Sequence: Synthetic oligonucleotide
  Target: SCNA; (-) strand; PAM type: YTN; PAM sequence: TTC
ttaggaaaggtacagtcatt

SEQ ID NO: 45257 - DNA, 20 bp, Artificial Sequence
  Description of Artificial Sequence: Synthetic oligonucleotide
  Target: SCNA; (-) strand; PAM type: YTN; PAM sequence: TTG
aaggataatcaacgaagaat

SEQ ID NO: 45258 - DNA, 20 bp, Artificial Sequence
  Description of Artificial Sequence: Synthetic oligonucleotide
  Target: SCNA; (-) strand; PAM type: YTN; PAM sequence: CTG
ttgaaggataatcaacgaag

SEQ ID NO: 45259 - DNA, 20 bp, Artificial Sequence
  Description of Artificial Sequence: Synthetic oligonucleotide
  Target: SCNA; (-) strand; PAM type: YTN; PAM sequence: CTC
tgttgaaggataatcaacga

SEQ ID NO: 45260 - DNA, 20 bp, Artificial Sequence
  Description of Artificial Sequence: Synthetic oligonucleotide
  Target: SCNA; (-) strand; PAM type: YTN; PAM sequence: TTA
gctctgttgaaggataatca

SEQ ID NO: 45261 - DNA, 20 bp, Artificial Sequence
  Description of Artificial Sequence: Synthetic oligonucleotide
  Target: SCNA; (-) strand; PAM type: YTN; PAM sequence: CTG
agcacatagggagagaagtt

SEQ ID NO: 45262 - DNA, 20 bp, Artificial Sequence
  Description of Artificial Sequence: Synthetic oligonucleotide
  Target: SCNA; (-) strand; PAM type: YTN; PAM sequence: TTG
actgagcacatagggagaga

SEQ ID NO: 45263 - DNA, 20 bp, Artificial Sequence
  Description of Artificial Sequence: Synthetic oligonucleotide
  Target: SCNA; (-) strand; PAM type: YTN; PAM sequence: TTT
gactgagcacatagggagag

SEQ ID NO: 45264 - DNA, 20 bp, Artificial Sequence
  Description of Artificial Sequence: Synthetic oligonucleotide
  Target: SCNA; (-) strand; PAM type: YTN; PAM sequence: CTC
agtccaatgggagagcattt

SEQ ID NO: 45265 - DNA, 20 bp, Artificial Sequence
  Description of Artificial Sequence: Synthetic oligonucleotide
  Target: SCNA; (-) strand; PAM type: YTN; PAM sequence: CTG
aactcagtccaatgggagag

SEQ ID NO: 45266 - DNA, 20 bp, Artificial Sequence
  Description of Artificial Sequence: Synthetic oligonucleotide
  Target: SCNA; (-) strand; PAM type: YTN; PAM sequence: TTA
tgctgaactcagtccaatgg

SEQ ID NO: 45267 - DNA, 20 bp, Artificial Sequence
  Description of Artificial Sequence: Synthetic oligonucleotide
  Target: SCNA; (-) strand; PAM type: YTN; PAM sequence: TTT
atgctgaactcagtccaatg

SEQ ID NO: 45268 - DNA, 20 bp, Artificial Sequence
  Description of Artificial Sequence: Synthetic oligonucleotide
  Target: SCNA; (-) strand; PAM type: YTN; PAM sequence: CTC
aaaacatggcagtttatgct

SEQ ID NO: 45269 - DNA, 20 bp, Artificial Sequence
  Description of Artificial Sequence: Synthetic oligonucleotide
  Target: SCNA; (-) strand; PAM type: YTN; PAM sequence: TTA
caccaatcatctcaaaacat

SEQ ID NO: 45270 - DNA, 20 bp, Artificial Sequence
  Description of Artificial Sequence: Synthetic oligonucleotide
  Target: SCNA; (-) strand; PAM type: YTN; PAM sequence: CTT
acaccaatcatctcaaaaca

SEQ ID NO: 45271 - DNA, 20 bp, Artificial Sequence
  Description of Artificial Sequence: Synthetic oligonucleotide
  Target: SCNA; (-) strand; PAM type: YTN; PAM sequence: TTC
gcttacaccaatcatctcaa

SEQ ID NO: 45272 - DNA, 20 bp, Artificial Sequence
  Description of Artificial Sequence: Synthetic oligonucleotide
  Target: SCNA; (-) strand; PAM type: YTN; PAM sequence: CTC
aggagaggacattcgcttac

SEQ ID NO: 45273 - DNA, 20 bp, Artificial Sequence
  Description of Artificial Sequence: Synthetic oligonucleotide
  Target: SCNA; (-) strand; PAM type: YTN; PAM sequence: CTC
gcaactcaggagaggacatt

SEQ ID NO: 45274 - DNA, 20 bp, Artificial Sequence
  Description of Artificial Sequence: Synthetic oligonucleotide
  Target: SCNA; (-) strand; PAM type: YTN; PAM sequence: TTC
tcgcaactcaggagaggaca

SEQ ID NO: 45275 - DNA, 20 bp, Artificial Sequence
  Description of Artificial Sequence: Synthetic oligonucleotide
  Target: SCNA; (-) strand; PAM type: YTN; PAM sequence: TTA
gattctcgcaactcaggaga

SEQ ID NO: 45276 - DNA, 20 bp, Artificial Sequence
  Description of Artificial Sequence: Synthetic oligonucleotide
  Target: SCNA; (-) strand; PAM type: YTN; PAM sequence: CTT
agattctcgcaactcaggag

SEQ ID NO: 45277 - DNA, 20 bp, Artificial Sequence
  Description of Artificial Sequence: Synthetic oligonucleotide
  Target: SCNA; (-) strand; PAM type: YTN; PAM sequence: CTC
ttagattctcgcaactcagg

SEQ ID NO: 45278 - DNA, 20 bp, Artificial Sequence
  Description of Artificial Sequence: Synthetic oligonucleotide
  Target: SCNA; (-) strand; PAM type: YTN; PAM sequence: CTG
ctcttagattctcgcaactc

SEQ ID NO: 45279 - DNA, 20 bp, Artificial Sequence
  Description of Artificial Sequence: Synthetic oligonucleotide
  Target: SCNA; (-) strand; PAM type: YTN; PAM sequence: TTG
tcctgctcttagattctcgc

SEQ ID NO: 45280 - DNA, 20 bp, Artificial Sequence
  Description of Artificial Sequence: Synthetic oligonucleotide
  Target: SCNA; (-) strand; PAM type: YTN; PAM sequence: CTA
tagaaagtagagaagcatgt

SEQ ID NO: 45281 - DNA, 20 bp, Artificial Sequence
  Description of Artificial Sequence: Synthetic oligonucleotide
  Target: SCNA; (-) strand; PAM type: YTN; PAM sequence: TTA
gacagtggacaaaagaacta

SEQ ID NO: 45282 - DNA, 20 bp, Artificial Sequence
  Description of Artificial Sequence: Synthetic oligonucleotide
  Target: SCNA; (-) strand; PAM type: YTN; PAM sequence: TTG
ttagacagtggacaaaagaa

SEQ ID NO: 45283 - DNA, 20 bp, Artificial Sequence
  Description of Artificial Sequence: Synthetic oligonucleotide
  Target: SCNA; (-) strand; PAM type: YTN; PAM sequence: TTT
gttagacagtggacaaaaga

SEQ ID NO: 45284 - DNA, 20 bp, Artificial Sequence
  Description of Artificial Sequence: Synthetic oligonucleotide
  Target: SCNA; (-) strand; PAM type: YTN; PAM sequence: TTA
tttgttagacagtggacaaa

SEQ ID NO: 45285 - DNA, 20 bp, Artificial Sequence
  Description of Artificial Sequence: Synthetic oligonucleotide
  Target: SCNA; (-) strand; PAM type: YTN; PAM sequence: TTG
gcattatttgttagacagtg

SEQ ID NO: 45286 - DNA, 20 bp, Artificial Sequence
  Description of Artificial Sequence: Synthetic oligonucleotide
  Target: SCNA; (-) strand; PAM type: YTN; PAM sequence: CTT
ggcattatttgttagacagt

SEQ ID NO: 45287 - DNA, 20 bp, Artificial Sequence
  Description of Artificial Sequence: Synthetic oligonucleotide
  Target: SCNA; (-) strand; PAM type: YTN; PAM sequence: TTC
acttggcattatttgttaga

SEQ ID NO: 45288 - DNA, 20 bp, Artificial Sequence
  Description of Artificial Sequence: Synthetic oligonucleotide
  Target: SCNA; (-) strand; PAM type: YTN; PAM sequence: TTT
cacttggcattatttgttag

SEQ ID NO: 45289 - DNA, 20 bp, Artificial Sequence
  Description of Artificial Sequence: Synthetic oligonucleotide
  Target: SCNA; (-) strand; PAM type: YTN; PAM sequence: TTT
tcacttggcattatttgtta

SEQ ID NO: 45290 - DNA, 20 bp, Artificial Sequence
  Description of Artificial Sequence: Synthetic oligonucleotide
  Target: SCNA; (-) strand; PAM type: YTN; PAM sequence: TTT
ttcacttggcattatttgtt

SEQ ID NO: 45291 - DNA, 20 bp, Artificial Sequence
  Description of Artificial Sequence: Synthetic oligonucleotide
  Target: SCNA; (-) strand; PAM type: YTN; PAM sequence: CTT
tttcacttggcattatttgt

SEQ ID NO: 45292 - DNA, 20 bp, Artificial Sequence
  Description of Artificial Sequence: Synthetic oligonucleotide
  Target: SCNA; (-) strand; PAM type: YTN; PAM sequence: TTC
cctttttcacttggcattat

SEQ ID NO: 45293 - DNA, 20 bp, Artificial Sequence
  Description of Artificial Sequence: Synthetic oligonucleotide
  Target: SCNA; (-) strand; PAM type: YTN; PAM sequence: TTT
ccctttttcacttggcatta

SEQ ID NO: 45294 - DNA, 20 bp, Artificial Sequence
  Description of Artificial Sequence: Synthetic oligonucleotide
  Target: SCNA; (-) strand; PAM type: YTN; PAM sequence: TTT
tccctttttcacttggcatt

SEQ ID NO: 45295 - DNA, 20 bp, Artificial Sequence
  Description of Artificial Sequence: Synthetic oligonucleotide
  Target: SCNA; (-) strand; PAM type: YTN; PAM sequence: TTT
ttccctttttcacttggcat

SEQ ID NO: 45296 - DNA, 20 bp, Artificial Sequence
  Description of Artificial Sequence: Synthetic oligonucleotide
  Target: SCNA; (-) strand; PAM type: YTN; PAM sequence: TTC
atttttccctttttcacttg

SEQ ID NO: 45297 - DNA, 20 bp, Artificial Sequence
  Description of Artificial Sequence: Synthetic oligonucleotide
  Target: SCNA; (-) strand; PAM type: YTN; PAM sequence: TTC
attcatttttccctttttca

SEQ ID NO: 45298 - DNA, 20 bp, Artificial Sequence
  Description of Artificial Sequence: Synthetic oligonucleotide
  Target: SCNA; (-) strand; PAM type: YTN; PAM sequence: TTA
ttcattcatttttccctttt

SEQ ID NO: 45299 - DNA, 20 bp, Artificial Sequence
  Description of Artificial Sequence: Synthetic oligonucleotide
  Target: SCNA; (-) strand; PAM type: YTN; PAM sequence: TTT
attcattcatttttcccttt

SEQ ID NO: 45300 - DNA, 20 bp, Artificial Sequence
  Description of Artificial Sequence: Synthetic oligonucleotide
  Target: SCNA; (-) strand; PAM type: YTN; PAM sequence: TTA
caaaatttattcattcattt

SEQ ID NO: 45301 - DNA, 20 bp, Artificial Sequence
  Description of Artificial Sequence: Synthetic oligonucleotide
  Target: SCNA; (-) strand; PAM type: YTN; PAM sequence: CTT
acaaaatttattcattcatt

SEQ ID NO: 45302 - DNA, 20 bp, Artificial Sequence
  Description of Artificial Sequence: Synthetic oligonucleotide
  Target: SCNA; (-) strand; PAM type: YTN; PAM sequence: TTG
gcatcttacaaaatttattc

SEQ ID NO: 45303 - DNA, 20 bp, Artificial Sequence
  Description of Artificial Sequence: Synthetic oligonucleotide
  Target: SCNA; (-) strand; PAM type: YTN; PAM sequence: TTC
cattggcatcttacaaaatt

SEQ ID NO: 45304 - DNA, 20 bp, Artificial Sequence
  Description of Artificial Sequence: Synthetic oligonucleotide
  Target: SCNA; (-) strand; PAM type: YTN; PAM sequence: TTT
ccattggcatcttacaaaat

SEQ ID NO: 45305 - DNA, 20 bp, Artificial Sequence
  Description of Artificial Sequence: Synthetic oligonucleotide
  Target: SCNA; (-) strand; PAM type: YTN; PAM sequence: TTT
tccattggcatcttacaaaa

SEQ ID NO: 45306 - DNA, 20 bp, Artificial Sequence
  Description of Artificial Sequence: Synthetic oligonucleotide
  Target: SCNA; (-) strand; PAM type: YTN; PAM sequence: TTT
ttccattggcatcttacaaa

SEQ ID NO: 45307 - DNA, 20 bp, Artificial Sequence
  Description of Artificial Sequence: Synthetic oligonucleotide
  Target: SCNA; (-) strand; PAM type: YTN; PAM sequence: TTT
tttccattggcatcttacaa

SEQ ID NO: 45308 - DNA, 20 bp, Artificial Sequence
  Description of Artificial Sequence: Synthetic oligonucleotide
  Target: SCNA; (-) strand; PAM type: YTN; PAM sequence: TTT
ttttccattggcatcttaca

SEQ ID NO: 45309 - DNA, 20 bp, Artificial Sequence
  Description of Artificial Sequence: Synthetic oligonucleotide
  Target: SCNA; (-) strand; PAM type: YTN; PAM sequence: CTG
tttttttccattggcatctt

SEQ ID NO: 45310 - DNA, 20 bp, Artificial Sequence
  Description of Artificial Sequence: Synthetic oligonucleotide
  Target: SCNA; (-) strand; PAM type: YTN; PAM sequence: TTC
tgtttttttccattggcatc

SEQ ID NO: 45311 - DNA, 20 bp, Artificial Sequence
  Description of Artificial Sequence: Synthetic oligonucleotide
  Target: SCNA; (-) strand; PAM type: YTN; PAM sequence: TTT
ctgtttttttccattggcat

SEQ ID NO: 45312 - DNA, 20 bp, Artificial Sequence
  Description of Artificial Sequence: Synthetic oligonucleotide
  Target: SCNA; (-) strand; PAM type: YTN; PAM sequence: TTT
tctgtttttttccattggca

SEQ ID NO: 45313 - DNA, 20 bp, Artificial Sequence
  Description of Artificial Sequence: Synthetic oligonucleotide
  Target: SCNA; (-) strand; PAM type: YTN; PAM sequence: TTG
attttctgtttttttccatt

SEQ ID NO: 45314 - DNA, 20 bp, Artificial Sequence
  Description of Artificial Sequence: Synthetic oligonucleotide
  Target: SCNA; (-) strand; PAM type: YTN; PAM sequence: CTT
gattttctgtttttttccat

SEQ ID NO: 45315 - DNA, 20 bp, Artificial Sequence
  Description of Artificial Sequence: Synthetic oligonucleotide
  Target: SCNA; (-) strand; PAM type: YTN; PAM sequence: CTC
ttgattttctgtttttttcc

SEQ ID NO: 45316 - DNA, 20 bp, Artificial Sequence
  Description of Artificial Sequence: Synthetic oligonucleotide
  Target: SCNA; (-) strand; PAM type: YTN; PAM sequence: TTA
gtaactcttgattttctgtt

SEQ ID NO: 45317 - DNA, 20 bp, Artificial Sequence
  Description of Artificial Sequence: Synthetic oligonucleotide
  Target: SCNA; (-) strand; PAM type: YTN; PAM sequence: TTT
agtaactcttgattttctgt

SEQ ID NO: 45318 - DNA, 20 bp, Artificial Sequence
  Description of Artificial Sequence: Synthetic oligonucleotide
  Target: SCNA; (-) strand; PAM type: YTN; PAM sequence: TTT
tagtaactcttgattttctg

SEQ ID NO: 45319 - DNA, 20 bp, Artificial Sequence
  Description of Artificial Sequence: Synthetic oligonucleotide
  Target: SCNA; (-) strand; PAM type: YTN; PAM sequence: TTT
ttagtaactcttgattttct

SEQ ID NO: 45320 - DNA, 20 bp, Artificial Sequence
  Description of Artificial Sequence: Synthetic oligonucleotide
  Target: SCNA; (-) strand; PAM type: YTN; PAM sequence: TTT
tttagtaactcttgattttc

SEQ ID NO: 45321 - DNA, 20 bp, Artificial Sequence
  Description of Artificial Sequence: Synthetic oligonucleotide
  Target: SCNA; (-) strand; PAM type: YTN; PAM sequence: TTT
ttttagtaactcttgatttt

SEQ ID NO: 45322 - DNA, 20 bp, Artificial Sequence
  Description of Artificial Sequence: Synthetic oligonucleotide
  Target: SCNA; (-) strand; PAM type: YTN; PAM sequence: TTT
tttttagtaactcttgattt

SEQ ID NO: 45323 - DNA, 20 bp, Artificial Sequence
  Description of Artificial Sequence: Synthetic oligonucleotide
  Target: SCNA; (-) strand; PAM type: YTN; PAM sequence: TTA
gtggttttttttagtaactc

SEQ ID NO: 45324 - DNA, 20 bp, Artificial Sequence
  Description of Artificial Sequence: Synthetic oligonucleotide
  Target: SCNA; (-) strand; PAM type: YTN; PAM sequence: TTA
aatggagttagtggtttttt

SEQ ID NO: 45325 - DNA, 20 bp, Artificial Sequence
  Description of Artificial Sequence: Synthetic oligonucleotide
  Target: SCNA; (-) strand; PAM type: YTN; PAM sequence: CTA
aaacaattaaatggagttag

SEQ ID NO: 45326 - DNA, 20 bp, Artificial Sequence
  Description of Artificial Sequence: Synthetic oligonucleotide
  Target: SCNA; (-) strand; PAM type: YTN; PAM sequence: TTA
gtctaaaacaattaaatgga

SEQ ID NO: 45327 - DNA, 20 bp, Artificial Sequence
  Description of Artificial Sequence: Synthetic oligonucleotide
  Target: SCNA; (-) strand; PAM type: YTN; PAM sequence: CTT
agtctaaaacaattaaatgg

SEQ ID NO: 45328 - DNA, 20 bp, Artificial Sequence
  Description of Artificial Sequence: Synthetic oligonucleotide
  Target: SCNA; (-) strand; PAM type: YTN; PAM sequence: TTC
ttagtctaaaacaattaaat

SEQ ID NO: 45329 - DNA, 20 bp, Artificial Sequence
  Description of Artificial Sequence: Synthetic oligonucleotide
  Target: SCNA; (-) strand; PAM type: YTN; PAM sequence: CTG
agggattcttagtctaaaac

SEQ ID NO: 45330 - DNA, 20 bp, Artificial Sequence
  Description of Artificial Sequence: Synthetic oligonucleotide
  Target: SCNA; (-) strand; PAM type: YTN; PAM sequence: CTA
ggtatcactgagggattctt

SEQ ID NO: 45331 - DNA, 20 bp, Artificial Sequence
  Description of Artificial Sequence: Synthetic oligonucleotide
  Target: SCNA; (-) strand; PAM type: YTN; PAM sequence: TTG
gctaggtatcactgagggat

SEQ ID NO: 45332 - DNA, 20 bp, Artificial Sequence
  Description of Artificial Sequence: Synthetic oligonucleotide
  Target: SCNA; (-) strand; PAM type: YTN; PAM sequence: TTT
ggctaggtatcactgaggga

SEQ ID NO: 45333 - DNA, 20 bp, Artificial Sequence
  Description of Artificial Sequence: Synthetic oligonucleotide
  Target: SCNA; (-) strand; PAM type: YTN; PAM sequence: TTT
tggctaggtatcactgaggg

SEQ ID NO: 45334 - DNA, 20 bp, Artificial Sequence
  Description of Artificial Sequence: Synthetic oligonucleotide
  Target: SCNA; (-) strand; PAM type: YTN; PAM sequence: CTA
attttggctaggtatcactg

SEQ ID NO: 45335 - DNA, 20 bp, Artificial Sequence
  Description of Artificial Sequence: Synthetic oligonucleotide
  Target: SCNA; (-) strand; PAM type: YTN; PAM sequence: CTG
aatcctaattttggctaggt

SEQ ID NO: 45336 - DNA, 20 bp, Artificial Sequence
  Description of Artificial Sequence: Synthetic oligonucleotide
  Target: SCNA; (-) strand; PAM type: YTN; PAM sequence: TTG
gatctgaatcctaattttgg

SEQ ID NO: 45337 - DNA, 20 bp, Artificial Sequence
  Description of Artificial Sequence: Synthetic oligonucleotide
  Target: SCNA; (-) strand; PAM type: YTN; PAM sequence: TTT
ggatctgaatcctaattttg

SEQ ID NO: 45338 - DNA, 20 bp, Artificial Sequence
  Description of Artificial Sequence: Synthetic oligonucleotide
  Target: SCNA; (-) strand; PAM type: YTN; PAM sequence: TTT
tggatctgaatcctaatttt

SEQ ID NO: 45339 - DNA, 20 bp, Artificial Sequence
  Description of Artificial Sequence: Synthetic oligonucleotide
  Target: SCNA; (-) strand; PAM type: YTN; PAM sequence: TTA
ttttggatctgaatcctaat

SEQ ID NO: 45340 - DNA, 20 bp, Artificial Sequence
  Description of Artificial Sequence: Synthetic oligonucleotide
  Target: SCNA; (-) strand; PAM type: YTN; PAM sequence: TTT
attttggatctgaatcctaa

SEQ ID NO: 45341 - DNA, 20 bp, Artificial Sequence
  Description of Artificial Sequence: Synthetic oligonucleotide
  Target: SCNA; (-) strand; PAM type: YTN; PAM sequence: TTT
tattttggatctgaatccta

SEQ ID NO: 45342 - DNA, 20 bp, Artificial Sequence
  Description of Artificial Sequence: Synthetic oligonucleotide
  Target: SCNA; (-) strand; PAM type: YTN; PAM sequence: CTT
ttattttggatctgaatcct

SEQ ID NO: 45343 - DNA, 20 bp, Artificial Sequence
  Description of Artificial Sequence: Synthetic oligonucleotide
  Target: SCNA; (-) strand; PAM type: YTN; PAM sequence: TTG
gggcaacagtatcttttatt

SEQ ID NO: 45344 - DNA, 20 bp, Artificial Sequence
  Description of Artificial Sequence: Synthetic oligonucleotide
  Target: SCNA; (-) strand; PAM type: YTN; PAM sequence: CTT
ggggcaacagtatcttttat

SEQ ID NO: 45345 - DNA, 20 bp, Artificial Sequence
  Description of Artificial Sequence: Synthetic oligonucleotide
  Target: SCNA; (-) strand; PAM type: YTN; PAM sequence: CTA
cttggggcaacagtatcttt

SEQ ID NO: 45346 - DNA, 20 bp, Artificial Sequence
  Description of Artificial Sequence: Synthetic oligonucleotide
  Target: SCNA; (-) strand; PAM type: YTN; PAM sequence: TTA
tgatatctacttggggcaac

SEQ ID NO: 45347 - DNA, 20 bp, Artificial Sequence
  Description of Artificial Sequence: Synthetic oligonucleotide
  Target: SCNA; (-) strand; PAM type: YTN; PAM sequence: TTG
taacaaattatgatatctac

SEQ ID NO: 45348 - DNA, 20 bp, Artificial Sequence
  Description of Artificial Sequence: Synthetic oligonucleotide
  Target: SCNA; (-) strand; PAM type: YTN; PAM sequence: TTA
ttgtaacaaattatgatatc

SEQ ID NO: 45349 - DNA, 20 bp, Artificial Sequence
  Description of Artificial Sequence: Synthetic oligonucleotide
  Target: SCNA; (-) strand; PAM type: YTN; PAM sequence: CTT
attgtaacaaattatgatat

SEQ ID NO: 45350 - DNA, 20 bp, Artificial Sequence
  Description of Artificial Sequence: Synthetic oligonucleotide
  Target: SCNA; (-) strand; PAM type: YTN; PAM sequence: TTA
cttattgtaacaaattatga

SEQ ID NO: 45351 - DNA, 20 bp, Artificial Sequence
  Description of Artificial Sequence: Synthetic oligonucleotide
  Target: SCNA; (-) strand; PAM type: YTN; PAM sequence: TTT
acttattgtaacaaattatg

SEQ ID NO: 45352 - DNA, 20 bp, Artificial Sequence
  Description of Artificial Sequence: Synthetic oligonucleotide
  Target: SCNA; (-) strand; PAM type: YTN; PAM sequence: TTT
tacttattgtaacaaattat

SEQ ID NO: 45353 - DNA, 20 bp, Artificial Sequence
  Description of Artificial Sequence: Synthetic oligonucleotide
  Target: SCNA; (-) strand; PAM type: YTN; PAM sequence: TTT
ttacttattgtaacaaatta

SEQ ID NO: 45354 - DNA, 20 bp, Artificial Sequence
  Description of Artificial Sequence: Synthetic oligonucleotide
  Target: SCNA; (-) strand; PAM type: YTN; PAM sequence: TTG
aataatatacatttttactt

SEQ ID NO: 45355 - DNA, 20 bp, Artificial Sequence
  Description of Artificial Sequence: Synthetic oligonucleotide
  Target: SCNA; (-) strand; PAM type: YTN; PAM sequence: TTA
gtattgaataatatacattt

SEQ ID NO: 45356 - DNA, 20 bp, Artificial Sequence
  Description of Artificial Sequence: Synthetic oligonucleotide
  Target: SCNA; (-) strand; PAM type: YTN; PAM sequence: TTT
agtattgaataatatacatt

SEQ ID NO: 45357 - DNA, 20 bp, Artificial Sequence
  Description of Artificial Sequence: Synthetic oligonucleotide
  Target: SCNA; (-) strand; PAM type: YTN; PAM sequence: TTG
aaatgtggtataacagttta

SEQ ID NO: 45358 - DNA, 20 bp, Artificial Sequence
  Description of Artificial Sequence: Synthetic oligonucleotide
  Target: SCNA; (-) strand; PAM type: YTN; PAM sequence: CTT
gaaatgtggtataacagttt

SEQ ID NO: 45359 - DNA, 20 bp, Artificial Sequence
  Description of Artificial Sequence: Synthetic oligonucleotide
  Target: SCNA; (-) strand; PAM type: YTN; PAM sequence: TTA
aaaacttgaaatgtggtata

SEQ ID NO: 45360 - DNA, 20 bp, Artificial Sequence
  Description of Artificial Sequence: Synthetic oligonucleotide
  Target: SCNA; (-) strand; PAM type: YTN; PAM sequence: TTT
aaaaacttgaaatgtggtat

SEQ ID NO: 45361 - DNA, 20 bp, Artificial Sequence
  Description of Artificial Sequence: Synthetic oligonucleotide
  Target: SCNA; (-) strand; PAM type: YTN; PAM sequence: TTT
taaaaacttgaaatgtggta

SEQ ID NO: 45362 - DNA, 20 bp, Artificial Sequence
  Description of Artificial Sequence: Synthetic oligonucleotide
  Target: SCNA; (-) strand; PAM type: YTN; PAM sequence: CTA
tgcataaaaggaagataaag

SEQ ID NO: 45363 - DNA, 20 bp, Artificial Sequence
  Description of Artificial Sequence: Synthetic oligonucleotide
  Target: SCNA; (-) strand; PAM type: YTN; PAM sequence: CTA
tctatgcataaaaggaagat

SEQ ID NO: 45364 - DNA, 20 bp, Artificial Sequence
  Description of Artificial Sequence: Synthetic oligonucleotide
  Target: SCNA; (-) strand; PAM type: YTN; PAM sequence: CTA
ctatctatgcataaaaggaa

SEQ ID NO: 45365 - DNA, 20 bp, Artificial Sequence
  Description of Artificial Sequence: Synthetic oligonucleotide
  Target: SCNA; (-) strand; PAM type: YTN; PAM sequence: CTA
ctactatctatgcataaaag

SEQ ID NO: 45366 - DNA, 20 bp, Artificial Sequence
  Description of Artificial Sequence: Synthetic oligonucleotide
  Target: SCNA; (-) strand; PAM type: YTN; PAM sequence: CTC
tactactatctatgcataaa

SEQ ID NO: 45367 - DNA, 20 bp, Artificial Sequence
  Description of Artificial Sequence: Synthetic oligonucleotide
  Target: SCNA; (-) strand; PAM type: YTN; PAM sequence: TTA
atgctctactactatctatg

SEQ ID NO: 45368 - DNA, 20 bp, Artificial Sequence
  Description of Artificial Sequence: Synthetic oligonucleotide
  Target: SCNA; (-) strand; PAM type: YTN; PAM sequence: CTT
aatgctctactactatctat

SEQ ID NO: 45369 - DNA, 20 bp, Artificial Sequence
  Description of Artificial Sequence: Synthetic oligonucleotide
  Target: SCNA; (-) strand; PAM type: YTN; PAM sequence: TTC
ttaatgctctactactatct

SEQ ID NO: 45370 - DNA, 20 bp, Artificial Sequence
  Description of Artificial Sequence: Synthetic oligonucleotide
  Target: SCNA; (-) strand; PAM type: YTN; PAM sequence: CTC
aggtgatagccatgcatgtt

SEQ ID NO: 45371 - DNA, 20 bp, Artificial Sequence
  Description of Artificial Sequence: Synthetic oligonucleotide
  Target: SCNA; (-) strand; PAM type: YTN; PAM sequence: TTA
caatcaacacctcaggtgat

SEQ ID NO: 45372 - DNA, 20 bp, Artificial Sequence
  Description of Artificial Sequence: Synthetic oligonucleotide
  Target: SCNA; (-) strand; PAM type: YTN; PAM sequence: TTT
acaatcaacacctcaggtga

SEQ ID NO: 45373 - DNA, 20 bp, Artificial Sequence
  Description of Artificial Sequence: Synthetic oligonucleotide
  Target: SCNA; (-) strand; PAM type: YTN; PAM sequence: CTA
ggaatgtgaatttacaatca

SEQ ID NO: 45374 - DNA, 20 bp, Artificial Sequence
  Description of Artificial Sequence: Synthetic oligonucleotide
  Target: SCNA; (-) strand; PAM type: YTN; PAM sequence: TTA
agagacaaagcctaggaatg

SEQ ID NO: 45375 - DNA, 20 bp, Artificial Sequence
  Description of Artificial Sequence: Synthetic oligonucleotide
  Target: SCNA; (-) strand; PAM type: YTN; PAM sequence: TTC
agtagttaagagacaaagcc

SEQ ID NO: 45376 - DNA, 20 bp, Artificial Sequence
  Description of Artificial Sequence: Synthetic oligonucleotide
  Target: SCNA; (-) strand; PAM type: YTN; PAM sequence: TTC
cgattcagtagttaagagac

SEQ ID NO: 45377 - DNA, 20 bp, Artificial Sequence
  Description of Artificial Sequence: Synthetic oligonucleotide
  Target: SCNA; (-) strand; PAM type: YTN; PAM sequence: CTC
ccaaagattccgattcagta

SEQ ID NO: 45378 - DNA, 20 bp, Artificial Sequence
  Description of Artificial Sequence: Synthetic oligonucleotide
  Target: SCNA; (-) strand; PAM type: YTN; PAM sequence: TTC
actcccaaagattccgattc

SEQ ID NO: 45379 - DNA, 20 bp, Artificial Sequence
  Description of Artificial Sequence: Synthetic oligonucleotide
  Target: SCNA; (-) strand; PAM type: YTN; PAM sequence: CTG
tcagttcactcccaaagatt

SEQ ID NO: 45380 - DNA, 20 bp, Artificial Sequence
  Description of Artificial Sequence: Synthetic oligonucleotide
  Target: SCNA; (-) strand; PAM type: YTN; PAM sequence: TTC
ctgtcagttcactcccaaag

SEQ ID NO: 45381 - DNA, 20 bp, Artificial Sequence
  Description of Artificial Sequence: Synthetic oligonucleotide
  Target: SCNA; (-) strand; PAM type: YTN; PAM sequence: TTC
agattcctgtcagttcactc

SEQ ID NO: 45382 - DNA, 20 bp, Artificial Sequence
  Description of Artificial Sequence: Synthetic oligonucleotide
  Target: SCNA; (-) strand; PAM type: YTN; PAM sequence: TTA
aaattcagattcctgtcagt

SEQ ID NO: 45383 - DNA, 20 bp, Artificial Sequence
  Description of Artificial Sequence: Synthetic oligonucleotide
  Target: SCNA; (-) strand; PAM type: YTN; PAM sequence: TTT
aaaattcagattcctgtcag

SEQ ID NO: 45384 - DNA, 20 bp, Artificial Sequence
  Description of Artificial Sequence: Synthetic oligonucleotide
  Target: SCNA; (-) strand; PAM type: YTN; PAM sequence: TTT
taaaattcagattcctgtca

SEQ ID NO: 45385 - DNA, 20 bp, Artificial Sequence
  Description of Artificial Sequence: Synthetic oligonucleotide
  Target: SCNA; (-) strand; PAM type: YTN; PAM sequence: TTT
ttaaaattcagattcctgtc

SEQ ID NO: 45386 - DNA, 20 bp, Artificial Sequence
  Description of Artificial Sequence: Synthetic oligonucleotide
  Target: SCNA; (-) strand; PAM type: YTN; PAM sequence: TTA
tttttaaaattcagattcct

SEQ ID NO: 45387 - DNA, 20 bp, Artificial Sequence
  Description of Artificial Sequence: Synthetic oligonucleotide
  Target: SCNA; (-) strand; PAM type: YTN; PAM sequence: CTT
atttttaaaattcagattcc

SEQ ID NO: 45388 - DNA, 20 bp, Artificial Sequence
  Description of Artificial Sequence: Synthetic oligonucleotide
  Target: SCNA; (-) strand; PAM type: YTN; PAM sequence: CTG
aagaccttatttttaaaatt

SEQ ID NO: 45389 - DNA, 20 bp, Artificial Sequence
  Description of Artificial Sequence: Synthetic oligonucleotide
  Target: SCNA; (-) strand; PAM type: YTN; PAM sequence: TTA
gatgcatgagaatcacctga

SEQ ID NO: 45390 - DNA, 20 bp, Artificial Sequence
  Description of Artificial Sequence: Synthetic oligonucleotide
  Target: SCNA; (-) strand; PAM type: YTN; PAM sequence: TTT
agatgcatgagaatcacctg

SEQ ID NO: 45391 - DNA, 20 bp, Artificial Sequence
  Description of Artificial Sequence: Synthetic oligonucleotide
  Target: SCNA; (-) strand; PAM type: YTN; PAM sequence: CTT
tagatgcatgagaatcacct

SEQ ID NO: 45392 - DNA, 20 bp, Artificial Sequence
  Description of Artificial Sequence: Synthetic oligonucleotide
  Target: SCNA; (-) strand; PAM type: YTN; PAM sequence: TTA
tctttagatgcatgagaatc

SEQ ID NO: 45393 - DNA, 20 bp, Artificial Sequence
  Description of Artificial Sequence: Synthetic oligonucleotide
  Target: SCNA; (-) strand; PAM type: YTN; PAM sequence: TTA
aagcagttatctttagatgc

SEQ ID NO: 45394 - DNA, 20 bp, Artificial Sequence
  Description of Artificial Sequence: Synthetic oligonucleotide
  Target: SCNA; (-) strand; PAM type: YTN; PAM sequence: TTA
tatattaaagcagttatctt

SEQ ID NO: 45395 - DNA, 20 bp, Artificial Sequence
  Description of Artificial Sequence: Synthetic oligonucleotide
  Target: SCNA; (-) strand; PAM type: YTN; PAM sequence: TTG
ttatatattaaagcagttat

SEQ ID NO: 45396 - DNA, 20 bp, Artificial Sequence
  Description of Artificial Sequence: Synthetic oligonucleotide
  Target: SCNA; (-) strand; PAM type: YTN; PAM sequence: TTT
gttatatattaaagcagtta

SEQ ID NO: 45397 - DNA, 20 bp, Artificial Sequence
  Description of Artificial Sequence: Synthetic oligonucleotide
  Target: SCNA; (-) strand; PAM type: YTN; PAM sequence: CTT
tgttatatattaaagcagtt

SEQ ID NO: 45398 - DNA, 20 bp, Artificial Sequence
  Description of Artificial Sequence: Synthetic oligonucleotide
  Target: SCNA; (-) strand; PAM type: YTN; PAM sequence: TTC
tttgttatatattaaagcag

SEQ ID NO: 45399 - DNA, 20 bp, Artificial Sequence
  Description of Artificial Sequence: Synthetic oligonucleotide
  Target: SCNA; (-) strand; PAM type: YTN; PAM sequence: TTT
ctttgttatatattaaagca

SEQ ID NO: 45400 - DNA, 20 bp, Artificial Sequence
  Description of Artificial Sequence: Synthetic oligonucleotide
  Target: SCNA; (-) strand; PAM type: YTN; PAM sequence: TTG
ggtttctttgttatatatta

SEQ ID NO: 45401 - DNA, 20 bp, Artificial Sequence
  Description of Artificial Sequence: Synthetic oligonucleotide
  Target: SCNA; (-) strand; PAM type: YTN; PAM sequence: TTT
gggtttctttgttatatatt

SEQ ID NO: 45402 - DNA, 20 bp, Artificial Sequence
  Description of Artificial Sequence: Synthetic oligonucleotide
  Target: SCNA; (-) strand; PAM type: YTN; PAM sequence: CTT
tgggtttctttgttatatat

SEQ ID NO: 45403 - DNA, 20 bp, Artificial Sequence
  Description of Artificial Sequence: Synthetic oligonucleotide
  Target: SCNA; (-) strand; PAM type: YTN; PAM sequence: CTC
tttgggtttctttgttatat

SEQ ID NO: 45404 - DNA, 20 bp, Artificial Sequence
  Description of Artificial Sequence: Synthetic oligonucleotide
  Target: SCNA; (-) strand; PAM type: YTN; PAM sequence: CTC
aagtgtccctctttgggttt

SEQ ID NO: 45405 - DNA, 20 bp, Artificial Sequence
  Description of Artificial Sequence: Synthetic oligonucleotide
  Target: SCNA; (-) strand; PAM type: YTN; PAM sequence: TTG
aaaaaatcctcaagtgtccc

SEQ ID NO: 45406 - DNA, 20 bp, Artificial Sequence
  Description of Artificial Sequence: Synthetic oligonucleotide
  Target: SCNA; (-) strand; PAM type: YTN; PAM sequence: CTG
caaaagaagatatattgaaa

SEQ ID NO: 45407 - DNA, 20 bp, Artificial Sequence
  Description of Artificial Sequence: Synthetic oligonucleotide
  Target: SCNA; (-) strand; PAM type: YTN; PAM sequence: CTC
tgcaaaagaagatatattga

SEQ ID NO: 45408 - DNA, 20 bp, Artificial Sequence
  Description of Artificial Sequence: Synthetic oligonucleotide
  Target: SCNA; (-) strand; PAM type: YTN; PAM sequence: TTA
atctctgcaaaagaagatat

SEQ ID NO: 45409 - DNA, 20 bp, Artificial Sequence
  Description of Artificial Sequence: Synthetic oligonucleotide
  Target: SCNA; (-) strand; PAM type: YTN; PAM sequence: CTA
ttaatctctgcaaaagaaga

SEQ ID NO: 45410 - DNA, 20 bp, Artificial Sequence
  Description of Artificial Sequence: Synthetic oligonucleotide
  Target: SCNA; (-) strand; PAM type: YTN; PAM sequence: TTC
actattaatctctgcaaaag

SEQ ID NO: 45411 - DNA, 20 bp, Artificial Sequence
  Description of Artificial Sequence: Synthetic oligonucleotide
  Target: SCNA; (-) strand; PAM type: YTN; PAM sequence: CTA
aacagcagataaaacaacat

SEQ ID NO: 45412 - DNA, 20 bp, Artificial Sequence
  Description of Artificial Sequence: Synthetic oligonucleotide
  Target: SCNA; (-) strand; PAM type: YTN; PAM sequence: TTC
taaacagcagataaaacaac

SEQ ID NO: 45413 - DNA, 20 bp, Artificial Sequence
  Description of Artificial Sequence: Synthetic oligonucleotide
  Target: SCNA; (-) strand; PAM type: YTN; PAM sequence: TTG
tcagtaaaagaagatgtatc

SEQ ID NO: 45414 - DNA, 20 bp, Artificial Sequence
  Description of Artificial Sequence: Synthetic oligonucleotide
  Target: SCNA; (-) strand; PAM type: YTN; PAM sequence: TTT
gtcagtaaaagaagatgtat

SEQ ID NO: 45415 - DNA, 20 bp, Artificial Sequence
  Description of Artificial Sequence: Synthetic oligonucleotide
  Target: SCNA; (-) strand; PAM type: YTN; PAM sequence: TTT
tgtcagtaaaagaagatgta

SEQ ID NO: 45416 - DNA, 20 bp, Artificial Sequence
  Description of Artificial Sequence: Synthetic oligonucleotide
  Target: SCNA; (-) strand; PAM type: YTN; PAM sequence: TTT
ttgtcagtaaaagaagatgt

SEQ ID NO: 45417 - DNA, 20 bp, Artificial Sequence
  Description of Artificial Sequence: Synthetic oligonucleotide
  Target: SCNA; (-) strand; PAM type: YTN; PAM sequence: CTT
tttgtcagtaaaagaagatg

SEQ ID NO: 45418 - DNA, 20 bp, Artificial Sequence
  Description of Artificial Sequence: Synthetic oligonucleotide
  Target: SCNA; (-) strand; PAM type: YTN; PAM sequence: CTC
cagagaaaagcctttttgtc

SEQ ID NO: 45419 - DNA, 20 bp, Artificial Sequence
  Description of Artificial Sequence: Synthetic oligonucleotide
  Target: SCNA; (-) strand; PAM type: YTN; PAM sequence: TTC
tccagagaaaagcctttttg

SEQ ID NO: 45420 - DNA, 20 bp, Artificial Sequence
  Description of Artificial Sequence: Synthetic oligonucleotide
  Target: SCNA; (-) strand; PAM type: YTN; PAM sequence: TTT
ctccagagaaaagccttttt

SEQ ID NO: 45421 - DNA, 20 bp, Artificial Sequence
  Description of Artificial Sequence: Synthetic oligonucleotide
  Target: SCNA; (-) strand; PAM type: YTN; PAM sequence: TTT
tctccagagaaaagcctttt

SEQ ID NO: 45422 - DNA, 20 bp, Artificial Sequence
  Description of Artificial Sequence: Synthetic oligonucleotide
  Target: SCNA; (-) strand; PAM type: YTN; PAM sequence: TTA
ttttctccagagaaaagcct

SEQ ID NO: 45423 - DNA, 20 bp, Artificial Sequence
  Description of Artificial Sequence: Synthetic oligonucleotide
  Target: SCNA; (-) strand; PAM type: YTN; PAM sequence: TTT
attttctccagagaaaagcc

SEQ ID NO: 45424 - DNA, 20 bp, Artificial Sequence
  Description of Artificial Sequence: Synthetic oligonucleotide
  Target: SCNA; (-) strand; PAM type: YTN; PAM sequence: TTT
tattttctccagagaaaagc

SEQ ID NO: 45425 - DNA, 20 bp, Artificial Sequence
  Description of Artificial Sequence: Synthetic oligonucleotide
  Target: SCNA; (-) strand; PAM type: YTN; PAM sequence: TTT
ttattttctccagagaaaag

SEQ ID NO: 45426 - DNA, 20 bp, Artificial Sequence
  Description of Artificial Sequence: Synthetic oligonucleotide
  Target: SCNA; (-) strand; PAM type: YTN; PAM sequence: CTT
tttattttctccagagaaaa

SEQ ID NO: 45427 - DNA, 20 bp, Artificial Sequence
  Description of Artificial Sequence: Synthetic oligonucleotide
  Target: SCNA; (-) strand; PAM type: YTN; PAM sequence: CTG
cctttttattttctccagag

SEQ ID NO: 45428 - DNA, 20 bp, Artificial Sequence
  Description of Artificial Sequence: Synthetic oligonucleotide
  Target: SCNA; (-) strand; PAM type: YTN; PAM sequence: CTC
agggaaagctgcctttttat

SEQ ID NO: 45429 - DNA, 20 bp, Artificial Sequence
  Description of Artificial Sequence: Synthetic oligonucleotide
  Target: SCNA; (-) strand; PAM type: YTN; PAM sequence: CTC
tcagggaaagctgccttttt

SEQ ID NO: 45430 - DNA, 20 bp, Artificial Sequence
  Description of Artificial Sequence: Synthetic oligonucleotide
  Target: SCNA; (-) strand; PAM type: YTN; PAM sequence: CTA
gaagtgtgtgctctcaggga

SEQ ID NO: 45431 - DNA, 20 bp, Artificial Sequence
  Description of Artificial Sequence: Synthetic oligonucleotide
  Target: SCNA; (-) strand; PAM type: YTN; PAM sequence: TTG
ctagaagtgtgtgctctcag

SEQ ID NO: 45432 - DNA, 20 bp, Artificial Sequence
  Description of Artificial Sequence: Synthetic oligonucleotide
  Target: SCNA; (-) strand; PAM type: YTN; PAM sequence: TTT
gctagaagtgtgtgctctca

SEQ ID NO: 45433 - DNA, 20 bp, Artificial Sequence
  Description of Artificial Sequence: Synthetic oligonucleotide
  Target: SCNA; (-) strand; PAM type: YTN; PAM sequence: CTT
tgctagaagtgtgtgctctc

SEQ ID NO: 45434 - DNA, 20 bp, Artificial Sequence
  Description of Artificial Sequence: Synthetic oligonucleotide
  Target: SCNA; (-) strand; PAM type: YTN; PAM sequence: TTG
gggctttgctagaagtgtgt

SEQ ID NO: 45435 - DNA, 20 bp, Artificial Sequence
  Description of Artificial Sequence: Synthetic oligonucleotide
  Target: SCNA; (-) strand; PAM type: YTN; PAM sequence: TTA
gagtcatatggattggggct

SEQ ID NO: 45436 - DNA, 20 bp, Artificial Sequence
  Description of Artificial Sequence: Synthetic oligonucleotide
  Target: SCNA; (-) strand; PAM type: YTN; PAM sequence: CTT
agagtcatatggattggggc

SEQ ID NO: 45437 - DNA, 20 bp, Artificial Sequence
  Description of Artificial Sequence: Synthetic oligonucleotide
  Target: SCNA; (-) strand; PAM type: YTN; PAM sequence: CTG
tcttagagtcatatggattg

SEQ ID NO: 45438 - DNA, 20 bp, Artificial Sequence
  Description of Artificial Sequence: Synthetic oligonucleotide
  Target: SCNA; (-) strand; PAM type: YTN; PAM sequence: CTC
tgtcttagagtcatatggat

SEQ ID NO: 45439 - DNA, 20 bp, Artificial Sequence
  Description of Artificial Sequence: Synthetic oligonucleotide
  Target: SCNA; (-) strand; PAM type: YTN; PAM sequence: CTA
gaaggtggaaatcactctgt

SEQ ID NO: 45440 - DNA, 20 bp, Artificial Sequence
  Description of Artificial Sequence: Synthetic oligonucleotide
  Target: SCNA; (-) strand; PAM type: YTN; PAM sequence: TTG
caagaaagtaaggactagaa

SEQ ID NO: 45441 - DNA, 20 bp, Artificial Sequence
  Description of Artificial Sequence: Synthetic oligonucleotide
  Target: SCNA; (-) strand; PAM type: YTN; PAM sequence: TTT
gcaagaaagtaaggactaga

SEQ ID NO: 45442 - DNA, 20 bp, Artificial Sequence
  Description of Artificial Sequence: Synthetic oligonucleotide
  Target: SCNA; (-) strand; PAM type: YTN; PAM sequence: TTT
tgcaagaaagtaaggactag

SEQ ID NO: 45443 - DNA, 20 bp, Artificial Sequence
  Description of Artificial Sequence: Synthetic oligonucleotide
  Target: SCNA; (-) strand; PAM type: YTN; PAM sequence: CTT
ttgcaagaaagtaaggacta

SEQ ID NO: 45444 - DNA, 20 bp, Artificial Sequence
  Description of Artificial Sequence: Synthetic oligonucleotide
  Target: SCNA; (-) strand; PAM type: YTN; PAM sequence: TTG
aaagccccttttgcaagaaa

SEQ ID NO: 45445 - DNA, 20 bp, Artificial Sequence
  Description of Artificial Sequence: Synthetic oligonucleotide
  Target: SCNA; (-) strand; PAM type: YTN; PAM sequence: TTT
gaaagccccttttgcaagaa

SEQ ID NO: 45446 - DNA, 20 bp, Artificial Sequence
  Description of Artificial Sequence: Synthetic oligonucleotide
  Target: SCNA; (-) strand; PAM type: YTN; PAM sequence: TTG
ataacaccagtaataaaaga

SEQ ID NO: 45447 - DNA, 20 bp, Artificial Sequence
  Description of Artificial Sequence: Synthetic oligonucleotide
  Target: SCNA; (-) strand; PAM type: YTN; PAM sequence: CTG
caagcatcccattgataaca

SEQ ID NO: 45448 - DNA, 20 bp, Artificial Sequence
  Description of Artificial Sequence: Synthetic oligonucleotide
  Target: SCNA; (-) strand; PAM type: YTN; PAM sequence: CTG
ctgcaagcatcccattgata

SEQ ID NO: 45449 - DNA, 20 bp, Artificial Sequence
  Description of Artificial Sequence: Synthetic oligonucleotide
  Target: SCNA; (-) strand; PAM type: YTN; PAM sequence: TTA
agctgctgcaagcatcccat

SEQ ID NO: 45450 - DNA, 20 bp, Artificial Sequence
  Description of Artificial Sequence: Synthetic oligonucleotide
  Target: SCNA; (-) strand; PAM type: YTN; PAM sequence: CTT
aagctgctgcaagcatccca

SEQ ID NO: 45451 - DNA, 20 bp, Artificial Sequence
  Description of Artificial Sequence: Synthetic oligonucleotide
  Target: SCNA; (-) strand; PAM type: YTN; PAM sequence: TTA
tccacatacttaagctgctg

SEQ ID NO: 45452 - DNA, 20 bp, Artificial Sequence
  Description of Artificial Sequence: Synthetic oligonucleotide
  Target: SCNA; (-) strand; PAM type: YTN; PAM sequence: TTT
atccacatacttaagctgct

SEQ ID NO: 45453 - DNA, 20 bp, Artificial Sequence
  Description of Artificial Sequence: Synthetic oligonucleotide
  Target: SCNA; (-) strand; PAM type: YTN; PAM sequence: CTT
tatccacatacttaagctgc

SEQ ID NO: 45454 - DNA, 20 bp, Artificial Sequence
  Description of Artificial Sequence: Synthetic oligonucleotide
  Target: SCNA; (-) strand; PAM type: YTN; PAM sequence: TTC
tttatccacatacttaagct

SEQ ID NO: 45455 - DNA, 20 bp, Artificial Sequence
  Description of Artificial Sequence: Synthetic oligonucleotide
  Target: SCNA; (-) strand; PAM type: YTN; PAM sequence: CTT
ctttatccacatacttaagc

SEQ ID NO: 45456 - DNA, 20 bp, Artificial Sequence
  Description of Artificial Sequence: Synthetic oligonucleotide
  Target: SCNA; (-) strand; PAM type: YTN; PAM sequence: TTC
cttctttatccacatactta

SEQ ID NO: 45457 - DNA, 20 bp, Artificial Sequence
  Description of Artificial Sequence: Synthetic oligonucleotide
  Target: SCNA; (-) strand; PAM type: YTN; PAM sequence: TTG
tgcattccttctttatccac

SEQ ID NO: 45458 - DNA, 20 bp, Artificial Sequence
  Description of Artificial Sequence: Synthetic oligonucleotide
  Target: SCNA; (-) strand; PAM type: YTN; PAM sequence: TTC
agtaccgtatattgtgcatt

SEQ ID NO: 45459 - DNA, 20 bp, Artificial Sequence
  Description of Artificial Sequence: Synthetic oligonucleotide
  Target: SCNA; (-) strand; PAM type: YTN; PAM sequence: TTA
aaaatattcagtaccgtata

SEQ ID NO: 45460 - DNA, 20 bp, Artificial Sequence
  Description of Artificial Sequence: Synthetic oligonucleotide
  Target: SCNA; (-) strand; PAM type: YTN; PAM sequence: TTT
aaaaatattcagtaccgtat

SEQ ID NO: 45461 - DNA, 20 bp, Artificial Sequence
  Description of Artificial Sequence: Synthetic oligonucleotide
  Target: SCNA; (-) strand; PAM type: YTN; PAM sequence: TTT
taaaaatattcagtaccgta

SEQ ID NO: 45462 - DNA, 20 bp, Artificial Sequence
  Description of Artificial Sequence: Synthetic oligonucleotide
  Target: SCNA; (-) strand; PAM type: YTN; PAM sequence: TTT
ttaaaaatattcagtaccgt

SEQ ID NO: 45463 - DNA, 20 bp, Artificial Sequence
  Description of Artificial Sequence: Synthetic oligonucleotide
  Target: SCNA; (-) strand; PAM type: YTN; PAM sequence: CTT
tttaaaaatattcagtaccg

SEQ ID NO: 45464 - DNA, 20 bp, Artificial Sequence
  Description of Artificial Sequence: Synthetic oligonucleotide
  Target: SCNA; (-) strand; PAM type: YTN; PAM sequence: CTG
aaagaccactttttaaaaat

SEQ ID NO: 45465 - DNA, 20 bp, Artificial Sequence
  Description of Artificial Sequence: Synthetic oligonucleotide
  Target: SCNA; (-) strand; PAM type: YTN; PAM sequence: TTC
tgaaagaccactttttaaaa

SEQ ID NO: 45466 - DNA, 20 bp, Artificial Sequence
  Description of Artificial Sequence: Synthetic oligonucleotide
  Target: SCNA; (-) strand; PAM type: YTN; PAM sequence: CTA
agcatgggcccccacacata

SEQ ID NO: 45467 - DNA, 20 bp, Artificial Sequence
  Description of Artificial Sequence: Synthetic oligonucleotide
  Target: SCNA; (-) strand; PAM type: YTN; PAM sequence: CTG
gcatgcacatatgcctaagc

SEQ ID NO: 45468 - DNA, 20 bp, Artificial Sequence
  Description of Artificial Sequence: Synthetic oligonucleotide
  Target: SCNA; (-) strand; PAM type: YTN; PAM sequence: TTC
aacataaataacacactggc

SEQ ID NO: 45469 - DNA, 20 bp, Artificial Sequence
  Description of Artificial Sequence: Synthetic oligonucleotide
  Target: SCNA; (-) strand; PAM type: YTN; PAM sequence: TTT
caacataaataacacactgg

SEQ ID NO: 45470 - DNA, 20 bp, Artificial Sequence
  Description of Artificial Sequence: Synthetic oligonucleotide
  Target: SCNA; (-) strand; PAM type: YTN; PAM sequence: TTG
gtttcaacataaataacaca

SEQ ID NO: 45471 - DNA, 20 bp, Artificial Sequence
  Description of Artificial Sequence: Synthetic oligonucleotide
  Target: SCNA; (-) strand; PAM type: YTN; PAM sequence: TTA
atgtaaaacattggtttcaa

SEQ ID NO: 45472 - DNA, 20 bp, Artificial Sequence
  Description of Artificial Sequence: Synthetic oligonucleotide
  Target: SCNA; (-) strand; PAM type: YTN; PAM sequence: TTC
cagccattaatgtaaaacat

SEQ ID NO: 45473 - DNA, 20 bp, Artificial Sequence
  Description of Artificial Sequence: Synthetic oligonucleotide
  Target: SCNA; (-) strand; PAM type: YTN; PAM sequence: CTG
gaattccagccattaatgta

SEQ ID NO: 45474 - DNA, 20 bp, Artificial Sequence
  Description of Artificial Sequence: Synthetic oligonucleotide
  Target: SCNA; (-) strand; PAM type: YTN; PAM sequence: TTC
tggaattccagccattaatg

SEQ ID NO: 45475 - DNA, 20 bp, Artificial Sequence
  Description of Artificial Sequence: Synthetic oligonucleotide
  Target: SCNA; (-) strand; PAM type: YTN; PAM sequence: TTT
ctggaattccagccattaat

SEQ ID NO: 45476 - DNA, 20 bp, Artificial Sequence
  Description of Artificial Sequence: Synthetic oligonucleotide
  Target: SCNA; (-) strand; PAM type: YTN; PAM sequence: TTT
tctggaattccagccattaa

SEQ ID NO: 45477 - DNA, 20 bp, Artificial Sequence
  Description of Artificial Sequence: Synthetic oligonucleotide
  Target: SCNA; (-) strand; PAM type: YTN; PAM sequence: TTT
ttctggaattccagccatta

SEQ ID NO: 45478 - DNA, 20 bp, Artificial Sequence
  Description of Artificial Sequence: Synthetic oligonucleotide
  Target: SCNA; (-) strand; PAM type: YTN; PAM sequence: TTA
tttttctggaattccagcca

SEQ ID NO: 45479 - DNA, 20 bp, Artificial Sequence
  Description of Artificial Sequence: Synthetic oligonucleotide
  Target: SCNA; (-) strand; PAM type: YTN; PAM sequence: CTT
atttttctggaattccagcc

SEQ ID NO: 45480 - DNA, 20 bp, Artificial Sequence
  Description of Artificial Sequence: Synthetic oligonucleotide
  Target: SCNA; (-) strand; PAM type: YTN; PAM sequence: TTC
ttatttttctggaattccag

SEQ ID NO: 45481 - DNA, 20 bp, Artificial Sequence
  Description of Artificial Sequence: Synthetic oligonucleotide
  Target: SCNA; (-) strand; PAM type: YTN; PAM sequence: TTT
cttatttttctggaattcca

SEQ ID NO: 45482 - DNA, 20 bp, Artificial Sequence
  Description of Artificial Sequence: Synthetic oligonucleotide
  Target: SCNA; (-) strand; PAM type: YTN; PAM sequence: TTT
tcttatttttctggaattcc

SEQ ID NO: 45483 - DNA, 20 bp, Artificial Sequence
  Description of Artificial Sequence: Synthetic oligonucleotide
  Target: SCNA; (-) strand; PAM type: YTN; PAM sequence: TTA
gaaaatacaaatattttctt

SEQ ID NO: 45484 - DNA, 20 bp, Artificial Sequence
  Description of Artificial Sequence: Synthetic oligonucleotide
  Target: SCNA; (-) strand; PAM type: YTN; PAM sequence: TTT
agaaaatacaaatattttct

SEQ ID NO: 45485 - DNA, 20 bp, Artificial Sequence
  Description of Artificial Sequence: Synthetic oligonucleotide
  Target: SCNA; (-) strand; PAM type: YTN; PAM sequence: TTA
atggtttagaaaatacaaat

SEQ ID NO: 45486 - DNA, 20 bp, Artificial Sequence
  Description of Artificial Sequence: Synthetic oligonucleotide
  Target: SCNA; (-) strand; PAM type: YTN; PAM sequence: TTT
aatggtttagaaaatacaaa

SEQ ID NO: 45487 - DNA, 20 bp, Artificial Sequence
  Description of Artificial Sequence: Synthetic oligonucleotide
  Target: SCNA; (-) strand; PAM type: YTN; PAM sequence: TTT
taatggtttagaaaatacaa

SEQ ID NO: 45488 - DNA, 20 bp, Artificial Sequence
  Description of Artificial Sequence: Synthetic oligonucleotide
  Target: SCNA; (-) strand; PAM type: YTN; PAM sequence: CTT
ttaatggtttagaaaataca

SEQ ID NO: 45489 - DNA, 20 bp, Artificial Sequence
  Description of Artificial Sequence: Synthetic oligonucleotide
  Target: SCNA; (-) strand; PAM type: YTN; PAM sequence: CTA
aacttttaatggtttagaaa

SEQ ID NO: 45490 - DNA, 20 bp, Artificial Sequence
  Description of Artificial Sequence: Synthetic oligonucleotide
  Target: SCNA; (-) strand; PAM type: YTN; PAM sequence: TTC
cactaaacttttaatggttt

SEQ ID NO: 45491 - DNA, 20 bp, Artificial Sequence
  Description of Artificial Sequence: Synthetic oligonucleotide
  Target: SCNA; (-) strand; PAM type: YTN; PAM sequence: TTA
atgagttccactaaactttt

SEQ ID NO: 45492 - DNA, 20 bp, Artificial Sequence
  Description of Artificial Sequence: Synthetic oligonucleotide
  Target: SCNA; (-) strand; PAM type: YTN; PAM sequence: CTA
ttaatgagttccactaaact

SEQ ID NO: 45493 - DNA, 20 bp, Artificial Sequence
  Description of Artificial Sequence: Synthetic oligonucleotide
  Target: SCNA; (-) strand; PAM type: YTN; PAM sequence: CTG
aaatatacagagagatgata

SEQ ID NO: 45494 - DNA, 20 bp, Artificial Sequence
  Description of Artificial Sequence: Synthetic oligonucleotide
  Target: SCNA; (-) strand; PAM type: YTN; PAM sequence: TTC
tgaaatatacagagagatga

SEQ ID NO: 45495 - DNA, 20 bp, Artificial Sequence
  Description of Artificial Sequence: Synthetic oligonucleotide
  Target: SCNA; (-) strand; PAM type: YTN; PAM sequence: CTT
ctgaaatatacagagagatg

SEQ ID NO: 45496 - DNA, 20 bp, Artificial Sequence
  Description of Artificial Sequence: Synthetic oligonucleotide
  Target: SCNA; (-) strand; PAM type: YTN; PAM sequence: TTA
aaatgtacttctgaaatata

SEQ ID NO: 45497 - DNA, 20 bp, Artificial Sequence
  Description of Artificial Sequence: Synthetic oligonucleotide
  Target: SCNA; (-) strand; PAM type: YTN; PAM sequence: CTT
aaaatgtacttctgaaatat

SEQ ID NO: 45498 - DNA, 20 bp, Artificial Sequence
  Description of Artificial Sequence: Synthetic oligonucleotide
  Target: SCNA; (-) strand; PAM type: YTN; PAM sequence: TTA
cacttaaaatgtacttctga

SEQ ID NO: 45499 - DNA, 20 bp, Artificial Sequence
  Description of Artificial Sequence: Synthetic oligonucleotide
  Target: SCNA; (-) strand; PAM type: YTN; PAM sequence: CTG
ttacacttaaaatgtacttc

SEQ ID NO: 45500 - DNA, 20 bp, Artificial Sequence
  Description of Artificial Sequence: Synthetic oligonucleotide
  Target: SCNA; (-) strand; PAM type: YTN; PAM sequence: CTA
gctgttacacttaaaatgta

SEQ ID NO: 45501 - DNA, 20 bp, Artificial Sequence
  Description of Artificial Sequence: Synthetic oligonucleotide
  Target: SCNA; (-) strand; PAM type: YTN; PAM sequence: TTA
cccctagctgttacacttaa

SEQ ID NO: 45502 - DNA, 20 bp, Artificial Sequence
  Description of Artificial Sequence: Synthetic oligonucleotide
  Target: SCNA; (-) strand; PAM type: YTN; PAM sequence: TTT
acccctagctgttacactta

SEQ ID NO: 45503 - DNA, 20 bp, Artificial Sequence
  Description of Artificial Sequence: Synthetic oligonucleotide
  Target: SCNA; (-) strand; PAM type: YTN; PAM sequence: TTA
tgaaagtttacccctagctg

SEQ ID NO: 45504 - DNA, 20 bp, Artificial Sequence
  Description of Artificial Sequence: Synthetic oligonucleotide
  Target: SCNA; (-) strand; PAM type: YTN; PAM sequence: TTC
aaatcatacagttatgaaag

SEQ ID NO: 45505 - DNA, 20 bp, Artificial Sequence
  Description of Artificial Sequence: Synthetic oligonucleotide
  Target: SCNA; (-) strand; PAM type: YTN; PAM sequence: TTG
tgttcaaatcatacagttat

SEQ ID NO: 45506 - DNA, 20 bp, Artificial Sequence
  Description of Artificial Sequence: Synthetic oligonucleotide
  Target: SCNA; (-) strand; PAM type: YTN; PAM sequence: CTT
gtgttcaaatcatacagtta

SEQ ID NO: 45507 - DNA, 20 bp, Artificial Sequence
  Description of Artificial Sequence: Synthetic oligonucleotide
  Target: SCNA; (-) strand; PAM type: YTN; PAM sequence: TTG
tacttgtgttcaaatcatac

SEQ ID NO: 45508 - DNA, 20 bp, Artificial Sequence
  Description of Artificial Sequence: Synthetic oligonucleotide
  Target: SCNA; (-) strand; PAM type: YTN; PAM sequence: CTT
gtacttgtgttcaaatcata

SEQ ID NO: 45509 - DNA, 20 bp, Artificial Sequence
  Description of Artificial Sequence: Synthetic oligonucleotide
  Target: SCNA; (-) strand; PAM type: YTN; PAM sequence: TTC
ttgtacttgtgttcaaatca

SEQ ID NO: 45510 - DNA, 20 bp, Artificial Sequence
  Description of Artificial Sequence: Synthetic oligonucleotide
  Target: SCNA; (-) strand; PAM type: YTN; PAM sequence: TTT
cttgtacttgtgttcaaatc

SEQ ID NO: 45511 - DNA, 20 bp, Artificial Sequence
  Description of Artificial Sequence: Synthetic oligonucleotide
  Target: SCNA; (-) strand; PAM type: YTN; PAM sequence: TTG
aatatttcttgtacttgtgt

SEQ ID NO: 45512 - DNA, 20 bp, Artificial Sequence
  Description of Artificial Sequence: Synthetic oligonucleotide
  Target: SCNA; (-) strand; PAM type: YTN; PAM sequence: CTT
gaatatttcttgtacttgtg

SEQ ID NO: 45513 - DNA, 20 bp, Artificial Sequence
  Description of Artificial Sequence: Synthetic oligonucleotide
  Target: SCNA; (-) strand; PAM type: YTN; PAM sequence: CTA
aaaaaaaaaaagaaaagaaa

SEQ ID NO: 45514 - DNA, 20 bp, Artificial Sequence
  Description of Artificial Sequence: Synthetic oligonucleotide
  Target: SCNA; (-) strand; PAM type: YTN; PAM sequence: TTC
atctaaaaaaaaaaaagaaa

SEQ ID NO: 45515 - DNA, 20 bp, Artificial Sequence
  Description of Artificial Sequence: Synthetic oligonucleotide
  Target: SCNA; (-) strand; PAM type: YTN; PAM sequence: CTT
catctaaaaaaaaaaaagaa

SEQ ID NO: 45516 - DNA, 20 bp, Artificial Sequence
  Description of Artificial Sequence: Synthetic oligonucleotide
  Target: SCNA; (-) strand; PAM type: YTN; PAM sequence: CTA
cggcgataagagtgagactt

SEQ ID NO: 45517 - DNA, 20 bp, Artificial Sequence
  Description of Artificial Sequence: Synthetic oligonucleotide
  Target: SCNA; (-) strand; PAM type: YTN; PAM sequence: CTA
tagctacggcgataagagtg

SEQ ID NO: 45518 - DNA, 20 bp, Artificial Sequence
  Description of Artificial Sequence: Synthetic oligonucleotide
  Target: SCNA; (-) strand; PAM type: YTN; PAM sequence: TTG
cactatagctacggcgataa

SEQ ID NO: 45519 - DNA, 20 bp, Artificial Sequence
  Description of Artificial Sequence: Synthetic oligonucleotide
  Target: SCNA; (-) strand; PAM type: YTN; PAM sequence: CTG
agacagcgccattgcactat

SEQ ID NO: 45520 - DNA, 20 bp, Artificial Sequence
  Description of Artificial Sequence: Synthetic oligonucleotide
  Target: SCNA; (-) strand; PAM type: YTN; PAM sequence: TTG
cagtgagctgagacagcgcc

SEQ ID NO: 45521 - DNA, 20 bp, Artificial Sequence
  Description of Artificial Sequence: Synthetic oligonucleotide
  Target: SCNA; (-) strand; PAM type: YTN; PAM sequence: CTA
ggaggcggaggttgcagtga

SEQ ID NO: 45522 - DNA, 20 bp, Artificial Sequence
  Description of Artificial Sequence: Synthetic oligonucleotide
  Target: SCNA; (-) strand; PAM type: YTN; PAM sequence: TTA
acctaggaggcggaggttgc

SEQ ID NO: 45523 - DNA, 20 bp, Artificial Sequence
  Description of Artificial Sequence: Synthetic oligonucleotide
  Target: SCNA; (-) strand; PAM type: YTN; PAM sequence: TTT
aacctaggaggcggaggttg

SEQ ID NO: 45524 - DNA, 20 bp, Artificial Sequence
  Description of Artificial Sequence: Synthetic oligonucleotide
  Target: SCNA; (-) strand; PAM type: YTN; PAM sequence: CTT
taacctaggaggcggaggtt

SEQ ID NO: 45525 - DNA, 20 bp, Artificial Sequence
  Description of Artificial Sequence: Synthetic oligonucleotide
  Target: SCNA; (-) strand; PAM type: YTN; PAM sequence: TTG
ctttaacctaggaggcggag

SEQ ID NO: 45526 - DNA, 20 bp, Artificial Sequence
  Description of Artificial Sequence: Synthetic oligonucleotide
  Target: SCNA; (-) strand; PAM type: YTN; PAM sequence: CTG
aggcaggagaattgctttaa

SEQ ID NO: 45527 - DNA, 20 bp, Artificial Sequence
  Description of Artificial Sequence: Synthetic oligonucleotide
  Target: SCNA; (-) strand; PAM type: YTN; PAM sequence: CTA
cggaggctgaggcaggagaa

SEQ ID NO: 45528 - DNA, 20 bp, Artificial Sequence
  Description of Artificial Sequence: Synthetic oligonucleotide
  Target: SCNA; (-) strand; PAM type: YTN; PAM sequence: CTA
ctacggaggctgaggcagga

SEQ ID NO: 45529 - DNA, 20 bp, Artificial Sequence
  Description of Artificial Sequence: Synthetic oligonucleotide
  Target: SCNA; (-) strand; PAM type: YTN; PAM sequence: CTG
taatcccagctactacggag

SEQ ID NO: 45530 - DNA, 20 bp, Artificial Sequence
  Description of Artificial Sequence: Synthetic oligonucleotide
  Target: SCNA; (-) strand; PAM type: YTN; PAM sequence: TTA
gtgggtgtggtggcaggatc

SEQ ID NO: 45531 - DNA, 20 bp, Artificial Sequence
  Description of Artificial Sequence: Synthetic oligonucleotide
  Target: SCNA; (-) strand; PAM type: YTN; PAM sequence: CTA
ccaaaaatacaaaaattagt

SEQ ID NO: 45532 - DNA, 20 bp, Artificial Sequence
  Description of Artificial Sequence: Synthetic oligonucleotide
  Target: SCNA; (-) strand; PAM type: YTN; PAM sequence: CTC
taccaaaaatacaaaaatta

SEQ ID NO: 45533 - DNA, 20 bp, Artificial Sequence
  Description of Artificial Sequence: Synthetic oligonucleotide
  Target: SCNA; (-) strand; PAM type: YTN; PAM sequence: TTC
tctaccaaaaatacaaaaat

SEQ ID NO: 45534 - DNA, 20 bp, Artificial Sequence
  Description of Artificial Sequence: Synthetic oligonucleotide
  Target: SCNA; (-) strand; PAM type: YTN; PAM sequence: CTG
tccaacatggtgaaacccat

SEQ ID NO: 45535 - DNA, 20 bp, Artificial Sequence
  Description of Artificial Sequence: Synthetic oligonucleotide
  Target: SCNA; (-) strand; PAM type: YTN; PAM sequence: TTC
atgaccagcctgtccaacat

SEQ ID NO: 45536 - DNA, 20 bp, Artificial Sequence
  Description of Artificial Sequence: Synthetic oligonucleotide
  Target: SCNA; (-) strand; PAM type: YTN; PAM sequence: CTG
aggtcaggagttcatgacca

SEQ ID NO: 45537 - DNA, 20 bp, Artificial Sequence
  Description of Artificial Sequence: Synthetic oligonucleotide
  Target: SCNA; (-) strand; PAM type: YTN; PAM sequence: TTG
ggaggccaaggcgggtggat

SEQ ID NO: 45538 - DNA, 20 bp, Artificial Sequence
  Description of Artificial Sequence: Synthetic oligonucleotide
  Target: SCNA; (-) strand; PAM type: YTN; PAM sequence: TTT
gggaggccaaggcgggtgga

SEQ ID NO: 45539 - DNA, 20 bp, Artificial Sequence
  Description of Artificial Sequence: Synthetic oligonucleotide
  Target: SCNA; (-) strand; PAM type: YTN; PAM sequence: CTT
tgggaggccaaggcgggtgg

SEQ ID NO: 45540 - DNA, 20 bp, Artificial Sequence
  Description of Artificial Sequence: Synthetic oligonucleotide
  Target: SCNA; (-) strand; PAM type: YTN; PAM sequence: CTG
taatccagcactttgggagg

SEQ ID NO: 45541 - DNA, 20 bp, Artificial Sequence
  Description of Artificial Sequence: Synthetic oligonucleotide
  Target: SCNA; (-) strand; PAM type: YTN; PAM sequence: TTG
gccaggcgcggtggacacct

SEQ ID NO: 45542 - DNA, 20 bp, Artificial Sequence
  Description of Artificial Sequence: Synthetic oligonucleotide
  Target: SCNA; (-) strand; PAM type: YTN; PAM sequence: TTG
aatattggccaggcgcggtg

SEQ ID NO: 45543 - DNA, 20 bp, Artificial Sequence
  Description of Artificial Sequence: Synthetic oligonucleotide
  Target: SCNA; (-) strand; PAM type: YTN; PAM sequence: CTT
gaatattggccaggcgcggt

SEQ ID NO: 45544 - DNA, 20 bp, Artificial Sequence
  Description of Artificial Sequence: Synthetic oligonucleotide
  Target: SCNA; (-) strand; PAM type: YTN; PAM sequence: CTG
tgtaaacttgaatattggcc

SEQ ID NO: 45545 - DNA, 20 bp, Artificial Sequence
  Description of Artificial Sequence: Synthetic oligonucleotide
  Target: SCNA; (-) strand; PAM type: YTN; PAM sequence: TTC
ctgtgtaaacttgaatattg

SEQ ID NO: 45546 - DNA, 20 bp, Artificial Sequence
  Description of Artificial Sequence: Synthetic oligonucleotide
  Target: SCNA; (-) strand; PAM type: YTN; PAM sequence: TTT
cctgtgtaaacttgaatatt

SEQ ID NO: 45547 - DNA, 20 bp, Artificial Sequence
  Description of Artificial Sequence: Synthetic oligonucleotide
  Target: SCNA; (-) strand; PAM type: YTN; PAM sequence: TTT
tcctgtgtaaacttgaatat

SEQ ID NO: 45548 - DNA, 20 bp, Artificial Sequence
  Description of Artificial Sequence: Synthetic oligonucleotide
  Target: SCNA; (-) strand; PAM type: YTN; PAM sequence: TTT
ttcctgtgtaaacttgaata

SEQ ID NO: 45549 - DNA, 20 bp, Artificial Sequence
  Description of Artificial Sequence: Synthetic oligonucleotide
  Target: SCNA; (-) strand; PAM type: YTN; PAM sequence: CTT
tttcctgtgtaaacttgaat

SEQ ID NO: 45550 - DNA, 20 bp, Artificial Sequence
  Description of Artificial Sequence: Synthetic oligonucleotide
  Target: SCNA; (-) strand; PAM type: YTN; PAM sequence: TTC
tttttcctgtgtaaacttga

SEQ ID NO: 45551 - DNA, 20 bp, Artificial Sequence
  Description of Artificial Sequence: Synthetic oligonucleotide
  Target: SCNA; (-) strand; PAM type: YTN; PAM sequence: TTA
tgcagagaaagtattctttt

SEQ ID NO: 45552 - DNA, 20 bp, Artificial Sequence
  Description of Artificial Sequence: Synthetic oligonucleotide
  Target: SCNA; (-) strand; PAM type: YTN; PAM sequence: TTA
tgagtaaataagtaaaggtt

SEQ ID NO: 45553 - DNA, 20 bp, Artificial Sequence
  Description of Artificial Sequence: Synthetic oligonucleotide
  Target: SCNA; (-) strand; PAM type: YTN; PAM sequence: CTT
atgagtaaataagtaaaggt

SEQ ID NO: 45554 - DNA, 20 bp, Artificial Sequence
  Description of Artificial Sequence: Synthetic oligonucleotide
  Target: SCNA; (-) strand; PAM type: YTN; PAM sequence: CTA
gaggcttatgagtaaataag

SEQ ID NO: 45555 - DNA, 20 bp, Artificial Sequence
  Description of Artificial Sequence: Synthetic oligonucleotide
  Target: SCNA; (-) strand; PAM type: YTN; PAM sequence: TTA
cagtcaaatccagagagaac

SEQ ID NO: 45556 - DNA, 20 bp, Artificial Sequence
  Description of Artificial Sequence: Synthetic oligonucleotide
  Target: SCNA; (-) strand; PAM type: YTN; PAM sequence: TTT
acagtcaaatccagagagaa

SEQ ID NO: 45557 - DNA, 20 bp, Artificial Sequence
  Description of Artificial Sequence: Synthetic oligonucleotide
  Target: SCNA; (-) strand; PAM type: YTN; PAM sequence: TTG
agatttacagtcaaatccag

SEQ ID NO: 45558 - DNA, 20 bp, Artificial Sequence
  Description of Artificial Sequence: Synthetic oligonucleotide
  Target: SCNA; (-) strand; PAM type: YTN; PAM sequence: CTG
ggaaatgtgttgagatttac

SEQ ID NO: 45559 - DNA, 20 bp, Artificial Sequence
  Description of Artificial Sequence: Synthetic oligonucleotide
  Target: SCNA; (-) strand; PAM type: YTN; PAM sequence: TTC
tgggaaatgtgttgagattt

SEQ ID NO: 45560 - DNA, 20 bp, Artificial Sequence
  Description of Artificial Sequence: Synthetic oligonucleotide
  Target: SCNA; (-) strand; PAM type: YTN; PAM sequence: TTT
ctgggaaatgtgttgagatt

SEQ ID NO: 45561 - DNA, 20 bp, Artificial Sequence
  Description of Artificial Sequence: Synthetic oligonucleotide
  Target: SCNA; (-) strand; PAM type: YTN; PAM sequence: TTA
gtttctgggaaatgtgttga

SEQ ID NO: 45562 - DNA, 20 bp, Artificial Sequence
  Description of Artificial Sequence: Synthetic oligonucleotide
  Target: SCNA; (-) strand; PAM type: YTN; PAM sequence: TTA
atagaagtcagccagaagat

SEQ ID NO: 45563 - DNA, 20 bp, Artificial Sequence
  Description of Artificial Sequence: Synthetic oligonucleotide
  Target: SCNA; (-) strand; PAM type: YTN; PAM sequence: TTT
aatagaagtcagccagaaga

SEQ ID NO: 45564 - DNA, 20 bp, Artificial Sequence
  Description of Artificial Sequence: Synthetic oligonucleotide
  Target: SCNA; (-) strand; PAM type: YTN; PAM sequence: TTT
taatagaagtcagccagaag

SEQ ID NO: 45565 - DNA, 20 bp, Artificial Sequence
  Description of Artificial Sequence: Synthetic oligonucleotide
  Target: SCNA; (-) strand; PAM type: YTN; PAM sequence: TTT
ttaatagaagtcagccagaa

SEQ ID NO: 45566 - DNA, 20 bp, Artificial Sequence
  Description of Artificial Sequence: Synthetic oligonucleotide
  Target: SCNA; (-) strand; PAM type: YTN; PAM sequence: CTG
aatttttaatagaagtcagc

SEQ ID NO: 45567 - DNA, 20 bp, Artificial Sequence
  Description of Artificial Sequence: Synthetic oligonucleotide
  Target: SCNA; (-) strand; PAM type: YTN; PAM sequence: TTG
tctgaatttttaatagaagt

SEQ ID NO: 45568 - DNA, 20 bp, Artificial Sequence
  Description of Artificial Sequence: Synthetic oligonucleotide
  Target: SCNA; (-) strand; PAM type: YTN; PAM sequence: TTT
gtctgaatttttaatagaag

SEQ ID NO: 45569 - DNA, 20 bp, Artificial Sequence
  Description of Artificial Sequence: Synthetic oligonucleotide
  Target: SCNA; (-) strand; PAM type: YTN; PAM sequence: CTT
tgtctgaatttttaatagaa

SEQ ID NO: 45570 - DNA, 20 bp, Artificial Sequence
  Description of Artificial Sequence: Synthetic oligonucleotide
  Target: SCNA; (-) strand; PAM type: YTN; PAM sequence: TTC
tttgtctgaatttttaatag

SEQ ID NO: 45571 - DNA, 20 bp, Artificial Sequence
  Description of Artificial Sequence: Synthetic oligonucleotide
  Target: SCNA; (-) strand; PAM type: YTN; PAM sequence: TTT
ctttgtctgaatttttaata

SEQ ID NO: 45572 - DNA, 20 bp, Artificial Sequence
  Description of Artificial Sequence: Synthetic oligonucleotide
  Target: SCNA; (-) strand; PAM type: YTN; PAM sequence: TTT
tctttgtctgaatttttaat

SEQ ID NO: 45573 - DNA, 20 bp, Artificial Sequence
  Description of Artificial Sequence: Synthetic oligonucleotide
  Target: SCNA; (-) strand; PAM type: YTN; PAM sequence: TTT
ttctttgtctgaatttttaa

SEQ ID NO: 45574 - DNA, 20 bp, Artificial Sequence
  Description of Artificial Sequence: Synthetic oligonucleotide
  Target: SCNA; (-) strand; PAM type: YTN; PAM sequence: TTT
tttctttgtctgaattttta

SEQ ID NO: 45575 - DNA, 20 bp, Artificial Sequence
  Description of Artificial Sequence: Synthetic oligonucleotide
  Target: SCNA; (-) strand; PAM type: YTN; PAM sequence: TTT
ttttctttgtctgaattttt

SEQ ID NO: 45576 - DNA, 20 bp, Artificial Sequence
  Description of Artificial Sequence: Synthetic oligonucleotide
  Target: SCNA; (-) strand; PAM type: YTN; PAM sequence: TTC
agtttttttctttgtctgaa

SEQ ID NO: 45577 - DNA, 20 bp, Artificial Sequence
  Description of Artificial Sequence: Synthetic oligonucleotide
  Target: SCNA; (-) strand; PAM type: YTN; PAM sequence: TTG
tattcagtttttttctttgt

SEQ ID NO: 45578 - DNA, 20 bp, Artificial Sequence
  Description of Artificial Sequence: Synthetic oligonucleotide
  Target: SCNA; (-) strand; PAM type: YTN; PAM sequence: CTC
cattgtattcagtttttttc

SEQ ID NO: 45579 - DNA, 20 bp, Artificial Sequence
  Description of Artificial Sequence: Synthetic oligonucleotide
  Target: SCNA; (-) strand; PAM type: YTN; PAM sequence: CTC
tccattgtattcagtttttt

SEQ ID NO: 45580 - DNA, 20 bp, Artificial Sequence
  Description of Artificial Sequence: Synthetic oligonucleotide
  Target: SCNA; (-) strand; PAM type: YTN; PAM sequence: CTC
tctccattgtattcagtttt

SEQ ID NO: 45581 - DNA, 20 bp, Artificial Sequence
  Description of Artificial Sequence: Synthetic oligonucleotide
  Target: SCNA; (-) strand; PAM type: YTN; PAM sequence: TTA
taatctctctccattgtatt

SEQ ID NO: 45582 - DNA, 20 bp, Artificial Sequence
  Description of Artificial Sequence: Synthetic oligonucleotide
  Target: SCNA; (-) strand; PAM type: YTN; PAM sequence: CTG
tagagagagagaatgggaga

SEQ ID NO: 45583 - DNA, 20 bp, Artificial Sequence
  Description of Artificial Sequence: Synthetic oligonucleotide
  Target: SCNA; (-) strand; PAM type: YTN; PAM sequence: TTG
gaggaggtgatatgctgtag

SEQ ID NO: 45584 - DNA, 20 bp, Artificial Sequence
  Description of Artificial Sequence: Synthetic oligonucleotide
  Target: SCNA; (-) strand; PAM type: YTN; PAM sequence: TTT
ggaggaggtgatatgctgta

SEQ ID NO: 45585 - DNA, 20 bp, Artificial Sequence
  Description of Artificial Sequence: Synthetic oligonucleotide
  Target: SCNA; (-) strand; PAM type: YTN; PAM sequence: TTT
tggaggaggtgatatgctgt

SEQ ID NO: 45586 - DNA, 20 bp, Artificial Sequence
  Description of Artificial Sequence: Synthetic oligonucleotide
  Target: SCNA; (-) strand; PAM type: YTN; PAM sequence: CTG
attttggaggaggtgatatg

SEQ ID NO: 45587 - DNA, 20 bp, Artificial Sequence
  Description of Artificial Sequence: Synthetic oligonucleotide
  Target: SCNA; (-) strand; PAM type: YTN; PAM sequence: TTA
gatatgaactgattttggag

SEQ ID NO: 45588 - DNA, 20 bp, Artificial Sequence
  Description of Artificial Sequence: Synthetic oligonucleotide
  Target: SCNA; (-) strand; PAM type: YTN; PAM sequence: CTA
ggagttagatatgaactgat

SEQ ID NO: 45589 - DNA, 20 bp, Artificial Sequence
  Description of Artificial Sequence: Synthetic oligonucleotide
  Target: SCNA; (-) strand; PAM type: YTN; PAM sequence: CTA
aaaatgtgctaggagttaga

SEQ ID NO: 45590 - DNA, 20 bp, Artificial Sequence
  Description of Artificial Sequence: Synthetic oligonucleotide
  Target: SCNA; (-) strand; PAM type: YTN; PAM sequence: TTA
actaaaaatgtgctaggagt

SEQ ID NO: 45591 - DNA, 20 bp, Artificial Sequence
  Description of Artificial Sequence: Synthetic oligonucleotide
  Target: SCNA; (-) strand; PAM type: YTN; PAM sequence: TTT
aactaaaaatgtgctaggag

SEQ ID NO: 45592 - DNA, 20 bp, Artificial Sequence
  Description of Artificial Sequence: Synthetic oligonucleotide
  Target: SCNA; (-) strand; PAM type: YTN; PAM sequence: TTT
taactaaaaatgtgctagga

SEQ ID NO: 45593 - DNA, 20 bp, Artificial Sequence
  Description of Artificial Sequence: Synthetic oligonucleotide
  Target: SCNA; (-) strand; PAM type: YTN; PAM sequence: TTT
ttaactaaaaatgtgctagg

SEQ ID NO: 45594 - DNA, 20 bp, Artificial Sequence
  Description of Artificial Sequence: Synthetic oligonucleotide
  Target: SCNA; (-) strand; PAM type: YTN; PAM sequence: TTG
tgcatgtatatttttaacta

SEQ ID NO: 45595 - DNA, 20 bp, Artificial Sequence
  Description of Artificial Sequence: Synthetic oligonucleotide
  Target: SCNA; (-) strand; PAM type: YTN; PAM sequence: TTT
gtgcatgtatatttttaact

SEQ ID NO: 45596 - DNA, 20 bp, Artificial Sequence
  Description of Artificial Sequence: Synthetic oligonucleotide
  Target: SCNA; (-) strand; PAM type: YTN; PAM sequence: TTT
tgtgcatgtatatttttaac

SEQ ID NO: 45597 - DNA, 20 bp, Artificial Sequence
  Description of Artificial Sequence: Synthetic oligonucleotide
  Target: SCNA; (-) strand; PAM type: YTN; PAM sequence: TTA
cacatatattttgtgcatgt

SEQ ID NO: 45598 - DNA, 20 bp, Artificial Sequence
  Description of Artificial Sequence: Synthetic oligonucleotide
  Target: SCNA; (-) strand; PAM type: YTN; PAM sequence: TTT
acacatatattttgtgcatg

SEQ ID NO: 45599 - DNA, 20 bp, Artificial Sequence
  Description of Artificial Sequence: Synthetic oligonucleotide
  Target: SCNA; (-) strand; PAM type: YTN; PAM sequence: TTG
tgtatatatatatacacaca

SEQ ID NO: 45600 - DNA, 20 bp, Artificial Sequence
  Description of Artificial Sequence: Synthetic oligonucleotide
  Target: SCNA; (-) strand; PAM type: YTN; PAM sequence: TTT
gtgtatatatatatacacac

SEQ ID NO: 45601 - DNA, 20 bp, Artificial Sequence
  Description of Artificial Sequence: Synthetic oligonucleotide
  Target: SCNA; (-) strand; PAM type: YTN; PAM sequence: TTT
tgtgtatatatatatacaca

SEQ ID NO: 45602 - DNA, 20 bp, Artificial Sequence
  Description of Artificial Sequence: Synthetic oligonucleotide
  Target: SCNA; (-) strand; PAM type: YTN; PAM sequence: CTT
ttgtgtatatatatatacac

SEQ ID NO: 45603 - DNA, 20 bp, Artificial Sequence
  Description of Artificial Sequence: Synthetic oligonucleotide
  Target: SCNA; (-) strand; PAM type: YTN; PAM sequence: CTG
cttttgtgtatatatatata

SEQ ID NO: 45604 - DNA, 20 bp, Artificial Sequence
  Description of Artificial Sequence: Synthetic oligonucleotide
  Target: SCNA; (-) strand; PAM type: YTN; PAM sequence: TTG
tgtatatatatatatatata

SEQ ID NO: 45605 - DNA, 20 bp, Artificial Sequence
  Description of Artificial Sequence: Synthetic oligonucleotide
  Target: SCNA; (-) strand; PAM type: YTN; PAM sequence: TTT
gtgtatatatatatatatat

SEQ ID NO: 45606 - DNA, 20 bp, Artificial Sequence
  Description of Artificial Sequence: Synthetic oligonucleotide
  Target: SCNA; (-) strand; PAM type: YTN; PAM sequence: TTT
tgtgtatatatatatatata

SEQ ID NO: 45607 - DNA, 20 bp, Artificial Sequence
  Description of Artificial Sequence: Synthetic oligonucleotide
  Target: SCNA; (-) strand; PAM type: YTN; PAM sequence: CTT
ttgtgtatatatatatatat

SEQ ID NO: 45608 - DNA, 20 bp, Artificial Sequence
  Description of Artificial Sequence: Synthetic oligonucleotide
  Target: SCNA; (-) strand; PAM type: YTN; PAM sequence: CTG
cttttgtgtatatatatata

SEQ ID NO: 45609 - DNA, 20 bp, Artificial Sequence
  Description of Artificial Sequence: Synthetic oligonucleotide
  Target: SCNA; (-) strand; PAM type: YTN; PAM sequence: CTG
caagaaagcatatatatata

SEQ ID NO: 45610 - DNA, 20 bp, Artificial Sequence
  Description of Artificial Sequence: Synthetic oligonucleotide
  Target: SCNA; (-) strand; PAM type: YTN; PAM sequence: CTA
tcacctgcaagaaagcatat

SEQ ID NO: 45611 - DNA, 20 bp, Artificial Sequence
  Description of Artificial Sequence: Synthetic oligonucleotide
  Target: SCNA; (-) strand; PAM type: YTN; PAM sequence: TTC
tatcacctgcaagaaagcat

SEQ ID NO: 45612 - DNA, 20 bp, Artificial Sequence
  Description of Artificial Sequence: Synthetic oligonucleotide
  Target: SCNA; (-) strand; PAM type: YTN; PAM sequence: CTC
caaaaaagcattctatcacc

SEQ ID NO: 45613 - DNA, 20 bp, Artificial Sequence
  Description of Artificial Sequence: Synthetic oligonucleotide
  Target: SCNA; (-) strand; PAM type: YTN; PAM sequence: TTA
cataggcccacaaaaccacc

SEQ ID NO: 45614 - DNA, 20 bp, Artificial Sequence
  Description of Artificial Sequence: Synthetic oligonucleotide
  Target: SCNA; (-) strand; PAM type: YTN; PAM sequence: TTA
aaatataacaatagagacat

SEQ ID NO: 45615 - DNA, 20 bp, Artificial Sequence
  Description of Artificial Sequence: Synthetic oligonucleotide
  Target: SCNA; (-) strand; PAM type: YTN; PAM sequence: TTT
aaaatataacaatagagaca

SEQ ID NO: 45616 - DNA, 20 bp, Artificial Sequence
  Description of Artificial Sequence: Synthetic oligonucleotide
  Target: SCNA; (-) strand; PAM type: YTN; PAM sequence: TTT
taaaatataacaatagagac

SEQ ID NO: 45617 - DNA, 20 bp, Artificial Sequence
  Description of Artificial Sequence: Synthetic oligonucleotide
  Target: SCNA; (-) strand; PAM type: YTN; PAM sequence: CTT
ttaaaatataacaatagaga

SEQ ID NO: 45618 - DNA, 20 bp, Artificial Sequence
  Description of Artificial Sequence: Synthetic oligonucleotide
  Target: SCNA; (-) strand; PAM type: YTN; PAM sequence: CTC
aaacaaacaaacaaacaaaa

SEQ ID NO: 45619 - DNA, 20 bp, Artificial Sequence
  Description of Artificial Sequence: Synthetic oligonucleotide
  Target: SCNA; (-) strand; PAM type: YTN; PAM sequence: CTC
catctcaaacaaacaaacaa

SEQ ID NO: 45620 - DNA, 20 bp, Artificial Sequence
  Description of Artificial Sequence: Synthetic oligonucleotide
  Target: SCNA; (-) strand; PAM type: YTN; PAM sequence: CTA
cagagggagactccatctca

SEQ ID NO: 45621 - DNA, 20 bp, Artificial Sequence
  Description of Artificial Sequence: Synthetic oligonucleotide
  Target: SCNA; (-) strand; PAM type: YTN; PAM sequence: CTG
ggctacagagggagactcca

SEQ ID NO: 45622 - DNA, 20 bp, Artificial Sequence
  Description of Artificial Sequence: Synthetic oligonucleotide
  Target: SCNA; (-) strand; PAM type: YTN; PAM sequence: CTC
cagcctgggctacagaggga

SEQ ID NO: 45623 - DNA, 20 bp, Artificial Sequence
  Description of Artificial Sequence: Synthetic oligonucleotide
  Target: SCNA; (-) strand; PAM type: YTN; PAM sequence: CTG
cactccagcctgggctacag

SEQ ID NO: 45624 - DNA, 20 bp, Artificial Sequence
  Description of Artificial Sequence: Synthetic oligonucleotide
  Target: SCNA; (-) strand; PAM type: YTN; PAM sequence: CTG
ccactgcactccagcctggg

SEQ ID NO: 45625 - DNA, 20 bp, Artificial Sequence
  Description of Artificial Sequence: Synthetic oligonucleotide
  Target: SCNA; (-) strand; PAM type: YTN; PAM sequence: TTG
cagtgagccgagatcctgcc

SEQ ID NO: 45626 - DNA, 20 bp, Artificial Sequence
  Description of Artificial Sequence: Synthetic oligonucleotide
  Target: SCNA; (-) strand; PAM type: YTN; PAM sequence: TTG
aacccgggaggcagaggttg

SEQ ID NO: 45627 - DNA, 20 bp, Artificial Sequence
  Description of Artificial Sequence: Synthetic oligonucleotide
  Target: SCNA; (-) strand; PAM type: YTN; PAM sequence: CTT
gaacccgggaggcagaggtt

SEQ ID NO: 45628 - DNA, 20 bp, Artificial Sequence
  Description of Artificial Sequence: Synthetic oligonucleotide
  Target: SCNA; (-) strand; PAM type: YTN; PAM sequence: CTG
aggcacgagagtcacttgaa

SEQ ID NO: 45629 - DNA, 20 bp, Artificial Sequence
  Description of Artificial Sequence: Synthetic oligonucleotide
  Target: SCNA; (-) strand; PAM type: YTN; PAM sequence: CTG
gaggctgaggcacgagagtc

SEQ ID NO: 45630 - DNA, 20 bp, Artificial Sequence
  Description of Artificial Sequence: Synthetic oligonucleotide
  Target: SCNA; (-) strand; PAM type: YTN; PAM sequence: CTC
tggaggctgaggcacgagag

SEQ ID NO: 45631 - DNA, 20 bp, Artificial Sequence
  Description of Artificial Sequence: Synthetic oligonucleotide
  Target: SCNA; (-) strand; PAM type: YTN; PAM sequence: CTA
ctctggaggctgaggcacga

SEQ ID NO: 45632 - DNA, 20 bp, Artificial Sequence
  Description of Artificial Sequence: Synthetic oligonucleotide
  Target: SCNA; (-) strand; PAM type: YTN; PAM sequence: CTG
gctactctggaggctgaggc

SEQ ID NO: 45633 - DNA, 20 bp, Artificial Sequence
  Description of Artificial Sequence: Synthetic oligonucleotide
  Target: SCNA; (-) strand; PAM type: YTN; PAM sequence: CTG
taatcctggctactctggag

SEQ ID NO: 45634 - DNA, 20 bp, Artificial Sequence
  Description of Artificial Sequence: Synthetic oligonucleotide
  Target: SCNA; (-) strand; PAM type: YTN; PAM sequence: CTA
aaaatacaaaaaaaaaaaaa

SEQ ID NO: 45635 - DNA, 20 bp, Artificial Sequence
  Description of Artificial Sequence: Synthetic oligonucleotide
  Target: SCNA; (-) strand; PAM type: YTN; PAM sequence: CTA
ctaaaaatacaaaaaaaaaa

SEQ ID NO: 45636 - DNA, 20 bp, Artificial Sequence
  Description of Artificial Sequence: Synthetic oligonucleotide
  Target: SCNA; (-) strand; PAM type: YTN; PAM sequence: CTC
tactaaaaatacaaaaaaaa

SEQ ID NO: 45637 - DNA, 20 bp, Artificial Sequence
  Description of Artificial Sequence: Synthetic oligonucleotide
  Target: SCNA; (-) strand; PAM type: YTN; PAM sequence: TTG
tctctactaaaaatacaaaa

SEQ ID NO: 45638 - DNA, 20 bp, Artificial Sequence
  Description of Artificial Sequence: Synthetic oligonucleotide
  Target: SCNA; (-) strand; PAM type: YTN; PAM sequence: CTT
gtctctactaaaaatacaaa

SEQ ID NO: 45639 - DNA, 20 bp, Artificial Sequence
  Description of Artificial Sequence: Synthetic oligonucleotide
  Target: SCNA; (-) strand; PAM type: YTN; PAM sequence: CTG
gccaacatggtgaaaccttg

SEQ ID NO: 45640 - DNA, 20 bp, Artificial Sequence
  Description of Artificial Sequence: Synthetic oligonucleotide
  Target: SCNA; (-) strand; PAM type: YTN; PAM sequence: TTG
agaccaccctggccaacatg

SEQ ID NO: 45641 - DNA, 20 bp, Artificial Sequence
  Description of Artificial Sequence: Synthetic oligonucleotide
  Target: SCNA; (-) strand; PAM type: YTN; PAM sequence: TTT
gagaccaccctggccaacat

SEQ ID NO: 45642 - DNA, 20 bp, Artificial Sequence
  Description of Artificial Sequence: Synthetic oligonucleotide
  Target: SCNA; (-) strand; PAM type: YTN; PAM sequence: TTG
agatcagtagtttgagacca

SEQ ID NO: 45643 - DNA, 20 bp, Artificial Sequence
  Description of Artificial Sequence: Synthetic oligonucleotide
  Target: SCNA; (-) strand; PAM type: YTN; PAM sequence: CTT
gagatcagtagtttgagacc

SEQ ID NO: 45644 - DNA, 20 bp, Artificial Sequence
  Description of Artificial Sequence: Synthetic oligonucleotide
  Target: SCNA; (-) strand; PAM type: YTN; PAM sequence: TTA
cttgagatcagtagtttgag

SEQ ID NO: 45645 - DNA, 20 bp, Artificial Sequence
  Description of Artificial Sequence: Synthetic oligonucleotide
  Target: SCNA; (-) strand; PAM type: YTN; PAM sequence: CTG
gccaattacttgagatcagt

SEQ ID NO: 45646 - DNA, 20 bp, Artificial Sequence
  Description of Artificial Sequence: Synthetic oligonucleotide
  Target: SCNA; (-) strand; PAM type: YTN; PAM sequence: TTG
ggacgccaaggctggccaat

SEQ ID NO: 45647 - DNA, 20 bp, Artificial Sequence
  Description of Artificial Sequence: Synthetic oligonucleotide
  Target: SCNA; (-) strand; PAM type: YTN; PAM sequence: TTT
gggacgccaaggctggccaa

SEQ ID NO: 45648 - DNA, 20 bp, Artificial Sequence
  Description of Artificial Sequence: Synthetic oligonucleotide
  Target: SCNA; (-) strand; PAM type: YTN; PAM sequence: CTT
tgggacgccaaggctggcca

SEQ ID NO: 45649 - DNA, 20 bp, Artificial Sequence
  Description of Artificial Sequence: Synthetic oligonucleotide
  Target: SCNA; (-) strand; PAM type: YTN; PAM sequence: TTG
cactttgggacgccaaggct

SEQ ID NO: 45650 - DNA, 20 bp, Artificial Sequence
  Description of Artificial Sequence: Synthetic oligonucleotide
  Target: SCNA; (-) strand; PAM type: YTN; PAM sequence: CTT
gcactttgggacgccaaggc

SEQ ID NO: 45651 - DNA, 20 bp, Artificial Sequence
  Description of Artificial Sequence: Synthetic oligonucleotide
  Target: SCNA; (-) strand; PAM type: YTN; PAM sequence: CTG
cagtcttgcactttgggacg

SEQ ID NO: 45652 - DNA, 20 bp, Artificial Sequence
  Description of Artificial Sequence: Synthetic oligonucleotide
  Target: SCNA; (-) strand; PAM type: YTN; PAM sequence: CTC
aagcctgcagtcttgcactt

SEQ ID NO: 45653 - DNA, 20 bp, Artificial Sequence
  Description of Artificial Sequence: Synthetic oligonucleotide
  Target: SCNA; (-) strand; PAM type: YTN; PAM sequence: TTG
gtggagcgtggtggctcaag

SEQ ID NO: 45654 - DNA, 20 bp, Artificial Sequence
  Description of Artificial Sequence: Synthetic oligonucleotide
  Target: SCNA; (-) strand; PAM type: YTN; PAM sequence: TTT
ggtggagcgtggtggctcaa

SEQ ID NO: 45655 - DNA, 20 bp, Artificial Sequence
  Description of Artificial Sequence: Synthetic oligonucleotide
  Target: SCNA; (-) strand; PAM type: YTN; PAM sequence: TTT
tggtggagcgtggtggctca

SEQ ID NO: 45656 - DNA, 20 bp, Artificial Sequence
  Description of Artificial Sequence: Synthetic oligonucleotide
  Target: SCNA; (-) strand; PAM type: YTN; PAM sequence: CTT
ttggtggagcgtggtggctc

SEQ ID NO: 45657 - DNA, 20 bp, Artificial Sequence
  Description of Artificial Sequence: Synthetic oligonucleotide
  Target: SCNA; (-) strand; PAM type: YTN; PAM sequence: CTA
agaaacttttggtggagcgt

SEQ ID NO: 45658 - DNA, 20 bp, Artificial Sequence
  Description of Artificial Sequence: Synthetic oligonucleotide
  Target: SCNA; (-) strand; PAM type: YTN; PAM sequence: CTC
atgagaatgagtgctaagaa

SEQ ID NO: 45659 - DNA, 20 bp, Artificial Sequence
  Description of Artificial Sequence: Synthetic oligonucleotide
  Target: SCNA; (-) strand; PAM type: YTN; PAM sequence: TTC
tcatgagaatgagtgctaag

SEQ ID NO: 45660 - DNA, 20 bp, Artificial Sequence
  Description of Artificial Sequence: Synthetic oligonucleotide
  Target: SCNA; (-) strand; PAM type: YTN; PAM sequence: TTT
ctcatgagaatgagtgctaa

SEQ ID NO: 45661 - DNA, 20 bp, Artificial Sequence
  Description of Artificial Sequence: Synthetic oligonucleotide
  Target: SCNA; (-) strand; PAM type: YTN; PAM sequence: TTT
tctcatgagaatgagtgcta

SEQ ID NO: 45662 - DNA, 20 bp, Artificial Sequence
  Description of Artificial Sequence: Synthetic oligonucleotide
  Target: SCNA; (-) strand; PAM type: YTN; PAM sequence: TTT
ttctcatgagaatgagtgct

SEQ ID NO: 45663 - DNA, 20 bp, Artificial Sequence
  Description of Artificial Sequence: Synthetic oligonucleotide
  Target: SCNA; (-) strand; PAM type: YTN; PAM sequence: TTC
agcaatttttctcatgagaa

SEQ ID NO: 45664 - DNA, 20 bp, Artificial Sequence
  Description of Artificial Sequence: Synthetic oligonucleotide
  Target: SCNA; (-) strand; PAM type: YTN; PAM sequence: TTT
cagcaatttttctcatgaga

SEQ ID NO: 45665 - DNA, 20 bp, Artificial Sequence
  Description of Artificial Sequence: Synthetic oligonucleotide
  Target: SCNA; (-) strand; PAM type: YTN; PAM sequence: TTT
tcagcaatttttctcatgag

SEQ ID NO: 45666 - DNA, 20 bp, Artificial Sequence
  Description of Artificial Sequence: Synthetic oligonucleotide
  Target: SCNA; (-) strand; PAM type: YTN; PAM sequence: TTG
ccaagttttcagcaattttt

SEQ ID NO: 45667 - DNA, 20 bp, Artificial Sequence
  Description of Artificial Sequence: Synthetic oligonucleotide
  Target: SCNA; (-) strand; PAM type: YTN; PAM sequence: TTA
ttgccaagttttcagcaatt

SEQ ID NO: 45668 - DNA, 20 bp, Artificial Sequence
  Description of Artificial Sequence: Synthetic oligonucleotide
  Target: SCNA; (-) strand; PAM type: YTN; PAM sequence: TTT
attgccaagttttcagcaat

SEQ ID NO: 45669 - DNA, 20 bp, Artificial Sequence
  Description of Artificial Sequence: Synthetic oligonucleotide
  Target: SCNA; (-) strand; PAM type: YTN; PAM sequence: CTT
tattgccaagttttcagcaa

SEQ ID NO: 45670 - DNA, 20 bp, Artificial Sequence
  Description of Artificial Sequence: Synthetic oligonucleotide
  Target: SCNA; (-) strand; PAM type: YTN; PAM sequence: TTC
tttattgccaagttttcagc

SEQ ID NO: 45671 - DNA, 20 bp, Artificial Sequence
  Description of Artificial Sequence: Synthetic oligonucleotide
  Target: SCNA; (-) strand; PAM type: YTN; PAM sequence: TTT
ctttattgccaagttttcag

SEQ ID NO: 45672 - DNA, 20 bp, Artificial Sequence
  Description of Artificial Sequence: Synthetic oligonucleotide
  Target: SCNA; (-) strand; PAM type: YTN; PAM sequence: CTG
tttctttattgccaagtttt

SEQ ID NO: 45673 - DNA, 20 bp, Artificial Sequence
  Description of Artificial Sequence: Synthetic oligonucleotide
  Target: SCNA; (-) strand; PAM type: YTN; PAM sequence: TTC
tgtttctttattgccaagtt

SEQ ID NO: 45674 - DNA, 20 bp, Artificial Sequence
  Description of Artificial Sequence: Synthetic oligonucleotide
  Target: SCNA; (-) strand; PAM type: YTN; PAM sequence: TTA
aaggacatgtagtcattctg

SEQ ID NO: 45675 - DNA, 20 bp, Artificial Sequence
  Description of Artificial Sequence: Synthetic oligonucleotide
  Target: SCNA; (-) strand; PAM type: YTN; PAM sequence: TTT
aaaggacatgtagtcattct

SEQ ID NO: 45676 - DNA, 20 bp, Artificial Sequence
  Description of Artificial Sequence: Synthetic oligonucleotide
  Target: SCNA; (-) strand; PAM type: YTN; PAM sequence: TTA
aaaataacatttaaaggaca

SEQ ID NO: 45677 - DNA, 20 bp, Artificial Sequence
  Description of Artificial Sequence: Synthetic oligonucleotide
  Target: SCNA; (-) strand; PAM type: YTN; PAM sequence: CTT
aaaaataacatttaaaggac

SEQ ID NO: 45678 - DNA, 20 bp, Artificial Sequence
  Description of Artificial Sequence: Synthetic oligonucleotide
  Target: SCNA; (-) strand; PAM type: YTN; PAM sequence: TTG
agccccttaaaaataacatt

SEQ ID NO: 45679 - DNA, 20 bp, Artificial Sequence
  Description of Artificial Sequence: Synthetic oligonucleotide
  Target: SCNA; (-) strand; PAM type: YTN; PAM sequence: TTG
attgagccccttaaaaataa

SEQ ID NO: 45680 - DNA, 20 bp, Artificial Sequence
  Description of Artificial Sequence: Synthetic oligonucleotide
  Target: SCNA; (-) strand; PAM type: YTN; PAM sequence: TTC
atagtcattgattgagcccc

SEQ ID NO: 45681 - DNA, 20 bp, Artificial Sequence
  Description of Artificial Sequence: Synthetic oligonucleotide
  Target: SCNA; (-) strand; PAM type: YTN; PAM sequence: CTT
catagtcattgattgagccc

SEQ ID NO: 45682 - DNA, 20 bp, Artificial Sequence
  Description of Artificial Sequence: Synthetic oligonucleotide
  Target: SCNA; (-) strand; PAM type: YTN; PAM sequence: TTA
gataacttcatagtcattga

SEQ ID NO: 45683 - DNA, 20 bp, Artificial Sequence
  Description of Artificial Sequence: Synthetic oligonucleotide
  Target: SCNA; (-) strand; PAM type: YTN; PAM sequence: CTT
agataacttcatagtcattg

SEQ ID NO: 45684 - DNA, 20 bp, Artificial Sequence
  Description of Artificial Sequence: Synthetic oligonucleotide
  Target: SCNA; (-) strand; PAM type: YTN; PAM sequence: TTA
tcttagataacttcatagtc

SEQ ID NO: 45685 - DNA, 20 bp, Artificial Sequence
  Description of Artificial Sequence: Synthetic oligonucleotide
  Target: SCNA; (-) strand; PAM type: YTN; PAM sequence: TTT
atcttagataacttcatagt

SEQ ID NO: 45686 - DNA, 20 bp, Artificial Sequence
  Description of Artificial Sequence: Synthetic oligonucleotide
  Target: SCNA; (-) strand; PAM type: YTN; PAM sequence: TTT
tatcttagataacttcatag

SEQ ID NO: 45687 - DNA, 20 bp, Artificial Sequence
  Description of Artificial Sequence: Synthetic oligonucleotide
  Target: SCNA; (-) strand; PAM type: YTN; PAM sequence: CTG
gtgttttatcttagataact

SEQ ID NO: 45688 - DNA, 20 bp, Artificial Sequence
  Description of Artificial Sequence: Synthetic oligonucleotide
  Target: SCNA; (-) strand; PAM type: YTN; PAM sequence: TTA
atggcaatgtcaaaatctgg

SEQ ID NO: 45689 - DNA, 20 bp, Artificial Sequence
  Description of Artificial Sequence: Synthetic oligonucleotide
  Target: SCNA; (-) strand; PAM type: YTN; PAM sequence: CTA
ataaaaaagttaatggcaat

SEQ ID NO: 45690 - DNA, 20 bp, Artificial Sequence
  Description of Artificial Sequence: Synthetic oligonucleotide
  Target: SCNA; (-) strand; PAM type: YTN; PAM sequence: CTC
taataaaaaagttaatggca

SEQ ID NO: 45691 - DNA, 20 bp, Artificial Sequence
  Description of Artificial Sequence: Synthetic oligonucleotide
  Target: SCNA; (-) strand; PAM type: YTN; PAM sequence: CTG
ggggctctaataaaaaagtt

SEQ ID NO: 45692 - DNA, 20 bp, Artificial Sequence
  Description of Artificial Sequence: Synthetic oligonucleotide
  Target: SCNA; (-) strand; PAM type: YTN; PAM sequence: CTG
tagatctgggggctctaata

SEQ ID NO: 45693 - DNA, 20 bp, Artificial Sequence
  Description of Artificial Sequence: Synthetic oligonucleotide
  Target: SCNA; (-) strand; PAM type: YTN; PAM sequence: CTG
cacatataacctgtagatct

SEQ ID NO: 45694 - DNA, 20 bp, Artificial Sequence
  Description of Artificial Sequence: Synthetic oligonucleotide
  Target: SCNA; (-) strand; PAM type: YTN; PAM sequence: CTG
cacatctgcacatataacct

SEQ ID NO: 45695 - DNA, 20 bp, Artificial Sequence
  Description of Artificial Sequence: Synthetic oligonucleotide
  Target: SCNA; (-) strand; PAM type: YTN; PAM sequence: TTG
aaaagggaaataaagcagcc

SEQ ID NO: 45696 - DNA, 20 bp, Artificial Sequence
  Description of Artificial Sequence: Synthetic oligonucleotide
  Target: SCNA; (-) strand; PAM type: YTN; PAM sequence: CTT
gaaaagggaaataaagcagc

SEQ ID NO: 45697 - DNA, 20 bp, Artificial Sequence
  Description of Artificial Sequence: Synthetic oligonucleotide
  Target: SCNA; (-) strand; PAM type: YTN; PAM sequence: CTC
ttgaaaagggaaataaagca

SEQ ID NO: 45698 - DNA, 20 bp, Artificial Sequence
  Description of Artificial Sequence: Synthetic oligonucleotide
  Target: SCNA; (-) strand; PAM type: YTN; PAM sequence: CTG
tataagaaaagctcttgaaa

SEQ ID NO: 45699 - DNA, 20 bp, Artificial Sequence
  Description of Artificial Sequence: Synthetic oligonucleotide
  Target: SCNA; (-) strand; PAM type: YTN; PAM sequence: CTA
taggagagtggatagatgct

SEQ ID NO: 45700 - DNA, 20 bp, Artificial Sequence
  Description of Artificial Sequence: Synthetic oligonucleotide
  Target: SCNA; (-) strand; PAM type: YTN; PAM sequence: CTC
tataggagagtggatagatg

SEQ ID NO: 45701 - DNA, 20 bp, Artificial Sequence
  Description of Artificial Sequence: Synthetic oligonucleotide
  Target: SCNA; (-) strand; PAM type: YTN; PAM sequence: TTC
atctctataggagagtggat

SEQ ID NO: 45702 - DNA, 20 bp, Artificial Sequence
  Description of Artificial Sequence: Synthetic oligonucleotide
  Target: SCNA; (-) strand; PAM type: YTN; PAM sequence: CTT
catctctataggagagtgga

SEQ ID NO: 45703 - DNA, 20 bp, Artificial Sequence
  Description of Artificial Sequence: Synthetic oligonucleotide
  Target: SCNA; (-) strand; PAM type: YTN; PAM sequence: TTA
acttcatctctataggagag

SEQ ID NO: 45704 - DNA, 20 bp, Artificial Sequence
  Description of Artificial Sequence: Synthetic oligonucleotide
  Target: SCNA; (-) strand; PAM type: YTN; PAM sequence: TTG
tcaagggagttaacttcatc

SEQ ID NO: 45705 - DNA, 20 bp, Artificial Sequence
  Description of Artificial Sequence: Synthetic oligonucleotide
  Target: SCNA; (-) strand; PAM type: YTN; PAM sequence: TTG
gggacaagtgatagttgtca

SEQ ID NO: 45706 - DNA, 20 bp, Artificial Sequence
  Description of Artificial Sequence: Synthetic oligonucleotide
  Target: SCNA; (-) strand; PAM type: YTN; PAM sequence: TTG
tatgtcaagtggaagggtgg

SEQ ID NO: 45707 - DNA, 20 bp, Artificial Sequence
  Description of Artificial Sequence: Synthetic oligonucleotide
  Target: SCNA; (-) strand; PAM type: YTN; PAM sequence: TTT
gtatgtcaagtggaagggtg

SEQ ID NO: 45708 - DNA, 20 bp, Artificial Sequence
  Description of Artificial Sequence: Synthetic oligonucleotide
  Target: SCNA; (-) strand; PAM type: YTN; PAM sequence: TTG
ggtttgtatgtcaagtggaa

SEQ ID NO: 45709 - DNA, 20 bp, Artificial Sequence
  Description of Artificial Sequence: Synthetic oligonucleotide
  Target: SCNA; (-) strand; PAM type: YTN; PAM sequence: TTT
gggtttgtatgtcaagtgga

SEQ ID NO: 45710 - DNA, 20 bp, Artificial Sequence
  Description of Artificial Sequence: Synthetic oligonucleotide
  Target: SCNA; (-) strand; PAM type: YTN; PAM sequence: CTT
tgggtttgtatgtcaagtgg

SEQ ID NO: 45711 - DNA, 20 bp, Artificial Sequence
  Description of Artificial Sequence: Synthetic oligonucleotide
  Target: SCNA; (-) strand; PAM type: YTN; PAM sequence: CTC
tttgggtttgtatgtcaagt

SEQ ID NO: 45712 - DNA, 20 bp, Artificial Sequence
  Description of Artificial Sequence: Synthetic oligonucleotide
  Target: SCNA; (-) strand; PAM type: YTN; PAM sequence: CTG
agcataaatgagcatgaatc

SEQ ID NO: 45713 - DNA, 20 bp, Artificial Sequence
  Description of Artificial Sequence: Synthetic oligonucleotide
  Target: SCNA; (-) strand; PAM type: YTN; PAM sequence: CTA
ctgagcataaatgagcatga

SEQ ID NO: 45714 - DNA, 20 bp, Artificial Sequence
  Description of Artificial Sequence: Synthetic oligonucleotide
  Target: SCNA; (-) strand; PAM type: YTN; PAM sequence: TTC
tactgagcataaatgagcat

SEQ ID NO: 45715 - DNA, 20 bp, Artificial Sequence
  Description of Artificial Sequence: Synthetic oligonucleotide
  Target: SCNA; (-) strand; PAM type: YTN; PAM sequence: TTT
ctactgagcataaatgagca

SEQ ID NO: 45716 - DNA, 20 bp, Artificial Sequence
  Description of Artificial Sequence: Synthetic oligonucleotide
  Target: SCNA; (-) strand; PAM type: YTN; PAM sequence: TTT
tctactgagcataaatgagc

SEQ ID NO: 45717 - DNA, 20 bp, Artificial Sequence
  Description of Artificial Sequence: Synthetic oligonucleotide
  Target: SCNA; (-) strand; PAM type: YTN; PAM sequence: TTA
tgttttctactgagcataaa

SEQ ID NO: 45718 - DNA, 20 bp, Artificial Sequence
  Description of Artificial Sequence: Synthetic oligonucleotide
  Target: SCNA; (-) strand; PAM type: YTN; PAM sequence: CTA
tggaattatgttttctactg

SEQ ID NO: 45719 - DNA, 20 bp, Artificial Sequence
  Description of Artificial Sequence: Synthetic oligonucleotide
  Target: SCNA; (-) strand; PAM type: YTN; PAM sequence: TTA
ataatagcagtaacctatgg

SEQ ID NO: 45720 - DNA, 20 bp, Artificial Sequence
  Description of Artificial Sequence: Synthetic oligonucleotide
  Target: SCNA; (-) strand; PAM type: YTN; PAM sequence: TTG
attaataatagcagtaacct

SEQ ID NO: 45721 - DNA, 20 bp, Artificial Sequence
  Description of Artificial Sequence: Synthetic oligonucleotide
  Target: SCNA; (-) strand; PAM type: YTN; PAM sequence: TTT
gattaataatagcagtaacc

SEQ ID NO: 45722 - DNA, 20 bp, Artificial Sequence
  Description of Artificial Sequence: Synthetic oligonucleotide
  Target: SCNA; (-) strand; PAM type: YTN; PAM sequence: CTA
gtaaatatttgattaataat

SEQ ID NO: 45723 - DNA, 20 bp, Artificial Sequence
  Description of Artificial Sequence: Synthetic oligonucleotide
  Target: SCNA; (-) strand; PAM type: YTN; PAM sequence: CTA
atagatataaatctagtaaa

SEQ ID NO: 45724 - DNA, 20 bp, Artificial Sequence
  Description of Artificial Sequence: Synthetic oligonucleotide
  Target: SCNA; (-) strand; PAM type: YTN; PAM sequence: TTG
actaatagatataaatctag

SEQ ID NO: 45725 - DNA, 20 bp, Artificial Sequence
  Description of Artificial Sequence: Synthetic oligonucleotide
  Target: SCNA; (-) strand; PAM type: YTN; PAM sequence: CTA
aagagaattgactaatagat

SEQ ID NO: 45726 - DNA, 20 bp, Artificial Sequence
  Description of Artificial Sequence: Synthetic oligonucleotide
  Target: SCNA; (-) strand; PAM type: YTN; PAM sequence: TTC
taaagagaattgactaatag

SEQ ID NO: 45727 - DNA, 20 bp, Artificial Sequence
  Description of Artificial Sequence: Synthetic oligonucleotide
  Target: SCNA; (-) strand; PAM type: YTN; PAM sequence: TTA
tagaaacagtcaaagaaatt

SEQ ID NO: 45728 - DNA, 20 bp, Artificial Sequence
  Description of Artificial Sequence: Synthetic oligonucleotide
  Target: SCNA; (-) strand; PAM type: YTN; PAM sequence: TTT
atagaaacagtcaaagaaat

SEQ ID NO: 45729 - DNA, 20 bp, Artificial Sequence
  Description of Artificial Sequence: Synthetic oligonucleotide
  Target: SCNA; (-) strand; PAM type: YTN; PAM sequence: CTG
aggaataaagatttatagaa

SEQ ID NO: 45730 - DNA, 20 bp, Artificial Sequence
  Description of Artificial Sequence: Synthetic oligonucleotide
  Target: SCNA; (-) strand; PAM type: YTN; PAM sequence: TTA
aaggaatatctgaggaataa

SEQ ID NO: 45731 - DNA, 20 bp, Artificial Sequence
  Description of Artificial Sequence: Synthetic oligonucleotide
  Target: SCNA; (-) strand; PAM type: YTN; PAM sequence: TTT
aaaggaatatctgaggaata

SEQ ID NO: 45732 - DNA, 20 bp, Artificial Sequence
  Description of Artificial Sequence: Synthetic oligonucleotide
  Target: SCNA; (-) strand; PAM type: YTN; PAM sequence: CTG
gtttaaaggaatatctgagg

SEQ ID NO: 45733 - DNA, 20 bp, Artificial Sequence
  Description of Artificial Sequence: Synthetic oligonucleotide
  Target: SCNA; (-) strand; PAM type: YTN; PAM sequence: CTG
gtaagactggtttaaaggaa

SEQ ID NO: 45734 - DNA, 20 bp, Artificial Sequence
  Description of Artificial Sequence: Synthetic oligonucleotide
  Target: SCNA; (-) strand; PAM type: YTN; PAM sequence: TTA
gtagtggagccaataagctg

SEQ ID NO: 45735 - DNA, 20 bp, Artificial Sequence
  Description of Artificial Sequence: Synthetic oligonucleotide
  Target: SCNA; (-) strand; PAM type: YTN; PAM sequence: TTA
attagtagtggagccaataa

SEQ ID NO: 45736 - DNA, 20 bp, Artificial Sequence
  Description of Artificial Sequence: Synthetic oligonucleotide
  Target: SCNA; (-) strand; PAM type: YTN; PAM sequence: CTA
attaattagtagtggagcca

SEQ ID NO: 45737 - DNA, 20 bp, Artificial Sequence
  Description of Artificial Sequence: Synthetic oligonucleotide
  Target: SCNA; (-) strand; PAM type: YTN; PAM sequence: TTC
aactaattaattagtagtgg

SEQ ID NO: 45738 - DNA, 20 bp, Artificial Sequence
  Description of Artificial Sequence: Synthetic oligonucleotide
  Target: SCNA; (-) strand; PAM type: YTN; PAM sequence: TTA
ttcaactaattaattagtag

SEQ ID NO: 45739 - DNA, 20 bp, Artificial Sequence
  Description of Artificial Sequence: Synthetic oligonucleotide
  Target: SCNA; (-) strand; PAM type: YTN; PAM sequence: TTT
attcaactaattaattagta

SEQ ID NO: 45740 - DNA, 20 bp, Artificial Sequence
  Description of Artificial Sequence: Synthetic oligonucleotide
  Target: SCNA; (-) strand; PAM type: YTN; PAM sequence: TTT
tattcaactaattaattagt

SEQ ID NO: 45741 - DNA, 20 bp, Artificial Sequence
  Description of Artificial Sequence: Synthetic oligonucleotide
  Target: SCNA; (-) strand; PAM type: YTN; PAM sequence: TTC
aaagattttattcaactaat

SEQ ID NO: 45742 - DNA, 20 bp, Artificial Sequence
  Description of Artificial Sequence: Synthetic oligonucleotide
  Target: SCNA; (-) strand; PAM type: YTN; PAM sequence: TTT
caaagattttattcaactaa

SEQ ID NO: 45743 - DNA, 20 bp, Artificial Sequence
  Description of Artificial Sequence: Synthetic oligonucleotide
  Target: SCNA; (-) strand; PAM type: YTN; PAM sequence: TTA
tacaaacataaacacatttc

SEQ ID NO: 45744 - DNA, 20 bp, Artificial Sequence
  Description of Artificial Sequence: Synthetic oligonucleotide
  Target: SCNA; (-) strand; PAM type: YTN; PAM sequence: TTT
atacaaacataaacacattt

SEQ ID NO: 45745 - DNA, 20 bp, Artificial Sequence
  Description of Artificial Sequence: Synthetic oligonucleotide
  Target: SCNA; (-) strand; PAM type: YTN; PAM sequence: TTT
tatacaaacataaacacatt

SEQ ID NO: 45746 - DNA, 20 bp, Artificial Sequence
  Description of Artificial Sequence: Synthetic oligonucleotide
  Target: SCNA; (-) strand; PAM type: YTN; PAM sequence: TTT
ttatacaaacataaacacat

SEQ ID NO: 45747 - DNA, 20 bp, Artificial Sequence
  Description of Artificial Sequence: Synthetic oligonucleotide
  Target: SCNA; (-) strand; PAM type: YTN; PAM sequence: TTG
aaaagtaaagaagatggttt

SEQ ID NO: 45748 - DNA, 20 bp, Artificial Sequence
  Description of Artificial Sequence: Synthetic oligonucleotide
  Target: SCNA; (-) strand; PAM type: YTN; PAM sequence: TTT
gaaaagtaaagaagatggtt

SEQ ID NO: 45749 - DNA, 20 bp, Artificial Sequence
  Description of Artificial Sequence: Synthetic oligonucleotide
  Target: SCNA; (-) strand; PAM type: YTN; PAM sequence: TTT
tgaaaagtaaagaagatggt

SEQ ID NO: 45750 - DNA, 20 bp, Artificial Sequence
  Description of Artificial Sequence: Synthetic oligonucleotide
  Target: SCNA; (-) strand; PAM type: YTN; PAM sequence: TTT
ttgaaaagtaaagaagatgg

SEQ ID NO: 45751 - DNA, 20 bp, Artificial Sequence
  Description of Artificial Sequence: Synthetic oligonucleotide
  Target: SCNA; (-) strand; PAM type: YTN; PAM sequence: CTC
aagtatagtttttgaaaagt

SEQ ID NO: 45752 - DNA, 20 bp, Artificial Sequence
  Description of Artificial Sequence: Synthetic oligonucleotide
  Target: SCNA; (-) strand; PAM type: YTN; PAM sequence: TTC
acagtgtgctcaagtatagt

SEQ ID NO: 45753 - DNA, 20 bp, Artificial Sequence
  Description of Artificial Sequence: Synthetic oligonucleotide
  Target: SCNA; (-) strand; PAM type: YTN; PAM sequence: TTT
cacagtgtgctcaagtatag

SEQ ID NO: 45754 - DNA, 20 bp, Artificial Sequence
  Description of Artificial Sequence: Synthetic oligonucleotide
  Target: SCNA; (-) strand; PAM type: YTN; PAM sequence: TTT
tcacagtgtgctcaagtata

SEQ ID NO: 45755 - DNA, 20 bp, Artificial Sequence
  Description of Artificial Sequence: Synthetic oligonucleotide
  Target: SCNA; (-) strand; PAM type: YTN; PAM sequence: CTT
ttcacagtgtgctcaagtat

SEQ ID NO: 45756 - DNA, 20 bp, Artificial Sequence
  Description of Artificial Sequence: Synthetic oligonucleotide
  Target: SCNA; (-) strand; PAM type: YTN; PAM sequence: TTA
tcttttcacagtgtgctcaa

SEQ ID NO: 45757 - DNA, 20 bp, Artificial Sequence
  Description of Artificial Sequence: Synthetic oligonucleotide
  Target: SCNA; (-) strand; PAM type: YTN; PAM sequence: TTT
atcttttcacagtgtgctca

SEQ ID NO: 45758 - DNA, 20 bp, Artificial Sequence
  Description of Artificial Sequence: Synthetic oligonucleotide
  Target: SCNA; (-) strand; PAM type: YTN; PAM sequence: CTA
gcaatttatcttttcacagt

SEQ ID NO: 45759 - DNA, 20 bp, Artificial Sequence
  Description of Artificial Sequence: Synthetic oligonucleotide
  Target: SCNA; (-) strand; PAM type: YTN; PAM sequence: TTG
aacctagcaatttatctttt

SEQ ID NO: 45760 - DNA, 20 bp, Artificial Sequence
  Description of Artificial Sequence: Synthetic oligonucleotide
  Target: SCNA; (-) strand; PAM type: YTN; PAM sequence: CTC
agttgaacctagcaatttat

SEQ ID NO: 45761 - DNA, 20 bp, Artificial Sequence
  Description of Artificial Sequence: Synthetic oligonucleotide
  Target: SCNA; (-) strand; PAM type: YTN; PAM sequence: TTC
ctcagttgaacctagcaatt

SEQ ID NO: 45762 - DNA, 20 bp, Artificial Sequence
  Description of Artificial Sequence: Synthetic oligonucleotide
  Target: SCNA; (-) strand; PAM type: YTN; PAM sequence: TTC
agttcctcagttgaacctag

SEQ ID NO: 45763 - DNA, 20 bp, Artificial Sequence
  Description of Artificial Sequence: Synthetic oligonucleotide
  Target: SCNA; (-) strand; PAM type: YTN; PAM sequence: TTA
ttcagttcctcagttgaacc

SEQ ID NO: 45764 - DNA, 20 bp, Artificial Sequence
  Description of Artificial Sequence: Synthetic oligonucleotide
  Target: SCNA; (-) strand; PAM type: YTN; PAM sequence: CTA
aaagaggaaaaaattattca

SEQ ID NO: 45765 - DNA, 20 bp, Artificial Sequence
  Description of Artificial Sequence: Synthetic oligonucleotide
  Target: SCNA; (-) strand; PAM type: YTN; PAM sequence: TTA
aaactaaaagaggaaaaaat

SEQ ID NO: 45766 - DNA, 20 bp, Artificial Sequence
  Description of Artificial Sequence: Synthetic oligonucleotide
  Target: SCNA; (-) strand; PAM type: YTN; PAM sequence: TTG
tgtagaatgttaaaactaaa

SEQ ID NO: 45767 - DNA, 20 bp, Artificial Sequence
  Description of Artificial Sequence: Synthetic oligonucleotide
  Target: SCNA; (-) strand; PAM type: YTN; PAM sequence: TTA
gattgtgtagaatgttaaaa

SEQ ID NO: 45768 - DNA, 20 bp, Artificial Sequence
  Description of Artificial Sequence: Synthetic oligonucleotide
  Target: SCNA; (-) strand; PAM type: YTN; PAM sequence: TTT
agattgtgtagaatgttaaa

SEQ ID NO: 45769 - DNA, 20 bp, Artificial Sequence
  Description of Artificial Sequence: Synthetic oligonucleotide
  Target: SCNA; (-) strand; PAM type: YTN; PAM sequence: TTA
aaataatttagattgtgtag

SEQ ID NO: 45770 - DNA, 20 bp, Artificial Sequence
  Description of Artificial Sequence: Synthetic oligonucleotide
  Target: SCNA; (-) strand; PAM type: YTN; PAM sequence: TTT
aaaataatttagattgtgta

SEQ ID NO: 45771 - DNA, 20 bp, Artificial Sequence
  Description of Artificial Sequence: Synthetic oligonucleotide
  Target: SCNA; (-) strand; PAM type: YTN; PAM sequence: TTT
taaaataatttagattgtgt

SEQ ID NO: 45772 - DNA, 20 bp, Artificial Sequence
  Description of Artificial Sequence: Synthetic oligonucleotide
  Target: SCNA; (-) strand; PAM type: YTN; PAM sequence: CTG
agttttaaaataatttagat

SEQ ID NO: 45773 - DNA, 20 bp, Artificial Sequence
  Description of Artificial Sequence: Synthetic oligonucleotide
  Target: SCNA; (-) strand; PAM type: YTN; PAM sequence: TTC
tgagttttaaaataatttag

SEQ ID NO: 45774 - DNA, 20 bp, Artificial Sequence
  Description of Artificial Sequence: Synthetic oligonucleotide
  Target: SCNA; (-) strand; PAM type: YTN; PAM sequence: TTT
ctgagttttaaaataattta

SEQ ID NO: 45775 - DNA, 20 bp, Artificial Sequence
  Description of Artificial Sequence: Synthetic oligonucleotide
  Target: SCNA; (-) strand; PAM type: YTN; PAM sequence: TTT
tctgagttttaaaataattt

SEQ ID NO: 45776 - DNA, 20 bp, Artificial Sequence
  Description of Artificial Sequence: Synthetic oligonucleotide
  Target: SCNA; (-) strand; PAM type: YTN; PAM sequence: TTA
aagcattttctgagttttaa

SEQ ID NO: 45777 - DNA, 20 bp, Artificial Sequence
  Description of Artificial Sequence: Synthetic oligonucleotide
  Target: SCNA; (-) strand; PAM type: YTN; PAM sequence: CTT
aaagcattttctgagtttta

SEQ ID NO: 45778 - DNA, 20 bp, Artificial Sequence
  Description of Artificial Sequence: Synthetic oligonucleotide
  Target: SCNA; (-) strand; PAM type: YTN; PAM sequence: CTA
taaatatgagcttaaagcat

SEQ ID NO: 45779 - DNA, 20 bp, Artificial Sequence
  Description of Artificial Sequence: Synthetic oligonucleotide
  Target: SCNA; (-) strand; PAM type: YTN; PAM sequence: TTG
ggaagtctataaatatgagc

SEQ ID NO: 45780 - DNA, 20 bp, Artificial Sequence
  Description of Artificial Sequence: Synthetic oligonucleotide
  Target: SCNA; (-) strand; PAM type: YTN; PAM sequence: CTT
gggaagtctataaatatgag

SEQ ID NO: 45781 - DNA, 20 bp, Artificial Sequence
  Description of Artificial Sequence: Synthetic oligonucleotide
  Target: SCNA; (-) strand; PAM type: YTN; PAM sequence: CTA
cttgggaagtctataaatat

SEQ ID NO: 45782 - DNA, 20 bp, Artificial Sequence
  Description of Artificial Sequence: Synthetic oligonucleotide
  Target: SCNA; (-) strand; PAM type: YTN; PAM sequence: TTG
tactacttgggaagtctata

SEQ ID NO: 45783 - DNA, 20 bp, Artificial Sequence
  Description of Artificial Sequence: Synthetic oligonucleotide
  Target: SCNA; (-) strand; PAM type: YTN; PAM sequence: TTA
acagattgtactacttggga

SEQ ID NO: 45784 - DNA, 20 bp, Artificial Sequence
  Description of Artificial Sequence: Synthetic oligonucleotide
  Target: SCNA; (-) strand; PAM type: YTN; PAM sequence: CTC
agttaacagattgtactact

SEQ ID NO: 45785 - DNA, 20 bp, Artificial Sequence
  Description of Artificial Sequence: Synthetic oligonucleotide
  Target: SCNA; (-) strand; PAM type: YTN; PAM sequence: CTA
cctcagttaacagattgtac

SEQ ID NO: 45786 - DNA, 20 bp, Artificial Sequence
  Description of Artificial Sequence: Synthetic oligonucleotide
  Target: SCNA; (-) strand; PAM type: YTN; PAM sequence: TTA
cctacctcagttaacagatt

SEQ ID NO: 45787 - DNA, 20 bp, Artificial Sequence
  Description of Artificial Sequence: Synthetic oligonucleotide
  Target: SCNA; (-) strand; PAM type: YTN; PAM sequence: CTT
acctacctcagttaacagat

SEQ ID NO: 45788 - DNA, 20 bp, Artificial Sequence
  Description of Artificial Sequence: Synthetic oligonucleotide
  Target: SCNA; (-) strand; PAM type: YTN; PAM sequence: TTA
cttacctacctcagttaaca

SEQ ID NO: 45789 - DNA, 20 bp, Artificial Sequence
  Description of Artificial Sequence: Synthetic oligonucleotide
  Target: SCNA; (-) strand; PAM type: YTN; PAM sequence: TTT
acttacctacctcagttaac

SEQ ID NO: 45790 - DNA, 20 bp, Artificial Sequence
  Description of Artificial Sequence: Synthetic oligonucleotide
  Target: SCNA; (-) strand; PAM type: YTN; PAM sequence: TTC
aaggacgtttacttacctac

SEQ ID NO: 45791 - DNA, 20 bp, Artificial Sequence
  Description of Artificial Sequence: Synthetic oligonucleotide
  Target: SCNA; (-) strand; PAM type: YTN; PAM sequence: TTT
caaggacgtttacttaccta

SEQ ID NO: 45792 - DNA, 20 bp, Artificial Sequence
  Description of Artificial Sequence: Synthetic oligonucleotide
  Target: SCNA; (-) strand; PAM type: YTN; PAM sequence: TTT
tcaaggacgtttacttacct

SEQ ID NO: 45793 - DNA, 20 bp, Artificial Sequence
  Description of Artificial Sequence: Synthetic oligonucleotide
  Target: SCNA; (-) strand; PAM type: YTN; PAM sequence: TTA
tggaagttttcaaggacgtt

SEQ ID NO: 45794 - DNA, 20 bp, Artificial Sequence
  Description of Artificial Sequence: Synthetic oligonucleotide
  Target: SCNA; (-) strand; PAM type: YTN; PAM sequence: TTT
atggaagttttcaaggacgt

SEQ ID NO: 45795 - DNA, 20 bp, Artificial Sequence
  Description of Artificial Sequence: Synthetic oligonucleotide
  Target: SCNA; (-) strand; PAM type: YTN; PAM sequence: TTC
accatcatttatggaagttt

SEQ ID NO: 45796 - DNA, 20 bp, Artificial Sequence
  Description of Artificial Sequence: Synthetic oligonucleotide
  Target: SCNA; (-) strand; PAM type: YTN; PAM sequence: TTA
ttcaccatcatttatggaag

SEQ ID NO: 45797 - DNA, 20 bp, Artificial Sequence
  Description of Artificial Sequence: Synthetic oligonucleotide
  Target: SCNA; (-) strand; PAM type: YTN; PAM sequence: TTT
attcaccatcatttatggaa

SEQ ID NO: 45798 - DNA, 20 bp, Artificial Sequence
  Description of Artificial Sequence: Synthetic oligonucleotide
  Target: SCNA; (-) strand; PAM type: YTN; PAM sequence: TTA
atttattcaccatcatttat

SEQ ID NO: 45799 - DNA, 20 bp, Artificial Sequence
  Description of Artificial Sequence: Synthetic oligonucleotide
  Target: SCNA; (-) strand; PAM type: YTN; PAM sequence: TTT
aatttattcaccatcattta

SEQ ID NO: 45800 - DNA, 20 bp, Artificial Sequence
  Description of Artificial Sequence: Synthetic oligonucleotide
  Target: SCNA; (-) strand; PAM type: YTN; PAM sequence: TTT
taatttattcaccatcattt

SEQ ID NO: 45801 - DNA, 20 bp, Artificial Sequence
  Description of Artificial Sequence: Synthetic oligonucleotide
  Target: SCNA; (-) strand; PAM type: YTN; PAM sequence: TTT
ttaatttattcaccatcatt

SEQ ID NO: 45802 - DNA, 20 bp, Artificial Sequence
  Description of Artificial Sequence: Synthetic oligonucleotide
  Target: SCNA; (-) strand; PAM type: YTN; PAM sequence: CTT
tttaatttattcaccatcat

SEQ ID NO: 45803 - DNA, 20 bp, Artificial Sequence
  Description of Artificial Sequence: Synthetic oligonucleotide
  Target: SCNA; (-) strand; PAM type: YTN; PAM sequence: TTC
cacctttttaatttattcac

SEQ ID NO: 45804 - DNA, 20 bp, Artificial Sequence
  Description of Artificial Sequence: Synthetic oligonucleotide
  Target: SCNA; (-) strand; PAM type: YTN; PAM sequence: TTT
ccacctttttaatttattca

SEQ ID NO: 45805 - DNA, 20 bp, Artificial Sequence
  Description of Artificial Sequence: Synthetic oligonucleotide
  Target: SCNA; (-) strand; PAM type: YTN; PAM sequence: TTG
tttccacctttttaatttat

SEQ ID NO: 45806 - DNA, 20 bp, Artificial Sequence
  Description of Artificial Sequence: Synthetic oligonucleotide
  Target: SCNA; (-) strand; PAM type: YTN; PAM sequence: CTG
gaaaattgtttccacctttt

SEQ ID NO: 45807 - DNA, 20 bp, Artificial Sequence
  Description of Artificial Sequence: Synthetic oligonucleotide
  Target: SCNA; (-) strand; PAM type: YTN; PAM sequence: CTC
agagacctggaaaattgttt

SEQ ID NO: 45808 - DNA, 20 bp, Artificial Sequence
  Description of Artificial Sequence: Synthetic oligonucleotide
  Target: SCNA; (-) strand; PAM type: YTN; PAM sequence: TTG
aatatggctcagagacctgg

SEQ ID NO: 45809 - DNA, 20 bp, Artificial Sequence
  Description of Artificial Sequence: Synthetic oligonucleotide
  Target: SCNA; (-) strand; PAM type: YTN; PAM sequence: TTA
tattgaatatggctcagaga

SEQ ID NO: 45810 - DNA, 20 bp, Artificial Sequence
  Description of Artificial Sequence: Synthetic oligonucleotide
  Target: SCNA; (-) strand; PAM type: YTN; PAM sequence: TTC
attatattgaatatggctca

SEQ ID NO: 45811 - DNA, 20 bp, Artificial Sequence
  Description of Artificial Sequence: Synthetic oligonucleotide
  Target: SCNA; (-) strand; PAM type: YTN; PAM sequence: TTC
aggattcattatattgaata

SEQ ID NO: 45812 - DNA, 20 bp, Artificial Sequence
  Description of Artificial Sequence: Synthetic oligonucleotide
  Target: SCNA; (-) strand; PAM type: YTN; PAM sequence: CTA
ttcaggattcattatattga

SEQ ID NO: 45813 - DNA, 20 bp, Artificial Sequence
  Description of Artificial Sequence: Synthetic oligonucleotide
  Target: SCNA; (-) strand; PAM type: YTN; PAM sequence: CTC
ctattcaggattcattatat

SEQ ID NO: 45814 - DNA, 20 bp, Artificial Sequence
  Description of Artificial Sequence: Synthetic oligonucleotide
  Target: SCNA; (-) strand; PAM type: YTN; PAM sequence: TTG
aactcctattcaggattcat

SEQ ID NO: 45815 - DNA, 20 bp, Artificial Sequence
  Description of Artificial Sequence: Synthetic oligonucleotide
  Target: SCNA; (-) strand; PAM type: YTN; PAM sequence: TTC
attgaactcctattcaggat

SEQ ID NO: 45816 - DNA, 20 bp, Artificial Sequence
  Description of Artificial Sequence: Synthetic oligonucleotide
  Target: SCNA; (-) strand; PAM type: YTN; PAM sequence: TTT
cattgaactcctattcagga

SEQ ID NO: 45817 - DNA, 20 bp, Artificial Sequence
  Description of Artificial Sequence: Synthetic oligonucleotide
  Target: SCNA; (-) strand; PAM type: YTN; PAM sequence: TTT
tcattgaactcctattcagg

SEQ ID NO: 45818 - DNA, 20 bp, Artificial Sequence
  Description of Artificial Sequence: Synthetic oligonucleotide
  Target: SCNA; (-) strand; PAM type: YTN; PAM sequence: CTT
ttcattgaactcctattcag

SEQ ID NO: 45819 - DNA, 20 bp, Artificial Sequence
  Description of Artificial Sequence: Synthetic oligonucleotide
  Target: SCNA; (-) strand; PAM type: YTN; PAM sequence: CTA
atcttttcattgaactccta

SEQ ID NO: 45820 - DNA, 20 bp, Artificial Sequence
  Description of Artificial Sequence: Synthetic oligonucleotide
  Target: SCNA; (-) strand; PAM type: YTN; PAM sequence: CTA
cctaatcttttcattgaact

SEQ ID NO: 45821 - DNA, 20 bp, Artificial Sequence
  Description of Artificial Sequence: Synthetic oligonucleotide
  Target: SCNA; (-) strand; PAM type: YTN; PAM sequence: TTA
aaaaaaatctacctaatctt

SEQ ID NO: 45822 - DNA, 20 bp, Artificial Sequence
  Description of Artificial Sequence: Synthetic oligonucleotide
  Target: SCNA; (-) strand; PAM type: YTN; PAM sequence: TTT
aaaaaaaatctacctaatct

SEQ ID NO: 45823 - DNA, 20 bp, Artificial Sequence
  Description of Artificial Sequence: Synthetic oligonucleotide
  Target: SCNA; (-) strand; PAM type: YTN; PAM sequence: TTT
taaaaaaaatctacctaatc

SEQ ID NO: 45824 - DNA, 20 bp, Artificial Sequence
  Description of Artificial Sequence: Synthetic oligonucleotide
  Target: SCNA; (-) strand; PAM type: YTN; PAM sequence: TTT
ttaaaaaaaatctacctaat

SEQ ID NO: 45825 - DNA, 20 bp, Artificial Sequence
  Description of Artificial Sequence: Synthetic oligonucleotide
  Target: SCNA; (-) strand; PAM type: YTN; PAM sequence: TTT
tttaaaaaaaatctacctaa

SEQ ID NO: 45826 - DNA, 20 bp, Artificial Sequence
  Description of Artificial Sequence: Synthetic oligonucleotide
  Target: SCNA; (-) strand; PAM type: YTN; PAM sequence: TTT
ttttaaaaaaaatctaccta

SEQ ID NO: 45827 - DNA, 20 bp, Artificial Sequence
  Description of Artificial Sequence: Synthetic oligonucleotide
  Target: SCNA; (-) strand; PAM type: YTN; PAM sequence: TTT
tttttaaaaaaaatctacct

SEQ ID NO: 45828 - DNA, 20 bp, Artificial Sequence
  Description of Artificial Sequence: Synthetic oligonucleotide
  Target: SCNA; (-) strand; PAM type: YTN; PAM sequence: TTA
cagcaggatcccatgggata

SEQ ID NO: 45829 - DNA, 20 bp, Artificial Sequence
  Description of Artificial Sequence: Synthetic oligonucleotide
  Target: SCNA; (-) strand; PAM type: YTN; PAM sequence: CTT
acagcaggatcccatgggat

SEQ ID NO: 45830 - DNA, 20 bp, Artificial Sequence
  Description of Artificial Sequence: Synthetic oligonucleotide
  Target: SCNA; (-) strand; PAM type: YTN; PAM sequence: TTA
taaaagtaccttacagcagg

SEQ ID NO: 45831 - DNA, 20 bp, Artificial Sequence
  Description of Artificial Sequence: Synthetic oligonucleotide
  Target: SCNA; (-) strand; PAM type: YTN; PAM sequence: TTT
ataaaagtaccttacagcag

SEQ ID NO: 45832 - DNA, 20 bp, Artificial Sequence
  Description of Artificial Sequence: Synthetic oligonucleotide
  Target: SCNA; (-) strand; PAM type: YTN; PAM sequence: CTC
aaagatcaccaaagtatata

SEQ ID NO: 45833 - DNA, 20 bp, Artificial Sequence
  Description of Artificial Sequence: Synthetic oligonucleotide
  Target: SCNA; (-) strand; PAM type: YTN; PAM sequence: TTC
tcaaagatcaccaaagtata

SEQ ID NO: 45834 - DNA, 20 bp, Artificial Sequence
  Description of Artificial Sequence: Synthetic oligonucleotide
  Target: SCNA; (-) strand; PAM type: YTN; PAM sequence: TTT
ctcaaagatcaccaaagtat

SEQ ID NO: 45835 - DNA, 20 bp, Artificial Sequence
  Description of Artificial Sequence: Synthetic oligonucleotide
  Target: SCNA; (-) strand; PAM type: YTN; PAM sequence: CTT
tctcaaagatcaccaaagta

SEQ ID NO: 45836 - DNA, 20 bp, Artificial Sequence
  Description of Artificial Sequence: Synthetic oligonucleotide
  Target: SCNA; (-) strand; PAM type: YTN; PAM sequence: TTA
aatgctttctcaaagatcac

SEQ ID NO: 45837 - DNA, 20 bp, Artificial Sequence
  Description of Artificial Sequence: Synthetic oligonucleotide
  Target: SCNA; (-) strand; PAM type: YTN; PAM sequence: CTG
taataggttaaatgctttct

SEQ ID NO: 45838 - DNA, 20 bp, Artificial Sequence
  Description of Artificial Sequence: Synthetic oligonucleotide
  Target: SCNA; (-) strand; PAM type: YTN; PAM sequence: TTA
ggggaaaaaaatgcctgtaa

SEQ ID NO: 45839 - DNA, 20 bp, Artificial Sequence
  Description of Artificial Sequence: Synthetic oligonucleotide
  Target: SCNA; (-) strand; PAM type: YTN; PAM sequence: TTT
aggggaaaaaaatgcctgta

SEQ ID NO: 45840 - DNA, 20 bp, Artificial Sequence
  Description of Artificial Sequence: Synthetic oligonucleotide
  Target: SCNA; (-) strand; PAM type: YTN; PAM sequence: CTT
taggggaaaaaaatgcctgt

SEQ ID NO: 45841 - DNA, 20 bp, Artificial Sequence
  Description of Artificial Sequence: Synthetic oligonucleotide
  Target: SCNA; (-) strand; PAM type: YTN; PAM sequence: TTG
tactttaggggaaaaaaatg

SEQ ID NO: 45842 - DNA, 20 bp, Artificial Sequence
  Description of Artificial Sequence: Synthetic oligonucleotide
  Target: SCNA; (-) strand; PAM type: YTN; PAM sequence: CTT
gtactttaggggaaaaaaat

SEQ ID NO: 45843 - DNA, 20 bp, Artificial Sequence
  Description of Artificial Sequence: Synthetic oligonucleotide
  Target: SCNA; (-) strand; PAM type: YTN; PAM sequence: CTA
cttgtactttaggggaaaaa

SEQ ID NO: 45844 - DNA, 20 bp, Artificial Sequence
  Description of Artificial Sequence: Synthetic oligonucleotide
  Target: SCNA; (-) strand; PAM type: YTN; PAM sequence: CTA
cctacttgtactttagggga

SEQ ID NO: 45845 - DNA, 20 bp, Artificial Sequence
  Description of Artificial Sequence: Synthetic oligonucleotide
  Target: SCNA; (-) strand; PAM type: YTN; PAM sequence: TTG
acctacctacttgtacttta

SEQ ID NO: 45846 - DNA, 20 bp, Artificial Sequence
  Description of Artificial Sequence: Synthetic oligonucleotide
  Target: SCNA; (-) strand; PAM type: YTN; PAM sequence: TTT
gacctacctacttgtacttt

SEQ ID NO: 45847 - DNA, 20 bp, Artificial Sequence
  Description of Artificial Sequence: Synthetic oligonucleotide
  Target: SCNA; (-) strand; PAM type: YTN; PAM sequence: TTT
tgacctacctacttgtactt

SEQ ID NO: 45848 - DNA, 20 bp, Artificial Sequence
  Description of Artificial Sequence: Synthetic oligonucleotide
  Target: SCNA; (-) strand; PAM type: YTN; PAM sequence: CTT
ttgacctacctacttgtact

SEQ ID NO: 45849 - DNA, 20 bp, Artificial Sequence
  Description of Artificial Sequence: Synthetic oligonucleotide
  Target: SCNA; (-) strand; PAM type: YTN; PAM sequence: TTC
ttttgacctacctacttgta

SEQ ID NO: 45850 - DNA, 20 bp, Artificial Sequence
  Description of Artificial Sequence: Synthetic oligonucleotide
  Target: SCNA; (-) strand; PAM type: YTN; PAM sequence: CTG
ttcttttgacctacctactt

SEQ ID NO: 45851 - DNA, 20 bp, Artificial Sequence
  Description of Artificial Sequence: Synthetic oligonucleotide
  Target: SCNA; (-) strand; PAM type: YTN; PAM sequence: TTG
ctgttcttttgacctaccta

SEQ ID NO: 45852 - DNA, 20 bp, Artificial Sequence
  Description of Artificial Sequence: Synthetic oligonucleotide
  Target: SCNA; (-) strand; PAM type: YTN; PAM sequence: CTT
gctgttcttttgacctacct

SEQ ID NO: 45853 - DNA, 20 bp, Artificial Sequence
  Description of Artificial Sequence: Synthetic oligonucleotide
  Target: SCNA; (-) strand; PAM type: YTN; PAM sequence: TTG
tccttgctgttcttttgacc

SEQ ID NO: 45854 - DNA, 20 bp, Artificial Sequence
  Description of Artificial Sequence: Synthetic oligonucleotide
  Target: SCNA; (-) strand; PAM type: YTN; PAM sequence: TTG
ggtggatagacattgtcctt

SEQ ID NO: 45855 - DNA, 20 bp, Artificial Sequence
  Description of Artificial Sequence: Synthetic oligonucleotide
  Target: SCNA; (-) strand; PAM type: YTN; PAM sequence: TTC
ggaggccaccagattgggtg

SEQ ID NO: 45856 - DNA, 20 bp, Artificial Sequence
  Description of Artificial Sequence: Synthetic oligonucleotide
  Target: SCNA; (-) strand; PAM type: YTN; PAM sequence: CTT
cggaggccaccagattgggt

SEQ ID NO: 45857 - DNA, 20 bp, Artificial Sequence
  Description of Artificial Sequence: Synthetic oligonucleotide
  Target: SCNA; (-) strand; PAM type: YTN; PAM sequence: TTG
tccttcggaggccaccagat

SEQ ID NO: 45858 - DNA, 20 bp, Artificial Sequence
  Description of Artificial Sequence: Synthetic oligonucleotide
  Target: SCNA; (-) strand; PAM type: YTN; PAM sequence: TTT
gtccttcggaggccaccaga

SEQ ID NO: 45859 - DNA, 20 bp, Artificial Sequence
  Description of Artificial Sequence: Synthetic oligonucleotide
  Target: SCNA; (-) strand; PAM type: YTN; PAM sequence: TTT
tgtccttcggaggccaccag

SEQ ID NO: 45860 - DNA, 20 bp, Artificial Sequence
  Description of Artificial Sequence: Synthetic oligonucleotide
  Target: SCNA; (-) strand; PAM type: YTN; PAM sequence: CTT
ttgtccttcggaggccacca

SEQ ID NO: 45861 - DNA, 20 bp, Artificial Sequence
  Description of Artificial Sequence: Synthetic oligonucleotide
  Target: SCNA; (-) strand; PAM type: YTN; PAM sequence: CTG
gcttttgtccttcggaggcc

SEQ ID NO: 45862 - DNA, 20 bp, Artificial Sequence
  Description of Artificial Sequence: Synthetic oligonucleotide
  Target: SCNA; (-) strand; PAM type: YTN; PAM sequence: CTC
tggcttttgtccttcggagg

SEQ ID NO: 45863 - DNA, 20 bp, Artificial Sequence
  Description of Artificial Sequence: Synthetic oligonucleotide
  Target: SCNA; (-) strand; PAM type: YTN; PAM sequence: TTA
actctggcttttgtccttcg

SEQ ID NO: 45864 - DNA, 20 bp, Artificial Sequence
  Description of Artificial Sequence: Synthetic oligonucleotide
  Target: SCNA; (-) strand; PAM type: YTN; PAM sequence: TTA
gattaactctggcttttgtc

SEQ ID NO: 45865 - DNA, 20 bp, Artificial Sequence
  Description of Artificial Sequence: Synthetic oligonucleotide
  Target: SCNA; (-) strand; PAM type: YTN; PAM sequence: TTT
agattaactctggcttttgt

SEQ ID NO: 45866 - DNA, 20 bp, Artificial Sequence
  Description of Artificial Sequence: Synthetic oligonucleotide
  Target: SCNA; (-) strand; PAM type: YTN; PAM sequence: CTT
tagattaactctggcttttg

SEQ ID NO: 45867 - DNA, 20 bp, Artificial Sequence
  Description of Artificial Sequence: Synthetic oligonucleotide
  Target: SCNA; (-) strand; PAM type: YTN; PAM sequence: TTG
ctttagattaactctggctt

SEQ ID NO: 45868 - DNA, 20 bp, Artificial Sequence
  Description of Artificial Sequence: Synthetic oligonucleotide
  Target: SCNA; (-) strand; PAM type: YTN; PAM sequence: TTG
attgctttagattaactctg

SEQ ID NO: 45869 - DNA, 20 bp, Artificial Sequence
  Description of Artificial Sequence: Synthetic oligonucleotide
  Target: SCNA; (-) strand; PAM type: YTN; PAM sequence: CTT
gattgctttagattaactct

SEQ ID NO: 45870 - DNA, 20 bp, Artificial Sequence
  Description of Artificial Sequence: Synthetic oligonucleotide
  Target: SCNA; (-) strand; PAM type: YTN; PAM sequence: CTC
cttgattgctttagattaac

SEQ ID NO: 45871 - DNA, 20 bp, Artificial Sequence
  Description of Artificial Sequence: Synthetic oligonucleotide
  Target: SCNA; (-) strand; PAM type: YTN; PAM sequence: TTC
catggtggtcagactccttg

SEQ ID NO: 45872 - DNA, 20 bp, Artificial Sequence
  Description of Artificial Sequence: Synthetic oligonucleotide
  Target: SCNA; (-) strand; PAM type: YTN; PAM sequence: CTT
ccatggtggtcagactcctt

SEQ ID NO: 45873 - DNA, 20 bp, Artificial Sequence
  Description of Artificial Sequence: Synthetic oligonucleotide
  Target: SCNA; (-) strand; PAM type: YTN; PAM sequence: CTC
agggcttccatggtggtcag

SEQ ID NO: 45874 - DNA, 20 bp, Artificial Sequence
  Description of Artificial Sequence: Synthetic oligonucleotide
  Target: SCNA; (-) strand; PAM type: YTN; PAM sequence: TTC
ctcagggcttccatggtggt

SEQ ID NO: 45875 - DNA, 20 bp, Artificial Sequence
  Description of Artificial Sequence: Synthetic oligonucleotide
  Target: SCNA; (-) strand; PAM type: YTN; PAM sequence: CTT
cctcagggcttccatggtgg

SEQ ID NO: 45876 - DNA, 20 bp, Artificial Sequence
  Description of Artificial Sequence: Synthetic oligonucleotide
  Target: SCNA; (-) strand; PAM type: YTN; PAM sequence: TTG
aaaagggaaatacagcagcc

SEQ ID NO: 45877 - DNA, 20 bp, Artificial Sequence
  Description of Artificial Sequence: Synthetic oligonucleotide
  Target: SCNA; (-) strand; PAM type: YTN; PAM sequence: CTT
gaaaagggaaatacagcagc

SEQ ID NO: 45878 - DNA, 20 bp, Artificial Sequence
  Description of Artificial Sequence: Synthetic oligonucleotide
  Target: SCNA; (-) strand; PAM type: YTN; PAM sequence: CTC
ttgaaaagggaaatacagca

SEQ ID NO: 45879 - DNA, 20 bp, Artificial Sequence
  Description of Artificial Sequence: Synthetic oligonucleotide
  Target: SCNA; (-) strand; PAM type: YTN; PAM sequence: CTG
tatacgaaaagctcttgaaa

SEQ ID NO: 45880 - DNA, 20 bp, Artificial Sequence
  Description of Artificial Sequence: Synthetic oligonucleotide
  Target: SCNA; (-) strand; PAM type: YTN; PAM sequence: CTA
taggagagtggatagacgct

SEQ ID NO: 45881 - DNA, 20 bp, Artificial Sequence
  Description of Artificial Sequence: Synthetic oligonucleotide
  Target: SCNA; (-) strand; PAM type: YTN; PAM sequence: CTC
tataggagagtggatagacg

SEQ ID NO: 45882 - DNA, 20 bp, Artificial Sequence
  Description of Artificial Sequence: Synthetic oligonucleotide
  Target: SCNA; (-) strand; PAM type: YTN; PAM sequence: TTC
atctctataggagagtggat

SEQ ID NO: 45883 - DNA, 20 bp, Artificial Sequence
  Description of Artificial Sequence: Synthetic oligonucleotide
  Target: SCNA; (-) strand; PAM type: YTN; PAM sequence: CTT
catctctataggagagtgga

SEQ ID NO: 45884 - DNA, 20 bp, Artificial Sequence
  Description of Artificial Sequence: Synthetic oligonucleotide
  Target: SCNA; (-) strand; PAM type: YTN; PAM sequence: TTA
acttcatctctataggagag

SEQ ID NO: 45885 - DNA, 20 bp, Artificial Sequence
  Description of Artificial Sequence: Synthetic oligonucleotide
  Target: SCNA; (-) strand; PAM type: YTN; PAM sequence: CTA
gggagttaacttcatctcta

SEQ ID NO: 45886 - DNA, 20 bp, Artificial Sequence
  Description of Artificial Sequence: Synthetic oligonucleotide
  Target: SCNA; (-) strand; PAM type: YTN; PAM sequence: TTG
tctagggagttaacttcatc

SEQ ID NO: 45887 - DNA, 20 bp, Artificial Sequence
  Description of Artificial Sequence: Synthetic oligonucleotide
  Target: SCNA; (-) strand; PAM type: YTN; PAM sequence: TTG
gggacaggtgatagttgtct

SEQ ID NO: 45888 - DNA, 20 bp, Artificial Sequence
  Description of Artificial Sequence: Synthetic oligonucleotide
  Target: SCNA; (-) strand; PAM type: YTN; PAM sequence: TTG
tatgtcaagtggaggggtgg

SEQ ID NO: 45889 - DNA, 20 bp, Artificial Sequence
  Description of Artificial Sequence: Synthetic oligonucleotide
  Target: SCNA; (-) strand; PAM type: YTN; PAM sequence: TTT
gtatgtcaagtggaggggtg

SEQ ID NO: 45890 - DNA, 20 bp, Artificial Sequence
  Description of Artificial Sequence: Synthetic oligonucleotide
  Target: SCNA; (-) strand; PAM type: YTN; PAM sequence: TTG
ggtttgtatgtcaagtggag

SEQ ID NO: 45891 - DNA, 20 bp, Artificial Sequence
  Description of Artificial Sequence: Synthetic oligonucleotide
  Target: SCNA; (-) strand; PAM type: YTN; PAM sequence: TTT
gggtttgtatgtcaagtgga

SEQ ID NO: 45892 - DNA, 20 bp, Artificial Sequence
  Description of Artificial Sequence: Synthetic oligonucleotide
  Target: SCNA; (-) strand; PAM type: YTN; PAM sequence: CTT
tgggtttgtatgtcaagtgg

SEQ ID NO: 45893 - DNA, 20 bp, Artificial Sequence
  Description of Artificial Sequence: Synthetic oligonucleotide
  Target: SCNA; (-) strand; PAM type: YTN; PAM sequence: CTC
tttgggtttgtatgtcaagt

SEQ ID NO: 45894 - DNA, 20 bp, Artificial Sequence
  Description of Artificial Sequence: Synthetic oligonucleotide
  Target: SCNA; (-) strand; PAM type: YTN; PAM sequence: TTA
atctctttgggtttgtatgt

SEQ ID NO: 45895 - DNA, 20 bp, Artificial Sequence
  Description of Artificial Sequence: Synthetic oligonucleotide
  Target: SCNA; (-) strand; PAM type: YTN; PAM sequence: TTA
attaatctctttgggtttgt

SEQ ID NO: 45896 - DNA, 20 bp, Artificial Sequence
  Description of Artificial Sequence: Synthetic oligonucleotide
  Target: SCNA; (-) strand; PAM type: YTN; PAM sequence: CTG
gaacaaatgttaattaatct

SEQ ID NO: 45897 - DNA, 20 bp, Artificial Sequence
  Description of Artificial Sequence: Synthetic oligonucleotide
  Target: SCNA; (-) strand; PAM type: YTN; PAM sequence: TTC
ctggaacaaatgttaattaa

SEQ ID NO: 45898 - DNA, 20 bp, Artificial Sequence
  Description of Artificial Sequence: Synthetic oligonucleotide
  Target: SCNA; (-) strand; PAM type: YTN; PAM sequence: CTT
cctggaacaaatgttaatta

SEQ ID NO: 45899 - DNA, 20 bp, Artificial Sequence
  Description of Artificial Sequence: Synthetic oligonucleotide
  Target: SCNA; (-) strand; PAM type: YTN; PAM sequence: CTC
ttcctggaacaaatgttaat

SEQ ID NO: 45900 - DNA, 20 bp, Artificial Sequence
  Description of Artificial Sequence: Synthetic oligonucleotide
  Target: SCNA; (-) strand; PAM type: YTN; PAM sequence: CTG
tgtctcttcctggaacaaat

SEQ ID NO: 45901 - DNA, 20 bp, Artificial Sequence
  Description of Artificial Sequence: Synthetic oligonucleotide
  Target: SCNA; (-) strand; PAM type: YTN; PAM sequence: TTG
tctgtgtctcttcctggaac

SEQ ID NO: 45902 - DNA, 20 bp, Artificial Sequence
  Description of Artificial Sequence: Synthetic oligonucleotide
  Target: SCNA; (-) strand; PAM type: YTN; PAM sequence: TTT
gtctgtgtctcttcctggaa

SEQ ID NO: 45903 - DNA, 20 bp, Artificial Sequence
  Description of Artificial Sequence: Synthetic oligonucleotide
  Target: SCNA; (-) strand; PAM type: YTN; PAM sequence: TTT
tgtctgtgtctcttcctgga

SEQ ID NO: 45904 - DNA, 20 bp, Artificial Sequence
  Description of Artificial Sequence: Synthetic oligonucleotide
  Target: SCNA; (-) strand; PAM type: YTN; PAM sequence: TTT
ttgtctgtgtctcttcctgg

SEQ ID NO: 45905 - DNA, 20 bp, Artificial Sequence
  Description of Artificial Sequence: Synthetic oligonucleotide
  Target: SCNA; (-) strand; PAM type: YTN; PAM sequence: TTC
caatatcggatgtttttgtc

SEQ ID NO: 45906 - DNA, 20 bp, Artificial Sequence
  Description of Artificial Sequence: Synthetic oligonucleotide
  Target: SCNA; (-) strand; PAM type: YTN; PAM sequence: TTC
acgaaggaatattccaatat

SEQ ID NO: 45907 - DNA, 20 bp, Artificial Sequence
  Description of Artificial Sequence: Synthetic oligonucleotide
  Target: SCNA; (-) strand; PAM type: YTN; PAM sequence: TTA
ttcacgaaggaatattccaa

SEQ ID NO: 45908 - DNA, 20 bp, Artificial Sequence
  Description of Artificial Sequence: Synthetic oligonucleotide
  Target: SCNA; (-) strand; PAM type: YTN; PAM sequence: TTT
attcacgaaggaatattcca

SEQ ID NO: 45909 - DNA, 20 bp, Artificial Sequence
  Description of Artificial Sequence: Synthetic oligonucleotide
  Target: SCNA; (-) strand; PAM type: YTN; PAM sequence: TTA
tatttattcacgaaggaata

SEQ ID NO: 45910 - DNA, 20 bp, Artificial Sequence
  Description of Artificial Sequence: Synthetic oligonucleotide
  Target: SCNA; (-) strand; PAM type: YTN; PAM sequence: TTT
atatttattcacgaaggaat

SEQ ID NO: 45911 - DNA, 20 bp, Artificial Sequence
  Description of Artificial Sequence: Synthetic oligonucleotide
  Target: SCNA; (-) strand; PAM type: YTN; PAM sequence: TTT
tatatttattcacgaaggaa

SEQ ID NO: 45912 - DNA, 20 bp, Artificial Sequence
  Description of Artificial Sequence: Synthetic oligonucleotide
  Target: SCNA; (-) strand; PAM type: YTN; PAM sequence: CTC
cataagttttatatttattc

SEQ ID NO: 45913 - DNA, 20 bp, Artificial Sequence
  Description of Artificial Sequence: Synthetic oligonucleotide
  Target: SCNA; (-) strand; PAM type: YTN; PAM sequence: CTC
tccataagttttatatttat

SEQ ID NO: 45914 - DNA, 20 bp, Artificial Sequence
  Description of Artificial Sequence: Synthetic oligonucleotide
  Target: SCNA; (-) strand; PAM type: YTN; PAM sequence: CTC
cctctccataagttttatat

SEQ ID NO: 45915 - DNA, 20 bp, Artificial Sequence
  Description of Artificial Sequence: Synthetic oligonucleotide
  Target: SCNA; (-) strand; PAM type: YTN; PAM sequence: TTC
ctccctctccataagtttta

SEQ ID NO: 45916 - DNA, 20 bp, Artificial Sequence
  Description of Artificial Sequence: Synthetic oligonucleotide
  Target: SCNA; (-) strand; PAM type: YTN; PAM sequence: CTT
cctccctctccataagtttt

SEQ ID NO: 45917 - DNA, 20 bp, Artificial Sequence
  Description of Artificial Sequence: Synthetic oligonucleotide
  Target: SCNA; (-) strand; PAM type: YTN; PAM sequence: TTC
aaaatatcttcctccctctc

SEQ ID NO: 45918 - DNA, 20 bp, Artificial Sequence
  Description of Artificial Sequence: Synthetic oligonucleotide
  Target: SCNA; (-) strand; PAM type: YTN; PAM sequence: TTT
caaaatatcttcctccctct

SEQ ID NO: 45919 - DNA, 20 bp, Artificial Sequence
  Description of Artificial Sequence: Synthetic oligonucleotide
  Target: SCNA; (-) strand; PAM type: YTN; PAM sequence: CTT
tcaaaatatcttcctccctc

SEQ ID NO: 45920 - DNA, 20 bp, Artificial Sequence
  Description of Artificial Sequence: Synthetic oligonucleotide
  Target: SCNA; (-) strand; PAM type: YTN; PAM sequence: TTC
ctttcaaaatatcttcctcc

SEQ ID NO: 45921 - DNA, 20 bp, Artificial Sequence
  Description of Artificial Sequence: Synthetic oligonucleotide
  Target: SCNA; (-) strand; PAM type: YTN; PAM sequence: TTT
cctttcaaaatatcttcctc

SEQ ID NO: 45922 - DNA, 20 bp, Artificial Sequence
  Description of Artificial Sequence: Synthetic oligonucleotide
  Target: SCNA; (-) strand; PAM type: YTN; PAM sequence: TTT
tcctttcaaaatatcttcct

SEQ ID NO: 45923 - DNA, 20 bp, Artificial Sequence
  Description of Artificial Sequence: Synthetic oligonucleotide
  Target: SCNA; (-) strand; PAM type: YTN; PAM sequence: TTT
ttcctttcaaaatatcttcc

SEQ ID NO: 45924 - DNA, 20 bp, Artificial Sequence
  Description of Artificial Sequence: Synthetic oligonucleotide
  Target: SCNA; (-) strand; PAM type: YTN; PAM sequence: TTT
tttcctttcaaaatatcttc

SEQ ID NO: 45925 - DNA, 20 bp, Artificial Sequence
  Description of Artificial Sequence: Synthetic oligonucleotide
  Target: SCNA; (-) strand; PAM type: YTN; PAM sequence: TTT
ttttcctttcaaaatatctt

SEQ ID NO: 45926 - DNA, 20 bp, Artificial Sequence
  Description of Artificial Sequence: Synthetic oligonucleotide
  Target: SCNA; (-) strand; PAM type: YTN; PAM sequence: TTG
agcaataaagtccaatgatt

SEQ ID NO: 45927 - DNA, 20 bp, Artificial Sequence
  Description of Artificial Sequence: Synthetic oligonucleotide
  Target: SCNA; (-) strand; PAM type: YTN; PAM sequence: TTT
gagcaataaagtccaatgat

SEQ ID NO: 45928 - DNA, 20 bp, Artificial Sequence
  Description of Artificial Sequence: Synthetic oligonucleotide
  Target: SCNA; (-) strand; PAM type: YTN; PAM sequence: CTT
tgagcaataaagtccaatga

SEQ ID NO: 45929 - DNA, 20 bp, Artificial Sequence
  Description of Artificial Sequence: Synthetic oligonucleotide
  Target: SCNA; (-) strand; PAM type: YTN; PAM sequence: TTG
gctttgagcaataaagtcca

SEQ ID NO: 45930 - DNA, 20 bp, Artificial Sequence
  Description of Artificial Sequence: Synthetic oligonucleotide
  Target: SCNA; (-) strand; PAM type: YTN; PAM sequence: TTT
ggctttgagcaataaagtcc

SEQ ID NO: 45931 - DNA, 20 bp, Artificial Sequence
  Description of Artificial Sequence: Synthetic oligonucleotide
  Target: SCNA; (-) strand; PAM type: YTN; PAM sequence: TTT
tggctttgagcaataaagtc

SEQ ID NO: 45932 - DNA, 20 bp, Artificial Sequence
  Description of Artificial Sequence: Synthetic oligonucleotide
  Target: SCNA; (-) strand; PAM type: YTN; PAM sequence: CTT
ttggctttgagcaataaagt

SEQ ID NO: 45933 - DNA, 20 bp, Artificial Sequence
  Description of Artificial Sequence: Synthetic oligonucleotide
  Target: SCNA; (-) strand; PAM type: YTN; PAM sequence: TTC
ttttggctttgagcaataaa

SEQ ID NO: 45934 - DNA, 20 bp, Artificial Sequence
  Description of Artificial Sequence: Synthetic oligonucleotide
  Target: SCNA; (-) strand; PAM type: YTN; PAM sequence: TTT
cttttggctttgagcaataa

SEQ ID NO: 45935 - DNA, 20 bp, Artificial Sequence
  Description of Artificial Sequence: Synthetic oligonucleotide
  Target: SCNA; (-) strand; PAM type: YTN; PAM sequence: TTG
ccacaaaaaacaatttcttt

SEQ ID NO: 45936 - DNA, 20 bp, Artificial Sequence
  Description of Artificial Sequence: Synthetic oligonucleotide
  Target: SCNA; (-) strand; PAM type: YTN; PAM sequence: TTT
gccacaaaaaacaatttctt

SEQ ID NO: 45937 - DNA, 20 bp, Artificial Sequence
  Description of Artificial Sequence: Synthetic oligonucleotide
  Target: SCNA; (-) strand; PAM type: YTN; PAM sequence: TTT
tgccacaaaaaacaatttct

SEQ ID NO: 45938 - DNA, 20 bp, Artificial Sequence
  Description of Artificial Sequence: Synthetic oligonucleotide
  Target: SCNA; (-) strand; PAM type: YTN; PAM sequence: CTT
ttgccacaaaaaacaatttc

SEQ ID NO: 45939 - DNA, 20 bp, Artificial Sequence
  Description of Artificial Sequence: Synthetic oligonucleotide
  Target: SCNA; (-) strand; PAM type: YTN; PAM sequence: TTA
cttttgccacaaaaaacaat

SEQ ID NO: 45940 - DNA, 20 bp, Artificial Sequence
  Description of Artificial Sequence: Synthetic oligonucleotide
  Target: SCNA; (-) strand; PAM type: YTN; PAM sequence: TTT
acttttgccacaaaaaacaa

SEQ ID NO: 45941 - DNA, 20 bp, Artificial Sequence
  Description of Artificial Sequence: Synthetic oligonucleotide
  Target: SCNA; (-) strand; PAM type: YTN; PAM sequence: TTT
tacttttgccacaaaaaaca

SEQ ID NO: 45942 - DNA, 20 bp, Artificial Sequence
  Description of Artificial Sequence: Synthetic oligonucleotide
  Target: SCNA; (-) strand; PAM type: YTN; PAM sequence: TTG
ttttacttttgccacaaaaa

SEQ ID NO: 45943 - DNA, 20 bp, Artificial Sequence
  Description of Artificial Sequence: Synthetic oligonucleotide
  Target: SCNA; (-) strand; PAM type: YTN; PAM sequence: CTT
gttttacttttgccacaaaa

SEQ ID NO: 45944 - DNA, 20 bp, Artificial Sequence
  Description of Artificial Sequence: Synthetic oligonucleotide
  Target: SCNA; (-) strand; PAM type: YTN; PAM sequence: TTA
ccttgttttacttttgccac

SEQ ID NO: 45945 - DNA, 20 bp, Artificial Sequence
  Description of Artificial Sequence: Synthetic oligonucleotide
  Target: SCNA; (-) strand; PAM type: YTN; PAM sequence: TTG
ccagaaatacagcacacagt

SEQ ID NO: 45946 - DNA, 20 bp, Artificial Sequence
  Description of Artificial Sequence: Synthetic oligonucleotide
  Target: SCNA; (-) strand; PAM type: YTN; PAM sequence: TTA
agataacagataattgccag

SEQ ID NO: 45947 - DNA, 20 bp, Artificial Sequence
  Description of Artificial Sequence: Synthetic oligonucleotide
  Target: SCNA; (-) strand; PAM type: YTN; PAM sequence: CTT
aagataacagataattgcca

SEQ ID NO: 45948 - DNA, 20 bp, Artificial Sequence
  Description of Artificial Sequence: Synthetic oligonucleotide
  Target: SCNA; (-) strand; PAM type: YTN; PAM sequence: CTC
ttaagataacagataattgc

SEQ ID NO: 45949 - DNA, 20 bp, Artificial Sequence
  Description of Artificial Sequence: Synthetic oligonucleotide
  Target: SCNA; (-) strand; PAM type: YTN; PAM sequence: CTA
tataagcctcttaagataac

SEQ ID NO: 45950 - DNA, 20 bp, Artificial Sequence
  Description of Artificial Sequence: Synthetic oligonucleotide
  Target: SCNA; (-) strand; PAM type: YTN; PAM sequence: TTC
tatataagcctcttaagata

SEQ ID NO: 45951 - DNA, 20 bp, Artificial Sequence
  Description of Artificial Sequence: Synthetic oligonucleotide
  Target: SCNA; (-) strand; PAM type: YTN; PAM sequence: TTT
ctatataagcctcttaagat

SEQ ID NO: 45952 - DNA, 20 bp, Artificial Sequence
  Description of Artificial Sequence: Synthetic oligonucleotide
  Target: SCNA; (-) strand; PAM type: YTN; PAM sequence: CTT
tctatataagcctcttaaga

SEQ ID NO: 45953 - DNA, 20 bp, Artificial Sequence
  Description of Artificial Sequence: Synthetic oligonucleotide
  Target: SCNA; (-) strand; PAM type: YTN; PAM sequence: TTC
tttctatataagcctcttaa

SEQ ID NO: 45954 - DNA, 20 bp, Artificial Sequence
  Description of Artificial Sequence: Synthetic oligonucleotide
  Target: SCNA; (-) strand; PAM type: YTN; PAM sequence: TTG
ttctttctatataagcctct

SEQ ID NO: 45955 - DNA, 20 bp, Artificial Sequence
  Description of Artificial Sequence: Synthetic oligonucleotide
  Target: SCNA; (-) strand; PAM type: YTN; PAM sequence: CTG
tgaaagtaggtacaattgtt

SEQ ID NO: 45956 - DNA, 20 bp, Artificial Sequence
  Description of Artificial Sequence: Synthetic oligonucleotide
  Target: SCNA; (-) strand; PAM type: YTN; PAM sequence: CTC
agagcatgctgtgaaagtag

SEQ ID NO: 45957 - DNA, 20 bp, Artificial Sequence
  Description of Artificial Sequence: Synthetic oligonucleotide
  Target: SCNA; (-) strand; PAM type: YTN; PAM sequence: TTA
gatcctcagagcatgctgtg

SEQ ID NO: 45958 - DNA, 20 bp, Artificial Sequence
  Description of Artificial Sequence: Synthetic oligonucleotide
  Target: SCNA; (-) strand; PAM type: YTN; PAM sequence: CTT
agatcctcagagcatgctgt

SEQ ID NO: 45959 - DNA, 20 bp, Artificial Sequence
  Description of Artificial Sequence: Synthetic oligonucleotide
  Target: SCNA; (-) strand; PAM type: YTN; PAM sequence: TTG
agggtccttagatcctcaga

SEQ ID NO: 45960 - DNA, 20 bp, Artificial Sequence
  Description of Artificial Sequence: Synthetic oligonucleotide
  Target: SCNA; (-) strand; PAM type: YTN; PAM sequence: TTG
ttgagggtccttagatcctc

SEQ ID NO: 45961 - DNA, 20 bp, Artificial Sequence
  Description of Artificial Sequence: Synthetic oligonucleotide
  Target: SCNA; (-) strand; PAM type: YTN; PAM sequence: TTT
gttgagggtccttagatcct

SEQ ID NO: 45962 - DNA, 20 bp, Artificial Sequence
  Description of Artificial Sequence: Synthetic oligonucleotide
  Target: SCNA; (-) strand; PAM type: YTN; PAM sequence: CTA
tttgttgagggtccttagat

SEQ ID NO: 45963 - DNA, 20 bp, Artificial Sequence
  Description of Artificial Sequence: Synthetic oligonucleotide
  Target: SCNA; (-) strand; PAM type: YTN; PAM sequence: TTG
tagcatgaaaactatttgtt

SEQ ID NO: 45964 - DNA, 20 bp, Artificial Sequence
  Description of Artificial Sequence: Synthetic oligonucleotide
  Target: SCNA; (-) strand; PAM type: YTN; PAM sequence: CTT
gtagcatgaaaactatttgt

SEQ ID NO: 45965 - DNA, 20 bp, Artificial Sequence
  Description of Artificial Sequence: Synthetic oligonucleotide
  Target: SCNA; (-) strand; PAM type: YTN; PAM sequence: CTG
cttgtagcatgaaaactatt

SEQ ID NO: 45966 - DNA, 20 bp, Artificial Sequence
  Description of Artificial Sequence: Synthetic oligonucleotide
  Target: SCNA; (-) strand; PAM type: YTN; PAM sequence: CTA
aataagtgcctgcttgtagc

SEQ ID NO: 45967 - DNA, 20 bp, Artificial Sequence
  Description of Artificial Sequence: Synthetic oligonucleotide
  Target: SCNA; (-) strand; PAM type: YTN; PAM sequence: TTG
tgcctaaataagtgcctgct

SEQ ID NO: 45968 - DNA, 20 bp, Artificial Sequence
  Description of Artificial Sequence: Synthetic oligonucleotide
  Target: SCNA; (-) strand; PAM type: YTN; PAM sequence: TTT
gtgcctaaataagtgcctgc

SEQ ID NO: 45969 - DNA, 20 bp, Artificial Sequence
  Description of Artificial Sequence: Synthetic oligonucleotide
  Target: SCNA; (-) strand; PAM type: YTN; PAM sequence: CTA
tttgtgcctaaataagtgcc

SEQ ID NO: 45970 - DNA, 20 bp, Artificial Sequence
  Description of Artificial Sequence: Synthetic oligonucleotide
  Target: SCNA; (-) strand; PAM type: YTN; PAM sequence: TTA
aaaaaagaatcccatcctat

SEQ ID NO: 45971 - DNA, 20 bp, Artificial Sequence
  Description of Artificial Sequence: Synthetic oligonucleotide
  Target: SCNA; (-) strand; PAM type: YTN; PAM sequence: CTA
cagttaaaaaaagaatccca

SEQ ID NO: 45972 - DNA, 20 bp, Artificial Sequence
  Description of Artificial Sequence: Synthetic oligonucleotide
  Target: SCNA; (-) strand; PAM type: YTN; PAM sequence: TTA
tactacagttaaaaaaagaa

SEQ ID NO: 45973 - DNA, 20 bp, Artificial Sequence
  Description of Artificial Sequence: Synthetic oligonucleotide
  Target: SCNA; (-) strand; PAM type: YTN; PAM sequence: TTT
atactacagttaaaaaaaga

SEQ ID NO: 45974 - DNA, 20 bp, Artificial Sequence
  Description of Artificial Sequence: Synthetic oligonucleotide
  Target: SCNA; (-) strand; PAM type: YTN; PAM sequence: TTA
tttatactacagttaaaaaa

SEQ ID NO: 45975 - DNA, 20 bp, Artificial Sequence
  Description of Artificial Sequence: Synthetic oligonucleotide
  Target: SCNA; (-) strand; PAM type: YTN; PAM sequence: TTA
tataaaattatttatactac

SEQ ID NO: 45976 - DNA, 20 bp, Artificial Sequence
  Description of Artificial Sequence: Synthetic oligonucleotide
  Target: SCNA; (-) strand; PAM type: YTN; PAM sequence: CTG
tattatataaaattatttat

SEQ ID NO: 45977 - DNA, 20 bp, Artificial Sequence
  Description of Artificial Sequence: Synthetic oligonucleotide
  Target: SCNA; (-) strand; PAM type: YTN; PAM sequence: CTA
tataactgtattatataaaa

SEQ ID NO: 45978 - DNA, 20 bp, Artificial Sequence
  Description of Artificial Sequence: Synthetic oligonucleotide
  Target: SCNA; (-) strand; PAM type: YTN; PAM sequence: TTA
aaaaagcctatataactgta

SEQ ID NO: 45979 - DNA, 20 bp, Artificial Sequence
  Description of Artificial Sequence: Synthetic oligonucleotide
  Target: SCNA; (-) strand; PAM type: YTN; PAM sequence: TTT
aaaaaagcctatataactgt

SEQ ID NO: 45980 - DNA, 20 bp, Artificial Sequence
  Description of Artificial Sequence: Synthetic oligonucleotide
  Target: SCNA; (-) strand; PAM type: YTN; PAM sequence: TTG
tttaaaaaagcctatataac

SEQ ID NO: 45981 - DNA, 20 bp, Artificial Sequence
  Description of Artificial Sequence: Synthetic oligonucleotide
  Target: SCNA; (-) strand; PAM type: YTN; PAM sequence: TTT
gtttaaaaaagcctatataa

SEQ ID NO: 45982 - DNA, 20 bp, Artificial Sequence
  Description of Artificial Sequence: Synthetic oligonucleotide
  Target: SCNA; (-) strand; PAM type: YTN; PAM sequence: TTT
tgtttaaaaaagcctatata

SEQ ID NO: 45983 - DNA, 20 bp, Artificial Sequence
  Description of Artificial Sequence: Synthetic oligonucleotide
  Target: SCNA; (-) strand; PAM type: YTN; PAM sequence: CTG
tattttgtttaaaaaagcct

SEQ ID NO: 45984 - DNA, 20 bp, Artificial Sequence
  Description of Artificial Sequence: Synthetic oligonucleotide
  Target: SCNA; (-) strand; PAM type: YTN; PAM sequence: CTG
actgtattttgtttaaaaaa

SEQ ID NO: 45985 - DNA, 20 bp, Artificial Sequence
  Description of Artificial Sequence: Synthetic oligonucleotide
  Target: SCNA; (-) strand; PAM type: YTN; PAM sequence: TTA
aaatctgactgtattttgtt

SEQ ID NO: 45986 - DNA, 20 bp, Artificial Sequence
  Description of Artificial Sequence: Synthetic oligonucleotide
  Target: SCNA; (-) strand; PAM type: YTN; PAM sequence: TTT
aaaatctgactgtattttgt

SEQ ID NO: 45987 - DNA, 20 bp, Artificial Sequence
  Description of Artificial Sequence: Synthetic oligonucleotide
  Target: SCNA; (-) strand; PAM type: YTN; PAM sequence: TTA
gaatagagagatttaaaatc

SEQ ID NO: 45988 - DNA, 20 bp, Artificial Sequence
  Description of Artificial Sequence: Synthetic oligonucleotide
  Target: SCNA; (-) strand; PAM type: YTN; PAM sequence: CTT
agaatagagagatttaaaat

SEQ ID NO: 45989 - DNA, 20 bp, Artificial Sequence
  Description of Artificial Sequence: Synthetic oligonucleotide
  Target: SCNA; (-) strand; PAM type: YTN; PAM sequence: CTA
tcttagaatagagagattta

SEQ ID NO: 45990 - DNA, 20 bp, Artificial Sequence
  Description of Artificial Sequence: Synthetic oligonucleotide
  Target: SCNA; (-) strand; PAM type: YTN; PAM sequence: TTG
tgaagtgtctatcttagaat

SEQ ID NO: 45991 - DNA, 20 bp, Artificial Sequence
  Description of Artificial Sequence: Synthetic oligonucleotide
  Target: SCNA; (-) strand; PAM type: YTN; PAM sequence: TTA
aattgtgaagtgtctatctt

SEQ ID NO: 45992 - DNA, 20 bp, Artificial Sequence
  Description of Artificial Sequence: Synthetic oligonucleotide
  Target: SCNA; (-) strand; PAM type: YTN; PAM sequence: TTT
aaattgtgaagtgtctatct

SEQ ID NO: 45993 - DNA, 20 bp, Artificial Sequence
  Description of Artificial Sequence: Synthetic oligonucleotide
  Target: SCNA; (-) strand; PAM type: YTN; PAM sequence: TTG
aatttaaattgtgaagtgtc

SEQ ID NO: 45994 - DNA, 20 bp, Artificial Sequence
  Description of Artificial Sequence: Synthetic oligonucleotide
  Target: SCNA; (-) strand; PAM type: YTN; PAM sequence: CTT
gaatttaaattgtgaagtgt

SEQ ID NO: 45995 - DNA, 20 bp, Artificial Sequence
  Description of Artificial Sequence: Synthetic oligonucleotide
  Target: SCNA; (-) strand; PAM type: YTN; PAM sequence: TTC
aagaaacaaggagtcttgaa

SEQ ID NO: 45996 - DNA, 20 bp, Artificial Sequence
  Description of Artificial Sequence: Synthetic oligonucleotide
  Target: SCNA; (-) strand; PAM type: YTN; PAM sequence: CTT
caagaaacaaggagtcttga

SEQ ID NO: 45997 - DNA, 20 bp, Artificial Sequence
  Description of Artificial Sequence: Synthetic oligonucleotide
  Target: SCNA; (-) strand; PAM type: YTN; PAM sequence: TTC
atagatgtcttcaagaaaca

SEQ ID NO: 45998 - DNA, 20 bp, Artificial Sequence
  Description of Artificial Sequence: Synthetic oligonucleotide
  Target: SCNA; (-) strand; PAM type: YTN; PAM sequence: TTT
catagatgtcttcaagaaac

SEQ ID NO: 45999 - DNA, 20 bp, Artificial Sequence
  Description of Artificial Sequence: Synthetic oligonucleotide
  Target: SCNA; (-) strand; PAM type: YTN; PAM sequence: CTT
tcatagatgtcttcaagaaa

SEQ ID NO: 46000 - DNA, 20 bp, Artificial Sequence
  Description of Artificial Sequence: Synthetic oligonucleotide
  Target: SCNA; (-) strand; PAM type: YTN; PAM sequence: TTG
ctttcatagatgtcttcaag

SEQ ID NO: 46001 - DNA, 20 bp, Artificial Sequence
  Description of Artificial Sequence: Synthetic oligonucleotide
  Target: SCNA; (-) strand; PAM type: YTN; PAM sequence: TTT
gctttcatagatgtcttcaa

SEQ ID NO: 46002 - DNA, 20 bp, Artificial Sequence
  Description of Artificial Sequence: Synthetic oligonucleotide
  Target: SCNA; (-) strand; PAM type: YTN; PAM sequence: CTC
aaaaacatttgctttcatag

SEQ ID NO: 46003 - DNA, 20 bp, Artificial Sequence
  Description of Artificial Sequence: Synthetic oligonucleotide
  Target: SCNA; (-) strand; PAM type: YTN; PAM sequence: TTC
tcaaaaacatttgctttcat

SEQ ID NO: 46004 - DNA, 20 bp, Artificial Sequence
  Description of Artificial Sequence: Synthetic oligonucleotide
  Target: SCNA; (-) strand; PAM type: YTN; PAM sequence: TTC
agccaagttctcaaaaacat

SEQ ID NO: 46005 - DNA, 20 bp, Artificial Sequence
  Description of Artificial Sequence: Synthetic oligonucleotide
  Target: SCNA; (-) strand; PAM type: YTN; PAM sequence: CTC
agattcagccaagttctcaa

SEQ ID NO: 46006 - DNA, 20 bp, Artificial Sequence
  Description of Artificial Sequence: Synthetic oligonucleotide
  Target: SCNA; (-) strand; PAM type: YTN; PAM sequence: CTA
atcggaatggactcagattc

SEQ ID NO: 46007 - DNA, 20 bp, Artificial Sequence
  Description of Artificial Sequence: Synthetic oligonucleotide
  Target: SCNA; (-) strand; PAM type: YTN; PAM sequence: CTG
ctaatcggaatggactcaga

SEQ ID NO: 46008 - DNA, 20 bp, Artificial Sequence
  Description of Artificial Sequence: Synthetic oligonucleotide
  Target: SCNA; (-) strand; PAM type: YTN; PAM sequence: CTC
aaaagtgaatgtggaatctg

SEQ ID NO: 46009 - DNA, 20 bp, Artificial Sequence
  Description of Artificial Sequence: Synthetic oligonucleotide
  Target: SCNA; (-) strand; PAM type: YTN; PAM sequence: CTA
agtcatggctcaaaagtgaa

SEQ ID NO: 46010 - DNA, 20 bp, Artificial Sequence
  Description of Artificial Sequence: Synthetic oligonucleotide
  Target: SCNA; (-) strand; PAM type: YTN; PAM sequence: TTC
taagtcatggctcaaaagtg

SEQ ID NO: 46011 - DNA, 20 bp, Artificial Sequence
  Description of Artificial Sequence: Synthetic oligonucleotide
  Target: SCNA; (-) strand; PAM type: YTN; PAM sequence: CTT
ctaagtcatggctcaaaagt

SEQ ID NO: 46012 - DNA, 20 bp, Artificial Sequence
  Description of Artificial Sequence: Synthetic oligonucleotide
  Target: SCNA; (-) strand; PAM type: YTN; PAM sequence: TTG
atagcttctaagtcatggct

SEQ ID NO: 46013 - DNA, 20 bp, Artificial Sequence
  Description of Artificial Sequence: Synthetic oligonucleotide
  Target: SCNA; (-) strand; PAM type: YTN; PAM sequence: CTT
gatagcttctaagtcatggc

SEQ ID NO: 46014 - DNA, 20 bp, Artificial Sequence
  Description of Artificial Sequence: Synthetic oligonucleotide
  Target: SCNA; (-) strand; PAM type: YTN; PAM sequence: CTA
cataatgtcttgatagcttc

SEQ ID NO: 46015 - DNA, 20 bp, Artificial Sequence
  Description of Artificial Sequence: Synthetic oligonucleotide
  Target: SCNA; (-) strand; PAM type: YTN; PAM sequence: TTG
ctacataatgtcttgatagc

SEQ ID NO: 46016 - DNA, 20 bp, Artificial Sequence
  Description of Artificial Sequence: Synthetic oligonucleotide
  Target: SCNA; (-) strand; PAM type: YTN; PAM sequence: CTG
agaaaaaggttgctacataa

SEQ ID NO: 46017 - DNA, 20 bp, Artificial Sequence
  Description of Artificial Sequence: Synthetic oligonucleotide
  Target: SCNA; (-) strand; PAM type: YTN; PAM sequence: CTG
gaatactgagaaaaaggttg

SEQ ID NO: 46018 - DNA, 20 bp, Artificial Sequence
  Description of Artificial Sequence: Synthetic oligonucleotide
  Target: SCNA; (-) strand; PAM type: YTN; PAM sequence: TTC
ctggaatactgagaaaaagg

SEQ ID NO: 46019 - DNA, 20 bp, Artificial Sequence
  Description of Artificial Sequence: Synthetic oligonucleotide
  Target: SCNA; (-) strand; PAM type: YTN; PAM sequence: TTT
cctggaatactgagaaaaag

SEQ ID NO: 46020 - DNA, 20 bp, Artificial Sequence
  Description of Artificial Sequence: Synthetic oligonucleotide
  Target: SCNA; (-) strand; PAM type: YTN; PAM sequence: TTT
tcctggaatactgagaaaaa

SEQ ID NO: 46021 - DNA, 20 bp, Artificial Sequence
  Description of Artificial Sequence: Synthetic oligonucleotide
  Target: SCNA; (-) strand; PAM type: YTN; PAM sequence: TTA
ttttcctggaatactgagaa

SEQ ID NO: 46022 - DNA, 20 bp, Artificial Sequence
  Description of Artificial Sequence: Synthetic oligonucleotide
  Target: SCNA; (-) strand; PAM type: YTN; PAM sequence: TTT
attttcctggaatactgaga

SEQ ID NO: 46023 - DNA, 20 bp, Artificial Sequence
  Description of Artificial Sequence: Synthetic oligonucleotide
  Target: SCNA; (-) strand; PAM type: YTN; PAM sequence: TTT
tattttcctggaatactgag

SEQ ID NO: 46024 - DNA, 20 bp, Artificial Sequence
  Description of Artificial Sequence: Synthetic oligonucleotide
  Target: SCNA; (-) strand; PAM type: YTN; PAM sequence: TTT
ttattttcctggaatactga

SEQ ID NO: 46025 - DNA, 20 bp, Artificial Sequence
  Description of Artificial Sequence: Synthetic oligonucleotide
  Target: SCNA; (-) strand; PAM type: YTN; PAM sequence: TTA
atgcatgcacatttttattt

SEQ ID NO: 46026 - DNA, 20 bp, Artificial Sequence
  Description of Artificial Sequence: Synthetic oligonucleotide
  Target: SCNA; (-) strand; PAM type: YTN; PAM sequence: TTG
agttaatgcatgcacatttt

SEQ ID NO: 46027 - DNA, 20 bp, Artificial Sequence
  Description of Artificial Sequence: Synthetic oligonucleotide
  Target: SCNA; (-) strand; PAM type: YTN; PAM sequence: CTA
ttgagttaatgcatgcacat

SEQ ID NO: 46028 - DNA, 20 bp, Artificial Sequence
  Description of Artificial Sequence: Synthetic oligonucleotide
  Target: SCNA; (-) strand; PAM type: YTN; PAM sequence: CTG
aatacctattgagttaatgc

SEQ ID NO: 46029 - DNA, 20 bp, Artificial Sequence
  Description of Artificial Sequence: Synthetic oligonucleotide
  Target: SCNA; (-) strand; PAM type: YTN; PAM sequence: CTA
atgggaaacatctgaatacc

SEQ ID NO: 46030 - DNA, 20 bp, Artificial Sequence
  Description of Artificial Sequence: Synthetic oligonucleotide
  Target: SCNA; (-) strand; PAM type: YTN; PAM sequence: TTA
ctaatgggaaacatctgaat

SEQ ID NO: 46031 - DNA, 20 bp, Artificial Sequence
  Description of Artificial Sequence: Synthetic oligonucleotide
  Target: SCNA; (-) strand; PAM type: YTN; PAM sequence: CTT
actaatgggaaacatctgaa

SEQ ID NO: 46032 - DNA, 20 bp, Artificial Sequence
  Description of Artificial Sequence: Synthetic oligonucleotide
  Target: SCNA; (-) strand; PAM type: YTN; PAM sequence: TTG
catggtcacaacttactaat

SEQ ID NO: 46033 - DNA, 20 bp, Artificial Sequence
  Description of Artificial Sequence: Synthetic oligonucleotide
  Target: SCNA; (-) strand; PAM type: YTN; PAM sequence: TTA
ttgcatggtcacaacttact

SEQ ID NO: 46034 - DNA, 20 bp, Artificial Sequence
  Description of Artificial Sequence: Synthetic oligonucleotide
  Target: SCNA; (-) strand; PAM type: YTN; PAM sequence: TTT
attgcatggtcacaacttac

SEQ ID NO: 46035 - DNA, 20 bp, Artificial Sequence
  Description of Artificial Sequence: Synthetic oligonucleotide
  Target: SCNA; (-) strand; PAM type: YTN; PAM sequence: TTT
tattgcatggtcacaactta

SEQ ID NO: 46036 - DNA, 20 bp, Artificial Sequence
  Description of Artificial Sequence: Synthetic oligonucleotide
  Target: SCNA; (-) strand; PAM type: YTN; PAM sequence: TTT
ttattgcatggtcacaactt

SEQ ID NO: 46037 - DNA, 20 bp, Artificial Sequence
  Description of Artificial Sequence: Synthetic oligonucleotide
  Target: SCNA; (-) strand; PAM type: YTN; PAM sequence: TTG
gtgagcatggtttttattgc

SEQ ID NO: 46038 - DNA, 20 bp, Artificial Sequence
  Description of Artificial Sequence: Synthetic oligonucleotide
  Target: SCNA; (-) strand; PAM type: YTN; PAM sequence: TTG
gggaatattggtgagcatgg

SEQ ID NO: 46039 - DNA, 20 bp, Artificial Sequence
  Description of Artificial Sequence: Synthetic oligonucleotide
  Target: SCNA; (-) strand; PAM type: YTN; PAM sequence: TTA
ttggggaatattggtgagca

SEQ ID NO: 46040 - DNA, 20 bp, Artificial Sequence
  Description of Artificial Sequence: Synthetic oligonucleotide
  Target: SCNA; (-) strand; PAM type: YTN; PAM sequence: TTT
attggggaatattggtgagc

SEQ ID NO: 46041 - DNA, 20 bp, Artificial Sequence
  Description of Artificial Sequence: Synthetic oligonucleotide
  Target: SCNA; (-) strand; PAM type: YTN; PAM sequence: TTG
aagtttattggggaatattg

SEQ ID NO: 46042 - DNA, 20 bp, Artificial Sequence
  Description of Artificial Sequence: Synthetic oligonucleotide
  Target: SCNA; (-) strand; PAM type: YTN; PAM sequence: CTT
gaagtttattggggaatatt

SEQ ID NO: 46043 - DNA, 20 bp, Artificial Sequence
  Description of Artificial Sequence: Synthetic oligonucleotide
  Target: SCNA; (-) strand; PAM type: YTN; PAM sequence: TTA
caaatcttgaagtttattgg

SEQ ID NO: 46044 - DNA, 20 bp, Artificial Sequence
  Description of Artificial Sequence: Synthetic oligonucleotide
  Target: SCNA; (-) strand; PAM type: YTN; PAM sequence: CTT
acaaatcttgaagtttattg

SEQ ID NO: 46045 - DNA, 20 bp, Artificial Sequence
  Description of Artificial Sequence: Synthetic oligonucleotide
  Target: SCNA; (-) strand; PAM type: YTN; PAM sequence: TTA
acataaatgtgggtatgcat

SEQ ID NO: 46046 - DNA, 20 bp, Artificial Sequence
  Description of Artificial Sequence: Synthetic oligonucleotide
  Target: SCNA; (-) strand; PAM type: YTN; PAM sequence: TTT
aacataaatgtgggtatgca

SEQ ID NO: 46047 - DNA, 20 bp, Artificial Sequence
  Description of Artificial Sequence: Synthetic oligonucleotide
  Target: SCNA; (-) strand; PAM type: YTN; PAM sequence: TTT
taacataaatgtgggtatgc

SEQ ID NO: 46048 - DNA, 20 bp, Artificial Sequence
  Description of Artificial Sequence: Synthetic oligonucleotide
  Target: SCNA; (-) strand; PAM type: YTN; PAM sequence: TTC
aaattttaacataaatgtgg

SEQ ID NO: 46049 - DNA, 20 bp, Artificial Sequence
  Description of Artificial Sequence: Synthetic oligonucleotide
  Target: SCNA; (-) strand; PAM type: YTN; PAM sequence: TTT
caaattttaacataaatgtg

SEQ ID NO: 46050 - DNA, 20 bp, Artificial Sequence
  Description of Artificial Sequence: Synthetic oligonucleotide
  Target: SCNA; (-) strand; PAM type: YTN; PAM sequence: TTA
tttcaaattttaacataaat

SEQ ID NO: 46051 - DNA, 20 bp, Artificial Sequence
  Description of Artificial Sequence: Synthetic oligonucleotide
  Target: SCNA; (-) strand; PAM type: YTN; PAM sequence: TTC
attatttcaaattttaacat

SEQ ID NO: 46052 - DNA, 20 bp, Artificial Sequence
  Description of Artificial Sequence: Synthetic oligonucleotide
  Target: SCNA; (-) strand; PAM type: YTN; PAM sequence: TTT
cattatttcaaattttaaca

SEQ ID NO: 46053 - DNA, 20 bp, Artificial Sequence
  Description of Artificial Sequence: Synthetic oligonucleotide
  Target: SCNA; (-) strand; PAM type: YTN; PAM sequence: TTC
acaatgcaaaaatatttcat

SEQ ID NO: 46054 - DNA, 20 bp, Artificial Sequence
  Description of Artificial Sequence: Synthetic oligonucleotide
  Target: SCNA; (-) strand; PAM type: YTN; PAM sequence: TTT
cacaatgcaaaaatatttca

SEQ ID NO: 46055 - DNA, 20 bp, Artificial Sequence
  Description of Artificial Sequence: Synthetic oligonucleotide
  Target: SCNA; (-) strand; PAM type: YTN; PAM sequence: TTT
tcacaatgcaaaaatatttc

SEQ ID NO: 46056 - DNA, 20 bp, Artificial Sequence
  Description of Artificial Sequence: Synthetic oligonucleotide
  Target: SCNA; (-) strand; PAM type: YTN; PAM sequence: TTT
ttcacaatgcaaaaatattt

SEQ ID NO: 46057 - DNA, 20 bp, Artificial Sequence
  Description of Artificial Sequence: Synthetic oligonucleotide
  Target: SCNA; (-) strand; PAM type: YTN; PAM sequence: CTA
tttttcacaatgcaaaaata

SEQ ID NO: 46058 - DNA, 20 bp, Artificial Sequence
  Description of Artificial Sequence: Synthetic oligonucleotide
  Target: SCNA; (-) strand; PAM type: YTN; PAM sequence: TTG
gtcacaaaatgcatatatat

SEQ ID NO: 46059 - DNA, 20 bp, Artificial Sequence
  Description of Artificial Sequence: Synthetic oligonucleotide
  Target: SCNA; (-) strand; PAM type: YTN; PAM sequence: TTT
ggtcacaaaatgcatatata

SEQ ID NO: 46060 - DNA, 20 bp, Artificial Sequence
  Description of Artificial Sequence: Synthetic oligonucleotide
  Target: SCNA; (-) strand; PAM type: YTN; PAM sequence: TTT
tggtcacaaaatgcatatat

SEQ ID NO: 46061 - DNA, 20 bp, Artificial Sequence
  Description of Artificial Sequence: Synthetic oligonucleotide
  Target: SCNA; (-) strand; PAM type: YTN; PAM sequence: CTG
tggtgatggttttggtcaca

SEQ ID NO: 46062 - DNA, 20 bp, Artificial Sequence
  Description of Artificial Sequence: Synthetic oligonucleotide
  Target: SCNA; (-) strand; PAM type: YTN; PAM sequence: TTA
taaccccaaatgtgccagat

SEQ ID NO: 46063 - DNA, 20 bp, Artificial Sequence
  Description of Artificial Sequence: Synthetic oligonucleotide
  Target: SCNA; (-) strand; PAM type: YTN; PAM sequence: TTT
ataaccccaaatgtgccaga

SEQ ID NO: 46064 - DNA, 20 bp, Artificial Sequence
  Description of Artificial Sequence: Synthetic oligonucleotide
  Target: SCNA; (-) strand; PAM type: YTN; PAM sequence: TTG
tgatttataaccccaaatgt

SEQ ID NO: 46065 - DNA, 20 bp, Artificial Sequence
  Description of Artificial Sequence: Synthetic oligonucleotide
  Target: SCNA; (-) strand; PAM type: YTN; PAM sequence: TTT
gtgatttataaccccaaatg

SEQ ID NO: 46066 - DNA, 20 bp, Artificial Sequence
  Description of Artificial Sequence: Synthetic oligonucleotide
  Target: SCNA; (-) strand; PAM type: YTN; PAM sequence: TTA
tttgtgatttataaccccaa

SEQ ID NO: 46067 - DNA, 20 bp, Artificial Sequence
  Description of Artificial Sequence: Synthetic oligonucleotide
  Target: SCNA; (-) strand; PAM type: YTN; PAM sequence: TTA
tgttatttgtgatttataac

SEQ ID NO: 46068 - DNA, 20 bp, Artificial Sequence
  Description of Artificial Sequence: Synthetic oligonucleotide
  Target: SCNA; (-) strand; PAM type: YTN; PAM sequence: TTT
atgttatttgtgatttataa

SEQ ID NO: 46069 - DNA, 20 bp, Artificial Sequence
  Description of Artificial Sequence: Synthetic oligonucleotide
  Target: SCNA; (-) strand; PAM type: YTN; PAM sequence: TTA
tttatgttatttgtgattta

SEQ ID NO: 46070 - DNA, 20 bp, Artificial Sequence
  Description of Artificial Sequence: Synthetic oligonucleotide
  Target: SCNA; (-) strand; PAM type: YTN; PAM sequence: CTT
atttatgttatttgtgattt

SEQ ID NO: 46071 - DNA, 20 bp, Artificial Sequence
  Description of Artificial Sequence: Synthetic oligonucleotide
  Target: SCNA; (-) strand; PAM type: YTN; PAM sequence: TTA
tcttatttatgttatttgtg

SEQ ID NO: 46072 - DNA, 20 bp, Artificial Sequence
  Description of Artificial Sequence: Synthetic oligonucleotide
  Target: SCNA; (-) strand; PAM type: YTN; PAM sequence: TTA
acattatcttatttatgtta

SEQ ID NO: 46073 - DNA, 20 bp, Artificial Sequence
  Description of Artificial Sequence: Synthetic oligonucleotide
  Target: SCNA; (-) strand; PAM type: YTN; PAM sequence: TTG
taagaaggagattaacatta

SEQ ID NO: 46074 - DNA, 20 bp, Artificial Sequence
  Description of Artificial Sequence: Synthetic oligonucleotide
  Target: SCNA; (-) strand; PAM type: YTN; PAM sequence: TTT
gtaagaaggagattaacatt

SEQ ID NO: 46075 - DNA, 20 bp, Artificial Sequence
  Description of Artificial Sequence: Synthetic oligonucleotide
  Target: SCNA; (-) strand; PAM type: YTN; PAM sequence: TTT
tgtaagaaggagattaacat

SEQ ID NO: 46076 - DNA, 20 bp, Artificial Sequence
  Description of Artificial Sequence: Synthetic oligonucleotide
  Target: SCNA; (-) strand; PAM type: YTN; PAM sequence: TTG
gattttgtaagaaggagatt

SEQ ID NO: 46077 - DNA, 20 bp, Artificial Sequence
  Description of Artificial Sequence: Synthetic oligonucleotide
  Target: SCNA; (-) strand; PAM type: YTN; PAM sequence: TTG
tgggaagccattggattttg

SEQ ID NO: 46078 - DNA, 20 bp, Artificial Sequence
  Description of Artificial Sequence: Synthetic oligonucleotide
  Target: SCNA; (-) strand; PAM type: YTN; PAM sequence: CTT
gtgggaagccattggatttt

SEQ ID NO: 46079 - DNA, 20 bp, Artificial Sequence
  Description of Artificial Sequence: Synthetic oligonucleotide
  Target: SCNA; (-) strand; PAM type: YTN; PAM sequence: TTA
tatatagacttgtgggaagc

SEQ ID NO: 46080 - DNA, 20 bp, Artificial Sequence
  Description of Artificial Sequence: Synthetic oligonucleotide
  Target: SCNA; (-) strand; PAM type: YTN; PAM sequence: TTG
catattatatatagacttgt

SEQ ID NO: 46081 - DNA, 20 bp, Artificial Sequence
  Description of Artificial Sequence: Synthetic oligonucleotide
  Target: SCNA; (-) strand; PAM type: YTN; PAM sequence: TTT
gcatattatatatagacttg

SEQ ID NO: 46082 - DNA, 20 bp, Artificial Sequence
  Description of Artificial Sequence: Synthetic oligonucleotide
  Target: SCNA; (-) strand; PAM type: YTN; PAM sequence: CTA
tagtaagaaatttgcatatt

SEQ ID NO: 46083 - DNA, 20 bp, Artificial Sequence
  Description of Artificial Sequence: Synthetic oligonucleotide
  Target: SCNA; (-) strand; PAM type: YTN; PAM sequence: TTA
taagctatagtaagaaattt

SEQ ID NO: 46084 - DNA, 20 bp, Artificial Sequence
  Description of Artificial Sequence: Synthetic oligonucleotide
  Target: SCNA; (-) strand; PAM type: YTN; PAM sequence: CTT
ataagctatagtaagaaatt

SEQ ID NO: 46085 - DNA, 20 bp, Artificial Sequence
  Description of Artificial Sequence: Synthetic oligonucleotide
  Target: SCNA; (-) strand; PAM type: YTN; PAM sequence: TTC
cagatcttataagctatagt

SEQ ID NO: 46086 - DNA, 20 bp, Artificial Sequence
  Description of Artificial Sequence: Synthetic oligonucleotide
  Target: SCNA; (-) strand; PAM type: YTN; PAM sequence: TTA
ttccagatcttataagctat

SEQ ID NO: 46087 - DNA, 20 bp, Artificial Sequence
  Description of Artificial Sequence: Synthetic oligonucleotide
  Target: SCNA; (-) strand; PAM type: YTN; PAM sequence: CTG
gagataggaaaaattattcc

SEQ ID NO: 46088 - DNA, 20 bp, Artificial Sequence
  Description of Artificial Sequence: Synthetic oligonucleotide
  Target: SCNA; (-) strand; PAM type: YTN; PAM sequence: CTA
gaatatgatgaatgtgagaa

SEQ ID NO: 46089 - DNA, 20 bp, Artificial Sequence
  Description of Artificial Sequence: Synthetic oligonucleotide
  Target: SCNA; (-) strand; PAM type: YTN; PAM sequence: TTA
gctagaatatgatgaatgtg

SEQ ID NO: 46090 - DNA, 20 bp, Artificial Sequence
  Description of Artificial Sequence: Synthetic oligonucleotide
  Target: SCNA; (-) strand; PAM type: YTN; PAM sequence: CTG
attagctagaatatgatgaa

SEQ ID NO: 46091 - DNA, 20 bp, Artificial Sequence
  Description of Artificial Sequence: Synthetic oligonucleotide
  Target: SCNA; (-) strand; PAM type: YTN; PAM sequence: TTA
tgacataaaagagtcctgat

SEQ ID NO: 46092 - DNA, 20 bp, Artificial Sequence
  Description of Artificial Sequence: Synthetic oligonucleotide
  Target: SCNA; (-) strand; PAM type: YTN; PAM sequence: TTT
atgacataaaagagtcctga

SEQ ID NO: 46093 - DNA, 20 bp, Artificial Sequence
  Description of Artificial Sequence: Synthetic oligonucleotide
  Target: SCNA; (-) strand; PAM type: YTN; PAM sequence: TTT
tatgacataaaagagtcctg

SEQ ID NO: 46094 - DNA, 20 bp, Artificial Sequence
  Description of Artificial Sequence: Synthetic oligonucleotide
  Target: SCNA; (-) strand; PAM type: YTN; PAM sequence: CTA
gcatattttatgacataaaa

SEQ ID NO: 46095 - DNA, 20 bp, Artificial Sequence
  Description of Artificial Sequence: Synthetic oligonucleotide
  Target: SCNA; (-) strand; PAM type: YTN; PAM sequence: TTA
agggtgtgcaaatctagcat

SEQ ID NO: 46096 - DNA, 20 bp, Artificial Sequence
  Description of Artificial Sequence: Synthetic oligonucleotide
  Target: SCNA; (-) strand; PAM type: YTN; PAM sequence: TTT
aagggtgtgcaaatctagca

SEQ ID NO: 46097 - DNA, 20 bp, Artificial Sequence
  Description of Artificial Sequence: Synthetic oligonucleotide
  Target: SCNA; (-) strand; PAM type: YTN; PAM sequence: CTT
taagggtgtgcaaatctagc

SEQ ID NO: 46098 - DNA, 20 bp, Artificial Sequence
  Description of Artificial Sequence: Synthetic oligonucleotide
  Target: SCNA; (-) strand; PAM type: YTN; PAM sequence: CTC
gtatatgaaggctttaaggg

SEQ ID NO: 46099 - DNA, 20 bp, Artificial Sequence
  Description of Artificial Sequence: Synthetic oligonucleotide
  Target: SCNA; (-) strand; PAM type: YTN; PAM sequence: TTC
gggaatgtggaacagaggta

SEQ ID NO: 46100 - DNA, 20 bp, Artificial Sequence
  Description of Artificial Sequence: Synthetic oligonucleotide
  Target: SCNA; (-) strand; PAM type: YTN; PAM sequence: CTG
tgtgatgagagagagaatgt

SEQ ID NO: 46101 - DNA, 20 bp, Artificial Sequence
  Description of Artificial Sequence: Synthetic oligonucleotide
  Target: SCNA; (-) strand; PAM type: YTN; PAM sequence: TTG
agatcaggagggtgaaaggg

SEQ ID NO: 46102 - DNA, 20 bp, Artificial Sequence
  Description of Artificial Sequence: Synthetic oligonucleotide
  Target: SCNA; (-) strand; PAM type: YTN; PAM sequence: TTC
aattgagatcaggagggtga

SEQ ID NO: 46103 - DNA, 20 bp, Artificial Sequence
  Description of Artificial Sequence: Synthetic oligonucleotide
  Target: SCNA; (-) strand; PAM type: YTN; PAM sequence: TTT
caattgagatcaggagggtg

SEQ ID NO: 46104 - DNA, 20 bp, Artificial Sequence
  Description of Artificial Sequence: Synthetic oligonucleotide
  Target: SCNA; (-) strand; PAM type: YTN; PAM sequence: TTA
tacaggaaggtcacatttca

SEQ ID NO: 46105 - DNA, 20 bp, Artificial Sequence
  Description of Artificial Sequence: Synthetic oligonucleotide
  Target: SCNA; (-) strand; PAM type: YTN; PAM sequence: TTT
atacaggaaggtcacatttc

SEQ ID NO: 46106 - DNA, 20 bp, Artificial Sequence
  Description of Artificial Sequence: Synthetic oligonucleotide
  Target: SCNA; (-) strand; PAM type: YTN; PAM sequence: CTC
atggaaagtttatacaggaa

SEQ ID NO: 46107 - DNA, 20 bp, Artificial Sequence
  Description of Artificial Sequence: Synthetic oligonucleotide
  Target: SCNA; (-) strand; PAM type: YTN; PAM sequence: TTC
agtcagacaagccagctcat

SEQ ID NO: 46108 - DNA, 20 bp, Artificial Sequence
  Description of Artificial Sequence: Synthetic oligonucleotide
  Target: SCNA; (-) strand; PAM type: YTN; PAM sequence: TTG
ggttcagtcagacaagccag

SEQ ID NO: 46109 - DNA, 20 bp, Artificial Sequence
  Description of Artificial Sequence: Synthetic oligonucleotide
  Target: SCNA; (-) strand; PAM type: YTN; PAM sequence: TTT
gggttcagtcagacaagcca

SEQ ID NO: 46110 - DNA, 20 bp, Artificial Sequence
  Description of Artificial Sequence: Synthetic oligonucleotide
  Target: SCNA; (-) strand; PAM type: YTN; PAM sequence: TTA
gccatttgggttcagtcaga

SEQ ID NO: 46111 - DNA, 20 bp, Artificial Sequence
  Description of Artificial Sequence: Synthetic oligonucleotide
  Target: SCNA; (-) strand; PAM type: YTN; PAM sequence: TTA
gagagcatgtaacgggaaag

SEQ ID NO: 46112 - DNA, 20 bp, Artificial Sequence
  Description of Artificial Sequence: Synthetic oligonucleotide
  Target: SCNA; (-) strand; PAM type: YTN; PAM sequence: TTC
cccccaagcaaagcatcata

SEQ ID NO: 46113 - DNA, 20 bp, Artificial Sequence
  Description of Artificial Sequence: Synthetic oligonucleotide
  Target: SCNA; (-) strand; PAM type: YTN; PAM sequence: TTT
ccccccaagcaaagcatcat

SEQ ID NO: 46114 - DNA, 20 bp, Artificial Sequence
  Description of Artificial Sequence: Synthetic oligonucleotide
  Target: SCNA; (-) strand; PAM type: YTN; PAM sequence: TTT
tccccccaagcaaagcatca

SEQ ID NO: 46115 - DNA, 20 bp, Artificial Sequence
  Description of Artificial Sequence: Synthetic oligonucleotide
  Target: SCNA; (-) strand; PAM type: YTN; PAM sequence: CTC
attttccccccaagcaaagc

SEQ ID NO: 46116 - DNA, 20 bp, Artificial Sequence
  Description of Artificial Sequence: Synthetic oligonucleotide
  Target: SCNA; (-) strand; PAM type: YTN; PAM sequence: CTC
tcattttccccccaagcaaa

SEQ ID NO: 46117 - DNA, 20 bp, Artificial Sequence
  Description of Artificial Sequence: Synthetic oligonucleotide
  Target: SCNA; (-) strand; PAM type: YTN; PAM sequence: CTC
ccacctctcattttcccccc

SEQ ID NO: 46118 - DNA, 20 bp, Artificial Sequence
  Description of Artificial Sequence: Synthetic oligonucleotide
  Target: SCNA; (-) strand; PAM type: YTN; PAM sequence: TTC
cgtaaacagactcccacctc

SEQ ID NO: 46119 - DNA, 20 bp, Artificial Sequence
  Description of Artificial Sequence: Synthetic oligonucleotide
  Target: SCNA; (-) strand; PAM type: YTN; PAM sequence: TTC
catgttccgtaaacagactc

SEQ ID NO: 46120 - DNA, 20 bp, Artificial Sequence
  Description of Artificial Sequence: Synthetic oligonucleotide
  Target: SCNA; (-) strand; PAM type: YTN; PAM sequence: CTT
ccatgttccgtaaacagact

SEQ ID NO: 46121 - DNA, 20 bp, Artificial Sequence
  Description of Artificial Sequence: Synthetic oligonucleotide
  Target: SCNA; (-) strand; PAM type: YTN; PAM sequence: CTG
caaaaggacttccatgttcc

SEQ ID NO: 46122 - DNA, 20 bp, Artificial Sequence
  Description of Artificial Sequence: Synthetic oligonucleotide
  Target: SCNA; (-) strand; PAM type: YTN; PAM sequence: CTC
tgcaaaaggacttccatgtt

SEQ ID NO: 46123 - DNA, 20 bp, Artificial Sequence
  Description of Artificial Sequence: Synthetic oligonucleotide
  Target: SCNA; (-) strand; PAM type: YTN; PAM sequence: TTG
tacctctgcaaaaggacttc

SEQ ID NO: 46124 - DNA, 20 bp, Artificial Sequence
  Description of Artificial Sequence: Synthetic oligonucleotide
  Target: SCNA; (-) strand; PAM type: YTN; PAM sequence: CTT
gtacctctgcaaaaggactt

SEQ ID NO: 46125 - DNA, 20 bp, Artificial Sequence
  Description of Artificial Sequence: Synthetic oligonucleotide
  Target: SCNA; (-) strand; PAM type: YTN; PAM sequence: CTC
ttgtacctctgcaaaaggac

SEQ ID NO: 46126 - DNA, 20 bp, Artificial Sequence
  Description of Artificial Sequence: Synthetic oligonucleotide
  Target: SCNA; (-) strand; PAM type: YTN; PAM sequence: TTC
cactcttgtacctctgcaaa

SEQ ID NO: 46127 - DNA, 20 bp, Artificial Sequence
  Description of Artificial Sequence: Synthetic oligonucleotide
  Target: SCNA; (-) strand; PAM type: YTN; PAM sequence: TTT
ccactcttgtacctctgcaa

SEQ ID NO: 46128 - DNA, 20 bp, Artificial Sequence
  Description of Artificial Sequence: Synthetic oligonucleotide
  Target: SCNA; (-) strand; PAM type: YTN; PAM sequence: CTG
gggaacagccatttccactc

SEQ ID NO: 46129 - DNA, 20 bp, Artificial Sequence
  Description of Artificial Sequence: Synthetic oligonucleotide
  Target: SCNA; (-) strand; PAM type: YTN; PAM sequence: CTC
agagagccaggctggggaac

SEQ ID NO: 46130 - DNA, 20 bp, Artificial Sequence
  Description of Artificial Sequence: Synthetic oligonucleotide
  Target: SCNA; (-) strand; PAM type: YTN; PAM sequence: CTG
actcagagagccaggctggg

SEQ ID NO: 46131 - DNA, 20 bp, Artificial Sequence
  Description of Artificial Sequence: Synthetic oligonucleotide
  Target: SCNA; (-) strand; PAM type: YTN; PAM sequence: CTG
tggatgtcaggtctgactca

SEQ ID NO: 46132 - DNA, 20 bp, Artificial Sequence
  Description of Artificial Sequence: Synthetic oligonucleotide
  Target: SCNA; (-) strand; PAM type: YTN; PAM sequence: CTC
tgtggatgtcaggtctgact

SEQ ID NO: 46133 - DNA, 20 bp, Artificial Sequence
  Description of Artificial Sequence: Synthetic oligonucleotide
  Target: SCNA; (-) strand; PAM type: YTN; PAM sequence: CTC
tctgtggatgtcaggtctga

SEQ ID NO: 46134 - DNA, 20 bp, Artificial Sequence
  Description of Artificial Sequence: Synthetic oligonucleotide
  Target: SCNA; (-) strand; PAM type: YTN; PAM sequence: CTC
tctctgtggatgtcaggtct

SEQ ID NO: 46135 - DNA, 20 bp, Artificial Sequence
  Description of Artificial Sequence: Synthetic oligonucleotide
  Target: SCNA; (-) strand; PAM type: YTN; PAM sequence: CTG
cagtgctctctctgtggatg

SEQ ID NO: 46136 - DNA, 20 bp, Artificial Sequence
  Description of Artificial Sequence: Synthetic oligonucleotide
  Target: SCNA; (-) strand; PAM type: YTN; PAM sequence: TTA
ctgcagtgctctctctgtgg

SEQ ID NO: 46137 - DNA, 20 bp, Artificial Sequence
  Description of Artificial Sequence: Synthetic oligonucleotide
  Target: SCNA; (-) strand; PAM type: YTN; PAM sequence: TTG
cagttactgcagtgctctct

SEQ ID NO: 46138 - DNA, 20 bp, Artificial Sequence
  Description of Artificial Sequence: Synthetic oligonucleotide
  Target: SCNA; (-) strand; PAM type: YTN; PAM sequence: TTT
gcagttactgcagtgctctc

SEQ ID NO: 46139 - DNA, 20 bp, Artificial Sequence
  Description of Artificial Sequence: Synthetic oligonucleotide
  Target: SCNA; (-) strand; PAM type: YTN; PAM sequence: TTA
ccacaatcaaaacagaagcg

SEQ ID NO: 46140 - DNA, 20 bp, Artificial Sequence
  Description of Artificial Sequence: Synthetic oligonucleotide
  Target: SCNA; (-) strand; PAM type: YTN; PAM sequence: TTC
caattaccacaatcaaaaca

SEQ ID NO: 46141 - DNA, 20 bp, Artificial Sequence
  Description of Artificial Sequence: Synthetic oligonucleotide
  Target: SCNA; (-) strand; PAM type: YTN; PAM sequence: TTG
ttccaattaccacaatcaaa

SEQ ID NO: 46142 - DNA, 20 bp, Artificial Sequence
  Description of Artificial Sequence: Synthetic oligonucleotide
  Target: SCNA; (-) strand; PAM type: YTN; PAM sequence: CTG
attgttccaattaccacaat

SEQ ID NO: 46143 - DNA, 20 bp, Artificial Sequence
  Description of Artificial Sequence: Synthetic oligonucleotide
  Target: SCNA; (-) strand; PAM type: YTN; PAM sequence: TTG
tgccctgattgttccaatta

SEQ ID NO: 46144 - DNA, 20 bp, Artificial Sequence
  Description of Artificial Sequence: Synthetic oligonucleotide
  Target: SCNA; (-) strand; PAM type: YTN; PAM sequence: TTT
gtgccctgattgttccaatt

SEQ ID NO: 46145 - DNA, 20 bp, Artificial Sequence
  Description of Artificial Sequence: Synthetic oligonucleotide
  Target: SCNA; (-) strand; PAM type: YTN; PAM sequence: TTG
cagtttgtgccctgattgtt

SEQ ID NO: 46146 - DNA, 20 bp, Artificial Sequence
  Description of Artificial Sequence: Synthetic oligonucleotide
  Target: SCNA; (-) strand; PAM type: YTN; PAM sequence: CTT
gcagtttgtgccctgattgt

SEQ ID NO: 46147 - DNA, 20 bp, Artificial Sequence
  Description of Artificial Sequence: Synthetic oligonucleotide
  Target: SCNA; (-) strand; PAM type: YTN; PAM sequence: TTG
ccagtgaccttgcagtttgt

SEQ ID NO: 46148 - DNA, 20 bp, Artificial Sequence
  Description of Artificial Sequence: Synthetic oligonucleotide
  Target: SCNA; (-) strand; PAM type: YTN; PAM sequence: CTT
gccagtgaccttgcagtttg

SEQ ID NO: 46149 - DNA, 20 bp, Artificial Sequence
  Description of Artificial Sequence: Synthetic oligonucleotide
  Target: SCNA; (-) strand; PAM type: YTN; PAM sequence: CTA
cccttgccagtgaccttgca

SEQ ID NO: 46150 - DNA, 20 bp, Artificial Sequence
  Description of Artificial Sequence: Synthetic oligonucleotide
  Target: SCNA; (-) strand; PAM type: YTN; PAM sequence: CTG
ctacccttgccagtgacctt

SEQ ID NO: 46151 - DNA, 20 bp, Artificial Sequence
  Description of Artificial Sequence: Synthetic oligonucleotide
  Target: SCNA; (-) strand; PAM type: YTN; PAM sequence: CTG
ctgctacccttgccagtgac

SEQ ID NO: 46152 - DNA, 20 bp, Artificial Sequence
  Description of Artificial Sequence: Synthetic oligonucleotide
  Target: SCNA; (-) strand; PAM type: YTN; PAM sequence: CTA
agggaggaatcatgcctgct

SEQ ID NO: 46153 - DNA, 20 bp, Artificial Sequence
  Description of Artificial Sequence: Synthetic oligonucleotide
  Target: SCNA; (-) strand; PAM type: YTN; PAM sequence: TTA
ctaagggaggaatcatgcct

SEQ ID NO: 46154 - DNA, 20 bp, Artificial Sequence
  Description of Artificial Sequence: Synthetic oligonucleotide
  Target: SCNA; (-) strand; PAM type: YTN; PAM sequence: TTA
aaattactaagggaggaatc

SEQ ID NO: 46155 - DNA, 20 bp, Artificial Sequence
  Description of Artificial Sequence: Synthetic oligonucleotide
  Target: SCNA; (-) strand; PAM type: YTN; PAM sequence: TTT
aaaattactaagggaggaat

SEQ ID NO: 46156 - DNA, 20 bp, Artificial Sequence
  Description of Artificial Sequence: Synthetic oligonucleotide
  Target: SCNA; (-) strand; PAM type: YTN; PAM sequence: CTT
taaaattactaagggaggaa

SEQ ID NO: 46157 - DNA, 20 bp, Artificial Sequence
  Description of Artificial Sequence: Synthetic oligonucleotide
  Target: SCNA; (-) strand; PAM type: YTN; PAM sequence: CTG
ctttaaaattactaagggag

SEQ ID NO: 46158 - DNA, 20 bp, Artificial Sequence
  Description of Artificial Sequence: Synthetic oligonucleotide
  Target: SCNA; (-) strand; PAM type: YTN; PAM sequence: CTG
ctgctttaaaattactaagg

SEQ ID NO: 46159 - DNA, 20 bp, Artificial Sequence
  Description of Artificial Sequence: Synthetic oligonucleotide
  Target: SCNA; (-) strand; PAM type: YTN; PAM sequence: TTG
aaatctgctgctttaaaatt

SEQ ID NO: 46160 - DNA, 20 bp, Artificial Sequence
  Description of Artificial Sequence: Synthetic oligonucleotide
  Target: SCNA; (-) strand; PAM type: YTN; PAM sequence: TTT
gaaatctgctgctttaaaat

SEQ ID NO: 46161 - DNA, 20 bp, Artificial Sequence
  Description of Artificial Sequence: Synthetic oligonucleotide
  Target: SCNA; (-) strand; PAM type: YTN; PAM sequence: TTT
tgaaatctgctgctttaaaa

SEQ ID NO: 46162 - DNA, 20 bp, Artificial Sequence
  Description of Artificial Sequence: Synthetic oligonucleotide
  Target: SCNA; (-) strand; PAM type: YTN; PAM sequence: CTT
ttgaaatctgctgctttaaa

SEQ ID NO: 46163 - DNA, 20 bp, Artificial Sequence
  Description of Artificial Sequence: Synthetic oligonucleotide
  Target: SCNA; (-) strand; PAM type: YTN; PAM sequence: TTC
ccttttgaaatctgctgctt

SEQ ID NO: 46164 - DNA, 20 bp, Artificial Sequence
  Description of Artificial Sequence: Synthetic oligonucleotide
  Target: SCNA; (-) strand; PAM type: YTN; PAM sequence: TTT
cccttttgaaatctgctgct

SEQ ID NO: 46165 - DNA, 20 bp, Artificial Sequence
  Description of Artificial Sequence: Synthetic oligonucleotide
  Target: SCNA; (-) strand; PAM type: YTN; PAM sequence: TTT
tcccttttgaaatctgctgc

SEQ ID NO: 46166 - DNA, 20 bp, Artificial Sequence
  Description of Artificial Sequence: Synthetic oligonucleotide
  Target: SCNA; (-) strand; PAM type: YTN; PAM sequence: TTG
gttttcccttttgaaatctg

SEQ ID NO: 46167 - DNA, 20 bp, Artificial Sequence
  Description of Artificial Sequence: Synthetic oligonucleotide
  Target: SCNA; (-) strand; PAM type: YTN; PAM sequence: CTT
ggttttcccttttgaaatct

SEQ ID NO: 46168 - DNA, 20 bp, Artificial Sequence
  Description of Artificial Sequence: Synthetic oligonucleotide
  Target: SCNA; (-) strand; PAM type: YTN; PAM sequence: CTG
cttggttttcccttttgaaa

SEQ ID NO: 46169 - DNA, 20 bp, Artificial Sequence
  Description of Artificial Sequence: Synthetic oligonucleotide
  Target: SCNA; (-) strand; PAM type: YTN; PAM sequence: TTC
atctgcttggttttcccttt

SEQ ID NO: 46170 - DNA, 20 bp, Artificial Sequence
  Description of Artificial Sequence: Synthetic oligonucleotide
  Target: SCNA; (-) strand; PAM type: YTN; PAM sequence: TTT
catctgcttggttttccctt

SEQ ID NO: 46171 - DNA, 20 bp, Artificial Sequence
  Description of Artificial Sequence: Synthetic oligonucleotide
  Target: SCNA; (-) strand; PAM type: YTN; PAM sequence: CTT
tcatctgcttggttttccct

SEQ ID NO: 46172 - DNA, 20 bp, Artificial Sequence
  Description of Artificial Sequence: Synthetic oligonucleotide
  Target: SCNA; (-) strand; PAM type: YTN; PAM sequence: CTC
actttcatctgcttggtttt

SEQ ID NO: 46173 - DNA, 20 bp, Artificial Sequence
  Description of Artificial Sequence: Synthetic oligonucleotide
  Target: SCNA; (-) strand; PAM type: YTN; PAM sequence: CTG
ctcactttcatctgcttggt

SEQ ID NO: 46174 - DNA, 20 bp, Artificial Sequence
  Description of Artificial Sequence: Synthetic oligonucleotide
  Target: SCNA; (-) strand; PAM type: YTN; PAM sequence: CTG
aagaacaaatctgctcactt

SEQ ID NO: 46175 - DNA, 20 bp, Artificial Sequence
  Description of Artificial Sequence: Synthetic oligonucleotide
  Target: SCNA; (-) strand; PAM type: YTN; PAM sequence: CTC
acatgtgctgaagaacaaat

SEQ ID NO: 46176 - DNA, 20 bp, Artificial Sequence
  Description of Artificial Sequence: Synthetic oligonucleotide
  Target: SCNA; (-) strand; PAM type: YTN; PAM sequence: CTC
caagggtatctcacatgtgc

SEQ ID NO: 46177 - DNA, 20 bp, Artificial Sequence
  Description of Artificial Sequence: Synthetic oligonucleotide
  Target: SCNA; (-) strand; PAM type: YTN; PAM sequence: TTG
gcatctccaagggtatctca

SEQ ID NO: 46178 - DNA, 20 bp, Artificial Sequence
  Description of Artificial Sequence: Synthetic oligonucleotide
  Target: SCNA; (-) strand; PAM type: YTN; PAM sequence: TTA
ttggcatctccaagggtatc

SEQ ID NO: 46179 - DNA, 20 bp, Artificial Sequence
  Description of Artificial Sequence: Synthetic oligonucleotide
  Target: SCNA; (-) strand; PAM type: YTN; PAM sequence: TTT
attggcatctccaagggtat

SEQ ID NO: 46180 - DNA, 20 bp, Artificial Sequence
  Description of Artificial Sequence: Synthetic oligonucleotide
  Target: SCNA; (-) strand; PAM type: YTN; PAM sequence: CTC
cagtgatttattggcatctc

SEQ ID NO: 46181 - DNA, 20 bp, Artificial Sequence
  Description of Artificial Sequence: Synthetic oligonucleotide
  Target: SCNA; (-) strand; PAM type: YTN; PAM sequence: CTC
tccagtgatttattggcatc

SEQ ID NO: 46182 - DNA, 20 bp, Artificial Sequence
  Description of Artificial Sequence: Synthetic oligonucleotide
  Target: SCNA; (-) strand; PAM type: YTN; PAM sequence: TTC
acagtctctccagtgattta

SEQ ID NO: 46183 - DNA, 20 bp, Artificial Sequence
  Description of Artificial Sequence: Synthetic oligonucleotide
  Target: SCNA; (-) strand; PAM type: YTN; PAM sequence: CTT
cacagtctctccagtgattt

SEQ ID NO: 46184 - DNA, 20 bp, Artificial Sequence
  Description of Artificial Sequence: Synthetic oligonucleotide
  Target: SCNA; (-) strand; PAM type: YTN; PAM sequence: CTC
cttcacagtctctccagtga

SEQ ID NO: 46185 - DNA, 20 bp, Artificial Sequence
  Description of Artificial Sequence: Synthetic oligonucleotide
  Target: SCNA; (-) strand; PAM type: YTN; PAM sequence: CTA
agcctccttcacagtctctc

SEQ ID NO: 46186 - DNA, 20 bp, Artificial Sequence
  Description of Artificial Sequence: Synthetic oligonucleotide
  Target: SCNA; (-) strand; PAM type: YTN; PAM sequence: CTG
cagggcctaagcctccttca

SEQ ID NO: 46187 - DNA, 20 bp, Artificial Sequence
  Description of Artificial Sequence: Synthetic oligonucleotide
  Target: SCNA; (-) strand; PAM type: YTN; PAM sequence: TTC
atctgcagggcctaagcctc

SEQ ID NO: 46188 - DNA, 20 bp, Artificial Sequence
  Description of Artificial Sequence: Synthetic oligonucleotide
  Target: SCNA; (-) strand; PAM type: YTN; PAM sequence: CTT
catctgcagggcctaagcct

SEQ ID NO: 46189 - DNA, 20 bp, Artificial Sequence
  Description of Artificial Sequence: Synthetic oligonucleotide
  Target: SCNA; (-) strand; PAM type: YTN; PAM sequence: CTA
acttcatctgcagggcctaa

SEQ ID NO: 46190 - DNA, 20 bp, Artificial Sequence
  Description of Artificial Sequence: Synthetic oligonucleotide
  Target: SCNA; (-) strand; PAM type: YTN; PAM sequence: CTC
catcactaacttcatctgca

SEQ ID NO: 46191 - DNA, 20 bp, Artificial Sequence
  Description of Artificial Sequence: Synthetic oligonucleotide
  Target: SCNA; (-) strand; PAM type: YTN; PAM sequence: TTC
cctccatcactaacttcatc

SEQ ID NO: 46192 - DNA, 20 bp, Artificial Sequence
  Description of Artificial Sequence: Synthetic oligonucleotide
  Target: SCNA; (-) strand; PAM type: YTN; PAM sequence: TTT
ccctccatcactaacttcat

SEQ ID NO: 46193 - DNA, 20 bp, Artificial Sequence
  Description of Artificial Sequence: Synthetic oligonucleotide
  Target: SCNA; (-) strand; PAM type: YTN; PAM sequence: CTG
acagcccgaggataaacacg

SEQ ID NO: 46194 - DNA, 20 bp, Artificial Sequence
  Description of Artificial Sequence: Synthetic oligonucleotide
  Target: SCNA; (-) strand; PAM type: YTN; PAM sequence: TTC
agacctgacagcccgaggat

SEQ ID NO: 46195 - DNA, 20 bp, Artificial Sequence
  Description of Artificial Sequence: Synthetic oligonucleotide
  Target: SCNA; (-) strand; PAM type: YTN; PAM sequence: TTT
cagacctgacagcccgagga

SEQ ID NO: 46196 - DNA, 20 bp, Artificial Sequence
  Description of Artificial Sequence: Synthetic oligonucleotide
  Target: SCNA; (-) strand; PAM type: YTN; PAM sequence: TTA
acccaggtatttcagacctg

SEQ ID NO: 46197 - DNA, 20 bp, Artificial Sequence
  Description of Artificial Sequence: Synthetic oligonucleotide
  Target: SCNA; (-) strand; PAM type: YTN; PAM sequence: CTT
aacccaggtatttcagacct

SEQ ID NO: 46198 - DNA, 20 bp, Artificial Sequence
  Description of Artificial Sequence: Synthetic oligonucleotide
  Target: SCNA; (-) strand; PAM type: YTN; PAM sequence: TTA
cttaacccaggtatttcaga

SEQ ID NO: 46199 - DNA, 20 bp, Artificial Sequence
  Description of Artificial Sequence: Synthetic oligonucleotide
  Target: SCNA; (-) strand; PAM type: YTN; PAM sequence: TTT
acttaacccaggtatttcag

SEQ ID NO: 46200 - DNA, 20 bp, Artificial Sequence
  Description of Artificial Sequence: Synthetic oligonucleotide
  Target: SCNA; (-) strand; PAM type: YTN; PAM sequence: CTG
tgaccatcccagaggccatt

SEQ ID NO: 46201 - DNA, 20 bp, Artificial Sequence
  Description of Artificial Sequence: Synthetic oligonucleotide
  Target: SCNA; (-) strand; PAM type: YTN; PAM sequence: TTG
ccgactgtgaccatcccaga

SEQ ID NO: 46202 - DNA, 20 bp, Artificial Sequence
  Description of Artificial Sequence: Synthetic oligonucleotide
  Target: SCNA; (-) strand; PAM type: YTN; PAM sequence: CTA
ataattgccgactgtgacca

SEQ ID NO: 46203 - DNA, 20 bp, Artificial Sequence
  Description of Artificial Sequence: Synthetic oligonucleotide
  Target: SCNA; (-) strand; PAM type: YTN; PAM sequence: CTG
ctaataattgccgactgtga

SEQ ID NO: 46204 - DNA, 20 bp, Artificial Sequence
  Description of Artificial Sequence: Synthetic oligonucleotide
  Target: SCNA; (-) strand; PAM type: YTN; PAM sequence: CTG
taactgctaataattgccga

SEQ ID NO: 46205 - DNA, 20 bp, Artificial Sequence
  Description of Artificial Sequence: Synthetic oligonucleotide
  Target: SCNA; (-) strand; PAM type: YTN; PAM sequence: TTG
gcatagagatggatctgtaa

SEQ ID NO: 46206 - DNA, 20 bp, Artificial Sequence
  Description of Artificial Sequence: Synthetic oligonucleotide
  Target: SCNA; (-) strand; PAM type: YTN; PAM sequence: TTT
ggcatagagatggatctgta

SEQ ID NO: 46207 - DNA, 20 bp, Artificial Sequence
  Description of Artificial Sequence: Synthetic oligonucleotide
  Target: SCNA; (-) strand; PAM type: YTN; PAM sequence: TTT
tggcatagagatggatctgt

SEQ ID NO: 46208 - DNA, 20 bp, Artificial Sequence
  Description of Artificial Sequence: Synthetic oligonucleotide
  Target: SCNA; (-) strand; PAM type: YTN; PAM sequence: CTG
ttttggcatagagatggatc

SEQ ID NO: 46209 - DNA, 20 bp, Artificial Sequence
  Description of Artificial Sequence: Synthetic oligonucleotide
  Target: SCNA; (-) strand; PAM type: YTN; PAM sequence: TTA
tctgttttggcatagagatg

SEQ ID NO: 46210 - DNA, 20 bp, Artificial Sequence
  Description of Artificial Sequence: Synthetic oligonucleotide
  Target: SCNA; (-) strand; PAM type: YTN; PAM sequence: CTG
ttatctgttttggcatagag

SEQ ID NO: 46211 - DNA, 20 bp, Artificial Sequence
  Description of Artificial Sequence: Synthetic oligonucleotide
  Target: SCNA; (-) strand; PAM type: YTN; PAM sequence: CTG
gatgctgttatctgttttgg

SEQ ID NO: 46212 - DNA, 20 bp, Artificial Sequence
  Description of Artificial Sequence: Synthetic oligonucleotide
  Target: SCNA; (-) strand; PAM type: YTN; PAM sequence: TTC
ctggatgctgttatctgttt

SEQ ID NO: 46213 - DNA, 20 bp, Artificial Sequence
  Description of Artificial Sequence: Synthetic oligonucleotide
  Target: SCNA; (-) strand; PAM type: YTN; PAM sequence: TTG
gataattcctggatgctgtt

SEQ ID NO: 46214 - DNA, 20 bp, Artificial Sequence
  Description of Artificial Sequence: Synthetic oligonucleotide
  Target: SCNA; (-) strand; PAM type: YTN; PAM sequence: TTT
ggataattcctggatgctgt

SEQ ID NO: 46215 - DNA, 20 bp, Artificial Sequence
  Description of Artificial Sequence: Synthetic oligonucleotide
  Target: SCNA; (-) strand; PAM type: YTN; PAM sequence: CTT
tggataattcctggatgctg

SEQ ID NO: 46216 - DNA, 20 bp, Artificial Sequence
  Description of Artificial Sequence: Synthetic oligonucleotide
  Target: SCNA; (-) strand; PAM type: YTN; PAM sequence: TTG
tgactttggataattcctgg

SEQ ID NO: 46217 - DNA, 20 bp, Artificial Sequence
  Description of Artificial Sequence: Synthetic oligonucleotide
  Target: SCNA; (-) strand; PAM type: YTN; PAM sequence: TTT
gtgactttggataattcctg

SEQ ID NO: 46218 - DNA, 20 bp, Artificial Sequence
  Description of Artificial Sequence: Synthetic oligonucleotide
  Target: SCNA; (-) strand; PAM type: YTN; PAM sequence: CTG
atttgtgactttggataatt

SEQ ID NO: 46219 - DNA, 20 bp, Artificial Sequence
  Description of Artificial Sequence: Synthetic oligonucleotide
  Target: SCNA; (-) strand; PAM type: YTN; PAM sequence: CTG
acactgatttgtgactttgg

SEQ ID NO: 46220 - DNA, 20 bp, Artificial Sequence
  Description of Artificial Sequence: Synthetic oligonucleotide
  Target: SCNA; (-) strand; PAM type: YTN; PAM sequence: CTA
cgtgggtgagtgacaagaca

SEQ ID NO: 46221 - DNA, 20 bp, Artificial Sequence
  Description of Artificial Sequence: Synthetic oligonucleotide
  Target: SCNA; (-) strand; PAM type: YTN; PAM sequence: CTA
ggaggaagggaaaagcacta

SEQ ID NO: 46222 - DNA, 20 bp, Artificial Sequence
  Description of Artificial Sequence: Synthetic oligonucleotide
  Target: SCNA; (-) strand; PAM type: YTN; PAM sequence: TTA
agtaactaggaggaagggaa

SEQ ID NO: 46223 - DNA, 20 bp, Artificial Sequence
  Description of Artificial Sequence: Synthetic oligonucleotide
  Target: SCNA; (-) strand; PAM type: YTN; PAM sequence: TTA
tccattaagtaactaggagg

SEQ ID NO: 46224 - DNA, 20 bp, Artificial Sequence
  Description of Artificial Sequence: Synthetic oligonucleotide
  Target: SCNA; (-) strand; PAM type: YTN; PAM sequence: CTT
atccattaagtaactaggag

SEQ ID NO: 46225 - DNA, 20 bp, Artificial Sequence
  Description of Artificial Sequence: Synthetic oligonucleotide
  Target: SCNA; (-) strand; PAM type: YTN; PAM sequence: TTG
acaatgtgcccttatccatt

SEQ ID NO: 46226 - DNA, 20 bp, Artificial Sequence
  Description of Artificial Sequence: Synthetic oligonucleotide
  Target: SCNA; (-) strand; PAM type: YTN; PAM sequence: TTT
gacaatgtgcccttatccat

SEQ ID NO: 46227 - DNA, 20 bp, Artificial Sequence
  Description of Artificial Sequence: Synthetic oligonucleotide
  Target: SCNA; (-) strand; PAM type: YTN; PAM sequence: TTA
tttgacaatgtgcccttatc

SEQ ID NO: 46228 - DNA, 20 bp, Artificial Sequence
  Description of Artificial Sequence: Synthetic oligonucleotide
  Target: SCNA; (-) strand; PAM type: YTN; PAM sequence: TTT
atttgacaatgtgcccttat

SEQ ID NO: 46229 - DNA, 20 bp, Artificial Sequence
  Description of Artificial Sequence: Synthetic oligonucleotide
  Target: SCNA; (-) strand; PAM type: YTN; PAM sequence: TTG
tttatttgacaatgtgccct

SEQ ID NO: 46230 - DNA, 20 bp, Artificial Sequence
  Description of Artificial Sequence: Synthetic oligonucleotide
  Target: SCNA; (-) strand; PAM type: YTN; PAM sequence: TTT
gtttatttgacaatgtgccc

SEQ ID NO: 46231 - DNA, 20 bp, Artificial Sequence
  Description of Artificial Sequence: Synthetic oligonucleotide
  Target: SCNA; (-) strand; PAM type: YTN; PAM sequence: TTG
tttgtttatttgacaatgtg

SEQ ID NO: 46232 - DNA, 20 bp, Artificial Sequence
  Description of Artificial Sequence: Synthetic oligonucleotide
  Target: SCNA; (-) strand; PAM type: YTN; PAM sequence: CTT
gtttgtttatttgacaatgt

SEQ ID NO: 46233 - DNA, 20 bp, Artificial Sequence
  Description of Artificial Sequence: Synthetic oligonucleotide
  Target: SCNA; (-) strand; PAM type: YTN; PAM sequence: CTC
acttgtttgtttatttgaca

SEQ ID NO: 46234 - DNA, 20 bp, Artificial Sequence
  Description of Artificial Sequence: Synthetic oligonucleotide
  Target: SCNA; (-) strand; PAM type: YTN; PAM sequence: TTA
tcctcacttgtttgtttatt

SEQ ID NO: 46235 - DNA, 20 bp, Artificial Sequence
  Description of Artificial Sequence: Synthetic oligonucleotide
  Target: SCNA; (-) strand; PAM type: YTN; PAM sequence: TTT
atcctcacttgtttgtttat

SEQ ID NO: 46236 - DNA, 20 bp, Artificial Sequence
  Description of Artificial Sequence: Synthetic oligonucleotide
  Target: SCNA; (-) strand; PAM type: YTN; PAM sequence: TTC
ggagcaacatttatcctcac

SEQ ID NO: 46237 - DNA, 20 bp, Artificial Sequence
  Description of Artificial Sequence: Synthetic oligonucleotide
  Target: SCNA; (-) strand; PAM type: YTN; PAM sequence: TTT
cggagcaacatttatcctca

SEQ ID NO: 46238 - DNA, 20 bp, Artificial Sequence
  Description of Artificial Sequence: Synthetic oligonucleotide
  Target: SCNA; (-) strand; PAM type: YTN; PAM sequence: TTA
aatttcggagcaacatttat

SEQ ID NO: 46239 - DNA, 20 bp, Artificial Sequence
  Description of Artificial Sequence: Synthetic oligonucleotide
  Target: SCNA; (-) strand; PAM type: YTN; PAM sequence: CTT
aaatttcggagcaacattta

SEQ ID NO: 46240 - DNA, 20 bp, Artificial Sequence
  Description of Artificial Sequence: Synthetic oligonucleotide
  Target: SCNA; (-) strand; PAM type: YTN; PAM sequence: TTC
accttaaatttcggagcaac

SEQ ID NO: 46241 - DNA, 20 bp, Artificial Sequence
  Description of Artificial Sequence: Synthetic oligonucleotide
  Target: SCNA; (-) strand; PAM type: YTN; PAM sequence: CTA
atgattcaccttaaatttcg

SEQ ID NO: 46242 - DNA, 20 bp, Artificial Sequence
  Description of Artificial Sequence: Synthetic oligonucleotide
  Target: SCNA; (-) strand; PAM type: YTN; PAM sequence: CTG
actaatgattcaccttaaat

SEQ ID NO: 46243 - DNA, 20 bp, Artificial Sequence
  Description of Artificial Sequence: Synthetic oligonucleotide
  Target: SCNA; (-) strand; PAM type: YTN; PAM sequence: TTC
catgacgataccaagtctga

SEQ ID NO: 46244 - DNA, 20 bp, Artificial Sequence
  Description of Artificial Sequence: Synthetic oligonucleotide
  Target: SCNA; (-) strand; PAM type: YTN; PAM sequence: TTA
gaaaacagaccaaattccat

SEQ ID NO: 46245 - DNA, 20 bp, Artificial Sequence
  Description of Artificial Sequence: Synthetic oligonucleotide
  Target: SCNA; (-) strand; PAM type: YTN; PAM sequence: CTA
gttagaaaacagaccaaatt

SEQ ID NO: 46246 - DNA, 20 bp, Artificial Sequence
  Description of Artificial Sequence: Synthetic oligonucleotide
  Target: SCNA; (-) strand; PAM type: YTN; PAM sequence: CTA
aaataaagctagttagaaaa

SEQ ID NO: 46247 - DNA, 20 bp, Artificial Sequence
  Description of Artificial Sequence: Synthetic oligonucleotide
  Target: SCNA; (-) strand; PAM type: YTN; PAM sequence: CTG
tgctaaaataaagctagtta

SEQ ID NO: 46248 - DNA, 20 bp, Artificial Sequence
  Description of Artificial Sequence: Synthetic oligonucleotide
  Target: SCNA; (-) strand; PAM type: YTN; PAM sequence: TTA
tggctgtgctaaaataaagc

SEQ ID NO: 46249 - DNA, 20 bp, Artificial Sequence
  Description of Artificial Sequence: Synthetic oligonucleotide
  Target: SCNA; (-) strand; PAM type: YTN; PAM sequence: TTT
atggctgtgctaaaataaag

SEQ ID NO: 46250 - DNA, 20 bp, Artificial Sequence
  Description of Artificial Sequence: Synthetic oligonucleotide
  Target: SCNA; (-) strand; PAM type: YTN; PAM sequence: TTA
cagccagatttatggctgtg

SEQ ID NO: 46251 - DNA, 20 bp, Artificial Sequence
  Description of Artificial Sequence: Synthetic oligonucleotide
  Target: SCNA; (-) strand; PAM type: YTN; PAM sequence: TTA
aagacaattacagccagatt

SEQ ID NO: 46252 - DNA, 20 bp, Artificial Sequence
  Description of Artificial Sequence: Synthetic oligonucleotide
  Target: SCNA; (-) strand; PAM type: YTN; PAM sequence: TTA
gatgtatgagtcatcggagt

SEQ ID NO: 46253 - DNA, 20 bp, Artificial Sequence
  Description of Artificial Sequence: Synthetic oligonucleotide
  Target: SCNA; (-) strand; PAM type: YTN; PAM sequence: CTT
agatgtatgagtcatcggag

SEQ ID NO: 46254 - DNA, 20 bp, Artificial Sequence
  Description of Artificial Sequence: Synthetic oligonucleotide
  Target: SCNA; (-) strand; PAM type: YTN; PAM sequence: TTA
aatgaaatgcttagatgtat

SEQ ID NO: 46255 - DNA, 20 bp, Artificial Sequence
  Description of Artificial Sequence: Synthetic oligonucleotide
  Target: SCNA; (-) strand; PAM type: YTN; PAM sequence: TTG
aaagttaaatgaaatgctta

SEQ ID NO: 46256 - DNA, 20 bp, Artificial Sequence
  Description of Artificial Sequence: Synthetic oligonucleotide
  Target: SCNA; (-) strand; PAM type: YTN; PAM sequence: TTC
acggttgaaagttaaatgaa

SEQ ID NO: 46257 - DNA, 20 bp, Artificial Sequence
  Description of Artificial Sequence: Synthetic oligonucleotide
  Target: SCNA; (-) strand; PAM type: YTN; PAM sequence: TTT
cacggttgaaagttaaatga

SEQ ID NO: 46258 - DNA, 20 bp, Artificial Sequence
  Description of Artificial Sequence: Synthetic oligonucleotide
  Target: SCNA; (-) strand; PAM type: YTN; PAM sequence: TTT
tcacggttgaaagttaaatg

SEQ ID NO: 46259 - DNA, 20 bp, Artificial Sequence
  Description of Artificial Sequence: Synthetic oligonucleotide
  Target: SCNA; (-) strand; PAM type: YTN; PAM sequence: TTT
ttcacggttgaaagttaaat

SEQ ID NO: 46260 - DNA, 20 bp, Artificial Sequence
  Description of Artificial Sequence: Synthetic oligonucleotide
  Target: SCNA; (-) strand; PAM type: YTN; PAM sequence: TTG
gaatttttcacggttgaaag

SEQ ID NO: 46261 - DNA, 20 bp, Artificial Sequence
  Description of Artificial Sequence: Synthetic oligonucleotide
  Target: SCNA; (-) strand; PAM type: YTN; PAM sequence: TTG
ccaaatcagttggaattttt

SEQ ID NO: 46262 - DNA, 20 bp, Artificial Sequence
  Description of Artificial Sequence: Synthetic oligonucleotide
  Target: SCNA; (-) strand; PAM type: YTN; PAM sequence: TTC
atattgccaaatcagttgga

SEQ ID NO: 46263 - DNA, 20 bp, Artificial Sequence
  Description of Artificial Sequence: Synthetic oligonucleotide
  Target: SCNA; (-) strand; PAM type: YTN; PAM sequence: CTG
acagcatcatatgatcatat

SEQ ID NO: 46264 - DNA, 20 bp, Artificial Sequence
  Description of Artificial Sequence: Synthetic oligonucleotide
  Target: SCNA; (-) strand; PAM type: YTN; PAM sequence: TTG
tactgacagcatcatatgat

SEQ ID NO: 46265 - DNA, 20 bp, Artificial Sequence
  Description of Artificial Sequence: Synthetic oligonucleotide
  Target: SCNA; (-) strand; PAM type: YTN; PAM sequence: TTC
atgatagtccatcaacatcc

SEQ ID NO: 46266 - DNA, 20 bp, Artificial Sequence
  Description of Artificial Sequence: Synthetic oligonucleotide
  Target: SCNA; (-) strand; PAM type: YTN; PAM sequence: TTA
taagatggttcatgatagtc

SEQ ID NO: 46267 - DNA, 20 bp, Artificial Sequence
  Description of Artificial Sequence: Synthetic oligonucleotide
  Target: SCNA; (-) strand; PAM type: YTN; PAM sequence: CTG
ggaaagttataagatggttc

SEQ ID NO: 46268 - DNA, 20 bp, Artificial Sequence
  Description of Artificial Sequence: Synthetic oligonucleotide
  Target: SCNA; (-) strand; PAM type: YTN; PAM sequence: TTA
aaggggactgggaaagttat

SEQ ID NO: 46269 - DNA, 20 bp, Artificial Sequence
  Description of Artificial Sequence: Synthetic oligonucleotide
  Target: SCNA; (-) strand; PAM type: YTN; PAM sequence: CTT
aaaggggactgggaaagtta

SEQ ID NO: 46270 - DNA, 20 bp, Artificial Sequence
  Description of Artificial Sequence: Synthetic oligonucleotide
  Target: SCNA; (-) strand; PAM type: YTN; PAM sequence: TTG
gacttaaaggggactgggaa

SEQ ID NO: 46271 - DNA, 20 bp, Artificial Sequence
  Description of Artificial Sequence: Synthetic oligonucleotide
  Target: SCNA; (-) strand; PAM type: YTN; PAM sequence: CTT
ggacttaaaggggactggga

SEQ ID NO: 46272 - DNA, 20 bp, Artificial Sequence
  Description of Artificial Sequence: Synthetic oligonucleotide
  Target: SCNA; (-) strand; PAM type: YTN; PAM sequence: CTC
ttggacttaaaggggactgg

SEQ ID NO: 46273 - DNA, 20 bp, Artificial Sequence
  Description of Artificial Sequence: Synthetic oligonucleotide
  Target: SCNA; (-) strand; PAM type: YTN; PAM sequence: TTG
tatcctcttggacttaaagg

SEQ ID NO: 46274 - DNA, 20 bp, Artificial Sequence
  Description of Artificial Sequence: Synthetic oligonucleotide
  Target: SCNA; (-) strand; PAM type: YTN; PAM sequence: CTC
agttgtatcctcttggactt

SEQ ID NO: 46275 - DNA, 20 bp, Artificial Sequence
  Description of Artificial Sequence: Synthetic oligonucleotide
  Target: SCNA; (-) strand; PAM type: YTN; PAM sequence: TTC
tcagttgtatcctcttggac

SEQ ID NO: 46276 - DNA, 20 bp, Artificial Sequence
  Description of Artificial Sequence: Synthetic oligonucleotide
  Target: SCNA; (-) strand; PAM type: YTN; PAM sequence: CTT
ctcagttgtatcctcttgga

SEQ ID NO: 46277 - DNA, 20 bp, Artificial Sequence
  Description of Artificial Sequence: Synthetic oligonucleotide
  Target: SCNA; (-) strand; PAM type: YTN; PAM sequence: CTG
ccttctcagttgtatcctct

SEQ ID NO: 46278 - DNA, 20 bp, Artificial Sequence
  Description of Artificial Sequence: Synthetic oligonucleotide
  Target: SCNA; (-) strand; PAM type: YTN; PAM sequence: CTA
cctgccttctcagttgtatc

SEQ ID NO: 46279 - DNA, 20 bp, Artificial Sequence
  Description of Artificial Sequence: Synthetic oligonucleotide
  Target: SCNA; (-) strand; PAM type: YTN; PAM sequence: CTC
tacctgccttctcagttgta

SEQ ID NO: 46280 - DNA, 20 bp, Artificial Sequence
  Description of Artificial Sequence: Synthetic oligonucleotide
  Target: SCNA; (-) strand; PAM type: YTN; PAM sequence: CTG
accaaaaactctacctgcct

SEQ ID NO: 46281 - DNA, 20 bp, Artificial Sequence
  Description of Artificial Sequence: Synthetic oligonucleotide
  Target: SCNA; (-) strand; PAM type: YTN; PAM sequence: CTA
gccactgaccaaaaactcta

SEQ ID NO: 46282 - DNA, 20 bp, Artificial Sequence
  Description of Artificial Sequence: Synthetic oligonucleotide
  Target: SCNA; (-) strand; PAM type: YTN; PAM sequence: TTC
aggaaaaacctagccactga

SEQ ID NO: 46283 - DNA, 20 bp, Artificial Sequence
  Description of Artificial Sequence: Synthetic oligonucleotide
  Target: SCNA; (-) strand; PAM type: YTN; PAM sequence: TTG
atattcaggaaaaacctagc

SEQ ID NO: 46284 - DNA, 20 bp, Artificial Sequence
  Description of Artificial Sequence: Synthetic oligonucleotide
  Target: SCNA; (-) strand; PAM type: YTN; PAM sequence: TTT
gatattcaggaaaaacctag

SEQ ID NO: 46285 - DNA, 20 bp, Artificial Sequence
  Description of Artificial Sequence: Synthetic oligonucleotide
  Target: SCNA; (-) strand; PAM type: YTN; PAM sequence: TTG
tttgatattcaggaaaaacc

SEQ ID NO: 46286 - DNA, 20 bp, Artificial Sequence
  Description of Artificial Sequence: Synthetic oligonucleotide
  Target: SCNA; (-) strand; PAM type: YTN; PAM sequence: TTT
gtttgatattcaggaaaaac

SEQ ID NO: 46287 - DNA, 20 bp, Artificial Sequence
  Description of Artificial Sequence: Synthetic oligonucleotide
  Target: SCNA; (-) strand; PAM type: YTN; PAM sequence: CTC
ataccaggcaatttgtttga

SEQ ID NO: 46288 - DNA, 20 bp, Artificial Sequence
  Description of Artificial Sequence: Synthetic oligonucleotide
  Target: SCNA; (-) strand; PAM type: YTN; PAM sequence: TTC
tcataccaggcaatttgttt

SEQ ID NO: 46289 - DNA, 20 bp, Artificial Sequence
  Description of Artificial Sequence: Synthetic oligonucleotide
  Target: SCNA; (-) strand; PAM type: YTN; PAM sequence: TTA
aattctcataccaggcaatt

SEQ ID NO: 46290 - DNA, 20 bp, Artificial Sequence
  Description of Artificial Sequence: Synthetic oligonucleotide
  Target: SCNA; (-) strand; PAM type: YTN; PAM sequence: CTG
ttaaattctcataccaggca

SEQ ID NO: 46291 - DNA, 20 bp, Artificial Sequence
  Description of Artificial Sequence: Synthetic oligonucleotide
  Target: SCNA; (-) strand; PAM type: YTN; PAM sequence: TTC
tgttaaattctcataccagg

SEQ ID NO: 46292 - DNA, 20 bp, Artificial Sequence
  Description of Artificial Sequence: Synthetic oligonucleotide
  Target: SCNA; (-) strand; PAM type: YTN; PAM sequence: TTG
tggtcatattctgttaaatt

SEQ ID NO: 46293 - DNA, 20 bp, Artificial Sequence
  Description of Artificial Sequence: Synthetic oligonucleotide
  Target: SCNA; (-) strand; PAM type: YTN; PAM sequence: TTA
aaaaaattgtggtcatattc

SEQ ID NO: 46294 - DNA, 20 bp, Artificial Sequence
  Description of Artificial Sequence: Synthetic oligonucleotide
  Target: SCNA; (-) strand; PAM type: YTN; PAM sequence: CTG
ttaaaaaaattgtggtcata

SEQ ID NO: 46295 - DNA, 20 bp, Artificial Sequence
  Description of Artificial Sequence: Synthetic oligonucleotide
  Target: SCNA; (-) strand; PAM type: YTN; PAM sequence: TTC
aagtagataaatctgttaaa

SEQ ID NO: 46296 - DNA, 20 bp, Artificial Sequence
  Description of Artificial Sequence: Synthetic oligonucleotide
  Target: SCNA; (-) strand; PAM type: YTN; PAM sequence: TTT
caagtagataaatctgttaa

SEQ ID NO: 46297 - DNA, 20 bp, Artificial Sequence
  Description of Artificial Sequence: Synthetic oligonucleotide
  Target: SCNA; (-) strand; PAM type: YTN; PAM sequence: CTG
aggcgatgtttcaagtagat

SEQ ID NO: 46298 - DNA, 20 bp, Artificial Sequence
  Description of Artificial Sequence: Synthetic oligonucleotide
  Target: SCNA; (-) strand; PAM type: YTN; PAM sequence: TTG
actgaggcgatgtttcaagt

SEQ ID NO: 46299 - DNA, 20 bp, Artificial Sequence
  Description of Artificial Sequence: Synthetic oligonucleotide
  Target: SCNA; (-) strand; PAM type: YTN; PAM sequence: TTC
attgactgaggcgatgtttc

SEQ ID NO: 46300 - DNA, 20 bp, Artificial Sequence
  Description of Artificial Sequence: Synthetic oligonucleotide
  Target: SCNA; (-) strand; PAM type: YTN; PAM sequence: CTT
cattgactgaggcgatgttt

SEQ ID NO: 46301 - DNA, 20 bp, Artificial Sequence
  Description of Artificial Sequence: Synthetic oligonucleotide
  Target: SCNA; (-) strand; PAM type: YTN; PAM sequence: TTC
ttcattgactgaggcgatgt

SEQ ID NO: 46302 - DNA, 20 bp, Artificial Sequence
  Description of Artificial Sequence: Synthetic oligonucleotide
  Target: SCNA; (-) strand; PAM type: YTN; PAM sequence: TTT
cttcattgactgaggcgatg

SEQ ID NO: 46303 - DNA, 20 bp, Artificial Sequence
  Description of Artificial Sequence: Synthetic oligonucleotide
  Target: SCNA; (-) strand; PAM type: YTN; PAM sequence: TTA
tagaacataagtttcttcat

SEQ ID NO: 46304 - DNA, 20 bp, Artificial Sequence
  Description of Artificial Sequence: Synthetic oligonucleotide
  Target: SCNA; (-) strand; PAM type: YTN; PAM sequence: TTA
gttatagaacataagtttct

SEQ ID NO: 46305 - DNA, 20 bp, Artificial Sequence
  Description of Artificial Sequence: Synthetic oligonucleotide
  Target: SCNA; (-) strand; PAM type: YTN; PAM sequence: TTA
ttagttatagaacataagtt

SEQ ID NO: 46306 - DNA, 20 bp, Artificial Sequence
  Description of Artificial Sequence: Synthetic oligonucleotide
  Target: SCNA; (-) strand; PAM type: YTN; PAM sequence: TTA
ttattagttatagaacataa

SEQ ID NO: 46307 - DNA, 20 bp, Artificial Sequence
  Description of Artificial Sequence: Synthetic oligonucleotide
  Target: SCNA; (-) strand; PAM type: YTN; PAM sequence: TTT
attattagttatagaacata

SEQ ID NO: 46308 - DNA, 20 bp, Artificial Sequence
  Description of Artificial Sequence: Synthetic oligonucleotide
  Target: SCNA; (-) strand; PAM type: YTN; PAM sequence: TTT
tattattagttatagaacat

SEQ ID NO: 46309 - DNA, 20 bp, Artificial Sequence
  Description of Artificial Sequence: Synthetic oligonucleotide
  Target: SCNA; (-) strand; PAM type: YTN; PAM sequence: CTT
ttattattagttatagaaca

SEQ ID NO: 46310 - DNA, 20 bp, Artificial Sequence
  Description of Artificial Sequence: Synthetic oligonucleotide
  Target: SCNA; (-) strand; PAM type: YTN; PAM sequence: TTA
caaatgatcttttattatta

SEQ ID NO: 46311 - DNA, 20 bp, Artificial Sequence
  Description of Artificial Sequence: Synthetic oligonucleotide
  Target: SCNA; (-) strand; PAM type: YTN; PAM sequence: TTC
agttacaaatgatcttttat

SEQ ID NO: 46312 - DNA, 20 bp, Artificial Sequence
  Description of Artificial Sequence: Synthetic oligonucleotide
  Target: SCNA; (-) strand; PAM type: YTN; PAM sequence: TTT
cagttacaaatgatctttta

SEQ ID NO: 46313 - DNA, 20 bp, Artificial Sequence
  Description of Artificial Sequence: Synthetic oligonucleotide
  Target: SCNA; (-) strand; PAM type: YTN; PAM sequence: TTG
tcatatttcagttacaaatg

SEQ ID NO: 46314 - DNA, 20 bp, Artificial Sequence
  Description of Artificial Sequence: Synthetic oligonucleotide
  Target: SCNA; (-) strand; PAM type: YTN; PAM sequence: TTT
gtcatatttcagttacaaat

SEQ ID NO: 46315 - DNA, 20 bp, Artificial Sequence
  Description of Artificial Sequence: Synthetic oligonucleotide
  Target: SCNA; (-) strand; PAM type: YTN; PAM sequence: TTA
aaacagcaatttgtcatatt

SEQ ID NO: 46316 - DNA, 20 bp, Artificial Sequence
  Description of Artificial Sequence: Synthetic oligonucleotide
  Target: SCNA; (-) strand; PAM type: YTN; PAM sequence: CTC
atgattaaaacagcaatttg

SEQ ID NO: 46317 - DNA, 20 bp, Artificial Sequence
  Description of Artificial Sequence: Synthetic oligonucleotide
  Target: SCNA; (-) strand; PAM type: YTN; PAM sequence: CTA
aatggtaatcctcatgatta

SEQ ID NO: 46318 - DNA, 20 bp, Artificial Sequence
  Description of Artificial Sequence: Synthetic oligonucleotide
  Target: SCNA; (-) strand; PAM type: YTN; PAM sequence: TTC
taaatggtaatcctcatgat

SEQ ID NO: 46319 - DNA, 20 bp, Artificial Sequence
  Description of Artificial Sequence: Synthetic oligonucleotide
  Target: SCNA; (-) strand; PAM type: YTN; PAM sequence: CTG
ttctaaatggtaatcctcat

SEQ ID NO: 46320 - DNA, 20 bp, Artificial Sequence
  Description of Artificial Sequence: Synthetic oligonucleotide
  Target: SCNA; (-) strand; PAM type: YTN; PAM sequence: CTA
gctgttctaaatggtaatcc

SEQ ID NO: 46321 - DNA, 20 bp, Artificial Sequence
  Description of Artificial Sequence: Synthetic oligonucleotide
  Target: SCNA; (-) strand; PAM type: YTN; PAM sequence: TTA
cctagctgttctaaatggta

SEQ ID NO: 46322 - DNA, 20 bp, Artificial Sequence
  Description of Artificial Sequence: Synthetic oligonucleotide
  Target: SCNA; (-) strand; PAM type: YTN; PAM sequence: TTT
acctagctgttctaaatggt

SEQ ID NO: 46323 - DNA, 20 bp, Artificial Sequence
  Description of Artificial Sequence: Synthetic oligonucleotide
  Target: SCNA; (-) strand; PAM type: YTN; PAM sequence: TTA
aaaagtaaatgtttacctag

SEQ ID NO: 46324 - DNA, 20 bp, Artificial Sequence
  Description of Artificial Sequence: Synthetic oligonucleotide
  Target: SCNA; (-) strand; PAM type: YTN; PAM sequence: TTC
cggattaaaaagtaaatgtt

SEQ ID NO: 46325 - DNA, 20 bp, Artificial Sequence
  Description of Artificial Sequence: Synthetic oligonucleotide
  Target: SCNA; (-) strand; PAM type: YTN; PAM sequence: TTT
ccggattaaaaagtaaatgt

SEQ ID NO: 46326 - DNA, 20 bp, Artificial Sequence
  Description of Artificial Sequence: Synthetic oligonucleotide
  Target: SCNA; (-) strand; PAM type: YTN; PAM sequence: TTA
tttccggattaaaaagtaaa

SEQ ID NO: 46327 - DNA, 20 bp, Artificial Sequence
  Description of Artificial Sequence: Synthetic oligonucleotide
  Target: SCNA; (-) strand; PAM type: YTN; PAM sequence: CTT
atttccggattaaaaagtaa

SEQ ID NO: 46328 - DNA, 20 bp, Artificial Sequence
  Description of Artificial Sequence: Synthetic oligonucleotide
  Target: SCNA; (-) strand; PAM type: YTN; PAM sequence: TTA
acttatttccggattaaaaa

SEQ ID NO: 46329 - DNA, 20 bp, Artificial Sequence
  Description of Artificial Sequence: Synthetic oligonucleotide
  Target: SCNA; (-) strand; PAM type: YTN; PAM sequence: TTT
aacttatttccggattaaaa

SEQ ID NO: 46330 - DNA, 20 bp, Artificial Sequence
  Description of Artificial Sequence: Synthetic oligonucleotide
  Target: SCNA; (-) strand; PAM type: YTN; PAM sequence: CTT
taacttatttccggattaaa

SEQ ID NO: 46331 - DNA, 20 bp, Artificial Sequence
  Description of Artificial Sequence: Synthetic oligonucleotide
  Target: SCNA; (-) strand; PAM type: YTN; PAM sequence: TTG
ctttaacttatttccggatt

SEQ ID NO: 46332 - DNA, 20 bp, Artificial Sequence
  Description of Artificial Sequence: Synthetic oligonucleotide
  Target: SCNA; (-) strand; PAM type: YTN; PAM sequence: TTT
gctttaacttatttccggat

SEQ ID NO: 46333 - DNA, 20 bp, Artificial Sequence
  Description of Artificial Sequence: Synthetic oligonucleotide
  Target: SCNA; (-) strand; PAM type: YTN; PAM sequence: TTA
tttgctttaacttatttccg

SEQ ID NO: 46334 - DNA, 20 bp, Artificial Sequence
  Description of Artificial Sequence: Synthetic oligonucleotide
  Target: SCNA; (-) strand; PAM type: YTN; PAM sequence: TTA
ttatttgctttaacttattt

SEQ ID NO: 46335 - DNA, 20 bp, Artificial Sequence
  Description of Artificial Sequence: Synthetic oligonucleotide
  Target: SCNA; (-) strand; PAM type: YTN; PAM sequence: TTT
attatttgctttaacttatt

SEQ ID NO: 46336 - DNA, 20 bp, Artificial Sequence
  Description of Artificial Sequence: Synthetic oligonucleotide
  Target: SCNA; (-) strand; PAM type: YTN; PAM sequence: TTT
tattatttgctttaacttat

SEQ ID NO: 46337 - DNA, 20 bp, Artificial Sequence
  Description of Artificial Sequence: Synthetic oligonucleotide
  Target: SCNA; (-) strand; PAM type: YTN; PAM sequence: TTT
ttattatttgctttaactta

SEQ ID NO: 46338 - DNA, 20 bp, Artificial Sequence
  Description of Artificial Sequence: Synthetic oligonucleotide
  Target: SCNA; (-) strand; PAM type: YTN; PAM sequence: TTA
aatataaatttttattattt

SEQ ID NO: 46339 - DNA, 20 bp, Artificial Sequence
  Description of Artificial Sequence: Synthetic oligonucleotide
  Target: SCNA; (-) strand; PAM type: YTN; PAM sequence: TTT
aaatataaatttttattatt

SEQ ID NO: 46340 - DNA, 20 bp, Artificial Sequence
  Description of Artificial Sequence: Synthetic oligonucleotide
  Target: SCNA; (-) strand; PAM type: YTN; PAM sequence: TTG
tgtgatttaaatataaattt

SEQ ID NO: 46341 - DNA, 20 bp, Artificial Sequence
  Description of Artificial Sequence: Synthetic oligonucleotide
  Target: SCNA; (-) strand; PAM type: YTN; PAM sequence: TTC
atgataaaacatgttgtgtg

SEQ ID NO: 46342 - DNA, 20 bp, Artificial Sequence
  Description of Artificial Sequence: Synthetic oligonucleotide
  Target: SCNA; (-) strand; PAM type: YTN; PAM sequence: TTA
ttcatgataaaacatgttgt

SEQ ID NO: 46343 - DNA, 20 bp, Artificial Sequence
  Description of Artificial Sequence: Synthetic oligonucleotide
  Target: SCNA; (-) strand; PAM type: YTN; PAM sequence: TTA
ttattcatgataaaacatgt

SEQ ID NO: 46344 - DNA, 20 bp, Artificial Sequence
  Description of Artificial Sequence: Synthetic oligonucleotide
  Target: SCNA; (-) strand; PAM type: YTN; PAM sequence: TTT
attattcatgataaaacatg

SEQ ID NO: 46345 - DNA, 20 bp, Artificial Sequence
  Description of Artificial Sequence: Synthetic oligonucleotide
  Target: SCNA; (-) strand; PAM type: YTN; PAM sequence: TTA
aaaacatttattattcatga

SEQ ID NO: 46346 - DNA, 20 bp, Artificial Sequence
  Description of Artificial Sequence: Synthetic oligonucleotide
  Target: SCNA; (-) strand; PAM type: YTN; PAM sequence: TTT
aaaaacatttattattcatg

SEQ ID NO: 46347 - DNA, 20 bp, Artificial Sequence
  Description of Artificial Sequence: Synthetic oligonucleotide
  Target: SCNA; (-) strand; PAM type: YTN; PAM sequence: CTT
taaaaacatttattattcat

SEQ ID NO: 46348 - DNA, 20 bp, Artificial Sequence
  Description of Artificial Sequence: Synthetic oligonucleotide
  Target: SCNA; (-) strand; PAM type: YTN; PAM sequence: TTA
aactttaaaaacatttatta

SEQ ID NO: 46349 - DNA, 20 bp, Artificial Sequence
  Description of Artificial Sequence: Synthetic oligonucleotide
  Target: SCNA; (-) strand; PAM type: YTN; PAM sequence: TTT
aaactttaaaaacatttatt

SEQ ID NO: 46350 - DNA, 20 bp, Artificial Sequence
  Description of Artificial Sequence: Synthetic oligonucleotide
  Target: SCNA; (-) strand; PAM type: YTN; PAM sequence: TTT
taaactttaaaaacatttat

SEQ ID NO: 46351 - DNA, 20 bp, Artificial Sequence
  Description of Artificial Sequence: Synthetic oligonucleotide
  Target: SCNA; (-) strand; PAM type: YTN; PAM sequence: TTT
ttaaactttaaaaacattta

SEQ ID NO: 46352 - DNA, 20 bp, Artificial Sequence
  Description of Artificial Sequence: Synthetic oligonucleotide
  Target: SCNA; (-) strand; PAM type: YTN; PAM sequence: TTC
aggaatacccacaaggtaac

SEQ ID NO: 46353 - DNA, 20 bp, Artificial Sequence
  Description of Artificial Sequence: Synthetic oligonucleotide
  Target: SCNA; (-) strand; PAM type: YTN; PAM sequence: CTA
atcatgttcaggaataccca

SEQ ID NO: 46354 - DNA, 20 bp, Artificial Sequence
  Description of Artificial Sequence: Synthetic oligonucleotide
  Target: SCNA; (-) strand; PAM type: YTN; PAM sequence: TTG
gagaaataaaaatcctaatc

SEQ ID NO: 46355 - DNA, 20 bp, Artificial Sequence
  Description of Artificial Sequence: Synthetic oligonucleotide
  Target: SCNA; (-) strand; PAM type: YTN; PAM sequence: CTT
ggagaaataaaaatcctaat

SEQ ID NO: 46356 - DNA, 20 bp, Artificial Sequence
  Description of Artificial Sequence: Synthetic oligonucleotide
  Target: SCNA; (-) strand; PAM type: YTN; PAM sequence: CTG
tgagtgaataaaaatacttg

SEQ ID NO: 46357 - DNA, 20 bp, Artificial Sequence
  Description of Artificial Sequence: Synthetic oligonucleotide
  Target: SCNA; (-) strand; PAM type: YTN; PAM sequence: TTC
tgtgagtgaataaaaatact

SEQ ID NO: 46358 - DNA, 20 bp, Artificial Sequence
  Description of Artificial Sequence: Synthetic oligonucleotide
  Target: SCNA; (-) strand; PAM type: YTN; PAM sequence: TTG
attctgtgagtgaataaaaa

SEQ ID NO: 46359 - DNA, 20 bp, Artificial Sequence
  Description of Artificial Sequence: Synthetic oligonucleotide
  Target: SCNA; (-) strand; PAM type: YTN; PAM sequence: TTT
gattctgtgagtgaataaaa

SEQ ID NO: 46360 - DNA, 20 bp, Artificial Sequence
  Description of Artificial Sequence: Synthetic oligonucleotide
  Target: SCNA; (-) strand; PAM type: YTN; PAM sequence: TTT
tgattctgtgagtgaataaa

SEQ ID NO: 46361 - DNA, 20 bp, Artificial Sequence
  Description of Artificial Sequence: Synthetic oligonucleotide
  Target: SCNA; (-) strand; PAM type: YTN; PAM sequence: TTG
acattttgattctgtgagtg

SEQ ID NO: 46362 - DNA, 20 bp, Artificial Sequence
  Description of Artificial Sequence: Synthetic oligonucleotide
  Target: SCNA; (-) strand; PAM type: YTN; PAM sequence: CTT
gacattttgattctgtgagt

SEQ ID NO: 46363 - DNA, 20 bp, Artificial Sequence
  Description of Artificial Sequence: Synthetic oligonucleotide
  Target: SCNA; (-) strand; PAM type: YTN; PAM sequence: TTA
tatagccttgacattttgat

SEQ ID NO: 46364 - DNA, 20 bp, Artificial Sequence
  Description of Artificial Sequence: Synthetic oligonucleotide
  Target: SCNA; (-) strand; PAM type: YTN; PAM sequence: CTT
atatagccttgacattttga

SEQ ID NO: 46365 - DNA, 20 bp, Artificial Sequence
  Description of Artificial Sequence: Synthetic oligonucleotide
  Target: SCNA; (-) strand; PAM type: YTN; PAM sequence: TTG
atgaaaacttatatagcctt

SEQ ID NO: 46366 - DNA, 20 bp, Artificial Sequence
  Description of Artificial Sequence: Synthetic oligonucleotide
  Target: SCNA; (-) strand; PAM type: YTN; PAM sequence: CTT
gatgaaaacttatatagcct

SEQ ID NO: 46367 - DNA, 20 bp, Artificial Sequence
  Description of Artificial Sequence: Synthetic oligonucleotide
  Target: SCNA; (-) strand; PAM type: YTN; PAM sequence: TTA
gcacttgatgaaaacttata

SEQ ID NO: 46368 - DNA, 20 bp, Artificial Sequence
  Description of Artificial Sequence: Synthetic oligonucleotide
  Target: SCNA; (-) strand; PAM type: YTN; PAM sequence: CTA
aattagcacttgatgaaaac

SEQ ID NO: 46369 - DNA, 20 bp, Artificial Sequence
  Description of Artificial Sequence: Synthetic oligonucleotide
  Target: SCNA; (-) strand; PAM type: YTN; PAM sequence: TTA
gatgctaaattagcacttga

SEQ ID NO: 46370 - DNA, 20 bp, Artificial Sequence
  Description of Artificial Sequence: Synthetic oligonucleotide
  Target: SCNA; (-) strand; PAM type: YTN; PAM sequence: CTT
agatgctaaattagcacttg

SEQ ID NO: 46371 - DNA, 20 bp, Artificial Sequence
  Description of Artificial Sequence: Synthetic oligonucleotide
  Target: SCNA; (-) strand; PAM type: YTN; PAM sequence: TTA
ataaaaacttagatgctaaa

SEQ ID NO: 46372 - DNA, 20 bp, Artificial Sequence
  Description of Artificial Sequence: Synthetic oligonucleotide
  Target: SCNA; (-) strand; PAM type: YTN; PAM sequence: TTA
attaataaaaacttagatgc

SEQ ID NO: 46373 - DNA, 20 bp, Artificial Sequence
  Description of Artificial Sequence: Synthetic oligonucleotide
  Target: SCNA; (-) strand; PAM type: YTN; PAM sequence: TTA
caaattaattaataaaaact

SEQ ID NO: 46374 - DNA, 20 bp, Artificial Sequence
  Description of Artificial Sequence: Synthetic oligonucleotide
  Target: SCNA; (-) strand; PAM type: YTN; PAM sequence: TTT
acaaattaattaataaaaac

SEQ ID NO: 46375 - DNA, 20 bp, Artificial Sequence
  Description of Artificial Sequence: Synthetic oligonucleotide
  Target: SCNA; (-) strand; PAM type: YTN; PAM sequence: CTT
tacaaattaattaataaaaa

SEQ ID NO: 46376 - DNA, 20 bp, Artificial Sequence
  Description of Artificial Sequence: Synthetic oligonucleotide
  Target: SCNA; (-) strand; PAM type: YTN; PAM sequence: TTC
ctttacaaattaattaataa

SEQ ID NO: 46377 - DNA, 20 bp, Artificial Sequence
  Description of Artificial Sequence: Synthetic oligonucleotide
  Target: SCNA; (-) strand; PAM type: YTN; PAM sequence: TTT
cctttacaaattaattaata

SEQ ID NO: 46378 - DNA, 20 bp, Artificial Sequence
  Description of Artificial Sequence: Synthetic oligonucleotide
  Target: SCNA; (-) strand; PAM type: YTN; PAM sequence: TTA
tttcctttacaaattaatta

SEQ ID NO: 46379 - DNA, 20 bp, Artificial Sequence
  Description of Artificial Sequence: Synthetic oligonucleotide
  Target: SCNA; (-) strand; PAM type: YTN; PAM sequence: TTA
ttatttcctttacaaattaa

SEQ ID NO: 46380 - DNA, 20 bp, Artificial Sequence
  Description of Artificial Sequence: Synthetic oligonucleotide
  Target: SCNA; (-) strand; PAM type: YTN; PAM sequence: CTC
attattatttcctttacaaa

SEQ ID NO: 46381 - DNA, 20 bp, Artificial Sequence
  Description of Artificial Sequence: Synthetic oligonucleotide
  Target: SCNA; (-) strand; PAM type: YTN; PAM sequence: CTC
tcattattatttcctttaca

SEQ ID NO: 46382 - DNA, 20 bp, Artificial Sequence
  Description of Artificial Sequence: Synthetic oligonucleotide
  Target: SCNA; (-) strand; PAM type: YTN; PAM sequence: TTG
actctcattattatttcctt

SEQ ID NO: 46383 - DNA, 20 bp, Artificial Sequence
  Description of Artificial Sequence: Synthetic oligonucleotide
  Target: SCNA; (-) strand; PAM type: YTN; PAM sequence: TTT
gactctcattattatttcct

SEQ ID NO: 46384 - DNA, 20 bp, Artificial Sequence
  Description of Artificial Sequence: Synthetic oligonucleotide
  Target: SCNA; (-) strand; PAM type: YTN; PAM sequence: CTT
tgactctcattattatttcc

SEQ ID NO: 46385 - DNA, 20 bp, Artificial Sequence
  Description of Artificial Sequence: Synthetic oligonucleotide
  Target: SCNA; (-) strand; PAM type: YTN; PAM sequence: TTC
ctttgactctcattattatt

SEQ ID NO: 46386 - DNA, 20 bp, Artificial Sequence
  Description of Artificial Sequence: Synthetic oligonucleotide
  Target: SCNA; (-) strand; PAM type: YTN; PAM sequence: CTT
cctttgactctcattattat

SEQ ID NO: 46387 - DNA, 20 bp, Artificial Sequence
  Description of Artificial Sequence: Synthetic oligonucleotide
  Target: SCNA; (-) strand; PAM type: YTN; PAM sequence: TTC
ttcctttgactctcattatt

SEQ ID NO: 46388 - DNA, 20 bp, Artificial Sequence
  Description of Artificial Sequence: Synthetic oligonucleotide
  Target: SCNA; (-) strand; PAM type: YTN; PAM sequence: CTT
cttcctttgactctcattat

SEQ ID NO: 46389 - DNA, 20 bp, Artificial Sequence
  Description of Artificial Sequence: Synthetic oligonucleotide
  Target: SCNA; (-) strand; PAM type: YTN; PAM sequence: CTC
accacaggagatgcttcttc

SEQ ID NO: 46390 - DNA, 20 bp, Artificial Sequence
  Description of Artificial Sequence: Synthetic oligonucleotide
  Target: SCNA; (-) strand; PAM type: YTN; PAM sequence: CTG
gaaatggagctcaccacagg

SEQ ID NO: 46391 - DNA, 20 bp, Artificial Sequence
  Description of Artificial Sequence: Synthetic oligonucleotide
  Target: SCNA; (-) strand; PAM type: YTN; PAM sequence: TTG
gaatctggaaatggagctca

SEQ ID NO: 46392 - DNA, 20 bp, Artificial Sequence
  Description of Artificial Sequence: Synthetic oligonucleotide
  Target: SCNA; (-) strand; PAM type: YTN; PAM sequence: TTC
gttggaatctggaaatggag

SEQ ID NO: 46393 - DNA, 20 bp, Artificial Sequence
  Description of Artificial Sequence: Synthetic oligonucleotide
  Target: SCNA; (-) strand; PAM type: YTN; PAM sequence: TTT
cgttggaatctggaaatgga

SEQ ID NO: 46394 - DNA, 20 bp, Artificial Sequence
  Description of Artificial Sequence: Synthetic oligonucleotide
  Target: SCNA; (-) strand; PAM type: YTN; PAM sequence: TTA
atggtttcgttggaatctgg

SEQ ID NO: 46395 - DNA, 20 bp, Artificial Sequence
  Description of Artificial Sequence: Synthetic oligonucleotide
  Target: SCNA; (-) strand; PAM type: YTN; PAM sequence: TTT
aatggtttcgttggaatctg

SEQ ID NO: 46396 - DNA, 20 bp, Artificial Sequence
  Description of Artificial Sequence: Synthetic oligonucleotide
  Target: SCNA; (-) strand; PAM type: YTN; PAM sequence: TTT
taatggtttcgttggaatct

SEQ ID NO: 46397 - DNA, 20 bp, Artificial Sequence
  Description of Artificial Sequence: Synthetic oligonucleotide
  Target: SCNA; (-) strand; PAM type: YTN; PAM sequence: CTC
agtgccataaatattttaat

SEQ ID NO: 46398 - DNA, 20 bp, Artificial Sequence
  Description of Artificial Sequence: Synthetic oligonucleotide
  Target: SCNA; (-) strand; PAM type: YTN; PAM sequence: TTC
agcctcagtgccataaatat

SEQ ID NO: 46399 - DNA, 20 bp, Artificial Sequence
  Description of Artificial Sequence: Synthetic oligonucleotide
  Target: SCNA; (-) strand; PAM type: YTN; PAM sequence: CTG
attcagcctcagtgccataa

SEQ ID NO: 46400 - DNA, 20 bp, Artificial Sequence
  Description of Artificial Sequence: Synthetic oligonucleotide
  Target: SCNA; (-) strand; PAM type: YTN; PAM sequence: CTA
cacaatatggccacacaaga

SEQ ID NO: 46401 - DNA, 20 bp, Artificial Sequence
  Description of Artificial Sequence: Synthetic oligonucleotide
  Target: SCNA; (-) strand; PAM type: YTN; PAM sequence: TTG
ctacacaatatggccacaca

SEQ ID NO: 46402 - DNA, 20 bp, Artificial Sequence
  Description of Artificial Sequence: Synthetic oligonucleotide
  Target: SCNA; (-) strand; PAM type: YTN; PAM sequence: CTG
ttgctacacaatatggccac

SEQ ID NO: 46403 - DNA, 20 bp, Artificial Sequence
  Description of Artificial Sequence: Synthetic oligonucleotide
  Target: SCNA; (-) strand; PAM type: YTN; PAM sequence: TTC
gaaacccactgttgctacac

SEQ ID NO: 46404 - DNA, 20 bp, Artificial Sequence
  Description of Artificial Sequence: Synthetic oligonucleotide
  Target: SCNA; (-) strand; PAM type: YTN; PAM sequence: TTA
ttcgaaacccactgttgcta

SEQ ID NO: 46405 - DNA, 20 bp, Artificial Sequence
  Description of Artificial Sequence: Synthetic oligonucleotide
  Target: SCNA; (-) strand; PAM type: YTN; PAM sequence: TTA
ttattcgaaacccactgttg

SEQ ID NO: 46406 - DNA, 20 bp, Artificial Sequence
  Description of Artificial Sequence: Synthetic oligonucleotide
  Target: SCNA; (-) strand; PAM type: YTN; PAM sequence: CTT
attattcgaaacccactgtt

SEQ ID NO: 46407 - DNA, 20 bp, Artificial Sequence
  Description of Artificial Sequence: Synthetic oligonucleotide
  Target: SCNA; (-) strand; PAM type: YTN; PAM sequence: CTG
aatcttattattcgaaaccc

SEQ ID NO: 46408 - DNA, 20 bp, Artificial Sequence
  Description of Artificial Sequence: Synthetic oligonucleotide
  Target: SCNA; (-) strand; PAM type: YTN; PAM sequence: CTA
aatggatgactgaatcttat

SEQ ID NO: 46409 - DNA, 20 bp, Artificial Sequence
  Description of Artificial Sequence: Synthetic oligonucleotide
  Target: SCNA; (-) strand; PAM type: YTN; PAM sequence: TTG
gagtctaaatggatgactga

SEQ ID NO: 46410 - DNA, 20 bp, Artificial Sequence
  Description of Artificial Sequence: Synthetic oligonucleotide
  Target: SCNA; (-) strand; PAM type: YTN; PAM sequence: CTC
caattggagtctaaatggat

SEQ ID NO: 46411 - DNA, 20 bp, Artificial Sequence
  Description of Artificial Sequence: Synthetic oligonucleotide
  Target: SCNA; (-) strand; PAM type: YTN; PAM sequence: CTG
agctccaattggagtctaaa

SEQ ID NO: 46412 - DNA, 20 bp, Artificial Sequence
  Description of Artificial Sequence: Synthetic oligonucleotide
  Target: SCNA; (-) strand; PAM type: YTN; PAM sequence: TTG
cctgagctccaattggagtc

SEQ ID NO: 46413 - DNA, 20 bp, Artificial Sequence
  Description of Artificial Sequence: Synthetic oligonucleotide
  Target: SCNA; (-) strand; PAM type: YTN; PAM sequence: TTG
aagttgcctgagctccaatt

SEQ ID NO: 46414 - DNA, 20 bp, Artificial Sequence
  Description of Artificial Sequence: Synthetic oligonucleotide
  Target: SCNA; (-) strand; PAM type: YTN; PAM sequence: TTA
taatcacaaattgaagttgc

SEQ ID NO: 46415 - DNA, 20 bp, Artificial Sequence
  Description of Artificial Sequence: Synthetic oligonucleotide
  Target: SCNA; (-) strand; PAM type: YTN; PAM sequence: TTA
atcattataatcacaaattg

SEQ ID NO: 46416 - DNA, 20 bp, Artificial Sequence
  Description of Artificial Sequence: Synthetic oligonucleotide
  Target: SCNA; (-) strand; PAM type: YTN; PAM sequence: TTG
aagttaatcattataatcac

SEQ ID NO: 46417 - DNA, 20 bp, Artificial Sequence
  Description of Artificial Sequence: Synthetic oligonucleotide
  Target: SCNA; (-) strand; PAM type: YTN; PAM sequence: TTT
gaagttaatcattataatca

SEQ ID NO: 46418 - DNA, 20 bp, Artificial Sequence
  Description of Artificial Sequence: Synthetic oligonucleotide
  Target: SCNA; (-) strand; PAM type: YTN; PAM sequence: TTT
tgaagttaatcattataatc

SEQ ID NO: 46419 - DNA, 20 bp, Artificial Sequence
  Description of Artificial Sequence: Synthetic oligonucleotide
  Target: SCNA; (-) strand; PAM type: YTN; PAM sequence: TTT
ttgaagttaatcattataat

SEQ ID NO: 46420 - DNA, 20 bp, Artificial Sequence
  Description of Artificial Sequence: Synthetic oligonucleotide
  Target: SCNA; (-) strand; PAM type: YTN; PAM sequence: CTT
tttgaagttaatcattataa

SEQ ID NO: 46421 - DNA, 20 bp, Artificial Sequence
  Description of Artificial Sequence: Synthetic oligonucleotide
  Target: SCNA; (-) strand; PAM type: YTN; PAM sequence: CTA
caaatagtgcatctttttga

SEQ ID NO: 46422 - DNA, 20 bp, Artificial Sequence
  Description of Artificial Sequence: Synthetic oligonucleotide
  Target: SCNA; (-) strand; PAM type: YTN; PAM sequence: TTC
aacataggtctacaaatagt

SEQ ID NO: 46423 - DNA, 20 bp, Artificial Sequence
  Description of Artificial Sequence: Synthetic oligonucleotide
  Target: SCNA; (-) strand; PAM type: YTN; PAM sequence: TTT
caacataggtctacaaatag

SEQ ID NO: 46424 - DNA, 20 bp, Artificial Sequence
  Description of Artificial Sequence: Synthetic oligonucleotide
  Target: SCNA; (-) strand; PAM type: YTN; PAM sequence: CTG
cataagtttcaacataggtc

SEQ ID NO: 46425 - DNA, 20 bp, Artificial Sequence
  Description of Artificial Sequence: Synthetic oligonucleotide
  Target: SCNA; (-) strand; PAM type: YTN; PAM sequence: TTC
cactgcataagtttcaacat

SEQ ID NO: 46426 - DNA, 20 bp, Artificial Sequence
  Description of Artificial Sequence: Synthetic oligonucleotide
  Target: SCNA; (-) strand; PAM type: YTN; PAM sequence: TTA
gttccactgcataagtttca

SEQ ID NO: 46427 - DNA, 20 bp, Artificial Sequence
  Description of Artificial Sequence: Synthetic oligonucleotide
  Target: SCNA; (-) strand; PAM type: YTN; PAM sequence: TTT
agttccactgcataagtttc

SEQ ID NO: 46428 - DNA, 20 bp, Artificial Sequence
  Description of Artificial Sequence: Synthetic oligonucleotide
  Target: SCNA; (-) strand; PAM type: YTN; PAM sequence: TTT
tagttccactgcataagttt

SEQ ID NO: 46429 - DNA, 20 bp, Artificial Sequence
  Description of Artificial Sequence: Synthetic oligonucleotide
  Target: SCNA; (-) strand; PAM type: YTN; PAM sequence: TTT
ttagttccactgcataagtt

SEQ ID NO: 46430 - DNA, 20 bp, Artificial Sequence
  Description of Artificial Sequence: Synthetic oligonucleotide
  Target: SCNA; (-) strand; PAM type: YTN; PAM sequence: CTT
tttagttccactgcataagt

SEQ ID NO: 46431 - DNA, 20 bp, Artificial Sequence
  Description of Artificial Sequence: Synthetic oligonucleotide
  Target: SCNA; (-) strand; PAM type: YTN; PAM sequence: TTA
taaaaataggtggcttttta

SEQ ID NO: 46432 - DNA, 20 bp, Artificial Sequence
  Description of Artificial Sequence: Synthetic oligonucleotide
  Target: SCNA; (-) strand; PAM type: YTN; PAM sequence: TTA
ttataaaaataggtggcttt

SEQ ID NO: 46433 - DNA, 20 bp, Artificial Sequence
  Description of Artificial Sequence: Synthetic oligonucleotide
  Target: SCNA; (-) strand; PAM type: YTN; PAM sequence: TTT
attataaaaataggtggctt

SEQ ID NO: 46434 - DNA, 20 bp, Artificial Sequence
  Description of Artificial Sequence: Synthetic oligonucleotide
  Target: SCNA; (-) strand; PAM type: YTN; PAM sequence: TTT
tattataaaaataggtggct

SEQ ID NO: 46435 - DNA, 20 bp, Artificial Sequence
  Description of Artificial Sequence: Synthetic oligonucleotide
  Target: SCNA; (-) strand; PAM type: YTN; PAM sequence: TTT
ttattataaaaataggtggc

SEQ ID NO: 46436 - DNA, 20 bp, Artificial Sequence
  Description of Artificial Sequence: Synthetic oligonucleotide
  Target: SCNA; (-) strand; PAM type: YTN; PAM sequence: CTT
tttattataaaaataggtgg

SEQ ID NO: 46437 - DNA, 20 bp, Artificial Sequence
  Description of Artificial Sequence: Synthetic oligonucleotide
  Target: SCNA; (-) strand; PAM type: YTN; PAM sequence: TTG
tgcctttttattataaaaat

SEQ ID NO: 46438 - DNA, 20 bp, Artificial Sequence
  Description of Artificial Sequence: Synthetic oligonucleotide
  Target: SCNA; (-) strand; PAM type: YTN; PAM sequence: TTT
gtgcctttttattataaaaa

SEQ ID NO: 46439 - DNA, 20 bp, Artificial Sequence
  Description of Artificial Sequence: Synthetic oligonucleotide
  Target: SCNA; (-) strand; PAM type: YTN; PAM sequence: TTG
cgtatttgtgcctttttatt

SEQ ID NO: 46440 - DNA, 20 bp, Artificial Sequence
  Description of Artificial Sequence: Synthetic oligonucleotide
  Target: SCNA; (-) strand; PAM type: YTN; PAM sequence: TTT
gcgtatttgtgcctttttat

SEQ ID NO: 46441 - DNA, 20 bp, Artificial Sequence
  Description of Artificial Sequence: Synthetic oligonucleotide
  Target: SCNA; (-) strand; PAM type: YTN; PAM sequence: TTG
catttgcgtatttgtgcctt

SEQ ID NO: 46442 - DNA, 20 bp, Artificial Sequence
  Description of Artificial Sequence: Synthetic oligonucleotide
  Target: SCNA; (-) strand; PAM type: YTN; PAM sequence: TTT
gcatttgcgtatttgtgcct

SEQ ID NO: 46443 - DNA, 20 bp, Artificial Sequence
  Description of Artificial Sequence: Synthetic oligonucleotide
  Target: SCNA; (-) strand; PAM type: YTN; PAM sequence: TTT
tgcatttgcgtatttgtgcc

SEQ ID NO: 46444 - DNA, 20 bp, Artificial Sequence
  Description of Artificial Sequence: Synthetic oligonucleotide
  Target: SCNA; (-) strand; PAM type: YTN; PAM sequence: CTT
ttgcatttgcgtatttgtgc

SEQ ID NO: 46445 - DNA, 20 bp, Artificial Sequence
  Description of Artificial Sequence: Synthetic oligonucleotide
  Target: SCNA; (-) strand; PAM type: YTN; PAM sequence: TTC
ttttgcatttgcgtatttgt

SEQ ID NO: 46446 - DNA, 20 bp, Artificial Sequence
  Description of Artificial Sequence: Synthetic oligonucleotide
  Target: SCNA; (-) strand; PAM type: YTN; PAM sequence: TTT
cttttgcatttgcgtatttg

SEQ ID NO: 46447 - DNA, 20 bp, Artificial Sequence
  Description of Artificial Sequence: Synthetic oligonucleotide
  Target: SCNA; (-) strand; PAM type: YTN; PAM sequence: TTC
caatgaatttcttttgcatt

SEQ ID NO: 46448 - DNA, 20 bp, Artificial Sequence
  Description of Artificial Sequence: Synthetic oligonucleotide
  Target: SCNA; (-) strand; PAM type: YTN; PAM sequence: TTT
ccaatgaatttcttttgcat

SEQ ID NO: 46449 - DNA, 20 bp, Artificial Sequence
  Description of Artificial Sequence: Synthetic oligonucleotide
  Target: SCNA; (-) strand; PAM type: YTN; PAM sequence: TTT
tccaatgaatttcttttgca

SEQ ID NO: 46450 - DNA, 20 bp, Artificial Sequence
  Description of Artificial Sequence: Synthetic oligonucleotide
  Target: SCNA; (-) strand; PAM type: YTN; PAM sequence: TTC
aagattttccaatgaatttc

SEQ ID NO: 46451 - DNA, 20 bp, Artificial Sequence
  Description of Artificial Sequence: Synthetic oligonucleotide
  Target: SCNA; (-) strand; PAM type: YTN; PAM sequence: TTG
aaacgttcaagattttccaa

SEQ ID NO: 46452 - DNA, 20 bp, Artificial Sequence
  Description of Artificial Sequence: Synthetic oligonucleotide
  Target: SCNA; (-) strand; PAM type: YTN; PAM sequence: TTT
gaaacgttcaagattttcca

SEQ ID NO: 46453 - DNA, 20 bp, Artificial Sequence
  Description of Artificial Sequence: Synthetic oligonucleotide
  Target: SCNA; (-) strand; PAM type: YTN; PAM sequence: TTA
tatttgaaacgttcaagatt

SEQ ID NO: 46454 - DNA, 20 bp, Artificial Sequence
  Description of Artificial Sequence: Synthetic oligonucleotide
  Target: SCNA; (-) strand; PAM type: YTN; PAM sequence: TTG
tgataattatatttgaaacg

SEQ ID NO: 46455 - DNA, 20 bp, Artificial Sequence
  Description of Artificial Sequence: Synthetic oligonucleotide
  Target: SCNA; (-) strand; PAM type: YTN; PAM sequence: TTT
gtgataattatatttgaaac

SEQ ID NO: 46456 - DNA, 20 bp, Artificial Sequence
  Description of Artificial Sequence: Synthetic oligonucleotide
  Target: SCNA; (-) strand; PAM type: YTN; PAM sequence: TTG
catttgtgataattatattt

SEQ ID NO: 46457 - DNA, 20 bp, Artificial Sequence
  Description of Artificial Sequence: Synthetic oligonucleotide
  Target: SCNA; (-) strand; PAM type: YTN; PAM sequence: TTT
gcatttgtgataattatatt

SEQ ID NO: 46458 - DNA, 20 bp, Artificial Sequence
  Description of Artificial Sequence: Synthetic oligonucleotide
  Target: SCNA; (-) strand; PAM type: YTN; PAM sequence: TTA
tatttgcatttgtgataatt

SEQ ID NO: 46459 - DNA, 20 bp, Artificial Sequence
  Description of Artificial Sequence: Synthetic oligonucleotide
  Target: SCNA; (-) strand; PAM type: YTN; PAM sequence: TTT
atatttgcatttgtgataat

SEQ ID NO: 46460 - DNA, 20 bp, Artificial Sequence
  Description of Artificial Sequence: Synthetic oligonucleotide
  Target: SCNA; (-) strand; PAM type: YTN; PAM sequence: TTT
tatatttgcatttgtgataa

SEQ ID NO: 46461 - DNA, 20 bp, Artificial Sequence
  Description of Artificial Sequence: Synthetic oligonucleotide
  Target: SCNA; (-) strand; PAM type: YTN; PAM sequence: TTA
ttttatatttgcatttgtga

SEQ ID NO: 46462 - DNA, 20 bp, Artificial Sequence
  Description of Artificial Sequence: Synthetic oligonucleotide
  Target: SCNA; (-) strand; PAM type: YTN; PAM sequence: TTG
ttattttatatttgcatttg

SEQ ID NO: 46463 - DNA, 20 bp, Artificial Sequence
  Description of Artificial Sequence: Synthetic oligonucleotide
  Target: SCNA; (-) strand; PAM type: YTN; PAM sequence: TTA
acaaacatattgttatttta

SEQ ID NO: 46464 - DNA, 20 bp, Artificial Sequence
  Description of Artificial Sequence: Synthetic oligonucleotide
  Target: SCNA; (-) strand; PAM type: YTN; PAM sequence: TTA
aatgaaagtataatattaac

SEQ ID NO: 46465 - DNA, 20 bp, Artificial Sequence
  Description of Artificial Sequence: Synthetic oligonucleotide
  Target: SCNA; (-) strand; PAM type: YTN; PAM sequence: CTG
attaaatgaaagtataatat

SEQ ID NO: 46466 - DNA, 20 bp, Artificial Sequence
  Description of Artificial Sequence: Synthetic oligonucleotide
  Target: SCNA; (-) strand; PAM type: YTN; PAM sequence: TTA
gaagaactgattaaatgaaa

SEQ ID NO: 46467 - DNA, 20 bp, Artificial Sequence
  Description of Artificial Sequence: Synthetic oligonucleotide
  Target: SCNA; (-) strand; PAM type: YTN; PAM sequence: CTT
agaagaactgattaaatgaa

SEQ ID NO: 46468 - DNA, 20 bp, Artificial Sequence
  Description of Artificial Sequence: Synthetic oligonucleotide
  Target: SCNA; (-) strand; PAM type: YTN; PAM sequence: TTA
cttagaagaactgattaaat

SEQ ID NO: 46469 - DNA, 20 bp, Artificial Sequence
  Description of Artificial Sequence: Synthetic oligonucleotide
  Target: SCNA; (-) strand; PAM type: YTN; PAM sequence: CTT
acttagaagaactgattaaa

SEQ ID NO: 46470 - DNA, 20 bp, Artificial Sequence
  Description of Artificial Sequence: Synthetic oligonucleotide
  Target: SCNA; (-) strand; PAM type: YTN; PAM sequence: TTG
ccttacttagaagaactgat

SEQ ID NO: 46471 - DNA, 20 bp, Artificial Sequence
  Description of Artificial Sequence: Synthetic oligonucleotide
  Target: SCNA; (-) strand; PAM type: YTN; PAM sequence: TTT
gccttacttagaagaactga

SEQ ID NO: 46472 - DNA, 20 bp, Artificial Sequence
  Description of Artificial Sequence: Synthetic oligonucleotide
  Target: SCNA; (-) strand; PAM type: YTN; PAM sequence: TTC
atatatttgccttacttaga

SEQ ID NO: 46473 - DNA, 20 bp, Artificial Sequence
  Description of Artificial Sequence: Synthetic oligonucleotide
  Target: SCNA; (-) strand; PAM type: YTN; PAM sequence: TTA
aaaaattcatatatttgcct

SEQ ID NO: 46474 - DNA, 20 bp, Artificial Sequence
  Description of Artificial Sequence: Synthetic oligonucleotide
  Target: SCNA; (-) strand; PAM type: YTN; PAM sequence: TTG
tatattaaaaaattcatata

SEQ ID NO: 46475 - DNA, 20 bp, Artificial Sequence
  Description of Artificial Sequence: Synthetic oligonucleotide
  Target: SCNA; (-) strand; PAM type: YTN; PAM sequence: TTT
gtatattaaaaaattcatat

SEQ ID NO: 46476 - DNA, 20 bp, Artificial Sequence
  Description of Artificial Sequence: Synthetic oligonucleotide
  Target: SCNA; (-) strand; PAM type: YTN; PAM sequence: TTT
tgtatattaaaaaattcata

SEQ ID NO: 46477 - DNA, 20 bp, Artificial Sequence
  Description of Artificial Sequence: Synthetic oligonucleotide
  Target: SCNA; (-) strand; PAM type: YTN; PAM sequence: TTT
ttgtatattaaaaaattcat

SEQ ID NO: 46478 - DNA, 20 bp, Artificial Sequence
  Description of Artificial Sequence: Synthetic oligonucleotide
  Target: SCNA; (-) strand; PAM type: YTN; PAM sequence: TTG
ggggggtatttttgtatatt

SEQ ID NO: 46479 - DNA, 20 bp, Artificial Sequence
  Description of Artificial Sequence: Synthetic oligonucleotide
  Target: SCNA; (-) strand; PAM type: YTN; PAM sequence: TTT
gggggggtatttttgtatat

SEQ ID NO: 46480 - DNA, 20 bp, Artificial Sequence
  Description of Artificial Sequence: Synthetic oligonucleotide
  Target: SCNA; (-) strand; PAM type: YTN; PAM sequence: TTT
tgggggggtatttttgtata

SEQ ID NO: 46481 - DNA, 20 bp, Artificial Sequence
  Description of Artificial Sequence: Synthetic oligonucleotide
  Target: SCNA; (-) strand; PAM type: YTN; PAM sequence: TTA
atggagttttgggggggtat

SEQ ID NO: 46482 - DNA, 20 bp, Artificial Sequence
  Description of Artificial Sequence: Synthetic oligonucleotide
  Target: SCNA; (-) strand; PAM type: YTN; PAM sequence: CTT
aatggagttttgggggggta

SEQ ID NO: 46483 - DNA, 20 bp, Artificial Sequence
  Description of Artificial Sequence: Synthetic oligonucleotide
  Target: SCNA; (-) strand; PAM type: YTN; PAM sequence: TTA
cccaatggtcatatagatat

SEQ ID NO: 46484 - DNA, 20 bp, Artificial Sequence
  Description of Artificial Sequence: Synthetic oligonucleotide
  Target: SCNA; (-) strand; PAM type: YTN; PAM sequence: CTT
acccaatggtcatatagata

SEQ ID NO: 46485 - DNA, 20 bp, Artificial Sequence
  Description of Artificial Sequence: Synthetic oligonucleotide
  Target: SCNA; (-) strand; PAM type: YTN; PAM sequence: CTA
ataatcataaaaaatcttac

SEQ ID NO: 46486 - DNA, 20 bp, Artificial Sequence
  Description of Artificial Sequence: Synthetic oligonucleotide
  Target: SCNA; (-) strand; PAM type: YTN; PAM sequence: TTC
ccatactaataatcataaaa

SEQ ID NO: 46487 - DNA, 20 bp, Artificial Sequence
  Description of Artificial Sequence: Synthetic oligonucleotide
  Target: SCNA; (-) strand; PAM type: YTN; PAM sequence: TTT
cccatactaataatcataaa

SEQ ID NO: 46488 - DNA, 20 bp, Artificial Sequence
  Description of Artificial Sequence: Synthetic oligonucleotide
  Target: SCNA; (-) strand; PAM type: YTN; PAM sequence: TTT
tcccatactaataatcataa

SEQ ID NO: 46489 - DNA, 20 bp, Artificial Sequence
  Description of Artificial Sequence: Synthetic oligonucleotide
  Target: SCNA; (-) strand; PAM type: YTN; PAM sequence: CTA
aacagtcacaattttcccat

SEQ ID NO: 46490 - DNA, 20 bp, Artificial Sequence
  Description of Artificial Sequence: Synthetic oligonucleotide
  Target: SCNA; (-) strand; PAM type: YTN; PAM sequence: TTA
atatatctaaacagtcacaa

SEQ ID NO: 46491 - DNA, 20 bp, Artificial Sequence
  Description of Artificial Sequence: Synthetic oligonucleotide
  Target: SCNA; (-) strand; PAM type: YTN; PAM sequence: TTT
aatatatctaaacagtcaca

SEQ ID NO: 46492 - DNA, 20 bp, Artificial Sequence
  Description of Artificial Sequence: Synthetic oligonucleotide
  Target: SCNA; (-) strand; PAM type: YTN; PAM sequence: TTA
atatatttaatatatctaaa

SEQ ID NO: 46493 - DNA, 20 bp, Artificial Sequence
  Description of Artificial Sequence: Synthetic oligonucleotide
  Target: SCNA; (-) strand; PAM type: YTN; PAM sequence: CTT
aatatatttaatatatctaa

SEQ ID NO: 46494 - DNA, 20 bp, Artificial Sequence
  Description of Artificial Sequence: Synthetic oligonucleotide
  Target: SCNA; (-) strand; PAM type: YTN; PAM sequence: TTA
cttaatatatttaatatatc

SEQ ID NO: 46495 - DNA, 20 bp, Artificial Sequence
  Description of Artificial Sequence: Synthetic oligonucleotide
  Target: SCNA; (-) strand; PAM type: YTN; PAM sequence: TTA
aatatattacttaatatatt

SEQ ID NO: 46496 - DNA, 20 bp, Artificial Sequence
  Description of Artificial Sequence: Synthetic oligonucleotide
  Target: SCNA; (-) strand; PAM type: YTN; PAM sequence: TTA
aatcattaaatatattactt

SEQ ID NO: 46497 - DNA, 20 bp, Artificial Sequence
  Description of Artificial Sequence: Synthetic oligonucleotide
  Target: SCNA; (-) strand; PAM type: YTN; PAM sequence: CTT
aaatcattaaatatattact

SEQ ID NO: 46498 - DNA, 20 bp, Artificial Sequence
  Description of Artificial Sequence: Synthetic oligonucleotide
  Target: SCNA; (-) strand; PAM type: YTN; PAM sequence: TTA
acaatcttaaatcattaaat

SEQ ID NO: 46499 - DNA, 20 bp, Artificial Sequence
  Description of Artificial Sequence: Synthetic oligonucleotide
  Target: SCNA; (-) strand; PAM type: YTN; PAM sequence: TTT
aacaatcttaaatcattaaa

SEQ ID NO: 46500 - DNA, 20 bp, Artificial Sequence
  Description of Artificial Sequence: Synthetic oligonucleotide
  Target: SCNA; (-) strand; PAM type: YTN; PAM sequence: TTA
tttaacaatcttaaatcatt

SEQ ID NO: 46501 - DNA, 20 bp, Artificial Sequence
  Description of Artificial Sequence: Synthetic oligonucleotide
  Target: SCNA; (-) strand; PAM type: YTN; PAM sequence: TTA
atataaattatttaacaatc

SEQ ID NO: 46502 - DNA, 20 bp, Artificial Sequence
  Description of Artificial Sequence: Synthetic oligonucleotide
  Target: SCNA; (-) strand; PAM type: YTN; PAM sequence: TTT
aatataaattatttaacaat

SEQ ID NO: 46503 - DNA, 20 bp, Artificial Sequence
  Description of Artificial Sequence: Synthetic oligonucleotide
  Target: SCNA; (-) strand; PAM type: YTN; PAM sequence: TTT
taatataaattatttaacaa

SEQ ID NO: 46504 - DNA, 20 bp, Artificial Sequence
  Description of Artificial Sequence: Synthetic oligonucleotide
  Target: SCNA; (-) strand; PAM type: YTN; PAM sequence: TTC
aattttaatataaattattt

SEQ ID NO: 46505 - DNA, 20 bp, Artificial Sequence
  Description of Artificial Sequence: Synthetic oligonucleotide
  Target: SCNA; (-) strand; PAM type: YTN; PAM sequence: TTT
caattttaatataaattatt

SEQ ID NO: 46506 - DNA, 20 bp, Artificial Sequence
  Description of Artificial Sequence: Synthetic oligonucleotide
  Target: SCNA; (-) strand; PAM type: YTN; PAM sequence: CTG
gcaaaatgaggtttcaattt

SEQ ID NO: 46507 - DNA, 20 bp, Artificial Sequence
  Description of Artificial Sequence: Synthetic oligonucleotide
  Target: SCNA; (-) strand; PAM type: YTN; PAM sequence: TTA
atactggcaaaatgaggttt

SEQ ID NO: 46508 - DNA, 20 bp, Artificial Sequence
  Description of Artificial Sequence: Synthetic oligonucleotide
  Target: SCNA; (-) strand; PAM type: YTN; PAM sequence: TTT
aatactggcaaaatgaggtt

SEQ ID NO: 46509 - DNA, 20 bp, Artificial Sequence
  Description of Artificial Sequence: Synthetic oligonucleotide
  Target: SCNA; (-) strand; PAM type: YTN; PAM sequence: TTT
taatactggcaaaatgaggt

SEQ ID NO: 46510 - DNA, 20 bp, Artificial Sequence
  Description of Artificial Sequence: Synthetic oligonucleotide
  Target: SCNA; (-) strand; PAM type: YTN; PAM sequence: TTT
ttaatactggcaaaatgagg

SEQ ID NO: 46511 - DNA, 20 bp, Artificial Sequence
  Description of Artificial Sequence: Synthetic oligonucleotide
  Target: SCNA; (-) strand; PAM type: YTN; PAM sequence: TTG
aaatttttaatactggcaaa

SEQ ID NO: 46512 - DNA, 20 bp, Artificial Sequence
  Description of Artificial Sequence: Synthetic oligonucleotide
  Target: SCNA; (-) strand; PAM type: YTN; PAM sequence: TTT
gaaatttttaatactggcaa

SEQ ID NO: 46513 - DNA, 20 bp, Artificial Sequence
  Description of Artificial Sequence: Synthetic oligonucleotide
  Target: SCNA; (-) strand; PAM type: YTN; PAM sequence: TTT
tgaaatttttaatactggca

SEQ ID NO: 46514 - DNA, 20 bp, Artificial Sequence
  Description of Artificial Sequence: Synthetic oligonucleotide
  Target: SCNA; (-) strand; PAM type: YTN; PAM sequence: TTA
aattttgaaatttttaatac

SEQ ID NO: 46515 - DNA, 20 bp, Artificial Sequence
  Description of Artificial Sequence: Synthetic oligonucleotide
  Target: SCNA; (-) strand; PAM type: YTN; PAM sequence: TTT
aaattttgaaatttttaata

SEQ ID NO: 46516 - DNA, 20 bp, Artificial Sequence
  Description of Artificial Sequence: Synthetic oligonucleotide
  Target: SCNA; (-) strand; PAM type: YTN; PAM sequence: TTG
gtgtcatatgtatttaaatt

SEQ ID NO: 46517 - DNA, 20 bp, Artificial Sequence
  Description of Artificial Sequence: Synthetic oligonucleotide
  Target: SCNA; (-) strand; PAM type: YTN; PAM sequence: TTG
tatgcattggtgtcatatgt

SEQ ID NO: 46518 - DNA, 20 bp, Artificial Sequence
  Description of Artificial Sequence: Synthetic oligonucleotide
  Target: SCNA; (-) strand; PAM type: YTN; PAM sequence: TTC
aggacaaagtaacattgtat

SEQ ID NO: 46519 - DNA, 20 bp, Artificial Sequence
  Description of Artificial Sequence: Synthetic oligonucleotide
  Target: SCNA; (-) strand; PAM type: YTN; PAM sequence: TTA
tgttcaggacaaagtaacat

SEQ ID NO: 46520 - DNA, 20 bp, Artificial Sequence
  Description of Artificial Sequence: Synthetic oligonucleotide
  Target: SCNA; (-) strand; PAM type: YTN; PAM sequence: CTT
atgttcaggacaaagtaaca

SEQ ID NO: 46521 - DNA, 20 bp, Artificial Sequence
  Description of Artificial Sequence: Synthetic oligonucleotide
  Target: SCNA; (-) strand; PAM type: YTN; PAM sequence: TTA
aaacttatgttcaggacaaa

SEQ ID NO: 46522 - DNA, 20 bp, Artificial Sequence
  Description of Artificial Sequence: Synthetic oligonucleotide
  Target: SCNA; (-) strand; PAM type: YTN; PAM sequence: TTT
aaaacttatgttcaggacaa

SEQ ID NO: 46523 - DNA, 20 bp, Artificial Sequence
  Description of Artificial Sequence: Synthetic oligonucleotide
  Target: SCNA; (-) strand; PAM type: YTN; PAM sequence: TTT
taaaacttatgttcaggaca

SEQ ID NO: 46524 - DNA, 20 bp, Artificial Sequence
  Description of Artificial Sequence: Synthetic oligonucleotide
  Target: SCNA; (-) strand; PAM type: YTN; PAM sequence: CTT
ttaaaacttatgttcaggac

SEQ ID NO: 46525 - DNA, 20 bp, Artificial Sequence
  Description of Artificial Sequence: Synthetic oligonucleotide
  Target: SCNA; (-) strand; PAM type: YTN; PAM sequence: TTC
ttttaaaacttatgttcagg

SEQ ID NO: 46526 - DNA, 20 bp, Artificial Sequence
  Description of Artificial Sequence: Synthetic oligonucleotide
  Target: SCNA; (-) strand; PAM type: YTN; PAM sequence: TTA
aattcttttaaaacttatgt

SEQ ID NO: 46527 - DNA, 20 bp, Artificial Sequence
  Description of Artificial Sequence: Synthetic oligonucleotide
  Target: SCNA; (-) strand; PAM type: YTN; PAM sequence: CTT
aaattcttttaaaacttatg

SEQ ID NO: 46528 - DNA, 20 bp, Artificial Sequence
  Description of Artificial Sequence: Synthetic oligonucleotide
  Target: SCNA; (-) strand; PAM type: YTN; PAM sequence: TTA
aacttaaattcttttaaaac

SEQ ID NO: 46529 - DNA, 20 bp, Artificial Sequence
  Description of Artificial Sequence: Synthetic oligonucleotide
  Target: SCNA; (-) strand; PAM type: YTN; PAM sequence: TTT
aaacttaaattcttttaaaa

SEQ ID NO: 46530 - DNA, 20 bp, Artificial Sequence
  Description of Artificial Sequence: Synthetic oligonucleotide
  Target: SCNA; (-) strand; PAM type: YTN; PAM sequence: TTA
ggagaatatttaaacttaaa

SEQ ID NO: 46531 - DNA, 20 bp, Artificial Sequence
  Description of Artificial Sequence: Synthetic oligonucleotide
  Target: SCNA; (-) strand; PAM type: YTN; PAM sequence: TTT
aggagaatatttaaacttaa

SEQ ID NO: 46532 - DNA, 20 bp, Artificial Sequence
  Description of Artificial Sequence: Synthetic oligonucleotide
  Target: SCNA; (-) strand; PAM type: YTN; PAM sequence: CTC
acaaagcatttaggagaata

SEQ ID NO: 46533 - DNA, 20 bp, Artificial Sequence
  Description of Artificial Sequence: Synthetic oligonucleotide
  Target: SCNA; (-) strand; PAM type: YTN; PAM sequence: TTA
agtctcacaaagcatttagg

SEQ ID NO: 46534 - DNA, 20 bp, Artificial Sequence
  Description of Artificial Sequence: Synthetic oligonucleotide
  Target: SCNA; (-) strand; PAM type: YTN; PAM sequence: CTT
aagtctcacaaagcatttag

SEQ ID NO: 46535 - DNA, 20 bp, Artificial Sequence
  Description of Artificial Sequence: Synthetic oligonucleotide
  Target: SCNA; (-) strand; PAM type: YTN; PAM sequence: TTA
tcttaagtctcacaaagcat

SEQ ID NO: 46536 - DNA, 20 bp, Artificial Sequence
  Description of Artificial Sequence: Synthetic oligonucleotide
  Target: SCNA; (-) strand; PAM type: YTN; PAM sequence: TTT
atcttaagtctcacaaagca

SEQ ID NO: 46537 - DNA, 20 bp, Artificial Sequence
  Description of Artificial Sequence: Synthetic oligonucleotide
  Target: SCNA; (-) strand; PAM type: YTN; PAM sequence: TTT
tatcttaagtctcacaaagc

SEQ ID NO: 46538 - DNA, 20 bp, Artificial Sequence
  Description of Artificial Sequence: Synthetic oligonucleotide
  Target: SCNA; (-) strand; PAM type: YTN; PAM sequence: TTT
ttatcttaagtctcacaaag

SEQ ID NO: 46539 - DNA, 20 bp, Artificial Sequence
  Description of Artificial Sequence: Synthetic oligonucleotide
  Target: SCNA; (-) strand; PAM type: YTN; PAM sequence: TTT
tttatcttaagtctcacaaa

SEQ ID NO: 46540 - DNA, 20 bp, Artificial Sequence
  Description of Artificial Sequence: Synthetic oligonucleotide
  Target: SCNA; (-) strand; PAM type: YTN; PAM sequence: CTG
ttttttatcttaagtctcac

SEQ ID NO: 46541 - DNA, 20 bp, Artificial Sequence
  Description of Artificial Sequence: Synthetic oligonucleotide
  Target: SCNA; (-) strand; PAM type: YTN; PAM sequence: CTG
aggaactgttttttatctta

SEQ ID NO: 46542 - DNA, 20 bp, Artificial Sequence
  Description of Artificial Sequence: Synthetic oligonucleotide
  Target: SCNA; (-) strand; PAM type: YTN; PAM sequence: TTC
tgaggaactgttttttatct

SEQ ID NO: 46543 - DNA, 20 bp, Artificial Sequence
  Description of Artificial Sequence: Synthetic oligonucleotide
  Target: SCNA; (-) strand; PAM type: YTN; PAM sequence: TTG
tcaggagttctgaggaactg

SEQ ID NO: 46544 - DNA, 20 bp, Artificial Sequence
  Description of Artificial Sequence: Synthetic oligonucleotide
  Target: SCNA; (-) strand; PAM type: YTN; PAM sequence: TTT
gtcaggagttctgaggaact

SEQ ID NO: 46545 - DNA, 20 bp, Artificial Sequence
  Description of Artificial Sequence: Synthetic oligonucleotide
  Target: SCNA; (-) strand; PAM type: YTN; PAM sequence: CTT
tgtcaggagttctgaggaac

SEQ ID NO: 46546 - DNA, 20 bp, Artificial Sequence
  Description of Artificial Sequence: Synthetic oligonucleotide
  Target: SCNA; (-) strand; PAM type: YTN; PAM sequence: CTG
cccccctttgtcaggagttc

SEQ ID NO: 46547 - DNA, 20 bp, Artificial Sequence
  Description of Artificial Sequence: Synthetic oligonucleotide
  Target: SCNA; (-) strand; PAM type: YTN; PAM sequence: TTA
ctgcccccctttgtcaggag

SEQ ID NO: 46548 - DNA, 20 bp, Artificial Sequence
  Description of Artificial Sequence: Synthetic oligonucleotide
  Target: SCNA; (-) strand; PAM type: YTN; PAM sequence: TTT
actgcccccctttgtcagga

SEQ ID NO: 46549 - DNA, 20 bp, Artificial Sequence
  Description of Artificial Sequence: Synthetic oligonucleotide
  Target: SCNA; (-) strand; PAM type: YTN; PAM sequence: CTT
tactgcccccctttgtcagg

SEQ ID NO: 46550 - DNA, 20 bp, Artificial Sequence
  Description of Artificial Sequence: Synthetic oligonucleotide
  Target: SCNA; (-) strand; PAM type: YTN; PAM sequence: TTC
tttactgcccccctttgtca

SEQ ID NO: 46551 - DNA, 20 bp, Artificial Sequence
  Description of Artificial Sequence: Synthetic oligonucleotide
  Target: SCNA; (-) strand; PAM type: YTN; PAM sequence: CTT
ctttactgcccccctttgtc

SEQ ID NO: 46552 - DNA, 20 bp, Artificial Sequence
  Description of Artificial Sequence: Synthetic oligonucleotide
  Target: SCNA; (-) strand; PAM type: YTN; PAM sequence: TTG
cttctttactgccccccttt

SEQ ID NO: 46553 - DNA, 20 bp, Artificial Sequence
  Description of Artificial Sequence: Synthetic oligonucleotide
  Target: SCNA; (-) strand; PAM type: YTN; PAM sequence: TTT
gcttctttactgcccccctt

SEQ ID NO: 46554 - DNA, 20 bp, Artificial Sequence
  Description of Artificial Sequence: Synthetic oligonucleotide
  Target: SCNA; (-) strand; PAM type: YTN; PAM sequence: TTT
tgcttctttactgcccccct

SEQ ID NO: 46555 - DNA, 20 bp, Artificial Sequence
  Description of Artificial Sequence: Synthetic oligonucleotide
  Target: SCNA; (-) strand; PAM type: YTN; PAM sequence: TTT
ttgcttctttactgcccccc

SEQ ID NO: 46556 - DNA, 20 bp, Artificial Sequence
  Description of Artificial Sequence: Synthetic oligonucleotide
  Target: SCNA; (-) strand; PAM type: YTN; PAM sequence: CTT
tttgcttctttactgccccc

SEQ ID NO: 46557 - DNA, 20 bp, Artificial Sequence
  Description of Artificial Sequence: Synthetic oligonucleotide
  Target: SCNA; (-) strand; PAM type: YTN; PAM sequence: CTC
cataaaaatctttttgcttc

SEQ ID NO: 46558 - DNA, 20 bp, Artificial Sequence
  Description of Artificial Sequence: Synthetic oligonucleotide
  Target: SCNA; (-) strand; PAM type: YTN; PAM sequence: CTG
aactccataaaaatcttttt

SEQ ID NO: 46559 - DNA, 20 bp, Artificial Sequence
  Description of Artificial Sequence: Synthetic oligonucleotide
  Target: SCNA; (-) strand; PAM type: YTN; PAM sequence: TTC
cctgaactccataaaaatct

SEQ ID NO: 46560 - DNA, 20 bp, Artificial Sequence
  Description of Artificial Sequence: Synthetic oligonucleotide
  Target: SCNA; (-) strand; PAM type: YTN; PAM sequence: TTT
ccctgaactccataaaaatc

SEQ ID NO: 46561 - DNA, 20 bp, Artificial Sequence
  Description of Artificial Sequence: Synthetic oligonucleotide
  Target: SCNA; (-) strand; PAM type: YTN; PAM sequence: CTT
tccctgaactccataaaaat

SEQ ID NO: 46562 - DNA, 20 bp, Artificial Sequence
  Description of Artificial Sequence: Synthetic oligonucleotide
  Target: SCNA; (-) strand; PAM type: YTN; PAM sequence: TTC
agctttccctgaactccata

SEQ ID NO: 46563 - DNA, 20 bp, Artificial Sequence
  Description of Artificial Sequence: Synthetic oligonucleotide
  Target: SCNA; (-) strand; PAM type: YTN; PAM sequence: TTT
cagctttccctgaactccat

SEQ ID NO: 46564 - DNA, 20 bp, Artificial Sequence
  Description of Artificial Sequence: Synthetic oligonucleotide
  Target: SCNA; (-) strand; PAM type: YTN; PAM sequence: CTT
tcagctttccctgaactcca

SEQ ID NO: 46565 - DNA, 20 bp, Artificial Sequence
  Description of Artificial Sequence: Synthetic oligonucleotide
  Target: SCNA; (-) strand; PAM type: YTN; PAM sequence: TTA
gaaaatagggaatgtacaca

SEQ ID NO: 46566 - DNA, 20 bp, Artificial Sequence
  Description of Artificial Sequence: Synthetic oligonucleotide
  Target: SCNA; (-) strand; PAM type: YTN; PAM sequence: TTT
agaaaatagggaatgtacac

SEQ ID NO: 46567 - DNA, 20 bp, Artificial Sequence
  Description of Artificial Sequence: Synthetic oligonucleotide
  Target: SCNA; (-) strand; PAM type: YTN; PAM sequence: CTG
tttagaaaatagggaatgta

SEQ ID NO: 46568 - DNA, 20 bp, Artificial Sequence
  Description of Artificial Sequence: Synthetic oligonucleotide
  Target: SCNA; (-) strand; PAM type: YTN; PAM sequence: TTA
ctgtttagaaaatagggaat

SEQ ID NO: 46569 - DNA, 20 bp, Artificial Sequence
  Description of Artificial Sequence: Synthetic oligonucleotide
  Target: SCNA; (-) strand; PAM type: YTN; PAM sequence: TTT
actgtttagaaaatagggaa

SEQ ID NO: 46570 - DNA, 20 bp, Artificial Sequence
  Description of Artificial Sequence: Synthetic oligonucleotide
  Target: SCNA; (-) strand; PAM type: YTN; PAM sequence: CTA
aaatgcaatccatcatttac

SEQ ID NO: 46571 - DNA, 20 bp, Artificial Sequence
  Description of Artificial Sequence: Synthetic oligonucleotide
  Target: SCNA; (-) strand; PAM type: YTN; PAM sequence: CTG
cctaaaatgcaatccatcat

SEQ ID NO: 46572 - DNA, 20 bp, Artificial Sequence
  Description of Artificial Sequence: Synthetic oligonucleotide
  Target: SCNA; (-) strand; PAM type: YTN; PAM sequence: TTG
tagtctgcctaaaatgcaat

SEQ ID NO: 46573 - DNA, 20 bp, Artificial Sequence
  Description of Artificial Sequence: Synthetic oligonucleotide
  Target: SCNA; (-) strand; PAM type: YTN; PAM sequence: TTT
gtagtctgcctaaaatgcaa

SEQ ID NO: 46574 - DNA, 20 bp, Artificial Sequence
  Description of Artificial Sequence: Synthetic oligonucleotide
  Target: SCNA; (-) strand; PAM type: YTN; PAM sequence: TTT
tgtagtctgcctaaaatgca

SEQ ID NO: 46575 - DNA, 20 bp, Artificial Sequence
  Description of Artificial Sequence: Synthetic oligonucleotide
  Target: SCNA; (-) strand; PAM type: YTN; PAM sequence: TTA
gcaattttgtagtctgccta

SEQ ID NO: 46576 - DNA, 20 bp, Artificial Sequence
  Description of Artificial Sequence: Synthetic oligonucleotide
  Target: SCNA; (-) strand; PAM type: YTN; PAM sequence: TTT
agcaattttgtagtctgcct

SEQ ID NO: 46577 - DNA, 20 bp, Artificial Sequence
  Description of Artificial Sequence: Synthetic oligonucleotide
  Target: SCNA; (-) strand; PAM type: YTN; PAM sequence: TTT
tagcaattttgtagtctgcc

SEQ ID NO: 46578 - DNA, 20 bp, Artificial Sequence
  Description of Artificial Sequence: Synthetic oligonucleotide
  Target: SCNA; (-) strand; PAM type: YTN; PAM sequence: TTA
attttagcaattttgtagtc

SEQ ID NO: 46579 - DNA, 20 bp, Artificial Sequence
  Description of Artificial Sequence: Synthetic oligonucleotide
  Target: SCNA; (-) strand; PAM type: YTN; PAM sequence: TTT
aattttagcaattttgtagt

SEQ ID NO: 46580 - DNA, 20 bp, Artificial Sequence
  Description of Artificial Sequence: Synthetic oligonucleotide
  Target: SCNA; (-) strand; PAM type: YTN; PAM sequence: TTC
catcccaacatttaatttta

SEQ ID NO: 46581 - DNA, 20 bp, Artificial Sequence
  Description of Artificial Sequence: Synthetic oligonucleotide
  Target: SCNA; (-) strand; PAM type: YTN; PAM sequence: TTT
ccatcccaacatttaatttt

SEQ ID NO: 46582 - DNA, 20 bp, Artificial Sequence
  Description of Artificial Sequence: Synthetic oligonucleotide
  Target: SCNA; (-) strand; PAM type: YTN; PAM sequence: TTC
cacatttccatcccaacatt

SEQ ID NO: 46583 - DNA, 20 bp, Artificial Sequence
  Description of Artificial Sequence: Synthetic oligonucleotide
  Target: SCNA; (-) strand; PAM type: YTN; PAM sequence: CTG
cattccacatttccatccca

SEQ ID NO: 46584 - DNA, 20 bp, Artificial Sequence
  Description of Artificial Sequence: Synthetic oligonucleotide
  Target: SCNA; (-) strand; PAM type: YTN; PAM sequence: CTC
tgcattccacatttccatcc

SEQ ID NO: 46585 - DNA, 20 bp, Artificial Sequence
  Description of Artificial Sequence: Synthetic oligonucleotide
  Target: SCNA; (-) strand; PAM type: YTN; PAM sequence: TTG
caaactctgcattccacatt

SEQ ID NO: 46586 - DNA, 20 bp, Artificial Sequence
  Description of Artificial Sequence: Synthetic oligonucleotide
  Target: SCNA; (-) strand; PAM type: YTN; PAM sequence: TTA
aaagggggttgcaaactctg

SEQ ID NO: 46587 - DNA, 20 bp, Artificial Sequence
  Description of Artificial Sequence: Synthetic oligonucleotide
  Target: SCNA; (-) strand; PAM type: YTN; PAM sequence: TTA
aattaaaagggggttgcaaa

SEQ ID NO: 46588 - DNA, 20 bp, Artificial Sequence
  Description of Artificial Sequence: Synthetic oligonucleotide
  Target: SCNA; (-) strand; PAM type: YTN; PAM sequence: TTG
aaaatattaaattaaaaggg

SEQ ID NO: 46589 - DNA, 20 bp, Artificial Sequence
  Description of Artificial Sequence: Synthetic oligonucleotide
  Target: SCNA; (-) strand; PAM type: YTN; PAM sequence: TTT
gaaaatattaaattaaaagg

SEQ ID NO: 46590 - DNA, 20 bp, Artificial Sequence
  Description of Artificial Sequence: Synthetic oligonucleotide
  Target: SCNA; (-) strand; PAM type: YTN; PAM sequence: CTT
tgaaaatattaaattaaaag

SEQ ID NO: 46591 - DNA, 20 bp, Artificial Sequence
  Description of Artificial Sequence: Synthetic oligonucleotide
  Target: SCNA; (-) strand; PAM type: YTN; PAM sequence: TTC
tttgaaaatattaaattaaa

SEQ ID NO: 46592 - DNA, 20 bp, Artificial Sequence
  Description of Artificial Sequence: Synthetic oligonucleotide
  Target: SCNA; (-) strand; PAM type: YTN; PAM sequence: TTA
attctttgaaaatattaaat

SEQ ID NO: 46593 - DNA, 20 bp, Artificial Sequence
  Description of Artificial Sequence: Synthetic oligonucleotide
  Target: SCNA; (-) strand; PAM type: YTN; PAM sequence: CTT
aattctttgaaaatattaaa

SEQ ID NO: 46594 - DNA, 20 bp, Artificial Sequence
  Description of Artificial Sequence: Synthetic oligonucleotide
  Target: SCNA; (-) strand; PAM type: YTN; PAM sequence: CTC
ttaattctttgaaaatatta

SEQ ID NO: 46595 - DNA, 20 bp, Artificial Sequence
  Description of Artificial Sequence: Synthetic oligonucleotide
  Target: SCNA; (-) strand; PAM type: YTN; PAM sequence: TTC
tcttaattctttgaaaatat

SEQ ID NO: 46596 - DNA, 20 bp, Artificial Sequence
  Description of Artificial Sequence: Synthetic oligonucleotide
  Target: SCNA; (-) strand; PAM type: YTN; PAM sequence: TTT
ctcttaattctttgaaaata

SEQ ID NO: 46597 - DNA, 20 bp, Artificial Sequence
  Description of Artificial Sequence: Synthetic oligonucleotide
  Target: SCNA; (-) strand; PAM type: YTN; PAM sequence: TTA
taaaataaaatataataatt

SEQ ID NO: 46598 - DNA, 20 bp, Artificial Sequence
  Description of Artificial Sequence: Synthetic oligonucleotide
  Target: SCNA; (-) strand; PAM type: YTN; PAM sequence: TTT
ataaaataaaatataataat

SEQ ID NO: 46599 - DNA, 20 bp, Artificial Sequence
  Description of Artificial Sequence: Synthetic oligonucleotide
  Target: SCNA; (-) strand; PAM type: YTN; PAM sequence: TTT
tataaaataaaatataataa

SEQ ID NO: 46600 - DNA, 20 bp, Artificial Sequence
  Description of Artificial Sequence: Synthetic oligonucleotide
  Target: SCNA; (-) strand; PAM type: YTN; PAM sequence: TTA
aatataatattttataaaat

SEQ ID NO: 46601 - DNA, 20 bp, Artificial Sequence
  Description of Artificial Sequence: Synthetic oligonucleotide
  Target: SCNA; (-) strand; PAM type: YTN; PAM sequence: TTT
aaatataatattttataaaa

SEQ ID NO: 46602 - DNA, 20 bp, Artificial Sequence
  Description of Artificial Sequence: Synthetic oligonucleotide
  Target: SCNA; (-) strand; PAM type: YTN; PAM sequence: TTT
taaatataatattttataaa

SEQ ID NO: 46603 - DNA, 20 bp, Artificial Sequence
  Description of Artificial Sequence: Synthetic oligonucleotide
  Target: SCNA; (-) strand; PAM type: YTN; PAM sequence: TTG
agtaattttaaatataatat

SEQ ID NO: 46604 - DNA, 20 bp, Artificial Sequence
  Description of Artificial Sequence: Synthetic oligonucleotide
  Target: SCNA; (-) strand; PAM type: YTN; PAM sequence: TTA
gaattgagtaattttaaata

SEQ ID NO: 46605 - DNA, 20 bp, Artificial Sequence
  Description of Artificial Sequence: Synthetic oligonucleotide
  Target: SCNA; (-) strand; PAM type: YTN; PAM sequence: TTT
agaattgagtaattttaaat

SEQ ID NO: 46606 - DNA, 20 bp, Artificial Sequence
  Description of Artificial Sequence: Synthetic oligonucleotide
  Target: SCNA; (-) strand; PAM type: YTN; PAM sequence: TTC
atttagaattgagtaatttt

SEQ ID NO: 46607 - DNA, 20 bp, Artificial Sequence
  Description of Artificial Sequence: Synthetic oligonucleotide
  Target: SCNA; (-) strand; PAM type: YTN; PAM sequence: TTG
caataacattcatttagaat

SEQ ID NO: 46608 - DNA, 20 bp, Artificial Sequence
  Description of Artificial Sequence: Synthetic oligonucleotide
  Target: SCNA; (-) strand; PAM type: YTN; PAM sequence: TTT
gcaataacattcatttagaa

SEQ ID NO: 46609 - DNA, 20 bp, Artificial Sequence
  Description of Artificial Sequence: Synthetic oligonucleotide
  Target: SCNA; (-) strand; PAM type: YTN; PAM sequence: CTA
ggtttgcaataacattcatt

SEQ ID NO: 46610 - DNA, 20 bp, Artificial Sequence
  Description of Artificial Sequence: Synthetic oligonucleotide
  Target: SCNA; (-) strand; PAM type: YTN; PAM sequence: TTA
taagcctaggtttgcaataa

SEQ ID NO: 46611 - DNA, 20 bp, Artificial Sequence
  Description of Artificial Sequence: Synthetic oligonucleotide
  Target: SCNA; (-) strand; PAM type: YTN; PAM sequence: CTT
ataagcctaggtttgcaata

SEQ ID NO: 46612 - DNA, 20 bp, Artificial Sequence
  Description of Artificial Sequence: Synthetic oligonucleotide
  Target: SCNA; (-) strand; PAM type: YTN; PAM sequence: TTC
ttataagcctaggtttgcaa

SEQ ID NO: 46613 - DNA, 20 bp, Artificial Sequence
  Description of Artificial Sequence: Synthetic oligonucleotide
  Target: SCNA; (-) strand; PAM type: YTN; PAM sequence: CTT
cttataagcctaggtttgca

SEQ ID NO: 46614 - DNA, 20 bp, Artificial Sequence
  Description of Artificial Sequence: Synthetic oligonucleotide
  Target: SCNA; (-) strand; PAM type: YTN; PAM sequence: TTC
ttcttataagcctaggtttg

SEQ ID NO: 46615 - DNA, 20 bp, Artificial Sequence
  Description of Artificial Sequence: Synthetic oligonucleotide
  Target: SCNA; (-) strand; PAM type: YTN; PAM sequence: CTA
aatgcattcttcttataagc

SEQ ID NO: 46616 - DNA, 20 bp, Artificial Sequence
  Description of Artificial Sequence: Synthetic oligonucleotide
  Target: SCNA; (-) strand; PAM type: YTN; PAM sequence: TTC
taaatgcattcttcttataa

SEQ ID NO: 46617 - DNA, 20 bp, Artificial Sequence
  Description of Artificial Sequence: Synthetic oligonucleotide
  Target: SCNA; (-) strand; PAM type: YTN; PAM sequence: CTT
ctaaatgcattcttcttata

SEQ ID NO: 46618 - DNA, 20 bp, Artificial Sequence
  Description of Artificial Sequence: Synthetic oligonucleotide
  Target: SCNA; (-) strand; PAM type: YTN; PAM sequence: CTA
gggcttctaaatgcattctt

SEQ ID NO: 46619 - DNA, 20 bp, Artificial Sequence
  Description of Artificial Sequence: Synthetic oligonucleotide
  Target: SCNA; (-) strand; PAM type: YTN; PAM sequence: TTA
tctagggcttctaaatgcat

SEQ ID NO: 46620 - DNA, 20 bp, Artificial Sequence
  Description of Artificial Sequence: Synthetic oligonucleotide
  Target: SCNA; (-) strand; PAM type: YTN; PAM sequence: TTG
tatgttatctagggcttcta

SEQ ID NO: 46621 - DNA, 20 bp, Artificial Sequence
  Description of Artificial Sequence: Synthetic oligonucleotide
  Target: SCNA; (-) strand; PAM type: YTN; PAM sequence: TTA
tattgtatgttatctagggc

SEQ ID NO: 46622 - DNA, 20 bp, Artificial Sequence
  Description of Artificial Sequence: Synthetic oligonucleotide
  Target: SCNA; (-) strand; PAM type: YTN; PAM sequence: TTT
atattgtatgttatctaggg

SEQ ID NO: 46623 - DNA, 20 bp, Artificial Sequence
  Description of Artificial Sequence: Synthetic oligonucleotide
  Target: SCNA; (-) strand; PAM type: YTN; PAM sequence: TTT
tatattgtatgttatctagg

SEQ ID NO: 46624 - DNA, 20 bp, Artificial Sequence
  Description of Artificial Sequence: Synthetic oligonucleotide
  Target: SCNA; (-) strand; PAM type: YTN; PAM sequence: TTT
ttatattgtatgttatctag

SEQ ID NO: 46625 - DNA, 20 bp, Artificial Sequence
  Description of Artificial Sequence: Synthetic oligonucleotide
  Target: SCNA; (-) strand; PAM type: YTN; PAM sequence: TTA
tttttatattgtatgttatc

SEQ ID NO: 46626 - DNA, 20 bp, Artificial Sequence
  Description of Artificial Sequence: Synthetic oligonucleotide
  Target: SCNA; (-) strand; PAM type: YTN; PAM sequence: TTG
caaatattatttttatattg

SEQ ID NO: 46627 - DNA, 20 bp, Artificial Sequence
  Description of Artificial Sequence: Synthetic oligonucleotide
  Target: SCNA; (-) strand; PAM type: YTN; PAM sequence: TTT
gcaaatattatttttatatt

SEQ ID NO: 46628 - DNA, 20 bp, Artificial Sequence
  Description of Artificial Sequence: Synthetic oligonucleotide
  Target: SCNA; (-) strand; PAM type: YTN; PAM sequence: CTC
aaaaaaaaaaaaaaaaagaa

SEQ ID NO: 46629 - DNA, 20 bp, Artificial Sequence
  Description of Artificial Sequence: Synthetic oligonucleotide
  Target: SCNA; (-) strand; PAM type: YTN; PAM sequence: CTC
catctcaaaaaaaaaaaaaa

SEQ ID NO: 46630 - DNA, 20 bp, Artificial Sequence
  Description of Artificial Sequence: Synthetic oligonucleotide
  Target: SCNA; (-) strand; PAM type: YTN; PAM sequence: CTA
ggcaacatgagcgaaactcc

SEQ ID NO: 46631 - DNA, 20 bp, Artificial Sequence
  Description of Artificial Sequence: Synthetic oligonucleotide
  Target: SCNA; (-) strand; PAM type: YTN; PAM sequence: CTA
gcctaggcaacatgagcgaa

SEQ ID NO: 46632 - DNA, 20 bp, Artificial Sequence
  Description of Artificial Sequence: Synthetic oligonucleotide
  Target: SCNA; (-) strand; PAM type: YTN; PAM sequence: TTC
tagcctaggcaacatgagcg

SEQ ID NO: 46633 - DNA, 20 bp, Artificial Sequence
  Description of Artificial Sequence: Synthetic oligonucleotide
  Target: SCNA; (-) strand; PAM type: YTN; PAM sequence: CTG
tattctagcctaggcaacat

SEQ ID NO: 46634 - DNA, 20 bp, Artificial Sequence
  Description of Artificial Sequence: Synthetic oligonucleotide
  Target: SCNA; (-) strand; PAM type: YTN; PAM sequence: TTG
tgccactgtattctagccta

SEQ ID NO: 46635 - DNA, 20 bp, Artificial Sequence
  Description of Artificial Sequence: Synthetic oligonucleotide
  Target: SCNA; (-) strand; PAM type: YTN; PAM sequence: TTG
cagtgagccgagattgtgcc

SEQ ID NO: 46636 - DNA, 20 bp, Artificial Sequence
  Description of Artificial Sequence: Synthetic oligonucleotide
  Target: SCNA; (-) strand; PAM type: YTN; PAM sequence: TTG
aacccaggaggcggtggttg

SEQ ID NO: 46637 - DNA, 20 bp, Artificial Sequence
  Description of Artificial Sequence: Synthetic oligonucleotide
  Target: SCNA; (-) strand; PAM type: YTN; PAM sequence: TTT
gaacccaggaggcggtggtt

SEQ ID NO: 46638 - DNA, 20 bp, Artificial Sequence
  Description of Artificial Sequence: Synthetic oligonucleotide
  Target: SCNA; (-) strand; PAM type: YTN; PAM sequence: CTG
aggcagaagaatcgtttgaa

SEQ ID NO: 46639 - DNA, 20 bp, Artificial Sequence
  Description of Artificial Sequence: Synthetic oligonucleotide
  Target: SCNA; (-) strand; PAM type: YTN; PAM sequence: CTG
gggaggctgaggcagaagaa

SEQ ID NO: 46640 - DNA, 20 bp, Artificial Sequence
  Description of Artificial Sequence: Synthetic oligonucleotide
  Target: SCNA; (-) strand; PAM type: YTN; PAM sequence: CTA
ctggggaggctgaggcagaa

SEQ ID NO: 46641 - DNA, 20 bp, Artificial Sequence
  Description of Artificial Sequence: Synthetic oligonucleotide
  Target: SCNA; (-) strand; PAM type: YTN; PAM sequence: CTG
taatcccaactactggggag

SEQ ID NO: 46642 - DNA, 20 bp, Artificial Sequence
  Description of Artificial Sequence: Synthetic oligonucleotide
  Target: SCNA; (-) strand; PAM type: YTN; PAM sequence: TTA
gccgggcatggtggcacata

SEQ ID NO: 46643 - DNA, 20 bp, Artificial Sequence
  Description of Artificial Sequence: Synthetic oligonucleotide
  Target: SCNA; (-) strand; PAM type: YTN; PAM sequence: CTA
aaaatacaaaattagccggg

SEQ ID NO: 46644 - DNA, 20 bp, Artificial Sequence
  Description of Artificial Sequence: Synthetic oligonucleotide
  Target: SCNA; (-) strand; PAM type: YTN; PAM sequence: CTA
ctaaaaatacaaaattagcc

SEQ ID NO: 46645 - DNA, 20 bp, Artificial Sequence
  Description of Artificial Sequence: Synthetic oligonucleotide
  Target: SCNA; (-) strand; PAM type: YTN; PAM sequence: CTC
tactaaaaatacaaaattag

SEQ ID NO: 46646 - DNA, 20 bp, Artificial Sequence
  Description of Artificial Sequence: Synthetic oligonucleotide
  Target: SCNA; (-) strand; PAM type: YTN; PAM sequence: CTC
catctctactaaaaatacaa

SEQ ID NO: 46647 - DNA, 20 bp, Artificial Sequence
  Description of Artificial Sequence: Synthetic oligonucleotide
  Target: SCNA; (-) strand; PAM type: YTN; PAM sequence: TTG
accaacatggagaaactcca

SEQ ID NO: 46648 - DNA, 20 bp, Artificial Sequence
  Description of Artificial Sequence: Synthetic oligonucleotide
  Target: SCNA; (-) strand; PAM type: YTN; PAM sequence: CTT
gaccaacatggagaaactcc

SEQ ID NO: 46649 - DNA, 20 bp, Artificial Sequence
  Description of Artificial Sequence: Synthetic oligonucleotide
  Target: SCNA; (-) strand; PAM type: YTN; PAM sequence: TTC
aagaccagcttgaccaacat

SEQ ID NO: 46650 - DNA, 20 bp, Artificial Sequence
  Description of Artificial Sequence: Synthetic oligonucleotide
  Target: SCNA; (-) strand; PAM type: YTN; PAM sequence: CTG
aggtcgggagttcaagacca

SEQ ID NO: 46651 - DNA, 20 bp, Artificial Sequence
  Description of Artificial Sequence: Synthetic oligonucleotide
  Target: SCNA; (-) strand; PAM type: YTN; PAM sequence: TTG
ggaggccaaggcgggtggat

SEQ ID NO: 46652 - DNA, 20 bp, Artificial Sequence
  Description of Artificial Sequence: Synthetic oligonucleotide
  Target: SCNA; (-) strand; PAM type: YTN; PAM sequence: TTT
gggaggccaaggcgggtgga

SEQ ID NO: 46653 - DNA, 20 bp, Artificial Sequence
  Description of Artificial Sequence: Synthetic oligonucleotide
  Target: SCNA; (-) strand; PAM type: YTN; PAM sequence: CTT
tgggaggccaaggcgggtgg

SEQ ID NO: 46654 - DNA, 20 bp, Artificial Sequence
  Description of Artificial Sequence: Synthetic oligonucleotide
  Target: SCNA; (-) strand; PAM type: YTN; PAM sequence: CTG
taatcccagcactttgggag

SEQ ID NO: 46655 - DNA, 20 bp, Artificial Sequence
  Description of Artificial Sequence: Synthetic oligonucleotide
  Target: SCNA; (-) strand; PAM type: YTN; PAM sequence: CTC
aggcctgtaatcccagcact

SEQ ID NO: 46656 - DNA, 20 bp, Artificial Sequence
  Description of Artificial Sequence: Synthetic oligonucleotide
  Target: SCNA; (-) strand; PAM type: YTN; PAM sequence: TTA
aaatgaaaacaggccaggcg

SEQ ID NO: 46657 - DNA, 20 bp, Artificial Sequence
  Description of Artificial Sequence: Synthetic oligonucleotide
  Target: SCNA; (-) strand; PAM type: YTN; PAM sequence: CTT
aaaatgaaaacaggccaggc

SEQ ID NO: 46658 - DNA, 20 bp, Artificial Sequence
  Description of Artificial Sequence: Synthetic oligonucleotide
  Target: SCNA; (-) strand; PAM type: YTN; PAM sequence: CTA
cacttaaaatgaaaacaggc

SEQ ID NO: 46659 - DNA, 20 bp, Artificial Sequence
  Description of Artificial Sequence: Synthetic oligonucleotide
  Target: SCNA; (-) strand; PAM type: YTN; PAM sequence: CTA
gacaactacacttaaaatga

SEQ ID NO: 46660 - DNA, 20 bp, Artificial Sequence
  Description of Artificial Sequence: Synthetic oligonucleotide
  Target: SCNA; (-) strand; PAM type: YTN; PAM sequence: TTG
aaaatgctagacaactacac

SEQ ID NO: 46661 - DNA, 20 bp, Artificial Sequence
  Description of Artificial Sequence: Synthetic oligonucleotide
  Target: SCNA; (-) strand; PAM type: YTN; PAM sequence: TTG
tcaaacgggggggaatgtat

SEQ ID NO: 46662 - DNA, 20 bp, Artificial Sequence
  Description of Artificial Sequence: Synthetic oligonucleotide
  Target: SCNA; (-) strand; PAM type: YTN; PAM sequence: TTT
gtcaaacgggggggaatgta

SEQ ID NO: 46663 - DNA, 20 bp, Artificial Sequence
  Description of Artificial Sequence: Synthetic oligonucleotide
  Target: SCNA; (-) strand; PAM type: YTN; PAM sequence: CTA
aatggcaagataaaatttgt

SEQ ID NO: 46664 - DNA, 20 bp, Artificial Sequence
  Description of Artificial Sequence: Synthetic oligonucleotide
  Target: SCNA; (-) strand; PAM type: YTN; PAM sequence: TTA
gctaaatggcaagataaaat

SEQ ID NO: 46665 - DNA, 20 bp, Artificial Sequence
  Description of Artificial Sequence: Synthetic oligonucleotide
  Target: SCNA; (-) strand; PAM type: YTN; PAM sequence: TTG
cccattagctaaatggcaag

SEQ ID NO: 46666 - DNA, 20 bp, Artificial Sequence
  Description of Artificial Sequence: Synthetic oligonucleotide
  Target: SCNA; (-) strand; PAM type: YTN; PAM sequence: CTT
gcccattagctaaatggcaa

SEQ ID NO: 46667 - DNA, 20 bp, Artificial Sequence
  Description of Artificial Sequence: Synthetic oligonucleotide
  Target: SCNA; (-) strand; PAM type: YTN; PAM sequence: TTG
cttgcccattagctaaatgg

SEQ ID NO: 46668 - DNA, 20 bp, Artificial Sequence
  Description of Artificial Sequence: Synthetic oligonucleotide
  Target: SCNA; (-) strand; PAM type: YTN; PAM sequence: TTT
gcttgcccattagctaaatg

SEQ ID NO: 46669 - DNA, 20 bp, Artificial Sequence
  Description of Artificial Sequence: Synthetic oligonucleotide
  Target: SCNA; (-) strand; PAM type: YTN; PAM sequence: TTT
tgcttgcccattagctaaat

SEQ ID NO: 46670 - DNA, 20 bp, Artificial Sequence
  Description of Artificial Sequence: Synthetic oligonucleotide
  Target: SCNA; (-) strand; PAM type: YTN; PAM sequence: TTT
ttgcttgcccattagctaaa

SEQ ID NO: 46671 - DNA, 20 bp, Artificial Sequence
  Description of Artificial Sequence: Synthetic oligonucleotide
  Target: SCNA; (-) strand; PAM type: YTN; PAM sequence: TTT
tttgcttgcccattagctaa

SEQ ID NO: 46672 - DNA, 20 bp, Artificial Sequence
  Description of Artificial Sequence: Synthetic oligonucleotide
  Target: SCNA; (-) strand; PAM type: YTN; PAM sequence: TTA
attttttgcttgcccattag

SEQ ID NO: 46673 - DNA, 20 bp, Artificial Sequence
  Description of Artificial Sequence: Synthetic oligonucleotide
  Target: SCNA; (-) strand; PAM type: YTN; PAM sequence: CTT
aattttttgcttgcccatta

SEQ ID NO: 46674 - DNA, 20 bp, Artificial Sequence
  Description of Artificial Sequence: Synthetic oligonucleotide
  Target: SCNA; (-) strand; PAM type: YTN; PAM sequence: TTC
cacttaattttttgcttgcc

SEQ ID NO: 46675 - DNA, 20 bp, Artificial Sequence
  Description of Artificial Sequence: Synthetic oligonucleotide
  Target: SCNA; (-) strand; PAM type: YTN; PAM sequence: TTA
ttccacttaattttttgctt

SEQ ID NO: 46676 - DNA, 20 bp, Artificial Sequence
  Description of Artificial Sequence: Synthetic oligonucleotide
  Target: SCNA; (-) strand; PAM type: YTN; PAM sequence: CTG
tccaattattccacttaatt

SEQ ID NO: 46677 - DNA, 20 bp, Artificial Sequence
  Description of Artificial Sequence: Synthetic oligonucleotide
  Target: SCNA; (-) strand; PAM type: YTN; PAM sequence: TTC
tgtccaattattccacttaa

SEQ ID NO: 46678 - DNA, 20 bp, Artificial Sequence
  Description of Artificial Sequence: Synthetic oligonucleotide
  Target: SCNA; (-) strand; PAM type: YTN; PAM sequence: TTG
ttctgtccaattattccact

SEQ ID NO: 46679 - DNA, 20 bp, Artificial Sequence
  Description of Artificial Sequence: Synthetic oligonucleotide
  Target: SCNA; (-) strand; PAM type: YTN; PAM sequence: TTA
ccagataattgttctgtcca

SEQ ID NO: 46680 - DNA, 20 bp, Artificial Sequence
  Description of Artificial Sequence: Synthetic oligonucleotide
  Target: SCNA; (-) strand; PAM type: YTN; PAM sequence: TTA
ggttaccagataattgttct

SEQ ID NO: 46681 - DNA, 20 bp, Artificial Sequence
  Description of Artificial Sequence: Synthetic oligonucleotide
  Target: SCNA; (-) strand; PAM type: YTN; PAM sequence: TTT
aggttaccagataattgttc

SEQ ID NO: 46682 - DNA, 20 bp, Artificial Sequence
  Description of Artificial Sequence: Synthetic oligonucleotide
  Target: SCNA; (-) strand; PAM type: YTN; PAM sequence: TTG
tttaggttaccagataattg

SEQ ID NO: 46683 - DNA, 20 bp, Artificial Sequence
  Description of Artificial Sequence: Synthetic oligonucleotide
  Target: SCNA; (-) strand; PAM type: YTN; PAM sequence: TTA
ccattgtttaggttaccaga

SEQ ID NO: 46684 - DNA, 20 bp, Artificial Sequence
  Description of Artificial Sequence: Synthetic oligonucleotide
  Target: SCNA; (-) strand; PAM type: YTN; PAM sequence: CTC
atgttaccattgtttaggtt

SEQ ID NO: 46685 - DNA, 20 bp, Artificial Sequence
  Description of Artificial Sequence: Synthetic oligonucleotide
  Target: SCNA; (-) strand; PAM type: YTN; PAM sequence: CTA
tctcatgttaccattgttta

SEQ ID NO: 46686 - DNA, 20 bp, Artificial Sequence
  Description of Artificial Sequence: Synthetic oligonucleotide
  Target: SCNA; (-) strand; PAM type: YTN; PAM sequence: TTA
taagtccaaacaatgcataa

SEQ ID NO: 46687 - DNA, 20 bp, Artificial Sequence
  Description of Artificial Sequence: Synthetic oligonucleotide
  Target: SCNA; (-) strand; PAM type: YTN; PAM sequence: TTT
ataagtccaaacaatgcata

SEQ ID NO: 46688 - DNA, 20 bp, Artificial Sequence
  Description of Artificial Sequence: Synthetic oligonucleotide
  Target: SCNA; (-) strand; PAM type: YTN; PAM sequence: CTA
gatagtttataagtccaaac

SEQ ID NO: 46689 - DNA, 20 bp, Artificial Sequence
  Description of Artificial Sequence: Synthetic oligonucleotide
  Target: SCNA; (-) strand; PAM type: YTN; PAM sequence: TTA
gaacactagatagtttataa

SEQ ID NO: 46690 - DNA, 20 bp, Artificial Sequence
  Description of Artificial Sequence: Synthetic oligonucleotide
  Target: SCNA; (-) strand; PAM type: YTN; PAM sequence: TTA
ttagaacactagatagttta

SEQ ID NO: 46691 - DNA, 20 bp, Artificial Sequence
  Description of Artificial Sequence: Synthetic oligonucleotide
  Target: SCNA; (-) strand; PAM type: YTN; PAM sequence: CTA
ttattagaacactagatagt

SEQ ID NO: 46692 - DNA, 20 bp, Artificial Sequence
  Description of Artificial Sequence: Synthetic oligonucleotide
  Target: SCNA; (-) strand; PAM type: YTN; PAM sequence: TTA
tgtctattattagaacacta

SEQ ID NO: 46693 - DNA, 20 bp, Artificial Sequence
  Description of Artificial Sequence: Synthetic oligonucleotide
  Target: SCNA; (-) strand; PAM type: YTN; PAM sequence: TTG
aataaaccattatgtctatt

SEQ ID NO: 46694 - DNA, 20 bp, Artificial Sequence
  Description of Artificial Sequence: Synthetic oligonucleotide
  Target: SCNA; (-) strand; PAM type: YTN; PAM sequence: TTA
gttgaataaaccattatgtc

SEQ ID NO: 46695 - DNA, 20 bp, Artificial Sequence
  Description of Artificial Sequence: Synthetic oligonucleotide
  Target: SCNA; (-) strand; PAM type: YTN; PAM sequence: CTA
ttagttgaataaaccattat

SEQ ID NO: 46696 - DNA, 20 bp, Artificial Sequence
  Description of Artificial Sequence: Synthetic oligonucleotide
  Target: SCNA; (-) strand; PAM type: YTN; PAM sequence: CTA
aggatgacagtagctattag

SEQ ID NO: 46697 - DNA, 20 bp, Artificial Sequence
  Description of Artificial Sequence: Synthetic oligonucleotide
  Target: SCNA; (-) strand; PAM type: YTN; PAM sequence: CTC
taaggatgacagtagctatt

SEQ ID NO: 46698 - DNA, 20 bp, Artificial Sequence
  Description of Artificial Sequence: Synthetic oligonucleotide
  Target: SCNA; (-) strand; PAM type: YTN; PAM sequence: TTA
ataacctctaaggatgacag

SEQ ID NO: 46699 - DNA, 20 bp, Artificial Sequence
  Description of Artificial Sequence: Synthetic oligonucleotide
  Target: SCNA; (-) strand; PAM type: YTN; PAM sequence: TTG
ttaataacctctaaggatga

SEQ ID NO: 46700 - DNA, 20 bp, Artificial Sequence
  Description of Artificial Sequence: Synthetic oligonucleotide
  Target: SCNA; (-) strand; PAM type: YTN; PAM sequence: TTG
agttgttaataacctctaag

SEQ ID NO: 46701 - DNA, 20 bp, Artificial Sequence
  Description of Artificial Sequence: Synthetic oligonucleotide
  Target: SCNA; (-) strand; PAM type: YTN; PAM sequence: TTT
gagttgttaataacctctaa

SEQ ID NO: 46702 - DNA, 20 bp, Artificial Sequence
  Description of Artificial Sequence: Synthetic oligonucleotide
  Target: SCNA; (-) strand; PAM type: YTN; PAM sequence: CTT
tgagttgttaataacctcta

SEQ ID NO: 46703 - DNA, 20 bp, Artificial Sequence
  Description of Artificial Sequence: Synthetic oligonucleotide
  Target: SCNA; (-) strand; PAM type: YTN; PAM sequence: CTA
ctttgagttgttaataacct

SEQ ID NO: 46704 - DNA, 20 bp, Artificial Sequence
  Description of Artificial Sequence: Synthetic oligonucleotide
  Target: SCNA; (-) strand; PAM type: YTN; PAM sequence: TTC
actactttgagttgttaata

SEQ ID NO: 46705 - DNA, 20 bp, Artificial Sequence
  Description of Artificial Sequence: Synthetic oligonucleotide
  Target: SCNA; (-) strand; PAM type: YTN; PAM sequence: TTG
gatgtaattcactactttga

SEQ ID NO: 46706 - DNA, 20 bp, Artificial Sequence
  Description of Artificial Sequence: Synthetic oligonucleotide
  Target: SCNA; (-) strand; PAM type: YTN; PAM sequence: TTA
gttggatgtaattcactact

SEQ ID NO: 46707 - DNA, 20 bp, Artificial Sequence
  Description of Artificial Sequence: Synthetic oligonucleotide
  Target: SCNA; (-) strand; PAM type: YTN; PAM sequence: TTT
agttggatgtaattcactac

SEQ ID NO: 46708 - DNA, 20 bp, Artificial Sequence
  Description of Artificial Sequence: Synthetic oligonucleotide
  Target: SCNA; (-) strand; PAM type: YTN; PAM sequence: CTT
tagttggatgtaattcacta

SEQ ID NO: 46709 - DNA, 20 bp, Artificial Sequence
  Description of Artificial Sequence: Synthetic oligonucleotide
  Target: SCNA; (-) strand; PAM type: YTN; PAM sequence: CTA
tacaaaagcaccctttagtt

SEQ ID NO: 46710 - DNA, 20 bp, Artificial Sequence
  Description of Artificial Sequence: Synthetic oligonucleotide
  Target: SCNA; (-) strand; PAM type: YTN; PAM sequence: TTG
aagaataagtgaccagcaat

SEQ ID NO: 46711 - DNA, 20 bp, Artificial Sequence
  Description of Artificial Sequence: Synthetic oligonucleotide
  Target: SCNA; (-) strand; PAM type: YTN; PAM sequence: TTT
gaagaataagtgaccagcaa

SEQ ID NO: 46712 - DNA, 20 bp, Artificial Sequence
  Description of Artificial Sequence: Synthetic oligonucleotide
  Target: SCNA; (-) strand; PAM type: YTN; PAM sequence: CTA
aaagatatttgaagaataag

SEQ ID NO: 46713 - DNA, 20 bp, Artificial Sequence
  Description of Artificial Sequence: Synthetic oligonucleotide
  Target: SCNA; (-) strand; PAM type: YTN; PAM sequence: TTG
taaatggtgcctaaaagata

SEQ ID NO: 46714 - DNA, 20 bp, Artificial Sequence
  Description of Artificial Sequence: Synthetic oligonucleotide
  Target: SCNA; (-) strand; PAM type: YTN; PAM sequence: TTT
gtaaatggtgcctaaaagat

SEQ ID NO: 46715 - DNA, 20 bp, Artificial Sequence
  Description of Artificial Sequence: Synthetic oligonucleotide
  Target: SCNA; (-) strand; PAM type: YTN; PAM sequence: CTT
tgtaaatggtgcctaaaaga

SEQ ID NO: 46716 - DNA, 20 bp, Artificial Sequence
  Description of Artificial Sequence: Synthetic oligonucleotide
  Target: SCNA; (-) strand; PAM type: YTN; PAM sequence: CTG
gtcatctttgtaaatggtgc

SEQ ID NO: 46717 - DNA, 20 bp, Artificial Sequence
  Description of Artificial Sequence: Synthetic oligonucleotide
  Target: SCNA; (-) strand; PAM type: YTN; PAM sequence: CTC
tggtcatctttgtaaatggt

SEQ ID NO: 46718 - DNA, 20 bp, Artificial Sequence
  Description of Artificial Sequence: Synthetic oligonucleotide
  Target: SCNA; (-) strand; PAM type: YTN; PAM sequence: TTG
tacctctggtcatctttgta

SEQ ID NO: 46719 - DNA, 20 bp, Artificial Sequence
  Description of Artificial Sequence: Synthetic oligonucleotide
  Target: SCNA; (-) strand; PAM type: YTN; PAM sequence: TTT
gtacctctggtcatctttgt

SEQ ID NO: 46720 - DNA, 20 bp, Artificial Sequence
  Description of Artificial Sequence: Synthetic oligonucleotide
  Target: SCNA; (-) strand; PAM type: YTN; PAM sequence: TTT
tgtacctctggtcatctttg

SEQ ID NO: 46721 - DNA, 20 bp, Artificial Sequence
  Description of Artificial Sequence: Synthetic oligonucleotide
  Target: SCNA; (-) strand; PAM type: YTN; PAM sequence: TTA
tatatgcagattttgtacct

SEQ ID NO: 46722 - DNA, 20 bp, Artificial Sequence
  Description of Artificial Sequence: Synthetic oligonucleotide
  Target: SCNA; (-) strand; PAM type: YTN; PAM sequence: CTA
ttatatatgcagattttgta

SEQ ID NO: 46723 - DNA, 20 bp, Artificial Sequence
  Description of Artificial Sequence: Synthetic oligonucleotide
  Target: SCNA; (-) strand; PAM type: YTN; PAM sequence: TTC
tattatatatgcagattttg

SEQ ID NO: 46724 - DNA, 20 bp, Artificial Sequence
  Description of Artificial Sequence: Synthetic oligonucleotide
  Target: SCNA; (-) strand; PAM type: YTN; PAM sequence: TTT
ctattatatatgcagatttt

SEQ ID NO: 46725 - DNA, 20 bp, Artificial Sequence
  Description of Artificial Sequence: Synthetic oligonucleotide
  Target: SCNA; (-) strand; PAM type: YTN; PAM sequence: CTT
tctattatatatgcagattt

SEQ ID NO: 46726 - DNA, 20 bp, Artificial Sequence
  Description of Artificial Sequence: Synthetic oligonucleotide
  Target: SCNA; (-) strand; PAM type: YTN; PAM sequence: CTC
tttctattatatatgcagat

SEQ ID NO: 46727 - DNA, 20 bp, Artificial Sequence
  Description of Artificial Sequence: Synthetic oligonucleotide
  Target: SCNA; (-) strand; PAM type: YTN; PAM sequence: CTG
gctctttctattatatatgc

SEQ ID NO: 46728 - DNA, 20 bp, Artificial Sequence
  Description of Artificial Sequence: Synthetic oligonucleotide
  Target: SCNA; (-) strand; PAM type: YTN; PAM sequence: CTA
cctggctctttctattatat

SEQ ID NO: 46729 - DNA, 20 bp, Artificial Sequence
  Description of Artificial Sequence: Synthetic oligonucleotide
  Target: SCNA; (-) strand; PAM type: YTN; PAM sequence: TTG
aatgactacctggctctttc

SEQ ID NO: 46730 - DNA, 20 bp, Artificial Sequence
  Description of Artificial Sequence: Synthetic oligonucleotide
  Target: SCNA; (-) strand; PAM type: YTN; PAM sequence: TTA
ttgaatgactacctggctct

SEQ ID NO: 46731 - DNA, 20 bp, Artificial Sequence
  Description of Artificial Sequence: Synthetic oligonucleotide
  Target: SCNA; (-) strand; PAM type: YTN; PAM sequence: TTT
attgaatgactacctggctc

SEQ ID NO: 46732 - DNA, 20 bp, Artificial Sequence
  Description of Artificial Sequence: Synthetic oligonucleotide
  Target: SCNA; (-) strand; PAM type: YTN; PAM sequence: TTT
tattgaatgactacctggct

SEQ ID NO: 46733 - DNA, 20 bp, Artificial Sequence
  Description of Artificial Sequence: Synthetic oligonucleotide
  Target: SCNA; (-) strand; PAM type: YTN; PAM sequence: CTT
ttattgaatgactacctggc

SEQ ID NO: 46734 - DNA, 20 bp, Artificial Sequence
  Description of Artificial Sequence: Synthetic oligonucleotide
  Target: SCNA; (-) strand; PAM type: YTN; PAM sequence: TTC
ttttattgaatgactacctg

SEQ ID NO: 46735 - DNA, 20 bp, Artificial Sequence
  Description of Artificial Sequence: Synthetic oligonucleotide
  Target: SCNA; (-) strand; PAM type: YTN; PAM sequence: CTT
cttttattgaatgactacct

SEQ ID NO: 46736 - DNA, 20 bp, Artificial Sequence
  Description of Artificial Sequence: Synthetic oligonucleotide
  Target: SCNA; (-) strand; PAM type: YTN; PAM sequence: CTA
tataccttcttttattgaat

SEQ ID NO: 46737 - DNA, 20 bp, Artificial Sequence
  Description of Artificial Sequence: Synthetic oligonucleotide
  Target: SCNA; (-) strand; PAM type: YTN; PAM sequence: CTG
gtactatataccttctttta

SEQ ID NO: 46738 - DNA, 20 bp, Artificial Sequence
  Description of Artificial Sequence: Synthetic oligonucleotide
  Target: SCNA; (-) strand; PAM type: YTN; PAM sequence: TTC
ctggtactatataccttctt

SEQ ID NO: 46739 - DNA, 20 bp, Artificial Sequence
  Description of Artificial Sequence: Synthetic oligonucleotide
  Target: SCNA; (-) strand; PAM type: YTN; PAM sequence: TTT
cctggtactatataccttct

SEQ ID NO: 46740 - DNA, 20 bp, Artificial Sequence
  Description of Artificial Sequence: Synthetic oligonucleotide
  Target: SCNA; (-) strand; PAM type: YTN; PAM sequence: TTT
tcctggtactatataccttc

SEQ ID NO: 46741 - DNA, 20 bp, Artificial Sequence
  Description of Artificial Sequence: Synthetic oligonucleotide
  Target: SCNA; (-) strand; PAM type: YTN; PAM sequence: CTT
ttcctggtactatatacctt

SEQ ID NO: 46742 - DNA, 20 bp, Artificial Sequence
  Description of Artificial Sequence: Synthetic oligonucleotide
  Target: SCNA; (-) strand; PAM type: YTN; PAM sequence: CTA
agataaaaatcttttcctgg

SEQ ID NO: 46743 - DNA, 20 bp, Artificial Sequence
  Description of Artificial Sequence: Synthetic oligonucleotide
  Target: SCNA; (-) strand; PAM type: YTN; PAM sequence: TTA
ggctaagataaaaatctttt

SEQ ID NO: 46744 - DNA, 20 bp, Artificial Sequence
  Description of Artificial Sequence: Synthetic oligonucleotide
  Target: SCNA; (-) strand; PAM type: YTN; PAM sequence: CTT
aggctaagataaaaatcttt

SEQ ID NO: 46745 - DNA, 20 bp, Artificial Sequence
  Description of Artificial Sequence: Synthetic oligonucleotide
  Target: SCNA; (-) strand; PAM type: YTN; PAM sequence: CTG
ccttaggctaagataaaaat

SEQ ID NO: 46746 - DNA, 20 bp, Artificial Sequence
  Description of Artificial Sequence: Synthetic oligonucleotide
  Target: SCNA; (-) strand; PAM type: YTN; PAM sequence: TTC
agactgccttaggctaagat

SEQ ID NO: 46747 - DNA, 20 bp, Artificial Sequence
  Description of Artificial Sequence: Synthetic oligonucleotide
  Target: SCNA; (-) strand; PAM type: YTN; PAM sequence: TTG
agaattcagactgccttagg

SEQ ID NO: 46748 - DNA, 20 bp, Artificial Sequence
  Description of Artificial Sequence: Synthetic oligonucleotide
  Target: SCNA; (-) strand; PAM type: YTN; PAM sequence: CTT
gagaattcagactgccttag

SEQ ID NO: 46749 - DNA, 20 bp, Artificial Sequence
  Description of Artificial Sequence: Synthetic oligonucleotide
  Target: SCNA; (-) strand; PAM type: YTN; PAM sequence: TTG
ggcttgagaattcagactgc

SEQ ID NO: 46750 - DNA, 20 bp, Artificial Sequence
  Description of Artificial Sequence: Synthetic oligonucleotide
  Target: SCNA; (-) strand; PAM type: YTN; PAM sequence: TTT
gggcttgagaattcagactg

SEQ ID NO: 46751 - DNA, 20 bp, Artificial Sequence
  Description of Artificial Sequence: Synthetic oligonucleotide
  Target: SCNA; (-) strand; PAM type: YTN; PAM sequence: CTT
tgggcttgagaattcagact

SEQ ID NO: 46752 - DNA, 20 bp, Artificial Sequence
  Description of Artificial Sequence: Synthetic oligonucleotide
  Target: SCNA; (-) strand; PAM type: YTN; PAM sequence: TTA
tgtgctttgggcttgagaat

SEQ ID NO: 46753 - DNA, 20 bp, Artificial Sequence
  Description of Artificial Sequence: Synthetic oligonucleotide
  Target: SCNA; (-) strand; PAM type: YTN; PAM sequence: TTT
atgtgctttgggcttgagaa

SEQ ID NO: 46754 - DNA, 20 bp, Artificial Sequence
  Description of Artificial Sequence: Synthetic oligonucleotide
  Target: SCNA; (-) strand; PAM type: YTN; PAM sequence: TTC
caacaaatttatgtgctttg

SEQ ID NO: 46755 - DNA, 20 bp, Artificial Sequence
  Description of Artificial Sequence: Synthetic oligonucleotide
  Target: SCNA; (-) strand; PAM type: YTN; PAM sequence: TTG
aaataattccaacaaattta

SEQ ID NO: 46756 - DNA, 20 bp, Artificial Sequence
  Description of Artificial Sequence: Synthetic oligonucleotide
  Target: SCNA; (-) strand; PAM type: YTN; PAM sequence: CTA
gaaattgaaataattccaac

SEQ ID NO: 46757 - DNA, 20 bp, Artificial Sequence
  Description of Artificial Sequence: Synthetic oligonucleotide
  Target: SCNA; (-) strand; PAM type: YTN; PAM sequence: TTA
gtgactagaaattgaaataa

SEQ ID NO: 46758 - DNA, 20 bp, Artificial Sequence
  Description of Artificial Sequence: Synthetic oligonucleotide
  Target: SCNA; (-) strand; PAM type: YTN; PAM sequence: TTT
agtgactagaaattgaaata

SEQ ID NO: 46759 - DNA, 20 bp, Artificial Sequence
  Description of Artificial Sequence: Synthetic oligonucleotide
  Target: SCNA; (-) strand; PAM type: YTN; PAM sequence: TTT
tagtgactagaaattgaaat

SEQ ID NO: 46760 - DNA, 20 bp, Artificial Sequence
  Description of Artificial Sequence: Synthetic oligonucleotide
  Target: SCNA; (-) strand; PAM type: YTN; PAM sequence: TTT
ttagtgactagaaattgaaa

SEQ ID NO: 46761 - DNA, 20 bp, Artificial Sequence
  Description of Artificial Sequence: Synthetic oligonucleotide
  Target: SCNA; (-) strand; PAM type: YTN; PAM sequence: CTG
gtgtaaatgtgcgtcacatt

SEQ ID NO: 46762 - DNA, 20 bp, Artificial Sequence
  Description of Artificial Sequence: Synthetic oligonucleotide
  Target: SCNA; (-) strand; PAM type: YTN; PAM sequence: CTG
aagagaagtaatcaaccgaa

SEQ ID NO: 46763 - DNA, 20 bp, Artificial Sequence
  Description of Artificial Sequence: Synthetic oligonucleotide
  Target: SCNA; (-) strand; PAM type: YTN; PAM sequence: CTA
gggctgaagagaagtaatca

SEQ ID NO: 46764 - DNA, 20 bp, Artificial Sequence
  Description of Artificial Sequence: Synthetic oligonucleotide
  Target: SCNA; (-) strand; PAM type: YTN; PAM sequence: TTA
agagactagggctgaagaga

SEQ ID NO: 46765 - DNA, 20 bp, Artificial Sequence
  Description of Artificial Sequence: Synthetic oligonucleotide
  Target: SCNA; (-) strand; PAM type: YTN; PAM sequence: CTT
aagagactagggctgaagag

SEQ ID NO: 46766 - DNA, 20 bp, Artificial Sequence
  Description of Artificial Sequence: Synthetic oligonucleotide
  Target: SCNA; (-) strand; PAM type: YTN; PAM sequence: CTG
tgcttaagagactagggctg

SEQ ID NO: 46767 - DNA, 20 bp, Artificial Sequence
  Description of Artificial Sequence: Synthetic oligonucleotide
  Target: SCNA; (-) strand; PAM type: YTN; PAM sequence: CTG
taagtgtgtatacctgtgct

SEQ ID NO: 46768 - DNA, 20 bp, Artificial Sequence
  Description of Artificial Sequence: Synthetic oligonucleotide
  Target: SCNA; (-) strand; PAM type: YTN; PAM sequence: TTG
ctgtaagtgtgtatacctgt

SEQ ID NO: 46769 - DNA, 20 bp, Artificial Sequence
  Description of Artificial Sequence: Synthetic oligonucleotide
  Target: SCNA; (-) strand; PAM type: YTN; PAM sequence: TTG
tatgcagagatattgctgta

SEQ ID NO: 46770 - DNA, 20 bp, Artificial Sequence
  Description of Artificial Sequence: Synthetic oligonucleotide
  Target: SCNA; (-) strand; PAM type: YTN; PAM sequence: CTG
tcaaaaatattgtatgcaga

SEQ ID NO: 46771 - DNA, 20 bp, Artificial Sequence
  Description of Artificial Sequence: Synthetic oligonucleotide
  Target: SCNA; (-) strand; PAM type: YTN; PAM sequence: TTC
tgtcaaaaatattgtatgca

SEQ ID NO: 46772 - DNA, 20 bp, Artificial Sequence
  Description of Artificial Sequence: Synthetic oligonucleotide
  Target: SCNA; (-) strand; PAM type: YTN; PAM sequence: TTC
attctgtcaaaaatattgta

SEQ ID NO: 46773 - DNA, 20 bp, Artificial Sequence
  Description of Artificial Sequence: Synthetic oligonucleotide
  Target: SCNA; (-) strand; PAM type: YTN; PAM sequence: TTT
cattctgtcaaaaatattgt

SEQ ID NO: 46774 - DNA, 20 bp, Artificial Sequence
  Description of Artificial Sequence: Synthetic oligonucleotide
  Target: SCNA; (-) strand; PAM type: YTN; PAM sequence: TTT
tcattctgtcaaaaatattg

SEQ ID NO: 46775 - DNA, 20 bp, Artificial Sequence
  Description of Artificial Sequence: Synthetic oligonucleotide
  Target: SCNA; (-) strand; PAM type: YTN; PAM sequence: TTT
ttcattctgtcaaaaatatt

SEQ ID NO: 46776 - DNA, 20 bp, Artificial Sequence
  Description of Artificial Sequence: Synthetic oligonucleotide
  Target: SCNA; (-) strand; PAM type: YTN; PAM sequence: CTT
tttcattctgtcaaaaatat

SEQ ID NO: 46777 - DNA, 20 bp, Artificial Sequence
  Description of Artificial Sequence: Synthetic oligonucleotide
  Target: SCNA; (-) strand; PAM type: YTN; PAM sequence: TTA
actttttcattctgtcaaaa

SEQ ID NO: 46778 - DNA, 20 bp, Artificial Sequence
  Description of Artificial Sequence: Synthetic oligonucleotide
  Target: SCNA; (-) strand; PAM type: YTN; PAM sequence: TTT
aactttttcattctgtcaaa

SEQ ID NO: 46779 - DNA, 20 bp, Artificial Sequence
  Description of Artificial Sequence: Synthetic oligonucleotide
  Target: SCNA; (-) strand; PAM type: YTN; PAM sequence: TTT
taactttttcattctgtcaa

SEQ ID NO: 46780 - DNA, 20 bp, Artificial Sequence
  Description of Artificial Sequence: Synthetic oligonucleotide
  Target: SCNA; (-) strand; PAM type: YTN; PAM sequence: TTT
ttaactttttcattctgtca

SEQ ID NO: 46781 - DNA, 20 bp, Artificial Sequence
  Description of Artificial Sequence: Synthetic oligonucleotide
  Target: SCNA; (-) strand; PAM type: YTN; PAM sequence: CTG
aaataaacatcaatattttt

SEQ ID NO: 46782 - DNA, 20 bp, Artificial Sequence
  Description of Artificial Sequence: Synthetic oligonucleotide
  Target: SCNA; (-) strand; PAM type: YTN; PAM sequence: TTC
agaatcgctgaaataaacat

SEQ ID NO: 46783 - DNA, 20 bp, Artificial Sequence
  Description of Artificial Sequence: Synthetic oligonucleotide
  Target: SCNA; (-) strand; PAM type: YTN; PAM sequence: TTT
cagaatcgctgaaataaaca

SEQ ID NO: 46784 - DNA, 20 bp, Artificial Sequence
  Description of Artificial Sequence: Synthetic oligonucleotide
  Target: SCNA; (-) strand; PAM type: YTN; PAM sequence: TTA
taaaccatttcagaatcgct

SEQ ID NO: 46785 - DNA, 20 bp, Artificial Sequence
  Description of Artificial Sequence: Synthetic oligonucleotide
  Target: SCNA; (-) strand; PAM type: YTN; PAM sequence: TTT
ataaaccatttcagaatcgc

SEQ ID NO: 46786 - DNA, 20 bp, Artificial Sequence
  Description of Artificial Sequence: Synthetic oligonucleotide
  Target: SCNA; (-) strand; PAM type: YTN; PAM sequence: TTT
tataaaccatttcagaatcg

SEQ ID NO: 46787 - DNA, 20 bp, Artificial Sequence
  Description of Artificial Sequence: Synthetic oligonucleotide
  Target: SCNA; (-) strand; PAM type: YTN; PAM sequence: TTT
ttataaaccatttcagaatc

SEQ ID NO: 46788 - DNA, 20 bp, Artificial Sequence
  Description of Artificial Sequence: Synthetic oligonucleotide
  Target: SCNA; (-) strand; PAM type: YTN; PAM sequence: TTA
tagtcatagaatttttataa

SEQ ID NO: 46789 - DNA, 20 bp, Artificial Sequence
  Description of Artificial Sequence: Synthetic oligonucleotide
  Target: SCNA; (-) strand; PAM type: YTN; PAM sequence: CTT
atagtcatagaatttttata

SEQ ID NO: 46790 - DNA, 20 bp, Artificial Sequence
  Description of Artificial Sequence: Synthetic oligonucleotide
  Target: SCNA; (-) strand; PAM type: YTN; PAM sequence: TTC
ttatagtcatagaattttta

SEQ ID NO: 46791 - DNA, 20 bp, Artificial Sequence
  Description of Artificial Sequence: Synthetic oligonucleotide
  Target: SCNA; (-) strand; PAM type: YTN; PAM sequence: TTT
cttatagtcatagaattttt

SEQ ID NO: 46792 - DNA, 20 bp, Artificial Sequence
  Description of Artificial Sequence: Synthetic oligonucleotide
  Target: SCNA; (-) strand; PAM type: YTN; PAM sequence: CTC
atgaatttcttatagtcata

SEQ ID NO: 46793 - DNA, 20 bp, Artificial Sequence
  Description of Artificial Sequence: Synthetic oligonucleotide
  Target: SCNA; (-) strand; PAM type: YTN; PAM sequence: TTC
ctcatgaatttcttatagtc

SEQ ID NO: 46794 - DNA, 20 bp, Artificial Sequence
  Description of Artificial Sequence: Synthetic oligonucleotide
  Target: SCNA; (-) strand; PAM type: YTN; PAM sequence: TTG
cattcctcatgaatttctta

SEQ ID NO: 46795 - DNA, 20 bp, Artificial Sequence
  Description of Artificial Sequence: Synthetic oligonucleotide
  Target: SCNA; (-) strand; PAM type: YTN; PAM sequence: CTG
atatattgcattcctcatga

SEQ ID NO: 46796 - DNA, 20 bp, Artificial Sequence
  Description of Artificial Sequence: Synthetic oligonucleotide
  Target: SCNA; (-) strand; PAM type: YTN; PAM sequence: TTC
ctgatatattgcattcctca

SEQ ID NO: 46797 - DNA, 20 bp, Artificial Sequence
  Description of Artificial Sequence: Synthetic oligonucleotide
  Target: SCNA; (-) strand; PAM type: YTN; PAM sequence: TTT
cctgatatattgcattcctc

SEQ ID NO: 46798 - DNA, 20 bp, Artificial Sequence
  Description of Artificial Sequence: Synthetic oligonucleotide
  Target: SCNA; (-) strand; PAM type: YTN; PAM sequence: CTT
tcctgatatattgcattcct

SEQ ID NO: 46799 - DNA, 20 bp, Artificial Sequence
  Description of Artificial Sequence: Synthetic oligonucleotide
  Target: SCNA; (-) strand; PAM type: YTN; PAM sequence: TTC
tttcctgatatattgcattc

SEQ ID NO: 46800 - DNA, 20 bp, Artificial Sequence
  Description of Artificial Sequence: Synthetic oligonucleotide
  Target: SCNA; (-) strand; PAM type: YTN; PAM sequence: TTG
ttctttcctgatatattgca

SEQ ID NO: 46801 - DNA, 20 bp, Artificial Sequence
  Description of Artificial Sequence: Synthetic oligonucleotide
  Target: SCNA; (-) strand; PAM type: YTN; PAM sequence: TTA
tgtaaagatgacattgttct

SEQ ID NO: 46802 - DNA, 20 bp, Artificial Sequence
  Description of Artificial Sequence: Synthetic oligonucleotide
  Target: SCNA; (-) strand; PAM type: YTN; PAM sequence: TTT
atgtaaagatgacattgttc

SEQ ID NO: 46803 - DNA, 20 bp, Artificial Sequence
  Description of Artificial Sequence: Synthetic oligonucleotide
  Target: SCNA; (-) strand; PAM type: YTN; PAM sequence: TTT
tatgtaaagatgacattgtt

SEQ ID NO: 46804 - DNA, 20 bp, Artificial Sequence
  Description of Artificial Sequence: Synthetic oligonucleotide
  Target: SCNA; (-) strand; PAM type: YTN; PAM sequence: TTT
ttatgtaaagatgacattgt

SEQ ID NO: 46805 - DNA, 20 bp, Artificial Sequence
  Description of Artificial Sequence: Synthetic oligonucleotide
  Target: SCNA; (-) strand; PAM type: YTN; PAM sequence: CTT
tttatgtaaagatgacattg

SEQ ID NO: 46806 - DNA, 20 bp, Artificial Sequence
  Description of Artificial Sequence: Synthetic oligonucleotide
  Target: SCNA; (-) strand; PAM type: YTN; PAM sequence: CTG
acacgcatcctttttatgta

SEQ ID NO: 46807 - DNA, 20 bp, Artificial Sequence
  Description of Artificial Sequence: Synthetic oligonucleotide
  Target: SCNA; (-) strand; PAM type: YTN; PAM sequence: TTA
ctgacacgcatcctttttat

SEQ ID NO: 46808 - DNA, 20 bp, Artificial Sequence
  Description of Artificial Sequence: Synthetic oligonucleotide
  Target: SCNA; (-) strand; PAM type: YTN; PAM sequence: CTC
aaattactgacacgcatcct

SEQ ID NO: 46809 - DNA, 20 bp, Artificial Sequence
  Description of Artificial Sequence: Synthetic oligonucleotide
  Target: SCNA; (-) strand; PAM type: YTN; PAM sequence: CTC
tcaaattactgacacgcatc

SEQ ID NO: 46810 - DNA, 20 bp, Artificial Sequence
  Description of Artificial Sequence: Synthetic oligonucleotide
  Target: SCNA; (-) strand; PAM type: YTN; PAM sequence: TTC
cagcctctcaaattactgac

SEQ ID NO: 46811 - DNA, 20 bp, Artificial Sequence
  Description of Artificial Sequence: Synthetic oligonucleotide
  Target: SCNA; (-) strand; PAM type: YTN; PAM sequence: CTA
gattccagcctctcaaatta

SEQ ID NO: 46812 - DNA, 20 bp, Artificial Sequence
  Description of Artificial Sequence: Synthetic oligonucleotide
  Target: SCNA; (-) strand; PAM type: YTN; PAM sequence: TTG
tcactagattccagcctctc

SEQ ID NO: 46813 - DNA, 20 bp, Artificial Sequence
  Description of Artificial Sequence: Synthetic oligonucleotide
  Target: SCNA; (-) strand; PAM type: YTN; PAM sequence: TTT
gtcactagattccagcctct

SEQ ID NO: 46814 - DNA, 20 bp, Artificial Sequence
  Description of Artificial Sequence: Synthetic oligonucleotide
  Target: SCNA; (-) strand; PAM type: YTN; PAM sequence: TTA
aaaagtgacacatttgtcac

SEQ ID NO: 46815 - DNA, 20 bp, Artificial Sequence
  Description of Artificial Sequence: Synthetic oligonucleotide
  Target: SCNA; (-) strand; PAM type: YTN; PAM sequence: CTT
aaaaagtgacacatttgtca

SEQ ID NO: 46816 - DNA, 20 bp, Artificial Sequence
  Description of Artificial Sequence: Synthetic oligonucleotide
  Target: SCNA; (-) strand; PAM type: YTN; PAM sequence: CTG
tgaatcaagcacaccttaaa

SEQ ID NO: 46817 - DNA, 20 bp, Artificial Sequence
  Description of Artificial Sequence: Synthetic oligonucleotide
  Target: SCNA; (-) strand; PAM type: YTN; PAM sequence: CTG
tcagctgtgaatcaagcaca

SEQ ID NO: 46818 - DNA, 20 bp, Artificial Sequence
  Description of Artificial Sequence: Synthetic oligonucleotide
  Target: SCNA; (-) strand; PAM type: YTN; PAM sequence: TTC
aaatcaaagctgtcagctgt

SEQ ID NO: 46819 - DNA, 20 bp, Artificial Sequence
  Description of Artificial Sequence: Synthetic oligonucleotide
  Target: SCNA; (-) strand; PAM type: YTN; PAM sequence: TTT
caaatcaaagctgtcagctg

SEQ ID NO: 46820 - DNA, 20 bp, Artificial Sequence
  Description of Artificial Sequence: Synthetic oligonucleotide
  Target: SCNA; (-) strand; PAM type: YTN; PAM sequence: TTA
aaggcaatttcaaatcaaag

SEQ ID NO: 46821 - DNA, 20 bp, Artificial Sequence
  Description of Artificial Sequence: Synthetic oligonucleotide
  Target: SCNA; (-) strand; PAM type: YTN; PAM sequence: TTT
aaaggcaatttcaaatcaaa

SEQ ID NO: 46822 - DNA, 20 bp, Artificial Sequence
  Description of Artificial Sequence: Synthetic oligonucleotide
  Target: SCNA; (-) strand; PAM type: YTN; PAM sequence: TTT
taaaggcaatttcaaatcaa

SEQ ID NO: 46823 - DNA, 20 bp, Artificial Sequence
  Description of Artificial Sequence: Synthetic oligonucleotide
  Target: SCNA; (-) strand; PAM type: YTN; PAM sequence: TTG
ttttaaaggcaatttcaaat

SEQ ID NO: 46824 - DNA, 20 bp, Artificial Sequence
  Description of Artificial Sequence: Synthetic oligonucleotide
  Target: SCNA; (-) strand; PAM type: YTN; PAM sequence: CTG
atacatagacattgttttaa

SEQ ID NO: 46825 - DNA, 20 bp, Artificial Sequence
  Description of Artificial Sequence: Synthetic oligonucleotide
  Target: SCNA; (-) strand; PAM type: YTN; PAM sequence: TTG
cactgatacatagacattgt

SEQ ID NO: 46826 - DNA, 20 bp, Artificial Sequence
  Description of Artificial Sequence: Synthetic oligonucleotide
  Target: SCNA; (-) strand; PAM type: YTN; PAM sequence: TTC
attgcactgatacatagaca

SEQ ID NO: 46827 - DNA, 20 bp, Artificial Sequence
  Description of Artificial Sequence: Synthetic oligonucleotide
  Target: SCNA; (-) strand; PAM type: YTN; PAM sequence: TTA
gaattcattgcactgataca

SEQ ID NO: 46828 - DNA, 20 bp, Artificial Sequence
  Description of Artificial Sequence: Synthetic oligonucleotide
  Target: SCNA; (-) strand; PAM type: YTN; PAM sequence: TTG
gttagaattcattgcactga

SEQ ID NO: 46829 - DNA, 20 bp, Artificial Sequence
  Description of Artificial Sequence: Synthetic oligonucleotide
  Target: SCNA; (-) strand; PAM type: YTN; PAM sequence: TTT
ggttagaattcattgcactg

SEQ ID NO: 46830 - DNA, 20 bp, Artificial Sequence
  Description of Artificial Sequence: Synthetic oligonucleotide
  Target: SCNA; (-) strand; PAM type: YTN; PAM sequence: TTT
tggttagaattcattgcact

SEQ ID NO: 46831 - DNA, 20 bp, Artificial Sequence
  Description of Artificial Sequence: Synthetic oligonucleotide
  Target: SCNA; (-) strand; PAM type: YTN; PAM sequence: CTT
ttggttagaattcattgcac

SEQ ID NO: 46832 - DNA, 20 bp, Artificial Sequence
  Description of Artificial Sequence: Synthetic oligonucleotide
  Target: SCNA; (-) strand; PAM type: YTN; PAM sequence: CTC
caacaagcttttggttagaa

SEQ ID NO: 46833 - DNA, 20 bp, Artificial Sequence
  Description of Artificial Sequence: Synthetic oligonucleotide
  Target: SCNA; (-) strand; PAM type: YTN; PAM sequence: TTA
gctccaacaagcttttggtt

SEQ ID NO: 46834 - DNA, 20 bp, Artificial Sequence
  Description of Artificial Sequence: Synthetic oligonucleotide
  Target: SCNA; (-) strand; PAM type: YTN; PAM sequence: CTG
tggttagctccaacaagctt

SEQ ID NO: 46835 - DNA, 20 bp, Artificial Sequence
  Description of Artificial Sequence: Synthetic oligonucleotide
  Target: SCNA; (-) strand; PAM type: YTN; PAM sequence: TTG
aatatataggtactgtggtt

SEQ ID NO: 46836 - DNA, 20 bp, Artificial Sequence
  Description of Artificial Sequence: Synthetic oligonucleotide
  Target: SCNA; (-) strand; PAM type: YTN; PAM sequence: CTT
gaatatataggtactgtggt

SEQ ID NO: 46837 - DNA, 20 bp, Artificial Sequence
  Description of Artificial Sequence: Synthetic oligonucleotide
  Target: SCNA; (-) strand; PAM type: YTN; PAM sequence: CTC
ccatgaacatcttgaatata

SEQ ID NO: 46838 - DNA, 20 bp, Artificial Sequence
  Description of Artificial Sequence: Synthetic oligonucleotide
  Target: SCNA; (-) strand; PAM type: YTN; PAM sequence: TTC
ctcccatgaacatcttgaat

SEQ ID NO: 46839 - DNA, 20 bp, Artificial Sequence
  Description of Artificial Sequence: Synthetic oligonucleotide
  Target: SCNA; (-) strand; PAM type: YTN; PAM sequence: TTC
cattcctcccatgaacatct

SEQ ID NO: 46840 - DNA, 20 bp, Artificial Sequence
  Description of Artificial Sequence: Synthetic oligonucleotide
  Target: SCNA; (-) strand; PAM type: YTN; PAM sequence: CTT
ccattcctcccatgaacatc

SEQ ID NO: 46841 - DNA, 20 bp, Artificial Sequence
  Description of Artificial Sequence: Synthetic oligonucleotide
  Target: SCNA; (-) strand; PAM type: YTN; PAM sequence: CTA
aatatcaaatcttccattcc

SEQ ID NO: 46842 - DNA, 20 bp, Artificial Sequence
  Description of Artificial Sequence: Synthetic oligonucleotide
  Target: SCNA; (-) strand; PAM type: YTN; PAM sequence: TTC
agtgcctaaatatcaaatct

SEQ ID NO: 46843 - DNA, 20 bp, Artificial Sequence
  Description of Artificial Sequence: Synthetic oligonucleotide
  Target: SCNA; (-) strand; PAM type: YTN; PAM sequence: CTT
cagtgcctaaatatcaaatc

SEQ ID NO: 46844 - DNA, 20 bp, Artificial Sequence
  Description of Artificial Sequence: Synthetic oligonucleotide
  Target: SCNA; (-) strand; PAM type: YTN; PAM sequence: CTA
tcatagcaacccttcagtgc

SEQ ID NO: 46845 - DNA, 20 bp, Artificial Sequence
  Description of Artificial Sequence: Synthetic oligonucleotide
  Target: SCNA; (-) strand; PAM type: YTN; PAM sequence: TTG
tgtataataactatcatagc

SEQ ID NO: 46846 - DNA, 20 bp, Artificial Sequence
  Description of Artificial Sequence: Synthetic oligonucleotide
  Target: SCNA; (-) strand; PAM type: YTN; PAM sequence: CTC
aattgtgtataataactatc

SEQ ID NO: 46847 - DNA, 20 bp, Artificial Sequence
  Description of Artificial Sequence: Synthetic oligonucleotide
  Target: SCNA; (-) strand; PAM type: YTN; PAM sequence: TTA
aactcaattgtgtataataa

SEQ ID NO: 46848 - DNA, 20 bp, Artificial Sequence
  Description of Artificial Sequence: Synthetic oligonucleotide
  Target: SCNA; (-) strand; PAM type: YTN; PAM sequence: TTT
aaactcaattgtgtataata

SEQ ID NO: 46849 - DNA, 20 bp, Artificial Sequence
  Description of Artificial Sequence: Synthetic oligonucleotide
  Target: SCNA; (-) strand; PAM type: YTN; PAM sequence: TTT
taaactcaattgtgtataat

SEQ ID NO: 46850 - DNA, 20 bp, Artificial Sequence
  Description of Artificial Sequence: Synthetic oligonucleotide
  Target: SCNA; (-) strand; PAM type: YTN; PAM sequence: TTC
attttaaactcaattgtgta

SEQ ID NO: 46851 - DNA, 20 bp, Artificial Sequence
  Description of Artificial Sequence: Synthetic oligonucleotide
  Target: SCNA; (-) strand; PAM type: YTN; PAM sequence: CTG
acacatatattcattttaaa

SEQ ID NO: 46852 - DNA, 20 bp, Artificial Sequence
  Description of Artificial Sequence: Synthetic oligonucleotide
  Target: SCNA; (-) strand; PAM type: YTN; PAM sequence: TTA
ataatagaactgacacatat

SEQ ID NO: 46853 - DNA, 20 bp, Artificial Sequence
  Description of Artificial Sequence: Synthetic oligonucleotide
  Target: SCNA; (-) strand; PAM type: YTN; PAM sequence: TTT
aataatagaactgacacata

SEQ ID NO: 46854 - DNA, 20 bp, Artificial Sequence
  Description of Artificial Sequence: Synthetic oligonucleotide
  Target: SCNA; (-) strand; PAM type: YTN; PAM sequence: TTA
taacatttaataatagaact

SEQ ID NO: 46855 - DNA, 20 bp, Artificial Sequence
  Description of Artificial Sequence: Synthetic oligonucleotide
  Target: SCNA; (-) strand; PAM type: YTN; PAM sequence: TTT
ataacatttaataatagaac

SEQ ID NO: 46856 - DNA, 20 bp, Artificial Sequence
  Description of Artificial Sequence: Synthetic oligonucleotide
  Target: SCNA; (-) strand; PAM type: YTN; PAM sequence: TTT
tataacatttaataatagaa

SEQ ID NO: 46857 - DNA, 20 bp, Artificial Sequence
  Description of Artificial Sequence: Synthetic oligonucleotide
  Target: SCNA; (-) strand; PAM type: YTN; PAM sequence: CTC
atattttataacatttaata

SEQ ID NO: 46858 - DNA, 20 bp, Artificial Sequence
  Description of Artificial Sequence: Synthetic oligonucleotide
  Target: SCNA; (-) strand; PAM type: YTN; PAM sequence: TTC
cctcatattttataacattt

SEQ ID NO: 46859 - DNA, 20 bp, Artificial Sequence
  Description of Artificial Sequence: Synthetic oligonucleotide
  Target: SCNA; (-) strand; PAM type: YTN; PAM sequence: TTA
ttccctcatattttataaca

SEQ ID NO: 46860 - DNA, 20 bp, Artificial Sequence
  Description of Artificial Sequence: Synthetic oligonucleotide
  Target: SCNA; (-) strand; PAM type: YTN; PAM sequence: TTA
ttattccctcatattttata

SEQ ID NO: 46861 - DNA, 20 bp, Artificial Sequence
  Description of Artificial Sequence: Synthetic oligonucleotide
  Target: SCNA; (-) strand; PAM type: YTN; PAM sequence: TTT
attattccctcatattttat

SEQ ID NO: 46862 - DNA, 20 bp, Artificial Sequence
  Description of Artificial Sequence: Synthetic oligonucleotide
  Target: SCNA; (-) strand; PAM type: YTN; PAM sequence: TTA
catagcatttattattccct

SEQ ID NO: 46863 - DNA, 20 bp, Artificial Sequence
  Description of Artificial Sequence: Synthetic oligonucleotide
  Target: SCNA; (-) strand; PAM type: YTN; PAM sequence: TTA
taaattacatagcatttatt

SEQ ID NO: 46864 - DNA, 20 bp, Artificial Sequence
  Description of Artificial Sequence: Synthetic oligonucleotide
  Target: SCNA; (-) strand; PAM type: YTN; PAM sequence: TTT
ataaattacatagcatttat

SEQ ID NO: 46865 - DNA, 20 bp, Artificial Sequence
  Description of Artificial Sequence: Synthetic oligonucleotide
  Target: SCNA; (-) strand; PAM type: YTN; PAM sequence: TTG
tagtttataaattacatagc

SEQ ID NO: 46866 - DNA, 20 bp, Artificial Sequence
  Description of Artificial Sequence: Synthetic oligonucleotide
  Target: SCNA; (-) strand; PAM type: YTN; PAM sequence: CTT
gtagtttataaattacatag

SEQ ID NO: 46867 - DNA, 20 bp, Artificial Sequence
  Description of Artificial Sequence: Synthetic oligonucleotide
  Target: SCNA; (-) strand; PAM type: YTN; PAM sequence: TTC
ttgtagtttataaattacat

SEQ ID NO: 46868 - DNA, 20 bp, Artificial Sequence
  Description of Artificial Sequence: Synthetic oligonucleotide
  Target: SCNA; (-) strand; PAM type: YTN; PAM sequence: TTT
cttgtagtttataaattaca

SEQ ID NO: 46869 - DNA, 20 bp, Artificial Sequence
  Description of Artificial Sequence: Synthetic oligonucleotide
  Target: SCNA; (-) strand; PAM type: YTN; PAM sequence: TTT
tcttgtagtttataaattac

SEQ ID NO: 46870 - DNA, 20 bp, Artificial Sequence
  Description of Artificial Sequence: Synthetic oligonucleotide
  Target: SCNA; (-) strand; PAM type: YTN; PAM sequence: CTG
atataaattttcttgtagtt

SEQ ID NO: 46871 - DNA, 20 bp, Artificial Sequence
  Description of Artificial Sequence: Synthetic oligonucleotide
  Target: SCNA; (-) strand; PAM type: YTN; PAM sequence: TTC
ctgatataaattttcttgta

SEQ ID NO: 46872 - DNA, 20 bp, Artificial Sequence
  Description of Artificial Sequence: Synthetic oligonucleotide
  Target: SCNA; (-) strand; PAM type: YTN; PAM sequence: TTT
cctgatataaattttcttgt

SEQ ID NO: 46873 - DNA, 20 bp, Artificial Sequence
  Description of Artificial Sequence: Synthetic oligonucleotide
  Target: SCNA; (-) strand; PAM type: YTN; PAM sequence: TTA
ggaaataagcagtttcctga

SEQ ID NO: 46874 - DNA, 20 bp, Artificial Sequence
  Description of Artificial Sequence: Synthetic oligonucleotide
  Target: SCNA; (-) strand; PAM type: YTN; PAM sequence: CTG
aagacagtgcatatattagg

SEQ ID NO: 46875 - DNA, 20 bp, Artificial Sequence
  Description of Artificial Sequence: Synthetic oligonucleotide
  Target: SCNA; (-) strand; PAM type: YTN; PAM sequence: TTG
gagacactgaagacagtgca

SEQ ID NO: 46876 - DNA, 20 bp, Artificial Sequence
  Description of Artificial Sequence: Synthetic oligonucleotide
  Target: SCNA; (-) strand; PAM type: YTN; PAM sequence: TTT
ggagacactgaagacagtgc

SEQ ID NO: 46877 - DNA, 20 bp, Artificial Sequence
  Description of Artificial Sequence: Synthetic oligonucleotide
  Target: SCNA; (-) strand; PAM type: YTN; PAM sequence: TTT
tggagacactgaagacagtg

SEQ ID NO: 46878 - DNA, 20 bp, Artificial Sequence
  Description of Artificial Sequence: Synthetic oligonucleotide
  Target: SCNA; (-) strand; PAM type: YTN; PAM sequence: TTG
acagttttggagacactgaa

SEQ ID NO: 46879 - DNA, 20 bp, Artificial Sequence
  Description of Artificial Sequence: Synthetic oligonucleotide
  Target: SCNA; (-) strand; PAM type: YTN; PAM sequence: TTG
gcagagttgacagttttgga

SEQ ID NO: 46880 - DNA, 20 bp, Artificial Sequence
  Description of Artificial Sequence: Synthetic oligonucleotide
  Target: SCNA; (-) strand; PAM type: YTN; PAM sequence: CTA
gtcacattggcagagttgac

SEQ ID NO: 46881 - DNA, 20 bp, Artificial Sequence
  Description of Artificial Sequence: Synthetic oligonucleotide
  Target: SCNA; (-) strand; PAM type: YTN; PAM sequence: CTG
ctagtcacattggcagagtt

SEQ ID NO: 46882 - DNA, 20 bp, Artificial Sequence
  Description of Artificial Sequence: Synthetic oligonucleotide
  Target: SCNA; (-) strand; PAM type: YTN; PAM sequence: CTC
atcatctgctagtcacattg

SEQ ID NO: 46883 - DNA, 20 bp, Artificial Sequence
  Description of Artificial Sequence: Synthetic oligonucleotide
  Target: SCNA; (-) strand; PAM type: YTN; PAM sequence: CTG
ctcatcatctgctagtcaca

SEQ ID NO: 46884 - DNA, 20 bp, Artificial Sequence
  Description of Artificial Sequence: Synthetic oligonucleotide
  Target: SCNA; (-) strand; PAM type: YTN; PAM sequence: CTG
cctgctcatcatctgctagt

SEQ ID NO: 46885 - DNA, 20 bp, Artificial Sequence
  Description of Artificial Sequence: Synthetic oligonucleotide
  Target: SCNA; (-) strand; PAM type: YTN; PAM sequence: TTG
ataatatcacacggactgcc

SEQ ID NO: 46886 - DNA, 20 bp, Artificial Sequence
  Description of Artificial Sequence: Synthetic oligonucleotide
  Target: SCNA; (-) strand; PAM type: YTN; PAM sequence: CTA
tgtaattgataatatcacac

SEQ ID NO: 46887 - DNA, 20 bp, Artificial Sequence
  Description of Artificial Sequence: Synthetic oligonucleotide
  Target: SCNA; (-) strand; PAM type: YTN; PAM sequence: CTG
actatgtaattgataatatc

SEQ ID NO: 46888 - DNA, 20 bp, Artificial Sequence
  Description of Artificial Sequence: Synthetic oligonucleotide
  Target: SCNA; (-) strand; PAM type: YTN; PAM sequence: TTC
tgactatgtaattgataata

SEQ ID NO: 46889 - DNA, 20 bp, Artificial Sequence
  Description of Artificial Sequence: Synthetic oligonucleotide
  Target: SCNA; (-) strand; PAM type: YTN; PAM sequence: TTT
ctgactatgtaattgataat

SEQ ID NO: 46890 - DNA, 20 bp, Artificial Sequence
  Description of Artificial Sequence: Synthetic oligonucleotide
  Target: SCNA; (-) strand; PAM type: YTN; PAM sequence: CTC
agatttctgactatgtaatt

SEQ ID NO: 46891 - DNA, 20 bp, Artificial Sequence
  Description of Artificial Sequence: Synthetic oligonucleotide
  Target: SCNA; (-) strand; PAM type: YTN; PAM sequence: CTC
ataaggtgaaagaaagactc

SEQ ID NO: 46892 - DNA, 20 bp, Artificial Sequence
  Description of Artificial Sequence: Synthetic oligonucleotide
  Target: SCNA; (-) strand; PAM type: YTN; PAM sequence: CTA
aacagctcataaggtgaaag

SEQ ID NO: 46893 - DNA, 20 bp, Artificial Sequence
  Description of Artificial Sequence: Synthetic oligonucleotide
  Target: SCNA; (-) strand; PAM type: YTN; PAM sequence: TTC
ctaaacagctcataaggtga

SEQ ID NO: 46894 - DNA, 20 bp, Artificial Sequence
  Description of Artificial Sequence: Synthetic oligonucleotide
  Target: SCNA; (-) strand; PAM type: YTN; PAM sequence: CTT
cctaaacagctcataaggtg

SEQ ID NO: 46895 - DNA, 20 bp, Artificial Sequence
  Description of Artificial Sequence: Synthetic oligonucleotide
  Target: SCNA; (-) strand; PAM type: YTN; PAM sequence: TTC
ttcctaaacagctcataagg

SEQ ID NO: 46896 - DNA, 20 bp, Artificial Sequence
  Description of Artificial Sequence: Synthetic oligonucleotide
  Target: SCNA; (-) strand; PAM type: YTN; PAM sequence: CTT
cttcctaaacagctcataag

SEQ ID NO: 46897 - DNA, 20 bp, Artificial Sequence
  Description of Artificial Sequence: Synthetic oligonucleotide
  Target: SCNA; (-) strand; PAM type: YTN; PAM sequence: TTA
cacacatatacaccttcttc

SEQ ID NO: 46898 - DNA, 20 bp, Artificial Sequence
  Description of Artificial Sequence: Synthetic oligonucleotide
  Target: SCNA; (-) strand; PAM type: YTN; PAM sequence: CTG
ttacacacatatacaccttc

SEQ ID NO: 46899 - DNA, 20 bp, Artificial Sequence
  Description of Artificial Sequence: Synthetic oligonucleotide
  Target: SCNA; (-) strand; PAM type: YTN; PAM sequence: CTC
cctgttacacacatatacac

SEQ ID NO: 46900 - DNA, 20 bp, Artificial Sequence
  Description of Artificial Sequence: Synthetic oligonucleotide
  Target: SCNA; (-) strand; PAM type: YTN; PAM sequence: TTG
ctccctgttacacacatata

SEQ ID NO: 46901 - DNA, 20 bp, Artificial Sequence
  Description of Artificial Sequence: Synthetic oligonucleotide
  Target: SCNA; (-) strand; PAM type: YTN; PAM sequence: CTT
gctccctgttacacacatat

SEQ ID NO: 46902 - DNA, 20 bp, Artificial Sequence
  Description of Artificial Sequence: Synthetic oligonucleotide
  Target: SCNA; (-) strand; PAM type: YTN; PAM sequence: CTC
ttgctccctgttacacacat

SEQ ID NO: 46903 - DNA, 20 bp, Artificial Sequence
  Description of Artificial Sequence: Synthetic oligonucleotide
  Target: SCNA; (-) strand; PAM type: YTN; PAM sequence: CTC
ctcttgctccctgttacaca

SEQ ID NO: 46904 - DNA, 20 bp, Artificial Sequence
  Description of Artificial Sequence: Synthetic oligonucleotide
  Target: SCNA; (-) strand; PAM type: YTN; PAM sequence: TTA
atctcctcttgctccctgtt

SEQ ID NO: 46905 - DNA, 20 bp, Artificial Sequence
  Description of Artificial Sequence: Synthetic oligonucleotide
  Target: SCNA; (-) strand; PAM type: YTN; PAM sequence: TTA
caagttaatctcctcttgct

SEQ ID NO: 46906 - DNA, 20 bp, Artificial Sequence
  Description of Artificial Sequence: Synthetic oligonucleotide
  Target: SCNA; (-) strand; PAM type: YTN; PAM sequence: CTT
acaagttaatctcctcttgc

SEQ ID NO: 46907 - DNA, 20 bp, Artificial Sequence
  Description of Artificial Sequence: Synthetic oligonucleotide
  Target: SCNA; (-) strand; PAM type: YTN; PAM sequence: TTG
catcagataatggcttacaa

SEQ ID NO: 46908 - DNA, 20 bp, Artificial Sequence
  Description of Artificial Sequence: Synthetic oligonucleotide
  Target: SCNA; (-) strand; PAM type: YTN; PAM sequence: TTT
gcatcagataatggcttaca

SEQ ID NO: 46909 - DNA, 20 bp, Artificial Sequence
  Description of Artificial Sequence: Synthetic oligonucleotide
  Target: SCNA; (-) strand; PAM type: YTN; PAM sequence: CTT
tgcatcagataatggcttac

SEQ ID NO: 46910 - DNA, 20 bp, Artificial Sequence
  Description of Artificial Sequence: Synthetic oligonucleotide
  Target: SCNA; (-) strand; PAM type: YTN; PAM sequence: CTG
cctttgcatcagataatggc

SEQ ID NO: 46911 - DNA, 20 bp, Artificial Sequence
  Description of Artificial Sequence: Synthetic oligonucleotide
  Target: SCNA; (-) strand; PAM type: YTN; PAM sequence: TTA
gtaaatgtctgcctttgcat

SEQ ID NO: 46912 - DNA, 20 bp, Artificial Sequence
  Description of Artificial Sequence: Synthetic oligonucleotide
  Target: SCNA; (-) strand; PAM type: YTN; PAM sequence: CTT
agtaaatgtctgcctttgca

SEQ ID NO: 46913 - DNA, 20 bp, Artificial Sequence
  Description of Artificial Sequence: Synthetic oligonucleotide
  Target: SCNA; (-) strand; PAM type: YTN; PAM sequence: TTC
acagatgacttagtaaatgt

SEQ ID NO: 46914 - DNA, 20 bp, Artificial Sequence
  Description of Artificial Sequence: Synthetic oligonucleotide
  Target: SCNA; (-) strand; PAM type: YTN; PAM sequence: CTT
cacagatgacttagtaaatg

SEQ ID NO: 46915 - DNA, 20 bp, Artificial Sequence
  Description of Artificial Sequence: Synthetic oligonucleotide
  Target: SCNA; (-) strand; PAM type: YTN; PAM sequence: CTC
ttcacagatgacttagtaaa

SEQ ID NO: 46916 - DNA, 20 bp, Artificial Sequence
  Description of Artificial Sequence: Synthetic oligonucleotide
  Target: SCNA; (-) strand; PAM type: YTN; PAM sequence: TTA
tcgaaccatctcttcacaga

SEQ ID NO: 46917 - DNA, 20 bp, Artificial Sequence
  Description of Artificial Sequence: Synthetic oligonucleotide
  Target: SCNA; (-) strand; PAM type: YTN; PAM sequence: CTA
ttatcgaaccatctcttcac

SEQ ID NO: 46918 - DNA, 20 bp, Artificial Sequence
  Description of Artificial Sequence: Synthetic oligonucleotide
  Target: SCNA; (-) strand; PAM type: YTN; PAM sequence: TTA
gctattatcgaaccatctct

SEQ ID NO: 46919 - DNA, 20 bp, Artificial Sequence
  Description of Artificial Sequence: Synthetic oligonucleotide
  Target: SCNA; (-) strand; PAM type: YTN; PAM sequence: CTT
agctattatcgaaccatctc

SEQ ID NO: 46920 - DNA, 20 bp, Artificial Sequence
  Description of Artificial Sequence: Synthetic oligonucleotide
  Target: SCNA; (-) strand; PAM type: YTN; PAM sequence: TTA
tatgaatgcttagctattat

SEQ ID NO: 46921 - DNA, 20 bp, Artificial Sequence
  Description of Artificial Sequence: Synthetic oligonucleotide
  Target: SCNA; (-) strand; PAM type: YTN; PAM sequence: TTT
atatgaatgcttagctatta

SEQ ID NO: 46922 - DNA, 20 bp, Artificial Sequence
  Description of Artificial Sequence: Synthetic oligonucleotide
  Target: SCNA; (-) strand; PAM type: YTN; PAM sequence: CTG
aagatttatatgaatgctta

SEQ ID NO: 46923 - DNA, 20 bp, Artificial Sequence
  Description of Artificial Sequence: Synthetic oligonucleotide
  Target: SCNA; (-) strand; PAM type: YTN; PAM sequence: TTC
gagtccctgaagatttatat

SEQ ID NO: 46924 - DNA, 20 bp, Artificial Sequence
  Description of Artificial Sequence: Synthetic oligonucleotide
  Target: SCNA; (-) strand; PAM type: YTN; PAM sequence: TTG
agagaattcgagtccctgaa

SEQ ID NO: 46925 - DNA, 20 bp, Artificial Sequence
  Description of Artificial Sequence: Synthetic oligonucleotide
  Target: SCNA; (-) strand; PAM type: YTN; PAM sequence: CTT
gagagaattcgagtccctga

SEQ ID NO: 46926 - DNA, 20 bp, Artificial Sequence
  Description of Artificial Sequence: Synthetic oligonucleotide
  Target: SCNA; (-) strand; PAM type: YTN; PAM sequence: CTG
tcacacttgagagaattcga

SEQ ID NO: 46927 - DNA, 20 bp, Artificial Sequence
  Description of Artificial Sequence: Synthetic oligonucleotide
  Target: SCNA; (-) strand; PAM type: YTN; PAM sequence: TTC
tgtcacacttgagagaattc

SEQ ID NO: 46928 - DNA, 20 bp, Artificial Sequence
  Description of Artificial Sequence: Synthetic oligonucleotide
  Target: SCNA; (-) strand; PAM type: YTN; PAM sequence: TTG
agaggagtattctgtcacac

SEQ ID NO: 46929 - DNA, 20 bp, Artificial Sequence
  Description of Artificial Sequence: Synthetic oligonucleotide
  Target: SCNA; (-) strand; PAM type: YTN; PAM sequence: CTG
gcagttgagaggagtattct

SEQ ID NO: 46930 - DNA, 20 bp, Artificial Sequence
  Description of Artificial Sequence: Synthetic oligonucleotide
  Target: SCNA; (-) strand; PAM type: YTN; PAM sequence: TTA
caacaggagcgctggcagtt

SEQ ID NO: 46931 - DNA, 20 bp, Artificial Sequence
  Description of Artificial Sequence: Synthetic oligonucleotide
  Target: SCNA; (-) strand; PAM type: YTN; PAM sequence: TTT
acaacaggagcgctggcagt

SEQ ID NO: 46932 - DNA, 20 bp, Artificial Sequence
  Description of Artificial Sequence: Synthetic oligonucleotide
  Target: SCNA; (-) strand; PAM type: YTN; PAM sequence: TTT
tacaacaggagcgctggcag

SEQ ID NO: 46933 - DNA, 20 bp, Artificial Sequence
  Description of Artificial Sequence: Synthetic oligonucleotide
  Target: SCNA; (-) strand; PAM type: YTN; PAM sequence: TTT
ttacaacaggagcgctggca

SEQ ID NO: 46934 - DNA, 20 bp, Artificial Sequence
  Description of Artificial Sequence: Synthetic oligonucleotide
  Target: SCNA; (-) strand; PAM type: YTN; PAM sequence: TTT
tttacaacaggagcgctggc

SEQ ID NO: 46935 - DNA, 20 bp, Artificial Sequence
  Description of Artificial Sequence: Synthetic oligonucleotide
  Target: SCNA; (-) strand; PAM type: YTN; PAM sequence: TTG
ccaaatgtgattttttacaa

SEQ ID NO: 46936 - DNA, 20 bp, Artificial Sequence
  Description of Artificial Sequence: Synthetic oligonucleotide
  Target: SCNA; (-) strand; PAM type: YTN; PAM sequence: TTT
gccaaatgtgattttttaca

SEQ ID NO: 46937 - DNA, 20 bp, Artificial Sequence
  Description of Artificial Sequence: Synthetic oligonucleotide
  Target: SCNA; (-) strand; PAM type: YTN; PAM sequence: CTT
tgccaaatgtgattttttac

SEQ ID NO: 46938 - DNA, 20 bp, Artificial Sequence
  Description of Artificial Sequence: Synthetic oligonucleotide
  Target: SCNA; (-) strand; PAM type: YTN; PAM sequence: CTC
aaaacaccagagccctttgc

SEQ ID NO: 46939 - DNA, 20 bp, Artificial Sequence
  Description of Artificial Sequence: Synthetic oligonucleotide
  Target: SCNA; (-) strand; PAM type: YTN; PAM sequence: CTG
agcagaactcaaaacaccag

SEQ ID NO: 46940 - DNA, 20 bp, Artificial Sequence
  Description of Artificial Sequence: Synthetic oligonucleotide
  Target: SCNA; (-) strand; PAM type: YTN; PAM sequence: CTG
tcactgagcagaactcaaaa

SEQ ID NO: 46941 - DNA, 20 bp, Artificial Sequence
  Description of Artificial Sequence: Synthetic oligonucleotide
  Target: SCNA; (-) strand; PAM type: YTN; PAM sequence: TTA
aaacaaacctgtcactgagc

SEQ ID NO: 46942 - DNA, 20 bp, Artificial Sequence
  Description of Artificial Sequence: Synthetic oligonucleotide
  Target: SCNA; (-) strand; PAM type: YTN; PAM sequence: CTT
aaaacaaacctgtcactgag

SEQ ID NO: 46943 - DNA, 20 bp, Artificial Sequence
  Description of Artificial Sequence: Synthetic oligonucleotide
  Target: SCNA; (-) strand; PAM type: YTN; PAM sequence: TTA
cttaaaacaaacctgtcact

SEQ ID NO: 46944 - DNA, 20 bp, Artificial Sequence
  Description of Artificial Sequence: Synthetic oligonucleotide
  Target: SCNA; (-) strand; PAM type: YTN; PAM sequence: CTT
acttaaaacaaacctgtcac

SEQ ID NO: 46945 - DNA, 20 bp, Artificial Sequence
  Description of Artificial Sequence: Synthetic oligonucleotide
  Target: SCNA; (-) strand; PAM type: YTN; PAM sequence: TTA
atcttacttaaaacaaacct

SEQ ID NO: 46946 - DNA, 20 bp, Artificial Sequence
  Description of Artificial Sequence: Synthetic oligonucleotide
  Target: SCNA; (-) strand; PAM type: YTN; PAM sequence: CTC
agtattaatcttacttaaaa

SEQ ID NO: 46947 - DNA, 20 bp, Artificial Sequence
  Description of Artificial Sequence: Synthetic oligonucleotide
  Target: SCNA; (-) strand; PAM type: YTN; PAM sequence: TTG
tcctcagtattaatcttact

SEQ ID NO: 46948 - DNA, 20 bp, Artificial Sequence
  Description of Artificial Sequence: Synthetic oligonucleotide
  Target: SCNA; (-) strand; PAM type: YTN; PAM sequence: TTA
ttgtcctcagtattaatctt

SEQ ID NO: 46949 - DNA, 20 bp, Artificial Sequence
  Description of Artificial Sequence: Synthetic oligonucleotide
  Target: SCNA; (-) strand; PAM type: YTN; PAM sequence: TTT
attgtcctcagtattaatct

SEQ ID NO: 46950 - DNA, 20 bp, Artificial Sequence
  Description of Artificial Sequence: Synthetic oligonucleotide
  Target: SCNA; (-) strand; PAM type: YTN; PAM sequence: TTT
tattgtcctcagtattaatc

SEQ ID NO: 46951 - DNA, 20 bp, Artificial Sequence
  Description of Artificial Sequence: Synthetic oligonucleotide
  Target: SCNA; (-) strand; PAM type: YTN; PAM sequence: TTG
aaggtcattttattgtcctc

SEQ ID NO: 46952 - DNA, 20 bp, Artificial Sequence
  Description of Artificial Sequence: Synthetic oligonucleotide
  Target: SCNA; (-) strand; PAM type: YTN; PAM sequence: TTA
attgaaggtcattttattgt

SEQ ID NO: 46953 - DNA, 20 bp, Artificial Sequence
  Description of Artificial Sequence: Synthetic oligonucleotide
  Target: SCNA; (-) strand; PAM type: YTN; PAM sequence: CTT
aattgaaggtcattttattg

SEQ ID NO: 46954 - DNA, 20 bp, Artificial Sequence
  Description of Artificial Sequence: Synthetic oligonucleotide
  Target: SCNA; (-) strand; PAM type: YTN; PAM sequence: TTA
aaaggagtcttaattgaagg

SEQ ID NO: 46955 - DNA, 20 bp, Artificial Sequence
  Description of Artificial Sequence: Synthetic oligonucleotide
  Target: SCNA; (-) strand; PAM type: YTN; PAM sequence: TTT
aaaaggagtcttaattgaag

SEQ ID NO: 46956 - DNA, 20 bp, Artificial Sequence
  Description of Artificial Sequence: Synthetic oligonucleotide
  Target: SCNA; (-) strand; PAM type: YTN; PAM sequence: CTA
gacacgaaccatagtggaaa

SEQ ID NO: 46957 - DNA, 20 bp, Artificial Sequence
  Description of Artificial Sequence: Synthetic oligonucleotide
  Target: SCNA; (-) strand; PAM type: YTN; PAM sequence: TTA
gatagagtacagctagacac

SEQ ID NO: 46958 - DNA, 20 bp, Artificial Sequence
  Description of Artificial Sequence: Synthetic oligonucleotide
  Target: SCNA; (-) strand; PAM type: YTN; PAM sequence: CTT
agatagagtacagctagaca

SEQ ID NO: 46959 - DNA, 20 bp, Artificial Sequence
  Description of Artificial Sequence: Synthetic oligonucleotide
  Target: SCNA; (-) strand; PAM type: YTN; PAM sequence: TTC
ttagatagagtacagctaga

SEQ ID NO: 46960 - DNA, 20 bp, Artificial Sequence
  Description of Artificial Sequence: Synthetic oligonucleotide
  Target: SCNA; (-) strand; PAM type: YTN; PAM sequence: TTA
aagatcattcttagatagag

SEQ ID NO: 46961 - DNA, 20 bp, Artificial Sequence
  Description of Artificial Sequence: Synthetic oligonucleotide
  Target: SCNA; (-) strand; PAM type: YTN; PAM sequence: TTT
aaagatcattcttagataga

SEQ ID NO: 46962 - DNA, 20 bp, Artificial Sequence
  Description of Artificial Sequence: Synthetic oligonucleotide
  Target: SCNA; (-) strand; PAM type: YTN; PAM sequence: TTT
taaagatcattcttagatag

SEQ ID NO: 46963 - DNA, 20 bp, Artificial Sequence
  Description of Artificial Sequence: Synthetic oligonucleotide
  Target: SCNA; (-) strand; PAM type: YTN; PAM sequence: CTG
aatgttttaaagatcattct

SEQ ID NO: 46964 - DNA, 20 bp, Artificial Sequence
  Description of Artificial Sequence: Synthetic oligonucleotide
  Target: SCNA; (-) strand; PAM type: YTN; PAM sequence: CTC
ataatcctgaatgttttaaa

SEQ ID NO: 46965 - DNA, 20 bp, Artificial Sequence
  Description of Artificial Sequence: Synthetic oligonucleotide
  Target: SCNA; (-) strand; PAM type: YTN; PAM sequence: CTC
tcataatcctgaatgtttta

SEQ ID NO: 46966 - DNA, 20 bp, Artificial Sequence
  Description of Artificial Sequence: Synthetic oligonucleotide
  Target: SCNA; (-) strand; PAM type: YTN; PAM sequence: CTC
tctcataatcctgaatgttt

SEQ ID NO: 46967 - DNA, 20 bp, Artificial Sequence
  Description of Artificial Sequence: Synthetic oligonucleotide
  Target: SCNA; (-) strand; PAM type: YTN; PAM sequence: CTA
gatatctctctcataatcct

SEQ ID NO: 46968 - DNA, 20 bp, Artificial Sequence
  Description of Artificial Sequence: Synthetic oligonucleotide
  Target: SCNA; (-) strand; PAM type: YTN; PAM sequence: TTC
ctagatatctctctcataat

SEQ ID NO: 46969 - DNA, 20 bp, Artificial Sequence
  Description of Artificial Sequence: Synthetic oligonucleotide
  Target: SCNA; (-) strand; PAM type: YTN; PAM sequence: CTT
cctagatatctctctcataa

SEQ ID NO: 46970 - DNA, 20 bp, Artificial Sequence
  Description of Artificial Sequence: Synthetic oligonucleotide
  Target: SCNA; (-) strand; PAM type: YTN; PAM sequence: CTA
tgacttcctagatatctctc

SEQ ID NO: 46971 - DNA, 20 bp, Artificial Sequence
  Description of Artificial Sequence: Synthetic oligonucleotide
  Target: SCNA; (-) strand; PAM type: YTN; PAM sequence: TTC
ctatgacttcctagatatct

SEQ ID NO: 46972 - DNA, 20 bp, Artificial Sequence
  Description of Artificial Sequence: Synthetic oligonucleotide
  Target: SCNA; (-) strand; PAM type: YTN; PAM sequence: TTT
cctatgacttcctagatatc

SEQ ID NO: 46973 - DNA, 20 bp, Artificial Sequence
  Description of Artificial Sequence: Synthetic oligonucleotide
  Target: SCNA; (-) strand; PAM type: YTN; PAM sequence: TTA
tttcctatgacttcctagat

SEQ ID NO: 46974 - DNA, 20 bp, Artificial Sequence
  Description of Artificial Sequence: Synthetic oligonucleotide
  Target: SCNA; (-) strand; PAM type: YTN; PAM sequence: TTG
aatagtggttatttcctatg

SEQ ID NO: 46975 - DNA, 20 bp, Artificial Sequence
  Description of Artificial Sequence: Synthetic oligonucleotide
  Target: SCNA; (-) strand; PAM type: YTN; PAM sequence: CTA
atggtgtacagaacagcatt

SEQ ID NO: 46976 - DNA, 20 bp, Artificial Sequence
  Description of Artificial Sequence: Synthetic oligonucleotide
  Target: SCNA; (-) strand; PAM type: YTN; PAM sequence: TTA
ctaatggtgtacagaacagc

SEQ ID NO: 46977 - DNA, 20 bp, Artificial Sequence
  Description of Artificial Sequence: Synthetic oligonucleotide
  Target: SCNA; (-) strand; PAM type: YTN; PAM sequence: TTT
actaatggtgtacagaacag

SEQ ID NO: 46978 - DNA, 20 bp, Artificial Sequence
  Description of Artificial Sequence: Synthetic oligonucleotide
  Target: SCNA; (-) strand; PAM type: YTN; PAM sequence: TTA
tggtttactaatggtgtaca

SEQ ID NO: 46979 - DNA, 20 bp, Artificial Sequence
  Description of Artificial Sequence: Synthetic oligonucleotide
  Target: SCNA; (-) strand; PAM type: YTN; PAM sequence: CTT
atggtttactaatggtgtac

SEQ ID NO: 46980 - DNA, 20 bp, Artificial Sequence
  Description of Artificial Sequence: Synthetic oligonucleotide
  Target: SCNA; (-) strand; PAM type: YTN; PAM sequence: CTC
ttatggtttactaatggtgt

SEQ ID NO: 46981 - DNA, 20 bp, Artificial Sequence
  Description of Artificial Sequence: Synthetic oligonucleotide
  Target: SCNA; (-) strand; PAM type: YTN; PAM sequence: CTC
tcttatggtttactaatggt

SEQ ID NO: 46982 - DNA, 20 bp, Artificial Sequence
  Description of Artificial Sequence: Synthetic oligonucleotide
  Target: SCNA; (-) strand; PAM type: YTN; PAM sequence: TTG
tcctctcttatggtttacta

SEQ ID NO: 46983 - DNA, 20 bp, Artificial Sequence
  Description of Artificial Sequence: Synthetic oligonucleotide
  Target: SCNA; (-) strand; PAM type: YTN; PAM sequence: TTT
gtcctctcttatggtttact

SEQ ID NO: 46984 - DNA, 20 bp, Artificial Sequence
  Description of Artificial Sequence: Synthetic oligonucleotide
  Target: SCNA; (-) strand; PAM type: YTN; PAM sequence: TTG
gataaatgtttgtcctctct

SEQ ID NO: 46985 - DNA, 20 bp, Artificial Sequence
  Description of Artificial Sequence: Synthetic oligonucleotide
  Target: SCNA; (-) strand; PAM type: YTN; PAM sequence: CTT
ggataaatgtttgtcctctc

SEQ ID NO: 46986 - DNA, 20 bp, Artificial Sequence
  Description of Artificial Sequence: Synthetic oligonucleotide
  Target: SCNA; (-) strand; PAM type: YTN; PAM sequence: TTC
ttggataaatgtttgtcctc

SEQ ID NO: 46987 - DNA, 20 bp, Artificial Sequence
  Description of Artificial Sequence: Synthetic oligonucleotide
  Target: SCNA; (-) strand; PAM type: YTN; PAM sequence: TTT
cttggataaatgtttgtcct

SEQ ID NO: 46988 - DNA, 20 bp, Artificial Sequence
  Description of Artificial Sequence: Synthetic oligonucleotide
  Target: SCNA; (-) strand; PAM type: YTN; PAM sequence: CTT
tcttggataaatgtttgtcc

SEQ ID NO: 46989 - DNA, 20 bp, Artificial Sequence
  Description of Artificial Sequence: Synthetic oligonucleotide
  Target: SCNA; (-) strand; PAM type: YTN; PAM sequence: CTC
tttcttggataaatgtttgt

SEQ ID NO: 46990 - DNA, 20 bp, Artificial Sequence
  Description of Artificial Sequence: Synthetic oligonucleotide
  Target: SCNA; (-) strand; PAM type: YTN; PAM sequence: CTA
tgtaatagtctctttcttgg

SEQ ID NO: 46991 - DNA, 20 bp, Artificial Sequence
  Description of Artificial Sequence: Synthetic oligonucleotide
  Target: SCNA; (-) strand; PAM type: YTN; PAM sequence: CTG
gtggctatgtaatagtctct

SEQ ID NO: 46992 - DNA, 20 bp, Artificial Sequence
  Description of Artificial Sequence: Synthetic oligonucleotide
  Target: SCNA; (-) strand; PAM type: YTN; PAM sequence: TTG
ggtcctggtggctatgtaat

SEQ ID NO: 46993 - DNA, 20 bp, Artificial Sequence
  Description of Artificial Sequence: Synthetic oligonucleotide
  Target: SCNA; (-) strand; PAM type: YTN; PAM sequence: CTG
aatccatattgggtcctggt

SEQ ID NO: 46994 - DNA, 20 bp, Artificial Sequence
  Description of Artificial Sequence: Synthetic oligonucleotide
  Target: SCNA; (-) strand; PAM type: YTN; PAM sequence: TTG
tgctgaatccatattgggtc

SEQ ID NO: 46995 - DNA, 20 bp, Artificial Sequence
  Description of Artificial Sequence: Synthetic oligonucleotide
  Target: SCNA; (-) strand; PAM type: YTN; PAM sequence: CTC
aattgtgctgaatccatatt

SEQ ID NO: 46996 - DNA, 20 bp, Artificial Sequence
  Description of Artificial Sequence: Synthetic oligonucleotide
  Target: SCNA; (-) strand; PAM type: YTN; PAM sequence: TTG
ctcaattgtgctgaatccat

SEQ ID NO: 46997 - DNA, 20 bp, Artificial Sequence
  Description of Artificial Sequence: Synthetic oligonucleotide
  Target: SCNA; (-) strand; PAM type: YTN; PAM sequence: TTA
catgtattgctcaattgtgc

SEQ ID NO: 46998 - DNA, 20 bp, Artificial Sequence
  Description of Artificial Sequence: Synthetic oligonucleotide
  Target: SCNA; (-) strand; PAM type: YTN; PAM sequence: CTG
ttacatgtattgctcaattg

SEQ ID NO: 46999 - DNA, 20 bp, Artificial Sequence
  Description of Artificial Sequence: Synthetic oligonucleotide
  Target: SCNA; (-) strand; PAM type: YTN; PAM sequence: TTC
accacaaatctgttacatgt

SEQ ID NO: 47000 - DNA, 20 bp, Artificial Sequence
  Description of Artificial Sequence: Synthetic oligonucleotide
  Target: SCNA; (-) strand; PAM type: YTN; PAM sequence: TTT
caccacaaatctgttacatg

SEQ ID NO: 47001 - DNA, 20 bp, Artificial Sequence
  Description of Artificial Sequence: Synthetic oligonucleotide
  Target: SCNA; (-) strand; PAM type: YTN; PAM sequence: TTT
tcaccacaaatctgttacat

SEQ ID NO: 47002 - DNA, 20 bp, Artificial Sequence
  Description of Artificial Sequence: Synthetic oligonucleotide
  Target: SCNA; (-) strand; PAM type: YTN; PAM sequence: TTT
ttcaccacaaatctgttaca

SEQ ID NO: 47003 - DNA, 20 bp, Artificial Sequence
  Description of Artificial Sequence: Synthetic oligonucleotide
  Target: SCNA; (-) strand; PAM type: YTN; PAM sequence: CTG
tttttcaccacaaatctgtt

SEQ ID NO: 47004 - DNA, 20 bp, Artificial Sequence
  Description of Artificial Sequence: Synthetic oligonucleotide
  Target: SCNA; (-) strand; PAM type: YTN; PAM sequence: TTG
agcagcacctgtttttcacc

SEQ ID NO: 47005 - DNA, 20 bp, Artificial Sequence
  Description of Artificial Sequence: Synthetic oligonucleotide
  Target: SCNA; (-) strand; PAM type: YTN; PAM sequence: CTA
agcaattgagcagcacctgt

SEQ ID NO: 47006 - DNA, 20 bp, Artificial Sequence
  Description of Artificial Sequence: Synthetic oligonucleotide
  Target: SCNA; (-) strand; PAM type: YTN; PAM sequence: TTA
gactaagcaattgagcagca

SEQ ID NO: 47007 - DNA, 20 bp, Artificial Sequence
  Description of Artificial Sequence: Synthetic oligonucleotide
  Target: SCNA; (-) strand; PAM type: YTN; PAM sequence: TTT
agactaagcaattgagcagc

SEQ ID NO: 47008 - DNA, 20 bp, Artificial Sequence
  Description of Artificial Sequence: Synthetic oligonucleotide
  Target: SCNA; (-) strand; PAM type: YTN; PAM sequence: TTT
tagactaagcaattgagcag

SEQ ID NO: 47009 - DNA, 20 bp, Artificial Sequence
  Description of Artificial Sequence: Synthetic oligonucleotide
  Target: SCNA; (-) strand; PAM type: YTN; PAM sequence: TTG
agggagaattttagactaag

SEQ ID NO: 47010 - DNA, 20 bp, Artificial Sequence
  Description of Artificial Sequence: Synthetic oligonucleotide
  Target: SCNA; (-) strand; PAM type: YTN; PAM sequence: TTA
ggtgatgggaaggaattgag

SEQ ID NO: 47011 - DNA, 20 bp, Artificial Sequence
  Description of Artificial Sequence: Synthetic oligonucleotide
  Target: SCNA; (-) strand; PAM type: YTN; PAM sequence: CTA
gatgtcaaacaaattaggtg

SEQ ID NO: 47012 - DNA, 20 bp, Artificial Sequence
  Description of Artificial Sequence: Synthetic oligonucleotide
  Target: SCNA; (-) strand; PAM type: YTN; PAM sequence: TTA
taatgtaaaaagactagatg

SEQ ID NO: 47013 - DNA, 20 bp, Artificial Sequence
  Description of Artificial Sequence: Synthetic oligonucleotide
  Target: SCNA; (-) strand; PAM type: YTN; PAM sequence: CTA
tattataatgtaaaaagact

SEQ ID NO: 47014 - DNA, 20 bp, Artificial Sequence
  Description of Artificial Sequence: Synthetic oligonucleotide
  Target: SCNA; (-) strand; PAM type: YTN; PAM sequence: TTA
atatactatattataatgta

SEQ ID NO: 47015 - DNA, 20 bp, Artificial Sequence
  Description of Artificial Sequence: Synthetic oligonucleotide
  Target: SCNA; (-) strand; PAM type: YTN; PAM sequence: TTT
aatatactatattataatgt

SEQ ID NO: 47016 - DNA, 20 bp, Artificial Sequence
  Description of Artificial Sequence: Synthetic oligonucleotide
  Target: SCNA; (-) strand; PAM type: YTN; PAM sequence: TTT
taatatactatattataatg

SEQ ID NO: 47017 - DNA, 20 bp, Artificial Sequence
  Description of Artificial Sequence: Synthetic oligonucleotide
  Target: SCNA; (-) strand; PAM type: YTN; PAM sequence: TTT
ttaatatactatattataat

SEQ ID NO: 47018 - DNA, 20 bp, Artificial Sequence
  Description of Artificial Sequence: Synthetic oligonucleotide
  Target: SCNA; (-) strand; PAM type: YTN; PAM sequence: CTT
tttaatatactatattataa

SEQ ID NO: 47019 - DNA, 20 bp, Artificial Sequence
  Description of Artificial Sequence: Synthetic oligonucleotide
  Target: SCNA; (-) strand; PAM type: YTN; PAM sequence: CTC
aaaaaaaaaaaccataataa

SEQ ID NO: 47020 - DNA, 20 bp, Artificial Sequence
  Description of Artificial Sequence: Synthetic oligonucleotide
  Target: SCNA; (-) strand; PAM type: YTN; PAM sequence: CTG
aacgacagagcgagacccca

SEQ ID NO: 47021 - DNA, 20 bp, Artificial Sequence
  Description of Artificial Sequence: Synthetic oligonucleotide
  Target: SCNA; (-) strand; PAM type: YTN; PAM sequence: CTC
cagcctgaacgacagagcga

SEQ ID NO: 47022 - DNA, 20 bp, Artificial Sequence
  Description of Artificial Sequence: Synthetic oligonucleotide
  Target: SCNA; (-) strand; PAM type: YTN; PAM sequence: CTC
tccagcctgaacgacagagc

SEQ ID NO: 47023 - DNA, 20 bp, Artificial Sequence
  Description of Artificial Sequence: Synthetic oligonucleotide
  Target: SCNA; (-) strand; PAM type: YTN; PAM sequence: CTA
ctctccagcctgaacgacag

SEQ ID NO: 47024 - DNA, 20 bp, Artificial Sequence
  Description of Artificial Sequence: Synthetic oligonucleotide
  Target: SCNA; (-) strand; PAM type: YTN; PAM sequence: CTG
agcctactctccagcctgaa

SEQ ID NO: 47025 - DNA, 20 bp, Artificial Sequence
  Description of Artificial Sequence: Synthetic oligonucleotide
  Target: SCNA; (-) strand; PAM type: YTN; PAM sequence: TTG
cactgagcctactctccagc

SEQ ID NO: 47026 - DNA, 20 bp, Artificial Sequence
  Description of Artificial Sequence: Synthetic oligonucleotide
  Target: SCNA; (-) strand; PAM type: YTN; PAM sequence: TTT
gcactgagcctactctccag

SEQ ID NO: 47027 - DNA, 20 bp, Artificial Sequence
  Description of Artificial Sequence: Synthetic oligonucleotide
  Target: SCNA; (-) strand; PAM type: YTN; PAM sequence: CTG
aggcaggagaatggcatgaa

SEQ ID NO: 47028 - DNA, 20 bp, Artificial Sequence
  Description of Artificial Sequence: Synthetic oligonucleotide
  Target: SCNA; (-) strand; PAM type: YTN; PAM sequence: CTC
gggaggctgaggcaggagaa

SEQ ID NO: 47029 - DNA, 20 bp, Artificial Sequence
  Description of Artificial Sequence: Synthetic oligonucleotide
  Target: SCNA; (-) strand; PAM type: YTN; PAM sequence: CTA
ctcgggaggctgaggcagga

SEQ ID NO: 47030 - DNA, 20 bp, Artificial Sequence
  Description of Artificial Sequence: Synthetic oligonucleotide
  Target: SCNA; (-) strand; PAM type: YTN; PAM sequence: CTG
tagtcccagctactcgggag

SEQ ID NO: 47031 - DNA, 20 bp, Artificial Sequence
  Description of Artificial Sequence: Synthetic oligonucleotide
  Target: SCNA; (-) strand; PAM type: YTN; PAM sequence: TTG
gcccagacgtggtggcggga

SEQ ID NO: 47032 - DNA, 20 bp, Artificial Sequence
  Description of Artificial Sequence: Synthetic oligonucleotide
  Target: SCNA; (-) strand; PAM type: YTN; PAM sequence: CTA
aaaatacaaaaaattggccc

SEQ ID NO: 47033 - DNA, 20 bp, Artificial Sequence
  Description of Artificial Sequence: Synthetic oligonucleotide
  Target: SCNA; (-) strand; PAM type: YTN; PAM sequence: TTA
ctaaaaatacaaaaaattgg

SEQ ID NO: 47034 - DNA, 20 bp, Artificial Sequence
  Description of Artificial Sequence: Synthetic oligonucleotide
  Target: SCNA; (-) strand; PAM type: YTN; PAM sequence: TTT
actaaaaatacaaaaaattg

SEQ ID NO: 47035 - DNA, 20 bp, Artificial Sequence
  Description of Artificial Sequence: Synthetic oligonucleotide
  Target: SCNA; (-) strand; PAM type: YTN; PAM sequence: CTT
tactaaaaatacaaaaaatt

SEQ ID NO: 47036 - DNA, 20 bp, Artificial Sequence
  Description of Artificial Sequence: Synthetic oligonucleotide
  Target: SCNA; (-) strand; PAM type: YTN; PAM sequence: CTA
acaccatgaaacccagtctt

SEQ ID NO: 47037 - DNA, 20 bp, Artificial Sequence
  Description of Artificial Sequence: Synthetic oligonucleotide
  Target: SCNA; (-) strand; PAM type: YTN; PAM sequence: CTA
gctaacaccatgaaacccag

SEQ ID NO: 47038 - DNA, 20 bp, Artificial Sequence
  Description of Artificial Sequence: Synthetic oligonucleotide
  Target: SCNA; (-) strand; PAM type: YTN; PAM sequence: TTG
ggaggccaaggtgggcaaat

SEQ ID NO: 47039 - DNA, 20 bp, Artificial Sequence
  Description of Artificial Sequence: Synthetic oligonucleotide
  Target: SCNA; (-) strand; PAM type: YTN; PAM sequence: TTT
gggaggccaaggtgggcaaa

SEQ ID NO: 47040 - DNA, 20 bp, Artificial Sequence
  Description of Artificial Sequence: Synthetic oligonucleotide
  Target: SCNA; (-) strand; PAM type: YTN; PAM sequence: TTT
tgggaggccaaggtgggcaa

SEQ ID NO: 47041 - DNA, 20 bp, Artificial Sequence
  Description of Artificial Sequence: Synthetic oligonucleotide
  Target: SCNA; (-) strand; PAM type: YTN; PAM sequence: CTC
agcattttgggaggccaagg

SEQ ID NO: 47042 - DNA, 20 bp, Artificial Sequence
  Description of Artificial Sequence: Synthetic oligonucleotide
  Target: SCNA; (-) strand; PAM type: YTN; PAM sequence: CTG
taatctcagcattttgggag

SEQ ID NO: 47043 - DNA, 20 bp, Artificial Sequence
  Description of Artificial Sequence: Synthetic oligonucleotide
  Target: SCNA; (-) strand; PAM type: YTN; PAM sequence: CTC
acacctgtaatctcagcatt

SEQ ID NO: 47044 - DNA, 20 bp, Artificial Sequence
  Description of Artificial Sequence: Synthetic oligonucleotide
  Target: SCNA; (-) strand; PAM type: YTN; PAM sequence: CTA
taataagggccaggcgcggt

SEQ ID NO: 47045 - DNA, 20 bp, Artificial Sequence
  Description of Artificial Sequence: Synthetic oligonucleotide
  Target: SCNA; (-) strand; PAM type: YTN; PAM sequence: TTC
tataataagggccaggcgcg

SEQ ID NO: 47046 - DNA, 20 bp, Artificial Sequence
  Description of Artificial Sequence: Synthetic oligonucleotide
  Target: SCNA; (-) strand; PAM type: YTN; PAM sequence: TTA
gaaaaatgtgcaatgtatgc

SEQ ID NO: 47047 - DNA, 20 bp, Artificial Sequence
  Description of Artificial Sequence: Synthetic oligonucleotide
  Target: SCNA; (-) strand; PAM type: YTN; PAM sequence: TTG
aagcacaattagaaaaatgt

SEQ ID NO: 47048 - DNA, 20 bp, Artificial Sequence
  Description of Artificial Sequence: Synthetic oligonucleotide
  Target: SCNA; (-) strand; PAM type: YTN; PAM sequence: TTA
ttgaagcacaattagaaaaa

SEQ ID NO: 47049 - DNA, 20 bp, Artificial Sequence
  Description of Artificial Sequence: Synthetic oligonucleotide
  Target: SCNA; (-) strand; PAM type: YTN; PAM sequence: TTG
gtattattgaagcacaatta

SEQ ID NO: 47050 - DNA, 20 bp, Artificial Sequence
  Description of Artificial Sequence: Synthetic oligonucleotide
  Target: SCNA; (-) strand; PAM type: YTN; PAM sequence: TTT
ggtattattgaagcacaatt

SEQ ID NO: 47051 - DNA, 20 bp, Artificial Sequence
  Description of Artificial Sequence: Synthetic oligonucleotide
  Target: SCNA; (-) strand; PAM type: YTN; PAM sequence: TTG
tttggtattattgaagcaca

SEQ ID NO: 47052 - DNA, 20 bp, Artificial Sequence
  Description of Artificial Sequence: Synthetic oligonucleotide
  Target: SCNA; (-) strand; PAM type: YTN; PAM sequence: CTT
gtttggtattattgaagcac

SEQ ID NO: 47053 - DNA, 20 bp, Artificial Sequence
  Description of Artificial Sequence: Synthetic oligonucleotide
  Target: SCNA; (-) strand; PAM type: YTN; PAM sequence: TTG
cccacttgtttggtattatt

SEQ ID NO: 47054 - DNA, 20 bp, Artificial Sequence
  Description of Artificial Sequence: Synthetic oligonucleotide
  Target: SCNA; (-) strand; PAM type: YTN; PAM sequence: TTT
gcccacttgtttggtattat

SEQ ID NO: 47055 - DNA, 20 bp, Artificial Sequence
  Description of Artificial Sequence: Synthetic oligonucleotide
  Target: SCNA; (-) strand; PAM type: YTN; PAM sequence: CTC
agggatgcaaatgtagccca

SEQ ID NO: 47056 - DNA, 20 bp, Artificial Sequence
  Description of Artificial Sequence: Synthetic oligonucleotide
  Target: SCNA; (-) strand; PAM type: YTN; PAM sequence: TTG
tactcagggatgcaaatgta

SEQ ID NO: 47057 - DNA, 20 bp, Artificial Sequence
  Description of Artificial Sequence: Synthetic oligonucleotide
  Target: SCNA; (-) strand; PAM type: YTN; PAM sequence: TTC
acaaaaccaaaaccaatgtg

SEQ ID NO: 47058 - DNA, 20 bp, Artificial Sequence
  Description of Artificial Sequence: Synthetic oligonucleotide
  Target: SCNA; (-) strand; PAM type: YTN; PAM sequence: CTC
caaaattcacaaaaccaaaa

SEQ ID NO: 47059 - DNA, 20 bp, Artificial Sequence
  Description of Artificial Sequence: Synthetic oligonucleotide
  Target: SCNA; (-) strand; PAM type: YTN; PAM sequence: TTC
ctccaaaattcacaaaacca

SEQ ID NO: 47060 - DNA, 20 bp, Artificial Sequence
  Description of Artificial Sequence: Synthetic oligonucleotide
  Target: SCNA; (-) strand; PAM type: YTN; PAM sequence: CTC
aaaataaattcctccaaaat

SEQ ID NO: 47061 - DNA, 20 bp, Artificial Sequence
  Description of Artificial Sequence: Synthetic oligonucleotide
  Target: SCNA; (-) strand; PAM type: YTN; PAM sequence: CTC
tcaaaataaattcctccaaa

SEQ ID NO: 47062 - DNA, 20 bp, Artificial Sequence
  Description of Artificial Sequence: Synthetic oligonucleotide
  Target: SCNA; (-) strand; PAM type: YTN; PAM sequence: TTC
caggggcatctctcaaaata

SEQ ID NO: 47063 - DNA, 20 bp, Artificial Sequence
  Description of Artificial Sequence: Synthetic oligonucleotide
  Target: SCNA; (-) strand; PAM type: YTN; PAM sequence: TTT
ccaggggcatctctcaaaat

SEQ ID NO: 47064 - DNA, 20 bp, Artificial Sequence
  Description of Artificial Sequence: Synthetic oligonucleotide
  Target: SCNA; (-) strand; PAM type: YTN; PAM sequence: TTA
tttccaggggcatctctcaa

SEQ ID NO: 47065 - DNA, 20 bp, Artificial Sequence
  Description of Artificial Sequence: Synthetic oligonucleotide
  Target: SCNA; (-) strand; PAM type: YTN; PAM sequence: TTT
atttccaggggcatctctca

SEQ ID NO: 47066 - DNA, 20 bp, Artificial Sequence
  Description of Artificial Sequence: Synthetic oligonucleotide
  Target: SCNA; (-) strand; PAM type: YTN; PAM sequence: TTA
tttatttccaggggcatctc

SEQ ID NO: 47067 - DNA, 20 bp, Artificial Sequence
  Description of Artificial Sequence: Synthetic oligonucleotide
  Target: SCNA; (-) strand; PAM type: YTN; PAM sequence: TTA
caccaaaacatcagcattat

SEQ ID NO: 47068 - DNA, 20 bp, Artificial Sequence
  Description of Artificial Sequence: Synthetic oligonucleotide
  Target: SCNA; (-) strand; PAM type: YTN; PAM sequence: TTA
atgcaataaataaaattaca

SEQ ID NO: 47069 - DNA, 20 bp, Artificial Sequence
  Description of Artificial Sequence: Synthetic oligonucleotide
  Target: SCNA; (-) strand; PAM type: YTN; PAM sequence: TTC
cattaatgcaataaataaaa

SEQ ID NO: 47070 - DNA, 20 bp, Artificial Sequence
  Description of Artificial Sequence: Synthetic oligonucleotide
  Target: SCNA; (-) strand; PAM type: YTN; PAM sequence: TTA
catattccattaatgcaata

SEQ ID NO: 47071 - DNA, 20 bp, Artificial Sequence
  Description of Artificial Sequence: Synthetic oligonucleotide
  Target: SCNA; (-) strand; PAM type: YTN; PAM sequence: TTT
acatattccattaatgcaat

SEQ ID NO: 47072 - DNA, 20 bp, Artificial Sequence
  Description of Artificial Sequence: Synthetic oligonucleotide
  Target: SCNA; (-) strand; PAM type: YTN; PAM sequence: TTG
tatttacatattccattaat

SEQ ID NO: 47073 - DNA, 20 bp, Artificial Sequence
  Description of Artificial Sequence: Synthetic oligonucleotide
  Target: SCNA; (-) strand; PAM type: YTN; PAM sequence: CTG
atagattgtatttacatatt

SEQ ID NO: 47074 - DNA, 20 bp, Artificial Sequence
  Description of Artificial Sequence: Synthetic oligonucleotide
  Target: SCNA; (-) strand; PAM type: YTN; PAM sequence: CTA
atgctgatagattgtattta

SEQ ID NO: 47075 - DNA, 20 bp, Artificial Sequence
  Description of Artificial Sequence: Synthetic oligonucleotide
  Target: SCNA; (-) strand; PAM type: YTN; PAM sequence: CTG
cctaatgctgatagattgta

SEQ ID NO: 47076 - DNA, 20 bp, Artificial Sequence
  Description of Artificial Sequence: Synthetic oligonucleotide
  Target: SCNA; (-) strand; PAM type: YTN; PAM sequence: TTC
tgcctaatgctgatagattg

SEQ ID NO: 47077 - DNA, 20 bp, Artificial Sequence
  Description of Artificial Sequence: Synthetic oligonucleotide
  Target: SCNA; (-) strand; PAM type: YTN; PAM sequence: TTT
ctgcctaatgctgatagatt

SEQ ID NO: 47078 - DNA, 20 bp, Artificial Sequence
  Description of Artificial Sequence: Synthetic oligonucleotide
  Target: SCNA; (-) strand; PAM type: YTN; PAM sequence: TTT
tctgcctaatgctgatagat

SEQ ID NO: 47079 - DNA, 20 bp, Artificial Sequence
  Description of Artificial Sequence: Synthetic oligonucleotide
  Target: SCNA; (-) strand; PAM type: YTN; PAM sequence: TTA
aatattttctgcctaatgct

SEQ ID NO: 47080 - DNA, 20 bp, Artificial Sequence
  Description of Artificial Sequence: Synthetic oligonucleotide
  Target: SCNA; (-) strand; PAM type: YTN; PAM sequence: CTT
aaatattttctgcctaatgc

SEQ ID NO: 47081 - DNA, 20 bp, Artificial Sequence
  Description of Artificial Sequence: Synthetic oligonucleotide
  Target: SCNA; (-) strand; PAM type: YTN; PAM sequence: CTC
ttaaatattttctgcctaat

SEQ ID NO: 47082 - DNA, 20 bp, Artificial Sequence
  Description of Artificial Sequence: Synthetic oligonucleotide
  Target: SCNA; (-) strand; PAM type: YTN; PAM sequence: TTG
atatctcttaaatattttct

SEQ ID NO: 47083 - DNA, 20 bp, Artificial Sequence
  Description of Artificial Sequence: Synthetic oligonucleotide
  Target: SCNA; (-) strand; PAM type: YTN; PAM sequence: TTT
gatatctcttaaatattttc

SEQ ID NO: 47084 - DNA, 20 bp, Artificial Sequence
  Description of Artificial Sequence: Synthetic oligonucleotide
  Target: SCNA; (-) strand; PAM type: YTN; PAM sequence: CTC
ggcaaaagaatttgatatct

SEQ ID NO: 47085 - DNA, 20 bp, Artificial Sequence
  Description of Artificial Sequence: Synthetic oligonucleotide
  Target: SCNA; (-) strand; PAM type: YTN; PAM sequence: TTC
tcggcaaaagaatttgatat

SEQ ID NO: 47086 - DNA, 20 bp, Artificial Sequence
  Description of Artificial Sequence: Synthetic oligonucleotide
  Target: SCNA; (-) strand; PAM type: YTN; PAM sequence: TTT
ctcggcaaaagaatttgata

SEQ ID NO: 47087 - DNA, 20 bp, Artificial Sequence
  Description of Artificial Sequence: Synthetic oligonucleotide
  Target: SCNA; (-) strand; PAM type: YTN; PAM sequence: CTT
tctcggcaaaagaatttgat

SEQ ID NO: 47088 - DNA, 20 bp, Artificial Sequence
  Description of Artificial Sequence: Synthetic oligonucleotide
  Target: SCNA; (-) strand; PAM type: YTN; PAM sequence: CTA
cctttctcggcaaaagaatt

SEQ ID NO: 47089 - DNA, 20 bp, Artificial Sequence
  Description of Artificial Sequence: Synthetic oligonucleotide
  Target: SCNA; (-) strand; PAM type: YTN; PAM sequence: CTA
ctacctttctcggcaaaaga

SEQ ID NO: 47090 - DNA, 20 bp, Artificial Sequence
  Description of Artificial Sequence: Synthetic oligonucleotide
  Target: SCNA; (-) strand; PAM type: YTN; PAM sequence: CTG
gcaaactactacctttctcg

SEQ ID NO: 47091 - DNA, 20 bp, Artificial Sequence
  Description of Artificial Sequence: Synthetic oligonucleotide
  Target: SCNA; (-) strand; PAM type: YTN; PAM sequence: TTC
ctggcaaactactacctttc

SEQ ID NO: 47092 - DNA, 20 bp, Artificial Sequence
  Description of Artificial Sequence: Synthetic oligonucleotide
  Target: SCNA; (-) strand; PAM type: YTN; PAM sequence: TTG
tagttcctggcaaactacta

SEQ ID NO: 47093 - DNA, 20 bp, Artificial Sequence
  Description of Artificial Sequence: Synthetic oligonucleotide
  Target: SCNA; (-) strand; PAM type: YTN; PAM sequence: CTT
gtagttcctggcaaactact

SEQ ID NO: 47094 - DNA, 20 bp, Artificial Sequence
  Description of Artificial Sequence: Synthetic oligonucleotide
  Target: SCNA; (-) strand; PAM type: YTN; PAM sequence: TTA
gaaagcttgtagttcctggc

SEQ ID NO: 47095 - DNA, 20 bp, Artificial Sequence
  Description of Artificial Sequence: Synthetic oligonucleotide
  Target: SCNA; (-) strand; PAM type: YTN; PAM sequence: TTC
agttagaaagcttgtagttc

SEQ ID NO: 47096 - DNA, 20 bp, Artificial Sequence
  Description of Artificial Sequence: Synthetic oligonucleotide
  Target: SCNA; (-) strand; PAM type: YTN; PAM sequence: TTA
aaagttcagttagaaagctt

SEQ ID NO: 47097 - DNA, 20 bp, Artificial Sequence
  Description of Artificial Sequence: Synthetic oligonucleotide
  Target: SCNA; (-) strand; PAM type: YTN; PAM sequence: TTT
aaaagttcagttagaaagct

SEQ ID NO: 47098 - DNA, 20 bp, Artificial Sequence
  Description of Artificial Sequence: Synthetic oligonucleotide
  Target: SCNA; (-) strand; PAM type: YTN; PAM sequence: TTT
taaaagttcagttagaaagc

SEQ ID NO: 47099 - DNA, 20 bp, Artificial Sequence
  Description of Artificial Sequence: Synthetic oligonucleotide
  Target: SCNA; (-) strand; PAM type: YTN; PAM sequence: TTT
ttaaaagttcagttagaaag

SEQ ID NO: 47100 - DNA, 20 bp, Artificial Sequence
  Description of Artificial Sequence: Synthetic oligonucleotide
  Target: SCNA; (-) strand; PAM type: YTN; PAM sequence: TTA
tttttaaaagttcagttaga

SEQ ID NO: 47101 - DNA, 20 bp, Artificial Sequence
  Description of Artificial Sequence: Synthetic oligonucleotide
  Target: SCNA; (-) strand; PAM type: YTN; PAM sequence: TTT
atttttaaaagttcagttag

SEQ ID NO: 47102 - DNA, 20 bp, Artificial Sequence
  Description of Artificial Sequence: Synthetic oligonucleotide
  Target: SCNA; (-) strand; PAM type: YTN; PAM sequence: TTA
aaatttatttttaaaagttc

SEQ ID NO: 47103 - DNA, 20 bp, Artificial Sequence
  Description of Artificial Sequence: Synthetic oligonucleotide
  Target: SCNA; (-) strand; PAM type: YTN; PAM sequence: TTA
aaaattaaaatttattttta

SEQ ID NO: 47104 - DNA, 20 bp, Artificial Sequence
  Description of Artificial Sequence: Synthetic oligonucleotide
  Target: SCNA; (-) strand; PAM type: YTN; PAM sequence: CTA
tcaaaattaaaaattaaaat

SEQ ID NO: 47105 - DNA, 20 bp, Artificial Sequence
  Description of Artificial Sequence: Synthetic oligonucleotide
  Target: SCNA; (-) strand; PAM type: YTN; PAM sequence: CTA
tgatgatctatcaaaattaa

SEQ ID NO: 47106 - DNA, 20 bp, Artificial Sequence
  Description of Artificial Sequence: Synthetic oligonucleotide
  Target: SCNA; (-) strand; PAM type: YTN; PAM sequence: TTA
aatatgtgcaactatgatga

SEQ ID NO: 47107 - DNA, 20 bp, Artificial Sequence
  Description of Artificial Sequence: Synthetic oligonucleotide
  Target: SCNA; (-) strand; PAM type: YTN; PAM sequence: CTT
aaatatgtgcaactatgatg

SEQ ID NO: 47108 - DNA, 20 bp, Artificial Sequence
  Description of Artificial Sequence: Synthetic oligonucleotide
  Target: SCNA; (-) strand; PAM type: YTN; PAM sequence: TTG
tatgaaaatatcacagatag

SEQ ID NO: 47109 - DNA, 20 bp, Artificial Sequence
  Description of Artificial Sequence: Synthetic oligonucleotide
  Target: SCNA; (-) strand; PAM type: YTN; PAM sequence: TTG
tgaatagtggcagtaaacat

SEQ ID NO: 47110 - DNA, 20 bp, Artificial Sequence
  Description of Artificial Sequence: Synthetic oligonucleotide
  Target: SCNA; (-) strand; PAM type: YTN; PAM sequence: CTA
ttgtgaatagtggcagtaaa

SEQ ID NO: 47111 - DNA, 20 bp, Artificial Sequence
  Description of Artificial Sequence: Synthetic oligonucleotide
  Target: SCNA; (-) strand; PAM type: YTN; PAM sequence: TTC
catatcgtggctattgtgaa

SEQ ID NO: 47112 - DNA, 20 bp, Artificial Sequence
  Description of Artificial Sequence: Synthetic oligonucleotide
  Target: SCNA; (-) strand; PAM type: YTN; PAM sequence: TTG
attccatatcgtggctattg

SEQ ID NO: 47113 - DNA, 20 bp, Artificial Sequence
  Description of Artificial Sequence: Synthetic oligonucleotide
  Target: SCNA; (-) strand; PAM type: YTN; PAM sequence: TTG
atgaacaaaggttgattcca

SEQ ID NO: 47114 - DNA, 20 bp, Artificial Sequence
  Description of Artificial Sequence: Synthetic oligonucleotide
  Target: SCNA; (-) strand; PAM type: YTN; PAM sequence: CTG
ttgatgaacaaaggttgatt

SEQ ID NO: 47115 - DNA, 20 bp, Artificial Sequence
  Description of Artificial Sequence: Synthetic oligonucleotide
  Target: SCNA; (-) strand; PAM type: YTN; PAM sequence: TTC
tgttgatgaacaaaggttga

SEQ ID NO: 47116 - DNA, 20 bp, Artificial Sequence
  Description of Artificial Sequence: Synthetic oligonucleotide
  Target: SCNA; (-) strand; PAM type: YTN; PAM sequence: CTT
ctgttgatgaacaaaggttg

SEQ ID NO: 47117 - DNA, 20 bp, Artificial Sequence
  Description of Artificial Sequence: Synthetic oligonucleotide
  Target: SCNA; (-) strand; PAM type: YTN; PAM sequence: CTC
ttctgttgatgaacaaaggt

SEQ ID NO: 47118 - DNA, 20 bp, Artificial Sequence
  Description of Artificial Sequence: Synthetic oligonucleotide
  Target: SCNA; (-) strand; PAM type: YTN; PAM sequence: CTC
ctcttctgttgatgaacaaa

SEQ ID NO: 47119 - DNA, 20 bp, Artificial Sequence
  Description of Artificial Sequence: Synthetic oligonucleotide
  Target: SCNA; (-) strand; PAM type: YTN; PAM sequence: TTG
tctcctcttctgttgatgaa

SEQ ID NO: 47120 - DNA, 20 bp, Artificial Sequence
  Description of Artificial Sequence: Synthetic oligonucleotide
  Target: SCNA; (-) strand; PAM type: YTN; PAM sequence: TTT
gtctcctcttctgttgatga

SEQ ID NO: 47121 - DNA, 20 bp, Artificial Sequence
  Description of Artificial Sequence: Synthetic oligonucleotide
  Target: SCNA; (-) strand; PAM type: YTN; PAM sequence: CTG
cagccagcacagaccaaagt

SEQ ID NO: 47122 - DNA, 20 bp, Artificial Sequence
  Description of Artificial Sequence: Synthetic oligonucleotide
  Target: SCNA; (-) strand; PAM type: YTN; PAM sequence: CTC
cagaacctgcagccagcaca

SEQ ID NO: 47123 - DNA, 20 bp, Artificial Sequence
  Description of Artificial Sequence: Synthetic oligonucleotide
  Target: SCNA; (-) strand; PAM type: YTN; PAM sequence: CTC
tccagaacctgcagccagca

SEQ ID NO: 47124 - DNA, 20 bp, Artificial Sequence
  Description of Artificial Sequence: Synthetic oligonucleotide
  Target: SCNA; (-) strand; PAM type: YTN; PAM sequence: TTC
aaacagctctccagaacctg

SEQ ID NO: 47125 - DNA, 20 bp, Artificial Sequence
  Description of Artificial Sequence: Synthetic oligonucleotide
  Target: SCNA; (-) strand; PAM type: YTN; PAM sequence: CTT
caaacagctctccagaacct

SEQ ID NO: 47126 - DNA, 20 bp, Artificial Sequence
  Description of Artificial Sequence: Synthetic oligonucleotide
  Target: SCNA; (-) strand; PAM type: YTN; PAM sequence: TTG
tcacttcaaacagctctcca

SEQ ID NO: 47127 - DNA, 20 bp, Artificial Sequence
  Description of Artificial Sequence: Synthetic oligonucleotide
  Target: SCNA; (-) strand; PAM type: YTN; PAM sequence: CTT
gtcacttcaaacagctctcc

SEQ ID NO: 47128 - DNA, 20 bp, Artificial Sequence
  Description of Artificial Sequence: Synthetic oligonucleotide
  Target: SCNA; (-) strand; PAM type: YTN; PAM sequence: TTG
ccatcttgtcacttcaaaca

SEQ ID NO: 47129 - DNA, 20 bp, Artificial Sequence
  Description of Artificial Sequence: Synthetic oligonucleotide
  Target: SCNA; (-) strand; PAM type: YTN; PAM sequence: TTT
gccatcttgtcacttcaaac

SEQ ID NO: 47130 - DNA, 20 bp, Artificial Sequence
  Description of Artificial Sequence: Synthetic oligonucleotide
  Target: SCNA; (-) strand; PAM type: YTN; PAM sequence: TTC
atttgccatcttgtcacttc

SEQ ID NO: 47131 - DNA, 20 bp, Artificial Sequence
  Description of Artificial Sequence: Synthetic oligonucleotide
  Target: SCNA; (-) strand; PAM type: YTN; PAM sequence: TTT
catttgccatcttgtcactt

SEQ ID NO: 47132 - DNA, 20 bp, Artificial Sequence
  Description of Artificial Sequence: Synthetic oligonucleotide
  Target: SCNA; (-) strand; PAM type: YTN; PAM sequence: CTT
tcatttgccatcttgtcact

SEQ ID NO: 47133 - DNA, 20 bp, Artificial Sequence
  Description of Artificial Sequence: Synthetic oligonucleotide
  Target: SCNA; (-) strand; PAM type: YTN; PAM sequence: CTG
accctttcatttgccatctt

SEQ ID NO: 47134 - DNA, 20 bp, Artificial Sequence
  Description of Artificial Sequence: Synthetic oligonucleotide
  Target: SCNA; (-) strand; PAM type: YTN; PAM sequence: TTA
tgaggacgaataatccacca

SEQ ID NO: 47135 - DNA, 20 bp, Artificial Sequence
  Description of Artificial Sequence: Synthetic oligonucleotide
  Target: SCNA; (-) strand; PAM type: YTN; PAM sequence: CTA
ggtaaagtgttatgaggacg

SEQ ID NO: 47136 - DNA, 20 bp, Artificial Sequence
  Description of Artificial Sequence: Synthetic oligonucleotide
  Target: SCNA; (-) strand; PAM type: YTN; PAM sequence: TTC
taggtaaagtgttatgagga

SEQ ID NO: 47137 - DNA, 20 bp, Artificial Sequence
  Description of Artificial Sequence: Synthetic oligonucleotide
  Target: SCNA; (-) strand; PAM type: YTN; PAM sequence: TTT
ctaggtaaagtgttatgagg

SEQ ID NO: 47138 - DNA, 20 bp, Artificial Sequence
  Description of Artificial Sequence: Synthetic oligonucleotide
  Target: SCNA; (-) strand; PAM type: YTN; PAM sequence: TTG
tgagaaaaggcaaaatttct

SEQ ID NO: 47139 - DNA, 20 bp, Artificial Sequence
  Description of Artificial Sequence: Synthetic oligonucleotide
  Target: SCNA; (-) strand; PAM type: YTN; PAM sequence: TTT
gtgagaaaaggcaaaatttc

SEQ ID NO: 47140 - DNA, 20 bp, Artificial Sequence
  Description of Artificial Sequence: Synthetic oligonucleotide
  Target: SCNA; (-) strand; PAM type: YTN; PAM sequence: TTT
tgtgagaaaaggcaaaattt

SEQ ID NO: 47141 - DNA, 20 bp, Artificial Sequence
  Description of Artificial Sequence: Synthetic oligonucleotide
  Target: SCNA; (-) strand; PAM type: YTN; PAM sequence: TTA
tggttttgtgagaaaaggca

SEQ ID NO: 47142 - DNA, 20 bp, Artificial Sequence
  Description of Artificial Sequence: Synthetic oligonucleotide
  Target: SCNA; (-) strand; PAM type: YTN; PAM sequence: TTA
ttatggttttgtgagaaaag

SEQ ID NO: 47143 - DNA, 20 bp, Artificial Sequence
  Description of Artificial Sequence: Synthetic oligonucleotide
  Target: SCNA; (-) strand; PAM type: YTN; PAM sequence: TTG
tccattattatggttttgtg

SEQ ID NO: 47144 - DNA, 20 bp, Artificial Sequence
  Description of Artificial Sequence: Synthetic oligonucleotide
  Target: SCNA; (-) strand; PAM type: YTN; PAM sequence: TTT
gtccattattatggttttgt

SEQ ID NO: 47145 - DNA, 20 bp, Artificial Sequence
  Description of Artificial Sequence: Synthetic oligonucleotide
  Target: SCNA; (-) strand; PAM type: YTN; PAM sequence: CTG
tttgtccattattatggttt

SEQ ID NO: 47146 - DNA, 20 bp, Artificial Sequence
  Description of Artificial Sequence: Synthetic oligonucleotide
  Target: SCNA; (-) strand; PAM type: YTN; PAM sequence: TTC
atgctgtttgtccattatta

SEQ ID NO: 47147 - DNA, 20 bp, Artificial Sequence
  Description of Artificial Sequence: Synthetic oligonucleotide
  Target: SCNA; (-) strand; PAM type: YTN; PAM sequence: CTA
ggttcatgctgtttgtccat

SEQ ID NO: 47148 - DNA, 20 bp, Artificial Sequence
  Description of Artificial Sequence: Synthetic oligonucleotide
  Target: SCNA; (-) strand; PAM type: YTN; PAM sequence: CTG
ggggtgcatatctaggttca

SEQ ID NO: 47149 - DNA, 20 bp, Artificial Sequence
  Description of Artificial Sequence: Synthetic oligonucleotide
  Target: SCNA; (-) strand; PAM type: YTN; PAM sequence: TTA
cgatagtgactgggggtgca

SEQ ID NO: 47150 - DNA, 20 bp, Artificial Sequence
  Description of Artificial Sequence: Synthetic oligonucleotide
  Target: SCNA; (-) strand; PAM type: YTN; PAM sequence: CTT
acgatagtgactgggggtgc

SEQ ID NO: 47151 - DNA, 20 bp, Artificial Sequence
  Description of Artificial Sequence: Synthetic oligonucleotide
  Target: SCNA; (-) strand; PAM type: YTN; PAM sequence: TTG
accttacgatagtgactggg

SEQ ID NO: 47152 - DNA, 20 bp, Artificial Sequence
  Description of Artificial Sequence: Synthetic oligonucleotide
  Target: SCNA; (-) strand; PAM type: YTN; PAM sequence: CTT
gaccttacgatagtgactgg

SEQ ID NO: 47153 - DNA, 20 bp, Artificial Sequence
  Description of Artificial Sequence: Synthetic oligonucleotide
  Target: SCNA; (-) strand; PAM type: YTN; PAM sequence: CTC
ataccaacttgaccttacga

SEQ ID NO: 47154 - DNA, 20 bp, Artificial Sequence
  Description of Artificial Sequence: Synthetic oligonucleotide
  Target: SCNA; (-) strand; PAM type: YTN; PAM sequence: TTA
tgtgactcataccaacttga

SEQ ID NO: 47155 - DNA, 20 bp, Artificial Sequence
  Description of Artificial Sequence: Synthetic oligonucleotide
  Target: SCNA; (-) strand; PAM type: YTN; PAM sequence: CTT
atgtgactcataccaacttg

SEQ ID NO: 47156 - DNA, 20 bp, Artificial Sequence
  Description of Artificial Sequence: Synthetic oligonucleotide
  Target: SCNA; (-) strand; PAM type: YTN; PAM sequence: CTA
cttatgtgactcataccaac

SEQ ID NO: 47157 - DNA, 20 bp, Artificial Sequence
  Description of Artificial Sequence: Synthetic oligonucleotide
  Target: SCNA; (-) strand; PAM type: YTN; PAM sequence: CTC
tacttatgtgactcatacca

SEQ ID NO: 47158 - DNA, 20 bp, Artificial Sequence
  Description of Artificial Sequence: Synthetic oligonucleotide
  Target: SCNA; (-) strand; PAM type: YTN; PAM sequence: CTA
gtcctctacttatgtgactc

SEQ ID NO: 47159 - DNA, 20 bp, Artificial Sequence
  Description of Artificial Sequence: Synthetic oligonucleotide
  Target: SCNA; (-) strand; PAM type: YTN; PAM sequence: TTC
tagtcctctacttatgtgac

SEQ ID NO: 47160 - DNA, 20 bp, Artificial Sequence
  Description of Artificial Sequence: Synthetic oligonucleotide
  Target: SCNA; (-) strand; PAM type: YTN; PAM sequence: CTT
ctagtcctctacttatgtga

SEQ ID NO: 47161 - DNA, 20 bp, Artificial Sequence
  Description of Artificial Sequence: Synthetic oligonucleotide
  Target: SCNA; (-) strand; PAM type: YTN; PAM sequence: TTC
agataaaacttctagtcctc

SEQ ID NO: 47162 - DNA, 20 bp, Artificial Sequence
  Description of Artificial Sequence: Synthetic oligonucleotide
  Target: SCNA; (-) strand; PAM type: YTN; PAM sequence: CTA
ttcagataaaacttctagtc

SEQ ID NO: 47163 - DNA, 20 bp, Artificial Sequence
  Description of Artificial Sequence: Synthetic oligonucleotide
  Target: SCNA; (-) strand; PAM type: YTN; PAM sequence: CTA
tgacaatactattcagataa

SEQ ID NO: 47164 - DNA, 20 bp, Artificial Sequence
  Description of Artificial Sequence: Synthetic oligonucleotide
  Target: SCNA; (-) strand; PAM type: YTN; PAM sequence: CTA
gccactatgacaatactatt

SEQ ID NO: 47165 - DNA, 20 bp, Artificial Sequence
  Description of Artificial Sequence: Synthetic oligonucleotide
  Target: SCNA; (-) strand; PAM type: YTN; PAM sequence: TTC
ctagccactatgacaatact

SEQ ID NO: 47166 - DNA, 20 bp, Artificial Sequence
  Description of Artificial Sequence: Synthetic oligonucleotide
  Target: SCNA; (-) strand; PAM type: YTN; PAM sequence: CTC
attcctagccactatgacaa

SEQ ID NO: 47167 - DNA, 20 bp, Artificial Sequence
  Description of Artificial Sequence: Synthetic oligonucleotide
  Target: SCNA; (-) strand; PAM type: YTN; PAM sequence: CTC
tcattcctagccactatgac

SEQ ID NO: 47168 - DNA, 20 bp, Artificial Sequence
  Description of Artificial Sequence: Synthetic oligonucleotide
  Target: SCNA; (-) strand; PAM type: YTN; PAM sequence: TTC
actctcattcctagccacta

SEQ ID NO: 47169 - DNA, 20 bp, Artificial Sequence
  Description of Artificial Sequence: Synthetic oligonucleotide
  Target: SCNA; (-) strand; PAM type: YTN; PAM sequence: TTT
cactctcattcctagccact

SEQ ID NO: 47170 - DNA, 20 bp, Artificial Sequence
  Description of Artificial Sequence: Synthetic oligonucleotide
  Target: SCNA; (-) strand; PAM type: YTN; PAM sequence: TTT
tcactctcattcctagccac

SEQ ID NO: 47171 - DNA, 20 bp, Artificial Sequence
  Description of Artificial Sequence: Synthetic oligonucleotide
  Target: SCNA; (-) strand; PAM type: YTN; PAM sequence: CTT
ttcactctcattcctagcca

SEQ ID NO: 47172 - DNA, 20 bp, Artificial Sequence
  Description of Artificial Sequence: Synthetic oligonucleotide
  Target: SCNA; (-) strand; PAM type: YTN; PAM sequence: CTA
cttttcactctcattcctag

SEQ ID NO: 47173 - DNA, 20 bp, Artificial Sequence
  Description of Artificial Sequence: Synthetic oligonucleotide
  Target: SCNA; (-) strand; PAM type: YTN; PAM sequence: CTA
gtctacttttcactctcatt

SEQ ID NO: 47174 - DNA, 20 bp, Artificial Sequence
  Description of Artificial Sequence: Synthetic oligonucleotide
  Target: SCNA; (-) strand; PAM type: YTN; PAM sequence: CTC
caagccatatcaaagcacac

SEQ ID NO: 47175 - DNA, 20 bp, Artificial Sequence
  Description of Artificial Sequence: Synthetic oligonucleotide
  Target: SCNA; (-) strand; PAM type: YTN; PAM sequence: TTG
ctccaagccatatcaaagca

SEQ ID NO: 47176 - DNA, 20 bp, Artificial Sequence
  Description of Artificial Sequence: Synthetic oligonucleotide
  Target: SCNA; (-) strand; PAM type: YTN; PAM sequence: TTT
gctccaagccatatcaaagc

SEQ ID NO: 47177 - DNA, 20 bp, Artificial Sequence
  Description of Artificial Sequence: Synthetic oligonucleotide
  Target: SCNA; (-) strand; PAM type: YTN; PAM sequence: TTT
tgctccaagccatatcaaag

SEQ ID NO: 47178 - DNA, 20 bp, Artificial Sequence
  Description of Artificial Sequence: Synthetic oligonucleotide
  Target: SCNA; (-) strand; PAM type: YTN; PAM sequence: CTT
ttgctccaagccatatcaaa

SEQ ID NO: 47179 - DNA, 20 bp, Artificial Sequence
  Description of Artificial Sequence: Synthetic oligonucleotide
  Target: SCNA; (-) strand; PAM type: YTN; PAM sequence: CTG
accttttgctccaagccata

SEQ ID NO: 47180 - DNA, 20 bp, Artificial Sequence
  Description of Artificial Sequence: Synthetic oligonucleotide
  Target: SCNA; (-) strand; PAM type: YTN; PAM sequence: TTC
agaagtgccccaatacctga

SEQ ID NO: 47181 - DNA, 20 bp, Artificial Sequence
  Description of Artificial Sequence: Synthetic oligonucleotide
  Target: SCNA; (-) strand; PAM type: YTN; PAM sequence: TTT
cagaagtgccccaatacctg

SEQ ID NO: 47182 - DNA, 20 bp, Artificial Sequence
  Description of Artificial Sequence: Synthetic oligonucleotide
  Target: SCNA; (-) strand; PAM type: YTN; PAM sequence: CTA
aataatagatatcatttcag

SEQ ID NO: 47183 - DNA, 20 bp, Artificial Sequence
  Description of Artificial Sequence: Synthetic oligonucleotide
  Target: SCNA; (-) strand; PAM type: YTN; PAM sequence: TTC
ctaaataatagatatcattt

SEQ ID NO: 47184 - DNA, 20 bp, Artificial Sequence
  Description of Artificial Sequence: Synthetic oligonucleotide
  Target: SCNA; (-) strand; PAM type: YTN; PAM sequence: CTG
acccagttcctaaataatag

SEQ ID NO: 47185 - DNA, 20 bp, Artificial Sequence
  Description of Artificial Sequence: Synthetic oligonucleotide
  Target: SCNA; (-) strand; PAM type: YTN; PAM sequence: TTC
ctgacccagttcctaaataa

SEQ ID NO: 47186 - DNA, 20 bp, Artificial Sequence
  Description of Artificial Sequence: Synthetic oligonucleotide
  Target: SCNA; (-) strand; PAM type: YTN; PAM sequence: TTT
cctgacccagttcctaaata

SEQ ID NO: 47187 - DNA, 20 bp, Artificial Sequence
  Description of Artificial Sequence: Synthetic oligonucleotide
  Target: SCNA; (-) strand; PAM type: YTN; PAM sequence: TTT
tcctgacccagttcctaaat

SEQ ID NO: 47188 - DNA, 20 bp, Artificial Sequence
  Description of Artificial Sequence: Synthetic oligonucleotide
  Target: SCNA; (-) strand; PAM type: YTN; PAM sequence: TTA
tagattttcctgacccagtt

SEQ ID NO: 47189 - DNA, 20 bp, Artificial Sequence
  Description of Artificial Sequence: Synthetic oligonucleotide
  Target: SCNA; (-) strand; PAM type: YTN; PAM sequence: TTA
ggaatgaatggtatgtaaat

SEQ ID NO: 47190 - DNA, 20 bp, Artificial Sequence
  Description of Artificial Sequence: Synthetic oligonucleotide
  Target: SCNA; (-) strand; PAM type: YTN; PAM sequence: CTT
aggaatgaatggtatgtaaa

SEQ ID NO: 47191 - DNA, 20 bp, Artificial Sequence
  Description of Artificial Sequence: Synthetic oligonucleotide
  Target: SCNA; (-) strand; PAM type: YTN; PAM sequence: CTC
ttaggaatgaatggtatgta

SEQ ID NO: 47192 - DNA, 20 bp, Artificial Sequence
  Description of Artificial Sequence: Synthetic oligonucleotide
  Target: SCNA; (-) strand; PAM type: YTN; PAM sequence: CTC
tcttaggaatgaatggtatg

SEQ ID NO: 47193 - DNA, 20 bp, Artificial Sequence
  Description of Artificial Sequence: Synthetic oligonucleotide
  Target: SCNA; (-) strand; PAM type: YTN; PAM sequence: TTG
gaagagctctcttaggaatg

SEQ ID NO: 47194 - DNA, 20 bp, Artificial Sequence
  Description of Artificial Sequence: Synthetic oligonucleotide
  Target: SCNA; (-) strand; PAM type: YTN; PAM sequence: TTT
ggaagagctctcttaggaat

SEQ ID NO: 47195 - DNA, 20 bp, Artificial Sequence
  Description of Artificial Sequence: Synthetic oligonucleotide
  Target: SCNA; (-) strand; PAM type: YTN; PAM sequence: TTT
tggaagagctctcttaggaa

SEQ ID NO: 47196 - DNA, 20 bp, Artificial Sequence
  Description of Artificial Sequence: Synthetic oligonucleotide
  Target: SCNA; (-) strand; PAM type: YTN; PAM sequence: TTT
ttggaagagctctcttagga

SEQ ID NO: 47197 - DNA, 20 bp, Artificial Sequence
  Description of Artificial Sequence: Synthetic oligonucleotide
  Target: SCNA; (-) strand; PAM type: YTN; PAM sequence: TTT
tttggaagagctctcttagg

SEQ ID NO: 47198 - DNA, 20 bp, Artificial Sequence
  Description of Artificial Sequence: Synthetic oligonucleotide
  Target: SCNA; (-) strand; PAM type: YTN; PAM sequence: TTT
ttttggaagagctctcttag

SEQ ID NO: 47199 - DNA, 20 bp, Artificial Sequence
  Description of Artificial Sequence: Synthetic oligonucleotide
  Target: SCNA; (-) strand; PAM type: YTN; PAM sequence: TTT
tttttggaagagctctctta

SEQ ID NO: 47200 - DNA, 20 bp, Artificial Sequence
  Description of Artificial Sequence: Synthetic oligonucleotide
  Target: SCNA; (-) strand; PAM type: YTN; PAM sequence: TTT
ttttttggaagagctctctt

SEQ ID NO: 47201 - DNA, 20 bp, Artificial Sequence
  Description of Artificial Sequence: Synthetic oligonucleotide
  Target: SCNA; (-) strand; PAM type: YTN; PAM sequence: TTT
tttttttggaagagctctct

SEQ ID NO: 47202 - DNA, 20 bp, Artificial Sequence
  Description of Artificial Sequence: Synthetic oligonucleotide
  Target: SCNA; (-) strand; PAM type: YTN; PAM sequence: TTT
ttttttttggaagagctctc

SEQ ID NO: 47203 - DNA, 20 bp, Artificial Sequence
  Description of Artificial Sequence: Synthetic oligonucleotide
  Target: SCNA; (-) strand; PAM type: YTN; PAM sequence: TTT
tttttttttggaagagctct

SEQ ID NO: 47204 - DNA, 20 bp, Artificial Sequence
  Description of Artificial Sequence: Synthetic oligonucleotide
  Target: SCNA; (-) strand; PAM type: YTN; PAM sequence: TTT
ttttttttttggaagagctc

SEQ ID NO: 47205 - DNA, 20 bp, Artificial Sequence
  Description of Artificial Sequence: Synthetic oligonucleotide
  Target: SCNA; (-) strand; PAM type: YTN; PAM sequence: TTT
tttttttttttggaagagct

SEQ ID NO: 47206 - DNA, 20 bp, Artificial Sequence
  Description of Artificial Sequence: Synthetic oligonucleotide
  Target: SCNA; (-) strand; PAM type: YTN; PAM sequence: TTT
ttttttttttttggaagagc

SEQ ID NO: 47207 - DNA, 20 bp, Artificial Sequence
  Description of Artificial Sequence: Synthetic oligonucleotide
  Target: SCNA; (-) strand; PAM type: YTN; PAM sequence: CTT
tttttttttttttggaagag

SEQ ID NO: 47208 - DNA, 20 bp, Artificial Sequence
  Description of Artificial Sequence: Synthetic oligonucleotide
  Target: SCNA; (-) strand; PAM type: YTN; PAM sequence: CTC
tttttttttttttttggaag

SEQ ID NO: 47209 - DNA, 20 bp, Artificial Sequence
  Description of Artificial Sequence: Synthetic oligonucleotide
  Target: SCNA; (-) strand; PAM type: YTN; PAM sequence: CTG
acatctcttttttttttttt

SEQ ID NO: 47210 - DNA, 20 bp, Artificial Sequence
  Description of Artificial Sequence: Synthetic oligonucleotide
  Target: SCNA; (-) strand; PAM type: YTN; PAM sequence: TTA
tgcactgacatctctttttt

SEQ ID NO: 47211 - DNA, 20 bp, Artificial Sequence
  Description of Artificial Sequence: Synthetic oligonucleotide
  Target: SCNA; (-) strand; PAM type: YTN; PAM sequence: TTT
atgcactgacatctcttttt

SEQ ID NO: 47212 - DNA, 20 bp, Artificial Sequence
  Description of Artificial Sequence: Synthetic oligonucleotide
  Target: SCNA; (-) strand; PAM type: YTN; PAM sequence: TTT
tatgcactgacatctctttt

SEQ ID NO: 47213 - DNA, 20 bp, Artificial Sequence
  Description of Artificial Sequence: Synthetic oligonucleotide
  Target: SCNA; (-) strand; PAM type: YTN; PAM sequence: TTT
ttatgcactgacatctcttt

SEQ ID NO: 47214 - DNA, 20 bp, Artificial Sequence
  Description of Artificial Sequence: Synthetic oligonucleotide
  Target: SCNA; (-) strand; PAM type: YTN; PAM sequence: TTT
tttatgcactgacatctctt

SEQ ID NO: 47215 - DNA, 20 bp, Artificial Sequence
  Description of Artificial Sequence: Synthetic oligonucleotide
  Target: SCNA; (-) strand; PAM type: YTN; PAM sequence: TTA
ttttttatgcactgacatct

SEQ ID NO: 47216 - DNA, 20 bp, Artificial Sequence
  Description of Artificial Sequence: Synthetic oligonucleotide
  Target: SCNA; (-) strand; PAM type: YTN; PAM sequence: TTT
attttttatgcactgacatc

SEQ ID NO: 47217 - DNA, 20 bp, Artificial Sequence
  Description of Artificial Sequence: Synthetic oligonucleotide
  Target: SCNA; (-) strand; PAM type: YTN; PAM sequence: TTG
agaaagaaatggagtttatt

SEQ ID NO: 47218 - DNA, 20 bp, Artificial Sequence
  Description of Artificial Sequence: Synthetic oligonucleotide
  Target: SCNA; (-) strand; PAM type: YTN; PAM sequence: CTT
gagaaagaaatggagtttat

SEQ ID NO: 47219 - DNA, 20 bp, Artificial Sequence
  Description of Artificial Sequence: Synthetic oligonucleotide
  Target: SCNA; (-) strand; PAM type: YTN; PAM sequence: TTG
ggcttgagaaagaaatggag

SEQ ID NO: 47220 - DNA, 20 bp, Artificial Sequence
  Description of Artificial Sequence: Synthetic oligonucleotide
  Target: SCNA; (-) strand; PAM type: YTN; PAM sequence: TTT
gggcttgagaaagaaatgga

SEQ ID NO: 47221 - DNA, 20 bp, Artificial Sequence
  Description of Artificial Sequence: Synthetic oligonucleotide
  Target: SCNA; (-) strand; PAM type: YTN; PAM sequence: CTT
tgggcttgagaaagaaatgg

SEQ ID NO: 47222 - DNA, 20 bp, Artificial Sequence
  Description of Artificial Sequence: Synthetic oligonucleotide
  Target: SCNA; (-) strand; PAM type: YTN; PAM sequence: TTA
tgtactttgggcttgagaaa

SEQ ID NO: 47223 - DNA, 20 bp, Artificial Sequence
  Description of Artificial Sequence: Synthetic oligonucleotide
  Target: SCNA; (-) strand; PAM type: YTN; PAM sequence: TTT
atgtactttgggcttgagaa

SEQ ID NO: 47224 - DNA, 20 bp, Artificial Sequence
  Description of Artificial Sequence: Synthetic oligonucleotide
  Target: SCNA; (-) strand; PAM type: YTN; PAM sequence: TTC
aagatttatgtactttgggc

SEQ ID NO: 47225 - DNA, 20 bp, Artificial Sequence
  Description of Artificial Sequence: Synthetic oligonucleotide
  Target: SCNA; (-) strand; PAM type: YTN; PAM sequence: TTT
caagatttatgtactttggg

SEQ ID NO: 47226 - DNA, 20 bp, Artificial Sequence
  Description of Artificial Sequence: Synthetic oligonucleotide
  Target: SCNA; (-) strand; PAM type: YTN; PAM sequence: CTG
gaaaatttcaagatttatgt

SEQ ID NO: 47227 - DNA, 20 bp, Artificial Sequence
  Description of Artificial Sequence: Synthetic oligonucleotide
  Target: SCNA; (-) strand; PAM type: YTN; PAM sequence: TTA
gctggaaaatttcaagattt

SEQ ID NO: 47228 - DNA, 20 bp, Artificial Sequence
  Description of Artificial Sequence: Synthetic oligonucleotide
  Target: SCNA; (-) strand; PAM type: YTN; PAM sequence: TTT
agctggaaaatttcaagatt

SEQ ID NO: 47229 - DNA, 20 bp, Artificial Sequence
  Description of Artificial Sequence: Synthetic oligonucleotide
  Target: SCNA; (-) strand; PAM type: YTN; PAM sequence: TTT
tagctggaaaatttcaagat

SEQ ID NO: 47230 - DNA, 20 bp, Artificial Sequence
  Description of Artificial Sequence: Synthetic oligonucleotide
  Target: SCNA; (-) strand; PAM type: YTN; PAM sequence: TTT
ttagctggaaaatttcaaga

SEQ ID NO: 47231 - DNA, 20 bp, Artificial Sequence
  Description of Artificial Sequence: Synthetic oligonucleotide
  Target: SCNA; (-) strand; PAM type: YTN; PAM sequence: TTT
tttagctggaaaatttcaag

SEQ ID NO: 47232 - DNA, 20 bp, Artificial Sequence
  Description of Artificial Sequence: Synthetic oligonucleotide
  Target: SCNA; (-) strand; PAM type: YTN; PAM sequence: CTA
ttttttagctggaaaatttc

SEQ ID NO: 47233 - DNA, 20 bp, Artificial Sequence
  Description of Artificial Sequence: Synthetic oligonucleotide
  Target: SCNA; (-) strand; PAM type: YTN; PAM sequence: CTA
gaacatatgcctatttttta

SEQ ID NO: 47234 - DNA, 20 bp, Artificial Sequence
  Description of Artificial Sequence: Synthetic oligonucleotide
  Target: SCNA; (-) strand; PAM type: YTN; PAM sequence: CTG
atgctagaacatatgcctat

SEQ ID NO: 47235 - DNA, 20 bp, Artificial Sequence
  Description of Artificial Sequence: Synthetic oligonucleotide
  Target: SCNA; (-) strand; PAM type: YTN; PAM sequence: TTA
aagctgatgctagaacatat

SEQ ID NO: 47236 - DNA, 20 bp, Artificial Sequence
  Description of Artificial Sequence: Synthetic oligonucleotide
  Target: SCNA; (-) strand; PAM type: YTN; PAM sequence: TTG
tagcagagaatgaatgtggg

SEQ ID NO: 47237 - DNA, 20 bp, Artificial Sequence
  Description of Artificial Sequence: Synthetic oligonucleotide
  Target: SCNA; (-) strand; PAM type: YTN; PAM sequence: TTA
ttgtagcagagaatgaatgt

SEQ ID NO: 47238 - DNA, 20 bp, Artificial Sequence
  Description of Artificial Sequence: Synthetic oligonucleotide
  Target: SCNA; (-) strand; PAM type: YTN; PAM sequence: TTT
attgtagcagagaatgaatg

SEQ ID NO: 47239 - DNA, 20 bp, Artificial Sequence
  Description of Artificial Sequence: Synthetic oligonucleotide
  Target: SCNA; (-) strand; PAM type: YTN; PAM sequence: CTT
tattgtagcagagaatgaat

SEQ ID NO: 47240 - DNA, 20 bp, Artificial Sequence
  Description of Artificial Sequence: Synthetic oligonucleotide
  Target: SCNA; (-) strand; PAM type: YTN; PAM sequence: TTG
tcactttattgtagcagaga

SEQ ID NO: 47241 - DNA, 20 bp, Artificial Sequence
  Description of Artificial Sequence: Synthetic oligonucleotide
  Target: SCNA; (-) strand; PAM type: YTN; PAM sequence: TTT
gtcactttattgtagcagag

SEQ ID NO: 47242 - DNA, 20 bp, Artificial Sequence
  Description of Artificial Sequence: Synthetic oligonucleotide
  Target: SCNA; (-) strand; PAM type: YTN; PAM sequence: CTT
tgtcactttattgtagcaga

SEQ ID NO: 47243 - DNA, 20 bp, Artificial Sequence
  Description of Artificial Sequence: Synthetic oligonucleotide
  Target: SCNA; (-) strand; PAM type: YTN; PAM sequence: TTA
gatgtaacataaaatatgaa

SEQ ID NO: 47244 - DNA, 20 bp, Artificial Sequence
  Description of Artificial Sequence: Synthetic oligonucleotide
  Target: SCNA; (-) strand; PAM type: YTN; PAM sequence: CTG
aaaaacagataattagatgt

SEQ ID NO: 47245 - DNA, 20 bp, Artificial Sequence
  Description of Artificial Sequence: Synthetic oligonucleotide
  Target: SCNA; (-) strand; PAM type: YTN; PAM sequence: CTA
actgaaaaacagataattag

SEQ ID NO: 47246 - DNA, 20 bp, Artificial Sequence
  Description of Artificial Sequence: Synthetic oligonucleotide
  Target: SCNA; (-) strand; PAM type: YTN; PAM sequence: TTA
tctaactgaaaaacagataa

SEQ ID NO: 47247 - DNA, 20 bp, Artificial Sequence
  Description of Artificial Sequence: Synthetic oligonucleotide
  Target: SCNA; (-) strand; PAM type: YTN; PAM sequence: TTT
atctaactgaaaaacagata

SEQ ID NO: 47248 - DNA, 20 bp, Artificial Sequence
  Description of Artificial Sequence: Synthetic oligonucleotide
  Target: SCNA; (-) strand; PAM type: YTN; PAM sequence: CTA
ggatataaagcatatttatc

SEQ ID NO: 47249 - DNA, 20 bp, Artificial Sequence
  Description of Artificial Sequence: Synthetic oligonucleotide
  Target: SCNA; (-) strand; PAM type: YTN; PAM sequence: CTG
atggtacctaggatataaag

SEQ ID NO: 47250 - DNA, 20 bp, Artificial Sequence
  Description of Artificial Sequence: Synthetic oligonucleotide
  Target: SCNA; (-) strand; PAM type: YTN; PAM sequence: TTC
tgatggtacctaggatataa

SEQ ID NO: 47251 - DNA, 20 bp, Artificial Sequence
  Description of Artificial Sequence: Synthetic oligonucleotide
  Target: SCNA; (-) strand; PAM type: YTN; PAM sequence: TTG
aaattctgatggtacctagg

SEQ ID NO: 47252 - DNA, 20 bp, Artificial Sequence
  Description of Artificial Sequence: Synthetic oligonucleotide
  Target: SCNA; (-) strand; PAM type: YTN; PAM sequence: TTT
gaaattctgatggtacctag

SEQ ID NO: 47253 - DNA, 20 bp, Artificial Sequence
  Description of Artificial Sequence: Synthetic oligonucleotide
  Target: SCNA; (-) strand; PAM type: YTN; PAM sequence: CTT
tgaaattctgatggtaccta

SEQ ID NO: 47254 - DNA, 20 bp, Artificial Sequence
  Description of Artificial Sequence: Synthetic oligonucleotide
  Target: SCNA; (-) strand; PAM type: YTN; PAM sequence: CTG
agctttgaaattctgatggt

SEQ ID NO: 47255 - DNA, 20 bp, Artificial Sequence
  Description of Artificial Sequence: Synthetic oligonucleotide
  Target: SCNA; (-) strand; PAM type: YTN; PAM sequence: TTC
tgagctttgaaattctgatg

SEQ ID NO: 47256 - DNA, 20 bp, Artificial Sequence
  Description of Artificial Sequence: Synthetic oligonucleotide
  Target: SCNA; (-) strand; PAM type: YTN; PAM sequence: TTT
ctgagctttgaaattctgat

SEQ ID NO: 47257 - DNA, 20 bp, Artificial Sequence
  Description of Artificial Sequence: Synthetic oligonucleotide
  Target: SCNA; (-) strand; PAM type: YTN; PAM sequence: TTT
tctgagctttgaaattctga

SEQ ID NO: 47258 - DNA, 20 bp, Artificial Sequence
  Description of Artificial Sequence: Synthetic oligonucleotide
  Target: SCNA; (-) strand; PAM type: YTN; PAM sequence: TTA
gtgattttctgagctttgaa

SEQ ID NO: 47259 - DNA, 20 bp, Artificial Sequence
  Description of Artificial Sequence: Synthetic oligonucleotide
  Target: SCNA; (-) strand; PAM type: YTN; PAM sequence: CTC
attagtgattttctgagctt

SEQ ID NO: 47260 - DNA, 20 bp, Artificial Sequence
  Description of Artificial Sequence: Synthetic oligonucleotide
  Target: SCNA; (-) strand; PAM type: YTN; PAM sequence: TTC
tcattagtgattttctgagc

SEQ ID NO: 47261 - DNA, 20 bp, Artificial Sequence
  Description of Artificial Sequence: Synthetic oligonucleotide
  Target: SCNA; (-) strand; PAM type: YTN; PAM sequence: TTC
cattctcattagtgattttc

SEQ ID NO: 47262 - DNA, 20 bp, Artificial Sequence
  Description of Artificial Sequence: Synthetic oligonucleotide
  Target: SCNA; (-) strand; PAM type: YTN; PAM sequence: CTT
ccattctcattagtgatttt

SEQ ID NO: 47263 - DNA, 20 bp, Artificial Sequence
  Description of Artificial Sequence: Synthetic oligonucleotide
  Target: SCNA; (-) strand; PAM type: YTN; PAM sequence: TTC
cttccattctcattagtgat

SEQ ID NO: 47264 - DNA, 20 bp, Artificial Sequence
  Description of Artificial Sequence: Synthetic oligonucleotide
  Target: SCNA; (-) strand; PAM type: YTN; PAM sequence: TTA
attccttccattctcattag

SEQ ID NO: 47265 - DNA, 20 bp, Artificial Sequence
  Description of Artificial Sequence: Synthetic oligonucleotide
  Target: SCNA; (-) strand; PAM type: YTN; PAM sequence: TTG
catgatggttaattccttcc

SEQ ID NO: 47266 - DNA, 20 bp, Artificial Sequence
  Description of Artificial Sequence: Synthetic oligonucleotide
  Target: SCNA; (-) strand; PAM type: YTN; PAM sequence: CTT
gcatgatggttaattccttc

SEQ ID NO: 47267 - DNA, 20 bp, Artificial Sequence
  Description of Artificial Sequence: Synthetic oligonucleotide
  Target: SCNA; (-) strand; PAM type: YTN; PAM sequence: CTG
cttgcatgatggttaattcc

SEQ ID NO: 47268 - DNA, 20 bp, Artificial Sequence
  Description of Artificial Sequence: Synthetic oligonucleotide
  Target: SCNA; (-) strand; PAM type: YTN; PAM sequence: TTC
tgcttgcatgatggttaatt

SEQ ID NO: 47269 - DNA, 20 bp, Artificial Sequence
  Description of Artificial Sequence: Synthetic oligonucleotide
  Target: SCNA; (-) strand; PAM type: YTN; PAM sequence: CTT
ctgcttgcatgatggttaat

SEQ ID NO: 47270 - DNA, 20 bp, Artificial Sequence
  Description of Artificial Sequence: Synthetic oligonucleotide
  Target: SCNA; (-) strand; PAM type: YTN; PAM sequence: CTG
agcaatgtagcatggtagcc

SEQ ID NO: 47271 - DNA, 20 bp, Artificial Sequence
  Description of Artificial Sequence: Synthetic oligonucleotide
  Target: SCNA; (-) strand; PAM type: YTN; PAM sequence: CTC
tgagcaatgtagcatggtag

SEQ ID NO: 47272 - DNA, 20 bp, Artificial Sequence
  Description of Artificial Sequence: Synthetic oligonucleotide
  Target: SCNA; (-) strand; PAM type: YTN; PAM sequence: CTA
catgaactctgagcaatgta

SEQ ID NO: 47273 - DNA, 20 bp, Artificial Sequence
  Description of Artificial Sequence: Synthetic oligonucleotide
  Target: SCNA; (-) strand; PAM type: YTN; PAM sequence: CTG
ctacatgaactctgagcaat

SEQ ID NO: 47274 - DNA, 20 bp, Artificial Sequence
  Description of Artificial Sequence: Synthetic oligonucleotide
  Target: SCNA; (-) strand; PAM type: YTN; PAM sequence: TTA
aactgctacatgaactctga

SEQ ID NO: 47275 - DNA, 20 bp, Artificial Sequence
  Description of Artificial Sequence: Synthetic oligonucleotide
  Target: SCNA; (-) strand; PAM type: YTN; PAM sequence: CTG
attaaactgctacatgaact

SEQ ID NO: 47276 - DNA, 20 bp, Artificial Sequence
  Description of Artificial Sequence: Synthetic oligonucleotide
  Target: SCNA; (-) strand; PAM type: YTN; PAM sequence: CTA
ccctgattaaactgctacat

SEQ ID NO: 47277 - DNA, 20 bp, Artificial Sequence
  Description of Artificial Sequence: Synthetic oligonucleotide
  Target: SCNA; (-) strand; PAM type: YTN; PAM sequence: CTG
ctaccctgattaaactgcta

SEQ ID NO: 47278 - DNA, 20 bp, Artificial Sequence
  Description of Artificial Sequence: Synthetic oligonucleotide
  Target: SCNA; (-) strand; PAM type: YTN; PAM sequence: TTG
cacagctgctaccctgatta

SEQ ID NO: 47279 - DNA, 20 bp, Artificial Sequence
  Description of Artificial Sequence: Synthetic oligonucleotide
  Target: SCNA; (-) strand; PAM type: YTN; PAM sequence: CTC
attgcacagctgctaccctg

SEQ ID NO: 47280 - DNA, 20 bp, Artificial Sequence
  Description of Artificial Sequence: Synthetic oligonucleotide
  Target: SCNA; (-) strand; PAM type: YTN; PAM sequence: TTC
caacaaagctcattgcacag

SEQ ID NO: 47281 - DNA, 20 bp, Artificial Sequence
  Description of Artificial Sequence: Synthetic oligonucleotide
  Target: SCNA; (-) strand; PAM type: YTN; PAM sequence: CTC
cagttccaacaaagctcatt

SEQ ID NO: 47282 - DNA, 20 bp, Artificial Sequence
  Description of Artificial Sequence: Synthetic oligonucleotide
  Target: SCNA; (-) strand; PAM type: YTN; PAM sequence: TTA
ggatgcgagactccagttcc

SEQ ID NO: 47283 - DNA, 20 bp, Artificial Sequence
  Description of Artificial Sequence: Synthetic oligonucleotide
  Target: SCNA; (-) strand; PAM type: YTN; PAM sequence: TTT
aggatgcgagactccagttc

SEQ ID NO: 47284 - DNA, 20 bp, Artificial Sequence
  Description of Artificial Sequence: Synthetic oligonucleotide
  Target: SCNA; (-) strand; PAM type: YTN; PAM sequence: TTC
acatttaggatgcgagactc

SEQ ID NO: 47285 - DNA, 20 bp, Artificial Sequence
  Description of Artificial Sequence: Synthetic oligonucleotide
  Target: SCNA; (-) strand; PAM type: YTN; PAM sequence: TTT
cacatttaggatgcgagact

SEQ ID NO: 47286 - DNA, 20 bp, Artificial Sequence
  Description of Artificial Sequence: Synthetic oligonucleotide
  Target: SCNA; (-) strand; PAM type: YTN; PAM sequence: TTC
aaacagtagatatttcacat

SEQ ID NO: 47287 - DNA, 20 bp, Artificial Sequence
  Description of Artificial Sequence: Synthetic oligonucleotide
  Target: SCNA; (-) strand; PAM type: YTN; PAM sequence: TTT
caaacagtagatatttcaca

SEQ ID NO: 47288 - DNA, 20 bp, Artificial Sequence
  Description of Artificial Sequence: Synthetic oligonucleotide
  Target: SCNA; (-) strand; PAM type: YTN; PAM sequence: CTT
tcaaacagtagatatttcac

SEQ ID NO: 47289 - DNA, 20 bp, Artificial Sequence
  Description of Artificial Sequence: Synthetic oligonucleotide
  Target: SCNA; (-) strand; PAM type: YTN; PAM sequence: TTA
tcaccctttcaaacagtaga

SEQ ID NO: 47290 - DNA, 20 bp, Artificial Sequence
  Description of Artificial Sequence: Synthetic oligonucleotide
  Target: SCNA; (-) strand; PAM type: YTN; PAM sequence: TTG
caaggcataaagttatcacc

SEQ ID NO: 47291 - DNA, 20 bp, Artificial Sequence
  Description of Artificial Sequence: Synthetic oligonucleotide
  Target: SCNA; (-) strand; PAM type: YTN; PAM sequence: TTT
gcaaggcataaagttatcac

SEQ ID NO: 47292 - DNA, 20 bp, Artificial Sequence
  Description of Artificial Sequence: Synthetic oligonucleotide
  Target: SCNA; (-) strand; PAM type: YTN; PAM sequence: CTT
tgcaaggcataaagttatca

SEQ ID NO: 47293 - DNA, 20 bp, Artificial Sequence
  Description of Artificial Sequence: Synthetic oligonucleotide
  Target: SCNA; (-) strand; PAM type: YTN; PAM sequence: TTC
tttgcaaggcataaagttat

SEQ ID NO: 47294 - DNA, 20 bp, Artificial Sequence
  Description of Artificial Sequence: Synthetic oligonucleotide
  Target: SCNA; (-) strand; PAM type: YTN; PAM sequence: TTT
ctttgcaaggcataaagtta

SEQ ID NO: 47295 - DNA, 20 bp, Artificial Sequence
  Description of Artificial Sequence: Synthetic oligonucleotide
  Target: SCNA; (-) strand; PAM type: YTN; PAM sequence: TTT
tctttgcaaggcataaagtt

SEQ ID NO: 47296 - DNA, 20 bp, Artificial Sequence
  Description of Artificial Sequence: Synthetic oligonucleotide
  Target: SCNA; (-) strand; PAM type: YTN; PAM sequence: CTG
ttttctttgcaaggcataaa

SEQ ID NO: 47297 - DNA, 20 bp, Artificial Sequence
  Description of Artificial Sequence: Synthetic oligonucleotide
  Target: SCNA; (-) strand; PAM type: YTN; PAM sequence: TTG
aggactgttttctttgcaag

SEQ ID NO: 47298 - DNA, 20 bp, Artificial Sequence
  Description of Artificial Sequence: Synthetic oligonucleotide
  Target: SCNA; (-) strand; PAM type: YTN; PAM sequence: CTT
gaggactgttttctttgcaa

SEQ ID NO: 47299 - DNA, 20 bp, Artificial Sequence
  Description of Artificial Sequence: Synthetic oligonucleotide
  Target: SCNA; (-) strand; PAM type: YTN; PAM sequence: TTA
aaaaataacacttgaggact

SEQ ID NO: 47300 - DNA, 20 bp, Artificial Sequence
  Description of Artificial Sequence: Synthetic oligonucleotide
  Target: SCNA; (-) strand; PAM type: YTN; PAM sequence: TTC
attaaaaaataacacttgag

SEQ ID NO: 47301 - DNA, 20 bp, Artificial Sequence
  Description of Artificial Sequence: Synthetic oligonucleotide
  Target: SCNA; (-) strand; PAM type: YTN; PAM sequence: TTA
attcattaaaaaataacact

SEQ ID NO: 47302 - DNA, 20 bp, Artificial Sequence
  Description of Artificial Sequence: Synthetic oligonucleotide
  Target: SCNA; (-) strand; PAM type: YTN; PAM sequence: CTG
agggcaaaaaaaaaaaaaaa

SEQ ID NO: 47303 - DNA, 20 bp, Artificial Sequence
  Description of Artificial Sequence: Synthetic oligonucleotide
  Target: SCNA; (-) strand; PAM type: YTN; PAM sequence: TTC
tgagggcaaaaaaaaaaaaa

SEQ ID NO: 47304 - DNA, 20 bp, Artificial Sequence
  Description of Artificial Sequence: Synthetic oligonucleotide
  Target: SCNA; (-) strand; PAM type: YTN; PAM sequence: CTT
ctgagggcaaaaaaaaaaaa

SEQ ID NO: 47305 - DNA, 20 bp, Artificial Sequence
  Description of Artificial Sequence: Synthetic oligonucleotide
  Target: SCNA; (-) strand; PAM type: YTN; PAM sequence: TTA
aatacttctgagggcaaaaa

SEQ ID NO: 47306 - DNA, 20 bp, Artificial Sequence
  Description of Artificial Sequence: Synthetic oligonucleotide
  Target: SCNA; (-) strand; PAM type: YTN; PAM sequence: TTT
aaatacttctgagggcaaaa

SEQ ID NO: 47307 - DNA, 20 bp, Artificial Sequence
  Description of Artificial Sequence: Synthetic oligonucleotide
  Target: SCNA; (-) strand; PAM type: YTN; PAM sequence: CTT
taaatacttctgagggcaaa

SEQ ID NO: 47308 - DNA, 20 bp, Artificial Sequence
  Description of Artificial Sequence: Synthetic oligonucleotide
  Target: SCNA; (-) strand; PAM type: YTN; PAM sequence: TTA
tcctttaaatacttctgagg

SEQ ID NO: 47309 - DNA, 20 bp, Artificial Sequence
  Description of Artificial Sequence: Synthetic oligonucleotide
  Target: SCNA; (-) strand; PAM type: YTN; PAM sequence: TTA
tcatatgggattatccttta

SEQ ID NO: 47310 - DNA, 20 bp, Artificial Sequence
  Description of Artificial Sequence: Synthetic oligonucleotide
  Target: SCNA; (-) strand; PAM type: YTN; PAM sequence: CTA
ggcagtgtgagttatcatat

SEQ ID NO: 47311 - DNA, 20 bp, Artificial Sequence
  Description of Artificial Sequence: Synthetic oligonucleotide
  Target: SCNA; (-) strand; PAM type: YTN; PAM sequence: CTG
aagctaggcagtgtgagtta

SEQ ID NO: 47312 - DNA, 20 bp, Artificial Sequence
  Description of Artificial Sequence: Synthetic oligonucleotide
  Target: SCNA; (-) strand; PAM type: YTN; PAM sequence: TTG
tactgaagctaggcagtgtg

SEQ ID NO: 47313 - DNA, 20 bp, Artificial Sequence
  Description of Artificial Sequence: Synthetic oligonucleotide
  Target: SCNA; (-) strand; PAM type: YTN; PAM sequence: CTG
caatgtatgagacattgtac

SEQ ID NO: 47314 - DNA, 20 bp, Artificial Sequence
  Description of Artificial Sequence: Synthetic oligonucleotide
  Target: SCNA; (-) strand; PAM type: YTN; PAM sequence: TTG
tgagtgcctgcaatgtatga

SEQ ID NO: 47315 - DNA, 20 bp, Artificial Sequence
  Description of Artificial Sequence: Synthetic oligonucleotide
  Target: SCNA; (-) strand; PAM type: YTN; PAM sequence: TTT
gtgagtgcctgcaatgtatg

SEQ ID NO: 47316 - DNA, 20 bp, Artificial Sequence
  Description of Artificial Sequence: Synthetic oligonucleotide
  Target: SCNA; (-) strand; PAM type: YTN; PAM sequence: TTA
aacaaatgtttgtgagtgcc

SEQ ID NO: 47317 - DNA, 20 bp, Artificial Sequence
  Description of Artificial Sequence: Synthetic oligonucleotide
  Target: SCNA; (-) strand; PAM type: YTN; PAM sequence: TTC
attaaacaaatgtttgtgag

SEQ ID NO: 47318 - DNA, 20 bp, Artificial Sequence
  Description of Artificial Sequence: Synthetic oligonucleotide
  Target: SCNA; (-) strand; PAM type: YTN; PAM sequence: TTC
attcattaaacaaatgtttg

SEQ ID NO: 47319 - DNA, 20 bp, Artificial Sequence
  Description of Artificial Sequence: Synthetic oligonucleotide
  Target: SCNA; (-) strand; PAM type: YTN; PAM sequence: TTA
ttcattcattaaacaaatgt

SEQ ID NO: 47320 - DNA, 20 bp, Artificial Sequence
  Description of Artificial Sequence: Synthetic oligonucleotide
  Target: SCNA; (-) strand; PAM type: YTN; PAM sequence: CTT
attcattcattaaacaaatg

SEQ ID NO: 47321 - DNA, 20 bp, Artificial Sequence
  Description of Artificial Sequence: Synthetic oligonucleotide
  Target: SCNA; (-) strand; PAM type: YTN; PAM sequence: TTC
acttattcattcattaaaca

SEQ ID NO: 47322 - DNA, 20 bp, Artificial Sequence
  Description of Artificial Sequence: Synthetic oligonucleotide
  Target: SCNA; (-) strand; PAM type: YTN; PAM sequence: TTT
cacttattcattcattaaac

SEQ ID NO: 47323 - DNA, 20 bp, Artificial Sequence
  Description of Artificial Sequence: Synthetic oligonucleotide
  Target: SCNA; (-) strand; PAM type: YTN; PAM sequence: CTT
tcacttattcattcattaaa

SEQ ID NO: 47324 - DNA, 20 bp, Artificial Sequence
  Description of Artificial Sequence: Synthetic oligonucleotide
  Target: SCNA; (-) strand; PAM type: YTN; PAM sequence: TTG
gactttcacttattcattca

SEQ ID NO: 47325 - DNA, 20 bp, Artificial Sequence
  Description of Artificial Sequence: Synthetic oligonucleotide
  Target: SCNA; (-) strand; PAM type: YTN; PAM sequence: TTC
cattggactttcacttattc

SEQ ID NO: 47326 - DNA, 20 bp, Artificial Sequence
  Description of Artificial Sequence: Synthetic oligonucleotide
  Target: SCNA; (-) strand; PAM type: YTN; PAM sequence: TTT
ccattggactttcacttatt

SEQ ID NO: 47327 - DNA, 20 bp, Artificial Sequence
  Description of Artificial Sequence: Synthetic oligonucleotide
  Target: SCNA; (-) strand; PAM type: YTN; PAM sequence: TTT
tccattggactttcacttat

SEQ ID NO: 47328 - DNA, 20 bp, Artificial Sequence
  Description of Artificial Sequence: Synthetic oligonucleotide
  Target: SCNA; (-) strand; PAM type: YTN; PAM sequence: TTC
aacagtgtaattttccattg

SEQ ID NO: 47329 - DNA, 20 bp, Artificial Sequence
  Description of Artificial Sequence: Synthetic oligonucleotide
  Target: SCNA; (-) strand; PAM type: YTN; PAM sequence: TTG
taaattcaacagtgtaattt

SEQ ID NO: 47330 - DNA, 20 bp, Artificial Sequence
  Description of Artificial Sequence: Synthetic oligonucleotide
  Target: SCNA; (-) strand; PAM type: YTN; PAM sequence: CTA
aaaccattgtaaattcaaca

SEQ ID NO: 47331 - DNA, 20 bp, Artificial Sequence
  Description of Artificial Sequence: Synthetic oligonucleotide
  Target: SCNA; (-) strand; PAM type: YTN; PAM sequence: CTC
taaaaccattgtaaattcaa

SEQ ID NO: 47332 - DNA, 20 bp, Artificial Sequence
  Description of Artificial Sequence: Synthetic oligonucleotide
  Target: SCNA; (-) strand; PAM type: YTN; PAM sequence: TTA
gagatgtacctctaaaacca

SEQ ID NO: 47333 - DNA, 20 bp, Artificial Sequence
  Description of Artificial Sequence: Synthetic oligonucleotide
  Target: SCNA; (-) strand; PAM type: YTN; PAM sequence: TTT
agagatgtacctctaaaacc

SEQ ID NO: 47334 - DNA, 20 bp, Artificial Sequence
  Description of Artificial Sequence: Synthetic oligonucleotide
  Target: SCNA; (-) strand; PAM type: YTN; PAM sequence: CTA
aataaatcaacaaatttaga

SEQ ID NO: 47335 - DNA, 20 bp, Artificial Sequence
  Description of Artificial Sequence: Synthetic oligonucleotide
  Target: SCNA; (-) strand; PAM type: YTN; PAM sequence: TTA
gcagtgaaaatgtgacaatg

SEQ ID NO: 47336 - DNA, 20 bp, Artificial Sequence
  Description of Artificial Sequence: Synthetic oligonucleotide
  Target: SCNA; (-) strand; PAM type: YTN; PAM sequence: TTT
agcagtgaaaatgtgacaat

SEQ ID NO: 47337 - DNA, 20 bp, Artificial Sequence
  Description of Artificial Sequence: Synthetic oligonucleotide
  Target: SCNA; (-) strand; PAM type: YTN; PAM sequence: TTA
atgaataatatgaaatttag

SEQ ID NO: 47338 - DNA, 20 bp, Artificial Sequence
  Description of Artificial Sequence: Synthetic oligonucleotide
  Target: SCNA; (-) strand; PAM type: YTN; PAM sequence: TTT
aatgaataatatgaaattta

SEQ ID NO: 47339 - DNA, 20 bp, Artificial Sequence
  Description of Artificial Sequence: Synthetic oligonucleotide
  Target: SCNA; (-) strand; PAM type: YTN; PAM sequence: CTT
taatgaataatatgaaattt

SEQ ID NO: 47340 - DNA, 20 bp, Artificial Sequence
  Description of Artificial Sequence: Synthetic oligonucleotide
  Target: SCNA; (-) strand; PAM type: YTN; PAM sequence: TTC
tttaatgaataatatgaaat

SEQ ID NO: 47341 - DNA, 20 bp, Artificial Sequence
  Description of Artificial Sequence: Synthetic oligonucleotide
  Target: SCNA; (-) strand; PAM type: YTN; PAM sequence: TTT
ctttaatgaataatatgaaa

SEQ ID NO: 47342 - DNA, 20 bp, Artificial Sequence
  Description of Artificial Sequence: Synthetic oligonucleotide
  Target: SCNA; (-) strand; PAM type: YTN; PAM sequence: CTT
tctttaatgaataatatgaa

SEQ ID NO: 47343 - DNA, 20 bp, Artificial Sequence
  Description of Artificial Sequence: Synthetic oligonucleotide
  Target: SCNA; (-) strand; PAM type: YTN; PAM sequence: CTG
cctttctttaatgaataata

SEQ ID NO: 47344 - DNA, 20 bp, Artificial Sequence
  Description of Artificial Sequence: Synthetic oligonucleotide
  Target: SCNA; (-) strand; PAM type: YTN; PAM sequence: CTC
caacactgcctttctttaat

SEQ ID NO: 47345 - DNA, 20 bp, Artificial Sequence
  Description of Artificial Sequence: Synthetic oligonucleotide
  Target: SCNA; (-) strand; PAM type: YTN; PAM sequence: CTC
tccaacactgcctttcttta

SEQ ID NO: 47346 - DNA, 20 bp, Artificial Sequence
  Description of Artificial Sequence: Synthetic oligonucleotide
  Target: SCNA; (-) strand; PAM type: YTN; PAM sequence: CTA
taaaactctccaacactgcc

SEQ ID NO: 47347 - DNA, 20 bp, Artificial Sequence
  Description of Artificial Sequence: Synthetic oligonucleotide
  Target: SCNA; (-) strand; PAM type: YTN; PAM sequence: CTG
tcaactataaaactctccaa

SEQ ID NO: 47348 - DNA, 20 bp, Artificial Sequence
  Description of Artificial Sequence: Synthetic oligonucleotide
  Target: SCNA; (-) strand; PAM type: YTN; PAM sequence: TTC
atctgtcaactataaaactc

SEQ ID NO: 47349 - DNA, 20 bp, Artificial Sequence
  Description of Artificial Sequence: Synthetic oligonucleotide
  Target: SCNA; (-) strand; PAM type: YTN; PAM sequence: TTA
tagataattcatctgtcaac

SEQ ID NO: 47350 - DNA, 20 bp, Artificial Sequence
  Description of Artificial Sequence: Synthetic oligonucleotide
  Target: SCNA; (-) strand; PAM type: YTN; PAM sequence: TTA
gaagttatagataattcatc

SEQ ID NO: 47351 - DNA, 20 bp, Artificial Sequence
  Description of Artificial Sequence: Synthetic oligonucleotide
  Target: SCNA; (-) strand; PAM type: YTN; PAM sequence: CTG
agtatattagaagttataga

SEQ ID NO: 47352 - DNA, 20 bp, Artificial Sequence
  Description of Artificial Sequence: Synthetic oligonucleotide
  Target: SCNA; (-) strand; PAM type: YTN; PAM sequence: CTA
gaaaaacatgatgtctgagt

SEQ ID NO: 47353 - DNA, 20 bp, Artificial Sequence
  Description of Artificial Sequence: Synthetic oligonucleotide
  Target: SCNA; (-) strand; PAM type: YTN; PAM sequence: TTA
catgctagaaaaacatgatg

SEQ ID NO: 47354 - DNA, 20 bp, Artificial Sequence
  Description of Artificial Sequence: Synthetic oligonucleotide
  Target: SCNA; (-) strand; PAM type: YTN; PAM sequence: TTA
aaagttacatgctagaaaaa

SEQ ID NO: 47355 - DNA, 20 bp, Artificial Sequence
  Description of Artificial Sequence: Synthetic oligonucleotide
  Target: SCNA; (-) strand; PAM type: YTN; PAM sequence: TTT
aaaagttacatgctagaaaa

SEQ ID NO: 47356 - DNA, 20 bp, Artificial Sequence
  Description of Artificial Sequence: Synthetic oligonucleotide
  Target: SCNA; (-) strand; PAM type: YTN; PAM sequence: TTT
taaaagttacatgctagaaa

SEQ ID NO: 47357 - DNA, 20 bp, Artificial Sequence
  Description of Artificial Sequence: Synthetic oligonucleotide
  Target: SCNA; (-) strand; PAM type: YTN; PAM sequence: TTA
tattttaaaagttacatgct

SEQ ID NO: 47358 - DNA, 20 bp, Artificial Sequence
  Description of Artificial Sequence: Synthetic oligonucleotide
  Target: SCNA; (-) strand; PAM type: YTN; PAM sequence: TTT
atattttaaaagttacatgc

SEQ ID NO: 47359 - DNA, 20 bp, Artificial Sequence
  Description of Artificial Sequence: Synthetic oligonucleotide
  Target: SCNA; (-) strand; PAM type: YTN; PAM sequence: TTG
gagagtttatattttaaaag

SEQ ID NO: 47360 - DNA, 20 bp, Artificial Sequence
  Description of Artificial Sequence: Synthetic oligonucleotide
  Target: SCNA; (-) strand; PAM type: YTN; PAM sequence: TTA
aatgttggagagtttatatt

SEQ ID NO: 47361 - DNA, 20 bp, Artificial Sequence
  Description of Artificial Sequence: Synthetic oligonucleotide
  Target: SCNA; (-) strand; PAM type: YTN; PAM sequence: TTT
aaatgttggagagtttatat

SEQ ID NO: 47362 - DNA, 20 bp, Artificial Sequence
  Description of Artificial Sequence: Synthetic oligonucleotide
  Target: SCNA; (-) strand; PAM type: YTN; PAM sequence: CTT
taaatgttggagagtttata

SEQ ID NO: 47363 - DNA, 20 bp, Artificial Sequence
  Description of Artificial Sequence: Synthetic oligonucleotide
  Target: SCNA; (-) strand; PAM type: YTN; PAM sequence: TTA
aaactttaaatgttggagag

SEQ ID NO: 47364 - DNA, 20 bp, Artificial Sequence
  Description of Artificial Sequence: Synthetic oligonucleotide
  Target: SCNA; (-) strand; PAM type: YTN; PAM sequence: CTA
aaaagtgttaaaactttaaa

SEQ ID NO: 47365 - DNA, 20 bp, Artificial Sequence
  Description of Artificial Sequence: Synthetic oligonucleotide
  Target: SCNA; (-) strand; PAM type: YTN; PAM sequence: TTA
ctaaaaagtgttaaaacttt

SEQ ID NO: 47366 - DNA, 20 bp, Artificial Sequence
  Description of Artificial Sequence: Synthetic oligonucleotide
  Target: SCNA; (-) strand; PAM type: YTN; PAM sequence: TTA
aaaaattactaaaaagtgtt

SEQ ID NO: 47367 - DNA, 20 bp, Artificial Sequence
  Description of Artificial Sequence: Synthetic oligonucleotide
  Target: SCNA; (-) strand; PAM type: YTN; PAM sequence: CTT
aaaaaattactaaaaagtgt

SEQ ID NO: 47368 - DNA, 20 bp, Artificial Sequence
  Description of Artificial Sequence: Synthetic oligonucleotide
  Target: SCNA; (-) strand; PAM type: YTN; PAM sequence: TTC
ttaaaaaattactaaaaagt

SEQ ID NO: 47369 - DNA, 20 bp, Artificial Sequence
  Description of Artificial Sequence: Synthetic oligonucleotide
  Target: SCNA; (-) strand; PAM type: YTN; PAM sequence: TTT
cttaaaaaattactaaaaag

SEQ ID NO: 47370 - DNA, 20 bp, Artificial Sequence
  Description of Artificial Sequence: Synthetic oligonucleotide
  Target: SCNA; (-) strand; PAM type: YTN; PAM sequence: CTG
tcatttcttaaaaaattact

SEQ ID NO: 47371 - DNA, 20 bp, Artificial Sequence
  Description of Artificial Sequence: Synthetic oligonucleotide
  Target: SCNA; (-) strand; PAM type: YTN; PAM sequence: TTG
atctgtcatttcttaaaaaa

SEQ ID NO: 47372 - DNA, 20 bp, Artificial Sequence
  Description of Artificial Sequence: Synthetic oligonucleotide
  Target: SCNA; (-) strand; PAM type: YTN; PAM sequence: CTA
ttgatctgtcatttcttaaa

SEQ ID NO: 47373 - DNA, 20 bp, Artificial Sequence
  Description of Artificial Sequence: Synthetic oligonucleotide
  Target: SCNA; (-) strand; PAM type: YTN; PAM sequence: CTA
ctattgatctgtcatttctt

SEQ ID NO: 47374 - DNA, 20 bp, Artificial Sequence
  Description of Artificial Sequence: Synthetic oligonucleotide
  Target: SCNA; (-) strand; PAM type: YTN; PAM sequence: TTA
tggaaagctactattgatct

SEQ ID NO: 47375 - DNA, 20 bp, Artificial Sequence
  Description of Artificial Sequence: Synthetic oligonucleotide
  Target: SCNA; (-) strand; PAM type: YTN; PAM sequence: TTT
atggaaagctactattgatc

SEQ ID NO: 47376 - DNA, 20 bp, Artificial Sequence
  Description of Artificial Sequence: Synthetic oligonucleotide
  Target: SCNA; (-) strand; PAM type: YTN; PAM sequence: TTA
tttatggaaagctactattg

SEQ ID NO: 47377 - DNA, 20 bp, Artificial Sequence
  Description of Artificial Sequence: Synthetic oligonucleotide
  Target: SCNA; (-) strand; PAM type: YTN; PAM sequence: TTT
atttatggaaagctactatt

SEQ ID NO: 47378 - DNA, 20 bp, Artificial Sequence
  Description of Artificial Sequence: Synthetic oligonucleotide
  Target: SCNA; (-) strand; PAM type: YTN; PAM sequence: TTT
tatttatggaaagctactat

SEQ ID NO: 47379 - DNA, 20 bp, Artificial Sequence
  Description of Artificial Sequence: Synthetic oligonucleotide
  Target: SCNA; (-) strand; PAM type: YTN; PAM sequence: CTT
ttatttatggaaagctacta

SEQ ID NO: 47380 - DNA, 20 bp, Artificial Sequence
  Description of Artificial Sequence: Synthetic oligonucleotide
  Target: SCNA; (-) strand; PAM type: YTN; PAM sequence: TTA
ataggcttttatttatggaa

SEQ ID NO: 47381 - DNA, 20 bp, Artificial Sequence
  Description of Artificial Sequence: Synthetic oligonucleotide
  Target: SCNA; (-) strand; PAM type: YTN; PAM sequence: TTA
tacaaattaataggctttta

SEQ ID NO: 47382 - DNA, 20 bp, Artificial Sequence
  Description of Artificial Sequence: Synthetic oligonucleotide
  Target: SCNA; (-) strand; PAM type: YTN; PAM sequence: TTA
tgttatacaaattaataggc

SEQ ID NO: 47383 - DNA, 20 bp, Artificial Sequence
  Description of Artificial Sequence: Synthetic oligonucleotide
  Target: SCNA; (-) strand; PAM type: YTN; PAM sequence: TTG
ttatgttatacaaattaata

SEQ ID NO: 47384 - DNA, 20 bp, Artificial Sequence
  Description of Artificial Sequence: Synthetic oligonucleotide
  Target: SCNA; (-) strand; PAM type: YTN; PAM sequence: TTT
gttatgttatacaaattaat

SEQ ID NO: 47385 - DNA, 20 bp, Artificial Sequence
  Description of Artificial Sequence: Synthetic oligonucleotide
  Target: SCNA; (-) strand; PAM type: YTN; PAM sequence: TTT
tgttatgttatacaaattaa

SEQ ID NO: 47386 - DNA, 20 bp, Artificial Sequence
  Description of Artificial Sequence: Synthetic oligonucleotide
  Target: SCNA; (-) strand; PAM type: YTN; PAM sequence: CTG
aattttgttatgttatacaa

SEQ ID NO: 47387 - DNA, 20 bp, Artificial Sequence
  Description of Artificial Sequence: Synthetic oligonucleotide
  Target: SCNA; (-) strand; PAM type: YTN; PAM sequence: TTG
cactgaattttgttatgtta

SEQ ID NO: 47388 - DNA, 20 bp, Artificial Sequence
  Description of Artificial Sequence: Synthetic oligonucleotide
  Target: SCNA; (-) strand; PAM type: YTN; PAM sequence: TTA
tgttgcactgaattttgtta

SEQ ID NO: 47389 - DNA, 20 bp, Artificial Sequence
  Description of Artificial Sequence: Synthetic oligonucleotide
  Target: SCNA; (-) strand; PAM type: YTN; PAM sequence: TTT
atgttgcactgaattttgtt

SEQ ID NO: 47390 - DNA, 20 bp, Artificial Sequence
  Description of Artificial Sequence: Synthetic oligonucleotide
  Target: SCNA; (-) strand; PAM type: YTN; PAM sequence: CTA
tatgaatttatgttgcactg

SEQ ID NO: 47391 - DNA, 20 bp, Artificial Sequence
  Description of Artificial Sequence: Synthetic oligonucleotide
  Target: SCNA; (-) strand; PAM type: YTN; PAM sequence: TTG
taggagtactatatgaattt

SEQ ID NO: 47392 - DNA, 20 bp, Artificial Sequence
  Description of Artificial Sequence: Synthetic oligonucleotide
  Target: SCNA; (-) strand; PAM type: YTN; PAM sequence: CTT
gtaggagtactatatgaatt

SEQ ID NO: 47393 - DNA, 20 bp, Artificial Sequence
  Description of Artificial Sequence: Synthetic oligonucleotide
  Target: SCNA; (-) strand; PAM type: YTN; PAM sequence: TTC
ttgtaggagtactatatgaa

SEQ ID NO: 47394 - DNA, 20 bp, Artificial Sequence
  Description of Artificial Sequence: Synthetic oligonucleotide
  Target: SCNA; (-) strand; PAM type: YTN; PAM sequence: TTT
cttgtaggagtactatatga

SEQ ID NO: 47395 - DNA, 20 bp, Artificial Sequence
  Description of Artificial Sequence: Synthetic oligonucleotide
  Target: SCNA; (-) strand; PAM type: YTN; PAM sequence: CTA
tagatttcttgtaggagtac

SEQ ID NO: 47396 - DNA, 20 bp, Artificial Sequence
  Description of Artificial Sequence: Synthetic oligonucleotide
  Target: SCNA; (-) strand; PAM type: YTN; PAM sequence: CTC
ctatagatttcttgtaggag

SEQ ID NO: 47397 - DNA, 20 bp, Artificial Sequence
  Description of Artificial Sequence: Synthetic oligonucleotide
  Target: SCNA; (-) strand; PAM type: YTN; PAM sequence: TTA
ctcctatagatttcttgtag

SEQ ID NO: 47398 - DNA, 20 bp, Artificial Sequence
  Description of Artificial Sequence: Synthetic oligonucleotide
  Target: SCNA; (-) strand; PAM type: YTN; PAM sequence: TTT
actcctatagatttcttgta

SEQ ID NO: 47399 - DNA, 20 bp, Artificial Sequence
  Description of Artificial Sequence: Synthetic oligonucleotide
  Target: SCNA; (-) strand; PAM type: YTN; PAM sequence: TTT
tactcctatagatttcttgt

SEQ ID NO: 47400 - DNA, 20 bp, Artificial Sequence
  Description of Artificial Sequence: Synthetic oligonucleotide
  Target: SCNA; (-) strand; PAM type: YTN; PAM sequence: TTA
taatcataattttactccta

SEQ ID NO: 47401 - DNA, 20 bp, Artificial Sequence
  Description of Artificial Sequence: Synthetic oligonucleotide
  Target: SCNA; (-) strand; PAM type: YTN; PAM sequence: TTT
ataatcataattttactcct

SEQ ID NO: 47402 - DNA, 20 bp, Artificial Sequence
  Description of Artificial Sequence: Synthetic oligonucleotide
  Target: SCNA; (-) strand; PAM type: YTN; PAM sequence: TTT
tataatcataattttactcc

SEQ ID NO: 47403 - DNA, 20 bp, Artificial Sequence
  Description of Artificial Sequence: Synthetic oligonucleotide
  Target: SCNA; (-) strand; PAM type: YTN; PAM sequence: TTT
ttataatcataattttactc

SEQ ID NO: 47404 - DNA, 20 bp, Artificial Sequence
  Description of Artificial Sequence: Synthetic oligonucleotide
  Target: SCNA; (-) strand; PAM type: YTN; PAM sequence: TTG
atttttataatcataatttt

SEQ ID NO: 47405 - DNA, 20 bp, Artificial Sequence
  Description of Artificial Sequence: Synthetic oligonucleotide
  Target: SCNA; (-) strand; PAM type: YTN; PAM sequence: CTG
ttgatttttataatcataat

SEQ ID NO: 47406 - DNA, 20 bp, Artificial Sequence
  Description of Artificial Sequence: Synthetic oligonucleotide
  Target: SCNA; (-) strand; PAM type: YTN; PAM sequence: TTA
agtctgttgatttttataat

SEQ ID NO: 47407 - DNA, 20 bp, Artificial Sequence
  Description of Artificial Sequence: Synthetic oligonucleotide
  Target: SCNA; (-) strand; PAM type: YTN; PAM sequence: TTT
aagtctgttgatttttataa

SEQ ID NO: 47408 - DNA, 20 bp, Artificial Sequence
  Description of Artificial Sequence: Synthetic oligonucleotide
  Target: SCNA; (-) strand; PAM type: YTN; PAM sequence: TTG
tttaagtctgttgattttta

SEQ ID NO: 47409 - DNA, 20 bp, Artificial Sequence
  Description of Artificial Sequence: Synthetic oligonucleotide
  Target: SCNA; (-) strand; PAM type: YTN; PAM sequence: TTT
gtttaagtctgttgattttt

SEQ ID NO: 47410 - DNA, 20 bp, Artificial Sequence
  Description of Artificial Sequence: Synthetic oligonucleotide
  Target: SCNA; (-) strand; PAM type: YTN; PAM sequence: TTG
tttgtttaagtctgttgatt

SEQ ID NO: 47411 - DNA, 20 bp, Artificial Sequence
  Description of Artificial Sequence: Synthetic oligonucleotide
  Target: SCNA; (-) strand; PAM type: YTN; PAM sequence: TTT
gtttgtttaagtctgttgat

SEQ ID NO: 47412 - DNA, 20 bp, Artificial Sequence
  Description of Artificial Sequence: Synthetic oligonucleotide
  Target: SCNA; (-) strand; PAM type: YTN; PAM sequence: TTA
tttgtttgtttaagtctgtt

SEQ ID NO: 47413 - DNA, 20 bp, Artificial Sequence
  Description of Artificial Sequence: Synthetic oligonucleotide
  Target: SCNA; (-) strand; PAM type: YTN; PAM sequence: CTG
ttatttgtttgtttaagtct

SEQ ID NO: 47414 - DNA, 20 bp, Artificial Sequence
  Description of Artificial Sequence: Synthetic oligonucleotide
  Target: SCNA; (-) strand; PAM type: YTN; PAM sequence: TTG
aaagctgttatttgtttgtt

SEQ ID NO: 47415 - DNA, 20 bp, Artificial Sequence
  Description of Artificial Sequence: Synthetic oligonucleotide
  Target: SCNA; (-) strand; PAM type: YTN; PAM sequence: TTA
attgaaagctgttatttgtt

SEQ ID NO: 47416 - DNA, 20 bp, Artificial Sequence
  Description of Artificial Sequence: Synthetic oligonucleotide
  Target: SCNA; (-) strand; PAM type: YTN; PAM sequence: CTT
aattgaaagctgttatttgt

SEQ ID NO: 47417 - DNA, 20 bp, Artificial Sequence
  Description of Artificial Sequence: Synthetic oligonucleotide
  Target: SCNA; (-) strand; PAM type: YTN; PAM sequence: CTA
taaacttaattgaaagctgt

SEQ ID NO: 47418 - DNA, 20 bp, Artificial Sequence
  Description of Artificial Sequence: Synthetic oligonucleotide
  Target: SCNA; (-) strand; PAM type: YTN; PAM sequence: TTG
gtatctataaacttaattga

SEQ ID NO: 47419 - DNA, 20 bp, Artificial Sequence
  Description of Artificial Sequence: Synthetic oligonucleotide
  Target: SCNA; (-) strand; PAM type: YTN; PAM sequence: TTT
ggtatctataaacttaattg

SEQ ID NO: 47420 - DNA, 20 bp, Artificial Sequence
  Description of Artificial Sequence: Synthetic oligonucleotide
  Target: SCNA; (-) strand; PAM type: YTN; PAM sequence: CTT
tggtatctataaacttaatt

SEQ ID NO: 47421 - DNA, 20 bp, Artificial Sequence
  Description of Artificial Sequence: Synthetic oligonucleotide
  Target: SCNA; (-) strand; PAM type: YTN; PAM sequence: TTG
aatgtctttggtatctataa

SEQ ID NO: 47422 - DNA, 20 bp, Artificial Sequence
  Description of Artificial Sequence: Synthetic oligonucleotide
  Target: SCNA; (-) strand; PAM type: YTN; PAM sequence: TTA
aaggttgaatgtctttggta

SEQ ID NO: 47423 - DNA, 20 bp, Artificial Sequence
  Description of Artificial Sequence: Synthetic oligonucleotide
  Target: SCNA; (-) strand; PAM type: YTN; PAM sequence: TTA
cacagtgggatgttaaaggt

SEQ ID NO: 47424 - DNA, 20 bp, Artificial Sequence
  Description of Artificial Sequence: Synthetic oligonucleotide
  Target: SCNA; (-) strand; PAM type: YTN; PAM sequence: TTT
acacagtgggatgttaaagg

SEQ ID NO: 47425 - DNA, 20 bp, Artificial Sequence
  Description of Artificial Sequence: Synthetic oligonucleotide
  Target: SCNA; (-) strand; PAM type: YTN; PAM sequence: TTT
tacacagtgggatgttaaag

SEQ ID NO: 47426 - DNA, 20 bp, Artificial Sequence
  Description of Artificial Sequence: Synthetic oligonucleotide
  Target: SCNA; (-) strand; PAM type: YTN; PAM sequence: TTG
attttacacagtgggatgtt

SEQ ID NO: 47427 - DNA, 20 bp, Artificial Sequence
  Description of Artificial Sequence: Synthetic oligonucleotide
  Target: SCNA; (-) strand; PAM type: YTN; PAM sequence: TTT
gattttacacagtgggatgt

SEQ ID NO: 47428 - DNA, 20 bp, Artificial Sequence
  Description of Artificial Sequence: Synthetic oligonucleotide
  Target: SCNA; (-) strand; PAM type: YTN; PAM sequence: TTC
ccatttgattttacacagtg

SEQ ID NO: 47429 - DNA, 20 bp, Artificial Sequence
  Description of Artificial Sequence: Synthetic oligonucleotide
  Target: SCNA; (-) strand; PAM type: YTN; PAM sequence: TTT
cccatttgattttacacagt

SEQ ID NO: 47430 - DNA, 20 bp, Artificial Sequence
  Description of Artificial Sequence: Synthetic oligonucleotide
  Target: SCNA; (-) strand; PAM type: YTN; PAM sequence: CTT
tcccatttgattttacacag

SEQ ID NO: 47431 - DNA, 20 bp, Artificial Sequence
  Description of Artificial Sequence: Synthetic oligonucleotide
  Target: SCNA; (-) strand; PAM type: YTN; PAM sequence: TTA
tcctttcccatttgatttta

SEQ ID NO: 47432 - DNA, 20 bp, Artificial Sequence
  Description of Artificial Sequence: Synthetic oligonucleotide
  Target: SCNA; (-) strand; PAM type: YTN; PAM sequence: TTT
atcctttcccatttgatttt

SEQ ID NO: 47433 - DNA, 20 bp, Artificial Sequence
  Description of Artificial Sequence: Synthetic oligonucleotide
  Target: SCNA; (-) strand; PAM type: YTN; PAM sequence: TTT
tatcctttcccatttgattt

SEQ ID NO: 47434 - DNA, 20 bp, Artificial Sequence
  Description of Artificial Sequence: Synthetic oligonucleotide
  Target: SCNA; (-) strand; PAM type: YTN; PAM sequence: CTT
ttatcctttcccatttgatt

SEQ ID NO: 47435 - DNA, 20 bp, Artificial Sequence
  Description of Artificial Sequence: Synthetic oligonucleotide
  Target: SCNA; (-) strand; PAM type: YTN; PAM sequence: TTG
gtccttttatcctttcccat

SEQ ID NO: 47436 - DNA, 20 bp, Artificial Sequence
  Description of Artificial Sequence: Synthetic oligonucleotide
  Target: SCNA; (-) strand; PAM type: YTN; PAM sequence: TTT
ggtccttttatcctttccca

SEQ ID NO: 47437 - DNA, 20 bp, Artificial Sequence
  Description of Artificial Sequence: Synthetic oligonucleotide
  Target: SCNA; (-) strand; PAM type: YTN; PAM sequence: CTT
tggtccttttatcctttccc

SEQ ID NO: 47438 - DNA, 20 bp, Artificial Sequence
  Description of Artificial Sequence: Synthetic oligonucleotide
  Target: SCNA; (-) strand; PAM type: YTN; PAM sequence: CTA
accatagctttggtcctttt

SEQ ID NO: 47439 - DNA, 20 bp, Artificial Sequence
  Description of Artificial Sequence: Synthetic oligonucleotide
  Target: SCNA; (-) strand; PAM type: YTN; PAM sequence: TTA
ctaaccatagctttggtcct

SEQ ID NO: 47440 - DNA, 20 bp, Artificial Sequence
  Description of Artificial Sequence: Synthetic oligonucleotide
  Target: SCNA; (-) strand; PAM type: YTN; PAM sequence: TTA
tattactaaccatagctttg

SEQ ID NO: 47441 - DNA, 20 bp, Artificial Sequence
  Description of Artificial Sequence: Synthetic oligonucleotide
  Target: SCNA; (-) strand; PAM type: YTN; PAM sequence: TTG
taggtagggcagcaatcaat

SEQ ID NO: 47442 - DNA, 20 bp, Artificial Sequence
  Description of Artificial Sequence: Synthetic oligonucleotide
  Target: SCNA; (-) strand; PAM type: YTN; PAM sequence: TTT
gtaggtagggcagcaatcaa

SEQ ID NO: 47443 - DNA, 20 bp, Artificial Sequence
  Description of Artificial Sequence: Synthetic oligonucleotide
  Target: SCNA; (-) strand; PAM type: YTN; PAM sequence: TTA
gtttgtaggtagggcagcaa

SEQ ID NO: 47444 - DNA, 20 bp, Artificial Sequence
  Description of Artificial Sequence: Synthetic oligonucleotide
  Target: SCNA; (-) strand; PAM type: YTN; PAM sequence: TTA
aaacaaattagtttgtaggt

SEQ ID NO: 47445 - DNA, 20 bp, Artificial Sequence
  Description of Artificial Sequence: Synthetic oligonucleotide
  Target: SCNA; (-) strand; PAM type: YTN; PAM sequence: CTA
gcacagatattaaaacaaat

SEQ ID NO: 47446 - DNA, 20 bp, Artificial Sequence
  Description of Artificial Sequence: Synthetic oligonucleotide
  Target: SCNA; (-) strand; PAM type: YTN; PAM sequence: TTC
tagcacagatattaaaacaa

SEQ ID NO: 47447 - DNA, 20 bp, Artificial Sequence
  Description of Artificial Sequence: Synthetic oligonucleotide
  Target: SCNA; (-) strand; PAM type: YTN; PAM sequence: CTG
gttctagcacagatattaaa

SEQ ID NO: 47448 - DNA, 20 bp, Artificial Sequence
  Description of Artificial Sequence: Synthetic oligonucleotide
  Target: SCNA; (-) strand; PAM type: YTN; PAM sequence: TTA
aaaggggtaacatactggtt

SEQ ID NO: 47449 - DNA, 20 bp, Artificial Sequence
  Description of Artificial Sequence: Synthetic oligonucleotide
  Target: SCNA; (-) strand; PAM type: YTN; PAM sequence: CTA
aagttaaaaggggtaacata

SEQ ID NO: 47450 - DNA, 20 bp, Artificial Sequence
  Description of Artificial Sequence: Synthetic oligonucleotide
  Target: SCNA; (-) strand; PAM type: YTN; PAM sequence: TTA
gctaaagttaaaaggggtaa

SEQ ID NO: 47451 - DNA, 20 bp, Artificial Sequence
  Description of Artificial Sequence: Synthetic oligonucleotide
  Target: SCNA; (-) strand; PAM type: YTN; PAM sequence: TTT
agctaaagttaaaaggggta

SEQ ID NO: 47452 - DNA, 20 bp, Artificial Sequence
  Description of Artificial Sequence: Synthetic oligonucleotide
  Target: SCNA; (-) strand; PAM type: YTN; PAM sequence: TTA
tttagctaaagttaaaaggg

SEQ ID NO: 47453 - DNA, 20 bp, Artificial Sequence
  Description of Artificial Sequence: Synthetic oligonucleotide
  Target: SCNA; (-) strand; PAM type: YTN; PAM sequence: TTG
tataaacattatttagctaa

SEQ ID NO: 47454 - DNA, 20 bp, Artificial Sequence
  Description of Artificial Sequence: Synthetic oligonucleotide
  Target: SCNA; (-) strand; PAM type: YTN; PAM sequence: TTT
gtataaacattatttagcta

SEQ ID NO: 47455 - DNA, 20 bp, Artificial Sequence
  Description of Artificial Sequence: Synthetic oligonucleotide
  Target: SCNA; (-) strand; PAM type: YTN; PAM sequence: CTG
catagtaaggtttgtataaa

SEQ ID NO: 47456 - DNA, 20 bp, Artificial Sequence
  Description of Artificial Sequence: Synthetic oligonucleotide
  Target: SCNA; (-) strand; PAM type: YTN; PAM sequence: CTC
tgcatagtaaggtttgtata

SEQ ID NO: 47457 - DNA, 20 bp, Artificial Sequence
  Description of Artificial Sequence: Synthetic oligonucleotide
  Target: SCNA; (-) strand; PAM type: YTN; PAM sequence: TTA
aagatagctctgcatagtaa

SEQ ID NO: 47458 - DNA, 20 bp, Artificial Sequence
  Description of Artificial Sequence: Synthetic oligonucleotide
  Target: SCNA; (-) strand; PAM type: YTN; PAM sequence: TTG
ttaaagatagctctgcatag

SEQ ID NO: 47459 - DNA, 20 bp, Artificial Sequence
  Description of Artificial Sequence: Synthetic oligonucleotide
  Target: SCNA; (-) strand; PAM type: YTN; PAM sequence: CTT
gttaaagatagctctgcata

SEQ ID NO: 47460 - DNA, 20 bp, Artificial Sequence
  Description of Artificial Sequence: Synthetic oligonucleotide
  Target: SCNA; (-) strand; PAM type: YTN; PAM sequence: CTC
ttgttaaagatagctctgca

SEQ ID NO: 47461 - DNA, 20 bp, Artificial Sequence
  Description of Artificial Sequence: Synthetic oligonucleotide
  Target: SCNA; (-) strand; PAM type: YTN; PAM sequence: CTC
aatgggatgctcttgttaaa

SEQ ID NO: 47462 - DNA, 20 bp, Artificial Sequence
  Description of Artificial Sequence: Synthetic oligonucleotide
  Target: SCNA; (-) strand; PAM type: YTN; PAM sequence: TTC
ctcaatgggatgctcttgtt

SEQ ID NO: 47463 - DNA, 20 bp, Artificial Sequence
  Description of Artificial Sequence: Synthetic oligonucleotide
  Target: SCNA; (-) strand; PAM type: YTN; PAM sequence: TTT
cctcaatgggatgctcttgt

SEQ ID NO: 47464 - DNA, 20 bp, Artificial Sequence
  Description of Artificial Sequence: Synthetic oligonucleotide
  Target: SCNA; (-) strand; PAM type: YTN; PAM sequence: TTT
tcctcaatgggatgctcttg

SEQ ID NO: 47465 - DNA, 20 bp, Artificial Sequence
  Description of Artificial Sequence: Synthetic oligonucleotide
  Target: SCNA; (-) strand; PAM type: YTN; PAM sequence: TTT
ttcctcaatgggatgctctt

SEQ ID NO: 47466 - DNA, 20 bp, Artificial Sequence
  Description of Artificial Sequence: Synthetic oligonucleotide
  Target: SCNA; (-) strand; PAM type: YTN; PAM sequence: TTT
tttcctcaatgggatgctct

SEQ ID NO: 47467 - DNA, 20 bp, Artificial Sequence
  Description of Artificial Sequence: Synthetic oligonucleotide
  Target: SCNA; (-) strand; PAM type: YTN; PAM sequence: CTT
ttttcctcaatgggatgctc

SEQ ID NO: 47468 - DNA, 20 bp, Artificial Sequence
  Description of Artificial Sequence: Synthetic oligonucleotide
  Target: SCNA; (-) strand; PAM type: YTN; PAM sequence: TTC
ttttttcctcaatgggatgc

SEQ ID NO: 47469 - DNA, 20 bp, Artificial Sequence
  Description of Artificial Sequence: Synthetic oligonucleotide
  Target: SCNA; (-) strand; PAM type: YTN; PAM sequence: TTT
cttttttcctcaatgggatg

SEQ ID NO: 47470 - DNA, 20 bp, Artificial Sequence
  Description of Artificial Sequence: Synthetic oligonucleotide
  Target: SCNA; (-) strand; PAM type: YTN; PAM sequence: TTT
tcttttttcctcaatgggat

SEQ ID NO: 47471 - DNA, 20 bp, Artificial Sequence
  Description of Artificial Sequence: Synthetic oligonucleotide
  Target: SCNA; (-) strand; PAM type: YTN; PAM sequence: CTA
ttttcttttttcctcaatgg

SEQ ID NO: 47472 - DNA, 20 bp, Artificial Sequence
  Description of Artificial Sequence: Synthetic oligonucleotide
  Target: SCNA; (-) strand; PAM type: YTN; PAM sequence: TTC
tattttcttttttcctcaat

SEQ ID NO: 47473 - DNA, 20 bp, Artificial Sequence
  Description of Artificial Sequence: Synthetic oligonucleotide
  Target: SCNA; (-) strand; PAM type: YTN; PAM sequence: TTT
ctattttcttttttcctcaa

SEQ ID NO: 47474 - DNA, 20 bp, Artificial Sequence
  Description of Artificial Sequence: Synthetic oligonucleotide
  Target: SCNA; (-) strand; PAM type: YTN; PAM sequence: CTT
tctattttcttttttcctca

SEQ ID NO: 47475 - DNA, 20 bp, Artificial Sequence
  Description of Artificial Sequence: Synthetic oligonucleotide
  Target: SCNA; (-) strand; PAM type: YTN; PAM sequence: TTC
atatctttctattttctttt

SEQ ID NO: 47476 - DNA, 20 bp, Artificial Sequence
  Description of Artificial Sequence: Synthetic oligonucleotide
  Target: SCNA; (-) strand; PAM type: YTN; PAM sequence: TTT
catatctttctattttcttt

SEQ ID NO: 47477 - DNA, 20 bp, Artificial Sequence
  Description of Artificial Sequence: Synthetic oligonucleotide
  Target: SCNA; (-) strand; PAM type: YTN; PAM sequence: TTT
tcatatctttctattttctt

SEQ ID NO: 47478 - DNA, 20 bp, Artificial Sequence
  Description of Artificial Sequence: Synthetic oligonucleotide
  Target: SCNA; (-) strand; PAM type: YTN; PAM sequence: TTA
gaaaaaagtgaaaattttca

SEQ ID NO: 47479 - DNA, 20 bp, Artificial Sequence
  Description of Artificial Sequence: Synthetic oligonucleotide
  Target: SCNA; (-) strand; PAM type: YTN; PAM sequence: TTG
gtattagaaaaaagtgaaaa

SEQ ID NO: 47480 - DNA, 20 bp, Artificial Sequence
  Description of Artificial Sequence: Synthetic oligonucleotide
  Target: SCNA; (-) strand; PAM type: YTN; PAM sequence: CTG
ttggtattagaaaaaagtga

SEQ ID NO: 47481 - DNA, 20 bp, Artificial Sequence
  Description of Artificial Sequence: Synthetic oligonucleotide
  Target: SCNA; (-) strand; PAM type: YTN; PAM sequence: TTA
tatacagaaatgcaatatca

SEQ ID NO: 47482 - DNA, 20 bp, Artificial Sequence
  Description of Artificial Sequence: Synthetic oligonucleotide
  Target: SCNA; (-) strand; PAM type: YTN; PAM sequence: CTA
tgtcattatatacagaaatg

SEQ ID NO: 47483 - DNA, 20 bp, Artificial Sequence
  Description of Artificial Sequence: Synthetic oligonucleotide
  Target: SCNA; (-) strand; PAM type: YTN; PAM sequence: TTC
tatgtcattatatacagaaa

SEQ ID NO: 47484 - DNA, 20 bp, Artificial Sequence
  Description of Artificial Sequence: Synthetic oligonucleotide
  Target: SCNA; (-) strand; PAM type: YTN; PAM sequence: CTC
atattctatgtcattatata

SEQ ID NO: 47485 - DNA, 20 bp, Artificial Sequence
  Description of Artificial Sequence: Synthetic oligonucleotide
  Target: SCNA; (-) strand; PAM type: YTN; PAM sequence: CTA
cagggaatgctcatattcta

SEQ ID NO: 47486 - DNA, 20 bp, Artificial Sequence
  Description of Artificial Sequence: Synthetic oligonucleotide
  Target: SCNA; (-) strand; PAM type: YTN; PAM sequence: CTG
aactacagggaatgctcata

SEQ ID NO: 47487 - DNA, 20 bp, Artificial Sequence
  Description of Artificial Sequence: Synthetic oligonucleotide
  Target: SCNA; (-) strand; PAM type: YTN; PAM sequence: CTG
tcagtaaaactgaactacag

SEQ ID NO: 47488 - DNA, 20 bp, Artificial Sequence
  Description of Artificial Sequence: Synthetic oligonucleotide
  Target: SCNA; (-) strand; PAM type: YTN; PAM sequence: TTA
ctgtcagtaaaactgaacta

SEQ ID NO: 47489 - DNA, 20 bp, Artificial Sequence
  Description of Artificial Sequence: Synthetic oligonucleotide
  Target: SCNA; (-) strand; PAM type: YTN; PAM sequence: TTG
tgcaatgttactgtcagtaa

SEQ ID NO: 47490 - DNA, 20 bp, Artificial Sequence
  Description of Artificial Sequence: Synthetic oligonucleotide
  Target: SCNA; (-) strand; PAM type: YTN; PAM sequence: TTT
gtgcaatgttactgtcagta

SEQ ID NO: 47491 - DNA, 20 bp, Artificial Sequence
  Description of Artificial Sequence: Synthetic oligonucleotide
  Target: SCNA; (-) strand; PAM type: YTN; PAM sequence: CTA
aaatgatttgtgcaatgtta

SEQ ID NO: 47492 - DNA, 20 bp, Artificial Sequence
  Description of Artificial Sequence: Synthetic oligonucleotide
  Target: SCNA; (-) strand; PAM type: YTN; PAM sequence: CTG
catagcacatagccctaaaa

SEQ ID NO: 47493 - DNA, 20 bp, Artificial Sequence
  Description of Artificial Sequence: Synthetic oligonucleotide
  Target: SCNA; (-) strand; PAM type: YTN; PAM sequence: CTC
tgcatagcacatagccctaa

SEQ ID NO: 47494 - DNA, 20 bp, Artificial Sequence
  Description of Artificial Sequence: Synthetic oligonucleotide
  Target: SCNA; (-) strand; PAM type: YTN; PAM sequence: CTG
tacaatgtctctgcatagca

SEQ ID NO: 47495 - DNA, 20 bp, Artificial Sequence
  Description of Artificial Sequence: Synthetic oligonucleotide
  Target: SCNA; (-) strand; PAM type: YTN; PAM sequence: TTA
actgtacaatgtctctgcat

SEQ ID NO: 47496 - DNA, 20 bp, Artificial Sequence
  Description of Artificial Sequence: Synthetic oligonucleotide
  Target: SCNA; (-) strand; PAM type: YTN; PAM sequence: TTA
atgatgccaattaactgtac

SEQ ID NO: 47497 - DNA, 20 bp, Artificial Sequence
  Description of Artificial Sequence: Synthetic oligonucleotide
  Target: SCNA; (-) strand; PAM type: YTN; PAM sequence: CTT
aatgatgccaattaactgta

SEQ ID NO: 47498 - DNA, 20 bp, Artificial Sequence
  Description of Artificial Sequence: Synthetic oligonucleotide
  Target: SCNA; (-) strand; PAM type: YTN; PAM sequence: TTA
cttaatgatgccaattaact

SEQ ID NO: 47499 - DNA, 20 bp, Artificial Sequence
  Description of Artificial Sequence: Synthetic oligonucleotide
  Target: SCNA; (-) strand; PAM type: YTN; PAM sequence: TTC
aaaatgttacttaatgatgc

SEQ ID NO: 47500 - DNA, 20 bp, Artificial Sequence
  Description of Artificial Sequence: Synthetic oligonucleotide
  Target: SCNA; (-) strand; PAM type: YTN; PAM sequence: TTT
caaaatgttacttaatgatg

SEQ ID NO: 47501 - DNA, 20 bp, Artificial Sequence
  Description of Artificial Sequence: Synthetic oligonucleotide
  Target: SCNA; (-) strand; PAM type: YTN; PAM sequence: CTC
atcatttcaaaatgttactt

SEQ ID NO: 47502 - DNA, 20 bp, Artificial Sequence
  Description of Artificial Sequence: Synthetic oligonucleotide
  Target: SCNA; (-) strand; PAM type: YTN; PAM sequence: TTG
aacacctcatcatttcaaaa

SEQ ID NO: 47503 - DNA, 20 bp, Artificial Sequence
  Description of Artificial Sequence: Synthetic oligonucleotide
  Target: SCNA; (-) strand; PAM type: YTN; PAM sequence: TTT
gaacacctcatcatttcaaa

SEQ ID NO: 47504 - DNA, 20 bp, Artificial Sequence
  Description of Artificial Sequence: Synthetic oligonucleotide
  Target: SCNA; (-) strand; PAM type: YTN; PAM sequence: CTA
catttgaacacctcatcatt

SEQ ID NO: 47505 - DNA, 20 bp, Artificial Sequence
  Description of Artificial Sequence: Synthetic oligonucleotide
  Target: SCNA; (-) strand; PAM type: YTN; PAM sequence: CTA
ctacatttgaacacctcatc

SEQ ID NO: 47506 - DNA, 20 bp, Artificial Sequence
  Description of Artificial Sequence: Synthetic oligonucleotide
  Target: SCNA; (-) strand; PAM type: YTN; PAM sequence: TTA
actactacatttgaacacct

SEQ ID NO: 47507 - DNA, 20 bp, Artificial Sequence
  Description of Artificial Sequence: Synthetic oligonucleotide
  Target: SCNA; (-) strand; PAM type: YTN; PAM sequence: TTT
aactactacatttgaacacc

SEQ ID NO: 47508 - DNA, 20 bp, Artificial Sequence
  Description of Artificial Sequence: Synthetic oligonucleotide
  Target: SCNA; (-) strand; PAM type: YTN; PAM sequence: CTT
taactactacatttgaacac

SEQ ID NO: 47509 - DNA, 20 bp, Artificial Sequence
  Description of Artificial Sequence: Synthetic oligonucleotide
  Target: SCNA; (-) strand; PAM type: YTN; PAM sequence: TTA
gcaatgtccaatcaagcctt

SEQ ID NO: 47510 - DNA, 20 bp, Artificial Sequence
  Description of Artificial Sequence: Synthetic oligonucleotide
  Target: SCNA; (-) strand; PAM type: YTN; PAM sequence: TTT
agcaatgtccaatcaagcct

SEQ ID NO: 47511 - DNA, 20 bp, Artificial Sequence
  Description of Artificial Sequence: Synthetic oligonucleotide
  Target: SCNA; (-) strand; PAM type: YTN; PAM sequence: CTA
gtacccaatttagcaatgtc

SEQ ID NO: 47512 - DNA, 20 bp, Artificial Sequence
  Description of Artificial Sequence: Synthetic oligonucleotide
  Target: SCNA; (-) strand; PAM type: YTN; PAM sequence: TTA
gagatctagtacccaattta

SEQ ID NO: 47513 - DNA, 20 bp, Artificial Sequence
  Description of Artificial Sequence: Synthetic oligonucleotide
  Target: SCNA; (-) strand; PAM type: YTN; PAM sequence: TTT
agagatctagtacccaattt

SEQ ID NO: 47514 - DNA, 20 bp, Artificial Sequence
  Description of Artificial Sequence: Synthetic oligonucleotide
  Target: SCNA; (-) strand; PAM type: YTN; PAM sequence: CTT
tagagatctagtacccaatt

SEQ ID NO: 47515 - DNA, 20 bp, Artificial Sequence
  Description of Artificial Sequence: Synthetic oligonucleotide
  Target: SCNA; (-) strand; PAM type: YTN; PAM sequence: CTC
tttagagatctagtacccaa

SEQ ID NO: 47516 - DNA, 20 bp, Artificial Sequence
  Description of Artificial Sequence: Synthetic oligonucleotide
  Target: SCNA; (-) strand; PAM type: YTN; PAM sequence: TTC
catctctttagagatctagt

SEQ ID NO: 47517 - DNA, 20 bp, Artificial Sequence
  Description of Artificial Sequence: Synthetic oligonucleotide
  Target: SCNA; (-) strand; PAM type: YTN; PAM sequence: CTA
gggggtaaattccatctctt

SEQ ID NO: 47518 - DNA, 20 bp, Artificial Sequence
  Description of Artificial Sequence: Synthetic oligonucleotide
  Target: SCNA; (-) strand; PAM type: YTN; PAM sequence: CTA
ctagggggtaaattccatct

SEQ ID NO: 47519 - DNA, 20 bp, Artificial Sequence
  Description of Artificial Sequence: Synthetic oligonucleotide
  Target: SCNA; (-) strand; PAM type: YTN; PAM sequence: CTG
agacaagtgaaaaaggataa

SEQ ID NO: 47520 - DNA, 20 bp, Artificial Sequence
  Description of Artificial Sequence: Synthetic oligonucleotide
  Target: SCNA; (-) strand; PAM type: YTN; PAM sequence: TTC
caaatctgagacaagtgaaa

SEQ ID NO: 47521 - DNA, 20 bp, Artificial Sequence
  Description of Artificial Sequence: Synthetic oligonucleotide
  Target: SCNA; (-) strand; PAM type: YTN; PAM sequence: CTA
aaagaaatgagttccaaatc

SEQ ID NO: 47522 - DNA, 20 bp, Artificial Sequence
  Description of Artificial Sequence: Synthetic oligonucleotide
  Target: SCNA; (-) strand; PAM type: YTN; PAM sequence: TTC
aacctaaaagaaatgagttc

SEQ ID NO: 47523 - DNA, 20 bp, Artificial Sequence
  Description of Artificial Sequence: Synthetic oligonucleotide
  Target: SCNA; (-) strand; PAM type: YTN; PAM sequence: TTT
caacctaaaagaaatgagtt

SEQ ID NO: 47524 - DNA, 20 bp, Artificial Sequence
  Description of Artificial Sequence: Synthetic oligonucleotide
  Target: SCNA; (-) strand; PAM type: YTN; PAM sequence: TTT
tcaacctaaaagaaatgagt

SEQ ID NO: 47525 - DNA, 20 bp, Artificial Sequence
  Description of Artificial Sequence: Synthetic oligonucleotide
  Target: SCNA; (-) strand; PAM type: YTN; PAM sequence: TTC
caacatgaacataaaatttt

SEQ ID NO: 47526 - DNA, 20 bp, Artificial Sequence
  Description of Artificial Sequence: Synthetic oligonucleotide
  Target: SCNA; (-) strand; PAM type: YTN; PAM sequence: TTT
ccaacatgaacataaaattt

SEQ ID NO: 47527 - DNA, 20 bp, Artificial Sequence
  Description of Artificial Sequence: Synthetic oligonucleotide
  Target: SCNA; (-) strand; PAM type: YTN; PAM sequence: TTA
agtttccaacatgaacataa

SEQ ID NO: 47528 - DNA, 20 bp, Artificial Sequence
  Description of Artificial Sequence: Synthetic oligonucleotide
  Target: SCNA; (-) strand; PAM type: YTN; PAM sequence: TTT
aagtttccaacatgaacata

SEQ ID NO: 47529 - DNA, 20 bp, Artificial Sequence
  Description of Artificial Sequence: Synthetic oligonucleotide
  Target: SCNA; (-) strand; PAM type: YTN; PAM sequence: TTA
aaatttaagtttccaacatg

SEQ ID NO: 47530 - DNA, 20 bp, Artificial Sequence
  Description of Artificial Sequence: Synthetic oligonucleotide
  Target: SCNA; (-) strand; PAM type: YTN; PAM sequence: TTG
ttaaaatttaagtttccaac

SEQ ID NO: 47531 - DNA, 20 bp, Artificial Sequence
  Description of Artificial Sequence: Synthetic oligonucleotide
  Target: SCNA; (-) strand; PAM type: YTN; PAM sequence: TTA
attgttaaaatttaagtttc

SEQ ID NO: 47532 - DNA, 20 bp, Artificial Sequence
  Description of Artificial Sequence: Synthetic oligonucleotide
  Target: SCNA; (-) strand; PAM type: YTN; PAM sequence: TTT
aattgttaaaatttaagttt

SEQ ID NO: 47533 - DNA, 20 bp, Artificial Sequence
  Description of Artificial Sequence: Synthetic oligonucleotide
  Target: SCNA; (-) strand; PAM type: YTN; PAM sequence: TTT
taattgttaaaatttaagtt

SEQ ID NO: 47534 - DNA, 20 bp, Artificial Sequence
  Description of Artificial Sequence: Synthetic oligonucleotide
  Target: SCNA; (-) strand; PAM type: YTN; PAM sequence: CTT
ttaattgttaaaatttaagt

SEQ ID NO: 47535 - DNA, 20 bp, Artificial Sequence
  Description of Artificial Sequence: Synthetic oligonucleotide
  Target: SCNA; (-) strand; PAM type: YTN; PAM sequence: TTC
aagtaatcttttaattgtta

SEQ ID NO: 47536 - DNA, 20 bp, Artificial Sequence
  Description of Artificial Sequence: Synthetic oligonucleotide
  Target: SCNA; (-) strand; PAM type: YTN; PAM sequence: TTT
caagtaatcttttaattgtt

SEQ ID NO: 47537 - DNA, 20 bp, Artificial Sequence
  Description of Artificial Sequence: Synthetic oligonucleotide
  Target: SCNA; (-) strand; PAM type: YTN; PAM sequence: TTG
catttcaagtaatcttttaa

SEQ ID NO: 47538 - DNA, 20 bp, Artificial Sequence
  Description of Artificial Sequence: Synthetic oligonucleotide
  Target: SCNA; (-) strand; PAM type: YTN; PAM sequence: CTC
ccaaaatgacaggcagccgt

SEQ ID NO: 47539 - DNA, 20 bp, Artificial Sequence
  Description of Artificial Sequence: Synthetic oligonucleotide
  Target: SCNA; (-) strand; PAM type: YTN; PAM sequence: CTA
taagaaactcccaaaatgac

SEQ ID NO: 47540 - DNA, 20 bp, Artificial Sequence
  Description of Artificial Sequence: Synthetic oligonucleotide
  Target: SCNA; (-) strand; PAM type: YTN; PAM sequence: CTA
aaaagaatctataagaaact

SEQ ID NO: 47541 - DNA, 20 bp, Artificial Sequence
  Description of Artificial Sequence: Synthetic oligonucleotide
  Target: SCNA; (-) strand; PAM type: YTN; PAM sequence: TTA
tccctaaaaagaatctataa

SEQ ID NO: 47542 - DNA, 20 bp, Artificial Sequence
  Description of Artificial Sequence: Synthetic oligonucleotide
  Target: SCNA; (-) strand; PAM type: YTN; PAM sequence: CTT
atccctaaaaagaatctata

SEQ ID NO: 47543 - DNA, 20 bp, Artificial Sequence
  Description of Artificial Sequence: Synthetic oligonucleotide
  Target: SCNA; (-) strand; PAM type: YTN; PAM sequence: TTC
ttatccctaaaaagaatcta

SEQ ID NO: 47544 - DNA, 20 bp, Artificial Sequence
  Description of Artificial Sequence: Synthetic oligonucleotide
  Target: SCNA; (-) strand; PAM type: YTN; PAM sequence: TTA
acataattcttatccctaaa

SEQ ID NO: 47545 - DNA, 20 bp, Artificial Sequence
  Description of Artificial Sequence: Synthetic oligonucleotide
  Target: SCNA; (-) strand; PAM type: YTN; PAM sequence: TTT
aacataattcttatccctaa

SEQ ID NO: 47546 - DNA, 20 bp, Artificial Sequence
  Description of Artificial Sequence: Synthetic oligonucleotide
  Target: SCNA; (-) strand; PAM type: YTN; PAM sequence: TTT
taacataattcttatcccta

SEQ ID NO: 47547 - DNA, 20 bp, Artificial Sequence
  Description of Artificial Sequence: Synthetic oligonucleotide
  Target: SCNA; (-) strand; PAM type: YTN; PAM sequence: CTG
gttttaacataattcttatc

SEQ ID NO: 47548 - DNA, 20 bp, Artificial Sequence
  Description of Artificial Sequence: Synthetic oligonucleotide
  Target: SCNA; (-) strand; PAM type: YTN; PAM sequence: CTA
gcatctggttttaacataat

SEQ ID NO: 47549 - DNA, 20 bp, Artificial Sequence
  Description of Artificial Sequence: Synthetic oligonucleotide
  Target: SCNA; (-) strand; PAM type: YTN; PAM sequence: TTC
tagcatctggttttaacata

SEQ ID NO: 47550 - DNA, 20 bp, Artificial Sequence
  Description of Artificial Sequence: Synthetic oligonucleotide
  Target: SCNA; (-) strand; PAM type: YTN; PAM sequence: TTA
aagcaattctagcatctggt

SEQ ID NO: 47551 - DNA, 20 bp, Artificial Sequence
  Description of Artificial Sequence: Synthetic oligonucleotide
  Target: SCNA; (-) strand; PAM type: YTN; PAM sequence: CTG
gggaataaaaattaaagcaa

SEQ ID NO: 47552 - DNA, 20 bp, Artificial Sequence
  Description of Artificial Sequence: Synthetic oligonucleotide
  Target: SCNA; (-) strand; PAM type: YTN; PAM sequence: TTG
tcaaaatggaaatgagaaac

SEQ ID NO: 47553 - DNA, 20 bp, Artificial Sequence
  Description of Artificial Sequence: Synthetic oligonucleotide
  Target: SCNA; (-) strand; PAM type: YTN; PAM sequence: TTT
gtcaaaatggaaatgagaaa

SEQ ID NO: 47554 - DNA, 20 bp, Artificial Sequence
  Description of Artificial Sequence: Synthetic oligonucleotide
  Target: SCNA; (-) strand; PAM type: YTN; PAM sequence: CTT
tgtcaaaatggaaatgagaa

SEQ ID NO: 47555 - DNA, 20 bp, Artificial Sequence
  Description of Artificial Sequence: Synthetic oligonucleotide
  Target: SCNA; (-) strand; PAM type: YTN; PAM sequence: CTC
tttgtcaaaatggaaatgag

SEQ ID NO: 47556 - DNA, 20 bp, Artificial Sequence
  Description of Artificial Sequence: Synthetic oligonucleotide
  Target: SCNA; (-) strand; PAM type: YTN; PAM sequence: TTG
ggcctctttgtcaaaatgga

SEQ ID NO: 47557 - DNA, 20 bp, Artificial Sequence
  Description of Artificial Sequence: Synthetic oligonucleotide
  Target: SCNA; (-) strand; PAM type: YTN; PAM sequence: TTT
gggcctctttgtcaaaatgg

SEQ ID NO: 47558 - DNA, 20 bp, Artificial Sequence
  Description of Artificial Sequence: Synthetic oligonucleotide
  Target: SCNA; (-) strand; PAM type: YTN; PAM sequence: TTT
tgggcctctttgtcaaaatg

SEQ ID NO: 47559 - DNA, 20 bp, Artificial Sequence
  Description of Artificial Sequence: Synthetic oligonucleotide
  Target: SCNA; (-) strand; PAM type: YTN; PAM sequence: TTC
atgttttgggcctctttgtc

SEQ ID NO: 47560 - DNA, 20 bp, Artificial Sequence
  Description of Artificial Sequence: Synthetic oligonucleotide
  Target: SCNA; (-) strand; PAM type: YTN; PAM sequence: CTA
ttcatgttttgggcctcttt

SEQ ID NO: 47561 - DNA, 20 bp, Artificial Sequence
  Description of Artificial Sequence: Synthetic oligonucleotide
  Target: SCNA; (-) strand; PAM type: YTN; PAM sequence: CTG
atatgggagaaaaaaacaga

SEQ ID NO: 47562 - DNA, 20 bp, Artificial Sequence
  Description of Artificial Sequence: Synthetic oligonucleotide
  Target: SCNA; (-) strand; PAM type: YTN; PAM sequence: CTC
atgggaactgatatgggaga

SEQ ID NO: 47563 - DNA, 20 bp, Artificial Sequence
  Description of Artificial Sequence: Synthetic oligonucleotide
  Target: SCNA; (-) strand; PAM type: YTN; PAM sequence: CTG
gtctcatgggaactgatatg

SEQ ID NO: 47564 - DNA, 20 bp, Artificial Sequence
  Description of Artificial Sequence: Synthetic oligonucleotide
  Target: SCNA; (-) strand; PAM type: YTN; PAM sequence: CTG
caataacagaaagaatgaag

SEQ ID NO: 47565 - DNA, 20 bp, Artificial Sequence
  Description of Artificial Sequence: Synthetic oligonucleotide
  Target: SCNA; (-) strand; PAM type: YTN; PAM sequence: CTG
caaaatgtaaacctgcaata

SEQ ID NO: 47566 - DNA, 20 bp, Artificial Sequence
  Description of Artificial Sequence: Synthetic oligonucleotide
  Target: SCNA; (-) strand; PAM type: YTN; PAM sequence: TTG
aagatagtgatacaagaata

SEQ ID NO: 47567 - DNA, 20 bp, Artificial Sequence
  Description of Artificial Sequence: Synthetic oligonucleotide
  Target: SCNA; (-) strand; PAM type: YTN; PAM sequence: TTG
gccacaatgattgaagatag

SEQ ID NO: 47568 - DNA, 20 bp, Artificial Sequence
  Description of Artificial Sequence: Synthetic oligonucleotide
  Target: SCNA; (-) strand; PAM type: YTN; PAM sequence: CTG
gaaagaattggccacaatga

SEQ ID NO: 47569 - DNA, 20 bp, Artificial Sequence
  Description of Artificial Sequence: Synthetic oligonucleotide
  Target: SCNA; (-) strand; PAM type: YTN; PAM sequence: TTG
agaatgacctggaaagaatt

SEQ ID NO: 47570 - DNA, 20 bp, Artificial Sequence
  Description of Artificial Sequence: Synthetic oligonucleotide
  Target: SCNA; (-) strand; PAM type: YTN; PAM sequence: TTT
gagaatgacctggaaagaat

SEQ ID NO: 47571 - DNA, 20 bp, Artificial Sequence
  Description of Artificial Sequence: Synthetic oligonucleotide
  Target: SCNA; (-) strand; PAM type: YTN; PAM sequence: TTG
atatggaggtttgagaatga

SEQ ID NO: 47572 - DNA, 20 bp, Artificial Sequence
  Description of Artificial Sequence: Synthetic oligonucleotide
  Target: SCNA; (-) strand; PAM type: YTN; PAM sequence: TTT
gatatggaggtttgagaatg

SEQ ID NO: 47573 - DNA, 20 bp, Artificial Sequence
  Description of Artificial Sequence: Synthetic oligonucleotide
  Target: SCNA; (-) strand; PAM type: YTN; PAM sequence: CTT
tgatatggaggtttgagaat

SEQ ID NO: 47574 - DNA, 20 bp, Artificial Sequence
  Description of Artificial Sequence: Synthetic oligonucleotide
  Target: SCNA; (-) strand; PAM type: YTN; PAM sequence: CTA
tagctttgatatggaggttt

SEQ ID NO: 47575 - DNA, 20 bp, Artificial Sequence
  Description of Artificial Sequence: Synthetic oligonucleotide
  Target: SCNA; (-) strand; PAM type: YTN; PAM sequence: TTG
atctatagctttgatatgga

SEQ ID NO: 47576 - DNA, 20 bp, Artificial Sequence
  Description of Artificial Sequence: Synthetic oligonucleotide
  Target: SCNA; (-) strand; PAM type: YTN; PAM sequence: TTA
ttgatctatagctttgatat

SEQ ID NO: 47577 - DNA, 20 bp, Artificial Sequence
  Description of Artificial Sequence: Synthetic oligonucleotide
  Target: SCNA; (-) strand; PAM type: YTN; PAM sequence: CTG
atagttattgatctatagct

SEQ ID NO: 47578 - DNA, 20 bp, Artificial Sequence
  Description of Artificial Sequence: Synthetic oligonucleotide
  Target: SCNA; (-) strand; PAM type: YTN; PAM sequence: TTC
tgatagttattgatctatag

SEQ ID NO: 47579 - DNA, 20 bp, Artificial Sequence
  Description of Artificial Sequence: Synthetic oligonucleotide
  Target: SCNA; (-) strand; PAM type: YTN; PAM sequence: TTG
ttctgatagttattgatcta

SEQ ID NO: 47580 - DNA, 20 bp, Artificial Sequence
  Description of Artificial Sequence: Synthetic oligonucleotide
  Target: SCNA; (-) strand; PAM type: YTN; PAM sequence: CTT
gttctgatagttattgatct

SEQ ID NO: 47581 - DNA, 20 bp, Artificial Sequence
  Description of Artificial Sequence: Synthetic oligonucleotide
  Target: SCNA; (-) strand; PAM type: YTN; PAM sequence: TTA
acttgttctgatagttattg

SEQ ID NO: 47582 - DNA, 20 bp, Artificial Sequence
  Description of Artificial Sequence: Synthetic oligonucleotide
  Target: SCNA; (-) strand; PAM type: YTN; PAM sequence: TTT
aacttgttctgatagttatt

SEQ ID NO: 47583 - DNA, 20 bp, Artificial Sequence
  Description of Artificial Sequence: Synthetic oligonucleotide
  Target: SCNA; (-) strand; PAM type: YTN; PAM sequence: TTA
atgtttaacttgttctgata

SEQ ID NO: 47584 - DNA, 20 bp, Artificial Sequence
  Description of Artificial Sequence: Synthetic oligonucleotide
  Target: SCNA; (-) strand; PAM type: YTN; PAM sequence: CTT
aatgtttaacttgttctgat

SEQ ID NO: 47585 - DNA, 20 bp, Artificial Sequence
  Description of Artificial Sequence: Synthetic oligonucleotide
  Target: SCNA; (-) strand; PAM type: YTN; PAM sequence: TTA
tcttaatgtttaacttgttc

SEQ ID NO: 47586 - DNA, 20 bp, Artificial Sequence
  Description of Artificial Sequence: Synthetic oligonucleotide
  Target: SCNA; (-) strand; PAM type: YTN; PAM sequence: TTT
atcttaatgtttaacttgtt

SEQ ID NO: 47587 - DNA, 20 bp, Artificial Sequence
  Description of Artificial Sequence: Synthetic oligonucleotide
  Target: SCNA; (-) strand; PAM type: YTN; PAM sequence: CTT
tatcttaatgtttaacttgt

SEQ ID NO: 47588 - DNA, 20 bp, Artificial Sequence
  Description of Artificial Sequence: Synthetic oligonucleotide
  Target: SCNA; (-) strand; PAM type: YTN; PAM sequence: TTA
actttatcttaatgtttaac

SEQ ID NO: 47589 - DNA, 20 bp, Artificial Sequence
  Description of Artificial Sequence: Synthetic oligonucleotide
  Target: SCNA; (-) strand; PAM type: YTN; PAM sequence: TTA
taaagaaaagatgattaact

SEQ ID NO: 47590 - DNA, 20 bp, Artificial Sequence
  Description of Artificial Sequence: Synthetic oligonucleotide
  Target: SCNA; (-) strand; PAM type: YTN; PAM sequence: TTA
ttataaagaaaagatgatta

SEQ ID NO: 47591 - DNA, 20 bp, Artificial Sequence
  Description of Artificial Sequence: Synthetic oligonucleotide
  Target: SCNA; (-) strand; PAM type: YTN; PAM sequence: TTA
ttattataaagaaaagatga

SEQ ID NO: 47592 - DNA, 20 bp, Artificial Sequence
  Description of Artificial Sequence: Synthetic oligonucleotide
  Target: SCNA; (-) strand; PAM type: YTN; PAM sequence: TTC
agtggtggttattattataa

SEQ ID NO: 47593 - DNA, 20 bp, Artificial Sequence
  Description of Artificial Sequence: Synthetic oligonucleotide
  Target: SCNA; (-) strand; PAM type: YTN; PAM sequence: TTG
caattcagtggtggttatta

SEQ ID NO: 47594 - DNA, 20 bp, Artificial Sequence
  Description of Artificial Sequence: Synthetic oligonucleotide
  Target: SCNA; (-) strand; PAM type: YTN; PAM sequence: CTC
ataacaattgcaattcagtg

SEQ ID NO: 47595 - DNA, 20 bp, Artificial Sequence
  Description of Artificial Sequence: Synthetic oligonucleotide
  Target: SCNA; (-) strand; PAM type: YTN; PAM sequence: TTA
gcataatacctcataacaat

SEQ ID NO: 47596 - DNA, 20 bp, Artificial Sequence
  Description of Artificial Sequence: Synthetic oligonucleotide
  Target: SCNA; (-) strand; PAM type: YTN; PAM sequence: TTT
agcataatacctcataacaa

SEQ ID NO: 47597 - DNA, 20 bp, Artificial Sequence
  Description of Artificial Sequence: Synthetic oligonucleotide
  Target: SCNA; (-) strand; PAM type: YTN; PAM sequence: TTG
ataaagtgtttagcataata

SEQ ID NO: 47598 - DNA, 20 bp, Artificial Sequence
  Description of Artificial Sequence: Synthetic oligonucleotide
  Target: SCNA; (-) strand; PAM type: YTN; PAM sequence: TTT
gataaagtgtttagcataat

SEQ ID NO: 47599 - DNA, 20 bp, Artificial Sequence
  Description of Artificial Sequence: Synthetic oligonucleotide
  Target: SCNA; (-) strand; PAM type: YTN; PAM sequence: TTC
ataagatttgataaagtgtt

SEQ ID NO: 47600 - DNA, 20 bp, Artificial Sequence
  Description of Artificial Sequence: Synthetic oligonucleotide
  Target: SCNA; (-) strand; PAM type: YTN; PAM sequence: TTT
cataagatttgataaagtgt

SEQ ID NO: 47601 - DNA, 20 bp, Artificial Sequence
  Description of Artificial Sequence: Synthetic oligonucleotide
  Target: SCNA; (-) strand; PAM type: YTN; PAM sequence: CTA
tttcataagatttgataaag

SEQ ID NO: 47602 - DNA, 20 bp, Artificial Sequence
  Description of Artificial Sequence: Synthetic oligonucleotide
  Target: SCNA; (-) strand; PAM type: YTN; PAM sequence: TTA
cccctatttcataagatttg

SEQ ID NO: 47603 - DNA, 20 bp, Artificial Sequence
  Description of Artificial Sequence: Synthetic oligonucleotide
  Target: SCNA; (-) strand; PAM type: YTN; PAM sequence: CTC
atgtgagatgagaataaaaa

SEQ ID NO: 47604 - DNA, 20 bp, Artificial Sequence
  Description of Artificial Sequence: Synthetic oligonucleotide
  Target: SCNA; (-) strand; PAM type: YTN; PAM sequence: TTC
tcatgtgagatgagaataaa

SEQ ID NO: 47605 - DNA, 20 bp, Artificial Sequence
  Description of Artificial Sequence: Synthetic oligonucleotide
  Target: SCNA; (-) strand; PAM type: YTN; PAM sequence: CTC
aagttctcatgtgagatgag

SEQ ID NO: 47606 - DNA, 20 bp, Artificial Sequence
  Description of Artificial Sequence: Synthetic oligonucleotide
  Target: SCNA; (-) strand; PAM type: YTN; PAM sequence: TTA
tgtgcctcaagttctcatgt

SEQ ID NO: 47607 - DNA, 20 bp, Artificial Sequence
  Description of Artificial Sequence: Synthetic oligonucleotide
  Target: SCNA; (-) strand; PAM type: YTN; PAM sequence: TTT
atgtgcctcaagttctcatg

SEQ ID NO: 47608 - DNA, 20 bp, Artificial Sequence
  Description of Artificial Sequence: Synthetic oligonucleotide
  Target: SCNA; (-) strand; PAM type: YTN; PAM sequence: TTT
tatgtgcctcaagttctcat

SEQ ID NO: 47609 - DNA, 20 bp, Artificial Sequence
  Description of Artificial Sequence: Synthetic oligonucleotide
  Target: SCNA; (-) strand; PAM type: YTN; PAM sequence: TTT
ttatgtgcctcaagttctca

SEQ ID NO: 47610 - DNA, 20 bp, Artificial Sequence
  Description of Artificial Sequence: Synthetic oligonucleotide
  Target: SCNA; (-) strand; PAM type: YTN; PAM sequence: TTA
atttttatgtgcctcaagtt

SEQ ID NO: 47611 - DNA, 20 bp, Artificial Sequence
  Description of Artificial Sequence: Synthetic oligonucleotide
  Target: SCNA; (-) strand; PAM type: YTN; PAM sequence: CTT
aatttttatgtgcctcaagt

SEQ ID NO: 47612 - DNA, 20 bp, Artificial Sequence
  Description of Artificial Sequence: Synthetic oligonucleotide
  Target: SCNA; (-) strand; PAM type: YTN; PAM sequence: CTG
gggcaaaatgccttaatttt

SEQ ID NO: 47613 - DNA, 20 bp, Artificial Sequence
  Description of Artificial Sequence: Synthetic oligonucleotide
  Target: SCNA; (-) strand; PAM type: YTN; PAM sequence: TTG
ccagccatgagacctggggc

SEQ ID NO: 47614 - DNA, 20 bp, Artificial Sequence
  Description of Artificial Sequence: Synthetic oligonucleotide
  Target: SCNA; (-) strand; PAM type: YTN; PAM sequence: CTT
gccagccatgagacctgggg

SEQ ID NO: 47615 - DNA, 20 bp, Artificial Sequence
  Description of Artificial Sequence: Synthetic oligonucleotide
  Target: SCNA; (-) strand; PAM type: YTN; PAM sequence: CTG
tcagacagaccacttgccag

SEQ ID NO: 47616 - DNA, 20 bp, Artificial Sequence
  Description of Artificial Sequence: Synthetic oligonucleotide
  Target: SCNA; (-) strand; PAM type: YTN; PAM sequence: CTA
ctgtcagacagaccacttgc

SEQ ID NO: 47617 - DNA, 20 bp, Artificial Sequence
  Description of Artificial Sequence: Synthetic oligonucleotide
  Target: SCNA; (-) strand; PAM type: YTN; PAM sequence: CTC
tactgtcagacagaccactt

SEQ ID NO: 47618 - DNA, 20 bp, Artificial Sequence
  Description of Artificial Sequence: Synthetic oligonucleotide
  Target: SCNA; (-) strand; PAM type: YTN; PAM sequence: CTC
tctactgtcagacagaccac

SEQ ID NO: 47619 - DNA, 20 bp, Artificial Sequence
  Description of Artificial Sequence: Synthetic oligonucleotide
  Target: SCNA; (-) strand; PAM type: YTN; PAM sequence: CTG
gctctctactgtcagacaga

SEQ ID NO: 47620 - DNA, 20 bp, Artificial Sequence
  Description of Artificial Sequence: Synthetic oligonucleotide
  Target: SCNA; (-) strand; PAM type: YTN; PAM sequence: TTG
aagctggctctctactgtca

SEQ ID NO: 47621 - DNA, 20 bp, Artificial Sequence
  Description of Artificial Sequence: Synthetic oligonucleotide
  Target: SCNA; (-) strand; PAM type: YTN; PAM sequence: CTT
gaagctggctctctactgtc

SEQ ID NO: 47622 - DNA, 20 bp, Artificial Sequence
  Description of Artificial Sequence: Synthetic oligonucleotide
  Target: SCNA; (-) strand; PAM type: YTN; PAM sequence: CTA
tagtacagtgcttgaagctg

SEQ ID NO: 47623 - DNA, 20 bp, Artificial Sequence
  Description of Artificial Sequence: Synthetic oligonucleotide
  Target: SCNA; (-) strand; PAM type: YTN; PAM sequence: TTA
tagtcatgacacagtggccc

SEQ ID NO: 47624 - DNA, 20 bp, Artificial Sequence
  Description of Artificial Sequence: Synthetic oligonucleotide
  Target: SCNA; (-) strand; PAM type: YTN; PAM sequence: TTT
atagtcatgacacagtggcc

SEQ ID NO: 47625 - DNA, 20 bp, Artificial Sequence
  Description of Artificial Sequence: Synthetic oligonucleotide
  Target: SCNA; (-) strand; PAM type: YTN; PAM sequence: CTG
aagagcccaaatgtatagac

SEQ ID NO: 47626 - DNA, 20 bp, Artificial Sequence
  Description of Artificial Sequence: Synthetic oligonucleotide
  Target: SCNA; (-) strand; PAM type: YTN; PAM sequence: TTG
aagctgaagagcccaaatgt

SEQ ID NO: 47627 - DNA, 20 bp, Artificial Sequence
  Description of Artificial Sequence: Synthetic oligonucleotide
  Target: SCNA; (-) strand; PAM type: YTN; PAM sequence: TTT
gaagctgaagagcccaaatg

SEQ ID NO: 47628 - DNA, 20 bp, Artificial Sequence
  Description of Artificial Sequence: Synthetic oligonucleotide
  Target: SCNA; (-) strand; PAM type: YTN; PAM sequence: CTG
catgatagataaatttgaag

SEQ ID NO: 47629 - DNA, 20 bp, Artificial Sequence
  Description of Artificial Sequence: Synthetic oligonucleotide
  Target: SCNA; (-) strand; PAM type: YTN; PAM sequence: CTA
gtgtcatgcctgcatgatag

SEQ ID NO: 47630 - DNA, 20 bp, Artificial Sequence
  Description of Artificial Sequence: Synthetic oligonucleotide
  Target: SCNA; (-) strand; PAM type: YTN; PAM sequence: TTC
cagtgcaagtgaaaacctag

SEQ ID NO: 47631 - DNA, 20 bp, Artificial Sequence
  Description of Artificial Sequence: Synthetic oligonucleotide
  Target: SCNA; (-) strand; PAM type: YTN; PAM sequence: CTT
ccagtgcaagtgaaaaccta

SEQ ID NO: 47632 - DNA, 20 bp, Artificial Sequence
  Description of Artificial Sequence: Synthetic oligonucleotide
  Target: SCNA; (-) strand; PAM type: YTN; PAM sequence: TTG
acttccagtgcaagtgaaaa

SEQ ID NO: 47633 - DNA, 20 bp, Artificial Sequence
  Description of Artificial Sequence: Synthetic oligonucleotide
  Target: SCNA; (-) strand; PAM type: YTN; PAM sequence: TTC
cagcagttgacttccagtgc

SEQ ID NO: 47634 - DNA, 20 bp, Artificial Sequence
  Description of Artificial Sequence: Synthetic oligonucleotide
  Target: SCNA; (-) strand; PAM type: YTN; PAM sequence: TTT
ccagcagttgacttccagtg

SEQ ID NO: 47635 - DNA, 20 bp, Artificial Sequence
  Description of Artificial Sequence: Synthetic oligonucleotide
  Target: SCNA; (-) strand; PAM type: YTN; PAM sequence: TTT
tccagcagttgacttccagt

SEQ ID NO: 47636 - DNA, 20 bp, Artificial Sequence
  Description of Artificial Sequence: Synthetic oligonucleotide
  Target: SCNA; (-) strand; PAM type: YTN; PAM sequence: CTA
attttccagcagttgacttc

SEQ ID NO: 47637 - DNA, 20 bp, Artificial Sequence
  Description of Artificial Sequence: Synthetic oligonucleotide
  Target: SCNA; (-) strand; PAM type: YTN; PAM sequence: CTA
cagactaattttccagcagt

SEQ ID NO: 47638 - DNA, 20 bp, Artificial Sequence
  Description of Artificial Sequence: Synthetic oligonucleotide
  Target: SCNA; (-) strand; PAM type: YTN; PAM sequence: TTC
tacagactaattttccagca

SEQ ID NO: 47639 - DNA, 20 bp, Artificial Sequence
  Description of Artificial Sequence: Synthetic oligonucleotide
  Target: SCNA; (-) strand; PAM type: YTN; PAM sequence: TTT
ctacagactaattttccagc

SEQ ID NO: 47640 - DNA, 20 bp, Artificial Sequence
  Description of Artificial Sequence: Synthetic oligonucleotide
  Target: SCNA; (-) strand; PAM type: YTN; PAM sequence: TTT
tctacagactaattttccag

SEQ ID NO: 47641 - DNA, 20 bp, Artificial Sequence
  Description of Artificial Sequence: Synthetic oligonucleotide
  Target: SCNA; (-) strand; PAM type: YTN; PAM sequence: CTA
cggttttctacagactaatt

SEQ ID NO: 47642 - DNA, 20 bp, Artificial Sequence
  Description of Artificial Sequence: Synthetic oligonucleotide
  Target: SCNA; (-) strand; PAM type: YTN; PAM sequence: CTG
tggcctacggttttctacag

SEQ ID NO: 47643 - DNA, 20 bp, Artificial Sequence
  Description of Artificial Sequence: Synthetic oligonucleotide
  Target: SCNA; (-) strand; PAM type: YTN; PAM sequence: CTC
tgtggcctacggttttctac

SEQ ID NO: 47644 - DNA, 20 bp, Artificial Sequence
  Description of Artificial Sequence: Synthetic oligonucleotide
  Target: SCNA; (-) strand; PAM type: YTN; PAM sequence: TTC
aggaactctgtggcctacgg

SEQ ID NO: 47645 - DNA, 20 bp, Artificial Sequence
  Description of Artificial Sequence: Synthetic oligonucleotide
  Target: SCNA; (-) strand; PAM type: YTN; PAM sequence: CTA
acacattcaggaactctgtg

SEQ ID NO: 47646 - DNA, 20 bp, Artificial Sequence
  Description of Artificial Sequence: Synthetic oligonucleotide
  Target: SCNA; (-) strand; PAM type: YTN; PAM sequence: TTA
ctaacacattcaggaactct

SEQ ID NO: 47647 - DNA, 20 bp, Artificial Sequence
  Description of Artificial Sequence: Synthetic oligonucleotide
  Target: SCNA; (-) strand; PAM type: YTN; PAM sequence: CTT
actaacacattcaggaactc

SEQ ID NO: 47648 - DNA, 20 bp, Artificial Sequence
  Description of Artificial Sequence: Synthetic oligonucleotide
  Target: SCNA; (-) strand; PAM type: YTN; PAM sequence: CTC
ttactaacacattcaggaac

SEQ ID NO: 47649 - DNA, 20 bp, Artificial Sequence
  Description of Artificial Sequence: Synthetic oligonucleotide
  Target: SCNA; (-) strand; PAM type: YTN; PAM sequence: CTA
agcctcttactaacacattc

SEQ ID NO: 47650 - DNA, 20 bp, Artificial Sequence
  Description of Artificial Sequence: Synthetic oligonucleotide
  Target: SCNA; (-) strand; PAM type: YTN; PAM sequence: TTC
ccagcccatccaaaataaaa

SEQ ID NO: 47651 - DNA, 20 bp, Artificial Sequence
  Description of Artificial Sequence: Synthetic oligonucleotide
  Target: SCNA; (-) strand; PAM type: YTN; PAM sequence: TTT
cccagcccatccaaaataaa

SEQ ID NO: 47652 - DNA, 20 bp, Artificial Sequence
  Description of Artificial Sequence: Synthetic oligonucleotide
  Target: SCNA; (-) strand; PAM type: YTN; PAM sequence: TTA
tttcccagcccatccaaaat

SEQ ID NO: 47653 - DNA, 20 bp, Artificial Sequence
  Description of Artificial Sequence: Synthetic oligonucleotide
  Target: SCNA; (-) strand; PAM type: YTN; PAM sequence: TTC
aattatttcccagcccatcc

SEQ ID NO: 47654 - DNA, 20 bp, Artificial Sequence
  Description of Artificial Sequence: Synthetic oligonucleotide
  Target: SCNA; (-) strand; PAM type: YTN; PAM sequence: CTT
caattatttcccagcccatc

SEQ ID NO: 47655 - DNA, 20 bp, Artificial Sequence
  Description of Artificial Sequence: Synthetic oligonucleotide
  Target: SCNA; (-) strand; PAM type: YTN; PAM sequence: TTA
caacccttcaattatttccc

SEQ ID NO: 47656 - DNA, 20 bp, Artificial Sequence
  Description of Artificial Sequence: Synthetic oligonucleotide
  Target: SCNA; (-) strand; PAM type: YTN; PAM sequence: CTG
ttacaacccttcaattattt

SEQ ID NO: 47657 - DNA, 20 bp, Artificial Sequence
  Description of Artificial Sequence: Synthetic oligonucleotide
  Target: SCNA; (-) strand; PAM type: YTN; PAM sequence: TTC
cctgttacaacccttcaatt

SEQ ID NO: 47658 - DNA, 20 bp, Artificial Sequence
  Description of Artificial Sequence: Synthetic oligonucleotide
  Target: SCNA; (-) strand; PAM type: YTN; PAM sequence: CTG
cacattccctgttacaaccc

SEQ ID NO: 47659 - DNA, 20 bp, Artificial Sequence
  Description of Artificial Sequence: Synthetic oligonucleotide
  Target: SCNA; (-) strand; PAM type: YTN; PAM sequence: TTC
tgcacattccctgttacaac

SEQ ID NO: 47660 - DNA, 20 bp, Artificial Sequence
  Description of Artificial Sequence: Synthetic oligonucleotide
  Target: SCNA; (-) strand; PAM type: YTN; PAM sequence: CTC
cacaatgcaattctgcacat

SEQ ID NO: 47661 - DNA, 20 bp, Artificial Sequence
  Description of Artificial Sequence: Synthetic oligonucleotide
  Target: SCNA; (-) strand; PAM type: YTN; PAM sequence: CTC
tccacaatgcaattctgcac

SEQ ID NO: 47662 - DNA, 20 bp, Artificial Sequence
  Description of Artificial Sequence: Synthetic oligonucleotide
  Target: SCNA; (-) strand; PAM type: YTN; PAM sequence: TTA
gatctctccacaatgcaatt

SEQ ID NO: 47663 - DNA, 20 bp, Artificial Sequence
  Description of Artificial Sequence: Synthetic oligonucleotide
  Target: SCNA; (-) strand; PAM type: YTN; PAM sequence: CTC
caattagatctctccacaat

SEQ ID NO: 47664 - DNA, 20 bp, Artificial Sequence
  Description of Artificial Sequence: Synthetic oligonucleotide
  Target: SCNA; (-) strand; PAM type: YTN; PAM sequence: TTC
ccccaatctccaattagatc

SEQ ID NO: 47665 - DNA, 20 bp, Artificial Sequence
  Description of Artificial Sequence: Synthetic oligonucleotide
  Target: SCNA; (-) strand; PAM type: YTN; PAM sequence: TTT
cccccaatctccaattagat

SEQ ID NO: 47666 - DNA, 20 bp, Artificial Sequence
  Description of Artificial Sequence: Synthetic oligonucleotide
  Target: SCNA; (-) strand; PAM type: YTN; PAM sequence: CTT
tcccccaatctccaattaga

SEQ ID NO: 47667 - DNA, 20 bp, Artificial Sequence
  Description of Artificial Sequence: Synthetic oligonucleotide
  Target: SCNA; (-) strand; PAM type: YTN; PAM sequence: CTC
atctttcccccaatctccaa

SEQ ID NO: 47668 - DNA, 20 bp, Artificial Sequence
  Description of Artificial Sequence: Synthetic oligonucleotide
  Target: SCNA; (-) strand; PAM type: YTN; PAM sequence: CTG
ctcatctttcccccaatctc

SEQ ID NO: 47669 - DNA, 20 bp, Artificial Sequence
  Description of Artificial Sequence: Synthetic oligonucleotide
  Target: SCNA; (-) strand; PAM type: YTN; PAM sequence: TTA
gggcctgctcatctttcccc

SEQ ID NO: 47670 - DNA, 20 bp, Artificial Sequence
  Description of Artificial Sequence: Synthetic oligonucleotide
  Target: SCNA; (-) strand; PAM type: YTN; PAM sequence: TTT
agggcctgctcatctttccc

SEQ ID NO: 47671 - DNA, 20 bp, Artificial Sequence
  Description of Artificial Sequence: Synthetic oligonucleotide
  Target: SCNA; (-) strand; PAM type: YTN; PAM sequence: TTA
tcacagtttagggcctgctc

SEQ ID NO: 47672 - DNA, 20 bp, Artificial Sequence
  Description of Artificial Sequence: Synthetic oligonucleotide
  Target: SCNA; (-) strand; PAM type: YTN; PAM sequence: TTG
ccaacattatcacagtttag

SEQ ID NO: 47673 - DNA, 20 bp, Artificial Sequence
  Description of Artificial Sequence: Synthetic oligonucleotide
  Target: SCNA; (-) strand; PAM type: YTN; PAM sequence: CTT
gccaacattatcacagttta

SEQ ID NO: 47674 - DNA, 20 bp, Artificial Sequence
  Description of Artificial Sequence: Synthetic oligonucleotide
  Target: SCNA; (-) strand; PAM type: YTN; PAM sequence: TTC
aagcttgccaacattatcac

SEQ ID NO: 47675 - DNA, 20 bp, Artificial Sequence
  Description of Artificial Sequence: Synthetic oligonucleotide
  Target: SCNA; (-) strand; PAM type: YTN; PAM sequence: CTT
caagcttgccaacattatca

SEQ ID NO: 47676 - DNA, 20 bp, Artificial Sequence
  Description of Artificial Sequence: Synthetic oligonucleotide
  Target: SCNA; (-) strand; PAM type: YTN; PAM sequence: CTC
ccttcaagcttgccaacatt

SEQ ID NO: 47677 - DNA, 20 bp, Artificial Sequence
  Description of Artificial Sequence: Synthetic oligonucleotide
  Target: SCNA; (-) strand; PAM type: YTN; PAM sequence: CTG
tccctcccttcaagcttgcc

SEQ ID NO: 47678 - DNA, 20 bp, Artificial Sequence
  Description of Artificial Sequence: Synthetic oligonucleotide
  Target: SCNA; (-) strand; PAM type: YTN; PAM sequence: TTC
tgtccctcccttcaagcttg

SEQ ID NO: 47679 - DNA, 20 bp, Artificial Sequence
  Description of Artificial Sequence: Synthetic oligonucleotide
  Target: SCNA; (-) strand; PAM type: YTN; PAM sequence: CTG
attctgtccctcccttcaag

SEQ ID NO: 47680 - DNA, 20 bp, Artificial Sequence
  Description of Artificial Sequence: Synthetic oligonucleotide
  Target: SCNA; (-) strand; PAM type: YTN; PAM sequence: TTC
tgattctgtccctcccttca

SEQ ID NO: 47681 - DNA, 20 bp, Artificial Sequence
  Description of Artificial Sequence: Synthetic oligonucleotide
  Target: SCNA; (-) strand; PAM type: YTN; PAM sequence: TTT
ctgattctgtccctcccttc

SEQ ID NO: 47682 - DNA, 20 bp, Artificial Sequence
  Description of Artificial Sequence: Synthetic oligonucleotide
  Target: SCNA; (-) strand; PAM type: YTN; PAM sequence: TTT
tctgattctgtccctccctt

SEQ ID NO: 47683 - DNA, 20 bp, Artificial Sequence
  Description of Artificial Sequence: Synthetic oligonucleotide
  Target: SCNA; (-) strand; PAM type: YTN; PAM sequence: TTA
caaatattttctgattctgt

SEQ ID NO: 47684 - DNA, 20 bp, Artificial Sequence
  Description of Artificial Sequence: Synthetic oligonucleotide
  Target: SCNA; (-) strand; PAM type: YTN; PAM sequence: CTT
acaaatattttctgattctg

SEQ ID NO: 47685 - DNA, 20 bp, Artificial Sequence
  Description of Artificial Sequence: Synthetic oligonucleotide
  Target: SCNA; (-) strand; PAM type: YTN; PAM sequence: CTA
gaaatgtcacttacaaatat

SEQ ID NO: 47686 - DNA, 20 bp, Artificial Sequence
  Description of Artificial Sequence: Synthetic oligonucleotide
  Target: SCNA; (-) strand; PAM type: YTN; PAM sequence: CTC
cagccagtaaatcacagggg

SEQ ID NO: 47687 - DNA, 20 bp, Artificial Sequence
  Description of Artificial Sequence: Synthetic oligonucleotide
  Target: SCNA; (-) strand; PAM type: YTN; PAM sequence: CTC
atcctccagccagtaaatca

SEQ ID NO: 47688 - DNA, 20 bp, Artificial Sequence
  Description of Artificial Sequence: Synthetic oligonucleotide
  Target: SCNA; (-) strand; PAM type: YTN; PAM sequence: CTG
ctcatcctccagccagtaaa

SEQ ID NO: 47689 - DNA, 20 bp, Artificial Sequence
  Description of Artificial Sequence: Synthetic oligonucleotide
  Target: SCNA; (-) strand; PAM type: YTN; PAM sequence: CTC
acctgctcatcctccagcca

SEQ ID NO: 47690 - DNA, 20 bp, Artificial Sequence
  Description of Artificial Sequence: Synthetic oligonucleotide
  Target: SCNA; (-) strand; PAM type: YTN; PAM sequence: CTC
tcacctgctcatcctccagc

SEQ ID NO: 47691 - DNA, 20 bp, Artificial Sequence
  Description of Artificial Sequence: Synthetic oligonucleotide
  Target: SCNA; (-) strand; PAM type: YTN; PAM sequence: TTC
aaaacaaacacctctcacct

SEQ ID NO: 47692 - DNA, 20 bp, Artificial Sequence
  Description of Artificial Sequence: Synthetic oligonucleotide
  Target: SCNA; (-) strand; PAM type: YTN; PAM sequence: TTT
caaaacaaacacctctcacc

SEQ ID NO: 47693 - DNA, 20 bp, Artificial Sequence
  Description of Artificial Sequence: Synthetic oligonucleotide
  Target: SCNA; (-) strand; PAM type: YTN; PAM sequence: TTT
tcaaaacaaacacctctcac

SEQ ID NO: 47694 - DNA, 20 bp, Artificial Sequence
  Description of Artificial Sequence: Synthetic oligonucleotide
  Target: SCNA; (-) strand; PAM type: YTN; PAM sequence: TTT
ttcaaaacaaacacctctca

SEQ ID NO: 47695 - DNA, 20 bp, Artificial Sequence
  Description of Artificial Sequence: Synthetic oligonucleotide
  Target: SCNA; (-) strand; PAM type: YTN; PAM sequence: TTT
tttcaaaacaaacacctctc

SEQ ID NO: 47696 - DNA, 20 bp, Artificial Sequence
  Description of Artificial Sequence: Synthetic oligonucleotide
  Target: SCNA; (-) strand; PAM type: YTN; PAM sequence: CTT
ttttcaaaacaaacacctct

SEQ ID NO: 47697 - DNA, 20 bp, Artificial Sequence
  Description of Artificial Sequence: Synthetic oligonucleotide
  Target: SCNA; (-) strand; PAM type: YTN; PAM sequence: TTC
aaaatcacttttttcaaaac

SEQ ID NO: 47698 - DNA, 20 bp, Artificial Sequence
  Description of Artificial Sequence: Synthetic oligonucleotide
  Target: SCNA; (-) strand; PAM type: YTN; PAM sequence: CTT
caaaatcacttttttcaaaa

SEQ ID NO: 47699 - DNA, 20 bp, Artificial Sequence
  Description of Artificial Sequence: Synthetic oligonucleotide
  Target: SCNA; (-) strand; PAM type: YTN; PAM sequence: CTC
ttcaaaatcacttttttcaa

SEQ ID NO: 47700 - DNA, 20 bp, Artificial Sequence
  Description of Artificial Sequence: Synthetic oligonucleotide
  Target: SCNA; (-) strand; PAM type: YTN; PAM sequence: CTC
tcttcaaaatcacttttttc

SEQ ID NO: 47701 - DNA, 20 bp, Artificial Sequence
  Description of Artificial Sequence: Synthetic oligonucleotide
  Target: SCNA; (-) strand; PAM type: YTN; PAM sequence: CTG
acctctcttcaaaatcactt

SEQ ID NO: 47702 - DNA, 20 bp, Artificial Sequence
  Description of Artificial Sequence: Synthetic oligonucleotide
  Target: SCNA; (-) strand; PAM type: YTN; PAM sequence: TTC
tgacctctcttcaaaatcac

SEQ ID NO: 47703 - DNA, 20 bp, Artificial Sequence
  Description of Artificial Sequence: Synthetic oligonucleotide
  Target: SCNA; (-) strand; PAM type: YTN; PAM sequence: TTT
ctgacctctcttcaaaatca

SEQ ID NO: 47704 - DNA, 20 bp, Artificial Sequence
  Description of Artificial Sequence: Synthetic oligonucleotide
  Target: SCNA; (-) strand; PAM type: YTN; PAM sequence: TTT
tctgacctctcttcaaaatc

SEQ ID NO: 47705 - DNA, 20 bp, Artificial Sequence
  Description of Artificial Sequence: Synthetic oligonucleotide
  Target: SCNA; (-) strand; PAM type: YTN; PAM sequence: TTT
ttctgacctctcttcaaaat

SEQ ID NO: 47706 - DNA, 20 bp, Artificial Sequence
  Description of Artificial Sequence: Synthetic oligonucleotide
  Target: SCNA; (-) strand; PAM type: YTN; PAM sequence: CTT
tttctgacctctcttcaaaa

SEQ ID NO: 47707 - DNA, 20 bp, Artificial Sequence
  Description of Artificial Sequence: Synthetic oligonucleotide
  Target: SCNA; (-) strand; PAM type: YTN; PAM sequence: CTC
atgaacacatgaagtaaaaa

SEQ ID NO: 47708 - DNA, 20 bp, Artificial Sequence
  Description of Artificial Sequence: Synthetic oligonucleotide
  Target: SCNA; (-) strand; PAM type: YTN; PAM sequence: CTC
cccaactcatgaacacatga

SEQ ID NO: 47709 - DNA, 20 bp, Artificial Sequence
  Description of Artificial Sequence: Synthetic oligonucleotide
  Target: SCNA; (-) strand; PAM type: YTN; PAM sequence: CTG
actccccaactcatgaacac

SEQ ID NO: 47710 - DNA, 20 bp, Artificial Sequence
  Description of Artificial Sequence: Synthetic oligonucleotide
  Target: SCNA; (-) strand; PAM type: YTN; PAM sequence: CTG
taccctgactccccaactca

SEQ ID NO: 47711 - DNA, 20 bp, Artificial Sequence
  Description of Artificial Sequence: Synthetic oligonucleotide
  Target: SCNA; (-) strand; PAM type: YTN; PAM sequence: TTC
tgtaccctgactccccaact

SEQ ID NO: 47712 - DNA, 20 bp, Artificial Sequence
  Description of Artificial Sequence: Synthetic oligonucleotide
  Target: SCNA; (-) strand; PAM type: YTN; PAM sequence: CTT
ctgtaccctgactccccaac

SEQ ID NO: 47713 - DNA, 20 bp, Artificial Sequence
  Description of Artificial Sequence: Synthetic oligonucleotide
  Target: SCNA; (-) strand; PAM type: YTN; PAM sequence: TTC
cttctgtaccctgactcccc

SEQ ID NO: 47714 - DNA, 20 bp, Artificial Sequence
  Description of Artificial Sequence: Synthetic oligonucleotide
  Target: SCNA; (-) strand; PAM type: YTN; PAM sequence: TTT
ccttctgtaccctgactccc

SEQ ID NO: 47715 - DNA, 20 bp, Artificial Sequence
  Description of Artificial Sequence: Synthetic oligonucleotide
  Target: SCNA; (-) strand; PAM type: YTN; PAM sequence: CTT
tccttctgtaccctgactcc

SEQ ID NO: 47716 - DNA, 20 bp, Artificial Sequence
  Description of Artificial Sequence: Synthetic oligonucleotide
  Target: SCNA; (-) strand; PAM type: YTN; PAM sequence: TTC
atgtgtctttccttctgtac

SEQ ID NO: 47717 - DNA, 20 bp, Artificial Sequence
  Description of Artificial Sequence: Synthetic oligonucleotide
  Target: SCNA; (-) strand; PAM type: YTN; PAM sequence: CTT
catgtgtctttccttctgta

SEQ ID NO: 47718 - DNA, 20 bp, Artificial Sequence
  Description of Artificial Sequence: Synthetic oligonucleotide
  Target: SCNA; (-) strand; PAM type: YTN; PAM sequence: CTG
gcttcatgtgtctttccttc

SEQ ID NO: 47719 - DNA, 20 bp, Artificial Sequence
  Description of Artificial Sequence: Synthetic oligonucleotide
  Target: SCNA; (-) strand; PAM type: YTN; PAM sequence: CTG
tgtcagtccctggcttcatg

SEQ ID NO: 47720 - DNA, 20 bp, Artificial Sequence
  Description of Artificial Sequence: Synthetic oligonucleotide
  Target: SCNA; (-) strand; PAM type: YTN; PAM sequence: CTC
tgtgtcagtccctggcttca

SEQ ID NO: 47721 - DNA, 20 bp, Artificial Sequence
  Description of Artificial Sequence: Synthetic oligonucleotide
  Target: SCNA; (-) strand; PAM type: YTN; PAM sequence: CTG
gtctctgtgtcagtccctgg

SEQ ID NO: 47722 - DNA, 20 bp, Artificial Sequence
  Description of Artificial Sequence: Synthetic oligonucleotide
  Target: SCNA; (-) strand; PAM type: YTN; PAM sequence: CTG
tgtgtctggtctctgtgtca

SEQ ID NO: 47723 - DNA, 20 bp, Artificial Sequence
  Description of Artificial Sequence: Synthetic oligonucleotide
  Target: SCNA; (-) strand; PAM type: YTN; PAM sequence: CTA
tccatgaagcacccactgtg

SEQ ID NO: 47724 - DNA, 20 bp, Artificial Sequence
  Description of Artificial Sequence: Synthetic oligonucleotide
  Target: SCNA; (-) strand; PAM type: YTN; PAM sequence: TTC
aacagctatccatgaagcac

SEQ ID NO: 47725 - DNA, 20 bp, Artificial Sequence
  Description of Artificial Sequence: Synthetic oligonucleotide
  Target: SCNA; (-) strand; PAM type: YTN; PAM sequence: TTC
acaaatcattcaacagctat

SEQ ID NO: 47726 - DNA, 20 bp, Artificial Sequence
  Description of Artificial Sequence: Synthetic oligonucleotide
  Target: SCNA; (-) strand; PAM type: YTN; PAM sequence: TTT
cacaaatcattcaacagcta

SEQ ID NO: 47727 - DNA, 20 bp, Artificial Sequence
  Description of Artificial Sequence: Synthetic oligonucleotide
  Target: SCNA; (-) strand; PAM type: YTN; PAM sequence: TTT
tcacaaatcattcaacagct

SEQ ID NO: 47728 - DNA, 20 bp, Artificial Sequence
  Description of Artificial Sequence: Synthetic oligonucleotide
  Target: SCNA; (-) strand; PAM type: YTN; PAM sequence: CTG
attttcacaaatcattcaac

SEQ ID NO: 47729 - DNA, 20 bp, Artificial Sequence
  Description of Artificial Sequence: Synthetic oligonucleotide
  Target: SCNA; (-) strand; PAM type: YTN; PAM sequence: CTA
tctgattttcacaaatcatt

SEQ ID NO: 47730 - DNA, 20 bp, Artificial Sequence
  Description of Artificial Sequence: Synthetic oligonucleotide
  Target: SCNA; (-) strand; PAM type: YTN; PAM sequence: CTG
ctatctgattttcacaaatc

SEQ ID NO: 47731 - DNA, 20 bp, Artificial Sequence
  Description of Artificial Sequence: Synthetic oligonucleotide
  Target: SCNA; (-) strand; PAM type: YTN; PAM sequence: CTC
accactgctatctgattttc

SEQ ID NO: 47732 - DNA, 20 bp, Artificial Sequence
  Description of Artificial Sequence: Synthetic oligonucleotide
  Target: SCNA; (-) strand; PAM type: YTN; PAM sequence: TTG
cataaaaaccctcaccactg

SEQ ID NO: 47733 - DNA, 20 bp, Artificial Sequence
  Description of Artificial Sequence: Synthetic oligonucleotide
  Target: SCNA; (-) strand; PAM type: YTN; PAM sequence: CTT
gcataaaaaccctcaccact

SEQ ID NO: 47734 - DNA, 20 bp, Artificial Sequence
  Description of Artificial Sequence: Synthetic oligonucleotide
  Target: SCNA; (-) strand; PAM type: YTN; PAM sequence: TTC
acttgcataaaaaccctcac

SEQ ID NO: 47735 - DNA, 20 bp, Artificial Sequence
  Description of Artificial Sequence: Synthetic oligonucleotide
  Target: SCNA; (-) strand; PAM type: YTN; PAM sequence: TTT
cacttgcataaaaaccctca

SEQ ID NO: 47736 - DNA, 20 bp, Artificial Sequence
  Description of Artificial Sequence: Synthetic oligonucleotide
  Target: SCNA; (-) strand; PAM type: YTN; PAM sequence: TTG
tatttcacttgcataaaaac

SEQ ID NO: 47737 - DNA, 20 bp, Artificial Sequence
  Description of Artificial Sequence: Synthetic oligonucleotide
  Target: SCNA; (-) strand; PAM type: YTN; PAM sequence: TTT
gtatttcacttgcataaaaa

SEQ ID NO: 47738 - DNA, 20 bp, Artificial Sequence
  Description of Artificial Sequence: Synthetic oligonucleotide
  Target: SCNA; (-) strand; PAM type: YTN; PAM sequence: TTC
atttgtatttcacttgcata

SEQ ID NO: 47739 - DNA, 20 bp, Artificial Sequence
  Description of Artificial Sequence: Synthetic oligonucleotide
  Target: SCNA; (-) strand; PAM type: YTN; PAM sequence: TTG
agaagttcatttgtatttca

SEQ ID NO: 47740 - DNA, 20 bp, Artificial Sequence
  Description of Artificial Sequence: Synthetic oligonucleotide
  Target: SCNA; (-) strand; PAM type: YTN; PAM sequence: CTT
gagaagttcatttgtatttc

SEQ ID NO: 47741 - DNA, 20 bp, Artificial Sequence
  Description of Artificial Sequence: Synthetic oligonucleotide
  Target: SCNA; (-) strand; PAM type: YTN; PAM sequence: CTC
agatatggcaccttgagaag

SEQ ID NO: 47742 - DNA, 20 bp, Artificial Sequence
  Description of Artificial Sequence: Synthetic oligonucleotide
  Target: SCNA; (-) strand; PAM type: YTN; PAM sequence: TTC
aaagtcaggaaccagatcaa

SEQ ID NO: 47743 - DNA, 20 bp, Artificial Sequence
  Description of Artificial Sequence: Synthetic oligonucleotide
  Target: SCNA; (-) strand; PAM type: YTN; PAM sequence: TTC
ataggaacaaaataattcaa

SEQ ID NO: 47744 - DNA, 20 bp, Artificial Sequence
  Description of Artificial Sequence: Synthetic oligonucleotide
  Target: SCNA; (-) strand; PAM type: YTN; PAM sequence: CTT
cataggaacaaaataattca

SEQ ID NO: 47745 - DNA, 20 bp, Artificial Sequence
  Description of Artificial Sequence: Synthetic oligonucleotide
  Target: SCNA; (-) strand; PAM type: YTN; PAM sequence: CTG
tacttcataggaacaaaata

SEQ ID NO: 47746 - DNA, 20 bp, Artificial Sequence
  Description of Artificial Sequence: Synthetic oligonucleotide
  Target: SCNA; (-) strand; PAM type: YTN; PAM sequence: TTA
caaagtcctgtacttcatag

SEQ ID NO: 47747 - DNA, 20 bp, Artificial Sequence
  Description of Artificial Sequence: Synthetic oligonucleotide
  Target: SCNA; (-) strand; PAM type: YTN; PAM sequence: TTA
ttacaaagtcctgtacttca

SEQ ID NO: 47748 - DNA, 20 bp, Artificial Sequence
  Description of Artificial Sequence: Synthetic oligonucleotide
  Target: SCNA; (-) strand; PAM type: YTN; PAM sequence: TTT
attacaaagtcctgtacttc

SEQ ID NO: 47749 - DNA, 20 bp, Artificial Sequence
  Description of Artificial Sequence: Synthetic oligonucleotide
  Target: SCNA; (-) strand; PAM type: YTN; PAM sequence: TTT
tattacaaagtcctgtactt

SEQ ID NO: 47750 - DNA, 20 bp, Artificial Sequence
  Description of Artificial Sequence: Synthetic oligonucleotide
  Target: SCNA; (-) strand; PAM type: YTN; PAM sequence: TTT
ttattacaaagtcctgtact

SEQ ID NO: 47751 - DNA, 20 bp, Artificial Sequence
  Description of Artificial Sequence: Synthetic oligonucleotide
  Target: SCNA; (-) strand; PAM type: YTN; PAM sequence: TTG
tgtatggtggatttttatta

SEQ ID NO: 47752 - DNA, 20 bp, Artificial Sequence
  Description of Artificial Sequence: Synthetic oligonucleotide
  Target: SCNA; (-) strand; PAM type: YTN; PAM sequence: TTT
gtgtatggtggatttttatt

SEQ ID NO: 47753 - DNA, 20 bp, Artificial Sequence
  Description of Artificial Sequence: Synthetic oligonucleotide
  Target: SCNA; (-) strand; PAM type: YTN; PAM sequence: TTT
tgtgtatggtggatttttat

SEQ ID NO: 47754 - DNA, 20 bp, Artificial Sequence
  Description of Artificial Sequence: Synthetic oligonucleotide
  Target: SCNA; (-) strand; PAM type: YTN; PAM sequence: TTA
agtccaggggattttgtgta

SEQ ID NO: 47755 - DNA, 20 bp, Artificial Sequence
  Description of Artificial Sequence: Synthetic oligonucleotide
  Target: SCNA; (-) strand; PAM type: YTN; PAM sequence: CTT
aagtccaggggattttgtgt

SEQ ID NO: 47756 - DNA, 20 bp, Artificial Sequence
  Description of Artificial Sequence: Synthetic oligonucleotide
  Target: SCNA; (-) strand; PAM type: YTN; PAM sequence: TTC
ttaagtccaggggattttgt

SEQ ID NO: 47757 - DNA, 20 bp, Artificial Sequence
  Description of Artificial Sequence: Synthetic oligonucleotide
  Target: SCNA; (-) strand; PAM type: YTN; PAM sequence: TTG
tggagatattcttaagtcca

SEQ ID NO: 47758 - DNA, 20 bp, Artificial Sequence
  Description of Artificial Sequence: Synthetic oligonucleotide
  Target: SCNA; (-) strand; PAM type: YTN; PAM sequence: CTT
gtggagatattcttaagtcc

SEQ ID NO: 47759 - DNA, 20 bp, Artificial Sequence
  Description of Artificial Sequence: Synthetic oligonucleotide
  Target: SCNA; (-) strand; PAM type: YTN; PAM sequence: TTA
taacttgtggagatattctt

SEQ ID NO: 47760 - DNA, 20 bp, Artificial Sequence
  Description of Artificial Sequence: Synthetic oligonucleotide
  Target: SCNA; (-) strand; PAM type: YTN; PAM sequence: CTT
ataacttgtggagatattct

SEQ ID NO: 47761 - DNA, 20 bp, Artificial Sequence
  Description of Artificial Sequence: Synthetic oligonucleotide
  Target: SCNA; (-) strand; PAM type: YTN; PAM sequence: TTC
ttataacttgtggagatatt

SEQ ID NO: 47762 - DNA, 20 bp, Artificial Sequence
  Description of Artificial Sequence: Synthetic oligonucleotide
  Target: SCNA; (-) strand; PAM type: YTN; PAM sequence: TTC
aattcttataacttgtggag

SEQ ID NO: 47763 - DNA, 20 bp, Artificial Sequence
  Description of Artificial Sequence: Synthetic oligonucleotide
  Target: SCNA; (-) strand; PAM type: YTN; PAM sequence: TTT
caattcttataacttgtgga

SEQ ID NO: 47764 - DNA, 20 bp, Artificial Sequence
  Description of Artificial Sequence: Synthetic oligonucleotide
  Target: SCNA; (-) strand; PAM type: YTN; PAM sequence: CTA
agcagtttcaattcttataa

SEQ ID NO: 47765 - DNA, 20 bp, Artificial Sequence
  Description of Artificial Sequence: Synthetic oligonucleotide
  Target: SCNA; (-) strand; PAM type: YTN; PAM sequence: TTC
taagcagtttcaattcttat

SEQ ID NO: 47766 - DNA, 20 bp, Artificial Sequence
  Description of Artificial Sequence: Synthetic oligonucleotide
  Target: SCNA; (-) strand; PAM type: YTN; PAM sequence: CTT
ctaagcagtttcaattctta

SEQ ID NO: 47767 - DNA, 20 bp, Artificial Sequence
  Description of Artificial Sequence: Synthetic oligonucleotide
  Target: SCNA; (-) strand; PAM type: YTN; PAM sequence: TTC
cttctaagcagtttcaattc

SEQ ID NO: 47768 - DNA, 20 bp, Artificial Sequence
  Description of Artificial Sequence: Synthetic oligonucleotide
  Target: SCNA; (-) strand; PAM type: YTN; PAM sequence: TTG
ttccttctaagcagtttcaa

SEQ ID NO: 47769 - DNA, 20 bp, Artificial Sequence
  Description of Artificial Sequence: Synthetic oligonucleotide
  Target: SCNA; (-) strand; PAM type: YTN; PAM sequence: CTG
agtacaagcaattgttcctt

SEQ ID NO: 47770 - DNA, 20 bp, Artificial Sequence
  Description of Artificial Sequence: Synthetic oligonucleotide
  Target: SCNA; (-) strand; PAM type: YTN; PAM sequence: CTG
gctgagtacaagcaattgtt

SEQ ID NO: 47771 - DNA, 20 bp, Artificial Sequence
  Description of Artificial Sequence: Synthetic oligonucleotide
  Target: SCNA; (-) strand; PAM type: YTN; PAM sequence: CTG
aggatgactggctgagtaca

SEQ ID NO: 47772 - DNA, 20 bp, Artificial Sequence
  Description of Artificial Sequence: Synthetic oligonucleotide
  Target: SCNA; (-) strand; PAM type: YTN; PAM sequence: CTC
atgcagctgaggatgactgg

SEQ ID NO: 47773 - DNA, 20 bp, Artificial Sequence
  Description of Artificial Sequence: Synthetic oligonucleotide
  Target: SCNA; (-) strand; PAM type: YTN; PAM sequence: TTG
agactcatgcagctgaggat

SEQ ID NO: 47774 - DNA, 20 bp, Artificial Sequence
  Description of Artificial Sequence: Synthetic oligonucleotide
  Target: SCNA; (-) strand; PAM type: YTN; PAM sequence: TTT
gagactcatgcagctgagga

SEQ ID NO: 47775 - DNA, 20 bp, Artificial Sequence
  Description of Artificial Sequence: Synthetic oligonucleotide
  Target: SCNA; (-) strand; PAM type: YTN; PAM sequence: TTT
tgagactcatgcagctgagg

SEQ ID NO: 47776 - DNA, 20 bp, Artificial Sequence
  Description of Artificial Sequence: Synthetic oligonucleotide
  Target: SCNA; (-) strand; PAM type: YTN; PAM sequence: CTC
cacccccgttttgagactca

SEQ ID NO: 47777 - DNA, 20 bp, Artificial Sequence
  Description of Artificial Sequence: Synthetic oligonucleotide
  Target: SCNA; (-) strand; PAM type: YTN; PAM sequence: CTC
tccacccccgttttgagact

SEQ ID NO: 47778 - DNA, 20 bp, Artificial Sequence
  Description of Artificial Sequence: Synthetic oligonucleotide
  Target: SCNA; (-) strand; PAM type: YTN; PAM sequence: CTG
gaggaggtagacactctcca

SEQ ID NO: 47779 - DNA, 20 bp, Artificial Sequence
  Description of Artificial Sequence: Synthetic oligonucleotide
  Target: SCNA; (-) strand; PAM type: YTN; PAM sequence: TTC
tggaggaggtagacactctc

SEQ ID NO: 47780 - DNA, 20 bp, Artificial Sequence
  Description of Artificial Sequence: Synthetic oligonucleotide
  Target: SCNA; (-) strand; PAM type: YTN; PAM sequence: TTT
ctggaggaggtagacactct

SEQ ID NO: 47781 - DNA, 20 bp, Artificial Sequence
  Description of Artificial Sequence: Synthetic oligonucleotide
  Target: SCNA; (-) strand; PAM type: YTN; PAM sequence: TTT
tctggaggaggtagacactc

SEQ ID NO: 47782 - DNA, 20 bp, Artificial Sequence
  Description of Artificial Sequence: Synthetic oligonucleotide
  Target: SCNA; (-) strand; PAM type: YTN; PAM sequence: CTT
ttctggaggaggtagacact

SEQ ID NO: 47783 - DNA, 20 bp, Artificial Sequence
  Description of Artificial Sequence: Synthetic oligonucleotide
  Target: SCNA; (-) strand; PAM type: YTN; PAM sequence: CTA
aaaaccttttctggaggagg

SEQ ID NO: 47784 - DNA, 20 bp, Artificial Sequence
  Description of Artificial Sequence: Synthetic oligonucleotide
  Target: SCNA; (-) strand; PAM type: YTN; PAM sequence: CTC
taaaaaccttttctggagga

SEQ ID NO: 47785 - DNA, 20 bp, Artificial Sequence
  Description of Artificial Sequence: Synthetic oligonucleotide
  Target: SCNA; (-) strand; PAM type: YTN; PAM sequence: TTC
gctctaaaaaccttttctgg

SEQ ID NO: 47786 - DNA, 20 bp, Artificial Sequence
  Description of Artificial Sequence: Synthetic oligonucleotide
  Target: SCNA; (-) strand; PAM type: YTN; PAM sequence: TTT
cgctctaaaaaccttttctg

SEQ ID NO: 47787 - DNA, 20 bp, Artificial Sequence
  Description of Artificial Sequence: Synthetic oligonucleotide
  Target: SCNA; (-) strand; PAM type: YTN; PAM sequence: TTG
atttcgctctaaaaaccttt

SEQ ID NO: 47788 - DNA, 20 bp, Artificial Sequence
  Description of Artificial Sequence: Synthetic oligonucleotide
  Target: SCNA; (-) strand; PAM type: YTN; PAM sequence: TTT
gatttcgctctaaaaacctt

SEQ ID NO: 47789 - DNA, 20 bp, Artificial Sequence
  Description of Artificial Sequence: Synthetic oligonucleotide
  Target: SCNA; (-) strand; PAM type: YTN; PAM sequence: CTT
tgatttcgctctaaaaacct

SEQ ID NO: 47790 - DNA, 20 bp, Artificial Sequence
  Description of Artificial Sequence: Synthetic oligonucleotide
  Target: SCNA; (-) strand; PAM type: YTN; PAM sequence: CTC
tttgatttcgctctaaaaac

SEQ ID NO: 47791 - DNA, 20 bp, Artificial Sequence
  Description of Artificial Sequence: Synthetic oligonucleotide
  Target: SCNA; (-) strand; PAM type: YTN; PAM sequence: TTG
gtggagaagaggcagtctct

SEQ ID NO: 47792 - DNA, 20 bp, Artificial Sequence
  Description of Artificial Sequence: Synthetic oligonucleotide
  Target: SCNA; (-) strand; PAM type: YTN; PAM sequence: TTT
ggtggagaagaggcagtctc

SEQ ID NO: 47793 - DNA, 20 bp, Artificial Sequence
  Description of Artificial Sequence: Synthetic oligonucleotide
  Target: SCNA; (-) strand; PAM type: YTN; PAM sequence: TTT
tggtggagaagaggcagtct

SEQ ID NO: 47794 - DNA, 20 bp, Artificial Sequence
  Description of Artificial Sequence: Synthetic oligonucleotide
  Target: SCNA; (-) strand; PAM type: YTN; PAM sequence: TTA
agacaaataattttggtgga

SEQ ID NO: 47795 - DNA, 20 bp, Artificial Sequence
  Description of Artificial Sequence: Synthetic oligonucleotide
  Target: SCNA; (-) strand; PAM type: YTN; PAM sequence: CTT
aagacaaataattttggtgg

SEQ ID NO: 47796 - DNA, 20 bp, Artificial Sequence
  Description of Artificial Sequence: Synthetic oligonucleotide
  Target: SCNA; (-) strand; PAM type: YTN; PAM sequence: TTG
tccccatcttaagacaaata

SEQ ID NO: 47797 - DNA, 20 bp, Artificial Sequence
  Description of Artificial Sequence: Synthetic oligonucleotide
  Target: SCNA; (-) strand; PAM type: YTN; PAM sequence: CTT
gtccccatcttaagacaaat

SEQ ID NO: 47798 - DNA, 20 bp, Artificial Sequence
  Description of Artificial Sequence: Synthetic oligonucleotide
  Target: SCNA; (-) strand; PAM type: YTN; PAM sequence: TTC
ttgtccccatcttaagacaa

SEQ ID NO: 47799 - DNA, 20 bp, Artificial Sequence
  Description of Artificial Sequence: Synthetic oligonucleotide
  Target: SCNA; (-) strand; PAM type: YTN; PAM sequence: TTT
cttgtccccatcttaagaca

SEQ ID NO: 47800 - DNA, 20 bp, Artificial Sequence
  Description of Artificial Sequence: Synthetic oligonucleotide
  Target: SCNA; (-) strand; PAM type: YTN; PAM sequence: CTG
ggtgccaggtttcttgtccc

SEQ ID NO: 47801 - DNA, 20 bp, Artificial Sequence
  Description of Artificial Sequence: Synthetic oligonucleotide
  Target: SCNA; (-) strand; PAM type: YTN; PAM sequence: CTC
ctgggtgccaggtttcttgt

SEQ ID NO: 47802 - DNA, 20 bp, Artificial Sequence
  Description of Artificial Sequence: Synthetic oligonucleotide
  Target: SCNA; (-) strand; PAM type: YTN; PAM sequence: TTA
ctcctgggtgccaggtttct

SEQ ID NO: 47803 - DNA, 20 bp, Artificial Sequence
  Description of Artificial Sequence: Synthetic oligonucleotide
  Target: SCNA; (-) strand; PAM type: YTN; PAM sequence: CTT
actcctgggtgccaggtttc

SEQ ID NO: 47804 - DNA, 20 bp, Artificial Sequence
  Description of Artificial Sequence: Synthetic oligonucleotide
  Target: SCNA; (-) strand; PAM type: YTN; PAM sequence: CTG
tgtccttactcctgggtgcc

SEQ ID NO: 47805 - DNA, 20 bp, Artificial Sequence
  Description of Artificial Sequence: Synthetic oligonucleotide
  Target: SCNA; (-) strand; PAM type: YTN; PAM sequence: TTA
aaatgagagagcacgtctgt

SEQ ID NO: 47806 - DNA, 20 bp, Artificial Sequence
  Description of Artificial Sequence: Synthetic oligonucleotide
  Target: SCNA; (-) strand; PAM type: YTN; PAM sequence: CTT
aaaatgagagagcacgtctg

SEQ ID NO: 47807 - DNA, 20 bp, Artificial Sequence
  Description of Artificial Sequence: Synthetic oligonucleotide
  Target: SCNA; (-) strand; PAM type: YTN; PAM sequence: TTC
agcttaaaatgagagagcac

SEQ ID NO: 47808 - DNA, 20 bp, Artificial Sequence
  Description of Artificial Sequence: Synthetic oligonucleotide
  Target: SCNA; (-) strand; PAM type: YTN; PAM sequence: CTT
cagcttaaaatgagagagca

SEQ ID NO: 47809 - DNA, 20 bp, Artificial Sequence
  Description of Artificial Sequence: Synthetic oligonucleotide
  Target: SCNA; (-) strand; PAM type: YTN; PAM sequence: TTC
agcttcagcttaaaatgaga

SEQ ID NO: 47810 - DNA, 20 bp, Artificial Sequence
  Description of Artificial Sequence: Synthetic oligonucleotide
  Target: SCNA; (-) strand; PAM type: YTN; PAM sequence: TTA
ggacaagacagttcagcttc

SEQ ID NO: 47811 - DNA, 20 bp, Artificial Sequence
  Description of Artificial Sequence: Synthetic oligonucleotide
  Target: SCNA; (-) strand; PAM type: YTN; PAM sequence: TTT
aggacaagacagttcagctt

SEQ ID NO: 47812 - DNA, 20 bp, Artificial Sequence
  Description of Artificial Sequence: Synthetic oligonucleotide
  Target: SCNA; (-) strand; PAM type: YTN; PAM sequence: TTT
taggacaagacagttcagct

SEQ ID NO: 47813 - DNA, 20 bp, Artificial Sequence
  Description of Artificial Sequence: Synthetic oligonucleotide
  Target: SCNA; (-) strand; PAM type: YTN; PAM sequence: TTT
ttaggacaagacagttcagc

SEQ ID NO: 47814 - DNA, 20 bp, Artificial Sequence
  Description of Artificial Sequence: Synthetic oligonucleotide
  Target: SCNA; (-) strand; PAM type: YTN; PAM sequence: CTG
ggcatatgtttttaggacaa

SEQ ID NO: 47815 - DNA, 20 bp, Artificial Sequence
  Description of Artificial Sequence: Synthetic oligonucleotide
  Target: SCNA; (-) strand; PAM type: YTN; PAM sequence: CTA
gagtctgggcatatgttttt

SEQ ID NO: 47816 - DNA, 20 bp, Artificial Sequence
  Description of Artificial Sequence: Synthetic oligonucleotide
  Target: SCNA; (-) strand; PAM type: YTN; PAM sequence: TTC
tagagtctgggcatatgttt

SEQ ID NO: 47817 - DNA, 20 bp, Artificial Sequence
  Description of Artificial Sequence: Synthetic oligonucleotide
  Target: SCNA; (-) strand; PAM type: YTN; PAM sequence: TTT
ctagagtctgggcatatgtt

SEQ ID NO: 47818 - DNA, 20 bp, Artificial Sequence
  Description of Artificial Sequence: Synthetic oligonucleotide
  Target: SCNA; (-) strand; PAM type: YTN; PAM sequence: TTT
tctagagtctgggcatatgt

SEQ ID NO: 47819 - DNA, 20 bp, Artificial Sequence
  Description of Artificial Sequence: Synthetic oligonucleotide
  Target: SCNA; (-) strand; PAM type: YTN; PAM sequence: CTT
ttctagagtctgggcatatg

SEQ ID NO: 47820 - DNA, 20 bp, Artificial Sequence
  Description of Artificial Sequence: Synthetic oligonucleotide
  Target: SCNA; (-) strand; PAM type: YTN; PAM sequence: CTA
agagagcttttctagagtct

SEQ ID NO: 47821 - DNA, 20 bp, Artificial Sequence
  Description of Artificial Sequence: Synthetic oligonucleotide
  Target: SCNA; (-) strand; PAM type: YTN; PAM sequence: CTG
tctaagagagcttttctaga

SEQ ID NO: 47822 - DNA, 20 bp, Artificial Sequence
  Description of Artificial Sequence: Synthetic oligonucleotide
  Target: SCNA; (-) strand; PAM type: YTN; PAM sequence: TTA
gcagtctgtctaagagagct

SEQ ID NO: 47823 - DNA, 20 bp, Artificial Sequence
  Description of Artificial Sequence: Synthetic oligonucleotide
  Target: SCNA; (-) strand; PAM type: YTN; PAM sequence: TTA
agtgacagaaatggagaaat

SEQ ID NO: 47824 - DNA, 20 bp, Artificial Sequence
  Description of Artificial Sequence: Synthetic oligonucleotide
  Target: SCNA; (-) strand; PAM type: YTN; PAM sequence: CTT
aagtgacagaaatggagaaa

SEQ ID NO: 47825 - DNA, 20 bp, Artificial Sequence
  Description of Artificial Sequence: Synthetic oligonucleotide
  Target: SCNA; (-) strand; PAM type: YTN; PAM sequence: CTC
ttaagtgacagaaatggaga

SEQ ID NO: 47826 - DNA, 20 bp, Artificial Sequence
  Description of Artificial Sequence: Synthetic oligonucleotide
  Target: SCNA; (-) strand; PAM type: YTN; PAM sequence: CTA
aaatcctcttaagtgacaga

SEQ ID NO: 47827 - DNA, 20 bp, Artificial Sequence
  Description of Artificial Sequence: Synthetic oligonucleotide
  Target: SCNA; (-) strand; PAM type: YTN; PAM sequence: TTA
tatgtccctaaaatcctctt

SEQ ID NO: 47828 - DNA, 20 bp, Artificial Sequence
  Description of Artificial Sequence: Synthetic oligonucleotide
  Target: SCNA; (-) strand; PAM type: YTN; PAM sequence: CTC
aaagttatatgtccctaaaa

SEQ ID NO: 47829 - DNA, 20 bp, Artificial Sequence
  Description of Artificial Sequence: Synthetic oligonucleotide
  Target: SCNA; (-) strand; PAM type: YTN; PAM sequence: TTC
tcaaagttatatgtccctaa

SEQ ID NO: 47830 - DNA, 20 bp, Artificial Sequence
  Description of Artificial Sequence: Synthetic oligonucleotide
  Target: SCNA; (-) strand; PAM type: YTN; PAM sequence: CTG
cagaatggaattctcaaagt

SEQ ID NO: 47831 - DNA, 20 bp, Artificial Sequence
  Description of Artificial Sequence: Synthetic oligonucleotide
  Target: SCNA; (-) strand; PAM type: YTN; PAM sequence: CTG
aaagctgcagaatggaattc

SEQ ID NO: 47832 - DNA, 20 bp, Artificial Sequence
  Description of Artificial Sequence: Synthetic oligonucleotide
  Target: SCNA; (-) strand; PAM type: YTN; PAM sequence: CTC
tgaaagctgcagaatggaat

SEQ ID NO: 47833 - DNA, 20 bp, Artificial Sequence
  Description of Artificial Sequence: Synthetic oligonucleotide
  Target: SCNA; (-) strand; PAM type: YTN; PAM sequence: TTA
cctctgaaagctgcagaatg

SEQ ID NO: 47834 - DNA, 20 bp, Artificial Sequence
  Description of Artificial Sequence: Synthetic oligonucleotide
  Target: SCNA; (-) strand; PAM type: YTN; PAM sequence: TTG
tattacctctgaaagctgca

SEQ ID NO: 47835 - DNA, 20 bp, Artificial Sequence
  Description of Artificial Sequence: Synthetic oligonucleotide
  Target: SCNA; (-) strand; PAM type: YTN; PAM sequence: TTG
gattgtattacctctgaaag

SEQ ID NO: 47836 - DNA, 20 bp, Artificial Sequence
  Description of Artificial Sequence: Synthetic oligonucleotide
  Target: SCNA; (-) strand; PAM type: YTN; PAM sequence: CTA
tgagtattggattgtattac

SEQ ID NO: 47837 - DNA, 20 bp, Artificial Sequence
  Description of Artificial Sequence: Synthetic oligonucleotide
  Target: SCNA; (-) strand; PAM type: YTN; PAM sequence: TTG
gaaaagtgccgggtacacca

SEQ ID NO: 47838 - DNA, 20 bp, Artificial Sequence
  Description of Artificial Sequence: Synthetic oligonucleotide
  Target: SCNA; (-) strand; PAM type: YTN; PAM sequence: TTT
ggaaaagtgccgggtacacc

SEQ ID NO: 47839 - DNA, 20 bp, Artificial Sequence
  Description of Artificial Sequence: Synthetic oligonucleotide
  Target: SCNA; (-) strand; PAM type: YTN; PAM sequence: CTA
taacaagtagaatgtttgga

SEQ ID NO: 47840 - DNA, 20 bp, Artificial Sequence
  Description of Artificial Sequence: Synthetic oligonucleotide
  Target: SCNA; (-) strand; PAM type: YTN; PAM sequence: TTA
aagaagctataacaagtaga

SEQ ID NO: 47841 - DNA, 20 bp, Artificial Sequence
  Description of Artificial Sequence: Synthetic oligonucleotide
  Target: SCNA; (-) strand; PAM type: YTN; PAM sequence: CTC
aattaaagaagctataacaa

SEQ ID NO: 47842 - DNA, 20 bp, Artificial Sequence
  Description of Artificial Sequence: Synthetic oligonucleotide
  Target: SCNA; (-) strand; PAM type: YTN; PAM sequence: CTC
ccaaatggagaatgataaga

SEQ ID NO: 47843 - DNA, 20 bp, Artificial Sequence
  Description of Artificial Sequence: Synthetic oligonucleotide
  Target: SCNA; (-) strand; PAM type: YTN; PAM sequence: CTC
aaatctcccaaatggagaat

SEQ ID NO: 47844 - DNA, 20 bp, Artificial Sequence
  Description of Artificial Sequence: Synthetic oligonucleotide
  Target: SCNA; (-) strand; PAM type: YTN; PAM sequence: CTC
tcaaatctcccaaatggaga

SEQ ID NO: 47845 - DNA, 20 bp, Artificial Sequence
  Description of Artificial Sequence: Synthetic oligonucleotide
  Target: SCNA; (-) strand; PAM type: YTN; PAM sequence: CTC
tctcaaatctcccaaatgga

SEQ ID NO: 47846 - DNA, 20 bp, Artificial Sequence
  Description of Artificial Sequence: Synthetic oligonucleotide
  Target: SCNA; (-) strand; PAM type: YTN; PAM sequence: CTC
tctctcaaatctcccaaatg

SEQ ID NO: 47847 - DNA, 20 bp, Artificial Sequence
  Description of Artificial Sequence: Synthetic oligonucleotide
  Target: SCNA; (-) strand; PAM type: YTN; PAM sequence: TTG
cctctctctcaaatctccca

SEQ ID NO: 47848 - DNA, 20 bp, Artificial Sequence
  Description of Artificial Sequence: Synthetic oligonucleotide
  Target: SCNA; (-) strand; PAM type: YTN; PAM sequence: TTT
gcctctctctcaaatctccc

SEQ ID NO: 47849 - DNA, 20 bp, Artificial Sequence
  Description of Artificial Sequence: Synthetic oligonucleotide
  Target: SCNA; (-) strand; PAM type: YTN; PAM sequence: CTT
tgcctctctctcaaatctcc

SEQ ID NO: 47850 - DNA, 20 bp, Artificial Sequence
  Description of Artificial Sequence: Synthetic oligonucleotide
  Target: SCNA; (-) strand; PAM type: YTN; PAM sequence: TTA
aggcacatactttgcctctc

SEQ ID NO: 47851 - DNA, 20 bp, Artificial Sequence
  Description of Artificial Sequence: Synthetic oligonucleotide
  Target: SCNA; (-) strand; PAM type: YTN; PAM sequence: CTT
aaggcacatactttgcctct

SEQ ID NO: 47852 - DNA, 20 bp, Artificial Sequence
  Description of Artificial Sequence: Synthetic oligonucleotide
  Target: SCNA; (-) strand; PAM type: YTN; PAM sequence: CTG
tgtcatcttaaggcacatac

SEQ ID NO: 47853 - DNA, 20 bp, Artificial Sequence
  Description of Artificial Sequence: Synthetic oligonucleotide
  Target: SCNA; (-) strand; PAM type: YTN; PAM sequence: TTA
ccaactgtgtcatcttaagg

SEQ ID NO: 47854 - DNA, 20 bp, Artificial Sequence
  Description of Artificial Sequence: Synthetic oligonucleotide
  Target: SCNA; (-) strand; PAM type: YTN; PAM sequence: CTT
accaactgtgtcatcttaag

SEQ ID NO: 47855 - DNA, 20 bp, Artificial Sequence
  Description of Artificial Sequence: Synthetic oligonucleotide
  Target: SCNA; (-) strand; PAM type: YTN; PAM sequence: CTA
cttaccaactgtgtcatctt

SEQ ID NO: 47856 - DNA, 20 bp, Artificial Sequence
  Description of Artificial Sequence: Synthetic oligonucleotide
  Target: SCNA; (-) strand; PAM type: YTN; PAM sequence: TTC
ctacttaccaactgtgtcat

SEQ ID NO: 47857 - DNA, 20 bp, Artificial Sequence
  Description of Artificial Sequence: Synthetic oligonucleotide
  Target: SCNA; (-) strand; PAM type: YTN; PAM sequence: TTT
cctacttaccaactgtgtca

SEQ ID NO: 47858 - DNA, 20 bp, Artificial Sequence
  Description of Artificial Sequence: Synthetic oligonucleotide
  Target: SCNA; (-) strand; PAM type: YTN; PAM sequence: CTT
tcctacttaccaactgtgtc

SEQ ID NO: 47859 - DNA, 20 bp, Artificial Sequence
  Description of Artificial Sequence: Synthetic oligonucleotide
  Target: SCNA; (-) strand; PAM type: YTN; PAM sequence: CTG
ctttcctacttaccaactgt

SEQ ID NO: 47860 - DNA, 20 bp, Artificial Sequence
  Description of Artificial Sequence: Synthetic oligonucleotide
  Target: SCNA; (-) strand; PAM type: YTN; PAM sequence: TTC
tgctttcctacttaccaact

SEQ ID NO: 47861 - DNA, 20 bp, Artificial Sequence
  Description of Artificial Sequence: Synthetic oligonucleotide
  Target: SCNA; (-) strand; PAM type: YTN; PAM sequence: TTA
aagttctgctttcctactta

SEQ ID NO: 47862 - DNA, 20 bp, Artificial Sequence
  Description of Artificial Sequence: Synthetic oligonucleotide
  Target: SCNA; (-) strand; PAM type: YTN; PAM sequence: CTG
atgttaaagttctgctttcc

SEQ ID NO: 47863 - DNA, 20 bp, Artificial Sequence
  Description of Artificial Sequence: Synthetic oligonucleotide
  Target: SCNA; (-) strand; PAM type: YTN; PAM sequence: CTG
ctgatgttaaagttctgctt

SEQ ID NO: 47864 - DNA, 20 bp, Artificial Sequence
  Description of Artificial Sequence: Synthetic oligonucleotide
  Target: SCNA; (-) strand; PAM type: YTN; PAM sequence: TTA
ctgctgatgttaaagttctg

SEQ ID NO: 47865 - DNA, 20 bp, Artificial Sequence
  Description of Artificial Sequence: Synthetic oligonucleotide
  Target: SCNA; (-) strand; PAM type: YTN; PAM sequence: TTT
actgctgatgttaaagttct

SEQ ID NO: 47866 - DNA, 20 bp, Artificial Sequence
  Description of Artificial Sequence: Synthetic oligonucleotide
  Target: SCNA; (-) strand; PAM type: YTN; PAM sequence: TTT
tactgctgatgttaaagttc

SEQ ID NO: 47867 - DNA, 20 bp, Artificial Sequence
  Description of Artificial Sequence: Synthetic oligonucleotide
  Target: SCNA; (-) strand; PAM type: YTN; PAM sequence: CTC
agggttttactgctgatgtt

SEQ ID NO: 47868 - DNA, 20 bp, Artificial Sequence
  Description of Artificial Sequence: Synthetic oligonucleotide
  Target: SCNA; (-) strand; PAM type: YTN; PAM sequence: TTA
aaacaatagtctcagggttt

SEQ ID NO: 47869 - DNA, 20 bp, Artificial Sequence
  Description of Artificial Sequence: Synthetic oligonucleotide
  Target: SCNA; (-) strand; PAM type: YTN; PAM sequence: TTA
aacacattaaaacaatagtc

SEQ ID NO: 47870 - DNA, 20 bp, Artificial Sequence
  Description of Artificial Sequence: Synthetic oligonucleotide
  Target: SCNA; (-) strand; PAM type: YTN; PAM sequence: TTA
ttaaacacattaaaacaata

SEQ ID NO: 47871 - DNA, 20 bp, Artificial Sequence
  Description of Artificial Sequence: Synthetic oligonucleotide
  Target: SCNA; (-) strand; PAM type: YTN; PAM sequence: TTT
attaaacacattaaaacaat

SEQ ID NO: 47872 - DNA, 20 bp, Artificial Sequence
  Description of Artificial Sequence: Synthetic oligonucleotide
  Target: SCNA; (-) strand; PAM type: YTN; PAM sequence: TTA
gtggggcatttattaaacac

SEQ ID NO: 47873 - DNA, 20 bp, Artificial Sequence
  Description of Artificial Sequence: Synthetic oligonucleotide
  Target: SCNA; (-) strand; PAM type: YTN; PAM sequence: CTT
agtggggcatttattaaaca

SEQ ID NO: 47874 - DNA, 20 bp, Artificial Sequence
  Description of Artificial Sequence: Synthetic oligonucleotide
  Target: SCNA; (-) strand; PAM type: YTN; PAM sequence: TTC
ttagtggggcatttattaaa

SEQ ID NO: 47875 - DNA, 20 bp, Artificial Sequence
  Description of Artificial Sequence: Synthetic oligonucleotide
  Target: SCNA; (-) strand; PAM type: YTN; PAM sequence: TTT
cttagtggggcatttattaa

SEQ ID NO: 47876 - DNA, 20 bp, Artificial Sequence
  Description of Artificial Sequence: Synthetic oligonucleotide
  Target: SCNA; (-) strand; PAM type: YTN; PAM sequence: CTG
gtttcttagtggggcattta

SEQ ID NO: 47877 - DNA, 20 bp, Artificial Sequence
  Description of Artificial Sequence: Synthetic oligonucleotide
  Target: SCNA; (-) strand; PAM type: YTN; PAM sequence: CTC
tggtttcttagtggggcatt

SEQ ID NO: 47878 - DNA, 20 bp, Artificial Sequence
  Description of Artificial Sequence: Synthetic oligonucleotide
  Target: SCNA; (-) strand; PAM type: YTN; PAM sequence: TTG
ctctggtttcttagtggggc

SEQ ID NO: 47879 - DNA, 20 bp, Artificial Sequence
  Description of Artificial Sequence: Synthetic oligonucleotide
  Target: SCNA; (-) strand; PAM type: YTN; PAM sequence: TTT
gctctggtttcttagtgggg

SEQ ID NO: 47880 - DNA, 20 bp, Artificial Sequence
  Description of Artificial Sequence: Synthetic oligonucleotide
  Target: SCNA; (-) strand; PAM type: YTN; PAM sequence: TTA
atttgctctggtttcttagt

SEQ ID NO: 47881 - DNA, 20 bp, Artificial Sequence
  Description of Artificial Sequence: Synthetic oligonucleotide
  Target: SCNA; (-) strand; PAM type: YTN; PAM sequence: TTT
aatttgctctggtttcttag

SEQ ID NO: 47882 - DNA, 20 bp, Artificial Sequence
  Description of Artificial Sequence: Synthetic oligonucleotide
  Target: SCNA; (-) strand; PAM type: YTN; PAM sequence: TTT
taatttgctctggtttctta

SEQ ID NO: 47883 - DNA, 20 bp, Artificial Sequence
  Description of Artificial Sequence: Synthetic oligonucleotide
  Target: SCNA; (-) strand; PAM type: YTN; PAM sequence: CTT
ttaatttgctctggtttctt

SEQ ID NO: 47884 - DNA, 20 bp, Artificial Sequence
  Description of Artificial Sequence: Synthetic oligonucleotide
  Target: SCNA; (-) strand; PAM type: YTN; PAM sequence: TTA
atagaacacagcatactttt

SEQ ID NO: 47885 - DNA, 20 bp, Artificial Sequence
  Description of Artificial Sequence: Synthetic oligonucleotide
  Target: SCNA; (-) strand; PAM type: YTN; PAM sequence: CTG
tatcaaattaatagaacaca

SEQ ID NO: 47886 - DNA, 20 bp, Artificial Sequence
  Description of Artificial Sequence: Synthetic oligonucleotide
  Target: SCNA; (-) strand; PAM type: YTN; PAM sequence: CTG
cctgtatcaaattaatagaa

SEQ ID NO: 47887 - DNA, 20 bp, Artificial Sequence
  Description of Artificial Sequence: Synthetic oligonucleotide
  Target: SCNA; (-) strand; PAM type: YTN; PAM sequence: TTC
tgcctgtatcaaattaatag

SEQ ID NO: 47888 - DNA, 20 bp, Artificial Sequence
  Description of Artificial Sequence: Synthetic oligonucleotide
  Target: SCNA; (-) strand; PAM type: YTN; PAM sequence: CTT
ctgcctgtatcaaattaata

SEQ ID NO: 47889 - DNA, 20 bp, Artificial Sequence
  Description of Artificial Sequence: Synthetic oligonucleotide
  Target: SCNA; (-) strand; PAM type: YTN; PAM sequence: TTC
ttctgcctgtatcaaattaa

SEQ ID NO: 47890 - DNA, 20 bp, Artificial Sequence
  Description of Artificial Sequence: Synthetic oligonucleotide
  Target: SCNA; (-) strand; PAM type: YTN; PAM sequence: TTT
cttctgcctgtatcaaatta

SEQ ID NO: 47891 - DNA, 20 bp, Artificial Sequence
  Description of Artificial Sequence: Synthetic oligonucleotide
  Target: SCNA; (-) strand; PAM type: YTN; PAM sequence: TTA
gatttcttctgcctgtatca

SEQ ID NO: 47892 - DNA, 20 bp, Artificial Sequence
  Description of Artificial Sequence: Synthetic oligonucleotide
  Target: SCNA; (-) strand; PAM type: YTN; PAM sequence: TTT
agatttcttctgcctgtatc

SEQ ID NO: 47893 - DNA, 20 bp, Artificial Sequence
  Description of Artificial Sequence: Synthetic oligonucleotide
  Target: SCNA; (-) strand; PAM type: YTN; PAM sequence: TTT
tagatttcttctgcctgtat

SEQ ID NO: 47894 - DNA, 20 bp, Artificial Sequence
  Description of Artificial Sequence: Synthetic oligonucleotide
  Target: SCNA; (-) strand; PAM type: YTN; PAM sequence: TTT
ttagatttcttctgcctgta

SEQ ID NO: 47895 - DNA, 20 bp, Artificial Sequence
  Description of Artificial Sequence: Synthetic oligonucleotide
  Target: SCNA; (-) strand; PAM type: YTN; PAM sequence: CTG
tttttagatttcttctgcct

SEQ ID NO: 47896 - DNA, 20 bp, Artificial Sequence
  Description of Artificial Sequence: Synthetic oligonucleotide
  Target: SCNA; (-) strand; PAM type: YTN; PAM sequence: TTG
ctgtttttagatttcttctg

SEQ ID NO: 47897 - DNA, 20 bp, Artificial Sequence
  Description of Artificial Sequence: Synthetic oligonucleotide
  Target: SCNA; (-) strand; PAM type: YTN; PAM sequence: TTT
gctgtttttagatttcttct

SEQ ID NO: 47898 - DNA, 20 bp, Artificial Sequence
  Description of Artificial Sequence: Synthetic oligonucleotide
  Target: SCNA; (-) strand; PAM type: YTN; PAM sequence: CTT
tgctgtttttagatttcttc

SEQ ID NO: 47899 - DNA, 20 bp, Artificial Sequence
  Description of Artificial Sequence: Synthetic oligonucleotide
  Target: SCNA; (-) strand; PAM type: YTN; PAM sequence: TTC
tttgctgtttttagatttct

SEQ ID NO: 47900 - DNA, 20 bp, Artificial Sequence
  Description of Artificial Sequence: Synthetic oligonucleotide
  Target: SCNA; (-) strand; PAM type: YTN; PAM sequence: TTA
aatatcattctttgctgttt

SEQ ID NO: 47901 - DNA, 20 bp, Artificial Sequence
  Description of Artificial Sequence: Synthetic oligonucleotide
  Target: SCNA; (-) strand; PAM type: YTN; PAM sequence: CTT
aaatatcattctttgctgtt

SEQ ID NO: 47902 - DNA, 20 bp, Artificial Sequence
  Description of Artificial Sequence: Synthetic oligonucleotide
  Target: SCNA; (-) strand; PAM type: YTN; PAM sequence: TTC
ttaaatatcattctttgctg

SEQ ID NO: 47903 - DNA, 20 bp, Artificial Sequence
  Description of Artificial Sequence: Synthetic oligonucleotide
  Target: SCNA; (-) strand; PAM type: YTN; PAM sequence: CTT
cttaaatatcattctttgct

SEQ ID NO: 47904 - DNA, 20 bp, Artificial Sequence
  Description of Artificial Sequence: Synthetic oligonucleotide
  Target: SCNA; (-) strand; PAM type: YTN; PAM sequence: TTC
ttcttaaatatcattctttg

SEQ ID NO: 47905 - DNA, 20 bp, Artificial Sequence
  Description of Artificial Sequence: Synthetic oligonucleotide
  Target: SCNA; (-) strand; PAM type: YTN; PAM sequence: TTA
aaatagagttcttcttaaat

SEQ ID NO: 47906 - DNA, 20 bp, Artificial Sequence
  Description of Artificial Sequence: Synthetic oligonucleotide
  Target: SCNA; (-) strand; PAM type: YTN; PAM sequence: CTT
aaaatagagttcttcttaaa

SEQ ID NO: 47907 - DNA, 20 bp, Artificial Sequence
  Description of Artificial Sequence: Synthetic oligonucleotide
  Target: SCNA; (-) strand; PAM type: YTN; PAM sequence: CTA
cttaaaatagagttcttctt

SEQ ID NO: 47908 - DNA, 20 bp, Artificial Sequence
  Description of Artificial Sequence: Synthetic oligonucleotide
  Target: SCNA; (-) strand; PAM type: YTN; PAM sequence: CTA
taactacttaaaatagagtt

SEQ ID NO: 47909 - DNA, 20 bp, Artificial Sequence
  Description of Artificial Sequence: Synthetic oligonucleotide
  Target: SCNA; (-) strand; PAM type: YTN; PAM sequence: TTA
agcatatgtcctataactac

SEQ ID NO: 47910 - DNA, 20 bp, Artificial Sequence
  Description of Artificial Sequence: Synthetic oligonucleotide
  Target: SCNA; (-) strand; PAM type: YTN; PAM sequence: TTT
aagcatatgtcctataacta

SEQ ID NO: 47911 - DNA, 20 bp, Artificial Sequence
  Description of Artificial Sequence: Synthetic oligonucleotide
  Target: SCNA; (-) strand; PAM type: YTN; PAM sequence: CTC
agtttaagcatatgtcctat

SEQ ID NO: 47912 - DNA, 20 bp, Artificial Sequence
  Description of Artificial Sequence: Synthetic oligonucleotide
  Target: SCNA; (-) strand; PAM type: YTN; PAM sequence: TTC
actcagtttaagcatatgtc

SEQ ID NO: 47913 - DNA, 20 bp, Artificial Sequence
  Description of Artificial Sequence: Synthetic oligonucleotide
  Target: SCNA; (-) strand; PAM type: YTN; PAM sequence: TTC
ataaaaagttcactcagttt

SEQ ID NO: 47914 - DNA, 20 bp, Artificial Sequence
  Description of Artificial Sequence: Synthetic oligonucleotide
  Target: SCNA; (-) strand; PAM type: YTN; PAM sequence: CTG
atgaaaagttcataaaaagt

SEQ ID NO: 47915 - DNA, 20 bp, Artificial Sequence
  Description of Artificial Sequence: Synthetic oligonucleotide
  Target: SCNA; (-) strand; PAM type: YTN; PAM sequence: CTC
tgatgaaaagttcataaaaa

SEQ ID NO: 47916 - DNA, 20 bp, Artificial Sequence
  Description of Artificial Sequence: Synthetic oligonucleotide
  Target: SCNA; (-) strand; PAM type: YTN; PAM sequence: TTA
aaaaaaaatctctgatgaaa

SEQ ID NO: 47917 - DNA, 20 bp, Artificial Sequence
  Description of Artificial Sequence: Synthetic oligonucleotide
  Target: SCNA; (-) strand; PAM type: YTN; PAM sequence: TTC
agtcacagacacaggagaaa

SEQ ID NO: 47918 - DNA, 20 bp, Artificial Sequence
  Description of Artificial Sequence: Synthetic oligonucleotide
  Target: SCNA; (-) strand; PAM type: YTN; PAM sequence: TTA
ttcagtcacagacacaggag

SEQ ID NO: 47919 - DNA, 20 bp, Artificial Sequence
  Description of Artificial Sequence: Synthetic oligonucleotide
  Target: SCNA; (-) strand; PAM type: YTN; PAM sequence: TTT
attcagtcacagacacagga

SEQ ID NO: 47920 - DNA, 20 bp, Artificial Sequence
  Description of Artificial Sequence: Synthetic oligonucleotide
  Target: SCNA; (-) strand; PAM type: YTN; PAM sequence: TTC
cagtgaacagaggccattta

SEQ ID NO: 47921 - DNA, 20 bp, Artificial Sequence
  Description of Artificial Sequence: Synthetic oligonucleotide
  Target: SCNA; (-) strand; PAM type: YTN; PAM sequence: CTG
agagaggaagcatgtgaagc

SEQ ID NO: 47922 - DNA, 20 bp, Artificial Sequence
  Description of Artificial Sequence: Synthetic oligonucleotide
  Target: SCNA; (-) strand; PAM type: YTN; PAM sequence: CTA
caactgagagaggaagcatg

SEQ ID NO: 47923 - DNA, 20 bp, Artificial Sequence
  Description of Artificial Sequence: Synthetic oligonucleotide
  Target: SCNA; (-) strand; PAM type: YTN; PAM sequence: CTG
aatagaaataaacacaccta

SEQ ID NO: 47924 - DNA, 20 bp, Artificial Sequence
  Description of Artificial Sequence: Synthetic oligonucleotide
  Target: SCNA; (-) strand; PAM type: YTN; PAM sequence: TTG
gtgtctgaatagaaataaac

SEQ ID NO: 47925 - DNA, 20 bp, Artificial Sequence
  Description of Artificial Sequence: Synthetic oligonucleotide
  Target: SCNA; (-) strand; PAM type: YTN; PAM sequence: TTT
ggtgtctgaatagaaataaa

SEQ ID NO: 47926 - DNA, 20 bp, Artificial Sequence
  Description of Artificial Sequence: Synthetic oligonucleotide
  Target: SCNA; (-) strand; PAM type: YTN; PAM sequence: CTT
tggtgtctgaatagaaataa

SEQ ID NO: 47927 - DNA, 20 bp, Artificial Sequence
  Description of Artificial Sequence: Synthetic oligonucleotide
  Target: SCNA; (-) strand; PAM type: YTN; PAM sequence: TTG
cagatacccataggcctttg

SEQ ID NO: 47928 - DNA, 20 bp, Artificial Sequence
  Description of Artificial Sequence: Synthetic oligonucleotide
  Target: SCNA; (-) strand; PAM type: YTN; PAM sequence: TTT
gcagatacccataggccttt

SEQ ID NO: 47929 - DNA, 20 bp, Artificial Sequence
  Description of Artificial Sequence: Synthetic oligonucleotide
  Target: SCNA; (-) strand; PAM type: YTN; PAM sequence: TTA
atttgcagatacccataggc

SEQ ID NO: 47930 - DNA, 20 bp, Artificial Sequence
  Description of Artificial Sequence: Synthetic oligonucleotide
  Target: SCNA; (-) strand; PAM type: YTN; PAM sequence: CTG
ttaatttgcagatacccata

SEQ ID NO: 47931 - DNA, 20 bp, Artificial Sequence
  Description of Artificial Sequence: Synthetic oligonucleotide
  Target: SCNA; (-) strand; PAM type: YTN; PAM sequence: TTC
acaatgatggaacataatag

SEQ ID NO: 47932 - DNA, 20 bp, Artificial Sequence
  Description of Artificial Sequence: Synthetic oligonucleotide
  Target: SCNA; (-) strand; PAM type: YTN; PAM sequence: CTT
cacaatgatggaacataata

SEQ ID NO: 47933 - DNA, 20 bp, Artificial Sequence
  Description of Artificial Sequence: Synthetic oligonucleotide
  Target: SCNA; (-) strand; PAM type: YTN; PAM sequence: CTG
cttcacaatgatggaacata

SEQ ID NO: 47934 - DNA, 20 bp, Artificial Sequence
  Description of Artificial Sequence: Synthetic oligonucleotide
  Target: SCNA; (-) strand; PAM type: YTN; PAM sequence: CTG
tgctgcttcacaatgatgga

SEQ ID NO: 47935 - DNA, 20 bp, Artificial Sequence
  Description of Artificial Sequence: Synthetic oligonucleotide
  Target: SCNA; (-) strand; PAM type: YTN; PAM sequence: TTC
ctgtgctgcttcacaatgat

SEQ ID NO: 47936 - DNA, 20 bp, Artificial Sequence
  Description of Artificial Sequence: Synthetic oligonucleotide
  Target: SCNA; (-) strand; PAM type: YTN; PAM sequence: TTT
cctgtgctgcttcacaatga

SEQ ID NO: 47937 - DNA, 20 bp, Artificial Sequence
  Description of Artificial Sequence: Synthetic oligonucleotide
  Target: SCNA; (-) strand; PAM type: YTN; PAM sequence: TTA
atttcctgtgctgcttcaca

SEQ ID NO: 47938 - DNA, 20 bp, Artificial Sequence
  Description of Artificial Sequence: Synthetic oligonucleotide
  Target: SCNA; (-) strand; PAM type: YTN; PAM sequence: TTA
cagatatgttaatttcctgt

SEQ ID NO: 47939 - DNA, 20 bp, Artificial Sequence
  Description of Artificial Sequence: Synthetic oligonucleotide
  Target: SCNA; (-) strand; PAM type: YTN; PAM sequence: TTA
tatagtaagggcgtggttac

SEQ ID NO: 47940 - DNA, 20 bp, Artificial Sequence
  Description of Artificial Sequence: Synthetic oligonucleotide
  Target: SCNA; (-) strand; PAM type: YTN; PAM sequence: TTC
atattatatagtaagggcgt

SEQ ID NO: 47941 - DNA, 20 bp, Artificial Sequence
  Description of Artificial Sequence: Synthetic oligonucleotide
  Target: SCNA; (-) strand; PAM type: YTN; PAM sequence: TTT
catattatatagtaagggcg

SEQ ID NO: 47942 - DNA, 20 bp, Artificial Sequence
  Description of Artificial Sequence: Synthetic oligonucleotide
  Target: SCNA; (-) strand; PAM type: YTN; PAM sequence: CTT
tcatattatatagtaagggc

SEQ ID NO: 47943 - DNA, 20 bp, Artificial Sequence
  Description of Artificial Sequence: Synthetic oligonucleotide
  Target: SCNA; (-) strand; PAM type: YTN; PAM sequence: TTA
cactttcatattatatagta

SEQ ID NO: 47944 - DNA, 20 bp, Artificial Sequence
  Description of Artificial Sequence: Synthetic oligonucleotide
  Target: SCNA; (-) strand; PAM type: YTN; PAM sequence: TTT
acactttcatattatatagt

SEQ ID NO: 47945 - DNA, 20 bp, Artificial Sequence
  Description of Artificial Sequence: Synthetic oligonucleotide
  Target: SCNA; (-) strand; PAM type: YTN; PAM sequence: TTA
atttacactttcatattata

SEQ ID NO: 47946 - DNA, 20 bp, Artificial Sequence
  Description of Artificial Sequence: Synthetic oligonucleotide
  Target: SCNA; (-) strand; PAM type: YTN; PAM sequence: TTT
aatttacactttcatattat

SEQ ID NO: 47947 - DNA, 20 bp, Artificial Sequence
  Description of Artificial Sequence: Synthetic oligonucleotide
  Target: SCNA; (-) strand; PAM type: YTN; PAM sequence: TTT
taatttacactttcatatta

SEQ ID NO: 47948 - DNA, 20 bp, Artificial Sequence
  Description of Artificial Sequence: Synthetic oligonucleotide
  Target: SCNA; (-) strand; PAM type: YTN; PAM sequence: TTA
atgaacacggcatgttttaa

SEQ ID NO: 47949 - DNA, 20 bp, Artificial Sequence
  Description of Artificial Sequence: Synthetic oligonucleotide
  Target: SCNA; (-) strand; PAM type: YTN; PAM sequence: TTT
aatgaacacggcatgtttta

SEQ ID NO: 47950 - DNA, 20 bp, Artificial Sequence
  Description of Artificial Sequence: Synthetic oligonucleotide
  Target: SCNA; (-) strand; PAM type: YTN; PAM sequence: CTC
agtttaatgaacacggcatg

SEQ ID NO: 47951 - DNA, 20 bp, Artificial Sequence
  Description of Artificial Sequence: Synthetic oligonucleotide
  Target: SCNA; (-) strand; PAM type: YTN; PAM sequence: TTA
tctcagtttaatgaacacgg

SEQ ID NO: 47952 - DNA, 20 bp, Artificial Sequence
  Description of Artificial Sequence: Synthetic oligonucleotide
  Target: SCNA; (-) strand; PAM type: YTN; PAM sequence: TTT
atctcagtttaatgaacacg

SEQ ID NO: 47953 - DNA, 20 bp, Artificial Sequence
  Description of Artificial Sequence: Synthetic oligonucleotide
  Target: SCNA; (-) strand; PAM type: YTN; PAM sequence: TTT
tatctcagtttaatgaacac

SEQ ID NO: 47954 - DNA, 20 bp, Artificial Sequence
  Description of Artificial Sequence: Synthetic oligonucleotide
  Target: SCNA; (-) strand; PAM type: YTN; PAM sequence: TTC
aaaatgtggttttatctcag

SEQ ID NO: 47955 - DNA, 20 bp, Artificial Sequence
  Description of Artificial Sequence: Synthetic oligonucleotide
  Target: SCNA; (-) strand; PAM type: YTN; PAM sequence: TTT
caaaatgtggttttatctca

SEQ ID NO: 47956 - DNA, 20 bp, Artificial Sequence
  Description of Artificial Sequence: Synthetic oligonucleotide
  Target: SCNA; (-) strand; PAM type: YTN; PAM sequence: TTT
tcaaaatgtggttttatctc

SEQ ID NO: 47957 - DNA, 20 bp, Artificial Sequence
  Description of Artificial Sequence: Synthetic oligonucleotide
  Target: SCNA; (-) strand; PAM type: YTN; PAM sequence: TTA
ttttcaaaatgtggttttat

SEQ ID NO: 47958 - DNA, 20 bp, Artificial Sequence
  Description of Artificial Sequence: Synthetic oligonucleotide
  Target: SCNA; (-) strand; PAM type: YTN; PAM sequence: TTT
attttcaaaatgtggtttta

SEQ ID NO: 47959 - DNA, 20 bp, Artificial Sequence
  Description of Artificial Sequence: Synthetic oligonucleotide
  Target: SCNA; (-) strand; PAM type: YTN; PAM sequence: CTT
tattttcaaaatgtggtttt

SEQ ID NO: 47960 - DNA, 20 bp, Artificial Sequence
  Description of Artificial Sequence: Synthetic oligonucleotide
  Target: SCNA; (-) strand; PAM type: YTN; PAM sequence: CTA
aactttattttcaaaatgtg

SEQ ID NO: 47961 - DNA, 20 bp, Artificial Sequence
  Description of Artificial Sequence: Synthetic oligonucleotide
  Target: SCNA; (-) strand; PAM type: YTN; PAM sequence: TTA
ctaaactttattttcaaaat

SEQ ID NO: 47962 - DNA, 20 bp, Artificial Sequence
  Description of Artificial Sequence: Synthetic oligonucleotide
  Target: SCNA; (-) strand; PAM type: YTN; PAM sequence: CTT
actaaactttattttcaaaa

SEQ ID NO: 47963 - DNA, 20 bp, Artificial Sequence
  Description of Artificial Sequence: Synthetic oligonucleotide
  Target: SCNA; (-) strand; PAM type: YTN; PAM sequence: CTA
agtatccacttactaaactt

SEQ ID NO: 47964 - DNA, 20 bp, Artificial Sequence
  Description of Artificial Sequence: Synthetic oligonucleotide
  Target: SCNA; (-) strand; PAM type: YTN; PAM sequence: TTA
gtatcgccaatgtgatacta

SEQ ID NO: 47965 - DNA, 20 bp, Artificial Sequence
  Description of Artificial Sequence: Synthetic oligonucleotide
  Target: SCNA; (-) strand; PAM type: YTN; PAM sequence: CTT
agtatcgccaatgtgatact

SEQ ID NO: 47966 - DNA, 20 bp, Artificial Sequence
  Description of Artificial Sequence: Synthetic oligonucleotide
  Target: SCNA; (-) strand; PAM type: YTN; PAM sequence: TTA
aaagcaagtcataagcttag

SEQ ID NO: 47967 - DNA, 20 bp, Artificial Sequence
  Description of Artificial Sequence: Synthetic oligonucleotide
  Target: SCNA; (-) strand; PAM type: YTN; PAM sequence: TTG
caatccaaatattaaaagca

SEQ ID NO: 47968 - DNA, 20 bp, Artificial Sequence
  Description of Artificial Sequence: Synthetic oligonucleotide
  Target: SCNA; (-) strand; PAM type: YTN; PAM sequence: TTT
gcaatccaaatattaaaagc

SEQ ID NO: 47969 - DNA, 20 bp, Artificial Sequence
  Description of Artificial Sequence: Synthetic oligonucleotide
  Target: SCNA; (-) strand; PAM type: YTN; PAM sequence: TTA
tttgcaatccaaatattaaa

SEQ ID NO: 47970 - DNA, 20 bp, Artificial Sequence
  Description of Artificial Sequence: Synthetic oligonucleotide
  Target: SCNA; (-) strand; PAM type: YTN; PAM sequence: TTT
atttgcaatccaaatattaa

SEQ ID NO: 47971 - DNA, 20 bp, Artificial Sequence
  Description of Artificial Sequence: Synthetic oligonucleotide
  Target: SCNA; (-) strand; PAM type: YTN; PAM sequence: TTC
caaatttatttgcaatccaa

SEQ ID NO: 47972 - DNA, 20 bp, Artificial Sequence
  Description of Artificial Sequence: Synthetic oligonucleotide
  Target: SCNA; (-) strand; PAM type: YTN; PAM sequence: CTT
ccaaatttatttgcaatcca

SEQ ID NO: 47973 - DNA, 20 bp, Artificial Sequence
  Description of Artificial Sequence: Synthetic oligonucleotide
  Target: SCNA; (-) strand; PAM type: YTN; PAM sequence: TTA
gcttccaaatttatttgcaa

SEQ ID NO: 47974 - DNA, 20 bp, Artificial Sequence
  Description of Artificial Sequence: Synthetic oligonucleotide
  Target: SCNA; (-) strand; PAM type: YTN; PAM sequence: CTC
catacattagcttccaaatt

SEQ ID NO: 47975 - DNA, 20 bp, Artificial Sequence
  Description of Artificial Sequence: Synthetic oligonucleotide
  Target: SCNA; (-) strand; PAM type: YTN; PAM sequence: TTG
tactccatacattagcttcc

SEQ ID NO: 47976 - DNA, 20 bp, Artificial Sequence
  Description of Artificial Sequence: Synthetic oligonucleotide
  Target: SCNA; (-) strand; PAM type: YTN; PAM sequence: TTA
ttgtactccatacattagct

SEQ ID NO: 47977 - DNA, 20 bp, Artificial Sequence
  Description of Artificial Sequence: Synthetic oligonucleotide
  Target: SCNA; (-) strand; PAM type: YTN; PAM sequence: CTA
ttattgtactccatacatta

SEQ ID NO: 47978 - DNA, 20 bp, Artificial Sequence
  Description of Artificial Sequence: Synthetic oligonucleotide
  Target: SCNA; (-) strand; PAM type: YTN; PAM sequence: TTC
gctattattgtactccatac

SEQ ID NO: 47979 - DNA, 20 bp, Artificial Sequence
  Description of Artificial Sequence: Synthetic oligonucleotide
  Target: SCNA; (-) strand; PAM type: YTN; PAM sequence: TTT
cgctattattgtactccata

SEQ ID NO: 47980 - DNA, 20 bp, Artificial Sequence
  Description of Artificial Sequence: Synthetic oligonucleotide
  Target: SCNA; (-) strand; PAM type: YTN; PAM sequence: TTT
tcgctattattgtactccat

SEQ ID NO: 47981 - DNA, 20 bp, Artificial Sequence
  Description of Artificial Sequence: Synthetic oligonucleotide
  Target: SCNA; (-) strand; PAM type: YTN; PAM sequence: CTT
ttcgctattattgtactcca

SEQ ID NO: 47982 - DNA, 20 bp, Artificial Sequence
  Description of Artificial Sequence: Synthetic oligonucleotide
  Target: SCNA; (-) strand; PAM type: YTN; PAM sequence: CTA
atatcaaagcccatgctttt

SEQ ID NO: 47983 - DNA, 20 bp, Artificial Sequence
  Description of Artificial Sequence: Synthetic oligonucleotide
  Target: SCNA; (-) strand; PAM type: YTN; PAM sequence: TTC
ggatgcatagccatgtctaa

SEQ ID NO: 47984 - DNA, 20 bp, Artificial Sequence
  Description of Artificial Sequence: Synthetic oligonucleotide
  Target: SCNA; (-) strand; PAM type: YTN; PAM sequence: TTG
aatcgaatatccaataataa

SEQ ID NO: 47985 - DNA, 20 bp, Artificial Sequence
  Description of Artificial Sequence: Synthetic oligonucleotide
  Target: SCNA; (-) strand; PAM type: YTN; PAM sequence: CTT
gaatcgaatatccaataata

SEQ ID NO: 47986 - DNA, 20 bp, Artificial Sequence
  Description of Artificial Sequence: Synthetic oligonucleotide
  Target: SCNA; (-) strand; PAM type: YTN; PAM sequence: TTC
ttgaatcgaatatccaataa

SEQ ID NO: 47987 - DNA, 20 bp, Artificial Sequence
  Description of Artificial Sequence: Synthetic oligonucleotide
  Target: SCNA; (-) strand; PAM type: YTN; PAM sequence: CTG
atatgttcttgaatcgaata

SEQ ID NO: 47988 - DNA, 20 bp, Artificial Sequence
  Description of Artificial Sequence: Synthetic oligonucleotide
  Target: SCNA; (-) strand; PAM type: YTN; PAM sequence: TTC
tgatatgttcttgaatcgaa

SEQ ID NO: 47989 - DNA, 20 bp, Artificial Sequence
  Description of Artificial Sequence: Synthetic oligonucleotide
  Target: SCNA; (-) strand; PAM type: YTN; PAM sequence: CTA
ttctgatatgttcttgaatc

SEQ ID NO: 47990 - DNA, 20 bp, Artificial Sequence
  Description of Artificial Sequence: Synthetic oligonucleotide
  Target: SCNA; (-) strand; PAM type: YTN; PAM sequence: TTA
ctattctgatatgttcttga

SEQ ID NO: 47991 - DNA, 20 bp, Artificial Sequence
  Description of Artificial Sequence: Synthetic oligonucleotide
  Target: SCNA; (-) strand; PAM type: YTN; PAM sequence: CTG
aatcaaatacaacataatta

SEQ ID NO: 47992 - DNA, 20 bp, Artificial Sequence
  Description of Artificial Sequence: Synthetic oligonucleotide
  Target: SCNA; (-) strand; PAM type: YTN; PAM sequence: CTC
agccactgaatcaaatacaa

SEQ ID NO: 47993 - DNA, 20 bp, Artificial Sequence
  Description of Artificial Sequence: Synthetic oligonucleotide
  Target: SCNA; (-) strand; PAM type: YTN; PAM sequence: TTC
aatctcagccactgaatcaa

SEQ ID NO: 47994 - DNA, 20 bp, Artificial Sequence
  Description of Artificial Sequence: Synthetic oligonucleotide
  Target: SCNA; (-) strand; PAM type: YTN; PAM sequence: CTT
caatctcagccactgaatca

SEQ ID NO: 47995 - DNA, 20 bp, Artificial Sequence
  Description of Artificial Sequence: Synthetic oligonucleotide
  Target: SCNA; (-) strand; PAM type: YTN; PAM sequence: TTG
cccttcaatctcagccactg

SEQ ID NO: 47996 - DNA, 20 bp, Artificial Sequence
  Description of Artificial Sequence: Synthetic oligonucleotide
  Target: SCNA; (-) strand; PAM type: YTN; PAM sequence: TTA
gttgcccttcaatctcagcc

SEQ ID NO: 47997 - DNA, 20 bp, Artificial Sequence
  Description of Artificial Sequence: Synthetic oligonucleotide
  Target: SCNA; (-) strand; PAM type: YTN; PAM sequence: TTG
gttagttgcccttcaatctc

SEQ ID NO: 47998 - DNA, 20 bp, Artificial Sequence
  Description of Artificial Sequence: Synthetic oligonucleotide
  Target: SCNA; (-) strand; PAM type: YTN; PAM sequence: CTG
ttggttagttgcccttcaat

SEQ ID NO: 47999 - DNA, 20 bp, Artificial Sequence
  Description of Artificial Sequence: Synthetic oligonucleotide
  Target: SCNA; (-) strand; PAM type: YTN; PAM sequence: CTC
tgttggttagttgcccttca

SEQ ID NO: 48000 - DNA, 20 bp, Artificial Sequence
  Description of Artificial Sequence: Synthetic oligonucleotide
  Target: SCNA; (-) strand; PAM type: YTN; PAM sequence: CTC
ctctgttggttagttgccct

SEQ ID NO: 48001 - DNA, 20 bp, Artificial Sequence
  Description of Artificial Sequence: Synthetic oligonucleotide
  Target: SCNA; (-) strand; PAM type: YTN; PAM sequence: TTC
tcctctgttggttagttgcc

SEQ ID NO: 48002 - DNA, 20 bp, Artificial Sequence
  Description of Artificial Sequence: Synthetic oligonucleotide
  Target: SCNA; (-) strand; PAM type: YTN; PAM sequence: CTT
ctcctctgttggttagttgc

SEQ ID NO: 48003 - DNA, 20 bp, Artificial Sequence
  Description of Artificial Sequence: Synthetic oligonucleotide
  Target: SCNA; (-) strand; PAM type: YTN; PAM sequence: TTA
gaacaatcaataatatcttc

SEQ ID NO: 48004 - DNA, 20 bp, Artificial Sequence
  Description of Artificial Sequence: Synthetic oligonucleotide
  Target: SCNA; (-) strand; PAM type: YTN; PAM sequence: TTT
agaacaatcaataatatctt

SEQ ID NO: 48005 - DNA, 20 bp, Artificial Sequence
  Description of Artificial Sequence: Synthetic oligonucleotide
  Target: SCNA; (-) strand; PAM type: YTN; PAM sequence: CTT
tagaacaatcaataatatct

SEQ ID NO: 48006 - DNA, 20 bp, Artificial Sequence
  Description of Artificial Sequence: Synthetic oligonucleotide
  Target: SCNA; (-) strand; PAM type: YTN; PAM sequence: TTG
gaggataaatctttagaaca

SEQ ID NO: 48007 - DNA, 20 bp, Artificial Sequence
  Description of Artificial Sequence: Synthetic oligonucleotide
  Target: SCNA; (-) strand; PAM type: YTN; PAM sequence: TTT
ggaggataaatctttagaac

SEQ ID NO: 48008 - DNA, 20 bp, Artificial Sequence
  Description of Artificial Sequence: Synthetic oligonucleotide
  Target: SCNA; (-) strand; PAM type: YTN; PAM sequence: CTT
tggaggataaatctttagaa

SEQ ID NO: 48009 - DNA, 20 bp, Artificial Sequence
  Description of Artificial Sequence: Synthetic oligonucleotide
  Target: SCNA; (-) strand; PAM type: YTN; PAM sequence: TTA
aaaaagatgtaacaagatag

SEQ ID NO: 48010 - DNA, 20 bp, Artificial Sequence
  Description of Artificial Sequence: Synthetic oligonucleotide
  Target: SCNA; (-) strand; PAM type: YTN; PAM sequence: TTT
aaaaaagatgtaacaagata

SEQ ID NO: 48011 - DNA, 20 bp, Artificial Sequence
  Description of Artificial Sequence: Synthetic oligonucleotide
  Target: SCNA; (-) strand; PAM type: YTN; PAM sequence: TTG
tttaaaaaagatgtaacaag

SEQ ID NO: 48012 - DNA, 20 bp, Artificial Sequence
  Description of Artificial Sequence: Synthetic oligonucleotide
  Target: SCNA; (-) strand; PAM type: YTN; PAM sequence: TTA
gcattgtttaaaaaagatgt

SEQ ID NO: 48013 - DNA, 20 bp, Artificial Sequence
  Description of Artificial Sequence: Synthetic oligonucleotide
  Target: SCNA; (-) strand; PAM type: YTN; PAM sequence: TTG
aataagaatatgtacaaggg

SEQ ID NO: 48014 - DNA, 20 bp, Artificial Sequence
  Description of Artificial Sequence: Synthetic oligonucleotide
  Target: SCNA; (-) strand; PAM type: YTN; PAM sequence: CTG
aggagttgaataagaatatg

SEQ ID NO: 48015 - DNA, 20 bp, Artificial Sequence
  Description of Artificial Sequence: Synthetic oligonucleotide
  Target: SCNA; (-) strand; PAM type: YTN; PAM sequence: TTG
ctgaggagttgaataagaat

SEQ ID NO: 48016 - DNA, 20 bp, Artificial Sequence
  Description of Artificial Sequence: Synthetic oligonucleotide
  Target: SCNA; (-) strand; PAM type: YTN; PAM sequence: TTT
gctgaggagttgaataagaa

SEQ ID NO: 48017 - DNA, 20 bp, Artificial Sequence
  Description of Artificial Sequence: Synthetic oligonucleotide
  Target: SCNA; (-) strand; PAM type: YTN; PAM sequence: TTG
gtcacatagaagatgtttgc

SEQ ID NO: 48018 - DNA, 20 bp, Artificial Sequence
  Description of Artificial Sequence: Synthetic oligonucleotide
  Target: SCNA; (-) strand; PAM type: YTN; PAM sequence: CTC
agaatgttggtcacatagaa

SEQ ID NO: 48019 - DNA, 20 bp, Artificial Sequence
  Description of Artificial Sequence: Synthetic oligonucleotide
  Target: SCNA; (-) strand; PAM type: YTN; PAM sequence: CTC
tcagaatgttggtcacatag

SEQ ID NO: 48020 - DNA, 20 bp, Artificial Sequence
  Description of Artificial Sequence: Synthetic oligonucleotide
  Target: SCNA; (-) strand; PAM type: YTN; PAM sequence: CTC
cagcacctctcagaatgttg

SEQ ID NO: 48021 - DNA, 20 bp, Artificial Sequence
  Description of Artificial Sequence: Synthetic oligonucleotide
  Target: SCNA; (-) strand; PAM type: YTN; PAM sequence: CTG
catctccagcacctctcaga

SEQ ID NO: 48022 - DNA, 20 bp, Artificial Sequence
  Description of Artificial Sequence: Synthetic oligonucleotide
  Target: SCNA; (-) strand; PAM type: YTN; PAM sequence: TTC
cctgcatctccagcacctct

SEQ ID NO: 48023 - DNA, 20 bp, Artificial Sequence
  Description of Artificial Sequence: Synthetic oligonucleotide
  Target: SCNA; (-) strand; PAM type: YTN; PAM sequence: CTT
ccctgcatctccagcacctc

SEQ ID NO: 48024 - DNA, 20 bp, Artificial Sequence
  Description of Artificial Sequence: Synthetic oligonucleotide
  Target: SCNA; (-) strand; PAM type: YTN; PAM sequence: CTC
ttccctgcatctccagcacc

SEQ ID NO: 48025 - DNA, 20 bp, Artificial Sequence
  Description of Artificial Sequence: Synthetic oligonucleotide
  Target: SCNA; (-) strand; PAM type: YTN; PAM sequence: TTA
ctcttccctgcatctccagc

SEQ ID NO: 48026 - DNA, 20 bp, Artificial Sequence
  Description of Artificial Sequence: Synthetic oligonucleotide
  Target: SCNA; (-) strand; PAM type: YTN; PAM sequence: CTT
actcttccctgcatctccag

SEQ ID NO: 48027 - DNA, 20 bp, Artificial Sequence
  Description of Artificial Sequence: Synthetic oligonucleotide
  Target: SCNA; (-) strand; PAM type: YTN; PAM sequence: CTG
caggtcaagcatagcatctt

SEQ ID NO: 48028 - DNA, 20 bp, Artificial Sequence
  Description of Artificial Sequence: Synthetic oligonucleotide
  Target: SCNA; (-) strand; PAM type: YTN; PAM sequence: TTC
aagatactgcaggtcaagca

SEQ ID NO: 48029 - DNA, 20 bp, Artificial Sequence
  Description of Artificial Sequence: Synthetic oligonucleotide
  Target: SCNA; (-) strand; PAM type: YTN; PAM sequence: CTT
caagatactgcaggtcaagc

SEQ ID NO: 48030 - DNA, 20 bp, Artificial Sequence
  Description of Artificial Sequence: Synthetic oligonucleotide
  Target: SCNA; (-) strand; PAM type: YTN; PAM sequence: CTA
gcttcaagatactgcaggtc

SEQ ID NO: 48031 - DNA, 20 bp, Artificial Sequence
  Description of Artificial Sequence: Synthetic oligonucleotide
  Target: SCNA; (-) strand; PAM type: YTN; PAM sequence: CTG
ccccaactagcttcaagata

SEQ ID NO: 48032 - DNA, 20 bp, Artificial Sequence
  Description of Artificial Sequence: Synthetic oligonucleotide
  Target: SCNA; (-) strand; PAM type: YTN; PAM sequence: TTG
ctgccccaactagcttcaag

SEQ ID NO: 48033 - DNA, 20 bp, Artificial Sequence
  Description of Artificial Sequence: Synthetic oligonucleotide
  Target: SCNA; (-) strand; PAM type: YTN; PAM sequence: TTT
gctgccccaactagcttcaa

SEQ ID NO: 48034 - DNA, 20 bp, Artificial Sequence
  Description of Artificial Sequence: Synthetic oligonucleotide
  Target: SCNA; (-) strand; PAM type: YTN; PAM sequence: TTA
atggtttgctgccccaacta

SEQ ID NO: 48035 - DNA, 20 bp, Artificial Sequence
  Description of Artificial Sequence: Synthetic oligonucleotide
  Target: SCNA; (-) strand; PAM type: YTN; PAM sequence: CTT
aatggtttgctgccccaact

SEQ ID NO: 48036 - DNA, 20 bp, Artificial Sequence
  Description of Artificial Sequence: Synthetic oligonucleotide
  Target: SCNA; (-) strand; PAM type: YTN; PAM sequence: CTG
aatgtcttaatggtttgctg

SEQ ID NO: 48037 - DNA, 20 bp, Artificial Sequence
  Description of Artificial Sequence: Synthetic oligonucleotide
  Target: SCNA; (-) strand; PAM type: YTN; PAM sequence: CTG
ctgaatgtcttaatggtttg

SEQ ID NO: 48038 - DNA, 20 bp, Artificial Sequence
  Description of Artificial Sequence: Synthetic oligonucleotide
  Target: SCNA; (-) strand; PAM type: YTN; PAM sequence: CTA
tgctgctgaatgtcttaatg

SEQ ID NO: 48039 - DNA, 20 bp, Artificial Sequence
  Description of Artificial Sequence: Synthetic oligonucleotide
  Target: SCNA; (-) strand; PAM type: YTN; PAM sequence: CTG
cagacaacagctatgctgct

SEQ ID NO: 48040 - DNA, 20 bp, Artificial Sequence
  Description of Artificial Sequence: Synthetic oligonucleotide
  Target: SCNA; (-) strand; PAM type: YTN; PAM sequence: TTC
tgcagacaacagctatgctg

SEQ ID NO: 48041 - DNA, 20 bp, Artificial Sequence
  Description of Artificial Sequence: Synthetic oligonucleotide
  Target: SCNA; (-) strand; PAM type: YTN; PAM sequence: TTT
ctgcagacaacagctatgct

SEQ ID NO: 48042 - DNA, 20 bp, Artificial Sequence
  Description of Artificial Sequence: Synthetic oligonucleotide
  Target: SCNA; (-) strand; PAM type: YTN; PAM sequence: CTG
tttctgcagacaacagctat

SEQ ID NO: 48043 - DNA, 20 bp, Artificial Sequence
  Description of Artificial Sequence: Synthetic oligonucleotide
  Target: SCNA; (-) strand; PAM type: YTN; PAM sequence: TTG
gatccccatctgtttctgca

SEQ ID NO: 48044 - DNA, 20 bp, Artificial Sequence
  Description of Artificial Sequence: Synthetic oligonucleotide
  Target: SCNA; (-) strand; PAM type: YTN; PAM sequence: CTT
ggatccccatctgtttctgc

SEQ ID NO: 48045 - DNA, 20 bp, Artificial Sequence
  Description of Artificial Sequence: Synthetic oligonucleotide
  Target: SCNA; (-) strand; PAM type: YTN; PAM sequence: TTC
caacccttggatccccatct

SEQ ID NO: 48046 - DNA, 20 bp, Artificial Sequence
  Description of Artificial Sequence: Synthetic oligonucleotide
  Target: SCNA; (-) strand; PAM type: YTN; PAM sequence: TTT
ccaacccttggatccccatc

SEQ ID NO: 48047 - DNA, 20 bp, Artificial Sequence
  Description of Artificial Sequence: Synthetic oligonucleotide
  Target: SCNA; (-) strand; PAM type: YTN; PAM sequence: TTA
tttccaacccttggatcccc

SEQ ID NO: 48048 - DNA, 20 bp, Artificial Sequence
  Description of Artificial Sequence: Synthetic oligonucleotide
  Target: SCNA; (-) strand; PAM type: YTN; PAM sequence: CTG
tattatttccaacccttgga

SEQ ID NO: 48049 - DNA, 20 bp, Artificial Sequence
  Description of Artificial Sequence: Synthetic oligonucleotide
  Target: SCNA; (-) strand; PAM type: YTN; PAM sequence: CTC
tgtattatttccaacccttg

SEQ ID NO: 48050 - DNA, 20 bp, Artificial Sequence
  Description of Artificial Sequence: Synthetic oligonucleotide
  Target: SCNA; (-) strand; PAM type: YTN; PAM sequence: CTC
ctctgtattatttccaaccc

SEQ ID NO: 48051 - DNA, 20 bp, Artificial Sequence
  Description of Artificial Sequence: Synthetic oligonucleotide
  Target: SCNA; (-) strand; PAM type: YTN; PAM sequence: CTC
tcctctgtattatttccaac

SEQ ID NO: 48052 - DNA, 20 bp, Artificial Sequence
  Description of Artificial Sequence: Synthetic oligonucleotide
  Target: SCNA; (-) strand; PAM type: YTN; PAM sequence: TTC
aaatgaatccatctctcctc

SEQ ID NO: 48053 - DNA, 20 bp, Artificial Sequence
  Description of Artificial Sequence: Synthetic oligonucleotide
  Target: SCNA; (-) strand; PAM type: YTN; PAM sequence: CTT
caaatgaatccatctctcct

SEQ ID NO: 48054 - DNA, 20 bp, Artificial Sequence
  Description of Artificial Sequence: Synthetic oligonucleotide
  Target: SCNA; (-) strand; PAM type: YTN; PAM sequence: CTC
ttcaaatgaatccatctctc

SEQ ID NO: 48055 - DNA, 20 bp, Artificial Sequence
  Description of Artificial Sequence: Synthetic oligonucleotide
  Target: SCNA; (-) strand; PAM type: YTN; PAM sequence: TTA
agcatgcaacaagagaactc

SEQ ID NO: 48056 - DNA, 20 bp, Artificial Sequence
  Description of Artificial Sequence: Synthetic oligonucleotide
  Target: SCNA; (-) strand; PAM type: YTN; PAM sequence: TTA
tattaagcatgcaacaagag

SEQ ID NO: 48057 - DNA, 20 bp, Artificial Sequence
  Description of Artificial Sequence: Synthetic oligonucleotide
  Target: SCNA; (-) strand; PAM type: YTN; PAM sequence: TTA
attatattaagcatgcaaca

SEQ ID NO: 48058 - DNA, 20 bp, Artificial Sequence
  Description of Artificial Sequence: Synthetic oligonucleotide
  Target: SCNA; (-) strand; PAM type: YTN; PAM sequence: TTT
aattatattaagcatgcaac

SEQ ID NO: 48059 - DNA, 20 bp, Artificial Sequence
  Description of Artificial Sequence: Synthetic oligonucleotide
  Target: SCNA; (-) strand; PAM type: YTN; PAM sequence: CTT
taattatattaagcatgcaa

SEQ ID NO: 48060 - DNA, 20 bp, Artificial Sequence
  Description of Artificial Sequence: Synthetic oligonucleotide
  Target: SCNA; (-) strand; PAM type: YTN; PAM sequence: CTA
ggcactttaattatattaag

SEQ ID NO: 48061 - DNA, 20 bp, Artificial Sequence
  Description of Artificial Sequence: Synthetic oligonucleotide
  Target: SCNA; (-) strand; PAM type: YTN; PAM sequence: CTA
gtggctaggcactttaatta

SEQ ID NO: 48062 - DNA, 20 bp, Artificial Sequence
  Description of Artificial Sequence: Synthetic oligonucleotide
  Target: SCNA; (-) strand; PAM type: YTN; PAM sequence: CTA
ctagtggctaggcactttaa

SEQ ID NO: 48063 - DNA, 20 bp, Artificial Sequence
  Description of Artificial Sequence: Synthetic oligonucleotide
  Target: SCNA; (-) strand; PAM type: YTN; PAM sequence: CTG
tcatctactagtggctaggc

SEQ ID NO: 48064 - DNA, 20 bp, Artificial Sequence
  Description of Artificial Sequence: Synthetic oligonucleotide
  Target: SCNA; (-) strand; PAM type: YTN; PAM sequence: TTA
gaaaactgtcatctactagt

SEQ ID NO: 48065 - DNA, 20 bp, Artificial Sequence
  Description of Artificial Sequence: Synthetic oligonucleotide
  Target: SCNA; (-) strand; PAM type: YTN; PAM sequence: TTA
catgatgtgtaaaattagaa

SEQ ID NO: 48066 - DNA, 20 bp, Artificial Sequence
  Description of Artificial Sequence: Synthetic oligonucleotide
  Target: SCNA; (-) strand; PAM type: YTN; PAM sequence: CTA
aggggattacatgatgtgta

SEQ ID NO: 48067 - DNA, 20 bp, Artificial Sequence
  Description of Artificial Sequence: Synthetic oligonucleotide
  Target: SCNA; (-) strand; PAM type: YTN; PAM sequence: TTC
aagactaaggggattacatg

SEQ ID NO: 48068 - DNA, 20 bp, Artificial Sequence
  Description of Artificial Sequence: Synthetic oligonucleotide
  Target: SCNA; (-) strand; PAM type: YTN; PAM sequence: CTT
caagactaaggggattacat

SEQ ID NO: 48069 - DNA, 20 bp, Artificial Sequence
  Description of Artificial Sequence: Synthetic oligonucleotide
  Target: SCNA; (-) strand; PAM type: YTN; PAM sequence: TTA
acaccatcaatatcttcaag

SEQ ID NO: 48070 - DNA, 20 bp, Artificial Sequence
  Description of Artificial Sequence: Synthetic oligonucleotide
  Target: SCNA; (-) strand; PAM type: YTN; PAM sequence: TTC
aagtgattaacaccatcaat

SEQ ID NO: 48071 - DNA, 20 bp, Artificial Sequence
  Description of Artificial Sequence: Synthetic oligonucleotide
  Target: SCNA; (-) strand; PAM type: YTN; PAM sequence: CTG
cattcaagtgattaacacca

SEQ ID NO: 48072 - DNA, 20 bp, Artificial Sequence
  Description of Artificial Sequence: Synthetic oligonucleotide
  Target: SCNA; (-) strand; PAM type: YTN; PAM sequence: TTA
atgtcactgcattcaagtga

SEQ ID NO: 48073 - DNA, 20 bp, Artificial Sequence
  Description of Artificial Sequence: Synthetic oligonucleotide
  Target: SCNA; (-) strand; PAM type: YTN; PAM sequence: TTA
ttaatgtcactgcattcaag

SEQ ID NO: 48074 - DNA, 20 bp, Artificial Sequence
  Description of Artificial Sequence: Synthetic oligonucleotide
  Target: SCNA; (-) strand; PAM type: YTN; PAM sequence: CTA
agaaattattaatgtcactg

SEQ ID NO: 48075 - DNA, 20 bp, Artificial Sequence
  Description of Artificial Sequence: Synthetic oligonucleotide
  Target: SCNA; (-) strand; PAM type: YTN; PAM sequence: TTA
tctaagaaattattaatgtc

SEQ ID NO: 48076 - DNA, 20 bp, Artificial Sequence
  Description of Artificial Sequence: Synthetic oligonucleotide
  Target: SCNA; (-) strand; PAM type: YTN; PAM sequence: TTT
atctaagaaattattaatgt

SEQ ID NO: 48077 - DNA, 20 bp, Artificial Sequence
  Description of Artificial Sequence: Synthetic oligonucleotide
  Target: SCNA; (-) strand; PAM type: YTN; PAM sequence: TTT
tatctaagaaattattaatg

SEQ ID NO: 48078 - DNA, 20 bp, Artificial Sequence
  Description of Artificial Sequence: Synthetic oligonucleotide
  Target: SCNA; (-) strand; PAM type: YTN; PAM sequence: TTT
ttatctaagaaattattaat

SEQ ID NO: 48079 - DNA, 20 bp, Artificial Sequence
  Description of Artificial Sequence: Synthetic oligonucleotide
  Target: SCNA; (-) strand; PAM type: YTN; PAM sequence: CTT
tttatctaagaaattattaa

SEQ ID NO: 48080 - DNA, 20 bp, Artificial Sequence
  Description of Artificial Sequence: Synthetic oligonucleotide
  Target: SCNA; (-) strand; PAM type: YTN; PAM sequence: TTG
gaaacagtatactttttatc

SEQ ID NO: 48081 - DNA, 20 bp, Artificial Sequence
  Description of Artificial Sequence: Synthetic oligonucleotide
  Target: SCNA; (-) strand; PAM type: YTN; PAM sequence: TTA
tgattggaaacagtatactt

SEQ ID NO: 48082 - DNA, 20 bp, Artificial Sequence
  Description of Artificial Sequence: Synthetic oligonucleotide
  Target: SCNA; (-) strand; PAM type: YTN; PAM sequence: TTT
atgattggaaacagtatact

SEQ ID NO: 48083 - DNA, 20 bp, Artificial Sequence
  Description of Artificial Sequence: Synthetic oligonucleotide
  Target: SCNA; (-) strand; PAM type: YTN; PAM sequence: CTG
ggaggcagggaatttatgat

SEQ ID NO: 48084 - DNA, 20 bp, Artificial Sequence
  Description of Artificial Sequence: Synthetic oligonucleotide
  Target: SCNA; (-) strand; PAM type: YTN; PAM sequence: CTC
acagagagtctgggaggcag

SEQ ID NO: 48085 - DNA, 20 bp, Artificial Sequence
  Description of Artificial Sequence: Synthetic oligonucleotide
  Target: SCNA; (-) strand; PAM type: YTN; PAM sequence: TTA
tgcacatgaggctcacagag

SEQ ID NO: 48086 - DNA, 20 bp, Artificial Sequence
  Description of Artificial Sequence: Synthetic oligonucleotide
  Target: SCNA; (-) strand; PAM type: YTN; PAM sequence: CTT
atgcacatgaggctcacaga

SEQ ID NO: 48087 - DNA, 20 bp, Artificial Sequence
  Description of Artificial Sequence: Synthetic oligonucleotide
  Target: SCNA; (-) strand; PAM type: YTN; PAM sequence: CTC
cacttatgcacatgaggctc

SEQ ID NO: 48088 - DNA, 20 bp, Artificial Sequence
  Description of Artificial Sequence: Synthetic oligonucleotide
  Target: SCNA; (-) strand; PAM type: YTN; PAM sequence: TTC
cctccacttatgcacatgag

SEQ ID NO: 48089 - DNA, 20 bp, Artificial Sequence
  Description of Artificial Sequence: Synthetic oligonucleotide
  Target: SCNA; (-) strand; PAM type: YTN; PAM sequence: CTT
ccctccacttatgcacatga

SEQ ID NO: 48090 - DNA, 20 bp, Artificial Sequence
  Description of Artificial Sequence: Synthetic oligonucleotide
  Target: SCNA; (-) strand; PAM type: YTN; PAM sequence: TTA
gatcagcaggtccttccctc

SEQ ID NO: 48091 - DNA, 20 bp, Artificial Sequence
  Description of Artificial Sequence: Synthetic oligonucleotide
  Target: SCNA; (-) strand; PAM type: YTN; PAM sequence: CTT
agatcagcaggtccttccct

SEQ ID NO: 48092 - DNA, 20 bp, Artificial Sequence
  Description of Artificial Sequence: Synthetic oligonucleotide
  Target: SCNA; (-) strand; PAM type: YTN; PAM sequence: TTC
ttagatcagcaggtccttcc

SEQ ID NO: 48093 - DNA, 20 bp, Artificial Sequence
  Description of Artificial Sequence: Synthetic oligonucleotide
  Target: SCNA; (-) strand; PAM type: YTN; PAM sequence: CTA
ggggtattcttagatcagca

SEQ ID NO: 48094 - DNA, 20 bp, Artificial Sequence
  Description of Artificial Sequence: Synthetic oligonucleotide
  Target: SCNA; (-) strand; PAM type: YTN; PAM sequence: TTG
acactaggggtattcttaga

SEQ ID NO: 48095 - DNA, 20 bp, Artificial Sequence
  Description of Artificial Sequence: Synthetic oligonucleotide
  Target: SCNA; (-) strand; PAM type: YTN; PAM sequence: TTT
gacactaggggtattcttag

SEQ ID NO: 48096 - DNA, 20 bp, Artificial Sequence
  Description of Artificial Sequence: Synthetic oligonucleotide
  Target: SCNA; (-) strand; PAM type: YTN; PAM sequence: CTT
tgacactaggggtattctta

SEQ ID NO: 48097 - DNA, 20 bp, Artificial Sequence
  Description of Artificial Sequence: Synthetic oligonucleotide
  Target: SCNA; (-) strand; PAM type: YTN; PAM sequence: TTC
tttgacactaggggtattct

SEQ ID NO: 48098 - DNA, 20 bp, Artificial Sequence
  Description of Artificial Sequence: Synthetic oligonucleotide
  Target: SCNA; (-) strand; PAM type: YTN; PAM sequence: CTT
ctttgacactaggggtattc

SEQ ID NO: 48099 - DNA, 20 bp, Artificial Sequence
  Description of Artificial Sequence: Synthetic oligonucleotide
  Target: SCNA; (-) strand; PAM type: YTN; PAM sequence: TTA
cttctttgacactaggggta

SEQ ID NO: 48100 - DNA, 20 bp, Artificial Sequence
  Description of Artificial Sequence: Synthetic oligonucleotide
  Target: SCNA; (-) strand; PAM type: YTN; PAM sequence: TTT
acttctttgacactaggggt

SEQ ID NO: 48101 - DNA, 20 bp, Artificial Sequence
  Description of Artificial Sequence: Synthetic oligonucleotide
  Target: SCNA; (-) strand; PAM type: YTN; PAM sequence: TTG
accatttacttctttgacac

SEQ ID NO: 48102 - DNA, 20 bp, Artificial Sequence
  Description of Artificial Sequence: Synthetic oligonucleotide
  Target: SCNA; (-) strand; PAM type: YTN; PAM sequence: CTT
gaccatttacttctttgaca

SEQ ID NO: 48103 - DNA, 20 bp, Artificial Sequence
  Description of Artificial Sequence: Synthetic oligonucleotide
  Target: SCNA; (-) strand; PAM type: YTN; PAM sequence: TTA
cttgaccatttacttctttg

SEQ ID NO: 48104 - DNA, 20 bp, Artificial Sequence
  Description of Artificial Sequence: Synthetic oligonucleotide
  Target: SCNA; (-) strand; PAM type: YTN; PAM sequence: CTT
acttgaccatttacttcttt

SEQ ID NO: 48105 - DNA, 20 bp, Artificial Sequence
  Description of Artificial Sequence: Synthetic oligonucleotide
  Target: SCNA; (-) strand; PAM type: YTN; PAM sequence: TTA
ggacaaccttacttgaccat

SEQ ID NO: 48106 - DNA, 20 bp, Artificial Sequence
  Description of Artificial Sequence: Synthetic oligonucleotide
  Target: SCNA; (-) strand; PAM type: YTN; PAM sequence: CTT
aggacaaccttacttgacca

SEQ ID NO: 48107 - DNA, 20 bp, Artificial Sequence
  Description of Artificial Sequence: Synthetic oligonucleotide
  Target: SCNA; (-) strand; PAM type: YTN; PAM sequence: TTC
ttaggacaaccttacttgac

SEQ ID NO: 48108 - DNA, 20 bp, Artificial Sequence
  Description of Artificial Sequence: Synthetic oligonucleotide
  Target: SCNA; (-) strand; PAM type: YTN; PAM sequence: CTT
cttaggacaaccttacttga

SEQ ID NO: 48109 - DNA, 20 bp, Artificial Sequence
  Description of Artificial Sequence: Synthetic oligonucleotide
  Target: SCNA; (-) strand; PAM type: YTN; PAM sequence: CTC
accagcagaaggggtaacat

SEQ ID NO: 48110 - DNA, 20 bp, Artificial Sequence
  Description of Artificial Sequence: Synthetic oligonucleotide
  Target: SCNA; (-) strand; PAM type: YTN; PAM sequence: CTG
tgctcaccagcagaaggggt

SEQ ID NO: 48111 - DNA, 20 bp, Artificial Sequence
  Description of Artificial Sequence: Synthetic oligonucleotide
  Target: SCNA; (-) strand; PAM type: YTN; PAM sequence: CTC
tgtgctcaccagcagaaggg

SEQ ID NO: 48112 - DNA, 20 bp, Artificial Sequence
  Description of Artificial Sequence: Synthetic oligonucleotide
  Target: SCNA; (-) strand; PAM type: YTN; PAM sequence: CTG
ggctctgtgctcaccagcag

SEQ ID NO: 48113 - DNA, 20 bp, Artificial Sequence
  Description of Artificial Sequence: Synthetic oligonucleotide
  Target: SCNA; (-) strand; PAM type: YTN; PAM sequence: TTA
tacctgggctctgtgctcac

SEQ ID NO: 48114 - DNA, 20 bp, Artificial Sequence
  Description of Artificial Sequence: Synthetic oligonucleotide
  Target: SCNA; (-) strand; PAM type: YTN; PAM sequence: TTT
atacctgggctctgtgctca

SEQ ID NO: 48115 - DNA, 20 bp, Artificial Sequence
  Description of Artificial Sequence: Synthetic oligonucleotide
  Target: SCNA; (-) strand; PAM type: YTN; PAM sequence: TTT
tatacctgggctctgtgctc

SEQ ID NO: 48116 - DNA, 20 bp, Artificial Sequence
  Description of Artificial Sequence: Synthetic oligonucleotide
  Target: SCNA; (-) strand; PAM type: YTN; PAM sequence: CTC
aaaaaaaaaaaaaaaaaatt

SEQ ID NO: 48117 - DNA, 20 bp, Artificial Sequence
  Description of Artificial Sequence: Synthetic oligonucleotide
  Target: SCNA; (-) strand; PAM type: YTN; PAM sequence: CTG
tctcaaaaaaaaaaaaaaaa

SEQ ID NO: 48118 - DNA, 20 bp, Artificial Sequence
  Description of Artificial Sequence: Synthetic oligonucleotide
  Target: SCNA; (-) strand; PAM type: YTN; PAM sequence: CTC
tgtctcaaaaaaaaaaaaaa

SEQ ID NO: 48119 - DNA, 20 bp, Artificial Sequence
  Description of Artificial Sequence: Synthetic oligonucleotide
  Target: SCNA; (-) strand; PAM type: YTN; PAM sequence: CTG
ggtgacagagcgagactctg

SEQ ID NO: 48120 - DNA, 20 bp, Artificial Sequence
  Description of Artificial Sequence: Synthetic oligonucleotide
  Target: SCNA; (-) strand; PAM type: YTN; PAM sequence: CTC
cagcctgggtgacagagcga

SEQ ID NO: 48121 - DNA, 20 bp, Artificial Sequence
  Description of Artificial Sequence: Synthetic oligonucleotide
  Target: SCNA; (-) strand; PAM type: YTN; PAM sequence: CTG
cactccagcctgggtgacag

SEQ ID NO: 48122 - DNA, 20 bp, Artificial Sequence
  Description of Artificial Sequence: Synthetic oligonucleotide
  Target: SCNA; (-) strand; PAM type: YTN; PAM sequence: TTG
caccactgcactccagcctg

SEQ ID NO: 48123 - DNA, 20 bp, Artificial Sequence
  Description of Artificial Sequence: Synthetic oligonucleotide
  Target: SCNA; (-) strand; PAM type: YTN; PAM sequence: TTG
cggtgagccgagattgcacc

SEQ ID NO: 48124 - DNA, 20 bp, Artificial Sequence
  Description of Artificial Sequence: Synthetic oligonucleotide
  Target: SCNA; (-) strand; PAM type: YTN; PAM sequence: TTG
aacccgggaggtggaggttg

SEQ ID NO: 48125 - DNA, 20 bp, Artificial Sequence
  Description of Artificial Sequence: Synthetic oligonucleotide
  Target: SCNA; (-) strand; PAM type: YTN; PAM sequence: CTT
gaacccgggaggtggaggtt

SEQ ID NO: 48126 - DNA, 20 bp, Artificial Sequence
  Description of Artificial Sequence: Synthetic oligonucleotide
  Target: SCNA; (-) strand; PAM type: YTN; PAM sequence: CTA
aggcaggagaatcgcttgaa

SEQ ID NO: 48127 - DNA, 20 bp, Artificial Sequence
  Description of Artificial Sequence: Synthetic oligonucleotide
  Target: SCNA; (-) strand; PAM type: YTN; PAM sequence: CTC
gggaggctaaggcaggagaa

SEQ ID NO: 48128 - DNA, 20 bp, Artificial Sequence
  Description of Artificial Sequence: Synthetic oligonucleotide
  Target: SCNA; (-) strand; PAM type: YTN; PAM sequence: CTG
ctcgggaggctaaggcagga

SEQ ID NO: 48129 - DNA, 20 bp, Artificial Sequence
  Description of Artificial Sequence: Synthetic oligonucleotide
  Target: SCNA; (-) strand; PAM type: YTN; PAM sequence: TTG
tagtcccagctgctcgggag

SEQ ID NO: 48130 - DNA, 20 bp, Artificial Sequence
  Description of Artificial Sequence: Synthetic oligonucleotide
  Target: SCNA; (-) strand; PAM type: YTN; PAM sequence: CTT
gtagtcccagctgctcggga

SEQ ID NO: 48131 - DNA, 20 bp, Artificial Sequence
  Description of Artificial Sequence: Synthetic oligonucleotide
  Target: SCNA; (-) strand; PAM type: YTN; PAM sequence: TTA
gccaggtgtggtgtcatgtg

SEQ ID NO: 48132 - DNA, 20 bp, Artificial Sequence
  Description of Artificial Sequence: Synthetic oligonucleotide
  Target: SCNA; (-) strand; PAM type: YTN; PAM sequence: CTA
aaaatacaaaaaattagcca

SEQ ID NO: 48133 - DNA, 20 bp, Artificial Sequence
  Description of Artificial Sequence: Synthetic oligonucleotide
  Target: SCNA; (-) strand; PAM type: YTN; PAM sequence: CTA
ctaaaaatacaaaaaattag

SEQ ID NO: 48134 - DNA, 20 bp, Artificial Sequence
  Description of Artificial Sequence: Synthetic oligonucleotide
  Target: SCNA; (-) strand; PAM type: YTN; PAM sequence: CTC
tactaaaaatacaaaaaatt

SEQ ID NO: 48135 - DNA, 20 bp, Artificial Sequence
  Description of Artificial Sequence: Synthetic oligonucleotide
  Target: SCNA; (-) strand; PAM type: YTN; PAM sequence: CTA
acatggtgaaaccccatctc

SEQ ID NO: 48136 - DNA, 20 bp, Artificial Sequence
  Description of Artificial Sequence: Synthetic oligonucleotide
  Target: SCNA; (-) strand; PAM type: YTN; PAM sequence: CTG
gctaacatggtgaaacccca

SEQ ID NO: 48137 - DNA, 20 bp, Artificial Sequence
  Description of Artificial Sequence: Synthetic oligonucleotide
  Target: SCNA; (-) strand; PAM type: YTN; PAM sequence: CTA
tcctggctaacatggtgaaa

SEQ ID NO: 48138 - DNA, 20 bp, Artificial Sequence
  Description of Artificial Sequence: Synthetic oligonucleotide
  Target: SCNA; (-) strand; PAM type: YTN; PAM sequence: CTG
aggcgggcagatcatgaggt

SEQ ID NO: 48139 - DNA, 20 bp, Artificial Sequence
  Description of Artificial Sequence: Synthetic oligonucleotide
  Target: SCNA; (-) strand; PAM type: YTN; PAM sequence: TTG
ggaggctgaggcgggcagat

SEQ ID NO: 48140 - DNA, 20 bp, Artificial Sequence
  Description of Artificial Sequence: Synthetic oligonucleotide
  Target: SCNA; (-) strand; PAM type: YTN; PAM sequence: TTT
gggaggctgaggcgggcaga

SEQ ID NO: 48141 - DNA, 20 bp, Artificial Sequence
  Description of Artificial Sequence: Synthetic oligonucleotide
  Target: SCNA; (-) strand; PAM type: YTN; PAM sequence: CTT
tgggaggctgaggcgggcag

SEQ ID NO: 48142 - DNA, 20 bp, Artificial Sequence
  Description of Artificial Sequence: Synthetic oligonucleotide
  Target: SCNA; (-) strand; PAM type: YTN; PAM sequence: CTG
taatcccagcactttgggag

SEQ ID NO: 48143 - DNA, 20 bp, Artificial Sequence
  Description of Artificial Sequence: Synthetic oligonucleotide
  Target: SCNA; (-) strand; PAM type: YTN; PAM sequence: CTC
acacctgtaatcccagcact

SEQ ID NO: 48144 - DNA, 20 bp, Artificial Sequence
  Description of Artificial Sequence: Synthetic oligonucleotide
  Target: SCNA; (-) strand; PAM type: YTN; PAM sequence: CTG
cagccaggcgtggtggctca

SEQ ID NO: 48145 - DNA, 20 bp, Artificial Sequence
  Description of Artificial Sequence: Synthetic oligonucleotide
  Target: SCNA; (-) strand; PAM type: YTN; PAM sequence: TTC
tgcagccaggcgtggtggct

SEQ ID NO: 48146 - DNA, 20 bp, Artificial Sequence
  Description of Artificial Sequence: Synthetic oligonucleotide
  Target: SCNA; (-) strand; PAM type: YTN; PAM sequence: CTA
ggtaaagattctgcagccag

SEQ ID NO: 48147 - DNA, 20 bp, Artificial Sequence
  Description of Artificial Sequence: Synthetic oligonucleotide
  Target: SCNA; (-) strand; PAM type: YTN; PAM sequence: TTA
cccacatggacaacagtaac

SEQ ID NO: 48148 - DNA, 20 bp, Artificial Sequence
  Description of Artificial Sequence: Synthetic oligonucleotide
  Target: SCNA; (-) strand; PAM type: YTN; PAM sequence: TTG
ttacccacatggacaacagt

SEQ ID NO: 48149 - DNA, 20 bp, Artificial Sequence
  Description of Artificial Sequence: Synthetic oligonucleotide
  Target: SCNA; (-) strand; PAM type: YTN; PAM sequence: TTC
agatgtcaagattgttaccc

SEQ ID NO: 48150 - DNA, 20 bp, Artificial Sequence
  Description of Artificial Sequence: Synthetic oligonucleotide
  Target: SCNA; (-) strand; PAM type: YTN; PAM sequence: CTT
cagatgtcaagattgttacc

SEQ ID NO: 48151 - DNA, 20 bp, Artificial Sequence
  Description of Artificial Sequence: Synthetic oligonucleotide
  Target: SCNA; (-) strand; PAM type: YTN; PAM sequence: TTC
aatgaacacttcagatgtca

SEQ ID NO: 48152 - DNA, 20 bp, Artificial Sequence
  Description of Artificial Sequence: Synthetic oligonucleotide
  Target: SCNA; (-) strand; PAM type: YTN; PAM sequence: TTA
ttcaatgaacacttcagatg

SEQ ID NO: 48153 - DNA, 20 bp, Artificial Sequence
  Description of Artificial Sequence: Synthetic oligonucleotide
  Target: SCNA; (-) strand; PAM type: YTN; PAM sequence: TTT
attcaatgaacacttcagat

SEQ ID NO: 48154 - DNA, 20 bp, Artificial Sequence
  Description of Artificial Sequence: Synthetic oligonucleotide
  Target: SCNA; (-) strand; PAM type: YTN; PAM sequence: TTT
tattcaatgaacacttcaga

SEQ ID NO: 48155 - DNA, 20 bp, Artificial Sequence
  Description of Artificial Sequence: Synthetic oligonucleotide
  Target: SCNA; (-) strand; PAM type: YTN; PAM sequence: TTT
ttattcaatgaacacttcag

SEQ ID NO: 48156 - DNA, 20 bp, Artificial Sequence
  Description of Artificial Sequence: Synthetic oligonucleotide
  Target: SCNA; (-) strand; PAM type: YTN; PAM sequence: TTC
aatacaaatttttattcaat

SEQ ID NO: 48157 - DNA, 20 bp, Artificial Sequence
  Description of Artificial Sequence: Synthetic oligonucleotide
  Target: SCNA; (-) strand; PAM type: YTN; PAM sequence: TTA
gaagaatattcaatacaaat

SEQ ID NO: 48158 - DNA, 20 bp, Artificial Sequence
  Description of Artificial Sequence: Synthetic oligonucleotide
  Target: SCNA; (-) strand; PAM type: YTN; PAM sequence: TTG
ttagaagaatattcaataca

SEQ ID NO: 48159 - DNA, 20 bp, Artificial Sequence
  Description of Artificial Sequence: Synthetic oligonucleotide
  Target: SCNA; (-) strand; PAM type: YTN; PAM sequence: TTT
gttagaagaatattcaatac

SEQ ID NO: 48160 - DNA, 20 bp, Artificial Sequence
  Description of Artificial Sequence: Synthetic oligonucleotide
  Target: SCNA; (-) strand; PAM type: YTN; PAM sequence: TTT
tgttagaagaatattcaata

SEQ ID NO: 48161 - DNA, 20 bp, Artificial Sequence
  Description of Artificial Sequence: Synthetic oligonucleotide
  Target: SCNA; (-) strand; PAM type: YTN; PAM sequence: TTC
agattttgttagaagaatat

SEQ ID NO: 48162 - DNA, 20 bp, Artificial Sequence
  Description of Artificial Sequence: Synthetic oligonucleotide
  Target: SCNA; (-) strand; PAM type: YTN; PAM sequence: TTT
cagattttgttagaagaata

SEQ ID NO: 48163 - DNA, 20 bp, Artificial Sequence
  Description of Artificial Sequence: Synthetic oligonucleotide
  Target: SCNA; (-) strand; PAM type: YTN; PAM sequence: TTT
tcagattttgttagaagaat

SEQ ID NO: 48164 - DNA, 20 bp, Artificial Sequence
  Description of Artificial Sequence: Synthetic oligonucleotide
  Target: SCNA; (-) strand; PAM type: YTN; PAM sequence: TTT
ttcagattttgttagaagaa

SEQ ID NO: 48165 - DNA, 20 bp, Artificial Sequence
  Description of Artificial Sequence: Synthetic oligonucleotide
  Target: SCNA; (-) strand; PAM type: YTN; PAM sequence: TTT
tttcagattttgttagaaga

SEQ ID NO: 48166 - DNA, 20 bp, Artificial Sequence
  Description of Artificial Sequence: Synthetic oligonucleotide
  Target: SCNA; (-) strand; PAM type: YTN; PAM sequence: CTT
ttttcagattttgttagaag

SEQ ID NO: 48167 - DNA, 20 bp, Artificial Sequence
  Description of Artificial Sequence: Synthetic oligonucleotide
  Target: SCNA; (-) strand; PAM type: YTN; PAM sequence: CTG
tacttttttcagattttgtt

SEQ ID NO: 48168 - DNA, 20 bp, Artificial Sequence
  Description of Artificial Sequence: Synthetic oligonucleotide
  Target: SCNA; (-) strand; PAM type: YTN; PAM sequence: CTC
tgtacttttttcagattttg

SEQ ID NO: 48169 - DNA, 20 bp, Artificial Sequence
  Description of Artificial Sequence: Synthetic oligonucleotide
  Target: SCNA; (-) strand; PAM type: YTN; PAM sequence: TTC
aaaaatagctctgtactttt

SEQ ID NO: 48170 - DNA, 20 bp, Artificial Sequence
  Description of Artificial Sequence: Synthetic oligonucleotide
  Target: SCNA; (-) strand; PAM type: YTN; PAM sequence: TTT
caaaaatagctctgtacttt

SEQ ID NO: 48171 - DNA, 20 bp, Artificial Sequence
  Description of Artificial Sequence: Synthetic oligonucleotide
  Target: SCNA; (-) strand; PAM type: YTN; PAM sequence: CTC
atccatttcaaaaatagctc

SEQ ID NO: 48172 - DNA, 20 bp, Artificial Sequence
  Description of Artificial Sequence: Synthetic oligonucleotide
  Target: SCNA; (-) strand; PAM type: YTN; PAM sequence: TTC
tcatccatttcaaaaatagc

SEQ ID NO: 48173 - DNA, 20 bp, Artificial Sequence
  Description of Artificial Sequence: Synthetic oligonucleotide
  Target: SCNA; (-) strand; PAM type: YTN; PAM sequence: TTA
ccatacattctcatccattt

SEQ ID NO: 48174 - DNA, 20 bp, Artificial Sequence
  Description of Artificial Sequence: Synthetic oligonucleotide
  Target: SCNA; (-) strand; PAM type: YTN; PAM sequence: CTA
aattaccatacattctcatc

SEQ ID NO: 48175 - DNA, 20 bp, Artificial Sequence
  Description of Artificial Sequence: Synthetic oligonucleotide
  Target: SCNA; (-) strand; PAM type: YTN; PAM sequence: CTA
gctaaattaccatacattct

SEQ ID NO: 48176 - DNA, 20 bp, Artificial Sequence
  Description of Artificial Sequence: Synthetic oligonucleotide
  Target: SCNA; (-) strand; PAM type: YTN; PAM sequence: CTG
aaaacaggacacatacaatg

SEQ ID NO: 48177 - DNA, 20 bp, Artificial Sequence
  Description of Artificial Sequence: Synthetic oligonucleotide
  Target: SCNA; (-) strand; PAM type: YTN; PAM sequence: TTC
agtagcaatgataactgaaa

SEQ ID NO: 48178 - DNA, 20 bp, Artificial Sequence
  Description of Artificial Sequence: Synthetic oligonucleotide
  Target: SCNA; (-) strand; PAM type: YTN; PAM sequence: CTA
aagataaataattcagtagc

SEQ ID NO: 48179 - DNA, 20 bp, Artificial Sequence
  Description of Artificial Sequence: Synthetic oligonucleotide
  Target: SCNA; (-) strand; PAM type: YTN; PAM sequence: TTA
tacacctaaagataaataat

SEQ ID NO: 48180 - DNA, 20 bp, Artificial Sequence
  Description of Artificial Sequence: Synthetic oligonucleotide
  Target: SCNA; (-) strand; PAM type: YTN; PAM sequence: TTT
atacacctaaagataaataa

SEQ ID NO: 48181 - DNA, 20 bp, Artificial Sequence
  Description of Artificial Sequence: Synthetic oligonucleotide
  Target: SCNA; (-) strand; PAM type: YTN; PAM sequence: CTA
taatttatacacctaaagat

SEQ ID NO: 48182 - DNA, 20 bp, Artificial Sequence
  Description of Artificial Sequence: Synthetic oligonucleotide
  Target: SCNA; (-) strand; PAM type: YTN; PAM sequence: TTG
actataatttatacacctaa

SEQ ID NO: 48183 - DNA, 20 bp, Artificial Sequence
  Description of Artificial Sequence: Synthetic oligonucleotide
  Target: SCNA; (-) strand; PAM type: YTN; PAM sequence: CTT
gactataatttatacaccta

SEQ ID NO: 48184 - DNA, 20 bp, Artificial Sequence
  Description of Artificial Sequence: Synthetic oligonucleotide
  Target: SCNA; (-) strand; PAM type: YTN; PAM sequence: TTG
taagcatcttgactataatt

SEQ ID NO: 48185 - DNA, 20 bp, Artificial Sequence
  Description of Artificial Sequence: Synthetic oligonucleotide
  Target: SCNA; (-) strand; PAM type: YTN; PAM sequence: TTC
atcaattgtaagcatcttga

SEQ ID NO: 48186 - DNA, 20 bp, Artificial Sequence
  Description of Artificial Sequence: Synthetic oligonucleotide
  Target: SCNA; (-) strand; PAM type: YTN; PAM sequence: CTT
catcaattgtaagcatcttg

SEQ ID NO: 48187 - DNA, 20 bp, Artificial Sequence
  Description of Artificial Sequence: Synthetic oligonucleotide
  Target: SCNA; (-) strand; PAM type: YTN; PAM sequence: TTC
cttcatcaattgtaagcatc

SEQ ID NO: 48188 - DNA, 20 bp, Artificial Sequence
  Description of Artificial Sequence: Synthetic oligonucleotide
  Target: SCNA; (-) strand; PAM type: YTN; PAM sequence: CTT
ccttcatcaattgtaagcat

SEQ ID NO: 48189 - DNA, 20 bp, Artificial Sequence
  Description of Artificial Sequence: Synthetic oligonucleotide
  Target: SCNA; (-) strand; PAM type: YTN; PAM sequence: TTC
ttccttcatcaattgtaagc

SEQ ID NO: 48190 - DNA, 20 bp, Artificial Sequence
  Description of Artificial Sequence: Synthetic oligonucleotide
  Target: SCNA; (-) strand; PAM type: YTN; PAM sequence: TTA
aaatcattcttccttcatca

SEQ ID NO: 48191 - DNA, 20 bp, Artificial Sequence
  Description of Artificial Sequence: Synthetic oligonucleotide
  Target: SCNA; (-) strand; PAM type: YTN; PAM sequence: TTT
aaaatcattcttccttcatc

SEQ ID NO: 48192 - DNA, 20 bp, Artificial Sequence
  Description of Artificial Sequence: Synthetic oligonucleotide
  Target: SCNA; (-) strand; PAM type: YTN; PAM sequence: TTT
taaaatcattcttccttcat

SEQ ID NO: 48193 - DNA, 20 bp, Artificial Sequence
  Description of Artificial Sequence: Synthetic oligonucleotide
  Target: SCNA; (-) strand; PAM type: YTN; PAM sequence: CTG
tgttttaaaatcattcttcc

SEQ ID NO: 48194 - DNA, 20 bp, Artificial Sequence
  Description of Artificial Sequence: Synthetic oligonucleotide
  Target: SCNA; (-) strand; PAM type: YTN; PAM sequence: CTC
tgtgttttaaaatcattctt

SEQ ID NO: 48195 - DNA, 20 bp, Artificial Sequence
  Description of Artificial Sequence: Synthetic oligonucleotide
  Target: SCNA; (-) strand; PAM type: YTN; PAM sequence: TTG
ctctgtgttttaaaatcatt

SEQ ID NO: 48196 - DNA, 20 bp, Artificial Sequence
  Description of Artificial Sequence: Synthetic oligonucleotide
  Target: SCNA; (-) strand; PAM type: YTN; PAM sequence: TTT
gctctgtgttttaaaatcat

SEQ ID NO: 48197 - DNA, 20 bp, Artificial Sequence
  Description of Artificial Sequence: Synthetic oligonucleotide
  Target: SCNA; (-) strand; PAM type: YTN; PAM sequence: TTT
tgctctgtgttttaaaatca

SEQ ID NO: 48198 - DNA, 20 bp, Artificial Sequence
  Description of Artificial Sequence: Synthetic oligonucleotide
  Target: SCNA; (-) strand; PAM type: YTN; PAM sequence: TTA
aaataacattttgctctgtg

SEQ ID NO: 48199 - DNA, 20 bp, Artificial Sequence
  Description of Artificial Sequence: Synthetic oligonucleotide
  Target: SCNA; (-) strand; PAM type: YTN; PAM sequence: TTT
aaaataacattttgctctgt

SEQ ID NO: 48200 - DNA, 20 bp, Artificial Sequence
  Description of Artificial Sequence: Synthetic oligonucleotide
  Target: SCNA; (-) strand; PAM type: YTN; PAM sequence: CTG
tatttaaaataacattttgc

SEQ ID NO: 48201 - DNA, 20 bp, Artificial Sequence
  Description of Artificial Sequence: Synthetic oligonucleotide
  Target: SCNA; (-) strand; PAM type: YTN; PAM sequence: TTC
tgtatttaaaataacatttt

SEQ ID NO: 48202 - DNA, 20 bp, Artificial Sequence
  Description of Artificial Sequence: Synthetic oligonucleotide
  Target: SCNA; (-) strand; PAM type: YTN; PAM sequence: CTT
ctgtatttaaaataacattt

SEQ ID NO: 48203 - DNA, 20 bp, Artificial Sequence
  Description of Artificial Sequence: Synthetic oligonucleotide
  Target: SCNA; (-) strand; PAM type: YTN; PAM sequence: TTC
atggaggagaagaatagact

SEQ ID NO: 48204 - DNA, 20 bp, Artificial Sequence
  Description of Artificial Sequence: Synthetic oligonucleotide
  Target: SCNA; (-) strand; PAM type: YTN; PAM sequence: TTA
ttcatggaggagaagaatag

SEQ ID NO: 48205 - DNA, 20 bp, Artificial Sequence
  Description of Artificial Sequence: Synthetic oligonucleotide
  Target: SCNA; (-) strand; PAM type: YTN; PAM sequence: CTA
atatacaatagaaacagaat

SEQ ID NO: 48206 - DNA, 20 bp, Artificial Sequence
  Description of Artificial Sequence: Synthetic oligonucleotide
  Target: SCNA; (-) strand; PAM type: YTN; PAM sequence: TTC
aacctaatatacaatagaaa

SEQ ID NO: 48207 - DNA, 20 bp, Artificial Sequence
  Description of Artificial Sequence: Synthetic oligonucleotide
  Target: SCNA; (-) strand; PAM type: YTN; PAM sequence: TTT
caacctaatatacaatagaa

SEQ ID NO: 48208 - DNA, 20 bp, Artificial Sequence
  Description of Artificial Sequence: Synthetic oligonucleotide
  Target: SCNA; (-) strand; PAM type: YTN; PAM sequence: CTG
gtaatgacaaaaacacatat

SEQ ID NO: 48209 - DNA, 20 bp, Artificial Sequence
  Description of Artificial Sequence: Synthetic oligonucleotide
  Target: SCNA; (-) strand; PAM type: YTN; PAM sequence: CTG
tggaaacactggtaatgaca

SEQ ID NO: 48210 - DNA, 20 bp, Artificial Sequence
  Description of Artificial Sequence: Synthetic oligonucleotide
  Target: SCNA; (-) strand; PAM type: YTN; PAM sequence: TTA
tcctgtggaaacactggtaa

SEQ ID NO: 48211 - DNA, 20 bp, Artificial Sequence
  Description of Artificial Sequence: Synthetic oligonucleotide
  Target: SCNA; (-) strand; PAM type: YTN; PAM sequence: CTT
atcctgtggaaacactggta

SEQ ID NO: 48212 - DNA, 20 bp, Artificial Sequence
  Description of Artificial Sequence: Synthetic oligonucleotide
  Target: SCNA; (-) strand; PAM type: YTN; PAM sequence: TTC
agtcttatcctgtggaaaca

SEQ ID NO: 48213 - DNA, 20 bp, Artificial Sequence
  Description of Artificial Sequence: Synthetic oligonucleotide
  Target: SCNA; (-) strand; PAM type: YTN; PAM sequence: CTT
cagtcttatcctgtggaaac

SEQ ID NO: 48214 - DNA, 20 bp, Artificial Sequence
  Description of Artificial Sequence: Synthetic oligonucleotide
  Target: SCNA; (-) strand; PAM type: YTN; PAM sequence: TTG
tgccttcagtcttatcctgt

SEQ ID NO: 48215 - DNA, 20 bp, Artificial Sequence
  Description of Artificial Sequence: Synthetic oligonucleotide
  Target: SCNA; (-) strand; PAM type: YTN; PAM sequence: CTT
gtgccttcagtcttatcctg

SEQ ID NO: 48216 - DNA, 20 bp, Artificial Sequence
  Description of Artificial Sequence: Synthetic oligonucleotide
  Target: SCNA; (-) strand; PAM type: YTN; PAM sequence: TTA
aatgcttgtgccttcagtct

SEQ ID NO: 48217 - DNA, 20 bp, Artificial Sequence
  Description of Artificial Sequence: Synthetic oligonucleotide
  Target: SCNA; (-) strand; PAM type: YTN; PAM sequence: TTC
agcaaatattaaatgcttgt

SEQ ID NO: 48218 - DNA, 20 bp, Artificial Sequence
  Description of Artificial Sequence: Synthetic oligonucleotide
  Target: SCNA; (-) strand; PAM type: YTN; PAM sequence: TTT
cagcaaatattaaatgcttg

SEQ ID NO: 48219 - DNA, 20 bp, Artificial Sequence
  Description of Artificial Sequence: Synthetic oligonucleotide
  Target: SCNA; (-) strand; PAM type: YTN; PAM sequence: CTT
tcagcaaatattaaatgctt

SEQ ID NO: 48220 - DNA, 20 bp, Artificial Sequence
  Description of Artificial Sequence: Synthetic oligonucleotide
  Target: SCNA; (-) strand; PAM type: YTN; PAM sequence: TTA
agtgctttcagcaaatatta

SEQ ID NO: 48221 - DNA, 20 bp, Artificial Sequence
  Description of Artificial Sequence: Synthetic oligonucleotide
  Target: SCNA; (-) strand; PAM type: YTN; PAM sequence: TTT
aagtgctttcagcaaatatt

SEQ ID NO: 48222 - DNA, 20 bp, Artificial Sequence
  Description of Artificial Sequence: Synthetic oligonucleotide
  Target: SCNA; (-) strand; PAM type: YTN; PAM sequence: CTG
tttaagtgctttcagcaaat

SEQ ID NO: 48223 - DNA, 20 bp, Artificial Sequence
  Description of Artificial Sequence: Synthetic oligonucleotide
  Target: SCNA; (-) strand; PAM type: YTN; PAM sequence: TTC
tgtttaagtgctttcagcaa

SEQ ID NO: 48224 - DNA, 20 bp, Artificial Sequence
  Description of Artificial Sequence: Synthetic oligonucleotide
  Target: SCNA; (-) strand; PAM type: YTN; PAM sequence: TTT
ctgtttaagtgctttcagca

SEQ ID NO: 48225 - DNA, 20 bp, Artificial Sequence
  Description of Artificial Sequence: Synthetic oligonucleotide
  Target: SCNA; (-) strand; PAM type: YTN; PAM sequence: TTT
tctgtttaagtgctttcagc

SEQ ID NO: 48226 - DNA, 20 bp, Artificial Sequence
  Description of Artificial Sequence: Synthetic oligonucleotide
  Target: SCNA; (-) strand; PAM type: YTN; PAM sequence: TTT
ttctgtttaagtgctttcag

SEQ ID NO: 48227 - DNA, 20 bp, Artificial Sequence
  Description of Artificial Sequence: Synthetic oligonucleotide
  Target: SCNA; (-) strand; PAM type: YTN; PAM sequence: TTT
tttctgtttaagtgctttca

SEQ ID NO: 48228 - DNA, 20 bp, Artificial Sequence
  Description of Artificial Sequence: Synthetic oligonucleotide
  Target: SCNA; (-) strand; PAM type: YTN; PAM sequence: CTA
gccaatattttttctgttta

SEQ ID NO: 48229 - DNA, 20 bp, Artificial Sequence
  Description of Artificial Sequence: Synthetic oligonucleotide
  Target: SCNA; (-) strand; PAM type: YTN; PAM sequence: CTC
actagccaatattttttctg

SEQ ID NO: 48230 - DNA, 20 bp, Artificial Sequence
  Description of Artificial Sequence: Synthetic oligonucleotide
  Target: SCNA; (-) strand; PAM type: YTN; PAM sequence: TTA
atctcactagccaatatttt

SEQ ID NO: 48231 - DNA, 20 bp, Artificial Sequence
  Description of Artificial Sequence: Synthetic oligonucleotide
  Target: SCNA; (-) strand; PAM type: YTN; PAM sequence: CTT
aatctcactagccaatattt

SEQ ID NO: 48232 - DNA, 20 bp, Artificial Sequence
  Description of Artificial Sequence: Synthetic oligonucleotide
  Target: SCNA; (-) strand; PAM type: YTN; PAM sequence: TTC
ttaatctcactagccaatat

SEQ ID NO: 48233 - DNA, 20 bp, Artificial Sequence
  Description of Artificial Sequence: Synthetic oligonucleotide
  Target: SCNA; (-) strand; PAM type: YTN; PAM sequence: TTC
attcttaatctcactagcca

SEQ ID NO: 48234 - DNA, 20 bp, Artificial Sequence
  Description of Artificial Sequence: Synthetic oligonucleotide
  Target: SCNA; (-) strand; PAM type: YTN; PAM sequence: TTT
cattcttaatctcactagcc

SEQ ID NO: 48235 - DNA, 20 bp, Artificial Sequence
  Description of Artificial Sequence: Synthetic oligonucleotide
  Target: SCNA; (-) strand; PAM type: YTN; PAM sequence: TTA
tttcattcttaatctcacta

SEQ ID NO: 48236 - DNA, 20 bp, Artificial Sequence
  Description of Artificial Sequence: Synthetic oligonucleotide
  Target: SCNA; (-) strand; PAM type: YTN; PAM sequence: CTT
atttcattcttaatctcact

SEQ ID NO: 48237 - DNA, 20 bp, Artificial Sequence
  Description of Artificial Sequence: Synthetic oligonucleotide
  Target: SCNA; (-) strand; PAM type: YTN; PAM sequence: CTA
ccttatttcattcttaatct

SEQ ID NO: 48238 - DNA, 20 bp, Artificial Sequence
  Description of Artificial Sequence: Synthetic oligonucleotide
  Target: SCNA; (-) strand; PAM type: YTN; PAM sequence: TTG
tctaccttatttcattctta

SEQ ID NO: 48239 - DNA, 20 bp, Artificial Sequence
  Description of Artificial Sequence: Synthetic oligonucleotide
  Target: SCNA; (-) strand; PAM type: YTN; PAM sequence: TTT
gtctaccttatttcattctt

SEQ ID NO: 48240 - DNA, 20 bp, Artificial Sequence
  Description of Artificial Sequence: Synthetic oligonucleotide
  Target: SCNA; (-) strand; PAM type: YTN; PAM sequence: CTA
tttgtctaccttatttcatt

SEQ ID NO: 48241 - DNA, 20 bp, Artificial Sequence
  Description of Artificial Sequence: Synthetic oligonucleotide
  Target: SCNA; (-) strand; PAM type: YTN; PAM sequence: TTG
cagccagctatttgtctacc

SEQ ID NO: 48242 - DNA, 20 bp, Artificial Sequence
  Description of Artificial Sequence: Synthetic oligonucleotide
  Target: SCNA; (-) strand; PAM type: YTN; PAM sequence: TTT
gcagccagctatttgtctac

SEQ ID NO: 48243 - DNA, 20 bp, Artificial Sequence
  Description of Artificial Sequence: Synthetic oligonucleotide
  Target: SCNA; (-) strand; PAM type: YTN; PAM sequence: TTT
tgcagccagctatttgtcta

SEQ ID NO: 48244 - DNA, 20 bp, Artificial Sequence
  Description of Artificial Sequence: Synthetic oligonucleotide
  Target: SCNA; (-) strand; PAM type: YTN; PAM sequence: CTT
ttgcagccagctatttgtct

SEQ ID NO: 48245 - DNA, 20 bp, Artificial Sequence
  Description of Artificial Sequence: Synthetic oligonucleotide
  Target: SCNA; (-) strand; PAM type: YTN; PAM sequence: CTC
ttttgcagccagctatttgt

SEQ ID NO: 48246 - DNA, 20 bp, Artificial Sequence
  Description of Artificial Sequence: Synthetic oligonucleotide
  Target: SCNA; (-) strand; PAM type: YTN; PAM sequence: TTA
aggtctcttttgcagccagc

SEQ ID NO: 48247 - DNA, 20 bp, Artificial Sequence
  Description of Artificial Sequence: Synthetic oligonucleotide
  Target: SCNA; (-) strand; PAM type: YTN; PAM sequence: TTT
aaggtctcttttgcagccag

SEQ ID NO: 48248 - DNA, 20 bp, Artificial Sequence
  Description of Artificial Sequence: Synthetic oligonucleotide
  Target: SCNA; (-) strand; PAM type: YTN; PAM sequence: TTT
taaggtctcttttgcagcca

SEQ ID NO: 48249 - DNA, 20 bp, Artificial Sequence
  Description of Artificial Sequence: Synthetic oligonucleotide
  Target: SCNA; (-) strand; PAM type: YTN; PAM sequence: TTT
ttaaggtctcttttgcagcc

SEQ ID NO: 48250 - DNA, 20 bp, Artificial Sequence
  Description of Artificial Sequence: Synthetic oligonucleotide
  Target: SCNA; (-) strand; PAM type: YTN; PAM sequence: CTT
tttaaggtctcttttgcagc

SEQ ID NO: 48251 - DNA, 20 bp, Artificial Sequence
  Description of Artificial Sequence: Synthetic oligonucleotide
  Target: SCNA; (-) strand; PAM type: YTN; PAM sequence: CTG
agaaactttttaaggtctct

SEQ ID NO: 48252 - DNA, 20 bp, Artificial Sequence
  Description of Artificial Sequence: Synthetic oligonucleotide
  Target: SCNA; (-) strand; PAM type: YTN; PAM sequence: CTC
tgagaaactttttaaggtct

SEQ ID NO: 48253 - DNA, 20 bp, Artificial Sequence
  Description of Artificial Sequence: Synthetic oligonucleotide
  Target: SCNA; (-) strand; PAM type: YTN; PAM sequence: TTG
gccaggctctgagaaacttt

SEQ ID NO: 48254 - DNA, 20 bp, Artificial Sequence
  Description of Artificial Sequence: Synthetic oligonucleotide
  Target: SCNA; (-) strand; PAM type: YTN; PAM sequence: TTT
ggccaggctctgagaaactt

SEQ ID NO: 48255 - DNA, 20 bp, Artificial Sequence
  Description of Artificial Sequence: Synthetic oligonucleotide
  Target: SCNA; (-) strand; PAM type: YTN; PAM sequence: TTT
tggccaggctctgagaaact

SEQ ID NO: 48256 - DNA, 20 bp, Artificial Sequence
  Description of Artificial Sequence: Synthetic oligonucleotide
  Target: SCNA; (-) strand; PAM type: YTN; PAM sequence: TTG
ccattttggccaggctctga

SEQ ID NO: 48257 - DNA, 20 bp, Artificial Sequence
  Description of Artificial Sequence: Synthetic oligonucleotide
  Target: SCNA; (-) strand; PAM type: YTN; PAM sequence: TTT
gccattttggccaggctctg

SEQ ID NO: 48258 - DNA, 20 bp, Artificial Sequence
  Description of Artificial Sequence: Synthetic oligonucleotide
  Target: SCNA; (-) strand; PAM type: YTN; PAM sequence: TTT
tgccattttggccaggctct

SEQ ID NO: 48259 - DNA, 20 bp, Artificial Sequence
  Description of Artificial Sequence: Synthetic oligonucleotide
  Target: SCNA; (-) strand; PAM type: YTN; PAM sequence: TTA
gtagagatggggttttgcca

SEQ ID NO: 48260 - DNA, 20 bp, Artificial Sequence
  Description of Artificial Sequence: Synthetic oligonucleotide
  Target: SCNA; (-) strand; PAM type: YTN; PAM sequence: CTT
agtagagatggggttttgcc

SEQ ID NO: 48261 - DNA, 20 bp, Artificial Sequence
  Description of Artificial Sequence: Synthetic oligonucleotide
  Target: SCNA; (-) strand; PAM type: YTN; PAM sequence: TTC
ttagtagagatggggttttg

SEQ ID NO: 48262 - DNA, 20 bp, Artificial Sequence
  Description of Artificial Sequence: Synthetic oligonucleotide
  Target: SCNA; (-) strand; PAM type: YTN; PAM sequence: TTG
tattcttagtagagatgggg

SEQ ID NO: 48263 - DNA, 20 bp, Artificial Sequence
  Description of Artificial Sequence: Synthetic oligonucleotide
  Target: SCNA; (-) strand; PAM type: YTN; PAM sequence: TTT
gtattcttagtagagatggg

SEQ ID NO: 48264 - DNA, 20 bp, Artificial Sequence
  Description of Artificial Sequence: Synthetic oligonucleotide
  Target: SCNA; (-) strand; PAM type: YTN; PAM sequence: TTT
tgtattcttagtagagatgg

SEQ ID NO: 48265 - DNA, 20 bp, Artificial Sequence
  Description of Artificial Sequence: Synthetic oligonucleotide
  Target: SCNA; (-) strand; PAM type: YTN; PAM sequence: TTT
ttgtattcttagtagagatg

SEQ ID NO: 48266 - DNA, 20 bp, Artificial Sequence
  Description of Artificial Sequence: Synthetic oligonucleotide
  Target: SCNA; (-) strand; PAM type: YTN; PAM sequence: CTA
atttttgtattcttagtaga

SEQ ID NO: 48267 - DNA, 20 bp, Artificial Sequence
  Description of Artificial Sequence: Synthetic oligonucleotide
  Target: SCNA; (-) strand; PAM type: YTN; PAM sequence: TTA
caggtgcatggtaccacacc

SEQ ID NO: 48268 - DNA, 20 bp, Artificial Sequence
  Description of Artificial Sequence: Synthetic oligonucleotide
  Target: SCNA; (-) strand; PAM type: YTN; PAM sequence: CTG
agattacaggtgcatggtac

SEQ ID NO: 48269 - DNA, 20 bp, Artificial Sequence
  Description of Artificial Sequence: Synthetic oligonucleotide
  Target: SCNA; (-) strand; PAM type: YTN; PAM sequence: TTG
agtagctgagattacaggtg

SEQ ID NO: 48270 - DNA, 20 bp, Artificial Sequence
  Description of Artificial Sequence: Synthetic oligonucleotide
  Target: SCNA; (-) strand; PAM type: YTN; PAM sequence: CTT
gagtagctgagattacaggt

SEQ ID NO: 48271 - DNA, 20 bp, Artificial Sequence
  Description of Artificial Sequence: Synthetic oligonucleotide
  Target: SCNA; (-) strand; PAM type: YTN; PAM sequence: CTC
ttgagtagctgagattacag

SEQ ID NO: 48272 - DNA, 20 bp, Artificial Sequence
  Description of Artificial Sequence: Synthetic oligonucleotide
  Target: SCNA; (-) strand; PAM type: YTN; PAM sequence: CTC
agcctcttgagtagctgaga

SEQ ID NO: 48273 - DNA, 20 bp, Artificial Sequence
  Description of Artificial Sequence: Synthetic oligonucleotide
  Target: SCNA; (-) strand; PAM type: YTN; PAM sequence: CTG
cctcagcctcttgagtagct

SEQ ID NO: 48274 - DNA, 20 bp, Artificial Sequence
  Description of Artificial Sequence: Synthetic oligonucleotide
  Target: SCNA; (-) strand; PAM type: YTN; PAM sequence: CTC
ctgcctcagcctcttgagta

SEQ ID NO: 48275 - DNA, 20 bp, Artificial Sequence
  Description of Artificial Sequence: Synthetic oligonucleotide
  Target: SCNA; (-) strand; PAM type: YTN; PAM sequence: TTC
tcctgcctcagcctcttgag

SEQ ID NO: 48276 - DNA, 20 bp, Artificial Sequence
  Description of Artificial Sequence: Synthetic oligonucleotide
  Target: SCNA; (-) strand; PAM type: YTN; PAM sequence: TTC
aagcaattctcctgcctcag

SEQ ID NO: 48277 - DNA, 20 bp, Artificial Sequence
  Description of Artificial Sequence: Synthetic oligonucleotide
  Target: SCNA; (-) strand; PAM type: YTN; PAM sequence: CTG
ggttcaagcaattctcctgc

SEQ ID NO: 48278 - DNA, 20 bp, Artificial Sequence
  Description of Artificial Sequence: Synthetic oligonucleotide
  Target: SCNA; (-) strand; PAM type: YTN; PAM sequence: CTC
ctgggttcaagcaattctcc

SEQ ID NO: 48279 - DNA, 20 bp, Artificial Sequence
  Description of Artificial Sequence: Synthetic oligonucleotide
  Target: SCNA; (-) strand; PAM type: YTN; PAM sequence: CTG
cctcctgggttcaagcaatt

SEQ ID NO: 48280 - DNA, 20 bp, Artificial Sequence
  Description of Artificial Sequence: Synthetic oligonucleotide
  Target: SCNA; (-) strand; PAM type: YTN; PAM sequence: CTC
tgcctcctgggttcaagcaa

SEQ ID NO: 48281 - DNA, 20 bp, Artificial Sequence
  Description of Artificial Sequence: Synthetic oligonucleotide
  Target: SCNA; (-) strand; PAM type: YTN; PAM sequence: CTA
cctctgcctcctgggttcaa

SEQ ID NO: 48282 - DNA, 20 bp, Artificial Sequence
  Description of Artificial Sequence: Synthetic oligonucleotide
  Target: SCNA; (-) strand; PAM type: YTN; PAM sequence: CTG
caacctacctctgcctcctg

SEQ ID NO: 48283 - DNA, 20 bp, Artificial Sequence
  Description of Artificial Sequence: Synthetic oligonucleotide
  Target: SCNA; (-) strand; PAM type: YTN; PAM sequence: CTC
actgcaacctacctctgcct

SEQ ID NO: 48284 - DNA, 20 bp, Artificial Sequence
  Description of Artificial Sequence: Synthetic oligonucleotide
  Target: SCNA; (-) strand; PAM type: YTN; PAM sequence: TTG
gctcactgcaacctacctct

SEQ ID NO: 48285 - DNA, 20 bp, Artificial Sequence
  Description of Artificial Sequence: Synthetic oligonucleotide
  Target: SCNA; (-) strand; PAM type: YTN; PAM sequence: CTT
ggctcactgcaacctacctc

SEQ ID NO: 48286 - DNA, 20 bp, Artificial Sequence
  Description of Artificial Sequence: Synthetic oligonucleotide
  Target: SCNA; (-) strand; PAM type: YTN; PAM sequence: CTG
gaatacagtgccatgatctt

SEQ ID NO: 48287 - DNA, 20 bp, Artificial Sequence
  Description of Artificial Sequence: Synthetic oligonucleotide
  Target: SCNA; (-) strand; PAM type: YTN; PAM sequence: TTG
cccaggctggaatacagtgc

SEQ ID NO: 48288 - DNA, 20 bp, Artificial Sequence
  Description of Artificial Sequence: Synthetic oligonucleotide
  Target: SCNA; (-) strand; PAM type: YTN; PAM sequence: CTA
ttgcccaggctggaatacag

SEQ ID NO: 48289 - DNA, 20 bp, Artificial Sequence
  Description of Artificial Sequence: Synthetic oligonucleotide
  Target: SCNA; (-) strand; PAM type: YTN; PAM sequence: CTC
tattgcccaggctggaatac

SEQ ID NO: 48290 - DNA, 20 bp, Artificial Sequence
  Description of Artificial Sequence: Synthetic oligonucleotide
  Target: SCNA; (-) strand; PAM type: YTN; PAM sequence: TTG
ctctattgcccaggctggaa

SEQ ID NO: 48291 - DNA, 20 bp, Artificial Sequence
  Description of Artificial Sequence: Synthetic oligonucleotide
  Target: SCNA; (-) strand; PAM type: YTN; PAM sequence: CTT
gctctattgcccaggctgga

SEQ ID NO: 48292 - DNA, 20 bp, Artificial Sequence
  Description of Artificial Sequence: Synthetic oligonucleotide
  Target: SCNA; (-) strand; PAM type: YTN; PAM sequence: TTG
agacagagtcttgctctatt

SEQ ID NO: 48293 - DNA, 20 bp, Artificial Sequence
  Description of Artificial Sequence: Synthetic oligonucleotide
  Target: SCNA; (-) strand; PAM type: YTN; PAM sequence: TTT
gagacagagtcttgctctat

SEQ ID NO: 48294 - DNA, 20 bp, Artificial Sequence
  Description of Artificial Sequence: Synthetic oligonucleotide
  Target: SCNA; (-) strand; PAM type: YTN; PAM sequence: TTT
tgagacagagtcttgctcta

SEQ ID NO: 48295 - DNA, 20 bp, Artificial Sequence
  Description of Artificial Sequence: Synthetic oligonucleotide
  Target: SCNA; (-) strand; PAM type: YTN; PAM sequence: TTT
ttgagacagagtcttgctct

SEQ ID NO: 48296 - DNA, 20 bp, Artificial Sequence
  Description of Artificial Sequence: Synthetic oligonucleotide
  Target: SCNA; (-) strand; PAM type: YTN; PAM sequence: TTT
tttgagacagagtcttgctc

SEQ ID NO: 48297 - DNA, 20 bp, Artificial Sequence
  Description of Artificial Sequence: Synthetic oligonucleotide
  Target: SCNA; (-) strand; PAM type: YTN; PAM sequence: TTT
ttttgagacagagtcttgct

SEQ ID NO: 48298 - DNA, 20 bp, Artificial Sequence
  Description of Artificial Sequence: Synthetic oligonucleotide
  Target: SCNA; (-) strand; PAM type: YTN; PAM sequence: CTT
tttttgagacagagtcttgc

SEQ ID NO: 48299 - DNA, 20 bp, Artificial Sequence
  Description of Artificial Sequence: Synthetic oligonucleotide
  Target: SCNA; (-) strand; PAM type: YTN; PAM sequence: TTC
tttttttgagacagagtctt

SEQ ID NO: 48300 - DNA, 20 bp, Artificial Sequence
  Description of Artificial Sequence: Synthetic oligonucleotide
  Target: SCNA; (-) strand; PAM type: YTN; PAM sequence: TTT
ctttttttgagacagagtct

SEQ ID NO: 48301 - DNA, 20 bp, Artificial Sequence
  Description of Artificial Sequence: Synthetic oligonucleotide
  Target: SCNA; (-) strand; PAM type: YTN; PAM sequence: CTT
tctttttttgagacagagtc

SEQ ID NO: 48302 - DNA, 20 bp, Artificial Sequence
  Description of Artificial Sequence: Synthetic oligonucleotide
  Target: SCNA; (-) strand; PAM type: YTN; PAM sequence: CTG
ataaactttctttttttgag

SEQ ID NO: 48303 - DNA, 20 bp, Artificial Sequence
  Description of Artificial Sequence: Synthetic oligonucleotide
  Target: SCNA; (-) strand; PAM type: YTN; PAM sequence: TTA
atagactgataaactttctt

SEQ ID NO: 48304 - DNA, 20 bp, Artificial Sequence
  Description of Artificial Sequence: Synthetic oligonucleotide
  Target: SCNA; (-) strand; PAM type: YTN; PAM sequence: CTT
aatagactgataaactttct

SEQ ID NO: 48305 - DNA, 20 bp, Artificial Sequence
  Description of Artificial Sequence: Synthetic oligonucleotide
  Target: SCNA; (-) strand; PAM type: YTN; PAM sequence: TTC
ttaatagactgataaacttt

SEQ ID NO: 48306 - DNA, 20 bp, Artificial Sequence
  Description of Artificial Sequence: Synthetic oligonucleotide
  Target: SCNA; (-) strand; PAM type: YTN; PAM sequence: TTG
taaaaatcaagtatattctt

SEQ ID NO: 48307 - DNA, 20 bp, Artificial Sequence
  Description of Artificial Sequence: Synthetic oligonucleotide
  Target: SCNA; (-) strand; PAM type: YTN; PAM sequence: CTT
gtaaaaatcaagtatattct

SEQ ID NO: 48308 - DNA, 20 bp, Artificial Sequence
  Description of Artificial Sequence: Synthetic oligonucleotide
  Target: SCNA; (-) strand; PAM type: YTN; PAM sequence: TTC
ttgtaaaaatcaagtatatt

SEQ ID NO: 48309 - DNA, 20 bp, Artificial Sequence
  Description of Artificial Sequence: Synthetic oligonucleotide
  Target: SCNA; (-) strand; PAM type: YTN; PAM sequence: CTT
cttgtaaaaatcaagtatat

SEQ ID NO: 48310 - DNA, 20 bp, Artificial Sequence
  Description of Artificial Sequence: Synthetic oligonucleotide
  Target: SCNA; (-) strand; PAM type: YTN; PAM sequence: TTC
ttcttgtaaaaatcaagtat

SEQ ID NO: 48311 - DNA, 20 bp, Artificial Sequence
  Description of Artificial Sequence: Synthetic oligonucleotide
  Target: SCNA; (-) strand; PAM type: YTN; PAM sequence: TTG
attcttcttgtaaaaatcaa

SEQ ID NO: 48312 - DNA, 20 bp, Artificial Sequence
  Description of Artificial Sequence: Synthetic oligonucleotide
  Target: SCNA; (-) strand; PAM type: YTN; PAM sequence: TTG
taaagcaattgattcttctt

SEQ ID NO: 48313 - DNA, 20 bp, Artificial Sequence
  Description of Artificial Sequence: Synthetic oligonucleotide
  Target: SCNA; (-) strand; PAM type: YTN; PAM sequence: TTT
gtaaagcaattgattcttct

SEQ ID NO: 48314 - DNA, 20 bp, Artificial Sequence
  Description of Artificial Sequence: Synthetic oligonucleotide
  Target: SCNA; (-) strand; PAM type: YTN; PAM sequence: CTT
tgtaaagcaattgattcttc

SEQ ID NO: 48315 - DNA, 20 bp, Artificial Sequence
  Description of Artificial Sequence: Synthetic oligonucleotide
  Target: SCNA; (-) strand; PAM type: YTN; PAM sequence: TTA
gataaataactttgtaaagc

SEQ ID NO: 48316 - DNA, 20 bp, Artificial Sequence
  Description of Artificial Sequence: Synthetic oligonucleotide
  Target: SCNA; (-) strand; PAM type: YTN; PAM sequence: TTT
agataaataactttgtaaag

SEQ ID NO: 48317 - DNA, 20 bp, Artificial Sequence
  Description of Artificial Sequence: Synthetic oligonucleotide
  Target: SCNA; (-) strand; PAM type: YTN; PAM sequence: TTT
tagataaataactttgtaaa

SEQ ID NO: 48318 - DNA, 20 bp, Artificial Sequence
  Description of Artificial Sequence: Synthetic oligonucleotide
  Target: SCNA; (-) strand; PAM type: YTN; PAM sequence: TTC
atacattttagataaataac

SEQ ID NO: 48319 - DNA, 20 bp, Artificial Sequence
  Description of Artificial Sequence: Synthetic oligonucleotide
  Target: SCNA; (-) strand; PAM type: YTN; PAM sequence: TTA
ttcatacattttagataaat

SEQ ID NO: 48320 - DNA, 20 bp, Artificial Sequence
  Description of Artificial Sequence: Synthetic oligonucleotide
  Target: SCNA; (-) strand; PAM type: YTN; PAM sequence: TTT
attcatacattttagataaa

SEQ ID NO: 48321 - DNA, 20 bp, Artificial Sequence
  Description of Artificial Sequence: Synthetic oligonucleotide
  Target: SCNA; (-) strand; PAM type: YTN; PAM sequence: TTT
tattcatacattttagataa

SEQ ID NO: 48322 - DNA, 20 bp, Artificial Sequence
  Description of Artificial Sequence: Synthetic oligonucleotide
  Target: SCNA; (-) strand; PAM type: YTN; PAM sequence: TTT
ttattcatacattttagata

SEQ ID NO: 48323 - DNA, 20 bp, Artificial Sequence
  Description of Artificial Sequence: Synthetic oligonucleotide
  Target: SCNA; (-) strand; PAM type: YTN; PAM sequence: TTA
tacatttttattcatacatt

SEQ ID NO: 48324 - DNA, 20 bp, Artificial Sequence
  Description of Artificial Sequence: Synthetic oligonucleotide
  Target: SCNA; (-) strand; PAM type: YTN; PAM sequence: TTA
tagttatacatttttattca

SEQ ID NO: 48325 - DNA, 20 bp, Artificial Sequence
  Description of Artificial Sequence: Synthetic oligonucleotide
  Target: SCNA; (-) strand; PAM type: YTN; PAM sequence: TTT
atagttatacatttttattc

SEQ ID NO: 48326 - DNA, 20 bp, Artificial Sequence
  Description of Artificial Sequence: Synthetic oligonucleotide
  Target: SCNA; (-) strand; PAM type: YTN; PAM sequence: TTA
tagatatgtttatagttata

SEQ ID NO: 48327 - DNA, 20 bp, Artificial Sequence
  Description of Artificial Sequence: Synthetic oligonucleotide
  Target: SCNA; (-) strand; PAM type: YTN; PAM sequence: TTT
atagatatgtttatagttat

SEQ ID NO: 48328 - DNA, 20 bp, Artificial Sequence
  Description of Artificial Sequence: Synthetic oligonucleotide
  Target: SCNA; (-) strand; PAM type: YTN; PAM sequence: TTT
tatagatatgtttatagtta

SEQ ID NO: 48329 - DNA, 20 bp, Artificial Sequence
  Description of Artificial Sequence: Synthetic oligonucleotide
  Target: SCNA; (-) strand; PAM type: YTN; PAM sequence: CTA
gttttatagatatgtttata

SEQ ID NO: 48330 - DNA, 20 bp, Artificial Sequence
  Description of Artificial Sequence: Synthetic oligonucleotide
  Target: SCNA; (-) strand; PAM type: YTN; PAM sequence: TTA
ctagttttatagatatgttt

SEQ ID NO: 48331 - DNA, 20 bp, Artificial Sequence
  Description of Artificial Sequence: Synthetic oligonucleotide
  Target: SCNA; (-) strand; PAM type: YTN; PAM sequence: TTT
actagttttatagatatgtt

SEQ ID NO: 48332 - DNA, 20 bp, Artificial Sequence
  Description of Artificial Sequence: Synthetic oligonucleotide
  Target: SCNA; (-) strand; PAM type: YTN; PAM sequence: CTT
tactagttttatagatatgt

SEQ ID NO: 48333 - DNA, 20 bp, Artificial Sequence
  Description of Artificial Sequence: Synthetic oligonucleotide
  Target: SCNA; (-) strand; PAM type: YTN; PAM sequence: TTG
atctttactagttttataga

SEQ ID NO: 48334 - DNA, 20 bp, Artificial Sequence
  Description of Artificial Sequence: Synthetic oligonucleotide
  Target: SCNA; (-) strand; PAM type: YTN; PAM sequence: TTT
gatctttactagttttatag

SEQ ID NO: 48335 - DNA, 20 bp, Artificial Sequence
  Description of Artificial Sequence: Synthetic oligonucleotide
  Target: SCNA; (-) strand; PAM type: YTN; PAM sequence: TTT
tgatctttactagttttata

SEQ ID NO: 48336 - DNA, 20 bp, Artificial Sequence
  Description of Artificial Sequence: Synthetic oligonucleotide
  Target: SCNA; (-) strand; PAM type: YTN; PAM sequence: CTT
ttgatctttactagttttat

SEQ ID NO: 48337 - DNA, 20 bp, Artificial Sequence
  Description of Artificial Sequence: Synthetic oligonucleotide
  Target: SCNA; (-) strand; PAM type: YTN; PAM sequence: CTG
agcttttgatctttactagt

SEQ ID NO: 48338 - DNA, 20 bp, Artificial Sequence
  Description of Artificial Sequence: Synthetic oligonucleotide
  Target: SCNA; (-) strand; PAM type: YTN; PAM sequence: TTA
aagatacctgagcttttgat

SEQ ID NO: 48339 - DNA, 20 bp, Artificial Sequence
  Description of Artificial Sequence: Synthetic oligonucleotide
  Target: SCNA; (-) strand; PAM type: YTN; PAM sequence: TTG
tgaatagtagaagcagagaa

SEQ ID NO: 48340 - DNA, 20 bp, Artificial Sequence
  Description of Artificial Sequence: Synthetic oligonucleotide
  Target: SCNA; (-) strand; PAM type: YTN; PAM sequence: TTT
gtgaatagtagaagcagaga

SEQ ID NO: 48341 - DNA, 20 bp, Artificial Sequence
  Description of Artificial Sequence: Synthetic oligonucleotide
  Target: SCNA; (-) strand; PAM type: YTN; PAM sequence: TTT
tgtgaatagtagaagcagag

SEQ ID NO: 48342 - DNA, 20 bp, Artificial Sequence
  Description of Artificial Sequence: Synthetic oligonucleotide
  Target: SCNA; (-) strand; PAM type: YTN; PAM sequence: TTT
ttgtgaatagtagaagcaga

SEQ ID NO: 48343 - DNA, 20 bp, Artificial Sequence
  Description of Artificial Sequence: Synthetic oligonucleotide
  Target: SCNA; (-) strand; PAM type: YTN; PAM sequence: CTG
agcaaatatttttgtgaata

SEQ ID NO: 48344 - DNA, 20 bp, Artificial Sequence
  Description of Artificial Sequence: Synthetic oligonucleotide
  Target: SCNA; (-) strand; PAM type: YTN; PAM sequence: CTC
tgagcaaatatttttgtgaa

SEQ ID NO: 48345 - DNA, 20 bp, Artificial Sequence
  Description of Artificial Sequence: Synthetic oligonucleotide
  Target: SCNA; (-) strand; PAM type: YTN; PAM sequence: CTG
tgtctctgagcaaatatttt

SEQ ID NO: 48346 - DNA, 20 bp, Artificial Sequence
  Description of Artificial Sequence: Synthetic oligonucleotide
  Target: SCNA; (-) strand; PAM type: YTN; PAM sequence: TTC
tgtgtctctgagcaaatatt

SEQ ID NO: 48347 - DNA, 20 bp, Artificial Sequence
  Description of Artificial Sequence: Synthetic oligonucleotide
  Target: SCNA; (-) strand; PAM type: YTN; PAM sequence: TTT
ctgtgtctctgagcaaatat

SEQ ID NO: 48348 - DNA, 20 bp, Artificial Sequence
  Description of Artificial Sequence: Synthetic oligonucleotide
  Target: SCNA; (-) strand; PAM type: YTN; PAM sequence: TTG
aagatgagtttctgtgtctc

SEQ ID NO: 48349 - DNA, 20 bp, Artificial Sequence
  Description of Artificial Sequence: Synthetic oligonucleotide
  Target: SCNA; (-) strand; PAM type: YTN; PAM sequence: CTT
gaagatgagtttctgtgtct

SEQ ID NO: 48350 - DNA, 20 bp, Artificial Sequence
  Description of Artificial Sequence: Synthetic oligonucleotide
  Target: SCNA; (-) strand; PAM type: YTN; PAM sequence: CTC
cacccagataaaaataaatc

SEQ ID NO: 48351 - DNA, 20 bp, Artificial Sequence
  Description of Artificial Sequence: Synthetic oligonucleotide
  Target: SCNA; (-) strand; PAM type: YTN; PAM sequence: CTG
taactccacccagataaaaa

SEQ ID NO: 48352 - DNA, 20 bp, Artificial Sequence
  Description of Artificial Sequence: Synthetic oligonucleotide
  Target: SCNA; (-) strand; PAM type: YTN; PAM sequence: CTC
tgtaactccacccagataaa

SEQ ID NO: 48353 - DNA, 20 bp, Artificial Sequence
  Description of Artificial Sequence: Synthetic oligonucleotide
  Target: SCNA; (-) strand; PAM type: YTN; PAM sequence: TTA
ccaaggcaactctgtaactc

SEQ ID NO: 48354 - DNA, 20 bp, Artificial Sequence
  Description of Artificial Sequence: Synthetic oligonucleotide
  Target: SCNA; (-) strand; PAM type: YTN; PAM sequence: CTG
ttaccaaggcaactctgtaa

SEQ ID NO: 48355 - DNA, 20 bp, Artificial Sequence
  Description of Artificial Sequence: Synthetic oligonucleotide
  Target: SCNA; (-) strand; PAM type: YTN; PAM sequence: TTG
ctgttaccaaggcaactctg

SEQ ID NO: 48356 - DNA, 20 bp, Artificial Sequence
  Description of Artificial Sequence: Synthetic oligonucleotide
  Target: SCNA; (-) strand; PAM type: YTN; PAM sequence: TTG
gtgatagttgctgttaccaa

SEQ ID NO: 48357 - DNA, 20 bp, Artificial Sequence
  Description of Artificial Sequence: Synthetic oligonucleotide
  Target: SCNA; (-) strand; PAM type: YTN; PAM sequence: TTT
ggtgatagttgctgttacca

SEQ ID NO: 48358 - DNA, 20 bp, Artificial Sequence
  Description of Artificial Sequence: Synthetic oligonucleotide
  Target: SCNA; (-) strand; PAM type: YTN; PAM sequence: TTA
atttggtgatagttgctgtt

SEQ ID NO: 48359 - DNA, 20 bp, Artificial Sequence
  Description of Artificial Sequence: Synthetic oligonucleotide
  Target: SCNA; (-) strand; PAM type: YTN; PAM sequence: CTT
aatttggtgatagttgctgt

SEQ ID NO: 48360 - DNA, 20 bp, Artificial Sequence
  Description of Artificial Sequence: Synthetic oligonucleotide
  Target: SCNA; (-) strand; PAM type: YTN; PAM sequence: TTA
acacttaatttggtgatagt

SEQ ID NO: 48361 - DNA, 20 bp, Artificial Sequence
  Description of Artificial Sequence: Synthetic oligonucleotide
  Target: SCNA; (-) strand; PAM type: YTN; PAM sequence: CTT
aacacttaatttggtgatag

SEQ ID NO: 48362 - DNA, 20 bp, Artificial Sequence
  Description of Artificial Sequence: Synthetic oligonucleotide
  Target: SCNA; (-) strand; PAM type: YTN; PAM sequence: TTA
aaaacgtgtgcttaacactt

SEQ ID NO: 48363 - DNA, 20 bp, Artificial Sequence
  Description of Artificial Sequence: Synthetic oligonucleotide
  Target: SCNA; (-) strand; PAM type: YTN; PAM sequence: TTT
aaaaacgtgtgcttaacact

SEQ ID NO: 48364 - DNA, 20 bp, Artificial Sequence
  Description of Artificial Sequence: Synthetic oligonucleotide
  Target: SCNA; (-) strand; PAM type: YTN; PAM sequence: TTA
aaaatgtttaaaaacgtgtg

SEQ ID NO: 48365 - DNA, 20 bp, Artificial Sequence
  Description of Artificial Sequence: Synthetic oligonucleotide
  Target: SCNA; (-) strand; PAM type: YTN; PAM sequence: TTA
aaatgttaaaaatgtttaaa

SEQ ID NO: 48366 - DNA, 20 bp, Artificial Sequence
  Description of Artificial Sequence: Synthetic oligonucleotide
  Target: SCNA; (-) strand; PAM type: YTN; PAM sequence: TTT
aaaatgttaaaaatgtttaa

SEQ ID NO: 48367 - DNA, 20 bp, Artificial Sequence
  Description of Artificial Sequence: Synthetic oligonucleotide
  Target: SCNA; (-) strand; PAM type: YTN; PAM sequence: TTT
taaaatgttaaaaatgttta

SEQ ID NO: 48368 - DNA, 20 bp, Artificial Sequence
  Description of Artificial Sequence: Synthetic oligonucleotide
  Target: SCNA; (-) strand; PAM type: YTN; PAM sequence: TTT
ttaaaatgttaaaaatgttt

SEQ ID NO: 48369 - DNA, 20 bp, Artificial Sequence
  Description of Artificial Sequence: Synthetic oligonucleotide
  Target: SCNA; (-) strand; PAM type: YTN; PAM sequence: CTG
catttttaaaatgttaaaaa

SEQ ID NO: 48370 - DNA, 20 bp, Artificial Sequence
  Description of Artificial Sequence: Synthetic oligonucleotide
  Target: SCNA; (-) strand; PAM type: YTN; PAM sequence: TTG
gcatctgcatttttaaaatg

SEQ ID NO: 48371 - DNA, 20 bp, Artificial Sequence
  Description of Artificial Sequence: Synthetic oligonucleotide
  Target: SCNA; (-) strand; PAM type: YTN; PAM sequence: TTT
ggcatctgcatttttaaaat

SEQ ID NO: 48372 - DNA, 20 bp, Artificial Sequence
  Description of Artificial Sequence: Synthetic oligonucleotide
  Target: SCNA; (-) strand; PAM type: YTN; PAM sequence: CTT
tggcatctgcatttttaaaa

SEQ ID NO: 48373 - DNA, 20 bp, Artificial Sequence
  Description of Artificial Sequence: Synthetic oligonucleotide
  Target: SCNA; (-) strand; PAM type: YTN; PAM sequence: CTC
ctttggcatctgcattttta

SEQ ID NO: 48374 - DNA, 20 bp, Artificial Sequence
  Description of Artificial Sequence: Synthetic oligonucleotide
  Target: SCNA; (-) strand; PAM type: YTN; PAM sequence: CTC
tcctttggcatctgcatttt

SEQ ID NO: 48375 - DNA, 20 bp, Artificial Sequence
  Description of Artificial Sequence: Synthetic oligonucleotide
  Target: SCNA; (-) strand; PAM type: YTN; PAM sequence: TTG
ctctcctttggcatctgcat

SEQ ID NO: 48376 - DNA, 20 bp, Artificial Sequence
  Description of Artificial Sequence: Synthetic oligonucleotide
  Target: SCNA; (-) strand; PAM type: YTN; PAM sequence: CTG
acattgctctcctttggcat

SEQ ID NO: 48377 - DNA, 20 bp, Artificial Sequence
  Description of Artificial Sequence: Synthetic oligonucleotide
  Target: SCNA; (-) strand; PAM type: YTN; PAM sequence: CTC
ctgacattgctctcctttgg

SEQ ID NO: 48378 - DNA, 20 bp, Artificial Sequence
  Description of Artificial Sequence: Synthetic oligonucleotide
  Target: SCNA; (-) strand; PAM type: YTN; PAM sequence: CTC
tcctgacattgctctccttt

SEQ ID NO: 48379 - DNA, 20 bp, Artificial Sequence
  Description of Artificial Sequence: Synthetic oligonucleotide
  Target: SCNA; (-) strand; PAM type: YTN; PAM sequence: TTC
tctcctgacattgctctcct

SEQ ID NO: 48380 - DNA, 20 bp, Artificial Sequence
  Description of Artificial Sequence: Synthetic oligonucleotide
  Target: SCNA; (-) strand; PAM type: YTN; PAM sequence: TTA
caacattctctcctgacatt

SEQ ID NO: 48381 - DNA, 20 bp, Artificial Sequence
  Description of Artificial Sequence: Synthetic oligonucleotide
  Target: SCNA; (-) strand; PAM type: YTN; PAM sequence: TTT
acaacattctctcctgacat

SEQ ID NO: 48382 - DNA, 20 bp, Artificial Sequence
  Description of Artificial Sequence: Synthetic oligonucleotide
  Target: SCNA; (-) strand; PAM type: YTN; PAM sequence: TTG
taatgtcaagtagatgtggg

SEQ ID NO: 48383 - DNA, 20 bp, Artificial Sequence
  Description of Artificial Sequence: Synthetic oligonucleotide
  Target: SCNA; (-) strand; PAM type: YTN; PAM sequence: CTT
gtaatgtcaagtagatgtgg

SEQ ID NO: 48384 - DNA, 20 bp, Artificial Sequence
  Description of Artificial Sequence: Synthetic oligonucleotide
  Target: SCNA; (-) strand; PAM type: YTN; PAM sequence: CTG
aaagtagtacaaaccttgta

SEQ ID NO: 48385 - DNA, 20 bp, Artificial Sequence
  Description of Artificial Sequence: Synthetic oligonucleotide
  Target: SCNA; (-) strand; PAM type: YTN; PAM sequence: TTC
tgaaagtagtacaaaccttg

SEQ ID NO: 48386 - DNA, 20 bp, Artificial Sequence
  Description of Artificial Sequence: Synthetic oligonucleotide
  Target: SCNA; (-) strand; PAM type: YTN; PAM sequence: TTT
ctgaaagtagtacaaacctt

SEQ ID NO: 48387 - DNA, 20 bp, Artificial Sequence
  Description of Artificial Sequence: Synthetic oligonucleotide
  Target: SCNA; (-) strand; PAM type: YTN; PAM sequence: CTG
gagaatttctgaaagtagta

SEQ ID NO: 48388 - DNA, 20 bp, Artificial Sequence
  Description of Artificial Sequence: Synthetic oligonucleotide
  Target: SCNA; (-) strand; PAM type: YTN; PAM sequence: TTA
aacactggagaatttctgaa

SEQ ID NO: 48389 - DNA, 20 bp, Artificial Sequence
  Description of Artificial Sequence: Synthetic oligonucleotide
  Target: SCNA; (-) strand; PAM type: YTN; PAM sequence: TTT
aaacactggagaatttctga

SEQ ID NO: 48390 - DNA, 20 bp, Artificial Sequence
  Description of Artificial Sequence: Synthetic oligonucleotide
  Target: SCNA; (-) strand; PAM type: YTN; PAM sequence: TTT
taaacactggagaatttctg

SEQ ID NO: 48391 - DNA, 20 bp, Artificial Sequence
  Description of Artificial Sequence: Synthetic oligonucleotide
  Target: SCNA; (-) strand; PAM type: YTN; PAM sequence: TTT
ttaaacactggagaatttct

SEQ ID NO: 48392 - DNA, 20 bp, Artificial Sequence
  Description of Artificial Sequence: Synthetic oligonucleotide
  Target: SCNA; (-) strand; PAM type: YTN; PAM sequence: TTT
tttaaacactggagaatttc

SEQ ID NO: 48393 - DNA, 20 bp, Artificial Sequence
  Description of Artificial Sequence: Synthetic oligonucleotide
  Target: SCNA; (-) strand; PAM type: YTN; PAM sequence: TTA
tagacgcattttttaaacac

SEQ ID NO: 48394 - DNA, 20 bp, Artificial Sequence
  Description of Artificial Sequence: Synthetic oligonucleotide
  Target: SCNA; (-) strand; PAM type: YTN; PAM sequence: TTT
atagacgcattttttaaaca

SEQ ID NO: 48395 - DNA, 20 bp, Artificial Sequence
  Description of Artificial Sequence: Synthetic oligonucleotide
  Target: SCNA; (-) strand; PAM type: YTN; PAM sequence: CTG
tgtatatgtgtgtttataga

SEQ ID NO: 48396 - DNA, 20 bp, Artificial Sequence
  Description of Artificial Sequence: Synthetic oligonucleotide
  Target: SCNA; (-) strand; PAM type: YTN; PAM sequence: CTC
tgtgtatatgtgtgtttata

SEQ ID NO: 48397 - DNA, 20 bp, Artificial Sequence
  Description of Artificial Sequence: Synthetic oligonucleotide
  Target: SCNA; (-) strand; PAM type: YTN; PAM sequence: TTC
aataagaagtgctctgtgta

SEQ ID NO: 48398 - DNA, 20 bp, Artificial Sequence
  Description of Artificial Sequence: Synthetic oligonucleotide
  Target: SCNA; (-) strand; PAM type: YTN; PAM sequence: CTT
caataagaagtgctctgtgt

SEQ ID NO: 48399 - DNA, 20 bp, Artificial Sequence
  Description of Artificial Sequence: Synthetic oligonucleotide
  Target: SCNA; (-) strand; PAM type: YTN; PAM sequence: TTA
cttcaataagaagtgctctg

SEQ ID NO: 48400 - DNA, 20 bp, Artificial Sequence
  Description of Artificial Sequence: Synthetic oligonucleotide
  Target: SCNA; (-) strand; PAM type: YTN; PAM sequence: TTA
aggtgattacttcaataaga

SEQ ID NO: 48401 - DNA, 20 bp, Artificial Sequence
  Description of Artificial Sequence: Synthetic oligonucleotide
  Target: SCNA; (-) strand; PAM type: YTN; PAM sequence: TTT
aaggtgattacttcaataag

SEQ ID NO: 48402 - DNA, 20 bp, Artificial Sequence
  Description of Artificial Sequence: Synthetic oligonucleotide
  Target: SCNA; (-) strand; PAM type: YTN; PAM sequence: TTT
taaggtgattacttcaataa

SEQ ID NO: 48403 - DNA, 20 bp, Artificial Sequence
  Description of Artificial Sequence: Synthetic oligonucleotide
  Target: SCNA; (-) strand; PAM type: YTN; PAM sequence: TTT
ttaaggtgattacttcaata

SEQ ID NO: 48404 - DNA, 20 bp, Artificial Sequence
  Description of Artificial Sequence: Synthetic oligonucleotide
  Target: SCNA; (-) strand; PAM type: YTN; PAM sequence: TTA
cataatttttaaggtgatta

SEQ ID NO: 48405 - DNA, 20 bp, Artificial Sequence
  Description of Artificial Sequence: Synthetic oligonucleotide
  Target: SCNA; (-) strand; PAM type: YTN; PAM sequence: TTG
cattacataatttttaaggt

SEQ ID NO: 48406 - DNA, 20 bp, Artificial Sequence
  Description of Artificial Sequence: Synthetic oligonucleotide
  Target: SCNA; (-) strand; PAM type: YTN; PAM sequence: TTC
attgcattacataattttta

SEQ ID NO: 48407 - DNA, 20 bp, Artificial Sequence
  Description of Artificial Sequence: Synthetic oligonucleotide
  Target: SCNA; (-) strand; PAM type: YTN; PAM sequence: TTT
cattgcattacataattttt

SEQ ID NO: 48408 - DNA, 20 bp, Artificial Sequence
  Description of Artificial Sequence: Synthetic oligonucleotide
  Target: SCNA; (-) strand; PAM type: YTN; PAM sequence: TTT
tcattgcattacataatttt

SEQ ID NO: 48409 - DNA, 20 bp, Artificial Sequence
  Description of Artificial Sequence: Synthetic oligonucleotide
  Target: SCNA; (-) strand; PAM type: YTN; PAM sequence: TTG
tggttttcattgcattacat

SEQ ID NO: 48410 - DNA, 20 bp, Artificial Sequence
  Description of Artificial Sequence: Synthetic oligonucleotide
  Target: SCNA; (-) strand; PAM type: YTN; PAM sequence: TTA
gtcaatggtaggaaaaccat

SEQ ID NO: 48411 - DNA, 20 bp, Artificial Sequence
  Description of Artificial Sequence: Synthetic oligonucleotide
  Target: SCNA; (-) strand; PAM type: YTN; PAM sequence: CTT
agtcaatggtaggaaaacca

SEQ ID NO: 48412 - DNA, 20 bp, Artificial Sequence
  Description of Artificial Sequence: Synthetic oligonucleotide
  Target: SCNA; (-) strand; PAM type: YTN; PAM sequence: TTC
ttagtcaatggtaggaaaac

SEQ ID NO: 48413 - DNA, 20 bp, Artificial Sequence
  Description of Artificial Sequence: Synthetic oligonucleotide
  Target: SCNA; (-) strand; PAM type: YTN; PAM sequence: TTT
cttagtcaatggtaggaaaa

SEQ ID NO: 48414 - DNA, 20 bp, Artificial Sequence
  Description of Artificial Sequence: Synthetic oligonucleotide
  Target: SCNA; (-) strand; PAM type: YTN; PAM sequence: CTT
tcttagtcaatggtaggaaa

SEQ ID NO: 48415 - DNA, 20 bp, Artificial Sequence
  Description of Artificial Sequence: Synthetic oligonucleotide
  Target: SCNA; (-) strand; PAM type: YTN; PAM sequence: TTG
ctttcttagtcaatggtagg

SEQ ID NO: 48416 - DNA, 20 bp, Artificial Sequence
  Description of Artificial Sequence: Synthetic oligonucleotide
  Target: SCNA; (-) strand; PAM type: YTN; PAM sequence: TTT
gctttcttagtcaatggtag

SEQ ID NO: 48417 - DNA, 20 bp, Artificial Sequence
  Description of Artificial Sequence: Synthetic oligonucleotide
  Target: SCNA; (-) strand; PAM type: YTN; PAM sequence: CTT
tgctttcttagtcaatggta

SEQ ID NO: 48418 - DNA, 20 bp, Artificial Sequence
  Description of Artificial Sequence: Synthetic oligonucleotide
  Target: SCNA; (-) strand; PAM type: YTN; PAM sequence: TTC
agaagaaaggtcctttgctt

SEQ ID NO: 48419 - DNA, 20 bp, Artificial Sequence
  Description of Artificial Sequence: Synthetic oligonucleotide
  Target: SCNA; (-) strand; PAM type: YTN; PAM sequence: TTT
cagaagaaaggtcctttgct

SEQ ID NO: 48420 - DNA, 20 bp, Artificial Sequence
  Description of Artificial Sequence: Synthetic oligonucleotide
  Target: SCNA; (-) strand; PAM type: YTN; PAM sequence: CTT
tcagaagaaaggtcctttgc

SEQ ID NO: 48421 - DNA, 20 bp, Artificial Sequence
  Description of Artificial Sequence: Synthetic oligonucleotide
  Target: SCNA; (-) strand; PAM type: YTN; PAM sequence: CTC
actttcagaagaaaggtcct

SEQ ID NO: 48422 - DNA, 20 bp, Artificial Sequence
  Description of Artificial Sequence: Synthetic oligonucleotide
  Target: SCNA; (-) strand; PAM type: YTN; PAM sequence: CTC
ctcactttcagaagaaaggt

SEQ ID NO: 48423 - DNA, 20 bp, Artificial Sequence
  Description of Artificial Sequence: Synthetic oligonucleotide
  Target: SCNA; (-) strand; PAM type: YTN; PAM sequence: TTC
acaaatgacaggaggcaaga

SEQ ID NO: 48424 - DNA, 20 bp, Artificial Sequence
  Description of Artificial Sequence: Synthetic oligonucleotide
  Target: SCNA; (-) strand; PAM type: YTN; PAM sequence: CTA
ttcacaaatgacaggaggca

SEQ ID NO: 48425 - DNA, 20 bp, Artificial Sequence
  Description of Artificial Sequence: Synthetic oligonucleotide
  Target: SCNA; (-) strand; PAM type: YTN; PAM sequence: TTC
tattcacaaatgacaggagg

SEQ ID NO: 48426 - DNA, 20 bp, Artificial Sequence
  Description of Artificial Sequence: Synthetic oligonucleotide
  Target: SCNA; (-) strand; PAM type: YTN; PAM sequence: CTA
cagagttctattcacaaatg

SEQ ID NO: 48427 - DNA, 20 bp, Artificial Sequence
  Description of Artificial Sequence: Synthetic oligonucleotide
  Target: SCNA; (-) strand; PAM type: YTN; PAM sequence: CTG
actacagagttctattcaca

SEQ ID NO: 48428 - DNA, 20 bp, Artificial Sequence
  Description of Artificial Sequence: Synthetic oligonucleotide
  Target: SCNA; (-) strand; PAM type: YTN; PAM sequence: TTC
tgactacagagttctattca

SEQ ID NO: 48429 - DNA, 20 bp, Artificial Sequence
  Description of Artificial Sequence: Synthetic oligonucleotide
  Target: SCNA; (-) strand; PAM type: YTN; PAM sequence: CTG
gttctgactacagagttcta

SEQ ID NO: 48430 - DNA, 20 bp, Artificial Sequence
  Description of Artificial Sequence: Synthetic oligonucleotide
  Target: SCNA; (-) strand; PAM type: YTN; PAM sequence: CTC
tggttctgactacagagttc

SEQ ID NO: 48431 - DNA, 20 bp, Artificial Sequence
  Description of Artificial Sequence: Synthetic oligonucleotide
  Target: SCNA; (-) strand; PAM type: YTN; PAM sequence: CTA
gaccaaatgccagaaatgct

SEQ ID NO: 48432 - DNA, 20 bp, Artificial Sequence
  Description of Artificial Sequence: Synthetic oligonucleotide
  Target: SCNA; (-) strand; PAM type: YTN; PAM sequence: TTC
tagaccaaatgccagaaatg

SEQ ID NO: 48433 - DNA, 20 bp, Artificial Sequence
  Description of Artificial Sequence: Synthetic oligonucleotide
  Target: SCNA; (-) strand; PAM type: YTN; PAM sequence: TTC
agaatgattctagaccaaat

SEQ ID NO: 48434 - DNA, 20 bp, Artificial Sequence
  Description of Artificial Sequence: Synthetic oligonucleotide
  Target: SCNA; (-) strand; PAM type: YTN; PAM sequence: CTT
cagaatgattctagaccaaa

SEQ ID NO: 48435 - DNA, 20 bp, Artificial Sequence
  Description of Artificial Sequence: Synthetic oligonucleotide
  Target: SCNA; (-) strand; PAM type: YTN; PAM sequence: TTG
cccttcagaatgattctaga

SEQ ID NO: 48436 - DNA, 20 bp, Artificial Sequence
  Description of Artificial Sequence: Synthetic oligonucleotide
  Target: SCNA; (-) strand; PAM type: YTN; PAM sequence: CTT
gcccttcagaatgattctag

SEQ ID NO: 48437 - DNA, 20 bp, Artificial Sequence
  Description of Artificial Sequence: Synthetic oligonucleotide
  Target: SCNA; (-) strand; PAM type: YTN; PAM sequence: TTA
gcaacacagcaccaggcttg

SEQ ID NO: 48438 - DNA, 20 bp, Artificial Sequence
  Description of Artificial Sequence: Synthetic oligonucleotide
  Target: SCNA; (-) strand; PAM type: YTN; PAM sequence: CTT
agcaacacagcaccaggctt

SEQ ID NO: 48439 - DNA, 20 bp, Artificial Sequence
  Description of Artificial Sequence: Synthetic oligonucleotide
  Target: SCNA; (-) strand; PAM type: YTN; PAM sequence: TTG
tgcttagcaacacagcacca

SEQ ID NO: 48440 - DNA, 20 bp, Artificial Sequence
  Description of Artificial Sequence: Synthetic oligonucleotide
  Target: SCNA; (-) strand; PAM type: YTN; PAM sequence: TTT
gtgcttagcaacacagcacc

SEQ ID NO: 48441 - DNA, 20 bp, Artificial Sequence
  Description of Artificial Sequence: Synthetic oligonucleotide
  Target: SCNA; (-) strand; PAM type: YTN; PAM sequence: TTG
tttgtgcttagcaacacagc

SEQ ID NO: 48442 - DNA, 20 bp, Artificial Sequence
  Description of Artificial Sequence: Synthetic oligonucleotide
  Target: SCNA; (-) strand; PAM type: YTN; PAM sequence: TTG
gagccaaataccaaattgtt

SEQ ID NO: 48443 - DNA, 20 bp, Artificial Sequence
  Description of Artificial Sequence: Synthetic oligonucleotide
  Target: SCNA; (-) strand; PAM type: YTN; PAM sequence: TTT
ggagccaaataccaaattgt

SEQ ID NO: 48444 - DNA, 20 bp, Artificial Sequence
  Description of Artificial Sequence: Synthetic oligonucleotide
  Target: SCNA; (-) strand; PAM type: YTN; PAM sequence: TTT
tggagccaaataccaaattg

SEQ ID NO: 48445 - DNA, 20 bp, Artificial Sequence
  Description of Artificial Sequence: Synthetic oligonucleotide
  Target: SCNA; (-) strand; PAM type: YTN; PAM sequence: TTT
ttggagccaaataccaaatt

SEQ ID NO: 48446 - DNA, 20 bp, Artificial Sequence
  Description of Artificial Sequence: Synthetic oligonucleotide
  Target: SCNA; (-) strand; PAM type: YTN; PAM sequence: CTC
gagcatatttttggagccaa

SEQ ID NO: 48447 - DNA, 20 bp, Artificial Sequence
  Description of Artificial Sequence: Synthetic oligonucleotide
  Target: SCNA; (-) strand; PAM type: YTN; PAM sequence: CTA
atctcgagcatatttttgga

SEQ ID NO: 48448 - DNA, 20 bp, Artificial Sequence
  Description of Artificial Sequence: Synthetic oligonucleotide
  Target: SCNA; (-) strand; PAM type: YTN; PAM sequence: CTG
agggaagaactaatctcgag

SEQ ID NO: 48449 - DNA, 20 bp, Artificial Sequence
  Description of Artificial Sequence: Synthetic oligonucleotide
  Target: SCNA; (-) strand; PAM type: YTN; PAM sequence: TTG
ctgagggaagaactaatctc

SEQ ID NO: 48450 - DNA, 20 bp, Artificial Sequence
  Description of Artificial Sequence: Synthetic oligonucleotide
  Target: SCNA; (-) strand; PAM type: YTN; PAM sequence: CTG
ttgctgagggaagaactaat

SEQ ID NO: 48451 - DNA, 20 bp, Artificial Sequence
  Description of Artificial Sequence: Synthetic oligonucleotide
  Target: SCNA; (-) strand; PAM type: YTN; PAM sequence: CTG
agcgcctgttgctgagggaa

SEQ ID NO: 48452 - DNA, 20 bp, Artificial Sequence
  Description of Artificial Sequence: Synthetic oligonucleotide
  Target: SCNA; (-) strand; PAM type: YTN; PAM sequence: TTG
gctgagcgcctgttgctgag

SEQ ID NO: 48453 - DNA, 20 bp, Artificial Sequence
  Description of Artificial Sequence: Synthetic oligonucleotide
  Target: SCNA; (-) strand; PAM type: YTN; PAM sequence: TTT
ggctgagcgcctgttgctga

SEQ ID NO: 48454 - DNA, 20 bp, Artificial Sequence
  Description of Artificial Sequence: Synthetic oligonucleotide
  Target: SCNA; (-) strand; PAM type: YTN; PAM sequence: TTA
tttggctgagcgcctgttgc

SEQ ID NO: 48455 - DNA, 20 bp, Artificial Sequence
  Description of Artificial Sequence: Synthetic oligonucleotide
  Target: SCNA; (-) strand; PAM type: YTN; PAM sequence: TTA
aaaattatttggctgagcgc

SEQ ID NO: 48456 - DNA, 20 bp, Artificial Sequence
  Description of Artificial Sequence: Synthetic oligonucleotide
  Target: SCNA; (-) strand; PAM type: YTN; PAM sequence: TTG
gttaaaaattatttggctga

SEQ ID NO: 48457 - DNA, 20 bp, Artificial Sequence
  Description of Artificial Sequence: Synthetic oligonucleotide
  Target: SCNA; (-) strand; PAM type: YTN; PAM sequence: CTG
agagttggttaaaaattatt

SEQ ID NO: 48458 - DNA, 20 bp, Artificial Sequence
  Description of Artificial Sequence: Synthetic oligonucleotide
  Target: SCNA; (-) strand; PAM type: YTN; PAM sequence: CTC
tgagagttggttaaaaatta

SEQ ID NO: 48459 - DNA, 20 bp, Artificial Sequence
  Description of Artificial Sequence: Synthetic oligonucleotide
  Target: SCNA; (-) strand; PAM type: YTN; PAM sequence: CTG
ggctctgagagttggttaaa

SEQ ID NO: 48460 - DNA, 20 bp, Artificial Sequence
  Description of Artificial Sequence: Synthetic oligonucleotide
  Target: SCNA; (-) strand; PAM type: YTN; PAM sequence: CTC
aagcaatactgggctctgag

SEQ ID NO: 48461 - DNA, 20 bp, Artificial Sequence
  Description of Artificial Sequence: Synthetic oligonucleotide
  Target: SCNA; (-) strand; PAM type: YTN; PAM sequence: CTC
agtagctcaagcaatactgg

SEQ ID NO: 48462 - DNA, 20 bp, Artificial Sequence
  Description of Artificial Sequence: Synthetic oligonucleotide
  Target: SCNA; (-) strand; PAM type: YTN; PAM sequence: TTG
aaataggatctcagtagctc

SEQ ID NO: 48463 - DNA, 20 bp, Artificial Sequence
  Description of Artificial Sequence: Synthetic oligonucleotide
  Target: SCNA; (-) strand; PAM type: YTN; PAM sequence: CTT
gaaataggatctcagtagct

SEQ ID NO: 48464 - DNA, 20 bp, Artificial Sequence
  Description of Artificial Sequence: Synthetic oligonucleotide
  Target: SCNA; (-) strand; PAM type: YTN; PAM sequence: TTG
atagcaataacttgaaatag

SEQ ID NO: 48465 - DNA, 20 bp, Artificial Sequence
  Description of Artificial Sequence: Synthetic oligonucleotide
  Target: SCNA; (-) strand; PAM type: YTN; PAM sequence: CTT
gatagcaataacttgaaata

SEQ ID NO: 48466 - DNA, 20 bp, Artificial Sequence
  Description of Artificial Sequence: Synthetic oligonucleotide
  Target: SCNA; (-) strand; PAM type: YTN; PAM sequence: CTC
catatcttgatagcaataac

SEQ ID NO: 48467 - DNA, 20 bp, Artificial Sequence
  Description of Artificial Sequence: Synthetic oligonucleotide
  Target: SCNA; (-) strand; PAM type: YTN; PAM sequence: CTC
ctccatatcttgatagcaat

SEQ ID NO: 48468 - DNA, 20 bp, Artificial Sequence
  Description of Artificial Sequence: Synthetic oligonucleotide
  Target: SCNA; (-) strand; PAM type: YTN; PAM sequence: CTC
tcctccatatcttgatagca

SEQ ID NO: 48469 - DNA, 20 bp, Artificial Sequence
  Description of Artificial Sequence: Synthetic oligonucleotide
  Target: SCNA; (-) strand; PAM type: YTN; PAM sequence: TTC
actctcctccatatcttgat

SEQ ID NO: 48470 - DNA, 20 bp, Artificial Sequence
  Description of Artificial Sequence: Synthetic oligonucleotide
  Target: SCNA; (-) strand; PAM type: YTN; PAM sequence: TTT
cactctcctccatatcttga

SEQ ID NO: 48471 - DNA, 20 bp, Artificial Sequence
  Description of Artificial Sequence: Synthetic oligonucleotide
  Target: SCNA; (-) strand; PAM type: YTN; PAM sequence: CTC
acaagtgtcagtatttcact

SEQ ID NO: 48472 - DNA, 20 bp, Artificial Sequence
  Description of Artificial Sequence: Synthetic oligonucleotide
  Target: SCNA; (-) strand; PAM type: YTN; PAM sequence: TTG
ggatctcacaagtgtcagta

SEQ ID NO: 48473 - DNA, 20 bp, Artificial Sequence
  Description of Artificial Sequence: Synthetic oligonucleotide
  Target: SCNA; (-) strand; PAM type: YTN; PAM sequence: CTT
gggatctcacaagtgtcagt

SEQ ID NO: 48474 - DNA, 20 bp, Artificial Sequence
  Description of Artificial Sequence: Synthetic oligonucleotide
  Target: SCNA; (-) strand; PAM type: YTN; PAM sequence: TTA
gtgtaagtcttgggatctca

SEQ ID NO: 48475 - DNA, 20 bp, Artificial Sequence
  Description of Artificial Sequence: Synthetic oligonucleotide
  Target: SCNA; (-) strand; PAM type: YTN; PAM sequence: TTT
agtgtaagtcttgggatctc

SEQ ID NO: 48476 - DNA, 20 bp, Artificial Sequence
  Description of Artificial Sequence: Synthetic oligonucleotide
  Target: SCNA; (-) strand; PAM type: YTN; PAM sequence: TTG
tatggatttagtgtaagtct

SEQ ID NO: 48477 - DNA, 20 bp, Artificial Sequence
  Description of Artificial Sequence: Synthetic oligonucleotide
  Target: SCNA; (-) strand; PAM type: YTN; PAM sequence: TTC
aggacagaaattgtatggat

SEQ ID NO: 48478 - DNA, 20 bp, Artificial Sequence
  Description of Artificial Sequence: Synthetic oligonucleotide
  Target: SCNA; (-) strand; PAM type: YTN; PAM sequence: TTA
attcaggacagaaattgtat

SEQ ID NO: 48479 - DNA, 20 bp, Artificial Sequence
  Description of Artificial Sequence: Synthetic oligonucleotide
  Target: SCNA; (-) strand; PAM type: YTN; PAM sequence: TTT
aattcaggacagaaattgta

SEQ ID NO: 48480 - DNA, 20 bp, Artificial Sequence
  Description of Artificial Sequence: Synthetic oligonucleotide
  Target: SCNA; (-) strand; PAM type: YTN; PAM sequence: TTT
taattcaggacagaaattgt

SEQ ID NO: 48481 - DNA, 20 bp, Artificial Sequence
  Description of Artificial Sequence: Synthetic oligonucleotide
  Target: SCNA; (-) strand; PAM type: YTN; PAM sequence: TTT
ttaattcaggacagaaattg

SEQ ID NO: 48482 - DNA, 20 bp, Artificial Sequence
  Description of Artificial Sequence: Synthetic oligonucleotide
  Target: SCNA; (-) strand; PAM type: YTN; PAM sequence: TTA
aaaaaatttttaattcagga

SEQ ID NO: 48483 - DNA, 20 bp, Artificial Sequence
  Description of Artificial Sequence: Synthetic oligonucleotide
  Target: SCNA; (-) strand; PAM type: YTN; PAM sequence: TTT
aaaaaaatttttaattcagg

SEQ ID NO: 48484 - DNA, 20 bp, Artificial Sequence
  Description of Artificial Sequence: Synthetic oligonucleotide
  Target: SCNA; (-) strand; PAM type: YTN; PAM sequence: TTT
taaaaaaatttttaattcag

SEQ ID NO: 48485 - DNA, 20 bp, Artificial Sequence
  Description of Artificial Sequence: Synthetic oligonucleotide
  Target: SCNA; (-) strand; PAM type: YTN; PAM sequence: TTT
ttaaaaaaatttttaattca

SEQ ID NO: 48486 - DNA, 20 bp, Artificial Sequence
  Description of Artificial Sequence: Synthetic oligonucleotide
  Target: SCNA; (-) strand; PAM type: YTN; PAM sequence: TTT
tttaaaaaaatttttaattc

SEQ ID NO: 48487 - DNA, 20 bp, Artificial Sequence
  Description of Artificial Sequence: Synthetic oligonucleotide
  Target: SCNA; (-) strand; PAM type: YTN; PAM sequence: CTT
ttttaaaaaaatttttaatt

SEQ ID NO: 48488 - DNA, 20 bp, Artificial Sequence
  Description of Artificial Sequence: Synthetic oligonucleotide
  Target: SCNA; (-) strand; PAM type: YTN; PAM sequence: CTC
ttttttaaaaaaatttttaa

SEQ ID NO: 48489 - DNA, 20 bp, Artificial Sequence
  Description of Artificial Sequence: Synthetic oligonucleotide
  Target: SCNA; (-) strand; PAM type: YTN; PAM sequence: TTC
atctcttttttaaaaaaatt

SEQ ID NO: 48490 - DNA, 20 bp, Artificial Sequence
  Description of Artificial Sequence: Synthetic oligonucleotide
  Target: SCNA; (-) strand; PAM type: YTN; PAM sequence: TTT
catctcttttttaaaaaaat

SEQ ID NO: 48491 - DNA, 20 bp, Artificial Sequence
  Description of Artificial Sequence: Synthetic oligonucleotide
  Target: SCNA; (-) strand; PAM type: YTN; PAM sequence: TTT
tcatctcttttttaaaaaaa

SEQ ID NO: 48492 - DNA, 20 bp, Artificial Sequence
  Description of Artificial Sequence: Synthetic oligonucleotide
  Target: SCNA; (-) strand; PAM type: YTN; PAM sequence: CTT
ttcatctcttttttaaaaaa

SEQ ID NO: 48493 - DNA, 20 bp, Artificial Sequence
  Description of Artificial Sequence: Synthetic oligonucleotide
  Target: SCNA; (-) strand; PAM type: YTN; PAM sequence: TTG
gaaatgtcacacttttcatc

SEQ ID NO: 48494 - DNA, 20 bp, Artificial Sequence
  Description of Artificial Sequence: Synthetic oligonucleotide
  Target: SCNA; (-) strand; PAM type: YTN; PAM sequence: TTT
ggaaatgtcacacttttcat

SEQ ID NO: 48495 - DNA, 20 bp, Artificial Sequence
  Description of Artificial Sequence: Synthetic oligonucleotide
  Target: SCNA; (-) strand; PAM type: YTN; PAM sequence: TTA
cgtggtttggaaatgtcaca

SEQ ID NO: 48496 - DNA, 20 bp, Artificial Sequence
  Description of Artificial Sequence: Synthetic oligonucleotide
  Target: SCNA; (-) strand; PAM type: YTN; PAM sequence: TTA
aggtgaaagaaaccaattac

SEQ ID NO: 48497 - DNA, 20 bp, Artificial Sequence
  Description of Artificial Sequence: Synthetic oligonucleotide
  Target: SCNA; (-) strand; PAM type: YTN; PAM sequence: TTT
aaggtgaaagaaaccaatta

SEQ ID NO: 48498 - DNA, 20 bp, Artificial Sequence
  Description of Artificial Sequence: Synthetic oligonucleotide
  Target: SCNA; (-) strand; PAM type: YTN; PAM sequence: TTG
gagtttaaggtgaaagaaac

SEQ ID NO: 48499 - DNA, 20 bp, Artificial Sequence
  Description of Artificial Sequence: Synthetic oligonucleotide
  Target: SCNA; (-) strand; PAM type: YTN; PAM sequence: CTT
ggagtttaaggtgaaagaaa

SEQ ID NO: 48500 - DNA, 20 bp, Artificial Sequence
  Description of Artificial Sequence: Synthetic oligonucleotide
  Target: SCNA; (-) strand; PAM type: YTN; PAM sequence: CTA
acttggagtttaaggtgaaa

SEQ ID NO: 48501 - DNA, 20 bp, Artificial Sequence
  Description of Artificial Sequence: Synthetic oligonucleotide
  Target: SCNA; (-) strand; PAM type: YTN; PAM sequence: CTC
taacttggagtttaaggtga

SEQ ID NO: 48502 - DNA, 20 bp, Artificial Sequence
  Description of Artificial Sequence: Synthetic oligonucleotide
  Target: SCNA; (-) strand; PAM type: YTN; PAM sequence: TTC
tctaacttggagtttaaggt

SEQ ID NO: 48503 - DNA, 20 bp, Artificial Sequence
  Description of Artificial Sequence: Synthetic oligonucleotide
  Target: SCNA; (-) strand; PAM type: YTN; PAM sequence: CTT
ctctaacttggagtttaagg

SEQ ID NO: 48504 - DNA, 20 bp, Artificial Sequence
  Description of Artificial Sequence: Synthetic oligonucleotide
  Target: SCNA; (-) strand; PAM type: YTN; PAM sequence: TTA
aaacaaaacaaacaacaaca

SEQ ID NO: 48505 - DNA, 20 bp, Artificial Sequence
  Description of Artificial Sequence: Synthetic oligonucleotide
  Target: SCNA; (-) strand; PAM type: YTN; PAM sequence: TTT
aaaacaaaacaaacaacaac

SEQ ID NO: 48506 - DNA, 20 bp, Artificial Sequence
  Description of Artificial Sequence: Synthetic oligonucleotide
  Target: SCNA; (-) strand; PAM type: YTN; PAM sequence: TTT
taaaacaaaacaaacaacaa

SEQ ID NO: 48507 - DNA, 20 bp, Artificial Sequence
  Description of Artificial Sequence: Synthetic oligonucleotide
  Target: SCNA; (-) strand; PAM type: YTN; PAM sequence: CTA
gttttaaaacaaaacaaaca

SEQ ID NO: 48508 - DNA, 20 bp, Artificial Sequence
  Description of Artificial Sequence: Synthetic oligonucleotide
  Target: SCNA; (-) strand; PAM type: YTN; PAM sequence: TTC
caccaagtctagttttaaaa

SEQ ID NO: 48509 - DNA, 20 bp, Artificial Sequence
  Description of Artificial Sequence: Synthetic oligonucleotide
  Target: SCNA; (-) strand; PAM type: YTN; PAM sequence: CTG
tattccaccaagtctagttt

SEQ ID NO: 48510 - DNA, 20 bp, Artificial Sequence
  Description of Artificial Sequence: Synthetic oligonucleotide
  Target: SCNA; (-) strand; PAM type: YTN; PAM sequence: TTC
tgtattccaccaagtctagt

SEQ ID NO: 48511 - DNA, 20 bp, Artificial Sequence
  Description of Artificial Sequence: Synthetic oligonucleotide
  Target: SCNA; (-) strand; PAM type: YTN; PAM sequence: TTA
tgttctgtattccaccaagt

SEQ ID NO: 48512 - DNA, 20 bp, Artificial Sequence
  Description of Artificial Sequence: Synthetic oligonucleotide
  Target: SCNA; (-) strand; PAM type: YTN; PAM sequence: TTT
atgttctgtattccaccaag

SEQ ID NO: 48513 - DNA, 20 bp, Artificial Sequence
  Description of Artificial Sequence: Synthetic oligonucleotide
  Target: SCNA; (-) strand; PAM type: YTN; PAM sequence: TTA
aaatgtttatgttctgtatt

SEQ ID NO: 48514 - DNA, 20 bp, Artificial Sequence
  Description of Artificial Sequence: Synthetic oligonucleotide
  Target: SCNA; (-) strand; PAM type: YTN; PAM sequence: TTT
aaaatgtttatgttctgtat

SEQ ID NO: 48515 - DNA, 20 bp, Artificial Sequence
  Description of Artificial Sequence: Synthetic oligonucleotide
  Target: SCNA; (-) strand; PAM type: YTN; PAM sequence: TTG
tttaaaatgtttatgttctg

SEQ ID NO: 48516 - DNA, 20 bp, Artificial Sequence
  Description of Artificial Sequence: Synthetic oligonucleotide
  Target: SCNA; (-) strand; PAM type: YTN; PAM sequence: TTT
gtttaaaatgtttatgttct

SEQ ID NO: 48517 - DNA, 20 bp, Artificial Sequence
  Description of Artificial Sequence: Synthetic oligonucleotide
  Target: SCNA; (-) strand; PAM type: YTN; PAM sequence: TTT
tgtttaaaatgtttatgttc

SEQ ID NO: 48518 - DNA, 20 bp, Artificial Sequence
  Description of Artificial Sequence: Synthetic oligonucleotide
  Target: SCNA; (-) strand; PAM type: YTN; PAM sequence: TTA
atattttgtttaaaatgttt

SEQ ID NO: 48519 - DNA, 20 bp, Artificial Sequence
  Description of Artificial Sequence: Synthetic oligonucleotide
  Target: SCNA; (-) strand; PAM type: YTN; PAM sequence: TTT
aatattttgtttaaaatgtt

SEQ ID NO: 48520 - DNA, 20 bp, Artificial Sequence
  Description of Artificial Sequence: Synthetic oligonucleotide
  Target: SCNA; (-) strand; PAM type: YTN; PAM sequence: CTA
gaagtttaatattttgttta

SEQ ID NO: 48521 - DNA, 20 bp, Artificial Sequence
  Description of Artificial Sequence: Synthetic oligonucleotide
  Target: SCNA; (-) strand; PAM type: YTN; PAM sequence: TTC
tagaagtttaatattttgtt

SEQ ID NO: 48522 - DNA, 20 bp, Artificial Sequence
  Description of Artificial Sequence: Synthetic oligonucleotide
  Target: SCNA; (-) strand; PAM type: YTN; PAM sequence: CTG
ttctagaagtttaatatttt

SEQ ID NO: 48523 - DNA, 20 bp, Artificial Sequence
  Description of Artificial Sequence: Synthetic oligonucleotide
  Target: SCNA; (-) strand; PAM type: YTN; PAM sequence: TTA
agtgatccactgttctagaa

SEQ ID NO: 48524 - DNA, 20 bp, Artificial Sequence
  Description of Artificial Sequence: Synthetic oligonucleotide
  Target: SCNA; (-) strand; PAM type: YTN; PAM sequence: TTT
aagtgatccactgttctaga

SEQ ID NO: 48525 - DNA, 20 bp, Artificial Sequence
  Description of Artificial Sequence: Synthetic oligonucleotide
  Target: SCNA; (-) strand; PAM type: YTN; PAM sequence: TTT
taagtgatccactgttctag

SEQ ID NO: 48526 - DNA, 20 bp, Artificial Sequence
  Description of Artificial Sequence: Synthetic oligonucleotide
  Target: SCNA; (-) strand; PAM type: YTN; PAM sequence: TTC
attttaagtgatccactgtt

SEQ ID NO: 48527 - DNA, 20 bp, Artificial Sequence
  Description of Artificial Sequence: Synthetic oligonucleotide
  Target: SCNA; (-) strand; PAM type: YTN; PAM sequence: TTT
cattttaagtgatccactgt

SEQ ID NO: 48528 - DNA, 20 bp, Artificial Sequence
  Description of Artificial Sequence: Synthetic oligonucleotide
  Target: SCNA; (-) strand; PAM type: YTN; PAM sequence: TTT
tcattttaagtgatccactg

SEQ ID NO: 48529 - DNA, 20 bp, Artificial Sequence
  Description of Artificial Sequence: Synthetic oligonucleotide
  Target: SCNA; (-) strand; PAM type: YTN; PAM sequence: TTA
aagttttcattttaagtgat

SEQ ID NO: 48530 - DNA, 20 bp, Artificial Sequence
  Description of Artificial Sequence: Synthetic oligonucleotide
  Target: SCNA; (-) strand; PAM type: YTN; PAM sequence: CTT
aaagttttcattttaagtga

SEQ ID NO: 48531 - DNA, 20 bp, Artificial Sequence
  Description of Artificial Sequence: Synthetic oligonucleotide
  Target: SCNA; (-) strand; PAM type: YTN; PAM sequence: CTA
aggaaagtcttaaagttttc

SEQ ID NO: 48532 - DNA, 20 bp, Artificial Sequence
  Description of Artificial Sequence: Synthetic oligonucleotide
  Target: SCNA; (-) strand; PAM type: YTN; PAM sequence: CTC
agtctaaggaaagtcttaaa

SEQ ID NO: 48533 - DNA, 20 bp, Artificial Sequence
  Description of Artificial Sequence: Synthetic oligonucleotide
  Target: SCNA; (-) strand; PAM type: YTN; PAM sequence: TTA
agaataaaaaactcagtcta

SEQ ID NO: 48534 - DNA, 20 bp, Artificial Sequence
  Description of Artificial Sequence: Synthetic oligonucleotide
  Target: SCNA; (-) strand; PAM type: YTN; PAM sequence: TTT
aagaataaaaaactcagtct

SEQ ID NO: 48535 - DNA, 20 bp, Artificial Sequence
  Description of Artificial Sequence: Synthetic oligonucleotide
  Target: SCNA; (-) strand; PAM type: YTN; PAM sequence: TTT
taagaataaaaaactcagtc

SEQ ID NO: 48536 - DNA, 20 bp, Artificial Sequence
  Description of Artificial Sequence: Synthetic oligonucleotide
  Target: SCNA; (-) strand; PAM type: YTN; PAM sequence: TTT
ttaagaataaaaaactcagt

SEQ ID NO: 48537 - DNA, 20 bp, Artificial Sequence
  Description of Artificial Sequence: Synthetic oligonucleotide
  Target: SCNA; (-) strand; PAM type: YTN; PAM sequence: TTT
tttaagaataaaaaactcag

SEQ ID NO: 48538 - DNA, 20 bp, Artificial Sequence
  Description of Artificial Sequence: Synthetic oligonucleotide
  Target: SCNA; (-) strand; PAM type: YTN; PAM sequence: TTT
ttttaagaataaaaaactca

SEQ ID NO: 48539 - DNA, 20 bp, Artificial Sequence
  Description of Artificial Sequence: Synthetic oligonucleotide
  Target: SCNA; (-) strand; PAM type: YTN; PAM sequence: TTT
tttttaagaataaaaaactc

SEQ ID NO: 48540 - DNA, 20 bp, Artificial Sequence
  Description of Artificial Sequence: Synthetic oligonucleotide
  Target: SCNA; (-) strand; PAM type: YTN; PAM sequence: TTA
attttttttaagaataaaaa

SEQ ID NO: 48541 - DNA, 20 bp, Artificial Sequence
  Description of Artificial Sequence: Synthetic oligonucleotide
  Target: SCNA; (-) strand; PAM type: YTN; PAM sequence: TTT
aattttttttaagaataaaa

SEQ ID NO: 48542 - DNA, 20 bp, Artificial Sequence
  Description of Artificial Sequence: Synthetic oligonucleotide
  Target: SCNA; (-) strand; PAM type: YTN; PAM sequence: TTT
taattttttttaagaataaa

SEQ ID NO: 48543 - DNA, 20 bp, Artificial Sequence
  Description of Artificial Sequence: Synthetic oligonucleotide
  Target: SCNA; (-) strand; PAM type: YTN; PAM sequence: CTT
ttaattttttttaagaataa

SEQ ID NO: 48544 - DNA, 20 bp, Artificial Sequence
  Description of Artificial Sequence: Synthetic oligonucleotide
  Target: SCNA; (-) strand; PAM type: YTN; PAM sequence: TTC
cttttaattttttttaagaa

SEQ ID NO: 48545 - DNA, 20 bp, Artificial Sequence
  Description of Artificial Sequence: Synthetic oligonucleotide
  Target: SCNA; (-) strand; PAM type: YTN; PAM sequence: CTT
ccttttaattttttttaaga

SEQ ID NO: 48546 - DNA, 20 bp, Artificial Sequence
  Description of Artificial Sequence: Synthetic oligonucleotide
  Target: SCNA; (-) strand; PAM type: YTN; PAM sequence: TTC
aacttccttttaattttttt

SEQ ID NO: 48547 - DNA, 20 bp, Artificial Sequence
  Description of Artificial Sequence: Synthetic oligonucleotide
  Target: SCNA; (-) strand; PAM type: YTN; PAM sequence: TTA
gaaataaaattcaacttcct

SEQ ID NO: 48548 - DNA, 20 bp, Artificial Sequence
  Description of Artificial Sequence: Synthetic oligonucleotide
  Target: SCNA; (-) strand; PAM type: YTN; PAM sequence: TTT
agaaataaaattcaacttcc

SEQ ID NO: 48549 - DNA, 20 bp, Artificial Sequence
  Description of Artificial Sequence: Synthetic oligonucleotide
  Target: SCNA; (-) strand; PAM type: YTN; PAM sequence: CTG
caccgtttagaaataaaatt

SEQ ID NO: 48550 - DNA, 20 bp, Artificial Sequence
  Description of Artificial Sequence: Synthetic oligonucleotide
  Target: SCNA; (-) strand; PAM type: YTN; PAM sequence: TTG
tcctgcaccgtttagaaata

SEQ ID NO: 48551 - DNA, 20 bp, Artificial Sequence
  Description of Artificial Sequence: Synthetic oligonucleotide
  Target: SCNA; (-) strand; PAM type: YTN; PAM sequence: TTT
gtcctgcaccgtttagaaat

SEQ ID NO: 48552 - DNA, 20 bp, Artificial Sequence
  Description of Artificial Sequence: Synthetic oligonucleotide
  Target: SCNA; (-) strand; PAM type: YTN; PAM sequence: TTC
atttgtcctgcaccgtttag

SEQ ID NO: 48553 - DNA, 20 bp, Artificial Sequence
  Description of Artificial Sequence: Synthetic oligonucleotide
  Target: SCNA; (-) strand; PAM type: YTN; PAM sequence: TTA
ttcatttgtcctgcaccgtt

SEQ ID NO: 48554 - DNA, 20 bp, Artificial Sequence
  Description of Artificial Sequence: Synthetic oligonucleotide
  Target: SCNA; (-) strand; PAM type: YTN; PAM sequence: TTT
attcatttgtcctgcaccgt

SEQ ID NO: 48555 - DNA, 20 bp, Artificial Sequence
  Description of Artificial Sequence: Synthetic oligonucleotide
  Target: SCNA; (-) strand; PAM type: YTN; PAM sequence: TTT
tattcatttgtcctgcaccg

SEQ ID NO: 48556 - DNA, 20 bp, Artificial Sequence
  Description of Artificial Sequence: Synthetic oligonucleotide
  Target: SCNA; (-) strand; PAM type: YTN; PAM sequence: TTA
agacagaggcaaaatgtatt

SEQ ID NO: 48557 - DNA, 20 bp, Artificial Sequence
  Description of Artificial Sequence: Synthetic oligonucleotide
  Target: SCNA; (-) strand; PAM type: YTN; PAM sequence: TTT
aagacagaggcaaaatgtat

SEQ ID NO: 48558 - DNA, 20 bp, Artificial Sequence
  Description of Artificial Sequence: Synthetic oligonucleotide
  Target: SCNA; (-) strand; PAM type: YTN; PAM sequence: CTA
agtttaagacagaggcaaaa

SEQ ID NO: 48559 - DNA, 20 bp, Artificial Sequence
  Description of Artificial Sequence: Synthetic oligonucleotide
  Target: SCNA; (-) strand; PAM type: YTN; PAM sequence: TTC
taagtttaagacagaggcaa

SEQ ID NO: 48560 - DNA, 20 bp, Artificial Sequence
  Description of Artificial Sequence: Synthetic oligonucleotide
  Target: SCNA; (-) strand; PAM type: YTN; PAM sequence: CTG
ttctaagtttaagacagagg

SEQ ID NO: 48561 - DNA, 20 bp, Artificial Sequence
  Description of Artificial Sequence: Synthetic oligonucleotide
  Target: SCNA; (-) strand; PAM type: YTN; PAM sequence: TTG
cgtatctgttctaagtttaa

SEQ ID NO: 48562 - DNA, 20 bp, Artificial Sequence
  Description of Artificial Sequence: Synthetic oligonucleotide
  Target: SCNA; (-) strand; PAM type: YTN; PAM sequence: TTA
aagagattgcgtatctgttc

SEQ ID NO: 48563 - DNA, 20 bp, Artificial Sequence
  Description of Artificial Sequence: Synthetic oligonucleotide
  Target: SCNA; (-) strand; PAM type: YTN; PAM sequence: CTG
ttaaagagattgcgtatctg

SEQ ID NO: 48564 - DNA, 20 bp, Artificial Sequence
  Description of Artificial Sequence: Synthetic oligonucleotide
  Target: SCNA; (-) strand; PAM type: YTN; PAM sequence: TTA
catactgttaaagagattgc

SEQ ID NO: 48565 - DNA, 20 bp, Artificial Sequence
  Description of Artificial Sequence: Synthetic oligonucleotide
  Target: SCNA; (-) strand; PAM type: YTN; PAM sequence: TTT
acatactgttaaagagattg

SEQ ID NO: 48566 - DNA, 20 bp, Artificial Sequence
  Description of Artificial Sequence: Synthetic oligonucleotide
  Target: SCNA; (-) strand; PAM type: YTN; PAM sequence: TTT
tacatactgttaaagagatt

SEQ ID NO: 48567 - DNA, 20 bp, Artificial Sequence
  Description of Artificial Sequence: Synthetic oligonucleotide
  Target: SCNA; (-) strand; PAM type: YTN; PAM sequence: TTT
ttacatactgttaaagagat

SEQ ID NO: 48568 - DNA, 20 bp, Artificial Sequence
  Description of Artificial Sequence: Synthetic oligonucleotide
  Target: SCNA; (-) strand; PAM type: YTN; PAM sequence: CTG
aatttttacatactgttaaa

SEQ ID NO: 48569 - DNA, 20 bp, Artificial Sequence
  Description of Artificial Sequence: Synthetic oligonucleotide
  Target: SCNA; (-) strand; PAM type: YTN; PAM sequence: TTG
gaaaccaaagaaagaaaaga

SEQ ID NO: 48570 - DNA, 20 bp, Artificial Sequence
  Description of Artificial Sequence: Synthetic oligonucleotide
  Target: SCNA; (-) strand; PAM type: YTN; PAM sequence: TTT
ggaaaccaaagaaagaaaag

SEQ ID NO: 48571 - DNA, 20 bp, Artificial Sequence
  Description of Artificial Sequence: Synthetic oligonucleotide
  Target: SCNA; (-) strand; PAM type: YTN; PAM sequence: CTG
taatttggaaaccaaagaaa

SEQ ID NO: 48572 - DNA, 20 bp, Artificial Sequence
  Description of Artificial Sequence: Synthetic oligonucleotide
  Target: SCNA; (-) strand; PAM type: YTN; PAM sequence: TTC
actgtaatttggaaaccaaa

SEQ ID NO: 48573 - DNA, 20 bp, Artificial Sequence
  Description of Artificial Sequence: Synthetic oligonucleotide
  Target: SCNA; (-) strand; PAM type: YTN; PAM sequence: TTT
cactgtaatttggaaaccaa

SEQ ID NO: 48574 - DNA, 20 bp, Artificial Sequence
  Description of Artificial Sequence: Synthetic oligonucleotide
  Target: SCNA; (-) strand; PAM type: YTN; PAM sequence: TTC
atttcactgtaatttggaaa

SEQ ID NO: 48575 - DNA, 20 bp, Artificial Sequence
  Description of Artificial Sequence: Synthetic oligonucleotide
  Target: SCNA; (-) strand; PAM type: YTN; PAM sequence: TTT
catttcactgtaatttggaa

SEQ ID NO: 48576 - DNA, 20 bp, Artificial Sequence
  Description of Artificial Sequence: Synthetic oligonucleotide
  Target: SCNA; (-) strand; PAM type: YTN; PAM sequence: TTA
cacataaaaggaaaatgttt

SEQ ID NO: 48577 - DNA, 20 bp, Artificial Sequence
  Description of Artificial Sequence: Synthetic oligonucleotide
  Target: SCNA; (-) strand; PAM type: YTN; PAM sequence: CTA
attacacataaaaggaaaat

SEQ ID NO: 48578 - DNA, 20 bp, Artificial Sequence
  Description of Artificial Sequence: Synthetic oligonucleotide
  Target: SCNA; (-) strand; PAM type: YTN; PAM sequence: CTG
cactaattacacataaaagg

SEQ ID NO: 48579 - DNA, 20 bp, Artificial Sequence
  Description of Artificial Sequence: Synthetic oligonucleotide
  Target: SCNA; (-) strand; PAM type: YTN; PAM sequence: TTA
aactgcactaattacacata

SEQ ID NO: 48580 - DNA, 20 bp, Artificial Sequence
  Description of Artificial Sequence: Synthetic oligonucleotide
  Target: SCNA; (-) strand; PAM type: YTN; PAM sequence: TTA
gttaaactgcactaattaca

SEQ ID NO: 48581 - DNA, 20 bp, Artificial Sequence
  Description of Artificial Sequence: Synthetic oligonucleotide
  Target: SCNA; (-) strand; PAM type: YTN; PAM sequence: CTT
agttaaactgcactaattac

SEQ ID NO: 48582 - DNA, 20 bp, Artificial Sequence
  Description of Artificial Sequence: Synthetic oligonucleotide
  Target: SCNA; (-) strand; PAM type: YTN; PAM sequence: CTC
ttagttaaactgcactaatt

SEQ ID NO: 48583 - DNA, 20 bp, Artificial Sequence
  Description of Artificial Sequence: Synthetic oligonucleotide
  Target: SCNA; (-) strand; PAM type: YTN; PAM sequence: CTC
cataactcttagttaaactg

SEQ ID NO: 48584 - DNA, 20 bp, Artificial Sequence
  Description of Artificial Sequence: Synthetic oligonucleotide
  Target: SCNA; (-) strand; PAM type: YTN; PAM sequence: CTA
catggatacaccatgaggtg

SEQ ID NO: 48585 - DNA, 20 bp, Artificial Sequence
  Description of Artificial Sequence: Synthetic oligonucleotide
  Target: SCNA; (-) strand; PAM type: YTN; PAM sequence: TTC
agctacatggatacaccatg

SEQ ID NO: 48586 - DNA, 20 bp, Artificial Sequence
  Description of Artificial Sequence: Synthetic oligonucleotide
  Target: SCNA; (-) strand; PAM type: YTN; PAM sequence: CTG
aagaaattcagctacatgga

SEQ ID NO: 48587 - DNA, 20 bp, Artificial Sequence
  Description of Artificial Sequence: Synthetic oligonucleotide
  Target: SCNA; (-) strand; PAM type: YTN; PAM sequence: TTA
aaaaagcaaatgctgaagaa

SEQ ID NO: 48588 - DNA, 20 bp, Artificial Sequence
  Description of Artificial Sequence: Synthetic oligonucleotide
  Target: SCNA; (-) strand; PAM type: YTN; PAM sequence: TTA
tacaaattaaaaaagcaaat

SEQ ID NO: 48589 - DNA, 20 bp, Artificial Sequence
  Description of Artificial Sequence: Synthetic oligonucleotide
  Target: SCNA; (-) strand; PAM type: YTN; PAM sequence: CTT
atacaaattaaaaaagcaaa

SEQ ID NO: 48590 - DNA, 20 bp, Artificial Sequence
  Description of Artificial Sequence: Synthetic oligonucleotide
  Target: SCNA; (-) strand; PAM type: YTN; PAM sequence: CTC
cttatacaaattaaaaaagc

SEQ ID NO: 48591 - DNA, 20 bp, Artificial Sequence
  Description of Artificial Sequence: Synthetic oligonucleotide
  Target: SCNA; (-) strand; PAM type: YTN; PAM sequence: TTA
ctccttatacaaattaaaaa

SEQ ID NO: 48592 - DNA, 20 bp, Artificial Sequence
  Description of Artificial Sequence: Synthetic oligonucleotide
  Target: SCNA; (-) strand; PAM type: YTN; PAM sequence: CTA
agatatggaacagttactcc

SEQ ID NO: 48593 - DNA, 20 bp, Artificial Sequence
  Description of Artificial Sequence: Synthetic oligonucleotide
  Target: SCNA; (-) strand; PAM type: YTN; PAM sequence: TTC
taagatatggaacagttact

SEQ ID NO: 48594 - DNA, 20 bp, Artificial Sequence
  Description of Artificial Sequence: Synthetic oligonucleotide
  Target: SCNA; (-) strand; PAM type: YTN; PAM sequence: TTT
ctaagatatggaacagttac

SEQ ID NO: 48595 - DNA, 20 bp, Artificial Sequence
  Description of Artificial Sequence: Synthetic oligonucleotide
  Target: SCNA; (-) strand; PAM type: YTN; PAM sequence: TTC
aaagatttctaagatatgga

SEQ ID NO: 48596 - DNA, 20 bp, Artificial Sequence
  Description of Artificial Sequence: Synthetic oligonucleotide
  Target: SCNA; (-) strand; PAM type: YTN; PAM sequence: TTT
caaagatttctaagatatgg

SEQ ID NO: 48597 - DNA, 20 bp, Artificial Sequence
  Description of Artificial Sequence: Synthetic oligonucleotide
  Target: SCNA; (-) strand; PAM type: YTN; PAM sequence: CTA
atttcaaagatttctaagat

SEQ ID NO: 48598 - DNA, 20 bp, Artificial Sequence
  Description of Artificial Sequence: Synthetic oligonucleotide
  Target: SCNA; (-) strand; PAM type: YTN; PAM sequence: TTC
taatttcaaagatttctaag

SEQ ID NO: 48599 - DNA, 20 bp, Artificial Sequence
  Description of Artificial Sequence: Synthetic oligonucleotide
  Target: SCNA; (-) strand; PAM type: YTN; PAM sequence: CTT
ctaatttcaaagatttctaa

SEQ ID NO: 48600 - DNA, 20 bp, Artificial Sequence
  Description of Artificial Sequence: Synthetic oligonucleotide
  Target: SCNA; (-) strand; PAM type: YTN; PAM sequence: TTA
gatcaacttctaatttcaaa

SEQ ID NO: 48601 - DNA, 20 bp, Artificial Sequence
  Description of Artificial Sequence: Synthetic oligonucleotide
  Target: SCNA; (-) strand; PAM type: YTN; PAM sequence: CTA
ttagatcaacttctaatttc

SEQ ID NO: 48602 - DNA, 20 bp, Artificial Sequence
  Description of Artificial Sequence: Synthetic oligonucleotide
  Target: SCNA; (-) strand; PAM type: YTN; PAM sequence: TTA
gagatgctattagatcaact

SEQ ID NO: 48603 - DNA, 20 bp, Artificial Sequence
  Description of Artificial Sequence: Synthetic oligonucleotide
  Target: SCNA; (-) strand; PAM type: YTN; PAM sequence: CTA
cattagagatgctattagat

SEQ ID NO: 48604 - DNA, 20 bp, Artificial Sequence
  Description of Artificial Sequence: Synthetic oligonucleotide
  Target: SCNA; (-) strand; PAM type: YTN; PAM sequence: TTC
aaggagagactacattagag

SEQ ID NO: 48605 - DNA, 20 bp, Artificial Sequence
  Description of Artificial Sequence: Synthetic oligonucleotide
  Target: SCNA; (-) strand; PAM type: YTN; PAM sequence: TTA
aaattcaaggagagactaca

SEQ ID NO: 48606 - DNA, 20 bp, Artificial Sequence
  Description of Artificial Sequence: Synthetic oligonucleotide
  Target: SCNA; (-) strand; PAM type: YTN; PAM sequence: TTT
aaaattcaaggagagactac

SEQ ID NO: 48607 - DNA, 20 bp, Artificial Sequence
  Description of Artificial Sequence: Synthetic oligonucleotide
  Target: SCNA; (-) strand; PAM type: YTN; PAM sequence: TTA
tatttaaaattcaaggagag

SEQ ID NO: 48608 - DNA, 20 bp, Artificial Sequence
  Description of Artificial Sequence: Synthetic oligonucleotide
  Target: SCNA; (-) strand; PAM type: YTN; PAM sequence: CTA
ttatatttaaaattcaagga

SEQ ID NO: 48609 - DNA, 20 bp, Artificial Sequence
  Description of Artificial Sequence: Synthetic oligonucleotide
  Target: SCNA; (-) strand; PAM type: YTN; PAM sequence: TTA
aataacaggtcatatctatt

SEQ ID NO: 48610 - DNA, 20 bp, Artificial Sequence
  Description of Artificial Sequence: Synthetic oligonucleotide
  Target: SCNA; (-) strand; PAM type: YTN; PAM sequence: TTT
aaataacaggtcatatctat

SEQ ID NO: 48611 - DNA, 20 bp, Artificial Sequence
  Description of Artificial Sequence: Synthetic oligonucleotide
  Target: SCNA; (-) strand; PAM type: YTN; PAM sequence: TTT
taaataacaggtcatatcta

SEQ ID NO: 48612 - DNA, 20 bp, Artificial Sequence
  Description of Artificial Sequence: Synthetic oligonucleotide
  Target: SCNA; (-) strand; PAM type: YTN; PAM sequence: CTT
ttaaataacaggtcatatct

SEQ ID NO: 48613 - DNA, 20 bp, Artificial Sequence
  Description of Artificial Sequence: Synthetic oligonucleotide
  Target: SCNA; (-) strand; PAM type: YTN; PAM sequence: CTA
tatcttttaaataacaggtc

SEQ ID NO: 48614 - DNA, 20 bp, Artificial Sequence
  Description of Artificial Sequence: Synthetic oligonucleotide
  Target: SCNA; (-) strand; PAM type: YTN; PAM sequence: TTA
tatgccagtaaacactatat

SEQ ID NO: 48615 - DNA, 20 bp, Artificial Sequence
  Description of Artificial Sequence: Synthetic oligonucleotide
  Target: SCNA; (-) strand; PAM type: YTN; PAM sequence: CTG
ttatatgccagtaaacacta

SEQ ID NO: 48616 - DNA, 20 bp, Artificial Sequence
  Description of Artificial Sequence: Synthetic oligonucleotide
  Target: SCNA; (-) strand; PAM type: YTN; PAM sequence: CTC
aacacaactgttatatgcca

SEQ ID NO: 48617 - DNA, 20 bp, Artificial Sequence
  Description of Artificial Sequence: Synthetic oligonucleotide
  Target: SCNA; (-) strand; PAM type: YTN; PAM sequence: TTC
tcaacacaactgttatatgc

SEQ ID NO: 48618 - DNA, 20 bp, Artificial Sequence
  Description of Artificial Sequence: Synthetic oligonucleotide
  Target: SCNA; (-) strand; PAM type: YTN; PAM sequence: TTC
aatgaaaaattctcaacaca

SEQ ID NO: 48619 - DNA, 20 bp, Artificial Sequence
  Description of Artificial Sequence: Synthetic oligonucleotide
  Target: SCNA; (-) strand; PAM type: YTN; PAM sequence: TTA
ttcaatgaaaaattctcaac

SEQ ID NO: 48620 - DNA, 20 bp, Artificial Sequence
  Description of Artificial Sequence: Synthetic oligonucleotide
  Target: SCNA; (-) strand; PAM type: YTN; PAM sequence: TTT
attcaatgaaaaattctcaa

SEQ ID NO: 48621 - DNA, 20 bp, Artificial Sequence
  Description of Artificial Sequence: Synthetic oligonucleotide
  Target: SCNA; (-) strand; PAM type: YTN; PAM sequence: TTT
tattcaatgaaaaattctca

SEQ ID NO: 48622 - DNA, 20 bp, Artificial Sequence
  Description of Artificial Sequence: Synthetic oligonucleotide
  Target: SCNA; (-) strand; PAM type: YTN; PAM sequence: TTC
aagggaaatatattttattc

SEQ ID NO: 48623 - DNA, 20 bp, Artificial Sequence
  Description of Artificial Sequence: Synthetic oligonucleotide
  Target: SCNA; (-) strand; PAM type: YTN; PAM sequence: TTT
caagggaaatatattttatt

SEQ ID NO: 48624 - DNA, 20 bp, Artificial Sequence
  Description of Artificial Sequence: Synthetic oligonucleotide
  Target: SCNA; (-) strand; PAM type: YTN; PAM sequence: TTA
tgagatatgaccataaaaca

SEQ ID NO: 48625 - DNA, 20 bp, Artificial Sequence
  Description of Artificial Sequence: Synthetic oligonucleotide
  Target: SCNA; (-) strand; PAM type: YTN; PAM sequence: TTC
agaggtggattatgagatat

SEQ ID NO: 48626 - DNA, 20 bp, Artificial Sequence
  Description of Artificial Sequence: Synthetic oligonucleotide
  Target: SCNA; (-) strand; PAM type: YTN; PAM sequence: TTG
attcagaggtggattatgag

SEQ ID NO: 48627 - DNA, 20 bp, Artificial Sequence
  Description of Artificial Sequence: Synthetic oligonucleotide
  Target: SCNA; (-) strand; PAM type: YTN; PAM sequence: TTC
attgattcagaggtggatta

SEQ ID NO: 48628 - DNA, 20 bp, Artificial Sequence
  Description of Artificial Sequence: Synthetic oligonucleotide
  Target: SCNA; (-) strand; PAM type: YTN; PAM sequence: CTC
caccaatacaagtgttcatt

SEQ ID NO: 48629 - DNA, 20 bp, Artificial Sequence
  Description of Artificial Sequence: Synthetic oligonucleotide
  Target: SCNA; (-) strand; PAM type: YTN; PAM sequence: TTC
tccaccaatacaagtgttca

SEQ ID NO: 48630 - DNA, 20 bp, Artificial Sequence
  Description of Artificial Sequence: Synthetic oligonucleotide
  Target: SCNA; (-) strand; PAM type: YTN; PAM sequence: TTT
ctccaccaatacaagtgttc

SEQ ID NO: 48631 - DNA, 20 bp, Artificial Sequence
  Description of Artificial Sequence: Synthetic oligonucleotide
  Target: SCNA; (-) strand; PAM type: YTN; PAM sequence: TTT
tctccaccaatacaagtgtt

SEQ ID NO: 48632 - DNA, 20 bp, Artificial Sequence
  Description of Artificial Sequence: Synthetic oligonucleotide
  Target: SCNA; (-) strand; PAM type: YTN; PAM sequence: TTG
ttttctccaccaatacaagt

SEQ ID NO: 48633 - DNA, 20 bp, Artificial Sequence
  Description of Artificial Sequence: Synthetic oligonucleotide
  Target: SCNA; (-) strand; PAM type: YTN; PAM sequence: TTT
gttttctccaccaatacaag

SEQ ID NO: 48634 - DNA, 20 bp, Artificial Sequence
  Description of Artificial Sequence: Synthetic oligonucleotide
  Target: SCNA; (-) strand; PAM type: YTN; PAM sequence: CTT
tgttttctccaccaatacaa

SEQ ID NO: 48635 - DNA, 20 bp, Artificial Sequence
  Description of Artificial Sequence: Synthetic oligonucleotide
  Target: SCNA; (-) strand; PAM type: YTN; PAM sequence: CTG
aaggatctttgttttctcca

SEQ ID NO: 48636 - DNA, 20 bp, Artificial Sequence
  Description of Artificial Sequence: Synthetic oligonucleotide
  Target: SCNA; (-) strand; PAM type: YTN; PAM sequence: CTG
tctgaaggatctttgttttc

SEQ ID NO: 48637 - DNA, 20 bp, Artificial Sequence
  Description of Artificial Sequence: Synthetic oligonucleotide
  Target: SCNA; (-) strand; PAM type: YTN; PAM sequence: TTA
gaaaagaaacagaaagaaca

SEQ ID NO: 48638 - DNA, 20 bp, Artificial Sequence
  Description of Artificial Sequence: Synthetic oligonucleotide
  Target: SCNA; (-) strand; PAM type: YTN; PAM sequence: TTA
ttagaaaagaaacagaaaga

SEQ ID NO: 48639 - DNA, 20 bp, Artificial Sequence
  Description of Artificial Sequence: Synthetic oligonucleotide
  Target: SCNA; (-) strand; PAM type: YTN; PAM sequence: TTA
atgttattagaaaagaaaca

SEQ ID NO: 48640 - DNA, 20 bp, Artificial Sequence
  Description of Artificial Sequence: Synthetic oligonucleotide
  Target: SCNA; (-) strand; PAM type: YTN; PAM sequence: TTA
aatgtaagttaatgttatta

SEQ ID NO: 48641 - DNA, 20 bp, Artificial Sequence
  Description of Artificial Sequence: Synthetic oligonucleotide
  Target: SCNA; (-) strand; PAM type: YTN; PAM sequence: TTT
aaatgtaagttaatgttatt

SEQ ID NO: 48642 - DNA, 20 bp, Artificial Sequence
  Description of Artificial Sequence: Synthetic oligonucleotide
  Target: SCNA; (-) strand; PAM type: YTN; PAM sequence: TTT
taaatgtaagttaatgttat

SEQ ID NO: 48643 - DNA, 20 bp, Artificial Sequence
  Description of Artificial Sequence: Synthetic oligonucleotide
  Target: SCNA; (-) strand; PAM type: YTN; PAM sequence: TTA
taataattttaaatgtaagt

SEQ ID NO: 48644 - DNA, 20 bp, Artificial Sequence
  Description of Artificial Sequence: Synthetic oligonucleotide
  Target: SCNA; (-) strand; PAM type: YTN; PAM sequence: TTG
tgaaaatagagtgaattata

SEQ ID NO: 48645 - DNA, 20 bp, Artificial Sequence
  Description of Artificial Sequence: Synthetic oligonucleotide
  Target: SCNA; (-) strand; PAM type: YTN; PAM sequence: TTT
gtgaaaatagagtgaattat

SEQ ID NO: 48646 - DNA, 20 bp, Artificial Sequence
  Description of Artificial Sequence: Synthetic oligonucleotide
  Target: SCNA; (-) strand; PAM type: YTN; PAM sequence: TTG
atgatttgtgaaaatagagt

SEQ ID NO: 48647 - DNA, 20 bp, Artificial Sequence
  Description of Artificial Sequence: Synthetic oligonucleotide
  Target: SCNA; (-) strand; PAM type: YTN; PAM sequence: TTT
gatgatttgtgaaaatagag

SEQ ID NO: 48648 - DNA, 20 bp, Artificial Sequence
  Description of Artificial Sequence: Synthetic oligonucleotide
  Target: SCNA; (-) strand; PAM type: YTN; PAM sequence: CTG
agtatgatttgatgatttgt

SEQ ID NO: 48649 - DNA, 20 bp, Artificial Sequence
  Description of Artificial Sequence: Synthetic oligonucleotide
  Target: SCNA; (-) strand; PAM type: YTN; PAM sequence: TTA
aatatctgagtatgatttga

SEQ ID NO: 48650 - DNA, 20 bp, Artificial Sequence
  Description of Artificial Sequence: Synthetic oligonucleotide
  Target: SCNA; (-) strand; PAM type: YTN; PAM sequence: TTT
aaatatctgagtatgatttg

SEQ ID NO: 48651 - DNA, 20 bp, Artificial Sequence
  Description of Artificial Sequence: Synthetic oligonucleotide
  Target: SCNA; (-) strand; PAM type: YTN; PAM sequence: TTT
taaatatctgagtatgattt

SEQ ID NO: 48652 - DNA, 20 bp, Artificial Sequence
  Description of Artificial Sequence: Synthetic oligonucleotide
  Target: SCNA; (-) strand; PAM type: YTN; PAM sequence: TTT
ttaaatatctgagtatgatt

SEQ ID NO: 48653 - DNA, 20 bp, Artificial Sequence
  Description of Artificial Sequence: Synthetic oligonucleotide
  Target: SCNA; (-) strand; PAM type: YTN; PAM sequence: TTA
tttttaaatatctgagtatg

SEQ ID NO: 48654 - DNA, 20 bp, Artificial Sequence
  Description of Artificial Sequence: Synthetic oligonucleotide
  Target: SCNA; (-) strand; PAM type: YTN; PAM sequence: TTT
atttttaaatatctgagtat

SEQ ID NO: 48655 - DNA, 20 bp, Artificial Sequence
  Description of Artificial Sequence: Synthetic oligonucleotide
  Target: SCNA; (-) strand; PAM type: YTN; PAM sequence: CTG
taaatatatacaataaaatt

SEQ ID NO: 48656 - DNA, 20 bp, Artificial Sequence
  Description of Artificial Sequence: Synthetic oligonucleotide
  Target: SCNA; (-) strand; PAM type: YTN; PAM sequence: TTA
ctgtaaatatatacaataaa

SEQ ID NO: 48657 - DNA, 20 bp, Artificial Sequence
  Description of Artificial Sequence: Synthetic oligonucleotide
  Target: SCNA; (-) strand; PAM type: YTN; PAM sequence: TTT
actgtaaatatatacaataa

SEQ ID NO: 48658 - DNA, 20 bp, Artificial Sequence
  Description of Artificial Sequence: Synthetic oligonucleotide
  Target: SCNA; (-) strand; PAM type: YTN; PAM sequence: TTG
tttactgtaaatatatacaa

SEQ ID NO: 48659 - DNA, 20 bp, Artificial Sequence
  Description of Artificial Sequence: Synthetic oligonucleotide
  Target: SCNA; (-) strand; PAM type: YTN; PAM sequence: TTA
taacagcatgttgtttactg

SEQ ID NO: 48660 - DNA, 20 bp, Artificial Sequence
  Description of Artificial Sequence: Synthetic oligonucleotide
  Target: SCNA; (-) strand; PAM type: YTN; PAM sequence: CTT
ataacagcatgttgtttact

SEQ ID NO: 48661 - DNA, 20 bp, Artificial Sequence
  Description of Artificial Sequence: Synthetic oligonucleotide
  Target: SCNA; (-) strand; PAM type: YTN; PAM sequence: TTC
atcttataacagcatgttgt

SEQ ID NO: 48662 - DNA, 20 bp, Artificial Sequence
  Description of Artificial Sequence: Synthetic oligonucleotide
  Target: SCNA; (-) strand; PAM type: YTN; PAM sequence: TTC
accatatacattcatcttat

SEQ ID NO: 48663 - DNA, 20 bp, Artificial Sequence
  Description of Artificial Sequence: Synthetic oligonucleotide
  Target: SCNA; (-) strand; PAM type: YTN; PAM sequence: TTT
caccatatacattcatctta

SEQ ID NO: 48664 - DNA, 20 bp, Artificial Sequence
  Description of Artificial Sequence: Synthetic oligonucleotide
  Target: SCNA; (-) strand; PAM type: YTN; PAM sequence: TTT
tcaccatatacattcatctt

SEQ ID NO: 48665 - DNA, 20 bp, Artificial Sequence
  Description of Artificial Sequence: Synthetic oligonucleotide
  Target: SCNA; (-) strand; PAM type: YTN; PAM sequence: CTT
ttcaccatatacattcatct

SEQ ID NO: 48666 - DNA, 20 bp, Artificial Sequence
  Description of Artificial Sequence: Synthetic oligonucleotide
  Target: SCNA; (-) strand; PAM type: YTN; PAM sequence: CTA
taataaccttttcaccatat

SEQ ID NO: 48667 - DNA, 20 bp, Artificial Sequence
  Description of Artificial Sequence: Synthetic oligonucleotide
  Target: SCNA; (-) strand; PAM type: YTN; PAM sequence: TTG
tcactataataaccttttca

SEQ ID NO: 48668 - DNA, 20 bp, Artificial Sequence
  Description of Artificial Sequence: Synthetic oligonucleotide
  Target: SCNA; (-) strand; PAM type: YTN; PAM sequence: TTT
gtcactataataaccttttc

SEQ ID NO: 48669 - DNA, 20 bp, Artificial Sequence
  Description of Artificial Sequence: Synthetic oligonucleotide
  Target: SCNA; (-) strand; PAM type: YTN; PAM sequence: TTT
tgtcactataataacctttt

SEQ ID NO: 48670 - DNA, 20 bp, Artificial Sequence
  Description of Artificial Sequence: Synthetic oligonucleotide
  Target: SCNA; (-) strand; PAM type: YTN; PAM sequence: TTT
ttgtcactataataaccttt

SEQ ID NO: 48671 - DNA, 20 bp, Artificial Sequence
  Description of Artificial Sequence: Synthetic oligonucleotide
  Target: SCNA; (-) strand; PAM type: YTN; PAM sequence: TTA
atttttgtcactataataac

SEQ ID NO: 48672 - DNA, 20 bp, Artificial Sequence
  Description of Artificial Sequence: Synthetic oligonucleotide
  Target: SCNA; (-) strand; PAM type: YTN; PAM sequence: CTA
cgtgagatagacaatggatg

SEQ ID NO: 48673 - DNA, 20 bp, Artificial Sequence
  Description of Artificial Sequence: Synthetic oligonucleotide
  Target: SCNA; (-) strand; PAM type: YTN; PAM sequence: TTG
ccacaggggaaaaagtgggt

SEQ ID NO: 48674 - DNA, 20 bp, Artificial Sequence
  Description of Artificial Sequence: Synthetic oligonucleotide
  Target: SCNA; (-) strand; PAM type: YTN; PAM sequence: CTT
gccacaggggaaaaagtggg

SEQ ID NO: 48675 - DNA, 20 bp, Artificial Sequence
  Description of Artificial Sequence: Synthetic oligonucleotide
  Target: SCNA; (-) strand; PAM type: YTN; PAM sequence: CTC
ttgccacaggggaaaaagtg

SEQ ID NO: 48676 - DNA, 20 bp, Artificial Sequence
  Description of Artificial Sequence: Synthetic oligonucleotide
  Target: SCNA; (-) strand; PAM type: YTN; PAM sequence: CTG
ctcttgccacaggggaaaaa

SEQ ID NO: 48677 - DNA, 20 bp, Artificial Sequence
  Description of Artificial Sequence: Synthetic oligonucleotide
  Target: SCNA; (-) strand; PAM type: YTN; PAM sequence: TTA
tagctgctcttgccacaggg

SEQ ID NO: 48678 - DNA, 20 bp, Artificial Sequence
  Description of Artificial Sequence: Synthetic oligonucleotide
  Target: SCNA; (-) strand; PAM type: YTN; PAM sequence: TTG
agtagattatagctgctctt

SEQ ID NO: 48679 - DNA, 20 bp, Artificial Sequence
  Description of Artificial Sequence: Synthetic oligonucleotide
  Target: SCNA; (-) strand; PAM type: YTN; PAM sequence: CTA
attgagtagattatagctgc

SEQ ID NO: 48680 - DNA, 20 bp, Artificial Sequence
  Description of Artificial Sequence: Synthetic oligonucleotide
  Target: SCNA; (-) strand; PAM type: YTN; PAM sequence: TTG
ctaattgagtagattatagc

SEQ ID NO: 48681 - DNA, 20 bp, Artificial Sequence
  Description of Artificial Sequence: Synthetic oligonucleotide
  Target: SCNA; (-) strand; PAM type: YTN; PAM sequence: TTT
gctaattgagtagattatag

SEQ ID NO: 48682 - DNA, 20 bp, Artificial Sequence
  Description of Artificial Sequence: Synthetic oligonucleotide
  Target: SCNA; (-) strand; PAM type: YTN; PAM sequence: TTT
tgctaattgagtagattata

SEQ ID NO: 48683 - DNA, 20 bp, Artificial Sequence
  Description of Artificial Sequence: Synthetic oligonucleotide
  Target: SCNA; (-) strand; PAM type: YTN; PAM sequence: TTT
ttgctaattgagtagattat

SEQ ID NO: 48684 - DNA, 20 bp, Artificial Sequence
  Description of Artificial Sequence: Synthetic oligonucleotide
  Target: SCNA; (-) strand; PAM type: YTN; PAM sequence: TTC
aggatttttgctaattgagt

SEQ ID NO: 48685 - DNA, 20 bp, Artificial Sequence
  Description of Artificial Sequence: Synthetic oligonucleotide
  Target: SCNA; (-) strand; PAM type: YTN; PAM sequence: TTG
tattcaggatttttgctaat

SEQ ID NO: 48686 - DNA, 20 bp, Artificial Sequence
  Description of Artificial Sequence: Synthetic oligonucleotide
  Target: SCNA; (-) strand; PAM type: YTN; PAM sequence: TTA
gtaatagtgtattgtattca

SEQ ID NO: 48687 - DNA, 20 bp, Artificial Sequence
  Description of Artificial Sequence: Synthetic oligonucleotide
  Target: SCNA; (-) strand; PAM type: YTN; PAM sequence: CTA
tagttagtaatagtgtattg

SEQ ID NO: 48688 - DNA, 20 bp, Artificial Sequence
  Description of Artificial Sequence: Synthetic oligonucleotide
  Target: SCNA; (-) strand; PAM type: YTN; PAM sequence: CTG
acatgcaggatgacaactat

SEQ ID NO: 48689 - DNA, 20 bp, Artificial Sequence
  Description of Artificial Sequence: Synthetic oligonucleotide
  Target: SCNA; (-) strand; PAM type: YTN; PAM sequence: CTA
aaaagctgacatgcaggatg

SEQ ID NO: 48690 - DNA, 20 bp, Artificial Sequence
  Description of Artificial Sequence: Synthetic oligonucleotide
  Target: SCNA; (-) strand; PAM type: YTN; PAM sequence: CTA
aggatacaaagtagcagata

SEQ ID NO: 48691 - DNA, 20 bp, Artificial Sequence
  Description of Artificial Sequence: Synthetic oligonucleotide
  Target: SCNA; (-) strand; PAM type: YTN; PAM sequence: TTG
ggagatgtagatctaaggat

SEQ ID NO: 48692 - DNA, 20 bp, Artificial Sequence
  Description of Artificial Sequence: Synthetic oligonucleotide
  Target: SCNA; (-) strand; PAM type: YTN; PAM sequence: TTA
ccatgagtgaggtggcaggg

SEQ ID NO: 48693 - DNA, 20 bp, Artificial Sequence
  Description of Artificial Sequence: Synthetic oligonucleotide
  Target: SCNA; (-) strand; PAM type: YTN; PAM sequence: CTG
gttaccatgagtgaggtggc

SEQ ID NO: 48694 - DNA, 20 bp, Artificial Sequence
  Description of Artificial Sequence: Synthetic oligonucleotide
  Target: SCNA; (-) strand; PAM type: YTN; PAM sequence: CTC
aaaataaaaaaacaaaaaac

SEQ ID NO: 48695 - DNA, 20 bp, Artificial Sequence
  Description of Artificial Sequence: Synthetic oligonucleotide
  Target: SCNA; (-) strand; PAM type: YTN; PAM sequence: CTG
tctcaaaataaaaaaacaaa

SEQ ID NO: 48696 - DNA, 20 bp, Artificial Sequence
  Description of Artificial Sequence: Synthetic oligonucleotide
  Target: SCNA; (-) strand; PAM type: YTN; PAM sequence: CTC
tgtctcaaaataaaaaaaca

SEQ ID NO: 48697 - DNA, 20 bp, Artificial Sequence
  Description of Artificial Sequence: Synthetic oligonucleotide
  Target: SCNA; (-) strand; PAM type: YTN; PAM sequence: CTG
ggcaaaagagcaaaactctg

SEQ ID NO: 48698 - DNA, 20 bp, Artificial Sequence
  Description of Artificial Sequence: Synthetic oligonucleotide
  Target: SCNA; (-) strand; PAM type: YTN; PAM sequence: CTC
cagcctgggcaaaagagcaa

SEQ ID NO: 48699 - DNA, 20 bp, Artificial Sequence
  Description of Artificial Sequence: Synthetic oligonucleotide
  Target: SCNA; (-) strand; PAM type: YTN; PAM sequence: TTC
actccagcctgggcaaaaga

SEQ ID NO: 48700 - DNA, 20 bp, Artificial Sequence
  Description of Artificial Sequence: Synthetic oligonucleotide
  Target: SCNA; (-) strand; PAM type: YTN; PAM sequence: CTT
cactccagcctgggcaaaag

SEQ ID NO: 48701 - DNA, 20 bp, Artificial Sequence
  Description of Artificial Sequence: Synthetic oligonucleotide
  Target: SCNA; (-) strand; PAM type: YTN; PAM sequence: TTG
cagtgagccgagatggcgcc

SEQ ID NO: 48702 - DNA, 20 bp, Artificial Sequence
  Description of Artificial Sequence: Synthetic oligonucleotide
  Target: SCNA; (-) strand; PAM type: YTN; PAM sequence: CTC
aggaggcataggttgcagtg

SEQ ID NO: 48703 - DNA, 20 bp, Artificial Sequence
  Description of Artificial Sequence: Synthetic oligonucleotide
  Target: SCNA; (-) strand; PAM type: YTN; PAM sequence: TTG
aactcaggaggcataggttg

SEQ ID NO: 48704 - DNA, 20 bp, Artificial Sequence
  Description of Artificial Sequence: Synthetic oligonucleotide
  Target: SCNA; (-) strand; PAM type: YTN; PAM sequence: CTT
gaactcaggaggcataggtt

SEQ ID NO: 48705 - DNA, 20 bp, Artificial Sequence
  Description of Artificial Sequence: Synthetic oligonucleotide
  Target: SCNA; (-) strand; PAM type: YTN; PAM sequence: TTG
agaaaggagaatcacttgaa

SEQ ID NO: 48706 - DNA, 20 bp, Artificial Sequence
  Description of Artificial Sequence: Synthetic oligonucleotide
  Target: SCNA; (-) strand; PAM type: YTN; PAM sequence: CTC
aggcagttgagaaaggagaa

SEQ ID NO: 48707 - DNA, 20 bp, Artificial Sequence
  Description of Artificial Sequence: Synthetic oligonucleotide
  Target: SCNA; (-) strand; PAM type: YTN; PAM sequence: CTA
ctcaggcagttgagaaagga

SEQ ID NO: 48708 - DNA, 20 bp, Artificial Sequence
  Description of Artificial Sequence: Synthetic oligonucleotide
  Target: SCNA; (-) strand; PAM type: YTN; PAM sequence: CTG
taatcccagctactcaggca

SEQ ID NO: 48709 - DNA, 20 bp, Artificial Sequence
  Description of Artificial Sequence: Synthetic oligonucleotide
  Target: SCNA; (-) strand; PAM type: YTN; PAM sequence: TTA
gccgggcatagtggcaggtg

SEQ ID NO: 48710 - DNA, 20 bp, Artificial Sequence
  Description of Artificial Sequence: Synthetic oligonucleotide
  Target: SCNA; (-) strand; PAM type: YTN; PAM sequence: CTA
aaagtacaaaaattagccgg

SEQ ID NO: 48711 - DNA, 20 bp, Artificial Sequence
  Description of Artificial Sequence: Synthetic oligonucleotide
  Target: SCNA; (-) strand; PAM type: YTN; PAM sequence: CTA
ctaaaagtacaaaaattagc

SEQ ID NO: 48712 - DNA, 20 bp, Artificial Sequence
  Description of Artificial Sequence: Synthetic oligonucleotide
  Target: SCNA; (-) strand; PAM type: YTN; PAM sequence: TTC
tactaaaagtacaaaaatta

SEQ ID NO: 48713 - DNA, 20 bp, Artificial Sequence
  Description of Artificial Sequence: Synthetic oligonucleotide
  Target: SCNA; (-) strand; PAM type: YTN; PAM sequence: TTT
ctactaaaagtacaaaaatt

SEQ ID NO: 48714 - DNA, 20 bp, Artificial Sequence
  Description of Artificial Sequence: Synthetic oligonucleotide
  Target: SCNA; (-) strand; PAM type: YTN; PAM sequence: CTG
tttctactaaaagtacaaaa

SEQ ID NO: 48715 - DNA, 20 bp, Artificial Sequence
  Description of Artificial Sequence: Synthetic oligonucleotide
  Target: SCNA; (-) strand; PAM type: YTN; PAM sequence: CTG
accaacatggtgaaatcctg

SEQ ID NO: 48716 - DNA, 20 bp, Artificial Sequence
  Description of Artificial Sequence: Synthetic oligonucleotide
  Target: SCNA; (-) strand; PAM type: YTN; PAM sequence: TTC
aagaccagcctgaccaacat

SEQ ID NO: 48717 - DNA, 20 bp, Artificial Sequence
  Description of Artificial Sequence: Synthetic oligonucleotide
  Target: SCNA; (-) strand; PAM type: YTN; PAM sequence: CTG
aggtcaggagttcaagacca

SEQ ID NO: 48718 - DNA, 20 bp, Artificial Sequence
  Description of Artificial Sequence: Synthetic oligonucleotide
  Target: SCNA; (-) strand; PAM type: YTN; PAM sequence: TTG
ggaagccgaggtgggtgaat

SEQ ID NO: 48719 - DNA, 20 bp, Artificial Sequence
  Description of Artificial Sequence: Synthetic oligonucleotide
  Target: SCNA; (-) strand; PAM type: YTN; PAM sequence: TTT
gggaagccgaggtgggtgaa

SEQ ID NO: 48720 - DNA, 20 bp, Artificial Sequence
  Description of Artificial Sequence: Synthetic oligonucleotide
  Target: SCNA; (-) strand; PAM type: YTN; PAM sequence: CTT
tgggaagccgaggtgggtga

SEQ ID NO: 48721 - DNA, 20 bp, Artificial Sequence
  Description of Artificial Sequence: Synthetic oligonucleotide
  Target: SCNA; (-) strand; PAM type: YTN; PAM sequence: CTA
gccctttgggaagccgaggt

SEQ ID NO: 48722 - DNA, 20 bp, Artificial Sequence
  Description of Artificial Sequence: Synthetic oligonucleotide
  Target: SCNA; (-) strand; PAM type: YTN; PAM sequence: CTG
taatcctagccctttgggaa

SEQ ID NO: 48723 - DNA, 20 bp, Artificial Sequence
  Description of Artificial Sequence: Synthetic oligonucleotide
  Target: SCNA; (-) strand; PAM type: YTN; PAM sequence: CTC
acgcctgtaatcctagccct

SEQ ID NO: 48724 - DNA, 20 bp, Artificial Sequence
  Description of Artificial Sequence: Synthetic oligonucleotide
  Target: SCNA; (-) strand; PAM type: YTN; PAM sequence: TTA
ccggccggatgtggtagctc

SEQ ID NO: 48725 - DNA, 20 bp, Artificial Sequence
  Description of Artificial Sequence: Synthetic oligonucleotide
  Target: SCNA; (-) strand; PAM type: YTN; PAM sequence: TTA
gaataaaacagtggttaccg

SEQ ID NO: 48726 - DNA, 20 bp, Artificial Sequence
  Description of Artificial Sequence: Synthetic oligonucleotide
  Target: SCNA; (-) strand; PAM type: YTN; PAM sequence: TTC
aaatataaagttagaataaa

SEQ ID NO: 48727 - DNA, 20 bp, Artificial Sequence
  Description of Artificial Sequence: Synthetic oligonucleotide
  Target: SCNA; (-) strand; PAM type: YTN; PAM sequence: CTA
aaaagaaaaagttcaaatat

SEQ ID NO: 48728 - DNA, 20 bp, Artificial Sequence
  Description of Artificial Sequence: Synthetic oligonucleotide
  Target: SCNA; (-) strand; PAM type: YTN; PAM sequence: TTA
tatgtggaatctaaaaagaa

SEQ ID NO: 48729 - DNA, 20 bp, Artificial Sequence
  Description of Artificial Sequence: Synthetic oligonucleotide
  Target: SCNA; (-) strand; PAM type: YTN; PAM sequence: CTT
atatgtggaatctaaaaaga

SEQ ID NO: 48730 - DNA, 20 bp, Artificial Sequence
  Description of Artificial Sequence: Synthetic oligonucleotide
  Target: SCNA; (-) strand; PAM type: YTN; PAM sequence: CTC
acttatatgtggaatctaaa

SEQ ID NO: 48731 - DNA, 20 bp, Artificial Sequence
  Description of Artificial Sequence: Synthetic oligonucleotide
  Target: SCNA; (-) strand; PAM type: YTN; PAM sequence: TTG
cataatctcacttatatgtg

SEQ ID NO: 48732 - DNA, 20 bp, Artificial Sequence
  Description of Artificial Sequence: Synthetic oligonucleotide
  Target: SCNA; (-) strand; PAM type: YTN; PAM sequence: CTG
tgggaaataagtccaacaca

SEQ ID NO: 48733 - DNA, 20 bp, Artificial Sequence
  Description of Artificial Sequence: Synthetic oligonucleotide
  Target: SCNA; (-) strand; PAM type: YTN; PAM sequence: TTA
agctgtgggaaataagtcca

SEQ ID NO: 48734 - DNA, 20 bp, Artificial Sequence
  Description of Artificial Sequence: Synthetic oligonucleotide
  Target: SCNA; (-) strand; PAM type: YTN; PAM sequence: CTG
gaggatattaagctgtggga

SEQ ID NO: 48735 - DNA, 20 bp, Artificial Sequence
  Description of Artificial Sequence: Synthetic oligonucleotide
  Target: SCNA; (-) strand; PAM type: YTN; PAM sequence: TTG
ccacaacatgcatggacctg

SEQ ID NO: 48736 - DNA, 20 bp, Artificial Sequence
  Description of Artificial Sequence: Synthetic oligonucleotide
  Target: SCNA; (-) strand; PAM type: YTN; PAM sequence: TTT
gccacaacatgcatggacct

SEQ ID NO: 48737 - DNA, 20 bp, Artificial Sequence
  Description of Artificial Sequence: Synthetic oligonucleotide
  Target: SCNA; (-) strand; PAM type: YTN; PAM sequence: CTG
tcatttgccacaacatgcat

SEQ ID NO: 48738 - DNA, 20 bp, Artificial Sequence
  Description of Artificial Sequence: Synthetic oligonucleotide
  Target: SCNA; (-) strand; PAM type: YTN; PAM sequence: TTA
aaaaaggagaagaccctgtc

SEQ ID NO: 48739 - DNA, 20 bp, Artificial Sequence
  Description of Artificial Sequence: Synthetic oligonucleotide
  Target: SCNA; (-) strand; PAM type: YTN; PAM sequence: CTT
aaaaaaggagaagaccctgt

SEQ ID NO: 48740 - DNA, 20 bp, Artificial Sequence
  Description of Artificial Sequence: Synthetic oligonucleotide
  Target: SCNA; (-) strand; PAM type: YTN; PAM sequence: TTC
agccttaaaaaaggagaaga

SEQ ID NO: 48741 - DNA, 20 bp, Artificial Sequence
  Description of Artificial Sequence: Synthetic oligonucleotide
  Target: SCNA; (-) strand; PAM type: YTN; PAM sequence: TTA
ttcagccttaaaaaaggaga

SEQ ID NO: 48742 - DNA, 20 bp, Artificial Sequence
  Description of Artificial Sequence: Synthetic oligonucleotide
  Target: SCNA; (-) strand; PAM type: YTN; PAM sequence: CTG
tggtatatgtatatacaatg

SEQ ID NO: 48743 - DNA, 20 bp, Artificial Sequence
  Description of Artificial Sequence: Synthetic oligonucleotide
  Target: SCNA; (-) strand; PAM type: YTN; PAM sequence: TTG
gtgcatgaatggataaaaga

SEQ ID NO: 48744 - DNA, 20 bp, Artificial Sequence
  Description of Artificial Sequence: Synthetic oligonucleotide
  Target: SCNA; (-) strand; PAM type: YTN; PAM sequence: CTA
ggtatgtgttggtgcatgaa

SEQ ID NO: 48745 - DNA, 20 bp, Artificial Sequence
  Description of Artificial Sequence: Synthetic oligonucleotide
  Target: SCNA; (-) strand; PAM type: YTN; PAM sequence: TTA
cagtagccaagatatggaaa

SEQ ID NO: 48746 - DNA, 20 bp, Artificial Sequence
  Description of Artificial Sequence: Synthetic oligonucleotide
  Target: SCNA; (-) strand; PAM type: YTN; PAM sequence: TTT
acagtagccaagatatggaa

SEQ ID NO: 48747 - DNA, 20 bp, Artificial Sequence
  Description of Artificial Sequence: Synthetic oligonucleotide
  Target: SCNA; (-) strand; PAM type: YTN; PAM sequence: TTA
tttacagtagccaagatatg

SEQ ID NO: 48748 - DNA, 20 bp, Artificial Sequence
  Description of Artificial Sequence: Synthetic oligonucleotide
  Target: SCNA; (-) strand; PAM type: YTN; PAM sequence: TTG
cagcattatttacagtagcc

SEQ ID NO: 48749 - DNA, 20 bp, Artificial Sequence
  Description of Artificial Sequence: Synthetic oligonucleotide
  Target: SCNA; (-) strand; PAM type: YTN; PAM sequence: TTC
attgcagcattatttacagt

SEQ ID NO: 48750 - DNA, 20 bp, Artificial Sequence
  Description of Artificial Sequence: Synthetic oligonucleotide
  Target: SCNA; (-) strand; PAM type: YTN; PAM sequence: CTA
tattcattgcagcattattt

SEQ ID NO: 48751 - DNA, 20 bp, Artificial Sequence
  Description of Artificial Sequence: Synthetic oligonucleotide
  Target: SCNA; (-) strand; PAM type: YTN; PAM sequence: CTG
ctatattcattgcagcatta

SEQ ID NO: 48752 - DNA, 20 bp, Artificial Sequence
  Description of Artificial Sequence: Synthetic oligonucleotide
  Target: SCNA; (-) strand; PAM type: YTN; PAM sequence: CTG
cactgctatattcattgcag

SEQ ID NO: 48753 - DNA, 20 bp, Artificial Sequence
  Description of Artificial Sequence: Synthetic oligonucleotide
  Target: SCNA; (-) strand; PAM type: YTN; PAM sequence: CTC
ataaagatatctgcactgct

SEQ ID NO: 48754 - DNA, 20 bp, Artificial Sequence
  Description of Artificial Sequence: Synthetic oligonucleotide
  Target: SCNA; (-) strand; PAM type: YTN; PAM sequence: CTG
gatgtacccaaaggaaataa

SEQ ID NO: 48755 - DNA, 20 bp, Artificial Sequence
  Description of Artificial Sequence: Synthetic oligonucleotide
  Target: SCNA; (-) strand; PAM type: YTN; PAM sequence: CTC
tggatgtacccaaaggaaat

SEQ ID NO: 48756 - DNA, 20 bp, Artificial Sequence
  Description of Artificial Sequence: Synthetic oligonucleotide
  Target: SCNA; (-) strand; PAM type: YTN; PAM sequence: CTC
ctctggatgtacccaaagga

SEQ ID NO: 48757 - DNA, 20 bp, Artificial Sequence
  Description of Artificial Sequence: Synthetic oligonucleotide
  Target: SCNA; (-) strand; PAM type: YTN; PAM sequence: CTA
agacccagcaatccctcctc

SEQ ID NO: 48758 - DNA, 20 bp, Artificial Sequence
  Description of Artificial Sequence: Synthetic oligonucleotide
  Target: SCNA; (-) strand; PAM type: YTN; PAM sequence: TTA
cctaagacccagcaatccct

SEQ ID NO: 48759 - DNA, 20 bp, Artificial Sequence
  Description of Artificial Sequence: Synthetic oligonucleotide
  Target: SCNA; (-) strand; PAM type: YTN; PAM sequence: TTA
gaattacctaagacccagca

SEQ ID NO: 48760 - DNA, 20 bp, Artificial Sequence
  Description of Artificial Sequence: Synthetic oligonucleotide
  Target: SCNA; (-) strand; PAM type: YTN; PAM sequence: TTA
aaattagaattacctaagac

SEQ ID NO: 48761 - DNA, 20 bp, Artificial Sequence
  Description of Artificial Sequence: Synthetic oligonucleotide
  Target: SCNA; (-) strand; PAM type: YTN; PAM sequence: CTA
aagaaattaaaattagaatt

SEQ ID NO: 48762 - DNA, 20 bp, Artificial Sequence
  Description of Artificial Sequence: Synthetic oligonucleotide
  Target: SCNA; (-) strand; PAM type: YTN; PAM sequence: TTC
ctaaagaaattaaaattaga

SEQ ID NO: 48763 - DNA, 20 bp, Artificial Sequence
  Description of Artificial Sequence: Synthetic oligonucleotide
  Target: SCNA; (-) strand; PAM type: YTN; PAM sequence: TTA
tggacaatagtacggaggtt

SEQ ID NO: 48764 - DNA, 20 bp, Artificial Sequence
  Description of Artificial Sequence: Synthetic oligonucleotide
  Target: SCNA; (-) strand; PAM type: YTN; PAM sequence: TTG
gtgcagtcattatggacaat

SEQ ID NO: 48765 - DNA, 20 bp, Artificial Sequence
  Description of Artificial Sequence: Synthetic oligonucleotide
  Target: SCNA; (-) strand; PAM type: YTN; PAM sequence: TTG
gtggaaatatagattggtgc

SEQ ID NO: 48766 - DNA, 20 bp, Artificial Sequence
  Description of Artificial Sequence: Synthetic oligonucleotide
  Target: SCNA; (-) strand; PAM type: YTN; PAM sequence: TTG
ttggtggaaatatagattgg

SEQ ID NO: 48767 - DNA, 20 bp, Artificial Sequence
  Description of Artificial Sequence: Synthetic oligonucleotide
  Target: SCNA; (-) strand; PAM type: YTN; PAM sequence: TTG
tacattgttggtggaaatat

SEQ ID NO: 48768 - DNA, 20 bp, Artificial Sequence
  Description of Artificial Sequence: Synthetic oligonucleotide
  Target: SCNA; (-) strand; PAM type: YTN; PAM sequence: CTT
gtacattgttggtggaaata

SEQ ID NO: 48769 - DNA, 20 bp, Artificial Sequence
  Description of Artificial Sequence: Synthetic oligonucleotide
  Target: SCNA; (-) strand; PAM type: YTN; PAM sequence: TTG
ataagtgtgtagagaaaagg

SEQ ID NO: 48770 - DNA, 20 bp, Artificial Sequence
  Description of Artificial Sequence: Synthetic oligonucleotide
  Target: SCNA; (-) strand; PAM type: YTN; PAM sequence: TTA
agtgttgataagtgtgtaga

SEQ ID NO: 48771 - DNA, 20 bp, Artificial Sequence
  Description of Artificial Sequence: Synthetic oligonucleotide
  Target: SCNA; (-) strand; PAM type: YTN; PAM sequence: TTT
aagtgttgataagtgtgtag

SEQ ID NO: 48772 - DNA, 20 bp, Artificial Sequence
  Description of Artificial Sequence: Synthetic oligonucleotide
  Target: SCNA; (-) strand; PAM type: YTN; PAM sequence: TTC
agtttaagtgttgataagtg

SEQ ID NO: 48773 - DNA, 20 bp, Artificial Sequence
  Description of Artificial Sequence: Synthetic oligonucleotide
  Target: SCNA; (-) strand; PAM type: YTN; PAM sequence: CTA
catgttcagtttaagtgttg

SEQ ID NO: 48774 - DNA, 20 bp, Artificial Sequence
  Description of Artificial Sequence: Synthetic oligonucleotide
  Target: SCNA; (-) strand; PAM type: YTN; PAM sequence: TTA
gagaataatgaaaagaaaaa

SEQ ID NO: 48775 - DNA, 20 bp, Artificial Sequence
  Description of Artificial Sequence: Synthetic oligonucleotide
  Target: SCNA; (-) strand; PAM type: YTN; PAM sequence: TTT
agagaataatgaaaagaaaa

SEQ ID NO: 48776 - DNA, 20 bp, Artificial Sequence
  Description of Artificial Sequence: Synthetic oligonucleotide
  Target: SCNA; (-) strand; PAM type: YTN; PAM sequence: TTG
tttagagaataatgaaaaga

SEQ ID NO: 48777 - DNA, 20 bp, Artificial Sequence
  Description of Artificial Sequence: Synthetic oligonucleotide
  Target: SCNA; (-) strand; PAM type: YTN; PAM sequence: CTA
tattgtttagagaataatga

SEQ ID NO: 48778 - DNA, 20 bp, Artificial Sequence
  Description of Artificial Sequence: Synthetic oligonucleotide
  Target: SCNA; (-) strand; PAM type: YTN; PAM sequence: TTA
tactatattgtttagagaat

SEQ ID NO: 48779 - DNA, 20 bp, Artificial Sequence
  Description of Artificial Sequence: Synthetic oligonucleotide
  Target: SCNA; (-) strand; PAM type: YTN; PAM sequence: TTT
atactatattgtttagagaa

SEQ ID NO: 48780 - DNA, 20 bp, Artificial Sequence
  Description of Artificial Sequence: Synthetic oligonucleotide
  Target: SCNA; (-) strand; PAM type: YTN; PAM sequence: TTT
tatactatattgtttagaga

SEQ ID NO: 48781 - DNA, 20 bp, Artificial Sequence
  Description of Artificial Sequence: Synthetic oligonucleotide
  Target: SCNA; (-) strand; PAM type: YTN; PAM sequence: TTT
ttatactatattgtttagag

SEQ ID NO: 48782 - DNA, 20 bp, Artificial Sequence
  Description of Artificial Sequence: Synthetic oligonucleotide
  Target: SCNA; (-) strand; PAM type: YTN; PAM sequence: CTA
tgtaaatagtttttatacta

SEQ ID NO: 48783 - DNA, 20 bp, Artificial Sequence
  Description of Artificial Sequence: Synthetic oligonucleotide
  Target: SCNA; (-) strand; PAM type: YTN; PAM sequence: TTC
tatgtaaatagtttttatac

SEQ ID NO: 48784 - DNA, 20 bp, Artificial Sequence
  Description of Artificial Sequence: Synthetic oligonucleotide
  Target: SCNA; (-) strand; PAM type: YTN; PAM sequence: CTG
ataatgcccaatacaatgta

SEQ ID NO: 48785 - DNA, 20 bp, Artificial Sequence
  Description of Artificial Sequence: Synthetic oligonucleotide
  Target: SCNA; (-) strand; PAM type: YTN; PAM sequence: TTA
ctgataatgcccaatacaat

SEQ ID NO: 48786 - DNA, 20 bp, Artificial Sequence
  Description of Artificial Sequence: Synthetic oligonucleotide
  Target: SCNA; (-) strand; PAM type: YTN; PAM sequence: CTA
gattactgataatgcccaat

SEQ ID NO: 48787 - DNA, 20 bp, Artificial Sequence
  Description of Artificial Sequence: Synthetic oligonucleotide
  Target: SCNA; (-) strand; PAM type: YTN; PAM sequence: CTC
tagattactgataatgccca

SEQ ID NO: 48788 - DNA, 20 bp, Artificial Sequence
  Description of Artificial Sequence: Synthetic oligonucleotide
  Target: SCNA; (-) strand; PAM type: YTN; PAM sequence: TTA
aataatctctagattactga

SEQ ID NO: 48789 - DNA, 20 bp, Artificial Sequence
  Description of Artificial Sequence: Synthetic oligonucleotide
  Target: SCNA; (-) strand; PAM type: YTN; PAM sequence: TTT
aaataatctctagattactg

SEQ ID NO: 48790 - DNA, 20 bp, Artificial Sequence
  Description of Artificial Sequence: Synthetic oligonucleotide
  Target: SCNA; (-) strand; PAM type: YTN; PAM sequence: CTT
taaataatctctagattact

SEQ ID NO: 48791 - DNA, 20 bp, Artificial Sequence
  Description of Artificial Sequence: Synthetic oligonucleotide
  Target: SCNA; (-) strand; PAM type: YTN; PAM sequence: CTG
ctttaaataatctctagatt

SEQ ID NO: 48792 - DNA, 20 bp, Artificial Sequence
  Description of Artificial Sequence: Synthetic oligonucleotide
  Target: SCNA; (-) strand; PAM type: YTN; PAM sequence: CTG
ctgctttaaataatctctag

SEQ ID NO: 48793 - DNA, 20 bp, Artificial Sequence
  Description of Artificial Sequence: Synthetic oligonucleotide
  Target: SCNA; (-) strand; PAM type: YTN; PAM sequence: TTG
gggactgctgctttaaataa

SEQ ID NO: 48794 - DNA, 20 bp, Artificial Sequence
  Description of Artificial Sequence: Synthetic oligonucleotide
  Target: SCNA; (-) strand; PAM type: YTN; PAM sequence: CTG
gtgccagaaaggttggggac

SEQ ID NO: 48795 - DNA, 20 bp, Artificial Sequence
  Description of Artificial Sequence: Synthetic oligonucleotide
  Target: SCNA; (-) strand; PAM type: YTN; PAM sequence: TTC
cagaaaaccagtccctggtg

SEQ ID NO: 48796 - DNA, 20 bp, Artificial Sequence
  Description of Artificial Sequence: Synthetic oligonucleotide
  Target: SCNA; (-) strand; PAM type: YTN; PAM sequence: CTT
ccagaaaaccagtccctggt

SEQ ID NO: 48797 - DNA, 20 bp, Artificial Sequence
  Description of Artificial Sequence: Synthetic oligonucleotide
  Target: SCNA; (-) strand; PAM type: YTN; PAM sequence: TTC
ttccagaaaaccagtccctg

SEQ ID NO: 48798 - DNA, 20 bp, Artificial Sequence
  Description of Artificial Sequence: Synthetic oligonucleotide
  Target: SCNA; (-) strand; PAM type: YTN; PAM sequence: TTT
cttccagaaaaccagtccct

SEQ ID NO: 48799 - DNA, 20 bp, Artificial Sequence
  Description of Artificial Sequence: Synthetic oligonucleotide
  Target: SCNA; (-) strand; PAM type: YTN; PAM sequence: CTG
tccgtggaaacatttcttcc

SEQ ID NO: 48800 - DNA, 20 bp, Artificial Sequence
  Description of Artificial Sequence: Synthetic oligonucleotide
  Target: SCNA; (-) strand; PAM type: YTN; PAM sequence: CTC
accatccctgtccgtggaaa

SEQ ID NO: 48801 - DNA, 20 bp, Artificial Sequence
  Description of Artificial Sequence: Synthetic oligonucleotide
  Target: SCNA; (-) strand; PAM type: YTN; PAM sequence: TTC
ccctcaccatccctgtccgt

SEQ ID NO: 48802 - DNA, 20 bp, Artificial Sequence
  Description of Artificial Sequence: Synthetic oligonucleotide
  Target: SCNA; (-) strand; PAM type: YTN; PAM sequence: CTT
cccctcaccatccctgtccg

SEQ ID NO: 48803 - DNA, 20 bp, Artificial Sequence
  Description of Artificial Sequence: Synthetic oligonucleotide
  Target: SCNA; (-) strand; PAM type: YTN; PAM sequence: TTC
cccttcccctcaccatccct

SEQ ID NO: 48804 - DNA, 20 bp, Artificial Sequence
  Description of Artificial Sequence: Synthetic oligonucleotide
  Target: SCNA; (-) strand; PAM type: YTN; PAM sequence: TTG
aatcatcccaaaaccattcc

SEQ ID NO: 48805 - DNA, 20 bp, Artificial Sequence
  Description of Artificial Sequence: Synthetic oligonucleotide
  Target: SCNA; (-) strand; PAM type: YTN; PAM sequence: CTT
gaatcatcccaaaaccattc

SEQ ID NO: 48806 - DNA, 20 bp, Artificial Sequence
  Description of Artificial Sequence: Synthetic oligonucleotide
  Target: SCNA; (-) strand; PAM type: YTN; PAM sequence: CTA
atgataaatgtaatgtgctt

SEQ ID NO: 48807 - DNA, 20 bp, Artificial Sequence
  Description of Artificial Sequence: Synthetic oligonucleotide
  Target: SCNA; (-) strand; PAM type: YTN; PAM sequence: TTA
tgagaatctaatgataaatg

SEQ ID NO: 48808 - DNA, 20 bp, Artificial Sequence
  Description of Artificial Sequence: Synthetic oligonucleotide
  Target: SCNA; (-) strand; PAM type: YTN; PAM sequence: CTT
atgagaatctaatgataaat

SEQ ID NO: 48809 - DNA, 20 bp, Artificial Sequence
  Description of Artificial Sequence: Synthetic oligonucleotide
  Target: SCNA; (-) strand; PAM type: YTN; PAM sequence: CTC
cttatgagaatctaatgata

SEQ ID NO: 48810 - DNA, 20 bp, Artificial Sequence
  Description of Artificial Sequence: Synthetic oligonucleotide
  Target: SCNA; (-) strand; PAM type: YTN; PAM sequence: TTG
tgcgctccttatgagaatct

SEQ ID NO: 48811 - DNA, 20 bp, Artificial Sequence
  Description of Artificial Sequence: Synthetic oligonucleotide
  Target: SCNA; (-) strand; PAM type: YTN; PAM sequence: CTA
ggttgtgcgctccttatgag

SEQ ID NO: 48812 - DNA, 20 bp, Artificial Sequence
  Description of Artificial Sequence: Synthetic oligonucleotide
  Target: SCNA; (-) strand; PAM type: YTN; PAM sequence: CTG
cacatgtgagggatctaggt

SEQ ID NO: 48813 - DNA, 20 bp, Artificial Sequence
  Description of Artificial Sequence: Synthetic oligonucleotide
  Target: SCNA; (-) strand; PAM type: YTN; PAM sequence: TTG
tgaactgcacatgtgaggga

SEQ ID NO: 48814 - DNA, 20 bp, Artificial Sequence
  Description of Artificial Sequence: Synthetic oligonucleotide
  Target: SCNA; (-) strand; PAM type: YTN; PAM sequence: CTA
ttgtgaactgcacatgtgag

SEQ ID NO: 48815 - DNA, 20 bp, Artificial Sequence
  Description of Artificial Sequence: Synthetic oligonucleotide
  Target: SCNA; (-) strand; PAM type: YTN; PAM sequence: TTG
ccataggagcacgaacccta

SEQ ID NO: 48816 - DNA, 20 bp, Artificial Sequence
  Description of Artificial Sequence: Synthetic oligonucleotide
  Target: SCNA; (-) strand; PAM type: YTN; PAM sequence: TTA
gattgccataggagcacgaa

SEQ ID NO: 48817 - DNA, 20 bp, Artificial Sequence
  Description of Artificial Sequence: Synthetic oligonucleotide
  Target: SCNA; (-) strand; PAM type: YTN; PAM sequence: CTC
agtggtggcattagattgcc

SEQ ID NO: 48818 - DNA, 20 bp, Artificial Sequence
  Description of Artificial Sequence: Synthetic oligonucleotide
  Target: SCNA; (-) strand; PAM type: YTN; PAM sequence: CTG
tcagctcagtggtggcatta

SEQ ID NO: 48819 - DNA, 20 bp, Artificial Sequence
  Description of Artificial Sequence: Synthetic oligonucleotide
  Target: SCNA; (-) strand; PAM type: YTN; PAM sequence: CTC
ctgtcagctcagtggtggca

SEQ ID NO: 48820 - DNA, 20 bp, Artificial Sequence
  Description of Artificial Sequence: Synthetic oligonucleotide
  Target: SCNA; (-) strand; PAM type: YTN; PAM sequence: CTC
ctcctgtcagctcagtggtg

SEQ ID NO: 48821 - DNA, 20 bp, Artificial Sequence
  Description of Artificial Sequence: Synthetic oligonucleotide
  Target: SCNA; (-) strand; PAM type: YTN; PAM sequence: CTC
ctcctcctgtcagctcagtg

SEQ ID NO: 48822 - DNA, 20 bp, Artificial Sequence
  Description of Artificial Sequence: Synthetic oligonucleotide
  Target: SCNA; (-) strand; PAM type: YTN; PAM sequence: CTG
agctcctcctcctgtcagct

SEQ ID NO: 48823 - DNA, 20 bp, Artificial Sequence
  Description of Artificial Sequence: Synthetic oligonucleotide
  Target: SCNA; (-) strand; PAM type: YTN; PAM sequence: CTG
cacagcaagagctgagctcc

SEQ ID NO: 48824 - DNA, 20 bp, Artificial Sequence
  Description of Artificial Sequence: Synthetic oligonucleotide
  Target: SCNA; (-) strand; PAM type: YTN; PAM sequence: TTC
gataccaggctgcacagcaa

SEQ ID NO: 48825 - DNA, 20 bp, Artificial Sequence
  Description of Artificial Sequence: Synthetic oligonucleotide
  Target: SCNA; (-) strand; PAM type: YTN; PAM sequence: CTG
ttcgataccaggctgcacag

SEQ ID NO: 48826 - DNA, 20 bp, Artificial Sequence
  Description of Artificial Sequence: Synthetic oligonucleotide
  Target: SCNA; (-) strand; PAM type: YTN; PAM sequence: TTA
ggctgttcgataccaggctg

SEQ ID NO: 48827 - DNA, 20 bp, Artificial Sequence
  Description of Artificial Sequence: Synthetic oligonucleotide
  Target: SCNA; (-) strand; PAM type: YTN; PAM sequence: CTG
ttaggctgttcgataccagg

SEQ ID NO: 48828 - DNA, 20 bp, Artificial Sequence
  Description of Artificial Sequence: Synthetic oligonucleotide
  Target: SCNA; (-) strand; PAM type: YTN; PAM sequence: CTG
gtccatagcctgttaggctg

SEQ ID NO: 48829 - DNA, 20 bp, Artificial Sequence
  Description of Artificial Sequence: Synthetic oligonucleotide
  Target: SCNA; (-) strand; PAM type: YTN; PAM sequence: TTC
aatcaggggtccccaacccc

SEQ ID NO: 48830 - DNA, 20 bp, Artificial Sequence
  Description of Artificial Sequence: Synthetic oligonucleotide
  Target: SCNA; (-) strand; PAM type: YTN; PAM sequence: TTT
caatcaggggtccccaaccc

SEQ ID NO: 48831 - DNA, 20 bp, Artificial Sequence
  Description of Artificial Sequence: Synthetic oligonucleotide
  Target: SCNA; (-) strand; PAM type: YTN; PAM sequence: CTT
tcaatcaggggtccccaacc

SEQ ID NO: 48832 - DNA, 20 bp, Artificial Sequence
  Description of Artificial Sequence: Synthetic oligonucleotide
  Target: SCNA; (-) strand; PAM type: YTN; PAM sequence: CTC
atatactttcaatcaggggt

SEQ ID NO: 48833 - DNA, 20 bp, Artificial Sequence
  Description of Artificial Sequence: Synthetic oligonucleotide
  Target: SCNA; (-) strand; PAM type: YTN; PAM sequence: CTC
tcatatactttcaatcaggg

SEQ ID NO: 48834 - DNA, 20 bp, Artificial Sequence
  Description of Artificial Sequence: Synthetic oligonucleotide
  Target: SCNA; (-) strand; PAM type: YTN; PAM sequence: CTA
tgcacatcctctcatatact

SEQ ID NO: 48835 - DNA, 20 bp, Artificial Sequence
  Description of Artificial Sequence: Synthetic oligonucleotide
  Target: SCNA; (-) strand; PAM type: YTN; PAM sequence: TTG
tatataacctatgcacatcc

SEQ ID NO: 48836 - DNA, 20 bp, Artificial Sequence
  Description of Artificial Sequence: Synthetic oligonucleotide
  Target: SCNA; (-) strand; PAM type: YTN; PAM sequence: TTT
gtatataacctatgcacatc

SEQ ID NO: 48837 - DNA, 20 bp, Artificial Sequence
  Description of Artificial Sequence: Synthetic oligonucleotide
  Target: SCNA; (-) strand; PAM type: YTN; PAM sequence: TTA
gtatttgtatataacctatg

SEQ ID NO: 48838 - DNA, 20 bp, Artificial Sequence
  Description of Artificial Sequence: Synthetic oligonucleotide
  Target: SCNA; (-) strand; PAM type: YTN; PAM sequence: CTT
agtatttgtatataacctat

SEQ ID NO: 48839 - DNA, 20 bp, Artificial Sequence
  Description of Artificial Sequence: Synthetic oligonucleotide
  Target: SCNA; (-) strand; PAM type: YTN; PAM sequence: TTA
taaaatggcttagtatttgt

SEQ ID NO: 48840 - DNA, 20 bp, Artificial Sequence
  Description of Artificial Sequence: Synthetic oligonucleotide
  Target: SCNA; (-) strand; PAM type: YTN; PAM sequence: CTG
ttataaaatggcttagtatt

SEQ ID NO: 48841 - DNA, 20 bp, Artificial Sequence
  Description of Artificial Sequence: Synthetic oligonucleotide
  Target: SCNA; (-) strand; PAM type: YTN; PAM sequence: CTA
agcccctgttataaaatggc

SEQ ID NO: 48842 - DNA, 20 bp, Artificial Sequence
  Description of Artificial Sequence: Synthetic oligonucleotide
  Target: SCNA; (-) strand; PAM type: YTN; PAM sequence: CTG
cagatgcctaagcccctgtt

SEQ ID NO: 48843 - DNA, 20 bp, Artificial Sequence
  Description of Artificial Sequence: Synthetic oligonucleotide
  Target: SCNA; (-) strand; PAM type: YTN; PAM sequence: CTA
aaatctgcagatgcctaagc

SEQ ID NO: 48844 - DNA, 20 bp, Artificial Sequence
  Description of Artificial Sequence: Synthetic oligonucleotide
  Target: SCNA; (-) strand; PAM type: YTN; PAM sequence: TTG
ggtactaaaatctgcagatg

SEQ ID NO: 48845 - DNA, 20 bp, Artificial Sequence
  Description of Artificial Sequence: Synthetic oligonucleotide
  Target: SCNA; (-) strand; PAM type: YTN; PAM sequence: CTT
gggtactaaaatctgcagat

SEQ ID NO: 48846 - DNA, 20 bp, Artificial Sequence
  Description of Artificial Sequence: Synthetic oligonucleotide
  Target: SCNA; (-) strand; PAM type: YTN; PAM sequence: CTC
ccttgggtactaaaatctgc

SEQ ID NO: 48847 - DNA, 20 bp, Artificial Sequence
  Description of Artificial Sequence: Synthetic oligonucleotide
  Target: SCNA; (-) strand; PAM type: YTN; PAM sequence: TTC
aggacctcccttgggtacta

SEQ ID NO: 48848 - DNA, 20 bp, Artificial Sequence
  Description of Artificial Sequence: Synthetic oligonucleotide
  Target: SCNA; (-) strand; PAM type: YTN; PAM sequence: TTT
caggacctcccttgggtact

SEQ ID NO: 48849 - DNA, 20 bp, Artificial Sequence
  Description of Artificial Sequence: Synthetic oligonucleotide
  Target: SCNA; (-) strand; PAM type: YTN; PAM sequence: TTG
gtttcaggacctcccttggg

SEQ ID NO: 48850 - DNA, 20 bp, Artificial Sequence
  Description of Artificial Sequence: Synthetic oligonucleotide
  Target: SCNA; (-) strand; PAM type: YTN; PAM sequence: TTC
agtagccataggggattggt

SEQ ID NO: 48851 - DNA, 20 bp, Artificial Sequence
  Description of Artificial Sequence: Synthetic oligonucleotide
  Target: SCNA; (-) strand; PAM type: YTN; PAM sequence: CTT
cagtagccataggggattgg

SEQ ID NO: 48852 - DNA, 20 bp, Artificial Sequence
  Description of Artificial Sequence: Synthetic oligonucleotide
  Target: SCNA; (-) strand; PAM type: YTN; PAM sequence: TTG
tccttcagtagccatagggg

SEQ ID NO: 48853 - DNA, 20 bp, Artificial Sequence
  Description of Artificial Sequence: Synthetic oligonucleotide
  Target: SCNA; (-) strand; PAM type: YTN; PAM sequence: TTA
agaatgatacacagttgtcc

SEQ ID NO: 48854 - DNA, 20 bp, Artificial Sequence
  Description of Artificial Sequence: Synthetic oligonucleotide
  Target: SCNA; (-) strand; PAM type: YTN; PAM sequence: CTG
ttaagaatgatacacagttg

SEQ ID NO: 48855 - DNA, 20 bp, Artificial Sequence
  Description of Artificial Sequence: Synthetic oligonucleotide
  Target: SCNA; (-) strand; PAM type: YTN; PAM sequence: TTC
tgttaagaatgatacacagt

SEQ ID NO: 48856 - DNA, 20 bp, Artificial Sequence
  Description of Artificial Sequence: Synthetic oligonucleotide
  Target: SCNA; (-) strand; PAM type: YTN; PAM sequence: TTT
ctgttaagaatgatacacag

SEQ ID NO: 48857 - DNA, 20 bp, Artificial Sequence
  Description of Artificial Sequence: Synthetic oligonucleotide
  Target: SCNA; (-) strand; PAM type: YTN; PAM sequence: TTT
tctgttaagaatgatacaca

SEQ ID NO: 48858 - DNA, 20 bp, Artificial Sequence
  Description of Artificial Sequence: Synthetic oligonucleotide
  Target: SCNA; (-) strand; PAM type: YTN; PAM sequence: TTT
ttctgttaagaatgatacac

SEQ ID NO: 48859 - DNA, 20 bp, Artificial Sequence
  Description of Artificial Sequence: Synthetic oligonucleotide
  Target: SCNA; (-) strand; PAM type: YTN; PAM sequence: TTT
tttctgttaagaatgataca

SEQ ID NO: 48860 - DNA, 20 bp, Artificial Sequence
  Description of Artificial Sequence: Synthetic oligonucleotide
  Target: SCNA; (-) strand; PAM type: YTN; PAM sequence: TTT
ttttctgttaagaatgatac

SEQ ID NO: 48861 - DNA, 20 bp, Artificial Sequence
  Description of Artificial Sequence: Synthetic oligonucleotide
  Target: SCNA; (-) strand; PAM type: YTN; PAM sequence: TTG
tttttttctgttaagaatga

SEQ ID NO: 48862 - DNA, 20 bp, Artificial Sequence
  Description of Artificial Sequence: Synthetic oligonucleotide
  Target: SCNA; (-) strand; PAM type: YTN; PAM sequence: TTT
gtttttttctgttaagaatg

SEQ ID NO: 48863 - DNA, 20 bp, Artificial Sequence
  Description of Artificial Sequence: Synthetic oligonucleotide
  Target: SCNA; (-) strand; PAM type: YTN; PAM sequence: TTT
tgtttttttctgttaagaat

SEQ ID NO: 48864 - DNA, 20 bp, Artificial Sequence
  Description of Artificial Sequence: Synthetic oligonucleotide
  Target: SCNA; (-) strand; PAM type: YTN; PAM sequence: TTA
caaaacagattttgtttttt

SEQ ID NO: 48865 - DNA, 20 bp, Artificial Sequence
  Description of Artificial Sequence: Synthetic oligonucleotide
  Target: SCNA; (-) strand; PAM type: YTN; PAM sequence: TTT
acaaaacagattttgttttt

SEQ ID NO: 48866 - DNA, 20 bp, Artificial Sequence
  Description of Artificial Sequence: Synthetic oligonucleotide
  Target: SCNA; (-) strand; PAM type: YTN; PAM sequence: TTA
tttacaaaacagattttgtt

SEQ ID NO: 48867 - DNA, 20 bp, Artificial Sequence
  Description of Artificial Sequence: Synthetic oligonucleotide
  Target: SCNA; (-) strand; PAM type: YTN; PAM sequence: TTT
atttacaaaacagattttgt

SEQ ID NO: 48868 - DNA, 20 bp, Artificial Sequence
  Description of Artificial Sequence: Synthetic oligonucleotide
  Target: SCNA; (-) strand; PAM type: YTN; PAM sequence: TTT
tatttacaaaacagattttg

SEQ ID NO: 48869 - DNA, 20 bp, Artificial Sequence
  Description of Artificial Sequence: Synthetic oligonucleotide
  Target: SCNA; (-) strand; PAM type: YTN; PAM sequence: TTC
cagagtgaaatggaaataat

SEQ ID NO: 48870 - DNA, 20 bp, Artificial Sequence
  Description of Artificial Sequence: Synthetic oligonucleotide
  Target: SCNA; (-) strand; PAM type: YTN; PAM sequence: CTA
aattccagagtgaaatggaa

SEQ ID NO: 48871 - DNA, 20 bp, Artificial Sequence
  Description of Artificial Sequence: Synthetic oligonucleotide
  Target: SCNA; (-) strand; PAM type: YTN; PAM sequence: CTA
actaaattccagagtgaaat

SEQ ID NO: 48872 - DNA, 20 bp, Artificial Sequence
  Description of Artificial Sequence: Synthetic oligonucleotide
  Target: SCNA; (-) strand; PAM type: YTN; PAM sequence: TTC
taactaaattccagagtgaa

SEQ ID NO: 48873 - DNA, 20 bp, Artificial Sequence
  Description of Artificial Sequence: Synthetic oligonucleotide
  Target: SCNA; (-) strand; PAM type: YTN; PAM sequence: TTT
ctaactaaattccagagtga

SEQ ID NO: 48874 - DNA, 20 bp, Artificial Sequence
  Description of Artificial Sequence: Synthetic oligonucleotide
  Target: SCNA; (-) strand; PAM type: YTN; PAM sequence: TTA
atttctaactaaattccaga

SEQ ID NO: 48875 - DNA, 20 bp, Artificial Sequence
  Description of Artificial Sequence: Synthetic oligonucleotide
  Target: SCNA; (-) strand; PAM type: YTN; PAM sequence: CTT
aatttctaactaaattccag

SEQ ID NO: 48876 - DNA, 20 bp, Artificial Sequence
  Description of Artificial Sequence: Synthetic oligonucleotide
  Target: SCNA; (-) strand; PAM type: YTN; PAM sequence: TTA
atcttaatttctaactaaat

SEQ ID NO: 48877 - DNA, 20 bp, Artificial Sequence
  Description of Artificial Sequence: Synthetic oligonucleotide
  Target: SCNA; (-) strand; PAM type: YTN; PAM sequence: TTG
ttaatcttaatttctaacta

SEQ ID NO: 48878 - DNA, 20 bp, Artificial Sequence
  Description of Artificial Sequence: Synthetic oligonucleotide
  Target: SCNA; (-) strand; PAM type: YTN; PAM sequence: TTT
gttaatcttaatttctaact

SEQ ID NO: 48879 - DNA, 20 bp, Artificial Sequence
  Description of Artificial Sequence: Synthetic oligonucleotide
  Target: SCNA; (-) strand; PAM type: YTN; PAM sequence: TTT
tgttaatcttaatttctaac

SEQ ID NO: 48880 - DNA, 20 bp, Artificial Sequence
  Description of Artificial Sequence: Synthetic oligonucleotide
  Target: SCNA; (-) strand; PAM type: YTN; PAM sequence: TTA
atattttgttaatcttaatt

SEQ ID NO: 48881 - DNA, 20 bp, Artificial Sequence
  Description of Artificial Sequence: Synthetic oligonucleotide
  Target: SCNA; (-) strand; PAM type: YTN; PAM sequence: TTA
gtagtcaattaatattttgt

SEQ ID NO: 48882 - DNA, 20 bp, Artificial Sequence
  Description of Artificial Sequence: Synthetic oligonucleotide
  Target: SCNA; (-) strand; PAM type: YTN; PAM sequence: TTT
agtagtcaattaatattttg

SEQ ID NO: 48883 - DNA, 20 bp, Artificial Sequence
  Description of Artificial Sequence: Synthetic oligonucleotide
  Target: SCNA; (-) strand; PAM type: YTN; PAM sequence: TTT
tagtagtcaattaatatttt

SEQ ID NO: 48884 - DNA, 20 bp, Artificial Sequence
  Description of Artificial Sequence: Synthetic oligonucleotide
  Target: SCNA; (-) strand; PAM type: YTN; PAM sequence: CTG
gtacattttagtagtcaatt

SEQ ID NO: 48885 - DNA, 20 bp, Artificial Sequence
  Description of Artificial Sequence: Synthetic oligonucleotide
  Target: SCNA; (-) strand; PAM type: YTN; PAM sequence: CTA
gtgctggtacattttagtag

SEQ ID NO: 48886 - DNA, 20 bp, Artificial Sequence
  Description of Artificial Sequence: Synthetic oligonucleotide
  Target: SCNA; (-) strand; PAM type: YTN; PAM sequence: CTG
ctagtgctggtacattttag

SEQ ID NO: 48887 - DNA, 20 bp, Artificial Sequence
  Description of Artificial Sequence: Synthetic oligonucleotide
  Target: SCNA; (-) strand; PAM type: YTN; PAM sequence: TTG
gtatgtgctgctagtgctgg

SEQ ID NO: 48888 - DNA, 20 bp, Artificial Sequence
  Description of Artificial Sequence: Synthetic oligonucleotide
  Target: SCNA; (-) strand; PAM type: YTN; PAM sequence: TTT
ggtatgtgctgctagtgctg

SEQ ID NO: 48889 - DNA, 20 bp, Artificial Sequence
  Description of Artificial Sequence: Synthetic oligonucleotide
  Target: SCNA; (-) strand; PAM type: YTN; PAM sequence: TTT
tggtatgtgctgctagtgct

SEQ ID NO: 48890 - DNA, 20 bp, Artificial Sequence
  Description of Artificial Sequence: Synthetic oligonucleotide
  Target: SCNA; (-) strand; PAM type: YTN; PAM sequence: TTT
ttggtatgtgctgctagtgc

SEQ ID NO: 48891 - DNA, 20 bp, Artificial Sequence
  Description of Artificial Sequence: Synthetic oligonucleotide
  Target: SCNA; (-) strand; PAM type: YTN; PAM sequence: TTA
gtttttggtatgtgctgcta

SEQ ID NO: 48892 - DNA, 20 bp, Artificial Sequence
  Description of Artificial Sequence: Synthetic oligonucleotide
  Target: SCNA; (-) strand; PAM type: YTN; PAM sequence: TTG
tattagtttttggtatgtgc

SEQ ID NO: 48893 - DNA, 20 bp, Artificial Sequence
  Description of Artificial Sequence: Synthetic oligonucleotide
  Target: SCNA; (-) strand; PAM type: YTN; PAM sequence: TTT
gtattagtttttggtatgtg

SEQ ID NO: 48894 - DNA, 20 bp, Artificial Sequence
  Description of Artificial Sequence: Synthetic oligonucleotide
  Target: SCNA; (-) strand; PAM type: YTN; PAM sequence: TTG
gaatatttgtattagttttt

SEQ ID NO: 48895 - DNA, 20 bp, Artificial Sequence
  Description of Artificial Sequence: Synthetic oligonucleotide
  Target: SCNA; (-) strand; PAM type: YTN; PAM sequence: TTA
ttggaatatttgtattagtt

SEQ ID NO: 48896 - DNA, 20 bp, Artificial Sequence
  Description of Artificial Sequence: Synthetic oligonucleotide
  Target: SCNA; (-) strand; PAM type: YTN; PAM sequence: TTA
atattattggaatatttgta

SEQ ID NO: 48897 - DNA, 20 bp, Artificial Sequence
  Description of Artificial Sequence: Synthetic oligonucleotide
  Target: SCNA; (-) strand; PAM type: YTN; PAM sequence: TTT
aatattattggaatatttgt

SEQ ID NO: 48898 - DNA, 20 bp, Artificial Sequence
  Description of Artificial Sequence: Synthetic oligonucleotide
  Target: SCNA; (-) strand; PAM type: YTN; PAM sequence: TTA
tttaatattattggaatatt

SEQ ID NO: 48899 - DNA, 20 bp, Artificial Sequence
  Description of Artificial Sequence: Synthetic oligonucleotide
  Target: SCNA; (-) strand; PAM type: YTN; PAM sequence: CTC
agatgaaatacaaatgcagt

SEQ ID NO: 48900 - DNA, 20 bp, Artificial Sequence
  Description of Artificial Sequence: Synthetic oligonucleotide
  Target: SCNA; (-) strand; PAM type: YTN; PAM sequence: CTC
tcagatgaaatacaaatgca

SEQ ID NO: 48901 - DNA, 20 bp, Artificial Sequence
  Description of Artificial Sequence: Synthetic oligonucleotide
  Target: SCNA; (-) strand; PAM type: YTN; PAM sequence: TTA
tggggaagaaccataaacca

SEQ ID NO: 48902 - DNA, 20 bp, Artificial Sequence
  Description of Artificial Sequence: Synthetic oligonucleotide
  Target: SCNA; (-) strand; PAM type: YTN; PAM sequence: CTT
atggggaagaaccataaacc

SEQ ID NO: 48903 - DNA, 20 bp, Artificial Sequence
  Description of Artificial Sequence: Synthetic oligonucleotide
  Target: SCNA; (-) strand; PAM type: YTN; PAM sequence: TTA
agaaaaagtggccatcaata

SEQ ID NO: 48904 - DNA, 20 bp, Artificial Sequence
  Description of Artificial Sequence: Synthetic oligonucleotide
  Target: SCNA; (-) strand; PAM type: YTN; PAM sequence: TTG
tgagaaagaccaggagttaa

SEQ ID NO: 48905 - DNA, 20 bp, Artificial Sequence
  Description of Artificial Sequence: Synthetic oligonucleotide
  Target: SCNA; (-) strand; PAM type: YTN; PAM sequence: CTG
tgattgtgagaaagaccagg

SEQ ID NO: 48906 - DNA, 20 bp, Artificial Sequence
  Description of Artificial Sequence: Synthetic oligonucleotide
  Target: SCNA; (-) strand; PAM type: YTN; PAM sequence: TTC
tgtgattgtgagaaagacca

SEQ ID NO: 48907 - DNA, 20 bp, Artificial Sequence
  Description of Artificial Sequence: Synthetic oligonucleotide
  Target: SCNA; (-) strand; PAM type: YTN; PAM sequence: TTT
ctgtgattgtgagaaagacc

SEQ ID NO: 48908 - DNA, 20 bp, Artificial Sequence
  Description of Artificial Sequence: Synthetic oligonucleotide
  Target: SCNA; (-) strand; PAM type: YTN; PAM sequence: TTT
tctgtgattgtgagaaagac

SEQ ID NO: 48909 - DNA, 20 bp, Artificial Sequence
  Description of Artificial Sequence: Synthetic oligonucleotide
  Target: SCNA; (-) strand; PAM type: YTN; PAM sequence: CTG
ttttctgtgattgtgagaaa

SEQ ID NO: 48910 - DNA, 20 bp, Artificial Sequence
  Description of Artificial Sequence: Synthetic oligonucleotide
  Target: SCNA; (-) strand; PAM type: YTN; PAM sequence: TTG
tgtgataagggactgttttc

SEQ ID NO: 48911 - DNA, 20 bp, Artificial Sequence
  Description of Artificial Sequence: Synthetic oligonucleotide
  Target: SCNA; (-) strand; PAM type: YTN; PAM sequence: TTT
gtgtgataagggactgtttt

SEQ ID NO: 48912 - DNA, 20 bp, Artificial Sequence
  Description of Artificial Sequence: Synthetic oligonucleotide
  Target: SCNA; (-) strand; PAM type: YTN; PAM sequence: TTA
tttgtgtgataagggactgt

SEQ ID NO: 48913 - DNA, 20 bp, Artificial Sequence
  Description of Artificial Sequence: Synthetic oligonucleotide
  Target: SCNA; (-) strand; PAM type: YTN; PAM sequence: TTT
atttgtgtgataagggactg

SEQ ID NO: 48914 - DNA, 20 bp, Artificial Sequence
  Description of Artificial Sequence: Synthetic oligonucleotide
  Target: SCNA; (-) strand; PAM type: YTN; PAM sequence: TTT
tatttgtgtgataagggact

SEQ ID NO: 48915 - DNA, 20 bp, Artificial Sequence
  Description of Artificial Sequence: Synthetic oligonucleotide
  Target: SCNA; (-) strand; PAM type: YTN; PAM sequence: TTT
ttatttgtgtgataagggac

SEQ ID NO: 48916 - DNA, 20 bp, Artificial Sequence
  Description of Artificial Sequence: Synthetic oligonucleotide
  Target: SCNA; (-) strand; PAM type: YTN; PAM sequence: TTT
tttatttgtgtgataaggga

SEQ ID NO: 48917 - DNA, 20 bp, Artificial Sequence
  Description of Artificial Sequence: Synthetic oligonucleotide
  Target: SCNA; (-) strand; PAM type: YTN; PAM sequence: CTT
ttttatttgtgtgataaggg

SEQ ID NO: 48918 - DNA, 20 bp, Artificial Sequence
  Description of Artificial Sequence: Synthetic oligonucleotide
  Target: SCNA; (-) strand; PAM type: YTN; PAM sequence: TTA
agataaaaggtacagaggaa

SEQ ID NO: 48919 - DNA, 20 bp, Artificial Sequence
  Description of Artificial Sequence: Synthetic oligonucleotide
  Target: SCNA; (-) strand; PAM type: YTN; PAM sequence: CTG
ttaagataaaaggtacagag

SEQ ID NO: 48920 - DNA, 20 bp, Artificial Sequence
  Description of Artificial Sequence: Synthetic oligonucleotide
  Target: SCNA; (-) strand; PAM type: YTN; PAM sequence: TTC
aaaacacaagtctgttaaga

SEQ ID NO: 48921 - DNA, 20 bp, Artificial Sequence
  Description of Artificial Sequence: Synthetic oligonucleotide
  Target: SCNA; (-) strand; PAM type: YTN; PAM sequence: TTT
caaaacacaagtctgttaag

SEQ ID NO: 48922 - DNA, 20 bp, Artificial Sequence
  Description of Artificial Sequence: Synthetic oligonucleotide
  Target: SCNA; (-) strand; PAM type: YTN; PAM sequence: TTA
aaaaatagtataaataatat

SEQ ID NO: 48923 - DNA, 20 bp, Artificial Sequence
  Description of Artificial Sequence: Synthetic oligonucleotide
  Target: SCNA; (-) strand; PAM type: YTN; PAM sequence: CTC
aaaaaattaaaaaatagtat

SEQ ID NO: 48924 - DNA, 20 bp, Artificial Sequence
  Description of Artificial Sequence: Synthetic oligonucleotide
  Target: SCNA; (-) strand; PAM type: YTN; PAM sequence: CTG
ggtgacagagaaagacccgg

SEQ ID NO: 48925 - DNA, 20 bp, Artificial Sequence
  Description of Artificial Sequence: Synthetic oligonucleotide
  Target: SCNA; (-) strand; PAM type: YTN; PAM sequence: CTC
cagactgggtgacagagaaa

SEQ ID NO: 48926 - DNA, 20 bp, Artificial Sequence
  Description of Artificial Sequence: Synthetic oligonucleotide
  Target: SCNA; (-) strand; PAM type: YTN; PAM sequence: CTG
cactccagactgggtgacag

SEQ ID NO: 48927 - DNA, 20 bp, Artificial Sequence
  Description of Artificial Sequence: Synthetic oligonucleotide
  Target: SCNA; (-) strand; PAM type: YTN; PAM sequence: CTG
cagtgagccaagatcgcgca

SEQ ID NO: 48928 - DNA, 20 bp, Artificial Sequence
  Description of Artificial Sequence: Synthetic oligonucleotide
  Target: SCNA; (-) strand; PAM type: YTN; PAM sequence: CTG
gggctgcagtgagccaagat

SEQ ID NO: 48929 - DNA, 20 bp, Artificial Sequence
  Description of Artificial Sequence: Synthetic oligonucleotide
  Target: SCNA; (-) strand; PAM type: YTN; PAM sequence: TTG
aacccggaagctggggctgc

SEQ ID NO: 48930 - DNA, 20 bp, Artificial Sequence
  Description of Artificial Sequence: Synthetic oligonucleotide
  Target: SCNA; (-) strand; PAM type: YTN; PAM sequence: CTT
gaacccggaagctggggctg

SEQ ID NO: 48931 - DNA, 20 bp, Artificial Sequence
  Description of Artificial Sequence: Synthetic oligonucleotide
  Target: SCNA; (-) strand; PAM type: YTN; PAM sequence: TTG
cttgaacccggaagctgggg

SEQ ID NO: 48932 - DNA, 20 bp, Artificial Sequence
  Description of Artificial Sequence: Synthetic oligonucleotide
  Target: SCNA; (-) strand; PAM type: YTN; PAM sequence: CTG
aagcaggagaattgcttgaa

SEQ ID NO: 48933 - DNA, 20 bp, Artificial Sequence
  Description of Artificial Sequence: Synthetic oligonucleotide
  Target: SCNA; (-) strand; PAM type: YTN; PAM sequence: CTC
aagaaactgaagcaggagaa

SEQ ID NO: 48934 - DNA, 20 bp, Artificial Sequence
  Description of Artificial Sequence: Synthetic oligonucleotide
  Target: SCNA; (-) strand; PAM type: YTN; PAM sequence: CTA
ctcaagaaactgaagcagga

SEQ ID NO: 48935 - DNA, 20 bp, Artificial Sequence
  Description of Artificial Sequence: Synthetic oligonucleotide
  Target: SCNA; (-) strand; PAM type: YTN; PAM sequence: CTG
gtaatcccagctactcaaga

SEQ ID NO: 48936 - DNA, 20 bp, Artificial Sequence
  Description of Artificial Sequence: Synthetic oligonucleotide
  Target: SCNA; (-) strand; PAM type: YTN; PAM sequence: CTG
ggtgtggtgatgggcgctgg

SEQ ID NO: 48937 - DNA, 20 bp, Artificial Sequence
  Description of Artificial Sequence: Synthetic oligonucleotide
  Target: SCNA; (-) strand; PAM type: YTN; PAM sequence: TTA
gctgggtgtggtgatgggcg

SEQ ID NO: 48938 - DNA, 20 bp, Artificial Sequence
  Description of Artificial Sequence: Synthetic oligonucleotide
  Target: SCNA; (-) strand; PAM type: YTN; PAM sequence: CTA
aaaatacagaaattagctgg

SEQ ID NO: 48939 - DNA, 20 bp, Artificial Sequence
  Description of Artificial Sequence: Synthetic oligonucleotide
  Target: SCNA; (-) strand; PAM type: YTN; PAM sequence: CTA
ctaaaaatacagaaattagc

SEQ ID NO: 48940 - DNA, 20 bp, Artificial Sequence
  Description of Artificial Sequence: Synthetic oligonucleotide
  Target: SCNA; (-) strand; PAM type: YTN; PAM sequence: CTC
tactaaaaatacagaaatta

SEQ ID NO: 48941 - DNA, 20 bp, Artificial Sequence
  Description of Artificial Sequence: Synthetic oligonucleotide
  Target: SCNA; (-) strand; PAM type: YTN; PAM sequence: CTA
gccaacatggtgaaacccat

SEQ ID NO: 48942 - DNA, 20 bp, Artificial Sequence
  Description of Artificial Sequence: Synthetic oligonucleotide
  Target: SCNA; (-) strand; PAM type: YTN; PAM sequence: TTG
aggacaggggatagagacaa

SEQ ID NO: 48943 - DNA, 20 bp, Artificial Sequence
  Description of Artificial Sequence: Synthetic oligonucleotide
  Target: SCNA; (-) strand; PAM type: YTN; PAM sequence: CTT
gaggacaggggatagagaca

SEQ ID NO: 48944 - DNA, 20 bp, Artificial Sequence
  Description of Artificial Sequence: Synthetic oligonucleotide
  Target: SCNA; (-) strand; PAM type: YTN; PAM sequence: TTG
cagggatcacttgaggacag

SEQ ID NO: 48945 - DNA, 20 bp, Artificial Sequence
  Description of Artificial Sequence: Synthetic oligonucleotide
  Target: SCNA; (-) strand; PAM type: YTN; PAM sequence: TTG
gaggtcaagttgcagggatc

SEQ ID NO: 48946 - DNA, 20 bp, Artificial Sequence
  Description of Artificial Sequence: Synthetic oligonucleotide
  Target: SCNA; (-) strand; PAM type: YTN; PAM sequence: TTT
ggaggtcaagttgcagggat

SEQ ID NO: 48947 - DNA, 20 bp, Artificial Sequence
  Description of Artificial Sequence: Synthetic oligonucleotide
  Target: SCNA; (-) strand; PAM type: YTN; PAM sequence: TTT
tggaggtcaagttgcaggga

SEQ ID NO: 48948 - DNA, 20 bp, Artificial Sequence
  Description of Artificial Sequence: Synthetic oligonucleotide
  Target: SCNA; (-) strand; PAM type: YTN; PAM sequence: CTT
ttggaggtcaagttgcaggg

SEQ ID NO: 48949 - DNA, 20 bp, Artificial Sequence
  Description of Artificial Sequence: Synthetic oligonucleotide
  Target: SCNA; (-) strand; PAM type: YTN; PAM sequence: CTA
taatcccagcacttttggag

SEQ ID NO: 48950 - DNA, 20 bp, Artificial Sequence
  Description of Artificial Sequence: Synthetic oligonucleotide
  Target: SCNA; (-) strand; PAM type: YTN; PAM sequence: CTC
atgcctataatcccagcact

SEQ ID NO: 48951 - DNA, 20 bp, Artificial Sequence
  Description of Artificial Sequence: Synthetic oligonucleotide
  Target: SCNA; (-) strand; PAM type: YTN; PAM sequence: TTA
atataatataaataaggcca

SEQ ID NO: 48952 - DNA, 20 bp, Artificial Sequence
  Description of Artificial Sequence: Synthetic oligonucleotide
  Target: SCNA; (-) strand; PAM type: YTN; PAM sequence: TTA
gagttaatataatataaata

SEQ ID NO: 48953 - DNA, 20 bp, Artificial Sequence
  Description of Artificial Sequence: Synthetic oligonucleotide
  Target: SCNA; (-) strand; PAM type: YTN; PAM sequence: TTA
ttagagttaatataatataa

SEQ ID NO: 48954 - DNA, 20 bp, Artificial Sequence
  Description of Artificial Sequence: Synthetic oligonucleotide
  Target: SCNA; (-) strand; PAM type: YTN; PAM sequence: TTA
caacagaaagtggcatagtg

SEQ ID NO: 48955 - DNA, 20 bp, Artificial Sequence
  Description of Artificial Sequence: Synthetic oligonucleotide
  Target: SCNA; (-) strand; PAM type: YTN; PAM sequence: CTA
aagaattacaacagaaagtg

SEQ ID NO: 48956 - DNA, 20 bp, Artificial Sequence
  Description of Artificial Sequence: Synthetic oligonucleotide
  Target: SCNA; (-) strand; PAM type: YTN; PAM sequence: TTA
aaaacatacaaagaagaagt

SEQ ID NO: 48957 - DNA, 20 bp, Artificial Sequence
  Description of Artificial Sequence: Synthetic oligonucleotide
  Target: SCNA; (-) strand; PAM type: YTN; PAM sequence: CTA
attaaaaacatacaaagaag

SEQ ID NO: 48958 - DNA, 20 bp, Artificial Sequence
  Description of Artificial Sequence: Synthetic oligonucleotide
  Target: SCNA; (-) strand; PAM type: YTN; PAM sequence: CTA
catgctaattaaaaacatac

SEQ ID NO: 48959 - DNA, 20 bp, Artificial Sequence
  Description of Artificial Sequence: Synthetic oligonucleotide
  Target: SCNA; (-) strand; PAM type: YTN; PAM sequence: CTA
tataactacatgctaattaa

SEQ ID NO: 48960 - DNA, 20 bp, Artificial Sequence
  Description of Artificial Sequence: Synthetic oligonucleotide
  Target: SCNA; (-) strand; PAM type: YTN; PAM sequence: CTA
aacgtaaatatataactata

SEQ ID NO: 48961 - DNA, 20 bp, Artificial Sequence
  Description of Artificial Sequence: Synthetic oligonucleotide
  Target: SCNA; (-) strand; PAM type: YTN; PAM sequence: TTG
gaggtatatctaaacgtaaa

SEQ ID NO: 48962 - DNA, 20 bp, Artificial Sequence
  Description of Artificial Sequence: Synthetic oligonucleotide
  Target: SCNA; (-) strand; PAM type: YTN; PAM sequence: CTT
ggaggtatatctaaacgtaa

SEQ ID NO: 48963 - DNA, 20 bp, Artificial Sequence
  Description of Artificial Sequence: Synthetic oligonucleotide
  Target: SCNA; (-) strand; PAM type: YTN; PAM sequence: CTA
cttggaggtatatctaaacg

SEQ ID NO: 48964 - DNA, 20 bp, Artificial Sequence
  Description of Artificial Sequence: Synthetic oligonucleotide
  Target: SCNA; (-) strand; PAM type: YTN; PAM sequence: TTG
gctacttggaggtatatcta

SEQ ID NO: 48965 - DNA, 20 bp, Artificial Sequence
  Description of Artificial Sequence: Synthetic oligonucleotide
  Target: SCNA; (-) strand; PAM type: YTN; PAM sequence: TTC
atgtagaatattggctactt

SEQ ID NO: 48966 - DNA, 20 bp, Artificial Sequence
  Description of Artificial Sequence: Synthetic oligonucleotide
  Target: SCNA; (-) strand; PAM type: YTN; PAM sequence: CTT
catgtagaatattggctact

SEQ ID NO: 48967 - DNA, 20 bp, Artificial Sequence
  Description of Artificial Sequence: Synthetic oligonucleotide
  Target: SCNA; (-) strand; PAM type: YTN; PAM sequence: TTA
tcacttcatgtagaatattg

SEQ ID NO: 48968 - DNA, 20 bp, Artificial Sequence
  Description of Artificial Sequence: Synthetic oligonucleotide
  Target: SCNA; (-) strand; PAM type: YTN; PAM sequence: TTT
atcacttcatgtagaatatt

SEQ ID NO: 48969 - DNA, 20 bp, Artificial Sequence
  Description of Artificial Sequence: Synthetic oligonucleotide
  Target: SCNA; (-) strand; PAM type: YTN; PAM sequence: CTT
tatcacttcatgtagaatat

SEQ ID NO: 48970 - DNA, 20 bp, Artificial Sequence
  Description of Artificial Sequence: Synthetic oligonucleotide
  Target: SCNA; (-) strand; PAM type: YTN; PAM sequence: TTC
agggataaataaatccttta

SEQ ID NO: 48971 - DNA, 20 bp, Artificial Sequence
  Description of Artificial Sequence: Synthetic oligonucleotide
  Target: SCNA; (-) strand; PAM type: YTN; PAM sequence: TTT
cagggataaataaatccttt

SEQ ID NO: 48972 - DNA, 20 bp, Artificial Sequence
  Description of Artificial Sequence: Synthetic oligonucleotide
  Target: SCNA; (-) strand; PAM type: YTN; PAM sequence: TTC
ataatttcagggataaataa

SEQ ID NO: 48973 - DNA, 20 bp, Artificial Sequence
  Description of Artificial Sequence: Synthetic oligonucleotide
  Target: SCNA; (-) strand; PAM type: YTN; PAM sequence: TTT
cataatttcagggataaata

SEQ ID NO: 48974 - DNA, 20 bp, Artificial Sequence
  Description of Artificial Sequence: Synthetic oligonucleotide
  Target: SCNA; (-) strand; PAM type: YTN; PAM sequence: TTT
tcataatttcagggataaat

SEQ ID NO: 48975 - DNA, 20 bp, Artificial Sequence
  Description of Artificial Sequence: Synthetic oligonucleotide
  Target: SCNA; (-) strand; PAM type: YTN; PAM sequence: CTT
ttcataatttcagggataaa

SEQ ID NO: 48976 - DNA, 20 bp, Artificial Sequence
  Description of Artificial Sequence: Synthetic oligonucleotide
  Target: SCNA; (-) strand; PAM type: YTN; PAM sequence: CTG
tagcacaatgcaagaaagaa

SEQ ID NO: 48977 - DNA, 20 bp, Artificial Sequence
  Description of Artificial Sequence: Synthetic oligonucleotide
  Target: SCNA; (-) strand; PAM type: YTN; PAM sequence: TTC
gtgtgtccgtgtatgtgtgt

SEQ ID NO: 48978 - DNA, 20 bp, Artificial Sequence
  Description of Artificial Sequence: Synthetic oligonucleotide
  Target: SCNA; (-) strand; PAM type: YTN; PAM sequence: TTA
gcagaacccagtgtgcatgt

SEQ ID NO: 48979 - DNA, 20 bp, Artificial Sequence
  Description of Artificial Sequence: Synthetic oligonucleotide
  Target: SCNA; (-) strand; PAM type: YTN; PAM sequence: CTA
aggaaatgataattagcaga

SEQ ID NO: 48980 - DNA, 20 bp, Artificial Sequence
  Description of Artificial Sequence: Synthetic oligonucleotide
  Target: SCNA; (-) strand; PAM type: YTN; PAM sequence: TTG
gggaatgatatggaactaag

SEQ ID NO: 48981 - DNA, 20 bp, Artificial Sequence
  Description of Artificial Sequence: Synthetic oligonucleotide
  Target: SCNA; (-) strand; PAM type: YTN; PAM sequence: TTA
ggggttggggaatgatatgg

SEQ ID NO: 48982 - DNA, 20 bp, Artificial Sequence
  Description of Artificial Sequence: Synthetic oligonucleotide
  Target: SCNA; (-) strand; PAM type: YTN; PAM sequence: CTT
aggggttggggaatgatatg

SEQ ID NO: 48983 - DNA, 20 bp, Artificial Sequence
  Description of Artificial Sequence: Synthetic oligonucleotide
  Target: SCNA; (-) strand; PAM type: YTN; PAM sequence: CTG
gtatggacacaggtggctta

SEQ ID NO: 48984 - DNA, 20 bp, Artificial Sequence
  Description of Artificial Sequence: Synthetic oligonucleotide
  Target: SCNA; (-) strand; PAM type: YTN; PAM sequence: CTG
gtaggcagtgggaagactgg

SEQ ID NO: 48985 - DNA, 20 bp, Artificial Sequence
  Description of Artificial Sequence: Synthetic oligonucleotide
  Target: SCNA; (-) strand; PAM type: YTN; PAM sequence: CTG
acatggggctggtaggcagt

SEQ ID NO: 48986 - DNA, 20 bp, Artificial Sequence
  Description of Artificial Sequence: Synthetic oligonucleotide
  Target: SCNA; (-) strand; PAM type: YTN; PAM sequence: CTG
atggaggtcatctgacatgg

SEQ ID NO: 48987 - DNA, 20 bp, Artificial Sequence
  Description of Artificial Sequence: Synthetic oligonucleotide
  Target: SCNA; (-) strand; PAM type: YTN; PAM sequence: CTA
ctgatggaggtcatctgaca

SEQ ID NO: 48988 - DNA, 20 bp, Artificial Sequence
  Description of Artificial Sequence: Synthetic oligonucleotide
  Target: SCNA; (-) strand; PAM type: YTN; PAM sequence: CTA
tgtgtcagaaaggcgagaca

SEQ ID NO: 48989 - DNA, 20 bp, Artificial Sequence
  Description of Artificial Sequence: Synthetic oligonucleotide
  Target: SCNA; (-) strand; PAM type: YTN; PAM sequence: TTA
ctatgtgtcagaaaggcgag

SEQ ID NO: 48990 - DNA, 20 bp, Artificial Sequence
  Description of Artificial Sequence: Synthetic oligonucleotide
  Target: SCNA; (-) strand; PAM type: YTN; PAM sequence: TTG
ttactatgtgtcagaaaggc

SEQ ID NO: 48991 - DNA, 20 bp, Artificial Sequence
  Description of Artificial Sequence: Synthetic oligonucleotide
  Target: SCNA; (-) strand; PAM type: YTN; PAM sequence: CTT
gttactatgtgtcagaaagg

SEQ ID NO: 48992 - DNA, 20 bp, Artificial Sequence
  Description of Artificial Sequence: Synthetic oligonucleotide
  Target: SCNA; (-) strand; PAM type: YTN; PAM sequence: CTC
acttgttactatgtgtcaga

SEQ ID NO: 48993 - DNA, 20 bp, Artificial Sequence
  Description of Artificial Sequence: Synthetic oligonucleotide
  Target: SCNA; (-) strand; PAM type: YTN; PAM sequence: TTA
acacctcacttgttactatg

SEQ ID NO: 48994 - DNA, 20 bp, Artificial Sequence
  Description of Artificial Sequence: Synthetic oligonucleotide
  Target: SCNA; (-) strand; PAM type: YTN; PAM sequence: CTT
aacacctcacttgttactat

SEQ ID NO: 48995 - DNA, 20 bp, Artificial Sequence
  Description of Artificial Sequence: Synthetic oligonucleotide
  Target: SCNA; (-) strand; PAM type: YTN; PAM sequence: TTA
gtcttaacacctcacttgtt

SEQ ID NO: 48996 - DNA, 20 bp, Artificial Sequence
  Description of Artificial Sequence: Synthetic oligonucleotide
  Target: SCNA; (-) strand; PAM type: YTN; PAM sequence: TTG
ttagtcttaacacctcactt

SEQ ID NO: 48997 - DNA, 20 bp, Artificial Sequence
  Description of Artificial Sequence: Synthetic oligonucleotide
  Target: SCNA; (-) strand; PAM type: YTN; PAM sequence: CTT
gttagtcttaacacctcact

SEQ ID NO: 48998 - DNA, 20 bp, Artificial Sequence
  Description of Artificial Sequence: Synthetic oligonucleotide
  Target: SCNA; (-) strand; PAM type: YTN; PAM sequence: CTC
ttgttagtcttaacacctca

SEQ ID NO: 48999 - DNA, 20 bp, Artificial Sequence
  Description of Artificial Sequence: Synthetic oligonucleotide
  Target: SCNA; (-) strand; PAM type: YTN; PAM sequence: TTC
tcttgttagtcttaacacct

SEQ ID NO: 49000 - DNA, 20 bp, Artificial Sequence
  Description of Artificial Sequence: Synthetic oligonucleotide
  Target: SCNA; (-) strand; PAM type: YTN; PAM sequence: TTT
ctcttgttagtcttaacacc

SEQ ID NO: 49001 - DNA, 20 bp, Artificial Sequence
  Description of Artificial Sequence: Synthetic oligonucleotide
  Target: SCNA; (-) strand; PAM type: YTN; PAM sequence: CTT
tctcttgttagtcttaacac

SEQ ID NO: 49002 - DNA, 20 bp, Artificial Sequence
  Description of Artificial Sequence: Synthetic oligonucleotide
  Target: SCNA; (-) strand; PAM type: YTN; PAM sequence: TTC
tttctcttgttagtcttaac

SEQ ID NO: 49003 - DNA, 20 bp, Artificial Sequence
  Description of Artificial Sequence: Synthetic oligonucleotide
  Target: SCNA; (-) strand; PAM type: YTN; PAM sequence: CTT
ctttctcttgttagtcttaa

SEQ ID NO: 49004 - DNA, 20 bp, Artificial Sequence
  Description of Artificial Sequence: Synthetic oligonucleotide
  Target: SCNA; (-) strand; PAM type: YTN; PAM sequence: CTA
gccagataagaataatgcct

SEQ ID NO: 49005 - DNA, 20 bp, Artificial Sequence
  Description of Artificial Sequence: Synthetic oligonucleotide
  Target: SCNA; (-) strand; PAM type: YTN; PAM sequence: TTC
tagccagataagaataatgc

SEQ ID NO: 49006 - DNA, 20 bp, Artificial Sequence
  Description of Artificial Sequence: Synthetic oligonucleotide
  Target: SCNA; (-) strand; PAM type: YTN; PAM sequence: TTT
ctagccagataagaataatg

SEQ ID NO: 49007 - DNA, 20 bp, Artificial Sequence
  Description of Artificial Sequence: Synthetic oligonucleotide
  Target: SCNA; (-) strand; PAM type: YTN; PAM sequence: CTT
tctagccagataagaataat

SEQ ID NO: 49008 - DNA, 20 bp, Artificial Sequence
  Description of Artificial Sequence: Synthetic oligonucleotide
  Target: SCNA; (-) strand; PAM type: YTN; PAM sequence: TTC
tttctagccagataagaata

SEQ ID NO: 49009 - DNA, 20 bp, Artificial Sequence
  Description of Artificial Sequence: Synthetic oligonucleotide
  Target: SCNA; (-) strand; PAM type: YTN; PAM sequence: TTT
ctttctagccagataagaat

SEQ ID NO: 49010 - DNA, 20 bp, Artificial Sequence
  Description of Artificial Sequence: Synthetic oligonucleotide
  Target: SCNA; (-) strand; PAM type: YTN; PAM sequence: TTT
tctttctagccagataagaa

SEQ ID NO: 49011 - DNA, 20 bp, Artificial Sequence
  Description of Artificial Sequence: Synthetic oligonucleotide
  Target: SCNA; (-) strand; PAM type: YTN; PAM sequence: TTG
ttttctttctagccagataa

SEQ ID NO: 49012 - DNA, 20 bp, Artificial Sequence
  Description of Artificial Sequence: Synthetic oligonucleotide
  Target: SCNA; (-) strand; PAM type: YTN; PAM sequence: CTG
attgttttctttctagccag

SEQ ID NO: 49013 - DNA, 20 bp, Artificial Sequence
  Description of Artificial Sequence: Synthetic oligonucleotide
  Target: SCNA; (-) strand; PAM type: YTN; PAM sequence: TTG
ctgattgttttctttctagc

SEQ ID NO: 49014 - DNA, 20 bp, Artificial Sequence
  Description of Artificial Sequence: Synthetic oligonucleotide
  Target: SCNA; (-) strand; PAM type: YTN; PAM sequence: TTA
aataaaagacaagttgctga

SEQ ID NO: 49015 - DNA, 20 bp, Artificial Sequence
  Description of Artificial Sequence: Synthetic oligonucleotide
  Target: SCNA; (-) strand; PAM type: YTN; PAM sequence: CTT
aaataaaagacaagttgctg

SEQ ID NO: 49016 - DNA, 20 bp, Artificial Sequence
  Description of Artificial Sequence: Synthetic oligonucleotide
  Target: SCNA; (-) strand; PAM type: YTN; PAM sequence: TTC
ccttaaataaaagacaagtt

SEQ ID NO: 49017 - DNA, 20 bp, Artificial Sequence
  Description of Artificial Sequence: Synthetic oligonucleotide
  Target: SCNA; (-) strand; PAM type: YTN; PAM sequence: CTT
cccttaaataaaagacaagt

SEQ ID NO: 49018 - DNA, 20 bp, Artificial Sequence
  Description of Artificial Sequence: Synthetic oligonucleotide
  Target: SCNA; (-) strand; PAM type: YTN; PAM sequence: TTC
ttcccttaaataaaagacaa

SEQ ID NO: 49019 - DNA, 20 bp, Artificial Sequence
  Description of Artificial Sequence: Synthetic oligonucleotide
  Target: SCNA; (-) strand; PAM type: YTN; PAM sequence: CTT
cttcccttaaataaaagaca

SEQ ID NO: 49020 - DNA, 20 bp, Artificial Sequence
  Description of Artificial Sequence: Synthetic oligonucleotide
  Target: SCNA; (-) strand; PAM type: YTN; PAM sequence: TTG
aaaatatagtagagtgaagc

SEQ ID NO: 49021 - DNA, 20 bp, Artificial Sequence
  Description of Artificial Sequence: Synthetic oligonucleotide
  Target: SCNA; (-) strand; PAM type: YTN; PAM sequence: CTT
gaaaatatagtagagtgaag

SEQ ID NO: 49022 - DNA, 20 bp, Artificial Sequence
  Description of Artificial Sequence: Synthetic oligonucleotide
  Target: SCNA; (-) strand; PAM type: YTN; PAM sequence: TTG
gaatatcttgaaaatatagt

SEQ ID NO: 49023 - DNA, 20 bp, Artificial Sequence
  Description of Artificial Sequence: Synthetic oligonucleotide
  Target: SCNA; (-) strand; PAM type: YTN; PAM sequence: TTT
ggaatatcttgaaaatatag

SEQ ID NO: 49024 - DNA, 20 bp, Artificial Sequence
  Description of Artificial Sequence: Synthetic oligonucleotide
  Target: SCNA; (-) strand; PAM type: YTN; PAM sequence: TTT
tggaatatcttgaaaatata

SEQ ID NO: 49025 - DNA, 20 bp, Artificial Sequence
  Description of Artificial Sequence: Synthetic oligonucleotide
  Target: SCNA; (-) strand; PAM type: YTN; PAM sequence: TTG
cagttttggaatatcttgaa

SEQ ID NO: 49026 - DNA, 20 bp, Artificial Sequence
  Description of Artificial Sequence: Synthetic oligonucleotide
  Target: SCNA; (-) strand; PAM type: YTN; PAM sequence: CTG
ttgcagttttggaatatctt

SEQ ID NO: 49027 - DNA, 20 bp, Artificial Sequence
  Description of Artificial Sequence: Synthetic oligonucleotide
  Target: SCNA; (-) strand; PAM type: YTN; PAM sequence: TTG
aaagggtctgttgcagtttt

SEQ ID NO: 49028 - DNA, 20 bp, Artificial Sequence
  Description of Artificial Sequence: Synthetic oligonucleotide
  Target: SCNA; (-) strand; PAM type: YTN; PAM sequence: TTG
gtaatagatgaaagtaaaat

SEQ ID NO: 49029 - DNA, 20 bp, Artificial Sequence
  Description of Artificial Sequence: Synthetic oligonucleotide
  Target: SCNA; (-) strand; PAM type: YTN; PAM sequence: TTT
ggtaatagatgaaagtaaaa

SEQ ID NO: 49030 - DNA, 20 bp, Artificial Sequence
  Description of Artificial Sequence: Synthetic oligonucleotide
  Target: SCNA; (-) strand; PAM type: YTN; PAM sequence: TTT
tggtaatagatgaaagtaaa

SEQ ID NO: 49031 - DNA, 20 bp, Artificial Sequence
  Description of Artificial Sequence: Synthetic oligonucleotide
  Target: SCNA; (-) strand; PAM type: YTN; PAM sequence: TTT
ttggtaatagatgaaagtaa

SEQ ID NO: 49032 - DNA, 20 bp, Artificial Sequence
  Description of Artificial Sequence: Synthetic oligonucleotide
  Target: SCNA; (-) strand; PAM type: YTN; PAM sequence: CTT
tttggtaatagatgaaagta

SEQ ID NO: 49033 - DNA, 20 bp, Artificial Sequence
  Description of Artificial Sequence: Synthetic oligonucleotide
  Target: SCNA; (-) strand; PAM type: YTN; PAM sequence: TTG
gcctttttggtaatagatga

SEQ ID NO: 49034 - DNA, 20 bp, Artificial Sequence
  Description of Artificial Sequence: Synthetic oligonucleotide
  Target: SCNA; (-) strand; PAM type: YTN; PAM sequence: CTA
aaagttggcctttttggtaa

SEQ ID NO: 49035 - DNA, 20 bp, Artificial Sequence
  Description of Artificial Sequence: Synthetic oligonucleotide
  Target: SCNA; (-) strand; PAM type: YTN; PAM sequence: CTC
aatctaaaagttggcctttt

SEQ ID NO: 49036 - DNA, 20 bp, Artificial Sequence
  Description of Artificial Sequence: Synthetic oligonucleotide
  Target: SCNA; (-) strand; PAM type: YTN; PAM sequence: TTG
cctcaatctaaaagttggcc

SEQ ID NO: 49037 - DNA, 20 bp, Artificial Sequence
  Description of Artificial Sequence: Synthetic oligonucleotide
  Target: SCNA; (-) strand; PAM type: YTN; PAM sequence: TTC
attgcctcaatctaaaagtt

SEQ ID NO: 49038 - DNA, 20 bp, Artificial Sequence
  Description of Artificial Sequence: Synthetic oligonucleotide
  Target: SCNA; (-) strand; PAM type: YTN; PAM sequence: TTT
cattgcctcaatctaaaagt

SEQ ID NO: 49039 - DNA, 20 bp, Artificial Sequence
  Description of Artificial Sequence: Synthetic oligonucleotide
  Target: SCNA; (-) strand; PAM type: YTN; PAM sequence: TTT
tcattgcctcaatctaaaag

SEQ ID NO: 49040 - DNA, 20 bp, Artificial Sequence
  Description of Artificial Sequence: Synthetic oligonucleotide
  Target: SCNA; (-) strand; PAM type: YTN; PAM sequence: CTG
agttttcattgcctcaatct

SEQ ID NO: 49041 - DNA, 20 bp, Artificial Sequence
  Description of Artificial Sequence: Synthetic oligonucleotide
  Target: SCNA; (-) strand; PAM type: YTN; PAM sequence: TTC
tgagttttcattgcctcaat

SEQ ID NO: 49042 - DNA, 20 bp, Artificial Sequence
  Description of Artificial Sequence: Synthetic oligonucleotide
  Target: SCNA; (-) strand; PAM type: YTN; PAM sequence: TTT
ctgagttttcattgcctcaa

SEQ ID NO: 49043 - DNA, 20 bp, Artificial Sequence
  Description of Artificial Sequence: Synthetic oligonucleotide
  Target: SCNA; (-) strand; PAM type: YTN; PAM sequence: TTC
caaaaaagtttctgagtttt

SEQ ID NO: 49044 - DNA, 20 bp, Artificial Sequence
  Description of Artificial Sequence: Synthetic oligonucleotide
  Target: SCNA; (-) strand; PAM type: YTN; PAM sequence: CTG
aaggtcattccaaaaaagtt

SEQ ID NO: 49045 - DNA, 20 bp, Artificial Sequence
  Description of Artificial Sequence: Synthetic oligonucleotide
  Target: SCNA; (-) strand; PAM type: YTN; PAM sequence: CTC
aaatctgaaggtcattccaa

SEQ ID NO: 49046 - DNA, 20 bp, Artificial Sequence
  Description of Artificial Sequence: Synthetic oligonucleotide
  Target: SCNA; (-) strand; PAM type: YTN; PAM sequence: TTG
aaacagtggtcatctcaaat

SEQ ID NO: 49047 - DNA, 20 bp, Artificial Sequence
  Description of Artificial Sequence: Synthetic oligonucleotide
  Target: SCNA; (-) strand; PAM type: YTN; PAM sequence: TTG
ttgaaacagtggtcatctca

SEQ ID NO: 49048 - DNA, 20 bp, Artificial Sequence
  Description of Artificial Sequence: Synthetic oligonucleotide
  Target: SCNA; (-) strand; PAM type: YTN; PAM sequence: CTG
aaatattgttgaaacagtgg

SEQ ID NO: 49049 - DNA, 20 bp, Artificial Sequence
  Description of Artificial Sequence: Synthetic oligonucleotide
  Target: SCNA; (-) strand; PAM type: YTN; PAM sequence: TTA
taactgaaatattgttgaaa

SEQ ID NO: 49050 - DNA, 20 bp, Artificial Sequence
  Description of Artificial Sequence: Synthetic oligonucleotide
  Target: SCNA; (-) strand; PAM type: YTN; PAM sequence: CTA
aatgaatatagagaaagaat

SEQ ID NO: 49051 - DNA, 20 bp, Artificial Sequence
  Description of Artificial Sequence: Synthetic oligonucleotide
  Target: SCNA; (-) strand; PAM type: YTN; PAM sequence: TTC
cctaaatgaatatagagaaa

SEQ ID NO: 49052 - DNA, 20 bp, Artificial Sequence
  Description of Artificial Sequence: Synthetic oligonucleotide
  Target: SCNA; (-) strand; PAM type: YTN; PAM sequence: TTT
ccctaaatgaatatagagaa

SEQ ID NO: 49053 - DNA, 20 bp, Artificial Sequence
  Description of Artificial Sequence: Synthetic oligonucleotide
  Target: SCNA; (-) strand; PAM type: YTN; PAM sequence: TTC
agaatcaaatttccctaaat

SEQ ID NO: 49054 - DNA, 20 bp, Artificial Sequence
  Description of Artificial Sequence: Synthetic oligonucleotide
  Target: SCNA; (-) strand; PAM type: YTN; PAM sequence: TTT
cagaatcaaatttccctaaa

SEQ ID NO: 49055 - DNA, 20 bp, Artificial Sequence
  Description of Artificial Sequence: Synthetic oligonucleotide
  Target: SCNA; (-) strand; PAM type: YTN; PAM sequence: TTT
tcagaatcaaatttccctaa

SEQ ID NO: 49056 - DNA, 20 bp, Artificial Sequence
  Description of Artificial Sequence: Synthetic oligonucleotide
  Target: SCNA; (-) strand; PAM type: YTN; PAM sequence: TTT
ttcagaatcaaatttcccta

SEQ ID NO: 49057 - DNA, 20 bp, Artificial Sequence
  Description of Artificial Sequence: Synthetic oligonucleotide
  Target: SCNA; (-) strand; PAM type: YTN; PAM sequence: TTG
tatttttcagaatcaaattt

SEQ ID NO: 49058 - DNA, 20 bp, Artificial Sequence
  Description of Artificial Sequence: Synthetic oligonucleotide
  Target: SCNA; (-) strand; PAM type: YTN; PAM sequence: TTT
gtatttttcagaatcaaatt

SEQ ID NO: 49059 - DNA, 20 bp, Artificial Sequence
  Description of Artificial Sequence: Synthetic oligonucleotide
  Target: SCNA; (-) strand; PAM type: YTN; PAM sequence: CTA
tttgtatttttcagaatcaa

SEQ ID NO: 49060 - DNA, 20 bp, Artificial Sequence
  Description of Artificial Sequence: Synthetic oligonucleotide
  Target: SCNA; (-) strand; PAM type: YTN; PAM sequence: CTC
aggagaaaggaagctatttg

SEQ ID NO: 49061 - DNA, 20 bp, Artificial Sequence
  Description of Artificial Sequence: Synthetic oligonucleotide
  Target: SCNA; (-) strand; PAM type: YTN; PAM sequence: CTA
gctcaggagaaaggaagcta

SEQ ID NO: 49062 - DNA, 20 bp, Artificial Sequence
  Description of Artificial Sequence: Synthetic oligonucleotide
  Target: SCNA; (-) strand; PAM type: YTN; PAM sequence: CTA
aatacagtcctagctcagga

SEQ ID NO: 49063 - DNA, 20 bp, Artificial Sequence
  Description of Artificial Sequence: Synthetic oligonucleotide
  Target: SCNA; (-) strand; PAM type: YTN; PAM sequence: TTC
taaatacagtcctagctcag

SEQ ID NO: 49064 - DNA, 20 bp, Artificial Sequence
  Description of Artificial Sequence: Synthetic oligonucleotide
  Target: SCNA; (-) strand; PAM type: YTN; PAM sequence: CTT
ctaaatacagtcctagctca

SEQ ID NO: 49065 - DNA, 20 bp, Artificial Sequence
  Description of Artificial Sequence: Synthetic oligonucleotide
  Target: SCNA; (-) strand; PAM type: YTN; PAM sequence: TTC
ccttctaaatacagtcctag

SEQ ID NO: 49066 - DNA, 20 bp, Artificial Sequence
  Description of Artificial Sequence: Synthetic oligonucleotide
  Target: SCNA; (-) strand; PAM type: YTN; PAM sequence: TTA
ttcccttctaaatacagtcc

SEQ ID NO: 49067 - DNA, 20 bp, Artificial Sequence
  Description of Artificial Sequence: Synthetic oligonucleotide
  Target: SCNA; (-) strand; PAM type: YTN; PAM sequence: TTT
attcccttctaaatacagtc

SEQ ID NO: 49068 - DNA, 20 bp, Artificial Sequence
  Description of Artificial Sequence: Synthetic oligonucleotide
  Target: SCNA; (-) strand; PAM type: YTN; PAM sequence: CTA
caatttattcccttctaaat

SEQ ID NO: 49069 - DNA, 20 bp, Artificial Sequence
  Description of Artificial Sequence: Synthetic oligonucleotide
  Target: SCNA; (-) strand; PAM type: YTN; PAM sequence: TTA
ataaaatctacaatttattc

SEQ ID NO: 49070 - DNA, 20 bp, Artificial Sequence
  Description of Artificial Sequence: Synthetic oligonucleotide
  Target: SCNA; (-) strand; PAM type: YTN; PAM sequence: TTT
aataaaatctacaatttatt

SEQ ID NO: 49071 - DNA, 20 bp, Artificial Sequence
  Description of Artificial Sequence: Synthetic oligonucleotide
  Target: SCNA; (-) strand; PAM type: YTN; PAM sequence: TTT
taataaaatctacaatttat

SEQ ID NO: 49072 - DNA, 20 bp, Artificial Sequence
  Description of Artificial Sequence: Synthetic oligonucleotide
  Target: SCNA; (-) strand; PAM type: YTN; PAM sequence: CTG
tgtcgtagcacaaaaaaaga

SEQ ID NO: 49073 - DNA, 20 bp, Artificial Sequence
  Description of Artificial Sequence: Synthetic oligonucleotide
  Target: SCNA; (-) strand; PAM type: YTN; PAM sequence: CTA
ctgtgtcgtagcacaaaaaa

SEQ ID NO: 49074 - DNA, 20 bp, Artificial Sequence
  Description of Artificial Sequence: Synthetic oligonucleotide
  Target: SCNA; (-) strand; PAM type: YTN; PAM sequence: TTG
ctactgtgtcgtagcacaaa

SEQ ID NO: 49075 - DNA, 20 bp, Artificial Sequence
  Description of Artificial Sequence: Synthetic oligonucleotide
  Target: SCNA; (-) strand; PAM type: YTN; PAM sequence: CTA
cattgctactgtgtcgtagc

SEQ ID NO: 49076 - DNA, 20 bp, Artificial Sequence
  Description of Artificial Sequence: Synthetic oligonucleotide
  Target: SCNA; (-) strand; PAM type: YTN; PAM sequence: TTC
aatctacattgctactgtgt

SEQ ID NO: 49077 - DNA, 20 bp, Artificial Sequence
  Description of Artificial Sequence: Synthetic oligonucleotide
  Target: SCNA; (-) strand; PAM type: YTN; PAM sequence: CTT
caatctacattgctactgtg

SEQ ID NO: 49078 - DNA, 20 bp, Artificial Sequence
  Description of Artificial Sequence: Synthetic oligonucleotide
  Target: SCNA; (-) strand; PAM type: YTN; PAM sequence: TTA
aaaatacatgtaaaagcctt

SEQ ID NO: 49079 - DNA, 20 bp, Artificial Sequence
  Description of Artificial Sequence: Synthetic oligonucleotide
  Target: SCNA; (-) strand; PAM type: YTN; PAM sequence: TTT
aaaaatacatgtaaaagcct

SEQ ID NO: 49080 - DNA, 20 bp, Artificial Sequence
  Description of Artificial Sequence: Synthetic oligonucleotide
  Target: SCNA; (-) strand; PAM type: YTN; PAM sequence: TTT
taaaaatacatgtaaaagcc

SEQ ID NO: 49081 - DNA, 20 bp, Artificial Sequence
  Description of Artificial Sequence: Synthetic oligonucleotide
  Target: SCNA; (-) strand; PAM type: YTN; PAM sequence: CTA
tggcaattttaaaaatacat

SEQ ID NO: 49082 - DNA, 20 bp, Artificial Sequence
  Description of Artificial Sequence: Synthetic oligonucleotide
  Target: SCNA; (-) strand; PAM type: YTN; PAM sequence: CTC
tatggcaattttaaaaatac

SEQ ID NO: 49083 - DNA, 20 bp, Artificial Sequence
  Description of Artificial Sequence: Synthetic oligonucleotide
  Target: SCNA; (-) strand; PAM type: YTN; PAM sequence: TTC
tctatggcaattttaaaaat

SEQ ID NO: 49084 - DNA, 20 bp, Artificial Sequence
  Description of Artificial Sequence: Synthetic oligonucleotide
  Target: SCNA; (-) strand; PAM type: YTN; PAM sequence: TTA
atacaaataattctctatgg

SEQ ID NO: 49085 - DNA, 20 bp, Artificial Sequence
  Description of Artificial Sequence: Synthetic oligonucleotide
  Target: SCNA; (-) strand; PAM type: YTN; PAM sequence: CTA
tgattaatacaaataattct

SEQ ID NO: 49086 - DNA, 20 bp, Artificial Sequence
  Description of Artificial Sequence: Synthetic oligonucleotide
  Target: SCNA; (-) strand; PAM type: YTN; PAM sequence: TTG
gaaatctatgattaatacaa

SEQ ID NO: 49087 - DNA, 20 bp, Artificial Sequence
  Description of Artificial Sequence: Synthetic oligonucleotide
  Target: SCNA; (-) strand; PAM type: YTN; PAM sequence: CTT
ggaaatctatgattaataca

SEQ ID NO: 49088 - DNA, 20 bp, Artificial Sequence
  Description of Artificial Sequence: Synthetic oligonucleotide
  Target: SCNA; (-) strand; PAM type: YTN; PAM sequence: TTG
cagccttggaaatctatgat

SEQ ID NO: 49089 - DNA, 20 bp, Artificial Sequence
  Description of Artificial Sequence: Synthetic oligonucleotide
  Target: SCNA; (-) strand; PAM type: YTN; PAM sequence: TTT
gcagccttggaaatctatga

SEQ ID NO: 49090 - DNA, 20 bp, Artificial Sequence
  Description of Artificial Sequence: Synthetic oligonucleotide
  Target: SCNA; (-) strand; PAM type: YTN; PAM sequence: TTT
tgcagccttggaaatctatg

SEQ ID NO: 49091 - DNA, 20 bp, Artificial Sequence
  Description of Artificial Sequence: Synthetic oligonucleotide
  Target: SCNA; (-) strand; PAM type: YTN; PAM sequence: CTT
ttgcagccttggaaatctat

SEQ ID NO: 49092 - DNA, 20 bp, Artificial Sequence
  Description of Artificial Sequence: Synthetic oligonucleotide
  Target: SCNA; (-) strand; PAM type: YTN; PAM sequence: TTA
gcttttgcagccttggaaat

SEQ ID NO: 49093 - DNA, 20 bp, Artificial Sequence
  Description of Artificial Sequence: Synthetic oligonucleotide
  Target: SCNA; (-) strand; PAM type: YTN; PAM sequence: TTT
agcttttgcagccttggaaa

SEQ ID NO: 49094 - DNA, 20 bp, Artificial Sequence
  Description of Artificial Sequence: Synthetic oligonucleotide
  Target: SCNA; (-) strand; PAM type: YTN; PAM sequence: CTA
tttagcttttgcagccttgg

SEQ ID NO: 49095 - DNA, 20 bp, Artificial Sequence
  Description of Artificial Sequence: Synthetic oligonucleotide
  Target: SCNA; (-) strand; PAM type: YTN; PAM sequence: TTA
ctatttagcttttgcagcct

SEQ ID NO: 49096 - DNA, 20 bp, Artificial Sequence
  Description of Artificial Sequence: Synthetic oligonucleotide
  Target: SCNA; (-) strand; PAM type: YTN; PAM sequence: TTT
actatttagcttttgcagcc

SEQ ID NO: 49097 - DNA, 20 bp, Artificial Sequence
  Description of Artificial Sequence: Synthetic oligonucleotide
  Target: SCNA; (-) strand; PAM type: YTN; PAM sequence: CTT
tactatttagcttttgcagc

SEQ ID NO: 49098 - DNA, 20 bp, Artificial Sequence
  Description of Artificial Sequence: Synthetic oligonucleotide
  Target: SCNA; (-) strand; PAM type: YTN; PAM sequence: TTA
tatgctttactatttagctt

SEQ ID NO: 49099 - DNA, 20 bp, Artificial Sequence
  Description of Artificial Sequence: Synthetic oligonucleotide
  Target: SCNA; (-) strand; PAM type: YTN; PAM sequence: TTA
ttatatgctttactatttag

SEQ ID NO: 49100 - DNA, 20 bp, Artificial Sequence
  Description of Artificial Sequence: Synthetic oligonucleotide
  Target: SCNA; (-) strand; PAM type: YTN; PAM sequence: CTA
ccattattatatgctttact

SEQ ID NO: 49101 - DNA, 20 bp, Artificial Sequence
  Description of Artificial Sequence: Synthetic oligonucleotide
  Target: SCNA; (-) strand; PAM type: YTN; PAM sequence: TTA
acgctaccattattatatgc

SEQ ID NO: 49102 - DNA, 20 bp, Artificial Sequence
  Description of Artificial Sequence: Synthetic oligonucleotide
  Target: SCNA; (-) strand; PAM type: YTN; PAM sequence: TTC
aaattaacgctaccattatt

SEQ ID NO: 49103 - DNA, 20 bp, Artificial Sequence
  Description of Artificial Sequence: Synthetic oligonucleotide
  Target: SCNA; (-) strand; PAM type: YTN; PAM sequence: TTT
caaattaacgctaccattat

SEQ ID NO: 49104 - DNA, 20 bp, Artificial Sequence
  Description of Artificial Sequence: Synthetic oligonucleotide
  Target: SCNA; (-) strand; PAM type: YTN; PAM sequence: TTT
tcaaattaacgctaccatta

SEQ ID NO: 49105 - DNA, 20 bp, Artificial Sequence
  Description of Artificial Sequence: Synthetic oligonucleotide
  Target: SCNA; (-) strand; PAM type: YTN; PAM sequence: TTT
ttcaaattaacgctaccatt

SEQ ID NO: 49106 - DNA, 20 bp, Artificial Sequence
  Description of Artificial Sequence: Synthetic oligonucleotide
  Target: SCNA; (-) strand; PAM type: YTN; PAM sequence: TTT
tttcaaattaacgctaccat

SEQ ID NO: 49107 - DNA, 20 bp, Artificial Sequence
  Description of Artificial Sequence: Synthetic oligonucleotide
  Target: SCNA; (-) strand; PAM type: YTN; PAM sequence: TTT
ttttcaaattaacgctacca

SEQ ID NO: 49108 - DNA, 20 bp, Artificial Sequence
  Description of Artificial Sequence: Synthetic oligonucleotide
  Target: SCNA; (-) strand; PAM type: YTN; PAM sequence: TTT
tttttcaaattaacgctacc

SEQ ID NO: 49109 - DNA, 20 bp, Artificial Sequence
  Description of Artificial Sequence: Synthetic oligonucleotide
  Target: SCNA; (-) strand; PAM type: YTN; PAM sequence: CTG
gaattttttttcaaattaac

SEQ ID NO: 49110 - DNA, 20 bp, Artificial Sequence
  Description of Artificial Sequence: Synthetic oligonucleotide
  Target: SCNA; (-) strand; PAM type: YTN; PAM sequence: CTA
gctggaattttttttcaaat

SEQ ID NO: 49111 - DNA, 20 bp, Artificial Sequence
  Description of Artificial Sequence: Synthetic oligonucleotide
  Target: SCNA; (-) strand; PAM type: YTN; PAM sequence: TTG
ctagctggaattttttttca

SEQ ID NO: 49112 - DNA, 20 bp, Artificial Sequence
  Description of Artificial Sequence: Synthetic oligonucleotide
  Target: SCNA; (-) strand; PAM type: YTN; PAM sequence: TTT
gctagctggaattttttttc

SEQ ID NO: 49113 - DNA, 20 bp, Artificial Sequence
  Description of Artificial Sequence: Synthetic oligonucleotide
  Target: SCNA; (-) strand; PAM type: YTN; PAM sequence: TTT
tgctagctggaatttttttt

SEQ ID NO: 49114 - DNA, 20 bp, Artificial Sequence
  Description of Artificial Sequence: Synthetic oligonucleotide
  Target: SCNA; (-) strand; PAM type: YTN; PAM sequence: CTC
atgttttgctagctggaatt

SEQ ID NO: 49115 - DNA, 20 bp, Artificial Sequence
  Description of Artificial Sequence: Synthetic oligonucleotide
  Target: SCNA; (-) strand; PAM type: YTN; PAM sequence: CTA
gactcatgttttgctagctg

SEQ ID NO: 49116 - DNA, 20 bp, Artificial Sequence
  Description of Artificial Sequence: Synthetic oligonucleotide
  Target: SCNA; (-) strand; PAM type: YTN; PAM sequence: CTA
catctagactcatgttttgc

SEQ ID NO: 49117 - DNA, 20 bp, Artificial Sequence
  Description of Artificial Sequence: Synthetic oligonucleotide
  Target: SCNA; (-) strand; PAM type: YTN; PAM sequence: TTG
aacatgatatctacatctag

SEQ ID NO: 49118 - DNA, 20 bp, Artificial Sequence
  Description of Artificial Sequence: Synthetic oligonucleotide
  Target: SCNA; (-) strand; PAM type: YTN; PAM sequence: TTT
gaacatgatatctacatcta

SEQ ID NO: 49119 - DNA, 20 bp, Artificial Sequence
  Description of Artificial Sequence: Synthetic oligonucleotide
  Target: SCNA; (-) strand; PAM type: YTN; PAM sequence: TTT
tgaacatgatatctacatct

SEQ ID NO: 49120 - DNA, 20 bp, Artificial Sequence
  Description of Artificial Sequence: Synthetic oligonucleotide
  Target: SCNA; (-) strand; PAM type: YTN; PAM sequence: TTT
ttgaacatgatatctacatc

SEQ ID NO: 49121 - DNA, 20 bp, Artificial Sequence
  Description of Artificial Sequence: Synthetic oligonucleotide
  Target: SCNA; (-) strand; PAM type: YTN; PAM sequence: TTG
tgatttttgaacatgatatc

SEQ ID NO: 49122 - DNA, 20 bp, Artificial Sequence
  Description of Artificial Sequence: Synthetic oligonucleotide
  Target: SCNA; (-) strand; PAM type: YTN; PAM sequence: TTT
gtgatttttgaacatgatat

SEQ ID NO: 49123 - DNA, 20 bp, Artificial Sequence
  Description of Artificial Sequence: Synthetic oligonucleotide
  Target: SCNA; (-) strand; PAM type: YTN; PAM sequence: CTT
tgtgatttttgaacatgata

SEQ ID NO: 49124 - DNA, 20 bp, Artificial Sequence
  Description of Artificial Sequence: Synthetic oligonucleotide
  Target: SCNA; (-) strand; PAM type: YTN; PAM sequence: CTG
ctttgtgatttttgaacatg

SEQ ID NO: 49125 - DNA, 20 bp, Artificial Sequence
  Description of Artificial Sequence: Synthetic oligonucleotide
  Target: SCNA; (-) strand; PAM type: YTN; PAM sequence: CTG
gcaatctgctttgtgatttt

SEQ ID NO: 49126 - DNA, 20 bp, Artificial Sequence
  Description of Artificial Sequence: Synthetic oligonucleotide
  Target: SCNA; (-) strand; PAM type: YTN; PAM sequence: TTG
ctggcaatctgctttgtgat

SEQ ID NO: 49127 - DNA, 20 bp, Artificial Sequence
  Description of Artificial Sequence: Synthetic oligonucleotide
  Target: SCNA; (-) strand; PAM type: YTN; PAM sequence: TTT
gctggcaatctgctttgtga

SEQ ID NO: 49128 - DNA, 20 bp, Artificial Sequence
  Description of Artificial Sequence: Synthetic oligonucleotide
  Target: SCNA; (-) strand; PAM type: YTN; PAM sequence: TTT
tgctggcaatctgctttgtg

SEQ ID NO: 49129 - DNA, 20 bp, Artificial Sequence
  Description of Artificial Sequence: Synthetic oligonucleotide
  Target: SCNA; (-) strand; PAM type: YTN; PAM sequence: TTT
ttgctggcaatctgctttgt

SEQ ID NO: 49130 - DNA, 20 bp, Artificial Sequence
  Description of Artificial Sequence: Synthetic oligonucleotide
  Target: SCNA; (-) strand; PAM type: YTN; PAM sequence: TTT
tttgctggcaatctgctttg

SEQ ID NO: 49131 - DNA, 20 bp, Artificial Sequence
  Description of Artificial Sequence: Synthetic oligonucleotide
  Target: SCNA; (-) strand; PAM type: YTN; PAM sequence: TTC
aattttttgctggcaatctg

SEQ ID NO: 49132 - DNA, 20 bp, Artificial Sequence
  Description of Artificial Sequence: Synthetic oligonucleotide
  Target: SCNA; (-) strand; PAM type: YTN; PAM sequence: TTG
gttcaattttttgctggcaa

SEQ ID NO: 49133 - DNA, 20 bp, Artificial Sequence
  Description of Artificial Sequence: Synthetic oligonucleotide
  Target: SCNA; (-) strand; PAM type: YTN; PAM sequence: CTT
ggttcaattttttgctggca

SEQ ID NO: 49134 - DNA, 20 bp, Artificial Sequence
  Description of Artificial Sequence: Synthetic oligonucleotide
  Target: SCNA; (-) strand; PAM type: YTN; PAM sequence: CTG
aaggggaaaaacttggttca

SEQ ID NO: 49135 - DNA, 20 bp, Artificial Sequence
  Description of Artificial Sequence: Synthetic oligonucleotide
  Target: SCNA; (-) strand; PAM type: YTN; PAM sequence: TTC
tgaaggggaaaaacttggtt

SEQ ID NO: 49136 - DNA, 20 bp, Artificial Sequence
  Description of Artificial Sequence: Synthetic oligonucleotide
  Target: SCNA; (-) strand; PAM type: YTN; PAM sequence: TTT
ctgaaggggaaaaacttggt

SEQ ID NO: 49137 - DNA, 20 bp, Artificial Sequence
  Description of Artificial Sequence: Synthetic oligonucleotide
  Target: SCNA; (-) strand; PAM type: YTN; PAM sequence: TTT
tctgaaggggaaaaacttgg

SEQ ID NO: 49138 - DNA, 20 bp, Artificial Sequence
  Description of Artificial Sequence: Synthetic oligonucleotide
  Target: SCNA; (-) strand; PAM type: YTN; PAM sequence: CTA
gttttctgaaggggaaaaac

SEQ ID NO: 49139 - DNA, 20 bp, Artificial Sequence
  Description of Artificial Sequence: Synthetic oligonucleotide
  Target: SCNA; (-) strand; PAM type: YTN; PAM sequence: TTA
aataaagctagttttctgaa

SEQ ID NO: 49140 - DNA, 20 bp, Artificial Sequence
  Description of Artificial Sequence: Synthetic oligonucleotide
  Target: SCNA; (-) strand; PAM type: YTN; PAM sequence: TTT
aaataaagctagttttctga

SEQ ID NO: 49141 - DNA, 20 bp, Artificial Sequence
  Description of Artificial Sequence: Synthetic oligonucleotide
  Target: SCNA; (-) strand; PAM type: YTN; PAM sequence: TTT
taaataaagctagttttctg

SEQ ID NO: 49142 - DNA, 20 bp, Artificial Sequence
  Description of Artificial Sequence: Synthetic oligonucleotide
  Target: SCNA; (-) strand; PAM type: YTN; PAM sequence: TTT
ttaaataaagctagttttct

SEQ ID NO: 49143 - DNA, 20 bp, Artificial Sequence
  Description of Artificial Sequence: Synthetic oligonucleotide
  Target: SCNA; (-) strand; PAM type: YTN; PAM sequence: TTT
tttaaataaagctagttttc

SEQ ID NO: 49144 - DNA, 20 bp, Artificial Sequence
  Description of Artificial Sequence: Synthetic oligonucleotide
  Target: SCNA; (-) strand; PAM type: YTN; PAM sequence: TTT
ttttaaataaagctagtttt

SEQ ID NO: 49145 - DNA, 20 bp, Artificial Sequence
  Description of Artificial Sequence: Synthetic oligonucleotide
  Target: SCNA; (-) strand; PAM type: YTN; PAM sequence: TTA
ggaaatttttttaaataaag

SEQ ID NO: 49146 - DNA, 20 bp, Artificial Sequence
  Description of Artificial Sequence: Synthetic oligonucleotide
  Target: SCNA; (-) strand; PAM type: YTN; PAM sequence: TTA
aatattaggaaattttttta

SEQ ID NO: 49147 - DNA, 20 bp, Artificial Sequence
  Description of Artificial Sequence: Synthetic oligonucleotide
  Target: SCNA; (-) strand; PAM type: YTN; PAM sequence: TTT
aaatattaggaaattttttt

SEQ ID NO: 49148 - DNA, 20 bp, Artificial Sequence
  Description of Artificial Sequence: Synthetic oligonucleotide
  Target: SCNA; (-) strand; PAM type: YTN; PAM sequence: TTA
taaacgtgtgaatcaattta

SEQ ID NO: 49149 - DNA, 20 bp, Artificial Sequence
  Description of Artificial Sequence: Synthetic oligonucleotide
  Target: SCNA; (-) strand; PAM type: YTN; PAM sequence: TTG
tatagttataaacgtgtgaa

SEQ ID NO: 49150 - DNA, 20 bp, Artificial Sequence
  Description of Artificial Sequence: Synthetic oligonucleotide
  Target: SCNA; (-) strand; PAM type: YTN; PAM sequence: CTT
gtatagttataaacgtgtga

SEQ ID NO: 49151 - DNA, 20 bp, Artificial Sequence
  Description of Artificial Sequence: Synthetic oligonucleotide
  Target: SCNA; (-) strand; PAM type: YTN; PAM sequence: TTG
atgaaacaaggaaacccttg

SEQ ID NO: 49152 - DNA, 20 bp, Artificial Sequence
  Description of Artificial Sequence: Synthetic oligonucleotide
  Target: SCNA; (-) strand; PAM type: YTN; PAM sequence: TTT
gatgaaacaaggaaaccctt

SEQ ID NO: 49153 - DNA, 20 bp, Artificial Sequence
  Description of Artificial Sequence: Synthetic oligonucleotide
  Target: SCNA; (-) strand; PAM type: YTN; PAM sequence: CTT
tgatgaaacaaggaaaccct

SEQ ID NO: 49154 - DNA, 20 bp, Artificial Sequence
  Description of Artificial Sequence: Synthetic oligonucleotide
  Target: SCNA; (-) strand; PAM type: YTN; PAM sequence: TTC
tttgatgaaacaaggaaacc

SEQ ID NO: 49155 - DNA, 20 bp, Artificial Sequence
  Description of Artificial Sequence: Synthetic oligonucleotide
  Target: SCNA; (-) strand; PAM type: YTN; PAM sequence: TTT
ctttgatgaaacaaggaaac

SEQ ID NO: 49156 - DNA, 20 bp, Artificial Sequence
  Description of Artificial Sequence: Synthetic oligonucleotide
  Target: SCNA; (-) strand; PAM type: YTN; PAM sequence: TTA
tttctttgatgaaacaagga

SEQ ID NO: 49157 - DNA, 20 bp, Artificial Sequence
  Description of Artificial Sequence: Synthetic oligonucleotide
  Target: SCNA; (-) strand; PAM type: YTN; PAM sequence: CTT
atttctttgatgaaacaagg

SEQ ID NO: 49158 - DNA, 20 bp, Artificial Sequence
  Description of Artificial Sequence: Synthetic oligonucleotide
  Target: SCNA; (-) strand; PAM type: YTN; PAM sequence: TTC
atacttatttctttgatgaa

SEQ ID NO: 49159 - DNA, 20 bp, Artificial Sequence
  Description of Artificial Sequence: Synthetic oligonucleotide
  Target: SCNA; (-) strand; PAM type: YTN; PAM sequence: CTC
attcatacttatttctttga

SEQ ID NO: 49160 - DNA, 20 bp, Artificial Sequence
  Description of Artificial Sequence: Synthetic oligonucleotide
  Target: SCNA; (-) strand; PAM type: YTN; PAM sequence: CTG
ctcattcatacttatttctt

SEQ ID NO: 49161 - DNA, 20 bp, Artificial Sequence
  Description of Artificial Sequence: Synthetic oligonucleotide
  Target: SCNA; (-) strand; PAM type: YTN; PAM sequence: TTC
tgctcattcatacttatttc

SEQ ID NO: 49162 - DNA, 20 bp, Artificial Sequence
  Description of Artificial Sequence: Synthetic oligonucleotide
  Target: SCNA; (-) strand; PAM type: YTN; PAM sequence: CTA
aaacattctgctcattcata

SEQ ID NO: 49163 - DNA, 20 bp, Artificial Sequence
  Description of Artificial Sequence: Synthetic oligonucleotide
  Target: SCNA; (-) strand; PAM type: YTN; PAM sequence: TTA
tactaaaacattctgctcat

SEQ ID NO: 49164 - DNA, 20 bp, Artificial Sequence
  Description of Artificial Sequence: Synthetic oligonucleotide
  Target: SCNA; (-) strand; PAM type: YTN; PAM sequence: TTT
atactaaaacattctgctca

SEQ ID NO: 49165 - DNA, 20 bp, Artificial Sequence
  Description of Artificial Sequence: Synthetic oligonucleotide
  Target: SCNA; (-) strand; PAM type: YTN; PAM sequence: TTT
tatactaaaacattctgctc

SEQ ID NO: 49166 - DNA, 20 bp, Artificial Sequence
  Description of Artificial Sequence: Synthetic oligonucleotide
  Target: SCNA; (-) strand; PAM type: YTN; PAM sequence: CTT
ttatactaaaacattctgct

SEQ ID NO: 49167 - DNA, 20 bp, Artificial Sequence
  Description of Artificial Sequence: Synthetic oligonucleotide
  Target: SCNA; (-) strand; PAM type: YTN; PAM sequence: TTG
taaacttttatactaaaaca

SEQ ID NO: 49168 - DNA, 20 bp, Artificial Sequence
  Description of Artificial Sequence: Synthetic oligonucleotide
  Target: SCNA; (-) strand; PAM type: YTN; PAM sequence: TTT
gtaaacttttatactaaaac

SEQ ID NO: 49169 - DNA, 20 bp, Artificial Sequence
  Description of Artificial Sequence: Synthetic oligonucleotide
  Target: SCNA; (-) strand; PAM type: YTN; PAM sequence: CTT
tgtaaacttttatactaaaa

SEQ ID NO: 49170 - DNA, 20 bp, Artificial Sequence
  Description of Artificial Sequence: Synthetic oligonucleotide
  Target: SCNA; (-) strand; PAM type: YTN; PAM sequence: TTC
cgagtgtgaataaactttgt

SEQ ID NO: 49171 - DNA, 20 bp, Artificial Sequence
  Description of Artificial Sequence: Synthetic oligonucleotide
  Target: SCNA; (-) strand; PAM type: YTN; PAM sequence: TTG
ttccgagtgtgaataaactt

SEQ ID NO: 49172 - DNA, 20 bp, Artificial Sequence
  Description of Artificial Sequence: Synthetic oligonucleotide
  Target: SCNA; (-) strand; PAM type: YTN; PAM sequence: TTT
gttccgagtgtgaataaact

SEQ ID NO: 49173 - DNA, 20 bp, Artificial Sequence
  Description of Artificial Sequence: Synthetic oligonucleotide
  Target: SCNA; (-) strand; PAM type: YTN; PAM sequence: CTT
tgttccgagtgtgaataaac

SEQ ID NO: 49174 - DNA, 20 bp, Artificial Sequence
  Description of Artificial Sequence: Synthetic oligonucleotide
  Target: SCNA; (-) strand; PAM type: YTN; PAM sequence: TTC
ctttgttccgagtgtgaata

SEQ ID NO: 49175 - DNA, 20 bp, Artificial Sequence
  Description of Artificial Sequence: Synthetic oligonucleotide
  Target: SCNA; (-) strand; PAM type: YTN; PAM sequence: TTA
ttcctttgttccgagtgtga

SEQ ID NO: 49176 - DNA, 20 bp, Artificial Sequence
  Description of Artificial Sequence: Synthetic oligonucleotide
  Target: SCNA; (-) strand; PAM type: YTN; PAM sequence: CTT
attcctttgttccgagtgtg

SEQ ID NO: 49177 - DNA, 20 bp, Artificial Sequence
  Description of Artificial Sequence: Synthetic oligonucleotide
  Target: SCNA; (-) strand; PAM type: YTN; PAM sequence: CTA
cttattcctttgttccgagt

SEQ ID NO: 49178 - DNA, 20 bp, Artificial Sequence
  Description of Artificial Sequence: Synthetic oligonucleotide
  Target: SCNA; (-) strand; PAM type: YTN; PAM sequence: TTC
ctacttattcctttgttccg

SEQ ID NO: 49179 - DNA, 20 bp, Artificial Sequence
  Description of Artificial Sequence: Synthetic oligonucleotide
  Target: SCNA; (-) strand; PAM type: YTN; PAM sequence: TTT
cctacttattcctttgttcc

SEQ ID NO: 49180 - DNA, 20 bp, Artificial Sequence
  Description of Artificial Sequence: Synthetic oligonucleotide
  Target: SCNA; (-) strand; PAM type: YTN; PAM sequence: TTT
tcctacttattcctttgttc

SEQ ID NO: 49181 - DNA, 20 bp, Artificial Sequence
  Description of Artificial Sequence: Synthetic oligonucleotide
  Target: SCNA; (-) strand; PAM type: YTN; PAM sequence: TTT
ttcctacttattcctttgtt

SEQ ID NO: 49182 - DNA, 20 bp, Artificial Sequence
  Description of Artificial Sequence: Synthetic oligonucleotide
  Target: SCNA; (-) strand; PAM type: YTN; PAM sequence: TTT
tttcctacttattcctttgt

SEQ ID NO: 49183 - DNA, 20 bp, Artificial Sequence
  Description of Artificial Sequence: Synthetic oligonucleotide
  Target: SCNA; (-) strand; PAM type: YTN; PAM sequence: TTT
ttttcctacttattcctttg

SEQ ID NO: 49184 - DNA, 20 bp, Artificial Sequence
  Description of Artificial Sequence: Synthetic oligonucleotide
  Target: SCNA; (-) strand; PAM type: YTN; PAM sequence: CTT
tttttcctacttattccttt

SEQ ID NO: 49185 - DNA, 20 bp, Artificial Sequence
  Description of Artificial Sequence: Synthetic oligonucleotide
  Target: SCNA; (-) strand; PAM type: YTN; PAM sequence: CTC
tttttttcctacttattcct

SEQ ID NO: 49186 - DNA, 20 bp, Artificial Sequence
  Description of Artificial Sequence: Synthetic oligonucleotide
  Target: SCNA; (-) strand; PAM type: YTN; PAM sequence: TTG
ctctttttttcctacttatt

SEQ ID NO: 49187 - DNA, 20 bp, Artificial Sequence
  Description of Artificial Sequence: Synthetic oligonucleotide
  Target: SCNA; (-) strand; PAM type: YTN; PAM sequence: TTA
gttgctctttttttcctact

SEQ ID NO: 49188 - DNA, 20 bp, Artificial Sequence
  Description of Artificial Sequence: Synthetic oligonucleotide
  Target: SCNA; (-) strand; PAM type: YTN; PAM sequence: TTT
agttgctctttttttcctac

SEQ ID NO: 49189 - DNA, 20 bp, Artificial Sequence
  Description of Artificial Sequence: Synthetic oligonucleotide
  Target: SCNA; (-) strand; PAM type: YTN; PAM sequence: TTT
tagttgctctttttttccta

SEQ ID NO: 49190 - DNA, 20 bp, Artificial Sequence
  Description of Artificial Sequence: Synthetic oligonucleotide
  Target: SCNA; (-) strand; PAM type: YTN; PAM sequence: TTT
ttagttgctctttttttcct

SEQ ID NO: 49191 - DNA, 20 bp, Artificial Sequence
  Description of Artificial Sequence: Synthetic oligonucleotide
  Target: SCNA; (-) strand; PAM type: YTN; PAM sequence: TTG
tttttagttgctcttttttt

SEQ ID NO: 49192 - DNA, 20 bp, Artificial Sequence
  Description of Artificial Sequence: Synthetic oligonucleotide
  Target: SCNA; (-) strand; PAM type: YTN; PAM sequence: TTT
gtttttagttgctctttttt

SEQ ID NO: 49193 - DNA, 20 bp, Artificial Sequence
  Description of Artificial Sequence: Synthetic oligonucleotide
  Target: SCNA; (-) strand; PAM type: YTN; PAM sequence: TTC
atttgtttttagttgctctt

SEQ ID NO: 49194 - DNA, 20 bp, Artificial Sequence
  Description of Artificial Sequence: Synthetic oligonucleotide
  Target: SCNA; (-) strand; PAM type: YTN; PAM sequence: TTG
gagacaaacgagagggatgg

SEQ ID NO: 49195 - DNA, 20 bp, Artificial Sequence
  Description of Artificial Sequence: Synthetic oligonucleotide
  Target: SCNA; (-) strand; PAM type: YTN; PAM sequence: CTG
attggagacaaacgagaggg

SEQ ID NO: 49196 - DNA, 20 bp, Artificial Sequence
  Description of Artificial Sequence: Synthetic oligonucleotide
  Target: SCNA; (-) strand; PAM type: YTN; PAM sequence: TTA
actgattggagacaaacgag

SEQ ID NO: 49197 - DNA, 20 bp, Artificial Sequence
  Description of Artificial Sequence: Synthetic oligonucleotide
  Target: SCNA; (-) strand; PAM type: YTN; PAM sequence: TTT
aactgattggagacaaacga

SEQ ID NO: 49198 - DNA, 20 bp, Artificial Sequence
  Description of Artificial Sequence: Synthetic oligonucleotide
  Target: SCNA; (-) strand; PAM type: YTN; PAM sequence: TTA
aaaggatttaactgattgga

SEQ ID NO: 49199 - DNA, 20 bp, Artificial Sequence
  Description of Artificial Sequence: Synthetic oligonucleotide
  Target: SCNA; (-) strand; PAM type: YTN; PAM sequence: TTA
tgatatatcattaaaaggat

SEQ ID NO: 49200 - DNA, 20 bp, Artificial Sequence
  Description of Artificial Sequence: Synthetic oligonucleotide
  Target: SCNA; (-) strand; PAM type: YTN; PAM sequence: CTT
atgatatatcattaaaagga

SEQ ID NO: 49201 - DNA, 20 bp, Artificial Sequence
  Description of Artificial Sequence: Synthetic oligonucleotide
  Target: SCNA; (-) strand; PAM type: YTN; PAM sequence: CTA
cttatgatatatcattaaaa

SEQ ID NO: 49202 - DNA, 20 bp, Artificial Sequence
  Description of Artificial Sequence: Synthetic oligonucleotide
  Target: SCNA; (-) strand; PAM type: YTN; PAM sequence: CTA
aagcatgaagctacttatga

SEQ ID NO: 49203 - DNA, 20 bp, Artificial Sequence
  Description of Artificial Sequence: Synthetic oligonucleotide
  Target: SCNA; (-) strand; PAM type: YTN; PAM sequence: TTA
atgatgtagatataagaata

SEQ ID NO: 49204 - DNA, 20 bp, Artificial Sequence
  Description of Artificial Sequence: Synthetic oligonucleotide
  Target: SCNA; (-) strand; PAM type: YTN; PAM sequence: TTA
ttaatgatgtagatataaga

SEQ ID NO: 49205 - DNA, 20 bp, Artificial Sequence
  Description of Artificial Sequence: Synthetic oligonucleotide
  Target: SCNA; (-) strand; PAM type: YTN; PAM sequence: TTG
attattaatgatgtagatat

SEQ ID NO: 49206 - DNA, 20 bp, Artificial Sequence
  Description of Artificial Sequence: Synthetic oligonucleotide
  Target: SCNA; (-) strand; PAM type: YTN; PAM sequence: TTT
gattattaatgatgtagata

SEQ ID NO: 49207 - DNA, 20 bp, Artificial Sequence
  Description of Artificial Sequence: Synthetic oligonucleotide
  Target: SCNA; (-) strand; PAM type: YTN; PAM sequence: TTT
tgattattaatgatgtagat

SEQ ID NO: 49208 - DNA, 20 bp, Artificial Sequence
  Description of Artificial Sequence: Synthetic oligonucleotide
  Target: SCNA; (-) strand; PAM type: YTN; PAM sequence: CTA
ttttgattattaatgatgta

SEQ ID NO: 49209 - DNA, 20 bp, Artificial Sequence
  Description of Artificial Sequence: Synthetic oligonucleotide
  Target: SCNA; (-) strand; PAM type: YTN; PAM sequence: CTA
aagacagaaagactattttg

SEQ ID NO: 49210 - DNA, 20 bp, Artificial Sequence
  Description of Artificial Sequence: Synthetic oligonucleotide
  Target: SCNA; (-) strand; PAM type: YTN; PAM sequence: TTA
gagacagcaaaactaaagac

SEQ ID NO: 49211 - DNA, 20 bp, Artificial Sequence
  Description of Artificial Sequence: Synthetic oligonucleotide
  Target: SCNA; (-) strand; PAM type: YTN; PAM sequence: CTT
agagacagcaaaactaaaga

SEQ ID NO: 49212 - DNA, 20 bp, Artificial Sequence
  Description of Artificial Sequence: Synthetic oligonucleotide
  Target: SCNA; (-) strand; PAM type: YTN; PAM sequence: CTG
acttagagacagcaaaacta

SEQ ID NO: 49213 - DNA, 20 bp, Artificial Sequence
  Description of Artificial Sequence: Synthetic oligonucleotide
  Target: SCNA; (-) strand; PAM type: YTN; PAM sequence: TTC
tgacttagagacagcaaaac

SEQ ID NO: 49214 - DNA, 20 bp, Artificial Sequence
  Description of Artificial Sequence: Synthetic oligonucleotide
  Target: SCNA; (-) strand; PAM type: YTN; PAM sequence: TTG
agttctgacttagagacagc

SEQ ID NO: 49215 - DNA, 20 bp, Artificial Sequence
  Description of Artificial Sequence: Synthetic oligonucleotide
  Target: SCNA; (-) strand; PAM type: YTN; PAM sequence: TTA
gagcaacagtattgagttct

SEQ ID NO: 49216 - DNA, 20 bp, Artificial Sequence
  Description of Artificial Sequence: Synthetic oligonucleotide
  Target: SCNA; (-) strand; PAM type: YTN; PAM sequence: TTT
agagcaacagtattgagttc

SEQ ID NO: 49217 - DNA, 20 bp, Artificial Sequence
  Description of Artificial Sequence: Synthetic oligonucleotide
  Target: SCNA; (-) strand; PAM type: YTN; PAM sequence: TTT
tagagcaacagtattgagtt

SEQ ID NO: 49218 - DNA, 20 bp, Artificial Sequence
  Description of Artificial Sequence: Synthetic oligonucleotide
  Target: SCNA; (-) strand; PAM type: YTN; PAM sequence: TTG
tattttagagcaacagtatt

SEQ ID NO: 49219 - DNA, 20 bp, Artificial Sequence
  Description of Artificial Sequence: Synthetic oligonucleotide
  Target: SCNA; (-) strand; PAM type: YTN; PAM sequence: TTT
gtattttagagcaacagtat

SEQ ID NO: 49220 - DNA, 20 bp, Artificial Sequence
  Description of Artificial Sequence: Synthetic oligonucleotide
  Target: SCNA; (-) strand; PAM type: YTN; PAM sequence: TTA
acatttgtattttagagcaa

SEQ ID NO: 49221 - DNA, 20 bp, Artificial Sequence
  Description of Artificial Sequence: Synthetic oligonucleotide
  Target: SCNA; (-) strand; PAM type: YTN; PAM sequence: CTT
aacatttgtattttagagca

SEQ ID NO: 49222 - DNA, 20 bp, Artificial Sequence
  Description of Artificial Sequence: Synthetic oligonucleotide
  Target: SCNA; (-) strand; PAM type: YTN; PAM sequence: CTG
aagaatcatcttaacatttg

SEQ ID NO: 49223 - DNA, 20 bp, Artificial Sequence
  Description of Artificial Sequence: Synthetic oligonucleotide
  Target: SCNA; (-) strand; PAM type: YTN; PAM sequence: CTC
ctgaagaatcatcttaacat

SEQ ID NO: 49224 - DNA, 20 bp, Artificial Sequence
  Description of Artificial Sequence: Synthetic oligonucleotide
  Target: SCNA; (-) strand; PAM type: YTN; PAM sequence: TTA
tagtacaggtgatgagaagc

SEQ ID NO: 49225 - DNA, 20 bp, Artificial Sequence
  Description of Artificial Sequence: Synthetic oligonucleotide
  Target: SCNA; (-) strand; PAM type: YTN; PAM sequence: CTA
gtagcattatagtacaggtg

SEQ ID NO: 49226 - DNA, 20 bp, Artificial Sequence
  Description of Artificial Sequence: Synthetic oligonucleotide
  Target: SCNA; (-) strand; PAM type: YTN; PAM sequence: CTC
atgctagtagcattatagta

SEQ ID NO: 49227 - DNA, 20 bp, Artificial Sequence
  Description of Artificial Sequence: Synthetic oligonucleotide
  Target: SCNA; (-) strand; PAM type: YTN; PAM sequence: CTC
tcatgctagtagcattatag

SEQ ID NO: 49228 - DNA, 20 bp, Artificial Sequence
  Description of Artificial Sequence: Synthetic oligonucleotide
  Target: SCNA; (-) strand; PAM type: YTN; PAM sequence: CTA
ggtgggtgctctcatgctag

SEQ ID NO: 49229 - DNA, 20 bp, Artificial Sequence
  Description of Artificial Sequence: Synthetic oligonucleotide
  Target: SCNA; (-) strand; PAM type: YTN; PAM sequence: TTG
agataagaaggctaggtggg

SEQ ID NO: 49230 - DNA, 20 bp, Artificial Sequence
  Description of Artificial Sequence: Synthetic oligonucleotide
  Target: SCNA; (-) strand; PAM type: YTN; PAM sequence: CTT
gagataagaaggctaggtgg

SEQ ID NO: 49231 - DNA, 20 bp, Artificial Sequence
  Description of Artificial Sequence: Synthetic oligonucleotide
  Target: SCNA; (-) strand; PAM type: YTN; PAM sequence: TTA
aagaggggatatatgtacag

SEQ ID NO: 49232 - DNA, 20 bp, Artificial Sequence
  Description of Artificial Sequence: Synthetic oligonucleotide
  Target: SCNA; (-) strand; PAM type: YTN; PAM sequence: CTA
agggtgaattaaagagggga

SEQ ID NO: 49233 - DNA, 20 bp, Artificial Sequence
  Description of Artificial Sequence: Synthetic oligonucleotide
  Target: SCNA; (-) strand; PAM type: YTN; PAM sequence: CTG
tctaagggtgaattaaagag

SEQ ID NO: 49234 - DNA, 20 bp, Artificial Sequence
  Description of Artificial Sequence: Synthetic oligonucleotide
  Target: SCNA; (-) strand; PAM type: YTN; PAM sequence: CTC
tgtctaagggtgaattaaag

SEQ ID NO: 49235 - DNA, 20 bp, Artificial Sequence
  Description of Artificial Sequence: Synthetic oligonucleotide
  Target: SCNA; (-) strand; PAM type: YTN; PAM sequence: CTG
tctctgtctaagggtgaatt

SEQ ID NO: 49236 - DNA, 20 bp, Artificial Sequence
  Description of Artificial Sequence: Synthetic oligonucleotide
  Target: SCNA; (-) strand; PAM type: YTN; PAM sequence: CTC
tgtctctgtctaagggtgaa

SEQ ID NO: 49237 - DNA, 20 bp, Artificial Sequence
  Description of Artificial Sequence: Synthetic oligonucleotide
  Target: SCNA; (-) strand; PAM type: YTN; PAM sequence: CTC
tctgtctctgtctaagggtg

SEQ ID NO: 49238 - DNA, 20 bp, Artificial Sequence
  Description of Artificial Sequence: Synthetic oligonucleotide
  Target: SCNA; (-) strand; PAM type: YTN; PAM sequence: TTC
aggaaaagacaagatgcgtg

SEQ ID NO: 49239 - DNA, 20 bp, Artificial Sequence
  Description of Artificial Sequence: Synthetic oligonucleotide
  Target: SCNA; (-) strand; PAM type: YTN; PAM sequence: TTA
attcaggaaaagacaagatg

SEQ ID NO: 49240 - DNA, 20 bp, Artificial Sequence
  Description of Artificial Sequence: Synthetic oligonucleotide
  Target: SCNA; (-) strand; PAM type: YTN; PAM sequence: CTA
aagcatggggcaaaaaccac

SEQ ID NO: 49241 - DNA, 20 bp, Artificial Sequence
  Description of Artificial Sequence: Synthetic oligonucleotide
  Target: SCNA; (-) strand; PAM type: YTN; PAM sequence: TTC
acatgtgctaaagcatgggg

SEQ ID NO: 49242 - DNA, 20 bp, Artificial Sequence
  Description of Artificial Sequence: Synthetic oligonucleotide
  Target: SCNA; (-) strand; PAM type: YTN; PAM sequence: CTG
gacaaatggattcacatgtg

SEQ ID NO: 49243 - DNA, 20 bp, Artificial Sequence
  Description of Artificial Sequence: Synthetic oligonucleotide
  Target: SCNA; (-) strand; PAM type: YTN; PAM sequence: TTG
tacacaggtgagcaaaggca

SEQ ID NO: 49244 - DNA, 20 bp, Artificial Sequence
  Description of Artificial Sequence: Synthetic oligonucleotide
  Target: SCNA; (-) strand; PAM type: YTN; PAM sequence: CTT
gtacacaggtgagcaaaggc

SEQ ID NO: 49245 - DNA, 20 bp, Artificial Sequence
  Description of Artificial Sequence: Synthetic oligonucleotide
  Target: SCNA; (-) strand; PAM type: YTN; PAM sequence: TTC
ttgtacacaggtgagcaaag

SEQ ID NO: 49246 - DNA, 20 bp, Artificial Sequence
  Description of Artificial Sequence: Synthetic oligonucleotide
  Target: SCNA; (-) strand; PAM type: YTN; PAM sequence: CTT
cttgtacacaggtgagcaaa

SEQ ID NO: 49247 - DNA, 20 bp, Artificial Sequence
  Description of Artificial Sequence: Synthetic oligonucleotide
  Target: SCNA; (-) strand; PAM type: YTN; PAM sequence: CTC
ttcttgtacacaggtgagca

SEQ ID NO: 49248 - DNA, 20 bp, Artificial Sequence
  Description of Artificial Sequence: Synthetic oligonucleotide
  Target: SCNA; (-) strand; PAM type: YTN; PAM sequence: TTA
tgtagctcttcttgtacaca

SEQ ID NO: 49249 - DNA, 20 bp, Artificial Sequence
  Description of Artificial Sequence: Synthetic oligonucleotide
  Target: SCNA; (-) strand; PAM type: YTN; PAM sequence: CTG
ttatgtagctcttcttgtac

SEQ ID NO: 49250 - DNA, 20 bp, Artificial Sequence
  Description of Artificial Sequence: Synthetic oligonucleotide
  Target: SCNA; (-) strand; PAM type: YTN; PAM sequence: TTG
atctgttatgtagctcttct

SEQ ID NO: 49251 - DNA, 20 bp, Artificial Sequence
  Description of Artificial Sequence: Synthetic oligonucleotide
  Target: SCNA; (-) strand; PAM type: YTN; PAM sequence: TTT
gatctgttatgtagctcttc

SEQ ID NO: 49252 - DNA, 20 bp, Artificial Sequence
  Description of Artificial Sequence: Synthetic oligonucleotide
  Target: SCNA; (-) strand; PAM type: YTN; PAM sequence: TTT
tgatctgttatgtagctctt

SEQ ID NO: 49253 - DNA, 20 bp, Artificial Sequence
  Description of Artificial Sequence: Synthetic oligonucleotide
  Target: SCNA; (-) strand; PAM type: YTN; PAM sequence: CTT
ttgatctgttatgtagctct

SEQ ID NO: 49254 - DNA, 20 bp, Artificial Sequence
  Description of Artificial Sequence: Synthetic oligonucleotide
  Target: SCNA; (-) strand; PAM type: YTN; PAM sequence: TTC
cttttgatctgttatgtagc

SEQ ID NO: 49255 - DNA, 20 bp, Artificial Sequence
  Description of Artificial Sequence: Synthetic oligonucleotide
  Target: SCNA; (-) strand; PAM type: YTN; PAM sequence: TTG
atgttccttttgatctgtta

SEQ ID NO: 49256 - DNA, 20 bp, Artificial Sequence
  Description of Artificial Sequence: Synthetic oligonucleotide
  Target: SCNA; (-) strand; PAM type: YTN; PAM sequence: TTT
gatgttccttttgatctgtt

SEQ ID NO: 49257 - DNA, 20 bp, Artificial Sequence
  Description of Artificial Sequence: Synthetic oligonucleotide
  Target: SCNA; (-) strand; PAM type: YTN; PAM sequence: CTT
tgatgttccttttgatctgt

SEQ ID NO: 49258 - DNA, 20 bp, Artificial Sequence
  Description of Artificial Sequence: Synthetic oligonucleotide
  Target: SCNA; (-) strand; PAM type: YTN; PAM sequence: CTA
agaaccagcgcctttgatgt

SEQ ID NO: 49259 - DNA, 20 bp, Artificial Sequence
  Description of Artificial Sequence: Synthetic oligonucleotide
  Target: SCNA; (-) strand; PAM type: YTN; PAM sequence: CTC
taagaaccagcgcctttgat

SEQ ID NO: 49260 - DNA, 20 bp, Artificial Sequence
  Description of Artificial Sequence: Synthetic oligonucleotide
  Target: SCNA; (-) strand; PAM type: YTN; PAM sequence: TTG
gaggaatggacatgagactc

SEQ ID NO: 49261 - DNA, 20 bp, Artificial Sequence
  Description of Artificial Sequence: Synthetic oligonucleotide
  Target: SCNA; (-) strand; PAM type: YTN; PAM sequence: CTC
ataagaaacagtgcatccag

SEQ ID NO: 49262 - DNA, 20 bp, Artificial Sequence
  Description of Artificial Sequence: Synthetic oligonucleotide
  Target: SCNA; (-) strand; PAM type: YTN; PAM sequence: TTA
aggaagctcataagaaacag

SEQ ID NO: 49263 - DNA, 20 bp, Artificial Sequence
  Description of Artificial Sequence: Synthetic oligonucleotide
  Target: SCNA; (-) strand; PAM type: YTN; PAM sequence: TTT
aaggaagctcataagaaaca

SEQ ID NO: 49264 - DNA, 20 bp, Artificial Sequence
  Description of Artificial Sequence: Synthetic oligonucleotide
  Target: SCNA; (-) strand; PAM type: YTN; PAM sequence: CTG
gagatgcccatacgcagaaa

SEQ ID NO: 49265 - DNA, 20 bp, Artificial Sequence
  Description of Artificial Sequence: Synthetic oligonucleotide
  Target: SCNA; (-) strand; PAM type: YTN; PAM sequence: TTG
gcactggagatgcccatacg

SEQ ID NO: 49266 - DNA, 20 bp, Artificial Sequence
  Description of Artificial Sequence: Synthetic oligonucleotide
  Target: SCNA; (-) strand; PAM type: YTN; PAM sequence: TTT
ggcactggagatgcccatac

SEQ ID NO: 49267 - DNA, 20 bp, Artificial Sequence
  Description of Artificial Sequence: Synthetic oligonucleotide
  Target: SCNA; (-) strand; PAM type: YTN; PAM sequence: CTT
tggcactggagatgcccata

SEQ ID NO: 49268 - DNA, 20 bp, Artificial Sequence
  Description of Artificial Sequence: Synthetic oligonucleotide
  Target: SCNA; (-) strand; PAM type: YTN; PAM sequence: TTA
ctttggcactggagatgccc

SEQ ID NO: 49269 - DNA, 20 bp, Artificial Sequence
  Description of Artificial Sequence: Synthetic oligonucleotide
  Target: SCNA; (-) strand; PAM type: YTN; PAM sequence: CTT
actttggcactggagatgcc

SEQ ID NO: 49270 - DNA, 20 bp, Artificial Sequence
  Description of Artificial Sequence: Synthetic oligonucleotide
  Target: SCNA; (-) strand; PAM type: YTN; PAM sequence: CTC
ttactttggcactggagatg

SEQ ID NO: 49271 - DNA, 20 bp, Artificial Sequence
  Description of Artificial Sequence: Synthetic oligonucleotide
  Target: SCNA; (-) strand; PAM type: YTN; PAM sequence: CTC
ctcttactttggcactggag

SEQ ID NO: 49272 - DNA, 20 bp, Artificial Sequence
  Description of Artificial Sequence: Synthetic oligonucleotide
  Target: SCNA; (-) strand; PAM type: YTN; PAM sequence: CTG
cagaaatctcctcttacttt

SEQ ID NO: 49273 - DNA, 20 bp, Artificial Sequence
  Description of Artificial Sequence: Synthetic oligonucleotide
  Target: SCNA; (-) strand; PAM type: YTN; PAM sequence: TTC
tgcagaaatctcctcttact

SEQ ID NO: 49274 - DNA, 20 bp, Artificial Sequence
  Description of Artificial Sequence: Synthetic oligonucleotide
  Target: SCNA; (-) strand; PAM type: YTN; PAM sequence: CTG
aaattctgcagaaatctcct

SEQ ID NO: 49275 - DNA, 20 bp, Artificial Sequence
  Description of Artificial Sequence: Synthetic oligonucleotide
  Target: SCNA; (-) strand; PAM type: YTN; PAM sequence: TTC
ctgaaattctgcagaaatct

SEQ ID NO: 49276 - DNA, 20 bp, Artificial Sequence
  Description of Artificial Sequence: Synthetic oligonucleotide
  Target: SCNA; (-) strand; PAM type: YTN; PAM sequence: CTT
cctgaaattctgcagaaatc

SEQ ID NO: 49277 - DNA, 20 bp, Artificial Sequence
  Description of Artificial Sequence: Synthetic oligonucleotide
  Target: SCNA; (-) strand; PAM type: YTN; PAM sequence: TTA
acttcctgaaattctgcaga

SEQ ID NO: 49278 - DNA, 20 bp, Artificial Sequence
  Description of Artificial Sequence: Synthetic oligonucleotide
  Target: SCNA; (-) strand; PAM type: YTN; PAM sequence: CTA
ggatattaacttcctgaaat

SEQ ID NO: 49279 - DNA, 20 bp, Artificial Sequence
  Description of Artificial Sequence: Synthetic oligonucleotide
  Target: SCNA; (-) strand; PAM type: YTN; PAM sequence: CTG
ccactaggatattaacttcc

SEQ ID NO: 49280 - DNA, 20 bp, Artificial Sequence
  Description of Artificial Sequence: Synthetic oligonucleotide
  Target: SCNA; (-) strand; PAM type: YTN; PAM sequence: CTG
agagctgccactaggatatt

SEQ ID NO: 49281 - DNA, 20 bp, Artificial Sequence
  Description of Artificial Sequence: Synthetic oligonucleotide
  Target: SCNA; (-) strand; PAM type: YTN; PAM sequence: TTG
tctgagagctgccactagga

SEQ ID NO: 49282 - DNA, 20 bp, Artificial Sequence
  Description of Artificial Sequence: Synthetic oligonucleotide
  Target: SCNA; (-) strand; PAM type: YTN; PAM sequence: CTC
ccattgtctgagagctgcca

SEQ ID NO: 49283 - DNA, 20 bp, Artificial Sequence
  Description of Artificial Sequence: Synthetic oligonucleotide
  Target: SCNA; (-) strand; PAM type: YTN; PAM sequence: CTG
tctcccattgtctgagagct

SEQ ID NO: 49284 - DNA, 20 bp, Artificial Sequence
  Description of Artificial Sequence: Synthetic oligonucleotide
  Target: SCNA; (-) strand; PAM type: YTN; PAM sequence: CTC
ctgtctcccattgtctgaga

SEQ ID NO: 49285 - DNA, 20 bp, Artificial Sequence
  Description of Artificial Sequence: Synthetic oligonucleotide
  Target: SCNA; (-) strand; PAM type: YTN; PAM sequence: TTA
gctcctgtctcccattgtct

SEQ ID NO: 49286 - DNA, 20 bp, Artificial Sequence
  Description of Artificial Sequence: Synthetic oligonucleotide
  Target: SCNA; (-) strand; PAM type: YTN; PAM sequence: CTG
aaggacaaaacgaagaaaca

SEQ ID NO: 49287 - DNA, 20 bp, Artificial Sequence
  Description of Artificial Sequence: Synthetic oligonucleotide
  Target: SCNA; (-) strand; PAM type: YTN; PAM sequence: TTA
tcagcctgaaggacaaaacg

SEQ ID NO: 49288 - DNA, 20 bp, Artificial Sequence
  Description of Artificial Sequence: Synthetic oligonucleotide
  Target: SCNA; (-) strand; PAM type: YTN; PAM sequence: CTG
gattatcagcctgaaggaca

SEQ ID NO: 49289 - DNA, 20 bp, Artificial Sequence
  Description of Artificial Sequence: Synthetic oligonucleotide
  Target: SCNA; (-) strand; PAM type: YTN; PAM sequence: TTC
tggattatcagcctgaagga

SEQ ID NO: 49290 - DNA, 20 bp, Artificial Sequence
  Description of Artificial Sequence: Synthetic oligonucleotide
  Target: SCNA; (-) strand; PAM type: YTN; PAM sequence: TTT
ctggattatcagcctgaagg

SEQ ID NO: 49291 - DNA, 20 bp, Artificial Sequence
  Description of Artificial Sequence: Synthetic oligonucleotide
  Target: SCNA; (-) strand; PAM type: YTN; PAM sequence: TTT
tctggattatcagcctgaag

SEQ ID NO: 49292 - DNA, 20 bp, Artificial Sequence
  Description of Artificial Sequence: Synthetic oligonucleotide
  Target: SCNA; (-) strand; PAM type: YTN; PAM sequence: TTG
gttttctggattatcagcct

SEQ ID NO: 49293 - DNA, 20 bp, Artificial Sequence
  Description of Artificial Sequence: Synthetic oligonucleotide
  Target: SCNA; (-) strand; PAM type: YTN; PAM sequence: TTG
tgcagattggttttctggat

SEQ ID NO: 49294 - DNA, 20 bp, Artificial Sequence
  Description of Artificial Sequence: Synthetic oligonucleotide
  Target: SCNA; (-) strand; PAM type: YTN; PAM sequence: CTC
aagcattgtgcagattggtt

SEQ ID NO: 49295 - DNA, 20 bp, Artificial Sequence
  Description of Artificial Sequence: Synthetic oligonucleotide
  Target: SCNA; (-) strand; PAM type: YTN; PAM sequence: TTC
tcaagcattgtgcagattgg

SEQ ID NO: 49296 - DNA, 20 bp, Artificial Sequence
  Description of Artificial Sequence: Synthetic oligonucleotide
  Target: SCNA; (-) strand; PAM type: YTN; PAM sequence: CTT
ctcaagcattgtgcagattg

SEQ ID NO: 49297 - DNA, 20 bp, Artificial Sequence
  Description of Artificial Sequence: Synthetic oligonucleotide
  Target: SCNA; (-) strand; PAM type: YTN; PAM sequence: CTG
caccttctcaagcattgtgc

SEQ ID NO: 49298 - DNA, 20 bp, Artificial Sequence
  Description of Artificial Sequence: Synthetic oligonucleotide
  Target: SCNA; (-) strand; PAM type: YTN; PAM sequence: CTC
tgcaccttctcaagcattgt

SEQ ID NO: 49299 - DNA, 20 bp, Artificial Sequence
  Description of Artificial Sequence: Synthetic oligonucleotide
  Target: SCNA; (-) strand; PAM type: YTN; PAM sequence: TTC
tctgcaccttctcaagcatt

SEQ ID NO: 49300 - DNA, 20 bp, Artificial Sequence
  Description of Artificial Sequence: Synthetic oligonucleotide
  Target: SCNA; (-) strand; PAM type: YTN; PAM sequence: CTA
attctctgcaccttctcaag

SEQ ID NO: 49301 - DNA, 20 bp, Artificial Sequence
  Description of Artificial Sequence: Synthetic oligonucleotide
  Target: SCNA; (-) strand; PAM type: YTN; PAM sequence: CTC
taattctctgcaccttctca

SEQ ID NO: 49302 - DNA, 20 bp, Artificial Sequence
  Description of Artificial Sequence: Synthetic oligonucleotide
  Target: SCNA; (-) strand; PAM type: YTN; PAM sequence: TTG
agggcaatgagggctctaat

SEQ ID NO: 49303 - DNA, 20 bp, Artificial Sequence
  Description of Artificial Sequence: Synthetic oligonucleotide
  Target: SCNA; (-) strand; PAM type: YTN; PAM sequence: CTG
cattgagggcaatgagggct

SEQ ID NO: 49304 - DNA, 20 bp, Artificial Sequence
  Description of Artificial Sequence: Synthetic oligonucleotide
  Target: SCNA; (-) strand; PAM type: YTN; PAM sequence: CTC
gggaaacaggagcatgtgat

SEQ ID NO: 49305 - DNA, 20 bp, Artificial Sequence
  Description of Artificial Sequence: Synthetic oligonucleotide
  Target: SCNA; (-) strand; PAM type: YTN; PAM sequence: CTG
aaatatagtgtagggtgcaa

SEQ ID NO: 49306 - DNA, 20 bp, Artificial Sequence
  Description of Artificial Sequence: Synthetic oligonucleotide
  Target: SCNA; (-) strand; PAM type: YTN; PAM sequence: CTG
aaggaagagcctgaaatata

SEQ ID NO: 49307 - DNA, 20 bp, Artificial Sequence
  Description of Artificial Sequence: Synthetic oligonucleotide
  Target: SCNA; (-) strand; PAM type: YTN; PAM sequence: TTA
tcctgaaggaagagcctgaa

SEQ ID NO: 49308 - DNA, 20 bp, Artificial Sequence
  Description of Artificial Sequence: Synthetic oligonucleotide
  Target: SCNA; (-) strand; PAM type: YTN; PAM sequence: TTC
attatcctgaaggaagagcc

SEQ ID NO: 49309 - DNA, 20 bp, Artificial Sequence
  Description of Artificial Sequence: Synthetic oligonucleotide
  Target: SCNA; (-) strand; PAM type: YTN; PAM sequence: TTT
cattatcctgaaggaagagc

SEQ ID NO: 49310 - DNA, 20 bp, Artificial Sequence
  Description of Artificial Sequence: Synthetic oligonucleotide
  Target: SCNA; (-) strand; PAM type: YTN; PAM sequence: TTG
gtttcattatcctgaaggaa

SEQ ID NO: 49311 - DNA, 20 bp, Artificial Sequence
  Description of Artificial Sequence: Synthetic oligonucleotide
  Target: SCNA; (-) strand; PAM type: YTN; PAM sequence: CTT
ggtttcattatcctgaagga

SEQ ID NO: 49312 - DNA, 20 bp, Artificial Sequence
  Description of Artificial Sequence: Synthetic oligonucleotide
  Target: SCNA; (-) strand; PAM type: YTN; PAM sequence: TTA
gcttggtttcattatcctga

SEQ ID NO: 49313 - DNA, 20 bp, Artificial Sequence
  Description of Artificial Sequence: Synthetic oligonucleotide
  Target: SCNA; (-) strand; PAM type: YTN; PAM sequence: TTT
agcttggtttcattatcctg

SEQ ID NO: 49314 - DNA, 20 bp, Artificial Sequence
  Description of Artificial Sequence: Synthetic oligonucleotide
  Target: SCNA; (-) strand; PAM type: YTN; PAM sequence: CTT
tagcttggtttcattatcct

SEQ ID NO: 49315 - DNA, 20 bp, Artificial Sequence
  Description of Artificial Sequence: Synthetic oligonucleotide
  Target: SCNA; (-) strand; PAM type: YTN; PAM sequence: TTG
cctttagcttggtttcatta

SEQ ID NO: 49316 - DNA, 20 bp, Artificial Sequence
  Description of Artificial Sequence: Synthetic oligonucleotide
  Target: SCNA; (-) strand; PAM type: YTN; PAM sequence: TTT
gcctttagcttggtttcatt

SEQ ID NO: 49317 - DNA, 20 bp, Artificial Sequence
  Description of Artificial Sequence: Synthetic oligonucleotide
  Target: SCNA; (-) strand; PAM type: YTN; PAM sequence: TTT
tgcctttagcttggtttcat

SEQ ID NO: 49318 - DNA, 20 bp, Artificial Sequence
  Description of Artificial Sequence: Synthetic oligonucleotide
  Target: SCNA; (-) strand; PAM type: YTN; PAM sequence: TTG
gattttgcctttagcttggt

SEQ ID NO: 49319 - DNA, 20 bp, Artificial Sequence
  Description of Artificial Sequence: Synthetic oligonucleotide
  Target: SCNA; (-) strand; PAM type: YTN; PAM sequence: TTA
aacaaaagttggattttgcc

SEQ ID NO: 49320 - DNA, 20 bp, Artificial Sequence
  Description of Artificial Sequence: Synthetic oligonucleotide
  Target: SCNA; (-) strand; PAM type: YTN; PAM sequence: CTC
agaagcaggatgagttaaac

SEQ ID NO: 49321 - DNA, 20 bp, Artificial Sequence
  Description of Artificial Sequence: Synthetic oligonucleotide
  Target: SCNA; (-) strand; PAM type: YTN; PAM sequence: TTG
ggagctcagaagcaggatga

SEQ ID NO: 49322 - DNA, 20 bp, Artificial Sequence
  Description of Artificial Sequence: Synthetic oligonucleotide
  Target: SCNA; (-) strand; PAM type: YTN; PAM sequence: CTT
gggagctcagaagcaggatg

SEQ ID NO: 49323 - DNA, 20 bp, Artificial Sequence
  Description of Artificial Sequence: Synthetic oligonucleotide
  Target: SCNA; (-) strand; PAM type: YTN; PAM sequence: TTC
agggatcttgggagctcaga

SEQ ID NO: 49324 - DNA, 20 bp, Artificial Sequence
  Description of Artificial Sequence: Synthetic oligonucleotide
  Target: SCNA; (-) strand; PAM type: YTN; PAM sequence: TTA
tataagagaagtaggttcag

SEQ ID NO: 49325 - DNA, 20 bp, Artificial Sequence
  Description of Artificial Sequence: Synthetic oligonucleotide
  Target: SCNA; (-) strand; PAM type: YTN; PAM sequence: CTA
taataaattatataagagaa

SEQ ID NO: 49326 - DNA, 20 bp, Artificial Sequence
  Description of Artificial Sequence: Synthetic oligonucleotide
  Target: SCNA; (-) strand; PAM type: YTN; PAM sequence: TTC
tataataaattatataagag

SEQ ID NO: 49327 - DNA, 20 bp, Artificial Sequence
  Description of Artificial Sequence: Synthetic oligonucleotide
  Target: SCNA; (-) strand; PAM type: YTN; PAM sequence: TTT
ctataataaattatataaga

SEQ ID NO: 49328 - DNA, 20 bp, Artificial Sequence
  Description of Artificial Sequence: Synthetic oligonucleotide
  Target: SCNA; (-) strand; PAM type: YTN; PAM sequence: CTT
tctataataaattatataag

SEQ ID NO: 49329 - DNA, 20 bp, Artificial Sequence
  Description of Artificial Sequence: Synthetic oligonucleotide
  Target: SCNA; (-) strand; PAM type: YTN; PAM sequence: TTA
aataactttctataataaat

SEQ ID NO: 49330 - DNA, 20 bp, Artificial Sequence
  Description of Artificial Sequence: Synthetic oligonucleotide
  Target: SCNA; (-) strand; PAM type: YTN; PAM sequence: CTT
aaataactttctataataaa

SEQ ID NO: 49331 - DNA, 20 bp, Artificial Sequence
  Description of Artificial Sequence: Synthetic oligonucleotide
  Target: SCNA; (-) strand; PAM type: YTN; PAM sequence: CTC
atgcttaaataactttctat

SEQ ID NO: 49332 - DNA, 20 bp, Artificial Sequence
  Description of Artificial Sequence: Synthetic oligonucleotide
  Target: SCNA; (-) strand; PAM type: YTN; PAM sequence: CTA
gagaaatctcatgcttaaat

SEQ ID NO: 49333 - DNA, 20 bp, Artificial Sequence
  Description of Artificial Sequence: Synthetic oligonucleotide
  Target: SCNA; (-) strand; PAM type: YTN; PAM sequence: TTC
aaagataaactagagaaatc

SEQ ID NO: 49334 - DNA, 20 bp, Artificial Sequence
  Description of Artificial Sequence: Synthetic oligonucleotide
  Target: SCNA; (-) strand; PAM type: YTN; PAM sequence: TTG
acagtggagattcaaagata

SEQ ID NO: 49335 - DNA, 20 bp, Artificial Sequence
  Description of Artificial Sequence: Synthetic oligonucleotide
  Target: SCNA; (-) strand; PAM type: YTN; PAM sequence: CTA
tattgacagtggagattcaa

SEQ ID NO: 49336 - DNA, 20 bp, Artificial Sequence
  Description of Artificial Sequence: Synthetic oligonucleotide
  Target: SCNA; (-) strand; PAM type: YTN; PAM sequence: TTG
gccagagactatattgacag

SEQ ID NO: 49337 - DNA, 20 bp, Artificial Sequence
  Description of Artificial Sequence: Synthetic oligonucleotide
  Target: SCNA; (-) strand; PAM type: YTN; PAM sequence: TTC
attggccagagactatattg

SEQ ID NO: 49338 - DNA, 20 bp, Artificial Sequence
  Description of Artificial Sequence: Synthetic oligonucleotide
  Target: SCNA; (-) strand; PAM type: YTN; PAM sequence: TTT
cattggccagagactatatt

SEQ ID NO: 49339 - DNA, 20 bp, Artificial Sequence
  Description of Artificial Sequence: Synthetic oligonucleotide
  Target: SCNA; (-) strand; PAM type: YTN; PAM sequence: CTT
tcattggccagagactatat

SEQ ID NO: 49340 - DNA, 20 bp, Artificial Sequence
  Description of Artificial Sequence: Synthetic oligonucleotide
  Target: SCNA; (-) strand; PAM type: YTN; PAM sequence: CTG
aacagctttcattggccaga

SEQ ID NO: 49341 - DNA, 20 bp, Artificial Sequence
  Description of Artificial Sequence: Synthetic oligonucleotide
  Target: SCNA; (-) strand; PAM type: YTN; PAM sequence: TTA
actgaacagctttcattggc

SEQ ID NO: 49342 - DNA, 20 bp, Artificial Sequence
  Description of Artificial Sequence: Synthetic oligonucleotide
  Target: SCNA; (-) strand; PAM type: YTN; PAM sequence: TTG
aatcaccacacattaactga

SEQ ID NO: 49343 - DNA, 20 bp, Artificial Sequence
  Description of Artificial Sequence: Synthetic oligonucleotide
  Target: SCNA; (-) strand; PAM type: YTN; PAM sequence: TTA
ggagtgcatgtattgaatca

SEQ ID NO: 49344 - DNA, 20 bp, Artificial Sequence
  Description of Artificial Sequence: Synthetic oligonucleotide
  Target: SCNA; (-) strand; PAM type: YTN; PAM sequence: TTC
ataaatgagaattaggagtg

SEQ ID NO: 49345 - DNA, 20 bp, Artificial Sequence
  Description of Artificial Sequence: Synthetic oligonucleotide
  Target: SCNA; (-) strand; PAM type: YTN; PAM sequence: TTA
acaaaatgttcataaatgag

SEQ ID NO: 49346 - DNA, 20 bp, Artificial Sequence
  Description of Artificial Sequence: Synthetic oligonucleotide
  Target: SCNA; (-) strand; PAM type: YTN; PAM sequence: TTT
aacaaaatgttcataaatga

SEQ ID NO: 49347 - DNA, 20 bp, Artificial Sequence
  Description of Artificial Sequence: Synthetic oligonucleotide
  Target: SCNA; (-) strand; PAM type: YTN; PAM sequence: CTA
taggccacgatttaacaaaa

SEQ ID NO: 49348 - DNA, 20 bp, Artificial Sequence
  Description of Artificial Sequence: Synthetic oligonucleotide
  Target: SCNA; (-) strand; PAM type: YTN; PAM sequence: TTC
ctataggccacgatttaaca

SEQ ID NO: 49349 - DNA, 20 bp, Artificial Sequence
  Description of Artificial Sequence: Synthetic oligonucleotide
  Target: SCNA; (-) strand; PAM type: YTN; PAM sequence: TTT
cctataggccacgatttaac

SEQ ID NO: 49350 - DNA, 20 bp, Artificial Sequence
  Description of Artificial Sequence: Synthetic oligonucleotide
  Target: SCNA; (-) strand; PAM type: YTN; PAM sequence: CTA
tttcctataggccacgattt

SEQ ID NO: 49351 - DNA, 20 bp, Artificial Sequence
  Description of Artificial Sequence: Synthetic oligonucleotide
  Target: SCNA; (-) strand; PAM type: YTN; PAM sequence: TTA
catgcctatttcctataggc

SEQ ID NO: 49352 - DNA, 20 bp, Artificial Sequence
  Description of Artificial Sequence: Synthetic oligonucleotide
  Target: SCNA; (-) strand; PAM type: YTN; PAM sequence: TTT
acatgcctatttcctatagg

SEQ ID NO: 49353 - DNA, 20 bp, Artificial Sequence
  Description of Artificial Sequence: Synthetic oligonucleotide
  Target: SCNA; (-) strand; PAM type: YTN; PAM sequence: TTT
tacatgcctatttcctatag

SEQ ID NO: 49354 - DNA, 20 bp, Artificial Sequence
  Description of Artificial Sequence: Synthetic oligonucleotide
  Target: SCNA; (-) strand; PAM type: YTN; PAM sequence: TTA
caggtgcattttacatgcct

SEQ ID NO: 49355 - DNA, 20 bp, Artificial Sequence
  Description of Artificial Sequence: Synthetic oligonucleotide
  Target: SCNA; (-) strand; PAM type: YTN; PAM sequence: CTT
acaggtgcattttacatgcc

SEQ ID NO: 49356 - DNA, 20 bp, Artificial Sequence
  Description of Artificial Sequence: Synthetic oligonucleotide
  Target: SCNA; (-) strand; PAM type: YTN; PAM sequence: CTA
taaaacttacaggtgcattt

SEQ ID NO: 49357 - DNA, 20 bp, Artificial Sequence
  Description of Artificial Sequence: Synthetic oligonucleotide
  Target: SCNA; (-) strand; PAM type: YTN; PAM sequence: CTA
ggtgctataaaacttacagg

SEQ ID NO: 49358 - DNA, 20 bp, Artificial Sequence
  Description of Artificial Sequence: Synthetic oligonucleotide
  Target: SCNA; (-) strand; PAM type: YTN; PAM sequence: CTG
tactaggtgctataaaactt

SEQ ID NO: 49359 - DNA, 20 bp, Artificial Sequence
  Description of Artificial Sequence: Synthetic oligonucleotide
  Target: SCNA; (-) strand; PAM type: YTN; PAM sequence: CTC
tgtactaggtgctataaaac

SEQ ID NO: 49360 - DNA, 20 bp, Artificial Sequence
  Description of Artificial Sequence: Synthetic oligonucleotide
  Target: SCNA; (-) strand; PAM type: YTN; PAM sequence: CTG
tcactctgtactaggtgcta

SEQ ID NO: 49361 - DNA, 20 bp, Artificial Sequence
  Description of Artificial Sequence: Synthetic oligonucleotide
  Target: SCNA; (-) strand; PAM type: YTN; PAM sequence: TTG
agctgtcactctgtactagg

SEQ ID NO: 49362 - DNA, 20 bp, Artificial Sequence
  Description of Artificial Sequence: Synthetic oligonucleotide
  Target: SCNA; (-) strand; PAM type: YTN; PAM sequence: TTT
gagctgtcactctgtactag

SEQ ID NO: 49363 - DNA, 20 bp, Artificial Sequence
  Description of Artificial Sequence: Synthetic oligonucleotide
  Target: SCNA; (-) strand; PAM type: YTN; PAM sequence: TTT
tgagctgtcactctgtacta

SEQ ID NO: 49364 - DNA, 20 bp, Artificial Sequence
  Description of Artificial Sequence: Synthetic oligonucleotide
  Target: SCNA; (-) strand; PAM type: YTN; PAM sequence: CTG
caaatagttttgagctgtca

SEQ ID NO: 49365 - DNA, 20 bp, Artificial Sequence
  Description of Artificial Sequence: Synthetic oligonucleotide
  Target: SCNA; (-) strand; PAM type: YTN; PAM sequence: TTC
tgcaaatagttttgagctgt

SEQ ID NO: 49366 - DNA, 20 bp, Artificial Sequence
  Description of Artificial Sequence: Synthetic oligonucleotide
  Target: SCNA; (-) strand; PAM type: YTN; PAM sequence: TTC
attctgcaaatagttttgag

SEQ ID NO: 49367 - DNA, 20 bp, Artificial Sequence
  Description of Artificial Sequence: Synthetic oligonucleotide
  Target: SCNA; (-) strand; PAM type: YTN; PAM sequence: TTT
cattctgcaaatagttttga

SEQ ID NO: 49368 - DNA, 20 bp, Artificial Sequence
  Description of Artificial Sequence: Synthetic oligonucleotide
  Target: SCNA; (-) strand; PAM type: YTN; PAM sequence: CTT
tcattctgcaaatagttttg

SEQ ID NO: 49369 - DNA, 20 bp, Artificial Sequence
  Description of Artificial Sequence: Synthetic oligonucleotide
  Target: SCNA; (-) strand; PAM type: YTN; PAM sequence: TTC
tttcattctgcaaatagttt

SEQ ID NO: 49370 - DNA, 20 bp, Artificial Sequence
  Description of Artificial Sequence: Synthetic oligonucleotide
  Target: SCNA; (-) strand; PAM type: YTN; PAM sequence: TTT
ctttcattctgcaaatagtt

SEQ ID NO: 49371 - DNA, 20 bp, Artificial Sequence
  Description of Artificial Sequence: Synthetic oligonucleotide
  Target: SCNA; (-) strand; PAM type: YTN; PAM sequence: TTT
tctttcattctgcaaatagt

SEQ ID NO: 49372 - DNA, 20 bp, Artificial Sequence
  Description of Artificial Sequence: Synthetic oligonucleotide
  Target: SCNA; (-) strand; PAM type: YTN; PAM sequence: TTT
ttctttcattctgcaaatag

SEQ ID NO: 49373 - DNA, 20 bp, Artificial Sequence
  Description of Artificial Sequence: Synthetic oligonucleotide
  Target: SCNA; (-) strand; PAM type: YTN; PAM sequence: TTT
tttctttcattctgcaaata

SEQ ID NO: 49374 - DNA, 20 bp, Artificial Sequence
  Description of Artificial Sequence: Synthetic oligonucleotide
  Target: SCNA; (-) strand; PAM type: YTN; PAM sequence: CTT
ttttctttcattctgcaaat

SEQ ID NO: 49375 - DNA, 20 bp, Artificial Sequence
  Description of Artificial Sequence: Synthetic oligonucleotide
  Target: SCNA; (-) strand; PAM type: YTN; PAM sequence: TTC
cttttttctttcattctgca

SEQ ID NO: 49376 - DNA, 20 bp, Artificial Sequence
  Description of Artificial Sequence: Synthetic oligonucleotide
  Target: SCNA; (-) strand; PAM type: YTN; PAM sequence: CTT
ccttttttctttcattctgc

SEQ ID NO: 49377 - DNA, 20 bp, Artificial Sequence
  Description of Artificial Sequence: Synthetic oligonucleotide
  Target: SCNA; (-) strand; PAM type: YTN; PAM sequence: TTG
gagagtcaacttcctttttt

SEQ ID NO: 49378 - DNA, 20 bp, Artificial Sequence
  Description of Artificial Sequence: Synthetic oligonucleotide
  Target: SCNA; (-) strand; PAM type: YTN; PAM sequence: TTT
ggagagtcaacttccttttt

SEQ ID NO: 49379 - DNA, 20 bp, Artificial Sequence
  Description of Artificial Sequence: Synthetic oligonucleotide
  Target: SCNA; (-) strand; PAM type: YTN; PAM sequence: TTT
tggagagtcaacttcctttt

SEQ ID NO: 49380 - DNA, 20 bp, Artificial Sequence
  Description of Artificial Sequence: Synthetic oligonucleotide
  Target: SCNA; (-) strand; PAM type: YTN; PAM sequence: TTG
ttttggagagtcaacttcct

SEQ ID NO: 49381 - DNA, 20 bp, Artificial Sequence
  Description of Artificial Sequence: Synthetic oligonucleotide
  Target: SCNA; (-) strand; PAM type: YTN; PAM sequence: TTG
gccatgtgtattgttttgga

SEQ ID NO: 49382 - DNA, 20 bp, Artificial Sequence
  Description of Artificial Sequence: Synthetic oligonucleotide
  Target: SCNA; (-) strand; PAM type: YTN; PAM sequence: TTT
ggccatgtgtattgttttgg

SEQ ID NO: 49383 - DNA, 20 bp, Artificial Sequence
  Description of Artificial Sequence: Synthetic oligonucleotide
  Target: SCNA; (-) strand; PAM type: YTN; PAM sequence: CTT
tggccatgtgtattgttttg

SEQ ID NO: 49384 - DNA, 20 bp, Artificial Sequence
  Description of Artificial Sequence: Synthetic oligonucleotide
  Target: SCNA; (-) strand; PAM type: YTN; PAM sequence: TTC
caggctttggccatgtgtat

SEQ ID NO: 49385 - DNA, 20 bp, Artificial Sequence
  Description of Artificial Sequence: Synthetic oligonucleotide
  Target: SCNA; (-) strand; PAM type: YTN; PAM sequence: TTT
ccaggctttggccatgtgta

SEQ ID NO: 49386 - DNA, 20 bp, Artificial Sequence
  Description of Artificial Sequence: Synthetic oligonucleotide
  Target: SCNA; (-) strand; PAM type: YTN; PAM sequence: TTT
tccaggctttggccatgtgt

SEQ ID NO: 49387 - DNA, 20 bp, Artificial Sequence
  Description of Artificial Sequence: Synthetic oligonucleotide
  Target: SCNA; (-) strand; PAM type: YTN; PAM sequence: TTT
ttccaggctttggccatgtg

SEQ ID NO: 49388 - DNA, 20 bp, Artificial Sequence
  Description of Artificial Sequence: Synthetic oligonucleotide
  Target: SCNA; (-) strand; PAM type: YTN; PAM sequence: TTT
tttccaggctttggccatgt

SEQ ID NO: 49389 - DNA, 20 bp, Artificial Sequence
  Description of Artificial Sequence: Synthetic oligonucleotide
  Target: SCNA; (-) strand; PAM type: YTN; PAM sequence: CTT
ttttccaggctttggccatg

SEQ ID NO: 49390 - DNA, 20 bp, Artificial Sequence
  Description of Artificial Sequence: Synthetic oligonucleotide
  Target: SCNA; (-) strand; PAM type: YTN; PAM sequence: TTA
cttttttccaggctttggcc

SEQ ID NO: 49391 - DNA, 20 bp, Artificial Sequence
  Description of Artificial Sequence: Synthetic oligonucleotide
  Target: SCNA; (-) strand; PAM type: YTN; PAM sequence: CTA
ttacttttttccaggctttg

SEQ ID NO: 49392 - DNA, 20 bp, Artificial Sequence
  Description of Artificial Sequence: Synthetic oligonucleotide
  Target: SCNA; (-) strand; PAM type: YTN; PAM sequence: CTG
ggacactattacttttttcc

SEQ ID NO: 49393 - DNA, 20 bp, Artificial Sequence
  Description of Artificial Sequence: Synthetic oligonucleotide
  Target: SCNA; (-) strand; PAM type: YTN; PAM sequence: TTA
cactgggacactattacttt

SEQ ID NO: 49394 - DNA, 20 bp, Artificial Sequence
  Description of Artificial Sequence: Synthetic oligonucleotide
  Target: SCNA; (-) strand; PAM type: YTN; PAM sequence: CTA
gaagttacactgggacacta

SEQ ID NO: 49395 - DNA, 20 bp, Artificial Sequence
  Description of Artificial Sequence: Synthetic oligonucleotide
  Target: SCNA; (-) strand; PAM type: YTN; PAM sequence: CTC
ctagaagttacactgggaca

SEQ ID NO: 49396 - DNA, 20 bp, Artificial Sequence
  Description of Artificial Sequence: Synthetic oligonucleotide
  Target: SCNA; (-) strand; PAM type: YTN; PAM sequence: CTC
acacctcctagaagttacac

SEQ ID NO: 49397 - DNA, 20 bp, Artificial Sequence
  Description of Artificial Sequence: Synthetic oligonucleotide
  Target: SCNA; (-) strand; PAM type: YTN; PAM sequence: TTC
ctcacacctcctagaagtta

SEQ ID NO: 49398 - DNA, 20 bp, Artificial Sequence
  Description of Artificial Sequence: Synthetic oligonucleotide
  Target: SCNA; (-) strand; PAM type: YTN; PAM sequence: CTT
cctcacacctcctagaagtt

SEQ ID NO: 49399 - DNA, 20 bp, Artificial Sequence
  Description of Artificial Sequence: Synthetic oligonucleotide
  Target: SCNA; (-) strand; PAM type: YTN; PAM sequence: TTC
ttcctcacacctcctagaag

SEQ ID NO: 49400 - DNA, 20 bp, Artificial Sequence
  Description of Artificial Sequence: Synthetic oligonucleotide
  Target: SCNA; (-) strand; PAM type: YTN; PAM sequence: TTT
cttcctcacacctcctagaa

SEQ ID NO: 49401 - DNA, 20 bp, Artificial Sequence
  Description of Artificial Sequence: Synthetic oligonucleotide
  Target: SCNA; (-) strand; PAM type: YTN; PAM sequence: CTT
tcttcctcacacctcctaga

SEQ ID NO: 49402 - DNA, 20 bp, Artificial Sequence
  Description of Artificial Sequence: Synthetic oligonucleotide
  Target: SCNA; (-) strand; PAM type: YTN; PAM sequence: TTC
tttcttcctcacacctccta

SEQ ID NO: 49403 - DNA, 20 bp, Artificial Sequence
  Description of Artificial Sequence: Synthetic oligonucleotide
  Target: SCNA; (-) strand; PAM type: YTN; PAM sequence: TTT
ctttcttcctcacacctcct

SEQ ID NO: 49404 - DNA, 20 bp, Artificial Sequence
  Description of Artificial Sequence: Synthetic oligonucleotide
  Target: SCNA; (-) strand; PAM type: YTN; PAM sequence: TTT
tctttcttcctcacacctcc

SEQ ID NO: 49405 - DNA, 20 bp, Artificial Sequence
  Description of Artificial Sequence: Synthetic oligonucleotide
  Target: SCNA; (-) strand; PAM type: YTN; PAM sequence: TTT
ttctttcttcctcacacctc

SEQ ID NO: 49406 - DNA, 20 bp, Artificial Sequence
  Description of Artificial Sequence: Synthetic oligonucleotide
  Target: SCNA; (-) strand; PAM type: YTN; PAM sequence: TTG
tttttctttcttcctcacac

SEQ ID NO: 49407 - DNA, 20 bp, Artificial Sequence
  Description of Artificial Sequence: Synthetic oligonucleotide
  Target: SCNA; (-) strand; PAM type: YTN; PAM sequence: TTT
gtttttctttcttcctcaca

SEQ ID NO: 49408 - DNA, 20 bp, Artificial Sequence
  Description of Artificial Sequence: Synthetic oligonucleotide
  Target: SCNA; (-) strand; PAM type: YTN; PAM sequence: TTT
tgtttttctttcttcctcac

SEQ ID NO: 49409 - DNA, 20 bp, Artificial Sequence
  Description of Artificial Sequence: Synthetic oligonucleotide
  Target: SCNA; (-) strand; PAM type: YTN; PAM sequence: CTG
ggaaaaggtgccaattttgt

SEQ ID NO: 49410 - DNA, 20 bp, Artificial Sequence
  Description of Artificial Sequence: Synthetic oligonucleotide
  Target: SCNA; (-) strand; PAM type: YTN; PAM sequence: CTA
aagcctgggaaaaggtgcca

SEQ ID NO: 49411 - DNA, 20 bp, Artificial Sequence
  Description of Artificial Sequence: Synthetic oligonucleotide
  Target: SCNA; (-) strand; PAM type: YTN; PAM sequence: CTC
agtctaaagcctgggaaaag

SEQ ID NO: 49412 - DNA, 20 bp, Artificial Sequence
  Description of Artificial Sequence: Synthetic oligonucleotide
  Target: SCNA; (-) strand; PAM type: YTN; PAM sequence: CTC
tcagtctaaagcctgggaaa

SEQ ID NO: 49413 - DNA, 20 bp, Artificial Sequence
  Description of Artificial Sequence: Synthetic oligonucleotide
  Target: SCNA; (-) strand; PAM type: YTN; PAM sequence: TTA
atatctctcagtctaaagcc

SEQ ID NO: 49414 - DNA, 20 bp, Artificial Sequence
  Description of Artificial Sequence: Synthetic oligonucleotide
  Target: SCNA; (-) strand; PAM type: YTN; PAM sequence: CTC
caagttaatatctctcagtc

SEQ ID NO: 49415 - DNA, 20 bp, Artificial Sequence
  Description of Artificial Sequence: Synthetic oligonucleotide
  Target: SCNA; (-) strand; PAM type: YTN; PAM sequence: CTC
tccaagttaatatctctcag

SEQ ID NO: 49416 - DNA, 20 bp, Artificial Sequence
  Description of Artificial Sequence: Synthetic oligonucleotide
  Target: SCNA; (-) strand; PAM type: YTN; PAM sequence: TTC
ccctctccaagttaatatct

SEQ ID NO: 49417 - DNA, 20 bp, Artificial Sequence
  Description of Artificial Sequence: Synthetic oligonucleotide
  Target: SCNA; (-) strand; PAM type: YTN; PAM sequence: TTT
cccctctccaagttaatatc

SEQ ID NO: 49418 - DNA, 20 bp, Artificial Sequence
  Description of Artificial Sequence: Synthetic oligonucleotide
  Target: SCNA; (-) strand; PAM type: YTN; PAM sequence: CTT
tcccctctccaagttaatat

SEQ ID NO: 49419 - DNA, 20 bp, Artificial Sequence
  Description of Artificial Sequence: Synthetic oligonucleotide
  Target: SCNA; (-) strand; PAM type: YTN; PAM sequence: CTA
tgctttcccctctccaagtt

SEQ ID NO: 49420 - DNA, 20 bp, Artificial Sequence
  Description of Artificial Sequence: Synthetic oligonucleotide
  Target: SCNA; (-) strand; PAM type: YTN; PAM sequence: TTA
gactatgctttcccctctcc

SEQ ID NO: 49421 - DNA, 20 bp, Artificial Sequence
  Description of Artificial Sequence: Synthetic oligonucleotide
  Target: SCNA; (-) strand; PAM type: YTN; PAM sequence: TTT
agactatgctttcccctctc

SEQ ID NO: 49422 - DNA, 20 bp, Artificial Sequence
  Description of Artificial Sequence: Synthetic oligonucleotide
  Target: SCNA; (-) strand; PAM type: YTN; PAM sequence: CTT
tagactatgctttcccctct

SEQ ID NO: 49423 - DNA, 20 bp, Artificial Sequence
  Description of Artificial Sequence: Synthetic oligonucleotide
  Target: SCNA; (-) strand; PAM type: YTN; PAM sequence: CTC
tttagactatgctttcccct

SEQ ID NO: 49424 - DNA, 20 bp, Artificial Sequence
  Description of Artificial Sequence: Synthetic oligonucleotide
  Target: SCNA; (-) strand; PAM type: YTN; PAM sequence: TTC
tctttagactatgctttccc

SEQ ID NO: 49425 - DNA, 20 bp, Artificial Sequence
  Description of Artificial Sequence: Synthetic oligonucleotide
  Target: SCNA; (-) strand; PAM type: YTN; PAM sequence: TTT
ctctttagactatgctttcc

SEQ ID NO: 49426 - DNA, 20 bp, Artificial Sequence
  Description of Artificial Sequence: Synthetic oligonucleotide
  Target: SCNA; (-) strand; PAM type: YTN; PAM sequence: CTG
tttctctttagactatgctt

SEQ ID NO: 49427 - DNA, 20 bp, Artificial Sequence
  Description of Artificial Sequence: Synthetic oligonucleotide
  Target: SCNA; (-) strand; PAM type: YTN; PAM sequence: TTA
gccctgtttctctttagact

SEQ ID NO: 49428 - DNA, 20 bp, Artificial Sequence
  Description of Artificial Sequence: Synthetic oligonucleotide
  Target: SCNA; (-) strand; PAM type: YTN; PAM sequence: CTT
agccctgtttctctttagac

SEQ ID NO: 49429 - DNA, 20 bp, Artificial Sequence
  Description of Artificial Sequence: Synthetic oligonucleotide
  Target: SCNA; (-) strand; PAM type: YTN; PAM sequence: TTC
cttagccctgtttctcttta

SEQ ID NO: 49430 - DNA, 20 bp, Artificial Sequence
  Description of Artificial Sequence: Synthetic oligonucleotide
  Target: SCNA; (-) strand; PAM type: YTN; PAM sequence: CTT
ccttagccctgtttctcttt

SEQ ID NO: 49431 - DNA, 20 bp, Artificial Sequence
  Description of Artificial Sequence: Synthetic oligonucleotide
  Target: SCNA; (-) strand; PAM type: YTN; PAM sequence: CTG
agagatagtaaaagaaagtg

SEQ ID NO: 49432 - DNA, 20 bp, Artificial Sequence
  Description of Artificial Sequence: Synthetic oligonucleotide
  Target: SCNA; (-) strand; PAM type: YTN; PAM sequence: CTG
tctgagagatagtaaaagaa

SEQ ID NO: 49433 - DNA, 20 bp, Artificial Sequence
  Description of Artificial Sequence: Synthetic oligonucleotide
  Target: SCNA; (-) strand; PAM type: YTN; PAM sequence: TTG
caatctgtctgagagatagt

SEQ ID NO: 49434 - DNA, 20 bp, Artificial Sequence
  Description of Artificial Sequence: Synthetic oligonucleotide
  Target: SCNA; (-) strand; PAM type: YTN; PAM sequence: TTG
cattgcaatctgtctgagag

SEQ ID NO: 49435 - DNA, 20 bp, Artificial Sequence
  Description of Artificial Sequence: Synthetic oligonucleotide
  Target: SCNA; (-) strand; PAM type: YTN; PAM sequence: TTG
agattgcattgcaatctgtc

SEQ ID NO: 49436 - DNA, 20 bp, Artificial Sequence
  Description of Artificial Sequence: Synthetic oligonucleotide
  Target: SCNA; (-) strand; PAM type: YTN; PAM sequence: CTT
gagattgcattgcaatctgt

SEQ ID NO: 49437 - DNA, 20 bp, Artificial Sequence
  Description of Artificial Sequence: Synthetic oligonucleotide
  Target: SCNA; (-) strand; PAM type: YTN; PAM sequence: CTG
ccttgagattgcattgcaat

SEQ ID NO: 49438 - DNA, 20 bp, Artificial Sequence
  Description of Artificial Sequence: Synthetic oligonucleotide
  Target: SCNA; (-) strand; PAM type: YTN; PAM sequence: TTG
tccagtgtagtgctgccttg

SEQ ID NO: 49439 - DNA, 20 bp, Artificial Sequence
  Description of Artificial Sequence: Synthetic oligonucleotide
  Target: SCNA; (-) strand; PAM type: YTN; PAM sequence: CTT
gtccagtgtagtgctgcctt

SEQ ID NO: 49440 - DNA, 20 bp, Artificial Sequence
  Description of Artificial Sequence: Synthetic oligonucleotide
  Target: SCNA; (-) strand; PAM type: YTN; PAM sequence: CTA
gtaccttgtccagtgtagtg

SEQ ID NO: 49441 - DNA, 20 bp, Artificial Sequence
  Description of Artificial Sequence: Synthetic oligonucleotide
  Target: SCNA; (-) strand; PAM type: YTN; PAM sequence: CTC
aaaaaaaaaaaaaagaataa

SEQ ID NO: 49442 - DNA, 20 bp, Artificial Sequence
  Description of Artificial Sequence: Synthetic oligonucleotide
  Target: SCNA; (-) strand; PAM type: YTN; PAM sequence: CTG
tctcaaaaaaaaaaaaaaga

SEQ ID NO: 49443 - DNA, 20 bp, Artificial Sequence
  Description of Artificial Sequence: Synthetic oligonucleotide
  Target: SCNA; (-) strand; PAM type: YTN; PAM sequence: CTC
tgtctcaaaaaaaaaaaaaa

SEQ ID NO: 49444 - DNA, 20 bp, Artificial Sequence
  Description of Artificial Sequence: Synthetic oligonucleotide
  Target: SCNA; (-) strand; PAM type: YTN; PAM sequence: CTG
ggtgacatagtgagactctg

SEQ ID NO: 49445 - DNA, 20 bp, Artificial Sequence
  Description of Artificial Sequence: Synthetic oligonucleotide
  Target: SCNA; (-) strand; PAM type: YTN; PAM sequence: CTC
cagcctgggtgacatagtga

SEQ ID NO: 49446 - DNA, 20 bp, Artificial Sequence
  Description of Artificial Sequence: Synthetic oligonucleotide
  Target: SCNA; (-) strand; PAM type: YTN; PAM sequence: CTG
tgctccagcctgggtgacat

SEQ ID NO: 49447 - DNA, 20 bp, Artificial Sequence
  Description of Artificial Sequence: Synthetic oligonucleotide
  Target: SCNA; (-) strand; PAM type: YTN; PAM sequence: TTG
cagtgagccaagatagtgcc

SEQ ID NO: 49448 - DNA, 20 bp, Artificial Sequence
  Description of Artificial Sequence: Synthetic oligonucleotide
  Target: SCNA; (-) strand; PAM type: YTN; PAM sequence: TTG
aacccgggaggcagaggttg

SEQ ID NO: 49449 - DNA, 20 bp, Artificial Sequence
  Description of Artificial Sequence: Synthetic oligonucleotide
  Target: SCNA; (-) strand; PAM type: YTN; PAM sequence: CTT
gaacccgggaggcagaggtt

SEQ ID NO: 49450 - DNA, 20 bp, Artificial Sequence
  Description of Artificial Sequence: Synthetic oligonucleotide
  Target: SCNA; (-) strand; PAM type: YTN; PAM sequence: CTG
aggcaggagaatcacttgaa

SEQ ID NO: 49451 - DNA, 20 bp, Artificial Sequence
  Description of Artificial Sequence: Synthetic oligonucleotide
  Target: SCNA; (-) strand; PAM type: YTN; PAM sequence: TTG
ggaggctgaggcaggagaat

SEQ ID NO: 49452 - DNA, 20 bp, Artificial Sequence
  Description of Artificial Sequence: Synthetic oligonucleotide
  Target: SCNA; (-) strand; PAM type: YTN; PAM sequence: CTT
gggaggctgaggcaggagaa

SEQ ID NO: 49453 - DNA, 20 bp, Artificial Sequence
  Description of Artificial Sequence: Synthetic oligonucleotide
  Target: SCNA; (-) strand; PAM type: YTN; PAM sequence: CTA
cttgggaggctgaggcagga

SEQ ID NO: 49454 - DNA, 20 bp, Artificial Sequence
  Description of Artificial Sequence: Synthetic oligonucleotide
  Target: SCNA; (-) strand; PAM type: YTN; PAM sequence: TTC
ccagctacttgggaggctga

SEQ ID NO: 49455 - DNA, 20 bp, Artificial Sequence
  Description of Artificial Sequence: Synthetic oligonucleotide
  Target: SCNA; (-) strand; PAM type: YTN; PAM sequence: CTG
tattcccagctacttgggag

SEQ ID NO: 49456 - DNA, 20 bp, Artificial Sequence
  Description of Artificial Sequence: Synthetic oligonucleotide
  Target: SCNA; (-) strand; PAM type: YTN; PAM sequence: TTA
caaaaaaaatacaaaaaaaa

SEQ ID NO: 49457 - DNA, 20 bp, Artificial Sequence
  Description of Artificial Sequence: Synthetic oligonucleotide
  Target: SCNA; (-) strand; PAM type: YTN; PAM sequence: CTA
aaaatacaaaaaaaaattac

SEQ ID NO: 49458 - DNA, 20 bp, Artificial Sequence
  Description of Artificial Sequence: Synthetic oligonucleotide
  Target: SCNA; (-) strand; PAM type: YTN; PAM sequence: CTA
ctaaaaatacaaaaaaaaat

SEQ ID NO: 49459 - DNA, 20 bp, Artificial Sequence
  Description of Artificial Sequence: Synthetic oligonucleotide
  Target: SCNA; (-) strand; PAM type: YTN; PAM sequence: CTC
tactaaaaatacaaaaaaaa

SEQ ID NO: 49460 - DNA, 20 bp, Artificial Sequence
  Description of Artificial Sequence: Synthetic oligonucleotide
  Target: SCNA; (-) strand; PAM type: YTN; PAM sequence: CTG
tctctactaaaaatacaaaa

SEQ ID NO: 49461 - DNA, 20 bp, Artificial Sequence
  Description of Artificial Sequence: Synthetic oligonucleotide
  Target: SCNA; (-) strand; PAM type: YTN; PAM sequence: TTC
aagaccagccaggccaacat

SEQ ID NO: 49462 - DNA, 20 bp, Artificial Sequence
  Description of Artificial Sequence: Synthetic oligonucleotide
  Target: SCNA; (-) strand; PAM type: YTN; PAM sequence: TTA
ggagttcaagaccagccagg

SEQ ID NO: 49463 - DNA, 20 bp, Artificial Sequence
  Description of Artificial Sequence: Synthetic oligonucleotide
  Target: SCNA; (-) strand; PAM type: YTN; PAM sequence: TTG
tgggaggccaaggcgggtgg

SEQ ID NO: 49464 - DNA, 20 bp, Artificial Sequence
  Description of Artificial Sequence: Synthetic oligonucleotide
  Target: SCNA; (-) strand; PAM type: YTN; PAM sequence: TTT
gtgggaggccaaggcgggtg

SEQ ID NO: 49465 - DNA, 20 bp, Artificial Sequence
  Description of Artificial Sequence: Synthetic oligonucleotide
  Target: SCNA; (-) strand; PAM type: YTN; PAM sequence: CTT
tgtgggaggccaaggcgggt

SEQ ID NO: 49466 - DNA, 20 bp, Artificial Sequence
  Description of Artificial Sequence: Synthetic oligonucleotide
  Target: SCNA; (-) strand; PAM type: YTN; PAM sequence: CTG
taatcccagcactttgtggg

SEQ ID NO: 49467 - DNA, 20 bp, Artificial Sequence
  Description of Artificial Sequence: Synthetic oligonucleotide
  Target: SCNA; (-) strand; PAM type: YTN; PAM sequence: CTC
atgcctgtaatcccagcact

SEQ ID NO: 49468 - DNA, 20 bp, Artificial Sequence
  Description of Artificial Sequence: Synthetic oligonucleotide
  Target: SCNA; (-) strand; PAM type: YTN; PAM sequence: TTA
agaataaaaatatgggccgg

SEQ ID NO: 49469 - DNA, 20 bp, Artificial Sequence
  Description of Artificial Sequence: Synthetic oligonucleotide
  Target: SCNA; (-) strand; PAM type: YTN; PAM sequence: TTT
aagaataaaaatatgggccg

SEQ ID NO: 49470 - DNA, 20 bp, Artificial Sequence
  Description of Artificial Sequence: Synthetic oligonucleotide
  Target: SCNA; (-) strand; PAM type: YTN; PAM sequence: CTT
taagaataaaaatatgggcc

SEQ ID NO: 49471 - DNA, 20 bp, Artificial Sequence
  Description of Artificial Sequence: Synthetic oligonucleotide
  Target: SCNA; (-) strand; PAM type: YTN; PAM sequence: TTC
tttaagaataaaaatatggg

SEQ ID NO: 49472 - DNA, 20 bp, Artificial Sequence
  Description of Artificial Sequence: Synthetic oligonucleotide
  Target: SCNA; (-) strand; PAM type: YTN; PAM sequence: CTG
gttctttaagaataaaaata

SEQ ID NO: 49473 - DNA, 20 bp, Artificial Sequence
  Description of Artificial Sequence: Synthetic oligonucleotide
  Target: SCNA; (-) strand; PAM type: YTN; PAM sequence: TTC
tggttctttaagaataaaaa

SEQ ID NO: 49474 - DNA, 20 bp, Artificial Sequence
  Description of Artificial Sequence: Synthetic oligonucleotide
  Target: SCNA; (-) strand; PAM type: YTN; PAM sequence: CTA
gatgcatatagttctggttc

SEQ ID NO: 49475 - DNA, 20 bp, Artificial Sequence
  Description of Artificial Sequence: Synthetic oligonucleotide
  Target: SCNA; (-) strand; PAM type: YTN; PAM sequence: TTG
gggaacactagatgcatata

SEQ ID NO: 49476 - DNA, 20 bp, Artificial Sequence
  Description of Artificial Sequence: Synthetic oligonucleotide
  Target: SCNA; (-) strand; PAM type: YTN; PAM sequence: CTT
ggggaacactagatgcatat

SEQ ID NO: 49477 - DNA, 20 bp, Artificial Sequence
  Description of Artificial Sequence: Synthetic oligonucleotide
  Target: SCNA; (-) strand; PAM type: YTN; PAM sequence: TTA
aaagacaaagaagaaaactt

SEQ ID NO: 49478 - DNA, 20 bp, Artificial Sequence
  Description of Artificial Sequence: Synthetic oligonucleotide
  Target: SCNA; (-) strand; PAM type: YTN; PAM sequence: CTG
gaatgttaaaagacaaagaa

SEQ ID NO: 49479 - DNA, 20 bp, Artificial Sequence
  Description of Artificial Sequence: Synthetic oligonucleotide
  Target: SCNA; (-) strand; PAM type: YTN; PAM sequence: TTC
ctggaatgttaaaagacaaa

SEQ ID NO: 49480 - DNA, 20 bp, Artificial Sequence
  Description of Artificial Sequence: Synthetic oligonucleotide
  Target: SCNA; (-) strand; PAM type: YTN; PAM sequence: TTT
cctggaatgttaaaagacaa

SEQ ID NO: 49481 - DNA, 20 bp, Artificial Sequence
  Description of Artificial Sequence: Synthetic oligonucleotide
  Target: SCNA; (-) strand; PAM type: YTN; PAM sequence: TTT
tcctggaatgttaaaagaca

SEQ ID NO: 49482 - DNA, 20 bp, Artificial Sequence
  Description of Artificial Sequence: Synthetic oligonucleotide
  Target: SCNA; (-) strand; PAM type: YTN; PAM sequence: CTG
ttttcctggaatgttaaaag

SEQ ID NO: 49483 - DNA, 20 bp, Artificial Sequence
  Description of Artificial Sequence: Synthetic oligonucleotide
  Target: SCNA; (-) strand; PAM type: YTN; PAM sequence: CTC
aatatctgttttcctggaat

SEQ ID NO: 49484 - DNA, 20 bp, Artificial Sequence
  Description of Artificial Sequence: Synthetic oligonucleotide
  Target: SCNA; (-) strand; PAM type: YTN; PAM sequence: CTA
tgcatgatccagcaaaacac

SEQ ID NO: 49485 - DNA, 20 bp, Artificial Sequence
  Description of Artificial Sequence: Synthetic oligonucleotide
  Target: SCNA; (-) strand; PAM type: YTN; PAM sequence: CTA
cagcaaacagagggtcaaaa

SEQ ID NO: 49486 - DNA, 20 bp, Artificial Sequence
  Description of Artificial Sequence: Synthetic oligonucleotide
  Target: SCNA; (-) strand; PAM type: YTN; PAM sequence: CTG
gctacagcaaacagagggtc

SEQ ID NO: 49487 - DNA, 20 bp, Artificial Sequence
  Description of Artificial Sequence: Synthetic oligonucleotide
  Target: SCNA; (-) strand; PAM type: YTN; PAM sequence: TTA
tagggtgaccatgaatccaa

SEQ ID NO: 49488 - DNA, 20 bp, Artificial Sequence
  Description of Artificial Sequence: Synthetic oligonucleotide
  Target: SCNA; (-) strand; PAM type: YTN; PAM sequence: TTA
gtgaatatgttatagggtga

SEQ ID NO: 49489 - DNA, 20 bp, Artificial Sequence
  Description of Artificial Sequence: Synthetic oligonucleotide
  Target: SCNA; (-) strand; PAM type: YTN; PAM sequence: TTG
gtggattagtgaatatgtta

SEQ ID NO: 49490 - DNA, 20 bp, Artificial Sequence
  Description of Artificial Sequence: Synthetic oligonucleotide
  Target: SCNA; (-) strand; PAM type: YTN; PAM sequence: TTC
attggtggattagtgaatat

SEQ ID NO: 49491 - DNA, 20 bp, Artificial Sequence
  Description of Artificial Sequence: Synthetic oligonucleotide
  Target: SCNA; (-) strand; PAM type: YTN; PAM sequence: TTT
cattggtggattagtgaata

SEQ ID NO: 49492 - DNA, 20 bp, Artificial Sequence
  Description of Artificial Sequence: Synthetic oligonucleotide
  Target: SCNA; (-) strand; PAM type: YTN; PAM sequence: CTT
tcattggtggattagtgaat

SEQ ID NO: 49493 - DNA, 20 bp, Artificial Sequence
  Description of Artificial Sequence: Synthetic oligonucleotide
  Target: SCNA; (-) strand; PAM type: YTN; PAM sequence: TTA
cataacctttcattggtgga

SEQ ID NO: 49494 - DNA, 20 bp, Artificial Sequence
  Description of Artificial Sequence: Synthetic oligonucleotide
  Target: SCNA; (-) strand; PAM type: YTN; PAM sequence: TTA
tacattacataacctttcat

SEQ ID NO: 49495 - DNA, 20 bp, Artificial Sequence
  Description of Artificial Sequence: Synthetic oligonucleotide
  Target: SCNA; (-) strand; PAM type: YTN; PAM sequence: TTG
ttatacattacataaccttt

SEQ ID NO: 49496 - DNA, 20 bp, Artificial Sequence
  Description of Artificial Sequence: Synthetic oligonucleotide
  Target: SCNA; (-) strand; PAM type: YTN; PAM sequence: TTG
attgttatacattacataac

SEQ ID NO: 49497 - DNA, 20 bp, Artificial Sequence
  Description of Artificial Sequence: Synthetic oligonucleotide
  Target: SCNA; (-) strand; PAM type: YTN; PAM sequence: CTG
agttgattgttatacattac

SEQ ID NO: 49498 - DNA, 20 bp, Artificial Sequence
  Description of Artificial Sequence: Synthetic oligonucleotide
  Target: SCNA; (-) strand; PAM type: YTN; PAM sequence: TTA
gaaaaccctgagttgattgt

SEQ ID NO: 49499 - DNA, 20 bp, Artificial Sequence
  Description of Artificial Sequence: Synthetic oligonucleotide
  Target: SCNA; (-) strand; PAM type: YTN; PAM sequence: TTG
tcattagaaaaccctgagtt

SEQ ID NO: 49500 - DNA, 20 bp, Artificial Sequence
  Description of Artificial Sequence: Synthetic oligonucleotide
  Target: SCNA; (-) strand; PAM type: YTN; PAM sequence: TTG
ataaagattgtcattagaaa

SEQ ID NO: 49501 - DNA, 20 bp, Artificial Sequence
  Description of Artificial Sequence: Synthetic oligonucleotide
  Target: SCNA; (-) strand; PAM type: YTN; PAM sequence: TTA
tagaacattgataaagattg

SEQ ID NO: 49502 - DNA, 20 bp, Artificial Sequence
  Description of Artificial Sequence: Synthetic oligonucleotide
  Target: SCNA; (-) strand; PAM type: YTN; PAM sequence: CTT
atagaacattgataaagatt

SEQ ID NO: 49503 - DNA, 20 bp, Artificial Sequence
  Description of Artificial Sequence: Synthetic oligonucleotide
  Target: SCNA; (-) strand; PAM type: YTN; PAM sequence: TTC
aagcttatagaacattgata

SEQ ID NO: 49504 - DNA, 20 bp, Artificial Sequence
  Description of Artificial Sequence: Synthetic oligonucleotide
  Target: SCNA; (-) strand; PAM type: YTN; PAM sequence: TTT
caagcttatagaacattgat

SEQ ID NO: 49505 - DNA, 20 bp, Artificial Sequence
  Description of Artificial Sequence: Synthetic oligonucleotide
  Target: SCNA; (-) strand; PAM type: YTN; PAM sequence: TTT
tcaagcttatagaacattga

SEQ ID NO: 49506 - DNA, 20 bp, Artificial Sequence
  Description of Artificial Sequence: Synthetic oligonucleotide
  Target: SCNA; (-) strand; PAM type: YTN; PAM sequence: TTA
attttcaagcttatagaaca

SEQ ID NO: 49507 - DNA, 20 bp, Artificial Sequence
  Description of Artificial Sequence: Synthetic oligonucleotide
  Target: SCNA; (-) strand; PAM type: YTN; PAM sequence: TTA
aattaattttcaagcttata

SEQ ID NO: 49508 - DNA, 20 bp, Artificial Sequence
  Description of Artificial Sequence: Synthetic oligonucleotide
  Target: SCNA; (-) strand; PAM type: YTN; PAM sequence: TTA
ttaaattaattttcaagctt

SEQ ID NO: 49509 - DNA, 20 bp, Artificial Sequence
  Description of Artificial Sequence: Synthetic oligonucleotide
  Target: SCNA; (-) strand; PAM type: YTN; PAM sequence: TTA
tgcacaatggtataaattat

SEQ ID NO: 49510 - DNA, 20 bp, Artificial Sequence
  Description of Artificial Sequence: Synthetic oligonucleotide
  Target: SCNA; (-) strand; PAM type: YTN; PAM sequence: TTT
atgcacaatggtataaatta

SEQ ID NO: 49511 - DNA, 20 bp, Artificial Sequence
  Description of Artificial Sequence: Synthetic oligonucleotide
  Target: SCNA; (-) strand; PAM type: YTN; PAM sequence: TTT
tatgcacaatggtataaatt

SEQ ID NO: 49512 - DNA, 20 bp, Artificial Sequence
  Description of Artificial Sequence: Synthetic oligonucleotide
  Target: SCNA; (-) strand; PAM type: YTN; PAM sequence: TTA
tattttatgcacaatggtat

SEQ ID NO: 49513 - DNA, 20 bp, Artificial Sequence
  Description of Artificial Sequence: Synthetic oligonucleotide
  Target: SCNA; (-) strand; PAM type: YTN; PAM sequence: TTA
ttatattttatgcacaatgg

SEQ ID NO: 49514 - DNA, 20 bp, Artificial Sequence
  Description of Artificial Sequence: Synthetic oligonucleotide
  Target: SCNA; (-) strand; PAM type: YTN; PAM sequence: TTT
attatattttatgcacaatg

SEQ ID NO: 49515 - DNA, 20 bp, Artificial Sequence
  Description of Artificial Sequence: Synthetic oligonucleotide
  Target: SCNA; (-) strand; PAM type: YTN; PAM sequence: TTT
tattatattttatgcacaat

SEQ ID NO: 49516 - DNA, 20 bp, Artificial Sequence
  Description of Artificial Sequence: Synthetic oligonucleotide
  Target: SCNA; (-) strand; PAM type: YTN; PAM sequence: TTT
ttattatattttatgcacaa

SEQ ID NO: 49517 - DNA, 20 bp, Artificial Sequence
  Description of Artificial Sequence: Synthetic oligonucleotide
  Target: SCNA; (-) strand; PAM type: YTN; PAM sequence: TTA
aagtttttattatattttat

SEQ ID NO: 49518 - DNA, 20 bp, Artificial Sequence
  Description of Artificial Sequence: Synthetic oligonucleotide
  Target: SCNA; (-) strand; PAM type: YTN; PAM sequence: TTA
aattaaagtttttattatat

SEQ ID NO: 49519 - DNA, 20 bp, Artificial Sequence
  Description of Artificial Sequence: Synthetic oligonucleotide
  Target: SCNA; (-) strand; PAM type: YTN; PAM sequence: TTA
ttaaattaaagtttttatta

SEQ ID NO: 49520 - DNA, 20 bp, Artificial Sequence
  Description of Artificial Sequence: Synthetic oligonucleotide
  Target: SCNA; (-) strand; PAM type: YTN; PAM sequence: TTC
gttattaaattaaagttttt

SEQ ID NO: 49521 - DNA, 20 bp, Artificial Sequence
  Description of Artificial Sequence: Synthetic oligonucleotide
  Target: SCNA; (-) strand; PAM type: YTN; PAM sequence: TTT
cgttattaaattaaagtttt

SEQ ID NO: 49522 - DNA, 20 bp, Artificial Sequence
  Description of Artificial Sequence: Synthetic oligonucleotide
  Target: SCNA; (-) strand; PAM type: YTN; PAM sequence: TTG
taaaagtatgcatgaatttc

SEQ ID NO: 49523 - DNA, 20 bp, Artificial Sequence
  Description of Artificial Sequence: Synthetic oligonucleotide
  Target: SCNA; (-) strand; PAM type: YTN; PAM sequence: TTT
gtaaaagtatgcatgaattt

SEQ ID NO: 49524 - DNA, 20 bp, Artificial Sequence
  Description of Artificial Sequence: Synthetic oligonucleotide
  Target: SCNA; (-) strand; PAM type: YTN; PAM sequence: CTG
ataagtttgtaaaagtatgc

SEQ ID NO: 49525 - DNA, 20 bp, Artificial Sequence
  Description of Artificial Sequence: Synthetic oligonucleotide
  Target: SCNA; (-) strand; PAM type: YTN; PAM sequence: CTG
aatgactgataagtttgtaa

SEQ ID NO: 49526 - DNA, 20 bp, Artificial Sequence
  Description of Artificial Sequence: Synthetic oligonucleotide
  Target: SCNA; (-) strand; PAM type: YTN; PAM sequence: TTC
tgaatgactgataagtttgt

SEQ ID NO: 49527 - DNA, 20 bp, Artificial Sequence
  Description of Artificial Sequence: Synthetic oligonucleotide
  Target: SCNA; (-) strand; PAM type: YTN; PAM sequence: CTT
ctgaatgactgataagtttg

SEQ ID NO: 49528 - DNA, 20 bp, Artificial Sequence
  Description of Artificial Sequence: Synthetic oligonucleotide
  Target: SCNA; (-) strand; PAM type: YTN; PAM sequence: TTA
cttctgaatgactgataagt

SEQ ID NO: 49529 - DNA, 20 bp, Artificial Sequence
  Description of Artificial Sequence: Synthetic oligonucleotide
  Target: SCNA; (-) strand; PAM type: YTN; PAM sequence: TTT
acttctgaatgactgataag

SEQ ID NO: 49530 - DNA, 20 bp, Artificial Sequence
  Description of Artificial Sequence: Synthetic oligonucleotide
  Target: SCNA; (-) strand; PAM type: YTN; PAM sequence: CTG
aagtccacatttacttctga

SEQ ID NO: 49531 - DNA, 20 bp, Artificial Sequence
  Description of Artificial Sequence: Synthetic oligonucleotide
  Target: SCNA; (-) strand; PAM type: YTN; PAM sequence: CTG
cccacaaaactgaagtccac

SEQ ID NO: 49532 - DNA, 20 bp, Artificial Sequence
  Description of Artificial Sequence: Synthetic oligonucleotide
  Target: SCNA; (-) strand; PAM type: YTN; PAM sequence: CTG
taaacccctgcccacaaaac

SEQ ID NO: 49533 - DNA, 20 bp, Artificial Sequence
  Description of Artificial Sequence: Synthetic oligonucleotide
  Target: SCNA; (-) strand; PAM type: YTN; PAM sequence: TTC
tgtaaacccctgcccacaaa

SEQ ID NO: 49534 - DNA, 20 bp, Artificial Sequence
  Description of Artificial Sequence: Synthetic oligonucleotide
  Target: SCNA; (-) strand; PAM type: YTN; PAM sequence: CTT
ctgtaaacccctgcccacaa

SEQ ID NO: 49535 - DNA, 20 bp, Artificial Sequence
  Description of Artificial Sequence: Synthetic oligonucleotide
  Target: SCNA; (-) strand; PAM type: YTN; PAM sequence: TTA
gtaaaacatacttctgtaaa

SEQ ID NO: 49536 - DNA, 20 bp, Artificial Sequence
  Description of Artificial Sequence: Synthetic oligonucleotide
  Target: SCNA; (-) strand; PAM type: YTN; PAM sequence: TTT
agtaaaacatacttctgtaa

SEQ ID NO: 49537 - DNA, 20 bp, Artificial Sequence
  Description of Artificial Sequence: Synthetic oligonucleotide
  Target: SCNA; (-) strand; PAM type: YTN; PAM sequence: CTT
tagtaaaacatacttctgta

SEQ ID NO: 49538 - DNA, 20 bp, Artificial Sequence
  Description of Artificial Sequence: Synthetic oligonucleotide
  Target: SCNA; (-) strand; PAM type: YTN; PAM sequence: CTC
caaactttagtaaaacatac

SEQ ID NO: 49539 - DNA, 20 bp, Artificial Sequence
  Description of Artificial Sequence: Synthetic oligonucleotide
  Target: SCNA; (-) strand; PAM type: YTN; PAM sequence: TTC
tccaaactttagtaaaacat

SEQ ID NO: 49540 - DNA, 20 bp, Artificial Sequence
  Description of Artificial Sequence: Synthetic oligonucleotide
  Target: SCNA; (-) strand; PAM type: YTN; PAM sequence: TTT
ctccaaactttagtaaaaca

SEQ ID NO: 49541 - DNA, 20 bp, Artificial Sequence
  Description of Artificial Sequence: Synthetic oligonucleotide
  Target: SCNA; (-) strand; PAM type: YTN; PAM sequence: TTT
tctccaaactttagtaaaac

SEQ ID NO: 49542 - DNA, 20 bp, Artificial Sequence
  Description of Artificial Sequence: Synthetic oligonucleotide
  Target: SCNA; (-) strand; PAM type: YTN; PAM sequence: CTT
ttctccaaactttagtaaaa

SEQ ID NO: 49543 - DNA, 20 bp, Artificial Sequence
  Description of Artificial Sequence: Synthetic oligonucleotide
  Target: SCNA; (-) strand; PAM type: YTN; PAM sequence: CTG
atcttttctccaaactttag

SEQ ID NO: 49544 - DNA, 20 bp, Artificial Sequence
  Description of Artificial Sequence: Synthetic oligonucleotide
  Target: SCNA; (-) strand; PAM type: YTN; PAM sequence: TTA
tactgatcttttctccaaac

SEQ ID NO: 49545 - DNA, 20 bp, Artificial Sequence
  Description of Artificial Sequence: Synthetic oligonucleotide
  Target: SCNA; (-) strand; PAM type: YTN; PAM sequence: TTT
atactgatcttttctccaaa

SEQ ID NO: 49546 - DNA, 20 bp, Artificial Sequence
  Description of Artificial Sequence: Synthetic oligonucleotide
  Target: SCNA; (-) strand; PAM type: YTN; PAM sequence: TTT
tatactgatcttttctccaa

SEQ ID NO: 49547 - DNA, 20 bp, Artificial Sequence
  Description of Artificial Sequence: Synthetic oligonucleotide
  Target: SCNA; (-) strand; PAM type: YTN; PAM sequence: TTT
ttatactgatcttttctcca

SEQ ID NO: 49548 - DNA, 20 bp, Artificial Sequence
  Description of Artificial Sequence: Synthetic oligonucleotide
  Target: SCNA; (-) strand; PAM type: YTN; PAM sequence: TTC
atatttttatactgatcttt

SEQ ID NO: 49549 - DNA, 20 bp, Artificial Sequence
  Description of Artificial Sequence: Synthetic oligonucleotide
  Target: SCNA; (-) strand; PAM type: YTN; PAM sequence: TTT
catatttttatactgatctt

SEQ ID NO: 49550 - DNA, 20 bp, Artificial Sequence
  Description of Artificial Sequence: Synthetic oligonucleotide
  Target: SCNA; (-) strand; PAM type: YTN; PAM sequence: TTG
gtataatttcatatttttat

SEQ ID NO: 49551 - DNA, 20 bp, Artificial Sequence
  Description of Artificial Sequence: Synthetic oligonucleotide
  Target: SCNA; (-) strand; PAM type: YTN; PAM sequence: CTA
ttggtataatttcatatttt

SEQ ID NO: 49552 - DNA, 20 bp, Artificial Sequence
  Description of Artificial Sequence: Synthetic oligonucleotide
  Target: SCNA; (-) strand; PAM type: YTN; PAM sequence: CTA
ataatgctattggtataatt

SEQ ID NO: 49553 - DNA, 20 bp, Artificial Sequence
  Description of Artificial Sequence: Synthetic oligonucleotide
  Target: SCNA; (-) strand; PAM type: YTN; PAM sequence: TTC
taataatgctattggtataa

SEQ ID NO: 49554 - DNA, 20 bp, Artificial Sequence
  Description of Artificial Sequence: Synthetic oligonucleotide
  Target: SCNA; (-) strand; PAM type: YTN; PAM sequence: TTT
ctaataatgctattggtata

SEQ ID NO: 49555 - DNA, 20 bp, Artificial Sequence
  Description of Artificial Sequence: Synthetic oligonucleotide
  Target: SCNA; (-) strand; PAM type: YTN; PAM sequence: CTA
tttctaataatgctattggt

SEQ ID NO: 49556 - DNA, 20 bp, Artificial Sequence
  Description of Artificial Sequence: Synthetic oligonucleotide
  Target: SCNA; (-) strand; PAM type: YTN; PAM sequence: TTA
actatttctaataatgctat

SEQ ID NO: 49557 - DNA, 20 bp, Artificial Sequence
  Description of Artificial Sequence: Synthetic oligonucleotide
  Target: SCNA; (-) strand; PAM type: YTN; PAM sequence: TTT
aactatttctaataatgcta

SEQ ID NO: 49558 - DNA, 20 bp, Artificial Sequence
  Description of Artificial Sequence: Synthetic oligonucleotide
  Target: SCNA; (-) strand; PAM type: YTN; PAM sequence: TTT
taactatttctaataatgct

SEQ ID NO: 49559 - DNA, 20 bp, Artificial Sequence
  Description of Artificial Sequence: Synthetic oligonucleotide
  Target: SCNA; (-) strand; PAM type: YTN; PAM sequence: CTT
ttaactatttctaataatgc

SEQ ID NO: 49560 - DNA, 20 bp, Artificial Sequence
  Description of Artificial Sequence: Synthetic oligonucleotide
  Target: SCNA; (-) strand; PAM type: YTN; PAM sequence: TTG
tcttttaactatttctaata

SEQ ID NO: 49561 - DNA, 20 bp, Artificial Sequence
  Description of Artificial Sequence: Synthetic oligonucleotide
  Target: SCNA; (-) strand; PAM type: YTN; PAM sequence: TTT
gtcttttaactatttctaat

SEQ ID NO: 49562 - DNA, 20 bp, Artificial Sequence
  Description of Artificial Sequence: Synthetic oligonucleotide
  Target: SCNA; (-) strand; PAM type: YTN; PAM sequence: CTT
tgtcttttaactatttctaa

SEQ ID NO: 49563 - DNA, 20 bp, Artificial Sequence
  Description of Artificial Sequence: Synthetic oligonucleotide
  Target: SCNA; (-) strand; PAM type: YTN; PAM sequence: TTA
aactttgtcttttaactatt

SEQ ID NO: 49564 - DNA, 20 bp, Artificial Sequence
  Description of Artificial Sequence: Synthetic oligonucleotide
  Target: SCNA; (-) strand; PAM type: YTN; PAM sequence: CTT
aaactttgtcttttaactat

SEQ ID NO: 49565 - DNA, 20 bp, Artificial Sequence
  Description of Artificial Sequence: Synthetic oligonucleotide
  Target: SCNA; (-) strand; PAM type: YTN; PAM sequence: TTA
tgaaaatacttaaactttgt

SEQ ID NO: 49566 - DNA, 20 bp, Artificial Sequence
  Description of Artificial Sequence: Synthetic oligonucleotide
  Target: SCNA; (-) strand; PAM type: YTN; PAM sequence: TTA
aaaagtgatatgattatgaa

SEQ ID NO: 49567 - DNA, 20 bp, Artificial Sequence
  Description of Artificial Sequence: Synthetic oligonucleotide
  Target: SCNA; (-) strand; PAM type: YTN; PAM sequence: CTT
aaaaagtgatatgattatga

SEQ ID NO: 49568 - DNA, 20 bp, Artificial Sequence
  Description of Artificial Sequence: Synthetic oligonucleotide
  Target: SCNA; (-) strand; PAM type: YTN; PAM sequence: TTA
gtcacttaaaaagtgatatg

SEQ ID NO: 49569 - DNA, 20 bp, Artificial Sequence
  Description of Artificial Sequence: Synthetic oligonucleotide
  Target: SCNA; (-) strand; PAM type: YTN; PAM sequence: TTT
agtcacttaaaaagtgatat

SEQ ID NO: 49570 - DNA, 20 bp, Artificial Sequence
  Description of Artificial Sequence: Synthetic oligonucleotide
  Target: SCNA; (-) strand; PAM type: YTN; PAM sequence: TTA
gtagtttagtcacttaaaaa

SEQ ID NO: 49571 - DNA, 20 bp, Artificial Sequence
  Description of Artificial Sequence: Synthetic oligonucleotide
  Target: SCNA; (-) strand; PAM type: YTN; PAM sequence: TTT
agtagtttagtcacttaaaa

SEQ ID NO: 49572 - DNA, 20 bp, Artificial Sequence
  Description of Artificial Sequence: Synthetic oligonucleotide
  Target: SCNA; (-) strand; PAM type: YTN; PAM sequence: CTT
tagtagtttagtcacttaaa

SEQ ID NO: 49573 - DNA, 20 bp, Artificial Sequence
  Description of Artificial Sequence: Synthetic oligonucleotide
  Target: SCNA; (-) strand; PAM type: YTN; PAM sequence: TTC
tttagtagtttagtcactta

SEQ ID NO: 49574 - DNA, 20 bp, Artificial Sequence
  Description of Artificial Sequence: Synthetic oligonucleotide
  Target: SCNA; (-) strand; PAM type: YTN; PAM sequence: TTT
ctttagtagtttagtcactt

SEQ ID NO: 49575 - DNA, 20 bp, Artificial Sequence
  Description of Artificial Sequence: Synthetic oligonucleotide
  Target: SCNA; (-) strand; PAM type: YTN; PAM sequence: CTA
aatgtttctttagtagttta

SEQ ID NO: 49576 - DNA, 20 bp, Artificial Sequence
  Description of Artificial Sequence: Synthetic oligonucleotide
  Target: SCNA; (-) strand; PAM type: YTN; PAM sequence: TTA
actaaatgtttctttagtag

SEQ ID NO: 49577 - DNA, 20 bp, Artificial Sequence
  Description of Artificial Sequence: Synthetic oligonucleotide
  Target: SCNA; (-) strand; PAM type: YTN; PAM sequence: TTA
gagttaactaaatgtttctt

SEQ ID NO: 49578 - DNA, 20 bp, Artificial Sequence
  Description of Artificial Sequence: Synthetic oligonucleotide
  Target: SCNA; (-) strand; PAM type: YTN; PAM sequence: TTT
agagttaactaaatgtttct

SEQ ID NO: 49579 - DNA, 20 bp, Artificial Sequence
  Description of Artificial Sequence: Synthetic oligonucleotide
  Target: SCNA; (-) strand; PAM type: YTN; PAM sequence: TTT
tagagttaactaaatgtttc

SEQ ID NO: 49580 - DNA, 20 bp, Artificial Sequence
  Description of Artificial Sequence: Synthetic oligonucleotide
  Target: SCNA; (-) strand; PAM type: YTN; PAM sequence: TTA
caacaatattttagagttaa

SEQ ID NO: 49581 - DNA, 20 bp, Artificial Sequence
  Description of Artificial Sequence: Synthetic oligonucleotide
  Target: SCNA; (-) strand; PAM type: YTN; PAM sequence: TTT
acaacaatattttagagtta

SEQ ID NO: 49582 - DNA, 20 bp, Artificial Sequence
  Description of Artificial Sequence: Synthetic oligonucleotide
  Target: SCNA; (-) strand; PAM type: YTN; PAM sequence: TTT
tacaacaatattttagagtt

SEQ ID NO: 49583 - DNA, 20 bp, Artificial Sequence
  Description of Artificial Sequence: Synthetic oligonucleotide
  Target: SCNA; (-) strand; PAM type: YTN; PAM sequence: CTC
aaaacacatagaaattttac

SEQ ID NO: 49584 - DNA, 20 bp, Artificial Sequence
  Description of Artificial Sequence: Synthetic oligonucleotide
  Target: SCNA; (-) strand; PAM type: YTN; PAM sequence: TTC
ctcaaaacacatagaaattt

SEQ ID NO: 49585 - DNA, 20 bp, Artificial Sequence
  Description of Artificial Sequence: Synthetic oligonucleotide
  Target: SCNA; (-) strand; PAM type: YTN; PAM sequence: TTT
cctcaaaacacatagaaatt

SEQ ID NO: 49586 - DNA, 20 bp, Artificial Sequence
  Description of Artificial Sequence: Synthetic oligonucleotide
  Target: SCNA; (-) strand; PAM type: YTN; PAM sequence: TTT
tcctcaaaacacatagaaat

SEQ ID NO: 49587 - DNA, 20 bp, Artificial Sequence
  Description of Artificial Sequence: Synthetic oligonucleotide
  Target: SCNA; (-) strand; PAM type: YTN; PAM sequence: TTT
ttcctcaaaacacatagaaa

SEQ ID NO: 49588 - DNA, 20 bp, Artificial Sequence
  Description of Artificial Sequence: Synthetic oligonucleotide
  Target: SCNA; (-) strand; PAM type: YTN; PAM sequence: TTA
tgatggaataaaagtatttt

SEQ ID NO: 49589 - DNA, 20 bp, Artificial Sequence
  Description of Artificial Sequence: Synthetic oligonucleotide
  Target: SCNA; (-) strand; PAM type: YTN; PAM sequence: TTT
atgatggaataaaagtattt

SEQ ID NO: 49590 - DNA, 20 bp, Artificial Sequence
  Description of Artificial Sequence: Synthetic oligonucleotide
  Target: SCNA; (-) strand; PAM type: YTN; PAM sequence: TTT
tatgatggaataaaagtatt

SEQ ID NO: 49591 - DNA, 20 bp, Artificial Sequence
  Description of Artificial Sequence: Synthetic oligonucleotide
  Target: SCNA; (-) strand; PAM type: YTN; PAM sequence: TTG
aaaattttatgatggaataa

SEQ ID NO: 49592 - DNA, 20 bp, Artificial Sequence
  Description of Artificial Sequence: Synthetic oligonucleotide
  Target: SCNA; (-) strand; PAM type: YTN; PAM sequence: CTA
agttgaaaattttatgatgg

SEQ ID NO: 49593 - DNA, 20 bp, Artificial Sequence
  Description of Artificial Sequence: Synthetic oligonucleotide
  Target: SCNA; (-) strand; PAM type: YTN; PAM sequence: CTC
taagttgaaaattttatgat

SEQ ID NO: 49594 - DNA, 20 bp, Artificial Sequence
  Description of Artificial Sequence: Synthetic oligonucleotide
  Target: SCNA; (-) strand; PAM type: YTN; PAM sequence: TTC
tctaagttgaaaattttatg

SEQ ID NO: 49595 - DNA, 20 bp, Artificial Sequence
  Description of Artificial Sequence: Synthetic oligonucleotide
  Target: SCNA; (-) strand; PAM type: YTN; PAM sequence: TTT
ctctaagttgaaaattttat

SEQ ID NO: 49596 - DNA, 20 bp, Artificial Sequence
  Description of Artificial Sequence: Synthetic oligonucleotide
  Target: SCNA; (-) strand; PAM type: YTN; PAM sequence: TTG
tttctctaagttgaaaattt

SEQ ID NO: 49597 - DNA, 20 bp, Artificial Sequence
  Description of Artificial Sequence: Synthetic oligonucleotide
  Target: SCNA; (-) strand; PAM type: YTN; PAM sequence: TTC
aagtaaacaaattgtttctc

SEQ ID NO: 49598 - DNA, 20 bp, Artificial Sequence
  Description of Artificial Sequence: Synthetic oligonucleotide
  Target: SCNA; (-) strand; PAM type: YTN; PAM sequence: TTT
caagtaaacaaattgtttct

SEQ ID NO: 49599 - DNA, 20 bp, Artificial Sequence
  Description of Artificial Sequence: Synthetic oligonucleotide
  Target: SCNA; (-) strand; PAM type: YTN; PAM sequence: TTT
tcaagtaaacaaattgtttc

SEQ ID NO: 49600 - DNA, 20 bp, Artificial Sequence
  Description of Artificial Sequence: Synthetic oligonucleotide
  Target: SCNA; (-) strand; PAM type: YTN; PAM sequence: TTT
ttcaagtaaacaaattgttt

SEQ ID NO: 49601 - DNA, 20 bp, Artificial Sequence
  Description of Artificial Sequence: Synthetic oligonucleotide
  Target: SCNA; (-) strand; PAM type: YTN; PAM sequence: TTA
taatttttcaagtaaacaaa

SEQ ID NO: 49602 - DNA, 20 bp, Artificial Sequence
  Description of Artificial Sequence: Synthetic oligonucleotide
  Target: SCNA; (-) strand; PAM type: YTN; PAM sequence: TTG
aaaatattataatttttcaa

SEQ ID NO: 49603 - DNA, 20 bp, Artificial Sequence
  Description of Artificial Sequence: Synthetic oligonucleotide
  Target: SCNA; (-) strand; PAM type: YTN; PAM sequence: CTT
gaaaatattataatttttca

SEQ ID NO: 49604 - DNA, 20 bp, Artificial Sequence
  Description of Artificial Sequence: Synthetic oligonucleotide
  Target: SCNA; (-) strand; PAM type: YTN; PAM sequence: TTA
cttgaaaatattataatttt

SEQ ID NO: 49605 - DNA, 20 bp, Artificial Sequence
  Description of Artificial Sequence: Synthetic oligonucleotide
  Target: SCNA; (-) strand; PAM type: YTN; PAM sequence: TTT
acttgaaaatattataattt

SEQ ID NO: 49606 - DNA, 20 bp, Artificial Sequence
  Description of Artificial Sequence: Synthetic oligonucleotide
  Target: SCNA; (-) strand; PAM type: YTN; PAM sequence: TTT
tacttgaaaatattataatt

SEQ ID NO: 49607 - DNA, 20 bp, Artificial Sequence
  Description of Artificial Sequence: Synthetic oligonucleotide
  Target: SCNA; (-) strand; PAM type: YTN; PAM sequence: TTT
ttacttgaaaatattataat

SEQ ID NO: 49608 - DNA, 20 bp, Artificial Sequence
  Description of Artificial Sequence: Synthetic oligonucleotide
  Target: SCNA; (-) strand; PAM type: YTN; PAM sequence: TTG
tcagtataaccatttttact

SEQ ID NO: 49609 - DNA, 20 bp, Artificial Sequence
  Description of Artificial Sequence: Synthetic oligonucleotide
  Target: SCNA; (-) strand; PAM type: YTN; PAM sequence: TTA
ataaattgtcagtataacca

SEQ ID NO: 49610 - DNA, 20 bp, Artificial Sequence
  Description of Artificial Sequence: Synthetic oligonucleotide
  Target: SCNA; (-) strand; PAM type: YTN; PAM sequence: TTT
aataaattgtcagtataacc

SEQ ID NO: 49611 - DNA, 20 bp, Artificial Sequence
  Description of Artificial Sequence: Synthetic oligonucleotide
  Target: SCNA; (-) strand; PAM type: YTN; PAM sequence: TTT
taataaattgtcagtataac

SEQ ID NO: 49612 - DNA, 20 bp, Artificial Sequence
  Description of Artificial Sequence: Synthetic oligonucleotide
  Target: SCNA; (-) strand; PAM type: YTN; PAM sequence: TTA
tgttttaataaattgtcagt

SEQ ID NO: 49613 - DNA, 20 bp, Artificial Sequence
  Description of Artificial Sequence: Synthetic oligonucleotide
  Target: SCNA; (-) strand; PAM type: YTN; PAM sequence: TTT
atgttttaataaattgtcag

SEQ ID NO: 49614 - DNA, 20 bp, Artificial Sequence
  Description of Artificial Sequence: Synthetic oligonucleotide
  Target: SCNA; (-) strand; PAM type: YTN; PAM sequence: TTA
tttatgttttaataaattgt

SEQ ID NO: 49615 - DNA, 20 bp, Artificial Sequence
  Description of Artificial Sequence: Synthetic oligonucleotide
  Target: SCNA; (-) strand; PAM type: YTN; PAM sequence: TTT
atttatgttttaataaattg

SEQ ID NO: 49616 - DNA, 20 bp, Artificial Sequence
  Description of Artificial Sequence: Synthetic oligonucleotide
  Target: SCNA; (-) strand; PAM type: YTN; PAM sequence: TTT
tatttatgttttaataaatt

SEQ ID NO: 49617 - DNA, 20 bp, Artificial Sequence
  Description of Artificial Sequence: Synthetic oligonucleotide
  Target: SCNA; (-) strand; PAM type: YTN; PAM sequence: CTT
ttatttatgttttaataaat

SEQ ID NO: 49618 - DNA, 20 bp, Artificial Sequence
  Description of Artificial Sequence: Synthetic oligonucleotide
  Target: SCNA; (-) strand; PAM type: YTN; PAM sequence: CTA
atcatgtgtcaaagtgtggg

SEQ ID NO: 49619 - DNA, 20 bp, Artificial Sequence
  Description of Artificial Sequence: Synthetic oligonucleotide
  Target: SCNA; (-) strand; PAM type: YTN; PAM sequence: TTC
taatcatgtgtcaaagtgtg

SEQ ID NO: 49620 - DNA, 20 bp, Artificial Sequence
  Description of Artificial Sequence: Synthetic oligonucleotide
  Target: SCNA; (-) strand; PAM type: YTN; PAM sequence: TTT
ctaatcatgtgtcaaagtgt

SEQ ID NO: 49621 - DNA, 20 bp, Artificial Sequence
  Description of Artificial Sequence: Synthetic oligonucleotide
  Target: SCNA; (-) strand; PAM type: YTN; PAM sequence: TTT
tctaatcatgtgtcaaagtg

SEQ ID NO: 49622 - DNA, 20 bp, Artificial Sequence
  Description of Artificial Sequence: Synthetic oligonucleotide
  Target: SCNA; (-) strand; PAM type: YTN; PAM sequence: TTT
ttctaatcatgtgtcaaagt

SEQ ID NO: 49623 - DNA, 20 bp, Artificial Sequence
  Description of Artificial Sequence: Synthetic oligonucleotide
  Target: SCNA; (-) strand; PAM type: YTN; PAM sequence: TTT
tttctaatcatgtgtcaaag

SEQ ID NO: 49624 - DNA, 20 bp, Artificial Sequence
  Description of Artificial Sequence: Synthetic oligonucleotide
  Target: SCNA; (-) strand; PAM type: YTN; PAM sequence: TTT
ttttctaatcatgtgtcaaa

SEQ ID NO: 49625 - DNA, 20 bp, Artificial Sequence
  Description of Artificial Sequence: Synthetic oligonucleotide
  Target: SCNA; (-) strand; PAM type: YTN; PAM sequence: TTT
tttttctaatcatgtgtcaa

SEQ ID NO: 49626 - DNA, 20 bp, Artificial Sequence
  Description of Artificial Sequence: Synthetic oligonucleotide
  Target: SCNA; (-) strand; PAM type: YTN; PAM sequence: TTT
ttttttctaatcatgtgtca

SEQ ID NO: 49627 - DNA, 20 bp, Artificial Sequence
  Description of Artificial Sequence: Synthetic oligonucleotide
  Target: SCNA; (-) strand; PAM type: YTN; PAM sequence: CTT
tttttttctaatcatgtgtc

SEQ ID NO: 49628 - DNA, 20 bp, Artificial Sequence
  Description of Artificial Sequence: Synthetic oligonucleotide
  Target: SCNA; (-) strand; PAM type: YTN; PAM sequence: CTG
cctttttttttctaatcatg

SEQ ID NO: 49629 - DNA, 20 bp, Artificial Sequence
  Description of Artificial Sequence: Synthetic oligonucleotide
  Target: SCNA; (-) strand; PAM type: YTN; PAM sequence: TTA
ctgcctttttttttctaatc

SEQ ID NO: 49630 - DNA, 20 bp, Artificial Sequence
  Description of Artificial Sequence: Synthetic oligonucleotide
  Target: SCNA; (-) strand; PAM type: YTN; PAM sequence: CTT
actgcctttttttttctaat

SEQ ID NO: 49631 - DNA, 20 bp, Artificial Sequence
  Description of Artificial Sequence: Synthetic oligonucleotide
  Target: SCNA; (-) strand; PAM type: YTN; PAM sequence: CTG
tatgaaaatcttactgcctt

SEQ ID NO: 49632 - DNA, 20 bp, Artificial Sequence
  Description of Artificial Sequence: Synthetic oligonucleotide
  Target: SCNA; (-) strand; PAM type: YTN; PAM sequence: TTC
tgtatgaaaatcttactgcc

SEQ ID NO: 49633 - DNA, 20 bp, Artificial Sequence
  Description of Artificial Sequence: Synthetic oligonucleotide
  Target: SCNA; (-) strand; PAM type: YTN; PAM sequence: TTA
accccagaattctgtatgaa

SEQ ID NO: 49634 - DNA, 20 bp, Artificial Sequence
  Description of Artificial Sequence: Synthetic oligonucleotide
  Target: SCNA; (-) strand; PAM type: YTN; PAM sequence: CTT
aaccccagaattctgtatga

SEQ ID NO: 49635 - DNA, 20 bp, Artificial Sequence
  Description of Artificial Sequence: Synthetic oligonucleotide
  Target: SCNA; (-) strand; PAM type: YTN; PAM sequence: CTA
cttaaccccagaattctgta

SEQ ID NO: 49636 - DNA, 20 bp, Artificial Sequence
  Description of Artificial Sequence: Synthetic oligonucleotide
  Target: SCNA; (-) strand; PAM type: YTN; PAM sequence: TTC
tacttaaccccagaattctg

SEQ ID NO: 49637 - DNA, 20 bp, Artificial Sequence
  Description of Artificial Sequence: Synthetic oligonucleotide
  Target: SCNA; (-) strand; PAM type: YTN; PAM sequence: TTA
gaccagcaaacacaagtgaa

SEQ ID NO: 49638 - DNA, 20 bp, Artificial Sequence
  Description of Artificial Sequence: Synthetic oligonucleotide
  Target: SCNA; (-) strand; PAM type: YTN; PAM sequence: CTT
agaccagcaaacacaagtga

SEQ ID NO: 49639 - DNA, 20 bp, Artificial Sequence
  Description of Artificial Sequence: Synthetic oligonucleotide
  Target: SCNA; (-) strand; PAM type: YTN; PAM sequence: TTG
catcttagaccagcaaacac

SEQ ID NO: 49640 - DNA, 20 bp, Artificial Sequence
  Description of Artificial Sequence: Synthetic oligonucleotide
  Target: SCNA; (-) strand; PAM type: YTN; PAM sequence: TTC
cattgcatcttagaccagca

SEQ ID NO: 49641 - DNA, 20 bp, Artificial Sequence
  Description of Artificial Sequence: Synthetic oligonucleotide
  Target: SCNA; (-) strand; PAM type: YTN; PAM sequence: CTC
caaattccattgcatcttag

SEQ ID NO: 49642 - DNA, 20 bp, Artificial Sequence
  Description of Artificial Sequence: Synthetic oligonucleotide
  Target: SCNA; (-) strand; PAM type: YTN; PAM sequence: TTG
cctccaaattccattgcatc

SEQ ID NO: 49643 - DNA, 20 bp, Artificial Sequence
  Description of Artificial Sequence: Synthetic oligonucleotide
  Target: SCNA; (-) strand; PAM type: YTN; PAM sequence: TTG
atagaatccagccccattgc

SEQ ID NO: 49644 - DNA, 20 bp, Artificial Sequence
  Description of Artificial Sequence: Synthetic oligonucleotide
  Target: SCNA; (-) strand; PAM type: YTN; PAM sequence: TTT
gatagaatccagccccattg

SEQ ID NO: 49645 - DNA, 20 bp, Artificial Sequence
  Description of Artificial Sequence: Synthetic oligonucleotide
  Target: SCNA; (-) strand; PAM type: YTN; PAM sequence: CTG
atttgatagaatccagcccc

SEQ ID NO: 49646 - DNA, 20 bp, Artificial Sequence
  Description of Artificial Sequence: Synthetic oligonucleotide
  Target: SCNA; (-) strand; PAM type: YTN; PAM sequence: TTC
cgtgtgtctgatttgataga

SEQ ID NO: 49647 - DNA, 20 bp, Artificial Sequence
  Description of Artificial Sequence: Synthetic oligonucleotide
  Target: SCNA; (-) strand; PAM type: YTN; PAM sequence: CTT
ccgtgtgtctgatttgatag

SEQ ID NO: 49648 - DNA, 20 bp, Artificial Sequence
  Description of Artificial Sequence: Synthetic oligonucleotide
  Target: SCNA; (-) strand; PAM type: YTN; PAM sequence: CTC
ttccgtgtgtctgatttgat

SEQ ID NO: 49649 - DNA, 20 bp, Artificial Sequence
  Description of Artificial Sequence: Synthetic oligonucleotide
  Target: SCNA; (-) strand; PAM type: YTN; PAM sequence: TTA
taacctcttccgtgtgtctg

SEQ ID NO: 49650 - DNA, 20 bp, Artificial Sequence
  Description of Artificial Sequence: Synthetic oligonucleotide
  Target: SCNA; (-) strand; PAM type: YTN; PAM sequence: CTC
acgttataacctcttccgtg

SEQ ID NO: 49651 - DNA, 20 bp, Artificial Sequence
  Description of Artificial Sequence: Synthetic oligonucleotide
  Target: SCNA; (-) strand; PAM type: YTN; PAM sequence: TTC
tcacgttataacctcttccg

SEQ ID NO: 49652 - DNA, 20 bp, Artificial Sequence
  Description of Artificial Sequence: Synthetic oligonucleotide
  Target: SCNA; (-) strand; PAM type: YTN; PAM sequence: CTG
agaaaatgaaaaaatataaa

SEQ ID NO: 49653 - DNA, 20 bp, Artificial Sequence
  Description of Artificial Sequence: Synthetic oligonucleotide
  Target: SCNA; (-) strand; PAM type: YTN; PAM sequence: TTC
aagtgtgggctgagaaaatg

SEQ ID NO: 49654 - DNA, 20 bp, Artificial Sequence
  Description of Artificial Sequence: Synthetic oligonucleotide
  Target: SCNA; (-) strand; PAM type: YTN; PAM sequence: TTT
caagtgtgggctgagaaaat

SEQ ID NO: 49655 - DNA, 20 bp, Artificial Sequence
  Description of Artificial Sequence: Synthetic oligonucleotide
  Target: SCNA; (-) strand; PAM type: YTN; PAM sequence: TTA
tttcaagtgtgggctgagaa

SEQ ID NO: 49656 - DNA, 20 bp, Artificial Sequence
  Description of Artificial Sequence: Synthetic oligonucleotide
  Target: SCNA; (-) strand; PAM type: YTN; PAM sequence: TTG
ttatttcaagtgtgggctga

SEQ ID NO: 49657 - DNA, 20 bp, Artificial Sequence
  Description of Artificial Sequence: Synthetic oligonucleotide
  Target: SCNA; (-) strand; PAM type: YTN; PAM sequence: TTG
caaattgttatttcaagtgt

SEQ ID NO: 49658 - DNA, 20 bp, Artificial Sequence
  Description of Artificial Sequence: Synthetic oligonucleotide
  Target: SCNA; (-) strand; PAM type: YTN; PAM sequence: CTT
gcaaattgttatttcaagtg

SEQ ID NO: 49659 - DNA, 20 bp, Artificial Sequence
  Description of Artificial Sequence: Synthetic oligonucleotide
  Target: SCNA; (-) strand; PAM type: YTN; PAM sequence: CTC
ttgcaaattgttatttcaag

SEQ ID NO: 49660 - DNA, 20 bp, Artificial Sequence
  Description of Artificial Sequence: Synthetic oligonucleotide
  Target: SCNA; (-) strand; PAM type: YTN; PAM sequence: TTG
agcaaagcaaaactcttgca

SEQ ID NO: 49661 - DNA, 20 bp, Artificial Sequence
  Description of Artificial Sequence: Synthetic oligonucleotide
  Target: SCNA; (-) strand; PAM type: YTN; PAM sequence: CTA
atattgagcaaagcaaaact

SEQ ID NO: 49662 - DNA, 20 bp, Artificial Sequence
  Description of Artificial Sequence: Synthetic oligonucleotide
  Target: SCNA; (-) strand; PAM type: YTN; PAM sequence: CTA
atcaggcctaatattgagca

SEQ ID NO: 49663 - DNA, 20 bp, Artificial Sequence
  Description of Artificial Sequence: Synthetic oligonucleotide
  Target: SCNA; (-) strand; PAM type: YTN; PAM sequence: TTA
gctaatcaggcctaatattg

SEQ ID NO: 49664 - DNA, 20 bp, Artificial Sequence
  Description of Artificial Sequence: Synthetic oligonucleotide
  Target: SCNA; (-) strand; PAM type: YTN; PAM sequence: TTT
agctaatcaggcctaatatt

SEQ ID NO: 49665 - DNA, 20 bp, Artificial Sequence
  Description of Artificial Sequence: Synthetic oligonucleotide
  Target: SCNA; (-) strand; PAM type: YTN; PAM sequence: TTT
tagctaatcaggcctaatat

SEQ ID NO: 49666 - DNA, 20 bp, Artificial Sequence
  Description of Artificial Sequence: Synthetic oligonucleotide
  Target: SCNA; (-) strand; PAM type: YTN; PAM sequence: TTG
agcattttagctaatcaggc

SEQ ID NO: 49667 - DNA, 20 bp, Artificial Sequence
  Description of Artificial Sequence: Synthetic oligonucleotide
  Target: SCNA; (-) strand; PAM type: YTN; PAM sequence: TTT
gagcattttagctaatcagg

SEQ ID NO: 49668 - DNA, 20 bp, Artificial Sequence
  Description of Artificial Sequence: Synthetic oligonucleotide
  Target: SCNA; (-) strand; PAM type: YTN; PAM sequence: TTG
aatggaaatttgagcatttt

SEQ ID NO: 49669 - DNA, 20 bp, Artificial Sequence
  Description of Artificial Sequence: Synthetic oligonucleotide
  Target: SCNA; (-) strand; PAM type: YTN; PAM sequence: TTA
aggattgaatggaaatttga

SEQ ID NO: 49670 - DNA, 20 bp, Artificial Sequence
  Description of Artificial Sequence: Synthetic oligonucleotide
  Target: SCNA; (-) strand; PAM type: YTN; PAM sequence: TTT
aaggattgaatggaaatttg

SEQ ID NO: 49671 - DNA, 20 bp, Artificial Sequence
  Description of Artificial Sequence: Synthetic oligonucleotide
  Target: SCNA; (-) strand; PAM type: YTN; PAM sequence: TTT
taaggattgaatggaaattt

SEQ ID NO: 49672 - DNA, 20 bp, Artificial Sequence
  Description of Artificial Sequence: Synthetic oligonucleotide
  Target: SCNA; (-) strand; PAM type: YTN; PAM sequence: TTT
ttaaggattgaatggaaatt

SEQ ID NO: 49673 - DNA, 20 bp, Artificial Sequence
  Description of Artificial Sequence: Synthetic oligonucleotide
  Target: SCNA; (-) strand; PAM type: YTN; PAM sequence: CTG
tttttaaggattgaatggaa

SEQ ID NO: 49674 - DNA, 20 bp, Artificial Sequence
  Description of Artificial Sequence: Synthetic oligonucleotide
  Target: SCNA; (-) strand; PAM type: YTN; PAM sequence: CTA
agtgtggatctgtttttaag

SEQ ID NO: 49675 - DNA, 20 bp, Artificial Sequence
  Description of Artificial Sequence: Synthetic oligonucleotide
  Target: SCNA; (-) strand; PAM type: YTN; PAM sequence: TTG
ggtgtgaaagggcgagggag

SEQ ID NO: 49676 - DNA, 20 bp, Artificial Sequence
  Description of Artificial Sequence: Synthetic oligonucleotide
  Target: SCNA; (-) strand; PAM type: YTN; PAM sequence: TTT
gggtgtgaaagggcgaggga

SEQ ID NO: 49677 - DNA, 20 bp, Artificial Sequence
  Description of Artificial Sequence: Synthetic oligonucleotide
  Target: SCNA; (-) strand; PAM type: YTN; PAM sequence: TTA
acaatttgggtgtgaaaggg

SEQ ID NO: 49678 - DNA, 20 bp, Artificial Sequence
  Description of Artificial Sequence: Synthetic oligonucleotide
  Target: SCNA; (-) strand; PAM type: YTN; PAM sequence: CTA
taaatgtgagaatagagaaa

SEQ ID NO: 49679 - DNA, 20 bp, Artificial Sequence
  Description of Artificial Sequence: Synthetic oligonucleotide
  Target: SCNA; (-) strand; PAM type: YTN; PAM sequence: CTG
aaccagactataaatgtgag

SEQ ID NO: 49680 - DNA, 20 bp, Artificial Sequence
  Description of Artificial Sequence: Synthetic oligonucleotide
  Target: SCNA; (-) strand; PAM type: YTN; PAM sequence: TTA
accacaagagcaagtgacag

SEQ ID NO: 49681 - DNA, 20 bp, Artificial Sequence
  Description of Artificial Sequence: Synthetic oligonucleotide
  Target: SCNA; (-) strand; PAM type: YTN; PAM sequence: TTT
aaccacaagagcaagtgaca

SEQ ID NO: 49682 - DNA, 20 bp, Artificial Sequence
  Description of Artificial Sequence: Synthetic oligonucleotide
  Target: SCNA; (-) strand; PAM type: YTN; PAM sequence: TTC
agaaatttaaccacaagagc

SEQ ID NO: 49683 - DNA, 20 bp, Artificial Sequence
  Description of Artificial Sequence: Synthetic oligonucleotide
  Target: SCNA; (-) strand; PAM type: YTN; PAM sequence: CTT
cagaaatttaaccacaagag

SEQ ID NO: 49684 - DNA, 20 bp, Artificial Sequence
  Description of Artificial Sequence: Synthetic oligonucleotide
  Target: SCNA; (-) strand; PAM type: YTN; PAM sequence: TTC
acttcagaaatttaaccaca

SEQ ID NO: 49685 - DNA, 20 bp, Artificial Sequence
  Description of Artificial Sequence: Synthetic oligonucleotide
  Target: SCNA; (-) strand; PAM type: YTN; PAM sequence: TTT
cacttcagaaatttaaccac

SEQ ID NO: 49686 - DNA, 20 bp, Artificial Sequence
  Description of Artificial Sequence: Synthetic oligonucleotide
  Target: SCNA; (-) strand; PAM type: YTN; PAM sequence: TTA
gagataggaatttcacttca

SEQ ID NO: 49687 - DNA, 20 bp, Artificial Sequence
  Description of Artificial Sequence: Synthetic oligonucleotide
  Target: SCNA; (-) strand; PAM type: YTN; PAM sequence: CTG
atgacatacataggagaaga

SEQ ID NO: 49688 - DNA, 20 bp, Artificial Sequence
  Description of Artificial Sequence: Synthetic oligonucleotide
  Target: SCNA; (-) strand; PAM type: YTN; PAM sequence: TTG
caagtctgatgacatacata

SEQ ID NO: 49689 - DNA, 20 bp, Artificial Sequence
  Description of Artificial Sequence: Synthetic oligonucleotide
  Target: SCNA; (-) strand; PAM type: YTN; PAM sequence: TTA
gaaaaaattgcaagtctgat

SEQ ID NO: 49690 - DNA, 20 bp, Artificial Sequence
  Description of Artificial Sequence: Synthetic oligonucleotide
  Target: SCNA; (-) strand; PAM type: YTN; PAM sequence: TTT
agaaaaaattgcaagtctga

SEQ ID NO: 49691 - DNA, 20 bp, Artificial Sequence
  Description of Artificial Sequence: Synthetic oligonucleotide
  Target: SCNA; (-) strand; PAM type: YTN; PAM sequence: TTG
ggtttagaaaaaattgcaag

SEQ ID NO: 49692 - DNA, 20 bp, Artificial Sequence
  Description of Artificial Sequence: Synthetic oligonucleotide
  Target: SCNA; (-) strand; PAM type: YTN; PAM sequence: TTT
gggtttagaaaaaattgcaa

SEQ ID NO: 49693 - DNA, 20 bp, Artificial Sequence
  Description of Artificial Sequence: Synthetic oligonucleotide
  Target: SCNA; (-) strand; PAM type: YTN; PAM sequence: TTT
tgggtttagaaaaaattgca

SEQ ID NO: 49694 - DNA, 20 bp, Artificial Sequence
  Description of Artificial Sequence: Synthetic oligonucleotide
  Target: SCNA; (-) strand; PAM type: YTN; PAM sequence: CTA
gtgaaaacacattttgggtt

SEQ ID NO: 49695 - DNA, 20 bp, Artificial Sequence
  Description of Artificial Sequence: Synthetic oligonucleotide
  Target: SCNA; (-) strand; PAM type: YTN; PAM sequence: TTA
acaggggactagtgaaaaca

SEQ ID NO: 49696 - DNA, 20 bp, Artificial Sequence
  Description of Artificial Sequence: Synthetic oligonucleotide
  Target: SCNA; (-) strand; PAM type: YTN; PAM sequence: TTT
aacaggggactagtgaaaac

SEQ ID NO: 49697 - DNA, 20 bp, Artificial Sequence
  Description of Artificial Sequence: Synthetic oligonucleotide
  Target: SCNA; (-) strand; PAM type: YTN; PAM sequence: TTT
taacaggggactagtgaaaa

SEQ ID NO: 49698 - DNA, 20 bp, Artificial Sequence
  Description of Artificial Sequence: Synthetic oligonucleotide
  Target: SCNA; (-) strand; PAM type: YTN; PAM sequence: TTT
ttaacaggggactagtgaaa

SEQ ID NO: 49699 - DNA, 20 bp, Artificial Sequence
  Description of Artificial Sequence: Synthetic oligonucleotide
  Target: SCNA; (-) strand; PAM type: YTN; PAM sequence: TTT
tttaacaggggactagtgaa

SEQ ID NO: 49700 - DNA, 20 bp, Artificial Sequence
  Description of Artificial Sequence: Synthetic oligonucleotide
  Target: SCNA; (-) strand; PAM type: YTN; PAM sequence: TTG
acagttttttaacaggggac

SEQ ID NO: 49701 - DNA, 20 bp, Artificial Sequence
  Description of Artificial Sequence: Synthetic oligonucleotide
  Target: SCNA; (-) strand; PAM type: YTN; PAM sequence: CTA
tagccagtgggcaatgtgga

SEQ ID NO: 49702 - DNA, 20 bp, Artificial Sequence
  Description of Artificial Sequence: Synthetic oligonucleotide
  Target: SCNA; (-) strand; PAM type: YTN; PAM sequence: CTC
tatagccagtgggcaatgtg

SEQ ID NO: 49703 - DNA, 20 bp, Artificial Sequence
  Description of Artificial Sequence: Synthetic oligonucleotide
  Target: SCNA; (-) strand; PAM type: YTN; PAM sequence: TTG
aactctatagccagtgggca

SEQ ID NO: 49704 - DNA, 20 bp, Artificial Sequence
  Description of Artificial Sequence: Synthetic oligonucleotide
  Target: SCNA; (-) strand; PAM type: YTN; PAM sequence: TTG
aattgaactctatagccagt

SEQ ID NO: 49705 - DNA, 20 bp, Artificial Sequence
  Description of Artificial Sequence: Synthetic oligonucleotide
  Target: SCNA; (-) strand; PAM type: YTN; PAM sequence: TTT
gaattgaactctatagccag

SEQ ID NO: 49706 - DNA, 20 bp, Artificial Sequence
  Description of Artificial Sequence: Synthetic oligonucleotide
  Target: SCNA; (-) strand; PAM type: YTN; PAM sequence: CTA
gtttgaattgaactctatag

SEQ ID NO: 49707 - DNA, 20 bp, Artificial Sequence
  Description of Artificial Sequence: Synthetic oligonucleotide
  Target: SCNA; (-) strand; PAM type: YTN; PAM sequence: CTC
tagtttgaattgaactctat

SEQ ID NO: 49708 - DNA, 20 bp, Artificial Sequence
  Description of Artificial Sequence: Synthetic oligonucleotide
  Target: SCNA; (-) strand; PAM type: YTN; PAM sequence: TTG
tccaagtagtgaatgactct

SEQ ID NO: 49709 - DNA, 20 bp, Artificial Sequence
  Description of Artificial Sequence: Synthetic oligonucleotide
  Target: SCNA; (-) strand; PAM type: YTN; PAM sequence: CTG
gttgtccaagtagtgaatga

SEQ ID NO: 49710 - DNA, 20 bp, Artificial Sequence
  Description of Artificial Sequence: Synthetic oligonucleotide
  Target: SCNA; (-) strand; PAM type: YTN; PAM sequence: CTG
ggaagctggttgtccaagta

SEQ ID NO: 49711 - DNA, 20 bp, Artificial Sequence
  Description of Artificial Sequence: Synthetic oligonucleotide
  Target: SCNA; (-) strand; PAM type: YTN; PAM sequence: CTG
aaggcaagagaaagaatacc

SEQ ID NO: 49712 - DNA, 20 bp, Artificial Sequence
  Description of Artificial Sequence: Synthetic oligonucleotide
  Target: SCNA; (-) strand; PAM type: YTN; PAM sequence: TTC
tgaaggcaagagaaagaata

SEQ ID NO: 49713 - DNA, 20 bp, Artificial Sequence
  Description of Artificial Sequence: Synthetic oligonucleotide
  Target: SCNA; (-) strand; PAM type: YTN; PAM sequence: CTC
aacaccattctgaaggcaag

SEQ ID NO: 49714 - DNA, 20 bp, Artificial Sequence
  Description of Artificial Sequence: Synthetic oligonucleotide
  Target: SCNA; (-) strand; PAM type: YTN; PAM sequence: TTA
tatcctcaacaccattctga

SEQ ID NO: 49715 - DNA, 20 bp, Artificial Sequence
  Description of Artificial Sequence: Synthetic oligonucleotide
  Target: SCNA; (-) strand; PAM type: YTN; PAM sequence: CTT
atatcctcaacaccattctg

SEQ ID NO: 49716 - DNA, 20 bp, Artificial Sequence
  Description of Artificial Sequence: Synthetic oligonucleotide
  Target: SCNA; (-) strand; PAM type: YTN; PAM sequence: TTC
accttatatcctcaacacca

SEQ ID NO: 49717 - DNA, 20 bp, Artificial Sequence
  Description of Artificial Sequence: Synthetic oligonucleotide
  Target: SCNA; (-) strand; PAM type: YTN; PAM sequence: TTG
cattcaccttatatcctcaa

SEQ ID NO: 49718 - DNA, 20 bp, Artificial Sequence
  Description of Artificial Sequence: Synthetic oligonucleotide
  Target: SCNA; (-) strand; PAM type: YTN; PAM sequence: CTG
ttgcattcaccttatatcct

SEQ ID NO: 49719 - DNA, 20 bp, Artificial Sequence
  Description of Artificial Sequence: Synthetic oligonucleotide
  Target: SCNA; (-) strand; PAM type: YTN; PAM sequence: CTG
agagcaatggctgttgcatt

SEQ ID NO: 49720 - DNA, 20 bp, Artificial Sequence
  Description of Artificial Sequence: Synthetic oligonucleotide
  Target: SCNA; (-) strand; PAM type: YTN; PAM sequence: CTC
actgagagcaatggctgttg

SEQ ID NO: 49721 - DNA, 20 bp, Artificial Sequence
  Description of Artificial Sequence: Synthetic oligonucleotide
  Target: SCNA; (-) strand; PAM type: YTN; PAM sequence: CTA
tgagctcactgagagcaatg

SEQ ID NO: 49722 - DNA, 20 bp, Artificial Sequence
  Description of Artificial Sequence: Synthetic oligonucleotide
  Target: SCNA; (-) strand; PAM type: YTN; PAM sequence: TTA
gactatgagctcactgagag

SEQ ID NO: 49723 - DNA, 20 bp, Artificial Sequence
  Description of Artificial Sequence: Synthetic oligonucleotide
  Target: SCNA; (-) strand; PAM type: YTN; PAM sequence: CTT
agactatgagctcactgaga

SEQ ID NO: 49724 - DNA, 20 bp, Artificial Sequence
  Description of Artificial Sequence: Synthetic oligonucleotide
  Target: SCNA; (-) strand; PAM type: YTN; PAM sequence: CTC
acttagactatgagctcact

SEQ ID NO: 49725 - DNA, 20 bp, Artificial Sequence
  Description of Artificial Sequence: Synthetic oligonucleotide
  Target: SCNA; (-) strand; PAM type: YTN; PAM sequence: CTC
ctcacttagactatgagctc

SEQ ID NO: 49726 - DNA, 20 bp, Artificial Sequence
  Description of Artificial Sequence: Synthetic oligonucleotide
  Target: SCNA; (-) strand; PAM type: YTN; PAM sequence: CTG
tctcctcacttagactatga

SEQ ID NO: 49727 - DNA, 20 bp, Artificial Sequence
  Description of Artificial Sequence: Synthetic oligonucleotide
  Target: SCNA; (-) strand; PAM type: YTN; PAM sequence: CTC
atctgtctcctcacttagac

SEQ ID NO: 49728 - DNA, 20 bp, Artificial Sequence
  Description of Artificial Sequence: Synthetic oligonucleotide
  Target: SCNA; (-) strand; PAM type: YTN; PAM sequence: CTG
ctcatctgtctcctcactta

SEQ ID NO: 49729 - DNA, 20 bp, Artificial Sequence
  Description of Artificial Sequence: Synthetic oligonucleotide
  Target: SCNA; (-) strand; PAM type: YTN; PAM sequence: TTA
taatgatctgctcatctgtc

SEQ ID NO: 49730 - DNA, 20 bp, Artificial Sequence
  Description of Artificial Sequence: Synthetic oligonucleotide
  Target: SCNA; (-) strand; PAM type: YTN; PAM sequence: TTT
ataatgatctgctcatctgt

SEQ ID NO: 49731 - DNA, 20 bp, Artificial Sequence
  Description of Artificial Sequence: Synthetic oligonucleotide
  Target: SCNA; (-) strand; PAM type: YTN; PAM sequence: TTT
tataatgatctgctcatctg

SEQ ID NO: 49732 - DNA, 20 bp, Artificial Sequence
  Description of Artificial Sequence: Synthetic oligonucleotide
  Target: SCNA; (-) strand; PAM type: YTN; PAM sequence: TTG
ttttataatgatctgctcat

SEQ ID NO: 49733 - DNA, 20 bp, Artificial Sequence
  Description of Artificial Sequence: Synthetic oligonucleotide
  Target: SCNA; (-) strand; PAM type: YTN; PAM sequence: TTT
gttttataatgatctgctca

SEQ ID NO: 49734 - DNA, 20 bp, Artificial Sequence
  Description of Artificial Sequence: Synthetic oligonucleotide
  Target: SCNA; (-) strand; PAM type: YTN; PAM sequence: TTG
ccaatttgttttataatgat

SEQ ID NO: 49735 - DNA, 20 bp, Artificial Sequence
  Description of Artificial Sequence: Synthetic oligonucleotide
  Target: SCNA; (-) strand; PAM type: YTN; PAM sequence: CTT
gccaatttgttttataatga

SEQ ID NO: 49736 - DNA, 20 bp, Artificial Sequence
  Description of Artificial Sequence: Synthetic oligonucleotide
  Target: SCNA; (-) strand; PAM type: YTN; PAM sequence: TTG
cacttgccaatttgttttat

SEQ ID NO: 49737 - DNA, 20 bp, Artificial Sequence
  Description of Artificial Sequence: Synthetic oligonucleotide
  Target: SCNA; (-) strand; PAM type: YTN; PAM sequence: CTG
tcattgcacttgccaatttg

SEQ ID NO: 49738 - DNA, 20 bp, Artificial Sequence
  Description of Artificial Sequence: Synthetic oligonucleotide
  Target: SCNA; (-) strand; PAM type: YTN; PAM sequence: TTC
tgtcattgcacttgccaatt

SEQ ID NO: 49739 - DNA, 20 bp, Artificial Sequence
  Description of Artificial Sequence: Synthetic oligonucleotide
  Target: SCNA; (-) strand; PAM type: YTN; PAM sequence: CTT
ctgtcattgcacttgccaat

SEQ ID NO: 49740 - DNA, 20 bp, Artificial Sequence
  Description of Artificial Sequence: Synthetic oligonucleotide
  Target: SCNA; (-) strand; PAM type: YTN; PAM sequence: CTA
tgcacacttctgtcattgca

SEQ ID NO: 49741 - DNA, 20 bp, Artificial Sequence
  Description of Artificial Sequence: Synthetic oligonucleotide
  Target: SCNA; (-) strand; PAM type: YTN; PAM sequence: TTC
ccatagcacctatgcacact

SEQ ID NO: 49742 - DNA, 20 bp, Artificial Sequence
  Description of Artificial Sequence: Synthetic oligonucleotide
  Target: SCNA; (-) strand; PAM type: YTN; PAM sequence: TTG
gttcccatagcacctatgca

SEQ ID NO: 49743 - DNA, 20 bp, Artificial Sequence
  Description of Artificial Sequence: Synthetic oligonucleotide
  Target: SCNA; (-) strand; PAM type: YTN; PAM sequence: CTT
ggttcccatagcacctatgc

SEQ ID NO: 49744 - DNA, 20 bp, Artificial Sequence
  Description of Artificial Sequence: Synthetic oligonucleotide
  Target: SCNA; (-) strand; PAM type: YTN; PAM sequence: CTC
ttggttcccatagcacctat

SEQ ID NO: 49745 - DNA, 20 bp, Artificial Sequence
  Description of Artificial Sequence: Synthetic oligonucleotide
  Target: SCNA; (-) strand; PAM type: YTN; PAM sequence: TTC
ctcttggttcccatagcacc

SEQ ID NO: 49746 - DNA, 20 bp, Artificial Sequence
  Description of Artificial Sequence: Synthetic oligonucleotide
  Target: SCNA; (-) strand; PAM type: YTN; PAM sequence: CTT
cctcttggttcccatagcac

SEQ ID NO: 49747 - DNA, 20 bp, Artificial Sequence
  Description of Artificial Sequence: Synthetic oligonucleotide
  Target: SCNA; (-) strand; PAM type: YTN; PAM sequence: TTA
tatatccttcctcttggttc

SEQ ID NO: 49748 - DNA, 20 bp, Artificial Sequence
  Description of Artificial Sequence: Synthetic oligonucleotide
  Target: SCNA; (-) strand; PAM type: YTN; PAM sequence: TTA
ttatatatccttcctcttgg

SEQ ID NO: 49749 - DNA, 20 bp, Artificial Sequence
  Description of Artificial Sequence: Synthetic oligonucleotide
  Target: SCNA; (-) strand; PAM type: YTN; PAM sequence: CTT
attatatatccttcctcttg

SEQ ID NO: 49750 - DNA, 20 bp, Artificial Sequence
  Description of Artificial Sequence: Synthetic oligonucleotide
  Target: SCNA; (-) strand; PAM type: YTN; PAM sequence: CTG
gcttattatatatccttcct

SEQ ID NO: 49751 - DNA, 20 bp, Artificial Sequence
  Description of Artificial Sequence: Synthetic oligonucleotide
  Target: SCNA; (-) strand; PAM type: YTN; PAM sequence: TTC
cctggcttattatatatcct

SEQ ID NO: 49752 - DNA, 20 bp, Artificial Sequence
  Description of Artificial Sequence: Synthetic oligonucleotide
  Target: SCNA; (-) strand; PAM type: YTN; PAM sequence: CTT
ccctggcttattatatatcc

SEQ ID NO: 49753 - DNA, 20 bp, Artificial Sequence
  Description of Artificial Sequence: Synthetic oligonucleotide
  Target: SCNA; (-) strand; PAM type: YTN; PAM sequence: TTC
cttccctggcttattatata

SEQ ID NO: 49754 - DNA, 20 bp, Artificial Sequence
  Description of Artificial Sequence: Synthetic oligonucleotide
  Target: SCNA; (-) strand; PAM type: YTN; PAM sequence: CTT
ccttccctggcttattatat

SEQ ID NO: 49755 - DNA, 20 bp, Artificial Sequence
  Description of Artificial Sequence: Synthetic oligonucleotide
  Target: SCNA; (-) strand; PAM type: YTN; PAM sequence: CTC
ttccttccctggcttattat

SEQ ID NO: 49756 - DNA, 20 bp, Artificial Sequence
  Description of Artificial Sequence: Synthetic oligonucleotide
  Target: SCNA; (-) strand; PAM type: YTN; PAM sequence: TTC
tcttccttccctggcttatt

SEQ ID NO: 49757 - DNA, 20 bp, Artificial Sequence
  Description of Artificial Sequence: Synthetic oligonucleotide
  Target: SCNA; (-) strand; PAM type: YTN; PAM sequence: CTT
ctcttccttccctggcttat

SEQ ID NO: 49758 - DNA, 20 bp, Artificial Sequence
  Description of Artificial Sequence: Synthetic oligonucleotide
  Target: SCNA; (-) strand; PAM type: YTN; PAM sequence: CTG
aatcttctcttccttccctg

SEQ ID NO: 49759 - DNA, 20 bp, Artificial Sequence
  Description of Artificial Sequence: Synthetic oligonucleotide
  Target: SCNA; (-) strand; PAM type: YTN; PAM sequence: CTC
cctgaatcttctcttccttc

SEQ ID NO: 49760 - DNA, 20 bp, Artificial Sequence
  Description of Artificial Sequence: Synthetic oligonucleotide
  Target: SCNA; (-) strand; PAM type: YTN; PAM sequence: CTC
cagtaagtctccctgaatct

SEQ ID NO: 49761 - DNA, 20 bp, Artificial Sequence
  Description of Artificial Sequence: Synthetic oligonucleotide
  Target: SCNA; (-) strand; PAM type: YTN; PAM sequence: TTC
atcctccagtaagtctccct

SEQ ID NO: 49762 - DNA, 20 bp, Artificial Sequence
  Description of Artificial Sequence: Synthetic oligonucleotide
  Target: SCNA; (-) strand; PAM type: YTN; PAM sequence: CTG
agggcaattcatcctccagt

SEQ ID NO: 49763 - DNA, 20 bp, Artificial Sequence
  Description of Artificial Sequence: Synthetic oligonucleotide
  Target: SCNA; (-) strand; PAM type: YTN; PAM sequence: TTC
tgagggcaattcatcctcca

SEQ ID NO: 49764 - DNA, 20 bp, Artificial Sequence
  Description of Artificial Sequence: Synthetic oligonucleotide
  Target: SCNA; (-) strand; PAM type: YTN; PAM sequence: TTT
ctgagggcaattcatcctcc

SEQ ID NO: 49765 - DNA, 20 bp, Artificial Sequence
  Description of Artificial Sequence: Synthetic oligonucleotide
  Target: SCNA; (-) strand; PAM type: YTN; PAM sequence: CTT
tctgagggcaattcatcctc

SEQ ID NO: 49766 - DNA, 20 bp, Artificial Sequence
  Description of Artificial Sequence: Synthetic oligonucleotide
  Target: SCNA; (-) strand; PAM type: YTN; PAM sequence: TTC
aatactttctgagggcaatt

SEQ ID NO: 49767 - DNA, 20 bp, Artificial Sequence
  Description of Artificial Sequence: Synthetic oligonucleotide
  Target: SCNA; (-) strand; PAM type: YTN; PAM sequence: CTT
caatactttctgagggcaat

SEQ ID NO: 49768 - DNA, 20 bp, Artificial Sequence
  Description of Artificial Sequence: Synthetic oligonucleotide
  Target: SCNA; (-) strand; PAM type: YTN; PAM sequence: CTA
cacttcaatactttctgagg

SEQ ID NO: 49769 - DNA, 20 bp, Artificial Sequence
  Description of Artificial Sequence: Synthetic oligonucleotide
  Target: SCNA; (-) strand; PAM type: YTN; PAM sequence: TTA
cctacacttcaatactttct

SEQ ID NO: 49770 - DNA, 20 bp, Artificial Sequence
  Description of Artificial Sequence: Synthetic oligonucleotide
  Target: SCNA; (-) strand; PAM type: YTN; PAM sequence: CTG
ttacctacacttcaatactt

SEQ ID NO: 49771 - DNA, 20 bp, Artificial Sequence
  Description of Artificial Sequence: Synthetic oligonucleotide
  Target: SCNA; (-) strand; PAM type: YTN; PAM sequence: TTA
accaactgttacctacactt

SEQ ID NO: 49772 - DNA, 20 bp, Artificial Sequence
  Description of Artificial Sequence: Synthetic oligonucleotide
  Target: SCNA; (-) strand; PAM type: YTN; PAM sequence: CTT
aaccaactgttacctacact

SEQ ID NO: 49773 - DNA, 20 bp, Artificial Sequence
  Description of Artificial Sequence: Synthetic oligonucleotide
  Target: SCNA; (-) strand; PAM type: YTN; PAM sequence: CTC
ttaaccaactgttacctaca

SEQ ID NO: 49774 - DNA, 20 bp, Artificial Sequence
  Description of Artificial Sequence: Synthetic oligonucleotide
  Target: SCNA; (-) strand; PAM type: YTN; PAM sequence: TTC
tcttaaccaactgttaccta

SEQ ID NO: 49775 - DNA, 20 bp, Artificial Sequence
  Description of Artificial Sequence: Synthetic oligonucleotide
  Target: SCNA; (-) strand; PAM type: YTN; PAM sequence: CTT
ctcttaaccaactgttacct

SEQ ID NO: 49776 - DNA, 20 bp, Artificial Sequence
  Description of Artificial Sequence: Synthetic oligonucleotide
  Target: SCNA; (-) strand; PAM type: YTN; PAM sequence: CTG
cttctcttaaccaactgtta

SEQ ID NO: 49777 - DNA, 20 bp, Artificial Sequence
  Description of Artificial Sequence: Synthetic oligonucleotide
  Target: SCNA; (-) strand; PAM type: YTN; PAM sequence: TTC
tgcttctcttaaccaactgt

SEQ ID NO: 49778 - DNA, 20 bp, Artificial Sequence
  Description of Artificial Sequence: Synthetic oligonucleotide
  Target: SCNA; (-) strand; PAM type: YTN; PAM sequence: TTT
ctgcttctcttaaccaactg

SEQ ID NO: 49779 - DNA, 20 bp, Artificial Sequence
  Description of Artificial Sequence: Synthetic oligonucleotide
  Target: SCNA; (-) strand; PAM type: YTN; PAM sequence: CTT
tctgcttctcttaaccaact

SEQ ID NO: 49780 - DNA, 20 bp, Artificial Sequence
  Description of Artificial Sequence: Synthetic oligonucleotide
  Target: SCNA; (-) strand; PAM type: YTN; PAM sequence: TTC
tttctgcttctcttaaccaa

SEQ ID NO: 49781 - DNA, 20 bp, Artificial Sequence
  Description of Artificial Sequence: Synthetic oligonucleotide
  Target: SCNA; (-) strand; PAM type: YTN; PAM sequence: CTT
ctttctgcttctcttaacca

SEQ ID NO: 49782 - DNA, 20 bp, Artificial Sequence
  Description of Artificial Sequence: Synthetic oligonucleotide
  Target: SCNA; (-) strand; PAM type: YTN; PAM sequence: TTC
cttctttctgcttctcttaa

SEQ ID NO: 49783 - DNA, 20 bp, Artificial Sequence
  Description of Artificial Sequence: Synthetic oligonucleotide
  Target: SCNA; (-) strand; PAM type: YTN; PAM sequence: TTT
ccttctttctgcttctctta

SEQ ID NO: 49784 - DNA, 20 bp, Artificial Sequence
  Description of Artificial Sequence: Synthetic oligonucleotide
  Target: SCNA; (-) strand; PAM type: YTN; PAM sequence: TTT
tccttctttctgcttctctt

SEQ ID NO: 49785 - DNA, 20 bp, Artificial Sequence
  Description of Artificial Sequence: Synthetic oligonucleotide
  Target: SCNA; (-) strand; PAM type: YTN; PAM sequence: CTT
ttccttctttctgcttctct

SEQ ID NO: 49786 - DNA, 20 bp, Artificial Sequence
  Description of Artificial Sequence: Synthetic oligonucleotide
  Target: SCNA; (-) strand; PAM type: YTN; PAM sequence: CTC
cttttccttctttctgcttc

SEQ ID NO: 49787 - DNA, 20 bp, Artificial Sequence
  Description of Artificial Sequence: Synthetic oligonucleotide
  Target: SCNA; (-) strand; PAM type: YTN; PAM sequence: CTG
tctccttttccttctttctg

SEQ ID NO: 49788 - DNA, 20 bp, Artificial Sequence
  Description of Artificial Sequence: Synthetic oligonucleotide
  Target: SCNA; (-) strand; PAM type: YTN; PAM sequence: CTG
ctgtctccttttccttcttt

SEQ ID NO: 49789 - DNA, 20 bp, Artificial Sequence
  Description of Artificial Sequence: Synthetic oligonucleotide
  Target: SCNA; (-) strand; PAM type: YTN; PAM sequence: CTG
tgctgctgtctccttttcct

SEQ ID NO: 49790 - DNA, 20 bp, Artificial Sequence
  Description of Artificial Sequence: Synthetic oligonucleotide
  Target: SCNA; (-) strand; PAM type: YTN; PAM sequence: TTG
gcaccctgtgctgctgtctc

SEQ ID NO: 49791 - DNA, 20 bp, Artificial Sequence
  Description of Artificial Sequence: Synthetic oligonucleotide
  Target: SCNA; (-) strand; PAM type: YTN; PAM sequence: TTT
ggcaccctgtgctgctgtct

SEQ ID NO: 49792 - DNA, 20 bp, Artificial Sequence
  Description of Artificial Sequence: Synthetic oligonucleotide
  Target: SCNA; (-) strand; PAM type: YTN; PAM sequence: TTT
tggcaccctgtgctgctgtc

SEQ ID NO: 49793 - DNA, 20 bp, Artificial Sequence
  Description of Artificial Sequence: Synthetic oligonucleotide
  Target: SCNA; (-) strand; PAM type: YTN; PAM sequence: TTA
ttttggcaccctgtgctgct

SEQ ID NO: 49794 - DNA, 20 bp, Artificial Sequence
  Description of Artificial Sequence: Synthetic oligonucleotide
  Target: SCNA; (-) strand; PAM type: YTN; PAM sequence: CTT
attttggcaccctgtgctgc

SEQ ID NO: 49795 - DNA, 20 bp, Artificial Sequence
  Description of Artificial Sequence: Synthetic oligonucleotide
  Target: SCNA; (-) strand; PAM type: YTN; PAM sequence: TTC
ttattttggcaccctgtgct

SEQ ID NO: 49796 - DNA, 20 bp, Artificial Sequence
  Description of Artificial Sequence: Synthetic oligonucleotide
  Target: SCNA; (-) strand; PAM type: YTN; PAM sequence: TTT
cttattttggcaccctgtgc

SEQ ID NO: 49797 - DNA, 20 bp, Artificial Sequence
  Description of Artificial Sequence: Synthetic oligonucleotide
  Target: SCNA; (-) strand; PAM type: YTN; PAM sequence: TTT
tcttattttggcaccctgtg

SEQ ID NO: 49798 - DNA, 20 bp, Artificial Sequence
  Description of Artificial Sequence: Synthetic oligonucleotide
  Target: SCNA; (-) strand; PAM type: YTN; PAM sequence: CTT
ttcttattttggcaccctgt

SEQ ID NO: 49799 - DNA, 20 bp, Artificial Sequence
  Description of Artificial Sequence: Synthetic oligonucleotide
  Target: SCNA; (-) strand; PAM type: YTN; PAM sequence: TTA
cccaggcttttcttattttg

SEQ ID NO: 49800 - DNA, 20 bp, Artificial Sequence
  Description of Artificial Sequence: Synthetic oligonucleotide
  Target: SCNA; (-) strand; PAM type: YTN; PAM sequence: TTG
gcagtattacccaggctttt

SEQ ID NO: 49801 - DNA, 20 bp, Artificial Sequence
  Description of Artificial Sequence: Synthetic oligonucleotide
  Target: SCNA; (-) strand; PAM type: YTN; PAM sequence: CTT
ggcagtattacccaggcttt

SEQ ID NO: 49802 - DNA, 20 bp, Artificial Sequence
  Description of Artificial Sequence: Synthetic oligonucleotide
  Target: SCNA; (-) strand; PAM type: YTN; PAM sequence: CTC
ttggcagtattacccaggct

SEQ ID NO: 49803 - DNA, 20 bp, Artificial Sequence
  Description of Artificial Sequence: Synthetic oligonucleotide
  Target: SCNA; (-) strand; PAM type: YTN; PAM sequence: TTC
tcttggcagtattacccagg

SEQ ID NO: 49804 - DNA, 20 bp, Artificial Sequence
  Description of Artificial Sequence: Synthetic oligonucleotide
  Target: SCNA; (-) strand; PAM type: YTN; PAM sequence: TTT
ctcttggcagtattacccag

SEQ ID NO: 49805 - DNA, 20 bp, Artificial Sequence
  Description of Artificial Sequence: Synthetic oligonucleotide
  Target: SCNA; (-) strand; PAM type: YTN; PAM sequence: TTG
tagatttctcttggcagtat

SEQ ID NO: 49806 - DNA, 20 bp, Artificial Sequence
  Description of Artificial Sequence: Synthetic oligonucleotide
  Target: SCNA; (-) strand; PAM type: YTN; PAM sequence: TTA
attgtagatttctcttggca

SEQ ID NO: 49807 - DNA, 20 bp, Artificial Sequence
  Description of Artificial Sequence: Synthetic oligonucleotide
  Target: SCNA; (-) strand; PAM type: YTN; PAM sequence: TTT
aattgtagatttctcttggc

SEQ ID NO: 49808 - DNA, 20 bp, Artificial Sequence
  Description of Artificial Sequence: Synthetic oligonucleotide
  Target: SCNA; (-) strand; PAM type: YTN; PAM sequence: TTG
catttaattgtagatttctc

SEQ ID NO: 49809 - DNA, 20 bp, Artificial Sequence
  Description of Artificial Sequence: Synthetic oligonucleotide
  Target: SCNA; (-) strand; PAM type: YTN; PAM sequence: TTG
atgggaattgcatttaattg

SEQ ID NO: 49810 - DNA, 20 bp, Artificial Sequence
  Description of Artificial Sequence: Synthetic oligonucleotide
  Target: SCNA; (-) strand; PAM type: YTN; PAM sequence: TTT
gatgggaattgcatttaatt

SEQ ID NO: 49811 - DNA, 20 bp, Artificial Sequence
  Description of Artificial Sequence: Synthetic oligonucleotide
  Target: SCNA; (-) strand; PAM type: YTN; PAM sequence: TTT
tgatgggaattgcatttaat

SEQ ID NO: 49812 - DNA, 20 bp, Artificial Sequence
  Description of Artificial Sequence: Synthetic oligonucleotide
  Target: SCNA; (-) strand; PAM type: YTN; PAM sequence: CTG
tgaagaatgatggtggtatt

SEQ ID NO: 49813 - DNA, 20 bp, Artificial Sequence
  Description of Artificial Sequence: Synthetic oligonucleotide
  Target: SCNA; (-) strand; PAM type: YTN; PAM sequence: TTC
tgtgaagaatgatggtggta

SEQ ID NO: 49814 - DNA, 20 bp, Artificial Sequence
  Description of Artificial Sequence: Synthetic oligonucleotide
  Target: SCNA; (-) strand; PAM type: YTN; PAM sequence: CTA
gttctgtgaagaatgatggt

SEQ ID NO: 49815 - DNA, 20 bp, Artificial Sequence
  Description of Artificial Sequence: Synthetic oligonucleotide
  Target: SCNA; (-) strand; PAM type: YTN; PAM sequence: TTC
tagttctgtgaagaatgatg

SEQ ID NO: 49816 - DNA, 20 bp, Artificial Sequence
  Description of Artificial Sequence: Synthetic oligonucleotide
  Target: SCNA; (-) strand; PAM type: YTN; PAM sequence: TTT
ctagttctgtgaagaatgat

SEQ ID NO: 49817 - DNA, 20 bp, Artificial Sequence
  Description of Artificial Sequence: Synthetic oligonucleotide
  Target: SCNA; (-) strand; PAM type: YTN; PAM sequence: TTT
tctagttctgtgaagaatga

SEQ ID NO: 49818 - DNA, 20 bp, Artificial Sequence
  Description of Artificial Sequence: Synthetic oligonucleotide
  Target: SCNA; (-) strand; PAM type: YTN; PAM sequence: TTT
ttctagttctgtgaagaatg

SEQ ID NO: 49819 - DNA, 20 bp, Artificial Sequence
  Description of Artificial Sequence: Synthetic oligonucleotide
  Target: SCNA; (-) strand; PAM type: YTN; PAM sequence: TTT
tttctagttctgtgaagaat

SEQ ID NO: 49820 - DNA, 20 bp, Artificial Sequence
  Description of Artificial Sequence: Synthetic oligonucleotide
  Target: SCNA; (-) strand; PAM type: YTN; PAM sequence: TTG
ttttttctagttctgtgaag

SEQ ID NO: 49821 - DNA, 20 bp, Artificial Sequence
  Description of Artificial Sequence: Synthetic oligonucleotide
  Target: SCNA; (-) strand; PAM type: YTN; PAM sequence: TTA
ggattgttttttctagttct

SEQ ID NO: 49822 - DNA, 20 bp, Artificial Sequence
  Description of Artificial Sequence: Synthetic oligonucleotide
  Target: SCNA; (-) strand; PAM type: YTN; PAM sequence: TTT
aggattgttttttctagttc

SEQ ID NO: 49823 - DNA, 20 bp, Artificial Sequence
  Description of Artificial Sequence: Synthetic oligonucleotide
  Target: SCNA; (-) strand; PAM type: YTN; PAM sequence: TTT
taggattgttttttctagtt

SEQ ID NO: 49824 - DNA, 20 bp, Artificial Sequence
  Description of Artificial Sequence: Synthetic oligonucleotide
  Target: SCNA; (-) strand; PAM type: YTN; PAM sequence: TTC
catatgaattttaggattgt

SEQ ID NO: 49825 - DNA, 20 bp, Artificial Sequence
  Description of Artificial Sequence: Synthetic oligonucleotide
  Target: SCNA; (-) strand; PAM type: YTN; PAM sequence: TTG
gttccatatgaattttagga

SEQ ID NO: 49826 - DNA, 20 bp, Artificial Sequence
  Description of Artificial Sequence: Synthetic oligonucleotide
  Target: SCNA; (-) strand; PAM type: YTN; PAM sequence: TTT
ggttccatatgaattttagg

SEQ ID NO: 49827 - DNA, 20 bp, Artificial Sequence
  Description of Artificial Sequence: Synthetic oligonucleotide
  Target: SCNA; (-) strand; PAM type: YTN; PAM sequence: TTT
tggttccatatgaattttag

SEQ ID NO: 49828 - DNA, 20 bp, Artificial Sequence
  Description of Artificial Sequence: Synthetic oligonucleotide
  Target: SCNA; (-) strand; PAM type: YTN; PAM sequence: TTT
ttggttccatatgaatttta

SEQ ID NO: 49829 - DNA, 20 bp, Artificial Sequence
  Description of Artificial Sequence: Synthetic oligonucleotide
  Target: SCNA; (-) strand; PAM type: YTN; PAM sequence: TTT
tttggttccatatgaatttt

SEQ ID NO: 49830 - DNA, 20 bp, Artificial Sequence
  Description of Artificial Sequence: Synthetic oligonucleotide
  Target: SCNA; (-) strand; PAM type: YTN; PAM sequence: CTT
ttttggttccatatgaattt

SEQ ID NO: 49831 - DNA, 20 bp, Artificial Sequence
  Description of Artificial Sequence: Synthetic oligonucleotide
  Target: SCNA; (-) strand; PAM type: YTN; PAM sequence: CTC
ttttttggttccatatgaat

SEQ ID NO: 49832 - DNA, 20 bp, Artificial Sequence
  Description of Artificial Sequence: Synthetic oligonucleotide
  Target: SCNA; (-) strand; PAM type: YTN; PAM sequence: CTA
tgtgggctcttttttggttc

SEQ ID NO: 49833 - DNA, 20 bp, Artificial Sequence
  Description of Artificial Sequence: Synthetic oligonucleotide
  Target: SCNA; (-) strand; PAM type: YTN; PAM sequence: TTG
gctatgtgggctcttttttg

SEQ ID NO: 49834 - DNA, 20 bp, Artificial Sequence
  Description of Artificial Sequence: Synthetic oligonucleotide
  Target: SCNA; (-) strand; PAM type: YTN; PAM sequence: TTT
ggctatgtgggctctttttt

SEQ ID NO: 49835 - DNA, 20 bp, Artificial Sequence
  Description of Artificial Sequence: Synthetic oligonucleotide
  Target: SCNA; (-) strand; PAM type: YTN; PAM sequence: CTT
tggctatgtgggctcttttt

SEQ ID NO: 49836 - DNA, 20 bp, Artificial Sequence
  Description of Artificial Sequence: Synthetic oligonucleotide
  Target: SCNA; (-) strand; PAM type: YTN; PAM sequence: TTG
ctttggctatgtgggctctt

SEQ ID NO: 49837 - DNA, 20 bp, Artificial Sequence
  Description of Artificial Sequence: Synthetic oligonucleotide
  Target: SCNA; (-) strand; PAM type: YTN; PAM sequence: CTT
gctttggctatgtgggctct

SEQ ID NO: 49838 - DNA, 20 bp, Artificial Sequence
  Description of Artificial Sequence: Synthetic oligonucleotide
  Target: SCNA; (-) strand; PAM type: YTN; PAM sequence: TTA
atcttgctttggctatgtgg

SEQ ID NO: 49839 - DNA, 20 bp, Artificial Sequence
  Description of Artificial Sequence: Synthetic oligonucleotide
  Target: SCNA; (-) strand; PAM type: YTN; PAM sequence: CTT
aatcttgctttggctatgtg

SEQ ID NO: 49840 - DNA, 20 bp, Artificial Sequence
  Description of Artificial Sequence: Synthetic oligonucleotide
  Target: SCNA; (-) strand; PAM type: YTN; PAM sequence: TTG
cttaatcttgctttggctat

SEQ ID NO: 49841 - DNA, 20 bp, Artificial Sequence
  Description of Artificial Sequence: Synthetic oligonucleotide
  Target: SCNA; (-) strand; PAM type: YTN; PAM sequence: TTT
gcttaatcttgctttggcta

SEQ ID NO: 49842 - DNA, 20 bp, Artificial Sequence
  Description of Artificial Sequence: Synthetic oligonucleotide
  Target: SCNA; (-) strand; PAM type: YTN; PAM sequence: TTT
tgcttaatcttgctttggct

SEQ ID NO: 49843 - DNA, 20 bp, Artificial Sequence
  Description of Artificial Sequence: Synthetic oligonucleotide
  Target: SCNA; (-) strand; PAM type: YTN; PAM sequence: TTT
ttgcttaatcttgctttggc

SEQ ID NO: 49844 - DNA, 20 bp, Artificial Sequence
  Description of Artificial Sequence: Synthetic oligonucleotide
  Target: SCNA; (-) strand; PAM type: YTN; PAM sequence: CTT
tttgcttaatcttgctttgg

SEQ ID NO: 49845 - DNA, 20 bp, Artificial Sequence
  Description of Artificial Sequence: Synthetic oligonucleotide
  Target: SCNA; (-) strand; PAM type: YTN; PAM sequence: TTC
tttttgcttaatcttgcttt

SEQ ID NO: 49846 - DNA, 20 bp, Artificial Sequence
  Description of Artificial Sequence: Synthetic oligonucleotide
  Target: SCNA; (-) strand; PAM type: YTN; PAM sequence: TTT
ctttttgcttaatcttgctt

SEQ ID NO: 49847 - DNA, 20 bp, Artificial Sequence
  Description of Artificial Sequence: Synthetic oligonucleotide
  Target: SCNA; (-) strand; PAM type: YTN; PAM sequence: TTT
tctttttgcttaatcttgct

SEQ ID NO: 49848 - DNA, 20 bp, Artificial Sequence
  Description of Artificial Sequence: Synthetic oligonucleotide
  Target: SCNA; (-) strand; PAM type: YTN; PAM sequence: TTT
ttctttttgcttaatcttgc

SEQ ID NO: 49849 - DNA, 20 bp, Artificial Sequence
  Description of Artificial Sequence: Synthetic oligonucleotide
  Target: SCNA; (-) strand; PAM type: YTN; PAM sequence: CTC
cagatttttctttttgctta

SEQ ID NO: 49850 - DNA, 20 bp, Artificial Sequence
  Description of Artificial Sequence: Synthetic oligonucleotide
  Target: SCNA; (-) strand; PAM type: YTN; PAM sequence: TTG
aaagcaggtaatgtgatgcc

SEQ ID NO: 49851 - DNA, 20 bp, Artificial Sequence
  Description of Artificial Sequence: Synthetic oligonucleotide
  Target: SCNA; (-) strand; PAM type: YTN; PAM sequence: TTT
gaaagcaggtaatgtgatgc

SEQ ID NO: 49852 - DNA, 20 bp, Artificial Sequence
  Description of Artificial Sequence: Synthetic oligonucleotide
  Target: SCNA; (-) strand; PAM type: YTN; PAM sequence: TTA
tagtatagtttgaaagcagg

SEQ ID NO: 49853 - DNA, 20 bp, Artificial Sequence
  Description of Artificial Sequence: Synthetic oligonucleotide
  Target: SCNA; (-) strand; PAM type: YTN; PAM sequence: CTT
atagtatagtttgaaagcag

SEQ ID NO: 49854 - DNA, 20 bp, Artificial Sequence
  Description of Artificial Sequence: Synthetic oligonucleotide
  Target: SCNA; (-) strand; PAM type: YTN; PAM sequence: CTA
tggccttatagtatagtttg

SEQ ID NO: 49855 - DNA, 20 bp, Artificial Sequence
  Description of Artificial Sequence: Synthetic oligonucleotide
  Target: SCNA; (-) strand; PAM type: YTN; PAM sequence: TTG
gtgactatggccttatagta

SEQ ID NO: 49856 - DNA, 20 bp, Artificial Sequence
  Description of Artificial Sequence: Synthetic oligonucleotide
  Target: SCNA; (-) strand; PAM type: YTN; PAM sequence: TTT
ggtgactatggccttatagt

SEQ ID NO: 49857 - DNA, 20 bp, Artificial Sequence
  Description of Artificial Sequence: Synthetic oligonucleotide
  Target: SCNA; (-) strand; PAM type: YTN; PAM sequence: TTT
tggtgactatggccttatag

SEQ ID NO: 49858 - DNA, 20 bp, Artificial Sequence
  Description of Artificial Sequence: Synthetic oligonucleotide
  Target: SCNA; (-) strand; PAM type: YTN; PAM sequence: CTG
ttttggtgactatggcctta

SEQ ID NO: 49859 - DNA, 20 bp, Artificial Sequence
  Description of Artificial Sequence: Synthetic oligonucleotide
  Target: SCNA; (-) strand; PAM type: YTN; PAM sequence: TTA
taccagtgccatgctgtttt

SEQ ID NO: 49860 - DNA, 20 bp, Artificial Sequence
  Description of Artificial Sequence: Synthetic oligonucleotide
  Target: SCNA; (-) strand; PAM type: YTN; PAM sequence: TTT
ataccagtgccatgctgttt

SEQ ID NO: 49861 - DNA, 20 bp, Artificial Sequence
  Description of Artificial Sequence: Synthetic oligonucleotide
  Target: SCNA; (-) strand; PAM type: YTN; PAM sequence: TTT
tataccagtgccatgctgtt

SEQ ID NO: 49862 - DNA, 20 bp, Artificial Sequence
  Description of Artificial Sequence: Synthetic oligonucleotide
  Target: SCNA; (-) strand; PAM type: YTN; PAM sequence: TTT
ttataccagtgccatgctgt

SEQ ID NO: 49863 - DNA, 20 bp, Artificial Sequence
  Description of Artificial Sequence: Synthetic oligonucleotide
  Target: SCNA; (-) strand; PAM type: YTN; PAM sequence: CTA
tttttataccagtgccatgc

SEQ ID NO: 49864 - DNA, 20 bp, Artificial Sequence
  Description of Artificial Sequence: Synthetic oligonucleotide
  Target: SCNA; (-) strand; PAM type: YTN; PAM sequence: CTG
tgtgcctatttttataccag

SEQ ID NO: 49865 - DNA, 20 bp, Artificial Sequence
  Description of Artificial Sequence: Synthetic oligonucleotide
  Target: SCNA; (-) strand; PAM type: YTN; PAM sequence: TTG
gtctgtgtgcctatttttat

SEQ ID NO: 49866 - DNA, 20 bp, Artificial Sequence
  Description of Artificial Sequence: Synthetic oligonucleotide
  Target: SCNA; (-) strand; PAM type: YTN; PAM sequence: TTA
ttggtctgtgtgcctatttt

SEQ ID NO: 49867 - DNA, 20 bp, Artificial Sequence
  Description of Artificial Sequence: Synthetic oligonucleotide
  Target: SCNA; (-) strand; PAM type: YTN; PAM sequence: TTT
attggtctgtgtgcctattt

SEQ ID NO: 49868 - DNA, 20 bp, Artificial Sequence
  Description of Artificial Sequence: Synthetic oligonucleotide
  Target: SCNA; (-) strand; PAM type: YTN; PAM sequence: TTT
tattggtctgtgtgcctatt

SEQ ID NO: 49869 - DNA, 20 bp, Artificial Sequence
  Description of Artificial Sequence: Synthetic oligonucleotide
  Target: SCNA; (-) strand; PAM type: YTN; PAM sequence: CTG
ttttattggtctgtgtgcct

SEQ ID NO: 49870 - DNA, 20 bp, Artificial Sequence
  Description of Artificial Sequence: Synthetic oligonucleotide
  Target: SCNA; (-) strand; PAM type: YTN; PAM sequence: TTC
tgttttattggtctgtgtgc

SEQ ID NO: 49871 - DNA, 20 bp, Artificial Sequence
  Description of Artificial Sequence: Synthetic oligonucleotide
  Target: SCNA; (-) strand; PAM type: YTN; PAM sequence: CTA
ttctgttttattggtctgtg

SEQ ID NO: 49872 - DNA, 20 bp, Artificial Sequence
  Description of Artificial Sequence: Synthetic oligonucleotide
  Target: SCNA; (-) strand; PAM type: YTN; PAM sequence: CTC
tattctgttttattggtctg

SEQ ID NO: 49873 - DNA, 20 bp, Artificial Sequence
  Description of Artificial Sequence: Synthetic oligonucleotide
  Target: SCNA; (-) strand; PAM type: YTN; PAM sequence: TTC
tctattctgttttattggtc

SEQ ID NO: 49874 - DNA, 20 bp, Artificial Sequence
  Description of Artificial Sequence: Synthetic oligonucleotide
  Target: SCNA; (-) strand; PAM type: YTN; PAM sequence: CTA
ggttctctattctgttttat

SEQ ID NO: 49875 - DNA, 20 bp, Artificial Sequence
  Description of Artificial Sequence: Synthetic oligonucleotide
  Target: SCNA; (-) strand; PAM type: YTN; PAM sequence: TTC
taggttctctattctgtttt

SEQ ID NO: 49876 - DNA, 20 bp, Artificial Sequence
  Description of Artificial Sequence: Synthetic oligonucleotide
  Target: SCNA; (-) strand; PAM type: YTN; PAM sequence: TTT
ctaggttctctattctgttt

SEQ ID NO: 49877 - DNA, 20 bp, Artificial Sequence
  Description of Artificial Sequence: Synthetic oligonucleotide
  Target: SCNA; (-) strand; PAM type: YTN; PAM sequence: TTA
tttctaggttctctattctg

SEQ ID NO: 49878 - DNA, 20 bp, Artificial Sequence
  Description of Artificial Sequence: Synthetic oligonucleotide
  Target: SCNA; (-) strand; PAM type: YTN; PAM sequence: TTT
atttctaggttctctattct

SEQ ID NO: 49879 - DNA, 20 bp, Artificial Sequence
  Description of Artificial Sequence: Synthetic oligonucleotide
  Target: SCNA; (-) strand; PAM type: YTN; PAM sequence: TTG
ggtttatttctaggttctct

SEQ ID NO: 49880 - DNA, 20 bp, Artificial Sequence
  Description of Artificial Sequence: Synthetic oligonucleotide
  Target: SCNA; (-) strand; PAM type: YTN; PAM sequence: TTT
gggtttatttctaggttctc

SEQ ID NO: 49881 - DNA, 20 bp, Artificial Sequence
  Description of Artificial Sequence: Synthetic oligonucleotide
  Target: SCNA; (-) strand; PAM type: YTN; PAM sequence: TTA
gcatttgggtttatttctag

SEQ ID NO: 49882 - DNA, 20 bp, Artificial Sequence
  Description of Artificial Sequence: Synthetic oligonucleotide
  Target: SCNA; (-) strand; PAM type: YTN; PAM sequence: CTG
ttagcatttgggtttatttc

SEQ ID NO: 49883 - DNA, 20 bp, Artificial Sequence
  Description of Artificial Sequence: Synthetic oligonucleotide
  Target: SCNA; (-) strand; PAM type: YTN; PAM sequence: TTG
gctgttagcatttgggttta

SEQ ID NO: 49884 - DNA, 20 bp, Artificial Sequence
  Description of Artificial Sequence: Synthetic oligonucleotide
  Target: SCNA; (-) strand; PAM type: YTN; PAM sequence: CTT
ggctgttagcatttgggttt

SEQ ID NO: 49885 - DNA, 20 bp, Artificial Sequence
  Description of Artificial Sequence: Synthetic oligonucleotide
  Target: SCNA; (-) strand; PAM type: YTN; PAM sequence: TTG
tcaaagatcacttggctgtt

SEQ ID NO: 49886 - DNA, 20 bp, Artificial Sequence
  Description of Artificial Sequence: Synthetic oligonucleotide
  Target: SCNA; (-) strand; PAM type: YTN; PAM sequence: TTT
gtcaaagatcacttggctgt

SEQ ID NO: 49887 - DNA, 20 bp, Artificial Sequence
  Description of Artificial Sequence: Synthetic oligonucleotide
  Target: SCNA; (-) strand; PAM type: YTN; PAM sequence: CTT
tgtcaaagatcacttggctg

SEQ ID NO: 49888 - DNA, 20 bp, Artificial Sequence
  Description of Artificial Sequence: Synthetic oligonucleotide
  Target: SCNA; (-) strand; PAM type: YTN; PAM sequence: TTG
ctttgtcaaagatcacttgg

SEQ ID NO: 49889 - DNA, 20 bp, Artificial Sequence
  Description of Artificial Sequence: Synthetic oligonucleotide
  Target: SCNA; (-) strand; PAM type: YTN; PAM sequence: TTT
gctttgtcaaagatcacttg

SEQ ID NO: 49890 - DNA, 20 bp, Artificial Sequence
  Description of Artificial Sequence: Synthetic oligonucleotide
  Target: SCNA; (-) strand; PAM type: YTN; PAM sequence: TTA
tttgctttgtcaaagatcac

SEQ ID NO: 49891 - DNA, 20 bp, Artificial Sequence
  Description of Artificial Sequence: Synthetic oligonucleotide
  Target: SCNA; (-) strand; PAM type: YTN; PAM sequence: TTT
atttgctttgtcaaagatca

SEQ ID NO: 49892 - DNA, 20 bp, Artificial Sequence
  Description of Artificial Sequence: Synthetic oligonucleotide
  Target: SCNA; (-) strand; PAM type: YTN; PAM sequence: TTT
tatttgctttgtcaaagatc

SEQ ID NO: 49893 - DNA, 20 bp, Artificial Sequence
  Description of Artificial Sequence: Synthetic oligonucleotide
  Target: SCNA; (-) strand; PAM type: YTN; PAM sequence: TTT
ttatttgctttgtcaaagat

SEQ ID NO: 49894 - DNA, 20 bp, Artificial Sequence
  Description of Artificial Sequence: Synthetic oligonucleotide
  Target: SCNA; (-) strand; PAM type: YTN; PAM sequence: TTA
tgtttttatttgctttgtca

SEQ ID NO: 49895 - DNA, 20 bp, Artificial Sequence
  Description of Artificial Sequence: Synthetic oligonucleotide
  Target: SCNA; (-) strand; PAM type: YTN; PAM sequence: TTT
atgtttttatttgctttgtc

SEQ ID NO: 49896 - DNA, 20 bp, Artificial Sequence
  Description of Artificial Sequence: Synthetic oligonucleotide
  Target: SCNA; (-) strand; PAM type: YTN; PAM sequence: CTT
tatgtttttatttgctttgt

SEQ ID NO: 49897 - DNA, 20 bp, Artificial Sequence
  Description of Artificial Sequence: Synthetic oligonucleotide
  Target: SCNA; (-) strand; PAM type: YTN; PAM sequence: TTC
cccactttatgtttttattt

SEQ ID NO: 49898 - DNA, 20 bp, Artificial Sequence
  Description of Artificial Sequence: Synthetic oligonucleotide
  Target: SCNA; (-) strand; PAM type: YTN; PAM sequence: TTT
ccccactttatgtttttatt

SEQ ID NO: 49899 - DNA, 20 bp, Artificial Sequence
  Description of Artificial Sequence: Synthetic oligonucleotide
  Target: SCNA; (-) strand; PAM type: YTN; PAM sequence: CTT
tccccactttatgtttttat

SEQ ID NO: 49900 - DNA, 20 bp, Artificial Sequence
  Description of Artificial Sequence: Synthetic oligonucleotide
  Target: SCNA; (-) strand; PAM type: YTN; PAM sequence: TTA
tgtaacccatacaatacatc

SEQ ID NO: 49901 - DNA, 20 bp, Artificial Sequence
  Description of Artificial Sequence: Synthetic oligonucleotide
  Target: SCNA; (-) strand; PAM type: YTN; PAM sequence: CTT
atgtaacccatacaatacat

SEQ ID NO: 49902 - DNA, 20 bp, Artificial Sequence
  Description of Artificial Sequence: Synthetic oligonucleotide
  Target: SCNA; (-) strand; PAM type: YTN; PAM sequence: TTA
atcgatcttatgtaacccat

SEQ ID NO: 49903 - DNA, 20 bp, Artificial Sequence
  Description of Artificial Sequence: Synthetic oligonucleotide
  Target: SCNA; (-) strand; PAM type: YTN; PAM sequence: CTT
aatcgatcttatgtaaccca

SEQ ID NO: 49904 - DNA, 20 bp, Artificial Sequence
  Description of Artificial Sequence: Synthetic oligonucleotide
  Target: SCNA; (-) strand; PAM type: YTN; PAM sequence: CTC
cacttaatcgatcttatgta

SEQ ID NO: 49905 - DNA, 20 bp, Artificial Sequence
  Description of Artificial Sequence: Synthetic oligonucleotide
  Target: SCNA; (-) strand; PAM type: YTN; PAM sequence: TTC
catctccacttaatcgatct

SEQ ID NO: 49906 - DNA, 20 bp, Artificial Sequence
  Description of Artificial Sequence: Synthetic oligonucleotide
  Target: SCNA; (-) strand; PAM type: YTN; PAM sequence: TTT
ccatctccacttaatcgatc

SEQ ID NO: 49907 - DNA, 20 bp, Artificial Sequence
  Description of Artificial Sequence: Synthetic oligonucleotide
  Target: SCNA; (-) strand; PAM type: YTN; PAM sequence: TTG
taaaatttccatctccactt

SEQ ID NO: 49908 - DNA, 20 bp, Artificial Sequence
  Description of Artificial Sequence: Synthetic oligonucleotide
  Target: SCNA; (-) strand; PAM type: YTN; PAM sequence: TTA
caatatacaacaaaaagttg

SEQ ID NO: 49909 - DNA, 20 bp, Artificial Sequence
  Description of Artificial Sequence: Synthetic oligonucleotide
  Target: SCNA; (-) strand; PAM type: YTN; PAM sequence: TTT
acaatatacaacaaaaagtt

SEQ ID NO: 49910 - DNA, 20 bp, Artificial Sequence
  Description of Artificial Sequence: Synthetic oligonucleotide
  Target: SCNA; (-) strand; PAM type: YTN; PAM sequence: TTA
aaaatagtttacaatataca

SEQ ID NO: 49911 - DNA, 20 bp, Artificial Sequence
  Description of Artificial Sequence: Synthetic oligonucleotide
  Target: SCNA; (-) strand; PAM type: YTN; PAM sequence: TTT
aaaaatagtttacaatatac

SEQ ID NO: 49912 - DNA, 20 bp, Artificial Sequence
  Description of Artificial Sequence: Synthetic oligonucleotide
  Target: SCNA; (-) strand; PAM type: YTN; PAM sequence: CTA
atatttaaaaatagtttaca

SEQ ID NO: 49913 - DNA, 20 bp, Artificial Sequence
  Description of Artificial Sequence: Synthetic oligonucleotide
  Target: SCNA; (-) strand; PAM type: YTN; PAM sequence: TTG
ccactaatatttaaaaatag

SEQ ID NO: 49914 - DNA, 20 bp, Artificial Sequence
  Description of Artificial Sequence: Synthetic oligonucleotide
  Target: SCNA; (-) strand; PAM type: YTN; PAM sequence: TTT
gccactaatatttaaaaata

SEQ ID NO: 49915 - DNA, 20 bp, Artificial Sequence
  Description of Artificial Sequence: Synthetic oligonucleotide
  Target: SCNA; (-) strand; PAM type: YTN; PAM sequence: TTT
tgccactaatatttaaaaat

SEQ ID NO: 49916 - DNA, 20 bp, Artificial Sequence
  Description of Artificial Sequence: Synthetic oligonucleotide
  Target: SCNA; (-) strand; PAM type: YTN; PAM sequence: TTT
ttgccactaatatttaaaaa

SEQ ID NO: 49917 - DNA, 20 bp, Artificial Sequence
  Description of Artificial Sequence: Synthetic oligonucleotide
  Target: SCNA; (-) strand; PAM type: YTN; PAM sequence: CTT
tttgccactaatatttaaaa

SEQ ID NO: 49918 - DNA, 20 bp, Artificial Sequence
  Description of Artificial Sequence: Synthetic oligonucleotide
  Target: SCNA; (-) strand; PAM type: YTN; PAM sequence: TTA
gtctttttgccactaatatt

SEQ ID NO: 49919 - DNA, 20 bp, Artificial Sequence
  Description of Artificial Sequence: Synthetic oligonucleotide
  Target: SCNA; (-) strand; PAM type: YTN; PAM sequence: TTA
tccatattagtctttttgcc

SEQ ID NO: 49920 - DNA, 20 bp, Artificial Sequence
  Description of Artificial Sequence: Synthetic oligonucleotide
  Target: SCNA; (-) strand; PAM type: YTN; PAM sequence: TTT
atccatattagtctttttgc

SEQ ID NO: 49921 - DNA, 20 bp, Artificial Sequence
  Description of Artificial Sequence: Synthetic oligonucleotide
  Target: SCNA; (-) strand; PAM type: YTN; PAM sequence: TTG
ggaatatttatccatattag

SEQ ID NO: 49922 - DNA, 20 bp, Artificial Sequence
  Description of Artificial Sequence: Synthetic oligonucleotide
  Target: SCNA; (-) strand; PAM type: YTN; PAM sequence: TTG
ttgggaatatttatccatat

SEQ ID NO: 49923 - DNA, 20 bp, Artificial Sequence
  Description of Artificial Sequence: Synthetic oligonucleotide
  Target: SCNA; (-) strand; PAM type: YTN; PAM sequence: TTG
ggacatcaaatatcaaattg

SEQ ID NO: 49924 - DNA, 20 bp, Artificial Sequence
  Description of Artificial Sequence: Synthetic oligonucleotide
  Target: SCNA; (-) strand; PAM type: YTN; PAM sequence: TTT
gggacatcaaatatcaaatt

SEQ ID NO: 49925 - DNA, 20 bp, Artificial Sequence
  Description of Artificial Sequence: Synthetic oligonucleotide
  Target: SCNA; (-) strand; PAM type: YTN; PAM sequence: CTC
acaatagtttgggacatcaa

SEQ ID NO: 49926 - DNA, 20 bp, Artificial Sequence
  Description of Artificial Sequence: Synthetic oligonucleotide
  Target: SCNA; (-) strand; PAM type: YTN; PAM sequence: TTA
taaccaatctcacaatagtt

SEQ ID NO: 49927 - DNA, 20 bp, Artificial Sequence
  Description of Artificial Sequence: Synthetic oligonucleotide
  Target: SCNA; (-) strand; PAM type: YTN; PAM sequence: TTA
ttataaccaatctcacaata

SEQ ID NO: 49928 - DNA, 20 bp, Artificial Sequence
  Description of Artificial Sequence: Synthetic oligonucleotide
  Target: SCNA; (-) strand; PAM type: YTN; PAM sequence: TTT
attataaccaatctcacaat

SEQ ID NO: 49929 - DNA, 20 bp, Artificial Sequence
  Description of Artificial Sequence: Synthetic oligonucleotide
  Target: SCNA; (-) strand; PAM type: YTN; PAM sequence: TTT
tattataaccaatctcacaa

SEQ ID NO: 49930 - DNA, 20 bp, Artificial Sequence
  Description of Artificial Sequence: Synthetic oligonucleotide
  Target: SCNA; (-) strand; PAM type: YTN; PAM sequence: TTT
ttattataaccaatctcaca

SEQ ID NO: 49931 - DNA, 20 bp, Artificial Sequence
  Description of Artificial Sequence: Synthetic oligonucleotide
  Target: SCNA; (-) strand; PAM type: YTN; PAM sequence: TTT
tttattataaccaatctcac

SEQ ID NO: 49932 - DNA, 20 bp, Artificial Sequence
  Description of Artificial Sequence: Synthetic oligonucleotide
  Target: SCNA; (-) strand; PAM type: YTN; PAM sequence: CTA
ttttttattataaccaatct

SEQ ID NO: 49933 - DNA, 20 bp, Artificial Sequence
  Description of Artificial Sequence: Synthetic oligonucleotide
  Target: SCNA; (-) strand; PAM type: YTN; PAM sequence: TTG
ctattttttattataaccaa

SEQ ID NO: 49934 - DNA, 20 bp, Artificial Sequence
  Description of Artificial Sequence: Synthetic oligonucleotide
  Target: SCNA; (-) strand; PAM type: YTN; PAM sequence: TTT
gctattttttattataacca

SEQ ID NO: 49935 - DNA, 20 bp, Artificial Sequence
  Description of Artificial Sequence: Synthetic oligonucleotide
  Target: SCNA; (-) strand; PAM type: YTN; PAM sequence: TTC
atgggaaatcagcagggtag

SEQ ID NO: 49936 - DNA, 20 bp, Artificial Sequence
  Description of Artificial Sequence: Synthetic oligonucleotide
  Target: SCNA; (-) strand; PAM type: YTN; PAM sequence: CTT
catgggaaatcagcagggta

SEQ ID NO: 49937 - DNA, 20 bp, Artificial Sequence
  Description of Artificial Sequence: Synthetic oligonucleotide
  Target: SCNA; (-) strand; PAM type: YTN; PAM sequence: TTA
agcttcatgggaaatcagca

SEQ ID NO: 49938 - DNA, 20 bp, Artificial Sequence
  Description of Artificial Sequence: Synthetic oligonucleotide
  Target: SCNA; (-) strand; PAM type: YTN; PAM sequence: CTG
aaatgtgagagagggttaag

SEQ ID NO: 49939 - DNA, 20 bp, Artificial Sequence
  Description of Artificial Sequence: Synthetic oligonucleotide
  Target: SCNA; (-) strand; PAM type: YTN; PAM sequence: TTC
tgaaatgtgagagagggtta

SEQ ID NO: 49940 - DNA, 20 bp, Artificial Sequence
  Description of Artificial Sequence: Synthetic oligonucleotide
  Target: SCNA; (-) strand; PAM type: YTN; PAM sequence: CTG
gttctgaaatgtgagagagg

SEQ ID NO: 49941 - DNA, 20 bp, Artificial Sequence
  Description of Artificial Sequence: Synthetic oligonucleotide
  Target: SCNA; (-) strand; PAM type: YTN; PAM sequence: TTA
agtcaggctggttctgaaat

SEQ ID NO: 49942 - DNA, 20 bp, Artificial Sequence
  Description of Artificial Sequence: Synthetic oligonucleotide
  Target: SCNA; (-) strand; PAM type: YTN; PAM sequence: CTT
aagtcaggctggttctgaaa

SEQ ID NO: 49943 - DNA, 20 bp, Artificial Sequence
  Description of Artificial Sequence: Synthetic oligonucleotide
  Target: SCNA; (-) strand; PAM type: YTN; PAM sequence: TTA
agtatgtagaggcttaagtc

SEQ ID NO: 49944 - DNA, 20 bp, Artificial Sequence
  Description of Artificial Sequence: Synthetic oligonucleotide
  Target: SCNA; (-) strand; PAM type: YTN; PAM sequence: TTT
aagtatgtagaggcttaagt

SEQ ID NO: 49945 - DNA, 20 bp, Artificial Sequence
  Description of Artificial Sequence: Synthetic oligonucleotide
  Target: SCNA; (-) strand; PAM type: YTN; PAM sequence: CTG
tttaagtatgtagaggctta

SEQ ID NO: 49946 - DNA, 20 bp, Artificial Sequence
  Description of Artificial Sequence: Synthetic oligonucleotide
  Target: SCNA; (-) strand; PAM type: YTN; PAM sequence: TTG
aagctgtttaagtatgtaga

SEQ ID NO: 49947 - DNA, 20 bp, Artificial Sequence
  Description of Artificial Sequence: Synthetic oligonucleotide
  Target: SCNA; (-) strand; PAM type: YTN; PAM sequence: TTT
gaagctgtttaagtatgtag

SEQ ID NO: 49948 - DNA, 20 bp, Artificial Sequence
  Description of Artificial Sequence: Synthetic oligonucleotide
  Target: SCNA; (-) strand; PAM type: YTN; PAM sequence: CTC
agataggcatttgaagctgt

SEQ ID NO: 49949 - DNA, 20 bp, Artificial Sequence
  Description of Artificial Sequence: Synthetic oligonucleotide
  Target: SCNA; (-) strand; PAM type: YTN; PAM sequence: CTG
tctcagataggcatttgaag

SEQ ID NO: 49950 - DNA, 20 bp, Artificial Sequence
  Description of Artificial Sequence: Synthetic oligonucleotide
  Target: SCNA; (-) strand; PAM type: YTN; PAM sequence: TTA
caaagctgtctcagataggc

SEQ ID NO: 49951 - DNA, 20 bp, Artificial Sequence
  Description of Artificial Sequence: Synthetic oligonucleotide
  Target: SCNA; (-) strand; PAM type: YTN; PAM sequence: TTG
tggacagagaaacaggggca

SEQ ID NO: 49952 - DNA, 20 bp, Artificial Sequence
  Description of Artificial Sequence: Synthetic oligonucleotide
  Target: SCNA; (-) strand; PAM type: YTN; PAM sequence: CTT
gtggacagagaaacaggggc

SEQ ID NO: 49953 - DNA, 20 bp, Artificial Sequence
  Description of Artificial Sequence: Synthetic oligonucleotide
  Target: SCNA; (-) strand; PAM type: YTN; PAM sequence: CTC
ttgtggacagagaaacaggg

SEQ ID NO: 49954 - DNA, 20 bp, Artificial Sequence
  Description of Artificial Sequence: Synthetic oligonucleotide
  Target: SCNA; (-) strand; PAM type: YTN; PAM sequence: TTA
gtacctcttgtggacagaga

SEQ ID NO: 49955 - DNA, 20 bp, Artificial Sequence
  Description of Artificial Sequence: Synthetic oligonucleotide
  Target: SCNA; (-) strand; PAM type: YTN; PAM sequence: CTG
aagagaagtgaattagtacc

SEQ ID NO: 49956 - DNA, 20 bp, Artificial Sequence
  Description of Artificial Sequence: Synthetic oligonucleotide
  Target: SCNA; (-) strand; PAM type: YTN; PAM sequence: CTA
acaactgaagagaagtgaat

SEQ ID NO: 49957 - DNA, 20 bp, Artificial Sequence
  Description of Artificial Sequence: Synthetic oligonucleotide
  Target: SCNA; (-) strand; PAM type: YTN; PAM sequence: CTA
ggtctaacaactgaagagaa

SEQ ID NO: 49958 - DNA, 20 bp, Artificial Sequence
  Description of Artificial Sequence: Synthetic oligonucleotide
  Target: SCNA; (-) strand; PAM type: YTN; PAM sequence: TTG
tgtcctaggtctaacaactg

SEQ ID NO: 49959 - DNA, 20 bp, Artificial Sequence
  Description of Artificial Sequence: Synthetic oligonucleotide
  Target: SCNA; (-) strand; PAM type: YTN; PAM sequence: CTA
ttgtgtcctaggtctaacaa

SEQ ID NO: 49960 - DNA, 20 bp, Artificial Sequence
  Description of Artificial Sequence: Synthetic oligonucleotide
  Target: SCNA; (-) strand; PAM type: YTN; PAM sequence: TTG
gtgtctattgtgtcctaggt

SEQ ID NO: 49961 - DNA, 20 bp, Artificial Sequence
  Description of Artificial Sequence: Synthetic oligonucleotide
  Target: SCNA; (-) strand; PAM type: YTN; PAM sequence: CTT
ggtgtctattgtgtcctagg

SEQ ID NO: 49962 - DNA, 20 bp, Artificial Sequence
  Description of Artificial Sequence: Synthetic oligonucleotide
  Target: SCNA; (-) strand; PAM type: YTN; PAM sequence: CTA
acagaaatgtaacttggtgt

SEQ ID NO: 49963 - DNA, 20 bp, Artificial Sequence
  Description of Artificial Sequence: Synthetic oligonucleotide
  Target: SCNA; (-) strand; PAM type: YTN; PAM sequence: TTC
caagatgcacctaacagaaa

SEQ ID NO: 49964 - DNA, 20 bp, Artificial Sequence
  Description of Artificial Sequence: Synthetic oligonucleotide
  Target: SCNA; (-) strand; PAM type: YTN; PAM sequence: CTT
ccaagatgcacctaacagaa

SEQ ID NO: 49965 - DNA, 20 bp, Artificial Sequence
  Description of Artificial Sequence: Synthetic oligonucleotide
  Target: SCNA; (-) strand; PAM type: YTN; PAM sequence: CTC
aggcacttccaagatgcacc

SEQ ID NO: 49966 - DNA, 20 bp, Artificial Sequence
  Description of Artificial Sequence: Synthetic oligonucleotide
  Target: SCNA; (-) strand; PAM type: YTN; PAM sequence: TTC
tcaggcacttccaagatgca

SEQ ID NO: 49967 - DNA, 20 bp, Artificial Sequence
  Description of Artificial Sequence: Synthetic oligonucleotide
  Target: SCNA; (-) strand; PAM type: YTN; PAM sequence: TTA
ggtaaaaaggtaggtgccca

SEQ ID NO: 49968 - DNA, 20 bp, Artificial Sequence
  Description of Artificial Sequence: Synthetic oligonucleotide
  Target: SCNA; (-) strand; PAM type: YTN; PAM sequence: CTT
aggtaaaaaggtaggtgccc

SEQ ID NO: 49969 - DNA, 20 bp, Artificial Sequence
  Description of Artificial Sequence: Synthetic oligonucleotide
  Target: SCNA; (-) strand; PAM type: YTN; PAM sequence: TTA
acagagacttaggtaaaaag

SEQ ID NO: 49970 - DNA, 20 bp, Artificial Sequence
  Description of Artificial Sequence: Synthetic oligonucleotide
  Target: SCNA; (-) strand; PAM type: YTN; PAM sequence: CTA
acaggtaaacagaccaacat

SEQ ID NO: 49971 - DNA, 20 bp, Artificial Sequence
  Description of Artificial Sequence: Synthetic oligonucleotide
  Target: SCNA; (-) strand; PAM type: YTN; PAM sequence: CTA
ctaacaggtaaacagaccaa

SEQ ID NO: 49972 - DNA, 20 bp, Artificial Sequence
  Description of Artificial Sequence: Synthetic oligonucleotide
  Target: SCNA; (-) strand; PAM type: YTN; PAM sequence: CTC
cactactaacaggtaaacag

SEQ ID NO: 49973 - DNA, 20 bp, Artificial Sequence
  Description of Artificial Sequence: Synthetic oligonucleotide
  Target: SCNA; (-) strand; PAM type: YTN; PAM sequence: CTA
tgcaccaggctccactacta

SEQ ID NO: 49974 - DNA, 20 bp, Artificial Sequence
  Description of Artificial Sequence: Synthetic oligonucleotide
  Target: SCNA; (-) strand; PAM type: YTN; PAM sequence: TTC
tatgcaccaggctccactac

SEQ ID NO: 49975 - DNA, 20 bp, Artificial Sequence
  Description of Artificial Sequence: Synthetic oligonucleotide
  Target: SCNA; (-) strand; PAM type: YTN; PAM sequence: TTG
tgggacacagatggcaagga

SEQ ID NO: 49976 - DNA, 20 bp, Artificial Sequence
  Description of Artificial Sequence: Synthetic oligonucleotide
  Target: SCNA; (-) strand; PAM type: YTN; PAM sequence: TTA
tatatgtgttgtgggacaca

SEQ ID NO: 49977 - DNA, 20 bp, Artificial Sequence
  Description of Artificial Sequence: Synthetic oligonucleotide
  Target: SCNA; (-) strand; PAM type: YTN; PAM sequence: CTC
atatgccatgcagggggtta

SEQ ID NO: 49978 - DNA, 20 bp, Artificial Sequence
  Description of Artificial Sequence: Synthetic oligonucleotide
  Target: SCNA; (-) strand; PAM type: YTN; PAM sequence: CTC
aggaaaggcctcatatgcca

SEQ ID NO: 49979 - DNA, 20 bp, Artificial Sequence
  Description of Artificial Sequence: Synthetic oligonucleotide
  Target: SCNA; (-) strand; PAM type: YTN; PAM sequence: CTC
tcaggaaaggcctcatatgc

SEQ ID NO: 49980 - DNA, 20 bp, Artificial Sequence
  Description of Artificial Sequence: Synthetic oligonucleotide
  Target: SCNA; (-) strand; PAM type: YTN; PAM sequence: TTA
aaagcacccctctcaggaaa

SEQ ID NO: 49981 - DNA, 20 bp, Artificial Sequence
  Description of Artificial Sequence: Synthetic oligonucleotide
  Target: SCNA; (-) strand; PAM type: YTN; PAM sequence: CTT
aaaagcacccctctcaggaa

SEQ ID NO: 49982 - DNA, 20 bp, Artificial Sequence
  Description of Artificial Sequence: Synthetic oligonucleotide
  Target: SCNA; (-) strand; PAM type: YTN; PAM sequence: TTG
gcttaaaagcacccctctca

SEQ ID NO: 49983 - DNA, 20 bp, Artificial Sequence
  Description of Artificial Sequence: Synthetic oligonucleotide
  Target: SCNA; (-) strand; PAM type: YTN; PAM sequence: CTG
gaatgttggcttaaaagcac

SEQ ID NO: 49984 - DNA, 20 bp, Artificial Sequence
  Description of Artificial Sequence: Synthetic oligonucleotide
  Target: SCNA; (-) strand; PAM type: YTN; PAM sequence: CTC
tggaatgttggcttaaaagc

SEQ ID NO: 49985 - DNA, 20 bp, Artificial Sequence
  Description of Artificial Sequence: Synthetic oligonucleotide
  Target: SCNA; (-) strand; PAM type: YTN; PAM sequence: CTA
ggtctctggaatgttggctt

SEQ ID NO: 49986 - DNA, 20 bp, Artificial Sequence
  Description of Artificial Sequence: Synthetic oligonucleotide
  Target: SCNA; (-) strand; PAM type: YTN; PAM sequence: CTG
gggcaggggaactaggtctc

SEQ ID NO: 49987 - DNA, 20 bp, Artificial Sequence
  Description of Artificial Sequence: Synthetic oligonucleotide
  Target: SCNA; (-) strand; PAM type: YTN; PAM sequence: CTG
aggcacctggggcaggggaa

SEQ ID NO: 49988 - DNA, 20 bp, Artificial Sequence
  Description of Artificial Sequence: Synthetic oligonucleotide
  Target: SCNA; (-) strand; PAM type: YTN; PAM sequence: CTA
ggtgtaaaaactgaggcacc

SEQ ID NO: 49989 - DNA, 20 bp, Artificial Sequence
  Description of Artificial Sequence: Synthetic oligonucleotide
  Target: SCNA; (-) strand; PAM type: YTN; PAM sequence: TTC
aaaatagcatcctaggtgta

SEQ ID NO: 49990 - DNA, 20 bp, Artificial Sequence
  Description of Artificial Sequence: Synthetic oligonucleotide
  Target: SCNA; (-) strand; PAM type: YTN; PAM sequence: TTG
aggagaagattcaaaatagc

SEQ ID NO: 49991 - DNA, 20 bp, Artificial Sequence
  Description of Artificial Sequence: Synthetic oligonucleotide
  Target: SCNA; (-) strand; PAM type: YTN; PAM sequence: TTG
tcattgaggagaagattcaa

SEQ ID NO: 49992 - DNA, 20 bp, Artificial Sequence
  Description of Artificial Sequence: Synthetic oligonucleotide
  Target: SCNA; (-) strand; PAM type: YTN; PAM sequence: CTT
gtcattgaggagaagattca

SEQ ID NO: 49993 - DNA, 20 bp, Artificial Sequence
  Description of Artificial Sequence: Synthetic oligonucleotide
  Target: SCNA; (-) strand; PAM type: YTN; PAM sequence: CTA
agtgagtacagatacttgtc

SEQ ID NO: 49994 - DNA, 20 bp, Artificial Sequence
  Description of Artificial Sequence: Synthetic oligonucleotide
  Target: SCNA; (-) strand; PAM type: YTN; PAM sequence: CTC
aggaatgtggcatggaccca

SEQ ID NO: 49995 - DNA, 20 bp, Artificial Sequence
  Description of Artificial Sequence: Synthetic oligonucleotide
  Target: SCNA; (-) strand; PAM type: YTN; PAM sequence: TTG
cctcaggaatgtggcatgga

SEQ ID NO: 49996 - DNA, 20 bp, Artificial Sequence
  Description of Artificial Sequence: Synthetic oligonucleotide
  Target: SCNA; (-) strand; PAM type: YTN; PAM sequence: TTC
agttgcctcaggaatgtggc

SEQ ID NO: 49997 - DNA, 20 bp, Artificial Sequence
  Description of Artificial Sequence: Synthetic oligonucleotide
  Target: SCNA; (-) strand; PAM type: YTN; PAM sequence: TTT
cagttgcctcaggaatgtgg

SEQ ID NO: 49998 - DNA, 20 bp, Artificial Sequence
  Description of Artificial Sequence: Synthetic oligonucleotide
  Target: SCNA; (-) strand; PAM type: YTN; PAM sequence: CTG
gaaggccatcaaggagtagg

SEQ ID NO: 49999 - DNA, 20 bp, Artificial Sequence
  Description of Artificial Sequence: Synthetic oligonucleotide
  Target: SCNA; (-) strand; PAM type: YTN; PAM sequence: CTA
tagtacagacaagcatcctg

SEQ ID NO: 50000 - DNA, 20 bp, Artificial Sequence
  Description of Artificial Sequence: Synthetic oligonucleotide
  Target: SCNA; (-) strand; PAM type: YTN; PAM sequence: CTC
aggaatccagtaaaaaccaa

SEQ ID NO: 50001 - DNA, 20 bp, Artificial Sequence
  Description of Artificial Sequence: Synthetic oligonucleotide
  Target: SCNA; (-) strand; PAM type: YTN; PAM sequence: TTC
ctcaggaatccagtaaaaac

SEQ ID NO: 50002 - DNA, 20 bp, Artificial Sequence
  Description of Artificial Sequence: Synthetic oligonucleotide
  Target: SCNA; (-) strand; PAM type: YTN; PAM sequence: CTT
cctcaggaatccagtaaaaa

SEQ ID NO: 50003 - DNA, 20 bp, Artificial Sequence
  Description of Artificial Sequence: Synthetic oligonucleotide
  Target: SCNA; (-) strand; PAM type: YTN; PAM sequence: TTC
agtggaaggccttcctcagg

SEQ ID NO: 50004 - DNA, 20 bp, Artificial Sequence
  Description of Artificial Sequence: Synthetic oligonucleotide
  Target: SCNA; (-) strand; PAM type: YTN; PAM sequence: CTA
acaggtagcaaagcacatga

SEQ ID NO: 50005 - DNA, 20 bp, Artificial Sequence
  Description of Artificial Sequence: Synthetic oligonucleotide
  Target: SCNA; (-) strand; PAM type: YTN; PAM sequence: TTC
taacaggtagcaaagcacat

SEQ ID NO: 50006 - DNA, 20 bp, Artificial Sequence
  Description of Artificial Sequence: Synthetic oligonucleotide
  Target: SCNA; (-) strand; PAM type: YTN; PAM sequence: TTT
ctaacaggtagcaaagcaca

SEQ ID NO: 50007 - DNA, 20 bp, Artificial Sequence
  Description of Artificial Sequence: Synthetic oligonucleotide
  Target: SCNA; (-) strand; PAM type: YTN; PAM sequence: TTT
tctaacaggtagcaaagcac

SEQ ID NO: 50008 - DNA, 20 bp, Artificial Sequence
  Description of Artificial Sequence: Synthetic oligonucleotide
  Target: SCNA; (-) strand; PAM type: YTN; PAM sequence: TTA
cattttctaacaggtagcaa

SEQ ID NO: 50009 - DNA, 20 bp, Artificial Sequence
  Description of Artificial Sequence: Synthetic oligonucleotide
  Target: SCNA; (-) strand; PAM type: YTN; PAM sequence: TTA
ggttacattttctaacaggt

SEQ ID NO: 50010 - DNA, 20 bp, Artificial Sequence
  Description of Artificial Sequence: Synthetic oligonucleotide
  Target: SCNA; (-) strand; PAM type: YTN; PAM sequence: TTA
cattaggttacattttctaa

SEQ ID NO: 50011 - DNA, 20 bp, Artificial Sequence
  Description of Artificial Sequence: Synthetic oligonucleotide
  Target: SCNA; (-) strand; PAM type: YTN; PAM sequence: TTT
acattaggttacattttcta

SEQ ID NO: 50012 - DNA, 20 bp, Artificial Sequence
  Description of Artificial Sequence: Synthetic oligonucleotide
  Target: SCNA; (-) strand; PAM type: YTN; PAM sequence: TTA
catttacattaggttacatt

SEQ ID NO: 50013 - DNA, 20 bp, Artificial Sequence
  Description of Artificial Sequence: Synthetic oligonucleotide
  Target: SCNA; (-) strand; PAM type: YTN; PAM sequence: TTT
acatttacattaggttacat

SEQ ID NO: 50014 - DNA, 20 bp, Artificial Sequence
  Description of Artificial Sequence: Synthetic oligonucleotide
  Target: SCNA; (-) strand; PAM type: YTN; PAM sequence: CTA
gaggcaccagaggtttacat

SEQ ID NO: 50015 - DNA, 20 bp, Artificial Sequence
  Description of Artificial Sequence: Synthetic oligonucleotide
  Target: SCNA; (-) strand; PAM type: YTN; PAM sequence: TTA
tataacataagtcagtaaaa

SEQ ID NO: 50016 - DNA, 20 bp, Artificial Sequence
  Description of Artificial Sequence: Synthetic oligonucleotide
  Target: SCNA; (-) strand; PAM type: YTN; PAM sequence: TTT
atataacataagtcagtaaa

SEQ ID NO: 50017 - DNA, 20 bp, Artificial Sequence
  Description of Artificial Sequence: Synthetic oligonucleotide
  Target: SCNA; (-) strand; PAM type: YTN; PAM sequence: CTC
ataacagggcaacagaaaga

SEQ ID NO: 50018 - DNA, 20 bp, Artificial Sequence
  Description of Artificial Sequence: Synthetic oligonucleotide
  Target: SCNA; (-) strand; PAM type: YTN; PAM sequence: TTA
gagtgatacatctcataaca

SEQ ID NO: 50019 - DNA, 20 bp, Artificial Sequence
  Description of Artificial Sequence: Synthetic oligonucleotide
  Target: SCNA; (-) strand; PAM type: YTN; PAM sequence: CTT
agagtgatacatctcataac

SEQ ID NO: 50020 - DNA, 20 bp, Artificial Sequence
  Description of Artificial Sequence: Synthetic oligonucleotide
  Target: SCNA; (-) strand; PAM type: YTN; PAM sequence: TTG
gcttagagtgatacatctca

SEQ ID NO: 50021 - DNA, 20 bp, Artificial Sequence
  Description of Artificial Sequence: Synthetic oligonucleotide
  Target: SCNA; (-) strand; PAM type: YTN; PAM sequence: CTT
ggcttagagtgatacatctc

SEQ ID NO: 50022 - DNA, 20 bp, Artificial Sequence
  Description of Artificial Sequence: Synthetic oligonucleotide
  Target: SCNA; (-) strand; PAM type: YTN; PAM sequence: TTG
ggcttggcttagagtgatac

SEQ ID NO: 50023 - DNA, 20 bp, Artificial Sequence
  Description of Artificial Sequence: Synthetic oligonucleotide
  Target: SCNA; (-) strand; PAM type: YTN; PAM sequence: TTT
gggcttggcttagagtgata

SEQ ID NO: 50024 - DNA, 20 bp, Artificial Sequence
  Description of Artificial Sequence: Synthetic oligonucleotide
  Target: SCNA; (-) strand; PAM type: YTN; PAM sequence: TTA
gtgtttgggcttggcttaga

SEQ ID NO: 50025 - DNA, 20 bp, Artificial Sequence
  Description of Artificial Sequence: Synthetic oligonucleotide
  Target: SCNA; (-) strand; PAM type: YTN; PAM sequence: CTT
agtgtttgggcttggcttag

SEQ ID NO: 50026 - DNA, 20 bp, Artificial Sequence
  Description of Artificial Sequence: Synthetic oligonucleotide
  Target: SCNA; (-) strand; PAM type: YTN; PAM sequence: TTA
tcttagtgtttgggcttggc

SEQ ID NO: 50027 - DNA, 20 bp, Artificial Sequence
  Description of Artificial Sequence: Synthetic oligonucleotide
  Target: SCNA; (-) strand; PAM type: YTN; PAM sequence: TTG
ttatcttagtgtttgggctt

SEQ ID NO: 50028 - DNA, 20 bp, Artificial Sequence
  Description of Artificial Sequence: Synthetic oligonucleotide
  Target: SCNA; (-) strand; PAM type: YTN; PAM sequence: CTT
gttatcttagtgtttgggct

SEQ ID NO: 50029 - DNA, 20 bp, Artificial Sequence
  Description of Artificial Sequence: Synthetic oligonucleotide
  Target: SCNA; (-) strand; PAM type: YTN; PAM sequence: TTA
gcacttgttatcttagtgtt

SEQ ID NO: 50030 - DNA, 20 bp, Artificial Sequence
  Description of Artificial Sequence: Synthetic oligonucleotide
  Target: SCNA; (-) strand; PAM type: YTN; PAM sequence: TTT
agcacttgttatcttagtgt

SEQ ID NO: 50031 - DNA, 20 bp, Artificial Sequence
  Description of Artificial Sequence: Synthetic oligonucleotide
  Target: SCNA; (-) strand; PAM type: YTN; PAM sequence: CTT
tagcacttgttatcttagtg

SEQ ID NO: 50032 - DNA, 20 bp, Artificial Sequence
  Description of Artificial Sequence: Synthetic oligonucleotide
  Target: SCNA; (-) strand; PAM type: YTN; PAM sequence: TTC
gtcatctttagcacttgtta

SEQ ID NO: 50033 - DNA, 20 bp, Artificial Sequence
  Description of Artificial Sequence: Synthetic oligonucleotide
  Target: SCNA; (-) strand; PAM type: YTN; PAM sequence: TTC
agaatattcgtcatctttag

SEQ ID NO: 50034 - DNA, 20 bp, Artificial Sequence
  Description of Artificial Sequence: Synthetic oligonucleotide
  Target: SCNA; (-) strand; PAM type: YTN; PAM sequence: CTT
cagaatattcgtcatcttta

SEQ ID NO: 50035 - DNA, 20 bp, Artificial Sequence
  Description of Artificial Sequence: Synthetic oligonucleotide
  Target: SCNA; (-) strand; PAM type: YTN; PAM sequence: CTC
ttcagaatattcgtcatctt

SEQ ID NO: 50036 - DNA, 20 bp, Artificial Sequence
  Description of Artificial Sequence: Synthetic oligonucleotide
  Target: SCNA; (-) strand; PAM type: YTN; PAM sequence: CTG
aaaactcttcagaatattcg

SEQ ID NO: 50037 - DNA, 20 bp, Artificial Sequence
  Description of Artificial Sequence: Synthetic oligonucleotide
  Target: SCNA; (-) strand; PAM type: YTN; PAM sequence: CTG
tgtgtcctgaaaactcttca

SEQ ID NO: 50038 - DNA, 20 bp, Artificial Sequence
  Description of Artificial Sequence: Synthetic oligonucleotide
  Target: SCNA; (-) strand; PAM type: YTN; PAM sequence: TTC
tgtgtgtcctgaaaactctt

SEQ ID NO: 50039 - DNA, 20 bp, Artificial Sequence
  Description of Artificial Sequence: Synthetic oligonucleotide
  Target: SCNA; (-) strand; PAM type: YTN; PAM sequence: CTG
gccacaaacaattctgtgtg

SEQ ID NO: 50040 - DNA, 20 bp, Artificial Sequence
  Description of Artificial Sequence: Synthetic oligonucleotide
  Target: SCNA; (-) strand; PAM type: YTN; PAM sequence: CTG
aggtgctggccacaaacaat

SEQ ID NO: 50041 - DNA, 20 bp, Artificial Sequence
  Description of Artificial Sequence: Synthetic oligonucleotide
  Target: SCNA; (-) strand; PAM type: YTN; PAM sequence: TTG
gtactgaggtgctggccaca

SEQ ID NO: 50042 - DNA, 20 bp, Artificial Sequence
  Description of Artificial Sequence: Synthetic oligonucleotide
  Target: SCNA; (-) strand; PAM type: YTN; PAM sequence: TTA
ttggtactgaggtgctggcc

SEQ ID NO: 50043 - DNA, 20 bp, Artificial Sequence
  Description of Artificial Sequence: Synthetic oligonucleotide
  Target: SCNA; (-) strand; PAM type: YTN; PAM sequence: CTG
ttattggtactgaggtgctg

SEQ ID NO: 50044 - DNA, 20 bp, Artificial Sequence
  Description of Artificial Sequence: Synthetic oligonucleotide
  Target: SCNA; (-) strand; PAM type: YTN; PAM sequence: CTA
tataacatgaaatatctgtt

SEQ ID NO: 50045 - DNA, 20 bp, Artificial Sequence
  Description of Artificial Sequence: Synthetic oligonucleotide
  Target: SCNA; (-) strand; PAM type: YTN; PAM sequence: TTA
atgaccccactatataacat

SEQ ID NO: 50046 - DNA, 20 bp, Artificial Sequence
  Description of Artificial Sequence: Synthetic oligonucleotide
  Target: SCNA; (-) strand; PAM type: YTN; PAM sequence: CTT
aatgaccccactatataaca

SEQ ID NO: 50047 - DNA, 20 bp, Artificial Sequence
  Description of Artificial Sequence: Synthetic oligonucleotide
  Target: SCNA; (-) strand; PAM type: YTN; PAM sequence: CTC
aaataagtccttaatgaccc

SEQ ID NO: 50048 - DNA, 20 bp, Artificial Sequence
  Description of Artificial Sequence: Synthetic oligonucleotide
  Target: SCNA; (-) strand; PAM type: YTN; PAM sequence: TTC
cctcaaataagtccttaatg

SEQ ID NO: 50049 - DNA, 20 bp, Artificial Sequence
  Description of Artificial Sequence: Synthetic oligonucleotide
  Target: SCNA; (-) strand; PAM type: YTN; PAM sequence: TTA
ttccctcaaataagtcctta

SEQ ID NO: 50050 - DNA, 20 bp, Artificial Sequence
  Description of Artificial Sequence: Synthetic oligonucleotide
  Target: SCNA; (-) strand; PAM type: YTN; PAM sequence: TTG
attattccctcaaataagtc

SEQ ID NO: 50051 - DNA, 20 bp, Artificial Sequence
  Description of Artificial Sequence: Synthetic oligonucleotide
  Target: SCNA; (-) strand; PAM type: YTN; PAM sequence: CTT
gattattccctcaaataagt

SEQ ID NO: 50052 - DNA, 20 bp, Artificial Sequence
  Description of Artificial Sequence: Synthetic oligonucleotide
  Target: SCNA; (-) strand; PAM type: YTN; PAM sequence: TTC
ttgattattccctcaaataa

SEQ ID NO: 50053 - DNA, 20 bp, Artificial Sequence
  Description of Artificial Sequence: Synthetic oligonucleotide
  Target: SCNA; (-) strand; PAM type: YTN; PAM sequence: TTT
cttgattattccctcaaata

SEQ ID NO: 50054 - DNA, 20 bp, Artificial Sequence
  Description of Artificial Sequence: Synthetic oligonucleotide
  Target: SCNA; (-) strand; PAM type: YTN; PAM sequence: TTT
tcttgattattccctcaaat

SEQ ID NO: 50055 - DNA, 20 bp, Artificial Sequence
  Description of Artificial Sequence: Synthetic oligonucleotide
  Target: SCNA; (-) strand; PAM type: YTN; PAM sequence: TTT
ttcttgattattccctcaaa

SEQ ID NO: 50056 - DNA, 20 bp, Artificial Sequence
  Description of Artificial Sequence: Synthetic oligonucleotide
  Target: SCNA; (-) strand; PAM type: YTN; PAM sequence: CTA
ggaagtttttcttgattatt

SEQ ID NO: 50057 - DNA, 20 bp, Artificial Sequence
  Description of Artificial Sequence: Synthetic oligonucleotide
  Target: SCNA; (-) strand; PAM type: YTN; PAM sequence: CTA
gcaagactaggaagtttttc

SEQ ID NO: 50058 - DNA, 20 bp, Artificial Sequence
  Description of Artificial Sequence: Synthetic oligonucleotide
  Target: SCNA; (-) strand; PAM type: YTN; PAM sequence: CTC
tagcaagactaggaagtttt

SEQ ID NO: 50059 - DNA, 20 bp, Artificial Sequence
  Description of Artificial Sequence: Synthetic oligonucleotide
  Target: SCNA; (-) strand; PAM type: YTN; PAM sequence: CTA
gatctctagcaagactagga

SEQ ID NO: 50060 - DNA, 20 bp, Artificial Sequence
  Description of Artificial Sequence: Synthetic oligonucleotide
  Target: SCNA; (-) strand; PAM type: YTN; PAM sequence: TTG
gatatctagatctctagcaa

SEQ ID NO: 50061 - DNA, 20 bp, Artificial Sequence
  Description of Artificial Sequence: Synthetic oligonucleotide
  Target: SCNA; (-) strand; PAM type: YTN; PAM sequence: TTT
ggatatctagatctctagca

SEQ ID NO: 50062 - DNA, 20 bp, Artificial Sequence
  Description of Artificial Sequence: Synthetic oligonucleotide
  Target: SCNA; (-) strand; PAM type: YTN; PAM sequence: TTA
tatttggatatctagatctc

SEQ ID NO: 50063 - DNA, 20 bp, Artificial Sequence
  Description of Artificial Sequence: Synthetic oligonucleotide
  Target: SCNA; (-) strand; PAM type: YTN; PAM sequence: CTT
atatttggatatctagatct

SEQ ID NO: 50064 - DNA, 20 bp, Artificial Sequence
  Description of Artificial Sequence: Synthetic oligonucleotide
  Target: SCNA; (-) strand; PAM type: YTN; PAM sequence: TTC
ttatatttggatatctagat

SEQ ID NO: 50065 - DNA, 20 bp, Artificial Sequence
  Description of Artificial Sequence: Synthetic oligonucleotide
  Target: SCNA; (-) strand; PAM type: YTN; PAM sequence: CTT
cttatatttggatatctaga

SEQ ID NO: 50066 - DNA, 20 bp, Artificial Sequence
  Description of Artificial Sequence: Synthetic oligonucleotide
  Target: SCNA; (-) strand; PAM type: YTN; PAM sequence: TTG
tgcttcttatatttggatat

SEQ ID NO: 50067 - DNA, 20 bp, Artificial Sequence
  Description of Artificial Sequence: Synthetic oligonucleotide
  Target: SCNA; (-) strand; PAM type: YTN; PAM sequence: TTT
gtgcttcttatatttggata

SEQ ID NO: 50068 - DNA, 20 bp, Artificial Sequence
  Description of Artificial Sequence: Synthetic oligonucleotide
  Target: SCNA; (-) strand; PAM type: YTN; PAM sequence: CTT
tgtgcttcttatatttggat

SEQ ID NO: 50069 - DNA, 20 bp, Artificial Sequence
  Description of Artificial Sequence: Synthetic oligonucleotide
  Target: SCNA; (-) strand; PAM type: YTN; PAM sequence: TTC
tttgtgcttcttatatttgg

SEQ ID NO: 50070 - DNA, 20 bp, Artificial Sequence
  Description of Artificial Sequence: Synthetic oligonucleotide
  Target: SCNA; (-) strand; PAM type: YTN; PAM sequence: TTC
ccaggtgttctttgtgcttc

SEQ ID NO: 50071 - DNA, 20 bp, Artificial Sequence
  Description of Artificial Sequence: Synthetic oligonucleotide
  Target: SCNA; (-) strand; PAM type: YTN; PAM sequence: TTT
cccaggtgttctttgtgctt

SEQ ID NO: 50072 - DNA, 20 bp, Artificial Sequence
  Description of Artificial Sequence: Synthetic oligonucleotide
  Target: SCNA; (-) strand; PAM type: YTN; PAM sequence: TTG
aatttcccaggtgttctttg

SEQ ID NO: 50073 - DNA, 20 bp, Artificial Sequence
  Description of Artificial Sequence: Synthetic oligonucleotide
  Target: SCNA; (-) strand; PAM type: YTN; PAM sequence: TTG
cattgaatttcccaggtgtt

SEQ ID NO: 50074 - DNA, 20 bp, Artificial Sequence
  Description of Artificial Sequence: Synthetic oligonucleotide
  Target: SCNA; (-) strand; PAM type: YTN; PAM sequence: TTT
gcattgaatttcccaggtgt

SEQ ID NO: 50075 - DNA, 20 bp, Artificial Sequence
  Description of Artificial Sequence: Synthetic oligonucleotide
  Target: SCNA; (-) strand; PAM type: YTN; PAM sequence: TTT
tgcattgaatttcccaggtg

SEQ ID NO: 50076 - DNA, 20 bp, Artificial Sequence
  Description of Artificial Sequence: Synthetic oligonucleotide
  Target: SCNA; (-) strand; PAM type: YTN; PAM sequence: TTT
ttgcattgaatttcccaggt

SEQ ID NO: 50077 - DNA, 20 bp, Artificial Sequence
  Description of Artificial Sequence: Synthetic oligonucleotide
  Target: SCNA; (-) strand; PAM type: YTN; PAM sequence: CTT
tttgcattgaatttcccagg

SEQ ID NO: 50078 - DNA, 20 bp, Artificial Sequence
  Description of Artificial Sequence: Synthetic oligonucleotide
  Target: SCNA; (-) strand; PAM type: YTN; PAM sequence: CTG
tgtgcccaggtggtaatctt

SEQ ID NO: 50079 - DNA, 20 bp, Artificial Sequence
  Description of Artificial Sequence: Synthetic oligonucleotide
  Target: SCNA; (-) strand; PAM type: YTN; PAM sequence: CTG
atggctgtgtgcccaggtgg

SEQ ID NO: 50080 - DNA, 20 bp, Artificial Sequence
  Description of Artificial Sequence: Synthetic oligonucleotide
  Target: SCNA; (-) strand; PAM type: YTN; PAM sequence: TTA
gacaacctgatggctgtgtg

SEQ ID NO: 50081 - DNA, 20 bp, Artificial Sequence
  Description of Artificial Sequence: Synthetic oligonucleotide
  Target: SCNA; (-) strand; PAM type: YTN; PAM sequence: TTT
agacaacctgatggctgtgt

SEQ ID NO: 50082 - DNA, 20 bp, Artificial Sequence
  Description of Artificial Sequence: Synthetic oligonucleotide
  Target: SCNA; (-) strand; PAM type: YTN; PAM sequence: CTT
tagacaacctgatggctgtg

SEQ ID NO: 50083 - DNA, 20 bp, Artificial Sequence
  Description of Artificial Sequence: Synthetic oligonucleotide
  Target: SCNA; (-) strand; PAM type: YTN; PAM sequence: TTG
actttagacaacctgatggc

SEQ ID NO: 50084 - DNA, 20 bp, Artificial Sequence
  Description of Artificial Sequence: Synthetic oligonucleotide
  Target: SCNA; (-) strand; PAM type: YTN; PAM sequence: CTT
gactttagacaacctgatgg

SEQ ID NO: 50085 - DNA, 20 bp, Artificial Sequence
  Description of Artificial Sequence: Synthetic oligonucleotide
  Target: SCNA; (-) strand; PAM type: YTN; PAM sequence: TTC
atcttgactttagacaacct

SEQ ID NO: 50086 - DNA, 20 bp, Artificial Sequence
  Description of Artificial Sequence: Synthetic oligonucleotide
  Target: SCNA; (-) strand; PAM type: YTN; PAM sequence: CTT
catcttgactttagacaacc

SEQ ID NO: 50087 - DNA, 20 bp, Artificial Sequence
  Description of Artificial Sequence: Synthetic oligonucleotide
  Target: SCNA; (-) strand; PAM type: YTN; PAM sequence: TTC
cttcatcttgactttagaca

SEQ ID NO: 50088 - DNA, 20 bp, Artificial Sequence
  Description of Artificial Sequence: Synthetic oligonucleotide
  Target: SCNA; (-) strand; PAM type: YTN; PAM sequence: TTT
ccttcatcttgactttagac

SEQ ID NO: 50089 - DNA, 20 bp, Artificial Sequence
  Description of Artificial Sequence: Synthetic oligonucleotide
  Target: SCNA; (-) strand; PAM type: YTN; PAM sequence: CTT
tccttcatcttgactttaga

SEQ ID NO: 50090 - DNA, 20 bp, Artificial Sequence
  Description of Artificial Sequence: Synthetic oligonucleotide
  Target: SCNA; (-) strand; PAM type: YTN; PAM sequence: TTC
tttccttcatcttgacttta

SEQ ID NO: 50091 - DNA, 20 bp, Artificial Sequence
  Description of Artificial Sequence: Synthetic oligonucleotide
  Target: SCNA; (-) strand; PAM type: YTN; PAM sequence: TTA
agattctttccttcatcttg

SEQ ID NO: 50092 - DNA, 20 bp, Artificial Sequence
  Description of Artificial Sequence: Synthetic oligonucleotide
  Target: SCNA; (-) strand; PAM type: YTN; PAM sequence: CTT
aagattctttccttcatctt

SEQ ID NO: 50093 - DNA, 20 bp, Artificial Sequence
  Description of Artificial Sequence: Synthetic oligonucleotide
  Target: SCNA; (-) strand; PAM type: YTN; PAM sequence: CTC
ttaagattctttccttcatc

SEQ ID NO: 50094 - DNA, 20 bp, Artificial Sequence
  Description of Artificial Sequence: Synthetic oligonucleotide
  Target: SCNA; (-) strand; PAM type: YTN; PAM sequence: CTC
acagctcttaagattctttc

SEQ ID NO: 50095 - DNA, 20 bp, Artificial Sequence
  Description of Artificial Sequence: Synthetic oligonucleotide
  Target: SCNA; (-) strand; PAM type: YTN; PAM sequence: TTG
cctcacagctcttaagattc

SEQ ID NO: 50096 - DNA, 20 bp, Artificial Sequence
  Description of Artificial Sequence: Synthetic oligonucleotide
  Target: SCNA; (-) strand; PAM type: YTN; PAM sequence: TTT
gcctcacagctcttaagatt

SEQ ID NO: 50097 - DNA, 20 bp, Artificial Sequence
  Description of Artificial Sequence: Synthetic oligonucleotide
  Target: SCNA; (-) strand; PAM type: YTN; PAM sequence: TTT
tgcctcacagctcttaagat

SEQ ID NO: 50098 - DNA, 20 bp, Artificial Sequence
  Description of Artificial Sequence: Synthetic oligonucleotide
  Target: SCNA; (-) strand; PAM type: YTN; PAM sequence: CTT
ttgcctcacagctcttaaga

SEQ ID NO: 50099 - DNA, 20 bp, Artificial Sequence
  Description of Artificial Sequence: Synthetic oligonucleotide
  Target: SCNA; (-) strand; PAM type: YTN; PAM sequence: CTG
atgcttttgcctcacagctc

SEQ ID NO: 50100 - DNA, 20 bp, Artificial Sequence
  Description of Artificial Sequence: Synthetic oligonucleotide
  Target: SCNA; (-) strand; PAM type: YTN; PAM sequence: TTA
taggatacctgatgcttttg

SEQ ID NO: 50101 - DNA, 20 bp, Artificial Sequence
  Description of Artificial Sequence: Synthetic oligonucleotide
  Target: SCNA; (-) strand; PAM type: YTN; PAM sequence: TTT
ataggatacctgatgctttt

SEQ ID NO: 50102 - DNA, 20 bp, Artificial Sequence
  Description of Artificial Sequence: Synthetic oligonucleotide
  Target: SCNA; (-) strand; PAM type: YTN; PAM sequence: TTT
tataggatacctgatgcttt

SEQ ID NO: 50103 - DNA, 20 bp, Artificial Sequence
  Description of Artificial Sequence: Synthetic oligonucleotide
  Target: SCNA; (-) strand; PAM type: YTN; PAM sequence: CTT
ttataggatacctgatgctt

SEQ ID NO: 50104 - DNA, 20 bp, Artificial Sequence
  Description of Artificial Sequence: Synthetic oligonucleotide
  Target: SCNA; (-) strand; PAM type: YTN; PAM sequence: TTC
ttttataggatacctgatgc

SEQ ID NO: 50105 - DNA, 20 bp, Artificial Sequence
  Description of Artificial Sequence: Synthetic oligonucleotide
  Target: SCNA; (-) strand; PAM type: YTN; PAM sequence: TTT
cttttataggatacctgatg

SEQ ID NO: 50106 - DNA, 20 bp, Artificial Sequence
  Description of Artificial Sequence: Synthetic oligonucleotide
  Target: SCNA; (-) strand; PAM type: YTN; PAM sequence: TTT
tcttttataggatacctgat

SEQ ID NO: 50107 - DNA, 20 bp, Artificial Sequence
  Description of Artificial Sequence: Synthetic oligonucleotide
  Target: SCNA; (-) strand; PAM type: YTN; PAM sequence: CTA
tgttttcttttataggatac

SEQ ID NO: 50108 - DNA, 20 bp, Artificial Sequence
  Description of Artificial Sequence: Synthetic oligonucleotide
  Target: SCNA; (-) strand; PAM type: YTN; PAM sequence: CTG
ctatgttttcttttatagga

SEQ ID NO: 50109 - DNA, 20 bp, Artificial Sequence
  Description of Artificial Sequence: Synthetic oligonucleotide
  Target: SCNA; (-) strand; PAM type: YTN; PAM sequence: TTA
atctgctatgttttctttta

SEQ ID NO: 50110 - DNA, 20 bp, Artificial Sequence
  Description of Artificial Sequence: Synthetic oligonucleotide
  Target: SCNA; (-) strand; PAM type: YTN; PAM sequence: CTA
ttaatctgctatgttttctt

SEQ ID NO: 50111 - DNA, 20 bp, Artificial Sequence
  Description of Artificial Sequence: Synthetic oligonucleotide
  Target: SCNA; (-) strand; PAM type: YTN; PAM sequence: CTG
ctattaatctgctatgtttt

SEQ ID NO: 50112 - DNA, 20 bp, Artificial Sequence
  Description of Artificial Sequence: Synthetic oligonucleotide
  Target: SCNA; (-) strand; PAM type: YTN; PAM sequence: CTG
agaaatctgctattaatctg

SEQ ID NO: 50113 - DNA, 20 bp, Artificial Sequence
  Description of Artificial Sequence: Synthetic oligonucleotide
  Target: SCNA; (-) strand; PAM type: YTN; PAM sequence: TTA
tgctgagaaatctgctatta

SEQ ID NO: 50114 - DNA, 20 bp, Artificial Sequence
  Description of Artificial Sequence: Synthetic oligonucleotide
  Target: SCNA; (-) strand; PAM type: YTN; PAM sequence: TTT
atgctgagaaatctgctatt

SEQ ID NO: 50115 - DNA, 20 bp, Artificial Sequence
  Description of Artificial Sequence: Synthetic oligonucleotide
  Target: SCNA; (-) strand; PAM type: YTN; PAM sequence: CTA
gcagggtttatgctgagaaa

SEQ ID NO: 50116 - DNA, 20 bp, Artificial Sequence
  Description of Artificial Sequence: Synthetic oligonucleotide
  Target: SCNA; (-) strand; PAM type: YTN; PAM sequence: CTG
gctagcagggtttatgctga

SEQ ID NO: 50117 - DNA, 20 bp, Artificial Sequence
  Description of Artificial Sequence: Synthetic oligonucleotide
  Target: SCNA; (-) strand; PAM type: YTN; PAM sequence: TTC
tggctagcagggtttatgct

SEQ ID NO: 50118 - DNA, 20 bp, Artificial Sequence
  Description of Artificial Sequence: Synthetic oligonucleotide
  Target: SCNA; (-) strand; PAM type: YTN; PAM sequence: CTT
ctggctagcagggtttatgc

SEQ ID NO: 50119 - DNA, 20 bp, Artificial Sequence
  Description of Artificial Sequence: Synthetic oligonucleotide
  Target: SCNA; (-) strand; PAM type: YTN; PAM sequence: CTC
ttctggctagcagggtttat

SEQ ID NO: 50120 - DNA, 20 bp, Artificial Sequence
  Description of Artificial Sequence: Synthetic oligonucleotide
  Target: SCNA; (-) strand; PAM type: YTN; PAM sequence: CTA
aatatagggcccaatctctt

SEQ ID NO: 50121 - DNA, 20 bp, Artificial Sequence
  Description of Artificial Sequence: Synthetic oligonucleotide
  Target: SCNA; (-) strand; PAM type: YTN; PAM sequence: TTA
agaggctaaatatagggccc

SEQ ID NO: 50122 - DNA, 20 bp, Artificial Sequence
  Description of Artificial Sequence: Synthetic oligonucleotide
  Target: SCNA; (-) strand; PAM type: YTN; PAM sequence: TTT
aagaggctaaatatagggcc

SEQ ID NO: 50123 - DNA, 20 bp, Artificial Sequence
  Description of Artificial Sequence: Synthetic oligonucleotide
  Target: SCNA; (-) strand; PAM type: YTN; PAM sequence: TTG
tttaagaggctaaatatagg

SEQ ID NO: 50124 - DNA, 20 bp, Artificial Sequence
  Description of Artificial Sequence: Synthetic oligonucleotide
  Target: SCNA; (-) strand; PAM type: YTN; PAM sequence: TTT
gtttaagaggctaaatatag

SEQ ID NO: 50125 - DNA, 20 bp, Artificial Sequence
  Description of Artificial Sequence: Synthetic oligonucleotide
  Target: SCNA; (-) strand; PAM type: YTN; PAM sequence: TTT
tgtttaagaggctaaatata

SEQ ID NO: 50126 - DNA, 20 bp, Artificial Sequence
  Description of Artificial Sequence: Synthetic oligonucleotide
  Target: SCNA; (-) strand; PAM type: YTN; PAM sequence: TTA
ttttgtttaagaggctaaat

SEQ ID NO: 50127 - DNA, 20 bp, Artificial Sequence
  Description of Artificial Sequence: Synthetic oligonucleotide
  Target: SCNA; (-) strand; PAM type: YTN; PAM sequence: CTG
ataattattttgtttaagag

SEQ ID NO: 50128 - DNA, 20 bp, Artificial Sequence
  Description of Artificial Sequence: Synthetic oligonucleotide
  Target: SCNA; (-) strand; PAM type: YTN; PAM sequence: TTG
gctgataattattttgttta

SEQ ID NO: 50129 - DNA, 20 bp, Artificial Sequence
  Description of Artificial Sequence: Synthetic oligonucleotide
  Target: SCNA; (-) strand; PAM type: YTN; PAM sequence: CTT
ggctgataattattttgttt

SEQ ID NO: 50130 - DNA, 20 bp, Artificial Sequence
  Description of Artificial Sequence: Synthetic oligonucleotide
  Target: SCNA; (-) strand; PAM type: YTN; PAM sequence: TTC
ttggctgataattattttgt

SEQ ID NO: 50131 - DNA, 20 bp, Artificial Sequence
  Description of Artificial Sequence: Synthetic oligonucleotide
  Target: SCNA; (-) strand; PAM type: YTN; PAM sequence: CTG
gatacaaaattcttggctga

SEQ ID NO: 50132 - DNA, 20 bp, Artificial Sequence
  Description of Artificial Sequence: Synthetic oligonucleotide
  Target: SCNA; (-) strand; PAM type: YTN; PAM sequence: TTC
actggatacaaaattcttgg

SEQ ID NO: 50133 - DNA, 20 bp, Artificial Sequence
  Description of Artificial Sequence: Synthetic oligonucleotide
  Target: SCNA; (-) strand; PAM type: YTN; PAM sequence: TTT
cactggatacaaaattcttg

SEQ ID NO: 50134 - DNA, 20 bp, Artificial Sequence
  Description of Artificial Sequence: Synthetic oligonucleotide
  Target: SCNA; (-) strand; PAM type: YTN; PAM sequence: TTA
gtttcactggatacaaaatt

SEQ ID NO: 50135 - DNA, 20 bp, Artificial Sequence
  Description of Artificial Sequence: Synthetic oligonucleotide
  Target: SCNA; (-) strand; PAM type: YTN; PAM sequence: CTT
agtttcactggatacaaaat

SEQ ID NO: 50136 - DNA, 20 bp, Artificial Sequence
  Description of Artificial Sequence: Synthetic oligonucleotide
  Target: SCNA; (-) strand; PAM type: YTN; PAM sequence: TTA
tgaagcttagtttcactgga

SEQ ID NO: 50137 - DNA, 20 bp, Artificial Sequence
  Description of Artificial Sequence: Synthetic oligonucleotide
  Target: SCNA; (-) strand; PAM type: YTN; PAM sequence: TTT
atgaagcttagtttcactgg

SEQ ID NO: 50138 - DNA, 20 bp, Artificial Sequence
  Description of Artificial Sequence: Synthetic oligonucleotide
  Target: SCNA; (-) strand; PAM type: YTN; PAM sequence: TTC
atttatgaagcttagtttca

SEQ ID NO: 50139 - DNA, 20 bp, Artificial Sequence
  Description of Artificial Sequence: Synthetic oligonucleotide
  Target: SCNA; (-) strand; PAM type: YTN; PAM sequence: TTT
catttatgaagcttagtttc

SEQ ID NO: 50140 - DNA, 20 bp, Artificial Sequence
  Description of Artificial Sequence: Synthetic oligonucleotide
  Target: SCNA; (-) strand; PAM type: YTN; PAM sequence: CTT
tcatttatgaagcttagttt

SEQ ID NO: 50141 - DNA, 20 bp, Artificial Sequence
  Description of Artificial Sequence: Synthetic oligonucleotide
  Target: SCNA; (-) strand; PAM type: YTN; PAM sequence: CTC
tttcatttatgaagcttagt

SEQ ID NO: 50142 - DNA, 20 bp, Artificial Sequence
  Description of Artificial Sequence: Synthetic oligonucleotide
  Target: SCNA; (-) strand; PAM type: YTN; PAM sequence: CTC
tctttcatttatgaagctta

SEQ ID NO: 50143 - DNA, 20 bp, Artificial Sequence
  Description of Artificial Sequence: Synthetic oligonucleotide
  Target: SCNA; (-) strand; PAM type: YTN; PAM sequence: TTA
tctctctttcatttatgaag

SEQ ID NO: 50144 - DNA, 20 bp, Artificial Sequence
  Description of Artificial Sequence: Synthetic oligonucleotide
  Target: SCNA; (-) strand; PAM type: YTN; PAM sequence: TTT
atctctctttcatttatgaa

SEQ ID NO: 50145 - DNA, 20 bp, Artificial Sequence
  Description of Artificial Sequence: Synthetic oligonucleotide
  Target: SCNA; (-) strand; PAM type: YTN; PAM sequence: CTT
tatctctctttcatttatga

SEQ ID NO: 50146 - DNA, 20 bp, Artificial Sequence
  Description of Artificial Sequence: Synthetic oligonucleotide
  Target: SCNA; (-) strand; PAM type: YTN; PAM sequence: CTG
aaaaagactttatctctctt

SEQ ID NO: 50147 - DNA, 20 bp, Artificial Sequence
  Description of Artificial Sequence: Synthetic oligonucleotide
  Target: SCNA; (-) strand; PAM type: YTN; PAM sequence: TTG
tctgaaaaagactttatctc

SEQ ID NO: 50148 - DNA, 20 bp, Artificial Sequence
  Description of Artificial Sequence: Synthetic oligonucleotide
  Target: SCNA; (-) strand; PAM type: YTN; PAM sequence: TTT
gtctgaaaaagactttatct

SEQ ID NO: 50149 - DNA, 20 bp, Artificial Sequence
  Description of Artificial Sequence: Synthetic oligonucleotide
  Target: SCNA; (-) strand; PAM type: YTN; PAM sequence: TTG
tttgtctgaaaaagacttta

SEQ ID NO: 50150 - DNA, 20 bp, Artificial Sequence
  Description of Artificial Sequence: Synthetic oligonucleotide
  Target: SCNA; (-) strand; PAM type: YTN; PAM sequence: TTT
gtttgtctgaaaaagacttt

SEQ ID NO: 50151 - DNA, 20 bp, Artificial Sequence
  Description of Artificial Sequence: Synthetic oligonucleotide
  Target: SCNA; (-) strand; PAM type: YTN; PAM sequence: TTC
agcatttgtttgtctgaaaa

SEQ ID NO: 50152 - DNA, 20 bp, Artificial Sequence
  Description of Artificial Sequence: Synthetic oligonucleotide
  Target: SCNA; (-) strand; PAM type: YTN; PAM sequence: TTG
gtagtggcaaattcagcatt

SEQ ID NO: 50153 - DNA, 20 bp, Artificial Sequence
  Description of Artificial Sequence: Synthetic oligonucleotide
  Target: SCNA; (-) strand; PAM type: YTN; PAM sequence: CTT
ggtagtggcaaattcagcat

SEQ ID NO: 50154 - DNA, 20 bp, Artificial Sequence
  Description of Artificial Sequence: Synthetic oligonucleotide
  Target: SCNA; (-) strand; PAM type: YTN; PAM sequence: CTG
gcttggtagtggcaaattca

SEQ ID NO: 50155 - DNA, 20 bp, Artificial Sequence
  Description of Artificial Sequence: Synthetic oligonucleotide
  Target: SCNA; (-) strand; PAM type: YTN; PAM sequence: CTC
agtgctggcttggtagtggc

SEQ ID NO: 50156 - DNA, 20 bp, Artificial Sequence
  Description of Artificial Sequence: Synthetic oligonucleotide
  Target: SCNA; (-) strand; PAM type: YTN; PAM sequence: TTC
tcagtgctggcttggtagtg

SEQ ID NO: 50157 - DNA, 20 bp, Artificial Sequence
  Description of Artificial Sequence: Synthetic oligonucleotide
  Target: SCNA; (-) strand; PAM type: YTN; PAM sequence: TTT
ctcagtgctggcttggtagt

SEQ ID NO: 50158 - DNA, 20 bp, Artificial Sequence
  Description of Artificial Sequence: Synthetic oligonucleotide
  Target: SCNA; (-) strand; PAM type: YTN; PAM sequence: TTA
gcatttctcagtgctggctt

SEQ ID NO: 50159 - DNA, 20 bp, Artificial Sequence
  Description of Artificial Sequence: Synthetic oligonucleotide
  Target: SCNA; (-) strand; PAM type: YTN; PAM sequence: TTT
agcatttctcagtgctggct

SEQ ID NO: 50160 - DNA, 20 bp, Artificial Sequence
  Description of Artificial Sequence: Synthetic oligonucleotide
  Target: SCNA; (-) strand; PAM type: YTN; PAM sequence: TTT
tagcatttctcagtgctggc

SEQ ID NO: 50161 - DNA, 20 bp, Artificial Sequence
  Description of Artificial Sequence: Synthetic oligonucleotide
  Target: SCNA; (-) strand; PAM type: YTN; PAM sequence: CTT
ttagcatttctcagtgctgg

SEQ ID NO: 50162 - DNA, 20 bp, Artificial Sequence
  Description of Artificial Sequence: Synthetic oligonucleotide
  Target: SCNA; (-) strand; PAM type: YTN; PAM sequence: CTC
cttttagcatttctcagtgc

SEQ ID NO: 50163 - DNA, 20 bp, Artificial Sequence
  Description of Artificial Sequence: Synthetic oligonucleotide
  Target: SCNA; (-) strand; PAM type: YTN; PAM sequence: TTA
gagctccttttagcatttct

SEQ ID NO: 50164 - DNA, 20 bp, Artificial Sequence
  Description of Artificial Sequence: Synthetic oligonucleotide
  Target: SCNA; (-) strand; PAM type: YTN; PAM sequence: TTT
agagctccttttagcatttc

SEQ ID NO: 50165 - DNA, 20 bp, Artificial Sequence
  Description of Artificial Sequence: Synthetic oligonucleotide
  Target: SCNA; (-) strand; PAM type: YTN; PAM sequence: TTC
aagatttagagctcctttta

SEQ ID NO: 50166 - DNA, 20 bp, Artificial Sequence
  Description of Artificial Sequence: Synthetic oligonucleotide
  Target: SCNA; (-) strand; PAM type: YTN; PAM sequence: TTT
caagatttagagctcctttt

SEQ ID NO: 50167 - DNA, 20 bp, Artificial Sequence
  Description of Artificial Sequence: Synthetic oligonucleotide
  Target: SCNA; (-) strand; PAM type: YTN; PAM sequence: CTG
tttcaagatttagagctcct

SEQ ID NO: 50168 - DNA, 20 bp, Artificial Sequence
  Description of Artificial Sequence: Synthetic oligonucleotide
  Target: SCNA; (-) strand; PAM type: YTN; PAM sequence: TTA
ctgtttcaagatttagagct

SEQ ID NO: 50169 - DNA, 20 bp, Artificial Sequence
  Description of Artificial Sequence: Synthetic oligonucleotide
  Target: SCNA; (-) strand; PAM type: YTN; PAM sequence: TTC
aagttactgtttcaagattt

SEQ ID NO: 50170 - DNA, 20 bp, Artificial Sequence
  Description of Artificial Sequence: Synthetic oligonucleotide
  Target: SCNA; (-) strand; PAM type: YTN; PAM sequence: TTG
atgtattcaagttactgttt

SEQ ID NO: 50171 - DNA, 20 bp, Artificial Sequence
  Description of Artificial Sequence: Synthetic oligonucleotide
  Target: SCNA; (-) strand; PAM type: YTN; PAM sequence: TTT
gatgtattcaagttactgtt

SEQ ID NO: 50172 - DNA, 20 bp, Artificial Sequence
  Description of Artificial Sequence: Synthetic oligonucleotide
  Target: SCNA; (-) strand; PAM type: YTN; PAM sequence: TTT
tgatgtattcaagttactgt

SEQ ID NO: 50173 - DNA, 20 bp, Artificial Sequence
  Description of Artificial Sequence: Synthetic oligonucleotide
  Target: SCNA; (-) strand; PAM type: YTN; PAM sequence: CTA
ttttgatgtattcaagttac

SEQ ID NO: 50174 - DNA, 20 bp, Artificial Sequence
  Description of Artificial Sequence: Synthetic oligonucleotide
  Target: SCNA; (-) strand; PAM type: YTN; PAM sequence: TTC
tattttgatgtattcaagtt

SEQ ID NO: 50175 - DNA, 20 bp, Artificial Sequence
  Description of Artificial Sequence: Synthetic oligonucleotide
  Target: SCNA; (-) strand; PAM type: YTN; PAM sequence: TTA
aggaggttctattttgatgt

SEQ ID NO: 50176 - DNA, 20 bp, Artificial Sequence
  Description of Artificial Sequence: Synthetic oligonucleotide
  Target: SCNA; (-) strand; PAM type: YTN; PAM sequence: TTT
aaggaggttctattttgatg

SEQ ID NO: 50177 - DNA, 20 bp, Artificial Sequence
  Description of Artificial Sequence: Synthetic oligonucleotide
  Target: SCNA; (-) strand; PAM type: YTN; PAM sequence: CTT
taaggaggttctattttgat

SEQ ID NO: 50178 - DNA, 20 bp, Artificial Sequence
  Description of Artificial Sequence: Synthetic oligonucleotide
  Target: SCNA; (-) strand; PAM type: YTN; PAM sequence: TTA
tgctttaaggaggttctatt

SEQ ID NO: 50179 - DNA, 20 bp, Artificial Sequence
  Description of Artificial Sequence: Synthetic oligonucleotide
  Target: SCNA; (-) strand; PAM type: YTN; PAM sequence: TTT
atgctttaaggaggttctat

SEQ ID NO: 50180 - DNA, 20 bp, Artificial Sequence
  Description of Artificial Sequence: Synthetic oligonucleotide
  Target: SCNA; (-) strand; PAM type: YTN; PAM sequence: TTA
aatttatgctttaaggaggt

SEQ ID NO: 50181 - DNA, 20 bp, Artificial Sequence
  Description of Artificial Sequence: Synthetic oligonucleotide
  Target: SCNA; (-) strand; PAM type: YTN; PAM sequence: CTG
ttaaatttatgctttaagga

SEQ ID NO: 50182 - DNA, 20 bp, Artificial Sequence
  Description of Artificial Sequence: Synthetic oligonucleotide
  Target: SCNA; (-) strand; PAM type: YTN; PAM sequence: TTA
tgggtcctgttaaatttatg

SEQ ID NO: 50183 - DNA, 20 bp, Artificial Sequence
  Description of Artificial Sequence: Synthetic oligonucleotide
  Target: SCNA; (-) strand; PAM type: YTN; PAM sequence: TTT
atgggtcctgttaaatttat

SEQ ID NO: 50184 - DNA, 20 bp, Artificial Sequence
  Description of Artificial Sequence: Synthetic oligonucleotide
  Target: SCNA; (-) strand; PAM type: YTN; PAM sequence: TTT
tatgggtcctgttaaattta

SEQ ID NO: 50185 - DNA, 20 bp, Artificial Sequence
  Description of Artificial Sequence: Synthetic oligonucleotide
  Target: SCNA; (-) strand; PAM type: YTN; PAM sequence: TTA
ttttatgggtcctgttaaat

SEQ ID NO: 50186 - DNA, 20 bp, Artificial Sequence
  Description of Artificial Sequence: Synthetic oligonucleotide
  Target: SCNA; (-) strand; PAM type: YTN; PAM sequence: TTA
ttattttatgggtcctgtta

SEQ ID NO: 50187 - DNA, 20 bp, Artificial Sequence
  Description of Artificial Sequence: Synthetic oligonucleotide
  Target: SCNA; (-) strand; PAM type: YTN; PAM sequence: TTG
tgttattattttatgggtcc

SEQ ID NO: 50188 - DNA, 20 bp, Artificial Sequence
  Description of Artificial Sequence: Synthetic oligonucleotide
  Target: SCNA; (-) strand; PAM type: YTN; PAM sequence: TTA
attgtgttattattttatgg

SEQ ID NO: 50189 - DNA, 20 bp, Artificial Sequence
  Description of Artificial Sequence: Synthetic oligonucleotide
  Target: SCNA; (-) strand; PAM type: YTN; PAM sequence: TTG
ttaattgtgttattatttta

SEQ ID NO: 50190 - DNA, 20 bp, Artificial Sequence
  Description of Artificial Sequence: Synthetic oligonucleotide
  Target: SCNA; (-) strand; PAM type: YTN; PAM sequence: CTG
ttgttaattgtgttattatt

SEQ ID NO: 50191 - DNA, 20 bp, Artificial Sequence
  Description of Artificial Sequence: Synthetic oligonucleotide
  Target: SCNA; (-) strand; PAM type: YTN; PAM sequence: TTG
ctgttgttaattgtgttatt

SEQ ID NO: 50192 - DNA, 20 bp, Artificial Sequence
  Description of Artificial Sequence: Synthetic oligonucleotide
  Target: SCNA; (-) strand; PAM type: YTN; PAM sequence: TTG
ttgctgttgttaattgtgtt

SEQ ID NO: 50193 - DNA, 20 bp, Artificial Sequence
  Description of Artificial Sequence: Synthetic oligonucleotide
  Target: SCNA; (-) strand; PAM type: YTN; PAM sequence: TTG
ttgttgctgttgttaattgt

SEQ ID NO: 50194 - DNA, 20 bp, Artificial Sequence
  Description of Artificial Sequence: Synthetic oligonucleotide
  Target: SCNA; (-) strand; PAM type: YTN; PAM sequence: CTT
gttgttgctgttgttaattg

SEQ ID NO: 50195 - DNA, 20 bp, Artificial Sequence
  Description of Artificial Sequence: Synthetic oligonucleotide
  Target: SCNA; (-) strand; PAM type: YTN; PAM sequence: TTC
ttgttgttgctgttgttaat

SEQ ID NO: 50196 - DNA, 20 bp, Artificial Sequence
  Description of Artificial Sequence: Synthetic oligonucleotide
  Target: SCNA; (-) strand; PAM type: YTN; PAM sequence: CTT
cttgttgttgctgttgttaa

SEQ ID NO: 50197 - DNA, 20 bp, Artificial Sequence
  Description of Artificial Sequence: Synthetic oligonucleotide
  Target: SCNA; (-) strand; PAM type: YTN; PAM sequence: CTC
aataccttcttgttgttgct

SEQ ID NO: 50198 - DNA, 20 bp, Artificial Sequence
  Description of Artificial Sequence: Synthetic oligonucleotide
  Target: SCNA; (-) strand; PAM type: YTN; PAM sequence: TTG
cctcaataccttcttgttgt

SEQ ID NO: 50199 - DNA, 20 bp, Artificial Sequence
  Description of Artificial Sequence: Synthetic oligonucleotide
  Target: SCNA; (-) strand; PAM type: YTN; PAM sequence: TTG
ttgcctcaataccttcttgt

SEQ ID NO: 50200 - DNA, 20 bp, Artificial Sequence
  Description of Artificial Sequence: Synthetic oligonucleotide
  Target: SCNA; (-) strand; PAM type: YTN; PAM sequence: TTC
atcatgatagttgttgcctc

SEQ ID NO: 50201 - DNA, 20 bp, Artificial Sequence
  Description of Artificial Sequence: Synthetic oligonucleotide
  Target: SCNA; (-) strand; PAM type: YTN; PAM sequence: CTA
ttcatcatgatagttgttgc

SEQ ID NO: 50202 - DNA, 20 bp, Artificial Sequence
  Description of Artificial Sequence: Synthetic oligonucleotide
  Target: SCNA; (-) strand; PAM type: YTN; PAM sequence: TTC
tattcatcatgatagttgtt

SEQ ID NO: 50203 - DNA, 20 bp, Artificial Sequence
  Description of Artificial Sequence: Synthetic oligonucleotide
  Target: SCNA; (-) strand; PAM type: YTN; PAM sequence: CTG
ttctattcatcatgatagtt

SEQ ID NO: 50204 - DNA, 20 bp, Artificial Sequence
  Description of Artificial Sequence: Synthetic oligonucleotide
  Target: SCNA; (-) strand; PAM type: YTN; PAM sequence: TTG
aggtatgaggtactgttcta

SEQ ID NO: 50205 - DNA, 20 bp, Artificial Sequence
  Description of Artificial Sequence: Synthetic oligonucleotide
  Target: SCNA; (-) strand; PAM type: YTN; PAM sequence: TTA
gtattgaggtatgaggtact

SEQ ID NO: 50206 - DNA, 20 bp, Artificial Sequence
  Description of Artificial Sequence: Synthetic oligonucleotide
  Target: SCNA; (-) strand; PAM type: YTN; PAM sequence: TTC
aacattagtattgaggtatg

SEQ ID NO: 50207 - DNA, 20 bp, Artificial Sequence
  Description of Artificial Sequence: Synthetic oligonucleotide
  Target: SCNA; (-) strand; PAM type: YTN; PAM sequence: TTA
cattcaacattagtattgag

SEQ ID NO: 50208 - DNA, 20 bp, Artificial Sequence
  Description of Artificial Sequence: Synthetic oligonucleotide
  Target: SCNA; (-) strand; PAM type: YTN; PAM sequence: TTT
acattcaacattagtattga

SEQ ID NO: 50209 - DNA, 20 bp, Artificial Sequence
  Description of Artificial Sequence: Synthetic oligonucleotide
  Target: SCNA; (-) strand; PAM type: YTN; PAM sequence: TTA
ggccatttacattcaacatt

SEQ ID NO: 50210 - DNA, 20 bp, Artificial Sequence
  Description of Artificial Sequence: Synthetic oligonucleotide
  Target: SCNA; (-) strand; PAM type: YTN; PAM sequence: TTT
aggccatttacattcaacat

SEQ ID NO: 50211 - DNA, 20 bp, Artificial Sequence
  Description of Artificial Sequence: Synthetic oligonucleotide
  Target: SCNA; (-) strand; PAM type: YTN; PAM sequence: TTA
agtggagcatttaggccatt

SEQ ID NO: 50212 - DNA, 20 bp, Artificial Sequence
  Description of Artificial Sequence: Synthetic oligonucleotide
  Target: SCNA; (-) strand; PAM type: YTN; PAM sequence: TTT
aagtggagcatttaggccat

SEQ ID NO: 50213 - DNA, 20 bp, Artificial Sequence
  Description of Artificial Sequence: Synthetic oligonucleotide
  Target: SCNA; (-) strand; PAM type: YTN; PAM sequence: TTT
taagtggagcatttaggcca

SEQ ID NO: 50214 - DNA, 20 bp, Artificial Sequence
  Description of Artificial Sequence: Synthetic oligonucleotide
  Target: SCNA; (-) strand; PAM type: YTN; PAM sequence: CTT
ttaagtggagcatttaggcc

SEQ ID NO: 50215 - DNA, 20 bp, Artificial Sequence
  Description of Artificial Sequence: Synthetic oligonucleotide
  Target: SCNA; (-) strand; PAM type: YTN; PAM sequence: CTG
tatcttttaagtggagcatt

SEQ ID NO: 50216 - DNA, 20 bp, Artificial Sequence
  Description of Artificial Sequence: Synthetic oligonucleotide
  Target: SCNA; (-) strand; PAM type: YTN; PAM sequence: TTC
tgtatcttttaagtggagca

SEQ ID NO: 50217 - DNA, 20 bp, Artificial Sequence
  Description of Artificial Sequence: Synthetic oligonucleotide
  Target: SCNA; (-) strand; PAM type: YTN; PAM sequence: CTG
ccattctgtatcttttaagt

SEQ ID NO: 50218 - DNA, 20 bp, Artificial Sequence
  Description of Artificial Sequence: Synthetic oligonucleotide
  Target: SCNA; (-) strand; PAM type: YTN; PAM sequence: TTC
tgccattctgtatcttttaa

SEQ ID NO: 50219 - DNA, 20 bp, Artificial Sequence
  Description of Artificial Sequence: Synthetic oligonucleotide
  Target: SCNA; (-) strand; PAM type: YTN; PAM sequence: TTA
tccattctgccattctgtat

SEQ ID NO: 50220 - DNA, 20 bp, Artificial Sequence
  Description of Artificial Sequence: Synthetic oligonucleotide
  Target: SCNA; (-) strand; PAM type: YTN; PAM sequence: TTT
atccattctgccattctgta

SEQ ID NO: 50221 - DNA, 20 bp, Artificial Sequence
  Description of Artificial Sequence: Synthetic oligonucleotide
  Target: SCNA; (-) strand; PAM type: YTN; PAM sequence: TTT
tatccattctgccattctgt

SEQ ID NO: 50222 - DNA, 20 bp, Artificial Sequence
  Description of Artificial Sequence: Synthetic oligonucleotide
  Target: SCNA; (-) strand; PAM type: YTN; PAM sequence: TTT
ttatccattctgccattctg

SEQ ID NO: 50223 - DNA, 20 bp, Artificial Sequence
  Description of Artificial Sequence: Synthetic oligonucleotide
  Target: SCNA; (-) strand; PAM type: YTN; PAM sequence: TTG
atggatttttatccattctg

SEQ ID NO: 50224 - DNA, 20 bp, Artificial Sequence
  Description of Artificial Sequence: Synthetic oligonucleotide
  Target: SCNA; (-) strand; PAM type: YTN; PAM sequence: TTG
gttgatggatttttatccat

SEQ ID NO: 50225 - DNA, 20 bp, Artificial Sequence
  Description of Artificial Sequence: Synthetic oligonucleotide
  Target: SCNA; (-) strand; PAM type: YTN; PAM sequence: CTT
ggttgatggatttttatcca

SEQ ID NO: 50226 - DNA, 20 bp, Artificial Sequence
  Description of Artificial Sequence: Synthetic oligonucleotide
  Target: SCNA; (-) strand; PAM type: YTN; PAM sequence: TTG
aagacagcagatacttggtt

SEQ ID NO: 50227 - DNA, 20 bp, Artificial Sequence
  Description of Artificial Sequence: Synthetic oligonucleotide
  Target: SCNA; (-) strand; PAM type: YTN; PAM sequence: CTT
gaagacagcagatacttggt

SEQ ID NO: 50228 - DNA, 20 bp, Artificial Sequence
  Description of Artificial Sequence: Synthetic oligonucleotide
  Target: SCNA; (-) strand; PAM type: YTN; PAM sequence: CTC
ttgaagacagcagatacttg

SEQ ID NO: 50229 - DNA, 20 bp, Artificial Sequence
  Description of Artificial Sequence: Synthetic oligonucleotide
  Target: SCNA; (-) strand; PAM type: YTN; PAM sequence: TTA
ggtgagtctcttgaagacag

SEQ ID NO: 50230 - DNA, 20 bp, Artificial Sequence
  Description of Artificial Sequence: Synthetic oligonucleotide
  Target: SCNA; (-) strand; PAM type: YTN; PAM sequence: TTA
cgtgttaggtgagtctcttg

SEQ ID NO: 50231 - DNA, 20 bp, Artificial Sequence
  Description of Artificial Sequence: Synthetic oligonucleotide
  Target: SCNA; (-) strand; PAM type: YTN; PAM sequence: CTT
acgtgttaggtgagtctctt

SEQ ID NO: 50232 - DNA, 20 bp, Artificial Sequence
  Description of Artificial Sequence: Synthetic oligonucleotide
  Target: SCNA; (-) strand; PAM type: YTN; PAM sequence: TTA
tgtgagtccttacgtgttag

SEQ ID NO: 50233 - DNA, 20 bp, Artificial Sequence
  Description of Artificial Sequence: Synthetic oligonucleotide
  Target: SCNA; (-) strand; PAM type: YTN; PAM sequence: TTT
atgtgagtccttacgtgtta

SEQ ID NO: 50234 - DNA, 20 bp, Artificial Sequence
  Description of Artificial Sequence: Synthetic oligonucleotide
  Target: SCNA; (-) strand; PAM type: YTN; PAM sequence: TTA
agtttatgtgagtccttacg

SEQ ID NO: 50235 - DNA, 20 bp, Artificial Sequence
  Description of Artificial Sequence: Synthetic oligonucleotide
  Target: SCNA; (-) strand; PAM type: YTN; PAM sequence: CTT
aagtttatgtgagtccttac

SEQ ID NO: 50236 - DNA, 20 bp, Artificial Sequence
  Description of Artificial Sequence: Synthetic oligonucleotide
  Target: SCNA; (-) strand; PAM type: YTN; PAM sequence: TTA
ccttaagtttatgtgagtcc

SEQ ID NO: 50237 - DNA, 20 bp, Artificial Sequence
  Description of Artificial Sequence: Synthetic oligonucleotide
  Target: SCNA; (-) strand; PAM type: YTN; PAM sequence: TTT
accttaagtttatgtgagtc

SEQ ID NO: 50238 - DNA, 20 bp, Artificial Sequence
  Description of Artificial Sequence: Synthetic oligonucleotide
  Target: SCNA; (-) strand; PAM type: YTN; PAM sequence: CTT
taccttaagtttatgtgagt

SEQ ID NO: 50239 - DNA, 20 bp, Artificial Sequence
  Description of Artificial Sequence: Synthetic oligonucleotide
  Target: SCNA; (-) strand; PAM type: YTN; PAM sequence: TTC
cacccctttaccttaagttt

SEQ ID NO: 50240 - DNA, 20 bp, Artificial Sequence
  Description of Artificial Sequence: Synthetic oligonucleotide
  Target: SCNA; (-) strand; PAM type: YTN; PAM sequence: TTT
ccacccctttaccttaagtt

SEQ ID NO: 50241 - DNA, 20 bp, Artificial Sequence
  Description of Artificial Sequence: Synthetic oligonucleotide
  Target: SCNA; (-) strand; PAM type: YTN; PAM sequence: TTT
tccacccctttaccttaagt

SEQ ID NO: 50242 - DNA, 20 bp, Artificial Sequence
  Description of Artificial Sequence: Synthetic oligonucleotide
  Target: SCNA; (-) strand; PAM type: YTN; PAM sequence: TTT
ttccacccctttaccttaag

SEQ ID NO: 50243 - DNA, 20 bp, Artificial Sequence
  Description of Artificial Sequence: Synthetic oligonucleotide
  Target: SCNA; (-) strand; PAM type: YTN; PAM sequence: CTT
tttccacccctttaccttaa

SEQ ID NO: 50244 - DNA, 20 bp, Artificial Sequence
  Description of Artificial Sequence: Synthetic oligonucleotide
  Target: SCNA; (-) strand; PAM type: YTN; PAM sequence: TTG
catggaatatctttttccac

SEQ ID NO: 50245 - DNA, 20 bp, Artificial Sequence
  Description of Artificial Sequence: Synthetic oligonucleotide
  Target: SCNA; (-) strand; PAM type: YTN; PAM sequence: TTT
gcatggaatatctttttcca

SEQ ID NO: 50246 - DNA, 20 bp, Artificial Sequence
  Description of Artificial Sequence: Synthetic oligonucleotide
  Target: SCNA; (-) strand; PAM type: YTN; PAM sequence: TTC
catttgcatggaatatcttt

SEQ ID NO: 50247 - DNA, 20 bp, Artificial Sequence
  Description of Artificial Sequence: Synthetic oligonucleotide
  Target: SCNA; (-) strand; PAM type: YTN; PAM sequence: TTT
ccatttgcatggaatatctt

SEQ ID NO: 50248 - DNA, 20 bp, Artificial Sequence
  Description of Artificial Sequence: Synthetic oligonucleotide
  Target: SCNA; (-) strand; PAM type: YTN; PAM sequence: TTG
agtttccatttgcatggaat

SEQ ID NO: 50249 - DNA, 20 bp, Artificial Sequence
  Description of Artificial Sequence: Synthetic oligonucleotide
  Target: SCNA; (-) strand; PAM type: YTN; PAM sequence: TTT
gagtttccatttgcatggaa

SEQ ID NO: 50250 - DNA, 20 bp, Artificial Sequence
  Description of Artificial Sequence: Synthetic oligonucleotide
  Target: SCNA; (-) strand; PAM type: YTN; PAM sequence: CTT
tgagtttccatttgcatgga

SEQ ID NO: 50251 - DNA, 20 bp, Artificial Sequence
  Description of Artificial Sequence: Synthetic oligonucleotide
  Target: SCNA; (-) strand; PAM type: YTN; PAM sequence: CTC
actttgagtttccatttgca

SEQ ID NO: 50252 - DNA, 20 bp, Artificial Sequence
  Description of Artificial Sequence: Synthetic oligonucleotide
  Target: SCNA; (-) strand; PAM type: YTN; PAM sequence: TTC
tcactttgagtttccatttg

SEQ ID NO: 50253 - DNA, 20 bp, Artificial Sequence
  Description of Artificial Sequence: Synthetic oligonucleotide
  Target: SCNA; (-) strand; PAM type: YTN; PAM sequence: TTT
ctcactttgagtttccattt

SEQ ID NO: 50254 - DNA, 20 bp, Artificial Sequence
  Description of Artificial Sequence: Synthetic oligonucleotide
  Target: SCNA; (-) strand; PAM type: YTN; PAM sequence: CTT
tctcactttgagtttccatt

SEQ ID NO: 50255 - DNA, 20 bp, Artificial Sequence
  Description of Artificial Sequence: Synthetic oligonucleotide
  Target: SCNA; (-) strand; PAM type: YTN; PAM sequence: TTC
tttctcactttgagtttcca

SEQ ID NO: 50256 - DNA, 20 bp, Artificial Sequence
  Description of Artificial Sequence: Synthetic oligonucleotide
  Target: SCNA; (-) strand; PAM type: YTN; PAM sequence: CTA
ttctttctcactttgagttt

SEQ ID NO: 50257 - DNA, 20 bp, Artificial Sequence
  Description of Artificial Sequence: Synthetic oligonucleotide
  Target: SCNA; (-) strand; PAM type: YTN; PAM sequence: TTG
ctattctttctcactttgag

SEQ ID NO: 50258 - DNA, 20 bp, Artificial Sequence
  Description of Artificial Sequence: Synthetic oligonucleotide
  Target: SCNA; (-) strand; PAM type: YTN; PAM sequence: CTG
atataagaattgctattctt

SEQ ID NO: 50259 - DNA, 20 bp, Artificial Sequence
  Description of Artificial Sequence: Synthetic oligonucleotide
  Target: SCNA; (-) strand; PAM type: YTN; PAM sequence: TTG
tctgatataagaattgctat

SEQ ID NO: 50260 - DNA, 20 bp, Artificial Sequence
  Description of Artificial Sequence: Synthetic oligonucleotide
  Target: SCNA; (-) strand; PAM type: YTN; PAM sequence: TTT
gtctgatataagaattgcta

SEQ ID NO: 50261 - DNA, 20 bp, Artificial Sequence
  Description of Artificial Sequence: Synthetic oligonucleotide
  Target: SCNA; (-) strand; PAM type: YTN; PAM sequence: TTT
tgtctgatataagaattgct

SEQ ID NO: 50262 - DNA, 20 bp, Artificial Sequence
  Description of Artificial Sequence: Synthetic oligonucleotide
  Target: SCNA; (-) strand; PAM type: YTN; PAM sequence: TTT
ttgtctgatataagaattgc

SEQ ID NO: 50263 - DNA, 20 bp, Artificial Sequence
  Description of Artificial Sequence: Synthetic oligonucleotide
  Target: SCNA; (-) strand; PAM type: YTN; PAM sequence: TTT
tttgtctgatataagaattg

SEQ ID NO: 50264 - DNA, 20 bp, Artificial Sequence
  Description of Artificial Sequence: Synthetic oligonucleotide
  Target: SCNA; (-) strand; PAM type: YTN; PAM sequence: CTT
ttttgtctgatataagaatt

SEQ ID NO: 50265 - DNA, 20 bp, Artificial Sequence
  Description of Artificial Sequence: Synthetic oligonucleotide
  Target: SCNA; (-) strand; PAM type: YTN; PAM sequence: TTA
aaatcttttttgtctgatat

SEQ ID NO: 50266 - DNA, 20 bp, Artificial Sequence
  Description of Artificial Sequence: Synthetic oligonucleotide
  Target: SCNA; (-) strand; PAM type: YTN; PAM sequence: TTT
aaaatcttttttgtctgata

SEQ ID NO: 50267 - DNA, 20 bp, Artificial Sequence
  Description of Artificial Sequence: Synthetic oligonucleotide
  Target: SCNA; (-) strand; PAM type: YTN; PAM sequence: CTT
taaaatcttttttgtctgat

SEQ ID NO: 50268 - DNA, 20 bp, Artificial Sequence
  Description of Artificial Sequence: Synthetic oligonucleotide
  Target: SCNA; (-) strand; PAM type: YTN; PAM sequence: TTG
ctttaaaatcttttttgtct

SEQ ID NO: 50269 - DNA, 20 bp, Artificial Sequence
  Description of Artificial Sequence: Synthetic oligonucleotide
  Target: SCNA; (-) strand; PAM type: YTN; PAM sequence: TTG
ttgctttaaaatcttttttg

SEQ ID NO: 50270 - DNA, 20 bp, Artificial Sequence
  Description of Artificial Sequence: Synthetic oligonucleotide
  Target: SCNA; (-) strand; PAM type: YTN; PAM sequence: TTG
ttgttgctttaaaatctttt

SEQ ID NO: 50271 - DNA, 20 bp, Artificial Sequence
  Description of Artificial Sequence: Synthetic oligonucleotide
  Target: SCNA; (-) strand; PAM type: YTN; PAM sequence: TTA
attgttgttgctttaaaatc

SEQ ID NO: 50272 - DNA, 20 bp, Artificial Sequence
  Description of Artificial Sequence: Synthetic oligonucleotide
  Target: SCNA; (-) strand; PAM type: YTN; PAM sequence: TTT
aattgttgttgctttaaaat

SEQ ID NO: 50273 - DNA, 20 bp, Artificial Sequence
  Description of Artificial Sequence: Synthetic oligonucleotide
  Target: SCNA; (-) strand; PAM type: YTN; PAM sequence: TTT
taattgttgttgctttaaaa

SEQ ID NO: 50274 - DNA, 20 bp, Artificial Sequence
  Description of Artificial Sequence: Synthetic oligonucleotide
  Target: SCNA; (-) strand; PAM type: YTN; PAM sequence: TTT
ttaattgttgttgctttaaa

SEQ ID NO: 50275 - DNA, 20 bp, Artificial Sequence
  Description of Artificial Sequence: Synthetic oligonucleotide
  Target: SCNA; (-) strand; PAM type: YTN; PAM sequence: TTT
tttaattgttgttgctttaa

SEQ ID NO: 50276 - DNA, 20 bp, Artificial Sequence
  Description of Artificial Sequence: Synthetic oligonucleotide
  Target: SCNA; (-) strand; PAM type: YTN; PAM sequence: CTT
ttttaattgttgttgcttta

SEQ ID NO: 50277 - DNA, 20 bp, Artificial Sequence
  Description of Artificial Sequence: Synthetic oligonucleotide
  Target: SCNA; (-) strand; PAM type: YTN; PAM sequence: TTG
tcttttttaattgttgttgc

SEQ ID NO: 50278 - DNA, 20 bp, Artificial Sequence
  Description of Artificial Sequence: Synthetic oligonucleotide
  Target: SCNA; (-) strand; PAM type: YTN; PAM sequence: TTT
gtcttttttaattgttgttg

SEQ ID NO: 50279 - DNA, 20 bp, Artificial Sequence
  Description of Artificial Sequence: Synthetic oligonucleotide
  Target: SCNA; (-) strand; PAM type: YTN; PAM sequence: CTT
tgtcttttttaattgttgtt

SEQ ID NO: 50280 - DNA, 20 bp, Artificial Sequence
  Description of Artificial Sequence: Synthetic oligonucleotide
  Target: SCNA; (-) strand; PAM type: YTN; PAM sequence: CTC
tttgtcttttttaattgttg

SEQ ID NO: 50281 - DNA, 20 bp, Artificial Sequence
  Description of Artificial Sequence: Synthetic oligonucleotide
  Target: SCNA; (-) strand; PAM type: YTN; PAM sequence: CTC
tctttgtcttttttaattgt

SEQ ID NO: 50282 - DNA, 20 bp, Artificial Sequence
  Description of Artificial Sequence: Synthetic oligonucleotide
  Target: SCNA; (-) strand; PAM type: YTN; PAM sequence: TTA
tataatgtctctctttgtct

SEQ ID NO: 50283 - DNA, 20 bp, Artificial Sequence
  Description of Artificial Sequence: Synthetic oligonucleotide
  Target: SCNA; (-) strand; PAM type: YTN; PAM sequence: TTA
tcattatataatgtctctct

SEQ ID NO: 50284 - DNA, 20 bp, Artificial Sequence
  Description of Artificial Sequence: Synthetic oligonucleotide
  Target: SCNA; (-) strand; PAM type: YTN; PAM sequence: TTT
atcattatataatgtctctc

SEQ ID NO: 50285 - DNA, 20 bp, Artificial Sequence
  Description of Artificial Sequence: Synthetic oligonucleotide
  Target: SCNA; (-) strand; PAM type: YTN; PAM sequence: TTT
tatcattatataatgtctct

SEQ ID NO: 50286 - DNA, 20 bp, Artificial Sequence
  Description of Artificial Sequence: Synthetic oligonucleotide
  Target: SCNA; (-) strand; PAM type: YTN; PAM sequence: TTA
ttttatcattatataatgtc

SEQ ID NO: 50287 - DNA, 20 bp, Artificial Sequence
  Description of Artificial Sequence: Synthetic oligonucleotide
  Target: SCNA; (-) strand; PAM type: YTN; PAM sequence: CTA
attattttatcattatataa

SEQ ID NO: 50288 - DNA, 20 bp, Artificial Sequence
  Description of Artificial Sequence: Synthetic oligonucleotide
  Target: SCNA; (-) strand; PAM type: YTN; PAM sequence: TTG
aactaattattttatcatta

SEQ ID NO: 50289 - DNA, 20 bp, Artificial Sequence
  Description of Artificial Sequence: Synthetic oligonucleotide
  Target: SCNA; (-) strand; PAM type: YTN; PAM sequence: CTG
ttgaactaattattttatca

SEQ ID NO: 50290 - DNA, 20 bp, Artificial Sequence
  Description of Artificial Sequence: Synthetic oligonucleotide
  Target: SCNA; (-) strand; PAM type: YTN; PAM sequence: TTC
ctgttgaactaattatttta

SEQ ID NO: 50291 - DNA, 20 bp, Artificial Sequence
  Description of Artificial Sequence: Synthetic oligonucleotide
  Target: SCNA; (-) strand; PAM type: YTN; PAM sequence: TTT
cctgttgaactaattatttt

SEQ ID NO: 50292 - DNA, 20 bp, Artificial Sequence
  Description of Artificial Sequence: Synthetic oligonucleotide
  Target: SCNA; (-) strand; PAM type: YTN; PAM sequence: TTT
tcctgttgaactaattattt

SEQ ID NO: 50293 - DNA, 20 bp, Artificial Sequence
  Description of Artificial Sequence: Synthetic oligonucleotide
  Target: SCNA; (-) strand; PAM type: YTN; PAM sequence: TTT
ttcctgttgaactaattatt

SEQ ID NO: 50294 - DNA, 20 bp, Artificial Sequence
  Description of Artificial Sequence: Synthetic oligonucleotide
  Target: SCNA; (-) strand; PAM type: YTN; PAM sequence: TTG
taaatttttcctgttgaact

SEQ ID NO: 50295 - DNA, 20 bp, Artificial Sequence
  Description of Artificial Sequence: Synthetic oligonucleotide
  Target: SCNA; (-) strand; PAM type: YTN; PAM sequence: TTA
agattgtaaatttttcctgt

SEQ ID NO: 50296 - DNA, 20 bp, Artificial Sequence
  Description of Artificial Sequence: Synthetic oligonucleotide
  Target: SCNA; (-) strand; PAM type: YTN; PAM sequence: CTT
aagattgtaaatttttcctg

SEQ ID NO: 50297 - DNA, 20 bp, Artificial Sequence
  Description of Artificial Sequence: Synthetic oligonucleotide
  Target: SCNA; (-) strand; PAM type: YTN; PAM sequence: TTA
gatgcatatacacttaagat

SEQ ID NO: 50298 - DNA, 20 bp, Artificial Sequence
  Description of Artificial Sequence: Synthetic oligonucleotide
  Target: SCNA; (-) strand; PAM type: YTN; PAM sequence: TTG
ggagcccaagtgttagatgc

SEQ ID NO: 50299 - DNA, 20 bp, Artificial Sequence
  Description of Artificial Sequence: Synthetic oligonucleotide
  Target: SCNA; (-) strand; PAM type: YTN; PAM sequence: TTT
gggagcccaagtgttagatg

SEQ ID NO: 50300 - DNA, 20 bp, Artificial Sequence
  Description of Artificial Sequence: Synthetic oligonucleotide
  Target: SCNA; (-) strand; PAM type: YTN; PAM sequence: TTA
taaatttgggagcccaagtg

SEQ ID NO: 50301 - DNA, 20 bp, Artificial Sequence
  Description of Artificial Sequence: Synthetic oligonucleotide
  Target: SCNA; (-) strand; PAM type: YTN; PAM sequence: TTT
ataaatttgggagcccaagt

SEQ ID NO: 50302 - DNA, 20 bp, Artificial Sequence
  Description of Artificial Sequence: Synthetic oligonucleotide
  Target: SCNA; (-) strand; PAM type: YTN; PAM sequence: CTT
tataaatttgggagcccaag

SEQ ID NO: 50303 - DNA, 20 bp, Artificial Sequence
  Description of Artificial Sequence: Synthetic oligonucleotide
  Target: SCNA; (-) strand; PAM type: YTN; PAM sequence: TTG
ctttataaatttgggagccc

SEQ ID NO: 50304 - DNA, 20 bp, Artificial Sequence
  Description of Artificial Sequence: Synthetic oligonucleotide
  Target: SCNA; (-) strand; PAM type: YTN; PAM sequence: CTA
gtagtgattgctttataaat

SEQ ID NO: 50305 - DNA, 20 bp, Artificial Sequence
  Description of Artificial Sequence: Synthetic oligonucleotide
  Target: SCNA; (-) strand; PAM type: YTN; PAM sequence: TTA
ggtctagtagtgattgcttt

SEQ ID NO: 50306 - DNA, 20 bp, Artificial Sequence
  Description of Artificial Sequence: Synthetic oligonucleotide
  Target: SCNA; (-) strand; PAM type: YTN; PAM sequence: CTT
aggtctagtagtgattgctt

SEQ ID NO: 50307 - DNA, 20 bp, Artificial Sequence
  Description of Artificial Sequence: Synthetic oligonucleotide
  Target: SCNA; (-) strand; PAM type: YTN; PAM sequence: CTC
atgtcttaggtctagtagtg

SEQ ID NO: 50308 - DNA, 20 bp, Artificial Sequence
  Description of Artificial Sequence: Synthetic oligonucleotide
  Target: SCNA; (-) strand; PAM type: YTN; PAM sequence: CTA
tctcatgtcttaggtctagt

SEQ ID NO: 50309 - DNA, 20 bp, Artificial Sequence
  Description of Artificial Sequence: Synthetic oligonucleotide
  Target: SCNA; (-) strand; PAM type: YTN; PAM sequence: CTG
tctatctcatgtcttaggtc

SEQ ID NO: 50310 - DNA, 20 bp, Artificial Sequence
  Description of Artificial Sequence: Synthetic oligonucleotide
  Target: SCNA; (-) strand; PAM type: YTN; PAM sequence: TTG
ctgtctatctcatgtcttag

SEQ ID NO: 50311 - DNA, 20 bp, Artificial Sequence
  Description of Artificial Sequence: Synthetic oligonucleotide
  Target: SCNA; (-) strand; PAM type: YTN; PAM sequence: TTG
tgttgctgtctatctcatgt

SEQ ID NO: 50312 - DNA, 20 bp, Artificial Sequence
  Description of Artificial Sequence: Synthetic oligonucleotide
  Target: SCNA; (-) strand; PAM type: YTN; PAM sequence: TTA
ttgtgttgctgtctatctca

SEQ ID NO: 50313 - DNA, 20 bp, Artificial Sequence
  Description of Artificial Sequence: Synthetic oligonucleotide
  Target: SCNA; (-) strand; PAM type: YTN; PAM sequence: CTA
ttattgtgttgctgtctatc

SEQ ID NO: 50314 - DNA, 20 bp, Artificial Sequence
  Description of Artificial Sequence: Synthetic oligonucleotide
  Target: SCNA; (-) strand; PAM type: YTN; PAM sequence: CTG
aagtcccccactattattgt

SEQ ID NO: 50315 - DNA, 20 bp, Artificial Sequence
  Description of Artificial Sequence: Synthetic oligonucleotide
  Target: SCNA; (-) strand; PAM type: YTN; PAM sequence: CTG
tcagtggagtactgaagtcc

SEQ ID NO: 50316 - DNA, 20 bp, Artificial Sequence
  Description of Artificial Sequence: Synthetic oligonucleotide
  Target: SCNA; (-) strand; PAM type: YTN; PAM sequence: CTA
gtgctgtcagtggagtactg

SEQ ID NO: 50317 - DNA, 20 bp, Artificial Sequence
  Description of Artificial Sequence: Synthetic oligonucleotide
  Target: SCNA; (-) strand; PAM type: YTN; PAM sequence: CTG
tctagtgctgtcagtggagt

SEQ ID NO: 50318 - DNA, 20 bp, Artificial Sequence
  Description of Artificial Sequence: Synthetic oligonucleotide
  Target: SCNA; (-) strand; PAM type: YTN; PAM sequence: TTG
atgacctgtctagtgctgtc

SEQ ID NO: 50319 - DNA, 20 bp, Artificial Sequence
  Description of Artificial Sequence: Synthetic oligonucleotide
  Target: SCNA; (-) strand; PAM type: YTN; PAM sequence: CTT
gatgacctgtctagtgctgt

SEQ ID NO: 50320 - DNA, 20 bp, Artificial Sequence
  Description of Artificial Sequence: Synthetic oligonucleotide
  Target: SCNA; (-) strand; PAM type: YTN; PAM sequence: CTG
tcttgatgacctgtctagtg

SEQ ID NO: 50321 - DNA, 20 bp, Artificial Sequence
  Description of Artificial Sequence: Synthetic oligonucleotide
  Target: SCNA; (-) strand; PAM type: YTN; PAM sequence: TTC
tgtcttgatgacctgtctag

SEQ ID NO: 50322 - DNA, 20 bp, Artificial Sequence
  Description of Artificial Sequence: Synthetic oligonucleotide
  Target: SCNA; (-) strand; PAM type: YTN; PAM sequence: TTT
ctgtcttgatgacctgtcta

SEQ ID NO: 50323 - DNA, 20 bp, Artificial Sequence
  Description of Artificial Sequence: Synthetic oligonucleotide
  Target: SCNA; (-) strand; PAM type: YTN; PAM sequence: CTT
tctgtcttgatgacctgtct

SEQ ID NO: 50324 - DNA, 20 bp, Artificial Sequence
  Description of Artificial Sequence: Synthetic oligonucleotide
  Target: SCNA; (-) strand; PAM type: YTN; PAM sequence: TTG
actttctgtcttgatgacct

SEQ ID NO: 50325 - DNA, 20 bp, Artificial Sequence
  Description of Artificial Sequence: Synthetic oligonucleotide
  Target: SCNA; (-) strand; PAM type: YTN; PAM sequence: TTG
ttgactttctgtcttgatga

SEQ ID NO: 50326 - DNA, 20 bp, Artificial Sequence
  Description of Artificial Sequence: Synthetic oligonucleotide
  Target: SCNA; (-) strand; PAM type: YTN; PAM sequence: TTT
gttgactttctgtcttgatg

SEQ ID NO: 50327 - DNA, 20 bp, Artificial Sequence
  Description of Artificial Sequence: Synthetic oligonucleotide
  Target: SCNA; (-) strand; PAM type: YTN; PAM sequence: CTT
tgttgactttctgtcttgat

SEQ ID NO: 50328 - DNA, 20 bp, Artificial Sequence
  Description of Artificial Sequence: Synthetic oligonucleotide
  Target: SCNA; (-) strand; PAM type: YTN; PAM sequence: TTC
tttgttgactttctgtcttg

SEQ ID NO: 50329 - DNA, 20 bp, Artificial Sequence
  Description of Artificial Sequence: Synthetic oligonucleotide
  Target: SCNA; (-) strand; PAM type: YTN; PAM sequence: TTT
ctttgttgactttctgtctt

SEQ ID NO: 50330 - DNA, 20 bp, Artificial Sequence
  Description of Artificial Sequence: Synthetic oligonucleotide
  Target: SCNA; (-) strand; PAM type: YTN; PAM sequence: TTA
agtccatgtttctttgttga

SEQ ID NO: 50331 - DNA, 20 bp, Artificial Sequence
  Description of Artificial Sequence: Synthetic oligonucleotide
  Target: SCNA; (-) strand; PAM type: YTN; PAM sequence: TTT
aagtccatgtttctttgttg

SEQ ID NO: 50332 - DNA, 20 bp, Artificial Sequence
  Description of Artificial Sequence: Synthetic oligonucleotide
  Target: SCNA; (-) strand; PAM type: YTN; PAM sequence: CTA
gggtatagtttaagtccatg

SEQ ID NO: 50333 - DNA, 20 bp, Artificial Sequence
  Description of Artificial Sequence: Synthetic oligonucleotide
  Target: SCNA; (-) strand; PAM type: YTN; PAM sequence: TTC
tagggtatagtttaagtcca

SEQ ID NO: 50334 - DNA, 20 bp, Artificial Sequence
  Description of Artificial Sequence: Synthetic oligonucleotide
  Target: SCNA; (-) strand; PAM type: YTN; PAM sequence: TTG
ttctagggtatagtttaagt

SEQ ID NO: 50335 - DNA, 20 bp, Artificial Sequence
  Description of Artificial Sequence: Synthetic oligonucleotide
  Target: SCNA; (-) strand; PAM type: YTN; PAM sequence: TTT
gttctagggtatagtttaag

SEQ ID NO: 50336 - DNA, 20 bp, Artificial Sequence
  Description of Artificial Sequence: Synthetic oligonucleotide
  Target: SCNA; (-) strand; PAM type: YTN; PAM sequence: TTA
agtccatttgttctagggta

SEQ ID NO: 50337 - DNA, 20 bp, Artificial Sequence
  Description of Artificial Sequence: Synthetic oligonucleotide
  Target: SCNA; (-) strand; PAM type: YTN; PAM sequence: CTG
ttaagtccatttgttctagg

SEQ ID NO: 50338 - DNA, 20 bp, Artificial Sequence
  Description of Artificial Sequence: Synthetic oligonucleotide
  Target: SCNA; (-) strand; PAM type: YTN; PAM sequence: TTG
taaatatctgttaagtccat

SEQ ID NO: 50339 - DNA, 20 bp, Artificial Sequence
  Description of Artificial Sequence: Synthetic oligonucleotide
  Target: SCNA; (-) strand; PAM type: YTN; PAM sequence: TTT
gtaaatatctgttaagtcca

SEQ ID NO: 50340 - DNA, 20 bp, Artificial Sequence
  Description of Artificial Sequence: Synthetic oligonucleotide
  Target: SCNA; (-) strand; PAM type: YTN; PAM sequence: TTT
tgtaaatatctgttaagtcc

SEQ ID NO: 50341 - DNA, 20 bp, Artificial Sequence
  Description of Artificial Sequence: Synthetic oligonucleotide
  Target: SCNA; (-) strand; PAM type: YTN; PAM sequence: TTT
ttgtaaatatctgttaagtc

SEQ ID NO: 50342 - DNA, 20 bp, Artificial Sequence
  Description of Artificial Sequence: Synthetic oligonucleotide
  Target: SCNA; (-) strand; PAM type: YTN; PAM sequence: TTT
tttgtaaatatctgttaagt

SEQ ID NO: 50343 - DNA, 20 bp, Artificial Sequence
  Description of Artificial Sequence: Synthetic oligonucleotide
  Target: SCNA; (-) strand; PAM type: YTN; PAM sequence: TTG
ggtaggattttttgtaaata

SEQ ID NO: 50344 - DNA, 20 bp, Artificial Sequence
  Description of Artificial Sequence: Synthetic oligonucleotide
  Target: SCNA; (-) strand; PAM type: YTN; PAM sequence: TTG
ttgggtaggattttttgtaa

SEQ ID NO: 50345 - DNA, 20 bp, Artificial Sequence
  Description of Artificial Sequence: Synthetic oligonucleotide
  Target: SCNA; (-) strand; PAM type: YTN; PAM sequence: TTG
atgaaaaggatgtagttgtt

SEQ ID NO: 50346 - DNA, 20 bp, Artificial Sequence
  Description of Artificial Sequence: Synthetic oligonucleotide
  Target: SCNA; (-) strand; PAM type: YTN; PAM sequence: TTC
catgtgttgatgaaaaggat

SEQ ID NO: 50347 - DNA, 20 bp, Artificial Sequence
  Description of Artificial Sequence: Synthetic oligonucleotide
  Target: SCNA; (-) strand; PAM type: YTN; PAM sequence: TTG
gagaatattccatgtgttga

SEQ ID NO: 50348 - DNA, 20 bp, Artificial Sequence
  Description of Artificial Sequence: Synthetic oligonucleotide
  Target: SCNA; (-) strand; PAM type: YTN; PAM sequence: CTT
ggagaatattccatgtgttg

SEQ ID NO: 50349 - DNA, 20 bp, Artificial Sequence
  Description of Artificial Sequence: Synthetic oligonucleotide
  Target: SCNA; (-) strand; PAM type: YTN; PAM sequence: CTG
tcttggagaatattccatgt

SEQ ID NO: 50350 - DNA, 20 bp, Artificial Sequence
  Description of Artificial Sequence: Synthetic oligonucleotide
  Target: SCNA; (-) strand; PAM type: YTN; PAM sequence: TTC
atatggtctgtcttggagaa

SEQ ID NO: 50351 - DNA, 20 bp, Artificial Sequence
  Description of Artificial Sequence: Synthetic oligonucleotide
  Target: SCNA; (-) strand; PAM type: YTN; PAM sequence: TTG
ttcatatggtctgtcttgga

SEQ ID NO: 50352 - DNA, 20 bp, Artificial Sequence
  Description of Artificial Sequence: Synthetic oligonucleotide
  Target: SCNA; (-) strand; PAM type: YTN; PAM sequence: CTT
gttcatatggtctgtcttgg

SEQ ID NO: 50353 - DNA, 20 bp, Artificial Sequence
  Description of Artificial Sequence: Synthetic oligonucleotide
  Target: SCNA; (-) strand; PAM type: YTN; PAM sequence: TTG
agacttgttcatatggtctg

SEQ ID NO: 50354 - DNA, 20 bp, Artificial Sequence
  Description of Artificial Sequence: Synthetic oligonucleotide
  Target: SCNA; (-) strand; PAM type: YTN; PAM sequence: TTA
ttgagacttgttcatatggt

SEQ ID NO: 50355 - DNA, 20 bp, Artificial Sequence
  Description of Artificial Sequence: Synthetic oligonucleotide
  Target: SCNA; (-) strand; PAM type: YTN; PAM sequence: TTT
attgagacttgttcatatgg

SEQ ID NO: 50356 - DNA, 20 bp, Artificial Sequence
  Description of Artificial Sequence: Synthetic oligonucleotide
  Target: SCNA; (-) strand; PAM type: YTN; PAM sequence: TTA
aatttattgagacttgttca

SEQ ID NO: 50357 - DNA, 20 bp, Artificial Sequence
  Description of Artificial Sequence: Synthetic oligonucleotide
  Target: SCNA; (-) strand; PAM type: YTN; PAM sequence: CTT
aaatttattgagacttgttc

SEQ ID NO: 50358 - DNA, 20 bp, Artificial Sequence
  Description of Artificial Sequence: Synthetic oligonucleotide
  Target: SCNA; (-) strand; PAM type: YTN; PAM sequence: TTC
ttaaatttattgagacttgt

SEQ ID NO: 50359 - DNA, 20 bp, Artificial Sequence
  Description of Artificial Sequence: Synthetic oligonucleotide
  Target: SCNA; (-) strand; PAM type: YTN; PAM sequence: TTT
cttaaatttattgagacttg

SEQ ID NO: 50360 - DNA, 20 bp, Artificial Sequence
  Description of Artificial Sequence: Synthetic oligonucleotide
  Target: SCNA; (-) strand; PAM type: YTN; PAM sequence: TTT
tcttaaatttattgagactt

SEQ ID NO: 50361 - DNA, 20 bp, Artificial Sequence
  Description of Artificial Sequence: Synthetic oligonucleotide
  Target: SCNA; (-) strand; PAM type: YTN; PAM sequence: TTG
attttcttaaatttattgag

SEQ ID NO: 50362 - DNA, 20 bp, Artificial Sequence
  Description of Artificial Sequence: Synthetic oligonucleotide
  Target: SCNA; (-) strand; PAM type: YTN; PAM sequence: TTT
gattttcttaaatttattga

SEQ ID NO: 50363 - DNA, 20 bp, Artificial Sequence
  Description of Artificial Sequence: Synthetic oligonucleotide
  Target: SCNA; (-) strand; PAM type: YTN; PAM sequence: TTT
tgattttcttaaatttattg

SEQ ID NO: 50364 - DNA, 20 bp, Artificial Sequence
  Description of Artificial Sequence: Synthetic oligonucleotide
  Target: SCNA; (-) strand; PAM type: YTN; PAM sequence: TTG
atataattttgattttctta

SEQ ID NO: 50365 - DNA, 20 bp, Artificial Sequence
  Description of Artificial Sequence: Synthetic oligonucleotide
  Target: SCNA; (-) strand; PAM type: YTN; PAM sequence: CTT
gatataattttgattttctt

SEQ ID NO: 50366 - DNA, 20 bp, Artificial Sequence
  Description of Artificial Sequence: Synthetic oligonucleotide
  Target: SCNA; (-) strand; PAM type: YTN; PAM sequence: CTG
agagaatacttgatataatt

SEQ ID NO: 50367 - DNA, 20 bp, Artificial Sequence
  Description of Artificial Sequence: Synthetic oligonucleotide
  Target: SCNA; (-) strand; PAM type: YTN; PAM sequence: CTG
tggtctgagagaatacttga

SEQ ID NO: 50368 - DNA, 20 bp, Artificial Sequence
  Description of Artificial Sequence: Synthetic oligonucleotide
  Target: SCNA; (-) strand; PAM type: YTN; PAM sequence: TTC
cactgtggtctgagagaata

SEQ ID NO: 50369 - DNA, 20 bp, Artificial Sequence
  Description of Artificial Sequence: Synthetic oligonucleotide
  Target: SCNA; (-) strand; PAM type: YTN; PAM sequence: TTA
ttccactgtggtctgagaga

SEQ ID NO: 50370 - DNA, 20 bp, Artificial Sequence
  Description of Artificial Sequence: Synthetic oligonucleotide
  Target: SCNA; (-) strand; PAM type: YTN; PAM sequence: TTT
attccactgtggtctgagag

SEQ ID NO: 50371 - DNA, 20 bp, Artificial Sequence
  Description of Artificial Sequence: Synthetic oligonucleotide
  Target: SCNA; (-) strand; PAM type: YTN; PAM sequence: TTT
tattccactgtggtctgaga

SEQ ID NO: 50372 - DNA, 20 bp, Artificial Sequence
  Description of Artificial Sequence: Synthetic oligonucleotide
  Target: SCNA; (-) strand; PAM type: YTN; PAM sequence: TTA
attttattccactgtggtct

SEQ ID NO: 50373 - DNA, 20 bp, Artificial Sequence
  Description of Artificial Sequence: Synthetic oligonucleotide
  Target: SCNA; (-) strand; PAM type: YTN; PAM sequence: TTT
aattttattccactgtggtc

SEQ ID NO: 50374 - DNA, 20 bp, Artificial Sequence
  Description of Artificial Sequence: Synthetic oligonucleotide
  Target: SCNA; (-) strand; PAM type: YTN; PAM sequence: TTT
taattttattccactgtggt

SEQ ID NO: 50375 - DNA, 20 bp, Artificial Sequence
  Description of Artificial Sequence: Synthetic oligonucleotide
  Target: SCNA; (-) strand; PAM type: YTN; PAM sequence: TTT
ttaattttattccactgtgg

SEQ ID NO: 50376 - DNA, 20 bp, Artificial Sequence
  Description of Artificial Sequence: Synthetic oligonucleotide
  Target: SCNA; (-) strand; PAM type: YTN; PAM sequence: TTA
atttttaattttattccact

SEQ ID NO: 50377 - DNA, 20 bp, Artificial Sequence
  Description of Artificial Sequence: Synthetic oligonucleotide
  Target: SCNA; (-) strand; PAM type: YTN; PAM sequence: TTG
gagttaatttttaattttat

SEQ ID NO: 50378 - DNA, 20 bp, Artificial Sequence
  Description of Artificial Sequence: Synthetic oligonucleotide
  Target: SCNA; (-) strand; PAM type: YTN; PAM sequence: TTT
ggagttaatttttaatttta

SEQ ID NO: 50379 - DNA, 20 bp, Artificial Sequence
  Description of Artificial Sequence: Synthetic oligonucleotide
  Target: SCNA; (-) strand; PAM type: YTN; PAM sequence: TTT
tggagttaatttttaatttt

SEQ ID NO: 50380 - DNA, 20 bp, Artificial Sequence
  Description of Artificial Sequence: Synthetic oligonucleotide
  Target: SCNA; (-) strand; PAM type: YTN; PAM sequence: CTT
ttggagttaatttttaattt

SEQ ID NO: 50381 - DNA, 20 bp, Artificial Sequence
  Description of Artificial Sequence: Synthetic oligonucleotide
  Target: SCNA; (-) strand; PAM type: YTN; PAM sequence: TTC
ttttggagttaatttttaat

SEQ ID NO: 50382 - DNA, 20 bp, Artificial Sequence
  Description of Artificial Sequence: Synthetic oligonucleotide
  Target: SCNA; (-) strand; PAM type: YTN; PAM sequence: TTT
cttttggagttaatttttaa

SEQ ID NO: 50383 - DNA, 20 bp, Artificial Sequence
  Description of Artificial Sequence: Synthetic oligonucleotide
  Target: SCNA; (-) strand; PAM type: YTN; PAM sequence: TTG
agggtttcttttggagttaa

SEQ ID NO: 50384 - DNA, 20 bp, Artificial Sequence
  Description of Artificial Sequence: Synthetic oligonucleotide
  Target: SCNA; (-) strand; PAM type: YTN; PAM sequence: TTT
gagggtttcttttggagtta

SEQ ID NO: 50385 - DNA, 20 bp, Artificial Sequence
  Description of Artificial Sequence: Synthetic oligonucleotide
  Target: SCNA; (-) strand; PAM type: YTN; PAM sequence: TTT
tgagggtttcttttggagtt

SEQ ID NO: 50386 - DNA, 20 bp, Artificial Sequence
  Description of Artificial Sequence: Synthetic oligonucleotide
  Target: SCNA; (-) strand; PAM type: YTN; PAM sequence: TTG
tatagttttgagggtttctt

SEQ ID NO: 50387 - DNA, 20 bp, Artificial Sequence
  Description of Artificial Sequence: Synthetic oligonucleotide
  Target: SCNA; (-) strand; PAM type: YTN; PAM sequence: TTT
gtatagttttgagggtttct

SEQ ID NO: 50388 - DNA, 20 bp, Artificial Sequence
  Description of Artificial Sequence: Synthetic oligonucleotide
  Target: SCNA; (-) strand; PAM type: YTN; PAM sequence: TTC
catgtatttgtatagttttg

SEQ ID NO: 50389 - DNA, 20 bp, Artificial Sequence
  Description of Artificial Sequence: Synthetic oligonucleotide
  Target: SCNA; (-) strand; PAM type: YTN; PAM sequence: TTT
ccatgtatttgtatagtttt

SEQ ID NO: 50390 - DNA, 20 bp, Artificial Sequence
  Description of Artificial Sequence: Synthetic oligonucleotide
  Target: SCNA; (-) strand; PAM type: YTN; PAM sequence: TTC
gatttccatgtatttgtata

SEQ ID NO: 50391 - DNA, 20 bp, Artificial Sequence
  Description of Artificial Sequence: Synthetic oligonucleotide
  Target: SCNA; (-) strand; PAM type: YTN; PAM sequence: TTA
ttcgatttccatgtatttgt

SEQ ID NO: 50392 - DNA, 20 bp, Artificial Sequence
  Description of Artificial Sequence: Synthetic oligonucleotide
  Target: SCNA; (-) strand; PAM type: YTN; PAM sequence: TTC
aggagcagattattcgattt

SEQ ID NO: 50393 - DNA, 20 bp, Artificial Sequence
  Description of Artificial Sequence: Synthetic oligonucleotide
  Target: SCNA; (-) strand; PAM type: YTN; PAM sequence: TTG
acccaaagatcattcaggag

SEQ ID NO: 50394 - DNA, 20 bp, Artificial Sequence
  Description of Artificial Sequence: Synthetic oligonucleotide
  Target: SCNA; (-) strand; PAM type: YTN; PAM sequence: TTG
ttgacccaaagatcattcag

SEQ ID NO: 50395 - DNA, 20 bp, Artificial Sequence
  Description of Artificial Sequence: Synthetic oligonucleotide
  Target: SCNA; (-) strand; PAM type: YTN; PAM sequence: TTC
attgttgacccaaagatcat

SEQ ID NO: 50396 - DNA, 20 bp, Artificial Sequence
  Description of Artificial Sequence: Synthetic oligonucleotide
  Target: SCNA; (-) strand; PAM type: YTN; PAM sequence: TTT
cattgttgacccaaagatca

SEQ ID NO: 50397 - DNA, 20 bp, Artificial Sequence
  Description of Artificial Sequence: Synthetic oligonucleotide
  Target: SCNA; (-) strand; PAM type: YTN; PAM sequence: TTG
atttcattgttgacccaaag

SEQ ID NO: 50398 - DNA, 20 bp, Artificial Sequence
  Description of Artificial Sequence: Synthetic oligonucleotide
  Target: SCNA; (-) strand; PAM type: YTN; PAM sequence: CTT
gatttcattgttgacccaaa

SEQ ID NO: 50399 - DNA, 20 bp, Artificial Sequence
  Description of Artificial Sequence: Synthetic oligonucleotide
  Target: SCNA; (-) strand; PAM type: YTN; PAM sequence: TTC
ttgatttcattgttgaccca

SEQ ID NO: 50400 - DNA, 20 bp, Artificial Sequence
  Description of Artificial Sequence: Synthetic oligonucleotide
  Target: SCNA; (-) strand; PAM type: YTN; PAM sequence: TTT
cttgatttcattgttgaccc

SEQ ID NO: 50401 - DNA, 20 bp, Artificial Sequence
  Description of Artificial Sequence: Synthetic oligonucleotide
  Target: SCNA; (-) strand; PAM type: YTN; PAM sequence: CTT
tcttgatttcattgttgacc

SEQ ID NO: 50402 - DNA, 20 bp, Artificial Sequence
  Description of Artificial Sequence: Synthetic oligonucleotide
  Target: SCNA; (-) strand; PAM type: YTN; PAM sequence: TTC
atctttcttgatttcattgt

SEQ ID NO: 50403 - DNA, 20 bp, Artificial Sequence
  Description of Artificial Sequence: Synthetic oligonucleotide
  Target: SCNA; (-) strand; PAM type: YTN; PAM sequence: TTT
catctttcttgatttcattg

SEQ ID NO: 50404 - DNA, 20 bp, Artificial Sequence
  Description of Artificial Sequence: Synthetic oligonucleotide
  Target: SCNA; (-) strand; PAM type: YTN; PAM sequence: TTT
tcatctttcttgatttcatt

SEQ ID NO: 50405 - DNA, 20 bp, Artificial Sequence
  Description of Artificial Sequence: Synthetic oligonucleotide
  Target: SCNA; (-) strand; PAM type: YTN; PAM sequence: TTA
aaattttcatctttcttgat

SEQ ID NO: 50406 - DNA, 20 bp, Artificial Sequence
  Description of Artificial Sequence: Synthetic oligonucleotide
  Target: SCNA; (-) strand; PAM type: YTN; PAM sequence: TTT
aaaattttcatctttcttga

SEQ ID NO: 50407 - DNA, 20 bp, Artificial Sequence
  Description of Artificial Sequence: Synthetic oligonucleotide
  Target: SCNA; (-) strand; PAM type: YTN; PAM sequence: TTT
taaaattttcatctttcttg

SEQ ID NO: 50408 - DNA, 20 bp, Artificial Sequence
  Description of Artificial Sequence: Synthetic oligonucleotide
  Target: SCNA; (-) strand; PAM type: YTN; PAM sequence: TTT
ttaaaattttcatctttctt

SEQ ID NO: 50409 - DNA, 20 bp, Artificial Sequence
  Description of Artificial Sequence: Synthetic oligonucleotide
  Target: SCNA; (-) strand; PAM type: YTN; PAM sequence: TTC
aaatatttttaaaattttca

SEQ ID NO: 50410 - DNA, 20 bp, Artificial Sequence
  Description of Artificial Sequence: Synthetic oligonucleotide
  Target: SCNA; (-) strand; PAM type: YTN; PAM sequence: TTG
aattcaaatatttttaaaat

SEQ ID NO: 50411 - DNA, 20 bp, Artificial Sequence
  Description of Artificial Sequence: Synthetic oligonucleotide
  Target: SCNA; (-) strand; PAM type: YTN; PAM sequence: TTG
ttgaattcaaatatttttaa

SEQ ID NO: 50412 - DNA, 20 bp, Artificial Sequence
  Description of Artificial Sequence: Synthetic oligonucleotide
  Target: SCNA; (-) strand; PAM type: YTN; PAM sequence: TTA
ttgttgaattcaaatatttt

SEQ ID NO: 50413 - DNA, 20 bp, Artificial Sequence
  Description of Artificial Sequence: Synthetic oligonucleotide
  Target: SCNA; (-) strand; PAM type: YTN; PAM sequence: TTA
ttattgttgaattcaaatat

SEQ ID NO: 50414 - DNA, 20 bp, Artificial Sequence
  Description of Artificial Sequence: Synthetic oligonucleotide
  Target: SCNA; (-) strand; PAM type: YTN; PAM sequence: TTG
tcattattattgttgaattc

SEQ ID NO: 50415 - DNA, 20 bp, Artificial Sequence
  Description of Artificial Sequence: Synthetic oligonucleotide
  Target: SCNA; (-) strand; PAM type: YTN; PAM sequence: TTT
gtcattattattgttgaatt

SEQ ID NO: 50416 - DNA, 20 bp, Artificial Sequence
  Description of Artificial Sequence: Synthetic oligonucleotide
  Target: SCNA; (-) strand; PAM type: YTN; PAM sequence: TTT
tgtcattattattgttgaat

SEQ ID NO: 50417 - DNA, 20 bp, Artificial Sequence
  Description of Artificial Sequence: Synthetic oligonucleotide
  Target: SCNA; (-) strand; PAM type: YTN; PAM sequence: TTG
tgataggttttgtcattatt

SEQ ID NO: 50418 - DNA, 20 bp, Artificial Sequence
  Description of Artificial Sequence: Synthetic oligonucleotide
  Target: SCNA; (-) strand; PAM type: YTN; PAM sequence: CTG
tatcccagaggttgtgatag

SEQ ID NO: 50419 - DNA, 20 bp, Artificial Sequence
  Description of Artificial Sequence: Synthetic oligonucleotide
  Target: SCNA; (-) strand; PAM type: YTN; PAM sequence: TTG
ctgtatcccagaggttgtga

SEQ ID NO: 50420 - DNA, 20 bp, Artificial Sequence
  Description of Artificial Sequence: Synthetic oligonucleotide
  Target: SCNA; (-) strand; PAM type: YTN; PAM sequence: TTT
gctgtatcccagaggttgtg

SEQ ID NO: 50421 - DNA, 20 bp, Artificial Sequence
  Description of Artificial Sequence: Synthetic oligonucleotide
  Target: SCNA; (-) strand; PAM type: YTN; PAM sequence: TTT
tgctgtatcccagaggttgt

SEQ ID NO: 50422 - DNA, 20 bp, Artificial Sequence
  Description of Artificial Sequence: Synthetic oligonucleotide
  Target: SCNA; (-) strand; PAM type: YTN; PAM sequence: CTT
ttgctgtatcccagaggttg

SEQ ID NO: 50423 - DNA, 20 bp, Artificial Sequence
  Description of Artificial Sequence: Synthetic oligonucleotide
  Target: SCNA; (-) strand; PAM type: YTN; PAM sequence: TTA
acatggcttttgctgtatcc

SEQ ID NO: 50424 - DNA, 20 bp, Artificial Sequence
  Description of Artificial Sequence: Synthetic oligonucleotide
  Target: SCNA; (-) strand; PAM type: YTN; PAM sequence: CTT
aacatggcttttgctgtatc

SEQ ID NO: 50425 - DNA, 20 bp, Artificial Sequence
  Description of Artificial Sequence: Synthetic oligonucleotide
  Target: SCNA; (-) strand; PAM type: YTN; PAM sequence: CTC
ttaacatggcttttgctgta

SEQ ID NO: 50426 - DNA, 20 bp, Artificial Sequence
  Description of Artificial Sequence: Synthetic oligonucleotide
  Target: SCNA; (-) strand; PAM type: YTN; PAM sequence: TTG
ctcttaacatggcttttgct

SEQ ID NO: 50427 - DNA, 20 bp, Artificial Sequence
  Description of Artificial Sequence: Synthetic oligonucleotide
  Target: SCNA; (-) strand; PAM type: YTN; PAM sequence: TTT
gctcttaacatggcttttgc

SEQ ID NO: 50428 - DNA, 20 bp, Artificial Sequence
  Description of Artificial Sequence: Synthetic oligonucleotide
  Target: SCNA; (-) strand; PAM type: YTN; PAM sequence: CTT
tgctcttaacatggcttttg

SEQ ID NO: 50429 - DNA, 20 bp, Artificial Sequence
  Description of Artificial Sequence: Synthetic oligonucleotide
  Target: SCNA; (-) strand; PAM type: YTN; PAM sequence: CTA
tgaactttgctcttaacatg

SEQ ID NO: 50430 - DNA, 20 bp, Artificial Sequence
  Description of Artificial Sequence: Synthetic oligonucleotide
  Target: SCNA; (-) strand; PAM type: YTN; PAM sequence: TTA
atgctatgaactttgctctt

SEQ ID NO: 50431 - DNA, 20 bp, Artificial Sequence
  Description of Artificial Sequence: Synthetic oligonucleotide
  Target: SCNA; (-) strand; PAM type: YTN; PAM sequence: TTT
aatgctatgaactttgctct

SEQ ID NO: 50432 - DNA, 20 bp, Artificial Sequence
  Description of Artificial Sequence: Synthetic oligonucleotide
  Target: SCNA; (-) strand; PAM type: YTN; PAM sequence: TTG
atgtagatatttaatgctat

SEQ ID NO: 50433 - DNA, 20 bp, Artificial Sequence
  Description of Artificial Sequence: Synthetic oligonucleotide
  Target: SCNA; (-) strand; PAM type: YTN; PAM sequence: TTT
gatgtagatatttaatgcta

SEQ ID NO: 50434 - DNA, 20 bp, Artificial Sequence
  Description of Artificial Sequence: Synthetic oligonucleotide
  Target: SCNA; (-) strand; PAM type: YTN; PAM sequence: TTT
tgatgtagatatttaatgct

SEQ ID NO: 50435 - DNA, 20 bp, Artificial Sequence
  Description of Artificial Sequence: Synthetic oligonucleotide
  Target: SCNA; (-) strand; PAM type: YTN; PAM sequence: TTT
ttgatgtagatatttaatgc

SEQ ID NO: 50436 - DNA, 20 bp, Artificial Sequence
  Description of Artificial Sequence: Synthetic oligonucleotide
  Target: SCNA; (-) strand; PAM type: YTN; PAM sequence: CTT
tttgatgtagatatttaatg

SEQ ID NO: 50437 - DNA, 20 bp, Artificial Sequence
  Description of Artificial Sequence: Synthetic oligonucleotide
  Target: SCNA; (-) strand; PAM type: YTN; PAM sequence: TTC
agactttttgatgtagatat

SEQ ID NO: 50438 - DNA, 20 bp, Artificial Sequence
  Description of Artificial Sequence: Synthetic oligonucleotide
  Target: SCNA; (-) strand; PAM type: YTN; PAM sequence: TTT
cagactttttgatgtagata

SEQ ID NO: 50439 - DNA, 20 bp, Artificial Sequence
  Description of Artificial Sequence: Synthetic oligonucleotide
  Target: SCNA; (-) strand; PAM type: YTN; PAM sequence: CTT
tcagactttttgatgtagat

SEQ ID NO: 50440 - DNA, 20 bp, Artificial Sequence
  Description of Artificial Sequence: Synthetic oligonucleotide
  Target: SCNA; (-) strand; PAM type: YTN; PAM sequence: CTC
tttcagactttttgatgtag

SEQ ID NO: 50441 - DNA, 20 bp, Artificial Sequence
  Description of Artificial Sequence: Synthetic oligonucleotide
  Target: SCNA; (-) strand; PAM type: YTN; PAM sequence: TTG
tgctctttcagactttttga

SEQ ID NO: 50442 - DNA, 20 bp, Artificial Sequence
  Description of Artificial Sequence: Synthetic oligonucleotide
  Target: SCNA; (-) strand; PAM type: YTN; PAM sequence: TTT
gtgctctttcagactttttg

SEQ ID NO: 50443 - DNA, 20 bp, Artificial Sequence
  Description of Artificial Sequence: Synthetic oligonucleotide
  Target: SCNA; (-) strand; PAM type: YTN; PAM sequence: CTA
tttgtgctctttcagacttt

SEQ ID NO: 50444 - DNA, 20 bp, Artificial Sequence
  Description of Artificial Sequence: Synthetic oligonucleotide
  Target: SCNA; (-) strand; PAM type: YTN; PAM sequence: TTG
tctatttgtgctctttcaga

SEQ ID NO: 50445 - DNA, 20 bp, Artificial Sequence
  Description of Artificial Sequence: Synthetic oligonucleotide
  Target: SCNA; (-) strand; PAM type: YTN; PAM sequence: CTC
agattgtctatttgtgctct

SEQ ID NO: 50446 - DNA, 20 bp, Artificial Sequence
  Description of Artificial Sequence: Synthetic oligonucleotide
  Target: SCNA; (-) strand; PAM type: YTN; PAM sequence: CTA
gaggtgtaagctcagattgt

SEQ ID NO: 50447 - DNA, 20 bp, Artificial Sequence
  Description of Artificial Sequence: Synthetic oligonucleotide
  Target: SCNA; (-) strand; PAM type: YTN; PAM sequence: TTC
ctagaggtgtaagctcagat

SEQ ID NO: 50448 - DNA, 20 bp, Artificial Sequence
  Description of Artificial Sequence: Synthetic oligonucleotide
  Target: SCNA; (-) strand; PAM type: YTN; PAM sequence: TTC
cagttcctagaggtgtaagc

SEQ ID NO: 50449 - DNA, 20 bp, Artificial Sequence
  Description of Artificial Sequence: Synthetic oligonucleotide
  Target: SCNA; (-) strand; PAM type: YTN; PAM sequence: TTT
ccagttcctagaggtgtaag

SEQ ID NO: 50450 - DNA, 20 bp, Artificial Sequence
  Description of Artificial Sequence: Synthetic oligonucleotide
  Target: SCNA; (-) strand; PAM type: YTN; PAM sequence: TTT
tccagttcctagaggtgtaa

SEQ ID NO: 50451 - DNA, 20 bp, Artificial Sequence
  Description of Artificial Sequence: Synthetic oligonucleotide
  Target: SCNA; (-) strand; PAM type: YTN; PAM sequence: TTT
ttccagttcctagaggtgta

SEQ ID NO: 50452 - DNA, 20 bp, Artificial Sequence
  Description of Artificial Sequence: Synthetic oligonucleotide
  Target: SCNA; (-) strand; PAM type: YTN; PAM sequence: TTG
tttttccagttcctagaggt

SEQ ID NO: 50453 - DNA, 20 bp, Artificial Sequence
  Description of Artificial Sequence: Synthetic oligonucleotide
  Target: SCNA; (-) strand; PAM type: YTN; PAM sequence: CTT
gtttttccagttcctagagg

SEQ ID NO: 50454 - DNA, 20 bp, Artificial Sequence
  Description of Artificial Sequence: Synthetic oligonucleotide
  Target: SCNA; (-) strand; PAM type: YTN; PAM sequence: TTG
tcttgtttttccagttccta

SEQ ID NO: 50455 - DNA, 20 bp, Artificial Sequence
  Description of Artificial Sequence: Synthetic oligonucleotide
  Target: SCNA; (-) strand; PAM type: YTN; PAM sequence: TTT
gtcttgtttttccagttcct

SEQ ID NO: 50456 - DNA, 20 bp, Artificial Sequence
  Description of Artificial Sequence: Synthetic oligonucleotide
  Target: SCNA; (-) strand; PAM type: YTN; PAM sequence: CTT
tgtcttgtttttccagttcc

SEQ ID NO: 50457 - DNA, 20 bp, Artificial Sequence
  Description of Artificial Sequence: Synthetic oligonucleotide
  Target: SCNA; (-) strand; PAM type: YTN; PAM sequence: TTG
ctttgtcttgtttttccagt

SEQ ID NO: 50458 - DNA, 20 bp, Artificial Sequence
  Description of Artificial Sequence: Synthetic oligonucleotide
  Target: SCNA; (-) strand; PAM type: YTN; PAM sequence: TTT
gctttgtcttgtttttccag

SEQ ID NO: 50459 - DNA, 20 bp, Artificial Sequence
  Description of Artificial Sequence: Synthetic oligonucleotide
  Target: SCNA; (-) strand; PAM type: YTN; PAM sequence: TTG
ggtttgctttgtcttgtttt

SEQ ID NO: 50460 - DNA, 20 bp, Artificial Sequence
  Description of Artificial Sequence: Synthetic oligonucleotide
  Target: SCNA; (-) strand; PAM type: YTN; PAM sequence: TTT
gggtttgctttgtcttgttt

SEQ ID NO: 50461 - DNA, 20 bp, Artificial Sequence
  Description of Artificial Sequence: Synthetic oligonucleotide
  Target: SCNA; (-) strand; PAM type: YTN; PAM sequence: CTG
ggtttgggtttgctttgtct

SEQ ID NO: 50462 - DNA, 20 bp, Artificial Sequence
  Description of Artificial Sequence: Synthetic oligonucleotide
  Target: SCNA; (-) strand; PAM type: YTN; PAM sequence: CTG
ctgggtttgggtttgctttg

SEQ ID NO: 50463 - DNA, 20 bp, Artificial Sequence
  Description of Artificial Sequence: Synthetic oligonucleotide
  Target: SCNA; (-) strand; PAM type: YTN; PAM sequence: TTC
tgctgggtttgggtttgctt

SEQ ID NO: 50464 - DNA, 20 bp, Artificial Sequence
  Description of Artificial Sequence: Synthetic oligonucleotide
  Target: SCNA; (-) strand; PAM type: YTN; PAM sequence: CTT
ctgctgggtttgggtttgct

SEQ ID NO: 50465 - DNA, 20 bp, Artificial Sequence
  Description of Artificial Sequence: Synthetic oligonucleotide
  Target: SCNA; (-) strand; PAM type: YTN; PAM sequence: TTC
ttctgctgggtttgggtttg

SEQ ID NO: 50466 - DNA, 20 bp, Artificial Sequence
  Description of Artificial Sequence: Synthetic oligonucleotide
  Target: SCNA; (-) strand; PAM type: YTN; PAM sequence: TTT
cttctgctgggtttgggttt

SEQ ID NO: 50467 - DNA, 20 bp, Artificial Sequence
  Description of Artificial Sequence: Synthetic oligonucleotide
  Target: SCNA; (-) strand; PAM type: YTN; PAM sequence: TTT
tcttctgctgggtttgggtt

SEQ ID NO: 50468 - DNA, 20 bp, Artificial Sequence
  Description of Artificial Sequence: Synthetic oligonucleotide
  Target: SCNA; (-) strand; PAM type: YTN; PAM sequence: CTT
ttcttctgctgggtttgggt

SEQ ID NO: 50469 - DNA, 20 bp, Artificial Sequence
  Description of Artificial Sequence: Synthetic oligonucleotide
  Target: SCNA; (-) strand; PAM type: YTN; PAM sequence: TTC
ttttcttctgctgggtttgg

SEQ ID NO: 50470 - DNA, 20 bp, Artificial Sequence
  Description of Artificial Sequence: Synthetic oligonucleotide
  Target: SCNA; (-) strand; PAM type: YTN; PAM sequence: TTT
cttttcttctgctgggtttg

SEQ ID NO: 50471 - DNA, 20 bp, Artificial Sequence
  Description of Artificial Sequence: Synthetic oligonucleotide
  Target: SCNA; (-) strand; PAM type: YTN; PAM sequence: TTA
tttcttttcttctgctgggt

SEQ ID NO: 50472 - DNA, 20 bp, Artificial Sequence
  Description of Artificial Sequence: Synthetic oligonucleotide
  Target: SCNA; (-) strand; PAM type: YTN; PAM sequence: TTG
ttatttcttttcttctgctg

SEQ ID NO: 50473 - DNA, 20 bp, Artificial Sequence
  Description of Artificial Sequence: Synthetic oligonucleotide
  Target: SCNA; (-) strand; PAM type: YTN; PAM sequence: TTT
gttatttcttttcttctgct

SEQ ID NO: 50474 - DNA, 20 bp, Artificial Sequence
  Description of Artificial Sequence: Synthetic oligonucleotide
  Target: SCNA; (-) strand; PAM type: YTN; PAM sequence: CTT
tgttatttcttttcttctgc

SEQ ID NO: 50475 - DNA, 20 bp, Artificial Sequence
  Description of Artificial Sequence: Synthetic oligonucleotide
  Target: SCNA; (-) strand; PAM type: YTN; PAM sequence: CTG
atctttgttatttcttttct

SEQ ID NO: 50476 - DNA, 20 bp, Artificial Sequence
  Description of Artificial Sequence: Synthetic oligonucleotide
  Target: SCNA; (-) strand; PAM type: YTN; PAM sequence: TTC
tgatctttgttatttctttt

SEQ ID NO: 50477 - DNA, 20 bp, Artificial Sequence
  Description of Artificial Sequence: Synthetic oligonucleotide
  Target: SCNA; (-) strand; PAM type: YTN; PAM sequence: CTA
ttctgatctttgttatttct

SEQ ID NO: 50478 - DNA, 20 bp, Artificial Sequence
  Description of Artificial Sequence: Synthetic oligonucleotide
  Target: SCNA; (-) strand; PAM type: YTN; PAM sequence: TTC
tattctgatctttgttattt

SEQ ID NO: 50479 - DNA, 20 bp, Artificial Sequence
  Description of Artificial Sequence: Synthetic oligonucleotide
  Target: SCNA; (-) strand; PAM type: YTN; PAM sequence: TTT
ctattctgatctttgttatt

SEQ ID NO: 50480 - DNA, 20 bp, Artificial Sequence
  Description of Artificial Sequence: Synthetic oligonucleotide
  Target: SCNA; (-) strand; PAM type: YTN; PAM sequence: TTA
tttctattctgatctttgtt

SEQ ID NO: 50481 - DNA, 20 bp, Artificial Sequence
  Description of Artificial Sequence: Synthetic oligonucleotide
  Target: SCNA; (-) strand; PAM type: YTN; PAM sequence: TTT
atttctattctgatctttgt

SEQ ID NO: 50482 - DNA, 20 bp, Artificial Sequence
  Description of Artificial Sequence: Synthetic oligonucleotide
  Target: SCNA; (-) strand; PAM type: YTN; PAM sequence: TTA
tttatttctattctgatctt

SEQ ID NO: 50483 - DNA, 20 bp, Artificial Sequence
  Description of Artificial Sequence: Synthetic oligonucleotide
  Target: SCNA; (-) strand; PAM type: YTN; PAM sequence: TTT
atttatttctattctgatct

SEQ ID NO: 50484 - DNA, 20 bp, Artificial Sequence
  Description of Artificial Sequence: Synthetic oligonucleotide
  Target: SCNA; (-) strand; PAM type: YTN; PAM sequence: TTT
tatttatttctattctgatc

SEQ ID NO: 50485 - DNA, 20 bp, Artificial Sequence
  Description of Artificial Sequence: Synthetic oligonucleotide
  Target: SCNA; (-) strand; PAM type: YTN; PAM sequence: CTC
aattttatttatttctattc

SEQ ID NO: 50486 - DNA, 20 bp, Artificial Sequence
  Description of Artificial Sequence: Synthetic oligonucleotide
  Target: SCNA; (-) strand; PAM type: YTN; PAM sequence: CTA
agactcaattttatttattt

SEQ ID NO: 50487 - DNA, 20 bp, Artificial Sequence
  Description of Artificial Sequence: Synthetic oligonucleotide
  Target: SCNA; (-) strand; PAM type: YTN; PAM sequence: TTA
caggtgtgagccaccacact

SEQ ID NO: 50488 - DNA, 20 bp, Artificial Sequence
  Description of Artificial Sequence: Synthetic oligonucleotide
  Target: SCNA; (-) strand; PAM type: YTN; PAM sequence: CTG
cgattacaggtgtgagccac

SEQ ID NO: 50489 - DNA, 20 bp, Artificial Sequence
  Description of Artificial Sequence: Synthetic oligonucleotide
  Target: SCNA; (-) strand; PAM type: YTN; PAM sequence: CTC
ccaaagtgctgcgattacag

SEQ ID NO: 50490 - DNA, 20 bp, Artificial Sequence
  Description of Artificial Sequence: Synthetic oligonucleotide
  Target: SCNA; (-) strand; PAM type: YTN; PAM sequence: TTG
gcctcccaaagtgctgcgat

SEQ ID NO: 50491 - DNA, 20 bp, Artificial Sequence
  Description of Artificial Sequence: Synthetic oligonucleotide
  Target: SCNA; (-) strand; PAM type: YTN; PAM sequence: CTT
ggcctcccaaagtgctgcga

SEQ ID NO: 50492 - DNA, 20 bp, Artificial Sequence
  Description of Artificial Sequence: Synthetic oligonucleotide
  Target: SCNA; (-) strand; PAM type: YTN; PAM sequence: CTG
ccttggcctcccaaagtgct

SEQ ID NO: 50493 - DNA, 20 bp, Artificial Sequence
  Description of Artificial Sequence: Synthetic oligonucleotide
  Target: SCNA; (-) strand; PAM type: YTN; PAM sequence: TTA
tggtgatccgcctgccttgg

SEQ ID NO: 50494 - DNA, 20 bp, Artificial Sequence
  Description of Artificial Sequence: Synthetic oligonucleotide
  Target: SCNA; (-) strand; PAM type: YTN; PAM sequence: CTT
atggtgatccgcctgccttg

SEQ ID NO: 50495 - DNA, 20 bp, Artificial Sequence
  Description of Artificial Sequence: Synthetic oligonucleotide
  Target: SCNA; (-) strand; PAM type: YTN; PAM sequence: CTG
acttatggtgatccgcctgc

SEQ ID NO: 50496 - DNA, 20 bp, Artificial Sequence
  Description of Artificial Sequence: Synthetic oligonucleotide
  Target: SCNA; (-) strand; PAM type: YTN; PAM sequence: CTC
ctgacttatggtgatccgcc

SEQ ID NO: 50497 - DNA, 20 bp, Artificial Sequence
  Description of Artificial Sequence: Synthetic oligonucleotide
  Target: SCNA; (-) strand; PAM type: YTN; PAM sequence: CTC
aaactcctgacttatggtga

SEQ ID NO: 50498 - DNA, 20 bp, Artificial Sequence
  Description of Artificial Sequence: Synthetic oligonucleotide
  Target: SCNA; (-) strand; PAM type: YTN; PAM sequence: TTG
gccaggcaggtctcaaactc

SEQ ID NO: 50499 - DNA, 20 bp, Artificial Sequence
  Description of Artificial Sequence: Synthetic oligonucleotide
  Target: SCNA; (-) strand; PAM type: YTN; PAM sequence: TTC
accatgttggccaggcaggt

SEQ ID NO: 50500 - DNA, 20 bp, Artificial Sequence
  Description of Artificial Sequence: Synthetic oligonucleotide
  Target: SCNA; (-) strand; PAM type: YTN; PAM sequence: TTT
caccatgttggccaggcagg

SEQ ID NO: 50501 - DNA, 20 bp, Artificial Sequence
  Description of Artificial Sequence: Synthetic oligonucleotide
  Target: SCNA; (-) strand; PAM type: YTN; PAM sequence: TTA
gtagagacggggtttcacca

SEQ ID NO: 50502 - DNA, 20 bp, Artificial Sequence
  Description of Artificial Sequence: Synthetic oligonucleotide
  Target: SCNA; (-) strand; PAM type: YTN; PAM sequence: TTT
agtagagacggggtttcacc

SEQ ID NO: 50503 - DNA, 20 bp, Artificial Sequence
  Description of Artificial Sequence: Synthetic oligonucleotide
  Target: SCNA; (-) strand; PAM type: YTN; PAM sequence: TTT
tagtagagacggggtttcac

SEQ ID NO: 50504 - DNA, 20 bp, Artificial Sequence
  Description of Artificial Sequence: Synthetic oligonucleotide
  Target: SCNA; (-) strand; PAM type: YTN; PAM sequence: TTT
ttagtagagacggggtttca

SEQ ID NO: 50505 - DNA, 20 bp, Artificial Sequence
  Description of Artificial Sequence: Synthetic oligonucleotide
  Target: SCNA; (-) strand; PAM type: YTN; PAM sequence: TTG
tatttttagtagagacgggg

SEQ ID NO: 50506 - DNA, 20 bp, Artificial Sequence
  Description of Artificial Sequence: Synthetic oligonucleotide
  Target: SCNA; (-) strand; PAM type: YTN; PAM sequence: TTT
gtatttttagtagagacggg

SEQ ID NO: 50507 - DNA, 20 bp, Artificial Sequence
  Description of Artificial Sequence: Synthetic oligonucleotide
  Target: SCNA; (-) strand; PAM type: YTN; PAM sequence: TTT
tgtatttttagtagagacgg

SEQ ID NO: 50508 - DNA, 20 bp, Artificial Sequence
  Description of Artificial Sequence: Synthetic oligonucleotide
  Target: SCNA; (-) strand; PAM type: YTN; PAM sequence: TTT
ttgtatttttagtagagacg

SEQ ID NO: 50509 - DNA, 20 bp, Artificial Sequence
  Description of Artificial Sequence: Synthetic oligonucleotide
  Target: SCNA; (-) strand; PAM type: YTN; PAM sequence: CTA
atttttgtatttttagtaga

SEQ ID NO: 50510 - DNA, 20 bp, Artificial Sequence
  Description of Artificial Sequence: Synthetic oligonucleotide
  Target: SCNA; (-) strand; PAM type: YTN; PAM sequence: CTG
gctaatttttgtatttttag

SEQ ID NO: 50511 - DNA, 20 bp, Artificial Sequence
  Description of Artificial Sequence: Synthetic oligonucleotide
  Target: SCNA; (-) strand; PAM type: YTN; PAM sequence: CTG
ccaccacacctggctaattt

SEQ ID NO: 50512 - DNA, 20 bp, Artificial Sequence
  Description of Artificial Sequence: Synthetic oligonucleotide
  Target: SCNA; (-) strand; PAM type: YTN; PAM sequence: CTA
caggtgcctgccaccacacc

SEQ ID NO: 50513 - DNA, 20 bp, Artificial Sequence
  Description of Artificial Sequence: Synthetic oligonucleotide
  Target: SCNA; (-) strand; PAM type: YTN; PAM sequence: CTG
ggactacaggtgcctgccac

SEQ ID NO: 50514 - DNA, 20 bp, Artificial Sequence
  Description of Artificial Sequence: Synthetic oligonucleotide
  Target: SCNA; (-) strand; PAM type: YTN; PAM sequence: CTG
cccgagtagctgggactaca

SEQ ID NO: 50515 - DNA, 20 bp, Artificial Sequence
  Description of Artificial Sequence: Synthetic oligonucleotide
  Target: SCNA; (-) strand; PAM type: YTN; PAM sequence: CTC
agctgcccgagtagctggga

SEQ ID NO: 50516 - DNA, 20 bp, Artificial Sequence
  Description of Artificial Sequence: Synthetic oligonucleotide
  Target: SCNA; (-) strand; PAM type: YTN; PAM sequence: TTG
cctcagctgcccgagtagct

SEQ ID NO: 50517 - DNA, 20 bp, Artificial Sequence
  Description of Artificial Sequence: Synthetic oligonucleotide
  Target: SCNA; (-) strand; PAM type: YTN; PAM sequence: CTT
gcctcagctgcccgagtagc

SEQ ID NO: 50518 - DNA, 20 bp, Artificial Sequence
  Description of Artificial Sequence: Synthetic oligonucleotide
  Target: SCNA; (-) strand; PAM type: YTN; PAM sequence: CTC
ttgcctcagctgcccgagta

SEQ ID NO: 50519 - DNA, 20 bp, Artificial Sequence
  Description of Artificial Sequence: Synthetic oligonucleotide
  Target: SCNA; (-) strand; PAM type: YTN; PAM sequence: TTC
tcttgcctcagctgcccgag

SEQ ID NO: 50520 - DNA, 20 bp, Artificial Sequence
  Description of Artificial Sequence: Synthetic oligonucleotide
  Target: SCNA; (-) strand; PAM type: YTN; PAM sequence: TTC
aagtgattctcttgcctcag

SEQ ID NO: 50521 - DNA, 20 bp, Artificial Sequence
  Description of Artificial Sequence: Synthetic oligonucleotide
  Target: SCNA; (-) strand; PAM type: YTN; PAM sequence: TTC
caggttcaagtgattctctt

SEQ ID NO: 50522 - DNA, 20 bp, Artificial Sequence
  Description of Artificial Sequence: Synthetic oligonucleotide
  Target: SCNA; (-) strand; PAM type: YTN; PAM sequence: CTT
ccaggttcaagtgattctct

SEQ ID NO: 50523 - DNA, 20 bp, Artificial Sequence
  Description of Artificial Sequence: Synthetic oligonucleotide
  Target: SCNA; (-) strand; PAM type: YTN; PAM sequence: CTG
ccttccaggttcaagtgatt

SEQ ID NO: 50524 - DNA, 20 bp, Artificial Sequence
  Description of Artificial Sequence: Synthetic oligonucleotide
  Target: SCNA; (-) strand; PAM type: YTN; PAM sequence: CTG
caacatctgccttccaggtt

SEQ ID NO: 50525 - DNA, 20 bp, Artificial Sequence
  Description of Artificial Sequence: Synthetic oligonucleotide
  Target: SCNA; (-) strand; PAM type: YTN; PAM sequence: CTC
actgcaacatctgccttcca

SEQ ID NO: 50526 - DNA, 20 bp, Artificial Sequence
  Description of Artificial Sequence: Synthetic oligonucleotide
  Target: SCNA; (-) strand; PAM type: YTN; PAM sequence: TTG
gctcactgcaacatctgcct

SEQ ID NO: 50527 - DNA, 20 bp, Artificial Sequence
  Description of Artificial Sequence: Synthetic oligonucleotide
  Target: SCNA; (-) strand; PAM type: YTN; PAM sequence: CTT
ggctcactgcaacatctgcc

SEQ ID NO: 50528 - DNA, 20 bp, Artificial Sequence
  Description of Artificial Sequence: Synthetic oligonucleotide
  Target: SCNA; (-) strand; PAM type: YTN; PAM sequence: CTG
gaatgcaacagtatgatctt

SEQ ID NO: 50529 - DNA, 20 bp, Artificial Sequence
  Description of Artificial Sequence: Synthetic oligonucleotide
  Target: SCNA; (-) strand; PAM type: YTN; PAM sequence: TTA
cccaggctggaatgcaacag

SEQ ID NO: 50530 - DNA, 20 bp, Artificial Sequence
  Description of Artificial Sequence: Synthetic oligonucleotide
  Target: SCNA; (-) strand; PAM type: YTN; PAM sequence: TTG
ttacccaggctggaatgcaa

SEQ ID NO: 50531 - DNA, 20 bp, Artificial Sequence
  Description of Artificial Sequence: Synthetic oligonucleotide
  Target: SCNA; (-) strand; PAM type: YTN; PAM sequence: CTT
gttacccaggctggaatgca

SEQ ID NO: 50532 - DNA, 20 bp, Artificial Sequence
  Description of Artificial Sequence: Synthetic oligonucleotide
  Target: SCNA; (-) strand; PAM type: YTN; PAM sequence: CTC
ttgttacccaggctggaatg

SEQ ID NO: 50533 - DNA, 20 bp, Artificial Sequence
  Description of Artificial Sequence: Synthetic oligonucleotide
  Target: SCNA; (-) strand; PAM type: YTN; PAM sequence: CTC
actcttgttacccaggctgg

SEQ ID NO: 50534 - DNA, 20 bp, Artificial Sequence
  Description of Artificial Sequence: Synthetic oligonucleotide
  Target: SCNA; (-) strand; PAM type: YTN; PAM sequence: TTG
agatggagtctcactcttgt

SEQ ID NO: 50535 - DNA, 20 bp, Artificial Sequence
  Description of Artificial Sequence: Synthetic oligonucleotide
  Target: SCNA; (-) strand; PAM type: YTN; PAM sequence: TTT
gagatggagtctcactcttg

SEQ ID NO: 50536 - DNA, 20 bp, Artificial Sequence
  Description of Artificial Sequence: Synthetic oligonucleotide
  Target: SCNA; (-) strand; PAM type: YTN; PAM sequence: TTT
tgagatggagtctcactctt

SEQ ID NO: 50537 - DNA, 20 bp, Artificial Sequence
  Description of Artificial Sequence: Synthetic oligonucleotide
  Target: SCNA; (-) strand; PAM type: YTN; PAM sequence: TTT
ttgagatggagtctcactct

SEQ ID NO: 50538 - DNA, 20 bp, Artificial Sequence
  Description of Artificial Sequence: Synthetic oligonucleotide
  Target: SCNA; (-) strand; PAM type: YTN; PAM sequence: TTT
tttgagatggagtctcactc

SEQ ID NO: 50539 - DNA, 20 bp, Artificial Sequence
  Description of Artificial Sequence: Synthetic oligonucleotide
  Target: SCNA; (-) strand; PAM type: YTN; PAM sequence: TTA
ttttttgagatggagtctca

SEQ ID NO: 50540 - DNA, 20 bp, Artificial Sequence
  Description of Artificial Sequence: Synthetic oligonucleotide
  Target: SCNA; (-) strand; PAM type: YTN; PAM sequence: TTT
attttttgagatggagtctc

SEQ ID NO: 50541 - DNA, 20 bp, Artificial Sequence
  Description of Artificial Sequence: Synthetic oligonucleotide
  Target: SCNA; (-) strand; PAM type: YTN; PAM sequence: TTT
tattttttgagatggagtct

SEQ ID NO: 50542 - DNA, 20 bp, Artificial Sequence
  Description of Artificial Sequence: Synthetic oligonucleotide
  Target: SCNA; (-) strand; PAM type: YTN; PAM sequence: TTT
ttattttttgagatggagtc

SEQ ID NO: 50543 - DNA, 20 bp, Artificial Sequence
  Description of Artificial Sequence: Synthetic oligonucleotide
  Target: SCNA; (-) strand; PAM type: YTN; PAM sequence: TTA
tttttattttttgagatgga

SEQ ID NO: 50544 - DNA, 20 bp, Artificial Sequence
  Description of Artificial Sequence: Synthetic oligonucleotide
  Target: SCNA; (-) strand; PAM type: YTN; PAM sequence: TTT
atttttattttttgagatgg

SEQ ID NO: 50545 - DNA, 20 bp, Artificial Sequence
  Description of Artificial Sequence: Synthetic oligonucleotide
  Target: SCNA; (-) strand; PAM type: YTN; PAM sequence: TTT
tatttttattttttgagatg

SEQ ID NO: 50546 - DNA, 20 bp, Artificial Sequence
  Description of Artificial Sequence: Synthetic oligonucleotide
  Target: SCNA; (-) strand; PAM type: YTN; PAM sequence: TTT
ttatttttattttttgagat

SEQ ID NO: 50547 - DNA, 20 bp, Artificial Sequence
  Description of Artificial Sequence: Synthetic oligonucleotide
  Target: SCNA; (-) strand; PAM type: YTN; PAM sequence: TTA
tttttatttttattttttga

SEQ ID NO: 50548 - DNA, 20 bp, Artificial Sequence
  Description of Artificial Sequence: Synthetic oligonucleotide
  Target: SCNA; (-) strand; PAM type: YTN; PAM sequence: TTT
atttttatttttattttttg

SEQ ID NO: 50549 - DNA, 20 bp, Artificial Sequence
  Description of Artificial Sequence: Synthetic oligonucleotide
  Target: SCNA; (-) strand; PAM type: YTN; PAM sequence: TTA
tttatttttatttttatttt

SEQ ID NO: 50550 - DNA, 20 bp, Artificial Sequence
  Description of Artificial Sequence: Synthetic oligonucleotide
  Target: SCNA; (-) strand; PAM type: YTN; PAM sequence: TTT
atttatttttatttttattt

SEQ ID NO: 50551 - DNA, 20 bp, Artificial Sequence
  Description of Artificial Sequence: Synthetic oligonucleotide
  Target: SCNA; (-) strand; PAM type: YTN; PAM sequence: TTA
tttatttatttttattttta

SEQ ID NO: 50552 - DNA, 20 bp, Artificial Sequence
  Description of Artificial Sequence: Synthetic oligonucleotide
  Target: SCNA; (-) strand; PAM type: YTN; PAM sequence: TTT
atttatttatttttattttt

SEQ ID NO: 50553 - DNA, 20 bp, Artificial Sequence
  Description of Artificial Sequence: Synthetic oligonucleotide
  Target: SCNA; (-) strand; PAM type: YTN; PAM sequence: TTA
tttatttatttatttttatt

SEQ ID NO: 50554 - DNA, 20 bp, Artificial Sequence
  Description of Artificial Sequence: Synthetic oligonucleotide
  Target: SCNA; (-) strand; PAM type: YTN; PAM sequence: TTT
atttatttatttatttttat

SEQ ID NO: 50555 - DNA, 20 bp, Artificial Sequence
  Description of Artificial Sequence: Synthetic oligonucleotide
  Target: SCNA; (-) strand; PAM type: YTN; PAM sequence: TTA
tttatttatttatttatttt

SEQ ID NO: 50556 - DNA, 20 bp, Artificial Sequence
  Description of Artificial Sequence: Synthetic oligonucleotide
  Target: SCNA; (-) strand; PAM type: YTN; PAM sequence: TTT
atttatttatttatttattt

SEQ ID NO: 50557 - DNA, 20 bp, Artificial Sequence
  Description of Artificial Sequence: Synthetic oligonucleotide
  Target: SCNA; (-) strand; PAM type: YTN; PAM sequence: TTT
tatttatttatttatttatt

SEQ ID NO: 50558 - DNA, 20 bp, Artificial Sequence
  Description of Artificial Sequence: Synthetic oligonucleotide
  Target: SCNA; (-) strand; PAM type: YTN; PAM sequence: TTC
aattttatttatttatttat

SEQ ID NO: 50559 - DNA, 20 bp, Artificial Sequence
  Description of Artificial Sequence: Synthetic oligonucleotide
  Target: SCNA; (-) strand; PAM type: YTN; PAM sequence: TTT
caattttatttatttattta

SEQ ID NO: 50560 - DNA, 20 bp, Artificial Sequence
  Description of Artificial Sequence: Synthetic oligonucleotide
  Target: SCNA; (-) strand; PAM type: YTN; PAM sequence: TTG
tgtttcaattttatttattt

SEQ ID NO: 50561 - DNA, 20 bp, Artificial Sequence
  Description of Artificial Sequence: Synthetic oligonucleotide
  Target: SCNA; (-) strand; PAM type: YTN; PAM sequence: TTT
gtgtttcaattttatttatt

SEQ ID NO: 50562 - DNA, 20 bp, Artificial Sequence
  Description of Artificial Sequence: Synthetic oligonucleotide
  Target: SCNA; (-) strand; PAM type: YTN; PAM sequence: TTT
tgtgtttcaattttatttat

SEQ ID NO: 50563 - DNA, 20 bp, Artificial Sequence
  Description of Artificial Sequence: Synthetic oligonucleotide
  Target: SCNA; (-) strand; PAM type: YTN; PAM sequence: TTG
tattttgtgtttcaatttta

SEQ ID NO: 50564 - DNA, 20 bp, Artificial Sequence
  Description of Artificial Sequence: Synthetic oligonucleotide
  Target: SCNA; (-) strand; PAM type: YTN; PAM sequence: TTG
tattgtattttgtgtttcaa

SEQ ID NO: 50565 - DNA, 20 bp, Artificial Sequence
  Description of Artificial Sequence: Synthetic oligonucleotide
  Target: SCNA; (-) strand; PAM type: YTN; PAM sequence: TTT
gtattgtattttgtgtttca

SEQ ID NO: 50566 - DNA, 20 bp, Artificial Sequence
  Description of Artificial Sequence: Synthetic oligonucleotide
  Target: SCNA; (-) strand; PAM type: YTN; PAM sequence: TTT
tgtattgtattttgtgtttc

SEQ ID NO: 50567 - DNA, 20 bp, Artificial Sequence
  Description of Artificial Sequence: Synthetic oligonucleotide
  Target: SCNA; (-) strand; PAM type: YTN; PAM sequence: CTT
ttgtattgtattttgtgttt

SEQ ID NO: 50568 - DNA, 20 bp, Artificial Sequence
  Description of Artificial Sequence: Synthetic oligonucleotide
  Target: SCNA; (-) strand; PAM type: YTN; PAM sequence: TTA
tcttttgtattgtattttgt

SEQ ID NO: 50569 - DNA, 20 bp, Artificial Sequence
  Description of Artificial Sequence: Synthetic oligonucleotide
  Target: SCNA; (-) strand; PAM type: YTN; PAM sequence: TTT
atcttttgtattgtattttg

SEQ ID NO: 50570 - DNA, 20 bp, Artificial Sequence
  Description of Artificial Sequence: Synthetic oligonucleotide
  Target: SCNA; (-) strand; PAM type: YTN; PAM sequence: TTC
atttatcttttgtattgtat

SEQ ID NO: 50571 - DNA, 20 bp, Artificial Sequence
  Description of Artificial Sequence: Synthetic oligonucleotide
  Target: SCNA; (-) strand; PAM type: YTN; PAM sequence: TTT
catttatcttttgtattgta

SEQ ID NO: 50572 - DNA, 20 bp, Artificial Sequence
  Description of Artificial Sequence: Synthetic oligonucleotide
  Target: SCNA; (-) strand; PAM type: YTN; PAM sequence: TTG
tttcatttatcttttgtatt

SEQ ID NO: 50573 - DNA, 20 bp, Artificial Sequence
  Description of Artificial Sequence: Synthetic oligonucleotide
  Target: SCNA; (-) strand; PAM type: YTN; PAM sequence: TTT
gtttcatttatcttttgtat

SEQ ID NO: 50574 - DNA, 20 bp, Artificial Sequence
  Description of Artificial Sequence: Synthetic oligonucleotide
  Target: SCNA; (-) strand; PAM type: YTN; PAM sequence: TTT
tgtttcatttatcttttgta

SEQ ID NO: 50575 - DNA, 20 bp, Artificial Sequence
  Description of Artificial Sequence: Synthetic oligonucleotide
  Target: SCNA; (-) strand; PAM type: YTN; PAM sequence: TTT
ttgtttcatttatcttttgt

SEQ ID NO: 50576 - DNA, 20 bp, Artificial Sequence
  Description of Artificial Sequence: Synthetic oligonucleotide
  Target: SCNA; (-) strand; PAM type: YTN; PAM sequence: TTC
aaagaagcaggtttttgttt

SEQ ID NO: 50577 - DNA, 20 bp, Artificial Sequence
  Description of Artificial Sequence: Synthetic oligonucleotide
  Target: SCNA; (-) strand; PAM type: YTN; PAM sequence: TTT
caaagaagcaggtttttgtt

SEQ ID NO: 50578 - DNA, 20 bp, Artificial Sequence
  Description of Artificial Sequence: Synthetic oligonucleotide
  Target: SCNA; (-) strand; PAM type: YTN; PAM sequence: TTT
tcaaagaagcaggtttttgt

SEQ ID NO: 50579 - DNA, 20 bp, Artificial Sequence
  Description of Artificial Sequence: Synthetic oligonucleotide
  Target: SCNA; (-) strand; PAM type: YTN; PAM sequence: CTT
ttcaaagaagcaggtttttg

SEQ ID NO: 50580 - DNA, 20 bp, Artificial Sequence
  Description of Artificial Sequence: Synthetic oligonucleotide
  Target: SCNA; (-) strand; PAM type: YTN; PAM sequence: TTA
tcttttcaaagaagcaggtt

SEQ ID NO: 50581 - DNA, 20 bp, Artificial Sequence
  Description of Artificial Sequence: Synthetic oligonucleotide
  Target: SCNA; (-) strand; PAM type: YTN; PAM sequence: TTT
atcttttcaaagaagcaggt

SEQ ID NO: 50582 - DNA, 20 bp, Artificial Sequence
  Description of Artificial Sequence: Synthetic oligonucleotide
  Target: SCNA; (-) strand; PAM type: YTN; PAM sequence: TTG
tttatcttttcaaagaagca

SEQ ID NO: 50583 - DNA, 20 bp, Artificial Sequence
  Description of Artificial Sequence: Synthetic oligonucleotide
  Target: SCNA; (-) strand; PAM type: YTN; PAM sequence: TTT
gtttatcttttcaaagaagc

SEQ ID NO: 50584 - DNA, 20 bp, Artificial Sequence
  Description of Artificial Sequence: Synthetic oligonucleotide
  Target: SCNA; (-) strand; PAM type: YTN; PAM sequence: TTT
tgtttatcttttcaaagaag

SEQ ID NO: 50585 - DNA, 20 bp, Artificial Sequence
  Description of Artificial Sequence: Synthetic oligonucleotide
  Target: SCNA; (-) strand; PAM type: YTN; PAM sequence: TTG
attttgtttatcttttcaaa

SEQ ID NO: 50586 - DNA, 20 bp, Artificial Sequence
  Description of Artificial Sequence: Synthetic oligonucleotide
  Target: SCNA; (-) strand; PAM type: YTN; PAM sequence: CTA
ttgattttgtttatcttttc

SEQ ID NO: 50587 - DNA, 20 bp, Artificial Sequence
  Description of Artificial Sequence: Synthetic oligonucleotide
  Target: SCNA; (-) strand; PAM type: YTN; PAM sequence: TTG
ccaatggtctattgattttg

SEQ ID NO: 50588 - DNA, 20 bp, Artificial Sequence
  Description of Artificial Sequence: Synthetic oligonucleotide
  Target: SCNA; (-) strand; PAM type: YTN; PAM sequence: CTT
gccaatggtctattgatttt

SEQ ID NO: 50589 - DNA, 20 bp, Artificial Sequence
  Description of Artificial Sequence: Synthetic oligonucleotide
  Target: SCNA; (-) strand; PAM type: YTN; PAM sequence: TTA
atcttgccaatggtctattg

SEQ ID NO: 50590 - DNA, 20 bp, Artificial Sequence
  Description of Artificial Sequence: Synthetic oligonucleotide
  Target: SCNA; (-) strand; PAM type: YTN; PAM sequence: TTG
gttaatcttgccaatggtct

SEQ ID NO: 50591 - DNA, 20 bp, Artificial Sequence
  Description of Artificial Sequence: Synthetic oligonucleotide
  Target: SCNA; (-) strand; PAM type: YTN; PAM sequence: CTT
ggttaatcttgccaatggtc

SEQ ID NO: 50592 - DNA, 20 bp, Artificial Sequence
  Description of Artificial Sequence: Synthetic oligonucleotide
  Target: SCNA; (-) strand; PAM type: YTN; PAM sequence: TTC
ttggttaatcttgccaatgg

SEQ ID NO: 50593 - DNA, 20 bp, Artificial Sequence
  Description of Artificial Sequence: Synthetic oligonucleotide
  Target: SCNA; (-) strand; PAM type: YTN; PAM sequence: TTT
cttggttaatcttgccaatg

SEQ ID NO: 50594 - DNA, 20 bp, Artificial Sequence
  Description of Artificial Sequence: Synthetic oligonucleotide
  Target: SCNA; (-) strand; PAM type: YTN; PAM sequence: TTT
tcttggttaatcttgccaat

SEQ ID NO: 50595 - DNA, 20 bp, Artificial Sequence
  Description of Artificial Sequence: Synthetic oligonucleotide
  Target: SCNA; (-) strand; PAM type: YTN; PAM sequence: TTG
ttttcttggttaatcttgcc

SEQ ID NO: 50596 - DNA, 20 bp, Artificial Sequence
  Description of Artificial Sequence: Synthetic oligonucleotide
  Target: SCNA; (-) strand; PAM type: YTN; PAM sequence: CTT
gttttcttggttaatcttgc

SEQ ID NO: 50597 - DNA, 20 bp, Artificial Sequence
  Description of Artificial Sequence: Synthetic oligonucleotide
  Target: SCNA; (-) strand; PAM type: YTN; PAM sequence: TTC
ttgttttcttggttaatctt

SEQ ID NO: 50598 - DNA, 20 bp, Artificial Sequence
  Description of Artificial Sequence: Synthetic oligonucleotide
  Target: SCNA; (-) strand; PAM type: YTN; PAM sequence: TTT
cttgttttcttggttaatct

SEQ ID NO: 50599 - DNA, 20 bp, Artificial Sequence
  Description of Artificial Sequence: Synthetic oligonucleotide
  Target: SCNA; (-) strand; PAM type: YTN; PAM sequence: TTT
tcttgttttcttggttaatc

SEQ ID NO: 50600 - DNA, 20 bp, Artificial Sequence
  Description of Artificial Sequence: Synthetic oligonucleotide
  Target: SCNA; (-) strand; PAM type: YTN; PAM sequence: TTT
ttcttgttttcttggttaat

SEQ ID NO: 50601 - DNA, 20 bp, Artificial Sequence
  Description of Artificial Sequence: Synthetic oligonucleotide
  Target: SCNA; (-) strand; PAM type: YTN; PAM sequence: TTT
tttcttgttttcttggttaa

SEQ ID NO: 50602 - DNA, 20 bp, Artificial Sequence
  Description of Artificial Sequence: Synthetic oligonucleotide
  Target: SCNA; (-) strand; PAM type: YTN; PAM sequence: CTT
ttttcttgttttcttggtta

SEQ ID NO: 50603 - DNA, 20 bp, Artificial Sequence
  Description of Artificial Sequence: Synthetic oligonucleotide
  Target: SCNA; (-) strand; PAM type: YTN; PAM sequence: TTA
gatcttttttcttgttttct

SEQ ID NO: 50604 - DNA, 20 bp, Artificial Sequence
  Description of Artificial Sequence: Synthetic oligonucleotide
  Target: SCNA; (-) strand; PAM type: YTN; PAM sequence: TTT
agatcttttttcttgttttc

SEQ ID NO: 50605 - DNA, 20 bp, Artificial Sequence
  Description of Artificial Sequence: Synthetic oligonucleotide
  Target: SCNA; (-) strand; PAM type: YTN; PAM sequence: TTG
tttagatcttttttcttgtt

SEQ ID NO: 50606 - DNA, 20 bp, Artificial Sequence
  Description of Artificial Sequence: Synthetic oligonucleotide
  Target: SCNA; (-) strand; PAM type: YTN; PAM sequence: CTT
gtttagatcttttttcttgt

SEQ ID NO: 50607 - DNA, 20 bp, Artificial Sequence
  Description of Artificial Sequence: Synthetic oligonucleotide
  Target: SCNA; (-) strand; PAM type: YTN; PAM sequence: TTG
agcttgtttagatctttttt

SEQ ID NO: 50608 - DNA, 20 bp, Artificial Sequence
  Description of Artificial Sequence: Synthetic oligonucleotide
  Target: SCNA; (-) strand; PAM type: YTN; PAM sequence: CTA
attgagcttgtttagatctt

SEQ ID NO: 50609 - DNA, 20 bp, Artificial Sequence
  Description of Artificial Sequence: Synthetic oligonucleotide
  Target: SCNA; (-) strand; PAM type: YTN; PAM sequence: TTC
taattgagcttgtttagatc

SEQ ID NO: 50610 - DNA, 20 bp, Artificial Sequence
  Description of Artificial Sequence: Synthetic oligonucleotide
  Target: SCNA; (-) strand; PAM type: YTN; PAM sequence: TTT
ctaattgagcttgtttagat

SEQ ID NO: 50611 - DNA, 20 bp, Artificial Sequence
  Description of Artificial Sequence: Synthetic oligonucleotide
  Target: SCNA; (-) strand; PAM type: YTN; PAM sequence: TTC
atttctaattgagcttgttt

SEQ ID NO: 50612 - DNA, 20 bp, Artificial Sequence
  Description of Artificial Sequence: Synthetic oligonucleotide
  Target: SCNA; (-) strand; PAM type: YTN; PAM sequence: TTT
catttctaattgagcttgtt

SEQ ID NO: 50613 - DNA, 20 bp, Artificial Sequence
  Description of Artificial Sequence: Synthetic oligonucleotide
  Target: SCNA; (-) strand; PAM type: YTN; PAM sequence: CTC
ccatttcatttctaattgag

SEQ ID NO: 50614 - DNA, 20 bp, Artificial Sequence
  Description of Artificial Sequence: Synthetic oligonucleotide
  Target: SCNA; (-) strand; PAM type: YTN; PAM sequence: TTG
tagtatctcccatttcattt

SEQ ID NO: 50615 - DNA, 20 bp, Artificial Sequence
  Description of Artificial Sequence: Synthetic oligonucleotide
  Target: SCNA; (-) strand; PAM type: YTN; PAM sequence: CTG
tggtatcagttgtagtatct

SEQ ID NO: 50616 - DNA, 20 bp, Artificial Sequence
  Description of Artificial Sequence: Synthetic oligonucleotide
  Target: SCNA; (-) strand; PAM type: YTN; PAM sequence: TTC
tgtggtatcagttgtagtat

SEQ ID NO: 50617 - DNA, 20 bp, Artificial Sequence
  Description of Artificial Sequence: Synthetic oligonucleotide
  Target: SCNA; (-) strand; PAM type: YTN; PAM sequence: TTT
ctgtggtatcagttgtagta

SEQ ID NO: 50618 - DNA, 20 bp, Artificial Sequence
  Description of Artificial Sequence: Synthetic oligonucleotide
  Target: SCNA; (-) strand; PAM type: YTN; PAM sequence: TTA
tttctgtggtatcagttgta

SEQ ID NO: 50619 - DNA, 20 bp, Artificial Sequence
  Description of Artificial Sequence: Synthetic oligonucleotide
  Target: SCNA; (-) strand; PAM type: YTN; PAM sequence: TTT
atttctgtggtatcagttgt

SEQ ID NO: 50620 - DNA, 20 bp, Artificial Sequence
  Description of Artificial Sequence: Synthetic oligonucleotide
  Target: SCNA; (-) strand; PAM type: YTN; PAM sequence: TTT
tatttctgtggtatcagttg

SEQ ID NO: 50621 - DNA, 20 bp, Artificial Sequence
  Description of Artificial Sequence: Synthetic oligonucleotide
  Target: SCNA; (-) strand; PAM type: YTN; PAM sequence: TTT
ttatttctgtggtatcagtt

SEQ ID NO: 50622 - DNA, 20 bp, Artificial Sequence
  Description of Artificial Sequence: Synthetic oligonucleotide
  Target: SCNA; (-) strand; PAM type: YTN; PAM sequence: TTT
tttatttctgtggtatcagt

SEQ ID NO: 50623 - DNA, 20 bp, Artificial Sequence
  Description of Artificial Sequence: Synthetic oligonucleotide
  Target: SCNA; (-) strand; PAM type: YTN; PAM sequence: CTT
ttttatttctgtggtatcag

SEQ ID NO: 50624 - DNA, 20 bp, Artificial Sequence
  Description of Artificial Sequence: Synthetic oligonucleotide
  Target: SCNA; (-) strand; PAM type: YTN; PAM sequence: TTG
aataatcttttttatttctg

SEQ ID NO: 50625 - DNA, 20 bp, Artificial Sequence
  Description of Artificial Sequence: Synthetic oligonucleotide
  Target: SCNA; (-) strand; PAM type: YTN; PAM sequence: CTT
gaataatcttttttatttct

SEQ ID NO: 50626 - DNA, 20 bp, Artificial Sequence
  Description of Artificial Sequence: Synthetic oligonucleotide
  Target: SCNA; (-) strand; PAM type: YTN; PAM sequence: TTC
acagtagtcttgaataatct

SEQ ID NO: 50627 - DNA, 20 bp, Artificial Sequence
  Description of Artificial Sequence: Synthetic oligonucleotide
  Target: SCNA; (-) strand; PAM type: YTN; PAM sequence: TTG
tgtacgtaaatgtgttcaca

SEQ ID NO: 50628 - DNA, 20 bp, Artificial Sequence
  Description of Artificial Sequence: Synthetic oligonucleotide
  Target: SCNA; (-) strand; PAM type: YTN; PAM sequence: TTT
gtgtacgtaaatgtgttcac

SEQ ID NO: 50629 - DNA, 20 bp, Artificial Sequence
  Description of Artificial Sequence: Synthetic oligonucleotide
  Target: SCNA; (-) strand; PAM type: YTN; PAM sequence: CTA
gtttgtgtacgtaaatgtgt

SEQ ID NO: 50630 - DNA, 20 bp, Artificial Sequence
  Description of Artificial Sequence: Synthetic oligonucleotide
  Target: SCNA; (-) strand; PAM type: YTN; PAM sequence: TTC
tagtttgtgtacgtaaatgt

SEQ ID NO: 50631 - DNA, 20 bp, Artificial Sequence
  Description of Artificial Sequence: Synthetic oligonucleotide
  Target: SCNA; (-) strand; PAM type: YTN; PAM sequence: TTT
ctagtttgtgtacgtaaatg

SEQ ID NO: 50632 - DNA, 20 bp, Artificial Sequence
  Description of Artificial Sequence: Synthetic oligonucleotide
  Target: SCNA; (-) strand; PAM type: YTN; PAM sequence: TTT
tctagtttgtgtacgtaaat

SEQ ID NO: 50633 - DNA, 20 bp, Artificial Sequence
  Description of Artificial Sequence: Synthetic oligonucleotide
  Target: SCNA; (-) strand; PAM type: YTN; PAM sequence: TTG
gttttctagtttgtgtacgt

SEQ ID NO: 50634 - DNA, 20 bp, Artificial Sequence
  Description of Artificial Sequence: Synthetic oligonucleotide
  Target: SCNA; (-) strand; PAM type: YTN; PAM sequence: CTT
ggttttctagtttgtgtacg

SEQ ID NO: 50635 - DNA, 20 bp, Artificial Sequence
  Description of Artificial Sequence: Synthetic oligonucleotide
  Target: SCNA; (-) strand; PAM type: YTN; PAM sequence: TTC
ttggttttctagtttgtgta

SEQ ID NO: 50636 - DNA, 20 bp, Artificial Sequence
  Description of Artificial Sequence: Synthetic oligonucleotide
  Target: SCNA; (-) strand; PAM type: YTN; PAM sequence: CTT
cttggttttctagtttgtgt

SEQ ID NO: 50637 - DNA, 20 bp, Artificial Sequence
  Description of Artificial Sequence: Synthetic oligonucleotide
  Target: SCNA; (-) strand; PAM type: YTN; PAM sequence: CTC
ttcttggttttctagtttgt

SEQ ID NO: 50638 - DNA, 20 bp, Artificial Sequence
  Description of Artificial Sequence: Synthetic oligonucleotide
  Target: SCNA; (-) strand; PAM type: YTN; PAM sequence: TTG
tccatctcttcttggttttc

SEQ ID NO: 50639 - DNA, 20 bp, Artificial Sequence
  Description of Artificial Sequence: Synthetic oligonucleotide
  Target: SCNA; (-) strand; PAM type: YTN; PAM sequence: TTT
gtccatctcttcttggtttt

SEQ ID NO: 50640 - DNA, 20 bp, Artificial Sequence
  Description of Artificial Sequence: Synthetic oligonucleotide
  Target: SCNA; (-) strand; PAM type: YTN; PAM sequence: TTG
tatatatgcaggaatttgtc

SEQ ID NO: 50641 - DNA, 20 bp, Artificial Sequence
  Description of Artificial Sequence: Synthetic oligonucleotide
  Target: SCNA; (-) strand; PAM type: YTN; PAM sequence: TTT
gtatatatgcaggaatttgt

SEQ ID NO: 50642 - DNA, 20 bp, Artificial Sequence
  Description of Artificial Sequence: Synthetic oligonucleotide
  Target: SCNA; (-) strand; PAM type: YTN; PAM sequence: CTA
ggaggtttgtatatatgcag

SEQ ID NO: 50643 - DNA, 20 bp, Artificial Sequence
  Description of Artificial Sequence: Synthetic oligonucleotide
  Target: SCNA; (-) strand; PAM type: YTN; PAM sequence: TTA
atctaggaggtttgtatata

SEQ ID NO: 50644 - DNA, 20 bp, Artificial Sequence
  Description of Artificial Sequence: Synthetic oligonucleotide
  Target: SCNA; (-) strand; PAM type: YTN; PAM sequence: TTT
aatctaggaggtttgtatat

SEQ ID NO: 50645 - DNA, 20 bp, Artificial Sequence
  Description of Artificial Sequence: Synthetic oligonucleotide
  Target: SCNA; (-) strand; PAM type: YTN; PAM sequence: TTT
taatctaggaggtttgtata

SEQ ID NO: 50646 - DNA, 20 bp, Artificial Sequence
  Description of Artificial Sequence: Synthetic oligonucleotide
  Target: SCNA; (-) strand; PAM type: YTN; PAM sequence: CTG
ttttaatctaggaggtttgt

SEQ ID NO: 50647 - DNA, 20 bp, Artificial Sequence
  Description of Artificial Sequence: Synthetic oligonucleotide
  Target: SCNA; (-) strand; PAM type: YTN; PAM sequence: TTC
ctgttttaatctaggaggtt

SEQ ID NO: 50648 - DNA, 20 bp, Artificial Sequence
  Description of Artificial Sequence: Synthetic oligonucleotide
  Target: SCNA; (-) strand; PAM type: YTN; PAM sequence: CTT
cctgttttaatctaggaggt

SEQ ID NO: 50649 - DNA, 20 bp, Artificial Sequence
  Description of Artificial Sequence: Synthetic oligonucleotide
  Target: SCNA; (-) strand; PAM type: YTN; PAM sequence: TTC
ttcctgttttaatctaggag

SEQ ID NO: 50650 - DNA, 20 bp, Artificial Sequence
  Description of Artificial Sequence: Synthetic oligonucleotide
  Target: SCNA; (-) strand; PAM type: YTN; PAM sequence: TTT
cttcctgttttaatctagga

SEQ ID NO: 50651 - DNA, 20 bp, Artificial Sequence
  Description of Artificial Sequence: Synthetic oligonucleotide
  Target: SCNA; (-) strand; PAM type: YTN; PAM sequence: CTA
tttcttcctgttttaatcta

SEQ ID NO: 50652 - DNA, 20 bp, Artificial Sequence
  Description of Artificial Sequence: Synthetic oligonucleotide
  Target: SCNA; (-) strand; PAM type: YTN; PAM sequence: TTC
tatttcttcctgttttaatc

SEQ ID NO: 50653 - DNA, 20 bp, Artificial Sequence
  Description of Artificial Sequence: Synthetic oligonucleotide
  Target: SCNA; (-) strand; PAM type: YTN; PAM sequence: TTT
ctatttcttcctgttttaat

SEQ ID NO: 50654 - DNA, 20 bp, Artificial Sequence
  Description of Artificial Sequence: Synthetic oligonucleotide
  Target: SCNA; (-) strand; PAM type: YTN; PAM sequence: TTA
ataatttctatttcttcctg

SEQ ID NO: 50655 - DNA, 20 bp, Artificial Sequence
  Description of Artificial Sequence: Synthetic oligonucleotide
  Target: SCNA; (-) strand; PAM type: YTN; PAM sequence: CTG
ttaataatttctatttcttc

SEQ ID NO: 50656 - DNA, 20 bp, Artificial Sequence
  Description of Artificial Sequence: Synthetic oligonucleotide
  Target: SCNA; (-) strand; PAM type: YTN; PAM sequence: TTG
gtctgttaataatttctatt

SEQ ID NO: 50657 - DNA, 20 bp, Artificial Sequence
  Description of Artificial Sequence: Synthetic oligonucleotide
  Target: SCNA; (-) strand; PAM type: YTN; PAM sequence: TTA
ttggtctgttaataatttct

SEQ ID NO: 50658 - DNA, 20 bp, Artificial Sequence
  Description of Artificial Sequence: Synthetic oligonucleotide
  Target: SCNA; (-) strand; PAM type: YTN; PAM sequence: CTA
tgcattattggtctgttaat

SEQ ID NO: 50659 - DNA, 20 bp, Artificial Sequence
  Description of Artificial Sequence: Synthetic oligonucleotide
  Target: SCNA; (-) strand; PAM type: YTN; PAM sequence: CTC
actatgcattattggtctgt

SEQ ID NO: 50660 - DNA, 20 bp, Artificial Sequence
  Description of Artificial Sequence: Synthetic oligonucleotide
  Target: SCNA; (-) strand; PAM type: YTN; PAM sequence: CTC
tcactatgcattattggtct

SEQ ID NO: 50661 - DNA, 20 bp, Artificial Sequence
  Description of Artificial Sequence: Synthetic oligonucleotide
  Target: SCNA; (-) strand; PAM type: YTN; PAM sequence: TTC
actctcactatgcattattg

SEQ ID NO: 50662 - DNA, 20 bp, Artificial Sequence
  Description of Artificial Sequence: Synthetic oligonucleotide
  Target: SCNA; (-) strand; PAM type: YTN; PAM sequence: TTT
cactctcactatgcattatt

SEQ ID NO: 50663 - DNA, 20 bp, Artificial Sequence
  Description of Artificial Sequence: Synthetic oligonucleotide
  Target: SCNA; (-) strand; PAM type: YTN; PAM sequence: TTG
tttcactctcactatgcatt

SEQ ID NO: 50664 - DNA, 20 bp, Artificial Sequence
  Description of Artificial Sequence: Synthetic oligonucleotide
  Target: SCNA; (-) strand; PAM type: YTN; PAM sequence: TTA
ttgtttcactctcactatgc

SEQ ID NO: 50665 - DNA, 20 bp, Artificial Sequence
  Description of Artificial Sequence: Synthetic oligonucleotide
  Target: SCNA; (-) strand; PAM type: YTN; PAM sequence: CTA
ttattgtttcactctcacta

SEQ ID NO: 50666 - DNA, 20 bp, Artificial Sequence
  Description of Artificial Sequence: Synthetic oligonucleotide
  Target: SCNA; (-) strand; PAM type: YTN; PAM sequence: TTC
tattattgtttcactctcac

SEQ ID NO: 50667 - DNA, 20 bp, Artificial Sequence
  Description of Artificial Sequence: Synthetic oligonucleotide
  Target: SCNA; (-) strand; PAM type: YTN; PAM sequence: TTT
ctattattgtttcactctca

SEQ ID NO: 50668 - DNA, 20 bp, Artificial Sequence
  Description of Artificial Sequence: Synthetic oligonucleotide
  Target: SCNA; (-) strand; PAM type: YTN; PAM sequence: TTT
tctattattgtttcactctc

SEQ ID NO: 50669 - DNA, 20 bp, Artificial Sequence
  Description of Artificial Sequence: Synthetic oligonucleotide
  Target: SCNA; (-) strand; PAM type: YTN; PAM sequence: TTT
ttctattattgtttcactct

SEQ ID NO: 50670 - DNA, 20 bp, Artificial Sequence
  Description of Artificial Sequence: Synthetic oligonucleotide
  Target: SCNA; (-) strand; PAM type: YTN; PAM sequence: TTT
tttctattattgtttcactc

SEQ ID NO: 50671 - DNA, 20 bp, Artificial Sequence
  Description of Artificial Sequence: Synthetic oligonucleotide
  Target: SCNA; (-) strand; PAM type: YTN; PAM sequence: CTG
acattttttctattattgtt

SEQ ID NO: 50672 - DNA, 20 bp, Artificial Sequence
  Description of Artificial Sequence: Synthetic oligonucleotide
  Target: SCNA; (-) strand; PAM type: YTN; PAM sequence: TTC
ctgacattttttctattatt

SEQ ID NO: 50673 - DNA, 20 bp, Artificial Sequence
  Description of Artificial Sequence: Synthetic oligonucleotide
  Target: SCNA; (-) strand; PAM type: YTN; PAM sequence: TTT
cctgacattttttctattat

SEQ ID NO: 50674 - DNA, 20 bp, Artificial Sequence
  Description of Artificial Sequence: Synthetic oligonucleotide
  Target: SCNA; (-) strand; PAM type: YTN; PAM sequence: TTG
tttcctgacattttttctat

SEQ ID NO: 50675 - DNA, 20 bp, Artificial Sequence
  Description of Artificial Sequence: Synthetic oligonucleotide
  Target: SCNA; (-) strand; PAM type: YTN; PAM sequence: TTT
gtttcctgacattttttcta

SEQ ID NO: 50676 - DNA, 20 bp, Artificial Sequence
  Description of Artificial Sequence: Synthetic oligonucleotide
  Target: SCNA; (-) strand; PAM type: YTN; PAM sequence: TTT
tgtttcctgacattttttct

SEQ ID NO: 50677 - DNA, 20 bp, Artificial Sequence
  Description of Artificial Sequence: Synthetic oligonucleotide
  Target: SCNA; (-) strand; PAM type: YTN; PAM sequence: TTT
ttgtttcctgacattttttc

SEQ ID NO: 50678 - DNA, 20 bp, Artificial Sequence
  Description of Artificial Sequence: Synthetic oligonucleotide
  Target: SCNA; (-) strand; PAM type: YTN; PAM sequence: TTT
tttgtttcctgacatttttt

SEQ ID NO: 50679 - DNA, 20 bp, Artificial Sequence
  Description of Artificial Sequence: Synthetic oligonucleotide
  Target: SCNA; (-) strand; PAM type: YTN; PAM sequence: TTT
ttttgtttcctgacattttt

SEQ ID NO: 50680 - DNA, 20 bp, Artificial Sequence
  Description of Artificial Sequence: Synthetic oligonucleotide
  Target: SCNA; (-) strand; PAM type: YTN; PAM sequence: CTT
tttttgtttcctgacatttt

SEQ ID NO: 50681 - DNA, 20 bp, Artificial Sequence
  Description of Artificial Sequence: Synthetic oligonucleotide
  Target: SCNA; (-) strand; PAM type: YTN; PAM sequence: CTA
gactttttttgtttcctgac

SEQ ID NO: 50682 - DNA, 20 bp, Artificial Sequence
  Description of Artificial Sequence: Synthetic oligonucleotide
  Target: SCNA; (-) strand; PAM type: YTN; PAM sequence: CTG
gtcctagactttttttgttt

SEQ ID NO: 50683 - DNA, 20 bp, Artificial Sequence
  Description of Artificial Sequence: Synthetic oligonucleotide
  Target: SCNA; (-) strand; PAM type: YTN; PAM sequence: CTG
tgaatccatctggtcctaga

SEQ ID NO: 50684 - DNA, 20 bp, Artificial Sequence
  Description of Artificial Sequence: Synthetic oligonucleotide
  Target: SCNA; (-) strand; PAM type: YTN; PAM sequence: TTC
acctgtgaatccatctggtc

SEQ ID NO: 50685 - DNA, 20 bp, Artificial Sequence
  Description of Artificial Sequence: Synthetic oligonucleotide
  Target: SCNA; (-) strand; PAM type: YTN; PAM sequence: CTG
atagcattcacctgtgaatc

SEQ ID NO: 50686 - DNA, 20 bp, Artificial Sequence
  Description of Artificial Sequence: Synthetic oligonucleotide
  Target: SCNA; (-) strand; PAM type: YTN; PAM sequence: TTC
tgatagcattcacctgtgaa

SEQ ID NO: 50687 - DNA, 20 bp, Artificial Sequence
  Description of Artificial Sequence: Synthetic oligonucleotide
  Target: SCNA; (-) strand; PAM type: YTN; PAM sequence: TTT
ctgatagcattcacctgtga

SEQ ID NO: 50688 - DNA, 20 bp, Artificial Sequence
  Description of Artificial Sequence: Synthetic oligonucleotide
  Target: SCNA; (-) strand; PAM type: YTN; PAM sequence: TTG
aatttctgatagcattcacc

SEQ ID NO: 50689 - DNA, 20 bp, Artificial Sequence
  Description of Artificial Sequence: Synthetic oligonucleotide
  Target: SCNA; (-) strand; PAM type: YTN; PAM sequence: TTT
gaatttctgatagcattcac

SEQ ID NO: 50690 - DNA, 20 bp, Artificial Sequence
  Description of Artificial Sequence: Synthetic oligonucleotide
  Target: SCNA; (-) strand; PAM type: YTN; PAM sequence: CTT
tgaatttctgatagcattca

SEQ ID NO: 50691 - DNA, 20 bp, Artificial Sequence
  Description of Artificial Sequence: Synthetic oligonucleotide
  Target: SCNA; (-) strand; PAM type: YTN; PAM sequence: TTC
tttgaatttctgatagcatt

SEQ ID NO: 50692 - DNA, 20 bp, Artificial Sequence
  Description of Artificial Sequence: Synthetic oligonucleotide
  Target: SCNA; (-) strand; PAM type: YTN; PAM sequence: TTT
ctttgaatttctgatagcat

SEQ ID NO: 50693 - DNA, 20 bp, Artificial Sequence
  Description of Artificial Sequence: Synthetic oligonucleotide
  Target: SCNA; (-) strand; PAM type: YTN; PAM sequence: TTT
tctttgaatttctgatagca

SEQ ID NO: 50694 - DNA, 20 bp, Artificial Sequence
  Description of Artificial Sequence: Synthetic oligonucleotide
  Target: SCNA; (-) strand; PAM type: YTN; PAM sequence: TTT
ttctttgaatttctgatagc

SEQ ID NO: 50695 - DNA, 20 bp, Artificial Sequence
  Description of Artificial Sequence: Synthetic oligonucleotide
  Target: SCNA; (-) strand; PAM type: YTN; PAM sequence: TTG
taccaatttttctttgaatt

SEQ ID NO: 50696 - DNA, 20 bp, Artificial Sequence
  Description of Artificial Sequence: Synthetic oligonucleotide
  Target: SCNA; (-) strand; PAM type: YTN; PAM sequence: TTT
gtaccaatttttctttgaat

SEQ ID NO: 50697 - DNA, 20 bp, Artificial Sequence
  Description of Artificial Sequence: Synthetic oligonucleotide
  Target: SCNA; (-) strand; PAM type: YTN; PAM sequence: TTC
aatagaatttgtaccaattt

SEQ ID NO: 50698 - DNA, 20 bp, Artificial Sequence
  Description of Artificial Sequence: Synthetic oligonucleotide
  Target: SCNA; (-) strand; PAM type: YTN; PAM sequence: TTT
caatagaatttgtaccaatt

SEQ ID NO: 50699 - DNA, 20 bp, Artificial Sequence
  Description of Artificial Sequence: Synthetic oligonucleotide
  Target: SCNA; (-) strand; PAM type: YTN; PAM sequence: TTG
gaacagtttcaatagaattt

SEQ ID NO: 50700 - DNA, 20 bp, Artificial Sequence
  Description of Artificial Sequence: Synthetic oligonucleotide
  Target: SCNA; (-) strand; PAM type: YTN; PAM sequence: TTT
ggaacagtttcaatagaatt

SEQ ID NO: 50701 - DNA, 20 bp, Artificial Sequence
  Description of Artificial Sequence: Synthetic oligonucleotide
  Target: SCNA; (-) strand; PAM type: YTN; PAM sequence: TTT
tggaacagtttcaatagaat

SEQ ID NO: 50702 - DNA, 20 bp, Artificial Sequence
  Description of Artificial Sequence: Synthetic oligonucleotide
  Target: SCNA; (-) strand; PAM type: YTN; PAM sequence: CTT
ttggaacagtttcaatagaa

SEQ ID NO: 50703 - DNA, 20 bp, Artificial Sequence
  Description of Artificial Sequence: Synthetic oligonucleotide
  Target: SCNA; (-) strand; PAM type: YTN; PAM sequence: CTA
tcttttggaacagtttcaat

SEQ ID NO: 50704 - DNA, 20 bp, Artificial Sequence
  Description of Artificial Sequence: Synthetic oligonucleotide
  Target: SCNA; (-) strand; PAM type: YTN; PAM sequence: CTC
tatcttttggaacagtttca

SEQ ID NO: 50705 - DNA, 20 bp, Artificial Sequence
  Description of Artificial Sequence: Synthetic oligonucleotide
  Target: SCNA; (-) strand; PAM type: YTN; PAM sequence: CTG
tctctatcttttggaacagt

SEQ ID NO: 50706 - DNA, 20 bp, Artificial Sequence
  Description of Artificial Sequence: Synthetic oligonucleotide
  Target: SCNA; (-) strand; PAM type: YTN; PAM sequence: CTC
tgtctctatcttttggaaca

SEQ ID NO: 50707 - DNA, 20 bp, Artificial Sequence
  Description of Artificial Sequence: Synthetic oligonucleotide
  Target: SCNA; (-) strand; PAM type: YTN; PAM sequence: TTC
cctctgtctctatcttttgg

SEQ ID NO: 50708 - DNA, 20 bp, Artificial Sequence
  Description of Artificial Sequence: Synthetic oligonucleotide
  Target: SCNA; (-) strand; PAM type: YTN; PAM sequence: TTA
gggaggattccctctgtctc

SEQ ID NO: 50709 - DNA, 20 bp, Artificial Sequence
  Description of Artificial Sequence: Synthetic oligonucleotide
  Target: SCNA; (-) strand; PAM type: YTN; PAM sequence: TTT
agggaggattccctctgtct

SEQ ID NO: 50710 - DNA, 20 bp, Artificial Sequence
  Description of Artificial Sequence: Synthetic oligonucleotide
  Target: SCNA; (-) strand; PAM type: YTN; PAM sequence: TTC
atagaatgatttagggagga

SEQ ID NO: 50711 - DNA, 20 bp, Artificial Sequence
  Description of Artificial Sequence: Synthetic oligonucleotide
  Target: SCNA; (-) strand; PAM type: YTN; PAM sequence: CTT
catagaatgatttagggagg

SEQ ID NO: 50712 - DNA, 20 bp, Artificial Sequence
  Description of Artificial Sequence: Synthetic oligonucleotide
  Target: SCNA; (-) strand; PAM type: YTN; PAM sequence: CTG
gcttcatagaatgatttagg

SEQ ID NO: 50713 - DNA, 20 bp, Artificial Sequence
  Description of Artificial Sequence: Synthetic oligonucleotide
  Target: SCNA; (-) strand; PAM type: YTN; PAM sequence: TTA
gggtaatactggcttcatag

SEQ ID NO: 50714 - DNA, 20 bp, Artificial Sequence
  Description of Artificial Sequence: Synthetic oligonucleotide
  Target: SCNA; (-) strand; PAM type: YTN; PAM sequence: TTG
atattagggtaatactggct

SEQ ID NO: 50715 - DNA, 20 bp, Artificial Sequence
  Description of Artificial Sequence: Synthetic oligonucleotide
  Target: SCNA; (-) strand; PAM type: YTN; PAM sequence: TTT
gatattagggtaatactggc

SEQ ID NO: 50716 - DNA, 20 bp, Artificial Sequence
  Description of Artificial Sequence: Synthetic oligonucleotide
  Target: SCNA; (-) strand; PAM type: YTN; PAM sequence: TTT
tgatattagggtaatactgg

SEQ ID NO: 50717 - DNA, 20 bp, Artificial Sequence
  Description of Artificial Sequence: Synthetic oligonucleotide
  Target: SCNA; (-) strand; PAM type: YTN; PAM sequence: CTG
gttttgatattagggtaata

SEQ ID NO: 50718 - DNA, 20 bp, Artificial Sequence
  Description of Artificial Sequence: Synthetic oligonucleotide
  Target: SCNA; (-) strand; PAM type: YTN; PAM sequence: TTC
tggttttgatattagggtaa

SEQ ID NO: 50719 - DNA, 20 bp, Artificial Sequence
  Description of Artificial Sequence: Synthetic oligonucleotide
  Target: SCNA; (-) strand; PAM type: YTN; PAM sequence: TTT
ctggttttgatattagggta

SEQ ID NO: 50720 - DNA, 20 bp, Artificial Sequence
  Description of Artificial Sequence: Synthetic oligonucleotide
  Target: SCNA; (-) strand; PAM type: YTN; PAM sequence: TTT
tctggttttgatattagggt

SEQ ID NO: 50721 - DNA, 20 bp, Artificial Sequence
  Description of Artificial Sequence: Synthetic oligonucleotide
  Target: SCNA; (-) strand; PAM type: YTN; PAM sequence: CTT
ttctggttttgatattaggg

SEQ ID NO: 50722 - DNA, 20 bp, Artificial Sequence
  Description of Artificial Sequence: Synthetic oligonucleotide
  Target: SCNA; (-) strand; PAM type: YTN; PAM sequence: TTA
tgtccttttctggttttgat

SEQ ID NO: 50723 - DNA, 20 bp, Artificial Sequence
  Description of Artificial Sequence: Synthetic oligonucleotide
  Target: SCNA; (-) strand; PAM type: YTN; PAM sequence: TTG
ttatgtccttttctggtttt

SEQ ID NO: 50724 - DNA, 20 bp, Artificial Sequence
  Description of Artificial Sequence: Synthetic oligonucleotide
  Target: SCNA; (-) strand; PAM type: YTN; PAM sequence: TTT
gttatgtccttttctggttt

SEQ ID NO: 50725 - DNA, 20 bp, Artificial Sequence
  Description of Artificial Sequence: Synthetic oligonucleotide
  Target: SCNA; (-) strand; PAM type: YTN; PAM sequence: TTT
tgttatgtccttttctggtt

SEQ ID NO: 50726 - DNA, 20 bp, Artificial Sequence
  Description of Artificial Sequence: Synthetic oligonucleotide
  Target: SCNA; (-) strand; PAM type: YTN; PAM sequence: TTT
ttgttatgtccttttctggt

SEQ ID NO: 50727 - DNA, 20 bp, Artificial Sequence
  Description of Artificial Sequence: Synthetic oligonucleotide
  Target: SCNA; (-) strand; PAM type: YTN; PAM sequence: TTT
tttgttatgtccttttctgg

SEQ ID NO: 50728 - DNA, 20 bp, Artificial Sequence
  Description of Artificial Sequence: Synthetic oligonucleotide
  Target: SCNA; (-) strand; PAM type: YTN; PAM sequence: TTT
ttttgttatgtccttttctg

SEQ ID NO: 50729 - DNA, 20 bp, Artificial Sequence
  Description of Artificial Sequence: Synthetic oligonucleotide
  Target: SCNA; (-) strand; PAM type: YTN; PAM sequence: CTT
tttttgttatgtccttttct

SEQ ID NO: 50730 - DNA, 20 bp, Artificial Sequence
  Description of Artificial Sequence: Synthetic oligonucleotide
  Target: SCNA; (-) strand; PAM type: YTN; PAM sequence: TTC
tttttttgttatgtcctttt

SEQ ID NO: 50731 - DNA, 20 bp, Artificial Sequence
  Description of Artificial Sequence: Synthetic oligonucleotide
  Target: SCNA; (-) strand; PAM type: YTN; PAM sequence: TTT
ctttttttgttatgtccttt

SEQ ID NO: 50732 - DNA, 20 bp, Artificial Sequence
  Description of Artificial Sequence: Synthetic oligonucleotide
  Target: SCNA; (-) strand; PAM type: YTN; PAM sequence: TTT
tctttttttgttatgtcctt

SEQ ID NO: 50733 - DNA, 20 bp, Artificial Sequence
  Description of Artificial Sequence: Synthetic oligonucleotide
  Target: SCNA; (-) strand; PAM type: YTN; PAM sequence: CTG
tagttttctttttttgttat

SEQ ID NO: 50734 - DNA, 20 bp, Artificial Sequence
  Description of Artificial Sequence: Synthetic oligonucleotide
  Target: SCNA; (-) strand; PAM type: YTN; PAM sequence: TTG
gtctgtagttttcttttttt

SEQ ID NO: 50735 - DNA, 20 bp, Artificial Sequence
  Description of Artificial Sequence: Synthetic oligonucleotide
  Target: SCNA; (-) strand; PAM type: YTN; PAM sequence: TTC
atcagggatattggtctgta

SEQ ID NO: 50736 - DNA, 20 bp, Artificial Sequence
  Description of Artificial Sequence: Synthetic oligonucleotide
  Target: SCNA; (-) strand; PAM type: YTN; PAM sequence: CTG
ttcatcagggatattggtct

SEQ ID NO: 50737 - DNA, 20 bp, Artificial Sequence
  Description of Artificial Sequence: Synthetic oligonucleotide
  Target: SCNA; (-) strand; PAM type: YTN; PAM sequence: CTC
tgttcatcagggatattggt

SEQ ID NO: 50738 - DNA, 20 bp, Artificial Sequence
  Description of Artificial Sequence: Synthetic oligonucleotide
  Target: SCNA; (-) strand; PAM type: YTN; PAM sequence: TTA
catctctgttcatcagggat

SEQ ID NO: 50739 - DNA, 20 bp, Artificial Sequence
  Description of Artificial Sequence: Synthetic oligonucleotide
  Target: SCNA; (-) strand; PAM type: YTN; PAM sequence: TTT
acatctctgttcatcaggga

SEQ ID NO: 50740 - DNA, 20 bp, Artificial Sequence
  Description of Artificial Sequence: Synthetic oligonucleotide
  Target: SCNA; (-) strand; PAM type: YTN; PAM sequence: TTT
tacatctctgttcatcaggg

SEQ ID NO: 50741 - DNA, 20 bp, Artificial Sequence
  Description of Artificial Sequence: Synthetic oligonucleotide
  Target: SCNA; (-) strand; PAM type: YTN; PAM sequence: TTT
ttacatctctgttcatcagg

SEQ ID NO: 50742 - DNA, 20 bp, Artificial Sequence
  Description of Artificial Sequence: Synthetic oligonucleotide
  Target: SCNA; (-) strand; PAM type: YTN; PAM sequence: TTG
aggatttttacatctctgtt

SEQ ID NO: 50743 - DNA, 20 bp, Artificial Sequence
  Description of Artificial Sequence: Synthetic oligonucleotide
  Target: SCNA; (-) strand; PAM type: YTN; PAM sequence: TTA
ttgaggatttttacatctct

SEQ ID NO: 50744 - DNA, 20 bp, Artificial Sequence
  Description of Artificial Sequence: Synthetic oligonucleotide
  Target: SCNA; (-) strand; PAM type: YTN; PAM sequence: TTT
attgaggatttttacatctc

SEQ ID NO: 50745 - DNA, 20 bp, Artificial Sequence
  Description of Artificial Sequence: Synthetic oligonucleotide
  Target: SCNA; (-) strand; PAM type: YTN; PAM sequence: TTT
tattgaggatttttacatct

SEQ ID NO: 50746 - DNA, 20 bp, Artificial Sequence
  Description of Artificial Sequence: Synthetic oligonucleotide
  Target: SCNA; (-) strand; PAM type: YTN; PAM sequence: CTA
gtattttattgaggattttt

SEQ ID NO: 50747 - DNA, 20 bp, Artificial Sequence
  Description of Artificial Sequence: Synthetic oligonucleotide
  Target: SCNA; (-) strand; PAM type: YTN; PAM sequence: TTA
gctagtattttattgaggat

SEQ ID NO: 50748 - DNA, 20 bp, Artificial Sequence
  Description of Artificial Sequence: Synthetic oligonucleotide
  Target: SCNA; (-) strand; PAM type: YTN; PAM sequence: TTT
agctagtattttattgagga

SEQ ID NO: 50749 - DNA, 20 bp, Artificial Sequence
  Description of Artificial Sequence: Synthetic oligonucleotide
  Target: SCNA; (-) strand; PAM type: YTN; PAM sequence: TTC
atttagctagtattttattg

SEQ ID NO: 50750 - DNA, 20 bp, Artificial Sequence
  Description of Artificial Sequence: Synthetic oligonucleotide
  Target: SCNA; (-) strand; PAM type: YTN; PAM sequence: CTG
gattcatttagctagtattt

SEQ ID NO: 50751 - DNA, 20 bp, Artificial Sequence
  Description of Artificial Sequence: Synthetic oligonucleotide
  Target: SCNA; (-) strand; PAM type: YTN; PAM sequence: CTG
ctggattcatttagctagta

SEQ ID NO: 50752 - DNA, 20 bp, Artificial Sequence
  Description of Artificial Sequence: Synthetic oligonucleotide
  Target: SCNA; (-) strand; PAM type: YTN; PAM sequence: TTG
atatgctgctggattcattt

SEQ ID NO: 50753 - DNA, 20 bp, Artificial Sequence
  Description of Artificial Sequence: Synthetic oligonucleotide
  Target: SCNA; (-) strand; PAM type: YTN; PAM sequence: TTT
gatatgctgctggattcatt

SEQ ID NO: 50754 - DNA, 20 bp, Artificial Sequence
  Description of Artificial Sequence: Synthetic oligonucleotide
  Target: SCNA; (-) strand; PAM type: YTN; PAM sequence: TTT
tgatatgctgctggattcat

SEQ ID NO: 50755 - DNA, 20 bp, Artificial Sequence
  Description of Artificial Sequence: Synthetic oligonucleotide
  Target: SCNA; (-) strand; PAM type: YTN; PAM sequence: TTT
ttgatatgctgctggattca

SEQ ID NO: 50756 - DNA, 20 bp, Artificial Sequence
  Description of Artificial Sequence: Synthetic oligonucleotide
  Target: SCNA; (-) strand; PAM type: YTN; PAM sequence: CTT
tttgatatgctgctggattc

SEQ ID NO: 50757 - DNA, 20 bp, Artificial Sequence
  Description of Artificial Sequence: Synthetic oligonucleotide
  Target: SCNA; (-) strand; PAM type: YTN; PAM sequence: TTA
tctttttgatatgctgctgg

SEQ ID NO: 50758 - DNA, 20 bp, Artificial Sequence
  Description of Artificial Sequence: Synthetic oligonucleotide
  Target: SCNA; (-) strand; PAM type: YTN; PAM sequence: CTG
atcatggtggattatctttt

SEQ ID NO: 50759 - DNA, 20 bp, Artificial Sequence
  Description of Artificial Sequence: Synthetic oligonucleotide
  Target: SCNA; (-) strand; PAM type: YTN; PAM sequence: CTG
catccccggtatgaaaccca

SEQ ID NO: 50760 - DNA, 20 bp, Artificial Sequence
  Description of Artificial Sequence: Synthetic oligonucleotide
  Target: SCNA; (-) strand; PAM type: YTN; PAM sequence: TTA
aagcaaccctgcatccccgg

SEQ ID NO: 50761 - DNA, 20 bp, Artificial Sequence
  Description of Artificial Sequence: Synthetic oligonucleotide
  Target: SCNA; (-) strand; PAM type: YTN; PAM sequence: TTG
catatgttaaagcaaccctg

SEQ ID NO: 50762 - DNA, 20 bp, Artificial Sequence
  Description of Artificial Sequence: Synthetic oligonucleotide
  Target: SCNA; (-) strand; PAM type: YTN; PAM sequence: CTT
gcatatgttaaagcaaccct

SEQ ID NO: 50763 - DNA, 20 bp, Artificial Sequence
  Description of Artificial Sequence: Synthetic oligonucleotide
  Target: SCNA; (-) strand; PAM type: YTN; PAM sequence: TTG
acttgcatatgttaaagcaa

SEQ ID NO: 50764 - DNA, 20 bp, Artificial Sequence
  Description of Artificial Sequence: Synthetic oligonucleotide
  Target: SCNA; (-) strand; PAM type: YTN; PAM sequence: TTA
ttgacttgcatatgttaaag

SEQ ID NO: 50765 - DNA, 20 bp, Artificial Sequence
  Description of Artificial Sequence: Synthetic oligonucleotide
  Target: SCNA; (-) strand; PAM type: YTN; PAM sequence: TTT
attgacttgcatatgttaaa

SEQ ID NO: 50766 - DNA, 20 bp, Artificial Sequence
  Description of Artificial Sequence: Synthetic oligonucleotide
  Target: SCNA; (-) strand; PAM type: YTN; PAM sequence: TTA
tatggtgtatcacatttatt

SEQ ID NO: 50767 - DNA, 20 bp, Artificial Sequence
  Description of Artificial Sequence: Synthetic oligonucleotide
  Target: SCNA; (-) strand; PAM type: YTN; PAM sequence: CTT
atatggtgtatcacatttat

SEQ ID NO: 50768 - DNA, 20 bp, Artificial Sequence
  Description of Artificial Sequence: Synthetic oligonucleotide
  Target: SCNA; (-) strand; PAM type: YTN; PAM sequence: CTG
cttatatggtgtatcacatt

SEQ ID NO: 50769 - DNA, 20 bp, Artificial Sequence
  Description of Artificial Sequence: Synthetic oligonucleotide
  Target: SCNA; (-) strand; PAM type: YTN; PAM sequence: CTC
ctgcttatatggtgtatcac

SEQ ID NO: 50770 - DNA, 20 bp, Artificial Sequence
  Description of Artificial Sequence: Synthetic oligonucleotide
  Target: SCNA; (-) strand; PAM type: YTN; PAM sequence: TTA
ctcctgcttatatggtgtat

SEQ ID NO: 50771 - DNA, 20 bp, Artificial Sequence
  Description of Artificial Sequence: Synthetic oligonucleotide
  Target: SCNA; (-) strand; PAM type: YTN; PAM sequence: TTT
actcctgcttatatggtgta

SEQ ID NO: 50772 - DNA, 20 bp, Artificial Sequence
  Description of Artificial Sequence: Synthetic oligonucleotide
  Target: SCNA; (-) strand; PAM type: YTN; PAM sequence: TTT
tactcctgcttatatggtgt

SEQ ID NO: 50773 - DNA, 20 bp, Artificial Sequence
  Description of Artificial Sequence: Synthetic oligonucleotide
  Target: SCNA; (-) strand; PAM type: YTN; PAM sequence: TTT
ttactcctgcttatatggtg

SEQ ID NO: 50774 - DNA, 20 bp, Artificial Sequence
  Description of Artificial Sequence: Synthetic oligonucleotide
  Target: SCNA; (-) strand; PAM type: YTN; PAM sequence: TTG
tttttactcctgcttatatg

SEQ ID NO: 50775 - DNA, 20 bp, Artificial Sequence
  Description of Artificial Sequence: Synthetic oligonucleotide
  Target: SCNA; (-) strand; PAM type: YTN; PAM sequence: TTT
gtttttactcctgcttatat

SEQ ID NO: 50776 - DNA, 20 bp, Artificial Sequence
  Description of Artificial Sequence: Synthetic oligonucleotide
  Target: SCNA; (-) strand; PAM type: YTN; PAM sequence: TTT
tgtttttactcctgcttata

SEQ ID NO: 50777 - DNA, 20 bp, Artificial Sequence
  Description of Artificial Sequence: Synthetic oligonucleotide
  Target: SCNA; (-) strand; PAM type: YTN; PAM sequence: TTT
ttgtttttactcctgcttat

SEQ ID NO: 50778 - DNA, 20 bp, Artificial Sequence
  Description of Artificial Sequence: Synthetic oligonucleotide
  Target: SCNA; (-) strand; PAM type: YTN; PAM sequence: TTA
tcatatgatttttgttttta

SEQ ID NO: 50779 - DNA, 20 bp, Artificial Sequence
  Description of Artificial Sequence: Synthetic oligonucleotide
  Target: SCNA; (-) strand; PAM type: YTN; PAM sequence: TTT
atcatatgatttttgttttt

SEQ ID NO: 50780 - DNA, 20 bp, Artificial Sequence
  Description of Artificial Sequence: Synthetic oligonucleotide
  Target: SCNA; (-) strand; PAM type: YTN; PAM sequence: TTG
agtttatcatatgatttttg

SEQ ID NO: 50781 - DNA, 20 bp, Artificial Sequence
  Description of Artificial Sequence: Synthetic oligonucleotide
  Target: SCNA; (-) strand; PAM type: YTN; PAM sequence: CTA
ttgagtttatcatatgattt

SEQ ID NO: 50782 - DNA, 20 bp, Artificial Sequence
  Description of Artificial Sequence: Synthetic oligonucleotide
  Target: SCNA; (-) strand; PAM type: YTN; PAM sequence: CTG
catctattgagtttatcata

SEQ ID NO: 50783 - DNA, 20 bp, Artificial Sequence
  Description of Artificial Sequence: Synthetic oligonucleotide
  Target: SCNA; (-) strand; PAM type: YTN; PAM sequence: TTC
tgcatctattgagtttatca

SEQ ID NO: 50784 - DNA, 20 bp, Artificial Sequence
  Description of Artificial Sequence: Synthetic oligonucleotide
  Target: SCNA; (-) strand; PAM type: YTN; PAM sequence: TTT
ctgcatctattgagtttatc

SEQ ID NO: 50785 - DNA, 20 bp, Artificial Sequence
  Description of Artificial Sequence: Synthetic oligonucleotide
  Target: SCNA; (-) strand; PAM type: YTN; PAM sequence: TTT
tctgcatctattgagtttat

SEQ ID NO: 50786 - DNA, 20 bp, Artificial Sequence
  Description of Artificial Sequence: Synthetic oligonucleotide
  Target: SCNA; (-) strand; PAM type: YTN; PAM sequence: TTT
ttctgcatctattgagttta

SEQ ID NO: 50787 - DNA, 20 bp, Artificial Sequence
  Description of Artificial Sequence: Synthetic oligonucleotide
  Target: SCNA; (-) strand; PAM type: YTN; PAM sequence: CTT
tttctgcatctattgagttt

SEQ ID NO: 50788 - DNA, 20 bp, Artificial Sequence
  Description of Artificial Sequence: Synthetic oligonucleotide
  Target: SCNA; (-) strand; PAM type: YTN; PAM sequence: TTG
tcaaatgctttttctgcatc

SEQ ID NO: 50789 - DNA, 20 bp, Artificial Sequence
  Description of Artificial Sequence: Synthetic oligonucleotide
  Target: SCNA; (-) strand; PAM type: YTN; PAM sequence: TTT
gtcaaatgctttttctgcat

SEQ ID NO: 50790 - DNA, 20 bp, Artificial Sequence
  Description of Artificial Sequence: Synthetic oligonucleotide
  Target: SCNA; (-) strand; PAM type: YTN; PAM sequence: TTT
tgtcaaatgctttttctgca

SEQ ID NO: 50791 - DNA, 20 bp, Artificial Sequence
  Description of Artificial Sequence: Synthetic oligonucleotide
  Target: SCNA; (-) strand; PAM type: YTN; PAM sequence: CTG
aattttgtcaaatgcttttt

SEQ ID NO: 50792 - DNA, 20 bp, Artificial Sequence
  Description of Artificial Sequence: Synthetic oligonucleotide
  Target: SCNA; (-) strand; PAM type: YTN; PAM sequence: TTA
atcataaagcaatactgaat

SEQ ID NO: 50793 - DNA, 20 bp, Artificial Sequence
  Description of Artificial Sequence: Synthetic oligonucleotide
  Target: SCNA; (-) strand; PAM type: YTN; PAM sequence: TTT
aatcataaagcaatactgaa

SEQ ID NO: 50794 - DNA, 20 bp, Artificial Sequence
  Description of Artificial Sequence: Synthetic oligonucleotide
  Target: SCNA; (-) strand; PAM type: YTN; PAM sequence: TTT
taatcataaagcaatactga

SEQ ID NO: 50795 - DNA, 20 bp, Artificial Sequence
  Description of Artificial Sequence: Synthetic oligonucleotide
  Target: SCNA; (-) strand; PAM type: YTN; PAM sequence: CTG
agggttttaatcataaagca

SEQ ID NO: 50796 - DNA, 20 bp, Artificial Sequence
  Description of Artificial Sequence: Synthetic oligonucleotide
  Target: SCNA; (-) strand; PAM type: YTN; PAM sequence: TTG
ctgagggttttaatcataaa

SEQ ID NO: 50797 - DNA, 20 bp, Artificial Sequence
  Description of Artificial Sequence: Synthetic oligonucleotide
  Target: SCNA; (-) strand; PAM type: YTN; PAM sequence: TTT
gctgagggttttaatcataa

SEQ ID NO: 50798 - DNA, 20 bp, Artificial Sequence
  Description of Artificial Sequence: Synthetic oligonucleotide
  Target: SCNA; (-) strand; PAM type: YTN; PAM sequence: TTT
tgctgagggttttaatcata

SEQ ID NO: 50799 - DNA, 20 bp, Artificial Sequence
  Description of Artificial Sequence: Synthetic oligonucleotide
  Target: SCNA; (-) strand; PAM type: YTN; PAM sequence: TTA
tatgccagttttgctgaggg

SEQ ID NO: 50800 - DNA, 20 bp, Artificial Sequence
  Description of Artificial Sequence: Synthetic oligonucleotide
  Target: SCNA; (-) strand; PAM type: YTN; PAM sequence: CTT
atatgccagttttgctgagg

SEQ ID NO: 50801 - DNA, 20 bp, Artificial Sequence
  Description of Artificial Sequence: Synthetic oligonucleotide
  Target: SCNA; (-) strand; PAM type: YTN; PAM sequence: TTA
aggtgtgtatcttatatgcc

SEQ ID NO: 50802 - DNA, 20 bp, Artificial Sequence
  Description of Artificial Sequence: Synthetic oligonucleotide
  Target: SCNA; (-) strand; PAM type: YTN; PAM sequence: CTT
aaggtgtgtatcttatatgc

SEQ ID NO: 50803 - DNA, 20 bp, Artificial Sequence
  Description of Artificial Sequence: Synthetic oligonucleotide
  Target: SCNA; (-) strand; PAM type: YTN; PAM sequence: TTA
ccttaaggtgtgtatcttat

SEQ ID NO: 50804 - DNA, 20 bp, Artificial Sequence
  Description of Artificial Sequence: Synthetic oligonucleotide
  Target: SCNA; (-) strand; PAM type: YTN; PAM sequence: TTA
ttaccttaaggtgtgtatct

SEQ ID NO: 50805 - DNA, 20 bp, Artificial Sequence
  Description of Artificial Sequence: Synthetic oligonucleotide
  Target: SCNA; (-) strand; PAM type: YTN; PAM sequence: TTT
attaccttaaggtgtgtatc

SEQ ID NO: 50806 - DNA, 20 bp, Artificial Sequence
  Description of Artificial Sequence: Synthetic oligonucleotide
  Target: SCNA; (-) strand; PAM type: YTN; PAM sequence: TTT
tattaccttaaggtgtgtat

SEQ ID NO: 50807 - DNA, 20 bp, Artificial Sequence
  Description of Artificial Sequence: Synthetic oligonucleotide
  Target: SCNA; (-) strand; PAM type: YTN; PAM sequence: CTT
ttattaccttaaggtgtgta

SEQ ID NO: 50808 - DNA, 20 bp, Artificial Sequence
  Description of Artificial Sequence: Synthetic oligonucleotide
  Target: SCNA; (-) strand; PAM type: YTN; PAM sequence: TTG
tcataagtggcttttattac

SEQ ID NO: 50809 - DNA, 20 bp, Artificial Sequence
  Description of Artificial Sequence: Synthetic oligonucleotide
  Target: SCNA; (-) strand; PAM type: YTN; PAM sequence: TTT
gtcataagtggcttttatta

SEQ ID NO: 50810 - DNA, 20 bp, Artificial Sequence
  Description of Artificial Sequence: Synthetic oligonucleotide
  Target: SCNA; (-) strand; PAM type: YTN; PAM sequence: CTG
tgggtttgtcataagtggct

SEQ ID NO: 50811 - DNA, 20 bp, Artificial Sequence
  Description of Artificial Sequence: Synthetic oligonucleotide
  Target: SCNA; (-) strand; PAM type: YTN; PAM sequence: TTG
gctgtgggtttgtcataagt

SEQ ID NO: 50812 - DNA, 20 bp, Artificial Sequence
  Description of Artificial Sequence: Synthetic oligonucleotide
  Target: SCNA; (-) strand; PAM type: YTN; PAM sequence: TTC
aatataatgttggctgtggg

SEQ ID NO: 50813 - DNA, 20 bp, Artificial Sequence
  Description of Artificial Sequence: Synthetic oligonucleotide
  Target: SCNA; (-) strand; PAM type: YTN; PAM sequence: TTC
ccccgttcaatataatgttg

SEQ ID NO: 50814 - DNA, 20 bp, Artificial Sequence
  Description of Artificial Sequence: Synthetic oligonucleotide
  Target: SCNA; (-) strand; PAM type: YTN; PAM sequence: TTT
cccccgttcaatataatgtt

SEQ ID NO: 50815 - DNA, 20 bp, Artificial Sequence
  Description of Artificial Sequence: Synthetic oligonucleotide
  Target: SCNA; (-) strand; PAM type: YTN; PAM sequence: TTT
tcccccgttcaatataatgt

SEQ ID NO: 50816 - DNA, 20 bp, Artificial Sequence
  Description of Artificial Sequence: Synthetic oligonucleotide
  Target: SCNA; (-) strand; PAM type: YTN; PAM sequence: TTC
aaattttcccccgttcaata

SEQ ID NO: 50817 - DNA, 20 bp, Artificial Sequence
  Description of Artificial Sequence: Synthetic oligonucleotide
  Target: SCNA; (-) strand; PAM type: YTN; PAM sequence: TTT
caaattttcccccgttcaat

SEQ ID NO: 50818 - DNA, 20 bp, Artificial Sequence
  Description of Artificial Sequence: Synthetic oligonucleotide
  Target: SCNA; (-) strand; PAM type: YTN; PAM sequence: CTT
tcaaattttcccccgttcaa

SEQ ID NO: 50819 - DNA, 20 bp, Artificial Sequence
  Description of Artificial Sequence: Synthetic oligonucleotide
  Target: SCNA; (-) strand; PAM type: YTN; PAM sequence: CTC
gggggaaatgctttcaaatt

SEQ ID NO: 50820 - DNA, 20 bp, Artificial Sequence
  Description of Artificial Sequence: Synthetic oligonucleotide
  Target: SCNA; (-) strand; PAM type: YTN; PAM sequence: TTC
tcgggggaaatgctttcaaa

SEQ ID NO: 50821 - DNA, 20 bp, Artificial Sequence
  Description of Artificial Sequence: Synthetic oligonucleotide
  Target: SCNA; (-) strand; PAM type: YTN; PAM sequence: TTC
cagttctcgggggaaatgct

SEQ ID NO: 50822 - DNA, 20 bp, Artificial Sequence
  Description of Artificial Sequence: Synthetic oligonucleotide
  Target: SCNA; (-) strand; PAM type: YTN; PAM sequence: TTA
ttccagttctcgggggaaat

SEQ ID NO: 50823 - DNA, 20 bp, Artificial Sequence
  Description of Artificial Sequence: Synthetic oligonucleotide
  Target: SCNA; (-) strand; PAM type: YTN; PAM sequence: CTT
attccagttctcgggggaaa

SEQ ID NO: 50824 - DNA, 20 bp, Artificial Sequence
  Description of Artificial Sequence: Synthetic oligonucleotide
  Target: SCNA; (-) strand; PAM type: YTN; PAM sequence: TTG
tcttattccagttctcgggg

SEQ ID NO: 50825 - DNA, 20 bp, Artificial Sequence
  Description of Artificial Sequence: Synthetic oligonucleotide
  Target: SCNA; (-) strand; PAM type: YTN; PAM sequence: CTT
gtcttattccagttctcggg

SEQ ID NO: 50826 - DNA, 20 bp, Artificial Sequence
  Description of Artificial Sequence: Synthetic oligonucleotide
  Target: SCNA; (-) strand; PAM type: YTN; PAM sequence: TTC
ttgtcttattccagttctcg

SEQ ID NO: 50827 - DNA, 20 bp, Artificial Sequence
  Description of Artificial Sequence: Synthetic oligonucleotide
  Target: SCNA; (-) strand; PAM type: YTN; PAM sequence: TTG
aatagaagtggtgaaagcag

SEQ ID NO: 50828 - DNA, 20 bp, Artificial Sequence
  Description of Artificial Sequence: Synthetic oligonucleotide
  Target: SCNA; (-) strand; PAM type: YTN; PAM sequence: CTA
tgttgaatagaagtggtgaa

SEQ ID NO: 50829 - DNA, 20 bp, Artificial Sequence
  Description of Artificial Sequence: Synthetic oligonucleotide
  Target: SCNA; (-) strand; PAM type: YTN; PAM sequence: TTC
cagtactatgttgaatagaa

SEQ ID NO: 50830 - DNA, 20 bp, Artificial Sequence
  Description of Artificial Sequence: Synthetic oligonucleotide
  Target: SCNA; (-) strand; PAM type: YTN; PAM sequence: TTT
ccagtactatgttgaataga

SEQ ID NO: 50831 - DNA, 20 bp, Artificial Sequence
  Description of Artificial Sequence: Synthetic oligonucleotide
  Target: SCNA; (-) strand; PAM type: YTN; PAM sequence: CTA
ggatttccagtactatgttg

SEQ ID NO: 50832 - DNA, 20 bp, Artificial Sequence
  Description of Artificial Sequence: Synthetic oligonucleotide
  Target: SCNA; (-) strand; PAM type: YTN; PAM sequence: CTG
gctaggatttccagtactat

SEQ ID NO: 50833 - DNA, 20 bp, Artificial Sequence
  Description of Artificial Sequence: Synthetic oligonucleotide
  Target: SCNA; (-) strand; PAM type: YTN; PAM sequence: CTC
tggctaggatttccagtact

SEQ ID NO: 50834 - DNA, 20 bp, Artificial Sequence
  Description of Artificial Sequence: Synthetic oligonucleotide
  Target: SCNA; (-) strand; PAM type: YTN; PAM sequence: TTG
ctctggctaggatttccagt

SEQ ID NO: 50835 - DNA, 20 bp, Artificial Sequence
  Description of Artificial Sequence: Synthetic oligonucleotide
  Target: SCNA; (-) strand; PAM type: YTN; PAM sequence: CTG
attgctctggctaggatttc

SEQ ID NO: 50836 - DNA, 20 bp, Artificial Sequence
  Description of Artificial Sequence: Synthetic oligonucleotide
  Target: SCNA; (-) strand; PAM type: YTN; PAM sequence: TTG
tctgattgctctggctagga

SEQ ID NO: 50837 - DNA, 20 bp, Artificial Sequence
  Description of Artificial Sequence: Synthetic oligonucleotide
  Target: SCNA; (-) strand; PAM type: YTN; PAM sequence: CTT
gtctgattgctctggctagg

SEQ ID NO: 50838 - DNA, 20 bp, Artificial Sequence
  Description of Artificial Sequence: Synthetic oligonucleotide
  Target: SCNA; (-) strand; PAM type: YTN; PAM sequence: CTC
ttgtctgattgctctggcta

SEQ ID NO: 50839 - DNA, 20 bp, Artificial Sequence
  Description of Artificial Sequence: Synthetic oligonucleotide
  Target: SCNA; (-) strand; PAM type: YTN; PAM sequence: TTC
tcttgtctgattgctctggc

SEQ ID NO: 50840 - DNA, 20 bp, Artificial Sequence
  Description of Artificial Sequence: Synthetic oligonucleotide
  Target: SCNA; (-) strand; PAM type: YTN; PAM sequence: TTT
ctcttgtctgattgctctgg

SEQ ID NO: 50841 - DNA, 20 bp, Artificial Sequence
  Description of Artificial Sequence: Synthetic oligonucleotide
  Target: SCNA; (-) strand; PAM type: YTN; PAM sequence: CTT
tctcttgtctgattgctctg

SEQ ID NO: 50842 - DNA, 20 bp, Artificial Sequence
  Description of Artificial Sequence: Synthetic oligonucleotide
  Target: SCNA; (-) strand; PAM type: YTN; PAM sequence: TTC
tttctcttgtctgattgctc

SEQ ID NO: 50843 - DNA, 20 bp, Artificial Sequence
  Description of Artificial Sequence: Synthetic oligonucleotide
  Target: SCNA; (-) strand; PAM type: YTN; PAM sequence: TTT
ctttctcttgtctgattgct

SEQ ID NO: 50844 - DNA, 20 bp, Artificial Sequence
  Description of Artificial Sequence: Synthetic oligonucleotide
  Target: SCNA; (-) strand; PAM type: YTN; PAM sequence: TTA
tttctttctcttgtctgatt

SEQ ID NO: 50845 - DNA, 20 bp, Artificial Sequence
  Description of Artificial Sequence: Synthetic oligonucleotide
  Target: SCNA; (-) strand; PAM type: YTN; PAM sequence: TTT
atttctttctcttgtctgat

SEQ ID NO: 50846 - DNA, 20 bp, Artificial Sequence
  Description of Artificial Sequence: Synthetic oligonucleotide
  Target: SCNA; (-) strand; PAM type: YTN; PAM sequence: CTT
tatttctttctcttgtctga

SEQ ID NO: 50847 - DNA, 20 bp, Artificial Sequence
  Description of Artificial Sequence: Synthetic oligonucleotide
  Target: SCNA; (-) strand; PAM type: YTN; PAM sequence: CTC
tttatttctttctcttgtct

SEQ ID NO: 50848 - DNA, 20 bp, Artificial Sequence
  Description of Artificial Sequence: Synthetic oligonucleotide
  Target: SCNA; (-) strand; PAM type: YTN; PAM sequence: TTG
gatgctctttatttctttct

SEQ ID NO: 50849 - DNA, 20 bp, Artificial Sequence
  Description of Artificial Sequence: Synthetic oligonucleotide
  Target: SCNA; (-) strand; PAM type: YTN; PAM sequence: TTT
ggatgctctttatttctttc

SEQ ID NO: 50850 - DNA, 20 bp, Artificial Sequence
  Description of Artificial Sequence: Synthetic oligonucleotide
  Target: SCNA; (-) strand; PAM type: YTN; PAM sequence: TTA
gcagtttggatgctctttat

SEQ ID NO: 50851 - DNA, 20 bp, Artificial Sequence
  Description of Artificial Sequence: Synthetic oligonucleotide
  Target: SCNA; (-) strand; PAM type: YTN; PAM sequence: TTT
agcagtttggatgctcttta

SEQ ID NO: 50852 - DNA, 20 bp, Artificial Sequence
  Description of Artificial Sequence: Synthetic oligonucleotide
  Target: SCNA; (-) strand; PAM type: YTN; PAM sequence: CTT
tagcagtttggatgctcttt

SEQ ID NO: 50853 - DNA, 20 bp, Artificial Sequence
  Description of Artificial Sequence: Synthetic oligonucleotide
  Target: SCNA; (-) strand; PAM type: YTN; PAM sequence: CTC
tttagcagtttggatgctct

SEQ ID NO: 50854 - DNA, 20 bp, Artificial Sequence
  Description of Artificial Sequence: Synthetic oligonucleotide
  Target: SCNA; (-) strand; PAM type: YTN; PAM sequence: TTC
ctctttagcagtttggatgc

SEQ ID NO: 50855 - DNA, 20 bp, Artificial Sequence
  Description of Artificial Sequence: Synthetic oligonucleotide
  Target: SCNA; (-) strand; PAM type: YTN; PAM sequence: CTT
cctctttagcagtttggatg

SEQ ID NO: 50856 - DNA, 20 bp, Artificial Sequence
  Description of Artificial Sequence: Synthetic oligonucleotide
  Target: SCNA; (-) strand; PAM type: YTN; PAM sequence: TTG
acttcctctttagcagtttg

SEQ ID NO: 50857 - DNA, 20 bp, Artificial Sequence
  Description of Artificial Sequence: Synthetic oligonucleotide
  Target: SCNA; (-) strand; PAM type: YTN; PAM sequence: TTT
gacttcctctttagcagttt

SEQ ID NO: 50858 - DNA, 20 bp, Artificial Sequence
  Description of Artificial Sequence: Synthetic oligonucleotide
  Target: SCNA; (-) strand; PAM type: YTN; PAM sequence: CTA
ggtatacaaacatatcatcg

SEQ ID NO: 50859 - DNA, 20 bp, Artificial Sequence
  Description of Artificial Sequence: Synthetic oligonucleotide
  Target: SCNA; (-) strand; PAM type: YTN; PAM sequence: TTC
taggtatacaaacatatcat

SEQ ID NO: 50860 - DNA, 20 bp, Artificial Sequence
  Description of Artificial Sequence: Synthetic oligonucleotide
  Target: SCNA; (-) strand; PAM type: YTN; PAM sequence: TTT
ctaggtatacaaacatatca

SEQ ID NO: 50861 - DNA, 20 bp, Artificial Sequence
  Description of Artificial Sequence: Synthetic oligonucleotide
  Target: SCNA; (-) strand; PAM type: YTN; PAM sequence: TTT
tctaggtatacaaacatatc

SEQ ID NO: 50862 - DNA, 20 bp, Artificial Sequence
  Description of Artificial Sequence: Synthetic oligonucleotide
  Target: SCNA; (-) strand; PAM type: YTN; PAM sequence: TTA
ggttttctaggtatacaaac

SEQ ID NO: 50863 - DNA, 20 bp, Artificial Sequence
  Description of Artificial Sequence: Synthetic oligonucleotide
  Target: SCNA; (-) strand; PAM type: YTN; PAM sequence: TTT
aggttttctaggtatacaaa

SEQ ID NO: 50864 - DNA, 20 bp, Artificial Sequence
  Description of Artificial Sequence: Synthetic oligonucleotide
  Target: SCNA; (-) strand; PAM type: YTN; PAM sequence: CTT
taggttttctaggtatacaa

SEQ ID NO: 50865 - DNA, 20 bp, Artificial Sequence
  Description of Artificial Sequence: Synthetic oligonucleotide
  Target: SCNA; (-) strand; PAM type: YTN; PAM sequence: TTG
gatgagtctttaggttttct

SEQ ID NO: 50866 - DNA, 20 bp, Artificial Sequence
  Description of Artificial Sequence: Synthetic oligonucleotide
  Target: SCNA; (-) strand; PAM type: YTN; PAM sequence: TTT
ggatgagtctttaggttttc

SEQ ID NO: 50867 - DNA, 20 bp, Artificial Sequence
  Description of Artificial Sequence: Synthetic oligonucleotide
  Target: SCNA; (-) strand; PAM type: YTN; PAM sequence: TTT
tggatgagtctttaggtttt

SEQ ID NO: 50868 - DNA, 20 bp, Artificial Sequence
  Description of Artificial Sequence: Synthetic oligonucleotide
  Target: SCNA; (-) strand; PAM type: YTN; PAM sequence: TTT
ttggatgagtctttaggttt

SEQ ID NO: 50869 - DNA, 20 bp, Artificial Sequence
  Description of Artificial Sequence: Synthetic oligonucleotide
  Target: SCNA; (-) strand; PAM type: YTN; PAM sequence: CTT
tttggatgagtctttaggtt

SEQ ID NO: 50870 - DNA, 20 bp, Artificial Sequence
  Description of Artificial Sequence: Synthetic oligonucleotide
  Target: SCNA; (-) strand; PAM type: YTN; PAM sequence: CTA
ggagctttttggatgagtct

SEQ ID NO: 50871 - DNA, 20 bp, Artificial Sequence
  Description of Artificial Sequence: Synthetic oligonucleotide
  Target: SCNA; (-) strand; PAM type: YTN; PAM sequence: TTA
tcagatctaggagctttttg

SEQ ID NO: 50872 - DNA, 20 bp, Artificial Sequence
  Description of Artificial Sequence: Synthetic oligonucleotide
  Target: SCNA; (-) strand; PAM type: YTN; PAM sequence: CTT
atcagatctaggagcttttt

SEQ ID NO: 50873 - DNA, 20 bp, Artificial Sequence
  Description of Artificial Sequence: Synthetic oligonucleotide
  Target: SCNA; (-) strand; PAM type: YTN; PAM sequence: TTA
acttatcagatctaggagct

SEQ ID NO: 50874 - DNA, 20 bp, Artificial Sequence
  Description of Artificial Sequence: Synthetic oligonucleotide
  Target: SCNA; (-) strand; PAM type: YTN; PAM sequence: CTG
aattaacttatcagatctag

SEQ ID NO: 50875 - DNA, 20 bp, Artificial Sequence
  Description of Artificial Sequence: Synthetic oligonucleotide
  Target: SCNA; (-) strand; PAM type: YTN; PAM sequence: TTA
ctgaattaacttatcagatc

SEQ ID NO: 50876 - DNA, 20 bp, Artificial Sequence
  Description of Artificial Sequence: Synthetic oligonucleotide
  Target: SCNA; (-) strand; PAM type: YTN; PAM sequence: TTT
actgaattaacttatcagat

SEQ ID NO: 50877 - DNA, 20 bp, Artificial Sequence
  Description of Artificial Sequence: Synthetic oligonucleotide
  Target: SCNA; (-) strand; PAM type: YTN; PAM sequence: CTT
tactgaattaacttatcaga

SEQ ID NO: 50878 - DNA, 20 bp, Artificial Sequence
  Description of Artificial Sequence: Synthetic oligonucleotide
  Target: SCNA; (-) strand; PAM type: YTN; PAM sequence: CTG
gaaactttactgaattaact

SEQ ID NO: 50879 - DNA, 20 bp, Artificial Sequence
  Description of Artificial Sequence: Synthetic oligonucleotide
  Target: SCNA; (-) strand; PAM type: YTN; PAM sequence: TTG
tatctggaaactttactgaa

SEQ ID NO: 50880 - DNA, 20 bp, Artificial Sequence
  Description of Artificial Sequence: Synthetic oligonucleotide
  Target: SCNA; (-) strand; PAM type: YTN; PAM sequence: TTT
gtatctggaaactttactga

SEQ ID NO: 50881 - DNA, 20 bp, Artificial Sequence
  Description of Artificial Sequence: Synthetic oligonucleotide
  Target: SCNA; (-) strand; PAM type: YTN; PAM sequence: TTT
tgtatctggaaactttactg

SEQ ID NO: 50882 - DNA, 20 bp, Artificial Sequence
  Description of Artificial Sequence: Synthetic oligonucleotide
  Target: SCNA; (-) strand; PAM type: YTN; PAM sequence: TTG
attttgtatctggaaacttt

SEQ ID NO: 50883 - DNA, 20 bp, Artificial Sequence
  Description of Artificial Sequence: Synthetic oligonucleotide
  Target: SCNA; (-) strand; PAM type: YTN; PAM sequence: TTG
tgtacattgattttgtatct

SEQ ID NO: 50884 - DNA, 20 bp, Artificial Sequence
  Description of Artificial Sequence: Synthetic oligonucleotide
  Target: SCNA; (-) strand; PAM type: YTN; PAM sequence: TTT
gtgtacattgattttgtatc

SEQ ID NO: 50885 - DNA, 20 bp, Artificial Sequence
  Description of Artificial Sequence: Synthetic oligonucleotide
  Target: SCNA; (-) strand; PAM type: YTN; PAM sequence: CTG
atttgtgtacattgattttg

SEQ ID NO: 50886 - DNA, 20 bp, Artificial Sequence
  Description of Artificial Sequence: Synthetic oligonucleotide
  Target: SCNA; (-) strand; PAM type: YTN; PAM sequence: CTG
gtactgatttgtgtacattg

SEQ ID NO: 50887 - DNA, 20 bp, Artificial Sequence
  Description of Artificial Sequence: Synthetic oligonucleotide
  Target: SCNA; (-) strand; PAM type: YTN; PAM sequence: TTG
gtgtatagcactggtactga

SEQ ID NO: 50888 - DNA, 20 bp, Artificial Sequence
  Description of Artificial Sequence: Synthetic oligonucleotide
  Target: SCNA; (-) strand; PAM type: YTN; PAM sequence: CTG
ttggtgtatagcactggtac

SEQ ID NO: 50889 - DNA, 20 bp, Artificial Sequence
  Description of Artificial Sequence: Synthetic oligonucleotide
  Target: SCNA; (-) strand; PAM type: YTN; PAM sequence: TTG
ctgttggtgtatagcactgg

SEQ ID NO: 50890 - DNA, 20 bp, Artificial Sequence
  Description of Artificial Sequence: Synthetic oligonucleotide
  Target: SCNA; (-) strand; PAM type: YTN; PAM sequence: TTG
ttgctgttggtgtatagcac

SEQ ID NO: 50891 - DNA, 20 bp, Artificial Sequence
  Description of Artificial Sequence: Synthetic oligonucleotide
  Target: SCNA; (-) strand; PAM type: YTN; PAM sequence: TTT
gttgctgttggtgtatagca

SEQ ID NO: 50892 - DNA, 20 bp, Artificial Sequence
  Description of Artificial Sequence: Synthetic oligonucleotide
  Target: SCNA; (-) strand; PAM type: YTN; PAM sequence: TTT
tgttgctgttggtgtatagc

SEQ ID NO: 50893 - DNA, 20 bp, Artificial Sequence
  Description of Artificial Sequence: Synthetic oligonucleotide
  Target: SCNA; (-) strand; PAM type: YTN; PAM sequence: CTC
agttttgttgctgttggtgt

SEQ ID NO: 50894 - DNA, 20 bp, Artificial Sequence
  Description of Artificial Sequence: Synthetic oligonucleotide
  Target: SCNA; (-) strand; PAM type: YTN; PAM sequence: TTC
tcagttttgttgctgttggt

SEQ ID NO: 50895 - DNA, 20 bp, Artificial Sequence
  Description of Artificial Sequence: Synthetic oligonucleotide
  Target: SCNA; (-) strand; PAM type: YTN; PAM sequence: TTG
attctcagttttgttgctgt

SEQ ID NO: 50896 - DNA, 20 bp, Artificial Sequence
  Description of Artificial Sequence: Synthetic oligonucleotide
  Target: SCNA; (-) strand; PAM type: YTN; PAM sequence: TTT
gattctcagttttgttgctg

SEQ ID NO: 50897 - DNA, 20 bp, Artificial Sequence
  Description of Artificial Sequence: Synthetic oligonucleotide
  Target: SCNA; (-) strand; PAM type: YTN; PAM sequence: TTA
atttgattctcagttttgtt

SEQ ID NO: 50898 - DNA, 20 bp, Artificial Sequence
  Description of Artificial Sequence: Synthetic oligonucleotide
  Target: SCNA; (-) strand; PAM type: YTN; PAM sequence: CTT
aatttgattctcagttttgt

SEQ ID NO: 50899 - DNA, 20 bp, Artificial Sequence
  Description of Artificial Sequence: Synthetic oligonucleotide
  Target: SCNA; (-) strand; PAM type: YTN; PAM sequence: TTC
ttaatttgattctcagtttt

SEQ ID NO: 50900 - DNA, 20 bp, Artificial Sequence
  Description of Artificial Sequence: Synthetic oligonucleotide
  Target: SCNA; (-) strand; PAM type: YTN; PAM sequence: CTC
aagttcttaatttgattctc

SEQ ID NO: 50901 - DNA, 20 bp, Artificial Sequence
  Description of Artificial Sequence: Synthetic oligonucleotide
  Target: SCNA; (-) strand; PAM type: YTN; PAM sequence: TTG
taaaaaggctcaagttctta

SEQ ID NO: 50902 - DNA, 20 bp, Artificial Sequence
  Description of Artificial Sequence: Synthetic oligonucleotide
  Target: SCNA; (-) strand; PAM type: YTN; PAM sequence: CTG
ttgtaaaaaggctcaagttc

SEQ ID NO: 50903 - DNA, 20 bp, Artificial Sequence
  Description of Artificial Sequence: Synthetic oligonucleotide
  Target: SCNA; (-) strand; PAM type: YTN; PAM sequence: TTG
cagctgttgtaaaaaggctc

SEQ ID NO: 50904 - DNA, 20 bp, Artificial Sequence
  Description of Artificial Sequence: Synthetic oligonucleotide
  Target: SCNA; (-) strand; PAM type: YTN; PAM sequence: TTT
gcagctgttgtaaaaaggct

SEQ ID NO: 50905 - DNA, 20 bp, Artificial Sequence
  Description of Artificial Sequence: Synthetic oligonucleotide
  Target: SCNA; (-) strand; PAM type: YTN; PAM sequence: TTT
tgcagctgttgtaaaaaggc

SEQ ID NO: 50906 - DNA, 20 bp, Artificial Sequence
  Description of Artificial Sequence: Synthetic oligonucleotide
  Target: SCNA; (-) strand; PAM type: YTN; PAM sequence: TTT
ttgcagctgttgtaaaaagg

SEQ ID NO: 50907 - DNA, 20 bp, Artificial Sequence
  Description of Artificial Sequence: Synthetic oligonucleotide
  Target: SCNA; (-) strand; PAM type: YTN; PAM sequence: TTT
tttgcagctgttgtaaaaag

SEQ ID NO: 50908 - DNA, 20 bp, Artificial Sequence
  Description of Artificial Sequence: Synthetic oligonucleotide
  Target: SCNA; (-) strand; PAM type: YTN; PAM sequence: TTT
ttttgcagctgttgtaaaaa

SEQ ID NO: 50909 - DNA, 20 bp, Artificial Sequence
  Description of Artificial Sequence: Synthetic oligonucleotide
  Target: SCNA; (-) strand; PAM type: YTN; PAM sequence: TTT
tttttgcagctgttgtaaaa

SEQ ID NO: 50910 - DNA, 20 bp, Artificial Sequence
  Description of Artificial Sequence: Synthetic oligonucleotide
  Target: SCNA; (-) strand; PAM type: YTN; PAM sequence: TTT
ttttttgcagctgttgtaaa

SEQ ID NO: 50911 - DNA, 20 bp, Artificial Sequence
  Description of Artificial Sequence: Synthetic oligonucleotide
  Target: SCNA; (-) strand; PAM type: YTN; PAM sequence: TTT
tttttttgcagctgttgtaa

SEQ ID NO: 50912 - DNA, 20 bp, Artificial Sequence
  Description of Artificial Sequence: Synthetic oligonucleotide
  Target: SCNA; (-) strand; PAM type: YTN; PAM sequence: TTT
ttttttttgcagctgttgta

SEQ ID NO: 50913 - DNA, 20 bp, Artificial Sequence
  Description of Artificial Sequence: Synthetic oligonucleotide
  Target: SCNA; (-) strand; PAM type: YTN; PAM sequence: TTT
tttttttttgcagctgttgt

SEQ ID NO: 50914 - DNA, 20 bp, Artificial Sequence
  Description of Artificial Sequence: Synthetic oligonucleotide
  Target: SCNA; (-) strand; PAM type: YTN; PAM sequence: CTA
agcattttttttttttgcag

SEQ ID NO: 50915 - DNA, 20 bp, Artificial Sequence
  Description of Artificial Sequence: Synthetic oligonucleotide
  Target: SCNA; (-) strand; PAM type: YTN; PAM sequence: TTC
ctaagcattttttttttttg

SEQ ID NO: 50916 - DNA, 20 bp, Artificial Sequence
  Description of Artificial Sequence: Synthetic oligonucleotide
  Target: SCNA; (-) strand; PAM type: YTN; PAM sequence: TTA
ggtatattcctaagcatttt

SEQ ID NO: 50917 - DNA, 20 bp, Artificial Sequence
  Description of Artificial Sequence: Synthetic oligonucleotide
  Target: SCNA; (-) strand; PAM type: YTN; PAM sequence: TTG
gttaggtatattcctaagca

SEQ ID NO: 50918 - DNA, 20 bp, Artificial Sequence
  Description of Artificial Sequence: Synthetic oligonucleotide
  Target: SCNA; (-) strand; PAM type: YTN; PAM sequence: TTT
ggttaggtatattcctaagc

SEQ ID NO: 50919 - DNA, 20 bp, Artificial Sequence
  Description of Artificial Sequence: Synthetic oligonucleotide
  Target: SCNA; (-) strand; PAM type: YTN; PAM sequence: CTT
tggttaggtatattcctaag

SEQ ID NO: 50920 - DNA, 20 bp, Artificial Sequence
  Description of Artificial Sequence: Synthetic oligonucleotide
  Target: SCNA; (-) strand; PAM type: YTN; PAM sequence: CTC
tttggttaggtatattccta

SEQ ID NO: 50921 - DNA, 20 bp, Artificial Sequence
  Description of Artificial Sequence: Synthetic oligonucleotide
  Target: SCNA; (-) strand; PAM type: YTN; PAM sequence: TTC
cacctctttggttaggtata

SEQ ID NO: 50922 - DNA, 20 bp, Artificial Sequence
  Description of Artificial Sequence: Synthetic oligonucleotide
  Target: SCNA; (-) strand; PAM type: YTN; PAM sequence: CTT
ccacctctttggttaggtat

SEQ ID NO: 50923 - DNA, 20 bp, Artificial Sequence
  Description of Artificial Sequence: Synthetic oligonucleotide
  Target: SCNA; (-) strand; PAM type: YTN; PAM sequence: CTG
tagagatcttccacctcttt

SEQ ID NO: 50924 - DNA, 20 bp, Artificial Sequence
  Description of Artificial Sequence: Synthetic oligonucleotide
  Target: SCNA; (-) strand; PAM type: YTN; PAM sequence: TTC
ctgtagagatcttccacctc

SEQ ID NO: 50925 - DNA, 20 bp, Artificial Sequence
  Description of Artificial Sequence: Synthetic oligonucleotide
  Target: SCNA; (-) strand; PAM type: YTN; PAM sequence: TTT
cctgtagagatcttccacct

SEQ ID NO: 50926 - DNA, 20 bp, Artificial Sequence
  Description of Artificial Sequence: Synthetic oligonucleotide
  Target: SCNA; (-) strand; PAM type: YTN; PAM sequence: TTT
tcctgtagagatcttccacc

SEQ ID NO: 50927 - DNA, 20 bp, Artificial Sequence
  Description of Artificial Sequence: Synthetic oligonucleotide
  Target: SCNA; (-) strand; PAM type: YTN; PAM sequence: TTG
tagttttcctgtagagatct

SEQ ID NO: 50928 - DNA, 20 bp, Artificial Sequence
  Description of Artificial Sequence: Synthetic oligonucleotide
  Target: SCNA; (-) strand; PAM type: YTN; PAM sequence: TTT
gtagttttcctgtagagatc

SEQ ID NO: 50929 - DNA, 20 bp, Artificial Sequence
  Description of Artificial Sequence: Synthetic oligonucleotide
  Target: SCNA; (-) strand; PAM type: YTN; PAM sequence: TTT
tgtagttttcctgtagagat

SEQ ID NO: 50930 - DNA, 20 bp, Artificial Sequence
  Description of Artificial Sequence: Synthetic oligonucleotide
  Target: SCNA; (-) strand; PAM type: YTN; PAM sequence: TTC
agcaatattttgtagttttc

SEQ ID NO: 50931 - DNA, 20 bp, Artificial Sequence
  Description of Artificial Sequence: Synthetic oligonucleotide
  Target: SCNA; (-) strand; PAM type: YTN; PAM sequence: TTT
cagcaatattttgtagtttt

SEQ ID NO: 50932 - DNA, 20 bp, Artificial Sequence
  Description of Artificial Sequence: Synthetic oligonucleotide
  Target: SCNA; (-) strand; PAM type: YTN; PAM sequence: CTT
tcagcaatattttgtagttt

SEQ ID NO: 50933 - DNA, 20 bp, Artificial Sequence
  Description of Artificial Sequence: Synthetic oligonucleotide
  Target: SCNA; (-) strand; PAM type: YTN; PAM sequence: TTC
tttcagcaatattttgtagt

SEQ ID NO: 50934 - DNA, 20 bp, Artificial Sequence
  Description of Artificial Sequence: Synthetic oligonucleotide
  Target: SCNA; (-) strand; PAM type: YTN; PAM sequence: TTT
ctttcagcaatattttgtag

SEQ ID NO: 50935 - DNA, 20 bp, Artificial Sequence
  Description of Artificial Sequence: Synthetic oligonucleotide
  Target: SCNA; (-) strand; PAM type: YTN; PAM sequence: CTG
tgatttctttcagcaatatt

SEQ ID NO: 50936 - DNA, 20 bp, Artificial Sequence
  Description of Artificial Sequence: Synthetic oligonucleotide
  Target: SCNA; (-) strand; PAM type: YTN; PAM sequence: TTG
tctgtgatttctttcagcaa

SEQ ID NO: 50937 - DNA, 20 bp, Artificial Sequence
  Description of Artificial Sequence: Synthetic oligonucleotide
  Target: SCNA; (-) strand; PAM type: YTN; PAM sequence: CTG
ttgtctgtgatttctttcag

SEQ ID NO: 50938 - DNA, 20 bp, Artificial Sequence
  Description of Artificial Sequence: Synthetic oligonucleotide
  Target: SCNA; (-) strand; PAM type: YTN; PAM sequence: TTC
tgttgtctgtgatttctttc

SEQ ID NO: 50939 - DNA, 20 bp, Artificial Sequence
  Description of Artificial Sequence: Synthetic oligonucleotide
  Target: SCNA; (-) strand; PAM type: YTN; PAM sequence: TTT
ctgttgtctgtgatttcttt

SEQ ID NO: 50940 - DNA, 20 bp, Artificial Sequence
  Description of Artificial Sequence: Synthetic oligonucleotide
  Target: SCNA; (-) strand; PAM type: YTN; PAM sequence: TTA
gtttctgttgtctgtgattt

SEQ ID NO: 50941 - DNA, 20 bp, Artificial Sequence
  Description of Artificial Sequence: Synthetic oligonucleotide
  Target: SCNA; (-) strand; PAM type: YTN; PAM sequence: TTC
attagtttctgttgtctgtg

SEQ ID NO: 50942 - DNA, 20 bp, Artificial Sequence
  Description of Artificial Sequence: Synthetic oligonucleotide
  Target: SCNA; (-) strand; PAM type: YTN; PAM sequence: TTT
cattagtttctgttgtctgt

SEQ ID NO: 50943 - DNA, 20 bp, Artificial Sequence
  Description of Artificial Sequence: Synthetic oligonucleotide
  Target: SCNA; (-) strand; PAM type: YTN; PAM sequence: TTT
tcattagtttctgttgtctg

SEQ ID NO: 50944 - DNA, 20 bp, Artificial Sequence
  Description of Artificial Sequence: Synthetic oligonucleotide
  Target: SCNA; (-) strand; PAM type: YTN; PAM sequence: CTG
ccaatccatgaataagggat

SEQ ID NO: 50945 - DNA, 20 bp, Artificial Sequence
  Description of Artificial Sequence: Synthetic oligonucleotide
  Target: SCNA; (-) strand; PAM type: YTN; PAM sequence: TTC
tgccaatccatgaataaggg

SEQ ID NO: 50946 - DNA, 20 bp, Artificial Sequence
  Description of Artificial Sequence: Synthetic oligonucleotide
  Target: SCNA; (-) strand; PAM type: YTN; PAM sequence: TTG
attctgccaatccatgaata

SEQ ID NO: 50947 - DNA, 20 bp, Artificial Sequence
  Description of Artificial Sequence: Synthetic oligonucleotide
  Target: SCNA; (-) strand; PAM type: YTN; PAM sequence: TTC
acaatattgattctgccaat

SEQ ID NO: 50948 - DNA, 20 bp, Artificial Sequence
  Description of Artificial Sequence: Synthetic oligonucleotide
  Target: SCNA; (-) strand; PAM type: YTN; PAM sequence: TTT
cacaatattgattctgccaa

SEQ ID NO: 50949 - DNA, 20 bp, Artificial Sequence
  Description of Artificial Sequence: Synthetic oligonucleotide
  Target: SCNA; (-) strand; PAM type: YTN; PAM sequence: TTT
tcacaatattgattctgcca

SEQ ID NO: 50950 - DNA, 20 bp, Artificial Sequence
  Description of Artificial Sequence: Synthetic oligonucleotide
  Target: SCNA; (-) strand; PAM type: YTN; PAM sequence: CTC
attttcacaatattgattct

SEQ ID NO: 50951 - DNA, 20 bp, Artificial Sequence
  Description of Artificial Sequence: Synthetic oligonucleotide
  Target: SCNA; (-) strand; PAM type: YTN; PAM sequence: TTG
gcagtgtgctcattttcaca

SEQ ID NO: 50952 - DNA, 20 bp, Artificial Sequence
  Description of Artificial Sequence: Synthetic oligonucleotide
  Target: SCNA; (-) strand; PAM type: YTN; PAM sequence: TTT
ggcagtgtgctcattttcac

SEQ ID NO: 50953 - DNA, 20 bp, Artificial Sequence
  Description of Artificial Sequence: Synthetic oligonucleotide
  Target: SCNA; (-) strand; PAM type: YTN; PAM sequence: TTT
tggcagtgtgctcattttca

SEQ ID NO: 50954 - DNA, 20 bp, Artificial Sequence
  Description of Artificial Sequence: Synthetic oligonucleotide
  Target: SCNA; (-) strand; PAM type: YTN; PAM sequence: TTT
ttggcagtgtgctcattttc

SEQ ID NO: 50955 - DNA, 20 bp, Artificial Sequence
  Description of Artificial Sequence: Synthetic oligonucleotide
  Target: SCNA; (-) strand; PAM type: YTN; PAM sequence: TTG
tttttggcagtgtgctcatt

SEQ ID NO: 50956 - DNA, 20 bp, Artificial Sequence
  Description of Artificial Sequence: Synthetic oligonucleotide
  Target: SCNA; (-) strand; PAM type: YTN; PAM sequence: TTA
tagattgtttttggcagtgt

SEQ ID NO: 50957 - DNA, 20 bp, Artificial Sequence
  Description of Artificial Sequence: Synthetic oligonucleotide
  Target: SCNA; (-) strand; PAM type: YTN; PAM sequence: TTT
atagattgtttttggcagtg

SEQ ID NO: 50958 - DNA, 20 bp, Artificial Sequence
  Description of Artificial Sequence: Synthetic oligonucleotide
  Target: SCNA; (-) strand; PAM type: YTN; PAM sequence: TTG
aatttatagattgtttttgg

SEQ ID NO: 50959 - DNA, 20 bp, Artificial Sequence
  Description of Artificial Sequence: Synthetic oligonucleotide
  Target: SCNA; (-) strand; PAM type: YTN; PAM sequence: TTG
atgggagtcgcattgaattt

SEQ ID NO: 50960 - DNA, 20 bp, Artificial Sequence
  Description of Artificial Sequence: Synthetic oligonucleotide
  Target: SCNA; (-) strand; PAM type: YTN; PAM sequence: TTT
gatgggagtcgcattgaatt

SEQ ID NO: 50961 - DNA, 20 bp, Artificial Sequence
  Description of Artificial Sequence: Synthetic oligonucleotide
  Target: SCNA; (-) strand; PAM type: YTN; PAM sequence: TTT
tgatgggagtcgcattgaat

SEQ ID NO: 50962 - DNA, 20 bp, Artificial Sequence
  Description of Artificial Sequence: Synthetic oligonucleotide
  Target: SCNA; (-) strand; PAM type: YTN; PAM sequence: TTG
aagaatgatggtggcatttt

SEQ ID NO: 50963 - DNA, 20 bp, Artificial Sequence
  Description of Artificial Sequence: Synthetic oligonucleotide
  Target: SCNA; (-) strand; PAM type: YTN; PAM sequence: TTT
gaagaatgatggtggcattt

SEQ ID NO: 50964 - DNA, 20 bp, Artificial Sequence
  Description of Artificial Sequence: Synthetic oligonucleotide
  Target: SCNA; (-) strand; PAM type: YTN; PAM sequence: CTT
tgaagaatgatggtggcatt

SEQ ID NO: 50965 - DNA, 20 bp, Artificial Sequence
  Description of Artificial Sequence: Synthetic oligonucleotide
  Target: SCNA; (-) strand; PAM type: YTN; PAM sequence: TTC
tttgaagaatgatggtggca

SEQ ID NO: 50966 - DNA, 20 bp, Artificial Sequence
  Description of Artificial Sequence: Synthetic oligonucleotide
  Target: SCNA; (-) strand; PAM type: YTN; PAM sequence: TTG
ttctttgaagaatgatggtg

SEQ ID NO: 50967 - DNA, 20 bp, Artificial Sequence
  Description of Artificial Sequence: Synthetic oligonucleotide
  Target: SCNA; (-) strand; PAM type: YTN; PAM sequence: CTT
gttctttgaagaatgatggt

SEQ ID NO: 50968 - DNA, 20 bp, Artificial Sequence
  Description of Artificial Sequence: Synthetic oligonucleotide
  Target: SCNA; (-) strand; PAM type: YTN; PAM sequence: TTC
ttgttctttgaagaatgatg

SEQ ID NO: 50969 - DNA, 20 bp, Artificial Sequence
  Description of Artificial Sequence: Synthetic oligonucleotide
  Target: SCNA; (-) strand; PAM type: YTN; PAM sequence: TTT
cttgttctttgaagaatgat

SEQ ID NO: 50970 - DNA, 20 bp, Artificial Sequence
  Description of Artificial Sequence: Synthetic oligonucleotide
  Target: SCNA; (-) strand; PAM type: YTN; PAM sequence: TTT
tcttgttctttgaagaatga

SEQ ID NO: 50971 - DNA, 20 bp, Artificial Sequence
  Description of Artificial Sequence: Synthetic oligonucleotide
  Target: SCNA; (-) strand; PAM type: YTN; PAM sequence: TTT
ttcttgttctttgaagaatg

SEQ ID NO: 50972 - DNA, 20 bp, Artificial Sequence
  Description of Artificial Sequence: Synthetic oligonucleotide
  Target: SCNA; (-) strand; PAM type: YTN; PAM sequence: TTT
tttcttgttctttgaagaat

SEQ ID NO: 50973 - DNA, 20 bp, Artificial Sequence
  Description of Artificial Sequence: Synthetic oligonucleotide
  Target: SCNA; (-) strand; PAM type: YTN; PAM sequence: TTT
ttttcttgttctttgaagaa

SEQ ID NO: 50974 - DNA, 20 bp, Artificial Sequence
  Description of Artificial Sequence: Synthetic oligonucleotide
  Target: SCNA; (-) strand; PAM type: YTN; PAM sequence: TTT
tttttcttgttctttgaaga

SEQ ID NO: 50975 - DNA, 20 bp, Artificial Sequence
  Description of Artificial Sequence: Synthetic oligonucleotide
  Target: SCNA; (-) strand; PAM type: YTN; PAM sequence: TTA
agattttttttcttgttctt

SEQ ID NO: 50976 - DNA, 20 bp, Artificial Sequence
  Description of Artificial Sequence: Synthetic oligonucleotide
  Target: SCNA; (-) strand; PAM type: YTN; PAM sequence: TTT
aagattttttttcttgttct

SEQ ID NO: 50977 - DNA, 20 bp, Artificial Sequence
  Description of Artificial Sequence: Synthetic oligonucleotide
  Target: SCNA; (-) strand; PAM type: YTN; PAM sequence: TTT
taagattttttttcttgttc

SEQ ID NO: 50978 - DNA, 20 bp, Artificial Sequence
  Description of Artificial Sequence: Synthetic oligonucleotide
  Target: SCNA; (-) strand; PAM type: YTN; PAM sequence: TTC
catgtgaattttaagatttt

SEQ ID NO: 50979 - DNA, 20 bp, Artificial Sequence
  Description of Artificial Sequence: Synthetic oligonucleotide
  Target: SCNA; (-) strand; PAM type: YTN; PAM sequence: TTG
ttccatgtgaattttaagat

SEQ ID NO: 50980 - DNA, 20 bp, Artificial Sequence
  Description of Artificial Sequence: Synthetic oligonucleotide
  Target: SCNA; (-) strand; PAM type: YTN; PAM sequence: TTT
gttccatgtgaattttaaga

SEQ ID NO: 50981 - DNA, 20 bp, Artificial Sequence
  Description of Artificial Sequence: Synthetic oligonucleotide
  Target: SCNA; (-) strand; PAM type: YTN; PAM sequence: TTT
tgttccatgtgaattttaag

SEQ ID NO: 50982 - DNA, 20 bp, Artificial Sequence
  Description of Artificial Sequence: Synthetic oligonucleotide
  Target: SCNA; (-) strand; PAM type: YTN; PAM sequence: TTG
ttttgttccatgtgaatttt

SEQ ID NO: 50983 - DNA, 20 bp, Artificial Sequence
  Description of Artificial Sequence: Synthetic oligonucleotide
  Target: SCNA; (-) strand; PAM type: YTN; PAM sequence: CTG
ttgttttgttccatgtgaat

SEQ ID NO: 50984 - DNA, 20 bp, Artificial Sequence
  Description of Artificial Sequence: Synthetic oligonucleotide
  Target: SCNA; (-) strand; PAM type: YTN; PAM sequence: CTG
tatgggctgttgttttgttc

SEQ ID NO: 50985 - DNA, 20 bp, Artificial Sequence
  Description of Artificial Sequence: Synthetic oligonucleotide
  Target: SCNA; (-) strand; PAM type: YTN; PAM sequence: TTG
gctgtatgggctgttgtttt

SEQ ID NO: 50986 - DNA, 20 bp, Artificial Sequence
  Description of Artificial Sequence: Synthetic oligonucleotide
  Target: SCNA; (-) strand; PAM type: YTN; PAM sequence: TTT
ggctgtatgggctgttgttt

SEQ ID NO: 50987 - DNA, 20 bp, Artificial Sequence
  Description of Artificial Sequence: Synthetic oligonucleotide
  Target: SCNA; (-) strand; PAM type: YTN; PAM sequence: CTT
tggctgtatgggctgttgtt

SEQ ID NO: 50988 - DNA, 20 bp, Artificial Sequence
  Description of Artificial Sequence: Synthetic oligonucleotide
  Target: SCNA; (-) strand; PAM type: YTN; PAM sequence: TTG
ctttggctgtatgggctgtt

SEQ ID NO: 50989 - DNA, 20 bp, Artificial Sequence
  Description of Artificial Sequence: Synthetic oligonucleotide
  Target: SCNA; (-) strand; PAM type: YTN; PAM sequence: CTT
gctttggctgtatgggctgt

SEQ ID NO: 50990 - DNA, 20 bp, Artificial Sequence
  Description of Artificial Sequence: Synthetic oligonucleotide
  Target: SCNA; (-) strand; PAM type: YTN; PAM sequence: TTA
gtcttgctttggctgtatgg

SEQ ID NO: 50991 - DNA, 20 bp, Artificial Sequence
  Description of Artificial Sequence: Synthetic oligonucleotide
  Target: SCNA; (-) strand; PAM type: YTN; PAM sequence: CTT
agtcttgctttggctgtatg

SEQ ID NO: 50992 - DNA, 20 bp, Artificial Sequence
  Description of Artificial Sequence: Synthetic oligonucleotide
  Target: SCNA; (-) strand; PAM type: YTN; PAM sequence: TTG
cttagtcttgctttggctgt

SEQ ID NO: 50993 - DNA, 20 bp, Artificial Sequence
  Description of Artificial Sequence: Synthetic oligonucleotide
  Target: SCNA; (-) strand; PAM type: YTN; PAM sequence: TTT
gcttagtcttgctttggctg

SEQ ID NO: 50994 - DNA, 20 bp, Artificial Sequence
  Description of Artificial Sequence: Synthetic oligonucleotide
  Target: SCNA; (-) strand; PAM type: YTN; PAM sequence: TTT
tgcttagtcttgctttggct

SEQ ID NO: 50995 - DNA, 20 bp, Artificial Sequence
  Description of Artificial Sequence: Synthetic oligonucleotide
  Target: SCNA; (-) strand; PAM type: YTN; PAM sequence: TTT
ttgcttagtcttgctttggc

SEQ ID NO: 50996 - DNA, 20 bp, Artificial Sequence
  Description of Artificial Sequence: Synthetic oligonucleotide
  Target: SCNA; (-) strand; PAM type: YTN; PAM sequence: TTT
tttgcttagtcttgctttgg

SEQ ID NO: 50997 - DNA, 20 bp, Artificial Sequence
  Description of Artificial Sequence: Synthetic oligonucleotide
  Target: SCNA; (-) strand; PAM type: YTN; PAM sequence: TTA
ttttttgcttagtcttgctt

SEQ ID NO: 50998 - DNA, 20 bp, Artificial Sequence
  Description of Artificial Sequence: Synthetic oligonucleotide
  Target: SCNA; (-) strand; PAM type: YTN; PAM sequence: TTG
ttattttttgcttagtcttg

SEQ ID NO: 50999 - DNA, 20 bp, Artificial Sequence
  Description of Artificial Sequence: Synthetic oligonucleotide
  Target: SCNA; (-) strand; PAM type: YTN; PAM sequence: TTT
gttattttttgcttagtctt

SEQ ID NO: 51000 - DNA, 20 bp, Artificial Sequence
  Description of Artificial Sequence: Synthetic oligonucleotide
  Target: SCNA; (-) strand; PAM type: YTN; PAM sequence: CTC
cagatttgttattttttgct

SEQ ID NO: 51001 - DNA, 20 bp, Artificial Sequence
  Description of Artificial Sequence: Synthetic oligonucleotide
  Target: SCNA; (-) strand; PAM type: YTN; PAM sequence: CTA
gtgcctccagatttgttatt

SEQ ID NO: 51002 - DNA, 20 bp, Artificial Sequence
  Description of Artificial Sequence: Synthetic oligonucleotide
  Target: SCNA; (-) strand; PAM type: YTN; PAM sequence: TTG
ggtaatctagtgcctccaga

SEQ ID NO: 51003 - DNA, 20 bp, Artificial Sequence
  Description of Artificial Sequence: Synthetic oligonucleotide
  Target: SCNA; (-) strand; PAM type: YTN; PAM sequence: TTG
aagttgggtaatctagtgcc

SEQ ID NO: 51004 - DNA, 20 bp, Artificial Sequence
  Description of Artificial Sequence: Synthetic oligonucleotide
  Target: SCNA; (-) strand; PAM type: YTN; PAM sequence: TTT
gaagttgggtaatctagtgc

SEQ ID NO: 51005 - DNA, 20 bp, Artificial Sequence
  Description of Artificial Sequence: Synthetic oligonucleotide
  Target: SCNA; (-) strand; PAM type: YTN; PAM sequence: TTG
tagtatagtttgaagttggg

SEQ ID NO: 51006 - DNA, 20 bp, Artificial Sequence
  Description of Artificial Sequence: Synthetic oligonucleotide
  Target: SCNA; (-) strand; PAM type: YTN; PAM sequence: CTT
gtagtatagtttgaagttgg

SEQ ID NO: 51007 - DNA, 20 bp, Artificial Sequence
  Description of Artificial Sequence: Synthetic oligonucleotide
  Target: SCNA; (-) strand; PAM type: YTN; PAM sequence: CTA
tagtcttgtagtatagtttg

SEQ ID NO: 51008 - DNA, 20 bp, Artificial Sequence
  Description of Artificial Sequence: Synthetic oligonucleotide
  Target: SCNA; (-) strand; PAM type: YTN; PAM sequence: CTA
actatagtcttgtagtatag

SEQ ID NO: 51009 - DNA, 20 bp, Artificial Sequence
  Description of Artificial Sequence: Synthetic oligonucleotide
  Target: SCNA; (-) strand; PAM type: YTN; PAM sequence: TTC
ctaactatagtcttgtagta

SEQ ID NO: 51010 - DNA, 20 bp, Artificial Sequence
  Description of Artificial Sequence: Synthetic oligonucleotide
  Target: SCNA; (-) strand; PAM type: YTN; PAM sequence: TTT
cctaactatagtcttgtagt

SEQ ID NO: 51011 - DNA, 20 bp, Artificial Sequence
  Description of Artificial Sequence: Synthetic oligonucleotide
  Target: SCNA; (-) strand; PAM type: YTN; PAM sequence: TTT
tcctaactatagtcttgtag

SEQ ID NO: 51012 - DNA, 20 bp, Artificial Sequence
  Description of Artificial Sequence: Synthetic oligonucleotide
  Target: SCNA; (-) strand; PAM type: YTN; PAM sequence: CTG
ttttcctaactatagtcttg

SEQ ID NO: 51013 - DNA, 20 bp, Artificial Sequence
  Description of Artificial Sequence: Synthetic oligonucleotide
  Target: SCNA; (-) strand; PAM type: YTN; PAM sequence: TTA
tagtagtaccatgctgtttt

SEQ ID NO: 51014 - DNA, 20 bp, Artificial Sequence
  Description of Artificial Sequence: Synthetic oligonucleotide
  Target: SCNA; (-) strand; PAM type: YTN; PAM sequence: TTT
atagtagtaccatgctgttt

SEQ ID NO: 51015 - DNA, 20 bp, Artificial Sequence
  Description of Artificial Sequence: Synthetic oligonucleotide
  Target: SCNA; (-) strand; PAM type: YTN; PAM sequence: TTT
tatagtagtaccatgctgtt

SEQ ID NO: 51016 - DNA, 20 bp, Artificial Sequence
  Description of Artificial Sequence: Synthetic oligonucleotide
  Target: SCNA; (-) strand; PAM type: YTN; PAM sequence: TTT
ttatagtagtaccatgctgt

SEQ ID NO: 51017 - DNA, 20 bp, Artificial Sequence
  Description of Artificial Sequence: Synthetic oligonucleotide
  Target: SCNA; (-) strand; PAM type: YTN; PAM sequence: CTA
tttttatagtagtaccatgc

SEQ ID NO: 51018 - DNA, 20 bp, Artificial Sequence
  Description of Artificial Sequence: Synthetic oligonucleotide
  Target: SCNA; (-) strand; PAM type: YTN; PAM sequence: CTA
catgtctatttttatagtag

SEQ ID NO: 51019 - DNA, 20 bp, Artificial Sequence
  Description of Artificial Sequence: Synthetic oligonucleotide
  Target: SCNA; (-) strand; PAM type: YTN; PAM sequence: TTG
atctacatgtctatttttat

SEQ ID NO: 51020 - DNA, 20 bp, Artificial Sequence
  Description of Artificial Sequence: Synthetic oligonucleotide
  Target: SCNA; (-) strand; PAM type: YTN; PAM sequence: CTC
cattgatctacatgtctatt

SEQ ID NO: 51021 - DNA, 20 bp, Artificial Sequence
  Description of Artificial Sequence: Synthetic oligonucleotide
  Target: SCNA; (-) strand; PAM type: YTN; PAM sequence: CTG
ctccattgatctacatgtct

SEQ ID NO: 51022 - DNA, 20 bp, Artificial Sequence
  Description of Artificial Sequence: Synthetic oligonucleotide
  Target: SCNA; (-) strand; PAM type: YTN; PAM sequence: TTC
tgctccattgatctacatgt

SEQ ID NO: 51023 - DNA, 20 bp, Artificial Sequence
  Description of Artificial Sequence: Synthetic oligonucleotide
  Target: SCNA; (-) strand; PAM type: YTN; PAM sequence: CTA
ttctgctccattgatctaca

SEQ ID NO: 51024 - DNA, 20 bp, Artificial Sequence
  Description of Artificial Sequence: Synthetic oligonucleotide
  Target: SCNA; (-) strand; PAM type: YTN; PAM sequence: TTC
tattctgctccattgatcta

SEQ ID NO: 51025 - DNA, 20 bp, Artificial Sequence
  Description of Artificial Sequence: Synthetic oligonucleotide
  Target: SCNA; (-) strand; PAM type: YTN; PAM sequence: TTT
ctattctgctccattgatct

SEQ ID NO: 51026 - DNA, 20 bp, Artificial Sequence
  Description of Artificial Sequence: Synthetic oligonucleotide
  Target: SCNA; (-) strand; PAM type: YTN; PAM sequence: TTT
tctattctgctccattgatc

SEQ ID NO: 51027 - DNA, 20 bp, Artificial Sequence
  Description of Artificial Sequence: Synthetic oligonucleotide
  Target: SCNA; (-) strand; PAM type: YTN; PAM sequence: CTG
gattttctattctgctccat

SEQ ID NO: 51028 - DNA, 20 bp, Artificial Sequence
  Description of Artificial Sequence: Synthetic oligonucleotide
  Target: SCNA; (-) strand; PAM type: YTN; PAM sequence: TTC
tggattttctattctgctcc

SEQ ID NO: 51029 - DNA, 20 bp, Artificial Sequence
  Description of Artificial Sequence: Synthetic oligonucleotide
  Target: SCNA; (-) strand; PAM type: YTN; PAM sequence: TTT
ctggattttctattctgctc

SEQ ID NO: 51030 - DNA, 20 bp, Artificial Sequence
  Description of Artificial Sequence: Synthetic oligonucleotide
  Target: SCNA; (-) strand; PAM type: YTN; PAM sequence: TTA
tttctggattttctattctg

SEQ ID NO: 51031 - DNA, 20 bp, Artificial Sequence
  Description of Artificial Sequence: Synthetic oligonucleotide
  Target: SCNA; (-) strand; PAM type: YTN; PAM sequence: TTT
atttctggattttctattct

SEQ ID NO: 51032 - DNA, 20 bp, Artificial Sequence
  Description of Artificial Sequence: Synthetic oligonucleotide
  Target: SCNA; (-) strand; PAM type: YTN; PAM sequence: CTT
tatttctggattttctattc

SEQ ID NO: 51033 - DNA, 20 bp, Artificial Sequence
  Description of Artificial Sequence: Synthetic oligonucleotide
  Target: SCNA; (-) strand; PAM type: YTN; PAM sequence: TTA
gctttatttctggattttct

SEQ ID NO: 51034 - DNA, 20 bp, Artificial Sequence
  Description of Artificial Sequence: Synthetic oligonucleotide
  Target: SCNA; (-) strand; PAM type: YTN; PAM sequence: TTT
agctttatttctggattttc

SEQ ID NO: 51035 - DNA, 20 bp, Artificial Sequence
  Description of Artificial Sequence: Synthetic oligonucleotide
  Target: SCNA; (-) strand; PAM type: YTN; PAM sequence: CTG
taagtatttagctttatttc

SEQ ID NO: 51036 - DNA, 20 bp, Artificial Sequence
  Description of Artificial Sequence: Synthetic oligonucleotide
  Target: SCNA; (-) strand; PAM type: YTN; PAM sequence: TTG
gctgtaagtatttagcttta

SEQ ID NO: 51037 - DNA, 20 bp, Artificial Sequence
  Description of Artificial Sequence: Synthetic oligonucleotide
  Target: SCNA; (-) strand; PAM type: YTN; PAM sequence: TTG
aagatcagttggctgtaagt

SEQ ID NO: 51038 - DNA, 20 bp, Artificial Sequence
  Description of Artificial Sequence: Synthetic oligonucleotide
  Target: SCNA; (-) strand; PAM type: YTN; PAM sequence: TTG
ttgaagatcagttggctgta

SEQ ID NO: 51039 - DNA, 20 bp, Artificial Sequence
  Description of Artificial Sequence: Synthetic oligonucleotide
  Target: SCNA; (-) strand; PAM type: YTN; PAM sequence: TTT
gttgaagatcagttggctgt

SEQ ID NO: 51040 - DNA, 20 bp, Artificial Sequence
  Description of Artificial Sequence: Synthetic oligonucleotide
  Target: SCNA; (-) strand; PAM type: YTN; PAM sequence: CTT
tgttgaagatcagttggctg

SEQ ID NO: 51041 - DNA, 20 bp, Artificial Sequence
  Description of Artificial Sequence: Synthetic oligonucleotide
  Target: SCNA; (-) strand; PAM type: YTN; PAM sequence: TTG
ctttgttgaagatcagttgg

SEQ ID NO: 51042 - DNA, 20 bp, Artificial Sequence
  Description of Artificial Sequence: Synthetic oligonucleotide
  Target: SCNA; (-) strand; PAM type: YTN; PAM sequence: TTT
gctttgttgaagatcagttg

SEQ ID NO: 51043 - DNA, 20 bp, Artificial Sequence
  Description of Artificial Sequence: Synthetic oligonucleotide
  Target: SCNA; (-) strand; PAM type: YTN; PAM sequence: TTG
tttgctttgttgaagatcag

SEQ ID NO: 51044 - DNA, 20 bp, Artificial Sequence
  Description of Artificial Sequence: Synthetic oligonucleotide
  Target: SCNA; (-) strand; PAM type: YTN; PAM sequence: TTT
gtttgctttgttgaagatca

SEQ ID NO: 51045 - DNA, 20 bp, Artificial Sequence
  Description of Artificial Sequence: Synthetic oligonucleotide
  Target: SCNA; (-) strand; PAM type: YTN; PAM sequence: TTT
tgtttgctttgttgaagatc

SEQ ID NO: 51046 - DNA, 20 bp, Artificial Sequence
  Description of Artificial Sequence: Synthetic oligonucleotide
  Target: SCNA; (-) strand; PAM type: YTN; PAM sequence: TTT
ttgtttgctttgttgaagat

SEQ ID NO: 51047 - DNA, 20 bp, Artificial Sequence
  Description of Artificial Sequence: Synthetic oligonucleotide
  Target: SCNA; (-) strand; PAM type: YTN; PAM sequence: TTA
tgtttttgtttgctttgttg

SEQ ID NO: 51048 - DNA, 20 bp, Artificial Sequence
  Description of Artificial Sequence: Synthetic oligonucleotide
  Target: SCNA; (-) strand; PAM type: YTN; PAM sequence: CTT
atgtttttgtttgctttgtt

SEQ ID NO: 51049 - DNA, 20 bp, Artificial Sequence
  Description of Artificial Sequence: Synthetic oligonucleotide
  Target: SCNA; (-) strand; PAM type: YTN; PAM sequence: TTC
cccaccttatgtttttgttt

SEQ ID NO: 51050 - DNA, 20 bp, Artificial Sequence
  Description of Artificial Sequence: Synthetic oligonucleotide
  Target: SCNA; (-) strand; PAM type: YTN; PAM sequence: TTT
ccccaccttatgtttttgtt

SEQ ID NO: 51051 - DNA, 20 bp, Artificial Sequence
  Description of Artificial Sequence: Synthetic oligonucleotide
  Target: SCNA; (-) strand; PAM type: YTN; PAM sequence: CTT
tccccaccttatgtttttgt

SEQ ID NO: 51052 - DNA, 20 bp, Artificial Sequence
  Description of Artificial Sequence: Synthetic oligonucleotide
  Target: SCNA; (-) strand; PAM type: YTN; PAM sequence: TTG
aataggatgtcctttcccca

SEQ ID NO: 51053 - DNA, 20 bp, Artificial Sequence
  Description of Artificial Sequence: Synthetic oligonucleotide
  Target: SCNA; (-) strand; PAM type: YTN; PAM sequence: TTG
ttgaataggatgtcctttcc

SEQ ID NO: 51054 - DNA, 20 bp, Artificial Sequence
  Description of Artificial Sequence: Synthetic oligonucleotide
  Target: SCNA; (-) strand; PAM type: YTN; PAM sequence: TTT
gttgaataggatgtcctttc

SEQ ID NO: 51055 - DNA, 20 bp, Artificial Sequence
  Description of Artificial Sequence: Synthetic oligonucleotide
  Target: SCNA; (-) strand; PAM type: YTN; PAM sequence: TTA
tcccaacaccatttgttgaa

SEQ ID NO: 51056 - DNA, 20 bp, Artificial Sequence
  Description of Artificial Sequence: Synthetic oligonucleotide
  Target: SCNA; (-) strand; PAM type: YTN; PAM sequence: TTG
ccaattatcccaacaccatt

SEQ ID NO: 51057 - DNA, 20 bp, Artificial Sequence
  Description of Artificial Sequence: Synthetic oligonucleotide
  Target: SCNA; (-) strand; PAM type: YTN; PAM sequence: CTT
gccaattatcccaacaccat

SEQ ID NO: 51058 - DNA, 20 bp, Artificial Sequence
  Description of Artificial Sequence: Synthetic oligonucleotide
  Target: SCNA; (-) strand; PAM type: YTN; PAM sequence: CTA
catgtggcttgccaattatc

SEQ ID NO: 51059 - DNA, 20 bp, Artificial Sequence
  Description of Artificial Sequence: Synthetic oligonucleotide
  Target: SCNA; (-) strand; PAM type: YTN; PAM sequence: TTC
tacatgtggcttgccaatta

SEQ ID NO: 51060 - DNA, 20 bp, Artificial Sequence
  Description of Artificial Sequence: Synthetic oligonucleotide
  Target: SCNA; (-) strand; PAM type: YTN; PAM sequence: CTT
ctacatgtggcttgccaatt

SEQ ID NO: 51061 - DNA, 20 bp, Artificial Sequence
  Description of Artificial Sequence: Synthetic oligonucleotide
  Target: SCNA; (-) strand; PAM type: YTN; PAM sequence: TTC
ttctacatgtggcttgccaa

SEQ ID NO: 51062 - DNA, 20 bp, Artificial Sequence
  Description of Artificial Sequence: Synthetic oligonucleotide
  Target: SCNA; (-) strand; PAM type: YTN; PAM sequence: TTC
attcttctacatgtggcttg

SEQ ID NO: 51063 - DNA, 20 bp, Artificial Sequence
  Description of Artificial Sequence: Synthetic oligonucleotide
  Target: SCNA; (-) strand; PAM type: YTN; PAM sequence: CTT
cattcttctacatgtggctt

SEQ ID NO: 51064 - DNA, 20 bp, Artificial Sequence
  Description of Artificial Sequence: Synthetic oligonucleotide
  Target: SCNA; (-) strand; PAM type: YTN; PAM sequence: TTG
agagatgaggatccagcttc

SEQ ID NO: 51065 - DNA, 20 bp, Artificial Sequence
  Description of Artificial Sequence: Synthetic oligonucleotide
  Target: SCNA; (-) strand; PAM type: YTN; PAM sequence: TTG
tataagttgagagatgagga

SEQ ID NO: 51066 - DNA, 20 bp, Artificial Sequence
  Description of Artificial Sequence: Synthetic oligonucleotide
  Target: SCNA; (-) strand; PAM type: YTN; PAM sequence: TTT
gtataagttgagagatgagg

SEQ ID NO: 51067 - DNA, 20 bp, Artificial Sequence
  Description of Artificial Sequence: Synthetic oligonucleotide
  Target: SCNA; (-) strand; PAM type: YTN; PAM sequence: TTT
tgtataagttgagagatgag

SEQ ID NO: 51068 - DNA, 20 bp, Artificial Sequence
  Description of Artificial Sequence: Synthetic oligonucleotide
  Target: SCNA; (-) strand; PAM type: YTN; PAM sequence: TTT
ttgtataagttgagagatga

SEQ ID NO: 51069 - DNA, 20 bp, Artificial Sequence
  Description of Artificial Sequence: Synthetic oligonucleotide
  Target: SCNA; (-) strand; PAM type: YTN; PAM sequence: TTG
agtggatttttgtataagtt

SEQ ID NO: 51070 - DNA, 20 bp, Artificial Sequence
  Description of Artificial Sequence: Synthetic oligonucleotide
  Target: SCNA; (-) strand; PAM type: YTN; PAM sequence: CTT
gagtggatttttgtataagt

SEQ ID NO: 51071 - DNA, 20 bp, Artificial Sequence
  Description of Artificial Sequence: Synthetic oligonucleotide
  Target: SCNA; (-) strand; PAM type: YTN; PAM sequence: TTG
atccatcttgagtggatttt

SEQ ID NO: 51072 - DNA, 20 bp, Artificial Sequence
  Description of Artificial Sequence: Synthetic oligonucleotide
  Target: SCNA; (-) strand; PAM type: YTN; PAM sequence: TTT
gatccatcttgagtggattt

SEQ ID NO: 51073 - DNA, 20 bp, Artificial Sequence
  Description of Artificial Sequence: Synthetic oligonucleotide
  Target: SCNA; (-) strand; PAM type: YTN; PAM sequence: CTT
tgatccatcttgagtggatt

SEQ ID NO: 51074 - DNA, 20 bp, Artificial Sequence
  Description of Artificial Sequence: Synthetic oligonucleotide
  Target: SCNA; (-) strand; PAM type: YTN; PAM sequence: TTA
agtctttgatccatcttgag

SEQ ID NO: 51075 - DNA, 20 bp, Artificial Sequence
  Description of Artificial Sequence: Synthetic oligonucleotide
  Target: SCNA; (-) strand; PAM type: YTN; PAM sequence: TTT
aagtctttgatccatcttga

SEQ ID NO: 51076 - DNA, 20 bp, Artificial Sequence
  Description of Artificial Sequence: Synthetic oligonucleotide
  Target: SCNA; (-) strand; PAM type: YTN; PAM sequence: TTA
gatttaagtctttgatccat

SEQ ID NO: 51077 - DNA, 20 bp, Artificial Sequence
  Description of Artificial Sequence: Synthetic oligonucleotide
  Target: SCNA; (-) strand; PAM type: YTN; PAM sequence: CTT
agatttaagtctttgatcca

SEQ ID NO: 51078 - DNA, 20 bp, Artificial Sequence
  Description of Artificial Sequence: Synthetic oligonucleotide
  Target: SCNA; (-) strand; PAM type: YTN; PAM sequence: TTG
ggtcttagatttaagtcttt

SEQ ID NO: 51079 - DNA, 20 bp, Artificial Sequence
  Description of Artificial Sequence: Synthetic oligonucleotide
  Target: SCNA; (-) strand; PAM type: YTN; PAM sequence: TTT
gggtcttagatttaagtctt

SEQ ID NO: 51080 - DNA, 20 bp, Artificial Sequence
  Description of Artificial Sequence: Synthetic oligonucleotide
  Target: SCNA; (-) strand; PAM type: YTN; PAM sequence: TTT
tgggtcttagatttaagtct

SEQ ID NO: 51081 - DNA, 20 bp, Artificial Sequence
  Description of Artificial Sequence: Synthetic oligonucleotide
  Target: SCNA; (-) strand; PAM type: YTN; PAM sequence: TTA
aggttttgggtcttagattt

SEQ ID NO: 51082 - DNA, 20 bp, Artificial Sequence
  Description of Artificial Sequence: Synthetic oligonucleotide
  Target: SCNA; (-) strand; PAM type: YTN; PAM sequence: TTT
aaggttttgggtcttagatt

SEQ ID NO: 51083 - DNA, 20 bp, Artificial Sequence
  Description of Artificial Sequence: Synthetic oligonucleotide
  Target: SCNA; (-) strand; PAM type: YTN; PAM sequence: TTT
taaggttttgggtcttagat

SEQ ID NO: 51084 - DNA, 20 bp, Artificial Sequence
  Description of Artificial Sequence: Synthetic oligonucleotide
  Target: SCNA; (-) strand; PAM type: YTN; PAM sequence: TTT
ttaaggttttgggtcttaga

SEQ ID NO: 51085 - DNA, 20 bp, Artificial Sequence
  Description of Artificial Sequence: Synthetic oligonucleotide
  Target: SCNA; (-) strand; PAM type: YTN; PAM sequence: CTA
taatttttaaggttttgggt

SEQ ID NO: 51086 - DNA, 20 bp, Artificial Sequence
  Description of Artificial Sequence: Synthetic oligonucleotide
  Target: SCNA; (-) strand; PAM type: YTN; PAM sequence: TTC
tataatttttaaggttttgg

SEQ ID NO: 51087 - DNA, 20 bp, Artificial Sequence
  Description of Artificial Sequence: Synthetic oligonucleotide
  Target: SCNA; (-) strand; PAM type: YTN; PAM sequence: CTT
ctataatttttaaggttttg

SEQ ID NO: 51088 - DNA, 20 bp, Artificial Sequence
  Description of Artificial Sequence: Synthetic oligonucleotide
  Target: SCNA; (-) strand; PAM type: YTN; PAM sequence: TTA
tcttctataatttttaaggt

SEQ ID NO: 51089 - DNA, 20 bp, Artificial Sequence
  Description of Artificial Sequence: Synthetic oligonucleotide
  Target: SCNA; (-) strand; PAM type: YTN; PAM sequence: TTA
ccaatgttatcttctataat

SEQ ID NO: 51090 - DNA, 20 bp, Artificial Sequence
  Description of Artificial Sequence: Synthetic oligonucleotide
  Target: SCNA; (-) strand; PAM type: YTN; PAM sequence: TTT
accaatgttatcttctataa

SEQ ID NO: 51091 - DNA, 20 bp, Artificial Sequence
  Description of Artificial Sequence: Synthetic oligonucleotide
  Target: SCNA; (-) strand; PAM type: YTN; PAM sequence: TTT
taccaatgttatcttctata

SEQ ID NO: 51092 - DNA, 20 bp, Artificial Sequence
  Description of Artificial Sequence: Synthetic oligonucleotide
  Target: SCNA; (-) strand; PAM type: YTN; PAM sequence: CTA
gaagagttttaccaatgtta

SEQ ID NO: 51093 - DNA, 20 bp, Artificial Sequence
  Description of Artificial Sequence: Synthetic oligonucleotide
  Target: SCNA; (-) strand; PAM type: YTN; PAM sequence: TTA
agccagtgtctagaagagtt

SEQ ID NO: 51094 - DNA, 20 bp, Artificial Sequence
  Description of Artificial Sequence: Synthetic oligonucleotide
  Target: SCNA; (-) strand; PAM type: YTN; PAM sequence: CTT
aagccagtgtctagaagagt

SEQ ID NO: 51095 - DNA, 20 bp, Artificial Sequence
  Description of Artificial Sequence: Synthetic oligonucleotide
  Target: SCNA; (-) strand; PAM type: YTN; PAM sequence: TTG
cttaagccagtgtctagaag

SEQ ID NO: 51096 - DNA, 20 bp, Artificial Sequence
  Description of Artificial Sequence: Synthetic oligonucleotide
  Target: SCNA; (-) strand; PAM type: YTN; PAM sequence: TTT
gcttaagccagtgtctagaa

SEQ ID NO: 51097 - DNA, 20 bp, Artificial Sequence
  Description of Artificial Sequence: Synthetic oligonucleotide
  Target: SCNA; (-) strand; PAM type: YTN; PAM sequence: CTT
tgcttaagccagtgtctaga

SEQ ID NO: 51098 - DNA, 20 bp, Artificial Sequence
  Description of Artificial Sequence: Synthetic oligonucleotide
  Target: SCNA; (-) strand; PAM type: YTN; PAM sequence: CTC
tttgcttaagccagtgtcta

SEQ ID NO: 51099 - DNA, 20 bp, Artificial Sequence
  Description of Artificial Sequence: Synthetic oligonucleotide
  Target: SCNA; (-) strand; PAM type: YTN; PAM sequence: TTG
gtcatgaactctttgcttaa

SEQ ID NO: 51100 - DNA, 20 bp, Artificial Sequence
  Description of Artificial Sequence: Synthetic oligonucleotide
  Target: SCNA; (-) strand; PAM type: YTN; PAM sequence: CTT
ggtcatgaactctttgctta

SEQ ID NO: 51101 - DNA, 20 bp, Artificial Sequence
  Description of Artificial Sequence: Synthetic oligonucleotide
  Target: SCNA; (-) strand; PAM type: YTN; PAM sequence: TTC
ttggtcatgaactctttgct

SEQ ID NO: 51102 - DNA, 20 bp, Artificial Sequence
  Description of Artificial Sequence: Synthetic oligonucleotide
  Target: SCNA; (-) strand; PAM type: YTN; PAM sequence: TTT
cttggtcatgaactctttgc

SEQ ID NO: 51103 - DNA, 20 bp, Artificial Sequence
  Description of Artificial Sequence: Synthetic oligonucleotide
  Target: SCNA; (-) strand; PAM type: YTN; PAM sequence: TTG
gtttcttggtcatgaactct

SEQ ID NO: 51104 - DNA, 20 bp, Artificial Sequence
  Description of Artificial Sequence: Synthetic oligonucleotide
  Target: SCNA; (-) strand; PAM type: YTN; PAM sequence: TTT
ggtttcttggtcatgaactc

SEQ ID NO: 51105 - DNA, 20 bp, Artificial Sequence
  Description of Artificial Sequence: Synthetic oligonucleotide
  Target: SCNA; (-) strand; PAM type: YTN; PAM sequence: TTT
tggtttcttggtcatgaact

SEQ ID NO: 51106 - DNA, 20 bp, Artificial Sequence
  Description of Artificial Sequence: Synthetic oligonucleotide
  Target: SCNA; (-) strand; PAM type: YTN; PAM sequence: CTT
ttggtttcttggtcatgaac

SEQ ID NO: 51107 - DNA, 20 bp, Artificial Sequence
  Description of Artificial Sequence: Synthetic oligonucleotide
  Target: SCNA; (-) strand; PAM type: YTN; PAM sequence: TTG
cttttggtttcttggtcatg

SEQ ID NO: 51108 - DNA, 20 bp, Artificial Sequence
  Description of Artificial Sequence: Synthetic oligonucleotide
  Target: SCNA; (-) strand; PAM type: YTN; PAM sequence: TTT
gcttttggtttcttggtcat

SEQ ID NO: 51109 - DNA, 20 bp, Artificial Sequence
  Description of Artificial Sequence: Synthetic oligonucleotide
  Target: SCNA; (-) strand; PAM type: YTN; PAM sequence: TTG
catttgcttttggtttcttg

SEQ ID NO: 51110 - DNA, 20 bp, Artificial Sequence
  Description of Artificial Sequence: Synthetic oligonucleotide
  Target: SCNA; (-) strand; PAM type: YTN; PAM sequence: TTG
ttgcatttgcttttggtttc

SEQ ID NO: 51111 - DNA, 20 bp, Artificial Sequence
  Description of Artificial Sequence: Synthetic oligonucleotide
  Target: SCNA; (-) strand; PAM type: YTN; PAM sequence: TTG
ttgttgcatttgcttttggt

SEQ ID NO: 51112 - DNA, 20 bp, Artificial Sequence
  Description of Artificial Sequence: Synthetic oligonucleotide
  Target: SCNA; (-) strand; PAM type: YTN; PAM sequence: TTG
ttgttgttgcatttgctttt

SEQ ID NO: 51113 - DNA, 20 bp, Artificial Sequence
  Description of Artificial Sequence: Synthetic oligonucleotide
  Target: SCNA; (-) strand; PAM type: YTN; PAM sequence: TTT
gttgttgttgcatttgcttt

SEQ ID NO: 51114 - DNA, 20 bp, Artificial Sequence
  Description of Artificial Sequence: Synthetic oligonucleotide
  Target: SCNA; (-) strand; PAM type: YTN; PAM sequence: TTT
tgttgttgttgcatttgctt

SEQ ID NO: 51115 - DNA, 20 bp, Artificial Sequence
  Description of Artificial Sequence: Synthetic oligonucleotide
  Target: SCNA; (-) strand; PAM type: YTN; PAM sequence: TTT
ttgttgttgttgcatttgct

SEQ ID NO: 51116 - DNA, 20 bp, Artificial Sequence
  Description of Artificial Sequence: Synthetic oligonucleotide
  Target: SCNA; (-) strand; PAM type: YTN; PAM sequence: TTT
tttgttgttgttgcatttgc

SEQ ID NO: 51117 - DNA, 20 bp, Artificial Sequence
  Description of Artificial Sequence: Synthetic oligonucleotide
  Target: SCNA; (-) strand; PAM type: YTN; PAM sequence: CTT
ttttgttgttgttgcatttg

SEQ ID NO: 51118 - DNA, 20 bp, Artificial Sequence
  Description of Artificial Sequence: Synthetic oligonucleotide
  Target: SCNA; (-) strand; PAM type: YTN; PAM sequence: TTA
tcttttttgttgttgttgca

SEQ ID NO: 51119 - DNA, 20 bp, Artificial Sequence
  Description of Artificial Sequence: Synthetic oligonucleotide
  Target: SCNA; (-) strand; PAM type: YTN; PAM sequence: TTT
atcttttttgttgttgttgc

SEQ ID NO: 51120 - DNA, 20 bp, Artificial Sequence
  Description of Artificial Sequence: Synthetic oligonucleotide
  Target: SCNA; (-) strand; PAM type: YTN; PAM sequence: CTA
tttatcttttttgttgttgt

SEQ ID NO: 51121 - DNA, 20 bp, Artificial Sequence
  Description of Artificial Sequence: Synthetic oligonucleotide
  Target: SCNA; (-) strand; PAM type: YTN; PAM sequence: TTA
ggtcccatctatttatcttt

SEQ ID NO: 51122 - DNA, 20 bp, Artificial Sequence
  Description of Artificial Sequence: Synthetic oligonucleotide
  Target: SCNA; (-) strand; PAM type: YTN; PAM sequence: TTT
aggtcccatctatttatctt

SEQ ID NO: 51123 - DNA, 20 bp, Artificial Sequence
  Description of Artificial Sequence: Synthetic oligonucleotide
  Target: SCNA; (-) strand; PAM type: YTN; PAM sequence: TTT
taggtcccatctatttatct

SEQ ID NO: 51124 - DNA, 20 bp, Artificial Sequence
  Description of Artificial Sequence: Synthetic oligonucleotide
  Target: SCNA; (-) strand; PAM type: YTN; PAM sequence: TTA
tagttttaggtcccatctat

SEQ ID NO: 51125 - DNA, 20 bp, Artificial Sequence
  Description of Artificial Sequence: Synthetic oligonucleotide
  Target: SCNA; (-) strand; PAM type: YTN; PAM sequence: TTT
atagttttaggtcccatcta

SEQ ID NO: 51126 - DNA, 20 bp, Artificial Sequence
  Description of Artificial Sequence: Synthetic oligonucleotide
  Target: SCNA; (-) strand; PAM type: YTN; PAM sequence: CTT
tatagttttaggtcccatct

SEQ ID NO: 51127 - DNA, 20 bp, Artificial Sequence
  Description of Artificial Sequence: Synthetic oligonucleotide
  Target: SCNA; (-) strand; PAM type: YTN; PAM sequence: CTG
tgcagaagctttatagtttt

SEQ ID NO: 51128 - DNA, 20 bp, Artificial Sequence
  Description of Artificial Sequence: Synthetic oligonucleotide
  Target: SCNA; (-) strand; PAM type: YTN; PAM sequence: TTG
ctgtgcagaagctttatagt

SEQ ID NO: 51129 - DNA, 20 bp, Artificial Sequence
  Description of Artificial Sequence: Synthetic oligonucleotide
  Target: SCNA; (-) strand; PAM type: YTN; PAM sequence: TTT
gctgtgcagaagctttatag

SEQ ID NO: 51130 - DNA, 20 bp, Artificial Sequence
  Description of Artificial Sequence: Synthetic oligonucleotide
  Target: SCNA; (-) strand; PAM type: YTN; PAM sequence: TTT
tgctgtgcagaagctttata

SEQ ID NO: 51131 - DNA, 20 bp, Artificial Sequence
  Description of Artificial Sequence: Synthetic oligonucleotide
  Target: SCNA; (-) strand; PAM type: YTN; PAM sequence: CTT
ttgctgtgcagaagctttat

SEQ ID NO: 51132 - DNA, 20 bp, Artificial Sequence
  Description of Artificial Sequence: Synthetic oligonucleotide
  Target: SCNA; (-) strand; PAM type: YTN; PAM sequence: TTC
ttttgctgtgcagaagcttt

SEQ ID NO: 51133 - DNA, 20 bp, Artificial Sequence
  Description of Artificial Sequence: Synthetic oligonucleotide
  Target: SCNA; (-) strand; PAM type: YTN; PAM sequence: TTT
cttttgctgtgcagaagctt

SEQ ID NO: 51134 - DNA, 20 bp, Artificial Sequence
  Description of Artificial Sequence: Synthetic oligonucleotide
  Target: SCNA; (-) strand; PAM type: YTN; PAM sequence: TTA
tttcttttgctgtgcagaag

SEQ ID NO: 51135 - DNA, 20 bp, Artificial Sequence
  Description of Artificial Sequence: Synthetic oligonucleotide
  Target: SCNA; (-) strand; PAM type: YTN; PAM sequence: CTG
atgattatttcttttgctgt

SEQ ID NO: 51136 - DNA, 20 bp, Artificial Sequence
  Description of Artificial Sequence: Synthetic oligonucleotide
  Target: SCNA; (-) strand; PAM type: YTN; PAM sequence: CTC
tgatgattatttcttttgct

SEQ ID NO: 51137 - DNA, 20 bp, Artificial Sequence
  Description of Artificial Sequence: Synthetic oligonucleotide
  Target: SCNA; (-) strand; PAM type: YTN; PAM sequence: TTA
ctctgatgattatttctttt

SEQ ID NO: 51138 - DNA, 20 bp, Artificial Sequence
  Description of Artificial Sequence: Synthetic oligonucleotide
  Target: SCNA; (-) strand; PAM type: YTN; PAM sequence: TTT
actctgatgattatttcttt

SEQ ID NO: 51139 - DNA, 20 bp, Artificial Sequence
  Description of Artificial Sequence: Synthetic oligonucleotide
  Target: SCNA; (-) strand; PAM type: YTN; PAM sequence: CTG
tttactctgatgattatttc

SEQ ID NO: 51140 - DNA, 20 bp, Artificial Sequence
  Description of Artificial Sequence: Synthetic oligonucleotide
  Target: SCNA; (-) strand; PAM type: YTN; PAM sequence: TTG
tctgtttactctgatgatta

SEQ ID NO: 51141 - DNA, 20 bp, Artificial Sequence
  Description of Artificial Sequence: Synthetic oligonucleotide
  Target: SCNA; (-) strand; PAM type: YTN; PAM sequence: CTG
tgggttgtctgtttactctg

SEQ ID NO: 51142 - DNA, 20 bp, Artificial Sequence
  Description of Artificial Sequence: Synthetic oligonucleotide
  Target: SCNA; (-) strand; PAM type: YTN; PAM sequence: TTC
tgtgggttgtctgtttactc

SEQ ID NO: 51143 - DNA, 20 bp, Artificial Sequence
  Description of Artificial Sequence: Synthetic oligonucleotide
  Target: SCNA; (-) strand; PAM type: YTN; PAM sequence: CTC
ccattctgtgggttgtctgt

SEQ ID NO: 51144 - DNA, 20 bp, Artificial Sequence
  Description of Artificial Sequence: Synthetic oligonucleotide
  Target: SCNA; (-) strand; PAM type: YTN; PAM sequence: TTC
tcccattctgtgggttgtct

SEQ ID NO: 51145 - DNA, 20 bp, Artificial Sequence
  Description of Artificial Sequence: Synthetic oligonucleotide
  Target: SCNA; (-) strand; PAM type: YTN; PAM sequence: TTT
ctcccattctgtgggttgtc

SEQ ID NO: 51146 - DNA, 20 bp, Artificial Sequence
  Description of Artificial Sequence: Synthetic oligonucleotide
  Target: SCNA; (-) strand; PAM type: YTN; PAM sequence: TTG
cagatatttctcccattctg

SEQ ID NO: 51147 - DNA, 20 bp, Artificial Sequence
  Description of Artificial Sequence: Synthetic oligonucleotide
  Target: SCNA; (-) strand; PAM type: YTN; PAM sequence: TTT
gcagatatttctcccattct

SEQ ID NO: 51148 - DNA, 20 bp, Artificial Sequence
  Description of Artificial Sequence: Synthetic oligonucleotide
  Target: SCNA; (-) strand; PAM type: YTN; PAM sequence: TTG
tcagatggatagtttgcaga

SEQ ID NO: 51149 - DNA, 20 bp, Artificial Sequence
  Description of Artificial Sequence: Synthetic oligonucleotide
  Target: SCNA; (-) strand; PAM type: YTN; PAM sequence: TTT
gtcagatggatagtttgcag

SEQ ID NO: 51150 - DNA, 20 bp, Artificial Sequence
  Description of Artificial Sequence: Synthetic oligonucleotide
  Target: SCNA; (-) strand; PAM type: YTN; PAM sequence: CTT
tgtcagatggatagtttgca

SEQ ID NO: 51151 - DNA, 20 bp, Artificial Sequence
  Description of Artificial Sequence: Synthetic oligonucleotide
  Target: SCNA; (-) strand; PAM type: YTN; PAM sequence: TTA
gtcctttgtcagatggatag

SEQ ID NO: 51152 - DNA, 20 bp, Artificial Sequence
  Description of Artificial Sequence: Synthetic oligonucleotide
  Target: SCNA; (-) strand; PAM type: YTN; PAM sequence: CTG
gatattagtcctttgtcaga

SEQ ID NO: 51153 - DNA, 20 bp, Artificial Sequence
  Description of Artificial Sequence: Synthetic oligonucleotide
  Target: SCNA; (-) strand; PAM type: YTN; PAM sequence: TTC
tggatattagtcctttgtca

SEQ ID NO: 51154 - DNA, 20 bp, Artificial Sequence
  Description of Artificial Sequence: Synthetic oligonucleotide
  Target: SCNA; (-) strand; PAM type: YTN; PAM sequence: TTG
tagattctggatattagtcc

SEQ ID NO: 51155 - DNA, 20 bp, Artificial Sequence
  Description of Artificial Sequence: Synthetic oligonucleotide
  Target: SCNA; (-) strand; PAM type: YTN; PAM sequence: CTT
gtagattctggatattagtc

SEQ ID NO: 51156 - DNA, 20 bp, Artificial Sequence
  Description of Artificial Sequence: Synthetic oligonucleotide
  Target: SCNA; (-) strand; PAM type: YTN; PAM sequence: TTC
cttgtagattctggatatta

SEQ ID NO: 51157 - DNA, 20 bp, Artificial Sequence
  Description of Artificial Sequence: Synthetic oligonucleotide
  Target: SCNA; (-) strand; PAM type: YTN; PAM sequence: TTG
agttccttgtagattctgga

SEQ ID NO: 51158 - DNA, 20 bp, Artificial Sequence
  Description of Artificial Sequence: Synthetic oligonucleotide
  Target: SCNA; (-) strand; PAM type: YTN; PAM sequence: TTT
gagttccttgtagattctgg

SEQ ID NO: 51159 - DNA, 20 bp, Artificial Sequence
  Description of Artificial Sequence: Synthetic oligonucleotide
  Target: SCNA; (-) strand; PAM type: YTN; PAM sequence: TTG
tttgagttccttgtagattc

SEQ ID NO: 51160 - DNA, 20 bp, Artificial Sequence
  Description of Artificial Sequence: Synthetic oligonucleotide
  Target: SCNA; (-) strand; PAM type: YTN; PAM sequence: TTT
gtttgagttccttgtagatt

SEQ ID NO: 51161 - DNA, 20 bp, Artificial Sequence
  Description of Artificial Sequence: Synthetic oligonucleotide
  Target: SCNA; (-) strand; PAM type: YTN; PAM sequence: CTG
atttgtttgagttccttgta

SEQ ID NO: 51162 - DNA, 20 bp, Artificial Sequence
  Description of Artificial Sequence: Synthetic oligonucleotide
  Target: SCNA; (-) strand; PAM type: YTN; PAM sequence: TTA
ctgatttgtttgagttcctt

SEQ ID NO: 51163 - DNA, 20 bp, Artificial Sequence
  Description of Artificial Sequence: Synthetic oligonucleotide
  Target: SCNA; (-) strand; PAM type: YTN; PAM sequence: CTT
actgatttgtttgagttcct

SEQ ID NO: 51164 - DNA, 20 bp, Artificial Sequence
  Description of Artificial Sequence: Synthetic oligonucleotide
  Target: SCNA; (-) strand; PAM type: YTN; PAM sequence: TTC
ttactgatttgtttgagttc

SEQ ID NO: 51165 - DNA, 20 bp, Artificial Sequence
  Description of Artificial Sequence: Synthetic oligonucleotide
  Target: SCNA; (-) strand; PAM type: YTN; PAM sequence: TTT
cttactgatttgtttgagtt

SEQ ID NO: 51166 - DNA, 20 bp, Artificial Sequence
  Description of Artificial Sequence: Synthetic oligonucleotide
  Target: SCNA; (-) strand; PAM type: YTN; PAM sequence: TTT
tcttactgatttgtttgagt

SEQ ID NO: 51167 - DNA, 20 bp, Artificial Sequence
  Description of Artificial Sequence: Synthetic oligonucleotide
  Target: SCNA; (-) strand; PAM type: YTN; PAM sequence: TTT
ttcttactgatttgtttgag

SEQ ID NO: 51168 - DNA, 20 bp, Artificial Sequence
  Description of Artificial Sequence: Synthetic oligonucleotide
  Target: SCNA; (-) strand; PAM type: YTN; PAM sequence: TTT
tttcttactgatttgtttga

SEQ ID NO: 51169 - DNA, 20 bp, Artificial Sequence
  Description of Artificial Sequence: Synthetic oligonucleotide
  Target: SCNA; (-) strand; PAM type: YTN; PAM sequence: TTG
ttttttcttactgatttgtt

SEQ ID NO: 51170 - DNA, 20 bp, Artificial Sequence
  Description of Artificial Sequence: Synthetic oligonucleotide
  Target: SCNA; (-) strand; PAM type: YTN; PAM sequence: TTT
gttttttcttactgatttgt

SEQ ID NO: 51171 - DNA, 20 bp, Artificial Sequence
  Description of Artificial Sequence: Synthetic oligonucleotide
  Target: SCNA; (-) strand; PAM type: YTN; PAM sequence: TTA
tttgttttttcttactgatt

SEQ ID NO: 51172 - DNA, 20 bp, Artificial Sequence
  Description of Artificial Sequence: Synthetic oligonucleotide
  Target: SCNA; (-) strand; PAM type: YTN; PAM sequence: TTG
ataggattatttgttttttc

SEQ ID NO: 51173 - DNA, 20 bp, Artificial Sequence
  Description of Artificial Sequence: Synthetic oligonucleotide
  Target: SCNA; (-) strand; PAM type: YTN; PAM sequence: TTT
gataggattatttgtttttt

SEQ ID NO: 51174 - DNA, 20 bp, Artificial Sequence
  Description of Artificial Sequence: Synthetic oligonucleotide
  Target: SCNA; (-) strand; PAM type: YTN; PAM sequence: TTT
tgataggattatttgttttt

SEQ ID NO: 51175 - DNA, 20 bp, Artificial Sequence
  Description of Artificial Sequence: Synthetic oligonucleotide
  Target: SCNA; (-) strand; PAM type: YTN; PAM sequence: TTT
ttgataggattatttgtttt

SEQ ID NO: 51176 - DNA, 20 bp, Artificial Sequence
  Description of Artificial Sequence: Synthetic oligonucleotide
  Target: SCNA; (-) strand; PAM type: YTN; PAM sequence: CTT
tttgataggattatttgttt

SEQ ID NO: 51177 - DNA, 20 bp, Artificial Sequence
  Description of Artificial Sequence: Synthetic oligonucleotide
  Target: SCNA; (-) strand; PAM type: YTN; PAM sequence: TTA
gcccactttttgataggatt

SEQ ID NO: 51178 - DNA, 20 bp, Artificial Sequence
  Description of Artificial Sequence: Synthetic oligonucleotide
  Target: SCNA; (-) strand; PAM type: YTN; PAM sequence: CTT
agcccactttttgataggat

SEQ ID NO: 51179 - DNA, 20 bp, Artificial Sequence
  Description of Artificial Sequence: Synthetic oligonucleotide
  Target: SCNA; (-) strand; PAM type: YTN; PAM sequence: TTC
atgtccttagcccacttttt

SEQ ID NO: 51180 - DNA, 20 bp, Artificial Sequence
  Description of Artificial Sequence: Synthetic oligonucleotide
  Target: SCNA; (-) strand; PAM type: YTN; PAM sequence: CTA
ttcatgtccttagcccactt

SEQ ID NO: 51181 - DNA, 20 bp, Artificial Sequence
  Description of Artificial Sequence: Synthetic oligonucleotide
  Target: SCNA; (-) strand; PAM type: YTN; PAM sequence: TTG
tctattcatgtccttagccc

SEQ ID NO: 51182 - DNA, 20 bp, Artificial Sequence
  Description of Artificial Sequence: Synthetic oligonucleotide
  Target: SCNA; (-) strand; PAM type: YTN; PAM sequence: TTG
agaattgtctattcatgtcc

SEQ ID NO: 51183 - DNA, 20 bp, Artificial Sequence
  Description of Artificial Sequence: Synthetic oligonucleotide
  Target: SCNA; (-) strand; PAM type: YTN; PAM sequence: TTT
gagaattgtctattcatgtc

SEQ ID NO: 51184 - DNA, 20 bp, Artificial Sequence
  Description of Artificial Sequence: Synthetic oligonucleotide
  Target: SCNA; (-) strand; PAM type: YTN; PAM sequence: TTT
tgagaattgtctattcatgt

SEQ ID NO: 51185 - DNA, 20 bp, Artificial Sequence
  Description of Artificial Sequence: Synthetic oligonucleotide
  Target: SCNA; (-) strand; PAM type: YTN; PAM sequence: CTT
ttgagaattgtctattcatg

SEQ ID NO: 51186 - DNA, 20 bp, Artificial Sequence
  Description of Artificial Sequence: Synthetic oligonucleotide
  Target: SCNA; (-) strand; PAM type: YTN; PAM sequence: TTC
ttttgagaattgtctattca

SEQ ID NO: 51187 - DNA, 20 bp, Artificial Sequence
  Description of Artificial Sequence: Synthetic oligonucleotide
  Target: SCNA; (-) strand; PAM type: YTN; PAM sequence: CTT
cttttgagaattgtctattc

SEQ ID NO: 51188 - DNA, 20 bp, Artificial Sequence
  Description of Artificial Sequence: Synthetic oligonucleotide
  Target: SCNA; (-) strand; PAM type: YTN; PAM sequence: CTA
tcttcttttgagaattgtct

SEQ ID NO: 51189 - DNA, 20 bp, Artificial Sequence
  Description of Artificial Sequence: Synthetic oligonucleotide
  Target: SCNA; (-) strand; PAM type: YTN; PAM sequence: TTG
tctatcttcttttgagaatt

SEQ ID NO: 51190 - DNA, 20 bp, Artificial Sequence
  Description of Artificial Sequence: Synthetic oligonucleotide
  Target: SCNA; (-) strand; PAM type: YTN; PAM sequence: TTT
gtctatcttcttttgagaat

SEQ ID NO: 51191 - DNA, 20 bp, Artificial Sequence
  Description of Artificial Sequence: Synthetic oligonucleotide
  Target: SCNA; (-) strand; PAM type: YTN; PAM sequence: CTG
tttgtctatcttcttttgag

SEQ ID NO: 51192 - DNA, 20 bp, Artificial Sequence
  Description of Artificial Sequence: Synthetic oligonucleotide
  Target: SCNA; (-) strand; PAM type: YTN; PAM sequence: TTG
gctgtttgtctatcttcttt

SEQ ID NO: 51193 - DNA, 20 bp, Artificial Sequence
  Description of Artificial Sequence: Synthetic oligonucleotide
  Target: SCNA; (-) strand; PAM type: YTN; PAM sequence: TTG
ttggctgtttgtctatcttc

SEQ ID NO: 51194 - DNA, 20 bp, Artificial Sequence
  Description of Artificial Sequence: Synthetic oligonucleotide
  Target: SCNA; (-) strand; PAM type: YTN; PAM sequence: TTT
gttggctgtttgtctatctt

SEQ ID NO: 51195 - DNA, 20 bp, Artificial Sequence
  Description of Artificial Sequence: Synthetic oligonucleotide
  Target: SCNA; (-) strand; PAM type: YTN; PAM sequence: TTC
atatgtttgttggctgtttg

SEQ ID NO: 51196 - DNA, 20 bp, Artificial Sequence
  Description of Artificial Sequence: Synthetic oligonucleotide
  Target: SCNA; (-) strand; PAM type: YTN; PAM sequence: TTT
catatgtttgttggctgttt

SEQ ID NO: 51197 - DNA, 20 bp, Artificial Sequence
  Description of Artificial Sequence: Synthetic oligonucleotide
  Target: SCNA; (-) strand; PAM type: YTN; PAM sequence: TTT
tcatatgtttgttggctgtt

SEQ ID NO: 51198 - DNA, 20 bp, Artificial Sequence
  Description of Artificial Sequence: Synthetic oligonucleotide
  Target: SCNA; (-) strand; PAM type: YTN; PAM sequence: TTT
ttcatatgtttgttggctgt

SEQ ID NO: 51199 - DNA, 20 bp, Artificial Sequence
  Description of Artificial Sequence: Synthetic oligonucleotide
  Target: SCNA; (-) strand; PAM type: YTN; PAM sequence: TTT
tttcatatgtttgttggctg

SEQ ID NO: 51200 - DNA, 20 bp, Artificial Sequence
  Description of Artificial Sequence: Synthetic oligonucleotide
  Target: SCNA; (-) strand; PAM type: YTN; PAM sequence: TTG
agcattttttcatatgtttg

SEQ ID NO: 51201 - DNA, 20 bp, Artificial Sequence
  Description of Artificial Sequence: Synthetic oligonucleotide
  Target: SCNA; (-) strand; PAM type: YTN; PAM sequence: TTA
aagatgttgagcattttttc

SEQ ID NO: 51202 - DNA, 20 bp, Artificial Sequence
  Description of Artificial Sequence: Synthetic oligonucleotide
  Target: SCNA; (-) strand; PAM type: YTN; PAM sequence: CTG
gtcattaaagatgttgagca

SEQ ID NO: 51203 - DNA, 20 bp, Artificial Sequence
  Description of Artificial Sequence: Synthetic oligonucleotide
  Target: SCNA; (-) strand; PAM type: YTN; PAM sequence: TTC
cctggtcattaaagatgttg

SEQ ID NO: 51204 - DNA, 20 bp, Artificial Sequence
  Description of Artificial Sequence: Synthetic oligonucleotide
  Target: SCNA; (-) strand; PAM type: YTN; PAM sequence: TTT
ccctggtcattaaagatgtt

SEQ ID NO: 51205 - DNA, 20 bp, Artificial Sequence
  Description of Artificial Sequence: Synthetic oligonucleotide
  Target: SCNA; (-) strand; PAM type: YTN; PAM sequence: TTG
catttccctggtcattaaag

SEQ ID NO: 51206 - DNA, 20 bp, Artificial Sequence
  Description of Artificial Sequence: Synthetic oligonucleotide
  Target: SCNA; (-) strand; PAM type: YTN; PAM sequence: TTT
gcatttccctggtcattaaa

SEQ ID NO: 51207 - DNA, 20 bp, Artificial Sequence
  Description of Artificial Sequence: Synthetic oligonucleotide
  Target: SCNA; (-) strand; PAM type: YTN; PAM sequence: TTG
atttgcatttccctggtcat

SEQ ID NO: 51208 - DNA, 20 bp, Artificial Sequence
  Description of Artificial Sequence: Synthetic oligonucleotide
  Target: SCNA; (-) strand; PAM type: YTN; PAM sequence: TTT
gatttgcatttccctggtca

SEQ ID NO: 51209 - DNA, 20 bp, Artificial Sequence
  Description of Artificial Sequence: Synthetic oligonucleotide
  Target: SCNA; (-) strand; PAM type: YTN; PAM sequence: TTT
tgatttgcatttccctggtc

SEQ ID NO: 51210 - DNA, 20 bp, Artificial Sequence
  Description of Artificial Sequence: Synthetic oligonucleotide
  Target: SCNA; (-) strand; PAM type: YTN; PAM sequence: TTG
tggttttgatttgcatttcc

SEQ ID NO: 51211 - DNA, 20 bp, Artificial Sequence
  Description of Artificial Sequence: Synthetic oligonucleotide
  Target: SCNA; (-) strand; PAM type: YTN; PAM sequence: TTG
caggagtaaggtggtatcac

SEQ ID NO: 51212 - DNA, 20 bp, Artificial Sequence
  Description of Artificial Sequence: Synthetic oligonucleotide
  Target: SCNA; (-) strand; PAM type: YTN; PAM sequence: CTT
gcaggagtaaggtggtatca

SEQ ID NO: 51213 - DNA, 20 bp, Artificial Sequence
  Description of Artificial Sequence: Synthetic oligonucleotide
  Target: SCNA; (-) strand; PAM type: YTN; PAM sequence: TTC
ttgcaggagtaaggtggtat

SEQ ID NO: 51214 - DNA, 20 bp, Artificial Sequence
  Description of Artificial Sequence: Synthetic oligonucleotide
  Target: SCNA; (-) strand; PAM type: YTN; PAM sequence: TTA
tggcaattcttgcaggagta

SEQ ID NO: 51215 - DNA, 20 bp, Artificial Sequence
  Description of Artificial Sequence: Synthetic oligonucleotide
  Target: SCNA; (-) strand; PAM type: YTN; PAM sequence: TTA
attatggcaattcttgcagg

SEQ ID NO: 51216 - DNA, 20 bp, Artificial Sequence
  Description of Artificial Sequence: Synthetic oligonucleotide
  Target: SCNA; (-) strand; PAM type: YTN; PAM sequence: TTT
aattatggcaattcttgcag

SEQ ID NO: 51217 - DNA, 20 bp, Artificial Sequence
  Description of Artificial Sequence: Synthetic oligonucleotide
  Target: SCNA; (-) strand; PAM type: YTN; PAM sequence: TTT
taattatggcaattcttgca

SEQ ID NO: 51218 - DNA, 20 bp, Artificial Sequence
  Description of Artificial Sequence: Synthetic oligonucleotide
  Target: SCNA; (-) strand; PAM type: YTN; PAM sequence: TTT
ttaattatggcaattcttgc

SEQ ID NO: 51219 - DNA, 20 bp, Artificial Sequence
  Description of Artificial Sequence: Synthetic oligonucleotide
  Target: SCNA; (-) strand; PAM type: YTN; PAM sequence: TTT
tttaattatggcaattcttg

SEQ ID NO: 51220 - DNA, 20 bp, Artificial Sequence
  Description of Artificial Sequence: Synthetic oligonucleotide
  Target: SCNA; (-) strand; PAM type: YTN; PAM sequence: TTA
ttttttaattatggcaattc

SEQ ID NO: 51221 - DNA, 20 bp, Artificial Sequence
  Description of Artificial Sequence: Synthetic oligonucleotide
  Target: SCNA; (-) strand; PAM type: YTN; PAM sequence: TTT
attttttaattatggcaatt

SEQ ID NO: 51222 - DNA, 20 bp, Artificial Sequence
  Description of Artificial Sequence: Synthetic oligonucleotide
  Target: SCNA; (-) strand; PAM type: YTN; PAM sequence: TTT
tattttttaattatggcaat

SEQ ID NO: 51223 - DNA, 20 bp, Artificial Sequence
  Description of Artificial Sequence: Synthetic oligonucleotide
  Target: SCNA; (-) strand; PAM type: YTN; PAM sequence: TTT
ttattttttaattatggcaa

SEQ ID NO: 51224 - DNA, 20 bp, Artificial Sequence
  Description of Artificial Sequence: Synthetic oligonucleotide
  Target: SCNA; (-) strand; PAM type: YTN; PAM sequence: TTT
tttattttttaattatggca

SEQ ID NO: 51225 - DNA, 20 bp, Artificial Sequence
  Description of Artificial Sequence: Synthetic oligonucleotide
  Target: SCNA; (-) strand; PAM type: YTN; PAM sequence: TTT
ttttattttttaattatggc

SEQ ID NO: 51226 - DNA, 20 bp, Artificial Sequence
  Description of Artificial Sequence: Synthetic oligonucleotide
  Target: SCNA; (-) strand; PAM type: YTN; PAM sequence: TTA
tttttttattttttaattat

SEQ ID NO: 51227 - DNA, 20 bp, Artificial Sequence
  Description of Artificial Sequence: Synthetic oligonucleotide
  Target: SCNA; (-) strand; PAM type: YTN; PAM sequence: TTT
atttttttattttttaatta

SEQ ID NO: 51228 - DNA, 20 bp, Artificial Sequence
  Description of Artificial Sequence: Synthetic oligonucleotide
  Target: SCNA; (-) strand; PAM type: YTN; PAM sequence: TTC
catgccaacgtttatttttt

SEQ ID NO: 51229 - DNA, 20 bp, Artificial Sequence
  Description of Artificial Sequence: Synthetic oligonucleotide
  Target: SCNA; (-) strand; PAM type: YTN; PAM sequence: CTT
ccatgccaacgtttattttt

SEQ ID NO: 51230 - DNA, 20 bp, Artificial Sequence
  Description of Artificial Sequence: Synthetic oligonucleotide
  Target: SCNA; (-) strand; PAM type: YTN; PAM sequence: TTA
ccacttccatgccaacgttt

SEQ ID NO: 51231 - DNA, 20 bp, Artificial Sequence
  Description of Artificial Sequence: Synthetic oligonucleotide
  Target: SCNA; (-) strand; PAM type: YTN; PAM sequence: TTT
accacttccatgccaacgtt

SEQ ID NO: 51232 - DNA, 20 bp, Artificial Sequence
  Description of Artificial Sequence: Synthetic oligonucleotide
  Target: SCNA; (-) strand; PAM type: YTN; PAM sequence: TTT
taccacttccatgccaacgt

SEQ ID NO: 51233 - DNA, 20 bp, Artificial Sequence
  Description of Artificial Sequence: Synthetic oligonucleotide
  Target: SCNA; (-) strand; PAM type: YTN; PAM sequence: TTT
ttaccacttccatgccaacg

SEQ ID NO: 51234 - DNA, 20 bp, Artificial Sequence
  Description of Artificial Sequence: Synthetic oligonucleotide
  Target: SCNA; (-) strand; PAM type: YTN; PAM sequence: CTT
tttaccacttccatgccaac

SEQ ID NO: 51235 - DNA, 20 bp, Artificial Sequence
  Description of Artificial Sequence: Synthetic oligonucleotide
  Target: SCNA; (-) strand; PAM type: YTN; PAM sequence: TTC
cctttttaccacttccatgc

SEQ ID NO: 51236 - DNA, 20 bp, Artificial Sequence
  Description of Artificial Sequence: Synthetic oligonucleotide
  Target: SCNA; (-) strand; PAM type: YTN; PAM sequence: CTA
ccagcagtgtaaaaaaatgt

SEQ ID NO: 51237 - DNA, 20 bp, Artificial Sequence
  Description of Artificial Sequence: Synthetic oligonucleotide
  Target: SCNA; (-) strand; PAM type: YTN; PAM sequence: TTC
ctaccagcagtgtaaaaaaa

SEQ ID NO: 51238 - DNA, 20 bp, Artificial Sequence
  Description of Artificial Sequence: Synthetic oligonucleotide
  Target: SCNA; (-) strand; PAM type: YTN; PAM sequence: TTA
cattcctaccagcagtgtaa

SEQ ID NO: 51239 - DNA, 20 bp, Artificial Sequence
  Description of Artificial Sequence: Synthetic oligonucleotide
  Target: SCNA; (-) strand; PAM type: YTN; PAM sequence: TTT
acattcctaccagcagtgta

SEQ ID NO: 51240 - DNA, 20 bp, Artificial Sequence
  Description of Artificial Sequence: Synthetic oligonucleotide
  Target: SCNA; (-) strand; PAM type: YTN; PAM sequence: CTA
gtttacattcctaccagcag

SEQ ID NO: 51241 - DNA, 20 bp, Artificial Sequence
  Description of Artificial Sequence: Synthetic oligonucleotide
  Target: SCNA; (-) strand; PAM type: YTN; PAM sequence: TTG
tactagtttacattcctacc

SEQ ID NO: 51242 - DNA, 20 bp, Artificial Sequence
  Description of Artificial Sequence: Synthetic oligonucleotide
  Target: SCNA; (-) strand; PAM type: YTN; PAM sequence: TTC
catggtggttgtactagttt

SEQ ID NO: 51243 - DNA, 20 bp, Artificial Sequence
  Description of Artificial Sequence: Synthetic oligonucleotide
  Target: SCNA; (-) strand; PAM type: YTN; PAM sequence: TTT
ccatggtggttgtactagtt

SEQ ID NO: 51244 - DNA, 20 bp, Artificial Sequence
  Description of Artificial Sequence: Synthetic oligonucleotide
  Target: SCNA; (-) strand; PAM type: YTN; PAM sequence: TTT
tccatggtggttgtactagt

SEQ ID NO: 51245 - DNA, 20 bp, Artificial Sequence
  Description of Artificial Sequence: Synthetic oligonucleotide
  Target: SCNA; (-) strand; PAM type: YTN; PAM sequence: CTT
ttccatggtggttgtactag

SEQ ID NO: 51246 - DNA, 20 bp, Artificial Sequence
  Description of Artificial Sequence: Synthetic oligonucleotide
  Target: SCNA; (-) strand; PAM type: YTN; PAM sequence: CTC
cataacttttccatggtggt

SEQ ID NO: 51247 - DNA, 20 bp, Artificial Sequence
  Description of Artificial Sequence: Synthetic oligonucleotide
  Target: SCNA; (-) strand; PAM type: YTN; PAM sequence: TTA
aggaatctccataacttttc

SEQ ID NO: 51248 - DNA, 20 bp, Artificial Sequence
  Description of Artificial Sequence: Synthetic oligonucleotide
  Target: SCNA; (-) strand; PAM type: YTN; PAM sequence: TTT
aaggaatctccataactttt

SEQ ID NO: 51249 - DNA, 20 bp, Artificial Sequence
  Description of Artificial Sequence: Synthetic oligonucleotide
  Target: SCNA; (-) strand; PAM type: YTN; PAM sequence: CTT
taaggaatctccataacttt

SEQ ID NO: 51250 - DNA, 20 bp, Artificial Sequence
  Description of Artificial Sequence: Synthetic oligonucleotide
  Target: SCNA; (-) strand; PAM type: YTN; PAM sequence: TTC
tttaaggaatctccataact

SEQ ID NO: 51251 - DNA, 20 bp, Artificial Sequence
  Description of Artificial Sequence: Synthetic oligonucleotide
  Target: SCNA; (-) strand; PAM type: YTN; PAM sequence: TTA
gttctttaaggaatctccat

SEQ ID NO: 51252 - DNA, 20 bp, Artificial Sequence
  Description of Artificial Sequence: Synthetic oligonucleotide
  Target: SCNA; (-) strand; PAM type: YTN; PAM sequence: TTT
agttctttaaggaatctcca

SEQ ID NO: 51253 - DNA, 20 bp, Artificial Sequence
  Description of Artificial Sequence: Synthetic oligonucleotide
  Target: SCNA; (-) strand; PAM type: YTN; PAM sequence: TTT
tagttctttaaggaatctcc

SEQ ID NO: 51254 - DNA, 20 bp, Artificial Sequence
  Description of Artificial Sequence: Synthetic oligonucleotide
  Target: SCNA; (-) strand; PAM type: YTN; PAM sequence: CTT
ttagttctttaaggaatctc

SEQ ID NO: 51255 - DNA, 20 bp, Artificial Sequence
  Description of Artificial Sequence: Synthetic oligonucleotide
  Target: SCNA; (-) strand; PAM type: YTN; PAM sequence: CTA
cttttagttctttaaggaat

SEQ ID NO: 51256 - DNA, 20 bp, Artificial Sequence
  Description of Artificial Sequence: Synthetic oligonucleotide
  Target: SCNA; (-) strand; PAM type: YTN; PAM sequence: TTC
tacttttagttctttaagga

SEQ ID NO: 51257 - DNA, 20 bp, Artificial Sequence
  Description of Artificial Sequence: Synthetic oligonucleotide
  Target: SCNA; (-) strand; PAM type: YTN; PAM sequence: TTG
ttctacttttagttctttaa

SEQ ID NO: 51258 - DNA, 20 bp, Artificial Sequence
  Description of Artificial Sequence: Synthetic oligonucleotide
  Target: SCNA; (-) strand; PAM type: YTN; PAM sequence: CTG
gaacaaatgattgttctact

SEQ ID NO: 51259 - DNA, 20 bp, Artificial Sequence
  Description of Artificial Sequence: Synthetic oligonucleotide
  Target: SCNA; (-) strand; PAM type: YTN; PAM sequence: CTA
ggagtgggatcgctggaaca

SEQ ID NO: 51260 - DNA, 20 bp, Artificial Sequence
  Description of Artificial Sequence: Synthetic oligonucleotide
  Target: SCNA; (-) strand; PAM type: YTN; PAM sequence: CTG
ggtagatacctaggagtggg

SEQ ID NO: 51261 - DNA, 20 bp, Artificial Sequence
  Description of Artificial Sequence: Synthetic oligonucleotide
  Target: SCNA; (-) strand; PAM type: YTN; PAM sequence: CTC
tgggtagatacctaggagtg

SEQ ID NO: 51262 - DNA, 20 bp, Artificial Sequence
  Description of Artificial Sequence: Synthetic oligonucleotide
  Target: SCNA; (-) strand; PAM type: YTN; PAM sequence: TTC
ctctgggtagatacctagga

SEQ ID NO: 51263 - DNA, 20 bp, Artificial Sequence
  Description of Artificial Sequence: Synthetic oligonucleotide
  Target: SCNA; (-) strand; PAM type: YTN; PAM sequence: TTT
cctctgggtagatacctagg

SEQ ID NO: 51264 - DNA, 20 bp, Artificial Sequence
  Description of Artificial Sequence: Synthetic oligonucleotide
  Target: SCNA; (-) strand; PAM type: YTN; PAM sequence: TTT
tcctctgggtagatacctag

SEQ ID NO: 51265 - DNA, 20 bp, Artificial Sequence
  Description of Artificial Sequence: Synthetic oligonucleotide
  Target: SCNA; (-) strand; PAM type: YTN; PAM sequence: CTT
ttcctctgggtagataccta

SEQ ID NO: 51266 - DNA, 20 bp, Artificial Sequence
  Description of Artificial Sequence: Synthetic oligonucleotide
  Target: SCNA; (-) strand; PAM type: YTN; PAM sequence: TTC
ttttcctctgggtagatacc

SEQ ID NO: 51267 - DNA, 20 bp, Artificial Sequence
  Description of Artificial Sequence: Synthetic oligonucleotide
  Target: SCNA; (-) strand; PAM type: YTN; PAM sequence: CTT
cttttcctctgggtagatac

SEQ ID NO: 51268 - DNA, 20 bp, Artificial Sequence
  Description of Artificial Sequence: Synthetic oligonucleotide
  Target: SCNA; (-) strand; PAM type: YTN; PAM sequence: TTC
atataatgacttcttttcct

SEQ ID NO: 51269 - DNA, 20 bp, Artificial Sequence
  Description of Artificial Sequence: Synthetic oligonucleotide
  Target: SCNA; (-) strand; PAM type: YTN; PAM sequence: TTT
catataatgacttcttttcc

SEQ ID NO: 51270 - DNA, 20 bp, Artificial Sequence
  Description of Artificial Sequence: Synthetic oligonucleotide
  Target: SCNA; (-) strand; PAM type: YTN; PAM sequence: TTT
tcatataatgacttcttttc

SEQ ID NO: 51271 - DNA, 20 bp, Artificial Sequence
  Description of Artificial Sequence: Synthetic oligonucleotide
  Target: SCNA; (-) strand; PAM type: YTN; PAM sequence: TTT
ttcatataatgacttctttt

SEQ ID NO: 51272 - DNA, 20 bp, Artificial Sequence
  Description of Artificial Sequence: Synthetic oligonucleotide
  Target: SCNA; (-) strand; PAM type: YTN; PAM sequence: CTT
tttcatataatgacttcttt

SEQ ID NO: 51273 - DNA, 20 bp, Artificial Sequence
  Description of Artificial Sequence: Synthetic oligonucleotide
  Target: SCNA; (-) strand; PAM type: YTN; PAM sequence: CTA
taaacatgcatgtgcaagtg

SEQ ID NO: 51274 - DNA, 20 bp, Artificial Sequence
  Description of Artificial Sequence: Synthetic oligonucleotide
  Target: SCNA; (-) strand; PAM type: YTN; PAM sequence: TTG
tgcagctataaacatgcatg

SEQ ID NO: 51275 - DNA, 20 bp, Artificial Sequence
  Description of Artificial Sequence: Synthetic oligonucleotide
  Target: SCNA; (-) strand; PAM type: YTN; PAM sequence: TTG
tgaattgtgcagctataaac

SEQ ID NO: 51276 - DNA, 20 bp, Artificial Sequence
  Description of Artificial Sequence: Synthetic oligonucleotide
  Target: SCNA; (-) strand; PAM type: YTN; PAM sequence: TTG
caattgtgaattgtgcagct

SEQ ID NO: 51277 - DNA, 20 bp, Artificial Sequence
  Description of Artificial Sequence: Synthetic oligonucleotide
  Target: SCNA; (-) strand; PAM type: YTN; PAM sequence: TTT
gcaattgtgaattgtgcagc

SEQ ID NO: 51278 - DNA, 20 bp, Artificial Sequence
  Description of Artificial Sequence: Synthetic oligonucleotide
  Target: SCNA; (-) strand; PAM type: YTN; PAM sequence: TTT
tgcaattgtgaattgtgcag

SEQ ID NO: 51279 - DNA, 20 bp, Artificial Sequence
  Description of Artificial Sequence: Synthetic oligonucleotide
  Target: SCNA; (-) strand; PAM type: YTN; PAM sequence: TTT
ttgcaattgtgaattgtgca

SEQ ID NO: 51280 - DNA, 20 bp, Artificial Sequence
  Description of Artificial Sequence: Synthetic oligonucleotide
  Target: SCNA; (-) strand; PAM type: YTN; PAM sequence: TTC
catatttttgcaattgtgaa

SEQ ID NO: 51281 - DNA, 20 bp, Artificial Sequence
  Description of Artificial Sequence: Synthetic oligonucleotide
  Target: SCNA; (-) strand; PAM type: YTN; PAM sequence: CTG
gttccatatttttgcaattg

SEQ ID NO: 51282 - DNA, 20 bp, Artificial Sequence
  Description of Artificial Sequence: Synthetic oligonucleotide
  Target: SCNA; (-) strand; PAM type: YTN; PAM sequence: TTA
ggctggttccatatttttgc

SEQ ID NO: 51283 - DNA, 20 bp, Artificial Sequence
  Description of Artificial Sequence: Synthetic oligonucleotide
  Target: SCNA; (-) strand; PAM type: YTN; PAM sequence: TTT
aggctggttccatatttttg

SEQ ID NO: 51284 - DNA, 20 bp, Artificial Sequence
  Description of Artificial Sequence: Synthetic oligonucleotide
  Target: SCNA; (-) strand; PAM type: YTN; PAM sequence: TTG
atgggtatttaggctggttc

SEQ ID NO: 51285 - DNA, 20 bp, Artificial Sequence
  Description of Artificial Sequence: Synthetic oligonucleotide
  Target: SCNA; (-) strand; PAM type: YTN; PAM sequence: TTG
gttgatgggtatttaggctg

SEQ ID NO: 51286 - DNA, 20 bp, Artificial Sequence
  Description of Artificial Sequence: Synthetic oligonucleotide
  Target: SCNA; (-) strand; PAM type: YTN; PAM sequence: CTC
attggttgatgggtatttag

SEQ ID NO: 51287 - DNA, 20 bp, Artificial Sequence
  Description of Artificial Sequence: Synthetic oligonucleotide
  Target: SCNA; (-) strand; PAM type: YTN; PAM sequence: TTA
tccactcattggttgatggg

SEQ ID NO: 51288 - DNA, 20 bp, Artificial Sequence
  Description of Artificial Sequence: Synthetic oligonucleotide
  Target: SCNA; (-) strand; PAM type: YTN; PAM sequence: TTT
atccactcattggttgatgg

SEQ ID NO: 51289 - DNA, 20 bp, Artificial Sequence
  Description of Artificial Sequence: Synthetic oligonucleotide
  Target: SCNA; (-) strand; PAM type: YTN; PAM sequence: CTT
tatccactcattggttgatg

SEQ ID NO: 51290 - DNA, 20 bp, Artificial Sequence
  Description of Artificial Sequence: Synthetic oligonucleotide
  Target: SCNA; (-) strand; PAM type: YTN; PAM sequence: TTC
tttatccactcattggttga

SEQ ID NO: 51291 - DNA, 20 bp, Artificial Sequence
  Description of Artificial Sequence: Synthetic oligonucleotide
  Target: SCNA; (-) strand; PAM type: YTN; PAM sequence: TTT
ctttatccactcattggttg

SEQ ID NO: 51292 - DNA, 20 bp, Artificial Sequence
  Description of Artificial Sequence: Synthetic oligonucleotide
  Target: SCNA; (-) strand; PAM type: YTN; PAM sequence: TTT
tctttatccactcattggtt

SEQ ID NO: 51293 - DNA, 20 bp, Artificial Sequence
  Description of Artificial Sequence: Synthetic oligonucleotide
  Target: SCNA; (-) strand; PAM type: YTN; PAM sequence: TTA
tatatatatgtaaatatatc

SEQ ID NO: 51294 - DNA, 20 bp, Artificial Sequence
  Description of Artificial Sequence: Synthetic oligonucleotide
  Target: SCNA; (-) strand; PAM type: YTN; PAM sequence: TTT
atatatatatgtaaatatat

SEQ ID NO: 51295 - DNA, 20 bp, Artificial Sequence
  Description of Artificial Sequence: Synthetic oligonucleotide
  Target: SCNA; (-) strand; PAM type: YTN; PAM sequence: CTT
tatatatatatgtaaatata

SEQ ID NO: 51296 - DNA, 20 bp, Artificial Sequence
  Description of Artificial Sequence: Synthetic oligonucleotide
  Target: SCNA; (-) strand; PAM type: YTN; PAM sequence: CTA
tgctttatatatatatgtaa

SEQ ID NO: 51297 - DNA, 20 bp, Artificial Sequence
  Description of Artificial Sequence: Synthetic oligonucleotide
  Target: SCNA; (-) strand; PAM type: YTN; PAM sequence: TTC
catagcatccacacacaccc

SEQ ID NO: 51298 - DNA, 20 bp, Artificial Sequence
  Description of Artificial Sequence: Synthetic oligonucleotide
  Target: SCNA; (-) strand; PAM type: YTN; PAM sequence: CTG
agtagtattccatagcatcc

SEQ ID NO: 51299 - DNA, 20 bp, Artificial Sequence
  Description of Artificial Sequence: Synthetic oligonucleotide
  Target: SCNA; (-) strand; PAM type: YTN; PAM sequence: TTA
tggctgagtagtattccata

SEQ ID NO: 51300 - DNA, 20 bp, Artificial Sequence
  Description of Artificial Sequence: Synthetic oligonucleotide
  Target: SCNA; (-) strand; PAM type: YTN; PAM sequence: TTT
atggctgagtagtattccat

SEQ ID NO: 51301 - DNA, 20 bp, Artificial Sequence
  Description of Artificial Sequence: Synthetic oligonucleotide
  Target: SCNA; (-) strand; PAM type: YTN; PAM sequence: TTT
tatggctgagtagtattcca

SEQ ID NO: 51302 - DNA, 20 bp, Artificial Sequence
  Description of Artificial Sequence: Synthetic oligonucleotide
  Target: SCNA; (-) strand; PAM type: YTN; PAM sequence: TTT
ttatggctgagtagtattcc

SEQ ID NO: 51303 - DNA, 20 bp, Artificial Sequence
  Description of Artificial Sequence: Synthetic oligonucleotide
  Target: SCNA; (-) strand; PAM type: YTN; PAM sequence: CTT
tttatggctgagtagtattc

SEQ ID NO: 51304 - DNA, 20 bp, Artificial Sequence
  Description of Artificial Sequence: Synthetic oligonucleotide
  Target: SCNA; (-) strand; PAM type: YTN; PAM sequence: TTC
ctttttatggctgagtagta

SEQ ID NO: 51305 - DNA, 20 bp, Artificial Sequence
  Description of Artificial Sequence: Synthetic oligonucleotide
  Target: SCNA; (-) strand; PAM type: YTN; PAM sequence: TTG
ttcctttttatggctgagta

SEQ ID NO: 51306 - DNA, 20 bp, Artificial Sequence
  Description of Artificial Sequence: Synthetic oligonucleotide
  Target: SCNA; (-) strand; PAM type: YTN; PAM sequence: TTT
gttcctttttatggctgagt

SEQ ID NO: 51307 - DNA, 20 bp, Artificial Sequence
  Description of Artificial Sequence: Synthetic oligonucleotide
  Target: SCNA; (-) strand; PAM type: YTN; PAM sequence: TTT
tgttcctttttatggctgag

SEQ ID NO: 51308 - DNA, 20 bp, Artificial Sequence
  Description of Artificial Sequence: Synthetic oligonucleotide
  Target: SCNA; (-) strand; PAM type: YTN; PAM sequence: TTA
ttttgttcctttttatggct

SEQ ID NO: 51309 - DNA, 20 bp, Artificial Sequence
  Description of Artificial Sequence: Synthetic oligonucleotide
  Target: SCNA; (-) strand; PAM type: YTN; PAM sequence: CTA
caaatgccattattttgttc

SEQ ID NO: 51310 - DNA, 20 bp, Artificial Sequence
  Description of Artificial Sequence: Synthetic oligonucleotide
  Target: SCNA; (-) strand; PAM type: YTN; PAM sequence: CTA
cgtagctacaaatgccatta

SEQ ID NO: 51311 - DNA, 20 bp, Artificial Sequence
  Description of Artificial Sequence: Synthetic oligonucleotide
  Target: SCNA; (-) strand; PAM type: YTN; PAM sequence: CTA
tctacgtagctacaaatgcc

SEQ ID NO: 51312 - DNA, 20 bp, Artificial Sequence
  Description of Artificial Sequence: Synthetic oligonucleotide
  Target: SCNA; (-) strand; PAM type: YTN; PAM sequence: CTC
tatctacgtagctacaaatg

SEQ ID NO: 51313 - DNA, 20 bp, Artificial Sequence
  Description of Artificial Sequence: Synthetic oligonucleotide
  Target: SCNA; (-) strand; PAM type: YTN; PAM sequence: CTC
caactctatctacgtagcta

SEQ ID NO: 51314 - DNA, 20 bp, Artificial Sequence
  Description of Artificial Sequence: Synthetic oligonucleotide
  Target: SCNA; (-) strand; PAM type: YTN; PAM sequence: TTA
gaataatggtctccaactct

SEQ ID NO: 51315 - DNA, 20 bp, Artificial Sequence
  Description of Artificial Sequence: Synthetic oligonucleotide
  Target: SCNA; (-) strand; PAM type: YTN; PAM sequence: CTT
agaataatggtctccaactc

SEQ ID NO: 51316 - DNA, 20 bp, Artificial Sequence
  Description of Artificial Sequence: Synthetic oligonucleotide
  Target: SCNA; (-) strand; PAM type: YTN; PAM sequence: TTC
acttagaataatggtctcca

SEQ ID NO: 51317 - DNA, 20 bp, Artificial Sequence
  Description of Artificial Sequence: Synthetic oligonucleotide
  Target: SCNA; (-) strand; PAM type: YTN; PAM sequence: CTT
cacttagaataatggtctcc

SEQ ID NO: 51318 - DNA, 20 bp, Artificial Sequence
  Description of Artificial Sequence: Synthetic oligonucleotide
  Target: SCNA; (-) strand; PAM type: YTN; PAM sequence: TTA
cttcacttagaataatggtc

SEQ ID NO: 51319 - DNA, 20 bp, Artificial Sequence
  Description of Artificial Sequence: Synthetic oligonucleotide
  Target: SCNA; (-) strand; PAM type: YTN; PAM sequence: CTG
agttacttcacttagaataa

SEQ ID NO: 51320 - DNA, 20 bp, Artificial Sequence
  Description of Artificial Sequence: Synthetic oligonucleotide
  Target: SCNA; (-) strand; PAM type: YTN; PAM sequence: CTC
ctgagttacttcacttagaa

SEQ ID NO: 51321 - DNA, 20 bp, Artificial Sequence
  Description of Artificial Sequence: Synthetic oligonucleotide
  Target: SCNA; (-) strand; PAM type: YTN; PAM sequence: TTC
cactcctgagttacttcact

SEQ ID NO: 51322 - DNA, 20 bp, Artificial Sequence
  Description of Artificial Sequence: Synthetic oligonucleotide
  Target: SCNA; (-) strand; PAM type: YTN; PAM sequence: TTT
ccactcctgagttacttcac

SEQ ID NO: 51323 - DNA, 20 bp, Artificial Sequence
  Description of Artificial Sequence: Synthetic oligonucleotide
  Target: SCNA; (-) strand; PAM type: YTN; PAM sequence: TTT
tccactcctgagttacttca

SEQ ID NO: 51324 - DNA, 20 bp, Artificial Sequence
  Description of Artificial Sequence: Synthetic oligonucleotide
  Target: SCNA; (-) strand; PAM type: YTN; PAM sequence: TTG
gttttccactcctgagttac

SEQ ID NO: 51325 - DNA, 20 bp, Artificial Sequence
  Description of Artificial Sequence: Synthetic oligonucleotide
  Target: SCNA; (-) strand; PAM type: YTN; PAM sequence: TTT
ggttttccactcctgagtta

SEQ ID NO: 51326 - DNA, 20 bp, Artificial Sequence
  Description of Artificial Sequence: Synthetic oligonucleotide
  Target: SCNA; (-) strand; PAM type: YTN; PAM sequence: TTA
taaatgagaacatgtaatgt

SEQ ID NO: 51327 - DNA, 20 bp, Artificial Sequence
  Description of Artificial Sequence: Synthetic oligonucleotide
  Target: SCNA; (-) strand; PAM type: YTN; PAM sequence: TTA
ggtggcagttataaatgaga

SEQ ID NO: 51328 - DNA, 20 bp, Artificial Sequence
  Description of Artificial Sequence: Synthetic oligonucleotide
  Target: SCNA; (-) strand; PAM type: YTN; PAM sequence: TTT
aggtggcagttataaatgag

SEQ ID NO: 51329 - DNA, 20 bp, Artificial Sequence
  Description of Artificial Sequence: Synthetic oligonucleotide
  Target: SCNA; (-) strand; PAM type: YTN; PAM sequence: TTA
gtttaggtggcagttataaa

SEQ ID NO: 51330 - DNA, 20 bp, Artificial Sequence
  Description of Artificial Sequence: Synthetic oligonucleotide
  Target: SCNA; (-) strand; PAM type: YTN; PAM sequence: TTT
agtttaggtggcagttataa

SEQ ID NO: 51331 - DNA, 20 bp, Artificial Sequence
  Description of Artificial Sequence: Synthetic oligonucleotide
  Target: SCNA; (-) strand; PAM type: YTN; PAM sequence: CTT
tagtttaggtggcagttata

SEQ ID NO: 51332 - DNA, 20 bp, Artificial Sequence
  Description of Artificial Sequence: Synthetic oligonucleotide
  Target: SCNA; (-) strand; PAM type: YTN; PAM sequence: TTG
catcctttagtttaggtggc

SEQ ID NO: 51333 - DNA, 20 bp, Artificial Sequence
  Description of Artificial Sequence: Synthetic oligonucleotide
  Target: SCNA; (-) strand; PAM type: YTN; PAM sequence: TTT
gcatcctttagtttaggtgg

SEQ ID NO: 51334 - DNA, 20 bp, Artificial Sequence
  Description of Artificial Sequence: Synthetic oligonucleotide
  Target: SCNA; (-) strand; PAM type: YTN; PAM sequence: CTT
tgcatcctttagtttaggtg

SEQ ID NO: 51335 - DNA, 20 bp, Artificial Sequence
  Description of Artificial Sequence: Synthetic oligonucleotide
  Target: SCNA; (-) strand; PAM type: YTN; PAM sequence: TTA
tgcctttgcatcctttagtt

SEQ ID NO: 51336 - DNA, 20 bp, Artificial Sequence
  Description of Artificial Sequence: Synthetic oligonucleotide
  Target: SCNA; (-) strand; PAM type: YTN; PAM sequence: CTT
atgcctttgcatcctttagt

SEQ ID NO: 51337 - DNA, 20 bp, Artificial Sequence
  Description of Artificial Sequence: Synthetic oligonucleotide
  Target: SCNA; (-) strand; PAM type: YTN; PAM sequence: TTC
ttatgcctttgcatccttta

SEQ ID NO: 51338 - DNA, 20 bp, Artificial Sequence
  Description of Artificial Sequence: Synthetic oligonucleotide
  Target: SCNA; (-) strand; PAM type: YTN; PAM sequence: TTA
tatcattcttatgcctttgc

SEQ ID NO: 51339 - DNA, 20 bp, Artificial Sequence
  Description of Artificial Sequence: Synthetic oligonucleotide
  Target: SCNA; (-) strand; PAM type: YTN; PAM sequence: CTC
cagagtccattatatcattc

SEQ ID NO: 51340 - DNA, 20 bp, Artificial Sequence
  Description of Artificial Sequence: Synthetic oligonucleotide
  Target: SCNA; (-) strand; PAM type: YTN; PAM sequence: CTC
aagtctccagagtccattat

SEQ ID NO: 51341 - DNA, 20 bp, Artificial Sequence
  Description of Artificial Sequence: Synthetic oligonucleotide
  Target: SCNA; (-) strand; PAM type: YTN; PAM sequence: TTC
ccctcaagtctccagagtcc

SEQ ID NO: 51342 - DNA, 20 bp, Artificial Sequence
  Description of Artificial Sequence: Synthetic oligonucleotide
  Target: SCNA; (-) strand; PAM type: YTN; PAM sequence: CTT
cccctcaagtctccagagtc

SEQ ID NO: 51343 - DNA, 20 bp, Artificial Sequence
  Description of Artificial Sequence: Synthetic oligonucleotide
  Target: SCNA; (-) strand; PAM type: YTN; PAM sequence: CTC
ccacccttcccctcaagtct

SEQ ID NO: 51344 - DNA, 20 bp, Artificial Sequence
  Description of Artificial Sequence: Synthetic oligonucleotide
  Target: SCNA; (-) strand; PAM type: YTN; PAM sequence: TTC
ctcccacccttcccctcaag

SEQ ID NO: 51345 - DNA, 20 bp, Artificial Sequence
  Description of Artificial Sequence: Synthetic oligonucleotide
  Target: SCNA; (-) strand; PAM type: YTN; PAM sequence: CTT
cctcccacccttcccctcaa

SEQ ID NO: 51346 - DNA, 20 bp, Artificial Sequence
  Description of Artificial Sequence: Synthetic oligonucleotide
  Target: SCNA; (-) strand; PAM type: YTN; PAM sequence: CTC
accttcctcccacccttccc

SEQ ID NO: 51347 - DNA, 20 bp, Artificial Sequence
  Description of Artificial Sequence: Synthetic oligonucleotide
  Target: SCNA; (-) strand; PAM type: YTN; PAM sequence: TTC
ctcaccttcctcccaccctt

SEQ ID NO: 51348 - DNA, 20 bp, Artificial Sequence
  Description of Artificial Sequence: Synthetic oligonucleotide
  Target: SCNA; (-) strand; PAM type: YTN; PAM sequence: TTC
attcctcaccttcctcccac

SEQ ID NO: 51349 - DNA, 20 bp, Artificial Sequence
  Description of Artificial Sequence: Synthetic oligonucleotide
  Target: SCNA; (-) strand; PAM type: YTN; PAM sequence: TTT
cattcctcaccttcctccca

SEQ ID NO: 51350 - DNA, 20 bp, Artificial Sequence
  Description of Artificial Sequence: Synthetic oligonucleotide
  Target: SCNA; (-) strand; PAM type: YTN; PAM sequence: CTT
tcattcctcaccttcctccc

SEQ ID NO: 51351 - DNA, 20 bp, Artificial Sequence
  Description of Artificial Sequence: Synthetic oligonucleotide
  Target: SCNA; (-) strand; PAM type: YTN; PAM sequence: CTG
cacccaatgtgtagtctttc

SEQ ID NO: 51352 - DNA, 20 bp, Artificial Sequence
  Description of Artificial Sequence: Synthetic oligonucleotide
  Target: SCNA; (-) strand; PAM type: YTN; PAM sequence: CTG
agcagcatacactgcaccca

SEQ ID NO: 51353 - DNA, 20 bp, Artificial Sequence
  Description of Artificial Sequence: Synthetic oligonucleotide
  Target: SCNA; (-) strand; PAM type: YTN; PAM sequence: CTC
ataacctgagcagcatacac

SEQ ID NO: 51354 - DNA, 20 bp, Artificial Sequence
  Description of Artificial Sequence: Synthetic oligonucleotide
  Target: SCNA; (-) strand; PAM type: YTN; PAM sequence: TTG
gtacactcataacctgagca

SEQ ID NO: 51355 - DNA, 20 bp, Artificial Sequence
  Description of Artificial Sequence: Synthetic oligonucleotide
  Target: SCNA; (-) strand; PAM type: YTN; PAM sequence: TTT
ggtacactcataacctgagc

SEQ ID NO: 51356 - DNA, 20 bp, Artificial Sequence
  Description of Artificial Sequence: Synthetic oligonucleotide
  Target: SCNA; (-) strand; PAM type: YTN; PAM sequence: TTT
tggtacactcataacctgag

SEQ ID NO: 51357 - DNA, 20 bp, Artificial Sequence
  Description of Artificial Sequence: Synthetic oligonucleotide
  Target: SCNA; (-) strand; PAM type: YTN; PAM sequence: CTG
agattttggtacactcataa

SEQ ID NO: 51358 - DNA, 20 bp, Artificial Sequence
  Description of Artificial Sequence: Synthetic oligonucleotide
  Target: SCNA; (-) strand; PAM type: YTN; PAM sequence: TTC
tgagattttggtacactcat

SEQ ID NO: 51359 - DNA, 20 bp, Artificial Sequence
  Description of Artificial Sequence: Synthetic oligonucleotide
  Target: SCNA; (-) strand; PAM type: YTN; PAM sequence: TTT
ctgagattttggtacactca

SEQ ID NO: 51360 - DNA, 20 bp, Artificial Sequence
  Description of Artificial Sequence: Synthetic oligonucleotide
  Target: SCNA; (-) strand; PAM type: YTN; PAM sequence: TTA
ggtatgatttctgagatttt

SEQ ID NO: 51361 - DNA, 20 bp, Artificial Sequence
  Description of Artificial Sequence: Synthetic oligonucleotide
  Target: SCNA; (-) strand; PAM type: YTN; PAM sequence: TTT
aggtatgatttctgagattt

SEQ ID NO: 51362 - DNA, 20 bp, Artificial Sequence
  Description of Artificial Sequence: Synthetic oligonucleotide
  Target: SCNA; (-) strand; PAM type: YTN; PAM sequence: TTG
tttaggtatgatttctgaga

SEQ ID NO: 51363 - DNA, 20 bp, Artificial Sequence
  Description of Artificial Sequence: Synthetic oligonucleotide
  Target: SCNA; (-) strand; PAM type: YTN; PAM sequence: TTA
tatggagaagttgtttaggt

SEQ ID NO: 51364 - DNA, 20 bp, Artificial Sequence
  Description of Artificial Sequence: Synthetic oligonucleotide
  Target: SCNA; (-) strand; PAM type: YTN; PAM sequence: TTG
gttatatggagaagttgttt

SEQ ID NO: 51365 - DNA, 20 bp, Artificial Sequence
  Description of Artificial Sequence: Synthetic oligonucleotide
  Target: SCNA; (-) strand; PAM type: YTN; PAM sequence: TTT
ggttatatggagaagttgtt

SEQ ID NO: 51366 - DNA, 20 bp, Artificial Sequence
  Description of Artificial Sequence: Synthetic oligonucleotide
  Target: SCNA; (-) strand; PAM type: YTN; PAM sequence: TTT
tggttatatggagaagttgt

SEQ ID NO: 51367 - DNA, 20 bp, Artificial Sequence
  Description of Artificial Sequence: Synthetic oligonucleotide
  Target: SCNA; (-) strand; PAM type: YTN; PAM sequence: TTT
ttggttatatggagaagttg

SEQ ID NO: 51368 - DNA, 20 bp, Artificial Sequence
  Description of Artificial Sequence: Synthetic oligonucleotide
  Target: SCNA; (-) strand; PAM type: YTN; PAM sequence: TTG
gggagcaggtggtttttggt

SEQ ID NO: 51369 - DNA, 20 bp, Artificial Sequence
  Description of Artificial Sequence: Synthetic oligonucleotide
  Target: SCNA; (-) strand; PAM type: YTN; PAM sequence: TTT
ggggagcaggtggtttttgg

SEQ ID NO: 51370 - DNA, 20 bp, Artificial Sequence
  Description of Artificial Sequence: Synthetic oligonucleotide
  Target: SCNA; (-) strand; PAM type: YTN; PAM sequence: TTT
tggggagcaggtggtttttg

SEQ ID NO: 51371 - DNA, 20 bp, Artificial Sequence
  Description of Artificial Sequence: Synthetic oligonucleotide
  Target: SCNA; (-) strand; PAM type: YTN; PAM sequence: CTT
ttggggagcaggtggttttt

SEQ ID NO: 51372 - DNA, 20 bp, Artificial Sequence
  Description of Artificial Sequence: Synthetic oligonucleotide
  Target: SCNA; (-) strand; PAM type: YTN; PAM sequence: TTC
aatagcttttggggagcagg

SEQ ID NO: 51373 - DNA, 20 bp, Artificial Sequence
  Description of Artificial Sequence: Synthetic oligonucleotide
  Target: SCNA; (-) strand; PAM type: YTN; PAM sequence: TTT
caatagcttttggggagcag

SEQ ID NO: 51374 - DNA, 20 bp, Artificial Sequence
  Description of Artificial Sequence: Synthetic oligonucleotide
  Target: SCNA; (-) strand; PAM type: YTN; PAM sequence: TTA
tttcaatagcttttggggag

SEQ ID NO: 51375 - DNA, 20 bp, Artificial Sequence
  Description of Artificial Sequence: Synthetic oligonucleotide
  Target: SCNA; (-) strand; PAM type: YTN; PAM sequence: TTA
ttatttcaatagcttttggg

SEQ ID NO: 51376 - DNA, 20 bp, Artificial Sequence
  Description of Artificial Sequence: Synthetic oligonucleotide
  Target: SCNA; (-) strand; PAM type: YTN; PAM sequence: TTA
ttattatttcaatagctttt

SEQ ID NO: 51377 - DNA, 20 bp, Artificial Sequence
  Description of Artificial Sequence: Synthetic oligonucleotide
  Target: SCNA; (-) strand; PAM type: YTN; PAM sequence: TTA
ttattattatttcaatagct

SEQ ID NO: 51378 - DNA, 20 bp, Artificial Sequence
  Description of Artificial Sequence: Synthetic oligonucleotide
  Target: SCNA; (-) strand; PAM type: YTN; PAM sequence: TTT
attattattatttcaatagc

SEQ ID NO: 51379 - DNA, 20 bp, Artificial Sequence
  Description of Artificial Sequence: Synthetic oligonucleotide
  Target: SCNA; (-) strand; PAM type: YTN; PAM sequence: CTT
tattattattatttcaatag

SEQ ID NO: 51380 - DNA, 20 bp, Artificial Sequence
  Description of Artificial Sequence: Synthetic oligonucleotide
  Target: SCNA; (-) strand; PAM type: YTN; PAM sequence: TTA
actttattattattatttca

SEQ ID NO: 51381 - DNA, 20 bp, Artificial Sequence
  Description of Artificial Sequence: Synthetic oligonucleotide
  Target: SCNA; (-) strand; PAM type: YTN; PAM sequence: CTG
attaactttattattattat

SEQ ID NO: 51382 - DNA, 20 bp, Artificial Sequence
  Description of Artificial Sequence: Synthetic oligonucleotide
  Target: SCNA; (-) strand; PAM type: YTN; PAM sequence: TTC
tgattaactttattattatt

SEQ ID NO: 51383 - DNA, 20 bp, Artificial Sequence
  Description of Artificial Sequence: Synthetic oligonucleotide
  Target: SCNA; (-) strand; PAM type: YTN; PAM sequence: TTT
ctgattaactttattattat

SEQ ID NO: 51384 - DNA, 20 bp, Artificial Sequence
  Description of Artificial Sequence: Synthetic oligonucleotide
  Target: SCNA; (-) strand; PAM type: YTN; PAM sequence: TTT
tctgattaactttattatta

SEQ ID NO: 51385 - DNA, 20 bp, Artificial Sequence
  Description of Artificial Sequence: Synthetic oligonucleotide
  Target: SCNA; (-) strand; PAM type: YTN; PAM sequence: TTA
tagacaataattttctgatt

SEQ ID NO: 51386 - DNA, 20 bp, Artificial Sequence
  Description of Artificial Sequence: Synthetic oligonucleotide
  Target: SCNA; (-) strand; PAM type: YTN; PAM sequence: TTG
gtgttatagacaataatttt

SEQ ID NO: 51387 - DNA, 20 bp, Artificial Sequence
  Description of Artificial Sequence: Synthetic oligonucleotide
  Target: SCNA; (-) strand; PAM type: YTN; PAM sequence: TTA
ataaaaataatatattggtg

SEQ ID NO: 51388 - DNA, 20 bp, Artificial Sequence
  Description of Artificial Sequence: Synthetic oligonucleotide
  Target: SCNA; (-) strand; PAM type: YTN; PAM sequence: TTA
aaagaaatgcattaataaaa

SEQ ID NO: 51389 - DNA, 20 bp, Artificial Sequence
  Description of Artificial Sequence: Synthetic oligonucleotide
  Target: SCNA; (-) strand; PAM type: YTN; PAM sequence: TTA
atgacaaataacaatacatt

SEQ ID NO: 51390 - DNA, 20 bp, Artificial Sequence
  Description of Artificial Sequence: Synthetic oligonucleotide
  Target: SCNA; (-) strand; PAM type: YTN; PAM sequence: TTA
attaatgacaaataacaata

SEQ ID NO: 51391 - DNA, 20 bp, Artificial Sequence
  Description of Artificial Sequence: Synthetic oligonucleotide
  Target: SCNA; (-) strand; PAM type: YTN; PAM sequence: TTT
aattaatgacaaataacaat

SEQ ID NO: 51392 - DNA, 20 bp, Artificial Sequence
  Description of Artificial Sequence: Synthetic oligonucleotide
  Target: SCNA; (-) strand; PAM type: YTN; PAM sequence: CTA
atttaattaatgacaaataa

SEQ ID NO: 51393 - DNA, 20 bp, Artificial Sequence
  Description of Artificial Sequence: Synthetic oligonucleotide
  Target: SCNA; (-) strand; PAM type: YTN; PAM sequence: CTA
ctaatttaattaatgacaaa

SEQ ID NO: 51394 - DNA, 20 bp, Artificial Sequence
  Description of Artificial Sequence: Synthetic oligonucleotide
  Target: SCNA; (-) strand; PAM type: YTN; PAM sequence: TTA
atagtgtaactactaattta

SEQ ID NO: 51395 - DNA, 20 bp, Artificial Sequence
  Description of Artificial Sequence: Synthetic oligonucleotide
  Target: SCNA; (-) strand; PAM type: YTN; PAM sequence: CTT
aatagtgtaactactaattt

SEQ ID NO: 51396 - DNA, 20 bp, Artificial Sequence
  Description of Artificial Sequence: Synthetic oligonucleotide
  Target: SCNA; (-) strand; PAM type: YTN; PAM sequence: TTA
taacaacagatcgcttaata

SEQ ID NO: 51397 - DNA, 20 bp, Artificial Sequence
  Description of Artificial Sequence: Synthetic oligonucleotide
  Target: SCNA; (-) strand; PAM type: YTN; PAM sequence: TTA
attataacaacagatcgctt

SEQ ID NO: 51398 - DNA, 20 bp, Artificial Sequence
  Description of Artificial Sequence: Synthetic oligonucleotide
  Target: SCNA; (-) strand; PAM type: YTN; PAM sequence: TTA
attaattataacaacagatc

SEQ ID NO: 51399 - DNA, 20 bp, Artificial Sequence
  Description of Artificial Sequence: Synthetic oligonucleotide
  Target: SCNA; (-) strand; PAM type: YTN; PAM sequence: TTA
attaattaattataacaaca

SEQ ID NO: 51400 - DNA, 20 bp, Artificial Sequence
  Description of Artificial Sequence: Synthetic oligonucleotide
  Target: SCNA; (-) strand; PAM type: YTN; PAM sequence: TTG
ataaagggaggttaattaat

SEQ ID NO: 51401 - DNA, 20 bp, Artificial Sequence
  Description of Artificial Sequence: Synthetic oligonucleotide
  Target: SCNA; (-) strand; PAM type: YTN; PAM sequence: TTA
attgataaagggaggttaat

SEQ ID NO: 51402 - DNA, 20 bp, Artificial Sequence
  Description of Artificial Sequence: Synthetic oligonucleotide
  Target: SCNA; (-) strand; PAM type: YTN; PAM sequence: TTT
aattgataaagggaggttaa

SEQ ID NO: 51403 - DNA, 20 bp, Artificial Sequence
  Description of Artificial Sequence: Synthetic oligonucleotide
  Target: SCNA; (-) strand; PAM type: YTN; PAM sequence: TTA
taatttaattgataaaggga

SEQ ID NO: 51404 - DNA, 20 bp, Artificial Sequence
  Description of Artificial Sequence: Synthetic oligonucleotide
  Target: SCNA; (-) strand; PAM type: YTN; PAM sequence: TTT
ataatttaattgataaaggg

SEQ ID NO: 51405 - DNA, 20 bp, Artificial Sequence
  Description of Artificial Sequence: Synthetic oligonucleotide
  Target: SCNA; (-) strand; PAM type: YTN; PAM sequence: CTT
tataatttaattgataaagg

SEQ ID NO: 51406 - DNA, 20 bp, Artificial Sequence
  Description of Artificial Sequence: Synthetic oligonucleotide
  Target: SCNA; (-) strand; PAM type: YTN; PAM sequence: TTC
agggctttataatttaattg

SEQ ID NO: 51407 - DNA, 20 bp, Artificial Sequence
  Description of Artificial Sequence: Synthetic oligonucleotide
  Target: SCNA; (-) strand; PAM type: YTN; PAM sequence: CTT
cagggctttataatttaatt

SEQ ID NO: 51408 - DNA, 20 bp, Artificial Sequence
  Description of Artificial Sequence: Synthetic oligonucleotide
  Target: SCNA; (-) strand; PAM type: YTN; PAM sequence: TTG
ccttcagggctttataattt

SEQ ID NO: 51409 - DNA, 20 bp, Artificial Sequence
  Description of Artificial Sequence: Synthetic oligonucleotide
  Target: SCNA; (-) strand; PAM type: YTN; PAM sequence: CTC
agttgccttcagggctttat

SEQ ID NO: 51410 - DNA, 20 bp, Artificial Sequence
  Description of Artificial Sequence: Synthetic oligonucleotide
  Target: SCNA; (-) strand; PAM type: YTN; PAM sequence: CTA
ctcagttgccttcagggctt

SEQ ID NO: 51411 - DNA, 20 bp, Artificial Sequence
  Description of Artificial Sequence: Synthetic oligonucleotide
  Target: SCNA; (-) strand; PAM type: YTN; PAM sequence: CTC
tactcagttgccttcagggc

SEQ ID NO: 51412 - DNA, 20 bp, Artificial Sequence
  Description of Artificial Sequence: Synthetic oligonucleotide
  Target: SCNA; (-) strand; PAM type: YTN; PAM sequence: TTG
ggcctctactcagttgcctt

SEQ ID NO: 51413 - DNA, 20 bp, Artificial Sequence
  Description of Artificial Sequence: Synthetic oligonucleotide
  Target: SCNA; (-) strand; PAM type: YTN; PAM sequence: TTA
ttgggcctctactcagttgc

SEQ ID NO: 51414 - DNA, 20 bp, Artificial Sequence
  Description of Artificial Sequence: Synthetic oligonucleotide
  Target: SCNA; (-) strand; PAM type: YTN; PAM sequence: CTT
attgggcctctactcagttg

SEQ ID NO: 51415 - DNA, 20 bp, Artificial Sequence
  Description of Artificial Sequence: Synthetic oligonucleotide
  Target: SCNA; (-) strand; PAM type: YTN; PAM sequence: TTC
agcaatcacttattgggcct

SEQ ID NO: 51416 - DNA, 20 bp, Artificial Sequence
  Description of Artificial Sequence: Synthetic oligonucleotide
  Target: SCNA; (-) strand; PAM type: YTN; PAM sequence: TTC
aattcagcaatcacttattg

SEQ ID NO: 51417 - DNA, 20 bp, Artificial Sequence
  Description of Artificial Sequence: Synthetic oligonucleotide
  Target: SCNA; (-) strand; PAM type: YTN; PAM sequence: TTT
caattcagcaatcacttatt

SEQ ID NO: 51418 - DNA, 20 bp, Artificial Sequence
  Description of Artificial Sequence: Synthetic oligonucleotide
  Target: SCNA; (-) strand; PAM type: YTN; PAM sequence: TTC
agcatttcaattcagcaatc

SEQ ID NO: 51419 - DNA, 20 bp, Artificial Sequence
  Description of Artificial Sequence: Synthetic oligonucleotide
  Target: SCNA; (-) strand; PAM type: YTN; PAM sequence: TTC
agttcagcatttcaattcag

SEQ ID NO: 51420 - DNA, 20 bp, Artificial Sequence
  Description of Artificial Sequence: Synthetic oligonucleotide
  Target: SCNA; (-) strand; PAM type: YTN; PAM sequence: CTA
tataatgaagtataattcag

SEQ ID NO: 51421 - DNA, 20 bp, Artificial Sequence
  Description of Artificial Sequence: Synthetic oligonucleotide
  Target: SCNA; (-) strand; PAM type: YTN; PAM sequence: TTC
tatataatgaagtataattc

SEQ ID NO: 51422 - DNA, 20 bp, Artificial Sequence
  Description of Artificial Sequence: Synthetic oligonucleotide
  Target: SCNA; (-) strand; PAM type: YTN; PAM sequence: TTT
ctatataatgaagtataatt

SEQ ID NO: 51423 - DNA, 20 bp, Artificial Sequence
  Description of Artificial Sequence: Synthetic oligonucleotide
  Target: SCNA; (-) strand; PAM type: YTN; PAM sequence: CTT
tctatataatgaagtataat

SEQ ID NO: 51424 - DNA, 20 bp, Artificial Sequence
  Description of Artificial Sequence: Synthetic oligonucleotide
  Target: SCNA; (-) strand; PAM type: YTN; PAM sequence: CTA
tatatgaggctttctatata

SEQ ID NO: 51425 - DNA, 20 bp, Artificial Sequence
  Description of Artificial Sequence: Synthetic oligonucleotide
  Target: SCNA; (-) strand; PAM type: YTN; PAM sequence: TTG
tgtaagggtatatgtgaggc

SEQ ID NO: 51426 - DNA, 20 bp, Artificial Sequence
  Description of Artificial Sequence: Synthetic oligonucleotide
  Target: SCNA; (-) strand; PAM type: YTN; PAM sequence: TTT
gtgtaagggtatatgtgagg

SEQ ID NO: 51427 - DNA, 20 bp, Artificial Sequence
  Description of Artificial Sequence: Synthetic oligonucleotide
  Target: SCNA; (-) strand; PAM type: YTN; PAM sequence: TTT
tgtgtaagggtatatgtgag

SEQ ID NO: 51428 - DNA, 20 bp, Artificial Sequence
  Description of Artificial Sequence: Synthetic oligonucleotide
  Target: SCNA; (-) strand; PAM type: YTN; PAM sequence: TTA
tattttgtgtaagggtatat

SEQ ID NO: 51429 - DNA, 20 bp, Artificial Sequence
  Description of Artificial Sequence: Synthetic oligonucleotide
  Target: SCNA; (-) strand; PAM type: YTN; PAM sequence: CTT
atattttgtgtaagggtata

SEQ ID NO: 51430 - DNA, 20 bp, Artificial Sequence
  Description of Artificial Sequence: Synthetic oligonucleotide
  Target: SCNA; (-) strand; PAM type: YTN; PAM sequence: TTC
ttatattttgtgtaagggta

SEQ ID NO: 51431 - DNA, 20 bp, Artificial Sequence
  Description of Artificial Sequence: Synthetic oligonucleotide
  Target: SCNA; (-) strand; PAM type: YTN; PAM sequence: TTG
tagtggattcttatattttg

SEQ ID NO: 51432 - DNA, 20 bp, Artificial Sequence
  Description of Artificial Sequence: Synthetic oligonucleotide
  Target: SCNA; (-) strand; PAM type: YTN; PAM sequence: TTT
gtagtggattcttatatttt

SEQ ID NO: 51433 - DNA, 20 bp, Artificial Sequence
  Description of Artificial Sequence: Synthetic oligonucleotide
  Target: SCNA; (-) strand; PAM type: YTN; PAM sequence: TTA
atcgatgaagtgatttgtag

SEQ ID NO: 51434 - DNA, 20 bp, Artificial Sequence
  Description of Artificial Sequence: Synthetic oligonucleotide
  Target: SCNA; (-) strand; PAM type: YTN; PAM sequence: TTG
attaatcgatgaagtgattt

SEQ ID NO: 51435 - DNA, 20 bp, Artificial Sequence
  Description of Artificial Sequence: Synthetic oligonucleotide
  Target: SCNA; (-) strand; PAM type: YTN; PAM sequence: TTA
caaagtacagccagttgatt

SEQ ID NO: 51436 - DNA, 20 bp, Artificial Sequence
  Description of Artificial Sequence: Synthetic oligonucleotide
  Target: SCNA; (-) strand; PAM type: YTN; PAM sequence: TTG
ttacaaagtacagccagttg

SEQ ID NO: 51437 - DNA, 20 bp, Artificial Sequence
  Description of Artificial Sequence: Synthetic oligonucleotide
  Target: SCNA; (-) strand; PAM type: YTN; PAM sequence: CTT
gttacaaagtacagccagtt

SEQ ID NO: 51438 - DNA, 20 bp, Artificial Sequence
  Description of Artificial Sequence: Synthetic oligonucleotide
  Target: SCNA; (-) strand; PAM type: YTN; PAM sequence: TTG
tgcaaaccttgttacaaagt

SEQ ID NO: 51439 - DNA, 20 bp, Artificial Sequence
  Description of Artificial Sequence: Synthetic oligonucleotide
  Target: SCNA; (-) strand; PAM type: YTN; PAM sequence: TTT
gtgcaaaccttgttacaaag

SEQ ID NO: 51440 - DNA, 20 bp, Artificial Sequence
  Description of Artificial Sequence: Synthetic oligonucleotide
  Target: SCNA; (-) strand; PAM type: YTN; PAM sequence: TTA
tttgtgcaaaccttgttaca

SEQ ID NO: 51441 - DNA, 20 bp, Artificial Sequence
  Description of Artificial Sequence: Synthetic oligonucleotide
  Target: SCNA; (-) strand; PAM type: YTN; PAM sequence: TTT
atttgtgcaaaccttgttac

SEQ ID NO: 51442 - DNA, 20 bp, Artificial Sequence
  Description of Artificial Sequence: Synthetic oligonucleotide
  Target: SCNA; (-) strand; PAM type: YTN; PAM sequence: TTT
tatttgtgcaaaccttgtta

SEQ ID NO: 51443 - DNA, 20 bp, Artificial Sequence
  Description of Artificial Sequence: Synthetic oligonucleotide
  Target: SCNA; (-) strand; PAM type: YTN; PAM sequence: CTG
aaagatattttatttgtgca

SEQ ID NO: 51444 - DNA, 20 bp, Artificial Sequence
  Description of Artificial Sequence: Synthetic oligonucleotide
  Target: SCNA; (-) strand; PAM type: YTN; PAM sequence: TTC
ctgaaagatattttatttgt

SEQ ID NO: 51445 - DNA, 20 bp, Artificial Sequence
  Description of Artificial Sequence: Synthetic oligonucleotide
  Target: SCNA; (-) strand; PAM type: YTN; PAM sequence: TTT
cctgaaagatattttatttg

SEQ ID NO: 51446 - DNA, 20 bp, Artificial Sequence
  Description of Artificial Sequence: Synthetic oligonucleotide
  Target: SCNA; (-) strand; PAM type: YTN; PAM sequence: TTT
tcctgaaagatattttattt

SEQ ID NO: 51447 - DNA, 20 bp, Artificial Sequence
  Description of Artificial Sequence: Synthetic oligonucleotide
  Target: SCNA; (-) strand; PAM type: YTN; PAM sequence: CTT
ttcctgaaagatattttatt

SEQ ID NO: 51448 - DNA, 20 bp, Artificial Sequence
  Description of Artificial Sequence: Synthetic oligonucleotide
  Target: SCNA; (-) strand; PAM type: YTN; PAM sequence: TTA
cacttttcctgaaagatatt

SEQ ID NO: 51449 - DNA, 20 bp, Artificial Sequence
  Description of Artificial Sequence: Synthetic oligonucleotide
  Target: SCNA; (-) strand; PAM type: YTN; PAM sequence: TTT
acacttttcctgaaagatat

SEQ ID NO: 51450 - DNA, 20 bp, Artificial Sequence
  Description of Artificial Sequence: Synthetic oligonucleotide
  Target: SCNA; (-) strand; PAM type: YTN; PAM sequence: TTT
tacacttttcctgaaagata

SEQ ID NO: 51451 - DNA, 20 bp, Artificial Sequence
  Description of Artificial Sequence: Synthetic oligonucleotide
  Target: SCNA; (-) strand; PAM type: YTN; PAM sequence: TTA
atgaaatatattttacactt

SEQ ID NO: 51452 - DNA, 20 bp, Artificial Sequence
  Description of Artificial Sequence: Synthetic oligonucleotide
  Target: SCNA; (-) strand; PAM type: YTN; PAM sequence: TTC
acagattaatgaaatatatt

SEQ ID NO: 51453 - DNA, 20 bp, Artificial Sequence
  Description of Artificial Sequence: Synthetic oligonucleotide
  Target: SCNA; (-) strand; PAM type: YTN; PAM sequence: TTT
cacagattaatgaaatatat

SEQ ID NO: 51454 - DNA, 20 bp, Artificial Sequence
  Description of Artificial Sequence: Synthetic oligonucleotide
  Target: SCNA; (-) strand; PAM type: YTN; PAM sequence: TTT
tcacagattaatgaaatata

SEQ ID NO: 51455 - DNA, 20 bp, Artificial Sequence
  Description of Artificial Sequence: Synthetic oligonucleotide
  Target: SCNA; (-) strand; PAM type: YTN; PAM sequence: TTG
cattttcacagattaatgaa

SEQ ID NO: 51456 - DNA, 20 bp, Artificial Sequence
  Description of Artificial Sequence: Synthetic oligonucleotide
  Target: SCNA; (-) strand; PAM type: YTN; PAM sequence: TTC
cagttgcattttcacagatt

SEQ ID NO: 51457 - DNA, 20 bp, Artificial Sequence
  Description of Artificial Sequence: Synthetic oligonucleotide
  Target: SCNA; (-) strand; PAM type: YTN; PAM sequence: CTT
ccagttgcattttcacagat

SEQ ID NO: 51458 - DNA, 20 bp, Artificial Sequence
  Description of Artificial Sequence: Synthetic oligonucleotide
  Target: SCNA; (-) strand; PAM type: YTN; PAM sequence: CTA
ggaagccacaaaacttccag

SEQ ID NO: 51459 - DNA, 20 bp, Artificial Sequence
  Description of Artificial Sequence: Synthetic oligonucleotide
  Target: SCNA; (-) strand; PAM type: YTN; PAM sequence: TTC
aaactaggaagccacaaaac

SEQ ID NO: 51460 - DNA, 20 bp, Artificial Sequence
  Description of Artificial Sequence: Synthetic oligonucleotide
  Target: SCNA; (-) strand; PAM type: YTN; PAM sequence: TTG
ggcggagttcaaactaggaa

SEQ ID NO: 51461 - DNA, 20 bp, Artificial Sequence
  Description of Artificial Sequence: Synthetic oligonucleotide
  Target: SCNA; (-) strand; PAM type: YTN; PAM sequence: CTT
gggcggagttcaaactagga

SEQ ID NO: 51462 - DNA, 20 bp, Artificial Sequence
  Description of Artificial Sequence: Synthetic oligonucleotide
  Target: SCNA; (-) strand; PAM type: YTN; PAM sequence: TTC
ttgggcggagttcaaactag

SEQ ID NO: 51463 - DNA, 20 bp, Artificial Sequence
  Description of Artificial Sequence: Synthetic oligonucleotide
  Target: SCNA; (-) strand; PAM type: YTN; PAM sequence: CTT
cttgggcggagttcaaacta

SEQ ID NO: 51464 - DNA, 20 bp, Artificial Sequence
  Description of Artificial Sequence: Synthetic oligonucleotide
  Target: SCNA; (-) strand; PAM type: YTN; PAM sequence: TTG
ccttcttgggcggagttcaa

SEQ ID NO: 51465 - DNA, 20 bp, Artificial Sequence
  Description of Artificial Sequence: Synthetic oligonucleotide
  Target: SCNA; (-) strand; PAM type: YTN; PAM sequence: TTT
gccttcttgggcggagttca

SEQ ID NO: 51466 - DNA, 20 bp, Artificial Sequence
  Description of Artificial Sequence: Synthetic oligonucleotide
  Target: SCNA; (-) strand; PAM type: YTN; PAM sequence: TTT
tgccttcttgggcggagttc

SEQ ID NO: 51467 - DNA, 20 bp, Artificial Sequence
  Description of Artificial Sequence: Synthetic oligonucleotide
  Target: SCNA; (-) strand; PAM type: YTN; PAM sequence: CTA
taaaggttttgccttcttgg

SEQ ID NO: 51468 - DNA, 20 bp, Artificial Sequence
  Description of Artificial Sequence: Synthetic oligonucleotide
  Target: SCNA; (-) strand; PAM type: YTN; PAM sequence: CTA
tgggtctataaaggttttgc

SEQ ID NO: 51469 - DNA, 20 bp, Artificial Sequence
  Description of Artificial Sequence: Synthetic oligonucleotide
  Target: SCNA; (-) strand; PAM type: YTN; PAM sequence: CTA
gacgggaaactatgggtcta

SEQ ID NO: 51470 - DNA, 20 bp, Artificial Sequence
  Description of Artificial Sequence: Synthetic oligonucleotide
  Target: SCNA; (-) strand; PAM type: YTN; PAM sequence: TTA
gagatgtgtgaaagagcagt

SEQ ID NO: 51471 - DNA, 20 bp, Artificial Sequence
  Description of Artificial Sequence: Synthetic oligonucleotide
  Target: SCNA; (-) strand; PAM type: YTN; PAM sequence: CTT
agagatgtgtgaaagagcag

SEQ ID NO: 51472 - DNA, 20 bp, Artificial Sequence
  Description of Artificial Sequence: Synthetic oligonucleotide
  Target: SCNA; (-) strand; PAM type: YTN; PAM sequence: CTA
gtcagacttagagatgtgtg

SEQ ID NO: 51473 - DNA, 20 bp, Artificial Sequence
  Description of Artificial Sequence: Synthetic oligonucleotide
  Target: SCNA; (-) strand; PAM type: YTN; PAM sequence: TTA
caatgtgtctagtcagactt

SEQ ID NO: 51474 - DNA, 20 bp, Artificial Sequence
  Description of Artificial Sequence: Synthetic oligonucleotide
  Target: SCNA; (-) strand; PAM type: YTN; PAM sequence: TTA
tgttacaatgtgtctagtca

SEQ ID NO: 51475 - DNA, 20 bp, Artificial Sequence
  Description of Artificial Sequence: Synthetic oligonucleotide
  Target: SCNA; (-) strand; PAM type: YTN; PAM sequence: CTT
atgttacaatgtgtctagtc

SEQ ID NO: 51476 - DNA, 20 bp, Artificial Sequence
  Description of Artificial Sequence: Synthetic oligonucleotide
  Target: SCNA; (-) strand; PAM type: YTN; PAM sequence: CTG
tcatgtgaccacagcttatg

SEQ ID NO: 51477 - DNA, 20 bp, Artificial Sequence
  Description of Artificial Sequence: Synthetic oligonucleotide
  Target: SCNA; (-) strand; PAM type: YTN; PAM sequence: CTA
cctgtcatgtgaccacagct

SEQ ID NO: 51478 - DNA, 20 bp, Artificial Sequence
  Description of Artificial Sequence: Synthetic oligonucleotide
  Target: SCNA; (-) strand; PAM type: YTN; PAM sequence: CTG
agacacctacctgtcatgtg

SEQ ID NO: 51479 - DNA, 20 bp, Artificial Sequence
  Description of Artificial Sequence: Synthetic oligonucleotide
  Target: SCNA; (-) strand; PAM type: YTN; PAM sequence: TTA
ctgagacacctacctgtcat

SEQ ID NO: 51480 - DNA, 20 bp, Artificial Sequence
  Description of Artificial Sequence: Synthetic oligonucleotide
  Target: SCNA; (-) strand; PAM type: YTN; PAM sequence: CTG
ttactgagacacctacctgt

SEQ ID NO: 51481 - DNA, 20 bp, Artificial Sequence
  Description of Artificial Sequence: Synthetic oligonucleotide
  Target: SCNA; (-) strand; PAM type: YTN; PAM sequence: TTG
cctgttactgagacacctac

SEQ ID NO: 51482 - DNA, 20 bp, Artificial Sequence
  Description of Artificial Sequence: Synthetic oligonucleotide
  Target: SCNA; (-) strand; PAM type: YTN; PAM sequence: CTG
gtgttgcctgttactgagac

SEQ ID NO: 51483 - DNA, 20 bp, Artificial Sequence
  Description of Artificial Sequence: Synthetic oligonucleotide
  Target: SCNA; (-) strand; PAM type: YTN; PAM sequence: TTC
catgactggtgttgcctgtt

SEQ ID NO: 51484 - DNA, 20 bp, Artificial Sequence
  Description of Artificial Sequence: Synthetic oligonucleotide
  Target: SCNA; (-) strand; PAM type: YTN; PAM sequence: TTT
ccatgactggtgttgcctgt

SEQ ID NO: 51485 - DNA, 20 bp, Artificial Sequence
  Description of Artificial Sequence: Synthetic oligonucleotide
  Target: SCNA; (-) strand; PAM type: YTN; PAM sequence: TTT
tccatgactggtgttgcctg

SEQ ID NO: 51486 - DNA, 20 bp, Artificial Sequence
  Description of Artificial Sequence: Synthetic oligonucleotide
  Target: SCNA; (-) strand; PAM type: YTN; PAM sequence: TTT
ttccatgactggtgttgcct

SEQ ID NO: 51487 - DNA, 20 bp, Artificial Sequence
  Description of Artificial Sequence: Synthetic oligonucleotide
  Target: SCNA; (-) strand; PAM type: YTN; PAM sequence: TTG
tttttccatgactggtgttg

SEQ ID NO: 51488 - DNA, 20 bp, Artificial Sequence
  Description of Artificial Sequence: Synthetic oligonucleotide
  Target: SCNA; (-) strand; PAM type: YTN; PAM sequence: TTT
gtttttccatgactggtgtt

SEQ ID NO: 51489 - DNA, 20 bp, Artificial Sequence
  Description of Artificial Sequence: Synthetic oligonucleotide
  Target: SCNA; (-) strand; PAM type: YTN; PAM sequence: TTT
tgtttttccatgactggtgt

SEQ ID NO: 51490 - DNA, 20 bp, Artificial Sequence
  Description of Artificial Sequence: Synthetic oligonucleotide
  Target: SCNA; (-) strand; PAM type: YTN; PAM sequence: TTA
gttttgtttttccatgactg

SEQ ID NO: 51491 - DNA, 20 bp, Artificial Sequence
  Description of Artificial Sequence: Synthetic oligonucleotide
  Target: SCNA; (-) strand; PAM type: YTN; PAM sequence: CTT
agttttgtttttccatgact

SEQ ID NO: 51492 - DNA, 20 bp, Artificial Sequence
  Description of Artificial Sequence: Synthetic oligonucleotide
  Target: SCNA; (-) strand; PAM type: YTN; PAM sequence: TTG
gacacttagttttgtttttc

SEQ ID NO: 51493 - DNA, 20 bp, Artificial Sequence
  Description of Artificial Sequence: Synthetic oligonucleotide
  Target: SCNA; (-) strand; PAM type: YTN; PAM sequence: TTT
ggacacttagttttgttttt

SEQ ID NO: 51494 - DNA, 20 bp, Artificial Sequence
  Description of Artificial Sequence: Synthetic oligonucleotide
  Target: SCNA; (-) strand; PAM type: YTN; PAM sequence: CTC
atttggacacttagttttgt

SEQ ID NO: 51495 - DNA, 20 bp, Artificial Sequence
  Description of Artificial Sequence: Synthetic oligonucleotide
  Target: SCNA; (-) strand; PAM type: YTN; PAM sequence: CTG
cactcatttggacacttagt

SEQ ID NO: 51496 - DNA, 20 bp, Artificial Sequence
  Description of Artificial Sequence: Synthetic oligonucleotide
  Target: SCNA; (-) strand; PAM type: YTN; PAM sequence: TTC
tgcactcatttggacactta

SEQ ID NO: 51497 - DNA, 20 bp, Artificial Sequence
  Description of Artificial Sequence: Synthetic oligonucleotide
  Target: SCNA; (-) strand; PAM type: YTN; PAM sequence: CTG
caatcaggattctgcactca

SEQ ID NO: 51498 - DNA, 20 bp, Artificial Sequence
  Description of Artificial Sequence: Synthetic oligonucleotide
  Target: SCNA; (-) strand; PAM type: YTN; PAM sequence: TTA
agagtaaatgtgagctgcaa

SEQ ID NO: 51499 - DNA, 20 bp, Artificial Sequence
  Description of Artificial Sequence: Synthetic oligonucleotide
  Target: SCNA; (-) strand; PAM type: YTN; PAM sequence: TTT
aagagtaaatgtgagctgca

SEQ ID NO: 51500 - DNA, 20 bp, Artificial Sequence
  Description of Artificial Sequence: Synthetic oligonucleotide
  Target: SCNA; (-) strand; PAM type: YTN; PAM sequence: TTG
tttaagagtaaatgtgagct

SEQ ID NO: 51501 - DNA, 20 bp, Artificial Sequence
  Description of Artificial Sequence: Synthetic oligonucleotide
  Target: SCNA; (-) strand; PAM type: YTN; PAM sequence: CTT
gtttaagagtaaatgtgagc

SEQ ID NO: 51502 - DNA, 20 bp, Artificial Sequence
  Description of Artificial Sequence: Synthetic oligonucleotide
  Target: SCNA; (-) strand; PAM type: YTN; PAM sequence: CTC
ttgtttaagagtaaatgtga

SEQ ID NO: 51503 - DNA, 20 bp, Artificial Sequence
  Description of Artificial Sequence: Synthetic oligonucleotide
  Target: SCNA; (-) strand; PAM type: YTN; PAM sequence: CTG
agaatataagaagagggcct

SEQ ID NO: 51504 - DNA, 20 bp, Artificial Sequence
  Description of Artificial Sequence: Synthetic oligonucleotide
  Target: SCNA; (-) strand; PAM type: YTN; PAM sequence: TTA
cctgagaatataagaagagg

SEQ ID NO: 51505 - DNA, 20 bp, Artificial Sequence
  Description of Artificial Sequence: Synthetic oligonucleotide
  Target: SCNA; (-) strand; PAM type: YTN; PAM sequence: CTT
acctgagaatataagaagag

SEQ ID NO: 51506 - DNA, 20 bp, Artificial Sequence
  Description of Artificial Sequence: Synthetic oligonucleotide
  Target: SCNA; (-) strand; PAM type: YTN; PAM sequence: TTA
cagagtcacttacctgagaa

SEQ ID NO: 51507 - DNA, 20 bp, Artificial Sequence
  Description of Artificial Sequence: Synthetic oligonucleotide
  Target: SCNA; (-) strand; PAM type: YTN; PAM sequence: TTA
ttacagagtcacttacctga

SEQ ID NO: 51508 - DNA, 20 bp, Artificial Sequence
  Description of Artificial Sequence: Synthetic oligonucleotide
  Target: SCNA; (-) strand; PAM type: YTN; PAM sequence: CTT
attacagagtcacttacctg

SEQ ID NO: 51509 - DNA, 20 bp, Artificial Sequence
  Description of Artificial Sequence: Synthetic oligonucleotide
  Target: SCNA; (-) strand; PAM type: YTN; PAM sequence: CTC
ttattacagagtcacttacc

SEQ ID NO: 51510 - DNA, 20 bp, Artificial Sequence
  Description of Artificial Sequence: Synthetic oligonucleotide
  Target: SCNA; (-) strand; PAM type: YTN; PAM sequence: CTA
cacaatcctcttattacaga

SEQ ID NO: 51511 - DNA, 20 bp, Artificial Sequence
  Description of Artificial Sequence: Synthetic oligonucleotide
  Target: SCNA; (-) strand; PAM type: YTN; PAM sequence: TTA
ggtaaatgctacacaatcct

SEQ ID NO: 51512 - DNA, 20 bp, Artificial Sequence
  Description of Artificial Sequence: Synthetic oligonucleotide
  Target: SCNA; (-) strand; PAM type: YTN; PAM sequence: CTG
ttaggtaaatgctacacaat

SEQ ID NO: 51513 - DNA, 20 bp, Artificial Sequence
  Description of Artificial Sequence: Synthetic oligonucleotide
  Target: SCNA; (-) strand; PAM type: YTN; PAM sequence: CTA
aagtaaagctgttaggtaaa

SEQ ID NO: 51514 - DNA, 20 bp, Artificial Sequence
  Description of Artificial Sequence: Synthetic oligonucleotide
  Target: SCNA; (-) strand; PAM type: YTN; PAM sequence: CTA
aggacagtatacagtcctaa

SEQ ID NO: 51515 - DNA, 20 bp, Artificial Sequence
  Description of Artificial Sequence: Synthetic oligonucleotide
  Target: SCNA; (-) strand; PAM type: YTN; PAM sequence: TTA
aaaatatctaaggacagtat

SEQ ID NO: 51516 - DNA, 20 bp, Artificial Sequence
  Description of Artificial Sequence: Synthetic oligonucleotide
  Target: SCNA; (-) strand; PAM type: YTN; PAM sequence: TTT
aaaaatatctaaggacagta

SEQ ID NO: 51517 - DNA, 20 bp, Artificial Sequence
  Description of Artificial Sequence: Synthetic oligonucleotide
  Target: SCNA; (-) strand; PAM type: YTN; PAM sequence: TTT
taaaaatatctaaggacagt

SEQ ID NO: 51518 - DNA, 20 bp, Artificial Sequence
  Description of Artificial Sequence: Synthetic oligonucleotide
  Target: SCNA; (-) strand; PAM type: YTN; PAM sequence: TTA
gaaatgaaatataaaaagtt

SEQ ID NO: 51519 - DNA, 20 bp, Artificial Sequence
  Description of Artificial Sequence: Synthetic oligonucleotide
  Target: SCNA; (-) strand; PAM type: YTN; PAM sequence: TTT
agaaatgaaatataaaaagt

SEQ ID NO: 51520 - DNA, 20 bp, Artificial Sequence
  Description of Artificial Sequence: Synthetic oligonucleotide
  Target: SCNA; (-) strand; PAM type: YTN; PAM sequence: TTA
tttagaaatgaaatataaaa

SEQ ID NO: 51521 - DNA, 20 bp, Artificial Sequence
  Description of Artificial Sequence: Synthetic oligonucleotide
  Target: SCNA; (-) strand; PAM type: YTN; PAM sequence: CTT
atttagaaatgaaatataaa

SEQ ID NO: 51522 - DNA, 20 bp, Artificial Sequence
  Description of Artificial Sequence: Synthetic oligonucleotide
  Target: SCNA; (-) strand; PAM type: YTN; PAM sequence: TTC
ttatttagaaatgaaatata

SEQ ID NO: 51523 - DNA, 20 bp, Artificial Sequence
  Description of Artificial Sequence: Synthetic oligonucleotide
  Target: SCNA; (-) strand; PAM type: YTN; PAM sequence: TTG
taatattcttatttagaaat

SEQ ID NO: 51524 - DNA, 20 bp, Artificial Sequence
  Description of Artificial Sequence: Synthetic oligonucleotide
  Target: SCNA; (-) strand; PAM type: YTN; PAM sequence: TTT
gtaatattcttatttagaaa

SEQ ID NO: 51525 - DNA, 20 bp, Artificial Sequence
  Description of Artificial Sequence: Synthetic oligonucleotide
  Target: SCNA; (-) strand; PAM type: YTN; PAM sequence: TTT
tgtaatattcttatttagaa

SEQ ID NO: 51526 - DNA, 20 bp, Artificial Sequence
  Description of Artificial Sequence: Synthetic oligonucleotide
  Target: SCNA; (-) strand; PAM type: YTN; PAM sequence: TTT
ttgtaatattcttatttaga

SEQ ID NO: 51527 - DNA, 20 bp, Artificial Sequence
  Description of Artificial Sequence: Synthetic oligonucleotide
  Target: SCNA; (-) strand; PAM type: YTN; PAM sequence: TTT
tttgtaatattcttatttag

SEQ ID NO: 51528 - DNA, 20 bp, Artificial Sequence
  Description of Artificial Sequence: Synthetic oligonucleotide
  Target: SCNA; (-) strand; PAM type: YTN; PAM sequence: TTA
ggaaattttttgtaatattc

SEQ ID NO: 51529 - DNA, 20 bp, Artificial Sequence
  Description of Artificial Sequence: Synthetic oligonucleotide
  Target: SCNA; (-) strand; PAM type: YTN; PAM sequence: TTA
tataaatgttaggaaatttt

SEQ ID NO: 51530 - DNA, 20 bp, Artificial Sequence
  Description of Artificial Sequence: Synthetic oligonucleotide
  Target: SCNA; (-) strand; PAM type: YTN; PAM sequence: TTA
tgttatataaatgttaggaa

SEQ ID NO: 51531 - DNA, 20 bp, Artificial Sequence
  Description of Artificial Sequence: Synthetic oligonucleotide
  Target: SCNA; (-) strand; PAM type: YTN; PAM sequence: TTG
agaattatgttatataaatg

SEQ ID NO: 51532 - DNA, 20 bp, Artificial Sequence
  Description of Artificial Sequence: Synthetic oligonucleotide
  Target: SCNA; (-) strand; PAM type: YTN; PAM sequence: TTT
gagaattatgttatataaat

SEQ ID NO: 51533 - DNA, 20 bp, Artificial Sequence
  Description of Artificial Sequence: Synthetic oligonucleotide
  Target: SCNA; (-) strand; PAM type: YTN; PAM sequence: CTT
tgagaattatgttatataaa

SEQ ID NO: 51534 - DNA, 20 bp, Artificial Sequence
  Description of Artificial Sequence: Synthetic oligonucleotide
  Target: SCNA; (-) strand; PAM type: YTN; PAM sequence: CTA
ctttgagaattatgttatat

SEQ ID NO: 51535 - DNA, 20 bp, Artificial Sequence
  Description of Artificial Sequence: Synthetic oligonucleotide
  Target: SCNA; (-) strand; PAM type: YTN; PAM sequence: CTA
tctactttgagaattatgtt

SEQ ID NO: 51536 - DNA, 20 bp, Artificial Sequence
  Description of Artificial Sequence: Synthetic oligonucleotide
  Target: SCNA; (-) strand; PAM type: YTN; PAM sequence: CTC
tatctactttgagaattatg

SEQ ID NO: 51537 - DNA, 20 bp, Artificial Sequence
  Description of Artificial Sequence: Synthetic oligonucleotide
  Target: SCNA; (-) strand; PAM type: YTN; PAM sequence: TTG
gctctatctactttgagaat

SEQ ID NO: 51538 - DNA, 20 bp, Artificial Sequence
  Description of Artificial Sequence: Synthetic oligonucleotide
  Target: SCNA; (-) strand; PAM type: YTN; PAM sequence: TTT
ggctctatctactttgagaa

SEQ ID NO: 51539 - DNA, 20 bp, Artificial Sequence
  Description of Artificial Sequence: Synthetic oligonucleotide
  Target: SCNA; (-) strand; PAM type: YTN; PAM sequence: TTA
tttggctctatctactttga

SEQ ID NO: 51540 - DNA, 20 bp, Artificial Sequence
  Description of Artificial Sequence: Synthetic oligonucleotide
  Target: SCNA; (-) strand; PAM type: YTN; PAM sequence: CTA
gcagaagtcagttatttggc

SEQ ID NO: 51541 - DNA, 20 bp, Artificial Sequence
  Description of Artificial Sequence: Synthetic oligonucleotide
  Target: SCNA; (-) strand; PAM type: YTN; PAM sequence: CTG
gaaaaaaaactagcagaagt

SEQ ID NO: 51542 - DNA, 20 bp, Artificial Sequence
  Description of Artificial Sequence: Synthetic oligonucleotide
  Target: SCNA; (-) strand; PAM type: YTN; PAM sequence: CTG
gccatgtacataaaagacaa

SEQ ID NO: 51543 - DNA, 20 bp, Artificial Sequence
  Description of Artificial Sequence: Synthetic oligonucleotide
  Target: SCNA; (-) strand; PAM type: YTN; PAM sequence: TTC
tggccatgtacataaaagac

SEQ ID NO: 51544 - DNA, 20 bp, Artificial Sequence
  Description of Artificial Sequence: Synthetic oligonucleotide
  Target: SCNA; (-) strand; PAM type: YTN; PAM sequence: TTT
ctggccatgtacataaaaga

SEQ ID NO: 51545 - DNA, 20 bp, Artificial Sequence
  Description of Artificial Sequence: Synthetic oligonucleotide
  Target: SCNA; (-) strand; PAM type: YTN; PAM sequence: CTA
agtggtttctggccatgtac

SEQ ID NO: 51546 - DNA, 20 bp, Artificial Sequence
  Description of Artificial Sequence: Synthetic oligonucleotide
  Target: SCNA; (-) strand; PAM type: YTN; PAM sequence: TTC
taagtggtttctggccatgt

SEQ ID NO: 51547 - DNA, 20 bp, Artificial Sequence
  Description of Artificial Sequence: Synthetic oligonucleotide
  Target: SCNA; (-) strand; PAM type: YTN; PAM sequence: TTA
tgcaagttctaagtggtttc

SEQ ID NO: 51548 - DNA, 20 bp, Artificial Sequence
  Description of Artificial Sequence: Synthetic oligonucleotide
  Target: SCNA; (-) strand; PAM type: YTN; PAM sequence: TTT
atgcaagttctaagtggttt

SEQ ID NO: 51549 - DNA, 20 bp, Artificial Sequence
  Description of Artificial Sequence: Synthetic oligonucleotide
  Target: SCNA; (-) strand; PAM type: YTN; PAM sequence: TTT
tatgcaagttctaagtggtt

SEQ ID NO: 51550 - DNA, 20 bp, Artificial Sequence
  Description of Artificial Sequence: Synthetic oligonucleotide
  Target: SCNA; (-) strand; PAM type: YTN; PAM sequence: TTT
ttatgcaagttctaagtggt

SEQ ID NO: 51551 - DNA, 20 bp, Artificial Sequence
  Description of Artificial Sequence: Synthetic oligonucleotide
  Target: SCNA; (-) strand; PAM type: YTN; PAM sequence: TTG
tttttatgcaagttctaagt

SEQ ID NO: 51552 - DNA, 20 bp, Artificial Sequence
  Description of Artificial Sequence: Synthetic oligonucleotide
  Target: SCNA; (-) strand; PAM type: YTN; PAM sequence: CTT
gtttttatgcaagttctaag

SEQ ID NO: 51553 - DNA, 20 bp, Artificial Sequence
  Description of Artificial Sequence: Synthetic oligonucleotide
  Target: SCNA; (-) strand; PAM type: YTN; PAM sequence: TTA
acttgtttttatgcaagttc

SEQ ID NO: 51554 - DNA, 20 bp, Artificial Sequence
  Description of Artificial Sequence: Synthetic oligonucleotide
  Target: SCNA; (-) strand; PAM type: YTN; PAM sequence: CTT
aacttgtttttatgcaagtt

SEQ ID NO: 51555 - DNA, 20 bp, Artificial Sequence
  Description of Artificial Sequence: Synthetic oligonucleotide
  Target: SCNA; (-) strand; PAM type: YTN; PAM sequence: TTC
ttaacttgtttttatgcaag

SEQ ID NO: 51556 - DNA, 20 bp, Artificial Sequence
  Description of Artificial Sequence: Synthetic oligonucleotide
  Target: SCNA; (-) strand; PAM type: YTN; PAM sequence: CTT
cttaacttgtttttatgcaa

SEQ ID NO: 51557 - DNA, 20 bp, Artificial Sequence
  Description of Artificial Sequence: Synthetic oligonucleotide
  Target: SCNA; (-) strand; PAM type: YTN; PAM sequence: TTG
cttcttaacttgtttttatg

SEQ ID NO: 51558 - DNA, 20 bp, Artificial Sequence
  Description of Artificial Sequence: Synthetic oligonucleotide
  Target: SCNA; (-) strand; PAM type: YTN; PAM sequence: TTT
gcttcttaacttgtttttat

SEQ ID NO: 51559 - DNA, 20 bp, Artificial Sequence
  Description of Artificial Sequence: Synthetic oligonucleotide
  Target: SCNA; (-) strand; PAM type: YTN; PAM sequence: TTT
tgcttcttaacttgttttta

SEQ ID NO: 51560 - DNA, 20 bp, Artificial Sequence
  Description of Artificial Sequence: Synthetic oligonucleotide
  Target: SCNA; (-) strand; PAM type: YTN; PAM sequence: CTG
acattttgcttcttaacttg

SEQ ID NO: 51561 - DNA, 20 bp, Artificial Sequence
  Description of Artificial Sequence: Synthetic oligonucleotide
  Target: SCNA; (-) strand; PAM type: YTN; PAM sequence: CTA
actgacattttgcttcttaa

SEQ ID NO: 51562 - DNA, 20 bp, Artificial Sequence
  Description of Artificial Sequence: Synthetic oligonucleotide
  Target: SCNA; (-) strand; PAM type: YTN; PAM sequence: CTG
ggatagagaaaggaactaac

SEQ ID NO: 51563 - DNA, 20 bp, Artificial Sequence
  Description of Artificial Sequence: Synthetic oligonucleotide
  Target: SCNA; (-) strand; PAM type: YTN; PAM sequence: CTC
tgggatagagaaaggaacta

SEQ ID NO: 51564 - DNA, 20 bp, Artificial Sequence
  Description of Artificial Sequence: Synthetic oligonucleotide
  Target: SCNA; (-) strand; PAM type: YTN; PAM sequence: CTA
atgaaacagtgcgctctggg

SEQ ID NO: 51565 - DNA, 20 bp, Artificial Sequence
  Description of Artificial Sequence: Synthetic oligonucleotide
  Target: SCNA; (-) strand; PAM type: YTN; PAM sequence: TTC
ctaatgaaacagtgcgctct

SEQ ID NO: 51566 - DNA, 20 bp, Artificial Sequence
  Description of Artificial Sequence: Synthetic oligonucleotide
  Target: SCNA; (-) strand; PAM type: YTN; PAM sequence: TTG
aaaaattcctaatgaaacag

SEQ ID NO: 51567 - DNA, 20 bp, Artificial Sequence
  Description of Artificial Sequence: Synthetic oligonucleotide
  Target: SCNA; (-) strand; PAM type: YTN; PAM sequence: TTA
ttgaaaaattcctaatgaaa

SEQ ID NO: 51568 - DNA, 20 bp, Artificial Sequence
  Description of Artificial Sequence: Synthetic oligonucleotide
  Target: SCNA; (-) strand; PAM type: YTN; PAM sequence: TTT
attgaaaaattcctaatgaa

SEQ ID NO: 51569 - DNA, 20 bp, Artificial Sequence
  Description of Artificial Sequence: Synthetic oligonucleotide
  Target: SCNA; (-) strand; PAM type: YTN; PAM sequence: TTT
tattgaaaaattcctaatga

SEQ ID NO: 51570 - DNA, 20 bp, Artificial Sequence
  Description of Artificial Sequence: Synthetic oligonucleotide
  Target: SCNA; (-) strand; PAM type: YTN; PAM sequence: TTT
ttattgaaaaattcctaatg

SEQ ID NO: 51571 - DNA, 20 bp, Artificial Sequence
  Description of Artificial Sequence: Synthetic oligonucleotide
  Target: SCNA; (-) strand; PAM type: YTN; PAM sequence: TTA
tttttattgaaaaattccta

SEQ ID NO: 51572 - DNA, 20 bp, Artificial Sequence
  Description of Artificial Sequence: Synthetic oligonucleotide
  Target: SCNA; (-) strand; PAM type: YTN; PAM sequence: TTA
ttatttttattgaaaaattc

SEQ ID NO: 51573 - DNA, 20 bp, Artificial Sequence
  Description of Artificial Sequence: Synthetic oligonucleotide
  Target: SCNA; (-) strand; PAM type: YTN; PAM sequence: CTA
cattattatttttattgaaa

SEQ ID NO: 51574 - DNA, 20 bp, Artificial Sequence
  Description of Artificial Sequence: Synthetic oligonucleotide
  Target: SCNA; (-) strand; PAM type: YTN; PAM sequence: TTC
tacattattatttttattga

SEQ ID NO: 51575 - DNA, 20 bp, Artificial Sequence
  Description of Artificial Sequence: Synthetic oligonucleotide
  Target: SCNA; (-) strand; PAM type: YTN; PAM sequence: CTT
ctacattattatttttattg

SEQ ID NO: 51576 - DNA, 20 bp, Artificial Sequence
  Description of Artificial Sequence: Synthetic oligonucleotide
  Target: SCNA; (-) strand; PAM type: YTN; PAM sequence: CTG
taaaaatcacaccttctaca

SEQ ID NO: 51577 - DNA, 20 bp, Artificial Sequence
  Description of Artificial Sequence: Synthetic oligonucleotide
  Target: SCNA; (-) strand; PAM type: YTN; PAM sequence: CTA
tatatcaagacatgaaaact

SEQ ID NO: 51578 - DNA, 20 bp, Artificial Sequence
  Description of Artificial Sequence: Synthetic oligonucleotide
  Target: SCNA; (-) strand; PAM type: YTN; PAM sequence: TTC
actatatatcaagacatgaa

SEQ ID NO: 51579 - DNA, 20 bp, Artificial Sequence
  Description of Artificial Sequence: Synthetic oligonucleotide
  Target: SCNA; (-) strand; PAM type: YTN; PAM sequence: TTT
cactatatatcaagacatga

SEQ ID NO: 51580 - DNA, 20 bp, Artificial Sequence
  Description of Artificial Sequence: Synthetic oligonucleotide
  Target: SCNA; (-) strand; PAM type: YTN; PAM sequence: CTC
aatttcactatatatcaaga

SEQ ID NO: 51581 - DNA, 20 bp, Artificial Sequence
  Description of Artificial Sequence: Synthetic oligonucleotide
  Target: SCNA; (-) strand; PAM type: YTN; PAM sequence: TTG
ctcaatttcactatatatca

SEQ ID NO: 51582 - DNA, 20 bp, Artificial Sequence
  Description of Artificial Sequence: Synthetic oligonucleotide
  Target: SCNA; (-) strand; PAM type: YTN; PAM sequence: CTC
acattgctcaatttcactat

SEQ ID NO: 51583 - DNA, 20 bp, Artificial Sequence
  Description of Artificial Sequence: Synthetic oligonucleotide
  Target: SCNA; (-) strand; PAM type: YTN; PAM sequence: TTC
tcacattgctcaatttcact

SEQ ID NO: 51584 - DNA, 20 bp, Artificial Sequence
  Description of Artificial Sequence: Synthetic oligonucleotide
  Target: SCNA; (-) strand; PAM type: YTN; PAM sequence: TTA
ttctcacattgctcaatttc

SEQ ID NO: 51585 - DNA, 20 bp, Artificial Sequence
  Description of Artificial Sequence: Synthetic oligonucleotide
  Target: SCNA; (-) strand; PAM type: YTN; PAM sequence: TTT
attctcacattgctcaattt

SEQ ID NO: 51586 - DNA, 20 bp, Artificial Sequence
  Description of Artificial Sequence: Synthetic oligonucleotide
  Target: SCNA; (-) strand; PAM type: YTN; PAM sequence: CTA
gatcacatttattctcacat

SEQ ID NO: 51587 - DNA, 20 bp, Artificial Sequence
  Description of Artificial Sequence: Synthetic oligonucleotide
  Target: SCNA; (-) strand; PAM type: YTN; PAM sequence: TTC
tagatcacatttattctcac

SEQ ID NO: 51588 - DNA, 20 bp, Artificial Sequence
  Description of Artificial Sequence: Synthetic oligonucleotide
  Target: SCNA; (-) strand; PAM type: YTN; PAM sequence: TTT
ctagatcacatttattctca

SEQ ID NO: 51589 - DNA, 20 bp, Artificial Sequence
  Description of Artificial Sequence: Synthetic oligonucleotide
  Target: SCNA; (-) strand; PAM type: YTN; PAM sequence: TTT
tctagatcacatttattctc

SEQ ID NO: 51590 - DNA, 20 bp, Artificial Sequence
  Description of Artificial Sequence: Synthetic oligonucleotide
  Target: SCNA; (-) strand; PAM type: YTN; PAM sequence: CTT
ttctagatcacatttattct

SEQ ID NO: 51591 - DNA, 20 bp, Artificial Sequence
  Description of Artificial Sequence: Synthetic oligonucleotide
  Target: SCNA; (-) strand; PAM type: YTN; PAM sequence: TTC
ttttctagatcacatttatt

SEQ ID NO: 51592 - DNA, 20 bp, Artificial Sequence
  Description of Artificial Sequence: Synthetic oligonucleotide
  Target: SCNA; (-) strand; PAM type: YTN; PAM sequence: TTT
cttttctagatcacatttat

SEQ ID NO: 51593 - DNA, 20 bp, Artificial Sequence
  Description of Artificial Sequence: Synthetic oligonucleotide
  Target: SCNA; (-) strand; PAM type: YTN; PAM sequence: TTT
tcttttctagatcacattta

SEQ ID NO: 51594 - DNA, 20 bp, Artificial Sequence
  Description of Artificial Sequence: Synthetic oligonucleotide
  Target: SCNA; (-) strand; PAM type: YTN; PAM sequence: TTT
ttcttttctagatcacattt

SEQ ID NO: 51595 - DNA, 20 bp, Artificial Sequence
  Description of Artificial Sequence: Synthetic oligonucleotide
  Target: SCNA; (-) strand; PAM type: YTN; PAM sequence: CTC
aaatcgaaagatatttttct

SEQ ID NO: 51596 - DNA, 20 bp, Artificial Sequence
  Description of Artificial Sequence: Synthetic oligonucleotide
  Target: SCNA; (-) strand; PAM type: YTN; PAM sequence: TTC
tcaaatcgaaagatattttt

SEQ ID NO: 51597 - DNA, 20 bp, Artificial Sequence
  Description of Artificial Sequence: Synthetic oligonucleotide
  Target: SCNA; (-) strand; PAM type: YTN; PAM sequence: CTG
ttctcaaatcgaaagatatt

SEQ ID NO: 51598 - DNA, 20 bp, Artificial Sequence
  Description of Artificial Sequence: Synthetic oligonucleotide
  Target: SCNA; (-) strand; PAM type: YTN; PAM sequence: TTA
accatctgttctcaaatcga

SEQ ID NO: 51599 - DNA, 20 bp, Artificial Sequence
  Description of Artificial Sequence: Synthetic oligonucleotide
  Target: SCNA; (-) strand; PAM type: YTN; PAM sequence: TTA
ttaaccatctgttctcaaat

SEQ ID NO: 51600 - DNA, 20 bp, Artificial Sequence
  Description of Artificial Sequence: Synthetic oligonucleotide
  Target: SCNA; (-) strand; PAM type: YTN; PAM sequence: TTA
ttattaaccatctgttctca

SEQ ID NO: 51601 - DNA, 20 bp, Artificial Sequence
  Description of Artificial Sequence: Synthetic oligonucleotide
  Target: SCNA; (-) strand; PAM type: YTN; PAM sequence: CTG
tcatgattattattaaccat

SEQ ID NO: 51602 - DNA, 20 bp, Artificial Sequence
  Description of Artificial Sequence: Synthetic oligonucleotide
  Target: SCNA; (-) strand; PAM type: YTN; PAM sequence: TTG
aatcactgtcatgattatta

SEQ ID NO: 51603 - DNA, 20 bp, Artificial Sequence
  Description of Artificial Sequence: Synthetic oligonucleotide
  Target: SCNA; (-) strand; PAM type: YTN; PAM sequence: CTT
gaatcactgtcatgattatt

SEQ ID NO: 51604 - DNA, 20 bp, Artificial Sequence
  Description of Artificial Sequence: Synthetic oligonucleotide
  Target: SCNA; (-) strand; PAM type: YTN; PAM sequence: TTA
accttgaatcactgtcatga

SEQ ID NO: 51605 - DNA, 20 bp, Artificial Sequence
  Description of Artificial Sequence: Synthetic oligonucleotide
  Target: SCNA; (-) strand; PAM type: YTN; PAM sequence: TTA
gcatgtaggtcattaacctt

SEQ ID NO: 51606 - DNA, 20 bp, Artificial Sequence
  Description of Artificial Sequence: Synthetic oligonucleotide
  Target: SCNA; (-) strand; PAM type: YTN; PAM sequence: TTT
agcatgtaggtcattaacct

SEQ ID NO: 51607 - DNA, 20 bp, Artificial Sequence
  Description of Artificial Sequence: Synthetic oligonucleotide
  Target: SCNA; (-) strand; PAM type: YTN; PAM sequence: TTA
aaacaagtttagcatgtagg

SEQ ID NO: 51608 - DNA, 20 bp, Artificial Sequence
  Description of Artificial Sequence: Synthetic oligonucleotide
  Target: SCNA; (-) strand; PAM type: YTN; PAM sequence: TTA
aaaattaaaacaagtttagc

SEQ ID NO: 51609 - DNA, 20 bp, Artificial Sequence
  Description of Artificial Sequence: Synthetic oligonucleotide
  Target: SCNA; (-) strand; PAM type: YTN; PAM sequence: TTT
aaaaattaaaacaagtttag

SEQ ID NO: 51610 - DNA, 20 bp, Artificial Sequence
  Description of Artificial Sequence: Synthetic oligonucleotide
  Target: SCNA; (-) strand; PAM type: YTN; PAM sequence: TTT
taaaaattaaaacaagttta

SEQ ID NO: 51611 - DNA, 20 bp, Artificial Sequence
  Description of Artificial Sequence: Synthetic oligonucleotide
  Target: SCNA; (-) strand; PAM type: YTN; PAM sequence: CTT
ttaaaaattaaaacaagttt

SEQ ID NO: 51612 - DNA, 20 bp, Artificial Sequence
  Description of Artificial Sequence: Synthetic oligonucleotide
  Target: SCNA; (-) strand; PAM type: YTN; PAM sequence: TTA
gtaatggcttttaaaaatta

SEQ ID NO: 51613 - DNA, 20 bp, Artificial Sequence
  Description of Artificial Sequence: Synthetic oligonucleotide
  Target: SCNA; (-) strand; PAM type: YTN; PAM sequence: TTC
agttagtaatggcttttaaa

SEQ ID NO: 51614 - DNA, 20 bp, Artificial Sequence
  Description of Artificial Sequence: Synthetic oligonucleotide
  Target: SCNA; (-) strand; PAM type: YTN; PAM sequence: TTT
cagttagtaatggcttttaa

SEQ ID NO: 51615 - DNA, 20 bp, Artificial Sequence
  Description of Artificial Sequence: Synthetic oligonucleotide
  Target: SCNA; (-) strand; PAM type: YTN; PAM sequence: TTT
tcagttagtaatggctttta

SEQ ID NO: 51616 - DNA, 20 bp, Artificial Sequence
  Description of Artificial Sequence: Synthetic oligonucleotide
  Target: SCNA; (-) strand; PAM type: YTN; PAM sequence: CTA
aagcagggagttttcagtta

SEQ ID NO: 51617 - DNA, 20 bp, Artificial Sequence
  Description of Artificial Sequence: Synthetic oligonucleotide
  Target: SCNA; (-) strand; PAM type: YTN; PAM sequence: TTC
agctaaagcagggagttttc

SEQ ID NO: 51618 - DNA, 20 bp, Artificial Sequence
  Description of Artificial Sequence: Synthetic oligonucleotide
  Target: SCNA; (-) strand; PAM type: YTN; PAM sequence: TTG
gttcagctaaagcagggagt

SEQ ID NO: 51619 - DNA, 20 bp, Artificial Sequence
  Description of Artificial Sequence: Synthetic oligonucleotide
  Target: SCNA; (-) strand; PAM type: YTN; PAM sequence: TTA
agtgttggttcagctaaagc

SEQ ID NO: 51620 - DNA, 20 bp, Artificial Sequence
  Description of Artificial Sequence: Synthetic oligonucleotide
  Target: SCNA; (-) strand; PAM type: YTN; PAM sequence: TTG
ttaagtgttggttcagctaa

SEQ ID NO: 51621 - DNA, 20 bp, Artificial Sequence
  Description of Artificial Sequence: Synthetic oligonucleotide
  Target: SCNA; (-) strand; PAM type: YTN; PAM sequence: CTT
gttaagtgttggttcagcta

SEQ ID NO: 51622 - DNA, 20 bp, Artificial Sequence
  Description of Artificial Sequence: Synthetic oligonucleotide
  Target: SCNA; (-) strand; PAM type: YTN; PAM sequence: TTA
aaaaacacttgttaagtgtt

SEQ ID NO: 51623 - DNA, 20 bp, Artificial Sequence
  Description of Artificial Sequence: Synthetic oligonucleotide
  Target: SCNA; (-) strand; PAM type: YTN; PAM sequence: TTT
aaaaaacacttgttaagtgt

SEQ ID NO: 51624 - DNA, 20 bp, Artificial Sequence
  Description of Artificial Sequence: Synthetic oligonucleotide
  Target: SCNA; (-) strand; PAM type: YTN; PAM sequence: CTT
taaaaaacacttgttaagtg

SEQ ID NO: 51625 - DNA, 20 bp, Artificial Sequence
  Description of Artificial Sequence: Synthetic oligonucleotide
  Target: SCNA; (-) strand; PAM type: YTN; PAM sequence: CTG
aaggtatcaagacatcttta

SEQ ID NO: 51626 - DNA, 20 bp, Artificial Sequence
  Description of Artificial Sequence: Synthetic oligonucleotide
  Target: SCNA; (-) strand; PAM type: YTN; PAM sequence: CTC
tgaaggtatcaagacatctt

SEQ ID NO: 51627 - DNA, 20 bp, Artificial Sequence
  Description of Artificial Sequence: Synthetic oligonucleotide
  Target: SCNA; (-) strand; PAM type: YTN; PAM sequence: TTC
tctgaaggtatcaagacatc

SEQ ID NO: 51628 - DNA, 20 bp, Artificial Sequence
  Description of Artificial Sequence: Synthetic oligonucleotide
  Target: SCNA; (-) strand; PAM type: YTN; PAM sequence: CTT
ctctgaaggtatcaagacat

SEQ ID NO: 51629 - DNA, 20 bp, Artificial Sequence
  Description of Artificial Sequence: Synthetic oligonucleotide
  Target: SCNA; (-) strand; PAM type: YTN; PAM sequence: CTA
gcagcaggagaacttctctg

SEQ ID NO: 51630 - DNA, 20 bp, Artificial Sequence
  Description of Artificial Sequence: Synthetic oligonucleotide
  Target: SCNA; (-) strand; PAM type: YTN; PAM sequence: CTC
cagagaaaactagcagcagg

SEQ ID NO: 51631 - DNA, 20 bp, Artificial Sequence
  Description of Artificial Sequence: Synthetic oligonucleotide
  Target: SCNA; (-) strand; PAM type: YTN; PAM sequence: TTG
ctccagagaaaactagcagc

SEQ ID NO: 51632 - DNA, 20 bp, Artificial Sequence
  Description of Artificial Sequence: Synthetic oligonucleotide
  Target: SCNA; (-) strand; PAM type: YTN; PAM sequence: CTG
ttgctccagagaaaactagc

SEQ ID NO: 51633 - DNA, 20 bp, Artificial Sequence
  Description of Artificial Sequence: Synthetic oligonucleotide
  Target: SCNA; (-) strand; PAM type: YTN; PAM sequence: TTC
ccactgttgctccagagaaa

SEQ ID NO: 51634 - DNA, 20 bp, Artificial Sequence
  Description of Artificial Sequence: Synthetic oligonucleotide
  Target: SCNA; (-) strand; PAM type: YTN; PAM sequence: TTT
cccactgttgctccagagaa

SEQ ID NO: 51635 - DNA, 20 bp, Artificial Sequence
  Description of Artificial Sequence: Synthetic oligonucleotide
  Target: SCNA; (-) strand; PAM type: YTN; PAM sequence: CTG
gggtttcccactgttgctcc

SEQ ID NO: 51636 - DNA, 20 bp, Artificial Sequence
  Description of Artificial Sequence: Synthetic oligonucleotide
  Target: SCNA; (-) strand; PAM type: YTN; PAM sequence: TTC
acaaaggagtaaccacctgg

SEQ ID NO: 51637 - DNA, 20 bp, Artificial Sequence
  Description of Artificial Sequence: Synthetic oligonucleotide
  Target: SCNA; (-) strand; PAM type: YTN; PAM sequence: TTA
tattcacaaaggagtaacca

SEQ ID NO: 51638 - DNA, 20 bp, Artificial Sequence
  Description of Artificial Sequence: Synthetic oligonucleotide
  Target: SCNA; (-) strand; PAM type: YTN; PAM sequence: CTT
atattcacaaaggagtaacc

SEQ ID NO: 51639 - DNA, 20 bp, Artificial Sequence
  Description of Artificial Sequence: Synthetic oligonucleotide
  Target: SCNA; (-) strand; PAM type: YTN; PAM sequence: TTC
atgtggatgcttatattcac

SEQ ID NO: 51640 - DNA, 20 bp, Artificial Sequence
  Description of Artificial Sequence: Synthetic oligonucleotide
  Target: SCNA; (-) strand; PAM type: YTN; PAM sequence: TTT
catgtggatgcttatattca

SEQ ID NO: 51641 - DNA, 20 bp, Artificial Sequence
  Description of Artificial Sequence: Synthetic oligonucleotide
  Target: SCNA; (-) strand; PAM type: YTN; PAM sequence: TTG
cccgtgcatgcggaaacaac

SEQ ID NO: 51642 - DNA, 20 bp, Artificial Sequence
  Description of Artificial Sequence: Synthetic oligonucleotide
  Target: SCNA; (-) strand; PAM type: YTN; PAM sequence: TTT
gcccgtgcatgcggaaacaa

SEQ ID NO: 51643 - DNA, 20 bp, Artificial Sequence
  Description of Artificial Sequence: Synthetic oligonucleotide
  Target: SCNA; (-) strand; PAM type: YTN; PAM sequence: TTA
gtataacaaaacatgtttgc

SEQ ID NO: 51644 - DNA, 20 bp, Artificial Sequence
  Description of Artificial Sequence: Synthetic oligonucleotide
  Target: SCNA; (-) strand; PAM type: YTN; PAM sequence: TTC
agacattagtataacaaaac

SEQ ID NO: 51645 - DNA, 20 bp, Artificial Sequence
  Description of Artificial Sequence: Synthetic oligonucleotide
  Target: SCNA; (-) strand; PAM type: YTN; PAM sequence: CTT
cagacattagtataacaaaa

SEQ ID NO: 51646 - DNA, 20 bp, Artificial Sequence
  Description of Artificial Sequence: Synthetic oligonucleotide
  Target: SCNA; (-) strand; PAM type: YTN; PAM sequence: TTG
tacttcagacattagtataa

SEQ ID NO: 51647 - DNA, 20 bp, Artificial Sequence
  Description of Artificial Sequence: Synthetic oligonucleotide
  Target: SCNA; (-) strand; PAM type: YTN; PAM sequence: TTT
gtacttcagacattagtata

SEQ ID NO: 51648 - DNA, 20 bp, Artificial Sequence
  Description of Artificial Sequence: Synthetic oligonucleotide
  Target: SCNA; (-) strand; PAM type: YTN; PAM sequence: CTA
caacaatttgtacttcagac

SEQ ID NO: 51649 - DNA, 20 bp, Artificial Sequence
  Description of Artificial Sequence: Synthetic oligonucleotide
  Target: SCNA; (-) strand; PAM type: YTN; PAM sequence: TTC
tacaacaatttgtacttcag

SEQ ID NO: 51650 - DNA, 20 bp, Artificial Sequence
  Description of Artificial Sequence: Synthetic oligonucleotide
  Target: SCNA; (-) strand; PAM type: YTN; PAM sequence: CTA
tggaataaaatgattctaca

SEQ ID NO: 51651 - DNA, 20 bp, Artificial Sequence
  Description of Artificial Sequence: Synthetic oligonucleotide
  Target: SCNA; (-) strand; PAM type: YTN; PAM sequence: TTG
gaagtctatggaataaaatg

SEQ ID NO: 51652 - DNA, 20 bp, Artificial Sequence
  Description of Artificial Sequence: Synthetic oligonucleotide
  Target: SCNA; (-) strand; PAM type: YTN; PAM sequence: CTT
ggaagtctatggaataaaat

SEQ ID NO: 51653 - DNA, 20 bp, Artificial Sequence
  Description of Artificial Sequence: Synthetic oligonucleotide
  Target: SCNA; (-) strand; PAM type: YTN; PAM sequence: TTA
gacttggaagtctatggaat

SEQ ID NO: 51654 - DNA, 20 bp, Artificial Sequence
  Description of Artificial Sequence: Synthetic oligonucleotide
  Target: SCNA; (-) strand; PAM type: YTN; PAM sequence: TTA
gaattagacttggaagtcta

SEQ ID NO: 51655 - DNA, 20 bp, Artificial Sequence
  Description of Artificial Sequence: Synthetic oligonucleotide
  Target: SCNA; (-) strand; PAM type: YTN; PAM sequence: TTA
gtattagaattagacttgga

SEQ ID NO: 51656 - DNA, 20 bp, Artificial Sequence
  Description of Artificial Sequence: Synthetic oligonucleotide
  Target: SCNA; (-) strand; PAM type: YTN; PAM sequence: TTG
atggaagttagtattagaat

SEQ ID NO: 51657 - DNA, 20 bp, Artificial Sequence
  Description of Artificial Sequence: Synthetic oligonucleotide
  Target: SCNA; (-) strand; PAM type: YTN; PAM sequence: CTA
ttgatggaagttagtattag

SEQ ID NO: 51658 - DNA, 20 bp, Artificial Sequence
  Description of Artificial Sequence: Synthetic oligonucleotide
  Target: SCNA; (-) strand; PAM type: YTN; PAM sequence: TTA
actattgatggaagttagta

SEQ ID NO: 51659 - DNA, 20 bp, Artificial Sequence
  Description of Artificial Sequence: Synthetic oligonucleotide
  Target: SCNA; (-) strand; PAM type: YTN; PAM sequence: TTT
aactattgatggaagttagt

SEQ ID NO: 51660 - DNA, 20 bp, Artificial Sequence
  Description of Artificial Sequence: Synthetic oligonucleotide
  Target: SCNA; (-) strand; PAM type: YTN; PAM sequence: TTG
gatagaagataaataataat

SEQ ID NO: 51661 - DNA, 20 bp, Artificial Sequence
  Description of Artificial Sequence: Synthetic oligonucleotide
  Target: SCNA; (-) strand; PAM type: YTN; PAM sequence: TTT
ggatagaagataaataataa

SEQ ID NO: 51662 - DNA, 20 bp, Artificial Sequence
  Description of Artificial Sequence: Synthetic oligonucleotide
  Target: SCNA; (-) strand; PAM type: YTN; PAM sequence: CTT
tggatagaagataaataata

SEQ ID NO: 51663 - DNA, 20 bp, Artificial Sequence
  Description of Artificial Sequence: Synthetic oligonucleotide
  Target: SCNA; (-) strand; PAM type: YTN; PAM sequence: TTC
aggtagcctttggatagaag

SEQ ID NO: 51664 - DNA, 20 bp, Artificial Sequence
  Description of Artificial Sequence: Synthetic oligonucleotide
  Target: SCNA; (-) strand; PAM type: YTN; PAM sequence: CTT
caggtagcctttggatagaa

SEQ ID NO: 51665 - DNA, 20 bp, Artificial Sequence
  Description of Artificial Sequence: Synthetic oligonucleotide
  Target: SCNA; (-) strand; PAM type: YTN; PAM sequence: CTC
acaccaaagtgataggacct

SEQ ID NO: 51666 - DNA, 20 bp, Artificial Sequence
  Description of Artificial Sequence: Synthetic oligonucleotide
  Target: SCNA; (-) strand; PAM type: YTN; PAM sequence: TTC
tcacaccaaagtgataggac

SEQ ID NO: 51667 - DNA, 20 bp, Artificial Sequence
  Description of Artificial Sequence: Synthetic oligonucleotide
  Target: SCNA; (-) strand; PAM type: YTN; PAM sequence: CTT
ctcacaccaaagtgatagga

SEQ ID NO: 51668 - DNA, 20 bp, Artificial Sequence
  Description of Artificial Sequence: Synthetic oligonucleotide
  Target: SCNA; (-) strand; PAM type: YTN; PAM sequence: TTC
ttctcacaccaaagtgatag

SEQ ID NO: 51669 - DNA, 20 bp, Artificial Sequence
  Description of Artificial Sequence: Synthetic oligonucleotide
  Target: SCNA; (-) strand; PAM type: YTN; PAM sequence: TTA
cccgattcttctcacaccaa

SEQ ID NO: 51670 - DNA, 20 bp, Artificial Sequence
  Description of Artificial Sequence: Synthetic oligonucleotide
  Target: SCNA; (-) strand; PAM type: YTN; PAM sequence: CTT
acccgattcttctcacacca

SEQ ID NO: 51671 - DNA, 20 bp, Artificial Sequence
  Description of Artificial Sequence: Synthetic oligonucleotide
  Target: SCNA; (-) strand; PAM type: YTN; PAM sequence: TTG
tcttacccgattcttctcac

SEQ ID NO: 51672 - DNA, 20 bp, Artificial Sequence
  Description of Artificial Sequence: Synthetic oligonucleotide
  Target: SCNA; (-) strand; PAM type: YTN; PAM sequence: TTT
gtcttacccgattcttctca

SEQ ID NO: 51673 - DNA, 20 bp, Artificial Sequence
  Description of Artificial Sequence: Synthetic oligonucleotide
  Target: SCNA; (-) strand; PAM type: YTN; PAM sequence: TTT
tgtcttacccgattcttctc

SEQ ID NO: 51674 - DNA, 20 bp, Artificial Sequence
  Description of Artificial Sequence: Synthetic oligonucleotide
  Target: SCNA; (-) strand; PAM type: YTN; PAM sequence: TTT
ttgtcttacccgattcttct

SEQ ID NO: 51675 - DNA, 20 bp, Artificial Sequence
  Description of Artificial Sequence: Synthetic oligonucleotide
  Target: SCNA; (-) strand; PAM type: YTN; PAM sequence: CTT
tttgtcttacccgattcttc

SEQ ID NO: 51676 - DNA, 20 bp, Artificial Sequence
  Description of Artificial Sequence: Synthetic oligonucleotide
  Target: SCNA; (-) strand; PAM type: YTN; PAM sequence: CTA
actttttgtcttacccgatt

SEQ ID NO: 51677 - DNA, 20 bp, Artificial Sequence
  Description of Artificial Sequence: Synthetic oligonucleotide
  Target: SCNA; (-) strand; PAM type: YTN; PAM sequence: CTG
gtgcaagcctaactttttgt

SEQ ID NO: 51678 - DNA, 20 bp, Artificial Sequence
  Description of Artificial Sequence: Synthetic oligonucleotide
  Target: SCNA; (-) strand; PAM type: YTN; PAM sequence: TTG
ataactggtgcaagcctaac

SEQ ID NO: 51679 - DNA, 20 bp, Artificial Sequence
  Description of Artificial Sequence: Synthetic oligonucleotide
  Target: SCNA; (-) strand; PAM type: YTN; PAM sequence: CTA
ttgataactggtgcaagcct

SEQ ID NO: 51680 - DNA, 20 bp, Artificial Sequence
  Description of Artificial Sequence: Synthetic oligonucleotide
  Target: SCNA; (-) strand; PAM type: YTN; PAM sequence: TTC
tattgataactggtgcaagc

SEQ ID NO: 51681 - DNA, 20 bp, Artificial Sequence
  Description of Artificial Sequence: Synthetic oligonucleotide
  Target: SCNA; (-) strand; PAM type: YTN; PAM sequence: TTA
atattctattgataactggt

SEQ ID NO: 51682 - DNA, 20 bp, Artificial Sequence
  Description of Artificial Sequence: Synthetic oligonucleotide
  Target: SCNA; (-) strand; PAM type: YTN; PAM sequence: CTT
aatattctattgataactgg

SEQ ID NO: 51683 - DNA, 20 bp, Artificial Sequence
  Description of Artificial Sequence: Synthetic oligonucleotide
  Target: SCNA; (-) strand; PAM type: YTN; PAM sequence: TTC
ttaatattctattgataact

SEQ ID NO: 51684 - DNA, 20 bp, Artificial Sequence
  Description of Artificial Sequence: Synthetic oligonucleotide
  Target: SCNA; (-) strand; PAM type: YTN; PAM sequence: TTT
cttaatattctattgataac

SEQ ID NO: 51685 - DNA, 20 bp, Artificial Sequence
  Description of Artificial Sequence: Synthetic oligonucleotide
  Target: SCNA; (-) strand; PAM type: YTN; PAM sequence: CTT
tcttaatattctattgataa

SEQ ID NO: 51686 - DNA, 20 bp, Artificial Sequence
  Description of Artificial Sequence: Synthetic oligonucleotide
  Target: SCNA; (-) strand; PAM type: YTN; PAM sequence: TTA
aaaatctttcttaatattct

SEQ ID NO: 51687 - DNA, 20 bp, Artificial Sequence
  Description of Artificial Sequence: Synthetic oligonucleotide
  Target: SCNA; (-) strand; PAM type: YTN; PAM sequence: CTT
aaaaatctttcttaatattc

SEQ ID NO: 51688 - DNA, 20 bp, Artificial Sequence
  Description of Artificial Sequence: Synthetic oligonucleotide
  Target: SCNA; (-) strand; PAM type: YTN; PAM sequence: TTC
ttaaaaatctttcttaatat

SEQ ID NO: 51689 - DNA, 20 bp, Artificial Sequence
  Description of Artificial Sequence: Synthetic oligonucleotide
  Target: SCNA; (-) strand; PAM type: YTN; PAM sequence: CTT
cttaaaaatctttcttaata

SEQ ID NO: 51690 - DNA, 20 bp, Artificial Sequence
  Description of Artificial Sequence: Synthetic oligonucleotide
  Target: SCNA; (-) strand; PAM type: YTN; PAM sequence: CTC
cttcttaaaaatctttctta

SEQ ID NO: 51691 - DNA, 20 bp, Artificial Sequence
  Description of Artificial Sequence: Synthetic oligonucleotide
  Target: SCNA; (-) strand; PAM type: YTN; PAM sequence: TTC
tccttcttaaaaatctttct

SEQ ID NO: 51692 - DNA, 20 bp, Artificial Sequence
  Description of Artificial Sequence: Synthetic oligonucleotide
  Target: SCNA; (-) strand; PAM type: YTN; PAM sequence: CTA
ttctccttcttaaaaatctt

SEQ ID NO: 51693 - DNA, 20 bp, Artificial Sequence
  Description of Artificial Sequence: Synthetic oligonucleotide
  Target: SCNA; (-) strand; PAM type: YTN; PAM sequence: CTG
ctattctccttcttaaaaat

SEQ ID NO: 51694 - DNA, 20 bp, Artificial Sequence
  Description of Artificial Sequence: Synthetic oligonucleotide
  Target: SCNA; (-) strand; PAM type: YTN; PAM sequence: CTG
gaactgctattctccttctt

SEQ ID NO: 51695 - DNA, 20 bp, Artificial Sequence
  Description of Artificial Sequence: Synthetic oligonucleotide
  Target: SCNA; (-) strand; PAM type: YTN; PAM sequence: CTG
gtgaaaagtatcaaatatgt

SEQ ID NO: 51696 - DNA, 20 bp, Artificial Sequence
  Description of Artificial Sequence: Synthetic oligonucleotide
  Target: SCNA; (-) strand; PAM type: YTN; PAM sequence: TTC
tggtgaaaagtatcaaatat

SEQ ID NO: 51697 - DNA, 20 bp, Artificial Sequence
  Description of Artificial Sequence: Synthetic oligonucleotide
  Target: SCNA; (-) strand; PAM type: YTN; PAM sequence: TTT
ctggtgaaaagtatcaaata

SEQ ID NO: 51698 - DNA, 20 bp, Artificial Sequence
  Description of Artificial Sequence: Synthetic oligonucleotide
  Target: SCNA; (-) strand; PAM type: YTN; PAM sequence: TTT
tctggtgaaaagtatcaaat

SEQ ID NO: 51699 - DNA, 20 bp, Artificial Sequence
  Description of Artificial Sequence: Synthetic oligonucleotide
  Target: SCNA; (-) strand; PAM type: YTN; PAM sequence: CTA
ttttctggtgaaaagtatca

SEQ ID NO: 51700 - DNA, 20 bp, Artificial Sequence
  Description of Artificial Sequence: Synthetic oligonucleotide
  Target: SCNA; (-) strand; PAM type: YTN; PAM sequence: TTC
ctattttctggtgaaaagta

SEQ ID NO: 51701 - DNA, 20 bp, Artificial Sequence
  Description of Artificial Sequence: Synthetic oligonucleotide
  Target: SCNA; (-) strand; PAM type: YTN; PAM sequence: TTT
cctattttctggtgaaaagt

SEQ ID NO: 51702 - DNA, 20 bp, Artificial Sequence
  Description of Artificial Sequence: Synthetic oligonucleotide
  Target: SCNA; (-) strand; PAM type: YTN; PAM sequence: CTT
tcctattttctggtgaaaag

SEQ ID NO: 51703 - DNA, 20 bp, Artificial Sequence
  Description of Artificial Sequence: Synthetic oligonucleotide
  Target: SCNA; (-) strand; PAM type: YTN; PAM sequence: TTG
cagacccaatccgtctttcc

SEQ ID NO: 51704 - DNA, 20 bp, Artificial Sequence
  Description of Artificial Sequence: Synthetic oligonucleotide
  Target: SCNA; (-) strand; PAM type: YTN; PAM sequence: TTG
aaaatacattgcagacccaa

SEQ ID NO: 51705 - DNA, 20 bp, Artificial Sequence
  Description of Artificial Sequence: Synthetic oligonucleotide
  Target: SCNA; (-) strand; PAM type: YTN; PAM sequence: TTT
gaaaatacattgcagaccca

SEQ ID NO: 51706 - DNA, 20 bp, Artificial Sequence
  Description of Artificial Sequence: Synthetic oligonucleotide
  Target: SCNA; (-) strand; PAM type: YTN; PAM sequence: CTT
tgaaaatacattgcagaccc

SEQ ID NO: 51707 - DNA, 20 bp, Artificial Sequence
  Description of Artificial Sequence: Synthetic oligonucleotide
  Target: SCNA; (-) strand; PAM type: YTN; PAM sequence: TTG
actttgaaaatacattgcag

SEQ ID NO: 51708 - DNA, 20 bp, Artificial Sequence
  Description of Artificial Sequence: Synthetic oligonucleotide
  Target: SCNA; (-) strand; PAM type: YTN; PAM sequence: TTT
gactttgaaaatacattgca

SEQ ID NO: 51709 - DNA, 20 bp, Artificial Sequence
  Description of Artificial Sequence: Synthetic oligonucleotide
  Target: SCNA; (-) strand; PAM type: YTN; PAM sequence: TTA
aatagaggaatagaagtttg

SEQ ID NO: 51710 - DNA, 20 bp, Artificial Sequence
  Description of Artificial Sequence: Synthetic oligonucleotide
  Target: SCNA; (-) strand; PAM type: YTN; PAM sequence: CTG
taaaaatacattaaatagag

SEQ ID NO: 51711 - DNA, 20 bp, Artificial Sequence
  Description of Artificial Sequence: Synthetic oligonucleotide
  Target: SCNA; (-) strand; PAM type: YTN; PAM sequence: CTC
tgtaaaaatacattaaatag

SEQ ID NO: 51712 - DNA, 20 bp, Artificial Sequence
  Description of Artificial Sequence: Synthetic oligonucleotide
  Target: SCNA; (-) strand; PAM type: YTN; PAM sequence: CTC
aagtcatctctgtaaaaata

SEQ ID NO: 51713 - DNA, 20 bp, Artificial Sequence
  Description of Artificial Sequence: Synthetic oligonucleotide
  Target: SCNA; (-) strand; PAM type: YTN; PAM sequence: TTC
tcaagtcatctctgtaaaaa

SEQ ID NO: 51714 - DNA, 20 bp, Artificial Sequence
  Description of Artificial Sequence: Synthetic oligonucleotide
  Target: SCNA; (-) strand; PAM type: YTN; PAM sequence: TTT
ctcaagtcatctctgtaaaa

SEQ ID NO: 51715 - DNA, 20 bp, Artificial Sequence
  Description of Artificial Sequence: Synthetic oligonucleotide
  Target: SCNA; (-) strand; PAM type: YTN; PAM sequence: TTT
tctcaagtcatctctgtaaa

SEQ ID NO: 51716 - DNA, 20 bp, Artificial Sequence
  Description of Artificial Sequence: Synthetic oligonucleotide
  Target: SCNA; (-) strand; PAM type: YTN; PAM sequence: TTC
aaaagaaatgtgtgttttct

SEQ ID NO: 51717 - DNA, 20 bp, Artificial Sequence
  Description of Artificial Sequence: Synthetic oligonucleotide
  Target: SCNA; (-) strand; PAM type: YTN; PAM sequence: CTG
atccgtcaaaaatatataca

SEQ ID NO: 51718 - DNA, 20 bp, Artificial Sequence
  Description of Artificial Sequence: Synthetic oligonucleotide
  Target: SCNA; (-) strand; PAM type: YTN; PAM sequence: CTC
aagtaagagtgtctgatccg

SEQ ID NO: 51719 - DNA, 20 bp, Artificial Sequence
  Description of Artificial Sequence: Synthetic oligonucleotide
  Target: SCNA; (-) strand; PAM type: YTN; PAM sequence: CTA
gctcaagtaagagtgtctga

SEQ ID NO: 51720 - DNA, 20 bp, Artificial Sequence
  Description of Artificial Sequence: Synthetic oligonucleotide
  Target: SCNA; (-) strand; PAM type: YTN; PAM sequence: CTA
cagaaacaatagcacatagc

SEQ ID NO: 51721 - DNA, 20 bp, Artificial Sequence
  Description of Artificial Sequence: Synthetic oligonucleotide
  Target: SCNA; (-) strand; PAM type: YTN; PAM sequence: TTG
gctacagaaacaatagcaca

SEQ ID NO: 51722 - DNA, 20 bp, Artificial Sequence
  Description of Artificial Sequence: Synthetic oligonucleotide
  Target: SCNA; (-) strand; PAM type: YTN; PAM sequence: TTT
ggctacagaaacaatagcac

SEQ ID NO: 51723 - DNA, 20 bp, Artificial Sequence
  Description of Artificial Sequence: Synthetic oligonucleotide
  Target: SCNA; (-) strand; PAM type: YTN; PAM sequence: TTC
atttggctacagaaacaata

SEQ ID NO: 51724 - DNA, 20 bp, Artificial Sequence
  Description of Artificial Sequence: Synthetic oligonucleotide
  Target: SCNA; (-) strand; PAM type: YTN; PAM sequence: TTG
ccaatggcccattcatttgg

SEQ ID NO: 51725 - DNA, 20 bp, Artificial Sequence
  Description of Artificial Sequence: Synthetic oligonucleotide
  Target: SCNA; (-) strand; PAM type: YTN; PAM sequence: TTG
attgccaatggcccattcat

SEQ ID NO: 51726 - DNA, 20 bp, Artificial Sequence
  Description of Artificial Sequence: Synthetic oligonucleotide
  Target: SCNA; (-) strand; PAM type: YTN; PAM sequence: CTT
gattgccaatggcccattca

SEQ ID NO: 51727 - DNA, 20 bp, Artificial Sequence
  Description of Artificial Sequence: Synthetic oligonucleotide
  Target: SCNA; (-) strand; PAM type: YTN; PAM sequence: TTG
gcttgattgccaatggccca

SEQ ID NO: 51728 - DNA, 20 bp, Artificial Sequence
  Description of Artificial Sequence: Synthetic oligonucleotide
  Target: SCNA; (-) strand; PAM type: YTN; PAM sequence: TTT
ggcttgattgccaatggccc

SEQ ID NO: 51729 - DNA, 20 bp, Artificial Sequence
  Description of Artificial Sequence: Synthetic oligonucleotide
  Target: SCNA; (-) strand; PAM type: YTN; PAM sequence: TTG
tttggcttgattgccaatgg

SEQ ID NO: 51730 - DNA, 20 bp, Artificial Sequence
  Description of Artificial Sequence: Synthetic oligonucleotide
  Target: SCNA; (-) strand; PAM type: YTN; PAM sequence: TTT
gtttggcttgattgccaatg

SEQ ID NO: 51731 - DNA, 20 bp, Artificial Sequence
  Description of Artificial Sequence: Synthetic oligonucleotide
  Target: SCNA; (-) strand; PAM type: YTN; PAM sequence: CTA
aaatcgggtgtaaaagcaaa

SEQ ID NO: 51732 - DNA, 20 bp, Artificial Sequence
  Description of Artificial Sequence: Synthetic oligonucleotide
  Target: SCNA; (-) strand; PAM type: YTN; PAM sequence: TTA
atgctaaaatcgggtgtaaa

SEQ ID NO: 51733 - DNA, 20 bp, Artificial Sequence
  Description of Artificial Sequence: Synthetic oligonucleotide
  Target: SCNA; (-) strand; PAM type: YTN; PAM sequence: CTG
tagattaatgctaaaatcgg

SEQ ID NO: 51734 - DNA, 20 bp, Artificial Sequence
  Description of Artificial Sequence: Synthetic oligonucleotide
  Target: SCNA; (-) strand; PAM type: YTN; PAM sequence: TTG
aaaagccgtgtctgtagatt

SEQ ID NO: 51735 - DNA, 20 bp, Artificial Sequence
  Description of Artificial Sequence: Synthetic oligonucleotide
  Target: SCNA; (-) strand; PAM type: YTN; PAM sequence: CTA
ttgaaaagccgtgtctgtag

SEQ ID NO: 51736 - DNA, 20 bp, Artificial Sequence
  Description of Artificial Sequence: Synthetic oligonucleotide
  Target: SCNA; (-) strand; PAM type: YTN; PAM sequence: CTA
ctattgaaaagccgtgtctg

SEQ ID NO: 51737 - DNA, 20 bp, Artificial Sequence
  Description of Artificial Sequence: Synthetic oligonucleotide
  Target: SCNA; (-) strand; PAM type: YTN; PAM sequence: TTC
tactattgaaaagccgtgtc

SEQ ID NO: 51738 - DNA, 20 bp, Artificial Sequence
  Description of Artificial Sequence: Synthetic oligonucleotide
  Target: SCNA; (-) strand; PAM type: YTN; PAM sequence: TTT
ctactattgaaaagccgtgt

SEQ ID NO: 51739 - DNA, 20 bp, Artificial Sequence
  Description of Artificial Sequence: Synthetic oligonucleotide
  Target: SCNA; (-) strand; PAM type: YTN; PAM sequence: TTT
tctactattgaaaagccgtg

SEQ ID NO: 51740 - DNA, 20 bp, Artificial Sequence
  Description of Artificial Sequence: Synthetic oligonucleotide
  Target: SCNA; (-) strand; PAM type: YTN; PAM sequence: CTT
ttctactattgaaaagccgt

SEQ ID NO: 51741 - DNA, 20 bp, Artificial Sequence
  Description of Artificial Sequence: Synthetic oligonucleotide
  Target: SCNA; (-) strand; PAM type: YTN; PAM sequence: CTA
aaatgggagatatcttttct

SEQ ID NO: 51742 - DNA, 20 bp, Artificial Sequence
  Description of Artificial Sequence: Synthetic oligonucleotide
  Target: SCNA; (-) strand; PAM type: YTN; PAM sequence: TTG
gactaaaatgggagatatct

SEQ ID NO: 51743 - DNA, 20 bp, Artificial Sequence
  Description of Artificial Sequence: Synthetic oligonucleotide
  Target: SCNA; (-) strand; PAM type: YTN; PAM sequence: TTT
ggactaaaatgggagatatc

SEQ ID NO: 51744 - DNA, 20 bp, Artificial Sequence
  Description of Artificial Sequence: Synthetic oligonucleotide
  Target: SCNA; (-) strand; PAM type: YTN; PAM sequence: TTA
aatttggactaaaatgggag

SEQ ID NO: 51745 - DNA, 20 bp, Artificial Sequence
  Description of Artificial Sequence: Synthetic oligonucleotide
  Target: SCNA; (-) strand; PAM type: YTN; PAM sequence: CTT
aaatttggactaaaatggga

SEQ ID NO: 51746 - DNA, 20 bp, Artificial Sequence
  Description of Artificial Sequence: Synthetic oligonucleotide
  Target: SCNA; (-) strand; PAM type: YTN; PAM sequence: CTA
tacttaaatttggactaaaa

SEQ ID NO: 51747 - DNA, 20 bp, Artificial Sequence
  Description of Artificial Sequence: Synthetic oligonucleotide
  Target: SCNA; (-) strand; PAM type: YTN; PAM sequence: TTA
actatacttaaatttggact

SEQ ID NO: 51748 - DNA, 20 bp, Artificial Sequence
  Description of Artificial Sequence: Synthetic oligonucleotide
  Target: SCNA; (-) strand; PAM type: YTN; PAM sequence: TTT
aactatacttaaatttggac

SEQ ID NO: 51749 - DNA, 20 bp, Artificial Sequence
  Description of Artificial Sequence: Synthetic oligonucleotide
  Target: SCNA; (-) strand; PAM type: YTN; PAM sequence: CTT
taactatacttaaatttgga

SEQ ID NO: 51750 - DNA, 20 bp, Artificial Sequence
  Description of Artificial Sequence: Synthetic oligonucleotide
  Target: SCNA; (-) strand; PAM type: YTN; PAM sequence: TTC
ccaaaatgtagctttaacta

SEQ ID NO: 51751 - DNA, 20 bp, Artificial Sequence
  Description of Artificial Sequence: Synthetic oligonucleotide
  Target: SCNA; (-) strand; PAM type: YTN; PAM sequence: TTT
cccaaaatgtagctttaact

SEQ ID NO: 51752 - DNA, 20 bp, Artificial Sequence
  Description of Artificial Sequence: Synthetic oligonucleotide
  Target: SCNA; (-) strand; PAM type: YTN; PAM sequence: TTT
tcccaaaatgtagctttaac

SEQ ID NO: 51753 - DNA, 20 bp, Artificial Sequence
  Description of Artificial Sequence: Synthetic oligonucleotide
  Target: SCNA; (-) strand; PAM type: YTN; PAM sequence: TTT
ttcccaaaatgtagctttaa

SEQ ID NO: 51754 - DNA, 20 bp, Artificial Sequence
  Description of Artificial Sequence: Synthetic oligonucleotide
  Target: SCNA; (-) strand; PAM type: YTN; PAM sequence: TTC
atcccacaagtgaacaaaaa

SEQ ID NO: 51755 - DNA, 20 bp, Artificial Sequence
  Description of Artificial Sequence: Synthetic oligonucleotide
  Target: SCNA; (-) strand; PAM type: YTN; PAM sequence: TTT
catcccacaagtgaacaaaa

SEQ ID NO: 51756 - DNA, 20 bp, Artificial Sequence
  Description of Artificial Sequence: Synthetic oligonucleotide
  Target: SCNA; (-) strand; PAM type: YTN; PAM sequence: TTT
tcatcccacaagtgaacaaa

SEQ ID NO: 51757 - DNA, 20 bp, Artificial Sequence
  Description of Artificial Sequence: Synthetic oligonucleotide
  Target: SCNA; (-) strand; PAM type: YTN; PAM sequence: CTT
ttcatcccacaagtgaacaa

SEQ ID NO: 51758 - DNA, 20 bp, Artificial Sequence
  Description of Artificial Sequence: Synthetic oligonucleotide
  Target: SCNA; (-) strand; PAM type: YTN; PAM sequence: CTA
cttttcatcccacaagtgaa

SEQ ID NO: 51759 - DNA, 20 bp, Artificial Sequence
  Description of Artificial Sequence: Synthetic oligonucleotide
  Target: SCNA; (-) strand; PAM type: YTN; PAM sequence: TTA
atcctacttttcatcccaca

SEQ ID NO: 51760 - DNA, 20 bp, Artificial Sequence
  Description of Artificial Sequence: Synthetic oligonucleotide
  Target: SCNA; (-) strand; PAM type: YTN; PAM sequence: TTT
aatcctacttttcatcccac

SEQ ID NO: 51761 - DNA, 20 bp, Artificial Sequence
  Description of Artificial Sequence: Synthetic oligonucleotide
  Target: SCNA; (-) strand; PAM type: YTN; PAM sequence: CTG
tttaatcctacttttcatcc

SEQ ID NO: 51762 - DNA, 20 bp, Artificial Sequence
  Description of Artificial Sequence: Synthetic oligonucleotide
  Target: SCNA; (-) strand; PAM type: YTN; PAM sequence: TTA
gagaaggtagagataatgga

SEQ ID NO: 51763 - DNA, 20 bp, Artificial Sequence
  Description of Artificial Sequence: Synthetic oligonucleotide
  Target: SCNA; (-) strand; PAM type: YTN; PAM sequence: TTA
gtaaaggcagttagagaagg

SEQ ID NO: 51764 - DNA, 20 bp, Artificial Sequence
  Description of Artificial Sequence: Synthetic oligonucleotide
  Target: SCNA; (-) strand; PAM type: YTN; PAM sequence: TTT
agtaaaggcagttagagaag

SEQ ID NO: 51765 - DNA, 20 bp, Artificial Sequence
  Description of Artificial Sequence: Synthetic oligonucleotide
  Target: SCNA; (-) strand; PAM type: YTN; PAM sequence: TTT
tagtaaaggcagttagagaa

SEQ ID NO: 51766 - DNA, 20 bp, Artificial Sequence
  Description of Artificial Sequence: Synthetic oligonucleotide
  Target: SCNA; (-) strand; PAM type: YTN; PAM sequence: TTA
aaattttagtaaaggcagtt

SEQ ID NO: 51767 - DNA, 20 bp, Artificial Sequence
  Description of Artificial Sequence: Synthetic oligonucleotide
  Target: SCNA; (-) strand; PAM type: YTN; PAM sequence: TTT
aaaattttagtaaaggcagt

SEQ ID NO: 51768 - DNA, 20 bp, Artificial Sequence
  Description of Artificial Sequence: Synthetic oligonucleotide
  Target: SCNA; (-) strand; PAM type: YTN; PAM sequence: TTT
taaaattttagtaaaggcag

SEQ ID NO: 51769 - DNA, 20 bp, Artificial Sequence
  Description of Artificial Sequence: Synthetic oligonucleotide
  Target: SCNA; (-) strand; PAM type: YTN; PAM sequence: TTC
aaaagaaatattttaaaatt

SEQ ID NO: 51770 - DNA, 20 bp, Artificial Sequence
  Description of Artificial Sequence: Synthetic oligonucleotide
  Target: SCNA; (-) strand; PAM type: YTN; PAM sequence: CTT
caaaagaaatattttaaaat

SEQ ID NO: 51771 - DNA, 20 bp, Artificial Sequence
  Description of Artificial Sequence: Synthetic oligonucleotide
  Target: SCNA; (-) strand; PAM type: YTN; PAM sequence: TTC
ttcaaaagaaatattttaaa

SEQ ID NO: 51772 - DNA, 20 bp, Artificial Sequence
  Description of Artificial Sequence: Synthetic oligonucleotide
  Target: SCNA; (-) strand; PAM type: YTN; PAM sequence: TTT
cttcaaaagaaatattttaa

SEQ ID NO: 51773 - DNA, 20 bp, Artificial Sequence
  Description of Artificial Sequence: Synthetic oligonucleotide
  Target: SCNA; (-) strand; PAM type: YTN; PAM sequence: TTG
tttcttcaaaagaaatattt

SEQ ID NO: 51774 - DNA, 20 bp, Artificial Sequence
  Description of Artificial Sequence: Synthetic oligonucleotide
  Target: SCNA; (-) strand; PAM type: YTN; PAM sequence: TTT
gtttcttcaaaagaaatatt

SEQ ID NO: 51775 - DNA, 20 bp, Artificial Sequence
  Description of Artificial Sequence: Synthetic oligonucleotide
  Target: SCNA; (-) strand; PAM type: YTN; PAM sequence: TTT
tgtttcttcaaaagaaatat

SEQ ID NO: 51776 - DNA, 20 bp, Artificial Sequence
  Description of Artificial Sequence: Synthetic oligonucleotide
  Target: SCNA; (-) strand; PAM type: YTN; PAM sequence: TTA
tgttttgtttcttcaaaaga

SEQ ID NO: 51777 - DNA, 20 bp, Artificial Sequence
  Description of Artificial Sequence: Synthetic oligonucleotide
  Target: SCNA; (-) strand; PAM type: YTN; PAM sequence: TTA
atggcaaatattatgttttg

SEQ ID NO: 51778 - DNA, 20 bp, Artificial Sequence
  Description of Artificial Sequence: Synthetic oligonucleotide
  Target: SCNA; (-) strand; PAM type: YTN; PAM sequence: TTT
aatggcaaatattatgtttt

SEQ ID NO: 51779 - DNA, 20 bp, Artificial Sequence
  Description of Artificial Sequence: Synthetic oligonucleotide
  Target: SCNA; (-) strand; PAM type: YTN; PAM sequence: TTA
agatttaatggcaaatatta

SEQ ID NO: 51780 - DNA, 20 bp, Artificial Sequence
  Description of Artificial Sequence: Synthetic oligonucleotide
  Target: SCNA; (-) strand; PAM type: YTN; PAM sequence: TTT
aagatttaatggcaaatatt

SEQ ID NO: 51781 - DNA, 20 bp, Artificial Sequence
  Description of Artificial Sequence: Synthetic oligonucleotide
  Target: SCNA; (-) strand; PAM type: YTN; PAM sequence: TTT
taagatttaatggcaaatat

SEQ ID NO: 51782 - DNA, 20 bp, Artificial Sequence
  Description of Artificial Sequence: Synthetic oligonucleotide
  Target: SCNA; (-) strand; PAM type: YTN; PAM sequence: CTT
ttaagatttaatggcaaata

SEQ ID NO: 51783 - DNA, 20 bp, Artificial Sequence
  Description of Artificial Sequence: Synthetic oligonucleotide
  Target: SCNA; (-) strand; PAM type: YTN; PAM sequence: TTG
tcatacttttaagatttaat

SEQ ID NO: 51784 - DNA, 20 bp, Artificial Sequence
  Description of Artificial Sequence: Synthetic oligonucleotide
  Target: SCNA; (-) strand; PAM type: YTN; PAM sequence: TTA
gttgtcatacttttaagatt

SEQ ID NO: 51785 - DNA, 20 bp, Artificial Sequence
  Description of Artificial Sequence: Synthetic oligonucleotide
  Target: SCNA; (-) strand; PAM type: YTN; PAM sequence: TTT
agttgtcatacttttaagat

SEQ ID NO: 51786 - DNA, 20 bp, Artificial Sequence
  Description of Artificial Sequence: Synthetic oligonucleotide
  Target: SCNA; (-) strand; PAM type: YTN; PAM sequence: TTA
gcatccatttagttgtcata

SEQ ID NO: 51787 - DNA, 20 bp, Artificial Sequence
  Description of Artificial Sequence: Synthetic oligonucleotide
  Target: SCNA; (-) strand; PAM type: YTN; PAM sequence: CTT
agcatccatttagttgtcat

SEQ ID NO: 51788 - DNA, 20 bp, Artificial Sequence
  Description of Artificial Sequence: Synthetic oligonucleotide
  Target: SCNA; (-) strand; PAM type: YTN; PAM sequence: TTG
tcttagcatccatttagttg

SEQ ID NO: 51789 - DNA, 20 bp, Artificial Sequence
  Description of Artificial Sequence: Synthetic oligonucleotide
  Target: SCNA; (-) strand; PAM type: YTN; PAM sequence: TTG
aaacacaattgtcttagcat

SEQ ID NO: 51790 - DNA, 20 bp, Artificial Sequence
  Description of Artificial Sequence: Synthetic oligonucleotide
  Target: SCNA; (-) strand; PAM type: YTN; PAM sequence: TTA
taagcccacagttgaaacac

SEQ ID NO: 51791 - DNA, 20 bp, Artificial Sequence
  Description of Artificial Sequence: Synthetic oligonucleotide
  Target: SCNA; (-) strand; PAM type: YTN; PAM sequence: TTT
ataagcccacagttgaaaca

SEQ ID NO: 51792 - DNA, 20 bp, Artificial Sequence
  Description of Artificial Sequence: Synthetic oligonucleotide
  Target: SCNA; (-) strand; PAM type: YTN; PAM sequence: CTC
aatagagtttataagcccac

SEQ ID NO: 51793 - DNA, 20 bp, Artificial Sequence
  Description of Artificial Sequence: Synthetic oligonucleotide
  Target: SCNA; (-) strand; PAM type: YTN; PAM sequence: TTC
tcaatagagtttataagccc

SEQ ID NO: 51794 - DNA, 20 bp, Artificial Sequence
  Description of Artificial Sequence: Synthetic oligonucleotide
  Target: SCNA; (-) strand; PAM type: YTN; PAM sequence: TTT
ctcaatagagtttataagcc

SEQ ID NO: 51795 - DNA, 20 bp, Artificial Sequence
  Description of Artificial Sequence: Synthetic oligonucleotide
  Target: SCNA; (-) strand; PAM type: YTN; PAM sequence: CTC
atgatcataaatgagtttct

SEQ ID NO: 51796 - DNA, 20 bp, Artificial Sequence
  Description of Artificial Sequence: Synthetic oligonucleotide
  Target: SCNA; (-) strand; PAM type: YTN; PAM sequence: CTG
gaaaaaactcatgatcataa

SEQ ID NO: 51797 - DNA, 20 bp, Artificial Sequence
  Description of Artificial Sequence: Synthetic oligonucleotide
  Target: SCNA; (-) strand; PAM type: YTN; PAM sequence: TTA
tatgtccatcctggaaaaaa

SEQ ID NO: 51798 - DNA, 20 bp, Artificial Sequence
  Description of Artificial Sequence: Synthetic oligonucleotide
  Target: SCNA; (-) strand; PAM type: YTN; PAM sequence: TTT
atatgtccatcctggaaaaa

SEQ ID NO: 51799 - DNA, 20 bp, Artificial Sequence
  Description of Artificial Sequence: Synthetic oligonucleotide
  Target: SCNA; (-) strand; PAM type: YTN; PAM sequence: CTT
tatatgtccatcctggaaaa

SEQ ID NO: 51800 - DNA, 20 bp, Artificial Sequence
  Description of Artificial Sequence: Synthetic oligonucleotide
  Target: SCNA; (-) strand; PAM type: YTN; PAM sequence: TTA
aaaatccatctttatatgtc

SEQ ID NO: 51801 - DNA, 20 bp, Artificial Sequence
  Description of Artificial Sequence: Synthetic oligonucleotide
  Target: SCNA; (-) strand; PAM type: YTN; PAM sequence: TTT
aaaaatccatctttatatgt

SEQ ID NO: 51802 - DNA, 20 bp, Artificial Sequence
  Description of Artificial Sequence: Synthetic oligonucleotide
  Target: SCNA; (-) strand; PAM type: YTN; PAM sequence: TTT
taaaaatccatctttatatg

SEQ ID NO: 51803 - DNA, 20 bp, Artificial Sequence
  Description of Artificial Sequence: Synthetic oligonucleotide
  Target: SCNA; (-) strand; PAM type: YTN; PAM sequence: CTC
caggccagtgttttaaaaat

SEQ ID NO: 51804 - DNA, 20 bp, Artificial Sequence
  Description of Artificial Sequence: Synthetic oligonucleotide
  Target: SCNA; (-) strand; PAM type: YTN; PAM sequence: TTC
tccaggccagtgttttaaaa

SEQ ID NO: 51805 - DNA, 20 bp, Artificial Sequence
  Description of Artificial Sequence: Synthetic oligonucleotide
  Target: SCNA; (-) strand; PAM type: YTN; PAM sequence: CTA
ttctccaggccagtgtttta

SEQ ID NO: 51806 - DNA, 20 bp, Artificial Sequence
  Description of Artificial Sequence: Synthetic oligonucleotide
  Target: SCNA; (-) strand; PAM type: YTN; PAM sequence: CTC
cctattctccaggccagtgt

SEQ ID NO: 51807 - DNA, 20 bp, Artificial Sequence
  Description of Artificial Sequence: Synthetic oligonucleotide
  Target: SCNA; (-) strand; PAM type: YTN; PAM sequence: CTC
tccctattctccaggccagt

SEQ ID NO: 51808 - DNA, 20 bp, Artificial Sequence
  Description of Artificial Sequence: Synthetic oligonucleotide
  Target: SCNA; (-) strand; PAM type: YTN; PAM sequence: TTC
tctccctattctccaggcca

SEQ ID NO: 51809 - DNA, 20 bp, Artificial Sequence
  Description of Artificial Sequence: Synthetic oligonucleotide
  Target: SCNA; (-) strand; PAM type: YTN; PAM sequence: CTT
ctctccctattctccaggcc

SEQ ID NO: 51810 - DNA, 20 bp, Artificial Sequence
  Description of Artificial Sequence: Synthetic oligonucleotide
  Target: SCNA; (-) strand; PAM type: YTN; PAM sequence: CTC
ttctctccctattctccagg

SEQ ID NO: 51811 - DNA, 20 bp, Artificial Sequence
  Description of Artificial Sequence: Synthetic oligonucleotide
  Target: SCNA; (-) strand; PAM type: YTN; PAM sequence: TTA
cctcttctctccctattctc

SEQ ID NO: 51812 - DNA, 20 bp, Artificial Sequence
  Description of Artificial Sequence: Synthetic oligonucleotide
  Target: SCNA; (-) strand; PAM type: YTN; PAM sequence: TTA
ttacctcttctctccctatt

SEQ ID NO: 51813 - DNA, 20 bp, Artificial Sequence
  Description of Artificial Sequence: Synthetic oligonucleotide
  Target: SCNA; (-) strand; PAM type: YTN; PAM sequence: TTT
attacctcttctctccctat

SEQ ID NO: 51814 - DNA, 20 bp, Artificial Sequence
  Description of Artificial Sequence: Synthetic oligonucleotide
  Target: SCNA; (-) strand; PAM type: YTN; PAM sequence: TTT
tattacctcttctctcccta

SEQ ID NO: 51815 - DNA, 20 bp, Artificial Sequence
  Description of Artificial Sequence: Synthetic oligonucleotide
  Target: SCNA; (-) strand; PAM type: YTN; PAM sequence: TTT
ttattacctcttctctccct

SEQ ID NO: 51816 - DNA, 20 bp, Artificial Sequence
  Description of Artificial Sequence: Synthetic oligonucleotide
  Target: SCNA; (-) strand; PAM type: YTN; PAM sequence: TTT
tttattacctcttctctccc

SEQ ID NO: 51817 - DNA, 20 bp, Artificial Sequence
  Description of Artificial Sequence: Synthetic oligonucleotide
  Target: SCNA; (-) strand; PAM type: YTN; PAM sequence: CTT
ttttattacctcttctctcc

SEQ ID NO: 51818 - DNA, 20 bp, Artificial Sequence
  Description of Artificial Sequence: Synthetic oligonucleotide
  Target: SCNA; (-) strand; PAM type: YTN; PAM sequence: CTC
atataagtaatataaatact

SEQ ID NO: 51819 - DNA, 20 bp, Artificial Sequence
  Description of Artificial Sequence: Synthetic oligonucleotide
  Target: SCNA; (-) strand; PAM type: YTN; PAM sequence: TTA
taaaaagatatgtctcatat

SEQ ID NO: 51820 - DNA, 20 bp, Artificial Sequence
  Description of Artificial Sequence: Synthetic oligonucleotide
  Target: SCNA; (-) strand; PAM type: YTN; PAM sequence: TTA
aatatagatattataaaaag

SEQ ID NO: 51821 - DNA, 20 bp, Artificial Sequence
  Description of Artificial Sequence: Synthetic oligonucleotide
  Target: SCNA; (-) strand; PAM type: YTN; PAM sequence: TTT
aaatatagatattataaaaa

SEQ ID NO: 51822 - DNA, 20 bp, Artificial Sequence
  Description of Artificial Sequence: Synthetic oligonucleotide
  Target: SCNA; (-) strand; PAM type: YTN; PAM sequence: TTT
taaatatagatattataaaa

SEQ ID NO: 51823 - DNA, 20 bp, Artificial Sequence
  Description of Artificial Sequence: Synthetic oligonucleotide
  Target: SCNA; (-) strand; PAM type: YTN; PAM sequence: TTA
aaatgttttaaatatagata

SEQ ID NO: 51824 - DNA, 20 bp, Artificial Sequence
  Description of Artificial Sequence: Synthetic oligonucleotide
  Target: SCNA; (-) strand; PAM type: YTN; PAM sequence: TTT
aaaatgttttaaatatagat

SEQ ID NO: 51825 - DNA, 20 bp, Artificial Sequence
  Description of Artificial Sequence: Synthetic oligonucleotide
  Target: SCNA; (-) strand; PAM type: YTN; PAM sequence: CTT
taaaatgttttaaatataga

SEQ ID NO: 51826 - DNA, 20 bp, Artificial Sequence
  Description of Artificial Sequence: Synthetic oligonucleotide
  Target: SCNA; (-) strand; PAM type: YTN; PAM sequence: TTA
tactttaaaatgttttaaat

SEQ ID NO: 51827 - DNA, 20 bp, Artificial Sequence
  Description of Artificial Sequence: Synthetic oligonucleotide
  Target: SCNA; (-) strand; PAM type: YTN; PAM sequence: TTT
atactttaaaatgttttaaa

SEQ ID NO: 51828 - DNA, 20 bp, Artificial Sequence
  Description of Artificial Sequence: Synthetic oligonucleotide
  Target: SCNA; (-) strand; PAM type: YTN; PAM sequence: TTA
tagtacagaaatatttatac

SEQ ID NO: 51829 - DNA, 20 bp, Artificial Sequence
  Description of Artificial Sequence: Synthetic oligonucleotide
  Target: SCNA; (-) strand; PAM type: YTN; PAM sequence: TTG
tattatagtacagaaatatt

SEQ ID NO: 51830 - DNA, 20 bp, Artificial Sequence
  Description of Artificial Sequence: Synthetic oligonucleotide
  Target: SCNA; (-) strand; PAM type: YTN; PAM sequence: CTG
tatattgtattatagtacag

SEQ ID NO: 51831 - DNA, 20 bp, Artificial Sequence
  Description of Artificial Sequence: Synthetic oligonucleotide
  Target: SCNA; (-) strand; PAM type: YTN; PAM sequence: CTA
taatactgtatattgtatta

SEQ ID NO: 51832 - DNA, 20 bp, Artificial Sequence
  Description of Artificial Sequence: Synthetic oligonucleotide
  Target: SCNA; (-) strand; PAM type: YTN; PAM sequence: TTA
ccgtaaatcacagaccataa

SEQ ID NO: 51833 - DNA, 20 bp, Artificial Sequence
  Description of Artificial Sequence: Synthetic oligonucleotide
  Target: SCNA; (-) strand; PAM type: YTN; PAM sequence: TTC
agaaaaaatgacccacagta

SEQ ID NO: 51834 - DNA, 20 bp, Artificial Sequence
  Description of Artificial Sequence: Synthetic oligonucleotide
  Target: SCNA; (-) strand; PAM type: YTN; PAM sequence: TTA
attcagaaaaaatgacccac

SEQ ID NO: 51835 - DNA, 20 bp, Artificial Sequence
  Description of Artificial Sequence: Synthetic oligonucleotide
  Target: SCNA; (-) strand; PAM type: YTN; PAM sequence: TTA
taaaattaattcagaaaaaa

SEQ ID NO: 51836 - DNA, 20 bp, Artificial Sequence
  Description of Artificial Sequence: Synthetic oligonucleotide
  Target: SCNA; (-) strand; PAM type: YTN; PAM sequence: CTT
ataaaattaattcagaaaaa

SEQ ID NO: 51837 - DNA, 20 bp, Artificial Sequence
  Description of Artificial Sequence: Synthetic oligonucleotide
  Target: SCNA; (-) strand; PAM type: YTN; PAM sequence: TTC
acttataaaattaattcaga

SEQ ID NO: 51838 - DNA, 20 bp, Artificial Sequence
  Description of Artificial Sequence: Synthetic oligonucleotide
  Target: SCNA; (-) strand; PAM type: YTN; PAM sequence: TTG
ttcacttataaaattaattc

SEQ ID NO: 51839 - DNA, 20 bp, Artificial Sequence
  Description of Artificial Sequence: Synthetic oligonucleotide
  Target: SCNA; (-) strand; PAM type: YTN; PAM sequence: CTT
gttcacttataaaattaatt

SEQ ID NO: 51840 - DNA, 20 bp, Artificial Sequence
  Description of Artificial Sequence: Synthetic oligonucleotide
  Target: SCNA; (-) strand; PAM type: YTN; PAM sequence: TTG
cttgttcacttataaaatta

SEQ ID NO: 51841 - DNA, 20 bp, Artificial Sequence
  Description of Artificial Sequence: Synthetic oligonucleotide
  Target: SCNA; (-) strand; PAM type: YTN; PAM sequence: TTT
gcttgttcacttataaaatt

SEQ ID NO: 51842 - DNA, 20 bp, Artificial Sequence
  Description of Artificial Sequence: Synthetic oligonucleotide
  Target: SCNA; (-) strand; PAM type: YTN; PAM sequence: CTT
tgcttgttcacttataaaat

SEQ ID NO: 51843 - DNA, 20 bp, Artificial Sequence
  Description of Artificial Sequence: Synthetic oligonucleotide
  Target: SCNA; (-) strand; PAM type: YTN; PAM sequence: TTG
gtcactttgcttgttcactt

SEQ ID NO: 51844 - DNA, 20 bp, Artificial Sequence
  Description of Artificial Sequence: Synthetic oligonucleotide
  Target: SCNA; (-) strand; PAM type: YTN; PAM sequence: CTT
ggtcactttgcttgttcact

SEQ ID NO: 51845 - DNA, 20 bp, Artificial Sequence
  Description of Artificial Sequence: Synthetic oligonucleotide
  Target: SCNA; (-) strand; PAM type: YTN; PAM sequence: CTC
ttggtcactttgcttgttca

SEQ ID NO: 51846 - DNA, 20 bp, Artificial Sequence
  Description of Artificial Sequence: Synthetic oligonucleotide
  Target: SCNA; (-) strand; PAM type: YTN; PAM sequence: TTC
tcttggtcactttgcttgtt

SEQ ID NO: 51847 - DNA, 20 bp, Artificial Sequence
  Description of Artificial Sequence: Synthetic oligonucleotide
  Target: SCNA; (-) strand; PAM type: YTN; PAM sequence: CTG
gatcatagatcattctcttg

SEQ ID NO: 51848 - DNA, 20 bp, Artificial Sequence
  Description of Artificial Sequence: Synthetic oligonucleotide
  Target: SCNA; (-) strand; PAM type: YTN; PAM sequence: TTC
tggatcatagatcattctct

SEQ ID NO: 51849 - DNA, 20 bp, Artificial Sequence
  Description of Artificial Sequence: Synthetic oligonucleotide
  Target: SCNA; (-) strand; PAM type: YTN; PAM sequence: TTT
ctggatcatagatcattctc

SEQ ID NO: 51850 - DNA, 20 bp, Artificial Sequence
  Description of Artificial Sequence: Synthetic oligonucleotide
  Target: SCNA; (-) strand; PAM type: YTN; PAM sequence: TTA
tttctggatcatagatcatt

SEQ ID NO: 51851 - DNA, 20 bp, Artificial Sequence
  Description of Artificial Sequence: Synthetic oligonucleotide
  Target: SCNA; (-) strand; PAM type: YTN; PAM sequence: TTG
aaagttatttctggatcata

SEQ ID NO: 51852 - DNA, 20 bp, Artificial Sequence
  Description of Artificial Sequence: Synthetic oligonucleotide
  Target: SCNA; (-) strand; PAM type: YTN; PAM sequence: TTA
tcattgaaagttatttctgg

SEQ ID NO: 51853 - DNA, 20 bp, Artificial Sequence
  Description of Artificial Sequence: Synthetic oligonucleotide
  Target: SCNA; (-) strand; PAM type: YTN; PAM sequence: TTT
atcattgaaagttatttctg

SEQ ID NO: 51854 - DNA, 20 bp, Artificial Sequence
  Description of Artificial Sequence: Synthetic oligonucleotide
  Target: SCNA; (-) strand; PAM type: YTN; PAM sequence: TTT
tatcattgaaagttatttct

SEQ ID NO: 51855 - DNA, 20 bp, Artificial Sequence
  Description of Artificial Sequence: Synthetic oligonucleotide
  Target: SCNA; (-) strand; PAM type: YTN; PAM sequence: TTT
ttatcattgaaagttatttc

SEQ ID NO: 51856 - DNA, 20 bp, Artificial Sequence
  Description of Artificial Sequence: Synthetic oligonucleotide
  Target: SCNA; (-) strand; PAM type: YTN; PAM sequence: TTT
tttatcattgaaagttattt

SEQ ID NO: 51857 - DNA, 20 bp, Artificial Sequence
  Description of Artificial Sequence: Synthetic oligonucleotide
  Target: SCNA; (-) strand; PAM type: YTN; PAM sequence: TTC
aggttttttatcattgaaag

SEQ ID NO: 51858 - DNA, 20 bp, Artificial Sequence
  Description of Artificial Sequence: Synthetic oligonucleotide
  Target: SCNA; (-) strand; PAM type: YTN; PAM sequence: CTT
caggttttttatcattgaaa

SEQ ID NO: 51859 - DNA, 20 bp, Artificial Sequence
  Description of Artificial Sequence: Synthetic oligonucleotide
  Target: SCNA; (-) strand; PAM type: YTN; PAM sequence: TTG
tacttcaggttttttatcat

SEQ ID NO: 51860 - DNA, 20 bp, Artificial Sequence
  Description of Artificial Sequence: Synthetic oligonucleotide
  Target: SCNA; (-) strand; PAM type: YTN; PAM sequence: TTG
ttgtacttcaggttttttat

SEQ ID NO: 51861 - DNA, 20 bp, Artificial Sequence
  Description of Artificial Sequence: Synthetic oligonucleotide
  Target: SCNA; (-) strand; PAM type: YTN; PAM sequence: TTT
gttgtacttcaggtttttta

SEQ ID NO: 51862 - DNA, 20 bp, Artificial Sequence
  Description of Artificial Sequence: Synthetic oligonucleotide
  Target: SCNA; (-) strand; PAM type: YTN; PAM sequence: CTT
tgttgtacttcaggtttttt

SEQ ID NO: 51863 - DNA, 20 bp, Artificial Sequence
  Description of Artificial Sequence: Synthetic oligonucleotide
  Target: SCNA; (-) strand; PAM type: YTN; PAM sequence: TTC
tttgttgtacttcaggtttt

SEQ ID NO: 51864 - DNA, 20 bp, Artificial Sequence
  Description of Artificial Sequence: Synthetic oligonucleotide
  Target: SCNA; (-) strand; PAM type: YTN; PAM sequence: CTT
ctttgttgtacttcaggttt

SEQ ID NO: 51865 - DNA, 20 bp, Artificial Sequence
  Description of Artificial Sequence: Synthetic oligonucleotide
  Target: SCNA; (-) strand; PAM type: YTN; PAM sequence: CTG
acttctttgttgtacttcag

SEQ ID NO: 51866 - DNA, 20 bp, Artificial Sequence
  Description of Artificial Sequence: Synthetic oligonucleotide
  Target: SCNA; (-) strand; PAM type: YTN; PAM sequence: CTC
tgacttctttgttgtacttc

SEQ ID NO: 51867 - DNA, 20 bp, Artificial Sequence
  Description of Artificial Sequence: Synthetic oligonucleotide
  Target: SCNA; (-) strand; PAM type: YTN; PAM sequence: CTG
cctctgacttctttgttgta

SEQ ID NO: 51868 - DNA, 20 bp, Artificial Sequence
  Description of Artificial Sequence: Synthetic oligonucleotide
  Target: SCNA; (-) strand; PAM type: YTN; PAM sequence: CTA
gccctgcctctgacttcttt

SEQ ID NO: 51869 - DNA, 20 bp, Artificial Sequence
  Description of Artificial Sequence: Synthetic oligonucleotide
  Target: SCNA; (-) strand; PAM type: YTN; PAM sequence: TTG
tctagccctgcctctgactt

SEQ ID NO: 51870 - DNA, 20 bp, Artificial Sequence
  Description of Artificial Sequence: Synthetic oligonucleotide
  Target: SCNA; (-) strand; PAM type: YTN; PAM sequence: TTT
gtctagccctgcctctgact

SEQ ID NO: 51871 - DNA, 20 bp, Artificial Sequence
  Description of Artificial Sequence: Synthetic oligonucleotide
  Target: SCNA; (-) strand; PAM type: YTN; PAM sequence: TTT
tgtctagccctgcctctgac

SEQ ID NO: 51872 - DNA, 20 bp, Artificial Sequence
  Description of Artificial Sequence: Synthetic oligonucleotide
  Target: SCNA; (-) strand; PAM type: YTN; PAM sequence: TTC
cattttgtctagccctgcct

SEQ ID NO: 51873 - DNA, 20 bp, Artificial Sequence
  Description of Artificial Sequence: Synthetic oligonucleotide
  Target: SCNA; (-) strand; PAM type: YTN; PAM sequence: TTA
gttccattttgtctagccct

SEQ ID NO: 51874 - DNA, 20 bp, Artificial Sequence
  Description of Artificial Sequence: Synthetic oligonucleotide
  Target: SCNA; (-) strand; PAM type: YTN; PAM sequence: TTT
agttccattttgtctagccc

SEQ ID NO: 51875 - DNA, 20 bp, Artificial Sequence
  Description of Artificial Sequence: Synthetic oligonucleotide
  Target: SCNA; (-) strand; PAM type: YTN; PAM sequence: TTA
gtatatttagttccattttg

SEQ ID NO: 51876 - DNA, 20 bp, Artificial Sequence
  Description of Artificial Sequence: Synthetic oligonucleotide
  Target: SCNA; (-) strand; PAM type: YTN; PAM sequence: CTT
agtatatttagttccatttt

SEQ ID NO: 51877 - DNA, 20 bp, Artificial Sequence
  Description of Artificial Sequence: Synthetic oligonucleotide
  Target: SCNA; (-) strand; PAM type: YTN; PAM sequence: TTC
ttagtatatttagttccatt

SEQ ID NO: 51878 - DNA, 20 bp, Artificial Sequence
  Description of Artificial Sequence: Synthetic oligonucleotide
  Target: SCNA; (-) strand; PAM type: YTN; PAM sequence: CTT
cttagtatatttagttccat

SEQ ID NO: 51879 - DNA, 20 bp, Artificial Sequence
  Description of Artificial Sequence: Synthetic oligonucleotide
  Target: SCNA; (-) strand; PAM type: YTN; PAM sequence: CTG
caccttcttagtatatttag

SEQ ID NO: 51880 - DNA, 20 bp, Artificial Sequence
  Description of Artificial Sequence: Synthetic oligonucleotide
  Target: SCNA; (-) strand; PAM type: YTN; PAM sequence: TTC
tgcaccttcttagtatattt

SEQ ID NO: 51881 - DNA, 20 bp, Artificial Sequence
  Description of Artificial Sequence: Synthetic oligonucleotide
  Target: SCNA; (-) strand; PAM type: YTN; PAM sequence: TTT
ctgcaccttcttagtatatt

SEQ ID NO: 51882 - DNA, 20 bp, Artificial Sequence
  Description of Artificial Sequence: Synthetic oligonucleotide
  Target: SCNA; (-) strand; PAM type: YTN; PAM sequence: TTT
tctgcaccttcttagtatat

SEQ ID NO: 51883 - DNA, 20 bp, Artificial Sequence
  Description of Artificial Sequence: Synthetic oligonucleotide
  Target: SCNA; (-) strand; PAM type: YTN; PAM sequence: TTT
ttctgcaccttcttagtata

SEQ ID NO: 51884 - DNA, 20 bp, Artificial Sequence
  Description of Artificial Sequence: Synthetic oligonucleotide
  Target: SCNA; (-) strand; PAM type: YTN; PAM sequence: CTT
tttctgcaccttcttagtat

SEQ ID NO: 51885 - DNA, 20 bp, Artificial Sequence
  Description of Artificial Sequence: Synthetic oligonucleotide
  Target: SCNA; (-) strand; PAM type: YTN; PAM sequence: TTC
tttttctgcaccttcttagt

SEQ ID NO: 51886 - DNA, 20 bp, Artificial Sequence
  Description of Artificial Sequence: Synthetic oligonucleotide
  Target: SCNA; (-) strand; PAM type: YTN; PAM sequence: CTT
ctttttctgcaccttcttag

SEQ ID NO: 51887 - DNA, 20 bp, Artificial Sequence
  Description of Artificial Sequence: Synthetic oligonucleotide
  Target: SCNA; (-) strand; PAM type: YTN; PAM sequence: CTC
ttctttttctgcaccttctt

SEQ ID NO: 51888 - DNA, 20 bp, Artificial Sequence
  Description of Artificial Sequence: Synthetic oligonucleotide
  Target: SCNA; (-) strand; PAM type: YTN; PAM sequence: TTC
tcttctttttctgcaccttc

SEQ ID NO: 51889 - DNA, 20 bp, Artificial Sequence
  Description of Artificial Sequence: Synthetic oligonucleotide
  Target: SCNA; (-) strand; PAM type: YTN; PAM sequence: CTT
ctcttctttttctgcacctt

SEQ ID NO: 51890 - DNA, 20 bp, Artificial Sequence
  Description of Artificial Sequence: Synthetic oligonucleotide
  Target: SCNA; (-) strand; PAM type: YTN; PAM sequence: CTC
ttctcttctttttctgcacc

SEQ ID NO: 51891 - DNA, 20 bp, Artificial Sequence
  Description of Artificial Sequence: Synthetic oligonucleotide
  Target: SCNA; (-) strand; PAM type: YTN; PAM sequence: TTA
agccacaacatactcttctc

SEQ ID NO: 51892 - DNA, 20 bp, Artificial Sequence
  Description of Artificial Sequence: Synthetic oligonucleotide
  Target: SCNA; (-) strand; PAM type: YTN; PAM sequence: CTG
ccatggggaaatatggggtt

SEQ ID NO: 51893 - DNA, 20 bp, Artificial Sequence
  Description of Artificial Sequence: Synthetic oligonucleotide
  Target: SCNA; (-) strand; PAM type: YTN; PAM sequence: TTC
tgccatggggaaatatgggg

SEQ ID NO: 51894 - DNA, 20 bp, Artificial Sequence
  Description of Artificial Sequence: Synthetic oligonucleotide
  Target: SCNA; (-) strand; PAM type: YTN; PAM sequence: CTT
ctgccatggggaaatatggg

SEQ ID NO: 51895 - DNA, 20 bp, Artificial Sequence
  Description of Artificial Sequence: Synthetic oligonucleotide
  Target: SCNA; (-) strand; PAM type: YTN; PAM sequence: CTG
tccttctgccatggggaaat

SEQ ID NO: 51896 - DNA, 20 bp, Artificial Sequence
  Description of Artificial Sequence: Synthetic oligonucleotide
  Target: SCNA; (-) strand; PAM type: YTN; PAM sequence: TTC
tgtccttctgccatggggaa

SEQ ID NO: 51897 - DNA, 20 bp, Artificial Sequence
  Description of Artificial Sequence: Synthetic oligonucleotide
  Target: SCNA; (-) strand; PAM type: YTN; PAM sequence: TTT
ctgtccttctgccatgggga

SEQ ID NO: 51898 - DNA, 20 bp, Artificial Sequence
  Description of Artificial Sequence: Synthetic oligonucleotide
  Target: SCNA; (-) strand; PAM type: YTN; PAM sequence: TTA
gtttctgtccttctgccatg

SEQ ID NO: 51899 - DNA, 20 bp, Artificial Sequence
  Description of Artificial Sequence: Synthetic oligonucleotide
  Target: SCNA; (-) strand; PAM type: YTN; PAM sequence: TTT
agtttctgtccttctgccat

SEQ ID NO: 51900 - DNA, 20 bp, Artificial Sequence
  Description of Artificial Sequence: Synthetic oligonucleotide
  Target: SCNA; (-) strand; PAM type: YTN; PAM sequence: CTC
agatttagtttctgtccttc

SEQ ID NO: 51901 - DNA, 20 bp, Artificial Sequence
  Description of Artificial Sequence: Synthetic oligonucleotide
  Target: SCNA; (-) strand; PAM type: YTN; PAM sequence: TTG
ccctcagatttagtttctgt

SEQ ID NO: 51902 - DNA, 20 bp, Artificial Sequence
  Description of Artificial Sequence: Synthetic oligonucleotide
  Target: SCNA; (-) strand; PAM type: YTN; PAM sequence: TTG
agttgccctcagatttagtt

SEQ ID NO: 51903 - DNA, 20 bp, Artificial Sequence
  Description of Artificial Sequence: Synthetic oligonucleotide
  Target: SCNA; (-) strand; PAM type: YTN; PAM sequence: CTG
ttgagttgccctcagattta

SEQ ID NO: 51904 - DNA, 20 bp, Artificial Sequence
  Description of Artificial Sequence: Synthetic oligonucleotide
  Target: SCNA; (-) strand; PAM type: YTN; PAM sequence: CTA
ctgttgagttgccctcagat

SEQ ID NO: 51905 - DNA, 20 bp, Artificial Sequence
  Description of Artificial Sequence: Synthetic oligonucleotide
  Target: SCNA; (-) strand; PAM type: YTN; PAM sequence: TTG
actactgttgagttgccctc

SEQ ID NO: 51906 - DNA, 20 bp, Artificial Sequence
  Description of Artificial Sequence: Synthetic oligonucleotide
  Target: SCNA; (-) strand; PAM type: YTN; PAM sequence: TTA
ttgactactgttgagttgcc

SEQ ID NO: 51907 - DNA, 20 bp, Artificial Sequence
  Description of Artificial Sequence: Synthetic oligonucleotide
  Target: SCNA; (-) strand; PAM type: YTN; PAM sequence: CTG
ataattattgactactgttg

SEQ ID NO: 51908 - DNA, 20 bp, Artificial Sequence
  Description of Artificial Sequence: Synthetic oligonucleotide
  Target: SCNA; (-) strand; PAM type: YTN; PAM sequence: TTG
gctgataattattgactact

SEQ ID NO: 51909 - DNA, 20 bp, Artificial Sequence
  Description of Artificial Sequence: Synthetic oligonucleotide
  Target: SCNA; (-) strand; PAM type: YTN; PAM sequence: TTT
ggctgataattattgactac

SEQ ID NO: 51910 - DNA, 20 bp, Artificial Sequence
  Description of Artificial Sequence: Synthetic oligonucleotide
  Target: SCNA; (-) strand; PAM type: YTN; PAM sequence: TTG
atttggctgataattattga

SEQ ID NO: 51911 - DNA, 20 bp, Artificial Sequence
  Description of Artificial Sequence: Synthetic oligonucleotide
  Target: SCNA; (-) strand; PAM type: YTN; PAM sequence: TTC
atccattgatttggctgata

SEQ ID NO: 51912 - DNA, 20 bp, Artificial Sequence
  Description of Artificial Sequence: Synthetic oligonucleotide
  Target: SCNA; (-) strand; PAM type: YTN; PAM sequence: CTA
ttcatccattgatttggctg

SEQ ID NO: 51913 - DNA, 20 bp, Artificial Sequence
  Description of Artificial Sequence: Synthetic oligonucleotide
  Target: SCNA; (-) strand; PAM type: YTN; PAM sequence: TTC
atccatccacctattcatcc

SEQ ID NO: 51914 - DNA, 20 bp, Artificial Sequence
  Description of Artificial Sequence: Synthetic oligonucleotide
  Target: SCNA; (-) strand; PAM type: YTN; PAM sequence: TTC
atccatgcattcatccatcc

SEQ ID NO: 51915 - DNA, 20 bp, Artificial Sequence
  Description of Artificial Sequence: Synthetic oligonucleotide
  Target: SCNA; (-) strand; PAM type: YTN; PAM sequence: TTC
ccaggcacaaacattcatcc

SEQ ID NO: 51916 - DNA, 20 bp, Artificial Sequence
  Description of Artificial Sequence: Synthetic oligonucleotide
  Target: SCNA; (-) strand; PAM type: YTN; PAM sequence: TTA
tgcatgatgacagaagggtt

SEQ ID NO: 51917 - DNA, 20 bp, Artificial Sequence
  Description of Artificial Sequence: Synthetic oligonucleotide
  Target: SCNA; (-) strand; PAM type: YTN; PAM sequence: CTT
atgcatgatgacagaagggt

SEQ ID NO: 51918 - DNA, 20 bp, Artificial Sequence
  Description of Artificial Sequence: Synthetic oligonucleotide
  Target: SCNA; (-) strand; PAM type: YTN; PAM sequence: CTG
cttatgcatgatgacagaag

SEQ ID NO: 51919 - DNA, 20 bp, Artificial Sequence
  Description of Artificial Sequence: Synthetic oligonucleotide
  Target: SCNA; (-) strand; PAM type: YTN; PAM sequence: CTC
aggctgcttatgcatgatga

SEQ ID NO: 51920 - DNA, 20 bp, Artificial Sequence
  Description of Artificial Sequence: Synthetic oligonucleotide
  Target: SCNA; (-) strand; PAM type: YTN; PAM sequence: CTA
agactcaggctgcttatgca

SEQ ID NO: 51921 - DNA, 20 bp, Artificial Sequence
  Description of Artificial Sequence: Synthetic oligonucleotide
  Target: SCNA; (-) strand; PAM type: YTN; PAM sequence: TTA
tctaagactcaggctgctta

SEQ ID NO: 51922 - DNA, 20 bp, Artificial Sequence
  Description of Artificial Sequence: Synthetic oligonucleotide
  Target: SCNA; (-) strand; PAM type: YTN; PAM sequence: TTC
acatgaagaaagcatgtcat

SEQ ID NO: 51923 - DNA, 20 bp, Artificial Sequence
  Description of Artificial Sequence: Synthetic oligonucleotide
  Target: SCNA; (-) strand; PAM type: YTN; PAM sequence: TTA
ttcacatgaagaaagcatgt

SEQ ID NO: 51924 - DNA, 20 bp, Artificial Sequence
  Description of Artificial Sequence: Synthetic oligonucleotide
  Target: SCNA; (-) strand; PAM type: YTN; PAM sequence: TTT
attcacatgaagaaagcatg

SEQ ID NO: 51925 - DNA, 20 bp, Artificial Sequence
  Description of Artificial Sequence: Synthetic oligonucleotide
  Target: SCNA; (-) strand; PAM type: YTN; PAM sequence: CTG
tttattcacatgaagaaagc

SEQ ID NO: 51926 - DNA, 20 bp, Artificial Sequence
  Description of Artificial Sequence: Synthetic oligonucleotide
  Target: SCNA; (-) strand; PAM type: YTN; PAM sequence: TTA
ggtctgtttattcacatgaa

SEQ ID NO: 51927 - DNA, 20 bp, Artificial Sequence
  Description of Artificial Sequence: Synthetic oligonucleotide
  Target: SCNA; (-) strand; PAM type: YTN; PAM sequence: TTT
aggtctgtttattcacatga

SEQ ID NO: 51928 - DNA, 20 bp, Artificial Sequence
  Description of Artificial Sequence: Synthetic oligonucleotide
  Target: SCNA; (-) strand; PAM type: YTN; PAM sequence: CTT
taggtctgtttattcacatg

SEQ ID NO: 51929 - DNA, 20 bp, Artificial Sequence
  Description of Artificial Sequence: Synthetic oligonucleotide
  Target: SCNA; (-) strand; PAM type: YTN; PAM sequence: CTG
tctttaggtctgtttattca

SEQ ID NO: 51930 - DNA, 20 bp, Artificial Sequence
  Description of Artificial Sequence: Synthetic oligonucleotide
  Target: SCNA; (-) strand; PAM type: YTN; PAM sequence: CTA
gtgcctgtctttaggtctgt

SEQ ID NO: 51931 - DNA, 20 bp, Artificial Sequence
  Description of Artificial Sequence: Synthetic oligonucleotide
  Target: SCNA; (-) strand; PAM type: YTN; PAM sequence: CTC
ctagtgcctgtctttaggtc

SEQ ID NO: 51932 - DNA, 20 bp, Artificial Sequence
  Description of Artificial Sequence: Synthetic oligonucleotide
  Target: SCNA; (-) strand; PAM type: YTN; PAM sequence: TTG
tggtcccagggtctcctagt

SEQ ID NO: 51933 - DNA, 20 bp, Artificial Sequence
  Description of Artificial Sequence: Synthetic oligonucleotide
  Target: SCNA; (-) strand; PAM type: YTN; PAM sequence: TTT
gtggtcccagggtctcctag

SEQ ID NO: 51934 - DNA, 20 bp, Artificial Sequence
  Description of Artificial Sequence: Synthetic oligonucleotide
  Target: SCNA; (-) strand; PAM type: YTN; PAM sequence: CTT
tgtggtcccagggtctccta

SEQ ID NO: 51935 - DNA, 20 bp, Artificial Sequence
  Description of Artificial Sequence: Synthetic oligonucleotide
  Target: SCNA; (-) strand; PAM type: YTN; PAM sequence: CTG
agctttgtggtcccagggtc

SEQ ID NO: 51936 - DNA, 20 bp, Artificial Sequence
  Description of Artificial Sequence: Synthetic oligonucleotide
  Target: SCNA; (-) strand; PAM type: YTN; PAM sequence: TTA
taacaatctgagctttgtgg

SEQ ID NO: 51937 - DNA, 20 bp, Artificial Sequence
  Description of Artificial Sequence: Synthetic oligonucleotide
  Target: SCNA; (-) strand; PAM type: YTN; PAM sequence: TTA
ttataacaatctgagctttg

SEQ ID NO: 51938 - DNA, 20 bp, Artificial Sequence
  Description of Artificial Sequence: Synthetic oligonucleotide
  Target: SCNA; (-) strand; PAM type: YTN; PAM sequence: TTT
attataacaatctgagcttt

SEQ ID NO: 51939 - DNA, 20 bp, Artificial Sequence
  Description of Artificial Sequence: Synthetic oligonucleotide
  Target: SCNA; (-) strand; PAM type: YTN; PAM sequence: TTT
tattataacaatctgagctt

SEQ ID NO: 51940 - DNA, 20 bp, Artificial Sequence
  Description of Artificial Sequence: Synthetic oligonucleotide
  Target: SCNA; (-) strand; PAM type: YTN; PAM sequence: CTT
ttattataacaatctgagct

SEQ ID NO: 51941 - DNA, 20 bp, Artificial Sequence
  Description of Artificial Sequence: Synthetic oligonucleotide
  Target: SCNA; (-) strand; PAM type: YTN; PAM sequence: CTC
cttttattataacaatctga

SEQ ID NO: 51942 - DNA, 20 bp, Artificial Sequence
  Description of Artificial Sequence: Synthetic oligonucleotide
  Target: SCNA; (-) strand; PAM type: YTN; PAM sequence: TTC
cctccttttattataacaat

SEQ ID NO: 51943 - DNA, 20 bp, Artificial Sequence
  Description of Artificial Sequence: Synthetic oligonucleotide
  Target: SCNA; (-) strand; PAM type: YTN; PAM sequence: TTT
ccctccttttattataacaa

SEQ ID NO: 51944 - DNA, 20 bp, Artificial Sequence
  Description of Artificial Sequence: Synthetic oligonucleotide
  Target: SCNA; (-) strand; PAM type: YTN; PAM sequence: TTG
tttccctccttttattataa

SEQ ID NO: 51945 - DNA, 20 bp, Artificial Sequence
  Description of Artificial Sequence: Synthetic oligonucleotide
  Target: SCNA; (-) strand; PAM type: YTN; PAM sequence: TTT
gtttccctccttttattata

SEQ ID NO: 51946 - DNA, 20 bp, Artificial Sequence
  Description of Artificial Sequence: Synthetic oligonucleotide
  Target: SCNA; (-) strand; PAM type: YTN; PAM sequence: CTT
tgtttccctccttttattat

SEQ ID NO: 51947 - DNA, 20 bp, Artificial Sequence
  Description of Artificial Sequence: Synthetic oligonucleotide
  Target: SCNA; (-) strand; PAM type: YTN; PAM sequence: TTC
aacagggagctttgtttccc

SEQ ID NO: 51948 - DNA, 20 bp, Artificial Sequence
  Description of Artificial Sequence: Synthetic oligonucleotide
  Target: SCNA; (-) strand; PAM type: YTN; PAM sequence: CTT
caacagggagctttgtttcc

SEQ ID NO: 51949 - DNA, 20 bp, Artificial Sequence
  Description of Artificial Sequence: Synthetic oligonucleotide
  Target: SCNA; (-) strand; PAM type: YTN; PAM sequence: TTC
ttcaacagggagctttgttt

SEQ ID NO: 51950 - DNA, 20 bp, Artificial Sequence
  Description of Artificial Sequence: Synthetic oligonucleotide
  Target: SCNA; (-) strand; PAM type: YTN; PAM sequence: TTT
cttcaacagggagctttgtt

SEQ ID NO: 51951 - DNA, 20 bp, Artificial Sequence
  Description of Artificial Sequence: Synthetic oligonucleotide
  Target: SCNA; (-) strand; PAM type: YTN; PAM sequence: TTT
tcttcaacagggagctttgt

SEQ ID NO: 51952 - DNA, 20 bp, Artificial Sequence
  Description of Artificial Sequence: Synthetic oligonucleotide
  Target: SCNA; (-) strand; PAM type: YTN; PAM sequence: TTG
tatatcaagtgtgcaaaaat

SEQ ID NO: 51953 - DNA, 20 bp, Artificial Sequence
  Description of Artificial Sequence: Synthetic oligonucleotide
  Target: SCNA; (-) strand; PAM type: YTN; PAM sequence: TTA
gtagaaatattgtatatcaa

SEQ ID NO: 51954 - DNA, 20 bp, Artificial Sequence
  Description of Artificial Sequence: Synthetic oligonucleotide
  Target: SCNA; (-) strand; PAM type: YTN; PAM sequence: TTC
attagtagaaatattgtata

SEQ ID NO: 51955 - DNA, 20 bp, Artificial Sequence
  Description of Artificial Sequence: Synthetic oligonucleotide
  Target: SCNA; (-) strand; PAM type: YTN; PAM sequence: CTG
ttcattagtagaaatattgt

SEQ ID NO: 51956 - DNA, 20 bp, Artificial Sequence
  Description of Artificial Sequence: Synthetic oligonucleotide
  Target: SCNA; (-) strand; PAM type: YTN; PAM sequence: CTC
tgttcattagtagaaatatt

SEQ ID NO: 51957 - DNA, 20 bp, Artificial Sequence
  Description of Artificial Sequence: Synthetic oligonucleotide
  Target: SCNA; (-) strand; PAM type: YTN; PAM sequence: TTC
tctgttcattagtagaaata

SEQ ID NO: 51958 - DNA, 20 bp, Artificial Sequence
  Description of Artificial Sequence: Synthetic oligonucleotide
  Target: SCNA; (-) strand; PAM type: YTN; PAM sequence: TTT
ctctgttcattagtagaaat

SEQ ID NO: 51959 - DNA, 20 bp, Artificial Sequence
  Description of Artificial Sequence: Synthetic oligonucleotide
  Target: SCNA; (-) strand; PAM type: YTN; PAM sequence: CTT
tctctgttcattagtagaaa

SEQ ID NO: 51960 - DNA, 20 bp, Artificial Sequence
  Description of Artificial Sequence: Synthetic oligonucleotide
  Target: SCNA; (-) strand; PAM type: YTN; PAM sequence: TTC
aagtcaagctttctctgttc

SEQ ID NO: 51961 - DNA, 20 bp, Artificial Sequence
  Description of Artificial Sequence: Synthetic oligonucleotide
  Target: SCNA; (-) strand; PAM type: YTN; PAM sequence: TTT
caagtcaagctttctctgtt

SEQ ID NO: 51962 - DNA, 20 bp, Artificial Sequence
  Description of Artificial Sequence: Synthetic oligonucleotide
  Target: SCNA; (-) strand; PAM type: YTN; PAM sequence: CTT
tcaagtcaagctttctctgt

SEQ ID NO: 51963 - DNA, 20 bp, Artificial Sequence
  Description of Artificial Sequence: Synthetic oligonucleotide
  Target: SCNA; (-) strand; PAM type: YTN; PAM sequence: CTA
atataaatgtgtcctttcaa

SEQ ID NO: 51964 - DNA, 20 bp, Artificial Sequence
  Description of Artificial Sequence: Synthetic oligonucleotide
  Target: SCNA; (-) strand; PAM type: YTN; PAM sequence: CTA
gatagggatgacatctaata

SEQ ID NO: 51965 - DNA, 20 bp, Artificial Sequence
  Description of Artificial Sequence: Synthetic oligonucleotide
  Target: SCNA; (-) strand; PAM type: YTN; PAM sequence: CTC
tagatagggatgacatctaa

SEQ ID NO: 51966 - DNA, 20 bp, Artificial Sequence
  Description of Artificial Sequence: Synthetic oligonucleotide
  Target: SCNA; (-) strand; PAM type: YTN; PAM sequence: TTG
atagtaatggcctctagata

SEQ ID NO: 51967 - DNA, 20 bp, Artificial Sequence
  Description of Artificial Sequence: Synthetic oligonucleotide
  Target: SCNA; (-) strand; PAM type: YTN; PAM sequence: CTT
gatagtaatggcctctagat

SEQ ID NO: 51968 - DNA, 20 bp, Artificial Sequence
  Description of Artificial Sequence: Synthetic oligonucleotide
  Target: SCNA; (-) strand; PAM type: YTN; PAM sequence: CTG
acagatgcttgatagtaatg

SEQ ID NO: 51969 - DNA, 20 bp, Artificial Sequence
  Description of Artificial Sequence: Synthetic oligonucleotide
  Target: SCNA; (-) strand; PAM type: YTN; PAM sequence: TTA
cctgacagatgcttgatagt

SEQ ID NO: 51970 - DNA, 20 bp, Artificial Sequence
  Description of Artificial Sequence: Synthetic oligonucleotide
  Target: SCNA; (-) strand; PAM type: YTN; PAM sequence: TTT
acctgacagatgcttgatag

SEQ ID NO: 51971 - DNA, 20 bp, Artificial Sequence
  Description of Artificial Sequence: Synthetic oligonucleotide
  Target: SCNA; (-) strand; PAM type: YTN; PAM sequence: CTT
tacctgacagatgcttgata

SEQ ID NO: 51972 - DNA, 20 bp, Artificial Sequence
  Description of Artificial Sequence: Synthetic oligonucleotide
  Target: SCNA; (-) strand; PAM type: YTN; PAM sequence: CTC
ctttacctgacagatgcttg

SEQ ID NO: 51973 - DNA, 20 bp, Artificial Sequence
  Description of Artificial Sequence: Synthetic oligonucleotide
  Target: SCNA; (-) strand; PAM type: YTN; PAM sequence: CTC
atctcctttacctgacagat

SEQ ID NO: 51974 - DNA, 20 bp, Artificial Sequence
  Description of Artificial Sequence: Synthetic oligonucleotide
  Target: SCNA; (-) strand; PAM type: YTN; PAM sequence: TTA
caggcatctcatctccttta

SEQ ID NO: 51975 - DNA, 20 bp, Artificial Sequence
  Description of Artificial Sequence: Synthetic oligonucleotide
  Target: SCNA; (-) strand; PAM type: YTN; PAM sequence: TTA
aagaaaaaattacaggcatc

SEQ ID NO: 51976 - DNA, 20 bp, Artificial Sequence
  Description of Artificial Sequence: Synthetic oligonucleotide
  Target: SCNA; (-) strand; PAM type: YTN; PAM sequence: TTT
aaagaaaaaattacaggcat

SEQ ID NO: 51977 - DNA, 20 bp, Artificial Sequence
  Description of Artificial Sequence: Synthetic oligonucleotide
  Target: SCNA; (-) strand; PAM type: YTN; PAM sequence: TTA
gaaaaaacaatatttaaaga

SEQ ID NO: 51978 - DNA, 20 bp, Artificial Sequence
  Description of Artificial Sequence: Synthetic oligonucleotide
  Target: SCNA; (-) strand; PAM type: YTN; PAM sequence: CTT
agaaaaaacaatatttaaag

SEQ ID NO: 51979 - DNA, 20 bp, Artificial Sequence
  Description of Artificial Sequence: Synthetic oligonucleotide
  Target: SCNA; (-) strand; PAM type: YTN; PAM sequence: TTC
caacacaacttagaaaaaac

SEQ ID NO: 51980 - DNA, 20 bp, Artificial Sequence
  Description of Artificial Sequence: Synthetic oligonucleotide
  Target: SCNA; (-) strand; PAM type: YTN; PAM sequence: TTT
ccaacacaacttagaaaaaa

SEQ ID NO: 51981 - DNA, 20 bp, Artificial Sequence
  Description of Artificial Sequence: Synthetic oligonucleotide
  Target: SCNA; (-) strand; PAM type: YTN; PAM sequence: CTC
cccatttccaacacaactta

SEQ ID NO: 51982 - DNA, 20 bp, Artificial Sequence
  Description of Artificial Sequence: Synthetic oligonucleotide
  Target: SCNA; (-) strand; PAM type: YTN; PAM sequence: TTG
caactccccatttccaacac

SEQ ID NO: 51983 - DNA, 20 bp, Artificial Sequence
  Description of Artificial Sequence: Synthetic oligonucleotide
  Target: SCNA; (-) strand; PAM type: YTN; PAM sequence: CTT
gcaactccccatttccaaca

SEQ ID NO: 51984 - DNA, 20 bp, Artificial Sequence
  Description of Artificial Sequence: Synthetic oligonucleotide
  Target: SCNA; (-) strand; PAM type: YTN; PAM sequence: TTA
agcaatggaaatacaaactt

SEQ ID NO: 51985 - DNA, 20 bp, Artificial Sequence
  Description of Artificial Sequence: Synthetic oligonucleotide
  Target: SCNA; (-) strand; PAM type: YTN; PAM sequence: TTT
aagcaatggaaatacaaact

SEQ ID NO: 51986 - DNA, 20 bp, Artificial Sequence
  Description of Artificial Sequence: Synthetic oligonucleotide
  Target: SCNA; (-) strand; PAM type: YTN; PAM sequence: TTT
taagcaatggaaatacaaac

SEQ ID NO: 51987 - DNA, 20 bp, Artificial Sequence
  Description of Artificial Sequence: Synthetic oligonucleotide
  Target: SCNA; (-) strand; PAM type: YTN; PAM sequence: TTT
ttaagcaatggaaatacaaa

SEQ ID NO: 51988 - DNA, 20 bp, Artificial Sequence
  Description of Artificial Sequence: Synthetic oligonucleotide
  Target: SCNA; (-) strand; PAM type: YTN; PAM sequence: CTA
tttttaagcaatggaaatac

SEQ ID NO: 51989 - DNA, 20 bp, Artificial Sequence
  Description of Artificial Sequence: Synthetic oligonucleotide
  Target: SCNA; (-) strand; PAM type: YTN; PAM sequence: TTC
tatttttaagcaatggaaat

SEQ ID NO: 51990 - DNA, 20 bp, Artificial Sequence
  Description of Artificial Sequence: Synthetic oligonucleotide
  Target: SCNA; (-) strand; PAM type: YTN; PAM sequence: TTT
ctatttttaagcaatggaaa

SEQ ID NO: 51991 - DNA, 20 bp, Artificial Sequence
  Description of Artificial Sequence: Synthetic oligonucleotide
  Target: SCNA; (-) strand; PAM type: YTN; PAM sequence: TTT
tctatttttaagcaatggaa

SEQ ID NO: 51992 - DNA, 20 bp, Artificial Sequence
  Description of Artificial Sequence: Synthetic oligonucleotide
  Target: SCNA; (-) strand; PAM type: YTN; PAM sequence: CTG
ttttctatttttaagcaatg

SEQ ID NO: 51993 - DNA, 20 bp, Artificial Sequence
  Description of Artificial Sequence: Synthetic oligonucleotide
  Target: SCNA; (-) strand; PAM type: YTN; PAM sequence: TTC
atctgttttctatttttaag

SEQ ID NO: 51994 - DNA, 20 bp, Artificial Sequence
  Description of Artificial Sequence: Synthetic oligonucleotide
  Target: SCNA; (-) strand; PAM type: YTN; PAM sequence: CTT
catctgttttctatttttaa

SEQ ID NO: 51995 - DNA, 20 bp, Artificial Sequence
  Description of Artificial Sequence: Synthetic oligonucleotide
  Target: SCNA; (-) strand; PAM type: YTN; PAM sequence: TTC
ttcatctgttttctattttt

SEQ ID NO: 51996 - DNA, 20 bp, Artificial Sequence
  Description of Artificial Sequence: Synthetic oligonucleotide
  Target: SCNA; (-) strand; PAM type: YTN; PAM sequence: TTT
cttcatctgttttctatttt

SEQ ID NO: 51997 - DNA, 20 bp, Artificial Sequence
  Description of Artificial Sequence: Synthetic oligonucleotide
  Target: SCNA; (-) strand; PAM type: YTN; PAM sequence: CTT
tcttcatctgttttctattt

SEQ ID NO: 51998 - DNA, 20 bp, Artificial Sequence
  Description of Artificial Sequence: Synthetic oligonucleotide
  Target: SCNA; (-) strand; PAM type: YTN; PAM sequence: CTC
ctttcttcatctgttttcta

SEQ ID NO: 51999 - DNA, 20 bp, Artificial Sequence
  Description of Artificial Sequence: Synthetic oligonucleotide
  Target: SCNA; (-) strand; PAM type: YTN; PAM sequence: CTG
atgatatctcctttcttcat

SEQ ID NO: 52000 - DNA, 20 bp, Artificial Sequence
  Description of Artificial Sequence: Synthetic oligonucleotide
  Target: SCNA; (-) strand; PAM type: YTN; PAM sequence: CTG
ctgatgatatctcctttctt

SEQ ID NO: 52001 - DNA, 20 bp, Artificial Sequence
  Description of Artificial Sequence: Synthetic oligonucleotide
  Target: SCNA; (-) strand; PAM type: YTN; PAM sequence: TTC
tgctgatgatatctcctttc

SEQ ID NO: 52002 - DNA, 20 bp, Artificial Sequence
  Description of Artificial Sequence: Synthetic oligonucleotide
  Target: SCNA; (-) strand; PAM type: YTN; PAM sequence: CTA
tgttctgctgatgatatctc

SEQ ID NO: 52003 - DNA, 20 bp, Artificial Sequence
  Description of Artificial Sequence: Synthetic oligonucleotide
  Target: SCNA; (-) strand; PAM type: YTN; PAM sequence: TTC
tatgttctgctgatgatatc

SEQ ID NO: 52004 - DNA, 20 bp, Artificial Sequence
  Description of Artificial Sequence: Synthetic oligonucleotide
  Target: SCNA; (-) strand; PAM type: YTN; PAM sequence: CTT
ctatgttctgctgatgatat

SEQ ID NO: 52005 - DNA, 20 bp, Artificial Sequence
  Description of Artificial Sequence: Synthetic oligonucleotide
  Target: SCNA; (-) strand; PAM type: YTN; PAM sequence: TTA
tgaaatcttctatgttctgc

SEQ ID NO: 52006 - DNA, 20 bp, Artificial Sequence
  Description of Artificial Sequence: Synthetic oligonucleotide
  Target: SCNA; (-) strand; PAM type: YTN; PAM sequence: CTC
cgtattatgaaatcttctat

SEQ ID NO: 52007 - DNA, 20 bp, Artificial Sequence
  Description of Artificial Sequence: Synthetic oligonucleotide
  Target: SCNA; (-) strand; PAM type: YTN; PAM sequence: TTA
gcctccgtattatgaaatct

SEQ ID NO: 52008 - DNA, 20 bp, Artificial Sequence
  Description of Artificial Sequence: Synthetic oligonucleotide
  Target: SCNA; (-) strand; PAM type: YTN; PAM sequence: TTT
agcctccgtattatgaaatc

SEQ ID NO: 52009 - DNA, 20 bp, Artificial Sequence
  Description of Artificial Sequence: Synthetic oligonucleotide
  Target: SCNA; (-) strand; PAM type: YTN; PAM sequence: TTT
tagcctccgtattatgaaat

SEQ ID NO: 52010 - DNA, 20 bp, Artificial Sequence
  Description of Artificial Sequence: Synthetic oligonucleotide
  Target: SCNA; (-) strand; PAM type: YTN; PAM sequence: TTA
agagttttagcctccgtatt

SEQ ID NO: 52011 - DNA, 20 bp, Artificial Sequence
  Description of Artificial Sequence: Synthetic oligonucleotide
  Target: SCNA; (-) strand; PAM type: YTN; PAM sequence: CTT
aagagttttagcctccgtat

SEQ ID NO: 52012 - DNA, 20 bp, Artificial Sequence
  Description of Artificial Sequence: Synthetic oligonucleotide
  Target: SCNA; (-) strand; PAM type: YTN; PAM sequence: TTC
ttaagagttttagcctccgt

SEQ ID NO: 52013 - DNA, 20 bp, Artificial Sequence
  Description of Artificial Sequence: Synthetic oligonucleotide
  Target: SCNA; (-) strand; PAM type: YTN; PAM sequence: TTT
cttaagagttttagcctccg

SEQ ID NO: 52014 - DNA, 20 bp, Artificial Sequence
  Description of Artificial Sequence: Synthetic oligonucleotide
  Target: SCNA; (-) strand; PAM type: YTN; PAM sequence: TTT
tcttaagagttttagcctcc

SEQ ID NO: 52015 - DNA, 20 bp, Artificial Sequence
  Description of Artificial Sequence: Synthetic oligonucleotide
  Target: SCNA; (-) strand; PAM type: YTN; PAM sequence: TTT
ttcttaagagttttagcctc

SEQ ID NO: 52016 - DNA, 20 bp, Artificial Sequence
  Description of Artificial Sequence: Synthetic oligonucleotide
  Target: SCNA; (-) strand; PAM type: YTN; PAM sequence: CTT
tttcttaagagttttagcct

SEQ ID NO: 52017 - DNA, 20 bp, Artificial Sequence
  Description of Artificial Sequence: Synthetic oligonucleotide
  Target: SCNA; (-) strand; PAM type: YTN; PAM sequence: TTG
ctttttcttaagagttttag

SEQ ID NO: 52018 - DNA, 20 bp, Artificial Sequence
  Description of Artificial Sequence: Synthetic oligonucleotide
  Target: SCNA; (-) strand; PAM type: YTN; PAM sequence: CTA
gaataaatattgctttttct

SEQ ID NO: 52019 - DNA, 20 bp, Artificial Sequence
  Description of Artificial Sequence: Synthetic oligonucleotide
  Target: SCNA; (-) strand; PAM type: YTN; PAM sequence: TTG
ggcactagaataaatattgc

SEQ ID NO: 52020 - DNA, 20 bp, Artificial Sequence
  Description of Artificial Sequence: Synthetic oligonucleotide
  Target: SCNA; (-) strand; PAM type: YTN; PAM sequence: CTC
atggtaggttgggcactaga

SEQ ID NO: 52021 - DNA, 20 bp, Artificial Sequence
  Description of Artificial Sequence: Synthetic oligonucleotide
  Target: SCNA; (-) strand; PAM type: YTN; PAM sequence: TTC
tcatggtaggttgggcacta

SEQ ID NO: 52022 - DNA, 20 bp, Artificial Sequence
  Description of Artificial Sequence: Synthetic oligonucleotide
  Target: SCNA; (-) strand; PAM type: YTN; PAM sequence: TTT
ctcatggtaggttgggcact

SEQ ID NO: 52023 - DNA, 20 bp, Artificial Sequence
  Description of Artificial Sequence: Synthetic oligonucleotide
  Target: SCNA; (-) strand; PAM type: YTN; PAM sequence: CTT
tctcatggtaggttgggcac

SEQ ID NO: 52024 - DNA, 20 bp, Artificial Sequence
  Description of Artificial Sequence: Synthetic oligonucleotide
  Target: SCNA; (-) strand; PAM type: YTN; PAM sequence: TTG
cccaaagtcgcacaactttc

SEQ ID NO: 52025 - DNA, 20 bp, Artificial Sequence
  Description of Artificial Sequence: Synthetic oligonucleotide
  Target: SCNA; (-) strand; PAM type: YTN; PAM sequence: CTT
gcccaaagtcgcacaacttt

SEQ ID NO: 52026 - DNA, 20 bp, Artificial Sequence
  Description of Artificial Sequence: Synthetic oligonucleotide
  Target: SCNA; (-) strand; PAM type: YTN; PAM sequence: TTA
aataacttgcccaaagtcgc

SEQ ID NO: 52027 - DNA, 20 bp, Artificial Sequence
  Description of Artificial Sequence: Synthetic oligonucleotide
  Target: SCNA; (-) strand; PAM type: YTN; PAM sequence: TTC
agacccagaggaattaaata

SEQ ID NO: 52028 - DNA, 20 bp, Artificial Sequence
  Description of Artificial Sequence: Synthetic oligonucleotide
  Target: SCNA; (-) strand; PAM type: YTN; PAM sequence: CTT
cagacccagaggaattaaat

SEQ ID NO: 52029 - DNA, 20 bp, Artificial Sequence
  Description of Artificial Sequence: Synthetic oligonucleotide
  Target: SCNA; (-) strand; PAM type: YTN; PAM sequence: CTC
atcttcagacccagaggaat

SEQ ID NO: 52030 - DNA, 20 bp, Artificial Sequence
  Description of Artificial Sequence: Synthetic oligonucleotide
  Target: SCNA; (-) strand; PAM type: YTN; PAM sequence: TTG
tgtgcagactcatcttcaga

SEQ ID NO: 52031 - DNA, 20 bp, Artificial Sequence
  Description of Artificial Sequence: Synthetic oligonucleotide
  Target: SCNA; (-) strand; PAM type: YTN; PAM sequence: CTT
gtgtgcagactcatcttcag

SEQ ID NO: 52032 - DNA, 20 bp, Artificial Sequence
  Description of Artificial Sequence: Synthetic oligonucleotide
  Target: SCNA; (-) strand; PAM type: YTN; PAM sequence: CTC
ttgtgtgcagactcatcttc

SEQ ID NO: 52033 - DNA, 20 bp, Artificial Sequence
  Description of Artificial Sequence: Synthetic oligonucleotide
  Target: SCNA; (-) strand; PAM type: YTN; PAM sequence: TTA
taggctcttgtgtgcagact

SEQ ID NO: 52034 - DNA, 20 bp, Artificial Sequence
  Description of Artificial Sequence: Synthetic oligonucleotide
  Target: SCNA; (-) strand; PAM type: YTN; PAM sequence: TTG
gaagggatcattataggctc

SEQ ID NO: 52035 - DNA, 20 bp, Artificial Sequence
  Description of Artificial Sequence: Synthetic oligonucleotide
  Target: SCNA; (-) strand; PAM type: YTN; PAM sequence: CTG
cagacccgccagtcccggtg

SEQ ID NO: 52036 - DNA, 20 bp, Artificial Sequence
  Description of Artificial Sequence: Synthetic oligonucleotide
  Target: SCNA; (-) strand; PAM type: YTN; PAM sequence: CTG
tggctgcagacccgccagtc

SEQ ID NO: 52037 - DNA, 20 bp, Artificial Sequence
  Description of Artificial Sequence: Synthetic oligonucleotide
  Target: SCNA; (-) strand; PAM type: YTN; PAM sequence: TTC
cagatgtaactgtggctgca

SEQ ID NO: 52038 - DNA, 20 bp, Artificial Sequence
  Description of Artificial Sequence: Synthetic oligonucleotide
  Target: SCNA; (-) strand; PAM type: YTN; PAM sequence: TTT
ccagatgtaactgtggctgc

SEQ ID NO: 52039 - DNA, 20 bp, Artificial Sequence
  Description of Artificial Sequence: Synthetic oligonucleotide
  Target: SCNA; (-) strand; PAM type: YTN; PAM sequence: CTC
caaaagcaccagtggagttt

SEQ ID NO: 52040 - DNA, 20 bp, Artificial Sequence
  Description of Artificial Sequence: Synthetic oligonucleotide
  Target: SCNA; (-) strand; PAM type: YTN; PAM sequence: TTG
ggaagctccaaaagcaccag

SEQ ID NO: 52041 - DNA, 20 bp, Artificial Sequence
  Description of Artificial Sequence: Synthetic oligonucleotide
  Target: SCNA; (-) strand; PAM type: YTN; PAM sequence: CTT
gggaagctccaaaagcacca

SEQ ID NO: 52042 - DNA, 20 bp, Artificial Sequence
  Description of Artificial Sequence: Synthetic oligonucleotide
  Target: SCNA; (-) strand; PAM type: YTN; PAM sequence: CTC
ttgggaagctccaaaagcac

SEQ ID NO: 52043 - DNA, 20 bp, Artificial Sequence
  Description of Artificial Sequence: Synthetic oligonucleotide
  Target: SCNA; (-) strand; PAM type: YTN; PAM sequence: CTG
atactcttgggaagctccaa

SEQ ID NO: 52044 - DNA, 20 bp, Artificial Sequence
  Description of Artificial Sequence: Synthetic oligonucleotide
  Target: SCNA; (-) strand; PAM type: YTN; PAM sequence: TTC
ctgatactcttgggaagctc

SEQ ID NO: 52045 - DNA, 20 bp, Artificial Sequence
  Description of Artificial Sequence: Synthetic oligonucleotide
  Target: SCNA; (-) strand; PAM type: YTN; PAM sequence: TTG
aattcctgatactcttggga

SEQ ID NO: 52046 - DNA, 20 bp, Artificial Sequence
  Description of Artificial Sequence: Synthetic oligonucleotide
  Target: SCNA; (-) strand; PAM type: YTN; PAM sequence: CTG
catattgaattcctgatact

SEQ ID NO: 52047 - DNA, 20 bp, Artificial Sequence
  Description of Artificial Sequence: Synthetic oligonucleotide
  Target: SCNA; (-) strand; PAM type: YTN; PAM sequence: TTA
tgactgcatattgaattcct

SEQ ID NO: 52048 - DNA, 20 bp, Artificial Sequence
  Description of Artificial Sequence: Synthetic oligonucleotide
  Target: SCNA; (-) strand; PAM type: YTN; PAM sequence: TTT
atgactgcatattgaattcc

SEQ ID NO: 52049 - DNA, 20 bp, Artificial Sequence
  Description of Artificial Sequence: Synthetic oligonucleotide
  Target: SCNA; (-) strand; PAM type: YTN; PAM sequence: TTT
tatgactgcatattgaattc

SEQ ID NO: 52050 - DNA, 20 bp, Artificial Sequence
  Description of Artificial Sequence: Synthetic oligonucleotide
  Target: SCNA; (-) strand; PAM type: YTN; PAM sequence: TTT
ttatgactgcatattgaatt

SEQ ID NO: 52051 - DNA, 20 bp, Artificial Sequence
  Description of Artificial Sequence: Synthetic oligonucleotide
  Target: SCNA; (-) strand; PAM type: YTN; PAM sequence: TTT
tttatgactgcatattgaat

SEQ ID NO: 52052 - DNA, 20 bp, Artificial Sequence
  Description of Artificial Sequence: Synthetic oligonucleotide
  Target: SCNA; (-) strand; PAM type: YTN; PAM sequence: TTA
gagaacatgacccaaaattt

SEQ ID NO: 52053 - DNA, 20 bp, Artificial Sequence
  Description of Artificial Sequence: Synthetic oligonucleotide
  Target: SCNA; (-) strand; PAM type: YTN; PAM sequence: CTT
agagaacatgacccaaaatt

SEQ ID NO: 52054 - DNA, 20 bp, Artificial Sequence
  Description of Artificial Sequence: Synthetic oligonucleotide
  Target: SCNA; (-) strand; PAM type: YTN; PAM sequence: TTG
tacttagagaacatgaccca

SEQ ID NO: 52055 - DNA, 20 bp, Artificial Sequence
  Description of Artificial Sequence: Synthetic oligonucleotide
  Target: SCNA; (-) strand; PAM type: YTN; PAM sequence: TTC
acacacatggcagtgttgta

SEQ ID NO: 52056 - DNA, 20 bp, Artificial Sequence
  Description of Artificial Sequence: Synthetic oligonucleotide
  Target: SCNA; (-) strand; PAM type: YTN; PAM sequence: CTT
cacacacatggcagtgttgt

SEQ ID NO: 52057 - DNA, 20 bp, Artificial Sequence
  Description of Artificial Sequence: Synthetic oligonucleotide
  Target: SCNA; (-) strand; PAM type: YTN; PAM sequence: CTC
ttcacacacatggcagtgtt

SEQ ID NO: 52058 - DNA, 20 bp, Artificial Sequence
  Description of Artificial Sequence: Synthetic oligonucleotide
  Target: SCNA; (-) strand; PAM type: YTN; PAM sequence: TTA
ataaagatatctcttcacac

SEQ ID NO: 52059 - DNA, 20 bp, Artificial Sequence
  Description of Artificial Sequence: Synthetic oligonucleotide
  Target: SCNA; (-) strand; PAM type: YTN; PAM sequence: TTT
aataaagatatctcttcaca

SEQ ID NO: 52060 - DNA, 20 bp, Artificial Sequence
  Description of Artificial Sequence: Synthetic oligonucleotide
  Target: SCNA; (-) strand; PAM type: YTN; PAM sequence: TTT
taataaagatatctcttcac

SEQ ID NO: 52061 - DNA, 20 bp, Artificial Sequence
  Description of Artificial Sequence: Synthetic oligonucleotide
  Target: SCNA; (-) strand; PAM type: YTN; PAM sequence: TTA
agaaaaattttaataaagat

SEQ ID NO: 52062 - DNA, 20 bp, Artificial Sequence
  Description of Artificial Sequence: Synthetic oligonucleotide
  Target: SCNA; (-) strand; PAM type: YTN; PAM sequence: CTT
aagaaaaattttaataaaga

SEQ ID NO: 52063 - DNA, 20 bp, Artificial Sequence
  Description of Artificial Sequence: Synthetic oligonucleotide
  Target: SCNA; (-) strand; PAM type: YTN; PAM sequence: TTA
ggaaggaacaacttaagaaa

SEQ ID NO: 52064 - DNA, 20 bp, Artificial Sequence
  Description of Artificial Sequence: Synthetic oligonucleotide
  Target: SCNA; (-) strand; PAM type: YTN; PAM sequence: TTT
aggaaggaacaacttaagaa

SEQ ID NO: 52065 - DNA, 20 bp, Artificial Sequence
  Description of Artificial Sequence: Synthetic oligonucleotide
  Target: SCNA; (-) strand; PAM type: YTN; PAM sequence: CTT
taggaaggaacaacttaaga

SEQ ID NO: 52066 - DNA, 20 bp, Artificial Sequence
  Description of Artificial Sequence: Synthetic oligonucleotide
  Target: SCNA; (-) strand; PAM type: YTN; PAM sequence: CTA
ctttaggaaggaacaactta

SEQ ID NO: 52067 - DNA, 20 bp, Artificial Sequence
  Description of Artificial Sequence: Synthetic oligonucleotide
  Target: SCNA; (-) strand; PAM type: YTN; PAM sequence: TTC
actactttaggaaggaacaa

SEQ ID NO: 52068 - DNA, 20 bp, Artificial Sequence
  Description of Artificial Sequence: Synthetic oligonucleotide
  Target: SCNA; (-) strand; PAM type: YTN; PAM sequence: TTT
cactactttaggaaggaaca

SEQ ID NO: 52069 - DNA, 20 bp, Artificial Sequence
  Description of Artificial Sequence: Synthetic oligonucleotide
  Target: SCNA; (-) strand; PAM type: YTN; PAM sequence: CTT
tcactactttaggaaggaac

SEQ ID NO: 52070 - DNA, 20 bp, Artificial Sequence
  Description of Artificial Sequence: Synthetic oligonucleotide
  Target: SCNA; (-) strand; PAM type: YTN; PAM sequence: CTC
agctttcactactttaggaa

SEQ ID NO: 52071 - DNA, 20 bp, Artificial Sequence
  Description of Artificial Sequence: Synthetic oligonucleotide
  Target: SCNA; (-) strand; PAM type: YTN; PAM sequence: CTG
ctcagctttcactactttag

SEQ ID NO: 52072 - DNA, 20 bp, Artificial Sequence
  Description of Artificial Sequence: Synthetic oligonucleotide
  Target: SCNA; (-) strand; PAM type: YTN; PAM sequence: CTA
agatctgctcagctttcact

SEQ ID NO: 52073 - DNA, 20 bp, Artificial Sequence
  Description of Artificial Sequence: Synthetic oligonucleotide
  Target: SCNA; (-) strand; PAM type: YTN; PAM sequence: TTC
taagatctgctcagctttca

SEQ ID NO: 52074 - DNA, 20 bp, Artificial Sequence
  Description of Artificial Sequence: Synthetic oligonucleotide
  Target: SCNA; (-) strand; PAM type: YTN; PAM sequence: TTT
ctaagatctgctcagctttc

SEQ ID NO: 52075 - DNA, 20 bp, Artificial Sequence
  Description of Artificial Sequence: Synthetic oligonucleotide
  Target: SCNA; (-) strand; PAM type: YTN; PAM sequence: CTA
aatgaatttctaagatctgc

SEQ ID NO: 52076 - DNA, 20 bp, Artificial Sequence
  Description of Artificial Sequence: Synthetic oligonucleotide
  Target: SCNA; (-) strand; PAM type: YTN; PAM sequence: TTC
taaatgaatttctaagatct

SEQ ID NO: 52077 - DNA, 20 bp, Artificial Sequence
  Description of Artificial Sequence: Synthetic oligonucleotide
  Target: SCNA; (-) strand; PAM type: YTN; PAM sequence: TTG
agtaatatgaattctaaatg

SEQ ID NO: 52078 - DNA, 20 bp, Artificial Sequence
  Description of Artificial Sequence: Synthetic oligonucleotide
  Target: SCNA; (-) strand; PAM type: YTN; PAM sequence: TTA
tagtcaagtgtaattgagta

SEQ ID NO: 52079 - DNA, 20 bp, Artificial Sequence
  Description of Artificial Sequence: Synthetic oligonucleotide
  Target: SCNA; (-) strand; PAM type: YTN; PAM sequence: TTA
agtgttatagtcaagtgtaa

SEQ ID NO: 52080 - DNA, 20 bp, Artificial Sequence
  Description of Artificial Sequence: Synthetic oligonucleotide
  Target: SCNA; (-) strand; PAM type: YTN; PAM sequence: CTT
aagtgttatagtcaagtgta

SEQ ID NO: 52081 - DNA, 20 bp, Artificial Sequence
  Description of Artificial Sequence: Synthetic oligonucleotide
  Target: SCNA; (-) strand; PAM type: YTN; PAM sequence: TTC
ttaagtgttatagtcaagtg

SEQ ID NO: 52082 - DNA, 20 bp, Artificial Sequence
  Description of Artificial Sequence: Synthetic oligonucleotide
  Target: SCNA; (-) strand; PAM type: YTN; PAM sequence: CTA
gattcttaagtgttatagtc

SEQ ID NO: 52083 - DNA, 20 bp, Artificial Sequence
  Description of Artificial Sequence: Synthetic oligonucleotide
  Target: SCNA; (-) strand; PAM type: YTN; PAM sequence: CTA
caaaaggaaaataactagat

SEQ ID NO: 52084 - DNA, 20 bp, Artificial Sequence
  Description of Artificial Sequence: Synthetic oligonucleotide
  Target: SCNA; (-) strand; PAM type: YTN; PAM sequence: TTA
ctacaaaaggaaaataacta

SEQ ID NO: 52085 - DNA, 20 bp, Artificial Sequence
  Description of Artificial Sequence: Synthetic oligonucleotide
  Target: SCNA; (-) strand; PAM type: YTN; PAM sequence: TTT
actacaaaaggaaaataact

SEQ ID NO: 52086 - DNA, 20 bp, Artificial Sequence
  Description of Artificial Sequence: Synthetic oligonucleotide
  Target: SCNA; (-) strand; PAM type: YTN; PAM sequence: TTT
tactacaaaaggaaaataac

SEQ ID NO: 52087 - DNA, 20 bp, Artificial Sequence
  Description of Artificial Sequence: Synthetic oligonucleotide
  Target: SCNA; (-) strand; PAM type: YTN; PAM sequence: TTT
ttactacaaaaggaaaataa

SEQ ID NO: 52088 - DNA, 20 bp, Artificial Sequence
  Description of Artificial Sequence: Synthetic oligonucleotide
  Target: SCNA; (-) strand; PAM type: YTN; PAM sequence: TTC
aaataaaatatatttttact

SEQ ID NO: 52089 - DNA, 20 bp, Artificial Sequence
  Description of Artificial Sequence: Synthetic oligonucleotide
  Target: SCNA; (-) strand; PAM type: YTN; PAM sequence: TTT
caaataaaatatatttttac

SEQ ID NO: 52090 - DNA, 20 bp, Artificial Sequence
  Description of Artificial Sequence: Synthetic oligonucleotide
  Target: SCNA; (-) strand; PAM type: YTN; PAM sequence: TTC
acatatttcaaataaaatat

SEQ ID NO: 52091 - DNA, 20 bp, Artificial Sequence
  Description of Artificial Sequence: Synthetic oligonucleotide
  Target: SCNA; (-) strand; PAM type: YTN; PAM sequence: CTA
agtaaccattcacatatttc

SEQ ID NO: 52092 - DNA, 20 bp, Artificial Sequence
  Description of Artificial Sequence: Synthetic oligonucleotide
  Target: SCNA; (-) strand; PAM type: YTN; PAM sequence: TTA
aaatgactaagtaaccattc

SEQ ID NO: 52093 - DNA, 20 bp, Artificial Sequence
  Description of Artificial Sequence: Synthetic oligonucleotide
  Target: SCNA; (-) strand; PAM type: YTN; PAM sequence: TTC
atgtagattaaaatgactaa

SEQ ID NO: 52094 - DNA, 20 bp, Artificial Sequence
  Description of Artificial Sequence: Synthetic oligonucleotide
  Target: SCNA; (-) strand; PAM type: YTN; PAM sequence: TTT
catgtagattaaaatgacta

SEQ ID NO: 52095 - DNA, 20 bp, Artificial Sequence
  Description of Artificial Sequence: Synthetic oligonucleotide
  Target: SCNA; (-) strand; PAM type: YTN; PAM sequence: TTT
tcatgtagattaaaatgact

SEQ ID NO: 52096 - DNA, 20 bp, Artificial Sequence
  Description of Artificial Sequence: Synthetic oligonucleotide
  Target: SCNA; (-) strand; PAM type: YTN; PAM sequence: TTT
ttcatgtagattaaaatgac

SEQ ID NO: 52097 - DNA, 20 bp, Artificial Sequence
  Description of Artificial Sequence: Synthetic oligonucleotide
  Target: SCNA; (-) strand; PAM type: YTN; PAM sequence: TTA
aatttttcatgtagattaaa

SEQ ID NO: 52098 - DNA, 20 bp, Artificial Sequence
  Description of Artificial Sequence: Synthetic oligonucleotide
  Target: SCNA; (-) strand; PAM type: YTN; PAM sequence: TTA
aggttaaatttttcatgtag

SEQ ID NO: 52099 - DNA, 20 bp, Artificial Sequence
  Description of Artificial Sequence: Synthetic oligonucleotide
  Target: SCNA; (-) strand; PAM type: YTN; PAM sequence: TTT
aaggttaaatttttcatgta

SEQ ID NO: 52100 - DNA, 20 bp, Artificial Sequence
  Description of Artificial Sequence: Synthetic oligonucleotide
  Target: SCNA; (-) strand; PAM type: YTN; PAM sequence: CTT
taaggttaaatttttcatgt

SEQ ID NO: 52101 - DNA, 20 bp, Artificial Sequence
  Description of Artificial Sequence: Synthetic oligonucleotide
  Target: SCNA; (-) strand; PAM type: YTN; PAM sequence: TTA
ctttaaggttaaatttttca

SEQ ID NO: 52102 - DNA, 20 bp, Artificial Sequence
  Description of Artificial Sequence: Synthetic oligonucleotide
  Target: SCNA; (-) strand; PAM type: YTN; PAM sequence: TTA
aaatagagttactttaaggt

SEQ ID NO: 52103 - DNA, 20 bp, Artificial Sequence
  Description of Artificial Sequence: Synthetic oligonucleotide
  Target: SCNA; (-) strand; PAM type: YTN; PAM sequence: TTT
aaaatagagttactttaagg

SEQ ID NO: 52104 - DNA, 20 bp, Artificial Sequence
  Description of Artificial Sequence: Synthetic oligonucleotide
  Target: SCNA; (-) strand; PAM type: YTN; PAM sequence: TTT
taaaatagagttactttaag

SEQ ID NO: 52105 - DNA, 20 bp, Artificial Sequence
  Description of Artificial Sequence: Synthetic oligonucleotide
  Target: SCNA; (-) strand; PAM type: YTN; PAM sequence: TTT
ttaaaatagagttactttaa

SEQ ID NO: 52106 - DNA, 20 bp, Artificial Sequence
  Description of Artificial Sequence: Synthetic oligonucleotide
  Target: SCNA; (-) strand; PAM type: YTN; PAM sequence: TTC
atatttttaaaatagagtta

SEQ ID NO: 52107 - DNA, 20 bp, Artificial Sequence
  Description of Artificial Sequence: Synthetic oligonucleotide
  Target: SCNA; (-) strand; PAM type: YTN; PAM sequence: TTT
catatttttaaaatagagtt

SEQ ID NO: 52108 - DNA, 20 bp, Artificial Sequence
  Description of Artificial Sequence: Synthetic oligonucleotide
  Target: SCNA; (-) strand; PAM type: YTN; PAM sequence: CTC
atttcatatttttaaaatag

SEQ ID NO: 52109 - DNA, 20 bp, Artificial Sequence
  Description of Artificial Sequence: Synthetic oligonucleotide
  Target: SCNA; (-) strand; PAM type: YTN; PAM sequence: TTG
atagtctcatttcatatttt

SEQ ID NO: 52110 - DNA, 20 bp, Artificial Sequence
  Description of Artificial Sequence: Synthetic oligonucleotide
  Target: SCNA; (-) strand; PAM type: YTN; PAM sequence: TTC
ataagtaccgattgatagtc

SEQ ID NO: 52111 - DNA, 20 bp, Artificial Sequence
  Description of Artificial Sequence: Synthetic oligonucleotide
  Target: SCNA; (-) strand; PAM type: YTN; PAM sequence: CTT
cataagtaccgattgatagt

SEQ ID NO: 52112 - DNA, 20 bp, Artificial Sequence
  Description of Artificial Sequence: Synthetic oligonucleotide
  Target: SCNA; (-) strand; PAM type: YTN; PAM sequence: TTG
cttcataagtaccgattgat

SEQ ID NO: 52113 - DNA, 20 bp, Artificial Sequence
  Description of Artificial Sequence: Synthetic oligonucleotide
  Target: SCNA; (-) strand; PAM type: YTN; PAM sequence: TTA
gaagaataaacattgcttca

SEQ ID NO: 52114 - DNA, 20 bp, Artificial Sequence
  Description of Artificial Sequence: Synthetic oligonucleotide
  Target: SCNA; (-) strand; PAM type: YTN; PAM sequence: CTA
tattagaagaataaacattg

SEQ ID NO: 52115 - DNA, 20 bp, Artificial Sequence
  Description of Artificial Sequence: Synthetic oligonucleotide
  Target: SCNA; (-) strand; PAM type: YTN; PAM sequence: TTC
ccacactatattagaagaat

SEQ ID NO: 52116 - DNA, 20 bp, Artificial Sequence
  Description of Artificial Sequence: Synthetic oligonucleotide
  Target: SCNA; (-) strand; PAM type: YTN; PAM sequence: CTT
cccacactatattagaagaa

SEQ ID NO: 52117 - DNA, 20 bp, Artificial Sequence
  Description of Artificial Sequence: Synthetic oligonucleotide
  Target: SCNA; (-) strand; PAM type: YTN; PAM sequence: CTC
ttcccacactatattagaag

SEQ ID NO: 52118 - DNA, 20 bp, Artificial Sequence
  Description of Artificial Sequence: Synthetic oligonucleotide
  Target: SCNA; (-) strand; PAM type: YTN; PAM sequence: TTC
tcttcccacactatattaga

SEQ ID NO: 52119 - DNA, 20 bp, Artificial Sequence
  Description of Artificial Sequence: Synthetic oligonucleotide
  Target: SCNA; (-) strand; PAM type: YTN; PAM sequence: TTT
ctcttcccacactatattag

SEQ ID NO: 52120 - DNA, 20 bp, Artificial Sequence
  Description of Artificial Sequence: Synthetic oligonucleotide
  Target: SCNA; (-) strand; PAM type: YTN; PAM sequence: TTA
catttctcttcccacactat

SEQ ID NO: 52121 - DNA, 20 bp, Artificial Sequence
  Description of Artificial Sequence: Synthetic oligonucleotide
  Target: SCNA; (-) strand; PAM type: YTN; PAM sequence: TTT
acatttctcttcccacacta

SEQ ID NO: 52122 - DNA, 20 bp, Artificial Sequence
  Description of Artificial Sequence: Synthetic oligonucleotide
  Target: SCNA; (-) strand; PAM type: YTN; PAM sequence: TTT
tacatttctcttcccacact

SEQ ID NO: 52123 - DNA, 20 bp, Artificial Sequence
  Description of Artificial Sequence: Synthetic oligonucleotide
  Target: SCNA; (-) strand; PAM type: YTN; PAM sequence: CTT
ttacatttctcttcccacac

SEQ ID NO: 52124 - DNA, 20 bp, Artificial Sequence
  Description of Artificial Sequence: Synthetic oligonucleotide
  Target: SCNA; (-) strand; PAM type: YTN; PAM sequence: TTG
caagacttttacatttctct

SEQ ID NO: 52125 - DNA, 20 bp, Artificial Sequence
  Description of Artificial Sequence: Synthetic oligonucleotide
  Target: SCNA; (-) strand; PAM type: YTN; PAM sequence: TTG
tgttgcaagacttttacatt

SEQ ID NO: 52126 - DNA, 20 bp, Artificial Sequence
  Description of Artificial Sequence: Synthetic oligonucleotide
  Target: SCNA; (-) strand; PAM type: YTN; PAM sequence: TTT
gtgttgcaagacttttacat

SEQ ID NO: 52127 - DNA, 20 bp, Artificial Sequence
  Description of Artificial Sequence: Synthetic oligonucleotide
  Target: SCNA; (-) strand; PAM type: YTN; PAM sequence: TTT
tgtgttgcaagacttttaca

SEQ ID NO: 52128 - DNA, 20 bp, Artificial Sequence
  Description of Artificial Sequence: Synthetic oligonucleotide
  Target: SCNA; (-) strand; PAM type: YTN; PAM sequence: CTT
ttgtgttgcaagacttttac

SEQ ID NO: 52129 - DNA, 20 bp, Artificial Sequence
  Description of Artificial Sequence: Synthetic oligonucleotide
  Target: SCNA; (-) strand; PAM type: YTN; PAM sequence: TTG
tgagaacaatcccttttgtg

SEQ ID NO: 52130 - DNA, 20 bp, Artificial Sequence
  Description of Artificial Sequence: Synthetic oligonucleotide
  Target: SCNA; (-) strand; PAM type: YTN; PAM sequence: TTT
gtgagaacaatcccttttgt

SEQ ID NO: 52131 - DNA, 20 bp, Artificial Sequence
  Description of Artificial Sequence: Synthetic oligonucleotide
  Target: SCNA; (-) strand; PAM type: YTN; PAM sequence: CTA
tgatttgtgagaacaatccc

SEQ ID NO: 52132 - DNA, 20 bp, Artificial Sequence
  Description of Artificial Sequence: Synthetic oligonucleotide
  Target: SCNA; (-) strand; PAM type: YTN; PAM sequence: CTC
acaaacctatgatttgtgag

SEQ ID NO: 52133 - DNA, 20 bp, Artificial Sequence
  Description of Artificial Sequence: Synthetic oligonucleotide
  Target: SCNA; (-) strand; PAM type: YTN; PAM sequence: TTG
ccaccccatctcacaaacct

SEQ ID NO: 52134 - DNA, 20 bp, Artificial Sequence
  Description of Artificial Sequence: Synthetic oligonucleotide
  Target: SCNA; (-) strand; PAM type: YTN; PAM sequence: TTT
gccaccccatctcacaaacc

SEQ ID NO: 52135 - DNA, 20 bp, Artificial Sequence
  Description of Artificial Sequence: Synthetic oligonucleotide
  Target: SCNA; (-) strand; PAM type: YTN; PAM sequence: TTT
tgccaccccatctcacaaac

SEQ ID NO: 52136 - DNA, 20 bp, Artificial Sequence
  Description of Artificial Sequence: Synthetic oligonucleotide
  Target: SCNA; (-) strand; PAM type: YTN; PAM sequence: TTA
aaaacaatgagattttgcca

SEQ ID NO: 52137 - DNA, 20 bp, Artificial Sequence
  Description of Artificial Sequence: Synthetic oligonucleotide
  Target: SCNA; (-) strand; PAM type: YTN; PAM sequence: TTT
aaaaacaatgagattttgcc

SEQ ID NO: 52138 - DNA, 20 bp, Artificial Sequence
  Description of Artificial Sequence: Synthetic oligonucleotide
  Target: SCNA; (-) strand; PAM type: YTN; PAM sequence: CTT
taaaaacaatgagattttgc

SEQ ID NO: 52139 - DNA, 20 bp, Artificial Sequence
  Description of Artificial Sequence: Synthetic oligonucleotide
  Target: SCNA; (-) strand; PAM type: YTN; PAM sequence: TTC
tttaaaaacaatgagatttt

SEQ ID NO: 52140 - DNA, 20 bp, Artificial Sequence
  Description of Artificial Sequence: Synthetic oligonucleotide
  Target: SCNA; (-) strand; PAM type: YTN; PAM sequence: TTG
gttctttaaaaacaatgaga

SEQ ID NO: 52141 - DNA, 20 bp, Artificial Sequence
  Description of Artificial Sequence: Synthetic oligonucleotide
  Target: SCNA; (-) strand; PAM type: YTN; PAM sequence: CTT
ggttctttaaaaacaatgag

SEQ ID NO: 52142 - DNA, 20 bp, Artificial Sequence
  Description of Artificial Sequence: Synthetic oligonucleotide
  Target: SCNA; (-) strand; PAM type: YTN; PAM sequence: CTC
atgaagaacagcttggttct

SEQ ID NO: 52143 - DNA, 20 bp, Artificial Sequence
  Description of Artificial Sequence: Synthetic oligonucleotide
  Target: SCNA; (-) strand; PAM type: YTN; PAM sequence: TTG
ctcatgaagaacagcttggt

SEQ ID NO: 52144 - DNA, 20 bp, Artificial Sequence
  Description of Artificial Sequence: Synthetic oligonucleotide
  Target: SCNA; (-) strand; PAM type: YTN; PAM sequence: CTT
gctcatgaagaacagcttgg

SEQ ID NO: 52145 - DNA, 20 bp, Artificial Sequence
  Description of Artificial Sequence: Synthetic oligonucleotide
  Target: SCNA; (-) strand; PAM type: YTN; PAM sequence: TTC
ttgctcatgaagaacagctt

SEQ ID NO: 52146 - DNA, 20 bp, Artificial Sequence
  Description of Artificial Sequence: Synthetic oligonucleotide
  Target: SCNA; (-) strand; PAM type: YTN; PAM sequence: TTC
agtgttcttgctcatgaaga

SEQ ID NO: 52147 - DNA, 20 bp, Artificial Sequence
  Description of Artificial Sequence: Synthetic oligonucleotide
  Target: SCNA; (-) strand; PAM type: YTN; PAM sequence: CTA
gaaaaagaaaaccagggaat

SEQ ID NO: 52148 - DNA, 20 bp, Artificial Sequence
  Description of Artificial Sequence: Synthetic oligonucleotide
  Target: SCNA; (-) strand; PAM type: YTN; PAM sequence: TTA
tgatgccaggggtatagtga

SEQ ID NO: 52149 - DNA, 20 bp, Artificial Sequence
  Description of Artificial Sequence: Synthetic oligonucleotide
  Target: SCNA; (-) strand; PAM type: YTN; PAM sequence: TTG
acagtagtgttatgatgcca

SEQ ID NO: 52150 - DNA, 20 bp, Artificial Sequence
  Description of Artificial Sequence: Synthetic oligonucleotide
  Target: SCNA; (-) strand; PAM type: YTN; PAM sequence: TTG
attgacagtagtgttatgat

SEQ ID NO: 52151 - DNA, 20 bp, Artificial Sequence
  Description of Artificial Sequence: Synthetic oligonucleotide
  Target: SCNA; (-) strand; PAM type: YTN; PAM sequence: CTG
gatgcagttgattgacagta

SEQ ID NO: 52152 - DNA, 20 bp, Artificial Sequence
  Description of Artificial Sequence: Synthetic oligonucleotide
  Target: SCNA; (-) strand; PAM type: YTN; PAM sequence: TTC
tggatgcagttgattgacag

SEQ ID NO: 52153 - DNA, 20 bp, Artificial Sequence
  Description of Artificial Sequence: Synthetic oligonucleotide
  Target: SCNA; (-) strand; PAM type: YTN; PAM sequence: CTT
ctggatgcagttgattgaca

SEQ ID NO: 52154 - DNA, 20 bp, Artificial Sequence
  Description of Artificial Sequence: Synthetic oligonucleotide
  Target: SCNA; (-) strand; PAM type: YTN; PAM sequence: CTA
ccttctggatgcagttgatt

SEQ ID NO: 52155 - DNA, 20 bp, Artificial Sequence
  Description of Artificial Sequence: Synthetic oligonucleotide
  Target: SCNA; (-) strand; PAM type: YTN; PAM sequence: TTC
taccttctggatgcagttga

SEQ ID NO: 52156 - DNA, 20 bp, Artificial Sequence
  Description of Artificial Sequence: Synthetic oligonucleotide
  Target: SCNA; (-) strand; PAM type: YTN; PAM sequence: TTA
ttctaccttctggatgcagt

SEQ ID NO: 52157 - DNA, 20 bp, Artificial Sequence
  Description of Artificial Sequence: Synthetic oligonucleotide
  Target: SCNA; (-) strand; PAM type: YTN; PAM sequence: TTT
attctaccttctggatgcag

SEQ ID NO: 52158 - DNA, 20 bp, Artificial Sequence
  Description of Artificial Sequence: Synthetic oligonucleotide
  Target: SCNA; (-) strand; PAM type: YTN; PAM sequence: TTT
tattctaccttctggatgca

SEQ ID NO: 52159 - DNA, 20 bp, Artificial Sequence
  Description of Artificial Sequence: Synthetic oligonucleotide
  Target: SCNA; (-) strand; PAM type: YTN; PAM sequence: TTG
gcattttattctaccttctg

SEQ ID NO: 52160 - DNA, 20 bp, Artificial Sequence
  Description of Artificial Sequence: Synthetic oligonucleotide
  Target: SCNA; (-) strand; PAM type: YTN; PAM sequence: CTT
ggcattttattctaccttct

SEQ ID NO: 52161 - DNA, 20 bp, Artificial Sequence
  Description of Artificial Sequence: Synthetic oligonucleotide
  Target: SCNA; (-) strand; PAM type: YTN; PAM sequence: CTG
ccgaaagtatcacttggcat

SEQ ID NO: 52162 - DNA, 20 bp, Artificial Sequence
  Description of Artificial Sequence: Synthetic oligonucleotide
  Target: SCNA; (-) strand; PAM type: YTN; PAM sequence: TTC
tgccgaaagtatcacttggc

SEQ ID NO: 52163 - DNA, 20 bp, Artificial Sequence
  Description of Artificial Sequence: Synthetic oligonucleotide
  Target: SCNA; (-) strand; PAM type: YTN; PAM sequence: CTG
gaattctgccgaaagtatca

SEQ ID NO: 52164 - DNA, 20 bp, Artificial Sequence
  Description of Artificial Sequence: Synthetic oligonucleotide
  Target: SCNA; (-) strand; PAM type: YTN; PAM sequence: CTC
tggaattctgccgaaagtat

SEQ ID NO: 52165 - DNA, 20 bp, Artificial Sequence
  Description of Artificial Sequence: Synthetic oligonucleotide
  Target: SCNA; (-) strand; PAM type: YTN; PAM sequence: CTG
agaatctctggaattctgcc

SEQ ID NO: 52166 - DNA, 20 bp, Artificial Sequence
  Description of Artificial Sequence: Synthetic oligonucleotide
  Target: SCNA; (-) strand; PAM type: YTN; PAM sequence: TTA
agagggaaaagaaaaaacca

SEQ ID NO: 52167 - DNA, 20 bp, Artificial Sequence
  Description of Artificial Sequence: Synthetic oligonucleotide
  Target: SCNA; (-) strand; PAM type: YTN; PAM sequence: TTT
aagagggaaaagaaaaaacc

SEQ ID NO: 52168 - DNA, 20 bp, Artificial Sequence
  Description of Artificial Sequence: Synthetic oligonucleotide
  Target: SCNA; (-) strand; PAM type: YTN; PAM sequence: TTT
taagagggaaaagaaaaaac

SEQ ID NO: 52169 - DNA, 20 bp, Artificial Sequence
  Description of Artificial Sequence: Synthetic oligonucleotide
  Target: SCNA; (-) strand; PAM type: YTN; PAM sequence: TTT
ttaagagggaaaagaaaaaa

SEQ ID NO: 52170 - DNA, 20 bp, Artificial Sequence
  Description of Artificial Sequence: Synthetic oligonucleotide
  Target: SCNA; (-) strand; PAM type: YTN; PAM sequence: CTC
atatggtacagtttttaaga

SEQ ID NO: 52171 - DNA, 20 bp, Artificial Sequence
  Description of Artificial Sequence: Synthetic oligonucleotide
  Target: SCNA; (-) strand; PAM type: YTN; PAM sequence: CTA
actcatatggtacagttttt

SEQ ID NO: 52172 - DNA, 20 bp, Artificial Sequence
  Description of Artificial Sequence: Synthetic oligonucleotide
  Target: SCNA; (-) strand; PAM type: YTN; PAM sequence: TTC
aaaataaacctaactcatat

SEQ ID NO: 52173 - DNA, 20 bp, Artificial Sequence
  Description of Artificial Sequence: Synthetic oligonucleotide
  Target: SCNA; (-) strand; PAM type: YTN; PAM sequence: TTT
caaaataaacctaactcata

SEQ ID NO: 52174 - DNA, 20 bp, Artificial Sequence
  Description of Artificial Sequence: Synthetic oligonucleotide
  Target: SCNA; (-) strand; PAM type: YTN; PAM sequence: TTC
atggacatttcaaaataaac

SEQ ID NO: 52175 - DNA, 20 bp, Artificial Sequence
  Description of Artificial Sequence: Synthetic oligonucleotide
  Target: SCNA; (-) strand; PAM type: YTN; PAM sequence: TTT
catggacatttcaaaataaa

SEQ ID NO: 52176 - DNA, 20 bp, Artificial Sequence
  Description of Artificial Sequence: Synthetic oligonucleotide
  Target: SCNA; (-) strand; PAM type: YTN; PAM sequence: TTT
tcatggacatttcaaaataa

SEQ ID NO: 52177 - DNA, 20 bp, Artificial Sequence
  Description of Artificial Sequence: Synthetic oligonucleotide
  Target: SCNA; (-) strand; PAM type: YTN; PAM sequence: TTT
ttcatggacatttcaaaata

SEQ ID NO: 52178 - DNA, 20 bp, Artificial Sequence
  Description of Artificial Sequence: Synthetic oligonucleotide
  Target: SCNA; (-) strand; PAM type: YTN; PAM sequence: CTT
tttcatggacatttcaaaat

SEQ ID NO: 52179 - DNA, 20 bp, Artificial Sequence
  Description of Artificial Sequence: Synthetic oligonucleotide
  Target: SCNA; (-) strand; PAM type: YTN; PAM sequence: TTC
tttttcatggacatttcaaa

SEQ ID NO: 52180 - DNA, 20 bp, Artificial Sequence
  Description of Artificial Sequence: Synthetic oligonucleotide
  Target: SCNA; (-) strand; PAM type: YTN; PAM sequence: CTT
ctttttcatggacatttcaa

SEQ ID NO: 52181 - DNA, 20 bp, Artificial Sequence
  Description of Artificial Sequence: Synthetic oligonucleotide
  Target: SCNA; (-) strand; PAM type: YTN; PAM sequence: CTG
acttctttttcatggacatt

SEQ ID NO: 52182 - DNA, 20 bp, Artificial Sequence
  Description of Artificial Sequence: Synthetic oligonucleotide
  Target: SCNA; (-) strand; PAM type: YTN; PAM sequence: TTA
agaaatatctgacttctttt

SEQ ID NO: 52183 - DNA, 20 bp, Artificial Sequence
  Description of Artificial Sequence: Synthetic oligonucleotide
  Target: SCNA; (-) strand; PAM type: YTN; PAM sequence: TTT
aagaaatatctgacttcttt

SEQ ID NO: 52184 - DNA, 20 bp, Artificial Sequence
  Description of Artificial Sequence: Synthetic oligonucleotide
  Target: SCNA; (-) strand; PAM type: YTN; PAM sequence: TTT
taagaaatatctgacttctt

SEQ ID NO: 52185 - DNA, 20 bp, Artificial Sequence
  Description of Artificial Sequence: Synthetic oligonucleotide
  Target: SCNA; (-) strand; PAM type: YTN; PAM sequence: CTA
agaggggccaattttaagaa

SEQ ID NO: 52186 - DNA, 20 bp, Artificial Sequence
  Description of Artificial Sequence: Synthetic oligonucleotide
  Target: SCNA; (-) strand; PAM type: YTN; PAM sequence: TTC
cccagaaatatctaagaggg

SEQ ID NO: 52187 - DNA, 20 bp, Artificial Sequence
  Description of Artificial Sequence: Synthetic oligonucleotide
  Target: SCNA; (-) strand; PAM type: YTN; PAM sequence: CTT
ccccagaaatatctaagagg

SEQ ID NO: 52188 - DNA, 20 bp, Artificial Sequence
  Description of Artificial Sequence: Synthetic oligonucleotide
  Target: SCNA; (-) strand; PAM type: YTN; PAM sequence: TTA
tatgaagcttccccagaaat

SEQ ID NO: 52189 - DNA, 20 bp, Artificial Sequence
  Description of Artificial Sequence: Synthetic oligonucleotide
  Target: SCNA; (-) strand; PAM type: YTN; PAM sequence: TTA
tgatgaaaaggaataacatg

SEQ ID NO: 52190 - DNA, 20 bp, Artificial Sequence
  Description of Artificial Sequence: Synthetic oligonucleotide
  Target: SCNA; (-) strand; PAM type: YTN; PAM sequence: TTT
atgatgaaaaggaataacat

SEQ ID NO: 52191 - DNA, 20 bp, Artificial Sequence
  Description of Artificial Sequence: Synthetic oligonucleotide
  Target: SCNA; (-) strand; PAM type: YTN; PAM sequence: CTG
atttatgatgaaaaggaata

SEQ ID NO: 52192 - DNA, 20 bp, Artificial Sequence
  Description of Artificial Sequence: Synthetic oligonucleotide
  Target: SCNA; (-) strand; PAM type: YTN; PAM sequence: TTA
tagaggactgatttatgatg

SEQ ID NO: 52193 - DNA, 20 bp, Artificial Sequence
  Description of Artificial Sequence: Synthetic oligonucleotide
  Target: SCNA; (-) strand; PAM type: YTN; PAM sequence: TTT
atagaggactgatttatgat

SEQ ID NO: 52194 - DNA, 20 bp, Artificial Sequence
  Description of Artificial Sequence: Synthetic oligonucleotide
  Target: SCNA; (-) strand; PAM type: YTN; PAM sequence: CTT
tatagaggactgatttatga

SEQ ID NO: 52195 - DNA, 20 bp, Artificial Sequence
  Description of Artificial Sequence: Synthetic oligonucleotide
  Target: SCNA; (-) strand; PAM type: YTN; PAM sequence: CTC
tttatagaggactgatttat

SEQ ID NO: 52196 - DNA, 20 bp, Artificial Sequence
  Description of Artificial Sequence: Synthetic oligonucleotide
  Target: SCNA; (-) strand; PAM type: YTN; PAM sequence: TTG
aagctctttatagaggactg

SEQ ID NO: 52197 - DNA, 20 bp, Artificial Sequence
  Description of Artificial Sequence: Synthetic oligonucleotide
  Target: SCNA; (-) strand; PAM type: YTN; PAM sequence: TTT
gaagctctttatagaggact

SEQ ID NO: 52198 - DNA, 20 bp, Artificial Sequence
  Description of Artificial Sequence: Synthetic oligonucleotide
  Target: SCNA; (-) strand; PAM type: YTN; PAM sequence: TTA
cagtagcatcaggcagtgaa

SEQ ID NO: 52199 - DNA, 20 bp, Artificial Sequence
  Description of Artificial Sequence: Synthetic oligonucleotide
  Target: SCNA; (-) strand; PAM type: YTN; PAM sequence: TTT
acagtagcatcaggcagtga

SEQ ID NO: 52200 - DNA, 20 bp, Artificial Sequence
  Description of Artificial Sequence: Synthetic oligonucleotide
  Target: SCNA; (-) strand; PAM type: YTN; PAM sequence: TTT
tacagtagcatcaggcagtg

SEQ ID NO: 52201 - DNA, 20 bp, Artificial Sequence
  Description of Artificial Sequence: Synthetic oligonucleotide
  Target: SCNA; (-) strand; PAM type: YTN; PAM sequence: TTT
ttacagtagcatcaggcagt

SEQ ID NO: 52202 - DNA, 20 bp, Artificial Sequence
  Description of Artificial Sequence: Synthetic oligonucleotide
  Target: SCNA; (-) strand; PAM type: YTN; PAM sequence: TTA
ggtatatttttacagtagca

SEQ ID NO: 52203 - DNA, 20 bp, Artificial Sequence
  Description of Artificial Sequence: Synthetic oligonucleotide
  Target: SCNA; (-) strand; PAM type: YTN; PAM sequence: TTC
gatcaaacatattaggtata

SEQ ID NO: 52204 - DNA, 20 bp, Artificial Sequence
  Description of Artificial Sequence: Synthetic oligonucleotide
  Target: SCNA; (-) strand; PAM type: YTN; PAM sequence: TTT
cgatcaaacatattaggtat

SEQ ID NO: 52205 - DNA, 20 bp, Artificial Sequence
  Description of Artificial Sequence: Synthetic oligonucleotide
  Target: SCNA; (-) strand; PAM type: YTN; PAM sequence: CTT
tcgatcaaacatattaggta

SEQ ID NO: 52206 - DNA, 20 bp, Artificial Sequence
  Description of Artificial Sequence: Synthetic oligonucleotide
  Target: SCNA; (-) strand; PAM type: YTN; PAM sequence: CTG
tctttcgatcaaacatatta

SEQ ID NO: 52207 - DNA, 20 bp, Artificial Sequence
  Description of Artificial Sequence: Synthetic oligonucleotide
  Target: SCNA; (-) strand; PAM type: YTN; PAM sequence: CTA
ctgtctttcgatcaaacata

SEQ ID NO: 52208 - DNA, 20 bp, Artificial Sequence
  Description of Artificial Sequence: Synthetic oligonucleotide
  Target: SCNA; (-) strand; PAM type: YTN; PAM sequence: TTG
actactgtctttcgatcaaa

SEQ ID NO: 52209 - DNA, 20 bp, Artificial Sequence
  Description of Artificial Sequence: Synthetic oligonucleotide
  Target: SCNA; (-) strand; PAM type: YTN; PAM sequence: CTA
ataaatatattgactactgt

SEQ ID NO: 52210 - DNA, 20 bp, Artificial Sequence
  Description of Artificial Sequence: Synthetic oligonucleotide
  Target: SCNA; (-) strand; PAM type: YTN; PAM sequence: CTC
ctaataaatatattgactac

SEQ ID NO: 52211 - DNA, 20 bp, Artificial Sequence
  Description of Artificial Sequence: Synthetic oligonucleotide
  Target: SCNA; (-) strand; PAM type: YTN; PAM sequence: TTC
tcctaataaatatattgact

SEQ ID NO: 52212 - DNA, 20 bp, Artificial Sequence
  Description of Artificial Sequence: Synthetic oligonucleotide
  Target: SCNA; (-) strand; PAM type: YTN; PAM sequence: TTT
ctcctaataaatatattgac

SEQ ID NO: 52213 - DNA, 20 bp, Artificial Sequence
  Description of Artificial Sequence: Synthetic oligonucleotide
  Target: SCNA; (-) strand; PAM type: YTN; PAM sequence: TTA
gtgaataaagtatttctcct

SEQ ID NO: 52214 - DNA, 20 bp, Artificial Sequence
  Description of Artificial Sequence: Synthetic oligonucleotide
  Target: SCNA; (-) strand; PAM type: YTN; PAM sequence: TTA
agattagtgaataaagtatt

SEQ ID NO: 52215 - DNA, 20 bp, Artificial Sequence
  Description of Artificial Sequence: Synthetic oligonucleotide
  Target: SCNA; (-) strand; PAM type: YTN; PAM sequence: CTT
aagattagtgaataaagtat

SEQ ID NO: 52216 - DNA, 20 bp, Artificial Sequence
  Description of Artificial Sequence: Synthetic oligonucleotide
  Target: SCNA; (-) strand; PAM type: YTN; PAM sequence: TTC
ttaagattagtgaataaagt

SEQ ID NO: 52217 - DNA, 20 bp, Artificial Sequence
  Description of Artificial Sequence: Synthetic oligonucleotide
  Target: SCNA; (-) strand; PAM type: YTN; PAM sequence: TTT
cttaagattagtgaataaag

SEQ ID NO: 52218 - DNA, 20 bp, Artificial Sequence
  Description of Artificial Sequence: Synthetic oligonucleotide
  Target: SCNA; (-) strand; PAM type: YTN; PAM sequence: CTA
gtatttcttaagattagtga

SEQ ID NO: 52219 - DNA, 20 bp, Artificial Sequence
  Description of Artificial Sequence: Synthetic oligonucleotide
  Target: SCNA; (-) strand; PAM type: YTN; PAM sequence: CTC
tagtatttcttaagattagt

SEQ ID NO: 52220 - DNA, 20 bp, Artificial Sequence
  Description of Artificial Sequence: Synthetic oligonucleotide
  Target: SCNA; (-) strand; PAM type: YTN; PAM sequence: TTC
ctctagtatttcttaagatt

SEQ ID NO: 52221 - DNA, 20 bp, Artificial Sequence
  Description of Artificial Sequence: Synthetic oligonucleotide
  Target: SCNA; (-) strand; PAM type: YTN; PAM sequence: TTT
cctctagtatttcttaagat

SEQ ID NO: 52222 - DNA, 20 bp, Artificial Sequence
  Description of Artificial Sequence: Synthetic oligonucleotide
  Target: SCNA; (-) strand; PAM type: YTN; PAM sequence: CTG
gatttcctctagtatttctt

SEQ ID NO: 52223 - DNA, 20 bp, Artificial Sequence
  Description of Artificial Sequence: Synthetic oligonucleotide
  Target: SCNA; (-) strand; PAM type: YTN; PAM sequence: TTG
tactggatttcctctagtat

SEQ ID NO: 52224 - DNA, 20 bp, Artificial Sequence
  Description of Artificial Sequence: Synthetic oligonucleotide
  Target: SCNA; (-) strand; PAM type: YTN; PAM sequence: TTC
agattgtactggatttcctc

SEQ ID NO: 52225 - DNA, 20 bp, Artificial Sequence
  Description of Artificial Sequence: Synthetic oligonucleotide
  Target: SCNA; (-) strand; PAM type: YTN; PAM sequence: CTT
cagattgtactggatttcct

SEQ ID NO: 52226 - DNA, 20 bp, Artificial Sequence
  Description of Artificial Sequence: Synthetic oligonucleotide
  Target: SCNA; (-) strand; PAM type: YTN; PAM sequence: TTA
acttcagattgtactggatt

SEQ ID NO: 52227 - DNA, 20 bp, Artificial Sequence
  Description of Artificial Sequence: Synthetic oligonucleotide
  Target: SCNA; (-) strand; PAM type: YTN; PAM sequence: TTT
aacttcagattgtactggat

SEQ ID NO: 52228 - DNA, 20 bp, Artificial Sequence
  Description of Artificial Sequence: Synthetic oligonucleotide
  Target: SCNA; (-) strand; PAM type: YTN; PAM sequence: TTT
taacttcagattgtactgga

SEQ ID NO: 52229 - DNA, 20 bp, Artificial Sequence
  Description of Artificial Sequence: Synthetic oligonucleotide
  Target: SCNA; (-) strand; PAM type: YTN; PAM sequence: TTA
gttttaacttcagattgtac

SEQ ID NO: 52230 - DNA, 20 bp, Artificial Sequence
  Description of Artificial Sequence: Synthetic oligonucleotide
  Target: SCNA; (-) strand; PAM type: YTN; PAM sequence: TTA
ataatcattagttttaactt

SEQ ID NO: 52231 - DNA, 20 bp, Artificial Sequence
  Description of Artificial Sequence: Synthetic oligonucleotide
  Target: SCNA; (-) strand; PAM type: YTN; PAM sequence: TTT
aataatcattagttttaact

SEQ ID NO: 52232 - DNA, 20 bp, Artificial Sequence
  Description of Artificial Sequence: Synthetic oligonucleotide
  Target: SCNA; (-) strand; PAM type: YTN; PAM sequence: TTC
atttaataatcattagtttt

SEQ ID NO: 52233 - DNA, 20 bp, Artificial Sequence
  Description of Artificial Sequence: Synthetic oligonucleotide
  Target: SCNA; (-) strand; PAM type: YTN; PAM sequence: TTA
ataaaatggtaacattcatt

SEQ ID NO: 52234 - DNA, 20 bp, Artificial Sequence
  Description of Artificial Sequence: Synthetic oligonucleotide
  Target: SCNA; (-) strand; PAM type: YTN; PAM sequence: TTT
aataaaatggtaacattcat

SEQ ID NO: 52235 - DNA, 20 bp, Artificial Sequence
  Description of Artificial Sequence: Synthetic oligonucleotide
  Target: SCNA; (-) strand; PAM type: YTN; PAM sequence: TTT
taataaaatggtaacattca

SEQ ID NO: 52236 - DNA, 20 bp, Artificial Sequence
  Description of Artificial Sequence: Synthetic oligonucleotide
  Target: SCNA; (-) strand; PAM type: YTN; PAM sequence: TTT
ttaataaaatggtaacattc

SEQ ID NO: 52237 - DNA, 20 bp, Artificial Sequence
  Description of Artificial Sequence: Synthetic oligonucleotide
  Target: SCNA; (-) strand; PAM type: YTN; PAM sequence: TTA
atttttaataaaatggtaac

SEQ ID NO: 52238 - DNA, 20 bp, Artificial Sequence
  Description of Artificial Sequence: Synthetic oligonucleotide
  Target: SCNA; (-) strand; PAM type: YTN; PAM sequence: TTA
ttaatttttaataaaatggt

SEQ ID NO: 52239 - DNA, 20 bp, Artificial Sequence
  Description of Artificial Sequence: Synthetic oligonucleotide
  Target: SCNA; (-) strand; PAM type: YTN; PAM sequence: CTA
ttattaatttttaataaaat

SEQ ID NO: 52240 - DNA, 20 bp, Artificial Sequence
  Description of Artificial Sequence: Synthetic oligonucleotide
  Target: SCNA; (-) strand; PAM type: YTN; PAM sequence: TTA
ctattattaatttttaataa

SEQ ID NO: 52241 - DNA, 20 bp, Artificial Sequence
  Description of Artificial Sequence: Synthetic oligonucleotide
  Target: SCNA; (-) strand; PAM type: YTN; PAM sequence: TTA
ttactattattaatttttaa

SEQ ID NO: 52242 - DNA, 20 bp, Artificial Sequence
  Description of Artificial Sequence: Synthetic oligonucleotide
  Target: SCNA; (-) strand; PAM type: YTN; PAM sequence: TTT
attactattattaattttta

SEQ ID NO: 52243 - DNA, 20 bp, Artificial Sequence
  Description of Artificial Sequence: Synthetic oligonucleotide
  Target: SCNA; (-) strand; PAM type: YTN; PAM sequence: TTT
tattactattattaattttt

SEQ ID NO: 52244 - DNA, 20 bp, Artificial Sequence
  Description of Artificial Sequence: Synthetic oligonucleotide
  Target: SCNA; (-) strand; PAM type: YTN; PAM sequence: TTT
ttattactattattaatttt

SEQ ID NO: 52245 - DNA, 20 bp, Artificial Sequence
  Description of Artificial Sequence: Synthetic oligonucleotide
  Target: SCNA; (-) strand; PAM type: YTN; PAM sequence: TTT
tttattactattattaattt

SEQ ID NO: 52246 - DNA, 20 bp, Artificial Sequence
  Description of Artificial Sequence: Synthetic oligonucleotide
  Target: SCNA; (-) strand; PAM type: YTN; PAM sequence: TTG
tagttttttattactattat

SEQ ID NO: 52247 - DNA, 20 bp, Artificial Sequence
  Description of Artificial Sequence: Synthetic oligonucleotide
  Target: SCNA; (-) strand; PAM type: YTN; PAM sequence: TTT
gtagttttttattactatta

SEQ ID NO: 52248 - DNA, 20 bp, Artificial Sequence
  Description of Artificial Sequence: Synthetic oligonucleotide
  Target: SCNA; (-) strand; PAM type: YTN; PAM sequence: CTT
tgtagttttttattactatt

SEQ ID NO: 52249 - DNA, 20 bp, Artificial Sequence
  Description of Artificial Sequence: Synthetic oligonucleotide
  Target: SCNA; (-) strand; PAM type: YTN; PAM sequence: TTG
tgagagtcaaatggaaatgt

SEQ ID NO: 52250 - DNA, 20 bp, Artificial Sequence
  Description of Artificial Sequence: Synthetic oligonucleotide
  Target: SCNA; (-) strand; PAM type: YTN; PAM sequence: TTA
ttgtgagagtcaaatggaaa

SEQ ID NO: 52251 - DNA, 20 bp, Artificial Sequence
  Description of Artificial Sequence: Synthetic oligonucleotide
  Target: SCNA; (-) strand; PAM type: YTN; PAM sequence: TTA
tgtgtaaaagcagagttatt

SEQ ID NO: 52252 - DNA, 20 bp, Artificial Sequence
  Description of Artificial Sequence: Synthetic oligonucleotide
  Target: SCNA; (-) strand; PAM type: YTN; PAM sequence: CTT
atgtgtaaaagcagagttat

SEQ ID NO: 52253 - DNA, 20 bp, Artificial Sequence
  Description of Artificial Sequence: Synthetic oligonucleotide
  Target: SCNA; (-) strand; PAM type: YTN; PAM sequence: TTA
tacataatatgtgtacatgt

SEQ ID NO: 52254 - DNA, 20 bp, Artificial Sequence
  Description of Artificial Sequence: Synthetic oligonucleotide
  Target: SCNA; (-) strand; PAM type: YTN; PAM sequence: TTA
ttatacataatatgtgtaca

SEQ ID NO: 52255 - DNA, 20 bp, Artificial Sequence
  Description of Artificial Sequence: Synthetic oligonucleotide
  Target: SCNA; (-) strand; PAM type: YTN; PAM sequence: TTA
catatagtaagagggttatt

SEQ ID NO: 52256 - DNA, 20 bp, Artificial Sequence
  Description of Artificial Sequence: Synthetic oligonucleotide
  Target: SCNA; (-) strand; PAM type: YTN; PAM sequence: CTT
acatatagtaagagggttat

SEQ ID NO: 52257 - DNA, 20 bp, Artificial Sequence
  Description of Artificial Sequence: Synthetic oligonucleotide
  Target: SCNA; (-) strand; PAM type: YTN; PAM sequence: CTG
aatcttacatatagtaagag

SEQ ID NO: 52258 - DNA, 20 bp, Artificial Sequence
  Description of Artificial Sequence: Synthetic oligonucleotide
  Target: SCNA; (-) strand; PAM type: YTN; PAM sequence: CTC
tgaatcttacatatagtaag

SEQ ID NO: 52259 - DNA, 20 bp, Artificial Sequence
  Description of Artificial Sequence: Synthetic oligonucleotide
  Target: SCNA; (-) strand; PAM type: YTN; PAM sequence: CTC
tctgaatcttacatatagta

SEQ ID NO: 52260 - DNA, 20 bp, Artificial Sequence
  Description of Artificial Sequence: Synthetic oligonucleotide
  Target: SCNA; (-) strand; PAM type: YTN; PAM sequence: TTA
ccctctctgaatcttacata

SEQ ID NO: 52261 - DNA, 20 bp, Artificial Sequence
  Description of Artificial Sequence: Synthetic oligonucleotide
  Target: SCNA; (-) strand; PAM type: YTN; PAM sequence: TTT
accctctctgaatcttacat

SEQ ID NO: 52262 - DNA, 20 bp, Artificial Sequence
  Description of Artificial Sequence: Synthetic oligonucleotide
  Target: SCNA; (-) strand; PAM type: YTN; PAM sequence: TTA
tttaccctctctgaatctta

SEQ ID NO: 52263 - DNA, 20 bp, Artificial Sequence
  Description of Artificial Sequence: Synthetic oligonucleotide
  Target: SCNA; (-) strand; PAM type: YTN; PAM sequence: TTC
atgttatttaccctctctga

SEQ ID NO: 52264 - DNA, 20 bp, Artificial Sequence
  Description of Artificial Sequence: Synthetic oligonucleotide
  Target: SCNA; (-) strand; PAM type: YTN; PAM sequence: TTA
ttcatgttatttaccctctc

SEQ ID NO: 52265 - DNA, 20 bp, Artificial Sequence
  Description of Artificial Sequence: Synthetic oligonucleotide
  Target: SCNA; (-) strand; PAM type: YTN; PAM sequence: CTT
attcatgttatttaccctct

SEQ ID NO: 52266 - DNA, 20 bp, Artificial Sequence
  Description of Artificial Sequence: Synthetic oligonucleotide
  Target: SCNA; (-) strand; PAM type: YTN; PAM sequence: CTG
tggtcttattcatgttattt

SEQ ID NO: 52267 - DNA, 20 bp, Artificial Sequence
  Description of Artificial Sequence: Synthetic oligonucleotide
  Target: SCNA; (-) strand; PAM type: YTN; PAM sequence: TTA
agagtcctgtggtcttattc

SEQ ID NO: 52268 - DNA, 20 bp, Artificial Sequence
  Description of Artificial Sequence: Synthetic oligonucleotide
  Target: SCNA; (-) strand; PAM type: YTN; PAM sequence: TTT
aagagtcctgtggtcttatt

SEQ ID NO: 52269 - DNA, 20 bp, Artificial Sequence
  Description of Artificial Sequence: Synthetic oligonucleotide
  Target: SCNA; (-) strand; PAM type: YTN; PAM sequence: CTA
gcacataatttaagagtcct

SEQ ID NO: 52270 - DNA, 20 bp, Artificial Sequence
  Description of Artificial Sequence: Synthetic oligonucleotide
  Target: SCNA; (-) strand; PAM type: YTN; PAM sequence: TTA
taatcactagcacataattt

SEQ ID NO: 52271 - DNA, 20 bp, Artificial Sequence
  Description of Artificial Sequence: Synthetic oligonucleotide
  Target: SCNA; (-) strand; PAM type: YTN; PAM sequence: CTA
tagaaataatgtaggaatta

SEQ ID NO: 52272 - DNA, 20 bp, Artificial Sequence
  Description of Artificial Sequence: Synthetic oligonucleotide
  Target: SCNA; (-) strand; PAM type: YTN; PAM sequence: CTG
atcctatagaaataatgtag

SEQ ID NO: 52273 - DNA, 20 bp, Artificial Sequence
  Description of Artificial Sequence: Synthetic oligonucleotide
  Target: SCNA; (-) strand; PAM type: YTN; PAM sequence: TTG
atatcagtgaagccagctga

SEQ ID NO: 52274 - DNA, 20 bp, Artificial Sequence
  Description of Artificial Sequence: Synthetic oligonucleotide
  Target: SCNA; (-) strand; PAM type: YTN; PAM sequence: TTT
gatatcagtgaagccagctg

SEQ ID NO: 52275 - DNA, 20 bp, Artificial Sequence
  Description of Artificial Sequence: Synthetic oligonucleotide
  Target: SCNA; (-) strand; PAM type: YTN; PAM sequence: TTT
tgatatcagtgaagccagct

SEQ ID NO: 52276 - DNA, 20 bp, Artificial Sequence
  Description of Artificial Sequence: Synthetic oligonucleotide
  Target: SCNA; (-) strand; PAM type: YTN; PAM sequence: CTT
ttgatatcagtgaagccagc

SEQ ID NO: 52277 - DNA, 20 bp, Artificial Sequence
  Description of Artificial Sequence: Synthetic oligonucleotide
  Target: SCNA; (-) strand; PAM type: YTN; PAM sequence: CTA
tatataatcttttgatatca

SEQ ID NO: 52278 - DNA, 20 bp, Artificial Sequence
  Description of Artificial Sequence: Synthetic oligonucleotide
  Target: SCNA; (-) strand; PAM type: YTN; PAM sequence: TTA
tataactatatataatcttt

SEQ ID NO: 52279 - DNA, 20 bp, Artificial Sequence
  Description of Artificial Sequence: Synthetic oligonucleotide
  Target: SCNA; (-) strand; PAM type: YTN; PAM sequence: TTA
taaaattatataactatata

SEQ ID NO: 52280 - DNA, 20 bp, Artificial Sequence
  Description of Artificial Sequence: Synthetic oligonucleotide
  Target: SCNA; (-) strand; PAM type: YTN; PAM sequence: TTT
ataaaattatataactatat

SEQ ID NO: 52281 - DNA, 20 bp, Artificial Sequence
  Description of Artificial Sequence: Synthetic oligonucleotide
  Target: SCNA; (-) strand; PAM type: YTN; PAM sequence: CTT
tataaaattatataactata

SEQ ID NO: 52282 - DNA, 20 bp, Artificial Sequence
  Description of Artificial Sequence: Synthetic oligonucleotide
  Target: SCNA; (-) strand; PAM type: YTN; PAM sequence: TTA
gcagaactttataaaattat

SEQ ID NO: 52283 - DNA, 20 bp, Artificial Sequence
  Description of Artificial Sequence: Synthetic oligonucleotide
  Target: SCNA; (-) strand; PAM type: YTN; PAM sequence: CTA
agttagcagaactttataaa

SEQ ID NO: 52284 - DNA, 20 bp, Artificial Sequence
  Description of Artificial Sequence: Synthetic oligonucleotide
  Target: SCNA; (-) strand; PAM type: YTN; PAM sequence: CTG
aaaaatgcatataaagtcac

SEQ ID NO: 52285 - DNA, 20 bp, Artificial Sequence
  Description of Artificial Sequence: Synthetic oligonucleotide
  Target: SCNA; (-) strand; PAM type: YTN; PAM sequence: TTC
ctgaaaaatgcatataaagt

SEQ ID NO: 52286 - DNA, 20 bp, Artificial Sequence
  Description of Artificial Sequence: Synthetic oligonucleotide
  Target: SCNA; (-) strand; PAM type: YTN; PAM sequence: TTT
cctgaaaaatgcatataaag

SEQ ID NO: 52287 - DNA, 20 bp, Artificial Sequence
  Description of Artificial Sequence: Synthetic oligonucleotide
  Target: SCNA; (-) strand; PAM type: YTN; PAM sequence: TTG
caagtttcctgaaaaatgca

SEQ ID NO: 52288 - DNA, 20 bp, Artificial Sequence
  Description of Artificial Sequence: Synthetic oligonucleotide
  Target: SCNA; (-) strand; PAM type: YTN; PAM sequence: TTT
gcaagtttcctgaaaaatgc

SEQ ID NO: 52289 - DNA, 20 bp, Artificial Sequence
  Description of Artificial Sequence: Synthetic oligonucleotide
  Target: SCNA; (-) strand; PAM type: YTN; PAM sequence: TTT
tgcaagtttcctgaaaaatg

SEQ ID NO: 52290 - DNA, 20 bp, Artificial Sequence
  Description of Artificial Sequence: Synthetic oligonucleotide
  Target: SCNA; (-) strand; PAM type: YTN; PAM sequence: TTT
ttgcaagtttcctgaaaaat

SEQ ID NO: 52291 - DNA, 20 bp, Artificial Sequence
  Description of Artificial Sequence: Synthetic oligonucleotide
  Target: SCNA; (-) strand; PAM type: YTN; PAM sequence: TTG
tttttgcaagtttcctgaaa

SEQ ID NO: 52292 - DNA, 20 bp, Artificial Sequence
  Description of Artificial Sequence: Synthetic oligonucleotide
  Target: SCNA; (-) strand; PAM type: YTN; PAM sequence: CTT
gtttttgcaagtttcctgaa

SEQ ID NO: 52293 - DNA, 20 bp, Artificial Sequence
  Description of Artificial Sequence: Synthetic oligonucleotide
  Target: SCNA; (-) strand; PAM type: YTN; PAM sequence: TTC
ttgtttttgcaagtttcctg

SEQ ID NO: 52294 - DNA, 20 bp, Artificial Sequence
  Description of Artificial Sequence: Synthetic oligonucleotide
  Target: SCNA; (-) strand; PAM type: YTN; PAM sequence: CTT
cttgtttttgcaagtttcct

SEQ ID NO: 52295 - DNA, 20 bp, Artificial Sequence
  Description of Artificial Sequence: Synthetic oligonucleotide
  Target: SCNA; (-) strand; PAM type: YTN; PAM sequence: TTC
accttcttgtttttgcaagt

SEQ ID NO: 52296 - DNA, 20 bp, Artificial Sequence
  Description of Artificial Sequence: Synthetic oligonucleotide
  Target: SCNA; (-) strand; PAM type: YTN; PAM sequence: TTA
ttcaccttcttgtttttgca

SEQ ID NO: 52297 - DNA, 20 bp, Artificial Sequence
  Description of Artificial Sequence: Synthetic oligonucleotide
  Target: SCNA; (-) strand; PAM type: YTN; PAM sequence: TTT
attcaccttcttgtttttgc

SEQ ID NO: 52298 - DNA, 20 bp, Artificial Sequence
  Description of Artificial Sequence: Synthetic oligonucleotide
  Target: SCNA; (-) strand; PAM type: YTN; PAM sequence: TTC
gaagtttattcaccttcttg

SEQ ID NO: 52299 - DNA, 20 bp, Artificial Sequence
  Description of Artificial Sequence: Synthetic oligonucleotide
  Target: SCNA; (-) strand; PAM type: YTN; PAM sequence: TTT
cgaagtttattcaccttctt

SEQ ID NO: 52300 - DNA, 20 bp, Artificial Sequence
  Description of Artificial Sequence: Synthetic oligonucleotide
  Target: SCNA; (-) strand; PAM type: YTN; PAM sequence: CTC
atttcgaagtttattcacct

SEQ ID NO: 52301 - DNA, 20 bp, Artificial Sequence
  Description of Artificial Sequence: Synthetic oligonucleotide
  Target: SCNA; (-) strand; PAM type: YTN; PAM sequence: TTC
tcatttcgaagtttattcac

SEQ ID NO: 52302 - DNA, 20 bp, Artificial Sequence
  Description of Artificial Sequence: Synthetic oligonucleotide
  Target: SCNA; (-) strand; PAM type: YTN; PAM sequence: CTT
ctcatttcgaagtttattca

SEQ ID NO: 52303 - DNA, 20 bp, Artificial Sequence
  Description of Artificial Sequence: Synthetic oligonucleotide
  Target: SCNA; (-) strand; PAM type: YTN; PAM sequence: CTC
ttctcatttcgaagtttatt

SEQ ID NO: 52304 - DNA, 20 bp, Artificial Sequence
  Description of Artificial Sequence: Synthetic oligonucleotide
  Target: SCNA; (-) strand; PAM type: YTN; PAM sequence: TTA
gtgaactcttctcatttcga

SEQ ID NO: 52305 - DNA, 20 bp, Artificial Sequence
  Description of Artificial Sequence: Synthetic oligonucleotide
  Target: SCNA; (-) strand; PAM type: YTN; PAM sequence: CTT
agtgaactcttctcatttcg

SEQ ID NO: 52306 - DNA, 20 bp, Artificial Sequence
  Description of Artificial Sequence: Synthetic oligonucleotide
  Target: SCNA; (-) strand; PAM type: YTN; PAM sequence: TTA
tgcttagtgaactcttctca

SEQ ID NO: 52307 - DNA, 20 bp, Artificial Sequence
  Description of Artificial Sequence: Synthetic oligonucleotide
  Target: SCNA; (-) strand; PAM type: YTN; PAM sequence: CTG
atgcaaaataaatgcattat

SEQ ID NO: 52308 - DNA, 20 bp, Artificial Sequence
  Description of Artificial Sequence: Synthetic oligonucleotide
  Target: SCNA; (-) strand; PAM type: YTN; PAM sequence: TTG
aaaaatcctgatgcaaaata

SEQ ID NO: 52309 - DNA, 20 bp, Artificial Sequence
  Description of Artificial Sequence: Synthetic oligonucleotide
  Target: SCNA; (-) strand; PAM type: YTN; PAM sequence: TTA
aaacgttgaaaaatcctgat

SEQ ID NO: 52310 - DNA, 20 bp, Artificial Sequence
  Description of Artificial Sequence: Synthetic oligonucleotide
  Target: SCNA; (-) strand; PAM type: YTN; PAM sequence: TTA
aaaattaaaacgttgaaaaa

SEQ ID NO: 52311 - DNA, 20 bp, Artificial Sequence
  Description of Artificial Sequence: Synthetic oligonucleotide
  Target: SCNA; (-) strand; PAM type: YTN; PAM sequence: TTA
attaaaaattaaaacgttga

SEQ ID NO: 52312 - DNA, 20 bp, Artificial Sequence
  Description of Artificial Sequence: Synthetic oligonucleotide
  Target: SCNA; (-) strand; PAM type: YTN; PAM sequence: TTT
aattaaaaattaaaacgttg

SEQ ID NO: 52313 - DNA, 20 bp, Artificial Sequence
  Description of Artificial Sequence: Synthetic oligonucleotide
  Target: SCNA; (-) strand; PAM type: YTN; PAM sequence: TTT
taattaaaaattaaaacgtt

SEQ ID NO: 52314 - DNA, 20 bp, Artificial Sequence
  Description of Artificial Sequence: Synthetic oligonucleotide
  Target: SCNA; (-) strand; PAM type: YTN; PAM sequence: TTT
ttaattaaaaattaaaacgt

SEQ ID NO: 52315 - DNA, 20 bp, Artificial Sequence
  Description of Artificial Sequence: Synthetic oligonucleotide
  Target: SCNA; (-) strand; PAM type: YTN; PAM sequence: TTT
tttaattaaaaattaaaacg

SEQ ID NO: 52316 - DNA, 20 bp, Artificial Sequence
  Description of Artificial Sequence: Synthetic oligonucleotide
  Target: SCNA; (-) strand; PAM type: YTN; PAM sequence: TTA
attttttaattaaaaattaa

SEQ ID NO: 52317 - DNA, 20 bp, Artificial Sequence
  Description of Artificial Sequence: Synthetic oligonucleotide
  Target: SCNA; (-) strand; PAM type: YTN; PAM sequence: TTT
aattttttaattaaaaatta

SEQ ID NO: 52318 - DNA, 20 bp, Artificial Sequence
  Description of Artificial Sequence: Synthetic oligonucleotide
  Target: SCNA; (-) strand; PAM type: YTN; PAM sequence: TTA
aaaatgtttaattttttaat

SEQ ID NO: 52319 - DNA, 20 bp, Artificial Sequence
  Description of Artificial Sequence: Synthetic oligonucleotide
  Target: SCNA; (-) strand; PAM type: YTN; PAM sequence: CTA
ttaaaaatgtttaatttttt

SEQ ID NO: 52320 - DNA, 20 bp, Artificial Sequence
  Description of Artificial Sequence: Synthetic oligonucleotide
  Target: SCNA; (-) strand; PAM type: YTN; PAM sequence: TTG
gagatgtatgtcggctatta

SEQ ID NO: 52321 - DNA, 20 bp, Artificial Sequence
  Description of Artificial Sequence: Synthetic oligonucleotide
  Target: SCNA; (-) strand; PAM type: YTN; PAM sequence: TTT
ggagatgtatgtcggctatt

SEQ ID NO: 52322 - DNA, 20 bp, Artificial Sequence
  Description of Artificial Sequence: Synthetic oligonucleotide
  Target: SCNA; (-) strand; PAM type: YTN; PAM sequence: TTT
tggagatgtatgtcggctat

SEQ ID NO: 52323 - DNA, 20 bp, Artificial Sequence
  Description of Artificial Sequence: Synthetic oligonucleotide
  Target: SCNA; (-) strand; PAM type: YTN; PAM sequence: TTG
gagaagtaaattttggagat

SEQ ID NO: 52324 - DNA, 20 bp, Artificial Sequence
  Description of Artificial Sequence: Synthetic oligonucleotide
  Target: SCNA; (-) strand; PAM type: YTN; PAM sequence: TTG
gaaagattggagaagtaaat

SEQ ID NO: 52325 - DNA, 20 bp, Artificial Sequence
  Description of Artificial Sequence: Synthetic oligonucleotide
  Target: SCNA; (-) strand; PAM type: YTN; PAM sequence: TTT
ggaaagattggagaagtaaa

SEQ ID NO: 52326 - DNA, 20 bp, Artificial Sequence
  Description of Artificial Sequence: Synthetic oligonucleotide
  Target: SCNA; (-) strand; PAM type: YTN; PAM sequence: TTT
tggaaagattggagaagtaa

SEQ ID NO: 52327 - DNA, 20 bp, Artificial Sequence
  Description of Artificial Sequence: Synthetic oligonucleotide
  Target: SCNA; (-) strand; PAM type: YTN; PAM sequence: CTT
ttggaaagattggagaagta

SEQ ID NO: 52328 - DNA, 20 bp, Artificial Sequence
  Description of Artificial Sequence: Synthetic oligonucleotide
  Target: SCNA; (-) strand; PAM type: YTN; PAM sequence: TTC
ttttggaaagattggagaag

SEQ ID NO: 52329 - DNA, 20 bp, Artificial Sequence
  Description of Artificial Sequence: Synthetic oligonucleotide
  Target: SCNA; (-) strand; PAM type: YTN; PAM sequence: TTC
atcaattcttttggaaagat

SEQ ID NO: 52330 - DNA, 20 bp, Artificial Sequence
  Description of Artificial Sequence: Synthetic oligonucleotide
  Target: SCNA; (-) strand; PAM type: YTN; PAM sequence: TTT
catcaattcttttggaaaga

SEQ ID NO: 52331 - DNA, 20 bp, Artificial Sequence
  Description of Artificial Sequence: Synthetic oligonucleotide
  Target: SCNA; (-) strand; PAM type: YTN; PAM sequence: TTT
tcatcaattcttttggaaag

SEQ ID NO: 52332 - DNA, 20 bp, Artificial Sequence
  Description of Artificial Sequence: Synthetic oligonucleotide
  Target: SCNA; (-) strand; PAM type: YTN; PAM sequence: TTA
cattttcatcaattcttttg

SEQ ID NO: 52333 - DNA, 20 bp, Artificial Sequence
  Description of Artificial Sequence: Synthetic oligonucleotide
  Target: SCNA; (-) strand; PAM type: YTN; PAM sequence: TTT
acattttcatcaattctttt

SEQ ID NO: 52334 - DNA, 20 bp, Artificial Sequence
  Description of Artificial Sequence: Synthetic oligonucleotide
  Target: SCNA; (-) strand; PAM type: YTN; PAM sequence: TTG
gtttacattttcatcaattc

SEQ ID NO: 52335 - DNA, 20 bp, Artificial Sequence
  Description of Artificial Sequence: Synthetic oligonucleotide
  Target: SCNA; (-) strand; PAM type: YTN; PAM sequence: CTT
ggtttacattttcatcaatt

SEQ ID NO: 52336 - DNA, 20 bp, Artificial Sequence
  Description of Artificial Sequence: Synthetic oligonucleotide
  Target: SCNA; (-) strand; PAM type: YTN; PAM sequence: CTA
aatcttggtttacattttca

SEQ ID NO: 52337 - DNA, 20 bp, Artificial Sequence
  Description of Artificial Sequence: Synthetic oligonucleotide
  Target: SCNA; (-) strand; PAM type: YTN; PAM sequence: TTA
catctaaatcttggtttaca

SEQ ID NO: 52338 - DNA, 20 bp, Artificial Sequence
  Description of Artificial Sequence: Synthetic oligonucleotide
  Target: SCNA; (-) strand; PAM type: YTN; PAM sequence: CTT
acatctaaatcttggtttac

SEQ ID NO: 52339 - DNA, 20 bp, Artificial Sequence
  Description of Artificial Sequence: Synthetic oligonucleotide
  Target: SCNA; (-) strand; PAM type: YTN; PAM sequence: TTA
taatgatcatccttacatct

SEQ ID NO: 52340 - DNA, 20 bp, Artificial Sequence
  Description of Artificial Sequence: Synthetic oligonucleotide
  Target: SCNA; (-) strand; PAM type: YTN; PAM sequence: TTA
taatgttataatgatcatcc

SEQ ID NO: 52341 - DNA, 20 bp, Artificial Sequence
  Description of Artificial Sequence: Synthetic oligonucleotide
  Target: SCNA; (-) strand; PAM type: YTN; PAM sequence: CTT
ataatgttataatgatcatc

SEQ ID NO: 52342 - DNA, 20 bp, Artificial Sequence
  Description of Artificial Sequence: Synthetic oligonucleotide
  Target: SCNA; (-) strand; PAM type: YTN; PAM sequence: TTC
ttataatgttataatgatca

SEQ ID NO: 52343 - DNA, 20 bp, Artificial Sequence
  Description of Artificial Sequence: Synthetic oligonucleotide
  Target: SCNA; (-) strand; PAM type: YTN; PAM sequence: CTT
cttataatgttataatgatc

SEQ ID NO: 52344 - DNA, 20 bp, Artificial Sequence
  Description of Artificial Sequence: Synthetic oligonucleotide
  Target: SCNA; (-) strand; PAM type: YTN; PAM sequence: TTG
cttcttataatgttataatg

SEQ ID NO: 52345 - DNA, 20 bp, Artificial Sequence
  Description of Artificial Sequence: Synthetic oligonucleotide
  Target: SCNA; (-) strand; PAM type: YTN; PAM sequence: TTT
gcttcttataatgttataat

SEQ ID NO: 52346 - DNA, 20 bp, Artificial Sequence
  Description of Artificial Sequence: Synthetic oligonucleotide
  Target: SCNA; (-) strand; PAM type: YTN; PAM sequence: TTT
tgcttcttataatgttataa

SEQ ID NO: 52347 - DNA, 20 bp, Artificial Sequence
  Description of Artificial Sequence: Synthetic oligonucleotide
  Target: SCNA; (-) strand; PAM type: YTN; PAM sequence: TTT
ttgcttcttataatgttata

SEQ ID NO: 52348 - DNA, 20 bp, Artificial Sequence
  Description of Artificial Sequence: Synthetic oligonucleotide
  Target: SCNA; (-) strand; PAM type: YTN; PAM sequence: CTG
taatttttgcttcttataat

SEQ ID NO: 52349 - DNA, 20 bp, Artificial Sequence
  Description of Artificial Sequence: Synthetic oligonucleotide
  Target: SCNA; (-) strand; PAM type: YTN; PAM sequence: TTC
tgtaatttttgcttcttata

SEQ ID NO: 52350 - DNA, 20 bp, Artificial Sequence
  Description of Artificial Sequence: Synthetic oligonucleotide
  Target: SCNA; (-) strand; PAM type: YTN; PAM sequence: TTT
ctgtaatttttgcttcttat

SEQ ID NO: 52351 - DNA, 20 bp, Artificial Sequence
  Description of Artificial Sequence: Synthetic oligonucleotide
  Target: SCNA; (-) strand; PAM type: YTN; PAM sequence: TTT
tctgtaatttttgcttctta

SEQ ID NO: 52352 - DNA, 20 bp, Artificial Sequence
  Description of Artificial Sequence: Synthetic oligonucleotide
  Target: SCNA; (-) strand; PAM type: YTN; PAM sequence: TTT
ttctgtaatttttgcttctt

SEQ ID NO: 52353 - DNA, 20 bp, Artificial Sequence
  Description of Artificial Sequence: Synthetic oligonucleotide
  Target: SCNA; (-) strand; PAM type: YTN; PAM sequence: TTG
aatacaatgtttttctgtaa

SEQ ID NO: 52354 - DNA, 20 bp, Artificial Sequence
  Description of Artificial Sequence: Synthetic oligonucleotide
  Target: SCNA; (-) strand; PAM type: YTN; PAM sequence: TTT
gaatacaatgtttttctgta

SEQ ID NO: 52355 - DNA, 20 bp, Artificial Sequence
  Description of Artificial Sequence: Synthetic oligonucleotide
  Target: SCNA; (-) strand; PAM type: YTN; PAM sequence: TTT
tgaatacaatgtttttctgt

SEQ ID NO: 52356 - DNA, 20 bp, Artificial Sequence
  Description of Artificial Sequence: Synthetic oligonucleotide
  Target: SCNA; (-) strand; PAM type: YTN; PAM sequence: TTT
ttgaatacaatgtttttctg

SEQ ID NO: 52357 - DNA, 20 bp, Artificial Sequence
  Description of Artificial Sequence: Synthetic oligonucleotide
  Target: SCNA; (-) strand; PAM type: YTN; PAM sequence: CTG
tttttgaatacaatgttttt

SEQ ID NO: 52358 - DNA, 20 bp, Artificial Sequence
  Description of Artificial Sequence: Synthetic oligonucleotide
  Target: SCNA; (-) strand; PAM type: YTN; PAM sequence: TTC
atcaacacctgtttttgaat

SEQ ID NO: 52359 - DNA, 20 bp, Artificial Sequence
  Description of Artificial Sequence: Synthetic oligonucleotide
  Target: SCNA; (-) strand; PAM type: YTN; PAM sequence: CTT
catcaacacctgtttttgaa

SEQ ID NO: 52360 - DNA, 20 bp, Artificial Sequence
  Description of Artificial Sequence: Synthetic oligonucleotide
  Target: SCNA; (-) strand; PAM type: YTN; PAM sequence: TTG
tgaataaagtaaataccttc

SEQ ID NO: 52361 - DNA, 20 bp, Artificial Sequence
  Description of Artificial Sequence: Synthetic oligonucleotide
  Target: SCNA; (-) strand; PAM type: YTN; PAM sequence: CTT
gtgaataaagtaaatacctt

SEQ ID NO: 52362 - DNA, 20 bp, Artificial Sequence
  Description of Artificial Sequence: Synthetic oligonucleotide
  Target: SCNA; (-) strand; PAM type: YTN; PAM sequence: TTA
cttgtgaataaagtaaatac

SEQ ID NO: 52363 - DNA, 20 bp, Artificial Sequence
  Description of Artificial Sequence: Synthetic oligonucleotide
  Target: SCNA; (-) strand; PAM type: YTN; PAM sequence: TTT
acttgtgaataaagtaaata

SEQ ID NO: 52364 - DNA, 20 bp, Artificial Sequence
  Description of Artificial Sequence: Synthetic oligonucleotide
  Target: SCNA; (-) strand; PAM type: YTN; PAM sequence: TTC
agtttacttgtgaataaagt

SEQ ID NO: 52365 - DNA, 20 bp, Artificial Sequence
  Description of Artificial Sequence: Synthetic oligonucleotide
  Target: SCNA; (-) strand; PAM type: YTN; PAM sequence: TTT
cagtttacttgtgaataaag

SEQ ID NO: 52366 - DNA, 20 bp, Artificial Sequence
  Description of Artificial Sequence: Synthetic oligonucleotide
  Target: SCNA; (-) strand; PAM type: YTN; PAM sequence: CTG
gtttcagtttacttgtgaat

SEQ ID NO: 52367 - DNA, 20 bp, Artificial Sequence
  Description of Artificial Sequence: Synthetic oligonucleotide
  Target: SCNA; (-) strand; PAM type: YTN; PAM sequence: CTC
tggtttcagtttacttgtga

SEQ ID NO: 52368 - DNA, 20 bp, Artificial Sequence
  Description of Artificial Sequence: Synthetic oligonucleotide
  Target: SCNA; (-) strand; PAM type: YTN; PAM sequence: CTC
tctggtttcagtttacttgt

SEQ ID NO: 52369 - DNA, 20 bp, Artificial Sequence
  Description of Artificial Sequence: Synthetic oligonucleotide
  Target: SCNA; (-) strand; PAM type: YTN; PAM sequence: CTG
tgaccaaatcatgtgatctc

SEQ ID NO: 52370 - DNA, 20 bp, Artificial Sequence
  Description of Artificial Sequence: Synthetic oligonucleotide
  Target: SCNA; (-) strand; PAM type: YTN; PAM sequence: CTG
tgcctgtgaccaaatcatgt

SEQ ID NO: 52371 - DNA, 20 bp, Artificial Sequence
  Description of Artificial Sequence: Synthetic oligonucleotide
  Target: SCNA; (-) strand; PAM type: YTN; PAM sequence: TTG
ctgtgcctgtgaccaaatca

SEQ ID NO: 52372 - DNA, 20 bp, Artificial Sequence
  Description of Artificial Sequence: Synthetic oligonucleotide
  Target: SCNA; (-) strand; PAM type: YTN; PAM sequence: CTG
ttgctgtgcctgtgaccaaa

SEQ ID NO: 52373 - DNA, 20 bp, Artificial Sequence
  Description of Artificial Sequence: Synthetic oligonucleotide
  Target: SCNA; (-) strand; PAM type: YTN; PAM sequence: CTA
cctgttgctgtgcctgtgac

SEQ ID NO: 52374 - DNA, 20 bp, Artificial Sequence
  Description of Artificial Sequence: Synthetic oligonucleotide
  Target: SCNA; (-) strand; PAM type: YTN; PAM sequence: CTC
ctacctgttgctgtgcctgt

SEQ ID NO: 52375 - DNA, 20 bp, Artificial Sequence
  Description of Artificial Sequence: Synthetic oligonucleotide
  Target: SCNA; (-) strand; PAM type: YTN; PAM sequence: CTG
ctcctacctgttgctgtgcc

SEQ ID NO: 52376 - DNA, 20 bp, Artificial Sequence
  Description of Artificial Sequence: Synthetic oligonucleotide
  Target: SCNA; (-) strand; PAM type: YTN; PAM sequence: TTG
gatcccagatctgctcctac

SEQ ID NO: 52377 - DNA, 20 bp, Artificial Sequence
  Description of Artificial Sequence: Synthetic oligonucleotide
  Target: SCNA; (-) strand; PAM type: YTN; PAM sequence: TTT
ggatcccagatctgctccta

SEQ ID NO: 52378 - DNA, 20 bp, Artificial Sequence
  Description of Artificial Sequence: Synthetic oligonucleotide
  Target: SCNA; (-) strand; PAM type: YTN; PAM sequence: CTA
acatggatttggatcccaga

SEQ ID NO: 52379 - DNA, 20 bp, Artificial Sequence
  Description of Artificial Sequence: Synthetic oligonucleotide
  Target: SCNA; (-) strand; PAM type: YTN; PAM sequence: CTG
gagatagctaacatggattt

SEQ ID NO: 52380 - DNA, 20 bp, Artificial Sequence
  Description of Artificial Sequence: Synthetic oligonucleotide
  Target: SCNA; (-) strand; PAM type: YTN; PAM sequence: CTA
tgtctggagatagctaacat

SEQ ID NO: 52381 - DNA, 20 bp, Artificial Sequence
  Description of Artificial Sequence: Synthetic oligonucleotide
  Target: SCNA; (-) strand; PAM type: YTN; PAM sequence: TTG
gtggagagagatctatgtct

SEQ ID NO: 52382 - DNA, 20 bp, Artificial Sequence
  Description of Artificial Sequence: Synthetic oligonucleotide
  Target: SCNA; (-) strand; PAM type: YTN; PAM sequence: TTT
ggtggagagagatctatgtc

SEQ ID NO: 52383 - DNA, 20 bp, Artificial Sequence
  Description of Artificial Sequence: Synthetic oligonucleotide
  Target: SCNA; (-) strand; PAM type: YTN; PAM sequence: TTT
tggtggagagagatctatgt

SEQ ID NO: 52384 - DNA, 20 bp, Artificial Sequence
  Description of Artificial Sequence: Synthetic oligonucleotide
  Target: SCNA; (-) strand; PAM type: YTN; PAM sequence: CTG
aagtgtgttttggtggagag

SEQ ID NO: 52385 - DNA, 20 bp, Artificial Sequence
  Description of Artificial Sequence: Synthetic oligonucleotide
  Target: SCNA; (-) strand; PAM type: YTN; PAM sequence: TTG
gagtgtggtctgaagtgtgt

SEQ ID NO: 52386 - DNA, 20 bp, Artificial Sequence
  Description of Artificial Sequence: Synthetic oligonucleotide
  Target: SCNA; (-) strand; PAM type: YTN; PAM sequence: TTG
gtcccatagttggagtgtgg

SEQ ID NO: 52387 - DNA, 20 bp, Artificial Sequence
  Description of Artificial Sequence: Synthetic oligonucleotide
  Target: SCNA; (-) strand; PAM type: YTN; PAM sequence: TTA
ccataggcaataaacaatgg

SEQ ID NO: 52388 - DNA, 20 bp, Artificial Sequence
  Description of Artificial Sequence: Synthetic oligonucleotide
  Target: SCNA; (-) strand; PAM type: YTN; PAM sequence: TTA
tacataaacccattaccata

SEQ ID NO: 52389 - DNA, 20 bp, Artificial Sequence
  Description of Artificial Sequence: Synthetic oligonucleotide
  Target: SCNA; (-) strand; PAM type: YTN; PAM sequence: TTA
gtcacgattatacataaacc

SEQ ID NO: 52390 - DNA, 20 bp, Artificial Sequence
  Description of Artificial Sequence: Synthetic oligonucleotide
  Target: SCNA; (-) strand; PAM type: YTN; PAM sequence: TTT
agtcacgattatacataaac

SEQ ID NO: 52391 - DNA, 20 bp, Artificial Sequence
  Description of Artificial Sequence: Synthetic oligonucleotide
  Target: SCNA; (-) strand; PAM type: YTN; PAM sequence: TTT
tagtcacgattatacataaa

SEQ ID NO: 52392 - DNA, 20 bp, Artificial Sequence
  Description of Artificial Sequence: Synthetic oligonucleotide
  Target: SCNA; (-) strand; PAM type: YTN; PAM sequence: TTA
aaaggataatgattttagtc

SEQ ID NO: 52393 - DNA, 20 bp, Artificial Sequence
  Description of Artificial Sequence: Synthetic oligonucleotide
  Target: SCNA; (-) strand; PAM type: YTN; PAM sequence: TTT
aaaaggataatgattttagt

SEQ ID NO: 52394 - DNA, 20 bp, Artificial Sequence
  Description of Artificial Sequence: Synthetic oligonucleotide
  Target: SCNA; (-) strand; PAM type: YTN; PAM sequence: TTC
aatttaaaaggataatgatt

SEQ ID NO: 52395 - DNA, 20 bp, Artificial Sequence
  Description of Artificial Sequence: Synthetic oligonucleotide
  Target: SCNA; (-) strand; PAM type: YTN; PAM sequence: TTT
caatttaaaaggataatgat

SEQ ID NO: 52396 - DNA, 20 bp, Artificial Sequence
  Description of Artificial Sequence: Synthetic oligonucleotide
  Target: SCNA; (-) strand; PAM type: YTN; PAM sequence: CTT
tcaatttaaaaggataatga

SEQ ID NO: 52397 - DNA, 20 bp, Artificial Sequence
  Description of Artificial Sequence: Synthetic oligonucleotide
  Target: SCNA; (-) strand; PAM type: YTN; PAM sequence: TTC
tttcaatttaaaaggataat

SEQ ID NO: 52398 - DNA, 20 bp, Artificial Sequence
  Description of Artificial Sequence: Synthetic oligonucleotide
  Target: SCNA; (-) strand; PAM type: YTN; PAM sequence: TTT
ctttcaatttaaaaggataa

SEQ ID NO: 52399 - DNA, 20 bp, Artificial Sequence
  Description of Artificial Sequence: Synthetic oligonucleotide
  Target: SCNA; (-) strand; PAM type: YTN; PAM sequence: CTT
tctttcaatttaaaaggata

SEQ ID NO: 52400 - DNA, 20 bp, Artificial Sequence
  Description of Artificial Sequence: Synthetic oligonucleotide
  Target: SCNA; (-) strand; PAM type: YTN; PAM sequence: TTA
cccacccatcccatctttct

SEQ ID NO: 52401 - DNA, 20 bp, Artificial Sequence
  Description of Artificial Sequence: Synthetic oligonucleotide
  Target: SCNA; (-) strand; PAM type: YTN; PAM sequence: TTT
acccacccatcccatctttc

SEQ ID NO: 52402 - DNA, 20 bp, Artificial Sequence
  Description of Artificial Sequence: Synthetic oligonucleotide
  Target: SCNA; (-) strand; PAM type: YTN; PAM sequence: CTA
tttacccacccatcccatct

SEQ ID NO: 52403 - DNA, 20 bp, Artificial Sequence
  Description of Artificial Sequence: Synthetic oligonucleotide
  Target: SCNA; (-) strand; PAM type: YTN; PAM sequence: CTG
taatctatttacccacccat

SEQ ID NO: 52404 - DNA, 20 bp, Artificial Sequence
  Description of Artificial Sequence: Synthetic oligonucleotide
  Target: SCNA; (-) strand; PAM type: YTN; PAM sequence: CTG
ctgtaatctatttacccacc

SEQ ID NO: 52405 - DNA, 20 bp, Artificial Sequence
  Description of Artificial Sequence: Synthetic oligonucleotide
  Target: SCNA; (-) strand; PAM type: YTN; PAM sequence: TTC
tgctgtaatctatttaccca

SEQ ID NO: 52406 - DNA, 20 bp, Artificial Sequence
  Description of Artificial Sequence: Synthetic oligonucleotide
  Target: SCNA; (-) strand; PAM type: YTN; PAM sequence: TTG
gttctgctgtaatctattta

SEQ ID NO: 52407 - DNA, 20 bp, Artificial Sequence
  Description of Artificial Sequence: Synthetic oligonucleotide
  Target: SCNA; (-) strand; PAM type: YTN; PAM sequence: CTT
ggttctgctgtaatctattt

SEQ ID NO: 52408 - DNA, 20 bp, Artificial Sequence
  Description of Artificial Sequence: Synthetic oligonucleotide
  Target: SCNA; (-) strand; PAM type: YTN; PAM sequence: CTG
cttggttctgctgtaatcta

SEQ ID NO: 52409 - DNA, 20 bp, Artificial Sequence
  Description of Artificial Sequence: Synthetic oligonucleotide
  Target: SCNA; (-) strand; PAM type: YTN; PAM sequence: CTA
ctgcttggttctgctgtaat

SEQ ID NO: 52410 - DNA, 20 bp, Artificial Sequence
  Description of Artificial Sequence: Synthetic oligonucleotide
  Target: SCNA; (-) strand; PAM type: YTN; PAM sequence: TTG
gtatgtgtggcaaaatagca

SEQ ID NO: 52411 - DNA, 20 bp, Artificial Sequence
  Description of Artificial Sequence: Synthetic oligonucleotide
  Target: SCNA; (-) strand; PAM type: YTN; PAM sequence: TTT
ggtatgtgtggcaaaatagc

SEQ ID NO: 52412 - DNA, 20 bp, Artificial Sequence
  Description of Artificial Sequence: Synthetic oligonucleotide
  Target: SCNA; (-) strand; PAM type: YTN; PAM sequence: CTA
atatttggtatgtgtggcaa

SEQ ID NO: 52413 - DNA, 20 bp, Artificial Sequence
  Description of Artificial Sequence: Synthetic oligonucleotide
  Target: SCNA; (-) strand; PAM type: YTN; PAM sequence: TTA
tctaatatttggtatgtgtg

SEQ ID NO: 52414 - DNA, 20 bp, Artificial Sequence
  Description of Artificial Sequence: Synthetic oligonucleotide
  Target: SCNA; (-) strand; PAM type: YTN; PAM sequence: TTC
attatctaatatttggtatg

SEQ ID NO: 52415 - DNA, 20 bp, Artificial Sequence
  Description of Artificial Sequence: Synthetic oligonucleotide
  Target: SCNA; (-) strand; PAM type: YTN; PAM sequence: TTA
atatgaagttcattatctaa

SEQ ID NO: 52416 - DNA, 20 bp, Artificial Sequence
  Description of Artificial Sequence: Synthetic oligonucleotide
  Target: SCNA; (-) strand; PAM type: YTN; PAM sequence: TTT
aatatgaagttcattatcta

SEQ ID NO: 52417 - DNA, 20 bp, Artificial Sequence
  Description of Artificial Sequence: Synthetic oligonucleotide
  Target: SCNA; (-) strand; PAM type: YTN; PAM sequence: CTA
gagaagatatttaatatgaa

SEQ ID NO: 52418 - DNA, 20 bp, Artificial Sequence
  Description of Artificial Sequence: Synthetic oligonucleotide
  Target: SCNA; (-) strand; PAM type: YTN; PAM sequence: CTA
tgatgaagataaagacctag

SEQ ID NO: 52419 - DNA, 20 bp, Artificial Sequence
  Description of Artificial Sequence: Synthetic oligonucleotide
  Target: SCNA; (-) strand; PAM type: YTN; PAM sequence: TTG
tgagctatgatgaagataaa

SEQ ID NO: 52420 - DNA, 20 bp, Artificial Sequence
  Description of Artificial Sequence: Synthetic oligonucleotide
  Target: SCNA; (-) strand; PAM type: YTN; PAM sequence: CTG
ccagagcatcatacaacatt

SEQ ID NO: 52421 - DNA, 20 bp, Artificial Sequence
  Description of Artificial Sequence: Synthetic oligonucleotide
  Target: SCNA; (-) strand; PAM type: YTN; PAM sequence: TTC
tgccagagcatcatacaaca

SEQ ID NO: 52422 - DNA, 20 bp, Artificial Sequence
  Description of Artificial Sequence: Synthetic oligonucleotide
  Target: SCNA; (-) strand; PAM type: YTN; PAM sequence: TTT
ctgccagagcatcatacaac

SEQ ID NO: 52423 - DNA, 20 bp, Artificial Sequence
  Description of Artificial Sequence: Synthetic oligonucleotide
  Target: SCNA; (-) strand; PAM type: YTN; PAM sequence: TTA
gtttctgccagagcatcata

SEQ ID NO: 52424 - DNA, 20 bp, Artificial Sequence
  Description of Artificial Sequence: Synthetic oligonucleotide
  Target: SCNA; (-) strand; PAM type: YTN; PAM sequence: TTT
agtttctgccagagcatcat

SEQ ID NO: 52425 - DNA, 20 bp, Artificial Sequence
  Description of Artificial Sequence: Synthetic oligonucleotide
  Target: SCNA; (-) strand; PAM type: YTN; PAM sequence: TTT
tagtttctgccagagcatca

SEQ ID NO: 52426 - DNA, 20 bp, Artificial Sequence
  Description of Artificial Sequence: Synthetic oligonucleotide
  Target: SCNA; (-) strand; PAM type: YTN; PAM sequence: TTT
ttagtttctgccagagcatc

SEQ ID NO: 52427 - DNA, 20 bp, Artificial Sequence
  Description of Artificial Sequence: Synthetic oligonucleotide
  Target: SCNA; (-) strand; PAM type: YTN; PAM sequence: CTA
caagcatagtttttagtttc

SEQ ID NO: 52428 - DNA, 20 bp, Artificial Sequence
  Description of Artificial Sequence: Synthetic oligonucleotide
  Target: SCNA; (-) strand; PAM type: YTN; PAM sequence: TTC
tacaagcatagtttttagtt

SEQ ID NO: 52429 - DNA, 20 bp, Artificial Sequence
  Description of Artificial Sequence: Synthetic oligonucleotide
  Target: SCNA; (-) strand; PAM type: YTN; PAM sequence: TTG
tcatataaatgagacattct

SEQ ID NO: 52430 - DNA, 20 bp, Artificial Sequence
  Description of Artificial Sequence: Synthetic oligonucleotide
  Target: SCNA; (-) strand; PAM type: YTN; PAM sequence: CTG
ttgtcatataaatgagacat

SEQ ID NO: 52431 - DNA, 20 bp, Artificial Sequence
  Description of Artificial Sequence: Synthetic oligonucleotide
  Target: SCNA; (-) strand; PAM type: YTN; PAM sequence: TTC
tgttgtcatataaatgagac

SEQ ID NO: 52432 - DNA, 20 bp, Artificial Sequence
  Description of Artificial Sequence: Synthetic oligonucleotide
  Target: SCNA; (-) strand; PAM type: YTN; PAM sequence: CTC
agtcgttctgttgtcatata

SEQ ID NO: 52433 - DNA, 20 bp, Artificial Sequence
  Description of Artificial Sequence: Synthetic oligonucleotide
  Target: SCNA; (-) strand; PAM type: YTN; PAM sequence: TTC
actcagtcgttctgttgtca

SEQ ID NO: 52434 - DNA, 20 bp, Artificial Sequence
  Description of Artificial Sequence: Synthetic oligonucleotide
  Target: SCNA; (-) strand; PAM type: YTN; PAM sequence: TTT
cactcagtcgttctgttgtc

SEQ ID NO: 52435 - DNA, 20 bp, Artificial Sequence
  Description of Artificial Sequence: Synthetic oligonucleotide
  Target: SCNA; (-) strand; PAM type: YTN; PAM sequence: CTC
catttcactcagtcgttctg

SEQ ID NO: 52436 - DNA, 20 bp, Artificial Sequence
  Description of Artificial Sequence: Synthetic oligonucleotide
  Target: SCNA; (-) strand; PAM type: YTN; PAM sequence: TTA
agctccatttcactcagtcg

SEQ ID NO: 52437 - DNA, 20 bp, Artificial Sequence
  Description of Artificial Sequence: Synthetic oligonucleotide
  Target: SCNA; (-) strand; PAM type: YTN; PAM sequence: TTA
atattaagctccatttcact

SEQ ID NO: 52438 - DNA, 20 bp, Artificial Sequence
  Description of Artificial Sequence: Synthetic oligonucleotide
  Target: SCNA; (-) strand; PAM type: YTN; PAM sequence: CTT
aatattaagctccatttcac

SEQ ID NO: 52439 - DNA, 20 bp, Artificial Sequence
  Description of Artificial Sequence: Synthetic oligonucleotide
  Target: SCNA; (-) strand; PAM type: YTN; PAM sequence: TTA
acagacttaatattaagctc

SEQ ID NO: 52440 - DNA, 20 bp, Artificial Sequence
  Description of Artificial Sequence: Synthetic oligonucleotide
  Target: SCNA; (-) strand; PAM type: YTN; PAM sequence: CTT
aacagacttaatattaagct

SEQ ID NO: 52441 - DNA, 20 bp, Artificial Sequence
  Description of Artificial Sequence: Synthetic oligonucleotide
  Target: SCNA; (-) strand; PAM type: YTN; PAM sequence: CTC
ttaacagacttaatattaag

SEQ ID NO: 52442 - DNA, 20 bp, Artificial Sequence
  Description of Artificial Sequence: Synthetic oligonucleotide
  Target: SCNA; (-) strand; PAM type: YTN; PAM sequence: CTA
acctcttaacagacttaata

SEQ ID NO: 52443 - DNA, 20 bp, Artificial Sequence
  Description of Artificial Sequence: Synthetic oligonucleotide
  Target: SCNA; (-) strand; PAM type: YTN; PAM sequence: TTG
tccctaacctcttaacagac

SEQ ID NO: 52444 - DNA, 20 bp, Artificial Sequence
  Description of Artificial Sequence: Synthetic oligonucleotide
  Target: SCNA; (-) strand; PAM type: YTN; PAM sequence: CTT
gtccctaacctcttaacaga

SEQ ID NO: 52445 - DNA, 20 bp, Artificial Sequence
  Description of Artificial Sequence: Synthetic oligonucleotide
  Target: SCNA; (-) strand; PAM type: YTN; PAM sequence: TTG
gcttgtccctaacctcttaa

SEQ ID NO: 52446 - DNA, 20 bp, Artificial Sequence
  Description of Artificial Sequence: Synthetic oligonucleotide
  Target: SCNA; (-) strand; PAM type: YTN; PAM sequence: TTT
ggcttgtccctaacctctta

SEQ ID NO: 52447 - DNA, 20 bp, Artificial Sequence
  Description of Artificial Sequence: Synthetic oligonucleotide
  Target: SCNA; (-) strand; PAM type: YTN; PAM sequence: CTT
tggcttgtccctaacctctt

SEQ ID NO: 52448 - DNA, 20 bp, Artificial Sequence
  Description of Artificial Sequence: Synthetic oligonucleotide
  Target: SCNA; (-) strand; PAM type: YTN; PAM sequence: CTG
tctttggcttgtccctaacc

SEQ ID NO: 52449 - DNA, 20 bp, Artificial Sequence
  Description of Artificial Sequence: Synthetic oligonucleotide
  Target: SCNA; (-) strand; PAM type: YTN; PAM sequence: CTC
tgtctttggcttgtccctaa

SEQ ID NO: 52450 - DNA, 20 bp, Artificial Sequence
  Description of Artificial Sequence: Synthetic oligonucleotide
  Target: SCNA; (-) strand; PAM type: YTN; PAM sequence: CTC
actctgtctttggcttgtcc

SEQ ID NO: 52451 - DNA, 20 bp, Artificial Sequence
  Description of Artificial Sequence: Synthetic oligonucleotide
  Target: SCNA; (-) strand; PAM type: YTN; PAM sequence: TTG
agacagagtctcactctgtc

SEQ ID NO: 52452 - DNA, 20 bp, Artificial Sequence
  Description of Artificial Sequence: Synthetic oligonucleotide
  Target: SCNA; (-) strand; PAM type: YTN; PAM sequence: TTT
gagacagagtctcactctgt

SEQ ID NO: 52453 - DNA, 20 bp, Artificial Sequence
  Description of Artificial Sequence: Synthetic oligonucleotide
  Target: SCNA; (-) strand; PAM type: YTN; PAM sequence: TTT
tgagacagagtctcactctg

SEQ ID NO: 52454 - DNA, 20 bp, Artificial Sequence
  Description of Artificial Sequence: Synthetic oligonucleotide
  Target: SCNA; (-) strand; PAM type: YTN; PAM sequence: TTT
ttgagacagagtctcactct

SEQ ID NO: 52455 - DNA, 20 bp, Artificial Sequence
  Description of Artificial Sequence: Synthetic oligonucleotide
  Target: SCNA; (-) strand; PAM type: YTN; PAM sequence: TTT
tttgagacagagtctcactc

SEQ ID NO: 52456 - DNA, 20 bp, Artificial Sequence
  Description of Artificial Sequence: Synthetic oligonucleotide
  Target: SCNA; (-) strand; PAM type: YTN; PAM sequence: TTT
ttttgagacagagtctcact

SEQ ID NO: 52457 - DNA, 20 bp, Artificial Sequence
  Description of Artificial Sequence: Synthetic oligonucleotide
  Target: SCNA; (-) strand; PAM type: YTN; PAM sequence: TTT
tttttgagacagagtctcac

SEQ ID NO: 52458 - DNA, 20 bp, Artificial Sequence
  Description of Artificial Sequence: Synthetic oligonucleotide
  Target: SCNA; (-) strand; PAM type: YTN; PAM sequence: TTT
ttttttgagacagagtctca

SEQ ID NO: 52459 - DNA, 20 bp, Artificial Sequence
  Description of Artificial Sequence: Synthetic oligonucleotide
  Target: SCNA; (-) strand; PAM type: YTN; PAM sequence: TTT
tttttttgagacagagtctc

SEQ ID NO: 52460 - DNA, 20 bp, Artificial Sequence
  Description of Artificial Sequence: Synthetic oligonucleotide
  Target: SCNA; (-) strand; PAM type: YTN; PAM sequence: TTT
ttttttttgagacagagtct

SEQ ID NO: 52461 - DNA, 20 bp, Artificial Sequence
  Description of Artificial Sequence: Synthetic oligonucleotide
  Target: SCNA; (-) strand; PAM type: YTN; PAM sequence: TTT
tttttttttgagacagagtc

SEQ ID NO: 52462 - DNA, 20 bp, Artificial Sequence
  Description of Artificial Sequence: Synthetic oligonucleotide
  Target: SCNA; (-) strand; PAM type: YTN; PAM sequence: TTT
ttttttttttgagacagagt

SEQ ID NO: 52463 - DNA, 20 bp, Artificial Sequence
  Description of Artificial Sequence: Synthetic oligonucleotide
  Target: SCNA; (-) strand; PAM type: YTN; PAM sequence: TTT
tttttttttttgagacagag

SEQ ID NO: 52464 - DNA, 20 bp, Artificial Sequence
  Description of Artificial Sequence: Synthetic oligonucleotide
  Target: SCNA; (-) strand; PAM type: YTN; PAM sequence: TTT
ttttttttttttgagacaga

SEQ ID NO: 52465 - DNA, 20 bp, Artificial Sequence
  Description of Artificial Sequence: Synthetic oligonucleotide
  Target: SCNA; (-) strand; PAM type: YTN; PAM sequence: TTT
tttttttttttttgagacag

SEQ ID NO: 52466 - DNA, 20 bp, Artificial Sequence
  Description of Artificial Sequence: Synthetic oligonucleotide
  Target: SCNA; (-) strand; PAM type: YTN; PAM sequence: TTT
ttttttttttttttgagaca

SEQ ID NO: 52467 - DNA, 20 bp, Artificial Sequence
  Description of Artificial Sequence: Synthetic oligonucleotide
  Target: SCNA; (-) strand; PAM type: YTN; PAM sequence: TTT
tttttttttttttttgagac

SEQ ID NO: 52468 - DNA, 20 bp, Artificial Sequence
  Description of Artificial Sequence: Synthetic oligonucleotide
  Target: SCNA; (-) strand; PAM type: YTN; PAM sequence: CTT
ttttttttttttttttgaga

SEQ ID NO: 52469 - DNA, 20 bp, Artificial Sequence
  Description of Artificial Sequence: Synthetic oligonucleotide
  Target: SCNA; (-) strand; PAM type: YTN; PAM sequence: TTA
cttttttttttttttttttg

SEQ ID NO: 52470 - DNA, 20 bp, Artificial Sequence
  Description of Artificial Sequence: Synthetic oligonucleotide
  Target: SCNA; (-) strand; PAM type: YTN; PAM sequence: CTG
agttactttttttttttttt

SEQ ID NO: 52471 - DNA, 20 bp, Artificial Sequence
  Description of Artificial Sequence: Synthetic oligonucleotide
  Target: SCNA; (-) strand; PAM type: YTN; PAM sequence: CTC
tgagttactttttttttttt

SEQ ID NO: 52472 - DNA, 20 bp, Artificial Sequence
  Description of Artificial Sequence: Synthetic oligonucleotide
  Target: SCNA; (-) strand; PAM type: YTN; PAM sequence: TTA
tctctgagttactttttttt

SEQ ID NO: 52473 - DNA, 20 bp, Artificial Sequence
  Description of Artificial Sequence: Synthetic oligonucleotide
  Target: SCNA; (-) strand; PAM type: YTN; PAM sequence: TTT
atctctgagttacttttttt

SEQ ID NO: 52474 - DNA, 20 bp, Artificial Sequence
  Description of Artificial Sequence: Synthetic oligonucleotide
  Target: SCNA; (-) strand; PAM type: YTN; PAM sequence: TTA
tttatctctgagttactttt

SEQ ID NO: 52475 - DNA, 20 bp, Artificial Sequence
  Description of Artificial Sequence: Synthetic oligonucleotide
  Target: SCNA; (-) strand; PAM type: YTN; PAM sequence: TTT
atttatctctgagttacttt

SEQ ID NO: 52476 - DNA, 20 bp, Artificial Sequence
  Description of Artificial Sequence: Synthetic oligonucleotide
  Target: SCNA; (-) strand; PAM type: YTN; PAM sequence: TTT
tatttatctctgagttactt

SEQ ID NO: 52477 - DNA, 20 bp, Artificial Sequence
  Description of Artificial Sequence: Synthetic oligonucleotide
  Target: SCNA; (-) strand; PAM type: YTN; PAM sequence: CTT
ttatttatctctgagttact

SEQ ID NO: 52478 - DNA, 20 bp, Artificial Sequence
  Description of Artificial Sequence: Synthetic oligonucleotide
  Target: SCNA; (-) strand; PAM type: YTN; PAM sequence: TTA
cttttatttatctctgagtt

SEQ ID NO: 52479 - DNA, 20 bp, Artificial Sequence
  Description of Artificial Sequence: Synthetic oligonucleotide
  Target: SCNA; (-) strand; PAM type: YTN; PAM sequence: CTT
acttttatttatctctgagt

SEQ ID NO: 52480 - DNA, 20 bp, Artificial Sequence
  Description of Artificial Sequence: Synthetic oligonucleotide
  Target: SCNA; (-) strand; PAM type: YTN; PAM sequence: CTC
agaacttacttttatttatc

SEQ ID NO: 52481 - DNA, 20 bp, Artificial Sequence
  Description of Artificial Sequence: Synthetic oligonucleotide
  Target: SCNA; (-) strand; PAM type: YTN; PAM sequence: TTA
tggatgtcagctcagaactt

SEQ ID NO: 52482 - DNA, 20 bp, Artificial Sequence
  Description of Artificial Sequence: Synthetic oligonucleotide
  Target: SCNA; (-) strand; PAM type: YTN; PAM sequence: TTT
atggatgtcagctcagaact

SEQ ID NO: 52483 - DNA, 20 bp, Artificial Sequence
  Description of Artificial Sequence: Synthetic oligonucleotide
  Target: SCNA; (-) strand; PAM type: YTN; PAM sequence: CTA
atgccacaaagcatttatgg

SEQ ID NO: 52484 - DNA, 20 bp, Artificial Sequence
  Description of Artificial Sequence: Synthetic oligonucleotide
  Target: SCNA; (-) strand; PAM type: YTN; PAM sequence: TTA
gcagcatctaatgccacaaa

SEQ ID NO: 52485 - DNA, 20 bp, Artificial Sequence
  Description of Artificial Sequence: Synthetic oligonucleotide
  Target: SCNA; (-) strand; PAM type: YTN; PAM sequence: CTT
agcagcatctaatgccacaa

SEQ ID NO: 52486 - DNA, 20 bp, Artificial Sequence
  Description of Artificial Sequence: Synthetic oligonucleotide
  Target: SCNA; (-) strand; PAM type: YTN; PAM sequence: CTC
ttagcagcatctaatgccac

SEQ ID NO: 52487 - DNA, 20 bp, Artificial Sequence
  Description of Artificial Sequence: Synthetic oligonucleotide
  Target: SCNA; (-) strand; PAM type: YTN; PAM sequence: TTC
actcttagcagcatctaatg

SEQ ID NO: 52488 - DNA, 20 bp, Artificial Sequence
  Description of Artificial Sequence: Synthetic oligonucleotide
  Target: SCNA; (-) strand; PAM type: YTN; PAM sequence: TTC
atggaaataattcactctta

SEQ ID NO: 52489 - DNA, 20 bp, Artificial Sequence
  Description of Artificial Sequence: Synthetic oligonucleotide
  Target: SCNA; (-) strand; PAM type: YTN; PAM sequence: CTT
catggaaataattcactctt

SEQ ID NO: 52490 - DNA, 20 bp, Artificial Sequence
  Description of Artificial Sequence: Synthetic oligonucleotide
  Target: SCNA; (-) strand; PAM type: YTN; PAM sequence: TTG
gcttcatggaaataattcac

SEQ ID NO: 52491 - DNA, 20 bp, Artificial Sequence
  Description of Artificial Sequence: Synthetic oligonucleotide
  Target: SCNA; (-) strand; PAM type: YTN; PAM sequence: CTT
ggcttcatggaaataattca

SEQ ID NO: 52492 - DNA, 20 bp, Artificial Sequence
  Description of Artificial Sequence: Synthetic oligonucleotide
  Target: SCNA; (-) strand; PAM type: YTN; PAM sequence: TTG
atcttggcttcatggaaata

SEQ ID NO: 52493 - DNA, 20 bp, Artificial Sequence
  Description of Artificial Sequence: Synthetic oligonucleotide
  Target: SCNA; (-) strand; PAM type: YTN; PAM sequence: CTT
gatcttggcttcatggaaat

SEQ ID NO: 52494 - DNA, 20 bp, Artificial Sequence
  Description of Artificial Sequence: Synthetic oligonucleotide
  Target: SCNA; (-) strand; PAM type: YTN; PAM sequence: TTG
tgcaacagcttgatcttggc

SEQ ID NO: 52495 - DNA, 20 bp, Artificial Sequence
  Description of Artificial Sequence: Synthetic oligonucleotide
  Target: SCNA; (-) strand; PAM type: YTN; PAM sequence: CTT
gtgcaacagcttgatcttgg

SEQ ID NO: 52496 - DNA, 20 bp, Artificial Sequence
  Description of Artificial Sequence: Synthetic oligonucleotide
  Target: SCNA; (-) strand; PAM type: YTN; PAM sequence: TTA
atgtacagcttgtgcaacag

SEQ ID NO: 52497 - DNA, 20 bp, Artificial Sequence
  Description of Artificial Sequence: Synthetic oligonucleotide
  Target: SCNA; (-) strand; PAM type: YTN; PAM sequence: TTC
aagtaattaatgtacagctt

SEQ ID NO: 52498 - DNA, 20 bp, Artificial Sequence
  Description of Artificial Sequence: Synthetic oligonucleotide
  Target: SCNA; (-) strand; PAM type: YTN; PAM sequence: TTT
caagtaattaatgtacagct

SEQ ID NO: 52499 - DNA, 20 bp, Artificial Sequence
  Description of Artificial Sequence: Synthetic oligonucleotide
  Target: SCNA; (-) strand; PAM type: YTN; PAM sequence: TTT
tcaagtaattaatgtacagc

SEQ ID NO: 52500 - DNA, 20 bp, Artificial Sequence
  Description of Artificial Sequence: Synthetic oligonucleotide
  Target: SCNA; (-) strand; PAM type: YTN; PAM sequence: TTT
ttcaagtaattaatgtacag

SEQ ID NO: 52501 - DNA, 20 bp, Artificial Sequence
  Description of Artificial Sequence: Synthetic oligonucleotide
  Target: SCNA; (-) strand; PAM type: YTN; PAM sequence: TTT
tttcaagtaattaatgtaca

SEQ ID NO: 52502 - DNA, 20 bp, Artificial Sequence
  Description of Artificial Sequence: Synthetic oligonucleotide
  Target: SCNA; (-) strand; PAM type: YTN; PAM sequence: TTT
ttttcaagtaattaatgtac

SEQ ID NO: 52503 - DNA, 20 bp, Artificial Sequence
  Description of Artificial Sequence: Synthetic oligonucleotide
  Target: SCNA; (-) strand; PAM type: YTN; PAM sequence: CTG
ggaatttttttcaagtaatt

SEQ ID NO: 52504 - DNA, 20 bp, Artificial Sequence
  Description of Artificial Sequence: Synthetic oligonucleotide
  Target: SCNA; (-) strand; PAM type: YTN; PAM sequence: CTA
ctgggaatttttttcaagta

SEQ ID NO: 52505 - DNA, 20 bp, Artificial Sequence
  Description of Artificial Sequence: Synthetic oligonucleotide
  Target: SCNA; (-) strand; PAM type: YTN; PAM sequence: TTG
ccctactgggaatttttttc

SEQ ID NO: 52506 - DNA, 20 bp, Artificial Sequence
  Description of Artificial Sequence: Synthetic oligonucleotide
  Target: SCNA; (-) strand; PAM type: YTN; PAM sequence: TTA
gacattgccctactgggaat

SEQ ID NO: 52507 - DNA, 20 bp, Artificial Sequence
  Description of Artificial Sequence: Synthetic oligonucleotide
  Target: SCNA; (-) strand; PAM type: YTN; PAM sequence: TTT
agacattgccctactgggaa

SEQ ID NO: 52508 - DNA, 20 bp, Artificial Sequence
  Description of Artificial Sequence: Synthetic oligonucleotide
  Target: SCNA; (-) strand; PAM type: YTN; PAM sequence: CTC
atggaaatatatttagacat

SEQ ID NO: 52509 - DNA, 20 bp, Artificial Sequence
  Description of Artificial Sequence: Synthetic oligonucleotide
  Target: SCNA; (-) strand; PAM type: YTN; PAM sequence: TTC
tcatggaaatatatttagac

SEQ ID NO: 52510 - DNA, 20 bp, Artificial Sequence
  Description of Artificial Sequence: Synthetic oligonucleotide
  Target: SCNA; (-) strand; PAM type: YTN; PAM sequence: CTA
ttctcatggaaatatattta

SEQ ID NO: 52511 - DNA, 20 bp, Artificial Sequence
  Description of Artificial Sequence: Synthetic oligonucleotide
  Target: SCNA; (-) strand; PAM type: YTN; PAM sequence: TTA
taacaaatatatatactatt

SEQ ID NO: 52512 - DNA, 20 bp, Artificial Sequence
  Description of Artificial Sequence: Synthetic oligonucleotide
  Target: SCNA; (-) strand; PAM type: YTN; PAM sequence: TTT
ataacaaatatatatactat

SEQ ID NO: 52513 - DNA, 20 bp, Artificial Sequence
  Description of Artificial Sequence: Synthetic oligonucleotide
  Target: SCNA; (-) strand; PAM type: YTN; PAM sequence: CTT
tataacaaatatatatacta

SEQ ID NO: 52514 - DNA, 20 bp, Artificial Sequence
  Description of Artificial Sequence: Synthetic oligonucleotide
  Target: SCNA; (-) strand; PAM type: YTN; PAM sequence: CTA
gatcatcacctttataacaa

SEQ ID NO: 52515 - DNA, 20 bp, Artificial Sequence
  Description of Artificial Sequence: Synthetic oligonucleotide
  Target: SCNA; (-) strand; PAM type: YTN; PAM sequence: TTG
gctagatcatcacctttata

SEQ ID NO: 52516 - DNA, 20 bp, Artificial Sequence
  Description of Artificial Sequence: Synthetic oligonucleotide
  Target: SCNA; (-) strand; PAM type: YTN; PAM sequence: CTT
ggctagatcatcacctttat

SEQ ID NO: 52517 - DNA, 20 bp, Artificial Sequence
  Description of Artificial Sequence: Synthetic oligonucleotide
  Target: SCNA; (-) strand; PAM type: YTN; PAM sequence: CTC
ttggctagatcatcaccttt

SEQ ID NO: 52518 - DNA, 20 bp, Artificial Sequence
  Description of Artificial Sequence: Synthetic oligonucleotide
  Target: SCNA; (-) strand; PAM type: YTN; PAM sequence: TTG
gaggtcagacaccctcttgg

SEQ ID NO: 52519 - DNA, 20 bp, Artificial Sequence
  Description of Artificial Sequence: Synthetic oligonucleotide
  Target: SCNA; (-) strand; PAM type: YTN; PAM sequence: TTT
ggaggtcagacaccctcttg

SEQ ID NO: 52520 - DNA, 20 bp, Artificial Sequence
  Description of Artificial Sequence: Synthetic oligonucleotide
  Target: SCNA; (-) strand; PAM type: YTN; PAM sequence: TTT
tggaggtcagacaccctctt

SEQ ID NO: 52521 - DNA, 20 bp, Artificial Sequence
  Description of Artificial Sequence: Synthetic oligonucleotide
  Target: SCNA; (-) strand; PAM type: YTN; PAM sequence: TTA
gtggatatattttggaggtc

SEQ ID NO: 52522 - DNA, 20 bp, Artificial Sequence
  Description of Artificial Sequence: Synthetic oligonucleotide
  Target: SCNA; (-) strand; PAM type: YTN; PAM sequence: TTA
ttagtggatatattttggag

SEQ ID NO: 52523 - DNA, 20 bp, Artificial Sequence
  Description of Artificial Sequence: Synthetic oligonucleotide
  Target: SCNA; (-) strand; PAM type: YTN; PAM sequence: TTT
attagtggatatattttgga

SEQ ID NO: 52524 - DNA, 20 bp, Artificial Sequence
  Description of Artificial Sequence: Synthetic oligonucleotide
  Target: SCNA; (-) strand; PAM type: YTN; PAM sequence: TTT
tattagtggatatattttgg

SEQ ID NO: 52525 - DNA, 20 bp, Artificial Sequence
  Description of Artificial Sequence: Synthetic oligonucleotide
  Target: SCNA; (-) strand; PAM type: YTN; PAM sequence: TTT
ttattagtggatatattttg

SEQ ID NO: 52526 - DNA, 20 bp, Artificial Sequence
  Description of Artificial Sequence: Synthetic oligonucleotide
  Target: SCNA; (-) strand; PAM type: YTN; PAM sequence: TTT
tttattagtggatatatttt

SEQ ID NO: 52527 - DNA, 20 bp, Artificial Sequence
  Description of Artificial Sequence: Synthetic oligonucleotide
  Target: SCNA; (-) strand; PAM type: YTN; PAM sequence: TTT
ttttattagtggatatattt

SEQ ID NO: 52528 - DNA, 20 bp, Artificial Sequence
  Description of Artificial Sequence: Synthetic oligonucleotide
  Target: SCNA; (-) strand; PAM type: YTN; PAM sequence: TTT
tttttattagtggatatatt

SEQ ID NO: 52529 - DNA, 20 bp, Artificial Sequence
  Description of Artificial Sequence: Synthetic oligonucleotide
  Target: SCNA; (-) strand; PAM type: YTN; PAM sequence: TTG
gattttttttattagtggat

SEQ ID NO: 52530 - DNA, 20 bp, Artificial Sequence
  Description of Artificial Sequence: Synthetic oligonucleotide
  Target: SCNA; (-) strand; PAM type: YTN; PAM sequence: CTT
ggattttttttattagtgga

SEQ ID NO: 52531 - DNA, 20 bp, Artificial Sequence
  Description of Artificial Sequence: Synthetic oligonucleotide
  Target: SCNA; (-) strand; PAM type: YTN; PAM sequence: CTC
cttggattttttttattagt

SEQ ID NO: 52532 - DNA, 20 bp, Artificial Sequence
  Description of Artificial Sequence: Synthetic oligonucleotide
  Target: SCNA; (-) strand; PAM type: YTN; PAM sequence: TTA
tccaaatgctccttggattt

SEQ ID NO: 52533 - DNA, 20 bp, Artificial Sequence
  Description of Artificial Sequence: Synthetic oligonucleotide
  Target: SCNA; (-) strand; PAM type: YTN; PAM sequence: CTG
ttatccaaatgctccttgga

SEQ ID NO: 52534 - DNA, 20 bp, Artificial Sequence
  Description of Artificial Sequence: Synthetic oligonucleotide
  Target: SCNA; (-) strand; PAM type: YTN; PAM sequence: TTA
accactgttatccaaatgct

SEQ ID NO: 52535 - DNA, 20 bp, Artificial Sequence
  Description of Artificial Sequence: Synthetic oligonucleotide
  Target: SCNA; (-) strand; PAM type: YTN; PAM sequence: TTT
aaccactgttatccaaatgc

SEQ ID NO: 52536 - DNA, 20 bp, Artificial Sequence
  Description of Artificial Sequence: Synthetic oligonucleotide
  Target: SCNA; (-) strand; PAM type: YTN; PAM sequence: TTT
taaccactgttatccaaatg

SEQ ID NO: 52537 - DNA, 20 bp, Artificial Sequence
  Description of Artificial Sequence: Synthetic oligonucleotide
  Target: SCNA; (-) strand; PAM type: YTN; PAM sequence: TTT
ttaaccactgttatccaaat

SEQ ID NO: 52538 - DNA, 20 bp, Artificial Sequence
  Description of Artificial Sequence: Synthetic oligonucleotide
  Target: SCNA; (-) strand; PAM type: YTN; PAM sequence: TTT
tttaaccactgttatccaaa

SEQ ID NO: 52539 - DNA, 20 bp, Artificial Sequence
  Description of Artificial Sequence: Synthetic oligonucleotide
  Target: SCNA; (-) strand; PAM type: YTN; PAM sequence: TTT
ttttaaccactgttatccaa

SEQ ID NO: 52540 - DNA, 20 bp, Artificial Sequence
  Description of Artificial Sequence: Synthetic oligonucleotide
  Target: SCNA; (-) strand; PAM type: YTN; PAM sequence: TTT
tttttaaccactgttatcca

SEQ ID NO: 52541 - DNA, 20 bp, Artificial Sequence
  Description of Artificial Sequence: Synthetic oligonucleotide
  Target: SCNA; (-) strand; PAM type: YTN; PAM sequence: TTG
caattttttttaaccactgt

SEQ ID NO: 52542 - DNA, 20 bp, Artificial Sequence
  Description of Artificial Sequence: Synthetic oligonucleotide
  Target: SCNA; (-) strand; PAM type: YTN; PAM sequence: TTT
gcaattttttttaaccactg

SEQ ID NO: 52543 - DNA, 20 bp, Artificial Sequence
  Description of Artificial Sequence: Synthetic oligonucleotide
  Target: SCNA; (-) strand; PAM type: YTN; PAM sequence: TTT
tgcaattttttttaaccact

SEQ ID NO: 52544 - DNA, 20 bp, Artificial Sequence
  Description of Artificial Sequence: Synthetic oligonucleotide
  Target: SCNA; (-) strand; PAM type: YTN; PAM sequence: CTG
ttttgcaattttttttaacc

SEQ ID NO: 52545 - DNA, 20 bp, Artificial Sequence
  Description of Artificial Sequence: Synthetic oligonucleotide
  Target: SCNA; (-) strand; PAM type: YTN; PAM sequence: CTG
gccacgtgtgtagtcatgcc

SEQ ID NO: 52546 - DNA, 20 bp, Artificial Sequence
  Description of Artificial Sequence: Synthetic oligonucleotide
  Target: SCNA; (-) strand; PAM type: YTN; PAM sequence: TTG
atctggccacgtgtgtagtc

SEQ ID NO: 52547 - DNA, 20 bp, Artificial Sequence
  Description of Artificial Sequence: Synthetic oligonucleotide
  Target: SCNA; (-) strand; PAM type: YTN; PAM sequence: CTG
ggattgatctggccacgtgt

SEQ ID NO: 52548 - DNA, 20 bp, Artificial Sequence
  Description of Artificial Sequence: Synthetic oligonucleotide
  Target: SCNA; (-) strand; PAM type: YTN; PAM sequence: TTG
catggaagaatcactgggat

SEQ ID NO: 52549 - DNA, 20 bp, Artificial Sequence
  Description of Artificial Sequence: Synthetic oligonucleotide
  Target: SCNA; (-) strand; PAM type: YTN; PAM sequence: TTT
gcatggaagaatcactggga

SEQ ID NO: 52550 - DNA, 20 bp, Artificial Sequence
  Description of Artificial Sequence: Synthetic oligonucleotide
  Target: SCNA; (-) strand; PAM type: YTN; PAM sequence: CTA
acatatttgcatggaagaat

SEQ ID NO: 52551 - DNA, 20 bp, Artificial Sequence
  Description of Artificial Sequence: Synthetic oligonucleotide
  Target: SCNA; (-) strand; PAM type: YTN; PAM sequence: CTA
atcacactaacatatttgca

SEQ ID NO: 52552 - DNA, 20 bp, Artificial Sequence
  Description of Artificial Sequence: Synthetic oligonucleotide
  Target: SCNA; (-) strand; PAM type: YTN; PAM sequence: CTA
caatcaactaatcacactaa

SEQ ID NO: 52553 - DNA, 20 bp, Artificial Sequence
  Description of Artificial Sequence: Synthetic oligonucleotide
  Target: SCNA; (-) strand; PAM type: YTN; PAM sequence: TTC
ctacaatcaactaatcacac

SEQ ID NO: 52554 - DNA, 20 bp, Artificial Sequence
  Description of Artificial Sequence: Synthetic oligonucleotide
  Target: SCNA; (-) strand; PAM type: YTN; PAM sequence: TTT
cctacaatcaactaatcaca

SEQ ID NO: 52555 - DNA, 20 bp, Artificial Sequence
  Description of Artificial Sequence: Synthetic oligonucleotide
  Target: SCNA; (-) strand; PAM type: YTN; PAM sequence: TTA
gtaatgcaaatgccacattt

SEQ ID NO: 52556 - DNA, 20 bp, Artificial Sequence
  Description of Artificial Sequence: Synthetic oligonucleotide
  Target: SCNA; (-) strand; PAM type: YTN; PAM sequence: TTA
caaccatgacaagaacaaaa

SEQ ID NO: 52557 - DNA, 20 bp, Artificial Sequence
  Description of Artificial Sequence: Synthetic oligonucleotide
  Target: SCNA; (-) strand; PAM type: YTN; PAM sequence: TTT
acaaccatgacaagaacaaa

SEQ ID NO: 52558 - DNA, 20 bp, Artificial Sequence
  Description of Artificial Sequence: Synthetic oligonucleotide
  Target: SCNA; (-) strand; PAM type: YTN; PAM sequence: TTT
tacaaccatgacaagaacaa

SEQ ID NO: 52559 - DNA, 20 bp, Artificial Sequence
  Description of Artificial Sequence: Synthetic oligonucleotide
  Target: SCNA; (-) strand; PAM type: YTN; PAM sequence: TTT
ttacaaccatgacaagaaca

SEQ ID NO: 52560 - DNA, 20 bp, Artificial Sequence
  Description of Artificial Sequence: Synthetic oligonucleotide
  Target: SCNA; (-) strand; PAM type: YTN; PAM sequence: CTG
tttttacaaccatgacaaga

SEQ ID NO: 52561 - DNA, 20 bp, Artificial Sequence
  Description of Artificial Sequence: Synthetic oligonucleotide
  Target: SCNA; (-) strand; PAM type: YTN; PAM sequence: CTA
agtaaagactgtttttacaa

SEQ ID NO: 52562 - DNA, 20 bp, Artificial Sequence
  Description of Artificial Sequence: Synthetic oligonucleotide
  Target: SCNA; (-) strand; PAM type: YTN; PAM sequence: TTG
ctaagtaaagactgttttta

SEQ ID NO: 52563 - DNA, 20 bp, Artificial Sequence
  Description of Artificial Sequence: Synthetic oligonucleotide
  Target: SCNA; (-) strand; PAM type: YTN; PAM sequence: CTT
gctaagtaaagactgttttt

SEQ ID NO: 52564 - DNA, 20 bp, Artificial Sequence
  Description of Artificial Sequence: Synthetic oligonucleotide
  Target: SCNA; (-) strand; PAM type: YTN; PAM sequence: TTA
tacttgctaagtaaagactg

SEQ ID NO: 52565 - DNA, 20 bp, Artificial Sequence
  Description of Artificial Sequence: Synthetic oligonucleotide
  Target: SCNA; (-) strand; PAM type: YTN; PAM sequence: TTT
atacttgctaagtaaagact

SEQ ID NO: 52566 - DNA, 20 bp, Artificial Sequence
  Description of Artificial Sequence: Synthetic oligonucleotide
  Target: SCNA; (-) strand; PAM type: YTN; PAM sequence: CTA
acatttatacttgctaagta

SEQ ID NO: 52567 - DNA, 20 bp, Artificial Sequence
  Description of Artificial Sequence: Synthetic oligonucleotide
  Target: SCNA; (-) strand; PAM type: YTN; PAM sequence: TTG
ctaacatttatacttgctaa

SEQ ID NO: 52568 - DNA, 20 bp, Artificial Sequence
  Description of Artificial Sequence: Synthetic oligonucleotide
  Target: SCNA; (-) strand; PAM type: YTN; PAM sequence: CTT
gctaacatttatacttgcta

SEQ ID NO: 52569 - DNA, 20 bp, Artificial Sequence
  Description of Artificial Sequence: Synthetic oligonucleotide
  Target: SCNA; (-) strand; PAM type: YTN; PAM sequence: TTA
tacttgctaacatttatact

SEQ ID NO: 52570 - DNA, 20 bp, Artificial Sequence
  Description of Artificial Sequence: Synthetic oligonucleotide
  Target: SCNA; (-) strand; PAM type: YTN; PAM sequence: TTT
atacttgctaacatttatac

SEQ ID NO: 52571 - DNA, 20 bp, Artificial Sequence
  Description of Artificial Sequence: Synthetic oligonucleotide
  Target: SCNA; (-) strand; PAM type: YTN; PAM sequence: TTA
aacatatttatacttgctaa

SEQ ID NO: 52572 - DNA, 20 bp, Artificial Sequence
  Description of Artificial Sequence: Synthetic oligonucleotide
  Target: SCNA; (-) strand; PAM type: YTN; PAM sequence: TTT
aaacatatttatacttgcta

SEQ ID NO: 52573 - DNA, 20 bp, Artificial Sequence
  Description of Artificial Sequence: Synthetic oligonucleotide
  Target: SCNA; (-) strand; PAM type: YTN; PAM sequence: TTA
tgtttaaacatatttatact

SEQ ID NO: 52574 - DNA, 20 bp, Artificial Sequence
  Description of Artificial Sequence: Synthetic oligonucleotide
  Target: SCNA; (-) strand; PAM type: YTN; PAM sequence: TTT
atgtttaaacatatttatac

SEQ ID NO: 52575 - DNA, 20 bp, Artificial Sequence
  Description of Artificial Sequence: Synthetic oligonucleotide
  Target: SCNA; (-) strand; PAM type: YTN; PAM sequence: TTT
tatgtttaaacatatttata

SEQ ID NO: 52576 - DNA, 20 bp, Artificial Sequence
  Description of Artificial Sequence: Synthetic oligonucleotide
  Target: SCNA; (-) strand; PAM type: YTN; PAM sequence: TTT
ttatgtttaaacatatttat

SEQ ID NO: 52577 - DNA, 20 bp, Artificial Sequence
  Description of Artificial Sequence: Synthetic oligonucleotide
  Target: SCNA; (-) strand; PAM type: YTN; PAM sequence: TTT
tttatgtttaaacatattta

SEQ ID NO: 52578 - DNA, 20 bp, Artificial Sequence
  Description of Artificial Sequence: Synthetic oligonucleotide
  Target: SCNA; (-) strand; PAM type: YTN; PAM sequence: TTA
ttttttatgtttaaacatat

SEQ ID NO: 52579 - DNA, 20 bp, Artificial Sequence
  Description of Artificial Sequence: Synthetic oligonucleotide
  Target: SCNA; (-) strand; PAM type: YTN; PAM sequence: CTT
attttttatgtttaaacata

SEQ ID NO: 52580 - DNA, 20 bp, Artificial Sequence
  Description of Artificial Sequence: Synthetic oligonucleotide
  Target: SCNA; (-) strand; PAM type: YTN; PAM sequence: TTA
gtcttattttttatgtttaa

SEQ ID NO: 52581 - DNA, 20 bp, Artificial Sequence
  Description of Artificial Sequence: Synthetic oligonucleotide
  Target: SCNA; (-) strand; PAM type: YTN; PAM sequence: TTT
agtcttattttttatgttta

SEQ ID NO: 52582 - DNA, 20 bp, Artificial Sequence
  Description of Artificial Sequence: Synthetic oligonucleotide
  Target: SCNA; (-) strand; PAM type: YTN; PAM sequence: TTG
tttagtcttattttttatgt

SEQ ID NO: 52583 - DNA, 20 bp, Artificial Sequence
  Description of Artificial Sequence: Synthetic oligonucleotide
  Target: SCNA; (-) strand; PAM type: YTN; PAM sequence: CTT
gtttagtcttattttttatg

SEQ ID NO: 52584 - DNA, 20 bp, Artificial Sequence
  Description of Artificial Sequence: Synthetic oligonucleotide
  Target: SCNA; (-) strand; PAM type: YTN; PAM sequence: TTC
ttgtttagtcttatttttta

SEQ ID NO: 52585 - DNA, 20 bp, Artificial Sequence
  Description of Artificial Sequence: Synthetic oligonucleotide
  Target: SCNA; (-) strand; PAM type: YTN; PAM sequence: TTA
ttcttgtttagtcttatttt

SEQ ID NO: 52586 - DNA, 20 bp, Artificial Sequence
  Description of Artificial Sequence: Synthetic oligonucleotide
  Target: SCNA; (-) strand; PAM type: YTN; PAM sequence: TTT
attcttgtttagtcttattt

SEQ ID NO: 52587 - DNA, 20 bp, Artificial Sequence
  Description of Artificial Sequence: Synthetic oligonucleotide
  Target: SCNA; (-) strand; PAM type: YTN; PAM sequence: TTT
tattcttgtttagtcttatt

SEQ ID NO: 52588 - DNA, 20 bp, Artificial Sequence
  Description of Artificial Sequence: Synthetic oligonucleotide
  Target: SCNA; (-) strand; PAM type: YTN; PAM sequence: TTT
ttattcttgtttagtcttat

SEQ ID NO: 52589 - DNA, 20 bp, Artificial Sequence
  Description of Artificial Sequence: Synthetic oligonucleotide
  Target: SCNA; (-) strand; PAM type: YTN; PAM sequence: TTA
aaaacagtttttattcttgt

SEQ ID NO: 52590 - DNA, 20 bp, Artificial Sequence
  Description of Artificial Sequence: Synthetic oligonucleotide
  Target: SCNA; (-) strand; PAM type: YTN; PAM sequence: TTA
tagttaaaaacagtttttat

SEQ ID NO: 52591 - DNA, 20 bp, Artificial Sequence
  Description of Artificial Sequence: Synthetic oligonucleotide
  Target: SCNA; (-) strand; PAM type: YTN; PAM sequence: TTG
ataattatagttaaaaacag

SEQ ID NO: 52592 - DNA, 20 bp, Artificial Sequence
  Description of Artificial Sequence: Synthetic oligonucleotide
  Target: SCNA; (-) strand; PAM type: YTN; PAM sequence: CTT
gataattatagttaaaaaca

SEQ ID NO: 52593 - DNA, 20 bp, Artificial Sequence
  Description of Artificial Sequence: Synthetic oligonucleotide
  Target: SCNA; (-) strand; PAM type: YTN; PAM sequence: TTG
tagacttgataattatagtt

SEQ ID NO: 52594 - DNA, 20 bp, Artificial Sequence
  Description of Artificial Sequence: Synthetic oligonucleotide
  Target: SCNA; (-) strand; PAM type: YTN; PAM sequence: TTG
ggttgtagacttgataatta

SEQ ID NO: 52595 - DNA, 20 bp, Artificial Sequence
  Description of Artificial Sequence: Synthetic oligonucleotide
  Target: SCNA; (-) strand; PAM type: YTN; PAM sequence: TTT
gggttgtagacttgataatt

SEQ ID NO: 52596 - DNA, 20 bp, Artificial Sequence
  Description of Artificial Sequence: Synthetic oligonucleotide
  Target: SCNA; (-) strand; PAM type: YTN; PAM sequence: TTT
tgggttgtagacttgataat

SEQ ID NO: 52597 - DNA, 20 bp, Artificial Sequence
  Description of Artificial Sequence: Synthetic oligonucleotide
  Target: SCNA; (-) strand; PAM type: YTN; PAM sequence: CTT
ttgggttgtagacttgataa

SEQ ID NO: 52598 - DNA, 20 bp, Artificial Sequence
  Description of Artificial Sequence: Synthetic oligonucleotide
  Target: SCNA; (-) strand; PAM type: YTN; PAM sequence: TTG
tgtcaaggatgggaaaaaga

SEQ ID NO: 52599 - DNA, 20 bp, Artificial Sequence
  Description of Artificial Sequence: Synthetic oligonucleotide
  Target: SCNA; (-) strand; PAM type: YTN; PAM sequence: TTA
ttgtgtcaaggatgggaaaa

SEQ ID NO: 52600 - DNA, 20 bp, Artificial Sequence
  Description of Artificial Sequence: Synthetic oligonucleotide
  Target: SCNA; (-) strand; PAM type: YTN; PAM sequence: TTG
aatgttattgtgtcaaggat

SEQ ID NO: 52601 - DNA, 20 bp, Artificial Sequence
  Description of Artificial Sequence: Synthetic oligonucleotide
  Target: SCNA; (-) strand; PAM type: YTN; PAM sequence: TTT
gaatgttattgtgtcaagga

SEQ ID NO: 52602 - DNA, 20 bp, Artificial Sequence
  Description of Artificial Sequence: Synthetic oligonucleotide
  Target: SCNA; (-) strand; PAM type: YTN; PAM sequence: TTA
aaaatcatgtttgaatgtta

SEQ ID NO: 52603 - DNA, 20 bp, Artificial Sequence
  Description of Artificial Sequence: Synthetic oligonucleotide
  Target: SCNA; (-) strand; PAM type: YTN; PAM sequence: CTA
cgagatcattaaaaatcatg

SEQ ID NO: 52604 - DNA, 20 bp, Artificial Sequence
  Description of Artificial Sequence: Synthetic oligonucleotide
  Target: SCNA; (-) strand; PAM type: YTN; PAM sequence: TTA
gcaataaatgtactacgaga

SEQ ID NO: 52605 - DNA, 20 bp, Artificial Sequence
  Description of Artificial Sequence: Synthetic oligonucleotide
  Target: SCNA; (-) strand; PAM type: YTN; PAM sequence: TTT
agcaataaatgtactacgag

SEQ ID NO: 52606 - DNA, 20 bp, Artificial Sequence
  Description of Artificial Sequence: Synthetic oligonucleotide
  Target: SCNA; (-) strand; PAM type: YTN; PAM sequence: TTG
agtacaatttagcaataaat

SEQ ID NO: 52607 - DNA, 20 bp, Artificial Sequence
  Description of Artificial Sequence: Synthetic oligonucleotide
  Target: SCNA; (-) strand; PAM type: YTN; PAM sequence: TTT
gagtacaatttagcaataaa

SEQ ID NO: 52608 - DNA, 20 bp, Artificial Sequence
  Description of Artificial Sequence: Synthetic oligonucleotide
  Target: SCNA; (-) strand; PAM type: YTN; PAM sequence: TTT
tgagtacaatttagcaataa

SEQ ID NO: 52609 - DNA, 20 bp, Artificial Sequence
  Description of Artificial Sequence: Synthetic oligonucleotide
  Target: SCNA; (-) strand; PAM type: YTN; PAM sequence: TTA
ttttgagtacaatttagcaa

SEQ ID NO: 52610 - DNA, 20 bp, Artificial Sequence
  Description of Artificial Sequence: Synthetic oligonucleotide
  Target: SCNA; (-) strand; PAM type: YTN; PAM sequence: TTA
agtaaaatgaaacattattt

SEQ ID NO: 52611 - DNA, 20 bp, Artificial Sequence
  Description of Artificial Sequence: Synthetic oligonucleotide
  Target: SCNA; (-) strand; PAM type: YTN; PAM sequence: CTT
aagtaaaatgaaacattatt

SEQ ID NO: 52612 - DNA, 20 bp, Artificial Sequence
  Description of Artificial Sequence: Synthetic oligonucleotide
  Target: SCNA; (-) strand; PAM type: YTN; PAM sequence: TTG
tgccacttaagtaaaatgaa

SEQ ID NO: 52613 - DNA, 20 bp, Artificial Sequence
  Description of Artificial Sequence: Synthetic oligonucleotide
  Target: SCNA; (-) strand; PAM type: YTN; PAM sequence: CTT
gtgccacttaagtaaaatga

SEQ ID NO: 52614 - DNA, 20 bp, Artificial Sequence
  Description of Artificial Sequence: Synthetic oligonucleotide
  Target: SCNA; (-) strand; PAM type: YTN; PAM sequence: CTA
cagggggcttgtgccactta

SEQ ID NO: 52615 - DNA, 20 bp, Artificial Sequence
  Description of Artificial Sequence: Synthetic oligonucleotide
  Target: SCNA; (-) strand; PAM type: YTN; PAM sequence: TTA
gtatgcggaatgtaatcata

SEQ ID NO: 52616 - DNA, 20 bp, Artificial Sequence
  Description of Artificial Sequence: Synthetic oligonucleotide
  Target: SCNA; (-) strand; PAM type: YTN; PAM sequence: CTC
aagaagaattagtatgcgga

SEQ ID NO: 52617 - DNA, 20 bp, Artificial Sequence
  Description of Artificial Sequence: Synthetic oligonucleotide
  Target: SCNA; (-) strand; PAM type: YTN; PAM sequence: CTG
tcagtgagctcaagaagaat

SEQ ID NO: 52618 - DNA, 20 bp, Artificial Sequence
  Description of Artificial Sequence: Synthetic oligonucleotide
  Target: SCNA; (-) strand; PAM type: YTN; PAM sequence: TTC
tgtcagtgagctcaagaaga

SEQ ID NO: 52619 - DNA, 20 bp, Artificial Sequence
  Description of Artificial Sequence: Synthetic oligonucleotide
  Target: SCNA; (-) strand; PAM type: YTN; PAM sequence: CTT
ctgtcagtgagctcaagaag

SEQ ID NO: 52620 - DNA, 20 bp, Artificial Sequence
  Description of Artificial Sequence: Synthetic oligonucleotide
  Target: SCNA; (-) strand; PAM type: YTN; PAM sequence: TTA
taagaagacatagtcacttc

SEQ ID NO: 52621 - DNA, 20 bp, Artificial Sequence
  Description of Artificial Sequence: Synthetic oligonucleotide
  Target: SCNA; (-) strand; PAM type: YTN; PAM sequence: TTT
ataagaagacatagtcactt

SEQ ID NO: 52622 - DNA, 20 bp, Artificial Sequence
  Description of Artificial Sequence: Synthetic oligonucleotide
  Target: SCNA; (-) strand; PAM type: YTN; PAM sequence: TTT
tataagaagacatagtcact

SEQ ID NO: 52623 - DNA, 20 bp, Artificial Sequence
  Description of Artificial Sequence: Synthetic oligonucleotide
  Target: SCNA; (-) strand; PAM type: YTN; PAM sequence: CTA
gatcatgggagtatagaaat

SEQ ID NO: 52624 - DNA, 20 bp, Artificial Sequence
  Description of Artificial Sequence: Synthetic oligonucleotide
  Target: SCNA; (-) strand; PAM type: YTN; PAM sequence: CTA
agctagatcatgggagtata

SEQ ID NO: 52625 - DNA, 20 bp, Artificial Sequence
  Description of Artificial Sequence: Synthetic oligonucleotide
  Target: SCNA; (-) strand; PAM type: YTN; PAM sequence: TTG
aaactaagctagatcatggg

SEQ ID NO: 52626 - DNA, 20 bp, Artificial Sequence
  Description of Artificial Sequence: Synthetic oligonucleotide
  Target: SCNA; (-) strand; PAM type: YTN; PAM sequence: TTG
gttgaaactaagctagatca

SEQ ID NO: 52627 - DNA, 20 bp, Artificial Sequence
  Description of Artificial Sequence: Synthetic oligonucleotide
  Target: SCNA; (-) strand; PAM type: YTN; PAM sequence: TTT
ggttgaaactaagctagatc

SEQ ID NO: 52628 - DNA, 20 bp, Artificial Sequence
  Description of Artificial Sequence: Synthetic oligonucleotide
  Target: SCNA; (-) strand; PAM type: YTN; PAM sequence: TTA
tttggttgaaactaagctag

SEQ ID NO: 52629 - DNA, 20 bp, Artificial Sequence
  Description of Artificial Sequence: Synthetic oligonucleotide
  Target: SCNA; (-) strand; PAM type: YTN; PAM sequence: TTT
atttggttgaaactaagcta

SEQ ID NO: 52630 - DNA, 20 bp, Artificial Sequence
  Description of Artificial Sequence: Synthetic oligonucleotide
  Target: SCNA; (-) strand; PAM type: YTN; PAM sequence: CTG
aatgccgtttatttggttga

SEQ ID NO: 52631 - DNA, 20 bp, Artificial Sequence
  Description of Artificial Sequence: Synthetic oligonucleotide
  Target: SCNA; (-) strand; PAM type: YTN; PAM sequence: TTC
agcaaatataaactgaatgc

SEQ ID NO: 52632 - DNA, 20 bp, Artificial Sequence
  Description of Artificial Sequence: Synthetic oligonucleotide
  Target: SCNA; (-) strand; PAM type: YTN; PAM sequence: CTT
cagcaaatataaactgaatg

SEQ ID NO: 52633 - DNA, 20 bp, Artificial Sequence
  Description of Artificial Sequence: Synthetic oligonucleotide
  Target: SCNA; (-) strand; PAM type: YTN; PAM sequence: TTC
ccttcagcaaatataaactg

SEQ ID NO: 52634 - DNA, 20 bp, Artificial Sequence
  Description of Artificial Sequence: Synthetic oligonucleotide
  Target: SCNA; (-) strand; PAM type: YTN; PAM sequence: CTT
cccttcagcaaatataaact

SEQ ID NO: 52635 - DNA, 20 bp, Artificial Sequence
  Description of Artificial Sequence: Synthetic oligonucleotide
  Target: SCNA; (-) strand; PAM type: YTN; PAM sequence: TTA
tcttcccttcagcaaatata

SEQ ID NO: 52636 - DNA, 20 bp, Artificial Sequence
  Description of Artificial Sequence: Synthetic oligonucleotide
  Target: SCNA; (-) strand; PAM type: YTN; PAM sequence: CTA
gaaggagattatcttccctt

SEQ ID NO: 52637 - DNA, 20 bp, Artificial Sequence
  Description of Artificial Sequence: Synthetic oligonucleotide
  Target: SCNA; (-) strand; PAM type: YTN; PAM sequence: CTA
actagaaggagattatcttc

SEQ ID NO: 52638 - DNA, 20 bp, Artificial Sequence
  Description of Artificial Sequence: Synthetic oligonucleotide
  Target: SCNA; (-) strand; PAM type: YTN; PAM sequence: CTG
tgtgtggatagatgctaact

SEQ ID NO: 52639 - DNA, 20 bp, Artificial Sequence
  Description of Artificial Sequence: Synthetic oligonucleotide
  Target: SCNA; (-) strand; PAM type: YTN; PAM sequence: TTA
agcactgtgtgtggatagat

SEQ ID NO: 52640 - DNA, 20 bp, Artificial Sequence
  Description of Artificial Sequence: Synthetic oligonucleotide
  Target: SCNA; (-) strand; PAM type: YTN; PAM sequence: TTA
ttaagcactgtgtgtggata

SEQ ID NO: 52641 - DNA, 20 bp, Artificial Sequence
  Description of Artificial Sequence: Synthetic oligonucleotide
  Target: SCNA; (-) strand; PAM type: YTN; PAM sequence: CTG
ttattaagcactgtgtgtgg

SEQ ID NO: 52642 - DNA, 20 bp, Artificial Sequence
  Description of Artificial Sequence: Synthetic oligonucleotide
  Target: SCNA; (-) strand; PAM type: YTN; PAM sequence: CTG
atacaatctgttattaagca

SEQ ID NO: 52643 - DNA, 20 bp, Artificial Sequence
  Description of Artificial Sequence: Synthetic oligonucleotide
  Target: SCNA; (-) strand; PAM type: YTN; PAM sequence: CTC
tgatacaatctgttattaag

SEQ ID NO: 52644 - DNA, 20 bp, Artificial Sequence
  Description of Artificial Sequence: Synthetic oligonucleotide
  Target: SCNA; (-) strand; PAM type: YTN; PAM sequence: CTA
gcaaactctgatacaatctg

SEQ ID NO: 52645 - DNA, 20 bp, Artificial Sequence
  Description of Artificial Sequence: Synthetic oligonucleotide
  Target: SCNA; (-) strand; PAM type: YTN; PAM sequence: TTG
gtggacaactagcaaactct

SEQ ID NO: 52646 - DNA, 20 bp, Artificial Sequence
  Description of Artificial Sequence: Synthetic oligonucleotide
  Target: SCNA; (-) strand; PAM type: YTN; PAM sequence: TTT
ggtggacaactagcaaactc

SEQ ID NO: 52647 - DNA, 20 bp, Artificial Sequence
  Description of Artificial Sequence: Synthetic oligonucleotide
  Target: SCNA; (-) strand; PAM type: YTN; PAM sequence: TTT
tggtggacaactagcaaact

SEQ ID NO: 52648 - DNA, 20 bp, Artificial Sequence
  Description of Artificial Sequence: Synthetic oligonucleotide
  Target: SCNA; (-) strand; PAM type: YTN; PAM sequence: CTG
acaaagaagggagaacagat

SEQ ID NO: 52649 - DNA, 20 bp, Artificial Sequence
  Description of Artificial Sequence: Synthetic oligonucleotide
  Target: SCNA; (-) strand; PAM type: YTN; PAM sequence: TTG
tagtatatagccatatgccc

SEQ ID NO: 52650 - DNA, 20 bp, Artificial Sequence
  Description of Artificial Sequence: Synthetic oligonucleotide
  Target: SCNA; (-) strand; PAM type: YTN; PAM sequence: TTC
aaggtagacagaaaattgta

SEQ ID NO: 52651 - DNA, 20 bp, Artificial Sequence
  Description of Artificial Sequence: Synthetic oligonucleotide
  Target: SCNA; (-) strand; PAM type: YTN; PAM sequence: TTA
ttcaaggtagacagaaaatt

SEQ ID NO: 52652 - DNA, 20 bp, Artificial Sequence
  Description of Artificial Sequence: Synthetic oligonucleotide
  Target: SCNA; (-) strand; PAM type: YTN; PAM sequence: TTT
attcaaggtagacagaaaat

SEQ ID NO: 52653 - DNA, 20 bp, Artificial Sequence
  Description of Artificial Sequence: Synthetic oligonucleotide
  Target: SCNA; (-) strand; PAM type: YTN; PAM sequence: TTG
gataccagccacaatttatt

SEQ ID NO: 52654 - DNA, 20 bp, Artificial Sequence
  Description of Artificial Sequence: Synthetic oligonucleotide
  Target: SCNA; (-) strand; PAM type: YTN; PAM sequence: TTT
ggataccagccacaatttat

SEQ ID NO: 52655 - DNA, 20 bp, Artificial Sequence
  Description of Artificial Sequence: Synthetic oligonucleotide
  Target: SCNA; (-) strand; PAM type: YTN; PAM sequence: CTT
tggataccagccacaattta

SEQ ID NO: 52656 - DNA, 20 bp, Artificial Sequence
  Description of Artificial Sequence: Synthetic oligonucleotide
  Target: SCNA; (-) strand; PAM type: YTN; PAM sequence: TTC
ctttggataccagccacaat

SEQ ID NO: 52657 - DNA, 20 bp, Artificial Sequence
  Description of Artificial Sequence: Synthetic oligonucleotide
  Target: SCNA; (-) strand; PAM type: YTN; PAM sequence: CTC
attcctttggataccagcca

SEQ ID NO: 52658 - DNA, 20 bp, Artificial Sequence
  Description of Artificial Sequence: Synthetic oligonucleotide
  Target: SCNA; (-) strand; PAM type: YTN; PAM sequence: TTC
tcattcctttggataccagc

SEQ ID NO: 52659 - DNA, 20 bp, Artificial Sequence
  Description of Artificial Sequence: Synthetic oligonucleotide
  Target: SCNA; (-) strand; PAM type: YTN; PAM sequence: TTT
ctcattcctttggataccag

SEQ ID NO: 52660 - DNA, 20 bp, Artificial Sequence
  Description of Artificial Sequence: Synthetic oligonucleotide
  Target: SCNA; (-) strand; PAM type: YTN; PAM sequence: CTT
tctcattcctttggatacca

SEQ ID NO: 52661 - DNA, 20 bp, Artificial Sequence
  Description of Artificial Sequence: Synthetic oligonucleotide
  Target: SCNA; (-) strand; PAM type: YTN; PAM sequence: TTC
ctttctcattcctttggata

SEQ ID NO: 52662 - DNA, 20 bp, Artificial Sequence
  Description of Artificial Sequence: Synthetic oligonucleotide
  Target: SCNA; (-) strand; PAM type: YTN; PAM sequence: TTT
cctttctcattcctttggat

SEQ ID NO: 52663 - DNA, 20 bp, Artificial Sequence
  Description of Artificial Sequence: Synthetic oligonucleotide
  Target: SCNA; (-) strand; PAM type: YTN; PAM sequence: TTA
tttcctttctcattcctttg

SEQ ID NO: 52664 - DNA, 20 bp, Artificial Sequence
  Description of Artificial Sequence: Synthetic oligonucleotide
  Target: SCNA; (-) strand; PAM type: YTN; PAM sequence: TTC
gaagtagcatacattatttc

SEQ ID NO: 52665 - DNA, 20 bp, Artificial Sequence
  Description of Artificial Sequence: Synthetic oligonucleotide
  Target: SCNA; (-) strand; PAM type: YTN; PAM sequence: CTT
cgaagtagcatacattattt

SEQ ID NO: 52666 - DNA, 20 bp, Artificial Sequence
  Description of Artificial Sequence: Synthetic oligonucleotide
  Target: SCNA; (-) strand; PAM type: YTN; PAM sequence: CTG
aggggatgcatccataccca

SEQ ID NO: 52667 - DNA, 20 bp, Artificial Sequence
  Description of Artificial Sequence: Synthetic oligonucleotide
  Target: SCNA; (-) strand; PAM type: YTN; PAM sequence: TTC
tgaggggatgcatccatacc

SEQ ID NO: 52668 - DNA, 20 bp, Artificial Sequence
  Description of Artificial Sequence: Synthetic oligonucleotide
  Target: SCNA; (-) strand; PAM type: YTN; PAM sequence: CTT
ctgaggggatgcatccatac

SEQ ID NO: 52669 - DNA, 20 bp, Artificial Sequence
  Description of Artificial Sequence: Synthetic oligonucleotide
  Target: SCNA; (-) strand; PAM type: YTN; PAM sequence: TTG
cagccccaccgtcttctgag

SEQ ID NO: 52670 - DNA, 20 bp, Artificial Sequence
  Description of Artificial Sequence: Synthetic oligonucleotide
  Target: SCNA; (-) strand; PAM type: YTN; PAM sequence: CTC
ccaagttgcagccccaccgt

SEQ ID NO: 52671 - DNA, 20 bp, Artificial Sequence
  Description of Artificial Sequence: Synthetic oligonucleotide
  Target: SCNA; (-) strand; PAM type: YTN; PAM sequence: CTC
ctcccaagttgcagccccac

SEQ ID NO: 52672 - DNA, 20 bp, Artificial Sequence
  Description of Artificial Sequence: Synthetic oligonucleotide
  Target: SCNA; (-) strand; PAM type: YTN; PAM sequence: TTG
aggaacccagactcctccca

SEQ ID NO: 52673 - DNA, 20 bp, Artificial Sequence
  Description of Artificial Sequence: Synthetic oligonucleotide
  Target: SCNA; (-) strand; PAM type: YTN; PAM sequence: TTA
gggagattgaggaacccaga

SEQ ID NO: 52674 - DNA, 20 bp, Artificial Sequence
  Description of Artificial Sequence: Synthetic oligonucleotide
  Target: SCNA; (-) strand; PAM type: YTN; PAM sequence: CTT
agggagattgaggaacccag

SEQ ID NO: 52675 - DNA, 20 bp, Artificial Sequence
  Description of Artificial Sequence: Synthetic oligonucleotide
  Target: SCNA; (-) strand; PAM type: YTN; PAM sequence: CTC
ccttagggagattgaggaac

SEQ ID NO: 52676 - DNA, 20 bp, Artificial Sequence
  Description of Artificial Sequence: Synthetic oligonucleotide
  Target: SCNA; (-) strand; PAM type: YTN; PAM sequence: TTC
tcccttagggagattgagga

SEQ ID NO: 52677 - DNA, 20 bp, Artificial Sequence
  Description of Artificial Sequence: Synthetic oligonucleotide
  Target: SCNA; (-) strand; PAM type: YTN; PAM sequence: TTT
ctcccttagggagattgagg

SEQ ID NO: 52678 - DNA, 20 bp, Artificial Sequence
  Description of Artificial Sequence: Synthetic oligonucleotide
  Target: SCNA; (-) strand; PAM type: YTN; PAM sequence: TTG
gcaggtgggtgagtttctcc

SEQ ID NO: 52679 - DNA, 20 bp, Artificial Sequence
  Description of Artificial Sequence: Synthetic oligonucleotide
  Target: SCNA; (-) strand; PAM type: YTN; PAM sequence: TTT
ggcaggtgggtgagtttctc

SEQ ID NO: 52680 - DNA, 20 bp, Artificial Sequence
  Description of Artificial Sequence: Synthetic oligonucleotide
  Target: SCNA; (-) strand; PAM type: YTN; PAM sequence: TTT
tggcaggtgggtgagtttct

SEQ ID NO: 52681 - DNA, 20 bp, Artificial Sequence
  Description of Artificial Sequence: Synthetic oligonucleotide
  Target: SCNA; (-) strand; PAM type: YTN; PAM sequence: TTT
ttggcaggtgggtgagtttc

SEQ ID NO: 52682 - DNA, 20 bp, Artificial Sequence
  Description of Artificial Sequence: Synthetic oligonucleotide
  Target: SCNA; (-) strand; PAM type: YTN; PAM sequence: TTC
acataagtccatggtaggtg

SEQ ID NO: 52683 - DNA, 20 bp, Artificial Sequence
  Description of Artificial Sequence: Synthetic oligonucleotide
  Target: SCNA; (-) strand; PAM type: YTN; PAM sequence: CTC
attcacataagtccatggta

SEQ ID NO: 52684 - DNA, 20 bp, Artificial Sequence
  Description of Artificial Sequence: Synthetic oligonucleotide
  Target: SCNA; (-) strand; PAM type: YTN; PAM sequence: TTC
tcattcacataagtccatgg

SEQ ID NO: 52685 - DNA, 20 bp, Artificial Sequence
  Description of Artificial Sequence: Synthetic oligonucleotide
  Target: SCNA; (-) strand; PAM type: YTN; PAM sequence: TTG
attctcattcacataagtcc

SEQ ID NO: 52686 - DNA, 20 bp, Artificial Sequence
  Description of Artificial Sequence: Synthetic oligonucleotide
  Target: SCNA; (-) strand; PAM type: YTN; PAM sequence: CTC
aaacacagtagaggttgatt

SEQ ID NO: 52687 - DNA, 20 bp, Artificial Sequence
  Description of Artificial Sequence: Synthetic oligonucleotide
  Target: SCNA; (-) strand; PAM type: YTN; PAM sequence: TTA
aaatgctcaaacacagtaga

SEQ ID NO: 52688 - DNA, 20 bp, Artificial Sequence
  Description of Artificial Sequence: Synthetic oligonucleotide
  Target: SCNA; (-) strand; PAM type: YTN; PAM sequence: TTA
aatgaatgtcaattaaaatg

SEQ ID NO: 52689 - DNA, 20 bp, Artificial Sequence
  Description of Artificial Sequence: Synthetic oligonucleotide
  Target: SCNA; (-) strand; PAM type: YTN; PAM sequence: TTA
aatagtgttaaatgaatgtc

SEQ ID NO: 52690 - DNA, 20 bp, Artificial Sequence
  Description of Artificial Sequence: Synthetic oligonucleotide
  Target: SCNA; (-) strand; PAM type: YTN; PAM sequence: CTG
tatattaaatagtgttaaat

SEQ ID NO: 52691 - DNA, 20 bp, Artificial Sequence
  Description of Artificial Sequence: Synthetic oligonucleotide
  Target: SCNA; (-) strand; PAM type: YTN; PAM sequence: CTG
aacatctgtatattaaatag

SEQ ID NO: 52692 - DNA, 20 bp, Artificial Sequence
  Description of Artificial Sequence: Synthetic oligonucleotide
  Target: SCNA; (-) strand; PAM type: YTN; PAM sequence: CTA
ctgaacatctgtatattaaa

SEQ ID NO: 52693 - DNA, 20 bp, Artificial Sequence
  Description of Artificial Sequence: Synthetic oligonucleotide
  Target: SCNA; (-) strand; PAM type: YTN; PAM sequence: TTA
gtgaacatctactgaacatc

SEQ ID NO: 52694 - DNA, 20 bp, Artificial Sequence
  Description of Artificial Sequence: Synthetic oligonucleotide
  Target: SCNA; (-) strand; PAM type: YTN; PAM sequence: TTT
agtgaacatctactgaacat

SEQ ID NO: 52695 - DNA, 20 bp, Artificial Sequence
  Description of Artificial Sequence: Synthetic oligonucleotide
  Target: SCNA; (-) strand; PAM type: YTN; PAM sequence: TTC
atttagtgaacatctactga

SEQ ID NO: 52696 - DNA, 20 bp, Artificial Sequence
  Description of Artificial Sequence: Synthetic oligonucleotide
  Target: SCNA; (-) strand; PAM type: YTN; PAM sequence: TTA
attcatttagtgaacatcta

SEQ ID NO: 52697 - DNA, 20 bp, Artificial Sequence
  Description of Artificial Sequence: Synthetic oligonucleotide
  Target: SCNA; (-) strand; PAM type: YTN; PAM sequence: CTT
aattcatttagtgaacatct

SEQ ID NO: 52698 - DNA, 20 bp, Artificial Sequence
  Description of Artificial Sequence: Synthetic oligonucleotide
  Target: SCNA; (-) strand; PAM type: YTN; PAM sequence: CTA
caaaaacttaattcatttag

SEQ ID NO: 52699 - DNA, 20 bp, Artificial Sequence
  Description of Artificial Sequence: Synthetic oligonucleotide
  Target: SCNA; (-) strand; PAM type: YTN; PAM sequence: TTC
agaaaatcaaactacaaaaa

SEQ ID NO: 52700 - DNA, 20 bp, Artificial Sequence
  Description of Artificial Sequence: Synthetic oligonucleotide
  Target: SCNA; (-) strand; PAM type: YTN; PAM sequence: CTT
cagaaaatcaaactacaaaa

SEQ ID NO: 52701 - DNA, 20 bp, Artificial Sequence
  Description of Artificial Sequence: Synthetic oligonucleotide
  Target: SCNA; (-) strand; PAM type: YTN; PAM sequence: TTC
ttcagaaaatcaaactacaa

SEQ ID NO: 52702 - DNA, 20 bp, Artificial Sequence
  Description of Artificial Sequence: Synthetic oligonucleotide
  Target: SCNA; (-) strand; PAM type: YTN; PAM sequence: TTC
aaattcttcagaaaatcaaa

SEQ ID NO: 52703 - DNA, 20 bp, Artificial Sequence
  Description of Artificial Sequence: Synthetic oligonucleotide
  Target: SCNA; (-) strand; PAM type: YTN; PAM sequence: TTT
caaattcttcagaaaatcaa

SEQ ID NO: 52704 - DNA, 20 bp, Artificial Sequence
  Description of Artificial Sequence: Synthetic oligonucleotide
  Target: SCNA; (-) strand; PAM type: YTN; PAM sequence: CTG
tttcaaattcttcagaaaat

SEQ ID NO: 52705 - DNA, 20 bp, Artificial Sequence
  Description of Artificial Sequence: Synthetic oligonucleotide
  Target: SCNA; (-) strand; PAM type: YTN; PAM sequence: TTG
atctgtttcaaattcttcag

SEQ ID NO: 52706 - DNA, 20 bp, Artificial Sequence
  Description of Artificial Sequence: Synthetic oligonucleotide
  Target: SCNA; (-) strand; PAM type: YTN; PAM sequence: TTT
gatctgtttcaaattcttca

SEQ ID NO: 52707 - DNA, 20 bp, Artificial Sequence
  Description of Artificial Sequence: Synthetic oligonucleotide
  Target: SCNA; (-) strand; PAM type: YTN; PAM sequence: CTA
tacatttgatctgtttcaaa

SEQ ID NO: 52708 - DNA, 20 bp, Artificial Sequence
  Description of Artificial Sequence: Synthetic oligonucleotide
  Target: SCNA; (-) strand; PAM type: YTN; PAM sequence: CTC
tatacatttgatctgtttca

SEQ ID NO: 52709 - DNA, 20 bp, Artificial Sequence
  Description of Artificial Sequence: Synthetic oligonucleotide
  Target: SCNA; (-) strand; PAM type: YTN; PAM sequence: TTC
tctatacatttgatctgttt

SEQ ID NO: 52710 - DNA, 20 bp, Artificial Sequence
  Description of Artificial Sequence: Synthetic oligonucleotide
  Target: SCNA; (-) strand; PAM type: YTN; PAM sequence: CTT
ctctatacatttgatctgtt

SEQ ID NO: 52711 - DNA, 20 bp, Artificial Sequence
  Description of Artificial Sequence: Synthetic oligonucleotide
  Target: SCNA; (-) strand; PAM type: YTN; PAM sequence: TTG
aaacttctctatacatttga

SEQ ID NO: 52712 - DNA, 20 bp, Artificial Sequence
  Description of Artificial Sequence: Synthetic oligonucleotide
  Target: SCNA; (-) strand; PAM type: YTN; PAM sequence: CTT
gaaacttctctatacatttg

SEQ ID NO: 52713 - DNA, 20 bp, Artificial Sequence
  Description of Artificial Sequence: Synthetic oligonucleotide
  Target: SCNA; (-) strand; PAM type: YTN; PAM sequence: TTC
ttgaaacttctctatacatt

SEQ ID NO: 52714 - DNA, 20 bp, Artificial Sequence
  Description of Artificial Sequence: Synthetic oligonucleotide
  Target: SCNA; (-) strand; PAM type: YTN; PAM sequence: CTG
ttcttgaaacttctctatac

SEQ ID NO: 52715 - DNA, 20 bp, Artificial Sequence
  Description of Artificial Sequence: Synthetic oligonucleotide
  Target: SCNA; (-) strand; PAM type: YTN; PAM sequence: TTG
actgttcttgaaacttctct

SEQ ID NO: 52716 - DNA, 20 bp, Artificial Sequence
  Description of Artificial Sequence: Synthetic oligonucleotide
  Target: SCNA; (-) strand; PAM type: YTN; PAM sequence: TTT
gactgttcttgaaacttctc

SEQ ID NO: 52717 - DNA, 20 bp, Artificial Sequence
  Description of Artificial Sequence: Synthetic oligonucleotide
  Target: SCNA; (-) strand; PAM type: YTN; PAM sequence: CTT
tgactgttcttgaaacttct

SEQ ID NO: 52718 - DNA, 20 bp, Artificial Sequence
  Description of Artificial Sequence: Synthetic oligonucleotide
  Target: SCNA; (-) strand; PAM type: YTN; PAM sequence: CTC
tttgactgttcttgaaactt

SEQ ID NO: 52719 - DNA, 20 bp, Artificial Sequence
  Description of Artificial Sequence: Synthetic oligonucleotide
  Target: SCNA; (-) strand; PAM type: YTN; PAM sequence: CTG
ggtgaagtggatagagggac

SEQ ID NO: 52720 - DNA, 20 bp, Artificial Sequence
  Description of Artificial Sequence: Synthetic oligonucleotide
  Target: SCNA; (-) strand; PAM type: YTN; PAM sequence: TTC
tgggtgaagtggatagaggg

SEQ ID NO: 52721 - DNA, 20 bp, Artificial Sequence
  Description of Artificial Sequence: Synthetic oligonucleotide
  Target: SCNA; (-) strand; PAM type: YTN; PAM sequence: TTA
ggaattctgggtgaagtgga

SEQ ID NO: 52722 - DNA, 20 bp, Artificial Sequence
  Description of Artificial Sequence: Synthetic oligonucleotide
  Target: SCNA; (-) strand; PAM type: YTN; PAM sequence: TTA
acaattaggaattctgggtg

SEQ ID NO: 52723 - DNA, 20 bp, Artificial Sequence
  Description of Artificial Sequence: Synthetic oligonucleotide
  Target: SCNA; (-) strand; PAM type: YTN; PAM sequence: TTA
ggcagagggagcaaatgagg

SEQ ID NO: 52724 - DNA, 20 bp, Artificial Sequence
  Description of Artificial Sequence: Synthetic oligonucleotide
  Target: SCNA; (-) strand; PAM type: YTN; PAM sequence: CTC
acacacacgcacaaatacat

SEQ ID NO: 52725 - DNA, 20 bp, Artificial Sequence
  Description of Artificial Sequence: Synthetic oligonucleotide
  Target: SCNA; (-) strand; PAM type: YTN; PAM sequence: CTC
tcacacacacgcacaaatac

SEQ ID NO: 52726 - DNA, 20 bp, Artificial Sequence
  Description of Artificial Sequence: Synthetic oligonucleotide
  Target: SCNA; (-) strand; PAM type: YTN; PAM sequence: CTG
gaaaaagatacgcacacaca

SEQ ID NO: 52727 - DNA, 20 bp, Artificial Sequence
  Description of Artificial Sequence: Synthetic oligonucleotide
  Target: SCNA; (-) strand; PAM type: YTN; PAM sequence: TTG
tgctggaaaaagatacgcac

SEQ ID NO: 52728 - DNA, 20 bp, Artificial Sequence
  Description of Artificial Sequence: Synthetic oligonucleotide
  Target: SCNA; (-) strand; PAM type: YTN; PAM sequence: TTA
atgcaccattgtgctggaaa

SEQ ID NO: 52729 - DNA, 20 bp, Artificial Sequence
  Description of Artificial Sequence: Synthetic oligonucleotide
  Target: SCNA; (-) strand; PAM type: YTN; PAM sequence: TTA
gggttaatgcaccattgtgc

SEQ ID NO: 52730 - DNA, 20 bp, Artificial Sequence
  Description of Artificial Sequence: Synthetic oligonucleotide
  Target: SCNA; (-) strand; PAM type: YTN; PAM sequence: CTT
agggttaatgcaccattgtg

SEQ ID NO: 52731 - DNA, 20 bp, Artificial Sequence
  Description of Artificial Sequence: Synthetic oligonucleotide
  Target: SCNA; (-) strand; PAM type: YTN; PAM sequence: CTG
aagtacttagggttaatgca

SEQ ID NO: 52732 - DNA, 20 bp, Artificial Sequence
  Description of Artificial Sequence: Synthetic oligonucleotide
  Target: SCNA; (-) strand; PAM type: YTN; PAM sequence: TTA
ctgaagtacttagggttaat

SEQ ID NO: 52733 - DNA, 20 bp, Artificial Sequence
  Description of Artificial Sequence: Synthetic oligonucleotide
  Target: SCNA; (-) strand; PAM type: YTN; PAM sequence: CTT
actgaagtacttagggttaa

SEQ ID NO: 52734 - DNA, 20 bp, Artificial Sequence
  Description of Artificial Sequence: Synthetic oligonucleotide
  Target: SCNA; (-) strand; PAM type: YTN; PAM sequence: TTA
gagaggtacttactgaagta

SEQ ID NO: 52735 - DNA, 20 bp, Artificial Sequence
  Description of Artificial Sequence: Synthetic oligonucleotide
  Target: SCNA; (-) strand; PAM type: YTN; PAM sequence: TTT
agagaggtacttactgaagt

SEQ ID NO: 52736 - DNA, 20 bp, Artificial Sequence
  Description of Artificial Sequence: Synthetic oligonucleotide
  Target: SCNA; (-) strand; PAM type: YTN; PAM sequence: CTT
tagagaggtacttactgaag

SEQ ID NO: 52737 - DNA, 20 bp, Artificial Sequence
  Description of Artificial Sequence: Synthetic oligonucleotide
  Target: SCNA; (-) strand; PAM type: YTN; PAM sequence: TTG
ctttagagaggtacttactg

SEQ ID NO: 52738 - DNA, 20 bp, Artificial Sequence
  Description of Artificial Sequence: Synthetic oligonucleotide
  Target: SCNA; (-) strand; PAM type: YTN; PAM sequence: CTT
gctttagagaggtacttact

SEQ ID NO: 52739 - DNA, 20 bp, Artificial Sequence
  Description of Artificial Sequence: Synthetic oligonucleotide
  Target: SCNA; (-) strand; PAM type: YTN; PAM sequence: TTA
gtgtagaagagaatccttgc

SEQ ID NO: 52740 - DNA, 20 bp, Artificial Sequence
  Description of Artificial Sequence: Synthetic oligonucleotide
  Target: SCNA; (-) strand; PAM type: YTN; PAM sequence: TTA
cagtgttagtgtagaagaga

SEQ ID NO: 52741 - DNA, 20 bp, Artificial Sequence
  Description of Artificial Sequence: Synthetic oligonucleotide
  Target: SCNA; (-) strand; PAM type: YTN; PAM sequence: TTT
acagtgttagtgtagaagag

SEQ ID NO: 52742 - DNA, 20 bp, Artificial Sequence
  Description of Artificial Sequence: Synthetic oligonucleotide
  Target: SCNA; (-) strand; PAM type: YTN; PAM sequence: TTT
tacagtgttagtgtagaaga

SEQ ID NO: 52743 - DNA, 20 bp, Artificial Sequence
  Description of Artificial Sequence: Synthetic oligonucleotide
  Target: SCNA; (-) strand; PAM type: YTN; PAM sequence: TTG
tgacagttttacagtgttag

SEQ ID NO: 52744 - DNA, 20 bp, Artificial Sequence
  Description of Artificial Sequence: Synthetic oligonucleotide
  Target: SCNA; (-) strand; PAM type: YTN; PAM sequence: CTG
gttgtgacagttttacagtg

SEQ ID NO: 52745 - DNA, 20 bp, Artificial Sequence
  Description of Artificial Sequence: Synthetic oligonucleotide
  Target: SCNA; (-) strand; PAM type: YTN; PAM sequence: TTC
ctggttgtgacagttttaca

SEQ ID NO: 52746 - DNA, 20 bp, Artificial Sequence
  Description of Artificial Sequence: Synthetic oligonucleotide
  Target: SCNA; (-) strand; PAM type: YTN; PAM sequence: CTT
cctggttgtgacagttttac

SEQ ID NO: 52747 - DNA, 20 bp, Artificial Sequence
  Description of Artificial Sequence: Synthetic oligonucleotide
  Target: SCNA; (-) strand; PAM type: YTN; PAM sequence: TTG
acttcctggttgtgacagtt

SEQ ID NO: 52748 - DNA, 20 bp, Artificial Sequence
  Description of Artificial Sequence: Synthetic oligonucleotide
  Target: SCNA; (-) strand; PAM type: YTN; PAM sequence: CTA
tcagtgttgacttcctggtt

SEQ ID NO: 52749 - DNA, 20 bp, Artificial Sequence
  Description of Artificial Sequence: Synthetic oligonucleotide
  Target: SCNA; (-) strand; PAM type: YTN; PAM sequence: TTC
tatcagtgttgacttcctgg

SEQ ID NO: 52750 - DNA, 20 bp, Artificial Sequence
  Description of Artificial Sequence: Synthetic oligonucleotide
  Target: SCNA; (-) strand; PAM type: YTN; PAM sequence: TTG
gatggcagtgttctatcagt

SEQ ID NO: 52751 - DNA, 20 bp, Artificial Sequence
  Description of Artificial Sequence: Synthetic oligonucleotide
  Target: SCNA; (-) strand; PAM type: YTN; PAM sequence: CTT
ggatggcagtgttctatcag

SEQ ID NO: 52752 - DNA, 20 bp, Artificial Sequence
  Description of Artificial Sequence: Synthetic oligonucleotide
  Target: SCNA; (-) strand; PAM type: YTN; PAM sequence: CTG
gcttggatggcagtgttcta

SEQ ID NO: 52753 - DNA, 20 bp, Artificial Sequence
  Description of Artificial Sequence: Synthetic oligonucleotide
  Target: SCNA; (-) strand; PAM type: YTN; PAM sequence: CTC
tggcttggatggcagtgttc

SEQ ID NO: 52754 - DNA, 20 bp, Artificial Sequence
  Description of Artificial Sequence: Synthetic oligonucleotide
  Target: SCNA; (-) strand; PAM type: YTN; PAM sequence: TTA
atcatcctctggcttggatg

SEQ ID NO: 52755 - DNA, 20 bp, Artificial Sequence
  Description of Artificial Sequence: Synthetic oligonucleotide
  Target: SCNA; (-) strand; PAM type: YTN; PAM sequence: TTT
aatcatcctctggcttggat

SEQ ID NO: 52756 - DNA, 20 bp, Artificial Sequence
  Description of Artificial Sequence: Synthetic oligonucleotide
  Target: SCNA; (-) strand; PAM type: YTN; PAM sequence: TTG
agcacccaataagcacataa

SEQ ID NO: 52757 - DNA, 20 bp, Artificial Sequence
  Description of Artificial Sequence: Synthetic oligonucleotide
  Target: SCNA; (-) strand; PAM type: YTN; PAM sequence: CTG
aacacccaattgagcaccca

SEQ ID NO: 52758 - DNA, 20 bp, Artificial Sequence
  Description of Artificial Sequence: Synthetic oligonucleotide
  Target: SCNA; (-) strand; PAM type: YTN; PAM sequence: TTG
tcatgctgaacacccaattg

SEQ ID NO: 52759 - DNA, 20 bp, Artificial Sequence
  Description of Artificial Sequence: Synthetic oligonucleotide
  Target: SCNA; (-) strand; PAM type: YTN; PAM sequence: CTT
gtcatgctgaacacccaatt

SEQ ID NO: 52760 - DNA, 20 bp, Artificial Sequence
  Description of Artificial Sequence: Synthetic oligonucleotide
  Target: SCNA; (-) strand; PAM type: YTN; PAM sequence: TTA
tgatacttgtcatgctgaac

SEQ ID NO: 52761 - DNA, 20 bp, Artificial Sequence
  Description of Artificial Sequence: Synthetic oligonucleotide
  Target: SCNA; (-) strand; PAM type: YTN; PAM sequence: TTA
tggtggttatgatacttgtc

SEQ ID NO: 52762 - DNA, 20 bp, Artificial Sequence
  Description of Artificial Sequence: Synthetic oligonucleotide
  Target: SCNA; (-) strand; PAM type: YTN; PAM sequence: CTA
ggaagtaggagggaaaagag

SEQ ID NO: 52763 - DNA, 20 bp, Artificial Sequence
  Description of Artificial Sequence: Synthetic oligonucleotide
  Target: SCNA; (-) strand; PAM type: YTN; PAM sequence: CTG
acagggggaggaaggagatg

SEQ ID NO: 52764 - DNA, 20 bp, Artificial Sequence
  Description of Artificial Sequence: Synthetic oligonucleotide
  Target: SCNA; (-) strand; PAM type: YTN; PAM sequence: CTG
ctgacagggggaggaaggag

SEQ ID NO: 52765 - DNA, 20 bp, Artificial Sequence
  Description of Artificial Sequence: Synthetic oligonucleotide
  Target: SCNA; (-) strand; PAM type: YTN; PAM sequence: CTG
agcaaggctgctgacagggg

SEQ ID NO: 52766 - DNA, 20 bp, Artificial Sequence
  Description of Artificial Sequence: Synthetic oligonucleotide
  Target: SCNA; (-) strand; PAM type: YTN; PAM sequence: TTG
atgtctgagcaaggctgctg

SEQ ID NO: 52767 - DNA, 20 bp, Artificial Sequence
  Description of Artificial Sequence: Synthetic oligonucleotide
  Target: SCNA; (-) strand; PAM type: YTN; PAM sequence: CTG
gtggttgatgtctgagcaag

SEQ ID NO: 52768 - DNA, 20 bp, Artificial Sequence
  Description of Artificial Sequence: Synthetic oligonucleotide
  Target: SCNA; (-) strand; PAM type: YTN; PAM sequence: TTG
ccatggggacatgcaaacac

SEQ ID NO: 52769 - DNA, 20 bp, Artificial Sequence
  Description of Artificial Sequence: Synthetic oligonucleotide
  Target: SCNA; (-) strand; PAM type: YTN; PAM sequence: CTT
gccatggggacatgcaaaca

SEQ ID NO: 52770 - DNA, 20 bp, Artificial Sequence
  Description of Artificial Sequence: Synthetic oligonucleotide
  Target: SCNA; (-) strand; PAM type: YTN; PAM sequence: TTC
ttgccatggggacatgcaaa

SEQ ID NO: 52771 - DNA, 20 bp, Artificial Sequence
  Description of Artificial Sequence: Synthetic oligonucleotide
  Target: SCNA; (-) strand; PAM type: YTN; PAM sequence: TTG
ttcttgccatggggacatgc

SEQ ID NO: 52772 - DNA, 20 bp, Artificial Sequence
  Description of Artificial Sequence: Synthetic oligonucleotide
  Target: SCNA; (-) strand; PAM type: YTN; PAM sequence: CTT
gttcttgccatggggacatg

SEQ ID NO: 52773 - DNA, 20 bp, Artificial Sequence
  Description of Artificial Sequence: Synthetic oligonucleotide
  Target: SCNA; (-) strand; PAM type: YTN; PAM sequence: TTC
ccccttgttcttgccatggg

SEQ ID NO: 52774 - DNA, 20 bp, Artificial Sequence
  Description of Artificial Sequence: Synthetic oligonucleotide
  Target: SCNA; (-) strand; PAM type: YTN; PAM sequence: CTT
cccccttgttcttgccatgg

SEQ ID NO: 52775 - DNA, 20 bp, Artificial Sequence
  Description of Artificial Sequence: Synthetic oligonucleotide
  Target: SCNA; (-) strand; PAM type: YTN; PAM sequence: CTC
ccttcccccttgttcttgcc

SEQ ID NO: 52776 - DNA, 20 bp, Artificial Sequence
  Description of Artificial Sequence: Synthetic oligonucleotide
  Target: SCNA; (-) strand; PAM type: YTN; PAM sequence: CTA
ctcccttcccccttgttctt

SEQ ID NO: 52777 - DNA, 20 bp, Artificial Sequence
  Description of Artificial Sequence: Synthetic oligonucleotide
  Target: SCNA; (-) strand; PAM type: YTN; PAM sequence: CTC
ctactcccttcccccttgtt

SEQ ID NO: 52778 - DNA, 20 bp, Artificial Sequence
  Description of Artificial Sequence: Synthetic oligonucleotide
  Target: SCNA; (-) strand; PAM type: YTN; PAM sequence: TTC
cctcctactcccttccccct

SEQ ID NO: 52779 - DNA, 20 bp, Artificial Sequence
  Description of Artificial Sequence: Synthetic oligonucleotide
  Target: SCNA; (-) strand; PAM type: YTN; PAM sequence: TTT
ccctcctactcccttccccc

SEQ ID NO: 52780 - DNA, 20 bp, Artificial Sequence
  Description of Artificial Sequence: Synthetic oligonucleotide
  Target: SCNA; (-) strand; PAM type: YTN; PAM sequence: TTT
tccctcctactcccttcccc

SEQ ID NO: 52781 - DNA, 20 bp, Artificial Sequence
  Description of Artificial Sequence: Synthetic oligonucleotide
  Target: SCNA; (-) strand; PAM type: YTN; PAM sequence: CTA
attttccctcctactccctt

SEQ ID NO: 52782 - DNA, 20 bp, Artificial Sequence
  Description of Artificial Sequence: Synthetic oligonucleotide
  Target: SCNA; (-) strand; PAM type: YTN; PAM sequence: TTA
ctaattttccctcctactcc

SEQ ID NO: 52783 - DNA, 20 bp, Artificial Sequence
  Description of Artificial Sequence: Synthetic oligonucleotide
  Target: SCNA; (-) strand; PAM type: YTN; PAM sequence: CTT
actaattttccctcctactc

SEQ ID NO: 52784 - DNA, 20 bp, Artificial Sequence
  Description of Artificial Sequence: Synthetic oligonucleotide
  Target: SCNA; (-) strand; PAM type: YTN; PAM sequence: TTG
tccttactaattttccctcc

SEQ ID NO: 52785 - DNA, 20 bp, Artificial Sequence
  Description of Artificial Sequence: Synthetic oligonucleotide
  Target: SCNA; (-) strand; PAM type: YTN; PAM sequence: CTT
gtccttactaattttccctc

SEQ ID NO: 52786 - DNA, 20 bp, Artificial Sequence
  Description of Artificial Sequence: Synthetic oligonucleotide
  Target: SCNA; (-) strand; PAM type: YTN; PAM sequence: TTC
ccttgtccttactaattttc

SEQ ID NO: 52787 - DNA, 20 bp, Artificial Sequence
  Description of Artificial Sequence: Synthetic oligonucleotide
  Target: SCNA; (-) strand; PAM type: YTN; PAM sequence: CTT
cccttgtccttactaatttt

SEQ ID NO: 52788 - DNA, 20 bp, Artificial Sequence
  Description of Artificial Sequence: Synthetic oligonucleotide
  Target: SCNA; (-) strand; PAM type: YTN; PAM sequence: TTC
atccaccttcccttgtcctt

SEQ ID NO: 52789 - DNA, 20 bp, Artificial Sequence
  Description of Artificial Sequence: Synthetic oligonucleotide
  Target: SCNA; (-) strand; PAM type: YTN; PAM sequence: TTC
attcatccaccttcccttgt

SEQ ID NO: 52790 - DNA, 20 bp, Artificial Sequence
  Description of Artificial Sequence: Synthetic oligonucleotide
  Target: SCNA; (-) strand; PAM type: YTN; PAM sequence: TTA
aaaatgaattcattcatcca

SEQ ID NO: 52791 - DNA, 20 bp, Artificial Sequence
  Description of Artificial Sequence: Synthetic oligonucleotide
  Target: SCNA; (-) strand; PAM type: YTN; PAM sequence: TTA
tattaaaaatgaattcattc

SEQ ID NO: 52792 - DNA, 20 bp, Artificial Sequence
  Description of Artificial Sequence: Synthetic oligonucleotide
  Target: SCNA; (-) strand; PAM type: YTN; PAM sequence: TTC
acgtagcattatattaaaaa

SEQ ID NO: 52793 - DNA, 20 bp, Artificial Sequence
  Description of Artificial Sequence: Synthetic oligonucleotide
  Target: SCNA; (-) strand; PAM type: YTN; PAM sequence: TTT
cacgtagcattatattaaaa

SEQ ID NO: 52794 - DNA, 20 bp, Artificial Sequence
  Description of Artificial Sequence: Synthetic oligonucleotide
  Target: SCNA; (-) strand; PAM type: YTN; PAM sequence: TTT
tcacgtagcattatattaaa

SEQ ID NO: 52795 - DNA, 20 bp, Artificial Sequence
  Description of Artificial Sequence: Synthetic oligonucleotide
  Target: SCNA; (-) strand; PAM type: YTN; PAM sequence: CTT
ttcacgtagcattatattaa

SEQ ID NO: 52796 - DNA, 20 bp, Artificial Sequence
  Description of Artificial Sequence: Synthetic oligonucleotide
  Target: SCNA; (-) strand; PAM type: YTN; PAM sequence: TTC
ttttcacgtagcattatatt

SEQ ID NO: 52797 - DNA, 20 bp, Artificial Sequence
  Description of Artificial Sequence: Synthetic oligonucleotide
  Target: SCNA; (-) strand; PAM type: YTN; PAM sequence: TTT
cttttcacgtagcattatat

SEQ ID NO: 52798 - DNA, 20 bp, Artificial Sequence
  Description of Artificial Sequence: Synthetic oligonucleotide
  Target: SCNA; (-) strand; PAM type: YTN; PAM sequence: CTG
gcatttcttttcacgtagca

SEQ ID NO: 52799 - DNA, 20 bp, Artificial Sequence
  Description of Artificial Sequence: Synthetic oligonucleotide
  Target: SCNA; (-) strand; PAM type: YTN; PAM sequence: TTC
tggcatttcttttcacgtag

SEQ ID NO: 52800 - DNA, 20 bp, Artificial Sequence
  Description of Artificial Sequence: Synthetic oligonucleotide
  Target: SCNA; (-) strand; PAM type: YTN; PAM sequence: TTT
ctggcatttcttttcacgta

SEQ ID NO: 52801 - DNA, 20 bp, Artificial Sequence
  Description of Artificial Sequence: Synthetic oligonucleotide
  Target: SCNA; (-) strand; PAM type: YTN; PAM sequence: CTT
tctggcatttcttttcacgt

SEQ ID NO: 52802 - DNA, 20 bp, Artificial Sequence
  Description of Artificial Sequence: Synthetic oligonucleotide
  Target: SCNA; (-) strand; PAM type: YTN; PAM sequence: TTA
ctttctggcatttcttttca

SEQ ID NO: 52803 - DNA, 20 bp, Artificial Sequence
  Description of Artificial Sequence: Synthetic oligonucleotide
  Target: SCNA; (-) strand; PAM type: YTN; PAM sequence: TTC
agaatgttactttctggcat

SEQ ID NO: 52804 - DNA, 20 bp, Artificial Sequence
  Description of Artificial Sequence: Synthetic oligonucleotide
  Target: SCNA; (-) strand; PAM type: YTN; PAM sequence: TTT
cagaatgttactttctggca

SEQ ID NO: 52805 - DNA, 20 bp, Artificial Sequence
  Description of Artificial Sequence: Synthetic oligonucleotide
  Target: SCNA; (-) strand; PAM type: YTN; PAM sequence: TTT
tcagaatgttactttctggc

SEQ ID NO: 52806 - DNA, 20 bp, Artificial Sequence
  Description of Artificial Sequence: Synthetic oligonucleotide
  Target: SCNA; (-) strand; PAM type: YTN; PAM sequence: TTA
ccagtgattttcagaatgtt

SEQ ID NO: 52807 - DNA, 20 bp, Artificial Sequence
  Description of Artificial Sequence: Synthetic oligonucleotide
  Target: SCNA; (-) strand; PAM type: YTN; PAM sequence: TTT
accagtgattttcagaatgt

SEQ ID NO: 52808 - DNA, 20 bp, Artificial Sequence
  Description of Artificial Sequence: Synthetic oligonucleotide
  Target: SCNA; (-) strand; PAM type: YTN; PAM sequence: TTT
taccagtgattttcagaatg

SEQ ID NO: 52809 - DNA, 20 bp, Artificial Sequence
  Description of Artificial Sequence: Synthetic oligonucleotide
  Target: SCNA; (-) strand; PAM type: YTN; PAM sequence: CTT
ttaccagtgattttcagaat

SEQ ID NO: 52810 - DNA, 20 bp, Artificial Sequence
  Description of Artificial Sequence: Synthetic oligonucleotide
  Target: SCNA; (-) strand; PAM type: YTN; PAM sequence: TTG
gggatgcttttaccagtgat

SEQ ID NO: 52811 - DNA, 20 bp, Artificial Sequence
  Description of Artificial Sequence: Synthetic oligonucleotide
  Target: SCNA; (-) strand; PAM type: YTN; PAM sequence: TTT
ggggatgcttttaccagtga

SEQ ID NO: 52812 - DNA, 20 bp, Artificial Sequence
  Description of Artificial Sequence: Synthetic oligonucleotide
  Target: SCNA; (-) strand; PAM type: YTN; PAM sequence: CTT
tggggatgcttttaccagtg

SEQ ID NO: 52813 - DNA, 20 bp, Artificial Sequence
  Description of Artificial Sequence: Synthetic oligonucleotide
  Target: SCNA; (-) strand; PAM type: YTN; PAM sequence: TTA
aatgtccatatcaggtagac

SEQ ID NO: 52814 - DNA, 20 bp, Artificial Sequence
  Description of Artificial Sequence: Synthetic oligonucleotide
  Target: SCNA; (-) strand; PAM type: YTN; PAM sequence: TTT
aaatgtccatatcaggtaga

SEQ ID NO: 52815 - DNA, 20 bp, Artificial Sequence
  Description of Artificial Sequence: Synthetic oligonucleotide
  Target: SCNA; (-) strand; PAM type: YTN; PAM sequence: TTA
atgaatttaaatgtccatat

SEQ ID NO: 52816 - DNA, 20 bp, Artificial Sequence
  Description of Artificial Sequence: Synthetic oligonucleotide
  Target: SCNA; (-) strand; PAM type: YTN; PAM sequence: TTT
aatgaatttaaatgtccata

SEQ ID NO: 52817 - DNA, 20 bp, Artificial Sequence
  Description of Artificial Sequence: Synthetic oligonucleotide
  Target: SCNA; (-) strand; PAM type: YTN; PAM sequence: TTT
taatgaatttaaatgtccat

SEQ ID NO: 52818 - DNA, 20 bp, Artificial Sequence
  Description of Artificial Sequence: Synthetic oligonucleotide
  Target: SCNA; (-) strand; PAM type: YTN; PAM sequence: TTT
ttaatgaatttaaatgtcca

SEQ ID NO: 52819 - DNA, 20 bp, Artificial Sequence
  Description of Artificial Sequence: Synthetic oligonucleotide
  Target: SCNA; (-) strand; PAM type: YTN; PAM sequence: CTC
agaatttttaatgaatttaa

SEQ ID NO: 52820 - DNA, 20 bp, Artificial Sequence
  Description of Artificial Sequence: Synthetic oligonucleotide
  Target: SCNA; (-) strand; PAM type: YTN; PAM sequence: TTA
aactcagaatttttaatgaa

SEQ ID NO: 52821 - DNA, 20 bp, Artificial Sequence
  Description of Artificial Sequence: Synthetic oligonucleotide
  Target: SCNA; (-) strand; PAM type: YTN; PAM sequence: CTT
aaactcagaatttttaatga

SEQ ID NO: 52822 - DNA, 20 bp, Artificial Sequence
  Description of Artificial Sequence: Synthetic oligonucleotide
  Target: SCNA; (-) strand; PAM type: YTN; PAM sequence: TTC
ttaaactcagaatttttaat

SEQ ID NO: 52823 - DNA, 20 bp, Artificial Sequence
  Description of Artificial Sequence: Synthetic oligonucleotide
  Target: SCNA; (-) strand; PAM type: YTN; PAM sequence: TTT
cttaaactcagaatttttaa

SEQ ID NO: 52824 - DNA, 20 bp, Artificial Sequence
  Description of Artificial Sequence: Synthetic oligonucleotide
  Target: SCNA; (-) strand; PAM type: YTN; PAM sequence: TTT
tcttaaactcagaattttta

SEQ ID NO: 52825 - DNA, 20 bp, Artificial Sequence
  Description of Artificial Sequence: Synthetic oligonucleotide
  Target: SCNA; (-) strand; PAM type: YTN; PAM sequence: CTG
ttttcttaaactcagaattt

SEQ ID NO: 52826 - DNA, 20 bp, Artificial Sequence
  Description of Artificial Sequence: Synthetic oligonucleotide
  Target: SCNA; (-) strand; PAM type: YTN; PAM sequence: TTA
gctgttttcttaaactcaga

SEQ ID NO: 52827 - DNA, 20 bp, Artificial Sequence
  Description of Artificial Sequence: Synthetic oligonucleotide
  Target: SCNA; (-) strand; PAM type: YTN; PAM sequence: CTT
agctgttttcttaaactcag

SEQ ID NO: 52828 - DNA, 20 bp, Artificial Sequence
  Description of Artificial Sequence: Synthetic oligonucleotide
  Target: SCNA; (-) strand; PAM type: YTN; PAM sequence: CTC
ttagctgttttcttaaactc

SEQ ID NO: 52829 - DNA, 20 bp, Artificial Sequence
  Description of Artificial Sequence: Synthetic oligonucleotide
  Target: SCNA; (-) strand; PAM type: YTN; PAM sequence: CTC
aacctcttagctgttttctt

SEQ ID NO: 52830 - DNA, 20 bp, Artificial Sequence
  Description of Artificial Sequence: Synthetic oligonucleotide
  Target: SCNA; (-) strand; PAM type: YTN; PAM sequence: TTC
tcaacctcttagctgttttc

SEQ ID NO: 52831 - DNA, 20 bp, Artificial Sequence
  Description of Artificial Sequence: Synthetic oligonucleotide
  Target: SCNA; (-) strand; PAM type: YTN; PAM sequence: TTT
ctcaacctcttagctgtttt

SEQ ID NO: 52832 - DNA, 20 bp, Artificial Sequence
  Description of Artificial Sequence: Synthetic oligonucleotide
  Target: SCNA; (-) strand; PAM type: YTN; PAM sequence: CTG
atttctcaacctcttagctg

SEQ ID NO: 52833 - DNA, 20 bp, Artificial Sequence
  Description of Artificial Sequence: Synthetic oligonucleotide
  Target: SCNA; (-) strand; PAM type: YTN; PAM sequence: CTC
tgatttctcaacctcttagc

SEQ ID NO: 52834 - DNA, 20 bp, Artificial Sequence
  Description of Artificial Sequence: Synthetic oligonucleotide
  Target: SCNA; (-) strand; PAM type: YTN; PAM sequence: TTG
ggcagccaactctgatttct

SEQ ID NO: 52835 - DNA, 20 bp, Artificial Sequence
  Description of Artificial Sequence: Synthetic oligonucleotide
  Target: SCNA; (-) strand; PAM type: YTN; PAM sequence: TTG
taagttgggcagccaactct

SEQ ID NO: 52836 - DNA, 20 bp, Artificial Sequence
  Description of Artificial Sequence: Synthetic oligonucleotide
  Target: SCNA; (-) strand; PAM type: YTN; PAM sequence: CTG
gtcagcaaggagaattgtaa

SEQ ID NO: 52837 - DNA, 20 bp, Artificial Sequence
  Description of Artificial Sequence: Synthetic oligonucleotide
  Target: SCNA; (-) strand; PAM type: YTN; PAM sequence: TTG
agaggcagccaaaagatgct

SEQ ID NO: 52838 - DNA, 20 bp, Artificial Sequence
  Description of Artificial Sequence: Synthetic oligonucleotide
  Target: SCNA; (-) strand; PAM type: YTN; PAM sequence: TTT
gagaggcagccaaaagatgc

SEQ ID NO: 52839 - DNA, 20 bp, Artificial Sequence
  Description of Artificial Sequence: Synthetic oligonucleotide
  Target: SCNA; (-) strand; PAM type: YTN; PAM sequence: TTT
tgagaggcagccaaaagatg

SEQ ID NO: 52840 - DNA, 20 bp, Artificial Sequence
  Description of Artificial Sequence: Synthetic oligonucleotide
  Target: SCNA; (-) strand; PAM type: YTN; PAM sequence: TTA
ttttgagaggcagccaaaag

SEQ ID NO: 52841 - DNA, 20 bp, Artificial Sequence
  Description of Artificial Sequence: Synthetic oligonucleotide
  Target: SCNA; (-) strand; PAM type: YTN; PAM sequence: CTG
ttattttgagaggcagccaa

SEQ ID NO: 52842 - DNA, 20 bp, Artificial Sequence
  Description of Artificial Sequence: Synthetic oligonucleotide
  Target: SCNA; (-) strand; PAM type: YTN; PAM sequence: TTA
tcctgttattttgagaggca

SEQ ID NO: 52843 - DNA, 20 bp, Artificial Sequence
  Description of Artificial Sequence: Synthetic oligonucleotide
  Target: SCNA; (-) strand; PAM type: YTN; PAM sequence: CTT
atcctgttattttgagaggc

SEQ ID NO: 52844 - DNA, 20 bp, Artificial Sequence
  Description of Artificial Sequence: Synthetic oligonucleotide
  Target: SCNA; (-) strand; PAM type: YTN; PAM sequence: TTG
tgtgccttatcctgttattt

SEQ ID NO: 52845 - DNA, 20 bp, Artificial Sequence
  Description of Artificial Sequence: Synthetic oligonucleotide
  Target: SCNA; (-) strand; PAM type: YTN; PAM sequence: TTT
gtgtgccttatcctgttatt

SEQ ID NO: 52846 - DNA, 20 bp, Artificial Sequence
  Description of Artificial Sequence: Synthetic oligonucleotide
  Target: SCNA; (-) strand; PAM type: YTN; PAM sequence: TTT
tgtgtgccttatcctgttat

SEQ ID NO: 52847 - DNA, 20 bp, Artificial Sequence
  Description of Artificial Sequence: Synthetic oligonucleotide
  Target: SCNA; (-) strand; PAM type: YTN; PAM sequence: TTC
agttttgtgtgccttatcct

SEQ ID NO: 52848 - DNA, 20 bp, Artificial Sequence
  Description of Artificial Sequence: Synthetic oligonucleotide
  Target: SCNA; (-) strand; PAM type: YTN; PAM sequence: TTA
atccaagtgaagaattcagt

SEQ ID NO: 52849 - DNA, 20 bp, Artificial Sequence
  Description of Artificial Sequence: Synthetic oligonucleotide
  Target: SCNA; (-) strand; PAM type: YTN; PAM sequence: TTT
aatccaagtgaagaattcag

SEQ ID NO: 52850 - DNA, 20 bp, Artificial Sequence
  Description of Artificial Sequence: Synthetic oligonucleotide
  Target: SCNA; (-) strand; PAM type: YTN; PAM sequence: TTC
agatttaatccaagtgaaga

SEQ ID NO: 52851 - DNA, 20 bp, Artificial Sequence
  Description of Artificial Sequence: Synthetic oligonucleotide
  Target: SCNA; (-) strand; PAM type: YTN; PAM sequence: TTA
taagcaaaggaataagagaa

SEQ ID NO: 52852 - DNA, 20 bp, Artificial Sequence
  Description of Artificial Sequence: Synthetic oligonucleotide
  Target: SCNA; (-) strand; PAM type: YTN; PAM sequence: TTT
ataagcaaaggaataagaga

SEQ ID NO: 52853 - DNA, 20 bp, Artificial Sequence
  Description of Artificial Sequence: Synthetic oligonucleotide
  Target: SCNA; (-) strand; PAM type: YTN; PAM sequence: TTT
tataagcaaaggaataagag

SEQ ID NO: 52854 - DNA, 20 bp, Artificial Sequence
  Description of Artificial Sequence: Synthetic oligonucleotide
  Target: SCNA; (-) strand; PAM type: YTN; PAM sequence: CTA
ggaagatattttataagcaa

SEQ ID NO: 52855 - DNA, 20 bp, Artificial Sequence
  Description of Artificial Sequence: Synthetic oligonucleotide
  Target: SCNA; (-) strand; PAM type: YTN; PAM sequence: CTC
aagcctaggaagatatttta

SEQ ID NO: 52856 - DNA, 20 bp, Artificial Sequence
  Description of Artificial Sequence: Synthetic oligonucleotide
  Target: SCNA; (-) strand; PAM type: YTN; PAM sequence: CTG
tctcaagcctaggaagatat

SEQ ID NO: 52857 - DNA, 20 bp, Artificial Sequence
  Description of Artificial Sequence: Synthetic oligonucleotide
  Target: SCNA; (-) strand; PAM type: YTN; PAM sequence: CTA
gactgtctcaagcctaggaa

SEQ ID NO: 52858 - DNA, 20 bp, Artificial Sequence
  Description of Artificial Sequence: Synthetic oligonucleotide
  Target: SCNA; (-) strand; PAM type: YTN; PAM sequence: CTC
tagactgtctcaagcctagg

SEQ ID NO: 52859 - DNA, 20 bp, Artificial Sequence
  Description of Artificial Sequence: Synthetic oligonucleotide
  Target: SCNA; (-) strand; PAM type: YTN; PAM sequence: CTC
aggtggtctctagactgtct

SEQ ID NO: 52860 - DNA, 20 bp, Artificial Sequence
  Description of Artificial Sequence: Synthetic oligonucleotide
  Target: SCNA; (-) strand; PAM type: YTN; PAM sequence: TTC
tcaggtggtctctagactgt

SEQ ID NO: 52861 - DNA, 20 bp, Artificial Sequence
  Description of Artificial Sequence: Synthetic oligonucleotide
  Target: SCNA; (-) strand; PAM type: YTN; PAM sequence: TTC
agtgttctcaggtggtctct

SEQ ID NO: 52862 - DNA, 20 bp, Artificial Sequence
  Description of Artificial Sequence: Synthetic oligonucleotide
  Target: SCNA; (-) strand; PAM type: YTN; PAM sequence: CTC
aaaaggaacattcagtgttc

SEQ ID NO: 52863 - DNA, 20 bp, Artificial Sequence
  Description of Artificial Sequence: Synthetic oligonucleotide
  Target: SCNA; (-) strand; PAM type: YTN; PAM sequence: CTG
gatactcaaaaggaacattc

SEQ ID NO: 52864 - DNA, 20 bp, Artificial Sequence
  Description of Artificial Sequence: Synthetic oligonucleotide
  Target: SCNA; (-) strand; PAM type: YTN; PAM sequence: CTA
ctggatactcaaaaggaaca

SEQ ID NO: 52865 - DNA, 20 bp, Artificial Sequence
  Description of Artificial Sequence: Synthetic oligonucleotide
  Target: SCNA; (-) strand; PAM type: YTN; PAM sequence: TTA
tgctactggatactcaaaag

SEQ ID NO: 52866 - DNA, 20 bp, Artificial Sequence
  Description of Artificial Sequence: Synthetic oligonucleotide
  Target: SCNA; (-) strand; PAM type: YTN; PAM sequence: TTG
acagtgtgagttatgctact

SEQ ID NO: 52867 - DNA, 20 bp, Artificial Sequence
  Description of Artificial Sequence: Synthetic oligonucleotide
  Target: SCNA; (-) strand; PAM type: YTN; PAM sequence: TTG
ttgacagtgtgagttatgct

SEQ ID NO: 52868 - DNA, 20 bp, Artificial Sequence
  Description of Artificial Sequence: Synthetic oligonucleotide
  Target: SCNA; (-) strand; PAM type: YTN; PAM sequence: CTT
gttgacagtgtgagttatgc

SEQ ID NO: 52869 - DNA, 20 bp, Artificial Sequence
  Description of Artificial Sequence: Synthetic oligonucleotide
  Target: SCNA; (-) strand; PAM type: YTN; PAM sequence: TTC
agcacacgtaagtaaggcct

SEQ ID NO: 52870 - DNA, 20 bp, Artificial Sequence
  Description of Artificial Sequence: Synthetic oligonucleotide
  Target: SCNA; (-) strand; PAM type: YTN; PAM sequence: TTG
tgataaaggatacaaaaata

SEQ ID NO: 52871 - DNA, 20 bp, Artificial Sequence
  Description of Artificial Sequence: Synthetic oligonucleotide
  Target: SCNA; (-) strand; PAM type: YTN; PAM sequence: TTT
gtgataaaggatacaaaaat

SEQ ID NO: 52872 - DNA, 20 bp, Artificial Sequence
  Description of Artificial Sequence: Synthetic oligonucleotide
  Target: SCNA; (-) strand; PAM type: YTN; PAM sequence: TTG
gtttgtgataaaggatacaa

SEQ ID NO: 52873 - DNA, 20 bp, Artificial Sequence
  Description of Artificial Sequence: Synthetic oligonucleotide
  Target: SCNA; (-) strand; PAM type: YTN; PAM sequence: TTT
ggtttgtgataaaggataca

SEQ ID NO: 52874 - DNA, 20 bp, Artificial Sequence
  Description of Artificial Sequence: Synthetic oligonucleotide
  Target: SCNA; (-) strand; PAM type: YTN; PAM sequence: CTA
agcagtgtttggtttgtgat

SEQ ID NO: 52875 - DNA, 20 bp, Artificial Sequence
  Description of Artificial Sequence: Synthetic oligonucleotide
  Target: SCNA; (-) strand; PAM type: YTN; PAM sequence: TTA
taactaagcagtgtttggtt

SEQ ID NO: 52876 - DNA, 20 bp, Artificial Sequence
  Description of Artificial Sequence: Synthetic oligonucleotide
  Target: SCNA; (-) strand; PAM type: YTN; PAM sequence: TTT
ataactaagcagtgtttggt

SEQ ID NO: 52877 - DNA, 20 bp, Artificial Sequence
  Description of Artificial Sequence: Synthetic oligonucleotide
  Target: SCNA; (-) strand; PAM type: YTN; PAM sequence: TTT
tataactaagcagtgtttgg

SEQ ID NO: 52878 - DNA, 20 bp, Artificial Sequence
  Description of Artificial Sequence: Synthetic oligonucleotide
  Target: SCNA; (-) strand; PAM type: YTN; PAM sequence: TTA
cacatatattttataactaa

SEQ ID NO: 52879 - DNA, 20 bp, Artificial Sequence
  Description of Artificial Sequence: Synthetic oligonucleotide
  Target: SCNA; (-) strand; PAM type: YTN; PAM sequence: CTT
acacatatattttataacta

SEQ ID NO: 52880 - DNA, 20 bp, Artificial Sequence
  Description of Artificial Sequence: Synthetic oligonucleotide
  Target: SCNA; (-) strand; PAM type: YTN; PAM sequence: TTG
acttacacatatattttata

SEQ ID NO: 52881 - DNA, 20 bp, Artificial Sequence
  Description of Artificial Sequence: Synthetic oligonucleotide
  Target: SCNA; (-) strand; PAM type: YTN; PAM sequence: TTA
tgttgacttacacatatatt

SEQ ID NO: 52882 - DNA, 20 bp, Artificial Sequence
  Description of Artificial Sequence: Synthetic oligonucleotide
  Target: SCNA; (-) strand; PAM type: YTN; PAM sequence: TTG
acaaaaaaaattatgttgac

SEQ ID NO: 52883 - DNA, 20 bp, Artificial Sequence
  Description of Artificial Sequence: Synthetic oligonucleotide
  Target: SCNA; (-) strand; PAM type: YTN; PAM sequence: TTT
gacaaaaaaaattatgttga

SEQ ID NO: 52884 - DNA, 20 bp, Artificial Sequence
  Description of Artificial Sequence: Synthetic oligonucleotide
  Target: SCNA; (-) strand; PAM type: YTN; PAM sequence: CTT
tgacaaaaaaaattatgttg

SEQ ID NO: 52885 - DNA, 20 bp, Artificial Sequence
  Description of Artificial Sequence: Synthetic oligonucleotide
  Target: SCNA; (-) strand; PAM type: YTN; PAM sequence: TTG
ctttgacaaaaaaaattatg

SEQ ID NO: 52886 - DNA, 20 bp, Artificial Sequence
  Description of Artificial Sequence: Synthetic oligonucleotide
  Target: SCNA; (-) strand; PAM type: YTN; PAM sequence: TTT
gctttgacaaaaaaaattat

SEQ ID NO: 52887 - DNA, 20 bp, Artificial Sequence
  Description of Artificial Sequence: Synthetic oligonucleotide
  Target: SCNA; (-) strand; PAM type: YTN; PAM sequence: CTT
tgctttgacaaaaaaaatta

SEQ ID NO: 52888 - DNA, 20 bp, Artificial Sequence
  Description of Artificial Sequence: Synthetic oligonucleotide
  Target: SCNA; (-) strand; PAM type: YTN; PAM sequence: TTG
gagaaaaatctttgctttga

SEQ ID NO: 52889 - DNA, 20 bp, Artificial Sequence
  Description of Artificial Sequence: Synthetic oligonucleotide
  Target: SCNA; (-) strand; PAM type: YTN; PAM sequence: TTT
ggagaaaaatctttgctttg

SEQ ID NO: 52890 - DNA, 20 bp, Artificial Sequence
  Description of Artificial Sequence: Synthetic oligonucleotide
  Target: SCNA; (-) strand; PAM type: YTN; PAM sequence: TTT
tggagaaaaatctttgcttt

SEQ ID NO: 52891 - DNA, 20 bp, Artificial Sequence
  Description of Artificial Sequence: Synthetic oligonucleotide
  Target: SCNA; (-) strand; PAM type: YTN; PAM sequence: CTA
tattttggagaaaaatcttt

SEQ ID NO: 52892 - DNA, 20 bp, Artificial Sequence
  Description of Artificial Sequence: Synthetic oligonucleotide
  Target: SCNA; (-) strand; PAM type: YTN; PAM sequence: CTG
tagctatattttggagaaaa

SEQ ID NO: 52893 - DNA, 20 bp, Artificial Sequence
  Description of Artificial Sequence: Synthetic oligonucleotide
  Target: SCNA; (-) strand; PAM type: YTN; PAM sequence: TTC
tgtagctatattttggagaa

SEQ ID NO: 52894 - DNA, 20 bp, Artificial Sequence
  Description of Artificial Sequence: Synthetic oligonucleotide
  Target: SCNA; (-) strand; PAM type: YTN; PAM sequence: CTT
ctgtagctatattttggaga

SEQ ID NO: 52895 - DNA, 20 bp, Artificial Sequence
  Description of Artificial Sequence: Synthetic oligonucleotide
  Target: SCNA; (-) strand; PAM type: YTN; PAM sequence: TTC
ttctgtagctatattttgga

SEQ ID NO: 52896 - DNA, 20 bp, Artificial Sequence
  Description of Artificial Sequence: Synthetic oligonucleotide
  Target: SCNA; (-) strand; PAM type: YTN; PAM sequence: TTT
cttctgtagctatattttgg

SEQ ID NO: 52897 - DNA, 20 bp, Artificial Sequence
  Description of Artificial Sequence: Synthetic oligonucleotide
  Target: SCNA; (-) strand; PAM type: YTN; PAM sequence: TTT
tcttctgtagctatattttg

SEQ ID NO: 52898 - DNA, 20 bp, Artificial Sequence
  Description of Artificial Sequence: Synthetic oligonucleotide
  Target: SCNA; (-) strand; PAM type: YTN; PAM sequence: CTT
ttcttctgtagctatatttt

SEQ ID NO: 52899 - DNA, 20 bp, Artificial Sequence
  Description of Artificial Sequence: Synthetic oligonucleotide
  Target: SCNA; (-) strand; PAM type: YTN; PAM sequence: TTA
taagccccttttcttctgta

SEQ ID NO: 52900 - DNA, 20 bp, Artificial Sequence
  Description of Artificial Sequence: Synthetic oligonucleotide
  Target: SCNA; (-) strand; PAM type: YTN; PAM sequence: TTG
ttataagccccttttcttct

SEQ ID NO: 52901 - DNA, 20 bp, Artificial Sequence
  Description of Artificial Sequence: Synthetic oligonucleotide
  Target: SCNA; (-) strand; PAM type: YTN; PAM sequence: CTT
gttataagccccttttcttc

SEQ ID NO: 52902 - DNA, 20 bp, Artificial Sequence
  Description of Artificial Sequence: Synthetic oligonucleotide
  Target: SCNA; (-) strand; PAM type: YTN; PAM sequence: CTA
tacacttgttataagcccct

SEQ ID NO: 52903 - DNA, 20 bp, Artificial Sequence
  Description of Artificial Sequence: Synthetic oligonucleotide
  Target: SCNA; (-) strand; PAM type: YTN; PAM sequence: CTG
aatgtgtactatacacttgt

SEQ ID NO: 52904 - DNA, 20 bp, Artificial Sequence
  Description of Artificial Sequence: Synthetic oligonucleotide
  Target: SCNA; (-) strand; PAM type: YTN; PAM sequence: TTC
tgaatgtgtactatacactt

SEQ ID NO: 52905 - DNA, 20 bp, Artificial Sequence
  Description of Artificial Sequence: Synthetic oligonucleotide
  Target: SCNA; (-) strand; PAM type: YTN; PAM sequence: TTT
ctgaatgtgtactatacact

SEQ ID NO: 52906 - DNA, 20 bp, Artificial Sequence
  Description of Artificial Sequence: Synthetic oligonucleotide
  Target: SCNA; (-) strand; PAM type: YTN; PAM sequence: CTG
aaacatccatgaaacaaaat

SEQ ID NO: 52907 - DNA, 20 bp, Artificial Sequence
  Description of Artificial Sequence: Synthetic oligonucleotide
  Target: SCNA; (-) strand; PAM type: YTN; PAM sequence: TTA
ctgaaacatccatgaaacaa

SEQ ID NO: 52908 - DNA, 20 bp, Artificial Sequence
  Description of Artificial Sequence: Synthetic oligonucleotide
  Target: SCNA; (-) strand; PAM type: YTN; PAM sequence: TTT
actgaaacatccatgaaaca

SEQ ID NO: 52909 - DNA, 20 bp, Artificial Sequence
  Description of Artificial Sequence: Synthetic oligonucleotide
  Target: SCNA; (-) strand; PAM type: YTN; PAM sequence: CTA
catagaaatgaagcatttac

SEQ ID NO: 52910 - DNA, 20 bp, Artificial Sequence
  Description of Artificial Sequence: Synthetic oligonucleotide
  Target: SCNA; (-) strand; PAM type: YTN; PAM sequence: CTC
ctacatagaaatgaagcatt

SEQ ID NO: 52911 - DNA, 20 bp, Artificial Sequence
  Description of Artificial Sequence: Synthetic oligonucleotide
  Target: SCNA; (-) strand; PAM type: YTN; PAM sequence: TTA
tacctcctacatagaaatga

SEQ ID NO: 52912 - DNA, 20 bp, Artificial Sequence
  Description of Artificial Sequence: Synthetic oligonucleotide
  Target: SCNA; (-) strand; PAM type: YTN; PAM sequence: CTT
atacctcctacatagaaatg

SEQ ID NO: 52913 - DNA, 20 bp, Artificial Sequence
  Description of Artificial Sequence: Synthetic oligonucleotide
  Target: SCNA; (-) strand; PAM type: YTN; PAM sequence: TTA
gcaggaatcttatacctcct

SEQ ID NO: 52914 - DNA, 20 bp, Artificial Sequence
  Description of Artificial Sequence: Synthetic oligonucleotide
  Target: SCNA; (-) strand; PAM type: YTN; PAM sequence: TTT
agcaggaatcttatacctcc

SEQ ID NO: 52915 - DNA, 20 bp, Artificial Sequence
  Description of Artificial Sequence: Synthetic oligonucleotide
  Target: SCNA; (-) strand; PAM type: YTN; PAM sequence: TTT
tagcaggaatcttatacctc

SEQ ID NO: 52916 - DNA, 20 bp, Artificial Sequence
  Description of Artificial Sequence: Synthetic oligonucleotide
  Target: SCNA; (-) strand; PAM type: YTN; PAM sequence: TTT
ttagcaggaatcttatacct

SEQ ID NO: 52917 - DNA, 20 bp, Artificial Sequence
  Description of Artificial Sequence: Synthetic oligonucleotide
  Target: SCNA; (-) strand; PAM type: YTN; PAM sequence: TTC
agggaagggaatgtattttt

SEQ ID NO: 52918 - DNA, 20 bp, Artificial Sequence
  Description of Artificial Sequence: Synthetic oligonucleotide
  Target: SCNA; (-) strand; PAM type: YTN; PAM sequence: TTG
tgaatattcagggaagggaa

SEQ ID NO: 52919 - DNA, 20 bp, Artificial Sequence
  Description of Artificial Sequence: Synthetic oligonucleotide
  Target: SCNA; (-) strand; PAM type: YTN; PAM sequence: CTA
ttgtgaatattcagggaagg

SEQ ID NO: 52920 - DNA, 20 bp, Artificial Sequence
  Description of Artificial Sequence: Synthetic oligonucleotide
  Target: SCNA; (-) strand; PAM type: YTN; PAM sequence: TTG
gcaagctattgtgaatattc

SEQ ID NO: 52921 - DNA, 20 bp, Artificial Sequence
  Description of Artificial Sequence: Synthetic oligonucleotide
  Target: SCNA; (-) strand; PAM type: YTN; PAM sequence: TTT
ggcaagctattgtgaatatt

SEQ ID NO: 52922 - DNA, 20 bp, Artificial Sequence
  Description of Artificial Sequence: Synthetic oligonucleotide
  Target: SCNA; (-) strand; PAM type: YTN; PAM sequence: TTT
tggcaagctattgtgaatat

SEQ ID NO: 52923 - DNA, 20 bp, Artificial Sequence
  Description of Artificial Sequence: Synthetic oligonucleotide
  Target: SCNA; (-) strand; PAM type: YTN; PAM sequence: TTT
ttggcaagctattgtgaata

SEQ ID NO: 52924 - DNA, 20 bp, Artificial Sequence
  Description of Artificial Sequence: Synthetic oligonucleotide
  Target: SCNA; (-) strand; PAM type: YTN; PAM sequence: TTG
tgagaatttttggcaagcta

SEQ ID NO: 52925 - DNA, 20 bp, Artificial Sequence
  Description of Artificial Sequence: Synthetic oligonucleotide
  Target: SCNA; (-) strand; PAM type: YTN; PAM sequence: TTT
gtgagaatttttggcaagct

SEQ ID NO: 52926 - DNA, 20 bp, Artificial Sequence
  Description of Artificial Sequence: Synthetic oligonucleotide
  Target: SCNA; (-) strand; PAM type: YTN; PAM sequence: TTC
atttgtgagaatttttggca

SEQ ID NO: 52927 - DNA, 20 bp, Artificial Sequence
  Description of Artificial Sequence: Synthetic oligonucleotide
  Target: SCNA; (-) strand; PAM type: YTN; PAM sequence: TTA
ttcatttgtgagaatttttg

SEQ ID NO: 52928 - DNA, 20 bp, Artificial Sequence
  Description of Artificial Sequence: Synthetic oligonucleotide
  Target: SCNA; (-) strand; PAM type: YTN; PAM sequence: TTT
attcatttgtgagaattttt

SEQ ID NO: 52929 - DNA, 20 bp, Artificial Sequence
  Description of Artificial Sequence: Synthetic oligonucleotide
  Target: SCNA; (-) strand; PAM type: YTN; PAM sequence: CTT
tattcatttgtgagaatttt

SEQ ID NO: 52930 - DNA, 20 bp, Artificial Sequence
  Description of Artificial Sequence: Synthetic oligonucleotide
  Target: SCNA; (-) strand; PAM type: YTN; PAM sequence: CTG
tctttattcatttgtgagaa

SEQ ID NO: 52931 - DNA, 20 bp, Artificial Sequence
  Description of Artificial Sequence: Synthetic oligonucleotide
  Target: SCNA; (-) strand; PAM type: YTN; PAM sequence: TTC
tgtctttattcatttgtgag

SEQ ID NO: 52932 - DNA, 20 bp, Artificial Sequence
  Description of Artificial Sequence: Synthetic oligonucleotide
  Target: SCNA; (-) strand; PAM type: YTN; PAM sequence: TTA
atcagttctgtctttattca

SEQ ID NO: 52933 - DNA, 20 bp, Artificial Sequence
  Description of Artificial Sequence: Synthetic oligonucleotide
  Target: SCNA; (-) strand; PAM type: YTN; PAM sequence: TTA
atacagttaatcagttctgt

SEQ ID NO: 52934 - DNA, 20 bp, Artificial Sequence
  Description of Artificial Sequence: Synthetic oligonucleotide
  Target: SCNA; (-) strand; PAM type: YTN; PAM sequence: CTT
aatacagttaatcagttctg

SEQ ID NO: 52935 - DNA, 20 bp, Artificial Sequence
  Description of Artificial Sequence: Synthetic oligonucleotide
  Target: SCNA; (-) strand; PAM type: YTN; PAM sequence: TTA
agtaggacacttaatacagt

SEQ ID NO: 52936 - DNA, 20 bp, Artificial Sequence
  Description of Artificial Sequence: Synthetic oligonucleotide
  Target: SCNA; (-) strand; PAM type: YTN; PAM sequence: TTG
tattaagtaggacacttaat

SEQ ID NO: 52937 - DNA, 20 bp, Artificial Sequence
  Description of Artificial Sequence: Synthetic oligonucleotide
  Target: SCNA; (-) strand; PAM type: YTN; PAM sequence: TTA
ttgtattaagtaggacactt

SEQ ID NO: 52938 - DNA, 20 bp, Artificial Sequence
  Description of Artificial Sequence: Synthetic oligonucleotide
  Target: SCNA; (-) strand; PAM type: YTN; PAM sequence: TTA
ttattgtattaagtaggaca

SEQ ID NO: 52939 - DNA, 20 bp, Artificial Sequence
  Description of Artificial Sequence: Synthetic oligonucleotide
  Target: SCNA; (-) strand; PAM type: YTN; PAM sequence: CTG
aattattattgtattaagta

SEQ ID NO: 52940 - DNA, 20 bp, Artificial Sequence
  Description of Artificial Sequence: Synthetic oligonucleotide
  Target: SCNA; (-) strand; PAM type: YTN; PAM sequence: TTA
aaacctgaattattattgta

SEQ ID NO: 52941 - DNA, 20 bp, Artificial Sequence
  Description of Artificial Sequence: Synthetic oligonucleotide
  Target: SCNA; (-) strand; PAM type: YTN; PAM sequence: TTT
aaaacctgaattattattgt

SEQ ID NO: 52942 - DNA, 20 bp, Artificial Sequence
  Description of Artificial Sequence: Synthetic oligonucleotide
  Target: SCNA; (-) strand; PAM type: YTN; PAM sequence: TTA
tttaaaacctgaattattat

SEQ ID NO: 52943 - DNA, 20 bp, Artificial Sequence
  Description of Artificial Sequence: Synthetic oligonucleotide
  Target: SCNA; (-) strand; PAM type: YTN; PAM sequence: TTG
aaattatttaaaacctgaat

SEQ ID NO: 52944 - DNA, 20 bp, Artificial Sequence
  Description of Artificial Sequence: Synthetic oligonucleotide
  Target: SCNA; (-) strand; PAM type: YTN; PAM sequence: CTG
atgttgaaattatttaaaac

SEQ ID NO: 52945 - DNA, 20 bp, Artificial Sequence
  Description of Artificial Sequence: Synthetic oligonucleotide
  Target: SCNA; (-) strand; PAM type: YTN; PAM sequence: TTA
atataatgaactgatgttga

SEQ ID NO: 52946 - DNA, 20 bp, Artificial Sequence
  Description of Artificial Sequence: Synthetic oligonucleotide
  Target: SCNA; (-) strand; PAM type: YTN; PAM sequence: TTA
attaatataatgaactgatg

SEQ ID NO: 52947 - DNA, 20 bp, Artificial Sequence
  Description of Artificial Sequence: Synthetic oligonucleotide
  Target: SCNA; (-) strand; PAM type: YTN; PAM sequence: TTA
tgagattaattaatataatg

SEQ ID NO: 52948 - DNA, 20 bp, Artificial Sequence
  Description of Artificial Sequence: Synthetic oligonucleotide
  Target: SCNA; (-) strand; PAM type: YTN; PAM sequence: TTT
atgagattaattaatataat

SEQ ID NO: 52949 - DNA, 20 bp, Artificial Sequence
  Description of Artificial Sequence: Synthetic oligonucleotide
  Target: SCNA; (-) strand; PAM type: YTN; PAM sequence: TTT
tatgagattaattaatataa

SEQ ID NO: 52950 - DNA, 20 bp, Artificial Sequence
  Description of Artificial Sequence: Synthetic oligonucleotide
  Target: SCNA; (-) strand; PAM type: YTN; PAM sequence: TTT
ttatgagattaattaatata

SEQ ID NO: 52951 - DNA, 20 bp, Artificial Sequence
  Description of Artificial Sequence: Synthetic oligonucleotide
  Target: SCNA; (-) strand; PAM type: YTN; PAM sequence: TTG
ggaggtttttatgagattaa

SEQ ID NO: 52952 - DNA, 20 bp, Artificial Sequence
  Description of Artificial Sequence: Synthetic oligonucleotide
  Target: SCNA; (-) strand; PAM type: YTN; PAM sequence: TTA
attgggaggtttttatgaga

SEQ ID NO: 52953 - DNA, 20 bp, Artificial Sequence
  Description of Artificial Sequence: Synthetic oligonucleotide
  Target: SCNA; (-) strand; PAM type: YTN; PAM sequence: TTA
tacatagtacattaattggg

SEQ ID NO: 52954 - DNA, 20 bp, Artificial Sequence
  Description of Artificial Sequence: Synthetic oligonucleotide
  Target: SCNA; (-) strand; PAM type: YTN; PAM sequence: TTT
atacatagtacattaattgg

SEQ ID NO: 52955 - DNA, 20 bp, Artificial Sequence
  Description of Artificial Sequence: Synthetic oligonucleotide
  Target: SCNA; (-) strand; PAM type: YTN; PAM sequence: TTG
ataaaatttatacatagtac

SEQ ID NO: 52956 - DNA, 20 bp, Artificial Sequence
  Description of Artificial Sequence: Synthetic oligonucleotide
  Target: SCNA; (-) strand; PAM type: YTN; PAM sequence: CTT
gataaaatttatacatagta

SEQ ID NO: 52957 - DNA, 20 bp, Artificial Sequence
  Description of Artificial Sequence: Synthetic oligonucleotide
  Target: SCNA; (-) strand; PAM type: YTN; PAM sequence: TTC
atcaaagtacttgataaaat

SEQ ID NO: 52958 - DNA, 20 bp, Artificial Sequence
  Description of Artificial Sequence: Synthetic oligonucleotide
  Target: SCNA; (-) strand; PAM type: YTN; PAM sequence: TTA
attcatcaaagtacttgata

SEQ ID NO: 52959 - DNA, 20 bp, Artificial Sequence
  Description of Artificial Sequence: Synthetic oligonucleotide
  Target: SCNA; (-) strand; PAM type: YTN; PAM sequence: CTT
aattcatcaaagtacttgat

SEQ ID NO: 52960 - DNA, 20 bp, Artificial Sequence
  Description of Artificial Sequence: Synthetic oligonucleotide
  Target: SCNA; (-) strand; PAM type: YTN; PAM sequence: CTC
ttaattcatcaaagtacttg

SEQ ID NO: 52961 - DNA, 20 bp, Artificial Sequence
  Description of Artificial Sequence: Synthetic oligonucleotide
  Target: SCNA; (-) strand; PAM type: YTN; PAM sequence: TTC
ctcttaattcatcaaagtac

SEQ ID NO: 52962 - DNA, 20 bp, Artificial Sequence
  Description of Artificial Sequence: Synthetic oligonucleotide
  Target: SCNA; (-) strand; PAM type: YTN; PAM sequence: CTT
cctcttaattcatcaaagta

SEQ ID NO: 52963 - DNA, 20 bp, Artificial Sequence
  Description of Artificial Sequence: Synthetic oligonucleotide
  Target: SCNA; (-) strand; PAM type: YTN; PAM sequence: TTA
ccttcctcttaattcatcaa

SEQ ID NO: 52964 - DNA, 20 bp, Artificial Sequence
  Description of Artificial Sequence: Synthetic oligonucleotide
  Target: SCNA; (-) strand; PAM type: YTN; PAM sequence: TTT
accttcctcttaattcatca

SEQ ID NO: 52965 - DNA, 20 bp, Artificial Sequence
  Description of Artificial Sequence: Synthetic oligonucleotide
  Target: SCNA; (-) strand; PAM type: YTN; PAM sequence: CTT
taccttcctcttaattcatc

SEQ ID NO: 52966 - DNA, 20 bp, Artificial Sequence
  Description of Artificial Sequence: Synthetic oligonucleotide
  Target: SCNA; (-) strand; PAM type: YTN; PAM sequence: TTG
atgaaaacctttaccttcct

SEQ ID NO: 52967 - DNA, 20 bp, Artificial Sequence
  Description of Artificial Sequence: Synthetic oligonucleotide
  Target: SCNA; (-) strand; PAM type: YTN; PAM sequence: TTG
cagatattgatgaaaacctt

SEQ ID NO: 52968 - DNA, 20 bp, Artificial Sequence
  Description of Artificial Sequence: Synthetic oligonucleotide
  Target: SCNA; (-) strand; PAM type: YTN; PAM sequence: TTA
ttgcagatattgatgaaaac

SEQ ID NO: 52969 - DNA, 20 bp, Artificial Sequence
  Description of Artificial Sequence: Synthetic oligonucleotide
  Target: SCNA; (-) strand; PAM type: YTN; PAM sequence: TTA
ataatattattgcagatatt

SEQ ID NO: 52970 - DNA, 20 bp, Artificial Sequence
  Description of Artificial Sequence: Synthetic oligonucleotide
  Target: SCNA; (-) strand; PAM type: YTN; PAM sequence: TTT
aataatattattgcagatat

SEQ ID NO: 52971 - DNA, 20 bp, Artificial Sequence
  Description of Artificial Sequence: Synthetic oligonucleotide
  Target: SCNA; (-) strand; PAM type: YTN; PAM sequence: TTA
gcccaatttaataatattat

SEQ ID NO: 52972 - DNA, 20 bp, Artificial Sequence
  Description of Artificial Sequence: Synthetic oligonucleotide
  Target: SCNA; (-) strand; PAM type: YTN; PAM sequence: TTT
agcccaatttaataatatta

SEQ ID NO: 52973 - DNA, 20 bp, Artificial Sequence
  Description of Artificial Sequence: Synthetic oligonucleotide
  Target: SCNA; (-) strand; PAM type: YTN; PAM sequence: TTT
tagcccaatttaataatatt

SEQ ID NO: 52974 - DNA, 20 bp, Artificial Sequence
  Description of Artificial Sequence: Synthetic oligonucleotide
  Target: SCNA; (-) strand; PAM type: YTN; PAM sequence: CTT
ttagcccaatttaataatat

SEQ ID NO: 52975 - DNA, 20 bp, Artificial Sequence
  Description of Artificial Sequence: Synthetic oligonucleotide
  Target: SCNA; (-) strand; PAM type: YTN; PAM sequence: TTC
cttttagcccaatttaataa

SEQ ID NO: 52976 - DNA, 20 bp, Artificial Sequence
  Description of Artificial Sequence: Synthetic oligonucleotide
  Target: SCNA; (-) strand; PAM type: YTN; PAM sequence: TTG
gttccttttagcccaattta

SEQ ID NO: 52977 - DNA, 20 bp, Artificial Sequence
  Description of Artificial Sequence: Synthetic oligonucleotide
  Target: SCNA; (-) strand; PAM type: YTN; PAM sequence: CTT
ggttccttttagcccaattt

SEQ ID NO: 52978 - DNA, 20 bp, Artificial Sequence
  Description of Artificial Sequence: Synthetic oligonucleotide
  Target: SCNA; (-) strand; PAM type: YTN; PAM sequence: TTG
tcttggttccttttagccca

SEQ ID NO: 52979 - DNA, 20 bp, Artificial Sequence
  Description of Artificial Sequence: Synthetic oligonucleotide
  Target: SCNA; (-) strand; PAM type: YTN; PAM sequence: TTT
gtcttggttccttttagccc

SEQ ID NO: 52980 - DNA, 20 bp, Artificial Sequence
  Description of Artificial Sequence: Synthetic oligonucleotide
  Target: SCNA; (-) strand; PAM type: YTN; PAM sequence: TTC
atttgtcttggttcctttta

SEQ ID NO: 52981 - DNA, 20 bp, Artificial Sequence
  Description of Artificial Sequence: Synthetic oligonucleotide
  Target: SCNA; (-) strand; PAM type: YTN; PAM sequence: CTT
catttgtcttggttcctttt

SEQ ID NO: 52982 - DNA, 20 bp, Artificial Sequence
  Description of Artificial Sequence: Synthetic oligonucleotide
  Target: SCNA; (-) strand; PAM type: YTN; PAM sequence: TTA
tatatcttcatttgtcttgg

SEQ ID NO: 52983 - DNA, 20 bp, Artificial Sequence
  Description of Artificial Sequence: Synthetic oligonucleotide
  Target: SCNA; (-) strand; PAM type: YTN; PAM sequence: CTT
atatatcttcatttgtcttg

SEQ ID NO: 52984 - DNA, 20 bp, Artificial Sequence
  Description of Artificial Sequence: Synthetic oligonucleotide
  Target: SCNA; (-) strand; PAM type: YTN; PAM sequence: TTC
ttatatatcttcatttgtct

SEQ ID NO: 52985 - DNA, 20 bp, Artificial Sequence
  Description of Artificial Sequence: Synthetic oligonucleotide
  Target: SCNA; (-) strand; PAM type: YTN; PAM sequence: TTT
cttatatatcttcatttgtc

SEQ ID NO: 52986 - DNA, 20 bp, Artificial Sequence
  Description of Artificial Sequence: Synthetic oligonucleotide
  Target: SCNA; (-) strand; PAM type: YTN; PAM sequence: TTT
tcttatatatcttcatttgt

SEQ ID NO: 52987 - DNA, 20 bp, Artificial Sequence
  Description of Artificial Sequence: Synthetic oligonucleotide
  Target: SCNA; (-) strand; PAM type: YTN; PAM sequence: TTA
gttttcttatatatcttcat

SEQ ID NO: 52988 - DNA, 20 bp, Artificial Sequence
  Description of Artificial Sequence: Synthetic oligonucleotide
  Target: SCNA; (-) strand; PAM type: YTN; PAM sequence: CTA
aaataatgattagttttctt

SEQ ID NO: 52989 - DNA, 20 bp, Artificial Sequence
  Description of Artificial Sequence: Synthetic oligonucleotide
  Target: SCNA; (-) strand; PAM type: YTN; PAM sequence: TTA
gtctaaaataatgattagtt

SEQ ID NO: 52990 - DNA, 20 bp, Artificial Sequence
  Description of Artificial Sequence: Synthetic oligonucleotide
  Target: SCNA; (-) strand; PAM type: YTN; PAM sequence: TTT
agtctaaaataatgattagt

SEQ ID NO: 52991 - DNA, 20 bp, Artificial Sequence
  Description of Artificial Sequence: Synthetic oligonucleotide
  Target: SCNA; (-) strand; PAM type: YTN; PAM sequence: TTT
tagtctaaaataatgattag

SEQ ID NO: 52992 - DNA, 20 bp, Artificial Sequence
  Description of Artificial Sequence: Synthetic oligonucleotide
  Target: SCNA; (-) strand; PAM type: YTN; PAM sequence: CTG
ttttagtctaaaataatgat

SEQ ID NO: 52993 - DNA, 20 bp, Artificial Sequence
  Description of Artificial Sequence: Synthetic oligonucleotide
  Target: SCNA; (-) strand; PAM type: YTN; PAM sequence: TTC
ctgttttagtctaaaataat

SEQ ID NO: 52994 - DNA, 20 bp, Artificial Sequence
  Description of Artificial Sequence: Synthetic oligonucleotide
  Target: SCNA; (-) strand; PAM type: YTN; PAM sequence: TTT
cctgttttagtctaaaataa

SEQ ID NO: 52995 - DNA, 20 bp, Artificial Sequence
  Description of Artificial Sequence: Synthetic oligonucleotide
  Target: SCNA; (-) strand; PAM type: YTN; PAM sequence: TTT
tcctgttttagtctaaaata

SEQ ID NO: 52996 - DNA, 20 bp, Artificial Sequence
  Description of Artificial Sequence: Synthetic oligonucleotide
  Target: SCNA; (-) strand; PAM type: YTN; PAM sequence: CTT
ttcctgttttagtctaaaat

SEQ ID NO: 52997 - DNA, 20 bp, Artificial Sequence
  Description of Artificial Sequence: Synthetic oligonucleotide
  Target: SCNA; (-) strand; PAM type: YTN; PAM sequence: TTC
ttttcctgttttagtctaaa

SEQ ID NO: 52998 - DNA, 20 bp, Artificial Sequence
  Description of Artificial Sequence: Synthetic oligonucleotide
  Target: SCNA; (-) strand; PAM type: YTN; PAM sequence: CTA
tgttcttttcctgttttagt

SEQ ID NO: 52999 - DNA, 20 bp, Artificial Sequence
  Description of Artificial Sequence: Synthetic oligonucleotide
  Target: SCNA; (-) strand; PAM type: YTN; PAM sequence: CTA
gataactatgttcttttcct

SEQ ID NO: 53000 - DNA, 20 bp, Artificial Sequence
  Description of Artificial Sequence: Synthetic oligonucleotide
  Target: SCNA; (-) strand; PAM type: YTN; PAM sequence: CTA
aggagacagtgtcctagata

SEQ ID NO: 53001 - DNA, 20 bp, Artificial Sequence
  Description of Artificial Sequence: Synthetic oligonucleotide
  Target: SCNA; (-) strand; PAM type: YTN; PAM sequence: TTA
aaaactaaggagacagtgtc

SEQ ID NO: 53002 - DNA, 20 bp, Artificial Sequence
  Description of Artificial Sequence: Synthetic oligonucleotide
  Target: SCNA; (-) strand; PAM type: YTN; PAM sequence: CTG
gggaagaaacattaaaaact

SEQ ID NO: 53003 - DNA, 20 bp, Artificial Sequence
  Description of Artificial Sequence: Synthetic oligonucleotide
  Target: SCNA; (-) strand; PAM type: YTN; PAM sequence: TTC
aggcaaaagatgtgcaaacc

SEQ ID NO: 53004 - DNA, 20 bp, Artificial Sequence
  Description of Artificial Sequence: Synthetic oligonucleotide
  Target: SCNA; (-) strand; PAM type: YTN; PAM sequence: TTT
caggcaaaagatgtgcaaac

SEQ ID NO: 53005 - DNA, 20 bp, Artificial Sequence
  Description of Artificial Sequence: Synthetic oligonucleotide
  Target: SCNA; (-) strand; PAM type: YTN; PAM sequence: TTT
tcaggcaaaagatgtgcaaa

SEQ ID NO: 53006 - DNA, 20 bp, Artificial Sequence
  Description of Artificial Sequence: Synthetic oligonucleotide
  Target: SCNA; (-) strand; PAM type: YTN; PAM sequence: TTT
ttcaggcaaaagatgtgcaa

SEQ ID NO: 53007 - DNA, 20 bp, Artificial Sequence
  Description of Artificial Sequence: Synthetic oligonucleotide
  Target: SCNA; (-) strand; PAM type: YTN; PAM sequence: TTT
tttcaggcaaaagatgtgca

SEQ ID NO: 53008 - DNA, 20 bp, Artificial Sequence
  Description of Artificial Sequence: Synthetic oligonucleotide
  Target: SCNA; (-) strand; PAM type: YTN; PAM sequence: CTT
ttttcaggcaaaagatgtgc

SEQ ID NO: 53009 - DNA, 20 bp, Artificial Sequence
  Description of Artificial Sequence: Synthetic oligonucleotide
  Target: SCNA; (-) strand; PAM type: YTN; PAM sequence: TTC
ttttttcaggcaaaagatgt

SEQ ID NO: 53010 - DNA, 20 bp, Artificial Sequence
  Description of Artificial Sequence: Synthetic oligonucleotide
  Target: SCNA; (-) strand; PAM type: YTN; PAM sequence: TTG
tgtggtggaaataagttctt

SEQ ID NO: 53011 - DNA, 20 bp, Artificial Sequence
  Description of Artificial Sequence: Synthetic oligonucleotide
  Target: SCNA; (-) strand; PAM type: YTN; PAM sequence: CTT
gtgtggtggaaataagttct

SEQ ID NO: 53012 - DNA, 20 bp, Artificial Sequence
  Description of Artificial Sequence: Synthetic oligonucleotide
  Target: SCNA; (-) strand; PAM type: YTN; PAM sequence: TTA
atgtaacttgtgtggtggaa

SEQ ID NO: 53013 - DNA, 20 bp, Artificial Sequence
  Description of Artificial Sequence: Synthetic oligonucleotide
  Target: SCNA; (-) strand; PAM type: YTN; PAM sequence: TTT
aatgtaacttgtgtggtgga

SEQ ID NO: 53014 - DNA, 20 bp, Artificial Sequence
  Description of Artificial Sequence: Synthetic oligonucleotide
  Target: SCNA; (-) strand; PAM type: YTN; PAM sequence: CTA
aaagacgtatttaatgtaac

SEQ ID NO: 53015 - DNA, 20 bp, Artificial Sequence
  Description of Artificial Sequence: Synthetic oligonucleotide
  Target: SCNA; (-) strand; PAM type: YTN; PAM sequence: CTA
ggagctaaaagacgtattta

SEQ ID NO: 53016 - DNA, 20 bp, Artificial Sequence
  Description of Artificial Sequence: Synthetic oligonucleotide
  Target: SCNA; (-) strand; PAM type: YTN; PAM sequence: CTC
cctaggagctaaaagacgta

SEQ ID NO: 53017 - DNA, 20 bp, Artificial Sequence
  Description of Artificial Sequence: Synthetic oligonucleotide
  Target: SCNA; (-) strand; PAM type: YTN; PAM sequence: TTC
agctccctaggagctaaaag

SEQ ID NO: 53018 - DNA, 20 bp, Artificial Sequence
  Description of Artificial Sequence: Synthetic oligonucleotide
  Target: SCNA; (-) strand; PAM type: YTN; PAM sequence: TTT
cagctccctaggagctaaaa

SEQ ID NO: 53019 - DNA, 20 bp, Artificial Sequence
  Description of Artificial Sequence: Synthetic oligonucleotide
  Target: SCNA; (-) strand; PAM type: YTN; PAM sequence: CTT
tcagctccctaggagctaaa

SEQ ID NO: 53020 - DNA, 20 bp, Artificial Sequence
  Description of Artificial Sequence: Synthetic oligonucleotide
  Target: SCNA; (-) strand; PAM type: YTN; PAM sequence: TTG
cctttcagctccctaggagc

SEQ ID NO: 53021 - DNA, 20 bp, Artificial Sequence
  Description of Artificial Sequence: Synthetic oligonucleotide
  Target: SCNA; (-) strand; PAM type: YTN; PAM sequence: CTT
gcctttcagctccctaggag

SEQ ID NO: 53022 - DNA, 20 bp, Artificial Sequence
  Description of Artificial Sequence: Synthetic oligonucleotide
  Target: SCNA; (-) strand; PAM type: YTN; PAM sequence: TTG
gacttgcctttcagctccct

SEQ ID NO: 53023 - DNA, 20 bp, Artificial Sequence
  Description of Artificial Sequence: Synthetic oligonucleotide
  Target: SCNA; (-) strand; PAM type: YTN; PAM sequence: TTT
ggacttgcctttcagctccc

SEQ ID NO: 53024 - DNA, 20 bp, Artificial Sequence
  Description of Artificial Sequence: Synthetic oligonucleotide
  Target: SCNA; (-) strand; PAM type: YTN; PAM sequence: TTT
tggacttgcctttcagctcc

SEQ ID NO: 53025 - DNA, 20 bp, Artificial Sequence
  Description of Artificial Sequence: Synthetic oligonucleotide
  Target: SCNA; (-) strand; PAM type: YTN; PAM sequence: TTC
attttggacttgcctttcag

SEQ ID NO: 53026 - DNA, 20 bp, Artificial Sequence
  Description of Artificial Sequence: Synthetic oligonucleotide
  Target: SCNA; (-) strand; PAM type: YTN; PAM sequence: TTC
atgacataacgaataaaaaa

SEQ ID NO: 53027 - DNA, 20 bp, Artificial Sequence
  Description of Artificial Sequence: Synthetic oligonucleotide
  Target: SCNA; (-) strand; PAM type: YTN; PAM sequence: TTT
catgacataacgaataaaaa

SEQ ID NO: 53028 - DNA, 20 bp, Artificial Sequence
  Description of Artificial Sequence: Synthetic oligonucleotide
  Target: SCNA; (-) strand; PAM type: YTN; PAM sequence: TTA
tagtttcatgacataacgaa

SEQ ID NO: 53029 - DNA, 20 bp, Artificial Sequence
  Description of Artificial Sequence: Synthetic oligonucleotide
  Target: SCNA; (-) strand; PAM type: YTN; PAM sequence: TTA
ataatgcagtgttatagttt

SEQ ID NO: 53030 - DNA, 20 bp, Artificial Sequence
  Description of Artificial Sequence: Synthetic oligonucleotide
  Target: SCNA; (-) strand; PAM type: YTN; PAM sequence: TTA
gaggtgtattaataatgcag

SEQ ID NO: 53031 - DNA, 20 bp, Artificial Sequence
  Description of Artificial Sequence: Synthetic oligonucleotide
  Target: SCNA; (-) strand; PAM type: YTN; PAM sequence: TTG
attagaggtgtattaataat

SEQ ID NO: 53032 - DNA, 20 bp, Artificial Sequence
  Description of Artificial Sequence: Synthetic oligonucleotide
  Target: SCNA; (-) strand; PAM type: YTN; PAM sequence: TTA
ttgattagaggtgtattaat

SEQ ID NO: 53033 - DNA, 20 bp, Artificial Sequence
  Description of Artificial Sequence: Synthetic oligonucleotide
  Target: SCNA; (-) strand; PAM type: YTN; PAM sequence: TTT
attgattagaggtgtattaa

SEQ ID NO: 53034 - DNA, 20 bp, Artificial Sequence
  Description of Artificial Sequence: Synthetic oligonucleotide
  Target: SCNA; (-) strand; PAM type: YTN; PAM sequence: CTT
tattgattagaggtgtatta

SEQ ID NO: 53035 - DNA, 20 bp, Artificial Sequence
  Description of Artificial Sequence: Synthetic oligonucleotide
  Target: SCNA; (-) strand; PAM type: YTN; PAM sequence: TTA
ggctttattgattagaggtg

SEQ ID NO: 53036 - DNA, 20 bp, Artificial Sequence
  Description of Artificial Sequence: Synthetic oligonucleotide
  Target: SCNA; (-) strand; PAM type: YTN; PAM sequence: TTT
aggctttattgattagaggt

SEQ ID NO: 53037 - DNA, 20 bp, Artificial Sequence
  Description of Artificial Sequence: Synthetic oligonucleotide
  Target: SCNA; (-) strand; PAM type: YTN; PAM sequence: TTT
taggctttattgattagagg

SEQ ID NO: 53038 - DNA, 20 bp, Artificial Sequence
  Description of Artificial Sequence: Synthetic oligonucleotide
  Target: SCNA; (-) strand; PAM type: YTN; PAM sequence: TTT
ttaggctttattgattagag

SEQ ID NO: 53039 - DNA, 20 bp, Artificial Sequence
  Description of Artificial Sequence: Synthetic oligonucleotide
  Target: SCNA; (-) strand; PAM type: YTN; PAM sequence: TTG
ggaatggatttttaggcttt

SEQ ID NO: 53040 - DNA, 20 bp, Artificial Sequence
  Description of Artificial Sequence: Synthetic oligonucleotide
  Target: SCNA; (-) strand; PAM type: YTN; PAM sequence: CTT
gggaatggatttttaggctt

SEQ ID NO: 53041 - DNA, 20 bp, Artificial Sequence
  Description of Artificial Sequence: Synthetic oligonucleotide
  Target: SCNA; (-) strand; PAM type: YTN; PAM sequence: CTC
ttgggaatggatttttaggc

SEQ ID NO: 53042 - DNA, 20 bp, Artificial Sequence
  Description of Artificial Sequence: Synthetic oligonucleotide
  Target: SCNA; (-) strand; PAM type: YTN; PAM sequence: CTG
ggtctcttgggaatggattt

SEQ ID NO: 53043 - DNA, 20 bp, Artificial Sequence
  Description of Artificial Sequence: Synthetic oligonucleotide
  Target: SCNA; (-) strand; PAM type: YTN; PAM sequence: CTG
gtagagaaatctgggtctct

SEQ ID NO: 53044 - DNA, 20 bp, Artificial Sequence
  Description of Artificial Sequence: Synthetic oligonucleotide
  Target: SCNA; (-) strand; PAM type: YTN; PAM sequence: CTA
gaactggtagagaaatctgg

SEQ ID NO: 53045 - DNA, 20 bp, Artificial Sequence
  Description of Artificial Sequence: Synthetic oligonucleotide
  Target: SCNA; (-) strand; PAM type: YTN; PAM sequence: CTA
gtacaactagaactggtaga

SEQ ID NO: 53046 - DNA, 20 bp, Artificial Sequence
  Description of Artificial Sequence: Synthetic oligonucleotide
  Target: SCNA; (-) strand; PAM type: YTN; PAM sequence: CTG
agaataactagtacaactag

SEQ ID NO: 53047 - DNA, 20 bp, Artificial Sequence
  Description of Artificial Sequence: Synthetic oligonucleotide
  Target: SCNA; (-) strand; PAM type: YTN; PAM sequence: TTA
ccgctgagaataactagtac

SEQ ID NO: 53048 - DNA, 20 bp, Artificial Sequence
  Description of Artificial Sequence: Synthetic oligonucleotide
  Target: SCNA; (-) strand; PAM type: YTN; PAM sequence: CTT
accgctgagaataactagta

SEQ ID NO: 53049 - DNA, 20 bp, Artificial Sequence
  Description of Artificial Sequence: Synthetic oligonucleotide
  Target: SCNA; (-) strand; PAM type: YTN; PAM sequence: CTA
ggaaaacttaccgctgagaa

SEQ ID NO: 53050 - DNA, 20 bp, Artificial Sequence
  Description of Artificial Sequence: Synthetic oligonucleotide
  Target: SCNA; (-) strand; PAM type: YTN; PAM sequence: TTA
agaactaggaaaacttaccg

SEQ ID NO: 53051 - DNA, 20 bp, Artificial Sequence
  Description of Artificial Sequence: Synthetic oligonucleotide
  Target: SCNA; (-) strand; PAM type: YTN; PAM sequence: TTA
atattaagaactaggaaaac

SEQ ID NO: 53052 - DNA, 20 bp, Artificial Sequence
  Description of Artificial Sequence: Synthetic oligonucleotide
  Target: SCNA; (-) strand; PAM type: YTN; PAM sequence: TTT
aatattaagaactaggaaaa

SEQ ID NO: 53053 - DNA, 20 bp, Artificial Sequence
  Description of Artificial Sequence: Synthetic oligonucleotide
  Target: SCNA; (-) strand; PAM type: YTN; PAM sequence: TTT
taatattaagaactaggaaa

SEQ ID NO: 53054 - DNA, 20 bp, Artificial Sequence
  Description of Artificial Sequence: Synthetic oligonucleotide
  Target: SCNA; (-) strand; PAM type: YTN; PAM sequence: CTC
attttaatattaagaactag

SEQ ID NO: 53055 - DNA, 20 bp, Artificial Sequence
  Description of Artificial Sequence: Synthetic oligonucleotide
  Target: SCNA; (-) strand; PAM type: YTN; PAM sequence: CTC
tcattttaatattaagaact

SEQ ID NO: 53056 - DNA, 20 bp, Artificial Sequence
  Description of Artificial Sequence: Synthetic oligonucleotide
  Target: SCNA; (-) strand; PAM type: YTN; PAM sequence: CTG
gacctctcattttaatatta

SEQ ID NO: 53057 - DNA, 20 bp, Artificial Sequence
  Description of Artificial Sequence: Synthetic oligonucleotide
  Target: SCNA; (-) strand; PAM type: YTN; PAM sequence: CTC
tggacctctcattttaatat

SEQ ID NO: 53058 - DNA, 20 bp, Artificial Sequence
  Description of Artificial Sequence: Synthetic oligonucleotide
  Target: SCNA; (-) strand; PAM type: YTN; PAM sequence: CTA
gagcctctggacctctcatt

SEQ ID NO: 53059 - DNA, 20 bp, Artificial Sequence
  Description of Artificial Sequence: Synthetic oligonucleotide
  Target: SCNA; (-) strand; PAM type: YTN; PAM sequence: CTC
caccacctagagcctctgga

SEQ ID NO: 53060 - DNA, 20 bp, Artificial Sequence
  Description of Artificial Sequence: Synthetic oligonucleotide
  Target: SCNA; (-) strand; PAM type: YTN; PAM sequence: CTA
gcaacccctccaccacctag

SEQ ID NO: 53061 - DNA, 20 bp, Artificial Sequence
  Description of Artificial Sequence: Synthetic oligonucleotide
  Target: SCNA; (-) strand; PAM type: YTN; PAM sequence: TTA
gctagcaacccctccaccac

SEQ ID NO: 53062 - DNA, 20 bp, Artificial Sequence
  Description of Artificial Sequence: Synthetic oligonucleotide
  Target: SCNA; (-) strand; PAM type: YTN; PAM sequence: TTT
agctagcaacccctccacca

SEQ ID NO: 53063 - DNA, 20 bp, Artificial Sequence
  Description of Artificial Sequence: Synthetic oligonucleotide
  Target: SCNA; (-) strand; PAM type: YTN; PAM sequence: TTT
tagctagcaacccctccacc

SEQ ID NO: 53064 - DNA, 20 bp, Artificial Sequence
  Description of Artificial Sequence: Synthetic oligonucleotide
  Target: SCNA; (-) strand; PAM type: YTN; PAM sequence: CTT
ttagctagcaacccctccac

SEQ ID NO: 53065 - DNA, 20 bp, Artificial Sequence
  Description of Artificial Sequence: Synthetic oligonucleotide
  Target: SCNA; (-) strand; PAM type: YTN; PAM sequence: CTC
cttttagctagcaacccctc

SEQ ID NO: 53066 - DNA, 20 bp, Artificial Sequence
  Description of Artificial Sequence: Synthetic oligonucleotide
  Target: SCNA; (-) strand; PAM type: YTN; PAM sequence: CTG
taggacaccctccttttagc

SEQ ID NO: 53067 - DNA, 20 bp, Artificial Sequence
  Description of Artificial Sequence: Synthetic oligonucleotide
  Target: SCNA; (-) strand; PAM type: YTN; PAM sequence: TTC
tgtaggacaccctcctttta

SEQ ID NO: 53068 - DNA, 20 bp, Artificial Sequence
  Description of Artificial Sequence: Synthetic oligonucleotide
  Target: SCNA; (-) strand; PAM type: YTN; PAM sequence: TTT
ctgtaggacaccctcctttt

SEQ ID NO: 53069 - DNA, 20 bp, Artificial Sequence
  Description of Artificial Sequence: Synthetic oligonucleotide
  Target: SCNA; (-) strand; PAM type: YTN; PAM sequence: CTT
tctgtaggacaccctccttt

SEQ ID NO: 53070 - DNA, 20 bp, Artificial Sequence
  Description of Artificial Sequence: Synthetic oligonucleotide
  Target: SCNA; (-) strand; PAM type: YTN; PAM sequence: CTG
tccctttctgtaggacaccc

SEQ ID NO: 53071 - DNA, 20 bp, Artificial Sequence
  Description of Artificial Sequence: Synthetic oligonucleotide
  Target: SCNA; (-) strand; PAM type: YTN; PAM sequence: CTC
tgtccctttctgtaggacac

SEQ ID NO: 53072 - DNA, 20 bp, Artificial Sequence
  Description of Artificial Sequence: Synthetic oligonucleotide
  Target: SCNA; (-) strand; PAM type: YTN; PAM sequence: CTC
atggagactctgtccctttc

SEQ ID NO: 53073 - DNA, 20 bp, Artificial Sequence
  Description of Artificial Sequence: Synthetic oligonucleotide
  Target: SCNA; (-) strand; PAM type: YTN; PAM sequence: TTG
ctcatggagactctgtccct

SEQ ID NO: 53074 - DNA, 20 bp, Artificial Sequence
  Description of Artificial Sequence: Synthetic oligonucleotide
  Target: SCNA; (-) strand; PAM type: YTN; PAM sequence: CTG
gaccacaggtaccatccagc

SEQ ID NO: 53075 - DNA, 20 bp, Artificial Sequence
  Description of Artificial Sequence: Synthetic oligonucleotide
  Target: SCNA; (-) strand; PAM type: YTN; PAM sequence: CTC
accatgtgccaagaactgga

SEQ ID NO: 53076 - DNA, 20 bp, Artificial Sequence
  Description of Artificial Sequence: Synthetic oligonucleotide
  Target: SCNA; (-) strand; PAM type: YTN; PAM sequence: TTA
ggcagcactcaccatgtgcc

SEQ ID NO: 53077 - DNA, 20 bp, Artificial Sequence
  Description of Artificial Sequence: Synthetic oligonucleotide
  Target: SCNA; (-) strand; PAM type: YTN; PAM sequence: CTT
aggcagcactcaccatgtgc

SEQ ID NO: 53078 - DNA, 20 bp, Artificial Sequence
  Description of Artificial Sequence: Synthetic oligonucleotide
  Target: SCNA; (-) strand; PAM type: YTN; PAM sequence: CTA
gggcaccaagacttaggcag

SEQ ID NO: 53079 - DNA, 20 bp, Artificial Sequence
  Description of Artificial Sequence: Synthetic oligonucleotide
  Target: SCNA; (-) strand; PAM type: YTN; PAM sequence: CTG
caggtctagggcaccaagac

SEQ ID NO: 53080 - DNA, 20 bp, Artificial Sequence
  Description of Artificial Sequence: Synthetic oligonucleotide
  Target: SCNA; (-) strand; PAM type: YTN; PAM sequence: CTG
ctgcaggtctagggcaccaa

SEQ ID NO: 53081 - DNA, 20 bp, Artificial Sequence
  Description of Artificial Sequence: Synthetic oligonucleotide
  Target: SCNA; (-) strand; PAM type: YTN; PAM sequence: TTG
ctgctgcaggtctagggcac

SEQ ID NO: 53082 - DNA, 20 bp, Artificial Sequence
  Description of Artificial Sequence: Synthetic oligonucleotide
  Target: SCNA; (-) strand; PAM type: YTN; PAM sequence: TTC
cccgccgattgctgctgcag

SEQ ID NO: 53083 - DNA, 20 bp, Artificial Sequence
  Description of Artificial Sequence: Synthetic oligonucleotide
  Target: SCNA; (-) strand; PAM type: YTN; PAM sequence: TTT
ccccgccgattgctgctgca

SEQ ID NO: 53084 - DNA, 20 bp, Artificial Sequence
  Description of Artificial Sequence: Synthetic oligonucleotide
  Target: SCNA; (-) strand; PAM type: YTN; PAM sequence: CTT
tccccgccgattgctgctgc

SEQ ID NO: 53085 - DNA, 20 bp, Artificial Sequence
  Description of Artificial Sequence: Synthetic oligonucleotide
  Target: SCNA; (-) strand; PAM type: YTN; PAM sequence: TTG
tcaccaaagtcatggtcctt

SEQ ID NO: 53086 - DNA, 20 bp, Artificial Sequence
  Description of Artificial Sequence: Synthetic oligonucleotide
  Target: SCNA; (-) strand; PAM type: YTN; PAM sequence: TTT
gtcaccaaagtcatggtcct

SEQ ID NO: 53087 - DNA, 20 bp, Artificial Sequence
  Description of Artificial Sequence: Synthetic oligonucleotide
  Target: SCNA; (-) strand; PAM type: YTN; PAM sequence: TTT
tgtcaccaaagtcatggtcc

SEQ ID NO: 53088 - DNA, 20 bp, Artificial Sequence
  Description of Artificial Sequence: Synthetic oligonucleotide
  Target: SCNA; (-) strand; PAM type: YTN; PAM sequence: CTT
ttgtcaccaaagtcatggtc

SEQ ID NO: 53089 - DNA, 20 bp, Artificial Sequence
  Description of Artificial Sequence: Synthetic oligonucleotide
  Target: SCNA; (-) strand; PAM type: YTN; PAM sequence: CTG
ccatcacttttgtcaccaaa

SEQ ID NO: 53090 - DNA, 20 bp, Artificial Sequence
  Description of Artificial Sequence: Synthetic oligonucleotide
  Target: SCNA; (-) strand; PAM type: YTN; PAM sequence: TTC
tgccatcacttttgtcacca

SEQ ID NO: 53091 - DNA, 20 bp, Artificial Sequence
  Description of Artificial Sequence: Synthetic oligonucleotide
  Target: SCNA; (-) strand; PAM type: YTN; PAM sequence: CTT
ctgccatcacttttgtcacc

SEQ ID NO: 53092 - DNA, 20 bp, Artificial Sequence
  Description of Artificial Sequence: Synthetic oligonucleotide
  Target: SCNA; (-) strand; PAM type: YTN; PAM sequence: CTC
ttctgccatcacttttgtca

SEQ ID NO: 53093 - DNA, 20 bp, Artificial Sequence
  Description of Artificial Sequence: Synthetic oligonucleotide
  Target: SCNA; (-) strand; PAM type: YTN; PAM sequence: TTC
cactcttctgccatcacttt

SEQ ID NO: 53094 - DNA, 20 bp, Artificial Sequence
  Description of Artificial Sequence: Synthetic oligonucleotide
  Target: SCNA; (-) strand; PAM type: YTN; PAM sequence: TTT
ccactcttctgccatcactt

SEQ ID NO: 53095 - DNA, 20 bp, Artificial Sequence
  Description of Artificial Sequence: Synthetic oligonucleotide
  Target: SCNA; (-) strand; PAM type: YTN; PAM sequence: CTT
tccactcttctgccatcact

SEQ ID NO: 53096 - DNA, 20 bp, Artificial Sequence
  Description of Artificial Sequence: Synthetic oligonucleotide
  Target: SCNA; (-) strand; PAM type: YTN; PAM sequence: CTC
tttccactcttctgccatca

SEQ ID NO: 53097 - DNA, 20 bp, Artificial Sequence
  Description of Artificial Sequence: Synthetic oligonucleotide
  Target: SCNA; (-) strand; PAM type: YTN; PAM sequence: CTC
atacctctttccactcttct

SEQ ID NO: 53098 - DNA, 20 bp, Artificial Sequence
  Description of Artificial Sequence: Synthetic oligonucleotide
  Target: SCNA; (-) strand; PAM type: YTN; PAM sequence: TTA
gtcatcactcatacctcttt

SEQ ID NO: 53099 - DNA, 20 bp, Artificial Sequence
  Description of Artificial Sequence: Synthetic oligonucleotide
  Target: SCNA; (-) strand; PAM type: YTN; PAM sequence: CTT
agtcatcactcatacctctt

SEQ ID NO: 53100 - DNA, 20 bp, Artificial Sequence
  Description of Artificial Sequence: Synthetic oligonucleotide
  Target: SCNA; (-) strand; PAM type: YTN; PAM sequence: TTG
tccttagtcatcactcatac

SEQ ID NO: 53101 - DNA, 20 bp, Artificial Sequence
  Description of Artificial Sequence: Synthetic oligonucleotide
  Target: SCNA; (-) strand; PAM type: YTN; PAM sequence: TTT
gtccttagtcatcactcata

SEQ ID NO: 53102 - DNA, 20 bp, Artificial Sequence
  Description of Artificial Sequence: Synthetic oligonucleotide
  Target: SCNA; (-) strand; PAM type: YTN; PAM sequence: CTT
tgtccttagtcatcactcat

SEQ ID NO: 53103 - DNA, 20 bp, Artificial Sequence
  Description of Artificial Sequence: Synthetic oligonucleotide
  Target: SCNA; (-) strand; PAM type: YTN; PAM sequence: TTC
tttgtccttagtcatcactc

SEQ ID NO: 53104 - DNA, 20 bp, Artificial Sequence
  Description of Artificial Sequence: Synthetic oligonucleotide
  Target: SCNA; (-) strand; PAM type: YTN; PAM sequence: TTT
ctttgtccttagtcatcact

SEQ ID NO: 53105 - DNA, 20 bp, Artificial Sequence
  Description of Artificial Sequence: Synthetic oligonucleotide
  Target: SCNA; (-) strand; PAM type: YTN; PAM sequence: TTG
tttctttgtccttagtcatc

SEQ ID NO: 53106 - DNA, 20 bp, Artificial Sequence
  Description of Artificial Sequence: Synthetic oligonucleotide
  Target: SCNA; (-) strand; PAM type: YTN; PAM sequence: CTT
gtttctttgtccttagtcat

SEQ ID NO: 53107 - DNA, 20 bp, Artificial Sequence
  Description of Artificial Sequence: Synthetic oligonucleotide
  Target: SCNA; (-) strand; PAM type: YTN; PAM sequence: CTA
cccttgtttctttgtcctta

SEQ ID NO: 53108 - DNA, 20 bp, Artificial Sequence
  Description of Artificial Sequence: Synthetic oligonucleotide
  Target: SCNA; (-) strand; PAM type: YTN; PAM sequence: TTC
tacccttgtttctttgtcct

SEQ ID NO: 53109 - DNA, 20 bp, Artificial Sequence
  Description of Artificial Sequence: Synthetic oligonucleotide
  Target: SCNA; (-) strand; PAM type: YTN; PAM sequence: CTT
ctacccttgtttctttgtcc

SEQ ID NO: 53110 - DNA, 20 bp, Artificial Sequence
  Description of Artificial Sequence: Synthetic oligonucleotide
  Target: SCNA; (-) strand; PAM type: YTN; PAM sequence: TTG
tccttctacccttgtttctt

SEQ ID NO: 53111 - DNA, 20 bp, Artificial Sequence
  Description of Artificial Sequence: Synthetic oligonucleotide
  Target: SCNA; (-) strand; PAM type: YTN; PAM sequence: CTG
gaattgtccttctacccttg

SEQ ID NO: 53112 - DNA, 20 bp, Artificial Sequence
  Description of Artificial Sequence: Synthetic oligonucleotide
  Target: SCNA; (-) strand; PAM type: YTN; PAM sequence: CTG
ctggaattgtccttctaccc

SEQ ID NO: 53113 - DNA, 20 bp, Artificial Sequence
  Description of Artificial Sequence: Synthetic oligonucleotide
  Target: SCNA; (-) strand; PAM type: YTN; PAM sequence: CTG
ctgctggaattgtccttcta

SEQ ID NO: 53114 - DNA, 20 bp, Artificial Sequence
  Description of Artificial Sequence: Synthetic oligonucleotide
  Target: SCNA; (-) strand; PAM type: YTN; PAM sequence: TTC
ggataggctgctgctggaat

SEQ ID NO: 53115 - DNA, 20 bp, Artificial Sequence
  Description of Artificial Sequence: Synthetic oligonucleotide
  Target: SCNA; (-) strand; PAM type: YTN; PAM sequence: TTA
ttcggataggctgctgctgg

SEQ ID NO: 53116 - DNA, 20 bp, Artificial Sequence
  Description of Artificial Sequence: Synthetic oligonucleotide
  Target: SCNA; (-) strand; PAM type: YTN; PAM sequence: TTG
ttattcggataggctgctgc

SEQ ID NO: 53117 - DNA, 20 bp, Artificial Sequence
  Description of Artificial Sequence: Synthetic oligonucleotide
  Target: SCNA; (-) strand; PAM type: YTN; PAM sequence: TTT
gttattcggataggctgctg

SEQ ID NO: 53118 - DNA, 20 bp, Artificial Sequence
  Description of Artificial Sequence: Synthetic oligonucleotide
  Target: SCNA; (-) strand; PAM type: YTN; PAM sequence: TTT
tgttattcggataggctgct

SEQ ID NO: 53119 - DNA, 20 bp, Artificial Sequence
  Description of Artificial Sequence: Synthetic oligonucleotide
  Target: SCNA; (-) strand; PAM type: YTN; PAM sequence: CTG
agataaggattttgttattc

SEQ ID NO: 53120 - DNA, 20 bp, Artificial Sequence
  Description of Artificial Sequence: Synthetic oligonucleotide
  Target: SCNA; (-) strand; PAM type: YTN; PAM sequence: TTC
ctgagataaggattttgtta

SEQ ID NO: 53121 - DNA, 20 bp, Artificial Sequence
  Description of Artificial Sequence: Synthetic oligonucleotide
  Target: SCNA; (-) strand; PAM type: YTN; PAM sequence: TTT
cctgagataaggattttgtt

SEQ ID NO: 53122 - DNA, 20 bp, Artificial Sequence
  Description of Artificial Sequence: Synthetic oligonucleotide
  Target: SCNA; (-) strand; PAM type: YTN; PAM sequence: TTT
tcctgagataaggattttgt

SEQ ID NO: 53123 - DNA, 20 bp, Artificial Sequence
  Description of Artificial Sequence: Synthetic oligonucleotide
  Target: SCNA; (-) strand; PAM type: YTN; PAM sequence: TTC
atagcagagatggttttcct

SEQ ID NO: 53124 - DNA, 20 bp, Artificial Sequence
  Description of Artificial Sequence: Synthetic oligonucleotide
  Target: SCNA; (-) strand; PAM type: YTN; PAM sequence: CTG
atgaatatatgtgtgtgtat

SEQ ID NO: 53125 - DNA, 20 bp, Artificial Sequence
  Description of Artificial Sequence: Synthetic oligonucleotide
  Target: SCNA; (-) strand; PAM type: YTN; PAM sequence: TTG
atacctgatgaatatatgtg

SEQ ID NO: 53126 - DNA, 20 bp, Artificial Sequence
  Description of Artificial Sequence: Synthetic oligonucleotide
  Target: SCNA; (-) strand; PAM type: YTN; PAM sequence: TTA
aattgatacctgatgaatat

SEQ ID NO: 53127 - DNA, 20 bp, Artificial Sequence
  Description of Artificial Sequence: Synthetic oligonucleotide
  Target: SCNA; (-) strand; PAM type: YTN; PAM sequence: TTC
caatcagtaattaaattgat

SEQ ID NO: 53128 - DNA, 20 bp, Artificial Sequence
  Description of Artificial Sequence: Synthetic oligonucleotide
  Target: SCNA; (-) strand; PAM type: YTN; PAM sequence: TTA
cagtgttccaatcagtaatt

SEQ ID NO: 53129 - DNA, 20 bp, Artificial Sequence
  Description of Artificial Sequence: Synthetic oligonucleotide
  Target: SCNA; (-) strand; PAM type: YTN; PAM sequence: TTT
acagtgttccaatcagtaat

SEQ ID NO: 53130 - DNA, 20 bp, Artificial Sequence
  Description of Artificial Sequence: Synthetic oligonucleotide
  Target: SCNA; (-) strand; PAM type: YTN; PAM sequence: TTG
aacaagtttacagtgttcca

SEQ ID NO: 53131 - DNA, 20 bp, Artificial Sequence
  Description of Artificial Sequence: Synthetic oligonucleotide
  Target: SCNA; (-) strand; PAM type: YTN; PAM sequence: TTT
gaacaagtttacagtgttcc

SEQ ID NO: 53132 - DNA, 20 bp, Artificial Sequence
  Description of Artificial Sequence: Synthetic oligonucleotide
  Target: SCNA; (-) strand; PAM type: YTN; PAM sequence: TTT
tgaacaagtttacagtgttc

SEQ ID NO: 53133 - DNA, 20 bp, Artificial Sequence
  Description of Artificial Sequence: Synthetic oligonucleotide
  Target: SCNA; (-) strand; PAM type: YTN; PAM sequence: CTA
ttttgaacaagtttacagtg

SEQ ID NO: 53134 - DNA, 20 bp, Artificial Sequence
  Description of Artificial Sequence: Synthetic oligonucleotide
  Target: SCNA; (-) strand; PAM type: YTN; PAM sequence: CTC
tattttgaacaagtttacag

SEQ ID NO: 53135 - DNA, 20 bp, Artificial Sequence
  Description of Artificial Sequence: Synthetic oligonucleotide
  Target: SCNA; (-) strand; PAM type: YTN; PAM sequence: CTG
aataataacctctattttga

SEQ ID NO: 53136 - DNA, 20 bp, Artificial Sequence
  Description of Artificial Sequence: Synthetic oligonucleotide
  Target: SCNA; (-) strand; PAM type: YTN; PAM sequence: CTG
aagatactgaataataacct

SEQ ID NO: 53137 - DNA, 20 bp, Artificial Sequence
  Description of Artificial Sequence: Synthetic oligonucleotide
  Target: SCNA; (-) strand; PAM type: YTN; PAM sequence: CTA
taaaatggtgaatccggaca

SEQ ID NO: 53138 - DNA, 20 bp, Artificial Sequence
  Description of Artificial Sequence: Synthetic oligonucleotide
  Target: SCNA; (-) strand; PAM type: YTN; PAM sequence: CTA
atgtcagagagcatgctata

SEQ ID NO: 53139 - DNA, 20 bp, Artificial Sequence
  Description of Artificial Sequence: Synthetic oligonucleotide
  Target: SCNA; (-) strand; PAM type: YTN; PAM sequence: CTC
actaatgtcagagagcatgc

SEQ ID NO: 53140 - DNA, 20 bp, Artificial Sequence
  Description of Artificial Sequence: Synthetic oligonucleotide
  Target: SCNA; (-) strand; PAM type: YTN; PAM sequence: TTC
tcactaatgtcagagagcat

SEQ ID NO: 53141 - DNA, 20 bp, Artificial Sequence
  Description of Artificial Sequence: Synthetic oligonucleotide
  Target: SCNA; (-) strand; PAM type: YTN; PAM sequence: TTC
attctcactaatgtcagaga

SEQ ID NO: 53142 - DNA, 20 bp, Artificial Sequence
  Description of Artificial Sequence: Synthetic oligonucleotide
  Target: SCNA; (-) strand; PAM type: YTN; PAM sequence: CTA
aatatgtagagtacaattca

SEQ ID NO: 53143 - DNA, 20 bp, Artificial Sequence
  Description of Artificial Sequence: Synthetic oligonucleotide
  Target: SCNA; (-) strand; PAM type: YTN; PAM sequence: TTA
cctaaatatgtagagtacaa

SEQ ID NO: 53144 - DNA, 20 bp, Artificial Sequence
  Description of Artificial Sequence: Synthetic oligonucleotide
  Target: SCNA; (-) strand; PAM type: YTN; PAM sequence: CTG
tataccaaaccattacctaa

SEQ ID NO: 53145 - DNA, 20 bp, Artificial Sequence
  Description of Artificial Sequence: Synthetic oligonucleotide
  Target: SCNA; (-) strand; PAM type: YTN; PAM sequence: TTA
atagcagctgtataccaaac

SEQ ID NO: 53146 - DNA, 20 bp, Artificial Sequence
  Description of Artificial Sequence: Synthetic oligonucleotide
  Target: SCNA; (-) strand; PAM type: YTN; PAM sequence: TTG
catagcacacaaatcgttaa

SEQ ID NO: 53147 - DNA, 20 bp, Artificial Sequence
  Description of Artificial Sequence: Synthetic oligonucleotide
  Target: SCNA; (-) strand; PAM type: YTN; PAM sequence: CTG
aggtgggtgacaggagacca

SEQ ID NO: 53148 - DNA, 20 bp, Artificial Sequence
  Description of Artificial Sequence: Synthetic oligonucleotide
  Target: SCNA; (-) strand; PAM type: YTN; PAM sequence: CTC
ctgaggtgggtgacaggaga

SEQ ID NO: 53149 - DNA, 20 bp, Artificial Sequence
  Description of Artificial Sequence: Synthetic oligonucleotide
  Target: SCNA; (-) strand; PAM type: YTN; PAM sequence: TTG
tgtctcctgaggtgggtgac

SEQ ID NO: 53150 - DNA, 20 bp, Artificial Sequence
  Description of Artificial Sequence: Synthetic oligonucleotide
  Target: SCNA; (-) strand; PAM type: YTN; PAM sequence: TTA
catcagttgtgtctcctgag

SEQ ID NO: 53151 - DNA, 20 bp, Artificial Sequence
  Description of Artificial Sequence: Synthetic oligonucleotide
  Target: SCNA; (-) strand; PAM type: YTN; PAM sequence: CTT
acatcagttgtgtctcctga

SEQ ID NO: 53152 - DNA, 20 bp, Artificial Sequence
  Description of Artificial Sequence: Synthetic oligonucleotide
  Target: SCNA; (-) strand; PAM type: YTN; PAM sequence: CTC
acttacatcagttgtgtctc

SEQ ID NO: 53153 - DNA, 20 bp, Artificial Sequence
  Description of Artificial Sequence: Synthetic oligonucleotide
  Target: SCNA; (-) strand; PAM type: YTN; PAM sequence: CTG
tctcacttacatcagttgtg

SEQ ID NO: 53154 - DNA, 20 bp, Artificial Sequence
  Description of Artificial Sequence: Synthetic oligonucleotide
  Target: SCNA; (-) strand; PAM type: YTN; PAM sequence: CTG
agctgtctcacttacatcag

SEQ ID NO: 53155 - DNA, 20 bp, Artificial Sequence
  Description of Artificial Sequence: Synthetic oligonucleotide
  Target: SCNA; (-) strand; PAM type: YTN; PAM sequence: TTC
cataggatatgctgagctgt

SEQ ID NO: 53156 - DNA, 20 bp, Artificial Sequence
  Description of Artificial Sequence: Synthetic oligonucleotide
  Target: SCNA; (-) strand; PAM type: YTN; PAM sequence: TTT
ccataggatatgctgagctg

SEQ ID NO: 53157 - DNA, 20 bp, Artificial Sequence
  Description of Artificial Sequence: Synthetic oligonucleotide
  Target: SCNA; (-) strand; PAM type: YTN; PAM sequence: TTT
tccataggatatgctgagct

SEQ ID NO: 53158 - DNA, 20 bp, Artificial Sequence
  Description of Artificial Sequence: Synthetic oligonucleotide
  Target: SCNA; (-) strand; PAM type: YTN; PAM sequence: TTT
ttccataggatatgctgagc

SEQ ID NO: 53159 - DNA, 20 bp, Artificial Sequence
  Description of Artificial Sequence: Synthetic oligonucleotide
  Target: SCNA; (-) strand; PAM type: YTN; PAM sequence: TTA
ataagagatttttccatagg

SEQ ID NO: 53160 - DNA, 20 bp, Artificial Sequence
  Description of Artificial Sequence: Synthetic oligonucleotide
  Target: SCNA; (-) strand; PAM type: YTN; PAM sequence: TTT
aataagagatttttccatag

SEQ ID NO: 53161 - DNA, 20 bp, Artificial Sequence
  Description of Artificial Sequence: Synthetic oligonucleotide
  Target: SCNA; (-) strand; PAM type: YTN; PAM sequence: TTA
tttaataagagatttttcca

SEQ ID NO: 53162 - DNA, 20 bp, Artificial Sequence
  Description of Artificial Sequence: Synthetic oligonucleotide
  Target: SCNA; (-) strand; PAM type: YTN; PAM sequence: TTT
atttaataagagatttttcc

SEQ ID NO: 53163 - DNA, 20 bp, Artificial Sequence
  Description of Artificial Sequence: Synthetic oligonucleotide
  Target: SCNA; (-) strand; PAM type: YTN; PAM sequence: CTT
tatttaataagagatttttc

SEQ ID NO: 53164 - DNA, 20 bp, Artificial Sequence
  Description of Artificial Sequence: Synthetic oligonucleotide
  Target: SCNA; (-) strand; PAM type: YTN; PAM sequence: TTG
acctttatttaataagagat

SEQ ID NO: 53165 - DNA, 20 bp, Artificial Sequence
  Description of Artificial Sequence: Synthetic oligonucleotide
  Target: SCNA; (-) strand; PAM type: YTN; PAM sequence: TTA
atcattgacctttatttaat

SEQ ID NO: 53166 - DNA, 20 bp, Artificial Sequence
  Description of Artificial Sequence: Synthetic oligonucleotide
  Target: SCNA; (-) strand; PAM type: YTN; PAM sequence: CTT
aatcattgacctttatttaa

SEQ ID NO: 53167 - DNA, 20 bp, Artificial Sequence
  Description of Artificial Sequence: Synthetic oligonucleotide
  Target: SCNA; (-) strand; PAM type: YTN; PAM sequence: CTA
cttaatcattgacctttatt

SEQ ID NO: 53168 - DNA, 20 bp, Artificial Sequence
  Description of Artificial Sequence: Synthetic oligonucleotide
  Target: SCNA; (-) strand; PAM type: YTN; PAM sequence: CTA
tactacttaatcattgacct

SEQ ID NO: 53169 - DNA, 20 bp, Artificial Sequence
  Description of Artificial Sequence: Synthetic oligonucleotide
  Target: SCNA; (-) strand; PAM type: YTN; PAM sequence: TTC
aatgactatactacttaatc

SEQ ID NO: 53170 - DNA, 20 bp, Artificial Sequence
  Description of Artificial Sequence: Synthetic oligonucleotide
  Target: SCNA; (-) strand; PAM type: YTN; PAM sequence: TTA
attcaatgactatactactt

SEQ ID NO: 53171 - DNA, 20 bp, Artificial Sequence
  Description of Artificial Sequence: Synthetic oligonucleotide
  Target: SCNA; (-) strand; PAM type: YTN; PAM sequence: TTA
aggaaaacaaattaattcaa

SEQ ID NO: 53172 - DNA, 20 bp, Artificial Sequence
  Description of Artificial Sequence: Synthetic oligonucleotide
  Target: SCNA; (-) strand; PAM type: YTN; PAM sequence: CTT
aaggaaaacaaattaattca

SEQ ID NO: 53173 - DNA, 20 bp, Artificial Sequence
  Description of Artificial Sequence: Synthetic oligonucleotide
  Target: SCNA; (-) strand; PAM type: YTN; PAM sequence: CTC
ttaaggaaaacaaattaatt

SEQ ID NO: 53174 - DNA, 20 bp, Artificial Sequence
  Description of Artificial Sequence: Synthetic oligonucleotide
  Target: SCNA; (-) strand; PAM type: YTN; PAM sequence: CTC
ctcttaaggaaaacaaatta

SEQ ID NO: 53175 - DNA, 20 bp, Artificial Sequence
  Description of Artificial Sequence: Synthetic oligonucleotide
  Target: SCNA; (-) strand; PAM type: YTN; PAM sequence: CTG
aggagagctcctcttaagga

SEQ ID NO: 53176 - DNA, 20 bp, Artificial Sequence
  Description of Artificial Sequence: Synthetic oligonucleotide
  Target: SCNA; (-) strand; PAM type: YTN; PAM sequence: TTG
acctgaggagagctcctctt

SEQ ID NO: 53177 - DNA, 20 bp, Artificial Sequence
  Description of Artificial Sequence: Synthetic oligonucleotide
  Target: SCNA; (-) strand; PAM type: YTN; PAM sequence: TTT
gacctgaggagagctcctct

SEQ ID NO: 53178 - DNA, 20 bp, Artificial Sequence
  Description of Artificial Sequence: Synthetic oligonucleotide
  Target: SCNA; (-) strand; PAM type: YTN; PAM sequence: TTT
tgacctgaggagagctcctc

SEQ ID NO: 53179 - DNA, 20 bp, Artificial Sequence
  Description of Artificial Sequence: Synthetic oligonucleotide
  Target: SCNA; (-) strand; PAM type: YTN; PAM sequence: TTA
attttgacctgaggagagct

SEQ ID NO: 53180 - DNA, 20 bp, Artificial Sequence
  Description of Artificial Sequence: Synthetic oligonucleotide
  Target: SCNA; (-) strand; PAM type: YTN; PAM sequence: TTT
aattttgacctgaggagagc

SEQ ID NO: 53181 - DNA, 20 bp, Artificial Sequence
  Description of Artificial Sequence: Synthetic oligonucleotide
  Target: SCNA; (-) strand; PAM type: YTN; PAM sequence: CTT
taattttgacctgaggagag

SEQ ID NO: 53182 - DNA, 20 bp, Artificial Sequence
  Description of Artificial Sequence: Synthetic oligonucleotide
  Target: SCNA; (-) strand; PAM type: YTN; PAM sequence: CTG
actttaattttgacctgagg

SEQ ID NO: 53183 - DNA, 20 bp, Artificial Sequence
  Description of Artificial Sequence: Synthetic oligonucleotide
  Target: SCNA; (-) strand; PAM type: YTN; PAM sequence: CTA
tccctgactttaattttgac

SEQ ID NO: 53184 - DNA, 20 bp, Artificial Sequence
  Description of Artificial Sequence: Synthetic oligonucleotide
  Target: SCNA; (-) strand; PAM type: YTN; PAM sequence: TTA
tctatccctgactttaattt

SEQ ID NO: 53185 - DNA, 20 bp, Artificial Sequence
  Description of Artificial Sequence: Synthetic oligonucleotide
  Target: SCNA; (-) strand; PAM type: YTN; PAM sequence: CTT
atctatccctgactttaatt

SEQ ID NO: 53186 - DNA, 20 bp, Artificial Sequence
  Description of Artificial Sequence: Synthetic oligonucleotide
  Target: SCNA; (-) strand; PAM type: YTN; PAM sequence: CTG
ggggaaccatatgagagact

SEQ ID NO: 53187 - DNA, 20 bp, Artificial Sequence
  Description of Artificial Sequence: Synthetic oligonucleotide
  Target: SCNA; (-) strand; PAM type: YTN; PAM sequence: CTC
acactgggggaaccatatga

SEQ ID NO: 53188 - DNA, 20 bp, Artificial Sequence
  Description of Artificial Sequence: Synthetic oligonucleotide
  Target: SCNA; (-) strand; PAM type: YTN; PAM sequence: CTC
tcacactgggggaaccatat

SEQ ID NO: 53189 - DNA, 20 bp, Artificial Sequence
  Description of Artificial Sequence: Synthetic oligonucleotide
  Target: SCNA; (-) strand; PAM type: YTN; PAM sequence: CTC
ctctcacactgggggaacca

SEQ ID NO: 53190 - DNA, 20 bp, Artificial Sequence
  Description of Artificial Sequence: Synthetic oligonucleotide
  Target: SCNA; (-) strand; PAM type: YTN; PAM sequence: TTG
ctcctctcacactgggggaa

SEQ ID NO: 53191 - DNA, 20 bp, Artificial Sequence
  Description of Artificial Sequence: Synthetic oligonucleotide
  Target: SCNA; (-) strand; PAM type: YTN; PAM sequence: CTT
gctcctctcacactggggga

SEQ ID NO: 53192 - DNA, 20 bp, Artificial Sequence
  Description of Artificial Sequence: Synthetic oligonucleotide
  Target: SCNA; (-) strand; PAM type: YTN; PAM sequence: CTG
agacaagaaaaaagccacca

SEQ ID NO: 53193 - DNA, 20 bp, Artificial Sequence
  Description of Artificial Sequence: Synthetic oligonucleotide
  Target: SCNA; (-) strand; PAM type: YTN; PAM sequence: TTC
tgagacaagaaaaaagccac

SEQ ID NO: 53194 - DNA, 20 bp, Artificial Sequence
  Description of Artificial Sequence: Synthetic oligonucleotide
  Target: SCNA; (-) strand; PAM type: YTN; PAM sequence: CTT
ctgagacaagaaaaaagcca

SEQ ID NO: 53195 - DNA, 20 bp, Artificial Sequence
  Description of Artificial Sequence: Synthetic oligonucleotide
  Target: SCNA; (-) strand; PAM type: YTN; PAM sequence: TTC
ttctgagacaagaaaaaagc

SEQ ID NO: 53196 - DNA, 20 bp, Artificial Sequence
  Description of Artificial Sequence: Synthetic oligonucleotide
  Target: SCNA; (-) strand; PAM type: YTN; PAM sequence: TTA
ttcttctgagacaagaaaaa

SEQ ID NO: 53197 - DNA, 20 bp, Artificial Sequence
  Description of Artificial Sequence: Synthetic oligonucleotide
  Target: SCNA; (-) strand; PAM type: YTN; PAM sequence: TTT
attcttctgagacaagaaaa

SEQ ID NO: 53198 - DNA, 20 bp, Artificial Sequence
  Description of Artificial Sequence: Synthetic oligonucleotide
  Target: SCNA; (-) strand; PAM type: YTN; PAM sequence: TTA
atttattcttctgagacaag

SEQ ID NO: 53199 - DNA, 20 bp, Artificial Sequence
  Description of Artificial Sequence: Synthetic oligonucleotide
  Target: SCNA; (-) strand; PAM type: YTN; PAM sequence: TTA
ttaatttattcttctgagac

SEQ ID NO: 53200 - DNA, 20 bp, Artificial Sequence
  Description of Artificial Sequence: Synthetic oligonucleotide
  Target: SCNA; (-) strand; PAM type: YTN; PAM sequence: TTT
attaatttattcttctgaga

SEQ ID NO: 53201 - DNA, 20 bp, Artificial Sequence
  Description of Artificial Sequence: Synthetic oligonucleotide
  Target: SCNA; (-) strand; PAM type: YTN; PAM sequence: CTA
tgcagaatttattaatttat

SEQ ID NO: 53202 - DNA, 20 bp, Artificial Sequence
  Description of Artificial Sequence: Synthetic oligonucleotide
  Target: SCNA; (-) strand; PAM type: YTN; PAM sequence: TTG
tcacacaaaatcacagctat

SEQ ID NO: 53203 - DNA, 20 bp, Artificial Sequence
  Description of Artificial Sequence: Synthetic oligonucleotide
  Target: SCNA; (-) strand; PAM type: YTN; PAM sequence: TTT
gtcacacaaaatcacagcta

SEQ ID NO: 53204 - DNA, 20 bp, Artificial Sequence
  Description of Artificial Sequence: Synthetic oligonucleotide
  Target: SCNA; (-) strand; PAM type: YTN; PAM sequence: TTT
tgtcacacaaaatcacagct

SEQ ID NO: 53205 - DNA, 20 bp, Artificial Sequence
  Description of Artificial Sequence: Synthetic oligonucleotide
  Target: SCNA; (-) strand; PAM type: YTN; PAM sequence: TTT
ttgtcacacaaaatcacagc

SEQ ID NO: 53206 - DNA, 20 bp, Artificial Sequence
  Description of Artificial Sequence: Synthetic oligonucleotide
  Target: SCNA; (-) strand; PAM type: YTN; PAM sequence: TTC
atttttgtcacacaaaatca

SEQ ID NO: 53207 - DNA, 20 bp, Artificial Sequence
  Description of Artificial Sequence: Synthetic oligonucleotide
  Target: SCNA; (-) strand; PAM type: YTN; PAM sequence: CTT
catttttgtcacacaaaatc

SEQ ID NO: 53208 - DNA, 20 bp, Artificial Sequence
  Description of Artificial Sequence: Synthetic oligonucleotide
  Target: SCNA; (-) strand; PAM type: YTN; PAM sequence: TTC
ttcatttttgtcacacaaaa

SEQ ID NO: 53209 - DNA, 20 bp, Artificial Sequence
  Description of Artificial Sequence: Synthetic oligonucleotide
  Target: SCNA; (-) strand; PAM type: YTN; PAM sequence: TTG
taaacagaggcacaggttct

SEQ ID NO: 53210 - DNA, 20 bp, Artificial Sequence
  Description of Artificial Sequence: Synthetic oligonucleotide
  Target: SCNA; (-) strand; PAM type: YTN; PAM sequence: TTT
gtaaacagaggcacaggttc

SEQ ID NO: 53211 - DNA, 20 bp, Artificial Sequence
  Description of Artificial Sequence: Synthetic oligonucleotide
  Target: SCNA; (-) strand; PAM type: YTN; PAM sequence: CTT
tgtaaacagaggcacaggtt

SEQ ID NO: 53212 - DNA, 20 bp, Artificial Sequence
  Description of Artificial Sequence: Synthetic oligonucleotide
  Target: SCNA; (-) strand; PAM type: YTN; PAM sequence: TTG
ctttgtaaacagaggcacag

SEQ ID NO: 53213 - DNA, 20 bp, Artificial Sequence
  Description of Artificial Sequence: Synthetic oligonucleotide
  Target: SCNA; (-) strand; PAM type: YTN; PAM sequence: TTG
cattgctttgtaaacagagg

SEQ ID NO: 53214 - DNA, 20 bp, Artificial Sequence
  Description of Artificial Sequence: Synthetic oligonucleotide
  Target: SCNA; (-) strand; PAM type: YTN; PAM sequence: TTC
ccattgcattgctttgtaaa

SEQ ID NO: 53215 - DNA, 20 bp, Artificial Sequence
  Description of Artificial Sequence: Synthetic oligonucleotide
  Target: SCNA; (-) strand; PAM type: YTN; PAM sequence: TTC
agcgggcaaagtggtggtga

SEQ ID NO: 53216 - DNA, 20 bp, Artificial Sequence
  Description of Artificial Sequence: Synthetic oligonucleotide
  Target: SCNA; (-) strand; PAM type: YTN; PAM sequence: TTT
cagcgggcaaagtggtggtg

SEQ ID NO: 53217 - DNA, 20 bp, Artificial Sequence
  Description of Artificial Sequence: Synthetic oligonucleotide
  Target: SCNA; (-) strand; PAM type: YTN; PAM sequence: TTA
agaacatttcagcgggcaaa

SEQ ID NO: 53218 - DNA, 20 bp, Artificial Sequence
  Description of Artificial Sequence: Synthetic oligonucleotide
  Target: SCNA; (-) strand; PAM type: YTN; PAM sequence: TTA
tggtgggtggggttaagaac

SEQ ID NO: 53219 - DNA, 20 bp, Artificial Sequence
  Description of Artificial Sequence: Synthetic oligonucleotide
  Target: SCNA; (-) strand; PAM type: YTN; PAM sequence: TTT
atggtgggtggggttaagaa

SEQ ID NO: 53220 - DNA, 20 bp, Artificial Sequence
  Description of Artificial Sequence: Synthetic oligonucleotide
  Target: SCNA; (-) strand; PAM type: YTN; PAM sequence: TTT
tatggtgggtggggttaaga

SEQ ID NO: 53221 - DNA, 20 bp, Artificial Sequence
  Description of Artificial Sequence: Synthetic oligonucleotide
  Target: SCNA; (-) strand; PAM type: YTN; PAM sequence: CTT
ttatggtgggtggggttaag

SEQ ID NO: 53222 - DNA, 20 bp, Artificial Sequence
  Description of Artificial Sequence: Synthetic oligonucleotide
  Target: SCNA; (-) strand; PAM type: YTN; PAM sequence: TTA
tcatcaccttttatggtggg

SEQ ID NO: 53223 - DNA, 20 bp, Artificial Sequence
  Description of Artificial Sequence: Synthetic oligonucleotide
  Target: SCNA; (-) strand; PAM type: YTN; PAM sequence: TTT
atcatcaccttttatggtgg

SEQ ID NO: 53224 - DNA, 20 bp, Artificial Sequence
  Description of Artificial Sequence: Synthetic oligonucleotide
  Target: SCNA; (-) strand; PAM type: YTN; PAM sequence: TTG
aagcaacaatttatcatcac

SEQ ID NO: 53225 - DNA, 20 bp, Artificial Sequence
  Description of Artificial Sequence: Synthetic oligonucleotide
  Target: SCNA; (-) strand; PAM type: YTN; PAM sequence: TTT
gaagcaacaatttatcatca

SEQ ID NO: 53226 - DNA, 20 bp, Artificial Sequence
  Description of Artificial Sequence: Synthetic oligonucleotide
  Target: SCNA; (-) strand; PAM type: YTN; PAM sequence: TTC
aatcagcatgagtttgaagc

SEQ ID NO: 53227 - DNA, 20 bp, Artificial Sequence
  Description of Artificial Sequence: Synthetic oligonucleotide
  Target: SCNA; (-) strand; PAM type: YTN; PAM sequence: TTT
caatcagcatgagtttgaag

SEQ ID NO: 53228 - DNA, 20 bp, Artificial Sequence
  Description of Artificial Sequence: Synthetic oligonucleotide
  Target: SCNA; (-) strand; PAM type: YTN; PAM sequence: CTG
gaaaatttcaatcagcatga

SEQ ID NO: 53229 - DNA, 20 bp, Artificial Sequence
  Description of Artificial Sequence: Synthetic oligonucleotide
  Target: SCNA; (-) strand; PAM type: YTN; PAM sequence: TTA
aaaatagctggaaaatttca

SEQ ID NO: 53230 - DNA, 20 bp, Artificial Sequence
  Description of Artificial Sequence: Synthetic oligonucleotide
  Target: SCNA; (-) strand; PAM type: YTN; PAM sequence: TTT
aaaaatagctggaaaatttc

SEQ ID NO: 53231 - DNA, 20 bp, Artificial Sequence
  Description of Artificial Sequence: Synthetic oligonucleotide
  Target: SCNA; (-) strand; PAM type: YTN; PAM sequence: TTA
tttaaaaatagctggaaaat

SEQ ID NO: 53232 - DNA, 20 bp, Artificial Sequence
  Description of Artificial Sequence: Synthetic oligonucleotide
  Target: SCNA; (-) strand; PAM type: YTN; PAM sequence: TTG
tcatataacatagaagcaag

SEQ ID NO: 53233 - DNA, 20 bp, Artificial Sequence
  Description of Artificial Sequence: Synthetic oligonucleotide
  Target: SCNA; (-) strand; PAM type: YTN; PAM sequence: CTG
aaagaagcattgtcatataa

SEQ ID NO: 53234 - DNA, 20 bp, Artificial Sequence
  Description of Artificial Sequence: Synthetic oligonucleotide
  Target: SCNA; (-) strand; PAM type: YTN; PAM sequence: TTC
acctgaaagaagcattgtca

SEQ ID NO: 53235 - DNA, 20 bp, Artificial Sequence
  Description of Artificial Sequence: Synthetic oligonucleotide
  Target: SCNA; (-) strand; PAM type: YTN; PAM sequence: TTT
cacctgaaagaagcattgtc

SEQ ID NO: 53236 - DNA, 20 bp, Artificial Sequence
  Description of Artificial Sequence: Synthetic oligonucleotide
  Target: SCNA; (-) strand; PAM type: YTN; PAM sequence: TTT
tcacctgaaagaagcattgt

SEQ ID NO: 53237 - DNA, 20 bp, Artificial Sequence
  Description of Artificial Sequence: Synthetic oligonucleotide
  Target: SCNA; (-) strand; PAM type: YTN; PAM sequence: TTC
caggacattttcacctgaaa

SEQ ID NO: 53238 - DNA, 20 bp, Artificial Sequence
  Description of Artificial Sequence: Synthetic oligonucleotide
  Target: SCNA; (-) strand; PAM type: YTN; PAM sequence: TTT
ccaggacattttcacctgaa

SEQ ID NO: 53239 - DNA, 20 bp, Artificial Sequence
  Description of Artificial Sequence: Synthetic oligonucleotide
  Target: SCNA; (-) strand; PAM type: YTN; PAM sequence: TTG
tttccaggacattttcacct

SEQ ID NO: 53240 - DNA, 20 bp, Artificial Sequence
  Description of Artificial Sequence: Synthetic oligonucleotide
  Target: SCNA; (-) strand; PAM type: YTN; PAM sequence: CTT
gtttccaggacattttcacc

SEQ ID NO: 53241 - DNA, 20 bp, Artificial Sequence
  Description of Artificial Sequence: Synthetic oligonucleotide
  Target: SCNA; (-) strand; PAM type: YTN; PAM sequence: TTA
cttgtttccaggacattttc

SEQ ID NO: 53242 - DNA, 20 bp, Artificial Sequence
  Description of Artificial Sequence: Synthetic oligonucleotide
  Target: SCNA; (-) strand; PAM type: YTN; PAM sequence: TTA
taaaaaaaaaaaaaaaaaaa

SEQ ID NO: 53243 - DNA, 20 bp, Artificial Sequence
  Description of Artificial Sequence: Synthetic oligonucleotide
  Target: SCNA; (-) strand; PAM type: YTN; PAM sequence: TTT
ataaaaaaaaaaaaaaaaaa

SEQ ID NO: 53244 - DNA, 20 bp, Artificial Sequence
  Description of Artificial Sequence: Synthetic oligonucleotide
  Target: SCNA; (-) strand; PAM type: YTN; PAM sequence: CTT
tataaaaaaaaaaaaaaaaa

SEQ ID NO: 53245 - DNA, 20 bp, Artificial Sequence
  Description of Artificial Sequence: Synthetic oligonucleotide
  Target: SCNA; (-) strand; PAM type: YTN; PAM sequence: TTC
tttataaaaaaaaaaaaaaa

SEQ ID NO: 53246 - DNA, 20 bp, Artificial Sequence
  Description of Artificial Sequence: Synthetic oligonucleotide
  Target: SCNA; (-) strand; PAM type: YTN; PAM sequence: TTT
ctttataaaaaaaaaaaaaa

SEQ ID NO: 53247 - DNA, 20 bp, Artificial Sequence
  Description of Artificial Sequence: Synthetic oligonucleotide
  Target: SCNA; (-) strand; PAM type: YTN; PAM sequence: CTT
tctttataaaaaaaaaaaaa

SEQ ID NO: 53248 - DNA, 20 bp, Artificial Sequence
  Description of Artificial Sequence: Synthetic oligonucleotide
  Target: SCNA; (-) strand; PAM type: YTN; PAM sequence: TTC
tttctttataaaaaaaaaaa

SEQ ID NO: 53249 - DNA, 20 bp, Artificial Sequence
  Description of Artificial Sequence: Synthetic oligonucleotide
  Target: SCNA; (-) strand; PAM type: YTN; PAM sequence: CTT
ctttctttataaaaaaaaaa

SEQ ID NO: 53250 - DNA, 20 bp, Artificial Sequence
  Description of Artificial Sequence: Synthetic oligonucleotide
  Target: SCNA; (-) strand; PAM type: YTN; PAM sequence: TTA
aacttctttctttataaaaa

SEQ ID NO: 53251 - DNA, 20 bp, Artificial Sequence
  Description of Artificial Sequence: Synthetic oligonucleotide
  Target: SCNA; (-) strand; PAM type: YTN; PAM sequence: CTA
tgcagaacggtgagtcaatt

SEQ ID NO: 53252 - DNA, 20 bp, Artificial Sequence
  Description of Artificial Sequence: Synthetic oligonucleotide
  Target: SCNA; (-) strand; PAM type: YTN; PAM sequence: CTC
agctatgcagaacggtgagt

SEQ ID NO: 53253 - DNA, 20 bp, Artificial Sequence
  Description of Artificial Sequence: Synthetic oligonucleotide
  Target: SCNA; (-) strand; PAM type: YTN; PAM sequence: CTC
ctcagctatgcagaacggtg

SEQ ID NO: 53254 - DNA, 20 bp, Artificial Sequence
  Description of Artificial Sequence: Synthetic oligonucleotide
  Target: SCNA; (-) strand; PAM type: YTN; PAM sequence: CTG
aggcctcctcagctatgcag

SEQ ID NO: 53255 - DNA, 20 bp, Artificial Sequence
  Description of Artificial Sequence: Synthetic oligonucleotide
  Target: SCNA; (-) strand; PAM type: YTN; PAM sequence: TTC
ctgaggcctcctcagctatg

SEQ ID NO: 53256 - DNA, 20 bp, Artificial Sequence
  Description of Artificial Sequence: Synthetic oligonucleotide
  Target: SCNA; (-) strand; PAM type: YTN; PAM sequence: TTT
cctgaggcctcctcagctat

SEQ ID NO: 53257 - DNA, 20 bp, Artificial Sequence
  Description of Artificial Sequence: Synthetic oligonucleotide
  Target: SCNA; (-) strand; PAM type: YTN; PAM sequence: TTG
taagtttcctgaggcctcct

SEQ ID NO: 53258 - DNA, 20 bp, Artificial Sequence
  Description of Artificial Sequence: Synthetic oligonucleotide
  Target: SCNA; (-) strand; PAM type: YTN; PAM sequence: CTA
tgattgtaagtttcctgagg

SEQ ID NO: 53259 - DNA, 20 bp, Artificial Sequence
  Description of Artificial Sequence: Synthetic oligonucleotide
  Target: SCNA; (-) strand; PAM type: YTN; PAM sequence: CTG
ctatgattgtaagtttcctg

SEQ ID NO: 53260 - DNA, 20 bp, Artificial Sequence
  Description of Artificial Sequence: Synthetic oligonucleotide
  Target: SCNA; (-) strand; PAM type: YTN; PAM sequence: TTC
tgctatgattgtaagtttcc

SEQ ID NO: 53261 - DNA, 20 bp, Artificial Sequence
  Description of Artificial Sequence: Synthetic oligonucleotide
  Target: SCNA; (-) strand; PAM type: YTN; PAM sequence: CTT
ctgctatgattgtaagtttc

SEQ ID NO: 53262 - DNA, 20 bp, Artificial Sequence
  Description of Artificial Sequence: Synthetic oligonucleotide
  Target: SCNA; (-) strand; PAM type: YTN; PAM sequence: TTC
cccttctgctatgattgtaa

SEQ ID NO: 53263 - DNA, 20 bp, Artificial Sequence
  Description of Artificial Sequence: Synthetic oligonucleotide
  Target: SCNA; (-) strand; PAM type: YTN; PAM sequence: CTT
ccccttctgctatgattgta

SEQ ID NO: 53264 - DNA, 20 bp, Artificial Sequence
  Description of Artificial Sequence: Synthetic oligonucleotide
  Target: SCNA; (-) strand; PAM type: YTN; PAM sequence: TTC
cccttccccttctgctatga

SEQ ID NO: 53265 - DNA, 20 bp, Artificial Sequence
  Description of Artificial Sequence: Synthetic oligonucleotide
  Target: SCNA; (-) strand; PAM type: YTN; PAM sequence: CTT
ccccttccccttctgctatg

SEQ ID NO: 53266 - DNA, 20 bp, Artificial Sequence
  Description of Artificial Sequence: Synthetic oligonucleotide
  Target: SCNA; (-) strand; PAM type: YTN; PAM sequence: TTG
cttccccttccccttctgct

SEQ ID NO: 53267 - DNA, 20 bp, Artificial Sequence
  Description of Artificial Sequence: Synthetic oligonucleotide
  Target: SCNA; (-) strand; PAM type: YTN; PAM sequence: CTT
gcttccccttccccttctgc

SEQ ID NO: 53268 - DNA, 20 bp, Artificial Sequence
  Description of Artificial Sequence: Synthetic oligonucleotide
  Target: SCNA; (-) strand; PAM type: YTN; PAM sequence: CTG
ccatgtgaggtgtgccttgc

SEQ ID NO: 53269 - DNA, 20 bp, Artificial Sequence
  Description of Artificial Sequence: Synthetic oligonucleotide
  Target: SCNA; (-) strand; PAM type: YTN; PAM sequence: CTC
ctgccatgtgaggtgtgcct

SEQ ID NO: 53270 - DNA, 20 bp, Artificial Sequence
  Description of Artificial Sequence: Synthetic oligonucleotide
  Target: SCNA; (-) strand; PAM type: YTN; PAM sequence: TTC
tcctgccatgtgaggtgtgc

SEQ ID NO: 53271 - DNA, 20 bp, Artificial Sequence
  Description of Artificial Sequence: Synthetic oligonucleotide
  Target: SCNA; (-) strand; PAM type: YTN; PAM sequence: TTT
ctcctgccatgtgaggtgtg

SEQ ID NO: 53272 - DNA, 20 bp, Artificial Sequence
  Description of Artificial Sequence: Synthetic oligonucleotide
  Target: SCNA; (-) strand; PAM type: YTN; PAM sequence: CTT
tctcctgccatgtgaggtgt

SEQ ID NO: 53273 - DNA, 20 bp, Artificial Sequence
  Description of Artificial Sequence: Synthetic oligonucleotide
  Target: SCNA; (-) strand; PAM type: YTN; PAM sequence: CTC
tttctcctgccatgtgaggt

SEQ ID NO: 53274 - DNA, 20 bp, Artificial Sequence
  Description of Artificial Sequence: Synthetic oligonucleotide
  Target: SCNA; (-) strand; PAM type: YTN; PAM sequence: CTC
tctttctcctgccatgtgag

SEQ ID NO: 53275 - DNA, 20 bp, Artificial Sequence
  Description of Artificial Sequence: Synthetic oligonucleotide
  Target: SCNA; (-) strand; PAM type: YTN; PAM sequence: CTC
tctctttctcctgccatgtg

SEQ ID NO: 53276 - DNA, 20 bp, Artificial Sequence
  Description of Artificial Sequence: Synthetic oligonucleotide
  Target: SCNA; (-) strand; PAM type: YTN; PAM sequence: TTG
ctctctctttctcctgccat

SEQ ID NO: 53277 - DNA, 20 bp, Artificial Sequence
  Description of Artificial Sequence: Synthetic oligonucleotide
  Target: SCNA; (-) strand; PAM type: YTN; PAM sequence: TTT
gctctctctttctcctgcca

SEQ ID NO: 53278 - DNA, 20 bp, Artificial Sequence
  Description of Artificial Sequence: Synthetic oligonucleotide
  Target: SCNA; (-) strand; PAM type: YTN; PAM sequence: TTT
tgctctctctttctcctgcc

SEQ ID NO: 53279 - DNA, 20 bp, Artificial Sequence
  Description of Artificial Sequence: Synthetic oligonucleotide
  Target: SCNA; (-) strand; PAM type: YTN; PAM sequence: CTT
ttgctctctctttctcctgc

SEQ ID NO: 53280 - DNA, 20 bp, Artificial Sequence
  Description of Artificial Sequence: Synthetic oligonucleotide
  Target: SCNA; (-) strand; PAM type: YTN; PAM sequence: TTC
cttttgctctctctttctcc

SEQ ID NO: 53281 - DNA, 20 bp, Artificial Sequence
  Description of Artificial Sequence: Synthetic oligonucleotide
  Target: SCNA; (-) strand; PAM type: YTN; PAM sequence: CTT
ccttttgctctctctttctc

SEQ ID NO: 53282 - DNA, 20 bp, Artificial Sequence
  Description of Artificial Sequence: Synthetic oligonucleotide
  Target: SCNA; (-) strand; PAM type: YTN; PAM sequence: TTA
aaatcatggcacttcctttt

SEQ ID NO: 53283 - DNA, 20 bp, Artificial Sequence
  Description of Artificial Sequence: Synthetic oligonucleotide
  Target: SCNA; (-) strand; PAM type: YTN; PAM sequence: TTT
aaaatcatggcacttccttt

SEQ ID NO: 53284 - DNA, 20 bp, Artificial Sequence
  Description of Artificial Sequence: Synthetic oligonucleotide
  Target: SCNA; (-) strand; PAM type: YTN; PAM sequence: CTA
atggtttaaaatcatggcac

SEQ ID NO: 53285 - DNA, 20 bp, Artificial Sequence
  Description of Artificial Sequence: Synthetic oligonucleotide
  Target: SCNA; (-) strand; PAM type: YTN; PAM sequence: CTC
ataagatctaatggtttaaa

SEQ ID NO: 53286 - DNA, 20 bp, Artificial Sequence
  Description of Artificial Sequence: Synthetic oligonucleotide
  Target: SCNA; (-) strand; PAM type: YTN; PAM sequence: TTC
tcataagatctaatggttta

SEQ ID NO: 53287 - DNA, 20 bp, Artificial Sequence
  Description of Artificial Sequence: Synthetic oligonucleotide
  Target: SCNA; (-) strand; PAM type: YTN; PAM sequence: CTC
atgatagtgaatgagttctc

SEQ ID NO: 53288 - DNA, 20 bp, Artificial Sequence
  Description of Artificial Sequence: Synthetic oligonucleotide
  Target: SCNA; (-) strand; PAM type: YTN; PAM sequence: TTC
tcatgatagtgaatgagttc

SEQ ID NO: 53289 - DNA, 20 bp, Artificial Sequence
  Description of Artificial Sequence: Synthetic oligonucleotide
  Target: SCNA; (-) strand; PAM type: YTN; PAM sequence: CTG
ttctcatgatagtgaatgag

SEQ ID NO: 53290 - DNA, 20 bp, Artificial Sequence
  Description of Artificial Sequence: Synthetic oligonucleotide
  Target: SCNA; (-) strand; PAM type: YTN; PAM sequence: CTC
catgctgttctcatgatagt

SEQ ID NO: 53291 - DNA, 20 bp, Artificial Sequence
  Description of Artificial Sequence: Synthetic oligonucleotide
  Target: SCNA; (-) strand; PAM type: YTN; PAM sequence: TTC
tccatgctgttctcatgata

SEQ ID NO: 53292 - DNA, 20 bp, Artificial Sequence
  Description of Artificial Sequence: Synthetic oligonucleotide
  Target: SCNA; (-) strand; PAM type: YTN; PAM sequence: TTT
ctccatgctgttctcatgat

SEQ ID NO: 53293 - DNA, 20 bp, Artificial Sequence
  Description of Artificial Sequence: Synthetic oligonucleotide
  Target: SCNA; (-) strand; PAM type: YTN; PAM sequence: TTG
gatcatgggggtagtttctc

SEQ ID NO: 53294 - DNA, 20 bp, Artificial Sequence
  Description of Artificial Sequence: Synthetic oligonucleotide
  Target: SCNA; (-) strand; PAM type: YTN; PAM sequence: TTA
tgggaggtgattggatcatg

SEQ ID NO: 53295 - DNA, 20 bp, Artificial Sequence
  Description of Artificial Sequence: Synthetic oligonucleotide
  Target: SCNA; (-) strand; PAM type: YTN; PAM sequence: CTT
atgggaggtgattggatcat

SEQ ID NO: 53296 - DNA, 20 bp, Artificial Sequence
  Description of Artificial Sequence: Synthetic oligonucleotide
  Target: SCNA; (-) strand; PAM type: YTN; PAM sequence: TTG
agggagggaccttatgggag

SEQ ID NO: 53297 - DNA, 20 bp, Artificial Sequence
  Description of Artificial Sequence: Synthetic oligonucleotide
  Target: SCNA; (-) strand; PAM type: YTN; PAM sequence: TTG
taacccccatgtgttgaggg

SEQ ID NO: 53298 - DNA, 20 bp, Artificial Sequence
  Description of Artificial Sequence: Synthetic oligonucleotide
  Target: SCNA; (-) strand; PAM type: YTN; PAM sequence: TTG
aattgtaacccccatgtgtt

SEQ ID NO: 53299 - DNA, 20 bp, Artificial Sequence
  Description of Artificial Sequence: Synthetic oligonucleotide
  Target: SCNA; (-) strand; PAM type: YTN; PAM sequence: CTT
gaattgtaacccccatgtgt

SEQ ID NO: 53300 - DNA, 20 bp, Artificial Sequence
  Description of Artificial Sequence: Synthetic oligonucleotide
  Target: SCNA; (-) strand; PAM type: YTN; PAM sequence: CTC
atcttgaattgtaaccccca

SEQ ID NO: 53301 - DNA, 20 bp, Artificial Sequence
  Description of Artificial Sequence: Synthetic oligonucleotide
  Target: SCNA; (-) strand; PAM type: YTN; PAM sequence: TTG
tgtccccacccaaatctcat

SEQ ID NO: 53302 - DNA, 20 bp, Artificial Sequence
  Description of Artificial Sequence: Synthetic oligonucleotide
  Target: SCNA; (-) strand; PAM type: YTN; PAM sequence: TTT
gtgtccccacccaaatctca

SEQ ID NO: 53303 - DNA, 20 bp, Artificial Sequence
  Description of Artificial Sequence: Synthetic oligonucleotide
  Target: SCNA; (-) strand; PAM type: YTN; PAM sequence: CTT
tgtgtccccacccaaatctc

SEQ ID NO: 53304 - DNA, 20 bp, Artificial Sequence
  Description of Artificial Sequence: Synthetic oligonucleotide
  Target: SCNA; (-) strand; PAM type: YTN; PAM sequence: TTG
gctttgtgtccccacccaaa

SEQ ID NO: 53305 - DNA, 20 bp, Artificial Sequence
  Description of Artificial Sequence: Synthetic oligonucleotide
  Target: SCNA; (-) strand; PAM type: YTN; PAM sequence: TTT
ggctttgtgtccccacccaa

SEQ ID NO: 53306 - DNA, 20 bp, Artificial Sequence
  Description of Artificial Sequence: Synthetic oligonucleotide
  Target: SCNA; (-) strand; PAM type: YTN; PAM sequence: CTA
ccatccatagtgatacggtt

SEQ ID NO: 53307 - DNA, 20 bp, Artificial Sequence
  Description of Artificial Sequence: Synthetic oligonucleotide
  Target: SCNA; (-) strand; PAM type: YTN; PAM sequence: CTG
atactaccatccatagtgat

SEQ ID NO: 53308 - DNA, 20 bp, Artificial Sequence
  Description of Artificial Sequence: Synthetic oligonucleotide
  Target: SCNA; (-) strand; PAM type: YTN; PAM sequence: TTA
aataaaaaaagaaaatcaga

SEQ ID NO: 53309 - DNA, 20 bp, Artificial Sequence
  Description of Artificial Sequence: Synthetic oligonucleotide
  Target: SCNA; (-) strand; PAM type: YTN; PAM sequence: TTT
aaataaaaaaagaaaatcag

SEQ ID NO: 53310 - DNA, 20 bp, Artificial Sequence
  Description of Artificial Sequence: Synthetic oligonucleotide
  Target: SCNA; (-) strand; PAM type: YTN; PAM sequence: TTA
aaaaaaaagaatttaaataa

SEQ ID NO: 53311 - DNA, 20 bp, Artificial Sequence
  Description of Artificial Sequence: Synthetic oligonucleotide
  Target: SCNA; (-) strand; PAM type: YTN; PAM sequence: TTT
aaaaaaaaagaatttaaata

SEQ ID NO: 53312 - DNA, 20 bp, Artificial Sequence
  Description of Artificial Sequence: Synthetic oligonucleotide
  Target: SCNA; (-) strand; PAM type: YTN; PAM sequence: TTA
aagtataatttaaaaaaaaa

SEQ ID NO: 53313 - DNA, 20 bp, Artificial Sequence
  Description of Artificial Sequence: Synthetic oligonucleotide
  Target: SCNA; (-) strand; PAM type: YTN; PAM sequence: CTT
aaagtataatttaaaaaaaa

SEQ ID NO: 53314 - DNA, 20 bp, Artificial Sequence
  Description of Artificial Sequence: Synthetic oligonucleotide
  Target: SCNA; (-) strand; PAM type: YTN; PAM sequence: CTA
aaacttaaagtataatttaa

SEQ ID NO: 53315 - DNA, 20 bp, Artificial Sequence
  Description of Artificial Sequence: Synthetic oligonucleotide
  Target: SCNA; (-) strand; PAM type: YTN; PAM sequence: CTG
cacaatgtgcacatgtaccc

SEQ ID NO: 53316 - DNA, 20 bp, Artificial Sequence
  Description of Artificial Sequence: Synthetic oligonucleotide
  Target: SCNA; (-) strand; PAM type: YTN; PAM sequence: CTA
acctgcacaatgtgcacatg

SEQ ID NO: 53317 - DNA, 20 bp, Artificial Sequence
  Description of Artificial Sequence: Synthetic oligonucleotide
  Target: SCNA; (-) strand; PAM type: YTN; PAM sequence: TTA
aaggtagccaggtcacatgt

SEQ ID NO: 53318 - DNA, 20 bp, Artificial Sequence
  Description of Artificial Sequence: Synthetic oligonucleotide
  Target: SCNA; (-) strand; PAM type: YTN; PAM sequence: TTT
aaaggtagccaggtcacatg

SEQ ID NO: 53319 - DNA, 20 bp, Artificial Sequence
  Description of Artificial Sequence: Synthetic oligonucleotide
  Target: SCNA; (-) strand; PAM type: YTN; PAM sequence: CTT
taaaggtagccaggtcacat

SEQ ID NO: 53320 - DNA, 20 bp, Artificial Sequence
  Description of Artificial Sequence: Synthetic oligonucleotide
  Target: SCNA; (-) strand; PAM type: YTN; PAM sequence: TTG
gaggagtcaatatccatctt

SEQ ID NO: 53321 - DNA, 20 bp, Artificial Sequence
  Description of Artificial Sequence: Synthetic oligonucleotide
  Target: SCNA; (-) strand; PAM type: YTN; PAM sequence: TTT
ggaggagtcaatatccatct

SEQ ID NO: 53322 - DNA, 20 bp, Artificial Sequence
  Description of Artificial Sequence: Synthetic oligonucleotide
  Target: SCNA; (-) strand; PAM type: YTN; PAM sequence: TTT
tggaggagtcaatatccatc

SEQ ID NO: 53323 - DNA, 20 bp, Artificial Sequence
  Description of Artificial Sequence: Synthetic oligonucleotide
  Target: SCNA; (-) strand; PAM type: YTN; PAM sequence: TTC
aagtgaaagcattttggagg

SEQ ID NO: 53324 - DNA, 20 bp, Artificial Sequence
  Description of Artificial Sequence: Synthetic oligonucleotide
  Target: SCNA; (-) strand; PAM type: YTN; PAM sequence: TTT
caagtgaaagcattttggag

SEQ ID NO: 53325 - DNA, 20 bp, Artificial Sequence
  Description of Artificial Sequence: Synthetic oligonucleotide
  Target: SCNA; (-) strand; PAM type: YTN; PAM sequence: TTT
tcaagtgaaagcattttgga

SEQ ID NO: 53326 - DNA, 20 bp, Artificial Sequence
  Description of Artificial Sequence: Synthetic oligonucleotide
  Target: SCNA; (-) strand; PAM type: YTN; PAM sequence: TTT
ttcaagtgaaagcattttgg

SEQ ID NO: 53327 - DNA, 20 bp, Artificial Sequence
  Description of Artificial Sequence: Synthetic oligonucleotide
  Target: SCNA; (-) strand; PAM type: YTN; PAM sequence: TTT
tttcaagtgaaagcattttg

SEQ ID NO: 53328 - DNA, 20 bp, Artificial Sequence
  Description of Artificial Sequence: Synthetic oligonucleotide
  Target: SCNA; (-) strand; PAM type: YTN; PAM sequence: TTT
ttttcaagtgaaagcatttt

SEQ ID NO: 53329 - DNA, 20 bp, Artificial Sequence
  Description of Artificial Sequence: Synthetic oligonucleotide
  Target: SCNA; (-) strand; PAM type: YTN; PAM sequence: TTT
tttttcaagtgaaagcattt

SEQ ID NO: 53330 - DNA, 20 bp, Artificial Sequence
  Description of Artificial Sequence: Synthetic oligonucleotide
  Target: SCNA; (-) strand; PAM type: YTN; PAM sequence: TTT
ttttttcaagtgaaagcatt

SEQ ID NO: 53331 - DNA, 20 bp, Artificial Sequence
  Description of Artificial Sequence: Synthetic oligonucleotide
  Target: SCNA; (-) strand; PAM type: YTN; PAM sequence: TTT
tttttttcaagtgaaagcat

SEQ ID NO: 53332 - DNA, 20 bp, Artificial Sequence
  Description of Artificial Sequence: Synthetic oligonucleotide
  Target: SCNA; (-) strand; PAM type: YTN; PAM sequence: CTT
ttttttttcaagtgaaagca

SEQ ID NO: 53333 - DNA, 20 bp, Artificial Sequence
  Description of Artificial Sequence: Synthetic oligonucleotide
  Target: SCNA; (-) strand; PAM type: YTN; PAM sequence: TTC
ttttttttttcaagtgaaag

SEQ ID NO: 53334 - DNA, 20 bp, Artificial Sequence
  Description of Artificial Sequence: Synthetic oligonucleotide
  Target: SCNA; (-) strand; PAM type: YTN; PAM sequence: CTT
cttttttttttcaagtgaaa

SEQ ID NO: 53335 - DNA, 20 bp, Artificial Sequence
  Description of Artificial Sequence: Synthetic oligonucleotide
  Target: SCNA; (-) strand; PAM type: YTN; PAM sequence: TTC
ttcttttttttttcaagtga

SEQ ID NO: 53336 - DNA, 20 bp, Artificial Sequence
  Description of Artificial Sequence: Synthetic oligonucleotide
  Target: SCNA; (-) strand; PAM type: YTN; PAM sequence: TTT
cttcttttttttttcaagtg

SEQ ID NO: 53337 - DNA, 20 bp, Artificial Sequence
  Description of Artificial Sequence: Synthetic oligonucleotide
  Target: SCNA; (-) strand; PAM type: YTN; PAM sequence: TTT
tcttcttttttttttcaagt

SEQ ID NO: 53338 - DNA, 20 bp, Artificial Sequence
  Description of Artificial Sequence: Synthetic oligonucleotide
  Target: SCNA; (-) strand; PAM type: YTN; PAM sequence: TTT
ttcttcttttttttttcaag

SEQ ID NO: 53339 - DNA, 20 bp, Artificial Sequence
  Description of Artificial Sequence: Synthetic oligonucleotide
  Target: SCNA; (-) strand; PAM type: YTN; PAM sequence: TTT
tttcttcttttttttttcaa

SEQ ID NO: 53340 - DNA, 20 bp, Artificial Sequence
  Description of Artificial Sequence: Synthetic oligonucleotide
  Target: SCNA; (-) strand; PAM type: YTN; PAM sequence: TTT
ttttcttcttttttttttca

SEQ ID NO: 53341 - DNA, 20 bp, Artificial Sequence
  Description of Artificial Sequence: Synthetic oligonucleotide
  Target: SCNA; (-) strand; PAM type: YTN; PAM sequence: TTG
aggtttttttcttctttttt

SEQ ID NO: 53342 - DNA, 20 bp, Artificial Sequence
  Description of Artificial Sequence: Synthetic oligonucleotide
  Target: SCNA; (-) strand; PAM type: YTN; PAM sequence: TTT
gaggtttttttcttcttttt

SEQ ID NO: 53343 - DNA, 20 bp, Artificial Sequence
  Description of Artificial Sequence: Synthetic oligonucleotide
  Target: SCNA; (-) strand; PAM type: YTN; PAM sequence: TTT
tgaggtttttttcttctttt

SEQ ID NO: 53344 - DNA, 20 bp, Artificial Sequence
  Description of Artificial Sequence: Synthetic oligonucleotide
  Target: SCNA; (-) strand; PAM type: YTN; PAM sequence: TTT
ttgaggtttttttcttcttt

SEQ ID NO: 53345 - DNA, 20 bp, Artificial Sequence
  Description of Artificial Sequence: Synthetic oligonucleotide
  Target: SCNA; (-) strand; PAM type: YTN; PAM sequence: CTC
atttttgaggtttttttctt

SEQ ID NO: 53346 - DNA, 20 bp, Artificial Sequence
  Description of Artificial Sequence: Synthetic oligonucleotide
  Target: SCNA; (-) strand; PAM type: YTN; PAM sequence: TTC
tcatttttgaggtttttttc

SEQ ID NO: 53347 - DNA, 20 bp, Artificial Sequence
  Description of Artificial Sequence: Synthetic oligonucleotide
  Target: SCNA; (-) strand; PAM type: YTN; PAM sequence: CTT
ctcatttttgaggttttttt

SEQ ID NO: 53348 - DNA, 20 bp, Artificial Sequence
  Description of Artificial Sequence: Synthetic oligonucleotide
  Target: SCNA; (-) strand; PAM type: YTN; PAM sequence: CTC
aagtcggaaagcccttctca

SEQ ID NO: 53349 - DNA, 20 bp, Artificial Sequence
  Description of Artificial Sequence: Synthetic oligonucleotide
  Target: SCNA; (-) strand; PAM type: YTN; PAM sequence: TTC
ctcaagtcggaaagcccttc

SEQ ID NO: 53350 - DNA, 20 bp, Artificial Sequence
  Description of Artificial Sequence: Synthetic oligonucleotide
  Target: SCNA; (-) strand; PAM type: YTN; PAM sequence: TTT
cctcaagtcggaaagccctt

SEQ ID NO: 53351 - DNA, 20 bp, Artificial Sequence
  Description of Artificial Sequence: Synthetic oligonucleotide
  Target: SCNA; (-) strand; PAM type: YTN; PAM sequence: CTT
tcctcaagtcggaaagccct

SEQ ID NO: 53352 - DNA, 20 bp, Artificial Sequence
  Description of Artificial Sequence: Synthetic oligonucleotide
  Target: SCNA; (-) strand; PAM type: YTN; PAM sequence: TTG
ctttcctcaagtcggaaagc

SEQ ID NO: 53353 - DNA, 20 bp, Artificial Sequence
  Description of Artificial Sequence: Synthetic oligonucleotide
  Target: SCNA; (-) strand; PAM type: YTN; PAM sequence: TTT
gctttcctcaagtcggaaag

SEQ ID NO: 53354 - DNA, 20 bp, Artificial Sequence
  Description of Artificial Sequence: Synthetic oligonucleotide
  Target: SCNA; (-) strand; PAM type: YTN; PAM sequence: TTA
aaaagatttgctttcctcaa

SEQ ID NO: 53355 - DNA, 20 bp, Artificial Sequence
  Description of Artificial Sequence: Synthetic oligonucleotide
  Target: SCNA; (-) strand; PAM type: YTN; PAM sequence: CTA
gtgcaagttaaaaagatttg

SEQ ID NO: 53356 - DNA, 20 bp, Artificial Sequence
  Description of Artificial Sequence: Synthetic oligonucleotide
  Target: SCNA; (-) strand; PAM type: YTN; PAM sequence: TTC
ctagtgcaagttaaaaagat

SEQ ID NO: 53357 - DNA, 20 bp, Artificial Sequence
  Description of Artificial Sequence: Synthetic oligonucleotide
  Target: SCNA; (-) strand; PAM type: YTN; PAM sequence: CTA
agaggcaagaaaatgtcgtg

SEQ ID NO: 53358 - DNA, 20 bp, Artificial Sequence
  Description of Artificial Sequence: Synthetic oligonucleotide
  Target: SCNA; (-) strand; PAM type: YTN; PAM sequence: TTC
agaagcatccaaaatacaaa

SEQ ID NO: 53359 - DNA, 20 bp, Artificial Sequence
  Description of Artificial Sequence: Synthetic oligonucleotide
  Target: SCNA; (-) strand; PAM type: YTN; PAM sequence: CTT
cagaagcatccaaaatacaa

SEQ ID NO: 53360 - DNA, 20 bp, Artificial Sequence
  Description of Artificial Sequence: Synthetic oligonucleotide
  Target: SCNA; (-) strand; PAM type: YTN; PAM sequence: CTC
ttcagaagcatccaaaatac

SEQ ID NO: 53361 - DNA, 20 bp, Artificial Sequence
  Description of Artificial Sequence: Synthetic oligonucleotide
  Target: SCNA; (-) strand; PAM type: YTN; PAM sequence: TTC
tcttcagaagcatccaaaat

SEQ ID NO: 53362 - DNA, 20 bp, Artificial Sequence
  Description of Artificial Sequence: Synthetic oligonucleotide
  Target: SCNA; (-) strand; PAM type: YTN; PAM sequence: TTT
ctcttcagaagcatccaaaa

SEQ ID NO: 53363 - DNA, 20 bp, Artificial Sequence
  Description of Artificial Sequence: Synthetic oligonucleotide
  Target: SCNA; (-) strand; PAM type: YTN; PAM sequence: TTG
tttctcttcagaagcatcca

SEQ ID NO: 53364 - DNA, 20 bp, Artificial Sequence
  Description of Artificial Sequence: Synthetic oligonucleotide
  Target: SCNA; (-) strand; PAM type: YTN; PAM sequence: TTT
gtttctcttcagaagcatcc

SEQ ID NO: 53365 - DNA, 20 bp, Artificial Sequence
  Description of Artificial Sequence: Synthetic oligonucleotide
  Target: SCNA; (-) strand; PAM type: YTN; PAM sequence: CTT
tgtttctcttcagaagcatc

SEQ ID NO: 53366 - DNA, 20 bp, Artificial Sequence
  Description of Artificial Sequence: Synthetic oligonucleotide
  Target: SCNA; (-) strand; PAM type: YTN; PAM sequence: CTA
tatgtctttgtttctcttca

SEQ ID NO: 53367 - DNA, 20 bp, Artificial Sequence
  Description of Artificial Sequence: Synthetic oligonucleotide
  Target: SCNA; (-) strand; PAM type: YTN; PAM sequence: TTC
tatatgtctttgtttctctt

SEQ ID NO: 53368 - DNA, 20 bp, Artificial Sequence
  Description of Artificial Sequence: Synthetic oligonucleotide
  Target: SCNA; (-) strand; PAM type: YTN; PAM sequence: TTA
aattctatatgtctttgttt

SEQ ID NO: 53369 - DNA, 20 bp, Artificial Sequence
  Description of Artificial Sequence: Synthetic oligonucleotide
  Target: SCNA; (-) strand; PAM type: YTN; PAM sequence: TTT
aaattctatatgtctttgtt

SEQ ID NO: 53370 - DNA, 20 bp, Artificial Sequence
  Description of Artificial Sequence: Synthetic oligonucleotide
  Target: SCNA; (-) strand; PAM type: YTN; PAM sequence: CTA
caaataaacacagataatgt

SEQ ID NO: 53371 - DNA, 20 bp, Artificial Sequence
  Description of Artificial Sequence: Synthetic oligonucleotide
  Target: SCNA; (-) strand; PAM type: YTN; PAM sequence: TTC
tacaaataaacacagataat

SEQ ID NO: 53372 - DNA, 20 bp, Artificial Sequence
  Description of Artificial Sequence: Synthetic oligonucleotide
  Target: SCNA; (-) strand; PAM type: YTN; PAM sequence: TTA
aaaaacaaaatacaaaaaat

SEQ ID NO: 53373 - DNA, 20 bp, Artificial Sequence
  Description of Artificial Sequence: Synthetic oligonucleotide
  Target: SCNA; (-) strand; PAM type: YTN; PAM sequence: TTT
aaaaaacaaaatacaaaaaa

SEQ ID NO: 53374 - DNA, 20 bp, Artificial Sequence
  Description of Artificial Sequence: Synthetic oligonucleotide
  Target: SCNA; (-) strand; PAM type: YTN; PAM sequence: CTC
atttaaaaaacaaaatacaa

SEQ ID NO: 53375 - DNA, 20 bp, Artificial Sequence
  Description of Artificial Sequence: Synthetic oligonucleotide
  Target: SCNA; (-) strand; PAM type: YTN; PAM sequence: CTA
aatgtatgagatatcagaca

SEQ ID NO: 53376 - DNA, 20 bp, Artificial Sequence
  Description of Artificial Sequence: Synthetic oligonucleotide
  Target: SCNA; (-) strand; PAM type: YTN; PAM sequence: TTC
taaatgtatgagatatcaga

SEQ ID NO: 53377 - DNA, 20 bp, Artificial Sequence
  Description of Artificial Sequence: Synthetic oligonucleotide
  Target: SCNA; (-) strand; PAM type: YTN; PAM sequence: TTA
caaatattctaaatgtatga

SEQ ID NO: 53378 - DNA, 20 bp, Artificial Sequence
  Description of Artificial Sequence: Synthetic oligonucleotide
  Target: SCNA; (-) strand; PAM type: YTN; PAM sequence: CTA
ttacaaatattctaaatgta

SEQ ID NO: 53379 - DNA, 20 bp, Artificial Sequence
  Description of Artificial Sequence: Synthetic oligonucleotide
  Target: SCNA; (-) strand; PAM type: YTN; PAM sequence: TTC
tattacaaatattctaaatg

SEQ ID NO: 53380 - DNA, 20 bp, Artificial Sequence
  Description of Artificial Sequence: Synthetic oligonucleotide
  Target: SCNA; (-) strand; PAM type: YTN; PAM sequence: CTA
ttctattacaaatattctaa

SEQ ID NO: 53381 - DNA, 20 bp, Artificial Sequence
  Description of Artificial Sequence: Synthetic oligonucleotide
  Target: SCNA; (-) strand; PAM type: YTN; PAM sequence: TTG
ctattctattacaaatattc

SEQ ID NO: 53382 - DNA, 20 bp, Artificial Sequence
  Description of Artificial Sequence: Synthetic oligonucleotide
  Target: SCNA; (-) strand; PAM type: YTN; PAM sequence: TTT
gctattctattacaaatatt

SEQ ID NO: 53383 - DNA, 20 bp, Artificial Sequence
  Description of Artificial Sequence: Synthetic oligonucleotide
  Target: SCNA; (-) strand; PAM type: YTN; PAM sequence: TTC
catggtggaaatttgctatt

SEQ ID NO: 53384 - DNA, 20 bp, Artificial Sequence
  Description of Artificial Sequence: Synthetic oligonucleotide
  Target: SCNA; (-) strand; PAM type: YTN; PAM sequence: CTG
attccatggtggaaatttgc

SEQ ID NO: 53385 - DNA, 20 bp, Artificial Sequence
  Description of Artificial Sequence: Synthetic oligonucleotide
  Target: SCNA; (-) strand; PAM type: YTN; PAM sequence: CTC
cactgattccatggtggaaa

SEQ ID NO: 53386 - DNA, 20 bp, Artificial Sequence
  Description of Artificial Sequence: Synthetic oligonucleotide
  Target: SCNA; (-) strand; PAM type: YTN; PAM sequence: CTC
tccactgattccatggtgga

SEQ ID NO: 53387 - DNA, 20 bp, Artificial Sequence
  Description of Artificial Sequence: Synthetic oligonucleotide
  Target: SCNA; (-) strand; PAM type: YTN; PAM sequence: TTG
catagctctccactgattcc

SEQ ID NO: 53388 - DNA, 20 bp, Artificial Sequence
  Description of Artificial Sequence: Synthetic oligonucleotide
  Target: SCNA; (-) strand; PAM type: YTN; PAM sequence: TTA
aattgcatagctctccactg

SEQ ID NO: 53389 - DNA, 20 bp, Artificial Sequence
  Description of Artificial Sequence: Synthetic oligonucleotide
  Target: SCNA; (-) strand; PAM type: YTN; PAM sequence: TTG
ttaaattgcatagctctcca

SEQ ID NO: 53390 - DNA, 20 bp, Artificial Sequence
  Description of Artificial Sequence: Synthetic oligonucleotide
  Target: SCNA; (-) strand; PAM type: YTN; PAM sequence: TTG
cagttgttaaattgcatagc

SEQ ID NO: 53391 - DNA, 20 bp, Artificial Sequence
  Description of Artificial Sequence: Synthetic oligonucleotide
  Target: SCNA; (-) strand; PAM type: YTN; PAM sequence: TTT
gcagttgttaaattgcatag

SEQ ID NO: 53392 - DNA, 20 bp, Artificial Sequence
  Description of Artificial Sequence: Synthetic oligonucleotide
  Target: SCNA; (-) strand; PAM type: YTN; PAM sequence: CTT
tgcagttgttaaattgcata

SEQ ID NO: 53393 - DNA, 20 bp, Artificial Sequence
  Description of Artificial Sequence: Synthetic oligonucleotide
  Target: SCNA; (-) strand; PAM type: YTN; PAM sequence: TTC
tttgcagttgttaaattgca

SEQ ID NO: 53394 - DNA, 20 bp, Artificial Sequence
  Description of Artificial Sequence: Synthetic oligonucleotide
  Target: SCNA; (-) strand; PAM type: YTN; PAM sequence: CTA
agattctttgcagttgttaa

SEQ ID NO: 53395 - DNA, 20 bp, Artificial Sequence
  Description of Artificial Sequence: Synthetic oligonucleotide
  Target: SCNA; (-) strand; PAM type: YTN; PAM sequence: CTC
taagattctttgcagttgtt

SEQ ID NO: 53396 - DNA, 20 bp, Artificial Sequence
  Description of Artificial Sequence: Synthetic oligonucleotide
  Target: SCNA; (-) strand; PAM type: YTN; PAM sequence: CTA
aggatctctaagattctttg

SEQ ID NO: 53397 - DNA, 20 bp, Artificial Sequence
  Description of Artificial Sequence: Synthetic oligonucleotide
  Target: SCNA; (-) strand; PAM type: YTN; PAM sequence: CTC
taaggatctctaagattctt

SEQ ID NO: 53398 - DNA, 20 bp, Artificial Sequence
  Description of Artificial Sequence: Synthetic oligonucleotide
  Target: SCNA; (-) strand; PAM type: YTN; PAM sequence: TTA
ctctaaggatctctaagatt

SEQ ID NO: 53399 - DNA, 20 bp, Artificial Sequence
  Description of Artificial Sequence: Synthetic oligonucleotide
  Target: SCNA; (-) strand; PAM type: YTN; PAM sequence: TTG
taaataagaggatgtgttac

SEQ ID NO: 53400 - DNA, 20 bp, Artificial Sequence
  Description of Artificial Sequence: Synthetic oligonucleotide
  Target: SCNA; (-) strand; PAM type: YTN; PAM sequence: TTT
gtaaataagaggatgtgtta

SEQ ID NO: 53401 - DNA, 20 bp, Artificial Sequence
  Description of Artificial Sequence: Synthetic oligonucleotide
  Target: SCNA; (-) strand; PAM type: YTN; PAM sequence: TTC
cccatttgtaaataagagga

SEQ ID NO: 53402 - DNA, 20 bp, Artificial Sequence
  Description of Artificial Sequence: Synthetic oligonucleotide
  Target: SCNA; (-) strand; PAM type: YTN; PAM sequence: TTT
ccccatttgtaaataagagg

SEQ ID NO: 53403 - DNA, 20 bp, Artificial Sequence
  Description of Artificial Sequence: Synthetic oligonucleotide
  Target: SCNA; (-) strand; PAM type: YTN; PAM sequence: CTG
tttccccatttgtaaataag

SEQ ID NO: 53404 - DNA, 20 bp, Artificial Sequence
  Description of Artificial Sequence: Synthetic oligonucleotide
  Target: SCNA; (-) strand; PAM type: YTN; PAM sequence: CTC
gtataccctgtttccccatt

SEQ ID NO: 53405 - DNA, 20 bp, Artificial Sequence
  Description of Artificial Sequence: Synthetic oligonucleotide
  Target: SCNA; (-) strand; PAM type: YTN; PAM sequence: CTA
ctcgtataccctgtttcccc

SEQ ID NO: 53406 - DNA, 20 bp, Artificial Sequence
  Description of Artificial Sequence: Synthetic oligonucleotide
  Target: SCNA; (-) strand; PAM type: YTN; PAM sequence: TTC
tactcgtataccctgtttcc

SEQ ID NO: 53407 - DNA, 20 bp, Artificial Sequence
  Description of Artificial Sequence: Synthetic oligonucleotide
  Target: SCNA; (-) strand; PAM type: YTN; PAM sequence: CTT
ctactcgtataccctgtttc

SEQ ID NO: 53408 - DNA, 20 bp, Artificial Sequence
  Description of Artificial Sequence: Synthetic oligonucleotide
  Target: SCNA; (-) strand; PAM type: YTN; PAM sequence: TTA
ggcaagtcacttctactcgt

SEQ ID NO: 53409 - DNA, 20 bp, Artificial Sequence
  Description of Artificial Sequence: Synthetic oligonucleotide
  Target: SCNA; (-) strand; PAM type: YTN; PAM sequence: TTA
tggattaggcaagtcacttc

SEQ ID NO: 53410 - DNA, 20 bp, Artificial Sequence
  Description of Artificial Sequence: Synthetic oligonucleotide
  Target: SCNA; (-) strand; PAM type: YTN; PAM sequence: CTT
atggattaggcaagtcactt

SEQ ID NO: 53411 - DNA, 20 bp, Artificial Sequence
  Description of Artificial Sequence: Synthetic oligonucleotide
  Target: SCNA; (-) strand; PAM type: YTN; PAM sequence: CTA
gcttatggattaggcaagtc

SEQ ID NO: 53412 - DNA, 20 bp, Artificial Sequence
  Description of Artificial Sequence: Synthetic oligonucleotide
  Target: SCNA; (-) strand; PAM type: YTN; PAM sequence: TTG
tacccctagcttatggatta

SEQ ID NO: 53413 - DNA, 20 bp, Artificial Sequence
  Description of Artificial Sequence: Synthetic oligonucleotide
  Target: SCNA; (-) strand; PAM type: YTN; PAM sequence: CTG
ttgtacccctagcttatgga

SEQ ID NO: 53414 - DNA, 20 bp, Artificial Sequence
  Description of Artificial Sequence: Synthetic oligonucleotide
  Target: SCNA; (-) strand; PAM type: YTN; PAM sequence: CTA
atgaccctgttgtaccccta

SEQ ID NO: 53415 - DNA, 20 bp, Artificial Sequence
  Description of Artificial Sequence: Synthetic oligonucleotide
  Target: SCNA; (-) strand; PAM type: YTN; PAM sequence: TTG
aacaggatggccctaatgac

SEQ ID NO: 53416 - DNA, 20 bp, Artificial Sequence
  Description of Artificial Sequence: Synthetic oligonucleotide
  Target: SCNA; (-) strand; PAM type: YTN; PAM sequence: CTA
ggatcatatcagggagaaat

SEQ ID NO: 53417 - DNA, 20 bp, Artificial Sequence
  Description of Artificial Sequence: Synthetic oligonucleotide
  Target: SCNA; (-) strand; PAM type: YTN; PAM sequence: CTC
catcgctaggatcatatcag

SEQ ID NO: 53418 - DNA, 20 bp, Artificial Sequence
  Description of Artificial Sequence: Synthetic oligonucleotide
  Target: SCNA; (-) strand; PAM type: YTN; PAM sequence: TTG
gtaggtactccatcgctagg

SEQ ID NO: 53419 - DNA, 20 bp, Artificial Sequence
  Description of Artificial Sequence: Synthetic oligonucleotide
  Target: SCNA; (-) strand; PAM type: YTN; PAM sequence: TTG
taaagaaagttggtaggtac

SEQ ID NO: 53420 - DNA, 20 bp, Artificial Sequence
  Description of Artificial Sequence: Synthetic oligonucleotide
  Target: SCNA; (-) strand; PAM type: YTN; PAM sequence: CTA
ttgtaaagaaagttggtagg

SEQ ID NO: 53421 - DNA, 20 bp, Artificial Sequence
  Description of Artificial Sequence: Synthetic oligonucleotide
  Target: SCNA; (-) strand; PAM type: YTN; PAM sequence: TTG
ggctattgtaaagaaagttg

SEQ ID NO: 53422 - DNA, 20 bp, Artificial Sequence
  Description of Artificial Sequence: Synthetic oligonucleotide
  Target: SCNA; (-) strand; PAM type: YTN; PAM sequence: CTA
gacgttgggctattgtaaag

SEQ ID NO: 53423 - DNA, 20 bp, Artificial Sequence
  Description of Artificial Sequence: Synthetic oligonucleotide
  Target: SCNA; (-) strand; PAM type: YTN; PAM sequence: CTC
atactagacgttgggctatt

SEQ ID NO: 53424 - DNA, 20 bp, Artificial Sequence
  Description of Artificial Sequence: Synthetic oligonucleotide
  Target: SCNA; (-) strand; PAM type: YTN; PAM sequence: TTC
tcatactagacgttgggcta

SEQ ID NO: 53425 - DNA, 20 bp, Artificial Sequence
  Description of Artificial Sequence: Synthetic oligonucleotide
  Target: SCNA; (-) strand; PAM type: YTN; PAM sequence: TTG
gaagagtgtccacagaatga

SEQ ID NO: 53426 - DNA, 20 bp, Artificial Sequence
  Description of Artificial Sequence: Synthetic oligonucleotide
  Target: SCNA; (-) strand; PAM type: YTN; PAM sequence: TTT
ggaagagtgtccacagaatg

SEQ ID NO: 53427 - DNA, 20 bp, Artificial Sequence
  Description of Artificial Sequence: Synthetic oligonucleotide
  Target: SCNA; (-) strand; PAM type: YTN; PAM sequence: TTC
aatttggaagagtgtccaca

SEQ ID NO: 53428 - DNA, 20 bp, Artificial Sequence
  Description of Artificial Sequence: Synthetic oligonucleotide
  Target: SCNA; (-) strand; PAM type: YTN; PAM sequence: TTT
caatttggaagagtgtccac

SEQ ID NO: 53429 - DNA, 20 bp, Artificial Sequence
  Description of Artificial Sequence: Synthetic oligonucleotide
  Target: SCNA; (-) strand; PAM type: YTN; PAM sequence: TTG
tttcaatttggaagagtgtc

SEQ ID NO: 53430 - DNA, 20 bp, Artificial Sequence
  Description of Artificial Sequence: Synthetic oligonucleotide
  Target: SCNA; (-) strand; PAM type: YTN; PAM sequence: CTG
tgccaggagtaatccaagga

SEQ ID NO: 53431 - DNA, 20 bp, Artificial Sequence
  Description of Artificial Sequence: Synthetic oligonucleotide
  Target: SCNA; (-) strand; PAM type: YTN; PAM sequence: CTA
tgagaatacataagctgtgc

SEQ ID NO: 53432 - DNA, 20 bp, Artificial Sequence
  Description of Artificial Sequence: Synthetic oligonucleotide
  Target: SCNA; (-) strand; PAM type: YTN; PAM sequence: TTG
gctatgagaatacataagct

SEQ ID NO: 53433 - DNA, 20 bp, Artificial Sequence
  Description of Artificial Sequence: Synthetic oligonucleotide
  Target: SCNA; (-) strand; PAM type: YTN; PAM sequence: CTA
gtgtcagagtcatgaccagg

SEQ ID NO: 53434 - DNA, 20 bp, Artificial Sequence
  Description of Artificial Sequence: Synthetic oligonucleotide
  Target: SCNA; (-) strand; PAM type: YTN; PAM sequence: CTA
ctagtgtcagagtcatgacc

SEQ ID NO: 53435 - DNA, 20 bp, Artificial Sequence
  Description of Artificial Sequence: Synthetic oligonucleotide
  Target: SCNA; (-) strand; PAM type: YTN; PAM sequence: TTA
tctactagtgtcagagtcat

SEQ ID NO: 53436 - DNA, 20 bp, Artificial Sequence
  Description of Artificial Sequence: Synthetic oligonucleotide
  Target: SCNA; (-) strand; PAM type: YTN; PAM sequence: TTT
atctactagtgtcagagtca

SEQ ID NO: 53437 - DNA, 20 bp, Artificial Sequence
  Description of Artificial Sequence: Synthetic oligonucleotide
  Target: SCNA; (-) strand; PAM type: YTN; PAM sequence: TTT
tatctactagtgtcagagtc

SEQ ID NO: 53438 - DNA, 20 bp, Artificial Sequence
  Description of Artificial Sequence: Synthetic oligonucleotide
  Target: SCNA; (-) strand; PAM type: YTN; PAM sequence: TTT
ttatctactagtgtcagagt

SEQ ID NO: 53439 - DNA, 20 bp, Artificial Sequence
  Description of Artificial Sequence: Synthetic oligonucleotide
  Target: SCNA; (-) strand; PAM type: YTN; PAM sequence: CTT
tttatctactagtgtcagag

SEQ ID NO: 53440 - DNA, 20 bp, Artificial Sequence
  Description of Artificial Sequence: Synthetic oligonucleotide
  Target: SCNA; (-) strand; PAM type: YTN; PAM sequence: TTA
gagtgatactttttatctac

SEQ ID NO: 53441 - DNA, 20 bp, Artificial Sequence
  Description of Artificial Sequence: Synthetic oligonucleotide
  Target: SCNA; (-) strand; PAM type: YTN; PAM sequence: CTG
catgtgtaaaaataaaggca

SEQ ID NO: 53442 - DNA, 20 bp, Artificial Sequence
  Description of Artificial Sequence: Synthetic oligonucleotide
  Target: SCNA; (-) strand; PAM type: YTN; PAM sequence: CTG
agtactgcatgtgtaaaaat

SEQ ID NO: 53443 - DNA, 20 bp, Artificial Sequence
  Description of Artificial Sequence: Synthetic oligonucleotide
  Target: SCNA; (-) strand; PAM type: YTN; PAM sequence: CTC
tgagtactgcatgtgtaaaa

SEQ ID NO: 53444 - DNA, 20 bp, Artificial Sequence
  Description of Artificial Sequence: Synthetic oligonucleotide
  Target: SCNA; (-) strand; PAM type: YTN; PAM sequence: TTA
gactctgagtactgcatgtg

SEQ ID NO: 53445 - DNA, 20 bp, Artificial Sequence
  Description of Artificial Sequence: Synthetic oligonucleotide
  Target: SCNA; (-) strand; PAM type: YTN; PAM sequence: TTT
agactctgagtactgcatgt

SEQ ID NO: 53446 - DNA, 20 bp, Artificial Sequence
  Description of Artificial Sequence: Synthetic oligonucleotide
  Target: SCNA; (-) strand; PAM type: YTN; PAM sequence: TTG
tttagactctgagtactgca

SEQ ID NO: 53447 - DNA, 20 bp, Artificial Sequence
  Description of Artificial Sequence: Synthetic oligonucleotide
  Target: SCNA; (-) strand; PAM type: YTN; PAM sequence: TTT
gtttagactctgagtactgc

SEQ ID NO: 53448 - DNA, 20 bp, Artificial Sequence
  Description of Artificial Sequence: Synthetic oligonucleotide
  Target: SCNA; (-) strand; PAM type: YTN; PAM sequence: CTA
aggtttgtttagactctgag

SEQ ID NO: 53449 - DNA, 20 bp, Artificial Sequence
  Description of Artificial Sequence: Synthetic oligonucleotide
  Target: SCNA; (-) strand; PAM type: YTN; PAM sequence: TTA
agaggaaaatgcaagctaag

SEQ ID NO: 53450 - DNA, 20 bp, Artificial Sequence
  Description of Artificial Sequence: Synthetic oligonucleotide
  Target: SCNA; (-) strand; PAM type: YTN; PAM sequence: TTT
aagaggaaaatgcaagctaa

SEQ ID NO: 53451 - DNA, 20 bp, Artificial Sequence
  Description of Artificial Sequence: Synthetic oligonucleotide
  Target: SCNA; (-) strand; PAM type: YTN; PAM sequence: TTT
taagaggaaaatgcaagcta

SEQ ID NO: 53452 - DNA, 20 bp, Artificial Sequence
  Description of Artificial Sequence: Synthetic oligonucleotide
  Target: SCNA; (-) strand; PAM type: YTN; PAM sequence: CTT
ttaagaggaaaatgcaagct

SEQ ID NO: 53453 - DNA, 20 bp, Artificial Sequence
  Description of Artificial Sequence: Synthetic oligonucleotide
  Target: SCNA; (-) strand; PAM type: YTN; PAM sequence: CTG
tgagatccatggtgggcttt

SEQ ID NO: 53454 - DNA, 20 bp, Artificial Sequence
  Description of Artificial Sequence: Synthetic oligonucleotide
  Target: SCNA; (-) strand; PAM type: YTN; PAM sequence: CTC
aacaacaacaacaacaacaa

SEQ ID NO: 53455 - DNA, 20 bp, Artificial Sequence
  Description of Artificial Sequence: Synthetic oligonucleotide
  Target: SCNA; (-) strand; PAM type: YTN; PAM sequence: CTG
gcaacagagtgagatcccgt

SEQ ID NO: 53456 - DNA, 20 bp, Artificial Sequence
  Description of Artificial Sequence: Synthetic oligonucleotide
  Target: SCNA; (-) strand; PAM type: YTN; PAM sequence: CTC
cagcctggcaacagagtgag

SEQ ID NO: 53457 - DNA, 20 bp, Artificial Sequence
  Description of Artificial Sequence: Synthetic oligonucleotide
  Target: SCNA; (-) strand; PAM type: YTN; PAM sequence: CTG
cactccagcctggcaacaga

SEQ ID NO: 53458 - DNA, 20 bp, Artificial Sequence
  Description of Artificial Sequence: Synthetic oligonucleotide
  Target: SCNA; (-) strand; PAM type: YTN; PAM sequence: TTG
tgccactgcactccagcctg

SEQ ID NO: 53459 - DNA, 20 bp, Artificial Sequence
  Description of Artificial Sequence: Synthetic oligonucleotide
  Target: SCNA; (-) strand; PAM type: YTN; PAM sequence: TTG
cagtgagccaagattgtgcc

SEQ ID NO: 53460 - DNA, 20 bp, Artificial Sequence
  Description of Artificial Sequence: Synthetic oligonucleotide
  Target: SCNA; (-) strand; PAM type: YTN; PAM sequence: TTG
aacaaccaaggagtcggagg

SEQ ID NO: 53461 - DNA, 20 bp, Artificial Sequence
  Description of Artificial Sequence: Synthetic oligonucleotide
  Target: SCNA; (-) strand; PAM type: YTN; PAM sequence: CTT
gaacaaccaaggagtcggag

SEQ ID NO: 53462 - DNA, 20 bp, Artificial Sequence
  Description of Artificial Sequence: Synthetic oligonucleotide
  Target: SCNA; (-) strand; PAM type: YTN; PAM sequence: CTG
aggcaagagaatcacttgaa

SEQ ID NO: 53463 - DNA, 20 bp, Artificial Sequence
  Description of Artificial Sequence: Synthetic oligonucleotide
  Target: SCNA; (-) strand; PAM type: YTN; PAM sequence: TTG
ggaggctgaggcaagagaat

SEQ ID NO: 53464 - DNA, 20 bp, Artificial Sequence
  Description of Artificial Sequence: Synthetic oligonucleotide
  Target: SCNA; (-) strand; PAM type: YTN; PAM sequence: TTT
gggaggctgaggcaagagaa

SEQ ID NO: 53465 - DNA, 20 bp, Artificial Sequence
  Description of Artificial Sequence: Synthetic oligonucleotide
  Target: SCNA; (-) strand; PAM type: YTN; PAM sequence: CTA
tttgggaggctgaggcaaga

SEQ ID NO: 53466 - DNA, 20 bp, Artificial Sequence
  Description of Artificial Sequence: Synthetic oligonucleotide
  Target: SCNA; (-) strand; PAM type: YTN; PAM sequence: CTC
agctatttgggaggctgagg

SEQ ID NO: 53467 - DNA, 20 bp, Artificial Sequence
  Description of Artificial Sequence: Synthetic oligonucleotide
  Target: SCNA; (-) strand; PAM type: YTN; PAM sequence: CTG
taatctcagctatttgggag

SEQ ID NO: 53468 - DNA, 20 bp, Artificial Sequence
  Description of Artificial Sequence: Synthetic oligonucleotide
  Target: SCNA; (-) strand; PAM type: YTN; PAM sequence: CTG
gtggcgcgtgcctgtaatct

SEQ ID NO: 53469 - DNA, 20 bp, Artificial Sequence
  Description of Artificial Sequence: Synthetic oligonucleotide
  Target: SCNA; (-) strand; PAM type: YTN; PAM sequence: CTG
ggcctggtggcgcgtgcctg

SEQ ID NO: 53470 - DNA, 20 bp, Artificial Sequence
  Description of Artificial Sequence: Synthetic oligonucleotide
  Target: SCNA; (-) strand; PAM type: YTN; PAM sequence: TTA
gctgggcctggtggcgcgtg

SEQ ID NO: 53471 - DNA, 20 bp, Artificial Sequence
  Description of Artificial Sequence: Synthetic oligonucleotide
  Target: SCNA; (-) strand; PAM type: YTN; PAM sequence: CTA
aaaatacaaaaattagctgg

SEQ ID NO: 53472 - DNA, 20 bp, Artificial Sequence
  Description of Artificial Sequence: Synthetic oligonucleotide
  Target: SCNA; (-) strand; PAM type: YTN; PAM sequence: CTA
ctaaaaatacaaaaattagc

SEQ ID NO: 53473 - DNA, 20 bp, Artificial Sequence
  Description of Artificial Sequence: Synthetic oligonucleotide
  Target: SCNA; (-) strand; PAM type: YTN; PAM sequence: CTC
tactaaaaatacaaaaatta

SEQ ID NO: 53474 - DNA, 20 bp, Artificial Sequence
  Description of Artificial Sequence: Synthetic oligonucleotide
  Target: SCNA; (-) strand; PAM type: YTN; PAM sequence: CTG
tctctactaaaaatacaaaa

SEQ ID NO: 53475 - DNA, 20 bp, Artificial Sequence
  Description of Artificial Sequence: Synthetic oligonucleotide
  Target: SCNA; (-) strand; PAM type: YTN; PAM sequence: CTG
gccaacatggtgaaacgctg

SEQ ID NO: 53476 - DNA, 20 bp, Artificial Sequence
  Description of Artificial Sequence: Synthetic oligonucleotide
  Target: SCNA; (-) strand; PAM type: YTN; PAM sequence: CTG
aggtgggtggatcacgaggt

SEQ ID NO: 53477 - DNA, 20 bp, Artificial Sequence
  Description of Artificial Sequence: Synthetic oligonucleotide
  Target: SCNA; (-) strand; PAM type: YTN; PAM sequence: TTG
gaaggctgaggtgggtggat

SEQ ID NO: 53478 - DNA, 20 bp, Artificial Sequence
  Description of Artificial Sequence: Synthetic oligonucleotide
  Target: SCNA; (-) strand; PAM type: YTN; PAM sequence: TTT
ggaaggctgaggtgggtgga

SEQ ID NO: 53479 - DNA, 20 bp, Artificial Sequence
  Description of Artificial Sequence: Synthetic oligonucleotide
  Target: SCNA; (-) strand; PAM type: YTN; PAM sequence: CTT
tggaaggctgaggtgggtgg

SEQ ID NO: 53480 - DNA, 20 bp, Artificial Sequence
  Description of Artificial Sequence: Synthetic oligonucleotide
  Target: SCNA; (-) strand; PAM type: YTN; PAM sequence: CTA
taatcccagcactttggaag

SEQ ID NO: 53481 - DNA, 20 bp, Artificial Sequence
  Description of Artificial Sequence: Synthetic oligonucleotide
  Target: SCNA; (-) strand; PAM type: YTN; PAM sequence: CTC
acgcctataatcccagcact

SEQ ID NO: 53482 - DNA, 20 bp, Artificial Sequence
  Description of Artificial Sequence: Synthetic oligonucleotide
  Target: SCNA; (-) strand; PAM type: YTN; PAM sequence: CTA
caagaggccgggcgcggtgg

SEQ ID NO: 53483 - DNA, 20 bp, Artificial Sequence
  Description of Artificial Sequence: Synthetic oligonucleotide
  Target: SCNA; (-) strand; PAM type: YTN; PAM sequence: TTA
aaaactacaagaggccgggc

SEQ ID NO: 53484 - DNA, 20 bp, Artificial Sequence
  Description of Artificial Sequence: Synthetic oligonucleotide
  Target: SCNA; (-) strand; PAM type: YTN; PAM sequence: TTT
aaaaactacaagaggccggg

SEQ ID NO: 53485 - DNA, 20 bp, Artificial Sequence
  Description of Artificial Sequence: Synthetic oligonucleotide
  Target: SCNA; (-) strand; PAM type: YTN; PAM sequence: TTT
taaaaactacaagaggccgg

SEQ ID NO: 53486 - DNA, 20 bp, Artificial Sequence
  Description of Artificial Sequence: Synthetic oligonucleotide
  Target: SCNA; (-) strand; PAM type: YTN; PAM sequence: TTA
attttaaaaactacaagagg

SEQ ID NO: 53487 - DNA, 20 bp, Artificial Sequence
  Description of Artificial Sequence: Synthetic oligonucleotide
  Target: SCNA; (-) strand; PAM type: YTN; PAM sequence: TTT
aattttaaaaactacaagag

SEQ ID NO: 53488 - DNA, 20 bp, Artificial Sequence
  Description of Artificial Sequence: Synthetic oligonucleotide
  Target: SCNA; (-) strand; PAM type: YTN; PAM sequence: TTA
aatttaattttaaaaactac

SEQ ID NO: 53489 - DNA, 20 bp, Artificial Sequence
  Description of Artificial Sequence: Synthetic oligonucleotide
  Target: SCNA; (-) strand; PAM type: YTN; PAM sequence: TTG
gattaaatttaattttaaaa

SEQ ID NO: 53490 - DNA, 20 bp, Artificial Sequence
  Description of Artificial Sequence: Synthetic oligonucleotide
  Target: SCNA; (-) strand; PAM type: YTN; PAM sequence: TTA
ttggattaaatttaatttta

SEQ ID NO: 53491 - DNA, 20 bp, Artificial Sequence
  Description of Artificial Sequence: Synthetic oligonucleotide
  Target: SCNA; (-) strand; PAM type: YTN; PAM sequence: TTT
attggattaaatttaatttt

SEQ ID NO: 53492 - DNA, 20 bp, Artificial Sequence
  Description of Artificial Sequence: Synthetic oligonucleotide
  Target: SCNA; (-) strand; PAM type: YTN; PAM sequence: TTT
tattggattaaatttaattt

SEQ ID NO: 53493 - DNA, 20 bp, Artificial Sequence
  Description of Artificial Sequence: Synthetic oligonucleotide
  Target: SCNA; (-) strand; PAM type: YTN; PAM sequence: CTA
aatgttttattggattaaat

SEQ ID NO: 53494 - DNA, 20 bp, Artificial Sequence
  Description of Artificial Sequence: Synthetic oligonucleotide
  Target: SCNA; (-) strand; PAM type: YTN; PAM sequence: TTC
caaataaaggcaaactaaat

SEQ ID NO: 53495 - DNA, 20 bp, Artificial Sequence
  Description of Artificial Sequence: Synthetic oligonucleotide
  Target: SCNA; (-) strand; PAM type: YTN; PAM sequence: TTA
atagagtatataacaataga

SEQ ID NO: 53496 - DNA, 20 bp, Artificial Sequence
  Description of Artificial Sequence: Synthetic oligonucleotide
  Target: SCNA; (-) strand; PAM type: YTN; PAM sequence: CTG
aagaggaggtattaatagag

SEQ ID NO: 53497 - DNA, 20 bp, Artificial Sequence
  Description of Artificial Sequence: Synthetic oligonucleotide
  Target: SCNA; (-) strand; PAM type: YTN; PAM sequence: TTG
ctgaagaggaggtattaata

SEQ ID NO: 53498 - DNA, 20 bp, Artificial Sequence
  Description of Artificial Sequence: Synthetic oligonucleotide
  Target: SCNA; (-) strand; PAM type: YTN; PAM sequence: CTT
gctgaagaggaggtattaat

SEQ ID NO: 53499 - DNA, 20 bp, Artificial Sequence
  Description of Artificial Sequence: Synthetic oligonucleotide
  Target: SCNA; (-) strand; PAM type: YTN; PAM sequence: TTC
cttgctgaagaggaggtatt

SEQ ID NO: 53500 - DNA, 20 bp, Artificial Sequence
  Description of Artificial Sequence: Synthetic oligonucleotide
  Target: SCNA; (-) strand; PAM type: YTN; PAM sequence: TTT
ccttgctgaagaggaggtat

SEQ ID NO: 53501 - DNA, 20 bp, Artificial Sequence
  Description of Artificial Sequence: Synthetic oligonucleotide
  Target: SCNA; (-) strand; PAM type: YTN; PAM sequence: CTA
acaaatgatgtacgtgtaag

SEQ ID NO: 53502 - DNA, 20 bp, Artificial Sequence
  Description of Artificial Sequence: Synthetic oligonucleotide
  Target: SCNA; (-) strand; PAM type: YTN; PAM sequence: CTC
taacaaatgatgtacgtgta

SEQ ID NO: 53503 - DNA, 20 bp, Artificial Sequence
  Description of Artificial Sequence: Synthetic oligonucleotide
  Target: SCNA; (-) strand; PAM type: YTN; PAM sequence: TTA
ggggctctaacaaatgatgt

SEQ ID NO: 53504 - DNA, 20 bp, Artificial Sequence
  Description of Artificial Sequence: Synthetic oligonucleotide
  Target: SCNA; (-) strand; PAM type: YTN; PAM sequence: TTT
aggggctctaacaaatgatg

SEQ ID NO: 53505 - DNA, 20 bp, Artificial Sequence
  Description of Artificial Sequence: Synthetic oligonucleotide
  Target: SCNA; (-) strand; PAM type: YTN; PAM sequence: TTA
ccaatatttaggggctctaa

SEQ ID NO: 53506 - DNA, 20 bp, Artificial Sequence
  Description of Artificial Sequence: Synthetic oligonucleotide
  Target: SCNA; (-) strand; PAM type: YTN; PAM sequence: CTA
taatatcatcatcatcatta

SEQ ID NO: 53507 - DNA, 20 bp, Artificial Sequence
  Description of Artificial Sequence: Synthetic oligonucleotide
  Target: SCNA; (-) strand; PAM type: YTN; PAM sequence: TTC
atgctataatatcatcatca

SEQ ID NO: 53508 - DNA, 20 bp, Artificial Sequence
  Description of Artificial Sequence: Synthetic oligonucleotide
  Target: SCNA; (-) strand; PAM type: YTN; PAM sequence: TTC
aacgtaaagtaattcatgct

SEQ ID NO: 53509 - DNA, 20 bp, Artificial Sequence
  Description of Artificial Sequence: Synthetic oligonucleotide
  Target: SCNA; (-) strand; PAM type: YTN; PAM sequence: TTA
ggccaatgttcaacgtaaag

SEQ ID NO: 53510 - DNA, 20 bp, Artificial Sequence
  Description of Artificial Sequence: Synthetic oligonucleotide
  Target: SCNA; (-) strand; PAM type: YTN; PAM sequence: CTT
aggccaatgttcaacgtaaa

SEQ ID NO: 53511 - DNA, 20 bp, Artificial Sequence
  Description of Artificial Sequence: Synthetic oligonucleotide
  Target: SCNA; (-) strand; PAM type: YTN; PAM sequence: TTA
aagcacttaggccaatgttc

SEQ ID NO: 53512 - DNA, 20 bp, Artificial Sequence
  Description of Artificial Sequence: Synthetic oligonucleotide
  Target: SCNA; (-) strand; PAM type: YTN; PAM sequence: TTT
aaagcacttaggccaatgtt

SEQ ID NO: 53513 - DNA, 20 bp, Artificial Sequence
  Description of Artificial Sequence: Synthetic oligonucleotide
  Target: SCNA; (-) strand; PAM type: YTN; PAM sequence: CTA
ggcaaataatgtgtttaaag

SEQ ID NO: 53514 - DNA, 20 bp, Artificial Sequence
  Description of Artificial Sequence: Synthetic oligonucleotide
  Target: SCNA; (-) strand; PAM type: YTN; PAM sequence: TTG
taaatgctaggcaaataatg

SEQ ID NO: 53515 - DNA, 20 bp, Artificial Sequence
  Description of Artificial Sequence: Synthetic oligonucleotide
  Target: SCNA; (-) strand; PAM type: YTN; PAM sequence: CTA
caaaaatgttgtaaatgcta

SEQ ID NO: 53516 - DNA, 20 bp, Artificial Sequence
  Description of Artificial Sequence: Synthetic oligonucleotide
  Target: SCNA; (-) strand; PAM type: YTN; PAM sequence: TTG
tgacaaataatacctacaaa

SEQ ID NO: 53517 - DNA, 20 bp, Artificial Sequence
  Description of Artificial Sequence: Synthetic oligonucleotide
  Target: SCNA; (-) strand; PAM type: YTN; PAM sequence: TTA
tatcatagaacaagaaaatg

SEQ ID NO: 53518 - DNA, 20 bp, Artificial Sequence
  Description of Artificial Sequence: Synthetic oligonucleotide
  Target: SCNA; (-) strand; PAM type: YTN; PAM sequence: CTA
atacgatatcaaaacaaatt

SEQ ID NO: 53519 - DNA, 20 bp, Artificial Sequence
  Description of Artificial Sequence: Synthetic oligonucleotide
  Target: SCNA; (-) strand; PAM type: YTN; PAM sequence: TTC
agtaggggaacaatagaaaa

SEQ ID NO: 53520 - DNA, 20 bp, Artificial Sequence
  Description of Artificial Sequence: Synthetic oligonucleotide
  Target: SCNA; (-) strand; PAM type: YTN; PAM sequence: TTG
tggtaattcagtaggggaac

SEQ ID NO: 53521 - DNA, 20 bp, Artificial Sequence
  Description of Artificial Sequence: Synthetic oligonucleotide
  Target: SCNA; (-) strand; PAM type: YTN; PAM sequence: TTT
gtggtaattcagtaggggaa

SEQ ID NO: 53522 - DNA, 20 bp, Artificial Sequence
  Description of Artificial Sequence: Synthetic oligonucleotide
  Target: SCNA; (-) strand; PAM type: YTN; PAM sequence: TTA
caatcccacaatgtaataaa

SEQ ID NO: 53523 - DNA, 20 bp, Artificial Sequence
  Description of Artificial Sequence: Synthetic oligonucleotide
  Target: SCNA; (-) strand; PAM type: YTN; PAM sequence: CTT
acaatcccacaatgtaataa

SEQ ID NO: 53524 - DNA, 20 bp, Artificial Sequence
  Description of Artificial Sequence: Synthetic oligonucleotide
  Target: SCNA; (-) strand; PAM type: YTN; PAM sequence: TTC
agacttacaatcccacaatg

SEQ ID NO: 53525 - DNA, 20 bp, Artificial Sequence
  Description of Artificial Sequence: Synthetic oligonucleotide
  Target: SCNA; (-) strand; PAM type: YTN; PAM sequence: CTT
cagacttacaatcccacaat

SEQ ID NO: 53526 - DNA, 20 bp, Artificial Sequence
  Description of Artificial Sequence: Synthetic oligonucleotide
  Target: SCNA; (-) strand; PAM type: YTN; PAM sequence: TTG
gacttcagacttacaatccc

SEQ ID NO: 53527 - DNA, 20 bp, Artificial Sequence
  Description of Artificial Sequence: Synthetic oligonucleotide
  Target: SCNA; (-) strand; PAM type: YTN; PAM sequence: CTA
ttggacttcagacttacaat

SEQ ID NO: 53528 - DNA, 20 bp, Artificial Sequence
  Description of Artificial Sequence: Synthetic oligonucleotide
  Target: SCNA; (-) strand; PAM type: YTN; PAM sequence: CTA
gtgagacccctattggactt

SEQ ID NO: 53529 - DNA, 20 bp, Artificial Sequence
  Description of Artificial Sequence: Synthetic oligonucleotide
  Target: SCNA; (-) strand; PAM type: YTN; PAM sequence: TTA
ggctagtgagacccctattg

SEQ ID NO: 53530 - DNA, 20 bp, Artificial Sequence
  Description of Artificial Sequence: Synthetic oligonucleotide
  Target: SCNA; (-) strand; PAM type: YTN; PAM sequence: TTT
aggctagtgagacccctatt

SEQ ID NO: 53531 - DNA, 20 bp, Artificial Sequence
  Description of Artificial Sequence: Synthetic oligonucleotide
  Target: SCNA; (-) strand; PAM type: YTN; PAM sequence: CTT
taggctagtgagacccctat

SEQ ID NO: 53532 - DNA, 20 bp, Artificial Sequence
  Description of Artificial Sequence: Synthetic oligonucleotide
  Target: SCNA; (-) strand; PAM type: YTN; PAM sequence: TTA
actttaggctagtgagaccc

SEQ ID NO: 53533 - DNA, 20 bp, Artificial Sequence
  Description of Artificial Sequence: Synthetic oligonucleotide
  Target: SCNA; (-) strand; PAM type: YTN; PAM sequence: CTT
aactttaggctagtgagacc

SEQ ID NO: 53534 - DNA, 20 bp, Artificial Sequence
  Description of Artificial Sequence: Synthetic oligonucleotide
  Target: SCNA; (-) strand; PAM type: YTN; PAM sequence: CTG
ccgacaccttaactttaggc

SEQ ID NO: 53535 - DNA, 20 bp, Artificial Sequence
  Description of Artificial Sequence: Synthetic oligonucleotide
  Target: SCNA; (-) strand; PAM type: YTN; PAM sequence: CTC
caaaacagaacacagtcctg

SEQ ID NO: 53536 - DNA, 20 bp, Artificial Sequence
  Description of Artificial Sequence: Synthetic oligonucleotide
  Target: SCNA; (-) strand; PAM type: YTN; PAM sequence: CTA
gagtctccaaaacagaacac

SEQ ID NO: 53537 - DNA, 20 bp, Artificial Sequence
  Description of Artificial Sequence: Synthetic oligonucleotide
  Target: SCNA; (-) strand; PAM type: YTN; PAM sequence: CTC
ctagagtctccaaaacagaa

SEQ ID NO: 53538 - DNA, 20 bp, Artificial Sequence
  Description of Artificial Sequence: Synthetic oligonucleotide
  Target: SCNA; (-) strand; PAM type: YTN; PAM sequence: TTC
tcctagagtctccaaaacag

SEQ ID NO: 53539 - DNA, 20 bp, Artificial Sequence
  Description of Artificial Sequence: Synthetic oligonucleotide
  Target: SCNA; (-) strand; PAM type: YTN; PAM sequence: TTT
ctcctagagtctccaaaaca

SEQ ID NO: 53540 - DNA, 20 bp, Artificial Sequence
  Description of Artificial Sequence: Synthetic oligonucleotide
  Target: SCNA; (-) strand; PAM type: YTN; PAM sequence: TTT
tctcctagagtctccaaaac

SEQ ID NO: 53541 - DNA, 20 bp, Artificial Sequence
  Description of Artificial Sequence: Synthetic oligonucleotide
  Target: SCNA; (-) strand; PAM type: YTN; PAM sequence: CTG
gaaaaggcaaggagacagat

SEQ ID NO: 53542 - DNA, 20 bp, Artificial Sequence
  Description of Artificial Sequence: Synthetic oligonucleotide
  Target: SCNA; (-) strand; PAM type: YTN; PAM sequence: CTA
tgaatggcatcaagaagctg

SEQ ID NO: 53543 - DNA, 20 bp, Artificial Sequence
  Description of Artificial Sequence: Synthetic oligonucleotide
  Target: SCNA; (-) strand; PAM type: YTN; PAM sequence: TTA
ggcaaaatataatcagaaaa

SEQ ID NO: 53544 - DNA, 20 bp, Artificial Sequence
  Description of Artificial Sequence: Synthetic oligonucleotide
  Target: SCNA; (-) strand; PAM type: YTN; PAM sequence: CTC
acagaggttaggcaaaatat

SEQ ID NO: 53545 - DNA, 20 bp, Artificial Sequence
  Description of Artificial Sequence: Synthetic oligonucleotide
  Target: SCNA; (-) strand; PAM type: YTN; PAM sequence: TTA
atatctcacagaggttaggc

SEQ ID NO: 53546 - DNA, 20 bp, Artificial Sequence
  Description of Artificial Sequence: Synthetic oligonucleotide
  Target: SCNA; (-) strand; PAM type: YTN; PAM sequence: CTC
aaataattaatatctcacag

SEQ ID NO: 53547 - DNA, 20 bp, Artificial Sequence
  Description of Artificial Sequence: Synthetic oligonucleotide
  Target: SCNA; (-) strand; PAM type: YTN; PAM sequence: CTG
ccctcaaataattaatatct

SEQ ID NO: 53548 - DNA, 20 bp, Artificial Sequence
  Description of Artificial Sequence: Synthetic oligonucleotide
  Target: SCNA; (-) strand; PAM type: YTN; PAM sequence: CTC
tgccctcaaataattaatat

SEQ ID NO: 53549 - DNA, 20 bp, Artificial Sequence
  Description of Artificial Sequence: Synthetic oligonucleotide
  Target: SCNA; (-) strand; PAM type: YTN; PAM sequence: TTA
tgaacaaacaaataaaaatc

SEQ ID NO: 53550 - DNA, 20 bp, Artificial Sequence
  Description of Artificial Sequence: Synthetic oligonucleotide
  Target: SCNA; (-) strand; PAM type: YTN; PAM sequence: CTG
gatatagttatgaacaaaca

SEQ ID NO: 53551 - DNA, 20 bp, Artificial Sequence
  Description of Artificial Sequence: Synthetic oligonucleotide
  Target: SCNA; (-) strand; PAM type: YTN; PAM sequence: TTA
aggcacctggatatagttat

SEQ ID NO: 53552 - DNA, 20 bp, Artificial Sequence
  Description of Artificial Sequence: Synthetic oligonucleotide
  Target: SCNA; (-) strand; PAM type: YTN; PAM sequence: TTT
aaggcacctggatatagtta

SEQ ID NO: 53553 - DNA, 20 bp, Artificial Sequence
  Description of Artificial Sequence: Synthetic oligonucleotide
  Target: SCNA; (-) strand; PAM type: YTN; PAM sequence: TTT
taaggcacctggatatagtt

SEQ ID NO: 53554 - DNA, 20 bp, Artificial Sequence
  Description of Artificial Sequence: Synthetic oligonucleotide
  Target: SCNA; (-) strand; PAM type: YTN; PAM sequence: TTG
tgtcaggcatcattttaagg

SEQ ID NO: 53555 - DNA, 20 bp, Artificial Sequence
  Description of Artificial Sequence: Synthetic oligonucleotide
  Target: SCNA; (-) strand; PAM type: YTN; PAM sequence: TTT
gtgtcaggcatcattttaag

SEQ ID NO: 53556 - DNA, 20 bp, Artificial Sequence
  Description of Artificial Sequence: Synthetic oligonucleotide
  Target: SCNA; (-) strand; PAM type: YTN; PAM sequence: TTT
tgtgtcaggcatcattttaa

SEQ ID NO: 53557 - DNA, 20 bp, Artificial Sequence
  Description of Artificial Sequence: Synthetic oligonucleotide
  Target: SCNA; (-) strand; PAM type: YTN; PAM sequence: CTA
ttttgtgtcaggcatcattt

SEQ ID NO: 53558 - DNA, 20 bp, Artificial Sequence
  Description of Artificial Sequence: Synthetic oligonucleotide
  Target: SCNA; (-) strand; PAM type: YTN; PAM sequence: TTG
agtacctattttgtgtcagg

SEQ ID NO: 53559 - DNA, 20 bp, Artificial Sequence
  Description of Artificial Sequence: Synthetic oligonucleotide
  Target: SCNA; (-) strand; PAM type: YTN; PAM sequence: TTG
attgagtacctattttgtgt

SEQ ID NO: 53560 - DNA, 20 bp, Artificial Sequence
  Description of Artificial Sequence: Synthetic oligonucleotide
  Target: SCNA; (-) strand; PAM type: YTN; PAM sequence: CTA
tgttgattgagtacctattt

SEQ ID NO: 53561 - DNA, 20 bp, Artificial Sequence
  Description of Artificial Sequence: Synthetic oligonucleotide
  Target: SCNA; (-) strand; PAM type: YTN; PAM sequence: TTA
acctatgttgattgagtacc

SEQ ID NO: 53562 - DNA, 20 bp, Artificial Sequence
  Description of Artificial Sequence: Synthetic oligonucleotide
  Target: SCNA; (-) strand; PAM type: YTN; PAM sequence: TTA
ttaacctatgttgattgagt

SEQ ID NO: 53563 - DNA, 20 bp, Artificial Sequence
  Description of Artificial Sequence: Synthetic oligonucleotide
  Target: SCNA; (-) strand; PAM type: YTN; PAM sequence: TTT
attaacctatgttgattgag

SEQ ID NO: 53564 - DNA, 20 bp, Artificial Sequence
  Description of Artificial Sequence: Synthetic oligonucleotide
  Target: SCNA; (-) strand; PAM type: YTN; PAM sequence: TTC
atttattaacctatgttgat

SEQ ID NO: 53565 - DNA, 20 bp, Artificial Sequence
  Description of Artificial Sequence: Synthetic oligonucleotide
  Target: SCNA; (-) strand; PAM type: YTN; PAM sequence: CTC
attcatttattaacctatgt

SEQ ID NO: 53566 - DNA, 20 bp, Artificial Sequence
  Description of Artificial Sequence: Synthetic oligonucleotide
  Target: SCNA; (-) strand; PAM type: YTN; PAM sequence: TTG
ctcattcatttattaaccta

SEQ ID NO: 53567 - DNA, 20 bp, Artificial Sequence
  Description of Artificial Sequence: Synthetic oligonucleotide
  Target: SCNA; (-) strand; PAM type: YTN; PAM sequence: TTT
gctcattcatttattaacct

SEQ ID NO: 53568 - DNA, 20 bp, Artificial Sequence
  Description of Artificial Sequence: Synthetic oligonucleotide
  Target: SCNA; (-) strand; PAM type: YTN; PAM sequence: TTT
tgctcattcatttattaacc

SEQ ID NO: 53569 - DNA, 20 bp, Artificial Sequence
  Description of Artificial Sequence: Synthetic oligonucleotide
  Target: SCNA; (-) strand; PAM type: YTN; PAM sequence: TTT
ttgctcattcatttattaac

SEQ ID NO: 53570 - DNA, 20 bp, Artificial Sequence
  Description of Artificial Sequence: Synthetic oligonucleotide
  Target: SCNA; (-) strand; PAM type: YTN; PAM sequence: CTT
tttgctcattcatttattaa

SEQ ID NO: 53571 - DNA, 20 bp, Artificial Sequence
  Description of Artificial Sequence: Synthetic oligonucleotide
  Target: SCNA; (-) strand; PAM type: YTN; PAM sequence: TTA
atatgcacaataaaactttt

SEQ ID NO: 53572 - DNA, 20 bp, Artificial Sequence
  Description of Artificial Sequence: Synthetic oligonucleotide
  Target: SCNA; (-) strand; PAM type: YTN; PAM sequence: TTC
ccccaggtaacaattaatat

SEQ ID NO: 53573 - DNA, 20 bp, Artificial Sequence
  Description of Artificial Sequence: Synthetic oligonucleotide
  Target: SCNA; (-) strand; PAM type: YTN; PAM sequence: CTG
agtatattcccccaggtaac

SEQ ID NO: 53574 - DNA, 20 bp, Artificial Sequence
  Description of Artificial Sequence: Synthetic oligonucleotide
  Target: SCNA; (-) strand; PAM type: YTN; PAM sequence: TTA
agatgtctgagtatattccc

SEQ ID NO: 53575 - DNA, 20 bp, Artificial Sequence
  Description of Artificial Sequence: Synthetic oligonucleotide
  Target: SCNA; (-) strand; PAM type: YTN; PAM sequence: CTT
aagatgtctgagtatattcc

SEQ ID NO: 53576 - DNA, 20 bp, Artificial Sequence
  Description of Artificial Sequence: Synthetic oligonucleotide
  Target: SCNA; (-) strand; PAM type: YTN; PAM sequence: TTA
catatgagacttaagatgtc

SEQ ID NO: 53577 - DNA, 20 bp, Artificial Sequence
  Description of Artificial Sequence: Synthetic oligonucleotide
  Target: SCNA; (-) strand; PAM type: YTN; PAM sequence: TTT
acatatgagacttaagatgt

SEQ ID NO: 53578 - DNA, 20 bp, Artificial Sequence
  Description of Artificial Sequence: Synthetic oligonucleotide
  Target: SCNA; (-) strand; PAM type: YTN; PAM sequence: TTG
atatcaataccccaagttta

SEQ ID NO: 53579 - DNA, 20 bp, Artificial Sequence
  Description of Artificial Sequence: Synthetic oligonucleotide
  Target: SCNA; (-) strand; PAM type: YTN; PAM sequence: CTC
aaaatggcatgttgatatca

SEQ ID NO: 53580 - DNA, 20 bp, Artificial Sequence
  Description of Artificial Sequence: Synthetic oligonucleotide
  Target: SCNA; (-) strand; PAM type: YTN; PAM sequence: TTA
atcctcaaaatggcatgttg

SEQ ID NO: 53581 - DNA, 20 bp, Artificial Sequence
  Description of Artificial Sequence: Synthetic oligonucleotide
  Target: SCNA; (-) strand; PAM type: YTN; PAM sequence: CTC
aattaatcctcaaaatggca

SEQ ID NO: 53582 - DNA, 20 bp, Artificial Sequence
  Description of Artificial Sequence: Synthetic oligonucleotide
  Target: SCNA; (-) strand; PAM type: YTN; PAM sequence: TTA
tagacataacctcaattaat

SEQ ID NO: 53583 - DNA, 20 bp, Artificial Sequence
  Description of Artificial Sequence: Synthetic oligonucleotide
  Target: SCNA; (-) strand; PAM type: YTN; PAM sequence: TTT
atagacataacctcaattaa

SEQ ID NO: 53584 - DNA, 20 bp, Artificial Sequence
  Description of Artificial Sequence: Synthetic oligonucleotide
  Target: SCNA; (-) strand; PAM type: YTN; PAM sequence: CTA
gtaggtatttatagacataa

SEQ ID NO: 53585 - DNA, 20 bp, Artificial Sequence
  Description of Artificial Sequence: Synthetic oligonucleotide
  Target: SCNA; (-) strand; PAM type: YTN; PAM sequence: CTA
tgctagtaggtatttataga

SEQ ID NO: 53586 - DNA, 20 bp, Artificial Sequence
  Description of Artificial Sequence: Synthetic oligonucleotide
  Target: SCNA; (-) strand; PAM type: YTN; PAM sequence: CTA
gacactatgctagtaggtat

SEQ ID NO: 53587 - DNA, 20 bp, Artificial Sequence
  Description of Artificial Sequence: Synthetic oligonucleotide
  Target: SCNA; (-) strand; PAM type: YTN; PAM sequence: CTA
tgtgctagacactatgctag

SEQ ID NO: 53588 - DNA, 20 bp, Artificial Sequence
  Description of Artificial Sequence: Synthetic oligonucleotide
  Target: SCNA; (-) strand; PAM type: YTN; PAM sequence: TTC
atactatgtgctagacacta

SEQ ID NO: 53589 - DNA, 20 bp, Artificial Sequence
  Description of Artificial Sequence: Synthetic oligonucleotide
  Target: SCNA; (-) strand; PAM type: YTN; PAM sequence: TTT
catactatgtgctagacact

SEQ ID NO: 53590 - DNA, 20 bp, Artificial Sequence
  Description of Artificial Sequence: Synthetic oligonucleotide
  Target: SCNA; (-) strand; PAM type: YTN; PAM sequence: TTT
tcatactatgtgctagacac

SEQ ID NO: 53591 - DNA, 20 bp, Artificial Sequence
  Description of Artificial Sequence: Synthetic oligonucleotide
  Target: SCNA; (-) strand; PAM type: YTN; PAM sequence: TTA
ataaataataataatacaat

SEQ ID NO: 53592 - DNA, 20 bp, Artificial Sequence
  Description of Artificial Sequence: Synthetic oligonucleotide
  Target: SCNA; (-) strand; PAM type: YTN; PAM sequence: TTT
aataaataataataatacaa

SEQ ID NO: 53593 - DNA, 20 bp, Artificial Sequence
  Description of Artificial Sequence: Synthetic oligonucleotide
  Target: SCNA; (-) strand; PAM type: YTN; PAM sequence: TTT
taataaataataataataca

SEQ ID NO: 53594 - DNA, 20 bp, Artificial Sequence
  Description of Artificial Sequence: Synthetic oligonucleotide
  Target: SCNA; (-) strand; PAM type: YTN; PAM sequence: CTA
taaagaaaacaaaatgccat

SEQ ID NO: 53595 - DNA, 20 bp, Artificial Sequence
  Description of Artificial Sequence: Synthetic oligonucleotide
  Target: SCNA; (-) strand; PAM type: YTN; PAM sequence: TTG
gatagtgtcaggtgctataa

SEQ ID NO: 53596 - DNA, 20 bp, Artificial Sequence
  Description of Artificial Sequence: Synthetic oligonucleotide
  Target: SCNA; (-) strand; PAM type: YTN; PAM sequence: TTT
ggatagtgtcaggtgctata

SEQ ID NO: 53597 - DNA, 20 bp, Artificial Sequence
  Description of Artificial Sequence: Synthetic oligonucleotide
  Target: SCNA; (-) strand; PAM type: YTN; PAM sequence: TTA
agaaataagtaaaaagaaaa

SEQ ID NO: 53598 - DNA, 20 bp, Artificial Sequence
  Description of Artificial Sequence: Synthetic oligonucleotide
  Target: SCNA; (-) strand; PAM type: YTN; PAM sequence: TTG
tgaaacaattaagaaataag

SEQ ID NO: 53599 - DNA, 20 bp, Artificial Sequence
  Description of Artificial Sequence: Synthetic oligonucleotide
  Target: SCNA; (-) strand; PAM type: YTN; PAM sequence: TTT
gtgaaacaattaagaaataa

SEQ ID NO: 53600 - DNA, 20 bp, Artificial Sequence
  Description of Artificial Sequence: Synthetic oligonucleotide
  Target: SCNA; (-) strand; PAM type: YTN; PAM sequence: CTT
tgtgaaacaattaagaaata

SEQ ID NO: 53601 - DNA, 20 bp, Artificial Sequence
  Description of Artificial Sequence: Synthetic oligonucleotide
  Target: SCNA; (-) strand; PAM type: YTN; PAM sequence: CTG
cctttgtgaaacaattaaga

SEQ ID NO: 53602 - DNA, 20 bp, Artificial Sequence
  Description of Artificial Sequence: Synthetic oligonucleotide
  Target: SCNA; (-) strand; PAM type: YTN; PAM sequence: CTC
tgcctttgtgaaacaattaa

SEQ ID NO: 53603 - DNA, 20 bp, Artificial Sequence
  Description of Artificial Sequence: Synthetic oligonucleotide
  Target: SCNA; (-) strand; PAM type: YTN; PAM sequence: CTA
aagacatagaggcaaagcat

SEQ ID NO: 53604 - DNA, 20 bp, Artificial Sequence
  Description of Artificial Sequence: Synthetic oligonucleotide
  Target: SCNA; (-) strand; PAM type: YTN; PAM sequence: CTA
ggtactaaagacatagaggc

SEQ ID NO: 53605 - DNA, 20 bp, Artificial Sequence
  Description of Artificial Sequence: Synthetic oligonucleotide
  Target: SCNA; (-) strand; PAM type: YTN; PAM sequence: TTC
taggtactaaagacatagag

SEQ ID NO: 53606 - DNA, 20 bp, Artificial Sequence
  Description of Artificial Sequence: Synthetic oligonucleotide
  Target: SCNA; (-) strand; PAM type: YTN; PAM sequence: CTA
ttctaggtactaaagacata

SEQ ID NO: 53607 - DNA, 20 bp, Artificial Sequence
  Description of Artificial Sequence: Synthetic oligonucleotide
  Target: SCNA; (-) strand; PAM type: YTN; PAM sequence: TTA
aacaggcactattctaggta

SEQ ID NO: 53608 - DNA, 20 bp, Artificial Sequence
  Description of Artificial Sequence: Synthetic oligonucleotide
  Target: SCNA; (-) strand; PAM type: YTN; PAM sequence: TTT
aaacaggcactattctaggt

SEQ ID NO: 53609 - DNA, 20 bp, Artificial Sequence
  Description of Artificial Sequence: Synthetic oligonucleotide
  Target: SCNA; (-) strand; PAM type: YTN; PAM sequence: TTT
taaacaggcactattctagg

SEQ ID NO: 53610 - DNA, 20 bp, Artificial Sequence
  Description of Artificial Sequence: Synthetic oligonucleotide
  Target: SCNA; (-) strand; PAM type: YTN; PAM sequence: CTT
ttaaacaggcactattctag

SEQ ID NO: 53611 - DNA, 20 bp, Artificial Sequence
  Description of Artificial Sequence: Synthetic oligonucleotide
  Target: SCNA; (-) strand; PAM type: YTN; PAM sequence: CTA
cttttaaacaggcactattc

SEQ ID NO: 53612 - DNA, 20 bp, Artificial Sequence
  Description of Artificial Sequence: Synthetic oligonucleotide
  Target: SCNA; (-) strand; PAM type: YTN; PAM sequence: CTC
ctacttttaaacaggcacta

SEQ ID NO: 53613 - DNA, 20 bp, Artificial Sequence
  Description of Artificial Sequence: Synthetic oligonucleotide
  Target: SCNA; (-) strand; PAM type: YTN; PAM sequence: TTC
agctcctacttttaaacagg

SEQ ID NO: 53614 - DNA, 20 bp, Artificial Sequence
  Description of Artificial Sequence: Synthetic oligonucleotide
  Target: SCNA; (-) strand; PAM type: YTN; PAM sequence: TTA
ttcagctcctacttttaaac

SEQ ID NO: 53615 - DNA, 20 bp, Artificial Sequence
  Description of Artificial Sequence: Synthetic oligonucleotide
  Target: SCNA; (-) strand; PAM type: YTN; PAM sequence: TTT
attcagctcctacttttaaa

SEQ ID NO: 53616 - DNA, 20 bp, Artificial Sequence
  Description of Artificial Sequence: Synthetic oligonucleotide
  Target: SCNA; (-) strand; PAM type: YTN; PAM sequence: TTC
agcaaacatttattcagctc

SEQ ID NO: 53617 - DNA, 20 bp, Artificial Sequence
  Description of Artificial Sequence: Synthetic oligonucleotide
  Target: SCNA; (-) strand; PAM type: YTN; PAM sequence: TTA
attcagcaaacatttattca

SEQ ID NO: 53618 - DNA, 20 bp, Artificial Sequence
  Description of Artificial Sequence: Synthetic oligonucleotide
  Target: SCNA; (-) strand; PAM type: YTN; PAM sequence: TTA
atattaattcagcaaacatt

SEQ ID NO: 53619 - DNA, 20 bp, Artificial Sequence
  Description of Artificial Sequence: Synthetic oligonucleotide
  Target: SCNA; (-) strand; PAM type: YTN; PAM sequence: CTA
cacatgattaatattaattc

SEQ ID NO: 53620 - DNA, 20 bp, Artificial Sequence
  Description of Artificial Sequence: Synthetic oligonucleotide
  Target: SCNA; (-) strand; PAM type: YTN; PAM sequence: TTC
ctacacatgattaatattaa

SEQ ID NO: 53621 - DNA, 20 bp, Artificial Sequence
  Description of Artificial Sequence: Synthetic oligonucleotide
  Target: SCNA; (-) strand; PAM type: YTN; PAM sequence: TTT
cctacacatgattaatatta

SEQ ID NO: 53622 - DNA, 20 bp, Artificial Sequence
  Description of Artificial Sequence: Synthetic oligonucleotide
  Target: SCNA; (-) strand; PAM type: YTN; PAM sequence: TTT
tcctacacatgattaatatt

SEQ ID NO: 53623 - DNA, 20 bp, Artificial Sequence
  Description of Artificial Sequence: Synthetic oligonucleotide
  Target: SCNA; (-) strand; PAM type: YTN; PAM sequence: CTT
ttcctacacatgattaatat

SEQ ID NO: 53624 - DNA, 20 bp, Artificial Sequence
  Description of Artificial Sequence: Synthetic oligonucleotide
  Target: SCNA; (-) strand; PAM type: YTN; PAM sequence: TTC
ttttcctacacatgattaat

SEQ ID NO: 53625 - DNA, 20 bp, Artificial Sequence
  Description of Artificial Sequence: Synthetic oligonucleotide
  Target: SCNA; (-) strand; PAM type: YTN; PAM sequence: CTT
cttttcctacacatgattaa

SEQ ID NO: 53626 - DNA, 20 bp, Artificial Sequence
  Description of Artificial Sequence: Synthetic oligonucleotide
  Target: SCNA; (-) strand; PAM type: YTN; PAM sequence: TTC
ccaagcttcttttcctacac

SEQ ID NO: 53627 - DNA, 20 bp, Artificial Sequence
  Description of Artificial Sequence: Synthetic oligonucleotide
  Target: SCNA; (-) strand; PAM type: YTN; PAM sequence: CTG
tgggtggtagaataacattc

SEQ ID NO: 53628 - DNA, 20 bp, Artificial Sequence
  Description of Artificial Sequence: Synthetic oligonucleotide
  Target: SCNA; (-) strand; PAM type: YTN; PAM sequence: TTG
agaaagaacacacaaaacaa

SEQ ID NO: 53629 - DNA, 20 bp, Artificial Sequence
  Description of Artificial Sequence: Synthetic oligonucleotide
  Target: SCNA; (-) strand; PAM type: YTN; PAM sequence: CTT
gagaaagaacacacaaaaca

SEQ ID NO: 53630 - DNA, 20 bp, Artificial Sequence
  Description of Artificial Sequence: Synthetic oligonucleotide
  Target: SCNA; (-) strand; PAM type: YTN; PAM sequence: CTG
aaagtgaatccttgagaaag

SEQ ID NO: 53631 - DNA, 20 bp, Artificial Sequence
  Description of Artificial Sequence: Synthetic oligonucleotide
  Target: SCNA; (-) strand; PAM type: YTN; PAM sequence: TTC
tgaaagtgaatccttgagaa

SEQ ID NO: 53632 - DNA, 20 bp, Artificial Sequence
  Description of Artificial Sequence: Synthetic oligonucleotide
  Target: SCNA; (-) strand; PAM type: YTN; PAM sequence: TTG
agttctgaaagtgaatcctt

SEQ ID NO: 53633 - DNA, 20 bp, Artificial Sequence
  Description of Artificial Sequence: Synthetic oligonucleotide
  Target: SCNA; (-) strand; PAM type: YTN; PAM sequence: TTT
gagttctgaaagtgaatcct

SEQ ID NO: 53634 - DNA, 20 bp, Artificial Sequence
  Description of Artificial Sequence: Synthetic oligonucleotide
  Target: SCNA; (-) strand; PAM type: YTN; PAM sequence: TTT
tgagttctgaaagtgaatcc

SEQ ID NO: 53635 - DNA, 20 bp, Artificial Sequence
  Description of Artificial Sequence: Synthetic oligonucleotide
  Target: SCNA; (-) strand; PAM type: YTN; PAM sequence: CTA
caccccattttgagttctga

SEQ ID NO: 53636 - DNA, 20 bp, Artificial Sequence
  Description of Artificial Sequence: Synthetic oligonucleotide
  Target: SCNA; (-) strand; PAM type: YTN; PAM sequence: CTG
gcaccaccaccaccctacac

SEQ ID NO: 53637 - DNA, 20 bp, Artificial Sequence
  Description of Artificial Sequence: Synthetic oligonucleotide
  Target: SCNA; (-) strand; PAM type: YTN; PAM sequence: CTG
ctggcaccaccaccacccta

SEQ ID NO: 53638 - DNA, 20 bp, Artificial Sequence
  Description of Artificial Sequence: Synthetic oligonucleotide
  Target: SCNA; (-) strand; PAM type: YTN; PAM sequence: CTC
ccatccccactgctggcacc

SEQ ID NO: 53639 - DNA, 20 bp, Artificial Sequence
  Description of Artificial Sequence: Synthetic oligonucleotide
  Target: SCNA; (-) strand; PAM type: YTN; PAM sequence: TTC
tcccatccccactgctggca

SEQ ID NO: 53640 - DNA, 20 bp, Artificial Sequence
  Description of Artificial Sequence: Synthetic oligonucleotide
  Target: SCNA; (-) strand; PAM type: YTN; PAM sequence: CTT
ctcccatccccactgctggc

SEQ ID NO: 53641 - DNA, 20 bp, Artificial Sequence
  Description of Artificial Sequence: Synthetic oligonucleotide
  Target: SCNA; (-) strand; PAM type: YTN; PAM sequence: CTG
tagggagagatcgagcttct

SEQ ID NO: 53642 - DNA, 20 bp, Artificial Sequence
  Description of Artificial Sequence: Synthetic oligonucleotide
  Target: SCNA; (-) strand; PAM type: YTN; PAM sequence: CTA
ctgtagggagagatcgagct

SEQ ID NO: 53643 - DNA, 20 bp, Artificial Sequence
  Description of Artificial Sequence: Synthetic oligonucleotide
  Target: SCNA; (-) strand; PAM type: YTN; PAM sequence: TTC
tactgtagggagagatcgag

SEQ ID NO: 53644 - DNA, 20 bp, Artificial Sequence
  Description of Artificial Sequence: Synthetic oligonucleotide
  Target: SCNA; (-) strand; PAM type: YTN; PAM sequence: CTT
ctactgtagggagagatcga

SEQ ID NO: 53645 - DNA, 20 bp, Artificial Sequence
  Description of Artificial Sequence: Synthetic oligonucleotide
  Target: SCNA; (-) strand; PAM type: YTN; PAM sequence: CTG
aagaacacatagagcagtaa

SEQ ID NO: 53646 - DNA, 20 bp, Artificial Sequence
  Description of Artificial Sequence: Synthetic oligonucleotide
  Target: SCNA; (-) strand; PAM type: YTN; PAM sequence: TTA
tagggctgaagaacacatag

SEQ ID NO: 53647 - DNA, 20 bp, Artificial Sequence
  Description of Artificial Sequence: Synthetic oligonucleotide
  Target: SCNA; (-) strand; PAM type: YTN; PAM sequence: CTT
atagggctgaagaacacata

SEQ ID NO: 53648 - DNA, 20 bp, Artificial Sequence
  Description of Artificial Sequence: Synthetic oligonucleotide
  Target: SCNA; (-) strand; PAM type: YTN; PAM sequence: TTC
ttatagggctgaagaacaca

SEQ ID NO: 53649 - DNA, 20 bp, Artificial Sequence
  Description of Artificial Sequence: Synthetic oligonucleotide
  Target: SCNA; (-) strand; PAM type: YTN; PAM sequence: TTG
gttcttatagggctgaagaa

SEQ ID NO: 53650 - DNA, 20 bp, Artificial Sequence
  Description of Artificial Sequence: Synthetic oligonucleotide
  Target: SCNA; (-) strand; PAM type: YTN; PAM sequence: TTC
attggttcttatagggctga

SEQ ID NO: 53651 - DNA, 20 bp, Artificial Sequence
  Description of Artificial Sequence: Synthetic oligonucleotide
  Target: SCNA; (-) strand; PAM type: YTN; PAM sequence: TTT
cattggttcttatagggctg

SEQ ID NO: 53652 - DNA, 20 bp, Artificial Sequence
  Description of Artificial Sequence: Synthetic oligonucleotide
  Target: SCNA; (-) strand; PAM type: YTN; PAM sequence: CTT
tcattggttcttatagggct

SEQ ID NO: 53653 - DNA, 20 bp, Artificial Sequence
  Description of Artificial Sequence: Synthetic oligonucleotide
  Target: SCNA; (-) strand; PAM type: YTN; PAM sequence: CTG
tgagtatgtagggatgtcca

SEQ ID NO: 53654 - DNA, 20 bp, Artificial Sequence
  Description of Artificial Sequence: Synthetic oligonucleotide
  Target: SCNA; (-) strand; PAM type: YTN; PAM sequence: CTG
ctgtgagtatgtagggatgt

SEQ ID NO: 53655 - DNA, 20 bp, Artificial Sequence
  Description of Artificial Sequence: Synthetic oligonucleotide
  Target: SCNA; (-) strand; PAM type: YTN; PAM sequence: TTG
cagactgctgtgagtatgta

SEQ ID NO: 53656 - DNA, 20 bp, Artificial Sequence
  Description of Artificial Sequence: Synthetic oligonucleotide
  Target: SCNA; (-) strand; PAM type: YTN; PAM sequence: TTT
gcagactgctgtgagtatgt

SEQ ID NO: 53657 - DNA, 20 bp, Artificial Sequence
  Description of Artificial Sequence: Synthetic oligonucleotide
  Target: SCNA; (-) strand; PAM type: YTN; PAM sequence: TTT
tgcagactgctgtgagtatg

SEQ ID NO: 53658 - DNA, 20 bp, Artificial Sequence
  Description of Artificial Sequence: Synthetic oligonucleotide
  Target: SCNA; (-) strand; PAM type: YTN; PAM sequence: TTG
gatatgttttgcagactgct

SEQ ID NO: 53659 - DNA, 20 bp, Artificial Sequence
  Description of Artificial Sequence: Synthetic oligonucleotide
  Target: SCNA; (-) strand; PAM type: YTN; PAM sequence: CTT
ggatatgttttgcagactgc

SEQ ID NO: 53660 - DNA, 20 bp, Artificial Sequence
  Description of Artificial Sequence: Synthetic oligonucleotide
  Target: SCNA; (-) strand; PAM type: YTN; PAM sequence: CTC
agtgggcccttggatatgtt

SEQ ID NO: 53661 - DNA, 20 bp, Artificial Sequence
  Description of Artificial Sequence: Synthetic oligonucleotide
  Target: SCNA; (-) strand; PAM type: YTN; PAM sequence: TTC
agtgtctcagtgggcccttg

SEQ ID NO: 53662 - DNA, 20 bp, Artificial Sequence
  Description of Artificial Sequence: Synthetic oligonucleotide
  Target: SCNA; (-) strand; PAM type: YTN; PAM sequence: CTT
cagtgtctcagtgggccctt

SEQ ID NO: 53663 - DNA, 20 bp, Artificial Sequence
  Description of Artificial Sequence: Synthetic oligonucleotide
  Target: SCNA; (-) strand; PAM type: YTN; PAM sequence: TTA
aatcaatgggtcatcttcag

SEQ ID NO: 53664 - DNA, 20 bp, Artificial Sequence
  Description of Artificial Sequence: Synthetic oligonucleotide
  Target: SCNA; (-) strand; PAM type: YTN; PAM sequence: TTG
caaatatgtattaaatcaat

SEQ ID NO: 53665 - DNA, 20 bp, Artificial Sequence
  Description of Artificial Sequence: Synthetic oligonucleotide
  Target: SCNA; (-) strand; PAM type: YTN; PAM sequence: CTT
gcaaatatgtattaaatcaa

SEQ ID NO: 53666 - DNA, 20 bp, Artificial Sequence
  Description of Artificial Sequence: Synthetic oligonucleotide
  Target: SCNA; (-) strand; PAM type: YTN; PAM sequence: CTC
aatcagagccttgcaaatat

SEQ ID NO: 53667 - DNA, 20 bp, Artificial Sequence
  Description of Artificial Sequence: Synthetic oligonucleotide
  Target: SCNA; (-) strand; PAM type: YTN; PAM sequence: TTC
tcaatcagagccttgcaaat

SEQ ID NO: 53668 - DNA, 20 bp, Artificial Sequence
  Description of Artificial Sequence: Synthetic oligonucleotide
  Target: SCNA; (-) strand; PAM type: YTN; PAM sequence: CTG
tccagaggttctcaatcaga

SEQ ID NO: 53669 - DNA, 20 bp, Artificial Sequence
  Description of Artificial Sequence: Synthetic oligonucleotide
  Target: SCNA; (-) strand; PAM type: YTN; PAM sequence: CTA
gataagcgcctgtccagagg

SEQ ID NO: 53670 - DNA, 20 bp, Artificial Sequence
  Description of Artificial Sequence: Synthetic oligonucleotide
  Target: SCNA; (-) strand; PAM type: YTN; PAM sequence: CTC
tagataagcgcctgtccaga

SEQ ID NO: 53671 - DNA, 20 bp, Artificial Sequence
  Description of Artificial Sequence: Synthetic oligonucleotide
  Target: SCNA; (-) strand; PAM type: YTN; PAM sequence: CTG
taacctctagataagcgcct

SEQ ID NO: 53672 - DNA, 20 bp, Artificial Sequence
  Description of Artificial Sequence: Synthetic oligonucleotide
  Target: SCNA; (-) strand; PAM type: YTN; PAM sequence: TTA
gtcacacactgtaacctcta

SEQ ID NO: 53673 - DNA, 20 bp, Artificial Sequence
  Description of Artificial Sequence: Synthetic oligonucleotide
  Target: SCNA; (-) strand; PAM type: YTN; PAM sequence: CTG
tgtcgtgttagtcacacact

SEQ ID NO: 53674 - DNA, 20 bp, Artificial Sequence
  Description of Artificial Sequence: Synthetic oligonucleotide
  Target: SCNA; (-) strand; PAM type: YTN; PAM sequence: CTA
aactgtgtcgtgttagtcac

SEQ ID NO: 53675 - DNA, 20 bp, Artificial Sequence
  Description of Artificial Sequence: Synthetic oligonucleotide
  Target: SCNA; (-) strand; PAM type: YTN; PAM sequence: TTA
cataaatcctaaactgtgtc

SEQ ID NO: 53676 - DNA, 20 bp, Artificial Sequence
  Description of Artificial Sequence: Synthetic oligonucleotide
  Target: SCNA; (-) strand; PAM type: YTN; PAM sequence: CTG
ttacataaatcctaaactgt

SEQ ID NO: 53677 - DNA, 20 bp, Artificial Sequence
  Description of Artificial Sequence: Synthetic oligonucleotide
  Target: SCNA; (-) strand; PAM type: YTN; PAM sequence: TTC
ctgttacataaatcctaaac

SEQ ID NO: 53678 - DNA, 20 bp, Artificial Sequence
  Description of Artificial Sequence: Synthetic oligonucleotide
  Target: SCNA; (-) strand; PAM type: YTN; PAM sequence: CTA
tagcatattcctgttacata

SEQ ID NO: 53679 - DNA, 20 bp, Artificial Sequence
  Description of Artificial Sequence: Synthetic oligonucleotide
  Target: SCNA; (-) strand; PAM type: YTN; PAM sequence: CTC
cctatagcatattcctgtta

SEQ ID NO: 53680 - DNA, 20 bp, Artificial Sequence
  Description of Artificial Sequence: Synthetic oligonucleotide
  Target: SCNA; (-) strand; PAM type: YTN; PAM sequence: CTC
tccctatagcatattcctgt

SEQ ID NO: 53681 - DNA, 20 bp, Artificial Sequence
  Description of Artificial Sequence: Synthetic oligonucleotide
  Target: SCNA; (-) strand; PAM type: YTN; PAM sequence: TTC
tctccctatagcatattcct

SEQ ID NO: 53682 - DNA, 20 bp, Artificial Sequence
  Description of Artificial Sequence: Synthetic oligonucleotide
  Target: SCNA; (-) strand; PAM type: YTN; PAM sequence: TTT
ctctccctatagcatattcc

SEQ ID NO: 53683 - DNA, 20 bp, Artificial Sequence
  Description of Artificial Sequence: Synthetic oligonucleotide
  Target: SCNA; (-) strand; PAM type: YTN; PAM sequence: CTT
tctctccctatagcatattc

SEQ ID NO: 53684 - DNA, 20 bp, Artificial Sequence
  Description of Artificial Sequence: Synthetic oligonucleotide
  Target: SCNA; (-) strand; PAM type: YTN; PAM sequence: TTC
tttctctccctatagcatat

SEQ ID NO: 53685 - DNA, 20 bp, Artificial Sequence
  Description of Artificial Sequence: Synthetic oligonucleotide
  Target: SCNA; (-) strand; PAM type: YTN; PAM sequence: CTG
ttctttctctccctatagca

SEQ ID NO: 53686 - DNA, 20 bp, Artificial Sequence
  Description of Artificial Sequence: Synthetic oligonucleotide
  Target: SCNA; (-) strand; PAM type: YTN; PAM sequence: TTC
tgttctttctctccctatag

SEQ ID NO: 53687 - DNA, 20 bp, Artificial Sequence
  Description of Artificial Sequence: Synthetic oligonucleotide
  Target: SCNA; (-) strand; PAM type: YTN; PAM sequence: CTT
ctgttctttctctccctata

SEQ ID NO: 53688 - DNA, 20 bp, Artificial Sequence
  Description of Artificial Sequence: Synthetic oligonucleotide
  Target: SCNA; (-) strand; PAM type: YTN; PAM sequence: CTG
aggtcttctgttctttctct

SEQ ID NO: 53689 - DNA, 20 bp, Artificial Sequence
  Description of Artificial Sequence: Synthetic oligonucleotide
  Target: SCNA; (-) strand; PAM type: YTN; PAM sequence: TTC
caccgtgtcaactgaggtct

SEQ ID NO: 53690 - DNA, 20 bp, Artificial Sequence
  Description of Artificial Sequence: Synthetic oligonucleotide
  Target: SCNA; (-) strand; PAM type: YTN; PAM sequence: CTC
caattccaccgtgtcaactg

SEQ ID NO: 53691 - DNA, 20 bp, Artificial Sequence
  Description of Artificial Sequence: Synthetic oligonucleotide
  Target: SCNA; (-) strand; PAM type: YTN; PAM sequence: CTC
actccaattccaccgtgtca

SEQ ID NO: 53692 - DNA, 20 bp, Artificial Sequence
  Description of Artificial Sequence: Synthetic oligonucleotide
  Target: SCNA; (-) strand; PAM type: YTN; PAM sequence: CTC
tcactccaattccaccgtgt

SEQ ID NO: 53693 - DNA, 20 bp, Artificial Sequence
  Description of Artificial Sequence: Synthetic oligonucleotide
  Target: SCNA; (-) strand; PAM type: YTN; PAM sequence: CTC
tctcactccaattccaccgt

SEQ ID NO: 53694 - DNA, 20 bp, Artificial Sequence
  Description of Artificial Sequence: Synthetic oligonucleotide
  Target: SCNA; (-) strand; PAM type: YTN; PAM sequence: TTC
atggaaatctctctcactcc

SEQ ID NO: 53695 - DNA, 20 bp, Artificial Sequence
  Description of Artificial Sequence: Synthetic oligonucleotide
  Target: SCNA; (-) strand; PAM type: YTN; PAM sequence: CTT
catggaaatctctctcactc

SEQ ID NO: 53696 - DNA, 20 bp, Artificial Sequence
  Description of Artificial Sequence: Synthetic oligonucleotide
  Target: SCNA; (-) strand; PAM type: YTN; PAM sequence: TTG
gcttcatggaaatctctctc

SEQ ID NO: 53697 - DNA, 20 bp, Artificial Sequence
  Description of Artificial Sequence: Synthetic oligonucleotide
  Target: SCNA; (-) strand; PAM type: YTN; PAM sequence: CTT
ggcttcatggaaatctctct

SEQ ID NO: 53698 - DNA, 20 bp, Artificial Sequence
  Description of Artificial Sequence: Synthetic oligonucleotide
  Target: SCNA; (-) strand; PAM type: YTN; PAM sequence: TTA
cttggcttcatggaaatctc

SEQ ID NO: 53699 - DNA, 20 bp, Artificial Sequence
  Description of Artificial Sequence: Synthetic oligonucleotide
  Target: SCNA; (-) strand; PAM type: YTN; PAM sequence: TTT
acttggcttcatggaaatct

SEQ ID NO: 53700 - DNA, 20 bp, Artificial Sequence
  Description of Artificial Sequence: Synthetic oligonucleotide
  Target: SCNA; (-) strand; PAM type: YTN; PAM sequence: CTA
tttacttggcttcatggaaa

SEQ ID NO: 53701 - DNA, 20 bp, Artificial Sequence
  Description of Artificial Sequence: Synthetic oligonucleotide
  Target: SCNA; (-) strand; PAM type: YTN; PAM sequence: CTC
caaaatactatttacttggc

SEQ ID NO: 53702 - DNA, 20 bp, Artificial Sequence
  Description of Artificial Sequence: Synthetic oligonucleotide
  Target: SCNA; (-) strand; PAM type: YTN; PAM sequence: CTC
tccaaaatactatttacttg

SEQ ID NO: 53703 - DNA, 20 bp, Artificial Sequence
  Description of Artificial Sequence: Synthetic oligonucleotide
  Target: SCNA; (-) strand; PAM type: YTN; PAM sequence: TTC
actctccaaaatactattta

SEQ ID NO: 53704 - DNA, 20 bp, Artificial Sequence
  Description of Artificial Sequence: Synthetic oligonucleotide
  Target: SCNA; (-) strand; PAM type: YTN; PAM sequence: CTT
cactctccaaaatactattt

SEQ ID NO: 53705 - DNA, 20 bp, Artificial Sequence
  Description of Artificial Sequence: Synthetic oligonucleotide
  Target: SCNA; (-) strand; PAM type: YTN; PAM sequence: CTC
cttcactctccaaaatacta

SEQ ID NO: 53706 - DNA, 20 bp, Artificial Sequence
  Description of Artificial Sequence: Synthetic oligonucleotide
  Target: SCNA; (-) strand; PAM type: YTN; PAM sequence: CTC
ctccttcactctccaaaata

SEQ ID NO: 53707 - DNA, 20 bp, Artificial Sequence
  Description of Artificial Sequence: Synthetic oligonucleotide
  Target: SCNA; (-) strand; PAM type: YTN; PAM sequence: TTA
aggatgatgtctcctccttc

SEQ ID NO: 53708 - DNA, 20 bp, Artificial Sequence
  Description of Artificial Sequence: Synthetic oligonucleotide
  Target: SCNA; (-) strand; PAM type: YTN; PAM sequence: TTG
aagttaaggatgatgtctcc

SEQ ID NO: 53709 - DNA, 20 bp, Artificial Sequence
  Description of Artificial Sequence: Synthetic oligonucleotide
  Target: SCNA; (-) strand; PAM type: YTN; PAM sequence: CTA
cacaggataataatattgaa

SEQ ID NO: 53710 - DNA, 20 bp, Artificial Sequence
  Description of Artificial Sequence: Synthetic oligonucleotide
  Target: SCNA; (-) strand; PAM type: YTN; PAM sequence: TTA
agtaaaaaatacacaaagta

SEQ ID NO: 53711 - DNA, 20 bp, Artificial Sequence
  Description of Artificial Sequence: Synthetic oligonucleotide
  Target: SCNA; (-) strand; PAM type: YTN; PAM sequence: CTT
aagtaaaaaatacacaaagt

SEQ ID NO: 53712 - DNA, 20 bp, Artificial Sequence
  Description of Artificial Sequence: Synthetic oligonucleotide
  Target: SCNA; (-) strand; PAM type: YTN; PAM sequence: CTC
ttaagtaaaaaatacacaaa

SEQ ID NO: 53713 - DNA, 20 bp, Artificial Sequence
  Description of Artificial Sequence: Synthetic oligonucleotide
  Target: SCNA; (-) strand; PAM type: YTN; PAM sequence: TTC
tcttaagtaaaaaatacaca

SEQ ID NO: 53714 - DNA, 20 bp, Artificial Sequence
  Description of Artificial Sequence: Synthetic oligonucleotide
  Target: SCNA; (-) strand; PAM type: YTN; PAM sequence: TTT
ctcttaagtaaaaaatacac

SEQ ID NO: 53715 - DNA, 20 bp, Artificial Sequence
  Description of Artificial Sequence: Synthetic oligonucleotide
  Target: SCNA; (-) strand; PAM type: YTN; PAM sequence: TTT
tctcttaagtaaaaaataca

SEQ ID NO: 53716 - DNA, 20 bp, Artificial Sequence
  Description of Artificial Sequence: Synthetic oligonucleotide
  Target: SCNA; (-) strand; PAM type: YTN; PAM sequence: TTT
ttctcttaagtaaaaaatac

SEQ ID NO: 53717 - DNA, 20 bp, Artificial Sequence
  Description of Artificial Sequence: Synthetic oligonucleotide
  Target: SCNA; (-) strand; PAM type: YTN; PAM sequence: TTT
tttctcttaagtaaaaaata

SEQ ID NO: 53718 - DNA, 20 bp, Artificial Sequence
  Description of Artificial Sequence: Synthetic oligonucleotide
  Target: SCNA; (-) strand; PAM type: YTN; PAM sequence: CTA
ttttttctcttaagtaaaaa

SEQ ID NO: 53719 - DNA, 20 bp, Artificial Sequence
  Description of Artificial Sequence: Synthetic oligonucleotide
  Target: SCNA; (-) strand; PAM type: YTN; PAM sequence: TTA
ctattttttctcttaagtaa

SEQ ID NO: 53720 - DNA, 20 bp, Artificial Sequence
  Description of Artificial Sequence: Synthetic oligonucleotide
  Target: SCNA; (-) strand; PAM type: YTN; PAM sequence: TTA
ttactattttttctcttaag

SEQ ID NO: 53721 - DNA, 20 bp, Artificial Sequence
  Description of Artificial Sequence: Synthetic oligonucleotide
  Target: SCNA; (-) strand; PAM type: YTN; PAM sequence: CTA
gcgaatattattactatttt

SEQ ID NO: 53722 - DNA, 20 bp, Artificial Sequence
  Description of Artificial Sequence: Synthetic oligonucleotide
  Target: SCNA; (-) strand; PAM type: YTN; PAM sequence: CTC
ctagcgaatattattactat

SEQ ID NO: 53723 - DNA, 20 bp, Artificial Sequence
  Description of Artificial Sequence: Synthetic oligonucleotide
  Target: SCNA; (-) strand; PAM type: YTN; PAM sequence: TTC
tcctagcgaatattattact

SEQ ID NO: 53724 - DNA, 20 bp, Artificial Sequence
  Description of Artificial Sequence: Synthetic oligonucleotide
  Target: SCNA; (-) strand; PAM type: YTN; PAM sequence: TTT
ctcctagcgaatattattac

SEQ ID NO: 53725 - DNA, 20 bp, Artificial Sequence
  Description of Artificial Sequence: Synthetic oligonucleotide
  Target: SCNA; (-) strand; PAM type: YTN; PAM sequence: TTC
aaagtgtttctcctagcgaa

SEQ ID NO: 53726 - DNA, 20 bp, Artificial Sequence
  Description of Artificial Sequence: Synthetic oligonucleotide
  Target: SCNA; (-) strand; PAM type: YTN; PAM sequence: CTT
caaagtgtttctcctagcga

SEQ ID NO: 53727 - DNA, 20 bp, Artificial Sequence
  Description of Artificial Sequence: Synthetic oligonucleotide
  Target: SCNA; (-) strand; PAM type: YTN; PAM sequence: TTC
ttcaaagtgtttctcctagc

SEQ ID NO: 53728 - DNA, 20 bp, Artificial Sequence
  Description of Artificial Sequence: Synthetic oligonucleotide
  Target: SCNA; (-) strand; PAM type: YTN; PAM sequence: TTT
cttcaaagtgtttctcctag

SEQ ID NO: 53729 - DNA, 20 bp, Artificial Sequence
  Description of Artificial Sequence: Synthetic oligonucleotide
  Target: SCNA; (-) strand; PAM type: YTN; PAM sequence: CTT
tcttcaaagtgtttctccta

SEQ ID NO: 53730 - DNA, 20 bp, Artificial Sequence
  Description of Artificial Sequence: Synthetic oligonucleotide
  Target: SCNA; (-) strand; PAM type: YTN; PAM sequence: TTC
tttcttcaaagtgtttctcc

SEQ ID NO: 53731 - DNA, 20 bp, Artificial Sequence
  Description of Artificial Sequence: Synthetic oligonucleotide
  Target: SCNA; (-) strand; PAM type: YTN; PAM sequence: TTT
ctttcttcaaagtgtttctc

SEQ ID NO: 53732 - DNA, 20 bp, Artificial Sequence
  Description of Artificial Sequence: Synthetic oligonucleotide
  Target: SCNA; (-) strand; PAM type: YTN; PAM sequence: TTA
tttctttcttcaaagtgttt

SEQ ID NO: 53733 - DNA, 20 bp, Artificial Sequence
  Description of Artificial Sequence: Synthetic oligonucleotide
  Target: SCNA; (-) strand; PAM type: YTN; PAM sequence: CTT
atttctttcttcaaagtgtt

SEQ ID NO: 53734 - DNA, 20 bp, Artificial Sequence
  Description of Artificial Sequence: Synthetic oligonucleotide
  Target: SCNA; (-) strand; PAM type: YTN; PAM sequence: CTG
gacttatttctttcttcaaa

SEQ ID NO: 53735 - DNA, 20 bp, Artificial Sequence
  Description of Artificial Sequence: Synthetic oligonucleotide
  Target: SCNA; (-) strand; PAM type: YTN; PAM sequence: CTC
ctggacttatttctttcttc

SEQ ID NO: 53736 - DNA, 20 bp, Artificial Sequence
  Description of Artificial Sequence: Synthetic oligonucleotide
  Target: SCNA; (-) strand; PAM type: YTN; PAM sequence: TTA
cagggctcctggacttattt

SEQ ID NO: 53737 - DNA, 20 bp, Artificial Sequence
  Description of Artificial Sequence: Synthetic oligonucleotide
  Target: SCNA; (-) strand; PAM type: YTN; PAM sequence: TTA
tgtgggaaataaatagagga

SEQ ID NO: 53738 - DNA, 20 bp, Artificial Sequence
  Description of Artificial Sequence: Synthetic oligonucleotide
  Target: SCNA; (-) strand; PAM type: YTN; PAM sequence: TTT
atgtgggaaataaatagagg

SEQ ID NO: 53739 - DNA, 20 bp, Artificial Sequence
  Description of Artificial Sequence: Synthetic oligonucleotide
  Target: SCNA; (-) strand; PAM type: YTN; PAM sequence: TTT
tatgtgggaaataaatagag

SEQ ID NO: 53740 - DNA, 20 bp, Artificial Sequence
  Description of Artificial Sequence: Synthetic oligonucleotide
  Target: SCNA; (-) strand; PAM type: YTN; PAM sequence: TTA
attttatgtgggaaataaat

SEQ ID NO: 53741 - DNA, 20 bp, Artificial Sequence
  Description of Artificial Sequence: Synthetic oligonucleotide
  Target: SCNA; (-) strand; PAM type: YTN; PAM sequence: TTT
aattttatgtgggaaataaa

SEQ ID NO: 53742 - DNA, 20 bp, Artificial Sequence
  Description of Artificial Sequence: Synthetic oligonucleotide
  Target: SCNA; (-) strand; PAM type: YTN; PAM sequence: CTT
taattttatgtgggaaataa

SEQ ID NO: 53743 - DNA, 20 bp, Artificial Sequence
  Description of Artificial Sequence: Synthetic oligonucleotide
  Target: SCNA; (-) strand; PAM type: YTN; PAM sequence: CTA
aaacagctttaattttatgt

SEQ ID NO: 53744 - DNA, 20 bp, Artificial Sequence
  Description of Artificial Sequence: Synthetic oligonucleotide
  Target: SCNA; (-) strand; PAM type: YTN; PAM sequence: TTC
aagatgataaatgcgatgag

SEQ ID NO: 53745 - DNA, 20 bp, Artificial Sequence
  Description of Artificial Sequence: Synthetic oligonucleotide
  Target: SCNA; (-) strand; PAM type: YTN; PAM sequence: TTA
aataaaataatgtggcaaat

SEQ ID NO: 53746 - DNA, 20 bp, Artificial Sequence
  Description of Artificial Sequence: Synthetic oligonucleotide
  Target: SCNA; (-) strand; PAM type: YTN; PAM sequence: TTT
aaataaaataatgtggcaaa

SEQ ID NO: 53747 - DNA, 20 bp, Artificial Sequence
  Description of Artificial Sequence: Synthetic oligonucleotide
  Target: SCNA; (-) strand; PAM type: YTN; PAM sequence: TTA
aggaatatttaaataaaata

SEQ ID NO: 53748 - DNA, 20 bp, Artificial Sequence
  Description of Artificial Sequence: Synthetic oligonucleotide
  Target: SCNA; (-) strand; PAM type: YTN; PAM sequence: CTG
taggttaaggaatatttaaa

SEQ ID NO: 53749 - DNA, 20 bp, Artificial Sequence
  Description of Artificial Sequence: Synthetic oligonucleotide
  Target: SCNA; (-) strand; PAM type: YTN; PAM sequence: CTC
tgtaggttaaggaatattta

SEQ ID NO: 53750 - DNA, 20 bp, Artificial Sequence
  Description of Artificial Sequence: Synthetic oligonucleotide
  Target: SCNA; (-) strand; PAM type: YTN; PAM sequence: CTC
tctgtaggttaaggaatatt

SEQ ID NO: 53751 - DNA, 20 bp, Artificial Sequence
  Description of Artificial Sequence: Synthetic oligonucleotide
  Target: SCNA; (-) strand; PAM type: YTN; PAM sequence: TTA
agtccactctctgtaggtta

SEQ ID NO: 53752 - DNA, 20 bp, Artificial Sequence
  Description of Artificial Sequence: Synthetic oligonucleotide
  Target: SCNA; (-) strand; PAM type: YTN; PAM sequence: TTA
gcagttaagtccactctctg

SEQ ID NO: 53753 - DNA, 20 bp, Artificial Sequence
  Description of Artificial Sequence: Synthetic oligonucleotide
  Target: SCNA; (-) strand; PAM type: YTN; PAM sequence: TTT
agcagttaagtccactctct

SEQ ID NO: 53754 - DNA, 20 bp, Artificial Sequence
  Description of Artificial Sequence: Synthetic oligonucleotide
  Target: SCNA; (-) strand; PAM type: YTN; PAM sequence: TTT
tagcagttaagtccactctc

SEQ ID NO: 53755 - DNA, 20 bp, Artificial Sequence
  Description of Artificial Sequence: Synthetic oligonucleotide
  Target: SCNA; (-) strand; PAM type: YTN; PAM sequence: TTT
ttagcagttaagtccactct

SEQ ID NO: 53756 - DNA, 20 bp, Artificial Sequence
  Description of Artificial Sequence: Synthetic oligonucleotide
  Target: SCNA; (-) strand; PAM type: YTN; PAM sequence: CTT
tttagcagttaagtccactc

SEQ ID NO: 53757 - DNA, 20 bp, Artificial Sequence
  Description of Artificial Sequence: Synthetic oligonucleotide
  Target: SCNA; (-) strand; PAM type: YTN; PAM sequence: TTA
agtactttttagcagttaag

SEQ ID NO: 53758 - DNA, 20 bp, Artificial Sequence
  Description of Artificial Sequence: Synthetic oligonucleotide
  Target: SCNA; (-) strand; PAM type: YTN; PAM sequence: TTG
ggaacatgtattaagtactt

SEQ ID NO: 53759 - DNA, 20 bp, Artificial Sequence
  Description of Artificial Sequence: Synthetic oligonucleotide
  Target: SCNA; (-) strand; PAM type: YTN; PAM sequence: CTT
gggaacatgtattaagtact

SEQ ID NO: 53760 - DNA, 20 bp, Artificial Sequence
  Description of Artificial Sequence: Synthetic oligonucleotide
  Target: SCNA; (-) strand; PAM type: YTN; PAM sequence: TTC
cttgggaacatgtattaagt

SEQ ID NO: 53761 - DNA, 20 bp, Artificial Sequence
  Description of Artificial Sequence: Synthetic oligonucleotide
  Target: SCNA; (-) strand; PAM type: YTN; PAM sequence: TTG
aagcagttccttgggaacat

SEQ ID NO: 53762 - DNA, 20 bp, Artificial Sequence
  Description of Artificial Sequence: Synthetic oligonucleotide
  Target: SCNA; (-) strand; PAM type: YTN; PAM sequence: TTG
tgcagtggtaattgaagcag

SEQ ID NO: 53763 - DNA, 20 bp, Artificial Sequence
  Description of Artificial Sequence: Synthetic oligonucleotide
  Target: SCNA; (-) strand; PAM type: YTN; PAM sequence: TTT
gtgcagtggtaattgaagca

SEQ ID NO: 53764 - DNA, 20 bp, Artificial Sequence
  Description of Artificial Sequence: Synthetic oligonucleotide
  Target: SCNA; (-) strand; PAM type: YTN; PAM sequence: CTT
tgtgcagtggtaattgaagc

SEQ ID NO: 53765 - DNA, 20 bp, Artificial Sequence
  Description of Artificial Sequence: Synthetic oligonucleotide
  Target: SCNA; (-) strand; PAM type: YTN; PAM sequence: TTA
aaaacaaacaaacctttgtg

SEQ ID NO: 53766 - DNA, 20 bp, Artificial Sequence
  Description of Artificial Sequence: Synthetic oligonucleotide
  Target: SCNA; (-) strand; PAM type: YTN; PAM sequence: TTA
ttaaaaacaaacaaaccttt

SEQ ID NO: 53767 - DNA, 20 bp, Artificial Sequence
  Description of Artificial Sequence: Synthetic oligonucleotide
  Target: SCNA; (-) strand; PAM type: YTN; PAM sequence: CTG
tattattaaaaacaaacaaa

SEQ ID NO: 53768 - DNA, 20 bp, Artificial Sequence
  Description of Artificial Sequence: Synthetic oligonucleotide
  Target: SCNA; (-) strand; PAM type: YTN; PAM sequence: CTA
gtaataatactgtattatta

SEQ ID NO: 53769 - DNA, 20 bp, Artificial Sequence
  Description of Artificial Sequence: Synthetic oligonucleotide
  Target: SCNA; (-) strand; PAM type: YTN; PAM sequence: TTC
tagtaataatactgtattat

SEQ ID NO: 53770 - DNA, 20 bp, Artificial Sequence
  Description of Artificial Sequence: Synthetic oligonucleotide
  Target: SCNA; (-) strand; PAM type: YTN; PAM sequence: CTT
ctagtaataatactgtatta

SEQ ID NO: 53771 - DNA, 20 bp, Artificial Sequence
  Description of Artificial Sequence: Synthetic oligonucleotide
  Target: SCNA; (-) strand; PAM type: YTN; PAM sequence: TTG
atgatacttctagtaataat

SEQ ID NO: 53772 - DNA, 20 bp, Artificial Sequence
  Description of Artificial Sequence: Synthetic oligonucleotide
  Target: SCNA; (-) strand; PAM type: YTN; PAM sequence: CTT
gatgatacttctagtaataa

SEQ ID NO: 53773 - DNA, 20 bp, Artificial Sequence
  Description of Artificial Sequence: Synthetic oligonucleotide
  Target: SCNA; (-) strand; PAM type: YTN; PAM sequence: TTC
catgacttgatgatacttct

SEQ ID NO: 53774 - DNA, 20 bp, Artificial Sequence
  Description of Artificial Sequence: Synthetic oligonucleotide
  Target: SCNA; (-) strand; PAM type: YTN; PAM sequence: TTG
accattccatgacttgatga

SEQ ID NO: 53775 - DNA, 20 bp, Artificial Sequence
  Description of Artificial Sequence: Synthetic oligonucleotide
  Target: SCNA; (-) strand; PAM type: YTN; PAM sequence: TTT
gaccattccatgacttgatg

SEQ ID NO: 53776 - DNA, 20 bp, Artificial Sequence
  Description of Artificial Sequence: Synthetic oligonucleotide
  Target: SCNA; (-) strand; PAM type: YTN; PAM sequence: TTT
tgaccattccatgacttgat

SEQ ID NO: 53777 - DNA, 20 bp, Artificial Sequence
  Description of Artificial Sequence: Synthetic oligonucleotide
  Target: SCNA; (-) strand; PAM type: YTN; PAM sequence: CTA
gcaatagaagtaagaatatt

SEQ ID NO: 53778 - DNA, 20 bp, Artificial Sequence
  Description of Artificial Sequence: Synthetic oligonucleotide
  Target: SCNA; (-) strand; PAM type: YTN; PAM sequence: CTA
acaccctagcaatagaagta

SEQ ID NO: 53779 - DNA, 20 bp, Artificial Sequence
  Description of Artificial Sequence: Synthetic oligonucleotide
  Target: SCNA; (-) strand; PAM type: YTN; PAM sequence: TTC
taacaccctagcaatagaag

SEQ ID NO: 53780 - DNA, 20 bp, Artificial Sequence
  Description of Artificial Sequence: Synthetic oligonucleotide
  Target: SCNA; (-) strand; PAM type: YTN; PAM sequence: TTT
ctaacaccctagcaatagaa

SEQ ID NO: 53781 - DNA, 20 bp, Artificial Sequence
  Description of Artificial Sequence: Synthetic oligonucleotide
  Target: SCNA; (-) strand; PAM type: YTN; PAM sequence: CTT
tctaacaccctagcaataga

SEQ ID NO: 53782 - DNA, 20 bp, Artificial Sequence
  Description of Artificial Sequence: Synthetic oligonucleotide
  Target: SCNA; (-) strand; PAM type: YTN; PAM sequence: CTA
gacatcaagtagtccagagt

SEQ ID NO: 53783 - DNA, 20 bp, Artificial Sequence
  Description of Artificial Sequence: Synthetic oligonucleotide
  Target: SCNA; (-) strand; PAM type: YTN; PAM sequence: CTG
catctagacatcaagtagtc

SEQ ID NO: 53784 - DNA, 20 bp, Artificial Sequence
  Description of Artificial Sequence: Synthetic oligonucleotide
  Target: SCNA; (-) strand; PAM type: YTN; PAM sequence: TTA
tctgcatctagacatcaagt

SEQ ID NO: 53785 - DNA, 20 bp, Artificial Sequence
  Description of Artificial Sequence: Synthetic oligonucleotide
  Target: SCNA; (-) strand; PAM type: YTN; PAM sequence: TTT
atctgcatctagacatcaag

SEQ ID NO: 53786 - DNA, 20 bp, Artificial Sequence
  Description of Artificial Sequence: Synthetic oligonucleotide
  Target: SCNA; (-) strand; PAM type: YTN; PAM sequence: TTT
tatctgcatctagacatcaa

SEQ ID NO: 53787 - DNA, 20 bp, Artificial Sequence
  Description of Artificial Sequence: Synthetic oligonucleotide
  Target: SCNA; (-) strand; PAM type: YTN; PAM sequence: TTT
ttatctgcatctagacatca

SEQ ID NO: 53788 - DNA, 20 bp, Artificial Sequence
  Description of Artificial Sequence: Synthetic oligonucleotide
  Target: SCNA; (-) strand; PAM type: YTN; PAM sequence: TTT
tttatctgcatctagacatc

SEQ ID NO: 53789 - DNA, 20 bp, Artificial Sequence
  Description of Artificial Sequence: Synthetic oligonucleotide
  Target: SCNA; (-) strand; PAM type: YTN; PAM sequence: TTT
ttttatctgcatctagacat

SEQ ID NO: 53790 - DNA, 20 bp, Artificial Sequence
  Description of Artificial Sequence: Synthetic oligonucleotide
  Target: SCNA; (-) strand; PAM type: YTN; PAM sequence: CTT
tttttatctgcatctagaca

SEQ ID NO: 53791 - DNA, 20 bp, Artificial Sequence
  Description of Artificial Sequence: Synthetic oligonucleotide
  Target: SCNA; (-) strand; PAM type: YTN; PAM sequence: CTG
ctttttttatctgcatctag

SEQ ID NO: 53792 - DNA, 20 bp, Artificial Sequence
  Description of Artificial Sequence: Synthetic oligonucleotide
  Target: SCNA; (-) strand; PAM type: YTN; PAM sequence: TTA
tgtgaagtgaacagctgctt

SEQ ID NO: 53793 - DNA, 20 bp, Artificial Sequence
  Description of Artificial Sequence: Synthetic oligonucleotide
  Target: SCNA; (-) strand; PAM type: YTN; PAM sequence: TTT
atgtgaagtgaacagctgct

SEQ ID NO: 53794 - DNA, 20 bp, Artificial Sequence
  Description of Artificial Sequence: Synthetic oligonucleotide
  Target: SCNA; (-) strand; PAM type: YTN; PAM sequence: CTT
tatgtgaagtgaacagctgc

SEQ ID NO: 53795 - DNA, 20 bp, Artificial Sequence
  Description of Artificial Sequence: Synthetic oligonucleotide
  Target: SCNA; (-) strand; PAM type: YTN; PAM sequence: CTA
ctttatgtgaagtgaacagc

SEQ ID NO: 53796 - DNA, 20 bp, Artificial Sequence
  Description of Artificial Sequence: Synthetic oligonucleotide
  Target: SCNA; (-) strand; PAM type: YTN; PAM sequence: TTA
agcagtagcggctactttat

SEQ ID NO: 53797 - DNA, 20 bp, Artificial Sequence
  Description of Artificial Sequence: Synthetic oligonucleotide
  Target: SCNA; (-) strand; PAM type: YTN; PAM sequence: TTT
aagcagtagcggctacttta

SEQ ID NO: 53798 - DNA, 20 bp, Artificial Sequence
  Description of Artificial Sequence: Synthetic oligonucleotide
  Target: SCNA; (-) strand; PAM type: YTN; PAM sequence: CTT
taagcagtagcggctacttt

SEQ ID NO: 53799 - DNA, 20 bp, Artificial Sequence
  Description of Artificial Sequence: Synthetic oligonucleotide
  Target: SCNA; (-) strand; PAM type: YTN; PAM sequence: TTA
cctttaagcagtagcggcta

SEQ ID NO: 53800 - DNA, 20 bp, Artificial Sequence
  Description of Artificial Sequence: Synthetic oligonucleotide
  Target: SCNA; (-) strand; PAM type: YTN; PAM sequence: CTT
acctttaagcagtagcggct

SEQ ID NO: 53801 - DNA, 20 bp, Artificial Sequence
  Description of Artificial Sequence: Synthetic oligonucleotide
  Target: SCNA; (-) strand; PAM type: YTN; PAM sequence: TTA
cccttacctttaagcagtag

SEQ ID NO: 53802 - DNA, 20 bp, Artificial Sequence
  Description of Artificial Sequence: Synthetic oligonucleotide
  Target: SCNA; (-) strand; PAM type: YTN; PAM sequence: TTT
acccttacctttaagcagta

SEQ ID NO: 53803 - DNA, 20 bp, Artificial Sequence
  Description of Artificial Sequence: Synthetic oligonucleotide
  Target: SCNA; (-) strand; PAM type: YTN; PAM sequence: TTC
atccacagtgaacaagattt

SEQ ID NO: 53804 - DNA, 20 bp, Artificial Sequence
  Description of Artificial Sequence: Synthetic oligonucleotide
  Target: SCNA; (-) strand; PAM type: YTN; PAM sequence: CTT
catccacagtgaacaagatt

SEQ ID NO: 53805 - DNA, 20 bp, Artificial Sequence
  Description of Artificial Sequence: Synthetic oligonucleotide
  Target: SCNA; (-) strand; PAM type: YTN; PAM sequence: TTA
gtaaccttcatccacagtga

SEQ ID NO: 53806 - DNA, 20 bp, Artificial Sequence
  Description of Artificial Sequence: Synthetic oligonucleotide
  Target: SCNA; (-) strand; PAM type: YTN; PAM sequence: TTT
agtaaccttcatccacagtg

SEQ ID NO: 53807 - DNA, 20 bp, Artificial Sequence
  Description of Artificial Sequence: Synthetic oligonucleotide
  Target: SCNA; (-) strand; PAM type: YTN; PAM sequence: CTT
tagtaaccttcatccacagt

SEQ ID NO: 53808 - DNA, 20 bp, Artificial Sequence
  Description of Artificial Sequence: Synthetic oligonucleotide
  Target: SCNA; (-) strand; PAM type: YTN; PAM sequence: CTC
tttagtaaccttcatccaca

SEQ ID NO: 53809 - DNA, 20 bp, Artificial Sequence
  Description of Artificial Sequence: Synthetic oligonucleotide
  Target: SCNA; (-) strand; PAM type: YTN; PAM sequence: TTC
tctttagtaaccttcatcca

SEQ ID NO: 53810 - DNA, 20 bp, Artificial Sequence
  Description of Artificial Sequence: Synthetic oligonucleotide
  Target: SCNA; (-) strand; PAM type: YTN; PAM sequence: CTT
ctctttagtaaccttcatcc

SEQ ID NO: 53811 - DNA, 20 bp, Artificial Sequence
  Description of Artificial Sequence: Synthetic oligonucleotide
  Target: SCNA; (-) strand; PAM type: YTN; PAM sequence: TTA
gtccttctctttagtaacct

SEQ ID NO: 53812 - DNA, 20 bp, Artificial Sequence
  Description of Artificial Sequence: Synthetic oligonucleotide
  Target: SCNA; (-) strand; PAM type: YTN; PAM sequence: TTA
tatgttagtccttctcttta

SEQ ID NO: 53813 - DNA, 20 bp, Artificial Sequence
  Description of Artificial Sequence: Synthetic oligonucleotide
  Target: SCNA; (-) strand; PAM type: YTN; PAM sequence: TTT
atatgttagtccttctcttt

SEQ ID NO: 53814 - DNA, 20 bp, Artificial Sequence
  Description of Artificial Sequence: Synthetic oligonucleotide
  Target: SCNA; (-) strand; PAM type: YTN; PAM sequence: TTT
tatatgttagtccttctctt

SEQ ID NO: 53815 - DNA, 20 bp, Artificial Sequence
  Description of Artificial Sequence: Synthetic oligonucleotide
  Target: SCNA; (-) strand; PAM type: YTN; PAM sequence: CTA
ttttatatgttagtccttct

SEQ ID NO: 53816 - DNA, 20 bp, Artificial Sequence
  Description of Artificial Sequence: Synthetic oligonucleotide
  Target: SCNA; (-) strand; PAM type: YTN; PAM sequence: TTG
aacctattttatatgttagt

SEQ ID NO: 53817 - DNA, 20 bp, Artificial Sequence
  Description of Artificial Sequence: Synthetic oligonucleotide
  Target: SCNA; (-) strand; PAM type: YTN; PAM sequence: TTT
gaacctattttatatgttag

SEQ ID NO: 53818 - DNA, 20 bp, Artificial Sequence
  Description of Artificial Sequence: Synthetic oligonucleotide
  Target: SCNA; (-) strand; PAM type: YTN; PAM sequence: CTC
cgtatatatttgaacctatt

SEQ ID NO: 53819 - DNA, 20 bp, Artificial Sequence
  Description of Artificial Sequence: Synthetic oligonucleotide
  Target: SCNA; (-) strand; PAM type: YTN; PAM sequence: CTA
tatctccgtatatatttgaa

SEQ ID NO: 53820 - DNA, 20 bp, Artificial Sequence
  Description of Artificial Sequence: Synthetic oligonucleotide
  Target: SCNA; (-) strand; PAM type: YTN; PAM sequence: TTA
agtctatatctccgtatata

SEQ ID NO: 53821 - DNA, 20 bp, Artificial Sequence
  Description of Artificial Sequence: Synthetic oligonucleotide
  Target: SCNA; (-) strand; PAM type: YTN; PAM sequence: TTT
aagtctatatctccgtatat

SEQ ID NO: 53822 - DNA, 20 bp, Artificial Sequence
  Description of Artificial Sequence: Synthetic oligonucleotide
  Target: SCNA; (-) strand; PAM type: YTN; PAM sequence: TTT
taagtctatatctccgtata

SEQ ID NO: 53823 - DNA, 20 bp, Artificial Sequence
  Description of Artificial Sequence: Synthetic oligonucleotide
  Target: SCNA; (-) strand; PAM type: YTN; PAM sequence: TTT
ttaagtctatatctccgtat

SEQ ID NO: 53824 - DNA, 20 bp, Artificial Sequence
  Description of Artificial Sequence: Synthetic oligonucleotide
  Target: SCNA; (-) strand; PAM type: YTN; PAM sequence: TTT
tttaagtctatatctccgta

SEQ ID NO: 53825 - DNA, 20 bp, Artificial Sequence
  Description of Artificial Sequence: Synthetic oligonucleotide
  Target: SCNA; (-) strand; PAM type: YTN; PAM sequence: TTA
attttttaagtctatatctc

SEQ ID NO: 53826 - DNA, 20 bp, Artificial Sequence
  Description of Artificial Sequence: Synthetic oligonucleotide
  Target: SCNA; (-) strand; PAM type: YTN; PAM sequence: CTT
aattttttaagtctatatct

SEQ ID NO: 53827 - DNA, 20 bp, Artificial Sequence
  Description of Artificial Sequence: Synthetic oligonucleotide
  Target: SCNA; (-) strand; PAM type: YTN; PAM sequence: TTG
aaggagaagtcttaattttt

SEQ ID NO: 53828 - DNA, 20 bp, Artificial Sequence
  Description of Artificial Sequence: Synthetic oligonucleotide
  Target: SCNA; (-) strand; PAM type: YTN; PAM sequence: TTA
attgaaggagaagtcttaat

SEQ ID NO: 53829 - DNA, 20 bp, Artificial Sequence
  Description of Artificial Sequence: Synthetic oligonucleotide
  Target: SCNA; (-) strand; PAM type: YTN; PAM sequence: TTG
gaatattaattgaaggagaa

SEQ ID NO: 53830 - DNA, 20 bp, Artificial Sequence
  Description of Artificial Sequence: Synthetic oligonucleotide
  Target: SCNA; (-) strand; PAM type: YTN; PAM sequence: CTT
ggaatattaattgaaggaga

SEQ ID NO: 53831 - DNA, 20 bp, Artificial Sequence
  Description of Artificial Sequence: Synthetic oligonucleotide
  Target: SCNA; (-) strand; PAM type: YTN; PAM sequence: TTC
ttggaatattaattgaagga

SEQ ID NO: 53832 - DNA, 20 bp, Artificial Sequence
  Description of Artificial Sequence: Synthetic oligonucleotide
  Target: SCNA; (-) strand; PAM type: YTN; PAM sequence: TTT
cttggaatattaattgaagg

SEQ ID NO: 53833 - DNA, 20 bp, Artificial Sequence
  Description of Artificial Sequence: Synthetic oligonucleotide
  Target: SCNA; (-) strand; PAM type: YTN; PAM sequence: TTT
tcttggaatattaattgaag

SEQ ID NO: 53834 - DNA, 20 bp, Artificial Sequence
  Description of Artificial Sequence: Synthetic oligonucleotide
  Target: SCNA; (-) strand; PAM type: YTN; PAM sequence: CTT
ttcttggaatattaattgaa

SEQ ID NO: 53835 - DNA, 20 bp, Artificial Sequence
  Description of Artificial Sequence: Synthetic oligonucleotide
  Target: SCNA; (-) strand; PAM type: YTN; PAM sequence: TTC
ttttcttggaatattaattg

SEQ ID NO: 53836 - DNA, 20 bp, Artificial Sequence
  Description of Artificial Sequence: Synthetic oligonucleotide
  Target: SCNA; (-) strand; PAM type: YTN; PAM sequence: TTT
cttttcttggaatattaatt

SEQ ID NO: 53837 - DNA, 20 bp, Artificial Sequence
  Description of Artificial Sequence: Synthetic oligonucleotide
  Target: SCNA; (-) strand; PAM type: YTN; PAM sequence: TTA
gatggcaatatggagtttct

SEQ ID NO: 53838 - DNA, 20 bp, Artificial Sequence
  Description of Artificial Sequence: Synthetic oligonucleotide
  Target: SCNA; (-) strand; PAM type: YTN; PAM sequence: TTT
agatggcaatatggagtttc

SEQ ID NO: 53839 - DNA, 20 bp, Artificial Sequence
  Description of Artificial Sequence: Synthetic oligonucleotide
  Target: SCNA; (-) strand; PAM type: YTN; PAM sequence: CTG
tgtttagatggcaatatgga

SEQ ID NO: 53840 - DNA, 20 bp, Artificial Sequence
  Description of Artificial Sequence: Synthetic oligonucleotide
  Target: SCNA; (-) strand; PAM type: YTN; PAM sequence: TTC
tgtgtttagatggcaatatg

SEQ ID NO: 53841 - DNA, 20 bp, Artificial Sequence
  Description of Artificial Sequence: Synthetic oligonucleotide
  Target: SCNA; (-) strand; PAM type: YTN; PAM sequence: CTT
ctgtgtttagatggcaatat

SEQ ID NO: 53842 - DNA, 20 bp, Artificial Sequence
  Description of Artificial Sequence: Synthetic oligonucleotide
  Target: SCNA; (-) strand; PAM type: YTN; PAM sequence: TTA
cagaaaagcttctgtgttta

SEQ ID NO: 53843 - DNA, 20 bp, Artificial Sequence
  Description of Artificial Sequence: Synthetic oligonucleotide
  Target: SCNA; (-) strand; PAM type: YTN; PAM sequence: CTG
gaataccattacagaaaagc

SEQ ID NO: 53844 - DNA, 20 bp, Artificial Sequence
  Description of Artificial Sequence: Synthetic oligonucleotide
  Target: SCNA; (-) strand; PAM type: YTN; PAM sequence: TTC
actggaataccattacagaa

SEQ ID NO: 53845 - DNA, 20 bp, Artificial Sequence
  Description of Artificial Sequence: Synthetic oligonucleotide
  Target: SCNA; (-) strand; PAM type: YTN; PAM sequence: TTT
cactggaataccattacaga

SEQ ID NO: 53846 - DNA, 20 bp, Artificial Sequence
  Description of Artificial Sequence: Synthetic oligonucleotide
  Target: SCNA; (-) strand; PAM type: YTN; PAM sequence: CTT
tcactggaataccattacag

SEQ ID NO: 53847 - DNA, 20 bp, Artificial Sequence
  Description of Artificial Sequence: Synthetic oligonucleotide
  Target: SCNA; (-) strand; PAM type: YTN; PAM sequence: TTA
aatgactttcactggaatac

SEQ ID NO: 53848 - DNA, 20 bp, Artificial Sequence
  Description of Artificial Sequence: Synthetic oligonucleotide
  Target: SCNA; (-) strand; PAM type: YTN; PAM sequence: TTT
aaatgactttcactggaata

SEQ ID NO: 53849 - DNA, 20 bp, Artificial Sequence
  Description of Artificial Sequence: Synthetic oligonucleotide
  Target: SCNA; (-) strand; PAM type: YTN; PAM sequence: TTC
gaatttaaatgactttcact

SEQ ID NO: 53850 - DNA, 20 bp, Artificial Sequence
  Description of Artificial Sequence: Synthetic oligonucleotide
  Target: SCNA; (-) strand; PAM type: YTN; PAM sequence: CTA
ttcgaatttaaatgactttc

SEQ ID NO: 53851 - DNA, 20 bp, Artificial Sequence
  Description of Artificial Sequence: Synthetic oligonucleotide
  Target: SCNA; (-) strand; PAM type: YTN; PAM sequence: TTC
tattcgaatttaaatgactt

SEQ ID NO: 53852 - DNA, 20 bp, Artificial Sequence
  Description of Artificial Sequence: Synthetic oligonucleotide
  Target: SCNA; (-) strand; PAM type: YTN; PAM sequence: TTT
ctattcgaatttaaatgact

SEQ ID NO: 53853 - DNA, 20 bp, Artificial Sequence
  Description of Artificial Sequence: Synthetic oligonucleotide
  Target: SCNA; (-) strand; PAM type: YTN; PAM sequence: TTT
tctattcgaatttaaatgac

SEQ ID NO: 53854 - DNA, 20 bp, Artificial Sequence
  Description of Artificial Sequence: Synthetic oligonucleotide
  Target: SCNA; (-) strand; PAM type: YTN; PAM sequence: TTT
ttctattcgaatttaaatga

SEQ ID NO: 53855 - DNA, 20 bp, Artificial Sequence
  Description of Artificial Sequence: Synthetic oligonucleotide
  Target: SCNA; (-) strand; PAM type: YTN; PAM sequence: TTA
aatttttctattcgaattta

SEQ ID NO: 53856 - DNA, 20 bp, Artificial Sequence
  Description of Artificial Sequence: Synthetic oligonucleotide
  Target: SCNA; (-) strand; PAM type: YTN; PAM sequence: CTC
aagttaaatttttctattcg

SEQ ID NO: 53857 - DNA, 20 bp, Artificial Sequence
  Description of Artificial Sequence: Synthetic oligonucleotide
  Target: SCNA; (-) strand; PAM type: YTN; PAM sequence: TTC
ataagggcagatctcaagtt

SEQ ID NO: 53858 - DNA, 20 bp, Artificial Sequence
  Description of Artificial Sequence: Synthetic oligonucleotide
  Target: SCNA; (-) strand; PAM type: YTN; PAM sequence: TTT
cataagggcagatctcaagt

SEQ ID NO: 53859 - DNA, 20 bp, Artificial Sequence
  Description of Artificial Sequence: Synthetic oligonucleotide
  Target: SCNA; (-) strand; PAM type: YTN; PAM sequence: TTT
tcataagggcagatctcaag

SEQ ID NO: 53860 - DNA, 20 bp, Artificial Sequence
  Description of Artificial Sequence: Synthetic oligonucleotide
  Target: SCNA; (-) strand; PAM type: YTN; PAM sequence: CTT
ttcataagggcagatctcaa

SEQ ID NO: 53861 - DNA, 20 bp, Artificial Sequence
  Description of Artificial Sequence: Synthetic oligonucleotide
  Target: SCNA; (-) strand; PAM type: YTN; PAM sequence: CTC
accacttttcataagggcag

SEQ ID NO: 53862 - DNA, 20 bp, Artificial Sequence
  Description of Artificial Sequence: Synthetic oligonucleotide
  Target: SCNA; (-) strand; PAM type: YTN; PAM sequence: TTC
tcaccacttttcataagggc

SEQ ID NO: 53863 - DNA, 20 bp, Artificial Sequence
  Description of Artificial Sequence: Synthetic oligonucleotide
  Target: SCNA; (-) strand; PAM type: YTN; PAM sequence: TTG
aattctcaccacttttcata

SEQ ID NO: 53864 - DNA, 20 bp, Artificial Sequence
  Description of Artificial Sequence: Synthetic oligonucleotide
  Target: SCNA; (-) strand; PAM type: YTN; PAM sequence: TTT
gaattctcaccacttttcat

SEQ ID NO: 53865 - DNA, 20 bp, Artificial Sequence
  Description of Artificial Sequence: Synthetic oligonucleotide
  Target: SCNA; (-) strand; PAM type: YTN; PAM sequence: CTA
tttgaattctcaccactttt

SEQ ID NO: 53866 - DNA, 20 bp, Artificial Sequence
  Description of Artificial Sequence: Synthetic oligonucleotide
  Target: SCNA; (-) strand; PAM type: YTN; PAM sequence: TTC
gagaactatttgaattctca

SEQ ID NO: 53867 - DNA, 20 bp, Artificial Sequence
  Description of Artificial Sequence: Synthetic oligonucleotide
  Target: SCNA; (-) strand; PAM type: YTN; PAM sequence: TTC
aggaagtgatatgacaaata

SEQ ID NO: 53868 - DNA, 20 bp, Artificial Sequence
  Description of Artificial Sequence: Synthetic oligonucleotide
  Target: SCNA; (-) strand; PAM type: YTN; PAM sequence: TTT
caggaagtgatatgacaaat

SEQ ID NO: 53869 - DNA, 20 bp, Artificial Sequence
  Description of Artificial Sequence: Synthetic oligonucleotide
  Target: SCNA; (-) strand; PAM type: YTN; PAM sequence: CTT
tcaggaagtgatatgacaaa

SEQ ID NO: 53870 - DNA, 20 bp, Artificial Sequence
  Description of Artificial Sequence: Synthetic oligonucleotide
  Target: SCNA; (-) strand; PAM type: YTN; PAM sequence: TTG
agtatcctttcaggaagtga

SEQ ID NO: 53871 - DNA, 20 bp, Artificial Sequence
  Description of Artificial Sequence: Synthetic oligonucleotide
  Target: SCNA; (-) strand; PAM type: YTN; PAM sequence: TTA
agagattgagtatcctttca

SEQ ID NO: 53872 - DNA, 20 bp, Artificial Sequence
  Description of Artificial Sequence: Synthetic oligonucleotide
  Target: SCNA; (-) strand; PAM type: YTN; PAM sequence: TTC
cataaagtacaaaataatag

SEQ ID NO: 53873 - DNA, 20 bp, Artificial Sequence
  Description of Artificial Sequence: Synthetic oligonucleotide
  Target: SCNA; (-) strand; PAM type: YTN; PAM sequence: TTT
ccataaagtacaaaataata

SEQ ID NO: 53874 - DNA, 20 bp, Artificial Sequence
  Description of Artificial Sequence: Synthetic oligonucleotide
  Target: SCNA; (-) strand; PAM type: YTN; PAM sequence: TTT
tccataaagtacaaaataat

SEQ ID NO: 53875 - DNA, 20 bp, Artificial Sequence
  Description of Artificial Sequence: Synthetic oligonucleotide
  Target: SCNA; (-) strand; PAM type: YTN; PAM sequence: TTT
ttccataaagtacaaaataa

SEQ ID NO: 53876 - DNA, 20 bp, Artificial Sequence
  Description of Artificial Sequence: Synthetic oligonucleotide
  Target: SCNA; (-) strand; PAM type: YTN; PAM sequence: CTA
aatatttttccataaagtac

SEQ ID NO: 53877 - DNA, 20 bp, Artificial Sequence
  Description of Artificial Sequence: Synthetic oligonucleotide
  Target: SCNA; (-) strand; PAM type: YTN; PAM sequence: TTC
ctaaatatttttccataaag

SEQ ID NO: 53878 - DNA, 20 bp, Artificial Sequence
  Description of Artificial Sequence: Synthetic oligonucleotide
  Target: SCNA; (-) strand; PAM type: YTN; PAM sequence: CTT
cctaaatatttttccataaa

SEQ ID NO: 53879 - DNA, 20 bp, Artificial Sequence
  Description of Artificial Sequence: Synthetic oligonucleotide
  Target: SCNA; (-) strand; PAM type: YTN; PAM sequence: CTA
taatcttcctaaatattttt

SEQ ID NO: 53880 - DNA, 20 bp, Artificial Sequence
  Description of Artificial Sequence: Synthetic oligonucleotide
  Target: SCNA; (-) strand; PAM type: YTN; PAM sequence: TTC
tataatcttcctaaatattt

SEQ ID NO: 53881 - DNA, 20 bp, Artificial Sequence
  Description of Artificial Sequence: Synthetic oligonucleotide
  Target: SCNA; (-) strand; PAM type: YTN; PAM sequence: TTT
ctataatcttcctaaatatt

SEQ ID NO: 53882 - DNA, 20 bp, Artificial Sequence
  Description of Artificial Sequence: Synthetic oligonucleotide
  Target: SCNA; (-) strand; PAM type: YTN; PAM sequence: CTT
tctataatcttcctaaatat

SEQ ID NO: 53883 - DNA, 20 bp, Artificial Sequence
  Description of Artificial Sequence: Synthetic oligonucleotide
  Target: SCNA; (-) strand; PAM type: YTN; PAM sequence: TTC
tttctataatcttcctaaat

SEQ ID NO: 53884 - DNA, 20 bp, Artificial Sequence
  Description of Artificial Sequence: Synthetic oligonucleotide
  Target: SCNA; (-) strand; PAM type: YTN; PAM sequence: TTT
ctttctataatcttcctaaa

SEQ ID NO: 53885 - DNA, 20 bp, Artificial Sequence
  Description of Artificial Sequence: Synthetic oligonucleotide
  Target: SCNA; (-) strand; PAM type: YTN; PAM sequence: TTT
tctttctataatcttcctaa

SEQ ID NO: 53886 - DNA, 20 bp, Artificial Sequence
  Description of Artificial Sequence: Synthetic oligonucleotide
  Target: SCNA; (-) strand; PAM type: YTN; PAM sequence: CTA
aaaattttctttctataatc

SEQ ID NO: 53887 - DNA, 20 bp, Artificial Sequence
  Description of Artificial Sequence: Synthetic oligonucleotide
  Target: SCNA; (-) strand; PAM type: YTN; PAM sequence: TTC
ctaaaaattttctttctata

SEQ ID NO: 53888 - DNA, 20 bp, Artificial Sequence
  Description of Artificial Sequence: Synthetic oligonucleotide
  Target: SCNA; (-) strand; PAM type: YTN; PAM sequence: CTT
cctaaaaattttctttctat

SEQ ID NO: 53889 - DNA, 20 bp, Artificial Sequence
  Description of Artificial Sequence: Synthetic oligonucleotide
  Target: SCNA; (-) strand; PAM type: YTN; PAM sequence: CTA
cttcctaaaaattttctttc

SEQ ID NO: 53890 - DNA, 20 bp, Artificial Sequence
  Description of Artificial Sequence: Synthetic oligonucleotide
  Target: SCNA; (-) strand; PAM type: YTN; PAM sequence: CTA
gagacgctacttcctaaaaa

SEQ ID NO: 53891 - DNA, 20 bp, Artificial Sequence
  Description of Artificial Sequence: Synthetic oligonucleotide
  Target: SCNA; (-) strand; PAM type: YTN; PAM sequence: TTA
ggaaaactagagacgctact

SEQ ID NO: 53892 - DNA, 20 bp, Artificial Sequence
  Description of Artificial Sequence: Synthetic oligonucleotide
  Target: SCNA; (-) strand; PAM type: YTN; PAM sequence: TTT
aggaaaactagagacgctac

SEQ ID NO: 53893 - DNA, 20 bp, Artificial Sequence
  Description of Artificial Sequence: Synthetic oligonucleotide
  Target: SCNA; (-) strand; PAM type: YTN; PAM sequence: TTT
taggaaaactagagacgcta

SEQ ID NO: 53894 - DNA, 20 bp, Artificial Sequence
  Description of Artificial Sequence: Synthetic oligonucleotide
  Target: SCNA; (-) strand; PAM type: YTN; PAM sequence: TTG
acataaattttaggaaaact

SEQ ID NO: 53895 - DNA, 20 bp, Artificial Sequence
  Description of Artificial Sequence: Synthetic oligonucleotide
  Target: SCNA; (-) strand; PAM type: YTN; PAM sequence: TTT
gacataaattttaggaaaac

SEQ ID NO: 53896 - DNA, 20 bp, Artificial Sequence
  Description of Artificial Sequence: Synthetic oligonucleotide
  Target: SCNA; (-) strand; PAM type: YTN; PAM sequence: TTA
tatgtaaaataaataatgcc

SEQ ID NO: 53897 - DNA, 20 bp, Artificial Sequence
  Description of Artificial Sequence: Synthetic oligonucleotide
  Target: SCNA; (-) strand; PAM type: YTN; PAM sequence: TTT
atatgtaaaataaataatgc

SEQ ID NO: 53898 - DNA, 20 bp, Artificial Sequence
  Description of Artificial Sequence: Synthetic oligonucleotide
  Target: SCNA; (-) strand; PAM type: YTN; PAM sequence: TTT
tatatgtaaaataaataatg

SEQ ID NO: 53899 - DNA, 20 bp, Artificial Sequence
  Description of Artificial Sequence: Synthetic oligonucleotide
  Target: SCNA; (-) strand; PAM type: YTN; PAM sequence: TTT
ttatatgtaaaataaataat

SEQ ID NO: 53900 - DNA, 20 bp, Artificial Sequence
  Description of Artificial Sequence: Synthetic oligonucleotide
  Target: SCNA; (-) strand; PAM type: YTN; PAM sequence: CTT
tttatatgtaaaataaataa

SEQ ID NO: 53901 - DNA, 20 bp, Artificial Sequence
  Description of Artificial Sequence: Synthetic oligonucleotide
  Target: SCNA; (-) strand; PAM type: YTN; PAM sequence: TTA
tgatctttttatatgtaaaa

SEQ ID NO: 53902 - DNA, 20 bp, Artificial Sequence
  Description of Artificial Sequence: Synthetic oligonucleotide
  Target: SCNA; (-) strand; PAM type: YTN; PAM sequence: TTA
acaaagagtaaaagttatga

SEQ ID NO: 53903 - DNA, 20 bp, Artificial Sequence
  Description of Artificial Sequence: Synthetic oligonucleotide
  Target: SCNA; (-) strand; PAM type: YTN; PAM sequence: TTT
aacaaagagtaaaagttatg

SEQ ID NO: 53904 - DNA, 20 bp, Artificial Sequence
  Description of Artificial Sequence: Synthetic oligonucleotide
  Target: SCNA; (-) strand; PAM type: YTN; PAM sequence: TTT
taacaaagagtaaaagttat

SEQ ID NO: 53905 - DNA, 20 bp, Artificial Sequence
  Description of Artificial Sequence: Synthetic oligonucleotide
  Target: SCNA; (-) strand; PAM type: YTN; PAM sequence: TTA
atatagttttaacaaagagt

SEQ ID NO: 53906 - DNA, 20 bp, Artificial Sequence
  Description of Artificial Sequence: Synthetic oligonucleotide
  Target: SCNA; (-) strand; PAM type: YTN; PAM sequence: TTT
aatatagttttaacaaagag

SEQ ID NO: 53907 - DNA, 20 bp, Artificial Sequence
  Description of Artificial Sequence: Synthetic oligonucleotide
  Target: SCNA; (-) strand; PAM type: YTN; PAM sequence: TTT
taatatagttttaacaaaga

SEQ ID NO: 53908 - DNA, 20 bp, Artificial Sequence
  Description of Artificial Sequence: Synthetic oligonucleotide
  Target: SCNA; (-) strand; PAM type: YTN; PAM sequence: TTG
ttttaatatagttttaacaa

SEQ ID NO: 53909 - DNA, 20 bp, Artificial Sequence
  Description of Artificial Sequence: Synthetic oligonucleotide
  Target: SCNA; (-) strand; PAM type: YTN; PAM sequence: TTT
gttttaatatagttttaaca

SEQ ID NO: 53910 - DNA, 20 bp, Artificial Sequence
  Description of Artificial Sequence: Synthetic oligonucleotide
  Target: SCNA; (-) strand; PAM type: YTN; PAM sequence: TTT
tgttttaatatagttttaac

SEQ ID NO: 53911 - DNA, 20 bp, Artificial Sequence
  Description of Artificial Sequence: Synthetic oligonucleotide
  Target: SCNA; (-) strand; PAM type: YTN; PAM sequence: CTT
ttgttttaatatagttttaa

SEQ ID NO: 53912 - DNA, 20 bp, Artificial Sequence
  Description of Artificial Sequence: Synthetic oligonucleotide
  Target: SCNA; (-) strand; PAM type: YTN; PAM sequence: CTC
ttttgttttaatatagtttt

SEQ ID NO: 53913 - DNA, 20 bp, Artificial Sequence
  Description of Artificial Sequence: Synthetic oligonucleotide
  Target: SCNA; (-) strand; PAM type: YTN; PAM sequence: TTC
tcttttgttttaatatagtt

SEQ ID NO: 53914 - DNA, 20 bp, Artificial Sequence
  Description of Artificial Sequence: Synthetic oligonucleotide
  Target: SCNA; (-) strand; PAM type: YTN; PAM sequence: CTT
ctcttttgttttaatatagt

SEQ ID NO: 53915 - DNA, 20 bp, Artificial Sequence
  Description of Artificial Sequence: Synthetic oligonucleotide
  Target: SCNA; (-) strand; PAM type: YTN; PAM sequence: TTG
cttctcttttgttttaatat

SEQ ID NO: 53916 - DNA, 20 bp, Artificial Sequence
  Description of Artificial Sequence: Synthetic oligonucleotide
  Target: SCNA; (-) strand; PAM type: YTN; PAM sequence: TTA
gtgggttgcttctcttttgt

SEQ ID NO: 53917 - DNA, 20 bp, Artificial Sequence
  Description of Artificial Sequence: Synthetic oligonucleotide
  Target: SCNA; (-) strand; PAM type: YTN; PAM sequence: TTT
agtgggttgcttctcttttg

SEQ ID NO: 53918 - DNA, 20 bp, Artificial Sequence
  Description of Artificial Sequence: Synthetic oligonucleotide
  Target: SCNA; (-) strand; PAM type: YTN; PAM sequence: TTA
tttagtgggttgcttctctt

SEQ ID NO: 53919 - DNA, 20 bp, Artificial Sequence
  Description of Artificial Sequence: Synthetic oligonucleotide
  Target: SCNA; (-) strand; PAM type: YTN; PAM sequence: TTA
ttatttagtgggttgcttct

SEQ ID NO: 53920 - DNA, 20 bp, Artificial Sequence
  Description of Artificial Sequence: Synthetic oligonucleotide
  Target: SCNA; (-) strand; PAM type: YTN; PAM sequence: TTA
atcaattattatttagtggg

SEQ ID NO: 53921 - DNA, 20 bp, Artificial Sequence
  Description of Artificial Sequence: Synthetic oligonucleotide
  Target: SCNA; (-) strand; PAM type: YTN; PAM sequence: CTC
caaatgaaattaatcaatta

SEQ ID NO: 53922 - DNA, 20 bp, Artificial Sequence
  Description of Artificial Sequence: Synthetic oligonucleotide
  Target: SCNA; (-) strand; PAM type: YTN; PAM sequence: CTA
aacatagaagacctccaaat

SEQ ID NO: 53923 - DNA, 20 bp, Artificial Sequence
  Description of Artificial Sequence: Synthetic oligonucleotide
  Target: SCNA; (-) strand; PAM type: YTN; PAM sequence: TTA
aaaagtccataaacatacta

SEQ ID NO: 53924 - DNA, 20 bp, Artificial Sequence
  Description of Artificial Sequence: Synthetic oligonucleotide
  Target: SCNA; (-) strand; PAM type: YTN; PAM sequence: TTT
aaaaagtccataaacatact

SEQ ID NO: 53925 - DNA, 20 bp, Artificial Sequence
  Description of Artificial Sequence: Synthetic oligonucleotide
  Target: SCNA; (-) strand; PAM type: YTN; PAM sequence: CTC
agtgtttaaaaagtccataa

SEQ ID NO: 53926 - DNA, 20 bp, Artificial Sequence
  Description of Artificial Sequence: Synthetic oligonucleotide
  Target: SCNA; (-) strand; PAM type: YTN; PAM sequence: TTA
gtgaatcctcagtgtttaaa

SEQ ID NO: 53927 - DNA, 20 bp, Artificial Sequence
  Description of Artificial Sequence: Synthetic oligonucleotide
  Target: SCNA; (-) strand; PAM type: YTN; PAM sequence: CTC
aaaaaaaaaaaaaaaaaaaa

SEQ ID NO: 53928 - DNA, 20 bp, Artificial Sequence
  Description of Artificial Sequence: Synthetic oligonucleotide
  Target: SCNA; (-) strand; PAM type: YTN; PAM sequence: CTG
tctcaaaaaaaaaaaaaaaa

SEQ ID NO: 53929 - DNA, 20 bp, Artificial Sequence
  Description of Artificial Sequence: Synthetic oligonucleotide
  Target: SCNA; (-) strand; PAM type: YTN; PAM sequence: CTG
ggcaaaaaagtaagatcctg

SEQ ID NO: 53930 - DNA, 20 bp, Artificial Sequence
  Description of Artificial Sequence: Synthetic oligonucleotide
  Target: SCNA; (-) strand; PAM type: YTN; PAM sequence: CTC
cagcctgggcaaaaaagtaa

SEQ ID NO: 53931 - DNA, 20 bp, Artificial Sequence
  Description of Artificial Sequence: Synthetic oligonucleotide
  Target: SCNA; (-) strand; PAM type: YTN; PAM sequence: CTG
cactccagcctgggcaaaaa

SEQ ID NO: 53932 - DNA, 20 bp, Artificial Sequence
  Description of Artificial Sequence: Synthetic oligonucleotide
  Target: SCNA; (-) strand; PAM type: YTN; PAM sequence: TTG
tatcactgcactccagcctg

SEQ ID NO: 53933 - DNA, 20 bp, Artificial Sequence
  Description of Artificial Sequence: Synthetic oligonucleotide
  Target: SCNA; (-) strand; PAM type: YTN; PAM sequence: CTG
tgattgtatcactgcactcc

SEQ ID NO: 53934 - DNA, 20 bp, Artificial Sequence
  Description of Artificial Sequence: Synthetic oligonucleotide
  Target: SCNA; (-) strand; PAM type: YTN; PAM sequence: TTG
cagtgagctgtgattgtatc

SEQ ID NO: 53935 - DNA, 20 bp, Artificial Sequence
  Description of Artificial Sequence: Synthetic oligonucleotide
  Target: SCNA; (-) strand; PAM type: YTN; PAM sequence: TTG
aggttgcagtgagctgtgat

SEQ ID NO: 53936 - DNA, 20 bp, Artificial Sequence
  Description of Artificial Sequence: Synthetic oligonucleotide
  Target: SCNA; (-) strand; PAM type: YTN; PAM sequence: CTG
gatggttgaggttgcagtga

SEQ ID NO: 53937 - DNA, 20 bp, Artificial Sequence
  Description of Artificial Sequence: Synthetic oligonucleotide
  Target: SCNA; (-) strand; PAM type: YTN; PAM sequence: TTG
agcctggatggttgaggttg

SEQ ID NO: 53938 - DNA, 20 bp, Artificial Sequence
  Description of Artificial Sequence: Synthetic oligonucleotide
  Target: SCNA; (-) strand; PAM type: YTN; PAM sequence: CTT
gagcctggatggttgaggtt

SEQ ID NO: 53939 - DNA, 20 bp, Artificial Sequence
  Description of Artificial Sequence: Synthetic oligonucleotide
  Target: SCNA; (-) strand; PAM type: YTN; PAM sequence: CTG
aggtgagaggatcacttgag

SEQ ID NO: 53940 - DNA, 20 bp, Artificial Sequence
  Description of Artificial Sequence: Synthetic oligonucleotide
  Target: SCNA; (-) strand; PAM type: YTN; PAM sequence: CTG
gtagctgaggtgagaggatc

SEQ ID NO: 53941 - DNA, 20 bp, Artificial Sequence
  Description of Artificial Sequence: Synthetic oligonucleotide
  Target: SCNA; (-) strand; PAM type: YTN; PAM sequence: CTA
gtctggtagctgaggtgaga

SEQ ID NO: 53942 - DNA, 20 bp, Artificial Sequence
  Description of Artificial Sequence: Synthetic oligonucleotide
  Target: SCNA; (-) strand; PAM type: YTN; PAM sequence: CTC
agctagtctggtagctgagg

SEQ ID NO: 53943 - DNA, 20 bp, Artificial Sequence
  Description of Artificial Sequence: Synthetic oligonucleotide
  Target: SCNA; (-) strand; PAM type: YTN; PAM sequence: CTG
gcatggtggcacacccccgt

SEQ ID NO: 53944 - DNA, 20 bp, Artificial Sequence
  Description of Artificial Sequence: Synthetic oligonucleotide
  Target: SCNA; (-) strand; PAM type: YTN; PAM sequence: TTA
gcctggcatggtggcacacc

SEQ ID NO: 53945 - DNA, 20 bp, Artificial Sequence
  Description of Artificial Sequence: Synthetic oligonucleotide
  Target: SCNA; (-) strand; PAM type: YTN; PAM sequence: TTA
gaccaaaaaaaaaatatata

SEQ ID NO: 53946 - DNA, 20 bp, Artificial Sequence
  Description of Artificial Sequence: Synthetic oligonucleotide
  Target: SCNA; (-) strand; PAM type: YTN; PAM sequence: CTG
ggcaacacagttagaccaaa

SEQ ID NO: 53947 - DNA, 20 bp, Artificial Sequence
  Description of Artificial Sequence: Synthetic oligonucleotide
  Target: SCNA; (-) strand; PAM type: YTN; PAM sequence: TTC
atgaccagcctgggcaacac

SEQ ID NO: 53948 - DNA, 20 bp, Artificial Sequence
  Description of Artificial Sequence: Synthetic oligonucleotide
  Target: SCNA; (-) strand; PAM type: YTN; PAM sequence: CTA
ggagttcatgaccagcctgg

SEQ ID NO: 53949 - DNA, 20 bp, Artificial Sequence
  Description of Artificial Sequence: Synthetic oligonucleotide
  Target: SCNA; (-) strand; PAM type: YTN; PAM sequence: TTG
agcctaggagttcatgacca

SEQ ID NO: 53950 - DNA, 20 bp, Artificial Sequence
  Description of Artificial Sequence: Synthetic oligonucleotide
  Target: SCNA; (-) strand; PAM type: YTN; PAM sequence: CTT
gagcctaggagttcatgacc

SEQ ID NO: 53951 - DNA, 20 bp, Artificial Sequence
  Description of Artificial Sequence: Synthetic oligonucleotide
  Target: SCNA; (-) strand; PAM type: YTN; PAM sequence: CTA
aggtggacagatcacttgag

SEQ ID NO: 53952 - DNA, 20 bp, Artificial Sequence
  Description of Artificial Sequence: Synthetic oligonucleotide
  Target: SCNA; (-) strand; PAM type: YTN; PAM sequence: TTG
ggaggctaaggtggacagat

SEQ ID NO: 53953 - DNA, 20 bp, Artificial Sequence
  Description of Artificial Sequence: Synthetic oligonucleotide
  Target: SCNA; (-) strand; PAM type: YTN; PAM sequence: TTT
gggaggctaaggtggacaga

SEQ ID NO: 53954 - DNA, 20 bp, Artificial Sequence
  Description of Artificial Sequence: Synthetic oligonucleotide
  Target: SCNA; (-) strand; PAM type: YTN; PAM sequence: CTT
tgggaggctaaggtggacag

SEQ ID NO: 53955 - DNA, 20 bp, Artificial Sequence
  Description of Artificial Sequence: Synthetic oligonucleotide
  Target: SCNA; (-) strand; PAM type: YTN; PAM sequence: CTG
taatcccacactttgggagg

SEQ ID NO: 53956 - DNA, 20 bp, Artificial Sequence
  Description of Artificial Sequence: Synthetic oligonucleotide
  Target: SCNA; (-) strand; PAM type: YTN; PAM sequence: CTC
atgcctgtaatcccacactt

SEQ ID NO: 53957 - DNA, 20 bp, Artificial Sequence
  Description of Artificial Sequence: Synthetic oligonucleotide
  Target: SCNA; (-) strand; PAM type: YTN; PAM sequence: CTG
gcatggtggctcatgcctgt

SEQ ID NO: 53958 - DNA, 20 bp, Artificial Sequence
  Description of Artificial Sequence: Synthetic oligonucleotide
  Target: SCNA; (-) strand; PAM type: YTN; PAM sequence: CTC
gcctggcatggtggctcatg

SEQ ID NO: 53959 - DNA, 20 bp, Artificial Sequence
  Description of Artificial Sequence: Synthetic oligonucleotide
  Target: SCNA; (-) strand; PAM type: YTN; PAM sequence: TTC
tcgcctggcatggtggctca

SEQ ID NO: 53960 - DNA, 20 bp, Artificial Sequence
  Description of Artificial Sequence: Synthetic oligonucleotide
  Target: SCNA; (-) strand; PAM type: YTN; PAM sequence: TTA
aaagcaaattctcgcctggc

SEQ ID NO: 53961 - DNA, 20 bp, Artificial Sequence
  Description of Artificial Sequence: Synthetic oligonucleotide
  Target: SCNA; (-) strand; PAM type: YTN; PAM sequence: TTT
aaaagcaaattctcgcctgg

SEQ ID NO: 53962 - DNA, 20 bp, Artificial Sequence
  Description of Artificial Sequence: Synthetic oligonucleotide
  Target: SCNA; (-) strand; PAM type: YTN; PAM sequence: CTC
atttaaaagcaaattctcgc

SEQ ID NO: 53963 - DNA, 20 bp, Artificial Sequence
  Description of Artificial Sequence: Synthetic oligonucleotide
  Target: SCNA; (-) strand; PAM type: YTN; PAM sequence: TTC
tcatttaaaagcaaattctc

SEQ ID NO: 53964 - DNA, 20 bp, Artificial Sequence
  Description of Artificial Sequence: Synthetic oligonucleotide
  Target: SCNA; (-) strand; PAM type: YTN; PAM sequence: TTT
ctcatttaaaagcaaattct

SEQ ID NO: 53965 - DNA, 20 bp, Artificial Sequence
  Description of Artificial Sequence: Synthetic oligonucleotide
  Target: SCNA; (-) strand; PAM type: YTN; PAM sequence: CTT
tctcatttaaaagcaaattc

SEQ ID NO: 53966 - DNA, 20 bp, Artificial Sequence
  Description of Artificial Sequence: Synthetic oligonucleotide
  Target: SCNA; (-) strand; PAM type: YTN; PAM sequence: TTG
tgtctttctcatttaaaagc

SEQ ID NO: 53967 - DNA, 20 bp, Artificial Sequence
  Description of Artificial Sequence: Synthetic oligonucleotide
  Target: SCNA; (-) strand; PAM type: YTN; PAM sequence: TTC
cgaaggcaggtattgtgtct

SEQ ID NO: 53968 - DNA, 20 bp, Artificial Sequence
  Description of Artificial Sequence: Synthetic oligonucleotide
  Target: SCNA; (-) strand; PAM type: YTN; PAM sequence: TTT
ccgaaggcaggtattgtgtc

SEQ ID NO: 53969 - DNA, 20 bp, Artificial Sequence
  Description of Artificial Sequence: Synthetic oligonucleotide
  Target: SCNA; (-) strand; PAM type: YTN; PAM sequence: CTT
tccgaaggcaggtattgtgt

SEQ ID NO: 53970 - DNA, 20 bp, Artificial Sequence
  Description of Artificial Sequence: Synthetic oligonucleotide
  Target: SCNA; (-) strand; PAM type: YTN; PAM sequence: TTG
acagggaactttccgaaggc

SEQ ID NO: 53971 - DNA, 20 bp, Artificial Sequence
  Description of Artificial Sequence: Synthetic oligonucleotide
  Target: SCNA; (-) strand; PAM type: YTN; PAM sequence: TTT
gacagggaactttccgaagg

SEQ ID NO: 53972 - DNA, 20 bp, Artificial Sequence
  Description of Artificial Sequence: Synthetic oligonucleotide
  Target: SCNA; (-) strand; PAM type: YTN; PAM sequence: CTA
aaatttgacagggaactttc

SEQ ID NO: 53973 - DNA, 20 bp, Artificial Sequence
  Description of Artificial Sequence: Synthetic oligonucleotide
  Target: SCNA; (-) strand; PAM type: YTN; PAM sequence: TTC
taaaatttgacagggaactt

SEQ ID NO: 53974 - DNA, 20 bp, Artificial Sequence
  Description of Artificial Sequence: Synthetic oligonucleotide
  Target: SCNA; (-) strand; PAM type: YTN; PAM sequence: TTT
ctaaaatttgacagggaact

SEQ ID NO: 53975 - DNA, 20 bp, Artificial Sequence
  Description of Artificial Sequence: Synthetic oligonucleotide
  Target: SCNA; (-) strand; PAM type: YTN; PAM sequence: TTA
tttctaaaatttgacaggga

SEQ ID NO: 53976 - DNA, 20 bp, Artificial Sequence
  Description of Artificial Sequence: Synthetic oligonucleotide
  Target: SCNA; (-) strand; PAM type: YTN; PAM sequence: TTT
atttctaaaatttgacaggg

SEQ ID NO: 53977 - DNA, 20 bp, Artificial Sequence
  Description of Artificial Sequence: Synthetic oligonucleotide
  Target: SCNA; (-) strand; PAM type: YTN; PAM sequence: TTA
tttatttctaaaatttgaca

SEQ ID NO: 53978 - DNA, 20 bp, Artificial Sequence
  Description of Artificial Sequence: Synthetic oligonucleotide
  Target: SCNA; (-) strand; PAM type: YTN; PAM sequence: TTA
attatttatttctaaaattt

SEQ ID NO: 53979 - DNA, 20 bp, Artificial Sequence
  Description of Artificial Sequence: Synthetic oligonucleotide
  Target: SCNA; (-) strand; PAM type: YTN; PAM sequence: TTT
aattatttatttctaaaatt

SEQ ID NO: 53980 - DNA, 20 bp, Artificial Sequence
  Description of Artificial Sequence: Synthetic oligonucleotide
  Target: SCNA; (-) strand; PAM type: YTN; PAM sequence: TTG
tttaattatttatttctaaa

SEQ ID NO: 53981 - DNA, 20 bp, Artificial Sequence
  Description of Artificial Sequence: Synthetic oligonucleotide
  Target: SCNA; (-) strand; PAM type: YTN; PAM sequence: TTT
gtttaattatttatttctaa

SEQ ID NO: 53982 - DNA, 20 bp, Artificial Sequence
  Description of Artificial Sequence: Synthetic oligonucleotide
  Target: SCNA; (-) strand; PAM type: YTN; PAM sequence: CTT
tgtttaattatttatttcta

SEQ ID NO: 53983 - DNA, 20 bp, Artificial Sequence
  Description of Artificial Sequence: Synthetic oligonucleotide
  Target: SCNA; (-) strand; PAM type: YTN; PAM sequence: CTA
taaactttgtttaattattt

SEQ ID NO: 53984 - DNA, 20 bp, Artificial Sequence
  Description of Artificial Sequence: Synthetic oligonucleotide
  Target: SCNA; (-) strand; PAM type: YTN; PAM sequence: TTA
tgcctataaactttgtttaa

SEQ ID NO: 53985 - DNA, 20 bp, Artificial Sequence
  Description of Artificial Sequence: Synthetic oligonucleotide
  Target: SCNA; (-) strand; PAM type: YTN; PAM sequence: TTA
ttatgcctataaactttgtt

SEQ ID NO: 53986 - DNA, 20 bp, Artificial Sequence
  Description of Artificial Sequence: Synthetic oligonucleotide
  Target: SCNA; (-) strand; PAM type: YTN; PAM sequence: CTT
attatgcctataaactttgt

SEQ ID NO: 53987 - DNA, 20 bp, Artificial Sequence
  Description of Artificial Sequence: Synthetic oligonucleotide
  Target: SCNA; (-) strand; PAM type: YTN; PAM sequence: TTA
tgacttattatgcctataaa

SEQ ID NO: 53988 - DNA, 20 bp, Artificial Sequence
  Description of Artificial Sequence: Synthetic oligonucleotide
  Target: SCNA; (-) strand; PAM type: YTN; PAM sequence: TTC
aagaatattatgacttatta

SEQ ID NO: 53989 - DNA, 20 bp, Artificial Sequence
  Description of Artificial Sequence: Synthetic oligonucleotide
  Target: SCNA; (-) strand; PAM type: YTN; PAM sequence: TTT
caagaatattatgacttatt

SEQ ID NO: 53990 - DNA, 20 bp, Artificial Sequence
  Description of Artificial Sequence: Synthetic oligonucleotide
  Target: SCNA; (-) strand; PAM type: YTN; PAM sequence: TTT
tcaagaatattatgacttat

SEQ ID NO: 53991 - DNA, 20 bp, Artificial Sequence
  Description of Artificial Sequence: Synthetic oligonucleotide
  Target: SCNA; (-) strand; PAM type: YTN; PAM sequence: CTT
ttcaagaatattatgactta

SEQ ID NO: 53992 - DNA, 20 bp, Artificial Sequence
  Description of Artificial Sequence: Synthetic oligonucleotide
  Target: SCNA; (-) strand; PAM type: YTN; PAM sequence: CTG
catatcttttcaagaatatt

SEQ ID NO: 53993 - DNA, 20 bp, Artificial Sequence
  Description of Artificial Sequence: Synthetic oligonucleotide
  Target: SCNA; (-) strand; PAM type: YTN; PAM sequence: CTC
tgcatatcttttcaagaata

SEQ ID NO: 53994 - DNA, 20 bp, Artificial Sequence
  Description of Artificial Sequence: Synthetic oligonucleotide
  Target: SCNA; (-) strand; PAM type: YTN; PAM sequence: TTG
gaaccctctgcatatctttt

SEQ ID NO: 53995 - DNA, 20 bp, Artificial Sequence
  Description of Artificial Sequence: Synthetic oligonucleotide
  Target: SCNA; (-) strand; PAM type: YTN; PAM sequence: TTT
ggaaccctctgcatatcttt

SEQ ID NO: 53996 - DNA, 20 bp, Artificial Sequence
  Description of Artificial Sequence: Synthetic oligonucleotide
  Target: SCNA; (-) strand; PAM type: YTN; PAM sequence: CTT
tggaaccctctgcatatctt

SEQ ID NO: 53997 - DNA, 20 bp, Artificial Sequence
  Description of Artificial Sequence: Synthetic oligonucleotide
  Target: SCNA; (-) strand; PAM type: YTN; PAM sequence: CTC
ctttggaaccctctgcatat

SEQ ID NO: 53998 - DNA, 20 bp, Artificial Sequence
  Description of Artificial Sequence: Synthetic oligonucleotide
  Target: SCNA; (-) strand; PAM type: YTN; PAM sequence: TTG
gtgctcctttggaaccctct

SEQ ID NO: 53999 - DNA, 20 bp, Artificial Sequence
  Description of Artificial Sequence: Synthetic oligonucleotide
  Target: SCNA; (-) strand; PAM type: YTN; PAM sequence: TTG
gttggtgctcctttggaacc

SEQ ID NO: 54000 - DNA, 20 bp, Artificial Sequence
  Description of Artificial Sequence: Synthetic oligonucleotide
  Target: SCNA; (-) strand; PAM type: YTN; PAM sequence: CTG
gttggttggtgctcctttgg

SEQ ID NO: 54001 - DNA, 20 bp, Artificial Sequence
  Description of Artificial Sequence: Synthetic oligonucleotide
  Target: SCNA; (-) strand; PAM type: YTN; PAM sequence: CTC
tggttggttggtgctccttt

SEQ ID NO: 54002 - DNA, 20 bp, Artificial Sequence
  Description of Artificial Sequence: Synthetic oligonucleotide
  Target: SCNA; (-) strand; PAM type: YTN; PAM sequence: TTC
ccctctggttggttggtgct

SEQ ID NO: 54003 - DNA, 20 bp, Artificial Sequence
  Description of Artificial Sequence: Synthetic oligonucleotide
  Target: SCNA; (-) strand; PAM type: YTN; PAM sequence: TTT
cccctctggttggttggtgc

SEQ ID NO: 54004 - DNA, 20 bp, Artificial Sequence
  Description of Artificial Sequence: Synthetic oligonucleotide
  Target: SCNA; (-) strand; PAM type: YTN; PAM sequence: TTT
tcccctctggttggttggtg

SEQ ID NO: 54005 - DNA, 20 bp, Artificial Sequence
  Description of Artificial Sequence: Synthetic oligonucleotide
  Target: SCNA; (-) strand; PAM type: YTN; PAM sequence: TTG
cccccatattttcccctctg

SEQ ID NO: 54006 - DNA, 20 bp, Artificial Sequence
  Description of Artificial Sequence: Synthetic oligonucleotide
  Target: SCNA; (-) strand; PAM type: YTN; PAM sequence: CTG
ttgcccccatattttcccct

SEQ ID NO: 54007 - DNA, 20 bp, Artificial Sequence
  Description of Artificial Sequence: Synthetic oligonucleotide
  Target: SCNA; (-) strand; PAM type: YTN; PAM sequence: CTC
tgttgcccccatattttccc

SEQ ID NO: 54008 - DNA, 20 bp, Artificial Sequence
  Description of Artificial Sequence: Synthetic oligonucleotide
  Target: SCNA; (-) strand; PAM type: YTN; PAM sequence: CTC
tctgttgcccccatattttc

SEQ ID NO: 54009 - DNA, 20 bp, Artificial Sequence
  Description of Artificial Sequence: Synthetic oligonucleotide
  Target: SCNA; (-) strand; PAM type: YTN; PAM sequence: TTG
cctctctgttgcccccatat

SEQ ID NO: 54010 - DNA, 20 bp, Artificial Sequence
  Description of Artificial Sequence: Synthetic oligonucleotide
  Target: SCNA; (-) strand; PAM type: YTN; PAM sequence: CTT
gcctctctgttgcccccata

SEQ ID NO: 54011 - DNA, 20 bp, Artificial Sequence
  Description of Artificial Sequence: Synthetic oligonucleotide
  Target: SCNA; (-) strand; PAM type: YTN; PAM sequence: CTC
ttgcctctctgttgccccca

SEQ ID NO: 54012 - DNA, 20 bp, Artificial Sequence
  Description of Artificial Sequence: Synthetic oligonucleotide
  Target: SCNA; (-) strand; PAM type: YTN; PAM sequence: CTC
atatcacctcttgcctctct

SEQ ID NO: 54013 - DNA, 20 bp, Artificial Sequence
  Description of Artificial Sequence: Synthetic oligonucleotide
  Target: SCNA; (-) strand; PAM type: YTN; PAM sequence: CTC
tcatatcacctcttgcctct

SEQ ID NO: 54014 - DNA, 20 bp, Artificial Sequence
  Description of Artificial Sequence: Synthetic oligonucleotide
  Target: SCNA; (-) strand; PAM type: YTN; PAM sequence: CTC
tctcatatcacctcttgcct

SEQ ID NO: 54015 - DNA, 20 bp, Artificial Sequence
  Description of Artificial Sequence: Synthetic oligonucleotide
  Target: SCNA; (-) strand; PAM type: YTN; PAM sequence: TTC
tctctcatatcacctcttgc

SEQ ID NO: 54016 - DNA, 20 bp, Artificial Sequence
  Description of Artificial Sequence: Synthetic oligonucleotide
  Target: SCNA; (-) strand; PAM type: YTN; PAM sequence: TTT
ctctctcatatcacctcttg

SEQ ID NO: 54017 - DNA, 20 bp, Artificial Sequence
  Description of Artificial Sequence: Synthetic oligonucleotide
  Target: SCNA; (-) strand; PAM type: YTN; PAM sequence: CTT
tctctctcatatcacctctt

SEQ ID NO: 54018 - DNA, 20 bp, Artificial Sequence
  Description of Artificial Sequence: Synthetic oligonucleotide
  Target: SCNA; (-) strand; PAM type: YTN; PAM sequence: CTC
aggctttctctctcatatca

SEQ ID NO: 54019 - DNA, 20 bp, Artificial Sequence
  Description of Artificial Sequence: Synthetic oligonucleotide
  Target: SCNA; (-) strand; PAM type: YTN; PAM sequence: CTA
gctcaggctttctctctcat

SEQ ID NO: 54020 - DNA, 20 bp, Artificial Sequence
  Description of Artificial Sequence: Synthetic oligonucleotide
  Target: SCNA; (-) strand; PAM type: YTN; PAM sequence: TTC
tagctcaggctttctctctc

SEQ ID NO: 54021 - DNA, 20 bp, Artificial Sequence
  Description of Artificial Sequence: Synthetic oligonucleotide
  Target: SCNA; (-) strand; PAM type: YTN; PAM sequence: CTG
tgttctagctcaggctttct

SEQ ID NO: 54022 - DNA, 20 bp, Artificial Sequence
  Description of Artificial Sequence: Synthetic oligonucleotide
  Target: SCNA; (-) strand; PAM type: YTN; PAM sequence: CTC
tgtgttctagctcaggcttt

SEQ ID NO: 54023 - DNA, 20 bp, Artificial Sequence
  Description of Artificial Sequence: Synthetic oligonucleotide
  Target: SCNA; (-) strand; PAM type: YTN; PAM sequence: CTG
gctctgtgttctagctcagg

SEQ ID NO: 54024 - DNA, 20 bp, Artificial Sequence
  Description of Artificial Sequence: Synthetic oligonucleotide
  Target: SCNA; (-) strand; PAM type: YTN; PAM sequence: TTC
atgacctggctctgtgttct

SEQ ID NO: 54025 - DNA, 20 bp, Artificial Sequence
  Description of Artificial Sequence: Synthetic oligonucleotide
  Target: SCNA; (-) strand; PAM type: YTN; PAM sequence: TTC
agattcatgacctggctctg

SEQ ID NO: 54026 - DNA, 20 bp, Artificial Sequence
  Description of Artificial Sequence: Synthetic oligonucleotide
  Target: SCNA; (-) strand; PAM type: YTN; PAM sequence: CTT
cagattcatgacctggctct

SEQ ID NO: 54027 - DNA, 20 bp, Artificial Sequence
  Description of Artificial Sequence: Synthetic oligonucleotide
  Target: SCNA; (-) strand; PAM type: YTN; PAM sequence: CTG
ccttcagattcatgacctgg

SEQ ID NO: 54028 - DNA, 20 bp, Artificial Sequence
  Description of Artificial Sequence: Synthetic oligonucleotide
  Target: SCNA; (-) strand; PAM type: YTN; PAM sequence: TTC
ctgccttcagattcatgacc

SEQ ID NO: 54029 - DNA, 20 bp, Artificial Sequence
  Description of Artificial Sequence: Synthetic oligonucleotide
  Target: SCNA; (-) strand; PAM type: YTN; PAM sequence: TTG
ttcctgccttcagattcatg

SEQ ID NO: 54030 - DNA, 20 bp, Artificial Sequence
  Description of Artificial Sequence: Synthetic oligonucleotide
  Target: SCNA; (-) strand; PAM type: YTN; PAM sequence: CTG
acagagttgttcctgccttc

SEQ ID NO: 54031 - DNA, 20 bp, Artificial Sequence
  Description of Artificial Sequence: Synthetic oligonucleotide
  Target: SCNA; (-) strand; PAM type: YTN; PAM sequence: CTC
acagctgacagagttgttcc

SEQ ID NO: 54032 - DNA, 20 bp, Artificial Sequence
  Description of Artificial Sequence: Synthetic oligonucleotide
  Target: SCNA; (-) strand; PAM type: YTN; PAM sequence: TTC
atgtctcacagctgacagag

SEQ ID NO: 54033 - DNA, 20 bp, Artificial Sequence
  Description of Artificial Sequence: Synthetic oligonucleotide
  Target: SCNA; (-) strand; PAM type: YTN; PAM sequence: TTC
caaattcatgtctcacagct

SEQ ID NO: 54034 - DNA, 20 bp, Artificial Sequence
  Description of Artificial Sequence: Synthetic oligonucleotide
  Target: SCNA; (-) strand; PAM type: YTN; PAM sequence: CTT
ccaaattcatgtctcacagc

SEQ ID NO: 54035 - DNA, 20 bp, Artificial Sequence
  Description of Artificial Sequence: Synthetic oligonucleotide
  Target: SCNA; (-) strand; PAM type: YTN; PAM sequence: CTC
ccagcagccttccaaattca

SEQ ID NO: 54036 - DNA, 20 bp, Artificial Sequence
  Description of Artificial Sequence: Synthetic oligonucleotide
  Target: SCNA; (-) strand; PAM type: YTN; PAM sequence: CTC
tcccagcagccttccaaatt

SEQ ID NO: 54037 - DNA, 20 bp, Artificial Sequence
  Description of Artificial Sequence: Synthetic oligonucleotide
  Target: SCNA; (-) strand; PAM type: YTN; PAM sequence: TTC
tctcccagcagccttccaaa

SEQ ID NO: 54038 - DNA, 20 bp, Artificial Sequence
  Description of Artificial Sequence: Synthetic oligonucleotide
  Target: SCNA; (-) strand; PAM type: YTN; PAM sequence: TTT
ctctcccagcagccttccaa

SEQ ID NO: 54039 - DNA, 20 bp, Artificial Sequence
  Description of Artificial Sequence: Synthetic oligonucleotide
  Target: SCNA; (-) strand; PAM type: YTN; PAM sequence: TTT
tctctcccagcagccttcca

SEQ ID NO: 54040 - DNA, 20 bp, Artificial Sequence
  Description of Artificial Sequence: Synthetic oligonucleotide
  Target: SCNA; (-) strand; PAM type: YTN; PAM sequence: CTT
ttctctcccagcagccttcc

SEQ ID NO: 54041 - DNA, 20 bp, Artificial Sequence
  Description of Artificial Sequence: Synthetic oligonucleotide
  Target: SCNA; (-) strand; PAM type: YTN; PAM sequence: CTG
cttttctctcccagcagcct

SEQ ID NO: 54042 - DNA, 20 bp, Artificial Sequence
  Description of Artificial Sequence: Synthetic oligonucleotide
  Target: SCNA; (-) strand; PAM type: YTN; PAM sequence: CTC
tgcttttctctcccagcagc

SEQ ID NO: 54043 - DNA, 20 bp, Artificial Sequence
  Description of Artificial Sequence: Synthetic oligonucleotide
  Target: SCNA; (-) strand; PAM type: YTN; PAM sequence: CTA
atctctgcttttctctccca

SEQ ID NO: 54044 - DNA, 20 bp, Artificial Sequence
  Description of Artificial Sequence: Synthetic oligonucleotide
  Target: SCNA; (-) strand; PAM type: YTN; PAM sequence: TTG
cacgactaatctctgctttt

SEQ ID NO: 54045 - DNA, 20 bp, Artificial Sequence
  Description of Artificial Sequence: Synthetic oligonucleotide
  Target: SCNA; (-) strand; PAM type: YTN; PAM sequence: TTA
agtagataattgcacgacta

SEQ ID NO: 54046 - DNA, 20 bp, Artificial Sequence
  Description of Artificial Sequence: Synthetic oligonucleotide
  Target: SCNA; (-) strand; PAM type: YTN; PAM sequence: CTT
aagtagataattgcacgact

SEQ ID NO: 54047 - DNA, 20 bp, Artificial Sequence
  Description of Artificial Sequence: Synthetic oligonucleotide
  Target: SCNA; (-) strand; PAM type: YTN; PAM sequence: TTC
cagcccaaaatatcttaagt

SEQ ID NO: 54048 - DNA, 20 bp, Artificial Sequence
  Description of Artificial Sequence: Synthetic oligonucleotide
  Target: SCNA; (-) strand; PAM type: YTN; PAM sequence: CTT
ccagcccaaaatatcttaag

SEQ ID NO: 54049 - DNA, 20 bp, Artificial Sequence
  Description of Artificial Sequence: Synthetic oligonucleotide
  Target: SCNA; (-) strand; PAM type: YTN; PAM sequence: CTG
cttccagcccaaaatatctt

SEQ ID NO: 54050 - DNA, 20 bp, Artificial Sequence
  Description of Artificial Sequence: Synthetic oligonucleotide
  Target: SCNA; (-) strand; PAM type: YTN; PAM sequence: TTA
caggtgtgagccactgcttc

SEQ ID NO: 54051 - DNA, 20 bp, Artificial Sequence
  Description of Artificial Sequence: Synthetic oligonucleotide
  Target: SCNA; (-) strand; PAM type: YTN; PAM sequence: CTG
gaattacaggtgtgagccac

SEQ ID NO: 54052 - DNA, 20 bp, Artificial Sequence
  Description of Artificial Sequence: Synthetic oligonucleotide
  Target: SCNA; (-) strand; PAM type: YTN; PAM sequence: CTC
ccaaagtgctggaattacag

SEQ ID NO: 54053 - DNA, 20 bp, Artificial Sequence
  Description of Artificial Sequence: Synthetic oligonucleotide
  Target: SCNA; (-) strand; PAM type: YTN; PAM sequence: CTC
aggtgatccacccgcgtcag

SEQ ID NO: 54054 - DNA, 20 bp, Artificial Sequence
  Description of Artificial Sequence: Synthetic oligonucleotide
  Target: SCNA; (-) strand; PAM type: YTN; PAM sequence: CTG
acctcaggtgatccacccgc

SEQ ID NO: 54055 - DNA, 20 bp, Artificial Sequence
  Description of Artificial Sequence: Synthetic oligonucleotide
  Target: SCNA; (-) strand; PAM type: YTN; PAM sequence: CTC
ctgacctcaggtgatccacc

SEQ ID NO: 54056 - DNA, 20 bp, Artificial Sequence
  Description of Artificial Sequence: Synthetic oligonucleotide
  Target: SCNA; (-) strand; PAM type: YTN; PAM sequence: CTC
gaactcctgacctcaggtga

SEQ ID NO: 54057 - DNA, 20 bp, Artificial Sequence
  Description of Artificial Sequence: Synthetic oligonucleotide
  Target: SCNA; (-) strand; PAM type: YTN; PAM sequence: CTG
atctcgaactcctgacctca

SEQ ID NO: 54058 - DNA, 20 bp, Artificial Sequence
  Description of Artificial Sequence: Synthetic oligonucleotide
  Target: SCNA; (-) strand; PAM type: YTN; PAM sequence: TTG
gccaggctgatctcgaactc

SEQ ID NO: 54059 - DNA, 20 bp, Artificial Sequence
  Description of Artificial Sequence: Synthetic oligonucleotide
  Target: SCNA; (-) strand; PAM type: YTN; PAM sequence: TTC
gccatgttggccaggctgat

SEQ ID NO: 54060 - DNA, 20 bp, Artificial Sequence
  Description of Artificial Sequence: Synthetic oligonucleotide
  Target: SCNA; (-) strand; PAM type: YTN; PAM sequence: TTT
cgccatgttggccaggctga

SEQ ID NO: 54061 - DNA, 20 bp, Artificial Sequence
  Description of Artificial Sequence: Synthetic oligonucleotide
  Target: SCNA; (-) strand; PAM type: YTN; PAM sequence: TTC
agtagagatggggtttcgcc

SEQ ID NO: 54062 - DNA, 20 bp, Artificial Sequence
  Description of Artificial Sequence: Synthetic oligonucleotide
  Target: SCNA; (-) strand; PAM type: YTN; PAM sequence: TTT
cagtagagatggggtttcgc

SEQ ID NO: 54063 - DNA, 20 bp, Artificial Sequence
  Description of Artificial Sequence: Synthetic oligonucleotide
  Target: SCNA; (-) strand; PAM type: YTN; PAM sequence: TTT
tcagtagagatggggtttcg

SEQ ID NO: 54064 - DNA, 20 bp, Artificial Sequence
  Description of Artificial Sequence: Synthetic oligonucleotide
  Target: SCNA; (-) strand; PAM type: YTN; PAM sequence: TTG
tattttcagtagagatgggg

SEQ ID NO: 54065 - DNA, 20 bp, Artificial Sequence
  Description of Artificial Sequence: Synthetic oligonucleotide
  Target: SCNA; (-) strand; PAM type: YTN; PAM sequence: TTT
gtattttcagtagagatggg

SEQ ID NO: 54066 - DNA, 20 bp, Artificial Sequence
  Description of Artificial Sequence: Synthetic oligonucleotide
  Target: SCNA; (-) strand; PAM type: YTN; PAM sequence: TTT
tgtattttcagtagagatgg

SEQ ID NO: 54067 - DNA, 20 bp, Artificial Sequence
  Description of Artificial Sequence: Synthetic oligonucleotide
  Target: SCNA; (-) strand; PAM type: YTN; PAM sequence: TTT
ttgtattttcagtagagatg

SEQ ID NO: 54068 - DNA, 20 bp, Artificial Sequence
  Description of Artificial Sequence: Synthetic oligonucleotide
  Target: SCNA; (-) strand; PAM type: YTN; PAM sequence: TTA
atttttgtattttcagtaga

SEQ ID NO: 54069 - DNA, 20 bp, Artificial Sequence
  Description of Artificial Sequence: Synthetic oligonucleotide
  Target: SCNA; (-) strand; PAM type: YTN; PAM sequence: CTG
gttaatttttgtattttcag

SEQ ID NO: 54070 - DNA, 20 bp, Artificial Sequence
  Description of Artificial Sequence: Synthetic oligonucleotide
  Target: SCNA; (-) strand; PAM type: YTN; PAM sequence: CTG
ccaccacgcctggttaattt

SEQ ID NO: 54071 - DNA, 20 bp, Artificial Sequence
  Description of Artificial Sequence: Synthetic oligonucleotide
  Target: SCNA; (-) strand; PAM type: YTN; PAM sequence: TTA
caggcatctgccaccacgcc

SEQ ID NO: 54072 - DNA, 20 bp, Artificial Sequence
  Description of Artificial Sequence: Synthetic oligonucleotide
  Target: SCNA; (-) strand; PAM type: YTN; PAM sequence: CTG
ggattacaggcatctgccac

SEQ ID NO: 54073 - DNA, 20 bp, Artificial Sequence
  Description of Artificial Sequence: Synthetic oligonucleotide
  Target: SCNA; (-) strand; PAM type: YTN; PAM sequence: CTG
agtagctgggattacaggca

SEQ ID NO: 54074 - DNA, 20 bp, Artificial Sequence
  Description of Artificial Sequence: Synthetic oligonucleotide
  Target: SCNA; (-) strand; PAM type: YTN; PAM sequence: CTC
ctgagtagctgggattacag

SEQ ID NO: 54075 - DNA, 20 bp, Artificial Sequence
  Description of Artificial Sequence: Synthetic oligonucleotide
  Target: SCNA; (-) strand; PAM type: YTN; PAM sequence: TTC
agcctcctgagtagctggga

SEQ ID NO: 54076 - DNA, 20 bp, Artificial Sequence
  Description of Artificial Sequence: Synthetic oligonucleotide
  Target: SCNA; (-) strand; PAM type: YTN; PAM sequence: CTA
gttcagcctcctgagtagct

SEQ ID NO: 54077 - DNA, 20 bp, Artificial Sequence
  Description of Artificial Sequence: Synthetic oligonucleotide
  Target: SCNA; (-) strand; PAM type: YTN; PAM sequence: CTC
ctagttcagcctcctgagta

SEQ ID NO: 54078 - DNA, 20 bp, Artificial Sequence
  Description of Artificial Sequence: Synthetic oligonucleotide
  Target: SCNA; (-) strand; PAM type: YTN; PAM sequence: TTC
tcctagttcagcctcctgag

SEQ ID NO: 54079 - DNA, 20 bp, Artificial Sequence
  Description of Artificial Sequence: Synthetic oligonucleotide
  Target: SCNA; (-) strand; PAM type: YTN; PAM sequence: TTC
aagcgattctcctagttcag

SEQ ID NO: 54080 - DNA, 20 bp, Artificial Sequence
  Description of Artificial Sequence: Synthetic oligonucleotide
  Target: SCNA; (-) strand; PAM type: YTN; PAM sequence: CTG
ccacccaggttcaagcgatt

SEQ ID NO: 54081 - DNA, 20 bp, Artificial Sequence
  Description of Artificial Sequence: Synthetic oligonucleotide
  Target: SCNA; (-) strand; PAM type: YTN; PAM sequence: CTC
tgccacccaggttcaagcga

SEQ ID NO: 54082 - DNA, 20 bp, Artificial Sequence
  Description of Artificial Sequence: Synthetic oligonucleotide
  Target: SCNA; (-) strand; PAM type: YTN; PAM sequence: CTC
acagcagcctctgccaccca

SEQ ID NO: 54083 - DNA, 20 bp, Artificial Sequence
  Description of Artificial Sequence: Synthetic oligonucleotide
  Target: SCNA; (-) strand; PAM type: YTN; PAM sequence: CTC
agctcacagcagcctctgcc

SEQ ID NO: 54084 - DNA, 20 bp, Artificial Sequence
  Description of Artificial Sequence: Synthetic oligonucleotide
  Target: SCNA; (-) strand; PAM type: YTN; PAM sequence: CTG
gagtgccgtggtgcaatctc

SEQ ID NO: 54085 - DNA, 20 bp, Artificial Sequence
  Description of Artificial Sequence: Synthetic oligonucleotide
  Target: SCNA; (-) strand; PAM type: YTN; PAM sequence: TTG
cccaggctggagtgccgtgg

SEQ ID NO: 54086 - DNA, 20 bp, Artificial Sequence
  Description of Artificial Sequence: Synthetic oligonucleotide
  Target: SCNA; (-) strand; PAM type: YTN; PAM sequence: CTG
ttgcccaggctggagtgccg

SEQ ID NO: 54087 - DNA, 20 bp, Artificial Sequence
  Description of Artificial Sequence: Synthetic oligonucleotide
  Target: SCNA; (-) strand; PAM type: YTN; PAM sequence: CTC
tgttgcccaggctggagtgc

SEQ ID NO: 54088 - DNA, 20 bp, Artificial Sequence
  Description of Artificial Sequence: Synthetic oligonucleotide
  Target: SCNA; (-) strand; PAM type: YTN; PAM sequence: CTC
gctctgttgcccaggctgga

SEQ ID NO: 54089 - DNA, 20 bp, Artificial Sequence
  Description of Artificial Sequence: Synthetic oligonucleotide
  Target: SCNA; (-) strand; PAM type: YTN; PAM sequence: TTG
agatggagtctcgctctgtt

SEQ ID NO: 54090 - DNA, 20 bp, Artificial Sequence
  Description of Artificial Sequence: Synthetic oligonucleotide
  Target: SCNA; (-) strand; PAM type: YTN; PAM sequence: TTT
gagatggagtctcgctctgt

SEQ ID NO: 54091 - DNA, 20 bp, Artificial Sequence
  Description of Artificial Sequence: Synthetic oligonucleotide
  Target: SCNA; (-) strand; PAM type: YTN; PAM sequence: TTT
tgagatggagtctcgctctg

SEQ ID NO: 54092 - DNA, 20 bp, Artificial Sequence
  Description of Artificial Sequence: Synthetic oligonucleotide
  Target: SCNA; (-) strand; PAM type: YTN; PAM sequence: TTT
ttgagatggagtctcgctct

SEQ ID NO: 54093 - DNA, 20 bp, Artificial Sequence
  Description of Artificial Sequence: Synthetic oligonucleotide
  Target: SCNA; (-) strand; PAM type: YTN; PAM sequence: TTT
tttgagatggagtctcgctc

SEQ ID NO: 54094 - DNA, 20 bp, Artificial Sequence
  Description of Artificial Sequence: Synthetic oligonucleotide
  Target: SCNA; (-) strand; PAM type: YTN; PAM sequence: TTT
ttttgagatggagtctcgct

SEQ ID NO: 54095 - DNA, 20 bp, Artificial Sequence
  Description of Artificial Sequence: Synthetic oligonucleotide
  Target: SCNA; (-) strand; PAM type: YTN; PAM sequence: TTT
tttttgagatggagtctcgc

SEQ ID NO: 54096 - DNA, 20 bp, Artificial Sequence
  Description of Artificial Sequence: Synthetic oligonucleotide
  Target: SCNA; (-) strand; PAM type: YTN; PAM sequence: TTT
ttttttgagatggagtctcg

SEQ ID NO: 54097 - DNA, 20 bp, Artificial Sequence
  Description of Artificial Sequence: Synthetic oligonucleotide
  Target: SCNA; (-) strand; PAM type: YTN; PAM sequence: TTT
tttttttgagatggagtctc

SEQ ID NO: 54098 - DNA, 20 bp, Artificial Sequence
  Description of Artificial Sequence: Synthetic oligonucleotide
  Target: SCNA; (-) strand; PAM type: YTN; PAM sequence: TTT
ttttttttgagatggagtct

SEQ ID NO: 54099 - DNA, 20 bp, Artificial Sequence
  Description of Artificial Sequence: Synthetic oligonucleotide
  Target: SCNA; (-) strand; PAM type: YTN; PAM sequence: TTC
aaaatatatatatatatatt

SEQ ID NO: 54100 - DNA, 20 bp, Artificial Sequence
  Description of Artificial Sequence: Synthetic oligonucleotide
  Target: SCNA; (-) strand; PAM type: YTN; PAM sequence: CTT
caaaatatatatatatatat

SEQ ID NO: 54101 - DNA, 20 bp, Artificial Sequence
  Description of Artificial Sequence: Synthetic oligonucleotide
  Target: SCNA; (-) strand; PAM type: YTN; PAM sequence: CTA
gacttcaaaatatatatata

SEQ ID NO: 54102 - DNA, 20 bp, Artificial Sequence
  Description of Artificial Sequence: Synthetic oligonucleotide
  Target: SCNA; (-) strand; PAM type: YTN; PAM sequence: CTC
tagacttcaaaatatatata

SEQ ID NO: 54103 - DNA, 20 bp, Artificial Sequence
  Description of Artificial Sequence: Synthetic oligonucleotide
  Target: SCNA; (-) strand; PAM type: YTN; PAM sequence: TTC
atctctagacttcaaaatat

SEQ ID NO: 54104 - DNA, 20 bp, Artificial Sequence
  Description of Artificial Sequence: Synthetic oligonucleotide
  Target: SCNA; (-) strand; PAM type: YTN; PAM sequence: CTG
gaattcatctctagacttca

SEQ ID NO: 54105 - DNA, 20 bp, Artificial Sequence
  Description of Artificial Sequence: Synthetic oligonucleotide
  Target: SCNA; (-) strand; PAM type: YTN; PAM sequence: TTC
tggaattcatctctagactt

SEQ ID NO: 54106 - DNA, 20 bp, Artificial Sequence
  Description of Artificial Sequence: Synthetic oligonucleotide
  Target: SCNA; (-) strand; PAM type: YTN; PAM sequence: TTT
ctggaattcatctctagact

SEQ ID NO: 54107 - DNA, 20 bp, Artificial Sequence
  Description of Artificial Sequence: Synthetic oligonucleotide
  Target: SCNA; (-) strand; PAM type: YTN; PAM sequence: TTA
tttctggaattcatctctag

SEQ ID NO: 54108 - DNA, 20 bp, Artificial Sequence
  Description of Artificial Sequence: Synthetic oligonucleotide
  Target: SCNA; (-) strand; PAM type: YTN; PAM sequence: CTT
atttctggaattcatctcta

SEQ ID NO: 54109 - DNA, 20 bp, Artificial Sequence
  Description of Artificial Sequence: Synthetic oligonucleotide
  Target: SCNA; (-) strand; PAM type: YTN; PAM sequence: CTG
tataccttatttctggaatt

SEQ ID NO: 54110 - DNA, 20 bp, Artificial Sequence
  Description of Artificial Sequence: Synthetic oligonucleotide
  Target: SCNA; (-) strand; PAM type: YTN; PAM sequence: TTC
tgtataccttatttctggaa

SEQ ID NO: 54111 - DNA, 20 bp, Artificial Sequence
  Description of Artificial Sequence: Synthetic oligonucleotide
  Target: SCNA; (-) strand; PAM type: YTN; PAM sequence: TTT
ctgtataccttatttctgga

SEQ ID NO: 54112 - DNA, 20 bp, Artificial Sequence
  Description of Artificial Sequence: Synthetic oligonucleotide
  Target: SCNA; (-) strand; PAM type: YTN; PAM sequence: CTT
tctgtataccttatttctgg

SEQ ID NO: 54113 - DNA, 20 bp, Artificial Sequence
  Description of Artificial Sequence: Synthetic oligonucleotide
  Target: SCNA; (-) strand; PAM type: YTN; PAM sequence: TTC
actttctgtataccttattt

SEQ ID NO: 54114 - DNA, 20 bp, Artificial Sequence
  Description of Artificial Sequence: Synthetic oligonucleotide
  Target: SCNA; (-) strand; PAM type: YTN; PAM sequence: TTT
cactttctgtataccttatt

SEQ ID NO: 54115 - DNA, 20 bp, Artificial Sequence
  Description of Artificial Sequence: Synthetic oligonucleotide
  Target: SCNA; (-) strand; PAM type: YTN; PAM sequence: CTA
cagtttcactttctgtatac

SEQ ID NO: 54116 - DNA, 20 bp, Artificial Sequence
  Description of Artificial Sequence: Synthetic oligonucleotide
  Target: SCNA; (-) strand; PAM type: YTN; PAM sequence: CTA
gtcaatcacaaagtcctaca

SEQ ID NO: 54117 - DNA, 20 bp, Artificial Sequence
  Description of Artificial Sequence: Synthetic oligonucleotide
  Target: SCNA; (-) strand; PAM type: YTN; PAM sequence: TTC
tagtcaatcacaaagtccta

SEQ ID NO: 54118 - DNA, 20 bp, Artificial Sequence
  Description of Artificial Sequence: Synthetic oligonucleotide
  Target: SCNA; (-) strand; PAM type: YTN; PAM sequence: CTC
agttctagtcaatcacaaag

SEQ ID NO: 54119 - DNA, 20 bp, Artificial Sequence
  Description of Artificial Sequence: Synthetic oligonucleotide
  Target: SCNA; (-) strand; PAM type: YTN; PAM sequence: TTG
tccctcagttctagtcaatc

SEQ ID NO: 54120 - DNA, 20 bp, Artificial Sequence
  Description of Artificial Sequence: Synthetic oligonucleotide
  Target: SCNA; (-) strand; PAM type: YTN; PAM sequence: CTT
gtccctcagttctagtcaat

SEQ ID NO: 54121 - DNA, 20 bp, Artificial Sequence
  Description of Artificial Sequence: Synthetic oligonucleotide
  Target: SCNA; (-) strand; PAM type: YTN; PAM sequence: CTC
ccttgtccctcagttctagt

SEQ ID NO: 54122 - DNA, 20 bp, Artificial Sequence
  Description of Artificial Sequence: Synthetic oligonucleotide
  Target: SCNA; (-) strand; PAM type: YTN; PAM sequence: CTC
tcccttgtccctcagttcta

SEQ ID NO: 54123 - DNA, 20 bp, Artificial Sequence
  Description of Artificial Sequence: Synthetic oligonucleotide
  Target: SCNA; (-) strand; PAM type: YTN; PAM sequence: TTC
cctctcccttgtccctcagt

SEQ ID NO: 54124 - DNA, 20 bp, Artificial Sequence
  Description of Artificial Sequence: Synthetic oligonucleotide
  Target: SCNA; (-) strand; PAM type: YTN; PAM sequence: TTT
ccctctcccttgtccctcag

SEQ ID NO: 54125 - DNA, 20 bp, Artificial Sequence
  Description of Artificial Sequence: Synthetic oligonucleotide
  Target: SCNA; (-) strand; PAM type: YTN; PAM sequence: CTT
tccctctcccttgtccctca

SEQ ID NO: 54126 - DNA, 20 bp, Artificial Sequence
  Description of Artificial Sequence: Synthetic oligonucleotide
  Target: SCNA; (-) strand; PAM type: YTN; PAM sequence: TTC
cctttccctctcccttgtcc

SEQ ID NO: 54127 - DNA, 20 bp, Artificial Sequence
  Description of Artificial Sequence: Synthetic oligonucleotide
  Target: SCNA; (-) strand; PAM type: YTN; PAM sequence: CTT
ccctttccctctcccttgtc

SEQ ID NO: 54128 - DNA, 20 bp, Artificial Sequence
  Description of Artificial Sequence: Synthetic oligonucleotide
  Target: SCNA; (-) strand; PAM type: YTN; PAM sequence: CTC
ttccctttccctctcccttg

SEQ ID NO: 54129 - DNA, 20 bp, Artificial Sequence
  Description of Artificial Sequence: Synthetic oligonucleotide
  Target: SCNA; (-) strand; PAM type: YTN; PAM sequence: TTC
aactcttccctttccctctc

SEQ ID NO: 54130 - DNA, 20 bp, Artificial Sequence
  Description of Artificial Sequence: Synthetic oligonucleotide
  Target: SCNA; (-) strand; PAM type: YTN; PAM sequence: CTT
caactcttccctttccctct

SEQ ID NO: 54131 - DNA, 20 bp, Artificial Sequence
  Description of Artificial Sequence: Synthetic oligonucleotide
  Target: SCNA; (-) strand; PAM type: YTN; PAM sequence: TTC
catcatcttcaactcttccc

SEQ ID NO: 54132 - DNA, 20 bp, Artificial Sequence
  Description of Artificial Sequence: Synthetic oligonucleotide
  Target: SCNA; (-) strand; PAM type: YTN; PAM sequence: TTT
ccatcatcttcaactcttcc

SEQ ID NO: 54133 - DNA, 20 bp, Artificial Sequence
  Description of Artificial Sequence: Synthetic oligonucleotide
  Target: SCNA; (-) strand; PAM type: YTN; PAM sequence: TTG
tttccatcatcttcaactct

SEQ ID NO: 54134 - DNA, 20 bp, Artificial Sequence
  Description of Artificial Sequence: Synthetic oligonucleotide
  Target: SCNA; (-) strand; PAM type: YTN; PAM sequence: CTA
ttgtttccatcatcttcaac

SEQ ID NO: 54135 - DNA, 20 bp, Artificial Sequence
  Description of Artificial Sequence: Synthetic oligonucleotide
  Target: SCNA; (-) strand; PAM type: YTN; PAM sequence: CTG
taatctattgtttccatcat

SEQ ID NO: 54136 - DNA, 20 bp, Artificial Sequence
  Description of Artificial Sequence: Synthetic oligonucleotide
  Target: SCNA; (-) strand; PAM type: YTN; PAM sequence: TTC
ctgtaatctattgtttccat

SEQ ID NO: 54137 - DNA, 20 bp, Artificial Sequence
  Description of Artificial Sequence: Synthetic oligonucleotide
  Target: SCNA; (-) strand; PAM type: YTN; PAM sequence: CTT
cctgtaatctattgtttcca

SEQ ID NO: 54138 - DNA, 20 bp, Artificial Sequence
  Description of Artificial Sequence: Synthetic oligonucleotide
  Target: SCNA; (-) strand; PAM type: YTN; PAM sequence: CTC
ttcctgtaatctattgtttc

SEQ ID NO: 54139 - DNA, 20 bp, Artificial Sequence
  Description of Artificial Sequence: Synthetic oligonucleotide
  Target: SCNA; (-) strand; PAM type: YTN; PAM sequence: TTG
atcctcttcctgtaatctat

SEQ ID NO: 54140 - DNA, 20 bp, Artificial Sequence
  Description of Artificial Sequence: Synthetic oligonucleotide
  Target: SCNA; (-) strand; PAM type: YTN; PAM sequence: TTT
gatcctcttcctgtaatcta

SEQ ID NO: 54141 - DNA, 20 bp, Artificial Sequence
  Description of Artificial Sequence: Synthetic oligonucleotide
  Target: SCNA; (-) strand; PAM type: YTN; PAM sequence: CTA
aatttgatcctcttcctgta

SEQ ID NO: 54142 - DNA, 20 bp, Artificial Sequence
  Description of Artificial Sequence: Synthetic oligonucleotide
  Target: SCNA; (-) strand; PAM type: YTN; PAM sequence: TTC
cccctaaatttgatcctctt

SEQ ID NO: 54143 - DNA, 20 bp, Artificial Sequence
  Description of Artificial Sequence: Synthetic oligonucleotide
  Target: SCNA; (-) strand; PAM type: YTN; PAM sequence: CTT
ccccctaaatttgatcctct

SEQ ID NO: 54144 - DNA, 20 bp, Artificial Sequence
  Description of Artificial Sequence: Synthetic oligonucleotide
  Target: SCNA; (-) strand; PAM type: YTN; PAM sequence: TTC
ttccccctaaatttgatcct

SEQ ID NO: 54145 - DNA, 20 bp, Artificial Sequence
  Description of Artificial Sequence: Synthetic oligonucleotide
  Target: SCNA; (-) strand; PAM type: YTN; PAM sequence: CTT
cttccccctaaatttgatcc

SEQ ID NO: 54146 - DNA, 20 bp, Artificial Sequence
  Description of Artificial Sequence: Synthetic oligonucleotide
  Target: SCNA; (-) strand; PAM type: YTN; PAM sequence: CTG
atcttcttccccctaaattt

SEQ ID NO: 54147 - DNA, 20 bp, Artificial Sequence
  Description of Artificial Sequence: Synthetic oligonucleotide
  Target: SCNA; (-) strand; PAM type: YTN; PAM sequence: TTA
tgatctgatcttcttccccc

SEQ ID NO: 54148 - DNA, 20 bp, Artificial Sequence
  Description of Artificial Sequence: Synthetic oligonucleotide
  Target: SCNA; (-) strand; PAM type: YTN; PAM sequence: TTG
attatgatctgatcttcttc

SEQ ID NO: 54149 - DNA, 20 bp, Artificial Sequence
  Description of Artificial Sequence: Synthetic oligonucleotide
  Target: SCNA; (-) strand; PAM type: YTN; PAM sequence: TTG
tattgattatgatctgatct

SEQ ID NO: 54150 - DNA, 20 bp, Artificial Sequence
  Description of Artificial Sequence: Synthetic oligonucleotide
  Target: SCNA; (-) strand; PAM type: YTN; PAM sequence: TTA
agttgtattgattatgatct

SEQ ID NO: 54151 - DNA, 20 bp, Artificial Sequence
  Description of Artificial Sequence: Synthetic oligonucleotide
  Target: SCNA; (-) strand; PAM type: YTN; PAM sequence: TTC
agaacatgtggaattaagtt

SEQ ID NO: 54152 - DNA, 20 bp, Artificial Sequence
  Description of Artificial Sequence: Synthetic oligonucleotide
  Target: SCNA; (-) strand; PAM type: YTN; PAM sequence: TTT
cagaacatgtggaattaagt

SEQ ID NO: 54153 - DNA, 20 bp, Artificial Sequence
  Description of Artificial Sequence: Synthetic oligonucleotide
  Target: SCNA; (-) strand; PAM type: YTN; PAM sequence: CTT
tcagaacatgtggaattaag

SEQ ID NO: 54154 - DNA, 20 bp, Artificial Sequence
  Description of Artificial Sequence: Synthetic oligonucleotide
  Target: SCNA; (-) strand; PAM type: YTN; PAM sequence: TTA
actttcagaacatgtggaat

SEQ ID NO: 54155 - DNA, 20 bp, Artificial Sequence
  Description of Artificial Sequence: Synthetic oligonucleotide
  Target: SCNA; (-) strand; PAM type: YTN; PAM sequence: TTT
aactttcagaacatgtggaa

SEQ ID NO: 54156 - DNA, 20 bp, Artificial Sequence
  Description of Artificial Sequence: Synthetic oligonucleotide
  Target: SCNA; (-) strand; PAM type: YTN; PAM sequence: CTA
gaggagatatttaactttca

SEQ ID NO: 54157 - DNA, 20 bp, Artificial Sequence
  Description of Artificial Sequence: Synthetic oligonucleotide
  Target: SCNA; (-) strand; PAM type: YTN; PAM sequence: TTG
gctagaggagatatttaact

SEQ ID NO: 54158 - DNA, 20 bp, Artificial Sequence
  Description of Artificial Sequence: Synthetic oligonucleotide
  Target: SCNA; (-) strand; PAM type: YTN; PAM sequence: TTT
ggctagaggagatatttaac

SEQ ID NO: 54159 - DNA, 20 bp, Artificial Sequence
  Description of Artificial Sequence: Synthetic oligonucleotide
  Target: SCNA; (-) strand; PAM type: YTN; PAM sequence: TTT
tggctagaggagatatttaa

SEQ ID NO: 54160 - DNA, 20 bp, Artificial Sequence
  Description of Artificial Sequence: Synthetic oligonucleotide
  Target: SCNA; (-) strand; PAM type: YTN; PAM sequence: CTT
ttggctagaggagatattta

SEQ ID NO: 54161 - DNA, 20 bp, Artificial Sequence
  Description of Artificial Sequence: Synthetic oligonucleotide
  Target: SCNA; (-) strand; PAM type: YTN; PAM sequence: TTA
agaggtccagagaagtaaaa

SEQ ID NO: 54162 - DNA, 20 bp, Artificial Sequence
  Description of Artificial Sequence: Synthetic oligonucleotide
  Target: SCNA; (-) strand; PAM type: YTN; PAM sequence: TTG
tgcaggggaataaacatcaa

SEQ ID NO: 54163 - DNA, 20 bp, Artificial Sequence
  Description of Artificial Sequence: Synthetic oligonucleotide
  Target: SCNA; (-) strand; PAM type: YTN; PAM sequence: TTT
gtgcaggggaataaacatca

SEQ ID NO: 54164 - DNA, 20 bp, Artificial Sequence
  Description of Artificial Sequence: Synthetic oligonucleotide
  Target: SCNA; (-) strand; PAM type: YTN; PAM sequence: TTA
tttgtgcaggggaataaaca

SEQ ID NO: 54165 - DNA, 20 bp, Artificial Sequence
  Description of Artificial Sequence: Synthetic oligonucleotide
  Target: SCNA; (-) strand; PAM type: YTN; PAM sequence: TTA
aattatttgtgcaggggaat

SEQ ID NO: 54166 - DNA, 20 bp, Artificial Sequence
  Description of Artificial Sequence: Synthetic oligonucleotide
  Target: SCNA; (-) strand; PAM type: YTN; PAM sequence: CTG
taaaggggttaaattatttg

SEQ ID NO: 54167 - DNA, 20 bp, Artificial Sequence
  Description of Artificial Sequence: Synthetic oligonucleotide
  Target: SCNA; (-) strand; PAM type: YTN; PAM sequence: TTG
gatctgtaaaggggttaaat

SEQ ID NO: 54168 - DNA, 20 bp, Artificial Sequence
  Description of Artificial Sequence: Synthetic oligonucleotide
  Target: SCNA; (-) strand; PAM type: YTN; PAM sequence: TTT
ggatctgtaaaggggttaaa

SEQ ID NO: 54169 - DNA, 20 bp, Artificial Sequence
  Description of Artificial Sequence: Synthetic oligonucleotide
  Target: SCNA; (-) strand; PAM type: YTN; PAM sequence: TTT
tggatctgtaaaggggttaa

SEQ ID NO: 54170 - DNA, 20 bp, Artificial Sequence
  Description of Artificial Sequence: Synthetic oligonucleotide
  Target: SCNA; (-) strand; PAM type: YTN; PAM sequence: CTA
taaaattttggatctgtaaa

SEQ ID NO: 54171 - DNA, 20 bp, Artificial Sequence
  Description of Artificial Sequence: Synthetic oligonucleotide
  Target: SCNA; (-) strand; PAM type: YTN; PAM sequence: CTA
ctataaaattttggatctgt

SEQ ID NO: 54172 - DNA, 20 bp, Artificial Sequence
  Description of Artificial Sequence: Synthetic oligonucleotide
  Target: SCNA; (-) strand; PAM type: YTN; PAM sequence: TTG
cctactataaaattttggat

SEQ ID NO: 54173 - DNA, 20 bp, Artificial Sequence
  Description of Artificial Sequence: Synthetic oligonucleotide
  Target: SCNA; (-) strand; PAM type: YTN; PAM sequence: TTT
gcctactataaaattttgga

SEQ ID NO: 54174 - DNA, 20 bp, Artificial Sequence
  Description of Artificial Sequence: Synthetic oligonucleotide
  Target: SCNA; (-) strand; PAM type: YTN; PAM sequence: TTA
caatatttgcctactataaa

SEQ ID NO: 54175 - DNA, 20 bp, Artificial Sequence
  Description of Artificial Sequence: Synthetic oligonucleotide
  Target: SCNA; (-) strand; PAM type: YTN; PAM sequence: TTC
aagggggttacaatatttgc

SEQ ID NO: 54176 - DNA, 20 bp, Artificial Sequence
  Description of Artificial Sequence: Synthetic oligonucleotide
  Target: SCNA; (-) strand; PAM type: YTN; PAM sequence: TTT
caagggggttacaatatttg

SEQ ID NO: 54177 - DNA, 20 bp, Artificial Sequence
  Description of Artificial Sequence: Synthetic oligonucleotide
  Target: SCNA; (-) strand; PAM type: YTN; PAM sequence: TTT
tcaagggggttacaatattt

SEQ ID NO: 54178 - DNA, 20 bp, Artificial Sequence
  Description of Artificial Sequence: Synthetic oligonucleotide
  Target: SCNA; (-) strand; PAM type: YTN; PAM sequence: TTC
ataacatacattttcaaggg

SEQ ID NO: 54179 - DNA, 20 bp, Artificial Sequence
  Description of Artificial Sequence: Synthetic oligonucleotide
  Target: SCNA; (-) strand; PAM type: YTN; PAM sequence: CTA
ttcataacatacattttcaa

SEQ ID NO: 54180 - DNA, 20 bp, Artificial Sequence
  Description of Artificial Sequence: Synthetic oligonucleotide
  Target: SCNA; (-) strand; PAM type: YTN; PAM sequence: CTA
caaaggctattcataacata

SEQ ID NO: 54181 - DNA, 20 bp, Artificial Sequence
  Description of Artificial Sequence: Synthetic oligonucleotide
  Target: SCNA; (-) strand; PAM type: YTN; PAM sequence: CTG
caaaaatatcacctacaaag

SEQ ID NO: 54182 - DNA, 20 bp, Artificial Sequence
  Description of Artificial Sequence: Synthetic oligonucleotide
  Target: SCNA; (-) strand; PAM type: YTN; PAM sequence: TTA
ccaaactgcaaaaatatcac

SEQ ID NO: 54183 - DNA, 20 bp, Artificial Sequence
  Description of Artificial Sequence: Synthetic oligonucleotide
  Target: SCNA; (-) strand; PAM type: YTN; PAM sequence: CTA
agttaccaaactgcaaaaat

SEQ ID NO: 54184 - DNA, 20 bp, Artificial Sequence
  Description of Artificial Sequence: Synthetic oligonucleotide
  Target: SCNA; (-) strand; PAM type: YTN; PAM sequence: TTG
tcctaagttaccaaactgca

SEQ ID NO: 54185 - DNA, 20 bp, Artificial Sequence
  Description of Artificial Sequence: Synthetic oligonucleotide
  Target: SCNA; (-) strand; PAM type: YTN; PAM sequence: CTT
gtcctaagttaccaaactgc

SEQ ID NO: 54186 - DNA, 20 bp, Artificial Sequence
  Description of Artificial Sequence: Synthetic oligonucleotide
  Target: SCNA; (-) strand; PAM type: YTN; PAM sequence: TTA
acaagggacaggaaaatgga

SEQ ID NO: 54187 - DNA, 20 bp, Artificial Sequence
  Description of Artificial Sequence: Synthetic oligonucleotide
  Target: SCNA; (-) strand; PAM type: YTN; PAM sequence: TTT
aacaagggacaggaaaatgg

SEQ ID NO: 54188 - DNA, 20 bp, Artificial Sequence
  Description of Artificial Sequence: Synthetic oligonucleotide
  Target: SCNA; (-) strand; PAM type: YTN; PAM sequence: TTG
tgacatttaacaagggacag

SEQ ID NO: 54189 - DNA, 20 bp, Artificial Sequence
  Description of Artificial Sequence: Synthetic oligonucleotide
  Target: SCNA; (-) strand; PAM type: YTN; PAM sequence: CTT
gtgacatttaacaagggaca

SEQ ID NO: 54190 - DNA, 20 bp, Artificial Sequence
  Description of Artificial Sequence: Synthetic oligonucleotide
  Target: SCNA; (-) strand; PAM type: YTN; PAM sequence: TTG
tgatatataggtagagaaga

SEQ ID NO: 54191 - DNA, 20 bp, Artificial Sequence
  Description of Artificial Sequence: Synthetic oligonucleotide
  Target: SCNA; (-) strand; PAM type: YTN; PAM sequence: TTT
gtgatatataggtagagaag

SEQ ID NO: 54192 - DNA, 20 bp, Artificial Sequence
  Description of Artificial Sequence: Synthetic oligonucleotide
  Target: SCNA; (-) strand; PAM type: YTN; PAM sequence: CTT
tgtgatatataggtagagaa

SEQ ID NO: 54193 - DNA, 20 bp, Artificial Sequence
  Description of Artificial Sequence: Synthetic oligonucleotide
  Target: SCNA; (-) strand; PAM type: YTN; PAM sequence: TTG
tgatcagcagagcagaaggt

SEQ ID NO: 54194 - DNA, 20 bp, Artificial Sequence
  Description of Artificial Sequence: Synthetic oligonucleotide
  Target: SCNA; (-) strand; PAM type: YTN; PAM sequence: CTT
gtgatcagcagagcagaagg

SEQ ID NO: 54195 - DNA, 20 bp, Artificial Sequence
  Description of Artificial Sequence: Synthetic oligonucleotide
  Target: SCNA; (-) strand; PAM type: YTN; PAM sequence: TTA
ccttgtgatcagcagagcag

SEQ ID NO: 54196 - DNA, 20 bp, Artificial Sequence
  Description of Artificial Sequence: Synthetic oligonucleotide
  Target: SCNA; (-) strand; PAM type: YTN; PAM sequence: TTA
attaccttgtgatcagcaga

SEQ ID NO: 54197 - DNA, 20 bp, Artificial Sequence
  Description of Artificial Sequence: Synthetic oligonucleotide
  Target: SCNA; (-) strand; PAM type: YTN; PAM sequence: CTT
aattaccttgtgatcagcag

SEQ ID NO: 54198 - DNA, 20 bp, Artificial Sequence
  Description of Artificial Sequence: Synthetic oligonucleotide
  Target: SCNA; (-) strand; PAM type: YTN; PAM sequence: CTC
caaaacttaattaccttgtg

SEQ ID NO: 54199 - DNA, 20 bp, Artificial Sequence
  Description of Artificial Sequence: Synthetic oligonucleotide
  Target: SCNA; (-) strand; PAM type: YTN; PAM sequence: CTC
cactccaaaacttaattacc

SEQ ID NO: 54200 - DNA, 20 bp, Artificial Sequence
  Description of Artificial Sequence: Synthetic oligonucleotide
  Target: SCNA; (-) strand; PAM type: YTN; PAM sequence: CTC
ctccactccaaaacttaatt

SEQ ID NO: 54201 - DNA, 20 bp, Artificial Sequence
  Description of Artificial Sequence: Synthetic oligonucleotide
  Target: SCNA; (-) strand; PAM type: YTN; PAM sequence: CTA
agacactcctccactccaaa

SEQ ID NO: 54202 - DNA, 20 bp, Artificial Sequence
  Description of Artificial Sequence: Synthetic oligonucleotide
  Target: SCNA; (-) strand; PAM type: YTN; PAM sequence: TTA
atgcatgaacataaacctaa

SEQ ID NO: 54203 - DNA, 20 bp, Artificial Sequence
  Description of Artificial Sequence: Synthetic oligonucleotide
  Target: SCNA; (-) strand; PAM type: YTN; PAM sequence: TTT
aatgcatgaacataaaccta

SEQ ID NO: 54204 - DNA, 20 bp, Artificial Sequence
  Description of Artificial Sequence: Synthetic oligonucleotide
  Target: SCNA; (-) strand; PAM type: YTN; PAM sequence: TTA
tatttaatgcatgaacataa

SEQ ID NO: 54205 - DNA, 20 bp, Artificial Sequence
  Description of Artificial Sequence: Synthetic oligonucleotide
  Target: SCNA; (-) strand; PAM type: YTN; PAM sequence: TTT
atatttaatgcatgaacata

SEQ ID NO: 54206 - DNA, 20 bp, Artificial Sequence
  Description of Artificial Sequence: Synthetic oligonucleotide
  Target: SCNA; (-) strand; PAM type: YTN; PAM sequence: CTT
tatatttaatgcatgaacat

SEQ ID NO: 54207 - DNA, 20 bp, Artificial Sequence
  Description of Artificial Sequence: Synthetic oligonucleotide
  Target: SCNA; (-) strand; PAM type: YTN; PAM sequence: TTC
tttatatttaatgcatgaac

SEQ ID NO: 54208 - DNA, 20 bp, Artificial Sequence
  Description of Artificial Sequence: Synthetic oligonucleotide
  Target: SCNA; (-) strand; PAM type: YTN; PAM sequence: TTT
ctttatatttaatgcatgaa

SEQ ID NO: 54209 - DNA, 20 bp, Artificial Sequence
  Description of Artificial Sequence: Synthetic oligonucleotide
  Target: SCNA; (-) strand; PAM type: YTN; PAM sequence: TTA
aaaatcatagatttctttat

SEQ ID NO: 54210 - DNA, 20 bp, Artificial Sequence
  Description of Artificial Sequence: Synthetic oligonucleotide
  Target: SCNA; (-) strand; PAM type: YTN; PAM sequence: TTT
aaaaatcatagatttcttta

SEQ ID NO: 54211 - DNA, 20 bp, Artificial Sequence
  Description of Artificial Sequence: Synthetic oligonucleotide
  Target: SCNA; (-) strand; PAM type: YTN; PAM sequence: TTT
taaaaatcatagatttcttt

SEQ ID NO: 54212 - DNA, 20 bp, Artificial Sequence
  Description of Artificial Sequence: Synthetic oligonucleotide
  Target: SCNA; (-) strand; PAM type: YTN; PAM sequence: TTT
ttaaaaatcatagatttctt

SEQ ID NO: 54213 - DNA, 20 bp, Artificial Sequence
  Description of Artificial Sequence: Synthetic oligonucleotide
  Target: SCNA; (-) strand; PAM type: YTN; PAM sequence: TTT
tttaaaaatcatagatttct

SEQ ID NO: 54214 - DNA, 20 bp, Artificial Sequence
  Description of Artificial Sequence: Synthetic oligonucleotide
  Target: SCNA; (-) strand; PAM type: YTN; PAM sequence: TTA
attttttaaaaatcatagat

SEQ ID NO: 54215 - DNA, 20 bp, Artificial Sequence
  Description of Artificial Sequence: Synthetic oligonucleotide
  Target: SCNA; (-) strand; PAM type: YTN; PAM sequence: CTC
aatatagttaattttttaaa

SEQ ID NO: 54216 - DNA, 20 bp, Artificial Sequence
  Description of Artificial Sequence: Synthetic oligonucleotide
  Target: SCNA; (-) strand; PAM type: YTN; PAM sequence: TTA
tacctcaatatagttaattt

SEQ ID NO: 54217 - DNA, 20 bp, Artificial Sequence
  Description of Artificial Sequence: Synthetic oligonucleotide
  Target: SCNA; (-) strand; PAM type: YTN; PAM sequence: TTG
taagtgaattatacctcaat

SEQ ID NO: 54218 - DNA, 20 bp, Artificial Sequence
  Description of Artificial Sequence: Synthetic oligonucleotide
  Target: SCNA; (-) strand; PAM type: YTN; PAM sequence: TTA
aaatgagtgcatatgattgt

SEQ ID NO: 54219 - DNA, 20 bp, Artificial Sequence
  Description of Artificial Sequence: Synthetic oligonucleotide
  Target: SCNA; (-) strand; PAM type: YTN; PAM sequence: TTT
aaaatgagtgcatatgattg

SEQ ID NO: 54220 - DNA, 20 bp, Artificial Sequence
  Description of Artificial Sequence: Synthetic oligonucleotide
  Target: SCNA; (-) strand; PAM type: YTN; PAM sequence: CTC
aagaaatgtacatttaaaat

SEQ ID NO: 54221 - DNA, 20 bp, Artificial Sequence
  Description of Artificial Sequence: Synthetic oligonucleotide
  Target: SCNA; (-) strand; PAM type: YTN; PAM sequence: TTA
atgcatcaaaactcaagaaa

SEQ ID NO: 54222 - DNA, 20 bp, Artificial Sequence
  Description of Artificial Sequence: Synthetic oligonucleotide
  Target: SCNA; (-) strand; PAM type: YTN; PAM sequence: TTA
ttaatgcatcaaaactcaag

SEQ ID NO: 54223 - DNA, 20 bp, Artificial Sequence
  Description of Artificial Sequence: Synthetic oligonucleotide
  Target: SCNA; (-) strand; PAM type: YTN; PAM sequence: TTT
attaatgcatcaaaactcaa

SEQ ID NO: 54224 - DNA, 20 bp, Artificial Sequence
  Description of Artificial Sequence: Synthetic oligonucleotide
  Target: SCNA; (-) strand; PAM type: YTN; PAM sequence: TTA
catgggtttattaatgcatc

SEQ ID NO: 54225 - DNA, 20 bp, Artificial Sequence
  Description of Artificial Sequence: Synthetic oligonucleotide
  Target: SCNA; (-) strand; PAM type: YTN; PAM sequence: TTG
tggtggtcgttacatgggtt

SEQ ID NO: 54226 - DNA, 20 bp, Artificial Sequence
  Description of Artificial Sequence: Synthetic oligonucleotide
  Target: SCNA; (-) strand; PAM type: YTN; PAM sequence: CTC
aattgtggtggtcgttacat

SEQ ID NO: 54227 - DNA, 20 bp, Artificial Sequence
  Description of Artificial Sequence: Synthetic oligonucleotide
  Target: SCNA; (-) strand; PAM type: YTN; PAM sequence: TTC
tcaattgtggtggtcgttac

SEQ ID NO: 54228 - DNA, 20 bp, Artificial Sequence
  Description of Artificial Sequence: Synthetic oligonucleotide
  Target: SCNA; (-) strand; PAM type: YTN; PAM sequence: TTT
ctcaattgtggtggtcgtta

SEQ ID NO: 54229 - DNA, 20 bp, Artificial Sequence
  Description of Artificial Sequence: Synthetic oligonucleotide
  Target: SCNA; (-) strand; PAM type: YTN; PAM sequence: TTG
gggaaaataatgaagatata

SEQ ID NO: 54230 - DNA, 20 bp, Artificial Sequence
  Description of Artificial Sequence: Synthetic oligonucleotide
  Target: SCNA; (-) strand; PAM type: YTN; PAM sequence: CTA
gaaaaaggcacaaaggaaaa

SEQ ID NO: 54231 - DNA, 20 bp, Artificial Sequence
  Description of Artificial Sequence: Synthetic oligonucleotide
  Target: SCNA; (-) strand; PAM type: YTN; PAM sequence: TTA
actagaaaaaggcacaaagg

SEQ ID NO: 54232 - DNA, 20 bp, Artificial Sequence
  Description of Artificial Sequence: Synthetic oligonucleotide
  Target: SCNA; (-) strand; PAM type: YTN; PAM sequence: CTG
gggtggaggtggaggagaag

SEQ ID NO: 54233 - DNA, 20 bp, Artificial Sequence
  Description of Artificial Sequence: Synthetic oligonucleotide
  Target: SCNA; (-) strand; PAM type: YTN; PAM sequence: CTA
cccccatggggctggggtgg

SEQ ID NO: 54234 - DNA, 20 bp, Artificial Sequence
  Description of Artificial Sequence: Synthetic oligonucleotide
  Target: SCNA; (-) strand; PAM type: YTN; PAM sequence: TTC
atggctacccccatggggct

SEQ ID NO: 54235 - DNA, 20 bp, Artificial Sequence
  Description of Artificial Sequence: Synthetic oligonucleotide
  Target: SCNA; (-) strand; PAM type: YTN; PAM sequence: CTT
catggctacccccatggggc

SEQ ID NO: 54236 - DNA, 20 bp, Artificial Sequence
  Description of Artificial Sequence: Synthetic oligonucleotide
  Target: SCNA; (-) strand; PAM type: YTN; PAM sequence: TTG
gagagaaaagatccaagagg

SEQ ID NO: 54237 - DNA, 20 bp, Artificial Sequence
  Description of Artificial Sequence: Synthetic oligonucleotide
  Target: SCNA; (-) strand; PAM type: YTN; PAM sequence: CTA
attggagagaaaagatccaa

SEQ ID NO: 54238 - DNA, 20 bp, Artificial Sequence
  Description of Artificial Sequence: Synthetic oligonucleotide
  Target: SCNA; (-) strand; PAM type: YTN; PAM sequence: CTG
gcagctaattggagagaaaa

SEQ ID NO: 54239 - DNA, 20 bp, Artificial Sequence
  Description of Artificial Sequence: Synthetic oligonucleotide
  Target: SCNA; (-) strand; PAM type: YTN; PAM sequence: CTC
ctggcagctaattggagaga

SEQ ID NO: 54240 - DNA, 20 bp, Artificial Sequence
  Description of Artificial Sequence: Synthetic oligonucleotide
  Target: SCNA; (-) strand; PAM type: YTN; PAM sequence: CTG
cagcaggaggccaatagcac

SEQ ID NO: 54241 - DNA, 20 bp, Artificial Sequence
  Description of Artificial Sequence: Synthetic oligonucleotide
  Target: SCNA; (-) strand; PAM type: YTN; PAM sequence: CTG
ctgcagcaggaggccaatag

SEQ ID NO: 54242 - DNA, 20 bp, Artificial Sequence
  Description of Artificial Sequence: Synthetic oligonucleotide
  Target: SCNA; (-) strand; PAM type: YTN; PAM sequence: TTG
ctgctgcagcaggaggccaa

SEQ ID NO: 54243 - DNA, 20 bp, Artificial Sequence
  Description of Artificial Sequence: Synthetic oligonucleotide
  Target: SCNA; (-) strand; PAM type: YTN; PAM sequence: CTG
tggtggatcccattgctgct

SEQ ID NO: 54244 - DNA, 20 bp, Artificial Sequence
  Description of Artificial Sequence: Synthetic oligonucleotide
  Target: SCNA; (-) strand; PAM type: YTN; PAM sequence: CTG
tgctgtggtggatcccattg

SEQ ID NO: 54245 - DNA, 20 bp, Artificial Sequence
  Description of Artificial Sequence: Synthetic oligonucleotide
  Target: SCNA; (-) strand; PAM type: YTN; PAM sequence: TTC
ctgtgctgtggtggatccca

SEQ ID NO: 54246 - DNA, 20 bp, Artificial Sequence
  Description of Artificial Sequence: Synthetic oligonucleotide
  Target: SCNA; (-) strand; PAM type: YTN; PAM sequence: CTG
ggttcctgtgctgtggtgga

SEQ ID NO: 54247 - DNA, 20 bp, Artificial Sequence
  Description of Artificial Sequence: Synthetic oligonucleotide
  Target: SCNA; (-) strand; PAM type: YTN; PAM sequence: CTG
gaggccagtctgggttcctg

SEQ ID NO: 54248 - DNA, 20 bp, Artificial Sequence
  Description of Artificial Sequence: Synthetic oligonucleotide
  Target: SCNA; (-) strand; PAM type: YTN; PAM sequence: TTG
gctggaggccagtctgggtt

SEQ ID NO: 54249 - DNA, 20 bp, Artificial Sequence
  Description of Artificial Sequence: Synthetic oligonucleotide
  Target: SCNA; (-) strand; PAM type: YTN; PAM sequence: CTC
ccagtcattggctggaggcc

SEQ ID NO: 54250 - DNA, 20 bp, Artificial Sequence
  Description of Artificial Sequence: Synthetic oligonucleotide
  Target: SCNA; (-) strand; PAM type: YTN; PAM sequence: CTG
ctcccagtcattggctggag

SEQ ID NO: 54251 - DNA, 20 bp, Artificial Sequence
  Description of Artificial Sequence: Synthetic oligonucleotide
  Target: SCNA; (-) strand; PAM type: YTN; PAM sequence: TTG
ctgctcccagtcattggctg

SEQ ID NO: 54252 - DNA, 20 bp, Artificial Sequence
  Description of Artificial Sequence: Synthetic oligonucleotide
  Target: SCNA; (-) strand; PAM type: YTN; PAM sequence: CTT
gctgctcccagtcattggct

SEQ ID NO: 54253 - DNA, 20 bp, Artificial Sequence
  Description of Artificial Sequence: Synthetic oligonucleotide
  Target: SCNA; (-) strand; PAM type: YTN; PAM sequence: TTC
cttgctgctcccagtcattg

SEQ ID NO: 54254 - DNA, 20 bp, Artificial Sequence
  Description of Artificial Sequence: Synthetic oligonucleotide
  Target: SCNA; (-) strand; PAM type: YTN; PAM sequence: TTT
ccttgctgctcccagtcatt

SEQ ID NO: 54255 - DNA, 20 bp, Artificial Sequence
  Description of Artificial Sequence: Synthetic oligonucleotide
  Target: SCNA; (-) strand; PAM type: YTN; PAM sequence: CTG
tagtttccttgctgctccca

SEQ ID NO: 54256 - DNA, 20 bp, Artificial Sequence
  Description of Artificial Sequence: Synthetic oligonucleotide
  Target: SCNA; (-) strand; PAM type: YTN; PAM sequence: CTG
ggctgtagtttccttgctgc

SEQ ID NO: 54257 - DNA, 20 bp, Artificial Sequence
  Description of Artificial Sequence: Synthetic oligonucleotide
  Target: SCNA; (-) strand; PAM type: YTN; PAM sequence: TTA
ggcagacatgtctgggctgt

SEQ ID NO: 54258 - DNA, 20 bp, Artificial Sequence
  Description of Artificial Sequence: Synthetic oligonucleotide
  Target: SCNA; (-) strand; PAM type: YTN; PAM sequence: TTG
aggagtcatgcattaggcag

SEQ ID NO: 54259 - DNA, 20 bp, Artificial Sequence
  Description of Artificial Sequence: Synthetic oligonucleotide
  Target: SCNA; (-) strand; PAM type: YTN; PAM sequence: TTG
ttgaggagtcatgcattagg

SEQ ID NO: 54260 - DNA, 20 bp, Artificial Sequence
  Description of Artificial Sequence: Synthetic oligonucleotide
  Target: SCNA; (-) strand; PAM type: YTN; PAM sequence: CTT
gttgaggagtcatgcattag

SEQ ID NO: 54261 - DNA, 20 bp, Artificial Sequence
  Description of Artificial Sequence: Synthetic oligonucleotide
  Target: SCNA; (-) strand; PAM type: YTN; PAM sequence: TTA
cttgttgaggagtcatgcat

SEQ ID NO: 54262 - DNA, 20 bp, Artificial Sequence
  Description of Artificial Sequence: Synthetic oligonucleotide
  Target: SCNA; (-) strand; PAM type: YTN; PAM sequence: TTC
caacaaaggttacttgttga

SEQ ID NO: 54263 - DNA, 20 bp, Artificial Sequence
  Description of Artificial Sequence: Synthetic oligonucleotide
  Target: SCNA; (-) strand; PAM type: YTN; PAM sequence: CTT
ccaacaaaggttacttgttg

SEQ ID NO: 54264 - DNA, 20 bp, Artificial Sequence
  Description of Artificial Sequence: Synthetic oligonucleotide
  Target: SCNA; (-) strand; PAM type: YTN; PAM sequence: TTG
gcttccaacaaaggttactt

SEQ ID NO: 54265 - DNA, 20 bp, Artificial Sequence
  Description of Artificial Sequence: Synthetic oligonucleotide
  Target: SCNA; (-) strand; PAM type: YTN; PAM sequence: CTT
ggcttccaacaaaggttact

SEQ ID NO: 54266 - DNA, 20 bp, Artificial Sequence
  Description of Artificial Sequence: Synthetic oligonucleotide
  Target: SCNA; (-) strand; PAM type: YTN; PAM sequence: TTA
caagaaagtcttggcttcca

SEQ ID NO: 54267 - DNA, 20 bp, Artificial Sequence
  Description of Artificial Sequence: Synthetic oligonucleotide
  Target: SCNA; (-) strand; PAM type: YTN; PAM sequence: TTA
cagtgcagttacaagaaagt

SEQ ID NO: 54268 - DNA, 20 bp, Artificial Sequence
  Description of Artificial Sequence: Synthetic oligonucleotide
  Target: SCNA; (-) strand; PAM type: YTN; PAM sequence: TTG
ggtaggaatagccacagatt

SEQ ID NO: 54269 - DNA, 20 bp, Artificial Sequence
  Description of Artificial Sequence: Synthetic oligonucleotide
  Target: SCNA; (-) strand; PAM type: YTN; PAM sequence: TTC
aaagggaggcagaaggaagg

SEQ ID NO: 54270 - DNA, 20 bp, Artificial Sequence
  Description of Artificial Sequence: Synthetic oligonucleotide
  Target: SCNA; (-) strand; PAM type: YTN; PAM sequence: CTT
caaagggaggcagaaggaag

SEQ ID NO: 54271 - DNA, 20 bp, Artificial Sequence
  Description of Artificial Sequence: Synthetic oligonucleotide
  Target: SCNA; (-) strand; PAM type: YTN; PAM sequence: TTG
tgatatcacttcaaagggag

SEQ ID NO: 54272 - DNA, 20 bp, Artificial Sequence
  Description of Artificial Sequence: Synthetic oligonucleotide
  Target: SCNA; (-) strand; PAM type: YTN; PAM sequence: CTA
tgaaaggtagaaagagaaca

SEQ ID NO: 54273 - DNA, 20 bp, Artificial Sequence
  Description of Artificial Sequence: Synthetic oligonucleotide
  Target: SCNA; (-) strand; PAM type: YTN; PAM sequence: TTG
caggcaatagctatgaaagg

SEQ ID NO: 54274 - DNA, 20 bp, Artificial Sequence
  Description of Artificial Sequence: Synthetic oligonucleotide
  Target: SCNA; (-) strand; PAM type: YTN; PAM sequence: TTA
ttgcaggcaatagctatgaa

SEQ ID NO: 54275 - DNA, 20 bp, Artificial Sequence
  Description of Artificial Sequence: Synthetic oligonucleotide
  Target: SCNA; (-) strand; PAM type: YTN; PAM sequence: TTT
attgcaggcaatagctatga

SEQ ID NO: 54276 - DNA, 20 bp, Artificial Sequence
  Description of Artificial Sequence: Synthetic oligonucleotide
  Target: SCNA; (-) strand; PAM type: YTN; PAM sequence: TTA
caaccatccacaagagattt

SEQ ID NO: 54277 - DNA, 20 bp, Artificial Sequence
  Description of Artificial Sequence: Synthetic oligonucleotide
  Target: SCNA; (-) strand; PAM type: YTN; PAM sequence: TTA
gaattacaaccatccacaag

SEQ ID NO: 54278 - DNA, 20 bp, Artificial Sequence
  Description of Artificial Sequence: Synthetic oligonucleotide
  Target: SCNA; (-) strand; PAM type: YTN; PAM sequence: TTC
caagatggtgttagaattac

SEQ ID NO: 54279 - DNA, 20 bp, Artificial Sequence
  Description of Artificial Sequence: Synthetic oligonucleotide
  Target: SCNA; (-) strand; PAM type: YTN; PAM sequence: CTG
attccaagatggtgttagaa

SEQ ID NO: 54280 - DNA, 20 bp, Artificial Sequence
  Description of Artificial Sequence: Synthetic oligonucleotide
  Target: SCNA; (-) strand; PAM type: YTN; PAM sequence: TTC
aggaagctgattccaagatg

SEQ ID NO: 54281 - DNA, 20 bp, Artificial Sequence
  Description of Artificial Sequence: Synthetic oligonucleotide
  Target: SCNA; (-) strand; PAM type: YTN; PAM sequence: TTC
agtcattcaggaagctgatt

SEQ ID NO: 54282 - DNA, 20 bp, Artificial Sequence
  Description of Artificial Sequence: Synthetic oligonucleotide
  Target: SCNA; (-) strand; PAM type: YTN; PAM sequence: CTG
gaggtagaggcatcagttca

SEQ ID NO: 54283 - DNA, 20 bp, Artificial Sequence
  Description of Artificial Sequence: Synthetic oligonucleotide
  Target: SCNA; (-) strand; PAM type: YTN; PAM sequence: TTG
ctggaggtagaggcatcagt

SEQ ID NO: 54284 - DNA, 20 bp, Artificial Sequence
  Description of Artificial Sequence: Synthetic oligonucleotide
  Target: SCNA; (-) strand; PAM type: YTN; PAM sequence: CTT
gctggaggtagaggcatcag

SEQ ID NO: 54285 - DNA, 20 bp, Artificial Sequence
  Description of Artificial Sequence: Synthetic oligonucleotide
  Target: SCNA; (-) strand; PAM type: YTN; PAM sequence: TTC
cagaaaagacaaatgtcatc

SEQ ID NO: 54286 - DNA, 20 bp, Artificial Sequence
  Description of Artificial Sequence: Synthetic oligonucleotide
  Target: SCNA; (-) strand; PAM type: YTN; PAM sequence: CTA
taattccagaaaagacaaat

SEQ ID NO: 54287 - DNA, 20 bp, Artificial Sequence
  Description of Artificial Sequence: Synthetic oligonucleotide
  Target: SCNA; (-) strand; PAM type: YTN; PAM sequence: CTG
tgtgatgccaggcacaaatc

SEQ ID NO: 54288 - DNA, 20 bp, Artificial Sequence
  Description of Artificial Sequence: Synthetic oligonucleotide
  Target: SCNA; (-) strand; PAM type: YTN; PAM sequence: CTA
tcatgctgtgtgatgccagg

SEQ ID NO: 54289 - DNA, 20 bp, Artificial Sequence
  Description of Artificial Sequence: Synthetic oligonucleotide
  Target: SCNA; (-) strand; PAM type: YTN; PAM sequence: CTC
aaaactatcatgctgtgtga

SEQ ID NO: 54290 - DNA, 20 bp, Artificial Sequence
  Description of Artificial Sequence: Synthetic oligonucleotide
  Target: SCNA; (-) strand; PAM type: YTN; PAM sequence: CTC
aacaacatggatgaatctca

SEQ ID NO: 54291 - DNA, 20 bp, Artificial Sequence
  Description of Artificial Sequence: Synthetic oligonucleotide
  Target: SCNA; (-) strand; PAM type: YTN; PAM sequence: CTG
ataacctcaacaacatggat

SEQ ID NO: 54292 - DNA, 20 bp, Artificial Sequence
  Description of Artificial Sequence: Synthetic oligonucleotide
  Target: SCNA; (-) strand; PAM type: YTN; PAM sequence: CTA
ctgataacctcaacaacatg

SEQ ID NO: 54293 - DNA, 20 bp, Artificial Sequence
  Description of Artificial Sequence: Synthetic oligonucleotide
  Target: SCNA; (-) strand; PAM type: YTN; PAM sequence: TTA
gcaacaaaaatggaatggac

SEQ ID NO: 54294 - DNA, 20 bp, Artificial Sequence
  Description of Artificial Sequence: Synthetic oligonucleotide
  Target: SCNA; (-) strand; PAM type: YTN; PAM sequence: CTT
agcaacaaaaatggaatgga

SEQ ID NO: 54295 - DNA, 20 bp, Artificial Sequence
  Description of Artificial Sequence: Synthetic oligonucleotide
  Target: SCNA; (-) strand; PAM type: YTN; PAM sequence: CTA
cttagcaacaaaaatggaat

SEQ ID NO: 54296 - DNA, 20 bp, Artificial Sequence
  Description of Artificial Sequence: Synthetic oligonucleotide
  Target: SCNA; (-) strand; PAM type: YTN; PAM sequence: TTC
atacagcagaatactactta

SEQ ID NO: 54297 - DNA, 20 bp, Artificial Sequence
  Description of Artificial Sequence: Synthetic oligonucleotide
  Target: SCNA; (-) strand; PAM type: YTN; PAM sequence: CTG
tattcatacagcagaatact

SEQ ID NO: 54298 - DNA, 20 bp, Artificial Sequence
  Description of Artificial Sequence: Synthetic oligonucleotide
  Target: SCNA; (-) strand; PAM type: YTN; PAM sequence: TTG
tgctgtattcatacagcaga

SEQ ID NO: 54299 - DNA, 20 bp, Artificial Sequence
  Description of Artificial Sequence: Synthetic oligonucleotide
  Target: SCNA; (-) strand; PAM type: YTN; PAM sequence: CTG
gtaacaacacaataatcaat

SEQ ID NO: 54300 - DNA, 20 bp, Artificial Sequence
  Description of Artificial Sequence: Synthetic oligonucleotide
  Target: SCNA; (-) strand; PAM type: YTN; PAM sequence: CTA
actggtaacaacacaataat

SEQ ID NO: 54301 - DNA, 20 bp, Artificial Sequence
  Description of Artificial Sequence: Synthetic oligonucleotide
  Target: SCNA; (-) strand; PAM type: YTN; PAM sequence: CTC
taactggtaacaacacaata

SEQ ID NO: 54302 - DNA, 20 bp, Artificial Sequence
  Description of Artificial Sequence: Synthetic oligonucleotide
  Target: SCNA; (-) strand; PAM type: YTN; PAM sequence: TTA
atagctctaactggtaacaa

SEQ ID NO: 54303 - DNA, 20 bp, Artificial Sequence
  Description of Artificial Sequence: Synthetic oligonucleotide
  Target: SCNA; (-) strand; PAM type: YTN; PAM sequence: CTT
aatagctctaactggtaaca

SEQ ID NO: 54304 - DNA, 20 bp, Artificial Sequence
  Description of Artificial Sequence: Synthetic oligonucleotide
  Target: SCNA; (-) strand; PAM type: YTN; PAM sequence: CTC
ttaatagctctaactggtaa

SEQ ID NO: 54305 - DNA, 20 bp, Artificial Sequence
  Description of Artificial Sequence: Synthetic oligonucleotide
  Target: SCNA; (-) strand; PAM type: YTN; PAM sequence: TTA
ctcttaatagctctaactgg

SEQ ID NO: 54306 - DNA, 20 bp, Artificial Sequence
  Description of Artificial Sequence: Synthetic oligonucleotide
  Target: SCNA; (-) strand; PAM type: YTN; PAM sequence: TTC
acgatagcattactcttaat

SEQ ID NO: 54307 - DNA, 20 bp, Artificial Sequence
  Description of Artificial Sequence: Synthetic oligonucleotide
  Target: SCNA; (-) strand; PAM type: YTN; PAM sequence: TTA
ttcacgatagcattactctt

SEQ ID NO: 54308 - DNA, 20 bp, Artificial Sequence
  Description of Artificial Sequence: Synthetic oligonucleotide
  Target: SCNA; (-) strand; PAM type: YTN; PAM sequence: TTG
tacagaattattcacgatag

SEQ ID NO: 54309 - DNA, 20 bp, Artificial Sequence
  Description of Artificial Sequence: Synthetic oligonucleotide
  Target: SCNA; (-) strand; PAM type: YTN; PAM sequence: CTT
gtacagaattattcacgata

SEQ ID NO: 54310 - DNA, 20 bp, Artificial Sequence
  Description of Artificial Sequence: Synthetic oligonucleotide
  Target: SCNA; (-) strand; PAM type: YTN; PAM sequence: TTC
atacaatgacttgtacagaa

SEQ ID NO: 54311 - DNA, 20 bp, Artificial Sequence
  Description of Artificial Sequence: Synthetic oligonucleotide
  Target: SCNA; (-) strand; PAM type: YTN; PAM sequence: TTA
atggaagcatatgttcatac

SEQ ID NO: 54312 - DNA, 20 bp, Artificial Sequence
  Description of Artificial Sequence: Synthetic oligonucleotide
  Target: SCNA; (-) strand; PAM type: YTN; PAM sequence: TTA
agattaatggaagcatatgt

SEQ ID NO: 54313 - DNA, 20 bp, Artificial Sequence
  Description of Artificial Sequence: Synthetic oligonucleotide
  Target: SCNA; (-) strand; PAM type: YTN; PAM sequence: CTT
aagattaatggaagcatatg

SEQ ID NO: 54314 - DNA, 20 bp, Artificial Sequence
  Description of Artificial Sequence: Synthetic oligonucleotide
  Target: SCNA; (-) strand; PAM type: YTN; PAM sequence: TTA
cttaagattaatggaagcat

SEQ ID NO: 54315 - DNA, 20 bp, Artificial Sequence
  Description of Artificial Sequence: Synthetic oligonucleotide
  Target: SCNA; (-) strand; PAM type: YTN; PAM sequence: TTT
acttaagattaatggaagca

SEQ ID NO: 54316 - DNA, 20 bp, Artificial Sequence
  Description of Artificial Sequence: Synthetic oligonucleotide
  Target: SCNA; (-) strand; PAM type: YTN; PAM sequence: CTA
ggtatttacttaagattaat

SEQ ID NO: 54317 - DNA, 20 bp, Artificial Sequence
  Description of Artificial Sequence: Synthetic oligonucleotide
  Target: SCNA; (-) strand; PAM type: YTN; PAM sequence: CTA
cccctaggtatttacttaag

SEQ ID NO: 54318 - DNA, 20 bp, Artificial Sequence
  Description of Artificial Sequence: Synthetic oligonucleotide
  Target: SCNA; (-) strand; PAM type: YTN; PAM sequence: TTC
tacccctaggtatttactta

SEQ ID NO: 54319 - DNA, 20 bp, Artificial Sequence
  Description of Artificial Sequence: Synthetic oligonucleotide
  Target: SCNA; (-) strand; PAM type: YTN; PAM sequence: CTG
taagttctacccctaggtat

SEQ ID NO: 54320 - DNA, 20 bp, Artificial Sequence
  Description of Artificial Sequence: Synthetic oligonucleotide
  Target: SCNA; (-) strand; PAM type: YTN; PAM sequence: TTC
atctgtaagttctaccccta

SEQ ID NO: 54321 - DNA, 20 bp, Artificial Sequence
  Description of Artificial Sequence: Synthetic oligonucleotide
  Target: SCNA; (-) strand; PAM type: YTN; PAM sequence: CTT
catctgtaagttctacccct

SEQ ID NO: 54322 - DNA, 20 bp, Artificial Sequence
  Description of Artificial Sequence: Synthetic oligonucleotide
  Target: SCNA; (-) strand; PAM type: YTN; PAM sequence: TTC
ttcatctgtaagttctaccc

SEQ ID NO: 54323 - DNA, 20 bp, Artificial Sequence
  Description of Artificial Sequence: Synthetic oligonucleotide
  Target: SCNA; (-) strand; PAM type: YTN; PAM sequence: TTT
cttcatctgtaagttctacc

SEQ ID NO: 54324 - DNA, 20 bp, Artificial Sequence
  Description of Artificial Sequence: Synthetic oligonucleotide
  Target: SCNA; (-) strand; PAM type: YTN; PAM sequence: CTG
tttcttcatctgtaagttct

SEQ ID NO: 54325 - DNA, 20 bp, Artificial Sequence
  Description of Artificial Sequence: Synthetic oligonucleotide
  Target: SCNA; (-) strand; PAM type: YTN; PAM sequence: TTC
tgtttcttcatctgtaagtt

SEQ ID NO: 54326 - DNA, 20 bp, Artificial Sequence
  Description of Artificial Sequence: Synthetic oligonucleotide
  Target: SCNA; (-) strand; PAM type: YTN; PAM sequence: CTT
ctgtttcttcatctgtaagt

SEQ ID NO: 54327 - DNA, 20 bp, Artificial Sequence
  Description of Artificial Sequence: Synthetic oligonucleotide
  Target: SCNA; (-) strand; PAM type: YTN; PAM sequence: CTG
tacttctgtttcttcatctg

SEQ ID NO: 54328 - DNA, 20 bp, Artificial Sequence
  Description of Artificial Sequence: Synthetic oligonucleotide
  Target: SCNA; (-) strand; PAM type: YTN; PAM sequence: TTA
catgctgtacttctgtttct

SEQ ID NO: 54329 - DNA, 20 bp, Artificial Sequence
  Description of Artificial Sequence: Synthetic oligonucleotide
  Target: SCNA; (-) strand; PAM type: YTN; PAM sequence: CTT
acatgctgtacttctgtttc

SEQ ID NO: 54330 - DNA, 20 bp, Artificial Sequence
  Description of Artificial Sequence: Synthetic oligonucleotide
  Target: SCNA; (-) strand; PAM type: YTN; PAM sequence: TTG
tgcaaagtcacttacatgct

SEQ ID NO: 54331 - DNA, 20 bp, Artificial Sequence
  Description of Artificial Sequence: Synthetic oligonucleotide
  Target: SCNA; (-) strand; PAM type: YTN; PAM sequence: CTT
gtgcaaagtcacttacatgc

SEQ ID NO: 54332 - DNA, 20 bp, Artificial Sequence
  Description of Artificial Sequence: Synthetic oligonucleotide
  Target: SCNA; (-) strand; PAM type: YTN; PAM sequence: CTA
cttgtgcaaagtcacttaca

SEQ ID NO: 54333 - DNA, 20 bp, Artificial Sequence
  Description of Artificial Sequence: Synthetic oligonucleotide
  Target: SCNA; (-) strand; PAM type: YTN; PAM sequence: CTG
cctacttgtgcaaagtcact

SEQ ID NO: 54334 - DNA, 20 bp, Artificial Sequence
  Description of Artificial Sequence: Synthetic oligonucleotide
  Target: SCNA; (-) strand; PAM type: YTN; PAM sequence: CTG
tgctgcctacttgtgcaaag

SEQ ID NO: 54335 - DNA, 20 bp, Artificial Sequence
  Description of Artificial Sequence: Synthetic oligonucleotide
  Target: SCNA; (-) strand; PAM type: YTN; PAM sequence: TTA
aagtcagaaaacctgtgctg

SEQ ID NO: 54336 - DNA, 20 bp, Artificial Sequence
  Description of Artificial Sequence: Synthetic oligonucleotide
  Target: SCNA; (-) strand; PAM type: YTN; PAM sequence: TTT
aaagtcagaaaacctgtgct

SEQ ID NO: 54337 - DNA, 20 bp, Artificial Sequence
  Description of Artificial Sequence: Synthetic oligonucleotide
  Target: SCNA; (-) strand; PAM type: YTN; PAM sequence: TTA
agagcatagatttaaagtca

SEQ ID NO: 54338 - DNA, 20 bp, Artificial Sequence
  Description of Artificial Sequence: Synthetic oligonucleotide
  Target: SCNA; (-) strand; PAM type: YTN; PAM sequence: TTC
ccatgaagaacaatacggca

SEQ ID NO: 54339 - DNA, 20 bp, Artificial Sequence
  Description of Artificial Sequence: Synthetic oligonucleotide
  Target: SCNA; (-) strand; PAM type: YTN; PAM sequence: CTT
cccatgaagaacaatacggc

SEQ ID NO: 54340 - DNA, 20 bp, Artificial Sequence
  Description of Artificial Sequence: Synthetic oligonucleotide
  Target: SCNA; (-) strand; PAM type: YTN; PAM sequence: TTC
ttcccatgaagaacaatacg

SEQ ID NO: 54341 - DNA, 20 bp, Artificial Sequence
  Description of Artificial Sequence: Synthetic oligonucleotide
  Target: SCNA; (-) strand; PAM type: YTN; PAM sequence: TTT
cttcccatgaagaacaatac

SEQ ID NO: 54342 - DNA, 20 bp, Artificial Sequence
  Description of Artificial Sequence: Synthetic oligonucleotide
  Target: SCNA; (-) strand; PAM type: YTN; PAM sequence: TTT
tcttcccatgaagaacaata

SEQ ID NO: 54343 - DNA, 20 bp, Artificial Sequence
  Description of Artificial Sequence: Synthetic oligonucleotide
  Target: SCNA; (-) strand; PAM type: YTN; PAM sequence: CTT
ttcttcccatgaagaacaat

SEQ ID NO: 54344 - DNA, 20 bp, Artificial Sequence
  Description of Artificial Sequence: Synthetic oligonucleotide
  Target: SCNA; (-) strand; PAM type: YTN; PAM sequence: TTA
aatgggtcaagaaaaatagc

SEQ ID NO: 54345 - DNA, 20 bp, Artificial Sequence
  Description of Artificial Sequence: Synthetic oligonucleotide
  Target: SCNA; (-) strand; PAM type: YTN; PAM sequence: TTT
aaatgggtcaagaaaaatag

SEQ ID NO: 54346 - DNA, 20 bp, Artificial Sequence
  Description of Artificial Sequence: Synthetic oligonucleotide
  Target: SCNA; (-) strand; PAM type: YTN; PAM sequence: TTA
tggaaagtttaaatgggtca

SEQ ID NO: 54347 - DNA, 20 bp, Artificial Sequence
  Description of Artificial Sequence: Synthetic oligonucleotide
  Target: SCNA; (-) strand; PAM type: YTN; PAM sequence: TTA
aacattatggaaagtttaaa

SEQ ID NO: 54348 - DNA, 20 bp, Artificial Sequence
  Description of Artificial Sequence: Synthetic oligonucleotide
  Target: SCNA; (-) strand; PAM type: YTN; PAM sequence: TTG
attaaacattatggaaagtt

SEQ ID NO: 54349 - DNA, 20 bp, Artificial Sequence
  Description of Artificial Sequence: Synthetic oligonucleotide
  Target: SCNA; (-) strand; PAM type: YTN; PAM sequence: TTT
gattaaacattatggaaagt

SEQ ID NO: 54350 - DNA, 20 bp, Artificial Sequence
  Description of Artificial Sequence: Synthetic oligonucleotide
  Target: SCNA; (-) strand; PAM type: YTN; PAM sequence: TTT
tgattaaacattatggaaag

SEQ ID NO: 54351 - DNA, 20 bp, Artificial Sequence
  Description of Artificial Sequence: Synthetic oligonucleotide
  Target: SCNA; (-) strand; PAM type: YTN; PAM sequence: TTG
aatattttgattaaacatta

SEQ ID NO: 54352 - DNA, 20 bp, Artificial Sequence
  Description of Artificial Sequence: Synthetic oligonucleotide
  Target: SCNA; (-) strand; PAM type: YTN; PAM sequence: TTA
aatattgaatattttgatta

SEQ ID NO: 54353 - DNA, 20 bp, Artificial Sequence
  Description of Artificial Sequence: Synthetic oligonucleotide
  Target: SCNA; (-) strand; PAM type: YTN; PAM sequence: CTT
aaatattgaatattttgatt

SEQ ID NO: 54354 - DNA, 20 bp, Artificial Sequence
  Description of Artificial Sequence: Synthetic oligonucleotide
  Target: SCNA; (-) strand; PAM type: YTN; PAM sequence: TTA
acttaaatattgaatatttt

SEQ ID NO: 54355 - DNA, 20 bp, Artificial Sequence
  Description of Artificial Sequence: Synthetic oligonucleotide
  Target: SCNA; (-) strand; PAM type: YTN; PAM sequence: TTT
aacttaaatattgaatattt

SEQ ID NO: 54356 - DNA, 20 bp, Artificial Sequence
  Description of Artificial Sequence: Synthetic oligonucleotide
  Target: SCNA; (-) strand; PAM type: YTN; PAM sequence: TTT
taacttaaatattgaatatt

SEQ ID NO: 54357 - DNA, 20 bp, Artificial Sequence
  Description of Artificial Sequence: Synthetic oligonucleotide
  Target: SCNA; (-) strand; PAM type: YTN; PAM sequence: TTT
ttaacttaaatattgaatat

SEQ ID NO: 54358 - DNA, 20 bp, Artificial Sequence
  Description of Artificial Sequence: Synthetic oligonucleotide
  Target: SCNA; (-) strand; PAM type: YTN; PAM sequence: CTG
tttttaacttaaatattgaa

SEQ ID NO: 54359 - DNA, 20 bp, Artificial Sequence
  Description of Artificial Sequence: Synthetic oligonucleotide
  Target: SCNA; (-) strand; PAM type: YTN; PAM sequence: TTG
ctgtttttaacttaaatatt

SEQ ID NO: 54360 - DNA, 20 bp, Artificial Sequence
  Description of Artificial Sequence: Synthetic oligonucleotide
  Target: SCNA; (-) strand; PAM type: YTN; PAM sequence: TTT
gctgtttttaacttaaatat

SEQ ID NO: 54361 - DNA, 20 bp, Artificial Sequence
  Description of Artificial Sequence: Synthetic oligonucleotide
  Target: SCNA; (-) strand; PAM type: YTN; PAM sequence: TTT
tgctgtttttaacttaaata

SEQ ID NO: 54362 - DNA, 20 bp, Artificial Sequence
  Description of Artificial Sequence: Synthetic oligonucleotide
  Target: SCNA; (-) strand; PAM type: YTN; PAM sequence: TTG
tatcccagattttgctgttt

SEQ ID NO: 54363 - DNA, 20 bp, Artificial Sequence
  Description of Artificial Sequence: Synthetic oligonucleotide
  Target: SCNA; (-) strand; PAM type: YTN; PAM sequence: CTT
gtatcccagattttgctgtt

SEQ ID NO: 54364 - DNA, 20 bp, Artificial Sequence
  Description of Artificial Sequence: Synthetic oligonucleotide
  Target: SCNA; (-) strand; PAM type: YTN; PAM sequence: TTG
gtacaccttgtatcccagat

SEQ ID NO: 54365 - DNA, 20 bp, Artificial Sequence
  Description of Artificial Sequence: Synthetic oligonucleotide
  Target: SCNA; (-) strand; PAM type: YTN; PAM sequence: TTG
aggttggtacaccttgtatc

SEQ ID NO: 54366 - DNA, 20 bp, Artificial Sequence
  Description of Artificial Sequence: Synthetic oligonucleotide
  Target: SCNA; (-) strand; PAM type: YTN; PAM sequence: CTT
gaggttggtacaccttgtat

SEQ ID NO: 54367 - DNA, 20 bp, Artificial Sequence
  Description of Artificial Sequence: Synthetic oligonucleotide
  Target: SCNA; (-) strand; PAM type: YTN; PAM sequence: TTA
cttgaggttggtacaccttg

SEQ ID NO: 54368 - DNA, 20 bp, Artificial Sequence
  Description of Artificial Sequence: Synthetic oligonucleotide
  Target: SCNA; (-) strand; PAM type: YTN; PAM sequence: TTT
acttgaggttggtacacctt

SEQ ID NO: 54369 - DNA, 20 bp, Artificial Sequence
  Description of Artificial Sequence: Synthetic oligonucleotide
  Target: SCNA; (-) strand; PAM type: YTN; PAM sequence: CTG
gcatgtttacttgaggttgg

SEQ ID NO: 54370 - DNA, 20 bp, Artificial Sequence
  Description of Artificial Sequence: Synthetic oligonucleotide
  Target: SCNA; (-) strand; PAM type: YTN; PAM sequence: TTC
caaacacctggcatgtttac

SEQ ID NO: 54371 - DNA, 20 bp, Artificial Sequence
  Description of Artificial Sequence: Synthetic oligonucleotide
  Target: SCNA; (-) strand; PAM type: YTN; PAM sequence: TTT
ccaaacacctggcatgttta

SEQ ID NO: 54372 - DNA, 20 bp, Artificial Sequence
  Description of Artificial Sequence: Synthetic oligonucleotide
  Target: SCNA; (-) strand; PAM type: YTN; PAM sequence: TTT
tccaaacacctggcatgttt

SEQ ID NO: 54373 - DNA, 20 bp, Artificial Sequence
  Description of Artificial Sequence: Synthetic oligonucleotide
  Target: SCNA; (-) strand; PAM type: YTN; PAM sequence: CTT
ttccaaacacctggcatgtt

SEQ ID NO: 54374 - DNA, 20 bp, Artificial Sequence
  Description of Artificial Sequence: Synthetic oligonucleotide
  Target: SCNA; (-) strand; PAM type: YTN; PAM sequence: CTA
cttttccaaacacctggcat

SEQ ID NO: 54375 - DNA, 20 bp, Artificial Sequence
  Description of Artificial Sequence: Synthetic oligonucleotide
  Target: SCNA; (-) strand; PAM type: YTN; PAM sequence: TTC
tacttttccaaacacctggc

SEQ ID NO: 54376 - DNA, 20 bp, Artificial Sequence
  Description of Artificial Sequence: Synthetic oligonucleotide
  Target: SCNA; (-) strand; PAM type: YTN; PAM sequence: CTT
ctacttttccaaacacctgg

SEQ ID NO: 54377 - DNA, 20 bp, Artificial Sequence
  Description of Artificial Sequence: Synthetic oligonucleotide
  Target: SCNA; (-) strand; PAM type: YTN; PAM sequence: TTC
ttctacttttccaaacacct

SEQ ID NO: 54378 - DNA, 20 bp, Artificial Sequence
  Description of Artificial Sequence: Synthetic oligonucleotide
  Target: SCNA; (-) strand; PAM type: YTN; PAM sequence: TTA
ttcttctacttttccaaaca

SEQ ID NO: 54379 - DNA, 20 bp, Artificial Sequence
  Description of Artificial Sequence: Synthetic oligonucleotide
  Target: SCNA; (-) strand; PAM type: YTN; PAM sequence: TTC
attattcttctacttttcca

SEQ ID NO: 54380 - DNA, 20 bp, Artificial Sequence
  Description of Artificial Sequence: Synthetic oligonucleotide
  Target: SCNA; (-) strand; PAM type: YTN; PAM sequence: TTG
catgtagtaaggttcattat

SEQ ID NO: 54381 - DNA, 20 bp, Artificial Sequence
  Description of Artificial Sequence: Synthetic oligonucleotide
  Target: SCNA; (-) strand; PAM type: YTN; PAM sequence: TTT
gcatgtagtaaggttcatta

SEQ ID NO: 54382 - DNA, 20 bp, Artificial Sequence
  Description of Artificial Sequence: Synthetic oligonucleotide
  Target: SCNA; (-) strand; PAM type: YTN; PAM sequence: TTG
cacagtttgcatgtagtaag

SEQ ID NO: 54383 - DNA, 20 bp, Artificial Sequence
  Description of Artificial Sequence: Synthetic oligonucleotide
  Target: SCNA; (-) strand; PAM type: YTN; PAM sequence: CTA
ttgcacagtttgcatgtagt

SEQ ID NO: 54384 - DNA, 20 bp, Artificial Sequence
  Description of Artificial Sequence: Synthetic oligonucleotide
  Target: SCNA; (-) strand; PAM type: YTN; PAM sequence: CTA
catgtaactattgcacagtt

SEQ ID NO: 54385 - DNA, 20 bp, Artificial Sequence
  Description of Artificial Sequence: Synthetic oligonucleotide
  Target: SCNA; (-) strand; PAM type: YTN; PAM sequence: TTC
tacatgtaactattgcacag

SEQ ID NO: 54386 - DNA, 20 bp, Artificial Sequence
  Description of Artificial Sequence: Synthetic oligonucleotide
  Target: SCNA; (-) strand; PAM type: YTN; PAM sequence: TTG
agatgcattctacatgtaac

SEQ ID NO: 54387 - DNA, 20 bp, Artificial Sequence
  Description of Artificial Sequence: Synthetic oligonucleotide
  Target: SCNA; (-) strand; PAM type: YTN; PAM sequence: TTT
gagatgcattctacatgtaa

SEQ ID NO: 54388 - DNA, 20 bp, Artificial Sequence
  Description of Artificial Sequence: Synthetic oligonucleotide
  Target: SCNA; (-) strand; PAM type: YTN; PAM sequence: TTT
tgagatgcattctacatgta

SEQ ID NO: 54389 - DNA, 20 bp, Artificial Sequence
  Description of Artificial Sequence: Synthetic oligonucleotide
  Target: SCNA; (-) strand; PAM type: YTN; PAM sequence: TTT
ttgagatgcattctacatgt

SEQ ID NO: 54390 - DNA, 20 bp, Artificial Sequence
  Description of Artificial Sequence: Synthetic oligonucleotide
  Target: SCNA; (-) strand; PAM type: YTN; PAM sequence: TTT
tttgagatgcattctacatg

SEQ ID NO: 54391 - DNA, 20 bp, Artificial Sequence
  Description of Artificial Sequence: Synthetic oligonucleotide
  Target: SCNA; (-) strand; PAM type: YTN; PAM sequence: TTT
ttttgagatgcattctacat

SEQ ID NO: 54392 - DNA, 20 bp, Artificial Sequence
  Description of Artificial Sequence: Synthetic oligonucleotide
  Target: SCNA; (-) strand; PAM type: YTN; PAM sequence: TTT
tttttgagatgcattctaca

SEQ ID NO: 54393 - DNA, 20 bp, Artificial Sequence
  Description of Artificial Sequence: Synthetic oligonucleotide
  Target: SCNA; (-) strand; PAM type: YTN; PAM sequence: TTT
ttttttgagatgcattctac

SEQ ID NO: 54394 - DNA, 20 bp, Artificial Sequence
  Description of Artificial Sequence: Synthetic oligonucleotide
  Target: SCNA; (-) strand; PAM type: YTN; PAM sequence: TTT
tttttttgagatgcattcta

SEQ ID NO: 54395 - DNA, 20 bp, Artificial Sequence
  Description of Artificial Sequence: Synthetic oligonucleotide
  Target: SCNA; (-) strand; PAM type: YTN; PAM sequence: TTT
ttttttttgagatgcattct

SEQ ID NO: 54396 - DNA, 20 bp, Artificial Sequence
  Description of Artificial Sequence: Synthetic oligonucleotide
  Target: SCNA; (-) strand; PAM type: YTN; PAM sequence: CTT
tttttttttgagatgcattc

SEQ ID NO: 54397 - DNA, 20 bp, Artificial Sequence
  Description of Artificial Sequence: Synthetic oligonucleotide
  Target: SCNA; (-) strand; PAM type: YTN; PAM sequence: TTC
caggaacctttttttttttg

SEQ ID NO: 54398 - DNA, 20 bp, Artificial Sequence
  Description of Artificial Sequence: Synthetic oligonucleotide
  Target: SCNA; (-) strand; PAM type: YTN; PAM sequence: TTT
ccaggaaccttttttttttt

SEQ ID NO: 54399 - DNA, 20 bp, Artificial Sequence
  Description of Artificial Sequence: Synthetic oligonucleotide
  Target: SCNA; (-) strand; PAM type: YTN; PAM sequence: CTG
tggtttccaggaaccttttt

SEQ ID NO: 54400 - DNA, 20 bp, Artificial Sequence
  Description of Artificial Sequence: Synthetic oligonucleotide
  Target: SCNA; (-) strand; PAM type: YTN; PAM sequence: TTC
atagcactgtggtttccagg

SEQ ID NO: 54401 - DNA, 20 bp, Artificial Sequence
  Description of Artificial Sequence: Synthetic oligonucleotide
  Target: SCNA; (-) strand; PAM type: YTN; PAM sequence: TTT
catagcactgtggtttccag

SEQ ID NO: 54402 - DNA, 20 bp, Artificial Sequence
  Description of Artificial Sequence: Synthetic oligonucleotide
  Target: SCNA; (-) strand; PAM type: YTN; PAM sequence: TTT
tcatagcactgtggtttcca

SEQ ID NO: 54403 - DNA, 20 bp, Artificial Sequence
  Description of Artificial Sequence: Synthetic oligonucleotide
  Target: SCNA; (-) strand; PAM type: YTN; PAM sequence: CTT
ttcatagcactgtggtttcc

SEQ ID NO: 54404 - DNA, 20 bp, Artificial Sequence
  Description of Artificial Sequence: Synthetic oligonucleotide
  Target: SCNA; (-) strand; PAM type: YTN; PAM sequence: TTA
tcttttcatagcactgtggt

SEQ ID NO: 54405 - DNA, 20 bp, Artificial Sequence
  Description of Artificial Sequence: Synthetic oligonucleotide
  Target: SCNA; (-) strand; PAM type: YTN; PAM sequence: CTA
tgattatcttttcatagcac

SEQ ID NO: 54406 - DNA, 20 bp, Artificial Sequence
  Description of Artificial Sequence: Synthetic oligonucleotide
  Target: SCNA; (-) strand; PAM type: YTN; PAM sequence: TTC
tatgattatcttttcatagc

SEQ ID NO: 54407 - DNA, 20 bp, Artificial Sequence
  Description of Artificial Sequence: Synthetic oligonucleotide
  Target: SCNA; (-) strand; PAM type: YTN; PAM sequence: TTT
ctatgattatcttttcatag

SEQ ID NO: 54408 - DNA, 20 bp, Artificial Sequence
  Description of Artificial Sequence: Synthetic oligonucleotide
  Target: SCNA; (-) strand; PAM type: YTN; PAM sequence: TTT
tctatgattatcttttcata

SEQ ID NO: 54409 - DNA, 20 bp, Artificial Sequence
  Description of Artificial Sequence: Synthetic oligonucleotide
  Target: SCNA; (-) strand; PAM type: YTN; PAM sequence: TTG
ttttctatgattatcttttc

SEQ ID NO: 54410 - DNA, 20 bp, Artificial Sequence
  Description of Artificial Sequence: Synthetic oligonucleotide
  Target: SCNA; (-) strand; PAM type: YTN; PAM sequence: CTT
gttttctatgattatctttt

SEQ ID NO: 54411 - DNA, 20 bp, Artificial Sequence
  Description of Artificial Sequence: Synthetic oligonucleotide
  Target: SCNA; (-) strand; PAM type: YTN; PAM sequence: TTA
tccttgttttctatgattat

SEQ ID NO: 54412 - DNA, 20 bp, Artificial Sequence
  Description of Artificial Sequence: Synthetic oligonucleotide
  Target: SCNA; (-) strand; PAM type: YTN; PAM sequence: TTT
atccttgttttctatgatta

SEQ ID NO: 54413 - DNA, 20 bp, Artificial Sequence
  Description of Artificial Sequence: Synthetic oligonucleotide
  Target: SCNA; (-) strand; PAM type: YTN; PAM sequence: TTC
aaatttatccttgttttcta

SEQ ID NO: 54414 - DNA, 20 bp, Artificial Sequence
  Description of Artificial Sequence: Synthetic oligonucleotide
  Target: SCNA; (-) strand; PAM type: YTN; PAM sequence: TTA
aaatgagtatgtggtattca

SEQ ID NO: 54415 - DNA, 20 bp, Artificial Sequence
  Description of Artificial Sequence: Synthetic oligonucleotide
  Target: SCNA; (-) strand; PAM type: YTN; PAM sequence: CTT
aaaatgagtatgtggtattc

SEQ ID NO: 54416 - DNA, 20 bp, Artificial Sequence
  Description of Artificial Sequence: Synthetic oligonucleotide
  Target: SCNA; (-) strand; PAM type: YTN; PAM sequence: TTC
ttaaaatgagtatgtggtat

SEQ ID NO: 54417 - DNA, 20 bp, Artificial Sequence
  Description of Artificial Sequence: Synthetic oligonucleotide
  Target: SCNA; (-) strand; PAM type: YTN; PAM sequence: TTT
cttaaaatgagtatgtggta

SEQ ID NO: 54418 - DNA, 20 bp, Artificial Sequence
  Description of Artificial Sequence: Synthetic oligonucleotide
  Target: SCNA; (-) strand; PAM type: YTN; PAM sequence: TTT
tcttaaaatgagtatgtggt

SEQ ID NO: 54419 - DNA, 20 bp, Artificial Sequence
  Description of Artificial Sequence: Synthetic oligonucleotide
  Target: SCNA; (-) strand; PAM type: YTN; PAM sequence: TTT
ttcttaaaatgagtatgtgg

SEQ ID NO: 54420 - DNA, 20 bp, Artificial Sequence
  Description of Artificial Sequence: Synthetic oligonucleotide
  Target: SCNA; (-) strand; PAM type: YTN; PAM sequence: CTC
agtgaaaatttttcttaaaa

SEQ ID NO: 54421 - DNA, 20 bp, Artificial Sequence
  Description of Artificial Sequence: Synthetic oligonucleotide
  Target: SCNA; (-) strand; PAM type: YTN; PAM sequence: CTC
tcagtgaaaatttttcttaa

SEQ ID NO: 54422 - DNA, 20 bp, Artificial Sequence
  Description of Artificial Sequence: Synthetic oligonucleotide
  Target: SCNA; (-) strand; PAM type: YTN; PAM sequence: TTC
tctcagtgaaaatttttctt

SEQ ID NO: 54423 - DNA, 20 bp, Artificial Sequence
  Description of Artificial Sequence: Synthetic oligonucleotide
  Target: SCNA; (-) strand; PAM type: YTN; PAM sequence: TTT
ctctcagtgaaaatttttct

SEQ ID NO: 54424 - DNA, 20 bp, Artificial Sequence
  Description of Artificial Sequence: Synthetic oligonucleotide
  Target: SCNA; (-) strand; PAM type: YTN; PAM sequence: TTT
tctctcagtgaaaatttttc

SEQ ID NO: 54425 - DNA, 20 bp, Artificial Sequence
  Description of Artificial Sequence: Synthetic oligonucleotide
  Target: SCNA; (-) strand; PAM type: YTN; PAM sequence: TTT
ttctctcagtgaaaattttt

SEQ ID NO: 54426 - DNA, 20 bp, Artificial Sequence
  Description of Artificial Sequence: Synthetic oligonucleotide
  Target: SCNA; (-) strand; PAM type: YTN; PAM sequence: TTT
tttctctcagtgaaaatttt

SEQ ID NO: 54427 - DNA, 20 bp, Artificial Sequence
  Description of Artificial Sequence: Synthetic oligonucleotide
  Target: SCNA; (-) strand; PAM type: YTN; PAM sequence: TTA
aattttttctctcagtgaaa

SEQ ID NO: 54428 - DNA, 20 bp, Artificial Sequence
  Description of Artificial Sequence: Synthetic oligonucleotide
  Target: SCNA; (-) strand; PAM type: YTN; PAM sequence: TTT
aaattttttctctcagtgaa

SEQ ID NO: 54429 - DNA, 20 bp, Artificial Sequence
  Description of Artificial Sequence: Synthetic oligonucleotide
  Target: SCNA; (-) strand; PAM type: YTN; PAM sequence: CTT
taaattttttctctcagtga

SEQ ID NO: 54430 - DNA, 20 bp, Artificial Sequence
  Description of Artificial Sequence: Synthetic oligonucleotide
  Target: SCNA; (-) strand; PAM type: YTN; PAM sequence: TTG
ctttaaattttttctctcag

SEQ ID NO: 54431 - DNA, 20 bp, Artificial Sequence
  Description of Artificial Sequence: Synthetic oligonucleotide
  Target: SCNA; (-) strand; PAM type: YTN; PAM sequence: CTT
gctttaaattttttctctca

SEQ ID NO: 54432 - DNA, 20 bp, Artificial Sequence
  Description of Artificial Sequence: Synthetic oligonucleotide
  Target: SCNA; (-) strand; PAM type: YTN; PAM sequence: TTA
tatgccatcaacttgcttta

SEQ ID NO: 54433 - DNA, 20 bp, Artificial Sequence
  Description of Artificial Sequence: Synthetic oligonucleotide
  Target: SCNA; (-) strand; PAM type: YTN; PAM sequence: TTT
atatgccatcaacttgcttt

SEQ ID NO: 54434 - DNA, 20 bp, Artificial Sequence
  Description of Artificial Sequence: Synthetic oligonucleotide
  Target: SCNA; (-) strand; PAM type: YTN; PAM sequence: TTC
aaggatgtttatatgccatc

SEQ ID NO: 54435 - DNA, 20 bp, Artificial Sequence
  Description of Artificial Sequence: Synthetic oligonucleotide
  Target: SCNA; (-) strand; PAM type: YTN; PAM sequence: TTT
caaggatgtttatatgccat

SEQ ID NO: 54436 - DNA, 20 bp, Artificial Sequence
  Description of Artificial Sequence: Synthetic oligonucleotide
  Target: SCNA; (-) strand; PAM type: YTN; PAM sequence: TTG
aagaatttcaaggatgttta

SEQ ID NO: 54437 - DNA, 20 bp, Artificial Sequence
  Description of Artificial Sequence: Synthetic oligonucleotide
  Target: SCNA; (-) strand; PAM type: YTN; PAM sequence: CTT
gaagaatttcaaggatgttt

SEQ ID NO: 54438 - DNA, 20 bp, Artificial Sequence
  Description of Artificial Sequence: Synthetic oligonucleotide
  Target: SCNA; (-) strand; PAM type: YTN; PAM sequence: TTC
acttgaagaatttcaaggat

SEQ ID NO: 54439 - DNA, 20 bp, Artificial Sequence
  Description of Artificial Sequence: Synthetic oligonucleotide
  Target: SCNA; (-) strand; PAM type: YTN; PAM sequence: TTG
tattcacttgaagaatttca

SEQ ID NO: 54440 - DNA, 20 bp, Artificial Sequence
  Description of Artificial Sequence: Synthetic oligonucleotide
  Target: SCNA; (-) strand; PAM type: YTN; PAM sequence: TTT
gtattcacttgaagaatttc

SEQ ID NO: 54441 - DNA, 20 bp, Artificial Sequence
  Description of Artificial Sequence: Synthetic oligonucleotide
  Target: SCNA; (-) strand; PAM type: YTN; PAM sequence: CTA
atttgtattcacttgaagaa

SEQ ID NO: 54442 - DNA, 20 bp, Artificial Sequence
  Description of Artificial Sequence: Synthetic oligonucleotide
  Target: SCNA; (-) strand; PAM type: YTN; PAM sequence: CTC
aactaatttgtattcacttg

SEQ ID NO: 54443 - DNA, 20 bp, Artificial Sequence
  Description of Artificial Sequence: Synthetic oligonucleotide
  Target: SCNA; (-) strand; PAM type: YTN; PAM sequence: TTA
actcaactaatttgtattca

SEQ ID NO: 54444 - DNA, 20 bp, Artificial Sequence
  Description of Artificial Sequence: Synthetic oligonucleotide
  Target: SCNA; (-) strand; PAM type: YTN; PAM sequence: CTT
aactcaactaatttgtattc

SEQ ID NO: 54445 - DNA, 20 bp, Artificial Sequence
  Description of Artificial Sequence: Synthetic oligonucleotide
  Target: SCNA; (-) strand; PAM type: YTN; PAM sequence: CTG
aatgcttaactcaactaatt

SEQ ID NO: 54446 - DNA, 20 bp, Artificial Sequence
  Description of Artificial Sequence: Synthetic oligonucleotide
  Target: SCNA; (-) strand; PAM type: YTN; PAM sequence: TTA
tctgaatgcttaactcaact

SEQ ID NO: 54447 - DNA, 20 bp, Artificial Sequence
  Description of Artificial Sequence: Synthetic oligonucleotide
  Target: SCNA; (-) strand; PAM type: YTN; PAM sequence: CTG
agaaggacccaaattatctg

SEQ ID NO: 54448 - DNA, 20 bp, Artificial Sequence
  Description of Artificial Sequence: Synthetic oligonucleotide
  Target: SCNA; (-) strand; PAM type: YTN; PAM sequence: CTA
ggccacctgagaaggaccca

SEQ ID NO: 54449 - DNA, 20 bp, Artificial Sequence
  Description of Artificial Sequence: Synthetic oligonucleotide
  Target: SCNA; (-) strand; PAM type: YTN; PAM sequence: TTG
ctaggccacctgagaaggac

SEQ ID NO: 54450 - DNA, 20 bp, Artificial Sequence
  Description of Artificial Sequence: Synthetic oligonucleotide
  Target: SCNA; (-) strand; PAM type: YTN; PAM sequence: CTT
gctaggccacctgagaagga

SEQ ID NO: 54451 - DNA, 20 bp, Artificial Sequence
  Description of Artificial Sequence: Synthetic oligonucleotide
  Target: SCNA; (-) strand; PAM type: YTN; PAM sequence: CTA
acttgctaggccacctgaga

SEQ ID NO: 54452 - DNA, 20 bp, Artificial Sequence
  Description of Artificial Sequence: Synthetic oligonucleotide
  Target: SCNA; (-) strand; PAM type: YTN; PAM sequence: TTG
actaacttgctaggccacct

SEQ ID NO: 54453 - DNA, 20 bp, Artificial Sequence
  Description of Artificial Sequence: Synthetic oligonucleotide
  Target: SCNA; (-) strand; PAM type: YTN; PAM sequence: TTT
gactaacttgctaggccacc

SEQ ID NO: 54454 - DNA, 20 bp, Artificial Sequence
  Description of Artificial Sequence: Synthetic oligonucleotide
  Target: SCNA; (-) strand; PAM type: YTN; PAM sequence: TTT
tgactaacttgctaggccac

SEQ ID NO: 54455 - DNA, 20 bp, Artificial Sequence
  Description of Artificial Sequence: Synthetic oligonucleotide
  Target: SCNA; (-) strand; PAM type: YTN; PAM sequence: CTT
ttgactaacttgctaggcca

SEQ ID NO: 54456 - DNA, 20 bp, Artificial Sequence
  Description of Artificial Sequence: Synthetic oligonucleotide
  Target: SCNA; (-) strand; PAM type: YTN; PAM sequence: TTA
tcttttgactaacttgctag

SEQ ID NO: 54457 - DNA, 20 bp, Artificial Sequence
  Description of Artificial Sequence: Synthetic oligonucleotide
  Target: SCNA; (-) strand; PAM type: YTN; PAM sequence: CTT
atcttttgactaacttgcta

SEQ ID NO: 54458 - DNA, 20 bp, Artificial Sequence
  Description of Artificial Sequence: Synthetic oligonucleotide
  Target: SCNA; (-) strand; PAM type: YTN; PAM sequence: TTA
caggtcttatcttttgacta

SEQ ID NO: 54459 - DNA, 20 bp, Artificial Sequence
  Description of Artificial Sequence: Synthetic oligonucleotide
  Target: SCNA; (-) strand; PAM type: YTN; PAM sequence: TTG
attacaggtcttatcttttg

SEQ ID NO: 54460 - DNA, 20 bp, Artificial Sequence
  Description of Artificial Sequence: Synthetic oligonucleotide
  Target: SCNA; (-) strand; PAM type: YTN; PAM sequence: CTT
gattacaggtcttatctttt

SEQ ID NO: 54461 - DNA, 20 bp, Artificial Sequence
  Description of Artificial Sequence: Synthetic oligonucleotide
  Target: SCNA; (-) strand; PAM type: YTN; PAM sequence: TTA
acgacggtaatgagagaggg

SEQ ID NO: 54462 - DNA, 20 bp, Artificial Sequence
  Description of Artificial Sequence: Synthetic oligonucleotide
  Target: SCNA; (-) strand; PAM type: YTN; PAM sequence: TTT
aacgacggtaatgagagagg

SEQ ID NO: 54463 - DNA, 20 bp, Artificial Sequence
  Description of Artificial Sequence: Synthetic oligonucleotide
  Target: SCNA; (-) strand; PAM type: YTN; PAM sequence: CTA
tgcagtttaacgacggtaat

SEQ ID NO: 54464 - DNA, 20 bp, Artificial Sequence
  Description of Artificial Sequence: Synthetic oligonucleotide
  Target: SCNA; (-) strand; PAM type: YTN; PAM sequence: CTA
cctatgcagtttaacgacgg

SEQ ID NO: 54465 - DNA, 20 bp, Artificial Sequence
  Description of Artificial Sequence: Synthetic oligonucleotide
  Target: SCNA; (-) strand; PAM type: YTN; PAM sequence: TTA
tgtctacctatgcagtttaa

SEQ ID NO: 54466 - DNA, 20 bp, Artificial Sequence
  Description of Artificial Sequence: Synthetic oligonucleotide
  Target: SCNA; (-) strand; PAM type: YTN; PAM sequence: TTA
ttatgtctacctatgcagtt

SEQ ID NO: 54467 - DNA, 20 bp, Artificial Sequence
  Description of Artificial Sequence: Synthetic oligonucleotide
  Target: SCNA; (-) strand; PAM type: YTN; PAM sequence: TTC
aagtcgattattatgtctac

SEQ ID NO: 54468 - DNA, 20 bp, Artificial Sequence
  Description of Artificial Sequence: Synthetic oligonucleotide
  Target: SCNA; (-) strand; PAM type: YTN; PAM sequence: TTA
ttcaagtcgattattatgtc

SEQ ID NO: 54469 - DNA, 20 bp, Artificial Sequence
  Description of Artificial Sequence: Synthetic oligonucleotide
  Target: SCNA; (-) strand; PAM type: YTN; PAM sequence: TTG
atggtacattattcaagtcg

SEQ ID NO: 54470 - DNA, 20 bp, Artificial Sequence
  Description of Artificial Sequence: Synthetic oligonucleotide
  Target: SCNA; (-) strand; PAM type: YTN; PAM sequence: TTT
gatggtacattattcaagtc

SEQ ID NO: 54471 - DNA, 20 bp, Artificial Sequence
  Description of Artificial Sequence: Synthetic oligonucleotide
  Target: SCNA; (-) strand; PAM type: YTN; PAM sequence: TTG
tttgatggtacattattcaa

SEQ ID NO: 54472 - DNA, 20 bp, Artificial Sequence
  Description of Artificial Sequence: Synthetic oligonucleotide
  Target: SCNA; (-) strand; PAM type: YTN; PAM sequence: TTA
atgttgtttgatggtacatt

SEQ ID NO: 54473 - DNA, 20 bp, Artificial Sequence
  Description of Artificial Sequence: Synthetic oligonucleotide
  Target: SCNA; (-) strand; PAM type: YTN; PAM sequence: TTT
aatgttgtttgatggtacat

SEQ ID NO: 54474 - DNA, 20 bp, Artificial Sequence
  Description of Artificial Sequence: Synthetic oligonucleotide
  Target: SCNA; (-) strand; PAM type: YTN; PAM sequence: CTA
tttaatgttgtttgatggta

SEQ ID NO: 54475 - DNA, 20 bp, Artificial Sequence
  Description of Artificial Sequence: Synthetic oligonucleotide
  Target: SCNA; (-) strand; PAM type: YTN; PAM sequence: CTG
atagactatttaatgttgtt

SEQ ID NO: 54476 - DNA, 20 bp, Artificial Sequence
  Description of Artificial Sequence: Synthetic oligonucleotide
  Target: SCNA; (-) strand; PAM type: YTN; PAM sequence: CTA
taagcagtgtgatctgatag

SEQ ID NO: 54477 - DNA, 20 bp, Artificial Sequence
  Description of Artificial Sequence: Synthetic oligonucleotide
  Target: SCNA; (-) strand; PAM type: YTN; PAM sequence: TTA
atgtgtactataagcagtgt

SEQ ID NO: 54478 - DNA, 20 bp, Artificial Sequence
  Description of Artificial Sequence: Synthetic oligonucleotide
  Target: SCNA; (-) strand; PAM type: YTN; PAM sequence: TTA
gatagtaaagcatatgagta

SEQ ID NO: 54479 - DNA, 20 bp, Artificial Sequence
  Description of Artificial Sequence: Synthetic oligonucleotide
  Target: SCNA; (-) strand; PAM type: YTN; PAM sequence: TTT
agatagtaaagcatatgagt

SEQ ID NO: 54480 - DNA, 20 bp, Artificial Sequence
  Description of Artificial Sequence: Synthetic oligonucleotide
  Target: SCNA; (-) strand; PAM type: YTN; PAM sequence: CTT
tagatagtaaagcatatgag

SEQ ID NO: 54481 - DNA, 20 bp, Artificial Sequence
  Description of Artificial Sequence: Synthetic oligonucleotide
  Target: SCNA; (-) strand; PAM type: YTN; PAM sequence: CTG
ctttagatagtaaagcatat

SEQ ID NO: 54482 - DNA, 20 bp, Artificial Sequence
  Description of Artificial Sequence: Synthetic oligonucleotide
  Target: SCNA; (-) strand; PAM type: YTN; PAM sequence: CTG
gacaaccctgctttagatag

SEQ ID NO: 54483 - DNA, 20 bp, Artificial Sequence
  Description of Artificial Sequence: Synthetic oligonucleotide
  Target: SCNA; (-) strand; PAM type: YTN; PAM sequence: TTC
aaatatggcccagggaagcc

SEQ ID NO: 54484 - DNA, 20 bp, Artificial Sequence
  Description of Artificial Sequence: Synthetic oligonucleotide
  Target: SCNA; (-) strand; PAM type: YTN; PAM sequence: CTT
caaatatggcccagggaagc

SEQ ID NO: 54485 - DNA, 20 bp, Artificial Sequence
  Description of Artificial Sequence: Synthetic oligonucleotide
  Target: SCNA; (-) strand; PAM type: YTN; PAM sequence: TTC
ttcaaatatggcccagggaa

SEQ ID NO: 54486 - DNA, 20 bp, Artificial Sequence
  Description of Artificial Sequence: Synthetic oligonucleotide
  Target: SCNA; (-) strand; PAM type: YTN; PAM sequence: CTT
cttcaaatatggcccaggga

SEQ ID NO: 54487 - DNA, 20 bp, Artificial Sequence
  Description of Artificial Sequence: Synthetic oligonucleotide
  Target: SCNA; (-) strand; PAM type: YTN; PAM sequence: TTC
ttcttcaaatatggcccagg

SEQ ID NO: 54488 - DNA, 20 bp, Artificial Sequence
  Description of Artificial Sequence: Synthetic oligonucleotide
  Target: SCNA; (-) strand; PAM type: YTN; PAM sequence: TTA
attcttcttcaaatatggcc

SEQ ID NO: 54489 - DNA, 20 bp, Artificial Sequence
  Description of Artificial Sequence: Synthetic oligonucleotide
  Target: SCNA; (-) strand; PAM type: YTN; PAM sequence: CTC
aagacaattaattcttcttc

SEQ ID NO: 54490 - DNA, 20 bp, Artificial Sequence
  Description of Artificial Sequence: Synthetic oligonucleotide
  Target: SCNA; (-) strand; PAM type: YTN; PAM sequence: TTA
tgcatggctcaagacaatta

SEQ ID NO: 54491 - DNA, 20 bp, Artificial Sequence
  Description of Artificial Sequence: Synthetic oligonucleotide
  Target: SCNA; (-) strand; PAM type: YTN; PAM sequence: TTT
atgcatggctcaagacaatt

SEQ ID NO: 54492 - DNA, 20 bp, Artificial Sequence
  Description of Artificial Sequence: Synthetic oligonucleotide
  Target: SCNA; (-) strand; PAM type: YTN; PAM sequence: TTT
tatgcatggctcaagacaat

SEQ ID NO: 54493 - DNA, 20 bp, Artificial Sequence
  Description of Artificial Sequence: Synthetic oligonucleotide
  Target: SCNA; (-) strand; PAM type: YTN; PAM sequence: TTA
gtgtattttatgcatggctc

SEQ ID NO: 54494 - DNA, 20 bp, Artificial Sequence
  Description of Artificial Sequence: Synthetic oligonucleotide
  Target: SCNA; (-) strand; PAM type: YTN; PAM sequence: CTA
tcatgagtgttagtgtattt

SEQ ID NO: 54495 - DNA, 20 bp, Artificial Sequence
  Description of Artificial Sequence: Synthetic oligonucleotide
  Target: SCNA; (-) strand; PAM type: YTN; PAM sequence: CTC
atcagctatcatgagtgtta

SEQ ID NO: 54496 - DNA, 20 bp, Artificial Sequence
  Description of Artificial Sequence: Synthetic oligonucleotide
  Target: SCNA; (-) strand; PAM type: YTN; PAM sequence: TTC
tcatcagctatcatgagtgt

SEQ ID NO: 54497 - DNA, 20 bp, Artificial Sequence
  Description of Artificial Sequence: Synthetic oligonucleotide
  Target: SCNA; (-) strand; PAM type: YTN; PAM sequence: TTT
ctcatcagctatcatgagtg

SEQ ID NO: 54498 - DNA, 20 bp, Artificial Sequence
  Description of Artificial Sequence: Synthetic oligonucleotide
  Target: SCNA; (-) strand; PAM type: YTN; PAM sequence: TTT
tctcatcagctatcatgagt

SEQ ID NO: 54499 - DNA, 20 bp, Artificial Sequence
  Description of Artificial Sequence: Synthetic oligonucleotide
  Target: SCNA; (-) strand; PAM type: YTN; PAM sequence: TTT
ttctcatcagctatcatgag

SEQ ID NO: 54500 - DNA, 20 bp, Artificial Sequence
  Description of Artificial Sequence: Synthetic oligonucleotide
  Target: SCNA; (-) strand; PAM type: YTN; PAM sequence: TTT
tttctcatcagctatcatga

SEQ ID NO: 54501 - DNA, 20 bp, Artificial Sequence
  Description of Artificial Sequence: Synthetic oligonucleotide
  Target: SCNA; (-) strand; PAM type: YTN; PAM sequence: TTT
ttttctcatcagctatcatg

SEQ ID NO: 54502 - DNA, 20 bp, Artificial Sequence
  Description of Artificial Sequence: Synthetic oligonucleotide
  Target: SCNA; (-) strand; PAM type: YTN; PAM sequence: TTG
tttttttctcatcagctatc

SEQ ID NO: 54503 - DNA, 20 bp, Artificial Sequence
  Description of Artificial Sequence: Synthetic oligonucleotide
  Target: SCNA; (-) strand; PAM type: YTN; PAM sequence: TTT
gtttttttctcatcagctat

SEQ ID NO: 54504 - DNA, 20 bp, Artificial Sequence
  Description of Artificial Sequence: Synthetic oligonucleotide
  Target: SCNA; (-) strand; PAM type: YTN; PAM sequence: TTT
tgtttttttctcatcagcta

SEQ ID NO: 54505 - DNA, 20 bp, Artificial Sequence
  Description of Artificial Sequence: Synthetic oligonucleotide
  Target: SCNA; (-) strand; PAM type: YTN; PAM sequence: TTT
ttgtttttttctcatcagct

SEQ ID NO: 54506 - DNA, 20 bp, Artificial Sequence
  Description of Artificial Sequence: Synthetic oligonucleotide
  Target: SCNA; (-) strand; PAM type: YTN; PAM sequence: TTG
tttttgtttttttctcatca

SEQ ID NO: 54507 - DNA, 20 bp, Artificial Sequence
  Description of Artificial Sequence: Synthetic oligonucleotide
  Target: SCNA; (-) strand; PAM type: YTN; PAM sequence: TTT
gtttttgtttttttctcatc

SEQ ID NO: 54508 - DNA, 20 bp, Artificial Sequence
  Description of Artificial Sequence: Synthetic oligonucleotide
  Target: SCNA; (-) strand; PAM type: YTN; PAM sequence: TTT
tgtttttgtttttttctcat

SEQ ID NO: 54509 - DNA, 20 bp, Artificial Sequence
  Description of Artificial Sequence: Synthetic oligonucleotide
  Target: SCNA; (-) strand; PAM type: YTN; PAM sequence: TTG
ttttgtttttgtttttttct

SEQ ID NO: 54510 - DNA, 20 bp, Artificial Sequence
  Description of Artificial Sequence: Synthetic oligonucleotide
  Target: SCNA; (-) strand; PAM type: YTN; PAM sequence: TTT
gttttgtttttgtttttttc

SEQ ID NO: 54511 - DNA, 20 bp, Artificial Sequence
  Description of Artificial Sequence: Synthetic oligonucleotide
  Target: SCNA; (-) strand; PAM type: YTN; PAM sequence: TTG
tttgttttgtttttgttttt

SEQ ID NO: 54512 - DNA, 20 bp, Artificial Sequence
  Description of Artificial Sequence: Synthetic oligonucleotide
  Target: SCNA; (-) strand; PAM type: YTN; PAM sequence: TTT
gtttgttttgtttttgtttt

SEQ ID NO: 54513 - DNA, 20 bp, Artificial Sequence
  Description of Artificial Sequence: Synthetic oligonucleotide
  Target: SCNA; (-) strand; PAM type: YTN; PAM sequence: TTT
tgtttgttttgtttttgttt

SEQ ID NO: 54514 - DNA, 20 bp, Artificial Sequence
  Description of Artificial Sequence: Synthetic oligonucleotide
  Target: SCNA; (-) strand; PAM type: YTN; PAM sequence: TTT
ttgtttgttttgtttttgtt

SEQ ID NO: 54515 - DNA, 20 bp, Artificial Sequence
  Description of Artificial Sequence: Synthetic oligonucleotide
  Target: SCNA; (-) strand; PAM type: YTN; PAM sequence: TTT
tttgtttgttttgtttttgt

SEQ ID NO: 54516 - DNA, 20 bp, Artificial Sequence
  Description of Artificial Sequence: Synthetic oligonucleotide
  Target: SCNA; (-) strand; PAM type: YTN; PAM sequence: TTA
tgaattttttgtttgttttg

SEQ ID NO: 54517 - DNA, 20 bp, Artificial Sequence
  Description of Artificial Sequence: Synthetic oligonucleotide
  Target: SCNA; (-) strand; PAM type: YTN; PAM sequence: TTA
aaacattatgaattttttgt

SEQ ID NO: 54518 - DNA, 20 bp, Artificial Sequence
  Description of Artificial Sequence: Synthetic oligonucleotide
  Target: SCNA; (-) strand; PAM type: YTN; PAM sequence: CTT
aaaacattatgaattttttg

SEQ ID NO: 54519 - DNA, 20 bp, Artificial Sequence
  Description of Artificial Sequence: Synthetic oligonucleotide
  Target: SCNA; (-) strand; PAM type: YTN; PAM sequence: TTC
cttaaaacattatgaatttt

SEQ ID NO: 54520 - DNA, 20 bp, Artificial Sequence
  Description of Artificial Sequence: Synthetic oligonucleotide
  Target: SCNA; (-) strand; PAM type: YTN; PAM sequence: CTT
ccttaaaacattatgaattt

SEQ ID NO: 54521 - DNA, 20 bp, Artificial Sequence
  Description of Artificial Sequence: Synthetic oligonucleotide
  Target: SCNA; (-) strand; PAM type: YTN; PAM sequence: TTG
aatgagatccaacacaaatg

SEQ ID NO: 54522 - DNA, 20 bp, Artificial Sequence
  Description of Artificial Sequence: Synthetic oligonucleotide
  Target: SCNA; (-) strand; PAM type: YTN; PAM sequence: TTT
gaatgagatccaacacaaat

SEQ ID NO: 54523 - DNA, 20 bp, Artificial Sequence
  Description of Artificial Sequence: Synthetic oligonucleotide
  Target: SCNA; (-) strand; PAM type: YTN; PAM sequence: TTT
tgaatgagatccaacacaaa

SEQ ID NO: 54524 - DNA, 20 bp, Artificial Sequence
  Description of Artificial Sequence: Synthetic oligonucleotide
  Target: SCNA; (-) strand; PAM type: YTN; PAM sequence: CTA
acccgtggcccatgggccac

SEQ ID NO: 54525 - DNA, 20 bp, Artificial Sequence
  Description of Artificial Sequence: Synthetic oligonucleotide
  Target: SCNA; (-) strand; PAM type: YTN; PAM sequence: TTG
tctaacccgtggcccatggg

SEQ ID NO: 54526 - DNA, 20 bp, Artificial Sequence
  Description of Artificial Sequence: Synthetic oligonucleotide
  Target: SCNA; (-) strand; PAM type: YTN; PAM sequence: TTT
gtctaacccgtggcccatgg

SEQ ID NO: 54527 - DNA, 20 bp, Artificial Sequence
  Description of Artificial Sequence: Synthetic oligonucleotide
  Target: SCNA; (-) strand; PAM type: YTN; PAM sequence: TTA
gatcaagtttgtctaacccg

SEQ ID NO: 54528 - DNA, 20 bp, Artificial Sequence
  Description of Artificial Sequence: Synthetic oligonucleotide
  Target: SCNA; (-) strand; PAM type: YTN; PAM sequence: TTT
agatcaagtttgtctaaccc

SEQ ID NO: 54529 - DNA, 20 bp, Artificial Sequence
  Description of Artificial Sequence: Synthetic oligonucleotide
  Target: SCNA; (-) strand; PAM type: YTN; PAM sequence: CTT
tagatcaagtttgtctaacc

SEQ ID NO: 54530 - DNA, 20 bp, Artificial Sequence
  Description of Artificial Sequence: Synthetic oligonucleotide
  Target: SCNA; (-) strand; PAM type: YTN; PAM sequence: TTG
ctttagatcaagtttgtcta

SEQ ID NO: 54531 - DNA, 20 bp, Artificial Sequence
  Description of Artificial Sequence: Synthetic oligonucleotide
  Target: SCNA; (-) strand; PAM type: YTN; PAM sequence: TTA
taatggatggtattgcttta

SEQ ID NO: 54532 - DNA, 20 bp, Artificial Sequence
  Description of Artificial Sequence: Synthetic oligonucleotide
  Target: SCNA; (-) strand; PAM type: YTN; PAM sequence: CTC
acagaataattataatggat

SEQ ID NO: 54533 - DNA, 20 bp, Artificial Sequence
  Description of Artificial Sequence: Synthetic oligonucleotide
  Target: SCNA; (-) strand; PAM type: YTN; PAM sequence: TTG
gctcacagaataattataat

SEQ ID NO: 54534 - DNA, 20 bp, Artificial Sequence
  Description of Artificial Sequence: Synthetic oligonucleotide
  Target: SCNA; (-) strand; PAM type: YTN; PAM sequence: TTA
cataattggctcacagaata

SEQ ID NO: 54535 - DNA, 20 bp, Artificial Sequence
  Description of Artificial Sequence: Synthetic oligonucleotide
  Target: SCNA; (-) strand; PAM type: YTN; PAM sequence: TTA
aaattacataattggctcac

SEQ ID NO: 54536 - DNA, 20 bp, Artificial Sequence
  Description of Artificial Sequence: Synthetic oligonucleotide
  Target: SCNA; (-) strand; PAM type: YTN; PAM sequence: TTT
aaaattacataattggctca

SEQ ID NO: 54537 - DNA, 20 bp, Artificial Sequence
  Description of Artificial Sequence: Synthetic oligonucleotide
  Target: SCNA; (-) strand; PAM type: YTN; PAM sequence: CTA
gaaaatttaaaattacataa

SEQ ID NO: 54538 - DNA, 20 bp, Artificial Sequence
  Description of Artificial Sequence: Synthetic oligonucleotide
  Target: SCNA; (-) strand; PAM type: YTN; PAM sequence: TTA
aatgtggtggctagaaaatt

SEQ ID NO: 54539 - DNA, 20 bp, Artificial Sequence
  Description of Artificial Sequence: Synthetic oligonucleotide
  Target: SCNA; (-) strand; PAM type: YTN; PAM sequence: TTG
ttaaatgtggtggctagaaa

SEQ ID NO: 54540 - DNA, 20 bp, Artificial Sequence
  Description of Artificial Sequence: Synthetic oligonucleotide
  Target: SCNA; (-) strand; PAM type: YTN; PAM sequence: TTT
gttaaatgtggtggctagaa

SEQ ID NO: 54541 - DNA, 20 bp, Artificial Sequence
  Description of Artificial Sequence: Synthetic oligonucleotide
  Target: SCNA; (-) strand; PAM type: YTN; PAM sequence: TTA
atttgttaaatgtggtggct

SEQ ID NO: 54542 - DNA, 20 bp, Artificial Sequence
  Description of Artificial Sequence: Synthetic oligonucleotide
  Target: SCNA; (-) strand; PAM type: YTN; PAM sequence: TTT
aatttgttaaatgtggtggc

SEQ ID NO: 54543 - DNA, 20 bp, Artificial Sequence
  Description of Artificial Sequence: Synthetic oligonucleotide
  Target: SCNA; (-) strand; PAM type: YTN; PAM sequence: TTT
taatttgttaaatgtggtgg

SEQ ID NO: 54544 - DNA, 20 bp, Artificial Sequence
  Description of Artificial Sequence: Synthetic oligonucleotide
  Target: SCNA; (-) strand; PAM type: YTN; PAM sequence: TTT
ttaatttgttaaatgtggtg

SEQ ID NO: 54545 - DNA, 20 bp, Artificial Sequence
  Description of Artificial Sequence: Synthetic oligonucleotide
  Target: SCNA; (-) strand; PAM type: YTN; PAM sequence: CTT
tttaatttgttaaatgtggt

SEQ ID NO: 54546 - DNA, 20 bp, Artificial Sequence
  Description of Artificial Sequence: Synthetic oligonucleotide
  Target: SCNA; (-) strand; PAM type: YTN; PAM sequence: TTC
tttttaatttgttaaatgtg

SEQ ID NO: 54547 - DNA, 20 bp, Artificial Sequence
  Description of Artificial Sequence: Synthetic oligonucleotide
  Target: SCNA; (-) strand; PAM type: YTN; PAM sequence: TTC
acccggttctttttaatttg

SEQ ID NO: 54548 - DNA, 20 bp, Artificial Sequence
  Description of Artificial Sequence: Synthetic oligonucleotide
  Target: SCNA; (-) strand; PAM type: YTN; PAM sequence: TTG
tatcaaataaaatataaaat

SEQ ID NO: 54549 - DNA, 20 bp, Artificial Sequence
  Description of Artificial Sequence: Synthetic oligonucleotide
  Target: SCNA; (-) strand; PAM type: YTN; PAM sequence: TTG
aataagttgtatcaaataaa

SEQ ID NO: 54550 - DNA, 20 bp, Artificial Sequence
  Description of Artificial Sequence: Synthetic oligonucleotide
  Target: SCNA; (-) strand; PAM type: YTN; PAM sequence: TTT
gaataagttgtatcaaataa

SEQ ID NO: 54551 - DNA, 20 bp, Artificial Sequence
  Description of Artificial Sequence: Synthetic oligonucleotide
  Target: SCNA; (-) strand; PAM type: YTN; PAM sequence: TTT
tgaataagttgtatcaaata

SEQ ID NO: 54552 - DNA, 20 bp, Artificial Sequence
  Description of Artificial Sequence: Synthetic oligonucleotide
  Target: SCNA; (-) strand; PAM type: YTN; PAM sequence: CTA
taacattttgaataagttgt

SEQ ID NO: 54553 - DNA, 20 bp, Artificial Sequence
  Description of Artificial Sequence: Synthetic oligonucleotide
  Target: SCNA; (-) strand; PAM type: YTN; PAM sequence: TTA
catgtagaaactataacatt

SEQ ID NO: 54554 - DNA, 20 bp, Artificial Sequence
  Description of Artificial Sequence: Synthetic oligonucleotide
  Target: SCNA; (-) strand; PAM type: YTN; PAM sequence: TTA
tagattacatgtagaaacta

SEQ ID NO: 54555 - DNA, 20 bp, Artificial Sequence
  Description of Artificial Sequence: Synthetic oligonucleotide
  Target: SCNA; (-) strand; PAM type: YTN; PAM sequence: TTT
atagattacatgtagaaact

SEQ ID NO: 54556 - DNA, 20 bp, Artificial Sequence
  Description of Artificial Sequence: Synthetic oligonucleotide
  Target: SCNA; (-) strand; PAM type: YTN; PAM sequence: TTT
tatagattacatgtagaaac

SEQ ID NO: 54557 - DNA, 20 bp, Artificial Sequence
  Description of Artificial Sequence: Synthetic oligonucleotide
  Target: SCNA; (-) strand; PAM type: YTN; PAM sequence: TTT
ttatagattacatgtagaaa

SEQ ID NO: 54558 - DNA, 20 bp, Artificial Sequence
  Description of Artificial Sequence: Synthetic oligonucleotide
  Target: SCNA; (-) strand; PAM type: YTN; PAM sequence: TTT
tttatagattacatgtagaa

SEQ ID NO: 54559 - DNA, 20 bp, Artificial Sequence
  Description of Artificial Sequence: Synthetic oligonucleotide
  Target: SCNA; (-) strand; PAM type: YTN; PAM sequence: TTT
ttttatagattacatgtaga

SEQ ID NO: 54560 - DNA, 20 bp, Artificial Sequence
  Description of Artificial Sequence: Synthetic oligonucleotide
  Target: SCNA; (-) strand; PAM type: YTN; PAM sequence: CTC
agtaatttttttatagatta

SEQ ID NO: 54561 - DNA, 20 bp, Artificial Sequence
  Description of Artificial Sequence: Synthetic oligonucleotide
  Target: SCNA; (-) strand; PAM type: YTN; PAM sequence: TTC
tcagtaatttttttatagat

SEQ ID NO: 54562 - DNA, 20 bp, Artificial Sequence
  Description of Artificial Sequence: Synthetic oligonucleotide
  Target: SCNA; (-) strand; PAM type: YTN; PAM sequence: TTT
ctcagtaatttttttataga

SEQ ID NO: 54563 - DNA, 20 bp, Artificial Sequence
  Description of Artificial Sequence: Synthetic oligonucleotide
  Target: SCNA; (-) strand; PAM type: YTN; PAM sequence: TTA
tgaaaaaaacccataaaatt

SEQ ID NO: 54564 - DNA, 20 bp, Artificial Sequence
  Description of Artificial Sequence: Synthetic oligonucleotide
  Target: SCNA; (-) strand; PAM type: YTN; PAM sequence: TTC
aagacatattatgaaaaaaa

SEQ ID NO: 54565 - DNA, 20 bp, Artificial Sequence
  Description of Artificial Sequence: Synthetic oligonucleotide
  Target: SCNA; (-) strand; PAM type: YTN; PAM sequence: TTT
caagacatattatgaaaaaa

SEQ ID NO: 54566 - DNA, 20 bp, Artificial Sequence
  Description of Artificial Sequence: Synthetic oligonucleotide
  Target: SCNA; (-) strand; PAM type: YTN; PAM sequence: TTG
agatataggggtaaaataca

SEQ ID NO: 54567 - DNA, 20 bp, Artificial Sequence
  Description of Artificial Sequence: Synthetic oligonucleotide
  Target: SCNA; (-) strand; PAM type: YTN; PAM sequence: CTG
agttgagatataggggtaaa

SEQ ID NO: 54568 - DNA, 20 bp, Artificial Sequence
  Description of Artificial Sequence: Synthetic oligonucleotide
  Target: SCNA; (-) strand; PAM type: YTN; PAM sequence: CTA
gcctgagttgagatataggg

SEQ ID NO: 54569 - DNA, 20 bp, Artificial Sequence
  Description of Artificial Sequence: Synthetic oligonucleotide
  Target: SCNA; (-) strand; PAM type: YTN; PAM sequence: TTC
aaaagtagctagcctgagtt

SEQ ID NO: 54570 - DNA, 20 bp, Artificial Sequence
  Description of Artificial Sequence: Synthetic oligonucleotide
  Target: SCNA; (-) strand; PAM type: YTN; PAM sequence: TTT
caaaagtagctagcctgagt

SEQ ID NO: 54571 - DNA, 20 bp, Artificial Sequence
  Description of Artificial Sequence: Synthetic oligonucleotide
  Target: SCNA; (-) strand; PAM type: YTN; PAM sequence: CTA
tcaagcatttcaaaagtagc

SEQ ID NO: 54572 - DNA, 20 bp, Artificial Sequence
  Description of Artificial Sequence: Synthetic oligonucleotide
  Target: SCNA; (-) strand; PAM type: YTN; PAM sequence: TTG
ctatcaagcatttcaaaagt

SEQ ID NO: 54573 - DNA, 20 bp, Artificial Sequence
  Description of Artificial Sequence: Synthetic oligonucleotide
  Target: SCNA; (-) strand; PAM type: YTN; PAM sequence: CTA
gacacatgttgctatcaagc

SEQ ID NO: 54574 - DNA, 20 bp, Artificial Sequence
  Description of Artificial Sequence: Synthetic oligonucleotide
  Target: SCNA; (-) strand; PAM type: YTN; PAM sequence: CTG
tacaataccatagtgactag

SEQ ID NO: 54575 - DNA, 20 bp, Artificial Sequence
  Description of Artificial Sequence: Synthetic oligonucleotide
  Target: SCNA; (-) strand; PAM type: YTN; PAM sequence: CTC
tgtacaataccatagtgact

SEQ ID NO: 54576 - DNA, 20 bp, Artificial Sequence
  Description of Artificial Sequence: Synthetic oligonucleotide
  Target: SCNA; (-) strand; PAM type: YTN; PAM sequence: CTA
ctctgtacaataccatagtg

SEQ ID NO: 54577 - DNA, 20 bp, Artificial Sequence
  Description of Artificial Sequence: Synthetic oligonucleotide
  Target: SCNA; (-) strand; PAM type: YTN; PAM sequence: CTA
cacctactctgtacaatacc

SEQ ID NO: 54578 - DNA, 20 bp, Artificial Sequence
  Description of Artificial Sequence: Synthetic oligonucleotide
  Target: SCNA; (-) strand; PAM type: YTN; PAM sequence: CTC
tacacctactctgtacaata

SEQ ID NO: 54579 - DNA, 20 bp, Artificial Sequence
  Description of Artificial Sequence: Synthetic oligonucleotide
  Target: SCNA; (-) strand; PAM type: YTN; PAM sequence: TTG
atctctacacctactctgta

SEQ ID NO: 54580 - DNA, 20 bp, Artificial Sequence
  Description of Artificial Sequence: Synthetic oligonucleotide
  Target: SCNA; (-) strand; PAM type: YTN; PAM sequence: CTG
ttgatctctacacctactct

SEQ ID NO: 54581 - DNA, 20 bp, Artificial Sequence
  Description of Artificial Sequence: Synthetic oligonucleotide
  Target: SCNA; (-) strand; PAM type: YTN; PAM sequence: TTC
ctgttgatctctacacctac

SEQ ID NO: 54582 - DNA, 20 bp, Artificial Sequence
  Description of Artificial Sequence: Synthetic oligonucleotide
  Target: SCNA; (-) strand; PAM type: YTN; PAM sequence: TTT
cctgttgatctctacaccta

SEQ ID NO: 54583 - DNA, 20 bp, Artificial Sequence
  Description of Artificial Sequence: Synthetic oligonucleotide
  Target: SCNA; (-) strand; PAM type: YTN; PAM sequence: CTC
aataaatgtttcctgttgat

SEQ ID NO: 54584 - DNA, 20 bp, Artificial Sequence
  Description of Artificial Sequence: Synthetic oligonucleotide
  Target: SCNA; (-) strand; PAM type: YTN; PAM sequence: TTA
tataggtactcaataaatgt

SEQ ID NO: 54585 - DNA, 20 bp, Artificial Sequence
  Description of Artificial Sequence: Synthetic oligonucleotide
  Target: SCNA; (-) strand; PAM type: YTN; PAM sequence: CTT
atataggtactcaataaatg

SEQ ID NO: 54586 - DNA, 20 bp, Artificial Sequence
  Description of Artificial Sequence: Synthetic oligonucleotide
  Target: SCNA; (-) strand; PAM type: YTN; PAM sequence: TTC
ttatataggtactcaataaa

SEQ ID NO: 54587 - DNA, 20 bp, Artificial Sequence
  Description of Artificial Sequence: Synthetic oligonucleotide
  Target: SCNA; (-) strand; PAM type: YTN; PAM sequence: TTT
cttatataggtactcaataa

SEQ ID NO: 54588 - DNA, 20 bp, Artificial Sequence
  Description of Artificial Sequence: Synthetic oligonucleotide
  Target: SCNA; (-) strand; PAM type: YTN; PAM sequence: CTA
gtataatttcttatataggt

SEQ ID NO: 54589 - DNA, 20 bp, Artificial Sequence
  Description of Artificial Sequence: Synthetic oligonucleotide
  Target: SCNA; (-) strand; PAM type: YTN; PAM sequence: CTG
gtatctagtataatttctta

SEQ ID NO: 54590 - DNA, 20 bp, Artificial Sequence
  Description of Artificial Sequence: Synthetic oligonucleotide
  Target: SCNA; (-) strand; PAM type: YTN; PAM sequence: TTC
cctggtatctagtataattt

SEQ ID NO: 54591 - DNA, 20 bp, Artificial Sequence
  Description of Artificial Sequence: Synthetic oligonucleotide
  Target: SCNA; (-) strand; PAM type: YTN; PAM sequence: TTT
ccctggtatctagtataatt

SEQ ID NO: 54592 - DNA, 20 bp, Artificial Sequence
  Description of Artificial Sequence: Synthetic oligonucleotide
  Target: SCNA; (-) strand; PAM type: YTN; PAM sequence: TTG
gtttccctggtatctagtat

SEQ ID NO: 54593 - DNA, 20 bp, Artificial Sequence
  Description of Artificial Sequence: Synthetic oligonucleotide
  Target: SCNA; (-) strand; PAM type: YTN; PAM sequence: TTT
ggtttccctggtatctagta

SEQ ID NO: 54594 - DNA, 20 bp, Artificial Sequence
  Description of Artificial Sequence: Synthetic oligonucleotide
  Target: SCNA; (-) strand; PAM type: YTN; PAM sequence: TTT
tggtttccctggtatctagt

SEQ ID NO: 54595 - DNA, 20 bp, Artificial Sequence
  Description of Artificial Sequence: Synthetic oligonucleotide
  Target: SCNA; (-) strand; PAM type: YTN; PAM sequence: TTT
ttggtttccctggtatctag

SEQ ID NO: 54596 - DNA, 20 bp, Artificial Sequence
  Description of Artificial Sequence: Synthetic oligonucleotide
  Target: SCNA; (-) strand; PAM type: YTN; PAM sequence: CTT
tttggtttccctggtatcta

SEQ ID NO: 54597 - DNA, 20 bp, Artificial Sequence
  Description of Artificial Sequence: Synthetic oligonucleotide
  Target: SCNA; (-) strand; PAM type: YTN; PAM sequence: TTC
tttttggtttccctggtatc

SEQ ID NO: 54598 - DNA, 20 bp, Artificial Sequence
  Description of Artificial Sequence: Synthetic oligonucleotide
  Target: SCNA; (-) strand; PAM type: YTN; PAM sequence: TTT
ctttttggtttccctggtat

SEQ ID NO: 54599 - DNA, 20 bp, Artificial Sequence
  Description of Artificial Sequence: Synthetic oligonucleotide
  Target: SCNA; (-) strand; PAM type: YTN; PAM sequence: TTT
tctttttggtttccctggta

SEQ ID NO: 54600 - DNA, 20 bp, Artificial Sequence
  Description of Artificial Sequence: Synthetic oligonucleotide
  Target: SCNA; (-) strand; PAM type: YTN; PAM sequence: TTT
ttctttttggtttccctggt

SEQ ID NO: 54601 - DNA, 20 bp, Artificial Sequence
  Description of Artificial Sequence: Synthetic oligonucleotide
  Target: SCNA; (-) strand; PAM type: YTN; PAM sequence: TTT
tttctttttggtttccctgg

SEQ ID NO: 54602 - DNA, 20 bp, Artificial Sequence
  Description of Artificial Sequence: Synthetic oligonucleotide
  Target: SCNA; (-) strand; PAM type: YTN; PAM sequence: TTT
ttttctttttggtttccctg

SEQ ID NO: 54603 - DNA, 20 bp, Artificial Sequence
  Description of Artificial Sequence: Synthetic oligonucleotide
  Target: SCNA; (-) strand; PAM type: YTN; PAM sequence: CTT
tttttctttttggtttccct

SEQ ID NO: 54604 - DNA, 20 bp, Artificial Sequence
  Description of Artificial Sequence: Synthetic oligonucleotide
  Target: SCNA; (-) strand; PAM type: YTN; PAM sequence: TTA
cagatgactttttttctttt

SEQ ID NO: 54605 - DNA, 20 bp, Artificial Sequence
  Description of Artificial Sequence: Synthetic oligonucleotide
  Target: SCNA; (-) strand; PAM type: YTN; PAM sequence: CTT
acagatgactttttttcttt

SEQ ID NO: 54606 - DNA, 20 bp, Artificial Sequence
  Description of Artificial Sequence: Synthetic oligonucleotide
  Target: SCNA; (-) strand; PAM type: YTN; PAM sequence: TTC
ttacagatgactttttttct

SEQ ID NO: 54607 - DNA, 20 bp, Artificial Sequence
  Description of Artificial Sequence: Synthetic oligonucleotide
  Target: SCNA; (-) strand; PAM type: YTN; PAM sequence: CTT
cttacagatgactttttttc

SEQ ID NO: 54608 - DNA, 20 bp, Artificial Sequence
  Description of Artificial Sequence: Synthetic oligonucleotide
  Target: SCNA; (-) strand; PAM type: YTN; PAM sequence: CTA
aacttcttacagatgacttt

SEQ ID NO: 54609 - DNA, 20 bp, Artificial Sequence
  Description of Artificial Sequence: Synthetic oligonucleotide
  Target: SCNA; (-) strand; PAM type: YTN; PAM sequence: CTG
ctaaacttcttacagatgac

SEQ ID NO: 54610 - DNA, 20 bp, Artificial Sequence
  Description of Artificial Sequence: Synthetic oligonucleotide
  Target: SCNA; (-) strand; PAM type: YTN; PAM sequence: CTC
ctgctaaacttcttacagat

SEQ ID NO: 54611 - DNA, 20 bp, Artificial Sequence
  Description of Artificial Sequence: Synthetic oligonucleotide
  Target: SCNA; (-) strand; PAM type: YTN; PAM sequence: TTG
ctcctgctaaacttcttaca

SEQ ID NO: 54612 - DNA, 20 bp, Artificial Sequence
  Description of Artificial Sequence: Synthetic oligonucleotide
  Target: SCNA; (-) strand; PAM type: YTN; PAM sequence: CTG
tgttgctcctgctaaacttc

SEQ ID NO: 54613 - DNA, 20 bp, Artificial Sequence
  Description of Artificial Sequence: Synthetic oligonucleotide
  Target: SCNA; (-) strand; PAM type: YTN; PAM sequence: TTC
actgtgttgctcctgctaaa

SEQ ID NO: 54614 - DNA, 20 bp, Artificial Sequence
  Description of Artificial Sequence: Synthetic oligonucleotide
  Target: SCNA; (-) strand; PAM type: YTN; PAM sequence: CTG
ttcactgtgttgctcctgct

SEQ ID NO: 54615 - DNA, 20 bp, Artificial Sequence
  Description of Artificial Sequence: Synthetic oligonucleotide
  Target: SCNA; (-) strand; PAM type: YTN; PAM sequence: CTG
gaatctgttcactgtgttgc

SEQ ID NO: 54616 - DNA, 20 bp, Artificial Sequence
  Description of Artificial Sequence: Synthetic oligonucleotide
  Target: SCNA; (-) strand; PAM type: YTN; PAM sequence: CTG
ctggaatctgttcactgtgt

SEQ ID NO: 54617 - DNA, 20 bp, Artificial Sequence
  Description of Artificial Sequence: Synthetic oligonucleotide
  Target: SCNA; (-) strand; PAM type: YTN; PAM sequence: CTC
tgctggaatctgttcactgt

SEQ ID NO: 54618 - DNA, 20 bp, Artificial Sequence
  Description of Artificial Sequence: Synthetic oligonucleotide
  Target: SCNA; (-) strand; PAM type: YTN; PAM sequence: CTG
ccataatctctgctggaatc

SEQ ID NO: 54619 - DNA, 20 bp, Artificial Sequence
  Description of Artificial Sequence: Synthetic oligonucleotide
  Target: SCNA; (-) strand; PAM type: YTN; PAM sequence: CTC
tgccataatctctgctggaa

SEQ ID NO: 54620 - DNA, 20 bp, Artificial Sequence
  Description of Artificial Sequence: Synthetic oligonucleotide
  Target: SCNA; (-) strand; PAM type: YTN; PAM sequence: TTG
cccaagatcacagtaatctc

SEQ ID NO: 54621 - DNA, 20 bp, Artificial Sequence
  Description of Artificial Sequence: Synthetic oligonucleotide
  Target: SCNA; (-) strand; PAM type: YTN; PAM sequence: TTT
gcccaagatcacagtaatct

SEQ ID NO: 54622 - DNA, 20 bp, Artificial Sequence
  Description of Artificial Sequence: Synthetic oligonucleotide
  Target: SCNA; (-) strand; PAM type: YTN; PAM sequence: TTT
tgcccaagatcacagtaatc

SEQ ID NO: 54623 - DNA, 20 bp, Artificial Sequence
  Description of Artificial Sequence: Synthetic oligonucleotide
  Target: SCNA; (-) strand; PAM type: YTN; PAM sequence: CTT
ttgcccaagatcacagtaat

SEQ ID NO: 54624 - DNA, 20 bp, Artificial Sequence
  Description of Artificial Sequence: Synthetic oligonucleotide
  Target: SCNA; (-) strand; PAM type: YTN; PAM sequence: CTA
agatacacacttttgcccaa

SEQ ID NO: 54625 - DNA, 20 bp, Artificial Sequence
  Description of Artificial Sequence: Synthetic oligonucleotide
  Target: SCNA; (-) strand; PAM type: YTN; PAM sequence: TTC
ctaagatacacacttttgcc

SEQ ID NO: 54626 - DNA, 20 bp, Artificial Sequence
  Description of Artificial Sequence: Synthetic oligonucleotide
  Target: SCNA; (-) strand; PAM type: YTN; PAM sequence: TTA
aattcctaagatacacactt

SEQ ID NO: 54627 - DNA, 20 bp, Artificial Sequence
  Description of Artificial Sequence: Synthetic oligonucleotide
  Target: SCNA; (-) strand; PAM type: YTN; PAM sequence: CTT
aaattcctaagatacacact

SEQ ID NO: 54628 - DNA, 20 bp, Artificial Sequence
  Description of Artificial Sequence: Synthetic oligonucleotide
  Target: SCNA; (-) strand; PAM type: YTN; PAM sequence: TTA
aatcttaaattcctaagata

SEQ ID NO: 54629 - DNA, 20 bp, Artificial Sequence
  Description of Artificial Sequence: Synthetic oligonucleotide
  Target: SCNA; (-) strand; PAM type: YTN; PAM sequence: CTT
aaatcttaaattcctaagat

SEQ ID NO: 54630 - DNA, 20 bp, Artificial Sequence
  Description of Artificial Sequence: Synthetic oligonucleotide
  Target: SCNA; (-) strand; PAM type: YTN; PAM sequence: TTC
ttaaatcttaaattcctaag

SEQ ID NO: 54631 - DNA, 20 bp, Artificial Sequence
  Description of Artificial Sequence: Synthetic oligonucleotide
  Target: SCNA; (-) strand; PAM type: YTN; PAM sequence: TTT
cttaaatcttaaattcctaa

SEQ ID NO: 54632 - DNA, 20 bp, Artificial Sequence
  Description of Artificial Sequence: Synthetic oligonucleotide
  Target: SCNA; (-) strand; PAM type: YTN; PAM sequence: CTT
tcttaaatcttaaattccta

SEQ ID NO: 54633 - DNA, 20 bp, Artificial Sequence
  Description of Artificial Sequence: Synthetic oligonucleotide
  Target: SCNA; (-) strand; PAM type: YTN; PAM sequence: TTC
tttcttaaatcttaaattcc

SEQ ID NO: 54634 - DNA, 20 bp, Artificial Sequence
  Description of Artificial Sequence: Synthetic oligonucleotide
  Target: SCNA; (-) strand; PAM type: YTN; PAM sequence: CTA
aaattctttcttaaatctta

SEQ ID NO: 54635 - DNA, 20 bp, Artificial Sequence
  Description of Artificial Sequence: Synthetic oligonucleotide
  Target: SCNA; (-) strand; PAM type: YTN; PAM sequence: TTC
atgcctaaaattctttctta

SEQ ID NO: 54636 - DNA, 20 bp, Artificial Sequence
  Description of Artificial Sequence: Synthetic oligonucleotide
  Target: SCNA; (-) strand; PAM type: YTN; PAM sequence: TTG
tcatatagttcatgcctaaa

SEQ ID NO: 54637 - DNA, 20 bp, Artificial Sequence
  Description of Artificial Sequence: Synthetic oligonucleotide
  Target: SCNA; (-) strand; PAM type: YTN; PAM sequence: TTT
gtcatatagttcatgcctaa

SEQ ID NO: 54638 - DNA, 20 bp, Artificial Sequence
  Description of Artificial Sequence: Synthetic oligonucleotide
  Target: SCNA; (-) strand; PAM type: YTN; PAM sequence: TTA
tgtatgtttgtcatatagtt

SEQ ID NO: 54639 - DNA, 20 bp, Artificial Sequence
  Description of Artificial Sequence: Synthetic oligonucleotide
  Target: SCNA; (-) strand; PAM type: YTN; PAM sequence: TTT
atgtatgtttgtcatatagt

SEQ ID NO: 54640 - DNA, 20 bp, Artificial Sequence
  Description of Artificial Sequence: Synthetic oligonucleotide
  Target: SCNA; (-) strand; PAM type: YTN; PAM sequence: CTT
tatgtatgtttgtcatatag

SEQ ID NO: 54641 - DNA, 20 bp, Artificial Sequence
  Description of Artificial Sequence: Synthetic oligonucleotide
  Target: SCNA; (-) strand; PAM type: YTN; PAM sequence: CTG
cctttatgtatgtttgtcat

SEQ ID NO: 54642 - DNA, 20 bp, Artificial Sequence
  Description of Artificial Sequence: Synthetic oligonucleotide
  Target: SCNA; (-) strand; PAM type: YTN; PAM sequence: CTC
ctgcctttatgtatgtttgt

SEQ ID NO: 54643 - DNA, 20 bp, Artificial Sequence
  Description of Artificial Sequence: Synthetic oligonucleotide
  Target: SCNA; (-) strand; PAM type: YTN; PAM sequence: TTC
tcctgcctttatgtatgttt

SEQ ID NO: 54644 - DNA, 20 bp, Artificial Sequence
  Description of Artificial Sequence: Synthetic oligonucleotide
  Target: SCNA; (-) strand; PAM type: YTN; PAM sequence: CTT
ctcctgcctttatgtatgtt

SEQ ID NO: 54645 - DNA, 20 bp, Artificial Sequence
  Description of Artificial Sequence: Synthetic oligonucleotide
  Target: SCNA; (-) strand; PAM type: YTN; PAM sequence: TTG
tcaccagagcatagcaggct

SEQ ID NO: 54646 - DNA, 20 bp, Artificial Sequence
  Description of Artificial Sequence: Synthetic oligonucleotide
  Target: SCNA; (-) strand; PAM type: YTN; PAM sequence: TTG
atccattgtcaccagagcat

SEQ ID NO: 54647 - DNA, 20 bp, Artificial Sequence
  Description of Artificial Sequence: Synthetic oligonucleotide
  Target: SCNA; (-) strand; PAM type: YTN; PAM sequence: CTG
gttgatccattgtcaccaga

SEQ ID NO: 54648 - DNA, 20 bp, Artificial Sequence
  Description of Artificial Sequence: Synthetic oligonucleotide
  Target: SCNA; (-) strand; PAM type: YTN; PAM sequence: CTA
atactggttgatccattgtc

SEQ ID NO: 54649 - DNA, 20 bp, Artificial Sequence
  Description of Artificial Sequence: Synthetic oligonucleotide
  Target: SCNA; (-) strand; PAM type: YTN; PAM sequence: CTC
taatactggttgatccattg

SEQ ID NO: 54650 - DNA, 20 bp, Artificial Sequence
  Description of Artificial Sequence: Synthetic oligonucleotide
  Target: SCNA; (-) strand; PAM type: YTN; PAM sequence: TTC
tctaatactggttgatccat

SEQ ID NO: 54651 - DNA, 20 bp, Artificial Sequence
  Description of Artificial Sequence: Synthetic oligonucleotide
  Target: SCNA; (-) strand; PAM type: YTN; PAM sequence: CTA
tcatgtgaattctctaatac

SEQ ID NO: 54652 - DNA, 20 bp, Artificial Sequence
  Description of Artificial Sequence: Synthetic oligonucleotide
  Target: SCNA; (-) strand; PAM type: YTN; PAM sequence: TTC
agtatctatcatgtgaattc

SEQ ID NO: 54653 - DNA, 20 bp, Artificial Sequence
  Description of Artificial Sequence: Synthetic oligonucleotide
  Target: SCNA; (-) strand; PAM type: YTN; PAM sequence: CTG
agcatccaggaaattcagta

SEQ ID NO: 54654 - DNA, 20 bp, Artificial Sequence
  Description of Artificial Sequence: Synthetic oligonucleotide
  Target: SCNA; (-) strand; PAM type: YTN; PAM sequence: CTA
accactgagcatccaggaaa

SEQ ID NO: 54655 - DNA, 20 bp, Artificial Sequence
  Description of Artificial Sequence: Synthetic oligonucleotide
  Target: SCNA; (-) strand; PAM type: YTN; PAM sequence: TTA
gctaaccactgagcatccag

SEQ ID NO: 54656 - DNA, 20 bp, Artificial Sequence
  Description of Artificial Sequence: Synthetic oligonucleotide
  Target: SCNA; (-) strand; PAM type: YTN; PAM sequence: CTT
agctaaccactgagcatcca

SEQ ID NO: 54657 - DNA, 20 bp, Artificial Sequence
  Description of Artificial Sequence: Synthetic oligonucleotide
  Target: SCNA; (-) strand; PAM type: YTN; PAM sequence: TTA
agacttagctaaccactgag

SEQ ID NO: 54658 - DNA, 20 bp, Artificial Sequence
  Description of Artificial Sequence: Synthetic oligonucleotide
  Target: SCNA; (-) strand; PAM type: YTN; PAM sequence: CTT
aagacttagctaaccactga

SEQ ID NO: 54659 - DNA, 20 bp, Artificial Sequence
  Description of Artificial Sequence: Synthetic oligonucleotide
  Target: SCNA; (-) strand; PAM type: YTN; PAM sequence: TTC
ataaacttaagacttagcta

SEQ ID NO: 54660 - DNA, 20 bp, Artificial Sequence
  Description of Artificial Sequence: Synthetic oligonucleotide
  Target: SCNA; (-) strand; PAM type: YTN; PAM sequence: TTC
attcataaacttaagactta

SEQ ID NO: 54661 - DNA, 20 bp, Artificial Sequence
  Description of Artificial Sequence: Synthetic oligonucleotide
  Target: SCNA; (-) strand; PAM type: YTN; PAM sequence: TTG
ttcattcataaacttaagac

SEQ ID NO: 54662 - DNA, 20 bp, Artificial Sequence
  Description of Artificial Sequence: Synthetic oligonucleotide
  Target: SCNA; (-) strand; PAM type: YTN; PAM sequence: TTT
gttcattcataaacttaaga

SEQ ID NO: 54663 - DNA, 20 bp, Artificial Sequence
  Description of Artificial Sequence: Synthetic oligonucleotide
  Target: SCNA; (-) strand; PAM type: YTN; PAM sequence: TTG
tgtcatttgttcattcataa

SEQ ID NO: 54664 - DNA, 20 bp, Artificial Sequence
  Description of Artificial Sequence: Synthetic oligonucleotide
  Target: SCNA; (-) strand; PAM type: YTN; PAM sequence: CTT
gtgtcatttgttcattcata

SEQ ID NO: 54665 - DNA, 20 bp, Artificial Sequence
  Description of Artificial Sequence: Synthetic oligonucleotide
  Target: SCNA; (-) strand; PAM type: YTN; PAM sequence: TTG
tatcttgtgtcatttgttca

SEQ ID NO: 54666 - DNA, 20 bp, Artificial Sequence
  Description of Artificial Sequence: Synthetic oligonucleotide
  Target: SCNA; (-) strand; PAM type: YTN; PAM sequence: CTA
atgttgtatcttgtgtcatt

SEQ ID NO: 54667 - DNA, 20 bp, Artificial Sequence
  Description of Artificial Sequence: Synthetic oligonucleotide
  Target: SCNA; (-) strand; PAM type: YTN; PAM sequence: TTC
taatgttgtatcttgtgtca

SEQ ID NO: 54668 - DNA, 20 bp, Artificial Sequence
  Description of Artificial Sequence: Synthetic oligonucleotide
  Target: SCNA; (-) strand; PAM type: YTN; PAM sequence: CTC
gttctaatgttgtatcttgt

SEQ ID NO: 54669 - DNA, 20 bp, Artificial Sequence
  Description of Artificial Sequence: Synthetic oligonucleotide
  Target: SCNA; (-) strand; PAM type: YTN; PAM sequence: CTC
catcctcgttctaatgttgt

SEQ ID NO: 54670 - DNA, 20 bp, Artificial Sequence
  Description of Artificial Sequence: Synthetic oligonucleotide
  Target: SCNA; (-) strand; PAM type: YTN; PAM sequence: TTC
tccatcctcgttctaatgtt

SEQ ID NO: 54671 - DNA, 20 bp, Artificial Sequence
  Description of Artificial Sequence: Synthetic oligonucleotide
  Target: SCNA; (-) strand; PAM type: YTN; PAM sequence: TTT
ctccatcctcgttctaatgt

SEQ ID NO: 54672 - DNA, 20 bp, Artificial Sequence
  Description of Artificial Sequence: Synthetic oligonucleotide
  Target: SCNA; (-) strand; PAM type: YTN; PAM sequence: TTT
tctccatcctcgttctaatg

SEQ ID NO: 54673 - DNA, 20 bp, Artificial Sequence
  Description of Artificial Sequence: Synthetic oligonucleotide
  Target: SCNA; (-) strand; PAM type: YTN; PAM sequence: TTT
ttctccatcctcgttctaat

SEQ ID NO: 54674 - DNA, 20 bp, Artificial Sequence
  Description of Artificial Sequence: Synthetic oligonucleotide
  Target: SCNA; (-) strand; PAM type: YTN; PAM sequence: TTT
tttctccatcctcgttctaa

SEQ ID NO: 54675 - DNA, 20 bp, Artificial Sequence
  Description of Artificial Sequence: Synthetic oligonucleotide
  Target: SCNA; (-) strand; PAM type: YTN; PAM sequence: TTA
tattttttctccatcctcgt

SEQ ID NO: 54676 - DNA, 20 bp, Artificial Sequence
  Description of Artificial Sequence: Synthetic oligonucleotide
  Target: SCNA; (-) strand; PAM type: YTN; PAM sequence: TTT
atattttttctccatcctcg

SEQ ID NO: 54677 - DNA, 20 bp, Artificial Sequence
  Description of Artificial Sequence: Synthetic oligonucleotide
  Target: SCNA; (-) strand; PAM type: YTN; PAM sequence: TTT
tatattttttctccatcctc

SEQ ID NO: 54678 - DNA, 20 bp, Artificial Sequence
  Description of Artificial Sequence: Synthetic oligonucleotide
  Target: SCNA; (-) strand; PAM type: YTN; PAM sequence: TTA
aagattttatattttttctc

SEQ ID NO: 54679 - DNA, 20 bp, Artificial Sequence
  Description of Artificial Sequence: Synthetic oligonucleotide
  Target: SCNA; (-) strand; PAM type: YTN; PAM sequence: TTT
aaagattttatattttttct

SEQ ID NO: 54680 - DNA, 20 bp, Artificial Sequence
  Description of Artificial Sequence: Synthetic oligonucleotide
  Target: SCNA; (-) strand; PAM type: YTN; PAM sequence: TTT
taaagattttatattttttc

SEQ ID NO: 54681 - DNA, 20 bp, Artificial Sequence
  Description of Artificial Sequence: Synthetic oligonucleotide
  Target: SCNA; (-) strand; PAM type: YTN; PAM sequence: CTG
atattttaaagattttatat

SEQ ID NO: 54682 - DNA, 20 bp, Artificial Sequence
  Description of Artificial Sequence: Synthetic oligonucleotide
  Target: SCNA; (-) strand; PAM type: YTN; PAM sequence: TTG
actgatattttaaagatttt

SEQ ID NO: 54683 - DNA, 20 bp, Artificial Sequence
  Description of Artificial Sequence: Synthetic oligonucleotide
  Target: SCNA; (-) strand; PAM type: YTN; PAM sequence: TTT
gactgatattttaaagattt

SEQ ID NO: 54684 - DNA, 20 bp, Artificial Sequence
  Description of Artificial Sequence: Synthetic oligonucleotide
  Target: SCNA; (-) strand; PAM type: YTN; PAM sequence: TTG
tcgtttgactgatattttaa

SEQ ID NO: 54685 - DNA, 20 bp, Artificial Sequence
  Description of Artificial Sequence: Synthetic oligonucleotide
  Target: SCNA; (-) strand; PAM type: YTN; PAM sequence: TTT
gtcgtttgactgatatttta

SEQ ID NO: 54686 - DNA, 20 bp, Artificial Sequence
  Description of Artificial Sequence: Synthetic oligonucleotide
  Target: SCNA; (-) strand; PAM type: YTN; PAM sequence: CTG
gaatttgtcgtttgactgat

SEQ ID NO: 54687 - DNA, 20 bp, Artificial Sequence
  Description of Artificial Sequence: Synthetic oligonucleotide
  Target: SCNA; (-) strand; PAM type: YTN; PAM sequence: TTC
ataagaagctggaatttgtc

SEQ ID NO: 54688 - DNA, 20 bp, Artificial Sequence
  Description of Artificial Sequence: Synthetic oligonucleotide
  Target: SCNA; (-) strand; PAM type: YTN; PAM sequence: TTC
attcataagaagctggaatt

SEQ ID NO: 54689 - DNA, 20 bp, Artificial Sequence
  Description of Artificial Sequence: Synthetic oligonucleotide
  Target: SCNA; (-) strand; PAM type: YTN; PAM sequence: CTT
cattcataagaagctggaat

SEQ ID NO: 54690 - DNA, 20 bp, Artificial Sequence
  Description of Artificial Sequence: Synthetic oligonucleotide
  Target: SCNA; (-) strand; PAM type: YTN; PAM sequence: CTC
ttcattcataagaagctgga

SEQ ID NO: 54691 - DNA, 20 bp, Artificial Sequence
  Description of Artificial Sequence: Synthetic oligonucleotide
  Target: SCNA; (-) strand; PAM type: YTN; PAM sequence: CTG
gctcttcattcataagaagc

SEQ ID NO: 54692 - DNA, 20 bp, Artificial Sequence
  Description of Artificial Sequence: Synthetic oligonucleotide
  Target: SCNA; (-) strand; PAM type: YTN; PAM sequence: TTA
actggctcttcattcataag

SEQ ID NO: 54693 - DNA, 20 bp, Artificial Sequence
  Description of Artificial Sequence: Synthetic oligonucleotide
  Target: SCNA; (-) strand; PAM type: YTN; PAM sequence: TTT
aactggctcttcattcataa

SEQ ID NO: 54694 - DNA, 20 bp, Artificial Sequence
  Description of Artificial Sequence: Synthetic oligonucleotide
  Target: SCNA; (-) strand; PAM type: YTN; PAM sequence: TTC
aaacgtatttaactggctct

SEQ ID NO: 54695 - DNA, 20 bp, Artificial Sequence
  Description of Artificial Sequence: Synthetic oligonucleotide
  Target: SCNA; (-) strand; PAM type: YTN; PAM sequence: TTC
attcaaacgtatttaactgg

SEQ ID NO: 54696 - DNA, 20 bp, Artificial Sequence
  Description of Artificial Sequence: Synthetic oligonucleotide
  Target: SCNA; (-) strand; PAM type: YTN; PAM sequence: TTT
cattcaaacgtatttaactg

SEQ ID NO: 54697 - DNA, 20 bp, Artificial Sequence
  Description of Artificial Sequence: Synthetic oligonucleotide
  Target: SCNA; (-) strand; PAM type: YTN; PAM sequence: TTT
tcattcaaacgtatttaact

SEQ ID NO: 54698 - DNA, 20 bp, Artificial Sequence
  Description of Artificial Sequence: Synthetic oligonucleotide
  Target: SCNA; (-) strand; PAM type: YTN; PAM sequence: TTT
ttcattcaaacgtatttaac

SEQ ID NO: 54699 - DNA, 20 bp, Artificial Sequence
  Description of Artificial Sequence: Synthetic oligonucleotide
  Target: SCNA; (-) strand; PAM type: YTN; PAM sequence: TTC
acacgtcatttttcattcaa

SEQ ID NO: 54700 - DNA, 20 bp, Artificial Sequence
  Description of Artificial Sequence: Synthetic oligonucleotide
  Target: SCNA; (-) strand; PAM type: YTN; PAM sequence: CTT
cacacgtcatttttcattca

SEQ ID NO: 54701 - DNA, 20 bp, Artificial Sequence
  Description of Artificial Sequence: Synthetic oligonucleotide
  Target: SCNA; (-) strand; PAM type: YTN; PAM sequence: CTG
ccacatatatcacttcacac

SEQ ID NO: 54702 - DNA, 20 bp, Artificial Sequence
  Description of Artificial Sequence: Synthetic oligonucleotide
  Target: SCNA; (-) strand; PAM type: YTN; PAM sequence: TTA
actgccacatatatcacttc

SEQ ID NO: 54703 - DNA, 20 bp, Artificial Sequence
  Description of Artificial Sequence: Synthetic oligonucleotide
  Target: SCNA; (-) strand; PAM type: YTN; PAM sequence: TTT
aactgccacatatatcactt

SEQ ID NO: 54704 - DNA, 20 bp, Artificial Sequence
  Description of Artificial Sequence: Synthetic oligonucleotide
  Target: SCNA; (-) strand; PAM type: YTN; PAM sequence: CTT
taactgccacatatatcact

SEQ ID NO: 54705 - DNA, 20 bp, Artificial Sequence
  Description of Artificial Sequence: Synthetic oligonucleotide
  Target: SCNA; (-) strand; PAM type: YTN; PAM sequence: TTA
actttaactgccacatatat

SEQ ID NO: 54706 - DNA, 20 bp, Artificial Sequence
  Description of Artificial Sequence: Synthetic oligonucleotide
  Target: SCNA; (-) strand; PAM type: YTN; PAM sequence: CTG
gttaactttaactgccacat

SEQ ID NO: 54707 - DNA, 20 bp, Artificial Sequence
  Description of Artificial Sequence: Synthetic oligonucleotide
  Target: SCNA; (-) strand; PAM type: YTN; PAM sequence: CTC
ctggttaactttaactgcca

SEQ ID NO: 54708 - DNA, 20 bp, Artificial Sequence
  Description of Artificial Sequence: Synthetic oligonucleotide
  Target: SCNA; (-) strand; PAM type: YTN; PAM sequence: CTC
tcctggttaactttaactgc

SEQ ID NO: 54709 - DNA, 20 bp, Artificial Sequence
  Description of Artificial Sequence: Synthetic oligonucleotide
  Target: SCNA; (-) strand; PAM type: YTN; PAM sequence: TTC
tctcctggttaactttaact

SEQ ID NO: 54710 - DNA, 20 bp, Artificial Sequence
  Description of Artificial Sequence: Synthetic oligonucleotide
  Target: SCNA; (-) strand; PAM type: YTN; PAM sequence: TTT
ctctcctggttaactttaac

SEQ ID NO: 54711 - DNA, 20 bp, Artificial Sequence
  Description of Artificial Sequence: Synthetic oligonucleotide
  Target: SCNA; (-) strand; PAM type: YTN; PAM sequence: CTT
tctctcctggttaactttaa

SEQ ID NO: 54712 - DNA, 20 bp, Artificial Sequence
  Description of Artificial Sequence: Synthetic oligonucleotide
  Target: SCNA; (-) strand; PAM type: YTN; PAM sequence: TTA
gctttctctcctggttaact

SEQ ID NO: 54713 - DNA, 20 bp, Artificial Sequence
  Description of Artificial Sequence: Synthetic oligonucleotide
  Target: SCNA; (-) strand; PAM type: YTN; PAM sequence: TTT
agctttctctcctggttaac

SEQ ID NO: 54714 - DNA, 20 bp, Artificial Sequence
  Description of Artificial Sequence: Synthetic oligonucleotide
  Target: SCNA; (-) strand; PAM type: YTN; PAM sequence: CTG
tgcagcggtagtttagcttt

SEQ ID NO: 54715 - DNA, 20 bp, Artificial Sequence
  Description of Artificial Sequence: Synthetic oligonucleotide
  Target: SCNA; (-) strand; PAM type: YTN; PAM sequence: CTG
agcctgtgcagcggtagttt

SEQ ID NO: 54716 - DNA, 20 bp, Artificial Sequence
  Description of Artificial Sequence: Synthetic oligonucleotide
  Target: SCNA; (-) strand; PAM type: YTN; PAM sequence: TTA
gtgcaatagatgctgagcct

SEQ ID NO: 54717 - DNA, 20 bp, Artificial Sequence
  Description of Artificial Sequence: Synthetic oligonucleotide
  Target: SCNA; (-) strand; PAM type: YTN; PAM sequence: CTA
gattagtgcaatagatgctg

SEQ ID NO: 54718 - DNA, 20 bp, Artificial Sequence
  Description of Artificial Sequence: Synthetic oligonucleotide
  Target: SCNA; (-) strand; PAM type: YTN; PAM sequence: CTC
atgcctagattagtgcaata

SEQ ID NO: 54719 - DNA, 20 bp, Artificial Sequence
  Description of Artificial Sequence: Synthetic oligonucleotide
  Target: SCNA; (-) strand; PAM type: YTN; PAM sequence: TTG
gataggacacaactcatgcc

SEQ ID NO: 54720 - DNA, 20 bp, Artificial Sequence
  Description of Artificial Sequence: Synthetic oligonucleotide
  Target: SCNA; (-) strand; PAM type: YTN; PAM sequence: TTT
ggataggacacaactcatgc

SEQ ID NO: 54721 - DNA, 20 bp, Artificial Sequence
  Description of Artificial Sequence: Synthetic oligonucleotide
  Target: SCNA; (-) strand; PAM type: YTN; PAM sequence: TTA
tgaaggtttggataggacac

SEQ ID NO: 54722 - DNA, 20 bp, Artificial Sequence
  Description of Artificial Sequence: Synthetic oligonucleotide
  Target: SCNA; (-) strand; PAM type: YTN; PAM sequence: TTC
cattatgaaggtttggatag

SEQ ID NO: 54723 - DNA, 20 bp, Artificial Sequence
  Description of Artificial Sequence: Synthetic oligonucleotide
  Target: SCNA; (-) strand; PAM type: YTN; PAM sequence: CTT
ccattatgaaggtttggata

SEQ ID NO: 54724 - DNA, 20 bp, Artificial Sequence
  Description of Artificial Sequence: Synthetic oligonucleotide
  Target: SCNA; (-) strand; PAM type: YTN; PAM sequence: CTC
ttccattatgaaggtttgga

SEQ ID NO: 54725 - DNA, 20 bp, Artificial Sequence
  Description of Artificial Sequence: Synthetic oligonucleotide
  Target: SCNA; (-) strand; PAM type: YTN; PAM sequence: CTC
ccccatctcttccattatga

SEQ ID NO: 54726 - DNA, 20 bp, Artificial Sequence
  Description of Artificial Sequence: Synthetic oligonucleotide
  Target: SCNA; (-) strand; PAM type: YTN; PAM sequence: CTC
tcccccatctcttccattat

SEQ ID NO: 54727 - DNA, 20 bp, Artificial Sequence
  Description of Artificial Sequence: Synthetic oligonucleotide
  Target: SCNA; (-) strand; PAM type: YTN; PAM sequence: TTC
tctcccccatctcttccatt

SEQ ID NO: 54728 - DNA, 20 bp, Artificial Sequence
  Description of Artificial Sequence: Synthetic oligonucleotide
  Target: SCNA; (-) strand; PAM type: YTN; PAM sequence: TTC
attctctcccccatctcttc

SEQ ID NO: 54729 - DNA, 20 bp, Artificial Sequence
  Description of Artificial Sequence: Synthetic oligonucleotide
  Target: SCNA; (-) strand; PAM type: YTN; PAM sequence: TTT
cattctctcccccatctctt

SEQ ID NO: 54730 - DNA, 20 bp, Artificial Sequence
  Description of Artificial Sequence: Synthetic oligonucleotide
  Target: SCNA; (-) strand; PAM type: YTN; PAM sequence: CTT
tcattctctcccccatctct

SEQ ID NO: 54731 - DNA, 20 bp, Artificial Sequence
  Description of Artificial Sequence: Synthetic oligonucleotide
  Target: SCNA; (-) strand; PAM type: YTN; PAM sequence: CTC
tttcattctctcccccatct

SEQ ID NO: 54732 - DNA, 20 bp, Artificial Sequence
  Description of Artificial Sequence: Synthetic oligonucleotide
  Target: SCNA; (-) strand; PAM type: YTN; PAM sequence: CTC
tctttcattctctcccccat

SEQ ID NO: 54733 - DNA, 20 bp, Artificial Sequence
  Description of Artificial Sequence: Synthetic oligonucleotide
  Target: SCNA; (-) strand; PAM type: YTN; PAM sequence: TTC
caatctctctttcattctct

SEQ ID NO: 54734 - DNA, 20 bp, Artificial Sequence
  Description of Artificial Sequence: Synthetic oligonucleotide
  Target: SCNA; (-) strand; PAM type: YTN; PAM sequence: TTT
ccaatctctctttcattctc

SEQ ID NO: 54735 - DNA, 20 bp, Artificial Sequence
  Description of Artificial Sequence: Synthetic oligonucleotide
  Target: SCNA; (-) strand; PAM type: YTN; PAM sequence: TTT
tccaatctctctttcattct

SEQ ID NO: 54736 - DNA, 20 bp, Artificial Sequence
  Description of Artificial Sequence: Synthetic oligonucleotide
  Target: SCNA; (-) strand; PAM type: YTN; PAM sequence: TTT
ttccaatctctctttcattc

SEQ ID NO: 54737 - DNA, 20 bp, Artificial Sequence
  Description of Artificial Sequence: Synthetic oligonucleotide
  Target: SCNA; (-) strand; PAM type: YTN; PAM sequence: TTT
tttccaatctctctttcatt

SEQ ID NO: 54738 - DNA, 20 bp, Artificial Sequence
  Description of Artificial Sequence: Synthetic oligonucleotide
  Target: SCNA; (-) strand; PAM type: YTN; PAM sequence: TTG
ttttttccaatctctctttc

SEQ ID NO: 54739 - DNA, 20 bp, Artificial Sequence
  Description of Artificial Sequence: Synthetic oligonucleotide
  Target: SCNA; (-) strand; PAM type: YTN; PAM sequence: CTT
gttttttccaatctctcttt

SEQ ID NO: 54740 - DNA, 20 bp, Artificial Sequence
  Description of Artificial Sequence: Synthetic oligonucleotide
  Target: SCNA; (-) strand; PAM type: YTN; PAM sequence: TTA
ggatccttgttttttccaat

SEQ ID NO: 54741 - DNA, 20 bp, Artificial Sequence
  Description of Artificial Sequence: Synthetic oligonucleotide
  Target: SCNA; (-) strand; PAM type: YTN; PAM sequence: TTT
aggatccttgttttttccaa

SEQ ID NO: 54742 - DNA, 20 bp, Artificial Sequence
  Description of Artificial Sequence: Synthetic oligonucleotide
  Target: SCNA; (-) strand; PAM type: YTN; PAM sequence: TTT
taggatccttgttttttcca

SEQ ID NO: 54743 - DNA, 20 bp, Artificial Sequence
  Description of Artificial Sequence: Synthetic oligonucleotide
  Target: SCNA; (-) strand; PAM type: YTN; PAM sequence: TTA
gccataagatgattttagga

SEQ ID NO: 54744 - DNA, 20 bp, Artificial Sequence
  Description of Artificial Sequence: Synthetic oligonucleotide
  Target: SCNA; (-) strand; PAM type: YTN; PAM sequence: TTT
agccataagatgattttagg

SEQ ID NO: 54745 - DNA, 20 bp, Artificial Sequence
  Description of Artificial Sequence: Synthetic oligonucleotide
  Target: SCNA; (-) strand; PAM type: YTN; PAM sequence: CTC
aaatttagccataagatgat

SEQ ID NO: 54746 - DNA, 20 bp, Artificial Sequence
  Description of Artificial Sequence: Synthetic oligonucleotide
  Target: SCNA; (-) strand; PAM type: YTN; PAM sequence: CTC
tcaaatttagccataagatg

SEQ ID NO: 54747 - DNA, 20 bp, Artificial Sequence
  Description of Artificial Sequence: Synthetic oligonucleotide
  Target: SCNA; (-) strand; PAM type: YTN; PAM sequence: CTC
cctctcaaatttagccataa

SEQ ID NO: 54748 - DNA, 20 bp, Artificial Sequence
  Description of Artificial Sequence: Synthetic oligonucleotide
  Target: SCNA; (-) strand; PAM type: YTN; PAM sequence: TTC
cctccctctcaaatttagcc

SEQ ID NO: 54749 - DNA, 20 bp, Artificial Sequence
  Description of Artificial Sequence: Synthetic oligonucleotide
  Target: SCNA; (-) strand; PAM type: YTN; PAM sequence: CTC
catagttccctccctctcaa

SEQ ID NO: 54750 - DNA, 20 bp, Artificial Sequence
  Description of Artificial Sequence: Synthetic oligonucleotide
  Target: SCNA; (-) strand; PAM type: YTN; PAM sequence: CTG
atgcctccatagttccctcc

SEQ ID NO: 54751 - DNA, 20 bp, Artificial Sequence
  Description of Artificial Sequence: Synthetic oligonucleotide
  Target: SCNA; (-) strand; PAM type: YTN; PAM sequence: CTA
caatataaaccatataaatc

SEQ ID NO: 54752 - DNA, 20 bp, Artificial Sequence
  Description of Artificial Sequence: Synthetic oligonucleotide
  Target: SCNA; (-) strand; PAM type: YTN; PAM sequence: TTC
ccatgacctacaatataaac

SEQ ID NO: 54753 - DNA, 20 bp, Artificial Sequence
  Description of Artificial Sequence: Synthetic oligonucleotide
  Target: SCNA; (-) strand; PAM type: YTN; PAM sequence: CTT
cccatgacctacaatataaa

SEQ ID NO: 54754 - DNA, 20 bp, Artificial Sequence
  Description of Artificial Sequence: Synthetic oligonucleotide
  Target: SCNA; (-) strand; PAM type: YTN; PAM sequence: TTA
tgacttcccatgacctacaa

SEQ ID NO: 54755 - DNA, 20 bp, Artificial Sequence
  Description of Artificial Sequence: Synthetic oligonucleotide
  Target: SCNA; (-) strand; PAM type: YTN; PAM sequence: CTT
atgacttcccatgacctaca

SEQ ID NO: 54756 - DNA, 20 bp, Artificial Sequence
  Description of Artificial Sequence: Synthetic oligonucleotide
  Target: SCNA; (-) strand; PAM type: YTN; PAM sequence: TTC
ttatgacttcccatgaccta

SEQ ID NO: 54757 - DNA, 20 bp, Artificial Sequence
  Description of Artificial Sequence: Synthetic oligonucleotide
  Target: SCNA; (-) strand; PAM type: YTN; PAM sequence: TTT
cttatgacttcccatgacct

SEQ ID NO: 54758 - DNA, 20 bp, Artificial Sequence
  Description of Artificial Sequence: Synthetic oligonucleotide
  Target: SCNA; (-) strand; PAM type: YTN; PAM sequence: TTT
tcttatgacttcccatgacc

SEQ ID NO: 54759 - DNA, 20 bp, Artificial Sequence
  Description of Artificial Sequence: Synthetic oligonucleotide
  Target: SCNA; (-) strand; PAM type: YTN; PAM sequence: TTT
ttcttatgacttcccatgac

SEQ ID NO: 54760 - DNA, 20 bp, Artificial Sequence
  Description of Artificial Sequence: Synthetic oligonucleotide
  Target: SCNA; (-) strand; PAM type: YTN; PAM sequence: TTG
gcaccagaatttttcttatg

SEQ ID NO: 54761 - DNA, 20 bp, Artificial Sequence
  Description of Artificial Sequence: Synthetic oligonucleotide
  Target: SCNA; (-) strand; PAM type: YTN; PAM sequence: TTA
tcaccattggcaccagaatt

SEQ ID NO: 54762 - DNA, 20 bp, Artificial Sequence
  Description of Artificial Sequence: Synthetic oligonucleotide
  Target: SCNA; (-) strand; PAM type: YTN; PAM sequence: TTC
atatcagttatcaccattgg

SEQ ID NO: 54763 - DNA, 20 bp, Artificial Sequence
  Description of Artificial Sequence: Synthetic oligonucleotide
  Target: SCNA; (-) strand; PAM type: YTN; PAM sequence: CTT
catatcagttatcaccattg

SEQ ID NO: 54764 - DNA, 20 bp, Artificial Sequence
  Description of Artificial Sequence: Synthetic oligonucleotide
  Target: SCNA; (-) strand; PAM type: YTN; PAM sequence: TTC
aagcaaggagtcccttcata

SEQ ID NO: 54765 - DNA, 20 bp, Artificial Sequence
  Description of Artificial Sequence: Synthetic oligonucleotide
  Target: SCNA; (-) strand; PAM type: YTN; PAM sequence: CTT
caagcaaggagtcccttcat

SEQ ID NO: 54766 - DNA, 20 bp, Artificial Sequence
  Description of Artificial Sequence: Synthetic oligonucleotide
  Target: SCNA; (-) strand; PAM type: YTN; PAM sequence: TTC
cttcaagcaaggagtccctt

SEQ ID NO: 54767 - DNA, 20 bp, Artificial Sequence
  Description of Artificial Sequence: Synthetic oligonucleotide
  Target: SCNA; (-) strand; PAM type: YTN; PAM sequence: TTT
ccttcaagcaaggagtccct

SEQ ID NO: 54768 - DNA, 20 bp, Artificial Sequence
  Description of Artificial Sequence: Synthetic oligonucleotide
  Target: SCNA; (-) strand; PAM type: YTN; PAM sequence: TTT
tccttcaagcaaggagtccc

SEQ ID NO: 54769 - DNA, 20 bp, Artificial Sequence
  Description of Artificial Sequence: Synthetic oligonucleotide
  Target: SCNA; (-) strand; PAM type: YTN; PAM sequence: TTT
ttccttcaagcaaggagtcc

SEQ ID NO: 54770 - DNA, 20 bp, Artificial Sequence
  Description of Artificial Sequence: Synthetic oligonucleotide
  Target: SCNA; (-) strand; PAM type: YTN; PAM sequence: TTA
atttttccttcaagcaagga

SEQ ID NO: 54771 - DNA, 20 bp, Artificial Sequence
  Description of Artificial Sequence: Synthetic oligonucleotide
  Target: SCNA; (-) strand; PAM type: YTN; PAM sequence: CTT
aatttttccttcaagcaagg

SEQ ID NO: 54772 - DNA, 20 bp, Artificial Sequence
  Description of Artificial Sequence: Synthetic oligonucleotide
  Target: SCNA; (-) strand; PAM type: YTN; PAM sequence: TTA
acttaatttttccttcaagc

SEQ ID NO: 54773 - DNA, 20 bp, Artificial Sequence
  Description of Artificial Sequence: Synthetic oligonucleotide
  Target: SCNA; (-) strand; PAM type: YTN; PAM sequence: TTT
aacttaatttttccttcaag

SEQ ID NO: 54774 - DNA, 20 bp, Artificial Sequence
  Description of Artificial Sequence: Synthetic oligonucleotide
  Target: SCNA; (-) strand; PAM type: YTN; PAM sequence: CTC
agtttaacttaatttttcct

SEQ ID NO: 54775 - DNA, 20 bp, Artificial Sequence
  Description of Artificial Sequence: Synthetic oligonucleotide
  Target: SCNA; (-) strand; PAM type: YTN; PAM sequence: TTC
aacaggtctcagtttaactt

SEQ ID NO: 54776 - DNA, 20 bp, Artificial Sequence
  Description of Artificial Sequence: Synthetic oligonucleotide
  Target: SCNA; (-) strand; PAM type: YTN; PAM sequence: TTT
caacaggtctcagtttaact

SEQ ID NO: 54777 - DNA, 20 bp, Artificial Sequence
  Description of Artificial Sequence: Synthetic oligonucleotide
  Target: SCNA; (-) strand; PAM type: YTN; PAM sequence: TTG
atttcaacaggtctcagttt

SEQ ID NO: 54778 - DNA, 20 bp, Artificial Sequence
  Description of Artificial Sequence: Synthetic oligonucleotide
  Target: SCNA; (-) strand; PAM type: YTN; PAM sequence: TTT
gatttcaacaggtctcagtt

SEQ ID NO: 54779 - DNA, 20 bp, Artificial Sequence
  Description of Artificial Sequence: Synthetic oligonucleotide
  Target: SCNA; (-) strand; PAM type: YTN; PAM sequence: CTT
tgatttcaacaggtctcagt

SEQ ID NO: 54780 - DNA, 20 bp, Artificial Sequence
  Description of Artificial Sequence: Synthetic oligonucleotide
  Target: SCNA; (-) strand; PAM type: YTN; PAM sequence: CTA
ctttgatttcaacaggtctc

SEQ ID NO: 54781 - DNA, 20 bp, Artificial Sequence
  Description of Artificial Sequence: Synthetic oligonucleotide
  Target: SCNA; (-) strand; PAM type: YTN; PAM sequence: CTA
ctactttgatttcaacaggt

SEQ ID NO: 54782 - DNA, 20 bp, Artificial Sequence
  Description of Artificial Sequence: Synthetic oligonucleotide
  Target: SCNA; (-) strand; PAM type: YTN; PAM sequence: TTA
gatatcacactactactttg

SEQ ID NO: 54783 - DNA, 20 bp, Artificial Sequence
  Description of Artificial Sequence: Synthetic oligonucleotide
  Target: SCNA; (-) strand; PAM type: YTN; PAM sequence: TTT
agatatcacactactacttt

SEQ ID NO: 54784 - DNA, 20 bp, Artificial Sequence
  Description of Artificial Sequence: Synthetic oligonucleotide
  Target: SCNA; (-) strand; PAM type: YTN; PAM sequence: TTA
tttagatatcacactactac

SEQ ID NO: 54785 - DNA, 20 bp, Artificial Sequence
  Description of Artificial Sequence: Synthetic oligonucleotide
  Target: SCNA; (-) strand; PAM type: YTN; PAM sequence: TTT
atttagatatcacactacta

SEQ ID NO: 54786 - DNA, 20 bp, Artificial Sequence
  Description of Artificial Sequence: Synthetic oligonucleotide
  Target: SCNA; (-) strand; PAM type: YTN; PAM sequence: TTT
tatttagatatcacactact

SEQ ID NO: 54787 - DNA, 20 bp, Artificial Sequence
  Description of Artificial Sequence: Synthetic oligonucleotide
  Target: SCNA; (-) strand; PAM type: YTN; PAM sequence: TTT
ttatttagatatcacactac

SEQ ID NO: 54788 - DNA, 20 bp, Artificial Sequence
  Description of Artificial Sequence: Synthetic oligonucleotide
  Target: SCNA; (-) strand; PAM type: YTN; PAM sequence: CTA
cacatttttatttagatatc

SEQ ID NO: 54789 - DNA, 20 bp, Artificial Sequence
  Description of Artificial Sequence: Synthetic oligonucleotide
  Target: SCNA; (-) strand; PAM type: YTN; PAM sequence: TTG
cacgctacacatttttattt

SEQ ID NO: 54790 - DNA, 20 bp, Artificial Sequence
  Description of Artificial Sequence: Synthetic oligonucleotide
  Target: SCNA; (-) strand; PAM type: YTN; PAM sequence: TTT
gcacgctacacatttttatt

SEQ ID NO: 54791 - DNA, 20 bp, Artificial Sequence
  Description of Artificial Sequence: Synthetic oligonucleotide
  Target: SCNA; (-) strand; PAM type: YTN; PAM sequence: CTT
tgcacgctacacatttttat

SEQ ID NO: 54792 - DNA, 20 bp, Artificial Sequence
  Description of Artificial Sequence: Synthetic oligonucleotide
  Target: SCNA; (-) strand; PAM type: YTN; PAM sequence: CTC
tttgcacgctacacattttt

SEQ ID NO: 54793 - DNA, 20 bp, Artificial Sequence
  Description of Artificial Sequence: Synthetic oligonucleotide
  Target: SCNA; (-) strand; PAM type: YTN; PAM sequence: TTC
tctttgcacgctacacattt

SEQ ID NO: 54794 - DNA, 20 bp, Artificial Sequence
  Description of Artificial Sequence: Synthetic oligonucleotide
  Target: SCNA; (-) strand; PAM type: YTN; PAM sequence: TTT
ctctttgcacgctacacatt

SEQ ID NO: 54795 - DNA, 20 bp, Artificial Sequence
  Description of Artificial Sequence: Synthetic oligonucleotide
  Target: SCNA; (-) strand; PAM type: YTN; PAM sequence: CTC
atatttctctttgcacgcta

SEQ ID NO: 54796 - DNA, 20 bp, Artificial Sequence
  Description of Artificial Sequence: Synthetic oligonucleotide
  Target: SCNA; (-) strand; PAM type: YTN; PAM sequence: CTC
tcatatttctctttgcacgc

SEQ ID NO: 54797 - DNA, 20 bp, Artificial Sequence
  Description of Artificial Sequence: Synthetic oligonucleotide
  Target: SCNA; (-) strand; PAM type: YTN; PAM sequence: CTG
atacacactctcatatttct

SEQ ID NO: 54798 - DNA, 20 bp, Artificial Sequence
  Description of Artificial Sequence: Synthetic oligonucleotide
  Target: SCNA; (-) strand; PAM type: YTN; PAM sequence: TTG
cctgatacacactctcatat

SEQ ID NO: 54799 - DNA, 20 bp, Artificial Sequence
  Description of Artificial Sequence: Synthetic oligonucleotide
  Target: SCNA; (-) strand; PAM type: YTN; PAM sequence: CTT
gcctgatacacactctcata

SEQ ID NO: 54800 - DNA, 20 bp, Artificial Sequence
  Description of Artificial Sequence: Synthetic oligonucleotide
  Target: SCNA; (-) strand; PAM type: YTN; PAM sequence: CTC
ttgcctgatacacactctca

SEQ ID NO: 54801 - DNA, 20 bp, Artificial Sequence
  Description of Artificial Sequence: Synthetic oligonucleotide
  Target: SCNA; (-) strand; PAM type: YTN; PAM sequence: CTA
gccagatctcttgcctgata

SEQ ID NO: 54802 - DNA, 20 bp, Artificial Sequence
  Description of Artificial Sequence: Synthetic oligonucleotide
  Target: SCNA; (-) strand; PAM type: YTN; PAM sequence: TTC
tagccagatctcttgcctga

SEQ ID NO: 54803 - DNA, 20 bp, Artificial Sequence
  Description of Artificial Sequence: Synthetic oligonucleotide
  Target: SCNA; (-) strand; PAM type: YTN; PAM sequence: TTT
ctagccagatctcttgcctg

SEQ ID NO: 54804 - DNA, 20 bp, Artificial Sequence
  Description of Artificial Sequence: Synthetic oligonucleotide
  Target: SCNA; (-) strand; PAM type: YTN; PAM sequence: CTA
catttctagccagatctctt

SEQ ID NO: 54805 - DNA, 20 bp, Artificial Sequence
  Description of Artificial Sequence: Synthetic oligonucleotide
  Target: SCNA; (-) strand; PAM type: YTN; PAM sequence: TTG
cctacatttctagccagatc

SEQ ID NO: 54806 - DNA, 20 bp, Artificial Sequence
  Description of Artificial Sequence: Synthetic oligonucleotide
  Target: SCNA; (-) strand; PAM type: YTN; PAM sequence: TTT
gcctacatttctagccagat

SEQ ID NO: 54807 - DNA, 20 bp, Artificial Sequence
  Description of Artificial Sequence: Synthetic oligonucleotide
  Target: SCNA; (-) strand; PAM type: YTN; PAM sequence: CTT
tgcctacatttctagccaga

SEQ ID NO: 54808 - DNA, 20 bp, Artificial Sequence
  Description of Artificial Sequence: Synthetic oligonucleotide
  Target: SCNA; (-) strand; PAM type: YTN; PAM sequence: TTA
tccctttgcctacatttcta

SEQ ID NO: 54809 - DNA, 20 bp, Artificial Sequence
  Description of Artificial Sequence: Synthetic oligonucleotide
  Target: SCNA; (-) strand; PAM type: YTN; PAM sequence: TTT
atccctttgcctacatttct

SEQ ID NO: 54810 - DNA, 20 bp, Artificial Sequence
  Description of Artificial Sequence: Synthetic oligonucleotide
  Target: SCNA; (-) strand; PAM type: YTN; PAM sequence: CTA
tttatccctttgcctacatt

SEQ ID NO: 54811 - DNA, 20 bp, Artificial Sequence
  Description of Artificial Sequence: Synthetic oligonucleotide
  Target: SCNA; (-) strand; PAM type: YTN; PAM sequence: TTA
tgactatttatccctttgcc

SEQ ID NO: 54812 - DNA, 20 bp, Artificial Sequence
  Description of Artificial Sequence: Synthetic oligonucleotide
  Target: SCNA; (-) strand; PAM type: YTN; PAM sequence: CTT
atgactatttatccctttgc

SEQ ID NO: 54813 - DNA, 20 bp, Artificial Sequence
  Description of Artificial Sequence: Synthetic oligonucleotide
  Target: SCNA; (-) strand; PAM type: YTN; PAM sequence: TTA
tagtcttatgactatttatc

SEQ ID NO: 54814 - DNA, 20 bp, Artificial Sequence
  Description of Artificial Sequence: Synthetic oligonucleotide
  Target: SCNA; (-) strand; PAM type: YTN; PAM sequence: CTT
atagtcttatgactatttat

SEQ ID NO: 54815 - DNA, 20 bp, Artificial Sequence
  Description of Artificial Sequence: Synthetic oligonucleotide
  Target: SCNA; (-) strand; PAM type: YTN; PAM sequence: CTC
cgcaatgccttatagtctta

SEQ ID NO: 54816 - DNA, 20 bp, Artificial Sequence
  Description of Artificial Sequence: Synthetic oligonucleotide
  Target: SCNA; (-) strand; PAM type: YTN; PAM sequence: TTC
cctccgcaatgccttatagt

SEQ ID NO: 54817 - DNA, 20 bp, Artificial Sequence
  Description of Artificial Sequence: Synthetic oligonucleotide
  Target: SCNA; (-) strand; PAM type: YTN; PAM sequence: CTT
ccctccgcaatgccttatag

SEQ ID NO: 54818 - DNA, 20 bp, Artificial Sequence
  Description of Artificial Sequence: Synthetic oligonucleotide
  Target: SCNA; (-) strand; PAM type: YTN; PAM sequence: CTC
ttccctccgcaatgccttat

SEQ ID NO: 54819 - DNA, 20 bp, Artificial Sequence
  Description of Artificial Sequence: Synthetic oligonucleotide
  Target: SCNA; (-) strand; PAM type: YTN; PAM sequence: TTC
ctcttccctccgcaatgcct

SEQ ID NO: 54820 - DNA, 20 bp, Artificial Sequence
  Description of Artificial Sequence: Synthetic oligonucleotide
  Target: SCNA; (-) strand; PAM type: YTN; PAM sequence: TTT
cctcttccctccgcaatgcc

SEQ ID NO: 54821 - DNA, 20 bp, Artificial Sequence
  Description of Artificial Sequence: Synthetic oligonucleotide
  Target: SCNA; (-) strand; PAM type: YTN; PAM sequence: TTT
tcctcttccctccgcaatgc

SEQ ID NO: 54822 - DNA, 20 bp, Artificial Sequence
  Description of Artificial Sequence: Synthetic oligonucleotide
  Target: SCNA; (-) strand; PAM type: YTN; PAM sequence: CTT
ttcctcttccctccgcaatg

SEQ ID NO: 54823 - DNA, 20 bp, Artificial Sequence
  Description of Artificial Sequence: Synthetic oligonucleotide
  Target: SCNA; (-) strand; PAM type: YTN; PAM sequence: CTC
caagcttttcctcttccctc

SEQ ID NO: 54824 - DNA, 20 bp, Artificial Sequence
  Description of Artificial Sequence: Synthetic oligonucleotide
  Target: SCNA; (-) strand; PAM type: YTN; PAM sequence: TTC
tccaagcttttcctcttccc

SEQ ID NO: 54825 - DNA, 20 bp, Artificial Sequence
  Description of Artificial Sequence: Synthetic oligonucleotide
  Target: SCNA; (-) strand; PAM type: YTN; PAM sequence: CTC
attctccaagcttttcctct

SEQ ID NO: 54826 - DNA, 20 bp, Artificial Sequence
  Description of Artificial Sequence: Synthetic oligonucleotide
  Target: SCNA; (-) strand; PAM type: YTN; PAM sequence: CTG
actcattctccaagcttttc

SEQ ID NO: 54827 - DNA, 20 bp, Artificial Sequence
  Description of Artificial Sequence: Synthetic oligonucleotide
  Target: SCNA; (-) strand; PAM type: YTN; PAM sequence: TTC
tgactcattctccaagcttt

SEQ ID NO: 54828 - DNA, 20 bp, Artificial Sequence
  Description of Artificial Sequence: Synthetic oligonucleotide
  Target: SCNA; (-) strand; PAM type: YTN; PAM sequence: TTT
ctgactcattctccaagctt

SEQ ID NO: 54829 - DNA, 20 bp, Artificial Sequence
  Description of Artificial Sequence: Synthetic oligonucleotide
  Target: SCNA; (-) strand; PAM type: YTN; PAM sequence: TTG
tgtggatttctgactcattc

SEQ ID NO: 54830 - DNA, 20 bp, Artificial Sequence
  Description of Artificial Sequence: Synthetic oligonucleotide
  Target: SCNA; (-) strand; PAM type: YTN; PAM sequence: CTA
ttgtgtggatttctgactca

SEQ ID NO: 54831 - DNA, 20 bp, Artificial Sequence
  Description of Artificial Sequence: Synthetic oligonucleotide
  Target: SCNA; (-) strand; PAM type: YTN; PAM sequence: TTA
atctattgtgtggatttctg

SEQ ID NO: 54832 - DNA, 20 bp, Artificial Sequence
  Description of Artificial Sequence: Synthetic oligonucleotide
  Target: SCNA; (-) strand; PAM type: YTN; PAM sequence: TTT
aatctattgtgtggatttct

SEQ ID NO: 54833 - DNA, 20 bp, Artificial Sequence
  Description of Artificial Sequence: Synthetic oligonucleotide
  Target: SCNA; (-) strand; PAM type: YTN; PAM sequence: CTT
taatctattgtgtggatttc

SEQ ID NO: 54834 - DNA, 20 bp, Artificial Sequence
  Description of Artificial Sequence: Synthetic oligonucleotide
  Target: SCNA; (-) strand; PAM type: YTN; PAM sequence: TTA
aatctttaatctattgtgtg

SEQ ID NO: 54835 - DNA, 20 bp, Artificial Sequence
  Description of Artificial Sequence: Synthetic oligonucleotide
  Target: SCNA; (-) strand; PAM type: YTN; PAM sequence: CTT
aaatctttaatctattgtgt

SEQ ID NO: 54836 - DNA, 20 bp, Artificial Sequence
  Description of Artificial Sequence: Synthetic oligonucleotide
  Target: SCNA; (-) strand; PAM type: YTN; PAM sequence: CTC
acaacttaaatctttaatct

SEQ ID NO: 54837 - DNA, 20 bp, Artificial Sequence
  Description of Artificial Sequence: Synthetic oligonucleotide
  Target: SCNA; (-) strand; PAM type: YTN; PAM sequence: TTC
tcacaacttaaatctttaat

SEQ ID NO: 54838 - DNA, 20 bp, Artificial Sequence
  Description of Artificial Sequence: Synthetic oligonucleotide
  Target: SCNA; (-) strand; PAM type: YTN; PAM sequence: TTT
ctcacaacttaaatctttaa

SEQ ID NO: 54839 - DNA, 20 bp, Artificial Sequence
  Description of Artificial Sequence: Synthetic oligonucleotide
  Target: SCNA; (-) strand; PAM type: YTN; PAM sequence: CTT
tctcacaacttaaatcttta

SEQ ID NO: 54840 - DNA, 20 bp, Artificial Sequence
  Description of Artificial Sequence: Synthetic oligonucleotide
  Target: SCNA; (-) strand; PAM type: YTN; PAM sequence: CTC
cataaaaactttctcacaac

SEQ ID NO: 54841 - DNA, 20 bp, Artificial Sequence
  Description of Artificial Sequence: Synthetic oligonucleotide
  Target: SCNA; (-) strand; PAM type: YTN; PAM sequence: CTC
tccataaaaactttctcaca

SEQ ID NO: 54842 - DNA, 20 bp, Artificial Sequence
  Description of Artificial Sequence: Synthetic oligonucleotide
  Target: SCNA; (-) strand; PAM type: YTN; PAM sequence: TTC
cccagaacactctccataaa

SEQ ID NO: 54843 - DNA, 20 bp, Artificial Sequence
  Description of Artificial Sequence: Synthetic oligonucleotide
  Target: SCNA; (-) strand; PAM type: YTN; PAM sequence: TTA
ttccccagaacactctccat

SEQ ID NO: 54844 - DNA, 20 bp, Artificial Sequence
  Description of Artificial Sequence: Synthetic oligonucleotide
  Target: SCNA; (-) strand; PAM type: YTN; PAM sequence: TTT
attccccagaacactctcca

SEQ ID NO: 54845 - DNA, 20 bp, Artificial Sequence
  Description of Artificial Sequence: Synthetic oligonucleotide
  Target: SCNA; (-) strand; PAM type: YTN; PAM sequence: CTA
atttattccccagaacactc

SEQ ID NO: 54846 - DNA, 20 bp, Artificial Sequence
  Description of Artificial Sequence: Synthetic oligonucleotide
  Target: SCNA; (-) strand; PAM type: YTN; PAM sequence: CTC
taatttattccccagaacac

SEQ ID NO: 54847 - DNA, 20 bp, Artificial Sequence
  Description of Artificial Sequence: Synthetic oligonucleotide
  Target: SCNA; (-) strand; PAM type: YTN; PAM sequence: TTA
atctctaatttattccccag

SEQ ID NO: 54848 - DNA, 20 bp, Artificial Sequence
  Description of Artificial Sequence: Synthetic oligonucleotide
  Target: SCNA; (-) strand; PAM type: YTN; PAM sequence: TTA
ttaatctctaatttattccc

SEQ ID NO: 54849 - DNA, 20 bp, Artificial Sequence
  Description of Artificial Sequence: Synthetic oligonucleotide
  Target: SCNA; (-) strand; PAM type: YTN; PAM sequence: TTT
attaatctctaatttattcc

SEQ ID NO: 54850 - DNA, 20 bp, Artificial Sequence
  Description of Artificial Sequence: Synthetic oligonucleotide
  Target: SCNA; (-) strand; PAM type: YTN; PAM sequence: TTT
tattaatctctaatttattc

SEQ ID NO: 54851 - DNA, 20 bp, Artificial Sequence
  Description of Artificial Sequence: Synthetic oligonucleotide
  Target: SCNA; (-) strand; PAM type: YTN; PAM sequence: CTT
ttattaatctctaatttatt

SEQ ID NO: 54852 - DNA, 20 bp, Artificial Sequence
  Description of Artificial Sequence: Synthetic oligonucleotide
  Target: SCNA; (-) strand; PAM type: YTN; PAM sequence: TTC
ttttattaatctctaattta

SEQ ID NO: 54853 - DNA, 20 bp, Artificial Sequence
  Description of Artificial Sequence: Synthetic oligonucleotide
  Target: SCNA; (-) strand; PAM type: YTN; PAM sequence: TTA
ttcttttattaatctctaat

SEQ ID NO: 54854 - DNA, 20 bp, Artificial Sequence
  Description of Artificial Sequence: Synthetic oligonucleotide
  Target: SCNA; (-) strand; PAM type: YTN; PAM sequence: TTT
attcttttattaatctctaa

SEQ ID NO: 54855 - DNA, 20 bp, Artificial Sequence
  Description of Artificial Sequence: Synthetic oligonucleotide
  Target: SCNA; (-) strand; PAM type: YTN; PAM sequence: TTT
tattcttttattaatctcta

SEQ ID NO: 54856 - DNA, 20 bp, Artificial Sequence
  Description of Artificial Sequence: Synthetic oligonucleotide
  Target: SCNA; (-) strand; PAM type: YTN; PAM sequence: TTT
ttattcttttattaatctct

SEQ ID NO: 54857 - DNA, 20 bp, Artificial Sequence
  Description of Artificial Sequence: Synthetic oligonucleotide
  Target: SCNA; (-) strand; PAM type: YTN; PAM sequence: TTT
tttattcttttattaatctc

SEQ ID NO: 54858 - DNA, 20 bp, Artificial Sequence
  Description of Artificial Sequence: Synthetic oligonucleotide
  Target: SCNA; (-) strand; PAM type: YTN; PAM sequence: TTG
attttttattcttttattaa

SEQ ID NO: 54859 - DNA, 20 bp, Artificial Sequence
  Description of Artificial Sequence: Synthetic oligonucleotide
  Target: SCNA; (-) strand; PAM type: YTN; PAM sequence: CTG
gttgattttttattctttta

SEQ ID NO: 54860 - DNA, 20 bp, Artificial Sequence
  Description of Artificial Sequence: Synthetic oligonucleotide
  Target: SCNA; (-) strand; PAM type: YTN; PAM sequence: CTA
cctggttgattttttattct

SEQ ID NO: 54861 - DNA, 20 bp, Artificial Sequence
  Description of Artificial Sequence: Synthetic oligonucleotide
  Target: SCNA; (-) strand; PAM type: YTN; PAM sequence: TTC
tacctggttgattttttatt

SEQ ID NO: 54862 - DNA, 20 bp, Artificial Sequence
  Description of Artificial Sequence: Synthetic oligonucleotide
  Target: SCNA; (-) strand; PAM type: YTN; PAM sequence: TTT
ctacctggttgattttttat

SEQ ID NO: 54863 - DNA, 20 bp, Artificial Sequence
  Description of Artificial Sequence: Synthetic oligonucleotide
  Target: SCNA; (-) strand; PAM type: YTN; PAM sequence: CTT
tctacctggttgatttttta

SEQ ID NO: 54864 - DNA, 20 bp, Artificial Sequence
  Description of Artificial Sequence: Synthetic oligonucleotide
  Target: SCNA; (-) strand; PAM type: YTN; PAM sequence: TTG
cacacaccaggatgcatgcc

SEQ ID NO: 54865 - DNA, 20 bp, Artificial Sequence
  Description of Artificial Sequence: Synthetic oligonucleotide
  Target: SCNA; (-) strand; PAM type: YTN; PAM sequence: TTT
gcacacaccaggatgcatgc

SEQ ID NO: 54866 - DNA, 20 bp, Artificial Sequence
  Description of Artificial Sequence: Synthetic oligonucleotide
  Target: SCNA; (-) strand; PAM type: YTN; PAM sequence: CTA
tacatgtttgcacacaccag

SEQ ID NO: 54867 - DNA, 20 bp, Artificial Sequence
  Description of Artificial Sequence: Synthetic oligonucleotide
  Target: SCNA; (-) strand; PAM type: YTN; PAM sequence: TTC
atgcagctatacatgtttgc

SEQ ID NO: 54868 - DNA, 20 bp, Artificial Sequence
  Description of Artificial Sequence: Synthetic oligonucleotide
  Target: SCNA; (-) strand; PAM type: YTN; PAM sequence: TTG
acattcatgcagctatacat

SEQ ID NO: 54869 - DNA, 20 bp, Artificial Sequence
  Description of Artificial Sequence: Synthetic oligonucleotide
  Target: SCNA; (-) strand; PAM type: YTN; PAM sequence: CTT
gacattcatgcagctataca

SEQ ID NO: 54870 - DNA, 20 bp, Artificial Sequence
  Description of Artificial Sequence: Synthetic oligonucleotide
  Target: SCNA; (-) strand; PAM type: YTN; PAM sequence: TTG
catagtgatatagccacgta

SEQ ID NO: 54871 - DNA, 20 bp, Artificial Sequence
  Description of Artificial Sequence: Synthetic oligonucleotide
  Target: SCNA; (-) strand; PAM type: YTN; PAM sequence: TTT
gcatagtgatatagccacgt

SEQ ID NO: 54872 - DNA, 20 bp, Artificial Sequence
  Description of Artificial Sequence: Synthetic oligonucleotide
  Target: SCNA; (-) strand; PAM type: YTN; PAM sequence: CTA
tagtttgcatagtgatatag

SEQ ID NO: 54873 - DNA, 20 bp, Artificial Sequence
  Description of Artificial Sequence: Synthetic oligonucleotide
  Target: SCNA; (-) strand; PAM type: YTN; PAM sequence: CTA
tgaaaggctatagtttgcat

SEQ ID NO: 54874 - DNA, 20 bp, Artificial Sequence
  Description of Artificial Sequence: Synthetic oligonucleotide
  Target: SCNA; (-) strand; PAM type: YTN; PAM sequence: TTA
cgtactatgaaaggctatag

SEQ ID NO: 54875 - DNA, 20 bp, Artificial Sequence
  Description of Artificial Sequence: Synthetic oligonucleotide
  Target: SCNA; (-) strand; PAM type: YTN; PAM sequence: CTT
acgtactatgaaaggctata

SEQ ID NO: 54876 - DNA, 20 bp, Artificial Sequence
  Description of Artificial Sequence: Synthetic oligonucleotide
  Target: SCNA; (-) strand; PAM type: YTN; PAM sequence: TTC
acttacgtactatgaaaggc

SEQ ID NO: 54877 - DNA, 20 bp, Artificial Sequence
  Description of Artificial Sequence: Synthetic oligonucleotide
  Target: SCNA; (-) strand; PAM type: YTN; PAM sequence: TTT
cacttacgtactatgaaagg

SEQ ID NO: 54878 - DNA, 20 bp, Artificial Sequence
  Description of Artificial Sequence: Synthetic oligonucleotide
  Target: SCNA; (-) strand; PAM type: YTN; PAM sequence: CTT
tcacttacgtactatgaaag

SEQ ID NO: 54879 - DNA, 20 bp, Artificial Sequence
  Description of Artificial Sequence: Synthetic oligonucleotide
  Target: SCNA; (-) strand; PAM type: YTN; PAM sequence: CTA
atgctttcacttacgtacta

SEQ ID NO: 54880 - DNA, 20 bp, Artificial Sequence
  Description of Artificial Sequence: Synthetic oligonucleotide
  Target: SCNA; (-) strand; PAM type: YTN; PAM sequence: CTC
taatgctttcacttacgtac

SEQ ID NO: 54881 - DNA, 20 bp, Artificial Sequence
  Description of Artificial Sequence: Synthetic oligonucleotide
  Target: SCNA; (-) strand; PAM type: YTN; PAM sequence: CTA
cacagataatcctctaatgc

SEQ ID NO: 54882 - DNA, 20 bp, Artificial Sequence
  Description of Artificial Sequence: Synthetic oligonucleotide
  Target: SCNA; (-) strand; PAM type: YTN; PAM sequence: TTA
ggactacacagataatcctc

SEQ ID NO: 54883 - DNA, 20 bp, Artificial Sequence
  Description of Artificial Sequence: Synthetic oligonucleotide
  Target: SCNA; (-) strand; PAM type: YTN; PAM sequence: TTT
aggactacacagataatcct

SEQ ID NO: 54884 - DNA, 20 bp, Artificial Sequence
  Description of Artificial Sequence: Synthetic oligonucleotide
  Target: SCNA; (-) strand; PAM type: YTN; PAM sequence: TTT
taggactacacagataatcc

SEQ ID NO: 54885 - DNA, 20 bp, Artificial Sequence
  Description of Artificial Sequence: Synthetic oligonucleotide
  Target: SCNA; (-) strand; PAM type: YTN; PAM sequence: TTC
acaaaggattttaggactac

SEQ ID NO: 54886 - DNA, 20 bp, Artificial Sequence
  Description of Artificial Sequence: Synthetic oligonucleotide
  Target: SCNA; (-) strand; PAM type: YTN; PAM sequence: TTA
tgtaaaacatgggcaagaat

SEQ ID NO: 54887 - DNA, 20 bp, Artificial Sequence
  Description of Artificial Sequence: Synthetic oligonucleotide
  Target: SCNA; (-) strand; PAM type: YTN; PAM sequence: CTG
gttatgtaaaacatgggcaa

SEQ ID NO: 54888 - DNA, 20 bp, Artificial Sequence
  Description of Artificial Sequence: Synthetic oligonucleotide
  Target: SCNA; (-) strand; PAM type: YTN; PAM sequence: TTA
cagtcagtctggttatgtaa

SEQ ID NO: 54889 - DNA, 20 bp, Artificial Sequence
  Description of Artificial Sequence: Synthetic oligonucleotide
  Target: SCNA; (-) strand; PAM type: YTN; PAM sequence: CTC
atattacagtcagtctggtt

SEQ ID NO: 54890 - DNA, 20 bp, Artificial Sequence
  Description of Artificial Sequence: Synthetic oligonucleotide
  Target: SCNA; (-) strand; PAM type: YTN; PAM sequence: TTA
acaaagggcacacacaatac

SEQ ID NO: 54891 - DNA, 20 bp, Artificial Sequence
  Description of Artificial Sequence: Synthetic oligonucleotide
  Target: SCNA; (-) strand; PAM type: YTN; PAM sequence: TTA
ttaacaaagggcacacacaa

SEQ ID NO: 54892 - DNA, 20 bp, Artificial Sequence
  Description of Artificial Sequence: Synthetic oligonucleotide
  Target: SCNA; (-) strand; PAM type: YTN; PAM sequence: TTT
attaacaaagggcacacaca

SEQ ID NO: 54893 - DNA, 20 bp, Artificial Sequence
  Description of Artificial Sequence: Synthetic oligonucleotide
  Target: SCNA; (-) strand; PAM type: YTN; PAM sequence: TTA
tacaaggatttattaacaaa

SEQ ID NO: 54894 - DNA, 20 bp, Artificial Sequence
  Description of Artificial Sequence: Synthetic oligonucleotide
  Target: SCNA; (-) strand; PAM type: YTN; PAM sequence: TTT
atacaaggatttattaacaa

SEQ ID NO: 54895 - DNA, 20 bp, Artificial Sequence
  Description of Artificial Sequence: Synthetic oligonucleotide
  Target: SCNA; (-) strand; PAM type: YTN; PAM sequence: TTG
tggggtttatacaaggattt

SEQ ID NO: 54896 - DNA, 20 bp, Artificial Sequence
  Description of Artificial Sequence: Synthetic oligonucleotide
  Target: SCNA; (-) strand; PAM type: YTN; PAM sequence: CTT
gtggggtttatacaaggatt

SEQ ID NO: 54897 - DNA, 20 bp, Artificial Sequence
  Description of Artificial Sequence: Synthetic oligonucleotide
  Target: SCNA; (-) strand; PAM type: YTN; PAM sequence: TTA
gagaaatccttgtggggttt

SEQ ID NO: 54898 - DNA, 20 bp, Artificial Sequence
  Description of Artificial Sequence: Synthetic oligonucleotide
  Target: SCNA; (-) strand; PAM type: YTN; PAM sequence: TTT
agagaaatccttgtggggtt

SEQ ID NO: 54899 - DNA, 20 bp, Artificial Sequence
  Description of Artificial Sequence: Synthetic oligonucleotide
  Target: SCNA; (-) strand; PAM type: YTN; PAM sequence: CTT
tagagaaatccttgtggggt

SEQ ID NO: 54900 - DNA, 20 bp, Artificial Sequence
  Description of Artificial Sequence: Synthetic oligonucleotide
  Target: SCNA; (-) strand; PAM type: YTN; PAM sequence: TTG
tctttagagaaatccttgtg

SEQ ID NO: 54901 - DNA, 20 bp, Artificial Sequence
  Description of Artificial Sequence: Synthetic oligonucleotide
  Target: SCNA; (-) strand; PAM type: YTN; PAM sequence: TTT
gtctttagagaaatccttgt

SEQ ID NO: 54902 - DNA, 20 bp, Artificial Sequence
  Description of Artificial Sequence: Synthetic oligonucleotide
  Target: SCNA; (-) strand; PAM type: YTN; PAM sequence: TTA
gcaagccaggtttgtcttta

SEQ ID NO: 54903 - DNA, 20 bp, Artificial Sequence
  Description of Artificial Sequence: Synthetic oligonucleotide
  Target: SCNA; (-) strand; PAM type: YTN; PAM sequence: TTT
agcaagccaggtttgtcttt

SEQ ID NO: 54904 - DNA, 20 bp, Artificial Sequence
  Description of Artificial Sequence: Synthetic oligonucleotide
  Target: SCNA; (-) strand; PAM type: YTN; PAM sequence: CTG
gagtgagtaatatttagcaa

SEQ ID NO: 54905 - DNA, 20 bp, Artificial Sequence
  Description of Artificial Sequence: Synthetic oligonucleotide
  Target: SCNA; (-) strand; PAM type: YTN; PAM sequence: TTA
gcctggagtgagtaatattt

SEQ ID NO: 54906 - DNA, 20 bp, Artificial Sequence
  Description of Artificial Sequence: Synthetic oligonucleotide
  Target: SCNA; (-) strand; PAM type: YTN; PAM sequence: TTT
agcctggagtgagtaatatt

SEQ ID NO: 54907 - DNA, 20 bp, Artificial Sequence
  Description of Artificial Sequence: Synthetic oligonucleotide
  Target: SCNA; (-) strand; PAM type: YTN; PAM sequence: TTA
aaatttagcctggagtgagt

SEQ ID NO: 54908 - DNA, 20 bp, Artificial Sequence
  Description of Artificial Sequence: Synthetic oligonucleotide
  Target: SCNA; (-) strand; PAM type: YTN; PAM sequence: TTA
ttaaaatttagcctggagtg

SEQ ID NO: 54909 - DNA, 20 bp, Artificial Sequence
  Description of Artificial Sequence: Synthetic oligonucleotide
  Target: SCNA; (-) strand; PAM type: YTN; PAM sequence: TTT
attaaaatttagcctggagt

SEQ ID NO: 54910 - DNA, 20 bp, Artificial Sequence
  Description of Artificial Sequence: Synthetic oligonucleotide
  Target: SCNA; (-) strand; PAM type: YTN; PAM sequence: TTA
tggaatttattaaaatttag

SEQ ID NO: 54911 - DNA, 20 bp, Artificial Sequence
  Description of Artificial Sequence: Synthetic oligonucleotide
  Target: SCNA; (-) strand; PAM type: YTN; PAM sequence: TTT
atggaatttattaaaattta

SEQ ID NO: 54912 - DNA, 20 bp, Artificial Sequence
  Description of Artificial Sequence: Synthetic oligonucleotide
  Target: SCNA; (-) strand; PAM type: YTN; PAM sequence: TTT
tatggaatttattaaaattt

SEQ ID NO: 54913 - DNA, 20 bp, Artificial Sequence
  Description of Artificial Sequence: Synthetic oligonucleotide
  Target: SCNA; (-) strand; PAM type: YTN; PAM sequence: CTG
atagtgttttatggaattta

SEQ ID NO: 54914 - DNA, 20 bp, Artificial Sequence
  Description of Artificial Sequence: Synthetic oligonucleotide
  Target: SCNA; (-) strand; PAM type: YTN; PAM sequence: CTC
aggaatatatctgatagtgt

SEQ ID NO: 54915 - DNA, 20 bp, Artificial Sequence
  Description of Artificial Sequence: Synthetic oligonucleotide
  Target: SCNA; (-) strand; PAM type: YTN; PAM sequence: TTA
aaatacaaaagtctcaggaa

SEQ ID NO: 54916 - DNA, 20 bp, Artificial Sequence
  Description of Artificial Sequence: Synthetic oligonucleotide
  Target: SCNA; (-) strand; PAM type: YTN; PAM sequence: CTT
aaaatacaaaagtctcagga

SEQ ID NO: 54917 - DNA, 20 bp, Artificial Sequence
  Description of Artificial Sequence: Synthetic oligonucleotide
  Target: SCNA; (-) strand; PAM type: YTN; PAM sequence: CTG
aaggggaagaaggaagaaac

SEQ ID NO: 54918 - DNA, 20 bp, Artificial Sequence
  Description of Artificial Sequence: Synthetic oligonucleotide
  Target: SCNA; (-) strand; PAM type: YTN; PAM sequence: CTC
caggcacagtgcaggagtgg

SEQ ID NO: 54919 - DNA, 20 bp, Artificial Sequence
  Description of Artificial Sequence: Synthetic oligonucleotide
  Target: SCNA; (-) strand; PAM type: YTN; PAM sequence: TTC
tccaggcacagtgcaggagt

SEQ ID NO: 54920 - DNA, 20 bp, Artificial Sequence
  Description of Artificial Sequence: Synthetic oligonucleotide
  Target: SCNA; (-) strand; PAM type: YTN; PAM sequence: CTT
ctccaggcacagtgcaggag

SEQ ID NO: 54921 - DNA, 20 bp, Artificial Sequence
  Description of Artificial Sequence: Synthetic oligonucleotide
  Target: SCNA; (-) strand; PAM type: YTN; PAM sequence: TTC
atcttctccaggcacagtgc

SEQ ID NO: 54922 - DNA, 20 bp, Artificial Sequence
  Description of Artificial Sequence: Synthetic oligonucleotide
  Target: SCNA; (-) strand; PAM type: YTN; PAM sequence: TTG
aaaaaccgtggtgtagtcag

SEQ ID NO: 54923 - DNA, 20 bp, Artificial Sequence
  Description of Artificial Sequence: Synthetic oligonucleotide
  Target: SCNA; (-) strand; PAM type: YTN; PAM sequence: CTG
ccaaggttgaaaaaccgtgg

SEQ ID NO: 54924 - DNA, 20 bp, Artificial Sequence
  Description of Artificial Sequence: Synthetic oligonucleotide
  Target: SCNA; (-) strand; PAM type: YTN; PAM sequence: TTA
ctgccaaggttgaaaaaccg

SEQ ID NO: 54925 - DNA, 20 bp, Artificial Sequence
  Description of Artificial Sequence: Synthetic oligonucleotide
  Target: SCNA; (-) strand; PAM type: YTN; PAM sequence: TTA
aaaaatgtcattactgccaa

SEQ ID NO: 54926 - DNA, 20 bp, Artificial Sequence
  Description of Artificial Sequence: Synthetic oligonucleotide
  Target: SCNA; (-) strand; PAM type: YTN; PAM sequence: TTC
cacaacaaagtatccagtta

SEQ ID NO: 54927 - DNA, 20 bp, Artificial Sequence
  Description of Artificial Sequence: Synthetic oligonucleotide
  Target: SCNA; (-) strand; PAM type: YTN; PAM sequence: CTT
ccacaacaaagtatccagtt

SEQ ID NO: 54928 - DNA, 20 bp, Artificial Sequence
  Description of Artificial Sequence: Synthetic oligonucleotide
  Target: SCNA; (-) strand; PAM type: YTN; PAM sequence: CTA
caatgcacaggacatccttc

SEQ ID NO: 54929 - DNA, 20 bp, Artificial Sequence
  Description of Artificial Sequence: Synthetic oligonucleotide
  Target: SCNA; (-) strand; PAM type: YTN; PAM sequence: TTA
aacatctacaatgcacagga

SEQ ID NO: 54930 - DNA, 20 bp, Artificial Sequence
  Description of Artificial Sequence: Synthetic oligonucleotide
  Target: SCNA; (-) strand; PAM type: YTN; PAM sequence: TTT
aaacatctacaatgcacagg

SEQ ID NO: 54931 - DNA, 20 bp, Artificial Sequence
  Description of Artificial Sequence: Synthetic oligonucleotide
  Target: SCNA; (-) strand; PAM type: YTN; PAM sequence: TTT
taaacatctacaatgcacag

SEQ ID NO: 54932 - DNA, 20 bp, Artificial Sequence
  Description of Artificial Sequence: Synthetic oligonucleotide
  Target: SCNA; (-) strand; PAM type: YTN; PAM sequence: TTT
ttaaacatctacaatgcaca

SEQ ID NO: 54933 - DNA, 20 bp, Artificial Sequence
  Description of Artificial Sequence: Synthetic oligonucleotide
  Target: SCNA; (-) strand; PAM type: YTN; PAM sequence: TTT
tttaaacatctacaatgcac

SEQ ID NO: 54934 - DNA, 20 bp, Artificial Sequence
  Description of Artificial Sequence: Synthetic oligonucleotide
  Target: SCNA; (-) strand; PAM type: YTN; PAM sequence: TTT
ttttaaacatctacaatgca

SEQ ID NO: 54935 - DNA, 20 bp, Artificial Sequence
  Description of Artificial Sequence: Synthetic oligonucleotide
  Target: SCNA; (-) strand; PAM type: YTN; PAM sequence: CTG
agggatttttttaaacatct

SEQ ID NO: 54936 - DNA, 20 bp, Artificial Sequence
  Description of Artificial Sequence: Synthetic oligonucleotide
  Target: SCNA; (-) strand; PAM type: YTN; PAM sequence: TTC
actgagggatttttttaaac

SEQ ID NO: 54937 - DNA, 20 bp, Artificial Sequence
  Description of Artificial Sequence: Synthetic oligonucleotide
  Target: SCNA; (-) strand; PAM type: YTN; PAM sequence: CTA
tgattcactgagggattttt

SEQ ID NO: 54938 - DNA, 20 bp, Artificial Sequence
  Description of Artificial Sequence: Synthetic oligonucleotide
  Target: SCNA; (-) strand; PAM type: YTN; PAM sequence: CTA
ctatgattcactgagggatt

SEQ ID NO: 54939 - DNA, 20 bp, Artificial Sequence
  Description of Artificial Sequence: Synthetic oligonucleotide
  Target: SCNA; (-) strand; PAM type: YTN; PAM sequence: CTC
aggggaggaagggagaggag

SEQ ID NO: 54940 - DNA, 20 bp, Artificial Sequence
  Description of Artificial Sequence: Synthetic oligonucleotide
  Target: SCNA; (-) strand; PAM type: YTN; PAM sequence: TTA
tcacagctcaggggaggaag

SEQ ID NO: 54941 - DNA, 20 bp, Artificial Sequence
  Description of Artificial Sequence: Synthetic oligonucleotide
  Target: SCNA; (-) strand; PAM type: YTN; PAM sequence: TTA
gtggttatcacagctcaggg

SEQ ID NO: 54942 - DNA, 20 bp, Artificial Sequence
  Description of Artificial Sequence: Synthetic oligonucleotide
  Target: SCNA; (-) strand; PAM type: YTN; PAM sequence: CTC
ccagggaacattagtggtta

SEQ ID NO: 54943 - DNA, 20 bp, Artificial Sequence
  Description of Artificial Sequence: Synthetic oligonucleotide
  Target: SCNA; (-) strand; PAM type: YTN; PAM sequence: TTG
tgctcccagggaacattagt

SEQ ID NO: 54944 - DNA, 20 bp, Artificial Sequence
  Description of Artificial Sequence: Synthetic oligonucleotide
  Target: SCNA; (-) strand; PAM type: YTN; PAM sequence: CTA
atccagggccaattgtgctc

SEQ ID NO: 54945 - DNA, 20 bp, Artificial Sequence
  Description of Artificial Sequence: Synthetic oligonucleotide
  Target: SCNA; (-) strand; PAM type: YTN; PAM sequence: TTC
taatccagggccaattgtgc

SEQ ID NO: 54946 - DNA, 20 bp, Artificial Sequence
  Description of Artificial Sequence: Synthetic oligonucleotide
  Target: SCNA; (-) strand; PAM type: YTN; PAM sequence: TTG
atgtagcagtggttctaatc

SEQ ID NO: 54947 - DNA, 20 bp, Artificial Sequence
  Description of Artificial Sequence: Synthetic oligonucleotide
  Target: SCNA; (-) strand; PAM type: YTN; PAM sequence: CTC
acagcgtagacaaaaggagt

SEQ ID NO: 54948 - DNA, 20 bp, Artificial Sequence
  Description of Artificial Sequence: Synthetic oligonucleotide
  Target: SCNA; (-) strand; PAM type: YTN; PAM sequence: CTG
gccaaactcacagcgtagac

SEQ ID NO: 54949 - DNA, 20 bp, Artificial Sequence
  Description of Artificial Sequence: Synthetic oligonucleotide
  Target: SCNA; (-) strand; PAM type: YTN; PAM sequence: TTC
cactggccaaactcacagcg

SEQ ID NO: 54950 - DNA, 20 bp, Artificial Sequence
  Description of Artificial Sequence: Synthetic oligonucleotide
  Target: SCNA; (-) strand; PAM type: YTN; PAM sequence: TTT
ccactggccaaactcacagc

SEQ ID NO: 54951 - DNA, 20 bp, Artificial Sequence
  Description of Artificial Sequence: Synthetic oligonucleotide
  Target: SCNA; (-) strand; PAM type: YTN; PAM sequence: TTG
tggtgtttccactggccaaa

SEQ ID NO: 54952 - DNA, 20 bp, Artificial Sequence
  Description of Artificial Sequence: Synthetic oligonucleotide
  Target: SCNA; (-) strand; PAM type: YTN; PAM sequence: TTT
gtggtgtttccactggccaa

SEQ ID NO: 54953 - DNA, 20 bp, Artificial Sequence
  Description of Artificial Sequence: Synthetic oligonucleotide
  Target: SCNA; (-) strand; PAM type: YTN; PAM sequence: CTT
tgtggtgtttccactggcca

SEQ ID NO: 54954 - DNA, 20 bp, Artificial Sequence
  Description of Artificial Sequence: Synthetic oligonucleotide
  Target: SCNA; (-) strand; PAM type: YTN; PAM sequence: CTC
tttgtggtgtttccactggc

SEQ ID NO: 54955 - DNA, 20 bp, Artificial Sequence
  Description of Artificial Sequence: Synthetic oligonucleotide
  Target: SCNA; (-) strand; PAM type: YTN; PAM sequence: TTC
ctctttgtggtgtttccact

SEQ ID NO: 54956 - DNA, 20 bp, Artificial Sequence
  Description of Artificial Sequence: Synthetic oligonucleotide
  Target: SCNA; (-) strand; PAM type: YTN; PAM sequence: TTT
cctctttgtggtgtttccac

SEQ ID NO: 54957 - DNA, 20 bp, Artificial Sequence
  Description of Artificial Sequence: Synthetic oligonucleotide
  Target: SCNA; (-) strand; PAM type: YTN; PAM sequence: CTG
tttcctctttgtggtgtttc

SEQ ID NO: 54958 - DNA, 20 bp, Artificial Sequence
  Description of Artificial Sequence: Synthetic oligonucleotide
  Target: SCNA; (-) strand; PAM type: YTN; PAM sequence: CTC
cctgtttcctctttgtggtg

SEQ ID NO: 54959 - DNA, 20 bp, Artificial Sequence
  Description of Artificial Sequence: Synthetic oligonucleotide
  Target: SCNA; (-) strand; PAM type: YTN; PAM sequence: CTC
cctccctgtttcctctttgt

SEQ ID NO: 54960 - DNA, 20 bp, Artificial Sequence
  Description of Artificial Sequence: Synthetic oligonucleotide
  Target: SCNA; (-) strand; PAM type: YTN; PAM sequence: TTC
ctccctccctgtttcctctt

SEQ ID NO: 54961 - DNA, 20 bp, Artificial Sequence
  Description of Artificial Sequence: Synthetic oligonucleotide
  Target: SCNA; (-) strand; PAM type: YTN; PAM sequence: TTT
cctccctccctgtttcctct

SEQ ID NO: 54962 - DNA, 20 bp, Artificial Sequence
  Description of Artificial Sequence: Synthetic oligonucleotide
  Target: SCNA; (-) strand; PAM type: YTN; PAM sequence: CTT
tcctccctccctgtttcctc

SEQ ID NO: 54963 - DNA, 20 bp, Artificial Sequence
  Description of Artificial Sequence: Synthetic oligonucleotide
  Target: SCNA; (-) strand; PAM type: YTN; PAM sequence: TTA
ctttcctccctccctgtttc

SEQ ID NO: 54964 - DNA, 20 bp, Artificial Sequence
  Description of Artificial Sequence: Synthetic oligonucleotide
  Target: SCNA; (-) strand; PAM type: YTN; PAM sequence: CTT
actttcctccctccctgttt

SEQ ID NO: 54965 - DNA, 20 bp, Artificial Sequence
  Description of Artificial Sequence: Synthetic oligonucleotide
  Target: SCNA; (-) strand; PAM type: YTN; PAM sequence: CTG
accttactttcctccctccc

SEQ ID NO: 54966 - DNA, 20 bp, Artificial Sequence
  Description of Artificial Sequence: Synthetic oligonucleotide
  Target: SCNA; (-) strand; PAM type: YTN; PAM sequence: CTG
gaaaatggatcacctgacct

SEQ ID NO: 54967 - DNA, 20 bp, Artificial Sequence
  Description of Artificial Sequence: Synthetic oligonucleotide
  Target: SCNA; (-) strand; PAM type: YTN; PAM sequence: CTA
gcagggcgagaatagtcaat

SEQ ID NO: 54968 - DNA, 20 bp, Artificial Sequence
  Description of Artificial Sequence: Synthetic oligonucleotide
  Target: SCNA; (-) strand; PAM type: YTN; PAM sequence: CTG
gcctagcagggcgagaatag

SEQ ID NO: 54969 - DNA, 20 bp, Artificial Sequence
  Description of Artificial Sequence: Synthetic oligonucleotide
  Target: SCNA; (-) strand; PAM type: YTN; PAM sequence: CTG
cactggcctagcagggcgag

SEQ ID NO: 54970 - DNA, 20 bp, Artificial Sequence
  Description of Artificial Sequence: Synthetic oligonucleotide
  Target: SCNA; (-) strand; PAM type: YTN; PAM sequence: CTG
cctgcactggcctagcaggg

SEQ ID NO: 54971 - DNA, 20 bp, Artificial Sequence
  Description of Artificial Sequence: Synthetic oligonucleotide
  Target: SCNA; (-) strand; PAM type: YTN; PAM sequence: CTG
ataccacctgcctgcactgg

SEQ ID NO: 54972 - DNA, 20 bp, Artificial Sequence
  Description of Artificial Sequence: Synthetic oligonucleotide
  Target: SCNA; (-) strand; PAM type: YTN; PAM sequence: TTG
gactgataccacctgcctgc

SEQ ID NO: 54973 - DNA, 20 bp, Artificial Sequence
  Description of Artificial Sequence: Synthetic oligonucleotide
  Target: SCNA; (-) strand; PAM type: YTN; PAM sequence: TTT
ggactgataccacctgcctg

SEQ ID NO: 54974 - DNA, 20 bp, Artificial Sequence
  Description of Artificial Sequence: Synthetic oligonucleotide
  Target: SCNA; (-) strand; PAM type: YTN; PAM sequence: CTT
tggactgataccacctgcct

SEQ ID NO: 54975 - DNA, 20 bp, Artificial Sequence
  Description of Artificial Sequence: Synthetic oligonucleotide
  Target: SCNA; (-) strand; PAM type: YTN; PAM sequence: CTG
tgtgatctttggactgatac

SEQ ID NO: 54976 - DNA, 20 bp, Artificial Sequence
  Description of Artificial Sequence: Synthetic oligonucleotide
  Target: SCNA; (-) strand; PAM type: YTN; PAM sequence: TTG
agctgtgtgatctttggact

SEQ ID NO: 54977 - DNA, 20 bp, Artificial Sequence
  Description of Artificial Sequence: Synthetic oligonucleotide
  Target: SCNA; (-) strand; PAM type: YTN; PAM sequence: CTT
gagctgtgtgatctttggac

SEQ ID NO: 54978 - DNA, 20 bp, Artificial Sequence
  Description of Artificial Sequence: Synthetic oligonucleotide
  Target: SCNA; (-) strand; PAM type: YTN; PAM sequence: CTG
acttgagctgtgtgatcttt

SEQ ID NO: 54979 - DNA, 20 bp, Artificial Sequence
  Description of Artificial Sequence: Synthetic oligonucleotide
  Target: SCNA; (-) strand; PAM type: YTN; PAM sequence: CTG
cctgacttgagctgtgtgat

SEQ ID NO: 54980 - DNA, 20 bp, Artificial Sequence
  Description of Artificial Sequence: Synthetic oligonucleotide
  Target: SCNA; (-) strand; PAM type: YTN; PAM sequence: CTA
tgtgaagacggctgcctgac

SEQ ID NO: 54981 - DNA, 20 bp, Artificial Sequence
  Description of Artificial Sequence: Synthetic oligonucleotide
  Target: SCNA; (-) strand; PAM type: YTN; PAM sequence: TTA
tcagaaaaagagggagaaag

SEQ ID NO: 54982 - DNA, 20 bp, Artificial Sequence
  Description of Artificial Sequence: Synthetic oligonucleotide
  Target: SCNA; (-) strand; PAM type: YTN; PAM sequence: TTT
atcagaaaaagagggagaaa

SEQ ID NO: 54983 - DNA, 20 bp, Artificial Sequence
  Description of Artificial Sequence: Synthetic oligonucleotide
  Target: SCNA; (-) strand; PAM type: YTN; PAM sequence: TTA
ccatttatcagaaaaagagg

SEQ ID NO: 54984 - DNA, 20 bp, Artificial Sequence
  Description of Artificial Sequence: Synthetic oligonucleotide
  Target: SCNA; (-) strand; PAM type: YTN; PAM sequence: CTA
aatgaacagggagattacca

SEQ ID NO: 54985 - DNA, 20 bp, Artificial Sequence
  Description of Artificial Sequence: Synthetic oligonucleotide
  Target: SCNA; (-) strand; PAM type: YTN; PAM sequence: CTA
ggccaaaatgaactaaatga

SEQ ID NO: 54986 - DNA, 20 bp, Artificial Sequence
  Description of Artificial Sequence: Synthetic oligonucleotide
  Target: SCNA; (-) strand; PAM type: YTN; PAM sequence: TTA
taaccactaggccaaaatga

SEQ ID NO: 54987 - DNA, 20 bp, Artificial Sequence
  Description of Artificial Sequence: Synthetic oligonucleotide
  Target: SCNA; (-) strand; PAM type: YTN; PAM sequence: TTA
ggatggcaacagcgagcacc

SEQ ID NO: 54988 - DNA, 20 bp, Artificial Sequence
  Description of Artificial Sequence: Synthetic oligonucleotide
  Target: SCNA; (-) strand; PAM type: YTN; PAM sequence: TTT
aggatggcaacagcgagcac

SEQ ID NO: 54989 - DNA, 20 bp, Artificial Sequence
  Description of Artificial Sequence: Synthetic oligonucleotide
  Target: SCNA; (-) strand; PAM type: YTN; PAM sequence: CTT
taggatggcaacagcgagca

SEQ ID NO: 54990 - DNA, 20 bp, Artificial Sequence
  Description of Artificial Sequence: Synthetic oligonucleotide
  Target: SCNA; (-) strand; PAM type: YTN; PAM sequence: TTA
ggaaaaacacacggaatagt

SEQ ID NO: 54991 - DNA, 20 bp, Artificial Sequence
  Description of Artificial Sequence: Synthetic oligonucleotide
  Target: SCNA; (-) strand; PAM type: YTN; PAM sequence: TTA
gaccgggttaggaaaaacac

SEQ ID NO: 54992 - DNA, 20 bp, Artificial Sequence
  Description of Artificial Sequence: Synthetic oligonucleotide
  Target: SCNA; (-) strand; PAM type: YTN; PAM sequence: TTT
agaccgggttaggaaaaaca

SEQ ID NO: 54993 - DNA, 20 bp, Artificial Sequence
  Description of Artificial Sequence: Synthetic oligonucleotide
  Target: SCNA; (-) strand; PAM type: YTN; PAM sequence: TTA
cgaaggtttagaccgggtta

SEQ ID NO: 54994 - DNA, 20 bp, Artificial Sequence
  Description of Artificial Sequence: Synthetic oligonucleotide
  Target: SCNA; (-) strand; PAM type: YTN; PAM sequence: CTA
attacgaaggtttagaccgg

SEQ ID NO: 54995 - DNA, 20 bp, Artificial Sequence
  Description of Artificial Sequence: Synthetic oligonucleotide
  Target: SCNA; (-) strand; PAM type: YTN; PAM sequence: TTA
taaagggactaattacgaag

SEQ ID NO: 54996 - DNA, 20 bp, Artificial Sequence
  Description of Artificial Sequence: Synthetic oligonucleotide
  Target: SCNA; (-) strand; PAM type: YTN; PAM sequence: TTT
ataaagggactaattacgaa

SEQ ID NO: 54997 - DNA, 20 bp, Artificial Sequence
  Description of Artificial Sequence: Synthetic oligonucleotide
  Target: SCNA; (-) strand; PAM type: YTN; PAM sequence: CTT
tataaagggactaattacga

SEQ ID NO: 54998 - DNA, 20 bp, Artificial Sequence
  Description of Artificial Sequence: Synthetic oligonucleotide
  Target: SCNA; (-) strand; PAM type: YTN; PAM sequence: TTG
gaggagactttataaaggga

SEQ ID NO: 54999 - DNA, 20 bp, Artificial Sequence
  Description of Artificial Sequence: Synthetic oligonucleotide
  Target: SCNA; (-) strand; PAM type: YTN; PAM sequence: TTG
gtagttggaggagactttat

SEQ ID NO: 55000 - DNA, 20 bp, Artificial Sequence
  Description of Artificial Sequence: Synthetic oligonucleotide
  Target: SCNA; (-) strand; PAM type: YTN; PAM sequence: TTT
ggtagttggaggagacttta

SEQ ID NO: 55001 - DNA, 20 bp, Artificial Sequence
  Description of Artificial Sequence: Synthetic oligonucleotide
  Target: SCNA; (-) strand; PAM type: YTN; PAM sequence: CTG
aaaacaaacagtgcacacaa

SEQ ID NO: 55002 - DNA, 20 bp, Artificial Sequence
  Description of Artificial Sequence: Synthetic oligonucleotide
  Target: SCNA; (-) strand; PAM type: YTN; PAM sequence: CTG
ctgaaaacaaacagtgcaca

SEQ ID NO: 55003 - DNA, 20 bp, Artificial Sequence
  Description of Artificial Sequence: Synthetic oligonucleotide
  Target: SCNA; (-) strand; PAM type: YTN; PAM sequence: CTC
ctgctgaaaacaaacagtgc

SEQ ID NO: 55004 - DNA, 20 bp, Artificial Sequence
  Description of Artificial Sequence: Synthetic oligonucleotide
  Target: SCNA; (-) strand; PAM type: YTN; PAM sequence: TTA
taactcctgctgaaaacaaa

SEQ ID NO: 55005 - DNA, 20 bp, Artificial Sequence
  Description of Artificial Sequence: Synthetic oligonucleotide
  Target: SCNA; (-) strand; PAM type: YTN; PAM sequence: TTA
catcatatcaattataactc

SEQ ID NO: 55006 - DNA, 20 bp, Artificial Sequence
  Description of Artificial Sequence: Synthetic oligonucleotide
  Target: SCNA; (-) strand; PAM type: YTN; PAM sequence: CTT
acatcatatcaattataact

SEQ ID NO: 55007 - DNA, 20 bp, Artificial Sequence
  Description of Artificial Sequence: Synthetic oligonucleotide
  Target: SCNA; (-) strand; PAM type: YTN; PAM sequence: TTG
atatgtacttacatcatatc

SEQ ID NO: 55008 - DNA, 20 bp, Artificial Sequence
  Description of Artificial Sequence: Synthetic oligonucleotide
  Target: SCNA; (-) strand; PAM type: YTN; PAM sequence: TTT
gatatgtacttacatcatat

SEQ ID NO: 55009 - DNA, 20 bp, Artificial Sequence
  Description of Artificial Sequence: Synthetic oligonucleotide
  Target: SCNA; (-) strand; PAM type: YTN; PAM sequence: CTT
tgatatgtacttacatcata

SEQ ID NO: 55010 - DNA, 20 bp, Artificial Sequence
  Description of Artificial Sequence: Synthetic oligonucleotide
  Target: SCNA; (-) strand; PAM type: YTN; PAM sequence: CTG
taaatactttgatatgtact

SEQ ID NO: 55011 - DNA, 20 bp, Artificial Sequence
  Description of Artificial Sequence: Synthetic oligonucleotide
  Target: SCNA; (-) strand; PAM type: YTN; PAM sequence: TTC
tgtaaatactttgatatgta

SEQ ID NO: 55012 - DNA, 20 bp, Artificial Sequence
  Description of Artificial Sequence: Synthetic oligonucleotide
  Target: SCNA; (-) strand; PAM type: YTN; PAM sequence: TTT
ctgtaaatactttgatatgt

SEQ ID NO: 55013 - DNA, 20 bp, Artificial Sequence
  Description of Artificial Sequence: Synthetic oligonucleotide
  Target: SCNA; (-) strand; PAM type: YTN; PAM sequence: TTT
tctgtaaatactttgatatg

SEQ ID NO: 55014 - DNA, 20 bp, Artificial Sequence
  Description of Artificial Sequence: Synthetic oligonucleotide
  Target: SCNA; (-) strand; PAM type: YTN; PAM sequence: CTT
ttctgtaaatactttgatat

SEQ ID NO: 55015 - DNA, 20 bp, Artificial Sequence
  Description of Artificial Sequence: Synthetic oligonucleotide
  Target: SCNA; (-) strand; PAM type: YTN; PAM sequence: TTG
cttttctgtaaatactttga

SEQ ID NO: 55016 - DNA, 20 bp, Artificial Sequence
  Description of Artificial Sequence: Synthetic oligonucleotide
  Target: SCNA; (-) strand; PAM type: YTN; PAM sequence: TTT
gcttttctgtaaatactttg

SEQ ID NO: 55017 - DNA, 20 bp, Artificial Sequence
  Description of Artificial Sequence: Synthetic oligonucleotide
  Target: SCNA; (-) strand; PAM type: YTN; PAM sequence: TTT
tgcttttctgtaaatacttt

SEQ ID NO: 55018 - DNA, 20 bp, Artificial Sequence
  Description of Artificial Sequence: Synthetic oligonucleotide
  Target: SCNA; (-) strand; PAM type: YTN; PAM sequence: TTG
gaattttgcttttctgtaaa

SEQ ID NO: 55019 - DNA, 20 bp, Artificial Sequence
  Description of Artificial Sequence: Synthetic oligonucleotide
  Target: SCNA; (-) strand; PAM type: YTN; PAM sequence: TTT
ggaattttgcttttctgtaa

SEQ ID NO: 55020 - DNA, 20 bp, Artificial Sequence
  Description of Artificial Sequence: Synthetic oligonucleotide
  Target: SCNA; (-) strand; PAM type: YTN; PAM sequence: CTC
aatatttggaattttgcttt

SEQ ID NO: 55021 - DNA, 20 bp, Artificial Sequence
  Description of Artificial Sequence: Synthetic oligonucleotide
  Target: SCNA; (-) strand; PAM type: YTN; PAM sequence: TTG
gggccaatacagagaaaaca

SEQ ID NO: 55022 - DNA, 20 bp, Artificial Sequence
  Description of Artificial Sequence: Synthetic oligonucleotide
  Target: SCNA; (-) strand; PAM type: YTN; PAM sequence: TTC
caatgattggggccaataca

SEQ ID NO: 55023 - DNA, 20 bp, Artificial Sequence
  Description of Artificial Sequence: Synthetic oligonucleotide
  Target: SCNA; (-) strand; PAM type: YTN; PAM sequence: TTG
tatgcacaaaacattccaat

SEQ ID NO: 55024 - DNA, 20 bp, Artificial Sequence
  Description of Artificial Sequence: Synthetic oligonucleotide
  Target: SCNA; (-) strand; PAM type: YTN; PAM sequence: TTA
taaagttgtatgcacaaaac

SEQ ID NO: 55025 - DNA, 20 bp, Artificial Sequence
  Description of Artificial Sequence: Synthetic oligonucleotide
  Target: SCNA; (-) strand; PAM type: YTN; PAM sequence: TTA
ttataaagttgtatgcacaa

SEQ ID NO: 55026 - DNA, 20 bp, Artificial Sequence
  Description of Artificial Sequence: Synthetic oligonucleotide
  Target: SCNA; (-) strand; PAM type: YTN; PAM sequence: TTG
agcaaatcaaagtatgaaaa

SEQ ID NO: 55027 - DNA, 20 bp, Artificial Sequence
  Description of Artificial Sequence: Synthetic oligonucleotide
  Target: SCNA; (-) strand; PAM type: YTN; PAM sequence: TTC
attgagcaaatcaaagtatg

SEQ ID NO: 55028 - DNA, 20 bp, Artificial Sequence
  Description of Artificial Sequence: Synthetic oligonucleotide
  Target: SCNA; (-) strand; PAM type: YTN; PAM sequence: CTA
gcattcattgagcaaatcaa

SEQ ID NO: 55029 - DNA, 20 bp, Artificial Sequence
  Description of Artificial Sequence: Synthetic oligonucleotide
  Target: SCNA; (-) strand; PAM type: YTN; PAM sequence: TTA
taactagcattcattgagca

SEQ ID NO: 55030 - DNA, 20 bp, Artificial Sequence
  Description of Artificial Sequence: Synthetic oligonucleotide
  Target: SCNA; (-) strand; PAM type: YTN; PAM sequence: TTT
ataactagcattcattgagc

SEQ ID NO: 55031 - DNA, 20 bp, Artificial Sequence
  Description of Artificial Sequence: Synthetic oligonucleotide
  Target: SCNA; (-) strand; PAM type: YTN; PAM sequence: TTT
tataactagcattcattgag

SEQ ID NO: 55032 - DNA, 20 bp, Artificial Sequence
  Description of Artificial Sequence: Synthetic oligonucleotide
  Target: SCNA; (-) strand; PAM type: YTN; PAM sequence: TTT
ttataactagcattcattga

SEQ ID NO: 55033 - DNA, 20 bp, Artificial Sequence
  Description of Artificial Sequence: Synthetic oligonucleotide
  Target: SCNA; (-) strand; PAM type: YTN; PAM sequence: TTT
tttataactagcattcattg

SEQ ID NO: 55034 - DNA, 20 bp, Artificial Sequence
  Description of Artificial Sequence: Synthetic oligonucleotide
  Target: SCNA; (-) strand; PAM type: YTN; PAM sequence: TTG
ttttttataactagcattca

SEQ ID NO: 55035 - DNA, 20 bp, Artificial Sequence
  Description of Artificial Sequence: Synthetic oligonucleotide
  Target: SCNA; (-) strand; PAM type: YTN; PAM sequence: CTT
gttttttataactagcattc

SEQ ID NO: 55036 - DNA, 20 bp, Artificial Sequence
  Description of Artificial Sequence: Synthetic oligonucleotide
  Target: SCNA; (-) strand; PAM type: YTN; PAM sequence: TTA
aatgatcttgttttttataa

SEQ ID NO: 55037 - DNA, 20 bp, Artificial Sequence
  Description of Artificial Sequence: Synthetic oligonucleotide
  Target: SCNA; (-) strand; PAM type: YTN; PAM sequence: TTT
aaatgatcttgttttttata

SEQ ID NO: 55038 - DNA, 20 bp, Artificial Sequence
  Description of Artificial Sequence: Synthetic oligonucleotide
  Target: SCNA; (-) strand; PAM type: YTN; PAM sequence: TTT
taaatgatcttgttttttat

SEQ ID NO: 55039 - DNA, 20 bp, Artificial Sequence
  Description of Artificial Sequence: Synthetic oligonucleotide
  Target: SCNA; (-) strand; PAM type: YTN; PAM sequence: CTG
agaataataaaggcaaggaa

SEQ ID NO: 55040 - DNA, 20 bp, Artificial Sequence
  Description of Artificial Sequence: Synthetic oligonucleotide
  Target: SCNA; (-) strand; PAM type: YTN; PAM sequence: TTC
acctgagaataataaaggca

SEQ ID NO: 55041 - DNA, 20 bp, Artificial Sequence
  Description of Artificial Sequence: Synthetic oligonucleotide
  Target: SCNA; (-) strand; PAM type: YTN; PAM sequence: TTT
cacctgagaataataaaggc

SEQ ID NO: 55042 - DNA, 20 bp, Artificial Sequence
  Description of Artificial Sequence: Synthetic oligonucleotide
  Target: SCNA; (-) strand; PAM type: YTN; PAM sequence: CTC
catttcacctgagaataata

SEQ ID NO: 55043 - DNA, 20 bp, Artificial Sequence
  Description of Artificial Sequence: Synthetic oligonucleotide
  Target: SCNA; (-) strand; PAM type: YTN; PAM sequence: TTC
atatctccatttcacctgag

SEQ ID NO: 55044 - DNA, 20 bp, Artificial Sequence
  Description of Artificial Sequence: Synthetic oligonucleotide
  Target: SCNA; (-) strand; PAM type: YTN; PAM sequence: TTA
taaattcatatctccatttc

SEQ ID NO: 55045 - DNA, 20 bp, Artificial Sequence
  Description of Artificial Sequence: Synthetic oligonucleotide
  Target: SCNA; (-) strand; PAM type: YTN; PAM sequence: TTA
ttataaattcatatctccat

SEQ ID NO: 55046 - DNA, 20 bp, Artificial Sequence
  Description of Artificial Sequence: Synthetic oligonucleotide
  Target: SCNA; (-) strand; PAM type: YTN; PAM sequence: TTT
attataaattcatatctcca

SEQ ID NO: 55047 - DNA, 20 bp, Artificial Sequence
  Description of Artificial Sequence: Synthetic oligonucleotide
  Target: SCNA; (-) strand; PAM type: YTN; PAM sequence: CTT
tattataaattcatatctcc

SEQ ID NO: 55048 - DNA, 20 bp, Artificial Sequence
  Description of Artificial Sequence: Synthetic oligonucleotide
  Target: SCNA; (-) strand; PAM type: YTN; PAM sequence: CTC
tttattataaattcatatct

SEQ ID NO: 55049 - DNA, 20 bp, Artificial Sequence
  Description of Artificial Sequence: Synthetic oligonucleotide
  Target: SCNA; (-) strand; PAM type: YTN; PAM sequence: TTG
tcactctttattataaattc

SEQ ID NO: 55050 - DNA, 20 bp, Artificial Sequence
  Description of Artificial Sequence: Synthetic oligonucleotide
  Target: SCNA; (-) strand; PAM type: YTN; PAM sequence: CTT
gtcactctttattataaatt

SEQ ID NO: 55051 - DNA, 20 bp, Artificial Sequence
  Description of Artificial Sequence: Synthetic oligonucleotide
  Target: SCNA; (-) strand; PAM type: YTN; PAM sequence: CTA
acttgtcactctttattata

SEQ ID NO: 55052 - DNA, 20 bp, Artificial Sequence
  Description of Artificial Sequence: Synthetic oligonucleotide
  Target: SCNA; (-) strand; PAM type: YTN; PAM sequence: TTC
cactaacttgtcactcttta

SEQ ID NO: 55053 - DNA, 20 bp, Artificial Sequence
  Description of Artificial Sequence: Synthetic oligonucleotide
  Target: SCNA; (-) strand; PAM type: YTN; PAM sequence: TTA
caattccactaacttgtcac

SEQ ID NO: 55054 - DNA, 20 bp, Artificial Sequence
  Description of Artificial Sequence: Synthetic oligonucleotide
  Target: SCNA; (-) strand; PAM type: YTN; PAM sequence: TTT
acaattccactaacttgtca

SEQ ID NO: 55055 - DNA, 20 bp, Artificial Sequence
  Description of Artificial Sequence: Synthetic oligonucleotide
  Target: SCNA; (-) strand; PAM type: YTN; PAM sequence: TTT
tacaattccactaacttgtc

SEQ ID NO: 55056 - DNA, 20 bp, Artificial Sequence
  Description of Artificial Sequence: Synthetic oligonucleotide
  Target: SCNA; (-) strand; PAM type: YTN; PAM sequence: TTA
ttttacaattccactaactt

SEQ ID NO: 55057 - DNA, 20 bp, Artificial Sequence
  Description of Artificial Sequence: Synthetic oligonucleotide
  Target: SCNA; (-) strand; PAM type: YTN; PAM sequence: TTG
agtataatgttattttacaa

SEQ ID NO: 55058 - DNA, 20 bp, Artificial Sequence
  Description of Artificial Sequence: Synthetic oligonucleotide
  Target: SCNA; (-) strand; PAM type: YTN; PAM sequence: TTT
gagtataatgttattttaca

SEQ ID NO: 55059 - DNA, 20 bp, Artificial Sequence
  Description of Artificial Sequence: Synthetic oligonucleotide
  Target: SCNA; (-) strand; PAM type: YTN; PAM sequence: TTT
tgagtataatgttattttac

SEQ ID NO: 55060 - DNA, 20 bp, Artificial Sequence
  Description of Artificial Sequence: Synthetic oligonucleotide
  Target: SCNA; (-) strand; PAM type: YTN; PAM sequence: TTT
ttgagtataatgttatttta

SEQ ID NO: 55061 - DNA, 20 bp, Artificial Sequence
  Description of Artificial Sequence: Synthetic oligonucleotide
  Target: SCNA; (-) strand; PAM type: YTN; PAM sequence: TTT
tttgagtataatgttatttt

SEQ ID NO: 55062 - DNA, 20 bp, Artificial Sequence
  Description of Artificial Sequence: Synthetic oligonucleotide
  Target: SCNA; (-) strand; PAM type: YTN; PAM sequence: CTT
ttttgagtataatgttattt

SEQ ID NO: 55063 - DNA, 20 bp, Artificial Sequence
  Description of Artificial Sequence: Synthetic oligonucleotide
  Target: SCNA; (-) strand; PAM type: YTN; PAM sequence: TTC
ttttttgagtataatgttat

SEQ ID NO: 55064 - DNA, 20 bp, Artificial Sequence
  Description of Artificial Sequence: Synthetic oligonucleotide
  Target: SCNA; (-) strand; PAM type: YTN; PAM sequence: CTT
cttttttgagtataatgtta

SEQ ID NO: 55065 - DNA, 20 bp, Artificial Sequence
  Description of Artificial Sequence: Synthetic oligonucleotide
  Target: SCNA; (-) strand; PAM type: YTN; PAM sequence: TTC
ttcttttttgagtataatgt

SEQ ID NO: 55066 - DNA, 20 bp, Artificial Sequence
  Description of Artificial Sequence: Synthetic oligonucleotide
  Target: SCNA; (-) strand; PAM type: YTN; PAM sequence: CTA
ttcttcttttttgagtataa

SEQ ID NO: 55067 - DNA, 20 bp, Artificial Sequence
  Description of Artificial Sequence: Synthetic oligonucleotide
  Target: SCNA; (-) strand; PAM type: YTN; PAM sequence: CTC
tattcttcttttttgagtat

SEQ ID NO: 55068 - DNA, 20 bp, Artificial Sequence
  Description of Artificial Sequence: Synthetic oligonucleotide
  Target: SCNA; (-) strand; PAM type: YTN; PAM sequence: TTA
caatctctattcttcttttt

SEQ ID NO: 55069 - DNA, 20 bp, Artificial Sequence
  Description of Artificial Sequence: Synthetic oligonucleotide
  Target: SCNA; (-) strand; PAM type: YTN; PAM sequence: TTT
acaatctctattcttctttt

SEQ ID NO: 55070 - DNA, 20 bp, Artificial Sequence
  Description of Artificial Sequence: Synthetic oligonucleotide
  Target: SCNA; (-) strand; PAM type: YTN; PAM sequence: CTT
tacaatctctattcttcttt

SEQ ID NO: 55071 - DNA, 20 bp, Artificial Sequence
  Description of Artificial Sequence: Synthetic oligonucleotide
  Target: SCNA; (-) strand; PAM type: YTN; PAM sequence: TTC
tttacaatctctattcttct

SEQ ID NO: 55072 - DNA, 20 bp, Artificial Sequence
  Description of Artificial Sequence: Synthetic oligonucleotide
  Target: SCNA; (-) strand; PAM type: YTN; PAM sequence: TTT
ctttacaatctctattcttc

SEQ ID NO: 55073 - DNA, 20 bp, Artificial Sequence
  Description of Artificial Sequence: Synthetic oligonucleotide
  Target: SCNA; (-) strand; PAM type: YTN; PAM sequence: CTC
atttctttacaatctctatt

SEQ ID NO: 55074 - DNA, 20 bp, Artificial Sequence
  Description of Artificial Sequence: Synthetic oligonucleotide
  Target: SCNA; (-) strand; PAM type: YTN; PAM sequence: CTC
aatctcatttctttacaatc

SEQ ID NO: 55075 - DNA, 20 bp, Artificial Sequence
  Description of Artificial Sequence: Synthetic oligonucleotide
  Target: SCNA; (-) strand; PAM type: YTN; PAM sequence: TTA
cggactcaatctcatttctt

SEQ ID NO: 55076 - DNA, 20 bp, Artificial Sequence
  Description of Artificial Sequence: Synthetic oligonucleotide
  Target: SCNA; (-) strand; PAM type: YTN; PAM sequence: CTT
acggactcaatctcatttct

SEQ ID NO: 55077 - DNA, 20 bp, Artificial Sequence
  Description of Artificial Sequence: Synthetic oligonucleotide
  Target: SCNA; (-) strand; PAM type: YTN; PAM sequence: TTA
cttacggactcaatctcatt

SEQ ID NO: 55078 - DNA, 20 bp, Artificial Sequence
  Description of Artificial Sequence: Synthetic oligonucleotide
  Target: SCNA; (-) strand; PAM type: YTN; PAM sequence: TTA
tacattacttacggactcaa

SEQ ID NO: 55079 - DNA, 20 bp, Artificial Sequence
  Description of Artificial Sequence: Synthetic oligonucleotide
  Target: SCNA; (-) strand; PAM type: YTN; PAM sequence: CTG
agacagttatacattactta

SEQ ID NO: 55080 - DNA, 20 bp, Artificial Sequence
  Description of Artificial Sequence: Synthetic oligonucleotide
  Target: SCNA; (-) strand; PAM type: YTN; PAM sequence: TTA
taaggtatgacaatgaaata

SEQ ID NO: 55081 - DNA, 20 bp, Artificial Sequence
  Description of Artificial Sequence: Synthetic oligonucleotide
  Target: SCNA; (-) strand; PAM type: YTN; PAM sequence: CTT
ataaggtatgacaatgaaat

SEQ ID NO: 55082 - DNA, 20 bp, Artificial Sequence
  Description of Artificial Sequence: Synthetic oligonucleotide
  Target: SCNA; (-) strand; PAM type: YTN; PAM sequence: TTA
cttataaggtatgacaatga

SEQ ID NO: 55083 - DNA, 20 bp, Artificial Sequence
  Description of Artificial Sequence: Synthetic oligonucleotide
  Target: SCNA; (-) strand; PAM type: YTN; PAM sequence: CTT
acttataaggtatgacaatg

SEQ ID NO: 55084 - DNA, 20 bp, Artificial Sequence
  Description of Artificial Sequence: Synthetic oligonucleotide
  Target: SCNA; (-) strand; PAM type: YTN; PAM sequence: CTG
cttacttataaggtatgaca

SEQ ID NO: 55085 - DNA, 20 bp, Artificial Sequence
  Description of Artificial Sequence: Synthetic oligonucleotide
  Target: SCNA; (-) strand; PAM type: YTN; PAM sequence: TTC
cctgcttacttataaggtat

SEQ ID NO: 55086 - DNA, 20 bp, Artificial Sequence
  Description of Artificial Sequence: Synthetic oligonucleotide
  Target: SCNA; (-) strand; PAM type: YTN; PAM sequence: CTT
ccctgcttacttataaggta

SEQ ID NO: 55087 - DNA, 20 bp, Artificial Sequence
  Description of Artificial Sequence: Synthetic oligonucleotide
  Target: SCNA; (-) strand; PAM type: YTN; PAM sequence: TTG
tacttccctgcttacttata

SEQ ID NO: 55088 - DNA, 20 bp, Artificial Sequence
  Description of Artificial Sequence: Synthetic oligonucleotide
  Target: SCNA; (-) strand; PAM type: YTN; PAM sequence: TTT
gtacttccctgcttacttat

SEQ ID NO: 55089 - DNA, 20 bp, Artificial Sequence
  Description of Artificial Sequence: Synthetic oligonucleotide
  Target: SCNA; (-) strand; PAM type: YTN; PAM sequence: CTA
tttgtacttccctgcttact

SEQ ID NO: 55090 - DNA, 20 bp, Artificial Sequence
  Description of Artificial Sequence: Synthetic oligonucleotide
  Target: SCNA; (-) strand; PAM type: YTN; PAM sequence: TTA
ataagtacacatctatttgt

SEQ ID NO: 55091 - DNA, 20 bp, Artificial Sequence
  Description of Artificial Sequence: Synthetic oligonucleotide
  Target: SCNA; (-) strand; PAM type: YTN; PAM sequence: CTA
aattaataagtacacatcta

SEQ ID NO: 55092 - DNA, 20 bp, Artificial Sequence
  Description of Artificial Sequence: Synthetic oligonucleotide
  Target: SCNA; (-) strand; PAM type: YTN; PAM sequence: CTG
aaagactaaattaataagta

SEQ ID NO: 55093 - DNA, 20 bp, Artificial Sequence
  Description of Artificial Sequence: Synthetic oligonucleotide
  Target: SCNA; (-) strand; PAM type: YTN; PAM sequence: CTC
aatgagtgactgaaagacta

SEQ ID NO: 55094 - DNA, 20 bp, Artificial Sequence
  Description of Artificial Sequence: Synthetic oligonucleotide
  Target: SCNA; (-) strand; PAM type: YTN; PAM sequence: TTG
actcaatgagtgactgaaag

SEQ ID NO: 55095 - DNA, 20 bp, Artificial Sequence
  Description of Artificial Sequence: Synthetic oligonucleotide
  Target: SCNA; (-) strand; PAM type: YTN; PAM sequence: TTG
attgactcaatgagtgactg

SEQ ID NO: 55096 - DNA, 20 bp, Artificial Sequence
  Description of Artificial Sequence: Synthetic oligonucleotide
  Target: SCNA; (-) strand; PAM type: YTN; PAM sequence: CTC
aagaattgattgactcaatg

SEQ ID NO: 55097 - DNA, 20 bp, Artificial Sequence
  Description of Artificial Sequence: Synthetic oligonucleotide
  Target: SCNA; (-) strand; PAM type: YTN; PAM sequence: TTG
gcctcaagaattgattgact

SEQ ID NO: 55098 - DNA, 20 bp, Artificial Sequence
  Description of Artificial Sequence: Synthetic oligonucleotide
  Target: SCNA; (-) strand; PAM type: YTN; PAM sequence: TTC
aaaaacaattggcctcaaga

SEQ ID NO: 55099 - DNA, 20 bp, Artificial Sequence
  Description of Artificial Sequence: Synthetic oligonucleotide
  Target: SCNA; (-) strand; PAM type: YTN; PAM sequence: CTT
caaaaacaattggcctcaag

SEQ ID NO: 55100 - DNA, 20 bp, Artificial Sequence
  Description of Artificial Sequence: Synthetic oligonucleotide
  Target: SCNA; (-) strand; PAM type: YTN; PAM sequence: CTA
gcacaatcagtgccttcaaa

SEQ ID NO: 55101 - DNA, 20 bp, Artificial Sequence
  Description of Artificial Sequence: Synthetic oligonucleotide
  Target: SCNA; (-) strand; PAM type: YTN; PAM sequence: TTG
taacatccacagtatctagc

SEQ ID NO: 55102 - DNA, 20 bp, Artificial Sequence
  Description of Artificial Sequence: Synthetic oligonucleotide
  Target: SCNA; (-) strand; PAM type: YTN; PAM sequence: TTT
gtaacatccacagtatctag

SEQ ID NO: 55103 - DNA, 20 bp, Artificial Sequence
  Description of Artificial Sequence: Synthetic oligonucleotide
  Target: SCNA; (-) strand; PAM type: YTN; PAM sequence: CTT
tgtaacatccacagtatcta

SEQ ID NO: 55104 - DNA, 20 bp, Artificial Sequence
  Description of Artificial Sequence: Synthetic oligonucleotide
  Target: SCNA; (-) strand; PAM type: YTN; PAM sequence: TTC
acctttgtaacatccacagt

SEQ ID NO: 55105 - DNA, 20 bp, Artificial Sequence
  Description of Artificial Sequence: Synthetic oligonucleotide
  Target: SCNA; (-) strand; PAM type: YTN; PAM sequence: TTA
ttcacctttgtaacatccac

SEQ ID NO: 55106 - DNA, 20 bp, Artificial Sequence
  Description of Artificial Sequence: Synthetic oligonucleotide
  Target: SCNA; (-) strand; PAM type: YTN; PAM sequence: TTT
attcacctttgtaacatcca

SEQ ID NO: 55107 - DNA, 20 bp, Artificial Sequence
  Description of Artificial Sequence: Synthetic oligonucleotide
  Target: SCNA; (-) strand; PAM type: YTN; PAM sequence: TTT
tattcacctttgtaacatcc

SEQ ID NO: 55108 - DNA, 20 bp, Artificial Sequence
  Description of Artificial Sequence: Synthetic oligonucleotide
  Target: SCNA; (-) strand; PAM type: YTN; PAM sequence: TTA
agacattttattcacctttg

SEQ ID NO: 55109 - DNA, 20 bp, Artificial Sequence
  Description of Artificial Sequence: Synthetic oligonucleotide
  Target: SCNA; (-) strand; PAM type: YTN; PAM sequence: CTC
agattaagacattttattca

SEQ ID NO: 55110 - DNA, 20 bp, Artificial Sequence
  Description of Artificial Sequence: Synthetic oligonucleotide
  Target: SCNA; (-) strand; PAM type: YTN; PAM sequence: TTC
ctcagattaagacattttat

SEQ ID NO: 55111 - DNA, 20 bp, Artificial Sequence
  Description of Artificial Sequence: Synthetic oligonucleotide
  Target: SCNA; (-) strand; PAM type: YTN; PAM sequence: CTT
cctcagattaagacatttta

SEQ ID NO: 55112 - DNA, 20 bp, Artificial Sequence
  Description of Artificial Sequence: Synthetic oligonucleotide
  Target: SCNA; (-) strand; PAM type: YTN; PAM sequence: TTC
ttcctcagattaagacattt

SEQ ID NO: 55113 - DNA, 20 bp, Artificial Sequence
  Description of Artificial Sequence: Synthetic oligonucleotide
  Target: SCNA; (-) strand; PAM type: YTN; PAM sequence: TTG
taaattcttcctcagattaa

SEQ ID NO: 55114 - DNA, 20 bp, Artificial Sequence
  Description of Artificial Sequence: Synthetic oligonucleotide
  Target: SCNA; (-) strand; PAM type: YTN; PAM sequence: CTG
tgtagattgtaaattcttcc

SEQ ID NO: 55115 - DNA, 20 bp, Artificial Sequence
  Description of Artificial Sequence: Synthetic oligonucleotide
  Target: SCNA; (-) strand; PAM type: YTN; PAM sequence: TTC
atgcctgtgtagattgtaaa

SEQ ID NO: 55116 - DNA, 20 bp, Artificial Sequence
  Description of Artificial Sequence: Synthetic oligonucleotide
  Target: SCNA; (-) strand; PAM type: YTN; PAM sequence: TTT
catgcctgtgtagattgtaa

SEQ ID NO: 55117 - DNA, 20 bp, Artificial Sequence
  Description of Artificial Sequence: Synthetic oligonucleotide
  Target: SCNA; (-) strand; PAM type: YTN; PAM sequence: TTT
tcatgcctgtgtagattgta

SEQ ID NO: 55118 - DNA, 20 bp, Artificial Sequence
  Description of Artificial Sequence: Synthetic oligonucleotide
  Target: SCNA; (-) strand; PAM type: YTN; PAM sequence: TTT
ttcatgcctgtgtagattgt

SEQ ID NO: 55119 - DNA, 20 bp, Artificial Sequence
  Description of Artificial Sequence: Synthetic oligonucleotide
  Target: SCNA; (-) strand; PAM type: YTN; PAM sequence: TTT
tttcatgcctgtgtagattg

SEQ ID NO: 55120 - DNA, 20 bp, Artificial Sequence
  Description of Artificial Sequence: Synthetic oligonucleotide
  Target: SCNA; (-) strand; PAM type: YTN; PAM sequence: TTG
ttttttcatgcctgtgtaga

SEQ ID NO: 55121 - DNA, 20 bp, Artificial Sequence
  Description of Artificial Sequence: Synthetic oligonucleotide
  Target: SCNA; (-) strand; PAM type: YTN; PAM sequence: CTT
gttttttcatgcctgtgtag

SEQ ID NO: 55122 - DNA, 20 bp, Artificial Sequence
  Description of Artificial Sequence: Synthetic oligonucleotide
  Target: SCNA; (-) strand; PAM type: YTN; PAM sequence: TTC
cttgttttttcatgcctgtg

SEQ ID NO: 55123 - DNA, 20 bp, Artificial Sequence
  Description of Artificial Sequence: Synthetic oligonucleotide
  Target: SCNA; (-) strand; PAM type: YTN; PAM sequence: CTT
ccttgttttttcatgcctgt

SEQ ID NO: 55124 - DNA, 20 bp, Artificial Sequence
  Description of Artificial Sequence: Synthetic oligonucleotide
  Target: SCNA; (-) strand; PAM type: YTN; PAM sequence: CTC
ttccttgttttttcatgcct

SEQ ID NO: 55125 - DNA, 20 bp, Artificial Sequence
  Description of Artificial Sequence: Synthetic oligonucleotide
  Target: SCNA; (-) strand; PAM type: YTN; PAM sequence: CTA
cactcttccttgttttttca

SEQ ID NO: 55126 - DNA, 20 bp, Artificial Sequence
  Description of Artificial Sequence: Synthetic oligonucleotide
  Target: SCNA; (-) strand; PAM type: YTN; PAM sequence: TTC
acctacactcttccttgttt

SEQ ID NO: 55127 - DNA, 20 bp, Artificial Sequence
  Description of Artificial Sequence: Synthetic oligonucleotide
  Target: SCNA; (-) strand; PAM type: YTN; PAM sequence: TTT
cacctacactcttccttgtt

SEQ ID NO: 55128 - DNA, 20 bp, Artificial Sequence
  Description of Artificial Sequence: Synthetic oligonucleotide
  Target: SCNA; (-) strand; PAM type: YTN; PAM sequence: CTT
tcacctacactcttccttgt

SEQ ID NO: 55129 - DNA, 20 bp, Artificial Sequence
  Description of Artificial Sequence: Synthetic oligonucleotide
  Target: SCNA; (-) strand; PAM type: YTN; PAM sequence: TTC
cctttcacctacactcttcc

SEQ ID NO: 55130 - DNA, 20 bp, Artificial Sequence
  Description of Artificial Sequence: Synthetic oligonucleotide
  Target: SCNA; (-) strand; PAM type: YTN; PAM sequence: TTT
ccctttcacctacactcttc

SEQ ID NO: 55131 - DNA, 20 bp, Artificial Sequence
  Description of Artificial Sequence: Synthetic oligonucleotide
  Target: SCNA; (-) strand; PAM type: YTN; PAM sequence: TTC
aaatttccctttcacctaca

SEQ ID NO: 55132 - DNA, 20 bp, Artificial Sequence
  Description of Artificial Sequence: Synthetic oligonucleotide
  Target: SCNA; (-) strand; PAM type: YTN; PAM sequence: TTC
acattcaaatttccctttca

SEQ ID NO: 55133 - DNA, 20 bp, Artificial Sequence
  Description of Artificial Sequence: Synthetic oligonucleotide
  Target: SCNA; (-) strand; PAM type: YTN; PAM sequence: TTT
cacattcaaatttccctttc

SEQ ID NO: 55134 - DNA, 20 bp, Artificial Sequence
  Description of Artificial Sequence: Synthetic oligonucleotide
  Target: SCNA; (-) strand; PAM type: YTN; PAM sequence: TTG
gtgatttcacattcaaattt

SEQ ID NO: 55135 - DNA, 20 bp, Artificial Sequence
  Description of Artificial Sequence: Synthetic oligonucleotide
  Target: SCNA; (-) strand; PAM type: YTN; PAM sequence: CTT
ggtgatttcacattcaaatt

SEQ ID NO: 55136 - DNA, 20 bp, Artificial Sequence
  Description of Artificial Sequence: Synthetic oligonucleotide
  Target: SCNA; (-) strand; PAM type: YTN; PAM sequence: TTG
tgaccttggtgatttcacat

SEQ ID NO: 55137 - DNA, 20 bp, Artificial Sequence
  Description of Artificial Sequence: Synthetic oligonucleotide
  Target: SCNA; (-) strand; PAM type: YTN; PAM sequence: TTT
gtgaccttggtgatttcaca

SEQ ID NO: 55138 - DNA, 20 bp, Artificial Sequence
  Description of Artificial Sequence: Synthetic oligonucleotide
  Target: SCNA; (-) strand; PAM type: YTN; PAM sequence: CTT
tgtgaccttggtgatttcac

SEQ ID NO: 55139 - DNA, 20 bp, Artificial Sequence
  Description of Artificial Sequence: Synthetic oligonucleotide
  Target: SCNA; (-) strand; PAM type: YTN; PAM sequence: CTG
aggagacatgctttgtgacc

SEQ ID NO: 55140 - DNA, 20 bp, Artificial Sequence
  Description of Artificial Sequence: Synthetic oligonucleotide
  Target: SCNA; (-) strand; PAM type: YTN; PAM sequence: CTA
gcactgaggagacatgcttt

SEQ ID NO: 55141 - DNA, 20 bp, Artificial Sequence
  Description of Artificial Sequence: Synthetic oligonucleotide
  Target: SCNA; (-) strand; PAM type: YTN; PAM sequence: TTC
gctagcactgaggagacatg

SEQ ID NO: 55142 - DNA, 20 bp, Artificial Sequence
  Description of Artificial Sequence: Synthetic oligonucleotide
  Target: SCNA; (-) strand; PAM type: YTN; PAM sequence: CTT
cgctagcactgaggagacat

SEQ ID NO: 55143 - DNA, 20 bp, Artificial Sequence
  Description of Artificial Sequence: Synthetic oligonucleotide
  Target: SCNA; (-) strand; PAM type: YTN; PAM sequence: TTA
tatagtccttcgctagcact

SEQ ID NO: 55144 - DNA, 20 bp, Artificial Sequence
  Description of Artificial Sequence: Synthetic oligonucleotide
  Target: SCNA; (-) strand; PAM type: YTN; PAM sequence: CTA
ttatatagtccttcgctagc

SEQ ID NO: 55145 - DNA, 20 bp, Artificial Sequence
  Description of Artificial Sequence: Synthetic oligonucleotide
  Target: SCNA; (-) strand; PAM type: YTN; PAM sequence: TTG
tgagcctattatatagtcct

SEQ ID NO: 55146 - DNA, 20 bp, Artificial Sequence
  Description of Artificial Sequence: Synthetic oligonucleotide
  Target: SCNA; (-) strand; PAM type: YTN; PAM sequence: TTT
gtgagcctattatatagtcc

SEQ ID NO: 55147 - DNA, 20 bp, Artificial Sequence
  Description of Artificial Sequence: Synthetic oligonucleotide
  Target: SCNA; (-) strand; PAM type: YTN; PAM sequence: TTT
tgtgagcctattatatagtc

SEQ ID NO: 55148 - DNA, 20 bp, Artificial Sequence
  Description of Artificial Sequence: Synthetic oligonucleotide
  Target: SCNA; (-) strand; PAM type: YTN; PAM sequence: TTT
ttgtgagcctattatatagt

SEQ ID NO: 55149 - DNA, 20 bp, Artificial Sequence
  Description of Artificial Sequence: Synthetic oligonucleotide
  Target: SCNA; (-) strand; PAM type: YTN; PAM sequence: TTA
aacaaatatttttgtgagcc

SEQ ID NO: 55150 - DNA, 20 bp, Artificial Sequence
  Description of Artificial Sequence: Synthetic oligonucleotide
  Target: SCNA; (-) strand; PAM type: YTN; PAM sequence: TTT
aaacaaatatttttgtgagc

SEQ ID NO: 55151 - DNA, 20 bp, Artificial Sequence
  Description of Artificial Sequence: Synthetic oligonucleotide
  Target: SCNA; (-) strand; PAM type: YTN; PAM sequence: TTT
taaacaaatatttttgtgag

SEQ ID NO: 55152 - DNA, 20 bp, Artificial Sequence
  Description of Artificial Sequence: Synthetic oligonucleotide
  Target: SCNA; (-) strand; PAM type: YTN; PAM sequence: TTA
cattttaaacaaatattttt

SEQ ID NO: 55153 - DNA, 20 bp, Artificial Sequence
  Description of Artificial Sequence: Synthetic oligonucleotide
  Target: SCNA; (-) strand; PAM type: YTN; PAM sequence: TTA
attacattttaaacaaatat

SEQ ID NO: 55154 - DNA, 20 bp, Artificial Sequence
  Description of Artificial Sequence: Synthetic oligonucleotide
  Target: SCNA; (-) strand; PAM type: YTN; PAM sequence: TTT
aattacattttaaacaaata

SEQ ID NO: 55155 - DNA, 20 bp, Artificial Sequence
  Description of Artificial Sequence: Synthetic oligonucleotide
  Target: SCNA; (-) strand; PAM type: YTN; PAM sequence: TTC
atttaattacattttaaaca

SEQ ID NO: 55156 - DNA, 20 bp, Artificial Sequence
  Description of Artificial Sequence: Synthetic oligonucleotide
  Target: SCNA; (-) strand; PAM type: YTN; PAM sequence: TTT
catttaattacattttaaac

SEQ ID NO: 55157 - DNA, 20 bp, Artificial Sequence
  Description of Artificial Sequence: Synthetic oligonucleotide
  Target: SCNA; (-) strand; PAM type: YTN; PAM sequence: TTC
aaatttcatttaattacatt

SEQ ID NO: 55158 - DNA, 20 bp, Artificial Sequence
  Description of Artificial Sequence: Synthetic oligonucleotide
  Target: SCNA; (-) strand; PAM type: YTN; PAM sequence: CTT
caaatttcatttaattacat

SEQ ID NO: 55159 - DNA, 20 bp, Artificial Sequence
  Description of Artificial Sequence: Synthetic oligonucleotide
  Target: SCNA; (-) strand; PAM type: YTN; PAM sequence: TTC
ttcaaatttcatttaattac

SEQ ID NO: 55160 - DNA, 20 bp, Artificial Sequence
  Description of Artificial Sequence: Synthetic oligonucleotide
  Target: SCNA; (-) strand; PAM type: YTN; PAM sequence: TTT
cttcaaatttcatttaatta

SEQ ID NO: 55161 - DNA, 20 bp, Artificial Sequence
  Description of Artificial Sequence: Synthetic oligonucleotide
  Target: SCNA; (-) strand; PAM type: YTN; PAM sequence: CTT
tcttcaaatttcatttaatt

SEQ ID NO: 55162 - DNA, 20 bp, Artificial Sequence
  Description of Artificial Sequence: Synthetic oligonucleotide
  Target: SCNA; (-) strand; PAM type: YTN; PAM sequence: CTG
ctttcttcaaatttcattta

SEQ ID NO: 55163 - DNA, 20 bp, Artificial Sequence
  Description of Artificial Sequence: Synthetic oligonucleotide
  Target: SCNA; (-) strand; PAM type: YTN; PAM sequence: TTC
tgctttcttcaaatttcatt

SEQ ID NO: 55164 - DNA, 20 bp, Artificial Sequence
  Description of Artificial Sequence: Synthetic oligonucleotide
  Target: SCNA; (-) strand; PAM type: YTN; PAM sequence: TTT
ctgctttcttcaaatttcat

SEQ ID NO: 55165 - DNA, 20 bp, Artificial Sequence
  Description of Artificial Sequence: Synthetic oligonucleotide
  Target: SCNA; (-) strand; PAM type: YTN; PAM sequence: TTT
tctgctttcttcaaatttca

SEQ ID NO: 55166 - DNA, 20 bp, Artificial Sequence
  Description of Artificial Sequence: Synthetic oligonucleotide
  Target: SCNA; (-) strand; PAM type: YTN; PAM sequence: TTG
tgagacattttctgctttct

SEQ ID NO: 55167 - DNA, 20 bp, Artificial Sequence
  Description of Artificial Sequence: Synthetic oligonucleotide
  Target: SCNA; (-) strand; PAM type: YTN; PAM sequence: TTC
cacatagcattgtgagacat

SEQ ID NO: 55168 - DNA, 20 bp, Artificial Sequence
  Description of Artificial Sequence: Synthetic oligonucleotide
  Target: SCNA; (-) strand; PAM type: YTN; PAM sequence: CTT
ccacatagcattgtgagaca

SEQ ID NO: 55169 - DNA, 20 bp, Artificial Sequence
  Description of Artificial Sequence: Synthetic oligonucleotide
  Target: SCNA; (-) strand; PAM type: YTN; PAM sequence: CTA
ataacttccacatagcattg

SEQ ID NO: 55170 - DNA, 20 bp, Artificial Sequence
  Description of Artificial Sequence: Synthetic oligonucleotide
  Target: SCNA; (-) strand; PAM type: YTN; PAM sequence: TTC
taataacttccacatagcat

SEQ ID NO: 55171 - DNA, 20 bp, Artificial Sequence
  Description of Artificial Sequence: Synthetic oligonucleotide
  Target: SCNA; (-) strand; PAM type: YTN; PAM sequence: TTA
ttctaataacttccacatag

SEQ ID NO: 55172 - DNA, 20 bp, Artificial Sequence
  Description of Artificial Sequence: Synthetic oligonucleotide
  Target: SCNA; (-) strand; PAM type: YTN; PAM sequence: CTG
ggaagggggtgttattctaa

SEQ ID NO: 55173 - DNA, 20 bp, Artificial Sequence
  Description of Artificial Sequence: Synthetic oligonucleotide
  Target: SCNA; (-) strand; PAM type: YTN; PAM sequence: TTA
ggaactgggaagggggtgtt

SEQ ID NO: 55174 - DNA, 20 bp, Artificial Sequence
  Description of Artificial Sequence: Synthetic oligonucleotide
  Target: SCNA; (-) strand; PAM type: YTN; PAM sequence: TTA
atgtacataagatatgccag

SEQ ID NO: 55175 - DNA, 20 bp, Artificial Sequence
  Description of Artificial Sequence: Synthetic oligonucleotide
  Target: SCNA; (-) strand; PAM type: YTN; PAM sequence: TTA
tagattaatgtacataagat

SEQ ID NO: 55176 - DNA, 20 bp, Artificial Sequence
  Description of Artificial Sequence: Synthetic oligonucleotide
  Target: SCNA; (-) strand; PAM type: YTN; PAM sequence: TTA
attatagattaatgtacata

SEQ ID NO: 55177 - DNA, 20 bp, Artificial Sequence
  Description of Artificial Sequence: Synthetic oligonucleotide
  Target: SCNA; (-) strand; PAM type: YTN; PAM sequence: TTT
aattatagattaatgtacat

SEQ ID NO: 55178 - DNA, 20 bp, Artificial Sequence
  Description of Artificial Sequence: Synthetic oligonucleotide
  Target: SCNA; (-) strand; PAM type: YTN; PAM sequence: TTC
atttaattatagattaatgt

SEQ ID NO: 55179 - DNA, 20 bp, Artificial Sequence
  Description of Artificial Sequence: Synthetic oligonucleotide
  Target: SCNA; (-) strand; PAM type: YTN; PAM sequence: TTT
catttaattatagattaatg

SEQ ID NO: 55180 - DNA, 20 bp, Artificial Sequence
  Description of Artificial Sequence: Synthetic oligonucleotide
  Target: SCNA; (-) strand; PAM type: YTN; PAM sequence: TTA
atgtttcatttaattataga

SEQ ID NO: 55181 - DNA, 20 bp, Artificial Sequence
  Description of Artificial Sequence: Synthetic oligonucleotide
  Target: SCNA; (-) strand; PAM type: YTN; PAM sequence: TTA
ataaagcagttaatgtttca

SEQ ID NO: 55182 - DNA, 20 bp, Artificial Sequence
  Description of Artificial Sequence: Synthetic oligonucleotide
  Target: SCNA; (-) strand; PAM type: YTN; PAM sequence: CTA
aagtagccattaataaagca

SEQ ID NO: 55183 - DNA, 20 bp, Artificial Sequence
  Description of Artificial Sequence: Synthetic oligonucleotide
  Target: SCNA; (-) strand; PAM type: YTN; PAM sequence: TTC
taaagtagccattaataaag

SEQ ID NO: 55184 - DNA, 20 bp, Artificial Sequence
  Description of Artificial Sequence: Synthetic oligonucleotide
  Target: SCNA; (-) strand; PAM type: YTN; PAM sequence: CTT
ctaaagtagccattaataaa

SEQ ID NO: 55185 - DNA, 20 bp, Artificial Sequence
  Description of Artificial Sequence: Synthetic oligonucleotide
  Target: SCNA; (-) strand; PAM type: YTN; PAM sequence: CTC
cttctaaagtagccattaat

SEQ ID NO: 55186 - DNA, 20 bp, Artificial Sequence
  Description of Artificial Sequence: Synthetic oligonucleotide
  Target: SCNA; (-) strand; PAM type: YTN; PAM sequence: TTA
atgaatgcactccttctaaa

SEQ ID NO: 55187 - DNA, 20 bp, Artificial Sequence
  Description of Artificial Sequence: Synthetic oligonucleotide
  Target: SCNA; (-) strand; PAM type: YTN; PAM sequence: CTT
aatgaatgcactccttctaa

SEQ ID NO: 55188 - DNA, 20 bp, Artificial Sequence
  Description of Artificial Sequence: Synthetic oligonucleotide
  Target: SCNA; (-) strand; PAM type: YTN; PAM sequence: TTC
aaaataatccttaatgaatg

SEQ ID NO: 55189 - DNA, 20 bp, Artificial Sequence
  Description of Artificial Sequence: Synthetic oligonucleotide
  Target: SCNA; (-) strand; PAM type: YTN; PAM sequence: TTT
caaaataatccttaatgaat

SEQ ID NO: 55190 - DNA, 20 bp, Artificial Sequence
  Description of Artificial Sequence: Synthetic oligonucleotide
  Target: SCNA; (-) strand; PAM type: YTN; PAM sequence: TTG
tatttcaaaataatccttaa

SEQ ID NO: 55191 - DNA, 20 bp, Artificial Sequence
  Description of Artificial Sequence: Synthetic oligonucleotide
  Target: SCNA; (-) strand; PAM type: YTN; PAM sequence: TTT
gtatttcaaaataatcctta

SEQ ID NO: 55192 - DNA, 20 bp, Artificial Sequence
  Description of Artificial Sequence: Synthetic oligonucleotide
  Target: SCNA; (-) strand; PAM type: YTN; PAM sequence: TTA
tttgtatttcaaaataatcc

SEQ ID NO: 55193 - DNA, 20 bp, Artificial Sequence
  Description of Artificial Sequence: Synthetic oligonucleotide
  Target: SCNA; (-) strand; PAM type: YTN; PAM sequence: TTA
tggggaaattatttgtattt

SEQ ID NO: 55194 - DNA, 20 bp, Artificial Sequence
  Description of Artificial Sequence: Synthetic oligonucleotide
  Target: SCNA; (-) strand; PAM type: YTN; PAM sequence: TTT
atggggaaattatttgtatt

SEQ ID NO: 55195 - DNA, 20 bp, Artificial Sequence
  Description of Artificial Sequence: Synthetic oligonucleotide
  Target: SCNA; (-) strand; PAM type: YTN; PAM sequence: CTC
agaatccaaatatgtgaatg

SEQ ID NO: 55196 - DNA, 20 bp, Artificial Sequence
  Description of Artificial Sequence: Synthetic oligonucleotide
  Target: SCNA; (-) strand; PAM type: YTN; PAM sequence: TTG
ggtaaaactcagaatccaaa

SEQ ID NO: 55197 - DNA, 20 bp, Artificial Sequence
  Description of Artificial Sequence: Synthetic oligonucleotide
  Target: SCNA; (-) strand; PAM type: YTN; PAM sequence: CTT
gggtaaaactcagaatccaa

SEQ ID NO: 55198 - DNA, 20 bp, Artificial Sequence
  Description of Artificial Sequence: Synthetic oligonucleotide
  Target: SCNA; (-) strand; PAM type: YTN; PAM sequence: TTG
tgtgccacttgggtaaaact

SEQ ID NO: 55199 - DNA, 20 bp, Artificial Sequence
  Description of Artificial Sequence: Synthetic oligonucleotide
  Target: SCNA; (-) strand; PAM type: YTN; PAM sequence: TTA
tggttgtgtgccacttgggt

SEQ ID NO: 55200 - DNA, 20 bp, Artificial Sequence
  Description of Artificial Sequence: Synthetic oligonucleotide
  Target: SCNA; (-) strand; PAM type: YTN; PAM sequence: CTA
caaattatggttgtgtgcca

SEQ ID NO: 55201 - DNA, 20 bp, Artificial Sequence
  Description of Artificial Sequence: Synthetic oligonucleotide
  Target: SCNA; (-) strand; PAM type: YTN; PAM sequence: CTG
tcctacaaattatggttgtg

SEQ ID NO: 55202 - DNA, 20 bp, Artificial Sequence
  Description of Artificial Sequence: Synthetic oligonucleotide
  Target: SCNA; (-) strand; PAM type: YTN; PAM sequence: TTC
acctgtcctacaaattatgg

SEQ ID NO: 55203 - DNA, 20 bp, Artificial Sequence
  Description of Artificial Sequence: Synthetic oligonucleotide
  Target: SCNA; (-) strand; PAM type: YTN; PAM sequence: TTT
cacctgtcctacaaattatg

SEQ ID NO: 55204 - DNA, 20 bp, Artificial Sequence
  Description of Artificial Sequence: Synthetic oligonucleotide
  Target: SCNA; (-) strand; PAM type: YTN; PAM sequence: TTA
tttcacctgtcctacaaatt

SEQ ID NO: 55205 - DNA, 20 bp, Artificial Sequence
  Description of Artificial Sequence: Synthetic oligonucleotide
  Target: SCNA; (-) strand; PAM type: YTN; PAM sequence: TTT
atttcacctgtcctacaaat

SEQ ID NO: 55206 - DNA, 20 bp, Artificial Sequence
  Description of Artificial Sequence: Synthetic oligonucleotide
  Target: SCNA; (-) strand; PAM type: YTN; PAM sequence: CTT
tatttcacctgtcctacaaa

SEQ ID NO: 55207 - DNA, 20 bp, Artificial Sequence
  Description of Artificial Sequence: Synthetic oligonucleotide
  Target: SCNA; (-) strand; PAM type: YTN; PAM sequence: CTA
gatacagtaccagaatagta

SEQ ID NO: 55208 - DNA, 20 bp, Artificial Sequence
  Description of Artificial Sequence: Synthetic oligonucleotide
  Target: SCNA; (-) strand; PAM type: YTN; PAM sequence: CTC
agtctagatacagtaccaga

SEQ ID NO: 55209 - DNA, 20 bp, Artificial Sequence
  Description of Artificial Sequence: Synthetic oligonucleotide
  Target: SCNA; (-) strand; PAM type: YTN; PAM sequence: TTA
aaaatatgtaaagctcagtc

SEQ ID NO: 55210 - DNA, 20 bp, Artificial Sequence
  Description of Artificial Sequence: Synthetic oligonucleotide
  Target: SCNA; (-) strand; PAM type: YTN; PAM sequence: CTA
ttaaaaatatgtaaagctca

SEQ ID NO: 55211 - DNA, 20 bp, Artificial Sequence
  Description of Artificial Sequence: Synthetic oligonucleotide
  Target: SCNA; (-) strand; PAM type: YTN; PAM sequence: CTC
aaaaaaaaaaaaaaaaagct

SEQ ID NO: 55212 - DNA, 20 bp, Artificial Sequence
  Description of Artificial Sequence: Synthetic oligonucleotide
  Target: SCNA; (-) strand; PAM type: YTN; PAM sequence: CTG
tctcaaaaaaaaaaaaaaaa

SEQ ID NO: 55213 - DNA, 20 bp, Artificial Sequence
  Description of Artificial Sequence: Synthetic oligonucleotide
  Target: SCNA; (-) strand; PAM type: YTN; PAM sequence: CTC
tgtctcaaaaaaaaaaaaaa

SEQ ID NO: 55214 - DNA, 20 bp, Artificial Sequence
  Description of Artificial Sequence: Synthetic oligonucleotide
  Target: SCNA; (-) strand; PAM type: YTN; PAM sequence: CTG
ggtgacagagcaaggctctg

SEQ ID NO: 55215 - DNA, 20 bp, Artificial Sequence
  Description of Artificial Sequence: Synthetic oligonucleotide
  Target: SCNA; (-) strand; PAM type: YTN; PAM sequence: CTC
cagcctgggtgacagagcaa

SEQ ID NO: 55216 - DNA, 20 bp, Artificial Sequence
  Description of Artificial Sequence: Synthetic oligonucleotide
  Target: SCNA; (-) strand; PAM type: YTN; PAM sequence: CTG
cactccagcctgggtgacag

SEQ ID NO: 55217 - DNA, 20 bp, Artificial Sequence
  Description of Artificial Sequence: Synthetic oligonucleotide
  Target: SCNA; (-) strand; PAM type: YTN; PAM sequence: TTA
cgccactgcactccagcctg

SEQ ID NO: 55218 - DNA, 20 bp, Artificial Sequence
  Description of Artificial Sequence: Synthetic oligonucleotide
  Target: SCNA; (-) strand; PAM type: YTN; PAM sequence: TTG
cagtagggtgagattacgcc

SEQ ID NO: 55219 - DNA, 20 bp, Artificial Sequence
  Description of Artificial Sequence: Synthetic oligonucleotide
  Target: SCNA; (-) strand; PAM type: YTN; PAM sequence: CTC
agaaggtggaggttgcagta

SEQ ID NO: 55220 - DNA, 20 bp, Artificial Sequence
  Description of Artificial Sequence: Synthetic oligonucleotide
  Target: SCNA; (-) strand; PAM type: YTN; PAM sequence: CTG
aactcagaaggtggaggttg

SEQ ID NO: 55221 - DNA, 20 bp, Artificial Sequence
  Description of Artificial Sequence: Synthetic oligonucleotide
  Target: SCNA; (-) strand; PAM type: YTN; PAM sequence: CTG
aggcatgagaatcgcctgaa

SEQ ID NO: 55222 - DNA, 20 bp, Artificial Sequence
  Description of Artificial Sequence: Synthetic oligonucleotide
  Target: SCNA; (-) strand; PAM type: YTN; PAM sequence: CTC
gggagactgaggcatgagaa

SEQ ID NO: 55223 - DNA, 20 bp, Artificial Sequence
  Description of Artificial Sequence: Synthetic oligonucleotide
  Target: SCNA; (-) strand; PAM type: YTN; PAM sequence: CTA
ctcgggagactgaggcatga

SEQ ID NO: 55224 - DNA, 20 bp, Artificial Sequence
  Description of Artificial Sequence: Synthetic oligonucleotide
  Target: SCNA; (-) strand; PAM type: YTN; PAM sequence: TTG
taatcacaactactcgggag

SEQ ID NO: 55225 - DNA, 20 bp, Artificial Sequence
  Description of Artificial Sequence: Synthetic oligonucleotide
  Target: SCNA; (-) strand; PAM type: YTN; PAM sequence: CTT
gtaatcacaactactcggga

SEQ ID NO: 55226 - DNA, 20 bp, Artificial Sequence
  Description of Artificial Sequence: Synthetic oligonucleotide
  Target: SCNA; (-) strand; PAM type: YTN; PAM sequence: CTC
atgcttgtaatcacaactac

SEQ ID NO: 55227 - DNA, 20 bp, Artificial Sequence
  Description of Artificial Sequence: Synthetic oligonucleotide
  Target: SCNA; (-) strand; PAM type: YTN; PAM sequence: TTG
ctcatgcttgtaatcacaac

SEQ ID NO: 55228 - DNA, 20 bp, Artificial Sequence
  Description of Artificial Sequence: Synthetic oligonucleotide
  Target: SCNA; (-) strand; PAM type: YTN; PAM sequence: CTA
aaaatacaaaaaaaaaaaaa

SEQ ID NO: 55229 - DNA, 20 bp, Artificial Sequence
  Description of Artificial Sequence: Synthetic oligonucleotide
  Target: SCNA; (-) strand; PAM type: YTN; PAM sequence: CTA
ctaaaaatacaaaaaaaaaa

SEQ ID NO: 55230 - DNA, 20 bp, Artificial Sequence
  Description of Artificial Sequence: Synthetic oligonucleotide
  Target: SCNA; (-) strand; PAM type: YTN; PAM sequence: CTC
tactaaaaatacaaaaaaaa

SEQ ID NO: 55231 - DNA, 20 bp, Artificial Sequence
  Description of Artificial Sequence: Synthetic oligonucleotide
  Target: SCNA; (-) strand; PAM type: YTN; PAM sequence: CTG
tctctactaaaaatacaaaa

SEQ ID NO: 55232 - DNA, 20 bp, Artificial Sequence
  Description of Artificial Sequence: Synthetic oligonucleotide
  Target: SCNA; (-) strand; PAM type: YTN; PAM sequence: CTG
gccaacatggtgaaatcctg

SEQ ID NO: 55233 - DNA, 20 bp, Artificial Sequence
  Description of Artificial Sequence: Synthetic oligonucleotide
  Target: SCNA; (-) strand; PAM type: YTN; PAM sequence: TTC
gagaccagcctggccaacat

SEQ ID NO: 55234 - DNA, 20 bp, Artificial Sequence
  Description of Artificial Sequence: Synthetic oligonucleotide
  Target: SCNA; (-) strand; PAM type: YTN; PAM sequence: TTG
aggccaggagttcgagacca

SEQ ID NO: 55235 - DNA, 20 bp, Artificial Sequence
  Description of Artificial Sequence: Synthetic oligonucleotide
  Target: SCNA; (-) strand; PAM type: YTN; PAM sequence: CTT
gaggccaggagttcgagacc

SEQ ID NO: 55236 - DNA, 20 bp, Artificial Sequence
  Description of Artificial Sequence: Synthetic oligonucleotide
  Target: SCNA; (-) strand; PAM type: YTN; PAM sequence: CTC
agatcacttgaggccaggag

SEQ ID NO: 55237 - DNA, 20 bp, Artificial Sequence
  Description of Artificial Sequence: Synthetic oligonucleotide
  Target: SCNA; (-) strand; PAM type: YTN; PAM sequence: TTG
ggaagtcaagaccctcagat

SEQ ID NO: 55238 - DNA, 20 bp, Artificial Sequence
  Description of Artificial Sequence: Synthetic oligonucleotide
  Target: SCNA; (-) strand; PAM type: YTN; PAM sequence: TTT
gggaagtcaagaccctcaga

SEQ ID NO: 55239 - DNA, 20 bp, Artificial Sequence
  Description of Artificial Sequence: Synthetic oligonucleotide
  Target: SCNA; (-) strand; PAM type: YTN; PAM sequence: CTT
tgggaagtcaagaccctcag

SEQ ID NO: 55240 - DNA, 20 bp, Artificial Sequence
  Description of Artificial Sequence: Synthetic oligonucleotide
  Target: SCNA; (-) strand; PAM type: YTN; PAM sequence: CTC
agcactttgggaagtcaaga

SEQ ID NO: 55241 - DNA, 20 bp, Artificial Sequence
  Description of Artificial Sequence: Synthetic oligonucleotide
  Target: SCNA; (-) strand; PAM type: YTN; PAM sequence: TTA
taccagtaatctcagcactt

SEQ ID NO: 55242 - DNA, 20 bp, Artificial Sequence
  Description of Artificial Sequence: Synthetic oligonucleotide
  Target: SCNA; (-) strand; PAM type: YTN; PAM sequence: CTT
ataccagtaatctcagcact

SEQ ID NO: 55243 - DNA, 20 bp, Artificial Sequence
  Description of Artificial Sequence: Synthetic oligonucleotide
  Target: SCNA; (-) strand; PAM type: YTN; PAM sequence: TTG
gtcaggtgtgatggcttata

SEQ ID NO: 55244 - DNA, 20 bp, Artificial Sequence
  Description of Artificial Sequence: Synthetic oligonucleotide
  Target: SCNA; (-) strand; PAM type: YTN; PAM sequence: CTA
ttggtcaggtgtgatggctt

SEQ ID NO: 55245 - DNA, 20 bp, Artificial Sequence
  Description of Artificial Sequence: Synthetic oligonucleotide
  Target: SCNA; (-) strand; PAM type: YTN; PAM sequence: TTC
aaaaatacaagctattggtc

SEQ ID NO: 55246 - DNA, 20 bp, Artificial Sequence
  Description of Artificial Sequence: Synthetic oligonucleotide
  Target: SCNA; (-) strand; PAM type: YTN; PAM sequence: TTT
caaaaatacaagctattggt

SEQ ID NO: 55247 - DNA, 20 bp, Artificial Sequence
  Description of Artificial Sequence: Synthetic oligonucleotide
  Target: SCNA; (-) strand; PAM type: YTN; PAM sequence: CTT
tcaaaaatacaagctattgg

SEQ ID NO: 55248 - DNA, 20 bp, Artificial Sequence
  Description of Artificial Sequence: Synthetic oligonucleotide
  Target: SCNA; (-) strand; PAM type: YTN; PAM sequence: TTC
tttcaaaaatacaagctatt

SEQ ID NO: 55249 - DNA, 20 bp, Artificial Sequence
  Description of Artificial Sequence: Synthetic oligonucleotide
  Target: SCNA; (-) strand; PAM type: YTN; PAM sequence: CTT
ctttcaaaaatacaagctat

SEQ ID NO: 55250 - DNA, 20 bp, Artificial Sequence
  Description of Artificial Sequence: Synthetic oligonucleotide
  Target: SCNA; (-) strand; PAM type: YTN; PAM sequence: CTA
aaacttctttcaaaaataca

SEQ ID NO: 55251 - DNA, 20 bp, Artificial Sequence
  Description of Artificial Sequence: Synthetic oligonucleotide
  Target: SCNA; (-) strand; PAM type: YTN; PAM sequence: TTC
cacaaacctaaaacttcttt

SEQ ID NO: 55252 - DNA, 20 bp, Artificial Sequence
  Description of Artificial Sequence: Synthetic oligonucleotide
  Target: SCNA; (-) strand; PAM type: YTN; PAM sequence: TTA
ttccacaaacctaaaacttc

SEQ ID NO: 55253 - DNA, 20 bp, Artificial Sequence
  Description of Artificial Sequence: Synthetic oligonucleotide
  Target: SCNA; (-) strand; PAM type: YTN; PAM sequence: CTC
agtacaattattccacaaac

SEQ ID NO: 55254 - DNA, 20 bp, Artificial Sequence
  Description of Artificial Sequence: Synthetic oligonucleotide
  Target: SCNA; (-) strand; PAM type: YTN; PAM sequence: CTG
taatctcagtacaattattc

SEQ ID NO: 55255 - DNA, 20 bp, Artificial Sequence
  Description of Artificial Sequence: Synthetic oligonucleotide
  Target: SCNA; (-) strand; PAM type: YTN; PAM sequence: TTG
ggggaagggtaatggagtat

SEQ ID NO: 55256 - DNA, 20 bp, Artificial Sequence
  Description of Artificial Sequence: Synthetic oligonucleotide
  Target: SCNA; (-) strand; PAM type: YTN; PAM sequence: TTA
taataataggggaattgggg

SEQ ID NO: 55257 - DNA, 20 bp, Artificial Sequence
  Description of Artificial Sequence: Synthetic oligonucleotide
  Target: SCNA; (-) strand; PAM type: YTN; PAM sequence: CTA
atgcaaaattataataatag

SEQ ID NO: 55258 - DNA, 20 bp, Artificial Sequence
  Description of Artificial Sequence: Synthetic oligonucleotide
  Target: SCNA; (-) strand; PAM type: YTN; PAM sequence: TTA
ataatgtaccacactaatgc

SEQ ID NO: 55259 - DNA, 20 bp, Artificial Sequence
  Description of Artificial Sequence: Synthetic oligonucleotide
  Target: SCNA; (-) strand; PAM type: YTN; PAM sequence: TTT
aataatgtaccacactaatg

SEQ ID NO: 55260 - DNA, 20 bp, Artificial Sequence
  Description of Artificial Sequence: Synthetic oligonucleotide
  Target: SCNA; (-) strand; PAM type: YTN; PAM sequence: TTT
taataatgtaccacactaat

SEQ ID NO: 55261 - DNA, 20 bp, Artificial Sequence
  Description of Artificial Sequence: Synthetic oligonucleotide
  Target: SCNA; (-) strand; PAM type: YTN; PAM sequence: TTC
ataagttttaataatgtacc

SEQ ID NO: 55262 - DNA, 20 bp, Artificial Sequence
  Description of Artificial Sequence: Synthetic oligonucleotide
  Target: SCNA; (-) strand; PAM type: YTN; PAM sequence: TTT
cataagttttaataatgtac

SEQ ID NO: 55263 - DNA, 20 bp, Artificial Sequence
  Description of Artificial Sequence: Synthetic oligonucleotide
  Target: SCNA; (-) strand; PAM type: YTN; PAM sequence: TTA
tttcataagttttaataatg

SEQ ID NO: 55264 - DNA, 20 bp, Artificial Sequence
  Description of Artificial Sequence: Synthetic oligonucleotide
  Target: SCNA; (-) strand; PAM type: YTN; PAM sequence: TTG
taataaggtatcaatgttat

SEQ ID NO: 55265 - DNA, 20 bp, Artificial Sequence
  Description of Artificial Sequence: Synthetic oligonucleotide
  Target: SCNA; (-) strand; PAM type: YTN; PAM sequence: TTA
gttgtaataaggtatcaatg

SEQ ID NO: 55266 - DNA, 20 bp, Artificial Sequence
  Description of Artificial Sequence: Synthetic oligonucleotide
  Target: SCNA; (-) strand; PAM type: YTN; PAM sequence: TTT
agttgtaataaggtatcaat

SEQ ID NO: 55267 - DNA, 20 bp, Artificial Sequence
  Description of Artificial Sequence: Synthetic oligonucleotide
  Target: SCNA; (-) strand; PAM type: YTN; PAM sequence: CTT
tagttgtaataaggtatcaa

SEQ ID NO: 55268 - DNA, 20 bp, Artificial Sequence
  Description of Artificial Sequence: Synthetic oligonucleotide
  Target: SCNA; (-) strand; PAM type: YTN; PAM sequence: CTA
tggactttagttgtaataag

SEQ ID NO: 55269 - DNA, 20 bp, Artificial Sequence
  Description of Artificial Sequence: Synthetic oligonucleotide
  Target: SCNA; (-) strand; PAM type: YTN; PAM sequence: CTA
atataaactatggactttag

SEQ ID NO: 55270 - DNA, 20 bp, Artificial Sequence
  Description of Artificial Sequence: Synthetic oligonucleotide
  Target: SCNA; (-) strand; PAM type: YTN; PAM sequence: TTC
taatataaactatggacttt

SEQ ID NO: 55271 - DNA, 20 bp, Artificial Sequence
  Description of Artificial Sequence: Synthetic oligonucleotide
  Target: SCNA; (-) strand; PAM type: YTN; PAM sequence: TTA
caatacagagtgaattctaa

SEQ ID NO: 55272 - DNA, 20 bp, Artificial Sequence
  Description of Artificial Sequence: Synthetic oligonucleotide
  Target: SCNA; (-) strand; PAM type: YTN; PAM sequence: TTT
acaatacagagtgaattcta

SEQ ID NO: 55273 - DNA, 20 bp, Artificial Sequence
  Description of Artificial Sequence: Synthetic oligonucleotide
  Target: SCNA; (-) strand; PAM type: YTN; PAM sequence: TTT
tacaatacagagtgaattct

SEQ ID NO: 55274 - DNA, 20 bp, Artificial Sequence
  Description of Artificial Sequence: Synthetic oligonucleotide
  Target: SCNA; (-) strand; PAM type: YTN; PAM sequence: CTC
agaattttacaatacagagt

SEQ ID NO: 55275 - DNA, 20 bp, Artificial Sequence
  Description of Artificial Sequence: Synthetic oligonucleotide
  Target: SCNA; (-) strand; PAM type: YTN; PAM sequence: TTA
aaactcagaattttacaata

SEQ ID NO: 55276 - DNA, 20 bp, Artificial Sequence
  Description of Artificial Sequence: Synthetic oligonucleotide
  Target: SCNA; (-) strand; PAM type: YTN; PAM sequence: TTG
ttaaaactcagaattttaca

SEQ ID NO: 55277 - DNA, 20 bp, Artificial Sequence
  Description of Artificial Sequence: Synthetic oligonucleotide
  Target: SCNA; (-) strand; PAM type: YTN; PAM sequence: TTT
gttaaaactcagaattttac

SEQ ID NO: 55278 - DNA, 20 bp, Artificial Sequence
  Description of Artificial Sequence: Synthetic oligonucleotide
  Target: SCNA; (-) strand; PAM type: YTN; PAM sequence: CTT
tgttaaaactcagaatttta

SEQ ID NO: 55279 - DNA, 20 bp, Artificial Sequence
  Description of Artificial Sequence: Synthetic oligonucleotide
  Target: SCNA; (-) strand; PAM type: YTN; PAM sequence: TTA
tacctttgttaaaactcaga

SEQ ID NO: 55280 - DNA, 20 bp, Artificial Sequence
  Description of Artificial Sequence: Synthetic oligonucleotide
  Target: SCNA; (-) strand; PAM type: YTN; PAM sequence: CTT
atacctttgttaaaactcag

SEQ ID NO: 55281 - DNA, 20 bp, Artificial Sequence
  Description of Artificial Sequence: Synthetic oligonucleotide
  Target: SCNA; (-) strand; PAM type: YTN; PAM sequence: CTG
tcatggtggatacatgacct

SEQ ID NO: 55282 - DNA, 20 bp, Artificial Sequence
  Description of Artificial Sequence: Synthetic oligonucleotide
  Target: SCNA; (-) strand; PAM type: YTN; PAM sequence: CTA
tgatactgtcatggtggata

SEQ ID NO: 55283 - DNA, 20 bp, Artificial Sequence
  Description of Artificial Sequence: Synthetic oligonucleotide
  Target: SCNA; (-) strand; PAM type: YTN; PAM sequence: CTC
tatgatactgtcatggtgga

SEQ ID NO: 55284 - DNA, 20 bp, Artificial Sequence
  Description of Artificial Sequence: Synthetic oligonucleotide
  Target: SCNA; (-) strand; PAM type: YTN; PAM sequence: TTC
tctatgatactgtcatggtg

SEQ ID NO: 55285 - DNA, 20 bp, Artificial Sequence
  Description of Artificial Sequence: Synthetic oligonucleotide
  Target: SCNA; (-) strand; PAM type: YTN; PAM sequence: CTA
ttctctatgatactgtcatg

SEQ ID NO: 55286 - DNA, 20 bp, Artificial Sequence
  Description of Artificial Sequence: Synthetic oligonucleotide
  Target: SCNA; (-) strand; PAM type: YTN; PAM sequence: TTA
ggacagtgaaactattctct

SEQ ID NO: 55287 - DNA, 20 bp, Artificial Sequence
  Description of Artificial Sequence: Synthetic oligonucleotide
  Target: SCNA; (-) strand; PAM type: YTN; PAM sequence: TTT
aggacagtgaaactattctc

SEQ ID NO: 55288 - DNA, 20 bp, Artificial Sequence
  Description of Artificial Sequence: Synthetic oligonucleotide
  Target: SCNA; (-) strand; PAM type: YTN; PAM sequence: CTG
agaaagtgcagagggatgaa

SEQ ID NO: 55289 - DNA, 20 bp, Artificial Sequence
  Description of Artificial Sequence: Synthetic oligonucleotide
  Target: SCNA; (-) strand; PAM type: YTN; PAM sequence: CTC
tgagaaagtgcagagggatg

SEQ ID NO: 55290 - DNA, 20 bp, Artificial Sequence
  Description of Artificial Sequence: Synthetic oligonucleotide
  Target: SCNA; (-) strand; PAM type: YTN; PAM sequence: CTG
gggctctgagaaagtgcaga

SEQ ID NO: 55291 - DNA, 20 bp, Artificial Sequence
  Description of Artificial Sequence: Synthetic oligonucleotide
  Target: SCNA; (-) strand; PAM type: YTN; PAM sequence: TTG
cctggggctctgagaaagtg

SEQ ID NO: 55292 - DNA, 20 bp, Artificial Sequence
  Description of Artificial Sequence: Synthetic oligonucleotide
  Target: SCNA; (-) strand; PAM type: YTN; PAM sequence: CTG
gagacagtaaaaagatcagt

SEQ ID NO: 55293 - DNA, 20 bp, Artificial Sequence
  Description of Artificial Sequence: Synthetic oligonucleotide
  Target: SCNA; (-) strand; PAM type: YTN; PAM sequence: TTC
tggagacagtaaaaagatca

SEQ ID NO: 55294 - DNA, 20 bp, Artificial Sequence
  Description of Artificial Sequence: Synthetic oligonucleotide
  Target: SCNA; (-) strand; PAM type: YTN; PAM sequence: CTG
aaagagacaaaattctggag

SEQ ID NO: 55295 - DNA, 20 bp, Artificial Sequence
  Description of Artificial Sequence: Synthetic oligonucleotide
  Target: SCNA; (-) strand; PAM type: YTN; PAM sequence: TTC
tgaaagagacaaaattctgg

SEQ ID NO: 55296 - DNA, 20 bp, Artificial Sequence
  Description of Artificial Sequence: Synthetic oligonucleotide
  Target: SCNA; (-) strand; PAM type: YTN; PAM sequence: TTC
caatatatgacattctgaaa

SEQ ID NO: 55297 - DNA, 20 bp, Artificial Sequence
  Description of Artificial Sequence: Synthetic oligonucleotide
  Target: SCNA; (-) strand; PAM type: YTN; PAM sequence: CTA
tatgattccaatatatgaca

SEQ ID NO: 55298 - DNA, 20 bp, Artificial Sequence
  Description of Artificial Sequence: Synthetic oligonucleotide
  Target: SCNA; (-) strand; PAM type: YTN; PAM sequence: TTC
tatatgattccaatatatga

SEQ ID NO: 55299 - DNA, 20 bp, Artificial Sequence
  Description of Artificial Sequence: Synthetic oligonucleotide
  Target: SCNA; (-) strand; PAM type: YTN; PAM sequence: TTG
cattctatatgattccaata

SEQ ID NO: 55300 - DNA, 20 bp, Artificial Sequence
  Description of Artificial Sequence: Synthetic oligonucleotide
  Target: SCNA; (-) strand; PAM type: YTN; PAM sequence: TTG
aaaggttgcattctatatga

SEQ ID NO: 55301 - DNA, 20 bp, Artificial Sequence
  Description of Artificial Sequence: Synthetic oligonucleotide
  Target: SCNA; (-) strand; PAM type: YTN; PAM sequence: TTT
gaaaggttgcattctatatg

SEQ ID NO: 55302 - DNA, 20 bp, Artificial Sequence
  Description of Artificial Sequence: Synthetic oligonucleotide
  Target: SCNA; (-) strand; PAM type: YTN; PAM sequence: TTA
ggtacgtaagccagtttgaa

SEQ ID NO: 55303 - DNA, 20 bp, Artificial Sequence
  Description of Artificial Sequence: Synthetic oligonucleotide
  Target: SCNA; (-) strand; PAM type: YTN; PAM sequence: CTT
aggtacgtaagccagtttga

SEQ ID NO: 55304 - DNA, 20 bp, Artificial Sequence
  Description of Artificial Sequence: Synthetic oligonucleotide
  Target: SCNA; (-) strand; PAM type: YTN; PAM sequence: CTA
tcaagccacaaaaacacatg

SEQ ID NO: 55305 - DNA, 20 bp, Artificial Sequence
  Description of Artificial Sequence: Synthetic oligonucleotide
  Target: SCNA; (-) strand; PAM type: YTN; PAM sequence: TTC
agtgataaaaagaaatgagc

SEQ ID NO: 55306 - DNA, 20 bp, Artificial Sequence
  Description of Artificial Sequence: Synthetic oligonucleotide
  Target: SCNA; (-) strand; PAM type: YTN; PAM sequence: TTA
ttcagtgataaaaagaaatg

SEQ ID NO: 55307 - DNA, 20 bp, Artificial Sequence
  Description of Artificial Sequence: Synthetic oligonucleotide
  Target: SCNA; (-) strand; PAM type: YTN; PAM sequence: CTC
aatggaatattattcagtga

SEQ ID NO: 55308 - DNA, 20 bp, Artificial Sequence
  Description of Artificial Sequence: Synthetic oligonucleotide
  Target: SCNA; (-) strand; PAM type: YTN; PAM sequence: CTG
gcacatgtactcaatggaat

SEQ ID NO: 55309 - DNA, 20 bp, Artificial Sequence
  Description of Artificial Sequence: Synthetic oligonucleotide
  Target: SCNA; (-) strand; PAM type: YTN; PAM sequence: CTC
aataggtgaatgaacaaaaa

SEQ ID NO: 55310 - DNA, 20 bp, Artificial Sequence
  Description of Artificial Sequence: Synthetic oligonucleotide
  Target: SCNA; (-) strand; PAM type: YTN; PAM sequence: TTC
ctcaataggtgaatgaacaa

SEQ ID NO: 55311 - DNA, 20 bp, Artificial Sequence
  Description of Artificial Sequence: Synthetic oligonucleotide
  Target: SCNA; (-) strand; PAM type: YTN; PAM sequence: TTG
gaagcaaccaagatgttcct

SEQ ID NO: 55312 - DNA, 20 bp, Artificial Sequence
  Description of Artificial Sequence: Synthetic oligonucleotide
  Target: SCNA; (-) strand; PAM type: YTN; PAM sequence: CTT
ggaagcaaccaagatgttcc

SEQ ID NO: 55313 - DNA, 20 bp, Artificial Sequence
  Description of Artificial Sequence: Synthetic oligonucleotide
  Target: SCNA; (-) strand; PAM type: YTN; PAM sequence: TTG
ccaaaacttggaagcaacca

SEQ ID NO: 55314 - DNA, 20 bp, Artificial Sequence
  Description of Artificial Sequence: Synthetic oligonucleotide
  Target: SCNA; (-) strand; PAM type: YTN; PAM sequence: TTC
ataattgccaaaacttggaa

SEQ ID NO: 55315 - DNA, 20 bp, Artificial Sequence
  Description of Artificial Sequence: Synthetic oligonucleotide
  Target: SCNA; (-) strand; PAM type: YTN; PAM sequence: TTA
ttcataattgccaaaacttg

SEQ ID NO: 55316 - DNA, 20 bp, Artificial Sequence
  Description of Artificial Sequence: Synthetic oligonucleotide
  Target: SCNA; (-) strand; PAM type: YTN; PAM sequence: TTT
attcataattgccaaaactt

SEQ ID NO: 55317 - DNA, 20 bp, Artificial Sequence
  Description of Artificial Sequence: Synthetic oligonucleotide
  Target: SCNA; (-) strand; PAM type: YTN; PAM sequence: CTT
tattcataattgccaaaact

SEQ ID NO: 55318 - DNA, 20 bp, Artificial Sequence
  Description of Artificial Sequence: Synthetic oligonucleotide
  Target: SCNA; (-) strand; PAM type: YTN; PAM sequence: TTA
tagcagctttattcataatt

SEQ ID NO: 55319 - DNA, 20 bp, Artificial Sequence
  Description of Artificial Sequence: Synthetic oligonucleotide
  Target: SCNA; (-) strand; PAM type: YTN; PAM sequence: TTT
atagcagctttattcataat

SEQ ID NO: 55320 - DNA, 20 bp, Artificial Sequence
  Description of Artificial Sequence: Synthetic oligonucleotide
  Target: SCNA; (-) strand; PAM type: YTN; PAM sequence: CTG
cacatgcacgtttatagcag

SEQ ID NO: 55321 - DNA, 20 bp, Artificial Sequence
  Description of Artificial Sequence: Synthetic oligonucleotide
  Target: SCNA; (-) strand; PAM type: YTN; PAM sequence: CTG
tgtccacaccaaaacctgca

SEQ ID NO: 55322 - DNA, 20 bp, Artificial Sequence
  Description of Artificial Sequence: Synthetic oligonucleotide
  Target: SCNA; (-) strand; PAM type: YTN; PAM sequence: TTC
acccaaaggaaatgtaaact

SEQ ID NO: 55323 - DNA, 20 bp, Artificial Sequence
  Description of Artificial Sequence: Synthetic oligonucleotide
  Target: SCNA; (-) strand; PAM type: YTN; PAM sequence: CTA
catgatattcacccaaagga

SEQ ID NO: 55324 - DNA, 20 bp, Artificial Sequence
  Description of Artificial Sequence: Synthetic oligonucleotide
  Target: SCNA; (-) strand; PAM type: YTN; PAM sequence: CTA
accatatcaccatatgatcc

SEQ ID NO: 55325 - DNA, 20 bp, Artificial Sequence
  Description of Artificial Sequence: Synthetic oligonucleotide
  Target: SCNA; (-) strand; PAM type: YTN; PAM sequence: TTG
ggtggggacacaaagcctaa

SEQ ID NO: 55326 - DNA, 20 bp, Artificial Sequence
  Description of Artificial Sequence: Synthetic oligonucleotide
  Target: SCNA; (-) strand; PAM type: YTN; PAM sequence: TTT
gggtggggacacaaagccta

SEQ ID NO: 55327 - DNA, 20 bp, Artificial Sequence
  Description of Artificial Sequence: Synthetic oligonucleotide
  Target: SCNA; (-) strand; PAM type: YTN; PAM sequence: TTC
aagatgagatttgggtgggg

SEQ ID NO: 55328 - DNA, 20 bp, Artificial Sequence
  Description of Artificial Sequence: Synthetic oligonucleotide
  Target: SCNA; (-) strand; PAM type: YTN; PAM sequence: TTA
taattcaagatgagatttgg

SEQ ID NO: 55329 - DNA, 20 bp, Artificial Sequence
  Description of Artificial Sequence: Synthetic oligonucleotide
  Target: SCNA; (-) strand; PAM type: YTN; PAM sequence: TTA
tggggattataattcaagat

SEQ ID NO: 55330 - DNA, 20 bp, Artificial Sequence
  Description of Artificial Sequence: Synthetic oligonucleotide
  Target: SCNA; (-) strand; PAM type: YTN; PAM sequence: TTG
acatgtggggattatgggga

SEQ ID NO: 55331 - DNA, 20 bp, Artificial Sequence
  Description of Artificial Sequence: Synthetic oligonucleotide
  Target: SCNA; (-) strand; PAM type: YTN; PAM sequence: CTT
gacatgtggggattatgggg

SEQ ID NO: 55332 - DNA, 20 bp, Artificial Sequence
  Description of Artificial Sequence: Synthetic oligonucleotide
  Target: SCNA; (-) strand; PAM type: YTN; PAM sequence: CTC
ccttgacatgtggggattat

SEQ ID NO: 55333 - DNA, 20 bp, Artificial Sequence
  Description of Artificial Sequence: Synthetic oligonucleotide
  Target: SCNA; (-) strand; PAM type: YTN; PAM sequence: CTC
tcccttgacatgtggggatt

SEQ ID NO: 55334 - DNA, 20 bp, Artificial Sequence
  Description of Artificial Sequence: Synthetic oligonucleotide
  Target: SCNA; (-) strand; PAM type: YTN; PAM sequence: CTG
gtctctcccttgacatgtgg

SEQ ID NO: 55335 - DNA, 20 bp, Artificial Sequence
  Description of Artificial Sequence: Synthetic oligonucleotide
  Target: SCNA; (-) strand; PAM type: YTN; PAM sequence: CTC
cacctggtctctcccttgac

SEQ ID NO: 55336 - DNA, 20 bp, Artificial Sequence
  Description of Artificial Sequence: Synthetic oligonucleotide
  Target: SCNA; (-) strand; PAM type: YTN; PAM sequence: TTA
cctccacctggtctctccct

SEQ ID NO: 55337 - DNA, 20 bp, Artificial Sequence
  Description of Artificial Sequence: Synthetic oligonucleotide
  Target: SCNA; (-) strand; PAM type: YTN; PAM sequence: CTA
gttacctccacctggtctct

SEQ ID NO: 55338 - DNA, 20 bp, Artificial Sequence
  Description of Artificial Sequence: Synthetic oligonucleotide
  Target: SCNA; (-) strand; PAM type: YTN; PAM sequence: CTC
atgatctagttacctccacc

SEQ ID NO: 55339 - DNA, 20 bp, Artificial Sequence
  Description of Artificial Sequence: Synthetic oligonucleotide
  Target: SCNA; (-) strand; PAM type: YTN; PAM sequence: CTC
tcatgatctagttacctcca

SEQ ID NO: 55340 - DNA, 20 bp, Artificial Sequence
  Description of Artificial Sequence: Synthetic oligonucleotide
  Target: SCNA; (-) strand; PAM type: YTN; PAM sequence: CTA
tcatgagaacagcatggggg

SEQ ID NO: 55341 - DNA, 20 bp, Artificial Sequence
  Description of Artificial Sequence: Synthetic oligonucleotide
  Target: SCNA; (-) strand; PAM type: YTN; PAM sequence: CTC
gctatcatgagaacagcatg

SEQ ID NO: 55342 - DNA, 20 bp, Artificial Sequence
  Description of Artificial Sequence: Synthetic oligonucleotide
  Target: SCNA; (-) strand; PAM type: YTN; PAM sequence: CTC
actcgctatcatgagaacag

SEQ ID NO: 55343 - DNA, 20 bp, Artificial Sequence
  Description of Artificial Sequence: Synthetic oligonucleotide
  Target: SCNA; (-) strand; PAM type: YTN; PAM sequence: CTC
gtgagaactcactcgctatc

SEQ ID NO: 55344 - DNA, 20 bp, Artificial Sequence
  Description of Artificial Sequence: Synthetic oligonucleotide
  Target: SCNA; (-) strand; PAM type: YTN; PAM sequence: CTC
tcgtgagaactcactcgcta

SEQ ID NO: 55345 - DNA, 20 bp, Artificial Sequence
  Description of Artificial Sequence: Synthetic oligonucleotide
  Target: SCNA; (-) strand; PAM type: YTN; PAM sequence: TTA
gctctcgtgagaactcactc

SEQ ID NO: 55346 - DNA, 20 bp, Artificial Sequence
  Description of Artificial Sequence: Synthetic oligonucleotide
  Target: SCNA; (-) strand; PAM type: YTN; PAM sequence: CTA
ccaaacacataaaaccatta

SEQ ID NO: 55347 - DNA, 20 bp, Artificial Sequence
  Description of Artificial Sequence: Synthetic oligonucleotide
  Target: SCNA; (-) strand; PAM type: YTN; PAM sequence: TTC
acaaggtgacaggaaggaga

SEQ ID NO: 55348 - DNA, 20 bp, Artificial Sequence
  Description of Artificial Sequence: Synthetic oligonucleotide
  Target: SCNA; (-) strand; PAM type: YTN; PAM sequence: CTT
cacaaggtgacaggaaggag

SEQ ID NO: 55349 - DNA, 20 bp, Artificial Sequence
  Description of Artificial Sequence: Synthetic oligonucleotide
  Target: SCNA; (-) strand; PAM type: YTN; PAM sequence: CTA
cttcacaaggtgacaggaag

SEQ ID NO: 55350 - DNA, 20 bp, Artificial Sequence
  Description of Artificial Sequence: Synthetic oligonucleotide
  Target: SCNA; (-) strand; PAM type: YTN; PAM sequence: TTA
taatcatggtggaaggagaa

SEQ ID NO: 55351 - DNA, 20 bp, Artificial Sequence
  Description of Artificial Sequence: Synthetic oligonucleotide
  Target: SCNA; (-) strand; PAM type: YTN; PAM sequence: CTT
ataatcatggtggaaggaga

SEQ ID NO: 55352 - DNA, 20 bp, Artificial Sequence
  Description of Artificial Sequence: Synthetic oligonucleotide
  Target: SCNA; (-) strand; PAM type: YTN; PAM sequence: CTC
agaaagcttataatcatggt

SEQ ID NO: 55353 - DNA, 20 bp, Artificial Sequence
  Description of Artificial Sequence: Synthetic oligonucleotide
  Target: SCNA; (-) strand; PAM type: YTN; PAM sequence: CTG
aggaggcctcagaaagctta

SEQ ID NO: 55354 - DNA, 20 bp, Artificial Sequence
  Description of Artificial Sequence: Synthetic oligonucleotide
  Target: SCNA; (-) strand; PAM type: YTN; PAM sequence: CTC
agcatggctgaggaggcctc

SEQ ID NO: 55355 - DNA, 20 bp, Artificial Sequence
  Description of Artificial Sequence: Synthetic oligonucleotide
  Target: SCNA; (-) strand; PAM type: YTN; PAM sequence: CTC
acagctcagcatggctgagg

SEQ ID NO: 55356 - DNA, 20 bp, Artificial Sequence
  Description of Artificial Sequence: Synthetic oligonucleotide
  Target: SCNA; (-) strand; PAM type: YTN; PAM sequence: TTG
actcacagctcagcatggct

SEQ ID NO: 55357 - DNA, 20 bp, Artificial Sequence
  Description of Artificial Sequence: Synthetic oligonucleotide
  Target: SCNA; (-) strand; PAM type: YTN; PAM sequence: TTA
attgactcacagctcagcat

SEQ ID NO: 55358 - DNA, 20 bp, Artificial Sequence
  Description of Artificial Sequence: Synthetic oligonucleotide
  Target: SCNA; (-) strand; PAM type: YTN; PAM sequence: TTT
aattgactcacagctcagca

SEQ ID NO: 55359 - DNA, 20 bp, Artificial Sequence
  Description of Artificial Sequence: Synthetic oligonucleotide
  Target: SCNA; (-) strand; PAM type: YTN; PAM sequence: TTA
tttaattgactcacagctca

SEQ ID NO: 55360 - DNA, 20 bp, Artificial Sequence
  Description of Artificial Sequence: Synthetic oligonucleotide
  Target: SCNA; (-) strand; PAM type: YTN; PAM sequence: TTT
atttaattgactcacagctc

SEQ ID NO: 55361 - DNA, 20 bp, Artificial Sequence
  Description of Artificial Sequence: Synthetic oligonucleotide
  Target: SCNA; (-) strand; PAM type: YTN; PAM sequence: TTA
taaaggaaagaggtttattt

SEQ ID NO: 55362 - DNA, 20 bp, Artificial Sequence
  Description of Artificial Sequence: Synthetic oligonucleotide
  Target: SCNA; (-) strand; PAM type: YTN; PAM sequence: TTT
ataaaggaaagaggtttatt

SEQ ID NO: 55363 - DNA, 20 bp, Artificial Sequence
  Description of Artificial Sequence: Synthetic oligonucleotide
  Target: SCNA; (-) strand; PAM type: YTN; PAM sequence: CTG
ggaaatttataaaggaaaga

SEQ ID NO: 55364 - DNA, 20 bp, Artificial Sequence
  Description of Artificial Sequence: Synthetic oligonucleotide
  Target: SCNA; (-) strand; PAM type: YTN; PAM sequence: TTC
ccgagactgggaaatttata

SEQ ID NO: 55365 - DNA, 20 bp, Artificial Sequence
  Description of Artificial Sequence: Synthetic oligonucleotide
  Target: SCNA; (-) strand; PAM type: YTN; PAM sequence: CTA
aaaagaagttcccgagactg

SEQ ID NO: 55366 - DNA, 20 bp, Artificial Sequence
  Description of Artificial Sequence: Synthetic oligonucleotide
  Target: SCNA; (-) strand; PAM type: YTN; PAM sequence: TTC
acagtgctaaaaagaagttc

SEQ ID NO: 55367 - DNA, 20 bp, Artificial Sequence
  Description of Artificial Sequence: Synthetic oligonucleotide
  Target: SCNA; (-) strand; PAM type: YTN; PAM sequence: TTT
cacagtgctaaaaagaagtt

SEQ ID NO: 55368 - DNA, 20 bp, Artificial Sequence
  Description of Artificial Sequence: Synthetic oligonucleotide
  Target: SCNA; (-) strand; PAM type: YTN; PAM sequence: TTT
tcacagtgctaaaaagaagt

SEQ ID NO: 55369 - DNA, 20 bp, Artificial Sequence
  Description of Artificial Sequence: Synthetic oligonucleotide
  Target: SCNA; (-) strand; PAM type: YTN; PAM sequence: TTG
tccattttcacagtgctaaa

SEQ ID NO: 55370 - DNA, 20 bp, Artificial Sequence
  Description of Artificial Sequence: Synthetic oligonucleotide
  Target: SCNA; (-) strand; PAM type: YTN; PAM sequence: TTT
gtccattttcacagtgctaa

SEQ ID NO: 55371 - DNA, 20 bp, Artificial Sequence
  Description of Artificial Sequence: Synthetic oligonucleotide
  Target: SCNA; (-) strand; PAM type: YTN; PAM sequence: TTA
acatatatatttgtccattt

SEQ ID NO: 55372 - DNA, 20 bp, Artificial Sequence
  Description of Artificial Sequence: Synthetic oligonucleotide
  Target: SCNA; (-) strand; PAM type: YTN; PAM sequence: CTT
aacatatatatttgtccatt

SEQ ID NO: 55373 - DNA, 20 bp, Artificial Sequence
  Description of Artificial Sequence: Synthetic oligonucleotide
  Target: SCNA; (-) strand; PAM type: YTN; PAM sequence: CTA
tacttaacatatatatttgt

SEQ ID NO: 55374 - DNA, 20 bp, Artificial Sequence
  Description of Artificial Sequence: Synthetic oligonucleotide
  Target: SCNA; (-) strand; PAM type: YTN; PAM sequence: CTA
aactatacttaacatatata

SEQ ID NO: 55375 - DNA, 20 bp, Artificial Sequence
  Description of Artificial Sequence: Synthetic oligonucleotide
  Target: SCNA; (-) strand; PAM type: YTN; PAM sequence: TTA
cgaagctaaactatacttaa

SEQ ID NO: 55376 - DNA, 20 bp, Artificial Sequence
  Description of Artificial Sequence: Synthetic oligonucleotide
  Target: SCNA; (-) strand; PAM type: YTN; PAM sequence: CTT
acgaagctaaactatactta

SEQ ID NO: 55377 - DNA, 20 bp, Artificial Sequence
  Description of Artificial Sequence: Synthetic oligonucleotide
  Target: SCNA; (-) strand; PAM type: YTN; PAM sequence: TTC
ttacgaagctaaactatact

SEQ ID NO: 55378 - DNA, 20 bp, Artificial Sequence
  Description of Artificial Sequence: Synthetic oligonucleotide
  Target: SCNA; (-) strand; PAM type: YTN; PAM sequence: TTT
cttacgaagctaaactatac

SEQ ID NO: 55379 - DNA, 20 bp, Artificial Sequence
  Description of Artificial Sequence: Synthetic oligonucleotide
  Target: SCNA; (-) strand; PAM type: YTN; PAM sequence: TTG
acaatttcttacgaagctaa

SEQ ID NO: 55380 - DNA, 20 bp, Artificial Sequence
  Description of Artificial Sequence: Synthetic oligonucleotide
  Target: SCNA; (-) strand; PAM type: YTN; PAM sequence: TTG
gaagataggttgacaatttc

SEQ ID NO: 55381 - DNA, 20 bp, Artificial Sequence
  Description of Artificial Sequence: Synthetic oligonucleotide
  Target: SCNA; (-) strand; PAM type: YTN; PAM sequence: TTT
ggaagataggttgacaattt

SEQ ID NO: 55382 - DNA, 20 bp, Artificial Sequence
  Description of Artificial Sequence: Synthetic oligonucleotide
  Target: SCNA; (-) strand; PAM type: YTN; PAM sequence: CTT
tggaagataggttgacaatt

SEQ ID NO: 55383 - DNA, 20 bp, Artificial Sequence
  Description of Artificial Sequence: Synthetic oligonucleotide
  Target: SCNA; (-) strand; PAM type: YTN; PAM sequence: CTG
gcaatacaaaatggtacagt

SEQ ID NO: 55384 - DNA, 20 bp, Artificial Sequence
  Description of Artificial Sequence: Synthetic oligonucleotide
  Target: SCNA; (-) strand; PAM type: YTN; PAM sequence: CTA
atgctggcaatacaaaatgg

SEQ ID NO: 55385 - DNA, 20 bp, Artificial Sequence
  Description of Artificial Sequence: Synthetic oligonucleotide
  Target: SCNA; (-) strand; PAM type: YTN; PAM sequence: TTC
actaatgctggcaatacaaa

SEQ ID NO: 55386 - DNA, 20 bp, Artificial Sequence
  Description of Artificial Sequence: Synthetic oligonucleotide
  Target: SCNA; (-) strand; PAM type: YTN; PAM sequence: TTC
attcactaatgctggcaata

SEQ ID NO: 55387 - DNA, 20 bp, Artificial Sequence
  Description of Artificial Sequence: Synthetic oligonucleotide
  Target: SCNA; (-) strand; PAM type: YTN; PAM sequence: TTC
attcattcactaatgctggc

SEQ ID NO: 55388 - DNA, 20 bp, Artificial Sequence
  Description of Artificial Sequence: Synthetic oligonucleotide
  Target: SCNA; (-) strand; PAM type: YTN; PAM sequence: TTT
cattcattcactaatgctgg

SEQ ID NO: 55389 - DNA, 20 bp, Artificial Sequence
  Description of Artificial Sequence: Synthetic oligonucleotide
  Target: SCNA; (-) strand; PAM type: YTN; PAM sequence: CTT
tcattcattcactaatgctg

SEQ ID NO: 55390 - DNA, 20 bp, Artificial Sequence
  Description of Artificial Sequence: Synthetic oligonucleotide
  Target: SCNA; (-) strand; PAM type: YTN; PAM sequence: CTG
gtgagatgtggagcaacaag

SEQ ID NO: 55391 - DNA, 20 bp, Artificial Sequence
  Description of Artificial Sequence: Synthetic oligonucleotide
  Target: SCNA; (-) strand; PAM type: YTN; PAM sequence: CTA
aaatccaaaacaccaagagc

SEQ ID NO: 55392 - DNA, 20 bp, Artificial Sequence
  Description of Artificial Sequence: Synthetic oligonucleotide
  Target: SCNA; (-) strand; PAM type: YTN; PAM sequence: TTA
aaatgactaaaatccaaaac

SEQ ID NO: 55393 - DNA, 20 bp, Artificial Sequence
  Description of Artificial Sequence: Synthetic oligonucleotide
  Target: SCNA; (-) strand; PAM type: YTN; PAM sequence: TTA
ttaaaatgactaaaatccaa

SEQ ID NO: 55394 - DNA, 20 bp, Artificial Sequence
  Description of Artificial Sequence: Synthetic oligonucleotide
  Target: SCNA; (-) strand; PAM type: YTN; PAM sequence: CTT
attaaaatgactaaaatcca

SEQ ID NO: 55395 - DNA, 20 bp, Artificial Sequence
  Description of Artificial Sequence: Synthetic oligonucleotide
  Target: SCNA; (-) strand; PAM type: YTN; PAM sequence: CTC
acaaaacacttattaaaatg

SEQ ID NO: 55396 - DNA, 20 bp, Artificial Sequence
  Description of Artificial Sequence: Synthetic oligonucleotide
  Target: SCNA; (-) strand; PAM type: YTN; PAM sequence: CTA
tcaaacagtaaagctcacaa

SEQ ID NO: 55397 - DNA, 20 bp, Artificial Sequence
  Description of Artificial Sequence: Synthetic oligonucleotide
  Target: SCNA; (-) strand; PAM type: YTN; PAM sequence: CTC
agctatcaaacagtaaagct

SEQ ID NO: 55398 - DNA, 20 bp, Artificial Sequence
  Description of Artificial Sequence: Synthetic oligonucleotide
  Target: SCNA; (-) strand; PAM type: YTN; PAM sequence: TTG
taactcagctatcaaacagt

SEQ ID NO: 55399 - DNA, 20 bp, Artificial Sequence
  Description of Artificial Sequence: Synthetic oligonucleotide
  Target: SCNA; (-) strand; PAM type: YTN; PAM sequence: TTT
gtaactcagctatcaaacag

SEQ ID NO: 55400 - DNA, 20 bp, Artificial Sequence
  Description of Artificial Sequence: Synthetic oligonucleotide
  Target: SCNA; (-) strand; PAM type: YTN; PAM sequence: TTG
ccagtttgtaactcagctat

SEQ ID NO: 55401 - DNA, 20 bp, Artificial Sequence
  Description of Artificial Sequence: Synthetic oligonucleotide
  Target: SCNA; (-) strand; PAM type: YTN; PAM sequence: CTT
gccagtttgtaactcagcta

SEQ ID NO: 55402 - DNA, 20 bp, Artificial Sequence
  Description of Artificial Sequence: Synthetic oligonucleotide
  Target: SCNA; (-) strand; PAM type: YTN; PAM sequence: TTG
gatacttgccagtttgtaac

SEQ ID NO: 55403 - DNA, 20 bp, Artificial Sequence
  Description of Artificial Sequence: Synthetic oligonucleotide
  Target: SCNA; (-) strand; PAM type: YTN; PAM sequence: CTT
ggatacttgccagtttgtaa

SEQ ID NO: 55404 - DNA, 20 bp, Artificial Sequence
  Description of Artificial Sequence: Synthetic oligonucleotide
  Target: SCNA; (-) strand; PAM type: YTN; PAM sequence: TTG
cttggatacttgccagtttg

SEQ ID NO: 55405 - DNA, 20 bp, Artificial Sequence
  Description of Artificial Sequence: Synthetic oligonucleotide
  Target: SCNA; (-) strand; PAM type: YTN; PAM sequence: TTT
gcttggatacttgccagttt

SEQ ID NO: 55406 - DNA, 20 bp, Artificial Sequence
  Description of Artificial Sequence: Synthetic oligonucleotide
  Target: SCNA; (-) strand; PAM type: YTN; PAM sequence: CTT
tgcttggatacttgccagtt

SEQ ID NO: 55407 - DNA, 20 bp, Artificial Sequence
  Description of Artificial Sequence: Synthetic oligonucleotide
  Target: SCNA; (-) strand; PAM type: YTN; PAM sequence: TTC
tttgcttggatacttgccag

SEQ ID NO: 55408 - DNA, 20 bp, Artificial Sequence
  Description of Artificial Sequence: Synthetic oligonucleotide
  Target: SCNA; (-) strand; PAM type: YTN; PAM sequence: CTG
ttctttgcttggatacttgc

SEQ ID NO: 55409 - DNA, 20 bp, Artificial Sequence
  Description of Artificial Sequence: Synthetic oligonucleotide
  Target: SCNA; (-) strand; PAM type: YTN; PAM sequence: CTC
tgttctttgcttggatactt

SEQ ID NO: 55410 - DNA, 20 bp, Artificial Sequence
  Description of Artificial Sequence: Synthetic oligonucleotide
  Target: SCNA; (-) strand; PAM type: YTN; PAM sequence: TTC
tctgttctttgcttggatac

SEQ ID NO: 55411 - DNA, 20 bp, Artificial Sequence
  Description of Artificial Sequence: Synthetic oligonucleotide
  Target: SCNA; (-) strand; PAM type: YTN; PAM sequence: CTC
cagttctctgttctttgctt

SEQ ID NO: 55412 - DNA, 20 bp, Artificial Sequence
  Description of Artificial Sequence: Synthetic oligonucleotide
  Target: SCNA; (-) strand; PAM type: YTN; PAM sequence: TTC
ggtagaaaagcaaacctcca

SEQ ID NO: 55413 - DNA, 20 bp, Artificial Sequence
  Description of Artificial Sequence: Synthetic oligonucleotide
  Target: SCNA; (-) strand; PAM type: YTN; PAM sequence: CTT
cggtagaaaagcaaacctcc

SEQ ID NO: 55414 - DNA, 20 bp, Artificial Sequence
  Description of Artificial Sequence: Synthetic oligonucleotide
  Target: SCNA; (-) strand; PAM type: YTN; PAM sequence: TTC
cttcggtagaaaagcaaacc

SEQ ID NO: 55415 - DNA, 20 bp, Artificial Sequence
  Description of Artificial Sequence: Synthetic oligonucleotide
  Target: SCNA; (-) strand; PAM type: YTN; PAM sequence: TTT
ccttcggtagaaaagcaaac

SEQ ID NO: 55416 - DNA, 20 bp, Artificial Sequence
  Description of Artificial Sequence: Synthetic oligonucleotide
  Target: SCNA; (-) strand; PAM type: YTN; PAM sequence: CTC
aacatatttccttcggtaga

SEQ ID NO: 55417 - DNA, 20 bp, Artificial Sequence
  Description of Artificial Sequence: Synthetic oligonucleotide
  Target: SCNA; (-) strand; PAM type: YTN; PAM sequence: TTC
tcaacatatttccttcggta

SEQ ID NO: 55418 - DNA, 20 bp, Artificial Sequence
  Description of Artificial Sequence: Synthetic oligonucleotide
  Target: SCNA; (-) strand; PAM type: YTN; PAM sequence: CTG
tattctcaacatatttcctt

SEQ ID NO: 55419 - DNA, 20 bp, Artificial Sequence
  Description of Artificial Sequence: Synthetic oligonucleotide
  Target: SCNA; (-) strand; PAM type: YTN; PAM sequence: TTC
ctgtattctcaacatatttc

SEQ ID NO: 55420 - DNA, 20 bp, Artificial Sequence
  Description of Artificial Sequence: Synthetic oligonucleotide
  Target: SCNA; (-) strand; PAM type: YTN; PAM sequence: TTT
cctgtattctcaacatattt

SEQ ID NO: 55421 - DNA, 20 bp, Artificial Sequence
  Description of Artificial Sequence: Synthetic oligonucleotide
  Target: SCNA; (-) strand; PAM type: YTN; PAM sequence: CTT
tcctgtattctcaacatatt

SEQ ID NO: 55422 - DNA, 20 bp, Artificial Sequence
  Description of Artificial Sequence: Synthetic oligonucleotide
  Target: SCNA; (-) strand; PAM type: YTN; PAM sequence: TTA
gcgtgaaactttcctgtatt

SEQ ID NO: 55423 - DNA, 20 bp, Artificial Sequence
  Description of Artificial Sequence: Synthetic oligonucleotide
  Target: SCNA; (-) strand; PAM type: YTN; PAM sequence: TTT
agcgtgaaactttcctgtat

SEQ ID NO: 55424 - DNA, 20 bp, Artificial Sequence
  Description of Artificial Sequence: Synthetic oligonucleotide
  Target: SCNA; (-) strand; PAM type: YTN; PAM sequence: TTA
catttagcgtgaaactttcc

SEQ ID NO: 55425 - DNA, 20 bp, Artificial Sequence
  Description of Artificial Sequence: Synthetic oligonucleotide
  Target: SCNA; (-) strand; PAM type: YTN; PAM sequence: TTT
acatttagcgtgaaactttc

SEQ ID NO: 55426 - DNA, 20 bp, Artificial Sequence
  Description of Artificial Sequence: Synthetic oligonucleotide
  Target: SCNA; (-) strand; PAM type: YTN; PAM sequence: TTA
tttacatttagcgtgaaact

SEQ ID NO: 55427 - DNA, 20 bp, Artificial Sequence
  Description of Artificial Sequence: Synthetic oligonucleotide
  Target: SCNA; (-) strand; PAM type: YTN; PAM sequence: CTG
taaaaaattatttacattta

SEQ ID NO: 55428 - DNA, 20 bp, Artificial Sequence
  Description of Artificial Sequence: Synthetic oligonucleotide
  Target: SCNA; (-) strand; PAM type: YTN; PAM sequence: TTA
actgtaaaaaattatttaca

SEQ ID NO: 55429 - DNA, 20 bp, Artificial Sequence
  Description of Artificial Sequence: Synthetic oligonucleotide
  Target: SCNA; (-) strand; PAM type: YTN; PAM sequence: TTT
aactgtaaaaaattatttac

SEQ ID NO: 55430 - DNA, 20 bp, Artificial Sequence
  Description of Artificial Sequence: Synthetic oligonucleotide
  Target: SCNA; (-) strand; PAM type: YTN; PAM sequence: TTA
gtttaactgtaaaaaattat

SEQ ID NO: 55431 - DNA, 20 bp, Artificial Sequence
  Description of Artificial Sequence: Synthetic oligonucleotide
  Target: SCNA; (-) strand; PAM type: YTN; PAM sequence: TTA
ttagtttaactgtaaaaaat

SEQ ID NO: 55432 - DNA, 20 bp, Artificial Sequence
  Description of Artificial Sequence: Synthetic oligonucleotide
  Target: SCNA; (-) strand; PAM type: YTN; PAM sequence: CTC
attattagtttaactgtaaa

SEQ ID NO: 55433 - DNA, 20 bp, Artificial Sequence
  Description of Artificial Sequence: Synthetic oligonucleotide
  Target: SCNA; (-) strand; PAM type: YTN; PAM sequence: TTC
aatcactcattattagttta

SEQ ID NO: 55434 - DNA, 20 bp, Artificial Sequence
  Description of Artificial Sequence: Synthetic oligonucleotide
  Target: SCNA; (-) strand; PAM type: YTN; PAM sequence: TTT
caatcactcattattagttt

SEQ ID NO: 55435 - DNA, 20 bp, Artificial Sequence
  Description of Artificial Sequence: Synthetic oligonucleotide
  Target: SCNA; (-) strand; PAM type: YTN; PAM sequence: TTT
tcaatcactcattattagtt

SEQ ID NO: 55436 - DNA, 20 bp, Artificial Sequence
  Description of Artificial Sequence: Synthetic oligonucleotide
  Target: SCNA; (-) strand; PAM type: YTN; PAM sequence: TTT
ttcaatcactcattattagt

SEQ ID NO: 55437 - DNA, 20 bp, Artificial Sequence
  Description of Artificial Sequence: Synthetic oligonucleotide
  Target: SCNA; (-) strand; PAM type: YTN; PAM sequence: TTT
tttcaatcactcattattag

SEQ ID NO: 55438 - DNA, 20 bp, Artificial Sequence
  Description of Artificial Sequence: Synthetic oligonucleotide
  Target: SCNA; (-) strand; PAM type: YTN; PAM sequence: CTT
ttttcaatcactcattatta

SEQ ID NO: 55439 - DNA, 20 bp, Artificial Sequence
  Description of Artificial Sequence: Synthetic oligonucleotide
  Target: SCNA; (-) strand; PAM type: YTN; PAM sequence: TTG
tatgtcacaagtcaactttt

SEQ ID NO: 55440 - DNA, 20 bp, Artificial Sequence
  Description of Artificial Sequence: Synthetic oligonucleotide
  Target: SCNA; (-) strand; PAM type: YTN; PAM sequence: TTT
gtatgtcacaagtcaacttt

SEQ ID NO: 55441 - DNA, 20 bp, Artificial Sequence
  Description of Artificial Sequence: Synthetic oligonucleotide
  Target: SCNA; (-) strand; PAM type: YTN; PAM sequence: TTG
tatcatttgtatgtcacaag

SEQ ID NO: 55442 - DNA, 20 bp, Artificial Sequence
  Description of Artificial Sequence: Synthetic oligonucleotide
  Target: SCNA; (-) strand; PAM type: YTN; PAM sequence: TTT
gtatcatttgtatgtcacaa

SEQ ID NO: 55443 - DNA, 20 bp, Artificial Sequence
  Description of Artificial Sequence: Synthetic oligonucleotide
  Target: SCNA; (-) strand; PAM type: YTN; PAM sequence: TTA
atacccatgaaagagaggac

SEQ ID NO: 55444 - DNA, 20 bp, Artificial Sequence
  Description of Artificial Sequence: Synthetic oligonucleotide
  Target: SCNA; (-) strand; PAM type: YTN; PAM sequence: TTA
tcaaatgaaatattaatacc

SEQ ID NO: 55445 - DNA, 20 bp, Artificial Sequence
  Description of Artificial Sequence: Synthetic oligonucleotide
  Target: SCNA; (-) strand; PAM type: YTN; PAM sequence: TTT
atcaaatgaaatattaatac

SEQ ID NO: 55446 - DNA, 20 bp, Artificial Sequence
  Description of Artificial Sequence: Synthetic oligonucleotide
  Target: SCNA; (-) strand; PAM type: YTN; PAM sequence: CTT
tatcaaatgaaatattaata

SEQ ID NO: 55447 - DNA, 20 bp, Artificial Sequence
  Description of Artificial Sequence: Synthetic oligonucleotide
  Target: SCNA; (-) strand; PAM type: YTN; PAM sequence: TTA
aatctttatcaaatgaaata

SEQ ID NO: 55448 - DNA, 20 bp, Artificial Sequence
  Description of Artificial Sequence: Synthetic oligonucleotide
  Target: SCNA; (-) strand; PAM type: YTN; PAM sequence: CTT
aaatctttatcaaatgaaat

SEQ ID NO: 55449 - DNA, 20 bp, Artificial Sequence
  Description of Artificial Sequence: Synthetic oligonucleotide
  Target: SCNA; (-) strand; PAM type: YTN; PAM sequence: TTA
gtacttaaatctttatcaaa

SEQ ID NO: 55450 - DNA, 20 bp, Artificial Sequence
  Description of Artificial Sequence: Synthetic oligonucleotide
  Target: SCNA; (-) strand; PAM type: YTN; PAM sequence: CTG
atagtcattagtacttaaat

SEQ ID NO: 55451 - DNA, 20 bp, Artificial Sequence
  Description of Artificial Sequence: Synthetic oligonucleotide
  Target: SCNA; (-) strand; PAM type: YTN; PAM sequence: CTA
gcaatcaacagatactgata

SEQ ID NO: 55452 - DNA, 20 bp, Artificial Sequence
  Description of Artificial Sequence: Synthetic oligonucleotide
  Target: SCNA; (-) strand; PAM type: YTN; PAM sequence: TTG
ctagcaatcaacagatactg

SEQ ID NO: 55453 - DNA, 20 bp, Artificial Sequence
  Description of Artificial Sequence: Synthetic oligonucleotide
  Target: SCNA; (-) strand; PAM type: YTN; PAM sequence: CTC
aaaattgctagcaatcaaca

SEQ ID NO: 55454 - DNA, 20 bp, Artificial Sequence
  Description of Artificial Sequence: Synthetic oligonucleotide
  Target: SCNA; (-) strand; PAM type: YTN; PAM sequence: CTA
ctcaaaattgctagcaatca

SEQ ID NO: 55455 - DNA, 20 bp, Artificial Sequence
  Description of Artificial Sequence: Synthetic oligonucleotide
  Target: SCNA; (-) strand; PAM type: YTN; PAM sequence: TTC
tactcaaaattgctagcaat

SEQ ID NO: 55456 - DNA, 20 bp, Artificial Sequence
  Description of Artificial Sequence: Synthetic oligonucleotide
  Target: SCNA; (-) strand; PAM type: YTN; PAM sequence: TTC
atacatatcagaaaaagtgt

SEQ ID NO: 55457 - DNA, 20 bp, Artificial Sequence
  Description of Artificial Sequence: Synthetic oligonucleotide
  Target: SCNA; (-) strand; PAM type: YTN; PAM sequence: CTA
tatattcatacatatcagaa

SEQ ID NO: 55458 - DNA, 20 bp, Artificial Sequence
  Description of Artificial Sequence: Synthetic oligonucleotide
  Target: SCNA; (-) strand; PAM type: YTN; PAM sequence: TTG
tctatatattcatacatatc

SEQ ID NO: 55459 - DNA, 20 bp, Artificial Sequence
  Description of Artificial Sequence: Synthetic oligonucleotide
  Target: SCNA; (-) strand; PAM type: YTN; PAM sequence: CTT
gtctatatattcatacatat

SEQ ID NO: 55460 - DNA, 20 bp, Artificial Sequence
  Description of Artificial Sequence: Synthetic oligonucleotide
  Target: SCNA; (-) strand; PAM type: YTN; PAM sequence: TTC
ttgtctatatattcatacat

SEQ ID NO: 55461 - DNA, 20 bp, Artificial Sequence
  Description of Artificial Sequence: Synthetic oligonucleotide
  Target: SCNA; (-) strand; PAM type: YTN; PAM sequence: TTA
cacaatccaggtgtatcata

SEQ ID NO: 55462 - DNA, 20 bp, Artificial Sequence
  Description of Artificial Sequence: Synthetic oligonucleotide
  Target: SCNA; (-) strand; PAM type: YTN; PAM sequence: CTA
ttacacaatccaggtgtatc

SEQ ID NO: 55463 - DNA, 20 bp, Artificial Sequence
  Description of Artificial Sequence: Synthetic oligonucleotide
  Target: SCNA; (-) strand; PAM type: YTN; PAM sequence: CTG
catcataaaggctattacac

SEQ ID NO: 55464 - DNA, 20 bp, Artificial Sequence
  Description of Artificial Sequence: Synthetic oligonucleotide
  Target: SCNA; (-) strand; PAM type: YTN; PAM sequence: TTA
ctgcatcataaaggctatta

SEQ ID NO: 55465 - DNA, 20 bp, Artificial Sequence
  Description of Artificial Sequence: Synthetic oligonucleotide
  Target: SCNA; (-) strand; PAM type: YTN; PAM sequence: CTT
actgcatcataaaggctatt

SEQ ID NO: 55466 - DNA, 20 bp, Artificial Sequence
  Description of Artificial Sequence: Synthetic oligonucleotide
  Target: SCNA; (-) strand; PAM type: YTN; PAM sequence: TTG
ccttactgcatcataaaggc

SEQ ID NO: 55467 - DNA, 20 bp, Artificial Sequence
  Description of Artificial Sequence: Synthetic oligonucleotide
  Target: SCNA; (-) strand; PAM type: YTN; PAM sequence: TTC
agtggttgccttactgcatc

SEQ ID NO: 55468 - DNA, 20 bp, Artificial Sequence
  Description of Artificial Sequence: Synthetic oligonucleotide
  Target: SCNA; (-) strand; PAM type: YTN; PAM sequence: TTC
caagttcagtggttgcctta

SEQ ID NO: 55469 - DNA, 20 bp, Artificial Sequence
  Description of Artificial Sequence: Synthetic oligonucleotide
  Target: SCNA; (-) strand; PAM type: YTN; PAM sequence: CTG
attccaagttcagtggttgc

SEQ ID NO: 55470 - DNA, 20 bp, Artificial Sequence
  Description of Artificial Sequence: Synthetic oligonucleotide
  Target: SCNA; (-) strand; PAM type: YTN; PAM sequence: TTC
actgattccaagttcagtgg

SEQ ID NO: 55471 - DNA, 20 bp, Artificial Sequence
  Description of Artificial Sequence: Synthetic oligonucleotide
  Target: SCNA; (-) strand; PAM type: YTN; PAM sequence: TTG
taattcactgattccaagtt

SEQ ID NO: 55472 - DNA, 20 bp, Artificial Sequence
  Description of Artificial Sequence: Synthetic oligonucleotide
  Target: SCNA; (-) strand; PAM type: YTN; PAM sequence: CTA
gtgagggacccagaagaaac

SEQ ID NO: 55473 - DNA, 20 bp, Artificial Sequence
  Description of Artificial Sequence: Synthetic oligonucleotide
  Target: SCNA; (-) strand; PAM type: YTN; PAM sequence: CTC
acagaagtcaaatagaccaa

SEQ ID NO: 55474 - DNA, 20 bp, Artificial Sequence
  Description of Artificial Sequence: Synthetic oligonucleotide
  Target: SCNA; (-) strand; PAM type: YTN; PAM sequence: TTG
aggctcacagaagtcaaata

SEQ ID NO: 55475 - DNA, 20 bp, Artificial Sequence
  Description of Artificial Sequence: Synthetic oligonucleotide
  Target: SCNA; (-) strand; PAM type: YTN; PAM sequence: TTT
gaggctcacagaagtcaaat

SEQ ID NO: 55476 - DNA, 20 bp, Artificial Sequence
  Description of Artificial Sequence: Synthetic oligonucleotide
  Target: SCNA; (-) strand; PAM type: YTN; PAM sequence: TTT
tgaggctcacagaagtcaaa

SEQ ID NO: 55477 - DNA, 20 bp, Artificial Sequence
  Description of Artificial Sequence: Synthetic oligonucleotide
  Target: SCNA; (-) strand; PAM type: YTN; PAM sequence: CTT
ttgaggctcacagaagtcaa

SEQ ID NO: 55478 - DNA, 20 bp, Artificial Sequence
  Description of Artificial Sequence: Synthetic oligonucleotide
  Target: SCNA; (-) strand; PAM type: YTN; PAM sequence: TTA
caaatgcacttttgaggctc

SEQ ID NO: 55479 - DNA, 20 bp, Artificial Sequence
  Description of Artificial Sequence: Synthetic oligonucleotide
  Target: SCNA; (-) strand; PAM type: YTN; PAM sequence: TTT
acaaatgcacttttgaggct

SEQ ID NO: 55480 - DNA, 20 bp, Artificial Sequence
  Description of Artificial Sequence: Synthetic oligonucleotide
  Target: SCNA; (-) strand; PAM type: YTN; PAM sequence: TTT
tacaaatgcacttttgaggc

SEQ ID NO: 55481 - DNA, 20 bp, Artificial Sequence
  Description of Artificial Sequence: Synthetic oligonucleotide
  Target: SCNA; (-) strand; PAM type: YTN; PAM sequence: TTC
cattttacaaatgcactttt

SEQ ID NO: 55482 - DNA, 20 bp, Artificial Sequence
  Description of Artificial Sequence: Synthetic oligonucleotide
  Target: SCNA; (-) strand; PAM type: YTN; PAM sequence: TTT
ccattttacaaatgcacttt

SEQ ID NO: 55483 - DNA, 20 bp, Artificial Sequence
  Description of Artificial Sequence: Synthetic oligonucleotide
  Target: SCNA; (-) strand; PAM type: YTN; PAM sequence: TTA
atttccattttacaaatgca

SEQ ID NO: 55484 - DNA, 20 bp, Artificial Sequence
  Description of Artificial Sequence: Synthetic oligonucleotide
  Target: SCNA; (-) strand; PAM type: YTN; PAM sequence: TTT
aatttccattttacaaatgc

SEQ ID NO: 55485 - DNA, 20 bp, Artificial Sequence
  Description of Artificial Sequence: Synthetic oligonucleotide
  Target: SCNA; (-) strand; PAM type: YTN; PAM sequence: TTC
acagtaagatgggcagaaaa

SEQ ID NO: 55486 - DNA, 20 bp, Artificial Sequence
  Description of Artificial Sequence: Synthetic oligonucleotide
  Target: SCNA; (-) strand; PAM type: YTN; PAM sequence: CTT
cacagtaagatgggcagaaa

SEQ ID NO: 55487 - DNA, 20 bp, Artificial Sequence
  Description of Artificial Sequence: Synthetic oligonucleotide
  Target: SCNA; (-) strand; PAM type: YTN; PAM sequence: TTA
caacagcttcacagtaagat

SEQ ID NO: 55488 - DNA, 20 bp, Artificial Sequence
  Description of Artificial Sequence: Synthetic oligonucleotide
  Target: SCNA; (-) strand; PAM type: YTN; PAM sequence: TTA
ttacaacagcttcacagtaa

SEQ ID NO: 55489 - DNA, 20 bp, Artificial Sequence
  Description of Artificial Sequence: Synthetic oligonucleotide
  Target: SCNA; (-) strand; PAM type: YTN; PAM sequence: TTA
ttattacaacagcttcacag

SEQ ID NO: 55490 - DNA, 20 bp, Artificial Sequence
  Description of Artificial Sequence: Synthetic oligonucleotide
  Target: SCNA; (-) strand; PAM type: YTN; PAM sequence: TTG
tcaatattattattacaaca

SEQ ID NO: 55491 - DNA, 20 bp, Artificial Sequence
  Description of Artificial Sequence: Synthetic oligonucleotide
  Target: SCNA; (-) strand; PAM type: YTN; PAM sequence: CTA
ttgtcaatattattattaca

SEQ ID NO: 55492 - DNA, 20 bp, Artificial Sequence
  Description of Artificial Sequence: Synthetic oligonucleotide
  Target: SCNA; (-) strand; PAM type: YTN; PAM sequence: TTG
ctattgtcaatattattatt

SEQ ID NO: 55493 - DNA, 20 bp, Artificial Sequence
  Description of Artificial Sequence: Synthetic oligonucleotide
  Target: SCNA; (-) strand; PAM type: YTN; PAM sequence: TTA
ttgctattgtcaatattatt

SEQ ID NO: 55494 - DNA, 20 bp, Artificial Sequence
  Description of Artificial Sequence: Synthetic oligonucleotide
  Target: SCNA; (-) strand; PAM type: YTN; PAM sequence: TTA
gtataattattgctattgtc

SEQ ID NO: 55495 - DNA, 20 bp, Artificial Sequence
  Description of Artificial Sequence: Synthetic oligonucleotide
  Target: SCNA; (-) strand; PAM type: YTN; PAM sequence: TTA
ttagtataattattgctatt

SEQ ID NO: 55496 - DNA, 20 bp, Artificial Sequence
  Description of Artificial Sequence: Synthetic oligonucleotide
  Target: SCNA; (-) strand; PAM type: YTN; PAM sequence: TTT
attagtataattattgctat

SEQ ID NO: 55497 - DNA, 20 bp, Artificial Sequence
  Description of Artificial Sequence: Synthetic oligonucleotide
  Target: SCNA; (-) strand; PAM type: YTN; PAM sequence: TTT
tattagtataattattgcta

SEQ ID NO: 55498 - DNA, 20 bp, Artificial Sequence
  Description of Artificial Sequence: Synthetic oligonucleotide
  Target: SCNA; (-) strand; PAM type: YTN; PAM sequence: TTT
ttattagtataattattgct

SEQ ID NO: 55499 - DNA, 20 bp, Artificial Sequence
  Description of Artificial Sequence: Synthetic oligonucleotide
  Target: SCNA; (-) strand; PAM type: YTN; PAM sequence: CTT
tttattagtataattattgc

SEQ ID NO: 55500 - DNA, 20 bp, Artificial Sequence
  Description of Artificial Sequence: Synthetic oligonucleotide
  Target: SCNA; (-) strand; PAM type: YTN; PAM sequence: TTG
ctttttattagtataattat

SEQ ID NO: 55501 - DNA, 20 bp, Artificial Sequence
  Description of Artificial Sequence: Synthetic oligonucleotide
  Target: SCNA; (-) strand; PAM type: YTN; PAM sequence: TTC
aaatacacagtaaattgctt

SEQ ID NO: 55502 - DNA, 20 bp, Artificial Sequence
  Description of Artificial Sequence: Synthetic oligonucleotide
  Target: SCNA; (-) strand; PAM type: YTN; PAM sequence: TTT
caaatacacagtaaattgct

SEQ ID NO: 55503 - DNA, 20 bp, Artificial Sequence
  Description of Artificial Sequence: Synthetic oligonucleotide
  Target: SCNA; (-) strand; PAM type: YTN; PAM sequence: TTG
cataatttcaaatacacagt

SEQ ID NO: 55504 - DNA, 20 bp, Artificial Sequence
  Description of Artificial Sequence: Synthetic oligonucleotide
  Target: SCNA; (-) strand; PAM type: YTN; PAM sequence: TTT
gcataatttcaaatacacag

SEQ ID NO: 55505 - DNA, 20 bp, Artificial Sequence
  Description of Artificial Sequence: Synthetic oligonucleotide
  Target: SCNA; (-) strand; PAM type: YTN; PAM sequence: TTG
tttgcataatttcaaataca

SEQ ID NO: 55506 - DNA, 20 bp, Artificial Sequence
  Description of Artificial Sequence: Synthetic oligonucleotide
  Target: SCNA; (-) strand; PAM type: YTN; PAM sequence: TTC
aaattgtttgcataatttca

SEQ ID NO: 55507 - DNA, 20 bp, Artificial Sequence
  Description of Artificial Sequence: Synthetic oligonucleotide
  Target: SCNA; (-) strand; PAM type: YTN; PAM sequence: TTT
caaattgtttgcataatttc

SEQ ID NO: 55508 - DNA, 20 bp, Artificial Sequence
  Description of Artificial Sequence: Synthetic oligonucleotide
  Target: SCNA; (-) strand; PAM type: YTN; PAM sequence: TTT
tcaaattgtttgcataattt

SEQ ID NO: 55509 - DNA, 20 bp, Artificial Sequence
  Description of Artificial Sequence: Synthetic oligonucleotide
  Target: SCNA; (-) strand; PAM type: YTN; PAM sequence: CTA
tgattttcaaattgtttgca

SEQ ID NO: 55510 - DNA, 20 bp, Artificial Sequence
  Description of Artificial Sequence: Synthetic oligonucleotide
  Target: SCNA; (-) strand; PAM type: YTN; PAM sequence: TTA
tatagtgctatgattttcaa

SEQ ID NO: 55511 - DNA, 20 bp, Artificial Sequence
  Description of Artificial Sequence: Synthetic oligonucleotide
  Target: SCNA; (-) strand; PAM type: YTN; PAM sequence: TTT
atatagtgctatgattttca

SEQ ID NO: 55512 - DNA, 20 bp, Artificial Sequence
  Description of Artificial Sequence: Synthetic oligonucleotide
  Target: SCNA; (-) strand; PAM type: YTN; PAM sequence: TTT
tatatagtgctatgattttc

SEQ ID NO: 55513 - DNA, 20 bp, Artificial Sequence
  Description of Artificial Sequence: Synthetic oligonucleotide
  Target: SCNA; (-) strand; PAM type: YTN; PAM sequence: TTA
cattttatatagtgctatga

SEQ ID NO: 55514 - DNA, 20 bp, Artificial Sequence
  Description of Artificial Sequence: Synthetic oligonucleotide
  Target: SCNA; (-) strand; PAM type: YTN; PAM sequence: CTA
atgtgacgttacattttata

SEQ ID NO: 55515 - DNA, 20 bp, Artificial Sequence
  Description of Artificial Sequence: Synthetic oligonucleotide
  Target: SCNA; (-) strand; PAM type: YTN; PAM sequence: CTC
caacactaatgtgacgttac

SEQ ID NO: 55516 - DNA, 20 bp, Artificial Sequence
  Description of Artificial Sequence: Synthetic oligonucleotide
  Target: SCNA; (-) strand; PAM type: YTN; PAM sequence: TTG
taaactccaacactaatgtg

SEQ ID NO: 55517 - DNA, 20 bp, Artificial Sequence
  Description of Artificial Sequence: Synthetic oligonucleotide
  Target: SCNA; (-) strand; PAM type: YTN; PAM sequence: CTG
ccaaattgtaaactccaaca

SEQ ID NO: 55518 - DNA, 20 bp, Artificial Sequence
  Description of Artificial Sequence: Synthetic oligonucleotide
  Target: SCNA; (-) strand; PAM type: YTN; PAM sequence: TTC
cctgccaaattgtaaactcc

SEQ ID NO: 55519 - DNA, 20 bp, Artificial Sequence
  Description of Artificial Sequence: Synthetic oligonucleotide
  Target: SCNA; (-) strand; PAM type: YTN; PAM sequence: CTT
ccctgccaaattgtaaactc

SEQ ID NO: 55520 - DNA, 20 bp, Artificial Sequence
  Description of Artificial Sequence: Synthetic oligonucleotide
  Target: SCNA; (-) strand; PAM type: YTN; PAM sequence: TTG
tacagcttccctgccaaatt

SEQ ID NO: 55521 - DNA, 20 bp, Artificial Sequence
  Description of Artificial Sequence: Synthetic oligonucleotide
  Target: SCNA; (-) strand; PAM type: YTN; PAM sequence: TTA
gttgtacagcttccctgcca

SEQ ID NO: 55522 - DNA, 20 bp, Artificial Sequence
  Description of Artificial Sequence: Synthetic oligonucleotide
  Target: SCNA; (-) strand; PAM type: YTN; PAM sequence: TTG
tgccgtggttagttgtacag

SEQ ID NO: 55523 - DNA, 20 bp, Artificial Sequence
  Description of Artificial Sequence: Synthetic oligonucleotide
  Target: SCNA; (-) strand; PAM type: YTN; PAM sequence: TTA
tcaaattgtgccgtggttag

SEQ ID NO: 55524 - DNA, 20 bp, Artificial Sequence
  Description of Artificial Sequence: Synthetic oligonucleotide
  Target: SCNA; (-) strand; PAM type: YTN; PAM sequence: CTT
atcaaattgtgccgtggtta

SEQ ID NO: 55525 - DNA, 20 bp, Artificial Sequence
  Description of Artificial Sequence: Synthetic oligonucleotide
  Target: SCNA; (-) strand; PAM type: YTN; PAM sequence: TTG
cttatcaaattgtgccgtgg

SEQ ID NO: 55526 - DNA, 20 bp, Artificial Sequence
  Description of Artificial Sequence: Synthetic oligonucleotide
  Target: SCNA; (-) strand; PAM type: YTN; PAM sequence: TTA
ttgcttatcaaattgtgccg

SEQ ID NO: 55527 - DNA, 20 bp, Artificial Sequence
  Description of Artificial Sequence: Synthetic oligonucleotide
  Target: SCNA; (-) strand; PAM type: YTN; PAM sequence: TTT
attgcttatcaaattgtgcc

SEQ ID NO: 55528 - DNA, 20 bp, Artificial Sequence
  Description of Artificial Sequence: Synthetic oligonucleotide
  Target: SCNA; (-) strand; PAM type: YTN; PAM sequence: CTA
aaggaagtttattgcttatc

SEQ ID NO: 55529 - DNA, 20 bp, Artificial Sequence
  Description of Artificial Sequence: Synthetic oligonucleotide
  Target: SCNA; (-) strand; PAM type: YTN; PAM sequence: CTC
taaaggaagtttattgctta

SEQ ID NO: 55530 - DNA, 20 bp, Artificial Sequence
  Description of Artificial Sequence: Synthetic oligonucleotide
  Target: SCNA; (-) strand; PAM type: YTN; PAM sequence: CTC
cgtatactctaaaggaagtt

SEQ ID NO: 55531 - DNA, 20 bp, Artificial Sequence
  Description of Artificial Sequence: Synthetic oligonucleotide
  Target: SCNA; (-) strand; PAM type: YTN; PAM sequence: TTC
tccgtatactctaaaggaag

SEQ ID NO: 55532 - DNA, 20 bp, Artificial Sequence
  Description of Artificial Sequence: Synthetic oligonucleotide
  Target: SCNA; (-) strand; PAM type: YTN; PAM sequence: TTT
ctccgtatactctaaaggaa

SEQ ID NO: 55533 - DNA, 20 bp, Artificial Sequence
  Description of Artificial Sequence: Synthetic oligonucleotide
  Target: SCNA; (-) strand; PAM type: YTN; PAM sequence: CTC
cccatttctccgtatactct

SEQ ID NO: 55534 - DNA, 20 bp, Artificial Sequence
  Description of Artificial Sequence: Synthetic oligonucleotide
  Target: SCNA; (-) strand; PAM type: YTN; PAM sequence: TTA
taatcctccccatttctccg

SEQ ID NO: 55535 - DNA, 20 bp, Artificial Sequence
  Description of Artificial Sequence: Synthetic oligonucleotide
  Target: SCNA; (-) strand; PAM type: YTN; PAM sequence: TTT
ataatcctccccatttctcc

SEQ ID NO: 55536 - DNA, 20 bp, Artificial Sequence
  Description of Artificial Sequence: Synthetic oligonucleotide
  Target: SCNA; (-) strand; PAM type: YTN; PAM sequence: TTA
atatttataatcctccccat

SEQ ID NO: 55537 - DNA, 20 bp, Artificial Sequence
  Description of Artificial Sequence: Synthetic oligonucleotide
  Target: SCNA; (-) strand; PAM type: YTN; PAM sequence: CTT
aatatttataatcctcccca

SEQ ID NO: 55538 - DNA, 20 bp, Artificial Sequence
  Description of Artificial Sequence: Synthetic oligonucleotide
  Target: SCNA; (-) strand; PAM type: YTN; PAM sequence: CTG
gcacaaaagggcttaatatt

SEQ ID NO: 55539 - DNA, 20 bp, Artificial Sequence
  Description of Artificial Sequence: Synthetic oligonucleotide
  Target: SCNA; (-) strand; PAM type: YTN; PAM sequence: TTG
tggtcccagagcctggcaca

SEQ ID NO: 55540 - DNA, 20 bp, Artificial Sequence
  Description of Artificial Sequence: Synthetic oligonucleotide
  Target: SCNA; (-) strand; PAM type: YTN; PAM sequence: CTG
caaggtgtgatggagatcac

SEQ ID NO: 55541 - DNA, 20 bp, Artificial Sequence
  Description of Artificial Sequence: Synthetic oligonucleotide
  Target: SCNA; (-) strand; PAM type: YTN; PAM sequence: TTA
catctgcaaggtgtgatgga

SEQ ID NO: 55542 - DNA, 20 bp, Artificial Sequence
  Description of Artificial Sequence: Synthetic oligonucleotide
  Target: SCNA; (-) strand; PAM type: YTN; PAM sequence: TTT
acatctgcaaggtgtgatgg

SEQ ID NO: 55543 - DNA, 20 bp, Artificial Sequence
  Description of Artificial Sequence: Synthetic oligonucleotide
  Target: SCNA; (-) strand; PAM type: YTN; PAM sequence: CTG
tataaaataagaataagaaa

SEQ ID NO: 55544 - DNA, 20 bp, Artificial Sequence
  Description of Artificial Sequence: Synthetic oligonucleotide
  Target: SCNA; (-) strand; PAM type: YTN; PAM sequence: TTG
catcatctgtataaaataag

SEQ ID NO: 55545 - DNA, 20 bp, Artificial Sequence
  Description of Artificial Sequence: Synthetic oligonucleotide
  Target: SCNA; (-) strand; PAM type: YTN; PAM sequence: TTC
agttgcatcatctgtataaa

SEQ ID NO: 55546 - DNA, 20 bp, Artificial Sequence
  Description of Artificial Sequence: Synthetic oligonucleotide
  Target: SCNA; (-) strand; PAM type: YTN; PAM sequence: CTT
cagttgcatcatctgtataa

SEQ ID NO: 55547 - DNA, 20 bp, Artificial Sequence
  Description of Artificial Sequence: Synthetic oligonucleotide
  Target: SCNA; (-) strand; PAM type: YTN; PAM sequence: TTC
ttcagttgcatcatctgtat

SEQ ID NO: 55548 - DNA, 20 bp, Artificial Sequence
  Description of Artificial Sequence: Synthetic oligonucleotide
  Target: SCNA; (-) strand; PAM type: YTN; PAM sequence: TTC
gttcttcagttgcatcatct

SEQ ID NO: 55549 - DNA, 20 bp, Artificial Sequence
  Description of Artificial Sequence: Synthetic oligonucleotide
  Target: SCNA; (-) strand; PAM type: YTN; PAM sequence: CTT
cgttcttcagttgcatcatc

SEQ ID NO: 55550 - DNA, 20 bp, Artificial Sequence
  Description of Artificial Sequence: Synthetic oligonucleotide
  Target: SCNA; (-) strand; PAM type: YTN; PAM sequence: TTG
cttcgttcttcagttgcatc

SEQ ID NO: 55551 - DNA, 20 bp, Artificial Sequence
  Description of Artificial Sequence: Synthetic oligonucleotide
  Target: SCNA; (-) strand; PAM type: YTN; PAM sequence: CTT
gcttcgttcttcagttgcat

SEQ ID NO: 55552 - DNA, 20 bp, Artificial Sequence
  Description of Artificial Sequence: Synthetic oligonucleotide
  Target: SCNA; (-) strand; PAM type: YTN; PAM sequence: CTG
tgtgaccatggacaacttgc

SEQ ID NO: 55553 - DNA, 20 bp, Artificial Sequence
  Description of Artificial Sequence: Synthetic oligonucleotide
  Target: SCNA; (-) strand; PAM type: YTN; PAM sequence: TTA
gctgtgtgaccatggacaac

SEQ ID NO: 55554 - DNA, 20 bp, Artificial Sequence
  Description of Artificial Sequence: Synthetic oligonucleotide
  Target: SCNA; (-) strand; PAM type: YTN; PAM sequence: TTA
ttagctgtgtgaccatggac

SEQ ID NO: 55555 - DNA, 20 bp, Artificial Sequence
  Description of Artificial Sequence: Synthetic oligonucleotide
  Target: SCNA; (-) strand; PAM type: YTN; PAM sequence: CTA
tcattattagctgtgtgacc

SEQ ID NO: 55556 - DNA, 20 bp, Artificial Sequence
  Description of Artificial Sequence: Synthetic oligonucleotide
  Target: SCNA; (-) strand; PAM type: YTN; PAM sequence: CTA
tgaggaataggaaaatacta

SEQ ID NO: 55557 - DNA, 20 bp, Artificial Sequence
  Description of Artificial Sequence: Synthetic oligonucleotide
  Target: SCNA; (-) strand; PAM type: YTN; PAM sequence: TTC
tatgaggaataggaaaatac

SEQ ID NO: 55558 - DNA, 20 bp, Artificial Sequence
  Description of Artificial Sequence: Synthetic oligonucleotide
  Target: SCNA; (-) strand; PAM type: YTN; PAM sequence: TTT
ctatgaggaataggaaaata

SEQ ID NO: 55559 - DNA, 20 bp, Artificial Sequence
  Description of Artificial Sequence: Synthetic oligonucleotide
  Target: SCNA; (-) strand; PAM type: YTN; PAM sequence: TTT
tctatgaggaataggaaaat

SEQ ID NO: 55560 - DNA, 20 bp, Artificial Sequence
  Description of Artificial Sequence: Synthetic oligonucleotide
  Target: SCNA; (-) strand; PAM type: YTN; PAM sequence: CTC
cagttttctatgaggaatag

SEQ ID NO: 55561 - DNA, 20 bp, Artificial Sequence
  Description of Artificial Sequence: Synthetic oligonucleotide
  Target: SCNA; (-) strand; PAM type: YTN; PAM sequence: TTA
aggatatataatgtggccgt

SEQ ID NO: 55562 - DNA, 20 bp, Artificial Sequence
  Description of Artificial Sequence: Synthetic oligonucleotide
  Target: SCNA; (-) strand; PAM type: YTN; PAM sequence: CTG
tagttaaggatatataatgt

SEQ ID NO: 55563 - DNA, 20 bp, Artificial Sequence
  Description of Artificial Sequence: Synthetic oligonucleotide
  Target: SCNA; (-) strand; PAM type: YTN; PAM sequence: CTA
gaaatggtccctgtagttaa

SEQ ID NO: 55564 - DNA, 20 bp, Artificial Sequence
  Description of Artificial Sequence: Synthetic oligonucleotide
  Target: SCNA; (-) strand; PAM type: YTN; PAM sequence: TTC
tagaaatggtccctgtagtt

SEQ ID NO: 55565 - DNA, 20 bp, Artificial Sequence
  Description of Artificial Sequence: Synthetic oligonucleotide
  Target: SCNA; (-) strand; PAM type: YTN; PAM sequence: TTT
ctagaaatggtccctgtagt

SEQ ID NO: 55566 - DNA, 20 bp, Artificial Sequence
  Description of Artificial Sequence: Synthetic oligonucleotide
  Target: SCNA; (-) strand; PAM type: YTN; PAM sequence: TTG
atttctagaaatggtccctg

SEQ ID NO: 55567 - DNA, 20 bp, Artificial Sequence
  Description of Artificial Sequence: Synthetic oligonucleotide
  Target: SCNA; (-) strand; PAM type: YTN; PAM sequence: TTT
gatttctagaaatggtccct

SEQ ID NO: 55568 - DNA, 20 bp, Artificial Sequence
  Description of Artificial Sequence: Synthetic oligonucleotide
  Target: SCNA; (-) strand; PAM type: YTN; PAM sequence: CTA
gaaatttgatttctagaaat

SEQ ID NO: 55569 - DNA, 20 bp, Artificial Sequence
  Description of Artificial Sequence: Synthetic oligonucleotide
  Target: SCNA; (-) strand; PAM type: YTN; PAM sequence: TTC
tagaaatttgatttctagaa

SEQ ID NO: 55570 - DNA, 20 bp, Artificial Sequence
  Description of Artificial Sequence: Synthetic oligonucleotide
  Target: SCNA; (-) strand; PAM type: YTN; PAM sequence: TTG
aattctagaaatttgatttc

SEQ ID NO: 55571 - DNA, 20 bp, Artificial Sequence
  Description of Artificial Sequence: Synthetic oligonucleotide
  Target: SCNA; (-) strand; PAM type: YTN; PAM sequence: CTT
gaattctagaaatttgattt

SEQ ID NO: 55572 - DNA, 20 bp, Artificial Sequence
  Description of Artificial Sequence: Synthetic oligonucleotide
  Target: SCNA; (-) strand; PAM type: YTN; PAM sequence: TTG
tatgtggtgtggcttgaatt

SEQ ID NO: 55573 - DNA, 20 bp, Artificial Sequence
  Description of Artificial Sequence: Synthetic oligonucleotide
  Target: SCNA; (-) strand; PAM type: YTN; PAM sequence: CTA
tggggtaatatattgtatgt

SEQ ID NO: 55574 - DNA, 20 bp, Artificial Sequence
  Description of Artificial Sequence: Synthetic oligonucleotide
  Target: SCNA; (-) strand; PAM type: YTN; PAM sequence: TTA
tcaataagctatggggtaat

SEQ ID NO: 55575 - DNA, 20 bp, Artificial Sequence
  Description of Artificial Sequence: Synthetic oligonucleotide
  Target: SCNA; (-) strand; PAM type: YTN; PAM sequence: TTA
gcattatcaataagctatgg

SEQ ID NO: 55576 - DNA, 20 bp, Artificial Sequence
  Description of Artificial Sequence: Synthetic oligonucleotide
  Target: SCNA; (-) strand; PAM type: YTN; PAM sequence: TTT
agcattatcaataagctatg

SEQ ID NO: 55577 - DNA, 20 bp, Artificial Sequence
  Description of Artificial Sequence: Synthetic oligonucleotide
  Target: SCNA; (-) strand; PAM type: YTN; PAM sequence: TTT
tagcattatcaataagctat

SEQ ID NO: 55578 - DNA, 20 bp, Artificial Sequence
  Description of Artificial Sequence: Synthetic oligonucleotide
  Target: SCNA; (-) strand; PAM type: YTN; PAM sequence: CTA
tgcaaagatatcccatattt

SEQ ID NO: 55579 - DNA, 20 bp, Artificial Sequence
  Description of Artificial Sequence: Synthetic oligonucleotide
  Target: SCNA; (-) strand; PAM type: YTN; PAM sequence: CTC
tatgcaaagatatcccatat

SEQ ID NO: 55580 - DNA, 20 bp, Artificial Sequence
  Description of Artificial Sequence: Synthetic oligonucleotide
  Target: SCNA; (-) strand; PAM type: YTN; PAM sequence: TTA
aggatctctatgcaaagata

SEQ ID NO: 55581 - DNA, 20 bp, Artificial Sequence
  Description of Artificial Sequence: Synthetic oligonucleotide
  Target: SCNA; (-) strand; PAM type: YTN; PAM sequence: TTT
aaggatctctatgcaaagat

SEQ ID NO: 55582 - DNA, 20 bp, Artificial Sequence
  Description of Artificial Sequence: Synthetic oligonucleotide
  Target: SCNA; (-) strand; PAM type: YTN; PAM sequence: CTA
gcacaatttaaggatctcta

SEQ ID NO: 55583 - DNA, 20 bp, Artificial Sequence
  Description of Artificial Sequence: Synthetic oligonucleotide
  Target: SCNA; (-) strand; PAM type: YTN; PAM sequence: TTC
tagcacaatttaaggatctc

SEQ ID NO: 55584 - DNA, 20 bp, Artificial Sequence
  Description of Artificial Sequence: Synthetic oligonucleotide
  Target: SCNA; (-) strand; PAM type: YTN; PAM sequence: CTC
atattctagcacaatttaag

SEQ ID NO: 55585 - DNA, 20 bp, Artificial Sequence
  Description of Artificial Sequence: Synthetic oligonucleotide
  Target: SCNA; (-) strand; PAM type: YTN; PAM sequence: CTA
tgcaaaaagatctcatattc

SEQ ID NO: 55586 - DNA, 20 bp, Artificial Sequence
  Description of Artificial Sequence: Synthetic oligonucleotide
  Target: SCNA; (-) strand; PAM type: YTN; PAM sequence: CTC
tatgcaaaaagatctcatat

SEQ ID NO: 55587 - DNA, 20 bp, Artificial Sequence
  Description of Artificial Sequence: Synthetic oligonucleotide
  Target: SCNA; (-) strand; PAM type: YTN; PAM sequence: CTA
tgcgagaggatctctatgca

SEQ ID NO: 55588 - DNA, 20 bp, Artificial Sequence
  Description of Artificial Sequence: Synthetic oligonucleotide
  Target: SCNA; (-) strand; PAM type: YTN; PAM sequence: CTC
tatgcgagaggatctctatg

SEQ ID NO: 55589 - DNA, 20 bp, Artificial Sequence
  Description of Artificial Sequence: Synthetic oligonucleotide
  Target: SCNA; (-) strand; PAM type: YTN; PAM sequence: TTC
tctatgcgagaggatctcta

SEQ ID NO: 55590 - DNA, 20 bp, Artificial Sequence
  Description of Artificial Sequence: Synthetic oligonucleotide
  Target: SCNA; (-) strand; PAM type: YTN; PAM sequence: TTG
agtagcaggaattctctatg

SEQ ID NO: 55591 - DNA, 20 bp, Artificial Sequence
  Description of Artificial Sequence: Synthetic oligonucleotide
  Target: SCNA; (-) strand; PAM type: YTN; PAM sequence: CTT
gagtagcaggaattctctat

SEQ ID NO: 55592 - DNA, 20 bp, Artificial Sequence
  Description of Artificial Sequence: Synthetic oligonucleotide
  Target: SCNA; (-) strand; PAM type: YTN; PAM sequence: TTC
ttgagtagcaggaattctct

SEQ ID NO: 55593 - DNA, 20 bp, Artificial Sequence
  Description of Artificial Sequence: Synthetic oligonucleotide
  Target: SCNA; (-) strand; PAM type: YTN; PAM sequence: TTG
attcttgagtagcaggaatt

SEQ ID NO: 55594 - DNA, 20 bp, Artificial Sequence
  Description of Artificial Sequence: Synthetic oligonucleotide
  Target: SCNA; (-) strand; PAM type: YTN; PAM sequence: CTA
acattgattcttgagtagca

SEQ ID NO: 55595 - DNA, 20 bp, Artificial Sequence
  Description of Artificial Sequence: Synthetic oligonucleotide
  Target: SCNA; (-) strand; PAM type: YTN; PAM sequence: CTG
tgagcacagagtgaatgtct

SEQ ID NO: 55596 - DNA, 20 bp, Artificial Sequence
  Description of Artificial Sequence: Synthetic oligonucleotide
  Target: SCNA; (-) strand; PAM type: YTN; PAM sequence: TTG
acagaagagaaaagaacact

SEQ ID NO: 55597 - DNA, 20 bp, Artificial Sequence
  Description of Artificial Sequence: Synthetic oligonucleotide
  Target: SCNA; (-) strand; PAM type: YTN; PAM sequence: TTT
gacagaagagaaaagaacac

SEQ ID NO: 55598 - DNA, 20 bp, Artificial Sequence
  Description of Artificial Sequence: Synthetic oligonucleotide
  Target: SCNA; (-) strand; PAM type: YTN; PAM sequence: TTT
tgacagaagagaaaagaaca

SEQ ID NO: 55599 - DNA, 20 bp, Artificial Sequence
  Description of Artificial Sequence: Synthetic oligonucleotide
  Target: SCNA; (-) strand; PAM type: YTN; PAM sequence: TTT
ttgacagaagagaaaagaac

SEQ ID NO: 55600 - DNA, 20 bp, Artificial Sequence
  Description of Artificial Sequence: Synthetic oligonucleotide
  Target: SCNA; (-) strand; PAM type: YTN; PAM sequence: TTT
tttgacagaagagaaaagaa

SEQ ID NO: 55601 - DNA, 20 bp, Artificial Sequence
  Description of Artificial Sequence: Synthetic oligonucleotide
  Target: SCNA; (-) strand; PAM type: YTN; PAM sequence: TTT
ttttgacagaagagaaaaga

SEQ ID NO: 55602 - DNA, 20 bp, Artificial Sequence
  Description of Artificial Sequence: Synthetic oligonucleotide
  Target: SCNA; (-) strand; PAM type: YTN; PAM sequence: TTT
tttttgacagaagagaaaag

SEQ ID NO: 55603 - DNA, 20 bp, Artificial Sequence
  Description of Artificial Sequence: Synthetic oligonucleotide
  Target: SCNA; (-) strand; PAM type: YTN; PAM sequence: TTT
ttttttgacagaagagaaaa

SEQ ID NO: 55604 - DNA, 20 bp, Artificial Sequence
  Description of Artificial Sequence: Synthetic oligonucleotide
  Target: SCNA; (-) strand; PAM type: YTN; PAM sequence: TTT
tttttttgacagaagagaaa

SEQ ID NO: 55605 - DNA, 20 bp, Artificial Sequence
  Description of Artificial Sequence: Synthetic oligonucleotide
  Target: SCNA; (-) strand; PAM type: YTN; PAM sequence: TTT
ttttttttgacagaagagaa

SEQ ID NO: 55606 - DNA, 20 bp, Artificial Sequence
  Description of Artificial Sequence: Synthetic oligonucleotide
  Target: SCNA; (-) strand; PAM type: YTN; PAM sequence: TTT
tttttttttgacagaagaga

SEQ ID NO: 55607 - DNA, 20 bp, Artificial Sequence
  Description of Artificial Sequence: Synthetic oligonucleotide
  Target: SCNA; (-) strand; PAM type: YTN; PAM sequence: TTT
ttttttttttgacagaagag

SEQ ID NO: 55608 - DNA, 20 bp, Artificial Sequence
  Description of Artificial Sequence: Synthetic oligonucleotide
  Target: SCNA; (-) strand; PAM type: YTN; PAM sequence: TTG
tttttttttttttgacagaa

SEQ ID NO: 55609 - DNA, 20 bp, Artificial Sequence
  Description of Artificial Sequence: Synthetic oligonucleotide
  Target: SCNA; (-) strand; PAM type: YTN; PAM sequence: TTT
gtttttttttttttgacaga

SEQ ID NO: 55610 - DNA, 20 bp, Artificial Sequence
  Description of Artificial Sequence: Synthetic oligonucleotide
  Target: SCNA; (-) strand; PAM type: YTN; PAM sequence: TTG
tttgtttttttttttttgac

SEQ ID NO: 55611 - DNA, 20 bp, Artificial Sequence
  Description of Artificial Sequence: Synthetic oligonucleotide
  Target: SCNA; (-) strand; PAM type: YTN; PAM sequence: TTT
gtttgtttttttttttttga

SEQ ID NO: 55612 - DNA, 20 bp, Artificial Sequence
  Description of Artificial Sequence: Synthetic oligonucleotide
  Target: SCNA; (-) strand; PAM type: YTN; PAM sequence: TTT
tgtttgtttttttttttttg

SEQ ID NO: 55613 - DNA, 20 bp, Artificial Sequence
  Description of Artificial Sequence: Synthetic oligonucleotide
  Target: SCNA; (-) strand; PAM type: YTN; PAM sequence: TTT
ttgtttgttttttttttttt

SEQ ID NO: 55614 - DNA, 20 bp, Artificial Sequence
  Description of Artificial Sequence: Synthetic oligonucleotide
  Target: SCNA; (-) strand; PAM type: YTN; PAM sequence: TTT
tttgtttgtttttttttttt

SEQ ID NO: 55615 - DNA, 20 bp, Artificial Sequence
  Description of Artificial Sequence: Synthetic oligonucleotide
  Target: SCNA; (-) strand; PAM type: YTN; PAM sequence: TTG
ttttttgtttgttttttttt

SEQ ID NO: 55616 - DNA, 20 bp, Artificial Sequence
  Description of Artificial Sequence: Synthetic oligonucleotide
  Target: SCNA; (-) strand; PAM type: YTN; PAM sequence: CTG
aaggtcacaagtaaaataag

SEQ ID NO: 55617 - DNA, 20 bp, Artificial Sequence
  Description of Artificial Sequence: Synthetic oligonucleotide
  Target: SCNA; (-) strand; PAM type: YTN; PAM sequence: TTG
gtactgaaggtcacaagtaa

SEQ ID NO: 55618 - DNA, 20 bp, Artificial Sequence
  Description of Artificial Sequence: Synthetic oligonucleotide
  Target: SCNA; (-) strand; PAM type: YTN; PAM sequence: CTT
ggtactgaaggtcacaagta

SEQ ID NO: 55619 - DNA, 20 bp, Artificial Sequence
  Description of Artificial Sequence: Synthetic oligonucleotide
  Target: SCNA; (-) strand; PAM type: YTN; PAM sequence: TTA
cttggtactgaaggtcacaa

SEQ ID NO: 55620 - DNA, 20 bp, Artificial Sequence
  Description of Artificial Sequence: Synthetic oligonucleotide
  Target: SCNA; (-) strand; PAM type: YTN; PAM sequence: CTT
acttggtactgaaggtcaca

SEQ ID NO: 55621 - DNA, 20 bp, Artificial Sequence
  Description of Artificial Sequence: Synthetic oligonucleotide
  Target: SCNA; (-) strand; PAM type: YTN; PAM sequence: CTA
tccagtcttacttggtactg

SEQ ID NO: 55622 - DNA, 20 bp, Artificial Sequence
  Description of Artificial Sequence: Synthetic oligonucleotide
  Target: SCNA; (-) strand; PAM type: YTN; PAM sequence: TTC
tatccagtcttacttggtac

SEQ ID NO: 55623 - DNA, 20 bp, Artificial Sequence
  Description of Artificial Sequence: Synthetic oligonucleotide
  Target: SCNA; (-) strand; PAM type: YTN; PAM sequence: TTG
atattctatccagtcttact

SEQ ID NO: 55624 - DNA, 20 bp, Artificial Sequence
  Description of Artificial Sequence: Synthetic oligonucleotide
  Target: SCNA; (-) strand; PAM type: YTN; PAM sequence: CTT
gatattctatccagtcttac

SEQ ID NO: 55625 - DNA, 20 bp, Artificial Sequence
  Description of Artificial Sequence: Synthetic oligonucleotide
  Target: SCNA; (-) strand; PAM type: YTN; PAM sequence: TTA
tcttgatattctatccagtc

SEQ ID NO: 55626 - DNA, 20 bp, Artificial Sequence
  Description of Artificial Sequence: Synthetic oligonucleotide
  Target: SCNA; (-) strand; PAM type: YTN; PAM sequence: TTT
atcttgatattctatccagt

SEQ ID NO: 55627 - DNA, 20 bp, Artificial Sequence
  Description of Artificial Sequence: Synthetic oligonucleotide
  Target: SCNA; (-) strand; PAM type: YTN; PAM sequence: CTG
tcgcaaatttatcttgatat

SEQ ID NO: 55628 - DNA, 20 bp, Artificial Sequence
  Description of Artificial Sequence: Synthetic oligonucleotide
  Target: SCNA; (-) strand; PAM type: YTN; PAM sequence: CTA
aatctgtcgcaaatttatct

SEQ ID NO: 55629 - DNA, 20 bp, Artificial Sequence
  Description of Artificial Sequence: Synthetic oligonucleotide
  Target: SCNA; (-) strand; PAM type: YTN; PAM sequence: CTG
ggcaaccatgataatgcgac

SEQ ID NO: 55630 - DNA, 20 bp, Artificial Sequence
  Description of Artificial Sequence: Synthetic oligonucleotide
  Target: SCNA; (-) strand; PAM type: YTN; PAM sequence: TTC
tgggcaaccatgataatgcg

SEQ ID NO: 55631 - DNA, 20 bp, Artificial Sequence
  Description of Artificial Sequence: Synthetic oligonucleotide
  Target: SCNA; (-) strand; PAM type: YTN; PAM sequence: CTT
ctgggcaaccatgataatgc

SEQ ID NO: 55632 - DNA, 20 bp, Artificial Sequence
  Description of Artificial Sequence: Synthetic oligonucleotide
  Target: SCNA; (-) strand; PAM type: YTN; PAM sequence: TTA
acttctgggcaaccatgata

SEQ ID NO: 55633 - DNA, 20 bp, Artificial Sequence
  Description of Artificial Sequence: Synthetic oligonucleotide
  Target: SCNA; (-) strand; PAM type: YTN; PAM sequence: CTT
aacttctgggcaaccatgat

SEQ ID NO: 55634 - DNA, 20 bp, Artificial Sequence
  Description of Artificial Sequence: Synthetic oligonucleotide
  Target: SCNA; (-) strand; PAM type: YTN; PAM sequence: CTC
ttaacttctgggcaaccatg

SEQ ID NO: 55635 - DNA, 20 bp, Artificial Sequence
  Description of Artificial Sequence: Synthetic oligonucleotide
  Target: SCNA; (-) strand; PAM type: YTN; PAM sequence: TTC
caaacctcttaacttctggg

SEQ ID NO: 55636 - DNA, 20 bp, Artificial Sequence
  Description of Artificial Sequence: Synthetic oligonucleotide
  Target: SCNA; (-) strand; PAM type: YTN; PAM sequence: CTG
gaatcattccaaacctctta

SEQ ID NO: 55637 - DNA, 20 bp, Artificial Sequence
  Description of Artificial Sequence: Synthetic oligonucleotide
  Target: SCNA; (-) strand; PAM type: YTN; PAM sequence: TTA
tcagactggaatcattccaa

SEQ ID NO: 55638 - DNA, 20 bp, Artificial Sequence
  Description of Artificial Sequence: Synthetic oligonucleotide
  Target: SCNA; (-) strand; PAM type: YTN; PAM sequence: CTT
atcagactggaatcattcca

SEQ ID NO: 55639 - DNA, 20 bp, Artificial Sequence
  Description of Artificial Sequence: Synthetic oligonucleotide
  Target: SCNA; (-) strand; PAM type: YTN; PAM sequence: CTC
cttatcagactggaatcatt

SEQ ID NO: 55640 - DNA, 20 bp, Artificial Sequence
  Description of Artificial Sequence: Synthetic oligonucleotide
  Target: SCNA; (-) strand; PAM type: YTN; PAM sequence: TTC
tccttatcagactggaatca

SEQ ID NO: 55641 - DNA, 20 bp, Artificial Sequence
  Description of Artificial Sequence: Synthetic oligonucleotide
  Target: SCNA; (-) strand; PAM type: YTN; PAM sequence: TTG
ttctccttatcagactggaa

SEQ ID NO: 55642 - DNA, 20 bp, Artificial Sequence
  Description of Artificial Sequence: Synthetic oligonucleotide
  Target: SCNA; (-) strand; PAM type: YTN; PAM sequence: CTT
gttctccttatcagactgga

SEQ ID NO: 55643 - DNA, 20 bp, Artificial Sequence
  Description of Artificial Sequence: Synthetic oligonucleotide
  Target: SCNA; (-) strand; PAM type: YTN; PAM sequence: TTC
aatgtcttgttctccttatc

SEQ ID NO: 55644 - DNA, 20 bp, Artificial Sequence
  Description of Artificial Sequence: Synthetic oligonucleotide
  Target: SCNA; (-) strand; PAM type: YTN; PAM sequence: CTT
caatgtcttgttctccttat

SEQ ID NO: 55645 - DNA, 20 bp, Artificial Sequence
  Description of Artificial Sequence: Synthetic oligonucleotide
  Target: SCNA; (-) strand; PAM type: YTN; PAM sequence: TTA
cttcaatgtcttgttctcct

SEQ ID NO: 55646 - DNA, 20 bp, Artificial Sequence
  Description of Artificial Sequence: Synthetic oligonucleotide
  Target: SCNA; (-) strand; PAM type: YTN; PAM sequence: CTT
acttcaatgtcttgttctcc

SEQ ID NO: 55647 - DNA, 20 bp, Artificial Sequence
  Description of Artificial Sequence: Synthetic oligonucleotide
  Target: SCNA; (-) strand; PAM type: YTN; PAM sequence: CTC
cagacacttacttcaatgtc

SEQ ID NO: 55648 - DNA, 20 bp, Artificial Sequence
  Description of Artificial Sequence: Synthetic oligonucleotide
  Target: SCNA; (-) strand; PAM type: YTN; PAM sequence: TTA
gactccagacacttacttca

SEQ ID NO: 55649 - DNA, 20 bp, Artificial Sequence
  Description of Artificial Sequence: Synthetic oligonucleotide
  Target: SCNA; (-) strand; PAM type: YTN; PAM sequence: TTT
agactccagacacttacttc

SEQ ID NO: 55650 - DNA, 20 bp, Artificial Sequence
  Description of Artificial Sequence: Synthetic oligonucleotide
  Target: SCNA; (-) strand; PAM type: YTN; PAM sequence: TTT
tagactccagacacttactt

SEQ ID NO: 55651 - DNA, 20 bp, Artificial Sequence
  Description of Artificial Sequence: Synthetic oligonucleotide
  Target: SCNA; (-) strand; PAM type: YTN; PAM sequence: CTA
ttttagactccagacactta

SEQ ID NO: 55652 - DNA, 20 bp, Artificial Sequence
  Description of Artificial Sequence: Synthetic oligonucleotide
  Target: SCNA; (-) strand; PAM type: YTN; PAM sequence: CTA
tcccagatctattttagact

SEQ ID NO: 55653 - DNA, 20 bp, Artificial Sequence
  Description of Artificial Sequence: Synthetic oligonucleotide
  Target: SCNA; (-) strand; PAM type: YTN; PAM sequence: CTA
aagtaatagctatcccagat

SEQ ID NO: 55654 - DNA, 20 bp, Artificial Sequence
  Description of Artificial Sequence: Synthetic oligonucleotide
  Target: SCNA; (-) strand; PAM type: YTN; PAM sequence: CTC
agaaaagctaaagtaatagc

SEQ ID NO: 55655 - DNA, 20 bp, Artificial Sequence
  Description of Artificial Sequence: Synthetic oligonucleotide
  Target: SCNA; (-) strand; PAM type: YTN; PAM sequence: TTA
aatctcagaaaagctaaagt

SEQ ID NO: 55656 - DNA, 20 bp, Artificial Sequence
  Description of Artificial Sequence: Synthetic oligonucleotide
  Target: SCNA; (-) strand; PAM type: YTN; PAM sequence: TTC
ccatattaaatctcagaaaa

SEQ ID NO: 55657 - DNA, 20 bp, Artificial Sequence
  Description of Artificial Sequence: Synthetic oligonucleotide
  Target: SCNA; (-) strand; PAM type: YTN; PAM sequence: CTC
attcccatattaaatctcag

SEQ ID NO: 55658 - DNA, 20 bp, Artificial Sequence
  Description of Artificial Sequence: Synthetic oligonucleotide
  Target: SCNA; (-) strand; PAM type: YTN; PAM sequence: TTA
cacctcattcccatattaaa

SEQ ID NO: 55659 - DNA, 20 bp, Artificial Sequence
  Description of Artificial Sequence: Synthetic oligonucleotide
  Target: SCNA; (-) strand; PAM type: YTN; PAM sequence: TTT
acacctcattcccatattaa

SEQ ID NO: 55660 - DNA, 20 bp, Artificial Sequence
  Description of Artificial Sequence: Synthetic oligonucleotide
  Target: SCNA; (-) strand; PAM type: YTN; PAM sequence: TTT
tacacctcattcccatatta

SEQ ID NO: 55661 - DNA, 20 bp, Artificial Sequence
  Description of Artificial Sequence: Synthetic oligonucleotide
  Target: SCNA; (-) strand; PAM type: YTN; PAM sequence: CTT
ttacacctcattcccatatt

SEQ ID NO: 55662 - DNA, 20 bp, Artificial Sequence
  Description of Artificial Sequence: Synthetic oligonucleotide
  Target: SCNA; (-) strand; PAM type: YTN; PAM sequence: TTC
ttttacacctcattcccata

SEQ ID NO: 55663 - DNA, 20 bp, Artificial Sequence
  Description of Artificial Sequence: Synthetic oligonucleotide
  Target: SCNA; (-) strand; PAM type: YTN; PAM sequence: CTT
cttttacacctcattcccat

SEQ ID NO: 55664 - DNA, 20 bp, Artificial Sequence
  Description of Artificial Sequence: Synthetic oligonucleotide
  Target: SCNA; (-) strand; PAM type: YTN; PAM sequence: CTC
ttcttttacacctcattccc

SEQ ID NO: 55665 - DNA, 20 bp, Artificial Sequence
  Description of Artificial Sequence: Synthetic oligonucleotide
  Target: SCNA; (-) strand; PAM type: YTN; PAM sequence: TTC
aactcttcttttacacctca

SEQ ID NO: 55666 - DNA, 20 bp, Artificial Sequence
  Description of Artificial Sequence: Synthetic oligonucleotide
  Target: SCNA; (-) strand; PAM type: YTN; PAM sequence: TTT
caactcttcttttacacctc

SEQ ID NO: 55667 - DNA, 20 bp, Artificial Sequence
  Description of Artificial Sequence: Synthetic oligonucleotide
  Target: SCNA; (-) strand; PAM type: YTN; PAM sequence: TTA
tttcaactcttcttttacac

SEQ ID NO: 55668 - DNA, 20 bp, Artificial Sequence
  Description of Artificial Sequence: Synthetic oligonucleotide
  Target: SCNA; (-) strand; PAM type: YTN; PAM sequence: CTG
tgtaatagttatttcaactc

SEQ ID NO: 55669 - DNA, 20 bp, Artificial Sequence
  Description of Artificial Sequence: Synthetic oligonucleotide
  Target: SCNA; (-) strand; PAM type: YTN; PAM sequence: CTC
tgtgtaatagttatttcaac

SEQ ID NO: 55670 - DNA, 20 bp, Artificial Sequence
  Description of Artificial Sequence: Synthetic oligonucleotide
  Target: SCNA; (-) strand; PAM type: YTN; PAM sequence: TTA
ggaagaaggaacaagcatct

SEQ ID NO: 55671 - DNA, 20 bp, Artificial Sequence
  Description of Artificial Sequence: Synthetic oligonucleotide
  Target: SCNA; (-) strand; PAM type: YTN; PAM sequence: CTT
aggaagaaggaacaagcatc

SEQ ID NO: 55672 - DNA, 20 bp, Artificial Sequence
  Description of Artificial Sequence: Synthetic oligonucleotide
  Target: SCNA; (-) strand; PAM type: YTN; PAM sequence: TTA
ggccttaggaagaaggaaca

SEQ ID NO: 55673 - DNA, 20 bp, Artificial Sequence
  Description of Artificial Sequence: Synthetic oligonucleotide
  Target: SCNA; (-) strand; PAM type: YTN; PAM sequence: CTT
aggccttaggaagaaggaac

SEQ ID NO: 55674 - DNA, 20 bp, Artificial Sequence
  Description of Artificial Sequence: Synthetic oligonucleotide
  Target: SCNA; (-) strand; PAM type: YTN; PAM sequence: TTC
ttaggccttaggaagaagga

SEQ ID NO: 55675 - DNA, 20 bp, Artificial Sequence
  Description of Artificial Sequence: Synthetic oligonucleotide
  Target: SCNA; (-) strand; PAM type: YTN; PAM sequence: CTA
ggatagaagaatgagtgaga

SEQ ID NO: 55676 - DNA, 20 bp, Artificial Sequence
  Description of Artificial Sequence: Synthetic oligonucleotide
  Target: SCNA; (-) strand; PAM type: YTN; PAM sequence: TTC
taggatagaagaatgagtga

SEQ ID NO: 55677 - DNA, 20 bp, Artificial Sequence
  Description of Artificial Sequence: Synthetic oligonucleotide
  Target: SCNA; (-) strand; PAM type: YTN; PAM sequence: TTA
tgaattctaggatagaagaa

SEQ ID NO: 55678 - DNA, 20 bp, Artificial Sequence
  Description of Artificial Sequence: Synthetic oligonucleotide
  Target: SCNA; (-) strand; PAM type: YTN; PAM sequence: CTG
tgcagtgccatataccatta

SEQ ID NO: 55679 - DNA, 20 bp, Artificial Sequence
  Description of Artificial Sequence: Synthetic oligonucleotide
  Target: SCNA; (-) strand; PAM type: YTN; PAM sequence: TTC
tgtgcagtgccatataccat

SEQ ID NO: 55680 - DNA, 20 bp, Artificial Sequence
  Description of Artificial Sequence: Synthetic oligonucleotide
  Target: SCNA; (-) strand; PAM type: YTN; PAM sequence: TTT
ctgtgcagtgccatatacca

SEQ ID NO: 55681 - DNA, 20 bp, Artificial Sequence
  Description of Artificial Sequence: Synthetic oligonucleotide
  Target: SCNA; (-) strand; PAM type: YTN; PAM sequence: TTA
atgaatttctgtgcagtgcc

SEQ ID NO: 55682 - DNA, 20 bp, Artificial Sequence
  Description of Artificial Sequence: Synthetic oligonucleotide
  Target: SCNA; (-) strand; PAM type: YTN; PAM sequence: TTT
aatgaatttctgtgcagtgc

SEQ ID NO: 55683 - DNA, 20 bp, Artificial Sequence
  Description of Artificial Sequence: Synthetic oligonucleotide
  Target: SCNA; (-) strand; PAM type: YTN; PAM sequence: CTA
acatttaatgaatttctgtg

SEQ ID NO: 55684 - DNA, 20 bp, Artificial Sequence
  Description of Artificial Sequence: Synthetic oligonucleotide
  Target: SCNA; (-) strand; PAM type: YTN; PAM sequence: TTC
actaacatttaatgaatttc

SEQ ID NO: 55685 - DNA, 20 bp, Artificial Sequence
  Description of Artificial Sequence: Synthetic oligonucleotide
  Target: SCNA; (-) strand; PAM type: YTN; PAM sequence: TTT
cactaacatttaatgaattt

SEQ ID NO: 55686 - DNA, 20 bp, Artificial Sequence
  Description of Artificial Sequence: Synthetic oligonucleotide
  Target: SCNA; (-) strand; PAM type: YTN; PAM sequence: TTC
acatgtaatatttcactaac

SEQ ID NO: 55687 - DNA, 20 bp, Artificial Sequence
  Description of Artificial Sequence: Synthetic oligonucleotide
  Target: SCNA; (-) strand; PAM type: YTN; PAM sequence: TTT
cacatgtaatatttcactaa

SEQ ID NO: 55688 - DNA, 20 bp, Artificial Sequence
  Description of Artificial Sequence: Synthetic oligonucleotide
  Target: SCNA; (-) strand; PAM type: YTN; PAM sequence: CTT
tcacatgtaatatttcacta

SEQ ID NO: 55689 - DNA, 20 bp, Artificial Sequence
  Description of Artificial Sequence: Synthetic oligonucleotide
  Target: SCNA; (-) strand; PAM type: YTN; PAM sequence: TTC
tttcacatgtaatatttcac

SEQ ID NO: 55690 - DNA, 20 bp, Artificial Sequence
  Description of Artificial Sequence: Synthetic oligonucleotide
  Target: SCNA; (-) strand; PAM type: YTN; PAM sequence: CTT
ctttcacatgtaatatttca

SEQ ID NO: 55691 - DNA, 20 bp, Artificial Sequence
  Description of Artificial Sequence: Synthetic oligonucleotide
  Target: SCNA; (-) strand; PAM type: YTN; PAM sequence: CTA
ccttctttcacatgtaatat

SEQ ID NO: 55692 - DNA, 20 bp, Artificial Sequence
  Description of Artificial Sequence: Synthetic oligonucleotide
  Target: SCNA; (-) strand; PAM type: YTN; PAM sequence: TTA
ctaccttctttcacatgtaa

SEQ ID NO: 55693 - DNA, 20 bp, Artificial Sequence
  Description of Artificial Sequence: Synthetic oligonucleotide
  Target: SCNA; (-) strand; PAM type: YTN; PAM sequence: TTA
cattactaccttctttcaca

SEQ ID NO: 55694 - DNA, 20 bp, Artificial Sequence
  Description of Artificial Sequence: Synthetic oligonucleotide
  Target: SCNA; (-) strand; PAM type: YTN; PAM sequence: TTT
acattactaccttctttcac

SEQ ID NO: 55695 - DNA, 20 bp, Artificial Sequence
  Description of Artificial Sequence: Synthetic oligonucleotide
  Target: SCNA; (-) strand; PAM type: YTN; PAM sequence: CTA
tttacattactaccttcttt

SEQ ID NO: 55696 - DNA, 20 bp, Artificial Sequence
  Description of Artificial Sequence: Synthetic oligonucleotide
  Target: SCNA; (-) strand; PAM type: YTN; PAM sequence: TTC
tatttacattactaccttct

SEQ ID NO: 55697 - DNA, 20 bp, Artificial Sequence
  Description of Artificial Sequence: Synthetic oligonucleotide
  Target: SCNA; (-) strand; PAM type: YTN; PAM sequence: TTA
ggttctatttacattactac

SEQ ID NO: 55698 - DNA, 20 bp, Artificial Sequence
  Description of Artificial Sequence: Synthetic oligonucleotide
  Target: SCNA; (-) strand; PAM type: YTN; PAM sequence: TTA
tattaggttctatttacatt

SEQ ID NO: 55699 - DNA, 20 bp, Artificial Sequence
  Description of Artificial Sequence: Synthetic oligonucleotide
  Target: SCNA; (-) strand; PAM type: YTN; PAM sequence: TTA
taagaaaatgcagaacataa

SEQ ID NO: 55700 - DNA, 20 bp, Artificial Sequence
  Description of Artificial Sequence: Synthetic oligonucleotide
  Target: SCNA; (-) strand; PAM type: YTN; PAM sequence: TTT
ataagaaaatgcagaacata

SEQ ID NO: 55701 - DNA, 20 bp, Artificial Sequence
  Description of Artificial Sequence: Synthetic oligonucleotide
  Target: SCNA; (-) strand; PAM type: YTN; PAM sequence: TTT
tataagaaaatgcagaacat

SEQ ID NO: 55702 - DNA, 20 bp, Artificial Sequence
  Description of Artificial Sequence: Synthetic oligonucleotide
  Target: SCNA; (-) strand; PAM type: YTN; PAM sequence: CTA
aaaagtaattttataagaaa

SEQ ID NO: 55703 - DNA, 20 bp, Artificial Sequence
  Description of Artificial Sequence: Synthetic oligonucleotide
  Target: SCNA; (-) strand; PAM type: YTN; PAM sequence: TTC
gagcagcaaaacaatctaaa

SEQ ID NO: 55704 - DNA, 20 bp, Artificial Sequence
  Description of Artificial Sequence: Synthetic oligonucleotide
  Target: SCNA; (-) strand; PAM type: YTN; PAM sequence: CTA
gatagcaaccagtaatgatt

SEQ ID NO: 55705 - DNA, 20 bp, Artificial Sequence
  Description of Artificial Sequence: Synthetic oligonucleotide
  Target: SCNA; (-) strand; PAM type: YTN; PAM sequence: TTG
aaggtgatccctagatagca

SEQ ID NO: 55706 - DNA, 20 bp, Artificial Sequence
  Description of Artificial Sequence: Synthetic oligonucleotide
  Target: SCNA; (-) strand; PAM type: YTN; PAM sequence: TTT
gaaggtgatccctagatagc

SEQ ID NO: 55707 - DNA, 20 bp, Artificial Sequence
  Description of Artificial Sequence: Synthetic oligonucleotide
  Target: SCNA; (-) strand; PAM type: YTN; PAM sequence: TTG
aaaggggtttgaaggtgatc

SEQ ID NO: 55708 - DNA, 20 bp, Artificial Sequence
  Description of Artificial Sequence: Synthetic oligonucleotide
  Target: SCNA; (-) strand; PAM type: YTN; PAM sequence: TTT
gaaaggggtttgaaggtgat

SEQ ID NO: 55709 - DNA, 20 bp, Artificial Sequence
  Description of Artificial Sequence: Synthetic oligonucleotide
  Target: SCNA; (-) strand; PAM type: YTN; PAM sequence: TTT
tgaaaggggtttgaaggtga

SEQ ID NO: 55710 - DNA, 20 bp, Artificial Sequence
  Description of Artificial Sequence: Synthetic oligonucleotide
  Target: SCNA; (-) strand; PAM type: YTN; PAM sequence: TTG
tattttgaaaggggtttgaa

SEQ ID NO: 55711 - DNA, 20 bp, Artificial Sequence
  Description of Artificial Sequence: Synthetic oligonucleotide
  Target: SCNA; (-) strand; PAM type: YTN; PAM sequence: TTG
aacattgtattttgaaaggg

SEQ ID NO: 55712 - DNA, 20 bp, Artificial Sequence
  Description of Artificial Sequence: Synthetic oligonucleotide
  Target: SCNA; (-) strand; PAM type: YTN; PAM sequence: TTT
gaacattgtattttgaaagg

SEQ ID NO: 55713 - DNA, 20 bp, Artificial Sequence
  Description of Artificial Sequence: Synthetic oligonucleotide
  Target: SCNA; (-) strand; PAM type: YTN; PAM sequence: TTT
tgaacattgtattttgaaag

SEQ ID NO: 55714 - DNA, 20 bp, Artificial Sequence
  Description of Artificial Sequence: Synthetic oligonucleotide
  Target: SCNA; (-) strand; PAM type: YTN; PAM sequence: TTT
ttgaacattgtattttgaaa

SEQ ID NO: 55715 - DNA, 20 bp, Artificial Sequence
  Description of Artificial Sequence: Synthetic oligonucleotide
  Target: SCNA; (-) strand; PAM type: YTN; PAM sequence: TTT
tttgaacattgtattttgaa

SEQ ID NO: 55716 - DNA, 20 bp, Artificial Sequence
  Description of Artificial Sequence: Synthetic oligonucleotide
  Target: SCNA; (-) strand; PAM type: YTN; PAM sequence: TTT
ttttgaacattgtattttga

SEQ ID NO: 55717 - DNA, 20 bp, Artificial Sequence
  Description of Artificial Sequence: Synthetic oligonucleotide
  Target: SCNA; (-) strand; PAM type: YTN; PAM sequence: TTT
tttttgaacattgtattttg

SEQ ID NO: 55718 - DNA, 20 bp, Artificial Sequence
  Description of Artificial Sequence: Synthetic oligonucleotide
  Target: SCNA; (-) strand; PAM type: YTN; PAM sequence: TTA
ttttttttgaacattgtatt

SEQ ID NO: 55719 - DNA, 20 bp, Artificial Sequence
  Description of Artificial Sequence: Synthetic oligonucleotide
  Target: SCNA; (-) strand; PAM type: YTN; PAM sequence: TTT
attttttttgaacattgtat

SEQ ID NO: 55720 - DNA, 20 bp, Artificial Sequence
  Description of Artificial Sequence: Synthetic oligonucleotide
  Target: SCNA; (-) strand; PAM type: YTN; PAM sequence: TTT
tattttttttgaacattgta

SEQ ID NO: 55721 - DNA, 20 bp, Artificial Sequence
  Description of Artificial Sequence: Synthetic oligonucleotide
  Target: SCNA; (-) strand; PAM type: YTN; PAM sequence: TTT
ttattttttttgaacattgt

SEQ ID NO: 55722 - DNA, 20 bp, Artificial Sequence
  Description of Artificial Sequence: Synthetic oligonucleotide
  Target: SCNA; (-) strand; PAM type: YTN; PAM sequence: TTG
tttttattttttttgaacat

SEQ ID NO: 55723 - DNA, 20 bp, Artificial Sequence
  Description of Artificial Sequence: Synthetic oligonucleotide
  Target: SCNA; (-) strand; PAM type: YTN; PAM sequence: CTT
gtttttattttttttgaaca

SEQ ID NO: 55724 - DNA, 20 bp, Artificial Sequence
  Description of Artificial Sequence: Synthetic oligonucleotide
  Target: SCNA; (-) strand; PAM type: YTN; PAM sequence: TTG
tgccaggcccttgtttttat

SEQ ID NO: 55725 - DNA, 20 bp, Artificial Sequence
  Description of Artificial Sequence: Synthetic oligonucleotide
  Target: SCNA; (-) strand; PAM type: YTN; PAM sequence: CTG
ggatacaggtgtgagccatt

SEQ ID NO: 55726 - DNA, 20 bp, Artificial Sequence
  Description of Artificial Sequence: Synthetic oligonucleotide
  Target: SCNA; (-) strand; PAM type: YTN; PAM sequence: CTC
ccaacagtgctgggatacag

SEQ ID NO: 55727 - DNA, 20 bp, Artificial Sequence
  Description of Artificial Sequence: Synthetic oligonucleotide
  Target: SCNA; (-) strand; PAM type: YTN; PAM sequence: CTC
ggcctcccaacagtgctggg

SEQ ID NO: 55728 - DNA, 20 bp, Artificial Sequence
  Description of Artificial Sequence: Synthetic oligonucleotide
  Target: SCNA; (-) strand; PAM type: YTN; PAM sequence: CTG
cctcggcctcccaacagtgc

SEQ ID NO: 55729 - DNA, 20 bp, Artificial Sequence
  Description of Artificial Sequence: Synthetic oligonucleotide
  Target: SCNA; (-) strand; PAM type: YTN; PAM sequence: CTC
ctgcctcggcctcccaacag

SEQ ID NO: 55730 - DNA, 20 bp, Artificial Sequence
  Description of Artificial Sequence: Synthetic oligonucleotide
  Target: SCNA; (-) strand; PAM type: YTN; PAM sequence: TTC
tcctgcctcggcctcccaac

SEQ ID NO: 55731 - DNA, 20 bp, Artificial Sequence
  Description of Artificial Sequence: Synthetic oligonucleotide
  Target: SCNA; (-) strand; PAM type: YTN; PAM sequence: CTC
aagcaattctcctgcctcgg

SEQ ID NO: 55732 - DNA, 20 bp, Artificial Sequence
  Description of Artificial Sequence: Synthetic oligonucleotide
  Target: SCNA; (-) strand; PAM type: YTN; PAM sequence: CTG
ggctcaagcaattctcctgc

SEQ ID NO: 55733 - DNA, 20 bp, Artificial Sequence
  Description of Artificial Sequence: Synthetic oligonucleotide
  Target: SCNA; (-) strand; PAM type: YTN; PAM sequence: CTC
ctgggctcaagcaattctcc

SEQ ID NO: 55734 - DNA, 20 bp, Artificial Sequence
  Description of Artificial Sequence: Synthetic oligonucleotide
  Target: SCNA; (-) strand; PAM type: YTN; PAM sequence: CTC
gaactcctgggctcaagcaa

SEQ ID NO: 55735 - DNA, 20 bp, Artificial Sequence
  Description of Artificial Sequence: Synthetic oligonucleotide
  Target: SCNA; (-) strand; PAM type: YTN; PAM sequence: CTG
gcctcgaactcctgggctca

SEQ ID NO: 55736 - DNA, 20 bp, Artificial Sequence
  Description of Artificial Sequence: Synthetic oligonucleotide
  Target: SCNA; (-) strand; PAM type: YTN; PAM sequence: TTG
cccaggctggcctcgaactc

SEQ ID NO: 55737 - DNA, 20 bp, Artificial Sequence
  Description of Artificial Sequence: Synthetic oligonucleotide
  Target: SCNA; (-) strand; PAM type: YTN; PAM sequence: CTA
tgttgcccaggctggcctcg

SEQ ID NO: 55738 - DNA, 20 bp, Artificial Sequence
  Description of Artificial Sequence: Synthetic oligonucleotide
  Target: SCNA; (-) strand; PAM type: YTN; PAM sequence: CTC
tatgttgcccaggctggcct

SEQ ID NO: 55739 - DNA, 20 bp, Artificial Sequence
  Description of Artificial Sequence: Synthetic oligonucleotide
  Target: SCNA; (-) strand; PAM type: YTN; PAM sequence: CTC
tctatgttgcccaggctggc

SEQ ID NO: 55740 - DNA, 20 bp, Artificial Sequence
  Description of Artificial Sequence: Synthetic oligonucleotide
  Target: SCNA; (-) strand; PAM type: YTN; PAM sequence: TTA
tagagatagcgtctctctat

SEQ ID NO: 55741 - DNA, 20 bp, Artificial Sequence
  Description of Artificial Sequence: Synthetic oligonucleotide
  Target: SCNA; (-) strand; PAM type: YTN; PAM sequence: TTA
ttatagagatagcgtctctc

SEQ ID NO: 55742 - DNA, 20 bp, Artificial Sequence
  Description of Artificial Sequence: Synthetic oligonucleotide
  Target: SCNA; (-) strand; PAM type: YTN; PAM sequence: TTT
attatagagatagcgtctct

SEQ ID NO: 55743 - DNA, 20 bp, Artificial Sequence
  Description of Artificial Sequence: Synthetic oligonucleotide
  Target: SCNA; (-) strand; PAM type: YTN; PAM sequence: TTA
tttattatagagatagcgtc

SEQ ID NO: 55744 - DNA, 20 bp, Artificial Sequence
  Description of Artificial Sequence: Synthetic oligonucleotide
  Target: SCNA; (-) strand; PAM type: YTN; PAM sequence: TTT
atttattatagagatagcgt

SEQ ID NO: 55745 - DNA, 20 bp, Artificial Sequence
  Description of Artificial Sequence: Synthetic oligonucleotide
  Target: SCNA; (-) strand; PAM type: YTN; PAM sequence: TTA
tttatttattatagagatag

SEQ ID NO: 55746 - DNA, 20 bp, Artificial Sequence
  Description of Artificial Sequence: Synthetic oligonucleotide
  Target: SCNA; (-) strand; PAM type: YTN; PAM sequence: TTT
atttatttattatagagata

SEQ ID NO: 55747 - DNA, 20 bp, Artificial Sequence
  Description of Artificial Sequence: Synthetic oligonucleotide
  Target: SCNA; (-) strand; PAM type: YTN; PAM sequence: TTA
tttatttatttattatagag

SEQ ID NO: 55748 - DNA, 20 bp, Artificial Sequence
  Description of Artificial Sequence: Synthetic oligonucleotide
  Target: SCNA; (-) strand; PAM type: YTN; PAM sequence: TTT
atttatttatttattataga

SEQ ID NO: 55749 - DNA, 20 bp, Artificial Sequence
  Description of Artificial Sequence: Synthetic oligonucleotide
  Target: SCNA; (-) strand; PAM type: YTN; PAM sequence: TTC
caaaaatatttatttattta

SEQ ID NO: 55750 - DNA, 20 bp, Artificial Sequence
  Description of Artificial Sequence: Synthetic oligonucleotide
  Target: SCNA; (-) strand; PAM type: YTN; PAM sequence: TTT
ccaaaaatatttatttattt

SEQ ID NO: 55751 - DNA, 20 bp, Artificial Sequence
  Description of Artificial Sequence: Synthetic oligonucleotide
  Target: SCNA; (-) strand; PAM type: YTN; PAM sequence: TTT
tccaaaaatatttatttatt

SEQ ID NO: 55752 - DNA, 20 bp, Artificial Sequence
  Description of Artificial Sequence: Synthetic oligonucleotide
  Target: SCNA; (-) strand; PAM type: YTN; PAM sequence: TTT
ttccaaaaatatttatttat

SEQ ID NO: 55753 - DNA, 20 bp, Artificial Sequence
  Description of Artificial Sequence: Synthetic oligonucleotide
  Target: SCNA; (-) strand; PAM type: YTN; PAM sequence: TTG
tttttccaaaaatatttatt

SEQ ID NO: 55754 - DNA, 20 bp, Artificial Sequence
  Description of Artificial Sequence: Synthetic oligonucleotide
  Target: SCNA; (-) strand; PAM type: YTN; PAM sequence: TTT
gtttttccaaaaatatttat

SEQ ID NO: 55755 - DNA, 20 bp, Artificial Sequence
  Description of Artificial Sequence: Synthetic oligonucleotide
  Target: SCNA; (-) strand; PAM type: YTN; PAM sequence: TTA
acagcatttgtttttccaaa

SEQ ID NO: 55756 - DNA, 20 bp, Artificial Sequence
  Description of Artificial Sequence: Synthetic oligonucleotide
  Target: SCNA; (-) strand; PAM type: YTN; PAM sequence: TTT
aacagcatttgtttttccaa

SEQ ID NO: 55757 - DNA, 20 bp, Artificial Sequence
  Description of Artificial Sequence: Synthetic oligonucleotide
  Target: SCNA; (-) strand; PAM type: YTN; PAM sequence: TTT
taacagcatttgtttttcca

SEQ ID NO: 55758 - DNA, 20 bp, Artificial Sequence
  Description of Artificial Sequence: Synthetic oligonucleotide
  Target: SCNA; (-) strand; PAM type: YTN; PAM sequence: CTA
gaaatgcattttaacagcat

SEQ ID NO: 55759 - DNA, 20 bp, Artificial Sequence
  Description of Artificial Sequence: Synthetic oligonucleotide
  Target: SCNA; (-) strand; PAM type: YTN; PAM sequence: CTA
agctagaaatgcattttaac

SEQ ID NO: 55760 - DNA, 20 bp, Artificial Sequence
  Description of Artificial Sequence: Synthetic oligonucleotide
  Target: SCNA; (-) strand; PAM type: YTN; PAM sequence: TTA
tgtgacctaagctagaaatg

SEQ ID NO: 55761 - DNA, 20 bp, Artificial Sequence
  Description of Artificial Sequence: Synthetic oligonucleotide
  Target: SCNA; (-) strand; PAM type: YTN; PAM sequence: TTT
atgtgacctaagctagaaat

SEQ ID NO: 55762 - DNA, 20 bp, Artificial Sequence
  Description of Artificial Sequence: Synthetic oligonucleotide
  Target: SCNA; (-) strand; PAM type: YTN; PAM sequence: CTT
tatgtgacctaagctagaaa

SEQ ID NO: 55763 - DNA, 20 bp, Artificial Sequence
  Description of Artificial Sequence: Synthetic oligonucleotide
  Target: SCNA; (-) strand; PAM type: YTN; PAM sequence: TTC
agatcctttatgtgacctaa

SEQ ID NO: 55764 - DNA, 20 bp, Artificial Sequence
  Description of Artificial Sequence: Synthetic oligonucleotide
  Target: SCNA; (-) strand; PAM type: YTN; PAM sequence: TTT
cagatcctttatgtgaccta

SEQ ID NO: 55765 - DNA, 20 bp, Artificial Sequence
  Description of Artificial Sequence: Synthetic oligonucleotide
  Target: SCNA; (-) strand; PAM type: YTN; PAM sequence: TTA
catgcccatttcagatcctt

SEQ ID NO: 55766 - DNA, 20 bp, Artificial Sequence
  Description of Artificial Sequence: Synthetic oligonucleotide
  Target: SCNA; (-) strand; PAM type: YTN; PAM sequence: TTT
acatgcccatttcagatcct

SEQ ID NO: 55767 - DNA, 20 bp, Artificial Sequence
  Description of Artificial Sequence: Synthetic oligonucleotide
  Target: SCNA; (-) strand; PAM type: YTN; PAM sequence: TTG
tttacatgcccatttcagat

SEQ ID NO: 55768 - DNA, 20 bp, Artificial Sequence
  Description of Artificial Sequence: Synthetic oligonucleotide
  Target: SCNA; (-) strand; PAM type: YTN; PAM sequence: TTG
ccattgtttacatgcccatt

SEQ ID NO: 55769 - DNA, 20 bp, Artificial Sequence
  Description of Artificial Sequence: Synthetic oligonucleotide
  Target: SCNA; (-) strand; PAM type: YTN; PAM sequence: CTT
gccattgtttacatgcccat

SEQ ID NO: 55770 - DNA, 20 bp, Artificial Sequence
  Description of Artificial Sequence: Synthetic oligonucleotide
  Target: SCNA; (-) strand; PAM type: YTN; PAM sequence: TTG
atatatataaaaacttgcca

SEQ ID NO: 55771 - DNA, 20 bp, Artificial Sequence
  Description of Artificial Sequence: Synthetic oligonucleotide
  Target: SCNA; (-) strand; PAM type: YTN; PAM sequence: TTA
attgatatatataaaaactt

SEQ ID NO: 55772 - DNA, 20 bp, Artificial Sequence
  Description of Artificial Sequence: Synthetic oligonucleotide
  Target: SCNA; (-) strand; PAM type: YTN; PAM sequence: CTG
ttaattgatatatataaaaa

SEQ ID NO: 55773 - DNA, 20 bp, Artificial Sequence
  Description of Artificial Sequence: Synthetic oligonucleotide
  Target: SCNA; (-) strand; PAM type: YTN; PAM sequence: TTC
aagacctgttaattgatata

SEQ ID NO: 55774 - DNA, 20 bp, Artificial Sequence
  Description of Artificial Sequence: Synthetic oligonucleotide
  Target: SCNA; (-) strand; PAM type: YTN; PAM sequence: TTT
caagacctgttaattgatat

SEQ ID NO: 55775 - DNA, 20 bp, Artificial Sequence
  Description of Artificial Sequence: Synthetic oligonucleotide
  Target: SCNA; (-) strand; PAM type: YTN; PAM sequence: TTT
tcaagacctgttaattgata

SEQ ID NO: 55776 - DNA, 20 bp, Artificial Sequence
  Description of Artificial Sequence: Synthetic oligonucleotide
  Target: SCNA; (-) strand; PAM type: YTN; PAM sequence: TTT
ttcaagacctgttaattgat

SEQ ID NO: 55777 - DNA, 20 bp, Artificial Sequence
  Description of Artificial Sequence: Synthetic oligonucleotide
  Target: SCNA; (-) strand; PAM type: YTN; PAM sequence: TTT
tttcaagacctgttaattga

SEQ ID NO: 55778 - DNA, 20 bp, Artificial Sequence
  Description of Artificial Sequence: Synthetic oligonucleotide
  Target: SCNA; (-) strand; PAM type: YTN; PAM sequence: CTT
ttttcaagacctgttaattg

SEQ ID NO: 55779 - DNA, 20 bp, Artificial Sequence
  Description of Artificial Sequence: Synthetic oligonucleotide
  Target: SCNA; (-) strand; PAM type: YTN; PAM sequence: TTC
acacaagccagtagagtcaa

SEQ ID NO: 55780 - DNA, 20 bp, Artificial Sequence
  Description of Artificial Sequence: Synthetic oligonucleotide
  Target: SCNA; (-) strand; PAM type: YTN; PAM sequence: TTT
cacacaagccagtagagtca

SEQ ID NO: 55781 - DNA, 20 bp, Artificial Sequence
  Description of Artificial Sequence: Synthetic oligonucleotide
  Target: SCNA; (-) strand; PAM type: YTN; PAM sequence: TTC
agggaaatttcacacaagcc

SEQ ID NO: 55782 - DNA, 20 bp, Artificial Sequence
  Description of Artificial Sequence: Synthetic oligonucleotide
  Target: SCNA; (-) strand; PAM type: YTN; PAM sequence: TTC
attcagggaaatttcacaca

SEQ ID NO: 55783 - DNA, 20 bp, Artificial Sequence
  Description of Artificial Sequence: Synthetic oligonucleotide
  Target: SCNA; (-) strand; PAM type: YTN; PAM sequence: TTT
cattcagggaaatttcacac

SEQ ID NO: 55784 - DNA, 20 bp, Artificial Sequence
  Description of Artificial Sequence: Synthetic oligonucleotide
  Target: SCNA; (-) strand; PAM type: YTN; PAM sequence: CTG
atttcattcagggaaatttc

SEQ ID NO: 55785 - DNA, 20 bp, Artificial Sequence
  Description of Artificial Sequence: Synthetic oligonucleotide
  Target: SCNA; (-) strand; PAM type: YTN; PAM sequence: TTG
tctgatttcattcagggaaa

SEQ ID NO: 55786 - DNA, 20 bp, Artificial Sequence
  Description of Artificial Sequence: Synthetic oligonucleotide
  Target: SCNA; (-) strand; PAM type: YTN; PAM sequence: CTG
agaacaccattgtctgattt

SEQ ID NO: 55787 - DNA, 20 bp, Artificial Sequence
  Description of Artificial Sequence: Synthetic oligonucleotide
  Target: SCNA; (-) strand; PAM type: YTN; PAM sequence: TTC
tgagaacaccattgtctgat

SEQ ID NO: 55788 - DNA, 20 bp, Artificial Sequence
  Description of Artificial Sequence: Synthetic oligonucleotide
  Target: SCNA; (-) strand; PAM type: YTN; PAM sequence: TTT
ctgagaacaccattgtctga

SEQ ID NO: 55789 - DNA, 20 bp, Artificial Sequence
  Description of Artificial Sequence: Synthetic oligonucleotide
  Target: SCNA; (-) strand; PAM type: YTN; PAM sequence: TTG
tttctgagaacaccattgtc

SEQ ID NO: 55790 - DNA, 20 bp, Artificial Sequence
  Description of Artificial Sequence: Synthetic oligonucleotide
  Target: SCNA; (-) strand; PAM type: YTN; PAM sequence: CTA
agatgcattgtttctgagaa

SEQ ID NO: 55791 - DNA, 20 bp, Artificial Sequence
  Description of Artificial Sequence: Synthetic oligonucleotide
  Target: SCNA; (-) strand; PAM type: YTN; PAM sequence: TTC
taagatgcattgtttctgag

SEQ ID NO: 55792 - DNA, 20 bp, Artificial Sequence
  Description of Artificial Sequence: Synthetic oligonucleotide
  Target: SCNA; (-) strand; PAM type: YTN; PAM sequence: CTT
ctaagatgcattgtttctga

SEQ ID NO: 55793 - DNA, 20 bp, Artificial Sequence
  Description of Artificial Sequence: Synthetic oligonucleotide
  Target: SCNA; (-) strand; PAM type: YTN; PAM sequence: CTC
ttctaagatgcattgtttct

SEQ ID NO: 55794 - DNA, 20 bp, Artificial Sequence
  Description of Artificial Sequence: Synthetic oligonucleotide
  Target: SCNA; (-) strand; PAM type: YTN; PAM sequence: TTA
actcttctaagatgcattgt

SEQ ID NO: 55795 - DNA, 20 bp, Artificial Sequence
  Description of Artificial Sequence: Synthetic oligonucleotide
  Target: SCNA; (-) strand; PAM type: YTN; PAM sequence: CTG
atattaactcttctaagatg

SEQ ID NO: 55796 - DNA, 20 bp, Artificial Sequence
  Description of Artificial Sequence: Synthetic oligonucleotide
  Target: SCNA; (-) strand; PAM type: YTN; PAM sequence: TTG
gctgatattaactcttctaa

SEQ ID NO: 55797 - DNA, 20 bp, Artificial Sequence
  Description of Artificial Sequence: Synthetic oligonucleotide
  Target: SCNA; (-) strand; PAM type: YTN; PAM sequence: TTT
ggctgatattaactcttcta

SEQ ID NO: 55798 - DNA, 20 bp, Artificial Sequence
  Description of Artificial Sequence: Synthetic oligonucleotide
  Target: SCNA; (-) strand; PAM type: YTN; PAM sequence: CTT
tggctgatattaactcttct

SEQ ID NO: 55799 - DNA, 20 bp, Artificial Sequence
  Description of Artificial Sequence: Synthetic oligonucleotide
  Target: SCNA; (-) strand; PAM type: YTN; PAM sequence: TTA
gtatgatataatgtctttgg

SEQ ID NO: 55800 - DNA, 20 bp, Artificial Sequence
  Description of Artificial Sequence: Synthetic oligonucleotide
  Target: SCNA; (-) strand; PAM type: YTN; PAM sequence: TTG
ggagagaagttagtatgata

SEQ ID NO: 55801 - DNA, 20 bp, Artificial Sequence
  Description of Artificial Sequence: Synthetic oligonucleotide
  Target: SCNA; (-) strand; PAM type: YTN; PAM sequence: TTA
ttgggagagaagttagtatg

SEQ ID NO: 55802 - DNA, 20 bp, Artificial Sequence
  Description of Artificial Sequence: Synthetic oligonucleotide
  Target: SCNA; (-) strand; PAM type: YTN; PAM sequence: TTT
attgggagagaagttagtat

SEQ ID NO: 55803 - DNA, 20 bp, Artificial Sequence
  Description of Artificial Sequence: Synthetic oligonucleotide
  Target: SCNA; (-) strand; PAM type: YTN; PAM sequence: TTT
tattgggagagaagttagta

SEQ ID NO: 55804 - DNA, 20 bp, Artificial Sequence
  Description of Artificial Sequence: Synthetic oligonucleotide
  Target: SCNA; (-) strand; PAM type: YTN; PAM sequence: CTA
ggcattttattgggagagaa

SEQ ID NO: 55805 - DNA, 20 bp, Artificial Sequence
  Description of Artificial Sequence: Synthetic oligonucleotide
  Target: SCNA; (-) strand; PAM type: YTN; PAM sequence: TTC
taggcattttattgggagag

SEQ ID NO: 55806 - DNA, 20 bp, Artificial Sequence
  Description of Artificial Sequence: Synthetic oligonucleotide
  Target: SCNA; (-) strand; PAM type: YTN; PAM sequence: TTT
ctaggcattttattgggaga

SEQ ID NO: 55807 - DNA, 20 bp, Artificial Sequence
  Description of Artificial Sequence: Synthetic oligonucleotide
  Target: SCNA; (-) strand; PAM type: YTN; PAM sequence: TTT
tctaggcattttattgggag

SEQ ID NO: 55808 - DNA, 20 bp, Artificial Sequence
  Description of Artificial Sequence: Synthetic oligonucleotide
  Target: SCNA; (-) strand; PAM type: YTN; PAM sequence: TTG
ttttctaggcattttattgg

SEQ ID NO: 55809 - DNA, 20 bp, Artificial Sequence
  Description of Artificial Sequence: Synthetic oligonucleotide
  Target: SCNA; (-) strand; PAM type: YTN; PAM sequence: TTA
gagatacattgttttctagg

SEQ ID NO: 55810 - DNA, 20 bp, Artificial Sequence
  Description of Artificial Sequence: Synthetic oligonucleotide
  Target: SCNA; (-) strand; PAM type: YTN; PAM sequence: TTG
ttagagatacattgttttct

SEQ ID NO: 55811 - DNA, 20 bp, Artificial Sequence
  Description of Artificial Sequence: Synthetic oligonucleotide
  Target: SCNA; (-) strand; PAM type: YTN; PAM sequence: CTT
gttagagatacattgttttc

SEQ ID NO: 55812 - DNA, 20 bp, Artificial Sequence
  Description of Artificial Sequence: Synthetic oligonucleotide
  Target: SCNA; (-) strand; PAM type: YTN; PAM sequence: TTC
ttgttagagatacattgttt

SEQ ID NO: 55813 - DNA, 20 bp, Artificial Sequence
  Description of Artificial Sequence: Synthetic oligonucleotide
  Target: SCNA; (-) strand; PAM type: YTN; PAM sequence: TTT
cttgttagagatacattgtt

SEQ ID NO: 55814 - DNA, 20 bp, Artificial Sequence
  Description of Artificial Sequence: Synthetic oligonucleotide
  Target: SCNA; (-) strand; PAM type: YTN; PAM sequence: TTT
tcttgttagagatacattgt

SEQ ID NO: 55815 - DNA, 20 bp, Artificial Sequence
  Description of Artificial Sequence: Synthetic oligonucleotide
  Target: SCNA; (-) strand; PAM type: YTN; PAM sequence: TTT
ttcttgttagagatacattg

SEQ ID NO: 55816 - DNA, 20 bp, Artificial Sequence
  Description of Artificial Sequence: Synthetic oligonucleotide
  Target: SCNA; (-) strand; PAM type: YTN; PAM sequence: CTT
tttcttgttagagatacatt

SEQ ID NO: 55817 - DNA, 20 bp, Artificial Sequence
  Description of Artificial Sequence: Synthetic oligonucleotide
  Target: SCNA; (-) strand; PAM type: YTN; PAM sequence: TTG
aactttttcttgttagagat

SEQ ID NO: 55818 - DNA, 20 bp, Artificial Sequence
  Description of Artificial Sequence: Synthetic oligonucleotide
  Target: SCNA; (-) strand; PAM type: YTN; PAM sequence: TTA
acacagcattgaactttttc

SEQ ID NO: 55819 - DNA, 20 bp, Artificial Sequence
  Description of Artificial Sequence: Synthetic oligonucleotide
  Target: SCNA; (-) strand; PAM type: YTN; PAM sequence: TTG
ccagttaacacagcattgaa

SEQ ID NO: 55820 - DNA, 20 bp, Artificial Sequence
  Description of Artificial Sequence: Synthetic oligonucleotide
  Target: SCNA; (-) strand; PAM type: YTN; PAM sequence: TTA
aatggaattgccagttaaca

SEQ ID NO: 55821 - DNA, 20 bp, Artificial Sequence
  Description of Artificial Sequence: Synthetic oligonucleotide
  Target: SCNA; (-) strand; PAM type: YTN; PAM sequence: TTT
aaatggaattgccagttaac

SEQ ID NO: 55822 - DNA, 20 bp, Artificial Sequence
  Description of Artificial Sequence: Synthetic oligonucleotide
  Target: SCNA; (-) strand; PAM type: YTN; PAM sequence: TTT
taaatggaattgccagttaa

SEQ ID NO: 55823 - DNA, 20 bp, Artificial Sequence
  Description of Artificial Sequence: Synthetic oligonucleotide
  Target: SCNA; (-) strand; PAM type: YTN; PAM sequence: TTG
aaaatattttaaatggaatt

SEQ ID NO: 55824 - DNA, 20 bp, Artificial Sequence
  Description of Artificial Sequence: Synthetic oligonucleotide
  Target: SCNA; (-) strand; PAM type: YTN; PAM sequence: TTT
gaaaatattttaaatggaat

SEQ ID NO: 55825 - DNA, 20 bp, Artificial Sequence
  Description of Artificial Sequence: Synthetic oligonucleotide
  Target: SCNA; (-) strand; PAM type: YTN; PAM sequence: TTA
gggaatgtgtttgaaaatat

SEQ ID NO: 55826 - DNA, 20 bp, Artificial Sequence
  Description of Artificial Sequence: Synthetic oligonucleotide
  Target: SCNA; (-) strand; PAM type: YTN; PAM sequence: CTT
agggaatgtgtttgaaaata

SEQ ID NO: 55827 - DNA, 20 bp, Artificial Sequence
  Description of Artificial Sequence: Synthetic oligonucleotide
  Target: SCNA; (-) strand; PAM type: YTN; PAM sequence: TTA
ccttagggaatgtgtttgaa

SEQ ID NO: 55828 - DNA, 20 bp, Artificial Sequence
  Description of Artificial Sequence: Synthetic oligonucleotide
  Target: SCNA; (-) strand; PAM type: YTN; PAM sequence: TTG
ttaccttagggaatgtgttt

SEQ ID NO: 55829 - DNA, 20 bp, Artificial Sequence
  Description of Artificial Sequence: Synthetic oligonucleotide
  Target: SCNA; (-) strand; PAM type: YTN; PAM sequence: TTT
gttaccttagggaatgtgtt

SEQ ID NO: 55830 - DNA, 20 bp, Artificial Sequence
  Description of Artificial Sequence: Synthetic oligonucleotide
  Target: SCNA; (-) strand; PAM type: YTN; PAM sequence: TTA
tatttgttaccttagggaat

SEQ ID NO: 55831 - DNA, 20 bp, Artificial Sequence
  Description of Artificial Sequence: Synthetic oligonucleotide
  Target: SCNA; (-) strand; PAM type: YTN; PAM sequence: TTA
ataattatatttgttacctt

SEQ ID NO: 55832 - DNA, 20 bp, Artificial Sequence
  Description of Artificial Sequence: Synthetic oligonucleotide
  Target: SCNA; (-) strand; PAM type: YTN; PAM sequence: TTT
aataattatatttgttacct

SEQ ID NO: 55833 - DNA, 20 bp, Artificial Sequence
  Description of Artificial Sequence: Synthetic oligonucleotide
  Target: SCNA; (-) strand; PAM type: YTN; PAM sequence: TTT
taataattatatttgttacc

SEQ ID NO: 55834 - DNA, 20 bp, Artificial Sequence
  Description of Artificial Sequence: Synthetic oligonucleotide
  Target: SCNA; (-) strand; PAM type: YTN; PAM sequence: CTT
ttaataattatatttgttac

SEQ ID NO: 55835 - DNA, 20 bp, Artificial Sequence
  Description of Artificial Sequence: Synthetic oligonucleotide
  Target: SCNA; (-) strand; PAM type: YTN; PAM sequence: TTA
ggcttttaataattatattt

SEQ ID NO: 55836 - DNA, 20 bp, Artificial Sequence
  Description of Artificial Sequence: Synthetic oligonucleotide
  Target: SCNA; (-) strand; PAM type: YTN; PAM sequence: TTA
ttaggcttttaataattata

SEQ ID NO: 55837 - DNA, 20 bp, Artificial Sequence
  Description of Artificial Sequence: Synthetic oligonucleotide
  Target: SCNA; (-) strand; PAM type: YTN; PAM sequence: TTT
attaggcttttaataattat

SEQ ID NO: 55838 - DNA, 20 bp, Artificial Sequence
  Description of Artificial Sequence: Synthetic oligonucleotide
  Target: SCNA; (-) strand; PAM type: YTN; PAM sequence: TTA
aaagatttattaggctttta

SEQ ID NO: 55839 - DNA, 20 bp, Artificial Sequence
  Description of Artificial Sequence: Synthetic oligonucleotide
  Target: SCNA; (-) strand; PAM type: YTN; PAM sequence: TTA
ttaaaagatttattaggctt

SEQ ID NO: 55840 - DNA, 20 bp, Artificial Sequence
  Description of Artificial Sequence: Synthetic oligonucleotide
  Target: SCNA; (-) strand; PAM type: YTN; PAM sequence: CTG
gattattaaaagatttatta

SEQ ID NO: 55841 - DNA, 20 bp, Artificial Sequence
  Description of Artificial Sequence: Synthetic oligonucleotide
  Target: SCNA; (-) strand; PAM type: YTN; PAM sequence: TTC
tggattattaaaagatttat

SEQ ID NO: 55842 - DNA, 20 bp, Artificial Sequence
  Description of Artificial Sequence: Synthetic oligonucleotide
  Target: SCNA; (-) strand; PAM type: YTN; PAM sequence: TTT
ctggattattaaaagattta

SEQ ID NO: 55843 - DNA, 20 bp, Artificial Sequence
  Description of Artificial Sequence: Synthetic oligonucleotide
  Target: SCNA; (-) strand; PAM type: YTN; PAM sequence: CTT
tctggattattaaaagattt

SEQ ID NO: 55844 - DNA, 20 bp, Artificial Sequence
  Description of Artificial Sequence: Synthetic oligonucleotide
  Target: SCNA; (-) strand; PAM type: YTN; PAM sequence: TTC
tttctggattattaaaagat

SEQ ID NO: 55845 - DNA, 20 bp, Artificial Sequence
  Description of Artificial Sequence: Synthetic oligonucleotide
  Target: SCNA; (-) strand; PAM type: YTN; PAM sequence: TTT
ctttctggattattaaaaga

SEQ ID NO: 55846 - DNA, 20 bp, Artificial Sequence
  Description of Artificial Sequence: Synthetic oligonucleotide
  Target: SCNA; (-) strand; PAM type: YTN; PAM sequence: CTA
aatgtttctttctggattat

SEQ ID NO: 55847 - DNA, 20 bp, Artificial Sequence
  Description of Artificial Sequence: Synthetic oligonucleotide
  Target: SCNA; (-) strand; PAM type: YTN; PAM sequence: TTC
taaatgtttctttctggatt

SEQ ID NO: 55848 - DNA, 20 bp, Artificial Sequence
  Description of Artificial Sequence: Synthetic oligonucleotide
  Target: SCNA; (-) strand; PAM type: YTN; PAM sequence: CTT
ctaaatgtttctttctggat

SEQ ID NO: 55849 - DNA, 20 bp, Artificial Sequence
  Description of Artificial Sequence: Synthetic oligonucleotide
  Target: SCNA; (-) strand; PAM type: YTN; PAM sequence: TTA
atgtcttctaaatgtttctt

SEQ ID NO: 55850 - DNA, 20 bp, Artificial Sequence
  Description of Artificial Sequence: Synthetic oligonucleotide
  Target: SCNA; (-) strand; PAM type: YTN; PAM sequence: CTT
aatgtcttctaaatgtttct

SEQ ID NO: 55851 - DNA, 20 bp, Artificial Sequence
  Description of Artificial Sequence: Synthetic oligonucleotide
  Target: SCNA; (-) strand; PAM type: YTN; PAM sequence: TTC
ttaatgtcttctaaatgttt

SEQ ID NO: 55852 - DNA, 20 bp, Artificial Sequence
  Description of Artificial Sequence: Synthetic oligonucleotide
  Target: SCNA; (-) strand; PAM type: YTN; PAM sequence: TTT
cttaatgtcttctaaatgtt

SEQ ID NO: 55853 - DNA, 20 bp, Artificial Sequence
  Description of Artificial Sequence: Synthetic oligonucleotide
  Target: SCNA; (-) strand; PAM type: YTN; PAM sequence: CTT
tcttaatgtcttctaaatgt

SEQ ID NO: 55854 - DNA, 20 bp, Artificial Sequence
  Description of Artificial Sequence: Synthetic oligonucleotide
  Target: SCNA; (-) strand; PAM type: YTN; PAM sequence: CTG
aatatgtctttcttaatgtc

SEQ ID NO: 55855 - DNA, 20 bp, Artificial Sequence
  Description of Artificial Sequence: Synthetic oligonucleotide
  Target: SCNA; (-) strand; PAM type: YTN; PAM sequence: TTC
tgaatatgtctttcttaatg

SEQ ID NO: 55856 - DNA, 20 bp, Artificial Sequence
  Description of Artificial Sequence: Synthetic oligonucleotide
  Target: SCNA; (-) strand; PAM type: YTN; PAM sequence: CTG
aattctgaatatgtctttct

SEQ ID NO: 55857 - DNA, 20 bp, Artificial Sequence
  Description of Artificial Sequence: Synthetic oligonucleotide
  Target: SCNA; (-) strand; PAM type: YTN; PAM sequence: CTG
tctgaattctgaatatgtct

SEQ ID NO: 55858 - DNA, 20 bp, Artificial Sequence
  Description of Artificial Sequence: Synthetic oligonucleotide
  Target: SCNA; (-) strand; PAM type: YTN; PAM sequence: TTC
tgtctgaattctgaatatgt

SEQ ID NO: 55859 - DNA, 20 bp, Artificial Sequence
  Description of Artificial Sequence: Synthetic oligonucleotide
  Target: SCNA; (-) strand; PAM type: YTN; PAM sequence: CTT
ctgtctgaattctgaatatg

SEQ ID NO: 55860 - DNA, 20 bp, Artificial Sequence
  Description of Artificial Sequence: Synthetic oligonucleotide
  Target: SCNA; (-) strand; PAM type: YTN; PAM sequence: TTA
tgagcttctgtctgaattct

SEQ ID NO: 55861 - DNA, 20 bp, Artificial Sequence
  Description of Artificial Sequence: Synthetic oligonucleotide
  Target: SCNA; (-) strand; PAM type: YTN; PAM sequence: TTT
atgagcttctgtctgaattc

SEQ ID NO: 55862 - DNA, 20 bp, Artificial Sequence
  Description of Artificial Sequence: Synthetic oligonucleotide
  Target: SCNA; (-) strand; PAM type: YTN; PAM sequence: TTT
tatgagcttctgtctgaatt

SEQ ID NO: 55863 - DNA, 20 bp, Artificial Sequence
  Description of Artificial Sequence: Synthetic oligonucleotide
  Target: SCNA; (-) strand; PAM type: YTN; PAM sequence: CTT
ttatgagcttctgtctgaat

SEQ ID NO: 55864 - DNA, 20 bp, Artificial Sequence
  Description of Artificial Sequence: Synthetic oligonucleotide
  Target: SCNA; (-) strand; PAM type: YTN; PAM sequence: TTA
gcttttatgagcttctgtct

SEQ ID NO: 55865 - DNA, 20 bp, Artificial Sequence
  Description of Artificial Sequence: Synthetic oligonucleotide
  Target: SCNA; (-) strand; PAM type: YTN; PAM sequence: TTA
tgttagcttttatgagcttc

SEQ ID NO: 55866 - DNA, 20 bp, Artificial Sequence
  Description of Artificial Sequence: Synthetic oligonucleotide
  Target: SCNA; (-) strand; PAM type: YTN; PAM sequence: TTT
atgttagcttttatgagctt

SEQ ID NO: 55867 - DNA, 20 bp, Artificial Sequence
  Description of Artificial Sequence: Synthetic oligonucleotide
  Target: SCNA; (-) strand; PAM type: YTN; PAM sequence: TTT
tatgttagcttttatgagct

SEQ ID NO: 55868 - DNA, 20 bp, Artificial Sequence
  Description of Artificial Sequence: Synthetic oligonucleotide
  Target: SCNA; (-) strand; PAM type: YTN; PAM sequence: TTT
ttatgttagcttttatgagc

SEQ ID NO: 55869 - DNA, 20 bp, Artificial Sequence
  Description of Artificial Sequence: Synthetic oligonucleotide
  Target: SCNA; (-) strand; PAM type: YTN; PAM sequence: CTT
tttatgttagcttttatgag

SEQ ID NO: 55870 - DNA, 20 bp, Artificial Sequence
  Description of Artificial Sequence: Synthetic oligonucleotide
  Target: SCNA; (-) strand; PAM type: YTN; PAM sequence: CTG
ctttttatgttagcttttat

SEQ ID NO: 55871 - DNA, 20 bp, Artificial Sequence
  Description of Artificial Sequence: Synthetic oligonucleotide
  Target: SCNA; (-) strand; PAM type: YTN; PAM sequence: TTA
acctgctttttatgttagct

SEQ ID NO: 55872 - DNA, 20 bp, Artificial Sequence
  Description of Artificial Sequence: Synthetic oligonucleotide
  Target: SCNA; (-) strand; PAM type: YTN; PAM sequence: TTT
aacctgctttttatgttagc

SEQ ID NO: 55873 - DNA, 20 bp, Artificial Sequence
  Description of Artificial Sequence: Synthetic oligonucleotide
  Target: SCNA; (-) strand; PAM type: YTN; PAM sequence: TTT
taacctgctttttatgttag

SEQ ID NO: 55874 - DNA, 20 bp, Artificial Sequence
  Description of Artificial Sequence: Synthetic oligonucleotide
  Target: SCNA; (-) strand; PAM type: YTN; PAM sequence: TTT
ttaacctgctttttatgtta

SEQ ID NO: 55875 - DNA, 20 bp, Artificial Sequence
  Description of Artificial Sequence: Synthetic oligonucleotide
  Target: SCNA; (-) strand; PAM type: YTN; PAM sequence: TTG
atttttaacctgctttttat

SEQ ID NO: 55876 - DNA, 20 bp, Artificial Sequence
  Description of Artificial Sequence: Synthetic oligonucleotide
  Target: SCNA; (-) strand; PAM type: YTN; PAM sequence: TTG
tagaaattgatttttaacct

SEQ ID NO: 55877 - DNA, 20 bp, Artificial Sequence
  Description of Artificial Sequence: Synthetic oligonucleotide
  Target: SCNA; (-) strand; PAM type: YTN; PAM sequence: CTT
gtagaaattgatttttaacc

SEQ ID NO: 55878 - DNA, 20 bp, Artificial Sequence
  Description of Artificial Sequence: Synthetic oligonucleotide
  Target: SCNA; (-) strand; PAM type: YTN; PAM sequence: TTC
ttgtagaaattgatttttaa

SEQ ID NO: 55879 - DNA, 20 bp, Artificial Sequence
  Description of Artificial Sequence: Synthetic oligonucleotide
  Target: SCNA; (-) strand; PAM type: YTN; PAM sequence: TTT
cttgtagaaattgattttta

SEQ ID NO: 55880 - DNA, 20 bp, Artificial Sequence
  Description of Artificial Sequence: Synthetic oligonucleotide
  Target: SCNA; (-) strand; PAM type: YTN; PAM sequence: TTT
tcttgtagaaattgattttt

SEQ ID NO: 55881 - DNA, 20 bp, Artificial Sequence
  Description of Artificial Sequence: Synthetic oligonucleotide
  Target: SCNA; (-) strand; PAM type: YTN; PAM sequence: TTT
ttcttgtagaaattgatttt

SEQ ID NO: 55882 - DNA, 20 bp, Artificial Sequence
  Description of Artificial Sequence: Synthetic oligonucleotide
  Target: SCNA; (-) strand; PAM type: YTN; PAM sequence: CTA
tatttttcttgtagaaattg

SEQ ID NO: 55883 - DNA, 20 bp, Artificial Sequence
  Description of Artificial Sequence: Synthetic oligonucleotide
  Target: SCNA; (-) strand; PAM type: YTN; PAM sequence: TTA
tatgtctatatttttcttgt

SEQ ID NO: 55884 - DNA, 20 bp, Artificial Sequence
  Description of Artificial Sequence: Synthetic oligonucleotide
  Target: SCNA; (-) strand; PAM type: YTN; PAM sequence: TTG
attatatgtctatatttttc

SEQ ID NO: 55885 - DNA, 20 bp, Artificial Sequence
  Description of Artificial Sequence: Synthetic oligonucleotide
  Target: SCNA; (-) strand; PAM type: YTN; PAM sequence: TTT
gattatatgtctatattttt

SEQ ID NO: 55886 - DNA, 20 bp, Artificial Sequence
  Description of Artificial Sequence: Synthetic oligonucleotide
  Target: SCNA; (-) strand; PAM type: YTN; PAM sequence: TTG
tttgattatatgtctatatt

SEQ ID NO: 55887 - DNA, 20 bp, Artificial Sequence
  Description of Artificial Sequence: Synthetic oligonucleotide
  Target: SCNA; (-) strand; PAM type: YTN; PAM sequence: TTT
gtttgattatatgtctatat

SEQ ID NO: 55888 - DNA, 20 bp, Artificial Sequence
  Description of Artificial Sequence: Synthetic oligonucleotide
  Target: SCNA; (-) strand; PAM type: YTN; PAM sequence: TTT
tgtttgattatatgtctata

SEQ ID NO: 55889 - DNA, 20 bp, Artificial Sequence
  Description of Artificial Sequence: Synthetic oligonucleotide
  Target: SCNA; (-) strand; PAM type: YTN; PAM sequence: CTT
ttgtttgattatatgtctat

SEQ ID NO: 55890 - DNA, 20 bp, Artificial Sequence
  Description of Artificial Sequence: Synthetic oligonucleotide
  Target: SCNA; (-) strand; PAM type: YTN; PAM sequence: TTC
ccccttttgtttgattatat

SEQ ID NO: 55891 - DNA, 20 bp, Artificial Sequence
  Description of Artificial Sequence: Synthetic oligonucleotide
  Target: SCNA; (-) strand; PAM type: YTN; PAM sequence: TTT
cccccttttgtttgattata

SEQ ID NO: 55892 - DNA, 20 bp, Artificial Sequence
  Description of Artificial Sequence: Synthetic oligonucleotide
  Target: SCNA; (-) strand; PAM type: YTN; PAM sequence: TTA
tgtatttcccccttttgttt

SEQ ID NO: 55893 - DNA, 20 bp, Artificial Sequence
  Description of Artificial Sequence: Synthetic oligonucleotide
  Target: SCNA; (-) strand; PAM type: YTN; PAM sequence: TTG
ttatgtatttcccccttttg

SEQ ID NO: 55894 - DNA, 20 bp, Artificial Sequence
  Description of Artificial Sequence: Synthetic oligonucleotide
  Target: SCNA; (-) strand; PAM type: YTN; PAM sequence: TTT
gttatgtatttccccctttt

SEQ ID NO: 55895 - DNA, 20 bp, Artificial Sequence
  Description of Artificial Sequence: Synthetic oligonucleotide
  Target: SCNA; (-) strand; PAM type: YTN; PAM sequence: CTA
gtgtttgttatgtatttccc

SEQ ID NO: 55896 - DNA, 20 bp, Artificial Sequence
  Description of Artificial Sequence: Synthetic oligonucleotide
  Target: SCNA; (-) strand; PAM type: YTN; PAM sequence: TTC
gtctagtgtttgttatgtat

SEQ ID NO: 55897 - DNA, 20 bp, Artificial Sequence
  Description of Artificial Sequence: Synthetic oligonucleotide
  Target: SCNA; (-) strand; PAM type: YTN; PAM sequence: TTG
cattcgtctagtgtttgtta

SEQ ID NO: 55898 - DNA, 20 bp, Artificial Sequence
  Description of Artificial Sequence: Synthetic oligonucleotide
  Target: SCNA; (-) strand; PAM type: YTN; PAM sequence: TTT
gcattcgtctagtgtttgtt

SEQ ID NO: 55899 - DNA, 20 bp, Artificial Sequence
  Description of Artificial Sequence: Synthetic oligonucleotide
  Target: SCNA; (-) strand; PAM type: YTN; PAM sequence: TTG
aaaatttgcattcgtctagt

SEQ ID NO: 55900 - DNA, 20 bp, Artificial Sequence
  Description of Artificial Sequence: Synthetic oligonucleotide
  Target: SCNA; (-) strand; PAM type: YTN; PAM sequence: TTT
gaaaatttgcattcgtctag

SEQ ID NO: 55901 - DNA, 20 bp, Artificial Sequence
  Description of Artificial Sequence: Synthetic oligonucleotide
  Target: SCNA; (-) strand; PAM type: YTN; PAM sequence: CTT
tgaaaatttgcattcgtcta

SEQ ID NO: 55902 - DNA, 20 bp, Artificial Sequence
  Description of Artificial Sequence: Synthetic oligonucleotide
  Target: SCNA; (-) strand; PAM type: YTN; PAM sequence: TTG
gtaaaatatagctttgaaaa

SEQ ID NO: 55903 - DNA, 20 bp, Artificial Sequence
  Description of Artificial Sequence: Synthetic oligonucleotide
  Target: SCNA; (-) strand; PAM type: YTN; PAM sequence: TTT
ggtaaaatatagctttgaaa

SEQ ID NO: 55904 - DNA, 20 bp, Artificial Sequence
  Description of Artificial Sequence: Synthetic oligonucleotide
  Target: SCNA; (-) strand; PAM type: YTN; PAM sequence: TTA
aaatttggtaaaatatagct

SEQ ID NO: 55905 - DNA, 20 bp, Artificial Sequence
  Description of Artificial Sequence: Synthetic oligonucleotide
  Target: SCNA; (-) strand; PAM type: YTN; PAM sequence: TTT
aaaatttggtaaaatatagc

SEQ ID NO: 55906 - DNA, 20 bp, Artificial Sequence
  Description of Artificial Sequence: Synthetic oligonucleotide
  Target: SCNA; (-) strand; PAM type: YTN; PAM sequence: TTT
taaaatttggtaaaatatag

SEQ ID NO: 55907 - DNA, 20 bp, Artificial Sequence
  Description of Artificial Sequence: Synthetic oligonucleotide
  Target: SCNA; (-) strand; PAM type: YTN; PAM sequence: CTT
ttaaaatttggtaaaatata

SEQ ID NO: 55908 - DNA, 20 bp, Artificial Sequence
  Description of Artificial Sequence: Synthetic oligonucleotide
  Target: SCNA; (-) strand; PAM type: YTN; PAM sequence: TTA
acttttaaaatttggtaaaa

SEQ ID NO: 55909 - DNA, 20 bp, Artificial Sequence
  Description of Artificial Sequence: Synthetic oligonucleotide
  Target: SCNA; (-) strand; PAM type: YTN; PAM sequence: TTA
aagttaacttttaaaatttg

SEQ ID NO: 55910 - DNA, 20 bp, Artificial Sequence
  Description of Artificial Sequence: Synthetic oligonucleotide
  Target: SCNA; (-) strand; PAM type: YTN; PAM sequence: TTT
aaagttaacttttaaaattt

SEQ ID NO: 55911 - DNA, 20 bp, Artificial Sequence
  Description of Artificial Sequence: Synthetic oligonucleotide
  Target: SCNA; (-) strand; PAM type: YTN; PAM sequence: TTT
taaagttaacttttaaaatt

SEQ ID NO: 55912 - DNA, 20 bp, Artificial Sequence
  Description of Artificial Sequence: Synthetic oligonucleotide
  Target: SCNA; (-) strand; PAM type: YTN; PAM sequence: CTT
ttaaagttaacttttaaaat

SEQ ID NO: 55913 - DNA, 20 bp, Artificial Sequence
  Description of Artificial Sequence: Synthetic oligonucleotide
  Target: SCNA; (-) strand; PAM type: YTN; PAM sequence: TTC
ttttaaagttaacttttaaa

SEQ ID NO: 55914 - DNA, 20 bp, Artificial Sequence
  Description of Artificial Sequence: Synthetic oligonucleotide
  Target: SCNA; (-) strand; PAM type: YTN; PAM sequence: CTT
cttttaaagttaacttttaa

SEQ ID NO: 55915 - DNA, 20 bp, Artificial Sequence
  Description of Artificial Sequence: Synthetic oligonucleotide
  Target: SCNA; (-) strand; PAM type: YTN; PAM sequence: TTC
ttcttttaaagttaactttt

SEQ ID NO: 55916 - DNA, 20 bp, Artificial Sequence
  Description of Artificial Sequence: Synthetic oligonucleotide
  Target: SCNA; (-) strand; PAM type: YTN; PAM sequence: TTA
attcttcttttaaagttaac

SEQ ID NO: 55917 - DNA, 20 bp, Artificial Sequence
  Description of Artificial Sequence: Synthetic oligonucleotide
  Target: SCNA; (-) strand; PAM type: YTN; PAM sequence: CTG
ccaccaaggttaattcttct

SEQ ID NO: 55918 - DNA, 20 bp, Artificial Sequence
  Description of Artificial Sequence: Synthetic oligonucleotide
  Target: SCNA; (-) strand; PAM type: YTN; PAM sequence: TTG
ctgccaccaaggttaattct

SEQ ID NO: 55919 - DNA, 20 bp, Artificial Sequence
  Description of Artificial Sequence: Synthetic oligonucleotide
  Target: SCNA; (-) strand; PAM type: YTN; PAM sequence: TTT
gctgccaccaaggttaattc

SEQ ID NO: 55920 - DNA, 20 bp, Artificial Sequence
  Description of Artificial Sequence: Synthetic oligonucleotide
  Target: SCNA; (-) strand; PAM type: YTN; PAM sequence: TTT
tgctgccaccaaggttaatt

SEQ ID NO: 55921 - DNA, 20 bp, Artificial Sequence
  Description of Artificial Sequence: Synthetic oligonucleotide
  Target: SCNA; (-) strand; PAM type: YTN; PAM sequence: TTG
aacccaaatcagccagacac

SEQ ID NO: 55922 - DNA, 20 bp, Artificial Sequence
  Description of Artificial Sequence: Synthetic oligonucleotide
  Target: SCNA; (-) strand; PAM type: YTN; PAM sequence: TTA
attgaacccaaatcagccag

SEQ ID NO: 55923 - DNA, 20 bp, Artificial Sequence
  Description of Artificial Sequence: Synthetic oligonucleotide
  Target: SCNA; (-) strand; PAM type: YTN; PAM sequence: TTT
aattgaacccaaatcagcca

SEQ ID NO: 55924 - DNA, 20 bp, Artificial Sequence
  Description of Artificial Sequence: Synthetic oligonucleotide
  Target: SCNA; (-) strand; PAM type: YTN; PAM sequence: TTT
taattgaacccaaatcagcc

SEQ ID NO: 55925 - DNA, 20 bp, Artificial Sequence
  Description of Artificial Sequence: Synthetic oligonucleotide
  Target: SCNA; (-) strand; PAM type: YTN; PAM sequence: CTA
cccaagattttaattgaacc

SEQ ID NO: 55926 - DNA, 20 bp, Artificial Sequence
  Description of Artificial Sequence: Synthetic oligonucleotide
  Target: SCNA; (-) strand; PAM type: YTN; PAM sequence: CTC
tacccaagattttaattgaa

SEQ ID NO: 55927 - DNA, 20 bp, Artificial Sequence
  Description of Artificial Sequence: Synthetic oligonucleotide
  Target: SCNA; (-) strand; PAM type: YTN; PAM sequence: TTC
tctacccaagattttaattg

SEQ ID NO: 55928 - DNA, 20 bp, Artificial Sequence
  Description of Artificial Sequence: Synthetic oligonucleotide
  Target: SCNA; (-) strand; PAM type: YTN; PAM sequence: TTA
agtgttctctacccaagatt

SEQ ID NO: 55929 - DNA, 20 bp, Artificial Sequence
  Description of Artificial Sequence: Synthetic oligonucleotide
  Target: SCNA; (-) strand; PAM type: YTN; PAM sequence: CTT
aagtgttctctacccaagat

SEQ ID NO: 55930 - DNA, 20 bp, Artificial Sequence
  Description of Artificial Sequence: Synthetic oligonucleotide
  Target: SCNA; (-) strand; PAM type: YTN; PAM sequence: TTC
acttaagtgttctctaccca

SEQ ID NO: 55931 - DNA, 20 bp, Artificial Sequence
  Description of Artificial Sequence: Synthetic oligonucleotide
  Target: SCNA; (-) strand; PAM type: YTN; PAM sequence: TTT
cacttaagtgttctctaccc

SEQ ID NO: 55932 - DNA, 20 bp, Artificial Sequence
  Description of Artificial Sequence: Synthetic oligonucleotide
  Target: SCNA; (-) strand; PAM type: YTN; PAM sequence: TTT
tcacttaagtgttctctacc

SEQ ID NO: 55933 - DNA, 20 bp, Artificial Sequence
  Description of Artificial Sequence: Synthetic oligonucleotide
  Target: SCNA; (-) strand; PAM type: YTN; PAM sequence: CTA
tattttcacttaagtgttct

SEQ ID NO: 55934 - DNA, 20 bp, Artificial Sequence
  Description of Artificial Sequence: Synthetic oligonucleotide
  Target: SCNA; (-) strand; PAM type: YTN; PAM sequence: TTG
ccctatattttcacttaagt

SEQ ID NO: 55935 - DNA, 20 bp, Artificial Sequence
  Description of Artificial Sequence: Synthetic oligonucleotide
  Target: SCNA; (-) strand; PAM type: YTN; PAM sequence: TTT
gccctatattttcacttaag

SEQ ID NO: 55936 - DNA, 20 bp, Artificial Sequence
  Description of Artificial Sequence: Synthetic oligonucleotide
  Target: SCNA; (-) strand; PAM type: YTN; PAM sequence: TTT
tgccctatattttcacttaa

SEQ ID NO: 55937 - DNA, 20 bp, Artificial Sequence
  Description of Artificial Sequence: Synthetic oligonucleotide
  Target: SCNA; (-) strand; PAM type: YTN; PAM sequence: TTT
ttgccctatattttcactta

SEQ ID NO: 55938 - DNA, 20 bp, Artificial Sequence
  Description of Artificial Sequence: Synthetic oligonucleotide
  Target: SCNA; (-) strand; PAM type: YTN; PAM sequence: TTA
tttttgccctatattttcac

SEQ ID NO: 55939 - DNA, 20 bp, Artificial Sequence
  Description of Artificial Sequence: Synthetic oligonucleotide
  Target: SCNA; (-) strand; PAM type: YTN; PAM sequence: TTG
tatggaattatttttgccct

SEQ ID NO: 55940 - DNA, 20 bp, Artificial Sequence
  Description of Artificial Sequence: Synthetic oligonucleotide
  Target: SCNA; (-) strand; PAM type: YTN; PAM sequence: TTT
gtatggaattatttttgccc

SEQ ID NO: 55941 - DNA, 20 bp, Artificial Sequence
  Description of Artificial Sequence: Synthetic oligonucleotide
  Target: SCNA; (-) strand; PAM type: YTN; PAM sequence: TTT
tgtatggaattatttttgcc

SEQ ID NO: 55942 - DNA, 20 bp, Artificial Sequence
  Description of Artificial Sequence: Synthetic oligonucleotide
  Target: SCNA; (-) strand; PAM type: YTN; PAM sequence: TTA
tattttgtatggaattattt

SEQ ID NO: 55943 - DNA, 20 bp, Artificial Sequence
  Description of Artificial Sequence: Synthetic oligonucleotide
  Target: SCNA; (-) strand; PAM type: YTN; PAM sequence: TTC
attatattttgtatggaatt

SEQ ID NO: 55944 - DNA, 20 bp, Artificial Sequence
  Description of Artificial Sequence: Synthetic oligonucleotide
  Target: SCNA; (-) strand; PAM type: YTN; PAM sequence: TTA
ttcattatattttgtatgga

SEQ ID NO: 55945 - DNA, 20 bp, Artificial Sequence
  Description of Artificial Sequence: Synthetic oligonucleotide
  Target: SCNA; (-) strand; PAM type: YTN; PAM sequence: TTT
attcattatattttgtatgg

SEQ ID NO: 55946 - DNA, 20 bp, Artificial Sequence
  Description of Artificial Sequence: Synthetic oligonucleotide
  Target: SCNA; (-) strand; PAM type: YTN; PAM sequence: CTA
tttattcattatattttgta

SEQ ID NO: 55947 - DNA, 20 bp, Artificial Sequence
  Description of Artificial Sequence: Synthetic oligonucleotide
  Target: SCNA; (-) strand; PAM type: YTN; PAM sequence: CTC
tatttattcattatattttg

SEQ ID NO: 55948 - DNA, 20 bp, Artificial Sequence
  Description of Artificial Sequence: Synthetic oligonucleotide
  Target: SCNA; (-) strand; PAM type: YTN; PAM sequence: TTG
ctctatttattcattatatt

SEQ ID NO: 55949 - DNA, 20 bp, Artificial Sequence
  Description of Artificial Sequence: Synthetic oligonucleotide
  Target: SCNA; (-) strand; PAM type: YTN; PAM sequence: TTT
gctctatttattcattatat

SEQ ID NO: 55950 - DNA, 20 bp, Artificial Sequence
  Description of Artificial Sequence: Synthetic oligonucleotide
  Target: SCNA; (-) strand; PAM type: YTN; PAM sequence: TTT
tgctctatttattcattata

SEQ ID NO: 55951 - DNA, 20 bp, Artificial Sequence
  Description of Artificial Sequence: Synthetic oligonucleotide
  Target: SCNA; (-) strand; PAM type: YTN; PAM sequence: TTA
tatgcgaaattttgctctat

SEQ ID NO: 55952 - DNA, 20 bp, Artificial Sequence
  Description of Artificial Sequence: Synthetic oligonucleotide
  Target: SCNA; (-) strand; PAM type: YTN; PAM sequence: TTG
gttatatgcgaaattttgct

SEQ ID NO: 55953 - DNA, 20 bp, Artificial Sequence
  Description of Artificial Sequence: Synthetic oligonucleotide
  Target: SCNA; (-) strand; PAM type: YTN; PAM sequence: TTT
ggttatatgcgaaattttgc

SEQ ID NO: 55954 - DNA, 20 bp, Artificial Sequence
  Description of Artificial Sequence: Synthetic oligonucleotide
  Target: SCNA; (-) strand; PAM type: YTN; PAM sequence: TTG
gaatttggttatatgcgaaa

SEQ ID NO: 55955 - DNA, 20 bp, Artificial Sequence
  Description of Artificial Sequence: Synthetic oligonucleotide
  Target: SCNA; (-) strand; PAM type: YTN; PAM sequence: TTA
aaatgttggaatttggttat

SEQ ID NO: 55956 - DNA, 20 bp, Artificial Sequence
  Description of Artificial Sequence: Synthetic oligonucleotide
  Target: SCNA; (-) strand; PAM type: YTN; PAM sequence: CTT
aaaatgttggaatttggtta

SEQ ID NO: 55957 - DNA, 20 bp, Artificial Sequence
  Description of Artificial Sequence: Synthetic oligonucleotide
  Target: SCNA; (-) strand; PAM type: YTN; PAM sequence: TTC
cttaaaatgttggaatttgg

SEQ ID NO: 55958 - DNA, 20 bp, Artificial Sequence
  Description of Artificial Sequence: Synthetic oligonucleotide
  Target: SCNA; (-) strand; PAM type: YTN; PAM sequence: CTT
ccttaaaatgttggaatttg

SEQ ID NO: 55959 - DNA, 20 bp, Artificial Sequence
  Description of Artificial Sequence: Synthetic oligonucleotide
  Target: SCNA; (-) strand; PAM type: YTN; PAM sequence: TTA
ataccttccttaaaatgttg

SEQ ID NO: 55960 - DNA, 20 bp, Artificial Sequence
  Description of Artificial Sequence: Synthetic oligonucleotide
  Target: SCNA; (-) strand; PAM type: YTN; PAM sequence: TTG
aaattaataccttccttaaa

SEQ ID NO: 55961 - DNA, 20 bp, Artificial Sequence
  Description of Artificial Sequence: Synthetic oligonucleotide
  Target: SCNA; (-) strand; PAM type: YTN; PAM sequence: CTT
gaaattaataccttccttaa

SEQ ID NO: 55962 - DNA, 20 bp, Artificial Sequence
  Description of Artificial Sequence: Synthetic oligonucleotide
  Target: SCNA; (-) strand; PAM type: YTN; PAM sequence: TTA
gcttgaaattaataccttcc

SEQ ID NO: 55963 - DNA, 20 bp, Artificial Sequence
  Description of Artificial Sequence: Synthetic oligonucleotide
  Target: SCNA; (-) strand; PAM type: YTN; PAM sequence: TTG
gatattagcttgaaattaat

SEQ ID NO: 55964 - DNA, 20 bp, Artificial Sequence
  Description of Artificial Sequence: Synthetic oligonucleotide
  Target: SCNA; (-) strand; PAM type: YTN; PAM sequence: TTT
ggatattagcttgaaattaa

SEQ ID NO: 55965 - DNA, 20 bp, Artificial Sequence
  Description of Artificial Sequence: Synthetic oligonucleotide
  Target: SCNA; (-) strand; PAM type: YTN; PAM sequence: TTA
ccagacaaatttggatatta

SEQ ID NO: 55966 - DNA, 20 bp, Artificial Sequence
  Description of Artificial Sequence: Synthetic oligonucleotide
  Target: SCNA; (-) strand; PAM type: YTN; PAM sequence: CTT
accagacaaatttggatatt

SEQ ID NO: 55967 - DNA, 20 bp, Artificial Sequence
  Description of Artificial Sequence: Synthetic oligonucleotide
  Target: SCNA; (-) strand; PAM type: YTN; PAM sequence: TTC
ttaccagacaaatttggata

SEQ ID NO: 55968 - DNA, 20 bp, Artificial Sequence
  Description of Artificial Sequence: Synthetic oligonucleotide
  Target: SCNA; (-) strand; PAM type: YTN; PAM sequence: TTT
cttaccagacaaatttggat

SEQ ID NO: 55969 - DNA, 20 bp, Artificial Sequence
  Description of Artificial Sequence: Synthetic oligonucleotide
  Target: SCNA; (-) strand; PAM type: YTN; PAM sequence: TTT
tcttaccagacaaatttgga

SEQ ID NO: 55970 - DNA, 20 bp, Artificial Sequence
  Description of Artificial Sequence: Synthetic oligonucleotide
  Target: SCNA; (-) strand; PAM type: YTN; PAM sequence: TTT
ttcttaccagacaaatttgg

SEQ ID NO: 55971 - DNA, 20 bp, Artificial Sequence
  Description of Artificial Sequence: Synthetic oligonucleotide
  Target: SCNA; (-) strand; PAM type: YTN; PAM sequence: CTT
tttcttaccagacaaatttg

SEQ ID NO: 55972 - DNA, 20 bp, Artificial Sequence
  Description of Artificial Sequence: Synthetic oligonucleotide
  Target: SCNA; (-) strand; PAM type: YTN; PAM sequence: CTC
acctttttcttaccagacaa

SEQ ID NO: 55973 - DNA, 20 bp, Artificial Sequence
  Description of Artificial Sequence: Synthetic oligonucleotide
  Target: SCNA; (-) strand; PAM type: YTN; PAM sequence: CTA
tcatagggatcatgctcacc

SEQ ID NO: 55974 - DNA, 20 bp, Artificial Sequence
  Description of Artificial Sequence: Synthetic oligonucleotide
  Target: SCNA; (-) strand; PAM type: YTN; PAM sequence: CTC
acaaaagtagaagtaatggc

SEQ ID NO: 55975 - DNA, 20 bp, Artificial Sequence
  Description of Artificial Sequence: Synthetic oligonucleotide
  Target: SCNA; (-) strand; PAM type: YTN; PAM sequence: CTG
cctcacaaaagtagaagtaa

SEQ ID NO: 55976 - DNA, 20 bp, Artificial Sequence
  Description of Artificial Sequence: Synthetic oligonucleotide
  Target: SCNA; (-) strand; PAM type: YTN; PAM sequence: TTC
tgcctcacaaaagtagaagt

SEQ ID NO: 55977 - DNA, 20 bp, Artificial Sequence
  Description of Artificial Sequence: Synthetic oligonucleotide
  Target: SCNA; (-) strand; PAM type: YTN; PAM sequence: CTA
ttctgcctcacaaaagtaga

SEQ ID NO: 55978 - DNA, 20 bp, Artificial Sequence
  Description of Artificial Sequence: Synthetic oligonucleotide
  Target: SCNA; (-) strand; PAM type: YTN; PAM sequence: CTG
tcccacctattctgcctcac

SEQ ID NO: 55979 - DNA, 20 bp, Artificial Sequence
  Description of Artificial Sequence: Synthetic oligonucleotide
  Target: SCNA; (-) strand; PAM type: YTN; PAM sequence: CTA
gagctgtcccacctattctg

SEQ ID NO: 55980 - DNA, 20 bp, Artificial Sequence
  Description of Artificial Sequence: Synthetic oligonucleotide
  Target: SCNA; (-) strand; PAM type: YTN; PAM sequence: TTG
atagaataaaatcagaagag

SEQ ID NO: 55981 - DNA, 20 bp, Artificial Sequence
  Description of Artificial Sequence: Synthetic oligonucleotide
  Target: SCNA; (-) strand; PAM type: YTN; PAM sequence: TTA
taattgatagaataaaatca

SEQ ID NO: 55982 - DNA, 20 bp, Artificial Sequence
  Description of Artificial Sequence: Synthetic oligonucleotide
  Target: SCNA; (-) strand; PAM type: YTN; PAM sequence: CTT
ataattgatagaataaaatc

SEQ ID NO: 55983 - DNA, 20 bp, Artificial Sequence
  Description of Artificial Sequence: Synthetic oligonucleotide
  Target: SCNA; (-) strand; PAM type: YTN; PAM sequence: CTC
ttataattgatagaataaaa

SEQ ID NO: 55984 - DNA, 20 bp, Artificial Sequence
  Description of Artificial Sequence: Synthetic oligonucleotide
  Target: SCNA; (-) strand; PAM type: YTN; PAM sequence: CTC
agacctcttataattgatag

SEQ ID NO: 55985 - DNA, 20 bp, Artificial Sequence
  Description of Artificial Sequence: Synthetic oligonucleotide
  Target: SCNA; (-) strand; PAM type: YTN; PAM sequence: TTC
tcagacctcttataattgat

SEQ ID NO: 55986 - DNA, 20 bp, Artificial Sequence
  Description of Artificial Sequence: Synthetic oligonucleotide
  Target: SCNA; (-) strand; PAM type: YTN; PAM sequence: CTG
ttctcagacctcttataatt

SEQ ID NO: 55987 - DNA, 20 bp, Artificial Sequence
  Description of Artificial Sequence: Synthetic oligonucleotide
  Target: SCNA; (-) strand; PAM type: YTN; PAM sequence: TTC
ctgttctcagacctcttata

SEQ ID NO: 55988 - DNA, 20 bp, Artificial Sequence
  Description of Artificial Sequence: Synthetic oligonucleotide
  Target: SCNA; (-) strand; PAM type: YTN; PAM sequence: TTT
cctgttctcagacctcttat

SEQ ID NO: 55989 - DNA, 20 bp, Artificial Sequence
  Description of Artificial Sequence: Synthetic oligonucleotide
  Target: SCNA; (-) strand; PAM type: YTN; PAM sequence: TTC
atttcctgttctcagacctc

SEQ ID NO: 55990 - DNA, 20 bp, Artificial Sequence
  Description of Artificial Sequence: Synthetic oligonucleotide
  Target: SCNA; (-) strand; PAM type: YTN; PAM sequence: TTT
catttcctgttctcagacct

SEQ ID NO: 55991 - DNA, 20 bp, Artificial Sequence
  Description of Artificial Sequence: Synthetic oligonucleotide
  Target: SCNA; (-) strand; PAM type: YTN; PAM sequence: TTT
tcatttcctgttctcagacc

SEQ ID NO: 55992 - DNA, 20 bp, Artificial Sequence
  Description of Artificial Sequence: Synthetic oligonucleotide
  Target: SCNA; (-) strand; PAM type: YTN; PAM sequence: TTT
ttcatttcctgttctcagac

SEQ ID NO: 55993 - DNA, 20 bp, Artificial Sequence
  Description of Artificial Sequence: Synthetic oligonucleotide
  Target: SCNA; (-) strand; PAM type: YTN; PAM sequence: TTT
tttcatttcctgttctcaga

SEQ ID NO: 55994 - DNA, 20 bp, Artificial Sequence
  Description of Artificial Sequence: Synthetic oligonucleotide
  Target: SCNA; (-) strand; PAM type: YTN; PAM sequence: CTT
ttttcatttcctgttctcag

SEQ ID NO: 55995 - DNA, 20 bp, Artificial Sequence
  Description of Artificial Sequence: Synthetic oligonucleotide
  Target: SCNA; (-) strand; PAM type: YTN; PAM sequence: TTG
agggtcatagcttttttcat

SEQ ID NO: 55996 - DNA, 20 bp, Artificial Sequence
  Description of Artificial Sequence: Synthetic oligonucleotide
  Target: SCNA; (-) strand; PAM type: YTN; PAM sequence: CTT
gagggtcatagcttttttca

SEQ ID NO: 55997 - DNA, 20 bp, Artificial Sequence
  Description of Artificial Sequence: Synthetic oligonucleotide
  Target: SCNA; (-) strand; PAM type: YTN; PAM sequence: CTA
gatggcttgagggtcatagc

SEQ ID NO: 55998 - DNA, 20 bp, Artificial Sequence
  Description of Artificial Sequence: Synthetic oligonucleotide
  Target: SCNA; (-) strand; PAM type: YTN; PAM sequence: TTG
agctagatggcttgagggtc

SEQ ID NO: 55999 - DNA, 20 bp, Artificial Sequence
  Description of Artificial Sequence: Synthetic oligonucleotide
  Target: SCNA; (-) strand; PAM type: YTN; PAM sequence: TTT
gagctagatggcttgagggt

SEQ ID NO: 56000 - DNA, 20 bp, Artificial Sequence
  Description of Artificial Sequence: Synthetic oligonucleotide
  Target: SCNA; (-) strand; PAM type: YTN; PAM sequence: CTA
gatgccagtgaaatcgtttg

SEQ ID NO: 56001 - DNA, 20 bp, Artificial Sequence
  Description of Artificial Sequence: Synthetic oligonucleotide
  Target: SCNA; (-) strand; PAM type: YTN; PAM sequence: TTC
cccaatccaaaatatatcag

SEQ ID NO: 56002 - DNA, 20 bp, Artificial Sequence
  Description of Artificial Sequence: Synthetic oligonucleotide
  Target: SCNA; (-) strand; PAM type: YTN; PAM sequence: CTT
ccccaatccaaaatatatca

SEQ ID NO: 56003 - DNA, 20 bp, Artificial Sequence
  Description of Artificial Sequence: Synthetic oligonucleotide
  Target: SCNA; (-) strand; PAM type: YTN; PAM sequence: CTC
ttccccaatccaaaatatat

SEQ ID NO: 56004 - DNA, 20 bp, Artificial Sequence
  Description of Artificial Sequence: Synthetic oligonucleotide
  Target: SCNA; (-) strand; PAM type: YTN; PAM sequence: TTA
ctcttccccaatccaaaata

SEQ ID NO: 56005 - DNA, 20 bp, Artificial Sequence
  Description of Artificial Sequence: Synthetic oligonucleotide
  Target: SCNA; (-) strand; PAM type: YTN; PAM sequence: TTT
actcttccccaatccaaaat

SEQ ID NO: 56006 - DNA, 20 bp, Artificial Sequence
  Description of Artificial Sequence: Synthetic oligonucleotide
  Target: SCNA; (-) strand; PAM type: YTN; PAM sequence: CTG
tgtttactcttccccaatcc

SEQ ID NO: 56007 - DNA, 20 bp, Artificial Sequence
  Description of Artificial Sequence: Synthetic oligonucleotide
  Target: SCNA; (-) strand; PAM type: YTN; PAM sequence: TTG
cctgtgtttactcttcccca

SEQ ID NO: 56008 - DNA, 20 bp, Artificial Sequence
  Description of Artificial Sequence: Synthetic oligonucleotide
  Target: SCNA; (-) strand; PAM type: YTN; PAM sequence: TTT
gcctgtgtttactcttcccc

SEQ ID NO: 56009 - DNA, 20 bp, Artificial Sequence
  Description of Artificial Sequence: Synthetic oligonucleotide
  Target: SCNA; (-) strand; PAM type: YTN; PAM sequence: TTT
tgcctgtgtttactcttccc

SEQ ID NO: 56010 - DNA, 20 bp, Artificial Sequence
  Description of Artificial Sequence: Synthetic oligonucleotide
  Target: SCNA; (-) strand; PAM type: YTN; PAM sequence: TTC
acatccaatgcaaattttgc

SEQ ID NO: 56011 - DNA, 20 bp, Artificial Sequence
  Description of Artificial Sequence: Synthetic oligonucleotide
  Target: SCNA; (-) strand; PAM type: YTN; PAM sequence: CTT
cacatccaatgcaaattttg

SEQ ID NO: 56012 - DNA, 20 bp, Artificial Sequence
  Description of Artificial Sequence: Synthetic oligonucleotide
  Target: SCNA; (-) strand; PAM type: YTN; PAM sequence: TTA
gcttcacatccaatgcaaat

SEQ ID NO: 56013 - DNA, 20 bp, Artificial Sequence
  Description of Artificial Sequence: Synthetic oligonucleotide
  Target: SCNA; (-) strand; PAM type: YTN; PAM sequence: TTA
tgtggaagggccattagctt

SEQ ID NO: 56014 - DNA, 20 bp, Artificial Sequence
  Description of Artificial Sequence: Synthetic oligonucleotide
  Target: SCNA; (-) strand; PAM type: YTN; PAM sequence: CTA
cagcaaaattatgtggaagg

SEQ ID NO: 56015 - DNA, 20 bp, Artificial Sequence
  Description of Artificial Sequence: Synthetic oligonucleotide
  Target: SCNA; (-) strand; PAM type: YTN; PAM sequence: TTG
atatcctacagcaaaattat

SEQ ID NO: 56016 - DNA, 20 bp, Artificial Sequence
  Description of Artificial Sequence: Synthetic oligonucleotide
  Target: SCNA; (-) strand; PAM type: YTN; PAM sequence: CTG
aaacagggaatcaattgata

SEQ ID NO: 56017 - DNA, 20 bp, Artificial Sequence
  Description of Artificial Sequence: Synthetic oligonucleotide
  Target: SCNA; (-) strand; PAM type: YTN; PAM sequence: CTC
tgaaacagggaatcaattga

SEQ ID NO: 56018 - DNA, 20 bp, Artificial Sequence
  Description of Artificial Sequence: Synthetic oligonucleotide
  Target: SCNA; (-) strand; PAM type: YTN; PAM sequence: TTC
ctctgaaacagggaatcaat

SEQ ID NO: 56019 - DNA, 20 bp, Artificial Sequence
  Description of Artificial Sequence: Synthetic oligonucleotide
  Target: SCNA; (-) strand; PAM type: YTN; PAM sequence: CTT
cctctgaaacagggaatcaa

SEQ ID NO: 56020 - DNA, 20 bp, Artificial Sequence
  Description of Artificial Sequence: Synthetic oligonucleotide
  Target: SCNA; (-) strand; PAM type: YTN; PAM sequence: TTA
acaatccttcctctgaaaca

SEQ ID NO: 56021 - DNA, 20 bp, Artificial Sequence
  Description of Artificial Sequence: Synthetic oligonucleotide
  Target: SCNA; (-) strand; PAM type: YTN; PAM sequence: CTT
aacaatccttcctctgaaac

SEQ ID NO: 56022 - DNA, 20 bp, Artificial Sequence
  Description of Artificial Sequence: Synthetic oligonucleotide
  Target: SCNA; (-) strand; PAM type: YTN; PAM sequence: TTA
gcttaacaatccttcctctg

SEQ ID NO: 56023 - DNA, 20 bp, Artificial Sequence
  Description of Artificial Sequence: Synthetic oligonucleotide
  Target: SCNA; (-) strand; PAM type: YTN; PAM sequence: TTT
agcttaacaatccttcctct

SEQ ID NO: 56024 - DNA, 20 bp, Artificial Sequence
  Description of Artificial Sequence: Synthetic oligonucleotide
  Target: SCNA; (-) strand; PAM type: YTN; PAM sequence: TTT
tagcttaacaatccttcctc

SEQ ID NO: 56025 - DNA, 20 bp, Artificial Sequence
  Description of Artificial Sequence: Synthetic oligonucleotide
  Target: SCNA; (-) strand; PAM type: YTN; PAM sequence: TTG
aaaccattttagcttaacaa

SEQ ID NO: 56026 - DNA, 20 bp, Artificial Sequence
  Description of Artificial Sequence: Synthetic oligonucleotide
  Target: SCNA; (-) strand; PAM type: YTN; PAM sequence: CTG
gttgaaaccattttagctta

SEQ ID NO: 56027 - DNA, 20 bp, Artificial Sequence
  Description of Artificial Sequence: Synthetic oligonucleotide
  Target: SCNA; (-) strand; PAM type: YTN; PAM sequence: TTG
atctggttgaaaccatttta

SEQ ID NO: 56028 - DNA, 20 bp, Artificial Sequence
  Description of Artificial Sequence: Synthetic oligonucleotide
  Target: SCNA; (-) strand; PAM type: YTN; PAM sequence: TTT
gatctggttgaaaccatttt

SEQ ID NO: 56029 - DNA, 20 bp, Artificial Sequence
  Description of Artificial Sequence: Synthetic oligonucleotide
  Target: SCNA; (-) strand; PAM type: YTN; PAM sequence: TTA
atgtttgatctggttgaaac

SEQ ID NO: 56030 - DNA, 20 bp, Artificial Sequence
  Description of Artificial Sequence: Synthetic oligonucleotide
  Target: SCNA; (-) strand; PAM type: YTN; PAM sequence: TTT
aatgtttgatctggttgaaa

SEQ ID NO: 56031 - DNA, 20 bp, Artificial Sequence
  Description of Artificial Sequence: Synthetic oligonucleotide
  Target: SCNA; (-) strand; PAM type: YTN; PAM sequence: CTT
taatgtttgatctggttgaa

SEQ ID NO: 56032 - DNA, 20 bp, Artificial Sequence
  Description of Artificial Sequence: Synthetic oligonucleotide
  Target: SCNA; (-) strand; PAM type: YTN; PAM sequence: TTA
ctttaatgtttgatctggtt

SEQ ID NO: 56033 - DNA, 20 bp, Artificial Sequence
  Description of Artificial Sequence: Synthetic oligonucleotide
  Target: SCNA; (-) strand; PAM type: YTN; PAM sequence: CTT
actttaatgtttgatctggt

SEQ ID NO: 56034 - DNA, 20 bp, Artificial Sequence
  Description of Artificial Sequence: Synthetic oligonucleotide
  Target: SCNA; (-) strand; PAM type: YTN; PAM sequence: CTG
cttactttaatgtttgatct

SEQ ID NO: 56035 - DNA, 20 bp, Artificial Sequence
  Description of Artificial Sequence: Synthetic oligonucleotide
  Target: SCNA; (-) strand; PAM type: YTN; PAM sequence: CTC
tgcttactttaatgtttgat

SEQ ID NO: 56036 - DNA, 20 bp, Artificial Sequence
  Description of Artificial Sequence: Synthetic oligonucleotide
  Target: SCNA; (-) strand; PAM type: YTN; PAM sequence: CTG
aaaaactctgcttactttaa

SEQ ID NO: 56037 - DNA, 20 bp, Artificial Sequence
  Description of Artificial Sequence: Synthetic oligonucleotide
  Target: SCNA; (-) strand; PAM type: YTN; PAM sequence: CTA
ctgaaaaactctgcttactt

SEQ ID NO: 56038 - DNA, 20 bp, Artificial Sequence
  Description of Artificial Sequence: Synthetic oligonucleotide
  Target: SCNA; (-) strand; PAM type: YTN; PAM sequence: CTA
gtcaaatctactgaaaaact

SEQ ID NO: 56039 - DNA, 20 bp, Artificial Sequence
  Description of Artificial Sequence: Synthetic oligonucleotide
  Target: SCNA; (-) strand; PAM type: YTN; PAM sequence: TTA
tagtaaatgaagaatctagt

SEQ ID NO: 56040 - DNA, 20 bp, Artificial Sequence
  Description of Artificial Sequence: Synthetic oligonucleotide
  Target: SCNA; (-) strand; PAM type: YTN; PAM sequence: TTT
atagtaaatgaagaatctag

SEQ ID NO: 56041 - DNA, 20 bp, Artificial Sequence
  Description of Artificial Sequence: Synthetic oligonucleotide
  Target: SCNA; (-) strand; PAM type: YTN; PAM sequence: CTT
tatagtaaatgaagaatcta

SEQ ID NO: 56042 - DNA, 20 bp, Artificial Sequence
  Description of Artificial Sequence: Synthetic oligonucleotide
  Target: SCNA; (-) strand; PAM type: YTN; PAM sequence: TTC
gggtgtggcagatctttata

SEQ ID NO: 56043 - DNA, 20 bp, Artificial Sequence
  Description of Artificial Sequence: Synthetic oligonucleotide
  Target: SCNA; (-) strand; PAM type: YTN; PAM sequence: TTT
cgggtgtggcagatctttat

SEQ ID NO: 56044 - DNA, 20 bp, Artificial Sequence
  Description of Artificial Sequence: Synthetic oligonucleotide
  Target: SCNA; (-) strand; PAM type: YTN; PAM sequence: TTC
aggtggtatttcgggtgtgg

SEQ ID NO: 56045 - DNA, 20 bp, Artificial Sequence
  Description of Artificial Sequence: Synthetic oligonucleotide
  Target: SCNA; (-) strand; PAM type: YTN; PAM sequence: TTT
caggtggtatttcgggtgtg

SEQ ID NO: 56046 - DNA, 20 bp, Artificial Sequence
  Description of Artificial Sequence: Synthetic oligonucleotide
  Target: SCNA; (-) strand; PAM type: YTN; PAM sequence: CTA
atttcaggtggtatttcggg

SEQ ID NO: 56047 - DNA, 20 bp, Artificial Sequence
  Description of Artificial Sequence: Synthetic oligonucleotide
  Target: SCNA; (-) strand; PAM type: YTN; PAM sequence: CTA
gaaaactaatttcaggtggt

SEQ ID NO: 56048 - DNA, 20 bp, Artificial Sequence
  Description of Artificial Sequence: Synthetic oligonucleotide
  Target: SCNA; (-) strand; PAM type: YTN; PAM sequence: TTA
actagaaaactaatttcagg

SEQ ID NO: 56049 - DNA, 20 bp, Artificial Sequence
  Description of Artificial Sequence: Synthetic oligonucleotide
  Target: SCNA; (-) strand; PAM type: YTN; PAM sequence: TTT
aactagaaaactaatttcag

SEQ ID NO: 56050 - DNA, 20 bp, Artificial Sequence
  Description of Artificial Sequence: Synthetic oligonucleotide
  Target: SCNA; (-) strand; PAM type: YTN; PAM sequence: CTG
atttaactagaaaactaatt

SEQ ID NO: 56051 - DNA, 20 bp, Artificial Sequence
  Description of Artificial Sequence: Synthetic oligonucleotide
  Target: SCNA; (-) strand; PAM type: YTN; PAM sequence: CTA
tactgatttaactagaaaac

SEQ ID NO: 56052 - DNA, 20 bp, Artificial Sequence
  Description of Artificial Sequence: Synthetic oligonucleotide
  Target: SCNA; (-) strand; PAM type: YTN; PAM sequence: TTA
tccatagtctatactgattt

SEQ ID NO: 56053 - DNA, 20 bp, Artificial Sequence
  Description of Artificial Sequence: Synthetic oligonucleotide
  Target: SCNA; (-) strand; PAM type: YTN; PAM sequence: TTT
atccatagtctatactgatt

SEQ ID NO: 56054 - DNA, 20 bp, Artificial Sequence
  Description of Artificial Sequence: Synthetic oligonucleotide
  Target: SCNA; (-) strand; PAM type: YTN; PAM sequence: TTT
tatccatagtctatactgat

SEQ ID NO: 56055 - DNA, 20 bp, Artificial Sequence
  Description of Artificial Sequence: Synthetic oligonucleotide
  Target: SCNA; (-) strand; PAM type: YTN; PAM sequence: CTT
ttatccatagtctatactga

SEQ ID NO: 56056 - DNA, 20 bp, Artificial Sequence
  Description of Artificial Sequence: Synthetic oligonucleotide
  Target: SCNA; (-) strand; PAM type: YTN; PAM sequence: TTC
ttttatccatagtctatact

SEQ ID NO: 56057 - DNA, 20 bp, Artificial Sequence
  Description of Artificial Sequence: Synthetic oligonucleotide
  Target: SCNA; (-) strand; PAM type: YTN; PAM sequence: CTT
cttttatccatagtctatac

SEQ ID NO: 56058 - DNA, 20 bp, Artificial Sequence
  Description of Artificial Sequence: Synthetic oligonucleotide
  Target: SCNA; (-) strand; PAM type: YTN; PAM sequence: TTC
gtaacttcttttatccatag

SEQ ID NO: 56059 - DNA, 20 bp, Artificial Sequence
  Description of Artificial Sequence: Synthetic oligonucleotide
  Target: SCNA; (-) strand; PAM type: YTN; PAM sequence: CTT
cgtaacttcttttatccata

SEQ ID NO: 56060 - DNA, 20 bp, Artificial Sequence
  Description of Artificial Sequence: Synthetic oligonucleotide
  Target: SCNA; (-) strand; PAM type: YTN; PAM sequence: TTG
tcttcgtaacttcttttatc

SEQ ID NO: 56061 - DNA, 20 bp, Artificial Sequence
  Description of Artificial Sequence: Synthetic oligonucleotide
  Target: SCNA; (-) strand; PAM type: YTN; PAM sequence: TTA
agagggttgtcttcgtaact

SEQ ID NO: 56062 - DNA, 20 bp, Artificial Sequence
  Description of Artificial Sequence: Synthetic oligonucleotide
  Target: SCNA; (-) strand; PAM type: YTN; PAM sequence: TTG
atcaagattaagagggttgt

SEQ ID NO: 56063 - DNA, 20 bp, Artificial Sequence
  Description of Artificial Sequence: Synthetic oligonucleotide
  Target: SCNA; (-) strand; PAM type: YTN; PAM sequence: CTG
aatattgatcaagattaaga

SEQ ID NO: 56064 - DNA, 20 bp, Artificial Sequence
  Description of Artificial Sequence: Synthetic oligonucleotide
  Target: SCNA; (-) strand; PAM type: YTN; PAM sequence: CTC
tgaatattgatcaagattaa

SEQ ID NO: 56065 - DNA, 20 bp, Artificial Sequence
  Description of Artificial Sequence: Synthetic oligonucleotide
  Target: SCNA; (-) strand; PAM type: YTN; PAM sequence: TTG
tgatggggagtagtcatctc

SEQ ID NO: 56066 - DNA, 20 bp, Artificial Sequence
  Description of Artificial Sequence: Synthetic oligonucleotide
  Target: SCNA; (-) strand; PAM type: YTN; PAM sequence: TTT
gtgatggggagtagtcatct

SEQ ID NO: 56067 - DNA, 20 bp, Artificial Sequence
  Description of Artificial Sequence: Synthetic oligonucleotide
  Target: SCNA; (-) strand; PAM type: YTN; PAM sequence: TTT
tgtgatggggagtagtcatc

SEQ ID NO: 56068 - DNA, 20 bp, Artificial Sequence
  Description of Artificial Sequence: Synthetic oligonucleotide
  Target: SCNA; (-) strand; PAM type: YTN; PAM sequence: CTT
ttgtgatggggagtagtcat

SEQ ID NO: 56069 - DNA, 20 bp, Artificial Sequence
  Description of Artificial Sequence: Synthetic oligonucleotide
  Target: SCNA; (-) strand; PAM type: YTN; PAM sequence: TTA
gcttttgtgatggggagtag

SEQ ID NO: 56070 - DNA, 20 bp, Artificial Sequence
  Description of Artificial Sequence: Synthetic oligonucleotide
  Target: SCNA; (-) strand; PAM type: YTN; PAM sequence: TTA
ggagcagagaaaaatgtgaa

SEQ ID NO: 56071 - DNA, 20 bp, Artificial Sequence
  Description of Artificial Sequence: Synthetic oligonucleotide
  Target: SCNA; (-) strand; PAM type: YTN; PAM sequence: TTC
attaggagcagagaaaaatg

SEQ ID NO: 56072 - DNA, 20 bp, Artificial Sequence
  Description of Artificial Sequence: Synthetic oligonucleotide
  Target: SCNA; (-) strand; PAM type: YTN; PAM sequence: TTT
cattaggagcagagaaaaat

SEQ ID NO: 56073 - DNA, 20 bp, Artificial Sequence
  Description of Artificial Sequence: Synthetic oligonucleotide
  Target: SCNA; (-) strand; PAM type: YTN; PAM sequence: TTC
agcaaaaaagatttcattag

SEQ ID NO: 56074 - DNA, 20 bp, Artificial Sequence
  Description of Artificial Sequence: Synthetic oligonucleotide
  Target: SCNA; (-) strand; PAM type: YTN; PAM sequence: CTT
cagcaaaaaagatttcatta

SEQ ID NO: 56075 - DNA, 20 bp, Artificial Sequence
  Description of Artificial Sequence: Synthetic oligonucleotide
  Target: SCNA; (-) strand; PAM type: YTN; PAM sequence: TTC
agaaacttcagcaaaaaaga

SEQ ID NO: 56076 - DNA, 20 bp, Artificial Sequence
  Description of Artificial Sequence: Synthetic oligonucleotide
  Target: SCNA; (-) strand; PAM type: YTN; PAM sequence: CTT
cagaaacttcagcaaaaaag

SEQ ID NO: 56077 - DNA, 20 bp, Artificial Sequence
  Description of Artificial Sequence: Synthetic oligonucleotide
  Target: SCNA; (-) strand; PAM type: YTN; PAM sequence: TTC
ttcagaaacttcagcaaaaa

SEQ ID NO: 56078 - DNA, 20 bp, Artificial Sequence
  Description of Artificial Sequence: Synthetic oligonucleotide
  Target: SCNA; (-) strand; PAM type: YTN; PAM sequence: TTT
cttcagaaacttcagcaaaa

SEQ ID NO: 56079 - DNA, 20 bp, Artificial Sequence
  Description of Artificial Sequence: Synthetic oligonucleotide
  Target: SCNA; (-) strand; PAM type: YTN; PAM sequence: TTA
tttcttcagaaacttcagca

SEQ ID NO: 56080 - DNA, 20 bp, Artificial Sequence
  Description of Artificial Sequence: Synthetic oligonucleotide
  Target: SCNA; (-) strand; PAM type: YTN; PAM sequence: TTT
atttcttcagaaacttcagc

SEQ ID NO: 56081 - DNA, 20 bp, Artificial Sequence
  Description of Artificial Sequence: Synthetic oligonucleotide
  Target: SCNA; (-) strand; PAM type: YTN; PAM sequence: TTA
tttatttcttcagaaacttc

SEQ ID NO: 56082 - DNA, 20 bp, Artificial Sequence
  Description of Artificial Sequence: Synthetic oligonucleotide
  Target: SCNA; (-) strand; PAM type: YTN; PAM sequence: TTT
atttatttcttcagaaactt

SEQ ID NO: 56083 - DNA, 20 bp, Artificial Sequence
  Description of Artificial Sequence: Synthetic oligonucleotide
  Target: SCNA; (-) strand; PAM type: YTN; PAM sequence: CTT
tatttatttcttcagaaact

SEQ ID NO: 56084 - DNA, 20 bp, Artificial Sequence
  Description of Artificial Sequence: Synthetic oligonucleotide
  Target: SCNA; (-) strand; PAM type: YTN; PAM sequence: TTC
tttatttatttcttcagaaa

SEQ ID NO: 56085 - DNA, 20 bp, Artificial Sequence
  Description of Artificial Sequence: Synthetic oligonucleotide
  Target: SCNA; (-) strand; PAM type: YTN; PAM sequence: CTT
ctttatttatttcttcagaa

SEQ ID NO: 56086 - DNA, 20 bp, Artificial Sequence
  Description of Artificial Sequence: Synthetic oligonucleotide
  Target: SCNA; (-) strand; PAM type: YTN; PAM sequence: CTG
agaggcaccaggcttcttta

SEQ ID NO: 56087 - DNA, 20 bp, Artificial Sequence
  Description of Artificial Sequence: Synthetic oligonucleotide
  Target: SCNA; (-) strand; PAM type: YTN; PAM sequence: CTC
tgagaggcaccaggcttctt

SEQ ID NO: 56088 - DNA, 20 bp, Artificial Sequence
  Description of Artificial Sequence: Synthetic oligonucleotide
  Target: SCNA; (-) strand; PAM type: YTN; PAM sequence: CTG
tgtggaactctgagaggcac

SEQ ID NO: 56089 - DNA, 20 bp, Artificial Sequence
  Description of Artificial Sequence: Synthetic oligonucleotide
  Target: SCNA; (-) strand; PAM type: YTN; PAM sequence: CTC
atcagctgtgtggaactctg

SEQ ID NO: 56090 - DNA, 20 bp, Artificial Sequence
  Description of Artificial Sequence: Synthetic oligonucleotide
  Target: SCNA; (-) strand; PAM type: YTN; PAM sequence: CTA
gactcatcagctgtgtggaa

SEQ ID NO: 56091 - DNA, 20 bp, Artificial Sequence
  Description of Artificial Sequence: Synthetic oligonucleotide
  Target: SCNA; (-) strand; PAM type: YTN; PAM sequence: CTG
cctagactcatcagctgtgt

SEQ ID NO: 56092 - DNA, 20 bp, Artificial Sequence
  Description of Artificial Sequence: Synthetic oligonucleotide
  Target: SCNA; (-) strand; PAM type: YTN; PAM sequence: TTG
tcactgcctagactcatcag

SEQ ID NO: 56093 - DNA, 20 bp, Artificial Sequence
  Description of Artificial Sequence: Synthetic oligonucleotide
  Target: SCNA; (-) strand; PAM type: YTN; PAM sequence: TTT
gtcactgcctagactcatca

SEQ ID NO: 56094 - DNA, 20 bp, Artificial Sequence
  Description of Artificial Sequence: Synthetic oligonucleotide
  Target: SCNA; (-) strand; PAM type: YTN; PAM sequence: CTG
aggaatatagtgtcatttgt

SEQ ID NO: 56095 - DNA, 20 bp, Artificial Sequence
  Description of Artificial Sequence: Synthetic oligonucleotide
  Target: SCNA; (-) strand; PAM type: YTN; PAM sequence: TTG
cacgctgaggaatatagtgt

SEQ ID NO: 56096 - DNA, 20 bp, Artificial Sequence
  Description of Artificial Sequence: Synthetic oligonucleotide
  Target: SCNA; (-) strand; PAM type: YTN; PAM sequence: TTG
caagaagatgagagggagag

SEQ ID NO: 56097 - DNA, 20 bp, Artificial Sequence
  Description of Artificial Sequence: Synthetic oligonucleotide
  Target: SCNA; (-) strand; PAM type: YTN; PAM sequence: TTC
cattgcaagaagatgagagg

SEQ ID NO: 56098 - DNA, 20 bp, Artificial Sequence
  Description of Artificial Sequence: Synthetic oligonucleotide
  Target: SCNA; (-) strand; PAM type: YTN; PAM sequence: CTG
caaggaatgtagcagtgttc

SEQ ID NO: 56099 - DNA, 20 bp, Artificial Sequence
  Description of Artificial Sequence: Synthetic oligonucleotide
  Target: SCNA; (-) strand; PAM type: YTN; PAM sequence: CTC
tgcaaggaatgtagcagtgt

SEQ ID NO: 56100 - DNA, 20 bp, Artificial Sequence
  Description of Artificial Sequence: Synthetic oligonucleotide
  Target: SCNA; (-) strand; PAM type: YTN; PAM sequence: TTC
ctctgcaaggaatgtagcag

SEQ ID NO: 56101 - DNA, 20 bp, Artificial Sequence
  Description of Artificial Sequence: Synthetic oligonucleotide
  Target: SCNA; (-) strand; PAM type: YTN; PAM sequence: TTT
cctctgcaaggaatgtagca

SEQ ID NO: 56102 - DNA, 20 bp, Artificial Sequence
  Description of Artificial Sequence: Synthetic oligonucleotide
  Target: SCNA; (-) strand; PAM type: YTN; PAM sequence: CTA
tgaaatgtacagtacgtttc

SEQ ID NO: 56103 - DNA, 20 bp, Artificial Sequence
  Description of Artificial Sequence: Synthetic oligonucleotide
  Target: SCNA; (-) strand; PAM type: YTN; PAM sequence: TTA
tgccaaggtgacagctatga

SEQ ID NO: 56104 - DNA, 20 bp, Artificial Sequence
  Description of Artificial Sequence: Synthetic oligonucleotide
  Target: SCNA; (-) strand; PAM type: YTN; PAM sequence: TTT
atgccaaggtgacagctatg

SEQ ID NO: 56105 - DNA, 20 bp, Artificial Sequence
  Description of Artificial Sequence: Synthetic oligonucleotide
  Target: SCNA; (-) strand; PAM type: YTN; PAM sequence: TTT
tatgccaaggtgacagctat

SEQ ID NO: 56106 - DNA, 20 bp, Artificial Sequence
  Description of Artificial Sequence: Synthetic oligonucleotide
  Target: SCNA; (-) strand; PAM type: YTN; PAM sequence: CTT
ttatgccaaggtgacagcta

SEQ ID NO: 56107 - DNA, 20 bp, Artificial Sequence
  Description of Artificial Sequence: Synthetic oligonucleotide
  Target: SCNA; (-) strand; PAM type: YTN; PAM sequence: CTG
ccttttatgccaaggtgaca

SEQ ID NO: 56108 - DNA, 20 bp, Artificial Sequence
  Description of Artificial Sequence: Synthetic oligonucleotide
  Target: SCNA; (-) strand; PAM type: YTN; PAM sequence: CTC
tgccttttatgccaaggtga

SEQ ID NO: 56109 - DNA, 20 bp, Artificial Sequence
  Description of Artificial Sequence: Synthetic oligonucleotide
  Target: SCNA; (-) strand; PAM type: YTN; PAM sequence: CTC
cctctgccttttatgccaag

SEQ ID NO: 56110 - DNA, 20 bp, Artificial Sequence
  Description of Artificial Sequence: Synthetic oligonucleotide
  Target: SCNA; (-) strand; PAM type: YTN; PAM sequence: TTC
cccctccctctgccttttat

SEQ ID NO: 56111 - DNA, 20 bp, Artificial Sequence
  Description of Artificial Sequence: Synthetic oligonucleotide
  Target: SCNA; (-) strand; PAM type: YTN; PAM sequence: TTT
ccccctccctctgcctttta

SEQ ID NO: 56112 - DNA, 20 bp, Artificial Sequence
  Description of Artificial Sequence: Synthetic oligonucleotide
  Target: SCNA; (-) strand; PAM type: YTN; PAM sequence: TTA
ggcagaccaaaagaagaatt

SEQ ID NO: 56113 - DNA, 20 bp, Artificial Sequence
  Description of Artificial Sequence: Synthetic oligonucleotide
  Target: SCNA; (-) strand; PAM type: YTN; PAM sequence: TTT
aggcagaccaaaagaagaat

SEQ ID NO: 56114 - DNA, 20 bp, Artificial Sequence
  Description of Artificial Sequence: Synthetic oligonucleotide
  Target: SCNA; (-) strand; PAM type: YTN; PAM sequence: TTG
atatataaaaaataaagtaa

SEQ ID NO: 56115 - DNA, 20 bp, Artificial Sequence
  Description of Artificial Sequence: Synthetic oligonucleotide
  Target: SCNA; (-) strand; PAM type: YTN; PAM sequence: TTA
ttgatatataaaaaataaag

SEQ ID NO: 56116 - DNA, 20 bp, Artificial Sequence
  Description of Artificial Sequence: Synthetic oligonucleotide
  Target: SCNA; (-) strand; PAM type: YTN; PAM sequence: CTC
atggttattgatatataaaa

SEQ ID NO: 56117 - DNA, 20 bp, Artificial Sequence
  Description of Artificial Sequence: Synthetic oligonucleotide
  Target: SCNA; (-) strand; PAM type: YTN; PAM sequence: TTC
tcatggttattgatatataa

SEQ ID NO: 56118 - DNA, 20 bp, Artificial Sequence
  Description of Artificial Sequence: Synthetic oligonucleotide
  Target: SCNA; (-) strand; PAM type: YTN; PAM sequence: TTT
ctcatggttattgatatata

SEQ ID NO: 56119 - DNA, 20 bp, Artificial Sequence
  Description of Artificial Sequence: Synthetic oligonucleotide
  Target: SCNA; (-) strand; PAM type: YTN; PAM sequence: CTC
aatagtttctcatggttatt

SEQ ID NO: 56120 - DNA, 20 bp, Artificial Sequence
  Description of Artificial Sequence: Synthetic oligonucleotide
  Target: SCNA; (-) strand; PAM type: YTN; PAM sequence: TTA
ctcaatagtttctcatggtt

SEQ ID NO: 56121 - DNA, 20 bp, Artificial Sequence
  Description of Artificial Sequence: Synthetic oligonucleotide
  Target: SCNA; (-) strand; PAM type: YTN; PAM sequence: CTT
actcaatagtttctcatggt

SEQ ID NO: 56122 - DNA, 20 bp, Artificial Sequence
  Description of Artificial Sequence: Synthetic oligonucleotide
  Target: SCNA; (-) strand; PAM type: YTN; PAM sequence: CTA
aacttactcaatagtttctc

SEQ ID NO: 56123 - DNA, 20 bp, Artificial Sequence
  Description of Artificial Sequence: Synthetic oligonucleotide
  Target: SCNA; (-) strand; PAM type: YTN; PAM sequence: TTA
tatctaaacttactcaatag

SEQ ID NO: 56124 - DNA, 20 bp, Artificial Sequence
  Description of Artificial Sequence: Synthetic oligonucleotide
  Target: SCNA; (-) strand; PAM type: YTN; PAM sequence: TTT
atatctaaacttactcaata

SEQ ID NO: 56125 - DNA, 20 bp, Artificial Sequence
  Description of Artificial Sequence: Synthetic oligonucleotide
  Target: SCNA; (-) strand; PAM type: YTN; PAM sequence: TTT
tatatctaaacttactcaat

SEQ ID NO: 56126 - DNA, 20 bp, Artificial Sequence
  Description of Artificial Sequence: Synthetic oligonucleotide
  Target: SCNA; (-) strand; PAM type: YTN; PAM sequence: CTG
ttttatatctaaacttactc

SEQ ID NO: 56127 - DNA, 20 bp, Artificial Sequence
  Description of Artificial Sequence: Synthetic oligonucleotide
  Target: SCNA; (-) strand; PAM type: YTN; PAM sequence: CTC
tgttttatatctaaacttac

SEQ ID NO: 56128 - DNA, 20 bp, Artificial Sequence
  Description of Artificial Sequence: Synthetic oligonucleotide
  Target: SCNA; (-) strand; PAM type: YTN; PAM sequence: TTC
tctgttttatatctaaactt

SEQ ID NO: 56129 - DNA, 20 bp, Artificial Sequence
  Description of Artificial Sequence: Synthetic oligonucleotide
  Target: SCNA; (-) strand; PAM type: YTN; PAM sequence: TTC
caaaacaaagttctctgttt

SEQ ID NO: 56130 - DNA, 20 bp, Artificial Sequence
  Description of Artificial Sequence: Synthetic oligonucleotide
  Target: SCNA; (-) strand; PAM type: YTN; PAM sequence: CTT
ccaaaacaaagttctctgtt

SEQ ID NO: 56131 - DNA, 20 bp, Artificial Sequence
  Description of Artificial Sequence: Synthetic oligonucleotide
  Target: SCNA; (-) strand; PAM type: YTN; PAM sequence: TTG
aaaagtaatgccttccaaaa

SEQ ID NO: 56132 - DNA, 20 bp, Artificial Sequence
  Description of Artificial Sequence: Synthetic oligonucleotide
  Target: SCNA; (-) strand; PAM type: YTN; PAM sequence: TTT
gaaaagtaatgccttccaaa

SEQ ID NO: 56133 - DNA, 20 bp, Artificial Sequence
  Description of Artificial Sequence: Synthetic oligonucleotide
  Target: SCNA; (-) strand; PAM type: YTN; PAM sequence: CTT
tgaaaagtaatgccttccaa

SEQ ID NO: 56134 - DNA, 20 bp, Artificial Sequence
  Description of Artificial Sequence: Synthetic oligonucleotide
  Target: SCNA; (-) strand; PAM type: YTN; PAM sequence: TTC
ctttgaaaagtaatgccttc

SEQ ID NO: 56135 - DNA, 20 bp, Artificial Sequence
  Description of Artificial Sequence: Synthetic oligonucleotide
  Target: SCNA; (-) strand; PAM type: YTN; PAM sequence: TTT
cctttgaaaagtaatgcctt

SEQ ID NO: 56136 - DNA, 20 bp, Artificial Sequence
  Description of Artificial Sequence: Synthetic oligonucleotide
  Target: SCNA; (-) strand; PAM type: YTN; PAM sequence: CTC
cacgatgcatttcctttgaa

SEQ ID NO: 56137 - DNA, 20 bp, Artificial Sequence
  Description of Artificial Sequence: Synthetic oligonucleotide
  Target: SCNA; (-) strand; PAM type: YTN; PAM sequence: CTC
tccacgatgcatttcctttg

SEQ ID NO: 56138 - DNA, 20 bp, Artificial Sequence
  Description of Artificial Sequence: Synthetic oligonucleotide
  Target: SCNA; (-) strand; PAM type: YTN; PAM sequence: CTC
actctccacgatgcatttcc

SEQ ID NO: 56139 - DNA, 20 bp, Artificial Sequence
  Description of Artificial Sequence: Synthetic oligonucleotide
  Target: SCNA; (-) strand; PAM type: YTN; PAM sequence: CTC
ctcactctccacgatgcatt

SEQ ID NO: 56140 - DNA, 20 bp, Artificial Sequence
  Description of Artificial Sequence: Synthetic oligonucleotide
  Target: SCNA; (-) strand; PAM type: YTN; PAM sequence: TTC
actcctcactctccacgatg

SEQ ID NO: 56141 - DNA, 20 bp, Artificial Sequence
  Description of Artificial Sequence: Synthetic oligonucleotide
  Target: SCNA; (-) strand; PAM type: YTN; PAM sequence: CTT
cactcctcactctccacgat

SEQ ID NO: 56142 - DNA, 20 bp, Artificial Sequence
  Description of Artificial Sequence: Synthetic oligonucleotide
  Target: SCNA; (-) strand; PAM type: YTN; PAM sequence: TTG
acccttcactcctcactctc

SEQ ID NO: 56143 - DNA, 20 bp, Artificial Sequence
  Description of Artificial Sequence: Synthetic oligonucleotide
  Target: SCNA; (-) strand; PAM type: YTN; PAM sequence: TTG
aaaacattgacccttcactc

SEQ ID NO: 56144 - DNA, 20 bp, Artificial Sequence
  Description of Artificial Sequence: Synthetic oligonucleotide
  Target: SCNA; (-) strand; PAM type: YTN; PAM sequence: CTT
gaaaacattgacccttcact

SEQ ID NO: 56145 - DNA, 20 bp, Artificial Sequence
  Description of Artificial Sequence: Synthetic oligonucleotide
  Target: SCNA; (-) strand; PAM type: YTN; PAM sequence: CTC
ttgaaaacattgacccttca

SEQ ID NO: 56146 - DNA, 20 bp, Artificial Sequence
  Description of Artificial Sequence: Synthetic oligonucleotide
  Target: SCNA; (-) strand; PAM type: YTN; PAM sequence: TTC
cgatcgctcttgaaaacatt

SEQ ID NO: 56147 - DNA, 20 bp, Artificial Sequence
  Description of Artificial Sequence: Synthetic oligonucleotide
  Target: SCNA; (-) strand; PAM type: YTN; PAM sequence: CTT
ccgatcgctcttgaaaacat

SEQ ID NO: 56148 - DNA, 20 bp, Artificial Sequence
  Description of Artificial Sequence: Synthetic oligonucleotide
  Target: SCNA; (-) strand; PAM type: YTN; PAM sequence: TTA
ggaatatcaaggcagggagc

SEQ ID NO: 56149 - DNA, 20 bp, Artificial Sequence
  Description of Artificial Sequence: Synthetic oligonucleotide
  Target: SCNA; (-) strand; PAM type: YTN; PAM sequence: TTG
gtgagcataagatgccagaa

SEQ ID NO: 56150 - DNA, 20 bp, Artificial Sequence
  Description of Artificial Sequence: Synthetic oligonucleotide
  Target: SCNA; (-) strand; PAM type: YTN; PAM sequence: TTA
ggcagttggtgagcataaga

SEQ ID NO: 56151 - DNA, 20 bp, Artificial Sequence
  Description of Artificial Sequence: Synthetic oligonucleotide
  Target: SCNA; (-) strand; PAM type: YTN; PAM sequence: CTA
ttaggcagttggtgagcata

SEQ ID NO: 56152 - DNA, 20 bp, Artificial Sequence
  Description of Artificial Sequence: Synthetic oligonucleotide
  Target: SCNA; (-) strand; PAM type: YTN; PAM sequence: TTG
gacagatgggcagaaccaca

SEQ ID NO: 56153 - DNA, 20 bp, Artificial Sequence
  Description of Artificial Sequence: Synthetic oligonucleotide
  Target: SCNA; (-) strand; PAM type: YTN; PAM sequence: TTA
gaatggcaattggacagatg

SEQ ID NO: 56154 - DNA, 20 bp, Artificial Sequence
  Description of Artificial Sequence: Synthetic oligonucleotide
  Target: SCNA; (-) strand; PAM type: YTN; PAM sequence: TTT
agaatggcaattggacagat

SEQ ID NO: 56155 - DNA, 20 bp, Artificial Sequence
  Description of Artificial Sequence: Synthetic oligonucleotide
  Target: SCNA; (-) strand; PAM type: YTN; PAM sequence: TTA
gtaaaccacataatttagaa

SEQ ID NO: 56156 - DNA, 20 bp, Artificial Sequence
  Description of Artificial Sequence: Synthetic oligonucleotide
  Target: SCNA; (-) strand; PAM type: YTN; PAM sequence: CTT
agtaaaccacataatttaga

SEQ ID NO: 56157 - DNA, 20 bp, Artificial Sequence
  Description of Artificial Sequence: Synthetic oligonucleotide
  Target: SCNA; (-) strand; PAM type: YTN; PAM sequence: TTC
ttagtaaaccacataattta

SEQ ID NO: 56158 - DNA, 20 bp, Artificial Sequence
  Description of Artificial Sequence: Synthetic oligonucleotide
  Target: SCNA; (-) strand; PAM type: YTN; PAM sequence: TTT
cttagtaaaccacataattt

SEQ ID NO: 56159 - DNA, 20 bp, Artificial Sequence
  Description of Artificial Sequence: Synthetic oligonucleotide
  Target: SCNA; (-) strand; PAM type: YTN; PAM sequence: TTT
tcttagtaaaccacataatt

SEQ ID NO: 56160 - DNA, 20 bp, Artificial Sequence
  Description of Artificial Sequence: Synthetic oligonucleotide
  Target: SCNA; (-) strand; PAM type: YTN; PAM sequence: TTA
agtattttcttagtaaacca

SEQ ID NO: 56161 - DNA, 20 bp, Artificial Sequence
  Description of Artificial Sequence: Synthetic oligonucleotide
  Target: SCNA; (-) strand; PAM type: YTN; PAM sequence: TTC
atataatgttaagtattttc

SEQ ID NO: 56162 - DNA, 20 bp, Artificial Sequence
  Description of Artificial Sequence: Synthetic oligonucleotide
  Target: SCNA; (-) strand; PAM type: YTN; PAM sequence: TTA
ttcatataatgttaagtatt

SEQ ID NO: 56163 - DNA, 20 bp, Artificial Sequence
  Description of Artificial Sequence: Synthetic oligonucleotide
  Target: SCNA; (-) strand; PAM type: YTN; PAM sequence: TTA
tacattattcatataatgtt

SEQ ID NO: 56164 - DNA, 20 bp, Artificial Sequence
  Description of Artificial Sequence: Synthetic oligonucleotide
  Target: SCNA; (-) strand; PAM type: YTN; PAM sequence: TTA
attatacattattcatataa

SEQ ID NO: 56165 - DNA, 20 bp, Artificial Sequence
  Description of Artificial Sequence: Synthetic oligonucleotide
  Target: SCNA; (-) strand; PAM type: YTN; PAM sequence: TTA
taattaattatacattattc

SEQ ID NO: 56166 - DNA, 20 bp, Artificial Sequence
  Description of Artificial Sequence: Synthetic oligonucleotide
  Target: SCNA; (-) strand; PAM type: YTN; PAM sequence: CTT
ataattaattatacattatt

SEQ ID NO: 56167 - DNA, 20 bp, Artificial Sequence
  Description of Artificial Sequence: Synthetic oligonucleotide
  Target: SCNA; (-) strand; PAM type: YTN; PAM sequence: CTA
cttataattaattatacatt

SEQ ID NO: 56168 - DNA, 20 bp, Artificial Sequence
  Description of Artificial Sequence: Synthetic oligonucleotide
  Target: SCNA; (-) strand; PAM type: YTN; PAM sequence: TTA
aaaactacttataattaatt

SEQ ID NO: 56169 - DNA, 20 bp, Artificial Sequence
  Description of Artificial Sequence: Synthetic oligonucleotide
  Target: SCNA; (-) strand; PAM type: YTN; PAM sequence: TTT
aaaaactacttataattaat

SEQ ID NO: 56170 - DNA, 20 bp, Artificial Sequence
  Description of Artificial Sequence: Synthetic oligonucleotide
  Target: SCNA; (-) strand; PAM type: YTN; PAM sequence: TTG
aagatttaaaaactacttat

SEQ ID NO: 56171 - DNA, 20 bp, Artificial Sequence
  Description of Artificial Sequence: Synthetic oligonucleotide
  Target: SCNA; (-) strand; PAM type: YTN; PAM sequence: CTT
gaagatttaaaaactactta

SEQ ID NO: 56172 - DNA, 20 bp, Artificial Sequence
  Description of Artificial Sequence: Synthetic oligonucleotide
  Target: SCNA; (-) strand; PAM type: YTN; PAM sequence: CTC
atgagataaatcttgaagat

SEQ ID NO: 56173 - DNA, 20 bp, Artificial Sequence
  Description of Artificial Sequence: Synthetic oligonucleotide
  Target: SCNA; (-) strand; PAM type: YTN; PAM sequence: TTC
actcatgagataaatcttga

SEQ ID NO: 56174 - DNA, 20 bp, Artificial Sequence
  Description of Artificial Sequence: Synthetic oligonucleotide
  Target: SCNA; (-) strand; PAM type: YTN; PAM sequence: TTT
cactcatgagataaatcttg

SEQ ID NO: 56175 - DNA, 20 bp, Artificial Sequence
  Description of Artificial Sequence: Synthetic oligonucleotide
  Target: SCNA; (-) strand; PAM type: YTN; PAM sequence: TTA
agaacaaagcaaccatttca

SEQ ID NO: 56176 - DNA, 20 bp, Artificial Sequence
  Description of Artificial Sequence: Synthetic oligonucleotide
  Target: SCNA; (-) strand; PAM type: YTN; PAM sequence: CTT
aagaacaaagcaaccatttc

SEQ ID NO: 56177 - DNA, 20 bp, Artificial Sequence
  Description of Artificial Sequence: Synthetic oligonucleotide
  Target: SCNA; (-) strand; PAM type: YTN; PAM sequence: CTC
cttaagaacaaagcaaccat

SEQ ID NO: 56178 - DNA, 20 bp, Artificial Sequence
  Description of Artificial Sequence: Synthetic oligonucleotide
  Target: SCNA; (-) strand; PAM type: YTN; PAM sequence: TTC
tccttaagaacaaagcaacc

SEQ ID NO: 56179 - DNA, 20 bp, Artificial Sequence
  Description of Artificial Sequence: Synthetic oligonucleotide
  Target: SCNA; (-) strand; PAM type: YTN; PAM sequence: TTT
ctccttaagaacaaagcaac

SEQ ID NO: 56180 - DNA, 20 bp, Artificial Sequence
  Description of Artificial Sequence: Synthetic oligonucleotide
  Target: SCNA; (-) strand; PAM type: YTN; PAM sequence: TTT
tctccttaagaacaaagcaa

SEQ ID NO: 56181 - DNA, 20 bp, Artificial Sequence
  Description of Artificial Sequence: Synthetic oligonucleotide
  Target: SCNA; (-) strand; PAM type: YTN; PAM sequence: TTA
attttctccttaagaacaaa

SEQ ID NO: 56182 - DNA, 20 bp, Artificial Sequence
  Description of Artificial Sequence: Synthetic oligonucleotide
  Target: SCNA; (-) strand; PAM type: YTN; PAM sequence: TTG
tacatggatacgtgggaaat

SEQ ID NO: 56183 - DNA, 20 bp, Artificial Sequence
  Description of Artificial Sequence: Synthetic oligonucleotide
  Target: SCNA; (-) strand; PAM type: YTN; PAM sequence: TTA
ttgtacatggatacgtggga

SEQ ID NO: 56184 - DNA, 20 bp, Artificial Sequence
  Description of Artificial Sequence: Synthetic oligonucleotide
  Target: SCNA; (-) strand; PAM type: YTN; PAM sequence: CTT
attgtacatggatacgtggg

SEQ ID NO: 56185 - DNA, 20 bp, Artificial Sequence
  Description of Artificial Sequence: Synthetic oligonucleotide
  Target: SCNA; (-) strand; PAM type: YTN; PAM sequence: CTA
cttattgtacatggatacgt

SEQ ID NO: 56186 - DNA, 20 bp, Artificial Sequence
  Description of Artificial Sequence: Synthetic oligonucleotide
  Target: SCNA; (-) strand; PAM type: YTN; PAM sequence: TTA
taacagcactacttattgta

SEQ ID NO: 56187 - DNA, 20 bp, Artificial Sequence
  Description of Artificial Sequence: Synthetic oligonucleotide
  Target: SCNA; (-) strand; PAM type: YTN; PAM sequence: TTT
ataacagcactacttattgt

SEQ ID NO: 56188 - DNA, 20 bp, Artificial Sequence
  Description of Artificial Sequence: Synthetic oligonucleotide
  Target: SCNA; (-) strand; PAM type: YTN; PAM sequence: TTA
tatgtttataacagcactac

SEQ ID NO: 56189 - DNA, 20 bp, Artificial Sequence
  Description of Artificial Sequence: Synthetic oligonucleotide
  Target: SCNA; (-) strand; PAM type: YTN; PAM sequence: CTT
atatgtttataacagcacta

SEQ ID NO: 56190 - DNA, 20 bp, Artificial Sequence
  Description of Artificial Sequence: Synthetic oligonucleotide
  Target: SCNA; (-) strand; PAM type: YTN; PAM sequence: TTC
ttatatgtttataacagcac

SEQ ID NO: 56191 - DNA, 20 bp, Artificial Sequence
  Description of Artificial Sequence: Synthetic oligonucleotide
  Target: SCNA; (-) strand; PAM type: YTN; PAM sequence: TTT
cttatatgtttataacagca

SEQ ID NO: 56192 - DNA, 20 bp, Artificial Sequence
  Description of Artificial Sequence: Synthetic oligonucleotide
  Target: SCNA; (-) strand; PAM type: YTN; PAM sequence: TTT
tcttatatgtttataacagc

SEQ ID NO: 56193 - DNA, 20 bp, Artificial Sequence
  Description of Artificial Sequence: Synthetic oligonucleotide
  Target: SCNA; (-) strand; PAM type: YTN; PAM sequence: CTC
attttcttatatgtttataa

SEQ ID NO: 56194 - DNA, 20 bp, Artificial Sequence
  Description of Artificial Sequence: Synthetic oligonucleotide
  Target: SCNA; (-) strand; PAM type: YTN; PAM sequence: TTA
tcatgatagctcattttctt

SEQ ID NO: 56195 - DNA, 20 bp, Artificial Sequence
  Description of Artificial Sequence: Synthetic oligonucleotide
  Target: SCNA; (-) strand; PAM type: YTN; PAM sequence: CTT
atcatgatagctcattttct

SEQ ID NO: 56196 - DNA, 20 bp, Artificial Sequence
  Description of Artificial Sequence: Synthetic oligonucleotide
  Target: SCNA; (-) strand; PAM type: YTN; PAM sequence: CTG
tatacttatcatgatagctc

SEQ ID NO: 56197 - DNA, 20 bp, Artificial Sequence
  Description of Artificial Sequence: Synthetic oligonucleotide
  Target: SCNA; (-) strand; PAM type: YTN; PAM sequence: CTA
tgctgtatacttatcatgat

SEQ ID NO: 56198 - DNA, 20 bp, Artificial Sequence
  Description of Artificial Sequence: Synthetic oligonucleotide
  Target: SCNA; (-) strand; PAM type: YTN; PAM sequence: CTC
tatgctgtatacttatcatg

SEQ ID NO: 56199 - DNA, 20 bp, Artificial Sequence
  Description of Artificial Sequence: Synthetic oligonucleotide
  Target: SCNA; (-) strand; PAM type: YTN; PAM sequence: TTA
actctatgctgtatacttat

SEQ ID NO: 56200 - DNA, 20 bp, Artificial Sequence
  Description of Artificial Sequence: Synthetic oligonucleotide
  Target: SCNA; (-) strand; PAM type: YTN; PAM sequence: CTT
aactctatgctgtatactta

SEQ ID NO: 56201 - DNA, 20 bp, Artificial Sequence
  Description of Artificial Sequence: Synthetic oligonucleotide
  Target: SCNA; (-) strand; PAM type: YTN; PAM sequence: CTA
ataaacttaactctatgctg

SEQ ID NO: 56202 - DNA, 20 bp, Artificial Sequence
  Description of Artificial Sequence: Synthetic oligonucleotide
  Target: SCNA; (-) strand; PAM type: YTN; PAM sequence: TTC
taataaacttaactctatgc

SEQ ID NO: 56203 - DNA, 20 bp, Artificial Sequence
  Description of Artificial Sequence: Synthetic oligonucleotide
  Target: SCNA; (-) strand; PAM type: YTN; PAM sequence: TTA
tagaatatgagggtattcta

SEQ ID NO: 56204 - DNA, 20 bp, Artificial Sequence
  Description of Artificial Sequence: Synthetic oligonucleotide
  Target: SCNA; (-) strand; PAM type: YTN; PAM sequence: TTG
tatattatagaatatgaggg

SEQ ID NO: 56205 - DNA, 20 bp, Artificial Sequence
  Description of Artificial Sequence: Synthetic oligonucleotide
  Target: SCNA; (-) strand; PAM type: YTN; PAM sequence: TTT
gtatattatagaatatgagg

SEQ ID NO: 56206 - DNA, 20 bp, Artificial Sequence
  Description of Artificial Sequence: Synthetic oligonucleotide
  Target: SCNA; (-) strand; PAM type: YTN; PAM sequence: TTT
tgtatattatagaatatgag

SEQ ID NO: 56207 - DNA, 20 bp, Artificial Sequence
  Description of Artificial Sequence: Synthetic oligonucleotide
  Target: SCNA; (-) strand; PAM type: YTN; PAM sequence: TTA
gtaattttgtatattataga

SEQ ID NO: 56208 - DNA, 20 bp, Artificial Sequence
  Description of Artificial Sequence: Synthetic oligonucleotide
  Target: SCNA; (-) strand; PAM type: YTN; PAM sequence: CTG
cacgttagtaattttgtata

SEQ ID NO: 56209 - DNA, 20 bp, Artificial Sequence
  Description of Artificial Sequence: Synthetic oligonucleotide
  Target: SCNA; (-) strand; PAM type: YTN; PAM sequence: TTC
actgcacgttagtaattttg

SEQ ID NO: 56210 - DNA, 20 bp, Artificial Sequence
  Description of Artificial Sequence: Synthetic oligonucleotide
  Target: SCNA; (-) strand; PAM type: YTN; PAM sequence: TTT
cactgcacgttagtaatttt

SEQ ID NO: 56211 - DNA, 20 bp, Artificial Sequence
  Description of Artificial Sequence: Synthetic oligonucleotide
  Target: SCNA; (-) strand; PAM type: YTN; PAM sequence: CTA
tatgatttcactgcacgtta

SEQ ID NO: 56212 - DNA, 20 bp, Artificial Sequence
  Description of Artificial Sequence: Synthetic oligonucleotide
  Target: SCNA; (-) strand; PAM type: YTN; PAM sequence: TTC
tatatgatttcactgcacgt

SEQ ID NO: 56213 - DNA, 20 bp, Artificial Sequence
  Description of Artificial Sequence: Synthetic oligonucleotide
  Target: SCNA; (-) strand; PAM type: YTN; PAM sequence: TTC
agaattctatatgatttcac

SEQ ID NO: 56214 - DNA, 20 bp, Artificial Sequence
  Description of Artificial Sequence: Synthetic oligonucleotide
  Target: SCNA; (-) strand; PAM type: YTN; PAM sequence: CTT
cagaattctatatgatttca

SEQ ID NO: 56215 - DNA, 20 bp, Artificial Sequence
  Description of Artificial Sequence: Synthetic oligonucleotide
  Target: SCNA; (-) strand; PAM type: YTN; PAM sequence: CTA
cttcagaattctatatgatt

SEQ ID NO: 56216 - DNA, 20 bp, Artificial Sequence
  Description of Artificial Sequence: Synthetic oligonucleotide
  Target: SCNA; (-) strand; PAM type: YTN; PAM sequence: TTC
actacttcagaattctatat

SEQ ID NO: 56217 - DNA, 20 bp, Artificial Sequence
  Description of Artificial Sequence: Synthetic oligonucleotide
  Target: SCNA; (-) strand; PAM type: YTN; PAM sequence: TTA
aacagtaaggaaacaattca

SEQ ID NO: 56218 - DNA, 20 bp, Artificial Sequence
  Description of Artificial Sequence: Synthetic oligonucleotide
  Target: SCNA; (-) strand; PAM type: YTN; PAM sequence: CTG
caagaatgtgttaaacagta

SEQ ID NO: 56219 - DNA, 20 bp, Artificial Sequence
  Description of Artificial Sequence: Synthetic oligonucleotide
  Target: SCNA; (-) strand; PAM type: YTN; PAM sequence: TTA
aaaagacaaactgcaagaat

SEQ ID NO: 56220 - DNA, 20 bp, Artificial Sequence
  Description of Artificial Sequence: Synthetic oligonucleotide
  Target: SCNA; (-) strand; PAM type: YTN; PAM sequence: TTT
aaaaagacaaactgcaagaa

SEQ ID NO: 56221 - DNA, 20 bp, Artificial Sequence
  Description of Artificial Sequence: Synthetic oligonucleotide
  Target: SCNA; (-) strand; PAM type: YTN; PAM sequence: TTT
taaaaagacaaactgcaaga

SEQ ID NO: 56222 - DNA, 20 bp, Artificial Sequence
  Description of Artificial Sequence: Synthetic oligonucleotide
  Target: SCNA; (-) strand; PAM type: YTN; PAM sequence: TTA
attttaaaaagacaaactgc

SEQ ID NO: 56223 - DNA, 20 bp, Artificial Sequence
  Description of Artificial Sequence: Synthetic oligonucleotide
  Target: SCNA; (-) strand; PAM type: YTN; PAM sequence: TTT
aattttaaaaagacaaactg

SEQ ID NO: 56224 - DNA, 20 bp, Artificial Sequence
  Description of Artificial Sequence: Synthetic oligonucleotide
  Target: SCNA; (-) strand; PAM type: YTN; PAM sequence: TTT
taattttaaaaagacaaact

SEQ ID NO: 56225 - DNA, 20 bp, Artificial Sequence
  Description of Artificial Sequence: Synthetic oligonucleotide
  Target: SCNA; (-) strand; PAM type: YTN; PAM sequence: CTG
attttaattttaaaaagaca

SEQ ID NO: 56226 - DNA, 20 bp, Artificial Sequence
  Description of Artificial Sequence: Synthetic oligonucleotide
  Target: SCNA; (-) strand; PAM type: YTN; PAM sequence: TTC
ctgattttaattttaaaaag

SEQ ID NO: 56227 - DNA, 20 bp, Artificial Sequence
  Description of Artificial Sequence: Synthetic oligonucleotide
  Target: SCNA; (-) strand; PAM type: YTN; PAM sequence: CTG
cccagaattcctgattttaa

SEQ ID NO: 56228 - DNA, 20 bp, Artificial Sequence
  Description of Artificial Sequence: Synthetic oligonucleotide
  Target: SCNA; (-) strand; PAM type: YTN; PAM sequence: CTA
actgcccagaattcctgatt

SEQ ID NO: 56229 - DNA, 20 bp, Artificial Sequence
  Description of Artificial Sequence: Synthetic oligonucleotide
  Target: SCNA; (-) strand; PAM type: YTN; PAM sequence: TTC
aaaaacaactaactgcccag

SEQ ID NO: 56230 - DNA, 20 bp, Artificial Sequence
  Description of Artificial Sequence: Synthetic oligonucleotide
  Target: SCNA; (-) strand; PAM type: YTN; PAM sequence: CTT
caaaaacaactaactgccca

SEQ ID NO: 56231 - DNA, 20 bp, Artificial Sequence
  Description of Artificial Sequence: Synthetic oligonucleotide
  Target: SCNA; (-) strand; PAM type: YTN; PAM sequence: TTG
tcttcaaaaacaactaactg

SEQ ID NO: 56232 - DNA, 20 bp, Artificial Sequence
  Description of Artificial Sequence: Synthetic oligonucleotide
  Target: SCNA; (-) strand; PAM type: YTN; PAM sequence: TTA
aagcaaagataaatgacatt

SEQ ID NO: 56233 - DNA, 20 bp, Artificial Sequence
  Description of Artificial Sequence: Synthetic oligonucleotide
  Target: SCNA; (-) strand; PAM type: YTN; PAM sequence: CTT
aaagcaaagataaatgacat

SEQ ID NO: 56234 - DNA, 20 bp, Artificial Sequence
  Description of Artificial Sequence: Synthetic oligonucleotide
  Target: SCNA; (-) strand; PAM type: YTN; PAM sequence: TTC
ttaaagcaaagataaatgac

SEQ ID NO: 56235 - DNA, 20 bp, Artificial Sequence
  Description of Artificial Sequence: Synthetic oligonucleotide
  Target: SCNA; (-) strand; PAM type: YTN; PAM sequence: CTT
cttaaagcaaagataaatga

SEQ ID NO: 56236 - DNA, 20 bp, Artificial Sequence
  Description of Artificial Sequence: Synthetic oligonucleotide
  Target: SCNA; (-) strand; PAM type: YTN; PAM sequence: TTC
cttcttaaagcaaagataaa

SEQ ID NO: 56237 - DNA, 20 bp, Artificial Sequence
  Description of Artificial Sequence: Synthetic oligonucleotide
  Target: SCNA; (-) strand; PAM type: YTN; PAM sequence: TTT
ccttcttaaagcaaagataa

SEQ ID NO: 56238 - DNA, 20 bp, Artificial Sequence
  Description of Artificial Sequence: Synthetic oligonucleotide
  Target: SCNA; (-) strand; PAM type: YTN; PAM sequence: CTG
tttccttcttaaagcaaaga

SEQ ID NO: 56239 - DNA, 20 bp, Artificial Sequence
  Description of Artificial Sequence: Synthetic oligonucleotide
  Target: SCNA; (-) strand; PAM type: YTN; PAM sequence: TTA
aatgtagactgtttccttct

SEQ ID NO: 56240 - DNA, 20 bp, Artificial Sequence
  Description of Artificial Sequence: Synthetic oligonucleotide
  Target: SCNA; (-) strand; PAM type: YTN; PAM sequence: TTG
ttaaatgtagactgtttcct

SEQ ID NO: 56241 - DNA, 20 bp, Artificial Sequence
  Description of Artificial Sequence: Synthetic oligonucleotide
  Target: SCNA; (-) strand; PAM type: YTN; PAM sequence: TTT
gttaaatgtagactgtttcc

SEQ ID NO: 56242 - DNA, 20 bp, Artificial Sequence
  Description of Artificial Sequence: Synthetic oligonucleotide
  Target: SCNA; (-) strand; PAM type: YTN; PAM sequence: TTG
tttgttaaatgtagactgtt

SEQ ID NO: 56243 - DNA, 20 bp, Artificial Sequence
  Description of Artificial Sequence: Synthetic oligonucleotide
  Target: SCNA; (-) strand; PAM type: YTN; PAM sequence: TTA
atatgtagaaaatgaattgt

SEQ ID NO: 56244 - DNA, 20 bp, Artificial Sequence
  Description of Artificial Sequence: Synthetic oligonucleotide
  Target: SCNA; (-) strand; PAM type: YTN; PAM sequence: CTC
aattaatatgtagaaaatga

SEQ ID NO: 56245 - DNA, 20 bp, Artificial Sequence
  Description of Artificial Sequence: Synthetic oligonucleotide
  Target: SCNA; (-) strand; PAM type: YTN; PAM sequence: CTG
ctcaattaatatgtagaaaa

SEQ ID NO: 56246 - DNA, 20 bp, Artificial Sequence
  Description of Artificial Sequence: Synthetic oligonucleotide
  Target: SCNA; (-) strand; PAM type: YTN; PAM sequence: TTC
actgctcaattaatatgtag

SEQ ID NO: 56247 - DNA, 20 bp, Artificial Sequence
  Description of Artificial Sequence: Synthetic oligonucleotide
  Target: SCNA; (-) strand; PAM type: YTN; PAM sequence: TTT
cactgctcaattaatatgta

SEQ ID NO: 56248 - DNA, 20 bp, Artificial Sequence
  Description of Artificial Sequence: Synthetic oligonucleotide
  Target: SCNA; (-) strand; PAM type: YTN; PAM sequence: TTT
tcactgctcaattaatatgt

SEQ ID NO: 56249 - DNA, 20 bp, Artificial Sequence
  Description of Artificial Sequence: Synthetic oligonucleotide
  Target: SCNA; (-) strand; PAM type: YTN; PAM sequence: CTG
ccaaccatattttcactgct

SEQ ID NO: 56250 - DNA, 20 bp, Artificial Sequence
  Description of Artificial Sequence: Synthetic oligonucleotide
  Target: SCNA; (-) strand; PAM type: YTN; PAM sequence: TTC
agacctgccaaccatatttt

SEQ ID NO: 56251 - DNA, 20 bp, Artificial Sequence
  Description of Artificial Sequence: Synthetic oligonucleotide
  Target: SCNA; (-) strand; PAM type: YTN; PAM sequence: CTT
cagacctgccaaccatattt

SEQ ID NO: 56252 - DNA, 20 bp, Artificial Sequence
  Description of Artificial Sequence: Synthetic oligonucleotide
  Target: SCNA; (-) strand; PAM type: YTN; PAM sequence: TTC
ttcagacctgccaaccatat

SEQ ID NO: 56253 - DNA, 20 bp, Artificial Sequence
  Description of Artificial Sequence: Synthetic oligonucleotide
  Target: SCNA; (-) strand; PAM type: YTN; PAM sequence: CTG
ttcttcagacctgccaacca

SEQ ID NO: 56254 - DNA, 20 bp, Artificial Sequence
  Description of Artificial Sequence: Synthetic oligonucleotide
  Target: SCNA; (-) strand; PAM type: YTN; PAM sequence: TTC
cctgttcttcagacctgcca

SEQ ID NO: 56255 - DNA, 20 bp, Artificial Sequence
  Description of Artificial Sequence: Synthetic oligonucleotide
  Target: SCNA; (-) strand; PAM type: YTN; PAM sequence: TTT
ccctgttcttcagacctgcc

SEQ ID NO: 56256 - DNA, 20 bp, Artificial Sequence
  Description of Artificial Sequence: Synthetic oligonucleotide
  Target: SCNA; (-) strand; PAM type: YTN; PAM sequence: TTT
tccctgttcttcagacctgc

SEQ ID NO: 56257 - DNA, 20 bp, Artificial Sequence
  Description of Artificial Sequence: Synthetic oligonucleotide
  Target: SCNA; (-) strand; PAM type: YTN; PAM sequence: TTT
ttccctgttcttcagacctg

SEQ ID NO: 56258 - DNA, 20 bp, Artificial Sequence
  Description of Artificial Sequence: Synthetic oligonucleotide
  Target: SCNA; (-) strand; PAM type: YTN; PAM sequence: CTT
tttccctgttcttcagacct

SEQ ID NO: 56259 - DNA, 20 bp, Artificial Sequence
  Description of Artificial Sequence: Synthetic oligonucleotide
  Target: SCNA; (-) strand; PAM type: YTN; PAM sequence: CTG
tctttttccctgttcttcag

SEQ ID NO: 56260 - DNA, 20 bp, Artificial Sequence
  Description of Artificial Sequence: Synthetic oligonucleotide
  Target: SCNA; (-) strand; PAM type: YTN; PAM sequence: CTA
cactgtctttttccctgttc

SEQ ID NO: 56261 - DNA, 20 bp, Artificial Sequence
  Description of Artificial Sequence: Synthetic oligonucleotide
  Target: SCNA; (-) strand; PAM type: YTN; PAM sequence: CTA
actacactgtctttttccct

SEQ ID NO: 56262 - DNA, 20 bp, Artificial Sequence
  Description of Artificial Sequence: Synthetic oligonucleotide
  Target: SCNA; (-) strand; PAM type: YTN; PAM sequence: CTC
taactacactgtctttttcc

SEQ ID NO: 56263 - DNA, 20 bp, Artificial Sequence
  Description of Artificial Sequence: Synthetic oligonucleotide
  Target: SCNA; (-) strand; PAM type: YTN; PAM sequence: CTA
cactctaactacactgtctt

SEQ ID NO: 56264 - DNA, 20 bp, Artificial Sequence
  Description of Artificial Sequence: Synthetic oligonucleotide
  Target: SCNA; (-) strand; PAM type: YTN; PAM sequence: CTC
caactacactctaactacac

SEQ ID NO: 56265 - DNA, 20 bp, Artificial Sequence
  Description of Artificial Sequence: Synthetic oligonucleotide
  Target: SCNA; (-) strand; PAM type: YTN; PAM sequence: TTG
tatgccaccctccaactaca

SEQ ID NO: 56266 - DNA, 20 bp, Artificial Sequence
  Description of Artificial Sequence: Synthetic oligonucleotide
  Target: SCNA; (-) strand; PAM type: YTN; PAM sequence: CTT
gtatgccaccctccaactac

SEQ ID NO: 56267 - DNA, 20 bp, Artificial Sequence
  Description of Artificial Sequence: Synthetic oligonucleotide
  Target: SCNA; (-) strand; PAM type: YTN; PAM sequence: CTC
cttgtatgccaccctccaac

SEQ ID NO: 56268 - DNA, 20 bp, Artificial Sequence
  Description of Artificial Sequence: Synthetic oligonucleotide
  Target: SCNA; (-) strand; PAM type: YTN; PAM sequence: TTC
tccttgtatgccaccctcca

SEQ ID NO: 56269 - DNA, 20 bp, Artificial Sequence
  Description of Artificial Sequence: Synthetic oligonucleotide
  Target: SCNA; (-) strand; PAM type: YTN; PAM sequence: TTT
ctccttgtatgccaccctcc

SEQ ID NO: 56270 - DNA, 20 bp, Artificial Sequence
  Description of Artificial Sequence: Synthetic oligonucleotide
  Target: SCNA; (-) strand; PAM type: YTN; PAM sequence: TTT
tctccttgtatgccaccctc

SEQ ID NO: 56271 - DNA, 20 bp, Artificial Sequence
  Description of Artificial Sequence: Synthetic oligonucleotide
  Target: SCNA; (-) strand; PAM type: YTN; PAM sequence: CTT
ttctccttgtatgccaccct

SEQ ID NO: 56272 - DNA, 20 bp, Artificial Sequence
  Description of Artificial Sequence: Synthetic oligonucleotide
  Target: SCNA; (-) strand; PAM type: YTN; PAM sequence: CTA
tcccttttctccttgtatgc

SEQ ID NO: 56273 - DNA, 20 bp, Artificial Sequence
  Description of Artificial Sequence: Synthetic oligonucleotide
  Target: SCNA; (-) strand; PAM type: YTN; PAM sequence: TTC
ctatcccttttctccttgta

SEQ ID NO: 56274 - DNA, 20 bp, Artificial Sequence
  Description of Artificial Sequence: Synthetic oligonucleotide
  Target: SCNA; (-) strand; PAM type: YTN; PAM sequence: CTT
cctatcccttttctccttgt

SEQ ID NO: 56275 - DNA, 20 bp, Artificial Sequence
  Description of Artificial Sequence: Synthetic oligonucleotide
  Target: SCNA; (-) strand; PAM type: YTN; PAM sequence: TTA
cttcctatcccttttctcct

SEQ ID NO: 56276 - DNA, 20 bp, Artificial Sequence
  Description of Artificial Sequence: Synthetic oligonucleotide
  Target: SCNA; (-) strand; PAM type: YTN; PAM sequence: CTT
acttcctatcccttttctcc

SEQ ID NO: 56277 - DNA, 20 bp, Artificial Sequence
  Description of Artificial Sequence: Synthetic oligonucleotide
  Target: SCNA; (-) strand; PAM type: YTN; PAM sequence: TTC
ttacttcctatcccttttct

SEQ ID NO: 56278 - DNA, 20 bp, Artificial Sequence
  Description of Artificial Sequence: Synthetic oligonucleotide
  Target: SCNA; (-) strand; PAM type: YTN; PAM sequence: CTT
cttacttcctatcccttttc

SEQ ID NO: 56279 - DNA, 20 bp, Artificial Sequence
  Description of Artificial Sequence: Synthetic oligonucleotide
  Target: SCNA; (-) strand; PAM type: YTN; PAM sequence: CTC
agtaacttcttacttcctat

SEQ ID NO: 56280 - DNA, 20 bp, Artificial Sequence
  Description of Artificial Sequence: Synthetic oligonucleotide
  Target: SCNA; (-) strand; PAM type: YTN; PAM sequence: CTG
gacctcagtaacttcttact

SEQ ID NO: 56281 - DNA, 20 bp, Artificial Sequence
  Description of Artificial Sequence: Synthetic oligonucleotide
  Target: SCNA; (-) strand; PAM type: YTN; PAM sequence: TTA
tctggacctcagtaacttct

SEQ ID NO: 56282 - DNA, 20 bp, Artificial Sequence
  Description of Artificial Sequence: Synthetic oligonucleotide
  Target: SCNA; (-) strand; PAM type: YTN; PAM sequence: CTA
cattatctggacctcagtaa

SEQ ID NO: 56283 - DNA, 20 bp, Artificial Sequence
  Description of Artificial Sequence: Synthetic oligonucleotide
  Target: SCNA; (-) strand; PAM type: YTN; PAM sequence: TTA
aaggccctacattatctgga

SEQ ID NO: 56284 - DNA, 20 bp, Artificial Sequence
  Description of Artificial Sequence: Synthetic oligonucleotide
  Target: SCNA; (-) strand; PAM type: YTN; PAM sequence: TTT
aaaggccctacattatctgg

SEQ ID NO: 56285 - DNA, 20 bp, Artificial Sequence
  Description of Artificial Sequence: Synthetic oligonucleotide
  Target: SCNA; (-) strand; PAM type: YTN; PAM sequence: TTT
taaaggccctacattatctg

SEQ ID NO: 56286 - DNA, 20 bp, Artificial Sequence
  Description of Artificial Sequence: Synthetic oligonucleotide
  Target: SCNA; (-) strand; PAM type: YTN; PAM sequence: CTG
tgttttaaaggccctacatt

SEQ ID NO: 56287 - DNA, 20 bp, Artificial Sequence
  Description of Artificial Sequence: Synthetic oligonucleotide
  Target: SCNA; (-) strand; PAM type: YTN; PAM sequence: TTA
ctgtgttttaaaggccctac

SEQ ID NO: 56288 - DNA, 20 bp, Artificial Sequence
  Description of Artificial Sequence: Synthetic oligonucleotide
  Target: SCNA; (-) strand; PAM type: YTN; PAM sequence: TTT
actgtgttttaaaggcccta

SEQ ID NO: 56289 - DNA, 20 bp, Artificial Sequence
  Description of Artificial Sequence: Synthetic oligonucleotide
  Target: SCNA; (-) strand; PAM type: YTN; PAM sequence: CTT
tactgtgttttaaaggccct

SEQ ID NO: 56290 - DNA, 20 bp, Artificial Sequence
  Description of Artificial Sequence: Synthetic oligonucleotide
  Target: SCNA; (-) strand; PAM type: YTN; PAM sequence: TTA
tcatacatagaatgaaatgc

SEQ ID NO: 56291 - DNA, 20 bp, Artificial Sequence
  Description of Artificial Sequence: Synthetic oligonucleotide
  Target: SCNA; (-) strand; PAM type: YTN; PAM sequence: CTT
atcatacatagaatgaaatg

SEQ ID NO: 56292 - DNA, 20 bp, Artificial Sequence
  Description of Artificial Sequence: Synthetic oligonucleotide
  Target: SCNA; (-) strand; PAM type: YTN; PAM sequence: CTC
ttatcatacatagaatgaaa

SEQ ID NO: 56293 - DNA, 20 bp, Artificial Sequence
  Description of Artificial Sequence: Synthetic oligonucleotide
  Target: SCNA; (-) strand; PAM type: YTN; PAM sequence: CTC
ccaaccatccagtgacctct

SEQ ID NO: 56294 - DNA, 20 bp, Artificial Sequence
  Description of Artificial Sequence: Synthetic oligonucleotide
  Target: SCNA; (-) strand; PAM type: YTN; PAM sequence: CTG
ctcccaaccatccagtgacc

SEQ ID NO: 56295 - DNA, 20 bp, Artificial Sequence
  Description of Artificial Sequence: Synthetic oligonucleotide
  Target: SCNA; (-) strand; PAM type: YTN; PAM sequence: CTC
tgctcccaaccatccagtga

SEQ ID NO: 56296 - DNA, 20 bp, Artificial Sequence
  Description of Artificial Sequence: Synthetic oligonucleotide
  Target: SCNA; (-) strand; PAM type: YTN; PAM sequence: TTA
agaaagaaaccagatcacat

SEQ ID NO: 56297 - DNA, 20 bp, Artificial Sequence
  Description of Artificial Sequence: Synthetic oligonucleotide
  Target: SCNA; (-) strand; PAM type: YTN; PAM sequence: TTT
aagaaagaaaccagatcaca

SEQ ID NO: 56298 - DNA, 20 bp, Artificial Sequence
  Description of Artificial Sequence: Synthetic oligonucleotide
  Target: SCNA; (-) strand; PAM type: YTN; PAM sequence: TTT
taagaaagaaaccagatcac

SEQ ID NO: 56299 - DNA, 20 bp, Artificial Sequence
  Description of Artificial Sequence: Synthetic oligonucleotide
  Target: SCNA; (-) strand; PAM type: YTN; PAM sequence: CTT
ttaagaaagaaaccagatca

SEQ ID NO: 56300 - DNA, 20 bp, Artificial Sequence
  Description of Artificial Sequence: Synthetic oligonucleotide
  Target: SCNA; (-) strand; PAM type: YTN; PAM sequence: TTC
ttttaagaaagaaaccagat

SEQ ID NO: 56301 - DNA, 20 bp, Artificial Sequence
  Description of Artificial Sequence: Synthetic oligonucleotide
  Target: SCNA; (-) strand; PAM type: YTN; PAM sequence: TTG
agcagtcggaataattcttt

SEQ ID NO: 56302 - DNA, 20 bp, Artificial Sequence
  Description of Artificial Sequence: Synthetic oligonucleotide
  Target: SCNA; (-) strand; PAM type: YTN; PAM sequence: CTT
gagcagtcggaataattctt

SEQ ID NO: 56303 - DNA, 20 bp, Artificial Sequence
  Description of Artificial Sequence: Synthetic oligonucleotide
  Target: SCNA; (-) strand; PAM type: YTN; PAM sequence: TTC
ttgagcagtcggaataattc

SEQ ID NO: 56304 - DNA, 20 bp, Artificial Sequence
  Description of Artificial Sequence: Synthetic oligonucleotide
  Target: SCNA; (-) strand; PAM type: YTN; PAM sequence: CTA
gtccattcttgagcagtcgg

SEQ ID NO: 56305 - DNA, 20 bp, Artificial Sequence
  Description of Artificial Sequence: Synthetic oligonucleotide
  Target: SCNA; (-) strand; PAM type: YTN; PAM sequence: TTA
gacacccaacctagtccatt

SEQ ID NO: 56306 - DNA, 20 bp, Artificial Sequence
  Description of Artificial Sequence: Synthetic oligonucleotide
  Target: SCNA; (-) strand; PAM type: YTN; PAM sequence: CTT
agacacccaacctagtccat

SEQ ID NO: 56307 - DNA, 20 bp, Artificial Sequence
  Description of Artificial Sequence: Synthetic oligonucleotide
  Target: SCNA; (-) strand; PAM type: YTN; PAM sequence: TTC
cacttagacacccaacctag

SEQ ID NO: 56308 - DNA, 20 bp, Artificial Sequence
  Description of Artificial Sequence: Synthetic oligonucleotide
  Target: SCNA; (-) strand; PAM type: YTN; PAM sequence: CTT
ccacttagacacccaaccta

SEQ ID NO: 56309 - DNA, 20 bp, Artificial Sequence
  Description of Artificial Sequence: Synthetic oligonucleotide
  Target: SCNA; (-) strand; PAM type: YTN; PAM sequence: CTG
cttccacttagacacccaac

SEQ ID NO: 56310 - DNA, 20 bp, Artificial Sequence
  Description of Artificial Sequence: Synthetic oligonucleotide
  Target: SCNA; (-) strand; PAM type: YTN; PAM sequence: CTG
cctgcttccacttagacacc

SEQ ID NO: 56311 - DNA, 20 bp, Artificial Sequence
  Description of Artificial Sequence: Synthetic oligonucleotide
  Target: SCNA; (-) strand; PAM type: YTN; PAM sequence: CTG
atctgcctgcttccacttag

SEQ ID NO: 56312 - DNA, 20 bp, Artificial Sequence
  Description of Artificial Sequence: Synthetic oligonucleotide
  Target: SCNA; (-) strand; PAM type: YTN; PAM sequence: CTG
aactgatctgcctgcttcca

SEQ ID NO: 56313 - DNA, 20 bp, Artificial Sequence
  Description of Artificial Sequence: Synthetic oligonucleotide
  Target: SCNA; (-) strand; PAM type: YTN; PAM sequence: CTC
tgaactgatctgcctgcttc

SEQ ID NO: 56314 - DNA, 20 bp, Artificial Sequence
  Description of Artificial Sequence: Synthetic oligonucleotide
  Target: SCNA; (-) strand; PAM type: YTN; PAM sequence: CTA
acctctgaactgatctgcct

SEQ ID NO: 56315 - DNA, 20 bp, Artificial Sequence
  Description of Artificial Sequence: Synthetic oligonucleotide
  Target: SCNA; (-) strand; PAM type: YTN; PAM sequence: TTC
cctaacctctgaactgatct

SEQ ID NO: 56316 - DNA, 20 bp, Artificial Sequence
  Description of Artificial Sequence: Synthetic oligonucleotide
  Target: SCNA; (-) strand; PAM type: YTN; PAM sequence: CTT
ccctaacctctgaactgatc

SEQ ID NO: 56317 - DNA, 20 bp, Artificial Sequence
  Description of Artificial Sequence: Synthetic oligonucleotide
  Target: SCNA; (-) strand; PAM type: YTN; PAM sequence: CTC
cttccctaacctctgaactg

SEQ ID NO: 56318 - DNA, 20 bp, Artificial Sequence
  Description of Artificial Sequence: Synthetic oligonucleotide
  Target: SCNA; (-) strand; PAM type: YTN; PAM sequence: CTG
gactccttccctaacctctg

SEQ ID NO: 56319 - DNA, 20 bp, Artificial Sequence
  Description of Artificial Sequence: Synthetic oligonucleotide
  Target: SCNA; (-) strand; PAM type: YTN; PAM sequence: CTC
acctggactccttccctaac

SEQ ID NO: 56320 - DNA, 20 bp, Artificial Sequence
  Description of Artificial Sequence: Synthetic oligonucleotide
  Target: SCNA; (-) strand; PAM type: YTN; PAM sequence: TTC
tcacctggactccttcccta

SEQ ID NO: 56321 - DNA, 20 bp, Artificial Sequence
  Description of Artificial Sequence: Synthetic oligonucleotide
  Target: SCNA; (-) strand; PAM type: YTN; PAM sequence: TTT
ctcacctggactccttccct

SEQ ID NO: 56322 - DNA, 20 bp, Artificial Sequence
  Description of Artificial Sequence: Synthetic oligonucleotide
  Target: SCNA; (-) strand; PAM type: YTN; PAM sequence: TTC
atcatttctcacctggactc

SEQ ID NO: 56323 - DNA, 20 bp, Artificial Sequence
  Description of Artificial Sequence: Synthetic oligonucleotide
  Target: SCNA; (-) strand; PAM type: YTN; PAM sequence: CTT
catcatttctcacctggact

SEQ ID NO: 56324 - DNA, 20 bp, Artificial Sequence
  Description of Artificial Sequence: Synthetic oligonucleotide
  Target: SCNA; (-) strand; PAM type: YTN; PAM sequence: CTA
ggccttcatcatttctcacc

SEQ ID NO: 56325 - DNA, 20 bp, Artificial Sequence
  Description of Artificial Sequence: Synthetic oligonucleotide
  Target: SCNA; (-) strand; PAM type: YTN; PAM sequence: CTA
ggctaggccttcatcatttc

SEQ ID NO: 56326 - DNA, 20 bp, Artificial Sequence
  Description of Artificial Sequence: Synthetic oligonucleotide
  Target: SCNA; (-) strand; PAM type: YTN; PAM sequence: TTA
ccaccctaggctaggccttc

SEQ ID NO: 56327 - DNA, 20 bp, Artificial Sequence
  Description of Artificial Sequence: Synthetic oligonucleotide
  Target: SCNA; (-) strand; PAM type: YTN; PAM sequence: CTG
ttaccaccctaggctaggcc

SEQ ID NO: 56328 - DNA, 20 bp, Artificial Sequence
  Description of Artificial Sequence: Synthetic oligonucleotide
  Target: SCNA; (-) strand; PAM type: YTN; PAM sequence: CTA
ctgttaccaccctaggctag

SEQ ID NO: 56329 - DNA, 20 bp, Artificial Sequence
  Description of Artificial Sequence: Synthetic oligonucleotide
  Target: SCNA; (-) strand; PAM type: YTN; PAM sequence: CTC
tactgttaccaccctaggct

SEQ ID NO: 56330 - DNA, 20 bp, Artificial Sequence
  Description of Artificial Sequence: Synthetic oligonucleotide
  Target: SCNA; (-) strand; PAM type: YTN; PAM sequence: TTC
tctactgttaccaccctagg

SEQ ID NO: 56331 - DNA, 20 bp, Artificial Sequence
  Description of Artificial Sequence: Synthetic oligonucleotide
  Target: SCNA; (-) strand; PAM type: YTN; PAM sequence: CTT
ctctactgttaccaccctag

SEQ ID NO: 56332 - DNA, 20 bp, Artificial Sequence
  Description of Artificial Sequence: Synthetic oligonucleotide
  Target: SCNA; (-) strand; PAM type: YTN; PAM sequence: CTC
ccttctctactgttaccacc

SEQ ID NO: 56333 - DNA, 20 bp, Artificial Sequence
  Description of Artificial Sequence: Synthetic oligonucleotide
  Target: SCNA; (-) strand; PAM type: YTN; PAM sequence: TTA
ccatgtctcccttctctact

SEQ ID NO: 56334 - DNA, 20 bp, Artificial Sequence
  Description of Artificial Sequence: Synthetic oligonucleotide
  Target: SCNA; (-) strand; PAM type: YTN; PAM sequence: CTT
accatgtctcccttctctac

SEQ ID NO: 56335 - DNA, 20 bp, Artificial Sequence
  Description of Artificial Sequence: Synthetic oligonucleotide
  Target: SCNA; (-) strand; PAM type: YTN; PAM sequence: TTC
aaaatgtatccccagtctta

SEQ ID NO: 56336 - DNA, 20 bp, Artificial Sequence
  Description of Artificial Sequence: Synthetic oligonucleotide
  Target: SCNA; (-) strand; PAM type: YTN; PAM sequence: CTG
taattcaaaatgtatcccca

SEQ ID NO: 56337 - DNA, 20 bp, Artificial Sequence
  Description of Artificial Sequence: Synthetic oligonucleotide
  Target: SCNA; (-) strand; PAM type: YTN; PAM sequence: CTA
cactgtaattcaaaatgtat

SEQ ID NO: 56338 - DNA, 20 bp, Artificial Sequence
  Description of Artificial Sequence: Synthetic oligonucleotide
  Target: SCNA; (-) strand; PAM type: YTN; PAM sequence: TTA
cctacactgtaattcaaaat

SEQ ID NO: 56339 - DNA, 20 bp, Artificial Sequence
  Description of Artificial Sequence: Synthetic oligonucleotide
  Target: SCNA; (-) strand; PAM type: YTN; PAM sequence: TTT
acctacactgtaattcaaaa

SEQ ID NO: 56340 - DNA, 20 bp, Artificial Sequence
  Description of Artificial Sequence: Synthetic oligonucleotide
  Target: SCNA; (-) strand; PAM type: YTN; PAM sequence: TTT
tacctacactgtaattcaaa

SEQ ID NO: 56341 - DNA, 20 bp, Artificial Sequence
  Description of Artificial Sequence: Synthetic oligonucleotide
  Target: SCNA; (-) strand; PAM type: YTN; PAM sequence: CTA
ataattttacctacactgta

SEQ ID NO: 56342 - DNA, 20 bp, Artificial Sequence
  Description of Artificial Sequence: Synthetic oligonucleotide
  Target: SCNA; (-) strand; PAM type: YTN; PAM sequence: TTA
agctaataattttacctaca

SEQ ID NO: 56343 - DNA, 20 bp, Artificial Sequence
  Description of Artificial Sequence: Synthetic oligonucleotide
  Target: SCNA; (-) strand; PAM type: YTN; PAM sequence: CTT
aagctaataattttacctac

SEQ ID NO: 56344 - DNA, 20 bp, Artificial Sequence
  Description of Artificial Sequence: Synthetic oligonucleotide
  Target: SCNA; (-) strand; PAM type: YTN; PAM sequence: CTA
acccttaagctaataatttt

SEQ ID NO: 56345 - DNA, 20 bp, Artificial Sequence
  Description of Artificial Sequence: Synthetic oligonucleotide
  Target: SCNA; (-) strand; PAM type: YTN; PAM sequence: TTA
tatctaacccttaagctaat

SEQ ID NO: 56346 - DNA, 20 bp, Artificial Sequence
  Description of Artificial Sequence: Synthetic oligonucleotide
  Target: SCNA; (-) strand; PAM type: YTN; PAM sequence: TTT
atatctaacccttaagctaa

SEQ ID NO: 56347 - DNA, 20 bp, Artificial Sequence
  Description of Artificial Sequence: Synthetic oligonucleotide
  Target: SCNA; (-) strand; PAM type: YTN; PAM sequence: TTT
tatatctaacccttaagcta

SEQ ID NO: 56348 - DNA, 20 bp, Artificial Sequence
  Description of Artificial Sequence: Synthetic oligonucleotide
  Target: SCNA; (-) strand; PAM type: YTN; PAM sequence: CTT
ttatatctaacccttaagct

SEQ ID NO: 56349 - DNA, 20 bp, Artificial Sequence
  Description of Artificial Sequence: Synthetic oligonucleotide
  Target: SCNA; (-) strand; PAM type: YTN; PAM sequence: TTC
ataccttttatatctaaccc

SEQ ID NO: 56350 - DNA, 20 bp, Artificial Sequence
  Description of Artificial Sequence: Synthetic oligonucleotide
  Target: SCNA; (-) strand; PAM type: YTN; PAM sequence: TTT
cataccttttatatctaacc

SEQ ID NO: 56351 - DNA, 20 bp, Artificial Sequence
  Description of Artificial Sequence: Synthetic oligonucleotide
  Target: SCNA; (-) strand; PAM type: YTN; PAM sequence: CTT
tcataccttttatatctaac

SEQ ID NO: 56352 - DNA, 20 bp, Artificial Sequence
  Description of Artificial Sequence: Synthetic oligonucleotide
  Target: SCNA; (-) strand; PAM type: YTN; PAM sequence: TTC
ctttcataccttttatatct

SEQ ID NO: 56353 - DNA, 20 bp, Artificial Sequence
  Description of Artificial Sequence: Synthetic oligonucleotide
  Target: SCNA; (-) strand; PAM type: YTN; PAM sequence: TTT
cctttcataccttttatatc

SEQ ID NO: 56354 - DNA, 20 bp, Artificial Sequence
  Description of Artificial Sequence: Synthetic oligonucleotide
  Target: SCNA; (-) strand; PAM type: YTN; PAM sequence: TTT
tcctttcataccttttatat

SEQ ID NO: 56355 - DNA, 20 bp, Artificial Sequence
  Description of Artificial Sequence: Synthetic oligonucleotide
  Target: SCNA; (-) strand; PAM type: YTN; PAM sequence: CTT
ttcctttcataccttttata

SEQ ID NO: 56356 - DNA, 20 bp, Artificial Sequence
  Description of Artificial Sequence: Synthetic oligonucleotide
  Target: SCNA; (-) strand; PAM type: YTN; PAM sequence: TTG
atccttttcctttcatacct

SEQ ID NO: 56357 - DNA, 20 bp, Artificial Sequence
  Description of Artificial Sequence: Synthetic oligonucleotide
  Target: SCNA; (-) strand; PAM type: YTN; PAM sequence: CTT
gatccttttcctttcatacc

SEQ ID NO: 56358 - DNA, 20 bp, Artificial Sequence
  Description of Artificial Sequence: Synthetic oligonucleotide
  Target: SCNA; (-) strand; PAM type: YTN; PAM sequence: TTG
cagatataccatacatatcc

SEQ ID NO: 56359 - DNA, 20 bp, Artificial Sequence
  Description of Artificial Sequence: Synthetic oligonucleotide
  Target: SCNA; (-) strand; PAM type: YTN; PAM sequence: TTT
gcagatataccatacatatc

SEQ ID NO: 56360 - DNA, 20 bp, Artificial Sequence
  Description of Artificial Sequence: Synthetic oligonucleotide
  Target: SCNA; (-) strand; PAM type: YTN; PAM sequence: CTA
gcatttgcagatataccata

SEQ ID NO: 56361 - DNA, 20 bp, Artificial Sequence
  Description of Artificial Sequence: Synthetic oligonucleotide
  Target: SCNA; (-) strand; PAM type: YTN; PAM sequence: CTC
ctagcatttgcagatatacc

SEQ ID NO: 56362 - DNA, 20 bp, Artificial Sequence
  Description of Artificial Sequence: Synthetic oligonucleotide
  Target: SCNA; (-) strand; PAM type: YTN; PAM sequence: TTG
gtctcctagcatttgcagat

SEQ ID NO: 56363 - DNA, 20 bp, Artificial Sequence
  Description of Artificial Sequence: Synthetic oligonucleotide
  Target: SCNA; (-) strand; PAM type: YTN; PAM sequence: TTT
ggtctcctagcatttgcaga

SEQ ID NO: 56364 - DNA, 20 bp, Artificial Sequence
  Description of Artificial Sequence: Synthetic oligonucleotide
  Target: SCNA; (-) strand; PAM type: YTN; PAM sequence: CTT
tggtctcctagcatttgcag

SEQ ID NO: 56365 - DNA, 20 bp, Artificial Sequence
  Description of Artificial Sequence: Synthetic oligonucleotide
  Target: SCNA; (-) strand; PAM type: YTN; PAM sequence: TTC
actttggtctcctagcattt

SEQ ID NO: 56366 - DNA, 20 bp, Artificial Sequence
  Description of Artificial Sequence: Synthetic oligonucleotide
  Target: SCNA; (-) strand; PAM type: YTN; PAM sequence: TTT
cactttggtctcctagcatt

SEQ ID NO: 56367 - DNA, 20 bp, Artificial Sequence
  Description of Artificial Sequence: Synthetic oligonucleotide
  Target: SCNA; (-) strand; PAM type: YTN; PAM sequence: CTA
tgtgaaatttcactttggtc

SEQ ID NO: 56368 - DNA, 20 bp, Artificial Sequence
  Description of Artificial Sequence: Synthetic oligonucleotide
  Target: SCNA; (-) strand; PAM type: YTN; PAM sequence: TTC
actatgtgaaatttcacttt

SEQ ID NO: 56369 - DNA, 20 bp, Artificial Sequence
  Description of Artificial Sequence: Synthetic oligonucleotide
  Target: SCNA; (-) strand; PAM type: YTN; PAM sequence: TTT
cactatgtgaaatttcactt

SEQ ID NO: 56370 - DNA, 20 bp, Artificial Sequence
  Description of Artificial Sequence: Synthetic oligonucleotide
  Target: SCNA; (-) strand; PAM type: YTN; PAM sequence: CTG
aaacacagtaatttcactat

SEQ ID NO: 56371 - DNA, 20 bp, Artificial Sequence
  Description of Artificial Sequence: Synthetic oligonucleotide
  Target: SCNA; (-) strand; PAM type: YTN; PAM sequence: CTG
ctgaaacacagtaatttcac

SEQ ID NO: 56372 - DNA, 20 bp, Artificial Sequence
  Description of Artificial Sequence: Synthetic oligonucleotide
  Target: SCNA; (-) strand; PAM type: YTN; PAM sequence: CTA
actgctgaaacacagtaatt

SEQ ID NO: 56373 - DNA, 20 bp, Artificial Sequence
  Description of Artificial Sequence: Synthetic oligonucleotide
  Target: SCNA; (-) strand; PAM type: YTN; PAM sequence: TTA
tccctaactgctgaaacaca

SEQ ID NO: 56374 - DNA, 20 bp, Artificial Sequence
  Description of Artificial Sequence: Synthetic oligonucleotide
  Target: SCNA; (-) strand; PAM type: YTN; PAM sequence: CTC
caaaaagttatccctaactg

SEQ ID NO: 56375 - DNA, 20 bp, Artificial Sequence
  Description of Artificial Sequence: Synthetic oligonucleotide
  Target: SCNA; (-) strand; PAM type: YTN; PAM sequence: CTC
cagaactccaaaaagttatc

SEQ ID NO: 56376 - DNA, 20 bp, Artificial Sequence
  Description of Artificial Sequence: Synthetic oligonucleotide
  Target: SCNA; (-) strand; PAM type: YTN; PAM sequence: TTA
tccatgcaaaaaagtccagc

SEQ ID NO: 56377 - DNA, 20 bp, Artificial Sequence
  Description of Artificial Sequence: Synthetic oligonucleotide
  Target: SCNA; (-) strand; PAM type: YTN; PAM sequence: TTT
atccatgcaaaaaagtccag

SEQ ID NO: 56378 - DNA, 20 bp, Artificial Sequence
  Description of Artificial Sequence: Synthetic oligonucleotide
  Target: SCNA; (-) strand; PAM type: YTN; PAM sequence: TTT
tatccatgcaaaaaagtcca

SEQ ID NO: 56379 - DNA, 20 bp, Artificial Sequence
  Description of Artificial Sequence: Synthetic oligonucleotide
  Target: SCNA; (-) strand; PAM type: YTN; PAM sequence: CTG
aattttatccatgcaaaaaa

SEQ ID NO: 56380 - DNA, 20 bp, Artificial Sequence
  Description of Artificial Sequence: Synthetic oligonucleotide
  Target: SCNA; (-) strand; PAM type: YTN; PAM sequence: CTG
tctgaattttatccatgcaa

SEQ ID NO: 56381 - DNA, 20 bp, Artificial Sequence
  Description of Artificial Sequence: Synthetic oligonucleotide
  Target: SCNA; (-) strand; PAM type: YTN; PAM sequence: CTC
ctgtctgaattttatccatg

SEQ ID NO: 56382 - DNA, 20 bp, Artificial Sequence
  Description of Artificial Sequence: Synthetic oligonucleotide
  Target: SCNA; (-) strand; PAM type: YTN; PAM sequence: TTA
tgtctcctgtctgaatttta

SEQ ID NO: 56383 - DNA, 20 bp, Artificial Sequence
  Description of Artificial Sequence: Synthetic oligonucleotide
  Target: SCNA; (-) strand; PAM type: YTN; PAM sequence: TTT
atgtctcctgtctgaatttt

SEQ ID NO: 56384 - DNA, 20 bp, Artificial Sequence
  Description of Artificial Sequence: Synthetic oligonucleotide
  Target: SCNA; (-) strand; PAM type: YTN; PAM sequence: TTT
tatgtctcctgtctgaattt

SEQ ID NO: 56385 - DNA, 20 bp, Artificial Sequence
  Description of Artificial Sequence: Synthetic oligonucleotide
  Target: SCNA; (-) strand; PAM type: YTN; PAM sequence: CTT
ttatgtctcctgtctgaatt

SEQ ID NO: 56386 - DNA, 20 bp, Artificial Sequence
  Description of Artificial Sequence: Synthetic oligonucleotide
  Target: SCNA; (-) strand; PAM type: YTN; PAM sequence: CTA
agaaggcttttatgtctcct

SEQ ID NO: 56387 - DNA, 20 bp, Artificial Sequence
  Description of Artificial Sequence: Synthetic oligonucleotide
  Target: SCNA; (-) strand; PAM type: YTN; PAM sequence: TTA
ccactaagaaggcttttatg

SEQ ID NO: 56388 - DNA, 20 bp, Artificial Sequence
  Description of Artificial Sequence: Synthetic oligonucleotide
  Target: SCNA; (-) strand; PAM type: YTN; PAM sequence: CTT
accactaagaaggcttttat

SEQ ID NO: 56389 - DNA, 20 bp, Artificial Sequence
  Description of Artificial Sequence: Synthetic oligonucleotide
  Target: SCNA; (-) strand; PAM type: YTN; PAM sequence: CTG
tcttaccactaagaaggctt

SEQ ID NO: 56390 - DNA, 20 bp, Artificial Sequence
  Description of Artificial Sequence: Synthetic oligonucleotide
  Target: SCNA; (-) strand; PAM type: YTN; PAM sequence: CTA
ataactgtcttaccactaag

SEQ ID NO: 56391 - DNA, 20 bp, Artificial Sequence
  Description of Artificial Sequence: Synthetic oligonucleotide
  Target: SCNA; (-) strand; PAM type: YTN; PAM sequence: TTA
tctaataactgtcttaccac

SEQ ID NO: 56392 - DNA, 20 bp, Artificial Sequence
  Description of Artificial Sequence: Synthetic oligonucleotide
  Target: SCNA; (-) strand; PAM type: YTN; PAM sequence: TTC
ccaattatctaataactgtc

SEQ ID NO: 56393 - DNA, 20 bp, Artificial Sequence
  Description of Artificial Sequence: Synthetic oligonucleotide
  Target: SCNA; (-) strand; PAM type: YTN; PAM sequence: CTT
cccaattatctaataactgt

SEQ ID NO: 56394 - DNA, 20 bp, Artificial Sequence
  Description of Artificial Sequence: Synthetic oligonucleotide
  Target: SCNA; (-) strand; PAM type: YTN; PAM sequence: TTC
aaaatacttcccaattatct

SEQ ID NO: 56395 - DNA, 20 bp, Artificial Sequence
  Description of Artificial Sequence: Synthetic oligonucleotide
  Target: SCNA; (-) strand; PAM type: YTN; PAM sequence: CTT
caaaatacttcccaattatc

SEQ ID NO: 56396 - DNA, 20 bp, Artificial Sequence
  Description of Artificial Sequence: Synthetic oligonucleotide
  Target: SCNA; (-) strand; PAM type: YTN; PAM sequence: CTA
ggtagacaagtatcttcaaa

SEQ ID NO: 56397 - DNA, 20 bp, Artificial Sequence
  Description of Artificial Sequence: Synthetic oligonucleotide
  Target: SCNA; (-) strand; PAM type: YTN; PAM sequence: TTC
taggtagacaagtatcttca

SEQ ID NO: 56398 - DNA, 20 bp, Artificial Sequence
  Description of Artificial Sequence: Synthetic oligonucleotide
  Target: SCNA; (-) strand; PAM type: YTN; PAM sequence: TTC
attctaggtagacaagtatc

SEQ ID NO: 56399 - DNA, 20 bp, Artificial Sequence
  Description of Artificial Sequence: Synthetic oligonucleotide
  Target: SCNA; (-) strand; PAM type: YTN; PAM sequence: CTT
cattctaggtagacaagtat

SEQ ID NO: 56400 - DNA, 20 bp, Artificial Sequence
  Description of Artificial Sequence: Synthetic oligonucleotide
  Target: SCNA; (-) strand; PAM type: YTN; PAM sequence: TTC
ttcattctaggtagacaagt

SEQ ID NO: 56401 - DNA, 20 bp, Artificial Sequence
  Description of Artificial Sequence: Synthetic oligonucleotide
  Target: SCNA; (-) strand; PAM type: YTN; PAM sequence: CTC
aacaaaattcttcattctag

SEQ ID NO: 56402 - DNA, 20 bp, Artificial Sequence
  Description of Artificial Sequence: Synthetic oligonucleotide
  Target: SCNA; (-) strand; PAM type: YTN; PAM sequence: CTC
aaatactcaacaaaattctt

SEQ ID NO: 56403 - DNA, 20 bp, Artificial Sequence
  Description of Artificial Sequence: Synthetic oligonucleotide
  Target: SCNA; (-) strand; PAM type: YTN; PAM sequence: CTC
tcaaatactcaacaaaattc

SEQ ID NO: 56404 - DNA, 20 bp, Artificial Sequence
  Description of Artificial Sequence: Synthetic oligonucleotide
  Target: SCNA; (-) strand; PAM type: YTN; PAM sequence: TTC
agccatatagctctcaaata

SEQ ID NO: 56405 - DNA, 20 bp, Artificial Sequence
  Description of Artificial Sequence: Synthetic oligonucleotide
  Target: SCNA; (-) strand; PAM type: YTN; PAM sequence: TTT
cagccatatagctctcaaat

SEQ ID NO: 56406 - DNA, 20 bp, Artificial Sequence
  Description of Artificial Sequence: Synthetic oligonucleotide
  Target: SCNA; (-) strand; PAM type: YTN; PAM sequence: TTT
tcagccatatagctctcaaa

SEQ ID NO: 56407 - DNA, 20 bp, Artificial Sequence
  Description of Artificial Sequence: Synthetic oligonucleotide
  Target: SCNA; (-) strand; PAM type: YTN; PAM sequence: CTT
ttcagccatatagctctcaa

SEQ ID NO: 56408 - DNA, 20 bp, Artificial Sequence
  Description of Artificial Sequence: Synthetic oligonucleotide
  Target: SCNA; (-) strand; PAM type: YTN; PAM sequence: TTC
ttttcagccatatagctctc

SEQ ID NO: 56409 - DNA, 20 bp, Artificial Sequence
  Description of Artificial Sequence: Synthetic oligonucleotide
  Target: SCNA; (-) strand; PAM type: YTN; PAM sequence: TTT
cttttcagccatatagctct

SEQ ID NO: 56410 - DNA, 20 bp, Artificial Sequence
  Description of Artificial Sequence: Synthetic oligonucleotide
  Target: SCNA; (-) strand; PAM type: YTN; PAM sequence: CTT
tcttttcagccatatagctc

SEQ ID NO: 56411 - DNA, 20 bp, Artificial Sequence
  Description of Artificial Sequence: Synthetic oligonucleotide
  Target: SCNA; (-) strand; PAM type: YTN; PAM sequence: CTC
tttcttttcagccatatagc

SEQ ID NO: 56412 - DNA, 20 bp, Artificial Sequence
  Description of Artificial Sequence: Synthetic oligonucleotide
  Target: SCNA; (-) strand; PAM type: YTN; PAM sequence: CTG
gcctctttcttttcagccat

SEQ ID NO: 56413 - DNA, 20 bp, Artificial Sequence
  Description of Artificial Sequence: Synthetic oligonucleotide
  Target: SCNA; (-) strand; PAM type: YTN; PAM sequence: TTA
tctggcctctttcttttcag

SEQ ID NO: 56414 - DNA, 20 bp, Artificial Sequence
  Description of Artificial Sequence: Synthetic oligonucleotide
  Target: SCNA; (-) strand; PAM type: YTN; PAM sequence: TTT
atctggcctctttcttttca

SEQ ID NO: 56415 - DNA, 20 bp, Artificial Sequence
  Description of Artificial Sequence: Synthetic oligonucleotide
  Target: SCNA; (-) strand; PAM type: YTN; PAM sequence: TTT
tatctggcctctttcttttc

SEQ ID NO: 56416 - DNA, 20 bp, Artificial Sequence
  Description of Artificial Sequence: Synthetic oligonucleotide
  Target: SCNA; (-) strand; PAM type: YTN; PAM sequence: TTG
ttttatctggcctctttctt

SEQ ID NO: 56417 - DNA, 20 bp, Artificial Sequence
  Description of Artificial Sequence: Synthetic oligonucleotide
  Target: SCNA; (-) strand; PAM type: YTN; PAM sequence: CTT
gttttatctggcctctttct

SEQ ID NO: 56418 - DNA, 20 bp, Artificial Sequence
  Description of Artificial Sequence: Synthetic oligonucleotide
  Target: SCNA; (-) strand; PAM type: YTN; PAM sequence: CTC
agggccttgttttatctggc

SEQ ID NO: 56419 - DNA, 20 bp, Artificial Sequence
  Description of Artificial Sequence: Synthetic oligonucleotide
  Target: SCNA; (-) strand; PAM type: YTN; PAM sequence: TTA
ctcagggccttgttttatct

SEQ ID NO: 56420 - DNA, 20 bp, Artificial Sequence
  Description of Artificial Sequence: Synthetic oligonucleotide
  Target: SCNA; (-) strand; PAM type: YTN; PAM sequence: TTG
ttactcagggccttgtttta

SEQ ID NO: 56421 - DNA, 20 bp, Artificial Sequence
  Description of Artificial Sequence: Synthetic oligonucleotide
  Target: SCNA; (-) strand; PAM type: YTN; PAM sequence: CTT
gttactcagggccttgtttt

SEQ ID NO: 56422 - DNA, 20 bp, Artificial Sequence
  Description of Artificial Sequence: Synthetic oligonucleotide
  Target: SCNA; (-) strand; PAM type: YTN; PAM sequence: CTC
ttgttactcagggccttgtt

SEQ ID NO: 56423 - DNA, 20 bp, Artificial Sequence
  Description of Artificial Sequence: Synthetic oligonucleotide
  Target: SCNA; (-) strand; PAM type: YTN; PAM sequence: CTA
ctcttgttactcagggcctt

SEQ ID NO: 56424 - DNA, 20 bp, Artificial Sequence
  Description of Artificial Sequence: Synthetic oligonucleotide
  Target: SCNA; (-) strand; PAM type: YTN; PAM sequence: CTA
tagaatcaaggcccaaggcc

SEQ ID NO: 56425 - DNA, 20 bp, Artificial Sequence
  Description of Artificial Sequence: Synthetic oligonucleotide
  Target: SCNA; (-) strand; PAM type: YTN; PAM sequence: CTC
tatagaatcaaggcccaagg

SEQ ID NO: 56426 - DNA, 20 bp, Artificial Sequence
  Description of Artificial Sequence: Synthetic oligonucleotide
  Target: SCNA; (-) strand; PAM type: YTN; PAM sequence: CTC
tctatagaatcaaggcccaa

SEQ ID NO: 56427 - DNA, 20 bp, Artificial Sequence
  Description of Artificial Sequence: Synthetic oligonucleotide
  Target: SCNA; (-) strand; PAM type: YTN; PAM sequence: TTG
cactctctatagaatcaagg

SEQ ID NO: 56428 - DNA, 20 bp, Artificial Sequence
  Description of Artificial Sequence: Synthetic oligonucleotide
  Target: SCNA; (-) strand; PAM type: YTN; PAM sequence: TTT
gcactctctatagaatcaag

SEQ ID NO: 56429 - DNA, 20 bp, Artificial Sequence
  Description of Artificial Sequence: Synthetic oligonucleotide
  Target: SCNA; (-) strand; PAM type: YTN; PAM sequence: TTT
tgcactctctatagaatcaa

SEQ ID NO: 56430 - DNA, 20 bp, Artificial Sequence
  Description of Artificial Sequence: Synthetic oligonucleotide
  Target: SCNA; (-) strand; PAM type: YTN; PAM sequence: TTA
gccagtggttttgcactctc

SEQ ID NO: 56431 - DNA, 20 bp, Artificial Sequence
  Description of Artificial Sequence: Synthetic oligonucleotide
  Target: SCNA; (-) strand; PAM type: YTN; PAM sequence: TTA
caaaaaattagccagtggtt

SEQ ID NO: 56432 - DNA, 20 bp, Artificial Sequence
  Description of Artificial Sequence: Synthetic oligonucleotide
  Target: SCNA; (-) strand; PAM type: YTN; PAM sequence: TTA
gttacaaaaaattagccagt

SEQ ID NO: 56433 - DNA, 20 bp, Artificial Sequence
  Description of Artificial Sequence: Synthetic oligonucleotide
  Target: SCNA; (-) strand; PAM type: YTN; PAM sequence: CTA
gccagattagttacaaaaaa

SEQ ID NO: 56434 - DNA, 20 bp, Artificial Sequence
  Description of Artificial Sequence: Synthetic oligonucleotide
  Target: SCNA; (-) strand; PAM type: YTN; PAM sequence: TTC
tagccagattagttacaaaa

SEQ ID NO: 56435 - DNA, 20 bp, Artificial Sequence
  Description of Artificial Sequence: Synthetic oligonucleotide
  Target: SCNA; (-) strand; PAM type: YTN; PAM sequence: TTT
ctagccagattagttacaaa

SEQ ID NO: 56436 - DNA, 20 bp, Artificial Sequence
  Description of Artificial Sequence: Synthetic oligonucleotide
  Target: SCNA; (-) strand; PAM type: YTN; PAM sequence: CTG
gaaatttctagccagattag

SEQ ID NO: 56437 - DNA, 20 bp, Artificial Sequence
  Description of Artificial Sequence: Synthetic oligonucleotide
  Target: SCNA; (-) strand; PAM type: YTN; PAM sequence: CTG
gaaatctggaaatttctagc

SEQ ID NO: 56438 - DNA, 20 bp, Artificial Sequence
  Description of Artificial Sequence: Synthetic oligonucleotide
  Target: SCNA; (-) strand; PAM type: YTN; PAM sequence: TTA
atatagtgtgctggaaatct

SEQ ID NO: 56439 - DNA, 20 bp, Artificial Sequence
  Description of Artificial Sequence: Synthetic oligonucleotide
  Target: SCNA; (-) strand; PAM type: YTN; PAM sequence: TTT
aatatagtgtgctggaaatc

SEQ ID NO: 56440 - DNA, 20 bp, Artificial Sequence
  Description of Artificial Sequence: Synthetic oligonucleotide
  Target: SCNA; (-) strand; PAM type: YTN; PAM sequence: CTT
taatatagtgtgctggaaat

SEQ ID NO: 56441 - DNA, 20 bp, Artificial Sequence
  Description of Artificial Sequence: Synthetic oligonucleotide
  Target: SCNA; (-) strand; PAM type: YTN; PAM sequence: TTC
ctttaatatagtgtgctgga

SEQ ID NO: 56442 - DNA, 20 bp, Artificial Sequence
  Description of Artificial Sequence: Synthetic oligonucleotide
  Target: SCNA; (-) strand; PAM type: YTN; PAM sequence: CTT
cctttaatatagtgtgctgg

SEQ ID NO: 56443 - DNA, 20 bp, Artificial Sequence
  Description of Artificial Sequence: Synthetic oligonucleotide
  Target: SCNA; (-) strand; PAM type: YTN; PAM sequence: TTG
gcagtacttcctttaatata

SEQ ID NO: 56444 - DNA, 20 bp, Artificial Sequence
  Description of Artificial Sequence: Synthetic oligonucleotide
  Target: SCNA; (-) strand; PAM type: YTN; PAM sequence: TTT
ggcagtacttcctttaatat

SEQ ID NO: 56445 - DNA, 20 bp, Artificial Sequence
  Description of Artificial Sequence: Synthetic oligonucleotide
  Target: SCNA; (-) strand; PAM type: YTN; PAM sequence: TTT
tggcagtacttcctttaata

SEQ ID NO: 56446 - DNA, 20 bp, Artificial Sequence
  Description of Artificial Sequence: Synthetic oligonucleotide
  Target: SCNA; (-) strand; PAM type: YTN; PAM sequence: TTT
ttggcagtacttcctttaat

SEQ ID NO: 56447 - DNA, 20 bp, Artificial Sequence
  Description of Artificial Sequence: Synthetic oligonucleotide
  Target: SCNA; (-) strand; PAM type: YTN; PAM sequence: TTT
tttggcagtacttcctttaa

SEQ ID NO: 56448 - DNA, 20 bp, Artificial Sequence
  Description of Artificial Sequence: Synthetic oligonucleotide
  Target: SCNA; (-) strand; PAM type: YTN; PAM sequence: TTG
gaatccatgaaatgtttttt

SEQ ID NO: 56449 - DNA, 20 bp, Artificial Sequence
  Description of Artificial Sequence: Synthetic oligonucleotide
  Target: SCNA; (-) strand; PAM type: YTN; PAM sequence: TTT
ggaatccatgaaatgttttt

SEQ ID NO: 56450 - DNA, 20 bp, Artificial Sequence
  Description of Artificial Sequence: Synthetic oligonucleotide
  Target: SCNA; (-) strand; PAM type: YTN; PAM sequence: TTT
tggaatccatgaaatgtttt

SEQ ID NO: 56451 - DNA, 20 bp, Artificial Sequence
  Description of Artificial Sequence: Synthetic oligonucleotide
  Target: SCNA; (-) strand; PAM type: YTN; PAM sequence: TTT
ttggaatccatgaaatgttt

SEQ ID NO: 56452 - DNA, 20 bp, Artificial Sequence
  Description of Artificial Sequence: Synthetic oligonucleotide
  Target: SCNA; (-) strand; PAM type: YTN; PAM sequence: CTA
tttttggaatccatgaaatg

SEQ ID NO: 56453 - DNA, 20 bp, Artificial Sequence
  Description of Artificial Sequence: Synthetic oligonucleotide
  Target: SCNA; (-) strand; PAM type: YTN; PAM sequence: CTC
tatttttggaatccatgaaa

SEQ ID NO: 56454 - DNA, 20 bp, Artificial Sequence
  Description of Artificial Sequence: Synthetic oligonucleotide
  Target: SCNA; (-) strand; PAM type: YTN; PAM sequence: TTG
atctctatttttggaatcca

SEQ ID NO: 56455 - DNA, 20 bp, Artificial Sequence
  Description of Artificial Sequence: Synthetic oligonucleotide
  Target: SCNA; (-) strand; PAM type: YTN; PAM sequence: CTA
cattgatctctatttttgga

SEQ ID NO: 56456 - DNA, 20 bp, Artificial Sequence
  Description of Artificial Sequence: Synthetic oligonucleotide
  Target: SCNA; (-) strand; PAM type: YTN; PAM sequence: TTC
atctacattgatctctattt

SEQ ID NO: 56457 - DNA, 20 bp, Artificial Sequence
  Description of Artificial Sequence: Synthetic oligonucleotide
  Target: SCNA; (-) strand; PAM type: YTN; PAM sequence: TTA
taaattcatctacattgatc

SEQ ID NO: 56458 - DNA, 20 bp, Artificial Sequence
  Description of Artificial Sequence: Synthetic oligonucleotide
  Target: SCNA; (-) strand; PAM type: YTN; PAM sequence: CTT
ataaattcatctacattgat

SEQ ID NO: 56459 - DNA, 20 bp, Artificial Sequence
  Description of Artificial Sequence: Synthetic oligonucleotide
  Target: SCNA; (-) strand; PAM type: YTN; PAM sequence: TTC
atcttataaattcatctaca

SEQ ID NO: 56460 - DNA, 20 bp, Artificial Sequence
  Description of Artificial Sequence: Synthetic oligonucleotide
  Target: SCNA; (-) strand; PAM type: YTN; PAM sequence: TTC
attcatcttataaattcatc

SEQ ID NO: 56461 - DNA, 20 bp, Artificial Sequence
  Description of Artificial Sequence: Synthetic oligonucleotide
  Target: SCNA; (-) strand; PAM type: YTN; PAM sequence: TTC
ccagagttcattcatcttat

SEQ ID NO: 56462 - DNA, 20 bp, Artificial Sequence
  Description of Artificial Sequence: Synthetic oligonucleotide
  Target: SCNA; (-) strand; PAM type: YTN; PAM sequence: CTT
cccagagttcattcatctta

SEQ ID NO: 56463 - DNA, 20 bp, Artificial Sequence
  Description of Artificial Sequence: Synthetic oligonucleotide
  Target: SCNA; (-) strand; PAM type: YTN; PAM sequence: TTG
gtcttcccagagttcattca

SEQ ID NO: 56464 - DNA, 20 bp, Artificial Sequence
  Description of Artificial Sequence: Synthetic oligonucleotide
  Target: SCNA; (-) strand; PAM type: YTN; PAM sequence: CTT
ggtcttcccagagttcattc

SEQ ID NO: 56465 - DNA, 20 bp, Artificial Sequence
  Description of Artificial Sequence: Synthetic oligonucleotide
  Target: SCNA; (-) strand; PAM type: YTN; PAM sequence: CTG
cttggtcttcccagagttca

SEQ ID NO: 56466 - DNA, 20 bp, Artificial Sequence
  Description of Artificial Sequence: Synthetic oligonucleotide
  Target: SCNA; (-) strand; PAM type: YTN; PAM sequence: TTC
agaaatctgcttggtcttcc

SEQ ID NO: 56467 - DNA, 20 bp, Artificial Sequence
  Description of Artificial Sequence: Synthetic oligonucleotide
  Target: SCNA; (-) strand; PAM type: YTN; PAM sequence: TTT
cagaaatctgcttggtcttc

SEQ ID NO: 56468 - DNA, 20 bp, Artificial Sequence
  Description of Artificial Sequence: Synthetic oligonucleotide
  Target: SCNA; (-) strand; PAM type: YTN; PAM sequence: TTG
tttcagaaatctgcttggtc

SEQ ID NO: 56469 - DNA, 20 bp, Artificial Sequence
  Description of Artificial Sequence: Synthetic oligonucleotide
  Target: SCNA; (-) strand; PAM type: YTN; PAM sequence: CTG
tgtgtgtatataatgaaata

SEQ ID NO: 56470 - DNA, 20 bp, Artificial Sequence
  Description of Artificial Sequence: Synthetic oligonucleotide
  Target: SCNA; (-) strand; PAM type: YTN; PAM sequence: TTC
agggtatggtgtgtgtgtgt

SEQ ID NO: 56471 - DNA, 20 bp, Artificial Sequence
  Description of Artificial Sequence: Synthetic oligonucleotide
  Target: SCNA; (-) strand; PAM type: YTN; PAM sequence: TTA
tgtagggtgtagggtatgtt

SEQ ID NO: 56472 - DNA, 20 bp, Artificial Sequence
  Description of Artificial Sequence: Synthetic oligonucleotide
  Target: SCNA; (-) strand; PAM type: YTN; PAM sequence: CTA
acgtgtatatataagtatta

SEQ ID NO: 56473 - DNA, 20 bp, Artificial Sequence
  Description of Artificial Sequence: Synthetic oligonucleotide
  Target: SCNA; (-) strand; PAM type: YTN; PAM sequence: CTG
cagagcactaacgtgtatat

SEQ ID NO: 56474 - DNA, 20 bp, Artificial Sequence
  Description of Artificial Sequence: Synthetic oligonucleotide
  Target: SCNA; (-) strand; PAM type: YTN; PAM sequence: TTA
actgcagagcactaacgtgt

SEQ ID NO: 56475 - DNA, 20 bp, Artificial Sequence
  Description of Artificial Sequence: Synthetic oligonucleotide
  Target: SCNA; (-) strand; PAM type: YTN; PAM sequence: TTA
taaaaattaactgcagagca

SEQ ID NO: 56476 - DNA, 20 bp, Artificial Sequence
  Description of Artificial Sequence: Synthetic oligonucleotide
  Target: SCNA; (-) strand; PAM type: YTN; PAM sequence: TTT
ataaaaattaactgcagagc

SEQ ID NO: 56477 - DNA, 20 bp, Artificial Sequence
  Description of Artificial Sequence: Synthetic oligonucleotide
  Target: SCNA; (-) strand; PAM type: YTN; PAM sequence: CTT
tataaaaattaactgcagag

SEQ ID NO: 56478 - DNA, 20 bp, Artificial Sequence
  Description of Artificial Sequence: Synthetic oligonucleotide
  Target: SCNA; (-) strand; PAM type: YTN; PAM sequence: TTG
gtgcctttataaaaattaac

SEQ ID NO: 56479 - DNA, 20 bp, Artificial Sequence
  Description of Artificial Sequence: Synthetic oligonucleotide
  Target: SCNA; (-) strand; PAM type: YTN; PAM sequence: CTA
attggtgcctttataaaaat

SEQ ID NO: 56480 - DNA, 20 bp, Artificial Sequence
  Description of Artificial Sequence: Synthetic oligonucleotide
  Target: SCNA; (-) strand; PAM type: YTN; PAM sequence: TTA
gaaactaattggtgccttta

SEQ ID NO: 56481 - DNA, 20 bp, Artificial Sequence
  Description of Artificial Sequence: Synthetic oligonucleotide
  Target: SCNA; (-) strand; PAM type: YTN; PAM sequence: TTA
ttagaaactaattggtgcct

SEQ ID NO: 56482 - DNA, 20 bp, Artificial Sequence
  Description of Artificial Sequence: Synthetic oligonucleotide
  Target: SCNA; (-) strand; PAM type: YTN; PAM sequence: CTT
attagaaactaattggtgcc

SEQ ID NO: 56483 - DNA, 20 bp, Artificial Sequence
  Description of Artificial Sequence: Synthetic oligonucleotide
  Target: SCNA; (-) strand; PAM type: YTN; PAM sequence: TTC
ttattagaaactaattggtg

SEQ ID NO: 56484 - DNA, 20 bp, Artificial Sequence
  Description of Artificial Sequence: Synthetic oligonucleotide
  Target: SCNA; (-) strand; PAM type: YTN; PAM sequence: TTT
cttattagaaactaattggt

SEQ ID NO: 56485 - DNA, 20 bp, Artificial Sequence
  Description of Artificial Sequence: Synthetic oligonucleotide
  Target: SCNA; (-) strand; PAM type: YTN; PAM sequence: TTT
tcttattagaaactaattgg

SEQ ID NO: 56486 - DNA, 20 bp, Artificial Sequence
  Description of Artificial Sequence: Synthetic oligonucleotide
  Target: SCNA; (-) strand; PAM type: YTN; PAM sequence: TTT
ttcttattagaaactaattg

SEQ ID NO: 56487 - DNA, 20 bp, Artificial Sequence
  Description of Artificial Sequence: Synthetic oligonucleotide
  Target: SCNA; (-) strand; PAM type: YTN; PAM sequence: CTT
tttcttattagaaactaatt

SEQ ID NO: 56488 - DNA, 20 bp, Artificial Sequence
  Description of Artificial Sequence: Synthetic oligonucleotide
  Target: SCNA; (-) strand; PAM type: YTN; PAM sequence: TTC
tttttcttattagaaactaa

SEQ ID NO: 56489 - DNA, 20 bp, Artificial Sequence
  Description of Artificial Sequence: Synthetic oligonucleotide
  Target: SCNA; (-) strand; PAM type: YTN; PAM sequence: TTT
ctttttcttattagaaacta

SEQ ID NO: 56490 - DNA, 20 bp, Artificial Sequence
  Description of Artificial Sequence: Synthetic oligonucleotide
  Target: SCNA; (-) strand; PAM type: YTN; PAM sequence: TTA
cacatttctttttcttatta

SEQ ID NO: 56491 - DNA, 20 bp, Artificial Sequence
  Description of Artificial Sequence: Synthetic oligonucleotide
  Target: SCNA; (-) strand; PAM type: YTN; PAM sequence: TTT
acacatttctttttcttatt

SEQ ID NO: 56492 - DNA, 20 bp, Artificial Sequence
  Description of Artificial Sequence: Synthetic oligonucleotide
  Target: SCNA; (-) strand; PAM type: YTN; PAM sequence: CTT
tacacatttctttttcttat

SEQ ID NO: 56493 - DNA, 20 bp, Artificial Sequence
  Description of Artificial Sequence: Synthetic oligonucleotide
  Target: SCNA; (-) strand; PAM type: YTN; PAM sequence: TTC
tttacacatttctttttctt

SEQ ID NO: 56494 - DNA, 20 bp, Artificial Sequence
  Description of Artificial Sequence: Synthetic oligonucleotide
  Target: SCNA; (-) strand; PAM type: YTN; PAM sequence: CTT
ctttacacatttctttttct

SEQ ID NO: 56495 - DNA, 20 bp, Artificial Sequence
  Description of Artificial Sequence: Synthetic oligonucleotide
  Target: SCNA; (-) strand; PAM type: YTN; PAM sequence: CTC
ttctttacacatttcttttt

SEQ ID NO: 56496 - DNA, 20 bp, Artificial Sequence
  Description of Artificial Sequence: Synthetic oligonucleotide
  Target: SCNA; (-) strand; PAM type: YTN; PAM sequence: TTC
tcttctttacacatttcttt

SEQ ID NO: 56497 - DNA, 20 bp, Artificial Sequence
  Description of Artificial Sequence: Synthetic oligonucleotide
  Target: SCNA; (-) strand; PAM type: YTN; PAM sequence: CTT
ctcttctttacacatttctt

SEQ ID NO: 56498 - DNA, 20 bp, Artificial Sequence
  Description of Artificial Sequence: Synthetic oligonucleotide
  Target: SCNA; (-) strand; PAM type: YTN; PAM sequence: TTC
ttctcttctttacacatttc

SEQ ID NO: 56499 - DNA, 20 bp, Artificial Sequence
  Description of Artificial Sequence: Synthetic oligonucleotide
  Target: SCNA; (-) strand; PAM type: YTN; PAM sequence: TTT
cttctcttctttacacattt

SEQ ID NO: 56500 - DNA, 20 bp, Artificial Sequence
  Description of Artificial Sequence: Synthetic oligonucleotide
  Target: SCNA; (-) strand; PAM type: YTN; PAM sequence: TTC
atggagagaatgaaatttct

SEQ ID NO: 56501 - DNA, 20 bp, Artificial Sequence
  Description of Artificial Sequence: Synthetic oligonucleotide
  Target: SCNA; (-) strand; PAM type: YTN; PAM sequence: CTT
catggagagaatgaaatttc

SEQ ID NO: 56502 - DNA, 20 bp, Artificial Sequence
  Description of Artificial Sequence: Synthetic oligonucleotide
  Target: SCNA; (-) strand; PAM type: YTN; PAM sequence: TTC
ttcatggagagaatgaaatt

SEQ ID NO: 56503 - DNA, 20 bp, Artificial Sequence
  Description of Artificial Sequence: Synthetic oligonucleotide
  Target: SCNA; (-) strand; PAM type: YTN; PAM sequence: TTA
ttcttcatggagagaatgaa

SEQ ID NO: 56504 - DNA, 20 bp, Artificial Sequence
  Description of Artificial Sequence: Synthetic oligonucleotide
  Target: SCNA; (-) strand; PAM type: YTN; PAM sequence: TTT
attcttcatggagagaatga

SEQ ID NO: 56505 - DNA, 20 bp, Artificial Sequence
  Description of Artificial Sequence: Synthetic oligonucleotide
  Target: SCNA; (-) strand; PAM type: YTN; PAM sequence: TTT
tattcttcatggagagaatg

SEQ ID NO: 56506 - DNA, 20 bp, Artificial Sequence
  Description of Artificial Sequence: Synthetic oligonucleotide
  Target: SCNA; (-) strand; PAM type: YTN; PAM sequence: TTT
ttattcttcatggagagaat

SEQ ID NO: 56507 - DNA, 20 bp, Artificial Sequence
  Description of Artificial Sequence: Synthetic oligonucleotide
  Target: SCNA; (-) strand; PAM type: YTN; PAM sequence: TTT
tttattcttcatggagagaa

SEQ ID NO: 56508 - DNA, 20 bp, Artificial Sequence
  Description of Artificial Sequence: Synthetic oligonucleotide
  Target: SCNA; (-) strand; PAM type: YTN; PAM sequence: TTG
tgttttttattcttcatgga

SEQ ID NO: 56509 - DNA, 20 bp, Artificial Sequence
  Description of Artificial Sequence: Synthetic oligonucleotide
  Target: SCNA; (-) strand; PAM type: YTN; PAM sequence: TTT
gtgttttttattcttcatgg

SEQ ID NO: 56510 - DNA, 20 bp, Artificial Sequence
  Description of Artificial Sequence: Synthetic oligonucleotide
  Target: SCNA; (-) strand; PAM type: YTN; PAM sequence: CTA
acaaatatttgtgtttttta

SEQ ID NO: 56511 - DNA, 20 bp, Artificial Sequence
  Description of Artificial Sequence: Synthetic oligonucleotide
  Target: SCNA; (-) strand; PAM type: YTN; PAM sequence: TTA
cagctaacaaatatttgtgt

SEQ ID NO: 56512 - DNA, 20 bp, Artificial Sequence
  Description of Artificial Sequence: Synthetic oligonucleotide
  Target: SCNA; (-) strand; PAM type: YTN; PAM sequence: TTG
ttacagctaacaaatatttg

SEQ ID NO: 56513 - DNA, 20 bp, Artificial Sequence
  Description of Artificial Sequence: Synthetic oligonucleotide
  Target: SCNA; (-) strand; PAM type: YTN; PAM sequence: TTT
gttacagctaacaaatattt

SEQ ID NO: 56514 - DNA, 20 bp, Artificial Sequence
  Description of Artificial Sequence: Synthetic oligonucleotide
  Target: SCNA; (-) strand; PAM type: YTN; PAM sequence: TTG
agaaaaaaatgtatatttgt

SEQ ID NO: 56515 - DNA, 20 bp, Artificial Sequence
  Description of Artificial Sequence: Synthetic oligonucleotide
  Target: SCNA; (-) strand; PAM type: YTN; PAM sequence: TTT
gagaaaaaaatgtatatttg

SEQ ID NO: 56516 - DNA, 20 bp, Artificial Sequence
  Description of Artificial Sequence: Synthetic oligonucleotide
  Target: SCNA; (-) strand; PAM type: YTN; PAM sequence: TTC
atgtgataaatatcatgaaa

SEQ ID NO: 56517 - DNA, 20 bp, Artificial Sequence
  Description of Artificial Sequence: Synthetic oligonucleotide
  Target: SCNA; (-) strand; PAM type: YTN; PAM sequence: TTT
catgtgataaatatcatgaa

SEQ ID NO: 56518 - DNA, 20 bp, Artificial Sequence
  Description of Artificial Sequence: Synthetic oligonucleotide
  Target: SCNA; (-) strand; PAM type: YTN; PAM sequence: TTT
tcatgtgataaatatcatga

SEQ ID NO: 56519 - DNA, 20 bp, Artificial Sequence
  Description of Artificial Sequence: Synthetic oligonucleotide
  Target: SCNA; (-) strand; PAM type: YTN; PAM sequence: TTT
ttcatgtgataaatatcatg

SEQ ID NO: 56520 - DNA, 20 bp, Artificial Sequence
  Description of Artificial Sequence: Synthetic oligonucleotide
  Target: SCNA; (-) strand; PAM type: YTN; PAM sequence: CTC
cccaaagtacccatttttca

SEQ ID NO: 56521 - DNA, 20 bp, Artificial Sequence
  Description of Artificial Sequence: Synthetic oligonucleotide
  Target: SCNA; (-) strand; PAM type: YTN; PAM sequence: TTA
ggagaaaatctccccaaagt

SEQ ID NO: 56522 - DNA, 20 bp, Artificial Sequence
  Description of Artificial Sequence: Synthetic oligonucleotide
  Target: SCNA; (-) strand; PAM type: YTN; PAM sequence: TTT
aggagaaaatctccccaaag

SEQ ID NO: 56523 - DNA, 20 bp, Artificial Sequence
  Description of Artificial Sequence: Synthetic oligonucleotide
  Target: SCNA; (-) strand; PAM type: YTN; PAM sequence: CTT
taggagaaaatctccccaaa

SEQ ID NO: 56524 - DNA, 20 bp, Artificial Sequence
  Description of Artificial Sequence: Synthetic oligonucleotide
  Target: SCNA; (-) strand; PAM type: YTN; PAM sequence: CTA
tatatgaaaaaatgaaggct

SEQ ID NO: 56525 - DNA, 20 bp, Artificial Sequence
  Description of Artificial Sequence: Synthetic oligonucleotide
  Target: SCNA; (-) strand; PAM type: YTN; PAM sequence: CTC
actatatatgaaaaaatgaa

SEQ ID NO: 56526 - DNA, 20 bp, Artificial Sequence
  Description of Artificial Sequence: Synthetic oligonucleotide
  Target: SCNA; (-) strand; PAM type: YTN; PAM sequence: TTA
gatctcactatatatgaaaa

SEQ ID NO: 56527 - DNA, 20 bp, Artificial Sequence
  Description of Artificial Sequence: Synthetic oligonucleotide
  Target: SCNA; (-) strand; PAM type: YTN; PAM sequence: TTT
agatctcactatatatgaaa

SEQ ID NO: 56528 - DNA, 20 bp, Artificial Sequence
  Description of Artificial Sequence: Synthetic oligonucleotide
  Target: SCNA; (-) strand; PAM type: YTN; PAM sequence: TTG
tttagatctcactatatatg

SEQ ID NO: 56529 - DNA, 20 bp, Artificial Sequence
  Description of Artificial Sequence: Synthetic oligonucleotide
  Target: SCNA; (-) strand; PAM type: YTN; PAM sequence: TTG
gttgtttagatctcactata

SEQ ID NO: 56530 - DNA, 20 bp, Artificial Sequence
  Description of Artificial Sequence: Synthetic oligonucleotide
  Target: SCNA; (-) strand; PAM type: YTN; PAM sequence: CTG
taaatagaaattggttgttt

SEQ ID NO: 56531 - DNA, 20 bp, Artificial Sequence
  Description of Artificial Sequence: Synthetic oligonucleotide
  Target: SCNA; (-) strand; PAM type: YTN; PAM sequence: TTC
aactgtaaatagaaattggt

SEQ ID NO: 56532 - DNA, 20 bp, Artificial Sequence
  Description of Artificial Sequence: Synthetic oligonucleotide
  Target: SCNA; (-) strand; PAM type: YTN; PAM sequence: TTG
gaagtagaattcaactgtaa

SEQ ID NO: 56533 - DNA, 20 bp, Artificial Sequence
  Description of Artificial Sequence: Synthetic oligonucleotide
  Target: SCNA; (-) strand; PAM type: YTN; PAM sequence: TTT
ggaagtagaattcaactgta

SEQ ID NO: 56534 - DNA, 20 bp, Artificial Sequence
  Description of Artificial Sequence: Synthetic oligonucleotide
  Target: SCNA; (-) strand; PAM type: YTN; PAM sequence: TTT
tggaagtagaattcaactgt

SEQ ID NO: 56535 - DNA, 20 bp, Artificial Sequence
  Description of Artificial Sequence: Synthetic oligonucleotide
  Target: SCNA; (-) strand; PAM type: YTN; PAM sequence: TTT
ttggaagtagaattcaactg

SEQ ID NO: 56536 - DNA, 20 bp, Artificial Sequence
  Description of Artificial Sequence: Synthetic oligonucleotide
  Target: SCNA; (-) strand; PAM type: YTN; PAM sequence: TTG
tatgtttttggaagtagaat

SEQ ID NO: 56537 - DNA, 20 bp, Artificial Sequence
  Description of Artificial Sequence: Synthetic oligonucleotide
  Target: SCNA; (-) strand; PAM type: YTN; PAM sequence: TTG
agtcatagttgtatgttttt

SEQ ID NO: 56538 - DNA, 20 bp, Artificial Sequence
  Description of Artificial Sequence: Synthetic oligonucleotide
  Target: SCNA; (-) strand; PAM type: YTN; PAM sequence: TTG
aaaggtaacaaggattgagt

SEQ ID NO: 56539 - DNA, 20 bp, Artificial Sequence
  Description of Artificial Sequence: Synthetic oligonucleotide
  Target: SCNA; (-) strand; PAM type: YTN; PAM sequence: TTA
ttgaaaggtaacaaggattg

SEQ ID NO: 56540 - DNA, 20 bp, Artificial Sequence
  Description of Artificial Sequence: Synthetic oligonucleotide
  Target: SCNA; (-) strand; PAM type: YTN; PAM sequence: TTT
attgaaaggtaacaaggatt

SEQ ID NO: 56541 - DNA, 20 bp, Artificial Sequence
  Description of Artificial Sequence: Synthetic oligonucleotide
  Target: SCNA; (-) strand; PAM type: YTN; PAM sequence: TTA
acagtttattgaaaggtaac

SEQ ID NO: 56542 - DNA, 20 bp, Artificial Sequence
  Description of Artificial Sequence: Synthetic oligonucleotide
  Target: SCNA; (-) strand; PAM type: YTN; PAM sequence: CTT
aacagtttattgaaaggtaa

SEQ ID NO: 56543 - DNA, 20 bp, Artificial Sequence
  Description of Artificial Sequence: Synthetic oligonucleotide
  Target: SCNA; (-) strand; PAM type: YTN; PAM sequence: TTG
ggcttaacagtttattgaaa

SEQ ID NO: 56544 - DNA, 20 bp, Artificial Sequence
  Description of Artificial Sequence: Synthetic oligonucleotide
  Target: SCNA; (-) strand; PAM type: YTN; PAM sequence: TTT
gggcttaacagtttattgaa

SEQ ID NO: 56545 - DNA, 20 bp, Artificial Sequence
  Description of Artificial Sequence: Synthetic oligonucleotide
  Target: SCNA; (-) strand; PAM type: YTN; PAM sequence: CTT
tgggcttaacagtttattga

SEQ ID NO: 56546 - DNA, 20 bp, Artificial Sequence
  Description of Artificial Sequence: Synthetic oligonucleotide
  Target: SCNA; (-) strand; PAM type: YTN; PAM sequence: TTA
tatctttgggcttaacagtt

SEQ ID NO: 56547 - DNA, 20 bp, Artificial Sequence
  Description of Artificial Sequence: Synthetic oligonucleotide
  Target: SCNA; (-) strand; PAM type: YTN; PAM sequence: TTA
aaataagttatatctttggg

SEQ ID NO: 56548 - DNA, 20 bp, Artificial Sequence
  Description of Artificial Sequence: Synthetic oligonucleotide
  Target: SCNA; (-) strand; PAM type: YTN; PAM sequence: TTT
aaaataagttatatctttgg

SEQ ID NO: 56549 - DNA, 20 bp, Artificial Sequence
  Description of Artificial Sequence: Synthetic oligonucleotide
  Target: SCNA; (-) strand; PAM type: YTN; PAM sequence: TTT
taaaataagttatatctttg

SEQ ID NO: 56550 - DNA, 20 bp, Artificial Sequence
  Description of Artificial Sequence: Synthetic oligonucleotide
  Target: SCNA; (-) strand; PAM type: YTN; PAM sequence: TTC
acattttaaaataagttata

SEQ ID NO: 56551 - DNA, 20 bp, Artificial Sequence
  Description of Artificial Sequence: Synthetic oligonucleotide
  Target: SCNA; (-) strand; PAM type: YTN; PAM sequence: CTA
ggttcacattttaaaataag

SEQ ID NO: 56552 - DNA, 20 bp, Artificial Sequence
  Description of Artificial Sequence: Synthetic oligonucleotide
  Target: SCNA; (-) strand; PAM type: YTN; PAM sequence: CTG
atcatcccaaatgtctaggt

SEQ ID NO: 56553 - DNA, 20 bp, Artificial Sequence
  Description of Artificial Sequence: Synthetic oligonucleotide
  Target: SCNA; (-) strand; PAM type: YTN; PAM sequence: CTA
gcatgcctgatcatcccaaa

SEQ ID NO: 56554 - DNA, 20 bp, Artificial Sequence
  Description of Artificial Sequence: Synthetic oligonucleotide
  Target: SCNA; (-) strand; PAM type: YTN; PAM sequence: TTA
atagtaactagcatgcctga

SEQ ID NO: 56555 - DNA, 20 bp, Artificial Sequence
  Description of Artificial Sequence: Synthetic oligonucleotide
  Target: SCNA; (-) strand; PAM type: YTN; PAM sequence: CTT
aatagtaactagcatgcctg

SEQ ID NO: 56556 - DNA, 20 bp, Artificial Sequence
  Description of Artificial Sequence: Synthetic oligonucleotide
  Target: SCNA; (-) strand; PAM type: YTN; PAM sequence: TTC
ttaatagtaactagcatgcc

SEQ ID NO: 56557 - DNA, 20 bp, Artificial Sequence
  Description of Artificial Sequence: Synthetic oligonucleotide
  Target: SCNA; (-) strand; PAM type: YTN; PAM sequence: CTA
ttcttaatagtaactagcat

SEQ ID NO: 56558 - DNA, 20 bp, Artificial Sequence
  Description of Artificial Sequence: Synthetic oligonucleotide
  Target: SCNA; (-) strand; PAM type: YTN; PAM sequence: CTG
ctattcttaatagtaactag

SEQ ID NO: 56559 - DNA, 20 bp, Artificial Sequence
  Description of Artificial Sequence: Synthetic oligonucleotide
  Target: SCNA; (-) strand; PAM type: YTN; PAM sequence: TTA
gtacatactgctattcttaa

SEQ ID NO: 56560 - DNA, 20 bp, Artificial Sequence
  Description of Artificial Sequence: Synthetic oligonucleotide
  Target: SCNA; (-) strand; PAM type: YTN; PAM sequence: TTA
ttagtacatactgctattct

SEQ ID NO: 56561 - DNA, 20 bp, Artificial Sequence
  Description of Artificial Sequence: Synthetic oligonucleotide
  Target: SCNA; (-) strand; PAM type: YTN; PAM sequence: TTT
attagtacatactgctattc

SEQ ID NO: 56562 - DNA, 20 bp, Artificial Sequence
  Description of Artificial Sequence: Synthetic oligonucleotide
  Target: SCNA; (-) strand; PAM type: YTN; PAM sequence: TTT
tattagtacatactgctatt

SEQ ID NO: 56563 - DNA, 20 bp, Artificial Sequence
  Description of Artificial Sequence: Synthetic oligonucleotide
  Target: SCNA; (-) strand; PAM type: YTN; PAM sequence: CTG
aataccattttattagtaca

SEQ ID NO: 56564 - DNA, 20 bp, Artificial Sequence
  Description of Artificial Sequence: Synthetic oligonucleotide
  Target: SCNA; (-) strand; PAM type: YTN; PAM sequence: CTC
tgaataccattttattagta

SEQ ID NO: 56565 - DNA, 20 bp, Artificial Sequence
  Description of Artificial Sequence: Synthetic oligonucleotide
  Target: SCNA; (-) strand; PAM type: YTN; PAM sequence: TTA
taatctctgaataccatttt

SEQ ID NO: 56566 - DNA, 20 bp, Artificial Sequence
  Description of Artificial Sequence: Synthetic oligonucleotide
  Target: SCNA; (-) strand; PAM type: YTN; PAM sequence: CTT
ataatctctgaataccattt

SEQ ID NO: 56567 - DNA, 20 bp, Artificial Sequence
  Description of Artificial Sequence: Synthetic oligonucleotide
  Target: SCNA; (-) strand; PAM type: YTN; PAM sequence: TTC
ccttataatctctgaatacc

SEQ ID NO: 56568 - DNA, 20 bp, Artificial Sequence
  Description of Artificial Sequence: Synthetic oligonucleotide
  Target: SCNA; (-) strand; PAM type: YTN; PAM sequence: CTT
cccttataatctctgaatac

SEQ ID NO: 56569 - DNA, 20 bp, Artificial Sequence
  Description of Artificial Sequence: Synthetic oligonucleotide
  Target: SCNA; (-) strand; PAM type: YTN; PAM sequence: TTA
gtgcttcccttataatctct

SEQ ID NO: 56570 - DNA, 20 bp, Artificial Sequence
  Description of Artificial Sequence: Synthetic oligonucleotide
  Target: SCNA; (-) strand; PAM type: YTN; PAM sequence: TTC
attagtgcttcccttataat

SEQ ID NO: 56571 - DNA, 20 bp, Artificial Sequence
  Description of Artificial Sequence: Synthetic oligonucleotide
  Target: SCNA; (-) strand; PAM type: YTN; PAM sequence: TTA
ttcattagtgcttcccttat

SEQ ID NO: 56572 - DNA, 20 bp, Artificial Sequence
  Description of Artificial Sequence: Synthetic oligonucleotide
  Target: SCNA; (-) strand; PAM type: YTN; PAM sequence: TTT
attcattagtgcttccctta

SEQ ID NO: 56573 - DNA, 20 bp, Artificial Sequence
  Description of Artificial Sequence: Synthetic oligonucleotide
  Target: SCNA; (-) strand; PAM type: YTN; PAM sequence: TTT
tattcattagtgcttccctt

SEQ ID NO: 56574 - DNA, 20 bp, Artificial Sequence
  Description of Artificial Sequence: Synthetic oligonucleotide
  Target: SCNA; (-) strand; PAM type: YTN; PAM sequence: TTT
ttattcattagtgcttccct

SEQ ID NO: 56575 - DNA, 20 bp, Artificial Sequence
  Description of Artificial Sequence: Synthetic oligonucleotide
  Target: SCNA; (-) strand; PAM type: YTN; PAM sequence: TTG
ggtcatttttattcattagt

SEQ ID NO: 56576 - DNA, 20 bp, Artificial Sequence
  Description of Artificial Sequence: Synthetic oligonucleotide
  Target: SCNA; (-) strand; PAM type: YTN; PAM sequence: TTT
gggtcatttttattcattag

SEQ ID NO: 56577 - DNA, 20 bp, Artificial Sequence
  Description of Artificial Sequence: Synthetic oligonucleotide
  Target: SCNA; (-) strand; PAM type: YTN; PAM sequence: TTA
tatatagtttgggtcatttt

SEQ ID NO: 56578 - DNA, 20 bp, Artificial Sequence
  Description of Artificial Sequence: Synthetic oligonucleotide
  Target: SCNA; (-) strand; PAM type: YTN; PAM sequence: TTT
atatatagtttgggtcattt

SEQ ID NO: 56579 - DNA, 20 bp, Artificial Sequence
  Description of Artificial Sequence: Synthetic oligonucleotide
  Target: SCNA; (-) strand; PAM type: YTN; PAM sequence: CTT
tatatatagtttgggtcatt

SEQ ID NO: 56580 - DNA, 20 bp, Artificial Sequence
  Description of Artificial Sequence: Synthetic oligonucleotide
  Target: SCNA; (-) strand; PAM type: YTN; PAM sequence: TTG
tgtatgaacaaagactttat

SEQ ID NO: 56581 - DNA, 20 bp, Artificial Sequence
  Description of Artificial Sequence: Synthetic oligonucleotide
  Target: SCNA; (-) strand; PAM type: YTN; PAM sequence: TTT
gtgtatgaacaaagacttta

SEQ ID NO: 56582 - DNA, 20 bp, Artificial Sequence
  Description of Artificial Sequence: Synthetic oligonucleotide
  Target: SCNA; (-) strand; PAM type: YTN; PAM sequence: TTT
tgtgtatgaacaaagacttt

SEQ ID NO: 56583 - DNA, 20 bp, Artificial Sequence
  Description of Artificial Sequence: Synthetic oligonucleotide
  Target: SCNA; (-) strand; PAM type: YTN; PAM sequence: TTA
ttttgtgtatgaacaaagac

SEQ ID NO: 56584 - DNA, 20 bp, Artificial Sequence
  Description of Artificial Sequence: Synthetic oligonucleotide
  Target: SCNA; (-) strand; PAM type: YTN; PAM sequence: TTT
attttgtgtatgaacaaaga

SEQ ID NO: 56585 - DNA, 20 bp, Artificial Sequence
  Description of Artificial Sequence: Synthetic oligonucleotide
  Target: SCNA; (-) strand; PAM type: YTN; PAM sequence: TTA
gagaaccccatccatagtgc

SEQ ID NO: 56586 - DNA, 20 bp, Artificial Sequence
  Description of Artificial Sequence: Synthetic oligonucleotide
  Target: SCNA; (-) strand; PAM type: YTN; PAM sequence: CTG
tcgttagagaaccccatcca

SEQ ID NO: 56587 - DNA, 20 bp, Artificial Sequence
  Description of Artificial Sequence: Synthetic oligonucleotide
  Target: SCNA; (-) strand; PAM type: YTN; PAM sequence: CTA
ctgtcgttagagaaccccat

SEQ ID NO: 56588 - DNA, 20 bp, Artificial Sequence
  Description of Artificial Sequence: Synthetic oligonucleotide
  Target: SCNA; (-) strand; PAM type: YTN; PAM sequence: TTC
tactgtcgttagagaacccc

SEQ ID NO: 56589 - DNA, 20 bp, Artificial Sequence
  Description of Artificial Sequence: Synthetic oligonucleotide
  Target: SCNA; (-) strand; PAM type: YTN; PAM sequence: CTT
ctactgtcgttagagaaccc

SEQ ID NO: 56590 - DNA, 20 bp, Artificial Sequence
  Description of Artificial Sequence: Synthetic oligonucleotide
  Target: SCNA; (-) strand; PAM type: YTN; PAM sequence: TTA
cttctactgtcgttagagaa

SEQ ID NO: 56591 - DNA, 20 bp, Artificial Sequence
  Description of Artificial Sequence: Synthetic oligonucleotide
  Target: SCNA; (-) strand; PAM type: YTN; PAM sequence: TTT
acttctactgtcgttagaga

SEQ ID NO: 56592 - DNA, 20 bp, Artificial Sequence
  Description of Artificial Sequence: Synthetic oligonucleotide
  Target: SCNA; (-) strand; PAM type: YTN; PAM sequence: CTG
cccgtttacttctactgtcg

SEQ ID NO: 56593 - DNA, 20 bp, Artificial Sequence
  Description of Artificial Sequence: Synthetic oligonucleotide
  Target: SCNA; (-) strand; PAM type: YTN; PAM sequence: TTA
gctgcccgtttacttctact

SEQ ID NO: 56594 - DNA, 20 bp, Artificial Sequence
  Description of Artificial Sequence: Synthetic oligonucleotide
  Target: SCNA; (-) strand; PAM type: YTN; PAM sequence: TTT
agctgcccgtttacttctac

SEQ ID NO: 56595 - DNA, 20 bp, Artificial Sequence
  Description of Artificial Sequence: Synthetic oligonucleotide
  Target: SCNA; (-) strand; PAM type: YTN; PAM sequence: CTT
tagctgcccgtttacttcta

SEQ ID NO: 56596 - DNA, 20 bp, Artificial Sequence
  Description of Artificial Sequence: Synthetic oligonucleotide
  Target: SCNA; (-) strand; PAM type: YTN; PAM sequence: CTC
tttagctgcccgtttacttc

SEQ ID NO: 56597 - DNA, 20 bp, Artificial Sequence
  Description of Artificial Sequence: Synthetic oligonucleotide
  Target: SCNA; (-) strand; PAM type: YTN; PAM sequence: TTG
atacactctttagctgcccg

SEQ ID NO: 56598 - DNA, 20 bp, Artificial Sequence
  Description of Artificial Sequence: Synthetic oligonucleotide
  Target: SCNA; (-) strand; PAM type: YTN; PAM sequence: TTT
gatacactctttagctgccc

SEQ ID NO: 56599 - DNA, 20 bp, Artificial Sequence
  Description of Artificial Sequence: Synthetic oligonucleotide
  Target: SCNA; (-) strand; PAM type: YTN; PAM sequence: TTT
tgatacactctttagctgcc

SEQ ID NO: 56600 - DNA, 20 bp, Artificial Sequence
  Description of Artificial Sequence: Synthetic oligonucleotide
  Target: SCNA; (-) strand; PAM type: YTN; PAM sequence: TTT
ttgatacactctttagctgc

SEQ ID NO: 56601 - DNA, 20 bp, Artificial Sequence
  Description of Artificial Sequence: Synthetic oligonucleotide
  Target: SCNA; (-) strand; PAM type: YTN; PAM sequence: CTG
taaaagtgcagtttttgata

SEQ ID NO: 56602 - DNA, 20 bp, Artificial Sequence
  Description of Artificial Sequence: Synthetic oligonucleotide
  Target: SCNA; (-) strand; PAM type: YTN; PAM sequence: CTG
acgatatataggaaactgta

SEQ ID NO: 56603 - DNA, 20 bp, Artificial Sequence
  Description of Artificial Sequence: Synthetic oligonucleotide
  Target: SCNA; (-) strand; PAM type: YTN; PAM sequence: CTG
tctgacgatatataggaaac

SEQ ID NO: 56604 - DNA, 20 bp, Artificial Sequence
  Description of Artificial Sequence: Synthetic oligonucleotide
  Target: SCNA; (-) strand; PAM type: YTN; PAM sequence: TTA
acctgtctgacgatatatag

SEQ ID NO: 56605 - DNA, 20 bp, Artificial Sequence
  Description of Artificial Sequence: Synthetic oligonucleotide
  Target: SCNA; (-) strand; PAM type: YTN; PAM sequence: TTG
ttaacctgtctgacgatata

SEQ ID NO: 56606 - DNA, 20 bp, Artificial Sequence
  Description of Artificial Sequence: Synthetic oligonucleotide
  Target: SCNA; (-) strand; PAM type: YTN; PAM sequence: TTT
gttaacctgtctgacgatat

SEQ ID NO: 56607 - DNA, 20 bp, Artificial Sequence
  Description of Artificial Sequence: Synthetic oligonucleotide
  Target: SCNA; (-) strand; PAM type: YTN; PAM sequence: TTT
tgttaacctgtctgacgata

SEQ ID NO: 56608 - DNA, 20 bp, Artificial Sequence
  Description of Artificial Sequence: Synthetic oligonucleotide
  Target: SCNA; (-) strand; PAM type: YTN; PAM sequence: CTT
ttgttaacctgtctgacgat

SEQ ID NO: 56609 - DNA, 20 bp, Artificial Sequence
  Description of Artificial Sequence: Synthetic oligonucleotide
  Target: SCNA; (-) strand; PAM type: YTN; PAM sequence: TTC
gatacttttgttaacctgtc

SEQ ID NO: 56610 - DNA, 20 bp, Artificial Sequence
  Description of Artificial Sequence: Synthetic oligonucleotide
  Target: SCNA; (-) strand; PAM type: YTN; PAM sequence: TTT
cgatacttttgttaacctgt

SEQ ID NO: 56611 - DNA, 20 bp, Artificial Sequence
  Description of Artificial Sequence: Synthetic oligonucleotide
  Target: SCNA; (-) strand; PAM type: YTN; PAM sequence: TTT
tcgatacttttgttaacctg

SEQ ID NO: 56612 - DNA, 20 bp, Artificial Sequence
  Description of Artificial Sequence: Synthetic oligonucleotide
  Target: SCNA; (-) strand; PAM type: YTN; PAM sequence: CTT
ttcgatacttttgttaacct

SEQ ID NO: 56613 - DNA, 20 bp, Artificial Sequence
  Description of Artificial Sequence: Synthetic oligonucleotide
  Target: SCNA; (-) strand; PAM type: YTN; PAM sequence: TTA
tccacagtatgccaactttt

SEQ ID NO: 56614 - DNA, 20 bp, Artificial Sequence
  Description of Artificial Sequence: Synthetic oligonucleotide
  Target: SCNA; (-) strand; PAM type: YTN; PAM sequence: TTT
atccacagtatgccaacttt

SEQ ID NO: 56615 - DNA, 20 bp, Artificial Sequence
  Description of Artificial Sequence: Synthetic oligonucleotide
  Target: SCNA; (-) strand; PAM type: YTN; PAM sequence: CTT
tatccacagtatgccaactt

SEQ ID NO: 56616 - DNA, 20 bp, Artificial Sequence
  Description of Artificial Sequence: Synthetic oligonucleotide
  Target: SCNA; (-) strand; PAM type: YTN; PAM sequence: TTA
atgtactttatccacagtat

SEQ ID NO: 56617 - DNA, 20 bp, Artificial Sequence
  Description of Artificial Sequence: Synthetic oligonucleotide
  Target: SCNA; (-) strand; PAM type: YTN; PAM sequence: TTT
aatgtactttatccacagta

SEQ ID NO: 56618 - DNA, 20 bp, Artificial Sequence
  Description of Artificial Sequence: Synthetic oligonucleotide
  Target: SCNA; (-) strand; PAM type: YTN; PAM sequence: TTT
taatgtactttatccacagt

SEQ ID NO: 56619 - DNA, 20 bp, Artificial Sequence
  Description of Artificial Sequence: Synthetic oligonucleotide
  Target: SCNA; (-) strand; PAM type: YTN; PAM sequence: CTC
attttaatgtactttatcca

SEQ ID NO: 56620 - DNA, 20 bp, Artificial Sequence
  Description of Artificial Sequence: Synthetic oligonucleotide
  Target: SCNA; (-) strand; PAM type: YTN; PAM sequence: TTC
tcattttaatgtactttatc

SEQ ID NO: 56621 - DNA, 20 bp, Artificial Sequence
  Description of Artificial Sequence: Synthetic oligonucleotide
  Target: SCNA; (-) strand; PAM type: YTN; PAM sequence: TTT
ctcattttaatgtactttat

SEQ ID NO: 56622 - DNA, 20 bp, Artificial Sequence
  Description of Artificial Sequence: Synthetic oligonucleotide
  Target: SCNA; (-) strand; PAM type: YTN; PAM sequence: CTT
tctcattttaatgtacttta

SEQ ID NO: 56623 - DNA, 20 bp, Artificial Sequence
  Description of Artificial Sequence: Synthetic oligonucleotide
  Target: SCNA; (-) strand; PAM type: YTN; PAM sequence: TTG
cctttctcattttaatgtac

SEQ ID NO: 56624 - DNA, 20 bp, Artificial Sequence
  Description of Artificial Sequence: Synthetic oligonucleotide
  Target: SCNA; (-) strand; PAM type: YTN; PAM sequence: TTT
gcctttctcattttaatgta

SEQ ID NO: 56625 - DNA, 20 bp, Artificial Sequence
  Description of Artificial Sequence: Synthetic oligonucleotide
  Target: SCNA; (-) strand; PAM type: YTN; PAM sequence: CTT
tgcctttctcattttaatgt

SEQ ID NO: 56626 - DNA, 20 bp, Artificial Sequence
  Description of Artificial Sequence: Synthetic oligonucleotide
  Target: SCNA; (-) strand; PAM type: YTN; PAM sequence: TTA
aaactttgcctttctcattt

SEQ ID NO: 56627 - DNA, 20 bp, Artificial Sequence
  Description of Artificial Sequence: Synthetic oligonucleotide
  Target: SCNA; (-) strand; PAM type: YTN; PAM sequence: CTT
aaaactttgcctttctcatt

SEQ ID NO: 56628 - DNA, 20 bp, Artificial Sequence
  Description of Artificial Sequence: Synthetic oligonucleotide
  Target: SCNA; (-) strand; PAM type: YTN; PAM sequence: TTC
atatatccttaaaactttgc

SEQ ID NO: 56629 - DNA, 20 bp, Artificial Sequence
  Description of Artificial Sequence: Synthetic oligonucleotide
  Target: SCNA; (-) strand; PAM type: YTN; PAM sequence: TTT
catatatccttaaaactttg

SEQ ID NO: 56630 - DNA, 20 bp, Artificial Sequence
  Description of Artificial Sequence: Synthetic oligonucleotide
  Target: SCNA; (-) strand; PAM type: YTN; PAM sequence: TTT
tcatatatccttaaaacttt

SEQ ID NO: 56631 - DNA, 20 bp, Artificial Sequence
  Description of Artificial Sequence: Synthetic oligonucleotide
  Target: SCNA; (-) strand; PAM type: YTN; PAM sequence: TTC
attttcatatatccttaaaa

SEQ ID NO: 56632 - DNA, 20 bp, Artificial Sequence
  Description of Artificial Sequence: Synthetic oligonucleotide
  Target: SCNA; (-) strand; PAM type: YTN; PAM sequence: TTT
cattttcatatatccttaaa

SEQ ID NO: 56633 - DNA, 20 bp, Artificial Sequence
  Description of Artificial Sequence: Synthetic oligonucleotide
  Target: SCNA; (-) strand; PAM type: YTN; PAM sequence: CTT
tcattttcatatatccttaa

SEQ ID NO: 56634 - DNA, 20 bp, Artificial Sequence
  Description of Artificial Sequence: Synthetic oligonucleotide
  Target: SCNA; (-) strand; PAM type: YTN; PAM sequence: TTG
ccatcctttcattttcatat

SEQ ID NO: 56635 - DNA, 20 bp, Artificial Sequence
  Description of Artificial Sequence: Synthetic oligonucleotide
  Target: SCNA; (-) strand; PAM type: YTN; PAM sequence: CTA
gttgccatcctttcattttc

SEQ ID NO: 56636 - DNA, 20 bp, Artificial Sequence
  Description of Artificial Sequence: Synthetic oligonucleotide
  Target: SCNA; (-) strand; PAM type: YTN; PAM sequence: TTC
gaccatactagttgccatcc

SEQ ID NO: 56637 - DNA, 20 bp, Artificial Sequence
  Description of Artificial Sequence: Synthetic oligonucleotide
  Target: SCNA; (-) strand; PAM type: YTN; PAM sequence: TTT
cgaccatactagttgccatc

SEQ ID NO: 56638 - DNA, 20 bp, Artificial Sequence
  Description of Artificial Sequence: Synthetic oligonucleotide
  Target: SCNA; (-) strand; PAM type: YTN; PAM sequence: TTA
tcacatgaatttcgaccata

SEQ ID NO: 56639 - DNA, 20 bp, Artificial Sequence
  Description of Artificial Sequence: Synthetic oligonucleotide
  Target: SCNA; (-) strand; PAM type: YTN; PAM sequence: TTT
atcacatgaatttcgaccat

SEQ ID NO: 56640 - DNA, 20 bp, Artificial Sequence
  Description of Artificial Sequence: Synthetic oligonucleotide
  Target: SCNA; (-) strand; PAM type: YTN; PAM sequence: TTA
cgatttatcacatgaatttc

SEQ ID NO: 56641 - DNA, 20 bp, Artificial Sequence
  Description of Artificial Sequence: Synthetic oligonucleotide
  Target: SCNA; (-) strand; PAM type: YTN; PAM sequence: TTA
ttacgatttatcacatgaat

SEQ ID NO: 56642 - DNA, 20 bp, Artificial Sequence
  Description of Artificial Sequence: Synthetic oligonucleotide
  Target: SCNA; (-) strand; PAM type: YTN; PAM sequence: TTG
gttattacgatttatcacat

SEQ ID NO: 56643 - DNA, 20 bp, Artificial Sequence
  Description of Artificial Sequence: Synthetic oligonucleotide
  Target: SCNA; (-) strand; PAM type: YTN; PAM sequence: CTA
tcacgttggttattacgatt

SEQ ID NO: 56644 - DNA, 20 bp, Artificial Sequence
  Description of Artificial Sequence: Synthetic oligonucleotide
  Target: SCNA; (-) strand; PAM type: YTN; PAM sequence: TTA
atactatcacgttggttatt

SEQ ID NO: 56645 - DNA, 20 bp, Artificial Sequence
  Description of Artificial Sequence: Synthetic oligonucleotide
  Target: SCNA; (-) strand; PAM type: YTN; PAM sequence: CTT
aatactatcacgttggttat

SEQ ID NO: 56646 - DNA, 20 bp, Artificial Sequence
  Description of Artificial Sequence: Synthetic oligonucleotide
  Target: SCNA; (-) strand; PAM type: YTN; PAM sequence: CTG
caaggccccaccacttaata

SEQ ID NO: 56647 - DNA, 20 bp, Artificial Sequence
  Description of Artificial Sequence: Synthetic oligonucleotide
  Target: SCNA; (-) strand; PAM type: YTN; PAM sequence: CTC
tgcaaggccccaccacttaa

SEQ ID NO: 56648 - DNA, 20 bp, Artificial Sequence
  Description of Artificial Sequence: Synthetic oligonucleotide
  Target: SCNA; (-) strand; PAM type: YTN; PAM sequence: TTA
cctctgcaaggccccaccac

SEQ ID NO: 56649 - DNA, 20 bp, Artificial Sequence
  Description of Artificial Sequence: Synthetic oligonucleotide
  Target: SCNA; (-) strand; PAM type: YTN; PAM sequence: TTA
ttacctctgcaaggccccac

SEQ ID NO: 56650 - DNA, 20 bp, Artificial Sequence
  Description of Artificial Sequence: Synthetic oligonucleotide
  Target: SCNA; (-) strand; PAM type: YTN; PAM sequence: TTT
attacctctgcaaggcccca

SEQ ID NO: 56651 - DNA, 20 bp, Artificial Sequence
  Description of Artificial Sequence: Synthetic oligonucleotide
  Target: SCNA; (-) strand; PAM type: YTN; PAM sequence: CTT
tattacctctgcaaggcccc

SEQ ID NO: 56652 - DNA, 20 bp, Artificial Sequence
  Description of Artificial Sequence: Synthetic oligonucleotide
  Target: SCNA; (-) strand; PAM type: YTN; PAM sequence: CTG
cccccgtgactttattacct

SEQ ID NO: 56653 - DNA, 20 bp, Artificial Sequence
  Description of Artificial Sequence: Synthetic oligonucleotide
  Target: SCNA; (-) strand; PAM type: YTN; PAM sequence: CTC
tgcccccgtgactttattac

SEQ ID NO: 56654 - DNA, 20 bp, Artificial Sequence
  Description of Artificial Sequence: Synthetic oligonucleotide
  Target: SCNA; (-) strand; PAM type: YTN; PAM sequence: TTG
tcagggctctgcccccgtga

SEQ ID NO: 56655 - DNA, 20 bp, Artificial Sequence
  Description of Artificial Sequence: Synthetic oligonucleotide
  Target: SCNA; (-) strand; PAM type: YTN; PAM sequence: CTT
gtcagggctctgcccccgtg

SEQ ID NO: 56656 - DNA, 20 bp, Artificial Sequence
  Description of Artificial Sequence: Synthetic oligonucleotide
  Target: SCNA; (-) strand; PAM type: YTN; PAM sequence: TTC
cacttgtcagggctctgccc

SEQ ID NO: 56657 - DNA, 20 bp, Artificial Sequence
  Description of Artificial Sequence: Synthetic oligonucleotide
  Target: SCNA; (-) strand; PAM type: YTN; PAM sequence: TTA
ccaattccacttgtcagggc

SEQ ID NO: 56658 - DNA, 20 bp, Artificial Sequence
  Description of Artificial Sequence: Synthetic oligonucleotide
  Target: SCNA; (-) strand; PAM type: YTN; PAM sequence: TTC
ataatgttaccaattccact

SEQ ID NO: 56659 - DNA, 20 bp, Artificial Sequence
  Description of Artificial Sequence: Synthetic oligonucleotide
  Target: SCNA; (-) strand; PAM type: YTN; PAM sequence: TTT
cataatgttaccaattccac

SEQ ID NO: 56660 - DNA, 20 bp, Artificial Sequence
  Description of Artificial Sequence: Synthetic oligonucleotide
  Target: SCNA; (-) strand; PAM type: YTN; PAM sequence: CTT
tcataatgttaccaattcca

SEQ ID NO: 56661 - DNA, 20 bp, Artificial Sequence
  Description of Artificial Sequence: Synthetic oligonucleotide
  Target: SCNA; (-) strand; PAM type: YTN; PAM sequence: CTC
aaggcctttcataatgttac

SEQ ID NO: 56662 - DNA, 20 bp, Artificial Sequence
  Description of Artificial Sequence: Synthetic oligonucleotide
  Target: SCNA; (-) strand; PAM type: YTN; PAM sequence: CTC
cctcaaggcctttcataatg

SEQ ID NO: 56663 - DNA, 20 bp, Artificial Sequence
  Description of Artificial Sequence: Synthetic oligonucleotide
  Target: SCNA; (-) strand; PAM type: YTN; PAM sequence: CTC
actccctcaaggcctttcat

SEQ ID NO: 56664 - DNA, 20 bp, Artificial Sequence
  Description of Artificial Sequence: Synthetic oligonucleotide
  Target: SCNA; (-) strand; PAM type: YTN; PAM sequence: CTC
acatggtagagagatagaaa

SEQ ID NO: 56665 - DNA, 20 bp, Artificial Sequence
  Description of Artificial Sequence: Synthetic oligonucleotide
  Target: SCNA; (-) strand; PAM type: YTN; PAM sequence: TTC
tcacatggtagagagataga

SEQ ID NO: 56666 - DNA, 20 bp, Artificial Sequence
  Description of Artificial Sequence: Synthetic oligonucleotide
  Target: SCNA; (-) strand; PAM type: YTN; PAM sequence: CTG
tgttctcacatggtagagag

SEQ ID NO: 56667 - DNA, 20 bp, Artificial Sequence
  Description of Artificial Sequence: Synthetic oligonucleotide
  Target: SCNA; (-) strand; PAM type: YTN; PAM sequence: CTC
cagagggccaaatgctgtgt

SEQ ID NO: 56668 - DNA, 20 bp, Artificial Sequence
  Description of Artificial Sequence: Synthetic oligonucleotide
  Target: SCNA; (-) strand; PAM type: YTN; PAM sequence: CTG
tatcctccagagggccaaat

SEQ ID NO: 56669 - DNA, 20 bp, Artificial Sequence
  Description of Artificial Sequence: Synthetic oligonucleotide
  Target: SCNA; (-) strand; PAM type: YTN; PAM sequence: TTG
tcactgtatcctccagaggg

SEQ ID NO: 56670 - DNA, 20 bp, Artificial Sequence
  Description of Artificial Sequence: Synthetic oligonucleotide
  Target: SCNA; (-) strand; PAM type: YTN; PAM sequence: CTT
gtcactgtatcctccagagg

SEQ ID NO: 56671 - DNA, 20 bp, Artificial Sequence
  Description of Artificial Sequence: Synthetic oligonucleotide
  Target: SCNA; (-) strand; PAM type: YTN; PAM sequence: CTC
ccaagatggtgtcttgtcac

SEQ ID NO: 56672 - DNA, 20 bp, Artificial Sequence
  Description of Artificial Sequence: Synthetic oligonucleotide
  Target: SCNA; (-) strand; PAM type: YTN; PAM sequence: CTA
ctcccaagatggtgtcttgt

SEQ ID NO: 56673 - DNA, 20 bp, Artificial Sequence
  Description of Artificial Sequence: Synthetic oligonucleotide
  Target: SCNA; (-) strand; PAM type: YTN; PAM sequence: CTC
tactcccaagatggtgtctt

SEQ ID NO: 56674 - DNA, 20 bp, Artificial Sequence
  Description of Artificial Sequence: Synthetic oligonucleotide
  Target: SCNA; (-) strand; PAM type: YTN; PAM sequence: TTC
tctactcccaagatggtgtc

SEQ ID NO: 56675 - DNA, 20 bp, Artificial Sequence
  Description of Artificial Sequence: Synthetic oligonucleotide
  Target: SCNA; (-) strand; PAM type: YTN; PAM sequence: CTG
gcgagggccggttctctact

SEQ ID NO: 56676 - DNA, 20 bp, Artificial Sequence
  Description of Artificial Sequence: Synthetic oligonucleotide
  Target: SCNA; (-) strand; PAM type: YTN; PAM sequence: TTC
agtatctggcgagggccggt

SEQ ID NO: 56677 - DNA, 20 bp, Artificial Sequence
  Description of Artificial Sequence: Synthetic oligonucleotide
  Target: SCNA; (-) strand; PAM type: YTN; PAM sequence: TTC
aggttcagtatctggcgagg

SEQ ID NO: 56678 - DNA, 20 bp, Artificial Sequence
  Description of Artificial Sequence: Synthetic oligonucleotide
  Target: SCNA; (-) strand; PAM type: YTN; PAM sequence: CTT
caggttcagtatctggcgag

SEQ ID NO: 56679 - DNA, 20 bp, Artificial Sequence
  Description of Artificial Sequence: Synthetic oligonucleotide
  Target: SCNA; (-) strand; PAM type: YTN; PAM sequence: TTG
tcttcaggttcagtatctgg

SEQ ID NO: 56680 - DNA, 20 bp, Artificial Sequence
  Description of Artificial Sequence: Synthetic oligonucleotide
  Target: SCNA; (-) strand; PAM type: YTN; PAM sequence: TTT
gtcttcaggttcagtatctg

SEQ ID NO: 56681 - DNA, 20 bp, Artificial Sequence
  Description of Artificial Sequence: Synthetic oligonucleotide
  Target: SCNA; (-) strand; PAM type: YTN; PAM sequence: CTC
caagatcaaggcatttgtct

SEQ ID NO: 56682 - DNA, 20 bp, Artificial Sequence
  Description of Artificial Sequence: Synthetic oligonucleotide
  Target: SCNA; (-) strand; PAM type: YTN; PAM sequence: CTG
ggaactccaagatcaaggca

SEQ ID NO: 56683 - DNA, 20 bp, Artificial Sequence
  Description of Artificial Sequence: Synthetic oligonucleotide
  Target: SCNA; (-) strand; PAM type: YTN; PAM sequence: CTG
gaggctgggaactccaagat

SEQ ID NO: 56684 - DNA, 20 bp, Artificial Sequence
  Description of Artificial Sequence: Synthetic oligonucleotide
  Target: SCNA; (-) strand; PAM type: YTN; PAM sequence: CTC
tggaggctgggaactccaag

SEQ ID NO: 56685 - DNA, 20 bp, Artificial Sequence
  Description of Artificial Sequence: Synthetic oligonucleotide
  Target: SCNA; (-) strand; PAM type: YTN; PAM sequence: CTC
atagctctggaggctgggaa

SEQ ID NO: 56686 - DNA, 20 bp, Artificial Sequence
  Description of Artificial Sequence: Synthetic oligonucleotide
  Target: SCNA; (-) strand; PAM type: YTN; PAM sequence: TTC
tcatagctctggaggctggg

SEQ ID NO: 56687 - DNA, 20 bp, Artificial Sequence
  Description of Artificial Sequence: Synthetic oligonucleotide
  Target: SCNA; (-) strand; PAM type: YTN; PAM sequence: TTT
ctcatagctctggaggctgg

SEQ ID NO: 56688 - DNA, 20 bp, Artificial Sequence
  Description of Artificial Sequence: Synthetic oligonucleotide
  Target: SCNA; (-) strand; PAM type: YTN; PAM sequence: TTA
tttctcatagctctggaggc

SEQ ID NO: 56689 - DNA, 20 bp, Artificial Sequence
  Description of Artificial Sequence: Synthetic oligonucleotide
  Target: SCNA; (-) strand; PAM type: YTN; PAM sequence: TTT
atttctcatagctctggagg

SEQ ID NO: 56690 - DNA, 20 bp, Artificial Sequence
  Description of Artificial Sequence: Synthetic oligonucleotide
  Target: SCNA; (-) strand; PAM type: YTN; PAM sequence: TTA
caaacaacagaaatttattt

SEQ ID NO: 56691 - DNA, 20 bp, Artificial Sequence
  Description of Artificial Sequence: Synthetic oligonucleotide
  Target: SCNA; (-) strand; PAM type: YTN; PAM sequence: TTT
acaaacaacagaaatttatt

SEQ ID NO: 56692 - DNA, 20 bp, Artificial Sequence
  Description of Artificial Sequence: Synthetic oligonucleotide
  Target: SCNA; (-) strand; PAM type: YTN; PAM sequence: CTG
ggtaatttacaaacaacaga

SEQ ID NO: 56693 - DNA, 20 bp, Artificial Sequence
  Description of Artificial Sequence: Synthetic oligonucleotide
  Target: SCNA; (-) strand; PAM type: YTN; PAM sequence: TTA
taacaaaatacatgagactg

SEQ ID NO: 56694 - DNA, 20 bp, Artificial Sequence
  Description of Artificial Sequence: Synthetic oligonucleotide
  Target: SCNA; (-) strand; PAM type: YTN; PAM sequence: CTG
ttataacaaaatacatgaga

SEQ ID NO: 56695 - DNA, 20 bp, Artificial Sequence
  Description of Artificial Sequence: Synthetic oligonucleotide
  Target: SCNA; (-) strand; PAM type: YTN; PAM sequence: TTG
tgctgttataacaaaataca

SEQ ID NO: 56696 - DNA, 20 bp, Artificial Sequence
  Description of Artificial Sequence: Synthetic oligonucleotide
  Target: SCNA; (-) strand; PAM type: YTN; PAM sequence: TTT
gtgctgttataacaaaatac

SEQ ID NO: 56697 - DNA, 20 bp, Artificial Sequence
  Description of Artificial Sequence: Synthetic oligonucleotide
  Target: SCNA; (-) strand; PAM type: YTN; PAM sequence: CTG
tttgtgctgttataacaaaa

SEQ ID NO: 56698 - DNA, 20 bp, Artificial Sequence
  Description of Artificial Sequence: Synthetic oligonucleotide
  Target: SCNA; (-) strand; PAM type: YTN; PAM sequence: TTA
atctgtttgtgctgttataa

SEQ ID NO: 56699 - DNA, 20 bp, Artificial Sequence
  Description of Artificial Sequence: Synthetic oligonucleotide
  Target: SCNA; (-) strand; PAM type: YTN; PAM sequence: CTT
aatctgtttgtgctgttata

SEQ ID NO: 56700 - DNA, 20 bp, Artificial Sequence
  Description of Artificial Sequence: Synthetic oligonucleotide
  Target: SCNA; (-) strand; PAM type: YTN; PAM sequence: TTG
tcttaatctgtttgtgctgt

SEQ ID NO: 56701 - DNA, 20 bp, Artificial Sequence
  Description of Artificial Sequence: Synthetic oligonucleotide
  Target: SCNA; (-) strand; PAM type: YTN; PAM sequence: CTG
ttgtcttaatctgtttgtgc

SEQ ID NO: 56702 - DNA, 20 bp, Artificial Sequence
  Description of Artificial Sequence: Synthetic oligonucleotide
  Target: SCNA; (-) strand; PAM type: YTN; PAM sequence: CTG
agaaagctgttgtcttaatc

SEQ ID NO: 56703 - DNA, 20 bp, Artificial Sequence
  Description of Artificial Sequence: Synthetic oligonucleotide
  Target: SCNA; (-) strand; PAM type: YTN; PAM sequence: CTC
tgagaaagctgttgtcttaa

SEQ ID NO: 56704 - DNA, 20 bp, Artificial Sequence
  Description of Artificial Sequence: Synthetic oligonucleotide
  Target: SCNA; (-) strand; PAM type: YTN; PAM sequence: TTG
ggctctgagaaagctgttgt

SEQ ID NO: 56705 - DNA, 20 bp, Artificial Sequence
  Description of Artificial Sequence: Synthetic oligonucleotide
  Target: SCNA; (-) strand; PAM type: YTN; PAM sequence: TTT
gggctctgagaaagctgttg

SEQ ID NO: 56706 - DNA, 20 bp, Artificial Sequence
  Description of Artificial Sequence: Synthetic oligonucleotide
  Target: SCNA; (-) strand; PAM type: YTN; PAM sequence: TTT
tgggctctgagaaagctgtt

SEQ ID NO: 56707 - DNA, 20 bp, Artificial Sequence
  Description of Artificial Sequence: Synthetic oligonucleotide
  Target: SCNA; (-) strand; PAM type: YTN; PAM sequence: TTA
taaatgttttgggctctgag

SEQ ID NO: 56708 - DNA, 20 bp, Artificial Sequence
  Description of Artificial Sequence: Synthetic oligonucleotide
  Target: SCNA; (-) strand; PAM type: YTN; PAM sequence: CTA
ttataaatgttttgggctct

SEQ ID NO: 56709 - DNA, 20 bp, Artificial Sequence
  Description of Artificial Sequence: Synthetic oligonucleotide
  Target: SCNA; (-) strand; PAM type: YTN; PAM sequence: TTA
ctattataaatgttttgggc

SEQ ID NO: 56710 - DNA, 20 bp, Artificial Sequence
  Description of Artificial Sequence: Synthetic oligonucleotide
  Target: SCNA; (-) strand; PAM type: YTN; PAM sequence: CTT
actattataaatgttttggg

SEQ ID NO: 56711 - DNA, 20 bp, Artificial Sequence
  Description of Artificial Sequence: Synthetic oligonucleotide
  Target: SCNA; (-) strand; PAM type: YTN; PAM sequence: TTC
ttactattataaatgttttg

SEQ ID NO: 56712 - DNA, 20 bp, Artificial Sequence
  Description of Artificial Sequence: Synthetic oligonucleotide
  Target: SCNA; (-) strand; PAM type: YTN; PAM sequence: TTG
caaattcttactattataaa

SEQ ID NO: 56713 - DNA, 20 bp, Artificial Sequence
  Description of Artificial Sequence: Synthetic oligonucleotide
  Target: SCNA; (-) strand; PAM type: YTN; PAM sequence: TTT
gcaaattcttactattataa

SEQ ID NO: 56714 - DNA, 20 bp, Artificial Sequence
  Description of Artificial Sequence: Synthetic oligonucleotide
  Target: SCNA; (-) strand; PAM type: YTN; PAM sequence: TTT
tgcaaattcttactattata

SEQ ID NO: 56715 - DNA, 20 bp, Artificial Sequence
  Description of Artificial Sequence: Synthetic oligonucleotide
  Target: SCNA; (-) strand; PAM type: YTN; PAM sequence: TTG
attttgcaaattcttactat

SEQ ID NO: 56716 - DNA, 20 bp, Artificial Sequence
  Description of Artificial Sequence: Synthetic oligonucleotide
  Target: SCNA; (-) strand; PAM type: YTN; PAM sequence: TTT
gattttgcaaattcttacta

SEQ ID NO: 56717 - DNA, 20 bp, Artificial Sequence
  Description of Artificial Sequence: Synthetic oligonucleotide
  Target: SCNA; (-) strand; PAM type: YTN; PAM sequence: TTG
tttgattttgcaaattctta

SEQ ID NO: 56718 - DNA, 20 bp, Artificial Sequence
  Description of Artificial Sequence: Synthetic oligonucleotide
  Target: SCNA; (-) strand; PAM type: YTN; PAM sequence: CTC
attgtttgattttgcaaatt

SEQ ID NO: 56719 - DNA, 20 bp, Artificial Sequence
  Description of Artificial Sequence: Synthetic oligonucleotide
  Target: SCNA; (-) strand; PAM type: YTN; PAM sequence: TTA
ctcattgtttgattttgcaa

SEQ ID NO: 56720 - DNA, 20 bp, Artificial Sequence
  Description of Artificial Sequence: Synthetic oligonucleotide
  Target: SCNA; (-) strand; PAM type: YTN; PAM sequence: CTT
actcattgtttgattttgca

SEQ ID NO: 56721 - DNA, 20 bp, Artificial Sequence
  Description of Artificial Sequence: Synthetic oligonucleotide
  Target: SCNA; (-) strand; PAM type: YTN; PAM sequence: TTG
aggccttactcattgtttga

SEQ ID NO: 56722 - DNA, 20 bp, Artificial Sequence
  Description of Artificial Sequence: Synthetic oligonucleotide
  Target: SCNA; (-) strand; PAM type: YTN; PAM sequence: TTT
gaggccttactcattgtttg

SEQ ID NO: 56723 - DNA, 20 bp, Artificial Sequence
  Description of Artificial Sequence: Synthetic oligonucleotide
  Target: SCNA; (-) strand; PAM type: YTN; PAM sequence: CTG
atcatttgaggccttactca

SEQ ID NO: 56724 - DNA, 20 bp, Artificial Sequence
  Description of Artificial Sequence: Synthetic oligonucleotide
  Target: SCNA; (-) strand; PAM type: YTN; PAM sequence: TTA
gcaagtacagctgatcattt

SEQ ID NO: 56725 - DNA, 20 bp, Artificial Sequence
  Description of Artificial Sequence: Synthetic oligonucleotide
  Target: SCNA; (-) strand; PAM type: YTN; PAM sequence: TTT
agcaagtacagctgatcatt

SEQ ID NO: 56726 - DNA, 20 bp, Artificial Sequence
  Description of Artificial Sequence: Synthetic oligonucleotide
  Target: SCNA; (-) strand; PAM type: YTN; PAM sequence: TTT
tagcaagtacagctgatcat

SEQ ID NO: 56727 - DNA, 20 bp, Artificial Sequence
  Description of Artificial Sequence: Synthetic oligonucleotide
  Target: SCNA; (-) strand; PAM type: YTN; PAM sequence: TTT
ttagcaagtacagctgatca

SEQ ID NO: 56728 - DNA, 20 bp, Artificial Sequence
  Description of Artificial Sequence: Synthetic oligonucleotide
  Target: SCNA; (-) strand; PAM type: YTN; PAM sequence: TTC
atttttagcaagtacagctg

SEQ ID NO: 56729 - DNA, 20 bp, Artificial Sequence
  Description of Artificial Sequence: Synthetic oligonucleotide
  Target: SCNA; (-) strand; PAM type: YTN; PAM sequence: TTT
catttttagcaagtacagct

SEQ ID NO: 56730 - DNA, 20 bp, Artificial Sequence
  Description of Artificial Sequence: Synthetic oligonucleotide
  Target: SCNA; (-) strand; PAM type: YTN; PAM sequence: CTT
tcatttttagcaagtacagc

SEQ ID NO: 56731 - DNA, 20 bp, Artificial Sequence
  Description of Artificial Sequence: Synthetic oligonucleotide
  Target: SCNA; (-) strand; PAM type: YTN; PAM sequence: TTC
tttcatttttagcaagtaca

SEQ ID NO: 56732 - DNA, 20 bp, Artificial Sequence
  Description of Artificial Sequence: Synthetic oligonucleotide
  Target: SCNA; (-) strand; PAM type: YTN; PAM sequence: TTG
ttctttcatttttagcaagt

SEQ ID NO: 56733 - DNA, 20 bp, Artificial Sequence
  Description of Artificial Sequence: Synthetic oligonucleotide
  Target: SCNA; (-) strand; PAM type: YTN; PAM sequence: TTA
gttgttctttcatttttagc

SEQ ID NO: 56734 - DNA, 20 bp, Artificial Sequence
  Description of Artificial Sequence: Synthetic oligonucleotide
  Target: SCNA; (-) strand; PAM type: YTN; PAM sequence: TTT
agttgttctttcatttttag

SEQ ID NO: 56735 - DNA, 20 bp, Artificial Sequence
  Description of Artificial Sequence: Synthetic oligonucleotide
  Target: SCNA; (-) strand; PAM type: YTN; PAM sequence: TTG
agtgatttagttgttctttc

SEQ ID NO: 56736 - DNA, 20 bp, Artificial Sequence
  Description of Artificial Sequence: Synthetic oligonucleotide
  Target: SCNA; (-) strand; PAM type: YTN; PAM sequence: TTG
cccaagtgaattgagtgatt

SEQ ID NO: 56737 - DNA, 20 bp, Artificial Sequence
  Description of Artificial Sequence: Synthetic oligonucleotide
  Target: SCNA; (-) strand; PAM type: YTN; PAM sequence: CTT
gcccaagtgaattgagtgat

SEQ ID NO: 56738 - DNA, 20 bp, Artificial Sequence
  Description of Artificial Sequence: Synthetic oligonucleotide
  Target: SCNA; (-) strand; PAM type: YTN; PAM sequence: TTG
tcttgcccaagtgaattgag

SEQ ID NO: 56739 - DNA, 20 bp, Artificial Sequence
  Description of Artificial Sequence: Synthetic oligonucleotide
  Target: SCNA; (-) strand; PAM type: YTN; PAM sequence: TTA
gacgaataatggattgtctt

SEQ ID NO: 56740 - DNA, 20 bp, Artificial Sequence
  Description of Artificial Sequence: Synthetic oligonucleotide
  Target: SCNA; (-) strand; PAM type: YTN; PAM sequence: TTT
agacgaataatggattgtct

SEQ ID NO: 56741 - DNA, 20 bp, Artificial Sequence
  Description of Artificial Sequence: Synthetic oligonucleotide
  Target: SCNA; (-) strand; PAM type: YTN; PAM sequence: TTT
tagacgaataatggattgtc

SEQ ID NO: 56742 - DNA, 20 bp, Artificial Sequence
  Description of Artificial Sequence: Synthetic oligonucleotide
  Target: SCNA; (-) strand; PAM type: YTN; PAM sequence: TTA
acaaaaattttagacgaata

SEQ ID NO: 56743 - DNA, 20 bp, Artificial Sequence
  Description of Artificial Sequence: Synthetic oligonucleotide
  Target: SCNA; (-) strand; PAM type: YTN; PAM sequence: TTA
ttaacaaaaattttagacga

SEQ ID NO: 56744 - DNA, 20 bp, Artificial Sequence
  Description of Artificial Sequence: Synthetic oligonucleotide
  Target: SCNA; (-) strand; PAM type: YTN; PAM sequence: TTA
gatagtaaatcagaaaatta

SEQ ID NO: 56745 - DNA, 20 bp, Artificial Sequence
  Description of Artificial Sequence: Synthetic oligonucleotide
  Target: SCNA; (-) strand; PAM type: YTN; PAM sequence: CTA
ttagatagtaaatcagaaaa

SEQ ID NO: 56746 - DNA, 20 bp, Artificial Sequence
  Description of Artificial Sequence: Synthetic oligonucleotide
  Target: SCNA; (-) strand; PAM type: YTN; PAM sequence: TTG
tatggtatccagtactatta

SEQ ID NO: 56747 - DNA, 20 bp, Artificial Sequence
  Description of Artificial Sequence: Synthetic oligonucleotide
  Target: SCNA; (-) strand; PAM type: YTN; PAM sequence: TTG
gttgtatggtatccagtact

SEQ ID NO: 56748 - DNA, 20 bp, Artificial Sequence
  Description of Artificial Sequence: Synthetic oligonucleotide
  Target: SCNA; (-) strand; PAM type: YTN; PAM sequence: TTG
taggagtaattggttgtatg

SEQ ID NO: 56749 - DNA, 20 bp, Artificial Sequence
  Description of Artificial Sequence: Synthetic oligonucleotide
  Target: SCNA; (-) strand; PAM type: YTN; PAM sequence: TTT
gtaggagtaattggttgtat

SEQ ID NO: 56750 - DNA, 20 bp, Artificial Sequence
  Description of Artificial Sequence: Synthetic oligonucleotide
  Target: SCNA; (-) strand; PAM type: YTN; PAM sequence: TTA
acaaaaaaatttgtaggagt

SEQ ID NO: 56751 - DNA, 20 bp, Artificial Sequence
  Description of Artificial Sequence: Synthetic oligonucleotide
  Target: SCNA; (-) strand; PAM type: YTN; PAM sequence: CTA
ttaacaaaaaaatttgtagg

SEQ ID NO: 56752 - DNA, 20 bp, Artificial Sequence
  Description of Artificial Sequence: Synthetic oligonucleotide
  Target: SCNA; (-) strand; PAM type: YTN; PAM sequence: TTA
aaaagcaaaacagagaacta

SEQ ID NO: 56753 - DNA, 20 bp, Artificial Sequence
  Description of Artificial Sequence: Synthetic oligonucleotide
  Target: SCNA; (-) strand; PAM type: YTN; PAM sequence: TTA
ttaaaaagcaaaacagagaa

SEQ ID NO: 56754 - DNA, 20 bp, Artificial Sequence
  Description of Artificial Sequence: Synthetic oligonucleotide
  Target: SCNA; (-) strand; PAM type: YTN; PAM sequence: TTG
gtatccagtattattaaaaa

SEQ ID NO: 56755 - DNA, 20 bp, Artificial Sequence
  Description of Artificial Sequence: Synthetic oligonucleotide
  Target: SCNA; (-) strand; PAM type: YTN; PAM sequence: TTG
gatatccagtattggtatcc

SEQ ID NO: 56756 - DNA, 20 bp, Artificial Sequence
  Description of Artificial Sequence: Synthetic oligonucleotide
  Target: SCNA; (-) strand; PAM type: YTN; PAM sequence: TTT
ggatatccagtattggtatc

SEQ ID NO: 56757 - DNA, 20 bp, Artificial Sequence
  Description of Artificial Sequence: Synthetic oligonucleotide
  Target: SCNA; (-) strand; PAM type: YTN; PAM sequence: TTT
tggatatccagtattggtat

SEQ ID NO: 56758 - DNA, 20 bp, Artificial Sequence
  Description of Artificial Sequence: Synthetic oligonucleotide
  Target: SCNA; (-) strand; PAM type: YTN; PAM sequence: CTA
tcaaaccattttggatatcc

SEQ ID NO: 56759 - DNA, 20 bp, Artificial Sequence
  Description of Artificial Sequence: Synthetic oligonucleotide
  Target: SCNA; (-) strand; PAM type: YTN; PAM sequence: TTC
ccaactatcaaaccattttg

SEQ ID NO: 56760 - DNA, 20 bp, Artificial Sequence
  Description of Artificial Sequence: Synthetic oligonucleotide
  Target: SCNA; (-) strand; PAM type: YTN; PAM sequence: TTG
ttcccaactatcaaaccatt

SEQ ID NO: 56761 - DNA, 20 bp, Artificial Sequence
  Description of Artificial Sequence: Synthetic oligonucleotide
  Target: SCNA; (-) strand; PAM type: YTN; PAM sequence: TTT
gttcccaactatcaaaccat

SEQ ID NO: 56762 - DNA, 20 bp, Artificial Sequence
  Description of Artificial Sequence: Synthetic oligonucleotide
  Target: SCNA; (-) strand; PAM type: YTN; PAM sequence: CTT
tgttcccaactatcaaacca

SEQ ID NO: 56763 - DNA, 20 bp, Artificial Sequence
  Description of Artificial Sequence: Synthetic oligonucleotide
  Target: SCNA; (-) strand; PAM type: YTN; PAM sequence: TTA
tcccctttgttcccaactat

SEQ ID NO: 56764 - DNA, 20 bp, Artificial Sequence
  Description of Artificial Sequence: Synthetic oligonucleotide
  Target: SCNA; (-) strand; PAM type: YTN; PAM sequence: TTT
atcccctttgttcccaacta

SEQ ID NO: 56765 - DNA, 20 bp, Artificial Sequence
  Description of Artificial Sequence: Synthetic oligonucleotide
  Target: SCNA; (-) strand; PAM type: YTN; PAM sequence: CTT
tatcccctttgttcccaact

SEQ ID NO: 56766 - DNA, 20 bp, Artificial Sequence
  Description of Artificial Sequence: Synthetic oligonucleotide
  Target: SCNA; (-) strand; PAM type: YTN; PAM sequence: TTC
ctttatcccctttgttccca

SEQ ID NO: 56767 - DNA, 20 bp, Artificial Sequence
  Description of Artificial Sequence: Synthetic oligonucleotide
  Target: SCNA; (-) strand; PAM type: YTN; PAM sequence: TTT
cctttatcccctttgttccc

SEQ ID NO: 56768 - DNA, 20 bp, Artificial Sequence
  Description of Artificial Sequence: Synthetic oligonucleotide
  Target: SCNA; (-) strand; PAM type: YTN; PAM sequence: CTT
tcctttatcccctttgttcc

SEQ ID NO: 56769 - DNA, 20 bp, Artificial Sequence
  Description of Artificial Sequence: Synthetic oligonucleotide
  Target: SCNA; (-) strand; PAM type: YTN; PAM sequence: TTC
tttcctttatcccctttgtt

SEQ ID NO: 56770 - DNA, 20 bp, Artificial Sequence
  Description of Artificial Sequence: Synthetic oligonucleotide
  Target: SCNA; (-) strand; PAM type: YTN; PAM sequence: TTT
ctttcctttatcccctttgt

SEQ ID NO: 56771 - DNA, 20 bp, Artificial Sequence
  Description of Artificial Sequence: Synthetic oligonucleotide
  Target: SCNA; (-) strand; PAM type: YTN; PAM sequence: TTA
tagtacatttctttccttta

SEQ ID NO: 56772 - DNA, 20 bp, Artificial Sequence
  Description of Artificial Sequence: Synthetic oligonucleotide
  Target: SCNA; (-) strand; PAM type: YTN; PAM sequence: CTG
gttatagtacatttctttcc

SEQ ID NO: 56773 - DNA, 20 bp, Artificial Sequence
  Description of Artificial Sequence: Synthetic oligonucleotide
  Target: SCNA; (-) strand; PAM type: YTN; PAM sequence: CTC
tggttatagtacatttcttt

SEQ ID NO: 56774 - DNA, 20 bp, Artificial Sequence
  Description of Artificial Sequence: Synthetic oligonucleotide
  Target: SCNA; (-) strand; PAM type: YTN; PAM sequence: TTC
aaaaatctctggttatagta

SEQ ID NO: 56775 - DNA, 20 bp, Artificial Sequence
  Description of Artificial Sequence: Synthetic oligonucleotide
  Target: SCNA; (-) strand; PAM type: YTN; PAM sequence: TTT
caaaaatctctggttatagt

SEQ ID NO: 56776 - DNA, 20 bp, Artificial Sequence
  Description of Artificial Sequence: Synthetic oligonucleotide
  Target: SCNA; (-) strand; PAM type: YTN; PAM sequence: TTT
tcaaaaatctctggttatag

SEQ ID NO: 56777 - DNA, 20 bp, Artificial Sequence
  Description of Artificial Sequence: Synthetic oligonucleotide
  Target: SCNA; (-) strand; PAM type: YTN; PAM sequence: TTT
ttcaaaaatctctggttata

SEQ ID NO: 56778 - DNA, 20 bp, Artificial Sequence
  Description of Artificial Sequence: Synthetic oligonucleotide
  Target: SCNA; (-) strand; PAM type: YTN; PAM sequence: TTA
tttttcaaaaatctctggtt

SEQ ID NO: 56779 - DNA, 20 bp, Artificial Sequence
  Description of Artificial Sequence: Synthetic oligonucleotide
  Target: SCNA; (-) strand; PAM type: YTN; PAM sequence: CTC
attatttttcaaaaatctct

SEQ ID NO: 56780 - DNA, 20 bp, Artificial Sequence
  Description of Artificial Sequence: Synthetic oligonucleotide
  Target: SCNA; (-) strand; PAM type: YTN; PAM sequence: CTG
agtgaagtatcatagtacat

SEQ ID NO: 56781 - DNA, 20 bp, Artificial Sequence
  Description of Artificial Sequence: Synthetic oligonucleotide
  Target: SCNA; (-) strand; PAM type: YTN; PAM sequence: TTC
tgagtgaagtatcatagtac

SEQ ID NO: 56782 - DNA, 20 bp, Artificial Sequence
  Description of Artificial Sequence: Synthetic oligonucleotide
  Target: SCNA; (-) strand; PAM type: YTN; PAM sequence: TTT
ctgagtgaagtatcatagta

SEQ ID NO: 56783 - DNA, 20 bp, Artificial Sequence
  Description of Artificial Sequence: Synthetic oligonucleotide
  Target: SCNA; (-) strand; PAM type: YTN; PAM sequence: TTT
tctgagtgaagtatcatagt

SEQ ID NO: 56784 - DNA, 20 bp, Artificial Sequence
  Description of Artificial Sequence: Synthetic oligonucleotide
  Target: SCNA; (-) strand; PAM type: YTN; PAM sequence: TTG
aagtgaggttttctgagtga

SEQ ID NO: 56785 - DNA, 20 bp, Artificial Sequence
  Description of Artificial Sequence: Synthetic oligonucleotide
  Target: SCNA; (-) strand; PAM type: YTN; PAM sequence: TTT
gaagtgaggttttctgagtg

SEQ ID NO: 56786 - DNA, 20 bp, Artificial Sequence
  Description of Artificial Sequence: Synthetic oligonucleotide
  Target: SCNA; (-) strand; PAM type: YTN; PAM sequence: TTA
agtttgaagtgaggttttct

SEQ ID NO: 56787 - DNA, 20 bp, Artificial Sequence
  Description of Artificial Sequence: Synthetic oligonucleotide
  Target: SCNA; (-) strand; PAM type: YTN; PAM sequence: TTC
ccattaagtttgaagtgagg

SEQ ID NO: 56788 - DNA, 20 bp, Artificial Sequence
  Description of Artificial Sequence: Synthetic oligonucleotide
  Target: SCNA; (-) strand; PAM type: YTN; PAM sequence: CTT
cccattaagtttgaagtgag

SEQ ID NO: 56789 - DNA, 20 bp, Artificial Sequence
  Description of Artificial Sequence: Synthetic oligonucleotide
  Target: SCNA; (-) strand; PAM type: YTN; PAM sequence: CTC
ttcccattaagtttgaagtg

SEQ ID NO: 56790 - DNA, 20 bp, Artificial Sequence
  Description of Artificial Sequence: Synthetic oligonucleotide
  Target: SCNA; (-) strand; PAM type: YTN; PAM sequence: TTC
tcttcccattaagtttgaag

SEQ ID NO: 56791 - DNA, 20 bp, Artificial Sequence
  Description of Artificial Sequence: Synthetic oligonucleotide
  Target: SCNA; (-) strand; PAM type: YTN; PAM sequence: TTT
ctcttcccattaagtttgaa

SEQ ID NO: 56792 - DNA, 20 bp, Artificial Sequence
  Description of Artificial Sequence: Synthetic oligonucleotide
  Target: SCNA; (-) strand; PAM type: YTN; PAM sequence: TTT
tctcttcccattaagtttga

SEQ ID NO: 56793 - DNA, 20 bp, Artificial Sequence
  Description of Artificial Sequence: Synthetic oligonucleotide
  Target: SCNA; (-) strand; PAM type: YTN; PAM sequence: TTT
ttctcttcccattaagtttg

SEQ ID NO: 56794 - DNA, 20 bp, Artificial Sequence
  Description of Artificial Sequence: Synthetic oligonucleotide
  Target: SCNA; (-) strand; PAM type: YTN; PAM sequence: CTT
tttctcttcccattaagttt

SEQ ID NO: 56795 - DNA, 20 bp, Artificial Sequence
  Description of Artificial Sequence: Synthetic oligonucleotide
  Target: SCNA; (-) strand; PAM type: YTN; PAM sequence: TTC
cccaatctttttctcttccc

SEQ ID NO: 56796 - DNA, 20 bp, Artificial Sequence
  Description of Artificial Sequence: Synthetic oligonucleotide
  Target: SCNA; (-) strand; PAM type: YTN; PAM sequence: CTT
ccccaatctttttctcttcc

SEQ ID NO: 56797 - DNA, 20 bp, Artificial Sequence
  Description of Artificial Sequence: Synthetic oligonucleotide
  Target: SCNA; (-) strand; PAM type: YTN; PAM sequence: TTC
ttccccaatctttttctctt

SEQ ID NO: 56798 - DNA, 20 bp, Artificial Sequence
  Description of Artificial Sequence: Synthetic oligonucleotide
  Target: SCNA; (-) strand; PAM type: YTN; PAM sequence: CTT
cttccccaatctttttctct

SEQ ID NO: 56799 - DNA, 20 bp, Artificial Sequence
  Description of Artificial Sequence: Synthetic oligonucleotide
  Target: SCNA; (-) strand; PAM type: YTN; PAM sequence: TTG
aagacttcttccccaatctt

SEQ ID NO: 56800 - DNA, 20 bp, Artificial Sequence
  Description of Artificial Sequence: Synthetic oligonucleotide
  Target: SCNA; (-) strand; PAM type: YTN; PAM sequence: CTT
gaagacttcttccccaatct

SEQ ID NO: 56801 - DNA, 20 bp, Artificial Sequence
  Description of Artificial Sequence: Synthetic oligonucleotide
  Target: SCNA; (-) strand; PAM type: YTN; PAM sequence: CTG
tgcttgaagacttcttcccc

SEQ ID NO: 56802 - DNA, 20 bp, Artificial Sequence
  Description of Artificial Sequence: Synthetic oligonucleotide
  Target: SCNA; (-) strand; PAM type: YTN; PAM sequence: TTA
tggactgtgcttgaagactt

SEQ ID NO: 56803 - DNA, 20 bp, Artificial Sequence
  Description of Artificial Sequence: Synthetic oligonucleotide
  Target: SCNA; (-) strand; PAM type: YTN; PAM sequence: CTA
tcaatattatggactgtgct

SEQ ID NO: 56804 - DNA, 20 bp, Artificial Sequence
  Description of Artificial Sequence: Synthetic oligonucleotide
  Target: SCNA; (-) strand; PAM type: YTN; PAM sequence: CTA
tctatcaatattatggactg

SEQ ID NO: 56805 - DNA, 20 bp, Artificial Sequence
  Description of Artificial Sequence: Synthetic oligonucleotide
  Target: SCNA; (-) strand; PAM type: YTN; PAM sequence: TTA
atatgtgtaggagtctatct

SEQ ID NO: 56806 - DNA, 20 bp, Artificial Sequence
  Description of Artificial Sequence: Synthetic oligonucleotide
  Target: SCNA; (-) strand; PAM type: YTN; PAM sequence: CTG
tcaaccattaatatgtgtag

SEQ ID NO: 56807 - DNA, 20 bp, Artificial Sequence
  Description of Artificial Sequence: Synthetic oligonucleotide
  Target: SCNA; (-) strand; PAM type: YTN; PAM sequence: CTA
gctgtcaaccattaatatgt

SEQ ID NO: 56808 - DNA, 20 bp, Artificial Sequence
  Description of Artificial Sequence: Synthetic oligonucleotide
  Target: SCNA; (-) strand; PAM type: YTN; PAM sequence: TTG
acatctagctgtcaaccatt

SEQ ID NO: 56809 - DNA, 20 bp, Artificial Sequence
  Description of Artificial Sequence: Synthetic oligonucleotide
  Target: SCNA; (-) strand; PAM type: YTN; PAM sequence: CTA
ggcattgacatctagctgtc

SEQ ID NO: 56810 - DNA, 20 bp, Artificial Sequence
  Description of Artificial Sequence: Synthetic oligonucleotide
  Target: SCNA; (-) strand; PAM type: YTN; PAM sequence: CTC
taggcattgacatctagctg

SEQ ID NO: 56811 - DNA, 20 bp, Artificial Sequence
  Description of Artificial Sequence: Synthetic oligonucleotide
  Target: SCNA; (-) strand; PAM type: YTN; PAM sequence: TTG
tgctctaggcattgacatct

SEQ ID NO: 56812 - DNA, 20 bp, Artificial Sequence
  Description of Artificial Sequence: Synthetic oligonucleotide
  Target: SCNA; (-) strand; PAM type: YTN; PAM sequence: TTG
ttgtgctctaggcattgaca

SEQ ID NO: 56813 - DNA, 20 bp, Artificial Sequence
  Description of Artificial Sequence: Synthetic oligonucleotide
  Target: SCNA; (-) strand; PAM type: YTN; PAM sequence: TTT
gttgtgctctaggcattgac

SEQ ID NO: 56814 - DNA, 20 bp, Artificial Sequence
  Description of Artificial Sequence: Synthetic oligonucleotide
  Target: SCNA; (-) strand; PAM type: YTN; PAM sequence: CTA
tttgttgtgctctaggcatt

SEQ ID NO: 56815 - DNA, 20 bp, Artificial Sequence
  Description of Artificial Sequence: Synthetic oligonucleotide
  Target: SCNA; (-) strand; PAM type: YTN; PAM sequence: CTC
aaaaacaaacaaaaaaaata

SEQ ID NO: 56816 - DNA, 20 bp, Artificial Sequence
  Description of Artificial Sequence: Synthetic oligonucleotide
  Target: SCNA; (-) strand; PAM type: YTN; PAM sequence: CTC
cgtctcaaaaacaaacaaaa

SEQ ID NO: 56817 - DNA, 20 bp, Artificial Sequence
  Description of Artificial Sequence: Synthetic oligonucleotide
  Target: SCNA; (-) strand; PAM type: YTN; PAM sequence: CTG
ggtgacagagcaagactccg

SEQ ID NO: 56818 - DNA, 20 bp, Artificial Sequence
  Description of Artificial Sequence: Synthetic oligonucleotide
  Target: SCNA; (-) strand; PAM type: YTN; PAM sequence: CTC
cagcctgggtgacagagcaa

SEQ ID NO: 56819 - DNA, 20 bp, Artificial Sequence
  Description of Artificial Sequence: Synthetic oligonucleotide
  Target: SCNA; (-) strand; PAM type: YTN; PAM sequence: CTG
agatcatgccaatacactcc

SEQ ID NO: 56820 - DNA, 20 bp, Artificial Sequence
  Description of Artificial Sequence: Synthetic oligonucleotide
  Target: SCNA; (-) strand; PAM type: YTN; PAM sequence: TTG
cagtgagctgagatcatgcc

SEQ ID NO: 56821 - DNA, 20 bp, Artificial Sequence
  Description of Artificial Sequence: Synthetic oligonucleotide
  Target: SCNA; (-) strand; PAM type: YTN; PAM sequence: TTT
gcagtgagctgagatcatgc

SEQ ID NO: 56822 - DNA, 20 bp, Artificial Sequence
  Description of Artificial Sequence: Synthetic oligonucleotide
  Target: SCNA; (-) strand; PAM type: YTN; PAM sequence: CTC
gaacccaggagatggagttt

SEQ ID NO: 56823 - DNA, 20 bp, Artificial Sequence
  Description of Artificial Sequence: Synthetic oligonucleotide
  Target: SCNA; (-) strand; PAM type: YTN; PAM sequence: CTG
aaccaggagaatcgctcgaa

SEQ ID NO: 56824 - DNA, 20 bp, Artificial Sequence
  Description of Artificial Sequence: Synthetic oligonucleotide
  Target: SCNA; (-) strand; PAM type: YTN; PAM sequence: TTA
ggaggctgaaccaggagaat

SEQ ID NO: 56825 - DNA, 20 bp, Artificial Sequence
  Description of Artificial Sequence: Synthetic oligonucleotide
  Target: SCNA; (-) strand; PAM type: YTN; PAM sequence: CTT
aggaggctgaaccaggagaa

SEQ ID NO: 56826 - DNA, 20 bp, Artificial Sequence
  Description of Artificial Sequence: Synthetic oligonucleotide
  Target: SCNA; (-) strand; PAM type: YTN; PAM sequence: CTA
cttaggaggctgaaccagga

SEQ ID NO: 56827 - DNA, 20 bp, Artificial Sequence
  Description of Artificial Sequence: Synthetic oligonucleotide
  Target: SCNA; (-) strand; PAM type: YTN; PAM sequence: CTA
atcccagctacttaggaggc

SEQ ID NO: 56828 - DNA, 20 bp, Artificial Sequence
  Description of Artificial Sequence: Synthetic oligonucleotide
  Target: SCNA; (-) strand; PAM type: YTN; PAM sequence: CTC
taatcccagctacttaggag

SEQ ID NO: 56829 - DNA, 20 bp, Artificial Sequence
  Description of Artificial Sequence: Synthetic oligonucleotide
  Target: SCNA; (-) strand; PAM type: YTN; PAM sequence: TTA
gccaggcatggtggcagacg

SEQ ID NO: 56830 - DNA, 20 bp, Artificial Sequence
  Description of Artificial Sequence: Synthetic oligonucleotide
  Target: SCNA; (-) strand; PAM type: YTN; PAM sequence: CTA
aaaatacaaaaattagccag

SEQ ID NO: 56831 - DNA, 20 bp, Artificial Sequence
  Description of Artificial Sequence: Synthetic oligonucleotide
  Target: SCNA; (-) strand; PAM type: YTN; PAM sequence: CTA
ctaaaaatacaaaaattagc

SEQ ID NO: 56832 - DNA, 20 bp, Artificial Sequence
  Description of Artificial Sequence: Synthetic oligonucleotide
  Target: SCNA; (-) strand; PAM type: YTN; PAM sequence: CTC
tactaaaaatacaaaaatta

SEQ ID NO: 56833 - DNA, 20 bp, Artificial Sequence
  Description of Artificial Sequence: Synthetic oligonucleotide
  Target: SCNA; (-) strand; PAM type: YTN; PAM sequence: CTG
tctctactaaaaatacaaaa

SEQ ID NO: 56834 - DNA, 20 bp, Artificial Sequence
  Description of Artificial Sequence: Synthetic oligonucleotide
  Target: SCNA; (-) strand; PAM type: YTN; PAM sequence: CTG
gccaacgtggaaaaaccctg

SEQ ID NO: 56835 - DNA, 20 bp, Artificial Sequence
  Description of Artificial Sequence: Synthetic oligonucleotide
  Target: SCNA; (-) strand; PAM type: YTN; PAM sequence: TTG
agaccagcctggccaacgtg

SEQ ID NO: 56836 - DNA, 20 bp, Artificial Sequence
  Description of Artificial Sequence: Synthetic oligonucleotide
  Target: SCNA; (-) strand; PAM type: YTN; PAM sequence: TTT
gagaccagcctggccaacgt

SEQ ID NO: 56837 - DNA, 20 bp, Artificial Sequence
  Description of Artificial Sequence: Synthetic oligonucleotide
  Target: SCNA; (-) strand; PAM type: YTN; PAM sequence: CTG
aagtcaggtgtttgagacca

SEQ ID NO: 56838 - DNA, 20 bp, Artificial Sequence
  Description of Artificial Sequence: Synthetic oligonucleotide
  Target: SCNA; (-) strand; PAM type: YTN; PAM sequence: TTG
ggaggccaaggcgggtggat

SEQ ID NO: 56839 - DNA, 20 bp, Artificial Sequence
  Description of Artificial Sequence: Synthetic oligonucleotide
  Target: SCNA; (-) strand; PAM type: YTN; PAM sequence: TTT
gggaggccaaggcgggtgga

SEQ ID NO: 56840 - DNA, 20 bp, Artificial Sequence
  Description of Artificial Sequence: Synthetic oligonucleotide
  Target: SCNA; (-) strand; PAM type: YTN; PAM sequence: CTT
tgggaggccaaggcgggtgg

SEQ ID NO: 56841 - DNA, 20 bp, Artificial Sequence
  Description of Artificial Sequence: Synthetic oligonucleotide
  Target: SCNA; (-) strand; PAM type: YTN; PAM sequence: TTC
caggactttgggaggccaag

SEQ ID NO: 56842 - DNA, 20 bp, Artificial Sequence
  Description of Artificial Sequence: Synthetic oligonucleotide
  Target: SCNA; (-) strand; PAM type: YTN; PAM sequence: CTG
taattccaggactttgggag

SEQ ID NO: 56843 - DNA, 20 bp, Artificial Sequence
  Description of Artificial Sequence: Synthetic oligonucleotide
  Target: SCNA; (-) strand; PAM type: YTN; PAM sequence: CTC
acgcctgtaattccaggact

SEQ ID NO: 56844 - DNA, 20 bp, Artificial Sequence
  Description of Artificial Sequence: Synthetic oligonucleotide
  Target: SCNA; (-) strand; PAM type: YTN; PAM sequence: CTG
gtgcggtggctcacgcctgt

SEQ ID NO: 56845 - DNA, 20 bp, Artificial Sequence
  Description of Artificial Sequence: Synthetic oligonucleotide
  Target: SCNA; (-) strand; PAM type: YTN; PAM sequence: CTA
caccagcctggtgcggtggc

SEQ ID NO: 56846 - DNA, 20 bp, Artificial Sequence
  Description of Artificial Sequence: Synthetic oligonucleotide
  Target: SCNA; (-) strand; PAM type: YTN; PAM sequence: CTG
tgtataaaatactacaccag

SEQ ID NO: 56847 - DNA, 20 bp, Artificial Sequence
  Description of Artificial Sequence: Synthetic oligonucleotide
  Target: SCNA; (-) strand; PAM type: YTN; PAM sequence: TTG
atgcatgctgtgtataaaat

SEQ ID NO: 56848 - DNA, 20 bp, Artificial Sequence
  Description of Artificial Sequence: Synthetic oligonucleotide
  Target: SCNA; (-) strand; PAM type: YTN; PAM sequence: TTG
ttgatgcatgctgtgtataa

SEQ ID NO: 56849 - DNA, 20 bp, Artificial Sequence
  Description of Artificial Sequence: Synthetic oligonucleotide
  Target: SCNA; (-) strand; PAM type: YTN; PAM sequence: TTT
gttgatgcatgctgtgtata

SEQ ID NO: 56850 - DNA, 20 bp, Artificial Sequence
  Description of Artificial Sequence: Synthetic oligonucleotide
  Target: SCNA; (-) strand; PAM type: YTN; PAM sequence: TTT
tgttgatgcatgctgtgtat

SEQ ID NO: 56851 - DNA, 20 bp, Artificial Sequence
  Description of Artificial Sequence: Synthetic oligonucleotide
  Target: SCNA; (-) strand; PAM type: YTN; PAM sequence: CTG
atccattttgttgatgcatg

SEQ ID NO: 56852 - DNA, 20 bp, Artificial Sequence
  Description of Artificial Sequence: Synthetic oligonucleotide
  Target: SCNA; (-) strand; PAM type: YTN; PAM sequence: TTG
tccacccatccatctgatcc

SEQ ID NO: 56853 - DNA, 20 bp, Artificial Sequence
  Description of Artificial Sequence: Synthetic oligonucleotide
  Target: SCNA; (-) strand; PAM type: YTN; PAM sequence: TTT
gtccacccatccatctgatc

SEQ ID NO: 56854 - DNA, 20 bp, Artificial Sequence
  Description of Artificial Sequence: Synthetic oligonucleotide
  Target: SCNA; (-) strand; PAM type: YTN; PAM sequence: TTA
tccatttgtccacccatcca

SEQ ID NO: 56855 - DNA, 20 bp, Artificial Sequence
  Description of Artificial Sequence: Synthetic oligonucleotide
  Target: SCNA; (-) strand; PAM type: YTN; PAM sequence: TTC
aattatccatttgtccaccc

SEQ ID NO: 56856 - DNA, 20 bp, Artificial Sequence
  Description of Artificial Sequence: Synthetic oligonucleotide
  Target: SCNA; (-) strand; PAM type: YTN; PAM sequence: TTT
caattatccatttgtccacc

SEQ ID NO: 56857 - DNA, 20 bp, Artificial Sequence
  Description of Artificial Sequence: Synthetic oligonucleotide
  Target: SCNA; (-) strand; PAM type: YTN; PAM sequence: CTT
tcaattatccatttgtccac

SEQ ID NO: 56858 - DNA, 20 bp, Artificial Sequence
  Description of Artificial Sequence: Synthetic oligonucleotide
  Target: SCNA; (-) strand; PAM type: YTN; PAM sequence: TTC
tttcaattatccatttgtcc

SEQ ID NO: 56859 - DNA, 20 bp, Artificial Sequence
  Description of Artificial Sequence: Synthetic oligonucleotide
  Target: SCNA; (-) strand; PAM type: YTN; PAM sequence: TTA
ttctttcaattatccatttg

SEQ ID NO: 56860 - DNA, 20 bp, Artificial Sequence
  Description of Artificial Sequence: Synthetic oligonucleotide
  Target: SCNA; (-) strand; PAM type: YTN; PAM sequence: TTT
attctttcaattatccattt

SEQ ID NO: 56861 - DNA, 20 bp, Artificial Sequence
  Description of Artificial Sequence: Synthetic oligonucleotide
  Target: SCNA; (-) strand; PAM type: YTN; PAM sequence: CTA
tttattctttcaattatcca

SEQ ID NO: 56862 - DNA, 20 bp, Artificial Sequence
  Description of Artificial Sequence: Synthetic oligonucleotide
  Target: SCNA; (-) strand; PAM type: YTN; PAM sequence: CTG
ctatttattctttcaattat

SEQ ID NO: 56863 - DNA, 20 bp, Artificial Sequence
  Description of Artificial Sequence: Synthetic oligonucleotide
  Target: SCNA; (-) strand; PAM type: YTN; PAM sequence: TTC
tgctatttattctttcaatt

SEQ ID NO: 56864 - DNA, 20 bp, Artificial Sequence
  Description of Artificial Sequence: Synthetic oligonucleotide
  Target: SCNA; (-) strand; PAM type: YTN; PAM sequence: TTT
ctgctatttattctttcaat

SEQ ID NO: 56865 - DNA, 20 bp, Artificial Sequence
  Description of Artificial Sequence: Synthetic oligonucleotide
  Target: SCNA; (-) strand; PAM type: YTN; PAM sequence: TTA
tcatttctgctatttattct

SEQ ID NO: 56866 - DNA, 20 bp, Artificial Sequence
  Description of Artificial Sequence: Synthetic oligonucleotide
  Target: SCNA; (-) strand; PAM type: YTN; PAM sequence: TTA
gagttatcatttctgctatt

SEQ ID NO: 56867 - DNA, 20 bp, Artificial Sequence
  Description of Artificial Sequence: Synthetic oligonucleotide
  Target: SCNA; (-) strand; PAM type: YTN; PAM sequence: TTA
aaagttagagttatcatttc

SEQ ID NO: 56868 - DNA, 20 bp, Artificial Sequence
  Description of Artificial Sequence: Synthetic oligonucleotide
  Target: SCNA; (-) strand; PAM type: YTN; PAM sequence: CTT
aaaagttagagttatcattt

SEQ ID NO: 56869 - DNA, 20 bp, Artificial Sequence
  Description of Artificial Sequence: Synthetic oligonucleotide
  Target: SCNA; (-) strand; PAM type: YTN; PAM sequence: CTC
ttaaaagttagagttatcat

SEQ ID NO: 56870 - DNA, 20 bp, Artificial Sequence
  Description of Artificial Sequence: Synthetic oligonucleotide
  Target: SCNA; (-) strand; PAM type: YTN; PAM sequence: TTG
atagactcttaaaagttaga

SEQ ID NO: 56871 - DNA, 20 bp, Artificial Sequence
  Description of Artificial Sequence: Synthetic oligonucleotide
  Target: SCNA; (-) strand; PAM type: YTN; PAM sequence: CTT
gatagactcttaaaagttag

SEQ ID NO: 56872 - DNA, 20 bp, Artificial Sequence
  Description of Artificial Sequence: Synthetic oligonucleotide
  Target: SCNA; (-) strand; PAM type: YTN; PAM sequence: TTA
gcttgatagactcttaaaag

SEQ ID NO: 56873 - DNA, 20 bp, Artificial Sequence
  Description of Artificial Sequence: Synthetic oligonucleotide
  Target: SCNA; (-) strand; PAM type: YTN; PAM sequence: TTT
agcttgatagactcttaaaa

SEQ ID NO: 56874 - DNA, 20 bp, Artificial Sequence
  Description of Artificial Sequence: Synthetic oligonucleotide
  Target: SCNA; (-) strand; PAM type: YTN; PAM sequence: TTT
tagcttgatagactcttaaa

SEQ ID NO: 56875 - DNA, 20 bp, Artificial Sequence
  Description of Artificial Sequence: Synthetic oligonucleotide
  Target: SCNA; (-) strand; PAM type: YTN; PAM sequence: TTC
aaaagtcattttagcttgat

SEQ ID NO: 56876 - DNA, 20 bp, Artificial Sequence
  Description of Artificial Sequence: Synthetic oligonucleotide
  Target: SCNA; (-) strand; PAM type: YTN; PAM sequence: CTG
attcaaaagtcattttagct

SEQ ID NO: 56877 - DNA, 20 bp, Artificial Sequence
  Description of Artificial Sequence: Synthetic oligonucleotide
  Target: SCNA; (-) strand; PAM type: YTN; PAM sequence: TTC
gactgattcaaaagtcattt

SEQ ID NO: 56878 - DNA, 20 bp, Artificial Sequence
  Description of Artificial Sequence: Synthetic oligonucleotide
  Target: SCNA; (-) strand; PAM type: YTN; PAM sequence: TTC
attcgactgattcaaaagtc

SEQ ID NO: 56879 - DNA, 20 bp, Artificial Sequence
  Description of Artificial Sequence: Synthetic oligonucleotide
  Target: SCNA; (-) strand; PAM type: YTN; PAM sequence: TTC
ccacgtacattcattcgact

SEQ ID NO: 56880 - DNA, 20 bp, Artificial Sequence
  Description of Artificial Sequence: Synthetic oligonucleotide
  Target: SCNA; (-) strand; PAM type: YTN; PAM sequence: TTC
ccagttcccacgtacattca

SEQ ID NO: 56881 - DNA, 20 bp, Artificial Sequence
  Description of Artificial Sequence: Synthetic oligonucleotide
  Target: SCNA; (-) strand; PAM type: YTN; PAM sequence: TTA
agttcccagttcccacgtac

SEQ ID NO: 56882 - DNA, 20 bp, Artificial Sequence
  Description of Artificial Sequence: Synthetic oligonucleotide
  Target: SCNA; (-) strand; PAM type: YTN; PAM sequence: CTT
aagttcccagttcccacgta

SEQ ID NO: 56883 - DNA, 20 bp, Artificial Sequence
  Description of Artificial Sequence: Synthetic oligonucleotide
  Target: SCNA; (-) strand; PAM type: YTN; PAM sequence: TTC
ttaagttcccagttcccacg

SEQ ID NO: 56884 - DNA, 20 bp, Artificial Sequence
  Description of Artificial Sequence: Synthetic oligonucleotide
  Target: SCNA; (-) strand; PAM type: YTN; PAM sequence: TTT
cttaagttcccagttcccac

SEQ ID NO: 56885 - DNA, 20 bp, Artificial Sequence
  Description of Artificial Sequence: Synthetic oligonucleotide
  Target: SCNA; (-) strand; PAM type: YTN; PAM sequence: CTT
tcttaagttcccagttccca

SEQ ID NO: 56886 - DNA, 20 bp, Artificial Sequence
  Description of Artificial Sequence: Synthetic oligonucleotide
  Target: SCNA; (-) strand; PAM type: YTN; PAM sequence: CTC
tttcttaagttcccagttcc

SEQ ID NO: 56887 - DNA, 20 bp, Artificial Sequence
  Description of Artificial Sequence: Synthetic oligonucleotide
  Target: SCNA; (-) strand; PAM type: YTN; PAM sequence: TTC
tctttcttaagttcccagtt

SEQ ID NO: 56888 - DNA, 20 bp, Artificial Sequence
  Description of Artificial Sequence: Synthetic oligonucleotide
  Target: SCNA; (-) strand; PAM type: YTN; PAM sequence: CTT
ctctttcttaagttcccagt

SEQ ID NO: 56889 - DNA, 20 bp, Artificial Sequence
  Description of Artificial Sequence: Synthetic oligonucleotide
  Target: SCNA; (-) strand; PAM type: YTN; PAM sequence: CTC
cttctctttcttaagttccc

SEQ ID NO: 56890 - DNA, 20 bp, Artificial Sequence
  Description of Artificial Sequence: Synthetic oligonucleotide
  Target: SCNA; (-) strand; PAM type: YTN; PAM sequence: TTA
tgctccttctctttcttaag

SEQ ID NO: 56891 - DNA, 20 bp, Artificial Sequence
  Description of Artificial Sequence: Synthetic oligonucleotide
  Target: SCNA; (-) strand; PAM type: YTN; PAM sequence: TTT
atgctccttctctttcttaa

SEQ ID NO: 56892 - DNA, 20 bp, Artificial Sequence
  Description of Artificial Sequence: Synthetic oligonucleotide
  Target: SCNA; (-) strand; PAM type: YTN; PAM sequence: TTG
caatttatgctccttctctt

SEQ ID NO: 56893 - DNA, 20 bp, Artificial Sequence
  Description of Artificial Sequence: Synthetic oligonucleotide
  Target: SCNA; (-) strand; PAM type: YTN; PAM sequence: TTA
gccacaattgcaatttatgc

SEQ ID NO: 56894 - DNA, 20 bp, Artificial Sequence
  Description of Artificial Sequence: Synthetic oligonucleotide
  Target: SCNA; (-) strand; PAM type: YTN; PAM sequence: TTT
agccacaattgcaatttatg

SEQ ID NO: 56895 - DNA, 20 bp, Artificial Sequence
  Description of Artificial Sequence: Synthetic oligonucleotide
  Target: SCNA; (-) strand; PAM type: YTN; PAM sequence: CTT
tagccacaattgcaatttat

SEQ ID NO: 56896 - DNA, 20 bp, Artificial Sequence
  Description of Artificial Sequence: Synthetic oligonucleotide
  Target: SCNA; (-) strand; PAM type: YTN; PAM sequence: CTG
ctttagccacaattgcaatt

SEQ ID NO: 56897 - DNA, 20 bp, Artificial Sequence
  Description of Artificial Sequence: Synthetic oligonucleotide
  Target: SCNA; (-) strand; PAM type: YTN; PAM sequence: CTG
ctgctttagccacaattgca

SEQ ID NO: 56898 - DNA, 20 bp, Artificial Sequence
  Description of Artificial Sequence: Synthetic oligonucleotide
  Target: SCNA; (-) strand; PAM type: YTN; PAM sequence: TTC
tgctgctttagccacaattg

SEQ ID NO: 56899 - DNA, 20 bp, Artificial Sequence
  Description of Artificial Sequence: Synthetic oligonucleotide
  Target: SCNA; (-) strand; PAM type: YTN; PAM sequence: TTA
tgtaaataagcattctgctg

SEQ ID NO: 56900 - DNA, 20 bp, Artificial Sequence
  Description of Artificial Sequence: Synthetic oligonucleotide
  Target: SCNA; (-) strand; PAM type: YTN; PAM sequence: CTT
atgtaaataagcattctgct

SEQ ID NO: 56901 - DNA, 20 bp, Artificial Sequence
  Description of Artificial Sequence: Synthetic oligonucleotide
  Target: SCNA; (-) strand; PAM type: YTN; PAM sequence: TTA
aaacttatgtaaataagcat

SEQ ID NO: 56902 - DNA, 20 bp, Artificial Sequence
  Description of Artificial Sequence: Synthetic oligonucleotide
  Target: SCNA; (-) strand; PAM type: YTN; PAM sequence: CTG
gttaaaacttatgtaaataa

SEQ ID NO: 56903 - DNA, 20 bp, Artificial Sequence
  Description of Artificial Sequence: Synthetic oligonucleotide
  Target: SCNA; (-) strand; PAM type: YTN; PAM sequence: TTC
cgcactggttaaaacttatg

SEQ ID NO: 56904 - DNA, 20 bp, Artificial Sequence
  Description of Artificial Sequence: Synthetic oligonucleotide
  Target: SCNA; (-) strand; PAM type: YTN; PAM sequence: TTA
caatattccgcactggttaa

SEQ ID NO: 56905 - DNA, 20 bp, Artificial Sequence
  Description of Artificial Sequence: Synthetic oligonucleotide
  Target: SCNA; (-) strand; PAM type: YTN; PAM sequence: TTC
ataaaaaaacaacataaatg

SEQ ID NO: 56906 - DNA, 20 bp, Artificial Sequence
  Description of Artificial Sequence: Synthetic oligonucleotide
  Target: SCNA; (-) strand; PAM type: YTN; PAM sequence: CTG
gattcataaaaaaacaacat

SEQ ID NO: 56907 - DNA, 20 bp, Artificial Sequence
  Description of Artificial Sequence: Synthetic oligonucleotide
  Target: SCNA; (-) strand; PAM type: YTN; PAM sequence: TTA
ataagcatgtactggattca

SEQ ID NO: 56908 - DNA, 20 bp, Artificial Sequence
  Description of Artificial Sequence: Synthetic oligonucleotide
  Target: SCNA; (-) strand; PAM type: YTN; PAM sequence: TTT
aataagcatgtactggattc

SEQ ID NO: 56909 - DNA, 20 bp, Artificial Sequence
  Description of Artificial Sequence: Synthetic oligonucleotide
  Target: SCNA; (-) strand; PAM type: YTN; PAM sequence: CTT
taataagcatgtactggatt

SEQ ID NO: 56910 - DNA, 20 bp, Artificial Sequence
  Description of Artificial Sequence: Synthetic oligonucleotide
  Target: SCNA; (-) strand; PAM type: YTN; PAM sequence: TTC
cctttaataagcatgtactg

SEQ ID NO: 56911 - DNA, 20 bp, Artificial Sequence
  Description of Artificial Sequence: Synthetic oligonucleotide
  Target: SCNA; (-) strand; PAM type: YTN; PAM sequence: CTC
caattccctttaataagcat

SEQ ID NO: 56912 - DNA, 20 bp, Artificial Sequence
  Description of Artificial Sequence: Synthetic oligonucleotide
  Target: SCNA; (-) strand; PAM type: YTN; PAM sequence: TTC
tccaattccctttaataagc

SEQ ID NO: 56913 - DNA, 20 bp, Artificial Sequence
  Description of Artificial Sequence: Synthetic oligonucleotide
  Target: SCNA; (-) strand; PAM type: YTN; PAM sequence: TTT
ctccaattccctttaataag

SEQ ID NO: 56914 - DNA, 20 bp, Artificial Sequence
  Description of Artificial Sequence: Synthetic oligonucleotide
  Target: SCNA; (-) strand; PAM type: YTN; PAM sequence: TTT
tctccaattccctttaataa

SEQ ID NO: 56915 - DNA, 20 bp, Artificial Sequence
  Description of Artificial Sequence: Synthetic oligonucleotide
  Target: SCNA; (-) strand; PAM type: YTN; PAM sequence: TTA
ttttctccaattccctttaa

SEQ ID NO: 56916 - DNA, 20 bp, Artificial Sequence
  Description of Artificial Sequence: Synthetic oligonucleotide
  Target: SCNA; (-) strand; PAM type: YTN; PAM sequence: TTT
attttctccaattcccttta

SEQ ID NO: 56917 - DNA, 20 bp, Artificial Sequence
  Description of Artificial Sequence: Synthetic oligonucleotide
  Target: SCNA; (-) strand; PAM type: YTN; PAM sequence: TTT
tattttctccaattcccttt

SEQ ID NO: 56918 - DNA, 20 bp, Artificial Sequence
  Description of Artificial Sequence: Synthetic oligonucleotide
  Target: SCNA; (-) strand; PAM type: YTN; PAM sequence: TTT
ttattttctccaattccctt

SEQ ID NO: 56919 - DNA, 20 bp, Artificial Sequence
  Description of Artificial Sequence: Synthetic oligonucleotide
  Target: SCNA; (-) strand; PAM type: YTN; PAM sequence: TTA
tttttattttctccaattcc

SEQ ID NO: 56920 - DNA, 20 bp, Artificial Sequence
  Description of Artificial Sequence: Synthetic oligonucleotide
  Target: SCNA; (-) strand; PAM type: YTN; PAM sequence: CTT
atttttattttctccaattc

SEQ ID NO: 56921 - DNA, 20 bp, Artificial Sequence
  Description of Artificial Sequence: Synthetic oligonucleotide
  Target: SCNA; (-) strand; PAM type: YTN; PAM sequence: TTC
ttatttttattttctccaat

SEQ ID NO: 56922 - DNA, 20 bp, Artificial Sequence
  Description of Artificial Sequence: Synthetic oligonucleotide
  Target: SCNA; (-) strand; PAM type: YTN; PAM sequence: TTT
cttatttttattttctccaa

SEQ ID NO: 56923 - DNA, 20 bp, Artificial Sequence
  Description of Artificial Sequence: Synthetic oligonucleotide
  Target: SCNA; (-) strand; PAM type: YTN; PAM sequence: CTT
tcttatttttattttctcca

SEQ ID NO: 56924 - DNA, 20 bp, Artificial Sequence
  Description of Artificial Sequence: Synthetic oligonucleotide
  Target: SCNA; (-) strand; PAM type: YTN; PAM sequence: TTC
ctttcttatttttattttct

SEQ ID NO: 56925 - DNA, 20 bp, Artificial Sequence
  Description of Artificial Sequence: Synthetic oligonucleotide
  Target: SCNA; (-) strand; PAM type: YTN; PAM sequence: TTG
cgttcctttcttatttttat

SEQ ID NO: 56926 - DNA, 20 bp, Artificial Sequence
  Description of Artificial Sequence: Synthetic oligonucleotide
  Target: SCNA; (-) strand; PAM type: YTN; PAM sequence: TTA
ttgcgttcctttcttatttt

SEQ ID NO: 56927 - DNA, 20 bp, Artificial Sequence
  Description of Artificial Sequence: Synthetic oligonucleotide
  Target: SCNA; (-) strand; PAM type: YTN; PAM sequence: CTG
gattattgcgttcctttctt

SEQ ID NO: 56928 - DNA, 20 bp, Artificial Sequence
  Description of Artificial Sequence: Synthetic oligonucleotide
  Target: SCNA; (-) strand; PAM type: YTN; PAM sequence: TTA
cagtctggattattgcgttc

SEQ ID NO: 56929 - DNA, 20 bp, Artificial Sequence
  Description of Artificial Sequence: Synthetic oligonucleotide
  Target: SCNA; (-) strand; PAM type: YTN; PAM sequence: CTA
gattacagtctggattattg

SEQ ID NO: 56930 - DNA, 20 bp, Artificial Sequence
  Description of Artificial Sequence: Synthetic oligonucleotide
  Target: SCNA; (-) strand; PAM type: YTN; PAM sequence: CTG
ggtcctagattacagtctgg

SEQ ID NO: 56931 - DNA, 20 bp, Artificial Sequence
  Description of Artificial Sequence: Synthetic oligonucleotide
  Target: SCNA; (-) strand; PAM type: YTN; PAM sequence: TTA
ctgggtcctagattacagtc

SEQ ID NO: 56932 - DNA, 20 bp, Artificial Sequence
  Description of Artificial Sequence: Synthetic oligonucleotide
  Target: SCNA; (-) strand; PAM type: YTN; PAM sequence: CTA
ttactgggtcctagattaca

SEQ ID NO: 56933 - DNA, 20 bp, Artificial Sequence
  Description of Artificial Sequence: Synthetic oligonucleotide
  Target: SCNA; (-) strand; PAM type: YTN; PAM sequence: CTA
agtaactattactgggtcct

SEQ ID NO: 56934 - DNA, 20 bp, Artificial Sequence
  Description of Artificial Sequence: Synthetic oligonucleotide
  Target: SCNA; (-) strand; PAM type: YTN; PAM sequence: TTG
caactaagtaactattactg

SEQ ID NO: 56935 - DNA, 20 bp, Artificial Sequence
  Description of Artificial Sequence: Synthetic oligonucleotide
  Target: SCNA; (-) strand; PAM type: YTN; PAM sequence: TTT
gcaactaagtaactattact

SEQ ID NO: 56936 - DNA, 20 bp, Artificial Sequence
  Description of Artificial Sequence: Synthetic oligonucleotide
  Target: SCNA; (-) strand; PAM type: YTN; PAM sequence: TTT
tgcaactaagtaactattac

SEQ ID NO: 56937 - DNA, 20 bp, Artificial Sequence
  Description of Artificial Sequence: Synthetic oligonucleotide
  Target: SCNA; (-) strand; PAM type: YTN; PAM sequence: TTG
aggaaattttgcaactaagt

SEQ ID NO: 56938 - DNA, 20 bp, Artificial Sequence
  Description of Artificial Sequence: Synthetic oligonucleotide
  Target: SCNA; (-) strand; PAM type: YTN; PAM sequence: CTT
gaggaaattttgcaactaag

SEQ ID NO: 56939 - DNA, 20 bp, Artificial Sequence
  Description of Artificial Sequence: Synthetic oligonucleotide
  Target: SCNA; (-) strand; PAM type: YTN; PAM sequence: TTG
cccttgaggaaattttgcaa

SEQ ID NO: 56940 - DNA, 20 bp, Artificial Sequence
  Description of Artificial Sequence: Synthetic oligonucleotide
  Target: SCNA; (-) strand; PAM type: YTN; PAM sequence: CTC
atattgcccttgaggaaatt

SEQ ID NO: 56941 - DNA, 20 bp, Artificial Sequence
  Description of Artificial Sequence: Synthetic oligonucleotide
  Target: SCNA; (-) strand; PAM type: YTN; PAM sequence: CTC
tcatattgcccttgaggaaa

SEQ ID NO: 56942 - DNA, 20 bp, Artificial Sequence
  Description of Artificial Sequence: Synthetic oligonucleotide
  Target: SCNA; (-) strand; PAM type: YTN; PAM sequence: CTC
tctcatattgcccttgagga

SEQ ID NO: 56943 - DNA, 20 bp, Artificial Sequence
  Description of Artificial Sequence: Synthetic oligonucleotide
  Target: SCNA; (-) strand; PAM type: YTN; PAM sequence: TTA
acgccagtaggcacccccag

SEQ ID NO: 56944 - DNA, 20 bp, Artificial Sequence
  Description of Artificial Sequence: Synthetic oligonucleotide
  Target: SCNA; (-) strand; PAM type: YTN; PAM sequence: TTT
aacgccagtaggcaccccca

SEQ ID NO: 56945 - DNA, 20 bp, Artificial Sequence
  Description of Artificial Sequence: Synthetic oligonucleotide
  Target: SCNA; (-) strand; PAM type: YTN; PAM sequence: CTT
taacgccagtaggcaccccc

SEQ ID NO: 56946 - DNA, 20 bp, Artificial Sequence
  Description of Artificial Sequence: Synthetic oligonucleotide
  Target: SCNA; (-) strand; PAM type: YTN; PAM sequence: CTC
tttaacgccagtaggcaccc

SEQ ID NO: 56947 - DNA, 20 bp, Artificial Sequence
  Description of Artificial Sequence: Synthetic oligonucleotide
  Target: SCNA; (-) strand; PAM type: YTN; PAM sequence: TTA
cctctttaacgccagtaggc

SEQ ID NO: 56948 - DNA, 20 bp, Artificial Sequence
  Description of Artificial Sequence: Synthetic oligonucleotide
  Target: SCNA; (-) strand; PAM type: YTN; PAM sequence: CTT
acctctttaacgccagtagg

SEQ ID NO: 56949 - DNA, 20 bp, Artificial Sequence
  Description of Artificial Sequence: Synthetic oligonucleotide
  Target: SCNA; (-) strand; PAM type: YTN; PAM sequence: CTG
ggccttacctctttaacgcc

SEQ ID NO: 56950 - DNA, 20 bp, Artificial Sequence
  Description of Artificial Sequence: Synthetic oligonucleotide
  Target: SCNA; (-) strand; PAM type: YTN; PAM sequence: TTA
caagccctgggccttacctc

SEQ ID NO: 56951 - DNA, 20 bp, Artificial Sequence
  Description of Artificial Sequence: Synthetic oligonucleotide
  Target: SCNA; (-) strand; PAM type: YTN; PAM sequence: TTT
acaagccctgggccttacct

SEQ ID NO: 56952 - DNA, 20 bp, Artificial Sequence
  Description of Artificial Sequence: Synthetic oligonucleotide
  Target: SCNA; (-) strand; PAM type: YTN; PAM sequence: TTG
taggatgtttacaagccctg

SEQ ID NO: 56953 - DNA, 20 bp, Artificial Sequence
  Description of Artificial Sequence: Synthetic oligonucleotide
  Target: SCNA; (-) strand; PAM type: YTN; PAM sequence: TTC
attgtaggatgtttacaagc

SEQ ID NO: 56954 - DNA, 20 bp, Artificial Sequence
  Description of Artificial Sequence: Synthetic oligonucleotide
  Target: SCNA; (-) strand; PAM type: YTN; PAM sequence: CTC
attcattgtaggatgtttac

SEQ ID NO: 56955 - DNA, 20 bp, Artificial Sequence
  Description of Artificial Sequence: Synthetic oligonucleotide
  Target: SCNA; (-) strand; PAM type: YTN; PAM sequence: CTC
tcattcattgtaggatgttt

SEQ ID NO: 56956 - DNA, 20 bp, Artificial Sequence
  Description of Artificial Sequence: Synthetic oligonucleotide
  Target: SCNA; (-) strand; PAM type: YTN; PAM sequence: CTG
tggagaactctcattcattg

SEQ ID NO: 56957 - DNA, 20 bp, Artificial Sequence
  Description of Artificial Sequence: Synthetic oligonucleotide
  Target: SCNA; (-) strand; PAM type: YTN; PAM sequence: TTC
gctgtggagaactctcattc

SEQ ID NO: 56958 - DNA, 20 bp, Artificial Sequence
  Description of Artificial Sequence: Synthetic oligonucleotide
  Target: SCNA; (-) strand; PAM type: YTN; PAM sequence: CTT
cgctgtggagaactctcatt

SEQ ID NO: 56959 - DNA, 20 bp, Artificial Sequence
  Description of Artificial Sequence: Synthetic oligonucleotide
  Target: SCNA; (-) strand; PAM type: YTN; PAM sequence: TTC
ttcgctgtggagaactctca

SEQ ID NO: 56960 - DNA, 20 bp, Artificial Sequence
  Description of Artificial Sequence: Synthetic oligonucleotide
  Target: SCNA; (-) strand; PAM type: YTN; PAM sequence: CTG
ggtaattcttcgctgtggag

SEQ ID NO: 56961 - DNA, 20 bp, Artificial Sequence
  Description of Artificial Sequence: Synthetic oligonucleotide
  Target: SCNA; (-) strand; PAM type: YTN; PAM sequence: TTG
ggctgggtaattcttcgctg

SEQ ID NO: 56962 - DNA, 20 bp, Artificial Sequence
  Description of Artificial Sequence: Synthetic oligonucleotide
  Target: SCNA; (-) strand; PAM type: YTN; PAM sequence: TTT
gggctgggtaattcttcgct

SEQ ID NO: 56963 - DNA, 20 bp, Artificial Sequence
  Description of Artificial Sequence: Synthetic oligonucleotide
  Target: SCNA; (-) strand; PAM type: YTN; PAM sequence: TTT
tgggctgggtaattcttcgc

SEQ ID NO: 56964 - DNA, 20 bp, Artificial Sequence
  Description of Artificial Sequence: Synthetic oligonucleotide
  Target: SCNA; (-) strand; PAM type: YTN; PAM sequence: TTG
cattttgggctgggtaattc

SEQ ID NO: 56965 - DNA, 20 bp, Artificial Sequence
  Description of Artificial Sequence: Synthetic oligonucleotide
  Target: SCNA; (-) strand; PAM type: YTN; PAM sequence: TTT
gcattttgggctgggtaatt

SEQ ID NO: 56966 - DNA, 20 bp, Artificial Sequence
  Description of Artificial Sequence: Synthetic oligonucleotide
  Target: SCNA; (-) strand; PAM type: YTN; PAM sequence: TTT
tgcattttgggctgggtaat

SEQ ID NO: 56967 - DNA, 20 bp, Artificial Sequence
  Description of Artificial Sequence: Synthetic oligonucleotide
  Target: SCNA; (-) strand; PAM type: YTN; PAM sequence: CTC
agtgaagcccattttgcatt

SEQ ID NO: 56968 - DNA, 20 bp, Artificial Sequence
  Description of Artificial Sequence: Synthetic oligonucleotide
  Target: SCNA; (-) strand; PAM type: YTN; PAM sequence: TTC
tcagtgaagcccattttgca

SEQ ID NO: 56969 - DNA, 20 bp, Artificial Sequence
  Description of Artificial Sequence: Synthetic oligonucleotide
  Target: SCNA; (-) strand; PAM type: YTN; PAM sequence: TTT
ctcagtgaagcccattttgc

SEQ ID NO: 56970 - DNA, 20 bp, Artificial Sequence
  Description of Artificial Sequence: Synthetic oligonucleotide
  Target: SCNA; (-) strand; PAM type: YTN; PAM sequence: TTT
tctcagtgaagcccattttg

SEQ ID NO: 56971 - DNA, 20 bp, Artificial Sequence
  Description of Artificial Sequence: Synthetic oligonucleotide
  Target: SCNA; (-) strand; PAM type: YTN; PAM sequence: TTT
ttctcagtgaagcccatttt

SEQ ID NO: 56972 - DNA, 20 bp, Artificial Sequence
  Description of Artificial Sequence: Synthetic oligonucleotide
  Target: SCNA; (-) strand; PAM type: YTN; PAM sequence: CTC
agtttttctcagtgaagccc

SEQ ID NO: 56973 - DNA, 20 bp, Artificial Sequence
  Description of Artificial Sequence: Synthetic oligonucleotide
  Target: SCNA; (-) strand; PAM type: YTN; PAM sequence: TTA
tgtacatataaagacgtgga

SEQ ID NO: 56974 - DNA, 20 bp, Artificial Sequence
  Description of Artificial Sequence: Synthetic oligonucleotide
  Target: SCNA; (-) strand; PAM type: YTN; PAM sequence: CTT
atgtacatataaagacgtgg

SEQ ID NO: 56975 - DNA, 20 bp, Artificial Sequence
  Description of Artificial Sequence: Synthetic oligonucleotide
  Target: SCNA; (-) strand; PAM type: YTN; PAM sequence: CTG
tatgtggcttatgtacatat

SEQ ID NO: 56976 - DNA, 20 bp, Artificial Sequence
  Description of Artificial Sequence: Synthetic oligonucleotide
  Target: SCNA; (-) strand; PAM type: YTN; PAM sequence: TTA
aaaacctgtatgtggcttat

SEQ ID NO: 56977 - DNA, 20 bp, Artificial Sequence
  Description of Artificial Sequence: Synthetic oligonucleotide
  Target: SCNA; (-) strand; PAM type: YTN; PAM sequence: TTT
aaaaacctgtatgtggctta

SEQ ID NO: 56978 - DNA, 20 bp, Artificial Sequence
  Description of Artificial Sequence: Synthetic oligonucleotide
  Target: SCNA; (-) strand; PAM type: YTN; PAM sequence: TTT
taaaaacctgtatgtggctt

SEQ ID NO: 56979 - DNA, 20 bp, Artificial Sequence
  Description of Artificial Sequence: Synthetic oligonucleotide
  Target: SCNA; (-) strand; PAM type: YTN; PAM sequence: TTT
ttaaaaacctgtatgtggct

SEQ ID NO: 56980 - DNA, 20 bp, Artificial Sequence
  Description of Artificial Sequence: Synthetic oligonucleotide
  Target: SCNA; (-) strand; PAM type: YTN; PAM sequence: TTT
tttaaaaacctgtatgtggc

SEQ ID NO: 56981 - DNA, 20 bp, Artificial Sequence
  Description of Artificial Sequence: Synthetic oligonucleotide
  Target: SCNA; (-) strand; PAM type: YTN; PAM sequence: TTA
ttttttaaaaacctgtatgt

SEQ ID NO: 56982 - DNA, 20 bp, Artificial Sequence
  Description of Artificial Sequence: Synthetic oligonucleotide
  Target: SCNA; (-) strand; PAM type: YTN; PAM sequence: TTT
attttttaaaaacctgtatg

SEQ ID NO: 56983 - DNA, 20 bp, Artificial Sequence
  Description of Artificial Sequence: Synthetic oligonucleotide
  Target: SCNA; (-) strand; PAM type: YTN; PAM sequence: TTT
tattttttaaaaacctgtat

SEQ ID NO: 56984 - DNA, 20 bp, Artificial Sequence
  Description of Artificial Sequence: Synthetic oligonucleotide
  Target: SCNA; (-) strand; PAM type: YTN; PAM sequence: TTT
ttattttttaaaaacctgta

SEQ ID NO: 56985 - DNA, 20 bp, Artificial Sequence
  Description of Artificial Sequence: Synthetic oligonucleotide
  Target: SCNA; (-) strand; PAM type: YTN; PAM sequence: TTG
tgcagcataatatttttatt

SEQ ID NO: 56986 - DNA, 20 bp, Artificial Sequence
  Description of Artificial Sequence: Synthetic oligonucleotide
  Target: SCNA; (-) strand; PAM type: YTN; PAM sequence: TTT
gtgcagcataatatttttat

SEQ ID NO: 56987 - DNA, 20 bp, Artificial Sequence
  Description of Artificial Sequence: Synthetic oligonucleotide
  Target: SCNA; (-) strand; PAM type: YTN; PAM sequence: TTA
caaagcagtttgtgcagcat

SEQ ID NO: 56988 - DNA, 20 bp, Artificial Sequence
  Description of Artificial Sequence: Synthetic oligonucleotide
  Target: SCNA; (-) strand; PAM type: YTN; PAM sequence: TTG
cagtatgtgaaaagaacaaa

SEQ ID NO: 56989 - DNA, 20 bp, Artificial Sequence
  Description of Artificial Sequence: Synthetic oligonucleotide
  Target: SCNA; (-) strand; PAM type: YTN; PAM sequence: TTG
ttgcagtatgtgaaaagaac

SEQ ID NO: 56990 - DNA, 20 bp, Artificial Sequence
  Description of Artificial Sequence: Synthetic oligonucleotide
  Target: SCNA; (-) strand; PAM type: YTN; PAM sequence: CTA
ttgttgcagtatgtgaaaag

SEQ ID NO: 56991 - DNA, 20 bp, Artificial Sequence
  Description of Artificial Sequence: Synthetic oligonucleotide
  Target: SCNA; (-) strand; PAM type: YTN; PAM sequence: TTA
atggtgtggaaggatgctat

SEQ ID NO: 56992 - DNA, 20 bp, Artificial Sequence
  Description of Artificial Sequence: Synthetic oligonucleotide
  Target: SCNA; (-) strand; PAM type: YTN; PAM sequence: TTA
ttaatggtgtggaaggatgc

SEQ ID NO: 56993 - DNA, 20 bp, Artificial Sequence
  Description of Artificial Sequence: Synthetic oligonucleotide
  Target: SCNA; (-) strand; PAM type: YTN; PAM sequence: TTG
tagaataattattaatggtg

SEQ ID NO: 56994 - DNA, 20 bp, Artificial Sequence
  Description of Artificial Sequence: Synthetic oligonucleotide
  Target: SCNA; (-) strand; PAM type: YTN; PAM sequence: TTA
aaatgttgtagaataattat

SEQ ID NO: 56995 - DNA, 20 bp, Artificial Sequence
  Description of Artificial Sequence: Synthetic oligonucleotide
  Target: SCNA; (-) strand; PAM type: YTN; PAM sequence: CTG
aacagccattaaaatgttgt

SEQ ID NO: 56996 - DNA, 20 bp, Artificial Sequence
  Description of Artificial Sequence: Synthetic oligonucleotide
  Target: SCNA; (-) strand; PAM type: YTN; PAM sequence: TTG
ctgaacagccattaaaatgt

SEQ ID NO: 56997 - DNA, 20 bp, Artificial Sequence
  Description of Artificial Sequence: Synthetic oligonucleotide
  Target: SCNA; (-) strand; PAM type: YTN; PAM sequence: TTT
gctgaacagccattaaaatg

SEQ ID NO: 56998 - DNA, 20 bp, Artificial Sequence
  Description of Artificial Sequence: Synthetic oligonucleotide
  Target: SCNA; (-) strand; PAM type: YTN; PAM sequence: TTG
atccatgcagtggtttgctg

SEQ ID NO: 56999 - DNA, 20 bp, Artificial Sequence
  Description of Artificial Sequence: Synthetic oligonucleotide
  Target: SCNA; (-) strand; PAM type: YTN; PAM sequence: TTA
tggttgatccatgcagtggt

SEQ ID NO: 57000 - DNA, 20 bp, Artificial Sequence
  Description of Artificial Sequence: Synthetic oligonucleotide
  Target: SCNA; (-) strand; PAM type: YTN; PAM sequence: TTA
aatgcattatggttgatcca

SEQ ID NO: 57001 - DNA, 20 bp, Artificial Sequence
  Description of Artificial Sequence: Synthetic oligonucleotide
  Target: SCNA; (-) strand; PAM type: YTN; PAM sequence: CTC
attaaatgcattatggttga

SEQ ID NO: 57002 - DNA, 20 bp, Artificial Sequence
  Description of Artificial Sequence: Synthetic oligonucleotide
  Target: SCNA; (-) strand; PAM type: YTN; PAM sequence: TTG
atcatagggacctcattaaa

SEQ ID NO: 57003 - DNA, 20 bp, Artificial Sequence
  Description of Artificial Sequence: Synthetic oligonucleotide
  Target: SCNA; (-) strand; PAM type: YTN; PAM sequence: TTT
gatcatagggacctcattaa

SEQ ID NO: 57004 - DNA, 20 bp, Artificial Sequence
  Description of Artificial Sequence: Synthetic oligonucleotide
  Target: SCNA; (-) strand; PAM type: YTN; PAM sequence: CTA
gaagtttgatcatagggacc

SEQ ID NO: 57005 - DNA, 20 bp, Artificial Sequence
  Description of Artificial Sequence: Synthetic oligonucleotide
  Target: SCNA; (-) strand; PAM type: YTN; PAM sequence: TTG
aaaaaaatagtgctagaagt

SEQ ID NO: 57006 - DNA, 20 bp, Artificial Sequence
  Description of Artificial Sequence: Synthetic oligonucleotide
  Target: SCNA; (-) strand; PAM type: YTN; PAM sequence: TTA
taaaacaaaattgaaaaaaa

SEQ ID NO: 57007 - DNA, 20 bp, Artificial Sequence
  Description of Artificial Sequence: Synthetic oligonucleotide
  Target: SCNA; (-) strand; PAM type: YTN; PAM sequence: TTG
attataaaacaaaattgaaa

SEQ ID NO: 57008 - DNA, 20 bp, Artificial Sequence
  Description of Artificial Sequence: Synthetic oligonucleotide
  Target: SCNA; (-) strand; PAM type: YTN; PAM sequence: TTA
tcacagaattgattataaaa

SEQ ID NO: 57009 - DNA, 20 bp, Artificial Sequence
  Description of Artificial Sequence: Synthetic oligonucleotide
  Target: SCNA; (-) strand; PAM type: YTN; PAM sequence: TTT
atcacagaattgattataaa

SEQ ID NO: 57010 - DNA, 20 bp, Artificial Sequence
  Description of Artificial Sequence: Synthetic oligonucleotide
  Target: SCNA; (-) strand; PAM type: YTN; PAM sequence: TTA
aatatgaagatgtttatcac

SEQ ID NO: 57011 - DNA, 20 bp, Artificial Sequence
  Description of Artificial Sequence: Synthetic oligonucleotide
  Target: SCNA; (-) strand; PAM type: YTN; PAM sequence: TTT
aaatatgaagatgtttatca

SEQ ID NO: 57012 - DNA, 20 bp, Artificial Sequence
  Description of Artificial Sequence: Synthetic oligonucleotide
  Target: SCNA; (-) strand; PAM type: YTN; PAM sequence: TTA
aatatgatcataagtttaaa

SEQ ID NO: 57013 - DNA, 20 bp, Artificial Sequence
  Description of Artificial Sequence: Synthetic oligonucleotide
  Target: SCNA; (-) strand; PAM type: YTN; PAM sequence: TTT
aaatatgatcataagtttaa

SEQ ID NO: 57014 - DNA, 20 bp, Artificial Sequence
  Description of Artificial Sequence: Synthetic oligonucleotide
  Target: SCNA; (-) strand; PAM type: YTN; PAM sequence: CTA
agaatttaaatatgatcata

SEQ ID NO: 57015 - DNA, 20 bp, Artificial Sequence
  Description of Artificial Sequence: Synthetic oligonucleotide
  Target: SCNA; (-) strand; PAM type: YTN; PAM sequence: CTG
accagtcgcatgtctaagaa

SEQ ID NO: 57016 - DNA, 20 bp, Artificial Sequence
  Description of Artificial Sequence: Synthetic oligonucleotide
  Target: SCNA; (-) strand; PAM type: YTN; PAM sequence: CTC
tgaccagtcgcatgtctaag

SEQ ID NO: 57017 - DNA, 20 bp, Artificial Sequence
  Description of Artificial Sequence: Synthetic oligonucleotide
  Target: SCNA; (-) strand; PAM type: YTN; PAM sequence: TTA
tgcatgctctgaccagtcgc

SEQ ID NO: 57018 - DNA, 20 bp, Artificial Sequence
  Description of Artificial Sequence: Synthetic oligonucleotide
  Target: SCNA; (-) strand; PAM type: YTN; PAM sequence: TTG
aaattatgcatgctctgacc

SEQ ID NO: 57019 - DNA, 20 bp, Artificial Sequence
  Description of Artificial Sequence: Synthetic oligonucleotide
  Target: SCNA; (-) strand; PAM type: YTN; PAM sequence: CTA
tcaaaagcattgaaattatg

SEQ ID NO: 57020 - DNA, 20 bp, Artificial Sequence
  Description of Artificial Sequence: Synthetic oligonucleotide
  Target: SCNA; (-) strand; PAM type: YTN; PAM sequence: TTG
gaagtctatcaaaagcattg

SEQ ID NO: 57021 - DNA, 20 bp, Artificial Sequence
  Description of Artificial Sequence: Synthetic oligonucleotide
  Target: SCNA; (-) strand; PAM type: YTN; PAM sequence: TTG
aggacatgttggaagtctat

SEQ ID NO: 57022 - DNA, 20 bp, Artificial Sequence
  Description of Artificial Sequence: Synthetic oligonucleotide
  Target: SCNA; (-) strand; PAM type: YTN; PAM sequence: TTT
gaggacatgttggaagtcta

SEQ ID NO: 57023 - DNA, 20 bp, Artificial Sequence
  Description of Artificial Sequence: Synthetic oligonucleotide
  Target: SCNA; (-) strand; PAM type: YTN; PAM sequence: TTT
tgaggacatgttggaagtct

SEQ ID NO: 57024 - DNA, 20 bp, Artificial Sequence
  Description of Artificial Sequence: Synthetic oligonucleotide
  Target: SCNA; (-) strand; PAM type: YTN; PAM sequence: TTT
ttgaggacatgttggaagtc

SEQ ID NO: 57025 - DNA, 20 bp, Artificial Sequence
  Description of Artificial Sequence: Synthetic oligonucleotide
  Target: SCNA; (-) strand; PAM type: YTN; PAM sequence: CTA
ataaaagtcatttttgagga

SEQ ID NO: 57026 - DNA, 20 bp, Artificial Sequence
  Description of Artificial Sequence: Synthetic oligonucleotide
  Target: SCNA; (-) strand; PAM type: YTN; PAM sequence: TTA
gagaataaactaataaaagt

SEQ ID NO: 57027 - DNA, 20 bp, Artificial Sequence
  Description of Artificial Sequence: Synthetic oligonucleotide
  Target: SCNA; (-) strand; PAM type: YTN; PAM sequence: TTA
gagatgtccatcaatcagaa

SEQ ID NO: 57028 - DNA, 20 bp, Artificial Sequence
  Description of Artificial Sequence: Synthetic oligonucleotide
  Target: SCNA; (-) strand; PAM type: YTN; PAM sequence: TTA
tgttagagatgtccatcaat

SEQ ID NO: 57029 - DNA, 20 bp, Artificial Sequence
  Description of Artificial Sequence: Synthetic oligonucleotide
  Target: SCNA; (-) strand; PAM type: YTN; PAM sequence: TTT
atgttagagatgtccatcaa

SEQ ID NO: 57030 - DNA, 20 bp, Artificial Sequence
  Description of Artificial Sequence: Synthetic oligonucleotide
  Target: SCNA; (-) strand; PAM type: YTN; PAM sequence: CTT
tatgttagagatgtccatca

SEQ ID NO: 57031 - DNA, 20 bp, Artificial Sequence
  Description of Artificial Sequence: Synthetic oligonucleotide
  Target: SCNA; (-) strand; PAM type: YTN; PAM sequence: TTC
agcaactttatgttagagat

SEQ ID NO: 57032 - DNA, 20 bp, Artificial Sequence
  Description of Artificial Sequence: Synthetic oligonucleotide
  Target: SCNA; (-) strand; PAM type: YTN; PAM sequence: TTT
cagcaactttatgttagaga

SEQ ID NO: 57033 - DNA, 20 bp, Artificial Sequence
  Description of Artificial Sequence: Synthetic oligonucleotide
  Target: SCNA; (-) strand; PAM type: YTN; PAM sequence: TTT
tcagcaactttatgttagag

SEQ ID NO: 57034 - DNA, 20 bp, Artificial Sequence
  Description of Artificial Sequence: Synthetic oligonucleotide
  Target: SCNA; (-) strand; PAM type: YTN; PAM sequence: TTC
atattttcagcaactttatg

SEQ ID NO: 57035 - DNA, 20 bp, Artificial Sequence
  Description of Artificial Sequence: Synthetic oligonucleotide
  Target: SCNA; (-) strand; PAM type: YTN; PAM sequence: TTT
catattttcagcaactttat

SEQ ID NO: 57036 - DNA, 20 bp, Artificial Sequence
  Description of Artificial Sequence: Synthetic oligonucleotide
  Target: SCNA; (-) strand; PAM type: YTN; PAM sequence: CTG
atgtttcatattttcagcaa

SEQ ID NO: 57037 - DNA, 20 bp, Artificial Sequence
  Description of Artificial Sequence: Synthetic oligonucleotide
  Target: SCNA; (-) strand; PAM type: YTN; PAM sequence: CTC
agctgatgtttcatattttc

SEQ ID NO: 57038 - DNA, 20 bp, Artificial Sequence
  Description of Artificial Sequence: Synthetic oligonucleotide
  Target: SCNA; (-) strand; PAM type: YTN; PAM sequence: TTC
ccagggtcacagtgcctcag

SEQ ID NO: 57039 - DNA, 20 bp, Artificial Sequence
  Description of Artificial Sequence: Synthetic oligonucleotide
  Target: SCNA; (-) strand; PAM type: YTN; PAM sequence: CTA
ggaagggaccagccagttcc

SEQ ID NO: 57040 - DNA, 20 bp, Artificial Sequence
  Description of Artificial Sequence: Synthetic oligonucleotide
  Target: SCNA; (-) strand; PAM type: YTN; PAM sequence: CTA
agatgtgggctaggaaggga

SEQ ID NO: 57041 - DNA, 20 bp, Artificial Sequence
  Description of Artificial Sequence: Synthetic oligonucleotide
  Target: SCNA; (-) strand; PAM type: YTN; PAM sequence: CTA
ctaagatgtgggctaggaag

SEQ ID NO: 57042 - DNA, 20 bp, Artificial Sequence
  Description of Artificial Sequence: Synthetic oligonucleotide
  Target: SCNA; (-) strand; PAM type: YTN; PAM sequence: TTC
tactaagatgtgggctagga

SEQ ID NO: 57043 - DNA, 20 bp, Artificial Sequence
  Description of Artificial Sequence: Synthetic oligonucleotide
  Target: SCNA; (-) strand; PAM type: YTN; PAM sequence: CTT
ctactaagatgtgggctagg

SEQ ID NO: 57044 - DNA, 20 bp, Artificial Sequence
  Description of Artificial Sequence: Synthetic oligonucleotide
  Target: SCNA; (-) strand; PAM type: YTN; PAM sequence: TTG
catcttctactaagatgtgg

SEQ ID NO: 57045 - DNA, 20 bp, Artificial Sequence
  Description of Artificial Sequence: Synthetic oligonucleotide
  Target: SCNA; (-) strand; PAM type: YTN; PAM sequence: CTT
gcatcttctactaagatgtg

SEQ ID NO: 57046 - DNA, 20 bp, Artificial Sequence
  Description of Artificial Sequence: Synthetic oligonucleotide
  Target: SCNA; (-) strand; PAM type: YTN; PAM sequence: TTC
cacaataacccttgcatctt

SEQ ID NO: 57047 - DNA, 20 bp, Artificial Sequence
  Description of Artificial Sequence: Synthetic oligonucleotide
  Target: SCNA; (-) strand; PAM type: YTN; PAM sequence: TTA
acccgcggacgtattccaca

SEQ ID NO: 57048 - DNA, 20 bp, Artificial Sequence
  Description of Artificial Sequence: Synthetic oligonucleotide
  Target: SCNA; (-) strand; PAM type: YTN; PAM sequence: TTT
aacccgcggacgtattccac

SEQ ID NO: 57049 - DNA, 20 bp, Artificial Sequence
  Description of Artificial Sequence: Synthetic oligonucleotide
  Target: SCNA; (-) strand; PAM type: YTN; PAM sequence: TTT
taacccgcggacgtattcca

SEQ ID NO: 57050 - DNA, 20 bp, Artificial Sequence
  Description of Artificial Sequence: Synthetic oligonucleotide
  Target: SCNA; (-) strand; PAM type: YTN; PAM sequence: TTT
ttaacccgcggacgtattcc

SEQ ID NO: 57051 - DNA, 20 bp, Artificial Sequence
  Description of Artificial Sequence: Synthetic oligonucleotide
  Target: SCNA; (-) strand; PAM type: YTN; PAM sequence: TTG
atacatggtttttaacccgc

SEQ ID NO: 57052 - DNA, 20 bp, Artificial Sequence
  Description of Artificial Sequence: Synthetic oligonucleotide
  Target: SCNA; (-) strand; PAM type: YTN; PAM sequence: TTA
gaattgatacatggttttta

SEQ ID NO: 57053 - DNA, 20 bp, Artificial Sequence
  Description of Artificial Sequence: Synthetic oligonucleotide
  Target: SCNA; (-) strand; PAM type: YTN; PAM sequence: TTT
agaattgatacatggttttt

SEQ ID NO: 57054 - DNA, 20 bp, Artificial Sequence
  Description of Artificial Sequence: Synthetic oligonucleotide
  Target: SCNA; (-) strand; PAM type: YTN; PAM sequence: TTG
gaatttagaattgatacatg

SEQ ID NO: 57055 - DNA, 20 bp, Artificial Sequence
  Description of Artificial Sequence: Synthetic oligonucleotide
  Target: SCNA; (-) strand; PAM type: YTN; PAM sequence: CTT
ggaatttagaattgatacat

SEQ ID NO: 57056 - DNA, 20 bp, Artificial Sequence
  Description of Artificial Sequence: Synthetic oligonucleotide
  Target: SCNA; (-) strand; PAM type: YTN; PAM sequence: CTG
gcacttggaatttagaattg

SEQ ID NO: 57057 - DNA, 20 bp, Artificial Sequence
  Description of Artificial Sequence: Synthetic oligonucleotide
  Target: SCNA; (-) strand; PAM type: YTN; PAM sequence: CTA
atgaaaggtaatgaaagggt

SEQ ID NO: 57058 - DNA, 20 bp, Artificial Sequence
  Description of Artificial Sequence: Synthetic oligonucleotide
  Target: SCNA; (-) strand; PAM type: YTN; PAM sequence: TTC
gctaatgaaaggtaatgaaa

SEQ ID NO: 57059 - DNA, 20 bp, Artificial Sequence
  Description of Artificial Sequence: Synthetic oligonucleotide
  Target: SCNA; (-) strand; PAM type: YTN; PAM sequence: CTT
cgctaatgaaaggtaatgaa

SEQ ID NO: 57060 - DNA, 20 bp, Artificial Sequence
  Description of Artificial Sequence: Synthetic oligonucleotide
  Target: SCNA; (-) strand; PAM type: YTN; PAM sequence: TTA
tacttcgctaatgaaaggta

SEQ ID NO: 57061 - DNA, 20 bp, Artificial Sequence
  Description of Artificial Sequence: Synthetic oligonucleotide
  Target: SCNA; (-) strand; PAM type: YTN; PAM sequence: TTT
atacttcgctaatgaaaggt

SEQ ID NO: 57062 - DNA, 20 bp, Artificial Sequence
  Description of Artificial Sequence: Synthetic oligonucleotide
  Target: SCNA; (-) strand; PAM type: YTN; PAM sequence: TTT
tatacttcgctaatgaaagg

SEQ ID NO: 57063 - DNA, 20 bp, Artificial Sequence
  Description of Artificial Sequence: Synthetic oligonucleotide
  Target: SCNA; (-) strand; PAM type: YTN; PAM sequence: TTT
ttatacttcgctaatgaaag

SEQ ID NO: 57064 - DNA, 20 bp, Artificial Sequence
  Description of Artificial Sequence: Synthetic oligonucleotide
  Target: SCNA; (-) strand; PAM type: YTN; PAM sequence: CTT
tttatacttcgctaatgaaa

SEQ ID NO: 57065 - DNA, 20 bp, Artificial Sequence
  Description of Artificial Sequence: Synthetic oligonucleotide
  Target: SCNA; (-) strand; PAM type: YTN; PAM sequence: TTC
tttttatacttcgctaatga

SEQ ID NO: 57066 - DNA, 20 bp, Artificial Sequence
  Description of Artificial Sequence: Synthetic oligonucleotide
  Target: SCNA; (-) strand; PAM type: YTN; PAM sequence: TTT
ctttttatacttcgctaatg

SEQ ID NO: 57067 - DNA, 20 bp, Artificial Sequence
  Description of Artificial Sequence: Synthetic oligonucleotide
  Target: SCNA; (-) strand; PAM type: YTN; PAM sequence: CTT
tctttttatacttcgctaat

SEQ ID NO: 57068 - DNA, 20 bp, Artificial Sequence
  Description of Artificial Sequence: Synthetic oligonucleotide
  Target: SCNA; (-) strand; PAM type: YTN; PAM sequence: CTC
tttctttttatacttcgcta

SEQ ID NO: 57069 - DNA, 20 bp, Artificial Sequence
  Description of Artificial Sequence: Synthetic oligonucleotide
  Target: SCNA; (-) strand; PAM type: YTN; PAM sequence: CTC
cctctttctttttatacttc

SEQ ID NO: 57070 - DNA, 20 bp, Artificial Sequence
  Description of Artificial Sequence: Synthetic oligonucleotide
  Target: SCNA; (-) strand; PAM type: YTN; PAM sequence: TTC
tccctctttctttttatact

SEQ ID NO: 57071 - DNA, 20 bp, Artificial Sequence
  Description of Artificial Sequence: Synthetic oligonucleotide
  Target: SCNA; (-) strand; PAM type: YTN; PAM sequence: CTT
ctccctctttctttttatac

SEQ ID NO: 57072 - DNA, 20 bp, Artificial Sequence
  Description of Artificial Sequence: Synthetic oligonucleotide
  Target: SCNA; (-) strand; PAM type: YTN; PAM sequence: TTG
aaaatcccttctccctcttt

SEQ ID NO: 57073 - DNA, 20 bp, Artificial Sequence
  Description of Artificial Sequence: Synthetic oligonucleotide
  Target: SCNA; (-) strand; PAM type: YTN; PAM sequence: CTT
gaaaatcccttctccctctt

SEQ ID NO: 57074 - DNA, 20 bp, Artificial Sequence
  Description of Artificial Sequence: Synthetic oligonucleotide
  Target: SCNA; (-) strand; PAM type: YTN; PAM sequence: TTC
cttgaaaatcccttctccct

SEQ ID NO: 57075 - DNA, 20 bp, Artificial Sequence
  Description of Artificial Sequence: Synthetic oligonucleotide
  Target: SCNA; (-) strand; PAM type: YTN; PAM sequence: TTT
ccttgaaaatcccttctccc

SEQ ID NO: 57076 - DNA, 20 bp, Artificial Sequence
  Description of Artificial Sequence: Synthetic oligonucleotide
  Target: SCNA; (-) strand; PAM type: YTN; PAM sequence: CTT
tccttgaaaatcccttctcc

SEQ ID NO: 57077 - DNA, 20 bp, Artificial Sequence
  Description of Artificial Sequence: Synthetic oligonucleotide
  Target: SCNA; (-) strand; PAM type: YTN; PAM sequence: TTA
ctttccttgaaaatcccttc

SEQ ID NO: 57078 - DNA, 20 bp, Artificial Sequence
  Description of Artificial Sequence: Synthetic oligonucleotide
  Target: SCNA; (-) strand; PAM type: YTN; PAM sequence: TTA
ttactttccttgaaaatccc

SEQ ID NO: 57079 - DNA, 20 bp, Artificial Sequence
  Description of Artificial Sequence: Synthetic oligonucleotide
  Target: SCNA; (-) strand; PAM type: YTN; PAM sequence: CTT
attactttccttgaaaatcc

SEQ ID NO: 57080 - DNA, 20 bp, Artificial Sequence
  Description of Artificial Sequence: Synthetic oligonucleotide
  Target: SCNA; (-) strand; PAM type: YTN; PAM sequence: TTC
ttattactttccttgaaaat

SEQ ID NO: 57081 - DNA, 20 bp, Artificial Sequence
  Description of Artificial Sequence: Synthetic oligonucleotide
  Target: SCNA; (-) strand; PAM type: YTN; PAM sequence: CTT
cttattactttccttgaaaa

SEQ ID NO: 57082 - DNA, 20 bp, Artificial Sequence
  Description of Artificial Sequence: Synthetic oligonucleotide
  Target: SCNA; (-) strand; PAM type: YTN; PAM sequence: TTC
ccttcttattactttccttg

SEQ ID NO: 57083 - DNA, 20 bp, Artificial Sequence
  Description of Artificial Sequence: Synthetic oligonucleotide
  Target: SCNA; (-) strand; PAM type: YTN; PAM sequence: CTT
cccttcttattactttcctt

SEQ ID NO: 57084 - DNA, 20 bp, Artificial Sequence
  Description of Artificial Sequence: Synthetic oligonucleotide
  Target: SCNA; (-) strand; PAM type: YTN; PAM sequence: CTA
atacttcccttcttattact

SEQ ID NO: 57085 - DNA, 20 bp, Artificial Sequence
  Description of Artificial Sequence: Synthetic oligonucleotide
  Target: SCNA; (-) strand; PAM type: YTN; PAM sequence: TTC
cactaatacttcccttctta

SEQ ID NO: 57086 - DNA, 20 bp, Artificial Sequence
  Description of Artificial Sequence: Synthetic oligonucleotide
  Target: SCNA; (-) strand; PAM type: YTN; PAM sequence: CTA
atgttccactaatacttccc

SEQ ID NO: 57087 - DNA, 20 bp, Artificial Sequence
  Description of Artificial Sequence: Synthetic oligonucleotide
  Target: SCNA; (-) strand; PAM type: YTN; PAM sequence: CTC
taatgttccactaatacttc

SEQ ID NO: 57088 - DNA, 20 bp, Artificial Sequence
  Description of Artificial Sequence: Synthetic oligonucleotide
  Target: SCNA; (-) strand; PAM type: YTN; PAM sequence: CTC
agaggaaggaccagagacaa

SEQ ID NO: 57089 - DNA, 20 bp, Artificial Sequence
  Description of Artificial Sequence: Synthetic oligonucleotide
  Target: SCNA; (-) strand; PAM type: YTN; PAM sequence: CTC
atgagtccccactcagagga

SEQ ID NO: 57090 - DNA, 20 bp, Artificial Sequence
  Description of Artificial Sequence: Synthetic oligonucleotide
  Target: SCNA; (-) strand; PAM type: YTN; PAM sequence: TTC
agacaacaccaagcctcatg

SEQ ID NO: 57091 - DNA, 20 bp, Artificial Sequence
  Description of Artificial Sequence: Synthetic oligonucleotide
  Target: SCNA; (-) strand; PAM type: YTN; PAM sequence: TTT
cagacaacaccaagcctcat

SEQ ID NO: 57092 - DNA, 20 bp, Artificial Sequence
  Description of Artificial Sequence: Synthetic oligonucleotide
  Target: SCNA; (-) strand; PAM type: YTN; PAM sequence: CTT
tcagacaacaccaagcctca

SEQ ID NO: 57093 - DNA, 20 bp, Artificial Sequence
  Description of Artificial Sequence: Synthetic oligonucleotide
  Target: SCNA; (-) strand; PAM type: YTN; PAM sequence: CTG
ctttcagacaacaccaagcc

SEQ ID NO: 57094 - DNA, 20 bp, Artificial Sequence
  Description of Artificial Sequence: Synthetic oligonucleotide
  Target: SCNA; (-) strand; PAM type: YTN; PAM sequence: TTC
ctgctttcagacaacaccaa

SEQ ID NO: 57095 - DNA, 20 bp, Artificial Sequence
  Description of Artificial Sequence: Synthetic oligonucleotide
  Target: SCNA; (-) strand; PAM type: YTN; PAM sequence: CTT
cctgctttcagacaacacca

SEQ ID NO: 57096 - DNA, 20 bp, Artificial Sequence
  Description of Artificial Sequence: Synthetic oligonucleotide
  Target: SCNA; (-) strand; PAM type: YTN; PAM sequence: CTA
ccagggagtaagacccaagt

SEQ ID NO: 57097 - DNA, 20 bp, Artificial Sequence
  Description of Artificial Sequence: Synthetic oligonucleotide
  Target: SCNA; (-) strand; PAM type: YTN; PAM sequence: CTG
catcctaccagggagtaaga

SEQ ID NO: 57098 - DNA, 20 bp, Artificial Sequence
  Description of Artificial Sequence: Synthetic oligonucleotide
  Target: SCNA; (-) strand; PAM type: YTN; PAM sequence: CTC
aggctgcatcctaccaggga

SEQ ID NO: 57099 - DNA, 20 bp, Artificial Sequence
  Description of Artificial Sequence: Synthetic oligonucleotide
  Target: SCNA; (-) strand; PAM type: YTN; PAM sequence: CTC
ctcaggctgcatcctaccag

SEQ ID NO: 57100 - DNA, 20 bp, Artificial Sequence
  Description of Artificial Sequence: Synthetic oligonucleotide
  Target: SCNA; (-) strand; PAM type: YTN; PAM sequence: TTG
ctcctcaggctgcatcctac

SEQ ID NO: 57101 - DNA, 20 bp, Artificial Sequence
  Description of Artificial Sequence: Synthetic oligonucleotide
  Target: SCNA; (-) strand; PAM type: YTN; PAM sequence: CTT
gctcctcaggctgcatccta

SEQ ID NO: 57102 - DNA, 20 bp, Artificial Sequence
  Description of Artificial Sequence: Synthetic oligonucleotide
  Target: SCNA; (-) strand; PAM type: YTN; PAM sequence: CTG
ccggccttgctcctcaggct

SEQ ID NO: 57103 - DNA, 20 bp, Artificial Sequence
  Description of Artificial Sequence: Synthetic oligonucleotide
  Target: SCNA; (-) strand; PAM type: YTN; PAM sequence: CTG
tgactgccggccttgctcct

SEQ ID NO: 57104 - DNA, 20 bp, Artificial Sequence
  Description of Artificial Sequence: Synthetic oligonucleotide
  Target: SCNA; (-) strand; PAM type: YTN; PAM sequence: CTC
acactgtgactgccggcctt

SEQ ID NO: 57105 - DNA, 20 bp, Artificial Sequence
  Description of Artificial Sequence: Synthetic oligonucleotide
  Target: SCNA; (-) strand; PAM type: YTN; PAM sequence: TTG
ctcacactgtgactgccggc

SEQ ID NO: 57106 - DNA, 20 bp, Artificial Sequence
  Description of Artificial Sequence: Synthetic oligonucleotide
  Target: SCNA; (-) strand; PAM type: YTN; PAM sequence: TTT
gctcacactgtgactgccgg

SEQ ID NO: 57107 - DNA, 20 bp, Artificial Sequence
  Description of Artificial Sequence: Synthetic oligonucleotide
  Target: SCNA; (-) strand; PAM type: YTN; PAM sequence: CTG
tatgaatgtttgctcacact

SEQ ID NO: 57108 - DNA, 20 bp, Artificial Sequence
  Description of Artificial Sequence: Synthetic oligonucleotide
  Target: SCNA; (-) strand; PAM type: YTN; PAM sequence: TTG
atatgtcagcccccacgtct

SEQ ID NO: 57109 - DNA, 20 bp, Artificial Sequence
  Description of Artificial Sequence: Synthetic oligonucleotide
  Target: SCNA; (-) strand; PAM type: YTN; PAM sequence: CTT
gatatgtcagcccccacgtc

SEQ ID NO: 57110 - DNA, 20 bp, Artificial Sequence
  Description of Artificial Sequence: Synthetic oligonucleotide
  Target: SCNA; (-) strand; PAM type: YTN; PAM sequence: CTC
caacttgatatgtcagcccc

SEQ ID NO: 57111 - DNA, 20 bp, Artificial Sequence
  Description of Artificial Sequence: Synthetic oligonucleotide
  Target: SCNA; (-) strand; PAM type: YTN; PAM sequence: TTC
tccaacttgatatgtcagcc

SEQ ID NO: 57112 - DNA, 20 bp, Artificial Sequence
  Description of Artificial Sequence: Synthetic oligonucleotide
  Target: SCNA; (-) strand; PAM type: YTN; PAM sequence: TTG
ggaatcagggtgtatggggg

SEQ ID NO: 57113 - DNA, 20 bp, Artificial Sequence
  Description of Artificial Sequence: Synthetic oligonucleotide
  Target: SCNA; (-) strand; PAM type: YTN; PAM sequence: CTT
gggaatcagggtgtatgggg

SEQ ID NO: 57114 - DNA, 20 bp, Artificial Sequence
  Description of Artificial Sequence: Synthetic oligonucleotide
  Target: SCNA; (-) strand; PAM type: YTN; PAM sequence: CTC
ttgggaatcagggtgtatgg

SEQ ID NO: 57115 - DNA, 20 bp, Artificial Sequence
  Description of Artificial Sequence: Synthetic oligonucleotide
  Target: SCNA; (-) strand; PAM type: YTN; PAM sequence: CTC
aactcttgggaatcagggtg

SEQ ID NO: 57116 - DNA, 20 bp, Artificial Sequence
  Description of Artificial Sequence: Synthetic oligonucleotide
  Target: SCNA; (-) strand; PAM type: YTN; PAM sequence: CTG
cctcaactcttgggaatcag

SEQ ID NO: 57117 - DNA, 20 bp, Artificial Sequence
  Description of Artificial Sequence: Synthetic oligonucleotide
  Target: SCNA; (-) strand; PAM type: YTN; PAM sequence: CTA
ccacaactgcctcaactctt

SEQ ID NO: 57118 - DNA, 20 bp, Artificial Sequence
  Description of Artificial Sequence: Synthetic oligonucleotide
  Target: SCNA; (-) strand; PAM type: YTN; PAM sequence: CTA
agaacccctaccacaactgc

SEQ ID NO: 57119 - DNA, 20 bp, Artificial Sequence
  Description of Artificial Sequence: Synthetic oligonucleotide
  Target: SCNA; (-) strand; PAM type: YTN; PAM sequence: CTG
agcccatgggaaacctaaga

SEQ ID NO: 57120 - DNA, 20 bp, Artificial Sequence
  Description of Artificial Sequence: Synthetic oligonucleotide
  Target: SCNA; (-) strand; PAM type: YTN; PAM sequence: CTA
atctgagcccatgggaaacc

SEQ ID NO: 57121 - DNA, 20 bp, Artificial Sequence
  Description of Artificial Sequence: Synthetic oligonucleotide
  Target: SCNA; (-) strand; PAM type: YTN; PAM sequence: TTC
cgtccgaggcctaatctgag

SEQ ID NO: 57122 - DNA, 20 bp, Artificial Sequence
  Description of Artificial Sequence: Synthetic oligonucleotide
  Target: SCNA; (-) strand; PAM type: YTN; PAM sequence: CTT
ccgtccgaggcctaatctga

SEQ ID NO: 57123 - DNA, 20 bp, Artificial Sequence
  Description of Artificial Sequence: Synthetic oligonucleotide
  Target: SCNA; (-) strand; PAM type: YTN; PAM sequence: TTC
acttccgtccgaggcctaat

SEQ ID NO: 57124 - DNA, 20 bp, Artificial Sequence
  Description of Artificial Sequence: Synthetic oligonucleotide
  Target: SCNA; (-) strand; PAM type: YTN; PAM sequence: CTT
cacttccgtccgaggcctaa

SEQ ID NO: 57125 - DNA, 20 bp, Artificial Sequence
  Description of Artificial Sequence: Synthetic oligonucleotide
  Target: SCNA; (-) strand; PAM type: YTN; PAM sequence: CTG
ccttcacttccgtccgaggc

SEQ ID NO: 57126 - DNA, 20 bp, Artificial Sequence
  Description of Artificial Sequence: Synthetic oligonucleotide
  Target: SCNA; (-) strand; PAM type: YTN; PAM sequence: TTC
acccagccagccactgcctt

SEQ ID NO: 57127 - DNA, 20 bp, Artificial Sequence
  Description of Artificial Sequence: Synthetic oligonucleotide
  Target: SCNA; (-) strand; PAM type: YTN; PAM sequence: TTT
cacccagccagccactgcct

SEQ ID NO: 57128 - DNA, 20 bp, Artificial Sequence
  Description of Artificial Sequence: Synthetic oligonucleotide
  Target: SCNA; (-) strand; PAM type: YTN; PAM sequence: CTG
tccgccatatttcacccagc

SEQ ID NO: 57129 - DNA, 20 bp, Artificial Sequence
  Description of Artificial Sequence: Synthetic oligonucleotide
  Target: SCNA; (-) strand; PAM type: YTN; PAM sequence: CTC
tgtccgccatatttcaccca

SEQ ID NO: 57130 - DNA, 20 bp, Artificial Sequence
  Description of Artificial Sequence: Synthetic oligonucleotide
  Target: SCNA; (-) strand; PAM type: YTN; PAM sequence: CTC
accgactctgtccgccatat

SEQ ID NO: 57131 - DNA, 20 bp, Artificial Sequence
  Description of Artificial Sequence: Synthetic oligonucleotide
  Target: SCNA; (-) strand; PAM type: YTN; PAM sequence: TTA
ctcaccgactctgtccgcca

SEQ ID NO: 57132 - DNA, 20 bp, Artificial Sequence
  Description of Artificial Sequence: Synthetic oligonucleotide
  Target: SCNA; (-) strand; PAM type: YTN; PAM sequence: CTG
ttactcaccgactctgtccg

SEQ ID NO: 57133 - DNA, 20 bp, Artificial Sequence
  Description of Artificial Sequence: Synthetic oligonucleotide
  Target: SCNA; (-) strand; PAM type: YTN; PAM sequence: CTC
ctgttactcaccgactctgt

SEQ ID NO: 57134 - DNA, 20 bp, Artificial Sequence
  Description of Artificial Sequence: Synthetic oligonucleotide
  Target: SCNA; (-) strand; PAM type: YTN; PAM sequence: CTC
tcctgttactcaccgactct

SEQ ID NO: 57135 - DNA, 20 bp, Artificial Sequence
  Description of Artificial Sequence: Synthetic oligonucleotide
  Target: SCNA; (-) strand; PAM type: YTN; PAM sequence: CTA
aaagggataacatgctctcc

SEQ ID NO: 57136 - DNA, 20 bp, Artificial Sequence
  Description of Artificial Sequence: Synthetic oligonucleotide
  Target: SCNA; (-) strand; PAM type: YTN; PAM sequence: TTC
aggggtctaaaagggataac

SEQ ID NO: 57137 - DNA, 20 bp, Artificial Sequence
  Description of Artificial Sequence: Synthetic oligonucleotide
  Target: SCNA; (-) strand; PAM type: YTN; PAM sequence: CTT
caggggtctaaaagggataa

SEQ ID NO: 57138 - DNA, 20 bp, Artificial Sequence
  Description of Artificial Sequence: Synthetic oligonucleotide
  Target: SCNA; (-) strand; PAM type: YTN; PAM sequence: CTA
atacttcaggggtctaaaag

SEQ ID NO: 57139 - DNA, 20 bp, Artificial Sequence
  Description of Artificial Sequence: Synthetic oligonucleotide
  Target: SCNA; (-) strand; PAM type: YTN; PAM sequence: CTC
taatacttcaggggtctaaa

SEQ ID NO: 57140 - DNA, 20 bp, Artificial Sequence
  Description of Artificial Sequence: Synthetic oligonucleotide
  Target: SCNA; (-) strand; PAM type: YTN; PAM sequence: CTC
tctaatacttcaggggtcta

SEQ ID NO: 57141 - DNA, 20 bp, Artificial Sequence
  Description of Artificial Sequence: Synthetic oligonucleotide
  Target: SCNA; (-) strand; PAM type: YTN; PAM sequence: CTG
atcctctctaatacttcagg

SEQ ID NO: 57142 - DNA, 20 bp, Artificial Sequence
  Description of Artificial Sequence: Synthetic oligonucleotide
  Target: SCNA; (-) strand; PAM type: YTN; PAM sequence: CTG
gctgatcctctctaatactt

SEQ ID NO: 57143 - DNA, 20 bp, Artificial Sequence
  Description of Artificial Sequence: Synthetic oligonucleotide
  Target: SCNA; (-) strand; PAM type: YTN; PAM sequence: CTA
aacgtgcctggctgatcctc

SEQ ID NO: 57144 - DNA, 20 bp, Artificial Sequence
  Description of Artificial Sequence: Synthetic oligonucleotide
  Target: SCNA; (-) strand; PAM type: YTN; PAM sequence: CTA
caatatgatacatcatatgg

SEQ ID NO: 57145 - DNA, 20 bp, Artificial Sequence
  Description of Artificial Sequence: Synthetic oligonucleotide
  Target: SCNA; (-) strand; PAM type: YTN; PAM sequence: TTG
gggtgaatctacaatatgat

SEQ ID NO: 57146 - DNA, 20 bp, Artificial Sequence
  Description of Artificial Sequence: Synthetic oligonucleotide
  Target: SCNA; (-) strand; PAM type: YTN; PAM sequence: CTT
ggggtgaatctacaatatga

SEQ ID NO: 57147 - DNA, 20 bp, Artificial Sequence
  Description of Artificial Sequence: Synthetic oligonucleotide
  Target: SCNA; (-) strand; PAM type: YTN; PAM sequence: CTG
cacagccacaaatgccttgg

SEQ ID NO: 57148 - DNA, 20 bp, Artificial Sequence
  Description of Artificial Sequence: Synthetic oligonucleotide
  Target: SCNA; (-) strand; PAM type: YTN; PAM sequence: TTA
ctgcacagccacaaatgcct

SEQ ID NO: 57149 - DNA, 20 bp, Artificial Sequence
  Description of Artificial Sequence: Synthetic oligonucleotide
  Target: SCNA; (-) strand; PAM type: YTN; PAM sequence: TTT
actgcacagccacaaatgcc

SEQ ID NO: 57150 - DNA, 20 bp, Artificial Sequence
  Description of Artificial Sequence: Synthetic oligonucleotide
  Target: SCNA; (-) strand; PAM type: YTN; PAM sequence: TTT
tactgcacagccacaaatgc

SEQ ID NO: 57151 - DNA, 20 bp, Artificial Sequence
  Description of Artificial Sequence: Synthetic oligonucleotide
  Target: SCNA; (-) strand; PAM type: YTN; PAM sequence: CTT
ttactgcacagccacaaatg

SEQ ID NO: 57152 - DNA, 20 bp, Artificial Sequence
  Description of Artificial Sequence: Synthetic oligonucleotide
  Target: SCNA; (-) strand; PAM type: YTN; PAM sequence: CTG
cacttttactgcacagccac

SEQ ID NO: 57153 - DNA, 20 bp, Artificial Sequence
  Description of Artificial Sequence: Synthetic oligonucleotide
  Target: SCNA; (-) strand; PAM type: YTN; PAM sequence: TTC
atcctgcacttttactgcac

SEQ ID NO: 57154 - DNA, 20 bp, Artificial Sequence
  Description of Artificial Sequence: Synthetic oligonucleotide
  Target: SCNA; (-) strand; PAM type: YTN; PAM sequence: TTT
catcctgcacttttactgca

SEQ ID NO: 57155 - DNA, 20 bp, Artificial Sequence
  Description of Artificial Sequence: Synthetic oligonucleotide
  Target: SCNA; (-) strand; PAM type: YTN; PAM sequence: CTG
gtttcatcctgcacttttac

SEQ ID NO: 57156 - DNA, 20 bp, Artificial Sequence
  Description of Artificial Sequence: Synthetic oligonucleotide
  Target: SCNA; (-) strand; PAM type: YTN; PAM sequence: TTC
agagagtctggtttcatcct

SEQ ID NO: 57157 - DNA, 20 bp, Artificial Sequence
  Description of Artificial Sequence: Synthetic oligonucleotide
  Target: SCNA; (-) strand; PAM type: YTN; PAM sequence: CTT
cagagagtctggtttcatcc

SEQ ID NO: 57158 - DNA, 20 bp, Artificial Sequence
  Description of Artificial Sequence: Synthetic oligonucleotide
  Target: SCNA; (-) strand; PAM type: YTN; PAM sequence: CTA
cccttcagagagtctggttt

SEQ ID NO: 57159 - DNA, 20 bp, Artificial Sequence
  Description of Artificial Sequence: Synthetic oligonucleotide
  Target: SCNA; (-) strand; PAM type: YTN; PAM sequence: CTG
caaagggggaaaagatgagg

SEQ ID NO: 57160 - DNA, 20 bp, Artificial Sequence
  Description of Artificial Sequence: Synthetic oligonucleotide
  Target: SCNA; (-) strand; PAM type: YTN; PAM sequence: TTA
tctgcaaagggggaaaagat

SEQ ID NO: 57161 - DNA, 20 bp, Artificial Sequence
  Description of Artificial Sequence: Synthetic oligonucleotide
  Target: SCNA; (-) strand; PAM type: YTN; PAM sequence: TTT
atctgcaaagggggaaaaga

SEQ ID NO: 57162 - DNA, 20 bp, Artificial Sequence
  Description of Artificial Sequence: Synthetic oligonucleotide
  Target: SCNA; (-) strand; PAM type: YTN; PAM sequence: TTG
aaagtgggatggtttatctg

SEQ ID NO: 57163 - DNA, 20 bp, Artificial Sequence
  Description of Artificial Sequence: Synthetic oligonucleotide
  Target: SCNA; (-) strand; PAM type: YTN; PAM sequence: TTT
gaaagtgggatggtttatct

SEQ ID NO: 57164 - DNA, 20 bp, Artificial Sequence
  Description of Artificial Sequence: Synthetic oligonucleotide
  Target: SCNA; (-) strand; PAM type: YTN; PAM sequence: TTC
atttgaaagtgggatggttt

SEQ ID NO: 57165 - DNA, 20 bp, Artificial Sequence
  Description of Artificial Sequence: Synthetic oligonucleotide
  Target: SCNA; (-) strand; PAM type: YTN; PAM sequence: CTC
ccaagttcatttgaaagtgg

SEQ ID NO: 57166 - DNA, 20 bp, Artificial Sequence
  Description of Artificial Sequence: Synthetic oligonucleotide
  Target: SCNA; (-) strand; PAM type: YTN; PAM sequence: CTC
ctcccaagttcatttgaaag

SEQ ID NO: 57167 - DNA, 20 bp, Artificial Sequence
  Description of Artificial Sequence: Synthetic oligonucleotide
  Target: SCNA; (-) strand; PAM type: YTN; PAM sequence: TTC
aaagccccctcctcccaagt

SEQ ID NO: 57168 - DNA, 20 bp, Artificial Sequence
  Description of Artificial Sequence: Synthetic oligonucleotide
  Target: SCNA; (-) strand; PAM type: YTN; PAM sequence: TTC
cagaggagaaacaaccccaa

SEQ ID NO: 57169 - DNA, 20 bp, Artificial Sequence
  Description of Artificial Sequence: Synthetic oligonucleotide
  Target: SCNA; (-) strand; PAM type: YTN; PAM sequence: TTT
ccagaggagaaacaacccca

SEQ ID NO: 57170 - DNA, 20 bp, Artificial Sequence
  Description of Artificial Sequence: Synthetic oligonucleotide
  Target: SCNA; (-) strand; PAM type: YTN; PAM sequence: TTA
gaatggaagcatttccagag

SEQ ID NO: 57171 - DNA, 20 bp, Artificial Sequence
  Description of Artificial Sequence: Synthetic oligonucleotide
  Target: SCNA; (-) strand; PAM type: YTN; PAM sequence: TTT
agaatggaagcatttccaga

SEQ ID NO: 57172 - DNA, 20 bp, Artificial Sequence
  Description of Artificial Sequence: Synthetic oligonucleotide
  Target: SCNA; (-) strand; PAM type: YTN; PAM sequence: TTT
tagaatggaagcatttccag

SEQ ID NO: 57173 - DNA, 20 bp, Artificial Sequence
  Description of Artificial Sequence: Synthetic oligonucleotide
  Target: SCNA; (-) strand; PAM type: YTN; PAM sequence: TTT
ttagaatggaagcatttcca

SEQ ID NO: 57174 - DNA, 20 bp, Artificial Sequence
  Description of Artificial Sequence: Synthetic oligonucleotide
  Target: SCNA; (-) strand; PAM type: YTN; PAM sequence: CTT
tttagaatggaagcatttcc

SEQ ID NO: 57175 - DNA, 20 bp, Artificial Sequence
  Description of Artificial Sequence: Synthetic oligonucleotide
  Target: SCNA; (-) strand; PAM type: YTN; PAM sequence: CTA
tgccagaactttttagaatg

SEQ ID NO: 57176 - DNA, 20 bp, Artificial Sequence
  Description of Artificial Sequence: Synthetic oligonucleotide
  Target: SCNA; (-) strand; PAM type: YTN; PAM sequence: TTC
cctatgccagaactttttag

SEQ ID NO: 57177 - DNA, 20 bp, Artificial Sequence
  Description of Artificial Sequence: Synthetic oligonucleotide
  Target: SCNA; (-) strand; PAM type: YTN; PAM sequence: TTA
ggccaattccctatgccaga

SEQ ID NO: 57178 - DNA, 20 bp, Artificial Sequence
  Description of Artificial Sequence: Synthetic oligonucleotide
  Target: SCNA; (-) strand; PAM type: YTN; PAM sequence: CTT
aggccaattccctatgccag

SEQ ID NO: 57179 - DNA, 20 bp, Artificial Sequence
  Description of Artificial Sequence: Synthetic oligonucleotide
  Target: SCNA; (-) strand; PAM type: YTN; PAM sequence: TTC
cttaggccaattccctatgc

SEQ ID NO: 57180 - DNA, 20 bp, Artificial Sequence
  Description of Artificial Sequence: Synthetic oligonucleotide
  Target: SCNA; (-) strand; PAM type: YTN; PAM sequence: TTT
ccttaggccaattccctatg

SEQ ID NO: 57181 - DNA, 20 bp, Artificial Sequence
  Description of Artificial Sequence: Synthetic oligonucleotide
  Target: SCNA; (-) strand; PAM type: YTN; PAM sequence: TTT
tccttaggccaattccctat

SEQ ID NO: 57182 - DNA, 20 bp, Artificial Sequence
  Description of Artificial Sequence: Synthetic oligonucleotide
  Target: SCNA; (-) strand; PAM type: YTN; PAM sequence: TTT
ttccttaggccaattcccta

SEQ ID NO: 57183 - DNA, 20 bp, Artificial Sequence
  Description of Artificial Sequence: Synthetic oligonucleotide
  Target: SCNA; (-) strand; PAM type: YTN; PAM sequence: TTA
aggggaaggagggcagagtt

SEQ ID NO: 57184 - DNA, 20 bp, Artificial Sequence
  Description of Artificial Sequence: Synthetic oligonucleotide
  Target: SCNA; (-) strand; PAM type: YTN; PAM sequence: CTC
aaaggcaggacagtccatta

SEQ ID NO: 57185 - DNA, 20 bp, Artificial Sequence
  Description of Artificial Sequence: Synthetic oligonucleotide
  Target: SCNA; (-) strand; PAM type: YTN; PAM sequence: CTC
acactcaaaggcaggacagt

SEQ ID NO: 57186 - DNA, 20 bp, Artificial Sequence
  Description of Artificial Sequence: Synthetic oligonucleotide
  Target: SCNA; (-) strand; PAM type: YTN; PAM sequence: TTA
ctcacactcaaaggcaggac

SEQ ID NO: 57187 - DNA, 20 bp, Artificial Sequence
  Description of Artificial Sequence: Synthetic oligonucleotide
  Target: SCNA; (-) strand; PAM type: YTN; PAM sequence: TTT
actcacactcaaaggcagga

SEQ ID NO: 57188 - DNA, 20 bp, Artificial Sequence
  Description of Artificial Sequence: Synthetic oligonucleotide
  Target: SCNA; (-) strand; PAM type: YTN; PAM sequence: TTT
tactcacactcaaaggcagg

SEQ ID NO: 57189 - DNA, 20 bp, Artificial Sequence
  Description of Artificial Sequence: Synthetic oligonucleotide
  Target: SCNA; (-) strand; PAM type: YTN; PAM sequence: CTT
ttactcacactcaaaggcag

SEQ ID NO: 57190 - DNA, 20 bp, Artificial Sequence
  Description of Artificial Sequence: Synthetic oligonucleotide
  Target: SCNA; (-) strand; PAM type: YTN; PAM sequence: CTC
agccccttttactcacactc

SEQ ID NO: 57191 - DNA, 20 bp, Artificial Sequence
  Description of Artificial Sequence: Synthetic oligonucleotide
  Target: SCNA; (-) strand; PAM type: YTN; PAM sequence: CTG
atgaatgatctcagcccctt

SEQ ID NO: 57192 - DNA, 20 bp, Artificial Sequence
  Description of Artificial Sequence: Synthetic oligonucleotide
  Target: SCNA; (-) strand; PAM type: YTN; PAM sequence: TTG
gctgatgaatgatctcagcc

SEQ ID NO: 57193 - DNA, 20 bp, Artificial Sequence
  Description of Artificial Sequence: Synthetic oligonucleotide
  Target: SCNA; (-) strand; PAM type: YTN; PAM sequence: CTG
taaaattggctgatgaatga

SEQ ID NO: 57194 - DNA, 20 bp, Artificial Sequence
  Description of Artificial Sequence: Synthetic oligonucleotide
  Target: SCNA; (-) strand; PAM type: YTN; PAM sequence: TTG
cagctgtaaaattggctgat

SEQ ID NO: 57195 - DNA, 20 bp, Artificial Sequence
  Description of Artificial Sequence: Synthetic oligonucleotide
  Target: SCNA; (-) strand; PAM type: YTN; PAM sequence: CTA
agtagattgcagctgtaaaa

SEQ ID NO: 57196 - DNA, 20 bp, Artificial Sequence
  Description of Artificial Sequence: Synthetic oligonucleotide
  Target: SCNA; (-) strand; PAM type: YTN; PAM sequence: CTA
gatgggggcaggtctaagta

SEQ ID NO: 57197 - DNA, 20 bp, Artificial Sequence
  Description of Artificial Sequence: Synthetic oligonucleotide
  Target: SCNA; (-) strand; PAM type: YTN; PAM sequence: TTG
gtgacctagatgggggcagg

SEQ ID NO: 57198 - DNA, 20 bp, Artificial Sequence
  Description of Artificial Sequence: Synthetic oligonucleotide
  Target: SCNA; (-) strand; PAM type: YTN; PAM sequence: CTT
ggtgacctagatgggggcag

SEQ ID NO: 57199 - DNA, 20 bp, Artificial Sequence
  Description of Artificial Sequence: Synthetic oligonucleotide
  Target: SCNA; (-) strand; PAM type: YTN; PAM sequence: CTG
acaaagatccttggtgacct

SEQ ID NO: 57200 - DNA, 20 bp, Artificial Sequence
  Description of Artificial Sequence: Synthetic oligonucleotide
  Target: SCNA; (-) strand; PAM type: YTN; PAM sequence: TTG
taccaaatgctgacaaagat

SEQ ID NO: 57201 - DNA, 20 bp, Artificial Sequence
  Description of Artificial Sequence: Synthetic oligonucleotide
  Target: SCNA; (-) strand; PAM type: YTN; PAM sequence: TTT
gtaccaaatgctgacaaaga

SEQ ID NO: 57202 - DNA, 20 bp, Artificial Sequence
  Description of Artificial Sequence: Synthetic oligonucleotide
  Target: SCNA; (-) strand; PAM type: YTN; PAM sequence: CTT
tgtaccaaatgctgacaaag

SEQ ID NO: 57203 - DNA, 20 bp, Artificial Sequence
  Description of Artificial Sequence: Synthetic oligonucleotide
  Target: SCNA; (-) strand; PAM type: YTN; PAM sequence: TTC
acataggctttgtaccaaat

SEQ ID NO: 57204 - DNA, 20 bp, Artificial Sequence
  Description of Artificial Sequence: Synthetic oligonucleotide
  Target: SCNA; (-) strand; PAM type: YTN; PAM sequence: TTC
attcacataggctttgtacc

SEQ ID NO: 57205 - DNA, 20 bp, Artificial Sequence
  Description of Artificial Sequence: Synthetic oligonucleotide
  Target: SCNA; (-) strand; PAM type: YTN; PAM sequence: CTT
cattcacataggctttgtac

SEQ ID NO: 57206 - DNA, 20 bp, Artificial Sequence
  Description of Artificial Sequence: Synthetic oligonucleotide
  Target: SCNA; (-) strand; PAM type: YTN; PAM sequence: TTG
ggacaacaccaaagaaatga

SEQ ID NO: 57207 - DNA, 20 bp, Artificial Sequence
  Description of Artificial Sequence: Synthetic oligonucleotide
  Target: SCNA; (-) strand; PAM type: YTN; PAM sequence: CTT
gggacaacaccaaagaaatg

SEQ ID NO: 57208 - DNA, 20 bp, Artificial Sequence
  Description of Artificial Sequence: Synthetic oligonucleotide
  Target: SCNA; (-) strand; PAM type: YTN; PAM sequence: TTC
ttgggacaacaccaaagaaa

SEQ ID NO: 57209 - DNA, 20 bp, Artificial Sequence
  Description of Artificial Sequence: Synthetic oligonucleotide
  Target: SCNA; (-) strand; PAM type: YTN; PAM sequence: TTT
cttgggacaacaccaaagaa

SEQ ID NO: 57210 - DNA, 20 bp, Artificial Sequence
  Description of Artificial Sequence: Synthetic oligonucleotide
  Target: SCNA; (-) strand; PAM type: YTN; PAM sequence: TTA
catttcttgggacaacacca

SEQ ID NO: 57211 - DNA, 20 bp, Artificial Sequence
  Description of Artificial Sequence: Synthetic oligonucleotide
  Target: SCNA; (-) strand; PAM type: YTN; PAM sequence: CTG
ttacatttcttgggacaaca

SEQ ID NO: 57212 - DNA, 20 bp, Artificial Sequence
  Description of Artificial Sequence: Synthetic oligonucleotide
  Target: SCNA; (-) strand; PAM type: YTN; PAM sequence: TTC
tgttacatttcttgggacaa

SEQ ID NO: 57213 - DNA, 20 bp, Artificial Sequence
  Description of Artificial Sequence: Synthetic oligonucleotide
  Target: SCNA; (-) strand; PAM type: YTN; PAM sequence: TTT
ctgttacatttcttgggaca

SEQ ID NO: 57214 - DNA, 20 bp, Artificial Sequence
  Description of Artificial Sequence: Synthetic oligonucleotide
  Target: SCNA; (-) strand; PAM type: YTN; PAM sequence: TTT
tctgttacatttcttgggac

SEQ ID NO: 57215 - DNA, 20 bp, Artificial Sequence
  Description of Artificial Sequence: Synthetic oligonucleotide
  Target: SCNA; (-) strand; PAM type: YTN; PAM sequence: TTA
tagtcattttctgttacatt

SEQ ID NO: 57216 - DNA, 20 bp, Artificial Sequence
  Description of Artificial Sequence: Synthetic oligonucleotide
  Target: SCNA; (-) strand; PAM type: YTN; PAM sequence: TTT
atagtcattttctgttacat

SEQ ID NO: 57217 - DNA, 20 bp, Artificial Sequence
  Description of Artificial Sequence: Synthetic oligonucleotide
  Target: SCNA; (-) strand; PAM type: YTN; PAM sequence: TTT
tatagtcattttctgttaca

SEQ ID NO: 57218 - DNA, 20 bp, Artificial Sequence
  Description of Artificial Sequence: Synthetic oligonucleotide
  Target: SCNA; (-) strand; PAM type: YTN; PAM sequence: CTT
ttatagtcattttctgttac

SEQ ID NO: 57219 - DNA, 20 bp, Artificial Sequence
  Description of Artificial Sequence: Synthetic oligonucleotide
  Target: SCNA; (-) strand; PAM type: YTN; PAM sequence: TTC
ttttatagtcattttctgtt

SEQ ID NO: 57220 - DNA, 20 bp, Artificial Sequence
  Description of Artificial Sequence: Synthetic oligonucleotide
  Target: SCNA; (-) strand; PAM type: YTN; PAM sequence: CTC
agcatcccatatcagaatcc

SEQ ID NO: 57221 - DNA, 20 bp, Artificial Sequence
  Description of Artificial Sequence: Synthetic oligonucleotide
  Target: SCNA; (-) strand; PAM type: YTN; PAM sequence: TTA
tcaggactcagcatcccata

SEQ ID NO: 57222 - DNA, 20 bp, Artificial Sequence
  Description of Artificial Sequence: Synthetic oligonucleotide
  Target: SCNA; (-) strand; PAM type: YTN; PAM sequence: TTA
gagagattatcaggactcag

SEQ ID NO: 57223 - DNA, 20 bp, Artificial Sequence
  Description of Artificial Sequence: Synthetic oligonucleotide
  Target: SCNA; (-) strand; PAM type: YTN; PAM sequence: TTT
agagagattatcaggactca

SEQ ID NO: 57224 - DNA, 20 bp, Artificial Sequence
  Description of Artificial Sequence: Synthetic oligonucleotide
  Target: SCNA; (-) strand; PAM type: YTN; PAM sequence: CTA
gatgaaagacatttagagag

SEQ ID NO: 57225 - DNA, 20 bp, Artificial Sequence
  Description of Artificial Sequence: Synthetic oligonucleotide
  Target: SCNA; (-) strand; PAM type: YTN; PAM sequence: TTG
caggtcctagatgaaagaca

SEQ ID NO: 57226 - DNA, 20 bp, Artificial Sequence
  Description of Artificial Sequence: Synthetic oligonucleotide
  Target: SCNA; (-) strand; PAM type: YTN; PAM sequence: CTG
attgcaggtcctagatgaaa

SEQ ID NO: 57227 - DNA, 20 bp, Artificial Sequence
  Description of Artificial Sequence: Synthetic oligonucleotide
  Target: SCNA; (-) strand; PAM type: YTN; PAM sequence: TTA
ataatggctgattgcaggtc

SEQ ID NO: 57228 - DNA, 20 bp, Artificial Sequence
  Description of Artificial Sequence: Synthetic oligonucleotide
  Target: SCNA; (-) strand; PAM type: YTN; PAM sequence: CTT
aataatggctgattgcaggt

SEQ ID NO: 57229 - DNA, 20 bp, Artificial Sequence
  Description of Artificial Sequence: Synthetic oligonucleotide
  Target: SCNA; (-) strand; PAM type: YTN; PAM sequence: TTC
ttaataatggctgattgcag

SEQ ID NO: 57230 - DNA, 20 bp, Artificial Sequence
  Description of Artificial Sequence: Synthetic oligonucleotide
  Target: SCNA; (-) strand; PAM type: YTN; PAM sequence: TTT
cttaataatggctgattgca

SEQ ID NO: 57231 - DNA, 20 bp, Artificial Sequence
  Description of Artificial Sequence: Synthetic oligonucleotide
  Target: SCNA; (-) strand; PAM type: YTN; PAM sequence: TTT
tcttaataatggctgattgc

SEQ ID NO: 57232 - DNA, 20 bp, Artificial Sequence
  Description of Artificial Sequence: Synthetic oligonucleotide
  Target: SCNA; (-) strand; PAM type: YTN; PAM sequence: TTT
ttcttaataatggctgattg

SEQ ID NO: 57233 - DNA, 20 bp, Artificial Sequence
  Description of Artificial Sequence: Synthetic oligonucleotide
  Target: SCNA; (-) strand; PAM type: YTN; PAM sequence: CTT
tttcttaataatggctgatt

SEQ ID NO: 57234 - DNA, 20 bp, Artificial Sequence
  Description of Artificial Sequence: Synthetic oligonucleotide
  Target: SCNA; (-) strand; PAM type: YTN; PAM sequence: CTC
tttttcttaataatggctga

SEQ ID NO: 57235 - DNA, 20 bp, Artificial Sequence
  Description of Artificial Sequence: Synthetic oligonucleotide
  Target: SCNA; (-) strand; PAM type: YTN; PAM sequence: TTC
tctttttcttaataatggct

SEQ ID NO: 57236 - DNA, 20 bp, Artificial Sequence
  Description of Artificial Sequence: Synthetic oligonucleotide
  Target: SCNA; (-) strand; PAM type: YTN; PAM sequence: TTT
ctctttttcttaataatggc

SEQ ID NO: 57237 - DNA, 20 bp, Artificial Sequence
  Description of Artificial Sequence: Synthetic oligonucleotide
  Target: SCNA; (-) strand; PAM type: YTN; PAM sequence: TTT
tctctttttcttaataatgg

SEQ ID NO: 57238 - DNA, 20 bp, Artificial Sequence
  Description of Artificial Sequence: Synthetic oligonucleotide
  Target: SCNA; (-) strand; PAM type: YTN; PAM sequence: CTT
ttctctttttcttaataatg

SEQ ID NO: 57239 - DNA, 20 bp, Artificial Sequence
  Description of Artificial Sequence: Synthetic oligonucleotide
  Target: SCNA; (-) strand; PAM type: YTN; PAM sequence: CTG
caatccttttctctttttct

SEQ ID NO: 57240 - DNA, 20 bp, Artificial Sequence
  Description of Artificial Sequence: Synthetic oligonucleotide
  Target: SCNA; (-) strand; PAM type: YTN; PAM sequence: CTG
tcccctgcaatccttttctc

SEQ ID NO: 57241 - DNA, 20 bp, Artificial Sequence
  Description of Artificial Sequence: Synthetic oligonucleotide
  Target: SCNA; (-) strand; PAM type: YTN; PAM sequence: TTG
gaactgtcccctgcaatcct

SEQ ID NO: 57242 - DNA, 20 bp, Artificial Sequence
  Description of Artificial Sequence: Synthetic oligonucleotide
  Target: SCNA; (-) strand; PAM type: YTN; PAM sequence: TTA
attggaactgtcccctgcaa

SEQ ID NO: 57243 - DNA, 20 bp, Artificial Sequence
  Description of Artificial Sequence: Synthetic oligonucleotide
  Target: SCNA; (-) strand; PAM type: YTN; PAM sequence: TTG
ggatgccacaggttaattgg

SEQ ID NO: 57244 - DNA, 20 bp, Artificial Sequence
  Description of Artificial Sequence: Synthetic oligonucleotide
  Target: SCNA; (-) strand; PAM type: YTN; PAM sequence: TTT
gggatgccacaggttaattg

SEQ ID NO: 57245 - DNA, 20 bp, Artificial Sequence
  Description of Artificial Sequence: Synthetic oligonucleotide
  Target: SCNA; (-) strand; PAM type: YTN; PAM sequence: TTC
agtaaaacacagatttggga

SEQ ID NO: 57246 - DNA, 20 bp, Artificial Sequence
  Description of Artificial Sequence: Synthetic oligonucleotide
  Target: SCNA; (-) strand; PAM type: YTN; PAM sequence: CTA
ggtgttcagtaaaacacaga

SEQ ID NO: 57247 - DNA, 20 bp, Artificial Sequence
  Description of Artificial Sequence: Synthetic oligonucleotide
  Target: SCNA; (-) strand; PAM type: YTN; PAM sequence: TTC
taggtgttcagtaaaacaca

SEQ ID NO: 57248 - DNA, 20 bp, Artificial Sequence
  Description of Artificial Sequence: Synthetic oligonucleotide
  Target: SCNA; (-) strand; PAM type: YTN; PAM sequence: TTG
acgccaaacccatggagaat

SEQ ID NO: 57249 - DNA, 20 bp, Artificial Sequence
  Description of Artificial Sequence: Synthetic oligonucleotide
  Target: SCNA; (-) strand; PAM type: YTN; PAM sequence: TTT
gacgccaaacccatggagaa

SEQ ID NO: 57250 - DNA, 20 bp, Artificial Sequence
  Description of Artificial Sequence: Synthetic oligonucleotide
  Target: SCNA; (-) strand; PAM type: YTN; PAM sequence: CTT
tgacgccaaacccatggaga

SEQ ID NO: 57251 - DNA, 20 bp, Artificial Sequence
  Description of Artificial Sequence: Synthetic oligonucleotide
  Target: SCNA; (-) strand; PAM type: YTN; PAM sequence: CTC
tttgacgccaaacccatgga

SEQ ID NO: 57252 - DNA, 20 bp, Artificial Sequence
  Description of Artificial Sequence: Synthetic oligonucleotide
  Target: SCNA; (-) strand; PAM type: YTN; PAM sequence: CTA
atgcctctttgacgccaaac

SEQ ID NO: 57253 - DNA, 20 bp, Artificial Sequence
  Description of Artificial Sequence: Synthetic oligonucleotide
  Target: SCNA; (-) strand; PAM type: YTN; PAM sequence: TTC
ctaatgcctctttgacgcca

SEQ ID NO: 57254 - DNA, 20 bp, Artificial Sequence
  Description of Artificial Sequence: Synthetic oligonucleotide
  Target: SCNA; (-) strand; PAM type: YTN; PAM sequence: TTT
cctaatgcctctttgacgcc

SEQ ID NO: 57255 - DNA, 20 bp, Artificial Sequence
  Description of Artificial Sequence: Synthetic oligonucleotide
  Target: SCNA; (-) strand; PAM type: YTN; PAM sequence: CTT
tcctaatgcctctttgacgc

SEQ ID NO: 57256 - DNA, 20 bp, Artificial Sequence
  Description of Artificial Sequence: Synthetic oligonucleotide
  Target: SCNA; (-) strand; PAM type: YTN; PAM sequence: TTA
ccatctttcctaatgcctct

SEQ ID NO: 57257 - DNA, 20 bp, Artificial Sequence
  Description of Artificial Sequence: Synthetic oligonucleotide
  Target: SCNA; (-) strand; PAM type: YTN; PAM sequence: TTG
tatgtaagaggaatagttac

SEQ ID NO: 57258 - DNA, 20 bp, Artificial Sequence
  Description of Artificial Sequence: Synthetic oligonucleotide
  Target: SCNA; (-) strand; PAM type: YTN; PAM sequence: TTA
atattgtatgtaagaggaat

SEQ ID NO: 57259 - DNA, 20 bp, Artificial Sequence
  Description of Artificial Sequence: Synthetic oligonucleotide
  Target: SCNA; (-) strand; PAM type: YTN; PAM sequence: CTT
aatattgtatgtaagaggaa

SEQ ID NO: 57260 - DNA, 20 bp, Artificial Sequence
  Description of Artificial Sequence: Synthetic oligonucleotide
  Target: SCNA; (-) strand; PAM type: YTN; PAM sequence: CTC
aaaggccttaatattgtatg

SEQ ID NO: 57261 - DNA, 20 bp, Artificial Sequence
  Description of Artificial Sequence: Synthetic oligonucleotide
  Target: SCNA; (-) strand; PAM type: YTN; PAM sequence: CTG
aagcaaatctcaaaggcctt

SEQ ID NO: 57262 - DNA, 20 bp, Artificial Sequence
  Description of Artificial Sequence: Synthetic oligonucleotide
  Target: SCNA; (-) strand; PAM type: YTN; PAM sequence: TTA
agctgaagcaaatctcaaag

SEQ ID NO: 57263 - DNA, 20 bp, Artificial Sequence
  Description of Artificial Sequence: Synthetic oligonucleotide
  Target: SCNA; (-) strand; PAM type: YTN; PAM sequence: CTG
ttaagctgaagcaaatctca

SEQ ID NO: 57264 - DNA, 20 bp, Artificial Sequence
  Description of Artificial Sequence: Synthetic oligonucleotide
  Target: SCNA; (-) strand; PAM type: YTN; PAM sequence: CTC
tgttaagctgaagcaaatct

SEQ ID NO: 57265 - DNA, 20 bp, Artificial Sequence
  Description of Artificial Sequence: Synthetic oligonucleotide
  Target: SCNA; (-) strand; PAM type: YTN; PAM sequence: TTA
aaagtatctctgttaagctg

SEQ ID NO: 57266 - DNA, 20 bp, Artificial Sequence
  Description of Artificial Sequence: Synthetic oligonucleotide
  Target: SCNA; (-) strand; PAM type: YTN; PAM sequence: TTT
aaaagtatctctgttaagct

SEQ ID NO: 57267 - DNA, 20 bp, Artificial Sequence
  Description of Artificial Sequence: Synthetic oligonucleotide
  Target: SCNA; (-) strand; PAM type: YTN; PAM sequence: TTA
acaaagtttaaaagtatctc

SEQ ID NO: 57268 - DNA, 20 bp, Artificial Sequence
  Description of Artificial Sequence: Synthetic oligonucleotide
  Target: SCNA; (-) strand; PAM type: YTN; PAM sequence: TTA
aattaacaaagtttaaaagt

SEQ ID NO: 57269 - DNA, 20 bp, Artificial Sequence
  Description of Artificial Sequence: Synthetic oligonucleotide
  Target: SCNA; (-) strand; PAM type: YTN; PAM sequence: TTT
aaattaacaaagtttaaaag

SEQ ID NO: 57270 - DNA, 20 bp, Artificial Sequence
  Description of Artificial Sequence: Synthetic oligonucleotide
  Target: SCNA; (-) strand; PAM type: YTN; PAM sequence: TTG
ggaaacatttaaattaacaa

SEQ ID NO: 57271 - DNA, 20 bp, Artificial Sequence
  Description of Artificial Sequence: Synthetic oligonucleotide
  Target: SCNA; (-) strand; PAM type: YTN; PAM sequence: TTT
gggaaacatttaaattaaca

SEQ ID NO: 57272 - DNA, 20 bp, Artificial Sequence
  Description of Artificial Sequence: Synthetic oligonucleotide
  Target: SCNA; (-) strand; PAM type: YTN; PAM sequence: TTT
tgggaaacatttaaattaac

SEQ ID NO: 57273 - DNA, 20 bp, Artificial Sequence
  Description of Artificial Sequence: Synthetic oligonucleotide
  Target: SCNA; (-) strand; PAM type: YTN; PAM sequence: CTC
aaataattttgggaaacatt

SEQ ID NO: 57274 - DNA, 20 bp, Artificial Sequence
  Description of Artificial Sequence: Synthetic oligonucleotide
  Target: SCNA; (-) strand; PAM type: YTN; PAM sequence: CTG
ctcaaataattttgggaaac

SEQ ID NO: 57275 - DNA, 20 bp, Artificial Sequence
  Description of Artificial Sequence: Synthetic oligonucleotide
  Target: SCNA; (-) strand; PAM type: YTN; PAM sequence: CTC
tgctcaaataattttgggaa

SEQ ID NO: 57276 - DNA, 20 bp, Artificial Sequence
  Description of Artificial Sequence: Synthetic oligonucleotide
  Target: SCNA; (-) strand; PAM type: YTN; PAM sequence: TTC
tctgctcaaataattttggg

SEQ ID NO: 57277 - DNA, 20 bp, Artificial Sequence
  Description of Artificial Sequence: Synthetic oligonucleotide
  Target: SCNA; (-) strand; PAM type: YTN; PAM sequence: TTA
gaatggattctctgctcaaa

SEQ ID NO: 57278 - DNA, 20 bp, Artificial Sequence
  Description of Artificial Sequence: Synthetic oligonucleotide
  Target: SCNA; (-) strand; PAM type: YTN; PAM sequence: TTA
tgcacatggtataattagaa

SEQ ID NO: 57279 - DNA, 20 bp, Artificial Sequence
  Description of Artificial Sequence: Synthetic oligonucleotide
  Target: SCNA; (-) strand; PAM type: YTN; PAM sequence: TTG
agtattatgcacatggtata

SEQ ID NO: 57280 - DNA, 20 bp, Artificial Sequence
  Description of Artificial Sequence: Synthetic oligonucleotide
  Target: SCNA; (-) strand; PAM type: YTN; PAM sequence: TTC
cattgagtattatgcacatg

SEQ ID NO: 57281 - DNA, 20 bp, Artificial Sequence
  Description of Artificial Sequence: Synthetic oligonucleotide
  Target: SCNA; (-) strand; PAM type: YTN; PAM sequence: TTC
cccaaagtcatgtgattcca

SEQ ID NO: 57282 - DNA, 20 bp, Artificial Sequence
  Description of Artificial Sequence: Synthetic oligonucleotide
  Target: SCNA; (-) strand; PAM type: YTN; PAM sequence: TTT
ccccaaagtcatgtgattcc

SEQ ID NO: 57283 - DNA, 20 bp, Artificial Sequence
  Description of Artificial Sequence: Synthetic oligonucleotide
  Target: SCNA; (-) strand; PAM type: YTN; PAM sequence: CTG
atttccccaaagtcatgtga

SEQ ID NO: 57284 - DNA, 20 bp, Artificial Sequence
  Description of Artificial Sequence: Synthetic oligonucleotide
  Target: SCNA; (-) strand; PAM type: YTN; PAM sequence: CTC
tgatttccccaaagtcatgt

SEQ ID NO: 57285 - DNA, 20 bp, Artificial Sequence
  Description of Artificial Sequence: Synthetic oligonucleotide
  Target: SCNA; (-) strand; PAM type: YTN; PAM sequence: TTC
ctctgatttccccaaagtca

SEQ ID NO: 57286 - DNA, 20 bp, Artificial Sequence
  Description of Artificial Sequence: Synthetic oligonucleotide
  Target: SCNA; (-) strand; PAM type: YTN; PAM sequence: TTT
cctctgatttccccaaagtc

SEQ ID NO: 57287 - DNA, 20 bp, Artificial Sequence
  Description of Artificial Sequence: Synthetic oligonucleotide
  Target: SCNA; (-) strand; PAM type: YTN; PAM sequence: TTT
tcctctgatttccccaaagt

SEQ ID NO: 57288 - DNA, 20 bp, Artificial Sequence
  Description of Artificial Sequence: Synthetic oligonucleotide
  Target: SCNA; (-) strand; PAM type: YTN; PAM sequence: TTA
gttttcctctgatttcccca

SEQ ID NO: 57289 - DNA, 20 bp, Artificial Sequence
  Description of Artificial Sequence: Synthetic oligonucleotide
  Target: SCNA; (-) strand; PAM type: YTN; PAM sequence: CTA
ttagttttcctctgatttcc

SEQ ID NO: 57290 - DNA, 20 bp, Artificial Sequence
  Description of Artificial Sequence: Synthetic oligonucleotide
  Target: SCNA; (-) strand; PAM type: YTN; PAM sequence: CTA
aataaaatgtaatcactatt

SEQ ID NO: 57291 - DNA, 20 bp, Artificial Sequence
  Description of Artificial Sequence: Synthetic oligonucleotide
  Target: SCNA; (-) strand; PAM type: YTN; PAM sequence: TTA
gctaaataaaatgtaatcac

SEQ ID NO: 57292 - DNA, 20 bp, Artificial Sequence
  Description of Artificial Sequence: Synthetic oligonucleotide
  Target: SCNA; (-) strand; PAM type: YTN; PAM sequence: TTT
agctaaataaaatgtaatca

SEQ ID NO: 57293 - DNA, 20 bp, Artificial Sequence
  Description of Artificial Sequence: Synthetic oligonucleotide
  Target: SCNA; (-) strand; PAM type: YTN; PAM sequence: TTA
tttagctaaataaaatgtaa

SEQ ID NO: 57294 - DNA, 20 bp, Artificial Sequence
  Description of Artificial Sequence: Synthetic oligonucleotide
  Target: SCNA; (-) strand; PAM type: YTN; PAM sequence: TTT
atttagctaaataaaatgta

SEQ ID NO: 57295 - DNA, 20 bp, Artificial Sequence
  Description of Artificial Sequence: Synthetic oligonucleotide
  Target: SCNA; (-) strand; PAM type: YTN; PAM sequence: TTT
tatttagctaaataaaatgt

SEQ ID NO: 57296 - DNA, 20 bp, Artificial Sequence
  Description of Artificial Sequence: Synthetic oligonucleotide
  Target: SCNA; (-) strand; PAM type: YTN; PAM sequence: CTG
aacatgccgttttatttagc

SEQ ID NO: 57297 - DNA, 20 bp, Artificial Sequence
  Description of Artificial Sequence: Synthetic oligonucleotide
  Target: SCNA; (-) strand; PAM type: YTN; PAM sequence: TTG
tataacacaaagagggaaaa

SEQ ID NO: 57298 - DNA, 20 bp, Artificial Sequence
  Description of Artificial Sequence: Synthetic oligonucleotide
  Target: SCNA; (-) strand; PAM type: YTN; PAM sequence: TTA
agtaagtaaattgtataaca

SEQ ID NO: 57299 - DNA, 20 bp, Artificial Sequence
  Description of Artificial Sequence: Synthetic oligonucleotide
  Target: SCNA; (-) strand; PAM type: YTN; PAM sequence: TTG
atgatattaagtaagtaaat

SEQ ID NO: 57300 - DNA, 20 bp, Artificial Sequence
  Description of Artificial Sequence: Synthetic oligonucleotide
  Target: SCNA; (-) strand; PAM type: YTN; PAM sequence: TTT
gatgatattaagtaagtaaa

SEQ ID NO: 57301 - DNA, 20 bp, Artificial Sequence
  Description of Artificial Sequence: Synthetic oligonucleotide
  Target: SCNA; (-) strand; PAM type: YTN; PAM sequence: TTG
tagtttgatgatattaagta

SEQ ID NO: 57302 - DNA, 20 bp, Artificial Sequence
  Description of Artificial Sequence: Synthetic oligonucleotide
  Target: SCNA; (-) strand; PAM type: YTN; PAM sequence: TTT
gtagtttgatgatattaagt

SEQ ID NO: 57303 - DNA, 20 bp, Artificial Sequence
  Description of Artificial Sequence: Synthetic oligonucleotide
  Target: SCNA; (-) strand; PAM type: YTN; PAM sequence: CTT
tgtagtttgatgatattaag

SEQ ID NO: 57304 - DNA, 20 bp, Artificial Sequence
  Description of Artificial Sequence: Synthetic oligonucleotide
  Target: SCNA; (-) strand; PAM type: YTN; PAM sequence: TTC
ctttgtagtttgatgatatt

SEQ ID NO: 57305 - DNA, 20 bp, Artificial Sequence
  Description of Artificial Sequence: Synthetic oligonucleotide
  Target: SCNA; (-) strand; PAM type: YTN; PAM sequence: TTC
catattcctttgtagtttga

SEQ ID NO: 57306 - DNA, 20 bp, Artificial Sequence
  Description of Artificial Sequence: Synthetic oligonucleotide
  Target: SCNA; (-) strand; PAM type: YTN; PAM sequence: TTT
ccatattcctttgtagtttg

SEQ ID NO: 57307 - DNA, 20 bp, Artificial Sequence
  Description of Artificial Sequence: Synthetic oligonucleotide
  Target: SCNA; (-) strand; PAM type: YTN; PAM sequence: TTT
tccatattcctttgtagttt

SEQ ID NO: 57308 - DNA, 20 bp, Artificial Sequence
  Description of Artificial Sequence: Synthetic oligonucleotide
  Target: SCNA; (-) strand; PAM type: YTN; PAM sequence: CTT
ttccatattcctttgtagtt

SEQ ID NO: 57309 - DNA, 20 bp, Artificial Sequence
  Description of Artificial Sequence: Synthetic oligonucleotide
  Target: SCNA; (-) strand; PAM type: YTN; PAM sequence: CTA
agaagtgtgtcgatacatga

SEQ ID NO: 57310 - DNA, 20 bp, Artificial Sequence
  Description of Artificial Sequence: Synthetic oligonucleotide
  Target: SCNA; (-) strand; PAM type: YTN; PAM sequence: CTC
taagaagtgtgtcgatacat

SEQ ID NO: 57311 - DNA, 20 bp, Artificial Sequence
  Description of Artificial Sequence: Synthetic oligonucleotide
  Target: SCNA; (-) strand; PAM type: YTN; PAM sequence: TTC
tctaagaagtgtgtcgatac

SEQ ID NO: 57312 - DNA, 20 bp, Artificial Sequence
  Description of Artificial Sequence: Synthetic oligonucleotide
  Target: SCNA; (-) strand; PAM type: YTN; PAM sequence: TTT
ctctaagaagtgtgtcgata

SEQ ID NO: 57313 - DNA, 20 bp, Artificial Sequence
  Description of Artificial Sequence: Synthetic oligonucleotide
  Target: SCNA; (-) strand; PAM type: YTN; PAM sequence: TTT
tctctaagaagtgtgtcgat

SEQ ID NO: 57314 - DNA, 20 bp, Artificial Sequence
  Description of Artificial Sequence: Synthetic oligonucleotide
  Target: SCNA; (-) strand; PAM type: YTN; PAM sequence: TTA
cattttctctaagaagtgtg

SEQ ID NO: 57315 - DNA, 20 bp, Artificial Sequence
  Description of Artificial Sequence: Synthetic oligonucleotide
  Target: SCNA; (-) strand; PAM type: YTN; PAM sequence: CTT
acattttctctaagaagtgt

SEQ ID NO: 57316 - DNA, 20 bp, Artificial Sequence
  Description of Artificial Sequence: Synthetic oligonucleotide
  Target: SCNA; (-) strand; PAM type: YTN; PAM sequence: TTG
ccaagaacttacattttctc

SEQ ID NO: 57317 - DNA, 20 bp, Artificial Sequence
  Description of Artificial Sequence: Synthetic oligonucleotide
  Target: SCNA; (-) strand; PAM type: YTN; PAM sequence: TTT
gccaagaacttacattttct

SEQ ID NO: 57318 - DNA, 20 bp, Artificial Sequence
  Description of Artificial Sequence: Synthetic oligonucleotide
  Target: SCNA; (-) strand; PAM type: YTN; PAM sequence: TTT
tgccaagaacttacattttc

SEQ ID NO: 57319 - DNA, 20 bp, Artificial Sequence
  Description of Artificial Sequence: Synthetic oligonucleotide
  Target: SCNA; (-) strand; PAM type: YTN; PAM sequence: TTG
taatattttgccaagaactt

SEQ ID NO: 57320 - DNA, 20 bp, Artificial Sequence
  Description of Artificial Sequence: Synthetic oligonucleotide
  Target: SCNA; (-) strand; PAM type: YTN; PAM sequence: TTA
tacagttgtaatattttgcc

SEQ ID NO: 57321 - DNA, 20 bp, Artificial Sequence
  Description of Artificial Sequence: Synthetic oligonucleotide
  Target: SCNA; (-) strand; PAM type: YTN; PAM sequence: TTG
tagtgcattatacagttgta

SEQ ID NO: 57322 - DNA, 20 bp, Artificial Sequence
  Description of Artificial Sequence: Synthetic oligonucleotide
  Target: SCNA; (-) strand; PAM type: YTN; PAM sequence: TTA
aaaattgtagtgcattatac

SEQ ID NO: 57323 - DNA, 20 bp, Artificial Sequence
  Description of Artificial Sequence: Synthetic oligonucleotide
  Target: SCNA; (-) strand; PAM type: YTN; PAM sequence: TTT
aaaaattgtagtgcattata

SEQ ID NO: 57324 - DNA, 20 bp, Artificial Sequence
  Description of Artificial Sequence: Synthetic oligonucleotide
  Target: SCNA; (-) strand; PAM type: YTN; PAM sequence: TTT
taaaaattgtagtgcattat

SEQ ID NO: 57325 - DNA, 20 bp, Artificial Sequence
  Description of Artificial Sequence: Synthetic oligonucleotide
  Target: SCNA; (-) strand; PAM type: YTN; PAM sequence: TTT
ttaaaaattgtagtgcatta

SEQ ID NO: 57326 - DNA, 20 bp, Artificial Sequence
  Description of Artificial Sequence: Synthetic oligonucleotide
  Target: SCNA; (-) strand; PAM type: YTN; PAM sequence: TTG
gagtgtgaatgaaataagat

SEQ ID NO: 57327 - DNA, 20 bp, Artificial Sequence
  Description of Artificial Sequence: Synthetic oligonucleotide
  Target: SCNA; (-) strand; PAM type: YTN; PAM sequence: CTG
cccagggttggagtgtgaat

SEQ ID NO: 57328 - DNA, 20 bp, Artificial Sequence
  Description of Artificial Sequence: Synthetic oligonucleotide
  Target: SCNA; (-) strand; PAM type: YTN; PAM sequence: CTG
gccagccaactgcccagggt

SEQ ID NO: 57329 - DNA, 20 bp, Artificial Sequence
  Description of Artificial Sequence: Synthetic oligonucleotide
  Target: SCNA; (-) strand; PAM type: YTN; PAM sequence: CTG
taactggccagccaactgcc

SEQ ID NO: 57330 - DNA, 20 bp, Artificial Sequence
  Description of Artificial Sequence: Synthetic oligonucleotide
  Target: SCNA; (-) strand; PAM type: YTN; PAM sequence: CTC
atctgtaactggccagccaa

SEQ ID NO: 57331 - DNA, 20 bp, Artificial Sequence
  Description of Artificial Sequence: Synthetic oligonucleotide
  Target: SCNA; (-) strand; PAM type: YTN; PAM sequence: CTA
ctcatctgtaactggccagc

SEQ ID NO: 57332 - DNA, 20 bp, Artificial Sequence
  Description of Artificial Sequence: Synthetic oligonucleotide
  Target: SCNA; (-) strand; PAM type: YTN; PAM sequence: CTA
aaccatagctactcatctgt

SEQ ID NO: 57333 - DNA, 20 bp, Artificial Sequence
  Description of Artificial Sequence: Synthetic oligonucleotide
  Target: SCNA; (-) strand; PAM type: YTN; PAM sequence: TTC
taaaccatagctactcatct

SEQ ID NO: 57334 - DNA, 20 bp, Artificial Sequence
  Description of Artificial Sequence: Synthetic oligonucleotide
  Target: SCNA; (-) strand; PAM type: YTN; PAM sequence: TTT
ctaaaccatagctactcatc

SEQ ID NO: 57335 - DNA, 20 bp, Artificial Sequence
  Description of Artificial Sequence: Synthetic oligonucleotide
  Target: SCNA; (-) strand; PAM type: YTN; PAM sequence: CTT
tctaaaccatagctactcat

SEQ ID NO: 57336 - DNA, 20 bp, Artificial Sequence
  Description of Artificial Sequence: Synthetic oligonucleotide
  Target: SCNA; (-) strand; PAM type: YTN; PAM sequence: CTC
atgtaacctttctaaaccat

SEQ ID NO: 57337 - DNA, 20 bp, Artificial Sequence
  Description of Artificial Sequence: Synthetic oligonucleotide
  Target: SCNA; (-) strand; PAM type: YTN; PAM sequence: CTG
gcaactcatgtaacctttct

SEQ ID NO: 57338 - DNA, 20 bp, Artificial Sequence
  Description of Artificial Sequence: Synthetic oligonucleotide
  Target: SCNA; (-) strand; PAM type: YTN; PAM sequence: TTG
ccagatccctggcaactcat

SEQ ID NO: 57339 - DNA, 20 bp, Artificial Sequence
  Description of Artificial Sequence: Synthetic oligonucleotide
  Target: SCNA; (-) strand; PAM type: YTN; PAM sequence: TTA
tgcgttgccagatccctggc

SEQ ID NO: 57340 - DNA, 20 bp, Artificial Sequence
  Description of Artificial Sequence: Synthetic oligonucleotide
  Target: SCNA; (-) strand; PAM type: YTN; PAM sequence: TTC
aattatgcgttgccagatcc

SEQ ID NO: 57341 - DNA, 20 bp, Artificial Sequence
  Description of Artificial Sequence: Synthetic oligonucleotide
  Target: SCNA; (-) strand; PAM type: YTN; PAM sequence: TTA
agacaatgtattcaattatg

SEQ ID NO: 57342 - DNA, 20 bp, Artificial Sequence
  Description of Artificial Sequence: Synthetic oligonucleotide
  Target: SCNA; (-) strand; PAM type: YTN; PAM sequence: CTT
aagacaatgtattcaattat

SEQ ID NO: 57343 - DNA, 20 bp, Artificial Sequence
  Description of Artificial Sequence: Synthetic oligonucleotide
  Target: SCNA; (-) strand; PAM type: YTN; PAM sequence: TTG
aatcttaagacaatgtattc

SEQ ID NO: 57344 - DNA, 20 bp, Artificial Sequence
  Description of Artificial Sequence: Synthetic oligonucleotide
  Target: SCNA; (-) strand; PAM type: YTN; PAM sequence: CTT
gaatcttaagacaatgtatt

SEQ ID NO: 57345 - DNA, 20 bp, Artificial Sequence
  Description of Artificial Sequence: Synthetic oligonucleotide
  Target: SCNA; (-) strand; PAM type: YTN; PAM sequence: TTA
atagcttgaatcttaagaca

SEQ ID NO: 57346 - DNA, 20 bp, Artificial Sequence
  Description of Artificial Sequence: Synthetic oligonucleotide
  Target: SCNA; (-) strand; PAM type: YTN; PAM sequence: TTT
aatagcttgaatcttaagac

SEQ ID NO: 57347 - DNA, 20 bp, Artificial Sequence
  Description of Artificial Sequence: Synthetic oligonucleotide
  Target: SCNA; (-) strand; PAM type: YTN; PAM sequence: CTG
tgtttaatagcttgaatctt

SEQ ID NO: 57348 - DNA, 20 bp, Artificial Sequence
  Description of Artificial Sequence: Synthetic oligonucleotide
  Target: SCNA; (-) strand; PAM type: YTN; PAM sequence: TTC
agtctgtgtttaatagcttg

SEQ ID NO: 57349 - DNA, 20 bp, Artificial Sequence
  Description of Artificial Sequence: Synthetic oligonucleotide
  Target: SCNA; (-) strand; PAM type: YTN; PAM sequence: TTT
cagtctgtgtttaatagctt

SEQ ID NO: 57350 - DNA, 20 bp, Artificial Sequence
  Description of Artificial Sequence: Synthetic oligonucleotide
  Target: SCNA; (-) strand; PAM type: YTN; PAM sequence: CTT
tcagtctgtgtttaatagct

SEQ ID NO: 57351 - DNA, 20 bp, Artificial Sequence
  Description of Artificial Sequence: Synthetic oligonucleotide
  Target: SCNA; (-) strand; PAM type: YTN; PAM sequence: TTC
aaaatgctttcagtctgtgt

SEQ ID NO: 57352 - DNA, 20 bp, Artificial Sequence
  Description of Artificial Sequence: Synthetic oligonucleotide
  Target: SCNA; (-) strand; PAM type: YTN; PAM sequence: TTA
aatgagttcaaaatgctttc

SEQ ID NO: 57353 - DNA, 20 bp, Artificial Sequence
  Description of Artificial Sequence: Synthetic oligonucleotide
  Target: SCNA; (-) strand; PAM type: YTN; PAM sequence: TTG
aattaaatgagttcaaaatg

SEQ ID NO: 57354 - DNA, 20 bp, Artificial Sequence
  Description of Artificial Sequence: Synthetic oligonucleotide
  Target: SCNA; (-) strand; PAM type: YTN; PAM sequence: CTG
tgaaataaaaatgttgaatt

SEQ ID NO: 57355 - DNA, 20 bp, Artificial Sequence
  Description of Artificial Sequence: Synthetic oligonucleotide
  Target: SCNA; (-) strand; PAM type: YTN; PAM sequence: TTA
tctgtgaaataaaaatgttg

SEQ ID NO: 57356 - DNA, 20 bp, Artificial Sequence
  Description of Artificial Sequence: Synthetic oligonucleotide
  Target: SCNA; (-) strand; PAM type: YTN; PAM sequence: CTT
atctgtgaaataaaaatgtt

SEQ ID NO: 57357 - DNA, 20 bp, Artificial Sequence
  Description of Artificial Sequence: Synthetic oligonucleotide
  Target: SCNA; (-) strand; PAM type: YTN; PAM sequence: TTC
ttatctgtgaaataaaaatg

SEQ ID NO: 57358 - DNA, 20 bp, Artificial Sequence
  Description of Artificial Sequence: Synthetic oligonucleotide
  Target: SCNA; (-) strand; PAM type: YTN; PAM sequence: TTT
cttatctgtgaaataaaaat

SEQ ID NO: 57359 - DNA, 20 bp, Artificial Sequence
  Description of Artificial Sequence: Synthetic oligonucleotide
  Target: SCNA; (-) strand; PAM type: YTN; PAM sequence: TTT
tcttatctgtgaaataaaaa

SEQ ID NO: 57360 - DNA, 20 bp, Artificial Sequence
  Description of Artificial Sequence: Synthetic oligonucleotide
  Target: SCNA; (-) strand; PAM type: YTN; PAM sequence: CTA
agcatgagttttcttatctg

SEQ ID NO: 57361 - DNA, 20 bp, Artificial Sequence
  Description of Artificial Sequence: Synthetic oligonucleotide
  Target: SCNA; (-) strand; PAM type: YTN; PAM sequence: CTC
taagcatgagttttcttatc

SEQ ID NO: 57362 - DNA, 20 bp, Artificial Sequence
  Description of Artificial Sequence: Synthetic oligonucleotide
  Target: SCNA; (-) strand; PAM type: YTN; PAM sequence: CTC
tctaagcatgagttttctta

SEQ ID NO: 57363 - DNA, 20 bp, Artificial Sequence
  Description of Artificial Sequence: Synthetic oligonucleotide
  Target: SCNA; (-) strand; PAM type: YTN; PAM sequence: CTC
ccctctctaagcatgagttt

SEQ ID NO: 57364 - DNA, 20 bp, Artificial Sequence
  Description of Artificial Sequence: Synthetic oligonucleotide
  Target: SCNA; (-) strand; PAM type: YTN; PAM sequence: CTG
gatgatgtcatctcccctct

SEQ ID NO: 57365 - DNA, 20 bp, Artificial Sequence
  Description of Artificial Sequence: Synthetic oligonucleotide
  Target: SCNA; (-) strand; PAM type: YTN; PAM sequence: CTA
ctggatgatgtcatctcccc

SEQ ID NO: 57366 - DNA, 20 bp, Artificial Sequence
  Description of Artificial Sequence: Synthetic oligonucleotide
  Target: SCNA; (-) strand; PAM type: YTN; PAM sequence: CTC
tactggatgatgtcatctcc

SEQ ID NO: 57367 - DNA, 20 bp, Artificial Sequence
  Description of Artificial Sequence: Synthetic oligonucleotide
  Target: SCNA; (-) strand; PAM type: YTN; PAM sequence: CTC
actctactggatgatgtcat

SEQ ID NO: 57368 - DNA, 20 bp, Artificial Sequence
  Description of Artificial Sequence: Synthetic oligonucleotide
  Target: SCNA; (-) strand; PAM type: YTN; PAM sequence: CTC
tcactctactggatgatgtc

SEQ ID NO: 57369 - DNA, 20 bp, Artificial Sequence
  Description of Artificial Sequence: Synthetic oligonucleotide
  Target: SCNA; (-) strand; PAM type: YTN; PAM sequence: CTC
tctcactctactggatgatg

SEQ ID NO: 57370 - DNA, 20 bp, Artificial Sequence
  Description of Artificial Sequence: Synthetic oligonucleotide
  Target: SCNA; (-) strand; PAM type: YTN; PAM sequence: CTC
tctctcactctactggatga

SEQ ID NO: 57371 - DNA, 20 bp, Artificial Sequence
  Description of Artificial Sequence: Synthetic oligonucleotide
  Target: SCNA; (-) strand; PAM type: YTN; PAM sequence: TTC
tctctctcactctactggat

SEQ ID NO: 57372 - DNA, 20 bp, Artificial Sequence
  Description of Artificial Sequence: Synthetic oligonucleotide
  Target: SCNA; (-) strand; PAM type: YTN; PAM sequence: CTT
ctctctctcactctactgga

SEQ ID NO: 57373 - DNA, 20 bp, Artificial Sequence
  Description of Artificial Sequence: Synthetic oligonucleotide
  Target: SCNA; (-) strand; PAM type: YTN; PAM sequence: TTG
gtcttctctctctcactcta

SEQ ID NO: 57374 - DNA, 20 bp, Artificial Sequence
  Description of Artificial Sequence: Synthetic oligonucleotide
  Target: SCNA; (-) strand; PAM type: YTN; PAM sequence: TTC
agggaacagagagttggtct

SEQ ID NO: 57375 - DNA, 20 bp, Artificial Sequence
  Description of Artificial Sequence: Synthetic oligonucleotide
  Target: SCNA; (-) strand; PAM type: YTN; PAM sequence: TTG
aattcagggaacagagagtt

SEQ ID NO: 57376 - DNA, 20 bp, Artificial Sequence
  Description of Artificial Sequence: Synthetic oligonucleotide
  Target: SCNA; (-) strand; PAM type: YTN; PAM sequence: CTT
gaattcagggaacagagagt

SEQ ID NO: 57377 - DNA, 20 bp, Artificial Sequence
  Description of Artificial Sequence: Synthetic oligonucleotide
  Target: SCNA; (-) strand; PAM type: YTN; PAM sequence: TTG
gtcatatacagggaaaacat

SEQ ID NO: 57378 - DNA, 20 bp, Artificial Sequence
  Description of Artificial Sequence: Synthetic oligonucleotide
  Target: SCNA; (-) strand; PAM type: YTN; PAM sequence: TTT
ggtcatatacagggaaaaca

SEQ ID NO: 57379 - DNA, 20 bp, Artificial Sequence
  Description of Artificial Sequence: Synthetic oligonucleotide
  Target: SCNA; (-) strand; PAM type: YTN; PAM sequence: TTG
tttggtcatatacagggaaa

SEQ ID NO: 57380 - DNA, 20 bp, Artificial Sequence
  Description of Artificial Sequence: Synthetic oligonucleotide
  Target: SCNA; (-) strand; PAM type: YTN; PAM sequence: TTT
gtttggtcatatacagggaa

SEQ ID NO: 57381 - DNA, 20 bp, Artificial Sequence
  Description of Artificial Sequence: Synthetic oligonucleotide
  Target: SCNA; (-) strand; PAM type: YTN; PAM sequence: TTT
tgtttggtcatatacaggga

SEQ ID NO: 57382 - DNA, 20 bp, Artificial Sequence
  Description of Artificial Sequence: Synthetic oligonucleotide
  Target: SCNA; (-) strand; PAM type: YTN; PAM sequence: CTG
caccattttgtttggtcata

SEQ ID NO: 57383 - DNA, 20 bp, Artificial Sequence
  Description of Artificial Sequence: Synthetic oligonucleotide
  Target: SCNA; (-) strand; PAM type: YTN; PAM sequence: TTA
actgcaccattttgtttggt

SEQ ID NO: 57384 - DNA, 20 bp, Artificial Sequence
  Description of Artificial Sequence: Synthetic oligonucleotide
  Target: SCNA; (-) strand; PAM type: YTN; PAM sequence: TTT
aactgcaccattttgtttgg

SEQ ID NO: 57385 - DNA, 20 bp, Artificial Sequence
  Description of Artificial Sequence: Synthetic oligonucleotide
  Target: SCNA; (-) strand; PAM type: YTN; PAM sequence: CTC
gtggtttaactgcaccattt

SEQ ID NO: 57386 - DNA, 20 bp, Artificial Sequence
  Description of Artificial Sequence: Synthetic oligonucleotide
  Target: SCNA; (-) strand; PAM type: YTN; PAM sequence: CTG
tgcatgacggctcgtggttt

SEQ ID NO: 57387 - DNA, 20 bp, Artificial Sequence
  Description of Artificial Sequence: Synthetic oligonucleotide
  Target: SCNA; (-) strand; PAM type: YTN; PAM sequence: CTC
ctgtgcatgacggctcgtgg

SEQ ID NO: 57388 - DNA, 20 bp, Artificial Sequence
  Description of Artificial Sequence: Synthetic oligonucleotide
  Target: SCNA; (-) strand; PAM type: YTN; PAM sequence: CTG
gccctcctgtgcatgacggc

SEQ ID NO: 57389 - DNA, 20 bp, Artificial Sequence
  Description of Artificial Sequence: Synthetic oligonucleotide
  Target: SCNA; (-) strand; PAM type: YTN; PAM sequence: TTG
atccagcatgatggccagct

SEQ ID NO: 57390 - DNA, 20 bp, Artificial Sequence
  Description of Artificial Sequence: Synthetic oligonucleotide
  Target: SCNA; (-) strand; PAM type: YTN; PAM sequence: TTT
gatccagcatgatggccagc

SEQ ID NO: 57391 - DNA, 20 bp, Artificial Sequence
  Description of Artificial Sequence: Synthetic oligonucleotide
  Target: SCNA; (-) strand; PAM type: YTN; PAM sequence: CTG
tttgatccagcatgatggcc

SEQ ID NO: 57392 - DNA, 20 bp, Artificial Sequence
  Description of Artificial Sequence: Synthetic oligonucleotide
  Target: SCNA; (-) strand; PAM type: YTN; PAM sequence: CTG
ctgtttgatccagcatgatg

SEQ ID NO: 57393 - DNA, 20 bp, Artificial Sequence
  Description of Artificial Sequence: Synthetic oligonucleotide
  Target: SCNA; (-) strand; PAM type: YTN; PAM sequence: CTA
tatctgctgtttgatccagc

SEQ ID NO: 57394 - DNA, 20 bp, Artificial Sequence
  Description of Artificial Sequence: Synthetic oligonucleotide
  Target: SCNA; (-) strand; PAM type: YTN; PAM sequence: CTA
gagatggtctatatctgctg

SEQ ID NO: 57395 - DNA, 20 bp, Artificial Sequence
  Description of Artificial Sequence: Synthetic oligonucleotide
  Target: SCNA; (-) strand; PAM type: YTN; PAM sequence: CTG
ctagagatggtctatatctg

SEQ ID NO: 57396 - DNA, 20 bp, Artificial Sequence
  Description of Artificial Sequence: Synthetic oligonucleotide
  Target: SCNA; (-) strand; PAM type: YTN; PAM sequence: TTC
tgctagagatggtctatatc

SEQ ID NO: 57397 - DNA, 20 bp, Artificial Sequence
  Description of Artificial Sequence: Synthetic oligonucleotide
  Target: SCNA; (-) strand; PAM type: YTN; PAM sequence: TTC
acaagtgttctgctagagat

SEQ ID NO: 57398 - DNA, 20 bp, Artificial Sequence
  Description of Artificial Sequence: Synthetic oligonucleotide
  Target: SCNA; (-) strand; PAM type: YTN; PAM sequence: TTG
aaacaaaggcaattcacaag

SEQ ID NO: 57399 - DNA, 20 bp, Artificial Sequence
  Description of Artificial Sequence: Synthetic oligonucleotide
  Target: SCNA; (-) strand; PAM type: YTN; PAM sequence: TTT
gaaacaaaggcaattcacaa

SEQ ID NO: 57400 - DNA, 20 bp, Artificial Sequence
  Description of Artificial Sequence: Synthetic oligonucleotide
  Target: SCNA; (-) strand; PAM type: YTN; PAM sequence: TTA
tgagtttgaaacaaaggcaa

SEQ ID NO: 57401 - DNA, 20 bp, Artificial Sequence
  Description of Artificial Sequence: Synthetic oligonucleotide
  Target: SCNA; (-) strand; PAM type: YTN; PAM sequence: TTT
atgagtttgaaacaaaggca

SEQ ID NO: 57402 - DNA, 20 bp, Artificial Sequence
  Description of Artificial Sequence: Synthetic oligonucleotide
  Target: SCNA; (-) strand; PAM type: YTN; PAM sequence: CTA
acatttatgagtttgaaaca

SEQ ID NO: 57403 - DNA, 20 bp, Artificial Sequence
  Description of Artificial Sequence: Synthetic oligonucleotide
  Target: SCNA; (-) strand; PAM type: YTN; PAM sequence: CTA
caaaggtatactaacattta

SEQ ID NO: 57404 - DNA, 20 bp, Artificial Sequence
  Description of Artificial Sequence: Synthetic oligonucleotide
  Target: SCNA; (-) strand; PAM type: YTN; PAM sequence: CTC
ctacaaaggtatactaacat

SEQ ID NO: 57405 - DNA, 20 bp, Artificial Sequence
  Description of Artificial Sequence: Synthetic oligonucleotide
  Target: SCNA; (-) strand; PAM type: YTN; PAM sequence: TTC
atggtagtcctcctacaaag

SEQ ID NO: 57406 - DNA, 20 bp, Artificial Sequence
  Description of Artificial Sequence: Synthetic oligonucleotide
  Target: SCNA; (-) strand; PAM type: YTN; PAM sequence: TTT
catggtagtcctcctacaaa

SEQ ID NO: 57407 - DNA, 20 bp, Artificial Sequence
  Description of Artificial Sequence: Synthetic oligonucleotide
  Target: SCNA; (-) strand; PAM type: YTN; PAM sequence: CTT
tcatggtagtcctcctacaa

SEQ ID NO: 57408 - DNA, 20 bp, Artificial Sequence
  Description of Artificial Sequence: Synthetic oligonucleotide
  Target: SCNA; (-) strand; PAM type: YTN; PAM sequence: TTC
atctttcatggtagtcctcc

SEQ ID NO: 57409 - DNA, 20 bp, Artificial Sequence
  Description of Artificial Sequence: Synthetic oligonucleotide
  Target: SCNA; (-) strand; PAM type: YTN; PAM sequence: TTA
tagtggcaattcatctttca

SEQ ID NO: 57410 - DNA, 20 bp, Artificial Sequence
  Description of Artificial Sequence: Synthetic oligonucleotide
  Target: SCNA; (-) strand; PAM type: YTN; PAM sequence: CTT
atagtggcaattcatctttc

SEQ ID NO: 57411 - DNA, 20 bp, Artificial Sequence
  Description of Artificial Sequence: Synthetic oligonucleotide
  Target: SCNA; (-) strand; PAM type: YTN; PAM sequence: CTG
cttatagtggcaattcatct

SEQ ID NO: 57412 - DNA, 20 bp, Artificial Sequence
  Description of Artificial Sequence: Synthetic oligonucleotide
  Target: SCNA; (-) strand; PAM type: YTN; PAM sequence: CTA
atgactgcttatagtggcaa

SEQ ID NO: 57413 - DNA, 20 bp, Artificial Sequence
  Description of Artificial Sequence: Synthetic oligonucleotide
  Target: SCNA; (-) strand; PAM type: YTN; PAM sequence: CTA
aatactaatgactgcttata

SEQ ID NO: 57414 - DNA, 20 bp, Artificial Sequence
  Description of Artificial Sequence: Synthetic oligonucleotide
  Target: SCNA; (-) strand; PAM type: YTN; PAM sequence: CTC
cactaaatactaatgactgc

SEQ ID NO: 57415 - DNA, 20 bp, Artificial Sequence
  Description of Artificial Sequence: Synthetic oligonucleotide
  Target: SCNA; (-) strand; PAM type: YTN; PAM sequence: TTA
atctccactaaatactaatg

SEQ ID NO: 57416 - DNA, 20 bp, Artificial Sequence
  Description of Artificial Sequence: Synthetic oligonucleotide
  Target: SCNA; (-) strand; PAM type: YTN; PAM sequence: TTA
aaagttaatctccactaaat

SEQ ID NO: 57417 - DNA, 20 bp, Artificial Sequence
  Description of Artificial Sequence: Synthetic oligonucleotide
  Target: SCNA; (-) strand; PAM type: YTN; PAM sequence: TTT
aaaagttaatctccactaaa

SEQ ID NO: 57418 - DNA, 20 bp, Artificial Sequence
  Description of Artificial Sequence: Synthetic oligonucleotide
  Target: SCNA; (-) strand; PAM type: YTN; PAM sequence: CTT
taaaagttaatctccactaa

SEQ ID NO: 57419 - DNA, 20 bp, Artificial Sequence
  Description of Artificial Sequence: Synthetic oligonucleotide
  Target: SCNA; (-) strand; PAM type: YTN; PAM sequence: CTA
aagtaggcacctttaaaagt

SEQ ID NO: 57420 - DNA, 20 bp, Artificial Sequence
  Description of Artificial Sequence: Synthetic oligonucleotide
  Target: SCNA; (-) strand; PAM type: YTN; PAM sequence: TTA
tgacatatctaaagtaggca

SEQ ID NO: 57421 - DNA, 20 bp, Artificial Sequence
  Description of Artificial Sequence: Synthetic oligonucleotide
  Target: SCNA; (-) strand; PAM type: YTN; PAM sequence: CTA
atattatgacatatctaaag

SEQ ID NO: 57422 - DNA, 20 bp, Artificial Sequence
  Description of Artificial Sequence: Synthetic oligonucleotide
  Target: SCNA; (-) strand; PAM type: YTN; PAM sequence: TTC
taatattatgacatatctaa

SEQ ID NO: 57423 - DNA, 20 bp, Artificial Sequence
  Description of Artificial Sequence: Synthetic oligonucleotide
  Target: SCNA; (-) strand; PAM type: YTN; PAM sequence: TTT
ctaatattatgacatatcta

SEQ ID NO: 57424 - DNA, 20 bp, Artificial Sequence
  Description of Artificial Sequence: Synthetic oligonucleotide
  Target: SCNA; (-) strand; PAM type: YTN; PAM sequence: TTA
atttctaatattatgacata

SEQ ID NO: 57425 - DNA, 20 bp, Artificial Sequence
  Description of Artificial Sequence: Synthetic oligonucleotide
  Target: SCNA; (-) strand; PAM type: YTN; PAM sequence: CTT
aatttctaatattatgacat

SEQ ID NO: 57426 - DNA, 20 bp, Artificial Sequence
  Description of Artificial Sequence: Synthetic oligonucleotide
  Target: SCNA; (-) strand; PAM type: YTN; PAM sequence: TTC
atccttaatttctaatatta

SEQ ID NO: 57427 - DNA, 20 bp, Artificial Sequence
  Description of Artificial Sequence: Synthetic oligonucleotide
  Target: SCNA; (-) strand; PAM type: YTN; PAM sequence: CTT
catccttaatttctaatatt

SEQ ID NO: 57428 - DNA, 20 bp, Artificial Sequence
  Description of Artificial Sequence: Synthetic oligonucleotide
  Target: SCNA; (-) strand; PAM type: YTN; PAM sequence: CTA
caaagcatagatagatagaa

SEQ ID NO: 57429 - DNA, 20 bp, Artificial Sequence
  Description of Artificial Sequence: Synthetic oligonucleotide
  Target: SCNA; (-) strand; PAM type: YTN; PAM sequence: TTG
tcctacaaagcatagataga

SEQ ID NO: 57430 - DNA, 20 bp, Artificial Sequence
  Description of Artificial Sequence: Synthetic oligonucleotide
  Target: SCNA; (-) strand; PAM type: YTN; PAM sequence: TTA
atataattgtcctacaaagc

SEQ ID NO: 57431 - DNA, 20 bp, Artificial Sequence
  Description of Artificial Sequence: Synthetic oligonucleotide
  Target: SCNA; (-) strand; PAM type: YTN; PAM sequence: TTG
ggattaatataattgtccta

SEQ ID NO: 57432 - DNA, 20 bp, Artificial Sequence
  Description of Artificial Sequence: Synthetic oligonucleotide
  Target: SCNA; (-) strand; PAM type: YTN; PAM sequence: TTT
gggattaatataattgtcct

SEQ ID NO: 57433 - DNA, 20 bp, Artificial Sequence
  Description of Artificial Sequence: Synthetic oligonucleotide
  Target: SCNA; (-) strand; PAM type: YTN; PAM sequence: CTT
tgggattaatataattgtcc

SEQ ID NO: 57434 - DNA, 20 bp, Artificial Sequence
  Description of Artificial Sequence: Synthetic oligonucleotide
  Target: SCNA; (-) strand; PAM type: YTN; PAM sequence: TTA
tgtcaggtaactttgggatt

SEQ ID NO: 57435 - DNA, 20 bp, Artificial Sequence
  Description of Artificial Sequence: Synthetic oligonucleotide
  Target: SCNA; (-) strand; PAM type: YTN; PAM sequence: CTT
atgtcaggtaactttgggat

SEQ ID NO: 57436 - DNA, 20 bp, Artificial Sequence
  Description of Artificial Sequence: Synthetic oligonucleotide
  Target: SCNA; (-) strand; PAM type: YTN; PAM sequence: CTA
cttatgtcaggtaactttgg

SEQ ID NO: 57437 - DNA, 20 bp, Artificial Sequence
  Description of Artificial Sequence: Synthetic oligonucleotide
  Target: SCNA; (-) strand; PAM type: YTN; PAM sequence: TTC
ctacttatgtcaggtaactt

SEQ ID NO: 57438 - DNA, 20 bp, Artificial Sequence
  Description of Artificial Sequence: Synthetic oligonucleotide
  Target: SCNA; (-) strand; PAM type: YTN; PAM sequence: CTT
cctacttatgtcaggtaact

SEQ ID NO: 57439 - DNA, 20 bp, Artificial Sequence
  Description of Artificial Sequence: Synthetic oligonucleotide
  Target: SCNA; (-) strand; PAM type: YTN; PAM sequence: CTA
tatatcagaagaggcatgtg

SEQ ID NO: 57440 - DNA, 20 bp, Artificial Sequence
  Description of Artificial Sequence: Synthetic oligonucleotide
  Target: SCNA; (-) strand; PAM type: YTN; PAM sequence: TTG
ctatatatcagaagaggcat

SEQ ID NO: 57441 - DNA, 20 bp, Artificial Sequence
  Description of Artificial Sequence: Synthetic oligonucleotide
  Target: SCNA; (-) strand; PAM type: YTN; PAM sequence: TTT
gctatatatcagaagaggca

SEQ ID NO: 57442 - DNA, 20 bp, Artificial Sequence
  Description of Artificial Sequence: Synthetic oligonucleotide
  Target: SCNA; (-) strand; PAM type: YTN; PAM sequence: TTA
tttgctatatatcagaagag

SEQ ID NO: 57443 - DNA, 20 bp, Artificial Sequence
  Description of Artificial Sequence: Synthetic oligonucleotide
  Target: SCNA; (-) strand; PAM type: YTN; PAM sequence: TTG
agtatatattatttgctata

SEQ ID NO: 57444 - DNA, 20 bp, Artificial Sequence
  Description of Artificial Sequence: Synthetic oligonucleotide
  Target: SCNA; (-) strand; PAM type: YTN; PAM sequence: CTC
agtggattgagtatatatta

SEQ ID NO: 57445 - DNA, 20 bp, Artificial Sequence
  Description of Artificial Sequence: Synthetic oligonucleotide
  Target: SCNA; (-) strand; PAM type: YTN; PAM sequence: TTG
ctcagtggattgagtatata

SEQ ID NO: 57446 - DNA, 20 bp, Artificial Sequence
  Description of Artificial Sequence: Synthetic oligonucleotide
  Target: SCNA; (-) strand; PAM type: YTN; PAM sequence: TTT
gctcagtggattgagtatat

SEQ ID NO: 57447 - DNA, 20 bp, Artificial Sequence
  Description of Artificial Sequence: Synthetic oligonucleotide
  Target: SCNA; (-) strand; PAM type: YTN; PAM sequence: TTT
tgctcagtggattgagtata

SEQ ID NO: 57448 - DNA, 20 bp, Artificial Sequence
  Description of Artificial Sequence: Synthetic oligonucleotide
  Target: SCNA; (-) strand; PAM type: YTN; PAM sequence: TTT
ttgctcagtggattgagtat

SEQ ID NO: 57449 - DNA, 20 bp, Artificial Sequence
  Description of Artificial Sequence: Synthetic oligonucleotide
  Target: SCNA; (-) strand; PAM type: YTN; PAM sequence: TTC
caatttttgctcagtggatt

SEQ ID NO: 57450 - DNA, 20 bp, Artificial Sequence
  Description of Artificial Sequence: Synthetic oligonucleotide
  Target: SCNA; (-) strand; PAM type: YTN; PAM sequence: TTG
aggttccaatttttgctcag

SEQ ID NO: 57451 - DNA, 20 bp, Artificial Sequence
  Description of Artificial Sequence: Synthetic oligonucleotide
  Target: SCNA; (-) strand; PAM type: YTN; PAM sequence: CTT
gaggttccaatttttgctca

SEQ ID NO: 57452 - DNA, 20 bp, Artificial Sequence
  Description of Artificial Sequence: Synthetic oligonucleotide
  Target: SCNA; (-) strand; PAM type: YTN; PAM sequence: TTG
ccttgaggttccaatttttg

SEQ ID NO: 57453 - DNA, 20 bp, Artificial Sequence
  Description of Artificial Sequence: Synthetic oligonucleotide
  Target: SCNA; (-) strand; PAM type: YTN; PAM sequence: TTT
gccttgaggttccaattttt

SEQ ID NO: 57454 - DNA, 20 bp, Artificial Sequence
  Description of Artificial Sequence: Synthetic oligonucleotide
  Target: SCNA; (-) strand; PAM type: YTN; PAM sequence: CTT
tgccttgaggttccaatttt

SEQ ID NO: 57455 - DNA, 20 bp, Artificial Sequence
  Description of Artificial Sequence: Synthetic oligonucleotide
  Target: SCNA; (-) strand; PAM type: YTN; PAM sequence: TTG
tacatacagctttgccttga

SEQ ID NO: 57456 - DNA, 20 bp, Artificial Sequence
  Description of Artificial Sequence: Synthetic oligonucleotide
  Target: SCNA; (-) strand; PAM type: YTN; PAM sequence: CTG
aggttgtacatacagctttg

SEQ ID NO: 57457 - DNA, 20 bp, Artificial Sequence
  Description of Artificial Sequence: Synthetic oligonucleotide
  Target: SCNA; (-) strand; PAM type: YTN; PAM sequence: TTC
tgaggttgtacatacagctt

SEQ ID NO: 57458 - DNA, 20 bp, Artificial Sequence
  Description of Artificial Sequence: Synthetic oligonucleotide
  Target: SCNA; (-) strand; PAM type: YTN; PAM sequence: TTT
ctgaggttgtacatacagct

SEQ ID NO: 57459 - DNA, 20 bp, Artificial Sequence
  Description of Artificial Sequence: Synthetic oligonucleotide
  Target: SCNA; (-) strand; PAM type: YTN; PAM sequence: TTT
tctgaggttgtacatacagc

SEQ ID NO: 57460 - DNA, 20 bp, Artificial Sequence
  Description of Artificial Sequence: Synthetic oligonucleotide
  Target: SCNA; (-) strand; PAM type: YTN; PAM sequence: TTC
atgccacacagattttctga

SEQ ID NO: 57461 - DNA, 20 bp, Artificial Sequence
  Description of Artificial Sequence: Synthetic oligonucleotide
  Target: SCNA; (-) strand; PAM type: YTN; PAM sequence: TTT
catgccacacagattttctg

SEQ ID NO: 57462 - DNA, 20 bp, Artificial Sequence
  Description of Artificial Sequence: Synthetic oligonucleotide
  Target: SCNA; (-) strand; PAM type: YTN; PAM sequence: TTA
cggtatttcatgccacacag

SEQ ID NO: 57463 - DNA, 20 bp, Artificial Sequence
  Description of Artificial Sequence: Synthetic oligonucleotide
  Target: SCNA; (-) strand; PAM type: YTN; PAM sequence: TTC
agtgtacgttacggtatttc

SEQ ID NO: 57464 - DNA, 20 bp, Artificial Sequence
  Description of Artificial Sequence: Synthetic oligonucleotide
  Target: SCNA; (-) strand; PAM type: YTN; PAM sequence: TTT
cagtgtacgttacggtattt

SEQ ID NO: 57465 - DNA, 20 bp, Artificial Sequence
  Description of Artificial Sequence: Synthetic oligonucleotide
  Target: SCNA; (-) strand; PAM type: YTN; PAM sequence: CTT
tcagtgtacgttacggtatt

SEQ ID NO: 57466 - DNA, 20 bp, Artificial Sequence
  Description of Artificial Sequence: Synthetic oligonucleotide
  Target: SCNA; (-) strand; PAM type: YTN; PAM sequence: TTG
ccctttcagtgtacgttacg

SEQ ID NO: 57467 - DNA, 20 bp, Artificial Sequence
  Description of Artificial Sequence: Synthetic oligonucleotide
  Target: SCNA; (-) strand; PAM type: YTN; PAM sequence: CTC
acaaaaatcgaaaattgccc

SEQ ID NO: 57468 - DNA, 20 bp, Artificial Sequence
  Description of Artificial Sequence: Synthetic oligonucleotide
  Target: SCNA; (-) strand; PAM type: YTN; PAM sequence: TTG
ggaatcctcacaaaaatcga

SEQ ID NO: 57469 - DNA, 20 bp, Artificial Sequence
  Description of Artificial Sequence: Synthetic oligonucleotide
  Target: SCNA; (-) strand; PAM type: YTN; PAM sequence: CTA
ttgggaatcctcacaaaaat

SEQ ID NO: 57470 - DNA, 20 bp, Artificial Sequence
  Description of Artificial Sequence: Synthetic oligonucleotide
  Target: SCNA; (-) strand; PAM type: YTN; PAM sequence: TTG
gctattgggaatcctcacaa

SEQ ID NO: 57471 - DNA, 20 bp, Artificial Sequence
  Description of Artificial Sequence: Synthetic oligonucleotide
  Target: SCNA; (-) strand; PAM type: YTN; PAM sequence: TTT
ggctattgggaatcctcaca

SEQ ID NO: 57472 - DNA, 20 bp, Artificial Sequence
  Description of Artificial Sequence: Synthetic oligonucleotide
  Target: SCNA; (-) strand; PAM type: YTN; PAM sequence: CTA
tttggctattgggaatcctc

SEQ ID NO: 57473 - DNA, 20 bp, Artificial Sequence
  Description of Artificial Sequence: Synthetic oligonucleotide
  Target: SCNA; (-) strand; PAM type: YTN; PAM sequence: TTC
tatttggctattgggaatcc

SEQ ID NO: 57474 - DNA, 20 bp, Artificial Sequence
  Description of Artificial Sequence: Synthetic oligonucleotide
  Target: SCNA; (-) strand; PAM type: YTN; PAM sequence: TTT
ctatttggctattgggaatc

SEQ ID NO: 57475 - DNA, 20 bp, Artificial Sequence
  Description of Artificial Sequence: Synthetic oligonucleotide
  Target: SCNA; (-) strand; PAM type: YTN; PAM sequence: TTT
tctatttggctattgggaat

SEQ ID NO: 57476 - DNA, 20 bp, Artificial Sequence
  Description of Artificial Sequence: Synthetic oligonucleotide
  Target: SCNA; (-) strand; PAM type: YTN; PAM sequence: TTT
ttctatttggctattgggaa

SEQ ID NO: 57477 - DNA, 20 bp, Artificial Sequence
  Description of Artificial Sequence: Synthetic oligonucleotide
  Target: SCNA; (-) strand; PAM type: YTN; PAM sequence: TTT
tttctatttggctattggga

SEQ ID NO: 57478 - DNA, 20 bp, Artificial Sequence
  Description of Artificial Sequence: Synthetic oligonucleotide
  Target: SCNA; (-) strand; PAM type: YTN; PAM sequence: TTT
ttttctatttggctattggg

SEQ ID NO: 57479 - DNA, 20 bp, Artificial Sequence
  Description of Artificial Sequence: Synthetic oligonucleotide
  Target: SCNA; (-) strand; PAM type: YTN; PAM sequence: CTT
tttttctatttggctattgg

SEQ ID NO: 57480 - DNA, 20 bp, Artificial Sequence
  Description of Artificial Sequence: Synthetic oligonucleotide
  Target: SCNA; (-) strand; PAM type: YTN; PAM sequence: TTC
acatgtatacacactttttt

SEQ ID NO: 57481 - DNA, 20 bp, Artificial Sequence
  Description of Artificial Sequence: Synthetic oligonucleotide
  Target: SCNA; (-) strand; PAM type: YTN; PAM sequence: CTC
caattcacatgtatacacac

SEQ ID NO: 57482 - DNA, 20 bp, Artificial Sequence
  Description of Artificial Sequence: Synthetic oligonucleotide
  Target: SCNA; (-) strand; PAM type: YTN; PAM sequence: TTA
atatcaagtcatctccaatt

SEQ ID NO: 57483 - DNA, 20 bp, Artificial Sequence
  Description of Artificial Sequence: Synthetic oligonucleotide
  Target: SCNA; (-) strand; PAM type: YTN; PAM sequence: CTT
aatatcaagtcatctccaat

SEQ ID NO: 57484 - DNA, 20 bp, Artificial Sequence
  Description of Artificial Sequence: Synthetic oligonucleotide
  Target: SCNA; (-) strand; PAM type: YTN; PAM sequence: CTG
acaatccttaatatcaagtc

SEQ ID NO: 57485 - DNA, 20 bp, Artificial Sequence
  Description of Artificial Sequence: Synthetic oligonucleotide
  Target: SCNA; (-) strand; PAM type: YTN; PAM sequence: TTA
caatggggtgacataagtct

SEQ ID NO: 57486 - DNA, 20 bp, Artificial Sequence
  Description of Artificial Sequence: Synthetic oligonucleotide
  Target: SCNA; (-) strand; PAM type: YTN; PAM sequence: CTT
acaatggggtgacataagtc

SEQ ID NO: 57487 - DNA, 20 bp, Artificial Sequence
  Description of Artificial Sequence: Synthetic oligonucleotide
  Target: SCNA; (-) strand; PAM type: YTN; PAM sequence: CTA
tgcttacaatggggtgacat

SEQ ID NO: 57488 - DNA, 20 bp, Artificial Sequence
  Description of Artificial Sequence: Synthetic oligonucleotide
  Target: SCNA; (-) strand; PAM type: YTN; PAM sequence: CTA
tctatgcttacaatggggtg

SEQ ID NO: 57489 - DNA, 20 bp, Artificial Sequence
  Description of Artificial Sequence: Synthetic oligonucleotide
  Target: SCNA; (-) strand; PAM type: YTN; PAM sequence: TTA
actatctatgcttacaatgg

SEQ ID NO: 57490 - DNA, 20 bp, Artificial Sequence
  Description of Artificial Sequence: Synthetic oligonucleotide
  Target: SCNA; (-) strand; PAM type: YTN; PAM sequence: TTT
aactatctatgcttacaatg

SEQ ID NO: 57491 - DNA, 20 bp, Artificial Sequence
  Description of Artificial Sequence: Synthetic oligonucleotide
  Target: SCNA; (-) strand; PAM type: YTN; PAM sequence: TTT
taactatctatgcttacaat

SEQ ID NO: 57492 - DNA, 20 bp, Artificial Sequence
  Description of Artificial Sequence: Synthetic oligonucleotide
  Target: SCNA; (-) strand; PAM type: YTN; PAM sequence: TTA
atgaaatcaaatagatttta

SEQ ID NO: 57493 - DNA, 20 bp, Artificial Sequence
  Description of Artificial Sequence: Synthetic oligonucleotide
  Target: SCNA; (-) strand; PAM type: YTN; PAM sequence: TTT
aatgaaatcaaatagatttt

SEQ ID NO: 57494 - DNA, 20 bp, Artificial Sequence
  Description of Artificial Sequence: Synthetic oligonucleotide
  Target: SCNA; (-) strand; PAM type: YTN; PAM sequence: TTA
atttaatgaaatcaaataga

SEQ ID NO: 57495 - DNA, 20 bp, Artificial Sequence
  Description of Artificial Sequence: Synthetic oligonucleotide
  Target: SCNA; (-) strand; PAM type: YTN; PAM sequence: TTT
aatttaatgaaatcaaatag

SEQ ID NO: 57496 - DNA, 20 bp, Artificial Sequence
  Description of Artificial Sequence: Synthetic oligonucleotide
  Target: SCNA; (-) strand; PAM type: YTN; PAM sequence: TTT
taatttaatgaaatcaaata

SEQ ID NO: 57497 - DNA, 20 bp, Artificial Sequence
  Description of Artificial Sequence: Synthetic oligonucleotide
  Target: SCNA; (-) strand; PAM type: YTN; PAM sequence: CTT
ttaatttaatgaaatcaaat

SEQ ID NO: 57498 - DNA, 20 bp, Artificial Sequence
  Description of Artificial Sequence: Synthetic oligonucleotide
  Target: SCNA; (-) strand; PAM type: YTN; PAM sequence: TTG
tgatgaataatgtacacttt

SEQ ID NO: 57499 - DNA, 20 bp, Artificial Sequence
  Description of Artificial Sequence: Synthetic oligonucleotide
  Target: SCNA; (-) strand; PAM type: YTN; PAM sequence: TTA
tggattgtgatgaataatgt

SEQ ID NO: 57500 - DNA, 20 bp, Artificial Sequence
  Description of Artificial Sequence: Synthetic oligonucleotide
  Target: SCNA; (-) strand; PAM type: YTN; PAM sequence: TTA
cattatggattgtgatgaat

SEQ ID NO: 57501 - DNA, 20 bp, Artificial Sequence
  Description of Artificial Sequence: Synthetic oligonucleotide
  Target: SCNA; (-) strand; PAM type: YTN; PAM sequence: TTC
agttacattatggattgtga

SEQ ID NO: 57502 - DNA, 20 bp, Artificial Sequence
  Description of Artificial Sequence: Synthetic oligonucleotide
  Target: SCNA; (-) strand; PAM type: YTN; PAM sequence: TTC
ataggaatgaattcagttac

SEQ ID NO: 57503 - DNA, 20 bp, Artificial Sequence
  Description of Artificial Sequence: Synthetic oligonucleotide
  Target: SCNA; (-) strand; PAM type: YTN; PAM sequence: TTC
agttcataggaatgaattca

SEQ ID NO: 57504 - DNA, 20 bp, Artificial Sequence
  Description of Artificial Sequence: Synthetic oligonucleotide
  Target: SCNA; (-) strand; PAM type: YTN; PAM sequence: TTG
gaattcagttcataggaatg

SEQ ID NO: 57505 - DNA, 20 bp, Artificial Sequence
  Description of Artificial Sequence: Synthetic oligonucleotide
  Target: SCNA; (-) strand; PAM type: YTN; PAM sequence: CTA
attggaattcagttcatagg

SEQ ID NO: 57506 - DNA, 20 bp, Artificial Sequence
  Description of Artificial Sequence: Synthetic oligonucleotide
  Target: SCNA; (-) strand; PAM type: YTN; PAM sequence: TTC
acaacaacaatatgataaat

SEQ ID NO: 57507 - DNA, 20 bp, Artificial Sequence
  Description of Artificial Sequence: Synthetic oligonucleotide
  Target: SCNA; (-) strand; PAM type: YTN; PAM sequence: CTG
gtgttcacaacaacaatatg

SEQ ID NO: 57508 - DNA, 20 bp, Artificial Sequence
  Description of Artificial Sequence: Synthetic oligonucleotide
  Target: SCNA; (-) strand; PAM type: YTN; PAM sequence: CTC
tggtgttcacaacaacaata

SEQ ID NO: 57509 - DNA, 20 bp, Artificial Sequence
  Description of Artificial Sequence: Synthetic oligonucleotide
  Target: SCNA; (-) strand; PAM type: YTN; PAM sequence: TTC
tctggtgttcacaacaacaa

SEQ ID NO: 57510 - DNA, 20 bp, Artificial Sequence
  Description of Artificial Sequence: Synthetic oligonucleotide
  Target: SCNA; (-) strand; PAM type: YTN; PAM sequence: TTT
ctctggtgttcacaacaaca

SEQ ID NO: 57511 - DNA, 20 bp, Artificial Sequence
  Description of Artificial Sequence: Synthetic oligonucleotide
  Target: SCNA; (-) strand; PAM type: YTN; PAM sequence: TTT
tctctggtgttcacaacaac

SEQ ID NO: 57512 - DNA, 20 bp, Artificial Sequence
  Description of Artificial Sequence: Synthetic oligonucleotide
  Target: SCNA; (-) strand; PAM type: YTN; PAM sequence: CTT
ttctctggtgttcacaacaa

SEQ ID NO: 57513 - DNA, 20 bp, Artificial Sequence
  Description of Artificial Sequence: Synthetic oligonucleotide
  Target: SCNA; (-) strand; PAM type: YTN; PAM sequence: CTA
cttttctctggtgttcacaa

SEQ ID NO: 57514 - DNA, 20 bp, Artificial Sequence
  Description of Artificial Sequence: Synthetic oligonucleotide
  Target: SCNA; (-) strand; PAM type: YTN; PAM sequence: CTG
tcctacttttctctggtgtt

SEQ ID NO: 57515 - DNA, 20 bp, Artificial Sequence
  Description of Artificial Sequence: Synthetic oligonucleotide
  Target: SCNA; (-) strand; PAM type: YTN; PAM sequence: TTA
gatgtgggactgtcctactt

SEQ ID NO: 57516 - DNA, 20 bp, Artificial Sequence
  Description of Artificial Sequence: Synthetic oligonucleotide
  Target: SCNA; (-) strand; PAM type: YTN; PAM sequence: CTT
agatgtgggactgtcctact

SEQ ID NO: 57517 - DNA, 20 bp, Artificial Sequence
  Description of Artificial Sequence: Synthetic oligonucleotide
  Target: SCNA; (-) strand; PAM type: YTN; PAM sequence: CTG
cttagatgtgggactgtcct

SEQ ID NO: 57518 - DNA, 20 bp, Artificial Sequence
  Description of Artificial Sequence: Synthetic oligonucleotide
  Target: SCNA; (-) strand; PAM type: YTN; PAM sequence: TTC
ctgcttagatgtgggactgt

SEQ ID NO: 57519 - DNA, 20 bp, Artificial Sequence
  Description of Artificial Sequence: Synthetic oligonucleotide
  Target: SCNA; (-) strand; PAM type: YTN; PAM sequence: CTT
cctgcttagatgtgggactg

SEQ ID NO: 57520 - DNA, 20 bp, Artificial Sequence
  Description of Artificial Sequence: Synthetic oligonucleotide
  Target: SCNA; (-) strand; PAM type: YTN; PAM sequence: TTA
tcttcctgcttagatgtggg

SEQ ID NO: 57521 - DNA, 20 bp, Artificial Sequence
  Description of Artificial Sequence: Synthetic oligonucleotide
  Target: SCNA; (-) strand; PAM type: YTN; PAM sequence: TTT
atcttcctgcttagatgtgg

SEQ ID NO: 57522 - DNA, 20 bp, Artificial Sequence
  Description of Artificial Sequence: Synthetic oligonucleotide
  Target: SCNA; (-) strand; PAM type: YTN; PAM sequence: TTT
tatcttcctgcttagatgtg

SEQ ID NO: 57523 - DNA, 20 bp, Artificial Sequence
  Description of Artificial Sequence: Synthetic oligonucleotide
  Target: SCNA; (-) strand; PAM type: YTN; PAM sequence: TTG
aacaagtaagtgaaaaaatg

SEQ ID NO: 57524 - DNA, 20 bp, Artificial Sequence
  Description of Artificial Sequence: Synthetic oligonucleotide
  Target: SCNA; (-) strand; PAM type: YTN; PAM sequence: TTA
ttgaacaagtaagtgaaaaa

SEQ ID NO: 57525 - DNA, 20 bp, Artificial Sequence
  Description of Artificial Sequence: Synthetic oligonucleotide
  Target: SCNA; (-) strand; PAM type: YTN; PAM sequence: TTT
attgaacaagtaagtgaaaa

SEQ ID NO: 57526 - DNA, 20 bp, Artificial Sequence
  Description of Artificial Sequence: Synthetic oligonucleotide
  Target: SCNA; (-) strand; PAM type: YTN; PAM sequence: TTA
tttattgaacaagtaagtga

SEQ ID NO: 57527 - DNA, 20 bp, Artificial Sequence
  Description of Artificial Sequence: Synthetic oligonucleotide
  Target: SCNA; (-) strand; PAM type: YTN; PAM sequence: TTG
aataaatagattatttattg

SEQ ID NO: 57528 - DNA, 20 bp, Artificial Sequence
  Description of Artificial Sequence: Synthetic oligonucleotide
  Target: SCNA; (-) strand; PAM type: YTN; PAM sequence: TTG
ttgaataaatagattattta

SEQ ID NO: 57529 - DNA, 20 bp, Artificial Sequence
  Description of Artificial Sequence: Synthetic oligonucleotide
  Target: SCNA; (-) strand; PAM type: YTN; PAM sequence: CTT
gttgaataaatagattattt

SEQ ID NO: 57530 - DNA, 20 bp, Artificial Sequence
  Description of Artificial Sequence: Synthetic oligonucleotide
  Target: SCNA; (-) strand; PAM type: YTN; PAM sequence: TTA
tgcttgttgaataaatagat

SEQ ID NO: 57531 - DNA, 20 bp, Artificial Sequence
  Description of Artificial Sequence: Synthetic oligonucleotide
  Target: SCNA; (-) strand; PAM type: YTN; PAM sequence: CTG
agccagaaattatgcttgtt

SEQ ID NO: 57532 - DNA, 20 bp, Artificial Sequence
  Description of Artificial Sequence: Synthetic oligonucleotide
  Target: SCNA; (-) strand; PAM type: YTN; PAM sequence: CTA
atgcaaagaatactgagcca

SEQ ID NO: 57533 - DNA, 20 bp, Artificial Sequence
  Description of Artificial Sequence: Synthetic oligonucleotide
  Target: SCNA; (-) strand; PAM type: YTN; PAM sequence: TTA
atgtcatagtgaatactaat

SEQ ID NO: 57534 - DNA, 20 bp, Artificial Sequence
  Description of Artificial Sequence: Synthetic oligonucleotide
  Target: SCNA; (-) strand; PAM type: YTN; PAM sequence: TTA
ttaatgtcatagtgaatact

SEQ ID NO: 57535 - DNA, 20 bp, Artificial Sequence
  Description of Artificial Sequence: Synthetic oligonucleotide
  Target: SCNA; (-) strand; PAM type: YTN; PAM sequence: CTT
attaatgtcatagtgaatac

SEQ ID NO: 57536 - DNA, 20 bp, Artificial Sequence
  Description of Artificial Sequence: Synthetic oligonucleotide
  Target: SCNA; (-) strand; PAM type: YTN; PAM sequence: TTC
ttattaatgtcatagtgaat

SEQ ID NO: 57537 - DNA, 20 bp, Artificial Sequence
  Description of Artificial Sequence: Synthetic oligonucleotide
  Target: SCNA; (-) strand; PAM type: YTN; PAM sequence: TTA
attcttattaatgtcatagt

SEQ ID NO: 57538 - DNA, 20 bp, Artificial Sequence
  Description of Artificial Sequence: Synthetic oligonucleotide
  Target: SCNA; (-) strand; PAM type: YTN; PAM sequence: TTT
aattcttattaatgtcatag

SEQ ID NO: 57539 - DNA, 20 bp, Artificial Sequence
  Description of Artificial Sequence: Synthetic oligonucleotide
  Target: SCNA; (-) strand; PAM type: YTN; PAM sequence: TTC
caaagtagcatttaattctt

SEQ ID NO: 57540 - DNA, 20 bp, Artificial Sequence
  Description of Artificial Sequence: Synthetic oligonucleotide
  Target: SCNA; (-) strand; PAM type: YTN; PAM sequence: TTG
tgaaaattccaaagtagcat

SEQ ID NO: 57541 - DNA, 20 bp, Artificial Sequence
  Description of Artificial Sequence: Synthetic oligonucleotide
  Target: SCNA; (-) strand; PAM type: YTN; PAM sequence: CTT
gtgaaaattccaaagtagca

SEQ ID NO: 57542 - DNA, 20 bp, Artificial Sequence
  Description of Artificial Sequence: Synthetic oligonucleotide
  Target: SCNA; (-) strand; PAM type: YTN; PAM sequence: TTA
cttgtgaaaattccaaagta

SEQ ID NO: 57543 - DNA, 20 bp, Artificial Sequence
  Description of Artificial Sequence: Synthetic oligonucleotide
  Target: SCNA; (-) strand; PAM type: YTN; PAM sequence: CTA
agcagttacttgtgaaaatt

SEQ ID NO: 57544 - DNA, 20 bp, Artificial Sequence
  Description of Artificial Sequence: Synthetic oligonucleotide
  Target: SCNA; (-) strand; PAM type: YTN; PAM sequence: CTG
gaatcactaagcagttactt

SEQ ID NO: 57545 - DNA, 20 bp, Artificial Sequence
  Description of Artificial Sequence: Synthetic oligonucleotide
  Target: SCNA; (-) strand; PAM type: YTN; PAM sequence: TTC
tggaatcactaagcagttac

SEQ ID NO: 57546 - DNA, 20 bp, Artificial Sequence
  Description of Artificial Sequence: Synthetic oligonucleotide
  Target: SCNA; (-) strand; PAM type: YTN; PAM sequence: CTA
ccaggtgattctggaatcac

SEQ ID NO: 57547 - DNA, 20 bp, Artificial Sequence
  Description of Artificial Sequence: Synthetic oligonucleotide
  Target: SCNA; (-) strand; PAM type: YTN; PAM sequence: TTC
taccaggtgattctggaatc

SEQ ID NO: 57548 - DNA, 20 bp, Artificial Sequence
  Description of Artificial Sequence: Synthetic oligonucleotide
  Target: SCNA; (-) strand; PAM type: YTN; PAM sequence: CTT
ctaccaggtgattctggaat

SEQ ID NO: 57549 - DNA, 20 bp, Artificial Sequence
  Description of Artificial Sequence: Synthetic oligonucleotide
  Target: SCNA; (-) strand; PAM type: YTN; PAM sequence: TTA
aatatccccttctaccaggt

SEQ ID NO: 57550 - DNA, 20 bp, Artificial Sequence
  Description of Artificial Sequence: Synthetic oligonucleotide
  Target: SCNA; (-) strand; PAM type: YTN; PAM sequence: TTT
aaatatccccttctaccagg

SEQ ID NO: 57551 - DNA, 20 bp, Artificial Sequence
  Description of Artificial Sequence: Synthetic oligonucleotide
  Target: SCNA; (-) strand; PAM type: YTN; PAM sequence: TTG
caatttaaatatccccttct

SEQ ID NO: 57552 - DNA, 20 bp, Artificial Sequence
  Description of Artificial Sequence: Synthetic oligonucleotide
  Target: SCNA; (-) strand; PAM type: YTN; PAM sequence: TTA
agttgcaatttaaatatccc

SEQ ID NO: 57553 - DNA, 20 bp, Artificial Sequence
  Description of Artificial Sequence: Synthetic oligonucleotide
  Target: SCNA; (-) strand; PAM type: YTN; PAM sequence: TTT
aagttgcaatttaaatatcc

SEQ ID NO: 57554 - DNA, 20 bp, Artificial Sequence
  Description of Artificial Sequence: Synthetic oligonucleotide
  Target: SCNA; (-) strand; PAM type: YTN; PAM sequence: TTT
taagttgcaatttaaatatc

SEQ ID NO: 57555 - DNA, 20 bp, Artificial Sequence
  Description of Artificial Sequence: Synthetic oligonucleotide
  Target: SCNA; (-) strand; PAM type: YTN; PAM sequence: TTT
ttaagttgcaatttaaatat

SEQ ID NO: 57556 - DNA, 20 bp, Artificial Sequence
  Description of Artificial Sequence: Synthetic oligonucleotide
  Target: SCNA; (-) strand; PAM type: YTN; PAM sequence: TTG
gatttttaagttgcaattta

SEQ ID NO: 57557 - DNA, 20 bp, Artificial Sequence
  Description of Artificial Sequence: Synthetic oligonucleotide
  Target: SCNA; (-) strand; PAM type: YTN; PAM sequence: TTT
ggatttttaagttgcaattt

SEQ ID NO: 57558 - DNA, 20 bp, Artificial Sequence
  Description of Artificial Sequence: Synthetic oligonucleotide
  Target: SCNA; (-) strand; PAM type: YTN; PAM sequence: TTA
acaacatttggatttttaag

SEQ ID NO: 57559 - DNA, 20 bp, Artificial Sequence
  Description of Artificial Sequence: Synthetic oligonucleotide
  Target: SCNA; (-) strand; PAM type: YTN; PAM sequence: TTT
aacaacatttggatttttaa

SEQ ID NO: 57560 - DNA, 20 bp, Artificial Sequence
  Description of Artificial Sequence: Synthetic oligonucleotide
  Target: SCNA; (-) strand; PAM type: YTN; PAM sequence: TTT
taacaacatttggattttta

SEQ ID NO: 57561 - DNA, 20 bp, Artificial Sequence
  Description of Artificial Sequence: Synthetic oligonucleotide
  Target: SCNA; (-) strand; PAM type: YTN; PAM sequence: CTT
ttaacaacatttggattttt

SEQ ID NO: 57562 - DNA, 20 bp, Artificial Sequence
  Description of Artificial Sequence: Synthetic oligonucleotide
  Target: SCNA; (-) strand; PAM type: YTN; PAM sequence: TTA
aaacttttaacaacatttgg

SEQ ID NO: 57563 - DNA, 20 bp, Artificial Sequence
  Description of Artificial Sequence: Synthetic oligonucleotide
  Target: SCNA; (-) strand; PAM type: YTN; PAM sequence: TTA
ttaaaacttttaacaacatt

SEQ ID NO: 57564 - DNA, 20 bp, Artificial Sequence
  Description of Artificial Sequence: Synthetic oligonucleotide
  Target: SCNA; (-) strand; PAM type: YTN; PAM sequence: TTT
attaaaacttttaacaacat

SEQ ID NO: 57565 - DNA, 20 bp, Artificial Sequence
  Description of Artificial Sequence: Synthetic oligonucleotide
  Target: SCNA; (-) strand; PAM type: YTN; PAM sequence: TTT
tattaaaacttttaacaaca

SEQ ID NO: 57566 - DNA, 20 bp, Artificial Sequence
  Description of Artificial Sequence: Synthetic oligonucleotide
  Target: SCNA; (-) strand; PAM type: YTN; PAM sequence: TTA
taagaaattttattaaaact

SEQ ID NO: 57567 - DNA, 20 bp, Artificial Sequence
  Description of Artificial Sequence: Synthetic oligonucleotide
  Target: SCNA; (-) strand; PAM type: YTN; PAM sequence: TTT
ataagaaattttattaaaac

SEQ ID NO: 57568 - DNA, 20 bp, Artificial Sequence
  Description of Artificial Sequence: Synthetic oligonucleotide
  Target: SCNA; (-) strand; PAM type: YTN; PAM sequence: TTT
tataagaaattttattaaaa

SEQ ID NO: 57569 - DNA, 20 bp, Artificial Sequence
  Description of Artificial Sequence: Synthetic oligonucleotide
  Target: SCNA; (-) strand; PAM type: YTN; PAM sequence: TTT
ttataagaaattttattaaa

SEQ ID NO: 57570 - DNA, 20 bp, Artificial Sequence
  Description of Artificial Sequence: Synthetic oligonucleotide
  Target: SCNA; (-) strand; PAM type: YTN; PAM sequence: CTC
gtatatgaagtaatttttat

SEQ ID NO: 57571 - DNA, 20 bp, Artificial Sequence
  Description of Artificial Sequence: Synthetic oligonucleotide
  Target: SCNA; (-) strand; PAM type: YTN; PAM sequence: TTG
tcaactcgtatatgaagtaa

SEQ ID NO: 57572 - DNA, 20 bp, Artificial Sequence
  Description of Artificial Sequence: Synthetic oligonucleotide
  Target: SCNA; (-) strand; PAM type: YTN; PAM sequence: TTT
gtcaactcgtatatgaagta

SEQ ID NO: 57573 - DNA, 20 bp, Artificial Sequence
  Description of Artificial Sequence: Synthetic oligonucleotide
  Target: SCNA; (-) strand; PAM type: YTN; PAM sequence: CTA
caaggagaaaatgaacaatt

SEQ ID NO: 57574 - DNA, 20 bp, Artificial Sequence
  Description of Artificial Sequence: Synthetic oligonucleotide
  Target: SCNA; (-) strand; PAM type: YTN; PAM sequence: TTC
tacaaggagaaaatgaacaa

SEQ ID NO: 57575 - DNA, 20 bp, Artificial Sequence
  Description of Artificial Sequence: Synthetic oligonucleotide
  Target: SCNA; (-) strand; PAM type: YTN; PAM sequence: CTT
ctacaaggagaaaatgaaca

SEQ ID NO: 57576 - DNA, 20 bp, Artificial Sequence
  Description of Artificial Sequence: Synthetic oligonucleotide
  Target: SCNA; (-) strand; PAM type: YTN; PAM sequence: TTC
ttctacaaggagaaaatgaa

SEQ ID NO: 57577 - DNA, 20 bp, Artificial Sequence
  Description of Artificial Sequence: Synthetic oligonucleotide
  Target: SCNA; (-) strand; PAM type: YTN; PAM sequence: TTG
ttcttctacaaggagaaaat

SEQ ID NO: 57578 - DNA, 20 bp, Artificial Sequence
  Description of Artificial Sequence: Synthetic oligonucleotide
  Target: SCNA; (-) strand; PAM type: YTN; PAM sequence: TTA
attgttcttctacaaggaga

SEQ ID NO: 57579 - DNA, 20 bp, Artificial Sequence
  Description of Artificial Sequence: Synthetic oligonucleotide
  Target: SCNA; (-) strand; PAM type: YTN; PAM sequence: TTT
aattgttcttctacaaggag

SEQ ID NO: 57580 - DNA, 20 bp, Artificial Sequence
  Description of Artificial Sequence: Synthetic oligonucleotide
  Target: SCNA; (-) strand; PAM type: YTN; PAM sequence: CTC
atcaatttaattgttcttct

SEQ ID NO: 57581 - DNA, 20 bp, Artificial Sequence
  Description of Artificial Sequence: Synthetic oligonucleotide
  Target: SCNA; (-) strand; PAM type: YTN; PAM sequence: TTA
gatgatacatctcatcaatt

SEQ ID NO: 57582 - DNA, 20 bp, Artificial Sequence
  Description of Artificial Sequence: Synthetic oligonucleotide
  Target: SCNA; (-) strand; PAM type: YTN; PAM sequence: TTA
cgtgtatgagagttagatga

SEQ ID NO: 57583 - DNA, 20 bp, Artificial Sequence
  Description of Artificial Sequence: Synthetic oligonucleotide
  Target: SCNA; (-) strand; PAM type: YTN; PAM sequence: TTG
tcatgcaaatatataattac

SEQ ID NO: 57584 - DNA, 20 bp, Artificial Sequence
  Description of Artificial Sequence: Synthetic oligonucleotide
  Target: SCNA; (-) strand; PAM type: YTN; PAM sequence: TTT
gtcatgcaaatatataatta

SEQ ID NO: 57585 - DNA, 20 bp, Artificial Sequence
  Description of Artificial Sequence: Synthetic oligonucleotide
  Target: SCNA; (-) strand; PAM type: YTN; PAM sequence: TTG
tatttgtcatgcaaatatat

SEQ ID NO: 57586 - DNA, 20 bp, Artificial Sequence
  Description of Artificial Sequence: Synthetic oligonucleotide
  Target: SCNA; (-) strand; PAM type: YTN; PAM sequence: TTC
aagggtacagaaatgaggta

SEQ ID NO: 57587 - DNA, 20 bp, Artificial Sequence
  Description of Artificial Sequence: Synthetic oligonucleotide
  Target: SCNA; (-) strand; PAM type: YTN; PAM sequence: TTA
cgtgatattcaagggtacag

SEQ ID NO: 57588 - DNA, 20 bp, Artificial Sequence
  Description of Artificial Sequence: Synthetic oligonucleotide
  Target: SCNA; (-) strand; PAM type: YTN; PAM sequence: TTT
acgtgatattcaagggtaca

SEQ ID NO: 57589 - DNA, 20 bp, Artificial Sequence
  Description of Artificial Sequence: Synthetic oligonucleotide
  Target: SCNA; (-) strand; PAM type: YTN; PAM sequence: TTA
aaaatcaggacaaaatatgt

SEQ ID NO: 57590 - DNA, 20 bp, Artificial Sequence
  Description of Artificial Sequence: Synthetic oligonucleotide
  Target: SCNA; (-) strand; PAM type: YTN; PAM sequence: TTT
aaaaatcaggacaaaatatg

SEQ ID NO: 57591 - DNA, 20 bp, Artificial Sequence
  Description of Artificial Sequence: Synthetic oligonucleotide
  Target: SCNA; (-) strand; PAM type: YTN; PAM sequence: TTC
aaagtatttaaaaatcagga

SEQ ID NO: 57592 - DNA, 20 bp, Artificial Sequence
  Description of Artificial Sequence: Synthetic oligonucleotide
  Target: SCNA; (-) strand; PAM type: YTN; PAM sequence: CTA
ttcaaagtatttaaaaatca

SEQ ID NO: 57593 - DNA, 20 bp, Artificial Sequence
  Description of Artificial Sequence: Synthetic oligonucleotide
  Target: SCNA; (-) strand; PAM type: YTN; PAM sequence: CTC
aaactattcaaagtatttaa

SEQ ID NO: 57594 - DNA, 20 bp, Artificial Sequence
  Description of Artificial Sequence: Synthetic oligonucleotide
  Target: SCNA; (-) strand; PAM type: YTN; PAM sequence: TTC
tcaaactattcaaagtattt

SEQ ID NO: 57595 - DNA, 20 bp, Artificial Sequence
  Description of Artificial Sequence: Synthetic oligonucleotide
  Target: SCNA; (-) strand; PAM type: YTN; PAM sequence: TTG
gttctcaaactattcaaagt

SEQ ID NO: 57596 - DNA, 20 bp, Artificial Sequence
  Description of Artificial Sequence: Synthetic oligonucleotide
  Target: SCNA; (-) strand; PAM type: YTN; PAM sequence: TTT
ggttctcaaactattcaaag

SEQ ID NO: 57597 - DNA, 20 bp, Artificial Sequence
  Description of Artificial Sequence: Synthetic oligonucleotide
  Target: SCNA; (-) strand; PAM type: YTN; PAM sequence: TTT
tggttctcaaactattcaaa

SEQ ID NO: 57598 - DNA, 20 bp, Artificial Sequence
  Description of Artificial Sequence: Synthetic oligonucleotide
  Target: SCNA; (-) strand; PAM type: YTN; PAM sequence: CTT
ttggttctcaaactattcaa

SEQ ID NO: 57599 - DNA, 20 bp, Artificial Sequence
  Description of Artificial Sequence: Synthetic oligonucleotide
  Target: SCNA; (-) strand; PAM type: YTN; PAM sequence: TTG
tcaaaagaggtcttttggtt

SEQ ID NO: 57600 - DNA, 20 bp, Artificial Sequence
  Description of Artificial Sequence: Synthetic oligonucleotide
  Target: SCNA; (-) strand; PAM type: YTN; PAM sequence: TTA
tcaagaggaaattgtcaaaa

SEQ ID NO: 57601 - DNA, 20 bp, Artificial Sequence
  Description of Artificial Sequence: Synthetic oligonucleotide
  Target: SCNA; (-) strand; PAM type: YTN; PAM sequence: TTT
atcaagaggaaattgtcaaa

SEQ ID NO: 57602 - DNA, 20 bp, Artificial Sequence
  Description of Artificial Sequence: Synthetic oligonucleotide
  Target: SCNA; (-) strand; PAM type: YTN; PAM sequence: CTT
tatcaagaggaaattgtcaa

SEQ ID NO: 57603 - DNA, 20 bp, Artificial Sequence
  Description of Artificial Sequence: Synthetic oligonucleotide
  Target: SCNA; (-) strand; PAM type: YTN; PAM sequence: TTG
ctttatcaagaggaaattgt

SEQ ID NO: 57604 - DNA, 20 bp, Artificial Sequence
  Description of Artificial Sequence: Synthetic oligonucleotide
  Target: SCNA; (-) strand; PAM type: YTN; PAM sequence: TTT
gctttatcaagaggaaattg

SEQ ID NO: 57605 - DNA, 20 bp, Artificial Sequence
  Description of Artificial Sequence: Synthetic oligonucleotide
  Target: SCNA; (-) strand; PAM type: YTN; PAM sequence: CTA
tttgctttatcaagaggaaa

SEQ ID NO: 57606 - DNA, 20 bp, Artificial Sequence
  Description of Artificial Sequence: Synthetic oligonucleotide
  Target: SCNA; (-) strand; PAM type: YTN; PAM sequence: TTG
atgatgctatttgctttatc

SEQ ID NO: 57607 - DNA, 20 bp, Artificial Sequence
  Description of Artificial Sequence: Synthetic oligonucleotide
  Target: SCNA; (-) strand; PAM type: YTN; PAM sequence: TTA
gggagacattgatgatgcta

SEQ ID NO: 57608 - DNA, 20 bp, Artificial Sequence
  Description of Artificial Sequence: Synthetic oligonucleotide
  Target: SCNA; (-) strand; PAM type: YTN; PAM sequence: TTT
agggagacattgatgatgct

SEQ ID NO: 57609 - DNA, 20 bp, Artificial Sequence
  Description of Artificial Sequence: Synthetic oligonucleotide
  Target: SCNA; (-) strand; PAM type: YTN; PAM sequence: TTT
tagggagacattgatgatgc

SEQ ID NO: 57610 - DNA, 20 bp, Artificial Sequence
  Description of Artificial Sequence: Synthetic oligonucleotide
  Target: SCNA; (-) strand; PAM type: YTN; PAM sequence: TTA
agttttagggagacattgat

SEQ ID NO: 57611 - DNA, 20 bp, Artificial Sequence
  Description of Artificial Sequence: Synthetic oligonucleotide
  Target: SCNA; (-) strand; PAM type: YTN; PAM sequence: TTT
aagttttagggagacattga

SEQ ID NO: 57612 - DNA, 20 bp, Artificial Sequence
  Description of Artificial Sequence: Synthetic oligonucleotide
  Target: SCNA; (-) strand; PAM type: YTN; PAM sequence: TTT
taagttttagggagacattg

SEQ ID NO: 57613 - DNA, 20 bp, Artificial Sequence
  Description of Artificial Sequence: Synthetic oligonucleotide
  Target: SCNA; (-) strand; PAM type: YTN; PAM sequence: CTT
ttaagttttagggagacatt

SEQ ID NO: 57614 - DNA, 20 bp, Artificial Sequence
  Description of Artificial Sequence: Synthetic oligonucleotide
  Target: SCNA; (-) strand; PAM type: YTN; PAM sequence: TTA
gcttttaagttttagggaga

SEQ ID NO: 57615 - DNA, 20 bp, Artificial Sequence
  Description of Artificial Sequence: Synthetic oligonucleotide
  Target: SCNA; (-) strand; PAM type: YTN; PAM sequence: CTG
ttagcttttaagttttaggg

SEQ ID NO: 57616 - DNA, 20 bp, Artificial Sequence
  Description of Artificial Sequence: Synthetic oligonucleotide
  Target: SCNA; (-) strand; PAM type: YTN; PAM sequence: TTC
aagcataggctgttagcttt

SEQ ID NO: 57617 - DNA, 20 bp, Artificial Sequence
  Description of Artificial Sequence: Synthetic oligonucleotide
  Target: SCNA; (-) strand; PAM type: YTN; PAM sequence: CTT
caagcataggctgttagctt

SEQ ID NO: 57618 - DNA, 20 bp, Artificial Sequence
  Description of Artificial Sequence: Synthetic oligonucleotide
  Target: SCNA; (-) strand; PAM type: YTN; PAM sequence: CTG
ccccttcaagcataggctgt

SEQ ID NO: 57619 - DNA, 20 bp, Artificial Sequence
  Description of Artificial Sequence: Synthetic oligonucleotide
  Target: SCNA; (-) strand; PAM type: YTN; PAM sequence: TTC
tgccccttcaagcataggct

SEQ ID NO: 57620 - DNA, 20 bp, Artificial Sequence
  Description of Artificial Sequence: Synthetic oligonucleotide
  Target: SCNA; (-) strand; PAM type: YTN; PAM sequence: TTT
ctgccccttcaagcataggc

SEQ ID NO: 57621 - DNA, 20 bp, Artificial Sequence
  Description of Artificial Sequence: Synthetic oligonucleotide
  Target: SCNA; (-) strand; PAM type: YTN; PAM sequence: TTT
tctgccccttcaagcatagg

SEQ ID NO: 57622 - DNA, 20 bp, Artificial Sequence
  Description of Artificial Sequence: Synthetic oligonucleotide
  Target: SCNA; (-) strand; PAM type: YTN; PAM sequence: CTT
ttctgccccttcaagcatag

SEQ ID NO: 57623 - DNA, 20 bp, Artificial Sequence
  Description of Artificial Sequence: Synthetic oligonucleotide
  Target: SCNA; (-) strand; PAM type: YTN; PAM sequence: TTG
acttttctgccccttcaagc

SEQ ID NO: 57624 - DNA, 20 bp, Artificial Sequence
  Description of Artificial Sequence: Synthetic oligonucleotide
  Target: SCNA; (-) strand; PAM type: YTN; PAM sequence: CTT
gacttttctgccccttcaag

SEQ ID NO: 57625 - DNA, 20 bp, Artificial Sequence
  Description of Artificial Sequence: Synthetic oligonucleotide
  Target: SCNA; (-) strand; PAM type: YTN; PAM sequence: CTA
aaaagtaagaaataacttga

SEQ ID NO: 57626 - DNA, 20 bp, Artificial Sequence
  Description of Artificial Sequence: Synthetic oligonucleotide
  Target: SCNA; (-) strand; PAM type: YTN; PAM sequence: TTG
tccctaaaaagtaagaaata

SEQ ID NO: 57627 - DNA, 20 bp, Artificial Sequence
  Description of Artificial Sequence: Synthetic oligonucleotide
  Target: SCNA; (-) strand; PAM type: YTN; PAM sequence: TTT
gtccctaaaaagtaagaaat

SEQ ID NO: 57628 - DNA, 20 bp, Artificial Sequence
  Description of Artificial Sequence: Synthetic oligonucleotide
  Target: SCNA; (-) strand; PAM type: YTN; PAM sequence: CTG
tttgtccctaaaaagtaaga

SEQ ID NO: 57629 - DNA, 20 bp, Artificial Sequence
  Description of Artificial Sequence: Synthetic oligonucleotide
  Target: SCNA; (-) strand; PAM type: YTN; PAM sequence: CTA
caatgataaacaacctgttt

SEQ ID NO: 57630 - DNA, 20 bp, Artificial Sequence
  Description of Artificial Sequence: Synthetic oligonucleotide
  Target: SCNA; (-) strand; PAM type: YTN; PAM sequence: CTC
caactacaatgataaacaac

SEQ ID NO: 57631 - DNA, 20 bp, Artificial Sequence
  Description of Artificial Sequence: Synthetic oligonucleotide
  Target: SCNA; (-) strand; PAM type: YTN; PAM sequence: TTG
tctccaactacaatgataaa

SEQ ID NO: 57632 - DNA, 20 bp, Artificial Sequence
  Description of Artificial Sequence: Synthetic oligonucleotide
  Target: SCNA; (-) strand; PAM type: YTN; PAM sequence: CTT
gtctccaactacaatgataa

SEQ ID NO: 57633 - DNA, 20 bp, Artificial Sequence
  Description of Artificial Sequence: Synthetic oligonucleotide
  Target: SCNA; (-) strand; PAM type: YTN; PAM sequence: TTC
catatatcttgtctccaact

SEQ ID NO: 57634 - DNA, 20 bp, Artificial Sequence
  Description of Artificial Sequence: Synthetic oligonucleotide
  Target: SCNA; (-) strand; PAM type: YTN; PAM sequence: TTA
ttccatatatcttgtctcca

SEQ ID NO: 57635 - DNA, 20 bp, Artificial Sequence
  Description of Artificial Sequence: Synthetic oligonucleotide
  Target: SCNA; (-) strand; PAM type: YTN; PAM sequence: TTA
tatattattccatatatctt

SEQ ID NO: 57636 - DNA, 20 bp, Artificial Sequence
  Description of Artificial Sequence: Synthetic oligonucleotide
  Target: SCNA; (-) strand; PAM type: YTN; PAM sequence: TTT
atatattattccatatatct

SEQ ID NO: 57637 - DNA, 20 bp, Artificial Sequence
  Description of Artificial Sequence: Synthetic oligonucleotide
  Target: SCNA; (-) strand; PAM type: YTN; PAM sequence: TTA
ggtgacgggcataaatagga

SEQ ID NO: 57638 - DNA, 20 bp, Artificial Sequence
  Description of Artificial Sequence: Synthetic oligonucleotide
  Target: SCNA; (-) strand; PAM type: YTN; PAM sequence: TTT
aggtgacgggcataaatagg

SEQ ID NO: 57639 - DNA, 20 bp, Artificial Sequence
  Description of Artificial Sequence: Synthetic oligonucleotide
  Target: SCNA; (-) strand; PAM type: YTN; PAM sequence: TTA
tatgtttaggtgacgggcat

SEQ ID NO: 57640 - DNA, 20 bp, Artificial Sequence
  Description of Artificial Sequence: Synthetic oligonucleotide
  Target: SCNA; (-) strand; PAM type: YTN; PAM sequence: CTT
atatgtttaggtgacgggca

SEQ ID NO: 57641 - DNA, 20 bp, Artificial Sequence
  Description of Artificial Sequence: Synthetic oligonucleotide
  Target: SCNA; (-) strand; PAM type: YTN; PAM sequence: TTG
gaaaaatagcacttatatgt

SEQ ID NO: 57642 - DNA, 20 bp, Artificial Sequence
  Description of Artificial Sequence: Synthetic oligonucleotide
  Target: SCNA; (-) strand; PAM type: YTN; PAM sequence: CTT
ggaaaaatagcacttatatg

SEQ ID NO: 57643 - DNA, 20 bp, Artificial Sequence
  Description of Artificial Sequence: Synthetic oligonucleotide
  Target: SCNA; (-) strand; PAM type: YTN; PAM sequence: TTG
ataataaacttggaaaaata

SEQ ID NO: 57644 - DNA, 20 bp, Artificial Sequence
  Description of Artificial Sequence: Synthetic oligonucleotide
  Target: SCNA; (-) strand; PAM type: YTN; PAM sequence: TTT
gataataaacttggaaaaat

SEQ ID NO: 57645 - DNA, 20 bp, Artificial Sequence
  Description of Artificial Sequence: Synthetic oligonucleotide
  Target: SCNA; (-) strand; PAM type: YTN; PAM sequence: TTG
taatttgataataaacttgg

SEQ ID NO: 57646 - DNA, 20 bp, Artificial Sequence
  Description of Artificial Sequence: Synthetic oligonucleotide
  Target: SCNA; (-) strand; PAM type: YTN; PAM sequence: TTT
gtaatttgataataaacttg

SEQ ID NO: 57647 - DNA, 20 bp, Artificial Sequence
  Description of Artificial Sequence: Synthetic oligonucleotide
  Target: SCNA; (-) strand; PAM type: YTN; PAM sequence: CTT
tgtaatttgataataaactt

SEQ ID NO: 57648 - DNA, 20 bp, Artificial Sequence
  Description of Artificial Sequence: Synthetic oligonucleotide
  Target: SCNA; (-) strand; PAM type: YTN; PAM sequence: TTC
cactttgtaatttgataata

SEQ ID NO: 57649 - DNA, 20 bp, Artificial Sequence
  Description of Artificial Sequence: Synthetic oligonucleotide
  Target: SCNA; (-) strand; PAM type: YTN; PAM sequence: TTT
ccactttgtaatttgataat

SEQ ID NO: 57650 - DNA, 20 bp, Artificial Sequence
  Description of Artificial Sequence: Synthetic oligonucleotide
  Target: SCNA; (-) strand; PAM type: YTN; PAM sequence: CTG
agccatatttccactttgta

SEQ ID NO: 57651 - DNA, 20 bp, Artificial Sequence
  Description of Artificial Sequence: Synthetic oligonucleotide
  Target: SCNA; (-) strand; PAM type: YTN; PAM sequence: CTA
ccatctgagccatatttcca

SEQ ID NO: 57652 - DNA, 20 bp, Artificial Sequence
  Description of Artificial Sequence: Synthetic oligonucleotide
  Target: SCNA; (-) strand; PAM type: YTN; PAM sequence: CTA
ctaccatctgagccatattt

SEQ ID NO: 57653 - DNA, 20 bp, Artificial Sequence
  Description of Artificial Sequence: Synthetic oligonucleotide
  Target: SCNA; (-) strand; PAM type: YTN; PAM sequence: CTC
tactaccatctgagccatat

SEQ ID NO: 57654 - DNA, 20 bp, Artificial Sequence
  Description of Artificial Sequence: Synthetic oligonucleotide
  Target: SCNA; (-) strand; PAM type: YTN; PAM sequence: TTA
cctctactaccatctgagcc

SEQ ID NO: 57655 - DNA, 20 bp, Artificial Sequence
  Description of Artificial Sequence: Synthetic oligonucleotide
  Target: SCNA; (-) strand; PAM type: YTN; PAM sequence: TTT
acctctactaccatctgagc

SEQ ID NO: 57656 - DNA, 20 bp, Artificial Sequence
  Description of Artificial Sequence: Synthetic oligonucleotide
  Target: SCNA; (-) strand; PAM type: YTN; PAM sequence: TTT
tacctctactaccatctgag

SEQ ID NO: 57657 - DNA, 20 bp, Artificial Sequence
  Description of Artificial Sequence: Synthetic oligonucleotide
  Target: SCNA; (-) strand; PAM type: YTN; PAM sequence: TTT
ttacctctactaccatctga

SEQ ID NO: 57658 - DNA, 20 bp, Artificial Sequence
  Description of Artificial Sequence: Synthetic oligonucleotide
  Target: SCNA; (-) strand; PAM type: YTN; PAM sequence: TTG
tttttacctctactaccatc

SEQ ID NO: 57659 - DNA, 20 bp, Artificial Sequence
  Description of Artificial Sequence: Synthetic oligonucleotide
  Target: SCNA; (-) strand; PAM type: YTN; PAM sequence: TTT
gtttttacctctactaccat

SEQ ID NO: 57660 - DNA, 20 bp, Artificial Sequence
  Description of Artificial Sequence: Synthetic oligonucleotide
  Target: SCNA; (-) strand; PAM type: YTN; PAM sequence: TTA
ggtttgtttttacctctact

SEQ ID NO: 57661 - DNA, 20 bp, Artificial Sequence
  Description of Artificial Sequence: Synthetic oligonucleotide
  Target: SCNA; (-) strand; PAM type: YTN; PAM sequence: CTT
aggtttgtttttacctctac

SEQ ID NO: 57662 - DNA, 20 bp, Artificial Sequence
  Description of Artificial Sequence: Synthetic oligonucleotide
  Target: SCNA; (-) strand; PAM type: YTN; PAM sequence: TTA
catgacttaggtttgttttt

SEQ ID NO: 57663 - DNA, 20 bp, Artificial Sequence
  Description of Artificial Sequence: Synthetic oligonucleotide
  Target: SCNA; (-) strand; PAM type: YTN; PAM sequence: CTT
acatgacttaggtttgtttt

SEQ ID NO: 57664 - DNA, 20 bp, Artificial Sequence
  Description of Artificial Sequence: Synthetic oligonucleotide
  Target: SCNA; (-) strand; PAM type: YTN; PAM sequence: CTC
atcttacatgacttaggttt

SEQ ID NO: 57665 - DNA, 20 bp, Artificial Sequence
  Description of Artificial Sequence: Synthetic oligonucleotide
  Target: SCNA; (-) strand; PAM type: YTN; PAM sequence: TTA
ctcatcttacatgacttagg

SEQ ID NO: 57666 - DNA, 20 bp, Artificial Sequence
  Description of Artificial Sequence: Synthetic oligonucleotide
  Target: SCNA; (-) strand; PAM type: YTN; PAM sequence: CTT
actcatcttacatgacttag

SEQ ID NO: 57667 - DNA, 20 bp, Artificial Sequence
  Description of Artificial Sequence: Synthetic oligonucleotide
  Target: SCNA; (-) strand; PAM type: YTN; PAM sequence: TTA
gacttactcatcttacatga

SEQ ID NO: 57668 - DNA, 20 bp, Artificial Sequence
  Description of Artificial Sequence: Synthetic oligonucleotide
  Target: SCNA; (-) strand; PAM type: YTN; PAM sequence: TTT
agacttactcatcttacatg

SEQ ID NO: 57669 - DNA, 20 bp, Artificial Sequence
  Description of Artificial Sequence: Synthetic oligonucleotide
  Target: SCNA; (-) strand; PAM type: YTN; PAM sequence: CTT
tagacttactcatcttacat

SEQ ID NO: 57670 - DNA, 20 bp, Artificial Sequence
  Description of Artificial Sequence: Synthetic oligonucleotide
  Target: SCNA; (-) strand; PAM type: YTN; PAM sequence: TTA
gatctttagacttactcatc

SEQ ID NO: 57671 - DNA, 20 bp, Artificial Sequence
  Description of Artificial Sequence: Synthetic oligonucleotide
  Target: SCNA; (-) strand; PAM type: YTN; PAM sequence: TTG
tacattagatctttagactt

SEQ ID NO: 57672 - DNA, 20 bp, Artificial Sequence
  Description of Artificial Sequence: Synthetic oligonucleotide
  Target: SCNA; (-) strand; PAM type: YTN; PAM sequence: TTC
atgttgtacattagatcttt

SEQ ID NO: 57673 - DNA, 20 bp, Artificial Sequence
  Description of Artificial Sequence: Synthetic oligonucleotide
  Target: SCNA; (-) strand; PAM type: YTN; PAM sequence: CTT
catgttgtacattagatctt

SEQ ID NO: 57674 - DNA, 20 bp, Artificial Sequence
  Description of Artificial Sequence: Synthetic oligonucleotide
  Target: SCNA; (-) strand; PAM type: YTN; PAM sequence: TTA
acaataatcttcatgttgta

SEQ ID NO: 57675 - DNA, 20 bp, Artificial Sequence
  Description of Artificial Sequence: Synthetic oligonucleotide
  Target: SCNA; (-) strand; PAM type: YTN; PAM sequence: TTA
ttaacaataatcttcatgtt

SEQ ID NO: 57676 - DNA, 20 bp, Artificial Sequence
  Description of Artificial Sequence: Synthetic oligonucleotide
  Target: SCNA; (-) strand; PAM type: YTN; PAM sequence: CTA
caatattattaacaataatc

SEQ ID NO: 57677 - DNA, 20 bp, Artificial Sequence
  Description of Artificial Sequence: Synthetic oligonucleotide
  Target: SCNA; (-) strand; PAM type: YTN; PAM sequence: TTA
ccagtatgcactacaatatt

SEQ ID NO: 57678 - DNA, 20 bp, Artificial Sequence
  Description of Artificial Sequence: Synthetic oligonucleotide
  Target: SCNA; (-) strand; PAM type: YTN; PAM sequence: TTG
aaaaattaccagtatgcact

SEQ ID NO: 57679 - DNA, 20 bp, Artificial Sequence
  Description of Artificial Sequence: Synthetic oligonucleotide
  Target: SCNA; (-) strand; PAM type: YTN; PAM sequence: CTT
gaaaaattaccagtatgcac

SEQ ID NO: 57680 - DNA, 20 bp, Artificial Sequence
  Description of Artificial Sequence: Synthetic oligonucleotide
  Target: SCNA; (-) strand; PAM type: YTN; PAM sequence: TTC
ttgaaaaattaccagtatgc

SEQ ID NO: 57681 - DNA, 20 bp, Artificial Sequence
  Description of Artificial Sequence: Synthetic oligonucleotide
  Target: SCNA; (-) strand; PAM type: YTN; PAM sequence: TTT
cttgaaaaattaccagtatg

SEQ ID NO: 57682 - DNA, 20 bp, Artificial Sequence
  Description of Artificial Sequence: Synthetic oligonucleotide
  Target: SCNA; (-) strand; PAM type: YTN; PAM sequence: CTT
tcttgaaaaattaccagtat

SEQ ID NO: 57683 - DNA, 20 bp, Artificial Sequence
  Description of Artificial Sequence: Synthetic oligonucleotide
  Target: SCNA; (-) strand; PAM type: YTN; PAM sequence: CTA
ctttcttgaaaaattaccag

SEQ ID NO: 57684 - DNA, 20 bp, Artificial Sequence
  Description of Artificial Sequence: Synthetic oligonucleotide
  Target: SCNA; (-) strand; PAM type: YTN; PAM sequence: CTA
aaatctactttcttgaaaaa

SEQ ID NO: 57685 - DNA, 20 bp, Artificial Sequence
  Description of Artificial Sequence: Synthetic oligonucleotide
  Target: SCNA; (-) strand; PAM type: YTN; PAM sequence: CTA
tcagtgcctaaaatctactt

SEQ ID NO: 57686 - DNA, 20 bp, Artificial Sequence
  Description of Artificial Sequence: Synthetic oligonucleotide
  Target: SCNA; (-) strand; PAM type: YTN; PAM sequence: TTA
ctatcagtgcctaaaatcta

SEQ ID NO: 57687 - DNA, 20 bp, Artificial Sequence
  Description of Artificial Sequence: Synthetic oligonucleotide
  Target: SCNA; (-) strand; PAM type: YTN; PAM sequence: TTT
actatcagtgcctaaaatct

SEQ ID NO: 57688 - DNA, 20 bp, Artificial Sequence
  Description of Artificial Sequence: Synthetic oligonucleotide
  Target: SCNA; (-) strand; PAM type: YTN; PAM sequence: TTT
tactatcagtgcctaaaatc

SEQ ID NO: 57689 - DNA, 20 bp, Artificial Sequence
  Description of Artificial Sequence: Synthetic oligonucleotide
  Target: SCNA; (-) strand; PAM type: YTN; PAM sequence: TTT
ttactatcagtgcctaaaat

SEQ ID NO: 57690 - DNA, 20 bp, Artificial Sequence
  Description of Artificial Sequence: Synthetic oligonucleotide
  Target: SCNA; (-) strand; PAM type: YTN; PAM sequence: TTT
tttactatcagtgcctaaaa

SEQ ID NO: 57691 - DNA, 20 bp, Artificial Sequence
  Description of Artificial Sequence: Synthetic oligonucleotide
  Target: SCNA; (-) strand; PAM type: YTN; PAM sequence: CTT
ttttactatcagtgcctaaa

SEQ ID NO: 57692 - DNA, 20 bp, Artificial Sequence
  Description of Artificial Sequence: Synthetic oligonucleotide
  Target: SCNA; (-) strand; PAM type: YTN; PAM sequence: TTG
cttttttactatcagtgcct

SEQ ID NO: 57693 - DNA, 20 bp, Artificial Sequence
  Description of Artificial Sequence: Synthetic oligonucleotide
  Target: SCNA; (-) strand; PAM type: YTN; PAM sequence: TTT
gcttttttactatcagtgcc

SEQ ID NO: 57694 - DNA, 20 bp, Artificial Sequence
  Description of Artificial Sequence: Synthetic oligonucleotide
  Target: SCNA; (-) strand; PAM type: YTN; PAM sequence: CTT
tgcttttttactatcagtgc

SEQ ID NO: 57695 - DNA, 20 bp, Artificial Sequence
  Description of Artificial Sequence: Synthetic oligonucleotide
  Target: SCNA; (-) strand; PAM type: YTN; PAM sequence: TTA
tctttgcttttttactatca

SEQ ID NO: 57696 - DNA, 20 bp, Artificial Sequence
  Description of Artificial Sequence: Synthetic oligonucleotide
  Target: SCNA; (-) strand; PAM type: YTN; PAM sequence: TTA
acatacccatcatcatatgg

SEQ ID NO: 57697 - DNA, 20 bp, Artificial Sequence
  Description of Artificial Sequence: Synthetic oligonucleotide
  Target: SCNA; (-) strand; PAM type: YTN; PAM sequence: TTG
aagcaaattaacatacccat

SEQ ID NO: 57698 - DNA, 20 bp, Artificial Sequence
  Description of Artificial Sequence: Synthetic oligonucleotide
  Target: SCNA; (-) strand; PAM type: YTN; PAM sequence: CTA
cattgaagcaaattaacata

SEQ ID NO: 57699 - DNA, 20 bp, Artificial Sequence
  Description of Artificial Sequence: Synthetic oligonucleotide
  Target: SCNA; (-) strand; PAM type: YTN; PAM sequence: TTC
ctacattgaagcaaattaac

SEQ ID NO: 57700 - DNA, 20 bp, Artificial Sequence
  Description of Artificial Sequence: Synthetic oligonucleotide
  Target: SCNA; (-) strand; PAM type: YTN; PAM sequence: TTA
tatatatatataatatacac

SEQ ID NO: 57701 - DNA, 20 bp, Artificial Sequence
  Description of Artificial Sequence: Synthetic oligonucleotide
  Target: SCNA; (-) strand; PAM type: YTN; PAM sequence: TTT
atatatatatataatataca

SEQ ID NO: 57702 - DNA, 20 bp, Artificial Sequence
  Description of Artificial Sequence: Synthetic oligonucleotide
  Target: SCNA; (-) strand; PAM type: YTN; PAM sequence: TTA
tttatatatatatataatat

SEQ ID NO: 57703 - DNA, 20 bp, Artificial Sequence
  Description of Artificial Sequence: Synthetic oligonucleotide
  Target: SCNA; (-) strand; PAM type: YTN; PAM sequence: TTT
atttatatatatatataata

SEQ ID NO: 57704 - DNA, 20 bp, Artificial Sequence
  Description of Artificial Sequence: Synthetic oligonucleotide
  Target: SCNA; (-) strand; PAM type: YTN; PAM sequence: CTT
tatttatatatatatataat

SEQ ID NO: 57705 - DNA, 20 bp, Artificial Sequence
  Description of Artificial Sequence: Synthetic oligonucleotide
  Target: SCNA; (-) strand; PAM type: YTN; PAM sequence: TTA
tctttatttatatatatata

SEQ ID NO: 57706 - DNA, 20 bp, Artificial Sequence
  Description of Artificial Sequence: Synthetic oligonucleotide
  Target: SCNA; (-) strand; PAM type: YTN; PAM sequence: CTT
atctttatttatatatatat

SEQ ID NO: 57707 - DNA, 20 bp, Artificial Sequence
  Description of Artificial Sequence: Synthetic oligonucleotide
  Target: SCNA; (-) strand; PAM type: YTN; PAM sequence: TTG
agatacttatctttatttat

SEQ ID NO: 57708 - DNA, 20 bp, Artificial Sequence
  Description of Artificial Sequence: Synthetic oligonucleotide
  Target: SCNA; (-) strand; PAM type: YTN; PAM sequence: TTT
gagatacttatctttattta

SEQ ID NO: 57709 - DNA, 20 bp, Artificial Sequence
  Description of Artificial Sequence: Synthetic oligonucleotide
  Target: SCNA; (-) strand; PAM type: YTN; PAM sequence: TTT
tgagatacttatctttattt

SEQ ID NO: 57710 - DNA, 20 bp, Artificial Sequence
  Description of Artificial Sequence: Synthetic oligonucleotide
  Target: SCNA; (-) strand; PAM type: YTN; PAM sequence: TTG
tacagcatgatgttttgaga

SEQ ID NO: 57711 - DNA, 20 bp, Artificial Sequence
  Description of Artificial Sequence: Synthetic oligonucleotide
  Target: SCNA; (-) strand; PAM type: YTN; PAM sequence: TTA
agttgtacagcatgatgttt

SEQ ID NO: 57712 - DNA, 20 bp, Artificial Sequence
  Description of Artificial Sequence: Synthetic oligonucleotide
  Target: SCNA; (-) strand; PAM type: YTN; PAM sequence: TTT
aagttgtacagcatgatgtt

SEQ ID NO: 57713 - DNA, 20 bp, Artificial Sequence
  Description of Artificial Sequence: Synthetic oligonucleotide
  Target: SCNA; (-) strand; PAM type: YTN; PAM sequence: TTG
tatacatttaagttgtacag

SEQ ID NO: 57714 - DNA, 20 bp, Artificial Sequence
  Description of Artificial Sequence: Synthetic oligonucleotide
  Target: SCNA; (-) strand; PAM type: YTN; PAM sequence: TTA
attgtatacatttaagttgt

SEQ ID NO: 57715 - DNA, 20 bp, Artificial Sequence
  Description of Artificial Sequence: Synthetic oligonucleotide
  Target: SCNA; (-) strand; PAM type: YTN; PAM sequence: TTT
aattgtatacatttaagttg

SEQ ID NO: 57716 - DNA, 20 bp, Artificial Sequence
  Description of Artificial Sequence: Synthetic oligonucleotide
  Target: SCNA; (-) strand; PAM type: YTN; PAM sequence: TTT
taattgtatacatttaagtt

SEQ ID NO: 57717 - DNA, 20 bp, Artificial Sequence
  Description of Artificial Sequence: Synthetic oligonucleotide
  Target: SCNA; (-) strand; PAM type: YTN; PAM sequence: TTT
ttaattgtatacatttaagt

SEQ ID NO: 57718 - DNA, 20 bp, Artificial Sequence
  Description of Artificial Sequence: Synthetic oligonucleotide
  Target: SCNA; (-) strand; PAM type: YTN; PAM sequence: TTA
tttttaattgtatacattta

SEQ ID NO: 57719 - DNA, 20 bp, Artificial Sequence
  Description of Artificial Sequence: Synthetic oligonucleotide
  Target: SCNA; (-) strand; PAM type: YTN; PAM sequence: TTG
taaaattatttttaattgta

SEQ ID NO: 57720 - DNA, 20 bp, Artificial Sequence
  Description of Artificial Sequence: Synthetic oligonucleotide
  Target: SCNA; (-) strand; PAM type: YTN; PAM sequence: TTG
tattgtaaaattatttttaa

SEQ ID NO: 57721 - DNA, 20 bp, Artificial Sequence
  Description of Artificial Sequence: Synthetic oligonucleotide
  Target: SCNA; (-) strand; PAM type: YTN; PAM sequence: TTA
gttgtattgtaaaattattt

SEQ ID NO: 57722 - DNA, 20 bp, Artificial Sequence
  Description of Artificial Sequence: Synthetic oligonucleotide
  Target: SCNA; (-) strand; PAM type: YTN; PAM sequence: CTT
agttgtattgtaaaattatt

SEQ ID NO: 57723 - DNA, 20 bp, Artificial Sequence
  Description of Artificial Sequence: Synthetic oligonucleotide
  Target: SCNA; (-) strand; PAM type: YTN; PAM sequence: TTC
aaacttagttgtattgtaaa

SEQ ID NO: 57724 - DNA, 20 bp, Artificial Sequence
  Description of Artificial Sequence: Synthetic oligonucleotide
  Target: SCNA; (-) strand; PAM type: YTN; PAM sequence: CTT
caaacttagttgtattgtaa

SEQ ID NO: 57725 - DNA, 20 bp, Artificial Sequence
  Description of Artificial Sequence: Synthetic oligonucleotide
  Target: SCNA; (-) strand; PAM type: YTN; PAM sequence: TTA
aatgtaggatgacttcaaac

SEQ ID NO: 57726 - DNA, 20 bp, Artificial Sequence
  Description of Artificial Sequence: Synthetic oligonucleotide
  Target: SCNA; (-) strand; PAM type: YTN; PAM sequence: CTG
ttaaatgtaggatgacttca

SEQ ID NO: 57727 - DNA, 20 bp, Artificial Sequence
  Description of Artificial Sequence: Synthetic oligonucleotide
  Target: SCNA; (-) strand; PAM type: YTN; PAM sequence: TTA
atgagatactgttaaatgta

SEQ ID NO: 57728 - DNA, 20 bp, Artificial Sequence
  Description of Artificial Sequence: Synthetic oligonucleotide
  Target: SCNA; (-) strand; PAM type: YTN; PAM sequence: TTC
attaatgagatactgttaaa

SEQ ID NO: 57729 - DNA, 20 bp, Artificial Sequence
  Description of Artificial Sequence: Synthetic oligonucleotide
  Target: SCNA; (-) strand; PAM type: YTN; PAM sequence: TTT
cattaatgagatactgttaa

SEQ ID NO: 57730 - DNA, 20 bp, Artificial Sequence
  Description of Artificial Sequence: Synthetic oligonucleotide
  Target: SCNA; (-) strand; PAM type: YTN; PAM sequence: CTG
gtttcattaatgagatactg

SEQ ID NO: 57731 - DNA, 20 bp, Artificial Sequence
  Description of Artificial Sequence: Synthetic oligonucleotide
  Target: SCNA; (-) strand; PAM type: YTN; PAM sequence: TTG
ctggtttcattaatgagata

SEQ ID NO: 57732 - DNA, 20 bp, Artificial Sequence
  Description of Artificial Sequence: Synthetic oligonucleotide
  Target: SCNA; (-) strand; PAM type: YTN; PAM sequence: TTT
gctggtttcattaatgagat

SEQ ID NO: 57733 - DNA, 20 bp, Artificial Sequence
  Description of Artificial Sequence: Synthetic oligonucleotide
  Target: SCNA; (-) strand; PAM type: YTN; PAM sequence: TTT
tgctggtttcattaatgaga

SEQ ID NO: 57734 - DNA, 20 bp, Artificial Sequence
  Description of Artificial Sequence: Synthetic oligonucleotide
  Target: SCNA; (-) strand; PAM type: YTN; PAM sequence: TTG
caaagatggcatgataattt

SEQ ID NO: 57735 - DNA, 20 bp, Artificial Sequence
  Description of Artificial Sequence: Synthetic oligonucleotide
  Target: SCNA; (-) strand; PAM type: YTN; PAM sequence: CTT
gcaaagatggcatgataatt

SEQ ID NO: 57736 - DNA, 20 bp, Artificial Sequence
  Description of Artificial Sequence: Synthetic oligonucleotide
  Target: SCNA; (-) strand; PAM type: YTN; PAM sequence: TTC
acttgcaaagatggcatgat

SEQ ID NO: 57737 - DNA, 20 bp, Artificial Sequence
  Description of Artificial Sequence: Synthetic oligonucleotide
  Target: SCNA; (-) strand; PAM type: YTN; PAM sequence: CTT
cacttgcaaagatggcatga

SEQ ID NO: 57738 - DNA, 20 bp, Artificial Sequence
  Description of Artificial Sequence: Synthetic oligonucleotide
  Target: SCNA; (-) strand; PAM type: YTN; PAM sequence: TTC
cttcacttgcaaagatggca

SEQ ID NO: 57739 - DNA, 20 bp, Artificial Sequence
  Description of Artificial Sequence: Synthetic oligonucleotide
  Target: SCNA; (-) strand; PAM type: YTN; PAM sequence: TTA
gtattccttcacttgcaaag

SEQ ID NO: 57740 - DNA, 20 bp, Artificial Sequence
  Description of Artificial Sequence: Synthetic oligonucleotide
  Target: SCNA; (-) strand; PAM type: YTN; PAM sequence: TTG
ttagtattccttcacttgca

SEQ ID NO: 57741 - DNA, 20 bp, Artificial Sequence
  Description of Artificial Sequence: Synthetic oligonucleotide
  Target: SCNA; (-) strand; PAM type: YTN; PAM sequence: CTA
ttgttagtattccttcactt

SEQ ID NO: 57742 - DNA, 20 bp, Artificial Sequence
  Description of Artificial Sequence: Synthetic oligonucleotide
  Target: SCNA; (-) strand; PAM type: YTN; PAM sequence: CTA
acgtctattgttagtattcc

SEQ ID NO: 57743 - DNA, 20 bp, Artificial Sequence
  Description of Artificial Sequence: Synthetic oligonucleotide
  Target: SCNA; (-) strand; PAM type: YTN; PAM sequence: CTG
tgcatgtgctaacgtctatt

SEQ ID NO: 57744 - DNA, 20 bp, Artificial Sequence
  Description of Artificial Sequence: Synthetic oligonucleotide
  Target: SCNA; (-) strand; PAM type: YTN; PAM sequence: TTA
ctgtgcatgtgctaacgtct

SEQ ID NO: 57745 - DNA, 20 bp, Artificial Sequence
  Description of Artificial Sequence: Synthetic oligonucleotide
  Target: SCNA; (-) strand; PAM type: YTN; PAM sequence: TTT
actgtgcatgtgctaacgtc

SEQ ID NO: 57746 - DNA, 20 bp, Artificial Sequence
  Description of Artificial Sequence: Synthetic oligonucleotide
  Target: SCNA; (-) strand; PAM type: YTN; PAM sequence: TTT
tactgtgcatgtgctaacgt

SEQ ID NO: 57747 - DNA, 20 bp, Artificial Sequence
  Description of Artificial Sequence: Synthetic oligonucleotide
  Target: SCNA; (-) strand; PAM type: YTN; PAM sequence: TTT
ttactgtgcatgtgctaacg

SEQ ID NO: 57748 - DNA, 20 bp, Artificial Sequence
  Description of Artificial Sequence: Synthetic oligonucleotide
  Target: SCNA; (-) strand; PAM type: YTN; PAM sequence: CTG
tgaacccatttttactgtgc

SEQ ID NO: 57749 - DNA, 20 bp, Artificial Sequence
  Description of Artificial Sequence: Synthetic oligonucleotide
  Target: SCNA; (-) strand; PAM type: YTN; PAM sequence: TTC
tgtgaacccatttttactgt

SEQ ID NO: 57750 - DNA, 20 bp, Artificial Sequence
  Description of Artificial Sequence: Synthetic oligonucleotide
  Target: SCNA; (-) strand; PAM type: YTN; PAM sequence: CTT
ctgtgaacccatttttactg

SEQ ID NO: 57751 - DNA, 20 bp, Artificial Sequence
  Description of Artificial Sequence: Synthetic oligonucleotide
  Target: SCNA; (-) strand; PAM type: YTN; PAM sequence: CTG
caacgtgagagcaatgacca

SEQ ID NO: 57752 - DNA, 20 bp, Artificial Sequence
  Description of Artificial Sequence: Synthetic oligonucleotide
  Target: SCNA; (-) strand; PAM type: YTN; PAM sequence: CTG
tggactgcaacgtgagagca

SEQ ID NO: 57753 - DNA, 20 bp, Artificial Sequence
  Description of Artificial Sequence: Synthetic oligonucleotide
  Target: SCNA; (-) strand; PAM type: YTN; PAM sequence: TTC
tgtggactgcaacgtgagag

SEQ ID NO: 57754 - DNA, 20 bp, Artificial Sequence
  Description of Artificial Sequence: Synthetic oligonucleotide
  Target: SCNA; (-) strand; PAM type: YTN; PAM sequence: TTA
aaattctgtggactgcaacg

SEQ ID NO: 57755 - DNA, 20 bp, Artificial Sequence
  Description of Artificial Sequence: Synthetic oligonucleotide
  Target: SCNA; (-) strand; PAM type: YTN; PAM sequence: CTT
aaaattctgtggactgcaac

SEQ ID NO: 57756 - DNA, 20 bp, Artificial Sequence
  Description of Artificial Sequence: Synthetic oligonucleotide
  Target: SCNA; (-) strand; PAM type: YTN; PAM sequence: TTA
acatagcttaaaattctgtg

SEQ ID NO: 57757 - DNA, 20 bp, Artificial Sequence
  Description of Artificial Sequence: Synthetic oligonucleotide
  Target: SCNA; (-) strand; PAM type: YTN; PAM sequence: TTT
aacatagcttaaaattctgt

SEQ ID NO: 57758 - DNA, 20 bp, Artificial Sequence
  Description of Artificial Sequence: Synthetic oligonucleotide
  Target: SCNA; (-) strand; PAM type: YTN; PAM sequence: TTC
ataaatgtttaacatagctt

SEQ ID NO: 57759 - DNA, 20 bp, Artificial Sequence
  Description of Artificial Sequence: Synthetic oligonucleotide
  Target: SCNA; (-) strand; PAM type: YTN; PAM sequence: CTT
cataaatgtttaacatagct

SEQ ID NO: 57760 - DNA, 20 bp, Artificial Sequence
  Description of Artificial Sequence: Synthetic oligonucleotide
  Target: SCNA; (-) strand; PAM type: YTN; PAM sequence: TTC
cttcataaatgtttaacata

SEQ ID NO: 57761 - DNA, 20 bp, Artificial Sequence
  Description of Artificial Sequence: Synthetic oligonucleotide
  Target: SCNA; (-) strand; PAM type: YTN; PAM sequence: TTG
ttccttcataaatgtttaac

SEQ ID NO: 57762 - DNA, 20 bp, Artificial Sequence
  Description of Artificial Sequence: Synthetic oligonucleotide
  Target: SCNA; (-) strand; PAM type: YTN; PAM sequence: CTT
gttccttcataaatgtttaa

SEQ ID NO: 57763 - DNA, 20 bp, Artificial Sequence
  Description of Artificial Sequence: Synthetic oligonucleotide
  Target: SCNA; (-) strand; PAM type: YTN; PAM sequence: TTC
ccttgttccttcataaatgt

SEQ ID NO: 57764 - DNA, 20 bp, Artificial Sequence
  Description of Artificial Sequence: Synthetic oligonucleotide
  Target: SCNA; (-) strand; PAM type: YTN; PAM sequence: CTT
cccttgttccttcataaatg

SEQ ID NO: 57765 - DNA, 20 bp, Artificial Sequence
  Description of Artificial Sequence: Synthetic oligonucleotide
  Target: SCNA; (-) strand; PAM type: YTN; PAM sequence: TTG
tgcacttcccttgttccttc

SEQ ID NO: 57766 - DNA, 20 bp, Artificial Sequence
  Description of Artificial Sequence: Synthetic oligonucleotide
  Target: SCNA; (-) strand; PAM type: YTN; PAM sequence: TTT
gtgcacttcccttgttcctt

SEQ ID NO: 57767 - DNA, 20 bp, Artificial Sequence
  Description of Artificial Sequence: Synthetic oligonucleotide
  Target: SCNA; (-) strand; PAM type: YTN; PAM sequence: TTA
aatcatatttgtgcacttcc

SEQ ID NO: 57768 - DNA, 20 bp, Artificial Sequence
  Description of Artificial Sequence: Synthetic oligonucleotide
  Target: SCNA; (-) strand; PAM type: YTN; PAM sequence: TTT
aaatcatatttgtgcacttc

SEQ ID NO: 57769 - DNA, 20 bp, Artificial Sequence
  Description of Artificial Sequence: Synthetic oligonucleotide
  Target: SCNA; (-) strand; PAM type: YTN; PAM sequence: TTA
caccaacaaataggtttaaa

SEQ ID NO: 57770 - DNA, 20 bp, Artificial Sequence
  Description of Artificial Sequence: Synthetic oligonucleotide
  Target: SCNA; (-) strand; PAM type: YTN; PAM sequence: CTG
catcacgttacaccaacaaa

SEQ ID NO: 57771 - DNA, 20 bp, Artificial Sequence
  Description of Artificial Sequence: Synthetic oligonucleotide
  Target: SCNA; (-) strand; PAM type: YTN; PAM sequence: TTA
taggatgagtgggatagaac

SEQ ID NO: 57772 - DNA, 20 bp, Artificial Sequence
  Description of Artificial Sequence: Synthetic oligonucleotide
  Target: SCNA; (-) strand; PAM type: YTN; PAM sequence: TTG
tcaaagaaatgtattatagg

SEQ ID NO: 57773 - DNA, 20 bp, Artificial Sequence
  Description of Artificial Sequence: Synthetic oligonucleotide
  Target: SCNA; (-) strand; PAM type: YTN; PAM sequence: TTT
gtcaaagaaatgtattatag

SEQ ID NO: 57774 - DNA, 20 bp, Artificial Sequence
  Description of Artificial Sequence: Synthetic oligonucleotide
  Target: SCNA; (-) strand; PAM type: YTN; PAM sequence: TTG
tttgtcaaagaaatgtatta

SEQ ID NO: 57775 - DNA, 20 bp, Artificial Sequence
  Description of Artificial Sequence: Synthetic oligonucleotide
  Target: SCNA; (-) strand; PAM type: YTN; PAM sequence: TTT
gtttgtcaaagaaatgtatt

SEQ ID NO: 57776 - DNA, 20 bp, Artificial Sequence
  Description of Artificial Sequence: Synthetic oligonucleotide
  Target: SCNA; (-) strand; PAM type: YTN; PAM sequence: TTT
tgtttgtcaaagaaatgtat

SEQ ID NO: 57777 - DNA, 20 bp, Artificial Sequence
  Description of Artificial Sequence: Synthetic oligonucleotide
  Target: SCNA; (-) strand; PAM type: YTN; PAM sequence: TTG
cgatgatagttttgtttgtc

SEQ ID NO: 57778 - DNA, 20 bp, Artificial Sequence
  Description of Artificial Sequence: Synthetic oligonucleotide
  Target: SCNA; (-) strand; PAM type: YTN; PAM sequence: CTG
attgcgatgatagttttgtt

SEQ ID NO: 57779 - DNA, 20 bp, Artificial Sequence
  Description of Artificial Sequence: Synthetic oligonucleotide
  Target: SCNA; (-) strand; PAM type: YTN; PAM sequence: TTC
aaagaactgattgcgatgat

SEQ ID NO: 57780 - DNA, 20 bp, Artificial Sequence
  Description of Artificial Sequence: Synthetic oligonucleotide
  Target: SCNA; (-) strand; PAM type: YTN; PAM sequence: TTA
atattcaaagaactgattgc

SEQ ID NO: 57781 - DNA, 20 bp, Artificial Sequence
  Description of Artificial Sequence: Synthetic oligonucleotide
  Target: SCNA; (-) strand; PAM type: YTN; PAM sequence: TTT
aatattcaaagaactgattg

SEQ ID NO: 57782 - DNA, 20 bp, Artificial Sequence
  Description of Artificial Sequence: Synthetic oligonucleotide
  Target: SCNA; (-) strand; PAM type: YTN; PAM sequence: TTT
taatattcaaagaactgatt

SEQ ID NO: 57783 - DNA, 20 bp, Artificial Sequence
  Description of Artificial Sequence: Synthetic oligonucleotide
  Target: SCNA; (-) strand; PAM type: YTN; PAM sequence: CTA
tacatccaattttaatattc

SEQ ID NO: 57784 - DNA, 20 bp, Artificial Sequence
  Description of Artificial Sequence: Synthetic oligonucleotide
  Target: SCNA; (-) strand; PAM type: YTN; PAM sequence: TTA
caatcccacaacatatgcat

SEQ ID NO: 57785 - DNA, 20 bp, Artificial Sequence
  Description of Artificial Sequence: Synthetic oligonucleotide
  Target: SCNA; (-) strand; PAM type: YTN; PAM sequence: CTG
taagcattacaatcccacaa

SEQ ID NO: 57786 - DNA, 20 bp, Artificial Sequence
  Description of Artificial Sequence: Synthetic oligonucleotide
  Target: SCNA; (-) strand; PAM type: YTN; PAM sequence: TTA
atagtctgtaagcattacaa

SEQ ID NO: 57787 - DNA, 20 bp, Artificial Sequence
  Description of Artificial Sequence: Synthetic oligonucleotide
  Target: SCNA; (-) strand; PAM type: YTN; PAM sequence: TTA
ggatcagtggttaatagtct

SEQ ID NO: 57788 - DNA, 20 bp, Artificial Sequence
  Description of Artificial Sequence: Synthetic oligonucleotide
  Target: SCNA; (-) strand; PAM type: YTN; PAM sequence: CTT
aggatcagtggttaatagtc

SEQ ID NO: 57789 - DNA, 20 bp, Artificial Sequence
  Description of Artificial Sequence: Synthetic oligonucleotide
  Target: SCNA; (-) strand; PAM type: YTN; PAM sequence: TTC
cacccaaatcttaggatcag

SEQ ID NO: 57790 - DNA, 20 bp, Artificial Sequence
  Description of Artificial Sequence: Synthetic oligonucleotide
  Target: SCNA; (-) strand; PAM type: YTN; PAM sequence: CTT
ccacccaaatcttaggatca

SEQ ID NO: 57791 - DNA, 20 bp, Artificial Sequence
  Description of Artificial Sequence: Synthetic oligonucleotide
  Target: SCNA; (-) strand; PAM type: YTN; PAM sequence: TTA
gatatagagacaaatacttc

SEQ ID NO: 57792 - DNA, 20 bp, Artificial Sequence
  Description of Artificial Sequence: Synthetic oligonucleotide
  Target: SCNA; (-) strand; PAM type: YTN; PAM sequence: CTT
agatatagagacaaatactt

SEQ ID NO: 57793 - DNA, 20 bp, Artificial Sequence
  Description of Artificial Sequence: Synthetic oligonucleotide
  Target: SCNA; (-) strand; PAM type: YTN; PAM sequence: CTG
cttagatatagagacaaata

SEQ ID NO: 57794 - DNA, 20 bp, Artificial Sequence
  Description of Artificial Sequence: Synthetic oligonucleotide
  Target: SCNA; (-) strand; PAM type: YTN; PAM sequence: TTA
gctgcttagatatagagaca

SEQ ID NO: 57795 - DNA, 20 bp, Artificial Sequence
  Description of Artificial Sequence: Synthetic oligonucleotide
  Target: SCNA; (-) strand; PAM type: YTN; PAM sequence: TTT
agctgcttagatatagagac

SEQ ID NO: 57796 - DNA, 20 bp, Artificial Sequence
  Description of Artificial Sequence: Synthetic oligonucleotide
  Target: SCNA; (-) strand; PAM type: YTN; PAM sequence: TTT
tagctgcttagatatagaga

SEQ ID NO: 57797 - DNA, 20 bp, Artificial Sequence
  Description of Artificial Sequence: Synthetic oligonucleotide
  Target: SCNA; (-) strand; PAM type: YTN; PAM sequence: CTC
acatacacgcacagatagta

SEQ ID NO: 57798 - DNA, 20 bp, Artificial Sequence
  Description of Artificial Sequence: Synthetic oligonucleotide
  Target: SCNA; (-) strand; PAM type: YTN; PAM sequence: TTA
cctcacatacacgcacagat

SEQ ID NO: 57799 - DNA, 20 bp, Artificial Sequence
  Description of Artificial Sequence: Synthetic oligonucleotide
  Target: SCNA; (-) strand; PAM type: YTN; PAM sequence: CTG
aaattacctcacatacacgc

SEQ ID NO: 57800 - DNA, 20 bp, Artificial Sequence
  Description of Artificial Sequence: Synthetic oligonucleotide
  Target: SCNA; (-) strand; PAM type: YTN; PAM sequence: TTG
tcagtagactgaaattacct

SEQ ID NO: 57801 - DNA, 20 bp, Artificial Sequence
  Description of Artificial Sequence: Synthetic oligonucleotide
  Target: SCNA; (-) strand; PAM type: YTN; PAM sequence: TTT
gtcagtagactgaaattacc

SEQ ID NO: 57802 - DNA, 20 bp, Artificial Sequence
  Description of Artificial Sequence: Synthetic oligonucleotide
  Target: SCNA; (-) strand; PAM type: YTN; PAM sequence: TTT
tgtcagtagactgaaattac

SEQ ID NO: 57803 - DNA, 20 bp, Artificial Sequence
  Description of Artificial Sequence: Synthetic oligonucleotide
  Target: SCNA; (-) strand; PAM type: YTN; PAM sequence: TTT
ttgtcagtagactgaaatta

SEQ ID NO: 57804 - DNA, 20 bp, Artificial Sequence
  Description of Artificial Sequence: Synthetic oligonucleotide
  Target: SCNA; (-) strand; PAM type: YTN; PAM sequence: TTG
tgtttttgtcagtagactga

SEQ ID NO: 57805 - DNA, 20 bp, Artificial Sequence
  Description of Artificial Sequence: Synthetic oligonucleotide
  Target: SCNA; (-) strand; PAM type: YTN; PAM sequence: TTA
aattgtgtttttgtcagtag

SEQ ID NO: 57806 - DNA, 20 bp, Artificial Sequence
  Description of Artificial Sequence: Synthetic oligonucleotide
  Target: SCNA; (-) strand; PAM type: YTN; PAM sequence: CTC
aataaatatcatacattaaa

SEQ ID NO: 57807 - DNA, 20 bp, Artificial Sequence
  Description of Artificial Sequence: Synthetic oligonucleotide
  Target: SCNA; (-) strand; PAM type: YTN; PAM sequence: CTC
tcaataaatatcatacatta

SEQ ID NO: 57808 - DNA, 20 bp, Artificial Sequence
  Description of Artificial Sequence: Synthetic oligonucleotide
  Target: SCNA; (-) strand; PAM type: YTN; PAM sequence: CTG
atgctctcaataaatatcat

SEQ ID NO: 57809 - DNA, 20 bp, Artificial Sequence
  Description of Artificial Sequence: Synthetic oligonucleotide
  Target: SCNA; (-) strand; PAM type: YTN; PAM sequence: TTA
gaaatgagagaggctgatgc

SEQ ID NO: 57810 - DNA, 20 bp, Artificial Sequence
  Description of Artificial Sequence: Synthetic oligonucleotide
  Target: SCNA; (-) strand; PAM type: YTN; PAM sequence: CTT
agaaatgagagaggctgatg

SEQ ID NO: 57811 - DNA, 20 bp, Artificial Sequence
  Description of Artificial Sequence: Synthetic oligonucleotide
  Target: SCNA; (-) strand; PAM type: YTN; PAM sequence: TTA
tcttagaaatgagagaggct

SEQ ID NO: 57812 - DNA, 20 bp, Artificial Sequence
  Description of Artificial Sequence: Synthetic oligonucleotide
  Target: SCNA; (-) strand; PAM type: YTN; PAM sequence: TTT
atcttagaaatgagagaggc

SEQ ID NO: 57813 - DNA, 20 bp, Artificial Sequence
  Description of Artificial Sequence: Synthetic oligonucleotide
  Target: SCNA; (-) strand; PAM type: YTN; PAM sequence: TTA
caagtatatatccatcatgg

SEQ ID NO: 57814 - DNA, 20 bp, Artificial Sequence
  Description of Artificial Sequence: Synthetic oligonucleotide
  Target: SCNA; (-) strand; PAM type: YTN; PAM sequence: TTG
ttacaagtatatatccatca

SEQ ID NO: 57815 - DNA, 20 bp, Artificial Sequence
  Description of Artificial Sequence: Synthetic oligonucleotide
  Target: SCNA; (-) strand; PAM type: YTN; PAM sequence: TTT
gttacaagtatatatccatc

SEQ ID NO: 57816 - DNA, 20 bp, Artificial Sequence
  Description of Artificial Sequence: Synthetic oligonucleotide
  Target: SCNA; (-) strand; PAM type: YTN; PAM sequence: CTG
agaacaatatggtttgttac

SEQ ID NO: 57817 - DNA, 20 bp, Artificial Sequence
  Description of Artificial Sequence: Synthetic oligonucleotide
  Target: SCNA; (-) strand; PAM type: YTN; PAM sequence: CTC
tgagaacaatatggtttgtt

SEQ ID NO: 57818 - DNA, 20 bp, Artificial Sequence
  Description of Artificial Sequence: Synthetic oligonucleotide
  Target: SCNA; (-) strand; PAM type: YTN; PAM sequence: CTG
tggtctctgagaacaatatg

SEQ ID NO: 57819 - DNA, 20 bp, Artificial Sequence
  Description of Artificial Sequence: Synthetic oligonucleotide
  Target: SCNA; (-) strand; PAM type: YTN; PAM sequence: CTG
ggaaaaagggagcagctgtg

SEQ ID NO: 57820 - DNA, 20 bp, Artificial Sequence
  Description of Artificial Sequence: Synthetic oligonucleotide
  Target: SCNA; (-) strand; PAM type: YTN; PAM sequence: TTA
ccctgggaaaaagggagcag

SEQ ID NO: 57821 - DNA, 20 bp, Artificial Sequence
  Description of Artificial Sequence: Synthetic oligonucleotide
  Target: SCNA; (-) strand; PAM type: YTN; PAM sequence: TTT
accctgggaaaaagggagca

SEQ ID NO: 57822 - DNA, 20 bp, Artificial Sequence
  Description of Artificial Sequence: Synthetic oligonucleotide
  Target: SCNA; (-) strand; PAM type: YTN; PAM sequence: CTG
acatatttaccctgggaaaa

SEQ ID NO: 57823 - DNA, 20 bp, Artificial Sequence
  Description of Artificial Sequence: Synthetic oligonucleotide
  Target: SCNA; (-) strand; PAM type: YTN; PAM sequence: TTC
aggccgggagactgacatat

SEQ ID NO: 57824 - DNA, 20 bp, Artificial Sequence
  Description of Artificial Sequence: Synthetic oligonucleotide
  Target: SCNA; (-) strand; PAM type: YTN; PAM sequence: TTC
aagaaatgggcagttcaggc

SEQ ID NO: 57825 - DNA, 20 bp, Artificial Sequence
  Description of Artificial Sequence: Synthetic oligonucleotide
  Target: SCNA; (-) strand; PAM type: YTN; PAM sequence: CTT
caagaaatgggcagttcagg

SEQ ID NO: 57826 - DNA, 20 bp, Artificial Sequence
  Description of Artificial Sequence: Synthetic oligonucleotide
  Target: SCNA; (-) strand; PAM type: YTN; PAM sequence: CTG
ccttcaagaaatgggcagtt

SEQ ID NO: 57827 - DNA, 20 bp, Artificial Sequence
  Description of Artificial Sequence: Synthetic oligonucleotide
  Target: SCNA; (-) strand; PAM type: YTN; PAM sequence: CTC
ctgccttcaagaaatgggca

SEQ ID NO: 57828 - DNA, 20 bp, Artificial Sequence
  Description of Artificial Sequence: Synthetic oligonucleotide
  Target: SCNA; (-) strand; PAM type: YTN; PAM sequence: CTG
agtaacatatgggtggctcc

SEQ ID NO: 57829 - DNA, 20 bp, Artificial Sequence
  Description of Artificial Sequence: Synthetic oligonucleotide
  Target: SCNA; (-) strand; PAM type: YTN; PAM sequence: CTG
ggcaccatgagaaatacaaa

SEQ ID NO: 57830 - DNA, 20 bp, Artificial Sequence
  Description of Artificial Sequence: Synthetic oligonucleotide
  Target: SCNA; (-) strand; PAM type: YTN; PAM sequence: CTC
agctgggcaccatgagaaat

SEQ ID NO: 57831 - DNA, 20 bp, Artificial Sequence
  Description of Artificial Sequence: Synthetic oligonucleotide
  Target: SCNA; (-) strand; PAM type: YTN; PAM sequence: TTA
atatgtgccagacactcagc

SEQ ID NO: 57832 - DNA, 20 bp, Artificial Sequence
  Description of Artificial Sequence: Synthetic oligonucleotide
  Target: SCNA; (-) strand; PAM type: YTN; PAM sequence: CTT
aatatgtgccagacactcag

SEQ ID NO: 57833 - DNA, 20 bp, Artificial Sequence
  Description of Artificial Sequence: Synthetic oligonucleotide
  Target: SCNA; (-) strand; PAM type: YTN; PAM sequence: CTG
agtacttaatatgtgccaga

SEQ ID NO: 57834 - DNA, 20 bp, Artificial Sequence
  Description of Artificial Sequence: Synthetic oligonucleotide
  Target: SCNA; (-) strand; PAM type: YTN; PAM sequence: TTA
actgagtacttaatatgtgc

SEQ ID NO: 57835 - DNA, 20 bp, Artificial Sequence
  Description of Artificial Sequence: Synthetic oligonucleotide
  Target: SCNA; (-) strand; PAM type: YTN; PAM sequence: TTA
aaaatcattaactgagtact

SEQ ID NO: 57836 - DNA, 20 bp, Artificial Sequence
  Description of Artificial Sequence: Synthetic oligonucleotide
  Target: SCNA; (-) strand; PAM type: YTN; PAM sequence: TTC
attaaaaatcattaactgag

SEQ ID NO: 57837 - DNA, 20 bp, Artificial Sequence
  Description of Artificial Sequence: Synthetic oligonucleotide
  Target: SCNA; (-) strand; PAM type: YTN; PAM sequence: TTT
cattaaaaatcattaactga

SEQ ID NO: 57838 - DNA, 20 bp, Artificial Sequence
  Description of Artificial Sequence: Synthetic oligonucleotide
  Target: SCNA; (-) strand; PAM type: YTN; PAM sequence: TTT
tcattaaaaatcattaactg

SEQ ID NO: 57839 - DNA, 20 bp, Artificial Sequence
  Description of Artificial Sequence: Synthetic oligonucleotide
  Target: SCNA; (-) strand; PAM type: YTN; PAM sequence: CTA
tgttttcattaaaaatcatt

SEQ ID NO: 57840 - DNA, 20 bp, Artificial Sequence
  Description of Artificial Sequence: Synthetic oligonucleotide
  Target: SCNA; (-) strand; PAM type: YTN; PAM sequence: CTG
ctatgttttcattaaaaatc

SEQ ID NO: 57841 - DNA, 20 bp, Artificial Sequence
  Description of Artificial Sequence: Synthetic oligonucleotide
  Target: SCNA; (-) strand; PAM type: YTN; PAM sequence: TTA
ctgctatgttttcattaaaa

SEQ ID NO: 57842 - DNA, 20 bp, Artificial Sequence
  Description of Artificial Sequence: Synthetic oligonucleotide
  Target: SCNA; (-) strand; PAM type: YTN; PAM sequence: CTT
actgctatgttttcattaaa

SEQ ID NO: 57843 - DNA, 20 bp, Artificial Sequence
  Description of Artificial Sequence: Synthetic oligonucleotide
  Target: SCNA; (-) strand; PAM type: YTN; PAM sequence: TTA
taaggaaaataggcttactg

SEQ ID NO: 57844 - DNA, 20 bp, Artificial Sequence
  Description of Artificial Sequence: Synthetic oligonucleotide
  Target: SCNA; (-) strand; PAM type: YTN; PAM sequence: TTA
tgtataaaattataaggaaa

SEQ ID NO: 57845 - DNA, 20 bp, Artificial Sequence
  Description of Artificial Sequence: Synthetic oligonucleotide
  Target: SCNA; (-) strand; PAM type: YTN; PAM sequence: CTG
taattatgtataaaattata

SEQ ID NO: 57846 - DNA, 20 bp, Artificial Sequence
  Description of Artificial Sequence: Synthetic oligonucleotide
  Target: SCNA; (-) strand; PAM type: YTN; PAM sequence: CTC
tgtaattatgtataaaatta

SEQ ID NO: 57847 - DNA, 20 bp, Artificial Sequence
  Description of Artificial Sequence: Synthetic oligonucleotide
  Target: SCNA; (-) strand; PAM type: YTN; PAM sequence: CTA
ggtgggaaagtactctgtaa

SEQ ID NO: 57848 - DNA, 20 bp, Artificial Sequence
  Description of Artificial Sequence: Synthetic oligonucleotide
  Target: SCNA; (-) strand; PAM type: YTN; PAM sequence: TTC
taggtgggaaagtactctgt

SEQ ID NO: 57849 - DNA, 20 bp, Artificial Sequence
  Description of Artificial Sequence: Synthetic oligonucleotide
  Target: SCNA; (-) strand; PAM type: YTN; PAM sequence: CTG
taaggttctaggtgggaaag

SEQ ID NO: 57850 - DNA, 20 bp, Artificial Sequence
  Description of Artificial Sequence: Synthetic oligonucleotide
  Target: SCNA; (-) strand; PAM type: YTN; PAM sequence: TTA
atcctgtaaggttctaggtg

SEQ ID NO: 57851 - DNA, 20 bp, Artificial Sequence
  Description of Artificial Sequence: Synthetic oligonucleotide
  Target: SCNA; (-) strand; PAM type: YTN; PAM sequence: CTT
aatcctgtaaggttctaggt

SEQ ID NO: 57852 - DNA, 20 bp, Artificial Sequence
  Description of Artificial Sequence: Synthetic oligonucleotide
  Target: SCNA; (-) strand; PAM type: YTN; PAM sequence: CTA
atgacccttaatcctgtaag

SEQ ID NO: 57853 - DNA, 20 bp, Artificial Sequence
  Description of Artificial Sequence: Synthetic oligonucleotide
  Target: SCNA; (-) strand; PAM type: YTN; PAM sequence: TTC
taatgacccttaatcctgta

SEQ ID NO: 57854 - DNA, 20 bp, Artificial Sequence
  Description of Artificial Sequence: Synthetic oligonucleotide
  Target: SCNA; (-) strand; PAM type: YTN; PAM sequence: TTC
aagatggatgaatagtgaat

SEQ ID NO: 57855 - DNA, 20 bp, Artificial Sequence
  Description of Artificial Sequence: Synthetic oligonucleotide
  Target: SCNA; (-) strand; PAM type: YTN; PAM sequence: CTG
ggttcaagatggatgaatag

SEQ ID NO: 57856 - DNA, 20 bp, Artificial Sequence
  Description of Artificial Sequence: Synthetic oligonucleotide
  Target: SCNA; (-) strand; PAM type: YTN; PAM sequence: TTC
actgggttcaagatggatga

SEQ ID NO: 57857 - DNA, 20 bp, Artificial Sequence
  Description of Artificial Sequence: Synthetic oligonucleotide
  Target: SCNA; (-) strand; PAM type: YTN; PAM sequence: TTT
cactgggttcaagatggatg

SEQ ID NO: 57858 - DNA, 20 bp, Artificial Sequence
  Description of Artificial Sequence: Synthetic oligonucleotide
  Target: SCNA; (-) strand; PAM type: YTN; PAM sequence: CTG
acaaaatttcactgggttca

SEQ ID NO: 57859 - DNA, 20 bp, Artificial Sequence
  Description of Artificial Sequence: Synthetic oligonucleotide
  Target: SCNA; (-) strand; PAM type: YTN; PAM sequence: TTG
tatctgacaaaatttcactg

SEQ ID NO: 57860 - DNA, 20 bp, Artificial Sequence
  Description of Artificial Sequence: Synthetic oligonucleotide
  Target: SCNA; (-) strand; PAM type: YTN; PAM sequence: TTT
gtatctgacaaaatttcact

SEQ ID NO: 57861 - DNA, 20 bp, Artificial Sequence
  Description of Artificial Sequence: Synthetic oligonucleotide
  Target: SCNA; (-) strand; PAM type: YTN; PAM sequence: CTT
tgtatctgacaaaatttcac

SEQ ID NO: 57862 - DNA, 20 bp, Artificial Sequence
  Description of Artificial Sequence: Synthetic oligonucleotide
  Target: SCNA; (-) strand; PAM type: YTN; PAM sequence: TTC
tttgtatctgacaaaatttc

SEQ ID NO: 57863 - DNA, 20 bp, Artificial Sequence
  Description of Artificial Sequence: Synthetic oligonucleotide
  Target: SCNA; (-) strand; PAM type: YTN; PAM sequence: TTT
ctttgtatctgacaaaattt

SEQ ID NO: 57864 - DNA, 20 bp, Artificial Sequence
  Description of Artificial Sequence: Synthetic oligonucleotide
  Target: SCNA; (-) strand; PAM type: YTN; PAM sequence: CTT
tctttgtatctgacaaaatt

SEQ ID NO: 57865 - DNA, 20 bp, Artificial Sequence
  Description of Artificial Sequence: Synthetic oligonucleotide
  Target: SCNA; (-) strand; PAM type: YTN; PAM sequence: TTA
tggcctttctttgtatctga

SEQ ID NO: 57866 - DNA, 20 bp, Artificial Sequence
  Description of Artificial Sequence: Synthetic oligonucleotide
  Target: SCNA; (-) strand; PAM type: YTN; PAM sequence: TTA
ttatggcctttctttgtatc

SEQ ID NO: 57867 - DNA, 20 bp, Artificial Sequence
  Description of Artificial Sequence: Synthetic oligonucleotide
  Target: SCNA; (-) strand; PAM type: YTN; PAM sequence: TTA
gaaacacaattattatggcc

SEQ ID NO: 57868 - DNA, 20 bp, Artificial Sequence
  Description of Artificial Sequence: Synthetic oligonucleotide
  Target: SCNA; (-) strand; PAM type: YTN; PAM sequence: CTT
agaaacacaattattatggc

SEQ ID NO: 57869 - DNA, 20 bp, Artificial Sequence
  Description of Artificial Sequence: Synthetic oligonucleotide
  Target: SCNA; (-) strand; PAM type: YTN; PAM sequence: CTG
tccccacttagaaacacaat

SEQ ID NO: 57870 - DNA, 20 bp, Artificial Sequence
  Description of Artificial Sequence: Synthetic oligonucleotide
  Target: SCNA; (-) strand; PAM type: YTN; PAM sequence: CTA
atggtacataaactgtcccc

SEQ ID NO: 57871 - DNA, 20 bp, Artificial Sequence
  Description of Artificial Sequence: Synthetic oligonucleotide
  Target: SCNA; (-) strand; PAM type: YTN; PAM sequence: CTC
atatgagagcccactaatgg

SEQ ID NO: 57872 - DNA, 20 bp, Artificial Sequence
  Description of Artificial Sequence: Synthetic oligonucleotide
  Target: SCNA; (-) strand; PAM type: YTN; PAM sequence: CTC
actcatatgagagcccacta

SEQ ID NO: 57873 - DNA, 20 bp, Artificial Sequence
  Description of Artificial Sequence: Synthetic oligonucleotide
  Target: SCNA; (-) strand; PAM type: YTN; PAM sequence: TTC
tcactcatatgagagcccac

SEQ ID NO: 57874 - DNA, 20 bp, Artificial Sequence
  Description of Artificial Sequence: Synthetic oligonucleotide
  Target: SCNA; (-) strand; PAM type: YTN; PAM sequence: TTT
ctcactcatatgagagccca

SEQ ID NO: 57875 - DNA, 20 bp, Artificial Sequence
  Description of Artificial Sequence: Synthetic oligonucleotide
  Target: SCNA; (-) strand; PAM type: YTN; PAM sequence: TTG
gtatttctcactcatatgag

SEQ ID NO: 57876 - DNA, 20 bp, Artificial Sequence
  Description of Artificial Sequence: Synthetic oligonucleotide
  Target: SCNA; (-) strand; PAM type: YTN; PAM sequence: TTG
caatgtggtatgtaaaagtt

SEQ ID NO: 57877 - DNA, 20 bp, Artificial Sequence
  Description of Artificial Sequence: Synthetic oligonucleotide
  Target: SCNA; (-) strand; PAM type: YTN; PAM sequence: TTT
gcaatgtggtatgtaaaagt

SEQ ID NO: 57878 - DNA, 20 bp, Artificial Sequence
  Description of Artificial Sequence: Synthetic oligonucleotide
  Target: SCNA; (-) strand; PAM type: YTN; PAM sequence: TTT
tgcaatgtggtatgtaaaag

SEQ ID NO: 57879 - DNA, 20 bp, Artificial Sequence
  Description of Artificial Sequence: Synthetic oligonucleotide
  Target: SCNA; (-) strand; PAM type: YTN; PAM sequence: CTA
aaggtatgtaacagtgacat

SEQ ID NO: 57880 - DNA, 20 bp, Artificial Sequence
  Description of Artificial Sequence: Synthetic oligonucleotide
  Target: SCNA; (-) strand; PAM type: YTN; PAM sequence: TTC
taaaggtatgtaacagtgac

SEQ ID NO: 57881 - DNA, 20 bp, Artificial Sequence
  Description of Artificial Sequence: Synthetic oligonucleotide
  Target: SCNA; (-) strand; PAM type: YTN; PAM sequence: TTT
ctaaaggtatgtaacagtga

SEQ ID NO: 57882 - DNA, 20 bp, Artificial Sequence
  Description of Artificial Sequence: Synthetic oligonucleotide
  Target: SCNA; (-) strand; PAM type: YTN; PAM sequence: TTG
tttctaaaggtatgtaacag

SEQ ID NO: 57883 - DNA, 20 bp, Artificial Sequence
  Description of Artificial Sequence: Synthetic oligonucleotide
  Target: SCNA; (-) strand; PAM type: YTN; PAM sequence: TTT
gtttctaaaggtatgtaaca

SEQ ID NO: 57884 - DNA, 20 bp, Artificial Sequence
  Description of Artificial Sequence: Synthetic oligonucleotide
  Target: SCNA; (-) strand; PAM type: YTN; PAM sequence: TTG
atttgtttctaaaggtatgt

SEQ ID NO: 57885 - DNA, 20 bp, Artificial Sequence
  Description of Artificial Sequence: Synthetic oligonucleotide
  Target: SCNA; (-) strand; PAM type: YTN; PAM sequence: TTA
agattgatttgtttctaaag

SEQ ID NO: 57886 - DNA, 20 bp, Artificial Sequence
  Description of Artificial Sequence: Synthetic oligonucleotide
  Target: SCNA; (-) strand; PAM type: YTN; PAM sequence: TTT
aagattgatttgtttctaaa

SEQ ID NO: 57887 - DNA, 20 bp, Artificial Sequence
  Description of Artificial Sequence: Synthetic oligonucleotide
  Target: SCNA; (-) strand; PAM type: YTN; PAM sequence: TTA
aagaaaaatttaagattgat

SEQ ID NO: 57888 - DNA, 20 bp, Artificial Sequence
  Description of Artificial Sequence: Synthetic oligonucleotide
  Target: SCNA; (-) strand; PAM type: YTN; PAM sequence: TTA
ttaaagaaaaatttaagatt

SEQ ID NO: 57889 - DNA, 20 bp, Artificial Sequence
  Description of Artificial Sequence: Synthetic oligonucleotide
  Target: SCNA; (-) strand; PAM type: YTN; PAM sequence: CTG
tgattattaaagaaaaattt

SEQ ID NO: 57890 - DNA, 20 bp, Artificial Sequence
  Description of Artificial Sequence: Synthetic oligonucleotide
  Target: SCNA; (-) strand; PAM type: YTN; PAM sequence: TTA
aagcatactgtgattattaa

SEQ ID NO: 57891 - DNA, 20 bp, Artificial Sequence
  Description of Artificial Sequence: Synthetic oligonucleotide
  Target: SCNA; (-) strand; PAM type: YTN; PAM sequence: TTA
gattaaagcatactgtgatt

SEQ ID NO: 57892 - DNA, 20 bp, Artificial Sequence
  Description of Artificial Sequence: Synthetic oligonucleotide
  Target: SCNA; (-) strand; PAM type: YTN; PAM sequence: CTT
agattaaagcatactgtgat

SEQ ID NO: 57893 - DNA, 20 bp, Artificial Sequence
  Description of Artificial Sequence: Synthetic oligonucleotide
  Target: SCNA; (-) strand; PAM type: YTN; PAM sequence: CTA
taatcttagattaaagcata

SEQ ID NO: 57894 - DNA, 20 bp, Artificial Sequence
  Description of Artificial Sequence: Synthetic oligonucleotide
  Target: SCNA; (-) strand; PAM type: YTN; PAM sequence: CTG
gcactataatcttagattaa

SEQ ID NO: 57895 - DNA, 20 bp, Artificial Sequence
  Description of Artificial Sequence: Synthetic oligonucleotide
  Target: SCNA; (-) strand; PAM type: YTN; PAM sequence: TTA
ctggcactataatcttagat

SEQ ID NO: 57896 - DNA, 20 bp, Artificial Sequence
  Description of Artificial Sequence: Synthetic oligonucleotide
  Target: SCNA; (-) strand; PAM type: YTN; PAM sequence: CTA
ttactggcactataatctta

SEQ ID NO: 57897 - DNA, 20 bp, Artificial Sequence
  Description of Artificial Sequence: Synthetic oligonucleotide
  Target: SCNA; (-) strand; PAM type: YTN; PAM sequence: TTC
gagtggcatatactattact

SEQ ID NO: 57898 - DNA, 20 bp, Artificial Sequence
  Description of Artificial Sequence: Synthetic oligonucleotide
  Target: SCNA; (-) strand; PAM type: YTN; PAM sequence: TTT
cgagtggcatatactattac

SEQ ID NO: 57899 - DNA, 20 bp, Artificial Sequence
  Description of Artificial Sequence: Synthetic oligonucleotide
  Target: SCNA; (-) strand; PAM type: YTN; PAM sequence: TTG
tgtttcgagtggcatatact

SEQ ID NO: 57900 - DNA, 20 bp, Artificial Sequence
  Description of Artificial Sequence: Synthetic oligonucleotide
  Target: SCNA; (-) strand; PAM type: YTN; PAM sequence: TTT
gtgtttcgagtggcatatac

SEQ ID NO: 57901 - DNA, 20 bp, Artificial Sequence
  Description of Artificial Sequence: Synthetic oligonucleotide
  Target: SCNA; (-) strand; PAM type: YTN; PAM sequence: TTG
tatttgtgtttcgagtggca

SEQ ID NO: 57902 - DNA, 20 bp, Artificial Sequence
  Description of Artificial Sequence: Synthetic oligonucleotide
  Target: SCNA; (-) strand; PAM type: YTN; PAM sequence: TTT
gtatttgtgtttcgagtggc

SEQ ID NO: 57903 - DNA, 20 bp, Artificial Sequence
  Description of Artificial Sequence: Synthetic oligonucleotide
  Target: SCNA; (-) strand; PAM type: YTN; PAM sequence: CTG
atttgtatttgtgtttcgag

SEQ ID NO: 57904 - DNA, 20 bp, Artificial Sequence
  Description of Artificial Sequence: Synthetic oligonucleotide
  Target: SCNA; (-) strand; PAM type: YTN; PAM sequence: TTG
cctgatttgtatttgtgttt

SEQ ID NO: 57905 - DNA, 20 bp, Artificial Sequence
  Description of Artificial Sequence: Synthetic oligonucleotide
  Target: SCNA; (-) strand; PAM type: YTN; PAM sequence: TTG
agacacaatgaattgcctga

SEQ ID NO: 57906 - DNA, 20 bp, Artificial Sequence
  Description of Artificial Sequence: Synthetic oligonucleotide
  Target: SCNA; (-) strand; PAM type: YTN; PAM sequence: TTT
gagacacaatgaattgcctg

SEQ ID NO: 57907 - DNA, 20 bp, Artificial Sequence
  Description of Artificial Sequence: Synthetic oligonucleotide
  Target: SCNA; (-) strand; PAM type: YTN; PAM sequence: CTT
tgagacacaatgaattgcct

SEQ ID NO: 57908 - DNA, 20 bp, Artificial Sequence
  Description of Artificial Sequence: Synthetic oligonucleotide
  Target: SCNA; (-) strand; PAM type: YTN; PAM sequence: TTA
aaagctttgagacacaatga

SEQ ID NO: 57909 - DNA, 20 bp, Artificial Sequence
  Description of Artificial Sequence: Synthetic oligonucleotide
  Target: SCNA; (-) strand; PAM type: YTN; PAM sequence: CTA
aattaaaagctttgagacac

SEQ ID NO: 57910 - DNA, 20 bp, Artificial Sequence
  Description of Artificial Sequence: Synthetic oligonucleotide
  Target: SCNA; (-) strand; PAM type: YTN; PAM sequence: TTA
gacctaaattaaaagctttg

SEQ ID NO: 57911 - DNA, 20 bp, Artificial Sequence
  Description of Artificial Sequence: Synthetic oligonucleotide
  Target: SCNA; (-) strand; PAM type: YTN; PAM sequence: TTT
agacctaaattaaaagcttt

SEQ ID NO: 57912 - DNA, 20 bp, Artificial Sequence
  Description of Artificial Sequence: Synthetic oligonucleotide
  Target: SCNA; (-) strand; PAM type: YTN; PAM sequence: TTA
ggtatatttagacctaaatt

SEQ ID NO: 57913 - DNA, 20 bp, Artificial Sequence
  Description of Artificial Sequence: Synthetic oligonucleotide
  Target: SCNA; (-) strand; PAM type: YTN; PAM sequence: CTA
ttaggtatatttagacctaa

SEQ ID NO: 57914 - DNA, 20 bp, Artificial Sequence
  Description of Artificial Sequence: Synthetic oligonucleotide
  Target: SCNA; (-) strand; PAM type: YTN; PAM sequence: TTC
agaagataaccagatgacta

SEQ ID NO: 57915 - DNA, 20 bp, Artificial Sequence
  Description of Artificial Sequence: Synthetic oligonucleotide
  Target: SCNA; (-) strand; PAM type: YTN; PAM sequence: CTT
cagaagataaccagatgact

SEQ ID NO: 57916 - DNA, 20 bp, Artificial Sequence
  Description of Artificial Sequence: Synthetic oligonucleotide
  Target: SCNA; (-) strand; PAM type: YTN; PAM sequence: TTG
acttcagaagataaccagat

SEQ ID NO: 57917 - DNA, 20 bp, Artificial Sequence
  Description of Artificial Sequence: Synthetic oligonucleotide
  Target: SCNA; (-) strand; PAM type: YTN; PAM sequence: CTT
gacttcagaagataaccaga

SEQ ID NO: 57918 - DNA, 20 bp, Artificial Sequence
  Description of Artificial Sequence: Synthetic oligonucleotide
  Target: SCNA; (-) strand; PAM type: YTN; PAM sequence: TTG
tgcttgacttcagaagataa

SEQ ID NO: 57919 - DNA, 20 bp, Artificial Sequence
  Description of Artificial Sequence: Synthetic oligonucleotide
  Target: SCNA; (-) strand; PAM type: YTN; PAM sequence: CTT
gtgcttgacttcagaagata

SEQ ID NO: 57920 - DNA, 20 bp, Artificial Sequence
  Description of Artificial Sequence: Synthetic oligonucleotide
  Target: SCNA; (-) strand; PAM type: YTN; PAM sequence: TTG
tccttgtgcttgacttcaga

SEQ ID NO: 57921 - DNA, 20 bp, Artificial Sequence
  Description of Artificial Sequence: Synthetic oligonucleotide
  Target: SCNA; (-) strand; PAM type: YTN; PAM sequence: CTT
gtccttgtgcttgacttcag

SEQ ID NO: 57922 - DNA, 20 bp, Artificial Sequence
  Description of Artificial Sequence: Synthetic oligonucleotide
  Target: SCNA; (-) strand; PAM type: YTN; PAM sequence: TTC
ttgtccttgtgcttgacttc

SEQ ID NO: 57923 - DNA, 20 bp, Artificial Sequence
  Description of Artificial Sequence: Synthetic oligonucleotide
  Target: SCNA; (-) strand; PAM type: YTN; PAM sequence: TTG
gttcttgtccttgtgcttga

SEQ ID NO: 57924 - DNA, 20 bp, Artificial Sequence
  Description of Artificial Sequence: Synthetic oligonucleotide
  Target: SCNA; (-) strand; PAM type: YTN; PAM sequence: TTT
ggttcttgtccttgtgcttg

SEQ ID NO: 57925 - DNA, 20 bp, Artificial Sequence
  Description of Artificial Sequence: Synthetic oligonucleotide
  Target: SCNA; (-) strand; PAM type: YTN; PAM sequence: TTA
aaagtttggttcttgtcctt

SEQ ID NO: 57926 - DNA, 20 bp, Artificial Sequence
  Description of Artificial Sequence: Synthetic oligonucleotide
  Target: SCNA; (-) strand; PAM type: YTN; PAM sequence: CTC
aaataattaaaagtttggtt

SEQ ID NO: 57927 - DNA, 20 bp, Artificial Sequence
  Description of Artificial Sequence: Synthetic oligonucleotide
  Target: SCNA; (-) strand; PAM type: YTN; PAM sequence: TTG
cctcaaataattaaaagttt

SEQ ID NO: 57928 - DNA, 20 bp, Artificial Sequence
  Description of Artificial Sequence: Synthetic oligonucleotide
  Target: SCNA; (-) strand; PAM type: YTN; PAM sequence: TTA
atataatacattgcctcaaa

SEQ ID NO: 57929 - DNA, 20 bp, Artificial Sequence
  Description of Artificial Sequence: Synthetic oligonucleotide
  Target: SCNA; (-) strand; PAM type: YTN; PAM sequence: TTG
ttaatataatacattgcctc

SEQ ID NO: 57930 - DNA, 20 bp, Artificial Sequence
  Description of Artificial Sequence: Synthetic oligonucleotide
  Target: SCNA; (-) strand; PAM type: YTN; PAM sequence: CTA
ataattgttaatataataca

SEQ ID NO: 57931 - DNA, 20 bp, Artificial Sequence
  Description of Artificial Sequence: Synthetic oligonucleotide
  Target: SCNA; (-) strand; PAM type: YTN; PAM sequence: TTA
agtgtctaataattgttaat

SEQ ID NO: 57932 - DNA, 20 bp, Artificial Sequence
  Description of Artificial Sequence: Synthetic oligonucleotide
  Target: SCNA; (-) strand; PAM type: YTN; PAM sequence: CTT
aagtgtctaataattgttaa

SEQ ID NO: 57933 - DNA, 20 bp, Artificial Sequence
  Description of Artificial Sequence: Synthetic oligonucleotide
  Target: SCNA; (-) strand; PAM type: YTN; PAM sequence: TTC
cccttaagtgtctaataatt

SEQ ID NO: 57934 - DNA, 20 bp, Artificial Sequence
  Description of Artificial Sequence: Synthetic oligonucleotide
  Target: SCNA; (-) strand; PAM type: YTN; PAM sequence: TTT
ccccttaagtgtctaataat

SEQ ID NO: 57935 - DNA, 20 bp, Artificial Sequence
  Description of Artificial Sequence: Synthetic oligonucleotide
  Target: SCNA; (-) strand; PAM type: YTN; PAM sequence: CTT
tccccttaagtgtctaataa

SEQ ID NO: 57936 - DNA, 20 bp, Artificial Sequence
  Description of Artificial Sequence: Synthetic oligonucleotide
  Target: SCNA; (-) strand; PAM type: YTN; PAM sequence: TTA
tagtaagctttccccttaag

SEQ ID NO: 57937 - DNA, 20 bp, Artificial Sequence
  Description of Artificial Sequence: Synthetic oligonucleotide
  Target: SCNA; (-) strand; PAM type: YTN; PAM sequence: TTT
atagtaagctttccccttaa

SEQ ID NO: 57938 - DNA, 20 bp, Artificial Sequence
  Description of Artificial Sequence: Synthetic oligonucleotide
  Target: SCNA; (-) strand; PAM type: YTN; PAM sequence: TTA
atttatagtaagctttcccc

SEQ ID NO: 57939 - DNA, 20 bp, Artificial Sequence
  Description of Artificial Sequence: Synthetic oligonucleotide
  Target: SCNA; (-) strand; PAM type: YTN; PAM sequence: TTT
aatttatagtaagctttccc

SEQ ID NO: 57940 - DNA, 20 bp, Artificial Sequence
  Description of Artificial Sequence: Synthetic oligonucleotide
  Target: SCNA; (-) strand; PAM type: YTN; PAM sequence: TTT
taatttatagtaagctttcc

SEQ ID NO: 57941 - DNA, 20 bp, Artificial Sequence
  Description of Artificial Sequence: Synthetic oligonucleotide
  Target: SCNA; (-) strand; PAM type: YTN; PAM sequence: CTG
gagaaatattttaatttata

SEQ ID NO: 57942 - DNA, 20 bp, Artificial Sequence
  Description of Artificial Sequence: Synthetic oligonucleotide
  Target: SCNA; (-) strand; PAM type: YTN; PAM sequence: TTA
taacaaggtagtaataagag

SEQ ID NO: 57943 - DNA, 20 bp, Artificial Sequence
  Description of Artificial Sequence: Synthetic oligonucleotide
  Target: SCNA; (-) strand; PAM type: YTN; PAM sequence: TTT
ataacaaggtagtaataaga

SEQ ID NO: 57944 - DNA, 20 bp, Artificial Sequence
  Description of Artificial Sequence: Synthetic oligonucleotide
  Target: SCNA; (-) strand; PAM type: YTN; PAM sequence: TTT
tataacaaggtagtaataag

SEQ ID NO: 57945 - DNA, 20 bp, Artificial Sequence
  Description of Artificial Sequence: Synthetic oligonucleotide
  Target: SCNA; (-) strand; PAM type: YTN; PAM sequence: TTA
aaataattttataacaaggt

SEQ ID NO: 57946 - DNA, 20 bp, Artificial Sequence
  Description of Artificial Sequence: Synthetic oligonucleotide
  Target: SCNA; (-) strand; PAM type: YTN; PAM sequence: CTT
aaaataattttataacaagg

SEQ ID NO: 57947 - DNA, 20 bp, Artificial Sequence
  Description of Artificial Sequence: Synthetic oligonucleotide
  Target: SCNA; (-) strand; PAM type: YTN; PAM sequence: TTG
aagaagcacacacaggtcac

SEQ ID NO: 57948 - DNA, 20 bp, Artificial Sequence
  Description of Artificial Sequence: Synthetic oligonucleotide
  Target: SCNA; (-) strand; PAM type: YTN; PAM sequence: TTT
gaagaagcacacacaggtca

SEQ ID NO: 57949 - DNA, 20 bp, Artificial Sequence
  Description of Artificial Sequence: Synthetic oligonucleotide
  Target: SCNA; (-) strand; PAM type: YTN; PAM sequence: CTT
tgaagaagcacacacaggtc

SEQ ID NO: 57950 - DNA, 20 bp, Artificial Sequence
  Description of Artificial Sequence: Synthetic oligonucleotide
  Target: SCNA; (-) strand; PAM type: YTN; PAM sequence: TTC
tttgaagaagcacacacagg

SEQ ID NO: 57951 - DNA, 20 bp, Artificial Sequence
  Description of Artificial Sequence: Synthetic oligonucleotide
  Target: SCNA; (-) strand; PAM type: YTN; PAM sequence: TTT
ctttgaagaagcacacacag

SEQ ID NO: 57952 - DNA, 20 bp, Artificial Sequence
  Description of Artificial Sequence: Synthetic oligonucleotide
  Target: SCNA; (-) strand; PAM type: YTN; PAM sequence: TTC
agatttctttgaagaagcac

SEQ ID NO: 57953 - DNA, 20 bp, Artificial Sequence
  Description of Artificial Sequence: Synthetic oligonucleotide
  Target: SCNA; (-) strand; PAM type: YTN; PAM sequence: TTT
cagatttctttgaagaagca

SEQ ID NO: 57954 - DNA, 20 bp, Artificial Sequence
  Description of Artificial Sequence: Synthetic oligonucleotide
  Target: SCNA; (-) strand; PAM type: YTN; PAM sequence: TTC
acaaacaagcacaggtcaca

SEQ ID NO: 57955 - DNA, 20 bp, Artificial Sequence
  Description of Artificial Sequence: Synthetic oligonucleotide
  Target: SCNA; (-) strand; PAM type: YTN; PAM sequence: TTT
cacaaacaagcacaggtcac

SEQ ID NO: 57956 - DNA, 20 bp, Artificial Sequence
  Description of Artificial Sequence: Synthetic oligonucleotide
  Target: SCNA; (-) strand; PAM type: YTN; PAM sequence: TTG
atttcacaaacaagcacagg

SEQ ID NO: 57957 - DNA, 20 bp, Artificial Sequence
  Description of Artificial Sequence: Synthetic oligonucleotide
  Target: SCNA; (-) strand; PAM type: YTN; PAM sequence: TTA
atgttgatttcacaaacaag

SEQ ID NO: 57958 - DNA, 20 bp, Artificial Sequence
  Description of Artificial Sequence: Synthetic oligonucleotide
  Target: SCNA; (-) strand; PAM type: YTN; PAM sequence: TTT
aatgttgatttcacaaacaa

SEQ ID NO: 57959 - DNA, 20 bp, Artificial Sequence
  Description of Artificial Sequence: Synthetic oligonucleotide
  Target: SCNA; (-) strand; PAM type: YTN; PAM sequence: CTG
aatcatttaatgttgatttc

SEQ ID NO: 57960 - DNA, 20 bp, Artificial Sequence
  Description of Artificial Sequence: Synthetic oligonucleotide
  Target: SCNA; (-) strand; PAM type: YTN; PAM sequence: TTG
ccatcagctgaatcatttaa

SEQ ID NO: 57961 - DNA, 20 bp, Artificial Sequence
  Description of Artificial Sequence: Synthetic oligonucleotide
  Target: SCNA; (-) strand; PAM type: YTN; PAM sequence: TTA
atcagatgatgtatgttgcc

SEQ ID NO: 57962 - DNA, 20 bp, Artificial Sequence
  Description of Artificial Sequence: Synthetic oligonucleotide
  Target: SCNA; (-) strand; PAM type: YTN; PAM sequence: TTA
aatgattaatcagatgatgt

SEQ ID NO: 57963 - DNA, 20 bp, Artificial Sequence
  Description of Artificial Sequence: Synthetic oligonucleotide
  Target: SCNA; (-) strand; PAM type: YTN; PAM sequence: CTG
attaaatgattaatcagatg

SEQ ID NO: 57964 - DNA, 20 bp, Artificial Sequence
  Description of Artificial Sequence: Synthetic oligonucleotide
  Target: SCNA; (-) strand; PAM type: YTN; PAM sequence: CTC
tgattaaatgattaatcaga

SEQ ID NO: 57965 - DNA, 20 bp, Artificial Sequence
  Description of Artificial Sequence: Synthetic oligonucleotide
  Target: SCNA; (-) strand; PAM type: YTN; PAM sequence: TTA
tggaccctctgattaaatga

SEQ ID NO: 57966 - DNA, 20 bp, Artificial Sequence
  Description of Artificial Sequence: Synthetic oligonucleotide
  Target: SCNA; (-) strand; PAM type: YTN; PAM sequence: TTG
agtgttatggaccctctgat

SEQ ID NO: 57967 - DNA, 20 bp, Artificial Sequence
  Description of Artificial Sequence: Synthetic oligonucleotide
  Target: SCNA; (-) strand; PAM type: YTN; PAM sequence: CTT
gagtgttatggaccctctga

SEQ ID NO: 57968 - DNA, 20 bp, Artificial Sequence
  Description of Artificial Sequence: Synthetic oligonucleotide
  Target: SCNA; (-) strand; PAM type: YTN; PAM sequence: TTA
aacacttgagtgttatggac

SEQ ID NO: 57969 - DNA, 20 bp, Artificial Sequence
  Description of Artificial Sequence: Synthetic oligonucleotide
  Target: SCNA; (-) strand; PAM type: YTN; PAM sequence: TTT
aaacacttgagtgttatgga

SEQ ID NO: 57970 - DNA, 20 bp, Artificial Sequence
  Description of Artificial Sequence: Synthetic oligonucleotide
  Target: SCNA; (-) strand; PAM type: YTN; PAM sequence: TTT
taaacacttgagtgttatgg

SEQ ID NO: 57971 - DNA, 20 bp, Artificial Sequence
  Description of Artificial Sequence: Synthetic oligonucleotide
  Target: SCNA; (-) strand; PAM type: YTN; PAM sequence: TTT
ttaaacacttgagtgttatg

SEQ ID NO: 57972 - DNA, 20 bp, Artificial Sequence
  Description of Artificial Sequence: Synthetic oligonucleotide
  Target: SCNA; (-) strand; PAM type: YTN; PAM sequence: TTA
tttttaaacacttgagtgtt

SEQ ID NO: 57973 - DNA, 20 bp, Artificial Sequence
  Description of Artificial Sequence: Synthetic oligonucleotide
  Target: SCNA; (-) strand; PAM type: YTN; PAM sequence: TTT
atttttaaacacttgagtgt

SEQ ID NO: 57974 - DNA, 20 bp, Artificial Sequence
  Description of Artificial Sequence: Synthetic oligonucleotide
  Target: SCNA; (-) strand; PAM type: YTN; PAM sequence: TTC
atgaaaatttatttttaaac

SEQ ID NO: 57975 - DNA, 20 bp, Artificial Sequence
  Description of Artificial Sequence: Synthetic oligonucleotide
  Target: SCNA; (-) strand; PAM type: YTN; PAM sequence: CTT
catgaaaatttatttttaaa

SEQ ID NO: 57976 - DNA, 20 bp, Artificial Sequence
  Description of Artificial Sequence: Synthetic oligonucleotide
  Target: SCNA; (-) strand; PAM type: YTN; PAM sequence: TTG
ggcttcatgaaaatttattt

SEQ ID NO: 57977 - DNA, 20 bp, Artificial Sequence
  Description of Artificial Sequence: Synthetic oligonucleotide
  Target: SCNA; (-) strand; PAM type: YTN; PAM sequence: CTG
tcatgttgggcttcatgaaa

SEQ ID NO: 57978 - DNA, 20 bp, Artificial Sequence
  Description of Artificial Sequence: Synthetic oligonucleotide
  Target: SCNA; (-) strand; PAM type: YTN; PAM sequence: CTA
tggctgtcatgttgggcttc

SEQ ID NO: 57979 - DNA, 20 bp, Artificial Sequence
  Description of Artificial Sequence: Synthetic oligonucleotide
  Target: SCNA; (-) strand; PAM type: YTN; PAM sequence: TTA
ctatggctgtcatgttgggc

SEQ ID NO: 57980 - DNA, 20 bp, Artificial Sequence
  Description of Artificial Sequence: Synthetic oligonucleotide
  Target: SCNA; (-) strand; PAM type: YTN; PAM sequence: CTT
actatggctgtcatgttggg

SEQ ID NO: 57981 - DNA, 20 bp, Artificial Sequence
  Description of Artificial Sequence: Synthetic oligonucleotide
  Target: SCNA; (-) strand; PAM type: YTN; PAM sequence: TTG
acttactatggctgtcatgt

SEQ ID NO: 57982 - DNA, 20 bp, Artificial Sequence
  Description of Artificial Sequence: Synthetic oligonucleotide
  Target: SCNA; (-) strand; PAM type: YTN; PAM sequence: TTT
gacttactatggctgtcatg

SEQ ID NO: 57983 - DNA, 20 bp, Artificial Sequence
  Description of Artificial Sequence: Synthetic oligonucleotide
  Target: SCNA; (-) strand; PAM type: YTN; PAM sequence: CTT
tgacttactatggctgtcat

SEQ ID NO: 57984 - DNA, 20 bp, Artificial Sequence
  Description of Artificial Sequence: Synthetic oligonucleotide
  Target: SCNA; (-) strand; PAM type: YTN; PAM sequence: TTC
ctttgacttactatggctgt

SEQ ID NO: 57985 - DNA, 20 bp, Artificial Sequence
  Description of Artificial Sequence: Synthetic oligonucleotide
  Target: SCNA; (-) strand; PAM type: YTN; PAM sequence: TTT
cctttgacttactatggctg

SEQ ID NO: 57986 - DNA, 20 bp, Artificial Sequence
  Description of Artificial Sequence: Synthetic oligonucleotide
  Target: SCNA; (-) strand; PAM type: YTN; PAM sequence: CTC
atttcctttgacttactatg

SEQ ID NO: 57987 - DNA, 20 bp, Artificial Sequence
  Description of Artificial Sequence: Synthetic oligonucleotide
  Target: SCNA; (-) strand; PAM type: YTN; PAM sequence: TTA
ctcatttcctttgacttact

SEQ ID NO: 57988 - DNA, 20 bp, Artificial Sequence
  Description of Artificial Sequence: Synthetic oligonucleotide
  Target: SCNA; (-) strand; PAM type: YTN; PAM sequence: TTT
actcatttcctttgacttac

SEQ ID NO: 57989 - DNA, 20 bp, Artificial Sequence
  Description of Artificial Sequence: Synthetic oligonucleotide
  Target: SCNA; (-) strand; PAM type: YTN; PAM sequence: TTT
tactcatttcctttgactta

SEQ ID NO: 57990 - DNA, 20 bp, Artificial Sequence
  Description of Artificial Sequence: Synthetic oligonucleotide
  Target: SCNA; (-) strand; PAM type: YTN; PAM sequence: CTT
ttactcatttcctttgactt

SEQ ID NO: 57991 - DNA, 20 bp, Artificial Sequence
  Description of Artificial Sequence: Synthetic oligonucleotide
  Target: SCNA; (-) strand; PAM type: YTN; PAM sequence: CTA
agtatccttttactcatttc

SEQ ID NO: 57992 - DNA, 20 bp, Artificial Sequence
  Description of Artificial Sequence: Synthetic oligonucleotide
  Target: SCNA; (-) strand; PAM type: YTN; PAM sequence: TTG
tgaatataatatctaagtat

SEQ ID NO: 57993 - DNA, 20 bp, Artificial Sequence
  Description of Artificial Sequence: Synthetic oligonucleotide
  Target: SCNA; (-) strand; PAM type: YTN; PAM sequence: TTG
acattgtgaatataatatct

SEQ ID NO: 57994 - DNA, 20 bp, Artificial Sequence
  Description of Artificial Sequence: Synthetic oligonucleotide
  Target: SCNA; (-) strand; PAM type: YTN; PAM sequence: TTT
gacattgtgaatataatatc

SEQ ID NO: 57995 - DNA, 20 bp, Artificial Sequence
  Description of Artificial Sequence: Synthetic oligonucleotide
  Target: SCNA; (-) strand; PAM type: YTN; PAM sequence: TTA
aaatgtcaggtttgacattg

SEQ ID NO: 57996 - DNA, 20 bp, Artificial Sequence
  Description of Artificial Sequence: Synthetic oligonucleotide
  Target: SCNA; (-) strand; PAM type: YTN; PAM sequence: TTT
aaaatgtcaggtttgacatt

SEQ ID NO: 57997 - DNA, 20 bp, Artificial Sequence
  Description of Artificial Sequence: Synthetic oligonucleotide
  Target: SCNA; (-) strand; PAM type: YTN; PAM sequence: TTT
taaaatgtcaggtttgacat

SEQ ID NO: 57998 - DNA, 20 bp, Artificial Sequence
  Description of Artificial Sequence: Synthetic oligonucleotide
  Target: SCNA; (-) strand; PAM type: YTN; PAM sequence: CTA
gatgaataaaaaaaaagcag

SEQ ID NO: 57999 - DNA, 20 bp, Artificial Sequence
  Description of Artificial Sequence: Synthetic oligonucleotide
  Target: SCNA; (-) strand; PAM type: YTN; PAM sequence: TTG
tgtgctagatgaataaaaaa

SEQ ID NO: 58000 - DNA, 20 bp, Artificial Sequence
  Description of Artificial Sequence: Synthetic oligonucleotide
  Target: SCNA; (-) strand; PAM type: YTN; PAM sequence: CTA
gccagttgtgtgctagatga

SEQ ID NO: 58001 - DNA, 20 bp, Artificial Sequence
  Description of Artificial Sequence: Synthetic oligonucleotide
  Target: SCNA; (-) strand; PAM type: YTN; PAM sequence: TTC
ataaaaggatagctagccag

SEQ ID NO: 58002 - DNA, 20 bp, Artificial Sequence
  Description of Artificial Sequence: Synthetic oligonucleotide
  Target: SCNA; (-) strand; PAM type: YTN; PAM sequence: TTA
attcataaaaggatagctag

SEQ ID NO: 58003 - DNA, 20 bp, Artificial Sequence
  Description of Artificial Sequence: Synthetic oligonucleotide
  Target: SCNA; (-) strand; PAM type: YTN; PAM sequence: CTT
aattcataaaaggatagcta

SEQ ID NO: 58004 - DNA, 20 bp, Artificial Sequence
  Description of Artificial Sequence: Synthetic oligonucleotide
  Target: SCNA; (-) strand; PAM type: YTN; PAM sequence: CTG
acttaattcataaaaggata

SEQ ID NO: 58005 - DNA, 20 bp, Artificial Sequence
  Description of Artificial Sequence: Synthetic oligonucleotide
  Target: SCNA; (-) strand; PAM type: YTN; PAM sequence: CTG
taataatcctgacttaattc

SEQ ID NO: 58006 - DNA, 20 bp, Artificial Sequence
  Description of Artificial Sequence: Synthetic oligonucleotide
  Target: SCNA; (-) strand; PAM type: YTN; PAM sequence: TTC
tgtaataatcctgacttaat

SEQ ID NO: 58007 - DNA, 20 bp, Artificial Sequence
  Description of Artificial Sequence: Synthetic oligonucleotide
  Target: SCNA; (-) strand; PAM type: YTN; PAM sequence: TTG
acacgtgtatattctgtaat

SEQ ID NO: 58008 - DNA, 20 bp, Artificial Sequence
  Description of Artificial Sequence: Synthetic oligonucleotide
  Target: SCNA; (-) strand; PAM type: YTN; PAM sequence: TTC
aaatggattgacacgtgtat

SEQ ID NO: 58009 - DNA, 20 bp, Artificial Sequence
  Description of Artificial Sequence: Synthetic oligonucleotide
  Target: SCNA; (-) strand; PAM type: YTN; PAM sequence: TTT
caaatggattgacacgtgta

SEQ ID NO: 58010 - DNA, 20 bp, Artificial Sequence
  Description of Artificial Sequence: Synthetic oligonucleotide
  Target: SCNA; (-) strand; PAM type: YTN; PAM sequence: TTG
atttcaaatggattgacacg

SEQ ID NO: 58011 - DNA, 20 bp, Artificial Sequence
  Description of Artificial Sequence: Synthetic oligonucleotide
  Target: SCNA; (-) strand; PAM type: YTN; PAM sequence: CTT
gatttcaaatggattgacac

SEQ ID NO: 58012 - DNA, 20 bp, Artificial Sequence
  Description of Artificial Sequence: Synthetic oligonucleotide
  Target: SCNA; (-) strand; PAM type: YTN; PAM sequence: TTA
aatcttgatttcaaatggat

SEQ ID NO: 58013 - DNA, 20 bp, Artificial Sequence
  Description of Artificial Sequence: Synthetic oligonucleotide
  Target: SCNA; (-) strand; PAM type: YTN; PAM sequence: TTT
aaatcttgatttcaaatgga

SEQ ID NO: 58014 - DNA, 20 bp, Artificial Sequence
  Description of Artificial Sequence: Synthetic oligonucleotide
  Target: SCNA; (-) strand; PAM type: YTN; PAM sequence: TTT
taaatcttgatttcaaatgg

SEQ ID NO: 58015 - DNA, 20 bp, Artificial Sequence
  Description of Artificial Sequence: Synthetic oligonucleotide
  Target: SCNA; (-) strand; PAM type: YTN; PAM sequence: TTT
ttaaatcttgatttcaaatg

SEQ ID NO: 58016 - DNA, 20 bp, Artificial Sequence
  Description of Artificial Sequence: Synthetic oligonucleotide
  Target: SCNA; (-) strand; PAM type: YTN; PAM sequence: TTT
tttaaatcttgatttcaaat

SEQ ID NO: 58017 - DNA, 20 bp, Artificial Sequence
  Description of Artificial Sequence: Synthetic oligonucleotide
  Target: SCNA; (-) strand; PAM type: YTN; PAM sequence: TTT
ttttaaatcttgatttcaaa

SEQ ID NO: 58018 - DNA, 20 bp, Artificial Sequence
  Description of Artificial Sequence: Synthetic oligonucleotide
  Target: SCNA; (-) strand; PAM type: YTN; PAM sequence: CTT
tttttaaatcttgatttcaa

SEQ ID NO: 58019 - DNA, 20 bp, Artificial Sequence
  Description of Artificial Sequence: Synthetic oligonucleotide
  Target: SCNA; (-) strand; PAM type: YTN; PAM sequence: TTA
tgaacaactttttttaaatc

SEQ ID NO: 58020 - DNA, 20 bp, Artificial Sequence
  Description of Artificial Sequence: Synthetic oligonucleotide
  Target: SCNA; (-) strand; PAM type: YTN; PAM sequence: TTA
catcaatatattatgaacaa

SEQ ID NO: 58021 - DNA, 20 bp, Artificial Sequence
  Description of Artificial Sequence: Synthetic oligonucleotide
  Target: SCNA; (-) strand; PAM type: YTN; PAM sequence: TTG
gaaaaattacatcaatatat

SEQ ID NO: 58022 - DNA, 20 bp, Artificial Sequence
  Description of Artificial Sequence: Synthetic oligonucleotide
  Target: SCNA; (-) strand; PAM type: YTN; PAM sequence: TTT
ggaaaaattacatcaatata

SEQ ID NO: 58023 - DNA, 20 bp, Artificial Sequence
  Description of Artificial Sequence: Synthetic oligonucleotide
  Target: SCNA; (-) strand; PAM type: YTN; PAM sequence: TTT
tggaaaaattacatcaatat

SEQ ID NO: 58024 - DNA, 20 bp, Artificial Sequence
  Description of Artificial Sequence: Synthetic oligonucleotide
  Target: SCNA; (-) strand; PAM type: YTN; PAM sequence: CTA
agcaatgccattttggaaaa

SEQ ID NO: 58025 - DNA, 20 bp, Artificial Sequence
  Description of Artificial Sequence: Synthetic oligonucleotide
  Target: SCNA; (-) strand; PAM type: YTN; PAM sequence: TTC
ctaagcaatgccattttgga

SEQ ID NO: 58026 - DNA, 20 bp, Artificial Sequence
  Description of Artificial Sequence: Synthetic oligonucleotide
  Target: SCNA; (-) strand; PAM type: YTN; PAM sequence: TTC
aaaatcagaatgaagttcct

SEQ ID NO: 58027 - DNA, 20 bp, Artificial Sequence
  Description of Artificial Sequence: Synthetic oligonucleotide
  Target: SCNA; (-) strand; PAM type: YTN; PAM sequence: TTG
ttcaaaatcagaatgaagtt

SEQ ID NO: 58028 - DNA, 20 bp, Artificial Sequence
  Description of Artificial Sequence: Synthetic oligonucleotide
  Target: SCNA; (-) strand; PAM type: YTN; PAM sequence: TTG
ttgttcaaaatcagaatgaa

SEQ ID NO: 58029 - DNA, 20 bp, Artificial Sequence
  Description of Artificial Sequence: Synthetic oligonucleotide
  Target: SCNA; (-) strand; PAM type: YTN; PAM sequence: TTA
ttgttgttcaaaatcagaat

SEQ ID NO: 58030 - DNA, 20 bp, Artificial Sequence
  Description of Artificial Sequence: Synthetic oligonucleotide
  Target: SCNA; (-) strand; PAM type: YTN; PAM sequence: TTT
attgttgttcaaaatcagaa

SEQ ID NO: 58031 - DNA, 20 bp, Artificial Sequence
  Description of Artificial Sequence: Synthetic oligonucleotide
  Target: SCNA; (-) strand; PAM type: YTN; PAM sequence: TTA
tttattgttgttcaaaatca

SEQ ID NO: 58032 - DNA, 20 bp, Artificial Sequence
  Description of Artificial Sequence: Synthetic oligonucleotide
  Target: SCNA; (-) strand; PAM type: YTN; PAM sequence: TTC
agcgatgttatttattgttg

SEQ ID NO: 58033 - DNA, 20 bp, Artificial Sequence
  Description of Artificial Sequence: Synthetic oligonucleotide
  Target: SCNA; (-) strand; PAM type: YTN; PAM sequence: TTA
aaacatccaggttcagcgat

SEQ ID NO: 58034 - DNA, 20 bp, Artificial Sequence
  Description of Artificial Sequence: Synthetic oligonucleotide
  Target: SCNA; (-) strand; PAM type: YTN; PAM sequence: CTT
aaaacatccaggttcagcga

SEQ ID NO: 58035 - DNA, 20 bp, Artificial Sequence
  Description of Artificial Sequence: Synthetic oligonucleotide
  Target: SCNA; (-) strand; PAM type: YTN; PAM sequence: TTG
gatacttaaaacatccaggt

SEQ ID NO: 58036 - DNA, 20 bp, Artificial Sequence
  Description of Artificial Sequence: Synthetic oligonucleotide
  Target: SCNA; (-) strand; PAM type: YTN; PAM sequence: CTT
ggatacttaaaacatccagg

SEQ ID NO: 58037 - DNA, 20 bp, Artificial Sequence
  Description of Artificial Sequence: Synthetic oligonucleotide
  Target: SCNA; (-) strand; PAM type: YTN; PAM sequence: TTG
ccttggatacttaaaacatc

SEQ ID NO: 58038 - DNA, 20 bp, Artificial Sequence
  Description of Artificial Sequence: Synthetic oligonucleotide
  Target: SCNA; (-) strand; PAM type: YTN; PAM sequence: CTG
ttgccttggatacttaaaac

SEQ ID NO: 58039 - DNA, 20 bp, Artificial Sequence
  Description of Artificial Sequence: Synthetic oligonucleotide
  Target: SCNA; (-) strand; PAM type: YTN; PAM sequence: TTG
aaatgtctgttgccttggat

SEQ ID NO: 58040 - DNA, 20 bp, Artificial Sequence
  Description of Artificial Sequence: Synthetic oligonucleotide
  Target: SCNA; (-) strand; PAM type: YTN; PAM sequence: CTT
gaaatgtctgttgccttgga

SEQ ID NO: 58041 - DNA, 20 bp, Artificial Sequence
  Description of Artificial Sequence: Synthetic oligonucleotide
  Target: SCNA; (-) strand; PAM type: YTN; PAM sequence: TTC
acgcaagaaataagcttgaa

SEQ ID NO: 58042 - DNA, 20 bp, Artificial Sequence
  Description of Artificial Sequence: Synthetic oligonucleotide
  Target: SCNA; (-) strand; PAM type: YTN; PAM sequence: TTT
cacgcaagaaataagcttga

SEQ ID NO: 58043 - DNA, 20 bp, Artificial Sequence
  Description of Artificial Sequence: Synthetic oligonucleotide
  Target: SCNA; (-) strand; PAM type: YTN; PAM sequence: TTT
tcacgcaagaaataagcttg

SEQ ID NO: 58044 - DNA, 20 bp, Artificial Sequence
  Description of Artificial Sequence: Synthetic oligonucleotide
  Target: SCNA; (-) strand; PAM type: YTN; PAM sequence: TTA
atagttttcacgcaagaaat

SEQ ID NO: 58045 - DNA, 20 bp, Artificial Sequence
  Description of Artificial Sequence: Synthetic oligonucleotide
  Target: SCNA; (-) strand; PAM type: YTN; PAM sequence: CTA
catgatgattaatagttttc

SEQ ID NO: 58046 - DNA, 20 bp, Artificial Sequence
  Description of Artificial Sequence: Synthetic oligonucleotide
  Target: SCNA; (-) strand; PAM type: YTN; PAM sequence: TTA
tctacatgatgattaatagt

SEQ ID NO: 58047 - DNA, 20 bp, Artificial Sequence
  Description of Artificial Sequence: Synthetic oligonucleotide
  Target: SCNA; (-) strand; PAM type: YTN; PAM sequence: CTT
atctacatgatgattaatag

SEQ ID NO: 58048 - DNA, 20 bp, Artificial Sequence
  Description of Artificial Sequence: Synthetic oligonucleotide
  Target: SCNA; (-) strand; PAM type: YTN; PAM sequence: TTG
agacacgacttatctacatg

SEQ ID NO: 58049 - DNA, 20 bp, Artificial Sequence
  Description of Artificial Sequence: Synthetic oligonucleotide
  Target: SCNA; (-) strand; PAM type: YTN; PAM sequence: TTA
tcatatcccattgagacacg

SEQ ID NO: 58050 - DNA, 20 bp, Artificial Sequence
  Description of Artificial Sequence: Synthetic oligonucleotide
  Target: SCNA; (-) strand; PAM type: YTN; PAM sequence: TTC
gttatcatatcccattgaga

SEQ ID NO: 58051 - DNA, 20 bp, Artificial Sequence
  Description of Artificial Sequence: Synthetic oligonucleotide
  Target: SCNA; (-) strand; PAM type: YTN; PAM sequence: CTT
cgttatcatatcccattgag

SEQ ID NO: 58052 - DNA, 20 bp, Artificial Sequence
  Description of Artificial Sequence: Synthetic oligonucleotide
  Target: SCNA; (-) strand; PAM type: YTN; PAM sequence: CTG
acaaataatacagcagtcag

SEQ ID NO: 58053 - DNA, 20 bp, Artificial Sequence
  Description of Artificial Sequence: Synthetic oligonucleotide
  Target: SCNA; (-) strand; PAM type: YTN; PAM sequence: CTG
cctgacaaataatacagcag

SEQ ID NO: 58054 - DNA, 20 bp, Artificial Sequence
  Description of Artificial Sequence: Synthetic oligonucleotide
  Target: SCNA; (-) strand; PAM type: YTN; PAM sequence: CTG
tgaagccactgcctgacaaa

SEQ ID NO: 58055 - DNA, 20 bp, Artificial Sequence
  Description of Artificial Sequence: Synthetic oligonucleotide
  Target: SCNA; (-) strand; PAM type: YTN; PAM sequence: CTG
aataaactgtgaagccactg

SEQ ID NO: 58056 - DNA, 20 bp, Artificial Sequence
  Description of Artificial Sequence: Synthetic oligonucleotide
  Target: SCNA; (-) strand; PAM type: YTN; PAM sequence: TTA
gagagcaaaagtcctgaata

SEQ ID NO: 58057 - DNA, 20 bp, Artificial Sequence
  Description of Artificial Sequence: Synthetic oligonucleotide
  Target: SCNA; (-) strand; PAM type: YTN; PAM sequence: TTT
agagagcaaaagtcctgaat

SEQ ID NO: 58058 - DNA, 20 bp, Artificial Sequence
  Description of Artificial Sequence: Synthetic oligonucleotide
  Target: SCNA; (-) strand; PAM type: YTN; PAM sequence: TTT
tagagagcaaaagtcctgaa

SEQ ID NO: 58059 - DNA, 20 bp, Artificial Sequence
  Description of Artificial Sequence: Synthetic oligonucleotide
  Target: SCNA; (-) strand; PAM type: YTN; PAM sequence: CTG
gagttttagagagcaaaagt

SEQ ID NO: 58060 - DNA, 20 bp, Artificial Sequence
  Description of Artificial Sequence: Synthetic oligonucleotide
  Target: SCNA; (-) strand; PAM type: YTN; PAM sequence: TTC
tggagttttagagagcaaaa

SEQ ID NO: 58061 - DNA, 20 bp, Artificial Sequence
  Description of Artificial Sequence: Synthetic oligonucleotide
  Target: SCNA; (-) strand; PAM type: YTN; PAM sequence: TTT
ctggagttttagagagcaaa

SEQ ID NO: 58062 - DNA, 20 bp, Artificial Sequence
  Description of Artificial Sequence: Synthetic oligonucleotide
  Target: SCNA; (-) strand; PAM type: YTN; PAM sequence: TTT
tctggagttttagagagcaa

SEQ ID NO: 58063 - DNA, 20 bp, Artificial Sequence
  Description of Artificial Sequence: Synthetic oligonucleotide
  Target: SCNA; (-) strand; PAM type: YTN; PAM sequence: TTG
taattttctggagttttaga

SEQ ID NO: 58064 - DNA, 20 bp, Artificial Sequence
  Description of Artificial Sequence: Synthetic oligonucleotide
  Target: SCNA; (-) strand; PAM type: YTN; PAM sequence: TTT
gtaattttctggagttttag

SEQ ID NO: 58065 - DNA, 20 bp, Artificial Sequence
  Description of Artificial Sequence: Synthetic oligonucleotide
  Target: SCNA; (-) strand; PAM type: YTN; PAM sequence: TTT
tgtaattttctggagtttta

SEQ ID NO: 58066 - DNA, 20 bp, Artificial Sequence
  Description of Artificial Sequence: Synthetic oligonucleotide
  Target: SCNA; (-) strand; PAM type: YTN; PAM sequence: TTT
ttgtaattttctggagtttt

SEQ ID NO: 58067 - DNA, 20 bp, Artificial Sequence
  Description of Artificial Sequence: Synthetic oligonucleotide
  Target: SCNA; (-) strand; PAM type: YTN; PAM sequence: TTA
tatttttgtaattttctgga

SEQ ID NO: 58068 - DNA, 20 bp, Artificial Sequence
  Description of Artificial Sequence: Synthetic oligonucleotide
  Target: SCNA; (-) strand; PAM type: YTN; PAM sequence: TTT
atatttttgtaattttctgg

SEQ ID NO: 58069 - DNA, 20 bp, Artificial Sequence
  Description of Artificial Sequence: Synthetic oligonucleotide
  Target: SCNA; (-) strand; PAM type: YTN; PAM sequence: TTT
tatatttttgtaattttctg

SEQ ID NO: 58070 - DNA, 20 bp, Artificial Sequence
  Description of Artificial Sequence: Synthetic oligonucleotide
  Target: SCNA; (-) strand; PAM type: YTN; PAM sequence: TTT
ttatatttttgtaattttct

SEQ ID NO: 58071 - DNA, 20 bp, Artificial Sequence
  Description of Artificial Sequence: Synthetic oligonucleotide
  Target: SCNA; (-) strand; PAM type: YTN; PAM sequence: CTG
aagtttttatatttttgtaa

SEQ ID NO: 58072 - DNA, 20 bp, Artificial Sequence
  Description of Artificial Sequence: Synthetic oligonucleotide
  Target: SCNA; (-) strand; PAM type: YTN; PAM sequence: TTG
gatcctgaagtttttatatt

SEQ ID NO: 58073 - DNA, 20 bp, Artificial Sequence
  Description of Artificial Sequence: Synthetic oligonucleotide
  Target: SCNA; (-) strand; PAM type: YTN; PAM sequence: CTA
aaagagttggatcctgaagt

SEQ ID NO: 58074 - DNA, 20 bp, Artificial Sequence
  Description of Artificial Sequence: Synthetic oligonucleotide
  Target: SCNA; (-) strand; PAM type: YTN; PAM sequence: CTC
taaaagagttggatcctgaa

SEQ ID NO: 58075 - DNA, 20 bp, Artificial Sequence
  Description of Artificial Sequence: Synthetic oligonucleotide
  Target: SCNA; (-) strand; PAM type: YTN; PAM sequence: TTC
atgccacatggaatgctcta

SEQ ID NO: 58076 - DNA, 20 bp, Artificial Sequence
  Description of Artificial Sequence: Synthetic oligonucleotide
  Target: SCNA; (-) strand; PAM type: YTN; PAM sequence: TTT
catgccacatggaatgctct

SEQ ID NO: 58077 - DNA, 20 bp, Artificial Sequence
  Description of Artificial Sequence: Synthetic oligonucleotide
  Target: SCNA; (-) strand; PAM type: YTN; PAM sequence: CTT
tcatgccacatggaatgctc

SEQ ID NO: 58078 - DNA, 20 bp, Artificial Sequence
  Description of Artificial Sequence: Synthetic oligonucleotide
  Target: SCNA; (-) strand; PAM type: YTN; PAM sequence: CTC
tttcatgccacatggaatgc

SEQ ID NO: 58079 - DNA, 20 bp, Artificial Sequence
  Description of Artificial Sequence: Synthetic oligonucleotide
  Target: SCNA; (-) strand; PAM type: YTN; PAM sequence: CTA
atgagcatctctttcatgcc

SEQ ID NO: 58080 - DNA, 20 bp, Artificial Sequence
  Description of Artificial Sequence: Synthetic oligonucleotide
  Target: SCNA; (-) strand; PAM type: YTN; PAM sequence: CTG
aactaatgagcatctctttc

SEQ ID NO: 58081 - DNA, 20 bp, Artificial Sequence
  Description of Artificial Sequence: Synthetic oligonucleotide
  Target: SCNA; (-) strand; PAM type: YTN; PAM sequence: TTG
ctgaactaatgagcatctct

SEQ ID NO: 58082 - DNA, 20 bp, Artificial Sequence
  Description of Artificial Sequence: Synthetic oligonucleotide
  Target: SCNA; (-) strand; PAM type: YTN; PAM sequence: CTT
gctgaactaatgagcatctc

SEQ ID NO: 58083 - DNA, 20 bp, Artificial Sequence
  Description of Artificial Sequence: Synthetic oligonucleotide
  Target: SCNA; (-) strand; PAM type: YTN; PAM sequence: CTC
aaataaatccttgctgaact

SEQ ID NO: 58084 - DNA, 20 bp, Artificial Sequence
  Description of Artificial Sequence: Synthetic oligonucleotide
  Target: SCNA; (-) strand; PAM type: YTN; PAM sequence: CTG
gtgctcaaataaatccttgc

SEQ ID NO: 58085 - DNA, 20 bp, Artificial Sequence
  Description of Artificial Sequence: Synthetic oligonucleotide
  Target: SCNA; (-) strand; PAM type: YTN; PAM sequence: TTG
tggctggtgctcaaataaat

SEQ ID NO: 58086 - DNA, 20 bp, Artificial Sequence
  Description of Artificial Sequence: Synthetic oligonucleotide
  Target: SCNA; (-) strand; PAM type: YTN; PAM sequence: CTT
gtggctggtgctcaaataaa

SEQ ID NO: 58087 - DNA, 20 bp, Artificial Sequence
  Description of Artificial Sequence: Synthetic oligonucleotide
  Target: SCNA; (-) strand; PAM type: YTN; PAM sequence: TTG
cttgtggctggtgctcaaat

SEQ ID NO: 58088 - DNA, 20 bp, Artificial Sequence
  Description of Artificial Sequence: Synthetic oligonucleotide
  Target: SCNA; (-) strand; PAM type: YTN; PAM sequence: CTT
gcttgtggctggtgctcaaa

SEQ ID NO: 58089 - DNA, 20 bp, Artificial Sequence
  Description of Artificial Sequence: Synthetic oligonucleotide
  Target: SCNA; (-) strand; PAM type: YTN; PAM sequence: CTC
aacagtgtcttgcttgtggc

SEQ ID NO: 58090 - DNA, 20 bp, Artificial Sequence
  Description of Artificial Sequence: Synthetic oligonucleotide
  Target: SCNA; (-) strand; PAM type: YTN; PAM sequence: CTC
ctcaacagtgtcttgcttgt

SEQ ID NO: 58091 - DNA, 20 bp, Artificial Sequence
  Description of Artificial Sequence: Synthetic oligonucleotide
  Target: SCNA; (-) strand; PAM type: YTN; PAM sequence: CTA
tcccagctcctcaacagtgt

SEQ ID NO: 58092 - DNA, 20 bp, Artificial Sequence
  Description of Artificial Sequence: Synthetic oligonucleotide
  Target: SCNA; (-) strand; PAM type: YTN; PAM sequence: TTG
gtctatcccagctcctcaac

SEQ ID NO: 58093 - DNA, 20 bp, Artificial Sequence
  Description of Artificial Sequence: Synthetic oligonucleotide
  Target: SCNA; (-) strand; PAM type: YTN; PAM sequence: CTT
ggtctatcccagctcctcaa

SEQ ID NO: 58094 - DNA, 20 bp, Artificial Sequence
  Description of Artificial Sequence: Synthetic oligonucleotide
  Target: SCNA; (-) strand; PAM type: YTN; PAM sequence: CTA
gaacacttggtctatcccag

SEQ ID NO: 58095 - DNA, 20 bp, Artificial Sequence
  Description of Artificial Sequence: Synthetic oligonucleotide
  Target: SCNA; (-) strand; PAM type: YTN; PAM sequence: CTA
tgcgtgcagtgtggagtagc

SEQ ID NO: 58096 - DNA, 20 bp, Artificial Sequence
  Description of Artificial Sequence: Synthetic oligonucleotide
  Target: SCNA; (-) strand; PAM type: YTN; PAM sequence: CTA
ctatgcgtgcagtgtggagt

SEQ ID NO: 58097 - DNA, 20 bp, Artificial Sequence
  Description of Artificial Sequence: Synthetic oligonucleotide
  Target: SCNA; (-) strand; PAM type: YTN; PAM sequence: CTG
taatgctactatgcgtgcag

SEQ ID NO: 58098 - DNA, 20 bp, Artificial Sequence
  Description of Artificial Sequence: Synthetic oligonucleotide
  Target: SCNA; (-) strand; PAM type: YTN; PAM sequence: TTC
tgtaatgctactatgcgtgc

SEQ ID NO: 58099 - DNA, 20 bp, Artificial Sequence
  Description of Artificial Sequence: Synthetic oligonucleotide
  Target: SCNA; (-) strand; PAM type: YTN; PAM sequence: TTA
ttctgtaatgctactatgcg

SEQ ID NO: 58100 - DNA, 20 bp, Artificial Sequence
  Description of Artificial Sequence: Synthetic oligonucleotide
  Target: SCNA; (-) strand; PAM type: YTN; PAM sequence: TTG
aatcagcgttattctgtaat

SEQ ID NO: 58101 - DNA, 20 bp, Artificial Sequence
  Description of Artificial Sequence: Synthetic oligonucleotide
  Target: SCNA; (-) strand; PAM type: YTN; PAM sequence: CTT
gaatcagcgttattctgtaa

SEQ ID NO: 58102 - DNA, 20 bp, Artificial Sequence
  Description of Artificial Sequence: Synthetic oligonucleotide
  Target: SCNA; (-) strand; PAM type: YTN; PAM sequence: TTG
tacaaagaaagtgacttgaa

SEQ ID NO: 58103 - DNA, 20 bp, Artificial Sequence
  Description of Artificial Sequence: Synthetic oligonucleotide
  Target: SCNA; (-) strand; PAM type: YTN; PAM sequence: CTA
agaatattgtacaaagaaag

SEQ ID NO: 58104 - DNA, 20 bp, Artificial Sequence
  Description of Artificial Sequence: Synthetic oligonucleotide
  Target: SCNA; (-) strand; PAM type: YTN; PAM sequence: TTC
taagaatattgtacaaagaa

SEQ ID NO: 58105 - DNA, 20 bp, Artificial Sequence
  Description of Artificial Sequence: Synthetic oligonucleotide
  Target: SCNA; (-) strand; PAM type: YTN; PAM sequence: TTG
ttctaagaatattgtacaaa

SEQ ID NO: 58106 - DNA, 20 bp, Artificial Sequence
  Description of Artificial Sequence: Synthetic oligonucleotide
  Target: SCNA; (-) strand; PAM type: YTN; PAM sequence: CTT
gttctaagaatattgtacaa

SEQ ID NO: 58107 - DNA, 20 bp, Artificial Sequence
  Description of Artificial Sequence: Synthetic oligonucleotide
  Target: SCNA; (-) strand; PAM type: YTN; PAM sequence: CTG
cttgttctaagaatattgta

SEQ ID NO: 58108 - DNA, 20 bp, Artificial Sequence
  Description of Artificial Sequence: Synthetic oligonucleotide
  Target: SCNA; (-) strand; PAM type: YTN; PAM sequence: TTG
aagaagaaagatctgcttgt

SEQ ID NO: 58109 - DNA, 20 bp, Artificial Sequence
  Description of Artificial Sequence: Synthetic oligonucleotide
  Target: SCNA; (-) strand; PAM type: YTN; PAM sequence: CTA
ttgaagaagaaagatctgct

SEQ ID NO: 58110 - DNA, 20 bp, Artificial Sequence
  Description of Artificial Sequence: Synthetic oligonucleotide
  Target: SCNA; (-) strand; PAM type: YTN; PAM sequence: TTC
tattgaagaagaaagatctg

SEQ ID NO: 58111 - DNA, 20 bp, Artificial Sequence
  Description of Artificial Sequence: Synthetic oligonucleotide
  Target: SCNA; (-) strand; PAM type: YTN; PAM sequence: CTT
ctattgaagaagaaagatct

SEQ ID NO: 58112 - DNA, 20 bp, Artificial Sequence
  Description of Artificial Sequence: Synthetic oligonucleotide
  Target: SCNA; (-) strand; PAM type: YTN; PAM sequence: CTA
cttctattgaagaagaaaga

SEQ ID NO: 58113 - DNA, 20 bp, Artificial Sequence
  Description of Artificial Sequence: Synthetic oligonucleotide
  Target: SCNA; (-) strand; PAM type: YTN; PAM sequence: TTC
ctacttctattgaagaagaa

SEQ ID NO: 58114 - DNA, 20 bp, Artificial Sequence
  Description of Artificial Sequence: Synthetic oligonucleotide
  Target: SCNA; (-) strand; PAM type: YTN; PAM sequence: TTT
cctacttctattgaagaaga

SEQ ID NO: 58115 - DNA, 20 bp, Artificial Sequence
  Description of Artificial Sequence: Synthetic oligonucleotide
  Target: SCNA; (-) strand; PAM type: YTN; PAM sequence: TTA
tatttcctacttctattgaa

SEQ ID NO: 58116 - DNA, 20 bp, Artificial Sequence
  Description of Artificial Sequence: Synthetic oligonucleotide
  Target: SCNA; (-) strand; PAM type: YTN; PAM sequence: TTT
atatttcctacttctattga

SEQ ID NO: 58117 - DNA, 20 bp, Artificial Sequence
  Description of Artificial Sequence: Synthetic oligonucleotide
  Target: SCNA; (-) strand; PAM type: YTN; PAM sequence: TTA
tatagagaaaatttatattt

SEQ ID NO: 58118 - DNA, 20 bp, Artificial Sequence
  Description of Artificial Sequence: Synthetic oligonucleotide
  Target: SCNA; (-) strand; PAM type: YTN; PAM sequence: TTA
agtgcaaagcaacagtgatg

SEQ ID NO: 58119 - DNA, 20 bp, Artificial Sequence
  Description of Artificial Sequence: Synthetic oligonucleotide
  Target: SCNA; (-) strand; PAM type: YTN; PAM sequence: TTT
aagtgcaaagcaacagtgat

SEQ ID NO: 58120 - DNA, 20 bp, Artificial Sequence
  Description of Artificial Sequence: Synthetic oligonucleotide
  Target: SCNA; (-) strand; PAM type: YTN; PAM sequence: TTT
taagtgcaaagcaacagtga

SEQ ID NO: 58121 - DNA, 20 bp, Artificial Sequence
  Description of Artificial Sequence: Synthetic oligonucleotide
  Target: SCNA; (-) strand; PAM type: YTN; PAM sequence: TTA
aaagtgcacaggcagaaatt

SEQ ID NO: 58122 - DNA, 20 bp, Artificial Sequence
  Description of Artificial Sequence: Synthetic oligonucleotide
  Target: SCNA; (-) strand; PAM type: YTN; PAM sequence: TTG
gcagagtagaaacaggttaa

SEQ ID NO: 58123 - DNA, 20 bp, Artificial Sequence
  Description of Artificial Sequence: Synthetic oligonucleotide
  Target: SCNA; (-) strand; PAM type: YTN; PAM sequence: TTC
attggcagagtagaaacagg

SEQ ID NO: 58124 - DNA, 20 bp, Artificial Sequence
  Description of Artificial Sequence: Synthetic oligonucleotide
  Target: SCNA; (-) strand; PAM type: YTN; PAM sequence: TTT
cattggcagagtagaaacag

SEQ ID NO: 58125 - DNA, 20 bp, Artificial Sequence
  Description of Artificial Sequence: Synthetic oligonucleotide
  Target: SCNA; (-) strand; PAM type: YTN; PAM sequence: CTT
tcattggcagagtagaaaca

SEQ ID NO: 58126 - DNA, 20 bp, Artificial Sequence
  Description of Artificial Sequence: Synthetic oligonucleotide
  Target: SCNA; (-) strand; PAM type: YTN; PAM sequence: TTC
atacctttcattggcagagt

SEQ ID NO: 58127 - DNA, 20 bp, Artificial Sequence
  Description of Artificial Sequence: Synthetic oligonucleotide
  Target: SCNA; (-) strand; PAM type: YTN; PAM sequence: TTG
aagttcatacctttcattgg

SEQ ID NO: 58128 - DNA, 20 bp, Artificial Sequence
  Description of Artificial Sequence: Synthetic oligonucleotide
  Target: SCNA; (-) strand; PAM type: YTN; PAM sequence: CTT
gaagttcatacctttcattg

SEQ ID NO: 58129 - DNA, 20 bp, Artificial Sequence
  Description of Artificial Sequence: Synthetic oligonucleotide
  Target: SCNA; (-) strand; PAM type: YTN; PAM sequence: TTC
ttgaagttcatacctttcat

SEQ ID NO: 58130 - DNA, 20 bp, Artificial Sequence
  Description of Artificial Sequence: Synthetic oligonucleotide
  Target: SCNA; (-) strand; PAM type: YTN; PAM sequence: TTT
cttgaagttcatacctttca

SEQ ID NO: 58131 - DNA, 20 bp, Artificial Sequence
  Description of Artificial Sequence: Synthetic oligonucleotide
  Target: SCNA; (-) strand; PAM type: YTN; PAM sequence: TTC
atttcttgaagttcatacct

SEQ ID NO: 58132 - DNA, 20 bp, Artificial Sequence
  Description of Artificial Sequence: Synthetic oligonucleotide
  Target: SCNA; (-) strand; PAM type: YTN; PAM sequence: TTA
tcagtcatacaattcatttc

SEQ ID NO: 58133 - DNA, 20 bp, Artificial Sequence
  Description of Artificial Sequence: Synthetic oligonucleotide
  Target: SCNA; (-) strand; PAM type: YTN; PAM sequence: CTC
atgtgcacataagaagttat

SEQ ID NO: 58134 - DNA, 20 bp, Artificial Sequence
  Description of Artificial Sequence: Synthetic oligonucleotide
  Target: SCNA; (-) strand; PAM type: YTN; PAM sequence: TTA
ctcatgtgcacataagaagt

SEQ ID NO: 58135 - DNA, 20 bp, Artificial Sequence
  Description of Artificial Sequence: Synthetic oligonucleotide
  Target: SCNA; (-) strand; PAM type: YTN; PAM sequence: TTT
actcatgtgcacataagaag

SEQ ID NO: 58136 - DNA, 20 bp, Artificial Sequence
  Description of Artificial Sequence: Synthetic oligonucleotide
  Target: SCNA; (-) strand; PAM type: YTN; PAM sequence: TTT
tactcatgtgcacataagaa

SEQ ID NO: 58137 - DNA, 20 bp, Artificial Sequence
  Description of Artificial Sequence: Synthetic oligonucleotide
  Target: SCNA; (-) strand; PAM type: YTN; PAM sequence: TTT
ttactcatgtgcacataaga

SEQ ID NO: 58138 - DNA, 20 bp, Artificial Sequence
  Description of Artificial Sequence: Synthetic oligonucleotide
  Target: SCNA; (-) strand; PAM type: YTN; PAM sequence: TTG
atccatatttttactcatgt

SEQ ID NO: 58139 - DNA, 20 bp, Artificial Sequence
  Description of Artificial Sequence: Synthetic oligonucleotide
  Target: SCNA; (-) strand; PAM type: YTN; PAM sequence: TTT
gatccatatttttactcatg

SEQ ID NO: 58140 - DNA, 20 bp, Artificial Sequence
  Description of Artificial Sequence: Synthetic oligonucleotide
  Target: SCNA; (-) strand; PAM type: YTN; PAM sequence: TTT
tgatccatatttttactcat

SEQ ID NO: 58141 - DNA, 20 bp, Artificial Sequence
  Description of Artificial Sequence: Synthetic oligonucleotide
  Target: SCNA; (-) strand; PAM type: YTN; PAM sequence: CTT
ttgatccatatttttactca

SEQ ID NO: 58142 - DNA, 20 bp, Artificial Sequence
  Description of Artificial Sequence: Synthetic oligonucleotide
  Target: SCNA; (-) strand; PAM type: YTN; PAM sequence: TTA
gaataatagatcttttgatc

SEQ ID NO: 58143 - DNA, 20 bp, Artificial Sequence
  Description of Artificial Sequence: Synthetic oligonucleotide
  Target: SCNA; (-) strand; PAM type: YTN; PAM sequence: TTA
gtacattagaataatagatc

SEQ ID NO: 58144 - DNA, 20 bp, Artificial Sequence
  Description of Artificial Sequence: Synthetic oligonucleotide
  Target: SCNA; (-) strand; PAM type: YTN; PAM sequence: TTT
agtacattagaataatagat

SEQ ID NO: 58145 - DNA, 20 bp, Artificial Sequence
  Description of Artificial Sequence: Synthetic oligonucleotide
  Target: SCNA; (-) strand; PAM type: YTN; PAM sequence: TTG
tgtttagtacattagaataa

SEQ ID NO: 58146 - DNA, 20 bp, Artificial Sequence
  Description of Artificial Sequence: Synthetic oligonucleotide
  Target: SCNA; (-) strand; PAM type: YTN; PAM sequence: CTT
gtgtttagtacattagaata

SEQ ID NO: 58147 - DNA, 20 bp, Artificial Sequence
  Description of Artificial Sequence: Synthetic oligonucleotide
  Target: SCNA; (-) strand; PAM type: YTN; PAM sequence: CTC
ttgtgtttagtacattagaa

SEQ ID NO: 58148 - DNA, 20 bp, Artificial Sequence
  Description of Artificial Sequence: Synthetic oligonucleotide
  Target: SCNA; (-) strand; PAM type: YTN; PAM sequence: TTA
actcttgtgtttagtacatt

SEQ ID NO: 58149 - DNA, 20 bp, Artificial Sequence
  Description of Artificial Sequence: Synthetic oligonucleotide
  Target: SCNA; (-) strand; PAM type: YTN; PAM sequence: TTA
cagaacaatattaactcttg

SEQ ID NO: 58150 - DNA, 20 bp, Artificial Sequence
  Description of Artificial Sequence: Synthetic oligonucleotide
  Target: SCNA; (-) strand; PAM type: YTN; PAM sequence: TTT
acagaacaatattaactctt

SEQ ID NO: 58151 - DNA, 20 bp, Artificial Sequence
  Description of Artificial Sequence: Synthetic oligonucleotide
  Target: SCNA; (-) strand; PAM type: YTN; PAM sequence: TTT
tacagaacaatattaactct

SEQ ID NO: 58152 - DNA, 20 bp, Artificial Sequence
  Description of Artificial Sequence: Synthetic oligonucleotide
  Target: SCNA; (-) strand; PAM type: YTN; PAM sequence: TTG
ttttacagaacaatattaac

SEQ ID NO: 58153 - DNA, 20 bp, Artificial Sequence
  Description of Artificial Sequence: Synthetic oligonucleotide
  Target: SCNA; (-) strand; PAM type: YTN; PAM sequence: TTT
gttttacagaacaatattaa

SEQ ID NO: 58154 - DNA, 20 bp, Artificial Sequence
  Description of Artificial Sequence: Synthetic oligonucleotide
  Target: SCNA; (-) strand; PAM type: YTN; PAM sequence: TTT
tgttttacagaacaatatta

SEQ ID NO: 58155 - DNA, 20 bp, Artificial Sequence
  Description of Artificial Sequence: Synthetic oligonucleotide
  Target: SCNA; (-) strand; PAM type: YTN; PAM sequence: TTA
taagattttgttttacagaa

SEQ ID NO: 58156 - DNA, 20 bp, Artificial Sequence
  Description of Artificial Sequence: Synthetic oligonucleotide
  Target: SCNA; (-) strand; PAM type: YTN; PAM sequence: TTG
aattataagattttgtttta

SEQ ID NO: 58157 - DNA, 20 bp, Artificial Sequence
  Description of Artificial Sequence: Synthetic oligonucleotide
  Target: SCNA; (-) strand; PAM type: YTN; PAM sequence: CTT
gaattataagattttgtttt

SEQ ID NO: 58158 - DNA, 20 bp, Artificial Sequence
  Description of Artificial Sequence: Synthetic oligonucleotide
  Target: SCNA; (-) strand; PAM type: YTN; PAM sequence: TTA
tcttgaattataagattttg

SEQ ID NO: 58159 - DNA, 20 bp, Artificial Sequence
  Description of Artificial Sequence: Synthetic oligonucleotide
  Target: SCNA; (-) strand; PAM type: YTN; PAM sequence: TTA
aaggacaaatgagttatctt

SEQ ID NO: 58160 - DNA, 20 bp, Artificial Sequence
  Description of Artificial Sequence: Synthetic oligonucleotide
  Target: SCNA; (-) strand; PAM type: YTN; PAM sequence: CTA
gttaaaggacaaatgagtta

SEQ ID NO: 58161 - DNA, 20 bp, Artificial Sequence
  Description of Artificial Sequence: Synthetic oligonucleotide
  Target: SCNA; (-) strand; PAM type: YTN; PAM sequence: CTA
agtataagactagttaaagg

SEQ ID NO: 58162 - DNA, 20 bp, Artificial Sequence
  Description of Artificial Sequence: Synthetic oligonucleotide
  Target: SCNA; (-) strand; PAM type: YTN; PAM sequence: TTC
taagtataagactagttaaa

SEQ ID NO: 58163 - DNA, 20 bp, Artificial Sequence
  Description of Artificial Sequence: Synthetic oligonucleotide
  Target: SCNA; (-) strand; PAM type: YTN; PAM sequence: TTT
ctaagtataagactagttaa

SEQ ID NO: 58164 - DNA, 20 bp, Artificial Sequence
  Description of Artificial Sequence: Synthetic oligonucleotide
  Target: SCNA; (-) strand; PAM type: YTN; PAM sequence: TTA
gtaataatttctaagtataa

SEQ ID NO: 58165 - DNA, 20 bp, Artificial Sequence
  Description of Artificial Sequence: Synthetic oligonucleotide
  Target: SCNA; (-) strand; PAM type: YTN; PAM sequence: CTT
agtaataatttctaagtata

SEQ ID NO: 58166 - DNA, 20 bp, Artificial Sequence
  Description of Artificial Sequence: Synthetic oligonucleotide
  Target: SCNA; (-) strand; PAM type: YTN; PAM sequence: CTG
cccttagtaataatttctaa

SEQ ID NO: 58167 - DNA, 20 bp, Artificial Sequence
  Description of Artificial Sequence: Synthetic oligonucleotide
  Target: SCNA; (-) strand; PAM type: YTN; PAM sequence: TTG
atcatatgaatgtagctgcc

SEQ ID NO: 58168 - DNA, 20 bp, Artificial Sequence
  Description of Artificial Sequence: Synthetic oligonucleotide
  Target: SCNA; (-) strand; PAM type: YTN; PAM sequence: TTT
gatcatatgaatgtagctgc

SEQ ID NO: 58169 - DNA, 20 bp, Artificial Sequence
  Description of Artificial Sequence: Synthetic oligonucleotide
  Target: SCNA; (-) strand; PAM type: YTN; PAM sequence: TTA
atttgatcatatgaatgtag

SEQ ID NO: 58170 - DNA, 20 bp, Artificial Sequence
  Description of Artificial Sequence: Synthetic oligonucleotide
  Target: SCNA; (-) strand; PAM type: YTN; PAM sequence: TTG
ttaatttgatcatatgaatg

SEQ ID NO: 58171 - DNA, 20 bp, Artificial Sequence
  Description of Artificial Sequence: Synthetic oligonucleotide
  Target: SCNA; (-) strand; PAM type: YTN; PAM sequence: TTT
gttaatttgatcatatgaat

SEQ ID NO: 58172 - DNA, 20 bp, Artificial Sequence
  Description of Artificial Sequence: Synthetic oligonucleotide
  Target: SCNA; (-) strand; PAM type: YTN; PAM sequence: TTT
tgttaatttgatcatatgaa

SEQ ID NO: 58173 - DNA, 20 bp, Artificial Sequence
  Description of Artificial Sequence: Synthetic oligonucleotide
  Target: SCNA; (-) strand; PAM type: YTN; PAM sequence: CTG
ttttgttaatttgatcatat

SEQ ID NO: 58174 - DNA, 20 bp, Artificial Sequence
  Description of Artificial Sequence: Synthetic oligonucleotide
  Target: SCNA; (-) strand; PAM type: YTN; PAM sequence: CTG
aacaaccaataaatcgagag

SEQ ID NO: 58175 - DNA, 20 bp, Artificial Sequence
  Description of Artificial Sequence: Synthetic oligonucleotide
  Target: SCNA; (-) strand; PAM type: YTN; PAM sequence: TTC
tgaacaaccaataaatcgag

SEQ ID NO: 58176 - DNA, 20 bp, Artificial Sequence
  Description of Artificial Sequence: Synthetic oligonucleotide
  Target: SCNA; (-) strand; PAM type: YTN; PAM sequence: TTA
aatgacataattctgaacaa

SEQ ID NO: 58177 - DNA, 20 bp, Artificial Sequence
  Description of Artificial Sequence: Synthetic oligonucleotide
  Target: SCNA; (-) strand; PAM type: YTN; PAM sequence: TTC
acaaataggtggaaattaaa

SEQ ID NO: 58178 - DNA, 20 bp, Artificial Sequence
  Description of Artificial Sequence: Synthetic oligonucleotide
  Target: SCNA; (-) strand; PAM type: YTN; PAM sequence: CTT
cacaaataggtggaaattaa

SEQ ID NO: 58179 - DNA, 20 bp, Artificial Sequence
  Description of Artificial Sequence: Synthetic oligonucleotide
  Target: SCNA; (-) strand; PAM type: YTN; PAM sequence: CTC
ccttcacaaataggtggaaa

SEQ ID NO: 58180 - DNA, 20 bp, Artificial Sequence
  Description of Artificial Sequence: Synthetic oligonucleotide
  Target: SCNA; (-) strand; PAM type: YTN; PAM sequence: CTC
tcccttcacaaataggtgga

SEQ ID NO: 58181 - DNA, 20 bp, Artificial Sequence
  Description of Artificial Sequence: Synthetic oligonucleotide
  Target: SCNA; (-) strand; PAM type: YTN; PAM sequence: TTC
cctctcccttcacaaatagg

SEQ ID NO: 58182 - DNA, 20 bp, Artificial Sequence
  Description of Artificial Sequence: Synthetic oligonucleotide
  Target: SCNA; (-) strand; PAM type: YTN; PAM sequence: TTG
atgagggagggaaagttccc

SEQ ID NO: 58183 - DNA, 20 bp, Artificial Sequence
  Description of Artificial Sequence: Synthetic oligonucleotide
  Target: SCNA; (-) strand; PAM type: YTN; PAM sequence: CTA
gttgatgagggagggaaagt

SEQ ID NO: 58184 - DNA, 20 bp, Artificial Sequence
  Description of Artificial Sequence: Synthetic oligonucleotide
  Target: SCNA; (-) strand; PAM type: YTN; PAM sequence: CTC
tagttgatgagggagggaaa

SEQ ID NO: 58185 - DNA, 20 bp, Artificial Sequence
  Description of Artificial Sequence: Synthetic oligonucleotide
  Target: SCNA; (-) strand; PAM type: YTN; PAM sequence: CTG
gtccatcaccctctagttga

SEQ ID NO: 58186 - DNA, 20 bp, Artificial Sequence
  Description of Artificial Sequence: Synthetic oligonucleotide
  Target: SCNA; (-) strand; PAM type: YTN; PAM sequence: TTG
agggtatctggtccatcacc

SEQ ID NO: 58187 - DNA, 20 bp, Artificial Sequence
  Description of Artificial Sequence: Synthetic oligonucleotide
  Target: SCNA; (-) strand; PAM type: YTN; PAM sequence: TTT
gagggtatctggtccatcac

SEQ ID NO: 58188 - DNA, 20 bp, Artificial Sequence
  Description of Artificial Sequence: Synthetic oligonucleotide
  Target: SCNA; (-) strand; PAM type: YTN; PAM sequence: CTT
tgagggtatctggtccatca

SEQ ID NO: 58189 - DNA, 20 bp, Artificial Sequence
  Description of Artificial Sequence: Synthetic oligonucleotide
  Target: SCNA; (-) strand; PAM type: YTN; PAM sequence: TTC
atgccctttgagggtatctg

SEQ ID NO: 58190 - DNA, 20 bp, Artificial Sequence
  Description of Artificial Sequence: Synthetic oligonucleotide
  Target: SCNA; (-) strand; PAM type: YTN; PAM sequence: TTT
catgccctttgagggtatct

SEQ ID NO: 58191 - DNA, 20 bp, Artificial Sequence
  Description of Artificial Sequence: Synthetic oligonucleotide
  Target: SCNA; (-) strand; PAM type: YTN; PAM sequence: CTT
tcatgccctttgagggtatc

SEQ ID NO: 58192 - DNA, 20 bp, Artificial Sequence
  Description of Artificial Sequence: Synthetic oligonucleotide
  Target: SCNA; (-) strand; PAM type: YTN; PAM sequence: TTC
acctttcatgccctttgagg

SEQ ID NO: 58193 - DNA, 20 bp, Artificial Sequence
  Description of Artificial Sequence: Synthetic oligonucleotide
  Target: SCNA; (-) strand; PAM type: YTN; PAM sequence: TTT
cacctttcatgccctttgag

SEQ ID NO: 58194 - DNA, 20 bp, Artificial Sequence
  Description of Artificial Sequence: Synthetic oligonucleotide
  Target: SCNA; (-) strand; PAM type: YTN; PAM sequence: TTT
tcacctttcatgccctttga

SEQ ID NO: 58195 - DNA, 20 bp, Artificial Sequence
  Description of Artificial Sequence: Synthetic oligonucleotide
  Target: SCNA; (-) strand; PAM type: YTN; PAM sequence: CTG
aaagggagtaatggcaccgg

SEQ ID NO: 58196 - DNA, 20 bp, Artificial Sequence
  Description of Artificial Sequence: Synthetic oligonucleotide
  Target: SCNA; (-) strand; PAM type: YTN; PAM sequence: TTA
agatcaggaacactgaaagg

SEQ ID NO: 58197 - DNA, 20 bp, Artificial Sequence
  Description of Artificial Sequence: Synthetic oligonucleotide
  Target: SCNA; (-) strand; PAM type: YTN; PAM sequence: TTT
aagatcaggaacactgaaag

SEQ ID NO: 58198 - DNA, 20 bp, Artificial Sequence
  Description of Artificial Sequence: Synthetic oligonucleotide
  Target: SCNA; (-) strand; PAM type: YTN; PAM sequence: TTT
taagatcaggaacactgaaa

SEQ ID NO: 58199 - DNA, 20 bp, Artificial Sequence
  Description of Artificial Sequence: Synthetic oligonucleotide
  Target: SCNA; (-) strand; PAM type: YTN; PAM sequence: CTT
ttaagatcaggaacactgaa

SEQ ID NO: 58200 - DNA, 20 bp, Artificial Sequence
  Description of Artificial Sequence: Synthetic oligonucleotide
  Target: SCNA; (-) strand; PAM type: YTN; PAM sequence: CTG
cttttaagatcaggaacact

SEQ ID NO: 58201 - DNA, 20 bp, Artificial Sequence
  Description of Artificial Sequence: Synthetic oligonucleotide
  Target: SCNA; (-) strand; PAM type: YTN; PAM sequence: CTC
tgcttttaagatcaggaaca

SEQ ID NO: 58202 - DNA, 20 bp, Artificial Sequence
  Description of Artificial Sequence: Synthetic oligonucleotide
  Target: SCNA; (-) strand; PAM type: YTN; PAM sequence: TTA
atggctctgcttttaagatc

SEQ ID NO: 58203 - DNA, 20 bp, Artificial Sequence
  Description of Artificial Sequence: Synthetic oligonucleotide
  Target: SCNA; (-) strand; PAM type: YTN; PAM sequence: TTG
tagaagtggattaatggctc

SEQ ID NO: 58204 - DNA, 20 bp, Artificial Sequence
  Description of Artificial Sequence: Synthetic oligonucleotide
  Target: SCNA; (-) strand; PAM type: YTN; PAM sequence: CTT
gtagaagtggattaatggct

SEQ ID NO: 58205 - DNA, 20 bp, Artificial Sequence
  Description of Artificial Sequence: Synthetic oligonucleotide
  Target: SCNA; (-) strand; PAM type: YTN; PAM sequence: CTA
gcttgtagaagtggattaat

SEQ ID NO: 58206 - DNA, 20 bp, Artificial Sequence
  Description of Artificial Sequence: Synthetic oligonucleotide
  Target: SCNA; (-) strand; PAM type: YTN; PAM sequence: CTG
gatgtctagcttgtagaagt

SEQ ID NO: 58207 - DNA, 20 bp, Artificial Sequence
  Description of Artificial Sequence: Synthetic oligonucleotide
  Target: SCNA; (-) strand; PAM type: YTN; PAM sequence: TTG
gaggaagagggatgtgacaa

SEQ ID NO: 58208 - DNA, 20 bp, Artificial Sequence
  Description of Artificial Sequence: Synthetic oligonucleotide
  Target: SCNA; (-) strand; PAM type: YTN; PAM sequence: CTT
ggaggaagagggatgtgaca

SEQ ID NO: 58209 - DNA, 20 bp, Artificial Sequence
  Description of Artificial Sequence: Synthetic oligonucleotide
  Target: SCNA; (-) strand; PAM type: YTN; PAM sequence: CTG
tgccagaaacttggaggaag

SEQ ID NO: 58210 - DNA, 20 bp, Artificial Sequence
  Description of Artificial Sequence: Synthetic oligonucleotide
  Target: SCNA; (-) strand; PAM type: YTN; PAM sequence: CTC
acactgtgccagaaacttgg

SEQ ID NO: 58211 - DNA, 20 bp, Artificial Sequence
  Description of Artificial Sequence: Synthetic oligonucleotide
  Target: SCNA; (-) strand; PAM type: YTN; PAM sequence: TTG
ctcacactgtgccagaaact

SEQ ID NO: 58212 - DNA, 20 bp, Artificial Sequence
  Description of Artificial Sequence: Synthetic oligonucleotide
  Target: SCNA; (-) strand; PAM type: YTN; PAM sequence: TTT
gctcacactgtgccagaaac

SEQ ID NO: 58213 - DNA, 20 bp, Artificial Sequence
  Description of Artificial Sequence: Synthetic oligonucleotide
  Target: SCNA; (-) strand; PAM type: YTN; PAM sequence: TTC
aagaaagaatgtttgctcac

SEQ ID NO: 58214 - DNA, 20 bp, Artificial Sequence
  Description of Artificial Sequence: Synthetic oligonucleotide
  Target: SCNA; (-) strand; PAM type: YTN; PAM sequence: TTC
atcattcaagaaagaatgtt

SEQ ID NO: 58215 - DNA, 20 bp, Artificial Sequence
  Description of Artificial Sequence: Synthetic oligonucleotide
  Target: SCNA; (-) strand; PAM type: YTN; PAM sequence: CTC
attcatcattcaagaaagaa

SEQ ID NO: 58216 - DNA, 20 bp, Artificial Sequence
  Description of Artificial Sequence: Synthetic oligonucleotide
  Target: SCNA; (-) strand; PAM type: YTN; PAM sequence: TTG
agacactcattcatcattca

SEQ ID NO: 58217 - DNA, 20 bp, Artificial Sequence
  Description of Artificial Sequence: Synthetic oligonucleotide
  Target: SCNA; (-) strand; PAM type: YTN; PAM sequence: CTG
cattgagacactcattcatc

SEQ ID NO: 58218 - DNA, 20 bp, Artificial Sequence
  Description of Artificial Sequence: Synthetic oligonucleotide
  Target: SCNA; (-) strand; PAM type: YTN; PAM sequence: TTA
atgactgcattgagacactc

SEQ ID NO: 58219 - DNA, 20 bp, Artificial Sequence
  Description of Artificial Sequence: Synthetic oligonucleotide
  Target: SCNA; (-) strand; PAM type: YTN; PAM sequence: TTA
ttaatgactgcattgagaca

SEQ ID NO: 58220 - DNA, 20 bp, Artificial Sequence
  Description of Artificial Sequence: Synthetic oligonucleotide
  Target: SCNA; (-) strand; PAM type: YTN; PAM sequence: CTT
attaatgactgcattgagac

SEQ ID NO: 58221 - DNA, 20 bp, Artificial Sequence
  Description of Artificial Sequence: Synthetic oligonucleotide
  Target: SCNA; (-) strand; PAM type: YTN; PAM sequence: TTG
aaatgcttattaatgactgc

SEQ ID NO: 58222 - DNA, 20 bp, Artificial Sequence
  Description of Artificial Sequence: Synthetic oligonucleotide
  Target: SCNA; (-) strand; PAM type: YTN; PAM sequence: CTT
gaaatgcttattaatgactg

SEQ ID NO: 58223 - DNA, 20 bp, Artificial Sequence
  Description of Artificial Sequence: Synthetic oligonucleotide
  Target: SCNA; (-) strand; PAM type: YTN; PAM sequence: TTG
cttgaaatgcttattaatga

SEQ ID NO: 58224 - DNA, 20 bp, Artificial Sequence
  Description of Artificial Sequence: Synthetic oligonucleotide
  Target: SCNA; (-) strand; PAM type: YTN; PAM sequence: TTT
gcttgaaatgcttattaatg

SEQ ID NO: 58225 - DNA, 20 bp, Artificial Sequence
  Description of Artificial Sequence: Synthetic oligonucleotide
  Target: SCNA; (-) strand; PAM type: YTN; PAM sequence: TTT
tgcttgaaatgcttattaat

SEQ ID NO: 58226 - DNA, 20 bp, Artificial Sequence
  Description of Artificial Sequence: Synthetic oligonucleotide
  Target: SCNA; (-) strand; PAM type: YTN; PAM sequence: TTT
ttgcttgaaatgcttattaa

SEQ ID NO: 58227 - DNA, 20 bp, Artificial Sequence
  Description of Artificial Sequence: Synthetic oligonucleotide
  Target: SCNA; (-) strand; PAM type: YTN; PAM sequence: CTT
tttgcttgaaatgcttatta

SEQ ID NO: 58228 - DNA, 20 bp, Artificial Sequence
  Description of Artificial Sequence: Synthetic oligonucleotide
  Target: SCNA; (-) strand; PAM type: YTN; PAM sequence: CTC
tttttgcttgaaatgcttat

SEQ ID NO: 58229 - DNA, 20 bp, Artificial Sequence
  Description of Artificial Sequence: Synthetic oligonucleotide
  Target: SCNA; (-) strand; PAM type: YTN; PAM sequence: CTG
gtaaatagaaataagcaaac

SEQ ID NO: 58230 - DNA, 20 bp, Artificial Sequence
  Description of Artificial Sequence: Synthetic oligonucleotide
  Target: SCNA; (-) strand; PAM type: YTN; PAM sequence: TTG
atcaaaatgaccctggtaaa

SEQ ID NO: 58231 - DNA, 20 bp, Artificial Sequence
  Description of Artificial Sequence: Synthetic oligonucleotide
  Target: SCNA; (-) strand; PAM type: YTN; PAM sequence: TTT
gatcaaaatgaccctggtaa

SEQ ID NO: 58232 - DNA, 20 bp, Artificial Sequence
  Description of Artificial Sequence: Synthetic oligonucleotide
  Target: SCNA; (-) strand; PAM type: YTN; PAM sequence: CTT
tgatcaaaatgaccctggta

SEQ ID NO: 58233 - DNA, 20 bp, Artificial Sequence
  Description of Artificial Sequence: Synthetic oligonucleotide
  Target: SCNA; (-) strand; PAM type: YTN; PAM sequence: TTA
aactttgatcaaaatgaccc

SEQ ID NO: 58234 - DNA, 20 bp, Artificial Sequence
  Description of Artificial Sequence: Synthetic oligonucleotide
  Target: SCNA; (-) strand; PAM type: YTN; PAM sequence: TTT
aaactttgatcaaaatgacc

SEQ ID NO: 58235 - DNA, 20 bp, Artificial Sequence
  Description of Artificial Sequence: Synthetic oligonucleotide
  Target: SCNA; (-) strand; PAM type: YTN; PAM sequence: TTT
taaactttgatcaaaatgac

SEQ ID NO: 58236 - DNA, 20 bp, Artificial Sequence
  Description of Artificial Sequence: Synthetic oligonucleotide
  Target: SCNA; (-) strand; PAM type: YTN; PAM sequence: TTT
ttaaactttgatcaaaatga

SEQ ID NO: 58237 - DNA, 20 bp, Artificial Sequence
  Description of Artificial Sequence: Synthetic oligonucleotide
  Target: SCNA; (-) strand; PAM type: YTN; PAM sequence: TTT
tttaaactttgatcaaaatg

SEQ ID NO: 58238 - DNA, 20 bp, Artificial Sequence
  Description of Artificial Sequence: Synthetic oligonucleotide
  Target: SCNA; (-) strand; PAM type: YTN; PAM sequence: TTC
attttttaaactttgatcaa

SEQ ID NO: 58239 - DNA, 20 bp, Artificial Sequence
  Description of Artificial Sequence: Synthetic oligonucleotide
  Target: SCNA; (-) strand; PAM type: YTN; PAM sequence: TTT
cattttttaaactttgatca

SEQ ID NO: 58240 - DNA, 20 bp, Artificial Sequence
  Description of Artificial Sequence: Synthetic oligonucleotide
  Target: SCNA; (-) strand; PAM type: YTN; PAM sequence: TTA
tttcattttttaaactttga

SEQ ID NO: 58241 - DNA, 20 bp, Artificial Sequence
  Description of Artificial Sequence: Synthetic oligonucleotide
  Target: SCNA; (-) strand; PAM type: YTN; PAM sequence: TTT
atttcattttttaaactttg

SEQ ID NO: 58242 - DNA, 20 bp, Artificial Sequence
  Description of Artificial Sequence: Synthetic oligonucleotide
  Target: SCNA; (-) strand; PAM type: YTN; PAM sequence: TTG
aaataatttatttcattttt

SEQ ID NO: 58243 - DNA, 20 bp, Artificial Sequence
  Description of Artificial Sequence: Synthetic oligonucleotide
  Target: SCNA; (-) strand; PAM type: YTN; PAM sequence: TTT
gaaataatttatttcatttt

SEQ ID NO: 58244 - DNA, 20 bp, Artificial Sequence
  Description of Artificial Sequence: Synthetic oligonucleotide
  Target: SCNA; (-) strand; PAM type: YTN; PAM sequence: CTT
tgaaataatttatttcattt

SEQ ID NO: 58245 - DNA, 20 bp, Artificial Sequence
  Description of Artificial Sequence: Synthetic oligonucleotide
  Target: SCNA; (-) strand; PAM type: YTN; PAM sequence: TTA
tgaactttgaaataatttat

SEQ ID NO: 58246 - DNA, 20 bp, Artificial Sequence
  Description of Artificial Sequence: Synthetic oligonucleotide
  Target: SCNA; (-) strand; PAM type: YTN; PAM sequence: TTC
attatgaactttgaaataat

SEQ ID NO: 58247 - DNA, 20 bp, Artificial Sequence
  Description of Artificial Sequence: Synthetic oligonucleotide
  Target: SCNA; (-) strand; PAM type: YTN; PAM sequence: TTG
ttcattatgaactttgaaat

SEQ ID NO: 58248 - DNA, 20 bp, Artificial Sequence
  Description of Artificial Sequence: Synthetic oligonucleotide
  Target: SCNA; (-) strand; PAM type: YTN; PAM sequence: TTT
gttcattatgaactttgaaa

SEQ ID NO: 58249 - DNA, 20 bp, Artificial Sequence
  Description of Artificial Sequence: Synthetic oligonucleotide
  Target: SCNA; (-) strand; PAM type: YTN; PAM sequence: TTA
atttgttcattatgaacttt

SEQ ID NO: 58250 - DNA, 20 bp, Artificial Sequence
  Description of Artificial Sequence: Synthetic oligonucleotide
  Target: SCNA; (-) strand; PAM type: YTN; PAM sequence: TTT
aatttgttcattatgaactt

SEQ ID NO: 58251 - DNA, 20 bp, Artificial Sequence
  Description of Artificial Sequence: Synthetic oligonucleotide
  Target: SCNA; (-) strand; PAM type: YTN; PAM sequence: TTC
aatgaaagtatttaatttgt

SEQ ID NO: 58252 - DNA, 20 bp, Artificial Sequence
  Description of Artificial Sequence: Synthetic oligonucleotide
  Target: SCNA; (-) strand; PAM type: YTN; PAM sequence: TTT
caatgaaagtatttaatttg

SEQ ID NO: 58253 - DNA, 20 bp, Artificial Sequence
  Description of Artificial Sequence: Synthetic oligonucleotide
  Target: SCNA; (-) strand; PAM type: YTN; PAM sequence: CTG
gatggtttcaatgaaagtat

SEQ ID NO: 58254 - DNA, 20 bp, Artificial Sequence
  Description of Artificial Sequence: Synthetic oligonucleotide
  Target: SCNA; (-) strand; PAM type: YTN; PAM sequence: CTA
aaaaatctggatggtttcaa

SEQ ID NO: 58255 - DNA, 20 bp, Artificial Sequence
  Description of Artificial Sequence: Synthetic oligonucleotide
  Target: SCNA; (-) strand; PAM type: YTN; PAM sequence: CTA
tgggatgctaaaaaatctgg

SEQ ID NO: 58256 - DNA, 20 bp, Artificial Sequence
  Description of Artificial Sequence: Synthetic oligonucleotide
  Target: SCNA; (-) strand; PAM type: YTN; PAM sequence: TTG
tggtcacatctatgggatgc

SEQ ID NO: 58257 - DNA, 20 bp, Artificial Sequence
  Description of Artificial Sequence: Synthetic oligonucleotide
  Target: SCNA; (-) strand; PAM type: YTN; PAM sequence: CTG
caattgtggtcacatctatg

SEQ ID NO: 58258 - DNA, 20 bp, Artificial Sequence
  Description of Artificial Sequence: Synthetic oligonucleotide
  Target: SCNA; (-) strand; PAM type: YTN; PAM sequence: CTA
ataaatgtctgcaattgtgg

SEQ ID NO: 58259 - DNA, 20 bp, Artificial Sequence
  Description of Artificial Sequence: Synthetic oligonucleotide
  Target: SCNA; (-) strand; PAM type: YTN; PAM sequence: CTC
taataaatgtctgcaattgt

SEQ ID NO: 58260 - DNA, 20 bp, Artificial Sequence
  Description of Artificial Sequence: Synthetic oligonucleotide
  Target: SCNA; (-) strand; PAM type: YTN; PAM sequence: TTC
aaagaatactctaataaatg

SEQ ID NO: 58261 - DNA, 20 bp, Artificial Sequence
  Description of Artificial Sequence: Synthetic oligonucleotide
  Target: SCNA; (-) strand; PAM type: YTN; PAM sequence: CTA
taataattcaaagaatactc

SEQ ID NO: 58262 - DNA, 20 bp, Artificial Sequence
  Description of Artificial Sequence: Synthetic oligonucleotide
  Target: SCNA; (-) strand; PAM type: YTN; PAM sequence: TTC
tataataattcaaagaatac

SEQ ID NO: 58263 - DNA, 20 bp, Artificial Sequence
  Description of Artificial Sequence: Synthetic oligonucleotide
  Target: SCNA; (-) strand; PAM type: YTN; PAM sequence: TTT
ctataataattcaaagaata

SEQ ID NO: 58264 - DNA, 20 bp, Artificial Sequence
  Description of Artificial Sequence: Synthetic oligonucleotide
  Target: SCNA; (-) strand; PAM type: YTN; PAM sequence: CTG
agtttctataataattcaaa

SEQ ID NO: 58265 - DNA, 20 bp, Artificial Sequence
  Description of Artificial Sequence: Synthetic oligonucleotide
  Target: SCNA; (-) strand; PAM type: YTN; PAM sequence: TTC
tgagtttctataataattca

SEQ ID NO: 58266 - DNA, 20 bp, Artificial Sequence
  Description of Artificial Sequence: Synthetic oligonucleotide
  Target: SCNA; (-) strand; PAM type: YTN; PAM sequence: TTA
gcaataaagttctgagtttc

SEQ ID NO: 58267 - DNA, 20 bp, Artificial Sequence
  Description of Artificial Sequence: Synthetic oligonucleotide
  Target: SCNA; (-) strand; PAM type: YTN; PAM sequence: TTT
agcaataaagttctgagttt

SEQ ID NO: 58268 - DNA, 20 bp, Artificial Sequence
  Description of Artificial Sequence: Synthetic oligonucleotide
  Target: SCNA; (-) strand; PAM type: YTN; PAM sequence: CTA
atttagcaataaagttctga

SEQ ID NO: 58269 - DNA, 20 bp, Artificial Sequence
  Description of Artificial Sequence: Synthetic oligonucleotide
  Target: SCNA; (-) strand; PAM type: YTN; PAM sequence: TTG
aagtctaatttagcaataaa

SEQ ID NO: 58270 - DNA, 20 bp, Artificial Sequence
  Description of Artificial Sequence: Synthetic oligonucleotide
  Target: SCNA; (-) strand; PAM type: YTN; PAM sequence: TTG
ttgaagtctaatttagcaat

SEQ ID NO: 58271 - DNA, 20 bp, Artificial Sequence
  Description of Artificial Sequence: Synthetic oligonucleotide
  Target: SCNA; (-) strand; PAM type: YTN; PAM sequence: CTA
gaaaattgttgaagtctaat

SEQ ID NO: 58272 - DNA, 20 bp, Artificial Sequence
  Description of Artificial Sequence: Synthetic oligonucleotide
  Target: SCNA; (-) strand; PAM type: YTN; PAM sequence: CTA
ctagaaaattgttgaagtct

SEQ ID NO: 58273 - DNA, 20 bp, Artificial Sequence
  Description of Artificial Sequence: Synthetic oligonucleotide
  Target: SCNA; (-) strand; PAM type: YTN; PAM sequence: CTC
tactagaaaattgttgaagt

SEQ ID NO: 58274 - DNA, 20 bp, Artificial Sequence
  Description of Artificial Sequence: Synthetic oligonucleotide
  Target: SCNA; (-) strand; PAM type: YTN; PAM sequence: CTC
ataaaatgaggaagctctac

SEQ ID NO: 58275 - DNA, 20 bp, Artificial Sequence
  Description of Artificial Sequence: Synthetic oligonucleotide
  Target: SCNA; (-) strand; PAM type: YTN; PAM sequence: TTC
tcataaaatgaggaagctct

SEQ ID NO: 58276 - DNA, 20 bp, Artificial Sequence
  Description of Artificial Sequence: Synthetic oligonucleotide
  Target: SCNA; (-) strand; PAM type: YTN; PAM sequence: TTT
ctcataaaatgaggaagctc

SEQ ID NO: 58277 - DNA, 20 bp, Artificial Sequence
  Description of Artificial Sequence: Synthetic oligonucleotide
  Target: SCNA; (-) strand; PAM type: YTN; PAM sequence: CTT
tctcataaaatgaggaagct

SEQ ID NO: 58278 - DNA, 20 bp, Artificial Sequence
  Description of Artificial Sequence: Synthetic oligonucleotide
  Target: SCNA; (-) strand; PAM type: YTN; PAM sequence: CTA
aaagtctttctcataaaatg

SEQ ID NO: 58279 - DNA, 20 bp, Artificial Sequence
  Description of Artificial Sequence: Synthetic oligonucleotide
  Target: SCNA; (-) strand; PAM type: YTN; PAM sequence: CTC
ctaaaagtctttctcataaa

SEQ ID NO: 58280 - DNA, 20 bp, Artificial Sequence
  Description of Artificial Sequence: Synthetic oligonucleotide
  Target: SCNA; (-) strand; PAM type: YTN; PAM sequence: TTC
gcagatctcctaaaagtctt

SEQ ID NO: 58281 - DNA, 20 bp, Artificial Sequence
  Description of Artificial Sequence: Synthetic oligonucleotide
  Target: SCNA; (-) strand; PAM type: YTN; PAM sequence: TTT
cgcagatctcctaaaagtct

SEQ ID NO: 58282 - DNA, 20 bp, Artificial Sequence
  Description of Artificial Sequence: Synthetic oligonucleotide
  Target: SCNA; (-) strand; PAM type: YTN; PAM sequence: CTT
tcgcagatctcctaaaagtc

SEQ ID NO: 58283 - DNA, 20 bp, Artificial Sequence
  Description of Artificial Sequence: Synthetic oligonucleotide
  Target: SCNA; (-) strand; PAM type: YTN; PAM sequence: CTG
gataacctttcgcagatctc

SEQ ID NO: 58284 - DNA, 20 bp, Artificial Sequence
  Description of Artificial Sequence: Synthetic oligonucleotide
  Target: SCNA; (-) strand; PAM type: YTN; PAM sequence: CTG
actggataacctttcgcaga

SEQ ID NO: 58285 - DNA, 20 bp, Artificial Sequence
  Description of Artificial Sequence: Synthetic oligonucleotide
  Target: SCNA; (-) strand; PAM type: YTN; PAM sequence: CTC
atacaccacctgactggata

SEQ ID NO: 58286 - DNA, 20 bp, Artificial Sequence
  Description of Artificial Sequence: Synthetic oligonucleotide
  Target: SCNA; (-) strand; PAM type: YTN; PAM sequence: CTG
ctcatacaccacctgactgg

SEQ ID NO: 58287 - DNA, 20 bp, Artificial Sequence
  Description of Artificial Sequence: Synthetic oligonucleotide
  Target: SCNA; (-) strand; PAM type: YTN; PAM sequence: CTC
tgctcatacaccacctgact

SEQ ID NO: 58288 - DNA, 20 bp, Artificial Sequence
  Description of Artificial Sequence: Synthetic oligonucleotide
  Target: SCNA; (-) strand; PAM type: YTN; PAM sequence: CTC
tctgctcatacaccacctga

SEQ ID NO: 58289 - DNA, 20 bp, Artificial Sequence
  Description of Artificial Sequence: Synthetic oligonucleotide
  Target: SCNA; (-) strand; PAM type: YTN; PAM sequence: TTC
ctctctgctcatacaccacc

SEQ ID NO: 58290 - DNA, 20 bp, Artificial Sequence
  Description of Artificial Sequence: Synthetic oligonucleotide
  Target: SCNA; (-) strand; PAM type: YTN; PAM sequence: CTT
cctctctgctcatacaccac

SEQ ID NO: 58291 - DNA, 20 bp, Artificial Sequence
  Description of Artificial Sequence: Synthetic oligonucleotide
  Target: SCNA; (-) strand; PAM type: YTN; PAM sequence: CTA
gtcttcctctctgctcatac

SEQ ID NO: 58292 - DNA, 20 bp, Artificial Sequence
  Description of Artificial Sequence: Synthetic oligonucleotide
  Target: SCNA; (-) strand; PAM type: YTN; PAM sequence: CTG
agagtgaaaatggctagtct

SEQ ID NO: 58293 - DNA, 20 bp, Artificial Sequence
  Description of Artificial Sequence: Synthetic oligonucleotide
  Target: SCNA; (-) strand; PAM type: YTN; PAM sequence: TTG
gactgagagtgaaaatggct

SEQ ID NO: 58294 - DNA, 20 bp, Artificial Sequence
  Description of Artificial Sequence: Synthetic oligonucleotide
  Target: SCNA; (-) strand; PAM type: YTN; PAM sequence: TTG
tggaaataaacattggactg

SEQ ID NO: 58295 - DNA, 20 bp, Artificial Sequence
  Description of Artificial Sequence: Synthetic oligonucleotide
  Target: SCNA; (-) strand; PAM type: YTN; PAM sequence: TTG
cagcatagttgtggaaataa

SEQ ID NO: 58296 - DNA, 20 bp, Artificial Sequence
  Description of Artificial Sequence: Synthetic oligonucleotide
  Target: SCNA; (-) strand; PAM type: YTN; PAM sequence: CTA
gaaattgcagcatagttgtg

SEQ ID NO: 58297 - DNA, 20 bp, Artificial Sequence
  Description of Artificial Sequence: Synthetic oligonucleotide
  Target: SCNA; (-) strand; PAM type: YTN; PAM sequence: CTA
atatgaaaatgaagccatag

SEQ ID NO: 58298 - DNA, 20 bp, Artificial Sequence
  Description of Artificial Sequence: Synthetic oligonucleotide
  Target: SCNA; (-) strand; PAM type: YTN; PAM sequence: TTC
taatatgaaaatgaagccat

SEQ ID NO: 58299 - DNA, 20 bp, Artificial Sequence
  Description of Artificial Sequence: Synthetic oligonucleotide
  Target: SCNA; (-) strand; PAM type: YTN; PAM sequence: TTT
ctaatatgaaaatgaagcca

SEQ ID NO: 58300 - DNA, 20 bp, Artificial Sequence
  Description of Artificial Sequence: Synthetic oligonucleotide
  Target: SCNA; (-) strand; PAM type: YTN; PAM sequence: CTG
atttctaatatgaaaatgaa

SEQ ID NO: 58301 - DNA, 20 bp, Artificial Sequence
  Description of Artificial Sequence: Synthetic oligonucleotide
  Target: SCNA; (-) strand; PAM type: YTN; PAM sequence: TTA
ctgatttctaatatgaaaat

SEQ ID NO: 58302 - DNA, 20 bp, Artificial Sequence
  Description of Artificial Sequence: Synthetic oligonucleotide
  Target: SCNA; (-) strand; PAM type: YTN; PAM sequence: CTT
actgatttctaatatgaaaa

SEQ ID NO: 58303 - DNA, 20 bp, Artificial Sequence
  Description of Artificial Sequence: Synthetic oligonucleotide
  Target: SCNA; (-) strand; PAM type: YTN; PAM sequence: TTC
ttactgatttctaatatgaa

SEQ ID NO: 58304 - DNA, 20 bp, Artificial Sequence
  Description of Artificial Sequence: Synthetic oligonucleotide
  Target: SCNA; (-) strand; PAM type: YTN; PAM sequence: TTT
cttactgatttctaatatga

SEQ ID NO: 58305 - DNA, 20 bp, Artificial Sequence
  Description of Artificial Sequence: Synthetic oligonucleotide
  Target: SCNA; (-) strand; PAM type: YTN; PAM sequence: TTA
taggtagtatagtttcttac

SEQ ID NO: 58306 - DNA, 20 bp, Artificial Sequence
  Description of Artificial Sequence: Synthetic oligonucleotide
  Target: SCNA; (-) strand; PAM type: YTN; PAM sequence: CTT
ataggtagtatagtttctta

SEQ ID NO: 58307 - DNA, 20 bp, Artificial Sequence
  Description of Artificial Sequence: Synthetic oligonucleotide
  Target: SCNA; (-) strand; PAM type: YTN; PAM sequence: TTC
ccttataggtagtatagttt

SEQ ID NO: 58308 - DNA, 20 bp, Artificial Sequence
  Description of Artificial Sequence: Synthetic oligonucleotide
  Target: SCNA; (-) strand; PAM type: YTN; PAM sequence: TTT
cccttataggtagtatagtt

SEQ ID NO: 58309 - DNA, 20 bp, Artificial Sequence
  Description of Artificial Sequence: Synthetic oligonucleotide
  Target: SCNA; (-) strand; PAM type: YTN; PAM sequence: TTG
gagatatttcccttataggt

SEQ ID NO: 58310 - DNA, 20 bp, Artificial Sequence
  Description of Artificial Sequence: Synthetic oligonucleotide
  Target: SCNA; (-) strand; PAM type: YTN; PAM sequence: TTT
ggagatatttcccttatagg

SEQ ID NO: 58311 - DNA, 20 bp, Artificial Sequence
  Description of Artificial Sequence: Synthetic oligonucleotide
  Target: SCNA; (-) strand; PAM type: YTN; PAM sequence: TTA
atcatttggagatatttccc

SEQ ID NO: 58312 - DNA, 20 bp, Artificial Sequence
  Description of Artificial Sequence: Synthetic oligonucleotide
  Target: SCNA; (-) strand; PAM type: YTN; PAM sequence: CTA
agtgatgtgacaaaattaat

SEQ ID NO: 58313 - DNA, 20 bp, Artificial Sequence
  Description of Artificial Sequence: Synthetic oligonucleotide
  Target: SCNA; (-) strand; PAM type: YTN; PAM sequence: TTA
aagcagaaatctaagtgatg

SEQ ID NO: 58314 - DNA, 20 bp, Artificial Sequence
  Description of Artificial Sequence: Synthetic oligonucleotide
  Target: SCNA; (-) strand; PAM type: YTN; PAM sequence: TTT
aaagcagaaatctaagtgat

SEQ ID NO: 58315 - DNA, 20 bp, Artificial Sequence
  Description of Artificial Sequence: Synthetic oligonucleotide
  Target: SCNA; (-) strand; PAM type: YTN; PAM sequence: TTA
atatttaaagcagaaatcta

SEQ ID NO: 58316 - DNA, 20 bp, Artificial Sequence
  Description of Artificial Sequence: Synthetic oligonucleotide
  Target: SCNA; (-) strand; PAM type: YTN; PAM sequence: TTT
aatatttaaagcagaaatct

SEQ ID NO: 58317 - DNA, 20 bp, Artificial Sequence
  Description of Artificial Sequence: Synthetic oligonucleotide
  Target: SCNA; (-) strand; PAM type: YTN; PAM sequence: TTT
taatatttaaagcagaaatc

SEQ ID NO: 58318 - DNA, 20 bp, Artificial Sequence
  Description of Artificial Sequence: Synthetic oligonucleotide
  Target: SCNA; (-) strand; PAM type: YTN; PAM sequence: TTA
ttttaatatttaaagcagaa

SEQ ID NO: 58319 - DNA, 20 bp, Artificial Sequence
  Description of Artificial Sequence: Synthetic oligonucleotide
  Target: SCNA; (-) strand; PAM type: YTN; PAM sequence: TTT
attttaatatttaaagcaga

SEQ ID NO: 58320 - DNA, 20 bp, Artificial Sequence
  Description of Artificial Sequence: Synthetic oligonucleotide
  Target: SCNA; (-) strand; PAM type: YTN; PAM sequence: CTA
tttattttaatatttaaagc

SEQ ID NO: 58321 - DNA, 20 bp, Artificial Sequence
  Description of Artificial Sequence: Synthetic oligonucleotide
  Target: SCNA; (-) strand; PAM type: YTN; PAM sequence: TTC
tatttattttaatatttaaa

SEQ ID NO: 58322 - DNA, 20 bp, Artificial Sequence
  Description of Artificial Sequence: Synthetic oligonucleotide
  Target: SCNA; (-) strand; PAM type: YTN; PAM sequence: CTT
ctatttattttaatatttaa

SEQ ID NO: 58323 - DNA, 20 bp, Artificial Sequence
  Description of Artificial Sequence: Synthetic oligonucleotide
  Target: SCNA; (-) strand; PAM type: YTN; PAM sequence: CTA
aaaatacttctatttatttt

SEQ ID NO: 58324 - DNA, 20 bp, Artificial Sequence
  Description of Artificial Sequence: Synthetic oligonucleotide
  Target: SCNA; (-) strand; PAM type: YTN; PAM sequence: TTC
cacccatctaaaaatacttc

SEQ ID NO: 58325 - DNA, 20 bp, Artificial Sequence
  Description of Artificial Sequence: Synthetic oligonucleotide
  Target: SCNA; (-) strand; PAM type: YTN; PAM sequence: TTT
ccacccatctaaaaatactt

SEQ ID NO: 58326 - DNA, 20 bp, Artificial Sequence
  Description of Artificial Sequence: Synthetic oligonucleotide
  Target: SCNA; (-) strand; PAM type: YTN; PAM sequence: CTT
tccacccatctaaaaatact

SEQ ID NO: 58327 - DNA, 20 bp, Artificial Sequence
  Description of Artificial Sequence: Synthetic oligonucleotide
  Target: SCNA; (-) strand; PAM type: YTN; PAM sequence: TTG
ctttccacccatctaaaaat

SEQ ID NO: 58328 - DNA, 20 bp, Artificial Sequence
  Description of Artificial Sequence: Synthetic oligonucleotide
  Target: SCNA; (-) strand; PAM type: YTN; PAM sequence: TTT
gctttccacccatctaaaaa

SEQ ID NO: 58329 - DNA, 20 bp, Artificial Sequence
  Description of Artificial Sequence: Synthetic oligonucleotide
  Target: SCNA; (-) strand; PAM type: YTN; PAM sequence: CTG
ggtttgctttccacccatct

SEQ ID NO: 58330 - DNA, 20 bp, Artificial Sequence
  Description of Artificial Sequence: Synthetic oligonucleotide
  Target: SCNA; (-) strand; PAM type: YTN; PAM sequence: TTA
caaaactgggtttgctttcc

SEQ ID NO: 58331 - DNA, 20 bp, Artificial Sequence
  Description of Artificial Sequence: Synthetic oligonucleotide
  Target: SCNA; (-) strand; PAM type: YTN; PAM sequence: TTT
acaaaactgggtttgctttc

SEQ ID NO: 58332 - DNA, 20 bp, Artificial Sequence
  Description of Artificial Sequence: Synthetic oligonucleotide
  Target: SCNA; (-) strand; PAM type: YTN; PAM sequence: TTT
tacaaaactgggtttgcttt

SEQ ID NO: 58333 - DNA, 20 bp, Artificial Sequence
  Description of Artificial Sequence: Synthetic oligonucleotide
  Target: SCNA; (-) strand; PAM type: YTN; PAM sequence: CTT
ttacaaaactgggtttgctt

SEQ ID NO: 58334 - DNA, 20 bp, Artificial Sequence
  Description of Artificial Sequence: Synthetic oligonucleotide
  Target: SCNA; (-) strand; PAM type: YTN; PAM sequence: TTA
atcttttacaaaactgggtt

SEQ ID NO: 58335 - DNA, 20 bp, Artificial Sequence
  Description of Artificial Sequence: Synthetic oligonucleotide
  Target: SCNA; (-) strand; PAM type: YTN; PAM sequence: CTT
aatcttttacaaaactgggt

SEQ ID NO: 58336 - DNA, 20 bp, Artificial Sequence
  Description of Artificial Sequence: Synthetic oligonucleotide
  Target: SCNA; (-) strand; PAM type: YTN; PAM sequence: TTG
caaatggagcatgaaagtgc

SEQ ID NO: 58337 - DNA, 20 bp, Artificial Sequence
  Description of Artificial Sequence: Synthetic oligonucleotide
  Target: SCNA; (-) strand; PAM type: YTN; PAM sequence: TTA
aggcatacaatataaattgc

SEQ ID NO: 58338 - DNA, 20 bp, Artificial Sequence
  Description of Artificial Sequence: Synthetic oligonucleotide
  Target: SCNA; (-) strand; PAM type: YTN; PAM sequence: TTT
aaggcatacaatataaattg

SEQ ID NO: 58339 - DNA, 20 bp, Artificial Sequence
  Description of Artificial Sequence: Synthetic oligonucleotide
  Target: SCNA; (-) strand; PAM type: YTN; PAM sequence: CTG
catttaaggcatacaatata

SEQ ID NO: 58340 - DNA, 20 bp, Artificial Sequence
  Description of Artificial Sequence: Synthetic oligonucleotide
  Target: SCNA; (-) strand; PAM type: YTN; PAM sequence: TTC
acctgcatttaaggcataca

SEQ ID NO: 58341 - DNA, 20 bp, Artificial Sequence
  Description of Artificial Sequence: Synthetic oligonucleotide
  Target: SCNA; (-) strand; PAM type: YTN; PAM sequence: TTA
ttcacctgcatttaaggcat

SEQ ID NO: 58342 - DNA, 20 bp, Artificial Sequence
  Description of Artificial Sequence: Synthetic oligonucleotide
  Target: SCNA; (-) strand; PAM type: YTN; PAM sequence: TTT
attcacctgcatttaaggca

SEQ ID NO: 58343 - DNA, 20 bp, Artificial Sequence
  Description of Artificial Sequence: Synthetic oligonucleotide
  Target: SCNA; (-) strand; PAM type: YTN; PAM sequence: TTT
tattcacctgcatttaaggc

SEQ ID NO: 58344 - DNA, 20 bp, Artificial Sequence
  Description of Artificial Sequence: Synthetic oligonucleotide
  Target: SCNA; (-) strand; PAM type: YTN; PAM sequence: CTT
ttattcacctgcatttaagg

SEQ ID NO: 58345 - DNA, 20 bp, Artificial Sequence
  Description of Artificial Sequence: Synthetic oligonucleotide
  Target: SCNA; (-) strand; PAM type: YTN; PAM sequence: TTA
agcaacagggaaacatgtac

SEQ ID NO: 58346 - DNA, 20 bp, Artificial Sequence
  Description of Artificial Sequence: Synthetic oligonucleotide
  Target: SCNA; (-) strand; PAM type: YTN; PAM sequence: TTC
agaatattaagcaacaggga

SEQ ID NO: 58347 - DNA, 20 bp, Artificial Sequence
  Description of Artificial Sequence: Synthetic oligonucleotide
  Target: SCNA; (-) strand; PAM type: YTN; PAM sequence: CTT
cagaatattaagcaacaggg

SEQ ID NO: 58348 - DNA, 20 bp, Artificial Sequence
  Description of Artificial Sequence: Synthetic oligonucleotide
  Target: SCNA; (-) strand; PAM type: YTN; PAM sequence: TTG
cttcagaatattaagcaaca

SEQ ID NO: 58349 - DNA, 20 bp, Artificial Sequence
  Description of Artificial Sequence: Synthetic oligonucleotide
  Target: SCNA; (-) strand; PAM type: YTN; PAM sequence: TTA
ttgcttcagaatattaagca

SEQ ID NO: 58350 - DNA, 20 bp, Artificial Sequence
  Description of Artificial Sequence: Synthetic oligonucleotide
  Target: SCNA; (-) strand; PAM type: YTN; PAM sequence: TTT
attgcttcagaatattaagc

SEQ ID NO: 58351 - DNA, 20 bp, Artificial Sequence
  Description of Artificial Sequence: Synthetic oligonucleotide
  Target: SCNA; (-) strand; PAM type: YTN; PAM sequence: TTT
tattgcttcagaatattaag

SEQ ID NO: 58352 - DNA, 20 bp, Artificial Sequence
  Description of Artificial Sequence: Synthetic oligonucleotide
  Target: SCNA; (-) strand; PAM type: YTN; PAM sequence: CTA
gaggattttattgcttcaga

SEQ ID NO: 58353 - DNA, 20 bp, Artificial Sequence
  Description of Artificial Sequence: Synthetic oligonucleotide
  Target: SCNA; (-) strand; PAM type: YTN; PAM sequence: TTA
actagaggattttattgctt

SEQ ID NO: 58354 - DNA, 20 bp, Artificial Sequence
  Description of Artificial Sequence: Synthetic oligonucleotide
  Target: SCNA; (-) strand; PAM type: YTN; PAM sequence: TTT
aactagaggattttattgct

SEQ ID NO: 58355 - DNA, 20 bp, Artificial Sequence
  Description of Artificial Sequence: Synthetic oligonucleotide
  Target: SCNA; (-) strand; PAM type: YTN; PAM sequence: CTA
gatttaactagaggatttta

SEQ ID NO: 58356 - DNA, 20 bp, Artificial Sequence
  Description of Artificial Sequence: Synthetic oligonucleotide
  Target: SCNA; (-) strand; PAM type: YTN; PAM sequence: TTA
tggacaactagatttaacta

SEQ ID NO: 58357 - DNA, 20 bp, Artificial Sequence
  Description of Artificial Sequence: Synthetic oligonucleotide
  Target: SCNA; (-) strand; PAM type: YTN; PAM sequence: TTC
agttatggacaactagattt

SEQ ID NO: 58358 - DNA, 20 bp, Artificial Sequence
  Description of Artificial Sequence: Synthetic oligonucleotide
  Target: SCNA; (-) strand; PAM type: YTN; PAM sequence: TTA
tacattcagttatggacaac

SEQ ID NO: 58359 - DNA, 20 bp, Artificial Sequence
  Description of Artificial Sequence: Synthetic oligonucleotide
  Target: SCNA; (-) strand; PAM type: YTN; PAM sequence: TTT
atacattcagttatggacaa

SEQ ID NO: 58360 - DNA, 20 bp, Artificial Sequence
  Description of Artificial Sequence: Synthetic oligonucleotide
  Target: SCNA; (-) strand; PAM type: YTN; PAM sequence: CTT
tatacattcagttatggaca

SEQ ID NO: 58361 - DNA, 20 bp, Artificial Sequence
  Description of Artificial Sequence: Synthetic oligonucleotide
  Target: SCNA; (-) strand; PAM type: YTN; PAM sequence: TTG
ggtctttatacattcagtta

SEQ ID NO: 58362 - DNA, 20 bp, Artificial Sequence
  Description of Artificial Sequence: Synthetic oligonucleotide
  Target: SCNA; (-) strand; PAM type: YTN; PAM sequence: TTT
gggtctttatacattcagtt

SEQ ID NO: 58363 - DNA, 20 bp, Artificial Sequence
  Description of Artificial Sequence: Synthetic oligonucleotide
  Target: SCNA; (-) strand; PAM type: YTN; PAM sequence: CTT
tgggtctttatacattcagt

SEQ ID NO: 58364 - DNA, 20 bp, Artificial Sequence
  Description of Artificial Sequence: Synthetic oligonucleotide
  Target: SCNA; (-) strand; PAM type: YTN; PAM sequence: TTC
ctttgggtctttatacattc

SEQ ID NO: 58365 - DNA, 20 bp, Artificial Sequence
  Description of Artificial Sequence: Synthetic oligonucleotide
  Target: SCNA; (-) strand; PAM type: YTN; PAM sequence: CTT
cctttgggtctttatacatt

SEQ ID NO: 58366 - DNA, 20 bp, Artificial Sequence
  Description of Artificial Sequence: Synthetic oligonucleotide
  Target: SCNA; (-) strand; PAM type: YTN; PAM sequence: TTA
ccttcctttgggtctttata

SEQ ID NO: 58367 - DNA, 20 bp, Artificial Sequence
  Description of Artificial Sequence: Synthetic oligonucleotide
  Target: SCNA; (-) strand; PAM type: YTN; PAM sequence: CTT
accttcctttgggtctttat

SEQ ID NO: 58368 - DNA, 20 bp, Artificial Sequence
  Description of Artificial Sequence: Synthetic oligonucleotide
  Target: SCNA; (-) strand; PAM type: YTN; PAM sequence: CTC
aaaacttaccttcctttggg

SEQ ID NO: 58369 - DNA, 20 bp, Artificial Sequence
  Description of Artificial Sequence: Synthetic oligonucleotide
  Target: SCNA; (-) strand; PAM type: YTN; PAM sequence: TTC
ctcaaaacttaccttccttt

SEQ ID NO: 58370 - DNA, 20 bp, Artificial Sequence
  Description of Artificial Sequence: Synthetic oligonucleotide
  Target: SCNA; (-) strand; PAM type: YTN; PAM sequence: CTT
cctcaaaacttaccttcctt

SEQ ID NO: 58371 - DNA, 20 bp, Artificial Sequence
  Description of Artificial Sequence: Synthetic oligonucleotide
  Target: SCNA; (-) strand; PAM type: YTN; PAM sequence: TTC
cccaagcacttcctcaaaac

SEQ ID NO: 58372 - DNA, 20 bp, Artificial Sequence
  Description of Artificial Sequence: Synthetic oligonucleotide
  Target: SCNA; (-) strand; PAM type: YTN; PAM sequence: CTT
ccccaagcacttcctcaaaa

SEQ ID NO: 58373 - DNA, 20 bp, Artificial Sequence
  Description of Artificial Sequence: Synthetic oligonucleotide
  Target: SCNA; (-) strand; PAM type: YTN; PAM sequence: CTA
tatcacttccccaagcactt

SEQ ID NO: 58374 - DNA, 20 bp, Artificial Sequence
  Description of Artificial Sequence: Synthetic oligonucleotide
  Target: SCNA; (-) strand; PAM type: YTN; PAM sequence: TTC
cagccactatatcacttccc

SEQ ID NO: 58375 - DNA, 20 bp, Artificial Sequence
  Description of Artificial Sequence: Synthetic oligonucleotide
  Target: SCNA; (-) strand; PAM type: YTN; PAM sequence: TTT
ccagccactatatcacttcc

SEQ ID NO: 58376 - DNA, 20 bp, Artificial Sequence
  Description of Artificial Sequence: Synthetic oligonucleotide
  Target: SCNA; (-) strand; PAM type: YTN; PAM sequence: TTT
tccagccactatatcacttc

SEQ ID NO: 58377 - DNA, 20 bp, Artificial Sequence
  Description of Artificial Sequence: Synthetic oligonucleotide
  Target: SCNA; (-) strand; PAM type: YTN; PAM sequence: CTT
ttccagccactatatcactt

SEQ ID NO: 58378 - DNA, 20 bp, Artificial Sequence
  Description of Artificial Sequence: Synthetic oligonucleotide
  Target: SCNA; (-) strand; PAM type: YTN; PAM sequence: CTG
gacaccagtagtacttttcc

SEQ ID NO: 58379 - DNA, 20 bp, Artificial Sequence
  Description of Artificial Sequence: Synthetic oligonucleotide
  Target: SCNA; (-) strand; PAM type: YTN; PAM sequence: TTG
gaatagactggacaccagta

SEQ ID NO: 58380 - DNA, 20 bp, Artificial Sequence
  Description of Artificial Sequence: Synthetic oligonucleotide
  Target: SCNA; (-) strand; PAM type: YTN; PAM sequence: TTT
ggaatagactggacaccagt

SEQ ID NO: 58381 - DNA, 20 bp, Artificial Sequence
  Description of Artificial Sequence: Synthetic oligonucleotide
  Target: SCNA; (-) strand; PAM type: YTN; PAM sequence: TTG
cacagtcatttggaatagac

SEQ ID NO: 58382 - DNA, 20 bp, Artificial Sequence
  Description of Artificial Sequence: Synthetic oligonucleotide
  Target: SCNA; (-) strand; PAM type: YTN; PAM sequence: CTA
cagaggaagtgggtagtcca

SEQ ID NO: 58383 - DNA, 20 bp, Artificial Sequence
  Description of Artificial Sequence: Synthetic oligonucleotide
  Target: SCNA; (-) strand; PAM type: YTN; PAM sequence: TTG
tagagatgaggaaacagaaa

SEQ ID NO: 58384 - DNA, 20 bp, Artificial Sequence
  Description of Artificial Sequence: Synthetic oligonucleotide
  Target: SCNA; (-) strand; PAM type: YTN; PAM sequence: CTG
attgtagagatgaggaaaca

SEQ ID NO: 58385 - DNA, 20 bp, Artificial Sequence
  Description of Artificial Sequence: Synthetic oligonucleotide
  Target: SCNA; (-) strand; PAM type: YTN; PAM sequence: TTC
tgattgtagagatgaggaaa

SEQ ID NO: 58386 - DNA, 20 bp, Artificial Sequence
  Description of Artificial Sequence: Synthetic oligonucleotide
  Target: SCNA; (-) strand; PAM type: YTN; PAM sequence: CTT
ctgattgtagagatgaggaa

SEQ ID NO: 58387 - DNA, 20 bp, Artificial Sequence
  Description of Artificial Sequence: Synthetic oligonucleotide
  Target: SCNA; (-) strand; PAM type: YTN; PAM sequence: TTC
agatcaatcttctgattgta

SEQ ID NO: 58388 - DNA, 20 bp, Artificial Sequence
  Description of Artificial Sequence: Synthetic oligonucleotide
  Target: SCNA; (-) strand; PAM type: YTN; PAM sequence: CTG
ttcagatcaatcttctgatt

SEQ ID NO: 58389 - DNA, 20 bp, Artificial Sequence
  Description of Artificial Sequence: Synthetic oligonucleotide
  Target: SCNA; (-) strand; PAM type: YTN; PAM sequence: CTC
tgttcagatcaatcttctga

SEQ ID NO: 58390 - DNA, 20 bp, Artificial Sequence
  Description of Artificial Sequence: Synthetic oligonucleotide
  Target: SCNA; (-) strand; PAM type: YTN; PAM sequence: TTG
acagaccctctgttcagatc

SEQ ID NO: 58391 - DNA, 20 bp, Artificial Sequence
  Description of Artificial Sequence: Synthetic oligonucleotide
  Target: SCNA; (-) strand; PAM type: YTN; PAM sequence: TTA
atgggaagtccattgacaga

SEQ ID NO: 58392 - DNA, 20 bp, Artificial Sequence
  Description of Artificial Sequence: Synthetic oligonucleotide
  Target: SCNA; (-) strand; PAM type: YTN; PAM sequence: CTT
aatgggaagtccattgacag

SEQ ID NO: 58393 - DNA, 20 bp, Artificial Sequence
  Description of Artificial Sequence: Synthetic oligonucleotide
  Target: SCNA; (-) strand; PAM type: YTN; PAM sequence: CTC
acatacgcacatcaaagagc

SEQ ID NO: 58394 - DNA, 20 bp, Artificial Sequence
  Description of Artificial Sequence: Synthetic oligonucleotide
  Target: SCNA; (-) strand; PAM type: YTN; PAM sequence: TTC
agaaaaatgcgcactcacat

SEQ ID NO: 58395 - DNA, 20 bp, Artificial Sequence
  Description of Artificial Sequence: Synthetic oligonucleotide
  Target: SCNA; (-) strand; PAM type: YTN; PAM sequence: CTT
cagaaaaatgcgcactcaca

SEQ ID NO: 58396 - DNA, 20 bp, Artificial Sequence
  Description of Artificial Sequence: Synthetic oligonucleotide
  Target: SCNA; (-) strand; PAM type: YTN; PAM sequence: TTA
gcttcagaaaaatgcgcact

SEQ ID NO: 58397 - DNA, 20 bp, Artificial Sequence
  Description of Artificial Sequence: Synthetic oligonucleotide
  Target: SCNA; (-) strand; PAM type: YTN; PAM sequence: CTT
agcttcagaaaaatgcgcac

SEQ ID NO: 58398 - DNA, 20 bp, Artificial Sequence
  Description of Artificial Sequence: Synthetic oligonucleotide
  Target: SCNA; (-) strand; PAM type: YTN; PAM sequence: CTC
ttagcttcagaaaaatgcgc

SEQ ID NO: 58399 - DNA, 20 bp, Artificial Sequence
  Description of Artificial Sequence: Synthetic oligonucleotide
  Target: SCNA; (-) strand; PAM type: YTN; PAM sequence: CTA
tagaccctcttagcttcaga

SEQ ID NO: 58400 - DNA, 20 bp, Artificial Sequence
  Description of Artificial Sequence: Synthetic oligonucleotide
  Target: SCNA; (-) strand; PAM type: YTN; PAM sequence: CTA
atagaagctatagaccctct

SEQ ID NO: 58401 - DNA, 20 bp, Artificial Sequence
  Description of Artificial Sequence: Synthetic oligonucleotide
  Target: SCNA; (-) strand; PAM type: YTN; PAM sequence: TTC
acgggctaatagaagctata

SEQ ID NO: 58402 - DNA, 20 bp, Artificial Sequence
  Description of Artificial Sequence: Synthetic oligonucleotide
  Target: SCNA; (-) strand; PAM type: YTN; PAM sequence: TTT
cacgggctaatagaagctat

SEQ ID NO: 58403 - DNA, 20 bp, Artificial Sequence
  Description of Artificial Sequence: Synthetic oligonucleotide
  Target: SCNA; (-) strand; PAM type: YTN; PAM sequence: TTT
tcacgggctaatagaagcta

SEQ ID NO: 58404 - DNA, 20 bp, Artificial Sequence
  Description of Artificial Sequence: Synthetic oligonucleotide
  Target: SCNA; (-) strand; PAM type: YTN; PAM sequence: CTT
ttcacgggctaatagaagct

SEQ ID NO: 58405 - DNA, 20 bp, Artificial Sequence
  Description of Artificial Sequence: Synthetic oligonucleotide
  Target: SCNA; (-) strand; PAM type: YTN; PAM sequence: CTC
cgacccttttcacgggctaa

SEQ ID NO: 58406 - DNA, 20 bp, Artificial Sequence
  Description of Artificial Sequence: Synthetic oligonucleotide
  Target: SCNA; (-) strand; PAM type: YTN; PAM sequence: TTG
tgtctccgacccttttcacg

SEQ ID NO: 58407 - DNA, 20 bp, Artificial Sequence
  Description of Artificial Sequence: Synthetic oligonucleotide
  Target: SCNA; (-) strand; PAM type: YTN; PAM sequence: TTT
gtgtctccgacccttttcac

SEQ ID NO: 58408 - DNA, 20 bp, Artificial Sequence
  Description of Artificial Sequence: Synthetic oligonucleotide
  Target: SCNA; (-) strand; PAM type: YTN; PAM sequence: TTT
tgtgtctccgacccttttca

SEQ ID NO: 58409 - DNA, 20 bp, Artificial Sequence
  Description of Artificial Sequence: Synthetic oligonucleotide
  Target: SCNA; (-) strand; PAM type: YTN; PAM sequence: TTA
atcagttttgtgtctccgac

SEQ ID NO: 58410 - DNA, 20 bp, Artificial Sequence
  Description of Artificial Sequence: Synthetic oligonucleotide
  Target: SCNA; (-) strand; PAM type: YTN; PAM sequence: TTA
gtacacaggcaattaatcag

SEQ ID NO: 58411 - DNA, 20 bp, Artificial Sequence
  Description of Artificial Sequence: Synthetic oligonucleotide
  Target: SCNA; (-) strand; PAM type: YTN; PAM sequence: TTA
aattagtacacaggcaatta

SEQ ID NO: 58412 - DNA, 20 bp, Artificial Sequence
  Description of Artificial Sequence: Synthetic oligonucleotide
  Target: SCNA; (-) strand; PAM type: YTN; PAM sequence: CTC
agattaaattagtacacagg

SEQ ID NO: 58413 - DNA, 20 bp, Artificial Sequence
  Description of Artificial Sequence: Synthetic oligonucleotide
  Target: SCNA; (-) strand; PAM type: YTN; PAM sequence: TTA
agagggacctcagattaaat

SEQ ID NO: 58414 - DNA, 20 bp, Artificial Sequence
  Description of Artificial Sequence: Synthetic oligonucleotide
  Target: SCNA; (-) strand; PAM type: YTN; PAM sequence: TTC
acaagttaagagggacctca

SEQ ID NO: 58415 - DNA, 20 bp, Artificial Sequence
  Description of Artificial Sequence: Synthetic oligonucleotide
  Target: SCNA; (-) strand; PAM type: YTN; PAM sequence: TTT
cacaagttaagagggacctc

SEQ ID NO: 58416 - DNA, 20 bp, Artificial Sequence
  Description of Artificial Sequence: Synthetic oligonucleotide
  Target: SCNA; (-) strand; PAM type: YTN; PAM sequence: TTC
gtaagatttcacaagttaag

SEQ ID NO: 58417 - DNA, 20 bp, Artificial Sequence
  Description of Artificial Sequence: Synthetic oligonucleotide
  Target: SCNA; (-) strand; PAM type: YTN; PAM sequence: CTT
cgtaagatttcacaagttaa

SEQ ID NO: 58418 - DNA, 20 bp, Artificial Sequence
  Description of Artificial Sequence: Synthetic oligonucleotide
  Target: SCNA; (-) strand; PAM type: YTN; PAM sequence: TTA
tagcttcgtaagatttcaca

SEQ ID NO: 58419 - DNA, 20 bp, Artificial Sequence
  Description of Artificial Sequence: Synthetic oligonucleotide
  Target: SCNA; (-) strand; PAM type: YTN; PAM sequence: TTT
atagcttcgtaagatttcac

SEQ ID NO: 58420 - DNA, 20 bp, Artificial Sequence
  Description of Artificial Sequence: Synthetic oligonucleotide
  Target: SCNA; (-) strand; PAM type: YTN; PAM sequence: CTA
tttatagcttcgtaagattt

SEQ ID NO: 58421 - DNA, 20 bp, Artificial Sequence
  Description of Artificial Sequence: Synthetic oligonucleotide
  Target: SCNA; (-) strand; PAM type: YTN; PAM sequence: TTC
tatttatagcttcgtaagat

SEQ ID NO: 58422 - DNA, 20 bp, Artificial Sequence
  Description of Artificial Sequence: Synthetic oligonucleotide
  Target: SCNA; (-) strand; PAM type: YTN; PAM sequence: TTA
attctatttatagcttcgta

SEQ ID NO: 58423 - DNA, 20 bp, Artificial Sequence
  Description of Artificial Sequence: Synthetic oligonucleotide
  Target: SCNA; (-) strand; PAM type: YTN; PAM sequence: TTT
aattctatttatagcttcgt

SEQ ID NO: 58424 - DNA, 20 bp, Artificial Sequence
  Description of Artificial Sequence: Synthetic oligonucleotide
  Target: SCNA; (-) strand; PAM type: YTN; PAM sequence: TTT
taattctatttatagcttcg

SEQ ID NO: 58425 - DNA, 20 bp, Artificial Sequence
  Description of Artificial Sequence: Synthetic oligonucleotide
  Target: SCNA; (-) strand; PAM type: YTN; PAM sequence: CTA
aaattttaattctatttata

SEQ ID NO: 58426 - DNA, 20 bp, Artificial Sequence
  Description of Artificial Sequence: Synthetic oligonucleotide
  Target: SCNA; (-) strand; PAM type: YTN; PAM sequence: TTC
catctaaaattttaattcta

SEQ ID NO: 58427 - DNA, 20 bp, Artificial Sequence
  Description of Artificial Sequence: Synthetic oligonucleotide
  Target: SCNA; (-) strand; PAM type: YTN; PAM sequence: TTT
ccatctaaaattttaattct

SEQ ID NO: 58428 - DNA, 20 bp, Artificial Sequence
  Description of Artificial Sequence: Synthetic oligonucleotide
  Target: SCNA; (-) strand; PAM type: YTN; PAM sequence: CTG
gtttccatctaaaattttaa

SEQ ID NO: 58429 - DNA, 20 bp, Artificial Sequence
  Description of Artificial Sequence: Synthetic oligonucleotide
  Target: SCNA; (-) strand; PAM type: YTN; PAM sequence: TTC
ctggtttccatctaaaattt

SEQ ID NO: 58430 - DNA, 20 bp, Artificial Sequence
  Description of Artificial Sequence: Synthetic oligonucleotide
  Target: SCNA; (-) strand; PAM type: YTN; PAM sequence: TTA
attcctggtttccatctaaa

SEQ ID NO: 58431 - DNA, 20 bp, Artificial Sequence
  Description of Artificial Sequence: Synthetic oligonucleotide
  Target: SCNA; (-) strand; PAM type: YTN; PAM sequence: TTA
tattaattcctggtttccat

SEQ ID NO: 58432 - DNA, 20 bp, Artificial Sequence
  Description of Artificial Sequence: Synthetic oligonucleotide
  Target: SCNA; (-) strand; PAM type: YTN; PAM sequence: TTA
gggataataattatattaat

SEQ ID NO: 58433 - DNA, 20 bp, Artificial Sequence
  Description of Artificial Sequence: Synthetic oligonucleotide
  Target: SCNA; (-) strand; PAM type: YTN; PAM sequence: TTA
ttagggataataattatatt

SEQ ID NO: 58434 - DNA, 20 bp, Artificial Sequence
  Description of Artificial Sequence: Synthetic oligonucleotide
  Target: SCNA; (-) strand; PAM type: YTN; PAM sequence: CTT
attagggataataattatat

SEQ ID NO: 58435 - DNA, 20 bp, Artificial Sequence
  Description of Artificial Sequence: Synthetic oligonucleotide
  Target: SCNA; (-) strand; PAM type: YTN; PAM sequence: TTC
aaataatcttattagggata

SEQ ID NO: 58436 - DNA, 20 bp, Artificial Sequence
  Description of Artificial Sequence: Synthetic oligonucleotide
  Target: SCNA; (-) strand; PAM type: YTN; PAM sequence: TTT
caaataatcttattagggat

SEQ ID NO: 58437 - DNA, 20 bp, Artificial Sequence
  Description of Artificial Sequence: Synthetic oligonucleotide
  Target: SCNA; (-) strand; PAM type: YTN; PAM sequence: TTT
tcaaataatcttattaggga

SEQ ID NO: 58438 - DNA, 20 bp, Artificial Sequence
  Description of Artificial Sequence: Synthetic oligonucleotide
  Target: SCNA; (-) strand; PAM type: YTN; PAM sequence: CTT
ttcaaataatcttattaggg

SEQ ID NO: 58439 - DNA, 20 bp, Artificial Sequence
  Description of Artificial Sequence: Synthetic oligonucleotide
  Target: SCNA; (-) strand; PAM type: YTN; PAM sequence: TTG
tacaaaatatgcttttcaaa

SEQ ID NO: 58440 - DNA, 20 bp, Artificial Sequence
  Description of Artificial Sequence: Synthetic oligonucleotide
  Target: SCNA; (-) strand; PAM type: YTN; PAM sequence: TTT
gtacaaaatatgcttttcaa

SEQ ID NO: 58441 - DNA, 20 bp, Artificial Sequence
  Description of Artificial Sequence: Synthetic oligonucleotide
  Target: SCNA; (-) strand; PAM type: YTN; PAM sequence: CTT
tgtacaaaatatgcttttca

SEQ ID NO: 58442 - DNA, 20 bp, Artificial Sequence
  Description of Artificial Sequence: Synthetic oligonucleotide
  Target: SCNA; (-) strand; PAM type: YTN; PAM sequence: TTG
gtcatggtggtacccctttg

SEQ ID NO: 58443 - DNA, 20 bp, Artificial Sequence
  Description of Artificial Sequence: Synthetic oligonucleotide
  Target: SCNA; (-) strand; PAM type: YTN; PAM sequence: TTG
aatgcatggttggtcatggt

SEQ ID NO: 58444 - DNA, 20 bp, Artificial Sequence
  Description of Artificial Sequence: Synthetic oligonucleotide
  Target: SCNA; (-) strand; PAM type: YTN; PAM sequence: TTT
gaatgcatggttggtcatgg

SEQ ID NO: 58445 - DNA, 20 bp, Artificial Sequence
  Description of Artificial Sequence: Synthetic oligonucleotide
  Target: SCNA; (-) strand; PAM type: YTN; PAM sequence: CTA
atgtttgaatgcatggttgg

SEQ ID NO: 58446 - DNA, 20 bp, Artificial Sequence
  Description of Artificial Sequence: Synthetic oligonucleotide
  Target: SCNA; (-) strand; PAM type: YTN; PAM sequence: TTC
agctaatgtttgaatgcatg

SEQ ID NO: 58447 - DNA, 20 bp, Artificial Sequence
  Description of Artificial Sequence: Synthetic oligonucleotide
  Target: SCNA; (-) strand; PAM type: YTN; PAM sequence: CTT
cagctaatgtttgaatgcat

SEQ ID NO: 58448 - DNA, 20 bp, Artificial Sequence
  Description of Artificial Sequence: Synthetic oligonucleotide
  Target: SCNA; (-) strand; PAM type: YTN; PAM sequence: TTC
ttcagctaatgtttgaatgc

SEQ ID NO: 58449 - DNA, 20 bp, Artificial Sequence
  Description of Artificial Sequence: Synthetic oligonucleotide
  Target: SCNA; (-) strand; PAM type: YTN; PAM sequence: CTA
gtgaagttcttcagctaatg

SEQ ID NO: 58450 - DNA, 20 bp, Artificial Sequence
  Description of Artificial Sequence: Synthetic oligonucleotide
  Target: SCNA; (-) strand; PAM type: YTN; PAM sequence: TTC
tagtgaagttcttcagctaa

SEQ ID NO: 58451 - DNA, 20 bp, Artificial Sequence
  Description of Artificial Sequence: Synthetic oligonucleotide
  Target: SCNA; (-) strand; PAM type: YTN; PAM sequence: CTT
ctagtgaagttcttcagcta

SEQ ID NO: 58452 - DNA, 20 bp, Artificial Sequence
  Description of Artificial Sequence: Synthetic oligonucleotide
  Target: SCNA; (-) strand; PAM type: YTN; PAM sequence: CTG
ggcttctagtgaagttcttc

SEQ ID NO: 58453 - DNA, 20 bp, Artificial Sequence
  Description of Artificial Sequence: Synthetic oligonucleotide
  Target: SCNA; (-) strand; PAM type: YTN; PAM sequence: TTA
ctgggcttctagtgaagttc

SEQ ID NO: 58454 - DNA, 20 bp, Artificial Sequence
  Description of Artificial Sequence: Synthetic oligonucleotide
  Target: SCNA; (-) strand; PAM type: YTN; PAM sequence: CTT
actgggcttctagtgaagtt

SEQ ID NO: 58455 - DNA, 20 bp, Artificial Sequence
  Description of Artificial Sequence: Synthetic oligonucleotide
  Target: SCNA; (-) strand; PAM type: YTN; PAM sequence: CTA
atgatggcaaatccttactg

SEQ ID NO: 58456 - DNA, 20 bp, Artificial Sequence
  Description of Artificial Sequence: Synthetic oligonucleotide
  Target: SCNA; (-) strand; PAM type: YTN; PAM sequence: CTG
gtgcaatggatgctaatgat

SEQ ID NO: 58457 - DNA, 20 bp, Artificial Sequence
  Description of Artificial Sequence: Synthetic oligonucleotide
  Target: SCNA; (-) strand; PAM type: YTN; PAM sequence: CTA
gtgtctggtgcaatggatgc

SEQ ID NO: 58458 - DNA, 20 bp, Artificial Sequence
  Description of Artificial Sequence: Synthetic oligonucleotide
  Target: SCNA; (-) strand; PAM type: YTN; PAM sequence: TTA
catgtctagtgtctggtgca

SEQ ID NO: 58459 - DNA, 20 bp, Artificial Sequence
  Description of Artificial Sequence: Synthetic oligonucleotide
  Target: SCNA; (-) strand; PAM type: YTN; PAM sequence: CTT
acatgtctagtgtctggtgc

SEQ ID NO: 58460 - DNA, 20 bp, Artificial Sequence
  Description of Artificial Sequence: Synthetic oligonucleotide
  Target: SCNA; (-) strand; PAM type: YTN; PAM sequence: CTA
catgtacttacatgtctagt

SEQ ID NO: 58461 - DNA, 20 bp, Artificial Sequence
  Description of Artificial Sequence: Synthetic oligonucleotide
  Target: SCNA; (-) strand; PAM type: YTN; PAM sequence: TTA
ctacatgtacttacatgtct

SEQ ID NO: 58462 - DNA, 20 bp, Artificial Sequence
  Description of Artificial Sequence: Synthetic oligonucleotide
  Target: SCNA; (-) strand; PAM type: YTN; PAM sequence: TTT
actacatgtacttacatgtc

SEQ ID NO: 58463 - DNA, 20 bp, Artificial Sequence
  Description of Artificial Sequence: Synthetic oligonucleotide
  Target: SCNA; (-) strand; PAM type: YTN; PAM sequence: TTA
gatttactacatgtacttac

SEQ ID NO: 58464 - DNA, 20 bp, Artificial Sequence
  Description of Artificial Sequence: Synthetic oligonucleotide
  Target: SCNA; (-) strand; PAM type: YTN; PAM sequence: TTT
agatttactacatgtactta

SEQ ID NO: 58465 - DNA, 20 bp, Artificial Sequence
  Description of Artificial Sequence: Synthetic oligonucleotide
  Target: SCNA; (-) strand; PAM type: YTN; PAM sequence: CTG
tgatatatttagatttacta

SEQ ID NO: 58466 - DNA, 20 bp, Artificial Sequence
  Description of Artificial Sequence: Synthetic oligonucleotide
  Target: SCNA; (-) strand; PAM type: YTN; PAM sequence: CTG
ataataaaaaggcagaacaa

SEQ ID NO: 58467 - DNA, 20 bp, Artificial Sequence
  Description of Artificial Sequence: Synthetic oligonucleotide
  Target: SCNA; (-) strand; PAM type: YTN; PAM sequence: CTC
tgataataaaaaggcagaac

SEQ ID NO: 58468 - DNA, 20 bp, Artificial Sequence
  Description of Artificial Sequence: Synthetic oligonucleotide
  Target: SCNA; (-) strand; PAM type: YTN; PAM sequence: TTA
aaactctgataataaaaagg

SEQ ID NO: 58469 - DNA, 20 bp, Artificial Sequence
  Description of Artificial Sequence: Synthetic oligonucleotide
  Target: SCNA; (-) strand; PAM type: YTN; PAM sequence: TTG
atagcccattaaaactctga

SEQ ID NO: 58470 - DNA, 20 bp, Artificial Sequence
  Description of Artificial Sequence: Synthetic oligonucleotide
  Target: SCNA; (-) strand; PAM type: YTN; PAM sequence: CTT
gatagcccattaaaactctg

SEQ ID NO: 58471 - DNA, 20 bp, Artificial Sequence
  Description of Artificial Sequence: Synthetic oligonucleotide
  Target: SCNA; (-) strand; PAM type: YTN; PAM sequence: TTA
ccttgatagcccattaaaac

SEQ ID NO: 58472 - DNA, 20 bp, Artificial Sequence
  Description of Artificial Sequence: Synthetic oligonucleotide
  Target: SCNA; (-) strand; PAM type: YTN; PAM sequence: CTT
accttgatagcccattaaaa

SEQ ID NO: 58473 - DNA, 20 bp, Artificial Sequence
  Description of Artificial Sequence: Synthetic oligonucleotide
  Target: SCNA; (-) strand; PAM type: YTN; PAM sequence: CTA
agtagcagccttaccttgat

SEQ ID NO: 58474 - DNA, 20 bp, Artificial Sequence
  Description of Artificial Sequence: Synthetic oligonucleotide
  Target: SCNA; (-) strand; PAM type: YTN; PAM sequence: TTC
atgtaatcctaagtagcagc

SEQ ID NO: 58475 - DNA, 20 bp, Artificial Sequence
  Description of Artificial Sequence: Synthetic oligonucleotide
  Target: SCNA; (-) strand; PAM type: YTN; PAM sequence: CTT
catgtaatcctaagtagcag

SEQ ID NO: 58476 - DNA, 20 bp, Artificial Sequence
  Description of Artificial Sequence: Synthetic oligonucleotide
  Target: SCNA; (-) strand; PAM type: YTN; PAM sequence: TTC
cacttcatgtaatcctaagt

SEQ ID NO: 58477 - DNA, 20 bp, Artificial Sequence
  Description of Artificial Sequence: Synthetic oligonucleotide
  Target: SCNA; (-) strand; PAM type: YTN; PAM sequence: TTT
ccacttcatgtaatcctaag

SEQ ID NO: 58478 - DNA, 20 bp, Artificial Sequence
  Description of Artificial Sequence: Synthetic oligonucleotide
  Target: SCNA; (-) strand; PAM type: YTN; PAM sequence: TTG
tttccacttcatgtaatcct

SEQ ID NO: 58479 - DNA, 20 bp, Artificial Sequence
  Description of Artificial Sequence: Synthetic oligonucleotide
  Target: SCNA; (-) strand; PAM type: YTN; PAM sequence: CTG
ggttgtttccacttcatgta

SEQ ID NO: 58480 - DNA, 20 bp, Artificial Sequence
  Description of Artificial Sequence: Synthetic oligonucleotide
  Target: SCNA; (-) strand; PAM type: YTN; PAM sequence: TTC
tgggttgtttccacttcatg

SEQ ID NO: 58481 - DNA, 20 bp, Artificial Sequence
  Description of Artificial Sequence: Synthetic oligonucleotide
  Target: SCNA; (-) strand; PAM type: YTN; PAM sequence: CTA
ttctgggttgtttccacttc

SEQ ID NO: 58482 - DNA, 20 bp, Artificial Sequence
  Description of Artificial Sequence: Synthetic oligonucleotide
  Target: SCNA; (-) strand; PAM type: YTN; PAM sequence: CTG
gcaaactattctgggttgtt

SEQ ID NO: 58483 - DNA, 20 bp, Artificial Sequence
  Description of Artificial Sequence: Synthetic oligonucleotide
  Target: SCNA; (-) strand; PAM type: YTN; PAM sequence: TTG
ctggcaaactattctgggtt

SEQ ID NO: 58484 - DNA, 20 bp, Artificial Sequence
  Description of Artificial Sequence: Synthetic oligonucleotide
  Target: SCNA; (-) strand; PAM type: YTN; PAM sequence: TTT
gctggcaaactattctgggt

SEQ ID NO: 58485 - DNA, 20 bp, Artificial Sequence
  Description of Artificial Sequence: Synthetic oligonucleotide
  Target: SCNA; (-) strand; PAM type: YTN; PAM sequence: TTA
tttgctggcaaactattctg

SEQ ID NO: 58486 - DNA, 20 bp, Artificial Sequence
  Description of Artificial Sequence: Synthetic oligonucleotide
  Target: SCNA; (-) strand; PAM type: YTN; PAM sequence: TTT
atttgctggcaaactattct

SEQ ID NO: 58487 - DNA, 20 bp, Artificial Sequence
  Description of Artificial Sequence: Synthetic oligonucleotide
  Target: SCNA; (-) strand; PAM type: YTN; PAM sequence: TTT
tatttgctggcaaactattc

SEQ ID NO: 58488 - DNA, 20 bp, Artificial Sequence
  Description of Artificial Sequence: Synthetic oligonucleotide
  Target: SCNA; (-) strand; PAM type: YTN; PAM sequence: TTG
tgagaaagaagttttatttg

SEQ ID NO: 58489 - DNA, 20 bp, Artificial Sequence
  Description of Artificial Sequence: Synthetic oligonucleotide
  Target: SCNA; (-) strand; PAM type: YTN; PAM sequence: TTG
aaaattgtgagaaagaagtt

SEQ ID NO: 58490 - DNA, 20 bp, Artificial Sequence
  Description of Artificial Sequence: Synthetic oligonucleotide
  Target: SCNA; (-) strand; PAM type: YTN; PAM sequence: CTT
gaaaattgtgagaaagaagt

SEQ ID NO: 58491 - DNA, 20 bp, Artificial Sequence
  Description of Artificial Sequence: Synthetic oligonucleotide
  Target: SCNA; (-) strand; PAM type: YTN; PAM sequence: TTG
gatgaatatcttgaaaattg

SEQ ID NO: 58492 - DNA, 20 bp, Artificial Sequence
  Description of Artificial Sequence: Synthetic oligonucleotide
  Target: SCNA; (-) strand; PAM type: YTN; PAM sequence: TTT
ggatgaatatcttgaaaatt

SEQ ID NO: 58493 - DNA, 20 bp, Artificial Sequence
  Description of Artificial Sequence: Synthetic oligonucleotide
  Target: SCNA; (-) strand; PAM type: YTN; PAM sequence: TTT
tggatgaatatcttgaaaat

SEQ ID NO: 58494 - DNA, 20 bp, Artificial Sequence
  Description of Artificial Sequence: Synthetic oligonucleotide
  Target: SCNA; (-) strand; PAM type: YTN; PAM sequence: TTA
caatcaaaatgattttggat

SEQ ID NO: 58495 - DNA, 20 bp, Artificial Sequence
  Description of Artificial Sequence: Synthetic oligonucleotide
  Target: SCNA; (-) strand; PAM type: YTN; PAM sequence: CTA
tccaaaagttacaatcaaaa

SEQ ID NO: 58496 - DNA, 20 bp, Artificial Sequence
  Description of Artificial Sequence: Synthetic oligonucleotide
  Target: SCNA; (-) strand; PAM type: YTN; PAM sequence: TTC
agctatccaaaagttacaat

SEQ ID NO: 58497 - DNA, 20 bp, Artificial Sequence
  Description of Artificial Sequence: Synthetic oligonucleotide
  Target: SCNA; (-) strand; PAM type: YTN; PAM sequence: CTA
ttcagctatccaaaagttac

SEQ ID NO: 58498 - DNA, 20 bp, Artificial Sequence
  Description of Artificial Sequence: Synthetic oligonucleotide
  Target: SCNA; (-) strand; PAM type: YTN; PAM sequence: TTA
gtataagaacagtgctattc

SEQ ID NO: 58499 - DNA, 20 bp, Artificial Sequence
  Description of Artificial Sequence: Synthetic oligonucleotide
  Target: SCNA; (-) strand; PAM type: YTN; PAM sequence: CTT
agtataagaacagtgctatt

SEQ ID NO: 58500 - DNA, 20 bp, Artificial Sequence
  Description of Artificial Sequence: Synthetic oligonucleotide
  Target: SCNA; (-) strand; PAM type: YTN; PAM sequence: TTA
taatcatatgcttagtataa

SEQ ID NO: 58501 - DNA, 20 bp, Artificial Sequence
  Description of Artificial Sequence: Synthetic oligonucleotide
  Target: SCNA; (-) strand; PAM type: YTN; PAM sequence: TTT
ataatcatatgcttagtata

SEQ ID NO: 58502 - DNA, 20 bp, Artificial Sequence
  Description of Artificial Sequence: Synthetic oligonucleotide
  Target: SCNA; (-) strand; PAM type: YTN; PAM sequence: TTT
tataatcatatgcttagtat

SEQ ID NO: 58503 - DNA, 20 bp, Artificial Sequence
  Description of Artificial Sequence: Synthetic oligonucleotide
  Target: SCNA; (-) strand; PAM type: YTN; PAM sequence: CTT
ttataatcatatgcttagta

SEQ ID NO: 58504 - DNA, 20 bp, Artificial Sequence
  Description of Artificial Sequence: Synthetic oligonucleotide
  Target: SCNA; (-) strand; PAM type: YTN; PAM sequence: CTG
ggtcttttataatcatatgc

SEQ ID NO: 58505 - DNA, 20 bp, Artificial Sequence
  Description of Artificial Sequence: Synthetic oligonucleotide
  Target: SCNA; (-) strand; PAM type: YTN; PAM sequence: TTC
tgggtcttttataatcatat

SEQ ID NO: 58506 - DNA, 20 bp, Artificial Sequence
  Description of Artificial Sequence: Synthetic oligonucleotide
  Target: SCNA; (-) strand; PAM type: YTN; PAM sequence: TTT
ctgggtcttttataatcata

SEQ ID NO: 58507 - DNA, 20 bp, Artificial Sequence
  Description of Artificial Sequence: Synthetic oligonucleotide
  Target: SCNA; (-) strand; PAM type: YTN; PAM sequence: TTC
atttctgggtcttttataat

SEQ ID NO: 58508 - DNA, 20 bp, Artificial Sequence
  Description of Artificial Sequence: Synthetic oligonucleotide
  Target: SCNA; (-) strand; PAM type: YTN; PAM sequence: TTT
catttctgggtcttttataa

SEQ ID NO: 58509 - DNA, 20 bp, Artificial Sequence
  Description of Artificial Sequence: Synthetic oligonucleotide
  Target: SCNA; (-) strand; PAM type: YTN; PAM sequence: CTT
tcatttctgggtcttttata

SEQ ID NO: 58510 - DNA, 20 bp, Artificial Sequence
  Description of Artificial Sequence: Synthetic oligonucleotide
  Target: SCNA; (-) strand; PAM type: YTN; PAM sequence: TTA
aggagggaaggaagtgagta

SEQ ID NO: 58511 - DNA, 20 bp, Artificial Sequence
  Description of Artificial Sequence: Synthetic oligonucleotide
  Target: SCNA; (-) strand; PAM type: YTN; PAM sequence: TTA
aattaaggagggaaggaagt

SEQ ID NO: 58512 - DNA, 20 bp, Artificial Sequence
  Description of Artificial Sequence: Synthetic oligonucleotide
  Target: SCNA; (-) strand; PAM type: YTN; PAM sequence: TTA
ttaaattaaggagggaagga

SEQ ID NO: 58513 - DNA, 20 bp, Artificial Sequence
  Description of Artificial Sequence: Synthetic oligonucleotide
  Target: SCNA; (-) strand; PAM type: YTN; PAM sequence: TTT
attaaattaaggagggaagg

SEQ ID NO: 58514 - DNA, 20 bp, Artificial Sequence
  Description of Artificial Sequence: Synthetic oligonucleotide
  Target: SCNA; (-) strand; PAM type: YTN; PAM sequence: TTA
acaaacatttattaaattaa

SEQ ID NO: 58515 - DNA, 20 bp, Artificial Sequence
  Description of Artificial Sequence: Synthetic oligonucleotide
  Target: SCNA; (-) strand; PAM type: YTN; PAM sequence: TTA
cagtagacaattaacaaaca

SEQ ID NO: 58516 - DNA, 20 bp, Artificial Sequence
  Description of Artificial Sequence: Synthetic oligonucleotide
  Target: SCNA; (-) strand; PAM type: YTN; PAM sequence: CTT
acagtagacaattaacaaac

SEQ ID NO: 58517 - DNA, 20 bp, Artificial Sequence
  Description of Artificial Sequence: Synthetic oligonucleotide
  Target: SCNA; (-) strand; PAM type: YTN; PAM sequence: TTC
caacttacagtagacaatta

SEQ ID NO: 58518 - DNA, 20 bp, Artificial Sequence
  Description of Artificial Sequence: Synthetic oligonucleotide
  Target: SCNA; (-) strand; PAM type: YTN; PAM sequence: TTT
ccaacttacagtagacaatt

SEQ ID NO: 58519 - DNA, 20 bp, Artificial Sequence
  Description of Artificial Sequence: Synthetic oligonucleotide
  Target: SCNA; (-) strand; PAM type: YTN; PAM sequence: CTG
ggagagtttccaacttacag

SEQ ID NO: 58520 - DNA, 20 bp, Artificial Sequence
  Description of Artificial Sequence: Synthetic oligonucleotide
  Target: SCNA; (-) strand; PAM type: YTN; PAM sequence: TTC
acaagtgtctgggagagttt

SEQ ID NO: 58521 - DNA, 20 bp, Artificial Sequence
  Description of Artificial Sequence: Synthetic oligonucleotide
  Target: SCNA; (-) strand; PAM type: YTN; PAM sequence: TTT
cacaagtgtctgggagagtt

SEQ ID NO: 58522 - DNA, 20 bp, Artificial Sequence
  Description of Artificial Sequence: Synthetic oligonucleotide
  Target: SCNA; (-) strand; PAM type: YTN; PAM sequence: TTG
atatttcacaagtgtctggg

SEQ ID NO: 58523 - DNA, 20 bp, Artificial Sequence
  Description of Artificial Sequence: Synthetic oligonucleotide
  Target: SCNA; (-) strand; PAM type: YTN; PAM sequence: TTC
attgatatttcacaagtgtc

SEQ ID NO: 58524 - DNA, 20 bp, Artificial Sequence
  Description of Artificial Sequence: Synthetic oligonucleotide
  Target: SCNA; (-) strand; PAM type: YTN; PAM sequence: TTG
ttcattgatatttcacaagt

SEQ ID NO: 58525 - DNA, 20 bp, Artificial Sequence
  Description of Artificial Sequence: Synthetic oligonucleotide
  Target: SCNA; (-) strand; PAM type: YTN; PAM sequence: TTT
gttcattgatatttcacaag

SEQ ID NO: 58526 - DNA, 20 bp, Artificial Sequence
  Description of Artificial Sequence: Synthetic oligonucleotide
  Target: SCNA; (-) strand; PAM type: YTN; PAM sequence: TTT
tgttcattgatatttcacaa

SEQ ID NO: 58527 - DNA, 20 bp, Artificial Sequence
  Description of Artificial Sequence: Synthetic oligonucleotide
  Target: SCNA; (-) strand; PAM type: YTN; PAM sequence: TTA
ttttgttcattgatatttca

SEQ ID NO: 58528 - DNA, 20 bp, Artificial Sequence
  Description of Artificial Sequence: Synthetic oligonucleotide
  Target: SCNA; (-) strand; PAM type: YTN; PAM sequence: TTT
attttgttcattgatatttc

SEQ ID NO: 58529 - DNA, 20 bp, Artificial Sequence
  Description of Artificial Sequence: Synthetic oligonucleotide
  Target: SCNA; (-) strand; PAM type: YTN; PAM sequence: CTA
gaatgtaggcaccatgagag

SEQ ID NO: 58530 - DNA, 20 bp, Artificial Sequence
  Description of Artificial Sequence: Synthetic oligonucleotide
  Target: SCNA; (-) strand; PAM type: YTN; PAM sequence: TTC
tagaatgtaggcaccatgag

SEQ ID NO: 58531 - DNA, 20 bp, Artificial Sequence
  Description of Artificial Sequence: Synthetic oligonucleotide
  Target: SCNA; (-) strand; PAM type: YTN; PAM sequence: CTT
ctagaatgtaggcaccatga

SEQ ID NO: 58532 - DNA, 20 bp, Artificial Sequence
  Description of Artificial Sequence: Synthetic oligonucleotide
  Target: SCNA; (-) strand; PAM type: YTN; PAM sequence: CTC
ccttctagaatgtaggcacc

SEQ ID NO: 58533 - DNA, 20 bp, Artificial Sequence
  Description of Artificial Sequence: Synthetic oligonucleotide
  Target: SCNA; (-) strand; PAM type: YTN; PAM sequence: TTC
tcccttctagaatgtaggca

SEQ ID NO: 58534 - DNA, 20 bp, Artificial Sequence
  Description of Artificial Sequence: Synthetic oligonucleotide
  Target: SCNA; (-) strand; PAM type: YTN; PAM sequence: TTT
ctcccttctagaatgtaggc

SEQ ID NO: 58535 - DNA, 20 bp, Artificial Sequence
  Description of Artificial Sequence: Synthetic oligonucleotide
  Target: SCNA; (-) strand; PAM type: YTN; PAM sequence: TTA
tttctcccttctagaatgta

SEQ ID NO: 58536 - DNA, 20 bp, Artificial Sequence
  Description of Artificial Sequence: Synthetic oligonucleotide
  Target: SCNA; (-) strand; PAM type: YTN; PAM sequence: TTT
atttctcccttctagaatgt

SEQ ID NO: 58537 - DNA, 20 bp, Artificial Sequence
  Description of Artificial Sequence: Synthetic oligonucleotide
  Target: SCNA; (-) strand; PAM type: YTN; PAM sequence: TTT
tatttctcccttctagaatg

SEQ ID NO: 58538 - DNA, 20 bp, Artificial Sequence
  Description of Artificial Sequence: Synthetic oligonucleotide
  Target: SCNA; (-) strand; PAM type: YTN; PAM sequence: TTA
ttttatttctcccttctaga

SEQ ID NO: 58539 - DNA, 20 bp, Artificial Sequence
  Description of Artificial Sequence: Synthetic oligonucleotide
  Target: SCNA; (-) strand; PAM type: YTN; PAM sequence: TTT
attttatttctcccttctag

SEQ ID NO: 58540 - DNA, 20 bp, Artificial Sequence
  Description of Artificial Sequence: Synthetic oligonucleotide
  Target: SCNA; (-) strand; PAM type: YTN; PAM sequence: TTT
tattttatttctcccttcta

SEQ ID NO: 58541 - DNA, 20 bp, Artificial Sequence
  Description of Artificial Sequence: Synthetic oligonucleotide
  Target: SCNA; (-) strand; PAM type: YTN; PAM sequence: TTT
ttattttatttctcccttct

SEQ ID NO: 58542 - DNA, 20 bp, Artificial Sequence
  Description of Artificial Sequence: Synthetic oligonucleotide
  Target: SCNA; (-) strand; PAM type: YTN; PAM sequence: TTA
atgtatgatttttattttat

SEQ ID NO: 58543 - DNA, 20 bp, Artificial Sequence
  Description of Artificial Sequence: Synthetic oligonucleotide
  Target: SCNA; (-) strand; PAM type: YTN; PAM sequence: TTT
aatgtatgatttttatttta

SEQ ID NO: 58544 - DNA, 20 bp, Artificial Sequence
  Description of Artificial Sequence: Synthetic oligonucleotide
  Target: SCNA; (-) strand; PAM type: YTN; PAM sequence: CTT
taatgtatgatttttatttt

SEQ ID NO: 58545 - DNA, 20 bp, Artificial Sequence
  Description of Artificial Sequence: Synthetic oligonucleotide
  Target: SCNA; (-) strand; PAM type: YTN; PAM sequence: TTA
ctttaatgtatgatttttat

SEQ ID NO: 58546 - DNA, 20 bp, Artificial Sequence
  Description of Artificial Sequence: Synthetic oligonucleotide
  Target: SCNA; (-) strand; PAM type: YTN; PAM sequence: CTT
actttaatgtatgattttta

SEQ ID NO: 58547 - DNA, 20 bp, Artificial Sequence
  Description of Artificial Sequence: Synthetic oligonucleotide
  Target: SCNA; (-) strand; PAM type: YTN; PAM sequence: TTA
aatataatacataatgtgct

SEQ ID NO: 58548 - DNA, 20 bp, Artificial Sequence
  Description of Artificial Sequence: Synthetic oligonucleotide
  Target: SCNA; (-) strand; PAM type: YTN; PAM sequence: TTT
aaatataatacataatgtgc

SEQ ID NO: 58549 - DNA, 20 bp, Artificial Sequence
  Description of Artificial Sequence: Synthetic oligonucleotide
  Target: SCNA; (-) strand; PAM type: YTN; PAM sequence: CTT
taaatataatacataatgtg

SEQ ID NO: 58550 - DNA, 20 bp, Artificial Sequence
  Description of Artificial Sequence: Synthetic oligonucleotide
  Target: SCNA; (-) strand; PAM type: YTN; PAM sequence: TTC
acctttaaatataatacata

SEQ ID NO: 58551 - DNA, 20 bp, Artificial Sequence
  Description of Artificial Sequence: Synthetic oligonucleotide
  Target: SCNA; (-) strand; PAM type: YTN; PAM sequence: TTA
ttcacctttaaatataatac

SEQ ID NO: 58552 - DNA, 20 bp, Artificial Sequence
  Description of Artificial Sequence: Synthetic oligonucleotide
  Target: SCNA; (-) strand; PAM type: YTN; PAM sequence: TTG
ccaaagtgttattcaccttt

SEQ ID NO: 58553 - DNA, 20 bp, Artificial Sequence
  Description of Artificial Sequence: Synthetic oligonucleotide
  Target: SCNA; (-) strand; PAM type: YTN; PAM sequence: TTT
gccaaagtgttattcacctt

SEQ ID NO: 58554 - DNA, 20 bp, Artificial Sequence
  Description of Artificial Sequence: Synthetic oligonucleotide
  Target: SCNA; (-) strand; PAM type: YTN; PAM sequence: CTT
tgccaaagtgttattcacct

SEQ ID NO: 58555 - DNA, 20 bp, Artificial Sequence
  Description of Artificial Sequence: Synthetic oligonucleotide
  Target: SCNA; (-) strand; PAM type: YTN; PAM sequence: TTC
tttgccaaagtgttattcac

SEQ ID NO: 58556 - DNA, 20 bp, Artificial Sequence
  Description of Artificial Sequence: Synthetic oligonucleotide
  Target: SCNA; (-) strand; PAM type: YTN; PAM sequence: TTT
ctttgccaaagtgttattca

SEQ ID NO: 58557 - DNA, 20 bp, Artificial Sequence
  Description of Artificial Sequence: Synthetic oligonucleotide
  Target: SCNA; (-) strand; PAM type: YTN; PAM sequence: CTT
tctttgccaaagtgttattc

SEQ ID NO: 58558 - DNA, 20 bp, Artificial Sequence
  Description of Artificial Sequence: Synthetic oligonucleotide
  Target: SCNA; (-) strand; PAM type: YTN; PAM sequence: TTC
ctttctttgccaaagtgtta

SEQ ID NO: 58559 - DNA, 20 bp, Artificial Sequence
  Description of Artificial Sequence: Synthetic oligonucleotide
  Target: SCNA; (-) strand; PAM type: YTN; PAM sequence: TTT
cctttctttgccaaagtgtt

SEQ ID NO: 58560 - DNA, 20 bp, Artificial Sequence
  Description of Artificial Sequence: Synthetic oligonucleotide
  Target: SCNA; (-) strand; PAM type: YTN; PAM sequence: TTT
tcctttctttgccaaagtgt

SEQ ID NO: 58561 - DNA, 20 bp, Artificial Sequence
  Description of Artificial Sequence: Synthetic oligonucleotide
  Target: SCNA; (-) strand; PAM type: YTN; PAM sequence: TTT
ttcctttctttgccaaagtg

SEQ ID NO: 58562 - DNA, 20 bp, Artificial Sequence
  Description of Artificial Sequence: Synthetic oligonucleotide
  Target: SCNA; (-) strand; PAM type: YTN; PAM sequence: CTT
tttcctttctttgccaaagt

SEQ ID NO: 58563 - DNA, 20 bp, Artificial Sequence
  Description of Artificial Sequence: Synthetic oligonucleotide
  Target: SCNA; (-) strand; PAM type: YTN; PAM sequence: TTC
tttttcctttctttgccaaa

SEQ ID NO: 58564 - DNA, 20 bp, Artificial Sequence
  Description of Artificial Sequence: Synthetic oligonucleotide
  Target: SCNA; (-) strand; PAM type: YTN; PAM sequence: TTT
ctttttcctttctttgccaa

SEQ ID NO: 58565 - DNA, 20 bp, Artificial Sequence
  Description of Artificial Sequence: Synthetic oligonucleotide
  Target: SCNA; (-) strand; PAM type: YTN; PAM sequence: CTT
tctttttcctttctttgcca

SEQ ID NO: 58566 - DNA, 20 bp, Artificial Sequence
  Description of Artificial Sequence: Synthetic oligonucleotide
  Target: SCNA; (-) strand; PAM type: YTN; PAM sequence: TTC
tttctttttcctttctttgc

SEQ ID NO: 58567 - DNA, 20 bp, Artificial Sequence
  Description of Artificial Sequence: Synthetic oligonucleotide
  Target: SCNA; (-) strand; PAM type: YTN; PAM sequence: TTT
ctttctttttcctttctttg

SEQ ID NO: 58568 - DNA, 20 bp, Artificial Sequence
  Description of Artificial Sequence: Synthetic oligonucleotide
  Target: SCNA; (-) strand; PAM type: YTN; PAM sequence: TTT
tctttctttttcctttcttt

SEQ ID NO: 58569 - DNA, 20 bp, Artificial Sequence
  Description of Artificial Sequence: Synthetic oligonucleotide
  Target: SCNA; (-) strand; PAM type: YTN; PAM sequence: CTT
ttctttctttttcctttctt

SEQ ID NO: 58570 - DNA, 20 bp, Artificial Sequence
  Description of Artificial Sequence: Synthetic oligonucleotide
  Target: SCNA; (-) strand; PAM type: YTN; PAM sequence: TTC
cttttctttctttttccttt

SEQ ID NO: 58571 - DNA, 20 bp, Artificial Sequence
  Description of Artificial Sequence: Synthetic oligonucleotide
  Target: SCNA; (-) strand; PAM type: YTN; PAM sequence: TTT
ccttttctttctttttcctt

SEQ ID NO: 58572 - DNA, 20 bp, Artificial Sequence
  Description of Artificial Sequence: Synthetic oligonucleotide
  Target: SCNA; (-) strand; PAM type: YTN; PAM sequence: CTT
tccttttctttctttttcct

SEQ ID NO: 58573 - DNA, 20 bp, Artificial Sequence
  Description of Artificial Sequence: Synthetic oligonucleotide
  Target: SCNA; (-) strand; PAM type: YTN; PAM sequence: TTC
tttccttttctttctttttc

SEQ ID NO: 58574 - DNA, 20 bp, Artificial Sequence
  Description of Artificial Sequence: Synthetic oligonucleotide
  Target: SCNA; (-) strand; PAM type: YTN; PAM sequence: CTT
ctttccttttctttcttttt

SEQ ID NO: 58575 - DNA, 20 bp, Artificial Sequence
  Description of Artificial Sequence: Synthetic oligonucleotide
  Target: SCNA; (-) strand; PAM type: YTN; PAM sequence: TTC
cttctttccttttctttctt

SEQ ID NO: 58576 - DNA, 20 bp, Artificial Sequence
  Description of Artificial Sequence: Synthetic oligonucleotide
  Target: SCNA; (-) strand; PAM type: YTN; PAM sequence: CTT
ccttctttccttttctttct

SEQ ID NO: 58577 - DNA, 20 bp, Artificial Sequence
  Description of Artificial Sequence: Synthetic oligonucleotide
  Target: SCNA; (-) strand; PAM type: YTN; PAM sequence: TTC
cttccttctttccttttctt

SEQ ID NO: 58578 - DNA, 20 bp, Artificial Sequence
  Description of Artificial Sequence: Synthetic oligonucleotide
  Target: SCNA; (-) strand; PAM type: YTN; PAM sequence: CTT
ccttccttctttccttttct

SEQ ID NO: 58579 - DNA, 20 bp, Artificial Sequence
  Description of Artificial Sequence: Synthetic oligonucleotide
  Target: SCNA; (-) strand; PAM type: YTN; PAM sequence: TTC
cttccttccttctttccttt

SEQ ID NO: 58580 - DNA, 20 bp, Artificial Sequence
  Description of Artificial Sequence: Synthetic oligonucleotide
  Target: SCNA; (-) strand; PAM type: YTN; PAM sequence: CTT
ccttccttccttctttcctt

SEQ ID NO: 58581 - DNA, 20 bp, Artificial Sequence
  Description of Artificial Sequence: Synthetic oligonucleotide
  Target: SCNA; (-) strand; PAM type: YTN; PAM sequence: TTG
cttccttccttccttctttc

SEQ ID NO: 58582 - DNA, 20 bp, Artificial Sequence
  Description of Artificial Sequence: Synthetic oligonucleotide
  Target: SCNA; (-) strand; PAM type: YTN; PAM sequence: CTT
gcttccttccttccttcttt

SEQ ID NO: 58583 - DNA, 20 bp, Artificial Sequence
  Description of Artificial Sequence: Synthetic oligonucleotide
  Target: SCNA; (-) strand; PAM type: YTN; PAM sequence: TTC
ttgcttccttccttccttct

SEQ ID NO: 58584 - DNA, 20 bp, Artificial Sequence
  Description of Artificial Sequence: Synthetic oligonucleotide
  Target: SCNA; (-) strand; PAM type: YTN; PAM sequence: TTT
cttgcttccttccttccttc

SEQ ID NO: 58585 - DNA, 20 bp, Artificial Sequence
  Description of Artificial Sequence: Synthetic oligonucleotide
  Target: SCNA; (-) strand; PAM type: YTN; PAM sequence: CTT
tcttgcttccttccttcctt

SEQ ID NO: 58586 - DNA, 20 bp, Artificial Sequence
  Description of Artificial Sequence: Synthetic oligonucleotide
  Target: SCNA; (-) strand; PAM type: YTN; PAM sequence: TTC
tttcttgcttccttccttcc

SEQ ID NO: 58587 - DNA, 20 bp, Artificial Sequence
  Description of Artificial Sequence: Synthetic oligonucleotide
  Target: SCNA; (-) strand; PAM type: YTN; PAM sequence: TTT
ctttcttgcttccttccttc

SEQ ID NO: 58588 - DNA, 20 bp, Artificial Sequence
  Description of Artificial Sequence: Synthetic oligonucleotide
  Target: SCNA; (-) strand; PAM type: YTN; PAM sequence: TTT
tctttcttgcttccttcctt

SEQ ID NO: 58589 - DNA, 20 bp, Artificial Sequence
  Description of Artificial Sequence: Synthetic oligonucleotide
  Target: SCNA; (-) strand; PAM type: YTN; PAM sequence: TTT
ttctttcttgcttccttcct

SEQ ID NO: 58590 - DNA, 20 bp, Artificial Sequence
  Description of Artificial Sequence: Synthetic oligonucleotide
  Target: SCNA; (-) strand; PAM type: YTN; PAM sequence: TTT
tttctttcttgcttccttcc

SEQ ID NO: 58591 - DNA, 20 bp, Artificial Sequence
  Description of Artificial Sequence: Synthetic oligonucleotide
  Target: SCNA; (-) strand; PAM type: YTN; PAM sequence: CTT
ttttctttcttgcttccttc

SEQ ID NO: 58592 - DNA, 20 bp, Artificial Sequence
  Description of Artificial Sequence: Synthetic oligonucleotide
  Target: SCNA; (-) strand; PAM type: YTN; PAM sequence: CTC
ttttttctttcttgcttcct

SEQ ID NO: 58593 - DNA, 20 bp, Artificial Sequence
  Description of Artificial Sequence: Synthetic oligonucleotide
  Target: SCNA; (-) strand; PAM type: YTN; PAM sequence: TTC
tcttttttctttcttgcttc

SEQ ID NO: 58594 - DNA, 20 bp, Artificial Sequence
  Description of Artificial Sequence: Synthetic oligonucleotide
  Target: SCNA; (-) strand; PAM type: YTN; PAM sequence: TTT
ctcttttttctttcttgctt

SEQ ID NO: 58595 - DNA, 20 bp, Artificial Sequence
  Description of Artificial Sequence: Synthetic oligonucleotide
  Target: SCNA; (-) strand; PAM type: YTN; PAM sequence: CTT
tctcttttttctttcttgct

SEQ ID NO: 58596 - DNA, 20 bp, Artificial Sequence
  Description of Artificial Sequence: Synthetic oligonucleotide
  Target: SCNA; (-) strand; PAM type: YTN; PAM sequence: TTC
tttctcttttttctttcttg

SEQ ID NO: 58597 - DNA, 20 bp, Artificial Sequence
  Description of Artificial Sequence: Synthetic oligonucleotide
  Target: SCNA; (-) strand; PAM type: YTN; PAM sequence: TTT
ctttctcttttttctttctt

SEQ ID NO: 58598 - DNA, 20 bp, Artificial Sequence
  Description of Artificial Sequence: Synthetic oligonucleotide
  Target: SCNA; (-) strand; PAM type: YTN; PAM sequence: CTT
tctttctcttttttctttct

SEQ ID NO: 58599 - DNA, 20 bp, Artificial Sequence
  Description of Artificial Sequence: Synthetic oligonucleotide
  Target: SCNA; (-) strand; PAM type: YTN; PAM sequence: TTC
tttctttctcttttttcttt

SEQ ID NO: 58600 - DNA, 20 bp, Artificial Sequence
  Description of Artificial Sequence: Synthetic oligonucleotide
  Target: SCNA; (-) strand; PAM type: YTN; PAM sequence: TTT
ctttctttctcttttttctt

SEQ ID NO: 58601 - DNA, 20 bp, Artificial Sequence
  Description of Artificial Sequence: Synthetic oligonucleotide
  Target: SCNA; (-) strand; PAM type: YTN; PAM sequence: CTT
tctttctttctcttttttct

SEQ ID NO: 58602 - DNA, 20 bp, Artificial Sequence
  Description of Artificial Sequence: Synthetic oligonucleotide
  Target: SCNA; (-) strand; PAM type: YTN; PAM sequence: CTC
cctttctttctttctctttt

SEQ ID NO: 58603 - DNA, 20 bp, Artificial Sequence
  Description of Artificial Sequence: Synthetic oligonucleotide
  Target: SCNA; (-) strand; PAM type: YTN; PAM sequence: TTC
ctccctttctttctttctct

SEQ ID NO: 58604 - DNA, 20 bp, Artificial Sequence
  Description of Artificial Sequence: Synthetic oligonucleotide
  Target: SCNA; (-) strand; PAM type: YTN; PAM sequence: CTT
cctccctttctttctttctc

SEQ ID NO: 58605 - DNA, 20 bp, Artificial Sequence
  Description of Artificial Sequence: Synthetic oligonucleotide
  Target: SCNA; (-) strand; PAM type: YTN; PAM sequence: TTC
cttcctccctttctttcttt

SEQ ID NO: 58606 - DNA, 20 bp, Artificial Sequence
  Description of Artificial Sequence: Synthetic oligonucleotide
  Target: SCNA; (-) strand; PAM type: YTN; PAM sequence: CTT
ccttcctccctttctttctt

SEQ ID NO: 58607 - DNA, 20 bp, Artificial Sequence
  Description of Artificial Sequence: Synthetic oligonucleotide
  Target: SCNA; (-) strand; PAM type: YTN; PAM sequence: CTC
ccttccttcctccctttctt

SEQ ID NO: 58608 - DNA, 20 bp, Artificial Sequence
  Description of Artificial Sequence: Synthetic oligonucleotide
  Target: SCNA; (-) strand; PAM type: YTN; PAM sequence: CTC
cctcccttccttcctccctt

SEQ ID NO: 58609 - DNA, 20 bp, Artificial Sequence
  Description of Artificial Sequence: Synthetic oligonucleotide
  Target: SCNA; (-) strand; PAM type: YTN; PAM sequence: CTC
tccctcccttccttcctccc

SEQ ID NO: 58610 - DNA, 20 bp, Artificial Sequence
  Description of Artificial Sequence: Synthetic oligonucleotide
  Target: SCNA; (-) strand; PAM type: YTN; PAM sequence: CTC
tctccctcccttccttcctc

SEQ ID NO: 58611 - DNA, 20 bp, Artificial Sequence
  Description of Artificial Sequence: Synthetic oligonucleotide
  Target: SCNA; (-) strand; PAM type: YTN; PAM sequence: CTC
cctctctccctcccttcctt

SEQ ID NO: 58612 - DNA, 20 bp, Artificial Sequence
  Description of Artificial Sequence: Synthetic oligonucleotide
  Target: SCNA; (-) strand; PAM type: YTN; PAM sequence: TTC
ctccctctctccctcccttc

SEQ ID NO: 58613 - DNA, 20 bp, Artificial Sequence
  Description of Artificial Sequence: Synthetic oligonucleotide
  Target: SCNA; (-) strand; PAM type: YTN; PAM sequence: CTT
cctccctctctccctccctt

SEQ ID NO: 58614 - DNA, 20 bp, Artificial Sequence
  Description of Artificial Sequence: Synthetic oligonucleotide
  Target: SCNA; (-) strand; PAM type: YTN; PAM sequence: TTC
cttcctccctctctccctcc

SEQ ID NO: 58615 - DNA, 20 bp, Artificial Sequence
  Description of Artificial Sequence: Synthetic oligonucleotide
  Target: SCNA; (-) strand; PAM type: YTN; PAM sequence: CTT
ccttcctccctctctccctc

SEQ ID NO: 58616 - DNA, 20 bp, Artificial Sequence
  Description of Artificial Sequence: Synthetic oligonucleotide
  Target: SCNA; (-) strand; PAM type: YTN; PAM sequence: TTC
cttccttcctccctctctcc

SEQ ID NO: 58617 - DNA, 20 bp, Artificial Sequence
  Description of Artificial Sequence: Synthetic oligonucleotide
  Target: SCNA; (-) strand; PAM type: YTN; PAM sequence: CTT
ccttccttcctccctctctc

SEQ ID NO: 58618 - DNA, 20 bp, Artificial Sequence
  Description of Artificial Sequence: Synthetic oligonucleotide
  Target: SCNA; (-) strand; PAM type: YTN; PAM sequence: CTC
ccttccttccttcctccctc

SEQ ID NO: 58619 - DNA, 20 bp, Artificial Sequence
  Description of Artificial Sequence: Synthetic oligonucleotide
  Target: SCNA; (-) strand; PAM type: YTN; PAM sequence: TTC
tcccttccttccttcctccc

SEQ ID NO: 58620 - DNA, 20 bp, Artificial Sequence
  Description of Artificial Sequence: Synthetic oligonucleotide
  Target: SCNA; (-) strand; PAM type: YTN; PAM sequence: TTT
ctcccttccttccttcctcc

SEQ ID NO: 58621 - DNA, 20 bp, Artificial Sequence
  Description of Artificial Sequence: Synthetic oligonucleotide
  Target: SCNA; (-) strand; PAM type: YTN; PAM sequence: CTT
tctcccttccttccttcctc

SEQ ID NO: 58622 - DNA, 20 bp, Artificial Sequence
  Description of Artificial Sequence: Synthetic oligonucleotide
  Target: SCNA; (-) strand; PAM type: YTN; PAM sequence: TTC
ctttctcccttccttccttc

SEQ ID NO: 58623 - DNA, 20 bp, Artificial Sequence
  Description of Artificial Sequence: Synthetic oligonucleotide
  Target: SCNA; (-) strand; PAM type: YTN; PAM sequence: CTT
cctttctcccttccttcctt

SEQ ID NO: 58624 - DNA, 20 bp, Artificial Sequence
  Description of Artificial Sequence: Synthetic oligonucleotide
  Target: SCNA; (-) strand; PAM type: YTN; PAM sequence: TTC
cttcctttctcccttccttc

SEQ ID NO: 58625 - DNA, 20 bp, Artificial Sequence
  Description of Artificial Sequence: Synthetic oligonucleotide
  Target: SCNA; (-) strand; PAM type: YTN; PAM sequence: CTT
ccttcctttctcccttcctt

SEQ ID NO: 58626 - DNA, 20 bp, Artificial Sequence
  Description of Artificial Sequence: Synthetic oligonucleotide
  Target: SCNA; (-) strand; PAM type: YTN; PAM sequence: TTC
cttccttcctttctcccttc

SEQ ID NO: 58627 - DNA, 20 bp, Artificial Sequence
  Description of Artificial Sequence: Synthetic oligonucleotide
  Target: SCNA; (-) strand; PAM type: YTN; PAM sequence: CTT
ccttccttcctttctccctt

SEQ ID NO: 58628 - DNA, 20 bp, Artificial Sequence
  Description of Artificial Sequence: Synthetic oligonucleotide
  Target: SCNA; (-) strand; PAM type: YTN; PAM sequence: TTC
ccttccttccttcctttctc

SEQ ID NO: 58629 - DNA, 20 bp, Artificial Sequence
  Description of Artificial Sequence: Synthetic oligonucleotide
  Target: SCNA; (-) strand; PAM type: YTN; PAM sequence: TTT
cccttccttccttcctttct

SEQ ID NO: 58630 - DNA, 20 bp, Artificial Sequence
  Description of Artificial Sequence: Synthetic oligonucleotide
  Target: SCNA; (-) strand; PAM type: YTN; PAM sequence: TTT
tcccttccttccttcctttc

SEQ ID NO: 58631 - DNA, 20 bp, Artificial Sequence
  Description of Artificial Sequence: Synthetic oligonucleotide
  Target: SCNA; (-) strand; PAM type: YTN; PAM sequence: CTT
ttcccttccttccttccttt

SEQ ID NO: 58632 - DNA, 20 bp, Artificial Sequence
  Description of Artificial Sequence: Synthetic oligonucleotide
  Target: SCNA; (-) strand; PAM type: YTN; PAM sequence: TTC
ttttcccttccttccttcct

SEQ ID NO: 58633 - DNA, 20 bp, Artificial Sequence
  Description of Artificial Sequence: Synthetic oligonucleotide
  Target: SCNA; (-) strand; PAM type: YTN; PAM sequence: TTT
cttttcccttccttccttcc

SEQ ID NO: 58634 - DNA, 20 bp, Artificial Sequence
  Description of Artificial Sequence: Synthetic oligonucleotide
  Target: SCNA; (-) strand; PAM type: YTN; PAM sequence: CTT
tcttttcccttccttccttc

SEQ ID NO: 58635 - DNA, 20 bp, Artificial Sequence
  Description of Artificial Sequence: Synthetic oligonucleotide
  Target: SCNA; (-) strand; PAM type: YTN; PAM sequence: TTC
tttcttttcccttccttcct

SEQ ID NO: 58636 - DNA, 20 bp, Artificial Sequence
  Description of Artificial Sequence: Synthetic oligonucleotide
  Target: SCNA; (-) strand; PAM type: YTN; PAM sequence: TTT
ctttcttttcccttccttcc

SEQ ID NO: 58637 - DNA, 20 bp, Artificial Sequence
  Description of Artificial Sequence: Synthetic oligonucleotide
  Target: SCNA; (-) strand; PAM type: YTN; PAM sequence: CTT
tctttcttttcccttccttc

SEQ ID NO: 58638 - DNA, 20 bp, Artificial Sequence
  Description of Artificial Sequence: Synthetic oligonucleotide
  Target: SCNA; (-) strand; PAM type: YTN; PAM sequence: TTC
ctttctttcttttcccttcc

SEQ ID NO: 58639 - DNA, 20 bp, Artificial Sequence
  Description of Artificial Sequence: Synthetic oligonucleotide
  Target: SCNA; (-) strand; PAM type: YTN; PAM sequence: TTT
cctttctttcttttcccttc

SEQ ID NO: 58640 - DNA, 20 bp, Artificial Sequence
  Description of Artificial Sequence: Synthetic oligonucleotide
  Target: SCNA; (-) strand; PAM type: YTN; PAM sequence: CTT
tcctttctttcttttccctt

SEQ ID NO: 58641 - DNA, 20 bp, Artificial Sequence
  Description of Artificial Sequence: Synthetic oligonucleotide
  Target: SCNA; (-) strand; PAM type: YTN; PAM sequence: CTC
tttcctttctttcttttccc

SEQ ID NO: 58642 - DNA, 20 bp, Artificial Sequence
  Description of Artificial Sequence: Synthetic oligonucleotide
  Target: SCNA; (-) strand; PAM type: YTN; PAM sequence: CTC
tctttcctttctttcttttc

SEQ ID NO: 58643 - DNA, 20 bp, Artificial Sequence
  Description of Artificial Sequence: Synthetic oligonucleotide
  Target: SCNA; (-) strand; PAM type: YTN; PAM sequence: TTC
tctctttcctttctttcttt

SEQ ID NO: 58644 - DNA, 20 bp, Artificial Sequence
  Description of Artificial Sequence: Synthetic oligonucleotide
  Target: SCNA; (-) strand; PAM type: YTN; PAM sequence: TTT
ctctctttcctttctttctt

SEQ ID NO: 58645 - DNA, 20 bp, Artificial Sequence
  Description of Artificial Sequence: Synthetic oligonucleotide
  Target: SCNA; (-) strand; PAM type: YTN; PAM sequence: CTT
tctctctttcctttctttct

SEQ ID NO: 58646 - DNA, 20 bp, Artificial Sequence
  Description of Artificial Sequence: Synthetic oligonucleotide
  Target: SCNA; (-) strand; PAM type: YTN; PAM sequence: TTC
tttctctctttcctttcttt

SEQ ID NO: 58647 - DNA, 20 bp, Artificial Sequence
  Description of Artificial Sequence: Synthetic oligonucleotide
  Target: SCNA; (-) strand; PAM type: YTN; PAM sequence: CTT
ctttctctctttcctttctt

SEQ ID NO: 58648 - DNA, 20 bp, Artificial Sequence
  Description of Artificial Sequence: Synthetic oligonucleotide
  Target: SCNA; (-) strand; PAM type: YTN; PAM sequence: TTC
cttctttctctctttccttt

SEQ ID NO: 58649 - DNA, 20 bp, Artificial Sequence
  Description of Artificial Sequence: Synthetic oligonucleotide
  Target: SCNA; (-) strand; PAM type: YTN; PAM sequence: TTT
ccttctttctctctttcctt

SEQ ID NO: 58650 - DNA, 20 bp, Artificial Sequence
  Description of Artificial Sequence: Synthetic oligonucleotide
  Target: SCNA; (-) strand; PAM type: YTN; PAM sequence: CTT
tccttctttctctctttcct

SEQ ID NO: 58651 - DNA, 20 bp, Artificial Sequence
  Description of Artificial Sequence: Synthetic oligonucleotide
  Target: SCNA; (-) strand; PAM type: YTN; PAM sequence: TTC
tttccttctttctctctttc

SEQ ID NO: 58652 - DNA, 20 bp, Artificial Sequence
  Description of Artificial Sequence: Synthetic oligonucleotide
  Target: SCNA; (-) strand; PAM type: YTN; PAM sequence: TTT
ctttccttctttctctcttt

SEQ ID NO: 58653 - DNA, 20 bp, Artificial Sequence
  Description of Artificial Sequence: Synthetic oligonucleotide
  Target: SCNA; (-) strand; PAM type: YTN; PAM sequence: CTT
tctttccttctttctctctt

SEQ ID NO: 58654 - DNA, 20 bp, Artificial Sequence
  Description of Artificial Sequence: Synthetic oligonucleotide
  Target: SCNA; (-) strand; PAM type: YTN; PAM sequence: TTC
tttctttccttctttctctc

SEQ ID NO: 58655 - DNA, 20 bp, Artificial Sequence
  Description of Artificial Sequence: Synthetic oligonucleotide
  Target: SCNA; (-) strand; PAM type: YTN; PAM sequence: TTT
ctttctttccttctttctct

SEQ ID NO: 58656 - DNA, 20 bp, Artificial Sequence
  Description of Artificial Sequence: Synthetic oligonucleotide
  Target: SCNA; (-) strand; PAM type: YTN; PAM sequence: CTT
tctttctttccttctttctc

SEQ ID NO: 58657 - DNA, 20 bp, Artificial Sequence
  Description of Artificial Sequence: Synthetic oligonucleotide
  Target: SCNA; (-) strand; PAM type: YTN; PAM sequence: TTC
tttctttctttccttctttc

SEQ ID NO: 58658 - DNA, 20 bp, Artificial Sequence
  Description of Artificial Sequence: Synthetic oligonucleotide
  Target: SCNA; (-) strand; PAM type: YTN; PAM sequence: TTT
ctttctttctttccttcttt

SEQ ID NO: 58659 - DNA, 20 bp, Artificial Sequence
  Description of Artificial Sequence: Synthetic oligonucleotide
  Target: SCNA; (-) strand; PAM type: YTN; PAM sequence: TTT
tctttctttctttccttctt

SEQ ID NO: 58660 - DNA, 20 bp, Artificial Sequence
  Description of Artificial Sequence: Synthetic oligonucleotide
  Target: SCNA; (-) strand; PAM type: YTN; PAM sequence: TTT
ttctttctttctttccttct

SEQ ID NO: 58661 - DNA, 20 bp, Artificial Sequence
  Description of Artificial Sequence: Synthetic oligonucleotide
  Target: SCNA; (-) strand; PAM type: YTN; PAM sequence: CTT
tttctttctttctttccttc

SEQ ID NO: 58662 - DNA, 20 bp, Artificial Sequence
  Description of Artificial Sequence: Synthetic oligonucleotide
  Target: SCNA; (-) strand; PAM type: YTN; PAM sequence: TTC
tttttctttctttctttcct

SEQ ID NO: 58663 - DNA, 20 bp, Artificial Sequence
  Description of Artificial Sequence: Synthetic oligonucleotide
  Target: SCNA; (-) strand; PAM type: YTN; PAM sequence: TTT
ctttttctttctttctttcc

SEQ ID NO: 58664 - DNA, 20 bp, Artificial Sequence
  Description of Artificial Sequence: Synthetic oligonucleotide
  Target: SCNA; (-) strand; PAM type: YTN; PAM sequence: TTT
tctttttctttctttctttc

SEQ ID NO: 58665 - DNA, 20 bp, Artificial Sequence
  Description of Artificial Sequence: Synthetic oligonucleotide
  Target: SCNA; (-) strand; PAM type: YTN; PAM sequence: TTT
ttctttttctttctttcttt

SEQ ID NO: 58666 - DNA, 20 bp, Artificial Sequence
  Description of Artificial Sequence: Synthetic oligonucleotide
  Target: SCNA; (-) strand; PAM type: YTN; PAM sequence: CTT
tttctttttctttctttctt

SEQ ID NO: 58667 - DNA, 20 bp, Artificial Sequence
  Description of Artificial Sequence: Synthetic oligonucleotide
  Target: SCNA; (-) strand; PAM type: YTN; PAM sequence: TTC
tttttctttttctttctttc

SEQ ID NO: 58668 - DNA, 20 bp, Artificial Sequence
  Description of Artificial Sequence: Synthetic oligonucleotide
  Target: SCNA; (-) strand; PAM type: YTN; PAM sequence: TTT
ctttttctttttctttcttt

SEQ ID NO: 58669 - DNA, 20 bp, Artificial Sequence
  Description of Artificial Sequence: Synthetic oligonucleotide
  Target: SCNA; (-) strand; PAM type: YTN; PAM sequence: CTT
tctttttctttttctttctt

SEQ ID NO: 58670 - DNA, 20 bp, Artificial Sequence
  Description of Artificial Sequence: Synthetic oligonucleotide
  Target: SCNA; (-) strand; PAM type: YTN; PAM sequence: TTC
tttctttttctttttctttc

SEQ ID NO: 58671 - DNA, 20 bp, Artificial Sequence
  Description of Artificial Sequence: Synthetic oligonucleotide
  Target: SCNA; (-) strand; PAM type: YTN; PAM sequence: TTT
ctttctttttctttttcttt

SEQ ID NO: 58672 - DNA, 20 bp, Artificial Sequence
  Description of Artificial Sequence: Synthetic oligonucleotide
  Target: SCNA; (-) strand; PAM type: YTN; PAM sequence: CTT
tctttctttttctttttctt

SEQ ID NO: 58673 - DNA, 20 bp, Artificial Sequence
  Description of Artificial Sequence: Synthetic oligonucleotide
  Target: SCNA; (-) strand; PAM type: YTN; PAM sequence: TTC
tttctttctttttctttttc

SEQ ID NO: 58674 - DNA, 20 bp, Artificial Sequence
  Description of Artificial Sequence: Synthetic oligonucleotide
  Target: SCNA; (-) strand; PAM type: YTN; PAM sequence: CTT
ctttctttctttttcttttt

SEQ ID NO: 58675 - DNA, 20 bp, Artificial Sequence
  Description of Artificial Sequence: Synthetic oligonucleotide
  Target: SCNA; (-) strand; PAM type: YTN; PAM sequence: TTC
cttctttctttctttttctt

SEQ ID NO: 58676 - DNA, 20 bp, Artificial Sequence
  Description of Artificial Sequence: Synthetic oligonucleotide
  Target: SCNA; (-) strand; PAM type: YTN; PAM sequence: TTT
ccttctttctttctttttct

SEQ ID NO: 58677 - DNA, 20 bp, Artificial Sequence
  Description of Artificial Sequence: Synthetic oligonucleotide
  Target: SCNA; (-) strand; PAM type: YTN; PAM sequence: TTT
tccttctttctttctttttc

SEQ ID NO: 58678 - DNA, 20 bp, Artificial Sequence
  Description of Artificial Sequence: Synthetic oligonucleotide
  Target: SCNA; (-) strand; PAM type: YTN; PAM sequence: TTT
ttccttctttctttcttttt

SEQ ID NO: 58679 - DNA, 20 bp, Artificial Sequence
  Description of Artificial Sequence: Synthetic oligonucleotide
  Target: SCNA; (-) strand; PAM type: YTN; PAM sequence: TTT
tttccttctttctttctttt

SEQ ID NO: 58680 - DNA, 20 bp, Artificial Sequence
  Description of Artificial Sequence: Synthetic oligonucleotide
  Target: SCNA; (-) strand; PAM type: YTN; PAM sequence: TTT
ttttccttctttctttcttt

SEQ ID NO: 58681 - DNA, 20 bp, Artificial Sequence
  Description of Artificial Sequence: Synthetic oligonucleotide
  Target: SCNA; (-) strand; PAM type: YTN; PAM sequence: CTT
tttttccttctttctttctt

SEQ ID NO: 58682 - DNA, 20 bp, Artificial Sequence
  Description of Artificial Sequence: Synthetic oligonucleotide
  Target: SCNA; (-) strand; PAM type: YTN; PAM sequence: CTA
ctttttttccttctttcttt

SEQ ID NO: 58683 - DNA, 20 bp, Artificial Sequence
  Description of Artificial Sequence: Synthetic oligonucleotide
  Target: SCNA; (-) strand; PAM type: YTN; PAM sequence: CTC
cctactttttttccttcttt

SEQ ID NO: 58684 - DNA, 20 bp, Artificial Sequence
  Description of Artificial Sequence: Synthetic oligonucleotide
  Target: SCNA; (-) strand; PAM type: YTN; PAM sequence: TTC
ccagtctccctacttttttt

SEQ ID NO: 58685 - DNA, 20 bp, Artificial Sequence
  Description of Artificial Sequence: Synthetic oligonucleotide
  Target: SCNA; (-) strand; PAM type: YTN; PAM sequence: CTG
gtattcccagtctccctact

SEQ ID NO: 58686 - DNA, 20 bp, Artificial Sequence
  Description of Artificial Sequence: Synthetic oligonucleotide
  Target: SCNA; (-) strand; PAM type: YTN; PAM sequence: CTC
tggtattcccagtctcccta

SEQ ID NO: 58687 - DNA, 20 bp, Artificial Sequence
  Description of Artificial Sequence: Synthetic oligonucleotide
  Target: SCNA; (-) strand; PAM type: YTN; PAM sequence: CTC
acctctggtattcccagtct

SEQ ID NO: 58688 - DNA, 20 bp, Artificial Sequence
  Description of Artificial Sequence: Synthetic oligonucleotide
  Target: SCNA; (-) strand; PAM type: YTN; PAM sequence: TTC
tcacctctggtattcccagt

SEQ ID NO: 58689 - DNA, 20 bp, Artificial Sequence
  Description of Artificial Sequence: Synthetic oligonucleotide
  Target: SCNA; (-) strand; PAM type: YTN; PAM sequence: CTT
ctcacctctggtattcccag

SEQ ID NO: 58690 - DNA, 20 bp, Artificial Sequence
  Description of Artificial Sequence: Synthetic oligonucleotide
  Target: SCNA; (-) strand; PAM type: YTN; PAM sequence: TTC
ttctcacctctggtattccc

SEQ ID NO: 58691 - DNA, 20 bp, Artificial Sequence
  Description of Artificial Sequence: Synthetic oligonucleotide
  Target: SCNA; (-) strand; PAM type: YTN; PAM sequence: TTG
gagccattcttctcacctct

SEQ ID NO: 58692 - DNA, 20 bp, Artificial Sequence
  Description of Artificial Sequence: Synthetic oligonucleotide
  Target: SCNA; (-) strand; PAM type: YTN; PAM sequence: CTA
tataaaattggagccattct

SEQ ID NO: 58693 - DNA, 20 bp, Artificial Sequence
  Description of Artificial Sequence: Synthetic oligonucleotide
  Target: SCNA; (-) strand; PAM type: YTN; PAM sequence: CTA
atctatataaaattggagcc

SEQ ID NO: 58694 - DNA, 20 bp, Artificial Sequence
  Description of Artificial Sequence: Synthetic oligonucleotide
  Target: SCNA; (-) strand; PAM type: YTN; PAM sequence: CTG
ccctaatctatataaaattg

SEQ ID NO: 58695 - DNA, 20 bp, Artificial Sequence
  Description of Artificial Sequence: Synthetic oligonucleotide
  Target: SCNA; (-) strand; PAM type: YTN; PAM sequence: TTG
gggaggcctgccctaatcta

SEQ ID NO: 58696 - DNA, 20 bp, Artificial Sequence
  Description of Artificial Sequence: Synthetic oligonucleotide
  Target: SCNA; (-) strand; PAM type: YTN; PAM sequence: CTT
ggggaggcctgccctaatct

SEQ ID NO: 58697 - DNA, 20 bp, Artificial Sequence
  Description of Artificial Sequence: Synthetic oligonucleotide
  Target: SCNA; (-) strand; PAM type: YTN; PAM sequence: TTC
ttggggaggcctgccctaat

SEQ ID NO: 58698 - DNA, 20 bp, Artificial Sequence
  Description of Artificial Sequence: Synthetic oligonucleotide
  Target: SCNA; (-) strand; PAM type: YTN; PAM sequence: CTG
acacgttcttggggaggcct

SEQ ID NO: 58699 - DNA, 20 bp, Artificial Sequence
  Description of Artificial Sequence: Synthetic oligonucleotide
  Target: SCNA; (-) strand; PAM type: YTN; PAM sequence: TTG
ccctgacacgttcttgggga

SEQ ID NO: 58700 - DNA, 20 bp, Artificial Sequence
  Description of Artificial Sequence: Synthetic oligonucleotide
  Target: SCNA; (-) strand; PAM type: YTN; PAM sequence: CTT
gccctgacacgttcttgggg

SEQ ID NO: 58701 - DNA, 20 bp, Artificial Sequence
  Description of Artificial Sequence: Synthetic oligonucleotide
  Target: SCNA; (-) strand; PAM type: YTN; PAM sequence: TTG
aataaatcaagcataccctt

SEQ ID NO: 58702 - DNA, 20 bp, Artificial Sequence
  Description of Artificial Sequence: Synthetic oligonucleotide
  Target: SCNA; (-) strand; PAM type: YTN; PAM sequence: CTT
gaataaatcaagcataccct

SEQ ID NO: 58703 - DNA, 20 bp, Artificial Sequence
  Description of Artificial Sequence: Synthetic oligonucleotide
  Target: SCNA; (-) strand; PAM type: YTN; PAM sequence: TTC
ttgaataaatcaagcatacc

SEQ ID NO: 58704 - DNA, 20 bp, Artificial Sequence
  Description of Artificial Sequence: Synthetic oligonucleotide
  Target: SCNA; (-) strand; PAM type: YTN; PAM sequence: TTT
cttgaataaatcaagcatac

SEQ ID NO: 58705 - DNA, 20 bp, Artificial Sequence
  Description of Artificial Sequence: Synthetic oligonucleotide
  Target: SCNA; (-) strand; PAM type: YTN; PAM sequence: CTA
tttcttgaataaatcaagca

SEQ ID NO: 58706 - DNA, 20 bp, Artificial Sequence
  Description of Artificial Sequence: Synthetic oligonucleotide
  Target: SCNA; (-) strand; PAM type: YTN; PAM sequence: TTG
ctatttcttgaataaatcaa

SEQ ID NO: 58707 - DNA, 20 bp, Artificial Sequence
  Description of Artificial Sequence: Synthetic oligonucleotide
  Target: SCNA; (-) strand; PAM type: YTN; PAM sequence: CTT
gctatttcttgaataaatca

SEQ ID NO: 58708 - DNA, 20 bp, Artificial Sequence
  Description of Artificial Sequence: Synthetic oligonucleotide
  Target: SCNA; (-) strand; PAM type: YTN; PAM sequence: CTC
cttgctatttcttgaataaa

SEQ ID NO: 58709 - DNA, 20 bp, Artificial Sequence
  Description of Artificial Sequence: Synthetic oligonucleotide
  Target: SCNA; (-) strand; PAM type: YTN; PAM sequence: CTG
ccacaatgacctccttgcta

SEQ ID NO: 58710 - DNA, 20 bp, Artificial Sequence
  Description of Artificial Sequence: Synthetic oligonucleotide
  Target: SCNA; (-) strand; PAM type: YTN; PAM sequence: TTC
cctgccacaatgacctcctt

SEQ ID NO: 58711 - DNA, 20 bp, Artificial Sequence
  Description of Artificial Sequence: Synthetic oligonucleotide
  Target: SCNA; (-) strand; PAM type: YTN; PAM sequence: TTT
ccctgccacaatgacctcct

SEQ ID NO: 58712 - DNA, 20 bp, Artificial Sequence
  Description of Artificial Sequence: Synthetic oligonucleotide
  Target: SCNA; (-) strand; PAM type: YTN; PAM sequence: TTT
tccctgccacaatgacctcc

SEQ ID NO: 58713 - DNA, 20 bp, Artificial Sequence
  Description of Artificial Sequence: Synthetic oligonucleotide
  Target: SCNA; (-) strand; PAM type: YTN; PAM sequence: TTT
ttccctgccacaatgacctc

SEQ ID NO: 58714 - DNA, 20 bp, Artificial Sequence
  Description of Artificial Sequence: Synthetic oligonucleotide
  Target: SCNA; (-) strand; PAM type: YTN; PAM sequence: CTT
tttccctgccacaatgacct

SEQ ID NO: 58715 - DNA, 20 bp, Artificial Sequence
  Description of Artificial Sequence: Synthetic oligonucleotide
  Target: SCNA; (-) strand; PAM type: YTN; PAM sequence: TTG
ctttttccctgccacaatga

SEQ ID NO: 58716 - DNA, 20 bp, Artificial Sequence
  Description of Artificial Sequence: Synthetic oligonucleotide
  Target: SCNA; (-) strand; PAM type: YTN; PAM sequence: TTT
gctttttccctgccacaatg

SEQ ID NO: 58717 - DNA, 20 bp, Artificial Sequence
  Description of Artificial Sequence: Synthetic oligonucleotide
  Target: SCNA; (-) strand; PAM type: YTN; PAM sequence: TTT
tgctttttccctgccacaat

SEQ ID NO: 58718 - DNA, 20 bp, Artificial Sequence
  Description of Artificial Sequence: Synthetic oligonucleotide
  Target: SCNA; (-) strand; PAM type: YTN; PAM sequence: TTT
ttgctttttccctgccacaa

SEQ ID NO: 58719 - DNA, 20 bp, Artificial Sequence
  Description of Artificial Sequence: Synthetic oligonucleotide
  Target: SCNA; (-) strand; PAM type: YTN; PAM sequence: CTA
caacagcaaaataatttttg

SEQ ID NO: 58720 - DNA, 20 bp, Artificial Sequence
  Description of Artificial Sequence: Synthetic oligonucleotide
  Target: SCNA; (-) strand; PAM type: YTN; PAM sequence: TTC
acaaacatcaccactacaac

SEQ ID NO: 58721 - DNA, 20 bp, Artificial Sequence
  Description of Artificial Sequence: Synthetic oligonucleotide
  Target: SCNA; (-) strand; PAM type: YTN; PAM sequence: TTT
cacaaacatcaccactacaa

SEQ ID NO: 58722 - DNA, 20 bp, Artificial Sequence
  Description of Artificial Sequence: Synthetic oligonucleotide
  Target: SCNA; (-) strand; PAM type: YTN; PAM sequence: TTG
aagtttcacaaacatcacca

SEQ ID NO: 58723 - DNA, 20 bp, Artificial Sequence
  Description of Artificial Sequence: Synthetic oligonucleotide
  Target: SCNA; (-) strand; PAM type: YTN; PAM sequence: CTA
atacagtatgaggtgtcaac

SEQ ID NO: 58724 - DNA, 20 bp, Artificial Sequence
  Description of Artificial Sequence: Synthetic oligonucleotide
  Target: SCNA; (-) strand; PAM type: YTN; PAM sequence: TTA
aatatggaactaatacagta

SEQ ID NO: 58725 - DNA, 20 bp, Artificial Sequence
  Description of Artificial Sequence: Synthetic oligonucleotide
  Target: SCNA; (-) strand; PAM type: YTN; PAM sequence: TTT
aaatatggaactaatacagt

SEQ ID NO: 58726 - DNA, 20 bp, Artificial Sequence
  Description of Artificial Sequence: Synthetic oligonucleotide
  Target: SCNA; (-) strand; PAM type: YTN; PAM sequence: TTT
taaatatggaactaatacag

SEQ ID NO: 58727 - DNA, 20 bp, Artificial Sequence
  Description of Artificial Sequence: Synthetic oligonucleotide
  Target: SCNA; (-) strand; PAM type: YTN; PAM sequence: TTC
attttaaatatggaactaat

SEQ ID NO: 58728 - DNA, 20 bp, Artificial Sequence
  Description of Artificial Sequence: Synthetic oligonucleotide
  Target: SCNA; (-) strand; PAM type: YTN; PAM sequence: TTT
cattttaaatatggaactaa

SEQ ID NO: 58729 - DNA, 20 bp, Artificial Sequence
  Description of Artificial Sequence: Synthetic oligonucleotide
  Target: SCNA; (-) strand; PAM type: YTN; PAM sequence: CTT
tcattttaaatatggaacta

SEQ ID NO: 58730 - DNA, 20 bp, Artificial Sequence
  Description of Artificial Sequence: Synthetic oligonucleotide
  Target: SCNA; (-) strand; PAM type: YTN; PAM sequence: TTA
taactttcattttaaatatg

SEQ ID NO: 58731 - DNA, 20 bp, Artificial Sequence
  Description of Artificial Sequence: Synthetic oligonucleotide
  Target: SCNA; (-) strand; PAM type: YTN; PAM sequence: TTA
taccaaagatattataactt

SEQ ID NO: 58732 - DNA, 20 bp, Artificial Sequence
  Description of Artificial Sequence: Synthetic oligonucleotide
  Target: SCNA; (-) strand; PAM type: YTN; PAM sequence: TTG
acaaacatgggacacgaata

SEQ ID NO: 58733 - DNA, 20 bp, Artificial Sequence
  Description of Artificial Sequence: Synthetic oligonucleotide
  Target: SCNA; (-) strand; PAM type: YTN; PAM sequence: TTT
gacaaacatgggacacgaat

SEQ ID NO: 58734 - DNA, 20 bp, Artificial Sequence
  Description of Artificial Sequence: Synthetic oligonucleotide
  Target: SCNA; (-) strand; PAM type: YTN; PAM sequence: TTT
tgacaaacatgggacacgaa

SEQ ID NO: 58735 - DNA, 20 bp, Artificial Sequence
  Description of Artificial Sequence: Synthetic oligonucleotide
  Target: SCNA; (-) strand; PAM type: YTN; PAM sequence: TTT
ttgacaaacatgggacacga

SEQ ID NO: 58736 - DNA, 20 bp, Artificial Sequence
  Description of Artificial Sequence: Synthetic oligonucleotide
  Target: SCNA; (-) strand; PAM type: YTN; PAM sequence: TTT
tttgacaaacatgggacacg

SEQ ID NO: 58737 - DNA, 20 bp, Artificial Sequence
  Description of Artificial Sequence: Synthetic oligonucleotide
  Target: SCNA; (-) strand; PAM type: YTN; PAM sequence: TTT
ttttgacaaacatgggacac

SEQ ID NO: 58738 - DNA, 20 bp, Artificial Sequence
  Description of Artificial Sequence: Synthetic oligonucleotide
  Target: SCNA; (-) strand; PAM type: YTN; PAM sequence: CTG
aatttttttgacaaacatgg

SEQ ID NO: 58739 - DNA, 20 bp, Artificial Sequence
  Description of Artificial Sequence: Synthetic oligonucleotide
  Target: SCNA; (-) strand; PAM type: YTN; PAM sequence: TTG
actgaatttttttgacaaac

SEQ ID NO: 58740 - DNA, 20 bp, Artificial Sequence
  Description of Artificial Sequence: Synthetic oligonucleotide
  Target: SCNA; (-) strand; PAM type: YTN; PAM sequence: TTT
gactgaatttttttgacaaa

SEQ ID NO: 58741 - DNA, 20 bp, Artificial Sequence
  Description of Artificial Sequence: Synthetic oligonucleotide
  Target: SCNA; (-) strand; PAM type: YTN; PAM sequence: TTT
tgactgaatttttttgacaa

SEQ ID NO: 58742 - DNA, 20 bp, Artificial Sequence
  Description of Artificial Sequence: Synthetic oligonucleotide
  Target: SCNA; (-) strand; PAM type: YTN; PAM sequence: CTG
agaagaattttgactgaatt

SEQ ID NO: 58743 - DNA, 20 bp, Artificial Sequence
  Description of Artificial Sequence: Synthetic oligonucleotide
  Target: SCNA; (-) strand; PAM type: YTN; PAM sequence: TTC
tgagaagaattttgactgaa

SEQ ID NO: 58744 - DNA, 20 bp, Artificial Sequence
  Description of Artificial Sequence: Synthetic oligonucleotide
  Target: SCNA; (-) strand; PAM type: YTN; PAM sequence: TTA
aaattctgagaagaattttg

SEQ ID NO: 58745 - DNA, 20 bp, Artificial Sequence
  Description of Artificial Sequence: Synthetic oligonucleotide
  Target: SCNA; (-) strand; PAM type: YTN; PAM sequence: TTT
aaaattctgagaagaatttt

SEQ ID NO: 58746 - DNA, 20 bp, Artificial Sequence
  Description of Artificial Sequence: Synthetic oligonucleotide
  Target: SCNA; (-) strand; PAM type: YTN; PAM sequence: TTT
taaaattctgagaagaattt

SEQ ID NO: 58747 - DNA, 20 bp, Artificial Sequence
  Description of Artificial Sequence: Synthetic oligonucleotide
  Target: SCNA; (-) strand; PAM type: YTN; PAM sequence: TTG
aggtagattttaaaattctg

SEQ ID NO: 58748 - DNA, 20 bp, Artificial Sequence
  Description of Artificial Sequence: Synthetic oligonucleotide
  Target: SCNA; (-) strand; PAM type: YTN; PAM sequence: TTT
gaggtagattttaaaattct

SEQ ID NO: 58749 - DNA, 20 bp, Artificial Sequence
  Description of Artificial Sequence: Synthetic oligonucleotide
  Target: SCNA; (-) strand; PAM type: YTN; PAM sequence: TTT
tgaggtagattttaaaattc

SEQ ID NO: 58750 - DNA, 20 bp, Artificial Sequence
  Description of Artificial Sequence: Synthetic oligonucleotide
  Target: SCNA; (-) strand; PAM type: YTN; PAM sequence: TTA
aaatacataccaaccagaga

SEQ ID NO: 58751 - DNA, 20 bp, Artificial Sequence
  Description of Artificial Sequence: Synthetic oligonucleotide
  Target: SCNA; (-) strand; PAM type: YTN; PAM sequence: CTT
aaaatacataccaaccagag

SEQ ID NO: 58752 - DNA, 20 bp, Artificial Sequence
  Description of Artificial Sequence: Synthetic oligonucleotide
  Target: SCNA; (-) strand; PAM type: YTN; PAM sequence: TTG
tgggaaatgagagacttaaa

SEQ ID NO: 58753 - DNA, 20 bp, Artificial Sequence
  Description of Artificial Sequence: Synthetic oligonucleotide
  Target: SCNA; (-) strand; PAM type: YTN; PAM sequence: TTT
gtgggaaatgagagacttaa

SEQ ID NO: 58754 - DNA, 20 bp, Artificial Sequence
  Description of Artificial Sequence: Synthetic oligonucleotide
  Target: SCNA; (-) strand; PAM type: YTN; PAM sequence: TTG
ccaaatacatatttgtggga

SEQ ID NO: 58755 - DNA, 20 bp, Artificial Sequence
  Description of Artificial Sequence: Synthetic oligonucleotide
  Target: SCNA; (-) strand; PAM type: YTN; PAM sequence: TTC
attgccaaatacatatttgt

SEQ ID NO: 58756 - DNA, 20 bp, Artificial Sequence
  Description of Artificial Sequence: Synthetic oligonucleotide
  Target: SCNA; (-) strand; PAM type: YTN; PAM sequence: TTA
cataacagttcattgccaaa

SEQ ID NO: 58757 - DNA, 20 bp, Artificial Sequence
  Description of Artificial Sequence: Synthetic oligonucleotide
  Target: SCNA; (-) strand; PAM type: YTN; PAM sequence: CTG
catattacataacagttcat

SEQ ID NO: 58758 - DNA, 20 bp, Artificial Sequence
  Description of Artificial Sequence: Synthetic oligonucleotide
  Target: SCNA; (-) strand; PAM type: YTN; PAM sequence: TTA
aatggcatatctgcatatta

SEQ ID NO: 58759 - DNA, 20 bp, Artificial Sequence
  Description of Artificial Sequence: Synthetic oligonucleotide
  Target: SCNA; (-) strand; PAM type: YTN; PAM sequence: TTA
ttaaatggcatatctgcata

SEQ ID NO: 58760 - DNA, 20 bp, Artificial Sequence
  Description of Artificial Sequence: Synthetic oligonucleotide
  Target: SCNA; (-) strand; PAM type: YTN; PAM sequence: CTT
attaaatggcatatctgcat

SEQ ID NO: 58761 - DNA, 20 bp, Artificial Sequence
  Description of Artificial Sequence: Synthetic oligonucleotide
  Target: SCNA; (-) strand; PAM type: YTN; PAM sequence: CTC
ttattaaatggcatatctgc

SEQ ID NO: 58762 - DNA, 20 bp, Artificial Sequence
  Description of Artificial Sequence: Synthetic oligonucleotide
  Target: SCNA; (-) strand; PAM type: YTN; PAM sequence: TTA
tagtgacatcatctcttatt

SEQ ID NO: 58763 - DNA, 20 bp, Artificial Sequence
  Description of Artificial Sequence: Synthetic oligonucleotide
  Target: SCNA; (-) strand; PAM type: YTN; PAM sequence: TTT
atagtgacatcatctcttat

SEQ ID NO: 58764 - DNA, 20 bp, Artificial Sequence
  Description of Artificial Sequence: Synthetic oligonucleotide
  Target: SCNA; (-) strand; PAM type: YTN; PAM sequence: CTT
tatagtgacatcatctctta

SEQ ID NO: 58765 - DNA, 20 bp, Artificial Sequence
  Description of Artificial Sequence: Synthetic oligonucleotide
  Target: SCNA; (-) strand; PAM type: YTN; PAM sequence: TTC
tttatagtgacatcatctct

SEQ ID NO: 58766 - DNA, 20 bp, Artificial Sequence
  Description of Artificial Sequence: Synthetic oligonucleotide
  Target: SCNA; (-) strand; PAM type: YTN; PAM sequence: TTT
ctttatagtgacatcatctc

SEQ ID NO: 58767 - DNA, 20 bp, Artificial Sequence
  Description of Artificial Sequence: Synthetic oligonucleotide
  Target: SCNA; (-) strand; PAM type: YTN; PAM sequence: TTA
tttctttatagtgacatcat

SEQ ID NO: 58768 - DNA, 20 bp, Artificial Sequence
  Description of Artificial Sequence: Synthetic oligonucleotide
  Target: SCNA; (-) strand; PAM type: YTN; PAM sequence: CTT
atttctttatagtgacatca

SEQ ID NO: 58769 - DNA, 20 bp, Artificial Sequence
  Description of Artificial Sequence: Synthetic oligonucleotide
  Target: SCNA; (-) strand; PAM type: YTN; PAM sequence: TTA
cttatttctttatagtgaca

SEQ ID NO: 58770 - DNA, 20 bp, Artificial Sequence
  Description of Artificial Sequence: Synthetic oligonucleotide
  Target: SCNA; (-) strand; PAM type: YTN; PAM sequence: TTT
acttatttctttatagtgac

SEQ ID NO: 58771 - DNA, 20 bp, Artificial Sequence
  Description of Artificial Sequence: Synthetic oligonucleotide
  Target: SCNA; (-) strand; PAM type: YTN; PAM sequence: TTT
tacttatttctttatagtga

SEQ ID NO: 58772 - DNA, 20 bp, Artificial Sequence
  Description of Artificial Sequence: Synthetic oligonucleotide
  Target: SCNA; (-) strand; PAM type: YTN; PAM sequence: CTT
ttacttatttctttatagtg

SEQ ID NO: 58773 - DNA, 20 bp, Artificial Sequence
  Description of Artificial Sequence: Synthetic oligonucleotide
  Target: SCNA; (-) strand; PAM type: YTN; PAM sequence: TTC
ttttacttatttctttatag

SEQ ID NO: 58774 - DNA, 20 bp, Artificial Sequence
  Description of Artificial Sequence: Synthetic oligonucleotide
  Target: SCNA; (-) strand; PAM type: YTN; PAM sequence: TTC
caaaataaagttcttttact

SEQ ID NO: 58775 - DNA, 20 bp, Artificial Sequence
  Description of Artificial Sequence: Synthetic oligonucleotide
  Target: SCNA; (-) strand; PAM type: YTN; PAM sequence: TTT
ccaaaataaagttcttttac

SEQ ID NO: 58776 - DNA, 20 bp, Artificial Sequence
  Description of Artificial Sequence: Synthetic oligonucleotide
  Target: SCNA; (-) strand; PAM type: YTN; PAM sequence: CTA
atttccaaaataaagttctt

SEQ ID NO: 58777 - DNA, 20 bp, Artificial Sequence
  Description of Artificial Sequence: Synthetic oligonucleotide
  Target: SCNA; (-) strand; PAM type: YTN; PAM sequence: TTC
ctaatttccaaaataaagtt

SEQ ID NO: 58778 - DNA, 20 bp, Artificial Sequence
  Description of Artificial Sequence: Synthetic oligonucleotide
  Target: SCNA; (-) strand; PAM type: YTN; PAM sequence: TTT
cctaatttccaaaataaagt

SEQ ID NO: 58779 - DNA, 20 bp, Artificial Sequence
  Description of Artificial Sequence: Synthetic oligonucleotide
  Target: SCNA; (-) strand; PAM type: YTN; PAM sequence: CTA
atttcctaatttccaaaata

SEQ ID NO: 58780 - DNA, 20 bp, Artificial Sequence
  Description of Artificial Sequence: Synthetic oligonucleotide
  Target: SCNA; (-) strand; PAM type: YTN; PAM sequence: TTG
tgcctaatttcctaatttcc

SEQ ID NO: 58781 - DNA, 20 bp, Artificial Sequence
  Description of Artificial Sequence: Synthetic oligonucleotide
  Target: SCNA; (-) strand; PAM type: YTN; PAM sequence: TTT
gtgcctaatttcctaatttc

SEQ ID NO: 58782 - DNA, 20 bp, Artificial Sequence
  Description of Artificial Sequence: Synthetic oligonucleotide
  Target: SCNA; (-) strand; PAM type: YTN; PAM sequence: CTT
tgtgcctaatttcctaattt

SEQ ID NO: 58783 - DNA, 20 bp, Artificial Sequence
  Description of Artificial Sequence: Synthetic oligonucleotide
  Target: SCNA; (-) strand; PAM type: YTN; PAM sequence: TTG
gagtaacaaatccctttgtg

SEQ ID NO: 58784 - DNA, 20 bp, Artificial Sequence
  Description of Artificial Sequence: Synthetic oligonucleotide
  Target: SCNA; (-) strand; PAM type: YTN; PAM sequence: CTT
ggagtaacaaatccctttgt

SEQ ID NO: 58785 - DNA, 20 bp, Artificial Sequence
  Description of Artificial Sequence: Synthetic oligonucleotide
  Target: SCNA; (-) strand; PAM type: YTN; PAM sequence: TTC
cttggagtaacaaatccctt

SEQ ID NO: 58786 - DNA, 20 bp, Artificial Sequence
  Description of Artificial Sequence: Synthetic oligonucleotide
  Target: SCNA; (-) strand; PAM type: YTN; PAM sequence: CTT
ccttggagtaacaaatccct

SEQ ID NO: 58787 - DNA, 20 bp, Artificial Sequence
  Description of Artificial Sequence: Synthetic oligonucleotide
  Target: SCNA; (-) strand; PAM type: YTN; PAM sequence: CTC
ttccttggagtaacaaatcc

SEQ ID NO: 58788 - DNA, 20 bp, Artificial Sequence
  Description of Artificial Sequence: Synthetic oligonucleotide
  Target: SCNA; (-) strand; PAM type: YTN; PAM sequence: TTC
tcttccttggagtaacaaat

SEQ ID NO: 58789 - DNA, 20 bp, Artificial Sequence
  Description of Artificial Sequence: Synthetic oligonucleotide
  Target: SCNA; (-) strand; PAM type: YTN; PAM sequence: TTT
ctcttccttggagtaacaaa

SEQ ID NO: 58790 - DNA, 20 bp, Artificial Sequence
  Description of Artificial Sequence: Synthetic oligonucleotide
  Target: SCNA; (-) strand; PAM type: YTN; PAM sequence: TTG
gaatttctcttccttggagt

SEQ ID NO: 58791 - DNA, 20 bp, Artificial Sequence
  Description of Artificial Sequence: Synthetic oligonucleotide
  Target: SCNA; (-) strand; PAM type: YTN; PAM sequence: CTT
ggaatttctcttccttggag

SEQ ID NO: 58792 - DNA, 20 bp, Artificial Sequence
  Description of Artificial Sequence: Synthetic oligonucleotide
  Target: SCNA; (-) strand; PAM type: YTN; PAM sequence: TTG
taagtcttggaatttctctt

SEQ ID NO: 58793 - DNA, 20 bp, Artificial Sequence
  Description of Artificial Sequence: Synthetic oligonucleotide
  Target: SCNA; (-) strand; PAM type: YTN; PAM sequence: TTA
attgtaagtcttggaatttc

SEQ ID NO: 58794 - DNA, 20 bp, Artificial Sequence
  Description of Artificial Sequence: Synthetic oligonucleotide
  Target: SCNA; (-) strand; PAM type: YTN; PAM sequence: TTC
atgttaattgtaagtcttgg

SEQ ID NO: 58795 - DNA, 20 bp, Artificial Sequence
  Description of Artificial Sequence: Synthetic oligonucleotide
  Target: SCNA; (-) strand; PAM type: YTN; PAM sequence: TTT
catgttaattgtaagtcttg

SEQ ID NO: 58796 - DNA, 20 bp, Artificial Sequence
  Description of Artificial Sequence: Synthetic oligonucleotide
  Target: SCNA; (-) strand; PAM type: YTN; PAM sequence: CTT
tcatgttaattgtaagtctt

SEQ ID NO: 58797 - DNA, 20 bp, Artificial Sequence
  Description of Artificial Sequence: Synthetic oligonucleotide
  Target: SCNA; (-) strand; PAM type: YTN; PAM sequence: TTC
agaaagaatgagggctttca

SEQ ID NO: 58798 - DNA, 20 bp, Artificial Sequence
  Description of Artificial Sequence: Synthetic oligonucleotide
  Target: SCNA; (-) strand; PAM type: YTN; PAM sequence: TTT
cagaaagaatgagggctttc

SEQ ID NO: 58799 - DNA, 20 bp, Artificial Sequence
  Description of Artificial Sequence: Synthetic oligonucleotide
  Target: SCNA; (-) strand; PAM type: YTN; PAM sequence: TTA
atgaaacaaaaaatgtagta

SEQ ID NO: 58800 - DNA, 20 bp, Artificial Sequence
  Description of Artificial Sequence: Synthetic oligonucleotide
  Target: SCNA; (-) strand; PAM type: YTN; PAM sequence: CTG
gaagaaagttaatgaaacaa

SEQ ID NO: 58801 - DNA, 20 bp, Artificial Sequence
  Description of Artificial Sequence: Synthetic oligonucleotide
  Target: SCNA; (-) strand; PAM type: YTN; PAM sequence: TTC
tggaagaaagttaatgaaac

SEQ ID NO: 58802 - DNA, 20 bp, Artificial Sequence
  Description of Artificial Sequence: Synthetic oligonucleotide
  Target: SCNA; (-) strand; PAM type: YTN; PAM sequence: TTT
ctggaagaaagttaatgaaa

SEQ ID NO: 58803 - DNA, 20 bp, Artificial Sequence
  Description of Artificial Sequence: Synthetic oligonucleotide
  Target: SCNA; (-) strand; PAM type: YTN; PAM sequence: TTC
aatttctggaagaaagttaa

SEQ ID NO: 58804 - DNA, 20 bp, Artificial Sequence
  Description of Artificial Sequence: Synthetic oligonucleotide
  Target: SCNA; (-) strand; PAM type: YTN; PAM sequence: TTT
caatttctggaagaaagtta

SEQ ID NO: 58805 - DNA, 20 bp, Artificial Sequence
  Description of Artificial Sequence: Synthetic oligonucleotide
  Target: SCNA; (-) strand; PAM type: YTN; PAM sequence: TTG
tttcaatttctggaagaaag

SEQ ID NO: 58806 - DNA, 20 bp, Artificial Sequence
  Description of Artificial Sequence: Synthetic oligonucleotide
  Target: SCNA; (-) strand; PAM type: YTN; PAM sequence: TTA
tgattgtttcaatttctgga

SEQ ID NO: 58807 - DNA, 20 bp, Artificial Sequence
  Description of Artificial Sequence: Synthetic oligonucleotide
  Target: SCNA; (-) strand; PAM type: YTN; PAM sequence: TTA
ttatgattgtttcaatttct

SEQ ID NO: 58808 - DNA, 20 bp, Artificial Sequence
  Description of Artificial Sequence: Synthetic oligonucleotide
  Target: SCNA; (-) strand; PAM type: YTN; PAM sequence: TTA
taattattatgattgtttca

SEQ ID NO: 58809 - DNA, 20 bp, Artificial Sequence
  Description of Artificial Sequence: Synthetic oligonucleotide
  Target: SCNA; (-) strand; PAM type: YTN; PAM sequence: TTT
ataattattatgattgtttc

SEQ ID NO: 58810 - DNA, 20 bp, Artificial Sequence
  Description of Artificial Sequence: Synthetic oligonucleotide
  Target: SCNA; (-) strand; PAM type: YTN; PAM sequence: TTT
tataattattatgattgttt

SEQ ID NO: 58811 - DNA, 20 bp, Artificial Sequence
  Description of Artificial Sequence: Synthetic oligonucleotide
  Target: SCNA; (-) strand; PAM type: YTN; PAM sequence: TTA
acccagataaatgccatgca

SEQ ID NO: 58812 - DNA, 20 bp, Artificial Sequence
  Description of Artificial Sequence: Synthetic oligonucleotide
  Target: SCNA; (-) strand; PAM type: YTN; PAM sequence: TTC
aggcattaacccagataaat

SEQ ID NO: 58813 - DNA, 20 bp, Artificial Sequence
  Description of Artificial Sequence: Synthetic oligonucleotide
  Target: SCNA; (-) strand; PAM type: YTN; PAM sequence: TTT
caggcattaacccagataaa

SEQ ID NO: 58814 - DNA, 20 bp, Artificial Sequence
  Description of Artificial Sequence: Synthetic oligonucleotide
  Target: SCNA; (-) strand; PAM type: YTN; PAM sequence: TTG
tttcaggcattaacccagat

SEQ ID NO: 58815 - DNA, 20 bp, Artificial Sequence
  Description of Artificial Sequence: Synthetic oligonucleotide
  Target: SCNA; (-) strand; PAM type: YTN; PAM sequence: CTT
gtttcaggcattaacccaga

SEQ ID NO: 58816 - DNA, 20 bp, Artificial Sequence
  Description of Artificial Sequence: Synthetic oligonucleotide
  Target: SCNA; (-) strand; PAM type: YTN; PAM sequence: TTG
cttgtttcaggcattaaccc

SEQ ID NO: 58817 - DNA, 20 bp, Artificial Sequence
  Description of Artificial Sequence: Synthetic oligonucleotide
  Target: SCNA; (-) strand; PAM type: YTN; PAM sequence: CTT
gcttgtttcaggcattaacc

SEQ ID NO: 58818 - DNA, 20 bp, Artificial Sequence
  Description of Artificial Sequence: Synthetic oligonucleotide
  Target: SCNA; (-) strand; PAM type: YTN; PAM sequence: TTG
gtcttgcttgtttcaggcat

SEQ ID NO: 58819 - DNA, 20 bp, Artificial Sequence
  Description of Artificial Sequence: Synthetic oligonucleotide
  Target: SCNA; (-) strand; PAM type: YTN; PAM sequence: TTA
tattggtcttgcttgtttca

SEQ ID NO: 58820 - DNA, 20 bp, Artificial Sequence
  Description of Artificial Sequence: Synthetic oligonucleotide
  Target: SCNA; (-) strand; PAM type: YTN; PAM sequence: TTT
atattggtcttgcttgtttc

SEQ ID NO: 58821 - DNA, 20 bp, Artificial Sequence
  Description of Artificial Sequence: Synthetic oligonucleotide
  Target: SCNA; (-) strand; PAM type: YTN; PAM sequence: CTT
tatattggtcttgcttgttt

SEQ ID NO: 58822 - DNA, 20 bp, Artificial Sequence
  Description of Artificial Sequence: Synthetic oligonucleotide
  Target: SCNA; (-) strand; PAM type: YTN; PAM sequence: CTA
cctttatattggtcttgctt

SEQ ID NO: 58823 - DNA, 20 bp, Artificial Sequence
  Description of Artificial Sequence: Synthetic oligonucleotide
  Target: SCNA; (-) strand; PAM type: YTN; PAM sequence: TTG
tgaaaaagtgctacctttat

SEQ ID NO: 58824 - DNA, 20 bp, Artificial Sequence
  Description of Artificial Sequence: Synthetic oligonucleotide
  Target: SCNA; (-) strand; PAM type: YTN; PAM sequence: CTT
gtgaaaaagtgctaccttta

SEQ ID NO: 58825 - DNA, 20 bp, Artificial Sequence
  Description of Artificial Sequence: Synthetic oligonucleotide
  Target: SCNA; (-) strand; PAM type: YTN; PAM sequence: CTC
cccttgtgaaaaagtgctac

SEQ ID NO: 58826 - DNA, 20 bp, Artificial Sequence
  Description of Artificial Sequence: Synthetic oligonucleotide
  Target: SCNA; (-) strand; PAM type: YTN; PAM sequence: CTG
accctccccttgtgaaaaag

SEQ ID NO: 58827 - DNA, 20 bp, Artificial Sequence
  Description of Artificial Sequence: Synthetic oligonucleotide
  Target: SCNA; (-) strand; PAM type: YTN; PAM sequence: CTA
cctgaccctccccttgtgaa

SEQ ID NO: 58828 - DNA, 20 bp, Artificial Sequence
  Description of Artificial Sequence: Synthetic oligonucleotide
  Target: SCNA; (-) strand; PAM type: YTN; PAM sequence: CTG
tggggaacggctacctgacc

SEQ ID NO: 58829 - DNA, 20 bp, Artificial Sequence
  Description of Artificial Sequence: Synthetic oligonucleotide
  Target: SCNA; (-) strand; PAM type: YTN; PAM sequence: TTA
ctgtggggaacggctacctg

SEQ ID NO: 58830 - DNA, 20 bp, Artificial Sequence
  Description of Artificial Sequence: Synthetic oligonucleotide
  Target: SCNA; (-) strand; PAM type: YTN; PAM sequence: CTT
actgtggggaacggctacct

SEQ ID NO: 58831 - DNA, 20 bp, Artificial Sequence
  Description of Artificial Sequence: Synthetic oligonucleotide
  Target: SCNA; (-) strand; PAM type: YTN; PAM sequence: CTG
gaggcaggagcaagatactt

SEQ ID NO: 58832 - DNA, 20 bp, Artificial Sequence
  Description of Artificial Sequence: Synthetic oligonucleotide
  Target: SCNA; (-) strand; PAM type: YTN; PAM sequence: TTC
atgtgaggcctggaggcagg

SEQ ID NO: 58833 - DNA, 20 bp, Artificial Sequence
  Description of Artificial Sequence: Synthetic oligonucleotide
  Target: SCNA; (-) strand; PAM type: YTN; PAM sequence: TTT
catgtgaggcctggaggcag

SEQ ID NO: 58834 - DNA, 20 bp, Artificial Sequence
  Description of Artificial Sequence: Synthetic oligonucleotide
  Target: SCNA; (-) strand; PAM type: YTN; PAM sequence: TTT
tcatgtgaggcctggaggca

SEQ ID NO: 58835 - DNA, 20 bp, Artificial Sequence
  Description of Artificial Sequence: Synthetic oligonucleotide
  Target: SCNA; (-) strand; PAM type: YTN; PAM sequence: TTC
attttcatgtgaggcctgga

SEQ ID NO: 58836 - DNA, 20 bp, Artificial Sequence
  Description of Artificial Sequence: Synthetic oligonucleotide
  Target: SCNA; (-) strand; PAM type: YTN; PAM sequence: TTA
cggttcattttcatgtgagg

SEQ ID NO: 58837 - DNA, 20 bp, Artificial Sequence
  Description of Artificial Sequence: Synthetic oligonucleotide
  Target: SCNA; (-) strand; PAM type: YTN; PAM sequence: CTG
gtgagattacggttcatttt

SEQ ID NO: 58838 - DNA, 20 bp, Artificial Sequence
  Description of Artificial Sequence: Synthetic oligonucleotide
  Target: SCNA; (-) strand; PAM type: YTN; PAM sequence: TTA
taagctggtgagattacggt

SEQ ID NO: 58839 - DNA, 20 bp, Artificial Sequence
  Description of Artificial Sequence: Synthetic oligonucleotide
  Target: SCNA; (-) strand; PAM type: YTN; PAM sequence: TTT
ataagctggtgagattacgg

SEQ ID NO: 58840 - DNA, 20 bp, Artificial Sequence
  Description of Artificial Sequence: Synthetic oligonucleotide
  Target: SCNA; (-) strand; PAM type: YTN; PAM sequence: TTA
catttataagctggtgagat

SEQ ID NO: 58841 - DNA, 20 bp, Artificial Sequence
  Description of Artificial Sequence: Synthetic oligonucleotide
  Target: SCNA; (-) strand; PAM type: YTN; PAM sequence: TTG
tgttacatttataagctggt

SEQ ID NO: 58842 - DNA, 20 bp, Artificial Sequence
  Description of Artificial Sequence: Synthetic oligonucleotide
  Target: SCNA; (-) strand; PAM type: YTN; PAM sequence: TTT
gtgttacatttataagctgg

SEQ ID NO: 58843 - DNA, 20 bp, Artificial Sequence
  Description of Artificial Sequence: Synthetic oligonucleotide
  Target: SCNA; (-) strand; PAM type: YTN; PAM sequence: TTT
tgtgttacatttataagctg

SEQ ID NO: 58844 - DNA, 20 bp, Artificial Sequence
  Description of Artificial Sequence: Synthetic oligonucleotide
  Target: SCNA; (-) strand; PAM type: YTN; PAM sequence: CTG
tgtacgttttgtgttacatt

SEQ ID NO: 58845 - DNA, 20 bp, Artificial Sequence
  Description of Artificial Sequence: Synthetic oligonucleotide
  Target: SCNA; (-) strand; PAM type: YTN; PAM sequence: TTG
ggcaaggtatggctgtgtac

SEQ ID NO: 58846 - DNA, 20 bp, Artificial Sequence
  Description of Artificial Sequence: Synthetic oligonucleotide
  Target: SCNA; (-) strand; PAM type: YTN; PAM sequence: TTG
tcaaaaaggaccagttgggc

SEQ ID NO: 58847 - DNA, 20 bp, Artificial Sequence
  Description of Artificial Sequence: Synthetic oligonucleotide
  Target: SCNA; (-) strand; PAM type: YTN; PAM sequence: TTT
gtcaaaaaggaccagttggg

SEQ ID NO: 58848 - DNA, 20 bp, Artificial Sequence
  Description of Artificial Sequence: Synthetic oligonucleotide
  Target: SCNA; (-) strand; PAM type: YTN; PAM sequence: CTT
tgtcaaaaaggaccagttgg

SEQ ID NO: 58849 - DNA, 20 bp, Artificial Sequence
  Description of Artificial Sequence: Synthetic oligonucleotide
  Target: SCNA; (-) strand; PAM type: YTN; PAM sequence: CTG
gctttgtcaaaaaggaccag

SEQ ID NO: 58850 - DNA, 20 bp, Artificial Sequence
  Description of Artificial Sequence: Synthetic oligonucleotide
  Target: SCNA; (-) strand; PAM type: YTN; PAM sequence: TTG
cagcagccactggctttgtc

SEQ ID NO: 58851 - DNA, 20 bp, Artificial Sequence
  Description of Artificial Sequence: Synthetic oligonucleotide
  Target: SCNA; (-) strand; PAM type: YTN; PAM sequence: TTG
gaggagcagtggtgacgggt

SEQ ID NO: 58852 - DNA, 20 bp, Artificial Sequence
  Description of Artificial Sequence: Synthetic oligonucleotide
  Target: SCNA; (-) strand; PAM type: YTN; PAM sequence: CTG
agaagaccaaagagcaagtg

SEQ ID NO: 58853 - DNA, 20 bp, Artificial Sequence
  Description of Artificial Sequence: Synthetic oligonucleotide
  Target: SCNA; (-) strand; PAM type: YTN; PAM sequence: TTG
taccagtggctgagaagacc

SEQ ID NO: 58854 - DNA, 20 bp, Artificial Sequence
  Description of Artificial Sequence: Synthetic oligonucleotide
  Target: SCNA; (-) strand; PAM type: YTN; PAM sequence: TTT
gtaccagtggctgagaagac

SEQ ID NO: 58855 - DNA, 20 bp, Artificial Sequence
  Description of Artificial Sequence: Synthetic oligonucleotide
  Target: SCNA; (-) strand; PAM type: YTN; PAM sequence: TTA
tttgtaccagtggctgagaa

SEQ ID NO: 58856 - DNA, 20 bp, Artificial Sequence
  Description of Artificial Sequence: Synthetic oligonucleotide
  Target: SCNA; (-) strand; PAM type: YTN; PAM sequence: TTT
atttgtaccagtggctgaga

SEQ ID NO: 58857 - DNA, 20 bp, Artificial Sequence
  Description of Artificial Sequence: Synthetic oligonucleotide
  Target: SCNA; (-) strand; PAM type: YTN; PAM sequence: CTT
tatttgtaccagtggctgag

SEQ ID NO: 58858 - DNA, 20 bp, Artificial Sequence
  Description of Artificial Sequence: Synthetic oligonucleotide
  Target: SCNA; (-) strand; PAM type: YTN; PAM sequence: CTC
tttatttgtaccagtggctg

SEQ ID NO: 58859 - DNA, 20 bp, Artificial Sequence
  Description of Artificial Sequence: Synthetic oligonucleotide
  Target: SCNA; (-) strand; PAM type: YTN; PAM sequence: TTG
ctctttatttgtaccagtgg

SEQ ID NO: 58860 - DNA, 20 bp, Artificial Sequence
  Description of Artificial Sequence: Synthetic oligonucleotide
  Target: SCNA; (-) strand; PAM type: YTN; PAM sequence: TTG
ttgctctttatttgtaccag

SEQ ID NO: 58861 - DNA, 20 bp, Artificial Sequence
  Description of Artificial Sequence: Synthetic oligonucleotide
  Target: SCNA; (-) strand; PAM type: YTN; PAM sequence: CTG
ttgttgctctttatttgtac

SEQ ID NO: 58862 - DNA, 20 bp, Artificial Sequence
  Description of Artificial Sequence: Synthetic oligonucleotide
  Target: SCNA; (-) strand; PAM type: YTN; PAM sequence: TTA
atctgttgttgctctttatt

SEQ ID NO: 58863 - DNA, 20 bp, Artificial Sequence
  Description of Artificial Sequence: Synthetic oligonucleotide
  Target: SCNA; (-) strand; PAM type: YTN; PAM sequence: TTT
aatctgttgttgctctttat

SEQ ID NO: 58864 - DNA, 20 bp, Artificial Sequence
  Description of Artificial Sequence: Synthetic oligonucleotide
  Target: SCNA; (-) strand; PAM type: YTN; PAM sequence: CTT
taatctgttgttgctcttta

SEQ ID NO: 58865 - DNA, 20 bp, Artificial Sequence
  Description of Artificial Sequence: Synthetic oligonucleotide
  Target: SCNA; (-) strand; PAM type: YTN; PAM sequence: CTA
ccaccctttaatctgttgtt

SEQ ID NO: 58866 - DNA, 20 bp, Artificial Sequence
  Description of Artificial Sequence: Synthetic oligonucleotide
  Target: SCNA; (-) strand; PAM type: YTN; PAM sequence: TTC
taccaccctttaatctgttg

SEQ ID NO: 58867 - DNA, 20 bp, Artificial Sequence
  Description of Artificial Sequence: Synthetic oligonucleotide
  Target: SCNA; (-) strand; PAM type: YTN; PAM sequence: TTA
ttctaccaccctttaatctg

SEQ ID NO: 58868 - DNA, 20 bp, Artificial Sequence
  Description of Artificial Sequence: Synthetic oligonucleotide
  Target: SCNA; (-) strand; PAM type: YTN; PAM sequence: CTG
ttattctaccaccctttaat

SEQ ID NO: 58869 - DNA, 20 bp, Artificial Sequence
  Description of Artificial Sequence: Synthetic oligonucleotide
  Target: SCNA; (-) strand; PAM type: YTN; PAM sequence: TTA
agtcactgttattctaccac

SEQ ID NO: 58870 - DNA, 20 bp, Artificial Sequence
  Description of Artificial Sequence: Synthetic oligonucleotide
  Target: SCNA; (-) strand; PAM type: YTN; PAM sequence: TTT
aagtcactgttattctacca

SEQ ID NO: 58871 - DNA, 20 bp, Artificial Sequence
  Description of Artificial Sequence: Synthetic oligonucleotide
  Target: SCNA; (-) strand; PAM type: YTN; PAM sequence: TTT
taagtcactgttattctacc

SEQ ID NO: 58872 - DNA, 20 bp, Artificial Sequence
  Description of Artificial Sequence: Synthetic oligonucleotide
  Target: SCNA; (-) strand; PAM type: YTN; PAM sequence: CTA
gtggaagtggaatgatttta

SEQ ID NO: 58873 - DNA, 20 bp, Artificial Sequence
  Description of Artificial Sequence: Synthetic oligonucleotide
  Target: SCNA; (-) strand; PAM type: YTN; PAM sequence: CTA
tggcatgtgtagatacaggt

SEQ ID NO: 58874 - DNA, 20 bp, Artificial Sequence
  Description of Artificial Sequence: Synthetic oligonucleotide
  Target: SCNA; (-) strand; PAM type: YTN; PAM sequence: TTA
tctatggcatgtgtagatac

SEQ ID NO: 58875 - DNA, 20 bp, Artificial Sequence
  Description of Artificial Sequence: Synthetic oligonucleotide
  Target: SCNA; (-) strand; PAM type: YTN; PAM sequence: CTC
agttatctatggcatgtgta

SEQ ID NO: 58876 - DNA, 20 bp, Artificial Sequence
  Description of Artificial Sequence: Synthetic oligonucleotide
  Target: SCNA; (-) strand; PAM type: YTN; PAM sequence: CTG
accactcagttatctatggc

SEQ ID NO: 58877 - DNA, 20 bp, Artificial Sequence
  Description of Artificial Sequence: Synthetic oligonucleotide
  Target: SCNA; (-) strand; PAM type: YTN; PAM sequence: TTC
tgaccactcagttatctatg

SEQ ID NO: 58878 - DNA, 20 bp, Artificial Sequence
  Description of Artificial Sequence: Synthetic oligonucleotide
  Target: SCNA; (-) strand; PAM type: YTN; PAM sequence: CTT
ctgaccactcagttatctat

SEQ ID NO: 58879 - DNA, 20 bp, Artificial Sequence
  Description of Artificial Sequence: Synthetic oligonucleotide
  Target: SCNA; (-) strand; PAM type: YTN; PAM sequence: TTC
ttctgaccactcagttatct

SEQ ID NO: 58880 - DNA, 20 bp, Artificial Sequence
  Description of Artificial Sequence: Synthetic oligonucleotide
  Target: SCNA; (-) strand; PAM type: YTN; PAM sequence: TTT
cttctgaccactcagttatc

SEQ ID NO: 58881 - DNA, 20 bp, Artificial Sequence
  Description of Artificial Sequence: Synthetic oligonucleotide
  Target: SCNA; (-) strand; PAM type: YTN; PAM sequence: TTG
tttcttctgaccactcagtt

SEQ ID NO: 58882 - DNA, 20 bp, Artificial Sequence
  Description of Artificial Sequence: Synthetic oligonucleotide
  Target: SCNA; (-) strand; PAM type: YTN; PAM sequence: TTT
gtttcttctgaccactcagt

SEQ ID NO: 58883 - DNA, 20 bp, Artificial Sequence
  Description of Artificial Sequence: Synthetic oligonucleotide
  Target: SCNA; (-) strand; PAM type: YTN; PAM sequence: TTT
tgtttcttctgaccactcag

SEQ ID NO: 58884 - DNA, 20 bp, Artificial Sequence
  Description of Artificial Sequence: Synthetic oligonucleotide
  Target: SCNA; (-) strand; PAM type: YTN; PAM sequence: CTT
ttgtttcttctgaccactca

SEQ ID NO: 58885 - DNA, 20 bp, Artificial Sequence
  Description of Artificial Sequence: Synthetic oligonucleotide
  Target: SCNA; (-) strand; PAM type: YTN; PAM sequence: TTG
gtggcttttgtttcttctga

SEQ ID NO: 58886 - DNA, 20 bp, Artificial Sequence
  Description of Artificial Sequence: Synthetic oligonucleotide
  Target: SCNA; (-) strand; PAM type: YTN; PAM sequence: CTT
ggtggcttttgtttcttctg

SEQ ID NO: 58887 - DNA, 20 bp, Artificial Sequence
  Description of Artificial Sequence: Synthetic oligonucleotide
  Target: SCNA; (-) strand; PAM type: YTN; PAM sequence: TTG
gacatcttggtggcttttgt

SEQ ID NO: 58888 - DNA, 20 bp, Artificial Sequence
  Description of Artificial Sequence: Synthetic oligonucleotide
  Target: SCNA; (-) strand; PAM type: YTN; PAM sequence: CTT
ggacatcttggtggcttttg

SEQ ID NO: 58889 - DNA, 20 bp, Artificial Sequence
  Description of Artificial Sequence: Synthetic oligonucleotide
  Target: SCNA; (-) strand; PAM type: YTN; PAM sequence: CTC
acttggacatcttggtggct

SEQ ID NO: 58890 - DNA, 20 bp, Artificial Sequence
  Description of Artificial Sequence: Synthetic oligonucleotide
  Target: SCNA; (-) strand; PAM type: YTN; PAM sequence: TTG
aaccacactcacttggacat

SEQ ID NO: 58891 - DNA, 20 bp, Artificial Sequence
  Description of Artificial Sequence: Synthetic oligonucleotide
  Target: SCNA; (-) strand; PAM type: YTN; PAM sequence: TTG
gttgaaccacactcacttgg

SEQ ID NO: 58892 - DNA, 20 bp, Artificial Sequence
  Description of Artificial Sequence: Synthetic oligonucleotide
  Target: SCNA; (-) strand; PAM type: YTN; PAM sequence: TTT
ggttgaaccacactcacttg

SEQ ID NO: 58893 - DNA, 20 bp, Artificial Sequence
  Description of Artificial Sequence: Synthetic oligonucleotide
  Target: SCNA; (-) strand; PAM type: YTN; PAM sequence: TTC
aatgtttggttgaaccacac

SEQ ID NO: 58894 - DNA, 20 bp, Artificial Sequence
  Description of Artificial Sequence: Synthetic oligonucleotide
  Target: SCNA; (-) strand; PAM type: YTN; PAM sequence: TTA
gccaagattcaatgtttggt

SEQ ID NO: 58895 - DNA, 20 bp, Artificial Sequence
  Description of Artificial Sequence: Synthetic oligonucleotide
  Target: SCNA; (-) strand; PAM type: YTN; PAM sequence: CTT
agccaagattcaatgtttgg

SEQ ID NO: 58896 - DNA, 20 bp, Artificial Sequence
  Description of Artificial Sequence: Synthetic oligonucleotide
  Target: SCNA; (-) strand; PAM type: YTN; PAM sequence: TTA
gccaaaatatcttagccaag

SEQ ID NO: 58897 - DNA, 20 bp, Artificial Sequence
  Description of Artificial Sequence: Synthetic oligonucleotide
  Target: SCNA; (-) strand; PAM type: YTN; PAM sequence: TTT
agccaaaatatcttagccaa

SEQ ID NO: 58898 - DNA, 20 bp, Artificial Sequence
  Description of Artificial Sequence: Synthetic oligonucleotide
  Target: SCNA; (-) strand; PAM type: YTN; PAM sequence: CTT
tagccaaaatatcttagcca

SEQ ID NO: 58899 - DNA, 20 bp, Artificial Sequence
  Description of Artificial Sequence: Synthetic oligonucleotide
  Target: SCNA; (-) strand; PAM type: YTN; PAM sequence: CTG
catgactttagccaaaatat

SEQ ID NO: 58900 - DNA, 20 bp, Artificial Sequence
  Description of Artificial Sequence: Synthetic oligonucleotide
  Target: SCNA; (-) strand; PAM type: YTN; PAM sequence: TTA
atactgcatgactttagcca

SEQ ID NO: 58901 - DNA, 20 bp, Artificial Sequence
  Description of Artificial Sequence: Synthetic oligonucleotide
  Target: SCNA; (-) strand; PAM type: YTN; PAM sequence: TTT
aatactgcatgactttagcc

SEQ ID NO: 58902 - DNA, 20 bp, Artificial Sequence
  Description of Artificial Sequence: Synthetic oligonucleotide
  Target: SCNA; (-) strand; PAM type: YTN; PAM sequence: TTT
taatactgcatgactttagc

SEQ ID NO: 58903 - DNA, 20 bp, Artificial Sequence
  Description of Artificial Sequence: Synthetic oligonucleotide
  Target: SCNA; (-) strand; PAM type: YTN; PAM sequence: TTT
ttaatactgcatgactttag

SEQ ID NO: 58904 - DNA, 20 bp, Artificial Sequence
  Description of Artificial Sequence: Synthetic oligonucleotide
  Target: SCNA; (-) strand; PAM type: YTN; PAM sequence: CTT
tttaatactgcatgacttta

SEQ ID NO: 58905 - DNA, 20 bp, Artificial Sequence
  Description of Artificial Sequence: Synthetic oligonucleotide
  Target: SCNA; (-) strand; PAM type: YTN; PAM sequence: TTG
aagcactttttaatactgca

SEQ ID NO: 58906 - DNA, 20 bp, Artificial Sequence
  Description of Artificial Sequence: Synthetic oligonucleotide
  Target: SCNA; (-) strand; PAM type: YTN; PAM sequence: CTT
gaagcactttttaatactgc

SEQ ID NO: 58907 - DNA, 20 bp, Artificial Sequence
  Description of Artificial Sequence: Synthetic oligonucleotide
  Target: SCNA; (-) strand; PAM type: YTN; PAM sequence: TTA
aacttgaagcactttttaat

SEQ ID NO: 58908 - DNA, 20 bp, Artificial Sequence
  Description of Artificial Sequence: Synthetic oligonucleotide
  Target: SCNA; (-) strand; PAM type: YTN; PAM sequence: CTG
atcgttaaacttgaagcact

SEQ ID NO: 58909 - DNA, 20 bp, Artificial Sequence
  Description of Artificial Sequence: Synthetic oligonucleotide
  Target: SCNA; (-) strand; PAM type: YTN; PAM sequence: TTC
ctgatcgttaaacttgaagc

SEQ ID NO: 58910 - DNA, 20 bp, Artificial Sequence
  Description of Artificial Sequence: Synthetic oligonucleotide
  Target: SCNA; (-) strand; PAM type: YTN; PAM sequence: TTA
cattcctgatcgttaaactt

SEQ ID NO: 58911 - DNA, 20 bp, Artificial Sequence
  Description of Artificial Sequence: Synthetic oligonucleotide
  Target: SCNA; (-) strand; PAM type: YTN; PAM sequence: TTT
acattcctgatcgttaaact

SEQ ID NO: 58912 - DNA, 20 bp, Artificial Sequence
  Description of Artificial Sequence: Synthetic oligonucleotide
  Target: SCNA; (-) strand; PAM type: YTN; PAM sequence: CTT
tacattcctgatcgttaaac

SEQ ID NO: 58913 - DNA, 20 bp, Artificial Sequence
  Description of Artificial Sequence: Synthetic oligonucleotide
  Target: SCNA; (-) strand; PAM type: YTN; PAM sequence: CTC
atggctttacattcctgatc

SEQ ID NO: 58914 - DNA, 20 bp, Artificial Sequence
  Description of Artificial Sequence: Synthetic oligonucleotide
  Target: SCNA; (-) strand; PAM type: YTN; PAM sequence: TTC
catagtataaaccaaatcca

SEQ ID NO: 58915 - DNA, 20 bp, Artificial Sequence
  Description of Artificial Sequence: Synthetic oligonucleotide
  Target: SCNA; (-) strand; PAM type: YTN; PAM sequence: TTT
ccatagtataaaccaaatcc

SEQ ID NO: 58916 - DNA, 20 bp, Artificial Sequence
  Description of Artificial Sequence: Synthetic oligonucleotide
  Target: SCNA; (-) strand; PAM type: YTN; PAM sequence: CTT
tccatagtataaaccaaatc

SEQ ID NO: 58917 - DNA, 20 bp, Artificial Sequence
  Description of Artificial Sequence: Synthetic oligonucleotide
  Target: SCNA; (-) strand; PAM type: YTN; PAM sequence: CTG
taaactttccatagtataaa

SEQ ID NO: 58918 - DNA, 20 bp, Artificial Sequence
  Description of Artificial Sequence: Synthetic oligonucleotide
  Target: SCNA; (-) strand; PAM type: YTN; PAM sequence: TTC
tgtaaactttccatagtata

SEQ ID NO: 58919 - DNA, 20 bp, Artificial Sequence
  Description of Artificial Sequence: Synthetic oligonucleotide
  Target: SCNA; (-) strand; PAM type: YTN; PAM sequence: TTT
ctgtaaactttccatagtat

SEQ ID NO: 58920 - DNA, 20 bp, Artificial Sequence
  Description of Artificial Sequence: Synthetic oligonucleotide
  Target: SCNA; (-) strand; PAM type: YTN; PAM sequence: CTT
tctgtaaactttccatagta

SEQ ID NO: 58921 - DNA, 20 bp, Artificial Sequence
  Description of Artificial Sequence: Synthetic oligonucleotide
  Target: SCNA; (-) strand; PAM type: YTN; PAM sequence: TTG
ctttctgtaaactttccata

SEQ ID NO: 58922 - DNA, 20 bp, Artificial Sequence
  Description of Artificial Sequence: Synthetic oligonucleotide
  Target: SCNA; (-) strand; PAM type: YTN; PAM sequence: CTG
taagaattgctttctgtaaa

SEQ ID NO: 58923 - DNA, 20 bp, Artificial Sequence
  Description of Artificial Sequence: Synthetic oligonucleotide
  Target: SCNA; (-) strand; PAM type: YTN; PAM sequence: CTG
cacctgtaagaattgctttc

SEQ ID NO: 58924 - DNA, 20 bp, Artificial Sequence
  Description of Artificial Sequence: Synthetic oligonucleotide
  Target: SCNA; (-) strand; PAM type: YTN; PAM sequence: TTC
aaatataactgcacctgtaa

SEQ ID NO: 58925 - DNA, 20 bp, Artificial Sequence
  Description of Artificial Sequence: Synthetic oligonucleotide
  Target: SCNA; (-) strand; PAM type: YTN; PAM sequence: CTG
gttcaaatataactgcacct

SEQ ID NO: 58926 - DNA, 20 bp, Artificial Sequence
  Description of Artificial Sequence: Synthetic oligonucleotide
  Target: SCNA; (-) strand; PAM type: YTN; PAM sequence: CTG
agtctggttcaaatataact

SEQ ID NO: 58927 - DNA, 20 bp, Artificial Sequence
  Description of Artificial Sequence: Synthetic oligonucleotide
  Target: SCNA; (-) strand; PAM type: YTN; PAM sequence: TTC
atgctgagtctggttcaaat

SEQ ID NO: 58928 - DNA, 20 bp, Artificial Sequence
  Description of Artificial Sequence: Synthetic oligonucleotide
  Target: SCNA; (-) strand; PAM type: YTN; PAM sequence: TTG
aaataaagaaatattcatgc

SEQ ID NO: 58929 - DNA, 20 bp, Artificial Sequence
  Description of Artificial Sequence: Synthetic oligonucleotide
  Target: SCNA; (-) strand; PAM type: YTN; PAM sequence: CTG
aattgaaataaagaaatatt

SEQ ID NO: 58930 - DNA, 20 bp, Artificial Sequence
  Description of Artificial Sequence: Synthetic oligonucleotide
  Target: SCNA; (-) strand; PAM type: YTN; PAM sequence: TTG
gcactgaattgaaataaaga

SEQ ID NO: 58931 - DNA, 20 bp, Artificial Sequence
  Description of Artificial Sequence: Synthetic oligonucleotide
  Target: SCNA; (-) strand; PAM type: YTN; PAM sequence: CTG
agtgagatcaaaggattggc

SEQ ID NO: 58932 - DNA, 20 bp, Artificial Sequence
  Description of Artificial Sequence: Synthetic oligonucleotide
  Target: SCNA; (-) strand; PAM type: YTN; PAM sequence: TTG
ctgagtgagatcaaaggatt

SEQ ID NO: 58933 - DNA, 20 bp, Artificial Sequence
  Description of Artificial Sequence: Synthetic oligonucleotide
  Target: SCNA; (-) strand; PAM type: YTN; PAM sequence: CTT
gctgagtgagatcaaaggat

SEQ ID NO: 58934 - DNA, 20 bp, Artificial Sequence
  Description of Artificial Sequence: Synthetic oligonucleotide
  Target: SCNA; (-) strand; PAM type: YTN; PAM sequence: TTA
acttgctgagtgagatcaaa

SEQ ID NO: 58935 - DNA, 20 bp, Artificial Sequence
  Description of Artificial Sequence: Synthetic oligonucleotide
  Target: SCNA; (-) strand; PAM type: YTN; PAM sequence: TTA
gaaggtgtggtggaaattaa

SEQ ID NO: 58936 - DNA, 20 bp, Artificial Sequence
  Description of Artificial Sequence: Synthetic oligonucleotide
  Target: SCNA; (-) strand; PAM type: YTN; PAM sequence: CTT
agaaggtgtggtggaaatta

SEQ ID NO: 58937 - DNA, 20 bp, Artificial Sequence
  Description of Artificial Sequence: Synthetic oligonucleotide
  Target: SCNA; (-) strand; PAM type: YTN; PAM sequence: TTG
cttagaaggtgtggtggaaa

SEQ ID NO: 58938 - DNA, 20 bp, Artificial Sequence
  Description of Artificial Sequence: Synthetic oligonucleotide
  Target: SCNA; (-) strand; PAM type: YTN; PAM sequence: TTG
tgttgcttagaaggtgtggt

SEQ ID NO: 58939 - DNA, 20 bp, Artificial Sequence
  Description of Artificial Sequence: Synthetic oligonucleotide
  Target: SCNA; (-) strand; PAM type: YTN; PAM sequence: CTC
aaataaataaataaatagaa

SEQ ID NO: 58940 - DNA, 20 bp, Artificial Sequence
  Description of Artificial Sequence: Synthetic oligonucleotide
  Target: SCNA; (-) strand; PAM type: YTN; PAM sequence: CTC
catctcaaataaataaataa

SEQ ID NO: 58941 - DNA, 20 bp, Artificial Sequence
  Description of Artificial Sequence: Synthetic oligonucleotide
  Target: SCNA; (-) strand; PAM type: YTN; PAM sequence: CTG
aacaacaagaatgaaactcc

SEQ ID NO: 58942 - DNA, 20 bp, Artificial Sequence
  Description of Artificial Sequence: Synthetic oligonucleotide
  Target: SCNA; (-) strand; PAM type: YTN; PAM sequence: TTC
cagcctgaacaacaagaatg

SEQ ID NO: 58943 - DNA, 20 bp, Artificial Sequence
  Description of Artificial Sequence: Synthetic oligonucleotide
  Target: SCNA; (-) strand; PAM type: YTN; PAM sequence: TTG
cattccagcctgaacaacaa

SEQ ID NO: 58944 - DNA, 20 bp, Artificial Sequence
  Description of Artificial Sequence: Synthetic oligonucleotide
  Target: SCNA; (-) strand; PAM type: YTN; PAM sequence: TTG
tgccattgcattccagcctg

SEQ ID NO: 58945 - DNA, 20 bp, Artificial Sequence
  Description of Artificial Sequence: Synthetic oligonucleotide
  Target: SCNA; (-) strand; PAM type: YTN; PAM sequence: CTG
agattgtgccattgcattcc

SEQ ID NO: 58946 - DNA, 20 bp, Artificial Sequence
  Description of Artificial Sequence: Synthetic oligonucleotide
  Target: SCNA; (-) strand; PAM type: YTN; PAM sequence: CTG
tgagctgagattgtgccatt

SEQ ID NO: 58947 - DNA, 20 bp, Artificial Sequence
  Description of Artificial Sequence: Synthetic oligonucleotide
  Target: SCNA; (-) strand; PAM type: YTN; PAM sequence: TTG
ctgtgagctgagattgtgcc

SEQ ID NO: 58948 - DNA, 20 bp, Artificial Sequence
  Description of Artificial Sequence: Synthetic oligonucleotide
  Target: SCNA; (-) strand; PAM type: YTN; PAM sequence: CTC
aggaggcggaggttgctgtg

SEQ ID NO: 58949 - DNA, 20 bp, Artificial Sequence
  Description of Artificial Sequence: Synthetic oligonucleotide
  Target: SCNA; (-) strand; PAM type: YTN; PAM sequence: TTG
aactcaggaggcggaggttg

SEQ ID NO: 58950 - DNA, 20 bp, Artificial Sequence
  Description of Artificial Sequence: Synthetic oligonucleotide
  Target: SCNA; (-) strand; PAM type: YTN; PAM sequence: CTT
gaactcaggaggcggaggtt

SEQ ID NO: 58951 - DNA, 20 bp, Artificial Sequence
  Description of Artificial Sequence: Synthetic oligonucleotide
  Target: SCNA; (-) strand; PAM type: YTN; PAM sequence: CTG
aggcaggagaatagcttgaa

SEQ ID NO: 58952 - DNA, 20 bp, Artificial Sequence
  Description of Artificial Sequence: Synthetic oligonucleotide
  Target: SCNA; (-) strand; PAM type: YTN; PAM sequence: CTC
gggagactgaggcaggagaa

SEQ ID NO: 58953 - DNA, 20 bp, Artificial Sequence
  Description of Artificial Sequence: Synthetic oligonucleotide
  Target: SCNA; (-) strand; PAM type: YTN; PAM sequence: CTA
ctcgggagactgaggcagga

SEQ ID NO: 58954 - DNA, 20 bp, Artificial Sequence
  Description of Artificial Sequence: Synthetic oligonucleotide
  Target: SCNA; (-) strand; PAM type: YTN; PAM sequence: CTG
taatcccagctactcgggag

SEQ ID NO: 58955 - DNA, 20 bp, Artificial Sequence
  Description of Artificial Sequence: Synthetic oligonucleotide
  Target: SCNA; (-) strand; PAM type: YTN; PAM sequence: TTG
tgggcacctgtaatcccagc

SEQ ID NO: 58956 - DNA, 20 bp, Artificial Sequence
  Description of Artificial Sequence: Synthetic oligonucleotide
  Target: SCNA; (-) strand; PAM type: YTN; PAM sequence: TTA
gccaggtgtggttgtgggca

SEQ ID NO: 58957 - DNA, 20 bp, Artificial Sequence
  Description of Artificial Sequence: Synthetic oligonucleotide
  Target: SCNA; (-) strand; PAM type: YTN; PAM sequence: CTA
aaaatacaaataataataat

SEQ ID NO: 58958 - DNA, 20 bp, Artificial Sequence
  Description of Artificial Sequence: Synthetic oligonucleotide
  Target: SCNA; (-) strand; PAM type: YTN; PAM sequence: CTA
ctaaaaatacaaataataat

SEQ ID NO: 58959 - DNA, 20 bp, Artificial Sequence
  Description of Artificial Sequence: Synthetic oligonucleotide
  Target: SCNA; (-) strand; PAM type: YTN; PAM sequence: TTC
tactaaaaatacaaataata

SEQ ID NO: 58960 - DNA, 20 bp, Artificial Sequence
  Description of Artificial Sequence: Synthetic oligonucleotide
  Target: SCNA; (-) strand; PAM type: YTN; PAM sequence: TTT
ctactaaaaatacaaataat

SEQ ID NO: 58961 - DNA, 20 bp, Artificial Sequence
  Description of Artificial Sequence: Synthetic oligonucleotide
  Target: SCNA; (-) strand; PAM type: YTN; PAM sequence: CTG
tttctactaaaaatacaaat

SEQ ID NO: 58962 - DNA, 20 bp, Artificial Sequence
  Description of Artificial Sequence: Synthetic oligonucleotide
  Target: SCNA; (-) strand; PAM type: YTN; PAM sequence: CTG
gccaacatgatgaaaccctg

SEQ ID NO: 58963 - DNA, 20 bp, Artificial Sequence
  Description of Artificial Sequence: Synthetic oligonucleotide
  Target: SCNA; (-) strand; PAM type: YTN; PAM sequence: TTC
gagaccggcctggccaacat

SEQ ID NO: 58964 - DNA, 20 bp, Artificial Sequence
  Description of Artificial Sequence: Synthetic oligonucleotide
  Target: SCNA; (-) strand; PAM type: YTN; PAM sequence: TTA
ggagttcgagaccggcctgg

SEQ ID NO: 58965 - DNA, 20 bp, Artificial Sequence
  Description of Artificial Sequence: Synthetic oligonucleotide
  Target: SCNA; (-) strand; PAM type: YTN; PAM sequence: CTG
aggttaggagttcgagaccg

SEQ ID NO: 58966 - DNA, 20 bp, Artificial Sequence
  Description of Artificial Sequence: Synthetic oligonucleotide
  Target: SCNA; (-) strand; PAM type: YTN; PAM sequence: CTA
aggcgggtggatcacctgag

SEQ ID NO: 58967 - DNA, 20 bp, Artificial Sequence
  Description of Artificial Sequence: Synthetic oligonucleotide
  Target: SCNA; (-) strand; PAM type: YTN; PAM sequence: TTG
ggaggctaaggcgggtggat

SEQ ID NO: 58968 - DNA, 20 bp, Artificial Sequence
  Description of Artificial Sequence: Synthetic oligonucleotide
  Target: SCNA; (-) strand; PAM type: YTN; PAM sequence: TTT
gggaggctaaggcgggtgga

SEQ ID NO: 58969 - DNA, 20 bp, Artificial Sequence
  Description of Artificial Sequence: Synthetic oligonucleotide
  Target: SCNA; (-) strand; PAM type: YTN; PAM sequence: CTT
tgggaggctaaggcgggtgg

SEQ ID NO: 58970 - DNA, 20 bp, Artificial Sequence
  Description of Artificial Sequence: Synthetic oligonucleotide
  Target: SCNA; (-) strand; PAM type: YTN; PAM sequence: CTA
gcactttgggaggctaaggc

SEQ ID NO: 58971 - DNA, 20 bp, Artificial Sequence
  Description of Artificial Sequence: Synthetic oligonucleotide
  Target: SCNA; (-) strand; PAM type: YTN; PAM sequence: CTA
taatcctagcactttgggag

SEQ ID NO: 58972 - DNA, 20 bp, Artificial Sequence
  Description of Artificial Sequence: Synthetic oligonucleotide
  Target: SCNA; (-) strand; PAM type: YTN; PAM sequence: CTG
ggtgcggtggatcatgccta

SEQ ID NO: 58973 - DNA, 20 bp, Artificial Sequence
  Description of Artificial Sequence: Synthetic oligonucleotide
  Target: SCNA; (-) strand; PAM type: YTN; PAM sequence: CTG
aacacgtagataataagtag

SEQ ID NO: 58974 - DNA, 20 bp, Artificial Sequence
  Description of Artificial Sequence: Synthetic oligonucleotide
  Target: SCNA; (-) strand; PAM type: YTN; PAM sequence: TTC
gtacatatgtgataatacca

SEQ ID NO: 58975 - DNA, 20 bp, Artificial Sequence
  Description of Artificial Sequence: Synthetic oligonucleotide
  Target: SCNA; (-) strand; PAM type: YTN; PAM sequence: TTA
ttcgtacatatgtgataata

SEQ ID NO: 58976 - DNA, 20 bp, Artificial Sequence
  Description of Artificial Sequence: Synthetic oligonucleotide
  Target: SCNA; (-) strand; PAM type: YTN; PAM sequence: CTG
ttattcgtacatatgtgata

SEQ ID NO: 58977 - DNA, 20 bp, Artificial Sequence
  Description of Artificial Sequence: Synthetic oligonucleotide
  Target: SCNA; (-) strand; PAM type: YTN; PAM sequence: TTA
tgctgttattcgtacatatg

SEQ ID NO: 58978 - DNA, 20 bp, Artificial Sequence
  Description of Artificial Sequence: Synthetic oligonucleotide
  Target: SCNA; (-) strand; PAM type: YTN; PAM sequence: CTT
atgctgttattcgtacatat

SEQ ID NO: 58979 - DNA, 20 bp, Artificial Sequence
  Description of Artificial Sequence: Synthetic oligonucleotide
  Target: SCNA; (-) strand; PAM type: YTN; PAM sequence: TTC
ttatgctgttattcgtacat

SEQ ID NO: 58980 - DNA, 20 bp, Artificial Sequence
  Description of Artificial Sequence: Synthetic oligonucleotide
  Target: SCNA; (-) strand; PAM type: YTN; PAM sequence: TTT
cttatgctgttattcgtaca

SEQ ID NO: 58981 - DNA, 20 bp, Artificial Sequence
  Description of Artificial Sequence: Synthetic oligonucleotide
  Target: SCNA; (-) strand; PAM type: YTN; PAM sequence: TTC
acaaccgtttcttatgctgt

SEQ ID NO: 58982 - DNA, 20 bp, Artificial Sequence
  Description of Artificial Sequence: Synthetic oligonucleotide
  Target: SCNA; (-) strand; PAM type: YTN; PAM sequence: CTT
cacaaccgtttcttatgctg

SEQ ID NO: 58983 - DNA, 20 bp, Artificial Sequence
  Description of Artificial Sequence: Synthetic oligonucleotide
  Target: SCNA; (-) strand; PAM type: YTN; PAM sequence: TTC
cttcacaaccgtttcttatg

SEQ ID NO: 58984 - DNA, 20 bp, Artificial Sequence
  Description of Artificial Sequence: Synthetic oligonucleotide
  Target: SCNA; (-) strand; PAM type: YTN; PAM sequence: CTA
taaaaagatccaagttcctt

SEQ ID NO: 58985 - DNA, 20 bp, Artificial Sequence
  Description of Artificial Sequence: Synthetic oligonucleotide
  Target: SCNA; (-) strand; PAM type: YTN; PAM sequence: TTC
tataaaaagatccaagttcc

SEQ ID NO: 58986 - DNA, 20 bp, Artificial Sequence
  Description of Artificial Sequence: Synthetic oligonucleotide
  Target: SCNA; (-) strand; PAM type: YTN; PAM sequence: CTG
aagttctataaaaagatcca

SEQ ID NO: 58987 - DNA, 20 bp, Artificial Sequence
  Description of Artificial Sequence: Synthetic oligonucleotide
  Target: SCNA; (-) strand; PAM type: YTN; PAM sequence: CTA
cctgaagttctataaaaaga

SEQ ID NO: 58988 - DNA, 20 bp, Artificial Sequence
  Description of Artificial Sequence: Synthetic oligonucleotide
  Target: SCNA; (-) strand; PAM type: YTN; PAM sequence: TTC
actacctgaagttctataaa

SEQ ID NO: 58989 - DNA, 20 bp, Artificial Sequence
  Description of Artificial Sequence: Synthetic oligonucleotide
  Target: SCNA; (-) strand; PAM type: YTN; PAM sequence: TTT
cactacctgaagttctataa

SEQ ID NO: 58990 - DNA, 20 bp, Artificial Sequence
  Description of Artificial Sequence: Synthetic oligonucleotide
  Target: SCNA; (-) strand; PAM type: YTN; PAM sequence: TTG
tttcactacctgaagttcta

SEQ ID NO: 58991 - DNA, 20 bp, Artificial Sequence
  Description of Artificial Sequence: Synthetic oligonucleotide
  Target: SCNA; (-) strand; PAM type: YTN; PAM sequence: TTT
gtttcactacctgaagttct

SEQ ID NO: 58992 - DNA, 20 bp, Artificial Sequence
  Description of Artificial Sequence: Synthetic oligonucleotide
  Target: SCNA; (-) strand; PAM type: YTN; PAM sequence: CTT
tgtttcactacctgaagttc

SEQ ID NO: 58993 - DNA, 20 bp, Artificial Sequence
  Description of Artificial Sequence: Synthetic oligonucleotide
  Target: SCNA; (-) strand; PAM type: YTN; PAM sequence: TTA
agaaccctttgtttcactac

SEQ ID NO: 58994 - DNA, 20 bp, Artificial Sequence
  Description of Artificial Sequence: Synthetic oligonucleotide
  Target: SCNA; (-) strand; PAM type: YTN; PAM sequence: TTT
aagaaccctttgtttcacta

SEQ ID NO: 58995 - DNA, 20 bp, Artificial Sequence
  Description of Artificial Sequence: Synthetic oligonucleotide
  Target: SCNA; (-) strand; PAM type: YTN; PAM sequence: TTT
taagaaccctttgtttcact

SEQ ID NO: 58996 - DNA, 20 bp, Artificial Sequence
  Description of Artificial Sequence: Synthetic oligonucleotide
  Target: SCNA; (-) strand; PAM type: YTN; PAM sequence: TTT
ttaagaaccctttgtttcac

SEQ ID NO: 58997 - DNA, 20 bp, Artificial Sequence
  Description of Artificial Sequence: Synthetic oligonucleotide
  Target: SCNA; (-) strand; PAM type: YTN; PAM sequence: CTT
tttaagaaccctttgtttca

SEQ ID NO: 58998 - DNA, 20 bp, Artificial Sequence
  Description of Artificial Sequence: Synthetic oligonucleotide
  Target: SCNA; (-) strand; PAM type: YTN; PAM sequence: TTA
gctttttaagaaccctttgt

SEQ ID NO: 58999 - DNA, 20 bp, Artificial Sequence
  Description of Artificial Sequence: Synthetic oligonucleotide
  Target: SCNA; (-) strand; PAM type: YTN; PAM sequence: TTT
agctttttaagaaccctttg

SEQ ID NO: 59000 - DNA, 20 bp, Artificial Sequence
  Description of Artificial Sequence: Synthetic oligonucleotide
  Target: SCNA; (-) strand; PAM type: YTN; PAM sequence: CTG
caaatttagctttttaagaa

SEQ ID NO: 59001 - DNA, 20 bp, Artificial Sequence
  Description of Artificial Sequence: Synthetic oligonucleotide
  Target: SCNA; (-) strand; PAM type: YTN; PAM sequence: TTA
ctgcaaatttagctttttaa

SEQ ID NO: 59002 - DNA, 20 bp, Artificial Sequence
  Description of Artificial Sequence: Synthetic oligonucleotide
  Target: SCNA; (-) strand; PAM type: YTN; PAM sequence: TTA
aaattactgcaaatttagct

SEQ ID NO: 59003 - DNA, 20 bp, Artificial Sequence
  Description of Artificial Sequence: Synthetic oligonucleotide
  Target: SCNA; (-) strand; PAM type: YTN; PAM sequence: CTA
ttaaaattactgcaaattta

SEQ ID NO: 59004 - DNA, 20 bp, Artificial Sequence
  Description of Artificial Sequence: Synthetic oligonucleotide
  Target: SCNA; (-) strand; PAM type: YTN; PAM sequence: CTC
ctattaaaattactgcaaat

SEQ ID NO: 59005 - DNA, 20 bp, Artificial Sequence
  Description of Artificial Sequence: Synthetic oligonucleotide
  Target: SCNA; (-) strand; PAM type: YTN; PAM sequence: CTG
tgctcctattaaaattactg

SEQ ID NO: 59006 - DNA, 20 bp, Artificial Sequence
  Description of Artificial Sequence: Synthetic oligonucleotide
  Target: SCNA; (-) strand; PAM type: YTN; PAM sequence: CTC
ctgtgctcctattaaaatta

SEQ ID NO: 59007 - DNA, 20 bp, Artificial Sequence
  Description of Artificial Sequence: Synthetic oligonucleotide
  Target: SCNA; (-) strand; PAM type: YTN; PAM sequence: CTA
gctcctgtgctcctattaaa

SEQ ID NO: 59008 - DNA, 20 bp, Artificial Sequence
  Description of Artificial Sequence: Synthetic oligonucleotide
  Target: SCNA; (-) strand; PAM type: YTN; PAM sequence: CTG
tctagctcctgtgctcctat

SEQ ID NO: 59009 - DNA, 20 bp, Artificial Sequence
  Description of Artificial Sequence: Synthetic oligonucleotide
  Target: SCNA; (-) strand; PAM type: YTN; PAM sequence: TTC
atactgtctagctcctgtgc

SEQ ID NO: 59010 - DNA, 20 bp, Artificial Sequence
  Description of Artificial Sequence: Synthetic oligonucleotide
  Target: SCNA; (-) strand; PAM type: YTN; PAM sequence: TTT
catactgtctagctcctgtg

SEQ ID NO: 59011 - DNA, 20 bp, Artificial Sequence
  Description of Artificial Sequence: Synthetic oligonucleotide
  Target: SCNA; (-) strand; PAM type: YTN; PAM sequence: TTT
tcatactgtctagctcctgt

SEQ ID NO: 59012 - DNA, 20 bp, Artificial Sequence
  Description of Artificial Sequence: Synthetic oligonucleotide
  Target: SCNA; (-) strand; PAM type: YTN; PAM sequence: TTC
attttcatactgtctagctc

SEQ ID NO: 59013 - DNA, 20 bp, Artificial Sequence
  Description of Artificial Sequence: Synthetic oligonucleotide
  Target: SCNA; (-) strand; PAM type: YTN; PAM sequence: CTT
cattttcatactgtctagct

SEQ ID NO: 59014 - DNA, 20 bp, Artificial Sequence
  Description of Artificial Sequence: Synthetic oligonucleotide
  Target: SCNA; (-) strand; PAM type: YTN; PAM sequence: CTC
ttcattttcatactgtctag

SEQ ID NO: 59015 - DNA, 20 bp, Artificial Sequence
  Description of Artificial Sequence: Synthetic oligonucleotide
  Target: SCNA; (-) strand; PAM type: YTN; PAM sequence: CTC
aatagcctcttcattttcat

SEQ ID NO: 59016 - DNA, 20 bp, Artificial Sequence
  Description of Artificial Sequence: Synthetic oligonucleotide
  Target: SCNA; (-) strand; PAM type: YTN; PAM sequence: TTG
taagggtgctcaatagcctc

SEQ ID NO: 59017 - DNA, 20 bp, Artificial Sequence
  Description of Artificial Sequence: Synthetic oligonucleotide
  Target: SCNA; (-) strand; PAM type: YTN; PAM sequence: TTA
tgaaaagaaattgtaagggt

SEQ ID NO: 59018 - DNA, 20 bp, Artificial Sequence
  Description of Artificial Sequence: Synthetic oligonucleotide
  Target: SCNA; (-) strand; PAM type: YTN; PAM sequence: TTT
atgaaaagaaattgtaaggg

SEQ ID NO: 59019 - DNA, 20 bp, Artificial Sequence
  Description of Artificial Sequence: Synthetic oligonucleotide
  Target: SCNA; (-) strand; PAM type: YTN; PAM sequence: TTT
tatgaaaagaaattgtaagg

SEQ ID NO: 59020 - DNA, 20 bp, Artificial Sequence
  Description of Artificial Sequence: Synthetic oligonucleotide
  Target: SCNA; (-) strand; PAM type: YTN; PAM sequence: TTG
ttttatgaaaagaaattgta

SEQ ID NO: 59021 - DNA, 20 bp, Artificial Sequence
  Description of Artificial Sequence: Synthetic oligonucleotide
  Target: SCNA; (-) strand; PAM type: YTN; PAM sequence: TTT
gttttatgaaaagaaattgt

SEQ ID NO: 59022 - DNA, 20 bp, Artificial Sequence
  Description of Artificial Sequence: Synthetic oligonucleotide
  Target: SCNA; (-) strand; PAM type: YTN; PAM sequence: TTT
tgttttatgaaaagaaattg

SEQ ID NO: 59023 - DNA, 20 bp, Artificial Sequence
  Description of Artificial Sequence: Synthetic oligonucleotide
  Target: SCNA; (-) strand; PAM type: YTN; PAM sequence: CTC
attttgttttatgaaaagaa

SEQ ID NO: 59024 - DNA, 20 bp, Artificial Sequence
  Description of Artificial Sequence: Synthetic oligonucleotide
  Target: SCNA; (-) strand; PAM type: YTN; PAM sequence: CTG
aatgaccgtatctcattttg

SEQ ID NO: 59025 - DNA, 20 bp, Artificial Sequence
  Description of Artificial Sequence: Synthetic oligonucleotide
  Target: SCNA; (-) strand; PAM type: YTN; PAM sequence: CTA
ctgaatgaccgtatctcatt

SEQ ID NO: 59026 - DNA, 20 bp, Artificial Sequence
  Description of Artificial Sequence: Synthetic oligonucleotide
  Target: SCNA; (-) strand; PAM type: YTN; PAM sequence: TTA
ataaatctactgaatgaccg

SEQ ID NO: 59027 - DNA, 20 bp, Artificial Sequence
  Description of Artificial Sequence: Synthetic oligonucleotide
  Target: SCNA; (-) strand; PAM type: YTN; PAM sequence: TTT
aataaatctactgaatgacc

SEQ ID NO: 59028 - DNA, 20 bp, Artificial Sequence
  Description of Artificial Sequence: Synthetic oligonucleotide
  Target: SCNA; (-) strand; PAM type: YTN; PAM sequence: TTT
taataaatctactgaatgac

SEQ ID NO: 59029 - DNA, 20 bp, Artificial Sequence
  Description of Artificial Sequence: Synthetic oligonucleotide
  Target: SCNA; (-) strand; PAM type: YTN; PAM sequence: TTA
ttttaataaatctactgaat

SEQ ID NO: 59030 - DNA, 20 bp, Artificial Sequence
  Description of Artificial Sequence: Synthetic oligonucleotide
  Target: SCNA; (-) strand; PAM type: YTN; PAM sequence: CTT
attttaataaatctactgaa

SEQ ID NO: 59031 - DNA, 20 bp, Artificial Sequence
  Description of Artificial Sequence: Synthetic oligonucleotide
  Target: SCNA; (-) strand; PAM type: YTN; PAM sequence: TTA
acttattttaataaatctac

SEQ ID NO: 59032 - DNA, 20 bp, Artificial Sequence
  Description of Artificial Sequence: Synthetic oligonucleotide
  Target: SCNA; (-) strand; PAM type: YTN; PAM sequence: CTC
aaaaatgttaacttatttta

SEQ ID NO: 59033 - DNA, 20 bp, Artificial Sequence
  Description of Artificial Sequence: Synthetic oligonucleotide
  Target: SCNA; (-) strand; PAM type: YTN; PAM sequence: TTC
tcaaaaatgttaacttattt

SEQ ID NO: 59034 - DNA, 20 bp, Artificial Sequence
  Description of Artificial Sequence: Synthetic oligonucleotide
  Target: SCNA; (-) strand; PAM type: YTN; PAM sequence: CTT
ctcaaaaatgttaacttatt

SEQ ID NO: 59035 - DNA, 20 bp, Artificial Sequence
  Description of Artificial Sequence: Synthetic oligonucleotide
  Target: SCNA; (-) strand; PAM type: YTN; PAM sequence: CTG
tcttctcaaaaatgttaact

SEQ ID NO: 59036 - DNA, 20 bp, Artificial Sequence
  Description of Artificial Sequence: Synthetic oligonucleotide
  Target: SCNA; (-) strand; PAM type: YTN; PAM sequence: TTA
cactgtcttctcaaaaatgt

SEQ ID NO: 59037 - DNA, 20 bp, Artificial Sequence
  Description of Artificial Sequence: Synthetic oligonucleotide
  Target: SCNA; (-) strand; PAM type: YTN; PAM sequence: TTT
acactgtcttctcaaaaatg

SEQ ID NO: 59038 - DNA, 20 bp, Artificial Sequence
  Description of Artificial Sequence: Synthetic oligonucleotide
  Target: SCNA; (-) strand; PAM type: YTN; PAM sequence: CTA
tttacactgtcttctcaaaa

SEQ ID NO: 59039 - DNA, 20 bp, Artificial Sequence
  Description of Artificial Sequence: Synthetic oligonucleotide
  Target: SCNA; (-) strand; PAM type: YTN; PAM sequence: TTC
aaactatttacactgtcttc

SEQ ID NO: 59040 - DNA, 20 bp, Artificial Sequence
  Description of Artificial Sequence: Synthetic oligonucleotide
  Target: SCNA; (-) strand; PAM type: YTN; PAM sequence: CTC
aattcaaactatttacactg

SEQ ID NO: 59041 - DNA, 20 bp, Artificial Sequence
  Description of Artificial Sequence: Synthetic oligonucleotide
  Target: SCNA; (-) strand; PAM type: YTN; PAM sequence: TTG
taaactcaattcaaactatt

SEQ ID NO: 59042 - DNA, 20 bp, Artificial Sequence
  Description of Artificial Sequence: Synthetic oligonucleotide
  Target: SCNA; (-) strand; PAM type: YTN; PAM sequence: CTT
gtaaactcaattcaaactat

SEQ ID NO: 59043 - DNA, 20 bp, Artificial Sequence
  Description of Artificial Sequence: Synthetic oligonucleotide
  Target: SCNA; (-) strand; PAM type: YTN; PAM sequence: CTG
cttgtaaactcaattcaaac

SEQ ID NO: 59044 - DNA, 20 bp, Artificial Sequence
  Description of Artificial Sequence: Synthetic oligonucleotide
  Target: SCNA; (-) strand; PAM type: YTN; PAM sequence: TTC
tgcttgtaaactcaattcaa

SEQ ID NO: 59045 - DNA, 20 bp, Artificial Sequence
  Description of Artificial Sequence: Synthetic oligonucleotide
  Target: SCNA; (-) strand; PAM type: YTN; PAM sequence: CTT
ctgcttgtaaactcaattca

SEQ ID NO: 59046 - DNA, 20 bp, Artificial Sequence
  Description of Artificial Sequence: Synthetic oligonucleotide
  Target: SCNA; (-) strand; PAM type: YTN; PAM sequence: TTA
aacttctgcttgtaaactca

SEQ ID NO: 59047 - DNA, 20 bp, Artificial Sequence
  Description of Artificial Sequence: Synthetic oligonucleotide
  Target: SCNA; (-) strand; PAM type: YTN; PAM sequence: TTG
acatgaaattaaacttctgc

SEQ ID NO: 59048 - DNA, 20 bp, Artificial Sequence
  Description of Artificial Sequence: Synthetic oligonucleotide
  Target: SCNA; (-) strand; PAM type: YTN; PAM sequence: TTT
gacatgaaattaaacttctg

SEQ ID NO: 59049 - DNA, 20 bp, Artificial Sequence
  Description of Artificial Sequence: Synthetic oligonucleotide
  Target: SCNA; (-) strand; PAM type: YTN; PAM sequence: TTT
tgacatgaaattaaacttct

SEQ ID NO: 59050 - DNA, 20 bp, Artificial Sequence
  Description of Artificial Sequence: Synthetic oligonucleotide
  Target: SCNA; (-) strand; PAM type: YTN; PAM sequence: TTT
ttgacatgaaattaaacttc

SEQ ID NO: 59051 - DNA, 20 bp, Artificial Sequence
  Description of Artificial Sequence: Synthetic oligonucleotide
  Target: SCNA; (-) strand; PAM type: YTN; PAM sequence: CTG
aacaagaaagtttttgacat

SEQ ID NO: 59052 - DNA, 20 bp, Artificial Sequence
  Description of Artificial Sequence: Synthetic oligonucleotide
  Target: SCNA; (-) strand; PAM type: YTN; PAM sequence: TTA
actgaacaagaaagtttttg

SEQ ID NO: 59053 - DNA, 20 bp, Artificial Sequence
  Description of Artificial Sequence: Synthetic oligonucleotide
  Target: SCNA; (-) strand; PAM type: YTN; PAM sequence: TTT
aactgaacaagaaagttttt

SEQ ID NO: 59054 - DNA, 20 bp, Artificial Sequence
  Description of Artificial Sequence: Synthetic oligonucleotide
  Target: SCNA; (-) strand; PAM type: YTN; PAM sequence: TTA
tttaactgaacaagaaagtt

SEQ ID NO: 59055 - DNA, 20 bp, Artificial Sequence
  Description of Artificial Sequence: Synthetic oligonucleotide
  Target: SCNA; (-) strand; PAM type: YTN; PAM sequence: CTT
atttaactgaacaagaaagt

SEQ ID NO: 59056 - DNA, 20 bp, Artificial Sequence
  Description of Artificial Sequence: Synthetic oligonucleotide
  Target: SCNA; (-) strand; PAM type: YTN; PAM sequence: CTG
gcttatttaactgaacaaga

SEQ ID NO: 59057 - DNA, 20 bp, Artificial Sequence
  Description of Artificial Sequence: Synthetic oligonucleotide
  Target: SCNA; (-) strand; PAM type: YTN; PAM sequence: TTC
tggcttatttaactgaacaa

SEQ ID NO: 59058 - DNA, 20 bp, Artificial Sequence
  Description of Artificial Sequence: Synthetic oligonucleotide
  Target: SCNA; (-) strand; PAM type: YTN; PAM sequence: TTT
ctggcttatttaactgaaca

SEQ ID NO: 59059 - DNA, 20 bp, Artificial Sequence
  Description of Artificial Sequence: Synthetic oligonucleotide
  Target: SCNA; (-) strand; PAM type: YTN; PAM sequence: CTG
tttctggcttatttaactga

SEQ ID NO: 59060 - DNA, 20 bp, Artificial Sequence
  Description of Artificial Sequence: Synthetic oligonucleotide
  Target: SCNA; (-) strand; PAM type: YTN; PAM sequence: TTC
tgtttctggcttatttaact

SEQ ID NO: 59061 - DNA, 20 bp, Artificial Sequence
  Description of Artificial Sequence: Synthetic oligonucleotide
  Target: SCNA; (-) strand; PAM type: YTN; PAM sequence: TTT
ctgtttctggcttatttaac

SEQ ID NO: 59062 - DNA, 20 bp, Artificial Sequence
  Description of Artificial Sequence: Synthetic oligonucleotide
  Target: SCNA; (-) strand; PAM type: YTN; PAM sequence: CTT
tctgtttctggcttatttaa

SEQ ID NO: 59063 - DNA, 20 bp, Artificial Sequence
  Description of Artificial Sequence: Synthetic oligonucleotide
  Target: SCNA; (-) strand; PAM type: YTN; PAM sequence: TTG
cctttctgtttctggcttat

SEQ ID NO: 59064 - DNA, 20 bp, Artificial Sequence
  Description of Artificial Sequence: Synthetic oligonucleotide
  Target: SCNA; (-) strand; PAM type: YTN; PAM sequence: TTT
gcctttctgtttctggctta

SEQ ID NO: 59065 - DNA, 20 bp, Artificial Sequence
  Description of Artificial Sequence: Synthetic oligonucleotide
  Target: SCNA; (-) strand; PAM type: YTN; PAM sequence: TTG
tttgcctttctgtttctggc

SEQ ID NO: 59066 - DNA, 20 bp, Artificial Sequence
  Description of Artificial Sequence: Synthetic oligonucleotide
  Target: SCNA; (-) strand; PAM type: YTN; PAM sequence: TTC
cacatgagtgagatcatgtg

SEQ ID NO: 59067 - DNA, 20 bp, Artificial Sequence
  Description of Artificial Sequence: Synthetic oligonucleotide
  Target: SCNA; (-) strand; PAM type: YTN; PAM sequence: TTA
gattccacatgagtgagatc

SEQ ID NO: 59068 - DNA, 20 bp, Artificial Sequence
  Description of Artificial Sequence: Synthetic oligonucleotide
  Target: SCNA; (-) strand; PAM type: YTN; PAM sequence: TTT
agattccacatgagtgagat

SEQ ID NO: 59069 - DNA, 20 bp, Artificial Sequence
  Description of Artificial Sequence: Synthetic oligonucleotide
  Target: SCNA; (-) strand; PAM type: YTN; PAM sequence: CTT
tagattccacatgagtgaga

SEQ ID NO: 59070 - DNA, 20 bp, Artificial Sequence
  Description of Artificial Sequence: Synthetic oligonucleotide
  Target: SCNA; (-) strand; PAM type: YTN; PAM sequence: TTC
tttagattccacatgagtga

SEQ ID NO: 59071 - DNA, 20 bp, Artificial Sequence
  Description of Artificial Sequence: Synthetic oligonucleotide
  Target: SCNA; (-) strand; PAM type: YTN; PAM sequence: TTT
ctttagattccacatgagtg

SEQ ID NO: 59072 - DNA, 20 bp, Artificial Sequence
  Description of Artificial Sequence: Synthetic oligonucleotide
  Target: SCNA; (-) strand; PAM type: YTN; PAM sequence: TTT
tctttagattccacatgagt

SEQ ID NO: 59073 - DNA, 20 bp, Artificial Sequence
  Description of Artificial Sequence: Synthetic oligonucleotide
  Target: SCNA; (-) strand; PAM type: YTN; PAM sequence: TTT
ttctttagattccacatgag

SEQ ID NO: 59074 - DNA, 20 bp, Artificial Sequence
  Description of Artificial Sequence: Synthetic oligonucleotide
  Target: SCNA; (-) strand; PAM type: YTN; PAM sequence: CTT
tttctttagattccacatga

SEQ ID NO: 59075 - DNA, 20 bp, Artificial Sequence
  Description of Artificial Sequence: Synthetic oligonucleotide
  Target: SCNA; (-) strand; PAM type: YTN; PAM sequence: TTC
tttttctttagattccacat

SEQ ID NO: 59076 - DNA, 20 bp, Artificial Sequence
  Description of Artificial Sequence: Synthetic oligonucleotide
  Target: SCNA; (-) strand; PAM type: YTN; PAM sequence: TTT
ctttttctttagattccaca

SEQ ID NO: 59077 - DNA, 20 bp, Artificial Sequence
  Description of Artificial Sequence: Synthetic oligonucleotide
  Target: SCNA; (-) strand; PAM type: YTN; PAM sequence: TTT
tctttttctttagattccac

SEQ ID NO: 59078 - DNA, 20 bp, Artificial Sequence
  Description of Artificial Sequence: Synthetic oligonucleotide
  Target: SCNA; (-) strand; PAM type: YTN; PAM sequence: CTT
ttctttttctttagattcca

SEQ ID NO: 59079 - DNA, 20 bp, Artificial Sequence
  Description of Artificial Sequence: Synthetic oligonucleotide
  Target: SCNA; (-) strand; PAM type: YTN; PAM sequence: CTA
tgatatcaacttttcttttt

SEQ ID NO: 59080 - DNA, 20 bp, Artificial Sequence
  Description of Artificial Sequence: Synthetic oligonucleotide
  Target: SCNA; (-) strand; PAM type: YTN; PAM sequence: TTC
tatgatatcaacttttcttt

SEQ ID NO: 59081 - DNA, 20 bp, Artificial Sequence
  Description of Artificial Sequence: Synthetic oligonucleotide
  Target: SCNA; (-) strand; PAM type: YTN; PAM sequence: CTT
ctatgatatcaacttttctt

SEQ ID NO: 59082 - DNA, 20 bp, Artificial Sequence
  Description of Artificial Sequence: Synthetic oligonucleotide
  Target: SCNA; (-) strand; PAM type: YTN; PAM sequence: CTG
cttctatgatatcaactttt

SEQ ID NO: 59083 - DNA, 20 bp, Artificial Sequence
  Description of Artificial Sequence: Synthetic oligonucleotide
  Target: SCNA; (-) strand; PAM type: YTN; PAM sequence: CTC
tgcttctatgatatcaactt

SEQ ID NO: 59084 - DNA, 20 bp, Artificial Sequence
  Description of Artificial Sequence: Synthetic oligonucleotide
  Target: SCNA; (-) strand; PAM type: YTN; PAM sequence: CTC
tctgcttctatgatatcaac

SEQ ID NO: 59085 - DNA, 20 bp, Artificial Sequence
  Description of Artificial Sequence: Synthetic oligonucleotide
  Target: SCNA; (-) strand; PAM type: YTN; PAM sequence: CTC
ctctctgcttctatgatatc

SEQ ID NO: 59086 - DNA, 20 bp, Artificial Sequence
  Description of Artificial Sequence: Synthetic oligonucleotide
  Target: SCNA; (-) strand; PAM type: YTN; PAM sequence: TTC
tcctctctgcttctatgata

SEQ ID NO: 59087 - DNA, 20 bp, Artificial Sequence
  Description of Artificial Sequence: Synthetic oligonucleotide
  Target: SCNA; (-) strand; PAM type: YTN; PAM sequence: CTG
ttctcctctctgcttctatg

SEQ ID NO: 59088 - DNA, 20 bp, Artificial Sequence
  Description of Artificial Sequence: Synthetic oligonucleotide
  Target: SCNA; (-) strand; PAM type: YTN; PAM sequence: CTC
cactgttctcctctctgctt

SEQ ID NO: 59089 - DNA, 20 bp, Artificial Sequence
  Description of Artificial Sequence: Synthetic oligonucleotide
  Target: SCNA; (-) strand; PAM type: YTN; PAM sequence: CTC
ctccactgttctcctctctg

SEQ ID NO: 59090 - DNA, 20 bp, Artificial Sequence
  Description of Artificial Sequence: Synthetic oligonucleotide
  Target: SCNA; (-) strand; PAM type: YTN; PAM sequence: CTC
tcctccactgttctcctctc

SEQ ID NO: 59091 - DNA, 20 bp, Artificial Sequence
  Description of Artificial Sequence: Synthetic oligonucleotide
  Target: SCNA; (-) strand; PAM type: YTN; PAM sequence: CTC
cactctcctccactgttctc

SEQ ID NO: 59092 - DNA, 20 bp, Artificial Sequence
  Description of Artificial Sequence: Synthetic oligonucleotide
  Target: SCNA; (-) strand; PAM type: YTN; PAM sequence: TTA
gatgagtgtccccatcctcc

SEQ ID NO: 59093 - DNA, 20 bp, Artificial Sequence
  Description of Artificial Sequence: Synthetic oligonucleotide
  Target: SCNA; (-) strand; PAM type: YTN; PAM sequence: CTT
agatgagtgtccccatcctc

SEQ ID NO: 59094 - DNA, 20 bp, Artificial Sequence
  Description of Artificial Sequence: Synthetic oligonucleotide
  Target: SCNA; (-) strand; PAM type: YTN; PAM sequence: TTC
cttagatgagtgtccccatc

SEQ ID NO: 59095 - DNA, 20 bp, Artificial Sequence
  Description of Artificial Sequence: Synthetic oligonucleotide
  Target: SCNA; (-) strand; PAM type: YTN; PAM sequence: TTT
ccttagatgagtgtccccat

SEQ ID NO: 59096 - DNA, 20 bp, Artificial Sequence
  Description of Artificial Sequence: Synthetic oligonucleotide
  Target: SCNA; (-) strand; PAM type: YTN; PAM sequence: TTC
atttccttagatgagtgtcc

SEQ ID NO: 59097 - DNA, 20 bp, Artificial Sequence
  Description of Artificial Sequence: Synthetic oligonucleotide
  Target: SCNA; (-) strand; PAM type: YTN; PAM sequence: CTT
catttccttagatgagtgtc

SEQ ID NO: 59098 - DNA, 20 bp, Artificial Sequence
  Description of Artificial Sequence: Synthetic oligonucleotide
  Target: SCNA; (-) strand; PAM type: YTN; PAM sequence: CTG
gggagtacaaagcatgtcaa

SEQ ID NO: 59099 - DNA, 20 bp, Artificial Sequence
  Description of Artificial Sequence: Synthetic oligonucleotide
  Target: SCNA; (-) strand; PAM type: YTN; PAM sequence: TTA
tctggggagtacaaagcatg

SEQ ID NO: 59100 - DNA, 20 bp, Artificial Sequence
  Description of Artificial Sequence: Synthetic oligonucleotide
  Target: SCNA; (-) strand; PAM type: YTN; PAM sequence: CTT
atctggggagtacaaagcat

SEQ ID NO: 59101 - DNA, 20 bp, Artificial Sequence
  Description of Artificial Sequence: Synthetic oligonucleotide
  Target: SCNA; (-) strand; PAM type: YTN; PAM sequence: CTG
aggcttatctggggagtaca

SEQ ID NO: 59102 - DNA, 20 bp, Artificial Sequence
  Description of Artificial Sequence: Synthetic oligonucleotide
  Target: SCNA; (-) strand; PAM type: YTN; PAM sequence: CTC
agactgaggcttatctgggg

SEQ ID NO: 59103 - DNA, 20 bp, Artificial Sequence
  Description of Artificial Sequence: Synthetic oligonucleotide
  Target: SCNA; (-) strand; PAM type: YTN; PAM sequence: CTC
tcagactgaggcttatctgg

SEQ ID NO: 59104 - DNA, 20 bp, Artificial Sequence
  Description of Artificial Sequence: Synthetic oligonucleotide
  Target: SCNA; (-) strand; PAM type: YTN; PAM sequence: CTC
ctctcagactgaggcttatc

SEQ ID NO: 59105 - DNA, 20 bp, Artificial Sequence
  Description of Artificial Sequence: Synthetic oligonucleotide
  Target: SCNA; (-) strand; PAM type: YTN; PAM sequence: CTG
acatggtgtaactcctctca

SEQ ID NO: 59106 - DNA, 20 bp, Artificial Sequence
  Description of Artificial Sequence: Synthetic oligonucleotide
  Target: SCNA; (-) strand; PAM type: YTN; PAM sequence: CTA
aacagctgacatggtgtaac

SEQ ID NO: 59107 - DNA, 20 bp, Artificial Sequence
  Description of Artificial Sequence: Synthetic oligonucleotide
  Target: SCNA; (-) strand; PAM type: YTN; PAM sequence: CTA
tacaatagtcatgtgaatag

SEQ ID NO: 59108 - DNA, 20 bp, Artificial Sequence
  Description of Artificial Sequence: Synthetic oligonucleotide
  Target: SCNA; (-) strand; PAM type: YTN; PAM sequence: CTG
gtgagatgaaacctatacaa

SEQ ID NO: 59109 - DNA, 20 bp, Artificial Sequence
  Description of Artificial Sequence: Synthetic oligonucleotide
  Target: SCNA; (-) strand; PAM type: YTN; PAM sequence: TTC
aactggtgagatgaaaccta

SEQ ID NO: 59110 - DNA, 20 bp, Artificial Sequence
  Description of Artificial Sequence: Synthetic oligonucleotide
  Target: SCNA; (-) strand; PAM type: YTN; PAM sequence: CTT
caactggtgagatgaaacct

SEQ ID NO: 59111 - DNA, 20 bp, Artificial Sequence
  Description of Artificial Sequence: Synthetic oligonucleotide
  Target: SCNA; (-) strand; PAM type: YTN; PAM sequence: TTC
ttcaactggtgagatgaaac

SEQ ID NO: 59112 - DNA, 20 bp, Artificial Sequence
  Description of Artificial Sequence: Synthetic oligonucleotide
  Target: SCNA; (-) strand; PAM type: YTN; PAM sequence: CTT
cttcaactggtgagatgaaa

SEQ ID NO: 59113 - DNA, 20 bp, Artificial Sequence
  Description of Artificial Sequence: Synthetic oligonucleotide
  Target: SCNA; (-) strand; PAM type: YTN; PAM sequence: TTG
gcttcttcaactggtgagat

SEQ ID NO: 59114 - DNA, 20 bp, Artificial Sequence
  Description of Artificial Sequence: Synthetic oligonucleotide
  Target: SCNA; (-) strand; PAM type: YTN; PAM sequence: CTC
aaaataaataaataaataaa

SEQ ID NO: 59115 - DNA, 20 bp, Artificial Sequence
  Description of Artificial Sequence: Synthetic oligonucleotide
  Target: SCNA; (-) strand; PAM type: YTN; PAM sequence: CTC
cgtctcaaaataaataaata

SEQ ID NO: 59116 - DNA, 20 bp, Artificial Sequence
  Description of Artificial Sequence: Synthetic oligonucleotide
  Target: SCNA; (-) strand; PAM type: YTN; PAM sequence: CTG
ggtgacagagcaagactccg

SEQ ID NO: 59117 - DNA, 20 bp, Artificial Sequence
  Description of Artificial Sequence: Synthetic oligonucleotide
  Target: SCNA; (-) strand; PAM type: YTN; PAM sequence: CTC
cagcctgggtgacagagcaa

SEQ ID NO: 59118 - DNA, 20 bp, Artificial Sequence
  Description of Artificial Sequence: Synthetic oligonucleotide
  Target: SCNA; (-) strand; PAM type: YTN; PAM sequence: CTG
cactccagcctgggtgacag

SEQ ID NO: 59119 - DNA, 20 bp, Artificial Sequence
  Description of Artificial Sequence: Synthetic oligonucleotide
  Target: SCNA; (-) strand; PAM type: YTN; PAM sequence: TTG
cagtgagccgacatcgtgcc

SEQ ID NO: 59120 - DNA, 20 bp, Artificial Sequence
  Description of Artificial Sequence: Synthetic oligonucleotide
  Target: SCNA; (-) strand; PAM type: YTN; PAM sequence: TTT
gcagtgagccgacatcgtgc

SEQ ID NO: 59121 - DNA, 20 bp, Artificial Sequence
  Description of Artificial Sequence: Synthetic oligonucleotide
  Target: SCNA; (-) strand; PAM type: YTN; PAM sequence: CTG
aacccgggagtcggagtttg

SEQ ID NO: 59122 - DNA, 20 bp, Artificial Sequence
  Description of Artificial Sequence: Synthetic oligonucleotide
  Target: SCNA; (-) strand; PAM type: YTN; PAM sequence: CTG
aggcaggagaatggcctgaa

SEQ ID NO: 59123 - DNA, 20 bp, Artificial Sequence
  Description of Artificial Sequence: Synthetic oligonucleotide
  Target: SCNA; (-) strand; PAM type: YTN; PAM sequence: CTG
gggaggctgaggcaggagaa

SEQ ID NO: 59124 - DNA, 20 bp, Artificial Sequence
  Description of Artificial Sequence: Synthetic oligonucleotide
  Target: SCNA; (-) strand; PAM type: YTN; PAM sequence: CTG
ctggggaggctgaggcagga

SEQ ID NO: 59125 - DNA, 20 bp, Artificial Sequence
  Description of Artificial Sequence: Synthetic oligonucleotide
  Target: SCNA; (-) strand; PAM type: YTN; PAM sequence: CTG
tagtcccagctgctggggag

SEQ ID NO: 59126 - DNA, 20 bp, Artificial Sequence
  Description of Artificial Sequence: Synthetic oligonucleotide
  Target: SCNA; (-) strand; PAM type: YTN; PAM sequence: TTA
gccgggtgtggtggcgcgca

SEQ ID NO: 59127 - DNA, 20 bp, Artificial Sequence
  Description of Artificial Sequence: Synthetic oligonucleotide
  Target: SCNA; (-) strand; PAM type: YTN; PAM sequence: CTA
aaaatataaaaaaattagcc

SEQ ID NO: 59128 - DNA, 20 bp, Artificial Sequence
  Description of Artificial Sequence: Synthetic oligonucleotide
  Target: SCNA; (-) strand; PAM type: YTN; PAM sequence: CTA
ctaaaaatataaaaaaatta

SEQ ID NO: 59129 - DNA, 20 bp, Artificial Sequence
  Description of Artificial Sequence: Synthetic oligonucleotide
  Target: SCNA; (-) strand; PAM type: YTN; PAM sequence: CTC
tactaaaaatataaaaaaat

SEQ ID NO: 59130 - DNA, 20 bp, Artificial Sequence
  Description of Artificial Sequence: Synthetic oligonucleotide
  Target: SCNA; (-) strand; PAM type: YTN; PAM sequence: CTG
tctctactaaaaatataaaa

SEQ ID NO: 59131 - DNA, 20 bp, Artificial Sequence
  Description of Artificial Sequence: Synthetic oligonucleotide
  Target: SCNA; (-) strand; PAM type: YTN; PAM sequence: CTA
acacggtgaaaccctgtctc

SEQ ID NO: 59132 - DNA, 20 bp, Artificial Sequence
  Description of Artificial Sequence: Synthetic oligonucleotide
  Target: SCNA; (-) strand; PAM type: YTN; PAM sequence: CTG
gctaacacggtgaaaccctg

SEQ ID NO: 59133 - DNA, 20 bp, Artificial Sequence
  Description of Artificial Sequence: Synthetic oligonucleotide
  Target: SCNA; (-) strand; PAM type: YTN; PAM sequence: CTG
aggcgggcagatcacgaggt

SEQ ID NO: 59134 - DNA, 20 bp, Artificial Sequence
  Description of Artificial Sequence: Synthetic oligonucleotide
  Target: SCNA; (-) strand; PAM type: YTN; PAM sequence: TTG
ggaggctgaggcgggcagat

SEQ ID NO: 59135 - DNA, 20 bp, Artificial Sequence
  Description of Artificial Sequence: Synthetic oligonucleotide
  Target: SCNA; (-) strand; PAM type: YTN; PAM sequence: TTT
gggaggctgaggcgggcaga

SEQ ID NO: 59136 - DNA, 20 bp, Artificial Sequence
  Description of Artificial Sequence: Synthetic oligonucleotide
  Target: SCNA; (-) strand; PAM type: YTN; PAM sequence: CTT
tgggaggctgaggcgggcag

SEQ ID NO: 59137 - DNA, 20 bp, Artificial Sequence
  Description of Artificial Sequence: Synthetic oligonucleotide
  Target: SCNA; (-) strand; PAM type: YTN; PAM sequence: TTA
tcccagcactttgggaggct

SEQ ID NO: 59138 - DNA, 20 bp, Artificial Sequence
  Description of Artificial Sequence: Synthetic oligonucleotide
  Target: SCNA; (-) strand; PAM type: YTN; PAM sequence: CTG
ttatcccagcactttgggag

SEQ ID NO: 59139 - DNA, 20 bp, Artificial Sequence
  Description of Artificial Sequence: Synthetic oligonucleotide
  Target: SCNA; (-) strand; PAM type: YTN; PAM sequence: CTC
acgcctgttatcccagcact

SEQ ID NO: 59140 - DNA, 20 bp, Artificial Sequence
  Description of Artificial Sequence: Synthetic oligonucleotide
  Target: SCNA; (-) strand; PAM type: YTN; PAM sequence: TTC
aggccaggcgcggtggctca

SEQ ID NO: 59141 - DNA, 20 bp, Artificial Sequence
  Description of Artificial Sequence: Synthetic oligonucleotide
  Target: SCNA; (-) strand; PAM type: YTN; PAM sequence: CTT
caggccaggcgcggtggctc

SEQ ID NO: 59142 - DNA, 20 bp, Artificial Sequence
  Description of Artificial Sequence: Synthetic oligonucleotide
  Target: SCNA; (-) strand; PAM type: YTN; PAM sequence: TTG
gcttcaggccaggcgcggtg

SEQ ID NO: 59143 - DNA, 20 bp, Artificial Sequence
  Description of Artificial Sequence: Synthetic oligonucleotide
  Target: SCNA; (-) strand; PAM type: YTN; PAM sequence: TTA
aatattggcttcaggccagg

SEQ ID NO: 59144 - DNA, 20 bp, Artificial Sequence
  Description of Artificial Sequence: Synthetic oligonucleotide
  Target: SCNA; (-) strand; PAM type: YTN; PAM sequence: TTT
aaatattggcttcaggccag

SEQ ID NO: 59145 - DNA, 20 bp, Artificial Sequence
  Description of Artificial Sequence: Synthetic oligonucleotide
  Target: SCNA; (-) strand; PAM type: YTN; PAM sequence: TTG
tccacaccatttaaatattg

SEQ ID NO: 59146 - DNA, 20 bp, Artificial Sequence
  Description of Artificial Sequence: Synthetic oligonucleotide
  Target: SCNA; (-) strand; PAM type: YTN; PAM sequence: TTT
gtccacaccatttaaatatt

SEQ ID NO: 59147 - DNA, 20 bp, Artificial Sequence
  Description of Artificial Sequence: Synthetic oligonucleotide
  Target: SCNA; (-) strand; PAM type: YTN; PAM sequence: CTT
tgtccacaccatttaaatat

SEQ ID NO: 59148 - DNA, 20 bp, Artificial Sequence
  Description of Artificial Sequence: Synthetic oligonucleotide
  Target: SCNA; (-) strand; PAM type: YTN; PAM sequence: TTG
ctttgtccacaccatttaaa

SEQ ID NO: 59149 - DNA, 20 bp, Artificial Sequence
  Description of Artificial Sequence: Synthetic oligonucleotide
  Target: SCNA; (-) strand; PAM type: YTN; PAM sequence: TTG
aaaacaaattgctttgtcca

SEQ ID NO: 59150 - DNA, 20 bp, Artificial Sequence
  Description of Artificial Sequence: Synthetic oligonucleotide
  Target: SCNA; (-) strand; PAM type: YTN; PAM sequence: TTT
gaaaacaaattgctttgtcc

SEQ ID NO: 59151 - DNA, 20 bp, Artificial Sequence
  Description of Artificial Sequence: Synthetic oligonucleotide
  Target: SCNA; (-) strand; PAM type: YTN; PAM sequence: CTA
tttgaaaacaaattgctttg

SEQ ID NO: 59152 - DNA, 20 bp, Artificial Sequence
  Description of Artificial Sequence: Synthetic oligonucleotide
  Target: SCNA; (-) strand; PAM type: YTN; PAM sequence: TTA
catagtctatttgaaaacaa

SEQ ID NO: 59153 - DNA, 20 bp, Artificial Sequence
  Description of Artificial Sequence: Synthetic oligonucleotide
  Target: SCNA; (-) strand; PAM type: YTN; PAM sequence: CTT
acatagtctatttgaaaaca

SEQ ID NO: 59154 - DNA, 20 bp, Artificial Sequence
  Description of Artificial Sequence: Synthetic oligonucleotide
  Target: SCNA; (-) strand; PAM type: YTN; PAM sequence: TTA
gcttacatagtctatttgaa

SEQ ID NO: 59155 - DNA, 20 bp, Artificial Sequence
  Description of Artificial Sequence: Synthetic oligonucleotide
  Target: SCNA; (-) strand; PAM type: YTN; PAM sequence: CTT
agcttacatagtctatttga

SEQ ID NO: 59156 - DNA, 20 bp, Artificial Sequence
  Description of Artificial Sequence: Synthetic oligonucleotide
  Target: SCNA; (-) strand; PAM type: YTN; PAM sequence: TTA
cagacccccttagcttacat

SEQ ID NO: 59157 - DNA, 20 bp, Artificial Sequence
  Description of Artificial Sequence: Synthetic oligonucleotide
  Target: SCNA; (-) strand; PAM type: YTN; PAM sequence: CTT
acagacccccttagcttaca

SEQ ID NO: 59158 - DNA, 20 bp, Artificial Sequence
  Description of Artificial Sequence: Synthetic oligonucleotide
  Target: SCNA; (-) strand; PAM type: YTN; PAM sequence: TTG
tccttacagacccccttagc

SEQ ID NO: 59159 - DNA, 20 bp, Artificial Sequence
  Description of Artificial Sequence: Synthetic oligonucleotide
  Target: SCNA; (-) strand; PAM type: YTN; PAM sequence: CTT
gtccttacagacccccttag

SEQ ID NO: 59160 - DNA, 20 bp, Artificial Sequence
  Description of Artificial Sequence: Synthetic oligonucleotide
  Target: SCNA; (-) strand; PAM type: YTN; PAM sequence: CTC
ttgtccttacagaccccctt

SEQ ID NO: 59161 - DNA, 20 bp, Artificial Sequence
  Description of Artificial Sequence: Synthetic oligonucleotide
  Target: SCNA; (-) strand; PAM type: YTN; PAM sequence: CTA
aggagaaagcctcttgtcct

SEQ ID NO: 59162 - DNA, 20 bp, Artificial Sequence
  Description of Artificial Sequence: Synthetic oligonucleotide
  Target: SCNA; (-) strand; PAM type: YTN; PAM sequence: CTG
tactaaggagaaagcctctt

SEQ ID NO: 59163 - DNA, 20 bp, Artificial Sequence
  Description of Artificial Sequence: Synthetic oligonucleotide
  Target: SCNA; (-) strand; PAM type: YTN; PAM sequence: TTG
cctgtactaaggagaaagcc

SEQ ID NO: 59164 - DNA, 20 bp, Artificial Sequence
  Description of Artificial Sequence: Synthetic oligonucleotide
  Target: SCNA; (-) strand; PAM type: YTN; PAM sequence: TTG
cccacattgcctgtactaag

SEQ ID NO: 59165 - DNA, 20 bp, Artificial Sequence
  Description of Artificial Sequence: Synthetic oligonucleotide
  Target: SCNA; (-) strand; PAM type: YTN; PAM sequence: CTT
gcccacattgcctgtactaa

SEQ ID NO: 59166 - DNA, 20 bp, Artificial Sequence
  Description of Artificial Sequence: Synthetic oligonucleotide
  Target: SCNA; (-) strand; PAM type: YTN; PAM sequence: CTA
tgtcaggcttgcccacattg

SEQ ID NO: 59167 - DNA, 20 bp, Artificial Sequence
  Description of Artificial Sequence: Synthetic oligonucleotide
  Target: SCNA; (-) strand; PAM type: YTN; PAM sequence: CTG
tgtggctatgtcaggcttgc

SEQ ID NO: 59168 - DNA, 20 bp, Artificial Sequence
  Description of Artificial Sequence: Synthetic oligonucleotide
  Target: SCNA; (-) strand; PAM type: YTN; PAM sequence: TTG
ggctgtgtggctatgtcagg

SEQ ID NO: 59169 - DNA, 20 bp, Artificial Sequence
  Description of Artificial Sequence: Synthetic oligonucleotide
  Target: SCNA; (-) strand; PAM type: YTN; PAM sequence: CTT
gggctgtgtggctatgtcag

SEQ ID NO: 59170 - DNA, 20 bp, Artificial Sequence
  Description of Artificial Sequence: Synthetic oligonucleotide
  Target: SCNA; (-) strand; PAM type: YTN; PAM sequence: CTG
gtcttgggctgtgtggctat

SEQ ID NO: 59171 - DNA, 20 bp, Artificial Sequence
  Description of Artificial Sequence: Synthetic oligonucleotide
  Target: SCNA; (-) strand; PAM type: YTN; PAM sequence: TTC
tggtcttgggctgtgtggct

SEQ ID NO: 59172 - DNA, 20 bp, Artificial Sequence
  Description of Artificial Sequence: Synthetic oligonucleotide
  Target: SCNA; (-) strand; PAM type: YTN; PAM sequence: TTT
ctggtcttgggctgtgtggc

SEQ ID NO: 59173 - DNA, 20 bp, Artificial Sequence
  Description of Artificial Sequence: Synthetic oligonucleotide
  Target: SCNA; (-) strand; PAM type: YTN; PAM sequence: CTG
tggaccgtttctggtcttgg

SEQ ID NO: 59174 - DNA, 20 bp, Artificial Sequence
  Description of Artificial Sequence: Synthetic oligonucleotide
  Target: SCNA; (-) strand; PAM type: YTN; PAM sequence: CTA
ctgtggaccgtttctggtct

SEQ ID NO: 59175 - DNA, 20 bp, Artificial Sequence
  Description of Artificial Sequence: Synthetic oligonucleotide
  Target: SCNA; (-) strand; PAM type: YTN; PAM sequence: CTA
aaagacaaatagggagcaac

SEQ ID NO: 59176 - DNA, 20 bp, Artificial Sequence
  Description of Artificial Sequence: Synthetic oligonucleotide
  Target: SCNA; (-) strand; PAM type: YTN; PAM sequence: CTA
gcctaaaagacaaataggga

SEQ ID NO: 59177 - DNA, 20 bp, Artificial Sequence
  Description of Artificial Sequence: Synthetic oligonucleotide
  Target: SCNA; (-) strand; PAM type: YTN; PAM sequence: TTC
tagcctaaaagacaaatagg

SEQ ID NO: 59178 - DNA, 20 bp, Artificial Sequence
  Description of Artificial Sequence: Synthetic oligonucleotide
  Target: SCNA; (-) strand; PAM type: YTN; PAM sequence: TTG
tacaaaattctagcctaaaa

SEQ ID NO: 59179 - DNA, 20 bp, Artificial Sequence
  Description of Artificial Sequence: Synthetic oligonucleotide
  Target: SCNA; (-) strand; PAM type: YTN; PAM sequence: TTA
ggtagttgtacaaaattcta

SEQ ID NO: 59180 - DNA, 20 bp, Artificial Sequence
  Description of Artificial Sequence: Synthetic oligonucleotide
  Target: SCNA; (-) strand; PAM type: YTN; PAM sequence: TTG
ttaggtagttgtacaaaatt

SEQ ID NO: 59181 - DNA, 20 bp, Artificial Sequence
  Description of Artificial Sequence: Synthetic oligonucleotide
  Target: SCNA; (-) strand; PAM type: YTN; PAM sequence: TTA
gaagtggcacggagttgtta

SEQ ID NO: 59182 - DNA, 20 bp, Artificial Sequence
  Description of Artificial Sequence: Synthetic oligonucleotide
  Target: SCNA; (-) strand; PAM type: YTN; PAM sequence: CTT
agaagtggcacggagttgtt

SEQ ID NO: 59183 - DNA, 20 bp, Artificial Sequence
  Description of Artificial Sequence: Synthetic oligonucleotide
  Target: SCNA; (-) strand; PAM type: YTN; PAM sequence: TTA
aggagacatcagccatatcc

SEQ ID NO: 59184 - DNA, 20 bp, Artificial Sequence
  Description of Artificial Sequence: Synthetic oligonucleotide
  Target: SCNA; (-) strand; PAM type: YTN; PAM sequence: CTT
aaggagacatcagccatatc

SEQ ID NO: 59185 - DNA, 20 bp, Artificial Sequence
  Description of Artificial Sequence: Synthetic oligonucleotide
  Target: SCNA; (-) strand; PAM type: YTN; PAM sequence: CTC
ttaaggagacatcagccata

SEQ ID NO: 59186 - DNA, 20 bp, Artificial Sequence
  Description of Artificial Sequence: Synthetic oligonucleotide
  Target: SCNA; (-) strand; PAM type: YTN; PAM sequence: TTG
ctcttaaggagacatcagcc

SEQ ID NO: 59187 - DNA, 20 bp, Artificial Sequence
  Description of Artificial Sequence: Synthetic oligonucleotide
  Target: SCNA; (-) strand; PAM type: YTN; PAM sequence: CTT
gctcttaaggagacatcagc

SEQ ID NO: 59188 - DNA, 20 bp, Artificial Sequence
  Description of Artificial Sequence: Synthetic oligonucleotide
  Target: SCNA; (-) strand; PAM type: YTN; PAM sequence: CTC
ttgctcttaaggagacatca

SEQ ID NO: 59189 - DNA, 20 bp, Artificial Sequence
  Description of Artificial Sequence: Synthetic oligonucleotide
  Target: SCNA; (-) strand; PAM type: YTN; PAM sequence: TTG
taaatagctcttgctcttaa

SEQ ID NO: 59190 - DNA, 20 bp, Artificial Sequence
  Description of Artificial Sequence: Synthetic oligonucleotide
  Target: SCNA; (-) strand; PAM type: YTN; PAM sequence: TTG
aattgtaaatagctcttgct

SEQ ID NO: 59191 - DNA, 20 bp, Artificial Sequence
  Description of Artificial Sequence: Synthetic oligonucleotide
  Target: SCNA; (-) strand; PAM type: YTN; PAM sequence: TTT
gaattgtaaatagctcttgc

SEQ ID NO: 59192 - DNA, 20 bp, Artificial Sequence
  Description of Artificial Sequence: Synthetic oligonucleotide
  Target: SCNA; (-) strand; PAM type: YTN; PAM sequence: CTT
tgaattgtaaatagctcttg

SEQ ID NO: 59193 - DNA, 20 bp, Artificial Sequence
  Description of Artificial Sequence: Synthetic oligonucleotide
  Target: SCNA; (-) strand; PAM type: YTN; PAM sequence: TTA
aatcgaactttgaattgtaa

SEQ ID NO: 59194 - DNA, 20 bp, Artificial Sequence
  Description of Artificial Sequence: Synthetic oligonucleotide
  Target: SCNA; (-) strand; PAM type: YTN; PAM sequence: TTT
aaatcgaactttgaattgta

SEQ ID NO: 59195 - DNA, 20 bp, Artificial Sequence
  Description of Artificial Sequence: Synthetic oligonucleotide
  Target: SCNA; (-) strand; PAM type: YTN; PAM sequence: CTG
gcatttaaatcgaactttga

SEQ ID NO: 59196 - DNA, 20 bp, Artificial Sequence
  Description of Artificial Sequence: Synthetic oligonucleotide
  Target: SCNA; (-) strand; PAM type: YTN; PAM sequence: TTC
gctggcatttaaatcgaact

SEQ ID NO: 59197 - DNA, 20 bp, Artificial Sequence
  Description of Artificial Sequence: Synthetic oligonucleotide
  Target: SCNA; (-) strand; PAM type: YTN; PAM sequence: TTT
cgctggcatttaaatcgaac

SEQ ID NO: 59198 - DNA, 20 bp, Artificial Sequence
  Description of Artificial Sequence: Synthetic oligonucleotide
  Target: SCNA; (-) strand; PAM type: YTN; PAM sequence: TTT
tcgctggcatttaaatcgaa

SEQ ID NO: 59199 - DNA, 20 bp, Artificial Sequence
  Description of Artificial Sequence: Synthetic oligonucleotide
  Target: SCNA; (-) strand; PAM type: YTN; PAM sequence: CTT
ttcgctggcatttaaatcga

SEQ ID NO: 59200 - DNA, 20 bp, Artificial Sequence
  Description of Artificial Sequence: Synthetic oligonucleotide
  Target: SCNA; (-) strand; PAM type: YTN; PAM sequence: TTC
agtacagcttttcgctggca

SEQ ID NO: 59201 - DNA, 20 bp, Artificial Sequence
  Description of Artificial Sequence: Synthetic oligonucleotide
  Target: SCNA; (-) strand; PAM type: YTN; PAM sequence: TTT
cagtacagcttttcgctggc

SEQ ID NO: 59202 - DNA, 20 bp, Artificial Sequence
  Description of Artificial Sequence: Synthetic oligonucleotide
  Target: SCNA; (-) strand; PAM type: YTN; PAM sequence: TTT
tcagtacagcttttcgctgg

SEQ ID NO: 59203 - DNA, 20 bp, Artificial Sequence
  Description of Artificial Sequence: Synthetic oligonucleotide
  Target: SCNA; (-) strand; PAM type: YTN; PAM sequence: TTA
aaacataagattttcagtac

SEQ ID NO: 59204 - DNA, 20 bp, Artificial Sequence
  Description of Artificial Sequence: Synthetic oligonucleotide
  Target: SCNA; (-) strand; PAM type: YTN; PAM sequence: TTT
aaaacataagattttcagta

SEQ ID NO: 59205 - DNA, 20 bp, Artificial Sequence
  Description of Artificial Sequence: Synthetic oligonucleotide
  Target: SCNA; (-) strand; PAM type: YTN; PAM sequence: TTT
taaaacataagattttcagt

SEQ ID NO: 59206 - DNA, 20 bp, Artificial Sequence
  Description of Artificial Sequence: Synthetic oligonucleotide
  Target: SCNA; (-) strand; PAM type: YTN; PAM sequence: TTC
agaaatgttttaaaacataa

SEQ ID NO: 59207 - DNA, 20 bp, Artificial Sequence
  Description of Artificial Sequence: Synthetic oligonucleotide
  Target: SCNA; (-) strand; PAM type: YTN; PAM sequence: TTT
cagaaatgttttaaaacata

SEQ ID NO: 59208 - DNA, 20 bp, Artificial Sequence
  Description of Artificial Sequence: Synthetic oligonucleotide
  Target: SCNA; (-) strand; PAM type: YTN; PAM sequence: TTA
aaggatcaacatttcagaaa

SEQ ID NO: 59209 - DNA, 20 bp, Artificial Sequence
  Description of Artificial Sequence: Synthetic oligonucleotide
  Target: SCNA; (-) strand; PAM type: YTN; PAM sequence: TTT
aaaggatcaacatttcagaa

SEQ ID NO: 59210 - DNA, 20 bp, Artificial Sequence
  Description of Artificial Sequence: Synthetic oligonucleotide
  Target: SCNA; (-) strand; PAM type: YTN; PAM sequence: TTT
taaaggatcaacatttcaga

SEQ ID NO: 59211 - DNA, 20 bp, Artificial Sequence
  Description of Artificial Sequence: Synthetic oligonucleotide
  Target: SCNA; (-) strand; PAM type: YTN; PAM sequence: TTT
ttaaaggatcaacatttcag

SEQ ID NO: 59212 - DNA, 20 bp, Artificial Sequence
  Description of Artificial Sequence: Synthetic oligonucleotide
  Target: SCNA; (-) strand; PAM type: YTN; PAM sequence: CTA
tttttaaaggatcaacattt

SEQ ID NO: 59213 - DNA, 20 bp, Artificial Sequence
  Description of Artificial Sequence: Synthetic oligonucleotide
  Target: SCNA; (-) strand; PAM type: YTN; PAM sequence: TTG
actatttttaaaggatcaac

SEQ ID NO: 59214 - DNA, 20 bp, Artificial Sequence
  Description of Artificial Sequence: Synthetic oligonucleotide
  Target: SCNA; (-) strand; PAM type: YTN; PAM sequence: TTG
aaacacataattgactattt

SEQ ID NO: 59215 - DNA, 20 bp, Artificial Sequence
  Description of Artificial Sequence: Synthetic oligonucleotide
  Target: SCNA; (-) strand; PAM type: YTN; PAM sequence: CTT
gaaacacataattgactatt

SEQ ID NO: 59216 - DNA, 20 bp, Artificial Sequence
  Description of Artificial Sequence: Synthetic oligonucleotide
  Target: SCNA; (-) strand; PAM type: YTN; PAM sequence: TTG
aaaaggaaaaaaatgacaac

SEQ ID NO: 59217 - DNA, 20 bp, Artificial Sequence
  Description of Artificial Sequence: Synthetic oligonucleotide
  Target: SCNA; (-) strand; PAM type: YTN; PAM sequence: CTT
gaaaaggaaaaaaatgacaa

SEQ ID NO: 59218 - DNA, 20 bp, Artificial Sequence
  Description of Artificial Sequence: Synthetic oligonucleotide
  Target: SCNA; (-) strand; PAM type: YTN; PAM sequence: TTC
acgtccttgaaaaggaaaaa

SEQ ID NO: 59219 - DNA, 20 bp, Artificial Sequence
  Description of Artificial Sequence: Synthetic oligonucleotide
  Target: SCNA; (-) strand; PAM type: YTN; PAM sequence: TTC
aattcacgtccttgaaaagg

SEQ ID NO: 59220 - DNA, 20 bp, Artificial Sequence
  Description of Artificial Sequence: Synthetic oligonucleotide
  Target: SCNA; (-) strand; PAM type: YTN; PAM sequence: TTT
caattcacgtccttgaaaag

SEQ ID NO: 59221 - DNA, 20 bp, Artificial Sequence
  Description of Artificial Sequence: Synthetic oligonucleotide
  Target: SCNA; (-) strand; PAM type: YTN; PAM sequence: TTT
tcaattcacgtccttgaaaa

SEQ ID NO: 59222 - DNA, 20 bp, Artificial Sequence
  Description of Artificial Sequence: Synthetic oligonucleotide
  Target: SCNA; (-) strand; PAM type: YTN; PAM sequence: TTC
aagcaaaattttcaattcac

SEQ ID NO: 59223 - DNA, 20 bp, Artificial Sequence
  Description of Artificial Sequence: Synthetic oligonucleotide
  Target: SCNA; (-) strand; PAM type: YTN; PAM sequence: TTT
caagcaaaattttcaattca

SEQ ID NO: 59224 - DNA, 20 bp, Artificial Sequence
  Description of Artificial Sequence: Synthetic oligonucleotide
  Target: SCNA; (-) strand; PAM type: YTN; PAM sequence: TTC
gtttcaagcaaaattttcaa

SEQ ID NO: 59225 - DNA, 20 bp, Artificial Sequence
  Description of Artificial Sequence: Synthetic oligonucleotide
  Target: SCNA; (-) strand; PAM type: YTN; PAM sequence: TTA
taacaagaaaatgttcgttt

SEQ ID NO: 59226 - DNA, 20 bp, Artificial Sequence
  Description of Artificial Sequence: Synthetic oligonucleotide
  Target: SCNA; (-) strand; PAM type: YTN; PAM sequence: TTT
ataacaagaaaatgttcgtt

SEQ ID NO: 59227 - DNA, 20 bp, Artificial Sequence
  Description of Artificial Sequence: Synthetic oligonucleotide
  Target: SCNA; (-) strand; PAM type: YTN; PAM sequence: TTT
tataacaagaaaatgttcgt

SEQ ID NO: 59228 - DNA, 20 bp, Artificial Sequence
  Description of Artificial Sequence: Synthetic oligonucleotide
  Target: SCNA; (-) strand; PAM type: YTN; PAM sequence: TTG
agattttataacaagaaaat

SEQ ID NO: 59229 - DNA, 20 bp, Artificial Sequence
  Description of Artificial Sequence: Synthetic oligonucleotide
  Target: SCNA; (-) strand; PAM type: YTN; PAM sequence: TTT
gagattttataacaagaaaa

SEQ ID NO: 59230 - DNA, 20 bp, Artificial Sequence
  Description of Artificial Sequence: Synthetic oligonucleotide
  Target: SCNA; (-) strand; PAM type: YTN; PAM sequence: CTT
tgagattttataacaagaaa

SEQ ID NO: 59231 - DNA, 20 bp, Artificial Sequence
  Description of Artificial Sequence: Synthetic oligonucleotide
  Target: SCNA; (-) strand; PAM type: YTN; PAM sequence: CTC
gctttgagattttataacaa

SEQ ID NO: 59232 - DNA, 20 bp, Artificial Sequence
  Description of Artificial Sequence: Synthetic oligonucleotide
  Target: SCNA; (-) strand; PAM type: YTN; PAM sequence: TTA
atctcgctttgagattttat

SEQ ID NO: 59233 - DNA, 20 bp, Artificial Sequence
  Description of Artificial Sequence: Synthetic oligonucleotide
  Target: SCNA; (-) strand; PAM type: YTN; PAM sequence: TTT
aatctcgctttgagatttta

SEQ ID NO: 59234 - DNA, 20 bp, Artificial Sequence
  Description of Artificial Sequence: Synthetic oligonucleotide
  Target: SCNA; (-) strand; PAM type: YTN; PAM sequence: TTT
taatctcgctttgagatttt

SEQ ID NO: 59235 - DNA, 20 bp, Artificial Sequence
  Description of Artificial Sequence: Synthetic oligonucleotide
  Target: SCNA; (-) strand; PAM type: YTN; PAM sequence: TTT
ttaatctcgctttgagattt

SEQ ID NO: 59236 - DNA, 20 bp, Artificial Sequence
  Description of Artificial Sequence: Synthetic oligonucleotide
  Target: SCNA; (-) strand; PAM type: YTN; PAM sequence: CTA
tttttaatctcgctttgaga

SEQ ID NO: 59237 - DNA, 20 bp, Artificial Sequence
  Description of Artificial Sequence: Synthetic oligonucleotide
  Target: SCNA; (-) strand; PAM type: YTN; PAM sequence: TTC
aaaacctatttttaatctcg

SEQ ID NO: 59238 - DNA, 20 bp, Artificial Sequence
  Description of Artificial Sequence: Synthetic oligonucleotide
  Target: SCNA; (-) strand; PAM type: YTN; PAM sequence: CTG
taaaaaattcaaaacctatt

SEQ ID NO: 59239 - DNA, 20 bp, Artificial Sequence
  Description of Artificial Sequence: Synthetic oligonucleotide
  Target: SCNA; (-) strand; PAM type: YTN; PAM sequence: CTG
gatctgtaaaaaattcaaaa

SEQ ID NO: 59240 - DNA, 20 bp, Artificial Sequence
  Description of Artificial Sequence: Synthetic oligonucleotide
  Target: SCNA; (-) strand; PAM type: YTN; PAM sequence: TTA
tggctggatctgtaaaaaat

SEQ ID NO: 59241 - DNA, 20 bp, Artificial Sequence
  Description of Artificial Sequence: Synthetic oligonucleotide
  Target: SCNA; (-) strand; PAM type: YTN; PAM sequence: TTT
atggctggatctgtaaaaaa

SEQ ID NO: 59242 - DNA, 20 bp, Artificial Sequence
  Description of Artificial Sequence: Synthetic oligonucleotide
  Target: SCNA; (-) strand; PAM type: YTN; PAM sequence: TTA
taaaatttatggctggatct

SEQ ID NO: 59243 - DNA, 20 bp, Artificial Sequence
  Description of Artificial Sequence: Synthetic oligonucleotide
  Target: SCNA; (-) strand; PAM type: YTN; PAM sequence: CTA
gatattataaaatttatggc

SEQ ID NO: 59244 - DNA, 20 bp, Artificial Sequence
  Description of Artificial Sequence: Synthetic oligonucleotide
  Target: SCNA; (-) strand; PAM type: YTN; PAM sequence: CTA
tctagatattataaaattta

SEQ ID NO: 59245 - DNA, 20 bp, Artificial Sequence
  Description of Artificial Sequence: Synthetic oligonucleotide
  Target: SCNA; (-) strand; PAM type: YTN; PAM sequence: TTA
tacatatataaaaggctatc

SEQ ID NO: 59246 - DNA, 20 bp, Artificial Sequence
  Description of Artificial Sequence: Synthetic oligonucleotide
  Target: SCNA; (-) strand; PAM type: YTN; PAM sequence: TTT
atacatatataaaaggctat

SEQ ID NO: 59247 - DNA, 20 bp, Artificial Sequence
  Description of Artificial Sequence: Synthetic oligonucleotide
  Target: SCNA; (-) strand; PAM type: YTN; PAM sequence: TTA
aaatttatacatatataaaa

SEQ ID NO: 59248 - DNA, 20 bp, Artificial Sequence
  Description of Artificial Sequence: Synthetic oligonucleotide
  Target: SCNA; (-) strand; PAM type: YTN; PAM sequence: CTA
gattaaaatttatacatata

SEQ ID NO: 59249 - DNA, 20 bp, Artificial Sequence
  Description of Artificial Sequence: Synthetic oligonucleotide
  Target: SCNA; (-) strand; PAM type: YTN; PAM sequence: TTA
aaactagattaaaatttata

SEQ ID NO: 59250 - DNA, 20 bp, Artificial Sequence
  Description of Artificial Sequence: Synthetic oligonucleotide
  Target: SCNA; (-) strand; PAM type: YTN; PAM sequence: TTG
cattaaaactagattaaaat

SEQ ID NO: 59251 - DNA, 20 bp, Artificial Sequence
  Description of Artificial Sequence: Synthetic oligonucleotide
  Target: SCNA; (-) strand; PAM type: YTN; PAM sequence: CTG
tgcagtgtattgcattaaaa

SEQ ID NO: 59252 - DNA, 20 bp, Artificial Sequence
  Description of Artificial Sequence: Synthetic oligonucleotide
  Target: SCNA; (-) strand; PAM type: YTN; PAM sequence: TTA
ctgtgcagtgtattgcatta

SEQ ID NO: 59253 - DNA, 20 bp, Artificial Sequence
  Description of Artificial Sequence: Synthetic oligonucleotide
  Target: SCNA; (-) strand; PAM type: YTN; PAM sequence: TTT
actgtgcagtgtattgcatt

SEQ ID NO: 59254 - DNA, 20 bp, Artificial Sequence
  Description of Artificial Sequence: Synthetic oligonucleotide
  Target: SCNA; (-) strand; PAM type: YTN; PAM sequence: TTT
tactgtgcagtgtattgcat

SEQ ID NO: 59255 - DNA, 20 bp, Artificial Sequence
  Description of Artificial Sequence: Synthetic oligonucleotide
  Target: SCNA; (-) strand; PAM type: YTN; PAM sequence: TTA
taataatgtgtagagtacat

SEQ ID NO: 59256 - DNA, 20 bp, Artificial Sequence
  Description of Artificial Sequence: Synthetic oligonucleotide
  Target: SCNA; (-) strand; PAM type: YTN; PAM sequence: TTA
taataataaaacaacaaaat

SEQ ID NO: 59257 - DNA, 20 bp, Artificial Sequence
  Description of Artificial Sequence: Synthetic oligonucleotide
  Target: SCNA; (-) strand; PAM type: YTN; PAM sequence: TTA
tgattataataataaaacaa

SEQ ID NO: 59258 - DNA, 20 bp, Artificial Sequence
  Description of Artificial Sequence: Synthetic oligonucleotide
  Target: SCNA; (-) strand; PAM type: YTN; PAM sequence: TTT
atgattataataataaaaca

SEQ ID NO: 59259 - DNA, 20 bp, Artificial Sequence
  Description of Artificial Sequence: Synthetic oligonucleotide
  Target: SCNA; (-) strand; PAM type: YTN; PAM sequence: TTA
tttatgattataataataaa

SEQ ID NO: 59260 - DNA, 20 bp, Artificial Sequence
  Description of Artificial Sequence: Synthetic oligonucleotide
  Target: SCNA; (-) strand; PAM type: YTN; PAM sequence: TTT
atttatgattataataataa

SEQ ID NO: 59261 - DNA, 20 bp, Artificial Sequence
  Description of Artificial Sequence: Synthetic oligonucleotide
  Target: SCNA; (-) strand; PAM type: YTN; PAM sequence: TTT
tatttatgattataataata

SEQ ID NO: 59262 - DNA, 20 bp, Artificial Sequence
  Description of Artificial Sequence: Synthetic oligonucleotide
  Target: SCNA; (-) strand; PAM type: YTN; PAM sequence: TTG
taatgtagccattttattta

SEQ ID NO: 59263 - DNA, 20 bp, Artificial Sequence
  Description of Artificial Sequence: Synthetic oligonucleotide
  Target: SCNA; (-) strand; PAM type: YTN; PAM sequence: TTT
gtaatgtagccattttattt

SEQ ID NO: 59264 - DNA, 20 bp, Artificial Sequence
  Description of Artificial Sequence: Synthetic oligonucleotide
  Target: SCNA; (-) strand; PAM type: YTN; PAM sequence: TTT
tgtaatgtagccattttatt

SEQ ID NO: 59265 - DNA, 20 bp, Artificial Sequence
  Description of Artificial Sequence: Synthetic oligonucleotide
  Target: SCNA; (-) strand; PAM type: YTN; PAM sequence: CTG
tcattttgtaatgtagccat

SEQ ID NO: 59266 - DNA, 20 bp, Artificial Sequence
  Description of Artificial Sequence: Synthetic oligonucleotide
  Target: SCNA; (-) strand; PAM type: YTN; PAM sequence: CTC
tgtcattttgtaatgtagcc

SEQ ID NO: 59267 - DNA, 20 bp, Artificial Sequence
  Description of Artificial Sequence: Synthetic oligonucleotide
  Target: SCNA; (-) strand; PAM type: YTN; PAM sequence: CTA
catgtacactctgtcatttt

SEQ ID NO: 59268 - DNA, 20 bp, Artificial Sequence
  Description of Artificial Sequence: Synthetic oligonucleotide
  Target: SCNA; (-) strand; PAM type: YTN; PAM sequence: TTG
ctacatgtacactctgtcat

SEQ ID NO: 59269 - DNA, 20 bp, Artificial Sequence
  Description of Artificial Sequence: Synthetic oligonucleotide
  Target: SCNA; (-) strand; PAM type: YTN; PAM sequence: TTA
ttgctacatgtacactctgt

SEQ ID NO: 59270 - DNA, 20 bp, Artificial Sequence
  Description of Artificial Sequence: Synthetic oligonucleotide
  Target: SCNA; (-) strand; PAM type: YTN; PAM sequence: TTA
aatgtgtcgattattgctac

SEQ ID NO: 59271 - DNA, 20 bp, Artificial Sequence
  Description of Artificial Sequence: Synthetic oligonucleotide
  Target: SCNA; (-) strand; PAM type: YTN; PAM sequence: TTT
aaatgtgtcgattattgcta

SEQ ID NO: 59272 - DNA, 20 bp, Artificial Sequence
  Description of Artificial Sequence: Synthetic oligonucleotide
  Target: SCNA; (-) strand; PAM type: YTN; PAM sequence: TTT
taaatgtgtcgattattgct

SEQ ID NO: 59273 - DNA, 20 bp, Artificial Sequence
  Description of Artificial Sequence: Synthetic oligonucleotide
  Target: SCNA; (-) strand; PAM type: YTN; PAM sequence: TTT
ttaaatgtgtcgattattgc

SEQ ID NO: 59274 - DNA, 20 bp, Artificial Sequence
  Description of Artificial Sequence: Synthetic oligonucleotide
  Target: SCNA; (-) strand; PAM type: YTN; PAM sequence: CTA
cagaaatgtttttaaatgtg

SEQ ID NO: 59275 - DNA, 20 bp, Artificial Sequence
  Description of Artificial Sequence: Synthetic oligonucleotide
  Target: SCNA; (-) strand; PAM type: YTN; PAM sequence: TTC
tacagaaatgtttttaaatg

SEQ ID NO: 59276 - DNA, 20 bp, Artificial Sequence
  Description of Artificial Sequence: Synthetic oligonucleotide
  Target: SCNA; (-) strand; PAM type: YTN; PAM sequence: CTA
gagaaatcagttctacagaa

SEQ ID NO: 59277 - DNA, 20 bp, Artificial Sequence
  Description of Artificial Sequence: Synthetic oligonucleotide
  Target: SCNA; (-) strand; PAM type: YTN; PAM sequence: CTA
ctagagaaatcagttctaca

SEQ ID NO: 59278 - DNA, 20 bp, Artificial Sequence
  Description of Artificial Sequence: Synthetic oligonucleotide
  Target: SCNA; (-) strand; PAM type: YTN; PAM sequence: TTA
aaggtcagcagagaccctac

SEQ ID NO: 59279 - DNA, 20 bp, Artificial Sequence
  Description of Artificial Sequence: Synthetic oligonucleotide
  Target: SCNA; (-) strand; PAM type: YTN; PAM sequence: CTC
aaggggaaaaatagaggtta

SEQ ID NO: 59280 - DNA, 20 bp, Artificial Sequence
  Description of Artificial Sequence: Synthetic oligonucleotide
  Target: SCNA; (-) strand; PAM type: YTN; PAM sequence: TTG
gaatgtcagtgagtagagag

SEQ ID NO: 59281 - DNA, 20 bp, Artificial Sequence
  Description of Artificial Sequence: Synthetic oligonucleotide
  Target: SCNA; (-) strand; PAM type: YTN; PAM sequence: TTT
ggaatgtcagtgagtagaga

SEQ ID NO: 59282 - DNA, 20 bp, Artificial Sequence
  Description of Artificial Sequence: Synthetic oligonucleotide
  Target: SCNA; (-) strand; PAM type: YTN; PAM sequence: TTG
tcacccgtcatttggaatgt

SEQ ID NO: 59283 - DNA, 20 bp, Artificial Sequence
  Description of Artificial Sequence: Synthetic oligonucleotide
  Target: SCNA; (-) strand; PAM type: YTN; PAM sequence: TTT
gtcacccgtcatttggaatg

SEQ ID NO: 59284 - DNA, 20 bp, Artificial Sequence
  Description of Artificial Sequence: Synthetic oligonucleotide
  Target: SCNA; (-) strand; PAM type: YTN; PAM sequence: TTT
tgtcacccgtcatttggaat

SEQ ID NO: 59285 - DNA, 20 bp, Artificial Sequence
  Description of Artificial Sequence: Synthetic oligonucleotide
  Target: SCNA; (-) strand; PAM type: YTN; PAM sequence: TTG
ttttgtcacccgtcatttgg

SEQ ID NO: 59286 - DNA, 20 bp, Artificial Sequence
  Description of Artificial Sequence: Synthetic oligonucleotide
  Target: SCNA; (-) strand; PAM type: YTN; PAM sequence: TTT
gttttgtcacccgtcatttg

SEQ ID NO: 59287 - DNA, 20 bp, Artificial Sequence
  Description of Artificial Sequence: Synthetic oligonucleotide
  Target: SCNA; (-) strand; PAM type: YTN; PAM sequence: TTT
tgttttgtcacccgtcattt

SEQ ID NO: 59288 - DNA, 20 bp, Artificial Sequence
  Description of Artificial Sequence: Synthetic oligonucleotide
  Target: SCNA; (-) strand; PAM type: YTN; PAM sequence: CTT
ttgttttgtcacccgtcatt

SEQ ID NO: 59289 - DNA, 20 bp, Artificial Sequence
  Description of Artificial Sequence: Synthetic oligonucleotide
  Target: SCNA; (-) strand; PAM type: YTN; PAM sequence: TTC
cttttgttttgtcacccgtc

SEQ ID NO: 59290 - DNA, 20 bp, Artificial Sequence
  Description of Artificial Sequence: Synthetic oligonucleotide
  Target: SCNA; (-) strand; PAM type: YTN; PAM sequence: TTT
ccttttgttttgtcacccgt

SEQ ID NO: 59291 - DNA, 20 bp, Artificial Sequence
  Description of Artificial Sequence: Synthetic oligonucleotide
  Target: SCNA; (-) strand; PAM type: YTN; PAM sequence: TTT
tccttttgttttgtcacccg

SEQ ID NO: 59292 - DNA, 20 bp, Artificial Sequence
  Description of Artificial Sequence: Synthetic oligonucleotide
  Target: SCNA; (-) strand; PAM type: YTN; PAM sequence: CTT
ttccttttgttttgtcaccc

SEQ ID NO: 59293 - DNA, 20 bp, Artificial Sequence
  Description of Artificial Sequence: Synthetic oligonucleotide
  Target: SCNA; (-) strand; PAM type: YTN; PAM sequence: CTC
ttttccttttgttttgtcac

SEQ ID NO: 59294 - DNA, 20 bp, Artificial Sequence
  Description of Artificial Sequence: Synthetic oligonucleotide
  Target: SCNA; (-) strand; PAM type: YTN; PAM sequence: CTA
atatgagtgtgtctcttttc

SEQ ID NO: 59295 - DNA, 20 bp, Artificial Sequence
  Description of Artificial Sequence: Synthetic oligonucleotide
  Target: SCNA; (-) strand; PAM type: YTN; PAM sequence: TTA
gacccaaaatgtactaatat

SEQ ID NO: 59296 - DNA, 20 bp, Artificial Sequence
  Description of Artificial Sequence: Synthetic oligonucleotide
  Target: SCNA; (-) strand; PAM type: YTN; PAM sequence: TTA
ttagacccaaaatgtactaa

SEQ ID NO: 59297 - DNA, 20 bp, Artificial Sequence
  Description of Artificial Sequence: Synthetic oligonucleotide
  Target: SCNA; (-) strand; PAM type: YTN; PAM sequence: TTT
attagacccaaaatgtacta

SEQ ID NO: 59298 - DNA, 20 bp, Artificial Sequence
  Description of Artificial Sequence: Synthetic oligonucleotide
  Target: SCNA; (-) strand; PAM type: YTN; PAM sequence: TTA
ccatttattagacccaaaat

SEQ ID NO: 59299 - DNA, 20 bp, Artificial Sequence
  Description of Artificial Sequence: Synthetic oligonucleotide
  Target: SCNA; (-) strand; PAM type: YTN; PAM sequence: TTG
ccgaaaaacagttaccattt

SEQ ID NO: 59300 - DNA, 20 bp, Artificial Sequence
  Description of Artificial Sequence: Synthetic oligonucleotide
  Target: SCNA; (-) strand; PAM type: YTN; PAM sequence: CTC
aattgccgaaaaacagttac

SEQ ID NO: 59301 - DNA, 20 bp, Artificial Sequence
  Description of Artificial Sequence: Synthetic oligonucleotide
  Target: SCNA; (-) strand; PAM type: YTN; PAM sequence: TTC
aaagaactcaattgccgaaa

SEQ ID NO: 59302 - DNA, 20 bp, Artificial Sequence
  Description of Artificial Sequence: Synthetic oligonucleotide
  Target: SCNA; (-) strand; PAM type: YTN; PAM sequence: TTT
caaagaactcaattgccgaa

SEQ ID NO: 59303 - DNA, 20 bp, Artificial Sequence
  Description of Artificial Sequence: Synthetic oligonucleotide
  Target: SCNA; (-) strand; PAM type: YTN; PAM sequence: CTG
atttcaaagaactcaattgc

SEQ ID NO: 59304 - DNA, 20 bp, Artificial Sequence
  Description of Artificial Sequence: Synthetic oligonucleotide
  Target: SCNA; (-) strand; PAM type: YTN; PAM sequence: CTA
tgaaataatataaagaaaaa

SEQ ID NO: 59305 - DNA, 20 bp, Artificial Sequence
  Description of Artificial Sequence: Synthetic oligonucleotide
  Target: SCNA; (-) strand; PAM type: YTN; PAM sequence: CTA
ctatgaaataatataaagaa

SEQ ID NO: 59306 - DNA, 20 bp, Artificial Sequence
  Description of Artificial Sequence: Synthetic oligonucleotide
  Target: SCNA; (-) strand; PAM type: YTN; PAM sequence: TTA
tctactatgaaataatataa

SEQ ID NO: 59307 - DNA, 20 bp, Artificial Sequence
  Description of Artificial Sequence: Synthetic oligonucleotide
  Target: SCNA; (-) strand; PAM type: YTN; PAM sequence: TTA
ttatctactatgaaataata

SEQ ID NO: 59308 - DNA, 20 bp, Artificial Sequence
  Description of Artificial Sequence: Synthetic oligonucleotide
  Target: SCNA; (-) strand; PAM type: YTN; PAM sequence: TTT
attatctactatgaaataat

SEQ ID NO: 59309 - DNA, 20 bp, Artificial Sequence
  Description of Artificial Sequence: Synthetic oligonucleotide
  Target: SCNA; (-) strand; PAM type: YTN; PAM sequence: TTA
tttattatctactatgaaat

SEQ ID NO: 59310 - DNA, 20 bp, Artificial Sequence
  Description of Artificial Sequence: Synthetic oligonucleotide
  Target: SCNA; (-) strand; PAM type: YTN; PAM sequence: CTA
aattatttattatctactat

SEQ ID NO: 59311 - DNA, 20 bp, Artificial Sequence
  Description of Artificial Sequence: Synthetic oligonucleotide
  Target: SCNA; (-) strand; PAM type: YTN; PAM sequence: TTC
taaattatttattatctact

SEQ ID NO: 59312 - DNA, 20 bp, Artificial Sequence
  Description of Artificial Sequence: Synthetic oligonucleotide
  Target: SCNA; (-) strand; PAM type: YTN; PAM sequence: TTA
gtatattctaaattatttat

SEQ ID NO: 59313 - DNA, 20 bp, Artificial Sequence
  Description of Artificial Sequence: Synthetic oligonucleotide
  Target: SCNA; (-) strand; PAM type: YTN; PAM sequence: TTT
agtatattctaaattattta

SEQ ID NO: 59314 - DNA, 20 bp, Artificial Sequence
  Description of Artificial Sequence: Synthetic oligonucleotide
  Target: SCNA; (-) strand; PAM type: YTN; PAM sequence: TTT
tagtatattctaaattattt

SEQ ID NO: 59315 - DNA, 20 bp, Artificial Sequence
  Description of Artificial Sequence: Synthetic oligonucleotide
  Target: SCNA; (-) strand; PAM type: YTN; PAM sequence: TTC
attttagtatattctaaatt

SEQ ID NO: 59316 - DNA, 20 bp, Artificial Sequence
  Description of Artificial Sequence: Synthetic oligonucleotide
  Target: SCNA; (-) strand; PAM type: YTN; PAM sequence: CTA
aattcattttagtatattct

SEQ ID NO: 59317 - DNA, 20 bp, Artificial Sequence
  Description of Artificial Sequence: Synthetic oligonucleotide
  Target: SCNA; (-) strand; PAM type: YTN; PAM sequence: TTA
gaggtagacactaaattcat

SEQ ID NO: 59318 - DNA, 20 bp, Artificial Sequence
  Description of Artificial Sequence: Synthetic oligonucleotide
  Target: SCNA; (-) strand; PAM type: YTN; PAM sequence: TTA
atgcagacattagaggtaga

SEQ ID NO: 59319 - DNA, 20 bp, Artificial Sequence
  Description of Artificial Sequence: Synthetic oligonucleotide
  Target: SCNA; (-) strand; PAM type: YTN; PAM sequence: TTA
tattaatgcagacattagag

SEQ ID NO: 59320 - DNA, 20 bp, Artificial Sequence
  Description of Artificial Sequence: Synthetic oligonucleotide
  Target: SCNA; (-) strand; PAM type: YTN; PAM sequence: TTT
atattaatgcagacattaga

SEQ ID NO: 59321 - DNA, 20 bp, Artificial Sequence
  Description of Artificial Sequence: Synthetic oligonucleotide
  Target: SCNA; (-) strand; PAM type: YTN; PAM sequence: TTA
tttatattaatgcagacatt

SEQ ID NO: 59322 - DNA, 20 bp, Artificial Sequence
  Description of Artificial Sequence: Synthetic oligonucleotide
  Target: SCNA; (-) strand; PAM type: YTN; PAM sequence: CTA
ttatttatattaatgcagac

SEQ ID NO: 59323 - DNA, 20 bp, Artificial Sequence
  Description of Artificial Sequence: Synthetic oligonucleotide
  Target: SCNA; (-) strand; PAM type: YTN; PAM sequence: CTA
aagtcaaatataaacctatt

SEQ ID NO: 59324 - DNA, 20 bp, Artificial Sequence
  Description of Artificial Sequence: Synthetic oligonucleotide
  Target: SCNA; (-) strand; PAM type: YTN; PAM sequence: TTA
aagtagctaaagtcaaatat

SEQ ID NO: 59325 - DNA, 20 bp, Artificial Sequence
  Description of Artificial Sequence: Synthetic oligonucleotide
  Target: SCNA; (-) strand; PAM type: YTN; PAM sequence: TTT
aaagtagctaaagtcaaata

SEQ ID NO: 59326 - DNA, 20 bp, Artificial Sequence
  Description of Artificial Sequence: Synthetic oligonucleotide
  Target: SCNA; (-) strand; PAM type: YTN; PAM sequence: TTT
taaagtagctaaagtcaaat

SEQ ID NO: 59327 - DNA, 20 bp, Artificial Sequence
  Description of Artificial Sequence: Synthetic oligonucleotide
  Target: SCNA; (-) strand; PAM type: YTN; PAM sequence: TTT
ttaaagtagctaaagtcaaa

SEQ ID NO: 59328 - DNA, 20 bp, Artificial Sequence
  Description of Artificial Sequence: Synthetic oligonucleotide
  Target: SCNA; (-) strand; PAM type: YTN; PAM sequence: TTA
tttttaaagtagctaaagtc

SEQ ID NO: 59329 - DNA, 20 bp, Artificial Sequence
  Description of Artificial Sequence: Synthetic oligonucleotide
  Target: SCNA; (-) strand; PAM type: YTN; PAM sequence: TTT
atttttaaagtagctaaagt

SEQ ID NO: 59330 - DNA, 20 bp, Artificial Sequence
  Description of Artificial Sequence: Synthetic oligonucleotide
  Target: SCNA; (-) strand; PAM type: YTN; PAM sequence: TTT
tatttttaaagtagctaaag

SEQ ID NO: 59331 - DNA, 20 bp, Artificial Sequence
  Description of Artificial Sequence: Synthetic oligonucleotide
  Target: SCNA; (-) strand; PAM type: YTN; PAM sequence: TTG
gaattttatttttaaagtag

SEQ ID NO: 59332 - DNA, 20 bp, Artificial Sequence
  Description of Artificial Sequence: Synthetic oligonucleotide
  Target: SCNA; (-) strand; PAM type: YTN; PAM sequence: TTT
ggaattttatttttaaagta

SEQ ID NO: 59333 - DNA, 20 bp, Artificial Sequence
  Description of Artificial Sequence: Synthetic oligonucleotide
  Target: SCNA; (-) strand; PAM type: YTN; PAM sequence: TTT
tggaattttatttttaaagt

SEQ ID NO: 59334 - DNA, 20 bp, Artificial Sequence
  Description of Artificial Sequence: Synthetic oligonucleotide
  Target: SCNA; (-) strand; PAM type: YTN; PAM sequence: TTT
ttggaattttatttttaaag

SEQ ID NO: 59335 - DNA, 20 bp, Artificial Sequence
  Description of Artificial Sequence: Synthetic oligonucleotide
  Target: SCNA; (-) strand; PAM type: YTN; PAM sequence: CTT
tttggaattttatttttaaa

SEQ ID NO: 59336 - DNA, 20 bp, Artificial Sequence
  Description of Artificial Sequence: Synthetic oligonucleotide
  Target: SCNA; (-) strand; PAM type: YTN; PAM sequence: TTC
ctttttggaattttattttt

SEQ ID NO: 59337 - DNA, 20 bp, Artificial Sequence
  Description of Artificial Sequence: Synthetic oligonucleotide
  Target: SCNA; (-) strand; PAM type: YTN; PAM sequence: TTT
cctttttggaattttatttt

SEQ ID NO: 59338 - DNA, 20 bp, Artificial Sequence
  Description of Artificial Sequence: Synthetic oligonucleotide
  Target: SCNA; (-) strand; PAM type: YTN; PAM sequence: TTG
gtatcacatttcctttttgg

SEQ ID NO: 59339 - DNA, 20 bp, Artificial Sequence
  Description of Artificial Sequence: Synthetic oligonucleotide
  Target: SCNA; (-) strand; PAM type: YTN; PAM sequence: CTA
aaagttggtatcacatttcc

SEQ ID NO: 59340 - DNA, 20 bp, Artificial Sequence
  Description of Artificial Sequence: Synthetic oligonucleotide
  Target: SCNA; (-) strand; PAM type: YTN; PAM sequence: TTC
taaaagttggtatcacattt

SEQ ID NO: 59341 - DNA, 20 bp, Artificial Sequence
  Description of Artificial Sequence: Synthetic oligonucleotide
  Target: SCNA; (-) strand; PAM type: YTN; PAM sequence: CTA
ttctaaaagttggtatcaca

SEQ ID NO: 59342 - DNA, 20 bp, Artificial Sequence
  Description of Artificial Sequence: Synthetic oligonucleotide
  Target: SCNA; (-) strand; PAM type: YTN; PAM sequence: CTA
tatctattctaaaagttggt

SEQ ID NO: 59343 - DNA, 20 bp, Artificial Sequence
  Description of Artificial Sequence: Synthetic oligonucleotide
  Target: SCNA; (-) strand; PAM type: YTN; PAM sequence: TTG
gctatatctattctaaaagt

SEQ ID NO: 59344 - DNA, 20 bp, Artificial Sequence
  Description of Artificial Sequence: Synthetic oligonucleotide
  Target: SCNA; (-) strand; PAM type: YTN; PAM sequence: TTT
ggctatatctattctaaaag

SEQ ID NO: 59345 - DNA, 20 bp, Artificial Sequence
  Description of Artificial Sequence: Synthetic oligonucleotide
  Target: SCNA; (-) strand; PAM type: YTN; PAM sequence: TTA
gatttggctatatctattct

SEQ ID NO: 59346 - DNA, 20 bp, Artificial Sequence
  Description of Artificial Sequence: Synthetic oligonucleotide
  Target: SCNA; (-) strand; PAM type: YTN; PAM sequence: TTA
atgtcaaaggttagatttgg

SEQ ID NO: 59347 - DNA, 20 bp, Artificial Sequence
  Description of Artificial Sequence: Synthetic oligonucleotide
  Target: SCNA; (-) strand; PAM type: YTN; PAM sequence: TTT
aatgtcaaaggttagatttg

SEQ ID NO: 59348 - DNA, 20 bp, Artificial Sequence
  Description of Artificial Sequence: Synthetic oligonucleotide
  Target: SCNA; (-) strand; PAM type: YTN; PAM sequence: TTG
tttaatgtcaaaggttagat

SEQ ID NO: 59349 - DNA, 20 bp, Artificial Sequence
  Description of Artificial Sequence: Synthetic oligonucleotide
  Target: SCNA; (-) strand; PAM type: YTN; PAM sequence: TTT
gtttaatgtcaaaggttaga

SEQ ID NO: 59350 - DNA, 20 bp, Artificial Sequence
  Description of Artificial Sequence: Synthetic oligonucleotide
  Target: SCNA; (-) strand; PAM type: YTN; PAM sequence: TTT
tgtttaatgtcaaaggttag

SEQ ID NO: 59351 - DNA, 20 bp, Artificial Sequence
  Description of Artificial Sequence: Synthetic oligonucleotide
  Target: SCNA; (-) strand; PAM type: YTN; PAM sequence: TTA
taattttgtttaatgtcaaa

SEQ ID NO: 59352 - DNA, 20 bp, Artificial Sequence
  Description of Artificial Sequence: Synthetic oligonucleotide
  Target: SCNA; (-) strand; PAM type: YTN; PAM sequence: TTT
ataattttgtttaatgtcaa

SEQ ID NO: 59353 - DNA, 20 bp, Artificial Sequence
  Description of Artificial Sequence: Synthetic oligonucleotide
  Target: SCNA; (-) strand; PAM type: YTN; PAM sequence: TTT
tataattttgtttaatgtca

SEQ ID NO: 59354 - DNA, 20 bp, Artificial Sequence
  Description of Artificial Sequence: Synthetic oligonucleotide
  Target: SCNA; (-) strand; PAM type: YTN; PAM sequence: TTA
attttataattttgtttaat

SEQ ID NO: 59355 - DNA, 20 bp, Artificial Sequence
  Description of Artificial Sequence: Synthetic oligonucleotide
  Target: SCNA; (-) strand; PAM type: YTN; PAM sequence: TTC
aaaaccatatattaatttta

SEQ ID NO: 59356 - DNA, 20 bp, Artificial Sequence
  Description of Artificial Sequence: Synthetic oligonucleotide
  Target: SCNA; (-) strand; PAM type: YTN; PAM sequence: TTG
tataacaattcaaaaccata

SEQ ID NO: 59357 - DNA, 20 bp, Artificial Sequence
  Description of Artificial Sequence: Synthetic oligonucleotide
  Target: SCNA; (-) strand; PAM type: YTN; PAM sequence: CTT
gtataacaattcaaaaccat

SEQ ID NO: 59358 - DNA, 20 bp, Artificial Sequence
  Description of Artificial Sequence: Synthetic oligonucleotide
  Target: SCNA; (-) strand; PAM type: YTN; PAM sequence: TTA
cttgtataacaattcaaaac

SEQ ID NO: 59359 - DNA, 20 bp, Artificial Sequence
  Description of Artificial Sequence: Synthetic oligonucleotide
  Target: SCNA; (-) strand; PAM type: YTN; PAM sequence: TTT
acttgtataacaattcaaaa

SEQ ID NO: 59360 - DNA, 20 bp, Artificial Sequence
  Description of Artificial Sequence: Synthetic oligonucleotide
  Target: SCNA; (-) strand; PAM type: YTN; PAM sequence: TTA
aatatacatatttacttgta

SEQ ID NO: 59361 - DNA, 20 bp, Artificial Sequence
  Description of Artificial Sequence: Synthetic oligonucleotide
  Target: SCNA; (-) strand; PAM type: YTN; PAM sequence: TTT
aaatatacatatttacttgt

SEQ ID NO: 59362 - DNA, 20 bp, Artificial Sequence
  Description of Artificial Sequence: Synthetic oligonucleotide
  Target: SCNA; (-) strand; PAM type: YTN; PAM sequence: TTA
catatgtatatttaaatata

SEQ ID NO: 59363 - DNA, 20 bp, Artificial Sequence
  Description of Artificial Sequence: Synthetic oligonucleotide
  Target: SCNA; (-) strand; PAM type: YTN; PAM sequence: TTT
acatatgtatatttaaatat

SEQ ID NO: 59364 - DNA, 20 bp, Artificial Sequence
  Description of Artificial Sequence: Synthetic oligonucleotide
  Target: SCNA; (-) strand; PAM type: YTN; PAM sequence: TTA
aatccatatttacatatgta

SEQ ID NO: 59365 - DNA, 20 bp, Artificial Sequence
  Description of Artificial Sequence: Synthetic oligonucleotide
  Target: SCNA; (-) strand; PAM type: YTN; PAM sequence: TTT
aaatccatatttacatatgt

SEQ ID NO: 59366 - DNA, 20 bp, Artificial Sequence
  Description of Artificial Sequence: Synthetic oligonucleotide
  Target: SCNA; (-) strand; PAM type: YTN; PAM sequence: CTT
taaatccatatttacatatg

SEQ ID NO: 59367 - DNA, 20 bp, Artificial Sequence
  Description of Artificial Sequence: Synthetic oligonucleotide
  Target: SCNA; (-) strand; PAM type: YTN; PAM sequence: TTC
tttaaatccatatttacata

SEQ ID NO: 59368 - DNA, 20 bp, Artificial Sequence
  Description of Artificial Sequence: Synthetic oligonucleotide
  Target: SCNA; (-) strand; PAM type: YTN; PAM sequence: TTT
ctttaaatccatatttacat

SEQ ID NO: 59369 - DNA, 20 bp, Artificial Sequence
  Description of Artificial Sequence: Synthetic oligonucleotide
  Target: SCNA; (-) strand; PAM type: YTN; PAM sequence: TTT
tctttaaatccatatttaca

SEQ ID NO: 59370 - DNA, 20 bp, Artificial Sequence
  Description of Artificial Sequence: Synthetic oligonucleotide
  Target: SCNA; (-) strand; PAM type: YTN; PAM sequence: TTA
ttttctttaaatccatattt

SEQ ID NO: 59371 - DNA, 20 bp, Artificial Sequence
  Description of Artificial Sequence: Synthetic oligonucleotide
  Target: SCNA; (-) strand; PAM type: YTN; PAM sequence: TTT
attttctttaaatccatatt

SEQ ID NO: 59372 - DNA, 20 bp, Artificial Sequence
  Description of Artificial Sequence: Synthetic oligonucleotide
  Target: SCNA; (-) strand; PAM type: YTN; PAM sequence: TTC
aaatttattttctttaaatc

SEQ ID NO: 59373 - DNA, 20 bp, Artificial Sequence
  Description of Artificial Sequence: Synthetic oligonucleotide
  Target: SCNA; (-) strand; PAM type: YTN; PAM sequence: TTT
caaatttattttctttaaat

SEQ ID NO: 59374 - DNA, 20 bp, Artificial Sequence
  Description of Artificial Sequence: Synthetic oligonucleotide
  Target: SCNA; (-) strand; PAM type: YTN; PAM sequence: TTG
tttcaaatttattttcttta

SEQ ID NO: 59375 - DNA, 20 bp, Artificial Sequence
  Description of Artificial Sequence: Synthetic oligonucleotide
  Target: SCNA; (-) strand; PAM type: YTN; PAM sequence: TTA
gtaaattgtttcaaatttat

SEQ ID NO: 59376 - DNA, 20 bp, Artificial Sequence
  Description of Artificial Sequence: Synthetic oligonucleotide
  Target: SCNA; (-) strand; PAM type: YTN; PAM sequence: CTT
agtaaattgtttcaaattta

SEQ ID NO: 59377 - DNA, 20 bp, Artificial Sequence
  Description of Artificial Sequence: Synthetic oligonucleotide
  Target: SCNA; (-) strand; PAM type: YTN; PAM sequence: TTC
cttagtaaattgtttcaaat

SEQ ID NO: 59378 - DNA, 20 bp, Artificial Sequence
  Description of Artificial Sequence: Synthetic oligonucleotide
  Target: SCNA; (-) strand; PAM type: YTN; PAM sequence: TTT
ccttagtaaattgtttcaaa

SEQ ID NO: 59379 - DNA, 20 bp, Artificial Sequence
  Description of Artificial Sequence: Synthetic oligonucleotide
  Target: SCNA; (-) strand; PAM type: YTN; PAM sequence: TTA
aatttccttagtaaattgtt

SEQ ID NO: 59380 - DNA, 20 bp, Artificial Sequence
  Description of Artificial Sequence: Synthetic oligonucleotide
  Target: SCNA; (-) strand; PAM type: YTN; PAM sequence: TTT
aaatttccttagtaaattgt

SEQ ID NO: 59381 - DNA, 20 bp, Artificial Sequence
  Description of Artificial Sequence: Synthetic oligonucleotide
  Target: SCNA; (-) strand; PAM type: YTN; PAM sequence: TTA
tgatttaaatttccttagta

SEQ ID NO: 59382 - DNA, 20 bp, Artificial Sequence
  Description of Artificial Sequence: Synthetic oligonucleotide
  Target: SCNA; (-) strand; PAM type: YTN; PAM sequence: TTC
aacatattatgatttaaatt

SEQ ID NO: 59383 - DNA, 20 bp, Artificial Sequence
  Description of Artificial Sequence: Synthetic oligonucleotide
  Target: SCNA; (-) strand; PAM type: YTN; PAM sequence: TTT
caacatattatgatttaaat

SEQ ID NO: 59384 - DNA, 20 bp, Artificial Sequence
  Description of Artificial Sequence: Synthetic oligonucleotide
  Target: SCNA; (-) strand; PAM type: YTN; PAM sequence: TTT
tcaacatattatgatttaaa

SEQ ID NO: 59385 - DNA, 20 bp, Artificial Sequence
  Description of Artificial Sequence: Synthetic oligonucleotide
  Target: SCNA; (-) strand; PAM type: YTN; PAM sequence: CTA
attttcaacatattatgatt

SEQ ID NO: 59386 - DNA, 20 bp, Artificial Sequence
  Description of Artificial Sequence: Synthetic oligonucleotide
  Target: SCNA; (-) strand; PAM type: YTN; PAM sequence: TTA
catcataatgaacaaaacta

SEQ ID NO: 59387 - DNA, 20 bp, Artificial Sequence
  Description of Artificial Sequence: Synthetic oligonucleotide
  Target: SCNA; (-) strand; PAM type: YTN; PAM sequence: TTA
ttacatcataatgaacaaaa

SEQ ID NO: 59388 - DNA, 20 bp, Artificial Sequence
  Description of Artificial Sequence: Synthetic oligonucleotide
  Target: SCNA; (-) strand; PAM type: YTN; PAM sequence: TTT
attacatcataatgaacaaa

SEQ ID NO: 59389 - DNA, 20 bp, Artificial Sequence
  Description of Artificial Sequence: Synthetic oligonucleotide
  Target: SCNA; (-) strand; PAM type: YTN; PAM sequence: TTA
taaatttattacatcataat

SEQ ID NO: 59390 - DNA, 20 bp, Artificial Sequence
  Description of Artificial Sequence: Synthetic oligonucleotide
  Target: SCNA; (-) strand; PAM type: YTN; PAM sequence: CTT
ataaatttattacatcataa

SEQ ID NO: 59391 - DNA, 20 bp, Artificial Sequence
  Description of Artificial Sequence: Synthetic oligonucleotide
  Target: SCNA; (-) strand; PAM type: YTN; PAM sequence: TTC
ttataaatttattacatcat

SEQ ID NO: 59392 - DNA, 20 bp, Artificial Sequence
  Description of Artificial Sequence: Synthetic oligonucleotide
  Target: SCNA; (-) strand; PAM type: YTN; PAM sequence: TTG
attcttataaatttattaca

SEQ ID NO: 59393 - DNA, 20 bp, Artificial Sequence
  Description of Artificial Sequence: Synthetic oligonucleotide
  Target: SCNA; (-) strand; PAM type: YTN; PAM sequence: TTT
gattcttataaatttattac

SEQ ID NO: 59394 - DNA, 20 bp, Artificial Sequence
  Description of Artificial Sequence: Synthetic oligonucleotide
  Target: SCNA; (-) strand; PAM type: YTN; PAM sequence: TTT
tgattcttataaatttatta

SEQ ID NO: 59395 - DNA, 20 bp, Artificial Sequence
  Description of Artificial Sequence: Synthetic oligonucleotide
  Target: SCNA; (-) strand; PAM type: YTN; PAM sequence: CTG
aaggttttgattcttataaa

SEQ ID NO: 59396 - DNA, 20 bp, Artificial Sequence
  Description of Artificial Sequence: Synthetic oligonucleotide
  Target: SCNA; (-) strand; PAM type: YTN; PAM sequence: TTC
tgaaggttttgattcttata

SEQ ID NO: 59397 - DNA, 20 bp, Artificial Sequence
  Description of Artificial Sequence: Synthetic oligonucleotide
  Target: SCNA; (-) strand; PAM type: YTN; PAM sequence: TTT
ctgaaggttttgattcttat

SEQ ID NO: 59398 - DNA, 20 bp, Artificial Sequence
  Description of Artificial Sequence: Synthetic oligonucleotide
  Target: SCNA; (-) strand; PAM type: YTN; PAM sequence: TTT
tctgaaggttttgattctta

SEQ ID NO: 59399 - DNA, 20 bp, Artificial Sequence
  Description of Artificial Sequence: Synthetic oligonucleotide
  Target: SCNA; (-) strand; PAM type: YTN; PAM sequence: CTG
gagattttctgaaggttttg

SEQ ID NO: 59400 - DNA, 20 bp, Artificial Sequence
  Description of Artificial Sequence: Synthetic oligonucleotide
  Target: SCNA; (-) strand; PAM type: YTN; PAM sequence: CTA
acactggagattttctgaag

SEQ ID NO: 59401 - DNA, 20 bp, Artificial Sequence
  Description of Artificial Sequence: Synthetic oligonucleotide
  Target: SCNA; (-) strand; PAM type: YTN; PAM sequence: TTC
taacactggagattttctga

SEQ ID NO: 59402 - DNA, 20 bp, Artificial Sequence
  Description of Artificial Sequence: Synthetic oligonucleotide
  Target: SCNA; (-) strand; PAM type: YTN; PAM sequence: TTT
ctaacactggagattttctg

SEQ ID NO: 59403 - DNA, 20 bp, Artificial Sequence
  Description of Artificial Sequence: Synthetic oligonucleotide
  Target: SCNA; (-) strand; PAM type: YTN; PAM sequence: TTC
atgcaagtatagtataaaga

SEQ ID NO: 59404 - DNA, 20 bp, Artificial Sequence
  Description of Artificial Sequence: Synthetic oligonucleotide
  Target: SCNA; (-) strand; PAM type: YTN; PAM sequence: TTT
catgcaagtatagtataaag

SEQ ID NO: 59405 - DNA, 20 bp, Artificial Sequence
  Description of Artificial Sequence: Synthetic oligonucleotide
  Target: SCNA; (-) strand; PAM type: YTN; PAM sequence: TTT
tcatgcaagtatagtataaa

SEQ ID NO: 59406 - DNA, 20 bp, Artificial Sequence
  Description of Artificial Sequence: Synthetic oligonucleotide
  Target: SCNA; (-) strand; PAM type: YTN; PAM sequence: TTT
ttcatgcaagtatagtataa

SEQ ID NO: 59407 - DNA, 20 bp, Artificial Sequence
  Description of Artificial Sequence: Synthetic oligonucleotide
  Target: SCNA; (-) strand; PAM type: YTN; PAM sequence: CTA
tttttcatgcaagtatagta

SEQ ID NO: 59408 - DNA, 20 bp, Artificial Sequence
  Description of Artificial Sequence: Synthetic oligonucleotide
  Target: SCNA; (-) strand; PAM type: YTN; PAM sequence: TTA
cctatttttcatgcaagtat

SEQ ID NO: 59409 - DNA, 20 bp, Artificial Sequence
  Description of Artificial Sequence: Synthetic oligonucleotide
  Target: SCNA; (-) strand; PAM type: YTN; PAM sequence: CTA
tgatataaagttacctattt

SEQ ID NO: 59410 - DNA, 20 bp, Artificial Sequence
  Description of Artificial Sequence: Synthetic oligonucleotide
  Target: SCNA; (-) strand; PAM type: YTN; PAM sequence: TTA
aaaataaactatgatataaa

SEQ ID NO: 59411 - DNA, 20 bp, Artificial Sequence
  Description of Artificial Sequence: Synthetic oligonucleotide
  Target: SCNA; (-) strand; PAM type: YTN; PAM sequence: TTT
aaaaataaactatgatataa

SEQ ID NO: 59412 - DNA, 20 bp, Artificial Sequence
  Description of Artificial Sequence: Synthetic oligonucleotide
  Target: SCNA; (-) strand; PAM type: YTN; PAM sequence: CTT
taaaaataaactatgatata

SEQ ID NO: 59413 - DNA, 20 bp, Artificial Sequence
  Description of Artificial Sequence: Synthetic oligonucleotide
  Target: SCNA; (-) strand; PAM type: YTN; PAM sequence: TTC
aggtactttaaaaataaact

SEQ ID NO: 59414 - DNA, 20 bp, Artificial Sequence
  Description of Artificial Sequence: Synthetic oligonucleotide
  Target: SCNA; (-) strand; PAM type: YTN; PAM sequence: TTT
caggtactttaaaaataaac

SEQ ID NO: 59415 - DNA, 20 bp, Artificial Sequence
  Description of Artificial Sequence: Synthetic oligonucleotide
  Target: SCNA; (-) strand; PAM type: YTN; PAM sequence: TTT
tcaggtactttaaaaataaa

SEQ ID NO: 59416 - DNA, 20 bp, Artificial Sequence
  Description of Artificial Sequence: Synthetic oligonucleotide
  Target: SCNA; (-) strand; PAM type: YTN; PAM sequence: TTT
ttcaggtactttaaaaataa

SEQ ID NO: 59417 - DNA, 20 bp, Artificial Sequence
  Description of Artificial Sequence: Synthetic oligonucleotide
  Target: SCNA; (-) strand; PAM type: YTN; PAM sequence: TTT
tttcaggtactttaaaaata

SEQ ID NO: 59418 - DNA, 20 bp, Artificial Sequence
  Description of Artificial Sequence: Synthetic oligonucleotide
  Target: SCNA; (-) strand; PAM type: YTN; PAM sequence: CTG
aatgatatgttttttcaggt

SEQ ID NO: 59419 - DNA, 20 bp, Artificial Sequence
  Description of Artificial Sequence: Synthetic oligonucleotide
  Target: SCNA; (-) strand; PAM type: YTN; PAM sequence: TTA
ctgaatgatatgttttttca

SEQ ID NO: 59420 - DNA, 20 bp, Artificial Sequence
  Description of Artificial Sequence: Synthetic oligonucleotide
  Target: SCNA; (-) strand; PAM type: YTN; PAM sequence: CTT
actgaatgatatgttttttc

SEQ ID NO: 59421 - DNA, 20 bp, Artificial Sequence
  Description of Artificial Sequence: Synthetic oligonucleotide
  Target: SCNA; (-) strand; PAM type: YTN; PAM sequence: TTA
aacttactgaatgatatgtt

SEQ ID NO: 59422 - DNA, 20 bp, Artificial Sequence
  Description of Artificial Sequence: Synthetic oligonucleotide
  Target: SCNA; (-) strand; PAM type: YTN; PAM sequence: TTA
attaaacttactgaatgata

SEQ ID NO: 59423 - DNA, 20 bp, Artificial Sequence
  Description of Artificial Sequence: Synthetic oligonucleotide
  Target: SCNA; (-) strand; PAM type: YTN; PAM sequence: TTT
aattaaacttactgaatgat

SEQ ID NO: 59424 - DNA, 20 bp, Artificial Sequence
  Description of Artificial Sequence: Synthetic oligonucleotide
  Target: SCNA; (-) strand; PAM type: YTN; PAM sequence: TTA
tagaaatatatgaaaatgtg

SEQ ID NO: 59425 - DNA, 20 bp, Artificial Sequence
  Description of Artificial Sequence: Synthetic oligonucleotide
  Target: SCNA; (-) strand; PAM type: YTN; PAM sequence: TTA
atgcatcatattatagaaat

SEQ ID NO: 59426 - DNA, 20 bp, Artificial Sequence
  Description of Artificial Sequence: Synthetic oligonucleotide
  Target: SCNA; (-) strand; PAM type: YTN; PAM sequence: CTT
aatgcatcatattatagaaa

SEQ ID NO: 59427 - DNA, 20 bp, Artificial Sequence
  Description of Artificial Sequence: Synthetic oligonucleotide
  Target: SCNA; (-) strand; PAM type: YTN; PAM sequence: TTA
tcaacttaatgcatcatatt

SEQ ID NO: 59428 - DNA, 20 bp, Artificial Sequence
  Description of Artificial Sequence: Synthetic oligonucleotide
  Target: SCNA; (-) strand; PAM type: YTN; PAM sequence: TTC
agttatcaacttaatgcatc

SEQ ID NO: 59429 - DNA, 20 bp, Artificial Sequence
  Description of Artificial Sequence: Synthetic oligonucleotide
  Target: SCNA; (-) strand; PAM type: YTN; PAM sequence: TTT
cagttatcaacttaatgcat

SEQ ID NO: 59430 - DNA, 20 bp, Artificial Sequence
  Description of Artificial Sequence: Synthetic oligonucleotide
  Target: SCNA; (-) strand; PAM type: YTN; PAM sequence: TTA
tttcagttatcaacttaatg

SEQ ID NO: 59431 - DNA, 20 bp, Artificial Sequence
  Description of Artificial Sequence: Synthetic oligonucleotide
  Target: SCNA; (-) strand; PAM type: YTN; PAM sequence: CTC
aggaaattatttcagttatc

SEQ ID NO: 59432 - DNA, 20 bp, Artificial Sequence
  Description of Artificial Sequence: Synthetic oligonucleotide
  Target: SCNA; (-) strand; PAM type: YTN; PAM sequence: TTG
atctcaggaaattatttcag

SEQ ID NO: 59433 - DNA, 20 bp, Artificial Sequence
  Description of Artificial Sequence: Synthetic oligonucleotide
  Target: SCNA; (-) strand; PAM type: YTN; PAM sequence: TTT
gatctcaggaaattatttca

SEQ ID NO: 59434 - DNA, 20 bp, Artificial Sequence
  Description of Artificial Sequence: Synthetic oligonucleotide
  Target: SCNA; (-) strand; PAM type: YTN; PAM sequence: CTG
tttgatctcaggaaattatt

SEQ ID NO: 59435 - DNA, 20 bp, Artificial Sequence
  Description of Artificial Sequence: Synthetic oligonucleotide
  Target: SCNA; (-) strand; PAM type: YTN; PAM sequence: CTG
gctgtttgatctcaggaaat

SEQ ID NO: 59436 - DNA, 20 bp, Artificial Sequence
  Description of Artificial Sequence: Synthetic oligonucleotide
  Target: SCNA; (-) strand; PAM type: YTN; PAM sequence: TTA
aatcctggctgtttgatctc

SEQ ID NO: 59437 - DNA, 20 bp, Artificial Sequence
  Description of Artificial Sequence: Synthetic oligonucleotide
  Target: SCNA; (-) strand; PAM type: YTN; PAM sequence: CTT
aaatcctggctgtttgatct

SEQ ID NO: 59438 - DNA, 20 bp, Artificial Sequence
  Description of Artificial Sequence: Synthetic oligonucleotide
  Target: SCNA; (-) strand; PAM type: YTN; PAM sequence: TTA
gataatatcaatgaaaaatc

SEQ ID NO: 59439 - DNA, 20 bp, Artificial Sequence
  Description of Artificial Sequence: Synthetic oligonucleotide
  Target: SCNA; (-) strand; PAM type: YTN; PAM sequence: CTA
gttagataatatcaatgaaa

SEQ ID NO: 59440 - DNA, 20 bp, Artificial Sequence
  Description of Artificial Sequence: Synthetic oligonucleotide
  Target: SCNA; (-) strand; PAM type: YTN; PAM sequence: TTA
tcctagttagataatatcaa

SEQ ID NO: 59441 - DNA, 20 bp, Artificial Sequence
  Description of Artificial Sequence: Synthetic oligonucleotide
  Target: SCNA; (-) strand; PAM type: YTN; PAM sequence: TTC
aaataaaataaattatccta

SEQ ID NO: 59442 - DNA, 20 bp, Artificial Sequence
  Description of Artificial Sequence: Synthetic oligonucleotide
  Target: SCNA; (-) strand; PAM type: YTN; PAM sequence: CTA
caaagttcaaataaaataaa

SEQ ID NO: 59443 - DNA, 20 bp, Artificial Sequence
  Description of Artificial Sequence: Synthetic oligonucleotide
  Target: SCNA; (-) strand; PAM type: YTN; PAM sequence: CTA
cctacaaagttcaaataaaa

SEQ ID NO: 59444 - DNA, 20 bp, Artificial Sequence
  Description of Artificial Sequence: Synthetic oligonucleotide
  Target: SCNA; (-) strand; PAM type: YTN; PAM sequence: TTC
tacctacaaagttcaaataa

SEQ ID NO: 59445 - DNA, 20 bp, Artificial Sequence
  Description of Artificial Sequence: Synthetic oligonucleotide
  Target: SCNA; (-) strand; PAM type: YTN; PAM sequence: TTT
ctacctacaaagttcaaata

SEQ ID NO: 59446 - DNA, 20 bp, Artificial Sequence
  Description of Artificial Sequence: Synthetic oligonucleotide
  Target: SCNA; (-) strand; PAM type: YTN; PAM sequence: CTT
tctacctacaaagttcaaat

SEQ ID NO: 59447 - DNA, 20 bp, Artificial Sequence
  Description of Artificial Sequence: Synthetic oligonucleotide
  Target: SCNA; (-) strand; PAM type: YTN; PAM sequence: CTG
ggaactttctacctacaaag

SEQ ID NO: 59448 - DNA, 20 bp, Artificial Sequence
  Description of Artificial Sequence: Synthetic oligonucleotide
  Target: SCNA; (-) strand; PAM type: YTN; PAM sequence: TTG
ggctgggaactttctaccta

SEQ ID NO: 59449 - DNA, 20 bp, Artificial Sequence
  Description of Artificial Sequence: Synthetic oligonucleotide
  Target: SCNA; (-) strand; PAM type: YTN; PAM sequence: CTT
gggctgggaactttctacct

SEQ ID NO: 59450 - DNA, 20 bp, Artificial Sequence
  Description of Artificial Sequence: Synthetic oligonucleotide
  Target: SCNA; (-) strand; PAM type: YTN; PAM sequence: TTC
agtaaacttgggctgggaac

SEQ ID NO: 59451 - DNA, 20 bp, Artificial Sequence
  Description of Artificial Sequence: Synthetic oligonucleotide
  Target: SCNA; (-) strand; PAM type: YTN; PAM sequence: CTT
cagtaaacttgggctgggaa

SEQ ID NO: 59452 - DNA, 20 bp, Artificial Sequence
  Description of Artificial Sequence: Synthetic oligonucleotide
  Target: SCNA; (-) strand; PAM type: YTN; PAM sequence: TTC
ggtggggcaggggagaaata

SEQ ID NO: 59453 - DNA, 20 bp, Artificial Sequence
  Description of Artificial Sequence: Synthetic oligonucleotide
  Target: SCNA; (-) strand; PAM type: YTN; PAM sequence: TTT
cggtggggcaggggagaaat

SEQ ID NO: 59454 - DNA, 20 bp, Artificial Sequence
  Description of Artificial Sequence: Synthetic oligonucleotide
  Target: SCNA; (-) strand; PAM type: YTN; PAM sequence: TTT
tcggtggggcaggggagaaa

SEQ ID NO: 59455 - DNA, 20 bp, Artificial Sequence
  Description of Artificial Sequence: Synthetic oligonucleotide
  Target: SCNA; (-) strand; PAM type: YTN; PAM sequence: TTT
ttcggtggggcaggggagaa

SEQ ID NO: 59456 - DNA, 20 bp, Artificial Sequence
  Description of Artificial Sequence: Synthetic oligonucleotide
  Target: SCNA; (-) strand; PAM type: YTN; PAM sequence: TTT
tttcggtggggcaggggaga

SEQ ID NO: 59457 - DNA, 20 bp, Artificial Sequence
  Description of Artificial Sequence: Synthetic oligonucleotide
  Target: SCNA; (-) strand; PAM type: YTN; PAM sequence: TTT
ttttcggtggggcaggggag

SEQ ID NO: 59458 - DNA, 20 bp, Artificial Sequence
  Description of Artificial Sequence: Synthetic oligonucleotide
  Target: SCNA; (-) strand; PAM type: YTN; PAM sequence: TTT
tttttcggtggggcagggga

SEQ ID NO: 59459 - DNA, 20 bp, Artificial Sequence
  Description of Artificial Sequence: Synthetic oligonucleotide
  Target: SCNA; (-) strand; PAM type: YTN; PAM sequence: TTT
ttttttcggtggggcagggg

SEQ ID NO: 59460 - DNA, 20 bp, Artificial Sequence
  Description of Artificial Sequence: Synthetic oligonucleotide
  Target: SCNA; (-) strand; PAM type: YTN; PAM sequence: TTT
tttttttcggtggggcaggg

SEQ ID NO: 59461 - DNA, 20 bp, Artificial Sequence
  Description of Artificial Sequence: Synthetic oligonucleotide
  Target: SCNA; (-) strand; PAM type: YTN; PAM sequence: TTT
ttttttttcggtggggcagg

SEQ ID NO: 59462 - DNA, 20 bp, Artificial Sequence
  Description of Artificial Sequence: Synthetic oligonucleotide
  Target: SCNA; (-) strand; PAM type: YTN; PAM sequence: CTT
tttttttttcggtggggcag

SEQ ID NO: 59463 - DNA, 20 bp, Artificial Sequence
  Description of Artificial Sequence: Synthetic oligonucleotide
  Target: SCNA; (-) strand; PAM type: YTN; PAM sequence: TTA
gctttttttttttcggtggg

SEQ ID NO: 59464 - DNA, 20 bp, Artificial Sequence
  Description of Artificial Sequence: Synthetic oligonucleotide
  Target: SCNA; (-) strand; PAM type: YTN; PAM sequence: TTC
atcccattagcttttttttt

SEQ ID NO: 59465 - DNA, 20 bp, Artificial Sequence
  Description of Artificial Sequence: Synthetic oligonucleotide
  Target: SCNA; (-) strand; PAM type: YTN; PAM sequence: CTA
aattcatcccattagctttt

SEQ ID NO: 59466 - DNA, 20 bp, Artificial Sequence
  Description of Artificial Sequence: Synthetic oligonucleotide
  Target: SCNA; (-) strand; PAM type: YTN; PAM sequence: TTC
ccctaaattcatcccattag

SEQ ID NO: 59467 - DNA, 20 bp, Artificial Sequence
  Description of Artificial Sequence: Synthetic oligonucleotide
  Target: SCNA; (-) strand; PAM type: YTN; PAM sequence: TTT
cccctaaattcatcccatta

SEQ ID NO: 59468 - DNA, 20 bp, Artificial Sequence
  Description of Artificial Sequence: Synthetic oligonucleotide
  Target: SCNA; (-) strand; PAM type: YTN; PAM sequence: TTA
aagaaacaatttcccctaaa

SEQ ID NO: 59469 - DNA, 20 bp, Artificial Sequence
  Description of Artificial Sequence: Synthetic oligonucleotide
  Target: SCNA; (-) strand; PAM type: YTN; PAM sequence: CTA
atattaaagaaacaatttcc

SEQ ID NO: 59470 - DNA, 20 bp, Artificial Sequence
  Description of Artificial Sequence: Synthetic oligonucleotide
  Target: SCNA; (-) strand; PAM type: YTN; PAM sequence: TTC
taatattaaagaaacaattt

SEQ ID NO: 59471 - DNA, 20 bp, Artificial Sequence
  Description of Artificial Sequence: Synthetic oligonucleotide
  Target: SCNA; (-) strand; PAM type: YTN; PAM sequence: CTT
ctaatattaaagaaacaatt

SEQ ID NO: 59472 - DNA, 20 bp, Artificial Sequence
  Description of Artificial Sequence: Synthetic oligonucleotide
  Target: SCNA; (-) strand; PAM type: YTN; PAM sequence: TTA
tcttctaatattaaagaaac

SEQ ID NO: 59473 - DNA, 20 bp, Artificial Sequence
  Description of Artificial Sequence: Synthetic oligonucleotide
  Target: SCNA; (-) strand; PAM type: YTN; PAM sequence: CTA
atattatcttctaatattaa

SEQ ID NO: 59474 - DNA, 20 bp, Artificial Sequence
  Description of Artificial Sequence: Synthetic oligonucleotide
  Target: SCNA; (-) strand; PAM type: YTN; PAM sequence: TTA
catagtacctaatattatct

SEQ ID NO: 59475 - DNA, 20 bp, Artificial Sequence
  Description of Artificial Sequence: Synthetic oligonucleotide
  Target: SCNA; (-) strand; PAM type: YTN; PAM sequence: TTA
ttacatagtacctaatatta

SEQ ID NO: 59476 - DNA, 20 bp, Artificial Sequence
  Description of Artificial Sequence: Synthetic oligonucleotide
  Target: SCNA; (-) strand; PAM type: YTN; PAM sequence: TTA
atgcagggaaacaagaaatt

SEQ ID NO: 59477 - DNA, 20 bp, Artificial Sequence
  Description of Artificial Sequence: Synthetic oligonucleotide
  Target: SCNA; (-) strand; PAM type: YTN; PAM sequence: CTT
aatgcagggaaacaagaaat

SEQ ID NO: 59478 - DNA, 20 bp, Artificial Sequence
  Description of Artificial Sequence: Synthetic oligonucleotide
  Target: SCNA; (-) strand; PAM type: YTN; PAM sequence: CTA
caagtcttaatgcagggaaa

SEQ ID NO: 59479 - DNA, 20 bp, Artificial Sequence
  Description of Artificial Sequence: Synthetic oligonucleotide
  Target: SCNA; (-) strand; PAM type: YTN; PAM sequence: TTG
ctacaagtcttaatgcaggg

SEQ ID NO: 59480 - DNA, 20 bp, Artificial Sequence
  Description of Artificial Sequence: Synthetic oligonucleotide
  Target: SCNA; (-) strand; PAM type: YTN; PAM sequence: CTT
gctacaagtcttaatgcagg

SEQ ID NO: 59481 - DNA, 20 bp, Artificial Sequence
  Description of Artificial Sequence: Synthetic oligonucleotide
  Target: SCNA; (-) strand; PAM type: YTN; PAM sequence: TTC
ttgctacaagtcttaatgca

SEQ ID NO: 59482 - DNA, 20 bp, Artificial Sequence
  Description of Artificial Sequence: Synthetic oligonucleotide
  Target: SCNA; (-) strand; PAM type: YTN; PAM sequence: TTG
ttcttgctacaagtcttaat

SEQ ID NO: 59483 - DNA, 20 bp, Artificial Sequence
  Description of Artificial Sequence: Synthetic oligonucleotide
  Target: SCNA; (-) strand; PAM type: YTN; PAM sequence: TTA
attgttcttgctacaagtct

SEQ ID NO: 59484 - DNA, 20 bp, Artificial Sequence
  Description of Artificial Sequence: Synthetic oligonucleotide
  Target: SCNA; (-) strand; PAM type: YTN; PAM sequence: TTG
ttaattgttcttgctacaag

SEQ ID NO: 59485 - DNA, 20 bp, Artificial Sequence
  Description of Artificial Sequence: Synthetic oligonucleotide
  Target: SCNA; (-) strand; PAM type: YTN; PAM sequence: CTA
attgttaattgttcttgcta

SEQ ID NO: 59486 - DNA, 20 bp, Artificial Sequence
  Description of Artificial Sequence: Synthetic oligonucleotide
  Target: SCNA; (-) strand; PAM type: YTN; PAM sequence: CTA
actaattgttaattgttctt

SEQ ID NO: 59487 - DNA, 20 bp, Artificial Sequence
  Description of Artificial Sequence: Synthetic oligonucleotide
  Target: SCNA; (-) strand; PAM type: YTN; PAM sequence: TTA
agtgctaactaattgttaat

SEQ ID NO: 59488 - DNA, 20 bp, Artificial Sequence
  Description of Artificial Sequence: Synthetic oligonucleotide
  Target: SCNA; (-) strand; PAM type: YTN; PAM sequence: TTA
tgggtacatattaagtgcta

SEQ ID NO: 59489 - DNA, 20 bp, Artificial Sequence
  Description of Artificial Sequence: Synthetic oligonucleotide
  Target: SCNA; (-) strand; PAM type: YTN; PAM sequence: TTA
ttatgggtacatattaagtg

SEQ ID NO: 59490 - DNA, 20 bp, Artificial Sequence
  Description of Artificial Sequence: Synthetic oligonucleotide
  Target: SCNA; (-) strand; PAM type: YTN; PAM sequence: TTT
attatgggtacatattaagt

SEQ ID NO: 59491 - DNA, 20 bp, Artificial Sequence
  Description of Artificial Sequence: Synthetic oligonucleotide
  Target: SCNA; (-) strand; PAM type: YTN; PAM sequence: CTG
atgtaaaatgtttattatgg

SEQ ID NO: 59492 - DNA, 20 bp, Artificial Sequence
  Description of Artificial Sequence: Synthetic oligonucleotide
  Target: SCNA; (-) strand; PAM type: YTN; PAM sequence: TTA
tgcctgatgtaaaatgttta

SEQ ID NO: 59493 - DNA, 20 bp, Artificial Sequence
  Description of Artificial Sequence: Synthetic oligonucleotide
  Target: SCNA; (-) strand; PAM type: YTN; PAM sequence: TTG
catattatgcctgatgtaaa

SEQ ID NO: 59494 - DNA, 20 bp, Artificial Sequence
  Description of Artificial Sequence: Synthetic oligonucleotide
  Target: SCNA; (-) strand; PAM type: YTN; PAM sequence: TTT
gcatattatgcctgatgtaa

SEQ ID NO: 59495 - DNA, 20 bp, Artificial Sequence
  Description of Artificial Sequence: Synthetic oligonucleotide
  Target: SCNA; (-) strand; PAM type: YTN; PAM sequence: TTA
aagagagggagaataatttg

SEQ ID NO: 59496 - DNA, 20 bp, Artificial Sequence
  Description of Artificial Sequence: Synthetic oligonucleotide
  Target: SCNA; (-) strand; PAM type: YTN; PAM sequence: TTC
aatggttaaagagagggaga

SEQ ID NO: 59497 - DNA, 20 bp, Artificial Sequence
  Description of Artificial Sequence: Synthetic oligonucleotide
  Target: SCNA; (-) strand; PAM type: YTN; PAM sequence: CTT
caatggttaaagagagggag

SEQ ID NO: 59498 - DNA, 20 bp, Artificial Sequence
  Description of Artificial Sequence: Synthetic oligonucleotide
  Target: SCNA; (-) strand; PAM type: YTN; PAM sequence: TTA
cacttcaatggttaaagaga

SEQ ID NO: 59499 - DNA, 20 bp, Artificial Sequence
  Description of Artificial Sequence: Synthetic oligonucleotide
  Target: SCNA; (-) strand; PAM type: YTN; PAM sequence: TTA
tgagaagaaataagataatt

SEQ ID NO: 59500 - DNA, 20 bp, Artificial Sequence
  Description of Artificial Sequence: Synthetic oligonucleotide
  Target: SCNA; (-) strand; PAM type: YTN; PAM sequence: CTA
attatgagaagaaataagat

SEQ ID NO: 59501 - DNA, 20 bp, Artificial Sequence
  Description of Artificial Sequence: Synthetic oligonucleotide
  Target: SCNA; (-) strand; PAM type: YTN; PAM sequence: TTA
agtctaattatgagaagaaa

SEQ ID NO: 59502 - DNA, 20 bp, Artificial Sequence
  Description of Artificial Sequence: Synthetic oligonucleotide
  Target: SCNA; (-) strand; PAM type: YTN; PAM sequence: CTT
aagtctaattatgagaagaa

SEQ ID NO: 59503 - DNA, 20 bp, Artificial Sequence
  Description of Artificial Sequence: Synthetic oligonucleotide
  Target: SCNA; (-) strand; PAM type: YTN; PAM sequence: TTA
atataaagtgcttaagtcta

SEQ ID NO: 59504 - DNA, 20 bp, Artificial Sequence
  Description of Artificial Sequence: Synthetic oligonucleotide
  Target: SCNA; (-) strand; PAM type: YTN; PAM sequence: TTT
aatataaagtgcttaagtct

SEQ ID NO: 59505 - DNA, 20 bp, Artificial Sequence
  Description of Artificial Sequence: Synthetic oligonucleotide
  Target: SCNA; (-) strand; PAM type: YTN; PAM sequence: TTA
tttaatataaagtgcttaag

SEQ ID NO: 59506 - DNA, 20 bp, Artificial Sequence
  Description of Artificial Sequence: Synthetic oligonucleotide
  Target: SCNA; (-) strand; PAM type: YTN; PAM sequence: TTG
aatagggttatttaatataa

SEQ ID NO: 59507 - DNA, 20 bp, Artificial Sequence
  Description of Artificial Sequence: Synthetic oligonucleotide
  Target: SCNA; (-) strand; PAM type: YTN; PAM sequence: TTT
gaatagggttatttaatata

SEQ ID NO: 59508 - DNA, 20 bp, Artificial Sequence
  Description of Artificial Sequence: Synthetic oligonucleotide
  Target: SCNA; (-) strand; PAM type: YTN; PAM sequence: TTT
tgaatagggttatttaatat

SEQ ID NO: 59509 - DNA, 20 bp, Artificial Sequence
  Description of Artificial Sequence: Synthetic oligonucleotide
  Target: SCNA; (-) strand; PAM type: YTN; PAM sequence: TTT
ttgaatagggttatttaata

SEQ ID NO: 59510 - DNA, 20 bp, Artificial Sequence
  Description of Artificial Sequence: Synthetic oligonucleotide
  Target: SCNA; (-) strand; PAM type: YTN; PAM sequence: CTT
tttgaatagggttatttaat

SEQ ID NO: 59511 - DNA, 20 bp, Artificial Sequence
  Description of Artificial Sequence: Synthetic oligonucleotide
  Target: SCNA; (-) strand; PAM type: YTN; PAM sequence: TTA
actttttgaatagggttatt

SEQ ID NO: 59512 - DNA, 20 bp, Artificial Sequence
  Description of Artificial Sequence: Synthetic oligonucleotide
  Target: SCNA; (-) strand; PAM type: YTN; PAM sequence: CTC
ccacatcagataaatgaatt

SEQ ID NO: 59513 - DNA, 20 bp, Artificial Sequence
  Description of Artificial Sequence: Synthetic oligonucleotide
  Target: SCNA; (-) strand; PAM type: YTN; PAM sequence: CTC
tcccacatcagataaatgaa

SEQ ID NO: 59514 - DNA, 20 bp, Artificial Sequence
  Description of Artificial Sequence: Synthetic oligonucleotide
  Target: SCNA; (-) strand; PAM type: YTN; PAM sequence: TTC
ctctcccacatcagataaat

SEQ ID NO: 59515 - DNA, 20 bp, Artificial Sequence
  Description of Artificial Sequence: Synthetic oligonucleotide
  Target: SCNA; (-) strand; PAM type: YTN; PAM sequence: CTA
tcataatcattcctctccca

SEQ ID NO: 59516 - DNA, 20 bp, Artificial Sequence
  Description of Artificial Sequence: Synthetic oligonucleotide
  Target: SCNA; (-) strand; PAM type: YTN; PAM sequence: CTG
ctatcataatcattcctctc

SEQ ID NO: 59517 - DNA, 20 bp, Artificial Sequence
  Description of Artificial Sequence: Synthetic oligonucleotide
  Target: SCNA; (-) strand; PAM type: YTN; PAM sequence: TTG
ggataaatcggctgctatca

SEQ ID NO: 59518 - DNA, 20 bp, Artificial Sequence
  Description of Artificial Sequence: Synthetic oligonucleotide
  Target: SCNA; (-) strand; PAM type: YTN; PAM sequence: CTA
tgagaaacacattgggataa

SEQ ID NO: 59519 - DNA, 20 bp, Artificial Sequence
  Description of Artificial Sequence: Synthetic oligonucleotide
  Target: SCNA; (-) strand; PAM type: YTN; PAM sequence: CTA
gtatggctatgagaaacaca

SEQ ID NO: 59520 - DNA, 20 bp, Artificial Sequence
  Description of Artificial Sequence: Synthetic oligonucleotide
  Target: SCNA; (-) strand; PAM type: YTN; PAM sequence: CTG
tcataactagtatggctatg

SEQ ID NO: 59521 - DNA, 20 bp, Artificial Sequence
  Description of Artificial Sequence: Synthetic oligonucleotide
  Target: SCNA; (-) strand; PAM type: YTN; PAM sequence: CTG
gcagtagtgaaataaccaaa

SEQ ID NO: 59522 - DNA, 20 bp, Artificial Sequence
  Description of Artificial Sequence: Synthetic oligonucleotide
  Target: SCNA; (-) strand; PAM type: YTN; PAM sequence: TTG
cacccatggaccaccctggc

SEQ ID NO: 59523 - DNA, 20 bp, Artificial Sequence
  Description of Artificial Sequence: Synthetic oligonucleotide
  Target: SCNA; (-) strand; PAM type: YTN; PAM sequence: TTA
cagcgattgcacccatggac

SEQ ID NO: 59524 - DNA, 20 bp, Artificial Sequence
  Description of Artificial Sequence: Synthetic oligonucleotide
  Target: SCNA; (-) strand; PAM type: YTN; PAM sequence: TTT
acagcgattgcacccatgga

SEQ ID NO: 59525 - DNA, 20 bp, Artificial Sequence
  Description of Artificial Sequence: Synthetic oligonucleotide
  Target: SCNA; (-) strand; PAM type: YTN; PAM sequence: TTC
agcatgtgcaatatttacag

SEQ ID NO: 59526 - DNA, 20 bp, Artificial Sequence
  Description of Artificial Sequence: Synthetic oligonucleotide
  Target: SCNA; (-) strand; PAM type: YTN; PAM sequence: TTT
cagcatgtgcaatatttaca

SEQ ID NO: 59527 - DNA, 20 bp, Artificial Sequence
  Description of Artificial Sequence: Synthetic oligonucleotide
  Target: SCNA; (-) strand; PAM type: YTN; PAM sequence: CTA
ggcagtaaggacatggtgat

SEQ ID NO: 59528 - DNA, 20 bp, Artificial Sequence
  Description of Artificial Sequence: Synthetic oligonucleotide
  Target: SCNA; (-) strand; PAM type: YTN; PAM sequence: TTG
ctaggcagtaaggacatggt

SEQ ID NO: 59529 - DNA, 20 bp, Artificial Sequence
  Description of Artificial Sequence: Synthetic oligonucleotide
  Target: SCNA; (-) strand; PAM type: YTN; PAM sequence: CTA
tgggaaatgttgctaggcag

SEQ ID NO: 59530 - DNA, 20 bp, Artificial Sequence
  Description of Artificial Sequence: Synthetic oligonucleotide
  Target: SCNA; (-) strand; PAM type: YTN; PAM sequence: TTC
cacagaaaactatgggaaat

SEQ ID NO: 59531 - DNA, 20 bp, Artificial Sequence
  Description of Artificial Sequence: Synthetic oligonucleotide
  Target: SCNA; (-) strand; PAM type: YTN; PAM sequence: CTA
gtgttccacagaaaactatg

SEQ ID NO: 59532 - DNA, 20 bp, Artificial Sequence
  Description of Artificial Sequence: Synthetic oligonucleotide
  Target: SCNA; (-) strand; PAM type: YTN; PAM sequence: TTG
aatgaaactagtgttccaca

SEQ ID NO: 59533 - DNA, 20 bp, Artificial Sequence
  Description of Artificial Sequence: Synthetic oligonucleotide
  Target: SCNA; (-) strand; PAM type: YTN; PAM sequence: CTA
gggttgaatgaaactagtgt

SEQ ID NO: 59534 - DNA, 20 bp, Artificial Sequence
  Description of Artificial Sequence: Synthetic oligonucleotide
  Target: SCNA; (-) strand; PAM type: YTN; PAM sequence: TTA
ctagggttgaatgaaactag

SEQ ID NO: 59535 - DNA, 20 bp, Artificial Sequence
  Description of Artificial Sequence: Synthetic oligonucleotide
  Target: SCNA; (-) strand; PAM type: YTN; PAM sequence: TTA
gttactagggttgaatgaaa

SEQ ID NO: 59536 - DNA, 20 bp, Artificial Sequence
  Description of Artificial Sequence: Synthetic oligonucleotide
  Target: SCNA; (-) strand; PAM type: YTN; PAM sequence: TTC
attagttactagggttgaat

SEQ ID NO: 59537 - DNA, 20 bp, Artificial Sequence
  Description of Artificial Sequence: Synthetic oligonucleotide
  Target: SCNA; (-) strand; PAM type: YTN; PAM sequence: CTT
cattagttactagggttgaa

SEQ ID NO: 59538 - DNA, 20 bp, Artificial Sequence
  Description of Artificial Sequence: Synthetic oligonucleotide
  Target: SCNA; (-) strand; PAM type: YTN; PAM sequence: TTC
ttcattagttactagggttg

SEQ ID NO: 59539 - DNA, 20 bp, Artificial Sequence
  Description of Artificial Sequence: Synthetic oligonucleotide
  Target: SCNA; (-) strand; PAM type: YTN; PAM sequence: TTT
cttcattagttactagggtt

SEQ ID NO: 59540 - DNA, 20 bp, Artificial Sequence
  Description of Artificial Sequence: Synthetic oligonucleotide
  Target: SCNA; (-) strand; PAM type: YTN; PAM sequence: CTT
tcttcattagttactagggt

SEQ ID NO: 59541 - DNA, 20 bp, Artificial Sequence
  Description of Artificial Sequence: Synthetic oligonucleotide
  Target: SCNA; (-) strand; PAM type: YTN; PAM sequence: TTG
aaaactttcttcattagtta

SEQ ID NO: 59542 - DNA, 20 bp, Artificial Sequence
  Description of Artificial Sequence: Synthetic oligonucleotide
  Target: SCNA; (-) strand; PAM type: YTN; PAM sequence: TTA
ttgaaaactttcttcattag

SEQ ID NO: 59543 - DNA, 20 bp, Artificial Sequence
  Description of Artificial Sequence: Synthetic oligonucleotide
  Target: SCNA; (-) strand; PAM type: YTN; PAM sequence: TTG
attattgaaaactttcttca

SEQ ID NO: 59544 - DNA, 20 bp, Artificial Sequence
  Description of Artificial Sequence: Synthetic oligonucleotide
  Target: SCNA; (-) strand; PAM type: YTN; PAM sequence: TTT
gattattgaaaactttcttc

SEQ ID NO: 59545 - DNA, 20 bp, Artificial Sequence
  Description of Artificial Sequence: Synthetic oligonucleotide
  Target: SCNA; (-) strand; PAM type: YTN; PAM sequence: TTT
tgattattgaaaactttctt

SEQ ID NO: 59546 - DNA, 20 bp, Artificial Sequence
  Description of Artificial Sequence: Synthetic oligonucleotide
  Target: SCNA; (-) strand; PAM type: YTN; PAM sequence: TTT
ttgattattgaaaactttct

SEQ ID NO: 59547 - DNA, 20 bp, Artificial Sequence
  Description of Artificial Sequence: Synthetic oligonucleotide
  Target: SCNA; (-) strand; PAM type: YTN; PAM sequence: CTT
tttgattattgaaaactttc

SEQ ID NO: 59548 - DNA, 20 bp, Artificial Sequence
  Description of Artificial Sequence: Synthetic oligonucleotide
  Target: SCNA; (-) strand; PAM type: YTN; PAM sequence: TTC
aaactttttgattattgaaa

SEQ ID NO: 59549 - DNA, 20 bp, Artificial Sequence
  Description of Artificial Sequence: Synthetic oligonucleotide
  Target: SCNA; (-) strand; PAM type: YTN; PAM sequence: TTA
ttcaaactttttgattattg

SEQ ID NO: 59550 - DNA, 20 bp, Artificial Sequence
  Description of Artificial Sequence: Synthetic oligonucleotide
  Target: SCNA; (-) strand; PAM type: YTN; PAM sequence: TTA
aaatcagggttattcaaact

SEQ ID NO: 59551 - DNA, 20 bp, Artificial Sequence
  Description of Artificial Sequence: Synthetic oligonucleotide
  Target: SCNA; (-) strand; PAM type: YTN; PAM sequence: TTA
catagttaaaatcagggtta

SEQ ID NO: 59552 - DNA, 20 bp, Artificial Sequence
  Description of Artificial Sequence: Synthetic oligonucleotide
  Target: SCNA; (-) strand; PAM type: YTN; PAM sequence: TTG
cattacatagttaaaatcag

SEQ ID NO: 59553 - DNA, 20 bp, Artificial Sequence
  Description of Artificial Sequence: Synthetic oligonucleotide
  Target: SCNA; (-) strand; PAM type: YTN; PAM sequence: TTT
gcattacatagttaaaatca

SEQ ID NO: 59554 - DNA, 20 bp, Artificial Sequence
  Description of Artificial Sequence: Synthetic oligonucleotide
  Target: SCNA; (-) strand; PAM type: YTN; PAM sequence: CTA
cagtaaagaaatttgcatta

SEQ ID NO: 59555 - DNA, 20 bp, Artificial Sequence
  Description of Artificial Sequence: Synthetic oligonucleotide
  Target: SCNA; (-) strand; PAM type: YTN; PAM sequence: CTG
agatgtcctacagtaaagaa

SEQ ID NO: 59556 - DNA, 20 bp, Artificial Sequence
  Description of Artificial Sequence: Synthetic oligonucleotide
  Target: SCNA; (-) strand; PAM type: YTN; PAM sequence: TTA
aggaatctgagatgtcctac

SEQ ID NO: 59557 - DNA, 20 bp, Artificial Sequence
  Description of Artificial Sequence: Synthetic oligonucleotide
  Target: SCNA; (-) strand; PAM type: YTN; PAM sequence: TTA
gcgtattaaggaatctgaga

SEQ ID NO: 59558 - DNA, 20 bp, Artificial Sequence
  Description of Artificial Sequence: Synthetic oligonucleotide
  Target: SCNA; (-) strand; PAM type: YTN; PAM sequence: TTT
agcgtattaaggaatctgag

SEQ ID NO: 59559 - DNA, 20 bp, Artificial Sequence
  Description of Artificial Sequence: Synthetic oligonucleotide
  Target: SCNA; (-) strand; PAM type: YTN; PAM sequence: CTT
tagcgtattaaggaatctga

SEQ ID NO: 59560 - DNA, 20 bp, Artificial Sequence
  Description of Artificial Sequence: Synthetic oligonucleotide
  Target: SCNA; (-) strand; PAM type: YTN; PAM sequence: CTC
tttagcgtattaaggaatct

SEQ ID NO: 59561 - DNA, 20 bp, Artificial Sequence
  Description of Artificial Sequence: Synthetic oligonucleotide
  Target: SCNA; (-) strand; PAM type: YTN; PAM sequence: TTC
tctttagcgtattaaggaat

SEQ ID NO: 59562 - DNA, 20 bp, Artificial Sequence
  Description of Artificial Sequence: Synthetic oligonucleotide
  Target: SCNA; (-) strand; PAM type: YTN; PAM sequence: TTT
ctctttagcgtattaaggaa

SEQ ID NO: 59563 - DNA, 20 bp, Artificial Sequence
  Description of Artificial Sequence: Synthetic oligonucleotide
  Target: SCNA; (-) strand; PAM type: YTN; PAM sequence: TTT
tctctttagcgtattaagga

SEQ ID NO: 59564 - DNA, 20 bp, Artificial Sequence
  Description of Artificial Sequence: Synthetic oligonucleotide
  Target: SCNA; (-) strand; PAM type: YTN; PAM sequence: TTA
ttttctctttagcgtattaa

SEQ ID NO: 59565 - DNA, 20 bp, Artificial Sequence
  Description of Artificial Sequence: Synthetic oligonucleotide
  Target: SCNA; (-) strand; PAM type: YTN; PAM sequence: TTT
attttctctttagcgtatta

SEQ ID NO: 59566 - DNA, 20 bp, Artificial Sequence
  Description of Artificial Sequence: Synthetic oligonucleotide
  Target: SCNA; (-) strand; PAM type: YTN; PAM sequence: CTT
tattttctctttagcgtatt

SEQ ID NO: 59567 - DNA, 20 bp, Artificial Sequence
  Description of Artificial Sequence: Synthetic oligonucleotide
  Target: SCNA; (-) strand; PAM type: YTN; PAM sequence: TTG
tatactttattttctcttta

SEQ ID NO: 59568 - DNA, 20 bp, Artificial Sequence
  Description of Artificial Sequence: Synthetic oligonucleotide
  Target: SCNA; (-) strand; PAM type: YTN; PAM sequence: TTT
gtatactttattttctcttt

SEQ ID NO: 59569 - DNA, 20 bp, Artificial Sequence
  Description of Artificial Sequence: Synthetic oligonucleotide
  Target: SCNA; (-) strand; PAM type: YTN; PAM sequence: CTT
tgtatactttattttctctt

SEQ ID NO: 59570 - DNA, 20 bp, Artificial Sequence
  Description of Artificial Sequence: Synthetic oligonucleotide
  Target: SCNA; (-) strand; PAM type: YTN; PAM sequence: TTG
ggagactttgtatactttat

SEQ ID NO: 59571 - DNA, 20 bp, Artificial Sequence
  Description of Artificial Sequence: Synthetic oligonucleotide
  Target: SCNA; (-) strand; PAM type: YTN; PAM sequence: TTG
tacaatgttgggagactttg

SEQ ID NO: 59572 - DNA, 20 bp, Artificial Sequence
  Description of Artificial Sequence: Synthetic oligonucleotide
  Target: SCNA; (-) strand; PAM type: YTN; PAM sequence: CTA
acattgtacaatgttgggag

SEQ ID NO: 59573 - DNA, 20 bp, Artificial Sequence
  Description of Artificial Sequence: Synthetic oligonucleotide
  Target: SCNA; (-) strand; PAM type: YTN; PAM sequence: TTC
taacattgtacaatgttggg

SEQ ID NO: 59574 - DNA, 20 bp, Artificial Sequence
  Description of Artificial Sequence: Synthetic oligonucleotide
  Target: SCNA; (-) strand; PAM type: YTN; PAM sequence: TTT
ctaacattgtacaatgttgg

SEQ ID NO: 59575 - DNA, 20 bp, Artificial Sequence
  Description of Artificial Sequence: Synthetic oligonucleotide
  Target: SCNA; (-) strand; PAM type: YTN; PAM sequence: TTA
agtttctaacattgtacaat

SEQ ID NO: 59576 - DNA, 20 bp, Artificial Sequence
  Description of Artificial Sequence: Synthetic oligonucleotide
  Target: SCNA; (-) strand; PAM type: YTN; PAM sequence: CTT
aagtttctaacattgtacaa

SEQ ID NO: 59577 - DNA, 20 bp, Artificial Sequence
  Description of Artificial Sequence: Synthetic oligonucleotide
  Target: SCNA; (-) strand; PAM type: YTN; PAM sequence: CTC
acaatcttaagtttctaaca

SEQ ID NO: 59578 - DNA, 20 bp, Artificial Sequence
  Description of Artificial Sequence: Synthetic oligonucleotide
  Target: SCNA; (-) strand; PAM type: YTN; PAM sequence: CTG
aaggacagtggctcacaatc

SEQ ID NO: 59579 - DNA, 20 bp, Artificial Sequence
  Description of Artificial Sequence: Synthetic oligonucleotide
  Target: SCNA; (-) strand; PAM type: YTN; PAM sequence: TTC
tgaaggacagtggctcacaa

SEQ ID NO: 59580 - DNA, 20 bp, Artificial Sequence
  Description of Artificial Sequence: Synthetic oligonucleotide
  Target: SCNA; (-) strand; PAM type: YTN; PAM sequence: TTT
ctgaaggacagtggctcaca

SEQ ID NO: 59581 - DNA, 20 bp, Artificial Sequence
  Description of Artificial Sequence: Synthetic oligonucleotide
  Target: SCNA; (-) strand; PAM type: YTN; PAM sequence: TTT
tctgaaggacagtggctcac

SEQ ID NO: 59582 - DNA, 20 bp, Artificial Sequence
  Description of Artificial Sequence: Synthetic oligonucleotide
  Target: SCNA; (-) strand; PAM type: YTN; PAM sequence: TTA
taaaatgttttctgaaggac

SEQ ID NO: 59583 - DNA, 20 bp, Artificial Sequence
  Description of Artificial Sequence: Synthetic oligonucleotide
  Target: SCNA; (-) strand; PAM type: YTN; PAM sequence: TTT
ataaaatgttttctgaagga

SEQ ID NO: 59584 - DNA, 20 bp, Artificial Sequence
  Description of Artificial Sequence: Synthetic oligonucleotide
  Target: SCNA; (-) strand; PAM type: YTN; PAM sequence: TTT
tataaaatgttttctgaagg

SEQ ID NO: 59585 - DNA, 20 bp, Artificial Sequence
  Description of Artificial Sequence: Synthetic oligonucleotide
  Target: SCNA; (-) strand; PAM type: YTN; PAM sequence: TTA
gacattttataaaatgtttt

SEQ ID NO: 59586 - DNA, 20 bp, Artificial Sequence
  Description of Artificial Sequence: Synthetic oligonucleotide
  Target: SCNA; (-) strand; PAM type: YTN; PAM sequence: TTG
tacaattagacattttataa

SEQ ID NO: 59587 - DNA, 20 bp, Artificial Sequence
  Description of Artificial Sequence: Synthetic oligonucleotide
  Target: SCNA; (-) strand; PAM type: YTN; PAM sequence: TTT
gtacaattagacattttata

SEQ ID NO: 59588 - DNA, 20 bp, Artificial Sequence
  Description of Artificial Sequence: Synthetic oligonucleotide
  Target: SCNA; (-) strand; PAM type: YTN; PAM sequence: CTG
aagtttgtacaattagacat

SEQ ID NO: 59589 - DNA, 20 bp, Artificial Sequence
  Description of Artificial Sequence: Synthetic oligonucleotide
  Target: SCNA; (-) strand; PAM type: YTN; PAM sequence: CTG
tgtgtgtgtgtgtgtgtgtg

SEQ ID NO: 59590 - DNA, 20 bp, Artificial Sequence
  Description of Artificial Sequence: Synthetic oligonucleotide
  Target: SCNA; (-) strand; PAM type: YTN; PAM sequence: TTC
cagaatgccaaaatgtaaac

SEQ ID NO: 59591 - DNA, 20 bp, Artificial Sequence
  Description of Artificial Sequence: Synthetic oligonucleotide
  Target: SCNA; (-) strand; PAM type: YTN; PAM sequence: TTT
ccagaatgccaaaatgtaaa

SEQ ID NO: 59592 - DNA, 20 bp, Artificial Sequence
  Description of Artificial Sequence: Synthetic oligonucleotide
  Target: SCNA; (-) strand; PAM type: YTN; PAM sequence: TTT
tccagaatgccaaaatgtaa

SEQ ID NO: 59593 - DNA, 20 bp, Artificial Sequence
  Description of Artificial Sequence: Synthetic oligonucleotide
  Target: SCNA; (-) strand; PAM type: YTN; PAM sequence: CTT
ttccagaatgccaaaatgta

SEQ ID NO: 59594 - DNA, 20 bp, Artificial Sequence
  Description of Artificial Sequence: Synthetic oligonucleotide
  Target: SCNA; (-) strand; PAM type: YTN; PAM sequence: TTA
gtcttttccagaatgccaaa

SEQ ID NO: 59595 - DNA, 20 bp, Artificial Sequence
  Description of Artificial Sequence: Synthetic oligonucleotide
  Target: SCNA; (-) strand; PAM type: YTN; PAM sequence: TTT
agtcttttccagaatgccaa

SEQ ID NO: 59596 - DNA, 20 bp, Artificial Sequence
  Description of Artificial Sequence: Synthetic oligonucleotide
  Target: SCNA; (-) strand; PAM type: YTN; PAM sequence: TTT
tagtcttttccagaatgcca

SEQ ID NO: 59597 - DNA, 20 bp, Artificial Sequence
  Description of Artificial Sequence: Synthetic oligonucleotide
  Target: SCNA; (-) strand; PAM type: YTN; PAM sequence: TTT
ttagtcttttccagaatgcc

SEQ ID NO: 59598 - DNA, 20 bp, Artificial Sequence
  Description of Artificial Sequence: Synthetic oligonucleotide
  Target: SCNA; (-) strand; PAM type: YTN; PAM sequence: TTT
tttagtcttttccagaatgc

SEQ ID NO: 59599 - DNA, 20 bp, Artificial Sequence
  Description of Artificial Sequence: Synthetic oligonucleotide
  Target: SCNA; (-) strand; PAM type: YTN; PAM sequence: TTT
ttttagtcttttccagaatg

SEQ ID NO: 59600 - DNA, 20 bp, Artificial Sequence
  Description of Artificial Sequence: Synthetic oligonucleotide
  Target: SCNA; (-) strand; PAM type: YTN; PAM sequence: CTG
catttttttagtcttttcca

SEQ ID NO: 59601 - DNA, 20 bp, Artificial Sequence
  Description of Artificial Sequence: Synthetic oligonucleotide
  Target: SCNA; (-) strand; PAM type: YTN; PAM sequence: CTG
tggagatgggctgcattttt

SEQ ID NO: 59602 - DNA, 20 bp, Artificial Sequence
  Description of Artificial Sequence: Synthetic oligonucleotide
  Target: SCNA; (-) strand; PAM type: YTN; PAM sequence: CTA
atggagactgtggagatggg

SEQ ID NO: 59603 - DNA, 20 bp, Artificial Sequence
  Description of Artificial Sequence: Synthetic oligonucleotide
  Target: SCNA; (-) strand; PAM type: YTN; PAM sequence: CTG
atgatctaatggagactgtg

SEQ ID NO: 59604 - DNA, 20 bp, Artificial Sequence
  Description of Artificial Sequence: Synthetic oligonucleotide
  Target: SCNA; (-) strand; PAM type: YTN; PAM sequence: CTG
tcacctgatgatctaatgga

SEQ ID NO: 59605 - DNA, 20 bp, Artificial Sequence
  Description of Artificial Sequence: Synthetic oligonucleotide
  Target: SCNA; (-) strand; PAM type: YTN; PAM sequence: TTA
ctgtcacctgatgatctaat

SEQ ID NO: 59606 - DNA, 20 bp, Artificial Sequence
  Description of Artificial Sequence: Synthetic oligonucleotide
  Target: SCNA; (-) strand; PAM type: YTN; PAM sequence: CTA
ttactgtcacctgatgatct

SEQ ID NO: 59607 - DNA, 20 bp, Artificial Sequence
  Description of Artificial Sequence: Synthetic oligonucleotide
  Target: SCNA; (-) strand; PAM type: YTN; PAM sequence: TTA
aagaacccaactattactgt

SEQ ID NO: 59608 - DNA, 20 bp, Artificial Sequence
  Description of Artificial Sequence: Synthetic oligonucleotide
  Target: SCNA; (-) strand; PAM type: YTN; PAM sequence: CTG
gagtcagtggtaaaaattaa

SEQ ID NO: 59609 - DNA, 20 bp, Artificial Sequence
  Description of Artificial Sequence: Synthetic oligonucleotide
  Target: SCNA; (-) strand; PAM type: YTN; PAM sequence: TTC
tggagtcagtggtaaaaatt

SEQ ID NO: 59610 - DNA, 20 bp, Artificial Sequence
  Description of Artificial Sequence: Synthetic oligonucleotide
  Target: SCNA; (-) strand; PAM type: YTN; PAM sequence: TTA
gaaagcagacaagcatgtgg

SEQ ID NO: 59611 - DNA, 20 bp, Artificial Sequence
  Description of Artificial Sequence: Synthetic oligonucleotide
  Target: SCNA; (-) strand; PAM type: YTN; PAM sequence: TTT
agaaagcagacaagcatgtg

SEQ ID NO: 59612 - DNA, 20 bp, Artificial Sequence
  Description of Artificial Sequence: Synthetic oligonucleotide
  Target: SCNA; (-) strand; PAM type: YTN; PAM sequence: TTG
aggaagaacccatgaggttt

SEQ ID NO: 59613 - DNA, 20 bp, Artificial Sequence
  Description of Artificial Sequence: Synthetic oligonucleotide
  Target: SCNA; (-) strand; PAM type: YTN; PAM sequence: TTA
gtagttgaggaagaacccat

SEQ ID NO: 59614 - DNA, 20 bp, Artificial Sequence
  Description of Artificial Sequence: Synthetic oligonucleotide
  Target: SCNA; (-) strand; PAM type: YTN; PAM sequence: TTT
agtagttgaggaagaaccca

SEQ ID NO: 59615 - DNA, 20 bp, Artificial Sequence
  Description of Artificial Sequence: Synthetic oligonucleotide
  Target: SCNA; (-) strand; PAM type: YTN; PAM sequence: TTC
catttagtagttgaggaaga

SEQ ID NO: 59616 - DNA, 20 bp, Artificial Sequence
  Description of Artificial Sequence: Synthetic oligonucleotide
  Target: SCNA; (-) strand; PAM type: YTN; PAM sequence: CTA
gatgaatggtgttccattta

SEQ ID NO: 59617 - DNA, 20 bp, Artificial Sequence
  Description of Artificial Sequence: Synthetic oligonucleotide
  Target: SCNA; (-) strand; PAM type: YTN; PAM sequence: CTG
aagacggtcaacctagatga

SEQ ID NO: 59618 - DNA, 20 bp, Artificial Sequence
  Description of Artificial Sequence: Synthetic oligonucleotide
  Target: SCNA; (-) strand; PAM type: YTN; PAM sequence: CTA
tctgaagacggtcaacctag

SEQ ID NO: 59619 - DNA, 20 bp, Artificial Sequence
  Description of Artificial Sequence: Synthetic oligonucleotide
  Target: SCNA; (-) strand; PAM type: YTN; PAM sequence: CTC
cactatctgaagacggtcaa

SEQ ID NO: 59620 - DNA, 20 bp, Artificial Sequence
  Description of Artificial Sequence: Synthetic oligonucleotide
  Target: SCNA; (-) strand; PAM type: YTN; PAM sequence: CTA
gataacagacaggtggagac

SEQ ID NO: 59621 - DNA, 20 bp, Artificial Sequence
  Description of Artificial Sequence: Synthetic oligonucleotide
  Target: SCNA; (-) strand; PAM type: YTN; PAM sequence: TTA
taataagaactagataacag

SEQ ID NO: 59622 - DNA, 20 bp, Artificial Sequence
  Description of Artificial Sequence: Synthetic oligonucleotide
  Target: SCNA; (-) strand; PAM type: YTN; PAM sequence: TTG
tgaagcatgattataataag

SEQ ID NO: 59623 - DNA, 20 bp, Artificial Sequence
  Description of Artificial Sequence: Synthetic oligonucleotide
  Target: SCNA; (-) strand; PAM type: YTN; PAM sequence: CTA
taaatatgatattgtgaagc

SEQ ID NO: 59624 - DNA, 20 bp, Artificial Sequence
  Description of Artificial Sequence: Synthetic oligonucleotide
  Target: SCNA; (-) strand; PAM type: YTN; PAM sequence: CTC
ctataaatatgatattgtga

SEQ ID NO: 59625 - DNA, 20 bp, Artificial Sequence
  Description of Artificial Sequence: Synthetic oligonucleotide
  Target: SCNA; (-) strand; PAM type: YTN; PAM sequence: CTA
gggacctcctataaatatga

SEQ ID NO: 59626 - DNA, 20 bp, Artificial Sequence
  Description of Artificial Sequence: Synthetic oligonucleotide
  Target: SCNA; (-) strand; PAM type: YTN; PAM sequence: TTC
tagggacctcctataaatat

SEQ ID NO: 59627 - DNA, 20 bp, Artificial Sequence
  Description of Artificial Sequence: Synthetic oligonucleotide
  Target: SCNA; (-) strand; PAM type: YTN; PAM sequence: CTT
ctagggacctcctataaata

SEQ ID NO: 59628 - DNA, 20 bp, Artificial Sequence
  Description of Artificial Sequence: Synthetic oligonucleotide
  Target: SCNA; (-) strand; PAM type: YTN; PAM sequence: CTA
tgatgccttctagggacctc

SEQ ID NO: 59629 - DNA, 20 bp, Artificial Sequence
  Description of Artificial Sequence: Synthetic oligonucleotide
  Target: SCNA; (-) strand; PAM type: YTN; PAM sequence: TTA
agtaagtggactatgatgcc

SEQ ID NO: 59630 - DNA, 20 bp, Artificial Sequence
  Description of Artificial Sequence: Synthetic oligonucleotide
  Target: SCNA; (-) strand; PAM type: YTN; PAM sequence: TTG
caatccaacagagaagtagt

SEQ ID NO: 59631 - DNA, 20 bp, Artificial Sequence
  Description of Artificial Sequence: Synthetic oligonucleotide
  Target: SCNA; (-) strand; PAM type: YTN; PAM sequence: CTG
ttgcaatccaacagagaagt

SEQ ID NO: 59632 - DNA, 20 bp, Artificial Sequence
  Description of Artificial Sequence: Synthetic oligonucleotide
  Target: SCNA; (-) strand; PAM type: YTN; PAM sequence: CTC
tgttgcaatccaacagagaa

SEQ ID NO: 59633 - DNA, 20 bp, Artificial Sequence
  Description of Artificial Sequence: Synthetic oligonucleotide
  Target: SCNA; (-) strand; PAM type: YTN; PAM sequence: TTA
atgggctctgttgcaatcca

SEQ ID NO: 59634 - DNA, 20 bp, Artificial Sequence
  Description of Artificial Sequence: Synthetic oligonucleotide
  Target: SCNA; (-) strand; PAM type: YTN; PAM sequence: TTT
aatgggctctgttgcaatcc

SEQ ID NO: 59635 - DNA, 20 bp, Artificial Sequence
  Description of Artificial Sequence: Synthetic oligonucleotide
  Target: SCNA; (-) strand; PAM type: YTN; PAM sequence: CTT
taatgggctctgttgcaatc

SEQ ID NO: 59636 - DNA, 20 bp, Artificial Sequence
  Description of Artificial Sequence: Synthetic oligonucleotide
  Target: SCNA; (-) strand; PAM type: YTN; PAM sequence: TTG
tgcacctttaatgggctctg

SEQ ID NO: 59637 - DNA, 20 bp, Artificial Sequence
  Description of Artificial Sequence: Synthetic oligonucleotide
  Target: SCNA; (-) strand; PAM type: YTN; PAM sequence: TTA
attgtgcacctttaatgggc

SEQ ID NO: 59638 - DNA, 20 bp, Artificial Sequence
  Description of Artificial Sequence: Synthetic oligonucleotide
  Target: SCNA; (-) strand; PAM type: YTN; PAM sequence: TTA
gaagttaattgtgcaccttt

SEQ ID NO: 59639 - DNA, 20 bp, Artificial Sequence
  Description of Artificial Sequence: Synthetic oligonucleotide
  Target: SCNA; (-) strand; PAM type: YTN; PAM sequence: CTG
ttagaagttaattgtgcacc

SEQ ID NO: 59640 - DNA, 20 bp, Artificial Sequence
  Description of Artificial Sequence: Synthetic oligonucleotide
  Target: SCNA; (-) strand; PAM type: YTN; PAM sequence: TTC
tgttagaagttaattgtgca

SEQ ID NO: 59641 - DNA, 20 bp, Artificial Sequence
  Description of Artificial Sequence: Synthetic oligonucleotide
  Target: SCNA; (-) strand; PAM type: YTN; PAM sequence: CTA
gttctgttagaagttaattg

SEQ ID NO: 59642 - DNA, 20 bp, Artificial Sequence
  Description of Artificial Sequence: Synthetic oligonucleotide
  Target: SCNA; (-) strand; PAM type: YTN; PAM sequence: TTG
aaactagttctgttagaagt

SEQ ID NO: 59643 - DNA, 20 bp, Artificial Sequence
  Description of Artificial Sequence: Synthetic oligonucleotide
  Target: SCNA; (-) strand; PAM type: YTN; PAM sequence: TTT
gaaactagttctgttagaag

SEQ ID NO: 59644 - DNA, 20 bp, Artificial Sequence
  Description of Artificial Sequence: Synthetic oligonucleotide
  Target: SCNA; (-) strand; PAM type: YTN; PAM sequence: CTT
tgaaactagttctgttagaa

SEQ ID NO: 59645 - DNA, 20 bp, Artificial Sequence
  Description of Artificial Sequence: Synthetic oligonucleotide
  Target: SCNA; (-) strand; PAM type: YTN; PAM sequence: CTC
ctttgaaactagttctgtta

SEQ ID NO: 59646 - DNA, 20 bp, Artificial Sequence
  Description of Artificial Sequence: Synthetic oligonucleotide
  Target: SCNA; (-) strand; PAM type: YTN; PAM sequence: TTA
aaaatcagagtgtaaaaata

SEQ ID NO: 59647 - DNA, 20 bp, Artificial Sequence
  Description of Artificial Sequence: Synthetic oligonucleotide
  Target: SCNA; (-) strand; PAM type: YTN; PAM sequence: TTT
aaaaatcagagtgtaaaaat

SEQ ID NO: 59648 - DNA, 20 bp, Artificial Sequence
  Description of Artificial Sequence: Synthetic oligonucleotide
  Target: SCNA; (-) strand; PAM type: YTN; PAM sequence: TTG
atttaaaaatcagagtgtaa

SEQ ID NO: 59649 - DNA, 20 bp, Artificial Sequence
  Description of Artificial Sequence: Synthetic oligonucleotide
  Target: SCNA; (-) strand; PAM type: YTN; PAM sequence: TTT
gatttaaaaatcagagtgta

SEQ ID NO: 59650 - DNA, 20 bp, Artificial Sequence
  Description of Artificial Sequence: Synthetic oligonucleotide
  Target: SCNA; (-) strand; PAM type: YTN; PAM sequence: TTT
tgatttaaaaatcagagtgt

SEQ ID NO: 59651 - DNA, 20 bp, Artificial Sequence
  Description of Artificial Sequence: Synthetic oligonucleotide
  Target: SCNA; (-) strand; PAM type: YTN; PAM sequence: CTT
ttgatttaaaaatcagagtg

SEQ ID NO: 59652 - DNA, 20 bp, Artificial Sequence
  Description of Artificial Sequence: Synthetic oligonucleotide
  Target: SCNA; (-) strand; PAM type: YTN; PAM sequence: TTA
aatgaatacttttgatttaa

SEQ ID NO: 59653 - DNA, 20 bp, Artificial Sequence
  Description of Artificial Sequence: Synthetic oligonucleotide
  Target: SCNA; (-) strand; PAM type: YTN; PAM sequence: TTT
aaatgaatacttttgattta

SEQ ID NO: 59654 - DNA, 20 bp, Artificial Sequence
  Description of Artificial Sequence: Synthetic oligonucleotide
  Target: SCNA; (-) strand; PAM type: YTN; PAM sequence: CTT
taaatgaatacttttgattt

SEQ ID NO: 59655 - DNA, 20 bp, Artificial Sequence
  Description of Artificial Sequence: Synthetic oligonucleotide
  Target: SCNA; (-) strand; PAM type: YTN; PAM sequence: TTC
tttaaatgaatacttttgat

SEQ ID NO: 59656 - DNA, 20 bp, Artificial Sequence
  Description of Artificial Sequence: Synthetic oligonucleotide
  Target: SCNA; (-) strand; PAM type: YTN; PAM sequence: TTT
ctttaaatgaatacttttga

SEQ ID NO: 59657 - DNA, 20 bp, Artificial Sequence
  Description of Artificial Sequence: Synthetic oligonucleotide
  Target: SCNA; (-) strand; PAM type: YTN; PAM sequence: CTA
gtggagaaaaatatttcttt

SEQ ID NO: 59658 - DNA, 20 bp, Artificial Sequence
  Description of Artificial Sequence: Synthetic oligonucleotide
  Target: SCNA; (-) strand; PAM type: YTN; PAM sequence: TTA
caactagtggagaaaaatat

SEQ ID NO: 59659 - DNA, 20 bp, Artificial Sequence
  Description of Artificial Sequence: Synthetic oligonucleotide
  Target: SCNA; (-) strand; PAM type: YTN; PAM sequence: TTT
acaactagtggagaaaaata

SEQ ID NO: 59660 - DNA, 20 bp, Artificial Sequence
  Description of Artificial Sequence: Synthetic oligonucleotide
  Target: SCNA; (-) strand; PAM type: YTN; PAM sequence: TTT
tacaactagtggagaaaaat

SEQ ID NO: 59661 - DNA, 20 bp, Artificial Sequence
  Description of Artificial Sequence: Synthetic oligonucleotide
  Target: SCNA; (-) strand; PAM type: YTN; PAM sequence: TTT
ttacaactagtggagaaaaa

SEQ ID NO: 59662 - DNA, 20 bp, Artificial Sequence
  Description of Artificial Sequence: Synthetic oligonucleotide
  Target: SCNA; (-) strand; PAM type: YTN; PAM sequence: TTG
tgcaacatttttacaactag

SEQ ID NO: 59663 - DNA, 20 bp, Artificial Sequence
  Description of Artificial Sequence: Synthetic oligonucleotide
  Target: SCNA; (-) strand; PAM type: YTN; PAM sequence: CTT
gtgcaacatttttacaacta

SEQ ID NO: 59664 - DNA, 20 bp, Artificial Sequence
  Description of Artificial Sequence: Synthetic oligonucleotide
  Target: SCNA; (-) strand; PAM type: YTN; PAM sequence: TTC
ttgtgcaacatttttacaac

SEQ ID NO: 59665 - DNA, 20 bp, Artificial Sequence
  Description of Artificial Sequence: Synthetic oligonucleotide
  Target: SCNA; (-) strand; PAM type: YTN; PAM sequence: TTT
cttgtgcaacatttttacaa

SEQ ID NO: 59666 - DNA, 20 bp, Artificial Sequence
  Description of Artificial Sequence: Synthetic oligonucleotide
  Target: SCNA; (-) strand; PAM type: YTN; PAM sequence: CTT
tcttgtgcaacatttttaca

SEQ ID NO: 59667 - DNA, 20 bp, Artificial Sequence
  Description of Artificial Sequence: Synthetic oligonucleotide
  Target: SCNA; (-) strand; PAM type: YTN; PAM sequence: TTA
tagtgaactttcttgtgcaa

SEQ ID NO: 59668 - DNA, 20 bp, Artificial Sequence
  Description of Artificial Sequence: Synthetic oligonucleotide
  Target: SCNA; (-) strand; PAM type: YTN; PAM sequence: TTT
atagtgaactttcttgtgca

SEQ ID NO: 59669 - DNA, 20 bp, Artificial Sequence
  Description of Artificial Sequence: Synthetic oligonucleotide
  Target: SCNA; (-) strand; PAM type: YTN; PAM sequence: TTT
tatagtgaactttcttgtgc

SEQ ID NO: 59670 - DNA, 20 bp, Artificial Sequence
  Description of Artificial Sequence: Synthetic oligonucleotide
  Target: SCNA; (-) strand; PAM type: YTN; PAM sequence: TTA
tagttttatagtgaactttc

SEQ ID NO: 59671 - DNA, 20 bp, Artificial Sequence
  Description of Artificial Sequence: Synthetic oligonucleotide
  Target: SCNA; (-) strand; PAM type: YTN; PAM sequence: CTT
atagttttatagtgaacttt

SEQ ID NO: 59672 - DNA, 20 bp, Artificial Sequence
  Description of Artificial Sequence: Synthetic oligonucleotide
  Target: SCNA; (-) strand; PAM type: YTN; PAM sequence: TTA
cttatagttttatagtgaac

SEQ ID NO: 59673 - DNA, 20 bp, Artificial Sequence
  Description of Artificial Sequence: Synthetic oligonucleotide
  Target: SCNA; (-) strand; PAM type: YTN; PAM sequence: TTA
taagtgttacttatagtttt

SEQ ID NO: 59674 - DNA, 20 bp, Artificial Sequence
  Description of Artificial Sequence: Synthetic oligonucleotide
  Target: SCNA; (-) strand; PAM type: YTN; PAM sequence: TTT
ataagtgttacttatagttt

SEQ ID NO: 59675 - DNA, 20 bp, Artificial Sequence
  Description of Artificial Sequence: Synthetic oligonucleotide
  Target: SCNA; (-) strand; PAM type: YTN; PAM sequence: TTT
tataagtgttacttatagtt

SEQ ID NO: 59676 - DNA, 20 bp, Artificial Sequence
  Description of Artificial Sequence: Synthetic oligonucleotide
  Target: SCNA; (-) strand; PAM type: YTN; PAM sequence: CTG
gaaaacaaaagcaaacaata

SEQ ID NO: 59677 - DNA, 20 bp, Artificial Sequence
  Description of Artificial Sequence: Synthetic oligonucleotide
  Target: SCNA; (-) strand; PAM type: YTN; PAM sequence: TTA
atgtacacaaaacatctgga

SEQ ID NO: 59678 - DNA, 20 bp, Artificial Sequence
  Description of Artificial Sequence: Synthetic oligonucleotide
  Target: SCNA; (-) strand; PAM type: YTN; PAM sequence: TTC
agtgaattaatgtacacaaa

SEQ ID NO: 59679 - DNA, 20 bp, Artificial Sequence
  Description of Artificial Sequence: Synthetic oligonucleotide
  Target: SCNA; (-) strand; PAM type: YTN; PAM sequence: CTA
taaaataattcagtgaatta

SEQ ID NO: 59680 - DNA, 20 bp, Artificial Sequence
  Description of Artificial Sequence: Synthetic oligonucleotide
  Target: SCNA; (-) strand; PAM type: YTN; PAM sequence: CTC
atctataaaataattcagtg

SEQ ID NO: 59681 - DNA, 20 bp, Artificial Sequence
  Description of Artificial Sequence: Synthetic oligonucleotide
  Target: SCNA; (-) strand; PAM type: YTN; PAM sequence: TTC
ctcatctataaaataattca

SEQ ID NO: 59682 - DNA, 20 bp, Artificial Sequence
  Description of Artificial Sequence: Synthetic oligonucleotide
  Target: SCNA; (-) strand; PAM type: YTN; PAM sequence: CTT
cctcatctataaaataattc

SEQ ID NO: 59683 - DNA, 20 bp, Artificial Sequence
  Description of Artificial Sequence: Synthetic oligonucleotide
  Target: SCNA; (-) strand; PAM type: YTN; PAM sequence: TTA
gcttcctcatctataaaata

SEQ ID NO: 59684 - DNA, 20 bp, Artificial Sequence
  Description of Artificial Sequence: Synthetic oligonucleotide
  Target: SCNA; (-) strand; PAM type: YTN; PAM sequence: TTT
agcttcctcatctataaaat

SEQ ID NO: 59685 - DNA, 20 bp, Artificial Sequence
  Description of Artificial Sequence: Synthetic oligonucleotide
  Target: SCNA; (-) strand; PAM type: YTN; PAM sequence: CTG
tgtgatttagcttcctcatc

SEQ ID NO: 59686 - DNA, 20 bp, Artificial Sequence
  Description of Artificial Sequence: Synthetic oligonucleotide
  Target: SCNA; (-) strand; PAM type: YTN; PAM sequence: CTC
tgtgtgatttagcttcctca

SEQ ID NO: 59687 - DNA, 20 bp, Artificial Sequence
  Description of Artificial Sequence: Synthetic oligonucleotide
  Target: SCNA; (-) strand; PAM type: YTN; PAM sequence: TTC
acctctgtgtgatttagctt

SEQ ID NO: 59688 - DNA, 20 bp, Artificial Sequence
  Description of Artificial Sequence: Synthetic oligonucleotide
  Target: SCNA; (-) strand; PAM type: YTN; PAM sequence: CTT
cacctctgtgtgatttagct

SEQ ID NO: 59689 - DNA, 20 bp, Artificial Sequence
  Description of Artificial Sequence: Synthetic oligonucleotide
  Target: SCNA; (-) strand; PAM type: YTN; PAM sequence: TTC
ttcacctctgtgtgatttag

SEQ ID NO: 59690 - DNA, 20 bp, Artificial Sequence
  Description of Artificial Sequence: Synthetic oligonucleotide
  Target: SCNA; (-) strand; PAM type: YTN; PAM sequence: TTG
caagattcttcacctctgtg

SEQ ID NO: 59691 - DNA, 20 bp, Artificial Sequence
  Description of Artificial Sequence: Synthetic oligonucleotide
  Target: SCNA; (-) strand; PAM type: YTN; PAM sequence: TTT
gcaagattcttcacctctgt

SEQ ID NO: 59692 - DNA, 20 bp, Artificial Sequence
  Description of Artificial Sequence: Synthetic oligonucleotide
  Target: SCNA; (-) strand; PAM type: YTN; PAM sequence: TTT
tgcaagattcttcacctctg

SEQ ID NO: 59693 - DNA, 20 bp, Artificial Sequence
  Description of Artificial Sequence: Synthetic oligonucleotide
  Target: SCNA; (-) strand; PAM type: YTN; PAM sequence: TTT
ttgcaagattcttcacctct

SEQ ID NO: 59694 - DNA, 20 bp, Artificial Sequence
  Description of Artificial Sequence: Synthetic oligonucleotide
  Target: SCNA; (-) strand; PAM type: YTN; PAM sequence: TTT
tttgcaagattcttcacctc

SEQ ID NO: 59695 - DNA, 20 bp, Artificial Sequence
  Description of Artificial Sequence: Synthetic oligonucleotide
  Target: SCNA; (-) strand; PAM type: YTN; PAM sequence: CTG
tgtgttttttgcaagattct

SEQ ID NO: 59696 - DNA, 20 bp, Artificial Sequence
  Description of Artificial Sequence: Synthetic oligonucleotide
  Target: SCNA; (-) strand; PAM type: YTN; PAM sequence: TTA
ccagctgtgtgttttttgca

SEQ ID NO: 59697 - DNA, 20 bp, Artificial Sequence
  Description of Artificial Sequence: Synthetic oligonucleotide
  Target: SCNA; (-) strand; PAM type: YTN; PAM sequence: CTT
accagctgtgtgttttttgc

SEQ ID NO: 59698 - DNA, 20 bp, Artificial Sequence
  Description of Artificial Sequence: Synthetic oligonucleotide
  Target: SCNA; (-) strand; PAM type: YTN; PAM sequence: CTC
cttaccagctgtgtgttttt

SEQ ID NO: 59699 - DNA, 20 bp, Artificial Sequence
  Description of Artificial Sequence: Synthetic oligonucleotide
  Target: SCNA; (-) strand; PAM type: YTN; PAM sequence: TTA
ctccttaccagctgtgtgtt

SEQ ID NO: 59700 - DNA, 20 bp, Artificial Sequence
  Description of Artificial Sequence: Synthetic oligonucleotide
  Target: SCNA; (-) strand; PAM type: YTN; PAM sequence: CTT
actccttaccagctgtgtgt
